United States Patent Application Publication US 2014/0004565 A1 - sequence listing, part 38

SEQ ID NO: 859603 - RNA, 19 nt, Artificial Sequence
  Description of Artificial Sequence: Synthetic oligonucleotide
ggugggucgguccaaggga

SEQ ID NO: 859604 - RNA, 19 nt, Artificial Sequence
  Description of Artificial Sequence: Synthetic oligonucleotide
uaaccagugugcggccuug

SEQ ID NO: 859605 - RNA, 19 nt, Artificial Sequence
  Description of Artificial Sequence: Synthetic oligonucleotide
gguacggugaggacagaug

SEQ ID NO: 859606 - RNA, 19 nt, Artificial Sequence
  Description of Artificial Sequence: Synthetic oligonucleotide
ugaaugcugcaguccugaa

SEQ ID NO: 859607 - RNA, 19 nt, Artificial Sequence
  Description of Artificial Sequence: Synthetic oligonucleotide
cacaugugagauauccugu

SEQ ID NO: 859608 - RNA, 19 nt, Artificial Sequence
  Description of Artificial Sequence: Synthetic oligonucleotide
uggcgcuuaauuggaggcu

SEQ ID NO: 859609 - RNA, 19 nt, Artificial Sequence
  Description of Artificial Sequence: Synthetic oligonucleotide
guaugugccugguccuuuc

SEQ ID NO: 859610 - RNA, 19 nt, Artificial Sequence
  Description of Artificial Sequence: Synthetic oligonucleotide
caauuucguuccgacagga

SEQ ID NO: 859611 - RNA, 19 nt, Artificial Sequence
  Description of Artificial Sequence: Synthetic oligonucleotide
ucugucgugcuggccagaa

SEQ ID NO: 859612 - RNA, 19 nt, Artificial Sequence
  Description of Artificial Sequence: Synthetic oligonucleotide
cagaccagguacggugagg

SEQ ID NO: 859613 - RNA, 19 nt, Artificial Sequence
  Description of Artificial Sequence: Synthetic oligonucleotide
agucaugacugagccauua

SEQ ID NO: 859614 - RNA, 19 nt, Artificial Sequence
  Description of Artificial Sequence: Synthetic oligonucleotide
gccccuauaggcucauaug

SEQ ID NO: 859615 - RNA, 19 nt, Artificial Sequence
  Description of Artificial Sequence: Synthetic oligonucleotide
gacagauggggaccuuucu

SEQ ID NO: 859616 - RNA, 19 nt, Artificial Sequence
  Description of Artificial Sequence: Synthetic oligonucleotide
gaaugccaaagcaucaguu

SEQ ID NO: 859617 - RNA, 19 nt, Artificial Sequence
  Description of Artificial Sequence: Synthetic oligonucleotide
caggaucaauguucauguc

SEQ ID NO: 859618 - RNA, 19 nt, Artificial Sequence
  Description of Artificial Sequence: Synthetic oligonucleotide
uuccgacaggacacaccga

SEQ ID NO: 859619 - RNA, 19 nt, Artificial Sequence
  Description of Artificial Sequence: Synthetic oligonucleotide
cugaggagucaucugcaaa

SEQ ID NO: 859620 - RNA, 19 nt, Artificial Sequence
  Description of Artificial Sequence: Synthetic oligonucleotide
acgcccaccaguuccccau

SEQ ID NO: 859621 - RNA, 19 nt, Artificial Sequence
  Description of Artificial Sequence: Synthetic oligonucleotide
gucgguccaagggaucagc

SEQ ID NO: 859622 - RNA, 19 nt, Artificial Sequence
  Description of Artificial Sequence: Synthetic oligonucleotide
ccuauaggcucauauguua

SEQ ID NO: 859623 - RNA, 19 nt, Artificial Sequence
  Description of Artificial Sequence: Synthetic oligonucleotide
uccaaagaauggugccauu

SEQ ID NO: 859624 - RNA, 19 nt, Artificial Sequence
  Description of Artificial Sequence: Synthetic oligonucleotide
gaucagcacuccagcaaga

SEQ ID NO: 859625 - RNA, 19 nt, Artificial Sequence
  Description of Artificial Sequence: Synthetic oligonucleotide
uacgcccaccaguucccca

SEQ ID NO: 859626 - RNA, 19 nt, Artificial Sequence
  Description of Artificial Sequence: Synthetic oligonucleotide
gguuucucauucacacggc

SEQ ID NO: 859627 - RNA, 19 nt, Artificial Sequence
  Description of Artificial Sequence: Synthetic oligonucleotide
ccaaggguagcguacugca

SEQ ID NO: 859628 - RNA, 19 nt, Artificial Sequence
  Description of Artificial Sequence: Synthetic oligonucleotide
gucagaccagguacgguga

SEQ ID NO: 859629 - RNA, 19 nt, Artificial Sequence
  Description of Artificial Sequence: Synthetic oligonucleotide
ggugcuacagauggagcuc

SEQ ID NO: 859630 - RNA, 19 nt, Artificial Sequence
  Description of Artificial Sequence: Synthetic oligonucleotide
aaacucucggagagcuuuu

SEQ ID NO: 859631 - RNA, 19 nt, Artificial Sequence
  Description of Artificial Sequence: Synthetic oligonucleotide
caccauccuuuccagaugu

SEQ ID NO: 859632 - RNA, 19 nt, Artificial Sequence
  Description of Artificial Sequence: Synthetic oligonucleotide
cuggccgacuucuucggaa

SEQ ID NO: 859633 - RNA, 19 nt, Artificial Sequence
  Description of Artificial Sequence: Synthetic oligonucleotide
gugcaucaggcaaacucuc

SEQ ID NO: 859634 - RNA, 19 nt, Artificial Sequence
  Description of Artificial Sequence: Synthetic oligonucleotide
aguaugugccugguccuuu

SEQ ID NO: 859635 - RNA, 19 nt, Artificial Sequence
  Description of Artificial Sequence: Synthetic oligonucleotide
cuccgaacucucccacaug

SEQ ID NO: 859636 - RNA, 19 nt, Artificial Sequence
  Description of Artificial Sequence: Synthetic oligonucleotide
guagcguacugcagugaga

SEQ ID NO: 859637 - RNA, 19 nt, Artificial Sequence
  Description of Artificial Sequence: Synthetic oligonucleotide
ugaccacacugguggcggu

SEQ ID NO: 859638 - RNA, 19 nt, Artificial Sequence
  Description of Artificial Sequence: Synthetic oligonucleotide
gucuccgaacucucccaca

SEQ ID NO: 859639 - RNA, 19 nt, Artificial Sequence
  Description of Artificial Sequence: Synthetic oligonucleotide
ucguuccgacaggacacac

SEQ ID NO: 859640 - RNA, 19 nt, Artificial Sequence
  Description of Artificial Sequence: Synthetic oligonucleotide
ccguguugcuauuucccac

SEQ ID NO: 859641 - RNA, 19 nt, Artificial Sequence
  Description of Artificial Sequence: Synthetic oligonucleotide
ggagaagguaaucguacau

SEQ ID NO: 859642 - RNA, 19 nt, Artificial Sequence
  Description of Artificial Sequence: Synthetic oligonucleotide
aaccagugugcggccuuga

SEQ ID NO: 859643 - RNA, 19 nt, Artificial Sequence
  Description of Artificial Sequence: Synthetic oligonucleotide
aggggaucgcuuugauguu

SEQ ID NO: 859644 - RNA, 19 nt, Artificial Sequence
  Description of Artificial Sequence: Synthetic oligonucleotide
caaacucucggagagcuuu

SEQ ID NO: 859645 - RNA, 19 nt, Artificial Sequence
  Description of Artificial Sequence: Synthetic oligonucleotide
ccccuuuagugauggcugc

SEQ ID NO: 859646 - RNA, 19 nt, Artificial Sequence
  Description of Artificial Sequence: Synthetic oligonucleotide
cagcauucaccuggugcug

SEQ ID NO: 859647 - RNA, 19 nt, Artificial Sequence
  Description of Artificial Sequence: Synthetic oligonucleotide
ggccgacuucuucggaaag

SEQ ID NO: 859648 - RNA, 19 nt, Artificial Sequence
  Description of Artificial Sequence: Synthetic oligonucleotide
ccuuucaugccuccacuca

SEQ ID NO: 859649 - RNA, 19 nt, Artificial Sequence
  Description of Artificial Sequence: Synthetic oligonucleotide
gccgacuucuucggaaagc

SEQ ID NO: 859650 - RNA, 19 nt, Artificial Sequence
  Description of Artificial Sequence: Synthetic oligonucleotide
gcggccuugaacagagaug

SEQ ID NO: 859651 - RNA, 19 nt, Artificial Sequence
  Description of Artificial Sequence: Synthetic oligonucleotide
ggcccucgcagcucucuag

SEQ ID NO: 859652 - RNA, 19 nt, Artificial Sequence
  Description of Artificial Sequence: Synthetic oligonucleotide
cgaacucucccacauguga

SEQ ID NO: 859653 - RNA, 19 nt, Artificial Sequence
  Description of Artificial Sequence: Synthetic oligonucleotide
agcuaccauucuggccgac

SEQ ID NO: 859654 - RNA, 19 nt, Artificial Sequence
  Description of Artificial Sequence: Synthetic oligonucleotide
gcccucgcagcucucuagc

SEQ ID NO: 859655 - RNA, 19 nt, Artificial Sequence
  Description of Artificial Sequence: Synthetic oligonucleotide
gucucaacacugagaaggu

SEQ ID NO: 859656 - RNA, 19 nt, Artificial Sequence
  Description of Artificial Sequence: Synthetic oligonucleotide
cguuccgacaggacacacc

SEQ ID NO: 859657 - RNA, 19 nt, Artificial Sequence
  Description of Artificial Sequence: Synthetic oligonucleotide
cucuagcaacuggguauug

SEQ ID NO: 859658 - RNA, 19 nt, Artificial Sequence
  Description of Artificial Sequence: Synthetic oligonucleotide
ccccuauaggcucauaugu

SEQ ID NO: 859659 - RNA, 19 nt, Artificial Sequence
  Description of Artificial Sequence: Synthetic oligonucleotide
cccuuuagugauggcugcg

SEQ ID NO: 859660 - RNA, 19 nt, Artificial Sequence
  Description of Artificial Sequence: Synthetic oligonucleotide
gcucacgguguuucauaac

SEQ ID NO: 859661 - RNA, 19 nt, Artificial Sequence
  Description of Artificial Sequence: Synthetic oligonucleotide
aagucaugacugagccauu

SEQ ID NO: 859662 - RNA, 19 nt, Artificial Sequence
  Description of Artificial Sequence: Synthetic oligonucleotide
ccucacagcugaagaccgc

SEQ ID NO: 859663 - RNA, 19 nt, Artificial Sequence
  Description of Artificial Sequence: Synthetic oligonucleotide
agguugccuugcucacggu

SEQ ID NO: 859664 - RNA, 19 nt, Artificial Sequence
  Description of Artificial Sequence: Synthetic oligonucleotide
gggucgguccaagggauca

SEQ ID NO: 859665 - RNA, 19 nt, Artificial Sequence
  Description of Artificial Sequence: Synthetic oligonucleotide
gcaacuggguauugaugua

SEQ ID NO: 859666 - RNA, 19 nt, Artificial Sequence
  Description of Artificial Sequence: Synthetic oligonucleotide
guacgcccaccaguucccc

SEQ ID NO: 859667 - RNA, 19 nt, Artificial Sequence
  Description of Artificial Sequence: Synthetic oligonucleotide
ccagaauccaagggcucac

SEQ ID NO: 859668 - RNA, 19 nt, Artificial Sequence
  Description of Artificial Sequence: Synthetic oligonucleotide
ugccuccacucagcuggcc

SEQ ID NO: 859669 - RNA, 19 nt, Artificial Sequence
  Description of Artificial Sequence: Synthetic oligonucleotide
cccguguugcuauuuccca

SEQ ID NO: 859670 - RNA, 19 nt, Artificial Sequence
  Description of Artificial Sequence: Synthetic oligonucleotide
gugugcggccuugaacaga

SEQ ID NO: 859671 - RNA, 19 nt, Artificial Sequence
  Description of Artificial Sequence: Synthetic oligonucleotide
ugaccccauccaagaugua

SEQ ID NO: 859672 - RNA, 19 nt, Artificial Sequence
  Description of Artificial Sequence: Synthetic oligonucleotide
agaucccauggagcaguau

SEQ ID NO: 859673 - RNA, 19 nt, Artificial Sequence
  Description of Artificial Sequence: Synthetic oligonucleotide
ccgacaggacacaccgaug

SEQ ID NO: 859674 - RNA, 19 nt, Artificial Sequence
  Description of Artificial Sequence: Synthetic oligonucleotide
ggucgguccaagggaucag

SEQ ID NO: 859675 - RNA, 19 nt, Artificial Sequence
  Description of Artificial Sequence: Synthetic oligonucleotide
gcgagggagggcccgucug

SEQ ID NO: 859676 - RNA, 19 nt, Artificial Sequence
  Description of Artificial Sequence: Synthetic oligonucleotide
augugucgaagcagaggua

SEQ ID NO: 859677 - RNA, 19 nt, Artificial Sequence
  Description of Artificial Sequence: Synthetic oligonucleotide
ccuuuagugauggcugcga

SEQ ID NO: 859678 - RNA, 19 nt, Artificial Sequence
  Description of Artificial Sequence: Synthetic oligonucleotide
cucucccacaugugagaua

SEQ ID NO: 859679 - RNA, 19 nt, Artificial Sequence
  Description of Artificial Sequence: Synthetic oligonucleotide
ggccccuauaggcucauau

SEQ ID NO: 859680 - RNA, 19 nt, Artificial Sequence
  Description of Artificial Sequence: Synthetic oligonucleotide
cagcuaccauucuggccga

SEQ ID NO: 859681 - RNA, 19 nt, Artificial Sequence
  Description of Artificial Sequence: Synthetic oligonucleotide
ccgucugccaggcccucgc

SEQ ID NO: 859682 - RNA, 19 nt, Artificial Sequence
  Description of Artificial Sequence: Synthetic oligonucleotide
ggucauuccccguguugcu

SEQ ID NO: 859683 - RNA, 19 nt, Artificial Sequence
  Description of Artificial Sequence: Synthetic oligonucleotide
cugcugugaccacacuggu

SEQ ID NO: 859684 - RNA, 19 nt, Artificial Sequence
  Description of Artificial Sequence: Synthetic oligonucleotide
cuucuucggaaagcucucu

SEQ ID NO: 859685 - RNA, 19 nt, Artificial Sequence
  Description of Artificial Sequence: Synthetic oligonucleotide
ccuguacgcccaccaguuc

SEQ ID NO: 859686 - RNA, 19 nt, Artificial Sequence
  Description of Artificial Sequence: Synthetic oligonucleotide
cucauauguuagagugcuu

SEQ ID NO: 859687 - RNA, 19 nt, Artificial Sequence
  Description of Artificial Sequence: Synthetic oligonucleotide
cccauccaagauguaucuc

SEQ ID NO: 859688 - RNA, 19 nt, Artificial Sequence
  Description of Artificial Sequence: Synthetic oligonucleotide
cugucagaccuuugucauu

SEQ ID NO: 859689 - RNA, 19 nt, Artificial Sequence
  Description of Artificial Sequence: Synthetic oligonucleotide
auggccccuauaggcucau

SEQ ID NO: 859690 - RNA, 19 nt, Artificial Sequence
  Description of Artificial Sequence: Synthetic oligonucleotide
cagaauccaagggcucacu

SEQ ID NO: 859691 - RNA, 19 nt, Artificial Sequence
  Description of Artificial Sequence: Synthetic oligonucleotide
ccccauccaagauguaucu

SEQ ID NO: 859692 - RNA, 19 nt, Artificial Sequence
  Description of Artificial Sequence: Synthetic oligonucleotide
ggcgcuuaauuggaggcuu

SEQ ID NO: 859693 - RNA, 19 nt, Artificial Sequence
  Description of Artificial Sequence: Synthetic oligonucleotide
ggguagcguacugcaguga

SEQ ID NO: 859694 - RNA, 19 nt, Artificial Sequence
  Description of Artificial Sequence: Synthetic oligonucleotide
cacugaccccauccaagau

SEQ ID NO: 859695 - RNA, 19 nt, Artificial Sequence
  Description of Artificial Sequence: Synthetic oligonucleotide
gcuuauugguagauucguu

SEQ ID NO: 859696 - RNA, 19 nt, Artificial Sequence
  Description of Artificial Sequence: Synthetic oligonucleotide
gcuuaauuggaggcuucau

SEQ ID NO: 859697 - RNA, 19 nt, Artificial Sequence
  Description of Artificial Sequence: Synthetic oligonucleotide
gcgcuuaauuggaggcuuc

SEQ ID NO: 859698 - RNA, 19 nt, Artificial Sequence
  Description of Artificial Sequence: Synthetic oligonucleotide
cugucagaccagguacggu

SEQ ID NO: 859699 - RNA, 19 nt, Artificial Sequence
  Description of Artificial Sequence: Synthetic oligonucleotide
gcuaccauucuggccgacu

SEQ ID NO: 859700 - RNA, 19 nt, Artificial Sequence
  Description of Artificial Sequence: Synthetic oligonucleotide
ccaucugauuuccacgcuu

SEQ ID NO: 859701 - RNA, 19 nt, Artificial Sequence
  Description of Artificial Sequence: Synthetic oligonucleotide
cgcuuauugguagauucgu

SEQ ID NO: 859702 - RNA, 19 nt, Artificial Sequence
  Description of Artificial Sequence: Synthetic oligonucleotide
caguaugugccugguccuu

SEQ ID NO: 859703 - RNA, 19 nt, Artificial Sequence
  Description of Artificial Sequence: Synthetic oligonucleotide
cauuccccguguugcuauu

SEQ ID NO: 859704 - RNA, 19 nt, Artificial Sequence
  Description of Artificial Sequence: Synthetic oligonucleotide
cccgucugccaggcccucg

SEQ ID NO: 859705 - RNA, 19 nt, Artificial Sequence
  Description of Artificial Sequence: Synthetic oligonucleotide
ggaucgcuuugauguugau

SEQ ID NO: 859706 - RNA, 19 nt, Artificial Sequence
  Description of Artificial Sequence: Synthetic oligonucleotide
cugucgugcuggccagaau

SEQ ID NO: 859707 - RNA, 19 nt, Artificial Sequence
  Description of Artificial Sequence: Synthetic oligonucleotide
gaggacagauggggaccuu

SEQ ID NO: 859708 - RNA, 19 nt, Artificial Sequence
  Description of Artificial Sequence: Synthetic oligonucleotide
gugcggccuugaacagaga

SEQ ID NO: 859709 - RNA, 19 nt, Artificial Sequence
  Description of Artificial Sequence: Synthetic oligonucleotide
ggcccgucugccaggcccu

SEQ ID NO: 859710 - RNA, 19 nt, Artificial Sequence
  Description of Artificial Sequence: Synthetic oligonucleotide
ccacgcuuauugguagauu

SEQ ID NO: 859711 - RNA, 19 nt, Artificial Sequence
  Description of Artificial Sequence: Synthetic oligonucleotide
gcccgucugccaggcccuc

SEQ ID NO: 859712 - RNA, 19 nt, Artificial Sequence
  Description of Artificial Sequence: Synthetic oligonucleotide
ccccauccuggcgcuuaau

SEQ ID NO: 859713 - RNA, 19 nt, Artificial Sequence
  Description of Artificial Sequence: Synthetic oligonucleotide
agugcuaugggguacaagc

SEQ ID NO: 859714 - RNA, 19 nt, Artificial Sequence
  Description of Artificial Sequence: Synthetic oligonucleotide
cuuuguacgacuauuugcg

SEQ ID NO: 859715 - RNA, 19 nt, Artificial Sequence
  Description of Artificial Sequence: Synthetic oligonucleotide
ucagcaaguacccacugcg

SEQ ID NO: 859716 - RNA, 19 nt, Artificial Sequence
  Description of Artificial Sequence: Synthetic oligonucleotide
acuauuugcgccuuguguc

SEQ ID NO: 859717 - RNA, 19 nt, Artificial Sequence
  Description of Artificial Sequence: Synthetic oligonucleotide
aaaagacuugucuggccgc

SEQ ID NO: 859718 - RNA, 19 nt, Artificial Sequence
  Description of Artificial Sequence: Synthetic oligonucleotide
agccaagccauccagacgg

SEQ ID NO: 859719 - RNA, 19 nt, Artificial Sequence
  Description of Artificial Sequence: Synthetic oligonucleotide
guuagugugaggcagugag

SEQ ID NO: 859720 - RNA, 19 nt, Artificial Sequence
  Description of Artificial Sequence: Synthetic oligonucleotide
ugagguuagaaggagaggc

SEQ ID NO: 859721 - RNA, 19 nt, Artificial Sequence
  Description of Artificial Sequence: Synthetic oligonucleotide
cacuaugccaucuacaaug

SEQ ID NO: 859722 - RNA, 19 nt, Artificial Sequence
  Description of Artificial Sequence: Synthetic oligonucleotide
gaagcuucaguguagauaa

SEQ ID NO: 859723 - RNA, 19 nt, Artificial Sequence
  Description of Artificial Sequence: Synthetic oligonucleotide
acaggguugaaugaauucc

SEQ ID NO: 859724 - RNA, 19 nt, Artificial Sequence
  Description of Artificial Sequence: Synthetic oligonucleotide
uucaccauagccuuguggu

SEQ ID NO: 859725 - RNA, 19 nt, Artificial Sequence
  Description of Artificial Sequence: Synthetic oligonucleotide
uucgcaggcagacauagug

SEQ ID NO: 859726 - RNA, 19 nt, Artificial Sequence
  Description of Artificial Sequence: Synthetic oligonucleotide
caaccugucacgauguucc

SEQ ID NO: 859727 - RNA, 19 nt, Artificial Sequence
  Description of Artificial Sequence: Synthetic oligonucleotide
cccgaaaucaccuugaccc

SEQ ID NO: 859728 - RNA, 19 nt, Artificial Sequence
  Description of Artificial Sequence: Synthetic oligonucleotide
ugcuugauaggguuaauca

SEQ ID NO: 859729 - RNA, 19 nt, Artificial Sequence
  Description of Artificial Sequence: Synthetic oligonucleotide
ucuucuacccacuugccca

SEQ ID NO: 859730 - RNA, 19 nt, Artificial Sequence
  Description of Artificial Sequence: Synthetic oligonucleotide
cuuccugucagacaggaac

SEQ ID NO: 859731 - RNA, 19 nt, Artificial Sequence
  Description of Artificial Sequence: Synthetic oligonucleotide
ucuucaacuguguugugug

SEQ ID NO: 859732 - RNA, 19 nt, Artificial Sequence
  Description of Artificial Sequence: Synthetic oligonucleotide
augaauuccccugagaugu

SEQ ID NO: 859733 - RNA, 19 nt, Artificial Sequence
  Description of Artificial Sequence: Synthetic oligonucleotide
aucaaaucaucucgcugcc

SEQ ID NO: 859734 - RNA, 19 nt, Artificial Sequence
  Description of Artificial Sequence: Synthetic oligonucleotide
acaucgacggaucuccugg

SEQ ID NO: 859735 - RNA, 19 nt, Artificial Sequence
  Description of Artificial Sequence: Synthetic oligonucleotide
cucuguacuggccugagcc

SEQ ID NO: 859736 - RNA, 19 nt, Artificial Sequence
  Description of Artificial Sequence: Synthetic oligonucleotide
agccuugugguuucggagc

SEQ ID NO: 859737 - RNA, 19 nt, Artificial Sequence
  Description of Artificial Sequence: Synthetic oligonucleotide
ugggguacaagccccagcc

SEQ ID NO: 859738 - RNA, 19 nt, Artificial Sequence
  Description of Artificial Sequence: Synthetic oligonucleotide
uuaugcagcucccucaggu

SEQ ID NO: 859739 - RNA, 19 nt, Artificial Sequence
  Description of Artificial Sequence: Synthetic oligonucleotide
aaagacuugucuggccgcc

SEQ ID NO: 859740 - RNA, 19 nt, Artificial Sequence
  Description of Artificial Sequence: Synthetic oligonucleotide
uucggugcccaacaaaucu

SEQ ID NO: 859741 - RNA, 19 nt, Artificial Sequence
  Description of Artificial Sequence: Synthetic oligonucleotide
agaguugacugacucagug

SEQ ID NO: 859742 - RNA, 19 nt, Artificial Sequence
  Description of Artificial Sequence: Synthetic oligonucleotide
ugcccaacaaaucugccac

SEQ ID NO: 859743 - RNA, 19 nt, Artificial Sequence
  Description of Artificial Sequence: Synthetic oligonucleotide
ugaugucucgcccagcaga

SEQ ID NO: 859744 - RNA, 19 nt, Artificial Sequence
  Description of Artificial Sequence: Synthetic oligonucleotide
uucaacccuggccugagcc

SEQ ID NO: 859745 - RNA, 19 nt, Artificial Sequence
  Description of Artificial Sequence: Synthetic oligonucleotide
uuguacgacuauuugcgcc

SEQ ID NO: 859746 - RNA, 19 nt, Artificial Sequence
  Description of Artificial Sequence: Synthetic oligonucleotide
uguacgacuauuugcgccu

SEQ ID NO: 859747 - RNA, 19 nt, Artificial Sequence
  Description of Artificial Sequence: Synthetic oligonucleotide
uguagauaagcagggcagg

SEQ ID NO: 859748 - RNA, 19 nt, Artificial Sequence
  Description of Artificial Sequence: Synthetic oligonucleotide
ugacucagugauaugccgc

SEQ ID NO: 859749 - RNA, 19 nt, Artificial Sequence
  Description of Artificial Sequence: Synthetic oligonucleotide
uuagugugaggcagugagg

SEQ ID NO: 859750 - RNA, 19 nt, Artificial Sequence
  Description of Artificial Sequence: Synthetic oligonucleotide
aguugacugacucagugau

SEQ ID NO: 859751 - RNA, 19 nt, Artificial Sequence
  Description of Artificial Sequence: Synthetic oligonucleotide
ucaaccgggagaccaaaca

SEQ ID NO: 859752 - RNA, 19 nt, Artificial Sequence
  Description of Artificial Sequence: Synthetic oligonucleotide
ugggauguagucagaagcu

SEQ ID NO: 859753 - RNA, 19 nt, Artificial Sequence
  Description of Artificial Sequence: Synthetic oligonucleotide
ucccacacaggguugaaug

SEQ ID NO: 859754 - RNA, 19 nt, Artificial Sequence
  Description of Artificial Sequence: Synthetic oligonucleotide
gauuaaucucuguuaguuc

SEQ ID NO: 859755 - RNA, 19 nt, Artificial Sequence
  Description of Artificial Sequence: Synthetic oligonucleotide
ugcgccuugugucaaccgg

SEQ ID NO: 859756 - RNA, 19 nt, Artificial Sequence
  Description of Artificial Sequence: Synthetic oligonucleotide
uguuaguuccaccuccuuc

SEQ ID NO: 859757 - RNA, 19 nt, Artificial Sequence
  Description of Artificial Sequence: Synthetic oligonucleotide
auagugguauccugagcgg

SEQ ID NO: 859758 - RNA, 19 nt, Artificial Sequence
  Description of Artificial Sequence: Synthetic oligonucleotide
ucaggucucguuccugccg

SEQ ID NO: 859759 - RNA, 19 nt, Artificial Sequence
  Description of Artificial Sequence: Synthetic oligonucleotide
ugaaugaauuccccugaga

SEQ ID NO: 859760 - RNA, 19 nt, Artificial Sequence
  Description of Artificial Sequence: Synthetic oligonucleotide
guccauuaggcugacaugc

SEQ ID NO: 859761 - RNA, 19 nt, Artificial Sequence
  Description of Artificial Sequence: Synthetic oligonucleotide
uugacugacucagugauau

SEQ ID NO: 859762 - RNA, 19 nt, Artificial Sequence
  Description of Artificial Sequence: Synthetic oligonucleotide
ugugucaaccgggagacca

SEQ ID NO: 859763 - RNA, 19 nt, Artificial Sequence
  Description of Artificial Sequence: Synthetic oligonucleotide
ugagauacuguuguugcgu

SEQ ID NO: 859764 - RNA, 19 nt, Artificial Sequence
  Description of Artificial Sequence: Synthetic oligonucleotide
acccaucuuggguaagugc

SEQ ID NO: 859765 - RNA, 19 nt, Artificial Sequence
  Description of Artificial Sequence: Synthetic oligonucleotide
gacucagugauaugccgcc

SEQ ID NO: 859766 - RNA, 19 nt, Artificial Sequence
  Description of Artificial Sequence: Synthetic oligonucleotide
caggguugaaugaauuccc

SEQ ID NO: 859767 - RNA, 19 nt, Artificial Sequence
  Description of Artificial Sequence: Synthetic oligonucleotide
ggugcaugaccauugcugg

SEQ ID NO: 859768 - RNA, 19 nt, Artificial Sequence
  Description of Artificial Sequence: Synthetic oligonucleotide
cugacucagugauaugccg

SEQ ID NO: 859769 - RNA, 19 nt, Artificial Sequence
  Description of Artificial Sequence: Synthetic oligonucleotide
cagacggcggguaagggcc

SEQ ID NO: 859770 - RNA, 19 nt, Artificial Sequence
  Description of Artificial Sequence: Synthetic oligonucleotide
uaugccgccgauuaaucuc

SEQ ID NO: 859771 - RNA, 19 nt, Artificial Sequence
  Description of Artificial Sequence: Synthetic oligonucleotide
aaugcgaagugaggccagc

SEQ ID NO: 859772 - RNA, 19 nt, Artificial Sequence
  Description of Artificial Sequence: Synthetic oligonucleotide
gguugaaugaauuccccug

SEQ ID NO: 859773 - RNA, 19 nt, Artificial Sequence
  Description of Artificial Sequence: Synthetic oligonucleotide
uuuguacgacuauuugcgc

SEQ ID NO: 859774 - RNA, 19 nt, Artificial Sequence
  Description of Artificial Sequence: Synthetic oligonucleotide
uucagcaaguacccacugc

SEQ ID NO: 859775 - RNA, 19 nt, Artificial Sequence
  Description of Artificial Sequence: Synthetic oligonucleotide
cuugugucaaccgggagac

SEQ ID NO: 859776 - RNA, 19 nt, Artificial Sequence
  Description of Artificial Sequence: Synthetic oligonucleotide
aaggggucaaaagacuugu

SEQ ID NO: 859777 - RNA, 19 nt, Artificial Sequence
  Description of Artificial Sequence: Synthetic oligonucleotide
ugagaugucuuuguacgac

SEQ ID NO: 859778 - RNA, 19 nt, Artificial Sequence
  Description of Artificial Sequence: Synthetic oligonucleotide
uucaacuguguugugugug

SEQ ID NO: 859779 - RNA, 19 nt, Artificial Sequence
  Description of Artificial Sequence: Synthetic oligonucleotide
cagacaucgacggaucucc

SEQ ID NO: 859780 - RNA, 19 nt, Artificial Sequence
  Description of Artificial Sequence: Synthetic oligonucleotide
guugaaugaauuccccuga

SEQ ID NO: 859781 - RNA, 19 nt, Artificial Sequence
  Description of Artificial Sequence: Synthetic oligonucleotide
uccgcuagcugcuggagga

SEQ ID NO: 859782 - RNA, 19 nt, Artificial Sequence
  Description of Artificial Sequence: Synthetic oligonucleotide
agacuugucuggccgccgc

SEQ ID NO: 859783 - RNA, 19 nt, Artificial Sequence
  Description of Artificial Sequence: Synthetic oligonucleotide
ucuguuaguuccaccuccu

SEQ ID NO: 859784 - RNA, 19 nt, Artificial Sequence
  Description of Artificial Sequence: Synthetic oligonucleotide
augccaucuacaaugaccu

SEQ ID NO: 859785 - RNA, 19 nt, Artificial Sequence
  Description of Artificial Sequence: Synthetic oligonucleotide
ugacccgcaaggcauuggc

SEQ ID NO: 859786 - RNA, 19 nt, Artificial Sequence
  Description of Artificial Sequence: Synthetic oligonucleotide
acaauggcugguuggccuc

SEQ ID NO: 859787 - RNA, 19 nt, Artificial Sequence
  Description of Artificial Sequence: Synthetic oligonucleotide
cugcaaugcgaagugaggc

SEQ ID NO: 859788 - RNA, 19 nt, Artificial Sequence
  Description of Artificial Sequence: Synthetic oligonucleotide
augggguacaagccccagc

SEQ ID NO: 859789 - RNA, 19 nt, Artificial Sequence
  Description of Artificial Sequence: Synthetic oligonucleotide
uuaacguccuccgcauuag

SEQ ID NO: 859790 - RNA, 19 nt, Artificial Sequence
  Description of Artificial Sequence: Synthetic oligonucleotide
aacucucgaugcugcuugg

SEQ ID NO: 859791 - RNA, 19 nt, Artificial Sequence
  Description of Artificial Sequence: Synthetic oligonucleotide
ucgacggaucuccuggggc

SEQ ID NO: 859792 - RNA, 19 nt, Artificial Sequence
  Description of Artificial Sequence: Synthetic oligonucleotide
cauugcuggcacaagccac

SEQ ID NO: 859793 - RNA, 19 nt, Artificial Sequence
  Description of Artificial Sequence: Synthetic oligonucleotide
agucagaagcuucagugua

SEQ ID NO: 859794 - RNA, 19 nt, Artificial Sequence
  Description of Artificial Sequence: Synthetic oligonucleotide
ugauaugccgccgauuaau

SEQ ID NO: 859795 - RNA, 19 nt, Artificial Sequence
  Description of Artificial Sequence: Synthetic oligonucleotide
aggugcaugaccauugcug

SEQ ID NO: 859796 - RNA, 19 nt, Artificial Sequence
  Description of Artificial Sequence: Synthetic oligonucleotide
gccgauuaaucucuguuag

SEQ ID NO: 859797 - RNA, 19 nt, Artificial Sequence
  Description of Artificial Sequence: Synthetic oligonucleotide
gucagcgcuggacaggugc

SEQ ID NO: 859798 - RNA, 19 nt, Artificial Sequence
  Description of Artificial Sequence: Synthetic oligonucleotide
ucggugcccaacaaaucug

SEQ ID NO: 859799 - RNA, 19 nt, Artificial Sequence
  Description of Artificial Sequence: Synthetic oligonucleotide
aggguugaaugaauucccc

SEQ ID NO: 859800 - RNA, 19 nt, Artificial Sequence
  Description of Artificial Sequence: Synthetic oligonucleotide
agggguaggggucaccuca

SEQ ID NO: 859801 - RNA, 19 nt, Artificial Sequence
  Description of Artificial Sequence: Synthetic oligonucleotide
uguuguugcguuuccuguc

SEQ ID NO: 859802 - RNA, 19 nt, Artificial Sequence
  Description of Artificial Sequence: Synthetic oligonucleotide
ucuaguggguuaggugugg

SEQ ID NO: 859803 - RNA, 19 nt, Artificial Sequence
  Description of Artificial Sequence: Synthetic oligonucleotide
acguagaugcccaccuucc

SEQ ID NO: 859804 - RNA, 19 nt, Artificial Sequence
  Description of Artificial Sequence: Synthetic oligonucleotide
auaggguuaaucagggccu

SEQ ID NO: 859805 - RNA, 19 nt, Artificial Sequence
  Description of Artificial Sequence: Synthetic oligonucleotide
uuccugacacuccuggguc

SEQ ID NO: 859806 - RNA, 19 nt, Artificial Sequence
  Description of Artificial Sequence: Synthetic oligonucleotide
uacccacuugcccacgagc

SEQ ID NO: 859807 - RNA, 19 nt, Artificial Sequence
  Description of Artificial Sequence: Synthetic oligonucleotide
ucucguuccugccggcucc

SEQ ID NO: 859808 - RNA, 19 nt, Artificial Sequence
  Description of Artificial Sequence: Synthetic oligonucleotide
ugucucgcccagcagacau

SEQ ID NO: 859809 - RNA, 19 nt, Artificial Sequence
  Description of Artificial Sequence: Synthetic oligonucleotide
aggaccggcaccugcuuuc

SEQ ID NO: 859810 - RNA, 19 nt, Artificial Sequence
  Description of Artificial Sequence: Synthetic oligonucleotide
cuccgaagcuucaccauag

SEQ ID NO: 859811 - RNA, 19 nt, Artificial Sequence
  Description of Artificial Sequence: Synthetic oligonucleotide
caucuaguggguuaggugu

SEQ ID NO: 859812 - RNA, 19 nt, Artificial Sequence
  Description of Artificial Sequence: Synthetic oligonucleotide
aaccgggagaccaaacaug

SEQ ID NO: 859813 - RNA, 19 nt, Artificial Sequence
  Description of Artificial Sequence: Synthetic oligonucleotide
aguggguuagguguggggu

SEQ ID NO: 859814 - RNA, 19 nt, Artificial Sequence
  Description of Artificial Sequence: Synthetic oligonucleotide
auaugccgccgauuaaucu

SEQ ID NO: 859815 - RNA, 19 nt, Artificial Sequence
  Description of Artificial Sequence: Synthetic oligonucleotide
agaagcuucaguguagaua

SEQ ID NO: 859816 - RNA, 19 nt, Artificial Sequence
  Description of Artificial Sequence: Synthetic oligonucleotide
auuaguggcucugccuagg

SEQ ID NO: 859817 - RNA, 19 nt, Artificial Sequence
  Description of Artificial Sequence: Synthetic oligonucleotide
cugauaugucucuguacug

SEQ ID NO: 859818 - RNA, 19 nt, Artificial Sequence
  Description of Artificial Sequence: Synthetic oligonucleotide
gugguuucggagcuccucc

SEQ ID NO: 859819 - RNA, 19 nt, Artificial Sequence
  Description of Artificial Sequence: Synthetic oligonucleotide
gaggcaucuaguggguuag

SEQ ID NO: 859820 - RNA, 19 nt, Artificial Sequence
  Description of Artificial Sequence: Synthetic oligonucleotide
uagauaagcagggcaggca

SEQ ID NO: 859821 - RNA, 19 nt, Artificial Sequence
  Description of Artificial Sequence: Synthetic oligonucleotide
gacuauuugcgccuugugu

SEQ ID NO: 859822 - RNA, 19 nt, Artificial Sequence
  Description of Artificial Sequence: Synthetic oligonucleotide
gaguugacugacucaguga

SEQ ID NO: 859823 - RNA, 19 nt, Artificial Sequence
  Description of Artificial Sequence: Synthetic oligonucleotide
aacguccuccgcauuagug

SEQ ID NO: 859824 - RNA, 19 nt, Artificial Sequence
  Description of Artificial Sequence: Synthetic oligonucleotide
cacaggguugaaugaauuc

SEQ ID NO: 859825 - RNA, 19 nt, Artificial Sequence
  Description of Artificial Sequence: Synthetic oligonucleotide
ucuguacuggccugagccu

SEQ ID NO: 859826 - RNA, 19 nt, Artificial Sequence
  Description of Artificial Sequence: Synthetic oligonucleotide
ugcgaagugaggccagcgu

SEQ ID NO: 859827 - RNA, 19 nt, Artificial Sequence
  Description of Artificial Sequence: Synthetic oligonucleotide
guagauaagcagggcaggc

SEQ ID NO: 859828 - RNA, 19 nt, Artificial Sequence
  Description of Artificial Sequence: Synthetic oligonucleotide
uuuuccuaggccugagguu

SEQ ID NO: 859829 - RNA, 19 nt, Artificial Sequence
  Description of Artificial Sequence: Synthetic oligonucleotide
gacaucgacggaucuccug

SEQ ID NO: 859830 - RNA, 19 nt, Artificial Sequence
  Description of Artificial Sequence: Synthetic oligonucleotide
cugguuggccucauuucgc

SEQ ID NO: 859831 - RNA, 19 nt, Artificial Sequence
  Description of Artificial Sequence: Synthetic oligonucleotide
cacgauguuccugacacuc

SEQ ID NO: 859832 - RNA, 19 nt, Artificial Sequence
  Description of Artificial Sequence: Synthetic oligonucleotide
gugugcauccaggacaacc

SEQ ID NO: 859833 - RNA, 19 nt, Artificial Sequence
  Description of Artificial Sequence: Synthetic oligonucleotide
guugugugugcauccagga

SEQ ID NO: 859834 - RNA, 19 nt, Artificial Sequence
  Description of Artificial Sequence: Synthetic oligonucleotide
uucuggaacucucgaugcu

SEQ ID NO: 859835 - RNA, 19 nt, Artificial Sequence
  Description of Artificial Sequence: Synthetic oligonucleotide
caggucucguuccugccgg

SEQ ID NO: 859836 - RNA, 19 nt, Artificial Sequence
  Description of Artificial Sequence: Synthetic oligonucleotide
uuccugccggcuccgaagc

SEQ ID NO: 859837 - RNA, 19 nt, Artificial Sequence
  Description of Artificial Sequence: Synthetic oligonucleotide
guugagacugcgucuccug

SEQ ID NO: 859838 - RNA, 19 nt, Artificial Sequence
  Description of Artificial Sequence: Synthetic oligonucleotide
cauuaguggcucugccuag

SEQ ID NO: 859839 - RNA, 19 nt, Artificial Sequence
  Description of Artificial Sequence: Synthetic oligonucleotide
ggauagaguugacugacuc

SEQ ID NO: 859840 - RNA, 19 nt, Artificial Sequence
  Description of Artificial Sequence: Synthetic oligonucleotide
ugguuggccucauuucgca

SEQ ID NO: 859841 - RNA, 19 nt, Artificial Sequence
  Description of Artificial Sequence: Synthetic oligonucleotide
uuugcgccuugugucaacc

SEQ ID NO: 859842 - RNA, 19 nt, Artificial Sequence
  Description of Artificial Sequence: Synthetic oligonucleotide
gaugucucgcccagcagac

SEQ ID NO: 859843 - RNA, 19 nt, Artificial Sequence
  Description of Artificial Sequence: Synthetic oligonucleotide
acgauguuccugacacucc

SEQ ID NO: 859844 - RNA, 19 nt, Artificial Sequence
  Description of Artificial Sequence: Synthetic oligonucleotide
acaaaucugccacccuccu

SEQ ID NO: 859845 - RNA, 19 nt, Artificial Sequence
  Description of Artificial Sequence: Synthetic oligonucleotide
cacguagaugcccaccuuc

SEQ ID NO: 859846 - RNA, 19 nt, Artificial Sequence
  Description of Artificial Sequence: Synthetic oligonucleotide
ugccccgaaaucaccuuga

SEQ ID NO: 859847 - RNA, 19 nt, Artificial Sequence
  Description of Artificial Sequence: Synthetic oligonucleotide
ucagugauaugccgccgau

SEQ ID NO: 859848 - RNA, 19 nt, Artificial Sequence
  Description of Artificial Sequence: Synthetic oligonucleotide
uccuuaacguccuccgcau

SEQ ID NO: 859849 - RNA, 19 nt, Artificial Sequence
  Description of Artificial Sequence: Synthetic oligonucleotide
aacugccccgaaaucaccu

SEQ ID NO: 859850 - RNA, 19 nt, Artificial Sequence
  Description of Artificial Sequence: Synthetic oligonucleotide
guuaggugugggguugggg

SEQ ID NO: 859851 - RNA, 19 nt, Artificial Sequence
  Description of Artificial Sequence: Synthetic oligonucleotide
gauaugccgccgauuaauc

SEQ ID NO: 859852 - RNA, 19 nt, Artificial Sequence
  Description of Artificial Sequence: Synthetic oligonucleotide
gucggauagaguugacuga

SEQ ID NO: 859853 - RNA, 19 nt, Artificial Sequence
  Description of Artificial Sequence: Synthetic oligonucleotide
uagugguauccugagcgga

SEQ ID NO: 859854 - RNA, 19 nt, Artificial Sequence
  Description of Artificial Sequence: Synthetic oligonucleotide
aggcagacauagugguauc

SEQ ID NO: 859855 - RNA, 19 nt, Artificial Sequence
  Description of Artificial Sequence: Synthetic oligonucleotide
ccaugaggcgcucauggcg

SEQ ID NO: 859856 - RNA, 19 nt, Artificial Sequence
  Description of Artificial Sequence: Synthetic oligonucleotide
caucgacggaucuccuggg

SEQ ID NO: 859857 - RNA, 19 nt, Artificial Sequence
  Description of Artificial Sequence: Synthetic oligonucleotide
gauucggugcccaacaaau

SEQ ID NO: 859858 - RNA, 19 nt, Artificial Sequence
  Description of Artificial Sequence: Synthetic oligonucleotide
uugcgccuugugucaaccg

SEQ ID NO: 859859 - RNA, 19 nt, Artificial Sequence
  Description of Artificial Sequence: Synthetic oligonucleotide
cuucuacccacuugcccac

SEQ ID NO: 859860 - RNA, 19 nt, Artificial Sequence
  Description of Artificial Sequence: Synthetic oligonucleotide
cagcaaguacccacugcgc

SEQ ID NO: 859861 - RNA, 19 nt, Artificial Sequence
  Description of Artificial Sequence: Synthetic oligonucleotide
ggcaaucaaaucaucucgc

SEQ ID NO: 859862 - RNA, 19 nt, Artificial Sequence
  Description of Artificial Sequence: Synthetic oligonucleotide
ucucuguacuggccugagc

SEQ ID NO: 859863 - RNA, 19 nt, Artificial Sequence
  Description of Artificial Sequence: Synthetic oligonucleotide
ucaaaucaucucgcugccc

SEQ ID NO: 859864 - RNA, 19 nt, Artificial Sequence
  Description of Artificial Sequence: Synthetic oligonucleotide
uuccuaggccugagguuag

SEQ ID NO: 859865 - RNA, 19 nt, Artificial Sequence
  Description of Artificial Sequence: Synthetic oligonucleotide
caggacaaccucccugagc

SEQ ID NO: 859866 - RNA, 19 nt, Artificial Sequence
  Description of Artificial Sequence: Synthetic oligonucleotide
cuccuuaacguccuccgca

SEQ ID NO: 859867 - RNA, 19 nt, Artificial Sequence
  Description of Artificial Sequence: Synthetic oligonucleotide
cucgaugcugcuuggccuc

SEQ ID NO: 859868 - RNA, 19 nt, Artificial Sequence
  Description of Artificial Sequence: Synthetic oligonucleotide
gcaucuaguggguuaggug

SEQ ID NO: 859869 - RNA, 19 nt, Artificial Sequence
  Description of Artificial Sequence: Synthetic oligonucleotide
caaugcgaagugaggccag

SEQ ID NO: 859870 - RNA, 19 nt, Artificial Sequence
  Description of Artificial Sequence: Synthetic oligonucleotide
ugcguuuccuguccaggau

SEQ ID NO: 859871 - RNA, 19 nt, Artificial Sequence
  Description of Artificial Sequence: Synthetic oligonucleotide
accgggagaccaaacaugu

SEQ ID NO: 859872 - RNA, 19 nt, Artificial Sequence
  Description of Artificial Sequence: Synthetic oligonucleotide
caaaucaucucgcugcccu

SEQ ID NO: 859873 - RNA, 19 nt, Artificial Sequence
  Description of Artificial Sequence: Synthetic oligonucleotide
gcggguaagggccauggcc

SEQ ID NO: 859874 - RNA, 19 nt, Artificial Sequence
  Description of Artificial Sequence: Synthetic oligonucleotide
cuuaacguccuccgcauua

SEQ ID NO: 859875 - RNA, 19 nt, Artificial Sequence
  Description of Artificial Sequence: Synthetic oligonucleotide
gcaaguacccacugcgccc

SEQ ID NO: 859876 - RNA, 19 nt, Artificial Sequence
  Description of Artificial Sequence: Synthetic oligonucleotide
augaccauugcuggcacaa

SEQ ID NO: 859877 - RNA, 19 nt, Artificial Sequence
  Description of Artificial Sequence: Synthetic oligonucleotide
auucggugcccaacaaauc

SEQ ID NO: 859878 - RNA, 19 nt, Artificial Sequence
  Description of Artificial Sequence: Synthetic oligonucleotide
uccugacacuccuggguca

SEQ ID NO: 859879 - RNA, 19 nt, Artificial Sequence
  Description of Artificial Sequence: Synthetic oligonucleotide
ucaucucgcugcccugggc

SEQ ID NO: 859880 - RNA, 19 nt, Artificial Sequence
  Description of Artificial Sequence: Synthetic oligonucleotide
agcacaaccuuggggaagu

SEQ ID NO: 859881 - RNA, 19 nt, Artificial Sequence
  Description of Artificial Sequence: Synthetic oligonucleotide
acuaugccaucuacaauga

SEQ ID NO: 859882 - RNA, 19 nt, Artificial Sequence
  Description of Artificial Sequence: Synthetic oligonucleotide
ugacacuccugggucagcu

SEQ ID NO: 859883 - RNA, 19 nt, Artificial Sequence
  Description of Artificial Sequence: Synthetic oligonucleotide
uuucaacccuggccugagc

SEQ ID NO: 859884 - RNA, 19 nt, Artificial Sequence
  Description of Artificial Sequence: Synthetic oligonucleotide
uccgcauuaguggcucugc

SEQ ID NO: 859885 - RNA, 19 nt, Artificial Sequence
  Description of Artificial Sequence: Synthetic oligonucleotide
aguuuagagcuggguguuc

SEQ ID NO: 859886 - RNA, 19 nt, Artificial Sequence
  Description of Artificial Sequence: Synthetic oligonucleotide
ugugguuucggagcuccuc

SEQ ID NO: 859887 - RNA, 19 nt, Artificial Sequence
  Description of Artificial Sequence: Synthetic oligonucleotide
uacgacuauuugcgccuug

SEQ ID NO: 859888 - RNA, 19 nt, Artificial Sequence
  Description of Artificial Sequence: Synthetic oligonucleotide
agcagacaucgacggaucu

SEQ ID NO: 859889 - RNA, 19 nt, Artificial Sequence
  Description of Artificial Sequence: Synthetic oligonucleotide
cgucggauagaguugacug

SEQ ID NO: 859890 - RNA, 19 nt, Artificial Sequence
  Description of Artificial Sequence: Synthetic oligonucleotide
ggccucauuucgcaggcag

SEQ ID NO: 859891 - RNA, 19 nt, Artificial Sequence
  Description of Artificial Sequence: Synthetic oligonucleotide
cauagccuugugguuucgg

SEQ ID NO: 859892 - RNA, 19 nt, Artificial Sequence
  Description of Artificial Sequence: Synthetic oligonucleotide
uaagggccauggccuugcg

SEQ ID NO: 859893 - RNA, 19 nt, Artificial Sequence
  Description of Artificial Sequence: Synthetic oligonucleotide
uuccacguagaugcccacc

SEQ ID NO: 859894 - RNA, 19 nt, Artificial Sequence
  Description of Artificial Sequence: Synthetic oligonucleotide
ugacugacucagugauaug

SEQ ID NO: 859895 - RNA, 19 nt, Artificial Sequence
  Description of Artificial Sequence: Synthetic oligonucleotide
acucagugauaugccgccg

SEQ ID NO: 859896 - RNA, 19 nt, Artificial Sequence
  Description of Artificial Sequence: Synthetic oligonucleotide
gguccauuaggcugacaug

SEQ ID NO: 859897 - RNA, 19 nt, Artificial Sequence
  Description of Artificial Sequence: Synthetic oligonucleotide
gccacuaugccaucuacaa

SEQ ID NO: 859898 - RNA, 19 nt, Artificial Sequence
  Description of Artificial Sequence: Synthetic oligonucleotide
uaacguccuccgcauuagu

SEQ ID NO: 859899 - RNA, 19 nt, Artificial Sequence
  Description of Artificial Sequence: Synthetic oligonucleotide
ugcuggcaaucaaaucauc

SEQ ID NO: 859900 - RNA, 19 nt, Artificial Sequence
  Description of Artificial Sequence: Synthetic oligonucleotide
augcgaagugaggccagcg

SEQ ID NO: 859901 - RNA, 19 nt, Artificial Sequence
  Description of Artificial Sequence: Synthetic oligonucleotide
gcugcaaugcgaagugagg

SEQ ID NO: 859902 - RNA, 19 nt, Artificial Sequence
  Description of Artificial Sequence: Synthetic oligonucleotide
uuccagccgucggauagag

SEQ ID NO: 859903 - RNA, 19 nt, Artificial Sequence
  Description of Artificial Sequence: Synthetic oligonucleotide
gcgaagugaggccagcgug

SEQ ID NO: 859904 - RNA, 19 nt, Artificial Sequence
  Description of Artificial Sequence: Synthetic oligonucleotide
guuccugacacuccugggu

SEQ ID NO: 859905 - RNA, 19 nt, Artificial Sequence
  Description of Artificial Sequence: Synthetic oligonucleotide
guuucggagcuccuccaga

SEQ ID NO: 859906 - RNA, 19 nt, Artificial Sequence
  Description of Artificial Sequence: Synthetic oligonucleotide
gcuaugggguacaagcccc

SEQ ID NO: 859907 - RNA, 19 nt, Artificial Sequence
  Description of Artificial Sequence: Synthetic oligonucleotide
agacugcgucuccugauau

SEQ ID NO: 859908 - RNA, 19 nt, Artificial Sequence
  Description of Artificial Sequence: Synthetic oligonucleotide
ugucucuguacuggccuga

SEQ ID NO: 859909 - RNA, 19 nt, Artificial Sequence
  Description of Artificial Sequence: Synthetic oligonucleotide
aggucucguuccugccggc

SEQ ID NO: 859910 - RNA, 19 nt, Artificial Sequence
  Description of Artificial Sequence: Synthetic oligonucleotide
ggcugcaaugcgaagugag

SEQ ID NO: 859911 - RNA, 19 nt, Artificial Sequence
  Description of Artificial Sequence: Synthetic oligonucleotide
auacccaucuuggguaagu

SEQ ID NO: 859912 - RNA, 19 nt, Artificial Sequence
  Description of Artificial Sequence: Synthetic oligonucleotide
aucuaguggguuaggugug

SEQ ID NO: 859913 - RNA, 19 nt, Artificial Sequence
  Description of Artificial Sequence: Synthetic oligonucleotide
acgacuauuugcgccuugu

SEQ ID NO: 859914 - RNA, 19 nt, Artificial Sequence
  Description of Artificial Sequence: Synthetic oligonucleotide
gaguccccaagaaaaugga

SEQ ID NO: 859915 - RNA, 19 nt, Artificial Sequence
  Description of Artificial Sequence: Synthetic oligonucleotide
accuuggggccaccgaggu

SEQ ID NO: 859916 - RNA, 19 nt, Artificial Sequence
  Description of Artificial Sequence: Synthetic oligonucleotide
guaagugcuaugggguaca

SEQ ID NO: 859917 - RNA, 19 nt, Artificial Sequence
  Description of Artificial Sequence: Synthetic oligonucleotide
guauccugagcggauggca

SEQ ID NO: 859918 - RNA, 19 nt, Artificial Sequence
  Description of Artificial Sequence: Synthetic oligonucleotide
gaacugccccgaaaucacc

SEQ ID NO: 859919 - RNA, 19 nt, Artificial Sequence
  Description of Artificial Sequence: Synthetic oligonucleotide
uaggaccuuggggccaccg

SEQ ID NO: 859920 - RNA, 19 nt, Artificial Sequence
  Description of Artificial Sequence: Synthetic oligonucleotide
cagugaggcauuugucuca

SEQ ID NO: 859921 - RNA, 19 nt, Artificial Sequence
  Description of Artificial Sequence: Synthetic oligonucleotide
gacaggaacugccccgaaa

SEQ ID NO: 859922 - RNA, 19 nt, Artificial Sequence
  Description of Artificial Sequence: Synthetic oligonucleotide
ccgaaaucaccuugacccg

SEQ ID NO: 859923 - RNA, 19 nt, Artificial Sequence
  Description of Artificial Sequence: Synthetic oligonucleotide
cucagugauaugccgccga

SEQ ID NO: 859924 - RNA, 19 nt, Artificial Sequence
  Description of Artificial Sequence: Synthetic oligonucleotide
cugccccgaaaucaccuug

SEQ ID NO: 859925 - RNA, 19 nt, Artificial Sequence
  Description of Artificial Sequence: Synthetic oligonucleotide
accuuccugucagacagga

SEQ ID NO: 859926 - RNA, 19 nt, Artificial Sequence
  Description of Artificial Sequence: Synthetic oligonucleotide
gggaauacccaucuugggu

SEQ ID NO: 859927 - RNA, 19 nt, Artificial Sequence
  Description of Artificial Sequence: Synthetic oligonucleotide
uggcccgcugguccauuag

SEQ ID NO: 859928 - RNA, 19 nt, Artificial Sequence
  Description of Artificial Sequence: Synthetic oligonucleotide
ccugauaugucucuguacu

SEQ ID NO: 859929 - RNA, 19 nt, Artificial Sequence
  Description of Artificial Sequence: Synthetic oligonucleotide
caggcacaauggcugguug

SEQ ID NO: 859930 - RNA, 19 nt, Artificial Sequence
  Description of Artificial Sequence: Synthetic oligonucleotide
cuucaucccacacaggguu

SEQ ID NO: 859931 - RNA, 19 nt, Artificial Sequence
  Description of Artificial Sequence: Synthetic oligonucleotide
cagccgucggauagaguug

SEQ ID NO: 859932 - RNA, 19 nt, Artificial Sequence
  Description of Artificial Sequence: Synthetic oligonucleotide
cugcccugccaugaggcgc

SEQ ID NO: 859933 - RNA, 19 nt, Artificial Sequence
  Description of Artificial Sequence: Synthetic oligonucleotide
cauccagacggcggguaag

SEQ ID NO: 859934 - RNA, 19 nt, Artificial Sequence
  Description of Artificial Sequence: Synthetic oligonucleotide
gguaagugcuaugggguac

SEQ ID NO: 859935 - RNA, 19 nt, Artificial Sequence
  Description of Artificial Sequence: Synthetic oligonucleotide
ugucaaccgggagaccaaa

SEQ ID NO: 859936 - RNA, 19 nt, Artificial Sequence
  Description of Artificial Sequence: Synthetic oligonucleotide
agccgucggauagaguuga

SEQ ID NO: 859937 - RNA, 19 nt, Artificial Sequence
  Description of Artificial Sequence: Synthetic oligonucleotide
gagaccaaacauguccacu

SEQ ID NO: 859938 - RNA, 19 nt, Artificial Sequence
  Description of Artificial Sequence: Synthetic oligonucleotide
aggaccuuggggccaccga

SEQ ID NO: 859939 - RNA, 19 nt, Artificial Sequence
  Description of Artificial Sequence: Synthetic oligonucleotide
ccuccguucaguuucugca

SEQ ID NO: 859940 - RNA, 19 nt, Artificial Sequence
  Description of Artificial Sequence: Synthetic oligonucleotide
ccggcaccugcuuucaacc

SEQ ID NO: 859941 - RNA, 19 nt, Artificial Sequence
  Description of Artificial Sequence: Synthetic oligonucleotide
cucagugaaggggucaaaa

SEQ ID NO: 859942 - RNA, 19 nt, Artificial Sequence
  Description of Artificial Sequence: Synthetic oligonucleotide
agugguauccugagcggau

SEQ ID NO: 859943 - RNA, 19 nt, Artificial Sequence
  Description of Artificial Sequence: Synthetic oligonucleotide
augccgccgauuaaucucu

SEQ ID NO: 859944 - RNA, 19 nt, Artificial Sequence
  Description of Artificial Sequence: Synthetic oligonucleotide
ucccucaggucucguuccu

SEQ ID NO: 859945 - RNA, 19 nt, Artificial Sequence
  Description of Artificial Sequence: Synthetic oligonucleotide
ccagacggcggguaagggc

SEQ ID NO: 859946 - RNA, 19 nt, Artificial Sequence
  Description of Artificial Sequence: Synthetic oligonucleotide
cagccaguuuagagcuggg

SEQ ID NO: 859947 - RNA, 19 nt, Artificial Sequence
  Description of Artificial Sequence: Synthetic oligonucleotide
caccuuccugucagacagg

SEQ ID NO: 859948 - RNA, 19 nt, Artificial Sequence
  Description of Artificial Sequence: Synthetic oligonucleotide
uugugguuucggagcuccu

SEQ ID NO: 859949 - RNA, 19 nt, Artificial Sequence
  Description of Artificial Sequence: Synthetic oligonucleotide
cuaugggguacaagcccca

SEQ ID NO: 859950 - RNA, 19 nt, Artificial Sequence
  Description of Artificial Sequence: Synthetic oligonucleotide
uggccgccgcaugaacucg

SEQ ID NO: 859951 - RNA, 19 nt, Artificial Sequence
  Description of Artificial Sequence: Synthetic oligonucleotide
gcuguugagacugcgucuc

SEQ ID NO: 859952 - RNA, 19 nt, Artificial Sequence
  Description of Artificial Sequence: Synthetic oligonucleotide
guuuagagcuggguguucu

SEQ ID NO: 859953 - RNA, 19 nt, Artificial Sequence
  Description of Artificial Sequence: Synthetic oligonucleotide
gacaugcuugauaggguua

SEQ ID NO: 859954 - RNA, 19 nt, Artificial Sequence
  Description of Artificial Sequence: Synthetic oligonucleotide
ggcccgcugguccauuagg

SEQ ID NO: 859955 - RNA, 19 nt, Artificial Sequence
  Description of Artificial Sequence: Synthetic oligonucleotide
gggagaccaaacaugucca

SEQ ID NO: 859956 - RNA, 19 nt, Artificial Sequence
  Description of Artificial Sequence: Synthetic oligonucleotide
uacccacugcgcccauugu

SEQ ID NO: 859957 - RNA, 19 nt, Artificial Sequence
  Description of Artificial Sequence: Synthetic oligonucleotide
caaguacccacugcgccca

SEQ ID NO: 859958 - RNA, 19 nt, Artificial Sequence
  Description of Artificial Sequence: Synthetic oligonucleotide
acugccccgaaaucaccuu

SEQ ID NO: 859959 - RNA, 19 nt, Artificial Sequence
  Description of Artificial Sequence: Synthetic oligonucleotide
gacuugucuggccgccgca

SEQ ID NO: 859960 - RNA, 19 nt, Artificial Sequence
  Description of Artificial Sequence: Synthetic oligonucleotide
gcaaugcgaagugaggcca

SEQ ID NO: 859961 - RNA, 19 nt, Artificial Sequence
  Description of Artificial Sequence: Synthetic oligonucleotide
ggguuaaucagggccucug

SEQ ID NO: 859962 - RNA, 19 nt, Artificial Sequence
  Description of Artificial Sequence: Synthetic oligonucleotide
cugccggcuccgaagcuuc

SEQ ID NO: 859963 - RNA, 19 nt, Artificial Sequence
  Description of Artificial Sequence: Synthetic oligonucleotide
ugccaucuacaaugaccuc

SEQ ID NO: 859964 - RNA, 19 nt, Artificial Sequence
  Description of Artificial Sequence: Synthetic oligonucleotide
ccgcugguccauuaggcug

SEQ ID NO: 859965 - RNA, 19 nt, Artificial Sequence
  Description of Artificial Sequence: Synthetic oligonucleotide
uaagugcuaugggguacaa

SEQ ID NO: 859966 - RNA, 19 nt, Artificial Sequence
  Description of Artificial Sequence: Synthetic oligonucleotide
ucgaugcugcuuggccucc

SEQ ID NO: 859967 - RNA, 19 nt, Artificial Sequence
  Description of Artificial Sequence: Synthetic oligonucleotide
ugccgccgauuaaucucug

SEQ ID NO: 859968 - RNA, 19 nt, Artificial Sequence
  Description of Artificial Sequence: Synthetic oligonucleotide
gcaaucaaaucaucucgcu

SEQ ID NO: 859969 - RNA, 19 nt, Artificial Sequence
  Description of Artificial Sequence: Synthetic oligonucleotide
cuccgcauuaguggcucug

SEQ ID NO: 859970 - RNA, 19 nt, Artificial Sequence
  Description of Artificial Sequence: Synthetic oligonucleotide
uggggcaaccugucacgau

SEQ ID NO: 859971 - RNA, 19 nt, Artificial Sequence
  Description of Artificial Sequence: Synthetic oligonucleotide
ggaccuguugguucuggaa

SEQ ID NO: 859972 - RNA, 19 nt, Artificial Sequence
  Description of Artificial Sequence: Synthetic oligonucleotide
gcgccuugugucaaccggg

SEQ ID NO: 859973 - RNA, 19 nt, Artificial Sequence
  Description of Artificial Sequence: Synthetic oligonucleotide
ccccgaaaucaccuugacc

SEQ ID NO: 859974 - RNA, 19 nt, Artificial Sequence
  Description of Artificial Sequence: Synthetic oligonucleotide
aggcaucuaguggguuagg

SEQ ID NO: 859975 - RNA, 19 nt, Artificial Sequence
  Description of Artificial Sequence: Synthetic oligonucleotide
caucucgcugcccugggcu

SEQ ID NO: 859976 - RNA, 19 nt, Artificial Sequence
  Description of Artificial Sequence: Synthetic oligonucleotide
ggccugagguuagaaggag

SEQ ID NO: 859977 - RNA, 19 nt, Artificial Sequence
  Description of Artificial Sequence: Synthetic oligonucleotide
uccagccgucggauagagu

SEQ ID NO: 859978 - RNA, 19 nt, Artificial Sequence
  Description of Artificial Sequence: Synthetic oligonucleotide
gucaaccgggagaccaaac

SEQ ID NO: 859979 - RNA, 19 nt, Artificial Sequence
  Description of Artificial Sequence: Synthetic oligonucleotide
ccacuugcccacgagcccc

SEQ ID NO: 859980 - RNA, 19 nt, Artificial Sequence
  Description of Artificial Sequence: Synthetic oligonucleotide
caaccgggagaccaaacau

SEQ ID NO: 859981 - RNA, 19 nt, Artificial Sequence
  Description of Artificial Sequence: Synthetic oligonucleotide
gccaugaggcgcucauggc

SEQ ID NO: 859982 - RNA, 19 nt, Artificial Sequence
  Description of Artificial Sequence: Synthetic oligonucleotide
gcuggcaaucaaaucaucu

SEQ ID NO: 859983 - RNA, 19 nt, Artificial Sequence
  Description of Artificial Sequence: Synthetic oligonucleotide
ggguugaaugaauuccccu

SEQ ID NO: 859984 - RNA, 19 nt, Artificial Sequence
  Description of Artificial Sequence: Synthetic oligonucleotide
uccugccggcuccgaagcu

SEQ ID NO: 859985 - RNA, 19 nt, Artificial Sequence
  Description of Artificial Sequence: Synthetic oligonucleotide
uugugucaaccgggagacc

SEQ ID NO: 859986 - RNA, 19 nt, Artificial Sequence
  Description of Artificial Sequence: Synthetic oligonucleotide
aggguuaaucagggccucu

SEQ ID NO: 859987 - RNA, 19 nt, Artificial Sequence
  Description of Artificial Sequence: Synthetic oligonucleotide
cucauuucgcaggcagaca

SEQ ID NO: 859988 - RNA, 19 nt, Artificial Sequence
  Description of Artificial Sequence: Synthetic oligonucleotide
cauuucgcaggcagacaua

SEQ ID NO: 859989 - RNA, 19 nt, Artificial Sequence
  Description of Artificial Sequence: Synthetic oligonucleotide
gcaaccugucacgauguuc

SEQ ID NO: 859990 - RNA, 19 nt, Artificial Sequence
  Description of Artificial Sequence: Synthetic oligonucleotide
gguuaggugugggguuggg

SEQ ID NO: 859991 - RNA, 19 nt, Artificial Sequence
  Description of Artificial Sequence: Synthetic oligonucleotide
cggugcccaacaaaucugc

SEQ ID NO: 859992 - RNA, 19 nt, Artificial Sequence
  Description of Artificial Sequence: Synthetic oligonucleotide
caccacucccaggugcaug

SEQ ID NO: 859993 - RNA, 19 nt, Artificial Sequence
  Description of Artificial Sequence: Synthetic oligonucleotide
ccuccuuaacguccuccgc

SEQ ID NO: 859994 - RNA, 19 nt, Artificial Sequence
  Description of Artificial Sequence: Synthetic oligonucleotide
cacacaggguugaaugaau

SEQ ID NO: 859995 - RNA, 19 nt, Artificial Sequence
  Description of Artificial Sequence: Synthetic oligonucleotide
agacaggaacugccccgaa

SEQ ID NO: 859996 - RNA, 19 nt, Artificial Sequence
  Description of Artificial Sequence: Synthetic oligonucleotide
uccuaggccugagguuaga

SEQ ID NO: 859997 - RNA, 19 nt, Artificial Sequence
  Description of Artificial Sequence: Synthetic oligonucleotide
gccuugugucaaccgggag

SEQ ID NO: 859998 - RNA, 19 nt, Artificial Sequence
  Description of Artificial Sequence: Synthetic oligonucleotide
uuggcccgcugguccauua

SEQ ID NO: 859999 - RNA, 19 nt, Artificial Sequence
  Description of Artificial Sequence: Synthetic oligonucleotide
ccagccgucggauagaguu

SEQ ID NO: 860000 - RNA, 19 nt, Artificial Sequence
  Description of Artificial Sequence: Synthetic oligonucleotide
cagcgcuggacaggugccc

SEQ ID NO: 860001 - RNA, 19 nt, Artificial Sequence
  Description of Artificial Sequence: Synthetic oligonucleotide
ccauugcuggcacaagcca

SEQ ID NO: 860002 - RNA, 19 nt, Artificial Sequence
  Description of Artificial Sequence: Synthetic oligonucleotide
guugacugacucagugaua

SEQ ID NO: 860003 - RNA, 19 nt, Artificial Sequence
  Description of Artificial Sequence: Synthetic oligonucleotide
gguaagggccauggccuug

SEQ ID NO: 860004 - RNA, 19 nt, Artificial Sequence
  Description of Artificial Sequence: Synthetic oligonucleotide
ggcacuggaggaggaccgg

SEQ ID NO: 860005 - RNA, 19 nt, Artificial Sequence
  Description of Artificial Sequence: Synthetic oligonucleotide
ggacaggugcccaccacuc

SEQ ID NO: 860006 - RNA, 19 nt, Artificial Sequence
  Description of Artificial Sequence: Synthetic oligonucleotide
cugacacuccugggucagc

SEQ ID NO: 860007 - RNA, 19 nt, Artificial Sequence
  Description of Artificial Sequence: Synthetic oligonucleotide
ccgcauuaguggcucugcc

SEQ ID NO: 860008 - RNA, 19 nt, Artificial Sequence
  Description of Artificial Sequence: Synthetic oligonucleotide
ggguuaggugugggguugg

SEQ ID NO: 860009 - RNA, 19 nt, Artificial Sequence
  Description of Artificial Sequence: Synthetic oligonucleotide
gcuccgaagcuucaccaua

SEQ ID NO: 860010 - RNA, 19 nt, Artificial Sequence
  Description of Artificial Sequence: Synthetic oligonucleotide
gccccucugaugucucgcc

SEQ ID NO: 860011 - RNA, 19 nt, Artificial Sequence
  Description of Artificial Sequence: Synthetic oligonucleotide
ggcaccugcuuucaacccu

SEQ ID NO: 860012 - RNA, 19 nt, Artificial Sequence
  Description of Artificial Sequence: Synthetic oligonucleotide
agacaucgacggaucuccu

SEQ ID NO: 860013 - RNA, 19 nt, Artificial Sequence
  Description of Artificial Sequence: Synthetic oligonucleotide
gccuagggcacuggaggag

SEQ ID NO: 860014 - RNA, 19 nt, Artificial Sequence
  Description of Artificial Sequence: Synthetic oligonucleotide
cuccguucaguuucugcau

SEQ ID NO: 860015 - RNA, 19 nt, Artificial Sequence
  Description of Artificial Sequence: Synthetic oligonucleotide
cugccaugaggcgcucaug

SEQ ID NO: 860016 - RNA, 19 nt, Artificial Sequence
  Description of Artificial Sequence: Synthetic oligonucleotide
gguaggaccuuggggccac

SEQ ID NO: 860017 - RNA, 19 nt, Artificial Sequence
  Description of Artificial Sequence: Synthetic oligonucleotide
cuuccagccgucggauaga

SEQ ID NO: 860018 - RNA, 19 nt, Artificial Sequence
  Description of Artificial Sequence: Synthetic oligonucleotide
gcagacauagugguauccu

SEQ ID NO: 860019 - RNA, 19 nt, Artificial Sequence
  Description of Artificial Sequence: Synthetic oligonucleotide
gggguaggggucaccucag

SEQ ID NO: 860020 - RNA, 19 nt, Artificial Sequence
  Description of Artificial Sequence: Synthetic oligonucleotide
augucucgcccagcagaca

SEQ ID NO: 860021 - RNA, 19 nt, Artificial Sequence
  Description of Artificial Sequence: Synthetic oligonucleotide
uggccucauuucgcaggca

SEQ ID NO: 860022 - RNA, 19 nt, Artificial Sequence
  Description of Artificial Sequence: Synthetic oligonucleotide
ggcggguaagggccauggc

SEQ ID NO: 860023 - RNA, 19 nt, Artificial Sequence
  Description of Artificial Sequence: Synthetic oligonucleotide
cuggggcaaccugucacga

SEQ ID NO: 860024 - RNA, 19 nt, Artificial Sequence
  Description of Artificial Sequence: Synthetic oligonucleotide
gcuuucaacccuggccuga

SEQ ID NO: 860025 - RNA, 19 nt, Artificial Sequence
  Description of Artificial Sequence: Synthetic oligonucleotide
ggcaaggauucggugccca

SEQ ID NO: 860026 - RNA, 19 nt, Artificial Sequence
  Description of Artificial Sequence: Synthetic oligonucleotide
gccccgaaaucaccuugac

SEQ ID NO: 860027 - RNA, 19 nt, Artificial Sequence
  Description of Artificial Sequence: Synthetic oligonucleotide
guacuggccugagccucac

SEQ ID NO: 860028 - RNA, 19 nt, Artificial Sequence
  Description of Artificial Sequence: Synthetic oligonucleotide
ggccgccgcaugaacucgg

SEQ ID NO: 860029 - RNA, 19 nt, Artificial Sequence
  Description of Artificial Sequence: Synthetic oligonucleotide
ggcaucuaguggguuaggu

SEQ ID NO: 860030 - RNA, 19 nt, Artificial Sequence
  Description of Artificial Sequence: Synthetic oligonucleotide
gucucgcccagcagacauc

SEQ ID NO: 860031 - RNA, 19 nt, Artificial Sequence
  Description of Artificial Sequence: Synthetic oligonucleotide
gaggaccggcaccugcuuu

SEQ ID NO: 860032 - RNA, 19 nt, Artificial Sequence
  Description of Artificial Sequence: Synthetic oligonucleotide
gccuugugguuucggagcu

SEQ ID NO: 860033 - RNA, 19 nt, Artificial Sequence
  Description of Artificial Sequence: Synthetic oligonucleotide
cgauuaaucucuguuaguu

SEQ ID NO: 860034 - RNA, 19 nt, Artificial Sequence
  Description of Artificial Sequence: Synthetic oligonucleotide
gcaaggauucggugcccaa

SEQ ID NO: 860035 - RNA, 19 nt, Artificial Sequence
  Description of Artificial Sequence: Synthetic oligonucleotide
agacggcggguaagggcca

SEQ ID NO: 860036 - RNA, 19 nt, Artificial Sequence
  Description of Artificial Sequence: Synthetic oligonucleotide
cggcaccugcuuucaaccc

SEQ ID NO: 860037 - RNA, 19 nt, Artificial Sequence
  Description of Artificial Sequence: Synthetic oligonucleotide
ucguuccugccggcuccga

SEQ ID NO: 860038 - RNA, 19 nt, Artificial Sequence
  Description of Artificial Sequence: Synthetic oligonucleotide
agucagcgcuggacaggug

SEQ ID NO: 860039 - RNA, 19 nt, Artificial Sequence
  Description of Artificial Sequence: Synthetic oligonucleotide
gccucauuucgcaggcaga

SEQ ID NO: 860040 - RNA, 19 nt, Artificial Sequence
  Description of Artificial Sequence: Synthetic oligonucleotide
gccgccgcaugaacucggg

SEQ ID NO: 860041 - RNA, 19 nt, Artificial Sequence
  Description of Artificial Sequence: Synthetic oligonucleotide
ccagcagacaucgacggau

SEQ ID NO: 860042 - RNA, 19 nt, Artificial Sequence
  Description of Artificial Sequence: Synthetic oligonucleotide
ccgggagaccaaacauguc

SEQ ID NO: 860043 - RNA, 19 nt, Artificial Sequence
  Description of Artificial Sequence: Synthetic oligonucleotide
ccgauuaaucucuguuagu

SEQ ID NO: 860044 - RNA, 19 nt, Artificial Sequence
  Description of Artificial Sequence: Synthetic oligonucleotide
ggguaggggucaccucaga

SEQ ID NO: 860045 - RNA, 19 nt, Artificial Sequence
  Description of Artificial Sequence: Synthetic oligonucleotide
cucgcccagcagacaucga

SEQ ID NO: 860046 - RNA, 19 nt, Artificial Sequence
  Description of Artificial Sequence: Synthetic oligonucleotide
ggcuccgaagcuucaccau

SEQ ID NO: 860047 - RNA, 19 nt, Artificial Sequence
  Description of Artificial Sequence: Synthetic oligonucleotide
ggaccggcaccugcuuuca

SEQ ID NO: 860048 - RNA, 19 nt, Artificial Sequence
  Description of Artificial Sequence: Synthetic oligonucleotide
gggcaaccugucacgaugu

SEQ ID NO: 860049 - RNA, 19 nt, Artificial Sequence
  Description of Artificial Sequence: Synthetic oligonucleotide
ccgccgcaugaacucgggc

SEQ ID NO: 860050 - RNA, 19 nt, Artificial Sequence
  Description of Artificial Sequence: Synthetic oligonucleotide
gccaccgaggugaggcauc

SEQ ID NO: 860051 - RNA, 19 nt, Artificial Sequence
  Description of Artificial Sequence: Synthetic oligonucleotide
cgccgcaugaacucgggcu

SEQ ID NO: 860052 - RNA, 19 nt, Artificial Sequence
  Description of Artificial Sequence: Synthetic oligonucleotide
cggcuccgaagcuucacca

SEQ ID NO: 860053 - RNA, 19 nt, Artificial Sequence
  Description of Artificial Sequence: Synthetic oligonucleotide
cgcauuaguggcucugccu

SEQ ID NO: 860054 - RNA, 19 nt, Artificial Sequence
  Description of Artificial Sequence: Synthetic oligonucleotide
ccaacaaaucugccacccu

SEQ ID NO: 860055 - RNA, 19 nt, Artificial Sequence
  Description of Artificial Sequence: Synthetic oligonucleotide
ccugguggucaucugggau

SEQ ID NO: 860056 - RNA, 19 nt, Artificial Sequence
  Description of Artificial Sequence: Synthetic oligonucleotide
caugcuugauaggguuaau

SEQ ID NO: 860057 - RNA, 19 nt, Artificial Sequence
  Description of Artificial Sequence: Synthetic oligonucleotide
guacgacuauuugcgccuu

SEQ ID NO: 860058 - RNA, 19 nt, Artificial Sequence
  Description of Artificial Sequence: Synthetic oligonucleotide
ccgcaugaacucgggcuuc

SEQ ID NO: 860059 - RNA, 19 nt, Artificial Sequence
  Description of Artificial Sequence: Synthetic oligonucleotide
ccccaagaaaauggaguua

SEQ ID NO: 860060 - RNA, 19 nt, Artificial Sequence
  Description of Artificial Sequence: Synthetic oligonucleotide
ccgccgauuaaucucuguu

SEQ ID NO: 860061 - RNA, 19 nt, Artificial Sequence
  Description of Artificial Sequence: Synthetic oligonucleotide
cagugauaugccgccgauu

SEQ ID NO: 860062 - RNA, 19 nt, Artificial Sequence
  Description of Artificial Sequence: Synthetic oligonucleotide
gccgccgauuaaucucugu

SEQ ID NO: 860063 - RNA, 19 nt, Artificial Sequence
  Description of Artificial Sequence: Synthetic oligonucleotide
cugguccauuaggcugaca

SEQ ID NO: 860064 - RNA, 19 nt, Artificial Sequence
  Description of Artificial Sequence: Synthetic oligonucleotide
ggcauuugucucagauuuu

SEQ ID NO: 860065 - RNA, 19 nt, Artificial Sequence
  Description of Artificial Sequence: Synthetic oligonucleotide
ggguaagggccauggccuu

SEQ ID NO: 860066 - RNA, 19 nt, Artificial Sequence
  Description of Artificial Sequence: Synthetic oligonucleotide
ccgcuagcugcuggaggac

SEQ ID NO: 860067 - RNA, 19 nt, Artificial Sequence
  Description of Artificial Sequence: Synthetic oligonucleotide
gccgucggauagaguugac

SEQ ID NO: 860068 - RNA, 19 nt, Artificial Sequence
  Description of Artificial Sequence: Synthetic oligonucleotide
gacggcggguaagggccau

SEQ ID NO: 860069 - RNA, 19 nt, Artificial Sequence
  Description of Artificial Sequence: Synthetic oligonucleotide
ggccuugcgcugaugcuuu

SEQ ID NO: 860070 - RNA, 19 nt, Artificial Sequence
  Description of Artificial Sequence: Synthetic oligonucleotide
ggcaaccugucacgauguu

SEQ ID NO: 860071 - RNA, 19 nt, Artificial Sequence
  Description of Artificial Sequence: Synthetic oligonucleotide
ccgucggauagaguugacu

SEQ ID NO: 860072 - RNA, 19 nt, Artificial Sequence
  Description of Artificial Sequence: Synthetic oligonucleotide
cguuccugccggcuccgaa

SEQ ID NO: 860073 - RNA, 19 nt, Artificial Sequence
  Description of Artificial Sequence: Synthetic oligonucleotide
ccaccgaggugaggcaucu

SEQ ID NO: 860074 - RNA, 19 nt, Artificial Sequence
  Description of Artificial Sequence: Synthetic oligonucleotide
caccgaggugaggcaucua

SEQ ID NO: 860075 - RNA, 19 nt, Artificial Sequence
  Description of Artificial Sequence: Synthetic oligonucleotide
gguggucaucugggaugua

SEQ ID NO: 860076 - RNA, 19 nt, Artificial Sequence
  Description of Artificial Sequence: Synthetic oligonucleotide
ccuuaacguccuccgcauu

SEQ ID NO: 860077 - RNA, 19 nt, Artificial Sequence
  Description of Artificial Sequence: Synthetic oligonucleotide
cuuggcccgcugguccauu

SEQ ID NO: 860078 - RNA, 19 nt, Artificial Sequence
  Description of Artificial Sequence: Synthetic oligonucleotide
ccuccgcauuaguggcucu

SEQ ID NO: 860079 - RNA, 19 nt, Artificial Sequence
  Description of Artificial Sequence: Synthetic oligonucleotide
cgcaaggcauuggccacua

SEQ ID NO: 860080 - RNA, 19 nt, Artificial Sequence
  Description of Artificial Sequence: Synthetic oligonucleotide
ugaguaaucauacagagcc

SEQ ID NO: 860081 - RNA, 19 nt, Artificial Sequence
  Description of Artificial Sequence: Synthetic oligonucleotide
acaaacaucacauugcggg

SEQ ID NO: 860082 - RNA, 19 nt, Artificial Sequence
  Description of Artificial Sequence: Synthetic oligonucleotide
aauucaaagggccuuguac

SEQ ID NO: 860083 - RNA, 19 nt, Artificial Sequence
  Description of Artificial Sequence: Synthetic oligonucleotide
uauggaaggaaccagagug

SEQ ID NO: 860084 - RNA, 19 nt, Artificial Sequence
  Description of Artificial Sequence: Synthetic oligonucleotide
ucuagugaaguucuuaagg

SEQ ID NO: 860085 - RNA, 19 nt, Artificial Sequence
  Description of Artificial Sequence: Synthetic oligonucleotide
ugcucaauccuucacaucg

SEQ ID NO: 860086 - RNA, 19 nt, Artificial Sequence
  Description of Artificial Sequence: Synthetic oligonucleotide
aaagauaagagguauccca

SEQ ID NO: 860087 - RNA, 19 nt, Artificial Sequence
  Description of Artificial Sequence: Synthetic oligonucleotide
uacuguacaacguaagucg

SEQ ID NO: 860088 - RNA, 19 nt, Artificial Sequence
  Description of Artificial Sequence: Synthetic oligonucleotide
auucaaagggccuuguacc

SEQ ID NO: 860089 - RNA, 19 nt, Artificial Sequence
  Description of Artificial Sequence: Synthetic oligonucleotide
agaguggucagccaguacc

SEQ ID NO: 860090 - RNA, 19 nt, Artificial Sequence
  Description of Artificial Sequence: Synthetic oligonucleotide
uuuacuuggauccuggcac

SEQ ID NO: 860091 - RNA, 19 nt, Artificial Sequence
  Description of Artificial Sequence: Synthetic oligonucleotide
aaaaggaccggcuauccag

SEQ ID NO: 860092 - RNA, 19 nt, Artificial Sequence
  Description of Artificial Sequence: Synthetic oligonucleotide
ucggcuuuggcauugaugc

SEQ ID NO: 860093 - RNA, 19 nt, Artificial Sequence
  Description of Artificial Sequence: Synthetic oligonucleotide
aauuccugguauuagagaa

SEQ ID NO: 860094 - RNA, 19 nt, Artificial Sequence
  Description of Artificial Sequence: Synthetic oligonucleotide
acaucguucuuccuggucc

SEQ ID NO: 860095 - RNA, 19 nt, Artificial Sequence
  Description of Artificial Sequence: Synthetic oligonucleotide
ugugcaaagcuucagcugc

SEQ ID NO: 860096 - RNA, 19 nt, Artificial Sequence
  Description of Artificial Sequence: Synthetic oligonucleotide
aagaaaucguuguagagau

SEQ ID NO: 860097 - RNA, 19 nt, Artificial Sequence
  Description of Artificial Sequence: Synthetic oligonucleotide
caaauaggaccuuaggucc

SEQ ID NO: 860098 - RNA, 19 nt, Artificial Sequence
  Description of Artificial Sequence: Synthetic oligonucleotide
aaaugcucugguaauaccg

SEQ ID NO: 860099 - RNA, 19 nt, Artificial Sequence
  Description of Artificial Sequence: Synthetic oligonucleotide
agugcuuuguuccuagugg

SEQ ID NO: 860100 - RNA, 19 nt, Artificial Sequence
  Description of Artificial Sequence: Synthetic oligonucleotide
caugaguaaucauacagag

SEQ ID NO: 860101 - RNA, 19 nt, Artificial Sequence
  Description of Artificial Sequence: Synthetic oligonucleotide
uguuggaauucaaagggcc

SEQ ID NO: 860102 - RNA, 19 nt, Artificial Sequence
  Description of Artificial Sequence: Synthetic oligonucleotide
agcgauguaauguugaaga

SEQ ID NO: 860103 - RNA, 19 nt, Artificial Sequence
  Description of Artificial Sequence: Synthetic oligonucleotide
aaucgagucacugaaguug

SEQ ID NO: 860104 - RNA, 19 nt, Artificial Sequence
  Description of Artificial Sequence: Synthetic oligonucleotide
gaaaccaugaguuguuggc

SEQ ID NO: 860105 - RNA, 19 nt, Artificial Sequence
  Description of Artificial Sequence: Synthetic oligonucleotide
caaggcauacuguacaacg

SEQ ID NO: 860106 - RNA, 19 nt, Artificial Sequence
  Description of Artificial Sequence: Synthetic oligonucleotide
aaguaguuauauuacaguu

SEQ ID NO: 860107 - RNA, 19 nt, Artificial Sequence
  Description of Artificial Sequence: Synthetic oligonucleotide
uccaaauaggaccuuaggu

SEQ ID NO: 860108 - RNA, 19 nt, Artificial Sequence
  Description of Artificial Sequence: Synthetic oligonucleotide
gaauauccgagcuuggaug

SEQ ID NO: 860109 - RNA, 19 nt, Artificial Sequence
  Description of Artificial Sequence: Synthetic oligonucleotide
aaaugagucaauguucucu

SEQ ID NO: 860110 - RNA, 19 nt, Artificial Sequence
  Description of Artificial Sequence: Synthetic oligonucleotide
cauugaugcaguaagugac

SEQ ID NO: 860111 - RNA, 19 nt, Artificial Sequence
  Description of Artificial Sequence: Synthetic oligonucleotide
aauauccgagcuuggaugu

SEQ ID NO: 860112 - RNA, 19 nt, Artificial Sequence
  Description of Artificial Sequence: Synthetic oligonucleotide
ugaaucgagucacugaagu

SEQ ID NO: 860113 - RNA, 19 nt, Artificial Sequence
  Description of Artificial Sequence: Synthetic oligonucleotide
aucguuguagagaugaugg

SEQ ID NO: 860114 - RNA, 19 nt, Artificial Sequence
  Description of Artificial Sequence: Synthetic oligonucleotide
caagcucauacaaugcucg

SEQ ID NO: 860115 - RNA, 19 nt, Artificial Sequence
  Description of Artificial Sequence: Synthetic oligonucleotide
gauguuucgagcccgaaga

SEQ ID NO: 860116 - RNA, 19 nt, Artificial Sequence
  Description of Artificial Sequence: Synthetic oligonucleotide
uuggcucuaaccaggaacc

SEQ ID NO: 860117 - RNA, 19 nt, Artificial Sequence
  Description of Artificial Sequence: Synthetic oligonucleotide
agcaacgaaaaggacaucg

SEQ ID NO: 860118 - RNA, 19 nt, Artificial Sequence
  Description of Artificial Sequence: Synthetic oligonucleotide
gaaaucguuguagagauga

SEQ ID NO: 860119 - RNA, 19 nt, Artificial Sequence
  Description of Artificial Sequence: Synthetic oligonucleotide
accuuaacaugucaucugg

SEQ ID NO: 860120 - RNA, 19 nt, Artificial Sequence
  Description of Artificial Sequence: Synthetic oligonucleotide
uagaauacucuguggagcc

SEQ ID NO: 860121 - RNA, 19 nt, Artificial Sequence
  Description of Artificial Sequence: Synthetic oligonucleotide
auguagaauacucugugga

SEQ ID NO: 860122 - RNA, 19 nt, Artificial Sequence
  Description of Artificial Sequence: Synthetic oligonucleotide
uuuaucguaauuccuggua

SEQ ID NO: 860123 - RNA, 19 nt, Artificial Sequence
  Description of Artificial Sequence: Synthetic oligonucleotide
acguaagucguguugguag

SEQ ID NO: 860124 - RNA, 19 nt, Artificial Sequence
  Description of Artificial Sequence: Synthetic oligonucleotide
aacuaggaauauccgagcu

SEQ ID NO: 860125 - RNA, 19 nt, Artificial Sequence
  Description of Artificial Sequence: Synthetic oligonucleotide
aacaugucaucuggggacc

SEQ ID NO: 860126 - RNA, 19 nt, Artificial Sequence
  Description of Artificial Sequence: Synthetic oligonucleotide
ugacucaguucaaaggcag

SEQ ID NO: 860127 - RNA, 19 nt, Artificial Sequence
  Description of Artificial Sequence: Synthetic oligonucleotide
acaacugagcacugugggc

SEQ ID NO: 860128 - RNA, 19 nt, Artificial Sequence
  Description of Artificial Sequence: Synthetic oligonucleotide
ucuaaccaggaacccauag

SEQ ID NO: 860129 - RNA, 19 nt, Artificial Sequence
  Description of Artificial Sequence: Synthetic oligonucleotide
aguacaacugagcacugug

SEQ ID NO: 860130 - RNA, 19 nt, Artificial Sequence
  Description of Artificial Sequence: Synthetic oligonucleotide
aguaagacacggcuccugg

SEQ ID NO: 860131 - RNA, 19 nt, Artificial Sequence
  Description of Artificial Sequence: Synthetic oligonucleotide
guagagaugaugguggaag

SEQ ID NO: 860132 - RNA, 19 nt, Artificial Sequence
  Description of Artificial Sequence: Synthetic oligonucleotide
uuaucguaauuccugguau

SEQ ID NO: 860133 - RNA, 19 nt, Artificial Sequence
  Description of Artificial Sequence: Synthetic oligonucleotide
agguaucccaagaaaaggc

SEQ ID NO: 860134 - RNA, 19 nt, Artificial Sequence
  Description of Artificial Sequence: Synthetic oligonucleotide
ucuuaaggccaccuguccc

SEQ ID NO: 860135 - RNA, 19 nt, Artificial Sequence
  Description of Artificial Sequence: Synthetic oligonucleotide
gagguaucccaagaaaagg

SEQ ID NO: 860136 - RNA, 19 nt, Artificial Sequence
  Description of Artificial Sequence: Synthetic oligonucleotide
cauguagaauacucugugg

SEQ ID NO: 860137 - RNA, 19 nt, Artificial Sequence
  Description of Artificial Sequence: Synthetic oligonucleotide
gucacguuaauguucucag

SEQ ID NO: 860138 - RNA, 19 nt, Artificial Sequence
  Description of Artificial Sequence: Synthetic oligonucleotide
ugagcugccaauguaguca

SEQ ID NO: 860139 - RNA, 19 nt, Artificial Sequence
  Description of Artificial Sequence: Synthetic oligonucleotide
guaguuauauuacaguuua

SEQ ID NO: 860140 - RNA, 19 nt, Artificial Sequence
  Description of Artificial Sequence: Synthetic oligonucleotide
uacccaugaguaaucauac

SEQ ID NO: 860141 - RNA, 19 nt, Artificial Sequence
  Description of Artificial Sequence: Synthetic oligonucleotide
aaucguuguagagaugaug

SEQ ID NO: 860142 - RNA, 19 nt, Artificial Sequence
  Description of Artificial Sequence: Synthetic oligonucleotide
uuguuggaauucaaagggc

SEQ ID NO: 860143 - RNA, 19 nt, Artificial Sequence
  Description of Artificial Sequence: Synthetic oligonucleotide
gauguaauguugaagaggu

SEQ ID NO: 860144 - RNA, 19 nt, Artificial Sequence
  Description of Artificial Sequence: Synthetic oligonucleotide
cuaggaauauccgagcuug

SEQ ID NO: 860145 - RNA, 19 nt, Artificial Sequence
  Description of Artificial Sequence: Synthetic oligonucleotide
aaaggaccggcuauccagc

SEQ ID NO: 860146 - RNA, 19 nt, Artificial Sequence
  Description of Artificial Sequence: Synthetic oligonucleotide
guuggcucuaaccaggaac

SEQ ID NO: 860147 - RNA, 19 nt, Artificial Sequence
  Description of Artificial Sequence: Synthetic oligonucleotide
gauaagagguaucccaaga

SEQ ID NO: 860148 - RNA, 19 nt, Artificial Sequence
  Description of Artificial Sequence: Synthetic oligonucleotide
agacguguaacuguuuggg

SEQ ID NO: 860149 - RNA, 19 nt, Artificial Sequence
  Description of Artificial Sequence: Synthetic oligonucleotide
cagagugaccagaaggucc

SEQ ID NO: 860150 - RNA, 19 nt, Artificial Sequence
  Description of Artificial Sequence: Synthetic oligonucleotide
cugguaauaccgguuaugg

SEQ ID NO: 860151 - RNA, 19 nt, Artificial Sequence
  Description of Artificial Sequence: Synthetic oligonucleotide
ucaaucccagucuaagaca

SEQ ID NO: 860152 - RNA, 19 nt, Artificial Sequence
  Description of Artificial Sequence: Synthetic oligonucleotide
uucaaagggccuuguaccc

SEQ ID NO: 860153 - RNA, 19 nt, Artificial Sequence
  Description of Artificial Sequence: Synthetic oligonucleotide
uaauaccgguuauggaagg

SEQ ID NO: 860154 - RNA, 19 nt, Artificial Sequence
  Description of Artificial Sequence: Synthetic oligonucleotide
ucucuagccgcacaggaaa

SEQ ID NO: 860155 - RNA, 19 nt, Artificial Sequence
  Description of Artificial Sequence: Synthetic oligonucleotide
uucgagcccgaagaaaucg

SEQ ID NO: 860156 - RNA, 19 nt, Artificial Sequence
  Description of Artificial Sequence: Synthetic oligonucleotide
uguacaacguaagucgugu

SEQ ID NO: 860157 - RNA, 19 nt, Artificial Sequence
  Description of Artificial Sequence: Synthetic oligonucleotide
gguaauaccgguuauggaa

SEQ ID NO: 860158 - RNA, 19 nt, Artificial Sequence
  Description of Artificial Sequence: Synthetic oligonucleotide
guagaauacucuguggagc

SEQ ID NO: 860159 - RNA, 19 nt, Artificial Sequence
  Description of Artificial Sequence: Synthetic oligonucleotide
auaggaaagggucuccccu

SEQ ID NO: 860160 - RNA, 19 nt, Artificial Sequence
  Description of Artificial Sequence: Synthetic oligonucleotide
aaggaccggcuauccagcc

SEQ ID NO: 860161 - RNA, 19 nt, Artificial Sequence
  Description of Artificial Sequence: Synthetic oligonucleotide
aagacacggcuccuggcuc

SEQ ID NO: 860162 - RNA, 19 nt, Artificial Sequence
  Description of Artificial Sequence: Synthetic oligonucleotide
cucuccaaggguucgggcg

SEQ ID NO: 860163 - RNA, 19 nt, Artificial Sequence
  Description of Artificial Sequence: Synthetic oligonucleotide
ucauacaaugcucgugcca

SEQ ID NO: 860164 - RNA, 19 nt, Artificial Sequence
  Description of Artificial Sequence: Synthetic oligonucleotide
agauaagagguaucccaag

SEQ ID NO: 860165 - RNA, 19 nt, Artificial Sequence
  Description of Artificial Sequence: Synthetic oligonucleotide
acguguaacuguuugggga

SEQ ID NO: 860166 - RNA, 19 nt, Artificial Sequence
  Description of Artificial Sequence: Synthetic oligonucleotide
gacguguaacuguuugggg

SEQ ID NO: 860167 - RNA, 19 nt, Artificial Sequence
  Description of Artificial Sequence: Synthetic oligonucleotide
guaauaccgguuauggaag

SEQ ID NO: 860168 - RNA, 19 nt, Artificial Sequence
  Description of Artificial Sequence: Synthetic oligonucleotide
gauucugucuccugaggac

SEQ ID NO: 860169 - RNA, 19 nt, Artificial Sequence
  Description of Artificial Sequence: Synthetic oligonucleotide
auaggucacguuaauguuc

SEQ ID NO: 860170 - RNA, 19 nt, Artificial Sequence
  Description of Artificial Sequence: Synthetic oligonucleotide
augaguaaucauacagagc

SEQ ID NO: 860171 - RNA, 19 nt, Artificial Sequence
  Description of Artificial Sequence: Synthetic oligonucleotide
uuauggaaggaaccagagu

SEQ ID NO: 860172 - RNA, 19 nt, Artificial Sequence
  Description of Artificial Sequence: Synthetic oligonucleotide
acguuaauguucucagcag

SEQ ID NO: 860173 - RNA, 19 nt, Artificial Sequence
  Description of Artificial Sequence: Synthetic oligonucleotide
aggacaucggcuuuggcau

SEQ ID NO: 860174 - RNA, 19 nt, Artificial Sequence
  Description of Artificial Sequence: Synthetic oligonucleotide
uacuguggagcgcacacac

SEQ ID NO: 860175 - RNA, 19 nt, Artificial Sequence
  Description of Artificial Sequence: Synthetic oligonucleotide
ccaaauaggaccuuagguc

SEQ ID NO: 860176 - RNA, 19 nt, Artificial Sequence
  Description of Artificial Sequence: Synthetic oligonucleotide
uucgccagugccuucgcag

SEQ ID NO: 860177 - RNA, 19 nt, Artificial Sequence
  Description of Artificial Sequence: Synthetic oligonucleotide
guauuagagaaggaggaac

SEQ ID NO: 860178 - RNA, 19 nt, Artificial Sequence
  Description of Artificial Sequence: Synthetic oligonucleotide
ugagaaagacacagcuggc

SEQ ID NO: 860179 - RNA, 19 nt, Artificial Sequence
  Description of Artificial Sequence: Synthetic oligonucleotide
agagcagacguguaacugu

SEQ ID NO: 860180 - RNA, 19 nt, Artificial Sequence
  Description of Artificial Sequence: Synthetic oligonucleotide
agauguuucgagcccgaag

SEQ ID NO: 860181 - RNA, 19 nt, Artificial Sequence
  Description of Artificial Sequence: Synthetic oligonucleotide
gaacccauagagcagacgu

SEQ ID NO: 860182 - RNA, 19 nt, Artificial Sequence
  Description of Artificial Sequence: Synthetic oligonucleotide
uggcaacuaggaauauccg

SEQ ID NO: 860183 - RNA, 19 nt, Artificial Sequence
  Description of Artificial Sequence: Synthetic oligonucleotide
uuuuaucguaauuccuggu

SEQ ID NO: 860184 - RNA, 19 nt, Artificial Sequence
  Description of Artificial Sequence: Synthetic oligonucleotide
acugaucuaggaaaugaag

SEQ ID NO: 860185 - RNA, 19 nt, Artificial Sequence
  Description of Artificial Sequence: Synthetic oligonucleotide
cacguuaauguucucagca

SEQ ID NO: 860186 - RNA, 19 nt, Artificial Sequence
  Description of Artificial Sequence: Synthetic oligonucleotide
cuuagguccugucugagga

SEQ ID NO: 860187 - RNA, 19 nt, Artificial Sequence
  Description of Artificial Sequence: Synthetic oligonucleotide
uccuaguggaacaacugau

SEQ ID NO: 860188 - RNA, 19 nt, Artificial Sequence
  Description of Artificial Sequence: Synthetic oligonucleotide
ugcaguaagugacgaugag

SEQ ID NO: 860189 - RNA, 19 nt, Artificial Sequence
  Description of Artificial Sequence: Synthetic oligonucleotide
aaacaucacauugcggggu

SEQ ID NO: 860190 - RNA, 19 nt, Artificial Sequence
  Description of Artificial Sequence: Synthetic oligonucleotide
accgguuauggaaggaacc

SEQ ID NO: 860191 - RNA, 19 nt, Artificial Sequence
  Description of Artificial Sequence: Synthetic oligonucleotide
gcaacuaggaauauccgag

SEQ ID NO: 860192 - RNA, 19 nt, Artificial Sequence
  Description of Artificial Sequence: Synthetic oligonucleotide
acaucggaugccuugugca

SEQ ID NO: 860193 - RNA, 19 nt, Artificial Sequence
  Description of Artificial Sequence: Synthetic oligonucleotide
caacuaggaauauccgagc

SEQ ID NO: 860194 - RNA, 19 nt, Artificial Sequence
  Description of Artificial Sequence: Synthetic oligonucleotide
aggacaacuucagggacac

SEQ ID NO: 860195 - RNA, 19 nt, Artificial Sequence
  Description of Artificial Sequence: Synthetic oligonucleotide
aagauaagagguaucccaa

SEQ ID NO: 860196 - RNA, 19 nt, Artificial Sequence
  Description of Artificial Sequence: Synthetic oligonucleotide
auguucucuagccgcacag

SEQ ID NO: 860197 - RNA, 19 nt, Artificial Sequence
  Description of Artificial Sequence: Synthetic oligonucleotide
gcucauacaaugcucgugc

SEQ ID NO: 860198 - RNA, 19 nt, Artificial Sequence
  Description of Artificial Sequence: Synthetic oligonucleotide
cauaggaaagggucucccc

SEQ ID NO: 860199 - RNA, 19 nt, Artificial Sequence
  Description of Artificial Sequence: Synthetic oligonucleotide
cagacguguaacuguuugg

SEQ ID NO: 860200 - RNA, 19 nt, Artificial Sequence
  Description of Artificial Sequence: Synthetic oligonucleotide
agcaugcccaccuuaacau

SEQ ID NO: 860201 - RNA, 19 nt, Artificial Sequence
  Description of Artificial Sequence: Synthetic oligonucleotide
ugcaaagauaagagguauc

SEQ ID NO: 860202 - RNA, 19 nt, Artificial Sequence
  Description of Artificial Sequence: Synthetic oligonucleotide
cccaugaguaaucauacag

SEQ ID NO: 860203 - RNA, 19 nt, Artificial Sequence
  Description of Artificial Sequence: Synthetic oligonucleotide
agagaucuagugaaguucu

SEQ ID NO: 860204 - RNA, 19 nt, Artificial Sequence
  Description of Artificial Sequence: Synthetic oligonucleotide
cuguuuggggaucagccug

SEQ ID NO: 860205 - RNA, 19 nt, Artificial Sequence
  Description of Artificial Sequence: Synthetic oligonucleotide
guaucccaagaaaaggcag

SEQ ID NO: 860206 - RNA, 19 nt, Artificial Sequence
  Description of Artificial Sequence: Synthetic oligonucleotide
ugucauaaaugcucuggua

SEQ ID NO: 860207 - RNA, 19 nt, Artificial Sequence
  Description of Artificial Sequence: Synthetic oligonucleotide
guacaacugagcacugugg

SEQ ID NO: 860208 - RNA, 19 nt, Artificial Sequence
  Description of Artificial Sequence: Synthetic oligonucleotide
agugucugucacaaaguuc

SEQ ID NO: 860209 - RNA, 19 nt, Artificial Sequence
  Description of Artificial Sequence: Synthetic oligonucleotide
agcaggaagcuuuuaucgu

SEQ ID NO: 860210 - RNA, 19 nt, Artificial Sequence
  Description of Artificial Sequence: Synthetic oligonucleotide
ucacguuaauguucucagc

SEQ ID NO: 860211 - RNA, 19 nt, Artificial Sequence
  Description of Artificial Sequence: Synthetic oligonucleotide
uaccgguuauggaaggaac

SEQ ID NO: 860212 - RNA, 19 nt, Artificial Sequence
  Description of Artificial Sequence: Synthetic oligonucleotide
aggcuacagcacuuucugc

SEQ ID NO: 860213 - RNA, 19 nt, Artificial Sequence
  Description of Artificial Sequence: Synthetic oligonucleotide
gaagagguccaucauccaa

SEQ ID NO: 860214 - RNA, 19 nt, Artificial Sequence
  Description of Artificial Sequence: Synthetic oligonucleotide
uacccaccuaacagcaugc

SEQ ID NO: 860215 - RNA, 19 nt, Artificial Sequence
  Description of Artificial Sequence: Synthetic oligonucleotide
ugacagcgauguaauguug

SEQ ID NO: 860216 - RNA, 19 nt, Artificial Sequence
  Description of Artificial Sequence: Synthetic oligonucleotide
uguucucuagccgcacagg

SEQ ID NO: 860217 - RNA, 19 nt, Artificial Sequence
  Description of Artificial Sequence: Synthetic oligonucleotide
aggaccuuagguccugucu

SEQ ID NO: 860218 - RNA, 19 nt, Artificial Sequence
  Description of Artificial Sequence: Synthetic oligonucleotide
aguaaucauacagagccuu

SEQ ID NO: 860219 - RNA, 19 nt, Artificial Sequence
  Description of Artificial Sequence: Synthetic oligonucleotide
aaggcauacuguacaacgu

SEQ ID NO: 860220 - RNA, 19 nt, Artificial Sequence
  Description of Artificial Sequence: Synthetic oligonucleotide
uguaacuguuuggggauca

SEQ ID NO: 860221 - RNA, 19 nt, Artificial Sequence
  Description of Artificial Sequence: Synthetic oligonucleotide
uucgcagugucugucacaa

SEQ ID NO: 860222 - RNA, 19 nt, Artificial Sequence
  Description of Artificial Sequence: Synthetic oligonucleotide
acaggaaacuugccguucu

SEQ ID NO: 860223 - RNA, 19 nt, Artificial Sequence
  Description of Artificial Sequence: Synthetic oligonucleotide
cuuguacccaugaguaauc

SEQ ID NO: 860224 - RNA, 19 nt, Artificial Sequence
  Description of Artificial Sequence: Synthetic oligonucleotide
aauaccgguuauggaagga

SEQ ID NO: 860225 - RNA, 19 nt, Artificial Sequence
  Description of Artificial Sequence: Synthetic oligonucleotide
ucucagcagugucauaaau

SEQ ID NO: 860226 - RNA, 19 nt, Artificial Sequence
  Description of Artificial Sequence: Synthetic oligonucleotide
aaauaggaccuuagguccu

SEQ ID NO: 860227 - RNA, 19 nt, Artificial Sequence
  Description of Artificial Sequence: Synthetic oligonucleotide
cucauacaaugcucgugcc

SEQ ID NO: 860228 - RNA, 19 nt, Artificial Sequence
  Description of Artificial Sequence: Synthetic oligonucleotide
uuacuuggauccuggcacu

SEQ ID NO: 860229 - RNA, 19 nt, Artificial Sequence
  Description of Artificial Sequence: Synthetic oligonucleotide
caccagagauguuucgagc

SEQ ID NO: 860230 - RNA, 19 nt, Artificial Sequence
  Description of Artificial Sequence: Synthetic oligonucleotide
agcgcacacaccgagggag

SEQ ID NO: 860231 - RNA, 19 nt, Artificial Sequence
  Description of Artificial Sequence: Synthetic oligonucleotide
cuuaaggccaccuguccca

SEQ ID NO: 860232 - RNA, 19 nt, Artificial Sequence
  Description of Artificial Sequence: Synthetic oligonucleotide
ucagguuugccaaggcaua

SEQ ID NO: 860233 - RNA, 19 nt, Artificial Sequence
  Description of Artificial Sequence: Synthetic oligonucleotide
ggauaggucacguuaaugu

SEQ ID NO: 860234 - RNA, 19 nt, Artificial Sequence
  Description of Artificial Sequence: Synthetic oligonucleotide
gaugcaaagauaagaggua

SEQ ID NO: 860235 - RNA, 19 nt, Artificial Sequence
  Description of Artificial Sequence: Synthetic oligonucleotide
uaagucguguugguagggc

SEQ ID NO: 860236 - RNA, 19 nt, Artificial Sequence
  Description of Artificial Sequence: Synthetic oligonucleotide
gucauagaccauccuugag

SEQ ID NO: 860237 - RNA, 19 nt, Artificial Sequence
  Description of Artificial Sequence: Synthetic oligonucleotide
aucacauugcgggguaggg

SEQ ID NO: 860238 - RNA, 19 nt, Artificial Sequence
  Description of Artificial Sequence: Synthetic oligonucleotide
uggagcgcacacaccgagg

SEQ ID NO: 860239 - RNA, 19 nt, Artificial Sequence
  Description of Artificial Sequence: Synthetic oligonucleotide
ucucggggagcaacgaaaa

SEQ ID NO: 860240 - RNA, 19 nt, Artificial Sequence
  Description of Artificial Sequence: Synthetic oligonucleotide
cagagauguuucgagcccg

SEQ ID NO: 860241 - RNA, 19 nt, Artificial Sequence
  Description of Artificial Sequence: Synthetic oligonucleotide
cugaaucgagucacugaag

SEQ ID NO: 860242 - RNA, 19 nt, Artificial Sequence
  Description of Artificial Sequence: Synthetic oligonucleotide
uggccagccguacugugga

SEQ ID NO: 860243 - RNA, 19 nt, Artificial Sequence
  Description of Artificial Sequence: Synthetic oligonucleotide
uucucuagccgcacaggaa

SEQ ID NO: 860244 - RNA, 19 nt, Artificial Sequence
  Description of Artificial Sequence: Synthetic oligonucleotide
acuaggaauauccgagcuu

SEQ ID NO: 860245 - RNA, 19 nt, Artificial Sequence
  Description of Artificial Sequence: Synthetic oligonucleotide
uaguuauauuacaguuuaa

SEQ ID NO: 860246 - RNA, 19 nt, Artificial Sequence
  Description of Artificial Sequence: Synthetic oligonucleotide
uugggacuuuacuuggauc

SEQ ID NO: 860247 - RNA, 19 nt, Artificial Sequence
  Description of Artificial Sequence: Synthetic oligonucleotide
gaucagccugaaucgaguc

SEQ ID NO: 860248 - RNA, 19 nt, Artificial Sequence
  Description of Artificial Sequence: Synthetic oligonucleotide
uaucguaauuccugguauu

SEQ ID NO: 860249 - RNA, 19 nt, Artificial Sequence
  Description of Artificial Sequence: Synthetic oligonucleotide
cuguacaacguaagucgug

SEQ ID NO: 860250 - RNA, 19 nt, Artificial Sequence
  Description of Artificial Sequence: Synthetic oligonucleotide
ggaccggcuauccagccgg

SEQ ID NO: 860251 - RNA, 19 nt, Artificial Sequence
  Description of Artificial Sequence: Synthetic oligonucleotide
ggaacaacugaucuaggaa

SEQ ID NO: 860252 - RNA, 19 nt, Artificial Sequence
  Description of Artificial Sequence: Synthetic oligonucleotide
cucaggauaggucacguua

SEQ ID NO: 860253 - RNA, 19 nt, Artificial Sequence
  Description of Artificial Sequence: Synthetic oligonucleotide
aaugcucgugccagcacug

SEQ ID NO: 860254 - RNA, 19 nt, Artificial Sequence
  Description of Artificial Sequence: Synthetic oligonucleotide
cauagaccauccuugagcu

SEQ ID NO: 860255 - RNA, 19 nt, Artificial Sequence
  Description of Artificial Sequence: Synthetic oligonucleotide
ggaccuuagguccugucug

SEQ ID NO: 860256 - RNA, 19 nt, Artificial Sequence
  Description of Artificial Sequence: Synthetic oligonucleotide
ucguuguagagaugauggu

SEQ ID NO: 860257 - RNA, 19 nt, Artificial Sequence
  Description of Artificial Sequence: Synthetic oligonucleotide
guaaucauacagagccuug

SEQ ID NO: 860258 - RNA, 19 nt, Artificial Sequence
  Description of Artificial Sequence: Synthetic oligonucleotide
guucucuagccgcacagga

SEQ ID NO: 860259 - RNA, 19 nt, Artificial Sequence
  Description of Artificial Sequence: Synthetic oligonucleotide
gggaguuaaaacaggagca

SEQ ID NO: 860260 - RNA, 19 nt, Artificial Sequence
  Description of Artificial Sequence: Synthetic oligonucleotide
acagucauccaugugucaa

SEQ ID NO: 860261 - RNA, 19 nt, Artificial Sequence
  Description of Artificial Sequence: Synthetic oligonucleotide
uaggaaagggucuccccuc

SEQ ID NO: 860262 - RNA, 19 nt, Artificial Sequence
  Description of Artificial Sequence: Synthetic oligonucleotide
cauacagagccuugcucuc

SEQ ID NO: 860263 - RNA, 19 nt, Artificial Sequence
  Description of Artificial Sequence: Synthetic oligonucleotide
uacucuguggagccccacu

SEQ ID NO: 860264 - RNA, 19 nt, Artificial Sequence
  Description of Artificial Sequence: Synthetic oligonucleotide
guaagucguguugguaggg

SEQ ID NO: 860265 - RNA, 19 nt, Artificial Sequence
  Description of Artificial Sequence: Synthetic oligonucleotide
ugagugacauaggaggcua

SEQ ID NO: 860266 - RNA, 19 nt, Artificial Sequence
  Description of Artificial Sequence: Synthetic oligonucleotide
ggaugcaaagauaagaggu

SEQ ID NO: 860267 - RNA, 19 nt, Artificial Sequence
  Description of Artificial Sequence: Synthetic oligonucleotide
caugggaucugugugcauc

SEQ ID NO: 860268 - RNA, 19 nt, Artificial Sequence
  Description of Artificial Sequence: Synthetic oligonucleotide
acccauagagcagacgugu

SEQ ID NO: 860269 - RNA, 19 nt, Artificial Sequence
  Description of Artificial Sequence: Synthetic oligonucleotide
uauccagccggguggcagc

SEQ ID NO: 860270 - RNA, 19 nt, Artificial Sequence
  Description of Artificial Sequence: Synthetic oligonucleotide
cuaguggaacaacugaucu

SEQ ID NO: 860271 - RNA, 19 nt, Artificial Sequence
  Description of Artificial Sequence: Synthetic oligonucleotide
uguacccaugaguaaucau

SEQ ID NO: 860272 - RNA, 19 nt, Artificial Sequence
  Description of Artificial Sequence: Synthetic oligonucleotide
aucugugugcauccagaga

SEQ ID NO: 860273 - RNA, 19 nt, Artificial Sequence
  Description of Artificial Sequence: Synthetic oligonucleotide
aacccauagagcagacgug

SEQ ID NO: 860274 - RNA, 19 nt, Artificial Sequence
  Description of Artificial Sequence: Synthetic oligonucleotide
agagugaccagaagguccu

SEQ ID NO: 860275 - RNA, 19 nt, Artificial Sequence
  Description of Artificial Sequence: Synthetic oligonucleotide
uugagcugccaauguaguc

SEQ ID NO: 860276 - RNA, 19 nt, Artificial Sequence
  Description of Artificial Sequence: Synthetic oligonucleotide
ucaaagggccuuguaccca

SEQ ID NO: 860277 - RNA, 19 nt, Artificial Sequence
  Description of Artificial Sequence: Synthetic oligonucleotide
gcagacguguaacuguuug

SEQ ID NO: 860278 - RNA, 19 nt, Artificial Sequence
  Description of Artificial Sequence: Synthetic oligonucleotide
aaguacaacugagcacugu

SEQ ID NO: 860279 - RNA, 19 nt, Artificial Sequence
  Description of Artificial Sequence: Synthetic oligonucleotide
guacccaugaguaaucaua

SEQ ID NO: 860280 - RNA, 19 nt, Artificial Sequence
  Description of Artificial Sequence: Synthetic oligonucleotide
aagugacgaugagagagaa

SEQ ID NO: 860281 - RNA, 19 nt, Artificial Sequence
  Description of Artificial Sequence: Synthetic oligonucleotide
gcauugaugcaguaaguga

SEQ ID NO: 860282 - RNA, 19 nt, Artificial Sequence
  Description of Artificial Sequence: Synthetic oligonucleotide
aggugggauacccaccuaa

SEQ ID NO: 860283 - RNA, 19 nt, Artificial Sequence
  Description of Artificial Sequence: Synthetic oligonucleotide
uuguacccaugaguaauca

SEQ ID NO: 860284 - RNA, 19 nt, Artificial Sequence
  Description of Artificial Sequence: Synthetic oligonucleotide
ucgagcccgaagaaaucgu

SEQ ID NO: 860285 - RNA, 19 nt, Artificial Sequence
  Description of Artificial Sequence: Synthetic oligonucleotide
agcucauacaaugcucgug

SEQ ID NO: 860286 - RNA, 19 nt, Artificial Sequence
  Description of Artificial Sequence: Synthetic oligonucleotide
aggauagacugaaaccaug

SEQ ID NO: 860287 - RNA, 19 nt, Artificial Sequence
  Description of Artificial Sequence: Synthetic oligonucleotide
aggcauacuguacaacgua

SEQ ID NO: 860288 - RNA, 19 nt, Artificial Sequence
  Description of Artificial Sequence: Synthetic oligonucleotide
aggauaggucacguuaaug

SEQ ID NO: 860289 - RNA, 19 nt, Artificial Sequence
  Description of Artificial Sequence: Synthetic oligonucleotide
cauccuugagcugccaaug

SEQ ID NO: 860290 - RNA, 19 nt, Artificial Sequence
  Description of Artificial Sequence: Synthetic oligonucleotide
gugcuuuguuccuagugga

SEQ ID NO: 860291 - RNA, 19 nt, Artificial Sequence
  Description of Artificial Sequence: Synthetic oligonucleotide
aggaccggcuauccagccg

SEQ ID NO: 860292 - RNA, 19 nt, Artificial Sequence
  Description of Artificial Sequence: Synthetic oligonucleotide
ugacugauucugucuccug

SEQ ID NO: 860293 - RNA, 19 nt, Artificial Sequence
  Description of Artificial Sequence: Synthetic oligonucleotide
gacugaaaccaugaguugu

SEQ ID NO: 860294 - RNA, 19 nt, Artificial Sequence
  Description of Artificial Sequence: Synthetic oligonucleotide
caucacauugcgggguagg

SEQ ID NO: 860295 - RNA, 19 nt, Artificial Sequence
  Description of Artificial Sequence: Synthetic oligonucleotide
ggcaacuaggaauauccga

SEQ ID NO: 860296 - RNA, 19 nt, Artificial Sequence
  Description of Artificial Sequence: Synthetic oligonucleotide
ugguuugacccugaugcuc

SEQ ID NO: 860297 - RNA, 19 nt, Artificial Sequence
  Description of Artificial Sequence: Synthetic oligonucleotide
gucguguugguagggcugg

SEQ ID NO: 860298 - RNA, 19 nt, Artificial Sequence
  Description of Artificial Sequence: Synthetic oligonucleotide
ugcucugguaauaccgguu

SEQ ID NO: 860299 - RNA, 19 nt, Artificial Sequence
  Description of Artificial Sequence: Synthetic oligonucleotide
acaugucaucuggggaccc

SEQ ID NO: 860300 - RNA, 19 nt, Artificial Sequence
  Description of Artificial Sequence: Synthetic oligonucleotide
gauaggucacguuaauguu

SEQ ID NO: 860301 - RNA, 19 nt, Artificial Sequence
  Description of Artificial Sequence: Synthetic oligonucleotide
ugcucgugccagcacugug

SEQ ID NO: 860302 - RNA, 19 nt, Artificial Sequence
  Description of Artificial Sequence: Synthetic oligonucleotide
gagcccgaagaaaucguug

SEQ ID NO: 860303 - RNA, 19 nt, Artificial Sequence
  Description of Artificial Sequence: Synthetic oligonucleotide
ugcccaccuuaacauguca

SEQ ID NO: 860304 - RNA, 19 nt, Artificial Sequence
  Description of Artificial Sequence: Synthetic oligonucleotide
gcaacgaaaaggacaucgg

SEQ ID NO: 860305 - RNA, 19 nt, Artificial Sequence
  Description of Artificial Sequence: Synthetic oligonucleotide
uguagagaugaugguggaa

SEQ ID NO: 860306 - RNA, 19 nt, Artificial Sequence
  Description of Artificial Sequence: Synthetic oligonucleotide
agaucuagugaaguucuua

SEQ ID NO: 860307 - RNA, 19 nt, Artificial Sequence
  Description of Artificial Sequence: Synthetic oligonucleotide
guucuuaaggccaccuguc

SEQ ID NO: 860308 - RNA, 19 nt, Artificial Sequence
  Description of Artificial Sequence: Synthetic oligonucleotide
gcgauguaauguugaagag

SEQ ID NO: 860309 - RNA, 19 nt, Artificial Sequence
  Description of Artificial Sequence: Synthetic oligonucleotide
gacaucggcuuuggcauug

SEQ ID NO: 860310 - RNA, 19 nt, Artificial Sequence
  Description of Artificial Sequence: Synthetic oligonucleotide
acuguacaacguaagucgu

SEQ ID NO: 860311 - RNA, 19 nt, Artificial Sequence
  Description of Artificial Sequence: Synthetic oligonucleotide
aacguaagucguguuggua

SEQ ID NO: 860312 - RNA, 19 nt, Artificial Sequence
  Description of Artificial Sequence: Synthetic oligonucleotide
ucugccgcucaggauaggu

SEQ ID NO: 860313 - RNA, 19 nt, Artificial Sequence
  Description of Artificial Sequence: Synthetic oligonucleotide
cgauguaauguugaagagg

SEQ ID NO: 860314 - RNA, 19 nt, Artificial Sequence
  Description of Artificial Sequence: Synthetic oligonucleotide
ucacauugcgggguagggu

SEQ ID NO: 860315 - RNA, 19 nt, Artificial Sequence
  Description of Artificial Sequence: Synthetic oligonucleotide
aucguaauuccugguauua

SEQ ID NO: 860316 - RNA, 19 nt, Artificial Sequence
  Description of Artificial Sequence: Synthetic oligonucleotide
gaccuuagguccugucuga

SEQ ID NO: 860317 - RNA, 19 nt, Artificial Sequence
  Description of Artificial Sequence: Synthetic oligonucleotide
cagcgauguaauguugaag

SEQ ID NO: 860318 - RNA, 19 nt, Artificial Sequence
  Description of Artificial Sequence: Synthetic oligonucleotide
ccaccuaacagcaugccca

SEQ ID NO: 860319 - RNA, 19 nt, Artificial Sequence
  Description of Artificial Sequence: Synthetic oligonucleotide
gugggauacccaccuaaca

SEQ ID NO: 860320 - RNA, 19 nt, Artificial Sequence
  Description of Artificial Sequence: Synthetic oligonucleotide
auaccgguuauggaaggaa

SEQ ID NO: 860321 - RNA, 19 nt, Artificial Sequence
  Description of Artificial Sequence: Synthetic oligonucleotide
ccaugaguaaucauacaga

SEQ ID NO: 860322 - RNA, 19 nt, Artificial Sequence
  Description of Artificial Sequence: Synthetic oligonucleotide
cucuagccgcacaggaaac

SEQ ID NO: 860323 - RNA, 19 nt, Artificial Sequence
  Description of Artificial Sequence: Synthetic oligonucleotide
aaaucguuguagagaugau

SEQ ID NO: 860324 - RNA, 19 nt, Artificial Sequence
  Description of Artificial Sequence: Synthetic oligonucleotide
gguaucccaagaaaaggca

SEQ ID NO: 860325 - RNA, 19 nt, Artificial Sequence
  Description of Artificial Sequence: Synthetic oligonucleotide
ggacccggggaaaugacag

SEQ ID NO: 860326 - RNA, 19 nt, Artificial Sequence
  Description of Artificial Sequence: Synthetic oligonucleotide
ccuaguggaacaacugauc

SEQ ID NO: 860327 - RNA, 19 nt, Artificial Sequence
  Description of Artificial Sequence: Synthetic oligonucleotide
acccaugaguaaucauaca

SEQ ID NO: 860328 - RNA, 19 nt, Artificial Sequence
  Description of Artificial Sequence: Synthetic oligonucleotide
agacacggcuccuggcucu

SEQ ID NO: 860329 - RNA, 19 nt, Artificial Sequence
  Description of Artificial Sequence: Synthetic oligonucleotide
uuagguccugucugaggau

SEQ ID NO: 860330 - RNA, 19 nt, Artificial Sequence
  Description of Artificial Sequence: Synthetic oligonucleotide
gguuauggaaggaaccaga

SEQ ID NO: 860331 - RNA, 19 nt, Artificial Sequence
  Description of Artificial Sequence: Synthetic oligonucleotide
agucguguugguagggcug

SEQ ID NO: 860332 - RNA, 19 nt, Artificial Sequence
  Description of Artificial Sequence: Synthetic oligonucleotide
ccagccguacuguggagcg

SEQ ID NO: 860333 - RNA, 19 nt, Artificial Sequence
  Description of Artificial Sequence: Synthetic oligonucleotide
guuucgagcccgaagaaau

SEQ ID NO: 860334 - RNA, 19 nt, Artificial Sequence
  Description of Artificial Sequence: Synthetic oligonucleotide
gacccugaugcucaauccu

SEQ ID NO: 860335 - RNA, 19 nt, Artificial Sequence
  Description of Artificial Sequence: Synthetic oligonucleotide
auguaauguugaagagguc

SEQ ID NO: 860336 - RNA, 19 nt, Artificial Sequence
  Description of Artificial Sequence: Synthetic oligonucleotide
uacuuggauccuggcacug

SEQ ID NO: 860337 - RNA, 19 nt, Artificial Sequence
  Description of Artificial Sequence: Synthetic oligonucleotide
acaccgagggagccgcucu

SEQ ID NO: 860338 - RNA, 19 nt, Artificial Sequence
  Description of Artificial Sequence: Synthetic oligonucleotide
cucgggugagguuggucac

SEQ ID NO: 860339 - RNA, 19 nt, Artificial Sequence
  Description of Artificial Sequence: Synthetic oligonucleotide
cucggggagcaacgaaaag

SEQ ID NO: 860340 - RNA, 19 nt, Artificial Sequence
  Description of Artificial Sequence: Synthetic oligonucleotide
cguaagucguguugguagg

SEQ ID NO: 860341 - RNA, 19 nt, Artificial Sequence
  Description of Artificial Sequence: Synthetic oligonucleotide
gcugagugacauaggaggc

SEQ ID NO: 860342 - RNA, 19 nt, Artificial Sequence
  Description of Artificial Sequence: Synthetic oligonucleotide
uagguccugucugaggaua

SEQ ID NO: 860343 - RNA, 19 nt, Artificial Sequence
  Description of Artificial Sequence: Synthetic oligonucleotide
accuaacagcaugcccacc

SEQ ID NO: 860344 - RNA, 19 nt, Artificial Sequence
  Description of Artificial Sequence: Synthetic oligonucleotide
cacaucguucuuccugguc

SEQ ID NO: 860345 - RNA, 19 nt, Artificial Sequence
  Description of Artificial Sequence: Synthetic oligonucleotide
aggaagcuuuuaucguaau

SEQ ID NO: 860346 - RNA, 19 nt, Artificial Sequence
  Description of Artificial Sequence: Synthetic oligonucleotide
caucguucuuccuggucca

SEQ ID NO: 860347 - RNA, 19 nt, Artificial Sequence
  Description of Artificial Sequence: Synthetic oligonucleotide
gagacaguccagugaaaau

SEQ ID NO: 860348 - RNA, 19 nt, Artificial Sequence
  Description of Artificial Sequence: Synthetic oligonucleotide
agccguacuguggagcgca

SEQ ID NO: 860349 - RNA, 19 nt, Artificial Sequence
  Description of Artificial Sequence: Synthetic oligonucleotide
guccaucauccaaauagga

SEQ ID NO: 860350 - RNA, 19 nt, Artificial Sequence
  Description of Artificial Sequence: Synthetic oligonucleotide
ccugaaucgagucacugaa

SEQ ID NO: 860351 - RNA, 19 nt, Artificial Sequence
  Description of Artificial Sequence: Synthetic oligonucleotide
ucgggcgggugguuugacc

SEQ ID NO: 860352 - RNA, 19 nt, Artificial Sequence
  Description of Artificial Sequence: Synthetic oligonucleotide
ugugggcuagaggugggau

SEQ ID NO: 860353 - RNA, 19 nt, Artificial Sequence
  Description of Artificial Sequence: Synthetic oligonucleotide
accauccuugagcugccaa

SEQ ID NO: 860354 - RNA, 19 nt, Artificial Sequence
  Description of Artificial Sequence: Synthetic oligonucleotide
ucgggugagguuggucacc

SEQ ID NO: 860355 - RNA, 19 nt, Artificial Sequence
  Description of Artificial Sequence: Synthetic oligonucleotide
cucggcccauguagaauac

SEQ ID NO: 860356 - RNA, 19 nt, Artificial Sequence
  Description of Artificial Sequence: Synthetic oligonucleotide
agaaaucguuguagagaug

SEQ ID NO: 860357 - RNA, 19 nt, Artificial Sequence
  Description of Artificial Sequence: Synthetic oligonucleotide
gaaucgagucacugaaguu

SEQ ID NO: 860358 - RNA, 19 nt, Artificial Sequence
  Description of Artificial Sequence: Synthetic oligonucleotide
ggcuagaggugggauaccc

SEQ ID NO: 860359 - RNA, 19 nt, Artificial Sequence
  Description of Artificial Sequence: Synthetic oligonucleotide
cacaggaaacuugccguuc

SEQ ID NO: 860360 - RNA, 19 nt, Artificial Sequence
  Description of Artificial Sequence: Synthetic oligonucleotide
acaucacauugcgggguag

SEQ ID NO: 860361 - RNA, 19 nt, Artificial Sequence
  Description of Artificial Sequence: Synthetic oligonucleotide
uaggaccuuagguccuguc

SEQ ID NO: 860362 - RNA, 19 nt, Artificial Sequence
  Description of Artificial Sequence: Synthetic oligonucleotide
cacggcuccuggcucucgg

SEQ ID NO: 860363 - RNA, 19 nt, Artificial Sequence
  Description of Artificial Sequence: Synthetic oligonucleotide
agguuugccaaggcauacu

SEQ ID NO: 860364 - RNA, 19 nt, Artificial Sequence
  Description of Artificial Sequence: Synthetic oligonucleotide
cuggcucucggggagcaac

SEQ ID NO: 860365 - RNA, 19 nt, Artificial Sequence
  Description of Artificial Sequence: Synthetic oligonucleotide
ggagcaacgaaaaggacau

SEQ ID NO: 860366 - RNA, 19 nt, Artificial Sequence
  Description of Artificial Sequence: Synthetic oligonucleotide
gggaucagccugaaucgag

SEQ ID NO: 860367 - RNA, 19 nt, Artificial Sequence
  Description of Artificial Sequence: Synthetic oligonucleotide
auucgccagugccuucgca

SEQ ID NO: 860368 - RNA, 19 nt, Artificial Sequence
  Description of Artificial Sequence: Synthetic oligonucleotide
cccaccuuaacaugucauc

SEQ ID NO: 860369 - RNA, 19 nt, Artificial Sequence
  Description of Artificial Sequence: Synthetic oligonucleotide
guagggugacagugggauc

SEQ ID NO: 860370 - RNA, 19 nt, Artificial Sequence
  Description of Artificial Sequence: Synthetic oligonucleotide
caccuugccagucagguuu

SEQ ID NO: 860371 - RNA, 19 nt, Artificial Sequence
  Description of Artificial Sequence: Synthetic oligonucleotide
ggacuuuacuuggauccug

SEQ ID NO: 860372 - RNA, 19 nt, Artificial Sequence
  Description of Artificial Sequence: Synthetic oligonucleotide
caggaaacuugccguucuc

SEQ ID NO: 860373 - RNA, 19 nt, Artificial Sequence
  Description of Artificial Sequence: Synthetic oligonucleotide
cauucgccagugccuucgc

SEQ ID NO: 860374 - RNA, 19 nt, Artificial Sequence
  Description of Artificial Sequence: Synthetic oligonucleotide
cagugggaucagagagagg

SEQ ID NO: 860375 - RNA, 19 nt, Artificial Sequence
  Description of Artificial Sequence: Synthetic oligonucleotide
cuucgcagugucugucaca

SEQ ID NO: 860376 - RNA, 19 nt, Artificial Sequence
  Description of Artificial Sequence: Synthetic oligonucleotide
gcaugcccaccuuaacaug

SEQ ID NO: 860377 - RNA, 19 nt, Artificial Sequence
  Description of Artificial Sequence: Synthetic oligonucleotide
uugcgggguaggguggcca

SEQ ID NO: 860378 - RNA, 19 nt, Artificial Sequence
  Description of Artificial Sequence: Synthetic oligonucleotide
cguacuguggagcgcacac

SEQ ID NO: 860379 - RNA, 19 nt, Artificial Sequence
  Description of Artificial Sequence: Synthetic oligonucleotide
gagggagccgcucugucuu

SEQ ID NO: 860380 - RNA, 19 nt, Artificial Sequence
  Description of Artificial Sequence: Synthetic oligonucleotide
aaagggccuuguacccaug

SEQ ID NO: 860381 - RNA, 19 nt, Artificial Sequence
  Description of Artificial Sequence: Synthetic oligonucleotide
ggugggauacccaccuaac

SEQ ID NO: 860382 - RNA, 19 nt, Artificial Sequence
  Description of Artificial Sequence: Synthetic oligonucleotide
gguucgggcgggugguuug

SEQ ID NO: 860383 - RNA, 19 nt, Artificial Sequence
  Description of Artificial Sequence: Synthetic oligonucleotide
ggcauacuguacaacguaa

SEQ ID NO: 860384 - RNA, 19 nt, Artificial Sequence
  Description of Artificial Sequence: Synthetic oligonucleotide
ucggcccauguagaauacu

SEQ ID NO: 860385 - RNA, 19 nt, Artificial Sequence
  Description of Artificial Sequence: Synthetic oligonucleotide
gagcgcacacaccgaggga

SEQ ID NO: 860386 - RNA, 19 nt, Artificial Sequence
  Description of Artificial Sequence: Synthetic oligonucleotide
cgggcgggugguuugaccc

SEQ ID NO: 860387 - RNA, 19 nt, Artificial Sequence
  Description of Artificial Sequence: Synthetic oligonucleotide
agggagccgcucugucuug

SEQ ID NO: 860388 - RNA, 19 nt, Artificial Sequence
  Description of Artificial Sequence: Synthetic oligonucleotide
auaggaccuuagguccugu

SEQ ID NO: 860389 - RNA, 19 nt, Artificial Sequence
  Description of Artificial Sequence: Synthetic oligonucleotide
acaugggaucugugugcau

SEQ ID NO: 860390 - RNA, 19 nt, Artificial Sequence
  Description of Artificial Sequence: Synthetic oligonucleotide
cacauucgccagugccuuc

SEQ ID NO: 860391 - RNA, 19 nt, Artificial Sequence
  Description of Artificial Sequence: Synthetic oligonucleotide
cggcuauccagccgggugg

SEQ ID NO: 860392 - RNA, 19 nt, Artificial Sequence
  Description of Artificial Sequence: Synthetic oligonucleotide
ggcucuaaccaggaaccca

SEQ ID NO: 860393 - RNA, 19 nt, Artificial Sequence
  Description of Artificial Sequence: Synthetic oligonucleotide
gugacugauucugucuccu

SEQ ID NO: 860394 - RNA, 19 nt, Artificial Sequence
  Description of Artificial Sequence: Synthetic oligonucleotide
gaccggcuauccagccggg

SEQ ID NO: 860395 - RNA, 19 nt, Artificial Sequence
  Description of Artificial Sequence: Synthetic oligonucleotide
ccuaacagcaugcccaccu

SEQ ID NO: 860396 - RNA, 19 nt, Artificial Sequence
  Description of Artificial Sequence: Synthetic oligonucleotide
ccggcuauccagccgggug

SEQ ID NO: 860397 - RNA, 19 nt, Artificial Sequence
  Description of Artificial Sequence: Synthetic oligonucleotide
caaagggccuuguacccau

SEQ ID NO: 860398 - RNA, 19 nt, Artificial Sequence
  Description of Artificial Sequence: Synthetic oligonucleotide
cggcccauguagaauacuc

SEQ ID NO: 860399 - RNA, 19 nt, Artificial Sequence
  Description of Artificial Sequence: Synthetic oligonucleotide
cggucagggugauaaacuc

SEQ ID NO: 860400 - RNA, 19 nt, Artificial Sequence
  Description of Artificial Sequence: Synthetic oligonucleotide
caccgagggagccgcucug

SEQ ID NO: 860401 - RNA, 19 nt, Artificial Sequence
  Description of Artificial Sequence: Synthetic oligonucleotide
gcacacaccgagggagccg

SEQ ID NO: 860402 - RNA, 19 nt, Artificial Sequence
  Description of Artificial Sequence: Synthetic oligonucleotide
ccuucgcagugucugucac

SEQ ID NO: 860403 - RNA, 19 nt, Artificial Sequence
  Description of Artificial Sequence: Synthetic oligonucleotide
gagcagacguguaacuguu

SEQ ID NO: 860404 - RNA, 19 nt, Artificial Sequence
  Description of Artificial Sequence: Synthetic oligonucleotide
gagcaacgaaaaggacauc

SEQ ID NO: 860405 - RNA, 19 nt, Artificial Sequence
  Description of Artificial Sequence: Synthetic oligonucleotide
gacccggggaaaugacagu

SEQ ID NO: 860406 - RNA, 19 nt, Artificial Sequence
  Description of Artificial Sequence: Synthetic oligonucleotide
augcucgugccagcacugu

SEQ ID NO: 860407 - RNA, 19 nt, Artificial Sequence
  Description of Artificial Sequence: Synthetic oligonucleotide
acaucggcuuuggcauuga

SEQ ID NO: 860408 - RNA, 19 nt, Artificial Sequence
  Description of Artificial Sequence: Synthetic oligonucleotide
ccagucuaagacagaccca

SEQ ID NO: 860409 - RNA, 19 nt, Artificial Sequence
  Description of Artificial Sequence: Synthetic oligonucleotide
guggagccccacugacuca

SEQ ID NO: 860410 - RNA, 19 nt, Artificial Sequence
  Description of Artificial Sequence: Synthetic oligonucleotide
acacggcuccuggcucucg

SEQ ID NO: 860411 - RNA, 19 nt, Artificial Sequence
  Description of Artificial Sequence: Synthetic oligonucleotide
ggcuauccagccggguggc

SEQ ID NO: 860412 - RNA, 19 nt, Artificial Sequence
  Description of Artificial Sequence: Synthetic oligonucleotide
cgguuauggaaggaaccag

SEQ ID NO: 860413 - RNA, 19 nt, Artificial Sequence
  Description of Artificial Sequence: Synthetic oligonucleotide
cucuaaccaggaacccaua

SEQ ID NO: 860414 - RNA, 19 nt, Artificial Sequence
  Description of Artificial Sequence: Synthetic oligonucleotide
cagccguacuguggagcgc

SEQ ID NO: 860415 - RNA, 19 nt, Artificial Sequence
  Description of Artificial Sequence: Synthetic oligonucleotide
cuggggccacauuccagaa

SEQ ID NO: 860416 - RNA, 19 nt, Artificial Sequence
  Description of Artificial Sequence: Synthetic oligonucleotide
uucgggcgggugguuugac

SEQ ID NO: 860417 - RNA, 19 nt, Artificial Sequence
  Description of Artificial Sequence: Synthetic oligonucleotide
gccuucgcagugucuguca

SEQ ID NO: 860418 - RNA, 19 nt, Artificial Sequence
  Description of Artificial Sequence: Synthetic oligonucleotide
ggaucagccugaaucgagu

SEQ ID NO: 860419 - RNA, 19 nt, Artificial Sequence
  Description of Artificial Sequence: Synthetic oligonucleotide
gcuagaggugggauaccca

SEQ ID NO: 860420 - RNA, 19 nt, Artificial Sequence
  Description of Artificial Sequence: Synthetic oligonucleotide
gccuuguacccaugaguaa

SEQ ID NO: 860421 - RNA, 19 nt, Artificial Sequence
  Description of Artificial Sequence: Synthetic oligonucleotide
ccaccuuaacaugucaucu

SEQ ID NO: 860422 - RNA, 19 nt, Artificial Sequence
  Description of Artificial Sequence: Synthetic oligonucleotide
ggcgggugguuugacccug

SEQ ID NO: 860423 - RNA, 19 nt, Artificial Sequence
  Description of Artificial Sequence: Synthetic oligonucleotide
ggggaucagccugaaucga

SEQ ID NO: 860424 - RNA, 19 nt, Artificial Sequence
  Description of Artificial Sequence: Synthetic oligonucleotide
cuaacagcaugcccaccuu

SEQ ID NO: 860425 - RNA, 19 nt, Artificial Sequence
  Description of Artificial Sequence: Synthetic oligonucleotide
cucugguaauaccgguuau

SEQ ID NO: 860426 - RNA, 19 nt, Artificial Sequence
  Description of Artificial Sequence: Synthetic oligonucleotide
guucgggcgggugguuuga

SEQ ID NO: 860427 - RNA, 19 nt, Artificial Sequence
  Description of Artificial Sequence: Synthetic oligonucleotide
agcagacguguaacuguuu

SEQ ID NO: 860428 - RNA, 19 nt, Artificial Sequence
  Description of Artificial Sequence: Synthetic oligonucleotide
accggcuauccagccgggu

SEQ ID NO: 860429 - RNA, 19 nt, Artificial Sequence
  Description of Artificial Sequence: Synthetic oligonucleotide
gggacccggggaaaugaca

SEQ ID NO: 860430 - RNA, 19 nt, Artificial Sequence
  Description of Artificial Sequence: Synthetic oligonucleotide
cucugccgcucaggauagg

SEQ ID NO: 860431 - RNA, 19 nt, Artificial Sequence
  Description of Artificial Sequence: Synthetic oligonucleotide
gccgaagcccacggucagg

SEQ ID NO: 860432 - RNA, 19 nt, Artificial Sequence
  Description of Artificial Sequence: Synthetic oligonucleotide
cuagccgcacaggaaacuu

SEQ ID NO: 860433 - RNA, 19 nt, Artificial Sequence
  Description of Artificial Sequence: Synthetic oligonucleotide
ggccagccguacuguggag

SEQ ID NO: 860434 - RNA, 19 nt, Artificial Sequence
  Description of Artificial Sequence: Synthetic oligonucleotide
ccgcucaggauaggucacg

SEQ ID NO: 860435 - RNA, 19 nt, Artificial Sequence
  Description of Artificial Sequence: Synthetic oligonucleotide
gagaucuagugaaguucuu

SEQ ID NO: 860436 - RNA, 19 nt, Artificial Sequence
  Description of Artificial Sequence: Synthetic oligonucleotide
gccccuggggccacauucc

SEQ ID NO: 860437 - RNA, 19 nt, Artificial Sequence
  Description of Artificial Sequence: Synthetic oligonucleotide
cugugggcuagagguggga

SEQ ID NO: 860438 - RNA, 19 nt, Artificial Sequence
  Description of Artificial Sequence: Synthetic oligonucleotide
gcucucggggagcaacgaa

SEQ ID NO: 860439 - RNA, 19 nt, Artificial Sequence
  Description of Artificial Sequence: Synthetic oligonucleotide
gggacuuuacuuggauccu

SEQ ID NO: 860440 - RNA, 19 nt, Artificial Sequence
  Description of Artificial Sequence: Synthetic oligonucleotide
cccggggaaaugacaguga

SEQ ID NO: 860441 - RNA, 19 nt, Artificial Sequence
  Description of Artificial Sequence: Synthetic oligonucleotide
cguguaacuguuuggggau

SEQ ID NO: 860442 - RNA, 19 nt, Artificial Sequence
  Description of Artificial Sequence: Synthetic oligonucleotide
ccagagaucuagugaaguu

SEQ ID NO: 860443 - RNA, 19 nt, Artificial Sequence
  Description of Artificial Sequence: Synthetic oligonucleotide
gcgcacacaccgagggagc

SEQ ID NO: 860444 - RNA, 19 nt, Artificial Sequence
  Description of Artificial Sequence: Synthetic oligonucleotide
ggggacccggggaaaugac

SEQ ID NO: 860445 - RNA, 19 nt, Artificial Sequence
  Description of Artificial Sequence: Synthetic oligonucleotide
gggcuagaggugggauacc

SEQ ID NO: 860446 - RNA, 19 nt, Artificial Sequence
  Description of Artificial Sequence: Synthetic oligonucleotide
ggacaacuucagggacacc

SEQ ID NO: 860447 - RNA, 19 nt, Artificial Sequence
  Description of Artificial Sequence: Synthetic oligonucleotide
cagccugaaucgagucacu

SEQ ID NO: 860448 - RNA, 19 nt, Artificial Sequence
  Description of Artificial Sequence: Synthetic oligonucleotide
gcucaauccuucacaucgu

SEQ ID NO: 860449 - RNA, 19 nt, Artificial Sequence
  Description of Artificial Sequence: Synthetic oligonucleotide
cccauagagcagacgugua

SEQ ID NO: 860450 - RNA, 19 nt, Artificial Sequence
  Description of Artificial Sequence: Synthetic oligonucleotide
aggguucgggcgggugguu

SEQ ID NO: 860451 - RNA, 19 nt, Artificial Sequence
  Description of Artificial Sequence: Synthetic oligonucleotide
gggcgggugguuugacccu

SEQ ID NO: 860452 - RNA, 19 nt, Artificial Sequence
  Description of Artificial Sequence: Synthetic oligonucleotide
cggaugccuugugcaaagc

SEQ ID NO: 860453 - RNA, 19 nt, Artificial Sequence
  Description of Artificial Sequence: Synthetic oligonucleotide
gcucaggauaggucacguu

SEQ ID NO: 860454 - RNA, 19 nt, Artificial Sequence
  Description of Artificial Sequence: Synthetic oligonucleotide
ggacaucggcuuuggcauu

SEQ ID NO: 860455 - RNA, 19 nt, Artificial Sequence
  Description of Artificial Sequence: Synthetic oligonucleotide
gcuauccagccggguggca

SEQ ID NO: 860456 - RNA, 19 nt, Artificial Sequence
  Description of Artificial Sequence: Synthetic oligonucleotide
gccguacuguggagcgcac

SEQ ID NO: 860457 - RNA, 19 nt, Artificial Sequence
  Description of Artificial Sequence: Synthetic oligonucleotide
ccaugaguuguuggcucua

SEQ ID NO: 860458 - RNA, 19 nt, Artificial Sequence
  Description of Artificial Sequence: Synthetic oligonucleotide
ccacauucgccagugccuu

SEQ ID NO: 860459 - RNA, 19 nt, Artificial Sequence
  Description of Artificial Sequence: Synthetic oligonucleotide
gcgggugguuugacccuga

SEQ ID NO: 860460 - RNA, 19 nt, Artificial Sequence
  Description of Artificial Sequence: Synthetic oligonucleotide
gggcaacuggggaguuaaa

SEQ ID NO: 860461 - RNA, 19 nt, Artificial Sequence
  Description of Artificial Sequence: Synthetic oligonucleotide
cgagcccgaagaaaucguu

SEQ ID NO: 860462 - RNA, 19 nt, Artificial Sequence
  Description of Artificial Sequence: Synthetic oligonucleotide
ccgcucugucuuguuggaa

SEQ ID NO: 860463 - RNA, 19 nt, Artificial Sequence
  Description of Artificial Sequence: Synthetic oligonucleotide
ggguucgggcgggugguuu

SEQ ID NO: 860464 - RNA, 19 nt, Artificial Sequence
  Description of Artificial Sequence: Synthetic oligonucleotide
aaagaugugucccagugag

SEQ ID NO: 860465 - RNA, 19 nt, Artificial Sequence
  Description of Artificial Sequence: Synthetic oligonucleotide
ucaagcauaacgcaacagg

SEQ ID NO: 860466 - RNA, 19 nt, Artificial Sequence
  Description of Artificial Sequence: Synthetic oligonucleotide
acagaugccacuuagacga

SEQ ID NO: 860467 - RNA, 19 nt, Artificial Sequence
  Description of Artificial Sequence: Synthetic oligonucleotide
aaugaaacccuucugggca

SEQ ID NO: 860468 - RNA, 19 nt, Artificial Sequence
  Description of Artificial Sequence: Synthetic oligonucleotide
ucauggaccugacagaugc

SEQ ID NO: 860469 - RNA, 19 nt, Artificial Sequence
  Description of Artificial Sequence: Synthetic oligonucleotide
ucuagguagggacagcagg

SEQ ID NO: 860470 - RNA, 19 nt, Artificial Sequence
  Description of Artificial Sequence: Synthetic oligonucleotide
uagacgaucgcucauuacc

SEQ ID NO: 860471 - RNA, 19 nt, Artificial Sequence
  Description of Artificial Sequence: Synthetic oligonucleotide
uaacgcaacagguagagga

SEQ ID NO: 860472 - RNA, 19 nt, Artificial Sequence
  Description of Artificial Sequence: Synthetic oligonucleotide
uaugaaucaugucacagaa

SEQ ID NO: 860473 - RNA, 19 nt, Artificial Sequence
  Description of Artificial Sequence: Synthetic oligonucleotide
aagauuucugcaucuagca

SEQ ID NO: 860474 - RNA, 19 nt, Artificial Sequence
  Description of Artificial Sequence: Synthetic oligonucleotide
ucuguaugaaucaugucac

SEQ ID NO: 860475 - RNA, 19 nt, Artificial Sequence
  Description of Artificial Sequence: Synthetic oligonucleotide
agcauaacgcaacagguag

SEQ ID NO: 860476 - RNA, 19 nt, Artificial Sequence
  Description of Artificial Sequence: Synthetic oligonucleotide
uguauuuugucuucacagc

SEQ ID NO: 860477 - RNA, 19 nt, Artificial Sequence
  Description of Artificial Sequence: Synthetic oligonucleotide
agaauaggguugcagcagc

SEQ ID NO: 860478 - RNA, 19 nt, Artificial Sequence
  Description of Artificial Sequence: Synthetic oligonucleotide
uucuuuagucuuuagcccc

SEQ ID NO: 860479 - RNA, 19 nt, Artificial Sequence
  Description of Artificial Sequence: Synthetic oligonucleotide
agcagguagaaucaucagg

SEQ ID NO: 860480 - RNA, 19 nt, Artificial Sequence
  Description of Artificial Sequence: Synthetic oligonucleotide
agcaaguguauccaucugg

SEQ ID NO: 860481 - RNA, 19 nt, Artificial Sequence
  Description of Artificial Sequence: Synthetic oligonucleotide
aguguauccaucugggcag

SEQ ID NO: 860482 - RNA, 19 nt, Artificial Sequence
  Description of Artificial Sequence: Synthetic oligonucleotide
uccagaauaggguugcagc

SEQ ID NO: 860483 - RNA, 19 nt, Artificial Sequence
  Description of Artificial Sequence: Synthetic oligonucleotide
ucaggaggcuaucugaaug

SEQ ID NO: 860484 - RNA, 19 nt, Artificial Sequence
  Description of Artificial Sequence: Synthetic oligonucleotide
ugacagaugccacuuagac

SEQ ID NO: 860485 - RNA, 19 nt, Artificial Sequence
  Description of Artificial Sequence: Synthetic oligonucleotide
uacgugguggacuucuugg

SEQ ID NO: 860486 - RNA, 19 nt, Artificial Sequence
  Description of Artificial Sequence: Synthetic oligonucleotide
uuguuaucuccaauuuggg

SEQ ID NO: 860487 - RNA, 19 nt, Artificial Sequence
  Description of Artificial Sequence: Synthetic oligonucleotide
aaacagccuggacaggagg

SEQ ID NO: 860488 - RNA, 19 nt, Artificial Sequence
  Description of Artificial Sequence: Synthetic oligonucleotide
uacccuuagggaaagggca

SEQ ID NO: 860489 - RNA, 19 nt, Artificial Sequence
  Description of Artificial Sequence: Synthetic oligonucleotide
cauacuucccacuggguag

SEQ ID NO: 860490 - RNA, 19 nt, Artificial Sequence
  Description of Artificial Sequence: Synthetic oligonucleotide
uuaucuccaauuugggaca

SEQ ID NO: 860491 - RNA, 19 nt, Artificial Sequence
  Description of Artificial Sequence: Synthetic oligonucleotide
acgaguaacuuccaggaca

SEQ ID NO: 860492 - RNA, 19 nt, Artificial Sequence
  Description of Artificial Sequence: Synthetic oligonucleotide
uucacguugcagauguacc

SEQ ID NO: 860493 - RNA, 19 nt, Artificial Sequence
  Description of Artificial Sequence: Synthetic oligonucleotide
gaugccacuuagacgaucg

SEQ ID NO: 860494 - RNA, 19 nt, Artificial Sequence
  Description of Artificial Sequence: Synthetic oligonucleotide
uuaccauaggcaauguguc

SEQ ID NO: 860495 - RNA, 19 nt, Artificial Sequence
  Description of Artificial Sequence: Synthetic oligonucleotide
cacagcaugggguaacugg

SEQ ID NO: 860496 - RNA, 19 nt, Artificial Sequence
  Description of Artificial Sequence: Synthetic oligonucleotide
gaaugucggaagcagguug

SEQ ID NO: 860497 - RNA, 19 nt, Artificial Sequence
  Description of Artificial Sequence: Synthetic oligonucleotide
ucgcucauuaccauaggca

SEQ ID NO: 860498 - RNA, 19 nt, Artificial Sequence
  Description of Artificial Sequence: Synthetic oligonucleotide
ucccauccgaacuacagug

SEQ ID NO: 860499 - RNA, 19 nt, Artificial Sequence
  Description of Artificial Sequence: Synthetic oligonucleotide
uguuccagccaccaggccu

SEQ ID NO: 860500 - RNA, 19 nt, Artificial Sequence
  Description of Artificial Sequence: Synthetic oligonucleotide
uacaguggaagccccgggg

SEQ ID NO: 860501 - RNA, 19 nt, Artificial Sequence
  Description of Artificial Sequence: Synthetic oligonucleotide
uguuaucuccaauuuggga

SEQ ID NO: 860502 - RNA, 19 nt, Artificial Sequence
  Description of Artificial Sequence: Synthetic oligonucleotide
cuaaauggacagcagcccc

SEQ ID NO: 860503 - RNA, 19 nt, Artificial Sequence
  Description of Artificial Sequence: Synthetic oligonucleotide
ugguccucacaacacacag

SEQ ID NO: 860504 - RNA, 19 nt, Artificial Sequence
  Description of Artificial Sequence: Synthetic oligonucleotide
uggacagcaaccauacuuc

SEQ ID NO: 860505 - RNA, 19 nt, Artificial Sequence
  Description of Artificial Sequence: Synthetic oligonucleotide
cuaucugaaugucggaagc

SEQ ID NO: 860506 - RNA, 19 nt, Artificial Sequence
  Description of Artificial Sequence: Synthetic oligonucleotide
ucacguugcagauguaccc

SEQ ID NO: 860507 - RNA, 19 nt, Artificial Sequence
  Description of Artificial Sequence: Synthetic oligonucleotide
gcagguagaaucaucaggg

SEQ ID NO: 860508 - RNA, 19 nt, Artificial Sequence
  Description of Artificial Sequence: Synthetic oligonucleotide
auuccggacauucgaauug

SEQ ID NO: 860509 - RNA, 19 nt, Artificial Sequence
  Description of Artificial Sequence: Synthetic oligonucleotide
guauuuugucuucacagca

SEQ ID NO: 860510 - RNA, 19 nt, Artificial Sequence
  Description of Artificial Sequence: Synthetic oligonucleotide
uucgucaaagauguguccc

SEQ ID NO: 860511 - RNA, 19 nt, Artificial Sequence
  Description of Artificial Sequence: Synthetic oligonucleotide
uaguugaggucccaccucc

SEQ ID NO: 860512 - RNA, 19 nt, Artificial Sequence
  Description of Artificial Sequence: Synthetic oligonucleotide
ugaggagacacgaguaacu

SEQ ID NO: 860513 - RNA, 19 nt, Artificial Sequence
  Description of Artificial Sequence: Synthetic oligonucleotide
guguauaugguccucacaa

SEQ ID NO: 860514 - RNA, 19 nt, Artificial Sequence
  Description of Artificial Sequence: Synthetic oligonucleotide
auacccuuagggaaagggc

SEQ ID NO: 860515 - RNA, 19 nt, Artificial Sequence
  Description of Artificial Sequence: Synthetic oligonucleotide
acagcaugggguaacuggc

SEQ ID NO: 860516 - RNA, 19 nt, Artificial Sequence
  Description of Artificial Sequence: Synthetic oligonucleotide
cuugccuucacguugcaga

SEQ ID NO: 860517 - RNA, 19 nt, Artificial Sequence
  Description of Artificial Sequence: Synthetic oligonucleotide
gguauugucaggaggacag

SEQ ID NO: 860518 - RNA, 19 nt, Artificial Sequence
  Description of Artificial Sequence: Synthetic oligonucleotide
gucggaagcagguuguccc

SEQ ID NO: 860519 - RNA, 19 nt, Artificial Sequence
  Description of Artificial Sequence: Synthetic oligonucleotide
ucgaauuggcuaccggggc

SEQ ID NO: 860520 - RNA, 19 nt, Artificial Sequence
  Description of Artificial Sequence: Synthetic oligonucleotide
ggagacacgaguaacuucc

SEQ ID NO: 860521 - RNA, 19 nt, Artificial Sequence
  Description of Artificial Sequence: Synthetic oligonucleotide
uguauaugguccucacaac

SEQ ID NO: 860522 - RNA, 19 nt, Artificial Sequence
  Description of Artificial Sequence: Synthetic oligonucleotide
agauggucggaacagcaga

SEQ ID NO: 860523 - RNA, 19 nt, Artificial Sequence
  Description of Artificial Sequence: Synthetic oligonucleotide
uugggacagaaaugucucg

SEQ ID NO: 860524 - RNA, 19 nt, Artificial Sequence
  Description of Artificial Sequence: Synthetic oligonucleotide
auaggguugcagcagcugu

SEQ ID NO: 860525 - RNA, 19 nt, Artificial Sequence
  Description of Artificial Sequence: Synthetic oligonucleotide
acgacugaccaucuggaca

SEQ ID NO: 860526 - RNA, 19 nt, Artificial Sequence
  Description of Artificial Sequence: Synthetic oligonucleotide
aagcagguugucccauccg

SEQ ID NO: 860527 - RNA, 19 nt, Artificial Sequence
  Description of Artificial Sequence: Synthetic oligonucleotide
gauauacccuuagggaaag

SEQ ID NO: 860528 - RNA, 19 nt, Artificial Sequence
  Description of Artificial Sequence: Synthetic oligonucleotide
ucuuuagucuuuagccccu

SEQ ID NO: 860529 - RNA, 19 nt, Artificial Sequence
  Description of Artificial Sequence: Synthetic oligonucleotide
auccgaacuacaguggaag

SEQ ID NO: 860530 - RNA, 19 nt, Artificial Sequence
  Description of Artificial Sequence: Synthetic oligonucleotide
aggagacacgaguaacuuc

SEQ ID NO: 860531 - RNA, 19 nt, Artificial Sequence
  Description of Artificial Sequence: Synthetic oligonucleotide
uuacucuggaucaggucac

SEQ ID NO: 860532 - RNA, 19 nt, Artificial Sequence
  Description of Artificial Sequence: Synthetic oligonucleotide
acaauagggcacgacugac

SEQ ID NO: 860533 - RNA, 19 nt, Artificial Sequence
  Description of Artificial Sequence: Synthetic oligonucleotide
gaggauuccggacauucga

SEQ ID NO: 860534 - RNA, 19 nt, Artificial Sequence
  Description of Artificial Sequence: Synthetic oligonucleotide
aauaggguugcagcagcug

SEQ ID NO: 860535 - RNA, 19 nt, Artificial Sequence
  Description of Artificial Sequence: Synthetic oligonucleotide
ucuuuagccccuccuuaca

SEQ ID NO: 860536 - RNA, 19 nt, Artificial Sequence
  Description of Artificial Sequence: Synthetic oligonucleotide
acauggucugccugcuucg

SEQ ID NO: 860537 - RNA, 19 nt, Artificial Sequence
  Description of Artificial Sequence: Synthetic oligonucleotide
caauagggcacgacugacc

SEQ ID NO: 860538 - RNA, 19 nt, Artificial Sequence
  Description of Artificial Sequence: Synthetic oligonucleotide
ggcacgacugaccaucugg

SEQ ID NO: 860539 - RNA, 19 nt, Artificial Sequence
  Description of Artificial Sequence: Synthetic oligonucleotide
uuaguugaggucccaccuc

SEQ ID NO: 860540 - RNA, 19 nt, Artificial Sequence
  Description of Artificial Sequence: Synthetic oligonucleotide
ggaagauuucugcaucuag

SEQ ID NO: 860541 - RNA, 19 nt, Artificial Sequence
  Description of Artificial Sequence: Synthetic oligonucleotide
gguagcucacagcagguag

SEQ ID NO: 860542 - RNA, 19 nt, Artificial Sequence
  Description of Artificial Sequence: Synthetic oligonucleotide
gacaauagggcacgacuga

SEQ ID NO: 860543 - RNA, 19 nt, Artificial Sequence
  Description of Artificial Sequence: Synthetic oligonucleotide
acggcauugggcauuggac

SEQ ID NO: 860544 - RNA, 19 nt, Artificial Sequence
  Description of Artificial Sequence: Synthetic oligonucleotide
uucucacaaguccuugccu

SEQ ID NO: 860545 - RNA, 19 nt, Artificial Sequence
  Description of Artificial Sequence: Synthetic oligonucleotide
aggcacuuacucuggauca

SEQ ID NO: 860546 - RNA, 19 nt, Artificial Sequence
  Description of Artificial Sequence: Synthetic oligonucleotide
ucucacaaguccuugccuu

SEQ ID NO: 860547 - RNA, 19 nt, Artificial Sequence
  Description of Artificial Sequence: Synthetic oligonucleotide
gaaucaugucacagaaggc

SEQ ID NO: 860548 - RNA, 19 nt, Artificial Sequence
  Description of Artificial Sequence: Synthetic oligonucleotide
ucgucaaagauguguccca

SEQ ID NO: 860549 - RNA, 19 nt, Artificial Sequence
  Description of Artificial Sequence: Synthetic oligonucleotide
ccuaaggucagguggacag

SEQ ID NO: 860550 - RNA, 19 nt, Artificial Sequence
  Description of Artificial Sequence: Synthetic oligonucleotide
uccuucgaaaacacuuggu

SEQ ID NO: 860551 - RNA, 19 nt, Artificial Sequence
  Description of Artificial Sequence: Synthetic oligonucleotide
cauucgaauuggcuaccgg

SEQ ID NO: 860552 - RNA, 19 nt, Artificial Sequence
  Description of Artificial Sequence: Synthetic oligonucleotide
aguguauaugguccucaca

SEQ ID NO: 860553 - RNA, 19 nt, Artificial Sequence
  Description of Artificial Sequence: Synthetic oligonucleotide
gcucacagcagguagaauc

SEQ ID NO: 860554 - RNA, 19 nt, Artificial Sequence
  Description of Artificial Sequence: Synthetic oligonucleotide
gcuaucugaaugucggaag

SEQ ID NO: 860555 - RNA, 19 nt, Artificial Sequence
  Description of Artificial Sequence: Synthetic oligonucleotide
uccgaacuacaguggaagc

SEQ ID NO: 860556 - RNA, 19 nt, Artificial Sequence
  Description of Artificial Sequence: Synthetic oligonucleotide
gaucgcucauuaccauagg

SEQ ID NO: 860557 - RNA, 19 nt, Artificial Sequence
  Description of Artificial Sequence: Synthetic oligonucleotide
caaguguauccaucugggc

SEQ ID NO: 860558 - RNA, 19 nt, Artificial Sequence
  Description of Artificial Sequence: Synthetic oligonucleotide
agugaggagacacgaguaa

SEQ ID NO: 860559 - RNA, 19 nt, Artificial Sequence
  Description of Artificial Sequence: Synthetic oligonucleotide
ucaucagggcacugggucu

SEQ ID NO: 860560 - RNA, 19 nt, Artificial Sequence
  Description of Artificial Sequence: Synthetic oligonucleotide
cucccuucaggcuagggca

SEQ ID NO: 860561 - RNA, 19 nt, Artificial Sequence
  Description of Artificial Sequence: Synthetic oligonucleotide
agacacgaguaacuuccag

SEQ ID NO: 860562 - RNA, 19 nt, Artificial Sequence
  Description of Artificial Sequence: Synthetic oligonucleotide
ugcagggaacuucuuuaac

SEQ ID NO: 860563 - RNA, 19 nt, Artificial Sequence
  Description of Artificial Sequence: Synthetic oligonucleotide
agguugucccauccgaacu

SEQ ID NO: 860564 - RNA, 19 nt, Artificial Sequence
  Description of Artificial Sequence: Synthetic oligonucleotide
aaaugucucgugagggugu

SEQ ID NO: 860565 - RNA, 19 nt, Artificial Sequence
  Description of Artificial Sequence: Synthetic oligonucleotide
acaacacacagccuugcua

SEQ ID NO: 860566 - RNA, 19 nt, Artificial Sequence
  Description of Artificial Sequence: Synthetic oligonucleotide
uguacaugugaagcccuug

SEQ ID NO: 860567 - RNA, 19 nt, Artificial Sequence
  Description of Artificial Sequence: Synthetic oligonucleotide
ugggacagaaaugucucgu

SEQ ID NO: 860568 - RNA, 19 nt, Artificial Sequence
  Description of Artificial Sequence: Synthetic oligonucleotide
gcaaccauacuucccacug

SEQ ID NO: 860569 - RNA, 19 nt, Artificial Sequence
  Description of Artificial Sequence: Synthetic oligonucleotide
uuagacgaucgcucauuac

SEQ ID NO: 860570 - RNA, 19 nt, Artificial Sequence
  Description of Artificial Sequence: Synthetic oligonucleotide
caacagguagaggauuccg

SEQ ID NO: 860571 - RNA, 19 nt, Artificial Sequence
  Description of Artificial Sequence: Synthetic oligonucleotide
ugugcuggucacaauuguu

SEQ ID NO: 860572 - RNA, 19 nt, Artificial Sequence
  Description of Artificial Sequence: Synthetic oligonucleotide
ggcaauguguccagaauag

SEQ ID NO: 860573 - RNA, 19 nt, Artificial Sequence
  Description of Artificial Sequence: Synthetic oligonucleotide
cagugagggaucuuccuuc

SEQ ID NO: 860574 - RNA, 19 nt, Artificial Sequence
  Description of Artificial Sequence: Synthetic oligonucleotide
cucgugaggguguaucuuc

SEQ ID NO: 860575 - RNA, 19 nt, Artificial Sequence
  Description of Artificial Sequence: Synthetic oligonucleotide
aagaugugucccagugagg

SEQ ID NO: 860576 - RNA, 19 nt, Artificial Sequence
  Description of Artificial Sequence: Synthetic oligonucleotide
caagcauaacgcaacaggu

SEQ ID NO: 860577 - RNA, 19 nt, Artificial Sequence
  Description of Artificial Sequence: Synthetic oligonucleotide
ugccccuaggugaaaugca

SEQ ID NO: 860578 - RNA, 19 nt, Artificial Sequence
  Description of Artificial Sequence: Synthetic oligonucleotide
ugacaguaccccuccgcug

SEQ ID NO: 860579 - RNA, 19 nt, Artificial Sequence
  Description of Artificial Sequence: Synthetic oligonucleotide
gauggucggaacagcagac

SEQ ID NO: 860580 - RNA, 19 nt, Artificial Sequence
  Description of Artificial Sequence: Synthetic oligonucleotide
ccgaugguaagguagcagc

SEQ ID NO: 860581 - RNA, 19 nt, Artificial Sequence
  Description of Artificial Sequence: Synthetic oligonucleotide
uuggcuaccggggcacugg

SEQ ID NO: 860582 - RNA, 19 nt, Artificial Sequence
  Description of Artificial Sequence: Synthetic oligonucleotide
acguugcagauguacccag

SEQ ID NO: 860583 - RNA, 19 nt, Artificial Sequence
  Description of Artificial Sequence: Synthetic oligonucleotide
augccacuuagacgaucgc

SEQ ID NO: 860584 - RNA, 19 nt, Artificial Sequence
  Description of Artificial Sequence: Synthetic oligonucleotide
gguaagguagcagcaagug

SEQ ID NO: 860585 - RNA, 19 nt, Artificial Sequence
  Description of Artificial Sequence: Synthetic oligonucleotide
ucgugaggguguaucuucu

SEQ ID NO: 860586 - RNA, 19 nt, Artificial Sequence
  Description of Artificial Sequence: Synthetic oligonucleotide
agucuuuagccccuccuua

SEQ ID NO: 860587 - RNA, 19 nt, Artificial Sequence
  Description of Artificial Sequence: Synthetic oligonucleotide
acauucgaauuggcuaccg

SEQ ID NO: 860588 - RNA, 19 nt, Artificial Sequence
  Description of Artificial Sequence: Synthetic oligonucleotide
gauggaauucacagccuuc

SEQ ID NO: 860589 - RNA, 19 nt, Artificial Sequence
  Description of Artificial Sequence: Synthetic oligonucleotide
ugccacuuagacgaucgcu

SEQ ID NO: 860590 - RNA, 19 nt, Artificial Sequence
  Description of Artificial Sequence: Synthetic oligonucleotide
uggcaguaaugcccugucc

SEQ ID NO: 860591 - RNA, 19 nt, Artificial Sequence
  Description of Artificial Sequence: Synthetic oligonucleotide
uaucuccaauuugggacag

SEQ ID NO: 860592 - RNA, 19 nt, Artificial Sequence
  Description of Artificial Sequence: Synthetic oligonucleotide
agaggauuccggacauucg

SEQ ID NO: 860593 - RNA, 19 nt, Artificial Sequence
  Description of Artificial Sequence: Synthetic oligonucleotide
aggucuuaguugagguccc

SEQ ID NO: 860594 - RNA, 19 nt, Artificial Sequence
  Description of Artificial Sequence: Synthetic oligonucleotide
cagcagacggcauugggca

SEQ ID NO: 860595 - RNA, 19 nt, Artificial Sequence
  Description of Artificial Sequence: Synthetic oligonucleotide
ccaucaagcauaacgcaac

SEQ ID NO: 860596 - RNA, 19 nt, Artificial Sequence
  Description of Artificial Sequence: Synthetic oligonucleotide
gugcccucuagguagggac

SEQ ID NO: 860597 - RNA, 19 nt, Artificial Sequence
  Description of Artificial Sequence: Synthetic oligonucleotide
aagcauaacgcaacaggua

SEQ ID NO: 860598 - RNA, 19 nt, Artificial Sequence
  Description of Artificial Sequence: Synthetic oligonucleotide
ugucggaagcagguugucc

SEQ ID NO: 860599 - RNA, 19 nt, Artificial Sequence
  Description of Artificial Sequence: Synthetic oligonucleotide
auaggcacuuacucuggau

SEQ ID NO: 860600 - RNA, 19 nt, Artificial Sequence
  Description of Artificial Sequence: Synthetic oligonucleotide
agacgaucgcucauuacca

SEQ ID NO: 860601 - RNA, 19 nt, Artificial Sequence
  Description of Artificial Sequence: Synthetic oligonucleotide
ucgggguccgcacucccug

SEQ ID NO: 860602 - RNA, 19 nt, Artificial Sequence
  Description of Artificial Sequence: Synthetic oligonucleotide
ugcccucuagguagggaca

SEQ ID NO: 860603 - RNA, 19 nt, Artificial Sequence
  Description of Artificial Sequence: Synthetic oligonucleotide
ugucucgugaggguguauc

SEQ ID NO: 860604 - RNA, 19 nt, Artificial Sequence
  Description of Artificial Sequence: Synthetic oligonucleotide
cuaccggggcacuggacag

SEQ ID NO: 860605 - RNA, 19 nt, Artificial Sequence
  Description of Artificial Sequence: Synthetic oligonucleotide
gacaguaccccuccgcugu

SEQ ID NO: 860606 - RNA, 19 nt, Artificial Sequence
  Description of Artificial Sequence: Synthetic oligonucleotide
ucggaagcagguuguccca

SEQ ID NO: 860607 - RNA, 19 nt, Artificial Sequence
  Description of Artificial Sequence: Synthetic oligonucleotide
caguguauaugguccucac

SEQ ID NO: 860608 - RNA, 19 nt, Artificial Sequence
  Description of Artificial Sequence: Synthetic oligonucleotide
guaacuggcagcaggccca

SEQ ID NO: 860609 - RNA, 19 nt, Artificial Sequence
  Description of Artificial Sequence: Synthetic oligonucleotide
auugucaggaggacagaca

SEQ ID NO: 860610 - RNA, 19 nt, Artificial Sequence
  Description of Artificial Sequence: Synthetic oligonucleotide
guacgugguggacuucuug

SEQ ID NO: 860611 - RNA, 19 nt, Artificial Sequence
  Description of Artificial Sequence: Synthetic oligonucleotide
ucacaaguccuugccuuca

SEQ ID NO: 860612 - RNA, 19 nt, Artificial Sequence
  Description of Artificial Sequence: Synthetic oligonucleotide
accaucaagcauaacgcaa

SEQ ID NO: 860613 - RNA, 19 nt, Artificial Sequence
  Description of Artificial Sequence: Synthetic oligonucleotide
gcuaaauggacagcagccc

SEQ ID NO: 860614 - RNA, 19 nt, Artificial Sequence
  Description of Artificial Sequence: Synthetic oligonucleotide
augaaucaugucacagaag

SEQ ID NO: 860615 - RNA, 19 nt, Artificial Sequence
  Description of Artificial Sequence: Synthetic oligonucleotide
uccggacauucgaauuggc

SEQ ID NO: 860616 - RNA, 19 nt, Artificial Sequence
  Description of Artificial Sequence: Synthetic oligonucleotide
cuuaguugaggucccaccu

SEQ ID NO: 860617 - RNA, 19 nt, Artificial Sequence
  Description of Artificial Sequence: Synthetic oligonucleotide
cagcagguagaaucaucag

SEQ ID NO: 860618 - RNA, 19 nt, Artificial Sequence
  Description of Artificial Sequence: Synthetic oligonucleotide
gucggaacagcagacggca

SEQ ID NO: 860619 - RNA, 19 nt, Artificial Sequence
  Description of Artificial Sequence: Synthetic oligonucleotide
ggaggcuaucugaaugucg

SEQ ID NO: 860620 - RNA, 19 nt, Artificial Sequence
  Description of Artificial Sequence: Synthetic oligonucleotide
ggacccgaugguaagguag

SEQ ID NO: 860621 - RNA, 19 nt, Artificial Sequence
  Description of Artificial Sequence: Synthetic oligonucleotide
aggaggcuaucugaauguc

SEQ ID NO: 860622 - RNA, 19 nt, Artificial Sequence
  Description of Artificial Sequence: Synthetic oligonucleotide
acgugguggacuucuugga

SEQ ID NO: 860623 - RNA, 19 nt, Artificial Sequence
  Description of Artificial Sequence: Synthetic oligonucleotide
guaaugcccugucccacac

SEQ ID NO: 860624 - RNA, 19 nt, Artificial Sequence
  Description of Artificial Sequence: Synthetic oligonucleotide
caugggguaacuggcagca

SEQ ID NO: 860625 - RNA, 19 nt, Artificial Sequence
  Description of Artificial Sequence: Synthetic oligonucleotide
gugaggagacacgaguaac

SEQ ID NO: 860626 - RNA, 19 nt, Artificial Sequence
  Description of Artificial Sequence: Synthetic oligonucleotide
cauggaccugacagaugcc

SEQ ID NO: 860627 - RNA, 19 nt, Artificial Sequence
  Description of Artificial Sequence: Synthetic oligonucleotide
cagcucaccuccgagucgc

SEQ ID NO: 860628 - RNA, 19 nt, Artificial Sequence
  Description of Artificial Sequence: Synthetic oligonucleotide
guaagguagcagcaagugu

SEQ ID NO: 860629 - RNA, 19 nt, Artificial Sequence
  Description of Artificial Sequence: Synthetic oligonucleotide
aguaccccuccgcuguaca

SEQ ID NO: 860630 - RNA, 19 nt, Artificial Sequence
  Description of Artificial Sequence: Synthetic oligonucleotide
cacgaguaacuuccaggac

SEQ ID NO: 860631 - RNA, 19 nt, Artificial Sequence
  Description of Artificial Sequence: Synthetic oligonucleotide
caucaagcauaacgcaaca

SEQ ID NO: 860632 - RNA, 19 nt, Artificial Sequence
  Description of Artificial Sequence: Synthetic oligonucleotide
cuccgcuguacaugugaag

SEQ ID NO: 860633 - RNA, 19 nt, Artificial Sequence
  Description of Artificial Sequence: Synthetic oligonucleotide
accccuccgcuguacaugu

SEQ ID NO: 860634 - RNA, 19 nt, Artificial Sequence
  Description of Artificial Sequence: Synthetic oligonucleotide
cacgacugaccaucuggac

SEQ ID NO: 860635 - RNA, 19 nt, Artificial Sequence
  Description of Artificial Sequence: Synthetic oligonucleotide
ugagggccuaaggucaggu

SEQ ID NO: 860636 - RNA, 19 nt, Artificial Sequence
  Description of Artificial Sequence: Synthetic oligonucleotide
acccuuagggaaagggcag

SEQ ID NO: 860637 - RNA, 19 nt, Artificial Sequence
  Description of Artificial Sequence: Synthetic oligonucleotide
agguacgugguggacuucu

SEQ ID NO: 860638 - RNA, 19 nt, Artificial Sequence
  Description of Artificial Sequence: Synthetic oligonucleotide
cuguaugaaucaugucaca

SEQ ID NO: 860639 - RNA, 19 nt, Artificial Sequence
  Description of Artificial Sequence: Synthetic oligonucleotide
cgaucgcucauuaccauag

SEQ ID NO: 860640 - RNA, 19 nt, Artificial Sequence
  Description of Artificial Sequence: Synthetic oligonucleotide
guucccuugacugaacagu

SEQ ID NO: 860641 - RNA, 19 nt, Artificial Sequence
  Description of Artificial Sequence: Synthetic oligonucleotide
ugaaugucggaagcagguu

SEQ ID NO: 860642 - RNA, 19 nt, Artificial Sequence
  Description of Artificial Sequence: Synthetic oligonucleotide
cgacugaccaucuggacac

SEQ ID NO: 860643 - RNA, 19 nt, Artificial Sequence
  Description of Artificial Sequence: Synthetic oligonucleotide
acgaucgcucauuaccaua

SEQ ID NO: 860644 - RNA, 19 nt, Artificial Sequence
  Description of Artificial Sequence: Synthetic oligonucleotide
cgaacuacaguggaagccc

SEQ ID NO: 860645 - RNA, 19 nt, Artificial Sequence
  Description of Artificial Sequence: Synthetic oligonucleotide
auauacccuuagggaaagg

SEQ ID NO: 860646 - RNA, 19 nt, Artificial Sequence
  Description of Artificial Sequence: Synthetic oligonucleotide
uuggggcuggauucgucaa

SEQ ID NO: 860647 - RNA, 19 nt, Artificial Sequence
  Description of Artificial Sequence: Synthetic oligonucleotide
ugcccugcuuuuccuuugu

SEQ ID NO: 860648 - RNA, 19 nt, Artificial Sequence
  Description of Artificial Sequence: Synthetic oligonucleotide
uggaagauuucugcaucua

SEQ ID NO: 860649 - RNA, 19 nt, Artificial Sequence
  Description of Artificial Sequence: Synthetic oligonucleotide
guagcucacagcagguaga

SEQ ID NO: 860650 - RNA, 19 nt, Artificial Sequence
  Description of Artificial Sequence: Synthetic oligonucleotide
cauggucugccugcuucgg

SEQ ID NO: 860651 - RNA, 19 nt, Artificial Sequence
  Description of Artificial Sequence: Synthetic oligonucleotide
ggauucgucaaagaugugu

SEQ ID NO: 860652 - RNA, 19 nt, Artificial Sequence
  Description of Artificial Sequence: Synthetic oligonucleotide
uuugugcagggaacuucuu

SEQ ID NO: 860653 - RNA, 19 nt, Artificial Sequence
  Description of Artificial Sequence: Synthetic oligonucleotide
caaccugagggccuaaggu

SEQ ID NO: 860654 - RNA, 19 nt, Artificial Sequence
  Description of Artificial Sequence: Synthetic oligonucleotide
gcuaccggggcacuggaca

SEQ ID NO: 860655 - RNA, 19 nt, Artificial Sequence
  Description of Artificial Sequence: Synthetic oligonucleotide
cagcaaguguauccaucug

SEQ ID NO: 860656 - RNA, 19 nt, Artificial Sequence
  Description of Artificial Sequence: Synthetic oligonucleotide
ccgaacuacaguggaagcc

SEQ ID NO: 860657 - RNA, 19 nt, Artificial Sequence
  Description of Artificial Sequence: Synthetic oligonucleotide
cuuagacgaucgcucauua

SEQ ID NO: 860658 - RNA, 19 nt, Artificial Sequence
  Description of Artificial Sequence: Synthetic oligonucleotide
caguaaugcccugucccac

SEQ ID NO: 860659 - RNA, 19 nt, Artificial Sequence
  Description of Artificial Sequence: Synthetic oligonucleotide
gugauggggugaccccagg

SEQ ID NO: 860660 - RNA, 19 nt, Artificial Sequence
  Description of Artificial Sequence: Synthetic oligonucleotide
cauugggcauuggacagca

SEQ ID NO: 860661 - RNA, 19 nt, Artificial Sequence
  Description of Artificial Sequence: Synthetic oligonucleotide
caucagggcacugggucug

SEQ ID NO: 860662 - RNA, 19 nt, Artificial Sequence
  Description of Artificial Sequence: Synthetic oligonucleotide
cccauccgaacuacagugg

SEQ ID NO: 860663 - RNA, 19 nt, Artificial Sequence
  Description of Artificial Sequence: Synthetic oligonucleotide
cagcaaccauacuucccac

SEQ ID NO: 860664 - RNA, 19 nt, Artificial Sequence
  Description of Artificial Sequence: Synthetic oligonucleotide
gcaguaaugcccuguccca

SEQ ID NO: 860665 - RNA, 19 nt, Artificial Sequence
  Description of Artificial Sequence: Synthetic oligonucleotide
gccacuuagacgaucgcuc

SEQ ID NO: 860666 - RNA, 19 nt, Artificial Sequence
  Description of Artificial Sequence: Synthetic oligonucleotide
cagugaggagacacgagua

SEQ ID NO: 860667 - RNA, 19 nt, Artificial Sequence
  Description of Artificial Sequence: Synthetic oligonucleotide
ucucgugaggguguaucuu

SEQ ID NO: 860668 - RNA, 19 nt, Artificial Sequence
  Description of Artificial Sequence: Synthetic oligonucleotide
gcacuuacucuggaucagg

SEQ ID NO: 860669 - RNA, 19 nt, Artificial Sequence
  Description of Artificial Sequence: Synthetic oligonucleotide
aauuggcuaccggggcacu

SEQ ID NO: 860670 - RNA, 19 nt, Artificial Sequence
  Description of Artificial Sequence: Synthetic oligonucleotide
gucuuaguugaggucccac

SEQ ID NO: 860671 - RNA, 19 nt, Artificial Sequence
  Description of Artificial Sequence: Synthetic oligonucleotide
ggggcuggauucgucaaag

SEQ ID NO: 860672 - RNA, 19 nt, Artificial Sequence
  Description of Artificial Sequence: Synthetic oligonucleotide
agcuuaccaggguccacau

SEQ ID NO: 860673 - RNA, 19 nt, Artificial Sequence
  Description of Artificial Sequence: Synthetic oligonucleotide
gugcagggaacuucuuuaa

SEQ ID NO: 860674 - RNA, 19 nt, Artificial Sequence
  Description of Artificial Sequence: Synthetic oligonucleotide
gggguaacuggcagcaggc

SEQ ID NO: 860675 - RNA, 19 nt, Artificial Sequence
  Description of Artificial Sequence: Synthetic oligonucleotide
uggcuaccggggcacugga

SEQ ID NO: 860676 - RNA, 19 nt, Artificial Sequence
  Description of Artificial Sequence: Synthetic oligonucleotide
gcagcaaguguauccaucu

SEQ ID NO: 860677 - RNA, 19 nt, Artificial Sequence
  Description of Artificial Sequence: Synthetic oligonucleotide
cacguugcagauguaccca

SEQ ID NO: 860678 - RNA, 19 nt, Artificial Sequence
  Description of Artificial Sequence: Synthetic oligonucleotide
cuucgggguccgcacuccc

SEQ ID NO: 860679 - RNA, 19 nt, Artificial Sequence
  Description of Artificial Sequence: Synthetic oligonucleotide
cauccgaacuacaguggaa

SEQ ID NO: 860680 - RNA, 19 nt, Artificial Sequence
  Description of Artificial Sequence: Synthetic oligonucleotide
caggucugccccaccggac

SEQ ID NO: 860681 - RNA, 19 nt, Artificial Sequence
  Description of Artificial Sequence: Synthetic oligonucleotide
gcugccggucuucacagca

SEQ ID NO: 860682 - RNA, 19 nt, Artificial Sequence
  Description of Artificial Sequence: Synthetic oligonucleotide
aggauuccggacauucgaa

SEQ ID NO: 860683 - RNA, 19 nt, Artificial Sequence
  Description of Artificial Sequence: Synthetic oligonucleotide
gcagcucaccuccgagucg

SEQ ID NO: 860684 - RNA, 19 nt, Artificial Sequence
  Description of Artificial Sequence: Synthetic oligonucleotide
agcagugcagauggucgga

SEQ ID NO: 860685 - RNA, 19 nt, Artificial Sequence
  Description of Artificial Sequence: Synthetic oligonucleotide
caccggacagcuggugugc

SEQ ID NO: 860686 - RNA, 19 nt, Artificial Sequence
  Description of Artificial Sequence: Synthetic oligonucleotide
cugacaguaccccuccgcu

SEQ ID NO: 860687 - RNA, 19 nt, Artificial Sequence
  Description of Artificial Sequence: Synthetic oligonucleotide
gccuucacguugcagaugu

SEQ ID NO: 860688 - RNA, 19 nt, Artificial Sequence
  Description of Artificial Sequence: Synthetic oligonucleotide
ggcacuuacucuggaucag

SEQ ID NO: 860689 - RNA, 19 nt, Artificial Sequence
  Description of Artificial Sequence: Synthetic oligonucleotide
ggugccccuaggugaaaug

SEQ ID NO: 860690 - RNA, 19 nt, Artificial Sequence
  Description of Artificial Sequence: Synthetic oligonucleotide
ucggaacagcagacggcau

SEQ ID NO: 860691 - RNA, 19 nt, Artificial Sequence
  Description of Artificial Sequence: Synthetic oligonucleotide
auagggcacgacugaccau

SEQ ID NO: 860692 - RNA, 19 nt, Artificial Sequence
  Description of Artificial Sequence: Synthetic oligonucleotide
gccaaugggacaacaguga

SEQ ID NO: 860693 - RNA, 19 nt, Artificial Sequence
  Description of Artificial Sequence: Synthetic oligonucleotide
ggucggaacagcagacggc

SEQ ID NO: 860694 - RNA, 19 nt, Artificial Sequence
  Description of Artificial Sequence: Synthetic oligonucleotide
aggaaccaucaagcauaac

SEQ ID NO: 860695 - RNA, 19 nt, Artificial Sequence
  Description of Artificial Sequence: Synthetic oligonucleotide
gagacacgaguaacuucca

SEQ ID NO: 860696 - RNA, 19 nt, Artificial Sequence
  Description of Artificial Sequence: Synthetic oligonucleotide
agcagacggcauugggcau

SEQ ID NO: 860697 - RNA, 19 nt, Artificial Sequence
  Description of Artificial Sequence: Synthetic oligonucleotide
guagaaucaucagggcacu

SEQ ID NO: 860698 - RNA, 19 nt, Artificial Sequence
  Description of Artificial Sequence: Synthetic oligonucleotide
gaauaggguugcagcagcu

SEQ ID NO: 860699 - RNA, 19 nt, Artificial Sequence
  Description of Artificial Sequence: Synthetic oligonucleotide
guauugucaggaggacaga

SEQ ID NO: 860700 - RNA, 19 nt, Artificial Sequence
  Description of Artificial Sequence: Synthetic oligonucleotide
cagcaagugcccucuaggu

SEQ ID NO: 860701 - RNA, 19 nt, Artificial Sequence
  Description of Artificial Sequence: Synthetic oligonucleotide
uaccggggcacuggacagc

SEQ ID NO: 860702 - RNA, 19 nt, Artificial Sequence
  Description of Artificial Sequence: Synthetic oligonucleotide
gucucgugaggguguaucu

SEQ ID NO: 860703 - RNA, 19 nt, Artificial Sequence
  Description of Artificial Sequence: Synthetic oligonucleotide
gaaggccagccagcuuacc

SEQ ID NO: 860704 - RNA, 19 nt, Artificial Sequence
  Description of Artificial Sequence: Synthetic oligonucleotide
gacgaucgcucauuaccau

SEQ ID NO: 860705 - RNA, 19 nt, Artificial Sequence
  Description of Artificial Sequence: Synthetic oligonucleotide
cgagucgcacuccaccucc

SEQ ID NO: 860706 - RNA, 19 nt, Artificial Sequence
  Description of Artificial Sequence: Synthetic oligonucleotide
cuuagggaaagggcagcaa

SEQ ID NO: 860707 - RNA, 19 nt, Artificial Sequence
  Description of Artificial Sequence: Synthetic oligonucleotide
aggacccgaugguaaggua

SEQ ID NO: 860708 - RNA, 19 nt, Artificial Sequence
  Description of Artificial Sequence: Synthetic oligonucleotide
cgcuguacaugugaagccc

SEQ ID NO: 860709 - RNA, 19 nt, Artificial Sequence
  Description of Artificial Sequence: Synthetic oligonucleotide
cucaccuccgagucgcacu

SEQ ID NO: 860710 - RNA, 19 nt, Artificial Sequence
  Description of Artificial Sequence: Synthetic oligonucleotide
cggacauucgaauuggcua

SEQ ID NO: 860711 - RNA, 19 nt, Artificial Sequence
  Description of Artificial Sequence: Synthetic oligonucleotide
acgcaacagguagaggauu

SEQ ID NO: 860712 - RNA, 19 nt, Artificial Sequence
  Description of Artificial Sequence: Synthetic oligonucleotide
gcauuggacagcaaccaua

SEQ ID NO: 860713 - RNA, 19 nt, Artificial Sequence
  Description of Artificial Sequence: Synthetic oligonucleotide
ccauccgaacuacagugga

SEQ ID NO: 860714 - RNA, 19 nt, Artificial Sequence
  Description of Artificial Sequence: Synthetic oligonucleotide
gguagaggauuccggacau

SEQ ID NO: 860715 - RNA, 19 nt, Artificial Sequence
  Description of Artificial Sequence: Synthetic oligonucleotide
cauaggcaauguguccaga

SEQ ID NO: 860716 - RNA, 19 nt, Artificial Sequence
  Description of Artificial Sequence: Synthetic oligonucleotide
acccgaugguaagguagca

SEQ ID NO: 860717 - RNA, 19 nt, Artificial Sequence
  Description of Artificial Sequence: Synthetic oligonucleotide
gcaggucugccccaccgga

SEQ ID NO: 860718 - RNA, 19 nt, Artificial Sequence
  Description of Artificial Sequence: Synthetic oligonucleotide
gcauugggcauuggacagc

SEQ ID NO: 860719 - RNA, 19 nt, Artificial Sequence
  Description of Artificial Sequence: Synthetic oligonucleotide
agcagacaauagggcacga

SEQ ID NO: 860720 - RNA, 19 nt, Artificial Sequence
  Description of Artificial Sequence: Synthetic oligonucleotide
gcccucuagguagggacag

SEQ ID NO: 860721 - RNA, 19 nt, Artificial Sequence
  Description of Artificial Sequence: Synthetic oligonucleotide
gcacgacugaccaucugga

SEQ ID NO: 860722 - RNA, 19 nt, Artificial Sequence
  Description of Artificial Sequence: Synthetic oligonucleotide
acaguaccccuccgcugua

SEQ ID NO: 860723 - RNA, 19 nt, Artificial Sequence
  Description of Artificial Sequence: Synthetic oligonucleotide
cagcaguguauaugguccu

SEQ ID NO: 860724 - RNA, 19 nt, Artificial Sequence
  Description of Artificial Sequence: Synthetic oligonucleotide
ggagguacgugguggacuu

SEQ ID NO: 860725 - RNA, 19 nt, Artificial Sequence
  Description of Artificial Sequence: Synthetic oligonucleotide
cccuuagggaaagggcagc

SEQ ID NO: 860726 - RNA, 19 nt, Artificial Sequence
  Description of Artificial Sequence: Synthetic oligonucleotide
caguaccccuccgcuguac

SEQ ID NO: 860727 - RNA, 19 nt, Artificial Sequence
  Description of Artificial Sequence: Synthetic oligonucleotide
agggcacgacugaccaucu

SEQ ID NO: 860728 - RNA, 19 nt, Artificial Sequence
  Description of Artificial Sequence: Synthetic oligonucleotide
cugaacaguggaagccaau

SEQ ID NO: 860729 - RNA, 19 nt, Artificial Sequence
  Description of Artificial Sequence: Synthetic oligonucleotide
gagguacgugguggacuuc

SEQ ID NO: 860730 - RNA, 19 nt, Artificial Sequence
  Description of Artificial Sequence: Synthetic oligonucleotide
ccggaggccucccauuuca

SEQ ID NO: 860731 - RNA, 19 nt, Artificial Sequence
  Description of Artificial Sequence: Synthetic oligonucleotide
cuguacaugugaagcccuu

SEQ ID NO: 860732 - RNA, 19 nt, Artificial Sequence
  Description of Artificial Sequence: Synthetic oligonucleotide
guaccccuccgcuguacau

SEQ ID NO: 860733 - RNA, 19 nt, Artificial Sequence
  Description of Artificial Sequence: Synthetic oligonucleotide
gcuucgggguccgcacucc

SEQ ID NO: 860734 - RNA, 19 nt, Artificial Sequence
  Description of Artificial Sequence: Synthetic oligonucleotide
gggcacgacugaccaucug

SEQ ID NO: 860735 - RNA, 19 nt, Artificial Sequence
  Description of Artificial Sequence: Synthetic oligonucleotide
gcuguacaugugaagcccu

SEQ ID NO: 860736 - RNA, 19 nt, Artificial Sequence
  Description of Artificial Sequence: Synthetic oligonucleotide
ccggacauucgaauuggcu

SEQ ID NO: 860737 - RNA, 19 nt, Artificial Sequence
  Description of Artificial Sequence: Synthetic oligonucleotide
ggucuuaguugagguccca

SEQ ID NO: 860738 - RNA, 19 nt, Artificial Sequence
  Description of Artificial Sequence: Synthetic oligonucleotide
ccgagucgcacuccaccuc

SEQ ID NO: 860739 - RNA, 19 nt, Artificial Sequence
  Description of Artificial Sequence: Synthetic oligonucleotide
augucucgugaggguguau

SEQ ID NO: 860740 - RNA, 19 nt, Artificial Sequence
  Description of Artificial Sequence: Synthetic oligonucleotide
gcaagaggccuggggcaug

SEQ ID NO: 860741 - RNA, 19 nt, Artificial Sequence
  Description of Artificial Sequence: Synthetic oligonucleotide
ccuccgcuguacaugugaa

SEQ ID NO: 860742 - RNA, 19 nt, Artificial Sequence
  Description of Artificial Sequence: Synthetic oligonucleotide
auugggcauuggacagcaa

SEQ ID NO: 860743 - RNA, 19 nt, Artificial Sequence
  Description of Artificial Sequence: Synthetic oligonucleotide
gcucauuaccauaggcaau

SEQ ID NO: 860744 - RNA, 19 nt, Artificial Sequence
  Description of Artificial Sequence: Synthetic oligonucleotide
cccuucaggcuagggcagc

SEQ ID NO: 860745 - RNA, 19 nt, Artificial Sequence
  Description of Artificial Sequence: Synthetic oligonucleotide
ggacagcaauguauuuugu

SEQ ID NO: 860746 - RNA, 19 nt, Artificial Sequence
  Description of Artificial Sequence: Synthetic oligonucleotide
ccccaggacccgaugguaa

SEQ ID NO: 860747 - RNA, 19 nt, Artificial Sequence
  Description of Artificial Sequence: Synthetic oligonucleotide
cccucuagguagggacagc

SEQ ID NO: 860748 - RNA, 19 nt, Artificial Sequence
  Description of Artificial Sequence: Synthetic oligonucleotide
gagucgcacuccaccuccu

SEQ ID NO: 860749 - RNA, 19 nt, Artificial Sequence
  Description of Artificial Sequence: Synthetic oligonucleotide
ggguagcucacagcaggua

SEQ ID NO: 860750 - RNA, 19 nt, Artificial Sequence
  Description of Artificial Sequence: Synthetic oligonucleotide
cgggguccgcacucccugg

SEQ ID NO: 860751 - RNA, 19 nt, Artificial Sequence
  Description of Artificial Sequence: Synthetic oligonucleotide
ggcuaccggggcacuggac

SEQ ID NO: 860752 - RNA, 19 nt, Artificial Sequence
  Description of Artificial Sequence: Synthetic oligonucleotide
ggcacccggaggccuccca

SEQ ID NO: 860753 - RNA, 19 nt, Artificial Sequence
  Description of Artificial Sequence: Synthetic oligonucleotide
gccccuaggugaaaugcau

SEQ ID NO: 860754 - RNA, 19 nt, Artificial Sequence
  Description of Artificial Sequence: Synthetic oligonucleotide
cccagucucccuucaggcu

SEQ ID NO: 860755 - RNA, 19 nt, Artificial Sequence
  Description of Artificial Sequence: Synthetic oligonucleotide
cccggaggccucccauuuc

SEQ ID NO: 860756 - RNA, 19 nt, Artificial Sequence
  Description of Artificial Sequence: Synthetic oligonucleotide
cccggggacagcaguggua

SEQ ID NO: 860757 - RNA, 19 nt, Artificial Sequence
  Description of Artificial Sequence: Synthetic oligonucleotide
cgugguggacuucuuggau

SEQ ID NO: 860758 - RNA, 19 nt, Artificial Sequence
  Description of Artificial Sequence: Synthetic oligonucleotide
cguugcagauguacccagu

SEQ ID NO: 860759 - RNA, 19 nt, Artificial Sequence
  Description of Artificial Sequence: Synthetic oligonucleotide
gguacgugguggacuucuu

SEQ ID NO: 860760 - RNA, 19 nt, Artificial Sequence
  Description of Artificial Sequence: Synthetic oligonucleotide
cggaacagcagacggcauu

SEQ ID NO: 860761 - RNA, 19 nt, Artificial Sequence
  Description of Artificial Sequence: Synthetic oligonucleotide
cgcacucccugggaggcau

SEQ ID NO: 860762 - RNA, 19 nt, Artificial Sequence
  Description of Artificial Sequence: Synthetic oligonucleotide
agauuguuggaacaaaucc

SEQ ID NO: 860763 - RNA, 19 nt, Artificial Sequence
  Description of Artificial Sequence: Synthetic oligonucleotide
agaguacugaaucaaaagc

SEQ ID NO: 860764 - RNA, 19 nt, Artificial Sequence
  Description of Artificial Sequence: Synthetic oligonucleotide
uaaaacugcaccuaguacc

SEQ ID NO: 860765 - RNA, 19 nt, Artificial Sequence
  Description of Artificial Sequence: Synthetic oligonucleotide
gauauuaccuguaaguucc

SEQ ID NO: 860766 - RNA, 19 nt, Artificial Sequence
  Description of Artificial Sequence: Synthetic oligonucleotide
cuagaaacgauauugcuac

SEQ ID NO: 860767 - RNA, 19 nt, Artificial Sequence
  Description of Artificial Sequence: Synthetic oligonucleotide
aaccuuuugacugaaggac

SEQ ID NO: 860768 - RNA, 19 nt, Artificial Sequence
  Description of Artificial Sequence: Synthetic oligonucleotide
uaagaguagaacaauaaau

SEQ ID NO: 860769 - RNA, 19 nt, Artificial Sequence
  Description of Artificial Sequence: Synthetic oligonucleotide
acuagcuuauacuauacag

SEQ ID NO: 860770 - RNA, 19 nt, Artificial Sequence
  Description of Artificial Sequence: Synthetic oligonucleotide
auugauuugaaguugccca

SEQ ID NO: 860771 - RNA, 19 nt, Artificial Sequence
  Description of Artificial Sequence: Synthetic oligonucleotide
auccuuacgacucaagagg

SEQ ID NO: 860772 - RNA, 19 nt, Artificial Sequence
  Description of Artificial Sequence: Synthetic oligonucleotide
cugauaacaccucauaugc

SEQ ID NO: 860773 - RNA, 19 nt, Artificial Sequence
  Description of Artificial Sequence: Synthetic oligonucleotide
ucugaaguagcucacggug

SEQ ID NO: 860774 - RNA, 19 nt, Artificial Sequence
  Description of Artificial Sequence: Synthetic oligonucleotide
aacgcuaaggacuuagugu

SEQ ID NO: 860775 - RNA, 19 nt, Artificial Sequence
  Description of Artificial Sequence: Synthetic oligonucleotide
uagcuuauacuauacaggc

SEQ ID NO: 860776 - RNA, 19 nt, Artificial Sequence
  Description of Artificial Sequence: Synthetic oligonucleotide
gauuguuggaacaaauccg

SEQ ID NO: 860777 - RNA, 19 nt, Artificial Sequence
  Description of Artificial Sequence: Synthetic oligonucleotide
ucgucaaggacuuuaacug

SEQ ID NO: 860778 - RNA, 19 nt, Artificial Sequence
  Description of Artificial Sequence: Synthetic oligonucleotide
uuugccauuaacaaucuua

SEQ ID NO: 860779 - RNA, 19 nt, Artificial Sequence
  Description of Artificial Sequence: Synthetic oligonucleotide
gacgauuaagaguagaaca

SEQ ID NO: 860780 - RNA, 19 nt, Artificial Sequence
  Description of Artificial Sequence: Synthetic oligonucleotide
uuaacaaucuuaguagaag

SEQ ID NO: 860781 - RNA, 19 nt, Artificial Sequence
  Description of Artificial Sequence: Synthetic oligonucleotide
uguuggaacaaauccgagg

SEQ ID NO: 860782 - RNA, 19 nt, Artificial Sequence
  Description of Artificial Sequence: Synthetic oligonucleotide
acguaaaaccuuuugacug

SEQ ID NO: 860783 - RNA, 19 nt, Artificial Sequence
  Description of Artificial Sequence: Synthetic oligonucleotide
acccaaacgaagugaaucc

SEQ ID NO: 860784 - RNA, 19 nt, Artificial Sequence
  Description of Artificial Sequence: Synthetic oligonucleotide
aauacaagcaaagagucua

SEQ ID NO: 860785 - RNA, 19 nt, Artificial Sequence
  Description of Artificial Sequence: Synthetic oligonucleotide
aaaacugcaccuaguaccg

SEQ ID NO: 860786 - RNA, 19 nt, Artificial Sequence
  Description of Artificial Sequence: Synthetic oligonucleotide
gauccuuacgacucaagag

SEQ ID NO: 860787 - RNA, 19 nt, Artificial Sequence
  Description of Artificial Sequence: Synthetic oligonucleotide
uccuguaucaaaagcagga

SEQ ID NO: 860788 - RNA, 19 nt, Artificial Sequence
  Description of Artificial Sequence: Synthetic oligonucleotide
uuuaacagauuguuggaac

SEQ ID NO: 860789 - RNA, 19 nt, Artificial Sequence
  Description of Artificial Sequence: Synthetic oligonucleotide
ucggccacaccauuuaucg

SEQ ID NO: 860790 - RNA, 19 nt, Artificial Sequence
  Description of Artificial Sequence: Synthetic oligonucleotide
uuuagacacaaguuuggcc

SEQ ID NO: 860791 - RNA, 19 nt, Artificial Sequence
  Description of Artificial Sequence: Synthetic oligonucleotide
uuccgauguacuaaaacug

SEQ ID NO: 860792 - RNA, 19 nt, Artificial Sequence
  Description of Artificial Sequence: Synthetic oligonucleotide
aaacgcuaaggacuuagug

SEQ ID NO: 860793 - RNA, 19 nt, Artificial Sequence
  Description of Artificial Sequence: Synthetic oligonucleotide
acagucaugaaugcguacc

SEQ ID NO: 860794 - RNA, 19 nt, Artificial Sequence
  Description of Artificial Sequence: Synthetic oligonucleotide
cuacguaaaaccuuuugac

SEQ ID NO: 860795 - RNA, 19 nt, Artificial Sequence
  Description of Artificial Sequence: Synthetic oligonucleotide
aacaaauccgaggacgcgg

SEQ ID NO: 860796 - RNA, 19 nt, Artificial Sequence
  Description of Artificial Sequence: Synthetic oligonucleotide
uaacaaucuuaguagaagu

SEQ ID NO: 860797 - RNA, 19 nt, Artificial Sequence
  Description of Artificial Sequence: Synthetic oligonucleotide
aauccgaggacgcggcggc

SEQ ID NO: 860798 - RNA, 19 nt, Artificial Sequence
  Description of Artificial Sequence: Synthetic oligonucleotide
aagcuagaaacgauauugc

SEQ ID NO: 860799 - RNA, 19 nt, Artificial Sequence
  Description of Artificial Sequence: Synthetic oligonucleotide
uuugccguauuugucauag

SEQ ID NO: 860800 - RNA, 19 nt, Artificial Sequence
  Description of Artificial Sequence: Synthetic oligonucleotide
ugaaugcguacccagcucc

SEQ ID NO: 860801 - RNA, 19 nt, Artificial Sequence
  Description of Artificial Sequence: Synthetic oligonucleotide
guuggaacaaauccgagga

SEQ ID NO: 860802 - RNA, 19 nt, Artificial Sequence
  Description of Artificial Sequence: Synthetic oligonucleotide
aaggcugaggcuaugucac

SEQ ID NO: 860803 - RNA, 19 nt, Artificial Sequence
  Description of Artificial Sequence: Synthetic oligonucleotide
uucuacucuuucuugacca

SEQ ID NO: 860804 - RNA, 19 nt, Artificial Sequence
  Description of Artificial Sequence: Synthetic oligonucleotide
cucgguuucuauuuccucg

SEQ ID NO: 860805 - RNA, 19 nt, Artificial Sequence
  Description of Artificial Sequence: Synthetic oligonucleotide
ugcaagggcguucucgucg

SEQ ID NO: 860806 - RNA, 19 nt, Artificial Sequence
  Description of Artificial Sequence: Synthetic oligonucleotide
aaaucuugacuaccaggag

SEQ ID NO: 860807 - RNA, 19 nt, Artificial Sequence
  Description of Artificial Sequence: Synthetic oligonucleotide
acaaguuuggccaucgggg

SEQ ID NO: 860808 - RNA, 19 nt, Artificial Sequence
  Description of Artificial Sequence: Synthetic oligonucleotide
uauacuauacaggccaccc

SEQ ID NO: 860809 - RNA, 19 nt, Artificial Sequence
  Description of Artificial Sequence: Synthetic oligonucleotide
auagcugacuauucugcac

SEQ ID NO: 860810 - RNA, 19 nt, Artificial Sequence
  Description of Artificial Sequence: Synthetic oligonucleotide
ugucaaaucuugacuacca

SEQ ID NO: 860811 - RNA, 19 nt, Artificial Sequence
  Description of Artificial Sequence: Synthetic oligonucleotide
ugauauuaccuguaaguuc

SEQ ID NO: 860812 - RNA, 19 nt, Artificial Sequence
  Description of Artificial Sequence: Synthetic oligonucleotide
auaguaauccaccauguuu

SEQ ID NO: 860813 - RNA, 19 nt, Artificial Sequence
  Description of Artificial Sequence: Synthetic oligonucleotide
uaaacuauauuugguguca

SEQ ID NO: 860814 - RNA, 19 nt, Artificial Sequence
  Description of Artificial Sequence: Synthetic oligonucleotide
ucccuauggacccuacugg

SEQ ID NO: 860815 - RNA, 19 nt, Artificial Sequence
  Description of Artificial Sequence: Synthetic oligonucleotide
aggacuuuaacuguccauc

SEQ ID NO: 860816 - RNA, 19 nt, Artificial Sequence
  Description of Artificial Sequence: Synthetic oligonucleotide
aacaguuacaaggcugagg

SEQ ID NO: 860817 - RNA, 19 nt, Artificial Sequence
  Description of Artificial Sequence: Synthetic oligonucleotide
ucuggauuccggaauguga

SEQ ID NO: 860818 - RNA, 19 nt, Artificial Sequence
  Description of Artificial Sequence: Synthetic oligonucleotide
aguugauauugauuugaag

SEQ ID NO: 860819 - RNA, 19 nt, Artificial Sequence
  Description of Artificial Sequence: Synthetic oligonucleotide
gucaaaaugacuuccaccu

SEQ ID NO: 860820 - RNA, 19 nt, Artificial Sequence
  Description of Artificial Sequence: Synthetic oligonucleotide
cagaguacugaaucaaaag

SEQ ID NO: 860821 - RNA, 19 nt, Artificial Sequence
  Description of Artificial Sequence: Synthetic oligonucleotide
acaaucuuaguagaaguug

SEQ ID NO: 860822 - RNA, 19 nt, Artificial Sequence
  Description of Artificial Sequence: Synthetic oligonucleotide
ucgguuucuauuuccucgg

SEQ ID NO: 860823 - RNA, 19 nt, Artificial Sequence
  Description of Artificial Sequence: Synthetic oligonucleotide
aaacgauauugcuacguaa

SEQ ID NO: 860824 - RNA, 19 nt, Artificial Sequence
  Description of Artificial Sequence: Synthetic oligonucleotide
gaagacggggcugaagucg

SEQ ID NO: 860825 - RNA, 19 nt, Artificial Sequence
  Description of Artificial Sequence: Synthetic oligonucleotide
agacgauuaagaguagaac

SEQ ID NO: 860826 - RNA, 19 nt, Artificial Sequence
  Description of Artificial Sequence: Synthetic oligonucleotide
gaguagaacaauaaauaca

SEQ ID NO: 860827 - RNA, 19 nt, Artificial Sequence
  Description of Artificial Sequence: Synthetic oligonucleotide
uugaccauucuccacaauu

SEQ ID NO: 860828 - RNA, 19 nt, Artificial Sequence
  Description of Artificial Sequence: Synthetic oligonucleotide
gauuccggaaugugaagcc

SEQ ID NO: 860829 - RNA, 19 nt, Artificial Sequence
  Description of Artificial Sequence: Synthetic oligonucleotide
ugucacuacuagcuuauac

SEQ ID NO: 860830 - RNA, 19 nt, Artificial Sequence
  Description of Artificial Sequence: Synthetic oligonucleotide
ucaaggacuuuaacugucc

SEQ ID NO: 860831 - RNA, 19 nt, Artificial Sequence
  Description of Artificial Sequence: Synthetic oligonucleotide
ugcccuagugacccaaacg

SEQ ID NO: 860832 - RNA, 19 nt, Artificial Sequence
  Description of Artificial Sequence: Synthetic oligonucleotide
cuuguuugaauuuccgcuc

SEQ ID NO: 860833 - RNA, 19 nt, Artificial Sequence
  Description of Artificial Sequence: Synthetic oligonucleotide
cuacuuguuugaauuuccg

SEQ ID NO: 860834 - RNA, 19 nt, Artificial Sequence
  Description of Artificial Sequence: Synthetic oligonucleotide
cacaaguuuggccaucggg

SEQ ID NO: 860835 - RNA, 19 nt, Artificial Sequence
  Description of Artificial Sequence: Synthetic oligonucleotide
gcuuauacuauacaggcca

SEQ ID NO: 860836 - RNA, 19 nt, Artificial Sequence
  Description of Artificial Sequence: Synthetic oligonucleotide
acuaaaacugcaccuagua

SEQ ID NO: 860837 - RNA, 19 nt, Artificial Sequence
  Description of Artificial Sequence: Synthetic oligonucleotide
ugauaacaccucauaugcc

SEQ ID NO: 860838 - RNA, 19 nt, Artificial Sequence
  Description of Artificial Sequence: Synthetic oligonucleotide
ucaugaaugcguacccagc

SEQ ID NO: 860839 - RNA, 19 nt, Artificial Sequence
  Description of Artificial Sequence: Synthetic oligonucleotide
agauccuuacgacucaaga

SEQ ID NO: 860840 - RNA, 19 nt, Artificial Sequence
  Description of Artificial Sequence: Synthetic oligonucleotide
caggagacgauuaagagua

SEQ ID NO: 860841 - RNA, 19 nt, Artificial Sequence
  Description of Artificial Sequence: Synthetic oligonucleotide
uguaccucgguuucuauuu

SEQ ID NO: 860842 - RNA, 19 nt, Artificial Sequence
  Description of Artificial Sequence: Synthetic oligonucleotide
acuacuagcuuauacuaua

SEQ ID NO: 860843 - RNA, 19 nt, Artificial Sequence
  Description of Artificial Sequence: Synthetic oligonucleotide
auacuauacaggccacccg

SEQ ID NO: 860844 - RNA, 19 nt, Artificial Sequence
  Description of Artificial Sequence: Synthetic oligonucleotide
cuaaaacugcaccuaguac

SEQ ID NO: 860845 - RNA, 19 nt, Artificial Sequence
  Description of Artificial Sequence: Synthetic oligonucleotide
ugacuauucugcacgcagc

SEQ ID NO: 860846 - RNA, 19 nt, Artificial Sequence
  Description of Artificial Sequence: Synthetic oligonucleotide
acuauauuuggugucaaau

SEQ ID NO: 860847 - RNA, 19 nt, Artificial Sequence
  Description of Artificial Sequence: Synthetic oligonucleotide
uccuuacgacucaagagga

SEQ ID NO: 860848 - RNA, 19 nt, Artificial Sequence
  Description of Artificial Sequence: Synthetic oligonucleotide
uauguguugccagaguacu

SEQ ID NO: 860849 - RNA, 19 nt, Artificial Sequence
  Description of Artificial Sequence: Synthetic oligonucleotide
cugacuauucugcacgcag

SEQ ID NO: 860850 - RNA, 19 nt, Artificial Sequence
  Description of Artificial Sequence: Synthetic oligonucleotide
aacgauauugcuacguaaa

SEQ ID NO: 860851 - RNA, 19 nt, Artificial Sequence
  Description of Artificial Sequence: Synthetic oligonucleotide
cuucgaguccucuuucugc

SEQ ID NO: 860852 - RNA, 19 nt, Artificial Sequence
  Description of Artificial Sequence: Synthetic oligonucleotide
ccuacgaaagcuagaaacg

SEQ ID NO: 860853 - RNA, 19 nt, Artificial Sequence
  Description of Artificial Sequence: Synthetic oligonucleotide
uuguuugaauuuccgcucu

SEQ ID NO: 860854 - RNA, 19 nt, Artificial Sequence
  Description of Artificial Sequence: Synthetic oligonucleotide
aggcuaugucacuacuagc

SEQ ID NO: 860855 - RNA, 19 nt, Artificial Sequence
  Description of Artificial Sequence: Synthetic oligonucleotide
caaucuuaguagaaguuga

SEQ ID NO: 860856 - RNA, 19 nt, Artificial Sequence
  Description of Artificial Sequence: Synthetic oligonucleotide
caaguuuggccaucggggc

SEQ ID NO: 860857 - RNA, 19 nt, Artificial Sequence
  Description of Artificial Sequence: Synthetic oligonucleotide
ugaauagccagguggcccu

SEQ ID NO: 860858 - RNA, 19 nt, Artificial Sequence
  Description of Artificial Sequence: Synthetic oligonucleotide
uuguuggaacaaauccgag

SEQ ID NO: 860859 - RNA, 19 nt, Artificial Sequence
  Description of Artificial Sequence: Synthetic oligonucleotide
uccaccgccaccaaaugau

SEQ ID NO: 860860 - RNA, 19 nt, Artificial Sequence
  Description of Artificial Sequence: Synthetic oligonucleotide
agcuagaaacgauauugcu

SEQ ID NO: 860861 - RNA, 19 nt, Artificial Sequence
  Description of Artificial Sequence: Synthetic oligonucleotide
cuauguguugccagaguac

SEQ ID NO: 860862 - RNA, 19 nt, Artificial Sequence
  Description of Artificial Sequence: Synthetic oligonucleotide
uuacgacucaagaggaaaa

SEQ ID NO: 860863 - RNA, 19 nt, Artificial Sequence
  Description of Artificial Sequence: Synthetic oligonucleotide
ggacaaauauuucuccaag

SEQ ID NO: 860864 - RNA, 19 nt, Artificial Sequence
  Description of Artificial Sequence: Synthetic oligonucleotide
aggcgcagcugauauuacc

SEQ ID NO: 860865 - RNA, 19 nt, Artificial Sequence
  Description of Artificial Sequence: Synthetic oligonucleotide
agcuuauacuauacaggcc

SEQ ID NO: 860866 - RNA, 19 nt, Artificial Sequence
  Description of Artificial Sequence: Synthetic oligonucleotide
auuaccuguaaguuccgau

SEQ ID NO: 860867 - RNA, 19 nt, Artificial Sequence
  Description of Artificial Sequence: Synthetic oligonucleotide
acgcuaaggacuuaguguu

SEQ ID NO: 860868 - RNA, 19 nt, Artificial Sequence
  Description of Artificial Sequence: Synthetic oligonucleotide
uuaucgucaaggacuuuaa

SEQ ID NO: 860869 - RNA, 19 nt, Artificial Sequence
  Description of Artificial Sequence: Synthetic oligonucleotide
uacuaaaacugcaccuagu

SEQ ID NO: 860870 - RNA, 19 nt, Artificial Sequence
  Description of Artificial Sequence: Synthetic oligonucleotide
cuuauacuauacaggccac

SEQ ID NO: 860871 - RNA, 19 nt, Artificial Sequence
  Description of Artificial Sequence: Synthetic oligonucleotide
acaaauccgaggacgcggc

SEQ ID NO: 860872 - RNA, 19 nt, Artificial Sequence
  Description of Artificial Sequence: Synthetic oligonucleotide
aguuacaaggcugaggcua

SEQ ID NO: 860873 - RNA, 19 nt, Artificial Sequence
  Description of Artificial Sequence: Synthetic oligonucleotide
aacuauauuuggugucaaa

SEQ ID NO: 860874 - RNA, 19 nt, Artificial Sequence
  Description of Artificial Sequence: Synthetic oligonucleotide
agaaacgauauugcuacgu

SEQ ID NO: 860875 - RNA, 19 nt, Artificial Sequence
  Description of Artificial Sequence: Synthetic oligonucleotide
uacaucugaaguagcucac

SEQ ID NO: 860876 - RNA, 19 nt, Artificial Sequence
  Description of Artificial Sequence: Synthetic oligonucleotide
aaaugagccuguaccucgg

SEQ ID NO: 860877 - RNA, 19 nt, Artificial Sequence
  Description of Artificial Sequence: Synthetic oligonucleotide
uacgaaagcuagaaacgau

SEQ ID NO: 860878 - RNA, 19 nt, Artificial Sequence
  Description of Artificial Sequence: Synthetic oligonucleotide
uugauuugaaguugcccau

SEQ ID NO: 860879 - RNA, 19 nt, Artificial Sequence
  Description of Artificial Sequence: Synthetic oligonucleotide
uagaaacgauauugcuacg

SEQ ID NO: 860880 - RNA, 19 nt, Artificial Sequence
  Description of Artificial Sequence: Synthetic oligonucleotide
uauuuccucgggaaccccu

SEQ ID NO: 860881 - RNA, 19 nt, Artificial Sequence
  Description of Artificial Sequence: Synthetic oligonucleotide
uugacuaccaggagacgau

SEQ ID NO: 860882 - RNA, 19 nt, Artificial Sequence
  Description of Artificial Sequence: Synthetic oligonucleotide
ugugggcgggugcugacag

SEQ ID NO: 860883 - RNA, 19 nt, Artificial Sequence
  Description of Artificial Sequence: Synthetic oligonucleotide
ugaagucggggcuggagac

SEQ ID NO: 860884 - RNA, 19 nt, Artificial Sequence
  Description of Artificial Sequence: Synthetic oligonucleotide
uucugcacgcagcugugug

SEQ ID NO: 860885 - RNA, 19 nt, Artificial Sequence
  Description of Artificial Sequence: Synthetic oligonucleotide
uguuugaauuuccgcucug

SEQ ID NO: 860886 - RNA, 19 nt, Artificial Sequence
  Description of Artificial Sequence: Synthetic oligonucleotide
uauacaggccacccgggau

SEQ ID NO: 860887 - RNA, 19 nt, Artificial Sequence
  Description of Artificial Sequence: Synthetic oligonucleotide
gucacuacuagcuuauacu

SEQ ID NO: 860888 - RNA, 19 nt, Artificial Sequence
  Description of Artificial Sequence: Synthetic oligonucleotide
aaagcacccuaacacccau

SEQ ID NO: 860889 - RNA, 19 nt, Artificial Sequence
  Description of Artificial Sequence: Synthetic oligonucleotide
aagacggggcugaagucgg

SEQ ID NO: 860890 - RNA, 19 nt, Artificial Sequence
  Description of Artificial Sequence: Synthetic oligonucleotide
aagucgggcggcuggucuc

SEQ ID NO: 860891 - RNA, 19 nt, Artificial Sequence
  Description of Artificial Sequence: Synthetic oligonucleotide
acgauuaagaguagaacaa

SEQ ID NO: 860892 - RNA, 19 nt, Artificial Sequence
  Description of Artificial Sequence: Synthetic oligonucleotide
ccucauaugccucagcuac

SEQ ID NO: 860893 - RNA, 19 nt, Artificial Sequence
  Description of Artificial Sequence: Synthetic oligonucleotide
gaaacgauauugcuacgua

SEQ ID NO: 860894 - RNA, 19 nt, Artificial Sequence
  Description of Artificial Sequence: Synthetic oligonucleotide
cccaguugcuuuuagacac

SEQ ID NO: 860895 - RNA, 19 nt, Artificial Sequence
  Description of Artificial Sequence: Synthetic oligonucleotide
cagucaugaaugcguaccc

SEQ ID NO: 860896 - RNA, 19 nt, Artificial Sequence
  Description of Artificial Sequence: Synthetic oligonucleotide
auuaacaaucuuaguagaa

SEQ ID NO: 860897 - RNA, 19 nt, Artificial Sequence
  Description of Artificial Sequence: Synthetic oligonucleotide
aaacugcaccuaguaccgc

SEQ ID NO: 860898 - RNA, 19 nt, Artificial Sequence
  Description of Artificial Sequence: Synthetic oligonucleotide
uuggaacaaauccgaggac

SEQ ID NO: 860899 - RNA, 19 nt, Artificial Sequence
  Description of Artificial Sequence: Synthetic oligonucleotide
gccaaacucaaauggacug

SEQ ID NO: 860900 - RNA, 19 nt, Artificial Sequence
  Description of Artificial Sequence: Synthetic oligonucleotide
uaucgucaaggacuuuaac

SEQ ID NO: 860901 - RNA, 19 nt, Artificial Sequence
  Description of Artificial Sequence: Synthetic oligonucleotide
auugcuacguaaaaccuuu

SEQ ID NO: 860902 - RNA, 19 nt, Artificial Sequence
  Description of Artificial Sequence: Synthetic oligonucleotide
gugaauagccagguggccc

SEQ ID NO: 860903 - RNA, 19 nt, Artificial Sequence
  Description of Artificial Sequence: Synthetic oligonucleotide
acgguggccuauguguugc

SEQ ID NO: 860904 - RNA, 19 nt, Artificial Sequence
  Description of Artificial Sequence: Synthetic oligonucleotide
aaacgaagugaauccugua

SEQ ID NO: 860905 - RNA, 19 nt, Artificial Sequence
  Description of Artificial Sequence: Synthetic oligonucleotide
aaucuuaguagaaguugau

SEQ ID NO: 860906 - RNA, 19 nt, Artificial Sequence
  Description of Artificial Sequence: Synthetic oligonucleotide
gacccuacuggccuccuac

SEQ ID NO: 860907 - RNA, 19 nt, Artificial Sequence
  Description of Artificial Sequence: Synthetic oligonucleotide
cuagcgguucccuuugguc

SEQ ID NO: 860908 - RNA, 19 nt, Artificial Sequence
  Description of Artificial Sequence: Synthetic oligonucleotide
acgauauugcuacguaaaa

SEQ ID NO: 860909 - RNA, 19 nt, Artificial Sequence
  Description of Artificial Sequence: Synthetic oligonucleotide
ugugaauagccagguggcc

SEQ ID NO: 860910 - RNA, 19 nt, Artificial Sequence
  Description of Artificial Sequence: Synthetic oligonucleotide
uuccaccgccaccaaauga

SEQ ID NO: 860911 - RNA, 19 nt, Artificial Sequence
  Description of Artificial Sequence: Synthetic oligonucleotide
augcccuagugacccaaac

SEQ ID NO: 860912 - RNA, 19 nt, Artificial Sequence
  Description of Artificial Sequence: Synthetic oligonucleotide
gagacgauuaagaguagaa

SEQ ID NO: 860913 - RNA, 19 nt, Artificial Sequence
  Description of Artificial Sequence: Synthetic oligonucleotide
gcuaaggacuuaguguugg

SEQ ID NO: 860914 - RNA, 19 nt, Artificial Sequence
  Description of Artificial Sequence: Synthetic oligonucleotide
aaaacgcuaaggacuuagu

SEQ ID NO: 860915 - RNA, 19 nt, Artificial Sequence
  Description of Artificial Sequence: Synthetic oligonucleotide
gggauugucaccuccaucu

SEQ ID NO: 860916 - RNA, 19 nt, Artificial Sequence
  Description of Artificial Sequence: Synthetic oligonucleotide
cuccuacagcuacaaauac

SEQ ID NO: 860917 - RNA, 19 nt, Artificial Sequence
  Description of Artificial Sequence: Synthetic oligonucleotide
gagacggggcugaagucgg

SEQ ID NO: 860918 - RNA, 19 nt, Artificial Sequence
  Description of Artificial Sequence: Synthetic oligonucleotide
accgccaccaaaugaugcu

SEQ ID NO: 860919 - RNA, 19 nt, Artificial Sequence
  Description of Artificial Sequence: Synthetic oligonucleotide
aaacuauauuuggugucaa

SEQ ID NO: 860920 - RNA, 19 nt, Artificial Sequence
  Description of Artificial Sequence: Synthetic oligonucleotide
cuggauuccggaaugugaa

SEQ ID NO: 860921 - RNA, 19 nt, Artificial Sequence
  Description of Artificial Sequence: Synthetic oligonucleotide
aaugggucccuuccaccaa

SEQ ID NO: 860922 - RNA, 19 nt, Artificial Sequence
  Description of Artificial Sequence: Synthetic oligonucleotide
aaggggccgaagacggggc

SEQ ID NO: 860923 - RNA, 19 nt, Artificial Sequence
  Description of Artificial Sequence: Synthetic oligonucleotide
ucugcacgcagcugugugu

SEQ ID NO: 860924 - RNA, 19 nt, Artificial Sequence
  Description of Artificial Sequence: Synthetic oligonucleotide
uggccaucggggcaggccu

SEQ ID NO: 860925 - RNA, 19 nt, Artificial Sequence
  Description of Artificial Sequence: Synthetic oligonucleotide
agugccuguuuccgauacg

SEQ ID NO: 860926 - RNA, 19 nt, Artificial Sequence
  Description of Artificial Sequence: Synthetic oligonucleotide
ggagacggggcugaagucg

SEQ ID NO: 860927 - RNA, 19 nt, Artificial Sequence
  Description of Artificial Sequence: Synthetic oligonucleotide
caccgccaccaaaugaugc

SEQ ID NO: 860928 - RNA, 19 nt, Artificial Sequence
  Description of Artificial Sequence: Synthetic oligonucleotide
ucuugacuaccaggagacg

SEQ ID NO: 860929 - RNA, 19 nt, Artificial Sequence
  Description of Artificial Sequence: Synthetic oligonucleotide
ugccuguuuccgauacgcc

SEQ ID NO: 860930 - RNA, 19 nt, Artificial Sequence
  Description of Artificial Sequence: Synthetic oligonucleotide
gaagucggggcuggagacg

SEQ ID NO: 860931 - RNA, 19 nt, Artificial Sequence
  Description of Artificial Sequence: Synthetic oligonucleotide
cuacgaaagcuagaaacga

SEQ ID NO: 860932 - RNA, 19 nt, Artificial Sequence
  Description of Artificial Sequence: Synthetic oligonucleotide
ugcaccuaguaccgccgcc

SEQ ID NO: 860933 - RNA, 19 nt, Artificial Sequence
  Description of Artificial Sequence: Synthetic oligonucleotide
uauuaccuguaaguuccga

SEQ ID NO: 860934 - RNA, 19 nt, Artificial Sequence
  Description of Artificial Sequence: Synthetic oligonucleotide
augccauuuaagugccugu

SEQ ID NO: 860935 - RNA, 19 nt, Artificial Sequence
  Description of Artificial Sequence: Synthetic oligonucleotide
ggauuccggaaugugaagc

SEQ ID NO: 860936 - RNA, 19 nt, Artificial Sequence
  Description of Artificial Sequence: Synthetic oligonucleotide
ucuacucuuucuugaccau

SEQ ID NO: 860937 - RNA, 19 nt, Artificial Sequence
  Description of Artificial Sequence: Synthetic oligonucleotide
uaauccuucuuugccguau

SEQ ID NO: 860938 - RNA, 19 nt, Artificial Sequence
  Description of Artificial Sequence: Synthetic oligonucleotide
uggccuauguguugccaga

SEQ ID NO: 860939 - RNA, 19 nt, Artificial Sequence
  Description of Artificial Sequence: Synthetic oligonucleotide
ggugcugacagaaggggcc

SEQ ID NO: 860940 - RNA, 19 nt, Artificial Sequence
  Description of Artificial Sequence: Synthetic oligonucleotide
cuuacgacucaagaggaaa

SEQ ID NO: 860941 - RNA, 19 nt, Artificial Sequence
  Description of Artificial Sequence: Synthetic oligonucleotide
ggugucaaaucuugacuac

SEQ ID NO: 860942 - RNA, 19 nt, Artificial Sequence
  Description of Artificial Sequence: Synthetic oligonucleotide
auuccaccgccaccaaaug

SEQ ID NO: 860943 - RNA, 19 nt, Artificial Sequence
  Description of Artificial Sequence: Synthetic oligonucleotide
gcccuagugacccaaacga

SEQ ID NO: 860944 - RNA, 19 nt, Artificial Sequence
  Description of Artificial Sequence: Synthetic oligonucleotide
acacgagagcggcggcugc

SEQ ID NO: 860945 - RNA, 19 nt, Artificial Sequence
  Description of Artificial Sequence: Synthetic oligonucleotide
aaugcguacccagcucccu

SEQ ID NO: 860946 - RNA, 19 nt, Artificial Sequence
  Description of Artificial Sequence: Synthetic oligonucleotide
cuagugacccaaacgaagu

SEQ ID NO: 860947 - RNA, 19 nt, Artificial Sequence
  Description of Artificial Sequence: Synthetic oligonucleotide
accuuuugacugaaggaca

SEQ ID NO: 860948 - RNA, 19 nt, Artificial Sequence
  Description of Artificial Sequence: Synthetic oligonucleotide
gucaaggacuuuaacuguc

SEQ ID NO: 860949 - RNA, 19 nt, Artificial Sequence
  Description of Artificial Sequence: Synthetic oligonucleotide
aggaacccgcugccugucc

SEQ ID NO: 860950 - RNA, 19 nt, Artificial Sequence
  Description of Artificial Sequence: Synthetic oligonucleotide
aaggcgcagcugauauuac

SEQ ID NO: 860951 - RNA, 19 nt, Artificial Sequence
  Description of Artificial Sequence: Synthetic oligonucleotide
auauuaccuguaaguuccg

SEQ ID NO: 860952 - RNA, 19 nt, Artificial Sequence
  Description of Artificial Sequence: Synthetic oligonucleotide
cagauccuuacgacucaag

SEQ ID NO: 860953 - RNA, 19 nt, Artificial Sequence
  Description of Artificial Sequence: Synthetic oligonucleotide
caaacgaagugaauccugu

SEQ ID NO: 860954 - RNA, 19 nt, Artificial Sequence
  Description of Artificial Sequence: Synthetic oligonucleotide
gaaugcguacccagcuccc

SEQ ID NO: 860955 - RNA, 19 nt, Artificial Sequence
  Description of Artificial Sequence: Synthetic oligonucleotide
agcgguucccuuuggucga

SEQ ID NO: 860956 - RNA, 19 nt, Artificial Sequence
  Description of Artificial Sequence: Synthetic oligonucleotide
gacggggcugaagucgggg

SEQ ID NO: 860957 - RNA, 19 nt, Artificial Sequence
  Description of Artificial Sequence: Synthetic oligonucleotide
ccaaacgaagugaauccug

SEQ ID NO: 860958 - RNA, 19 nt, Artificial Sequence
  Description of Artificial Sequence: Synthetic oligonucleotide
auggacccuacuggccucc

SEQ ID NO: 860959 - RNA, 19 nt, Artificial Sequence
  Description of Artificial Sequence: Synthetic oligonucleotide
cugaagucggggcuggaga

SEQ ID NO: 860960 - RNA, 19 nt, Artificial Sequence
  Description of Artificial Sequence: Synthetic oligonucleotide
uucucgucggccacaccau

SEQ ID NO: 860961 - RNA, 19 nt, Artificial Sequence
  Description of Artificial Sequence: Synthetic oligonucleotide
caaauccgaggacgcggcg

SEQ ID NO: 860962 - RNA, 19 nt, Artificial Sequence
  Description of Artificial Sequence: Synthetic oligonucleotide
ugacccaaacgaagugaau

SEQ ID NO: 860963 - RNA, 19 nt, Artificial Sequence
  Description of Artificial Sequence: Synthetic oligonucleotide
aucuggauuccggaaugug

SEQ ID NO: 860964 - RNA, 19 nt, Artificial Sequence
  Description of Artificial Sequence: Synthetic oligonucleotide
ucgucggccacaccauuua

SEQ ID NO: 860965 - RNA, 19 nt, Artificial Sequence
  Description of Artificial Sequence: Synthetic oligonucleotide
uuaauccuucuuugccgua

SEQ ID NO: 860966 - RNA, 19 nt, Artificial Sequence
  Description of Artificial Sequence: Synthetic oligonucleotide
caugaaugcguacccagcu

SEQ ID NO: 860967 - RNA, 19 nt, Artificial Sequence
  Description of Artificial Sequence: Synthetic oligonucleotide
uauggacccuacuggccuc

SEQ ID NO: 860968 - RNA, 19 nt, Artificial Sequence
  Description of Artificial Sequence: Synthetic oligonucleotide
agucgggcggcuggucucc

SEQ ID NO: 860969 - RNA, 19 nt, Artificial Sequence
  Description of Artificial Sequence: Synthetic oligonucleotide
gcaagggcguucucgucgg

SEQ ID NO: 860970 - RNA, 19 nt, Artificial Sequence
  Description of Artificial Sequence: Synthetic oligonucleotide
ugccauuuaagugccuguu

SEQ ID NO: 860971 - RNA, 19 nt, Artificial Sequence
  Description of Artificial Sequence: Synthetic oligonucleotide
caaggacuuuaacugucca

SEQ ID NO: 860972 - RNA, 19 nt, Artificial Sequence
  Description of Artificial Sequence: Synthetic oligonucleotide
gcuagaaacgauauugcua

SEQ ID NO: 860973 - RNA, 19 nt, Artificial Sequence
  Description of Artificial Sequence: Synthetic oligonucleotide
gguuucuauuuccucggga

SEQ ID NO: 860974 - RNA, 19 nt, Artificial Sequence
  Description of Artificial Sequence: Synthetic oligonucleotide
caaggcgcagcugauauua

SEQ ID NO: 860975 - RNA, 19 nt, Artificial Sequence
  Description of Artificial Sequence: Synthetic oligonucleotide
cgauguacuaaaacugcac

SEQ ID NO: 860976 - RNA, 19 nt, Artificial Sequence
  Description of Artificial Sequence: Synthetic oligonucleotide
cauuccaccgccaccaaau

SEQ ID NO: 860977 - RNA, 19 nt, Artificial Sequence
  Description of Artificial Sequence: Synthetic oligonucleotide
cugaaucaaaagcacccua

SEQ ID NO: 860978 - RNA, 19 nt, Artificial Sequence
  Description of Artificial Sequence: Synthetic oligonucleotide
ugcguacccagcucccuau

SEQ ID NO: 860979 - RNA, 19 nt, Artificial Sequence
  Description of Artificial Sequence: Synthetic oligonucleotide
cccuauggacccuacuggc

SEQ ID NO: 860980 - RNA, 19 nt, Artificial Sequence
  Description of Artificial Sequence: Synthetic oligonucleotide
auaccugguugugggagca

SEQ ID NO: 860981 - RNA, 19 nt, Artificial Sequence
  Description of Artificial Sequence: Synthetic oligonucleotide
cuauggacccuacuggccu

SEQ ID NO: 860982 - RNA, 19 nt, Artificial Sequence
  Description of Artificial Sequence: Synthetic oligonucleotide
aauagccagguggcccuga

SEQ ID NO: 860983 - RNA, 19 nt, Artificial Sequence
  Description of Artificial Sequence: Synthetic oligonucleotide
ggacugucaaaaugacuuc

SEQ ID NO: 860984 - RNA, 19 nt, Artificial Sequence
  Description of Artificial Sequence: Synthetic oligonucleotide
cugaccuacgaaagcuaga

SEQ ID NO: 860985 - RNA, 19 nt, Artificial Sequence
  Description of Artificial Sequence: Synthetic oligonucleotide
caccccacacgagagcggc

SEQ ID NO: 860986 - RNA, 19 nt, Artificial Sequence
  Description of Artificial Sequence: Synthetic oligonucleotide
cugcacgcagcugugugug

SEQ ID NO: 860987 - RNA, 19 nt, Artificial Sequence
  Description of Artificial Sequence: Synthetic oligonucleotide
cacgguggccuauguguug

SEQ ID NO: 860988 - RNA, 19 nt, Artificial Sequence
  Description of Artificial Sequence: Synthetic oligonucleotide
guaccucgguuucuauuuc

SEQ ID NO: 860989 - RNA, 19 nt, Artificial Sequence
  Description of Artificial Sequence: Synthetic oligonucleotide
agaaugaggcagauccuua

SEQ ID NO: 860990 - RNA, 19 nt, Artificial Sequence
  Description of Artificial Sequence: Synthetic oligonucleotide
gcaccuaguaccgccgccg

SEQ ID NO: 860991 - RNA, 19 nt, Artificial Sequence
  Description of Artificial Sequence: Synthetic oligonucleotide
uuacaaggcugaggcuaug

SEQ ID NO: 860992 - RNA, 19 nt, Artificial Sequence
  Description of Artificial Sequence: Synthetic oligonucleotide
caccuaguaccgccgccgc

SEQ ID NO: 860993 - RNA, 19 nt, Artificial Sequence
  Description of Artificial Sequence: Synthetic oligonucleotide
gaagucgggcggcuggucu

SEQ ID NO: 860994 - RNA, 19 nt, Artificial Sequence
  Description of Artificial Sequence: Synthetic oligonucleotide
gguaugugcuggccucucc

SEQ ID NO: 860995 - RNA, 19 nt, Artificial Sequence
  Description of Artificial Sequence: Synthetic oligonucleotide
cugcaccuaguaccgccgc

SEQ ID NO: 860996 - RNA, 19 nt, Artificial Sequence
  Description of Artificial Sequence: Synthetic oligonucleotide
auguguugccagaguacug

SEQ ID NO: 860997 - RNA, 19 nt, Artificial Sequence
  Description of Artificial Sequence: Synthetic oligonucleotide
cgauauugcuacguaaaac

SEQ ID NO: 860998 - RNA, 19 nt, Artificial Sequence
  Description of Artificial Sequence: Synthetic oligonucleotide
ggugaggcaugucucugca

SEQ ID NO: 860999 - RNA, 19 nt, Artificial Sequence
  Description of Artificial Sequence: Synthetic oligonucleotide
ucaaggcgcagcugauauu

SEQ ID NO: 861000 - RNA, 19 nt, Artificial Sequence
  Description of Artificial Sequence: Synthetic oligonucleotide
uugccguauuugucauaga

SEQ ID NO: 861001 - RNA, 19 nt, Artificial Sequence
  Description of Artificial Sequence: Synthetic oligonucleotide
cuaguaccgccgccgccag

SEQ ID NO: 861002 - RNA, 19 nt, Artificial Sequence
  Description of Artificial Sequence: Synthetic oligonucleotide
ugaugggccagagcuggua

SEQ ID NO: 861003 - RNA, 19 nt, Artificial Sequence
  Description of Artificial Sequence: Synthetic oligonucleotide
uugcuacguaaaaccuuuu

SEQ ID NO: 861004 - RNA, 19 nt, Artificial Sequence
  Description of Artificial Sequence: Synthetic oligonucleotide
cacacgagagcggcggcug

SEQ ID NO: 861005 - RNA, 19 nt, Artificial Sequence
  Description of Artificial Sequence: Synthetic oligonucleotide
gaauuuccgcucugccucu

SEQ ID NO: 861006 - RNA, 19 nt, Artificial Sequence
  Description of Artificial Sequence: Synthetic oligonucleotide
ccagaguacugaaucaaaa

SEQ ID NO: 861007 - RNA, 19 nt, Artificial Sequence
  Description of Artificial Sequence: Synthetic oligonucleotide
guaauccaccauguuuuaa

SEQ ID NO: 861008 - RNA, 19 nt, Artificial Sequence
  Description of Artificial Sequence: Synthetic oligonucleotide
cacgagagcggcggcugcg

SEQ ID NO: 861009 - RNA, 19 nt, Artificial Sequence
  Description of Artificial Sequence: Synthetic oligonucleotide
cucaaggcgcagcugauau

SEQ ID NO: 861010 - RNA, 19 nt, Artificial Sequence
  Description of Artificial Sequence: Synthetic oligonucleotide
acccggacuguugcugggg

SEQ ID NO: 861011 - RNA, 19 nt, Artificial Sequence
  Description of Artificial Sequence: Synthetic oligonucleotide
ucucgucggccacaccauu

SEQ ID NO: 861012 - RNA, 19 nt, Artificial Sequence
  Description of Artificial Sequence: Synthetic oligonucleotide
gacgcggcggccggcgagg

SEQ ID NO: 861013 - RNA, 19 nt, Artificial Sequence
  Description of Artificial Sequence: Synthetic oligonucleotide
cguaaaaccuuuugacuga

SEQ ID NO: 861014 - RNA, 19 nt, Artificial Sequence
  Description of Artificial Sequence: Synthetic oligonucleotide
gaggggacccggacuguug

SEQ ID NO: 861015 - RNA, 19 nt, Artificial Sequence
  Description of Artificial Sequence: Synthetic oligonucleotide
ggagacgauuaagaguaga

SEQ ID NO: 861016 - RNA, 19 nt, Artificial Sequence
  Description of Artificial Sequence: Synthetic oligonucleotide
gaauagccagguggcccug

SEQ ID NO: 861017 - RNA, 19 nt, Artificial Sequence
  Description of Artificial Sequence: Synthetic oligonucleotide
gugaggcaugucucugcac

SEQ ID NO: 861018 - RNA, 19 nt, Artificial Sequence
  Description of Artificial Sequence: Synthetic oligonucleotide
cuuuggucgacuucuucuu

SEQ ID NO: 861019 - RNA, 19 nt, Artificial Sequence
  Description of Artificial Sequence: Synthetic oligonucleotide
gucggccacaccauuuauc

SEQ ID NO: 861020 - RNA, 19 nt, Artificial Sequence
  Description of Artificial Sequence: Synthetic oligonucleotide
uccucgcgcuuuccuuucu

SEQ ID NO: 861021 - RNA, 19 nt, Artificial Sequence
  Description of Artificial Sequence: Synthetic oligonucleotide
augcguacccagcucccua

SEQ ID NO: 861022 - RNA, 19 nt, Artificial Sequence
  Description of Artificial Sequence: Synthetic oligonucleotide
cugcacgcccagaacuuca

SEQ ID NO: 861023 - RNA, 19 nt, Artificial Sequence
  Description of Artificial Sequence: Synthetic oligonucleotide
agcucacgguggccuaugu

SEQ ID NO: 861024 - RNA, 19 nt, Artificial Sequence
  Description of Artificial Sequence: Synthetic oligonucleotide
ggauugucaccuccaucuc

SEQ ID NO: 861025 - RNA, 19 nt, Artificial Sequence
  Description of Artificial Sequence: Synthetic oligonucleotide
uagcucacgguggccuaug

SEQ ID NO: 861026 - RNA, 19 nt, Artificial Sequence
  Description of Artificial Sequence: Synthetic oligonucleotide
aggagacgauuaagaguag

SEQ ID NO: 861027 - RNA, 19 nt, Artificial Sequence
  Description of Artificial Sequence: Synthetic oligonucleotide
ccccaugcccuagugaccc

SEQ ID NO: 861028 - RNA, 19 nt, Artificial Sequence
  Description of Artificial Sequence: Synthetic oligonucleotide
cuccucgcgcuuuccuuuc

SEQ ID NO: 861029 - RNA, 19 nt, Artificial Sequence
  Description of Artificial Sequence: Synthetic oligonucleotide
ucgaguccucuuucugcuu

SEQ ID NO: 861030 - RNA, 19 nt, Artificial Sequence
  Description of Artificial Sequence: Synthetic oligonucleotide
auccgaggacgcggcggcc

SEQ ID NO: 861031 - RNA, 19 nt, Artificial Sequence
  Description of Artificial Sequence: Synthetic oligonucleotide
ccaugaugggccagagcug

SEQ ID NO: 861032 - RNA, 19 nt, Artificial Sequence
  Description of Artificial Sequence: Synthetic oligonucleotide
ugguaugugcuggccucuc

SEQ ID NO: 861033 - RNA, 19 nt, Artificial Sequence
  Description of Artificial Sequence: Synthetic oligonucleotide
gccuguuuccgauacgccu

SEQ ID NO: 861034 - RNA, 19 nt, Artificial Sequence
  Description of Artificial Sequence: Synthetic oligonucleotide
ccaggagacgauuaagagu

SEQ ID NO: 861035 - RNA, 19 nt, Artificial Sequence
  Description of Artificial Sequence: Synthetic oligonucleotide
guuacaaggcugaggcuau

SEQ ID NO: 861036 - RNA, 19 nt, Artificial Sequence
  Description of Artificial Sequence: Synthetic oligonucleotide
cccuacuggccuccuacag

SEQ ID NO: 861037 - RNA, 19 nt, Artificial Sequence
  Description of Artificial Sequence: Synthetic oligonucleotide
agguggcccugaccuacga

SEQ ID NO: 861038 - RNA, 19 nt, Artificial Sequence
  Description of Artificial Sequence: Synthetic oligonucleotide
gcucacgguggccuaugug

SEQ ID NO: 861039 - RNA, 19 nt, Artificial Sequence
  Description of Artificial Sequence: Synthetic oligonucleotide
ccucgguuucuauuuccuc

SEQ ID NO: 861040 - RNA, 19 nt, Artificial Sequence
  Description of Artificial Sequence: Synthetic oligonucleotide
ggcgcagcugauauuaccu

SEQ ID NO: 861041 - RNA, 19 nt, Artificial Sequence
  Description of Artificial Sequence: Synthetic oligonucleotide
ccaaguccagccuagcggu

SEQ ID NO: 861042 - RNA, 19 nt, Artificial Sequence
  Description of Artificial Sequence: Synthetic oligonucleotide
cuuugccguauuugucaua

SEQ ID NO: 861043 - RNA, 19 nt, Artificial Sequence
  Description of Artificial Sequence: Synthetic oligonucleotide
cugaggcuaugucacuacu

SEQ ID NO: 861044 - RNA, 19 nt, Artificial Sequence
  Description of Artificial Sequence: Synthetic oligonucleotide
caagggcguucucgucggc

SEQ ID NO: 861045 - RNA, 19 nt, Artificial Sequence
  Description of Artificial Sequence: Synthetic oligonucleotide
ccccacacgagagcggcgg

SEQ ID NO: 861046 - RNA, 19 nt, Artificial Sequence
  Description of Artificial Sequence: Synthetic oligonucleotide
caugcccuagugacccaaa

SEQ ID NO: 861047 - RNA, 19 nt, Artificial Sequence
  Description of Artificial Sequence: Synthetic oligonucleotide
agacggggcugaagucggg

SEQ ID NO: 861048 - RNA, 19 nt, Artificial Sequence
  Description of Artificial Sequence: Synthetic oligonucleotide
ccgaagacggggcugaagu

SEQ ID NO: 861049 - RNA, 19 nt, Artificial Sequence
  Description of Artificial Sequence: Synthetic oligonucleotide
ggggccgggccaugauggg

SEQ ID NO: 861050 - RNA, 19 nt, Artificial Sequence
  Description of Artificial Sequence: Synthetic oligonucleotide
uguuuccgauacgccuuuu

SEQ ID NO: 861051 - RNA, 19 nt, Artificial Sequence
  Description of Artificial Sequence: Synthetic oligonucleotide
accccacacgagagcggcg

SEQ ID NO: 861052 - RNA, 19 nt, Artificial Sequence
  Description of Artificial Sequence: Synthetic oligonucleotide
gccgccaggagacagucau

SEQ ID NO: 861053 - RNA, 19 nt, Artificial Sequence
  Description of Artificial Sequence: Synthetic oligonucleotide
ccggaaugugaagccaaac

SEQ ID NO: 861054 - RNA, 19 nt, Artificial Sequence
  Description of Artificial Sequence: Synthetic oligonucleotide
gccagaguacugaaucaaa

SEQ ID NO: 861055 - RNA, 19 nt, Artificial Sequence
  Description of Artificial Sequence: Synthetic oligonucleotide
cgguuucuauuuccucggg

SEQ ID NO: 861056 - RNA, 19 nt, Artificial Sequence
  Description of Artificial Sequence: Synthetic oligonucleotide
gccuagcgguucccuuugg

SEQ ID NO: 861057 - RNA, 19 nt, Artificial Sequence
  Description of Artificial Sequence: Synthetic oligonucleotide
cgcuaaggacuuaguguug

SEQ ID NO: 861058 - RNA, 19 nt, Artificial Sequence
  Description of Artificial Sequence: Synthetic oligonucleotide
gcugacuauucugcacgca

SEQ ID NO: 861059 - RNA, 19 nt, Artificial Sequence
  Description of Artificial Sequence: Synthetic oligonucleotide
gccacccgggauugucacc

SEQ ID NO: 861060 - RNA, 19 nt, Artificial Sequence
  Description of Artificial Sequence: Synthetic oligonucleotide
cgaagacggggcugaaguc

SEQ ID NO: 861061 - RNA, 19 nt, Artificial Sequence
  Description of Artificial Sequence: Synthetic oligonucleotide
ccgccaccaaaugaugcug

SEQ ID NO: 861062 - RNA, 19 nt, Artificial Sequence
  Description of Artificial Sequence: Synthetic oligonucleotide
ccuuacgacucaagaggaa

SEQ ID NO: 861063 - RNA, 19 nt, Artificial Sequence
  Description of Artificial Sequence: Synthetic oligonucleotide
cgggcggcuggucuccucg

SEQ ID NO: 861064 - RNA, 19 nt, Artificial Sequence
  Description of Artificial Sequence: Synthetic oligonucleotide
cugcggcugccgccaaguc

SEQ ID NO: 861065 - RNA, 19 nt, Artificial Sequence
  Description of Artificial Sequence: Synthetic oligonucleotide
cucgucggccacaccauuu

SEQ ID NO: 861066 - RNA, 19 nt, Artificial Sequence
  Description of Artificial Sequence: Synthetic oligonucleotide
ucgggcggcuggucuccuc

SEQ ID NO: 861067 - RNA, 19 nt, Artificial Sequence
  Description of Artificial Sequence: Synthetic oligonucleotide
cacccgggauugucaccuc

SEQ ID NO: 861068 - RNA, 19 nt, Artificial Sequence
  Description of Artificial Sequence: Synthetic oligonucleotide
uggucuccucgcggcucug

SEQ ID NO: 861069 - RNA, 19 nt, Artificial Sequence
  Description of Artificial Sequence: Synthetic oligonucleotide
cagccuagcgguucccuuu

SEQ ID NO: 861070 - RNA, 19 nt, Artificial Sequence
  Description of Artificial Sequence: Synthetic oligonucleotide
cucgggaaccccuccgguu

SEQ ID NO: 861071 - RNA, 19 nt, Artificial Sequence
  Description of Artificial Sequence: Synthetic oligonucleotide
cccuaacacccauggcuca

SEQ ID NO: 861072 - RNA, 19 nt, Artificial Sequence
  Description of Artificial Sequence: Synthetic oligonucleotide
cgucaaggacuuuaacugu

SEQ ID NO: 861073 - RNA, 19 nt, Artificial Sequence
  Description of Artificial Sequence: Synthetic oligonucleotide
cgggauugucaccuccauc

SEQ ID NO: 861074 - RNA, 19 nt, Artificial Sequence
  Description of Artificial Sequence: Synthetic oligonucleotide
cuguuuccgauacgccuuu

SEQ ID NO: 861075 - RNA, 19 nt, Artificial Sequence
  Description of Artificial Sequence: Synthetic oligonucleotide
ccucgcgcuuuccuuucuc

SEQ ID NO: 861076 - RNA, 19 nt, Artificial Sequence
  Description of Artificial Sequence: Synthetic oligonucleotide
acaggccacccgggauugu

SEQ ID NO: 861077 - RNA, 19 nt, Artificial Sequence
  Description of Artificial Sequence: Synthetic oligonucleotide
ccgccaggagacagucaug

SEQ ID NO: 861078 - RNA, 19 nt, Artificial Sequence
  Description of Artificial Sequence: Synthetic oligonucleotide
guagcucacgguggccuau

SEQ ID NO: 861079 - RNA, 19 nt, Artificial Sequence
  Description of Artificial Sequence: Synthetic oligonucleotide
ccuaacacccauggcucaa

SEQ ID NO: 861080 - RNA, 19 nt, Artificial Sequence
  Description of Artificial Sequence: Synthetic oligonucleotide
caguugccaggaacccgcu

SEQ ID NO: 861081 - RNA, 19 nt, Artificial Sequence
  Description of Artificial Sequence: Synthetic oligonucleotide
cccaaacgaagugaauccu

SEQ ID NO: 861082 - RNA, 19 nt, Artificial Sequence
  Description of Artificial Sequence: Synthetic oligonucleotide
ccacccgggauugucaccu

SEQ ID NO: 861083 - RNA, 19 nt, Artificial Sequence
  Description of Artificial Sequence: Synthetic oligonucleotide
ccuagcgguucccuuuggu

SEQ ID NO: 861084 - RNA, 19 nt, Artificial Sequence
  Description of Artificial Sequence: Synthetic oligonucleotide
ggccuccuacagcuacaaa

SEQ ID NO: 861085 - RNA, 19 nt, Artificial Sequence
  Description of Artificial Sequence: Synthetic oligonucleotide
gcugcggcugccgccaagu

SEQ ID NO: 861086 - RNA, 19 nt, Artificial Sequence
  Description of Artificial Sequence: Synthetic oligonucleotide
ccaucggggcaggccuggg

SEQ ID NO: 861087 - RNA, 19 nt, Artificial Sequence
  Description of Artificial Sequence: Synthetic oligonucleotide
ggacccuacuggccuccua

SEQ ID NO: 861088 - RNA, 19 nt, Artificial Sequence
  Description of Artificial Sequence: Synthetic oligonucleotide
ccgccaaguccagccuagc

SEQ ID NO: 861089 - RNA, 19 nt, Artificial Sequence
  Description of Artificial Sequence: Synthetic oligonucleotide
ccgccgccaggagacaguc

SEQ ID NO: 861090 - RNA, 19 nt, Artificial Sequence
  Description of Artificial Sequence: Synthetic oligonucleotide
ggggacccggacuguugcu

SEQ ID NO: 861091 - RNA, 19 nt, Artificial Sequence
  Description of Artificial Sequence: Synthetic oligonucleotide
gcgguucccuuuggucgac

SEQ ID NO: 861092 - RNA, 19 nt, Artificial Sequence
  Description of Artificial Sequence: Synthetic oligonucleotide
ccucgggaaccccuccggu

SEQ ID NO: 861093 - RNA, 19 nt, Artificial Sequence
  Description of Artificial Sequence: Synthetic oligonucleotide
ggaggggacccggacuguu

SEQ ID NO: 861094 - RNA, 19 nt, Artificial Sequence
  Description of Artificial Sequence: Synthetic oligonucleotide
ccagccuagcgguucccuu

SEQ ID NO: 861095 - RNA, 19 nt, Artificial Sequence
  Description of Artificial Sequence: Synthetic oligonucleotide
ccacacgagagcggcggcu

SEQ ID NO: 861096 - RNA, 19 nt, Artificial Sequence
  Description of Artificial Sequence: Synthetic oligonucleotide
gccgccgccaggagacagu

SEQ ID NO: 861097 - RNA, 19 nt, Artificial Sequence
  Description of Artificial Sequence: Synthetic oligonucleotide
gucgggcggcuggucuccu

SEQ ID NO: 861098 - RNA, 19 nt, Artificial Sequence
  Description of Artificial Sequence: Synthetic oligonucleotide
gcggcgucuccucgcgcuu

SEQ ID NO: 861099 - RNA, 19 nt, Artificial Sequence
  Description of Artificial Sequence: Synthetic oligonucleotide
cgucggccacaccauuuau

SEQ ID NO: 861100 - RNA, 19 nt, Artificial Sequence
  Description of Artificial Sequence: Synthetic oligonucleotide
ccucuccgcuggcauucuu

SEQ ID NO: 861101 - RNA, 19 nt, Artificial Sequence
  Description of Artificial Sequence: Synthetic oligonucleotide
cgguucccuuuggucgacu

SEQ ID NO: 861102 - RNA, 19 nt, Artificial Sequence
  Description of Artificial Sequence: Synthetic oligonucleotide
auugguacaaaucacagac

SEQ ID NO: 861103 - RNA, 19 nt, Artificial Sequence
  Description of Artificial Sequence: Synthetic oligonucleotide
aacauguuauguuagcagc

SEQ ID NO: 861104 - RNA, 19 nt, Artificial Sequence
  Description of Artificial Sequence: Synthetic oligonucleotide
aaagcagccaacuagagca

SEQ ID NO: 861105 - RNA, 19 nt, Artificial Sequence
  Description of Artificial Sequence: Synthetic oligonucleotide
uguauuaaaauccagguua

SEQ ID NO: 861106 - RNA, 19 nt, Artificial Sequence
  Description of Artificial Sequence: Synthetic oligonucleotide
uauacuaucauauucaaua

SEQ ID NO: 861107 - RNA, 19 nt, Artificial Sequence
  Description of Artificial Sequence: Synthetic oligonucleotide
uggagagugaccaauauag

SEQ ID NO: 861108 - RNA, 19 nt, Artificial Sequence
  Description of Artificial Sequence: Synthetic oligonucleotide
ugagaauugguacaaauca

SEQ ID NO: 861109 - RNA, 19 nt, Artificial Sequence
  Description of Artificial Sequence: Synthetic oligonucleotide
acaucuacaaaguacaaag

SEQ ID NO: 861110 - RNA, 19 nt, Artificial Sequence
  Description of Artificial Sequence: Synthetic oligonucleotide
guuauuauggucuuagugc

SEQ ID NO: 861111 - RNA, 19 nt, Artificial Sequence
  Description of Artificial Sequence: Synthetic oligonucleotide
aauccuaaguauuuucuag

SEQ ID NO: 861112 - RNA, 19 nt, Artificial Sequence
  Description of Artificial Sequence: Synthetic oligonucleotide
auaucucuugacuugagcg

SEQ ID NO: 861113 - RNA, 19 nt, Artificial Sequence
  Description of Artificial Sequence: Synthetic oligonucleotide
uauacuaagaaaucaccag

SEQ ID NO: 861114 - RNA, 19 nt, Artificial Sequence
  Description of Artificial Sequence: Synthetic oligonucleotide
uggauguuaauaaauuuag

SEQ ID NO: 861115 - RNA, 19 nt, Artificial Sequence
  Description of Artificial Sequence: Synthetic oligonucleotide
aaaagauguguauacauaa

SEQ ID NO: 861116 - RNA, 19 nt, Artificial Sequence
  Description of Artificial Sequence: Synthetic oligonucleotide
aaacauguuauguuagcag

SEQ ID NO: 861117 - RNA, 19 nt, Artificial Sequence
  Description of Artificial Sequence: Synthetic oligonucleotide
uguuauuauggucuuagug

SEQ ID NO: 861118 - RNA, 19 nt, Artificial Sequence
  Description of Artificial Sequence: Synthetic oligonucleotide
aauauguccaaagagacaa

SEQ ID NO: 861119 - RNA, 19 nt, Artificial Sequence
  Description of Artificial Sequence: Synthetic oligonucleotide
ucuaaagaaacaacucuag

SEQ ID NO: 861120 - RNA, 19 nt, Artificial Sequence
  Description of Artificial Sequence: Synthetic oligonucleotide
cuaaguauuuucuagguuc

SEQ ID NO: 861121 - RNA, 19 nt, Artificial Sequence
  Description of Artificial Sequence: Synthetic oligonucleotide
aauaacauuugguauuaca

SEQ ID NO: 861122 - RNA, 19 nt, Artificial Sequence
  Description of Artificial Sequence: Synthetic oligonucleotide
uaauaaguguauuaaaauc

SEQ ID NO: 861123 - RNA, 19 nt, Artificial Sequence
  Description of Artificial Sequence: Synthetic oligonucleotide
aauugcuucaccuugccaa

SEQ ID NO: 861124 - RNA, 19 nt, Artificial Sequence
  Description of Artificial Sequence: Synthetic oligonucleotide
ugagguuagacugaguagg

SEQ ID NO: 861125 - RNA, 19 nt, Artificial Sequence
  Description of Artificial Sequence: Synthetic oligonucleotide
ucaaaucacaguuuggaca

SEQ ID NO: 861126 - RNA, 19 nt, Artificial Sequence
  Description of Artificial Sequence: Synthetic oligonucleotide
gaaccuaaggaugaaacgg

SEQ ID NO: 861127 - RNA, 19 nt, Artificial Sequence
  Description of Artificial Sequence: Synthetic oligonucleotide
aaccucaugcuauaaaaug

SEQ ID NO: 861128 - RNA, 19 nt, Artificial Sequence
  Description of Artificial Sequence: Synthetic oligonucleotide
aauagauuaucugcugugg

SEQ ID NO: 861129 - RNA, 19 nt, Artificial Sequence
  Description of Artificial Sequence: Synthetic oligonucleotide
uacaacauucacucaaggg

SEQ ID NO: 861130 - RNA, 19 nt, Artificial Sequence
  Description of Artificial Sequence: Synthetic oligonucleotide
aaacacauacccaaggcuc

SEQ ID NO: 861131 - RNA, 19 nt, Artificial Sequence
  Description of Artificial Sequence: Synthetic oligonucleotide
uaaacagauugcuacaaca

SEQ ID NO: 861132 - RNA, 19 nt, Artificial Sequence
  Description of Artificial Sequence: Synthetic oligonucleotide
uuuauguugaaaagaugug

SEQ ID NO: 861133 - RNA, 19 nt, Artificial Sequence
  Description of Artificial Sequence: Synthetic oligonucleotide
uuccuauuuauucuggaug

SEQ ID NO: 861134 - RNA, 19 nt, Artificial Sequence
  Description of Artificial Sequence: Synthetic oligonucleotide
aaacaacucuagauaaucc

SEQ ID NO: 861135 - RNA, 19 nt, Artificial Sequence
  Description of Artificial Sequence: Synthetic oligonucleotide
ucuacuuagauugaucaug

SEQ ID NO: 861136 - RNA, 19 nt, Artificial Sequence
  Description of Artificial Sequence: Synthetic oligonucleotide
acuauacuaagaaaucacc

SEQ ID NO: 861137 - RNA, 19 nt, Artificial Sequence
  Description of Artificial Sequence: Synthetic oligonucleotide
uuuaucuuugcagugacac

SEQ ID NO: 861138 - RNA, 19 nt, Artificial Sequence
  Description of Artificial Sequence: Synthetic oligonucleotide
gauucuaacuggaacaacc

SEQ ID NO: 861139 - RNA, 19 nt, Artificial Sequence
  Description of Artificial Sequence: Synthetic oligonucleotide
ucaugcuauaaaauggucu

SEQ ID NO: 861140 - RNA, 19 nt, Artificial Sequence
  Description of Artificial Sequence: Synthetic oligonucleotide
uaaggcucaucuuuaagcc

SEQ ID NO: 861141 - RNA, 19 nt, Artificial Sequence
  Description of Artificial Sequence: Synthetic oligonucleotide
augaauaccaaacauguua

SEQ ID NO: 861142 - RNA, 19 nt, Artificial Sequence
  Description of Artificial Sequence: Synthetic oligonucleotide
ucaucuucgagacuuccag

SEQ ID NO: 861143 - RNA, 19 nt, Artificial Sequence
  Description of Artificial Sequence: Synthetic oligonucleotide
aaauauguggcuguuauua

SEQ ID NO: 861144 - RNA, 19 nt, Artificial Sequence
  Description of Artificial Sequence: Synthetic oligonucleotide
aaaugcuaaauuugauucu

SEQ ID NO: 861145 - RNA, 19 nt, Artificial Sequence
  Description of Artificial Sequence: Synthetic oligonucleotide
aaaaugacugaagaugucu

SEQ ID NO: 861146 - RNA, 19 nt, Artificial Sequence
  Description of Artificial Sequence: Synthetic oligonucleotide
auccauaugaauaccaaac

SEQ ID NO: 861147 - RNA, 19 nt, Artificial Sequence
  Description of Artificial Sequence: Synthetic oligonucleotide
uguguauacauaaaagguu

SEQ ID NO: 861148 - RNA, 19 nt, Artificial Sequence
  Description of Artificial Sequence: Synthetic oligonucleotide
uacuauacuaagaaaucac

SEQ ID NO: 861149 - RNA, 19 nt, Artificial Sequence
  Description of Artificial Sequence: Synthetic oligonucleotide
aguaauaacauuugguauu

SEQ ID NO: 861150 - RNA, 19 nt, Artificial Sequence
  Description of Artificial Sequence: Synthetic oligonucleotide
ugacauaaacaauuuuaag

SEQ ID NO: 861151 - RNA, 19 nt, Artificial Sequence
  Description of Artificial Sequence: Synthetic oligonucleotide
guugaaaagauguguauac

SEQ ID NO: 861152 - RNA, 19 nt, Artificial Sequence
  Description of Artificial Sequence: Synthetic oligonucleotide
uccuauuuauucuggauga

SEQ ID NO: 861153 - RNA, 19 nt, Artificial Sequence
  Description of Artificial Sequence: Synthetic oligonucleotide
ugcucaguuccacacauag

SEQ ID NO: 861154 - RNA, 19 nt, Artificial Sequence
  Description of Artificial Sequence: Synthetic oligonucleotide
uuuauucacauagaggggu

SEQ ID NO: 861155 - RNA, 19 nt, Artificial Sequence
  Description of Artificial Sequence: Synthetic oligonucleotide
ucuggugguuuaaaguagg

SEQ ID NO: 861156 - RNA, 19 nt, Artificial Sequence
  Description of Artificial Sequence: Synthetic oligonucleotide
aucaugauuugauucuaac

SEQ ID NO: 861157 - RNA, 19 nt, Artificial Sequence
  Description of Artificial Sequence: Synthetic oligonucleotide
uuuacugucgucuugcguu

SEQ ID NO: 861158 - RNA, 19 nt, Artificial Sequence
  Description of Artificial Sequence: Synthetic oligonucleotide
cuuaaaaccaugauugcca

SEQ ID NO: 861159 - RNA, 19 nt, Artificial Sequence
  Description of Artificial Sequence: Synthetic oligonucleotide
ugucucuauacuaucauau

SEQ ID NO: 861160 - RNA, 19 nt, Artificial Sequence
  Description of Artificial Sequence: Synthetic oligonucleotide
uccauaugaauaccaaaca

SEQ ID NO: 861161 - RNA, 19 nt, Artificial Sequence
  Description of Artificial Sequence: Synthetic oligonucleotide
cuugccaaacuucuggagg

SEQ ID NO: 861162 - RNA, 19 nt, Artificial Sequence
  Description of Artificial Sequence: Synthetic oligonucleotide
ugaaaagauguguauacau

SEQ ID NO: 861163 - RNA, 19 nt, Artificial Sequence
  Description of Artificial Sequence: Synthetic oligonucleotide
uucuaaagaaacaacucua

SEQ ID NO: 861164 - RNA, 19 nt, Artificial Sequence
  Description of Artificial Sequence: Synthetic oligonucleotide
uggaguuacaaauccaaac

SEQ ID NO: 861165 - RNA, 19 nt, Artificial Sequence
  Description of Artificial Sequence: Synthetic oligonucleotide
uguucaaaucacaguuugg

SEQ ID NO: 861166 - RNA, 19 nt, Artificial Sequence
  Description of Artificial Sequence: Synthetic oligonucleotide
aauccagguuaguaauaac

SEQ ID NO: 861167 - RNA, 19 nt, Artificial Sequence
  Description of Artificial Sequence: Synthetic oligonucleotide
uaaguguauuaaaauccag

SEQ ID NO: 861168 - RNA, 19 nt, Artificial Sequence
  Description of Artificial Sequence: Synthetic oligonucleotide
acagauugcuacaacauuc

SEQ ID NO: 861169 - RNA, 19 nt, Artificial Sequence
  Description of Artificial Sequence: Synthetic oligonucleotide
ucaugauuugauucuaacu

SEQ ID NO: 861170 - RNA, 19 nt, Artificial Sequence
  Description of Artificial Sequence: Synthetic oligonucleotide
uuaugaucauaucucuuga

SEQ ID NO: 861171 - RNA, 19 nt, Artificial Sequence
  Description of Artificial Sequence: Synthetic oligonucleotide
uggcucaaggcuuaugggg

SEQ ID NO: 861172 - RNA, 19 nt, Artificial Sequence
  Description of Artificial Sequence: Synthetic oligonucleotide
gauguuaauaaauuuaguu

SEQ ID NO: 861173 - RNA, 19 nt, Artificial Sequence
  Description of Artificial Sequence: Synthetic oligonucleotide
uccuaauugagauuuggaa

SEQ ID NO: 861174 - RNA, 19 nt, Artificial Sequence
  Description of Artificial Sequence: Synthetic oligonucleotide
uugauucuauacuuuguug

SEQ ID NO: 861175 - RNA, 19 nt, Artificial Sequence
  Description of Artificial Sequence: Synthetic oligonucleotide
cuugacuugagcgugggcc

SEQ ID NO: 861176 - RNA, 19 nt, Artificial Sequence
  Description of Artificial Sequence: Synthetic oligonucleotide
aaaucaccagacaaauggg

SEQ ID NO: 861177 - RNA, 19 nt, Artificial Sequence
  Description of Artificial Sequence: Synthetic oligonucleotide
gauucuauacuuuguugac

SEQ ID NO: 861178 - RNA, 19 nt, Artificial Sequence
  Description of Artificial Sequence: Synthetic oligonucleotide
aacucuagauaauccuaag

SEQ ID NO: 861179 - RNA, 19 nt, Artificial Sequence
  Description of Artificial Sequence: Synthetic oligonucleotide
aguucuauuccaccacaac

SEQ ID NO: 861180 - RNA, 19 nt, Artificial Sequence
  Description of Artificial Sequence: Synthetic oligonucleotide
uucuauacuuuguugacau

SEQ ID NO: 861181 - RNA, 19 nt, Artificial Sequence
  Description of Artificial Sequence: Synthetic oligonucleotide
uuagaaaguaaugcuggag

SEQ ID NO: 861182 - RNA, 19 nt, Artificial Sequence
  Description of Artificial Sequence: Synthetic oligonucleotide
gaauugguacaaaucacag

SEQ ID NO: 861183 - RNA, 19 nt, Artificial Sequence
  Description of Artificial Sequence: Synthetic oligonucleotide
ugugguauaaaaugcuaaa

SEQ ID NO: 861184 - RNA, 19 nt, Artificial Sequence
  Description of Artificial Sequence: Synthetic oligonucleotide
ucuagaguaaggaguaguc

SEQ ID NO: 861185 - RNA, 19 nt, Artificial Sequence
  Description of Artificial Sequence: Synthetic oligonucleotide
cuauacuaagaaaucacca

SEQ ID NO: 861186 - RNA, 19 nt, Artificial Sequence
  Description of Artificial Sequence: Synthetic oligonucleotide
uauuacagaaggcaagguu

SEQ ID NO: 861187 - RNA, 19 nt, Artificial Sequence
  Description of Artificial Sequence: Synthetic oligonucleotide
aaacggugaauacuauacu

SEQ ID NO: 861188 - RNA, 19 nt, Artificial Sequence
  Description of Artificial Sequence: Synthetic oligonucleotide
uagauaauccuaaguauuu

SEQ ID NO: 861189 - RNA, 19 nt, Artificial Sequence
  Description of Artificial Sequence: Synthetic oligonucleotide
uuagauugaucaugauuug

SEQ ID NO: 861190 - RNA, 19 nt, Artificial Sequence
  Description of Artificial Sequence: Synthetic oligonucleotide
accucaugcuauaaaaugg

SEQ ID NO: 861191 - RNA, 19 nt, Artificial Sequence
  Description of Artificial Sequence: Synthetic oligonucleotide
uucuagguuccuauuaaaa

SEQ ID NO: 861192 - RNA, 19 nt, Artificial Sequence
  Description of Artificial Sequence: Synthetic oligonucleotide
aggaugaaacggugaauac

SEQ ID NO: 861193 - RNA, 19 nt, Artificial Sequence
  Description of Artificial Sequence: Synthetic oligonucleotide
aauauguggcuguuauuau

SEQ ID NO: 861194 - RNA, 19 nt, Artificial Sequence
  Description of Artificial Sequence: Synthetic oligonucleotide
ucuauacuaucauauucaa

SEQ ID NO: 861195 - RNA, 19 nt, Artificial Sequence
  Description of Artificial Sequence: Synthetic oligonucleotide
auuuuccuaauugagauuu

SEQ ID NO: 861196 - RNA, 19 nt, Artificial Sequence
  Description of Artificial Sequence: Synthetic oligonucleotide
uucaaaucacaguuuggac

SEQ ID NO: 861197 - RNA, 19 nt, Artificial Sequence
  Description of Artificial Sequence: Synthetic oligonucleotide
auauguggcuguuauuaug

SEQ ID NO: 861198 - RNA, 19 nt, Artificial Sequence
  Description of Artificial Sequence: Synthetic oligonucleotide
guagguuccgugcuugagg

SEQ ID NO: 861199 - RNA, 19 nt, Artificial Sequence
  Description of Artificial Sequence: Synthetic oligonucleotide
uccuaaguauuuucuaggu

SEQ ID NO: 861200 - RNA, 19 nt, Artificial Sequence
  Description of Artificial Sequence: Synthetic oligonucleotide
ugcugucagaauaaggcuc

SEQ ID NO: 861201 - RNA, 19 nt, Artificial Sequence
  Description of Artificial Sequence: Synthetic oligonucleotide
aguuuggacacauuccuau

SEQ ID NO: 861202 - RNA, 19 nt, Artificial Sequence
  Description of Artificial Sequence: Synthetic oligonucleotide
uguauacauaaaagguuaa

SEQ ID NO: 861203 - RNA, 19 nt, Artificial Sequence
  Description of Artificial Sequence: Synthetic oligonucleotide
acuccuagugcuuacugca

SEQ ID NO: 861204 - RNA, 19 nt, Artificial Sequence
  Description of Artificial Sequence: Synthetic oligonucleotide
aaauccagguuaguaauaa

SEQ ID NO: 861205 - RNA, 19 nt, Artificial Sequence
  Description of Artificial Sequence: Synthetic oligonucleotide
agauugcuacaacauucac

SEQ ID NO: 861206 - RNA, 19 nt, Artificial Sequence
  Description of Artificial Sequence: Synthetic oligonucleotide
ugaaggauuuccacaguaa

SEQ ID NO: 861207 - RNA, 19 nt, Artificial Sequence
  Description of Artificial Sequence: Synthetic oligonucleotide
uuaaaaccaugauugccaa

SEQ ID NO: 861208 - RNA, 19 nt, Artificial Sequence
  Description of Artificial Sequence: Synthetic oligonucleotide
uauuauggucuuagugccc

SEQ ID NO: 861209 - RNA, 19 nt, Artificial Sequence
  Description of Artificial Sequence: Synthetic oligonucleotide
gaugaaacggugaauacua

SEQ ID NO: 861210 - RNA, 19 nt, Artificial Sequence
  Description of Artificial Sequence: Synthetic oligonucleotide
uaaauuuaguuuccugauu

SEQ ID NO: 861211 - RNA, 19 nt, Artificial Sequence
  Description of Artificial Sequence: Synthetic oligonucleotide
ucuauuccaccacaacccu

SEQ ID NO: 861212 - RNA, 19 nt, Artificial Sequence
  Description of Artificial Sequence: Synthetic oligonucleotide
uaugaucauaucucuugac

SEQ ID NO: 861213 - RNA, 19 nt, Artificial Sequence
  Description of Artificial Sequence: Synthetic oligonucleotide
uuagugcccaagcacuggc

SEQ ID NO: 861214 - RNA, 19 nt, Artificial Sequence
  Description of Artificial Sequence: Synthetic oligonucleotide
ucgucuugcguuuauucac

SEQ ID NO: 861215 - RNA, 19 nt, Artificial Sequence
  Description of Artificial Sequence: Synthetic oligonucleotide
acucuagauaauccuaagu

SEQ ID NO: 861216 - RNA, 19 nt, Artificial Sequence
  Description of Artificial Sequence: Synthetic oligonucleotide
ucugcgucaggauuuucug

SEQ ID NO: 861217 - RNA, 19 nt, Artificial Sequence
  Description of Artificial Sequence: Synthetic oligonucleotide
gacugaguagguuccgugc

SEQ ID NO: 861218 - RNA, 19 nt, Artificial Sequence
  Description of Artificial Sequence: Synthetic oligonucleotide
uguaugucucuauacuauc

SEQ ID NO: 861219 - RNA, 19 nt, Artificial Sequence
  Description of Artificial Sequence: Synthetic oligonucleotide
cucuagauaauccuaagua

SEQ ID NO: 861220 - RNA, 19 nt, Artificial Sequence
  Description of Artificial Sequence: Synthetic oligonucleotide
uuggcaguaccauucacau

SEQ ID NO: 861221 - RNA, 19 nt, Artificial Sequence
  Description of Artificial Sequence: Synthetic oligonucleotide
cuagaguaaggaguagucc

SEQ ID NO: 861222 - RNA, 19 nt, Artificial Sequence
  Description of Artificial Sequence: Synthetic oligonucleotide
guucaaaucacaguuugga

SEQ ID NO: 861223 - RNA, 19 nt, Artificial Sequence
  Description of Artificial Sequence: Synthetic oligonucleotide
gagagugaccaauauagua

SEQ ID NO: 861224 - RNA, 19 nt, Artificial Sequence
  Description of Artificial Sequence: Synthetic oligonucleotide
uuuuacugucgucuugcgu

SEQ ID NO: 861225 - RNA, 19 nt, Artificial Sequence
  Description of Artificial Sequence: Synthetic oligonucleotide
ucucuugacuugagcgugg

SEQ ID NO: 861226 - RNA, 19 nt, Artificial Sequence
  Description of Artificial Sequence: Synthetic oligonucleotide
ggaagacacauccauauga

SEQ ID NO: 861227 - RNA, 19 nt, Artificial Sequence
  Description of Artificial Sequence: Synthetic oligonucleotide
gaggggugagaauugguac

SEQ ID NO: 861228 - RNA, 19 nt, Artificial Sequence
  Description of Artificial Sequence: Synthetic oligonucleotide
agagugaccaauauaguaa

SEQ ID NO: 861229 - RNA, 19 nt, Artificial Sequence
  Description of Artificial Sequence: Synthetic oligonucleotide
cagcuugccauugagacac

SEQ ID NO: 861230 - RNA, 19 nt, Artificial Sequence
  Description of Artificial Sequence: Synthetic oligonucleotide
aaaccaugauugccaaaga

SEQ ID NO: 861231 - RNA, 19 nt, Artificial Sequence
  Description of Artificial Sequence: Synthetic oligonucleotide
accaauauaguaaacuuua

SEQ ID NO: 861232 - RNA, 19 nt, Artificial Sequence
  Description of Artificial Sequence: Synthetic oligonucleotide
cuaauugagauuuggaaau

SEQ ID NO: 861233 - RNA, 19 nt, Artificial Sequence
  Description of Artificial Sequence: Synthetic oligonucleotide
aaaauauguggcuguuauu

SEQ ID NO: 861234 - RNA, 19 nt, Artificial Sequence
  Description of Artificial Sequence: Synthetic oligonucleotide
auuccuauuuauucuggau

SEQ ID NO: 861235 - RNA, 19 nt, Artificial Sequence
  Description of Artificial Sequence: Synthetic oligonucleotide
cuacuuagauugaucauga

SEQ ID NO: 861236 - RNA, 19 nt, Artificial Sequence
  Description of Artificial Sequence: Synthetic oligonucleotide
ggcaguaccauucacaucu

SEQ ID NO: 861237 - RNA, 19 nt, Artificial Sequence
  Description of Artificial Sequence: Synthetic oligonucleotide
uggucuuagugcccaagca

SEQ ID NO: 861238 - RNA, 19 nt, Artificial Sequence
  Description of Artificial Sequence: Synthetic oligonucleotide
uuuuccuaauugagauuug

SEQ ID NO: 861239 - RNA, 19 nt, Artificial Sequence
  Description of Artificial Sequence: Synthetic oligonucleotide
uguuauguuagcagcccua

SEQ ID NO: 861240 - RNA, 19 nt, Artificial Sequence
  Description of Artificial Sequence: Synthetic oligonucleotide
cuaguuucuaaagaaacaa

SEQ ID NO: 861241 - RNA, 19 nt, Artificial Sequence
  Description of Artificial Sequence: Synthetic oligonucleotide
uucuuagacagugccagcu

SEQ ID NO: 861242 - RNA, 19 nt, Artificial Sequence
  Description of Artificial Sequence: Synthetic oligonucleotide
agguuacucagacuuaaaa

SEQ ID NO: 861243 - RNA, 19 nt, Artificial Sequence
  Description of Artificial Sequence: Synthetic oligonucleotide
gaaacacauacccaaggcu

SEQ ID NO: 861244 - RNA, 19 nt, Artificial Sequence
  Description of Artificial Sequence: Synthetic oligonucleotide
uguuaugaucauaucucuu

SEQ ID NO: 861245 - RNA, 19 nt, Artificial Sequence
  Description of Artificial Sequence: Synthetic oligonucleotide
aaccuaaggaugaaacggu

SEQ ID NO: 861246 - RNA, 19 nt, Artificial Sequence
  Description of Artificial Sequence: Synthetic oligonucleotide
uucuagaguaaggaguagu

SEQ ID NO: 861247 - RNA, 19 nt, Artificial Sequence
  Description of Artificial Sequence: Synthetic oligonucleotide
aaauuugauucuauacuuu

SEQ ID NO: 861248 - RNA, 19 nt, Artificial Sequence
  Description of Artificial Sequence: Synthetic oligonucleotide
uccuuagcugcauaagguc

SEQ ID NO: 861249 - RNA, 19 nt, Artificial Sequence
  Description of Artificial Sequence: Synthetic oligonucleotide
acugaguagguuccgugcu

SEQ ID NO: 861250 - RNA, 19 nt, Artificial Sequence
  Description of Artificial Sequence: Synthetic oligonucleotide
agcauaauucuuaaacaga

SEQ ID NO: 861251 - RNA, 19 nt, Artificial Sequence
  Description of Artificial Sequence: Synthetic oligonucleotide
ugucgucuugcguuuauuc

SEQ ID NO: 861252 - RNA, 19 nt, Artificial Sequence
  Description of Artificial Sequence: Synthetic oligonucleotide
cuucgagacuuccaggcug

SEQ ID NO: 861253 - RNA, 19 nt, Artificial Sequence
  Description of Artificial Sequence: Synthetic oligonucleotide
uuggacacauuccuauuua

SEQ ID NO: 861254 - RNA, 19 nt, Artificial Sequence
  Description of Artificial Sequence: Synthetic oligonucleotide
aaggaguaguccuuuucuu

SEQ ID NO: 861255 - RNA, 19 nt, Artificial Sequence
  Description of Artificial Sequence: Synthetic oligonucleotide
agauuaucugcugugguau

SEQ ID NO: 861256 - RNA, 19 nt, Artificial Sequence
  Description of Artificial Sequence: Synthetic oligonucleotide
aacacauacccaaggcucu

SEQ ID NO: 861257 - RNA, 19 nt, Artificial Sequence
  Description of Artificial Sequence: Synthetic oligonucleotide
ucucacaaccccacagaac

SEQ ID NO: 861258 - RNA, 19 nt, Artificial Sequence
  Description of Artificial Sequence: Synthetic oligonucleotide
uguuuauguaugucucuau

SEQ ID NO: 861259 - RNA, 19 nt, Artificial Sequence
  Description of Artificial Sequence: Synthetic oligonucleotide
ugguuuaaaguaggaauaa

SEQ ID NO: 861260 - RNA, 19 nt, Artificial Sequence
  Description of Artificial Sequence: Synthetic oligonucleotide
uacucagacuuaaaaccau

SEQ ID NO: 861261 - RNA, 19 nt, Artificial Sequence
  Description of Artificial Sequence: Synthetic oligonucleotide
cucacaaccccacagaacu

SEQ ID NO: 861262 - RNA, 19 nt, Artificial Sequence
  Description of Artificial Sequence: Synthetic oligonucleotide
gagugaccaauauaguaaa

SEQ ID NO: 861263 - RNA, 19 nt, Artificial Sequence
  Description of Artificial Sequence: Synthetic oligonucleotide
aggggugagaauugguaca

SEQ ID NO: 861264 - RNA, 19 nt, Artificial Sequence
  Description of Artificial Sequence: Synthetic oligonucleotide
augauugccaaagaauaaa

SEQ ID NO: 861265 - RNA, 19 nt, Artificial Sequence
  Description of Artificial Sequence: Synthetic oligonucleotide
cguaccaccaacuucuuag

SEQ ID NO: 861266 - RNA, 19 nt, Artificial Sequence
  Description of Artificial Sequence: Synthetic oligonucleotide
ucuucgagacuuccaggcu

SEQ ID NO: 861267 - RNA, 19 nt, Artificial Sequence
  Description of Artificial Sequence: Synthetic oligonucleotide
gcuguuauuauggucuuag

SEQ ID NO: 861268 - RNA, 19 nt, Artificial Sequence
  Description of Artificial Sequence: Synthetic oligonucleotide
uucuacuuagauugaucau

SEQ ID NO: 861269 - RNA, 19 nt, Artificial Sequence
  Description of Artificial Sequence: Synthetic oligonucleotide
agacugaguagguuccgug

SEQ ID NO: 861270 - RNA, 19 nt, Artificial Sequence
  Description of Artificial Sequence: Synthetic oligonucleotide
auucuauacuuuguugaca

SEQ ID NO: 861271 - RNA, 19 nt, Artificial Sequence
  Description of Artificial Sequence: Synthetic oligonucleotide
uuauguuagcagcccuaac

SEQ ID NO: 861272 - RNA, 19 nt, Artificial Sequence
  Description of Artificial Sequence: Synthetic oligonucleotide
agcgugggcccaucguacc

SEQ ID NO: 861273 - RNA, 19 nt, Artificial Sequence
  Description of Artificial Sequence: Synthetic oligonucleotide
aucucuugacuugagcgug

SEQ ID NO: 861274 - RNA, 19 nt, Artificial Sequence
  Description of Artificial Sequence: Synthetic oligonucleotide
auucuaacuggaacaaccu

SEQ ID NO: 861275 - RNA, 19 nt, Artificial Sequence
  Description of Artificial Sequence: Synthetic oligonucleotide
auguuauguuagcagcccu

SEQ ID NO: 861276 - RNA, 19 nt, Artificial Sequence
  Description of Artificial Sequence: Synthetic oligonucleotide
auucacauagaggggugag

SEQ ID NO: 861277 - RNA, 19 nt, Artificial Sequence
  Description of Artificial Sequence: Synthetic oligonucleotide
agugaccaauauaguaaac

SEQ ID NO: 861278 - RNA, 19 nt, Artificial Sequence
  Description of Artificial Sequence: Synthetic oligonucleotide
ggugguuuaaaguaggaau

SEQ ID NO: 861279 - RNA, 19 nt, Artificial Sequence
  Description of Artificial Sequence: Synthetic oligonucleotide
caaacauguuauguuagca

SEQ ID NO: 861280 - RNA, 19 nt, Artificial Sequence
  Description of Artificial Sequence: Synthetic oligonucleotide
cagauugcuacaacauuca

SEQ ID NO: 861281 - RNA, 19 nt, Artificial Sequence
  Description of Artificial Sequence: Synthetic oligonucleotide
ugagcgugggcccaucgua

SEQ ID NO: 861282 - RNA, 19 nt, Artificial Sequence
  Description of Artificial Sequence: Synthetic oligonucleotide
acugcacugcccuccuuag

SEQ ID NO: 861283 - RNA, 19 nt, Artificial Sequence
  Description of Artificial Sequence: Synthetic oligonucleotide
uggauacucugcgucagga

SEQ ID NO: 861284 - RNA, 19 nt, Artificial Sequence
  Description of Artificial Sequence: Synthetic oligonucleotide
caauauguccaaagagaca

SEQ ID NO: 861285 - RNA, 19 nt, Artificial Sequence
  Description of Artificial Sequence: Synthetic oligonucleotide
agccaacuagagcagcuca

SEQ ID NO: 861286 - RNA, 19 nt, Artificial Sequence
  Description of Artificial Sequence: Synthetic oligonucleotide
gucgucuugcguuuauuca

SEQ ID NO: 861287 - RNA, 19 nt, Artificial Sequence
  Description of Artificial Sequence: Synthetic oligonucleotide
ccuaauugagauuuggaaa

SEQ ID NO: 861288 - RNA, 19 nt, Artificial Sequence
  Description of Artificial Sequence: Synthetic oligonucleotide
ucacaaccccacagaacug

SEQ ID NO: 861289 - RNA, 19 nt, Artificial Sequence
  Description of Artificial Sequence: Synthetic oligonucleotide
auguaugucucuauacuau

SEQ ID NO: 861290 - RNA, 19 nt, Artificial Sequence
  Description of Artificial Sequence: Synthetic oligonucleotide
gcguuuauucacauagagg

SEQ ID NO: 861291 - RNA, 19 nt, Artificial Sequence
  Description of Artificial Sequence: Synthetic oligonucleotide
guaauaacauuugguauua

SEQ ID NO: 861292 - RNA, 19 nt, Artificial Sequence
  Description of Artificial Sequence: Synthetic oligonucleotide
guaggaauaaacaggugcu

SEQ ID NO: 861293 - RNA, 19 nt, Artificial Sequence
  Description of Artificial Sequence: Synthetic oligonucleotide
aagccguguagucuuccaa

SEQ ID NO: 861294 - RNA, 19 nt, Artificial Sequence
  Description of Artificial Sequence: Synthetic oligonucleotide
uucacauagaggggugaga

SEQ ID NO: 861295 - RNA, 19 nt, Artificial Sequence
  Description of Artificial Sequence: Synthetic oligonucleotide
uaagccguguagucuucca

SEQ ID NO: 861296 - RNA, 19 nt, Artificial Sequence
  Description of Artificial Sequence: Synthetic oligonucleotide
uagaggggugagaauuggu

SEQ ID NO: 861297 - RNA, 19 nt, Artificial Sequence
  Description of Artificial Sequence: Synthetic oligonucleotide
guaguccuuuucuuaucug

SEQ ID NO: 861298 - RNA, 19 nt, Artificial Sequence
  Description of Artificial Sequence: Synthetic oligonucleotide
uggugguuuaaaguaggaa

SEQ ID NO: 861299 - RNA, 19 nt, Artificial Sequence
  Description of Artificial Sequence: Synthetic oligonucleotide
gugguuuaaaguaggaaua

SEQ ID NO: 861300 - RNA, 19 nt, Artificial Sequence
  Description of Artificial Sequence: Synthetic oligonucleotide
ugauucuaacuggaacaac

SEQ ID NO: 861301 - RNA, 19 nt, Artificial Sequence
  Description of Artificial Sequence: Synthetic oligonucleotide
guaugucucuauacuauca

SEQ ID NO: 861302 - RNA, 19 nt, Artificial Sequence
  Description of Artificial Sequence: Synthetic oligonucleotide
uaacuggaacaaccucaug

SEQ ID NO: 861303 - RNA, 19 nt, Artificial Sequence
  Description of Artificial Sequence: Synthetic oligonucleotide
ccaaacauguuauguuagc

SEQ ID NO: 861304 - RNA, 19 nt, Artificial Sequence
  Description of Artificial Sequence: Synthetic oligonucleotide
guuccgugcuugaggaugg

SEQ ID NO: 861305 - RNA, 19 nt, Artificial Sequence
  Description of Artificial Sequence: Synthetic oligonucleotide
cauuccuauuuauucugga

SEQ ID NO: 861306 - RNA, 19 nt, Artificial Sequence
  Description of Artificial Sequence: Synthetic oligonucleotide
gacuucaaacauggagacc

SEQ ID NO: 861307 - RNA, 19 nt, Artificial Sequence
  Description of Artificial Sequence: Synthetic oligonucleotide
aggcuuauggggaggaucu

SEQ ID NO: 861308 - RNA, 19 nt, Artificial Sequence
  Description of Artificial Sequence: Synthetic oligonucleotide
uuaagccguguagucuucc

SEQ ID NO: 861309 - RNA, 19 nt, Artificial Sequence
  Description of Artificial Sequence: Synthetic oligonucleotide
caaguucuauuccaccaca

SEQ ID NO: 861310 - RNA, 19 nt, Artificial Sequence
  Description of Artificial Sequence: Synthetic oligonucleotide
gauuugauucuaacuggaa

SEQ ID NO: 861311 - RNA, 19 nt, Artificial Sequence
  Description of Artificial Sequence: Synthetic oligonucleotide
acggugaauacuauacuaa

SEQ ID NO: 861312 - RNA, 19 nt, Artificial Sequence
  Description of Artificial Sequence: Synthetic oligonucleotide
gaugcucaguuccacacau

SEQ ID NO: 861313 - RNA, 19 nt, Artificial Sequence
  Description of Artificial Sequence: Synthetic oligonucleotide
agauaauccuaaguauuuu

SEQ ID NO: 861314 - RNA, 19 nt, Artificial Sequence
  Description of Artificial Sequence: Synthetic oligonucleotide
aaguucuauuccaccacaa

SEQ ID NO: 861315 - RNA, 19 nt, Artificial Sequence
  Description of Artificial Sequence: Synthetic oligonucleotide
ggugaauacuauacuaaga

SEQ ID NO: 861316 - RNA, 19 nt, Artificial Sequence
  Description of Artificial Sequence: Synthetic oligonucleotide
cuugagcgugggcccaucg

SEQ ID NO: 861317 - RNA, 19 nt, Artificial Sequence
  Description of Artificial Sequence: Synthetic oligonucleotide
uuauggggaggaucuuauc

SEQ ID NO: 861318 - RNA, 19 nt, Artificial Sequence
  Description of Artificial Sequence: Synthetic oligonucleotide
agcuggauuuccaaauaga

SEQ ID NO: 861319 - RNA, 19 nt, Artificial Sequence
  Description of Artificial Sequence: Synthetic oligonucleotide
ucuauacuuuguugacaua

SEQ ID NO: 861320 - RNA, 19 nt, Artificial Sequence
  Description of Artificial Sequence: Synthetic oligonucleotide
cuggauacucugcgucagg

SEQ ID NO: 861321 - RNA, 19 nt, Artificial Sequence
  Description of Artificial Sequence: Synthetic oligonucleotide
gguuccgugcuugaggaug

SEQ ID NO: 861322 - RNA, 19 nt, Artificial Sequence
  Description of Artificial Sequence: Synthetic oligonucleotide
cuccuagugcuuacugcac

SEQ ID NO: 861323 - RNA, 19 nt, Artificial Sequence
  Description of Artificial Sequence: Synthetic oligonucleotide
uuacugucgucuugcguuu

SEQ ID NO: 861324 - RNA, 19 nt, Artificial Sequence
  Description of Artificial Sequence: Synthetic oligonucleotide
guuauguuagcagcccuaa

SEQ ID NO: 861325 - RNA, 19 nt, Artificial Sequence
  Description of Artificial Sequence: Synthetic oligonucleotide
acacauacccaaggcucuc

SEQ ID NO: 861326 - RNA, 19 nt, Artificial Sequence
  Description of Artificial Sequence: Synthetic oligonucleotide
aaguaaugcuggagaguga

SEQ ID NO: 861327 - RNA, 19 nt, Artificial Sequence
  Description of Artificial Sequence: Synthetic oligonucleotide
guucuagaguaaggaguag

SEQ ID NO: 861328 - RNA, 19 nt, Artificial Sequence
  Description of Artificial Sequence: Synthetic oligonucleotide
cucuugacuugagcguggg

SEQ ID NO: 861329 - RNA, 19 nt, Artificial Sequence
  Description of Artificial Sequence: Synthetic oligonucleotide
cuggaguuacaaauccaaa

SEQ ID NO: 861330 - RNA, 19 nt, Artificial Sequence
  Description of Artificial Sequence: Synthetic oligonucleotide
cucuggcacacuguguuuc

SEQ ID NO: 861331 - RNA, 19 nt, Artificial Sequence
  Description of Artificial Sequence: Synthetic oligonucleotide
cagaacuguuagaaaguaa

SEQ ID NO: 861332 - RNA, 19 nt, Artificial Sequence
  Description of Artificial Sequence: Synthetic oligonucleotide
cuuguggaacaggaaguca

SEQ ID NO: 861333 - RNA, 19 nt, Artificial Sequence
  Description of Artificial Sequence: Synthetic oligonucleotide
cuggugguuuaaaguagga

SEQ ID NO: 861334 - RNA, 19 nt, Artificial Sequence
  Description of Artificial Sequence: Synthetic oligonucleotide
ccuagugcuuacugcacug

SEQ ID NO: 861335 - RNA, 19 nt, Artificial Sequence
  Description of Artificial Sequence: Synthetic oligonucleotide
cuuauggggaggaucuuau

SEQ ID NO: 861336 - RNA, 19 nt, Artificial Sequence
  Description of Artificial Sequence: Synthetic oligonucleotide
uuauggucuuagugcccaa

SEQ ID NO: 861337 - RNA, 19 nt, Artificial Sequence
  Description of Artificial Sequence: Synthetic oligonucleotide
gcuuacugcacugcccucc

SEQ ID NO: 861338 - RNA, 19 nt, Artificial Sequence
  Description of Artificial Sequence: Synthetic oligonucleotide
ucguaccaccaacuucuua

SEQ ID NO: 861339 - RNA, 19 nt, Artificial Sequence
  Description of Artificial Sequence: Synthetic oligonucleotide
caucuuuaagccguguagu

SEQ ID NO: 861340 - RNA, 19 nt, Artificial Sequence
  Description of Artificial Sequence: Synthetic oligonucleotide
uggcaguaccauucacauc

SEQ ID NO: 861341 - RNA, 19 nt, Artificial Sequence
  Description of Artificial Sequence: Synthetic oligonucleotide
gugguauaaaaugcuaaau

SEQ ID NO: 861342 - RNA, 19 nt, Artificial Sequence
  Description of Artificial Sequence: Synthetic oligonucleotide
gcugucagaauaaggcuca

SEQ ID NO: 861343 - RNA, 19 nt, Artificial Sequence
  Description of Artificial Sequence: Synthetic oligonucleotide
ugggcccaucguaccacca

SEQ ID NO: 861344 - RNA, 19 nt, Artificial Sequence
  Description of Artificial Sequence: Synthetic oligonucleotide
cucugcgucaggauuuucu

SEQ ID NO: 861345 - RNA, 19 nt, Artificial Sequence
  Description of Artificial Sequence: Synthetic oligonucleotide
gagcgugggcccaucguac

SEQ ID NO: 861346 - RNA, 19 nt, Artificial Sequence
  Description of Artificial Sequence: Synthetic oligonucleotide
cuggagagugaccaauaua

SEQ ID NO: 861347 - RNA, 19 nt, Artificial Sequence
  Description of Artificial Sequence: Synthetic oligonucleotide
gguuuaaaguaggaauaaa

SEQ ID NO: 861348 - RNA, 19 nt, Artificial Sequence
  Description of Artificial Sequence: Synthetic oligonucleotide
ccuuugagaaccuaaggau

SEQ ID NO: 861349 - RNA, 19 nt, Artificial Sequence
  Description of Artificial Sequence: Synthetic oligonucleotide
ccaucguaccaccaacuuc

SEQ ID NO: 861350 - RNA, 19 nt, Artificial Sequence
  Description of Artificial Sequence: Synthetic oligonucleotide
gcuggauacucugcgucag

SEQ ID NO: 861351 - RNA, 19 nt, Artificial Sequence
  Description of Artificial Sequence: Synthetic oligonucleotide
ugcugacuccuagugcuua

SEQ ID NO: 861352 - RNA, 19 nt, Artificial Sequence
  Description of Artificial Sequence: Synthetic oligonucleotide
ccgugcuugaggauggcuc

SEQ ID NO: 861353 - RNA, 19 nt, Artificial Sequence
  Description of Artificial Sequence: Synthetic oligonucleotide
caaagccacccgacuugug

SEQ ID NO: 861354 - RNA, 19 nt, Artificial Sequence
  Description of Artificial Sequence: Synthetic oligonucleotide
ucgcuucaauggcuuuuau

SEQ ID NO: 861355 - RNA, 19 nt, Artificial Sequence
  Description of Artificial Sequence: Synthetic oligonucleotide
gucucuauacuaucauauu

SEQ ID NO: 861356 - RNA, 19 nt, Artificial Sequence
  Description of Artificial Sequence: Synthetic oligonucleotide
gccaacuagagcagcucag

SEQ ID NO: 861357 - RNA, 19 nt, Artificial Sequence
  Description of Artificial Sequence: Synthetic oligonucleotide
gagguuagacugaguaggu

SEQ ID NO: 861358 - RNA, 19 nt, Artificial Sequence
  Description of Artificial Sequence: Synthetic oligonucleotide
augaaacggugaauacuau

SEQ ID NO: 861359 - RNA, 19 nt, Artificial Sequence
  Description of Artificial Sequence: Synthetic oligonucleotide
acccgacuuguggaacagg

SEQ ID NO: 861360 - RNA, 19 nt, Artificial Sequence
  Description of Artificial Sequence: Synthetic oligonucleotide
agccacccgacuuguggaa

SEQ ID NO: 861361 - RNA, 19 nt, Artificial Sequence
  Description of Artificial Sequence: Synthetic oligonucleotide
ggcccaucguaccaccaac

SEQ ID NO: 861362 - RNA, 19 nt, Artificial Sequence
  Description of Artificial Sequence: Synthetic oligonucleotide
cuggaacaaccucaugcua

SEQ ID NO: 861363 - RNA, 19 nt, Artificial Sequence
  Description of Artificial Sequence: Synthetic oligonucleotide
auauguccaaagagacaaa

SEQ ID NO: 861364 - RNA, 19 nt, Artificial Sequence
  Description of Artificial Sequence: Synthetic oligonucleotide
agguuagacugaguagguu

SEQ ID NO: 861365 - RNA, 19 nt, Artificial Sequence
  Description of Artificial Sequence: Synthetic oligonucleotide
acuugagcgugggcccauc

SEQ ID NO: 861366 - RNA, 19 nt, Artificial Sequence
  Description of Artificial Sequence: Synthetic oligonucleotide
ggauguuaauaaauuuagu

SEQ ID NO: 861367 - RNA, 19 nt, Artificial Sequence
  Description of Artificial Sequence: Synthetic oligonucleotide
cacccgacuuguggaacag

SEQ ID NO: 861368 - RNA, 19 nt, Artificial Sequence
  Description of Artificial Sequence: Synthetic oligonucleotide
cuucccgcccucauccuua

SEQ ID NO: 861369 - RNA, 19 nt, Artificial Sequence
  Description of Artificial Sequence: Synthetic oligonucleotide
gcugacuccuagugcuuac

SEQ ID NO: 861370 - RNA, 19 nt, Artificial Sequence
  Description of Artificial Sequence: Synthetic oligonucleotide
guacccucggggcuggccu

SEQ ID NO: 861371 - RNA, 19 nt, Artificial Sequence
  Description of Artificial Sequence: Synthetic oligonucleotide
acucugcgucaggauuuuc

SEQ ID NO: 861372 - RNA, 19 nt, Artificial Sequence
  Description of Artificial Sequence: Synthetic oligonucleotide
ugcccuccuuagcugcaua

SEQ ID NO: 861373 - RNA, 19 nt, Artificial Sequence
  Description of Artificial Sequence: Synthetic oligonucleotide
accagacaaaugggagcca

SEQ ID NO: 861374 - RNA, 19 nt, Artificial Sequence
  Description of Artificial Sequence: Synthetic oligonucleotide
acaacccuuugagaaccua

SEQ ID NO: 861375 - RNA, 19 nt, Artificial Sequence
  Description of Artificial Sequence: Synthetic oligonucleotide
cacaaccccacagaacugu

SEQ ID NO: 861376 - RNA, 19 nt, Artificial Sequence
  Description of Artificial Sequence: Synthetic oligonucleotide
caaccccacagaacuguua

SEQ ID NO: 861377 - RNA, 19 nt, Artificial Sequence
  Description of Artificial Sequence: Synthetic oligonucleotide
cuuacugcacugcccuccu

SEQ ID NO: 861378 - RNA, 19 nt, Artificial Sequence
  Description of Artificial Sequence: Synthetic oligonucleotide
agguuccgugcuugaggau

SEQ ID NO: 861379 - RNA, 19 nt, Artificial Sequence
  Description of Artificial Sequence: Synthetic oligonucleotide
uucccgcccucauccuuau

SEQ ID NO: 861380 - RNA, 19 nt, Artificial Sequence
  Description of Artificial Sequence: Synthetic oligonucleotide
acaaccccacagaacuguu

SEQ ID NO: 861381 - RNA, 19 nt, Artificial Sequence
  Description of Artificial Sequence: Synthetic oligonucleotide
cgugcuugaggauggcuca

SEQ ID NO: 861382 - RNA, 19 nt, Artificial Sequence
  Description of Artificial Sequence: Synthetic oligonucleotide
uacugucgucuugcguuua

SEQ ID NO: 861383 - RNA, 19 nt, Artificial Sequence
  Description of Artificial Sequence: Synthetic oligonucleotide
acccucggggcuggccuuc

SEQ ID NO: 861384 - RNA, 19 nt, Artificial Sequence
  Description of Artificial Sequence: Synthetic oligonucleotide
ggauggcucaaggcuuaug

SEQ ID NO: 861385 - RNA, 19 nt, Artificial Sequence
  Description of Artificial Sequence: Synthetic oligonucleotide
gcgucaggauuuucugcca

SEQ ID NO: 861386 - RNA, 19 nt, Artificial Sequence
  Description of Artificial Sequence: Synthetic oligonucleotide
cgucuugcguuuauucaca

SEQ ID NO: 861387 - RNA, 19 nt, Artificial Sequence
  Description of Artificial Sequence: Synthetic oligonucleotide
cacauagaggggugagaau

SEQ ID NO: 861388 - RNA, 19 nt, Artificial Sequence
  Description of Artificial Sequence: Synthetic oligonucleotide
ggagagugaccaauauagu

SEQ ID NO: 861389 - RNA, 19 nt, Artificial Sequence
  Description of Artificial Sequence: Synthetic oligonucleotide
gcuggagagugaccaauau

SEQ ID NO: 861390 - RNA, 19 nt, Artificial Sequence
  Description of Artificial Sequence: Synthetic oligonucleotide
ccacccgacuuguggaaca

SEQ ID NO: 861391 - RNA, 19 nt, Artificial Sequence
  Description of Artificial Sequence: Synthetic oligonucleotide
gggcccaucguaccaccaa

SEQ ID NO: 861392 - RNA, 19 nt, Artificial Sequence
  Description of Artificial Sequence: Synthetic oligonucleotide
gugcuugaggauggcucaa

SEQ ID NO: 861393 - RNA, 19 nt, Artificial Sequence
  Description of Artificial Sequence: Synthetic oligonucleotide
cugacuccuagugcuuacu

SEQ ID NO: 861394 - RNA, 19 nt, Artificial Sequence
  Description of Artificial Sequence: Synthetic oligonucleotide
aucguaccaccaacuucuu

SEQ ID NO: 861395 - RNA, 19 nt, Artificial Sequence
  Description of Artificial Sequence: Synthetic oligonucleotide
ucgagacuuccaggcuguu

SEQ ID NO: 861396 - RNA, 19 nt, Artificial Sequence
  Description of Artificial Sequence: Synthetic oligonucleotide
ccgacuuguggaacaggaa

SEQ ID NO: 861397 - RNA, 19 nt, Artificial Sequence
  Description of Artificial Sequence: Synthetic oligonucleotide
cacauacccaaggcucucu

SEQ ID NO: 861398 - RNA, 19 nt, Artificial Sequence
  Description of Artificial Sequence: Synthetic oligonucleotide
gccacccgacuuguggaac

SEQ ID NO: 861399 - RNA, 19 nt, Artificial Sequence
  Description of Artificial Sequence: Synthetic oligonucleotide
ccaacuagagcagcucagu

SEQ ID NO: 861400 - RNA, 19 nt, Artificial Sequence
  Description of Artificial Sequence: Synthetic oligonucleotide
ucccgcccucauccuuauu

SEQ ID NO: 861401 - RNA, 19 nt, Artificial Sequence
  Description of Artificial Sequence: Synthetic oligonucleotide
cgagacuuccaggcuguuc

SEQ ID NO: 861402 - RNA, 19 nt, Artificial Sequence
  Description of Artificial Sequence: Synthetic oligonucleotide
cccgcccucauccuuauuu

SEQ ID NO: 861403 - RNA, 19 nt, Artificial Sequence
  Description of Artificial Sequence: Synthetic oligonucleotide
gacuugagcgugggcccau

SEQ ID NO: 861404 - RNA, 19 nt, Artificial Sequence
  Description of Artificial Sequence: Synthetic oligonucleotide
gcccaucguaccaccaacu

SEQ ID NO: 861405 - RNA, 19 nt, Artificial Sequence
  Description of Artificial Sequence: Synthetic oligonucleotide
cugucgucuugcguuuauu

SEQ ID NO: 861406 - RNA, 19 nt, Artificial Sequence
  Description of Artificial Sequence: Synthetic oligonucleotide
cgucaggauuuucugccau

SEQ ID NO: 861407 - RNA, 19 nt, Artificial Sequence
  Description of Artificial Sequence: Synthetic oligonucleotide
ccgcccucauccuuauuuu

SEQ ID NO: 861408 - RNA, 19 nt, Artificial Sequence
  Description of Artificial Sequence: Synthetic oligonucleotide
uauaucucgaaucagcuga

SEQ ID NO: 861409 - RNA, 19 nt, Artificial Sequence
  Description of Artificial Sequence: Synthetic oligonucleotide
agauucaggcuuuauaacc

SEQ ID NO: 861410 - RNA, 19 nt, Artificial Sequence
  Description of Artificial Sequence: Synthetic oligonucleotide
aaagugaguccacaaauuc

SEQ ID NO: 861411 - RNA, 19 nt, Artificial Sequence
  Description of Artificial Sequence: Synthetic oligonucleotide
aauuugaugcgcuuuccac

SEQ ID NO: 861412 - RNA, 19 nt, Artificial Sequence
  Description of Artificial Sequence: Synthetic oligonucleotide
uuuacuugagguauggagc

SEQ ID NO: 861413 - RNA, 19 nt, Artificial Sequence
  Description of Artificial Sequence: Synthetic oligonucleotide
cugauaucugauaaaaugg

SEQ ID NO: 861414 - RNA, 19 nt, Artificial Sequence
  Description of Artificial Sequence: Synthetic oligonucleotide
aaaauuugccuuguugacc

SEQ ID NO: 861415 - RNA, 19 nt, Artificial Sequence
  Description of Artificial Sequence: Synthetic oligonucleotide
aauagcaggaaucauugga

SEQ ID NO: 861416 - RNA, 19 nt, Artificial Sequence
  Description of Artificial Sequence: Synthetic oligonucleotide
aaauuugccuuguugaccu

SEQ ID NO: 861417 - RNA, 19 nt, Artificial Sequence
  Description of Artificial Sequence: Synthetic oligonucleotide
uuugagguuccgaagaaag

SEQ ID NO: 861418 - RNA, 19 nt, Artificial Sequence
  Description of Artificial Sequence: Synthetic oligonucleotide
uugauaaucuccaaccggc

SEQ ID NO: 861419 - RNA, 19 nt, Artificial Sequence
  Description of Artificial Sequence: Synthetic oligonucleotide
aagauucaggcuuuauaac

SEQ ID NO: 861420 - RNA, 19 nt, Artificial Sequence
  Description of Artificial Sequence: Synthetic oligonucleotide
auugauaaucuccaaccgg

SEQ ID NO: 861421 - RNA, 19 nt, Artificial Sequence
  Description of Artificial Sequence: Synthetic oligonucleotide
agcuagauuggcaauaucc

SEQ ID NO: 861422 - RNA, 19 nt, Artificial Sequence
  Description of Artificial Sequence: Synthetic oligonucleotide
aauugucugucucaguucu

SEQ ID NO: 861423 - RNA, 19 nt, Artificial Sequence
  Description of Artificial Sequence: Synthetic oligonucleotide
auuacgugcaugcuucagc

SEQ ID NO: 861424 - RNA, 19 nt, Artificial Sequence
  Description of Artificial Sequence: Synthetic oligonucleotide
uacuguagagccaauggag

SEQ ID NO: 861425 - RNA, 19 nt, Artificial Sequence
  Description of Artificial Sequence: Synthetic oligonucleotide
ugauaucugauaaaaugga

SEQ ID NO: 861426 - RNA, 19 nt, Artificial Sequence
  Description of Artificial Sequence: Synthetic oligonucleotide
acauuugagagacagcuug

SEQ ID NO: 861427 - RNA, 19 nt, Artificial Sequence
  Description of Artificial Sequence: Synthetic oligonucleotide
aagucauguaggcgcaugc

SEQ ID NO: 861428 - RNA, 19 nt, Artificial Sequence
  Description of Artificial Sequence: Synthetic oligonucleotide
uucuuugacacuucuuccg

SEQ ID NO: 861429 - RNA, 19 nt, Artificial Sequence
  Description of Artificial Sequence: Synthetic oligonucleotide
augucucaaucguagauac

SEQ ID NO: 861430 - RNA, 19 nt, Artificial Sequence
  Description of Artificial Sequence: Synthetic oligonucleotide
uucagcuuaacguccagag

SEQ ID NO: 861431 - RNA, 19 nt, Artificial Sequence
  Description of Artificial Sequence: Synthetic oligonucleotide
uuauaaccgucuuugagac

SEQ ID NO: 861432 - RNA, 19 nt, Artificial Sequence
  Description of Artificial Sequence: Synthetic oligonucleotide
uggauuaggcacuguaugg

SEQ ID NO: 861433 - RNA, 19 nt, Artificial Sequence
  Description of Artificial Sequence: Synthetic oligonucleotide
ucuuugacacuucuuccgg

SEQ ID NO: 861434 - RNA, 19 nt, Artificial Sequence
  Description of Artificial Sequence: Synthetic oligonucleotide
ucugcggccuccauaaagg

SEQ ID NO: 861435 - RNA, 19 nt, Artificial Sequence
  Description of Artificial Sequence: Synthetic oligonucleotide
aauggguccgccaucaguc

SEQ ID NO: 861436 - RNA, 19 nt, Artificial Sequence
  Description of Artificial Sequence: Synthetic oligonucleotide
uuugaugcgcuuuccacag

SEQ ID NO: 861437 - RNA, 19 nt, Artificial Sequence
  Description of Artificial Sequence: Synthetic oligonucleotide
cacacaugaguauaucucg

SEQ ID NO: 861438 - RNA, 19 nt, Artificial Sequence
  Description of Artificial Sequence: Synthetic oligonucleotide
aaugguugacagucuauug

SEQ ID NO: 861439 - RNA, 19 nt, Artificial Sequence
  Description of Artificial Sequence: Synthetic oligonucleotide
ucaaagugaguccacaaau

SEQ ID NO: 861440 - RNA, 19 nt, Artificial Sequence
  Description of Artificial Sequence: Synthetic oligonucleotide
aaauucaccacuguaguau

SEQ ID NO: 861441 - RNA, 19 nt, Artificial Sequence
  Description of Artificial Sequence: Synthetic oligonucleotide
uugaguugacgcuugaugu

SEQ ID NO: 861442 - RNA, 19 nt, Artificial Sequence
  Description of Artificial Sequence: Synthetic oligonucleotide
uacaaucucugugacaggg

SEQ ID NO: 861443 - RNA, 19 nt, Artificial Sequence
  Description of Artificial Sequence: Synthetic oligonucleotide
ugggguagcucacugacag

SEQ ID NO: 861444 - RNA, 19 nt, Artificial Sequence
  Description of Artificial Sequence: Synthetic oligonucleotide
ucuauuguucccaggguug

SEQ ID NO: 861445 - RNA, 19 nt, Artificial Sequence
  Description of Artificial Sequence: Synthetic oligonucleotide
uacuugauuacgugcaugc

SEQ ID NO: 861446 - RNA, 19 nt, Artificial Sequence
  Description of Artificial Sequence: Synthetic oligonucleotide
uugauuacgugcaugcuuc

SEQ ID NO: 861447 - RNA, 19 nt, Artificial Sequence
  Description of Artificial Sequence: Synthetic oligonucleotide
augaguauaucucgaauca

SEQ ID NO: 861448 - RNA, 19 nt, Artificial Sequence
  Description of Artificial Sequence: Synthetic oligonucleotide
uccuguauaagccugccuc

SEQ ID NO: 861449 - RNA, 19 nt, Artificial Sequence
  Description of Artificial Sequence: Synthetic oligonucleotide
cucgaaguccuucacaacc

SEQ ID NO: 861450 - RNA, 19 nt, Artificial Sequence
  Description of Artificial Sequence: Synthetic oligonucleotide
caugaguauaucucgaauc

SEQ ID NO: 861451 - RNA, 19 nt, Artificial Sequence
  Description of Artificial Sequence: Synthetic oligonucleotide
uccgccaucagucggaaca

SEQ ID NO: 861452 - RNA, 19 nt, Artificial Sequence
  Description of Artificial Sequence: Synthetic oligonucleotide
agauuuuagcuagauuggc

SEQ ID NO: 861453 - RNA, 19 nt, Artificial Sequence
  Description of Artificial Sequence: Synthetic oligonucleotide
ucacuuuaaugucuggugu

SEQ ID NO: 861454 - RNA, 19 nt, Artificial Sequence
  Description of Artificial Sequence: Synthetic oligonucleotide
aaugugucccuguuggccu

SEQ ID NO: 861455 - RNA, 19 nt, Artificial Sequence
  Description of Artificial Sequence: Synthetic oligonucleotide
gauaaaggagucuuggcaa

SEQ ID NO: 861456 - RNA, 19 nt, Artificial Sequence
  Description of Artificial Sequence: Synthetic oligonucleotide
aaauuugaugcgcuuucca

SEQ ID NO: 861457 - RNA, 19 nt, Artificial Sequence
  Description of Artificial Sequence: Synthetic oligonucleotide
ugauaaucuccaaccggcg

SEQ ID NO: 861458 - RNA, 19 nt, Artificial Sequence
  Description of Artificial Sequence: Synthetic oligonucleotide
ucacacaugaguauaucuc

SEQ ID NO: 861459 - RNA, 19 nt, Artificial Sequence
  Description of Artificial Sequence: Synthetic oligonucleotide
gucucaaucguagauacag

SEQ ID NO: 861460 - RNA, 19 nt, Artificial Sequence
  Description of Artificial Sequence: Synthetic oligonucleotide
gaucccgacauucuggaug

SEQ ID NO: 861461 - RNA, 19 nt, Artificial Sequence
  Description of Artificial Sequence: Synthetic oligonucleotide
uaaaggaccugauuucccc

SEQ ID NO: 861462 - RNA, 19 nt, Artificial Sequence
  Description of Artificial Sequence: Synthetic oligonucleotide
uucuuuacaggaccaggag

SEQ ID NO: 861463 - RNA, 19 nt, Artificial Sequence
  Description of Artificial Sequence: Synthetic oligonucleotide
gcuaaugugucccuguugg

SEQ ID NO: 861464 - RNA, 19 nt, Artificial Sequence
  Description of Artificial Sequence: Synthetic oligonucleotide
agagcacuagcccagucuc

SEQ ID NO: 861465 - RNA, 19 nt, Artificial Sequence
  Description of Artificial Sequence: Synthetic oligonucleotide
cagucuauuguucccaggg

SEQ ID NO: 861466 - RNA, 19 nt, Artificial Sequence
  Description of Artificial Sequence: Synthetic oligonucleotide
cuggaugagagaccaaacg

SEQ ID NO: 861467 - RNA, 19 nt, Artificial Sequence
  Description of Artificial Sequence: Synthetic oligonucleotide
uuugaucucuacaucuacu

SEQ ID NO: 861468 - RNA, 19 nt, Artificial Sequence
  Description of Artificial Sequence: Synthetic oligonucleotide
cucgguugagaaaagcuag

SEQ ID NO: 861469 - RNA, 19 nt, Artificial Sequence
  Description of Artificial Sequence: Synthetic oligonucleotide
cuugaguugacgcuugaug

SEQ ID NO: 861470 - RNA, 19 nt, Artificial Sequence
  Description of Artificial Sequence: Synthetic oligonucleotide
acuguagagccaauggagc

SEQ ID NO: 861471 - RNA, 19 nt, Artificial Sequence
  Description of Artificial Sequence: Synthetic oligonucleotide
aauccucgaaguccuucac

SEQ ID NO: 861472 - RNA, 19 nt, Artificial Sequence
  Description of Artificial Sequence: Synthetic oligonucleotide
gauaaucuccaaccggcgc

SEQ ID NO: 861473 - RNA, 19 nt, Artificial Sequence
  Description of Artificial Sequence: Synthetic oligonucleotide
uggaguucccaccagggga

SEQ ID NO: 861474 - RNA, 19 nt, Artificial Sequence
  Description of Artificial Sequence: Synthetic oligonucleotide
gaguauaucucgaaucagc

SEQ ID NO: 861475 - RNA, 19 nt, Artificial Sequence
  Description of Artificial Sequence: Synthetic oligonucleotide
uguaugggcaacuauugua

SEQ ID NO: 861476 - RNA, 19 nt, Artificial Sequence
  Description of Artificial Sequence: Synthetic oligonucleotide
caucuacuugauuacgugc

SEQ ID NO: 861477 - RNA, 19 nt, Artificial Sequence
  Description of Artificial Sequence: Synthetic oligonucleotide
uacaucuacuugauuacgu

SEQ ID NO: 861478 - RNA, 19 nt, Artificial Sequence
  Description of Artificial Sequence: Synthetic oligonucleotide
aaagcugauaucugauaaa

SEQ ID NO: 861479 - RNA, 19 nt, Artificial Sequence
  Description of Artificial Sequence: Synthetic oligonucleotide
uuugcaacuauugauucau

SEQ ID NO: 861480 - RNA, 19 nt, Artificial Sequence
  Description of Artificial Sequence: Synthetic oligonucleotide
acaacaauagcaggaauca

SEQ ID NO: 861481 - RNA, 19 nt, Artificial Sequence
  Description of Artificial Sequence: Synthetic oligonucleotide
acaauagcaggaaucauug

SEQ ID NO: 861482 - RNA, 19 nt, Artificial Sequence
  Description of Artificial Sequence: Synthetic oligonucleotide
ucaucagucuugucaaagc

SEQ ID NO: 861483 - RNA, 19 nt, Artificial Sequence
  Description of Artificial Sequence: Synthetic oligonucleotide
uguugaguucccauugcca

SEQ ID NO: 861484 - RNA, 19 nt, Artificial Sequence
  Description of Artificial Sequence: Synthetic oligonucleotide
ucgaugaacugucugcugu

SEQ ID NO: 861485 - RNA, 19 nt, Artificial Sequence
  Description of Artificial Sequence: Synthetic oligonucleotide
augggcaacuauuguaggg

SEQ ID NO: 861486 - RNA, 19 nt, Artificial Sequence
  Description of Artificial Sequence: Synthetic oligonucleotide
ugagagaccaaacggcagu

SEQ ID NO: 861487 - RNA, 19 nt, Artificial Sequence
  Description of Artificial Sequence: Synthetic oligonucleotide
uuguuccucgcuuagcuga

SEQ ID NO: 861488 - RNA, 19 nt, Artificial Sequence
  Description of Artificial Sequence: Synthetic oligonucleotide
acuauuguagggccaaaga

SEQ ID NO: 861489 - RNA, 19 nt, Artificial Sequence
  Description of Artificial Sequence: Synthetic oligonucleotide
augguugacagucuauugu

SEQ ID NO: 861490 - RNA, 19 nt, Artificial Sequence
  Description of Artificial Sequence: Synthetic oligonucleotide
ucaggcuuuauaaccgucu

SEQ ID NO: 861491 - RNA, 19 nt, Artificial Sequence
  Description of Artificial Sequence: Synthetic oligonucleotide
uaugggcaacuauuguagg

SEQ ID NO: 861492 - RNA, 19 nt, Artificial Sequence
  Description of Artificial Sequence: Synthetic oligonucleotide
uuacgugcaugcuucagcu

SEQ ID NO: 861493 - RNA, 19 nt, Artificial Sequence
  Description of Artificial Sequence: Synthetic oligonucleotide
agcugcucaaagugagucc

SEQ ID NO: 861494 - RNA, 19 nt, Artificial Sequence
  Description of Artificial Sequence: Synthetic oligonucleotide
guaugggcaacuauuguag

SEQ ID NO: 861495 - RNA, 19 nt, Artificial Sequence
  Description of Artificial Sequence: Synthetic oligonucleotide
uucggucacagccugagau

SEQ ID NO: 861496 - RNA, 19 nt, Artificial Sequence
  Description of Artificial Sequence: Synthetic oligonucleotide
ugguguugaguucccauug

SEQ ID NO: 861497 - RNA, 19 nt, Artificial Sequence
  Description of Artificial Sequence: Synthetic oligonucleotide
gaaucagcugaaucuguug

SEQ ID NO: 861498 - RNA, 19 nt, Artificial Sequence
  Description of Artificial Sequence: Synthetic oligonucleotide
aacuauuguagggccaaag

SEQ ID NO: 861499 - RNA, 19 nt, Artificial Sequence
  Description of Artificial Sequence: Synthetic oligonucleotide
ugcaugcuucagcuuaacg

SEQ ID NO: 861500 - RNA, 19 nt, Artificial Sequence
  Description of Artificial Sequence: Synthetic oligonucleotide
aucuguuaucucugcggcc

SEQ ID NO: 861501 - RNA, 19 nt, Artificial Sequence
  Description of Artificial Sequence: Synthetic oligonucleotide
cucgacauuugagagacag

SEQ ID NO: 861502 - RNA, 19 nt, Artificial Sequence
  Description of Artificial Sequence: Synthetic oligonucleotide
aagcugauaucugauaaaa

SEQ ID NO: 861503 - RNA, 19 nt, Artificial Sequence
  Description of Artificial Sequence: Synthetic oligonucleotide
uccucgguugagaaaagcu

SEQ ID NO: 861504 - RNA, 19 nt, Artificial Sequence
  Description of Artificial Sequence: Synthetic oligonucleotide
cagcuuaacguccagagca

SEQ ID NO: 861505 - RNA, 19 nt, Artificial Sequence
  Description of Artificial Sequence: Synthetic oligonucleotide
ucagcuuaacguccagagc

SEQ ID NO: 861506 - RNA, 19 nt, Artificial Sequence
  Description of Artificial Sequence: Synthetic oligonucleotide
ugcagggaaggggacaucg

SEQ ID NO: 861507 - RNA, 19 nt, Artificial Sequence
  Description of Artificial Sequence: Synthetic oligonucleotide
aaggagucuuggcaaguug

SEQ ID NO: 861508 - RNA, 19 nt, Artificial Sequence
  Description of Artificial Sequence: Synthetic oligonucleotide
ucucaaucguagauacagc

SEQ ID NO: 861509 - RNA, 19 nt, Artificial Sequence
  Description of Artificial Sequence: Synthetic oligonucleotide
uuuacuguucggucacagc

SEQ ID NO: 861510 - RNA, 19 nt, Artificial Sequence
  Description of Artificial Sequence: Synthetic oligonucleotide
ugccagaugugucacacau

SEQ ID NO: 861511 - RNA, 19 nt, Artificial Sequence
  Description of Artificial Sequence: Synthetic oligonucleotide
agcugacaacaauagcagg

SEQ ID NO: 861512 - RNA, 19 nt, Artificial Sequence
  Description of Artificial Sequence: Synthetic oligonucleotide
gcaacuauugauucauuug

SEQ ID NO: 861513 - RNA, 19 nt, Artificial Sequence
  Description of Artificial Sequence: Synthetic oligonucleotide
ucauguaggcgcaugccuc

SEQ ID NO: 861514 - RNA, 19 nt, Artificial Sequence
  Description of Artificial Sequence: Synthetic oligonucleotide
cuuugcuuagccaaaaggu

SEQ ID NO: 861515 - RNA, 19 nt, Artificial Sequence
  Description of Artificial Sequence: Synthetic oligonucleotide
ucauuugccuggucuacug

SEQ ID NO: 861516 - RNA, 19 nt, Artificial Sequence
  Description of Artificial Sequence: Synthetic oligonucleotide
ucgaaguccuucacaaccu

SEQ ID NO: 861517 - RNA, 19 nt, Artificial Sequence
  Description of Artificial Sequence: Synthetic oligonucleotide
ugucugucucaguucuugg

SEQ ID NO: 861518 - RNA, 19 nt, Artificial Sequence
  Description of Artificial Sequence: Synthetic oligonucleotide
uaguguucggacucugagc

SEQ ID NO: 861519 - RNA, 19 nt, Artificial Sequence
  Description of Artificial Sequence: Synthetic oligonucleotide
uauaagccugccucaguca

SEQ ID NO: 861520 - RNA, 19 nt, Artificial Sequence
  Description of Artificial Sequence: Synthetic oligonucleotide
agucauguaggcgcaugcc

SEQ ID NO: 861521 - RNA, 19 nt, Artificial Sequence
  Description of Artificial Sequence: Synthetic oligonucleotide
guauaucucgaaucagcug

SEQ ID NO: 861522 - RNA, 19 nt, Artificial Sequence
  Description of Artificial Sequence: Synthetic oligonucleotide
guauaagccugccucaguc

SEQ ID NO: 861523 - RNA, 19 nt, Artificial Sequence
  Description of Artificial Sequence: Synthetic oligonucleotide
uuuagcuagauuggcaaua

SEQ ID NO: 861524 - RNA, 19 nt, Artificial Sequence
  Description of Artificial Sequence: Synthetic oligonucleotide
gaguugacgcuugaugucc

SEQ ID NO: 861525 - RNA, 19 nt, Artificial Sequence
  Description of Artificial Sequence: Synthetic oligonucleotide
caucagucggaacagucac

SEQ ID NO: 861526 - RNA, 19 nt, Artificial Sequence
  Description of Artificial Sequence: Synthetic oligonucleotide
gaugagagaccaaacggca

SEQ ID NO: 861527 - RNA, 19 nt, Artificial Sequence
  Description of Artificial Sequence: Synthetic oligonucleotide
uuccggaaauccucgaagu

SEQ ID NO: 861528 - RNA, 19 nt, Artificial Sequence
  Description of Artificial Sequence: Synthetic oligonucleotide
uuuguuccucgcuuagcug

SEQ ID NO: 861529 - RNA, 19 nt, Artificial Sequence
  Description of Artificial Sequence: Synthetic oligonucleotide
aaagucauguaggcgcaug

SEQ ID NO: 861530 - RNA, 19 nt, Artificial Sequence
  Description of Artificial Sequence: Synthetic oligonucleotide
ucaaucguagauacagcuu

SEQ ID NO: 861531 - RNA, 19 nt, Artificial Sequence
  Description of Artificial Sequence: Synthetic oligonucleotide
cguagauacagcuucaaug

SEQ ID NO: 861532 - RNA, 19 nt, Artificial Sequence
  Description of Artificial Sequence: Synthetic oligonucleotide
gcaaguuggaauucaggag

SEQ ID NO: 861533 - RNA, 19 nt, Artificial Sequence
  Description of Artificial Sequence: Synthetic oligonucleotide
uugagguuccgaagaaagu

SEQ ID NO: 861534 - RNA, 19 nt, Artificial Sequence
  Description of Artificial Sequence: Synthetic oligonucleotide
gucucgacauuugagagac

SEQ ID NO: 861535 - RNA, 19 nt, Artificial Sequence
  Description of Artificial Sequence: Synthetic oligonucleotide
cagugauucaucagucuug

SEQ ID NO: 861536 - RNA, 19 nt, Artificial Sequence
  Description of Artificial Sequence: Synthetic oligonucleotide
caaagcugauaucugauaa

SEQ ID NO: 861537 - RNA, 19 nt, Artificial Sequence
  Description of Artificial Sequence: Synthetic oligonucleotide
uaaguugguggcagacuug

SEQ ID NO: 861538 - RNA, 19 nt, Artificial Sequence
  Description of Artificial Sequence: Synthetic oligonucleotide
caucuuaguguucggacuc

SEQ ID NO: 861539 - RNA, 19 nt, Artificial Sequence
  Description of Artificial Sequence: Synthetic oligonucleotide
gcucucauuuccuucauug

SEQ ID NO: 861540 - RNA, 19 nt, Artificial Sequence
  Description of Artificial Sequence: Synthetic oligonucleotide
gacagucuauuguucccag

SEQ ID NO: 861541 - RNA, 19 nt, Artificial Sequence
  Description of Artificial Sequence: Synthetic oligonucleotide
ugcgcuuuccacagggaac

SEQ ID NO: 861542 - RNA, 19 nt, Artificial Sequence
  Description of Artificial Sequence: Synthetic oligonucleotide
uccugguuuguucuuugac

SEQ ID NO: 861543 - RNA, 19 nt, Artificial Sequence
  Description of Artificial Sequence: Synthetic oligonucleotide
ucaaagcugauaucugaua

SEQ ID NO: 861544 - RNA, 19 nt, Artificial Sequence
  Description of Artificial Sequence: Synthetic oligonucleotide
acaugaguauaucucgaau

SEQ ID NO: 861545 - RNA, 19 nt, Artificial Sequence
  Description of Artificial Sequence: Synthetic oligonucleotide
gauaucugauaaaauggaa

SEQ ID NO: 861546 - RNA, 19 nt, Artificial Sequence
  Description of Artificial Sequence: Synthetic oligonucleotide
acuguaugggcaacuauug

SEQ ID NO: 861547 - RNA, 19 nt, Artificial Sequence
  Description of Artificial Sequence: Synthetic oligonucleotide
uguagggccaaagauuuua

SEQ ID NO: 861548 - RNA, 19 nt, Artificial Sequence
  Description of Artificial Sequence: Synthetic oligonucleotide
acagucuauuguucccagg

SEQ ID NO: 861549 - RNA, 19 nt, Artificial Sequence
  Description of Artificial Sequence: Synthetic oligonucleotide
ugaguugacgcuugauguc

SEQ ID NO: 861550 - RNA, 19 nt, Artificial Sequence
  Description of Artificial Sequence: Synthetic oligonucleotide
uguauaagccugccucagu

SEQ ID NO: 861551 - RNA, 19 nt, Artificial Sequence
  Description of Artificial Sequence: Synthetic oligonucleotide
gguugagaaaagcuagagc

SEQ ID NO: 861552 - RNA, 19 nt, Artificial Sequence
  Description of Artificial Sequence: Synthetic oligonucleotide
cuuuaaugucugguguccg

SEQ ID NO: 861553 - RNA, 19 nt, Artificial Sequence
  Description of Artificial Sequence: Synthetic oligonucleotide
uccucgcuuagcugaaugc

SEQ ID NO: 861554 - RNA, 19 nt, Artificial Sequence
  Description of Artificial Sequence: Synthetic oligonucleotide
ucgacauuugagagacagc

SEQ ID NO: 861555 - RNA, 19 nt, Artificial Sequence
  Description of Artificial Sequence: Synthetic oligonucleotide
cacuuuaaugucugguguc

SEQ ID NO: 861556 - RNA, 19 nt, Artificial Sequence
  Description of Artificial Sequence: Synthetic oligonucleotide
aucccgacauucuggauga

SEQ ID NO: 861557 - RNA, 19 nt, Artificial Sequence
  Description of Artificial Sequence: Synthetic oligonucleotide
agucggaacagucacugua

SEQ ID NO: 861558 - RNA, 19 nt, Artificial Sequence
  Description of Artificial Sequence: Synthetic oligonucleotide
caaccggcgcacaagcugc

SEQ ID NO: 861559 - RNA, 19 nt, Artificial Sequence
  Description of Artificial Sequence: Synthetic oligonucleotide
ggcaaugucucaaucguag

SEQ ID NO: 861560 - RNA, 19 nt, Artificial Sequence
  Description of Artificial Sequence: Synthetic oligonucleotide
ucuacuugauuacgugcau

SEQ ID NO: 861561 - RNA, 19 nt, Artificial Sequence
  Description of Artificial Sequence: Synthetic oligonucleotide
ggauuaggcacuguauggg

SEQ ID NO: 861562 - RNA, 19 nt, Artificial Sequence
  Description of Artificial Sequence: Synthetic oligonucleotide
uuguacaaucucugugaca

SEQ ID NO: 861563 - RNA, 19 nt, Artificial Sequence
  Description of Artificial Sequence: Synthetic oligonucleotide
uaacguccagagcacuagc

SEQ ID NO: 861564 - RNA, 19 nt, Artificial Sequence
  Description of Artificial Sequence: Synthetic oligonucleotide
cucgcuuagcugaaugcug

SEQ ID NO: 861565 - RNA, 19 nt, Artificial Sequence
  Description of Artificial Sequence: Synthetic oligonucleotide
uuagcugaaugcugccaga

SEQ ID NO: 861566 - RNA, 19 nt, Artificial Sequence
  Description of Artificial Sequence: Synthetic oligonucleotide
agucucgacauuugagaga

SEQ ID NO: 861567 - RNA, 19 nt, Artificial Sequence
  Description of Artificial Sequence: Synthetic oligonucleotide
ucgaucccgacauucugga

SEQ ID NO: 861568 - RNA, 19 nt, Artificial Sequence
  Description of Artificial Sequence: Synthetic oligonucleotide
gagaccaaacggcagucuc

SEQ ID NO: 861569 - RNA, 19 nt, Artificial Sequence
  Description of Artificial Sequence: Synthetic oligonucleotide
ucgaaucagcugaaucugu

SEQ ID NO: 861570 - RNA, 19 nt, Artificial Sequence
  Description of Artificial Sequence: Synthetic oligonucleotide
ugacagucuauuguuccca

SEQ ID NO: 861571 - RNA, 19 nt, Artificial Sequence
  Description of Artificial Sequence: Synthetic oligonucleotide
uguucggacucugagccac

SEQ ID NO: 861572 - RNA, 19 nt, Artificial Sequence
  Description of Artificial Sequence: Synthetic oligonucleotide
uacauggcggcugugcugu

SEQ ID NO: 861573 - RNA, 19 nt, Artificial Sequence
  Description of Artificial Sequence: Synthetic oligonucleotide
cucgaaucagcugaaucug

SEQ ID NO: 861574 - RNA, 19 nt, Artificial Sequence
  Description of Artificial Sequence: Synthetic oligonucleotide
ggaugagagaccaaacggc

SEQ ID NO: 861575 - RNA, 19 nt, Artificial Sequence
  Description of Artificial Sequence: Synthetic oligonucleotide
guguugaguucccauugcc

SEQ ID NO: 861576 - RNA, 19 nt, Artificial Sequence
  Description of Artificial Sequence: Synthetic oligonucleotide
agucuauuguucccagggu

SEQ ID NO: 861577 - RNA, 19 nt, Artificial Sequence
  Description of Artificial Sequence: Synthetic oligonucleotide
uuagcuagauuggcaauau

SEQ ID NO: 861578 - RNA, 19 nt, Artificial Sequence
  Description of Artificial Sequence: Synthetic oligonucleotide
uggguccgccaucagucgg

SEQ ID NO: 861579 - RNA, 19 nt, Artificial Sequence
  Description of Artificial Sequence: Synthetic oligonucleotide
ccgucuuugagacaaaguc

SEQ ID NO: 861580 - RNA, 19 nt, Artificial Sequence
  Description of Artificial Sequence: Synthetic oligonucleotide
agaccaaacggcagucucg

SEQ ID NO: 861581 - RNA, 19 nt, Artificial Sequence
  Description of Artificial Sequence: Synthetic oligonucleotide
gauuacgugcaugcuucag

SEQ ID NO: 861582 - RNA, 19 nt, Artificial Sequence
  Description of Artificial Sequence: Synthetic oligonucleotide
ucgccguuugaucucuaca

SEQ ID NO: 861583 - RNA, 19 nt, Artificial Sequence
  Description of Artificial Sequence: Synthetic oligonucleotide
uccggaaauccucgaaguc

SEQ ID NO: 861584 - RNA, 19 nt, Artificial Sequence
  Description of Artificial Sequence: Synthetic oligonucleotide
cuacuguagagccaaugga

SEQ ID NO: 861585 - RNA, 19 nt, Artificial Sequence
  Description of Artificial Sequence: Synthetic oligonucleotide
cuauuguucccaggguugc

SEQ ID NO: 861586 - RNA, 19 nt, Artificial Sequence
  Description of Artificial Sequence: Synthetic oligonucleotide
ugacgcuugauguccugga

SEQ ID NO: 861587 - RNA, 19 nt, Artificial Sequence
  Description of Artificial Sequence: Synthetic oligonucleotide
ucguagauacagcuucaau

SEQ ID NO: 861588 - RNA, 19 nt, Artificial Sequence
  Description of Artificial Sequence: Synthetic oligonucleotide
cucugcggccuccauaaag

SEQ ID NO: 861589 - RNA, 19 nt, Artificial Sequence
  Description of Artificial Sequence: Synthetic oligonucleotide
uucagugcggagucacugu

SEQ ID NO: 861590 - RNA, 19 nt, Artificial Sequence
  Description of Artificial Sequence: Synthetic oligonucleotide
guaaaggaccugauuuccc

SEQ ID NO: 861591 - RNA, 19 nt, Artificial Sequence
  Description of Artificial Sequence: Synthetic oligonucleotide
ugucucaaucguagauaca

SEQ ID NO: 861592 - RNA, 19 nt, Artificial Sequence
  Description of Artificial Sequence: Synthetic oligonucleotide
auugccacgcuggauguca

SEQ ID NO: 861593 - RNA, 19 nt, Artificial Sequence
  Description of Artificial Sequence: Synthetic oligonucleotide
gaaauccucgaaguccuuc

SEQ ID NO: 861594 - RNA, 19 nt, Artificial Sequence
  Description of Artificial Sequence: Synthetic oligonucleotide
agcuuaacguccagagcac

SEQ ID NO: 861595 - RNA, 19 nt, Artificial Sequence
  Description of Artificial Sequence: Synthetic oligonucleotide
uauaaccgucuuugagaca

SEQ ID NO: 861596 - RNA, 19 nt, Artificial Sequence
  Description of Artificial Sequence: Synthetic oligonucleotide
gauccuguauaagccugcc

SEQ ID NO: 861597 - RNA, 19 nt, Artificial Sequence
  Description of Artificial Sequence: Synthetic oligonucleotide
aacggcagucucgacauuu

SEQ ID NO: 861598 - RNA, 19 nt, Artificial Sequence
  Description of Artificial Sequence: Synthetic oligonucleotide
guacaaucucugugacagg

SEQ ID NO: 861599 - RNA, 19 nt, Artificial Sequence
  Description of Artificial Sequence: Synthetic oligonucleotide
guucagugcggagucacug

SEQ ID NO: 861600 - RNA, 19 nt, Artificial Sequence
  Description of Artificial Sequence: Synthetic oligonucleotide
auuaggcacuguaugggca

SEQ ID NO: 861601 - RNA, 19 nt, Artificial Sequence
  Description of Artificial Sequence: Synthetic oligonucleotide
gaaggcuaaugugucccug

SEQ ID NO: 861602 - RNA, 19 nt, Artificial Sequence
  Description of Artificial Sequence: Synthetic oligonucleotide
uguucagugcggagucacu

SEQ ID NO: 861603 - RNA, 19 nt, Artificial Sequence
  Description of Artificial Sequence: Synthetic oligonucleotide
uucauuugccuggucuacu

SEQ ID NO: 861604 - RNA, 19 nt, Artificial Sequence
  Description of Artificial Sequence: Synthetic oligonucleotide
cuacuugauuacgugcaug

SEQ ID NO: 861605 - RNA, 19 nt, Artificial Sequence
  Description of Artificial Sequence: Synthetic oligonucleotide
ucuuaguguucggacucug

SEQ ID NO: 861606 - RNA, 19 nt, Artificial Sequence
  Description of Artificial Sequence: Synthetic oligonucleotide
guagggccaaagauuuuag

SEQ ID NO: 861607 - RNA, 19 nt, Artificial Sequence
  Description of Artificial Sequence: Synthetic oligonucleotide
augagagaccaaacggcag

SEQ ID NO: 861608 - RNA, 19 nt, Artificial Sequence
  Description of Artificial Sequence: Synthetic oligonucleotide
agcacuagcccagucucug

SEQ ID NO: 861609 - RNA, 19 nt, Artificial Sequence
  Description of Artificial Sequence: Synthetic oligonucleotide
cuauuguagggccaaagau

SEQ ID NO: 861610 - RNA, 19 nt, Artificial Sequence
  Description of Artificial Sequence: Synthetic oligonucleotide
uguuccucgcuuagcugaa

SEQ ID NO: 861611 - RNA, 19 nt, Artificial Sequence
  Description of Artificial Sequence: Synthetic oligonucleotide
ucggucacagccugagauc

SEQ ID NO: 861612 - RNA, 19 nt, Artificial Sequence
  Description of Artificial Sequence: Synthetic oligonucleotide
acaaccuggaugaauucaa

SEQ ID NO: 861613 - RNA, 19 nt, Artificial Sequence
  Description of Artificial Sequence: Synthetic oligonucleotide
cuguauaagccugccucag

SEQ ID NO: 861614 - RNA, 19 nt, Artificial Sequence
  Description of Artificial Sequence: Synthetic oligonucleotide
guacauggcggcugugcug

SEQ ID NO: 861615 - RNA, 19 nt, Artificial Sequence
  Description of Artificial Sequence: Synthetic oligonucleotide
gcaugcuucagcuuaacgu

SEQ ID NO: 861616 - RNA, 19 nt, Artificial Sequence
  Description of Artificial Sequence: Synthetic oligonucleotide
gaacauugucacugggucu

SEQ ID NO: 861617 - RNA, 19 nt, Artificial Sequence
  Description of Artificial Sequence: Synthetic oligonucleotide
gaugccuguccucgguuga

SEQ ID NO: 861618 - RNA, 19 nt, Artificial Sequence
  Description of Artificial Sequence: Synthetic oligonucleotide
acgcuggaugucaauguuc

SEQ ID NO: 861619 - RNA, 19 nt, Artificial Sequence
  Description of Artificial Sequence: Synthetic oligonucleotide
acacaugaguauaucucga

SEQ ID NO: 861620 - RNA, 19 nt, Artificial Sequence
  Description of Artificial Sequence: Synthetic oligonucleotide
ggagagguuguacaaucuc

SEQ ID NO: 861621 - RNA, 19 nt, Artificial Sequence
  Description of Artificial Sequence: Synthetic oligonucleotide
guccgugguguugaguucc

SEQ ID NO: 861622 - RNA, 19 nt, Artificial Sequence
  Description of Artificial Sequence: Synthetic oligonucleotide
gucuacuguagagccaaug

SEQ ID NO: 861623 - RNA, 19 nt, Artificial Sequence
  Description of Artificial Sequence: Synthetic oligonucleotide
uggcaaugucucaaucgua

SEQ ID NO: 861624 - RNA, 19 nt, Artificial Sequence
  Description of Artificial Sequence: Synthetic oligonucleotide
ccggaaauccucgaagucc

SEQ ID NO: 861625 - RNA, 19 nt, Artificial Sequence
  Description of Artificial Sequence: Synthetic oligonucleotide
cuuugacacuucuuccgga

SEQ ID NO: 861626 - RNA, 19 nt, Artificial Sequence
  Description of Artificial Sequence: Synthetic oligonucleotide
acuugauuacgugcaugcu

SEQ ID NO: 861627 - RNA, 19 nt, Artificial Sequence
  Description of Artificial Sequence: Synthetic oligonucleotide
auccuguauaagccugccu

SEQ ID NO: 861628 - RNA, 19 nt, Artificial Sequence
  Description of Artificial Sequence: Synthetic oligonucleotide
cugcggccuccauaaaggc

SEQ ID NO: 861629 - RNA, 19 nt, Artificial Sequence
  Description of Artificial Sequence: Synthetic oligonucleotide
cuaucucauucacacagcu

SEQ ID NO: 861630 - RNA, 19 nt, Artificial Sequence
  Description of Artificial Sequence: Synthetic oligonucleotide
accaaacggcagucucgac

SEQ ID NO: 861631 - RNA, 19 nt, Artificial Sequence
  Description of Artificial Sequence: Synthetic oligonucleotide
gggcaacuauuguagggcc

SEQ ID NO: 861632 - RNA, 19 nt, Artificial Sequence
  Description of Artificial Sequence: Synthetic oligonucleotide
cacaugaguauaucucgaa

SEQ ID NO: 861633 - RNA, 19 nt, Artificial Sequence
  Description of Artificial Sequence: Synthetic oligonucleotide
cuguucagugcggagucac

SEQ ID NO: 861634 - RNA, 19 nt, Artificial Sequence
  Description of Artificial Sequence: Synthetic oligonucleotide
uccgugguguugaguuccc

SEQ ID NO: 861635 - RNA, 19 nt, Artificial Sequence
  Description of Artificial Sequence: Synthetic oligonucleotide
gagagaccaaacggcaguc

SEQ ID NO: 861636 - RNA, 19 nt, Artificial Sequence
  Description of Artificial Sequence: Synthetic oligonucleotide
ggugugccugaauugucug

SEQ ID NO: 861637 - RNA, 19 nt, Artificial Sequence
  Description of Artificial Sequence: Synthetic oligonucleotide
caaacggcagucucgacau

SEQ ID NO: 861638 - RNA, 19 nt, Artificial Sequence
  Description of Artificial Sequence: Synthetic oligonucleotide
uugauucauuugccugguc

SEQ ID NO: 861639 - RNA, 19 nt, Artificial Sequence
  Description of Artificial Sequence: Synthetic oligonucleotide
ggcagucucgacauuugag

SEQ ID NO: 861640 - RNA, 19 nt, Artificial Sequence
  Description of Artificial Sequence: Synthetic oligonucleotide
ucggacucugagccacucu

SEQ ID NO: 861641 - RNA, 19 nt, Artificial Sequence
  Description of Artificial Sequence: Synthetic oligonucleotide
gucauguaggcgcaugccu

SEQ ID NO: 861642 - RNA, 19 nt, Artificial Sequence
  Description of Artificial Sequence: Synthetic oligonucleotide
ucacugggucuggauuagg

SEQ ID NO: 861643 - RNA, 19 nt, Artificial Sequence
  Description of Artificial Sequence: Synthetic oligonucleotide
cccaccaggggagaaaugc

SEQ ID NO: 861644 - RNA, 19 nt, Artificial Sequence
  Description of Artificial Sequence: Synthetic oligonucleotide
cuugauuacgugcaugcuu

SEQ ID NO: 861645 - RNA, 19 nt, Artificial Sequence
  Description of Artificial Sequence: Synthetic oligonucleotide
agguauggagcagggaaaa

SEQ ID NO: 861646 - RNA, 19 nt, Artificial Sequence
  Description of Artificial Sequence: Synthetic oligonucleotide
gcucuuuuacuguucgguc

SEQ ID NO: 861647 - RNA, 19 nt, Artificial Sequence
  Description of Artificial Sequence: Synthetic oligonucleotide
acaucgaucccgacauucu

SEQ ID NO: 861648 - RNA, 19 nt, Artificial Sequence
  Description of Artificial Sequence: Synthetic oligonucleotide
gggccaaagauuuuagcua

SEQ ID NO: 861649 - RNA, 19 nt, Artificial Sequence
  Description of Artificial Sequence: Synthetic oligonucleotide
gagguuccgaagaaagucu

SEQ ID NO: 861650 - RNA, 19 nt, Artificial Sequence
  Description of Artificial Sequence: Synthetic oligonucleotide
gccaucgaugaacugucug

SEQ ID NO: 861651 - RNA, 19 nt, Artificial Sequence
  Description of Artificial Sequence: Synthetic oligonucleotide
aauuugccuuguugaccua

SEQ ID NO: 861652 - RNA, 19 nt, Artificial Sequence
  Description of Artificial Sequence: Synthetic oligonucleotide
ggcuaaugugucccuguug

SEQ ID NO: 861653 - RNA, 19 nt, Artificial Sequence
  Description of Artificial Sequence: Synthetic oligonucleotide
gacgcuugauguccuggaa

SEQ ID NO: 861654 - RNA, 19 nt, Artificial Sequence
  Description of Artificial Sequence: Synthetic oligonucleotide
cacuguaugggcaacuauu

SEQ ID NO: 861655 - RNA, 19 nt, Artificial Sequence
  Description of Artificial Sequence: Synthetic oligonucleotide
agcugauaucugauaaaau

SEQ ID NO: 861656 - RNA, 19 nt, Artificial Sequence
  Description of Artificial Sequence: Synthetic oligonucleotide
gucuauuguucccaggguu

SEQ ID NO: 861657 - RNA, 19 nt, Artificial Sequence
  Description of Artificial Sequence: Synthetic oligonucleotide
agagaccaaacggcagucu

SEQ ID NO: 861658 - RNA, 19 nt, Artificial Sequence
  Description of Artificial Sequence: Synthetic oligonucleotide
accgucuuugagacaaagu

SEQ ID NO: 861659 - RNA, 19 nt, Artificial Sequence
  Description of Artificial Sequence: Synthetic oligonucleotide
caaugucucaaucguagau

SEQ ID NO: 861660 - RNA, 19 nt, Artificial Sequence
  Description of Artificial Sequence: Synthetic oligonucleotide
ggggacaucgaucccgaca

SEQ ID NO: 861661 - RNA, 19 nt, Artificial Sequence
  Description of Artificial Sequence: Synthetic oligonucleotide
ggaacagucacuguaguuu

SEQ ID NO: 861662 - RNA, 19 nt, Artificial Sequence
  Description of Artificial Sequence: Synthetic oligonucleotide
gcgcacaagcugcucaaag

SEQ ID NO: 861663 - RNA, 19 nt, Artificial Sequence
  Description of Artificial Sequence: Synthetic oligonucleotide
gccuccauuauugugaggu

SEQ ID NO: 861664 - RNA, 19 nt, Artificial Sequence
  Description of Artificial Sequence: Synthetic oligonucleotide
guguccgugguguugaguu

SEQ ID NO: 861665 - RNA, 19 nt, Artificial Sequence
  Description of Artificial Sequence: Synthetic oligonucleotide
gucgccguuugaucucuac

SEQ ID NO: 861666 - RNA, 19 nt, Artificial Sequence
  Description of Artificial Sequence: Synthetic oligonucleotide
cagauucaucaaugguuga

SEQ ID NO: 861667 - RNA, 19 nt, Artificial Sequence
  Description of Artificial Sequence: Synthetic oligonucleotide
aucguagauacagcuucaa

SEQ ID NO: 861668 - RNA, 19 nt, Artificial Sequence
  Description of Artificial Sequence: Synthetic oligonucleotide
ucgcugucgccguuugauc

SEQ ID NO: 861669 - RNA, 19 nt, Artificial Sequence
  Description of Artificial Sequence: Synthetic oligonucleotide
aucugccaacauucccucu

SEQ ID NO: 861670 - RNA, 19 nt, Artificial Sequence
  Description of Artificial Sequence: Synthetic oligonucleotide
ggagggguacaguuuucac

SEQ ID NO: 861671 - RNA, 19 nt, Artificial Sequence
  Description of Artificial Sequence: Synthetic oligonucleotide
ccaaccggcgcacaagcug

SEQ ID NO: 861672 - RNA, 19 nt, Artificial Sequence
  Description of Artificial Sequence: Synthetic oligonucleotide
aggccucgcugcucuaucu

SEQ ID NO: 861673 - RNA, 19 nt, Artificial Sequence
  Description of Artificial Sequence: Synthetic oligonucleotide
gggacaucgaucccgacau

SEQ ID NO: 861674 - RNA, 19 nt, Artificial Sequence
  Description of Artificial Sequence: Synthetic oligonucleotide
guccucgguugagaaaagc

SEQ ID NO: 861675 - RNA, 19 nt, Artificial Sequence
  Description of Artificial Sequence: Synthetic oligonucleotide
aggggacaucgaucccgac

SEQ ID NO: 861676 - RNA, 19 nt, Artificial Sequence
  Description of Artificial Sequence: Synthetic oligonucleotide
uuguagggccaaagauuuu

SEQ ID NO: 861677 - RNA, 19 nt, Artificial Sequence
  Description of Artificial Sequence: Synthetic oligonucleotide
ucucgacauuugagagaca

SEQ ID NO: 861678 - RNA, 19 nt, Artificial Sequence
  Description of Artificial Sequence: Synthetic oligonucleotide
auaucucgaaucagcugaa

SEQ ID NO: 861679 - RNA, 19 nt, Artificial Sequence
  Description of Artificial Sequence: Synthetic oligonucleotide
gaccuaaguugguggcaga

SEQ ID NO: 861680 - RNA, 19 nt, Artificial Sequence
  Description of Artificial Sequence: Synthetic oligonucleotide
uaucucgaaucagcugaau

SEQ ID NO: 861681 - RNA, 19 nt, Artificial Sequence
  Description of Artificial Sequence: Synthetic oligonucleotide
uaaccgucuuugagacaaa

SEQ ID NO: 861682 - RNA, 19 nt, Artificial Sequence
  Description of Artificial Sequence: Synthetic oligonucleotide
aggcgcaugccuccauuau

SEQ ID NO: 861683 - RNA, 19 nt, Artificial Sequence
  Description of Artificial Sequence: Synthetic oligonucleotide
aguugacgcuugauguccu

SEQ ID NO: 861684 - RNA, 19 nt, Artificial Sequence
  Description of Artificial Sequence: Synthetic oligonucleotide
ccuguauaagccugccuca

SEQ ID NO: 861685 - RNA, 19 nt, Artificial Sequence
  Description of Artificial Sequence: Synthetic oligonucleotide
cuuguugaccuaaguuggu

SEQ ID NO: 861686 - RNA, 19 nt, Artificial Sequence
  Description of Artificial Sequence: Synthetic oligonucleotide
cuccauuauugugaggugu

SEQ ID NO: 861687 - RNA, 19 nt, Artificial Sequence
  Description of Artificial Sequence: Synthetic oligonucleotide
ccaucagucggaacaguca

SEQ ID NO: 861688 - RNA, 19 nt, Artificial Sequence
  Description of Artificial Sequence: Synthetic oligonucleotide
uugccacgcuggaugucaa

SEQ ID NO: 861689 - RNA, 19 nt, Artificial Sequence
  Description of Artificial Sequence: Synthetic oligonucleotide
uacgugcaugcuucagcuu

SEQ ID NO: 861690 - RNA, 19 nt, Artificial Sequence
  Description of Artificial Sequence: Synthetic oligonucleotide
uucggacucugagccacuc

SEQ ID NO: 861691 - RNA, 19 nt, Artificial Sequence
  Description of Artificial Sequence: Synthetic oligonucleotide
gccguuugaucucuacauc

SEQ ID NO: 861692 - RNA, 19 nt, Artificial Sequence
  Description of Artificial Sequence: Synthetic oligonucleotide
cagagcacuagcccagucu

SEQ ID NO: 861693 - RNA, 19 nt, Artificial Sequence
  Description of Artificial Sequence: Synthetic oligonucleotide
acggcagucucgacauuug

SEQ ID NO: 861694 - RNA, 19 nt, Artificial Sequence
  Description of Artificial Sequence: Synthetic oligonucleotide
gcaacuauuguagggccaa

SEQ ID NO: 861695 - RNA, 19 nt, Artificial Sequence
  Description of Artificial Sequence: Synthetic oligonucleotide
aaacggcagucucgacauu

SEQ ID NO: 861696 - RNA, 19 nt, Artificial Sequence
  Description of Artificial Sequence: Synthetic oligonucleotide
gugauucaucagucuuguc

SEQ ID NO: 861697 - RNA, 19 nt, Artificial Sequence
  Description of Artificial Sequence: Synthetic oligonucleotide
agguuccgaagaaagucuu

SEQ ID NO: 861698 - RNA, 19 nt, Artificial Sequence
  Description of Artificial Sequence: Synthetic oligonucleotide
cuguaugggcaacuauugu

SEQ ID NO: 861699 - RNA, 19 nt, Artificial Sequence
  Description of Artificial Sequence: Synthetic oligonucleotide
ccuccauuauugugaggug

SEQ ID NO: 861700 - RNA, 19 nt, Artificial Sequence
  Description of Artificial Sequence: Synthetic oligonucleotide
gcgcuuuccacagggaaca

SEQ ID NO: 861701 - RNA, 19 nt, Artificial Sequence
  Description of Artificial Sequence: Synthetic oligonucleotide
caauggguccgccaucagu

SEQ ID NO: 861702 - RNA, 19 nt, Artificial Sequence
  Description of Artificial Sequence: Synthetic oligonucleotide
gguacauggcggcugugcu

SEQ ID NO: 861703 - RNA, 19 nt, Artificial Sequence
  Description of Artificial Sequence: Synthetic oligonucleotide
cauggcggcugugcuguug

SEQ ID NO: 861704 - RNA, 19 nt, Artificial Sequence
  Description of Artificial Sequence: Synthetic oligonucleotide
ccucgguugagaaaagcua

SEQ ID NO: 861705 - RNA, 19 nt, Artificial Sequence
  Description of Artificial Sequence: Synthetic oligonucleotide
aggcacuguaugggcaacu

SEQ ID NO: 861706 - RNA, 19 nt, Artificial Sequence
  Description of Artificial Sequence: Synthetic oligonucleotide
guguucggacucugagcca

SEQ ID NO: 861707 - RNA, 19 nt, Artificial Sequence
  Description of Artificial Sequence: Synthetic oligonucleotide
caaugguugacagucuauu

SEQ ID NO: 861708 - RNA, 19 nt, Artificial Sequence
  Description of Artificial Sequence: Synthetic oligonucleotide
guucggucacagccugaga

SEQ ID NO: 861709 - RNA, 19 nt, Artificial Sequence
  Description of Artificial Sequence: Synthetic oligonucleotide
gacauuugagagacagcuu

SEQ ID NO: 861710 - RNA, 19 nt, Artificial Sequence
  Description of Artificial Sequence: Synthetic oligonucleotide
ggcaacuauuguagggcca

SEQ ID NO: 861711 - RNA, 19 nt, Artificial Sequence
  Description of Artificial Sequence: Synthetic oligonucleotide
cgacauuugagagacagcu

SEQ ID NO: 861712 - RNA, 19 nt, Artificial Sequence
  Description of Artificial Sequence: Synthetic oligonucleotide
gggguagcucacugacagc

SEQ ID NO: 861713 - RNA, 19 nt, Artificial Sequence
  Description of Artificial Sequence: Synthetic oligonucleotide
ccacaaauucaccacugua

SEQ ID NO: 861714 - RNA, 19 nt, Artificial Sequence
  Description of Artificial Sequence: Synthetic oligonucleotide
cauuugccuggucuacugu

SEQ ID NO: 861715 - RNA, 19 nt, Artificial Sequence
  Description of Artificial Sequence: Synthetic oligonucleotide
ccaucuuaguguucggacu

SEQ ID NO: 861716 - RNA, 19 nt, Artificial Sequence
  Description of Artificial Sequence: Synthetic oligonucleotide
ccaaaaggucagaaggggu

SEQ ID NO: 861717 - RNA, 19 nt, Artificial Sequence
  Description of Artificial Sequence: Synthetic oligonucleotide
cagcuucaauggguccgcc

SEQ ID NO: 861718 - RNA, 19 nt, Artificial Sequence
  Description of Artificial Sequence: Synthetic oligonucleotide
gugcaugcuucagcuuaac

SEQ ID NO: 861719 - RNA, 19 nt, Artificial Sequence
  Description of Artificial Sequence: Synthetic oligonucleotide
gggucuggauuaggcacug

SEQ ID NO: 861720 - RNA, 19 nt, Artificial Sequence
  Description of Artificial Sequence: Synthetic oligonucleotide
ugucgccguuugaucucua

SEQ ID NO: 861721 - RNA, 19 nt, Artificial Sequence
  Description of Artificial Sequence: Synthetic oligonucleotide
cucgcugucgccguuugau

SEQ ID NO: 861722 - RNA, 19 nt, Artificial Sequence
  Description of Artificial Sequence: Synthetic oligonucleotide
ucccgacauucuggaugag

SEQ ID NO: 861723 - RNA, 19 nt, Artificial Sequence
  Description of Artificial Sequence: Synthetic oligonucleotide
caggcuuuauaaccgucuu

SEQ ID NO: 861724 - RNA, 19 nt, Artificial Sequence
  Description of Artificial Sequence: Synthetic oligonucleotide
cuguucggucacagccuga

SEQ ID NO: 861725 - RNA, 19 nt, Artificial Sequence
  Description of Artificial Sequence: Synthetic oligonucleotide
gccugguacauggcggcug

SEQ ID NO: 861726 - RNA, 19 nt, Artificial Sequence
  Description of Artificial Sequence: Synthetic oligonucleotide
ggccucgcugcucuaucuc

SEQ ID NO: 861727 - RNA, 19 nt, Artificial Sequence
  Description of Artificial Sequence: Synthetic oligonucleotide
gaguucccaccaggggaga

SEQ ID NO: 861728 - RNA, 19 nt, Artificial Sequence
  Description of Artificial Sequence: Synthetic oligonucleotide
ccaaaucugggagugcucu

SEQ ID NO: 861729 - RNA, 19 nt, Artificial Sequence
  Description of Artificial Sequence: Synthetic oligonucleotide
gagcacuagcccagucucu

SEQ ID NO: 861730 - RNA, 19 nt, Artificial Sequence
  Description of Artificial Sequence: Synthetic oligonucleotide
caacuauuguagggccaaa

SEQ ID NO: 861731 - RNA, 19 nt, Artificial Sequence
  Description of Artificial Sequence: Synthetic oligonucleotide
cauucagccucagcucgcu

SEQ ID NO: 861732 - RNA, 19 nt, Artificial Sequence
  Description of Artificial Sequence: Synthetic oligonucleotide
guccgccaucagucggaac

SEQ ID NO: 861733 - RNA, 19 nt, Artificial Sequence
  Description of Artificial Sequence: Synthetic oligonucleotide
ggcacuguaugggcaacua

SEQ ID NO: 861734 - RNA, 19 nt, Artificial Sequence
  Description of Artificial Sequence: Synthetic oligonucleotide
cucuuugcaaguggaucau

SEQ ID NO: 861735 - RNA, 19 nt, Artificial Sequence
  Description of Artificial Sequence: Synthetic oligonucleotide
ggguccgccaucagucgga

SEQ ID NO: 861736 - RNA, 19 nt, Artificial Sequence
  Description of Artificial Sequence: Synthetic oligonucleotide
cccgacauucuggaugaga

SEQ ID NO: 861737 - RNA, 19 nt, Artificial Sequence
  Description of Artificial Sequence: Synthetic oligonucleotide
cacaagauucaggcuuuau

SEQ ID NO: 861738 - RNA, 19 nt, Artificial Sequence
  Description of Artificial Sequence: Synthetic oligonucleotide
cagucggaacagucacugu

SEQ ID NO: 861739 - RNA, 19 nt, Artificial Sequence
  Description of Artificial Sequence: Synthetic oligonucleotide
ccacgcuggaugucaaugu

SEQ ID NO: 861740 - RNA, 19 nt, Artificial Sequence
  Description of Artificial Sequence: Synthetic oligonucleotide
ggcgcaugccuccauuauu

SEQ ID NO: 861741 - RNA, 19 nt, Artificial Sequence
  Description of Artificial Sequence: Synthetic oligonucleotide
gcacuguaugggcaacuau

SEQ ID NO: 861742 - RNA, 19 nt, Artificial Sequence
  Description of Artificial Sequence: Synthetic oligonucleotide
ccggcgcacaagcugcuca

SEQ ID NO: 861743 - RNA, 19 nt, Artificial Sequence
  Description of Artificial Sequence: Synthetic oligonucleotide
gaaucccaguccagugauu

SEQ ID NO: 861744 - RNA, 19 nt, Artificial Sequence
  Description of Artificial Sequence: Synthetic oligonucleotide
gcuuaacguccagagcacu

SEQ ID NO: 861745 - RNA, 19 nt, Artificial Sequence
  Description of Artificial Sequence: Synthetic oligonucleotide
ggagcgccucuuuucucgu

SEQ ID NO: 861746 - RNA, 19 nt, Artificial Sequence
  Description of Artificial Sequence: Synthetic oligonucleotide
ccucgcuuagcugaaugcu

SEQ ID NO: 861747 - RNA, 19 nt, Artificial Sequence
  Description of Artificial Sequence: Synthetic oligonucleotide
cgccguuugaucucuacau

SEQ ID NO: 861748 - RNA, 19 nt, Artificial Sequence
  Description of Artificial Sequence: Synthetic oligonucleotide
ccuaaguugguggcagacu

SEQ ID NO: 861749 - RNA, 19 nt, Artificial Sequence
  Description of Artificial Sequence: Synthetic oligonucleotide
gagcgccucuuuucucguu

SEQ ID NO: 861750 - RNA, 19 nt, Artificial Sequence
  Description of Artificial Sequence: Synthetic oligonucleotide
gcucgcugucgccguuuga

SEQ ID NO: 861751 - RNA, 19 nt, Artificial Sequence
  Description of Artificial Sequence: Synthetic oligonucleotide
gguccgccaucagucggaa

SEQ ID NO: 861752 - RNA, 19 nt, Artificial Sequence
  Description of Artificial Sequence: Synthetic oligonucleotide
gguguccgugguguugagu

SEQ ID NO: 861753 - RNA, 19 nt, Artificial Sequence
  Description of Artificial Sequence: Synthetic oligonucleotide
ccgacuccugguccaagcu

SEQ ID NO: 861754 - RNA, 19 nt, Artificial Sequence
  Description of Artificial Sequence: Synthetic oligonucleotide
cggcagucucgacauuuga

SEQ ID NO: 861755 - RNA, 19 nt, Artificial Sequence
  Description of Artificial Sequence: Synthetic oligonucleotide
ggacucugagccacucuuu

SEQ ID NO: 861756 - RNA, 19 nt, Artificial Sequence
  Description of Artificial Sequence: Synthetic oligonucleotide
ccaccuugaguugacgcuu

SEQ ID NO: 861757 - RNA, 19 nt, Artificial Sequence
  Description of Artificial Sequence: Synthetic oligonucleotide
ccaccaucaugaacugauu

SEQ ID NO: 861758 - RNA, 19 nt, Artificial Sequence
  Description of Artificial Sequence: Synthetic oligonucleotide
ccccgacuccugguccaag

SEQ ID NO: 861759 - RNA, 19 nt, Artificial Sequence
  Description of Artificial Sequence: Synthetic oligonucleotide
ggccaucgaugaacugucu

SEQ ID NO: 861760 - RNA, 19 nt, Artificial Sequence
  Description of Artificial Sequence: Synthetic oligonucleotide
ccuugaguugacgcuugau

SEQ ID NO: 861761 - RNA, 19 nt, Artificial Sequence
  Description of Artificial Sequence: Synthetic oligonucleotide
cggcgcacaagcugcucaa

SEQ ID NO: 861762 - RNA, 19 nt, Artificial Sequence
  Description of Artificial Sequence: Synthetic oligonucleotide
ggacaucgaucccgacauu

SEQ ID NO: 861763 - RNA, 19 nt, Artificial Sequence
  Description of Artificial Sequence: Synthetic oligonucleotide
ccgugguguugaguuccca

SEQ ID NO: 861764 - RNA, 19 nt, Artificial Sequence
  Description of Artificial Sequence: Synthetic oligonucleotide
ggucuacuguagagccaau

SEQ ID NO: 861765 - RNA, 19 nt, Artificial Sequence
  Description of Artificial Sequence: Synthetic oligonucleotide
ccacuguaguauccaucuu

SEQ ID NO: 861766 - RNA, 19 nt, Artificial Sequence
  Description of Artificial Sequence: Synthetic oligonucleotide
cgaucccgacauucuggau

SEQ ID NO: 861767 - RNA, 19 nt, Artificial Sequence
  Description of Artificial Sequence: Synthetic oligonucleotide
ucuaacaucccaaauaggg

SEQ ID NO: 861768 - RNA, 19 nt, Artificial Sequence
  Description of Artificial Sequence: Synthetic oligonucleotide
aaugcuacuucuaacaucc

SEQ ID NO: 861769 - RNA, 19 nt, Artificial Sequence
  Description of Artificial Sequence: Synthetic oligonucleotide
gaucauacauuccagaacg

SEQ ID NO: 861770 - RNA, 19 nt, Artificial Sequence
  Description of Artificial Sequence: Synthetic oligonucleotide
aacggauuuagacacaguc

SEQ ID NO: 861771 - RNA, 19 nt, Artificial Sequence
  Description of Artificial Sequence: Synthetic oligonucleotide
cuuuaaauggaaugggugg

SEQ ID NO: 861772 - RNA, 19 nt, Artificial Sequence
  Description of Artificial Sequence: Synthetic oligonucleotide
uuuagcuaggaacaaacca

SEQ ID NO: 861773 - RNA, 19 nt, Artificial Sequence
  Description of Artificial Sequence: Synthetic oligonucleotide
gauuaaguaggauuucuag

SEQ ID NO: 861774 - RNA, 19 nt, Artificial Sequence
  Description of Artificial Sequence: Synthetic oligonucleotide
uccagaacggcucagacca

SEQ ID NO: 861775 - RNA, 19 nt, Artificial Sequence
  Description of Artificial Sequence: Synthetic oligonucleotide
auauuuaacagaccccugg

SEQ ID NO: 861776 - RNA, 19 nt, Artificial Sequence
  Description of Artificial Sequence: Synthetic oligonucleotide
uauuuaacagaccccuggg

SEQ ID NO: 861777 - RNA, 19 nt, Artificial Sequence
  Description of Artificial Sequence: Synthetic oligonucleotide
aguagaugcgcucuguuuc

SEQ ID NO: 861778 - RNA, 19 nt, Artificial Sequence
  Description of Artificial Sequence: Synthetic oligonucleotide
uguacgacuccuuaaaacu

SEQ ID NO: 861779 - RNA, 19 nt, Artificial Sequence
  Description of Artificial Sequence: Synthetic oligonucleotide
aaugcauauagguguugac

SEQ ID NO: 861780 - RNA, 19 nt, Artificial Sequence
  Description of Artificial Sequence: Synthetic oligonucleotide
cuucuaacaucccaaauag

SEQ ID NO: 861781 - RNA, 19 nt, Artificial Sequence
  Description of Artificial Sequence: Synthetic oligonucleotide
gauuucuagggcuagcgcc

SEQ ID NO: 861782 - RNA, 19 nt, Artificial Sequence
  Description of Artificial Sequence: Synthetic oligonucleotide
aagaacaagagacagugua

SEQ ID NO: 861783 - RNA, 19 nt, Artificial Sequence
  Description of Artificial Sequence: Synthetic oligonucleotide
aaaucguuuccuuccuugg

SEQ ID NO: 861784 - RNA, 19 nt, Artificial Sequence
  Description of Artificial Sequence: Synthetic oligonucleotide
gagagauugggccaugagg

SEQ ID NO: 861785 - RNA, 19 nt, Artificial Sequence
  Description of Artificial Sequence: Synthetic oligonucleotide
aauggaauggguggaaauc

SEQ ID NO: 861786 - RNA, 19 nt, Artificial Sequence
  Description of Artificial Sequence: Synthetic oligonucleotide
ucuuuagcuaggaacaaac

SEQ ID NO: 861787 - RNA, 19 nt, Artificial Sequence
  Description of Artificial Sequence: Synthetic oligonucleotide
caguguacacuacagaagg

SEQ ID NO: 861788 - RNA, 19 nt, Artificial Sequence
  Description of Artificial Sequence: Synthetic oligonucleotide
uguacacuacagaaggugc

SEQ ID NO: 861789 - RNA, 19 nt, Artificial Sequence
  Description of Artificial Sequence: Synthetic oligonucleotide
aaauagggaucaaauagag

SEQ ID NO: 861790 - RNA, 19 nt, Artificial Sequence
  Description of Artificial Sequence: Synthetic oligonucleotide
auguacgacuccuuaaaac

SEQ ID NO: 861791 - RNA, 19 nt, Artificial Sequence
  Description of Artificial Sequence: Synthetic oligonucleotide
uccaauagggugcuccugg

SEQ ID NO: 861792 - RNA, 19 nt, Artificial Sequence
  Description of Artificial Sequence: Synthetic oligonucleotide
aaucguuuccuuccuuggg

SEQ ID NO: 861793 - RNA, 19 nt, Artificial Sequence
  Description of Artificial Sequence: Synthetic oligonucleotide
ugcgaagagagauugggcc

SEQ ID NO: 861794 - RNA, 19 nt, Artificial Sequence
  Description of Artificial Sequence: Synthetic oligonucleotide
aacucaugguucgucaggc

SEQ ID NO: 861795 - RNA, 19 nt, Artificial Sequence
  Description of Artificial Sequence: Synthetic oligonucleotide
uuuaacagaccccuggguc

SEQ ID NO: 861796 - RNA, 19 nt, Artificial Sequence
  Description of Artificial Sequence: Synthetic oligonucleotide
ugacucuuuagcuaggaac

SEQ ID NO: 861797 - RNA, 19 nt, Artificial Sequence
  Description of Artificial Sequence: Synthetic oligonucleotide
ugcauauagguguugacgu

SEQ ID NO: 861798 - RNA, 19 nt, Artificial Sequence
  Description of Artificial Sequence: Synthetic oligonucleotide
uacgacuccuuaaaacugg

SEQ ID NO: 861799 - RNA, 19 nt, Artificial Sequence
  Description of Artificial Sequence: Synthetic oligonucleotide
uguuucacgguccccauca

SEQ ID NO: 861800 - RNA, 19 nt, Artificial Sequence
  Description of Artificial Sequence: Synthetic oligonucleotide
gaugcgcucuguuucacgg

SEQ ID NO: 861801 - RNA, 19 nt, Artificial Sequence
  Description of Artificial Sequence: Synthetic oligonucleotide
aaguaggauuucuagggcu

SEQ ID NO: 861802 - RNA, 19 nt, Artificial Sequence
  Description of Artificial Sequence: Synthetic oligonucleotide
ugaucauacauuccagaac

SEQ ID NO: 861803 - RNA, 19 nt, Artificial Sequence
  Description of Artificial Sequence: Synthetic oligonucleotide
uuuagacacagucuacacu

SEQ ID NO: 861804 - RNA, 19 nt, Artificial Sequence
  Description of Artificial Sequence: Synthetic oligonucleotide
ucauugaagaauucauaga

SEQ ID NO: 861805 - RNA, 19 nt, Artificial Sequence
  Description of Artificial Sequence: Synthetic oligonucleotide
accuagugaagacugguuc

SEQ ID NO: 861806 - RNA, 19 nt, Artificial Sequence
  Description of Artificial Sequence: Synthetic oligonucleotide
agggccgucguacacagac

SEQ ID NO: 861807 - RNA, 19 nt, Artificial Sequence
  Description of Artificial Sequence: Synthetic oligonucleotide
uaaguaggauuucuagggc

SEQ ID NO: 861808 - RNA, 19 nt, Artificial Sequence
  Description of Artificial Sequence: Synthetic oligonucleotide
aaacuuaccuggucucuag

SEQ ID NO: 861809 - RNA, 19 nt, Artificial Sequence
  Description of Artificial Sequence: Synthetic oligonucleotide
gcuacauggaugcagagcc

SEQ ID NO: 861810 - RNA, 19 nt, Artificial Sequence
  Description of Artificial Sequence: Synthetic oligonucleotide
ugccuuauaucaaaaugcu

SEQ ID NO: 861811 - RNA, 19 nt, Artificial Sequence
  Description of Artificial Sequence: Synthetic oligonucleotide
uuuaaauggaaugggugga

SEQ ID NO: 861812 - RNA, 19 nt, Artificial Sequence
  Description of Artificial Sequence: Synthetic oligonucleotide
uaacaucccaaauagggau

SEQ ID NO: 861813 - RNA, 19 nt, Artificial Sequence
  Description of Artificial Sequence: Synthetic oligonucleotide
ugaugagaucaaauccagg

SEQ ID NO: 861814 - RNA, 19 nt, Artificial Sequence
  Description of Artificial Sequence: Synthetic oligonucleotide
uccccauaaaaccaaagua

SEQ ID NO: 861815 - RNA, 19 nt, Artificial Sequence
  Description of Artificial Sequence: Synthetic oligonucleotide
acagucuacacuuccauaa

SEQ ID NO: 861816 - RNA, 19 nt, Artificial Sequence
  Description of Artificial Sequence: Synthetic oligonucleotide
aaucucagacuguugccug

SEQ ID NO: 861817 - RNA, 19 nt, Artificial Sequence
  Description of Artificial Sequence: Synthetic oligonucleotide
ugaacgucgaguauuccuc

SEQ ID NO: 861818 - RNA, 19 nt, Artificial Sequence
  Description of Artificial Sequence: Synthetic oligonucleotide
uucuaacaucccaaauagg

SEQ ID NO: 861819 - RNA, 19 nt, Artificial Sequence
  Description of Artificial Sequence: Synthetic oligonucleotide
ugcugcaaggggcugauca

SEQ ID NO: 861820 - RNA, 19 nt, Artificial Sequence
  Description of Artificial Sequence: Synthetic oligonucleotide
ugcguauuucugcucauug

SEQ ID NO: 861821 - RNA, 19 nt, Artificial Sequence
  Description of Artificial Sequence: Synthetic oligonucleotide
gauugggccaugaggaacg

SEQ ID NO: 861822 - RNA, 19 nt, Artificial Sequence
  Description of Artificial Sequence: Synthetic oligonucleotide
guagcaagcauguggauuc

SEQ ID NO: 861823 - RNA, 19 nt, Artificial Sequence
  Description of Artificial Sequence: Synthetic oligonucleotide
aaauggaauggguggaaau

SEQ ID NO: 861824 - RNA, 19 nt, Artificial Sequence
  Description of Artificial Sequence: Synthetic oligonucleotide
auuccagaacggcucagac

SEQ ID NO: 861825 - RNA, 19 nt, Artificial Sequence
  Description of Artificial Sequence: Synthetic oligonucleotide
guuaaagagagaguagaug

SEQ ID NO: 861826 - RNA, 19 nt, Artificial Sequence
  Description of Artificial Sequence: Synthetic oligonucleotide
aaccaacacaagcuaagga

SEQ ID NO: 861827 - RNA, 19 nt, Artificial Sequence
  Description of Artificial Sequence: Synthetic oligonucleotide
cuuaaaacuggcagacuug

SEQ ID NO: 861828 - RNA, 19 nt, Artificial Sequence
  Description of Artificial Sequence: Synthetic oligonucleotide
augugaaacagcauguuug

SEQ ID NO: 861829 - RNA, 19 nt, Artificial Sequence
  Description of Artificial Sequence: Synthetic oligonucleotide
gaacucaugguucgucagg

SEQ ID NO: 861830 - RNA, 19 nt, Artificial Sequence
  Description of Artificial Sequence: Synthetic oligonucleotide
agaacaagagacaguguac

SEQ ID NO: 861831 - RNA, 19 nt, Artificial Sequence
  Description of Artificial Sequence: Synthetic oligonucleotide
cuuuagcuaggaacaaacc

SEQ ID NO: 861832 - RNA, 19 nt, Artificial Sequence
  Description of Artificial Sequence: Synthetic oligonucleotide
acuuuaaauggaaugggug

SEQ ID NO: 861833 - RNA, 19 nt, Artificial Sequence
  Description of Artificial Sequence: Synthetic oligonucleotide
auguauguguucuggggag

SEQ ID NO: 861834 - RNA, 19 nt, Artificial Sequence
  Description of Artificial Sequence: Synthetic oligonucleotide
caaauagggaucaaauaga

SEQ ID NO: 861835 - RNA, 19 nt, Artificial Sequence
  Description of Artificial Sequence: Synthetic oligonucleotide
uagggcuagcgccagacug

SEQ ID NO: 861836 - RNA, 19 nt, Artificial Sequence
  Description of Artificial Sequence: Synthetic oligonucleotide
gugcacauagccaugaaug

SEQ ID NO: 861837 - RNA, 19 nt, Artificial Sequence
  Description of Artificial Sequence: Synthetic oligonucleotide
ucccaaauagggaucaaau

SEQ ID NO: 861838 - RNA, 19 nt, Artificial Sequence
  Description of Artificial Sequence: Synthetic oligonucleotide
gacucuuuagcuaggaaca

SEQ ID NO: 861839 - RNA, 19 nt, Artificial Sequence
  Description of Artificial Sequence: Synthetic oligonucleotide
aaacuggcagacuuggauu

SEQ ID NO: 861840 - RNA, 19 nt, Artificial Sequence
  Description of Artificial Sequence: Synthetic oligonucleotide
uggauuguugcugggagcc

SEQ ID NO: 861841 - RNA, 19 nt, Artificial Sequence
  Description of Artificial Sequence: Synthetic oligonucleotide
caaaucguuuccuuccuug

SEQ ID NO: 861842 - RNA, 19 nt, Artificial Sequence
  Description of Artificial Sequence: Synthetic oligonucleotide
augaacgucgaguauuccu

SEQ ID NO: 861843 - RNA, 19 nt, Artificial Sequence
  Description of Artificial Sequence: Synthetic oligonucleotide
auauagguguugacguucc

SEQ ID NO: 861844 - RNA, 19 nt, Artificial Sequence
  Description of Artificial Sequence: Synthetic oligonucleotide
guguugacguuccaaacug

SEQ ID NO: 861845 - RNA, 19 nt, Artificial Sequence
  Description of Artificial Sequence: Synthetic oligonucleotide
ucgauggggaugcugcaag

SEQ ID NO: 861846 - RNA, 19 nt, Artificial Sequence
  Description of Artificial Sequence: Synthetic oligonucleotide
gauuuagacacagucuaca

SEQ ID NO: 861847 - RNA, 19 nt, Artificial Sequence
  Description of Artificial Sequence: Synthetic oligonucleotide
aguacgagccagcagcugu

SEQ ID NO: 861848 - RNA, 19 nt, Artificial Sequence
  Description of Artificial Sequence: Synthetic oligonucleotide
gagacaguguacacuacag

SEQ ID NO: 861849 - RNA, 19 nt, Artificial Sequence
  Description of Artificial Sequence: Synthetic oligonucleotide
gggaguacgagccagcagc

SEQ ID NO: 861850 - RNA, 19 nt, Artificial Sequence
  Description of Artificial Sequence: Synthetic oligonucleotide
uucuuuaagcaggaugggc

SEQ ID NO: 861851 - RNA, 19 nt, Artificial Sequence
  Description of Artificial Sequence: Synthetic oligonucleotide
agguuaaagagagaguaga

SEQ ID NO: 861852 - RNA, 19 nt, Artificial Sequence
  Description of Artificial Sequence: Synthetic oligonucleotide
augaaugaaccagccgugc

SEQ ID NO: 861853 - RNA, 19 nt, Artificial Sequence
  Description of Artificial Sequence: Synthetic oligonucleotide
ugaugaacgucgaguauuc

SEQ ID NO: 861854 - RNA, 19 nt, Artificial Sequence
  Description of Artificial Sequence: Synthetic oligonucleotide
caugaaugaaccagccgug

SEQ ID NO: 861855 - RNA, 19 nt, Artificial Sequence
  Description of Artificial Sequence: Synthetic oligonucleotide
ugacguuccaaacugccuu

SEQ ID NO: 861856 - RNA, 19 nt, Artificial Sequence
  Description of Artificial Sequence: Synthetic oligonucleotide
uguggauucuaguuuuaaa

SEQ ID NO: 861857 - RNA, 19 nt, Artificial Sequence
  Description of Artificial Sequence: Synthetic oligonucleotide
gaauggguggaaaucucag

SEQ ID NO: 861858 - RNA, 19 nt, Artificial Sequence
  Description of Artificial Sequence: Synthetic oligonucleotide
ugguucgucaggcgaaacc

SEQ ID NO: 861859 - RNA, 19 nt, Artificial Sequence
  Description of Artificial Sequence: Synthetic oligonucleotide
agauugggccaugaggaac

SEQ ID NO: 861860 - RNA, 19 nt, Artificial Sequence
  Description of Artificial Sequence: Synthetic oligonucleotide
uuuuacggcaucugcguau

SEQ ID NO: 861861 - RNA, 19 nt, Artificial Sequence
  Description of Artificial Sequence: Synthetic oligonucleotide
cuaacaucccaaauaggga

SEQ ID NO: 861862 - RNA, 19 nt, Artificial Sequence
  Description of Artificial Sequence: Synthetic oligonucleotide
aucaaugaugaacgucgag

SEQ ID NO: 861863 - RNA, 19 nt, Artificial Sequence
  Description of Artificial Sequence: Synthetic oligonucleotide
uuguuagccuggauguaca

SEQ ID NO: 861864 - RNA, 19 nt, Artificial Sequence
  Description of Artificial Sequence: Synthetic oligonucleotide
acaagcuaaggaggaagac

SEQ ID NO: 861865 - RNA, 19 nt, Artificial Sequence
  Description of Artificial Sequence: Synthetic oligonucleotide
cagguuaaagagagaguag

SEQ ID NO: 861866 - RNA, 19 nt, Artificial Sequence
  Description of Artificial Sequence: Synthetic oligonucleotide
uuccagaacggcucagacc

SEQ ID NO: 861867 - RNA, 19 nt, Artificial Sequence
  Description of Artificial Sequence: Synthetic oligonucleotide
gaggucagcaggcaaagaa

SEQ ID NO: 861868 - RNA, 19 nt, Artificial Sequence
  Description of Artificial Sequence: Synthetic oligonucleotide
gauaaccuggaacauauuu

SEQ ID NO: 861869 - RNA, 19 nt, Artificial Sequence
  Description of Artificial Sequence: Synthetic oligonucleotide
agcuugguaggaccugugg

SEQ ID NO: 861870 - RNA, 19 nt, Artificial Sequence
  Description of Artificial Sequence: Synthetic oligonucleotide
ggguggaaaucucagacug

SEQ ID NO: 861871 - RNA, 19 nt, Artificial Sequence
  Description of Artificial Sequence: Synthetic oligonucleotide
cagccuaggcaacaguucc

SEQ ID NO: 861872 - RNA, 19 nt, Artificial Sequence
  Description of Artificial Sequence: Synthetic oligonucleotide
agugaacucaugguucguc

SEQ ID NO: 861873 - RNA, 19 nt, Artificial Sequence
  Description of Artificial Sequence: Synthetic oligonucleotide
ucguuuccuuccuugggcc

SEQ ID NO: 861874 - RNA, 19 nt, Artificial Sequence
  Description of Artificial Sequence: Synthetic oligonucleotide
gaacgucgaguauuccucc

SEQ ID NO: 861875 - RNA, 19 nt, Artificial Sequence
  Description of Artificial Sequence: Synthetic oligonucleotide
cuuugugagaaaacaaaua

SEQ ID NO: 861876 - RNA, 19 nt, Artificial Sequence
  Description of Artificial Sequence: Synthetic oligonucleotide
agagagauugggccaugag

SEQ ID NO: 861877 - RNA, 19 nt, Artificial Sequence
  Description of Artificial Sequence: Synthetic oligonucleotide
uggaaaucucagacuguug

SEQ ID NO: 861878 - RNA, 19 nt, Artificial Sequence
  Description of Artificial Sequence: Synthetic oligonucleotide
gcuaggaacaaaccaacac

SEQ ID NO: 861879 - RNA, 19 nt, Artificial Sequence
  Description of Artificial Sequence: Synthetic oligonucleotide
cauauagguguugacguuc

SEQ ID NO: 861880 - RNA, 19 nt, Artificial Sequence
  Description of Artificial Sequence: Synthetic oligonucleotide
uguuagccuggauguacag

SEQ ID NO: 861881 - RNA, 19 nt, Artificial Sequence
  Description of Artificial Sequence: Synthetic oligonucleotide
acaugguuccuccccaugu

SEQ ID NO: 861882 - RNA, 19 nt, Artificial Sequence
  Description of Artificial Sequence: Synthetic oligonucleotide
ucaugguucgucaggcgaa

SEQ ID NO: 861883 - RNA, 19 nt, Artificial Sequence
  Description of Artificial Sequence: Synthetic oligonucleotide
ucgaguauuccuccugcuc

SEQ ID NO: 861884 - RNA, 19 nt, Artificial Sequence
  Description of Artificial Sequence: Synthetic oligonucleotide
auggaauggguggaaaucu

SEQ ID NO: 861885 - RNA, 19 nt, Artificial Sequence
  Description of Artificial Sequence: Synthetic oligonucleotide
ugcuacauggaugcagagc

SEQ ID NO: 861886 - RNA, 19 nt, Artificial Sequence
  Description of Artificial Sequence: Synthetic oligonucleotide
acagugcacgcucuggcug

SEQ ID NO: 861887 - RNA, 19 nt, Artificial Sequence
  Description of Artificial Sequence: Synthetic oligonucleotide
aacuuaccuggucucuaga

SEQ ID NO: 861888 - RNA, 19 nt, Artificial Sequence
  Description of Artificial Sequence: Synthetic oligonucleotide
ugucccuccuguacugugc

SEQ ID NO: 861889 - RNA, 19 nt, Artificial Sequence
  Description of Artificial Sequence: Synthetic oligonucleotide
ucuagacaugugcccaaac

SEQ ID NO: 861890 - RNA, 19 nt, Artificial Sequence
  Description of Artificial Sequence: Synthetic oligonucleotide
aacgucgaguauuccuccu

SEQ ID NO: 861891 - RNA, 19 nt, Artificial Sequence
  Description of Artificial Sequence: Synthetic oligonucleotide
acggcaucugcguauuucu

SEQ ID NO: 861892 - RNA, 19 nt, Artificial Sequence
  Description of Artificial Sequence: Synthetic oligonucleotide
agaugcgcucuguuucacg

SEQ ID NO: 861893 - RNA, 19 nt, Artificial Sequence
  Description of Artificial Sequence: Synthetic oligonucleotide
uuaaugcauauagguguug

SEQ ID NO: 861894 - RNA, 19 nt, Artificial Sequence
  Description of Artificial Sequence: Synthetic oligonucleotide
uacacuacagaaggugcac

SEQ ID NO: 861895 - RNA, 19 nt, Artificial Sequence
  Description of Artificial Sequence: Synthetic oligonucleotide
gacaugugcccaaacugug

SEQ ID NO: 861896 - RNA, 19 nt, Artificial Sequence
  Description of Artificial Sequence: Synthetic oligonucleotide
cugcgaagagagauugggc

SEQ ID NO: 861897 - RNA, 19 nt, Artificial Sequence
  Description of Artificial Sequence: Synthetic oligonucleotide
ucgucaggcgaaaccaccu

SEQ ID NO: 861898 - RNA, 19 nt, Artificial Sequence
  Description of Artificial Sequence: Synthetic oligonucleotide
cauguguagccuguugggc

SEQ ID NO: 861899 - RNA, 19 nt, Artificial Sequence
  Description of Artificial Sequence: Synthetic oligonucleotide
acucaugguucgucaggcg

SEQ ID NO: 861900 - RNA, 19 nt, Artificial Sequence
  Description of Artificial Sequence: Synthetic oligonucleotide
ucuccaauagggugcuccu

SEQ ID NO: 861901 - RNA, 19 nt, Artificial Sequence
  Description of Artificial Sequence: Synthetic oligonucleotide
guacgacuccuuaaaacug

SEQ ID NO: 861902 - RNA, 19 nt, Artificial Sequence
  Description of Artificial Sequence: Synthetic oligonucleotide
augaugaacgucgaguauu

SEQ ID NO: 861903 - RNA, 19 nt, Artificial Sequence
  Description of Artificial Sequence: Synthetic oligonucleotide
cuggauuguugcugggagc

SEQ ID NO: 861904 - RNA, 19 nt, Artificial Sequence
  Description of Artificial Sequence: Synthetic oligonucleotide
ucacgguccccaucaaugu

SEQ ID NO: 861905 - RNA, 19 nt, Artificial Sequence
  Description of Artificial Sequence: Synthetic oligonucleotide
gucuccaauagggugcucc

SEQ ID NO: 861906 - RNA, 19 nt, Artificial Sequence
  Description of Artificial Sequence: Synthetic oligonucleotide
auuucuagggcuagcgcca

SEQ ID NO: 861907 - RNA, 19 nt, Artificial Sequence
  Description of Artificial Sequence: Synthetic oligonucleotide
ugcgcucuguuucacgguc

SEQ ID NO: 861908 - RNA, 19 nt, Artificial Sequence
  Description of Artificial Sequence: Synthetic oligonucleotide
ucuagggcuagcgccagac

SEQ ID NO: 861909 - RNA, 19 nt, Artificial Sequence
  Description of Artificial Sequence: Synthetic oligonucleotide
agucuacacuuccauaaua

SEQ ID NO: 861910 - RNA, 19 nt, Artificial Sequence
  Description of Artificial Sequence: Synthetic oligonucleotide
gaaugaaccagccgugccu

SEQ ID NO: 861911 - RNA, 19 nt, Artificial Sequence
  Description of Artificial Sequence: Synthetic oligonucleotide
ucccuuaggguuucccugu

SEQ ID NO: 861912 - RNA, 19 nt, Artificial Sequence
  Description of Artificial Sequence: Synthetic oligonucleotide
acagccuaggcaacaguuc

SEQ ID NO: 861913 - RNA, 19 nt, Artificial Sequence
  Description of Artificial Sequence: Synthetic oligonucleotide
acggauuuagacacagucu

SEQ ID NO: 861914 - RNA, 19 nt, Artificial Sequence
  Description of Artificial Sequence: Synthetic oligonucleotide
ugcgugcuccuguucgagg

SEQ ID NO: 861915 - RNA, 19 nt, Artificial Sequence
  Description of Artificial Sequence: Synthetic oligonucleotide
ugccauguguagccuguug

SEQ ID NO: 861916 - RNA, 19 nt, Artificial Sequence
  Description of Artificial Sequence: Synthetic oligonucleotide
gcgccagacugcuacaugg

SEQ ID NO: 861917 - RNA, 19 nt, Artificial Sequence
  Description of Artificial Sequence: Synthetic oligonucleotide
cagugcacgcucuggcugg

SEQ ID NO: 861918 - RNA, 19 nt, Artificial Sequence
  Description of Artificial Sequence: Synthetic oligonucleotide
gcccgcuuaaucaugaacc

SEQ ID NO: 861919 - RNA, 19 nt, Artificial Sequence
  Description of Artificial Sequence: Synthetic oligonucleotide
aggguagcaagcaugugga

SEQ ID NO: 861920 - RNA, 19 nt, Artificial Sequence
  Description of Artificial Sequence: Synthetic oligonucleotide
uucauucggaaggacuccu

SEQ ID NO: 861921 - RNA, 19 nt, Artificial Sequence
  Description of Artificial Sequence: Synthetic oligonucleotide
cuaggaugucgauccaguc

SEQ ID NO: 861922 - RNA, 19 nt, Artificial Sequence
  Description of Artificial Sequence: Synthetic oligonucleotide
aggcgaaaccaccucuucu

SEQ ID NO: 861923 - RNA, 19 nt, Artificial Sequence
  Description of Artificial Sequence: Synthetic oligonucleotide
ggaacggauuuagacacag

SEQ ID NO: 861924 - RNA, 19 nt, Artificial Sequence
  Description of Artificial Sequence: Synthetic oligonucleotide
gcuagcgccagacugcuac

SEQ ID NO: 861925 - RNA, 19 nt, Artificial Sequence
  Description of Artificial Sequence: Synthetic oligonucleotide
caugcuuggcucgcagugg

SEQ ID NO: 861926 - RNA, 19 nt, Artificial Sequence
  Description of Artificial Sequence: Synthetic oligonucleotide
uuucacgguccccaucaau

SEQ ID NO: 861927 - RNA, 19 nt, Artificial Sequence
  Description of Artificial Sequence: Synthetic oligonucleotide
uguugggcccacagagaca

SEQ ID NO: 861928 - RNA, 19 nt, Artificial Sequence
  Description of Artificial Sequence: Synthetic oligonucleotide
ugccauguacgacuccuua

SEQ ID NO: 861929 - RNA, 19 nt, Artificial Sequence
  Description of Artificial Sequence: Synthetic oligonucleotide
uggauguacagugcacgcu

SEQ ID NO: 861930 - RNA, 19 nt, Artificial Sequence
  Description of Artificial Sequence: Synthetic oligonucleotide
uugucccuccuguacugug

SEQ ID NO: 861931 - RNA, 19 nt, Artificial Sequence
  Description of Artificial Sequence: Synthetic oligonucleotide
ugugcccaaacuguggguu

SEQ ID NO: 861932 - RNA, 19 nt, Artificial Sequence
  Description of Artificial Sequence: Synthetic oligonucleotide
ugccucugcgaagagagau

SEQ ID NO: 861933 - RNA, 19 nt, Artificial Sequence
  Description of Artificial Sequence: Synthetic oligonucleotide
ucucuagacaugugcccaa

SEQ ID NO: 861934 - RNA, 19 nt, Artificial Sequence
  Description of Artificial Sequence: Synthetic oligonucleotide
acgucgaguauuccuccug

SEQ ID NO: 861935 - RNA, 19 nt, Artificial Sequence
  Description of Artificial Sequence: Synthetic oligonucleotide
caguuguuagccuggaugu

SEQ ID NO: 861936 - RNA, 19 nt, Artificial Sequence
  Description of Artificial Sequence: Synthetic oligonucleotide
gaugaacgucgaguauucc

SEQ ID NO: 861937 - RNA, 19 nt, Artificial Sequence
  Description of Artificial Sequence: Synthetic oligonucleotide
ugugcgugcuccuguucga

SEQ ID NO: 861938 - RNA, 19 nt, Artificial Sequence
  Description of Artificial Sequence: Synthetic oligonucleotide
cucuaugcucuuggggucc

SEQ ID NO: 861939 - RNA, 19 nt, Artificial Sequence
  Description of Artificial Sequence: Synthetic oligonucleotide
uccuugggcccgcuuaauc

SEQ ID NO: 861940 - RNA, 19 nt, Artificial Sequence
  Description of Artificial Sequence: Synthetic oligonucleotide
gucuaggaugucgauccag

SEQ ID NO: 861941 - RNA, 19 nt, Artificial Sequence
  Description of Artificial Sequence: Synthetic oligonucleotide
cgugccucugcgaagagag

SEQ ID NO: 861942 - RNA, 19 nt, Artificial Sequence
  Description of Artificial Sequence: Synthetic oligonucleotide
guccccauaaaaccaaagu

SEQ ID NO: 861943 - RNA, 19 nt, Artificial Sequence
  Description of Artificial Sequence: Synthetic oligonucleotide
uccuguucgagggucccca

SEQ ID NO: 861944 - RNA, 19 nt, Artificial Sequence
  Description of Artificial Sequence: Synthetic oligonucleotide
gaaggugcacauagccaug

SEQ ID NO: 861945 - RNA, 19 nt, Artificial Sequence
  Description of Artificial Sequence: Synthetic oligonucleotide
augguuccuccccauguau

SEQ ID NO: 861946 - RNA, 19 nt, Artificial Sequence
  Description of Artificial Sequence: Synthetic oligonucleotide
gagaucaaauccaggaaau

SEQ ID NO: 861947 - RNA, 19 nt, Artificial Sequence
  Description of Artificial Sequence: Synthetic oligonucleotide
gcgugcuccuguucgaggg

SEQ ID NO: 861948 - RNA, 19 nt, Artificial Sequence
  Description of Artificial Sequence: Synthetic oligonucleotide
caacaaggauuaaguagga

SEQ ID NO: 861949 - RNA, 19 nt, Artificial Sequence
  Description of Artificial Sequence: Synthetic oligonucleotide
aguaggauuucuagggcua

SEQ ID NO: 861950 - RNA, 19 nt, Artificial Sequence
  Description of Artificial Sequence: Synthetic oligonucleotide
uuuacggcaucugcguauu

SEQ ID NO: 861951 - RNA, 19 nt, Artificial Sequence
  Description of Artificial Sequence: Synthetic oligonucleotide
cagaacggcucagaccacc

SEQ ID NO: 861952 - RNA, 19 nt, Artificial Sequence
  Description of Artificial Sequence: Synthetic oligonucleotide
gguucgucaggcgaaacca

SEQ ID NO: 861953 - RNA, 19 nt, Artificial Sequence
  Description of Artificial Sequence: Synthetic oligonucleotide
gaacggcucagaccaccug

SEQ ID NO: 861954 - RNA, 19 nt, Artificial Sequence
  Description of Artificial Sequence: Synthetic oligonucleotide
cccgcuuaaucaugaaccc

SEQ ID NO: 861955 - RNA, 19 nt, Artificial Sequence
  Description of Artificial Sequence: Synthetic oligonucleotide
uccuguacugugcgugcuc

SEQ ID NO: 861956 - RNA, 19 nt, Artificial Sequence
  Description of Artificial Sequence: Synthetic oligonucleotide
caggucucugucccucagg

SEQ ID NO: 861957 - RNA, 19 nt, Artificial Sequence
  Description of Artificial Sequence: Synthetic oligonucleotide
agcgccagacugcuacaug

SEQ ID NO: 861958 - RNA, 19 nt, Artificial Sequence
  Description of Artificial Sequence: Synthetic oligonucleotide
agaucaaauccaggaaauu

SEQ ID NO: 861959 - RNA, 19 nt, Artificial Sequence
  Description of Artificial Sequence: Synthetic oligonucleotide
ucccacacgcccucccucu

SEQ ID NO: 861960 - RNA, 19 nt, Artificial Sequence
  Description of Artificial Sequence: Synthetic oligonucleotide
ucuaugcucuugggguccc

SEQ ID NO: 861961 - RNA, 19 nt, Artificial Sequence
  Description of Artificial Sequence: Synthetic oligonucleotide
ccaugaaugaaccagccgu

SEQ ID NO: 861962 - RNA, 19 nt, Artificial Sequence
  Description of Artificial Sequence: Synthetic oligonucleotide
cauguacgacuccuuaaaa

SEQ ID NO: 861963 - RNA, 19 nt, Artificial Sequence
  Description of Artificial Sequence: Synthetic oligonucleotide
gacguuccaaacugccuua

SEQ ID NO: 861964 - RNA, 19 nt, Artificial Sequence
  Description of Artificial Sequence: Synthetic oligonucleotide
auugggccaugaggaacgg

SEQ ID NO: 861965 - RNA, 19 nt, Artificial Sequence
  Description of Artificial Sequence: Synthetic oligonucleotide
auguggauucuaguuuuaa

SEQ ID NO: 861966 - RNA, 19 nt, Artificial Sequence
  Description of Artificial Sequence: Synthetic oligonucleotide
augguucgucaggcgaaac

SEQ ID NO: 861967 - RNA, 19 nt, Artificial Sequence
  Description of Artificial Sequence: Synthetic oligonucleotide
gaagagagauugggccaug

SEQ ID NO: 861968 - RNA, 19 nt, Artificial Sequence
  Description of Artificial Sequence: Synthetic oligonucleotide
caucugcguauuucugcuc

SEQ ID NO: 861969 - RNA, 19 nt, Artificial Sequence
  Description of Artificial Sequence: Synthetic oligonucleotide
gcgaagagagauugggcca

SEQ ID NO: 861970 - RNA, 19 nt, Artificial Sequence
  Description of Artificial Sequence: Synthetic oligonucleotide
ggauuuagacacagucuac

SEQ ID NO: 861971 - RNA, 19 nt, Artificial Sequence
  Description of Artificial Sequence: Synthetic oligonucleotide
ucucccugaugaugagauc

SEQ ID NO: 861972 - RNA, 19 nt, Artificial Sequence
  Description of Artificial Sequence: Synthetic oligonucleotide
guacgagccagcagcugug

SEQ ID NO: 861973 - RNA, 19 nt, Artificial Sequence
  Description of Artificial Sequence: Synthetic oligonucleotide
acauuccagaacggcucag

SEQ ID NO: 861974 - RNA, 19 nt, Artificial Sequence
  Description of Artificial Sequence: Synthetic oligonucleotide
cuacauggaugcagagcca

SEQ ID NO: 861975 - RNA, 19 nt, Artificial Sequence
  Description of Artificial Sequence: Synthetic oligonucleotide
ccgucguacacagacuugc

SEQ ID NO: 861976 - RNA, 19 nt, Artificial Sequence
  Description of Artificial Sequence: Synthetic oligonucleotide
cuuaaucaugaacccuucu

SEQ ID NO: 861977 - RNA, 19 nt, Artificial Sequence
  Description of Artificial Sequence: Synthetic oligonucleotide
gaguagaugcgcucuguuu

SEQ ID NO: 861978 - RNA, 19 nt, Artificial Sequence
  Description of Artificial Sequence: Synthetic oligonucleotide
guucgucaggcgaaaccac

SEQ ID NO: 861979 - RNA, 19 nt, Artificial Sequence
  Description of Artificial Sequence: Synthetic oligonucleotide
uagaugcgcucuguuucac

SEQ ID NO: 861980 - RNA, 19 nt, Artificial Sequence
  Description of Artificial Sequence: Synthetic oligonucleotide
agccgugccucugcgaaga

SEQ ID NO: 861981 - RNA, 19 nt, Artificial Sequence
  Description of Artificial Sequence: Synthetic oligonucleotide
gguccccauaaaaccaaag

SEQ ID NO: 861982 - RNA, 19 nt, Artificial Sequence
  Description of Artificial Sequence: Synthetic oligonucleotide
agaacggcucagaccaccu

SEQ ID NO: 861983 - RNA, 19 nt, Artificial Sequence
  Description of Artificial Sequence: Synthetic oligonucleotide
gaguacgagccagcagcug

SEQ ID NO: 861984 - RNA, 19 nt, Artificial Sequence
  Description of Artificial Sequence: Synthetic oligonucleotide
gucaggcgaaaccaccucu

SEQ ID NO: 861985 - RNA, 19 nt, Artificial Sequence
  Description of Artificial Sequence: Synthetic oligonucleotide
ccucugcgaagagagauug

SEQ ID NO: 861986 - RNA, 19 nt, Artificial Sequence
  Description of Artificial Sequence: Synthetic oligonucleotide
ccauaaaaccaaaguagua

SEQ ID NO: 861987 - RNA, 19 nt, Artificial Sequence
  Description of Artificial Sequence: Synthetic oligonucleotide
caguggcgccaccagcuug

SEQ ID NO: 861988 - RNA, 19 nt, Artificial Sequence
  Description of Artificial Sequence: Synthetic oligonucleotide
cucuuuagcuaggaacaaa

SEQ ID NO: 861989 - RNA, 19 nt, Artificial Sequence
  Description of Artificial Sequence: Synthetic oligonucleotide
cgaguauuccuccugcuca

SEQ ID NO: 861990 - RNA, 19 nt, Artificial Sequence
  Description of Artificial Sequence: Synthetic oligonucleotide
aguuguuagccuggaugua

SEQ ID NO: 861991 - RNA, 19 nt, Artificial Sequence
  Description of Artificial Sequence: Synthetic oligonucleotide
ggauuaaguaggauuucua

SEQ ID NO: 861992 - RNA, 19 nt, Artificial Sequence
  Description of Artificial Sequence: Synthetic oligonucleotide
cggauuuagacacagucua

SEQ ID NO: 861993 - RNA, 19 nt, Artificial Sequence
  Description of Artificial Sequence: Synthetic oligonucleotide
guggaaaucucagacuguu

SEQ ID NO: 861994 - RNA, 19 nt, Artificial Sequence
  Description of Artificial Sequence: Synthetic oligonucleotide
caugguuccuccccaugua

SEQ ID NO: 861995 - RNA, 19 nt, Artificial Sequence
  Description of Artificial Sequence: Synthetic oligonucleotide
ccuaggcaacaguuccugc

SEQ ID NO: 861996 - RNA, 19 nt, Artificial Sequence
  Description of Artificial Sequence: Synthetic oligonucleotide
cuggauaaccuggaacaua

SEQ ID NO: 861997 - RNA, 19 nt, Artificial Sequence
  Description of Artificial Sequence: Synthetic oligonucleotide
gugcgugcuccuguucgag

SEQ ID NO: 861998 - RNA, 19 nt, Artificial Sequence
  Description of Artificial Sequence: Synthetic oligonucleotide
cgucgaguauuccuccugc

SEQ ID NO: 861999 - RNA, 19 nt, Artificial Sequence
  Description of Artificial Sequence: Synthetic oligonucleotide
gccuaggcaacaguuccug

SEQ ID NO: 862000 - RNA, 19 nt, Artificial Sequence
  Description of Artificial Sequence: Synthetic oligonucleotide
cuagcgccagacugcuaca

SEQ ID NO: 862001 - RNA, 19 nt, Artificial Sequence
  Description of Artificial Sequence: Synthetic oligonucleotide
gcuuaaucaugaacccuuc

SEQ ID NO: 862002 - RNA, 19 nt, Artificial Sequence
  Description of Artificial Sequence: Synthetic oligonucleotide
agccuaggcaacaguuccu

SEQ ID NO: 862003 - RNA, 19 nt, Artificial Sequence
  Description of Artificial Sequence: Synthetic oligonucleotide
aggaacggauuuagacaca

SEQ ID NO: 862004 - RNA, 19 nt, Artificial Sequence
  Description of Artificial Sequence: Synthetic oligonucleotide
cagccgugccucugcgaag

SEQ ID NO: 862005 - RNA, 19 nt, Artificial Sequence
  Description of Artificial Sequence: Synthetic oligonucleotide
ccguaucucgucuucuuga

SEQ ID NO: 862006 - RNA, 19 nt, Artificial Sequence
  Description of Artificial Sequence: Synthetic oligonucleotide
uagcgccagacugcuacau

SEQ ID NO: 862007 - RNA, 19 nt, Artificial Sequence
  Description of Artificial Sequence: Synthetic oligonucleotide
ggcaugugaaacagcaugu

SEQ ID NO: 862008 - RNA, 19 nt, Artificial Sequence
  Description of Artificial Sequence: Synthetic oligonucleotide
cccaaagaucaaaggcuuc

SEQ ID NO: 862009 - RNA, 19 nt, Artificial Sequence
  Description of Artificial Sequence: Synthetic oligonucleotide
gccauguacgacuccuuaa

SEQ ID NO: 862010 - RNA, 19 nt, Artificial Sequence
  Description of Artificial Sequence: Synthetic oligonucleotide
uuacggcaucugcguauuu

SEQ ID NO: 862011 - RNA, 19 nt, Artificial Sequence
  Description of Artificial Sequence: Synthetic oligonucleotide
cuugggcccgcuuaaucau

SEQ ID NO: 862012 - RNA, 19 nt, Artificial Sequence
  Description of Artificial Sequence: Synthetic oligonucleotide
gguuaaagagagaguagau

SEQ ID NO: 862013 - RNA, 19 nt, Artificial Sequence
  Description of Artificial Sequence: Synthetic oligonucleotide
gucgaguauuccuccugcu

SEQ ID NO: 862014 - RNA, 19 nt, Artificial Sequence
  Description of Artificial Sequence: Synthetic oligonucleotide
ggcgaaaccaccucuucuu

SEQ ID NO: 862015 - RNA, 19 nt, Artificial Sequence
  Description of Artificial Sequence: Synthetic oligonucleotide
acguuccaaacugccuuau

SEQ ID NO: 862016 - RNA, 19 nt, Artificial Sequence
  Description of Artificial Sequence: Synthetic oligonucleotide
ccggaaaugcuacuucuaa

SEQ ID NO: 862017 - RNA, 19 nt, Artificial Sequence
  Description of Artificial Sequence: Synthetic oligonucleotide
caauagggugcuccuggcu

SEQ ID NO: 862018 - RNA, 19 nt, Artificial Sequence
  Description of Artificial Sequence: Synthetic oligonucleotide
guuucacgguccccaucaa

SEQ ID NO: 862019 - RNA, 19 nt, Artificial Sequence
  Description of Artificial Sequence: Synthetic oligonucleotide
gagcccgccagugcaggga

SEQ ID NO: 862020 - RNA, 19 nt, Artificial Sequence
  Description of Artificial Sequence: Synthetic oligonucleotide
cacacgcccucccucucca

SEQ ID NO: 862021 - RNA, 19 nt, Artificial Sequence
  Description of Artificial Sequence: Synthetic oligonucleotide
caugguucgucaggcgaaa

SEQ ID NO: 862022 - RNA, 19 nt, Artificial Sequence
  Description of Artificial Sequence: Synthetic oligonucleotide
gaacggauuuagacacagu

SEQ ID NO: 862023 - RNA, 19 nt, Artificial Sequence
  Description of Artificial Sequence: Synthetic oligonucleotide
accccagcgaugaccugcu

SEQ ID NO: 862024 - RNA, 19 nt, Artificial Sequence
  Description of Artificial Sequence: Synthetic oligonucleotide
uuccuugggcccgcuuaau

SEQ ID NO: 862025 - RNA, 19 nt, Artificial Sequence
  Description of Artificial Sequence: Synthetic oligonucleotide
agcaagcauguggauucua

SEQ ID NO: 862026 - RNA, 19 nt, Artificial Sequence
  Description of Artificial Sequence: Synthetic oligonucleotide
cucuagacaugugcccaaa

SEQ ID NO: 862027 - RNA, 19 nt, Artificial Sequence
  Description of Artificial Sequence: Synthetic oligonucleotide
cgaaaccaccucuucuuga

SEQ ID NO: 862028 - RNA, 19 nt, Artificial Sequence
  Description of Artificial Sequence: Synthetic oligonucleotide
gccuggauguacagugcac

SEQ ID NO: 862029 - RNA, 19 nt, Artificial Sequence
  Description of Artificial Sequence: Synthetic oligonucleotide
uggcgccaccagcuuggua

SEQ ID NO: 862030 - RNA, 19 nt, Artificial Sequence
  Description of Artificial Sequence: Synthetic oligonucleotide
ggccgucguacacagacuu

SEQ ID NO: 862031 - RNA, 19 nt, Artificial Sequence
  Description of Artificial Sequence: Synthetic oligonucleotide
gccgucguacacagacuug

SEQ ID NO: 862032 - RNA, 19 nt, Artificial Sequence
  Description of Artificial Sequence: Synthetic oligonucleotide
gcauauagguguugacguu

SEQ ID NO: 862033 - RNA, 19 nt, Artificial Sequence
  Description of Artificial Sequence: Synthetic oligonucleotide
gcgcucuguuucacggucc

SEQ ID NO: 862034 - RNA, 19 nt, Artificial Sequence
  Description of Artificial Sequence: Synthetic oligonucleotide
cgcuuaaucaugaacccuu

SEQ ID NO: 862035 - RNA, 19 nt, Artificial Sequence
  Description of Artificial Sequence: Synthetic oligonucleotide
cuagggcuagcgccagacu

SEQ ID NO: 862036 - RNA, 19 nt, Artificial Sequence
  Description of Artificial Sequence: Synthetic oligonucleotide
cccuuaggguuucccugug

SEQ ID NO: 862037 - RNA, 19 nt, Artificial Sequence
  Description of Artificial Sequence: Synthetic oligonucleotide
ccuguucgaggguccccac

SEQ ID NO: 862038 - RNA, 19 nt, Artificial Sequence
  Description of Artificial Sequence: Synthetic oligonucleotide
caauguccagcuggauugu

SEQ ID NO: 862039 - RNA, 19 nt, Artificial Sequence
  Description of Artificial Sequence: Synthetic oligonucleotide
cagccaagauguucucgau

SEQ ID NO: 862040 - RNA, 19 nt, Artificial Sequence
  Description of Artificial Sequence: Synthetic oligonucleotide
caucccaaauagggaucaa

SEQ ID NO: 862041 - RNA, 19 nt, Artificial Sequence
  Description of Artificial Sequence: Synthetic oligonucleotide
cgucaggcgaaaccaccuc

SEQ ID NO: 862042 - RNA, 19 nt, Artificial Sequence
  Description of Artificial Sequence: Synthetic oligonucleotide
cccggaaaugcuacuucua

SEQ ID NO: 862043 - RNA, 19 nt, Artificial Sequence
  Description of Artificial Sequence: Synthetic oligonucleotide
cggcucagaccaccugugc

SEQ ID NO: 862044 - RNA, 19 nt, Artificial Sequence
  Description of Artificial Sequence: Synthetic oligonucleotide
gcaugugaaacagcauguu

SEQ ID NO: 862045 - RNA, 19 nt, Artificial Sequence
  Description of Artificial Sequence: Synthetic oligonucleotide
ccauccccuuuaaugcaua

SEQ ID NO: 862046 - RNA, 19 nt, Artificial Sequence
  Description of Artificial Sequence: Synthetic oligonucleotide
cugccccggaaaugcuacu

SEQ ID NO: 862047 - RNA, 19 nt, Artificial Sequence
  Description of Artificial Sequence: Synthetic oligonucleotide
ggguagcaagcauguggau

SEQ ID NO: 862048 - RNA, 19 nt, Artificial Sequence
  Description of Artificial Sequence: Synthetic oligonucleotide
cugcguauuucugcucauu

SEQ ID NO: 862049 - RNA, 19 nt, Artificial Sequence
  Description of Artificial Sequence: Synthetic oligonucleotide
ggcugccccggaaaugcua

SEQ ID NO: 862050 - RNA, 19 nt, Artificial Sequence
  Description of Artificial Sequence: Synthetic oligonucleotide
cuaugcucuuggggucccu

SEQ ID NO: 862051 - RNA, 19 nt, Artificial Sequence
  Description of Artificial Sequence: Synthetic oligonucleotide
cguuccaaacugccuuaua

SEQ ID NO: 862052 - RNA, 19 nt, Artificial Sequence
  Description of Artificial Sequence: Synthetic oligonucleotide
cgaagagagauugggccau

SEQ ID NO: 862053 - RNA, 19 nt, Artificial Sequence
  Description of Artificial Sequence: Synthetic oligonucleotide
gccucugcgaagagagauu

SEQ ID NO: 862054 - RNA, 19 nt, Artificial Sequence
  Description of Artificial Sequence: Synthetic oligonucleotide
gggccgucguacacagacu

SEQ ID NO: 862055 - RNA, 19 nt, Artificial Sequence
  Description of Artificial Sequence: Synthetic oligonucleotide
gcccgccagugcagggagu

SEQ ID NO: 862056 - RNA, 19 nt, Artificial Sequence
  Description of Artificial Sequence: Synthetic oligonucleotide
auaacugcaauguagauga

SEQ ID NO: 862057 - RNA, 19 nt, Artificial Sequence
  Description of Artificial Sequence: Synthetic oligonucleotide
ugauccaccacccagaacu

SEQ ID NO: 862058 - RNA, 19 nt, Artificial Sequence
  Description of Artificial Sequence: Synthetic oligonucleotide
ugaaguagcucccagacca

SEQ ID NO: 862059 - RNA, 19 nt, Artificial Sequence
  Description of Artificial Sequence: Synthetic oligonucleotide
aagauuauggcuguauagg

SEQ ID NO: 862060 - RNA, 19 nt, Artificial Sequence
  Description of Artificial Sequence: Synthetic oligonucleotide
ugcggugucaagauuaugg

SEQ ID NO: 862061 - RNA, 19 nt, Artificial Sequence
  Description of Artificial Sequence: Synthetic oligonucleotide
uuuacuuaucauaaucuug

SEQ ID NO: 862062 - RNA, 19 nt, Artificial Sequence
  Description of Artificial Sequence: Synthetic oligonucleotide
acuuaucauaaucuuggcc

SEQ ID NO: 862063 - RNA, 19 nt, Artificial Sequence
  Description of Artificial Sequence: Synthetic oligonucleotide
aaaaccgggacccagaguu

SEQ ID NO: 862064 - RNA, 19 nt, Artificial Sequence
  Description of Artificial Sequence: Synthetic oligonucleotide
aaccuuuacaccucgagga

SEQ ID NO: 862065 - RNA, 19 nt, Artificial Sequence
  Description of Artificial Sequence: Synthetic oligonucleotide
uuaggcuucauauugccug

SEQ ID NO: 862066 - RNA, 19 nt, Artificial Sequence
  Description of Artificial Sequence: Synthetic oligonucleotide
aaggacgcgauguccaggc

SEQ ID NO: 862067 - RNA, 19 nt, Artificial Sequence
  Description of Artificial Sequence: Synthetic oligonucleotide
agauuauggcuguauaggg

SEQ ID NO: 862068 - RNA, 19 nt, Artificial Sequence
  Description of Artificial Sequence: Synthetic oligonucleotide
uguagcgggugucaaacgg

SEQ ID NO: 862069 - RNA, 19 nt, Artificial Sequence
  Description of Artificial Sequence: Synthetic oligonucleotide
uuugacgccucguucauag

SEQ ID NO: 862070 - RNA, 19 nt, Artificial Sequence
  Description of Artificial Sequence: Synthetic oligonucleotide
uucccauagaaacagcuga

SEQ ID NO: 862071 - RNA, 19 nt, Artificial Sequence
  Description of Artificial Sequence: Synthetic oligonucleotide
ugugaaguagcucccagac

SEQ ID NO: 862072 - RNA, 19 nt, Artificial Sequence
  Description of Artificial Sequence: Synthetic oligonucleotide
gaaccuuuacaccucgagg

SEQ ID NO: 862073 - RNA, 19 nt, Artificial Sequence
  Description of Artificial Sequence: Synthetic oligonucleotide
uguauagggaauuccaguc

SEQ ID NO: 862074 - RNA, 19 nt, Artificial Sequence
  Description of Artificial Sequence: Synthetic oligonucleotide
ucugcuaggucuacagggg

SEQ ID NO: 862075 - RNA, 19 nt, Artificial Sequence
  Description of Artificial Sequence: Synthetic oligonucleotide
cucugcuaggucuacaggg

SEQ ID NO: 862076 - RNA, 19 nt, Artificial Sequence
  Description of Artificial Sequence: Synthetic oligonucleotide
caauguagaugaaacuccg

SEQ ID NO: 862077 - RNA, 19 nt, Artificial Sequence
  Description of Artificial Sequence: Synthetic oligonucleotide
cuuuacaccucgaggagcc

SEQ ID NO: 862078 - RNA, 19 nt, Artificial Sequence
  Description of Artificial Sequence: Synthetic oligonucleotide
caguuuaggcuucauauug

SEQ ID NO: 862079 - RNA, 19 nt, Artificial Sequence
  Description of Artificial Sequence: Synthetic oligonucleotide
gauucgaaccuuuacaccu

SEQ ID NO: 862080 - RNA, 19 nt, Artificial Sequence
  Description of Artificial Sequence: Synthetic oligonucleotide
augcaaauccccguauucc

SEQ ID NO: 862081 - RNA, 19 nt, Artificial Sequence
  Description of Artificial Sequence: Synthetic oligonucleotide
acuacuuuggggccugauc

SEQ ID NO: 862082 - RNA, 19 nt, Artificial Sequence
  Description of Artificial Sequence: Synthetic oligonucleotide
guuaccagcagggaggugc

SEQ ID NO: 862083 - RNA, 19 nt, Artificial Sequence
  Description of Artificial Sequence: Synthetic oligonucleotide
ugcaaauccccguauuccc

SEQ ID NO: 862084 - RNA, 19 nt, Artificial Sequence
  Description of Artificial Sequence: Synthetic oligonucleotide
aauccccguauucccauag

SEQ ID NO: 862085 - RNA, 19 nt, Artificial Sequence
  Description of Artificial Sequence: Synthetic oligonucleotide
auuuacuuaucauaaucuu

SEQ ID NO: 862086 - RNA, 19 nt, Artificial Sequence
  Description of Artificial Sequence: Synthetic oligonucleotide
ucgauuucauucacgggca

SEQ ID NO: 862087 - RNA, 19 nt, Artificial Sequence
  Description of Artificial Sequence: Synthetic oligonucleotide
uucauaggcagcccgucgc

SEQ ID NO: 862088 - RNA, 19 nt, Artificial Sequence
  Description of Artificial Sequence: Synthetic oligonucleotide
aguuuaggcuucauauugc

SEQ ID NO: 862089 - RNA, 19 nt, Artificial Sequence
  Description of Artificial Sequence: Synthetic oligonucleotide
agcgauucgaaccuuuaca

SEQ ID NO: 862090 - RNA, 19 nt, Artificial Sequence
  Description of Artificial Sequence: Synthetic oligonucleotide
auagaaacagcugagucau

SEQ ID NO: 862091 - RNA, 19 nt, Artificial Sequence
  Description of Artificial Sequence: Synthetic oligonucleotide
gucucuugauuguagcggg

SEQ ID NO: 862092 - RNA, 19 nt, Artificial Sequence
  Description of Artificial Sequence: Synthetic oligonucleotide
uucacacgggcauagggga

SEQ ID NO: 862093 - RNA, 19 nt, Artificial Sequence
  Description of Artificial Sequence: Synthetic oligonucleotide
uucacgggcaguucucccg

SEQ ID NO: 862094 - RNA, 19 nt, Artificial Sequence
  Description of Artificial Sequence: Synthetic oligonucleotide
uaggcuucauauugccugg

SEQ ID NO: 862095 - RNA, 19 nt, Artificial Sequence
  Description of Artificial Sequence: Synthetic oligonucleotide
uucgcaggggucauagcag

SEQ ID NO: 862096 - RNA, 19 nt, Artificial Sequence
  Description of Artificial Sequence: Synthetic oligonucleotide
gagcaagcgcacuuugacg

SEQ ID NO: 862097 - RNA, 19 nt, Artificial Sequence
  Description of Artificial Sequence: Synthetic oligonucleotide
auaaucuuggccccuuaga

SEQ ID NO: 862098 - RNA, 19 nt, Artificial Sequence
  Description of Artificial Sequence: Synthetic oligonucleotide
agguugaaggaauggagcu

SEQ ID NO: 862099 - RNA, 19 nt, Artificial Sequence
  Description of Artificial Sequence: Synthetic oligonucleotide
uuggagguuccaauguaca

SEQ ID NO: 862100 - RNA, 19 nt, Artificial Sequence
  Description of Artificial Sequence: Synthetic oligonucleotide
uuuaggcuucauauugccu

SEQ ID NO: 862101 - RNA, 19 nt, Artificial Sequence
  Description of Artificial Sequence: Synthetic oligonucleotide
gagacugcggagccgaggc

SEQ ID NO: 862102 - RNA, 19 nt, Artificial Sequence
  Description of Artificial Sequence: Synthetic oligonucleotide
guucacacgggcauagggg

SEQ ID NO: 862103 - RNA, 19 nt, Artificial Sequence
  Description of Artificial Sequence: Synthetic oligonucleotide
ucuugauuguagcgggugu

SEQ ID NO: 862104 - RNA, 19 nt, Artificial Sequence
  Description of Artificial Sequence: Synthetic oligonucleotide
gaaccaguaggccucaaaa

SEQ ID NO: 862105 - RNA, 19 nt, Artificial Sequence
  Description of Artificial Sequence: Synthetic oligonucleotide
uguaggaccccguggguca

SEQ ID NO: 862106 - RNA, 19 nt, Artificial Sequence
  Description of Artificial Sequence: Synthetic oligonucleotide
guugucacgaagagcagcc

SEQ ID NO: 862107 - RNA, 19 nt, Artificial Sequence
  Description of Artificial Sequence: Synthetic oligonucleotide
agguccguuagguuugcuc

SEQ ID NO: 862108 - RNA, 19 nt, Artificial Sequence
  Description of Artificial Sequence: Synthetic oligonucleotide
agcucugcuaggucuacag

SEQ ID NO: 862109 - RNA, 19 nt, Artificial Sequence
  Description of Artificial Sequence: Synthetic oligonucleotide
ugggccaaagguccgggcc

SEQ ID NO: 862110 - RNA, 19 nt, Artificial Sequence
  Description of Artificial Sequence: Synthetic oligonucleotide
aacuccagaccuucgggaa

SEQ ID NO: 862111 - RNA, 19 nt, Artificial Sequence
  Description of Artificial Sequence: Synthetic oligonucleotide
uucauauugccuggcagcu

SEQ ID NO: 862112 - RNA, 19 nt, Artificial Sequence
  Description of Artificial Sequence: Synthetic oligonucleotide
uugggcgggaccucaaagc

SEQ ID NO: 862113 - RNA, 19 nt, Artificial Sequence
  Description of Artificial Sequence: Synthetic oligonucleotide
uugcgugugggugucauug

SEQ ID NO: 862114 - RNA, 19 nt, Artificial Sequence
  Description of Artificial Sequence: Synthetic oligonucleotide
ugggacacagugguggcgg

SEQ ID NO: 862115 - RNA, 19 nt, Artificial Sequence
  Description of Artificial Sequence: Synthetic oligonucleotide
auaggcagcccgucgcaac

SEQ ID NO: 862116 - RNA, 19 nt, Artificial Sequence
  Description of Artificial Sequence: Synthetic oligonucleotide
auugggcgggaccucaaag

SEQ ID NO: 862117 - RNA, 19 nt, Artificial Sequence
  Description of Artificial Sequence: Synthetic oligonucleotide
ugggcgggaccucaaagca

SEQ ID NO: 862118 - RNA, 19 nt, Artificial Sequence
  Description of Artificial Sequence: Synthetic oligonucleotide
ucgcaggggucauagcagg

SEQ ID NO: 862119 - RNA, 19 nt, Artificial Sequence
  Description of Artificial Sequence: Synthetic oligonucleotide
accuuuacaccucgaggag

SEQ ID NO: 862120 - RNA, 19 nt, Artificial Sequence
  Description of Artificial Sequence: Synthetic oligonucleotide
ucgcaacccgucaucaaug

SEQ ID NO: 862121 - RNA, 19 nt, Artificial Sequence
  Description of Artificial Sequence: Synthetic oligonucleotide
gauuauggcuguauaggga

SEQ ID NO: 862122 - RNA, 19 nt, Artificial Sequence
  Description of Artificial Sequence: Synthetic oligonucleotide
uccaguagaaggacgcgau

SEQ ID NO: 862123 - RNA, 19 nt, Artificial Sequence
  Description of Artificial Sequence: Synthetic oligonucleotide
uagcgggugucaaacggcc

SEQ ID NO: 862124 - RNA, 19 nt, Artificial Sequence
  Description of Artificial Sequence: Synthetic oligonucleotide
aacggccgcggccagguug

SEQ ID NO: 862125 - RNA, 19 nt, Artificial Sequence
  Description of Artificial Sequence: Synthetic oligonucleotide
ugcaguuguacaugacgac

SEQ ID NO: 862126 - RNA, 19 nt, Artificial Sequence
  Description of Artificial Sequence: Synthetic oligonucleotide
uggagguuccaauguacac

SEQ ID NO: 862127 - RNA, 19 nt, Artificial Sequence
  Description of Artificial Sequence: Synthetic oligonucleotide
ugggguacggccacuggga

SEQ ID NO: 862128 - RNA, 19 nt, Artificial Sequence
  Description of Artificial Sequence: Synthetic oligonucleotide
uuguagcgggugucaaacg

SEQ ID NO: 862129 - RNA, 19 nt, Artificial Sequence
  Description of Artificial Sequence: Synthetic oligonucleotide
ucaucaauggcuggccaga

SEQ ID NO: 862130 - RNA, 19 nt, Artificial Sequence
  Description of Artificial Sequence: Synthetic oligonucleotide
ugucaaacggccgcggcca

SEQ ID NO: 862131 - RNA, 19 nt, Artificial Sequence
  Description of Artificial Sequence: Synthetic oligonucleotide
gcaauguagaugaaacucc

SEQ ID NO: 862132 - RNA, 19 nt, Artificial Sequence
  Description of Artificial Sequence: Synthetic oligonucleotide
aaacuccgggcacugucca

SEQ ID NO: 862133 - RNA, 19 nt, Artificial Sequence
  Description of Artificial Sequence: Synthetic oligonucleotide
gcgcacagaagacagaggc

SEQ ID NO: 862134 - RNA, 19 nt, Artificial Sequence
  Description of Artificial Sequence: Synthetic oligonucleotide
gaaacuccgggcacugucc

SEQ ID NO: 862135 - RNA, 19 nt, Artificial Sequence
  Description of Artificial Sequence: Synthetic oligonucleotide
caccacgcugagcagagcc

SEQ ID NO: 862136 - RNA, 19 nt, Artificial Sequence
  Description of Artificial Sequence: Synthetic oligonucleotide
cagaccuucgggaaugcuc

SEQ ID NO: 862137 - RNA, 19 nt, Artificial Sequence
  Description of Artificial Sequence: Synthetic oligonucleotide
cuucgcaggggucauagca

SEQ ID NO: 862138 - RNA, 19 nt, Artificial Sequence
  Description of Artificial Sequence: Synthetic oligonucleotide
uccccguauucccauagaa

SEQ ID NO: 862139 - RNA, 19 nt, Artificial Sequence
  Description of Artificial Sequence: Synthetic oligonucleotide
gaaccugcguggaugggag

SEQ ID NO: 862140 - RNA, 19 nt, Artificial Sequence
  Description of Artificial Sequence: Synthetic oligonucleotide
aagcaggcgacaggcauug

SEQ ID NO: 862141 - RNA, 19 nt, Artificial Sequence
  Description of Artificial Sequence: Synthetic oligonucleotide
cugggguacggccacuggg

SEQ ID NO: 862142 - RNA, 19 nt, Artificial Sequence
  Description of Artificial Sequence: Synthetic oligonucleotide
uuacaccucgaggagccag

SEQ ID NO: 862143 - RNA, 19 nt, Artificial Sequence
  Description of Artificial Sequence: Synthetic oligonucleotide
ucacgggcaguucucccgc

SEQ ID NO: 862144 - RNA, 19 nt, Artificial Sequence
  Description of Artificial Sequence: Synthetic oligonucleotide
ugauccuccccuagcucug

SEQ ID NO: 862145 - RNA, 19 nt, Artificial Sequence
  Description of Artificial Sequence: Synthetic oligonucleotide
ugcgcaagccaucgugccc

SEQ ID NO: 862146 - RNA, 19 nt, Artificial Sequence
  Description of Artificial Sequence: Synthetic oligonucleotide
gaccccgugggucagcuuc

SEQ ID NO: 862147 - RNA, 19 nt, Artificial Sequence
  Description of Artificial Sequence: Synthetic oligonucleotide
agaccuucgggaaugcucu

SEQ ID NO: 862148 - RNA, 19 nt, Artificial Sequence
  Description of Artificial Sequence: Synthetic oligonucleotide
gccgcggccagguugaagg

SEQ ID NO: 862149 - RNA, 19 nt, Artificial Sequence
  Description of Artificial Sequence: Synthetic oligonucleotide
accuucgggaaugcucucc

SEQ ID NO: 862150 - RNA, 19 nt, Artificial Sequence
  Description of Artificial Sequence: Synthetic oligonucleotide
gcgauucgaaccuuuacac

SEQ ID NO: 862151 - RNA, 19 nt, Artificial Sequence
  Description of Artificial Sequence: Synthetic oligonucleotide
agcgccaguccauguuggc

SEQ ID NO: 862152 - RNA, 19 nt, Artificial Sequence
  Description of Artificial Sequence: Synthetic oligonucleotide
gguccguuagguuugcuca

SEQ ID NO: 862153 - RNA, 19 nt, Artificial Sequence
  Description of Artificial Sequence: Synthetic oligonucleotide
uacaccucgaggagccaga

SEQ ID NO: 862154 - RNA, 19 nt, Artificial Sequence
  Description of Artificial Sequence: Synthetic oligonucleotide
cacucuguagcagggacug

SEQ ID NO: 862155 - RNA, 19 nt, Artificial Sequence
  Description of Artificial Sequence: Synthetic oligonucleotide
gacgagcaagcgcacuuug

SEQ ID NO: 862156 - RNA, 19 nt, Artificial Sequence
  Description of Artificial Sequence: Synthetic oligonucleotide
ucuccgcugccuuccaggc

SEQ ID NO: 862157 - RNA, 19 nt, Artificial Sequence
  Description of Artificial Sequence: Synthetic oligonucleotide
ggagaaucucuucacccug

SEQ ID NO: 862158 - RNA, 19 nt, Artificial Sequence
  Description of Artificial Sequence: Synthetic oligonucleotide
aagccaucgugcccauucu

SEQ ID NO: 862159 - RNA, 19 nt, Artificial Sequence
  Description of Artificial Sequence: Synthetic oligonucleotide
cagaacuugguguguagga

SEQ ID NO: 862160 - RNA, 19 nt, Artificial Sequence
  Description of Artificial Sequence: Synthetic oligonucleotide
ucucuugauuguagcgggu

SEQ ID NO: 862161 - RNA, 19 nt, Artificial Sequence
  Description of Artificial Sequence: Synthetic oligonucleotide
uuauggcuguauagggaau

SEQ ID NO: 862162 - RNA, 19 nt, Artificial Sequence
  Description of Artificial Sequence: Synthetic oligonucleotide
uguguaggaccccgugggu

SEQ ID NO: 862163 - RNA, 19 nt, Artificial Sequence
  Description of Artificial Sequence: Synthetic oligonucleotide
ugguugucacgaagagcag

SEQ ID NO: 862164 - RNA, 19 nt, Artificial Sequence
  Description of Artificial Sequence: Synthetic oligonucleotide
cuugauuguagcggguguc

SEQ ID NO: 862165 - RNA, 19 nt, Artificial Sequence
  Description of Artificial Sequence: Synthetic oligonucleotide
uuggucaggucucgagcga

SEQ ID NO: 862166 - RNA, 19 nt, Artificial Sequence
  Description of Artificial Sequence: Synthetic oligonucleotide
uggcggugcacucgccagg

SEQ ID NO: 862167 - RNA, 19 nt, Artificial Sequence
  Description of Artificial Sequence: Synthetic oligonucleotide
ugcccacgcugucagcugc

SEQ ID NO: 862168 - RNA, 19 nt, Artificial Sequence
  Description of Artificial Sequence: Synthetic oligonucleotide
uaucauaaucuuggccccu

SEQ ID NO: 862169 - RNA, 19 nt, Artificial Sequence
  Description of Artificial Sequence: Synthetic oligonucleotide
aaagguccgggcccagcau

SEQ ID NO: 862170 - RNA, 19 nt, Artificial Sequence
  Description of Artificial Sequence: Synthetic oligonucleotide
cauaggggauucgagccug

SEQ ID NO: 862171 - RNA, 19 nt, Artificial Sequence
  Description of Artificial Sequence: Synthetic oligonucleotide
gacccagcgggcuuucuuc

SEQ ID NO: 862172 - RNA, 19 nt, Artificial Sequence
  Description of Artificial Sequence: Synthetic oligonucleotide
agcacggcuucgcaggggu

SEQ ID NO: 862173 - RNA, 19 nt, Artificial Sequence
  Description of Artificial Sequence: Synthetic oligonucleotide
uggucaggucucgagcgag

SEQ ID NO: 862174 - RNA, 19 nt, Artificial Sequence
  Description of Artificial Sequence: Synthetic oligonucleotide
cacagcacgcucagucacc

SEQ ID NO: 862175 - RNA, 19 nt, Artificial Sequence
  Description of Artificial Sequence: Synthetic oligonucleotide
aaggaccgcauggauggcu

SEQ ID NO: 862176 - RNA, 19 nt, Artificial Sequence
  Description of Artificial Sequence: Synthetic oligonucleotide
agaugaaacuccgggcacu

SEQ ID NO: 862177 - RNA, 19 nt, Artificial Sequence
  Description of Artificial Sequence: Synthetic oligonucleotide
uugacgccucguucauagg

SEQ ID NO: 862178 - RNA, 19 nt, Artificial Sequence
  Description of Artificial Sequence: Synthetic oligonucleotide
gggaccucaaagcaggcga

SEQ ID NO: 862179 - RNA, 19 nt, Artificial Sequence
  Description of Artificial Sequence: Synthetic oligonucleotide
acgccucguucauaggcag

SEQ ID NO: 862180 - RNA, 19 nt, Artificial Sequence
  Description of Artificial Sequence: Synthetic oligonucleotide
cugcgcaagccaucgugcc

SEQ ID NO: 862181 - RNA, 19 nt, Artificial Sequence
  Description of Artificial Sequence: Synthetic oligonucleotide
guagcgggugucaaacggc

SEQ ID NO: 862182 - RNA, 19 nt, Artificial Sequence
  Description of Artificial Sequence: Synthetic oligonucleotide
aucgugcccauucuguguu

SEQ ID NO: 862183 - RNA, 19 nt, Artificial Sequence
  Description of Artificial Sequence: Synthetic oligonucleotide
uucucccgcaggcuccuca

SEQ ID NO: 862184 - RNA, 19 nt, Artificial Sequence
  Description of Artificial Sequence: Synthetic oligonucleotide
guauagggaauuccagucu

SEQ ID NO: 862185 - RNA, 19 nt, Artificial Sequence
  Description of Artificial Sequence: Synthetic oligonucleotide
cagaccaguuggagguucc

SEQ ID NO: 862186 - RNA, 19 nt, Artificial Sequence
  Description of Artificial Sequence: Synthetic oligonucleotide
uugcucgugguggcguugg

SEQ ID NO: 862187 - RNA, 19 nt, Artificial Sequence
  Description of Artificial Sequence: Synthetic oligonucleotide
gcggugucaagauuauggc

SEQ ID NO: 862188 - RNA, 19 nt, Artificial Sequence
  Description of Artificial Sequence: Synthetic oligonucleotide
gguaaaagugggucugauc

SEQ ID NO: 862189 - RNA, 19 nt, Artificial Sequence
  Description of Artificial Sequence: Synthetic oligonucleotide
ggcgggaccucaaagcagg

SEQ ID NO: 862190 - RNA, 19 nt, Artificial Sequence
  Description of Artificial Sequence: Synthetic oligonucleotide
uccagcuggcugcgcaagc

SEQ ID NO: 862191 - RNA, 19 nt, Artificial Sequence
  Description of Artificial Sequence: Synthetic oligonucleotide
gaccgcauggauggcucgg

SEQ ID NO: 862192 - RNA, 19 nt, Artificial Sequence
  Description of Artificial Sequence: Synthetic oligonucleotide
aaauccccguauucccaua

SEQ ID NO: 862193 - RNA, 19 nt, Artificial Sequence
  Description of Artificial Sequence: Synthetic oligonucleotide
uccccuagcucugcuaggu

SEQ ID NO: 862194 - RNA, 19 nt, Artificial Sequence
  Description of Artificial Sequence: Synthetic oligonucleotide
uccguuagguuugcucaca

SEQ ID NO: 862195 - RNA, 19 nt, Artificial Sequence
  Description of Artificial Sequence: Synthetic oligonucleotide
ucgaaccuuuacaccucga

SEQ ID NO: 862196 - RNA, 19 nt, Artificial Sequence
  Description of Artificial Sequence: Synthetic oligonucleotide
gagcgccaguccauguugg

SEQ ID NO: 862197 - RNA, 19 nt, Artificial Sequence
  Description of Artificial Sequence: Synthetic oligonucleotide
uaggggauucgagccuggg

SEQ ID NO: 862198 - RNA, 19 nt, Artificial Sequence
  Description of Artificial Sequence: Synthetic oligonucleotide
ccagaaccugcguggaugg

SEQ ID NO: 862199 - RNA, 19 nt, Artificial Sequence
  Description of Artificial Sequence: Synthetic oligonucleotide
cuucaggucugggguacgg

SEQ ID NO: 862200 - RNA, 19 nt, Artificial Sequence
  Description of Artificial Sequence: Synthetic oligonucleotide
aggaccgcauggauggcuc

SEQ ID NO: 862201 - RNA, 19 nt, Artificial Sequence
  Description of Artificial Sequence: Synthetic oligonucleotide
gaagcccaccaccgccagg

SEQ ID NO: 862202 - RNA, 19 nt, Artificial Sequence
  Description of Artificial Sequence: Synthetic oligonucleotide
agccaucgugcccauucug

SEQ ID NO: 862203 - RNA, 19 nt, Artificial Sequence
  Description of Artificial Sequence: Synthetic oligonucleotide
uugguguguaggaccccgu

SEQ ID NO: 862204 - RNA, 19 nt, Artificial Sequence
  Description of Artificial Sequence: Synthetic oligonucleotide
cagccccacuacuuugggg

SEQ ID NO: 862205 - RNA, 19 nt, Artificial Sequence
  Description of Artificial Sequence: Synthetic oligonucleotide
gagccggggugccauugag

SEQ ID NO: 862206 - RNA, 19 nt, Artificial Sequence
  Description of Artificial Sequence: Synthetic oligonucleotide
cucacagcgauucgaaccu

SEQ ID NO: 862207 - RNA, 19 nt, Artificial Sequence
  Description of Artificial Sequence: Synthetic oligonucleotide
gcaggcgacaggcauugcc

SEQ ID NO: 862208 - RNA, 19 nt, Artificial Sequence
  Description of Artificial Sequence: Synthetic oligonucleotide
ccaggccucgauuucauuc

SEQ ID NO: 862209 - RNA, 19 nt, Artificial Sequence
  Description of Artificial Sequence: Synthetic oligonucleotide
ggacgcgauguccaggcug

SEQ ID NO: 862210 - RNA, 19 nt, Artificial Sequence
  Description of Artificial Sequence: Synthetic oligonucleotide
cuccagaccuucgggaaug

SEQ ID NO: 862211 - RNA, 19 nt, Artificial Sequence
  Description of Artificial Sequence: Synthetic oligonucleotide
gugguggcggugcacucgc

SEQ ID NO: 862212 - RNA, 19 nt, Artificial Sequence
  Description of Artificial Sequence: Synthetic oligonucleotide
agcugcggugucaagauua

SEQ ID NO: 862213 - RNA, 19 nt, Artificial Sequence
  Description of Artificial Sequence: Synthetic oligonucleotide
guccguuagguuugcucac

SEQ ID NO: 862214 - RNA, 19 nt, Artificial Sequence
  Description of Artificial Sequence: Synthetic oligonucleotide
ucacacgggcauaggggau

SEQ ID NO: 862215 - RNA, 19 nt, Artificial Sequence
  Description of Artificial Sequence: Synthetic oligonucleotide
ggggauucgagccugggcu

SEQ ID NO: 862216 - RNA, 19 nt, Artificial Sequence
  Description of Artificial Sequence: Synthetic oligonucleotide
ugguucacacgggcauagg

SEQ ID NO: 862217 - RNA, 19 nt, Artificial Sequence
  Description of Artificial Sequence: Synthetic oligonucleotide
ggguccaguagaaggacgc

SEQ ID NO: 862218 - RNA, 19 nt, Artificial Sequence
  Description of Artificial Sequence: Synthetic oligonucleotide
uacggccacugggacacag

SEQ ID NO: 862219 - RNA, 19 nt, Artificial Sequence
  Description of Artificial Sequence: Synthetic oligonucleotide
aagcgcacuuugacgccuc

SEQ ID NO: 862220 - RNA, 19 nt, Artificial Sequence
  Description of Artificial Sequence: Synthetic oligonucleotide
ucgccagguaggccagagc

SEQ ID NO: 862221 - RNA, 19 nt, Artificial Sequence
  Description of Artificial Sequence: Synthetic oligonucleotide
uggcuaguggagggguugc

SEQ ID NO: 862222 - RNA, 19 nt, Artificial Sequence
  Description of Artificial Sequence: Synthetic oligonucleotide
acacgggcauaggggauuc

SEQ ID NO: 862223 - RNA, 19 nt, Artificial Sequence
  Description of Artificial Sequence: Synthetic oligonucleotide
cgauucgaaccuuuacacc

SEQ ID NO: 862224 - RNA, 19 nt, Artificial Sequence
  Description of Artificial Sequence: Synthetic oligonucleotide
ucuugcgugugggugucau

SEQ ID NO: 862225 - RNA, 19 nt, Artificial Sequence
  Description of Artificial Sequence: Synthetic oligonucleotide
ccagaacuugguguguagg

SEQ ID NO: 862226 - RNA, 19 nt, Artificial Sequence
  Description of Artificial Sequence: Synthetic oligonucleotide
acgggcauaggggauucga

SEQ ID NO: 862227 - RNA, 19 nt, Artificial Sequence
  Description of Artificial Sequence: Synthetic oligonucleotide
guccaguagaaggacgcga

SEQ ID NO: 862228 - RNA, 19 nt, Artificial Sequence
  Description of Artificial Sequence: Synthetic oligonucleotide
gcgggugucaaacggccgc

SEQ ID NO: 862229 - RNA, 19 nt, Artificial Sequence
  Description of Artificial Sequence: Synthetic oligonucleotide
ccagguaaaagugggucug

SEQ ID NO: 862230 - RNA, 19 nt, Artificial Sequence
  Description of Artificial Sequence: Synthetic oligonucleotide
gcccauucuguguuaccag

SEQ ID NO: 862231 - RNA, 19 nt, Artificial Sequence
  Description of Artificial Sequence: Synthetic oligonucleotide
gguccaguagaaggacgcg

SEQ ID NO: 862232 - RNA, 19 nt, Artificial Sequence
  Description of Artificial Sequence: Synthetic oligonucleotide
agguuccaauguacacagc

SEQ ID NO: 862233 - RNA, 19 nt, Artificial Sequence
  Description of Artificial Sequence: Synthetic oligonucleotide
auccccguauucccauaga

SEQ ID NO: 862234 - RNA, 19 nt, Artificial Sequence
  Description of Artificial Sequence: Synthetic oligonucleotide
auaggggauucgagccugg

SEQ ID NO: 862235 - RNA, 19 nt, Artificial Sequence
  Description of Artificial Sequence: Synthetic oligonucleotide
gguccaaauagaugcaaau

SEQ ID NO: 862236 - RNA, 19 nt, Artificial Sequence
  Description of Artificial Sequence: Synthetic oligonucleotide
gcguggaugggagaacucc

SEQ ID NO: 862237 - RNA, 19 nt, Artificial Sequence
  Description of Artificial Sequence: Synthetic oligonucleotide
gugcccauucuguguuacc

SEQ ID NO: 862238 - RNA, 19 nt, Artificial Sequence
  Description of Artificial Sequence: Synthetic oligonucleotide
ccuuuacaccucgaggagc

SEQ ID NO: 862239 - RNA, 19 nt, Artificial Sequence
  Description of Artificial Sequence: Synthetic oligonucleotide
ucgcugguuggguccaaau

SEQ ID NO: 862240 - RNA, 19 nt, Artificial Sequence
  Description of Artificial Sequence: Synthetic oligonucleotide
accugcguggaugggagaa

SEQ ID NO: 862241 - RNA, 19 nt, Artificial Sequence
  Description of Artificial Sequence: Synthetic oligonucleotide
caguagaaggacgcgaugu

SEQ ID NO: 862242 - RNA, 19 nt, Artificial Sequence
  Description of Artificial Sequence: Synthetic oligonucleotide
aucauaaucuuggccccuu

SEQ ID NO: 862243 - RNA, 19 nt, Artificial Sequence
  Description of Artificial Sequence: Synthetic oligonucleotide
agcgggugucaaacggccg

SEQ ID NO: 862244 - RNA, 19 nt, Artificial Sequence
  Description of Artificial Sequence: Synthetic oligonucleotide
gauccuccccuagcucugc

SEQ ID NO: 862245 - RNA, 19 nt, Artificial Sequence
  Description of Artificial Sequence: Synthetic oligonucleotide
gucgcaacccgucaucaau

SEQ ID NO: 862246 - RNA, 19 nt, Artificial Sequence
  Description of Artificial Sequence: Synthetic oligonucleotide
cucgccagguaggccagag

SEQ ID NO: 862247 - RNA, 19 nt, Artificial Sequence
  Description of Artificial Sequence: Synthetic oligonucleotide
ugacgagcaagcgcacuuu

SEQ ID NO: 862248 - RNA, 19 nt, Artificial Sequence
  Description of Artificial Sequence: Synthetic oligonucleotide
gcaagcgcacuuugacgcc

SEQ ID NO: 862249 - RNA, 19 nt, Artificial Sequence
  Description of Artificial Sequence: Synthetic oligonucleotide
gcgacaggcauugcccacg

SEQ ID NO: 862250 - RNA, 19 nt, Artificial Sequence
  Description of Artificial Sequence: Synthetic oligonucleotide
gcacuuugacgccucguuc

SEQ ID NO: 862251 - RNA, 19 nt, Artificial Sequence
  Description of Artificial Sequence: Synthetic oligonucleotide
uucccgccuggccuaggaa

SEQ ID NO: 862252 - RNA, 19 nt, Artificial Sequence
  Description of Artificial Sequence: Synthetic oligonucleotide
acgcugucagcugcggugu

SEQ ID NO: 862253 - RNA, 19 nt, Artificial Sequence
  Description of Artificial Sequence: Synthetic oligonucleotide
gugggccaaagguccgggc

SEQ ID NO: 862254 - RNA, 19 nt, Artificial Sequence
  Description of Artificial Sequence: Synthetic oligonucleotide
ccaucgugcccauucugug

SEQ ID NO: 862255 - RNA, 19 nt, Artificial Sequence
  Description of Artificial Sequence: Synthetic oligonucleotide
ggugaggguccaguagaag

SEQ ID NO: 862256 - RNA, 19 nt, Artificial Sequence
  Description of Artificial Sequence: Synthetic oligonucleotide
ggaccgcauggauggcucg

SEQ ID NO: 862257 - RNA, 19 nt, Artificial Sequence
  Description of Artificial Sequence: Synthetic oligonucleotide
gcugcgcaagccaucgugc

SEQ ID NO: 862258 - RNA, 19 nt, Artificial Sequence
  Description of Artificial Sequence: Synthetic oligonucleotide
cugaggcgcacagaagaca

SEQ ID NO: 862259 - RNA, 19 nt, Artificial Sequence
  Description of Artificial Sequence: Synthetic oligonucleotide
gucaaacggccgcggccag

SEQ ID NO: 862260 - RNA, 19 nt, Artificial Sequence
  Description of Artificial Sequence: Synthetic oligonucleotide
cuccgcugccuuccaggcc

SEQ ID NO: 862261 - RNA, 19 nt, Artificial Sequence
  Description of Artificial Sequence: Synthetic oligonucleotide
agcccgucgcaacccguca

SEQ ID NO: 862262 - RNA, 19 nt, Artificial Sequence
  Description of Artificial Sequence: Synthetic oligonucleotide
ccguauucccauagaaaca

SEQ ID NO: 862263 - RNA, 19 nt, Artificial Sequence
  Description of Artificial Sequence: Synthetic oligonucleotide
ugucaagauuauggcugua

SEQ ID NO: 862264 - RNA, 19 nt, Artificial Sequence
  Description of Artificial Sequence: Synthetic oligonucleotide
gaccaguuggagguuccaa

SEQ ID NO: 862265 - RNA, 19 nt, Artificial Sequence
  Description of Artificial Sequence: Synthetic oligonucleotide
gcccagguaaaaguggguc

SEQ ID NO: 862266 - RNA, 19 nt, Artificial Sequence
  Description of Artificial Sequence: Synthetic oligonucleotide
cccgucaucaauggcuggc

SEQ ID NO: 862267 - RNA, 19 nt, Artificial Sequence
  Description of Artificial Sequence: Synthetic oligonucleotide
ggugggccaaagguccggg

SEQ ID NO: 862268 - RNA, 19 nt, Artificial Sequence
  Description of Artificial Sequence: Synthetic oligonucleotide
ggcguuggggaacuccaga

SEQ ID NO: 862269 - RNA, 19 nt, Artificial Sequence
  Description of Artificial Sequence: Synthetic oligonucleotide
cagcccgucgcaacccguc

SEQ ID NO: 862270 - RNA, 19 nt, Artificial Sequence
  Description of Artificial Sequence: Synthetic oligonucleotide
guugcucgugguggcguug

SEQ ID NO: 862271 - RNA, 19 nt, Artificial Sequence
  Description of Artificial Sequence: Synthetic oligonucleotide
caucgugcccauucugugu

SEQ ID NO: 862272 - RNA, 19 nt, Artificial Sequence
  Description of Artificial Sequence: Synthetic oligonucleotide
cacggcuucgcagggguca

SEQ ID NO: 862273 - RNA, 19 nt, Artificial Sequence
  Description of Artificial Sequence: Synthetic oligonucleotide
cauugaggcagaucuccau

SEQ ID NO: 862274 - RNA, 19 nt, Artificial Sequence
  Description of Artificial Sequence: Synthetic oligonucleotide
gaccuucgggaaugcucuc

SEQ ID NO: 862275 - RNA, 19 nt, Artificial Sequence
  Description of Artificial Sequence: Synthetic oligonucleotide
aggacgcgauguccaggcu

SEQ ID NO: 862276 - RNA, 19 nt, Artificial Sequence
  Description of Artificial Sequence: Synthetic oligonucleotide
ggaaccaguaggccucaaa

SEQ ID NO: 862277 - RNA, 19 nt, Artificial Sequence
  Description of Artificial Sequence: Synthetic oligonucleotide
ggcagcccgucgcaacccg

SEQ ID NO: 862278 - RNA, 19 nt, Artificial Sequence
  Description of Artificial Sequence: Synthetic oligonucleotide
ccaguagaaggacgcgaug

SEQ ID NO: 862279 - RNA, 19 nt, Artificial Sequence
  Description of Artificial Sequence: Synthetic oligonucleotide
gucucgagcgaggcagcug

SEQ ID NO: 862280 - RNA, 19 nt, Artificial Sequence
  Description of Artificial Sequence: Synthetic oligonucleotide
ccgcagggaccacaaacag

SEQ ID NO: 862281 - RNA, 19 nt, Artificial Sequence
  Description of Artificial Sequence: Synthetic oligonucleotide
accgcauggauggcucgga

SEQ ID NO: 862282 - RNA, 19 nt, Artificial Sequence
  Description of Artificial Sequence: Synthetic oligonucleotide
guaggaccccgugggucag

SEQ ID NO: 862283 - RNA, 19 nt, Artificial Sequence
  Description of Artificial Sequence: Synthetic oligonucleotide
gggcucuugcgugugggug

SEQ ID NO: 862284 - RNA, 19 nt, Artificial Sequence
  Description of Artificial Sequence: Synthetic oligonucleotide
agcaggcgacaggcauugc

SEQ ID NO: 862285 - RNA, 19 nt, Artificial Sequence
  Description of Artificial Sequence: Synthetic oligonucleotide
ggaccucaaagcaggcgac

SEQ ID NO: 862286 - RNA, 19 nt, Artificial Sequence
  Description of Artificial Sequence: Synthetic oligonucleotide
uccaggccucgauuucauu

SEQ ID NO: 862287 - RNA, 19 nt, Artificial Sequence
  Description of Artificial Sequence: Synthetic oligonucleotide
cacagugguggcggugcac

SEQ ID NO: 862288 - RNA, 19 nt, Artificial Sequence
  Description of Artificial Sequence: Synthetic oligonucleotide
cagagccggggugccauug

SEQ ID NO: 862289 - RNA, 19 nt, Artificial Sequence
  Description of Artificial Sequence: Synthetic oligonucleotide
gggccugauccuccccuag

SEQ ID NO: 862290 - RNA, 19 nt, Artificial Sequence
  Description of Artificial Sequence: Synthetic oligonucleotide
uccgggcacuguccaccac

SEQ ID NO: 862291 - RNA, 19 nt, Artificial Sequence
  Description of Artificial Sequence: Synthetic oligonucleotide
gggguacggccacugggac

SEQ ID NO: 862292 - RNA, 19 nt, Artificial Sequence
  Description of Artificial Sequence: Synthetic oligonucleotide
augcggaccugggcaccac

SEQ ID NO: 862293 - RNA, 19 nt, Artificial Sequence
  Description of Artificial Sequence: Synthetic oligonucleotide
cugcggugucaagauuaug

SEQ ID NO: 862294 - RNA, 19 nt, Artificial Sequence
  Description of Artificial Sequence: Synthetic oligonucleotide
gccccacuacuuuggggcc

SEQ ID NO: 862295 - RNA, 19 nt, Artificial Sequence
  Description of Artificial Sequence: Synthetic oligonucleotide
ccgucaucaauggcuggcc

SEQ ID NO: 862296 - RNA, 19 nt, Artificial Sequence
  Description of Artificial Sequence: Synthetic oligonucleotide
gggugucaaacggccgcgg

SEQ ID NO: 862297 - RNA, 19 nt, Artificial Sequence
  Description of Artificial Sequence: Synthetic oligonucleotide
ggguccaaauagaugcaaa

SEQ ID NO: 862298 - RNA, 19 nt, Artificial Sequence
  Description of Artificial Sequence: Synthetic oligonucleotide
cagcacggcuucgcagggg

SEQ ID NO: 862299 - RNA, 19 nt, Artificial Sequence
  Description of Artificial Sequence: Synthetic oligonucleotide
gcuaguggagggguugcuc

SEQ ID NO: 862300 - RNA, 19 nt, Artificial Sequence
  Description of Artificial Sequence: Synthetic oligonucleotide
cauugggcgggaccucaaa

SEQ ID NO: 862301 - RNA, 19 nt, Artificial Sequence
  Description of Artificial Sequence: Synthetic oligonucleotide
cgggcauaggggauucgag

SEQ ID NO: 862302 - RNA, 19 nt, Artificial Sequence
  Description of Artificial Sequence: Synthetic oligonucleotide
accgggacccagaguugag

SEQ ID NO: 862303 - RNA, 19 nt, Artificial Sequence
  Description of Artificial Sequence: Synthetic oligonucleotide
cugacgagcaagcgcacuu

SEQ ID NO: 862304 - RNA, 19 nt, Artificial Sequence
  Description of Artificial Sequence: Synthetic oligonucleotide
ucacagcgauucgaaccuu

SEQ ID NO: 862305 - RNA, 19 nt, Artificial Sequence
  Description of Artificial Sequence: Synthetic oligonucleotide
ccgcaggcuccucaacagg

SEQ ID NO: 862306 - RNA, 19 nt, Artificial Sequence
  Description of Artificial Sequence: Synthetic oligonucleotide
ggucagcgagcgccagucc

SEQ ID NO: 862307 - RNA, 19 nt, Artificial Sequence
  Description of Artificial Sequence: Synthetic oligonucleotide
cgagcgccaguccauguug

SEQ ID NO: 862308 - RNA, 19 nt, Artificial Sequence
  Description of Artificial Sequence: Synthetic oligonucleotide
cacgggcauaggggauucg

SEQ ID NO: 862309 - RNA, 19 nt, Artificial Sequence
  Description of Artificial Sequence: Synthetic oligonucleotide
ggguacggccacugggaca

SEQ ID NO: 862310 - RNA, 19 nt, Artificial Sequence
  Description of Artificial Sequence: Synthetic oligonucleotide
gggguugcucgugguggcg

SEQ ID NO: 862311 - RNA, 19 nt, Artificial Sequence
  Description of Artificial Sequence: Synthetic oligonucleotide
ccuucgggaaugcucucca

SEQ ID NO: 862312 - RNA, 19 nt, Artificial Sequence
  Description of Artificial Sequence: Synthetic oligonucleotide
caaaaccgggacccagagu

SEQ ID NO: 862313 - RNA, 19 nt, Artificial Sequence
  Description of Artificial Sequence: Synthetic oligonucleotide
caugcggaccugggcacca

SEQ ID NO: 862314 - RNA, 19 nt, Artificial Sequence
  Description of Artificial Sequence: Synthetic oligonucleotide
cgauuucauucacgggcag

SEQ ID NO: 862315 - RNA, 19 nt, Artificial Sequence
  Description of Artificial Sequence: Synthetic oligonucleotide
aaacggccgcggccagguu

SEQ ID NO: 862316 - RNA, 19 nt, Artificial Sequence
  Description of Artificial Sequence: Synthetic oligonucleotide
cccagguaaaagugggucu

SEQ ID NO: 862317 - RNA, 19 nt, Artificial Sequence
  Description of Artificial Sequence: Synthetic oligonucleotide
cugcguggaugggagaacu

SEQ ID NO: 862318 - RNA, 19 nt, Artificial Sequence
  Description of Artificial Sequence: Synthetic oligonucleotide
guggaugggagaacuccau

SEQ ID NO: 862319 - RNA, 19 nt, Artificial Sequence
  Description of Artificial Sequence: Synthetic oligonucleotide
cucgagcgaggcagcugca

SEQ ID NO: 862320 - RNA, 19 nt, Artificial Sequence
  Description of Artificial Sequence: Synthetic oligonucleotide
cacagcgauucgaaccuuu

SEQ ID NO: 862321 - RNA, 19 nt, Artificial Sequence
  Description of Artificial Sequence: Synthetic oligonucleotide
caagcgcacuuugacgccu

SEQ ID NO: 862322 - RNA, 19 nt, Artificial Sequence
  Description of Artificial Sequence: Synthetic oligonucleotide
cugcauugggcgggaccuc

SEQ ID NO: 862323 - RNA, 19 nt, Artificial Sequence
  Description of Artificial Sequence: Synthetic oligonucleotide
ccgcauggauggcucggag

SEQ ID NO: 862324 - RNA, 19 nt, Artificial Sequence
  Description of Artificial Sequence: Synthetic oligonucleotide
gguugaaggaauggagcuu

SEQ ID NO: 862325 - RNA, 19 nt, Artificial Sequence
  Description of Artificial Sequence: Synthetic oligonucleotide
gcgccaguccauguuggca

SEQ ID NO: 862326 - RNA, 19 nt, Artificial Sequence
  Description of Artificial Sequence: Synthetic oligonucleotide
cgacaggcauugcccacgc

SEQ ID NO: 862327 - RNA, 19 nt, Artificial Sequence
  Description of Artificial Sequence: Synthetic oligonucleotide
cacgggcaguucucccgca

SEQ ID NO: 862328 - RNA, 19 nt, Artificial Sequence
  Description of Artificial Sequence: Synthetic oligonucleotide
cgggaccucaaagcaggcg

SEQ ID NO: 862329 - RNA, 19 nt, Artificial Sequence
  Description of Artificial Sequence: Synthetic oligonucleotide
ccugcguggaugggagaac

SEQ ID NO: 862330 - RNA, 19 nt, Artificial Sequence
  Description of Artificial Sequence: Synthetic oligonucleotide
gcccacgcugucagcugcg

SEQ ID NO: 862331 - RNA, 19 nt, Artificial Sequence
  Description of Artificial Sequence: Synthetic oligonucleotide
cccacuacuuuggggccug

SEQ ID NO: 862332 - RNA, 19 nt, Artificial Sequence
  Description of Artificial Sequence: Synthetic oligonucleotide
cccgugggucagcuucugc

SEQ ID NO: 862333 - RNA, 19 nt, Artificial Sequence
  Description of Artificial Sequence: Synthetic oligonucleotide
cguucauaggcagcccguc

SEQ ID NO: 862334 - RNA, 19 nt, Artificial Sequence
  Description of Artificial Sequence: Synthetic oligonucleotide
gcucuugcguguggguguc

SEQ ID NO: 862335 - RNA, 19 nt, Artificial Sequence
  Description of Artificial Sequence: Synthetic oligonucleotide
cgugcccauucuguguuac

SEQ ID NO: 862336 - RNA, 19 nt, Artificial Sequence
  Description of Artificial Sequence: Synthetic oligonucleotide
ccaugcggaccugggcacc

SEQ ID NO: 862337 - RNA, 19 nt, Artificial Sequence
  Description of Artificial Sequence: Synthetic oligonucleotide
gucgcugguuggguccaaa

SEQ ID NO: 862338 - RNA, 19 nt, Artificial Sequence
  Description of Artificial Sequence: Synthetic oligonucleotide
acucgccagguaggccaga

SEQ ID NO: 862339 - RNA, 19 nt, Artificial Sequence
  Description of Artificial Sequence: Synthetic oligonucleotide
cccacgcugucagcugcgg

SEQ ID NO: 862340 - RNA, 19 nt, Artificial Sequence
  Description of Artificial Sequence: Synthetic oligonucleotide
gcgggcuuucuucuccgcu

SEQ ID NO: 862341 - RNA, 19 nt, Artificial Sequence
  Description of Artificial Sequence: Synthetic oligonucleotide
gggauucgagccugggcuu

SEQ ID NO: 862342 - RNA, 19 nt, Artificial Sequence
  Description of Artificial Sequence: Synthetic oligonucleotide
cacacgggcauaggggauu

SEQ ID NO: 862343 - RNA, 19 nt, Artificial Sequence
  Description of Artificial Sequence: Synthetic oligonucleotide
gcgggaccucaaagcaggc

SEQ ID NO: 862344 - RNA, 19 nt, Artificial Sequence
  Description of Artificial Sequence: Synthetic oligonucleotide
gcaccggcaaggaggccca

SEQ ID NO: 862345 - RNA, 19 nt, Artificial Sequence
  Description of Artificial Sequence: Synthetic oligonucleotide
cuugcgugugggugucauu

SEQ ID NO: 862346 - RNA, 19 nt, Artificial Sequence
  Description of Artificial Sequence: Synthetic oligonucleotide
ccccuagcucugcuagguc

SEQ ID NO: 862347 - RNA, 19 nt, Artificial Sequence
  Description of Artificial Sequence: Synthetic oligonucleotide
ggccgcggccagguugaag

SEQ ID NO: 862348 - RNA, 19 nt, Artificial Sequence
  Description of Artificial Sequence: Synthetic oligonucleotide
ccgucgcaacccgucauca

SEQ ID NO: 862349 - RNA, 19 nt, Artificial Sequence
  Description of Artificial Sequence: Synthetic oligonucleotide
cgcugguuggguccaaaua

SEQ ID NO: 862350 - RNA, 19 nt, Artificial Sequence
  Description of Artificial Sequence: Synthetic oligonucleotide
cucuugcguguggguguca

SEQ ID NO: 862351 - RNA, 19 nt, Artificial Sequence
  Description of Artificial Sequence: Synthetic oligonucleotide
gagguccguuagguuugcu

SEQ ID NO: 862352 - RNA, 19 nt, Artificial Sequence
  Description of Artificial Sequence: Synthetic oligonucleotide
ugguggcguuggggaacuc

SEQ ID NO: 862353 - RNA, 19 nt, Artificial Sequence
  Description of Artificial Sequence: Synthetic oligonucleotide
gcgugugggugucauuguu

SEQ ID NO: 862354 - RNA, 19 nt, Artificial Sequence
  Description of Artificial Sequence: Synthetic oligonucleotide
ggcggugcacucgccaggu

SEQ ID NO: 862355 - RNA, 19 nt, Artificial Sequence
  Description of Artificial Sequence: Synthetic oligonucleotide
gcugcggugucaagauuau

SEQ ID NO: 862356 - RNA, 19 nt, Artificial Sequence
  Description of Artificial Sequence: Synthetic oligonucleotide
ccggggugccauugaggca

SEQ ID NO: 862357 - RNA, 19 nt, Artificial Sequence
  Description of Artificial Sequence: Synthetic oligonucleotide
cgcgauguccaggcugcug

SEQ ID NO: 862358 - RNA, 19 nt, Artificial Sequence
  Description of Artificial Sequence: Synthetic oligonucleotide
gcgagcgccaguccauguu

SEQ ID NO: 862359 - RNA, 19 nt, Artificial Sequence
  Description of Artificial Sequence: Synthetic oligonucleotide
gguccgggcccagcaugca

SEQ ID NO: 862360 - RNA, 19 nt, Artificial Sequence
  Description of Artificial Sequence: Synthetic oligonucleotide
ggccagaaccugcguggau

SEQ ID NO: 862361 - RNA, 19 nt, Artificial Sequence
  Description of Artificial Sequence: Synthetic oligonucleotide
ccaccaccgccaggauaag

SEQ ID NO: 862362 - RNA, 19 nt, Artificial Sequence
  Description of Artificial Sequence: Synthetic oligonucleotide
ccgcggccagguugaagga

SEQ ID NO: 862363 - RNA, 19 nt, Artificial Sequence
  Description of Artificial Sequence: Synthetic oligonucleotide
gcacggcuucgcagggguc

SEQ ID NO: 862364 - RNA, 19 nt, Artificial Sequence
  Description of Artificial Sequence: Synthetic oligonucleotide
cagcacgcucagucaccau

SEQ ID NO: 862365 - RNA, 19 nt, Artificial Sequence
  Description of Artificial Sequence: Synthetic oligonucleotide
gcccgucgcaacccgucau

SEQ ID NO: 862366 - RNA, 19 nt, Artificial Sequence
  Description of Artificial Sequence: Synthetic oligonucleotide
ccaaccaggccuggcuagu

SEQ ID NO: 862367 - RNA, 19 nt, Artificial Sequence
  Description of Artificial Sequence: Synthetic oligonucleotide
gcgcacuuugacgccucgu

SEQ ID NO: 862368 - RNA, 19 nt, Artificial Sequence
  Description of Artificial Sequence: Synthetic oligonucleotide
ccuggcuaguggagggguu

SEQ ID NO: 862369 - RNA, 19 nt, Artificial Sequence
  Description of Artificial Sequence: Synthetic oligonucleotide
ccgggacccagaguugagu

SEQ ID NO: 862370 - RNA, 19 nt, Artificial Sequence
  Description of Artificial Sequence: Synthetic oligonucleotide
ccacgcugucagcugcggu

SEQ ID NO: 862371 - RNA, 19 nt, Artificial Sequence
  Description of Artificial Sequence: Synthetic oligonucleotide
gcggugcacucgccaggua

SEQ ID NO: 862372 - RNA, 19 nt, Artificial Sequence
  Description of Artificial Sequence: Synthetic oligonucleotide
gcagcccgucgcaacccgu

SEQ ID NO: 862373 - RNA, 19 nt, Artificial Sequence
  Description of Artificial Sequence: Synthetic oligonucleotide
ccccacuacuuuggggccu

SEQ ID NO: 862374 - RNA, 19 nt, Artificial Sequence
  Description of Artificial Sequence: Synthetic oligonucleotide
cggagccgaggcggccagg

SEQ ID NO: 862375 - RNA, 19 nt, Artificial Sequence
  Description of Artificial Sequence: Synthetic oligonucleotide
ccacuacuuuggggccuga

SEQ ID NO: 862376 - RNA, 19 nt, Artificial Sequence
  Description of Artificial Sequence: Synthetic oligonucleotide
gcaagccaucgugcccauu

SEQ ID NO: 862377 - RNA, 19 nt, Artificial Sequence
  Description of Artificial Sequence: Synthetic oligonucleotide
cauaaaaucgauaaggucc

SEQ ID NO: 862378 - RNA, 19 nt, Artificial Sequence
  Description of Artificial Sequence: Synthetic oligonucleotide
aauguuuagacuuccgagc

SEQ ID NO: 862379 - RNA, 19 nt, Artificial Sequence
  Description of Artificial Sequence: Synthetic oligonucleotide
aaugacacuaaauucaaug

SEQ ID NO: 862380 - RNA, 19 nt, Artificial Sequence
  Description of Artificial Sequence: Synthetic oligonucleotide
ucaauaaacagguaaggag

SEQ ID NO: 862381 - RNA, 19 nt, Artificial Sequence
  Description of Artificial Sequence: Synthetic oligonucleotide
aaauguuuagacuuccgag

SEQ ID NO: 862382 - RNA, 19 nt, Artificial Sequence
  Description of Artificial Sequence: Synthetic oligonucleotide
aucaugaauacacaacccc

SEQ ID NO: 862383 - RNA, 19 nt, Artificial Sequence
  Description of Artificial Sequence: Synthetic oligonucleotide
aauguauagauauuuuaga

SEQ ID NO: 862384 - RNA, 19 nt, Artificial Sequence
  Description of Artificial Sequence: Synthetic oligonucleotide
acugccauagccuaacacc

SEQ ID NO: 862385 - RNA, 19 nt, Artificial Sequence
  Description of Artificial Sequence: Synthetic oligonucleotide
augacacuaaauucaaugc

SEQ ID NO: 862386 - RNA, 19 nt, Artificial Sequence
  Description of Artificial Sequence: Synthetic oligonucleotide
aaucgauaagguccuacgc

SEQ ID NO: 862387 - RNA, 19 nt, Artificial Sequence
  Description of Artificial Sequence: Synthetic oligonucleotide
ugaaccauggcuauuggag

SEQ ID NO: 862388 - RNA, 19 nt, Artificial Sequence
  Description of Artificial Sequence: Synthetic oligonucleotide
auguaaguaacgcugaguc

SEQ ID NO: 862389 - RNA, 19 nt, Artificial Sequence
  Description of Artificial Sequence: Synthetic oligonucleotide
aaaaccguaaaucgcugac

SEQ ID NO: 862390 - RNA, 19 nt, Artificial Sequence
  Description of Artificial Sequence: Synthetic oligonucleotide
aaaucgauaagguccuacg

SEQ ID NO: 862391 - RNA, 19 nt, Artificial Sequence
  Description of Artificial Sequence: Synthetic oligonucleotide
uccacaucaccuuacaagg

SEQ ID NO: 862392 - RNA, 19 nt, Artificial Sequence
  Description of Artificial Sequence: Synthetic oligonucleotide
uuaaaguacccuuaucucc

SEQ ID NO: 862393 - RNA, 19 nt, Artificial Sequence
  Description of Artificial Sequence: Synthetic oligonucleotide
ucaacuuagguaaacaauc

SEQ ID NO: 862394 - RNA, 19 nt, Artificial Sequence
  Description of Artificial Sequence: Synthetic oligonucleotide
aauacaugcuuuuacuaca

SEQ ID NO: 862395 - RNA, 19 nt, Artificial Sequence
  Description of Artificial Sequence: Synthetic oligonucleotide
ugguguauaacacuccuag

SEQ ID NO: 862396 - RNA, 19 nt, Artificial Sequence
  Description of Artificial Sequence: Synthetic oligonucleotide
ucagcuuaauaacagaggu

SEQ ID NO: 862397 - RNA, 19 nt, Artificial Sequence
  Description of Artificial Sequence: Synthetic oligonucleotide
uauuggaguagucacguag

SEQ ID NO: 862398 - RNA, 19 nt, Artificial Sequence
  Description of Artificial Sequence: Synthetic oligonucleotide
ucagcuaaucuucaaaugu

SEQ ID NO: 862399 - RNA, 19 nt, Artificial Sequence
  Description of Artificial Sequence: Synthetic oligonucleotide
uauuaucccaacuucagac

SEQ ID NO: 862400 - RNA, 19 nt, Artificial Sequence
  Description of Artificial Sequence: Synthetic oligonucleotide
auaaccaaaggaaaagagc

SEQ ID NO: 862401 - RNA, 19 nt, Artificial Sequence
  Description of Artificial Sequence: Synthetic oligonucleotide
aaugaugagccauccaucu

SEQ ID NO: 862402 - RNA, 19 nt, Artificial Sequence
  Description of Artificial Sequence: Synthetic oligonucleotide
uucuccauaaaaucgauaa

SEQ ID NO: 862403 - RNA, 19 nt, Artificial Sequence
  Description of Artificial Sequence: Synthetic oligonucleotide
ugggaauuuuaugagaagg

SEQ ID NO: 862404 - RNA, 19 nt, Artificial Sequence
  Description of Artificial Sequence: Synthetic oligonucleotide
ugacacuaaauucaaugcc

SEQ ID NO: 862405 - RNA, 19 nt, Artificial Sequence
  Description of Artificial Sequence: Synthetic oligonucleotide
aacccuuuauuauucaacu

SEQ ID NO: 862406 - RNA, 19 nt, Artificial Sequence
  Description of Artificial Sequence: Synthetic oligonucleotide
uuucucaugauacuucgca

SEQ ID NO: 862407 - RNA, 19 nt, Artificial Sequence
  Description of Artificial Sequence: Synthetic oligonucleotide
uuuacuuagcagaugcucu

SEQ ID NO: 862408 - RNA, 19 nt, Artificial Sequence
  Description of Artificial Sequence: Synthetic oligonucleotide
uuacguaugcagcauacug

SEQ ID NO: 862409 - RNA, 19 nt, Artificial Sequence
  Description of Artificial Sequence: Synthetic oligonucleotide
uaaaguacccuuaucucca

SEQ ID NO: 862410 - RNA, 19 nt, Artificial Sequence
  Description of Artificial Sequence: Synthetic oligonucleotide
uaagcuaguauaauuuccu

SEQ ID NO: 862411 - RNA, 19 nt, Artificial Sequence
  Description of Artificial Sequence: Synthetic oligonucleotide
ucacauauuauuaucccaa

SEQ ID NO: 862412 - RNA, 19 nt, Artificial Sequence
  Description of Artificial Sequence: Synthetic oligonucleotide
aaaaucgauaagguccuac

SEQ ID NO: 862413 - RNA, 19 nt, Artificial Sequence
  Description of Artificial Sequence: Synthetic oligonucleotide
cuaaucuucaaauguuuag

SEQ ID NO: 862414 - RNA, 19 nt, Artificial Sequence
  Description of Artificial Sequence: Synthetic oligonucleotide
uccaaaaccguaaaucgcu

SEQ ID NO: 862415 - RNA, 19 nt, Artificial Sequence
  Description of Artificial Sequence: Synthetic oligonucleotide
uuugaaccaacaauuggga

SEQ ID NO: 862416 - RNA, 19 nt, Artificial Sequence
  Description of Artificial Sequence: Synthetic oligonucleotide
auacagaagcuguucgugc

SEQ ID NO: 862417 - RNA, 19 nt, Artificial Sequence
  Description of Artificial Sequence: Synthetic oligonucleotide
auauaaaccccuuucucug

SEQ ID NO: 862418 - RNA, 19 nt, Artificial Sequence
  Description of Artificial Sequence: Synthetic oligonucleotide
aaaucgcugacuuccaggu

SEQ ID NO: 862419 - RNA, 19 nt, Artificial Sequence
  Description of Artificial Sequence: Synthetic oligonucleotide
aguacaguuuacuuagcag

SEQ ID NO: 862420 - RNA, 19 nt, Artificial Sequence
  Description of Artificial Sequence: Synthetic oligonucleotide
guauagauauuuuagaccu

SEQ ID NO: 862421 - RNA, 19 nt, Artificial Sequence
  Description of Artificial Sequence: Synthetic oligonucleotide
uccaaugauauaaaccccu

SEQ ID NO: 862422 - RNA, 19 nt, Artificial Sequence
  Description of Artificial Sequence: Synthetic oligonucleotide
agcuuaauaacagagguga

SEQ ID NO: 862423 - RNA, 19 nt, Artificial Sequence
  Description of Artificial Sequence: Synthetic oligonucleotide
aaaaccauggcuguauccu

SEQ ID NO: 862424 - RNA, 19 nt, Artificial Sequence
  Description of Artificial Sequence: Synthetic oligonucleotide
aauucaaugccauguuggu

SEQ ID NO: 862425 - RNA, 19 nt, Artificial Sequence
  Description of Artificial Sequence: Synthetic oligonucleotide
ugaaguuuaggauaagcua

SEQ ID NO: 862426 - RNA, 19 nt, Artificial Sequence
  Description of Artificial Sequence: Synthetic oligonucleotide
ucaugaauacacaaccccu

SEQ ID NO: 862427 - RNA, 19 nt, Artificial Sequence
  Description of Artificial Sequence: Synthetic oligonucleotide
uuaugauucagcuaaucuu

SEQ ID NO: 862428 - RNA, 19 nt, Artificial Sequence
  Description of Artificial Sequence: Synthetic oligonucleotide
uuuuacuacagguucucca

SEQ ID NO: 862429 - RNA, 19 nt, Artificial Sequence
  Description of Artificial Sequence: Synthetic oligonucleotide
uaugaguucagcucuuuac

SEQ ID NO: 862430 - RNA, 19 nt, Artificial Sequence
  Description of Artificial Sequence: Synthetic oligonucleotide
ucgauaagguccuacgcag

SEQ ID NO: 862431 - RNA, 19 nt, Artificial Sequence
  Description of Artificial Sequence: Synthetic oligonucleotide
ugcagcauacugaacuggg

SEQ ID NO: 862432 - RNA, 19 nt, Artificial Sequence
  Description of Artificial Sequence: Synthetic oligonucleotide
aacuuagguaaacaaucca

SEQ ID NO: 862433 - RNA, 19 nt, Artificial Sequence
  Description of Artificial Sequence: Synthetic oligonucleotide
ugcuaaacuucacaaagaa

SEQ ID NO: 862434 - RNA, 19 nt, Artificial Sequence
  Description of Artificial Sequence: Synthetic oligonucleotide
gauaagcuaguauaauuuc

SEQ ID NO: 862435 - RNA, 19 nt, Artificial Sequence
  Description of Artificial Sequence: Synthetic oligonucleotide
caauacaugcuuuuacuac

SEQ ID NO: 862436 - RNA, 19 nt, Artificial Sequence
  Description of Artificial Sequence: Synthetic oligonucleotide
agaaagcagagugaaauag

SEQ ID NO: 862437 - RNA, 19 nt, Artificial Sequence
  Description of Artificial Sequence: Synthetic oligonucleotide
cucacuaugcagaggagcc

SEQ ID NO: 862438 - RNA, 19 nt, Artificial Sequence
  Description of Artificial Sequence: Synthetic oligonucleotide
uucaacuuagguaaacaau

SEQ ID NO: 862439 - RNA, 19 nt, Artificial Sequence
  Description of Artificial Sequence: Synthetic oligonucleotide
ugcaucuuaugauucagcu

SEQ ID NO: 862440 - RNA, 19 nt, Artificial Sequence
  Description of Artificial Sequence: Synthetic oligonucleotide
caucuuaugauucagcuaa

SEQ ID NO: 862441 - RNA, 19 nt, Artificial Sequence
  Description of Artificial Sequence: Synthetic oligonucleotide
uaugaaguuuaggauaagc

SEQ ID NO: 862442 - RNA, 19 nt, Artificial Sequence
  Description of Artificial Sequence: Synthetic oligonucleotide
uguauccuugaccaaagaa

SEQ ID NO: 862443 - RNA, 19 nt, Artificial Sequence
  Description of Artificial Sequence: Synthetic oligonucleotide
cuuaaaguacccuuaucuc

SEQ ID NO: 862444 - RNA, 19 nt, Artificial Sequence
  Description of Artificial Sequence: Synthetic oligonucleotide
ugcuaaugacacuaaauuc

SEQ ID NO: 862445 - RNA, 19 nt, Artificial Sequence
  Description of Artificial Sequence: Synthetic oligonucleotide
ucucaugauacuucgcaug

SEQ ID NO: 862446 - RNA, 19 nt, Artificial Sequence
  Description of Artificial Sequence: Synthetic oligonucleotide
ugcuccgucgccaugacga

SEQ ID NO: 862447 - RNA, 19 nt, Artificial Sequence
  Description of Artificial Sequence: Synthetic oligonucleotide
agccaugggaauuuuauga

SEQ ID NO: 862448 - RNA, 19 nt, Artificial Sequence
  Description of Artificial Sequence: Synthetic oligonucleotide
uacguaugcagcauacuga

SEQ ID NO: 862449 - RNA, 19 nt, Artificial Sequence
  Description of Artificial Sequence: Synthetic oligonucleotide
acaauccaaaaucagucca

SEQ ID NO: 862450 - RNA, 19 nt, Artificial Sequence
  Description of Artificial Sequence: Synthetic oligonucleotide
auaacacuccuagaucugc

SEQ ID NO: 862451 - RNA, 19 nt, Artificial Sequence
  Description of Artificial Sequence: Synthetic oligonucleotide
auaauagcaaauacagaag

SEQ ID NO: 862452 - RNA, 19 nt, Artificial Sequence
  Description of Artificial Sequence: Synthetic oligonucleotide
augauauaaaccccuuucu

SEQ ID NO: 862453 - RNA, 19 nt, Artificial Sequence
  Description of Artificial Sequence: Synthetic oligonucleotide
uuuacuacagguucuccau

SEQ ID NO: 862454 - RNA, 19 nt, Artificial Sequence
  Description of Artificial Sequence: Synthetic oligonucleotide
uacagguucuccauaaaau

SEQ ID NO: 862455 - RNA, 19 nt, Artificial Sequence
  Description of Artificial Sequence: Synthetic oligonucleotide
auuggaguagucacguagc

SEQ ID NO: 862456 - RNA, 19 nt, Artificial Sequence
  Description of Artificial Sequence: Synthetic oligonucleotide
uuuguguuggaccuuguuu

SEQ ID NO: 862457 - RNA, 19 nt, Artificial Sequence
  Description of Artificial Sequence: Synthetic oligonucleotide
ggaguagucacguagccag

SEQ ID NO: 862458 - RNA, 19 nt, Artificial Sequence
  Description of Artificial Sequence: Synthetic oligonucleotide
ucugguguauaacacuccu

SEQ ID NO: 862459 - RNA, 19 nt, Artificial Sequence
  Description of Artificial Sequence: Synthetic oligonucleotide
cauaauguacuccguagug

SEQ ID NO: 862460 - RNA, 19 nt, Artificial Sequence
  Description of Artificial Sequence: Synthetic oligonucleotide
uguaaguaacgcugagucc

SEQ ID NO: 862461 - RNA, 19 nt, Artificial Sequence
  Description of Artificial Sequence: Synthetic oligonucleotide
uuccaaugauauaaacccc

SEQ ID NO: 862462 - RNA, 19 nt, Artificial Sequence
  Description of Artificial Sequence: Synthetic oligonucleotide
uuuuagaccugacagucuu

SEQ ID NO: 862463 - RNA, 19 nt, Artificial Sequence
  Description of Artificial Sequence: Synthetic oligonucleotide
aagcuaguauaauuuccug

SEQ ID NO: 862464 - RNA, 19 nt, Artificial Sequence
  Description of Artificial Sequence: Synthetic oligonucleotide
aucacauauuauuauccca

SEQ ID NO: 862465 - RNA, 19 nt, Artificial Sequence
  Description of Artificial Sequence: Synthetic oligonucleotide
uauaacacuccuagaucug

SEQ ID NO: 862466 - RNA, 19 nt, Artificial Sequence
  Description of Artificial Sequence: Synthetic oligonucleotide
aucgauaagguccuacgca

SEQ ID NO: 862467 - RNA, 19 nt, Artificial Sequence
  Description of Artificial Sequence: Synthetic oligonucleotide
acgacagugauggucuucc

SEQ ID NO: 862468 - RNA, 19 nt, Artificial Sequence
  Description of Artificial Sequence: Synthetic oligonucleotide
uccgucacgaacuggccgg

SEQ ID NO: 862469 - RNA, 19 nt, Artificial Sequence
  Description of Artificial Sequence: Synthetic oligonucleotide
ucaauacaugcuuuuacua

SEQ ID NO: 862470 - RNA, 19 nt, Artificial Sequence
  Description of Artificial Sequence: Synthetic oligonucleotide
auguuuagacuuccgagcu

SEQ ID NO: 862471 - RNA, 19 nt, Artificial Sequence
  Description of Artificial Sequence: Synthetic oligonucleotide
gacacuaaauucaaugcca

SEQ ID NO: 862472 - RNA, 19 nt, Artificial Sequence
  Description of Artificial Sequence: Synthetic oligonucleotide
uauucaacuuagguaaaca

SEQ ID NO: 862473 - RNA, 19 nt, Artificial Sequence
  Description of Artificial Sequence: Synthetic oligonucleotide
cauagccuaacaccagucg

SEQ ID NO: 862474 - RNA, 19 nt, Artificial Sequence
  Description of Artificial Sequence: Synthetic oligonucleotide
augaguucagcucuuuaca

SEQ ID NO: 862475 - RNA, 19 nt, Artificial Sequence
  Description of Artificial Sequence: Synthetic oligonucleotide
gaauacacaaccccucaca

SEQ ID NO: 862476 - RNA, 19 nt, Artificial Sequence
  Description of Artificial Sequence: Synthetic oligonucleotide
auucaacuuagguaaacaa

SEQ ID NO: 862477 - RNA, 19 nt, Artificial Sequence
  Description of Artificial Sequence: Synthetic oligonucleotide
uuguguuggaccuuguuuu

SEQ ID NO: 862478 - RNA, 19 nt, Artificial Sequence
  Description of Artificial Sequence: Synthetic oligonucleotide
uaguauaauuuccugcuuu

SEQ ID NO: 862479 - RNA, 19 nt, Artificial Sequence
  Description of Artificial Sequence: Synthetic oligonucleotide
agguaugaaguuuaggaua

SEQ ID NO: 862480 - RNA, 19 nt, Artificial Sequence
  Description of Artificial Sequence: Synthetic oligonucleotide
aaccguaaaucgcugacuu

SEQ ID NO: 862481 - RNA, 19 nt, Artificial Sequence
  Description of Artificial Sequence: Synthetic oligonucleotide
augacgagcccacagcgag

SEQ ID NO: 862482 - RNA, 19 nt, Artificial Sequence
  Description of Artificial Sequence: Synthetic oligonucleotide
aacuuugaaccaacaauug

SEQ ID NO: 862483 - RNA, 19 nt, Artificial Sequence
  Description of Artificial Sequence: Synthetic oligonucleotide
aguagucacguagccagcc

SEQ ID NO: 862484 - RNA, 19 nt, Artificial Sequence
  Description of Artificial Sequence: Synthetic oligonucleotide
ucgagccccaucacuaagg

SEQ ID NO: 862485 - RNA, 19 nt, Artificial Sequence
  Description of Artificial Sequence: Synthetic oligonucleotide
gagaucagagguaucauuc

SEQ ID NO: 862486 - RNA, 19 nt, Artificial Sequence
  Description of Artificial Sequence: Synthetic oligonucleotide
cuccaaaaccguaaaucgc

SEQ ID NO: 862487 - RNA, 19 nt, Artificial Sequence
  Description of Artificial Sequence: Synthetic oligonucleotide
aucagcuuaauaacagagg

SEQ ID NO: 862488 - RNA, 19 nt, Artificial Sequence
  Description of Artificial Sequence: Synthetic oligonucleotide
auagccuaacaccagucga

SEQ ID NO: 862489 - RNA, 19 nt, Artificial Sequence
  Description of Artificial Sequence: Synthetic oligonucleotide
aucucaucaagcgaggcug

SEQ ID NO: 862490 - RNA, 19 nt, Artificial Sequence
  Description of Artificial Sequence: Synthetic oligonucleotide
caugaauacacaaccccuc

SEQ ID NO: 862491 - RNA, 19 nt, Artificial Sequence
  Description of Artificial Sequence: Synthetic oligonucleotide
guauaacacuccuagaucu

SEQ ID NO: 862492 - RNA, 19 nt, Artificial Sequence
  Description of Artificial Sequence: Synthetic oligonucleotide
aucaccuuacaaggaaggc

SEQ ID NO: 862493 - RNA, 19 nt, Artificial Sequence
  Description of Artificial Sequence: Synthetic oligonucleotide
augaaguuuaggauaagcu

SEQ ID NO: 862494 - RNA, 19 nt, Artificial Sequence
  Description of Artificial Sequence: Synthetic oligonucleotide
gguguaaagacaccgcccc

SEQ ID NO: 862495 - RNA, 19 nt, Artificial Sequence
  Description of Artificial Sequence: Synthetic oligonucleotide
aggauaagcuaguauaauu

SEQ ID NO: 862496 - RNA, 19 nt, Artificial Sequence
  Description of Artificial Sequence: Synthetic oligonucleotide
ugaauacacaaccccucac

SEQ ID NO: 862497 - RNA, 19 nt, Artificial Sequence
  Description of Artificial Sequence: Synthetic oligonucleotide
uggcuauuggaguagucac

SEQ ID NO: 862498 - RNA, 19 nt, Artificial Sequence
  Description of Artificial Sequence: Synthetic oligonucleotide
augaauacacaaccccuca

SEQ ID NO: 862499 - RNA, 19 nt, Artificial Sequence
  Description of Artificial Sequence: Synthetic oligonucleotide
uggaucguuaggaagcuuu

SEQ ID NO: 862500 - RNA, 19 nt, Artificial Sequence
  Description of Artificial Sequence: Synthetic oligonucleotide
aauaggaaacuggccaccu

SEQ ID NO: 862501 - RNA, 19 nt, Artificial Sequence
  Description of Artificial Sequence: Synthetic oligonucleotide
cuucaaauguuuagacuuc

SEQ ID NO: 862502 - RNA, 19 nt, Artificial Sequence
  Description of Artificial Sequence: Synthetic oligonucleotide
uacgcaguugaggacaagc

SEQ ID NO: 862503 - RNA, 19 nt, Artificial Sequence
  Description of Artificial Sequence: Synthetic oligonucleotide
aguaccguucauuugcuuu

SEQ ID NO: 862504 - RNA, 19 nt, Artificial Sequence
  Description of Artificial Sequence: Synthetic oligonucleotide
cagauagguuuauagaaga

SEQ ID NO: 862505 - RNA, 19 nt, Artificial Sequence
  Description of Artificial Sequence: Synthetic oligonucleotide
aguacccuuaucuccaaaa

SEQ ID NO: 862506 - RNA, 19 nt, Artificial Sequence
  Description of Artificial Sequence: Synthetic oligonucleotide
uguuuagacuuccgagcug

SEQ ID NO: 862507 - RNA, 19 nt, Artificial Sequence
  Description of Artificial Sequence: Synthetic oligonucleotide
gaauuuuaugagaaggugu

SEQ ID NO: 862508 - RNA, 19 nt, Artificial Sequence
  Description of Artificial Sequence: Synthetic oligonucleotide
ugucucccaaugcuaaacu

SEQ ID NO: 862509 - RNA, 19 nt, Artificial Sequence
  Description of Artificial Sequence: Synthetic oligonucleotide
uuacuuagcagaugcucuc

SEQ ID NO: 862510 - RNA, 19 nt, Artificial Sequence
  Description of Artificial Sequence: Synthetic oligonucleotide
ucguaaaugaugagccauc

SEQ ID NO: 862511 - RNA, 19 nt, Artificial Sequence
  Description of Artificial Sequence: Synthetic oligonucleotide
uucgugcaucuuaugauuc

SEQ ID NO: 862512 - RNA, 19 nt, Artificial Sequence
  Description of Artificial Sequence: Synthetic oligonucleotide
uuagggagaucagagguau

SEQ ID NO: 862513 - RNA, 19 nt, Artificial Sequence
  Description of Artificial Sequence: Synthetic oligonucleotide
guaaguaacgcugaguccu

SEQ ID NO: 862514 - RNA, 19 nt, Artificial Sequence
  Description of Artificial Sequence: Synthetic oligonucleotide
aaaccguaaaucgcugacu

SEQ ID NO: 862515 - RNA, 19 nt, Artificial Sequence
  Description of Artificial Sequence: Synthetic oligonucleotide
ugcuuccaaugauauaaac

SEQ ID NO: 862516 - RNA, 19 nt, Artificial Sequence
  Description of Artificial Sequence: Synthetic oligonucleotide
aaacagguaaggagaauau

SEQ ID NO: 862517 - RNA, 19 nt, Artificial Sequence
  Description of Artificial Sequence: Synthetic oligonucleotide
guaucauucagaagaguca

SEQ ID NO: 862518 - RNA, 19 nt, Artificial Sequence
  Description of Artificial Sequence: Synthetic oligonucleotide
uccuacgcaguugaggaca

SEQ ID NO: 862519 - RNA, 19 nt, Artificial Sequence
  Description of Artificial Sequence: Synthetic oligonucleotide
acguaugcagcauacugaa

SEQ ID NO: 862520 - RNA, 19 nt, Artificial Sequence
  Description of Artificial Sequence: Synthetic oligonucleotide
cacuccuagaucugcuggg

SEQ ID NO: 862521 - RNA, 19 nt, Artificial Sequence
  Description of Artificial Sequence: Synthetic oligonucleotide
aggagaauaucaguuuucu

SEQ ID NO: 862522 - RNA, 19 nt, Artificial Sequence
  Description of Artificial Sequence: Synthetic oligonucleotide
cugauauuugguuuguucu

SEQ ID NO: 862523 - RNA, 19 nt, Artificial Sequence
  Description of Artificial Sequence: Synthetic oligonucleotide
auggcuauuggaguaguca

SEQ ID NO: 862524 - RNA, 19 nt, Artificial Sequence
  Description of Artificial Sequence: Synthetic oligonucleotide
agccuaacaccagucgagc

SEQ ID NO: 862525 - RNA, 19 nt, Artificial Sequence
  Description of Artificial Sequence: Synthetic oligonucleotide
uccuugaccaaagaauguc

SEQ ID NO: 862526 - RNA, 19 nt, Artificial Sequence
  Description of Artificial Sequence: Synthetic oligonucleotide
cuuccgagcugcuaaugac

SEQ ID NO: 862527 - RNA, 19 nt, Artificial Sequence
  Description of Artificial Sequence: Synthetic oligonucleotide
cauauuauuaucccaacuu

SEQ ID NO: 862528 - RNA, 19 nt, Artificial Sequence
  Description of Artificial Sequence: Synthetic oligonucleotide
cuuucucaugauacuucgc

SEQ ID NO: 862529 - RNA, 19 nt, Artificial Sequence
  Description of Artificial Sequence: Synthetic oligonucleotide
cuuuagggagaucagaggu

SEQ ID NO: 862530 - RNA, 19 nt, Artificial Sequence
  Description of Artificial Sequence: Synthetic oligonucleotide
aaccaaaggaaaagagcca

SEQ ID NO: 862531 - RNA, 19 nt, Artificial Sequence
  Description of Artificial Sequence: Synthetic oligonucleotide
guacccuuaucuccaaaac

SEQ ID NO: 862532 - RNA, 19 nt, Artificial Sequence
  Description of Artificial Sequence: Synthetic oligonucleotide
uacuccguaguguucuuaa

SEQ ID NO: 862533 - RNA, 19 nt, Artificial Sequence
  Description of Artificial Sequence: Synthetic oligonucleotide
uacuucgcaugcauuaguu

SEQ ID NO: 862534 - RNA, 19 nt, Artificial Sequence
  Description of Artificial Sequence: Synthetic oligonucleotide
guugagucugucaaucaac

SEQ ID NO: 862535 - RNA, 19 nt, Artificial Sequence
  Description of Artificial Sequence: Synthetic oligonucleotide
gagucugucaaucaacuuu

SEQ ID NO: 862536 - RNA, 19 nt, Artificial Sequence
  Description of Artificial Sequence: Synthetic oligonucleotide
accguaaaucgcugacuuc

SEQ ID NO: 862537 - RNA, 19 nt, Artificial Sequence
  Description of Artificial Sequence: Synthetic oligonucleotide
guaccguucauuugcuuuc

SEQ ID NO: 862538 - RNA, 19 nt, Artificial Sequence
  Description of Artificial Sequence: Synthetic oligonucleotide
cucccaaugcuaaacuuca

SEQ ID NO: 862539 - RNA, 19 nt, Artificial Sequence
  Description of Artificial Sequence: Synthetic oligonucleotide
auacuucgcaugcauuagu

SEQ ID NO: 862540 - RNA, 19 nt, Artificial Sequence
  Description of Artificial Sequence: Synthetic oligonucleotide
ucgugcaucuuaugauuca

SEQ ID NO: 862541 - RNA, 19 nt, Artificial Sequence
  Description of Artificial Sequence: Synthetic oligonucleotide
aaaguaccguucauuugcu

SEQ ID NO: 862542 - RNA, 19 nt, Artificial Sequence
  Description of Artificial Sequence: Synthetic oligonucleotide
ggaauaugaguucagcucu

SEQ ID NO: 862543 - RNA, 19 nt, Artificial Sequence
  Description of Artificial Sequence: Synthetic oligonucleotide
cuccuguaaauuuucaugu

SEQ ID NO: 862544 - RNA, 19 nt, Artificial Sequence
  Description of Artificial Sequence: Synthetic oligonucleotide
cacuaaauucaaugccaug

SEQ ID NO: 862545 - RNA, 19 nt, Artificial Sequence
  Description of Artificial Sequence: Synthetic oligonucleotide
caacuuugaaccaacaauu

SEQ ID NO: 862546 - RNA, 19 nt, Artificial Sequence
  Description of Artificial Sequence: Synthetic oligonucleotide
uagucacguagccagccuc

SEQ ID NO: 862547 - RNA, 19 nt, Artificial Sequence
  Description of Artificial Sequence: Synthetic oligonucleotide
gcuaguauaauuuccugcu

SEQ ID NO: 862548 - RNA, 19 nt, Artificial Sequence
  Description of Artificial Sequence: Synthetic oligonucleotide
aaaguacccuuaucuccaa

SEQ ID NO: 862549 - RNA, 19 nt, Artificial Sequence
  Description of Artificial Sequence: Synthetic oligonucleotide
agcagucaaaguaccguuc

SEQ ID NO: 862550 - RNA, 19 nt, Artificial Sequence
  Description of Artificial Sequence: Synthetic oligonucleotide
ugaacuggggacuccugua

SEQ ID NO: 862551 - RNA, 19 nt, Artificial Sequence
  Description of Artificial Sequence: Synthetic oligonucleotide
cuccgucacgaacuggccg

SEQ ID NO: 862552 - RNA, 19 nt, Artificial Sequence
  Description of Artificial Sequence: Synthetic oligonucleotide
uaaguaacgcugaguccuc

SEQ ID NO: 862553 - RNA, 19 nt, Artificial Sequence
  Description of Artificial Sequence: Synthetic oligonucleotide
ccguaaaucgcugacuucc

SEQ ID NO: 862554 - RNA, 19 nt, Artificial Sequence
  Description of Artificial Sequence: Synthetic oligonucleotide
ccauaaaaucgauaagguc

SEQ ID NO: 862555 - RNA, 19 nt, Artificial Sequence
  Description of Artificial Sequence: Synthetic oligonucleotide
guaaaugaugagccaucca

SEQ ID NO: 862556 - RNA, 19 nt, Artificial Sequence
  Description of Artificial Sequence: Synthetic oligonucleotide
uggaguagucacguagcca

SEQ ID NO: 862557 - RNA, 19 nt, Artificial Sequence
  Description of Artificial Sequence: Synthetic oligonucleotide
gauagguuuauagaagauu

SEQ ID NO: 862558 - RNA, 19 nt, Artificial Sequence
  Description of Artificial Sequence: Synthetic oligonucleotide
cagagguaucauucagaag

SEQ ID NO: 862559 - RNA, 19 nt, Artificial Sequence
  Description of Artificial Sequence: Synthetic oligonucleotide
agcgaggcuggauugcaga

SEQ ID NO: 862560 - RNA, 19 nt, Artificial Sequence
  Description of Artificial Sequence: Synthetic oligonucleotide
auacugaacuggggacucc

SEQ ID NO: 862561 - RNA, 19 nt, Artificial Sequence
  Description of Artificial Sequence: Synthetic oligonucleotide
guaacgcugaguccucuuc

SEQ ID NO: 862562 - RNA, 19 nt, Artificial Sequence
  Description of Artificial Sequence: Synthetic oligonucleotide
uuuagacuuccgagcugcu

SEQ ID NO: 862563 - RNA, 19 nt, Artificial Sequence
  Description of Artificial Sequence: Synthetic oligonucleotide
acaccagucgagccccauc

SEQ ID NO: 862564 - RNA, 19 nt, Artificial Sequence
  Description of Artificial Sequence: Synthetic oligonucleotide
gguaugaaguuuaggauaa

SEQ ID NO: 862565 - RNA, 19 nt, Artificial Sequence
  Description of Artificial Sequence: Synthetic oligonucleotide
aaccccucacauccugagu

SEQ ID NO: 862566 - RNA, 19 nt, Artificial Sequence
  Description of Artificial Sequence: Synthetic oligonucleotide
auaugaguucagcucuuua

SEQ ID NO: 862567 - RNA, 19 nt, Artificial Sequence
  Description of Artificial Sequence: Synthetic oligonucleotide
uggggacuccuguaaauuu

SEQ ID NO: 862568 - RNA, 19 nt, Artificial Sequence
  Description of Artificial Sequence: Synthetic oligonucleotide
gaguccaccgcgccugcgc

SEQ ID NO: 862569 - RNA, 19 nt, Artificial Sequence
  Description of Artificial Sequence: Synthetic oligonucleotide
ugagucugucaaucaacuu

SEQ ID NO: 862570 - RNA, 19 nt, Artificial Sequence
  Description of Artificial Sequence: Synthetic oligonucleotide
acuucagacgacagugaug

SEQ ID NO: 862571 - RNA, 19 nt, Artificial Sequence
  Description of Artificial Sequence: Synthetic oligonucleotide
ugacgagcccacagcgagc

SEQ ID NO: 862572 - RNA, 19 nt, Artificial Sequence
  Description of Artificial Sequence: Synthetic oligonucleotide
ccaugacgagcccacagcg

SEQ ID NO: 862573 - RNA, 19 nt, Artificial Sequence
  Description of Artificial Sequence: Synthetic oligonucleotide
ggcuauuggaguagucacg

SEQ ID NO: 862574 - RNA, 19 nt, Artificial Sequence
  Description of Artificial Sequence: Synthetic oligonucleotide
aacuggccggugaagccag

SEQ ID NO: 862575 - RNA, 19 nt, Artificial Sequence
  Description of Artificial Sequence: Synthetic oligonucleotide
acacuaaauucaaugccau

SEQ ID NO: 862576 - RNA, 19 nt, Artificial Sequence
  Description of Artificial Sequence: Synthetic oligonucleotide
acguagccagccucugguc

SEQ ID NO: 862577 - RNA, 19 nt, Artificial Sequence
  Description of Artificial Sequence: Synthetic oligonucleotide
aguggaucguuaggaagcu

SEQ ID NO: 862578 - RNA, 19 nt, Artificial Sequence
  Description of Artificial Sequence: Synthetic oligonucleotide
cuauccgaccuuccaguuc

SEQ ID NO: 862579 - RNA, 19 nt, Artificial Sequence
  Description of Artificial Sequence: Synthetic oligonucleotide
caucguaaaugaugagcca

SEQ ID NO: 862580 - RNA, 19 nt, Artificial Sequence
  Description of Artificial Sequence: Synthetic oligonucleotide
aguaccgggcgccgcagca

SEQ ID NO: 862581 - RNA, 19 nt, Artificial Sequence
  Description of Artificial Sequence: Synthetic oligonucleotide
aaucgcugacuuccaggua

SEQ ID NO: 862582 - RNA, 19 nt, Artificial Sequence
  Description of Artificial Sequence: Synthetic oligonucleotide
ugcgccucaggccgcgacc

SEQ ID NO: 862583 - RNA, 19 nt, Artificial Sequence
  Description of Artificial Sequence: Synthetic oligonucleotide
agauagguuuauagaagau

SEQ ID NO: 862584 - RNA, 19 nt, Artificial Sequence
  Description of Artificial Sequence: Synthetic oligonucleotide
ggcuggauugcagacauca

SEQ ID NO: 862585 - RNA, 19 nt, Artificial Sequence
  Description of Artificial Sequence: Synthetic oligonucleotide
uagaccugacagucuucca

SEQ ID NO: 862586 - RNA, 19 nt, Artificial Sequence
  Description of Artificial Sequence: Synthetic oligonucleotide
gucgagccccaucacuaag

SEQ ID NO: 862587 - RNA, 19 nt, Artificial Sequence
  Description of Artificial Sequence: Synthetic oligonucleotide
aaguaccguucauuugcuu

SEQ ID NO: 862588 - RNA, 19 nt, Artificial Sequence
  Description of Artificial Sequence: Synthetic oligonucleotide
augccucccaccguuacgu

SEQ ID NO: 862589 - RNA, 19 nt, Artificial Sequence
  Description of Artificial Sequence: Synthetic oligonucleotide
caccguuacguaugcagca

SEQ ID NO: 862590 - RNA, 19 nt, Artificial Sequence
  Description of Artificial Sequence: Synthetic oligonucleotide
aguuuacuuagcagaugcu

SEQ ID NO: 862591 - RNA, 19 nt, Artificial Sequence
  Description of Artificial Sequence: Synthetic oligonucleotide
gucacugccauagccuaac

SEQ ID NO: 862592 - RNA, 19 nt, Artificial Sequence
  Description of Artificial Sequence: Synthetic oligonucleotide
gugucucccaaugcuaaac

SEQ ID NO: 862593 - RNA, 19 nt, Artificial Sequence
  Description of Artificial Sequence: Synthetic oligonucleotide
acuauccgaccuuccaguu

SEQ ID NO: 862594 - RNA, 19 nt, Artificial Sequence
  Description of Artificial Sequence: Synthetic oligonucleotide
ccaaagaaugucaucguaa

SEQ ID NO: 862595 - RNA, 19 nt, Artificial Sequence
  Description of Artificial Sequence: Synthetic oligonucleotide
aaguaacgcugaguccucu

SEQ ID NO: 862596 - RNA, 19 nt, Artificial Sequence
  Description of Artificial Sequence: Synthetic oligonucleotide
cugaaccauggcuauugga

SEQ ID NO: 862597 - RNA, 19 nt, Artificial Sequence
  Description of Artificial Sequence: Synthetic oligonucleotide
cacaaccccucacauccug

SEQ ID NO: 862598 - RNA, 19 nt, Artificial Sequence
  Description of Artificial Sequence: Synthetic oligonucleotide
gguaaggagaauaucaguu

SEQ ID NO: 862599 - RNA, 19 nt, Artificial Sequence
  Description of Artificial Sequence: Synthetic oligonucleotide
ucaucaagcgaggcuggau

SEQ ID NO: 862600 - RNA, 19 nt, Artificial Sequence
  Description of Artificial Sequence: Synthetic oligonucleotide
gguguauaacacuccuaga

SEQ ID NO: 862601 - RNA, 19 nt, Artificial Sequence
  Description of Artificial Sequence: Synthetic oligonucleotide
aguaacgcugaguccucuu

SEQ ID NO: 862602 - RNA, 19 nt, Artificial Sequence
  Description of Artificial Sequence: Synthetic oligonucleotide
acgcaguugaggacaagca

SEQ ID NO: 862603 - RNA, 19 nt, Artificial Sequence
  Description of Artificial Sequence: Synthetic oligonucleotide
aagcgaggcuggauugcag

SEQ ID NO: 862604 - RNA, 19 nt, Artificial Sequence
  Description of Artificial Sequence: Synthetic oligonucleotide
aguuuaggauaagcuagua

SEQ ID NO: 862605 - RNA, 19 nt, Artificial Sequence
  Description of Artificial Sequence: Synthetic oligonucleotide
uacagucagauagguuuau

SEQ ID NO: 862606 - RNA, 19 nt, Artificial Sequence
  Description of Artificial Sequence: Synthetic oligonucleotide
ggcgccgaacaccaccagg

SEQ ID NO: 862607 - RNA, 19 nt, Artificial Sequence
  Description of Artificial Sequence: Synthetic oligonucleotide
gccaugacgagcccacagc

SEQ ID NO: 862608 - RNA, 19 nt, Artificial Sequence
  Description of Artificial Sequence: Synthetic oligonucleotide
gacuuccgagcugcuaaug

SEQ ID NO: 862609 - RNA, 19 nt, Artificial Sequence
  Description of Artificial Sequence: Synthetic oligonucleotide
gaguagucacguagccagc

SEQ ID NO: 862610 - RNA, 19 nt, Artificial Sequence
  Description of Artificial Sequence: Synthetic oligonucleotide
ggauaagcuaguauaauuu

SEQ ID NO: 862611 - RNA, 19 nt, Artificial Sequence
  Description of Artificial Sequence: Synthetic oligonucleotide
aaagagccaugggaauuuu

SEQ ID NO: 862612 - RNA, 19 nt, Artificial Sequence
  Description of Artificial Sequence: Synthetic oligonucleotide
uaccgggcgccgcagcaac

SEQ ID NO: 862613 - RNA, 19 nt, Artificial Sequence
  Description of Artificial Sequence: Synthetic oligonucleotide
agucgagccccaucacuaa

SEQ ID NO: 862614 - RNA, 19 nt, Artificial Sequence
  Description of Artificial Sequence: Synthetic oligonucleotide
guucgugcaucuuaugauu

SEQ ID NO: 862615 - RNA, 19 nt, Artificial Sequence
  Description of Artificial Sequence: Synthetic oligonucleotide
accguucauuugcuuucug

SEQ ID NO: 862616 - RNA, 19 nt, Artificial Sequence
  Description of Artificial Sequence: Synthetic oligonucleotide
cucccaccguuacguaugc

SEQ ID NO: 862617 - RNA, 19 nt, Artificial Sequence
  Description of Artificial Sequence: Synthetic oligonucleotide
aaccaacaauugggacagg

SEQ ID NO: 862618 - RNA, 19 nt, Artificial Sequence
  Description of Artificial Sequence: Synthetic oligonucleotide
cguaaaugaugagccaucc

SEQ ID NO: 862619 - RNA, 19 nt, Artificial Sequence
  Description of Artificial Sequence: Synthetic oligonucleotide
uagggagaucagagguauc

SEQ ID NO: 862620 - RNA, 19 nt, Artificial Sequence
  Description of Artificial Sequence: Synthetic oligonucleotide
cacuauccgaccuuccagu

SEQ ID NO: 862621 - RNA, 19 nt, Artificial Sequence
  Description of Artificial Sequence: Synthetic oligonucleotide
cguuacguaugcagcauac

SEQ ID NO: 862622 - RNA, 19 nt, Artificial Sequence
  Description of Artificial Sequence: Synthetic oligonucleotide
agcuguucgugcaucuuau

SEQ ID NO: 862623 - RNA, 19 nt, Artificial Sequence
  Description of Artificial Sequence: Synthetic oligonucleotide
gucgccaugacgagcccac

SEQ ID NO: 862624 - RNA, 19 nt, Artificial Sequence
  Description of Artificial Sequence: Synthetic oligonucleotide
ggagcggcccgccacggcc

SEQ ID NO: 862625 - RNA, 19 nt, Artificial Sequence
  Description of Artificial Sequence: Synthetic oligonucleotide
gccuaacaccagucgagcc

SEQ ID NO: 862626 - RNA, 19 nt, Artificial Sequence
  Description of Artificial Sequence: Synthetic oligonucleotide
gacgacagugauggucuuc

SEQ ID NO: 862627 - RNA, 19 nt, Artificial Sequence
  Description of Artificial Sequence: Synthetic oligonucleotide
gaggcgccgaacaccacca

SEQ ID NO: 862628 - RNA, 19 nt, Artificial Sequence
  Description of Artificial Sequence: Synthetic oligonucleotide
uguacuccguaguguucuu

SEQ ID NO: 862629 - RNA, 19 nt, Artificial Sequence
  Description of Artificial Sequence: Synthetic oligonucleotide
cagacauaucagaucccaa

SEQ ID NO: 862630 - RNA, 19 nt, Artificial Sequence
  Description of Artificial Sequence: Synthetic oligonucleotide
cgaccuuccaguucauuug

SEQ ID NO: 862631 - RNA, 19 nt, Artificial Sequence
  Description of Artificial Sequence: Synthetic oligonucleotide
guccuacgcaguugaggac

SEQ ID NO: 862632 - RNA, 19 nt, Artificial Sequence
  Description of Artificial Sequence: Synthetic oligonucleotide
cauccugaguggaucguua

SEQ ID NO: 862633 - RNA, 19 nt, Artificial Sequence
  Description of Artificial Sequence: Synthetic oligonucleotide
accguuacguaugcagcau

SEQ ID NO: 862634 - RNA, 19 nt, Artificial Sequence
  Description of Artificial Sequence: Synthetic oligonucleotide
aagagccaugggaauuuua

SEQ ID NO: 862635 - RNA, 19 nt, Artificial Sequence
  Description of Artificial Sequence: Synthetic oligonucleotide
ccauagccuaacaccaguc

SEQ ID NO: 862636 - RNA, 19 nt, Artificial Sequence
  Description of Artificial Sequence: Synthetic oligonucleotide
gcaucuuaugauucagcua

SEQ ID NO: 862637 - RNA, 19 nt, Artificial Sequence
  Description of Artificial Sequence: Synthetic oligonucleotide
cacggcccacggcaggcgg

SEQ ID NO: 862638 - RNA, 19 nt, Artificial Sequence
  Description of Artificial Sequence: Synthetic oligonucleotide
uucagacgacagugauggu

SEQ ID NO: 862639 - RNA, 19 nt, Artificial Sequence
  Description of Artificial Sequence: Synthetic oligonucleotide
cugguguauaacacuccua

SEQ ID NO: 862640 - RNA, 19 nt, Artificial Sequence
  Description of Artificial Sequence: Synthetic oligonucleotide
gcuauuggaguagucacgu

SEQ ID NO: 862641 - RNA, 19 nt, Artificial Sequence
  Description of Artificial Sequence: Synthetic oligonucleotide
acaaccccucacauccuga

SEQ ID NO: 862642 - RNA, 19 nt, Artificial Sequence
  Description of Artificial Sequence: Synthetic oligonucleotide
gccaucucaucaagcgagg

SEQ ID NO: 862643 - RNA, 19 nt, Artificial Sequence
  Description of Artificial Sequence: Synthetic oligonucleotide
aacaccagucgagccccau

SEQ ID NO: 862644 - RNA, 19 nt, Artificial Sequence
  Description of Artificial Sequence: Synthetic oligonucleotide
ggcuguauccuugaccaaa

SEQ ID NO: 862645 - RNA, 19 nt, Artificial Sequence
  Description of Artificial Sequence: Synthetic oligonucleotide
cacguagccagccucuggu

SEQ ID NO: 862646 - RNA, 19 nt, Artificial Sequence
  Description of Artificial Sequence: Synthetic oligonucleotide
acagucagauagguuuaua

SEQ ID NO: 862647 - RNA, 19 nt, Artificial Sequence
  Description of Artificial Sequence: Synthetic oligonucleotide
agguaccaucaugaauaca

SEQ ID NO: 862648 - RNA, 19 nt, Artificial Sequence
  Description of Artificial Sequence: Synthetic oligonucleotide
caucaagcgaggcuggauu

SEQ ID NO: 862649 - RNA, 19 nt, Artificial Sequence
  Description of Artificial Sequence: Synthetic oligonucleotide
cgcaguugaggacaagcac

SEQ ID NO: 862650 - RNA, 19 nt, Artificial Sequence
  Description of Artificial Sequence: Synthetic oligonucleotide
cguuaggaagcuuuccaca

SEQ ID NO: 862651 - RNA, 19 nt, Artificial Sequence
  Description of Artificial Sequence: Synthetic oligonucleotide
ugggagcggcccgccacgg

SEQ ID NO: 862652 - RNA, 19 nt, Artificial Sequence
  Description of Artificial Sequence: Synthetic oligonucleotide
gcuguucgugcaucuuaug

SEQ ID NO: 862653 - RNA, 19 nt, Artificial Sequence
  Description of Artificial Sequence: Synthetic oligonucleotide
gucacguagccagccucug

SEQ ID NO: 862654 - RNA, 19 nt, Artificial Sequence
  Description of Artificial Sequence: Synthetic oligonucleotide
guuacguaugcagcauacu

SEQ ID NO: 862655 - RNA, 19 nt, Artificial Sequence
  Description of Artificial Sequence: Synthetic oligonucleotide
guagucacguagccagccu

SEQ ID NO: 862656 - RNA, 19 nt, Artificial Sequence
  Description of Artificial Sequence: Synthetic oligonucleotide
aucuuaugauucagcuaau

SEQ ID NO: 862657 - RNA, 19 nt, Artificial Sequence
  Description of Artificial Sequence: Synthetic oligonucleotide
cuccgucgccaugacgagc

SEQ ID NO: 862658 - RNA, 19 nt, Artificial Sequence
  Description of Artificial Sequence: Synthetic oligonucleotide
gcuguccuggccgccgucg

SEQ ID NO: 862659 - RNA, 19 nt, Artificial Sequence
  Description of Artificial Sequence: Synthetic oligonucleotide
cgugcaucuuaugauucag

SEQ ID NO: 862660 - RNA, 19 nt, Artificial Sequence
  Description of Artificial Sequence: Synthetic oligonucleotide
cuauuggaguagucacgua

SEQ ID NO: 862661 - RNA, 19 nt, Artificial Sequence
  Description of Artificial Sequence: Synthetic oligonucleotide
gaauaugaguucagcucuu

SEQ ID NO: 862662 - RNA, 19 nt, Artificial Sequence
  Description of Artificial Sequence: Synthetic oligonucleotide
aucaguccauguagaugga

SEQ ID NO: 862663 - RNA, 19 nt, Artificial Sequence
  Description of Artificial Sequence: Synthetic oligonucleotide
accuuacaaggaaggcaga

SEQ ID NO: 862664 - RNA, 19 nt, Artificial Sequence
  Description of Artificial Sequence: Synthetic oligonucleotide
gccgcgaccccaguaccgg

SEQ ID NO: 862665 - RNA, 19 nt, Artificial Sequence
  Description of Artificial Sequence: Synthetic oligonucleotide
cuacgcaguugaggacaag

SEQ ID NO: 862666 - RNA, 19 nt, Artificial Sequence
  Description of Artificial Sequence: Synthetic oligonucleotide
gcuccgucgccaugacgag

SEQ ID NO: 862667 - RNA, 19 nt, Artificial Sequence
  Description of Artificial Sequence: Synthetic oligonucleotide
cagcagucaaaguaccguu

SEQ ID NO: 862668 - RNA, 19 nt, Artificial Sequence
  Description of Artificial Sequence: Synthetic oligonucleotide
gagcugcuaaugacacuaa

SEQ ID NO: 862669 - RNA, 19 nt, Artificial Sequence
  Description of Artificial Sequence: Synthetic oligonucleotide
acacaaccccucacauccu

SEQ ID NO: 862670 - RNA, 19 nt, Artificial Sequence
  Description of Artificial Sequence: Synthetic oligonucleotide
cgagcugcuaaugacacua

SEQ ID NO: 862671 - RNA, 19 nt, Artificial Sequence
  Description of Artificial Sequence: Synthetic oligonucleotide
ucccaccguuacguaugca

SEQ ID NO: 862672 - RNA, 19 nt, Artificial Sequence
  Description of Artificial Sequence: Synthetic oligonucleotide
uccgaccuuccaguucauu

SEQ ID NO: 862673 - RNA, 19 nt, Artificial Sequence
  Description of Artificial Sequence: Synthetic oligonucleotide
ugccucccaccguuacgua

SEQ ID NO: 862674 - RNA, 19 nt, Artificial Sequence
  Description of Artificial Sequence: Synthetic oligonucleotide
cguaaaucgcugacuucca

SEQ ID NO: 862675 - RNA, 19 nt, Artificial Sequence
  Description of Artificial Sequence: Synthetic oligonucleotide
guacuccguaguguucuua

SEQ ID NO: 862676 - RNA, 19 nt, Artificial Sequence
  Description of Artificial Sequence: Synthetic oligonucleotide
gcgccgaacaccaccaggu

SEQ ID NO: 862677 - RNA, 19 nt, Artificial Sequence
  Description of Artificial Sequence: Synthetic oligonucleotide
ccgaccuuccaguucauuu

SEQ ID NO: 862678 - RNA, 19 nt, Artificial Sequence
  Description of Artificial Sequence: Synthetic oligonucleotide
ccuacgcaguugaggacaa

SEQ ID NO: 862679 - RNA, 19 nt, Artificial Sequence
  Description of Artificial Sequence: Synthetic oligonucleotide
ccacugcuuccaaugauau

SEQ ID NO: 862680 - RNA, 19 nt, Artificial Sequence
  Description of Artificial Sequence: Synthetic oligonucleotide
cccaacuucagacgacagu

SEQ ID NO: 862681 - RNA, 19 nt, Artificial Sequence
  Description of Artificial Sequence: Synthetic oligonucleotide
ccgcgaccccaguaccggg

SEQ ID NO: 862682 - RNA, 19 nt, Artificial Sequence
  Description of Artificial Sequence: Synthetic oligonucleotide
guaccgggcgccgcagcaa

SEQ ID NO: 862683 - RNA, 19 nt, Artificial Sequence
  Description of Artificial Sequence: Synthetic oligonucleotide
cgagccccaucacuaagga

SEQ ID NO: 862684 - RNA, 19 nt, Artificial Sequence
  Description of Artificial Sequence: Synthetic oligonucleotide
ggggacuccuguaaauuuu

SEQ ID NO: 862685 - RNA, 19 nt, Artificial Sequence
  Description of Artificial Sequence: Synthetic oligonucleotide
caccgcgccugcgccucag

SEQ ID NO: 862686 - RNA, 19 nt, Artificial Sequence
  Description of Artificial Sequence: Synthetic oligonucleotide
cccaguaccgggcgccgca

SEQ ID NO: 862687 - RNA, 19 nt, Artificial Sequence
  Description of Artificial Sequence: Synthetic oligonucleotide
acuggccggugaagccaga

SEQ ID NO: 862688 - RNA, 19 nt, Artificial Sequence
  Description of Artificial Sequence: Synthetic oligonucleotide
ccguuacguaugcagcaua

SEQ ID NO: 862689 - RNA, 19 nt, Artificial Sequence
  Description of Artificial Sequence: Synthetic oligonucleotide
cacggcaggcgggagcccu

SEQ ID NO: 862690 - RNA, 19 nt, Artificial Sequence
  Description of Artificial Sequence: Synthetic oligonucleotide
cgauaagguccuacgcagu

SEQ ID NO: 862691 - RNA, 19 nt, Artificial Sequence
  Description of Artificial Sequence: Synthetic oligonucleotide
gggccgccuucuccagcac

SEQ ID NO: 862692 - RNA, 19 nt, Artificial Sequence
  Description of Artificial Sequence: Synthetic oligonucleotide
cgcaugcauuaguuccaga

SEQ ID NO: 862693 - RNA, 19 nt, Artificial Sequence
  Description of Artificial Sequence: Synthetic oligonucleotide
ccccaguaccgggcgccgc

SEQ ID NO: 862694 - RNA, 19 nt, Artificial Sequence
  Description of Artificial Sequence: Synthetic oligonucleotide
cggcccgccacggcccacg

SEQ ID NO: 862695 - RNA, 19 nt, Artificial Sequence
  Description of Artificial Sequence: Synthetic oligonucleotide
ccgucacgaacuggccggu

SEQ ID NO: 862696 - RNA, 19 nt, Artificial Sequence
  Description of Artificial Sequence: Synthetic oligonucleotide
ccgcagcaaccgccgcugu

SEQ ID NO: 862697 - RNA, 19 nt, Artificial Sequence
  Description of Artificial Sequence: Synthetic oligonucleotide
auuguacuggguuagaacc

SEQ ID NO: 862698 - RNA, 19 nt, Artificial Sequence
  Description of Artificial Sequence: Synthetic oligonucleotide
ugugauaacauguguaugg

SEQ ID NO: 862699 - RNA, 19 nt, Artificial Sequence
  Description of Artificial Sequence: Synthetic oligonucleotide
auagcgaccacauucuucc

SEQ ID NO: 862700 - RNA, 19 nt, Artificial Sequence
  Description of Artificial Sequence: Synthetic oligonucleotide
aaauaauugugguauagca

SEQ ID NO: 862701 - RNA, 19 nt, Artificial Sequence
  Description of Artificial Sequence: Synthetic oligonucleotide
ugagcauaaagcuuuaugc

SEQ ID NO: 862702 - RNA, 19 nt, Artificial Sequence
  Description of Artificial Sequence: Synthetic oligonucleotide
aacagugcacagcugaccc

SEQ ID NO: 862703 - RNA, 19 nt, Artificial Sequence
  Description of Artificial Sequence: Synthetic oligonucleotide
acuaaagauaugcauaauc

SEQ ID NO: 862704 - RNA, 19 nt, Artificial Sequence
  Description of Artificial Sequence: Synthetic oligonucleotide
auugcauuaacauuguacu

SEQ ID NO: 862705 - RNA, 19 nt, Artificial Sequence
  Description of Artificial Sequence: Synthetic oligonucleotide
gauaagagugguuuauugg

SEQ ID NO: 862706 - RNA, 19 nt, Artificial Sequence
  Description of Artificial Sequence: Synthetic oligonucleotide
ugugguauagcacaguaga

SEQ ID NO: 862707 - RNA, 19 nt, Artificial Sequence
  Description of Artificial Sequence: Synthetic oligonucleotide
uccucauuugcauauauag

SEQ ID NO: 862708 - RNA, 19 nt, Artificial Sequence
  Description of Artificial Sequence: Synthetic oligonucleotide
uagagaauguuccagauuc

SEQ ID NO: 862709 - RNA, 19 nt, Artificial Sequence
  Description of Artificial Sequence: Synthetic oligonucleotide
aauaauugugguauagcac

SEQ ID NO: 862710 - RNA, 19 nt, Artificial Sequence
  Description of Artificial Sequence: Synthetic oligonucleotide
uaugcuuuuauaaagugau

SEQ ID NO: 862711 - RNA, 19 nt, Artificial Sequence
  Description of Artificial Sequence: Synthetic oligonucleotide
auaauugugguauagcaca

SEQ ID NO: 862712 - RNA, 19 nt, Artificial Sequence
  Description of Artificial Sequence: Synthetic oligonucleotide
ugaagauacacugugagca

SEQ ID NO: 862713 - RNA, 19 nt, Artificial Sequence
  Description of Artificial Sequence: Synthetic oligonucleotide
uauaaagugaugauacugu

SEQ ID NO: 862714 - RNA, 19 nt, Artificial Sequence
  Description of Artificial Sequence: Synthetic oligonucleotide
ucaaagagaauuuauucac

SEQ ID NO: 862715 - RNA, 19 nt, Artificial Sequence
  Description of Artificial Sequence: Synthetic oligonucleotide
uuaauguaugcuuuuauaa

SEQ ID NO: 862716 - RNA, 19 nt, Artificial Sequence
  Description of Artificial Sequence: Synthetic oligonucleotide
auuaugugcuuucaggcuc

SEQ ID NO: 862717 - RNA, 19 nt, Artificial Sequence
  Description of Artificial Sequence: Synthetic oligonucleotide
cuuugaauaacauugaaua

SEQ ID NO: 862718 - RNA, 19 nt, Artificial Sequence
  Description of Artificial Sequence: Synthetic oligonucleotide
ugauuaugugcuuucaggc

SEQ ID NO: 862719 - RNA, 19 nt, Artificial Sequence
  Description of Artificial Sequence: Synthetic oligonucleotide
acuguauuccuccagccac

SEQ ID NO: 862720 - RNA, 19 nt, Artificial Sequence
  Description of Artificial Sequence: Synthetic oligonucleotide
gaucaaagagaauuuauuc

SEQ ID NO: 862721 - RNA, 19 nt, Artificial Sequence
  Description of Artificial Sequence: Synthetic oligonucleotide
uccgguacaagucaggcug

SEQ ID NO: 862722 - RNA, 19 nt, Artificial Sequence
  Description of Artificial Sequence: Synthetic oligonucleotide
aucaaagagaauuuauuca

SEQ ID NO: 862723 - RNA, 19 nt, Artificial Sequence
  Description of Artificial Sequence: Synthetic oligonucleotide
cuaaagauaugcauaauca

SEQ ID NO: 862724 - RNA, 19 nt, Artificial Sequence
  Description of Artificial Sequence: Synthetic oligonucleotide
agugagagcuaccaggagg

SEQ ID NO: 862725 - RNA, 19 nt, Artificial Sequence
  Description of Artificial Sequence: Synthetic oligonucleotide
cauugcauuaacauuguac

SEQ ID NO: 862726 - RNA, 19 nt, Artificial Sequence
  Description of Artificial Sequence: Synthetic oligonucleotide
acugaagauacacugugag

SEQ ID NO: 862727 - RNA, 19 nt, Artificial Sequence
  Description of Artificial Sequence: Synthetic oligonucleotide
ugacauacauuaacgauac

SEQ ID NO: 862728 - RNA, 19 nt, Artificial Sequence
  Description of Artificial Sequence: Synthetic oligonucleotide
uuugaauaacauugaauac

SEQ ID NO: 862729 - RNA, 19 nt, Artificial Sequence
  Description of Artificial Sequence: Synthetic oligonucleotide
gugauuaugugcuuucagg

SEQ ID NO: 862730 - RNA, 19 nt, Artificial Sequence
  Description of Artificial Sequence: Synthetic oligonucleotide
uuugcauauauagauuugc

SEQ ID NO: 862731 - RNA, 19 nt, Artificial Sequence
  Description of Artificial Sequence: Synthetic oligonucleotide
uacauuaacgauacuugug

SEQ ID NO: 862732 - RNA, 19 nt, Artificial Sequence
  Description of Artificial Sequence: Synthetic oligonucleotide
ugcauauauagauuugcug

SEQ ID NO: 862733 - RNA, 19 nt, Artificial Sequence
  Description of Artificial Sequence: Synthetic oligonucleotide
uauagauuugcugugacau

SEQ ID NO: 862734 - RNA, 19 nt, Artificial Sequence
  Description of Artificial Sequence: Synthetic oligonucleotide
cuaucauggacaaaagcug

SEQ ID NO: 862735 - RNA, 19 nt, Artificial Sequence
  Description of Artificial Sequence: Synthetic oligonucleotide
auucccaccuaucauggac

SEQ ID NO: 862736 - RNA, 19 nt, Artificial Sequence
  Description of Artificial Sequence: Synthetic oligonucleotide
uguaugcuuuuauaaagug

SEQ ID NO: 862737 - RNA, 19 nt, Artificial Sequence
  Description of Artificial Sequence: Synthetic oligonucleotide
ugaaauaauugugguauag

SEQ ID NO: 862738 - RNA, 19 nt, Artificial Sequence
  Description of Artificial Sequence: Synthetic oligonucleotide
ucuuugaauaacauugaau

SEQ ID NO: 862739 - RNA, 19 nt, Artificial Sequence
  Description of Artificial Sequence: Synthetic oligonucleotide
auuaacauuguacuggguu

SEQ ID NO: 862740 - RNA, 19 nt, Artificial Sequence
  Description of Artificial Sequence: Synthetic oligonucleotide
caggauacgagcaucuccg

SEQ ID NO: 862741 - RNA, 19 nt, Artificial Sequence
  Description of Artificial Sequence: Synthetic oligonucleotide
accuaucauggacaaaagc

SEQ ID NO: 862742 - RNA, 19 nt, Artificial Sequence
  Description of Artificial Sequence: Synthetic oligonucleotide
ugugauuaugugcuuucag

SEQ ID NO: 862743 - RNA, 19 nt, Artificial Sequence
  Description of Artificial Sequence: Synthetic oligonucleotide
gaauacaaaggcuuaccac

SEQ ID NO: 862744 - RNA, 19 nt, Artificial Sequence
  Description of Artificial Sequence: Synthetic oligonucleotide
uggguuagaaccacuauuc

SEQ ID NO: 862745 - RNA, 19 nt, Artificial Sequence
  Description of Artificial Sequence: Synthetic oligonucleotide
guagcugaugcuuuggccc

SEQ ID NO: 862746 - RNA, 19 nt, Artificial Sequence
  Description of Artificial Sequence: Synthetic oligonucleotide
caaucugcaacugaauucc

SEQ ID NO: 862747 - RNA, 19 nt, Artificial Sequence
  Description of Artificial Sequence: Synthetic oligonucleotide
ucaaucugcaacugaauuc

SEQ ID NO: 862748 - RNA, 19 nt, Artificial Sequence
  Description of Artificial Sequence: Synthetic oligonucleotide
ugugacauacauuaacgau

SEQ ID NO: 862749 - RNA, 19 nt, Artificial Sequence
  Description of Artificial Sequence: Synthetic oligonucleotide
aacccauaagggcagugag

SEQ ID NO: 862750 - RNA, 19 nt, Artificial Sequence
  Description of Artificial Sequence: Synthetic oligonucleotide
uaucauggacaaaagcugu

SEQ ID NO: 862751 - RNA, 19 nt, Artificial Sequence
  Description of Artificial Sequence: Synthetic oligonucleotide
guaugugugcauuauggug

SEQ ID NO: 862752 - RNA, 19 nt, Artificial Sequence
  Description of Artificial Sequence: Synthetic oligonucleotide
uauauagauuugcugugac

SEQ ID NO: 862753 - RNA, 19 nt, Artificial Sequence
  Description of Artificial Sequence: Synthetic oligonucleotide
acugaauucccaccuauca

SEQ ID NO: 862754 - RNA, 19 nt, Artificial Sequence
  Description of Artificial Sequence: Synthetic oligonucleotide
gauacuacuguuucuacua

SEQ ID NO: 862755 - RNA, 19 nt, Artificial Sequence
  Description of Artificial Sequence: Synthetic oligonucleotide
ugcgacguagauccggacg

SEQ ID NO: 862756 - RNA, 19 nt, Artificial Sequence
  Description of Artificial Sequence: Synthetic oligonucleotide
auuacuccgguacaaguca

SEQ ID NO: 862757 - RNA, 19 nt, Artificial Sequence
  Description of Artificial Sequence: Synthetic oligonucleotide
uauugguccauggacuagg

SEQ ID NO: 862758 - RNA, 19 nt, Artificial Sequence
  Description of Artificial Sequence: Synthetic oligonucleotide
cuuuugacaacuuccccac

SEQ ID NO: 862759 - RNA, 19 nt, Artificial Sequence
  Description of Artificial Sequence: Synthetic oligonucleotide
aacgauacuuguggaauag

SEQ ID NO: 862760 - RNA, 19 nt, Artificial Sequence
  Description of Artificial Sequence: Synthetic oligonucleotide
uauugaucaaagagaauuu

SEQ ID NO: 862761 - RNA, 19 nt, Artificial Sequence
  Description of Artificial Sequence: Synthetic oligonucleotide
uggacuaggcuuaauguau

SEQ ID NO: 862762 - RNA, 19 nt, Artificial Sequence
  Description of Artificial Sequence: Synthetic oligonucleotide
gaauucccaccuaucaugg

SEQ ID NO: 862763 - RNA, 19 nt, Artificial Sequence
  Description of Artificial Sequence: Synthetic oligonucleotide
uuaacgauacuuguggaau

SEQ ID NO: 862764 - RNA, 19 nt, Artificial Sequence
  Description of Artificial Sequence: Synthetic oligonucleotide
uagauuugcugugacauac

SEQ ID NO: 862765 - RNA, 19 nt, Artificial Sequence
  Description of Artificial Sequence: Synthetic oligonucleotide
cucaccuucgccacuauug

SEQ ID NO: 862766 - RNA, 19 nt, Artificial Sequence
  Description of Artificial Sequence: Synthetic oligonucleotide
auuucauugcauuaacauu

SEQ ID NO: 862767 - RNA, 19 nt, Artificial Sequence
  Description of Artificial Sequence: Synthetic oligonucleotide
aagugaugauacuguacug

SEQ ID NO: 862768 - RNA, 19 nt, Artificial Sequence
  Description of Artificial Sequence: Synthetic oligonucleotide
gauaacauguguauggugu

SEQ ID NO: 862769 - RNA, 19 nt, Artificial Sequence
  Description of Artificial Sequence: Synthetic oligonucleotide
ugucccacauucuccaugc

SEQ ID NO: 862770 - RNA, 19 nt, Artificial Sequence
  Description of Artificial Sequence: Synthetic oligonucleotide
agaaacuguauuccuccag

SEQ ID NO: 862771 - RNA, 19 nt, Artificial Sequence
  Description of Artificial Sequence: Synthetic oligonucleotide
ugcauuauggugugugugu

SEQ ID NO: 862772 - RNA, 19 nt, Artificial Sequence
  Description of Artificial Sequence: Synthetic oligonucleotide
aaaugaauauugaaauaau

SEQ ID NO: 862773 - RNA, 19 nt, Artificial Sequence
  Description of Artificial Sequence: Synthetic oligonucleotide
ugguguguguguaugugug

SEQ ID NO: 862774 - RNA, 19 nt, Artificial Sequence
  Description of Artificial Sequence: Synthetic oligonucleotide
cuacuagcccuuuugacuc

SEQ ID NO: 862775 - RNA, 19 nt, Artificial Sequence
  Description of Artificial Sequence: Synthetic oligonucleotide
acuaugguacagauccucc

SEQ ID NO: 862776 - RNA, 19 nt, Artificial Sequence
  Description of Artificial Sequence: Synthetic oligonucleotide
auuaacgauacuuguggaa

SEQ ID NO: 862777 - RNA, 19 nt, Artificial Sequence
  Description of Artificial Sequence: Synthetic oligonucleotide
ugauacuguacugaugacu

SEQ ID NO: 862778 - RNA, 19 nt, Artificial Sequence
  Description of Artificial Sequence: Synthetic oligonucleotide
gaaacacccaauguccugc

SEQ ID NO: 862779 - RNA, 19 nt, Artificial Sequence
  Description of Artificial Sequence: Synthetic oligonucleotide
uagugugauaacaugugua

SEQ ID NO: 862780 - RNA, 19 nt, Artificial Sequence
  Description of Artificial Sequence: Synthetic oligonucleotide
uugcauuaacauuguacug

SEQ ID NO: 862781 - RNA, 19 nt, Artificial Sequence
  Description of Artificial Sequence: Synthetic oligonucleotide
uauugcgacguagauccgg

SEQ ID NO: 862782 - RNA, 19 nt, Artificial Sequence
  Description of Artificial Sequence: Synthetic oligonucleotide
cauuguacuggguuagaac

SEQ ID NO: 862783 - RNA, 19 nt, Artificial Sequence
  Description of Artificial Sequence: Synthetic oligonucleotide
ucaccuucgccacuauugc

SEQ ID NO: 862784 - RNA, 19 nt, Artificial Sequence
  Description of Artificial Sequence: Synthetic oligonucleotide
ugaugauacuguacugaug

SEQ ID NO: 862785 - RNA, 19 nt, Artificial Sequence
  Description of Artificial Sequence: Synthetic oligonucleotide
uuuauugguccauggacua

SEQ ID NO: 862786 - RNA, 19 nt, Artificial Sequence
  Description of Artificial Sequence: Synthetic oligonucleotide
uccauugucccacauucuc

SEQ ID NO: 862787 - RNA, 19 nt, Artificial Sequence
  Description of Artificial Sequence: Synthetic oligonucleotide
uguagccacaagucugccg

SEQ ID NO: 862788 - RNA, 19 nt, Artificial Sequence
  Description of Artificial Sequence: Synthetic oligonucleotide
aguuuuagccuuuggucca

SEQ ID NO: 862789 - RNA, 19 nt, Artificial Sequence
  Description of Artificial Sequence: Synthetic oligonucleotide
gauacgagcaucuccggaa

SEQ ID NO: 862790 - RNA, 19 nt, Artificial Sequence
  Description of Artificial Sequence: Synthetic oligonucleotide
guagggauagugcuucugc

SEQ ID NO: 862791 - RNA, 19 nt, Artificial Sequence
  Description of Artificial Sequence: Synthetic oligonucleotide
agugaugauacuguacuga

SEQ ID NO: 862792 - RNA, 19 nt, Artificial Sequence
  Description of Artificial Sequence: Synthetic oligonucleotide
ugguccauggacuaggcuu

SEQ ID NO: 862793 - RNA, 19 nt, Artificial Sequence
  Description of Artificial Sequence: Synthetic oligonucleotide
uaccacuaaagauaugcau

SEQ ID NO: 862794 - RNA, 19 nt, Artificial Sequence
  Description of Artificial Sequence: Synthetic oligonucleotide
auauagauuugcugugaca

SEQ ID NO: 862795 - RNA, 19 nt, Artificial Sequence
  Description of Artificial Sequence: Synthetic oligonucleotide
uuaugugcuuucaggcuca

SEQ ID NO: 862796 - RNA, 19 nt, Artificial Sequence
  Description of Artificial Sequence: Synthetic oligonucleotide
uagaaacacccaauguccu

SEQ ID NO: 862797 - RNA, 19 nt, Artificial Sequence
  Description of Artificial Sequence: Synthetic oligonucleotide
agcagaagcuacucagauc

SEQ ID NO: 862798 - RNA, 19 nt, Artificial Sequence
  Description of Artificial Sequence: Synthetic oligonucleotide
cacuauuccaccuugugaa

SEQ ID NO: 862799 - RNA, 19 nt, Artificial Sequence
  Description of Artificial Sequence: Synthetic oligonucleotide
agauuacuccgguacaagu

SEQ ID NO: 862800 - RNA, 19 nt, Artificial Sequence
  Description of Artificial Sequence: Synthetic oligonucleotide
uauuccaccuugugaaagu

SEQ ID NO: 862801 - RNA, 19 nt, Artificial Sequence
  Description of Artificial Sequence: Synthetic oligonucleotide
cacaaggauauuacagcag

SEQ ID NO: 862802 - RNA, 19 nt, Artificial Sequence
  Description of Artificial Sequence: Synthetic oligonucleotide
auccggacgacucuggaga

SEQ ID NO: 862803 - RNA, 19 nt, Artificial Sequence
  Description of Artificial Sequence: Synthetic oligonucleotide
aguagugugauaacaugug

SEQ ID NO: 862804 - RNA, 19 nt, Artificial Sequence
  Description of Artificial Sequence: Synthetic oligonucleotide
acuccgguacaagucaggc

SEQ ID NO: 862805 - RNA, 19 nt, Artificial Sequence
  Description of Artificial Sequence: Synthetic oligonucleotide
gauaugcauaaucacugaa

SEQ ID NO: 862806 - RNA, 19 nt, Artificial Sequence
  Description of Artificial Sequence: Synthetic oligonucleotide
caaugaggcucauacuuug

SEQ ID NO: 862807 - RNA, 19 nt, Artificial Sequence
  Description of Artificial Sequence: Synthetic oligonucleotide
ugcuuccuaagauacuacu

SEQ ID NO: 862808 - RNA, 19 nt, Artificial Sequence
  Description of Artificial Sequence: Synthetic oligonucleotide
auacugauaagagugguuu

SEQ ID NO: 862809 - RNA, 19 nt, Artificial Sequence
  Description of Artificial Sequence: Synthetic oligonucleotide
aacugaauucccaccuauc

SEQ ID NO: 862810 - RNA, 19 nt, Artificial Sequence
  Description of Artificial Sequence: Synthetic oligonucleotide
agagcuaccaggaggagca

SEQ ID NO: 862811 - RNA, 19 nt, Artificial Sequence
  Description of Artificial Sequence: Synthetic oligonucleotide
gauuacuccgguacaaguc

SEQ ID NO: 862812 - RNA, 19 nt, Artificial Sequence
  Description of Artificial Sequence: Synthetic oligonucleotide
agaaacacccaauguccug

SEQ ID NO: 862813 - RNA, 19 nt, Artificial Sequence
  Description of Artificial Sequence: Synthetic oligonucleotide
uuacuccgguacaagucag

SEQ ID NO: 862814 - RNA, 19 nt, Artificial Sequence
  Description of Artificial Sequence: Synthetic oligonucleotide
gcauauauagauuugcugu

SEQ ID NO: 862815 - RNA, 19 nt, Artificial Sequence
  Description of Artificial Sequence: Synthetic oligonucleotide
cagccaauuucacacuugc

SEQ ID NO: 862816 - RNA, 19 nt, Artificial Sequence
  Description of Artificial Sequence: Synthetic oligonucleotide
aucaacaagccucccagaa

SEQ ID NO: 862817 - RNA, 19 nt, Artificial Sequence
  Description of Artificial Sequence: Synthetic oligonucleotide
gaaccacuauuccaccuug

SEQ ID NO: 862818 - RNA, 19 nt, Artificial Sequence
  Description of Artificial Sequence: Synthetic oligonucleotide
ugguauagcacaguagaau

SEQ ID NO: 862819 - RNA, 19 nt, Artificial Sequence
  Description of Artificial Sequence: Synthetic oligonucleotide
caugugauuaugugcuuuc

SEQ ID NO: 862820 - RNA, 19 nt, Artificial Sequence
  Description of Artificial Sequence: Synthetic oligonucleotide
uucgccacuauugcgacgu

SEQ ID NO: 862821 - RNA, 19 nt, Artificial Sequence
  Description of Artificial Sequence: Synthetic oligonucleotide
gcauaaagcuuuaugcagg

SEQ ID NO: 862822 - RNA, 19 nt, Artificial Sequence
  Description of Artificial Sequence: Synthetic oligonucleotide
uuuggccccuucaaucccc

SEQ ID NO: 862823 - RNA, 19 nt, Artificial Sequence
  Description of Artificial Sequence: Synthetic oligonucleotide
uccuaagauacuacuguuu

SEQ ID NO: 862824 - RNA, 19 nt, Artificial Sequence
  Description of Artificial Sequence: Synthetic oligonucleotide
cugccgacucucaucaugc

SEQ ID NO: 862825 - RNA, 19 nt, Artificial Sequence
  Description of Artificial Sequence: Synthetic oligonucleotide
ccaauaauuggagaaagac

SEQ ID NO: 862826 - RNA, 19 nt, Artificial Sequence
  Description of Artificial Sequence: Synthetic oligonucleotide
gauccggacgacucuggag

SEQ ID NO: 862827 - RNA, 19 nt, Artificial Sequence
  Description of Artificial Sequence: Synthetic oligonucleotide
uacuccgguacaagucagg

SEQ ID NO: 862828 - RNA, 19 nt, Artificial Sequence
  Description of Artificial Sequence: Synthetic oligonucleotide
gacgacucuggagagccgg

SEQ ID NO: 862829 - RNA, 19 nt, Artificial Sequence
  Description of Artificial Sequence: Synthetic oligonucleotide
accacuauuccaccuugug

SEQ ID NO: 862830 - RNA, 19 nt, Artificial Sequence
  Description of Artificial Sequence: Synthetic oligonucleotide
gauuaugugcuuucaggcu

SEQ ID NO: 862831 - RNA, 19 nt, Artificial Sequence
  Description of Artificial Sequence: Synthetic oligonucleotide
gauacuuguggaauagaaa

SEQ ID NO: 862832 - RNA, 19 nt, Artificial Sequence
  Description of Artificial Sequence: Synthetic oligonucleotide
cauagcgaccacauucuuc

SEQ ID NO: 862833 - RNA, 19 nt, Artificial Sequence
  Description of Artificial Sequence: Synthetic oligonucleotide
guaugcuuuuauaaaguga

SEQ ID NO: 862834 - RNA, 19 nt, Artificial Sequence
  Description of Artificial Sequence: Synthetic oligonucleotide
gguuagaaccacuauucca

SEQ ID NO: 862835 - RNA, 19 nt, Artificial Sequence
  Description of Artificial Sequence: Synthetic oligonucleotide
gugacauacauuaacgaua

SEQ ID NO: 862836 - RNA, 19 nt, Artificial Sequence
  Description of Artificial Sequence: Synthetic oligonucleotide
cucagaucacuacuguguc

SEQ ID NO: 862837 - RNA, 19 nt, Artificial Sequence
  Description of Artificial Sequence: Synthetic oligonucleotide
ccuaagauacuacuguuuc

SEQ ID NO: 862838 - RNA, 19 nt, Artificial Sequence
  Description of Artificial Sequence: Synthetic oligonucleotide
acugauaagagugguuuau

SEQ ID NO: 862839 - RNA, 19 nt, Artificial Sequence
  Description of Artificial Sequence: Synthetic oligonucleotide
gaucacuacugugucuuug

SEQ ID NO: 862840 - RNA, 19 nt, Artificial Sequence
  Description of Artificial Sequence: Synthetic oligonucleotide
auugaucaaagagaauuua

SEQ ID NO: 862841 - RNA, 19 nt, Artificial Sequence
  Description of Artificial Sequence: Synthetic oligonucleotide
uuccuaagauacuacuguu

SEQ ID NO: 862842 - RNA, 19 nt, Artificial Sequence
  Description of Artificial Sequence: Synthetic oligonucleotide
cugcaacugaauucccacc

SEQ ID NO: 862843 - RNA, 19 nt, Artificial Sequence
  Description of Artificial Sequence: Synthetic oligonucleotide
uaacgauacuuguggaaua

SEQ ID NO: 862844 - RNA, 19 nt, Artificial Sequence
  Description of Artificial Sequence: Synthetic oligonucleotide
uuugacuccccuaguccuc

SEQ ID NO: 862845 - RNA, 19 nt, Artificial Sequence
  Description of Artificial Sequence: Synthetic oligonucleotide
cugugacauacauuaacga

SEQ ID NO: 862846 - RNA, 19 nt, Artificial Sequence
  Description of Artificial Sequence: Synthetic oligonucleotide
cuucagggaaugucugcag

SEQ ID NO: 862847 - RNA, 19 nt, Artificial Sequence
  Description of Artificial Sequence: Synthetic oligonucleotide
ucccuaacgggucccgggc

SEQ ID NO: 862848 - RNA, 19 nt, Artificial Sequence
  Description of Artificial Sequence: Synthetic oligonucleotide
ugucacuaugguacagauc

SEQ ID NO: 862849 - RNA, 19 nt, Artificial Sequence
  Description of Artificial Sequence: Synthetic oligonucleotide
cugagauccccagagccag

SEQ ID NO: 862850 - RNA, 19 nt, Artificial Sequence
  Description of Artificial Sequence: Synthetic oligonucleotide
aggacccgcucggagagcc

SEQ ID NO: 862851 - RNA, 19 nt, Artificial Sequence
  Description of Artificial Sequence: Synthetic oligonucleotide
aggauacgagcaucuccgg

SEQ ID NO: 862852 - RNA, 19 nt, Artificial Sequence
  Description of Artificial Sequence: Synthetic oligonucleotide
cuccggaaagugccaaagg

SEQ ID NO: 862853 - RNA, 19 nt, Artificial Sequence
  Description of Artificial Sequence: Synthetic oligonucleotide
acguagauccggacgacuc

SEQ ID NO: 862854 - RNA, 19 nt, Artificial Sequence
  Description of Artificial Sequence: Synthetic oligonucleotide
gaagcaagccagccacgug

SEQ ID NO: 862855 - RNA, 19 nt, Artificial Sequence
  Description of Artificial Sequence: Synthetic oligonucleotide
uacugauaagagugguuua

SEQ ID NO: 862856 - RNA, 19 nt, Artificial Sequence
  Description of Artificial Sequence: Synthetic oligonucleotide
gaggcucauacuuuguagu

SEQ ID NO: 862857 - RNA, 19 nt, Artificial Sequence
  Description of Artificial Sequence: Synthetic oligonucleotide
guuuauugguccauggacu

SEQ ID NO: 862858 - RNA, 19 nt, Artificial Sequence
  Description of Artificial Sequence: Synthetic oligonucleotide
cauucugcgcuggggaugc

SEQ ID NO: 862859 - RNA, 19 nt, Artificial Sequence
  Description of Artificial Sequence: Synthetic oligonucleotide
cuuuggccccuucaauccc

SEQ ID NO: 862860 - RNA, 19 nt, Artificial Sequence
  Description of Artificial Sequence: Synthetic oligonucleotide
acuggguuagaaccacuau

SEQ ID NO: 862861 - RNA, 19 nt, Artificial Sequence
  Description of Artificial Sequence: Synthetic oligonucleotide
cauggacuaggcuuaaugu

SEQ ID NO: 862862 - RNA, 19 nt, Artificial Sequence
  Description of Artificial Sequence: Synthetic oligonucleotide
aagauacacugugagcaua

SEQ ID NO: 862863 - RNA, 19 nt, Artificial Sequence
  Description of Artificial Sequence: Synthetic oligonucleotide
auagauuugcugugacaua

SEQ ID NO: 862864 - RNA, 19 nt, Artificial Sequence
  Description of Artificial Sequence: Synthetic oligonucleotide
caccuucgccacuauugcg

SEQ ID NO: 862865 - RNA, 19 nt, Artificial Sequence
  Description of Artificial Sequence: Synthetic oligonucleotide
gucccuaacgggucccggg

SEQ ID NO: 862866 - RNA, 19 nt, Artificial Sequence
  Description of Artificial Sequence: Synthetic oligonucleotide
ggaucaacagugcacagcu

SEQ ID NO: 862867 - RNA, 19 nt, Artificial Sequence
  Description of Artificial Sequence: Synthetic oligonucleotide
ccuccauugucccacauuc

SEQ ID NO: 862868 - RNA, 19 nt, Artificial Sequence
  Description of Artificial Sequence: Synthetic oligonucleotide
uuccuacuguccuggagau

SEQ ID NO: 862869 - RNA, 19 nt, Artificial Sequence
  Description of Artificial Sequence: Synthetic oligonucleotide
acuauuccaccuugugaaa

SEQ ID NO: 862870 - RNA, 19 nt, Artificial Sequence
  Description of Artificial Sequence: Synthetic oligonucleotide
uccggacgacucuggagag

SEQ ID NO: 862871 - RNA, 19 nt, Artificial Sequence
  Description of Artificial Sequence: Synthetic oligonucleotide
agagccgggguggaggguc

SEQ ID NO: 862872 - RNA, 19 nt, Artificial Sequence
  Description of Artificial Sequence: Synthetic oligonucleotide
caguagugugauaacaugu

SEQ ID NO: 862873 - RNA, 19 nt, Artificial Sequence
  Description of Artificial Sequence: Synthetic oligonucleotide
cagauuacuccgguacaag

SEQ ID NO: 862874 - RNA, 19 nt, Artificial Sequence
  Description of Artificial Sequence: Synthetic oligonucleotide
gauuugcugugacauacau

SEQ ID NO: 862875 - RNA, 19 nt, Artificial Sequence
  Description of Artificial Sequence: Synthetic oligonucleotide
cacuauugcgacguagauc

SEQ ID NO: 862876 - RNA, 19 nt, Artificial Sequence
  Description of Artificial Sequence: Synthetic oligonucleotide
guagauccggacgacucug

SEQ ID NO: 862877 - RNA, 19 nt, Artificial Sequence
  Description of Artificial Sequence: Synthetic oligonucleotide
augcaaugaggcucauacu

SEQ ID NO: 862878 - RNA, 19 nt, Artificial Sequence
  Description of Artificial Sequence: Synthetic oligonucleotide
auacgagcaucuccggaaa

SEQ ID NO: 862879 - RNA, 19 nt, Artificial Sequence
  Description of Artificial Sequence: Synthetic oligonucleotide
gugcaugugauuaugugcu

SEQ ID NO: 862880 - RNA, 19 nt, Artificial Sequence
  Description of Artificial Sequence: Synthetic oligonucleotide
uugguccauggacuaggcu

SEQ ID NO: 862881 - RNA, 19 nt, Artificial Sequence
  Description of Artificial Sequence: Synthetic oligonucleotide
agucugccggacuuccuca

SEQ ID NO: 862882 - RNA, 19 nt, Artificial Sequence
  Description of Artificial Sequence: Synthetic oligonucleotide
guagugugauaacaugugu

SEQ ID NO: 862883 - RNA, 19 nt, Artificial Sequence
  Description of Artificial Sequence: Synthetic oligonucleotide
ggucucaguagggauagug

SEQ ID NO: 862884 - RNA, 19 nt, Artificial Sequence
  Description of Artificial Sequence: Synthetic oligonucleotide
aacgggucccgggcgcagc

SEQ ID NO: 862885 - RNA, 19 nt, Artificial Sequence
  Description of Artificial Sequence: Synthetic oligonucleotide
gcuuccuaagauacuacug

SEQ ID NO: 862886 - RNA, 19 nt, Artificial Sequence
  Description of Artificial Sequence: Synthetic oligonucleotide
gcccagauuacuccgguac

SEQ ID NO: 862887 - RNA, 19 nt, Artificial Sequence
  Description of Artificial Sequence: Synthetic oligonucleotide
gcgaccacauucuuccacc

SEQ ID NO: 862888 - RNA, 19 nt, Artificial Sequence
  Description of Artificial Sequence: Synthetic oligonucleotide
agauacacugugagcauaa

SEQ ID NO: 862889 - RNA, 19 nt, Artificial Sequence
  Description of Artificial Sequence: Synthetic oligonucleotide
guauagcacaguagaauaa

SEQ ID NO: 862890 - RNA, 19 nt, Artificial Sequence
  Description of Artificial Sequence: Synthetic oligonucleotide
cuaggcuuaauguaugcuu

SEQ ID NO: 862891 - RNA, 19 nt, Artificial Sequence
  Description of Artificial Sequence: Synthetic oligonucleotide
caaggauauuacagcagaa

SEQ ID NO: 862892 - RNA, 19 nt, Artificial Sequence
  Description of Artificial Sequence: Synthetic oligonucleotide
cuaagauacuacuguuucu

SEQ ID NO: 862893 - RNA, 19 nt, Artificial Sequence
  Description of Artificial Sequence: Synthetic oligonucleotide
cuucgccacuauugcgacg

SEQ ID NO: 862894 - RNA, 19 nt, Artificial Sequence
  Description of Artificial Sequence: Synthetic oligonucleotide
guguguguguaugugugca

SEQ ID NO: 862895 - RNA, 19 nt, Artificial Sequence
  Description of Artificial Sequence: Synthetic oligonucleotide
auugcgacguagauccgga

SEQ ID NO: 862896 - RNA, 19 nt, Artificial Sequence
  Description of Artificial Sequence: Synthetic oligonucleotide
gguguguguguaugugugc

SEQ ID NO: 862897 - RNA, 19 nt, Artificial Sequence
  Description of Artificial Sequence: Synthetic oligonucleotide
agccacaagucugccggac

SEQ ID NO: 862898 - RNA, 19 nt, Artificial Sequence
  Description of Artificial Sequence: Synthetic oligonucleotide
ugucccagccuaaggggua

SEQ ID NO: 862899 - RNA, 19 nt, Artificial Sequence
  Description of Artificial Sequence: Synthetic oligonucleotide
cuauugcgacguagauccg

SEQ ID NO: 862900 - RNA, 19 nt, Artificial Sequence
  Description of Artificial Sequence: Synthetic oligonucleotide
augugauuaugugcuuuca

SEQ ID NO: 862901 - RNA, 19 nt, Artificial Sequence
  Description of Artificial Sequence: Synthetic oligonucleotide
gaagauacacugugagcau

SEQ ID NO: 862902 - RNA, 19 nt, Artificial Sequence
  Description of Artificial Sequence: Synthetic oligonucleotide
caucaugcacaggauacga

SEQ ID NO: 862903 - RNA, 19 nt, Artificial Sequence
  Description of Artificial Sequence: Synthetic oligonucleotide
auacaaaggcuuaccacua

SEQ ID NO: 862904 - RNA, 19 nt, Artificial Sequence
  Description of Artificial Sequence: Synthetic oligonucleotide
uugcugugacauacauuaa

SEQ ID NO: 862905 - RNA, 19 nt, Artificial Sequence
  Description of Artificial Sequence: Synthetic oligonucleotide
uaguaggcccagccaauuu

SEQ ID NO: 862906 - RNA, 19 nt, Artificial Sequence
  Description of Artificial Sequence: Synthetic oligonucleotide
caguacagaagacuguccu

SEQ ID NO: 862907 - RNA, 19 nt, Artificial Sequence
  Description of Artificial Sequence: Synthetic oligonucleotide
ucccgggcgcagcacaacu

SEQ ID NO: 862908 - RNA, 19 nt, Artificial Sequence
  Description of Artificial Sequence: Synthetic oligonucleotide
uaggcccagccaauuucac

SEQ ID NO: 862909 - RNA, 19 nt, Artificial Sequence
  Description of Artificial Sequence: Synthetic oligonucleotide
acagagcuuuucaaauaca

SEQ ID NO: 862910 - RNA, 19 nt, Artificial Sequence
  Description of Artificial Sequence: Synthetic oligonucleotide
aaccacuauuccaccuugu

SEQ ID NO: 862911 - RNA, 19 nt, Artificial Sequence
  Description of Artificial Sequence: Synthetic oligonucleotide
uucugcgcuggggaugccc

SEQ ID NO: 862912 - RNA, 19 nt, Artificial Sequence
  Description of Artificial Sequence: Synthetic oligonucleotide
gcgacguagauccggacga

SEQ ID NO: 862913 - RNA, 19 nt, Artificial Sequence
  Description of Artificial Sequence: Synthetic oligonucleotide
cagugagagcuaccaggag

SEQ ID NO: 862914 - RNA, 19 nt, Artificial Sequence
  Description of Artificial Sequence: Synthetic oligonucleotide
ugcaugugauuaugugcuu

SEQ ID NO: 862915 - RNA, 19 nt, Artificial Sequence
  Description of Artificial Sequence: Synthetic oligonucleotide
ccucauuugcauauauaga

SEQ ID NO: 862916 - RNA, 19 nt, Artificial Sequence
  Description of Artificial Sequence: Synthetic oligonucleotide
ugugagcauaaagcuuuau

SEQ ID NO: 862917 - RNA, 19 nt, Artificial Sequence
  Description of Artificial Sequence: Synthetic oligonucleotide
uaugugcuuucaggcucag

SEQ ID NO: 862918 - RNA, 19 nt, Artificial Sequence
  Description of Artificial Sequence: Synthetic oligonucleotide
cagaagcuacucagaucac

SEQ ID NO: 862919 - RNA, 19 nt, Artificial Sequence
  Description of Artificial Sequence: Synthetic oligonucleotide
acggucccuaacggguccc

SEQ ID NO: 862920 - RNA, 19 nt, Artificial Sequence
  Description of Artificial Sequence: Synthetic oligonucleotide
ggacuaggcuuaauguaug

SEQ ID NO: 862921 - RNA, 19 nt, Artificial Sequence
  Description of Artificial Sequence: Synthetic oligonucleotide
aguaguaggcccagccaau

SEQ ID NO: 862922 - RNA, 19 nt, Artificial Sequence
  Description of Artificial Sequence: Synthetic oligonucleotide
uccaugcuuuugacaacuu

SEQ ID NO: 862923 - RNA, 19 nt, Artificial Sequence
  Description of Artificial Sequence: Synthetic oligonucleotide
gguccguucucuccucagc

SEQ ID NO: 862924 - RNA, 19 nt, Artificial Sequence
  Description of Artificial Sequence: Synthetic oligonucleotide
auaaagcuuuaugcaggau

SEQ ID NO: 862925 - RNA, 19 nt, Artificial Sequence
  Description of Artificial Sequence: Synthetic oligonucleotide
ugccgacucucaucaugca

SEQ ID NO: 862926 - RNA, 19 nt, Artificial Sequence
  Description of Artificial Sequence: Synthetic oligonucleotide
ggagaugagcucugauaca

SEQ ID NO: 862927 - RNA, 19 nt, Artificial Sequence
  Description of Artificial Sequence: Synthetic oligonucleotide
gugauaacauguguauggu

SEQ ID NO: 862928 - RNA, 19 nt, Artificial Sequence
  Description of Artificial Sequence: Synthetic oligonucleotide
gccaucuuucaccaggcaa

SEQ ID NO: 862929 - RNA, 19 nt, Artificial Sequence
  Description of Artificial Sequence: Synthetic oligonucleotide
caacccauaagggcaguga

SEQ ID NO: 862930 - RNA, 19 nt, Artificial Sequence
  Description of Artificial Sequence: Synthetic oligonucleotide
gccccggugcaguaguagg

SEQ ID NO: 862931 - RNA, 19 nt, Artificial Sequence
  Description of Artificial Sequence: Synthetic oligonucleotide
ggauacgagcaucuccgga

SEQ ID NO: 862932 - RNA, 19 nt, Artificial Sequence
  Description of Artificial Sequence: Synthetic oligonucleotide
cuggguuagaaccacuauu

SEQ ID NO: 862933 - RNA, 19 nt, Artificial Sequence
  Description of Artificial Sequence: Synthetic oligonucleotide
uugcgacguagauccggac

SEQ ID NO: 862934 - RNA, 19 nt, Artificial Sequence
  Description of Artificial Sequence: Synthetic oligonucleotide
gugguauagcacaguagaa

SEQ ID NO: 862935 - RNA, 19 nt, Artificial Sequence
  Description of Artificial Sequence: Synthetic oligonucleotide
ggaaggaggcauagcgacc

SEQ ID NO: 862936 - RNA, 19 nt, Artificial Sequence
  Description of Artificial Sequence: Synthetic oligonucleotide
caagucaggcuggaugcca

SEQ ID NO: 862937 - RNA, 19 nt, Artificial Sequence
  Description of Artificial Sequence: Synthetic oligonucleotide
acgacucuggagagccggg

SEQ ID NO: 862938 - RNA, 19 nt, Artificial Sequence
  Description of Artificial Sequence: Synthetic oligonucleotide
cuacucagaucacuacugu

SEQ ID NO: 862939 - RNA, 19 nt, Artificial Sequence
  Description of Artificial Sequence: Synthetic oligonucleotide
uccuacuguccuggagaug

SEQ ID NO: 862940 - RNA, 19 nt, Artificial Sequence
  Description of Artificial Sequence: Synthetic oligonucleotide
gccgacucucaucaugcac

SEQ ID NO: 862941 - RNA, 19 nt, Artificial Sequence
  Description of Artificial Sequence: Synthetic oligonucleotide
cacaggauacgagcaucuc

SEQ ID NO: 862942 - RNA, 19 nt, Artificial Sequence
  Description of Artificial Sequence: Synthetic oligonucleotide
gccacuauugcgacguaga

SEQ ID NO: 862943 - RNA, 19 nt, Artificial Sequence
  Description of Artificial Sequence: Synthetic oligonucleotide
cgauacuuguggaauagaa

SEQ ID NO: 862944 - RNA, 19 nt, Artificial Sequence
  Description of Artificial Sequence: Synthetic oligonucleotide
cugucacuaugguacagau

SEQ ID NO: 862945 - RNA, 19 nt, Artificial Sequence
  Description of Artificial Sequence: Synthetic oligonucleotide
ccgguacaagucaggcugg

SEQ ID NO: 862946 - RNA, 19 nt, Artificial Sequence
  Description of Artificial Sequence: Synthetic oligonucleotide
cuaagggguagagggcaca

SEQ ID NO: 862947 - RNA, 19 nt, Artificial Sequence
  Description of Artificial Sequence: Synthetic oligonucleotide
ccuaacgggucccgggcgc

SEQ ID NO: 862948 - RNA, 19 nt, Artificial Sequence
  Description of Artificial Sequence: Synthetic oligonucleotide
ucccuuccuagagaauguu

SEQ ID NO: 862949 - RNA, 19 nt, Artificial Sequence
  Description of Artificial Sequence: Synthetic oligonucleotide
caccaucaucugccgacuc

SEQ ID NO: 862950 - RNA, 19 nt, Artificial Sequence
  Description of Artificial Sequence: Synthetic oligonucleotide
gguacagauccuccauucu

SEQ ID NO: 862951 - RNA, 19 nt, Artificial Sequence
  Description of Artificial Sequence: Synthetic oligonucleotide
ccuucgccacuauugcgac

SEQ ID NO: 862952 - RNA, 19 nt, Artificial Sequence
  Description of Artificial Sequence: Synthetic oligonucleotide
ggcucauacuuuguaguaa

SEQ ID NO: 862953 - RNA, 19 nt, Artificial Sequence
  Description of Artificial Sequence: Synthetic oligonucleotide
cccuuccuagagaauguuc

SEQ ID NO: 862954 - RNA, 19 nt, Artificial Sequence
  Description of Artificial Sequence: Synthetic oligonucleotide
agauccucauuugcauaua

SEQ ID NO: 862955 - RNA, 19 nt, Artificial Sequence
  Description of Artificial Sequence: Synthetic oligonucleotide
cauuaacauuguacugggu

SEQ ID NO: 862956 - RNA, 19 nt, Artificial Sequence
  Description of Artificial Sequence: Synthetic oligonucleotide
cucaguagggauagugcuu

SEQ ID NO: 862957 - RNA, 19 nt, Artificial Sequence
  Description of Artificial Sequence: Synthetic oligonucleotide
cauuaugguguguguguau

SEQ ID NO: 862958 - RNA, 19 nt, Artificial Sequence
  Description of Artificial Sequence: Synthetic oligonucleotide
cggacgacucuggagagcc

SEQ ID NO: 862959 - RNA, 19 nt, Artificial Sequence
  Description of Artificial Sequence: Synthetic oligonucleotide
agcccagauuacuccggua

SEQ ID NO: 862960 - RNA, 19 nt, Artificial Sequence
  Description of Artificial Sequence: Synthetic oligonucleotide
gacguagauccggacgacu

SEQ ID NO: 862961 - RNA, 19 nt, Artificial Sequence
  Description of Artificial Sequence: Synthetic oligonucleotide
gagcuaccaggaggagcag

SEQ ID NO: 862962 - RNA, 19 nt, Artificial Sequence
  Description of Artificial Sequence: Synthetic oligonucleotide
ggcauagcgaccacauucu

SEQ ID NO: 862963 - RNA, 19 nt, Artificial Sequence
  Description of Artificial Sequence: Synthetic oligonucleotide
auucugcgcuggggaugcc

SEQ ID NO: 862964 - RNA, 19 nt, Artificial Sequence
  Description of Artificial Sequence: Synthetic oligonucleotide
gugguccguucucuccuca

SEQ ID NO: 862965 - RNA, 19 nt, Artificial Sequence
  Description of Artificial Sequence: Synthetic oligonucleotide
gugccaaaggacacaggcu

SEQ ID NO: 862966 - RNA, 19 nt, Artificial Sequence
  Description of Artificial Sequence: Synthetic oligonucleotide
cccuaacgggucccgggcg

SEQ ID NO: 862967 - RNA, 19 nt, Artificial Sequence
  Description of Artificial Sequence: Synthetic oligonucleotide
uccucaccuucgccacuau

SEQ ID NO: 862968 - RNA, 19 nt, Artificial Sequence
  Description of Artificial Sequence: Synthetic oligonucleotide
ggucccuaacgggucccgg

SEQ ID NO: 862969 - RNA, 19 nt, Artificial Sequence
  Description of Artificial Sequence: Synthetic oligonucleotide
ggggacagagcaguacaga

SEQ ID NO: 862970 - RNA, 19 nt, Artificial Sequence
  Description of Artificial Sequence: Synthetic oligonucleotide
cacccucccuuccuagaga

SEQ ID NO: 862971 - RNA, 19 nt, Artificial Sequence
  Description of Artificial Sequence: Synthetic oligonucleotide
agcaacccauaagggcagu

SEQ ID NO: 862972 - RNA, 19 nt, Artificial Sequence
  Description of Artificial Sequence: Synthetic oligonucleotide
ggauagugcuucugcuucu

SEQ ID NO: 862973 - RNA, 19 nt, Artificial Sequence
  Description of Artificial Sequence: Synthetic oligonucleotide
ccgggagcaccgcggaucc

SEQ ID NO: 862974 - RNA, 19 nt, Artificial Sequence
  Description of Artificial Sequence: Synthetic oligonucleotide
gcaacccauaagggcagug

SEQ ID NO: 862975 - RNA, 19 nt, Artificial Sequence
  Description of Artificial Sequence: Synthetic oligonucleotide
acccgcucggagagcccgc

SEQ ID NO: 862976 - RNA, 19 nt, Artificial Sequence
  Description of Artificial Sequence: Synthetic oligonucleotide
gcauuauggugugugugua

SEQ ID NO: 862977 - RNA, 19 nt, Artificial Sequence
  Description of Artificial Sequence: Synthetic oligonucleotide
cccagauuacuccgguaca

SEQ ID NO: 862978 - RNA, 19 nt, Artificial Sequence
  Description of Artificial Sequence: Synthetic oligonucleotide
gaggacccgcucggagagc

SEQ ID NO: 862979 - RNA, 19 nt, Artificial Sequence
  Description of Artificial Sequence: Synthetic oligonucleotide
ggcuugcccagcugagauc

SEQ ID NO: 862980 - RNA, 19 nt, Artificial Sequence
  Description of Artificial Sequence: Synthetic oligonucleotide
cuaacgggucccgggcgca

SEQ ID NO: 862981 - RNA, 19 nt, Artificial Sequence
  Description of Artificial Sequence: Synthetic oligonucleotide
ucccagccuaagggguaga

SEQ ID NO: 862982 - RNA, 19 nt, Artificial Sequence
  Description of Artificial Sequence: Synthetic oligonucleotide
ggaggcauagcgaccacau

SEQ ID NO: 862983 - RNA, 19 nt, Artificial Sequence
  Description of Artificial Sequence: Synthetic oligonucleotide
uggucucaguagggauagu

SEQ ID NO: 862984 - RNA, 19 nt, Artificial Sequence
  Description of Artificial Sequence: Synthetic oligonucleotide
ggacgacucuggagagccg

SEQ ID NO: 862985 - RNA, 19 nt, Artificial Sequence
  Description of Artificial Sequence: Synthetic oligonucleotide
ucgccacuauugcgacgua

SEQ ID NO: 862986 - RNA, 19 nt, Artificial Sequence
  Description of Artificial Sequence: Synthetic oligonucleotide
guuuuagccuuugguccau

SEQ ID NO: 862987 - RNA, 19 nt, Artificial Sequence
  Description of Artificial Sequence: Synthetic oligonucleotide
guaguaggcccagccaauu

SEQ ID NO: 862988 - RNA, 19 nt, Artificial Sequence
  Description of Artificial Sequence: Synthetic oligonucleotide
gccacggucccuaacgggu

SEQ ID NO: 862989 - RNA, 19 nt, Artificial Sequence
  Description of Artificial Sequence: Synthetic oligonucleotide
gccggcuguggccgugcgg

SEQ ID NO: 862990 - RNA, 19 nt, Artificial Sequence
  Description of Artificial Sequence: Synthetic oligonucleotide
cccagccuaagggguagag

SEQ ID NO: 862991 - RNA, 19 nt, Artificial Sequence
  Description of Artificial Sequence: Synthetic oligonucleotide
cagcacaacuugcugucuu

SEQ ID NO: 862992 - RNA, 19 nt, Artificial Sequence
  Description of Artificial Sequence: Synthetic oligonucleotide
cgacucuggagagccgggg

SEQ ID NO: 862993 - RNA, 19 nt, Artificial Sequence
  Description of Artificial Sequence: Synthetic oligonucleotide
agccgggguggagggucag

SEQ ID NO: 862994 - RNA, 19 nt, Artificial Sequence
  Description of Artificial Sequence: Synthetic oligonucleotide
caguagggauagugcuucu

SEQ ID NO: 862995 - RNA, 19 nt, Artificial Sequence
  Description of Artificial Sequence: Synthetic oligonucleotide
cgccacuauugcgacguag

SEQ ID NO: 862996 - RNA, 19 nt, Artificial Sequence
  Description of Artificial Sequence: Synthetic oligonucleotide
gucccgggcgcagcacaac

SEQ ID NO: 862997 - RNA, 19 nt, Artificial Sequence
  Description of Artificial Sequence: Synthetic oligonucleotide
ccggacgacucuggagagc

SEQ ID NO: 862998 - RNA, 19 nt, Artificial Sequence
  Description of Artificial Sequence: Synthetic oligonucleotide
gguacaagucaggcuggau

SEQ ID NO: 862999 - RNA, 19 nt, Artificial Sequence
  Description of Artificial Sequence: Synthetic oligonucleotide
cuccccuaguccucaucuu

SEQ ID NO: 863000 - RNA, 19 nt, Artificial Sequence
  Description of Artificial Sequence: Synthetic oligonucleotide
cguagauccggacgacucu

SEQ ID NO: 863001 - RNA, 19 nt, Artificial Sequence
  Description of Artificial Sequence: Synthetic oligonucleotide
ggacccgcucggagagccc

SEQ ID NO: 863002 - RNA, 19 nt, Artificial Sequence
  Description of Artificial Sequence: Synthetic oligonucleotide
cgacguagauccggacgac

SEQ ID NO: 863003 - RNA, 19 nt, Artificial Sequence
  Description of Artificial Sequence: Synthetic oligonucleotide
gcauagcgaccacauucuu

SEQ ID NO: 863004 - RNA, 19 nt, Artificial Sequence
  Description of Artificial Sequence: Synthetic oligonucleotide
ccccuaguccucaucuuuu

SEQ ID NO: 863005 - RNA, 19 nt, Artificial Sequence
  Description of Artificial Sequence: Synthetic oligonucleotide
cggucccuaacgggucccg

SEQ ID NO: 863006 - RNA, 19 nt, Artificial Sequence
  Description of Artificial Sequence: Synthetic oligonucleotide
cccuuuugacuccccuagu

SEQ ID NO: 863007 - RNA, 19 nt, Artificial Sequence
  Description of Artificial Sequence: Synthetic oligonucleotide
gccgugcggcccgggagca

SEQ ID NO: 863008 - RNA, 19 nt, Artificial Sequence
  Description of Artificial Sequence: Synthetic oligonucleotide
ccgccggcuguggccgugc

SEQ ID NO: 863009 - RNA, 19 nt, Artificial Sequence
  Description of Artificial Sequence: Synthetic oligonucleotide
cgccggcuguggccgugcg

SEQ ID NO: 863010 - RNA, 19 nt, Artificial Sequence
  Description of Artificial Sequence: Synthetic oligonucleotide
cccgggcgcagcacaacuu

SEQ ID NO: 863011 - RNA, 19 nt, Artificial Sequence
  Description of Artificial Sequence: Synthetic oligonucleotide
ccgagggccuggucucagu

SEQ ID NO: 863012 - RNA, 19 nt, Artificial Sequence
  Description of Artificial Sequence: Synthetic oligonucleotide
aaggauaaugaccaucucc

SEQ ID NO: 863013 - RNA, 19 nt, Artificial Sequence
  Description of Artificial Sequence: Synthetic oligonucleotide
aacgacagaaacuaaagag

SEQ ID NO: 863014 - RNA, 19 nt, Artificial Sequence
  Description of Artificial Sequence: Synthetic oligonucleotide
ugaaagaacaauauccuag

SEQ ID NO: 863015 - RNA, 19 nt, Artificial Sequence
  Description of Artificial Sequence: Synthetic oligonucleotide
aaugcuaugaugcaaugca

SEQ ID NO: 863016 - RNA, 19 nt, Artificial Sequence
  Description of Artificial Sequence: Synthetic oligonucleotide
uuauaaaccauccucugcc

SEQ ID NO: 863017 - RNA, 19 nt, Artificial Sequence
  Description of Artificial Sequence: Synthetic oligonucleotide
aaugcaaauuuccaccaac

SEQ ID NO: 863018 - RNA, 19 nt, Artificial Sequence
  Description of Artificial Sequence: Synthetic oligonucleotide
auaugguuacaacauaccc

SEQ ID NO: 863019 - RNA, 19 nt, Artificial Sequence
  Description of Artificial Sequence: Synthetic oligonucleotide
ugugauucuugucuaaugg

SEQ ID NO: 863020 - RNA, 19 nt, Artificial Sequence
  Description of Artificial Sequence: Synthetic oligonucleotide
uggaaacuagcacugaagg

SEQ ID NO: 863021 - RNA, 19 nt, Artificial Sequence
  Description of Artificial Sequence: Synthetic oligonucleotide
uauccuagaagucugugag

SEQ ID NO: 863022 - RNA, 19 nt, Artificial Sequence
  Description of Artificial Sequence: Synthetic oligonucleotide
aaucgguggaucuuccagc

SEQ ID NO: 863023 - RNA, 19 nt, Artificial Sequence
  Description of Artificial Sequence: Synthetic oligonucleotide
aaauuaaugaggagauacc

SEQ ID NO: 863024 - RNA, 19 nt, Artificial Sequence
  Description of Artificial Sequence: Synthetic oligonucleotide
uacagcaccguguagaucc

SEQ ID NO: 863025 - RNA, 19 nt, Artificial Sequence
  Description of Artificial Sequence: Synthetic oligonucleotide
ucaaacaacuaauuguuug

SEQ ID NO: 863026 - RNA, 19 nt, Artificial Sequence
  Description of Artificial Sequence: Synthetic oligonucleotide
aacguuaggcaucgaaagc

SEQ ID NO: 863027 - RNA, 19 nt, Artificial Sequence
  Description of Artificial Sequence: Synthetic oligonucleotide
aucgaaagcaauugcagac

SEQ ID NO: 863028 - RNA, 19 nt, Artificial Sequence
  Description of Artificial Sequence: Synthetic oligonucleotide
ugagccuaauacaugaaag

SEQ ID NO: 863029 - RNA, 19 nt, Artificial Sequence
  Description of Artificial Sequence: Synthetic oligonucleotide
uauaggaaauuccaacaag

SEQ ID NO: 863030 - RNA, 19 nt, Artificial Sequence
  Description of Artificial Sequence: Synthetic oligonucleotide
augguuacaacauacccag

SEQ ID NO: 863031 - RNA, 19 nt, Artificial Sequence
  Description of Artificial Sequence: Synthetic oligonucleotide
uaugguuacaacauaccca

SEQ ID NO: 863032 - RNA, 19 nt, Artificial Sequence
  Description of Artificial Sequence: Synthetic oligonucleotide
uguauaggaaauuccaaca

SEQ ID NO: 863033 - RNA, 19 nt, Artificial Sequence
  Description of Artificial Sequence: Synthetic oligonucleotide
ugcaaugcaaauuuccacc

SEQ ID NO: 863034 - RNA, 19 nt, Artificial Sequence
  Description of Artificial Sequence: Synthetic oligonucleotide
augcuagacaucuucuucc

SEQ ID NO: 863035 - RNA, 19 nt, Artificial Sequence
  Description of Artificial Sequence: Synthetic oligonucleotide
ugucuaaaccaucucauga

SEQ ID NO: 863036 - RNA, 19 nt, Artificial Sequence
  Description of Artificial Sequence: Synthetic oligonucleotide
aaagcaguccuguacauaa

SEQ ID NO: 863037 - RNA, 19 nt, Artificial Sequence
  Description of Artificial Sequence: Synthetic oligonucleotide
gaaacuagcacugaaggac

SEQ ID NO: 863038 - RNA, 19 nt, Artificial Sequence
  Description of Artificial Sequence: Synthetic oligonucleotide
ugaggucuaacacuuuccg

SEQ ID NO: 863039 - RNA, 19 nt, Artificial Sequence
  Description of Artificial Sequence: Synthetic oligonucleotide
aaaacgacagaaacuaaag

SEQ ID NO: 863040 - RNA, 19 nt, Artificial Sequence
  Description of Artificial Sequence: Synthetic oligonucleotide
aagucuuguauuguggccg

SEQ ID NO: 863041 - RNA, 19 nt, Artificial Sequence
  Description of Artificial Sequence: Synthetic oligonucleotide
uuuaucaauuucccaugcg

SEQ ID NO: 863042 - RNA, 19 nt, Artificial Sequence
  Description of Artificial Sequence: Synthetic oligonucleotide
guacauaacagcugugugg

SEQ ID NO: 863043 - RNA, 19 nt, Artificial Sequence
  Description of Artificial Sequence: Synthetic oligonucleotide
uguauugcaauaugguuac

SEQ ID NO: 863044 - RNA, 19 nt, Artificial Sequence
  Description of Artificial Sequence: Synthetic oligonucleotide
ugcaauaugguuacaacau

SEQ ID NO: 863045 - RNA, 19 nt, Artificial Sequence
  Description of Artificial Sequence: Synthetic oligonucleotide
uuaugcaguaccaucgucu

SEQ ID NO: 863046 - RNA, 19 nt, Artificial Sequence
  Description of Artificial Sequence: Synthetic oligonucleotide
aaacuagcacugaaggacc

SEQ ID NO: 863047 - RNA, 19 nt, Artificial Sequence
  Description of Artificial Sequence: Synthetic oligonucleotide
uuacaacauacccagcacc

SEQ ID NO: 863048 - RNA, 19 nt, Artificial Sequence
  Description of Artificial Sequence: Synthetic oligonucleotide
guaucggauuccuacagcg

SEQ ID NO: 863049 - RNA, 19 nt, Artificial Sequence
  Description of Artificial Sequence: Synthetic oligonucleotide
aguaccaucgucugagguc

SEQ ID NO: 863050 - RNA, 19 nt, Artificial Sequence
  Description of Artificial Sequence: Synthetic oligonucleotide
gaaggcauaaucagaacag

SEQ ID NO: 863051 - RNA, 19 nt, Artificial Sequence
  Description of Artificial Sequence: Synthetic oligonucleotide
aaacgacagaaacuaaaga

SEQ ID NO: 863052 - RNA, 19 nt, Artificial Sequence
  Description of Artificial Sequence: Synthetic oligonucleotide
uuggaagcccaaaauaugu

SEQ ID NO: 863053 - RNA, 19 nt, Artificial Sequence
  Description of Artificial Sequence: Synthetic oligonucleotide
uuggcuguuucacaaaaga

SEQ ID NO: 863054 - RNA, 19 nt, Artificial Sequence
  Description of Artificial Sequence: Synthetic oligonucleotide
aucggauuccuacagcgcg

SEQ ID NO: 863055 - RNA, 19 nt, Artificial Sequence
  Description of Artificial Sequence: Synthetic oligonucleotide
aagauuguacagcaccgug

SEQ ID NO: 863056 - RNA, 19 nt, Artificial Sequence
  Description of Artificial Sequence: Synthetic oligonucleotide
aggucuaacacuuuccgcu

SEQ ID NO: 863057 - RNA, 19 nt, Artificial Sequence
  Description of Artificial Sequence: Synthetic oligonucleotide
aacaacuaauuguuuggcu

SEQ ID NO: 863058 - RNA, 19 nt, Artificial Sequence
  Description of Artificial Sequence: Synthetic oligonucleotide
ucucaugaaugcuagacau

SEQ ID NO: 863059 - RNA, 19 nt, Artificial Sequence
  Description of Artificial Sequence: Synthetic oligonucleotide
aagaaauuaaugaggagau

SEQ ID NO: 863060 - RNA, 19 nt, Artificial Sequence
  Description of Artificial Sequence: Synthetic oligonucleotide
uggaaugagccuaauacau

SEQ ID NO: 863061 - RNA, 19 nt, Artificial Sequence
  Description of Artificial Sequence: Synthetic oligonucleotide
aaugaggagauaccacaug

SEQ ID NO: 863062 - RNA, 19 nt, Artificial Sequence
  Description of Artificial Sequence: Synthetic oligonucleotide
uguaugcugaacuacuuuc

SEQ ID NO: 863063 - RNA, 19 nt, Artificial Sequence
  Description of Artificial Sequence: Synthetic oligonucleotide
gaaagaacaauauccuaga

SEQ ID NO: 863064 - RNA, 19 nt, Artificial Sequence
  Description of Artificial Sequence: Synthetic oligonucleotide
ggauauaaaauucaagaga

SEQ ID NO: 863065 - RNA, 19 nt, Artificial Sequence
  Description of Artificial Sequence: Synthetic oligonucleotide
cuuauaaaccauccucugc

SEQ ID NO: 863066 - RNA, 19 nt, Artificial Sequence
  Description of Artificial Sequence: Synthetic oligonucleotide
gauuuggcaauucccuggg

SEQ ID NO: 863067 - RNA, 19 nt, Artificial Sequence
  Description of Artificial Sequence: Synthetic oligonucleotide
uuugaguccuggaaugagc

SEQ ID NO: 863068 - RNA, 19 nt, Artificial Sequence
  Description of Artificial Sequence: Synthetic oligonucleotide
auuaaugaggagauaccac

SEQ ID NO: 863069 - RNA, 19 nt, Artificial Sequence
  Description of Artificial Sequence: Synthetic oligonucleotide
uacaacauacccagcaccu

SEQ ID NO: 863070 - RNA, 19 nt, Artificial Sequence
  Description of Artificial Sequence: Synthetic oligonucleotide
uuaauuugucuaaaccauc

SEQ ID NO: 863071 - RNA, 19 nt, Artificial Sequence
  Description of Artificial Sequence: Synthetic oligonucleotide
uguaggcuagacauguaug

SEQ ID NO: 863072 - RNA, 19 nt, Artificial Sequence
  Description of Artificial Sequence: Synthetic oligonucleotide
uauuuccagugaaagggcc

SEQ ID NO: 863073 - RNA, 19 nt, Artificial Sequence
  Description of Artificial Sequence: Synthetic oligonucleotide
uuggaauaccaauguaugc

SEQ ID NO: 863074 - RNA, 19 nt, Artificial Sequence
  Description of Artificial Sequence: Synthetic oligonucleotide
ucuaaaccaucucaugagu

SEQ ID NO: 863075 - RNA, 19 nt, Artificial Sequence
  Description of Artificial Sequence: Synthetic oligonucleotide
gacaacucgaaggauaaug

SEQ ID NO: 863076 - RNA, 19 nt, Artificial Sequence
  Description of Artificial Sequence: Synthetic oligonucleotide
uagauuauuucugaugcac

SEQ ID NO: 863077 - RNA, 19 nt, Artificial Sequence
  Description of Artificial Sequence: Synthetic oligonucleotide
caacguuaggcaucgaaag

SEQ ID NO: 863078 - RNA, 19 nt, Artificial Sequence
  Description of Artificial Sequence: Synthetic oligonucleotide
uaaugguuccaaauggaaa

SEQ ID NO: 863079 - RNA, 19 nt, Artificial Sequence
  Description of Artificial Sequence: Synthetic oligonucleotide
uauuguggccggcuuaugc

SEQ ID NO: 863080 - RNA, 19 nt, Artificial Sequence
  Description of Artificial Sequence: Synthetic oligonucleotide
uuucccaugcgagagguag

SEQ ID NO: 863081 - RNA, 19 nt, Artificial Sequence
  Description of Artificial Sequence: Synthetic oligonucleotide
ugaacuacuuucagcagaa

SEQ ID NO: 863082 - RNA, 19 nt, Artificial Sequence
  Description of Artificial Sequence: Synthetic oligonucleotide
gaaggaccugcccagacgc

SEQ ID NO: 863083 - RNA, 19 nt, Artificial Sequence
  Description of Artificial Sequence: Synthetic oligonucleotide
gaaucgguggaucuuccag

SEQ ID NO: 863084 - RNA, 19 nt, Artificial Sequence
  Description of Artificial Sequence: Synthetic oligonucleotide
ugugagucacacauuggca

SEQ ID NO: 863085 - RNA, 19 nt, Artificial Sequence
  Description of Artificial Sequence: Synthetic oligonucleotide
ugaaggaccugcccagacg

SEQ ID NO: 863086 - RNA, 19 nt, Artificial Sequence
  Description of Artificial Sequence: Synthetic oligonucleotide
agagcagaauacuggggac

SEQ ID NO: 863087 - RNA, 19 nt, Artificial Sequence
  Description of Artificial Sequence: Synthetic oligonucleotide
ucugcaacguuaggcaucg

SEQ ID NO: 863088 - RNA, 19 nt, Artificial Sequence
  Description of Artificial Sequence: Synthetic oligonucleotide
uugucagucauugccauug

SEQ ID NO: 863089 - RNA, 19 nt, Artificial Sequence
  Description of Artificial Sequence: Synthetic oligonucleotide
ucuguuccuauugauagac

SEQ ID NO: 863090 - RNA, 19 nt, Artificial Sequence
  Description of Artificial Sequence: Synthetic oligonucleotide
gaagucuuguauuguggcc

SEQ ID NO: 863091 - RNA, 19 nt, Artificial Sequence
  Description of Artificial Sequence: Synthetic oligonucleotide
ugaguggauaaauggauau

SEQ ID NO: 863092 - RNA, 19 nt, Artificial Sequence
  Description of Artificial Sequence: Synthetic oligonucleotide
ucgaaagcaauugcagacg

SEQ ID NO: 863093 - RNA, 19 nt, Artificial Sequence
  Description of Artificial Sequence: Synthetic oligonucleotide
cuaaaccaucucaugagug

SEQ ID NO: 863094 - RNA, 19 nt, Artificial Sequence
  Description of Artificial Sequence: Synthetic oligonucleotide
uaggaaauuccaacaagaa

SEQ ID NO: 863095 - RNA, 19 nt, Artificial Sequence
  Description of Artificial Sequence: Synthetic oligonucleotide
acuaguuggaauaccaaug

SEQ ID NO: 863096 - RNA, 19 nt, Artificial Sequence
  Description of Artificial Sequence: Synthetic oligonucleotide
uuaacacauccuucaaaca

SEQ ID NO: 863097 - RNA, 19 nt, Artificial Sequence
  Description of Artificial Sequence: Synthetic oligonucleotide
auaggaaauuccaacaaga

SEQ ID NO: 863098 - RNA, 19 nt, Artificial Sequence
  Description of Artificial Sequence: Synthetic oligonucleotide
ucucucaugaaugcuagac

SEQ ID NO: 863099 - RNA, 19 nt, Artificial Sequence
  Description of Artificial Sequence: Synthetic oligonucleotide
ccuaauacaugaaagaaca

SEQ ID NO: 863100 - RNA, 19 nt, Artificial Sequence
  Description of Artificial Sequence: Synthetic oligonucleotide
uuauaggugggagauuccc

SEQ ID NO: 863101 - RNA, 19 nt, Artificial Sequence
  Description of Artificial Sequence: Synthetic oligonucleotide
cuucaagagcagaauacug

SEQ ID NO: 863102 - RNA, 19 nt, Artificial Sequence
  Description of Artificial Sequence: Synthetic oligonucleotide
uguggguaacaccaguggu

SEQ ID NO: 863103 - RNA, 19 nt, Artificial Sequence
  Description of Artificial Sequence: Synthetic oligonucleotide
cuuaaagcaguccuguaca

SEQ ID NO: 863104 - RNA, 19 nt, Artificial Sequence
  Description of Artificial Sequence: Synthetic oligonucleotide
aauauccuagaagucugug

SEQ ID NO: 863105 - RNA, 19 nt, Artificial Sequence
  Description of Artificial Sequence: Synthetic oligonucleotide
auacccagcaccuugugau

SEQ ID NO: 863106 - RNA, 19 nt, Artificial Sequence
  Description of Artificial Sequence: Synthetic oligonucleotide
ugugcuguauaggaaauuc

SEQ ID NO: 863107 - RNA, 19 nt, Artificial Sequence
  Description of Artificial Sequence: Synthetic oligonucleotide
ggagauaccacaugaaguc

SEQ ID NO: 863108 - RNA, 19 nt, Artificial Sequence
  Description of Artificial Sequence: Synthetic oligonucleotide
uuaggcaucgaaagcaauu

SEQ ID NO: 863109 - RNA, 19 nt, Artificial Sequence
  Description of Artificial Sequence: Synthetic oligonucleotide
uguuccuaagaagaagcug

SEQ ID NO: 863110 - RNA, 19 nt, Artificial Sequence
  Description of Artificial Sequence: Synthetic oligonucleotide
uacgacugcagcagcgggg

SEQ ID NO: 863111 - RNA, 19 nt, Artificial Sequence
  Description of Artificial Sequence: Synthetic oligonucleotide
aguguuguauuuccaguga

SEQ ID NO: 863112 - RNA, 19 nt, Artificial Sequence
  Description of Artificial Sequence: Synthetic oligonucleotide
uugucuaaaccaucucaug

SEQ ID NO: 863113 - RNA, 19 nt, Artificial Sequence
  Description of Artificial Sequence: Synthetic oligonucleotide
uggacaacucgaaggauaa

SEQ ID NO: 863114 - RNA, 19 nt, Artificial Sequence
  Description of Artificial Sequence: Synthetic oligonucleotide
uuguuuggcuguuucacaa

SEQ ID NO: 863115 - RNA, 19 nt, Artificial Sequence
  Description of Artificial Sequence: Synthetic oligonucleotide
cuauugauagacuuauaaa

SEQ ID NO: 863116 - RNA, 19 nt, Artificial Sequence
  Description of Artificial Sequence: Synthetic oligonucleotide
uaaugaggagauaccacau

SEQ ID NO: 863117 - RNA, 19 nt, Artificial Sequence
  Description of Artificial Sequence: Synthetic oligonucleotide
guaggcuagacauguauga

SEQ ID NO: 863118 - RNA, 19 nt, Artificial Sequence
  Description of Artificial Sequence: Synthetic oligonucleotide
aguccuguacauaacagcu

SEQ ID NO: 863119 - RNA, 19 nt, Artificial Sequence
  Description of Artificial Sequence: Synthetic oligonucleotide
uuuucacagcauucuauaa

SEQ ID NO: 863120 - RNA, 19 nt, Artificial Sequence
  Description of Artificial Sequence: Synthetic oligonucleotide
gaaugcuaugaugcaaugc

SEQ ID NO: 863121 - RNA, 19 nt, Artificial Sequence
  Description of Artificial Sequence: Synthetic oligonucleotide
guuacaacauacccagcac

SEQ ID NO: 863122 - RNA, 19 nt, Artificial Sequence
  Description of Artificial Sequence: Synthetic oligonucleotide
uccuagaagucugugaguc

SEQ ID NO: 863123 - RNA, 19 nt, Artificial Sequence
  Description of Artificial Sequence: Synthetic oligonucleotide
uaucggauuccuacagcgc

SEQ ID NO: 863124 - RNA, 19 nt, Artificial Sequence
  Description of Artificial Sequence: Synthetic oligonucleotide
agucuuguauuguggccgg

SEQ ID NO: 863125 - RNA, 19 nt, Artificial Sequence
  Description of Artificial Sequence: Synthetic oligonucleotide
gauauugucuucacucuca

SEQ ID NO: 863126 - RNA, 19 nt, Artificial Sequence
  Description of Artificial Sequence: Synthetic oligonucleotide
uauaaaccauccucugccu

SEQ ID NO: 863127 - RNA, 19 nt, Artificial Sequence
  Description of Artificial Sequence: Synthetic oligonucleotide
ugcaacguuaggcaucgaa

SEQ ID NO: 863128 - RNA, 19 nt, Artificial Sequence
  Description of Artificial Sequence: Synthetic oligonucleotide
auuguggccggcuuaugca

SEQ ID NO: 863129 - RNA, 19 nt, Artificial Sequence
  Description of Artificial Sequence: Synthetic oligonucleotide
cuaaagaggagcucaagua

SEQ ID NO: 863130 - RNA, 19 nt, Artificial Sequence
  Description of Artificial Sequence: Synthetic oligonucleotide
uuccuauugauagacuuau

SEQ ID NO: 863131 - RNA, 19 nt, Artificial Sequence
  Description of Artificial Sequence: Synthetic oligonucleotide
agcaguccuguacauaaca

SEQ ID NO: 863132 - RNA, 19 nt, Artificial Sequence
  Description of Artificial Sequence: Synthetic oligonucleotide
gaggucuaacacuuuccgc

SEQ ID NO: 863133 - RNA, 19 nt, Artificial Sequence
  Description of Artificial Sequence: Synthetic oligonucleotide
auuccaacaagaaauuaau

SEQ ID NO: 863134 - RNA, 19 nt, Artificial Sequence
  Description of Artificial Sequence: Synthetic oligonucleotide
ccuguuccuaagaagaagc

SEQ ID NO: 863135 - RNA, 19 nt, Artificial Sequence
  Description of Artificial Sequence: Synthetic oligonucleotide
gacacucccucugaugccg

SEQ ID NO: 863136 - RNA, 19 nt, Artificial Sequence
  Description of Artificial Sequence: Synthetic oligonucleotide
guauaggaaauuccaacaa

SEQ ID NO: 863137 - RNA, 19 nt, Artificial Sequence
  Description of Artificial Sequence: Synthetic oligonucleotide
agcucaaguauugaauuca

SEQ ID NO: 863138 - RNA, 19 nt, Artificial Sequence
  Description of Artificial Sequence: Synthetic oligonucleotide
uugccaacugagucucugg

SEQ ID NO: 863139 - RNA, 19 nt, Artificial Sequence
  Description of Artificial Sequence: Synthetic oligonucleotide
aggagauaccacaugaagu

SEQ ID NO: 863140 - RNA, 19 nt, Artificial Sequence
  Description of Artificial Sequence: Synthetic oligonucleotide
aaggcauaaucagaacaga

SEQ ID NO: 863141 - RNA, 19 nt, Artificial Sequence
  Description of Artificial Sequence: Synthetic oligonucleotide
uuggguuauaggugggaga

SEQ ID NO: 863142 - RNA, 19 nt, Artificial Sequence
  Description of Artificial Sequence: Synthetic oligonucleotide
uggagauauugucuucacu

SEQ ID NO: 863143 - RNA, 19 nt, Artificial Sequence
  Description of Artificial Sequence: Synthetic oligonucleotide
ucuuugcacugccugauuu

SEQ ID NO: 863144 - RNA, 19 nt, Artificial Sequence
  Description of Artificial Sequence: Synthetic oligonucleotide
aggcuagacauguaugagu

SEQ ID NO: 863145 - RNA, 19 nt, Artificial Sequence
  Description of Artificial Sequence: Synthetic oligonucleotide
aauacuggggacacucccu

SEQ ID NO: 863146 - RNA, 19 nt, Artificial Sequence
  Description of Artificial Sequence: Synthetic oligonucleotide
uaggcuagacauguaugag

SEQ ID NO: 863147 - RNA, 19 nt, Artificial Sequence
  Description of Artificial Sequence: Synthetic oligonucleotide
gauuguacagcaccgugua

SEQ ID NO: 863148 - RNA, 19 nt, Artificial Sequence
  Description of Artificial Sequence: Synthetic oligonucleotide
uggguuauaggugggagau

SEQ ID NO: 863149 - RNA, 19 nt, Artificial Sequence
  Description of Artificial Sequence: Synthetic oligonucleotide
uggcuguuucacaaaagau

SEQ ID NO: 863150 - RNA, 19 nt, Artificial Sequence
  Description of Artificial Sequence: Synthetic oligonucleotide
acguuaggcaucgaaagca

SEQ ID NO: 863151 - RNA, 19 nt, Artificial Sequence
  Description of Artificial Sequence: Synthetic oligonucleotide
caaauuuguggucaccgca

SEQ ID NO: 863152 - RNA, 19 nt, Artificial Sequence
  Description of Artificial Sequence: Synthetic oligonucleotide
gguggauaaguucuccaag

SEQ ID NO: 863153 - RNA, 19 nt, Artificial Sequence
  Description of Artificial Sequence: Synthetic oligonucleotide
aaaccuccccuugaggugu

SEQ ID NO: 863154 - RNA, 19 nt, Artificial Sequence
  Description of Artificial Sequence: Synthetic oligonucleotide
guaugaguggauaaaugga

SEQ ID NO: 863155 - RNA, 19 nt, Artificial Sequence
  Description of Artificial Sequence: Synthetic oligonucleotide
acgacugcagcagcggggc

SEQ ID NO: 863156 - RNA, 19 nt, Artificial Sequence
  Description of Artificial Sequence: Synthetic oligonucleotide
uauuucugaugcacuaguu

SEQ ID NO: 863157 - RNA, 19 nt, Artificial Sequence
  Description of Artificial Sequence: Synthetic oligonucleotide
cugugauucuugucuaaug

SEQ ID NO: 863158 - RNA, 19 nt, Artificial Sequence
  Description of Artificial Sequence: Synthetic oligonucleotide
uggucaccgcaucaaauuc

SEQ ID NO: 863159 - RNA, 19 nt, Artificial Sequence
  Description of Artificial Sequence: Synthetic oligonucleotide
ugccaacugagucucugga

SEQ ID NO: 863160 - RNA, 19 nt, Artificial Sequence
  Description of Artificial Sequence: Synthetic oligonucleotide
cuuugcacugccugauuug

SEQ ID NO: 863161 - RNA, 19 nt, Artificial Sequence
  Description of Artificial Sequence: Synthetic oligonucleotide
aguacgacugcagcagcgg

SEQ ID NO: 863162 - RNA, 19 nt, Artificial Sequence
  Description of Artificial Sequence: Synthetic oligonucleotide
uucugcaacguuaggcauc

SEQ ID NO: 863163 - RNA, 19 nt, Artificial Sequence
  Description of Artificial Sequence: Synthetic oligonucleotide
gggacacucccucugaugc

SEQ ID NO: 863164 - RNA, 19 nt, Artificial Sequence
  Description of Artificial Sequence: Synthetic oligonucleotide
aguuacugauuugaguccu

SEQ ID NO: 863165 - RNA, 19 nt, Artificial Sequence
  Description of Artificial Sequence: Synthetic oligonucleotide
guguauugcaauaugguua

SEQ ID NO: 863166 - RNA, 19 nt, Artificial Sequence
  Description of Artificial Sequence: Synthetic oligonucleotide
cuagcacugaaggaccugc

SEQ ID NO: 863167 - RNA, 19 nt, Artificial Sequence
  Description of Artificial Sequence: Synthetic oligonucleotide
ucccauugugcuguauagg

SEQ ID NO: 863168 - RNA, 19 nt, Artificial Sequence
  Description of Artificial Sequence: Synthetic oligonucleotide
augcgagagguaguuuucc

SEQ ID NO: 863169 - RNA, 19 nt, Artificial Sequence
  Description of Artificial Sequence: Synthetic oligonucleotide
auuuguggucaccgcauca

SEQ ID NO: 863170 - RNA, 19 nt, Artificial Sequence
  Description of Artificial Sequence: Synthetic oligonucleotide
cagaauacuggggacacuc

SEQ ID NO: 863171 - RNA, 19 nt, Artificial Sequence
  Description of Artificial Sequence: Synthetic oligonucleotide
cuaaugguuccaaauggaa

SEQ ID NO: 863172 - RNA, 19 nt, Artificial Sequence
  Description of Artificial Sequence: Synthetic oligonucleotide
ugagguugccugguugagg

SEQ ID NO: 863173 - RNA, 19 nt, Artificial Sequence
  Description of Artificial Sequence: Synthetic oligonucleotide
ugcgagagguaguuuuccc

SEQ ID NO: 863174 - RNA, 19 nt, Artificial Sequence
  Description of Artificial Sequence: Synthetic oligonucleotide
gacugagguugccugguug

SEQ ID NO: 863175 - RNA, 19 nt, Artificial Sequence
  Description of Artificial Sequence: Synthetic oligonucleotide
cuuggguuauaggugggag

SEQ ID NO: 863176 - RNA, 19 nt, Artificial Sequence
  Description of Artificial Sequence: Synthetic oligonucleotide
gguaguuuucccaggcugg

SEQ ID NO: 863177 - RNA, 19 nt, Artificial Sequence
  Description of Artificial Sequence: Synthetic oligonucleotide
aucgguggaucuuccagcu

SEQ ID NO: 863178 - RNA, 19 nt, Artificial Sequence
  Description of Artificial Sequence: Synthetic oligonucleotide
guauuuccagugaaagggc

SEQ ID NO: 863179 - RNA, 19 nt, Artificial Sequence
  Description of Artificial Sequence: Synthetic oligonucleotide
uuggcaauucccugggcau

SEQ ID NO: 863180 - RNA, 19 nt, Artificial Sequence
  Description of Artificial Sequence: Synthetic oligonucleotide
caauuucccaugcgagagg

SEQ ID NO: 863181 - RNA, 19 nt, Artificial Sequence
  Description of Artificial Sequence: Synthetic oligonucleotide
gagauauugucuucacucu

SEQ ID NO: 863182 - RNA, 19 nt, Artificial Sequence
  Description of Artificial Sequence: Synthetic oligonucleotide
gaguacgacugcagcagcg

SEQ ID NO: 863183 - RNA, 19 nt, Artificial Sequence
  Description of Artificial Sequence: Synthetic oligonucleotide
auguaugaguggauaaaug

SEQ ID NO: 863184 - RNA, 19 nt, Artificial Sequence
  Description of Artificial Sequence: Synthetic oligonucleotide
ggcuagacauguaugagug

SEQ ID NO: 863185 - RNA, 19 nt, Artificial Sequence
  Description of Artificial Sequence: Synthetic oligonucleotide
aauguaugcugaacuacuu

SEQ ID NO: 863186 - RNA, 19 nt, Artificial Sequence
  Description of Artificial Sequence: Synthetic oligonucleotide
uguauuguggccggcuuau

SEQ ID NO: 863187 - RNA, 19 nt, Artificial Sequence
  Description of Artificial Sequence: Synthetic oligonucleotide
augcacuaguuggaauacc

SEQ ID NO: 863188 - RNA, 19 nt, Artificial Sequence
  Description of Artificial Sequence: Synthetic oligonucleotide
uuggauuugugcucaccau

SEQ ID NO: 863189 - RNA, 19 nt, Artificial Sequence
  Description of Artificial Sequence: Synthetic oligonucleotide
agguguauugcaauauggu

SEQ ID NO: 863190 - RNA, 19 nt, Artificial Sequence
  Description of Artificial Sequence: Synthetic oligonucleotide
agauuguacagcaccgugu

SEQ ID NO: 863191 - RNA, 19 nt, Artificial Sequence
  Description of Artificial Sequence: Synthetic oligonucleotide
guacgacugcagcagcggg

SEQ ID NO: 863192 - RNA, 19 nt, Artificial Sequence
  Description of Artificial Sequence: Synthetic oligonucleotide
uacauggaaguggucauua

SEQ ID NO: 863193 - RNA, 19 nt, Artificial Sequence
  Description of Artificial Sequence: Synthetic oligonucleotide
cuuaugcaguaccaucguc

SEQ ID NO: 863194 - RNA, 19 nt, Artificial Sequence
  Description of Artificial Sequence: Synthetic oligonucleotide
agugaaagggccaaaccua

SEQ ID NO: 863195 - RNA, 19 nt, Artificial Sequence
  Description of Artificial Sequence: Synthetic oligonucleotide
auguaugcugaacuacuuu

SEQ ID NO: 863196 - RNA, 19 nt, Artificial Sequence
  Description of Artificial Sequence: Synthetic oligonucleotide
uugugaucaccaaguuacu

SEQ ID NO: 863197 - RNA, 19 nt, Artificial Sequence
  Description of Artificial Sequence: Synthetic oligonucleotide
gguauugucagggaggcaa

SEQ ID NO: 863198 - RNA, 19 nt, Artificial Sequence
  Description of Artificial Sequence: Synthetic oligonucleotide
caugcgagagguaguuuuc

SEQ ID NO: 863199 - RNA, 19 nt, Artificial Sequence
  Description of Artificial Sequence: Synthetic oligonucleotide
cuaguuggaauaccaaugu

SEQ ID NO: 863200 - RNA, 19 nt, Artificial Sequence
  Description of Artificial Sequence: Synthetic oligonucleotide
uuguauuguggccggcuua

SEQ ID NO: 863201 - RNA, 19 nt, Artificial Sequence
  Description of Artificial Sequence: Synthetic oligonucleotide
cuauaaaagcuugagaguu

SEQ ID NO: 863202 - RNA, 19 nt, Artificial Sequence
  Description of Artificial Sequence: Synthetic oligonucleotide
gauuugaguccuggaauga

SEQ ID NO: 863203 - RNA, 19 nt, Artificial Sequence
  Description of Artificial Sequence: Synthetic oligonucleotide
gaaggauaaugaccaucuc

SEQ ID NO: 863204 - RNA, 19 nt, Artificial Sequence
  Description of Artificial Sequence: Synthetic oligonucleotide
cucucaugaaugcuagaca

SEQ ID NO: 863205 - RNA, 19 nt, Artificial Sequence
  Description of Artificial Sequence: Synthetic oligonucleotide
cacuggacaacucgaagga

SEQ ID NO: 863206 - RNA, 19 nt, Artificial Sequence
  Description of Artificial Sequence: Synthetic oligonucleotide
gugacagcggugcgggcgg

SEQ ID NO: 863207 - RNA, 19 nt, Artificial Sequence
  Description of Artificial Sequence: Synthetic oligonucleotide
uuguagacugagguugccu

SEQ ID NO: 863208 - RNA, 19 nt, Artificial Sequence
  Description of Artificial Sequence: Synthetic oligonucleotide
gauuugugcucaccauguc

SEQ ID NO: 863209 - RNA, 19 nt, Artificial Sequence
  Description of Artificial Sequence: Synthetic oligonucleotide
caauguaugcugaacuacu

SEQ ID NO: 863210 - RNA, 19 nt, Artificial Sequence
  Description of Artificial Sequence: Synthetic oligonucleotide
uccccuugagguguauugc

SEQ ID NO: 863211 - RNA, 19 nt, Artificial Sequence
  Description of Artificial Sequence: Synthetic oligonucleotide
agaaucgguggaucuucca

SEQ ID NO: 863212 - RNA, 19 nt, Artificial Sequence
  Description of Artificial Sequence: Synthetic oligonucleotide
cucaugaguguuguauuuc

SEQ ID NO: 863213 - RNA, 19 nt, Artificial Sequence
  Description of Artificial Sequence: Synthetic oligonucleotide
guaugcugaacuacuuuca

SEQ ID NO: 863214 - RNA, 19 nt, Artificial Sequence
  Description of Artificial Sequence: Synthetic oligonucleotide
ugaaagggccaaaccuaau

SEQ ID NO: 863215 - RNA, 19 nt, Artificial Sequence
  Description of Artificial Sequence: Synthetic oligonucleotide
auuuccagugaaagggcca

SEQ ID NO: 863216 - RNA, 19 nt, Artificial Sequence
  Description of Artificial Sequence: Synthetic oligonucleotide
ugucagucauugccauugu

SEQ ID NO: 863217 - RNA, 19 nt, Artificial Sequence
  Description of Artificial Sequence: Synthetic oligonucleotide
gguaucggauuccuacagc

SEQ ID NO: 863218 - RNA, 19 nt, Artificial Sequence
  Description of Artificial Sequence: Synthetic oligonucleotide
gcauaaaucacuggacaac

SEQ ID NO: 863219 - RNA, 19 nt, Artificial Sequence
  Description of Artificial Sequence: Synthetic oligonucleotide
cauaaaucacuggacaacu

SEQ ID NO: 863220 - RNA, 19 nt, Artificial Sequence
  Description of Artificial Sequence: Synthetic oligonucleotide
ccaccugaaggugacagcg

SEQ ID NO: 863221 - RNA, 19 nt, Artificial Sequence
  Description of Artificial Sequence: Synthetic oligonucleotide
ggucuaacacuuuccgcug

SEQ ID NO: 863222 - RNA, 19 nt, Artificial Sequence
  Description of Artificial Sequence: Synthetic oligonucleotide
gcggguaucggauuccuac

SEQ ID NO: 863223 - RNA, 19 nt, Artificial Sequence
  Description of Artificial Sequence: Synthetic oligonucleotide
gccuaauacaugaaagaac

SEQ ID NO: 863224 - RNA, 19 nt, Artificial Sequence
  Description of Artificial Sequence: Synthetic oligonucleotide
uccuggaaugagccuaaua

SEQ ID NO: 863225 - RNA, 19 nt, Artificial Sequence
  Description of Artificial Sequence: Synthetic oligonucleotide
cuggacaacucgaaggaua

SEQ ID NO: 863226 - RNA, 19 nt, Artificial Sequence
  Description of Artificial Sequence: Synthetic oligonucleotide
caacuaauuguuuggcugu

SEQ ID NO: 863227 - RNA, 19 nt, Artificial Sequence
  Description of Artificial Sequence: Synthetic oligonucleotide
gcuagacauguaugagugg

SEQ ID NO: 863228 - RNA, 19 nt, Artificial Sequence
  Description of Artificial Sequence: Synthetic oligonucleotide
gggaguacgacugcagcag

SEQ ID NO: 863229 - RNA, 19 nt, Artificial Sequence
  Description of Artificial Sequence: Synthetic oligonucleotide
aacuagcacugaaggaccu

SEQ ID NO: 863230 - RNA, 19 nt, Artificial Sequence
  Description of Artificial Sequence: Synthetic oligonucleotide
ugggauccugcggguaucg

SEQ ID NO: 863231 - RNA, 19 nt, Artificial Sequence
  Description of Artificial Sequence: Synthetic oligonucleotide
aacuaauuguuuggcuguu

SEQ ID NO: 863232 - RNA, 19 nt, Artificial Sequence
  Description of Artificial Sequence: Synthetic oligonucleotide
guuauaggugggagauucc

SEQ ID NO: 863233 - RNA, 19 nt, Artificial Sequence
  Description of Artificial Sequence: Synthetic oligonucleotide
ggaaugcuaugaugcaaug

SEQ ID NO: 863234 - RNA, 19 nt, Artificial Sequence
  Description of Artificial Sequence: Synthetic oligonucleotide
aggcauaaucagaacagau

SEQ ID NO: 863235 - RNA, 19 nt, Artificial Sequence
  Description of Artificial Sequence: Synthetic oligonucleotide
ugaguccugguggaaacua

SEQ ID NO: 863236 - RNA, 19 nt, Artificial Sequence
  Description of Artificial Sequence: Synthetic oligonucleotide
uucccaugcgagagguagu

SEQ ID NO: 863237 - RNA, 19 nt, Artificial Sequence
  Description of Artificial Sequence: Synthetic oligonucleotide
uccuauugauagacuuaua

SEQ ID NO: 863238 - RNA, 19 nt, Artificial Sequence
  Description of Artificial Sequence: Synthetic oligonucleotide
gguugggaguuuuguagac

SEQ ID NO: 863239 - RNA, 19 nt, Artificial Sequence
  Description of Artificial Sequence: Synthetic oligonucleotide
uggcaauucccugggcaug

SEQ ID NO: 863240 - RNA, 19 nt, Artificial Sequence
  Description of Artificial Sequence: Synthetic oligonucleotide
agaaauuaaugaggagaua

SEQ ID NO: 863241 - RNA, 19 nt, Artificial Sequence
  Description of Artificial Sequence: Synthetic oligonucleotide
caccuugugaucaccaagu

SEQ ID NO: 863242 - RNA, 19 nt, Artificial Sequence
  Description of Artificial Sequence: Synthetic oligonucleotide
guccuguacauaacagcug

SEQ ID NO: 863243 - RNA, 19 nt, Artificial Sequence
  Description of Artificial Sequence: Synthetic oligonucleotide
ugguuccaaauggaaaguu

SEQ ID NO: 863244 - RNA, 19 nt, Artificial Sequence
  Description of Artificial Sequence: Synthetic oligonucleotide
aggagacuucccaccgccc

SEQ ID NO: 863245 - RNA, 19 nt, Artificial Sequence
  Description of Artificial Sequence: Synthetic oligonucleotide
guaccaucgucugaggucu

SEQ ID NO: 863246 - RNA, 19 nt, Artificial Sequence
  Description of Artificial Sequence: Synthetic oligonucleotide
ccaauguaugcugaacuac

SEQ ID NO: 863247 - RNA, 19 nt, Artificial Sequence
  Description of Artificial Sequence: Synthetic oligonucleotide
guuacugauuugaguccug

SEQ ID NO: 863248 - RNA, 19 nt, Artificial Sequence
  Description of Artificial Sequence: Synthetic oligonucleotide
acuagcacugaaggaccug

SEQ ID NO: 863249 - RNA, 19 nt, Artificial Sequence
  Description of Artificial Sequence: Synthetic oligonucleotide
cagcauugucagucauugc

SEQ ID NO: 863250 - RNA, 19 nt, Artificial Sequence
  Description of Artificial Sequence: Synthetic oligonucleotide
caccguguagauccucuuc

SEQ ID NO: 863251 - RNA, 19 nt, Artificial Sequence
  Description of Artificial Sequence: Synthetic oligonucleotide
gguggaaacuagcacugaa

SEQ ID NO: 863252 - RNA, 19 nt, Artificial Sequence
  Description of Artificial Sequence: Synthetic oligonucleotide
uuacauggaaguggucauu

SEQ ID NO: 863253 - RNA, 19 nt, Artificial Sequence
  Description of Artificial Sequence: Synthetic oligonucleotide
cauguccagaaucggugga

SEQ ID NO: 863254 - RNA, 19 nt, Artificial Sequence
  Description of Artificial Sequence: Synthetic oligonucleotide
gguguauugcaauaugguu

SEQ ID NO: 863255 - RNA, 19 nt, Artificial Sequence
  Description of Artificial Sequence: Synthetic oligonucleotide
gacgucccuguuccuaaga

SEQ ID NO: 863256 - RNA, 19 nt, Artificial Sequence
  Description of Artificial Sequence: Synthetic oligonucleotide
caucucaugaguguuguau

SEQ ID NO: 863257 - RNA, 19 nt, Artificial Sequence
  Description of Artificial Sequence: Synthetic oligonucleotide
guuuucccaggcuggugga

SEQ ID NO: 863258 - RNA, 19 nt, Artificial Sequence
  Description of Artificial Sequence: Synthetic oligonucleotide
agcaccguguagauccucu

SEQ ID NO: 863259 - RNA, 19 nt, Artificial Sequence
  Description of Artificial Sequence: Synthetic oligonucleotide
gucgggaguacgacugcag

SEQ ID NO: 863260 - RNA, 19 nt, Artificial Sequence
  Description of Artificial Sequence: Synthetic oligonucleotide
ugguggaaacuagcacuga

SEQ ID NO: 863261 - RNA, 19 nt, Artificial Sequence
  Description of Artificial Sequence: Synthetic oligonucleotide
ggaguacgacugcagcagc

SEQ ID NO: 863262 - RNA, 19 nt, Artificial Sequence
  Description of Artificial Sequence: Synthetic oligonucleotide
uugugcuguauaggaaauu

SEQ ID NO: 863263 - RNA, 19 nt, Artificial Sequence
  Description of Artificial Sequence: Synthetic oligonucleotide
guaaagcaucuucuugggu

SEQ ID NO: 863264 - RNA, 19 nt, Artificial Sequence
  Description of Artificial Sequence: Synthetic oligonucleotide
ucccaugcgagagguaguu

SEQ ID NO: 863265 - RNA, 19 nt, Artificial Sequence
  Description of Artificial Sequence: Synthetic oligonucleotide
auguccagaaucgguggau

SEQ ID NO: 863266 - RNA, 19 nt, Artificial Sequence
  Description of Artificial Sequence: Synthetic oligonucleotide
cauguaugaguggauaaau

SEQ ID NO: 863267 - RNA, 19 nt, Artificial Sequence
  Description of Artificial Sequence: Synthetic oligonucleotide
caccagugguucaguuccc

SEQ ID NO: 863268 - RNA, 19 nt, Artificial Sequence
  Description of Artificial Sequence: Synthetic oligonucleotide
ggcgucgggaguacgacug

SEQ ID NO: 863269 - RNA, 19 nt, Artificial Sequence
  Description of Artificial Sequence: Synthetic oligonucleotide
acuaauuguuuggcuguuu

SEQ ID NO: 863270 - RNA, 19 nt, Artificial Sequence
  Description of Artificial Sequence: Synthetic oligonucleotide
gcaacguuaggcaucgaaa

SEQ ID NO: 863271 - RNA, 19 nt, Artificial Sequence
  Description of Artificial Sequence: Synthetic oligonucleotide
cuggaaugcuaugaugcaa

SEQ ID NO: 863272 - RNA, 19 nt, Artificial Sequence
  Description of Artificial Sequence: Synthetic oligonucleotide
ccugguggaaacuagcacu

SEQ ID NO: 863273 - RNA, 19 nt, Artificial Sequence
  Description of Artificial Sequence: Synthetic oligonucleotide
gcgagagguaguuuuccca

SEQ ID NO: 863274 - RNA, 19 nt, Artificial Sequence
  Description of Artificial Sequence: Synthetic oligonucleotide
acuggacaacucgaaggau

SEQ ID NO: 863275 - RNA, 19 nt, Artificial Sequence
  Description of Artificial Sequence: Synthetic oligonucleotide
gcuaugaugcaaugcaaau

SEQ ID NO: 863276 - RNA, 19 nt, Artificial Sequence
  Description of Artificial Sequence: Synthetic oligonucleotide
cuguuccuaagaagaagcu

SEQ ID NO: 863277 - RNA, 19 nt, Artificial Sequence
  Description of Artificial Sequence: Synthetic oligonucleotide
ggacacucccucugaugcc

SEQ ID NO: 863278 - RNA, 19 nt, Artificial Sequence
  Description of Artificial Sequence: Synthetic oligonucleotide
ccuacagcgcgcagugccc

SEQ ID NO: 863279 - RNA, 19 nt, Artificial Sequence
  Description of Artificial Sequence: Synthetic oligonucleotide
caauauccuagaagucugu

SEQ ID NO: 863280 - RNA, 19 nt, Artificial Sequence
  Description of Artificial Sequence: Synthetic oligonucleotide
ggccggcuuaugcaguacc

SEQ ID NO: 863281 - RNA, 19 nt, Artificial Sequence
  Description of Artificial Sequence: Synthetic oligonucleotide
cauugucagucauugccau

SEQ ID NO: 863282 - RNA, 19 nt, Artificial Sequence
  Description of Artificial Sequence: Synthetic oligonucleotide
ugcggguaucggauuccua

SEQ ID NO: 863283 - RNA, 19 nt, Artificial Sequence
  Description of Artificial Sequence: Synthetic oligonucleotide
gcgcgcagugcccucuugg

SEQ ID NO: 863284 - RNA, 19 nt, Artificial Sequence
  Description of Artificial Sequence: Synthetic oligonucleotide
gcccagacgcccaugcugc

SEQ ID NO: 863285 - RNA, 19 nt, Artificial Sequence
  Description of Artificial Sequence: Synthetic oligonucleotide
ucgguggaucuuccagcuu

SEQ ID NO: 863286 - RNA, 19 nt, Artificial Sequence
  Description of Artificial Sequence: Synthetic oligonucleotide
ugcgggcggagcagaccca

SEQ ID NO: 863287 - RNA, 19 nt, Artificial Sequence
  Description of Artificial Sequence: Synthetic oligonucleotide
guauuguggccggcuuaug

SEQ ID NO: 863288 - RNA, 19 nt, Artificial Sequence
  Description of Artificial Sequence: Synthetic oligonucleotide
guaguuuucccaggcuggu

SEQ ID NO: 863289 - RNA, 19 nt, Artificial Sequence
  Description of Artificial Sequence: Synthetic oligonucleotide
caaaugggauccugcgggu

SEQ ID NO: 863290 - RNA, 19 nt, Artificial Sequence
  Description of Artificial Sequence: Synthetic oligonucleotide
ccguguagauccucuucug

SEQ ID NO: 863291 - RNA, 19 nt, Artificial Sequence
  Description of Artificial Sequence: Synthetic oligonucleotide
gcucccauugugcuguaua

SEQ ID NO: 863292 - RNA, 19 nt, Artificial Sequence
  Description of Artificial Sequence: Synthetic oligonucleotide
gccaacugagucucuggaa

SEQ ID NO: 863293 - RNA, 19 nt, Artificial Sequence
  Description of Artificial Sequence: Synthetic oligonucleotide
agcgcgcagugcccucuug

SEQ ID NO: 863294 - RNA, 19 nt, Artificial Sequence
  Description of Artificial Sequence: Synthetic oligonucleotide
ggauuccuacagcgcgcag

SEQ ID NO: 863295 - RNA, 19 nt, Artificial Sequence
  Description of Artificial Sequence: Synthetic oligonucleotide
agguauugucagggaggca

SEQ ID NO: 863296 - RNA, 19 nt, Artificial Sequence
  Description of Artificial Sequence: Synthetic oligonucleotide
accaucgucugaggucuaa

SEQ ID NO: 863297 - RNA, 19 nt, Artificial Sequence
  Description of Artificial Sequence: Synthetic oligonucleotide
auccugcggguaucggauu

SEQ ID NO: 863298 - RNA, 19 nt, Artificial Sequence
  Description of Artificial Sequence: Synthetic oligonucleotide
guauugcaauaugguuaca

SEQ ID NO: 863299 - RNA, 19 nt, Artificial Sequence
  Description of Artificial Sequence: Synthetic oligonucleotide
cggcuuaugcaguaccauc

SEQ ID NO: 863300 - RNA, 19 nt, Artificial Sequence
  Description of Artificial Sequence: Synthetic oligonucleotide
guggccggcuuaugcagua

SEQ ID NO: 863301 - RNA, 19 nt, Artificial Sequence
  Description of Artificial Sequence: Synthetic oligonucleotide
uggccggcuuaugcaguac

SEQ ID NO: 863302 - RNA, 19 nt, Artificial Sequence
  Description of Artificial Sequence: Synthetic oligonucleotide
guuaggcaucgaaagcaau

SEQ ID NO: 863303 - RNA, 19 nt, Artificial Sequence
  Description of Artificial Sequence: Synthetic oligonucleotide
ccccuugagguguauugca

SEQ ID NO: 863304 - RNA, 19 nt, Artificial Sequence
  Description of Artificial Sequence: Synthetic oligonucleotide
acagcaccguguagauccu

SEQ ID NO: 863305 - RNA, 19 nt, Artificial Sequence
  Description of Artificial Sequence: Synthetic oligonucleotide
uaccaucgucugaggucua

SEQ ID NO: 863306 - RNA, 19 nt, Artificial Sequence
  Description of Artificial Sequence: Synthetic oligonucleotide
caugaaugcuagacaucuu

SEQ ID NO: 863307 - RNA, 19 nt, Artificial Sequence
  Description of Artificial Sequence: Synthetic oligonucleotide
ccaucgucugaggucuaac

SEQ ID NO: 863308 - RNA, 19 nt, Artificial Sequence
  Description of Artificial Sequence: Synthetic oligonucleotide
gcgucgggaguacgacugc

SEQ ID NO: 863309 - RNA, 19 nt, Artificial Sequence
  Description of Artificial Sequence: Synthetic oligonucleotide
cacugccugauuuguguuu

SEQ ID NO: 863310 - RNA, 19 nt, Artificial Sequence
  Description of Artificial Sequence: Synthetic oligonucleotide
ucccucugaugccgcccuu

SEQ ID NO: 863311 - RNA, 19 nt, Artificial Sequence
  Description of Artificial Sequence: Synthetic oligonucleotide
cguuaggcaucgaaagcaa

SEQ ID NO: 863312 - RNA, 19 nt, Artificial Sequence
  Description of Artificial Sequence: Synthetic oligonucleotide
auuucccaugcgagaggua

SEQ ID NO: 863313 - RNA, 19 nt, Artificial Sequence
  Description of Artificial Sequence: Synthetic oligonucleotide
ccaugcgagagguaguuuu

SEQ ID NO: 863314 - RNA, 19 nt, Artificial Sequence
  Description of Artificial Sequence: Synthetic oligonucleotide
cucgaaggauaaugaccau

SEQ ID NO: 863315 - RNA, 19 nt, Artificial Sequence
  Description of Artificial Sequence: Synthetic oligonucleotide
gcgggcggagcagacccag

SEQ ID NO: 863316 - RNA, 19 nt, Artificial Sequence
  Description of Artificial Sequence: Synthetic oligonucleotide
gcagacgucccuguuccua

SEQ ID NO: 863317 - RNA, 19 nt, Artificial Sequence
  Description of Artificial Sequence: Synthetic oligonucleotide
cagcaccguguagauccuc

SEQ ID NO: 863318 - RNA, 19 nt, Artificial Sequence
  Description of Artificial Sequence: Synthetic oligonucleotide
accugcccagacgcccaug

SEQ ID NO: 863319 - RNA, 19 nt, Artificial Sequence
  Description of Artificial Sequence: Synthetic oligonucleotide
cggguaucggauuccuaca

SEQ ID NO: 863320 - RNA, 19 nt, Artificial Sequence
  Description of Artificial Sequence: Synthetic oligonucleotide
agcucccauugugcuguau

SEQ ID NO: 863321 - RNA, 19 nt, Artificial Sequence
  Description of Artificial Sequence: Synthetic oligonucleotide
cuacagcgcgcagugcccu

SEQ ID NO: 863322 - RNA, 19 nt, Artificial Sequence
  Description of Artificial Sequence: Synthetic oligonucleotide
cgucugaggucuaacacuu

SEQ ID NO: 863323 - RNA, 19 nt, Artificial Sequence
  Description of Artificial Sequence: Synthetic oligonucleotide
gaccugcccagacgcccau

SEQ ID NO: 863324 - RNA, 19 nt, Artificial Sequence
  Description of Artificial Sequence: Synthetic oligonucleotide
gggcgucgggaguacgacu

SEQ ID NO: 863325 - RNA, 19 nt, Artificial Sequence
  Description of Artificial Sequence: Synthetic oligonucleotide
gcugugccggguucccacu

SEQ ID NO: 863326 - RNA, 19 nt, Artificial Sequence
  Description of Artificial Sequence: Synthetic oligonucleotide
gcagaauacuggggacacu

SEQ ID NO: 863327 - RNA, 19 nt, Artificial Sequence
  Description of Artificial Sequence: Synthetic oligonucleotide
cggauuccuacagcgcgca

SEQ ID NO: 863328 - RNA, 19 nt, Artificial Sequence
  Description of Artificial Sequence: Synthetic oligonucleotide
gcaccguguagauccucuu

SEQ ID NO: 863329 - RNA, 19 nt, Artificial Sequence
  Description of Artificial Sequence: Synthetic oligonucleotide
ggacaacucgaaggauaau

SEQ ID NO: 863330 - RNA, 19 nt, Artificial Sequence
  Description of Artificial Sequence: Synthetic oligonucleotide
cggggcgucgggaguacga

SEQ ID NO: 863331 - RNA, 19 nt, Artificial Sequence
  Description of Artificial Sequence: Synthetic oligonucleotide
gcggugcgggcggagcaga

SEQ ID NO: 863332 - RNA, 19 nt, Artificial Sequence
  Description of Artificial Sequence: Synthetic oligonucleotide
cgucgggaguacgacugca

SEQ ID NO: 863333 - RNA, 19 nt, Artificial Sequence
  Description of Artificial Sequence: Synthetic oligonucleotide
cugcaacguuaggcaucga

SEQ ID NO: 863334 - RNA, 19 nt, Artificial Sequence
  Description of Artificial Sequence: Synthetic oligonucleotide
ccggcuuaugcaguaccau

SEQ ID NO: 863335 - RNA, 19 nt, Artificial Sequence
  Description of Artificial Sequence: Synthetic oligonucleotide
ccucugaugccgcccuuuu

SEQ ID NO: 863336 - RNA, 19 nt, Artificial Sequence
  Description of Artificial Sequence: Synthetic oligonucleotide
ccuccccuugagguguauu

SEQ ID NO: 863337 - RNA, 19 nt, Artificial Sequence
  Description of Artificial Sequence: Synthetic oligonucleotide
auaaaucucauucauauuc

SEQ ID NO: 863338 - RNA, 19 nt, Artificial Sequence
  Description of Artificial Sequence: Synthetic oligonucleotide
auugaauggauggagaccc

SEQ ID NO: 863339 - RNA, 19 nt, Artificial Sequence
  Description of Artificial Sequence: Synthetic oligonucleotide
auuaaucauguccggaucc

SEQ ID NO: 863340 - RNA, 19 nt, Artificial Sequence
  Description of Artificial Sequence: Synthetic oligonucleotide
auuggggugucuuagcucc

SEQ ID NO: 863341 - RNA, 19 nt, Artificial Sequence
  Description of Artificial Sequence: Synthetic oligonucleotide
ucauuaaugccccaugucc

SEQ ID NO: 863342 - RNA, 19 nt, Artificial Sequence
  Description of Artificial Sequence: Synthetic oligonucleotide
guagauaccacucugguac

SEQ ID NO: 863343 - RNA, 19 nt, Artificial Sequence
  Description of Artificial Sequence: Synthetic oligonucleotide
gaagagaucacaguaacag

SEQ ID NO: 863344 - RNA, 19 nt, Artificial Sequence
  Description of Artificial Sequence: Synthetic oligonucleotide
acugguaccggcuucauuc

SEQ ID NO: 863345 - RNA, 19 nt, Artificial Sequence
  Description of Artificial Sequence: Synthetic oligonucleotide
ucauguacuuccaugagug

SEQ ID NO: 863346 - RNA, 19 nt, Artificial Sequence
  Description of Artificial Sequence: Synthetic oligonucleotide
auauucaugacagaggaag

SEQ ID NO: 863347 - RNA, 19 nt, Artificial Sequence
  Description of Artificial Sequence: Synthetic oligonucleotide
ucuccuggcagguacaucg

SEQ ID NO: 863348 - RNA, 19 nt, Artificial Sequence
  Description of Artificial Sequence: Synthetic oligonucleotide
uccauuagcuccuucauga

SEQ ID NO: 863349 - RNA, 19 nt, Artificial Sequence
  Description of Artificial Sequence: Synthetic oligonucleotide
aagagaucacaguaacagg

SEQ ID NO: 863350 - RNA, 19 nt, Artificial Sequence
  Description of Artificial Sequence: Synthetic oligonucleotide
uuuccaaccgauuuuacaa

SEQ ID NO: 863351 - RNA, 19 nt, Artificial Sequence
  Description of Artificial Sequence: Synthetic oligonucleotide
aguauuugaucguccuucc

SEQ ID NO: 863352 - RNA, 19 nt, Artificial Sequence
  Description of Artificial Sequence: Synthetic oligonucleotide
uguggaucccaccuagugg

SEQ ID NO: 863353 - RNA, 19 nt, Artificial Sequence
  Description of Artificial Sequence: Synthetic oligonucleotide
ucauacaucgagaacuggu

SEQ ID NO: 863354 - RNA, 19 nt, Artificial Sequence
  Description of Artificial Sequence: Synthetic oligonucleotide
guagcgaaugcccucaucc

SEQ ID NO: 863355 - RNA, 19 nt, Artificial Sequence
  Description of Artificial Sequence: Synthetic oligonucleotide
auacaucgagaacugguac

SEQ ID NO: 863356 - RNA, 19 nt, Artificial Sequence
  Description of Artificial Sequence: Synthetic oligonucleotide
ugcagaagagaucacagua

SEQ ID NO: 863357 - RNA, 19 nt, Artificial Sequence
  Description of Artificial Sequence: Synthetic oligonucleotide
uccaaccgauuuuacaagg

SEQ ID NO: 863358 - RNA, 19 nt, Artificial Sequence
  Description of Artificial Sequence: Synthetic oligonucleotide
ucggguguugcauucgugg

SEQ ID NO: 863359 - RNA, 19 nt, Artificial Sequence
  Description of Artificial Sequence: Synthetic oligonucleotide
cucaucggagccuaggcgg

SEQ ID NO: 863360 - RNA, 19 nt, Artificial Sequence
  Description of Artificial Sequence: Synthetic oligonucleotide
aaccgauuuuacaaggcgg

SEQ ID NO: 863361 - RNA, 19 nt, Artificial Sequence
  Description of Artificial Sequence: Synthetic oligonucleotide
ugucagauaccaccccucg

SEQ ID NO: 863362 - RNA, 19 nt, Artificial Sequence
  Description of Artificial Sequence: Synthetic oligonucleotide
agauaccaccccucgacgc

SEQ ID NO: 863363 - RNA, 19 nt, Artificial Sequence
  Description of Artificial Sequence: Synthetic oligonucleotide
ugguacaagaagaaauccu

SEQ ID NO: 863364 - RNA, 19 nt, Artificial Sequence
  Description of Artificial Sequence: Synthetic oligonucleotide
augacagaggaagaugggc

SEQ ID NO: 863365 - RNA, 19 nt, Artificial Sequence
  Description of Artificial Sequence: Synthetic oligonucleotide
ugugcaucauacaucgaga

SEQ ID NO: 863366 - RNA, 19 nt, Artificial Sequence
  Description of Artificial Sequence: Synthetic oligonucleotide
ucucaucggagccuaggcg

SEQ ID NO: 863367 - RNA, 19 nt, Artificial Sequence
  Description of Artificial Sequence: Synthetic oligonucleotide
uacaaggcggaaaagggaa

SEQ ID NO: 863368 - RNA, 19 nt, Artificial Sequence
  Description of Artificial Sequence: Synthetic oligonucleotide
caucaagacgcccaccucg

SEQ ID NO: 863369 - RNA, 19 nt, Artificial Sequence
  Description of Artificial Sequence: Synthetic oligonucleotide
ucggaagccucaaaggccc

SEQ ID NO: 863370 - RNA, 19 nt, Artificial Sequence
  Description of Artificial Sequence: Synthetic oligonucleotide
agggccauucuccauuagc

SEQ ID NO: 863371 - RNA, 19 nt, Artificial Sequence
  Description of Artificial Sequence: Synthetic oligonucleotide
uacaucgagaacugguacc

SEQ ID NO: 863372 - RNA, 19 nt, Artificial Sequence
  Description of Artificial Sequence: Synthetic oligonucleotide
uuacaaggcggaaaaggga

SEQ ID NO: 863373 - RNA, 19 nt, Artificial Sequence
  Description of Artificial Sequence: Synthetic oligonucleotide
ucuacauucccucccugca

SEQ ID NO: 863374 - RNA, 19 nt, Artificial Sequence
  Description of Artificial Sequence: Synthetic oligonucleotide
auuaaugccccauguccuc

SEQ ID NO: 863375 - RNA, 19 nt, Artificial Sequence
  Description of Artificial Sequence: Synthetic oligonucleotide
uaguugccccgauugaugg

SEQ ID NO: 863376 - RNA, 19 nt, Artificial Sequence
  Description of Artificial Sequence: Synthetic oligonucleotide
guauaaaucucauucauau

SEQ ID NO: 863377 - RNA, 19 nt, Artificial Sequence
  Description of Artificial Sequence: Synthetic oligonucleotide
aguugucagauaccacccc

SEQ ID NO: 863378 - RNA, 19 nt, Artificial Sequence
  Description of Artificial Sequence: Synthetic oligonucleotide
uguguaugugaauuagcac

SEQ ID NO: 863379 - RNA, 19 nt, Artificial Sequence
  Description of Artificial Sequence: Synthetic oligonucleotide
caaccgauuuuacaaggcg

SEQ ID NO: 863380 - RNA, 19 nt, Artificial Sequence
  Description of Artificial Sequence: Synthetic oligonucleotide
uugggcguggccccuaagg

SEQ ID NO: 863381 - RNA, 19 nt, Artificial Sequence
  Description of Artificial Sequence: Synthetic oligonucleotide
acaucgagaacugguaccg

SEQ ID NO: 863382 - RNA, 19 nt, Artificial Sequence
  Description of Artificial Sequence: Synthetic oligonucleotide
agagaucacaguaacaggu

SEQ ID NO: 863383 - RNA, 19 nt, Artificial Sequence
  Description of Artificial Sequence: Synthetic oligonucleotide
aaaggcccuagguaguacu

SEQ ID NO: 863384 - RNA, 19 nt, Artificial Sequence
  Description of Artificial Sequence: Synthetic oligonucleotide
caugucucgcucuuggcag

SEQ ID NO: 863385 - RNA, 19 nt, Artificial Sequence
  Description of Artificial Sequence: Synthetic oligonucleotide
auugcggacugacaccagg

SEQ ID NO: 863386 - RNA, 19 nt, Artificial Sequence
  Description of Artificial Sequence: Synthetic oligonucleotide
gugaauuagcaccugguuc

SEQ ID NO: 863387 - RNA, 19 nt, Artificial Sequence
  Description of Artificial Sequence: Synthetic oligonucleotide
agaugggcggauugugccc

SEQ ID NO: 863388 - RNA, 19 nt, Artificial Sequence
  Description of Artificial Sequence: Synthetic oligonucleotide
uggcuuauagguguguggc

SEQ ID NO: 863389 - RNA, 19 nt, Artificial Sequence
  Description of Artificial Sequence: Synthetic oligonucleotide
cucggaagccucaaaggcc

SEQ ID NO: 863390 - RNA, 19 nt, Artificial Sequence
  Description of Artificial Sequence: Synthetic oligonucleotide
guagguuccgaagacuggg

SEQ ID NO: 863391 - RNA, 19 nt, Artificial Sequence
  Description of Artificial Sequence: Synthetic oligonucleotide
caggacgagcacaugauug

SEQ ID NO: 863392 - RNA, 19 nt, Artificial Sequence
  Description of Artificial Sequence: Synthetic oligonucleotide
ugaauggauggagacccgg

SEQ ID NO: 863393 - RNA, 19 nt, Artificial Sequence
  Description of Artificial Sequence: Synthetic oligonucleotide
acagucgucagcucggcca

SEQ ID NO: 863394 - RNA, 19 nt, Artificial Sequence
  Description of Artificial Sequence: Synthetic oligonucleotide
uuugaucguccuuccaucu

SEQ ID NO: 863395 - RNA, 19 nt, Artificial Sequence
  Description of Artificial Sequence: Synthetic oligonucleotide
accaagcaccaucaagacg

SEQ ID NO: 863396 - RNA, 19 nt, Artificial Sequence
  Description of Artificial Sequence: Synthetic oligonucleotide
gauaccaccccucgacgcc

SEQ ID NO: 863397 - RNA, 19 nt, Artificial Sequence
  Description of Artificial Sequence: Synthetic oligonucleotide
acucguuggugccacgcac

SEQ ID NO: 863398 - RNA, 19 nt, Artificial Sequence
  Description of Artificial Sequence: Synthetic oligonucleotide
caguugucagauaccaccc

SEQ ID NO: 863399 - RNA, 19 nt, Artificial Sequence
  Description of Artificial Sequence: Synthetic oligonucleotide
ggugucuuagcuccugugg

SEQ ID NO: 863400 - RNA, 19 nt, Artificial Sequence
  Description of Artificial Sequence: Synthetic oligonucleotide
caugacagaggaagauggg

SEQ ID NO: 863401 - RNA, 19 nt, Artificial Sequence
  Description of Artificial Sequence: Synthetic oligonucleotide
uggugccacgcacaauucg

SEQ ID NO: 863402 - RNA, 19 nt, Artificial Sequence
  Description of Artificial Sequence: Synthetic oligonucleotide
uguguggcuguagauacca

SEQ ID NO: 863403 - RNA, 19 nt, Artificial Sequence
  Description of Artificial Sequence: Synthetic oligonucleotide
uguacuuccaugagugcuu

SEQ ID NO: 863404 - RNA, 19 nt, Artificial Sequence
  Description of Artificial Sequence: Synthetic oligonucleotide
caucauacaucgagaacug

SEQ ID NO: 863405 - RNA, 19 nt, Artificial Sequence
  Description of Artificial Sequence: Synthetic oligonucleotide
uaguacuuccccucugccc

SEQ ID NO: 863406 - RNA, 19 nt, Artificial Sequence
  Description of Artificial Sequence: Synthetic oligonucleotide
cauugaauggauggagacc

SEQ ID NO: 863407 - RNA, 19 nt, Artificial Sequence
  Description of Artificial Sequence: Synthetic oligonucleotide
acaugucucgcucuuggca

SEQ ID NO: 863408 - RNA, 19 nt, Artificial Sequence
  Description of Artificial Sequence: Synthetic oligonucleotide
agcgaaugcccucauccag

SEQ ID NO: 863409 - RNA, 19 nt, Artificial Sequence
  Description of Artificial Sequence: Synthetic oligonucleotide
agucccaugucugcgguac

SEQ ID NO: 863410 - RNA, 19 nt, Artificial Sequence
  Description of Artificial Sequence: Synthetic oligonucleotide
acaguaacagguggcuccc

SEQ ID NO: 863411 - RNA, 19 nt, Artificial Sequence
  Description of Artificial Sequence: Synthetic oligonucleotide
aguggccuggcgcuugccc

SEQ ID NO: 863412 - RNA, 19 nt, Artificial Sequence
  Description of Artificial Sequence: Synthetic oligonucleotide
cugguacaagaagaaaucc

SEQ ID NO: 863413 - RNA, 19 nt, Artificial Sequence
  Description of Artificial Sequence: Synthetic oligonucleotide
auugugcccaggcgguagc

SEQ ID NO: 863414 - RNA, 19 nt, Artificial Sequence
  Description of Artificial Sequence: Synthetic oligonucleotide
uggguaacaguugucagau

SEQ ID NO: 863415 - RNA, 19 nt, Artificial Sequence
  Description of Artificial Sequence: Synthetic oligonucleotide
auagguguguggcuguaga

SEQ ID NO: 863416 - RNA, 19 nt, Artificial Sequence
  Description of Artificial Sequence: Synthetic oligonucleotide
caguauuugaucguccuuc

SEQ ID NO: 863417 - RNA, 19 nt, Artificial Sequence
  Description of Artificial Sequence: Synthetic oligonucleotide
cauuaaucauguccggauc

SEQ ID NO: 863418 - RNA, 19 nt, Artificial Sequence
  Description of Artificial Sequence: Synthetic oligonucleotide
ucuccuaaagcagcagagc

SEQ ID NO: 863419 - RNA, 19 nt, Artificial Sequence
  Description of Artificial Sequence: Synthetic oligonucleotide
uucaggacgagcacaugau

SEQ ID NO: 863420 - RNA, 19 nt, Artificial Sequence
  Description of Artificial Sequence: Synthetic oligonucleotide
agguacaucgauugcaguu

SEQ ID NO: 863421 - RNA, 19 nt, Artificial Sequence
  Description of Artificial Sequence: Synthetic oligonucleotide
aggacgagcacaugauugu

SEQ ID NO: 863422 - RNA, 19 nt, Artificial Sequence
  Description of Artificial Sequence: Synthetic oligonucleotide
ggugucaugugucccauug

SEQ ID NO: 863423 - RNA, 19 nt, Artificial Sequence
  Description of Artificial Sequence: Synthetic oligonucleotide
aguugccccgauugauggc

SEQ ID NO: 863424 - RNA, 19 nt, Artificial Sequence
  Description of Artificial Sequence: Synthetic oligonucleotide
caguuuccauaccaggccc

SEQ ID NO: 863425 - RNA, 19 nt, Artificial Sequence
  Description of Artificial Sequence: Synthetic oligonucleotide
gguguguggcuguagauac

SEQ ID NO: 863426 - RNA, 19 nt, Artificial Sequence
  Description of Artificial Sequence: Synthetic oligonucleotide
ugcgauugcagaagagauc

SEQ ID NO: 863427 - RNA, 19 nt, Artificial Sequence
  Description of Artificial Sequence: Synthetic oligonucleotide
auguacuuccaugagugcu

SEQ ID NO: 863428 - RNA, 19 nt, Artificial Sequence
  Description of Artificial Sequence: Synthetic oligonucleotide
ugggcguggccccuaaggc

SEQ ID NO: 863429 - RNA, 19 nt, Artificial Sequence
  Description of Artificial Sequence: Synthetic oligonucleotide
cucauuaaugccccauguc

SEQ ID NO: 863430 - RNA, 19 nt, Artificial Sequence
  Description of Artificial Sequence: Synthetic oligonucleotide
gaucccaccuaguggcugc

SEQ ID NO: 863431 - RNA, 19 nt, Artificial Sequence
  Description of Artificial Sequence: Synthetic oligonucleotide
ugccccagaaggcacuaug

SEQ ID NO: 863432 - RNA, 19 nt, Artificial Sequence
  Description of Artificial Sequence: Synthetic oligonucleotide
ggcaguaccggccaccugc

SEQ ID NO: 863433 - RNA, 19 nt, Artificial Sequence
  Description of Artificial Sequence: Synthetic oligonucleotide
cauuggaaucaaccugacc

SEQ ID NO: 863434 - RNA, 19 nt, Artificial Sequence
  Description of Artificial Sequence: Synthetic oligonucleotide
gagacggugcgauugcaga

SEQ ID NO: 863435 - RNA, 19 nt, Artificial Sequence
  Description of Artificial Sequence: Synthetic oligonucleotide
cuucaggacgagcacauga

SEQ ID NO: 863436 - RNA, 19 nt, Artificial Sequence
  Description of Artificial Sequence: Synthetic oligonucleotide
cauguacuuccaugagugc

SEQ ID NO: 863437 - RNA, 19 nt, Artificial Sequence
  Description of Artificial Sequence: Synthetic oligonucleotide
uugucagauaccaccccuc

SEQ ID NO: 863438 - RNA, 19 nt, Artificial Sequence
  Description of Artificial Sequence: Synthetic oligonucleotide
ccuaaagcagcagagcugc

SEQ ID NO: 863439 - RNA, 19 nt, Artificial Sequence
  Description of Artificial Sequence: Synthetic oligonucleotide
cacgaauggguaacaguug

SEQ ID NO: 863440 - RNA, 19 nt, Artificial Sequence
  Description of Artificial Sequence: Synthetic oligonucleotide
gguuccgaagacuggguag

SEQ ID NO: 863441 - RNA, 19 nt, Artificial Sequence
  Description of Artificial Sequence: Synthetic oligonucleotide
gguacaucgauugcaguug

SEQ ID NO: 863442 - RNA, 19 nt, Artificial Sequence
  Description of Artificial Sequence: Synthetic oligonucleotide
gcggauugugcccaggcgg

SEQ ID NO: 863443 - RNA, 19 nt, Artificial Sequence
  Description of Artificial Sequence: Synthetic oligonucleotide
guaguacuuccccucugcc

SEQ ID NO: 863444 - RNA, 19 nt, Artificial Sequence
  Description of Artificial Sequence: Synthetic oligonucleotide
uguccggauccacuagaca

SEQ ID NO: 863445 - RNA, 19 nt, Artificial Sequence
  Description of Artificial Sequence: Synthetic oligonucleotide
acgaagcucucaaugucac

SEQ ID NO: 863446 - RNA, 19 nt, Artificial Sequence
  Description of Artificial Sequence: Synthetic oligonucleotide
cauacaucgagaacuggua

SEQ ID NO: 863447 - RNA, 19 nt, Artificial Sequence
  Description of Artificial Sequence: Synthetic oligonucleotide
gaucuccugucaguggaag

SEQ ID NO: 863448 - RNA, 19 nt, Artificial Sequence
  Description of Artificial Sequence: Synthetic oligonucleotide
gacccggucagaugcaaca

SEQ ID NO: 863449 - RNA, 19 nt, Artificial Sequence
  Description of Artificial Sequence: Synthetic oligonucleotide
aucauacaucgagaacugg

SEQ ID NO: 863450 - RNA, 19 nt, Artificial Sequence
  Description of Artificial Sequence: Synthetic oligonucleotide
guaggcaggcgugaccugg

SEQ ID NO: 863451 - RNA, 19 nt, Artificial Sequence
  Description of Artificial Sequence: Synthetic oligonucleotide
uaggcgguaggcaggcgug

SEQ ID NO: 863452 - RNA, 19 nt, Artificial Sequence
  Description of Artificial Sequence: Synthetic oligonucleotide
cacucauuaaugccccaug

SEQ ID NO: 863453 - RNA, 19 nt, Artificial Sequence
  Description of Artificial Sequence: Synthetic oligonucleotide
ucgcucuuggcaguaccgg

SEQ ID NO: 863454 - RNA, 19 nt, Artificial Sequence
  Description of Artificial Sequence: Synthetic oligonucleotide
cuucucaucggagccuagg

SEQ ID NO: 863455 - RNA, 19 nt, Artificial Sequence
  Description of Artificial Sequence: Synthetic oligonucleotide
accgauuuuacaaggcgga

SEQ ID NO: 863456 - RNA, 19 nt, Artificial Sequence
  Description of Artificial Sequence: Synthetic oligonucleotide
ucgaggggacagcuucagg

SEQ ID NO: 863457 - RNA, 19 nt, Artificial Sequence
  Description of Artificial Sequence: Synthetic oligonucleotide
ggugccacgcacaauucgg

SEQ ID NO: 863458 - RNA, 19 nt, Artificial Sequence
  Description of Artificial Sequence: Synthetic oligonucleotide
guggguaucacaggacagc

SEQ ID NO: 863459 - RNA, 19 nt, Artificial Sequence
  Description of Artificial Sequence: Synthetic oligonucleotide
gucugagacggugcgauug

SEQ ID NO: 863460 - RNA, 19 nt, Artificial Sequence
  Description of Artificial Sequence: Synthetic oligonucleotide
ucaucggagccuaggcggu

SEQ ID NO: 863461 - RNA, 19 nt, Artificial Sequence
  Description of Artificial Sequence: Synthetic oligonucleotide
gccccagacgccuagcacg

SEQ ID NO: 863462 - RNA, 19 nt, Artificial Sequence
  Description of Artificial Sequence: Synthetic oligonucleotide
cacgaagcucucaauguca

SEQ ID NO: 863463 - RNA, 19 nt, Artificial Sequence
  Description of Artificial Sequence: Synthetic oligonucleotide
aggaugggugucauguguc

SEQ ID NO: 863464 - RNA, 19 nt, Artificial Sequence
  Description of Artificial Sequence: Synthetic oligonucleotide
uagguuccgaagacugggu

SEQ ID NO: 863465 - RNA, 19 nt, Artificial Sequence
  Description of Artificial Sequence: Synthetic oligonucleotide
gcuucauugggcguggccc

SEQ ID NO: 863466 - RNA, 19 nt, Artificial Sequence
  Description of Artificial Sequence: Synthetic oligonucleotide
acaaggcggaaaagggaac

SEQ ID NO: 863467 - RNA, 19 nt, Artificial Sequence
  Description of Artificial Sequence: Synthetic oligonucleotide
gacuggguagaugcggccc

SEQ ID NO: 863468 - RNA, 19 nt, Artificial Sequence
  Description of Artificial Sequence: Synthetic oligonucleotide
uggcugccacucauuaaug

SEQ ID NO: 863469 - RNA, 19 nt, Artificial Sequence
  Description of Artificial Sequence: Synthetic oligonucleotide
ucaggacgagcacaugauu

SEQ ID NO: 863470 - RNA, 19 nt, Artificial Sequence
  Description of Artificial Sequence: Synthetic oligonucleotide
ucucgaggggacagcuuca

SEQ ID NO: 863471 - RNA, 19 nt, Artificial Sequence
  Description of Artificial Sequence: Synthetic oligonucleotide
acgcacaauucggaagugg

SEQ ID NO: 863472 - RNA, 19 nt, Artificial Sequence
  Description of Artificial Sequence: Synthetic oligonucleotide
gaaggcacuaugguuccca

SEQ ID NO: 863473 - RNA, 19 nt, Artificial Sequence
  Description of Artificial Sequence: Synthetic oligonucleotide
augccccgcaggugcaacc

SEQ ID NO: 863474 - RNA, 19 nt, Artificial Sequence
  Description of Artificial Sequence: Synthetic oligonucleotide
agaacugguaccggcuuca

SEQ ID NO: 863475 - RNA, 19 nt, Artificial Sequence
  Description of Artificial Sequence: Synthetic oligonucleotide
cacgaguuggcagcagucc

SEQ ID NO: 863476 - RNA, 19 nt, Artificial Sequence
  Description of Artificial Sequence: Synthetic oligonucleotide
ugcccagcgccguauaaau

SEQ ID NO: 863477 - RNA, 19 nt, Artificial Sequence
  Description of Artificial Sequence: Synthetic oligonucleotide
cucaugcaucuuuggcucc

SEQ ID NO: 863478 - RNA, 19 nt, Artificial Sequence
  Description of Artificial Sequence: Synthetic oligonucleotide
auguccggauccacuagac

SEQ ID NO: 863479 - RNA, 19 nt, Artificial Sequence
  Description of Artificial Sequence: Synthetic oligonucleotide
cgccguauaaaucucauuc

SEQ ID NO: 863480 - RNA, 19 nt, Artificial Sequence
  Description of Artificial Sequence: Synthetic oligonucleotide
cucacggcccacgaauggg

SEQ ID NO: 863481 - RNA, 19 nt, Artificial Sequence
  Description of Artificial Sequence: Synthetic oligonucleotide
uccggcugugaugucuggg

SEQ ID NO: 863482 - RNA, 19 nt, Artificial Sequence
  Description of Artificial Sequence: Synthetic oligonucleotide
cacaugucucgcucuuggc

SEQ ID NO: 863483 - RNA, 19 nt, Artificial Sequence
  Description of Artificial Sequence: Synthetic oligonucleotide
aguuccggcugugaugucu

SEQ ID NO: 863484 - RNA, 19 nt, Artificial Sequence
  Description of Artificial Sequence: Synthetic oligonucleotide
auggagacccggucagaug

SEQ ID NO: 863485 - RNA, 19 nt, Artificial Sequence
  Description of Artificial Sequence: Synthetic oligonucleotide
auaccaccccucgacgccg

SEQ ID NO: 863486 - RNA, 19 nt, Artificial Sequence
  Description of Artificial Sequence: Synthetic oligonucleotide
ccgauugauggcauuaauc

SEQ ID NO: 863487 - RNA, 19 nt, Artificial Sequence
  Description of Artificial Sequence: Synthetic oligonucleotide
agaucggguguugcauucg

SEQ ID NO: 863488 - RNA, 19 nt, Artificial Sequence
  Description of Artificial Sequence: Synthetic oligonucleotide
ccaaccgauuuuacaaggc

SEQ ID NO: 863489 - RNA, 19 nt, Artificial Sequence
  Description of Artificial Sequence: Synthetic oligonucleotide
accccgaggcagaaguccc

SEQ ID NO: 863490 - RNA, 19 nt, Artificial Sequence
  Description of Artificial Sequence: Synthetic oligonucleotide
ucccagaucggguguugca

SEQ ID NO: 863491 - RNA, 19 nt, Artificial Sequence
  Description of Artificial Sequence: Synthetic oligonucleotide
gaacugaaggggagcuaag

SEQ ID NO: 863492 - RNA, 19 nt, Artificial Sequence
  Description of Artificial Sequence: Synthetic oligonucleotide
agacggugcgauugcagaa

SEQ ID NO: 863493 - RNA, 19 nt, Artificial Sequence
  Description of Artificial Sequence: Synthetic oligonucleotide
agcgggaaguggccuggcg

SEQ ID NO: 863494 - RNA, 19 nt, Artificial Sequence
  Description of Artificial Sequence: Synthetic oligonucleotide
ucuuagcuccugugguccu

SEQ ID NO: 863495 - RNA, 19 nt, Artificial Sequence
  Description of Artificial Sequence: Synthetic oligonucleotide
caagcaccaucaagacgcc

SEQ ID NO: 863496 - RNA, 19 nt, Artificial Sequence
  Description of Artificial Sequence: Synthetic oligonucleotide
guugucagauaccaccccu

SEQ ID NO: 863497 - RNA, 19 nt, Artificial Sequence
  Description of Artificial Sequence: Synthetic oligonucleotide
uguugcauucguggaucug

SEQ ID NO: 863498 - RNA, 19 nt, Artificial Sequence
  Description of Artificial Sequence: Synthetic oligonucleotide
ucggccacgacagcacaug

SEQ ID NO: 863499 - RNA, 19 nt, Artificial Sequence
  Description of Artificial Sequence: Synthetic oligonucleotide
cuaugguucccagccugcc

SEQ ID NO: 863500 - RNA, 19 nt, Artificial Sequence
  Description of Artificial Sequence: Synthetic oligonucleotide
ucccaugucugcgguacug

SEQ ID NO: 863501 - RNA, 19 nt, Artificial Sequence
  Description of Artificial Sequence: Synthetic oligonucleotide
gccguauaaaucucauuca

SEQ ID NO: 863502 - RNA, 19 nt, Artificial Sequence
  Description of Artificial Sequence: Synthetic oligonucleotide
ggcugccacucauuaaugc

SEQ ID NO: 863503 - RNA, 19 nt, Artificial Sequence
  Description of Artificial Sequence: Synthetic oligonucleotide
ggauccacuagacauggcu

SEQ ID NO: 863504 - RNA, 19 nt, Artificial Sequence
  Description of Artificial Sequence: Synthetic oligonucleotide
gaucguccuuccaucuggc

SEQ ID NO: 863505 - RNA, 19 nt, Artificial Sequence
  Description of Artificial Sequence: Synthetic oligonucleotide
ggugcgauugcagaagaga

SEQ ID NO: 863506 - RNA, 19 nt, Artificial Sequence
  Description of Artificial Sequence: Synthetic oligonucleotide
caccccgaggcagaagucc

SEQ ID NO: 863507 - RNA, 19 nt, Artificial Sequence
  Description of Artificial Sequence: Synthetic oligonucleotide
guggcugccacucauuaau

SEQ ID NO: 863508 - RNA, 19 nt, Artificial Sequence
  Description of Artificial Sequence: Synthetic oligonucleotide
gaugggcggauugugccca

SEQ ID NO: 863509 - RNA, 19 nt, Artificial Sequence
  Description of Artificial Sequence: Synthetic oligonucleotide
ucugcccagcgccguauaa

SEQ ID NO: 863510 - RNA, 19 nt, Artificial Sequence
  Description of Artificial Sequence: Synthetic oligonucleotide
gcagcaguccaguauuuga

SEQ ID NO: 863511 - RNA, 19 nt, Artificial Sequence
  Description of Artificial Sequence: Synthetic oligonucleotide
ggcggauugugcccaggcg

SEQ ID NO: 863512 - RNA, 19 nt, Artificial Sequence
  Description of Artificial Sequence: Synthetic oligonucleotide
gguaccggcuucauucugc

SEQ ID NO: 863513 - RNA, 19 nt, Artificial Sequence
  Description of Artificial Sequence: Synthetic oligonucleotide
guacuuccaugagugcuug

SEQ ID NO: 863514 - RNA, 19 nt, Artificial Sequence
  Description of Artificial Sequence: Synthetic oligonucleotide
caagacgcccaccucggca

SEQ ID NO: 863515 - RNA, 19 nt, Artificial Sequence
  Description of Artificial Sequence: Synthetic oligonucleotide
gcgaaugcccucauccagg

SEQ ID NO: 863516 - RNA, 19 nt, Artificial Sequence
  Description of Artificial Sequence: Synthetic oligonucleotide
gguggguaucacaggacag

SEQ ID NO: 863517 - RNA, 19 nt, Artificial Sequence
  Description of Artificial Sequence: Synthetic oligonucleotide
uuccggcugugaugucugg

SEQ ID NO: 863518 - RNA, 19 nt, Artificial Sequence
  Description of Artificial Sequence: Synthetic oligonucleotide
cccguaguugccccgauug

SEQ ID NO: 863519 - RNA, 19 nt, Artificial Sequence
  Description of Artificial Sequence: Synthetic oligonucleotide
gguguugcauucguggauc

SEQ ID NO: 863520 - RNA, 19 nt, Artificial Sequence
  Description of Artificial Sequence: Synthetic oligonucleotide
caugcauccuuggauggga

SEQ ID NO: 863521 - RNA, 19 nt, Artificial Sequence
  Description of Artificial Sequence: Synthetic oligonucleotide
cagucgucagcucggccac

SEQ ID NO: 863522 - RNA, 19 nt, Artificial Sequence
  Description of Artificial Sequence: Synthetic oligonucleotide
caucgagaacugguaccgg

SEQ ID NO: 863523 - RNA, 19 nt, Artificial Sequence
  Description of Artificial Sequence: Synthetic oligonucleotide
aggcggaaaagggaacuga

SEQ ID NO: 863524 - RNA, 19 nt, Artificial Sequence
  Description of Artificial Sequence: Synthetic oligonucleotide
agguuccgaagacugggua

SEQ ID NO: 863525 - RNA, 19 nt, Artificial Sequence
  Description of Artificial Sequence: Synthetic oligonucleotide
cauucguggaucugugugu

SEQ ID NO: 863526 - RNA, 19 nt, Artificial Sequence
  Description of Artificial Sequence: Synthetic oligonucleotide
ggcgugaccugguagaugu

SEQ ID NO: 863527 - RNA, 19 nt, Artificial Sequence
  Description of Artificial Sequence: Synthetic oligonucleotide
ugaccugguagaugucauu

SEQ ID NO: 863528 - RNA, 19 nt, Artificial Sequence
  Description of Artificial Sequence: Synthetic oligonucleotide
cucguuggugccacgcaca

SEQ ID NO: 863529 - RNA, 19 nt, Artificial Sequence
  Description of Artificial Sequence: Synthetic oligonucleotide
ggcagguacaucgauugca

SEQ ID NO: 863530 - RNA, 19 nt, Artificial Sequence
  Description of Artificial Sequence: Synthetic oligonucleotide
ggaacugaaggggagcuaa

SEQ ID NO: 863531 - RNA, 19 nt, Artificial Sequence
  Description of Artificial Sequence: Synthetic oligonucleotide
auucguggaucugugugua

SEQ ID NO: 863532 - RNA, 19 nt, Artificial Sequence
  Description of Artificial Sequence: Synthetic oligonucleotide
gucagauaccaccccucga

SEQ ID NO: 863533 - RNA, 19 nt, Artificial Sequence
  Description of Artificial Sequence: Synthetic oligonucleotide
guuccggcugugaugucug

SEQ ID NO: 863534 - RNA, 19 nt, Artificial Sequence
  Description of Artificial Sequence: Synthetic oligonucleotide
gacugacaccaggagggac

SEQ ID NO: 863535 - RNA, 19 nt, Artificial Sequence
  Description of Artificial Sequence: Synthetic oligonucleotide
aucguccuuccaucuggca

SEQ ID NO: 863536 - RNA, 19 nt, Artificial Sequence
  Description of Artificial Sequence: Synthetic oligonucleotide
uuauagguguguggcugua

SEQ ID NO: 863537 - RNA, 19 nt, Artificial Sequence
  Description of Artificial Sequence: Synthetic oligonucleotide
aucggagccuaggcgguag

SEQ ID NO: 863538 - RNA, 19 nt, Artificial Sequence
  Description of Artificial Sequence: Synthetic oligonucleotide
gagccaacucccugcgcca

SEQ ID NO: 863539 - RNA, 19 nt, Artificial Sequence
  Description of Artificial Sequence: Synthetic oligonucleotide
gugucaugugucccauuga

SEQ ID NO: 863540 - RNA, 19 nt, Artificial Sequence
  Description of Artificial Sequence: Synthetic oligonucleotide
agacccggucagaugcaac

SEQ ID NO: 863541 - RNA, 19 nt, Artificial Sequence
  Description of Artificial Sequence: Synthetic oligonucleotide
guacuuccccucugcccag

SEQ ID NO: 863542 - RNA, 19 nt, Artificial Sequence
  Description of Artificial Sequence: Synthetic oligonucleotide
cuuauagguguguggcugu

SEQ ID NO: 863543 - RNA, 19 nt, Artificial Sequence
  Description of Artificial Sequence: Synthetic oligonucleotide
uuccccugacugcacccaa

SEQ ID NO: 863544 - RNA, 19 nt, Artificial Sequence
  Description of Artificial Sequence: Synthetic oligonucleotide
gcggaaaagggaacugaag

SEQ ID NO: 863545 - RNA, 19 nt, Artificial Sequence
  Description of Artificial Sequence: Synthetic oligonucleotide
cucgacugugcaucauaca

SEQ ID NO: 863546 - RNA, 19 nt, Artificial Sequence
  Description of Artificial Sequence: Synthetic oligonucleotide
cacagucgucagcucggcc

SEQ ID NO: 863547 - RNA, 19 nt, Artificial Sequence
  Description of Artificial Sequence: Synthetic oligonucleotide
gcaggcgugaccugguaga

SEQ ID NO: 863548 - RNA, 19 nt, Artificial Sequence
  Description of Artificial Sequence: Synthetic oligonucleotide
cucgaggggacagcuucag

SEQ ID NO: 863549 - RNA, 19 nt, Artificial Sequence
  Description of Artificial Sequence: Synthetic oligonucleotide
gccacgacagcacaugucu

SEQ ID NO: 863550 - RNA, 19 nt, Artificial Sequence
  Description of Artificial Sequence: Synthetic oligonucleotide
auugggcguggccccuaag

SEQ ID NO: 863551 - RNA, 19 nt, Artificial Sequence
  Description of Artificial Sequence: Synthetic oligonucleotide
cucaccccaccacgggccc

SEQ ID NO: 863552 - RNA, 19 nt, Artificial Sequence
  Description of Artificial Sequence: Synthetic oligonucleotide
cacgggccccacgaguugg

SEQ ID NO: 863553 - RNA, 19 nt, Artificial Sequence
  Description of Artificial Sequence: Synthetic oligonucleotide
gacgagcacaugauugucu

SEQ ID NO: 863554 - RNA, 19 nt, Artificial Sequence
  Description of Artificial Sequence: Synthetic oligonucleotide
gaucggguguugcauucgu

SEQ ID NO: 863555 - RNA, 19 nt, Artificial Sequence
  Description of Artificial Sequence: Synthetic oligonucleotide
gggcguggccccuaaggcc

SEQ ID NO: 863556 - RNA, 19 nt, Artificial Sequence
  Description of Artificial Sequence: Synthetic oligonucleotide
uucguggaucuguguguau

SEQ ID NO: 863557 - RNA, 19 nt, Artificial Sequence
  Description of Artificial Sequence: Synthetic oligonucleotide
agcacaugucucgcucuug

SEQ ID NO: 863558 - RNA, 19 nt, Artificial Sequence
  Description of Artificial Sequence: Synthetic oligonucleotide
caaaggcccuagguaguac

SEQ ID NO: 863559 - RNA, 19 nt, Artificial Sequence
  Description of Artificial Sequence: Synthetic oligonucleotide
cuuccccucugcccagcgc

SEQ ID NO: 863560 - RNA, 19 nt, Artificial Sequence
  Description of Artificial Sequence: Synthetic oligonucleotide
ccggauccacuagacaugg

SEQ ID NO: 863561 - RNA, 19 nt, Artificial Sequence
  Description of Artificial Sequence: Synthetic oligonucleotide
gcaugcauccuuggauggg

SEQ ID NO: 863562 - RNA, 19 nt, Artificial Sequence
  Description of Artificial Sequence: Synthetic oligonucleotide
gaauggauggagacccggu

SEQ ID NO: 863563 - RNA, 19 nt, Artificial Sequence
  Description of Artificial Sequence: Synthetic oligonucleotide
guacaucgauugcaguugu

SEQ ID NO: 863564 - RNA, 19 nt, Artificial Sequence
  Description of Artificial Sequence: Synthetic oligonucleotide
gggacuuuccaaccgauuu

SEQ ID NO: 863565 - RNA, 19 nt, Artificial Sequence
  Description of Artificial Sequence: Synthetic oligonucleotide
aguagcccuuggcucucga

SEQ ID NO: 863566 - RNA, 19 nt, Artificial Sequence
  Description of Artificial Sequence: Synthetic oligonucleotide
cccaguagguuccgaagac

SEQ ID NO: 863567 - RNA, 19 nt, Artificial Sequence
  Description of Artificial Sequence: Synthetic oligonucleotide
uugccccgccccauggcuc

SEQ ID NO: 863568 - RNA, 19 nt, Artificial Sequence
  Description of Artificial Sequence: Synthetic oligonucleotide
uaccaccccucgacgccgc

SEQ ID NO: 863569 - RNA, 19 nt, Artificial Sequence
  Description of Artificial Sequence: Synthetic oligonucleotide
ccugcgucccggaugcccc

SEQ ID NO: 863570 - RNA, 19 nt, Artificial Sequence
  Description of Artificial Sequence: Synthetic oligonucleotide
acggcccacgaauggguaa

SEQ ID NO: 863571 - RNA, 19 nt, Artificial Sequence
  Description of Artificial Sequence: Synthetic oligonucleotide
ugggcggauugugcccagg

SEQ ID NO: 863572 - RNA, 19 nt, Artificial Sequence
  Description of Artificial Sequence: Synthetic oligonucleotide
gugcgauugcagaagagau

SEQ ID NO: 863573 - RNA, 19 nt, Artificial Sequence
  Description of Artificial Sequence: Synthetic oligonucleotide
uggcagcaguccaguauuu

SEQ ID NO: 863574 - RNA, 19 nt, Artificial Sequence
  Description of Artificial Sequence: Synthetic oligonucleotide
guguguggcuguagauacc

SEQ ID NO: 863575 - RNA, 19 nt, Artificial Sequence
  Description of Artificial Sequence: Synthetic oligonucleotide
aguuggcagcaguccagua

SEQ ID NO: 863576 - RNA, 19 nt, Artificial Sequence
  Description of Artificial Sequence: Synthetic oligonucleotide
ggauuggggugucuuagcu

SEQ ID NO: 863577 - RNA, 19 nt, Artificial Sequence
  Description of Artificial Sequence: Synthetic oligonucleotide
agcgccguauaaaucucau

SEQ ID NO: 863578 - RNA, 19 nt, Artificial Sequence
  Description of Artificial Sequence: Synthetic oligonucleotide
aucggguguugcauucgug

SEQ ID NO: 863579 - RNA, 19 nt, Artificial Sequence
  Description of Artificial Sequence: Synthetic oligonucleotide
cuaggcgguaggcaggcgu

SEQ ID NO: 863580 - RNA, 19 nt, Artificial Sequence
  Description of Artificial Sequence: Synthetic oligonucleotide
gggcggauugugcccaggc

SEQ ID NO: 863581 - RNA, 19 nt, Artificial Sequence
  Description of Artificial Sequence: Synthetic oligonucleotide
cugcgucccggaugccccg

SEQ ID NO: 863582 - RNA, 19 nt, Artificial Sequence
  Description of Artificial Sequence: Synthetic oligonucleotide
uugccccgauugauggcau

SEQ ID NO: 863583 - RNA, 19 nt, Artificial Sequence
  Description of Artificial Sequence: Synthetic oligonucleotide
cccucucaccccaccacgg

SEQ ID NO: 863584 - RNA, 19 nt, Artificial Sequence
  Description of Artificial Sequence: Synthetic oligonucleotide
cucccugcgccagcgacuc

SEQ ID NO: 863585 - RNA, 19 nt, Artificial Sequence
  Description of Artificial Sequence: Synthetic oligonucleotide
augggcggauugugcccag

SEQ ID NO: 863586 - RNA, 19 nt, Artificial Sequence
  Description of Artificial Sequence: Synthetic oligonucleotide
ggaucuacauucccucccu

SEQ ID NO: 863587 - RNA, 19 nt, Artificial Sequence
  Description of Artificial Sequence: Synthetic oligonucleotide
cagcgccguauaaaucuca

SEQ ID NO: 863588 - RNA, 19 nt, Artificial Sequence
  Description of Artificial Sequence: Synthetic oligonucleotide
ggguaucacaggacagcag

SEQ ID NO: 863589 - RNA, 19 nt, Artificial Sequence
  Description of Artificial Sequence: Synthetic oligonucleotide
ggugcaacccuggagccaa

SEQ ID NO: 863590 - RNA, 19 nt, Artificial Sequence
  Description of Artificial Sequence: Synthetic oligonucleotide
cacgcacaauucggaagug

SEQ ID NO: 863591 - RNA, 19 nt, Artificial Sequence
  Description of Artificial Sequence: Synthetic oligonucleotide
uggccccuaaggccucuuc

SEQ ID NO: 863592 - RNA, 19 nt, Artificial Sequence
  Description of Artificial Sequence: Synthetic oligonucleotide
caccaucaagacgcccacc

SEQ ID NO: 863593 - RNA, 19 nt, Artificial Sequence
  Description of Artificial Sequence: Synthetic oligonucleotide
ggcagcaguccaguauuug

SEQ ID NO: 863594 - RNA, 19 nt, Artificial Sequence
  Description of Artificial Sequence: Synthetic oligonucleotide
cccggucagaugcaacagc

SEQ ID NO: 863595 - RNA, 19 nt, Artificial Sequence
  Description of Artificial Sequence: Synthetic oligonucleotide
guaccggcuucauucugcu

SEQ ID NO: 863596 - RNA, 19 nt, Artificial Sequence
  Description of Artificial Sequence: Synthetic oligonucleotide
cccucgacgccgcaggaac

SEQ ID NO: 863597 - RNA, 19 nt, Artificial Sequence
  Description of Artificial Sequence: Synthetic oligonucleotide
ugucucgcucuuggcagua

SEQ ID NO: 863598 - RNA, 19 nt, Artificial Sequence
  Description of Artificial Sequence: Synthetic oligonucleotide
cacucguuggugccacgca

SEQ ID NO: 863599 - RNA, 19 nt, Artificial Sequence
  Description of Artificial Sequence: Synthetic oligonucleotide
agucgucagcucggccacg

SEQ ID NO: 863600 - RNA, 19 nt, Artificial Sequence
  Description of Artificial Sequence: Synthetic oligonucleotide
aggcgugaccugguagaug

SEQ ID NO: 863601 - RNA, 19 nt, Artificial Sequence
  Description of Artificial Sequence: Synthetic oligonucleotide
uggaucagguugggccacu

SEQ ID NO: 863602 - RNA, 19 nt, Artificial Sequence
  Description of Artificial Sequence: Synthetic oligonucleotide
cacggccccagacgccuag

SEQ ID NO: 863603 - RNA, 19 nt, Artificial Sequence
  Description of Artificial Sequence: Synthetic oligonucleotide
cugcacaguugcccugguc

SEQ ID NO: 863604 - RNA, 19 nt, Artificial Sequence
  Description of Artificial Sequence: Synthetic oligonucleotide
ccucucaccccaccacggg

SEQ ID NO: 863605 - RNA, 19 nt, Artificial Sequence
  Description of Artificial Sequence: Synthetic oligonucleotide
ccccucucaccccaccacg

SEQ ID NO: 863606 - RNA, 19 nt, Artificial Sequence
  Description of Artificial Sequence: Synthetic oligonucleotide
cucgacgccgcaggaacca

SEQ ID NO: 863607 - RNA, 19 nt, Artificial Sequence
  Description of Artificial Sequence: Synthetic oligonucleotide
ccuggcuuauaggugugug

SEQ ID NO: 863608 - RNA, 19 nt, Artificial Sequence
  Description of Artificial Sequence: Synthetic oligonucleotide
cucggcagcccugcuggug

SEQ ID NO: 863609 - RNA, 19 nt, Artificial Sequence
  Description of Artificial Sequence: Synthetic oligonucleotide
gugccacgcacaauucgga

SEQ ID NO: 863610 - RNA, 19 nt, Artificial Sequence
  Description of Artificial Sequence: Synthetic oligonucleotide
ccacgaguuggcagcaguc

SEQ ID NO: 863611 - RNA, 19 nt, Artificial Sequence
  Description of Artificial Sequence: Synthetic oligonucleotide
uaccggcuucauucugcuc

SEQ ID NO: 863612 - RNA, 19 nt, Artificial Sequence
  Description of Artificial Sequence: Synthetic oligonucleotide
ggcggaaaagggaacugaa

SEQ ID NO: 863613 - RNA, 19 nt, Artificial Sequence
  Description of Artificial Sequence: Synthetic oligonucleotide
ggagccuaggcgguaggca

SEQ ID NO: 863614 - RNA, 19 nt, Artificial Sequence
  Description of Artificial Sequence: Synthetic oligonucleotide
ggccuccccuggcuuauag

SEQ ID NO: 863615 - RNA, 19 nt, Artificial Sequence
  Description of Artificial Sequence: Synthetic oligonucleotide
cuccuggcagguacaucga

SEQ ID NO: 863616 - RNA, 19 nt, Artificial Sequence
  Description of Artificial Sequence: Synthetic oligonucleotide
ggaaguggccuggcgcuug

SEQ ID NO: 863617 - RNA, 19 nt, Artificial Sequence
  Description of Artificial Sequence: Synthetic oligonucleotide
cgacagccccacauggugc

SEQ ID NO: 863618 - RNA, 19 nt, Artificial Sequence
  Description of Artificial Sequence: Synthetic oligonucleotide
cccgcaggugcaacccugg

SEQ ID NO: 863619 - RNA, 19 nt, Artificial Sequence
  Description of Artificial Sequence: Synthetic oligonucleotide
gccacccguaguugccccg

SEQ ID NO: 863620 - RNA, 19 nt, Artificial Sequence
  Description of Artificial Sequence: Synthetic oligonucleotide
ggacgagcacaugauuguc

SEQ ID NO: 863621 - RNA, 19 nt, Artificial Sequence
  Description of Artificial Sequence: Synthetic oligonucleotide
gagacccggucagaugcaa

SEQ ID NO: 863622 - RNA, 19 nt, Artificial Sequence
  Description of Artificial Sequence: Synthetic oligonucleotide
gcgguaggcaggcgugacc

SEQ ID NO: 863623 - RNA, 19 nt, Artificial Sequence
  Description of Artificial Sequence: Synthetic oligonucleotide
ucgacgccgcaggaaccac

SEQ ID NO: 863624 - RNA, 19 nt, Artificial Sequence
  Description of Artificial Sequence: Synthetic oligonucleotide
ccagcgccguauaaaucuc

SEQ ID NO: 863625 - RNA, 19 nt, Artificial Sequence
  Description of Artificial Sequence: Synthetic oligonucleotide
cuagcacgaagcucucaau

SEQ ID NO: 863626 - RNA, 19 nt, Artificial Sequence
  Description of Artificial Sequence: Synthetic oligonucleotide
cuugccccgccccauggcu

SEQ ID NO: 863627 - RNA, 19 nt, Artificial Sequence
  Description of Artificial Sequence: Synthetic oligonucleotide
acccguaguugccccgauu

SEQ ID NO: 863628 - RNA, 19 nt, Artificial Sequence
  Description of Artificial Sequence: Synthetic oligonucleotide
cgccgcaggaaccaccaag

SEQ ID NO: 863629 - RNA, 19 nt, Artificial Sequence
  Description of Artificial Sequence: Synthetic oligonucleotide
ccggcugugaugucuggga

SEQ ID NO: 863630 - RNA, 19 nt, Artificial Sequence
  Description of Artificial Sequence: Synthetic oligonucleotide
ugcgucccggaugccccgc

SEQ ID NO: 863631 - RNA, 19 nt, Artificial Sequence
  Description of Artificial Sequence: Synthetic oligonucleotide
ccucgacgccgcaggaacc

SEQ ID NO: 863632 - RNA, 19 nt, Artificial Sequence
  Description of Artificial Sequence: Synthetic oligonucleotide
ccugguuccccugacugca

SEQ ID NO: 863633 - RNA, 19 nt, Artificial Sequence
  Description of Artificial Sequence: Synthetic oligonucleotide
accccucgacgccgcagga

SEQ ID NO: 863634 - RNA, 19 nt, Artificial Sequence
  Description of Artificial Sequence: Synthetic oligonucleotide
ccggcuucauucugcucac

SEQ ID NO: 863635 - RNA, 19 nt, Artificial Sequence
  Description of Artificial Sequence: Synthetic oligonucleotide
ccguauaaaucucauucau

SEQ ID NO: 863636 - RNA, 19 nt, Artificial Sequence
  Description of Artificial Sequence: Synthetic oligonucleotide
cagguacaucgauugcagu

SEQ ID NO: 863637 - RNA, 19 nt, Artificial Sequence
  Description of Artificial Sequence: Synthetic oligonucleotide
ugccccgauugauggcauu

SEQ ID NO: 863638 - RNA, 19 nt, Artificial Sequence
  Description of Artificial Sequence: Synthetic oligonucleotide
ccccgugcaugcauccuug

SEQ ID NO: 863639 - RNA, 19 nt, Artificial Sequence
  Description of Artificial Sequence: Synthetic oligonucleotide
gcccacgaauggguaacag

SEQ ID NO: 863640 - RNA, 19 nt, Artificial Sequence
  Description of Artificial Sequence: Synthetic oligonucleotide
ccggucagaugcaacagcu

SEQ ID NO: 863641 - RNA, 19 nt, Artificial Sequence
  Description of Artificial Sequence: Synthetic oligonucleotide
gccuaggcgguaggcaggc

SEQ ID NO: 863642 - RNA, 19 nt, Artificial Sequence
  Description of Artificial Sequence: Synthetic oligonucleotide
gcccuagguaguacuuccc

SEQ ID NO: 863643 - RNA, 19 nt, Artificial Sequence
  Description of Artificial Sequence: Synthetic oligonucleotide
cugcccagcgccguauaaa

SEQ ID NO: 863644 - RNA, 19 nt, Artificial Sequence
  Description of Artificial Sequence: Synthetic oligonucleotide
ccaguuccggcugugaugu

SEQ ID NO: 863645 - RNA, 19 nt, Artificial Sequence
  Description of Artificial Sequence: Synthetic oligonucleotide
ggguguugcauucguggau

SEQ ID NO: 863646 - RNA, 19 nt, Artificial Sequence
  Description of Artificial Sequence: Synthetic oligonucleotide
cagccugccacccguaguu

SEQ ID NO: 863647 - RNA, 19 nt, Artificial Sequence
  Description of Artificial Sequence: Synthetic oligonucleotide
gucucgcucuuggcaguac

SEQ ID NO: 863648 - RNA, 19 nt, Artificial Sequence
  Description of Artificial Sequence: Synthetic oligonucleotide
cgauuuuacaaggcggaaa

SEQ ID NO: 863649 - RNA, 19 nt, Artificial Sequence
  Description of Artificial Sequence: Synthetic oligonucleotide
ggccacgacagcacauguc

SEQ ID NO: 863650 - RNA, 19 nt, Artificial Sequence
  Description of Artificial Sequence: Synthetic oligonucleotide
gcacagucgucagcucggc

SEQ ID NO: 863651 - RNA, 19 nt, Artificial Sequence
  Description of Artificial Sequence: Synthetic oligonucleotide
cacuucucggaagccucaa

SEQ ID NO: 863652 - RNA, 19 nt, Artificial Sequence
  Description of Artificial Sequence: Synthetic oligonucleotide
caauucggaaguggccccu

SEQ ID NO: 863653 - RNA, 19 nt, Artificial Sequence
  Description of Artificial Sequence: Synthetic oligonucleotide
cccacgaauggguaacagu

SEQ ID NO: 863654 - RNA, 19 nt, Artificial Sequence
  Description of Artificial Sequence: Synthetic oligonucleotide
ccuuggggaucuccuguca

SEQ ID NO: 863655 - RNA, 19 nt, Artificial Sequence
  Description of Artificial Sequence: Synthetic oligonucleotide
gccacucauuaaugcccca

SEQ ID NO: 863656 - RNA, 19 nt, Artificial Sequence
  Description of Artificial Sequence: Synthetic oligonucleotide
ccccagacgccuagcacga

SEQ ID NO: 863657 - RNA, 19 nt, Artificial Sequence
  Description of Artificial Sequence: Synthetic oligonucleotide
cggugcgauugcagaagag

SEQ ID NO: 863658 - RNA, 19 nt, Artificial Sequence
  Description of Artificial Sequence: Synthetic oligonucleotide
caugccccagaaggcacua

SEQ ID NO: 863659 - RNA, 19 nt, Artificial Sequence
  Description of Artificial Sequence: Synthetic oligonucleotide
cgacgccgcaggaaccacc

SEQ ID NO: 863660 - RNA, 19 nt, Artificial Sequence
  Description of Artificial Sequence: Synthetic oligonucleotide
caguuccggcugugauguc

SEQ ID NO: 863661 - RNA, 19 nt, Artificial Sequence
  Description of Artificial Sequence: Synthetic oligonucleotide
ggagacccggucagaugca

SEQ ID NO: 863662 - RNA, 19 nt, Artificial Sequence
  Description of Artificial Sequence: Synthetic oligonucleotide
ggcucccagguagggcaag

SEQ ID NO: 863663 - RNA, 19 nt, Artificial Sequence
  Description of Artificial Sequence: Synthetic oligonucleotide
ccguaguugccccgauuga

SEQ ID NO: 863664 - RNA, 19 nt, Artificial Sequence
  Description of Artificial Sequence: Synthetic oligonucleotide
ccgccccauggcucgacug

SEQ ID NO: 863665 - RNA, 19 nt, Artificial Sequence
  Description of Artificial Sequence: Synthetic oligonucleotide
gccccgauugauggcauua

SEQ ID NO: 863666 - RNA, 19 nt, Artificial Sequence
  Description of Artificial Sequence: Synthetic oligonucleotide
gccagcgacuccgccuggc

SEQ ID NO: 863667 - RNA, 19 nt, Artificial Sequence
  Description of Artificial Sequence: Synthetic oligonucleotide
gucccaugucugcgguacu

SEQ ID NO: 863668 - RNA, 19 nt, Artificial Sequence
  Description of Artificial Sequence: Synthetic oligonucleotide
ccgauuuuacaaggcggaa

SEQ ID NO: 863669 - RNA, 19 nt, Artificial Sequence
  Description of Artificial Sequence: Synthetic oligonucleotide
cagcacaugucucgcucuu

SEQ ID NO: 863670 - RNA, 19 nt, Artificial Sequence
  Description of Artificial Sequence: Synthetic oligonucleotide
cggcccacgaauggguaac

SEQ ID NO: 863671 - RNA, 19 nt, Artificial Sequence
  Description of Artificial Sequence: Synthetic oligonucleotide
gggaacugaaggggagcua

SEQ ID NO: 863672 - RNA, 19 nt, Artificial Sequence
  Description of Artificial Sequence: Synthetic oligonucleotide
ggcccacgaauggguaaca

SEQ ID NO: 863673 - RNA, 19 nt, Artificial Sequence
  Description of Artificial Sequence: Synthetic oligonucleotide
ccuggcagguacaucgauu

SEQ ID NO: 863674 - RNA, 19 nt, Artificial Sequence
  Description of Artificial Sequence: Synthetic oligonucleotide
ccuaggcgguaggcaggcg

SEQ ID NO: 863675 - RNA, 19 nt, Artificial Sequence
  Description of Artificial Sequence: Synthetic oligonucleotide
gugcaacccuggagccaac

SEQ ID NO: 863676 - RNA, 19 nt, Artificial Sequence
  Description of Artificial Sequence: Synthetic oligonucleotide
caucggagccuaggcggua

SEQ ID NO: 863677 - RNA, 19 nt, Artificial Sequence
  Description of Artificial Sequence: Synthetic oligonucleotide
cggagccuaggcgguaggc

SEQ ID NO: 863678 - RNA, 19 nt, Artificial Sequence
  Description of Artificial Sequence: Synthetic oligonucleotide
ggauugugcccaggcggua

SEQ ID NO: 863679 - RNA, 19 nt, Artificial Sequence
  Description of Artificial Sequence: Synthetic oligonucleotide
gccuagcacgaagcucuca

SEQ ID NO: 863680 - RNA, 19 nt, Artificial Sequence
  Description of Artificial Sequence: Synthetic oligonucleotide
cccacgaguuggcagcagu

SEQ ID NO: 863681 - RNA, 19 nt, Artificial Sequence
  Description of Artificial Sequence: Synthetic oligonucleotide
caggcgugaccugguagau

SEQ ID NO: 863682 - RNA, 19 nt, Artificial Sequence
  Description of Artificial Sequence: Synthetic oligonucleotide
cggauugugcccaggcggu

SEQ ID NO: 863683 - RNA, 19 nt, Artificial Sequence
  Description of Artificial Sequence: Synthetic oligonucleotide
ccccgaggcagaaguccca

SEQ ID NO: 863684 - RNA, 19 nt, Artificial Sequence
  Description of Artificial Sequence: Synthetic oligonucleotide
cccgauugauggcauuaau

SEQ ID NO: 863685 - RNA, 19 nt, Artificial Sequence
  Description of Artificial Sequence: Synthetic oligonucleotide
gcgccguauaaaucucauu

SEQ ID NO: 863686 - RNA, 19 nt, Artificial Sequence
  Description of Artificial Sequence: Synthetic oligonucleotide
ccccgauugauggcauuaa

SEQ ID NO: 863687 - RNA, 19 nt, Artificial Sequence
  Description of Artificial Sequence: Synthetic oligonucleotide
ccacccguaguugccccga

SEQ ID NO: 863688 - RNA, 19 nt, Artificial Sequence
  Description of Artificial Sequence: Synthetic oligonucleotide
gccccacgaguuggcagca

SEQ ID NO: 863689 - RNA, 19 nt, Artificial Sequence
  Description of Artificial Sequence: Synthetic oligonucleotide
ccccacccugugaucuuga

SEQ ID NO: 863690 - RNA, 19 nt, Artificial Sequence
  Description of Artificial Sequence: Synthetic oligonucleotide
cccaaguugcugcuucauu

SEQ ID NO: 863691 - RNA, 19 nt, Artificial Sequence
  Description of Artificial Sequence: Synthetic oligonucleotide
gcgucccggaugccccgca

SEQ ID NO: 863692 - RNA, 19 nt, Artificial Sequence
  Description of Artificial Sequence: Synthetic oligonucleotide
cacccguaguugccccgau

SEQ ID NO: 863693 - RNA, 19 nt, Artificial Sequence
  Description of Artificial Sequence: Synthetic oligonucleotide
gggugucaugugucccauu

SEQ ID NO: 863694 - RNA, 19 nt, Artificial Sequence
  Description of Artificial Sequence: Synthetic oligonucleotide
cgccagcgacuccgccugg

SEQ ID NO: 863695 - RNA, 19 nt, Artificial Sequence
  Description of Artificial Sequence: Synthetic oligonucleotide
cgccccauggcucgacugu

SEQ ID NO: 863696 - RNA, 19 nt, Artificial Sequence
  Description of Artificial Sequence: Synthetic oligonucleotide
cccuggcuuauaggugugu

SEQ ID NO: 863697 - RNA, 19 nt, Artificial Sequence
  Description of Artificial Sequence: Synthetic oligonucleotide
cggaagccucaaaggcccu

SEQ ID NO: 863698 - RNA, 19 nt, Artificial Sequence
  Description of Artificial Sequence: Synthetic oligonucleotide
cccgccccauggcucgacu

SEQ ID NO: 863699 - RNA, 19 nt, Artificial Sequence
  Description of Artificial Sequence: Synthetic oligonucleotide
aaacuuauuacacaccugc

SEQ ID NO: 863700 - RNA, 19 nt, Artificial Sequence
  Description of Artificial Sequence: Synthetic oligonucleotide
ucuaaugcaacgcagauca

SEQ ID NO: 863701 - RNA, 19 nt, Artificial Sequence
  Description of Artificial Sequence: Synthetic oligonucleotide
uuuauaaugguuuaucuga

SEQ ID NO: 863702 - RNA, 19 nt, Artificial Sequence
  Description of Artificial Sequence: Synthetic oligonucleotide
aauagauucugauuucaac

SEQ ID NO: 863703 - RNA, 19 nt, Artificial Sequence
  Description of Artificial Sequence: Synthetic oligonucleotide
uuuuacgcaaauuucaaag

SEQ ID NO: 863704 - RNA, 19 nt, Artificial Sequence
  Description of Artificial Sequence: Synthetic oligonucleotide
uauaugcuaaauaacaaug

SEQ ID NO: 863705 - RNA, 19 nt, Artificial Sequence
  Description of Artificial Sequence: Synthetic oligonucleotide
uguauaguagucaaaggag

SEQ ID NO: 863706 - RNA, 19 nt, Artificial Sequence
  Description of Artificial Sequence: Synthetic oligonucleotide
uauguacugacuuugaugu

SEQ ID NO: 863707 - RNA, 19 nt, Artificial Sequence
  Description of Artificial Sequence: Synthetic oligonucleotide
uguuuuaugaguauaacuu

SEQ ID NO: 863708 - RNA, 19 nt, Artificial Sequence
  Description of Artificial Sequence: Synthetic oligonucleotide
uacagaacgaugaaaagug

SEQ ID NO: 863709 - RNA, 19 nt, Artificial Sequence
  Description of Artificial Sequence: Synthetic oligonucleotide
aggacuuaaauauacuggg

SEQ ID NO: 863710 - RNA, 19 nt, Artificial Sequence
  Description of Artificial Sequence: Synthetic oligonucleotide
uauuuguuagguaagcuga

SEQ ID NO: 863711 - RNA, 19 nt, Artificial Sequence
  Description of Artificial Sequence: Synthetic oligonucleotide
uuaagcauagucuuugagc

SEQ ID NO: 863712 - RNA, 19 nt, Artificial Sequence
  Description of Artificial Sequence: Synthetic oligonucleotide
aagucaagagagcugacuc

SEQ ID NO: 863713 - RNA, 19 nt, Artificial Sequence
  Description of Artificial Sequence: Synthetic oligonucleotide
aauguguaaaaggaguaac

SEQ ID NO: 863714 - RNA, 19 nt, Artificial Sequence
  Description of Artificial Sequence: Synthetic oligonucleotide
uuguuagguaagcugaugg

SEQ ID NO: 863715 - RNA, 19 nt, Artificial Sequence
  Description of Artificial Sequence: Synthetic oligonucleotide
uguaaaaggaguaacggau

SEQ ID NO: 863716 - RNA, 19 nt, Artificial Sequence
  Description of Artificial Sequence: Synthetic oligonucleotide
acuuaaauauacugggaac

SEQ ID NO: 863717 - RNA, 19 nt, Artificial Sequence
  Description of Artificial Sequence: Synthetic oligonucleotide
ucuuaagauaaacaaagaa

SEQ ID NO: 863718 - RNA, 19 nt, Artificial Sequence
  Description of Artificial Sequence: Synthetic oligonucleotide
uuuacgcaaauuucaaagg

SEQ ID NO: 863719 - RNA, 19 nt, Artificial Sequence
  Description of Artificial Sequence: Synthetic oligonucleotide
uuuaauagacugaaugugu

SEQ ID NO: 863720 - RNA, 19 nt, Artificial Sequence
  Description of Artificial Sequence: Synthetic oligonucleotide
uaugcuaaauaacaauggc

SEQ ID NO: 863721 - RNA, 19 nt, Artificial Sequence
  Description of Artificial Sequence: Synthetic oligonucleotide
uaagcauagucuuugagcu

SEQ ID NO: 863722 - RNA, 19 nt, Artificial Sequence
  Description of Artificial Sequence: Synthetic oligonucleotide
uccuaaaggacuuaaauau

SEQ ID NO: 863723 - RNA, 19 nt, Artificial Sequence
  Description of Artificial Sequence: Synthetic oligonucleotide
gaauguauaguagucaaag

SEQ ID NO: 863724 - RNA, 19 nt, Artificial Sequence
  Description of Artificial Sequence: Synthetic oligonucleotide
uaugacuaacuccacgggg

SEQ ID NO: 863725 - RNA, 19 nt, Artificial Sequence
  Description of Artificial Sequence: Synthetic oligonucleotide
uuuuaugaguauaacuuac

SEQ ID NO: 863726 - RNA, 19 nt, Artificial Sequence
  Description of Artificial Sequence: Synthetic oligonucleotide
aacucuugacaucaccugg

SEQ ID NO: 863727 - RNA, 19 nt, Artificial Sequence
  Description of Artificial Sequence: Synthetic oligonucleotide
gacuauauauauaugguug

SEQ ID NO: 863728 - RNA, 19 nt, Artificial Sequence
  Description of Artificial Sequence: Synthetic oligonucleotide
aguaacucgaguuugccug

SEQ ID NO: 863729 - RNA, 19 nt, Artificial Sequence
  Description of Artificial Sequence: Synthetic oligonucleotide
uuauucuaugacuaacucc

SEQ ID NO: 863730 - RNA, 19 nt, Artificial Sequence
  Description of Artificial Sequence: Synthetic oligonucleotide
uaacuuacuacauuaacau

SEQ ID NO: 863731 - RNA, 19 nt, Artificial Sequence
  Description of Artificial Sequence: Synthetic oligonucleotide
aauaccagaauagauucug

SEQ ID NO: 863732 - RNA, 19 nt, Artificial Sequence
  Description of Artificial Sequence: Synthetic oligonucleotide
aagcccaacugcuaucacc

SEQ ID NO: 863733 - RNA, 19 nt, Artificial Sequence
  Description of Artificial Sequence: Synthetic oligonucleotide
ucaaccuuccuaaaggacu

SEQ ID NO: 863734 - RNA, 19 nt, Artificial Sequence
  Description of Artificial Sequence: Synthetic oligonucleotide
aguauaacuuacuacauua

SEQ ID NO: 863735 - RNA, 19 nt, Artificial Sequence
  Description of Artificial Sequence: Synthetic oligonucleotide
agcacaauguaaaaucucc

SEQ ID NO: 863736 - RNA, 19 nt, Artificial Sequence
  Description of Artificial Sequence: Synthetic oligonucleotide
ucuaauguucccuuugaca

SEQ ID NO: 863737 - RNA, 19 nt, Artificial Sequence
  Description of Artificial Sequence: Synthetic oligonucleotide
uaugaguauaacuuacuac

SEQ ID NO: 863738 - RNA, 19 nt, Artificial Sequence
  Description of Artificial Sequence: Synthetic oligonucleotide
uccuuauuucuaaauauac

SEQ ID NO: 863739 - RNA, 19 nt, Artificial Sequence
  Description of Artificial Sequence: Synthetic oligonucleotide
uuacgcaaauuucaaagga

SEQ ID NO: 863740 - RNA, 19 nt, Artificial Sequence
  Description of Artificial Sequence: Synthetic oligonucleotide
acgaugaaaaguguguacc

SEQ ID NO: 863741 - RNA, 19 nt, Artificial Sequence
  Description of Artificial Sequence: Synthetic oligonucleotide
acuuacuacauuaacauca

SEQ ID NO: 863742 - RNA, 19 nt, Artificial Sequence
  Description of Artificial Sequence: Synthetic oligonucleotide
uauuuucuaaugcaacgca

SEQ ID NO: 863743 - RNA, 19 nt, Artificial Sequence
  Description of Artificial Sequence: Synthetic oligonucleotide
agugcuuuauucuaugacu

SEQ ID NO: 863744 - RNA, 19 nt, Artificial Sequence
  Description of Artificial Sequence: Synthetic oligonucleotide
augucaagcgccugcagcc

SEQ ID NO: 863745 - RNA, 19 nt, Artificial Sequence
  Description of Artificial Sequence: Synthetic oligonucleotide
uacgcaaauuucaaaggag

SEQ ID NO: 863746 - RNA, 19 nt, Artificial Sequence
  Description of Artificial Sequence: Synthetic oligonucleotide
uuaaugugcuguuuaaagu

SEQ ID NO: 863747 - RNA, 19 nt, Artificial Sequence
  Description of Artificial Sequence: Synthetic oligonucleotide
uucuaugacuaacuccacg

SEQ ID NO: 863748 - RNA, 19 nt, Artificial Sequence
  Description of Artificial Sequence: Synthetic oligonucleotide
uuuauucuaugacuaacuc

SEQ ID NO: 863749 - RNA, 19 nt, Artificial Sequence
  Description of Artificial Sequence: Synthetic oligonucleotide
cauauggaaguacaacugg

SEQ ID NO: 863750 - RNA, 19 nt, Artificial Sequence
  Description of Artificial Sequence: Synthetic oligonucleotide
aaaggagcaguauguacug

SEQ ID NO: 863751 - RNA, 19 nt, Artificial Sequence
  Description of Artificial Sequence: Synthetic oligonucleotide
aaauggaaagcaaacccag

SEQ ID NO: 863752 - RNA, 19 nt, Artificial Sequence
  Description of Artificial Sequence: Synthetic oligonucleotide
uuuugauugggacaauuau

SEQ ID NO: 863753 - RNA, 19 nt, Artificial Sequence
  Description of Artificial Sequence: Synthetic oligonucleotide
agacuuauaaaauuacaau

SEQ ID NO: 863754 - RNA, 19 nt, Artificial Sequence
  Description of Artificial Sequence: Synthetic oligonucleotide
uugauuaugguuucccaca

SEQ ID NO: 863755 - RNA, 19 nt, Artificial Sequence
  Description of Artificial Sequence: Synthetic oligonucleotide
uuugauuaugguuucccac

SEQ ID NO: 863756 - RNA, 19 nt, Artificial Sequence
  Description of Artificial Sequence: Synthetic oligonucleotide
guauuuguuagguaagcug

SEQ ID NO: 863757 - RNA, 19 nt, Artificial Sequence
  Description of Artificial Sequence: Synthetic oligonucleotide
uuuaucugaaacucagaac

SEQ ID NO: 863758 - RNA, 19 nt, Artificial Sequence
  Description of Artificial Sequence: Synthetic oligonucleotide
auaugcuaaauaacaaugg

SEQ ID NO: 863759 - RNA, 19 nt, Artificial Sequence
  Description of Artificial Sequence: Synthetic oligonucleotide
uuuaugaguauaacuuacu

SEQ ID NO: 863760 - RNA, 19 nt, Artificial Sequence
  Description of Artificial Sequence: Synthetic oligonucleotide
uggaguacaggccagccug

SEQ ID NO: 863761 - RNA, 19 nt, Artificial Sequence
  Description of Artificial Sequence: Synthetic oligonucleotide
uccuguuacucccauuggg

SEQ ID NO: 863762 - RNA, 19 nt, Artificial Sequence
  Description of Artificial Sequence: Synthetic oligonucleotide
ucaggcuuuuauuagaaau

SEQ ID NO: 863763 - RNA, 19 nt, Artificial Sequence
  Description of Artificial Sequence: Synthetic oligonucleotide
aaaacucuugacaucaccu

SEQ ID NO: 863764 - RNA, 19 nt, Artificial Sequence
  Description of Artificial Sequence: Synthetic oligonucleotide
guuuaauagacugaaugug

SEQ ID NO: 863765 - RNA, 19 nt, Artificial Sequence
  Description of Artificial Sequence: Synthetic oligonucleotide
acacaagucaagucaagag

SEQ ID NO: 863766 - RNA, 19 nt, Artificial Sequence
  Description of Artificial Sequence: Synthetic oligonucleotide
uuagguaagcugauggagu

SEQ ID NO: 863767 - RNA, 19 nt, Artificial Sequence
  Description of Artificial Sequence: Synthetic oligonucleotide
uuugauugggacaauuaua

SEQ ID NO: 863768 - RNA, 19 nt, Artificial Sequence
  Description of Artificial Sequence: Synthetic oligonucleotide
ugauguaaggcaaaugguu

SEQ ID NO: 863769 - RNA, 19 nt, Artificial Sequence
  Description of Artificial Sequence: Synthetic oligonucleotide
auaacuuacuacauuaaca

SEQ ID NO: 863770 - RNA, 19 nt, Artificial Sequence
  Description of Artificial Sequence: Synthetic oligonucleotide
aacuuauuacacaccugcc

SEQ ID NO: 863771 - RNA, 19 nt, Artificial Sequence
  Description of Artificial Sequence: Synthetic oligonucleotide
guauguacugacuuugaug

SEQ ID NO: 863772 - RNA, 19 nt, Artificial Sequence
  Description of Artificial Sequence: Synthetic oligonucleotide
uguaggagaucauuaccag

SEQ ID NO: 863773 - RNA, 19 nt, Artificial Sequence
  Description of Artificial Sequence: Synthetic oligonucleotide
acaagucaagucaagagag

SEQ ID NO: 863774 - RNA, 19 nt, Artificial Sequence
  Description of Artificial Sequence: Synthetic oligonucleotide
aaaucuccaguaaggcucc

SEQ ID NO: 863775 - RNA, 19 nt, Artificial Sequence
  Description of Artificial Sequence: Synthetic oligonucleotide
aaaggaguaacggauaauu

SEQ ID NO: 863776 - RNA, 19 nt, Artificial Sequence
  Description of Artificial Sequence: Synthetic oligonucleotide
caggcaauaacaaacagaa

SEQ ID NO: 863777 - RNA, 19 nt, Artificial Sequence
  Description of Artificial Sequence: Synthetic oligonucleotide
uugccugucuccuucaacc

SEQ ID NO: 863778 - RNA, 19 nt, Artificial Sequence
  Description of Artificial Sequence: Synthetic oligonucleotide
agaucaguguuuuaugagu

SEQ ID NO: 863779 - RNA, 19 nt, Artificial Sequence
  Description of Artificial Sequence: Synthetic oligonucleotide
cuuacuacauuaacaucag

SEQ ID NO: 863780 - RNA, 19 nt, Artificial Sequence
  Description of Artificial Sequence: Synthetic oligonucleotide
accaguuuauuuucuaaug

SEQ ID NO: 863781 - RNA, 19 nt, Artificial Sequence
  Description of Artificial Sequence: Synthetic oligonucleotide
uaaaaggaguaacggauaa

SEQ ID NO: 863782 - RNA, 19 nt, Artificial Sequence
  Description of Artificial Sequence: Synthetic oligonucleotide
cucuauugaauaauaaaga

SEQ ID NO: 863783 - RNA, 19 nt, Artificial Sequence
  Description of Artificial Sequence: Synthetic oligonucleotide
augacuaacuccacggggc

SEQ ID NO: 863784 - RNA, 19 nt, Artificial Sequence
  Description of Artificial Sequence: Synthetic oligonucleotide
uuaauagacugaaugugua

SEQ ID NO: 863785 - RNA, 19 nt, Artificial Sequence
  Description of Artificial Sequence: Synthetic oligonucleotide
uuucuuuugauugggacaa

SEQ ID NO: 863786 - RNA, 19 nt, Artificial Sequence
  Description of Artificial Sequence: Synthetic oligonucleotide
acgcaaauuucaaaggagc

SEQ ID NO: 863787 - RNA, 19 nt, Artificial Sequence
  Description of Artificial Sequence: Synthetic oligonucleotide
gacuuaaauauacugggaa

SEQ ID NO: 863788 - RNA, 19 nt, Artificial Sequence
  Description of Artificial Sequence: Synthetic oligonucleotide
aagucaagucaagagagcu

SEQ ID NO: 863789 - RNA, 19 nt, Artificial Sequence
  Description of Artificial Sequence: Synthetic oligonucleotide
guaacggauaauuuccgug

SEQ ID NO: 863790 - RNA, 19 nt, Artificial Sequence
  Description of Artificial Sequence: Synthetic oligonucleotide
agucaagagagcugacucg

SEQ ID NO: 863791 - RNA, 19 nt, Artificial Sequence
  Description of Artificial Sequence: Synthetic oligonucleotide
aauaaagacugugguagcu

SEQ ID NO: 863792 - RNA, 19 nt, Artificial Sequence
  Description of Artificial Sequence: Synthetic oligonucleotide
ugaauguguaaaaggagua

SEQ ID NO: 863793 - RNA, 19 nt, Artificial Sequence
  Description of Artificial Sequence: Synthetic oligonucleotide
uuauaaugguuuaucugaa

SEQ ID NO: 863794 - RNA, 19 nt, Artificial Sequence
  Description of Artificial Sequence: Synthetic oligonucleotide
ucaacacaagucaagucaa

SEQ ID NO: 863795 - RNA, 19 nt, Artificial Sequence
  Description of Artificial Sequence: Synthetic oligonucleotide
uuccuaaaggacuuaaaua

SEQ ID NO: 863796 - RNA, 19 nt, Artificial Sequence
  Description of Artificial Sequence: Synthetic oligonucleotide
aggcaaaugguuuaauaga

SEQ ID NO: 863797 - RNA, 19 nt, Artificial Sequence
  Description of Artificial Sequence: Synthetic oligonucleotide
guuuaucugaaacucagaa

SEQ ID NO: 863798 - RNA, 19 nt, Artificial Sequence
  Description of Artificial Sequence: Synthetic oligonucleotide
cuagcuccuaugaaaacac

SEQ ID NO: 863799 - RNA, 19 nt, Artificial Sequence
  Description of Artificial Sequence: Synthetic oligonucleotide
guuagguaagcugauggag

SEQ ID NO: 863800 - RNA, 19 nt, Artificial Sequence
  Description of Artificial Sequence: Synthetic oligonucleotide
cuggaaagaagucaggaca

SEQ ID NO: 863801 - RNA, 19 nt, Artificial Sequence
  Description of Artificial Sequence: Synthetic oligonucleotide
uugugaguaguucuccugu

SEQ ID NO: 863802 - RNA, 19 nt, Artificial Sequence
  Description of Artificial Sequence: Synthetic oligonucleotide
guuaagcauagucuuugag

SEQ ID NO: 863803 - RNA, 19 nt, Artificial Sequence
  Description of Artificial Sequence: Synthetic oligonucleotide
uguuagguaagcugaugga

SEQ ID NO: 863804 - RNA, 19 nt, Artificial Sequence
  Description of Artificial Sequence: Synthetic oligonucleotide
cagccugucggacaaaggg

SEQ ID NO: 863805 - RNA, 19 nt, Artificial Sequence
  Description of Artificial Sequence: Synthetic oligonucleotide
auauacugggaacucaaaa

SEQ ID NO: 863806 - RNA, 19 nt, Artificial Sequence
  Description of Artificial Sequence: Synthetic oligonucleotide
ugaguauaacuuacuacau

SEQ ID NO: 863807 - RNA, 19 nt, Artificial Sequence
  Description of Artificial Sequence: Synthetic oligonucleotide
auauggaaguacaacuggg

SEQ ID NO: 863808 - RNA, 19 nt, Artificial Sequence
  Description of Artificial Sequence: Synthetic oligonucleotide
auguguaaaaggaguaacg

SEQ ID NO: 863809 - RNA, 19 nt, Artificial Sequence
  Description of Artificial Sequence: Synthetic oligonucleotide
uuaaauauacugggaacuc

SEQ ID NO: 863810 - RNA, 19 nt, Artificial Sequence
  Description of Artificial Sequence: Synthetic oligonucleotide
gcuaucaccagccacccgg

SEQ ID NO: 863811 - RNA, 19 nt, Artificial Sequence
  Description of Artificial Sequence: Synthetic oligonucleotide
aacacaagucaagucaaga

SEQ ID NO: 863812 - RNA, 19 nt, Artificial Sequence
  Description of Artificial Sequence: Synthetic oligonucleotide
ugguuucccacauauuugu

SEQ ID NO: 863813 - RNA, 19 nt, Artificial Sequence
  Description of Artificial Sequence: Synthetic oligonucleotide
ucaguucgagaaaggaucu

SEQ ID NO: 863814 - RNA, 19 nt, Artificial Sequence
  Description of Artificial Sequence: Synthetic oligonucleotide
uccaggcaauaacaaacag

SEQ ID NO: 863815 - RNA, 19 nt, Artificial Sequence
  Description of Artificial Sequence: Synthetic oligonucleotide
auugugaguaguucuccug

SEQ ID NO: 863816 - RNA, 19 nt, Artificial Sequence
  Description of Artificial Sequence: Synthetic oligonucleotide
uguuacucccauuggguac

SEQ ID NO: 863817 - RNA, 19 nt, Artificial Sequence
  Description of Artificial Sequence: Synthetic oligonucleotide
ugggacaauuauaugcuaa

SEQ ID NO: 863818 - RNA, 19 nt, Artificial Sequence
  Description of Artificial Sequence: Synthetic oligonucleotide
auugggacaauuauaugcu

SEQ ID NO: 863819 - RNA, 19 nt, Artificial Sequence
  Description of Artificial Sequence: Synthetic oligonucleotide
agaucauuaccagaaucag

SEQ ID NO: 863820 - RNA, 19 nt, Artificial Sequence
  Description of Artificial Sequence: Synthetic oligonucleotide
ggaguaacggauaauuucc

SEQ ID NO: 863821 - RNA, 19 nt, Artificial Sequence
  Description of Artificial Sequence: Synthetic oligonucleotide
auuuucuaaugcaacgcag

SEQ ID NO: 863822 - RNA, 19 nt, Artificial Sequence
  Description of Artificial Sequence: Synthetic oligonucleotide
guuguauuuguuagguaag

SEQ ID NO: 863823 - RNA, 19 nt, Artificial Sequence
  Description of Artificial Sequence: Synthetic oligonucleotide
auucuaauguucccuuuga

SEQ ID NO: 863824 - RNA, 19 nt, Artificial Sequence
  Description of Artificial Sequence: Synthetic oligonucleotide
uuucccacauauuugucua

SEQ ID NO: 863825 - RNA, 19 nt, Artificial Sequence
  Description of Artificial Sequence: Synthetic oligonucleotide
agaacgaugaaaagugugu

SEQ ID NO: 863826 - RNA, 19 nt, Artificial Sequence
  Description of Artificial Sequence: Synthetic oligonucleotide
uucgagaaaggaucuuucu

SEQ ID NO: 863827 - RNA, 19 nt, Artificial Sequence
  Description of Artificial Sequence: Synthetic oligonucleotide
uauugugaguaguucuccu

SEQ ID NO: 863828 - RNA, 19 nt, Artificial Sequence
  Description of Artificial Sequence: Synthetic oligonucleotide
gauuguccaggcaauaaca

SEQ ID NO: 863829 - RNA, 19 nt, Artificial Sequence
  Description of Artificial Sequence: Synthetic oligonucleotide
uaaugcaacgcagaucagu

SEQ ID NO: 863830 - RNA, 19 nt, Artificial Sequence
  Description of Artificial Sequence: Synthetic oligonucleotide
uucuaauguucccuuugac

SEQ ID NO: 863831 - RNA, 19 nt, Artificial Sequence
  Description of Artificial Sequence: Synthetic oligonucleotide
ugcaacgcagaucaguguu

SEQ ID NO: 863832 - RNA, 19 nt, Artificial Sequence
  Description of Artificial Sequence: Synthetic oligonucleotide
ugacuaacuccacggggcc

SEQ ID NO: 863833 - RNA, 19 nt, Artificial Sequence
  Description of Artificial Sequence: Synthetic oligonucleotide
aguaacggauaauuuccgu

SEQ ID NO: 863834 - RNA, 19 nt, Artificial Sequence
  Description of Artificial Sequence: Synthetic oligonucleotide
aguagcgugacugaccccu

SEQ ID NO: 863835 - RNA, 19 nt, Artificial Sequence
  Description of Artificial Sequence: Synthetic oligonucleotide
guuuuaugaguauaacuua

SEQ ID NO: 863836 - RNA, 19 nt, Artificial Sequence
  Description of Artificial Sequence: Synthetic oligonucleotide
cacaagucaagucaagaga

SEQ ID NO: 863837 - RNA, 19 nt, Artificial Sequence
  Description of Artificial Sequence: Synthetic oligonucleotide
ucgagaaaggaucuuucuu

SEQ ID NO: 863838 - RNA, 19 nt, Artificial Sequence
  Description of Artificial Sequence: Synthetic oligonucleotide
guguaaaaggaguaacgga

SEQ ID NO: 863839 - RNA, 19 nt, Artificial Sequence
  Description of Artificial Sequence: Synthetic oligonucleotide
auagcacaauguaaaaucu

SEQ ID NO: 863840 - RNA, 19 nt, Artificial Sequence
  Description of Artificial Sequence: Synthetic oligonucleotide
caagucaagucaagagagc

SEQ ID NO: 863841 - RNA, 19 nt, Artificial Sequence
  Description of Artificial Sequence: Synthetic oligonucleotide
uccaguaaggcuccuguuu

SEQ ID NO: 863842 - RNA, 19 nt, Artificial Sequence
  Description of Artificial Sequence: Synthetic oligonucleotide
uauuaaugugcuguuuaaa

SEQ ID NO: 863843 - RNA, 19 nt, Artificial Sequence
  Description of Artificial Sequence: Synthetic oligonucleotide
guauaguagucaaaggaga

SEQ ID NO: 863844 - RNA, 19 nt, Artificial Sequence
  Description of Artificial Sequence: Synthetic oligonucleotide
ugcauauauugugaguagu

SEQ ID NO: 863845 - RNA, 19 nt, Artificial Sequence
  Description of Artificial Sequence: Synthetic oligonucleotide
uguguguuacagcccauau

SEQ ID NO: 863846 - RNA, 19 nt, Artificial Sequence
  Description of Artificial Sequence: Synthetic oligonucleotide
agcuccuaugaaaacacag

SEQ ID NO: 863847 - RNA, 19 nt, Artificial Sequence
  Description of Artificial Sequence: Synthetic oligonucleotide
uuacagcccauauuagaaa

SEQ ID NO: 863848 - RNA, 19 nt, Artificial Sequence
  Description of Artificial Sequence: Synthetic oligonucleotide
gagcugcauauauugugag

SEQ ID NO: 863849 - RNA, 19 nt, Artificial Sequence
  Description of Artificial Sequence: Synthetic oligonucleotide
aacagaagacggcacgauu

SEQ ID NO: 863850 - RNA, 19 nt, Artificial Sequence
  Description of Artificial Sequence: Synthetic oligonucleotide
uaccagaauagauucugau

SEQ ID NO: 863851 - RNA, 19 nt, Artificial Sequence
  Description of Artificial Sequence: Synthetic oligonucleotide
ccaacugcuaucaccagcc

SEQ ID NO: 863852 - RNA, 19 nt, Artificial Sequence
  Description of Artificial Sequence: Synthetic oligonucleotide
ugugauuuucagguuggac

SEQ ID NO: 863853 - RNA, 19 nt, Artificial Sequence
  Description of Artificial Sequence: Synthetic oligonucleotide
aguauguacugacuuugau

SEQ ID NO: 863854 - RNA, 19 nt, Artificial Sequence
  Description of Artificial Sequence: Synthetic oligonucleotide
gucaagucaagagagcuga

SEQ ID NO: 863855 - RNA, 19 nt, Artificial Sequence
  Description of Artificial Sequence: Synthetic oligonucleotide
aacucagaacugaauguga

SEQ ID NO: 863856 - RNA, 19 nt, Artificial Sequence
  Description of Artificial Sequence: Synthetic oligonucleotide
cauuggguacagaacgaug

SEQ ID NO: 863857 - RNA, 19 nt, Artificial Sequence
  Description of Artificial Sequence: Synthetic oligonucleotide
cuuaaauauacugggaacu

SEQ ID NO: 863858 - RNA, 19 nt, Artificial Sequence
  Description of Artificial Sequence: Synthetic oligonucleotide
ucacaagcccaacugcuau

SEQ ID NO: 863859 - RNA, 19 nt, Artificial Sequence
  Description of Artificial Sequence: Synthetic oligonucleotide
caggacaacagaagacggc

SEQ ID NO: 863860 - RNA, 19 nt, Artificial Sequence
  Description of Artificial Sequence: Synthetic oligonucleotide
ucuaaacuugggccuggca

SEQ ID NO: 863861 - RNA, 19 nt, Artificial Sequence
  Description of Artificial Sequence: Synthetic oligonucleotide
uguagaugaccagguacgc

SEQ ID NO: 863862 - RNA, 19 nt, Artificial Sequence
  Description of Artificial Sequence: Synthetic oligonucleotide
aagacggcacgauuccuau

SEQ ID NO: 863863 - RNA, 19 nt, Artificial Sequence
  Description of Artificial Sequence: Synthetic oligonucleotide
cuuuauucuaugacuaacu

SEQ ID NO: 863864 - RNA, 19 nt, Artificial Sequence
  Description of Artificial Sequence: Synthetic oligonucleotide
uacgccguggccacaggcc

SEQ ID NO: 863865 - RNA, 19 nt, Artificial Sequence
  Description of Artificial Sequence: Synthetic oligonucleotide
uagguaagcugauggagua

SEQ ID NO: 863866 - RNA, 19 nt, Artificial Sequence
  Description of Artificial Sequence: Synthetic oligonucleotide
agccugucggacaaagggc

SEQ ID NO: 863867 - RNA, 19 nt, Artificial Sequence
  Description of Artificial Sequence: Synthetic oligonucleotide
cagaagacggcacgauucc

SEQ ID NO: 863868 - RNA, 19 nt, Artificial Sequence
  Description of Artificial Sequence: Synthetic oligonucleotide
acgccguggccacaggccc

SEQ ID NO: 863869 - RNA, 19 nt, Artificial Sequence
  Description of Artificial Sequence: Synthetic oligonucleotide
gcaaauuucaaaggagcag

SEQ ID NO: 863870 - RNA, 19 nt, Artificial Sequence
  Description of Artificial Sequence: Synthetic oligonucleotide
ggcagaauucuaauguucc

SEQ ID NO: 863871 - RNA, 19 nt, Artificial Sequence
  Description of Artificial Sequence: Synthetic oligonucleotide
cuuugauuaugguuuccca

SEQ ID NO: 863872 - RNA, 19 nt, Artificial Sequence
  Description of Artificial Sequence: Synthetic oligonucleotide
ggcaaaugguuuaauagac

SEQ ID NO: 863873 - RNA, 19 nt, Artificial Sequence
  Description of Artificial Sequence: Synthetic oligonucleotide
aaaaggaguaacggauaau

SEQ ID NO: 863874 - RNA, 19 nt, Artificial Sequence
  Description of Artificial Sequence: Synthetic oligonucleotide
auguaaggcaaaugguuua

SEQ ID NO: 863875 - RNA, 19 nt, Artificial Sequence
  Description of Artificial Sequence: Synthetic oligonucleotide
gaauguguaaaaggaguaa

SEQ ID NO: 863876 - RNA, 19 nt, Artificial Sequence
  Description of Artificial Sequence: Synthetic oligonucleotide
gauggaguacaggccagcc

SEQ ID NO: 863877 - RNA, 19 nt, Artificial Sequence
  Description of Artificial Sequence: Synthetic oligonucleotide
uuguguucuucaguucgag

SEQ ID NO: 863878 - RNA, 19 nt, Artificial Sequence
  Description of Artificial Sequence: Synthetic oligonucleotide
aacuccacggggccuuuga

SEQ ID NO: 863879 - RNA, 19 nt, Artificial Sequence
  Description of Artificial Sequence: Synthetic oligonucleotide
guaggagaucauuaccaga

SEQ ID NO: 863880 - RNA, 19 nt, Artificial Sequence
  Description of Artificial Sequence: Synthetic oligonucleotide
cuauuaaugugcuguuuaa

SEQ ID NO: 863881 - RNA, 19 nt, Artificial Sequence
  Description of Artificial Sequence: Synthetic oligonucleotide
ucgaguuugccugucuccu

SEQ ID NO: 863882 - RNA, 19 nt, Artificial Sequence
  Description of Artificial Sequence: Synthetic oligonucleotide
agcaguauguacugacuuu

SEQ ID NO: 863883 - RNA, 19 nt, Artificial Sequence
  Description of Artificial Sequence: Synthetic oligonucleotide
augguuucccacauauuug

SEQ ID NO: 863884 - RNA, 19 nt, Artificial Sequence
  Description of Artificial Sequence: Synthetic oligonucleotide
uucuaaugcaacgcagauc

SEQ ID NO: 863885 - RNA, 19 nt, Artificial Sequence
  Description of Artificial Sequence: Synthetic oligonucleotide
uuccguccaggacagugcu

SEQ ID NO: 863886 - RNA, 19 nt, Artificial Sequence
  Description of Artificial Sequence: Synthetic oligonucleotide
gagugugcugagugcgccg

SEQ ID NO: 863887 - RNA, 19 nt, Artificial Sequence
  Description of Artificial Sequence: Synthetic oligonucleotide
acaucuaaacuugggccug

SEQ ID NO: 863888 - RNA, 19 nt, Artificial Sequence
  Description of Artificial Sequence: Synthetic oligonucleotide
uguguaccuggcccauuug

SEQ ID NO: 863889 - RNA, 19 nt, Artificial Sequence
  Description of Artificial Sequence: Synthetic oligonucleotide
ugacucgaggcagaauucu

SEQ ID NO: 863890 - RNA, 19 nt, Artificial Sequence
  Description of Artificial Sequence: Synthetic oligonucleotide
cagguuugaaaauauaguu

SEQ ID NO: 863891 - RNA, 19 nt, Artificial Sequence
  Description of Artificial Sequence: Synthetic oligonucleotide
aaggaguaacggauaauuu

SEQ ID NO: 863892 - RNA, 19 nt, Artificial Sequence
  Description of Artificial Sequence: Synthetic oligonucleotide
acaagcccaacugcuauca

SEQ ID NO: 863893 - RNA, 19 nt, Artificial Sequence
  Description of Artificial Sequence: Synthetic oligonucleotide
guuucccacauauuugucu

SEQ ID NO: 863894 - RNA, 19 nt, Artificial Sequence
  Description of Artificial Sequence: Synthetic oligonucleotide
cuaucaccagccacccggc

SEQ ID NO: 863895 - RNA, 19 nt, Artificial Sequence
  Description of Artificial Sequence: Synthetic oligonucleotide
agggcaguaacucgaguuu

SEQ ID NO: 863896 - RNA, 19 nt, Artificial Sequence
  Description of Artificial Sequence: Synthetic oligonucleotide
aucuaaacuugggccuggc

SEQ ID NO: 863897 - RNA, 19 nt, Artificial Sequence
  Description of Artificial Sequence: Synthetic oligonucleotide
ucaagucaagagagcugac

SEQ ID NO: 863898 - RNA, 19 nt, Artificial Sequence
  Description of Artificial Sequence: Synthetic oligonucleotide
aguucgagaaaggaucuuu

SEQ ID NO: 863899 - RNA, 19 nt, Artificial Sequence
  Description of Artificial Sequence: Synthetic oligonucleotide
gcagaauucuaauguuccc

SEQ ID NO: 863900 - RNA, 19 nt, Artificial Sequence
  Description of Artificial Sequence: Synthetic oligonucleotide
gucaagagagcugacucga

SEQ ID NO: 863901 - RNA, 19 nt, Artificial Sequence
  Description of Artificial Sequence: Synthetic oligonucleotide
ugcuaucaccagccacccg

SEQ ID NO: 863902 - RNA, 19 nt, Artificial Sequence
  Description of Artificial Sequence: Synthetic oligonucleotide
gauguaaggcaaaugguuu

SEQ ID NO: 863903 - RNA, 19 nt, Artificial Sequence
  Description of Artificial Sequence: Synthetic oligonucleotide
gaacgaugaaaagugugua

SEQ ID NO: 863904 - RNA, 19 nt, Artificial Sequence
  Description of Artificial Sequence: Synthetic oligonucleotide
cagaaggacacugucuuca

SEQ ID NO: 863905 - RNA, 19 nt, Artificial Sequence
  Description of Artificial Sequence: Synthetic oligonucleotide
gacuuugauguuuuauaau

SEQ ID NO: 863906 - RNA, 19 nt, Artificial Sequence
  Description of Artificial Sequence: Synthetic oligonucleotide
uugggacaauuauaugcua

SEQ ID NO: 863907 - RNA, 19 nt, Artificial Sequence
  Description of Artificial Sequence: Synthetic oligonucleotide
cugacucgaggcagaauuc

SEQ ID NO: 863908 - RNA, 19 nt, Artificial Sequence
  Description of Artificial Sequence: Synthetic oligonucleotide
gucaagcgccugcagcccg

SEQ ID NO: 863909 - RNA, 19 nt, Artificial Sequence
  Description of Artificial Sequence: Synthetic oligonucleotide
aguaaggcuccuguuugga

SEQ ID NO: 863910 - RNA, 19 nt, Artificial Sequence
  Description of Artificial Sequence: Synthetic oligonucleotide
guuacucccauuggguaca

SEQ ID NO: 863911 - RNA, 19 nt, Artificial Sequence
  Description of Artificial Sequence: Synthetic oligonucleotide
guauaacuuacuacauuaa

SEQ ID NO: 863912 - RNA, 19 nt, Artificial Sequence
  Description of Artificial Sequence: Synthetic oligonucleotide
ggugucagucacauugucc

SEQ ID NO: 863913 - RNA, 19 nt, Artificial Sequence
  Description of Artificial Sequence: Synthetic oligonucleotide
ugacaucaccuggaaagaa

SEQ ID NO: 863914 - RNA, 19 nt, Artificial Sequence
  Description of Artificial Sequence: Synthetic oligonucleotide
guaagcugauggaguacag

SEQ ID NO: 863915 - RNA, 19 nt, Artificial Sequence
  Description of Artificial Sequence: Synthetic oligonucleotide
acucuugacaucaccugga

SEQ ID NO: 863916 - RNA, 19 nt, Artificial Sequence
  Description of Artificial Sequence: Synthetic oligonucleotide
gcacgauuccuauagcaca

SEQ ID NO: 863917 - RNA, 19 nt, Artificial Sequence
  Description of Artificial Sequence: Synthetic oligonucleotide
gaguauaacuuacuacauu

SEQ ID NO: 863918 - RNA, 19 nt, Artificial Sequence
  Description of Artificial Sequence: Synthetic oligonucleotide
cuaaugcaacgcagaucag

SEQ ID NO: 863919 - RNA, 19 nt, Artificial Sequence
  Description of Artificial Sequence: Synthetic oligonucleotide
caucuaaacuugggccugg

SEQ ID NO: 863920 - RNA, 19 nt, Artificial Sequence
  Description of Artificial Sequence: Synthetic oligonucleotide
guaaaaggaguaacggaua

SEQ ID NO: 863921 - RNA, 19 nt, Artificial Sequence
  Description of Artificial Sequence: Synthetic oligonucleotide
aggcaguagcgugacugac

SEQ ID NO: 863922 - RNA, 19 nt, Artificial Sequence
  Description of Artificial Sequence: Synthetic oligonucleotide
gaugaccagguacgccgug

SEQ ID NO: 863923 - RNA, 19 nt, Artificial Sequence
  Description of Artificial Sequence: Synthetic oligonucleotide
cacgauuccuauagcacaa

SEQ ID NO: 863924 - RNA, 19 nt, Artificial Sequence
  Description of Artificial Sequence: Synthetic oligonucleotide
ggguacagaacgaugaaaa

SEQ ID NO: 863925 - RNA, 19 nt, Artificial Sequence
  Description of Artificial Sequence: Synthetic oligonucleotide
ugucaagcgccugcagccc

SEQ ID NO: 863926 - RNA, 19 nt, Artificial Sequence
  Description of Artificial Sequence: Synthetic oligonucleotide
aggagaucauuaccagaau

SEQ ID NO: 863927 - RNA, 19 nt, Artificial Sequence
  Description of Artificial Sequence: Synthetic oligonucleotide
agacugugguagcugcccu

SEQ ID NO: 863928 - RNA, 19 nt, Artificial Sequence
  Description of Artificial Sequence: Synthetic oligonucleotide
gggacaauuauaugcuaaa

SEQ ID NO: 863929 - RNA, 19 nt, Artificial Sequence
  Description of Artificial Sequence: Synthetic oligonucleotide
acagaacgaugaaaagugu

SEQ ID NO: 863930 - RNA, 19 nt, Artificial Sequence
  Description of Artificial Sequence: Synthetic oligonucleotide
auuuguuagguaagcugau

SEQ ID NO: 863931 - RNA, 19 nt, Artificial Sequence
  Description of Artificial Sequence: Synthetic oligonucleotide
cugagugcgccgugaggag

SEQ ID NO: 863932 - RNA, 19 nt, Artificial Sequence
  Description of Artificial Sequence: Synthetic oligonucleotide
uagcgugacugaccccuca

SEQ ID NO: 863933 - RNA, 19 nt, Artificial Sequence
  Description of Artificial Sequence: Synthetic oligonucleotide
cacaagcccaacugcuauc

SEQ ID NO: 863934 - RNA, 19 nt, Artificial Sequence
  Description of Artificial Sequence: Synthetic oligonucleotide
ggcacgauuccuauagcac

SEQ ID NO: 863935 - RNA, 19 nt, Artificial Sequence
  Description of Artificial Sequence: Synthetic oligonucleotide
agaggggcuuuuccgucca

SEQ ID NO: 863936 - RNA, 19 nt, Artificial Sequence
  Description of Artificial Sequence: Synthetic oligonucleotide
auuacacaccugccugcau

SEQ ID NO: 863937 - RNA, 19 nt, Artificial Sequence
  Description of Artificial Sequence: Synthetic oligonucleotide
cuguuacucccauugggua

SEQ ID NO: 863938 - RNA, 19 nt, Artificial Sequence
  Description of Artificial Sequence: Synthetic oligonucleotide
acucgaggcagaauucuaa

SEQ ID NO: 863939 - RNA, 19 nt, Artificial Sequence
  Description of Artificial Sequence: Synthetic oligonucleotide
agugugcugagugcgccgu

SEQ ID NO: 863940 - RNA, 19 nt, Artificial Sequence
  Description of Artificial Sequence: Synthetic oligonucleotide
acuaacuccacggggccuu

SEQ ID NO: 863941 - RNA, 19 nt, Artificial Sequence
  Description of Artificial Sequence: Synthetic oligonucleotide
gugauucuauuaaugugcu

SEQ ID NO: 863942 - RNA, 19 nt, Artificial Sequence
  Description of Artificial Sequence: Synthetic oligonucleotide
aaguguguaccuggcccau

SEQ ID NO: 863943 - RNA, 19 nt, Artificial Sequence
  Description of Artificial Sequence: Synthetic oligonucleotide
ggacuuaaauauacuggga

SEQ ID NO: 863944 - RNA, 19 nt, Artificial Sequence
  Description of Artificial Sequence: Synthetic oligonucleotide
cuuggucgccgcagucgcc

SEQ ID NO: 863945 - RNA, 19 nt, Artificial Sequence
  Description of Artificial Sequence: Synthetic oligonucleotide
cccuuagccagguaugcuc

SEQ ID NO: 863946 - RNA, 19 nt, Artificial Sequence
  Description of Artificial Sequence: Synthetic oligonucleotide
agagcacacaccaguuuau

SEQ ID NO: 863947 - RNA, 19 nt, Artificial Sequence
  Description of Artificial Sequence: Synthetic oligonucleotide
caccaguuuauuuucuaau

SEQ ID NO: 863948 - RNA, 19 nt, Artificial Sequence
  Description of Artificial Sequence: Synthetic oligonucleotide
accuuccuaaaggacuuaa

SEQ ID NO: 863949 - RNA, 19 nt, Artificial Sequence
  Description of Artificial Sequence: Synthetic oligonucleotide
gcaguaacucgaguuugcc

SEQ ID NO: 863950 - RNA, 19 nt, Artificial Sequence
  Description of Artificial Sequence: Synthetic oligonucleotide
gugcugagugcgccgugag

SEQ ID NO: 863951 - RNA, 19 nt, Artificial Sequence
  Description of Artificial Sequence: Synthetic oligonucleotide
agguacgccguggccacag

SEQ ID NO: 863952 - RNA, 19 nt, Artificial Sequence
  Description of Artificial Sequence: Synthetic oligonucleotide
agcgugacugaccccucau

SEQ ID NO: 863953 - RNA, 19 nt, Artificial Sequence
  Description of Artificial Sequence: Synthetic oligonucleotide
cucacaagcccaacugcua

SEQ ID NO: 863954 - RNA, 19 nt, Artificial Sequence
  Description of Artificial Sequence: Synthetic oligonucleotide
uuacucccauuggguacag

SEQ ID NO: 863955 - RNA, 19 nt, Artificial Sequence
  Description of Artificial Sequence: Synthetic oligonucleotide
ggcaguaacucgaguuugc

SEQ ID NO: 863956 - RNA, 19 nt, Artificial Sequence
  Description of Artificial Sequence: Synthetic oligonucleotide
ggcaguagcgugacugacc

SEQ ID NO: 863957 - RNA, 19 nt, Artificial Sequence
  Description of Artificial Sequence: Synthetic oligonucleotide
gagugcgccgugaggagca

SEQ ID NO: 863958 - RNA, 19 nt, Artificial Sequence
  Description of Artificial Sequence: Synthetic oligonucleotide
guaacucgaguuugccugu

SEQ ID NO: 863959 - RNA, 19 nt, Artificial Sequence
  Description of Artificial Sequence: Synthetic oligonucleotide
ggccgucaucaccacauug

SEQ ID NO: 863960 - RNA, 19 nt, Artificial Sequence
  Description of Artificial Sequence: Synthetic oligonucleotide
acggggccuuugauuaugg

SEQ ID NO: 863961 - RNA, 19 nt, Artificial Sequence
  Description of Artificial Sequence: Synthetic oligonucleotide
caagcccaacugcuaucac

SEQ ID NO: 863962 - RNA, 19 nt, Artificial Sequence
  Description of Artificial Sequence: Synthetic oligonucleotide
cacggggccuuugauuaug

SEQ ID NO: 863963 - RNA, 19 nt, Artificial Sequence
  Description of Artificial Sequence: Synthetic oligonucleotide
cgcaaauuucaaaggagca

SEQ ID NO: 863964 - RNA, 19 nt, Artificial Sequence
  Description of Artificial Sequence: Synthetic oligonucleotide
ccuaaaggacuuaaauaua

SEQ ID NO: 863965 - RNA, 19 nt, Artificial Sequence
  Description of Artificial Sequence: Synthetic oligonucleotide
aaguuugguuugggauagu

SEQ ID NO: 863966 - RNA, 19 nt, Artificial Sequence
  Description of Artificial Sequence: Synthetic oligonucleotide
ccuauagcacaauguaaaa

SEQ ID NO: 863967 - RNA, 19 nt, Artificial Sequence
  Description of Artificial Sequence: Synthetic oligonucleotide
cacugccgccaugucaagc

SEQ ID NO: 863968 - RNA, 19 nt, Artificial Sequence
  Description of Artificial Sequence: Synthetic oligonucleotide
caguaacucgaguuugccu

SEQ ID NO: 863969 - RNA, 19 nt, Artificial Sequence
  Description of Artificial Sequence: Synthetic oligonucleotide
acacaccugccugcauuag

SEQ ID NO: 863970 - RNA, 19 nt, Artificial Sequence
  Description of Artificial Sequence: Synthetic oligonucleotide
uggcccauuugaugaugua

SEQ ID NO: 863971 - RNA, 19 nt, Artificial Sequence
  Description of Artificial Sequence: Synthetic oligonucleotide
cgcagaucaguguuuuaug

SEQ ID NO: 863972 - RNA, 19 nt, Artificial Sequence
  Description of Artificial Sequence: Synthetic oligonucleotide
gacucgaggcagaauucua

SEQ ID NO: 863973 - RNA, 19 nt, Artificial Sequence
  Description of Artificial Sequence: Synthetic oligonucleotide
aaccuuccuaaaggacuua

SEQ ID NO: 863974 - RNA, 19 nt, Artificial Sequence
  Description of Artificial Sequence: Synthetic oligonucleotide
gggccuuugauuaugguuu

SEQ ID NO: 863975 - RNA, 19 nt, Artificial Sequence
  Description of Artificial Sequence: Synthetic oligonucleotide
cgauuccuauagcacaaug

SEQ ID NO: 863976 - RNA, 19 nt, Artificial Sequence
  Description of Artificial Sequence: Synthetic oligonucleotide
cagcccgcucuccucgcgc

SEQ ID NO: 863977 - RNA, 19 nt, Artificial Sequence
  Description of Artificial Sequence: Synthetic oligonucleotide
gccugucggacaaagggca

SEQ ID NO: 863978 - RNA, 19 nt, Artificial Sequence
  Description of Artificial Sequence: Synthetic oligonucleotide
ggacaacagaagacggcac

SEQ ID NO: 863979 - RNA, 19 nt, Artificial Sequence
  Description of Artificial Sequence: Synthetic oligonucleotide
cucgaggcagaauucuaau

SEQ ID NO: 863980 - RNA, 19 nt, Artificial Sequence
  Description of Artificial Sequence: Synthetic oligonucleotide
cgaggcagaauucuaaugu

SEQ ID NO: 863981 - RNA, 19 nt, Artificial Sequence
  Description of Artificial Sequence: Synthetic oligonucleotide
acgauuccuauagcacaau

SEQ ID NO: 863982 - RNA, 19 nt, Artificial Sequence
  Description of Artificial Sequence: Synthetic oligonucleotide
ccagguacgccguggccac

SEQ ID NO: 863983 - RNA, 19 nt, Artificial Sequence
  Description of Artificial Sequence: Synthetic oligonucleotide
gucggacaaagggcagagc

SEQ ID NO: 863984 - RNA, 19 nt, Artificial Sequence
  Description of Artificial Sequence: Synthetic oligonucleotide
cuggcccauuugaugaugu

SEQ ID NO: 863985 - RNA, 19 nt, Artificial Sequence
  Description of Artificial Sequence: Synthetic oligonucleotide
agacggcacgauuccuaua

SEQ ID NO: 863986 - RNA, 19 nt, Artificial Sequence
  Description of Artificial Sequence: Synthetic oligonucleotide
caacugcuaucaccagcca

SEQ ID NO: 863987 - RNA, 19 nt, Artificial Sequence
  Description of Artificial Sequence: Synthetic oligonucleotide
guguguaccuggcccauuu

SEQ ID NO: 863988 - RNA, 19 nt, Artificial Sequence
  Description of Artificial Sequence: Synthetic oligonucleotide
ggacaauuauaugcuaaau

SEQ ID NO: 863989 - RNA, 19 nt, Artificial Sequence
  Description of Artificial Sequence: Synthetic oligonucleotide
uacucccauuggguacaga

SEQ ID NO: 863990 - RNA, 19 nt, Artificial Sequence
  Description of Artificial Sequence: Synthetic oligonucleotide
gccgucaucaccacauugu

SEQ ID NO: 863991 - RNA, 19 nt, Artificial Sequence
  Description of Artificial Sequence: Synthetic oligonucleotide
agugcgccgugaggagcag

SEQ ID NO: 863992 - RNA, 19 nt, Artificial Sequence
  Description of Artificial Sequence: Synthetic oligonucleotide
cuugggccuggcauuuuau

SEQ ID NO: 863993 - RNA, 19 nt, Artificial Sequence
  Description of Artificial Sequence: Synthetic oligonucleotide
guagcgugacugaccccuc

SEQ ID NO: 863994 - RNA, 19 nt, Artificial Sequence
  Description of Artificial Sequence: Synthetic oligonucleotide
cggcacgauuccuauagca

SEQ ID NO: 863995 - RNA, 19 nt, Artificial Sequence
  Description of Artificial Sequence: Synthetic oligonucleotide
cgaugaaaaguguguaccu

SEQ ID NO: 863996 - RNA, 19 nt, Artificial Sequence
  Description of Artificial Sequence: Synthetic oligonucleotide
gagcacacaccaguuuauu

SEQ ID NO: 863997 - RNA, 19 nt, Artificial Sequence
  Description of Artificial Sequence: Synthetic oligonucleotide
ccuggcccauuugaugaug

SEQ ID NO: 863998 - RNA, 19 nt, Artificial Sequence
  Description of Artificial Sequence: Synthetic oligonucleotide
ccgucaucaccacauugua

SEQ ID NO: 863999 - RNA, 19 nt, Artificial Sequence
  Description of Artificial Sequence: Synthetic oligonucleotide
gcgccgugaggagcagugg

SEQ ID NO: 864000 - RNA, 19 nt, Artificial Sequence
  Description of Artificial Sequence: Synthetic oligonucleotide
cuccaguaaggcuccuguu

SEQ ID NO: 864001 - RNA, 19 nt, Artificial Sequence
  Description of Artificial Sequence: Synthetic oligonucleotide
cagccacccggccgucauc

SEQ ID NO: 864002 - RNA, 19 nt, Artificial Sequence
  Description of Artificial Sequence: Synthetic oligonucleotide
cccauuccccuuggucgcc

SEQ ID NO: 864003 - RNA, 19 nt, Artificial Sequence
  Description of Artificial Sequence: Synthetic oligonucleotide
ccacugccgccaugucaag

SEQ ID NO: 864004 - RNA, 19 nt, Artificial Sequence
  Description of Artificial Sequence: Synthetic oligonucleotide
gcaacgcagaucaguguuu

SEQ ID NO: 864005 - RNA, 19 nt, Artificial Sequence
  Description of Artificial Sequence: Synthetic oligonucleotide
ccgugauuguccaggcaau

SEQ ID NO: 864006 - RNA, 19 nt, Artificial Sequence
  Description of Artificial Sequence: Synthetic oligonucleotide
cagguacgccguggccaca

SEQ ID NO: 864007 - RNA, 19 nt, Artificial Sequence
  Description of Artificial Sequence: Synthetic oligonucleotide
cuuuuccguccaggacagu

SEQ ID NO: 864008 - RNA, 19 nt, Artificial Sequence
  Description of Artificial Sequence: Synthetic oligonucleotide
cuaacuccacggggccuuu

SEQ ID NO: 864009 - RNA, 19 nt, Artificial Sequence
  Description of Artificial Sequence: Synthetic oligonucleotide
gugcgccgugaggagcagu

SEQ ID NO: 864010 - RNA, 19 nt, Artificial Sequence
  Description of Artificial Sequence: Synthetic oligonucleotide
cccggccgucaucaccaca

SEQ ID NO: 864011 - RNA, 19 nt, Artificial Sequence
  Description of Artificial Sequence: Synthetic oligonucleotide
gcccgcucuccucgcgccu

SEQ ID NO: 864012 - RNA, 19 nt, Artificial Sequence
  Description of Artificial Sequence: Synthetic oligonucleotide
ccacggggccuuugauuau

SEQ ID NO: 864013 - RNA, 19 nt, Artificial Sequence
  Description of Artificial Sequence: Synthetic oligonucleotide
cggccgucaucaccacauu

SEQ ID NO: 864014 - RNA, 19 nt, Artificial Sequence
  Description of Artificial Sequence: Synthetic oligonucleotide
ugugaauauagcaauaucu

SEQ ID NO: 864015 - RNA, 19 nt, Artificial Sequence
  Description of Artificial Sequence: Synthetic oligonucleotide
uccaauaucagcuucgucc

SEQ ID NO: 864016 - RNA, 19 nt, Artificial Sequence
  Description of Artificial Sequence: Synthetic oligonucleotide
uaaguggucacucuugucg

SEQ ID NO: 864017 - RNA, 19 nt, Artificial Sequence
  Description of Artificial Sequence: Synthetic oligonucleotide
uguaggagaaaccacaggc

SEQ ID NO: 864018 - RNA, 19 nt, Artificial Sequence
  Description of Artificial Sequence: Synthetic oligonucleotide
uuuaugauguccuucagca

SEQ ID NO: 864019 - RNA, 19 nt, Artificial Sequence
  Description of Artificial Sequence: Synthetic oligonucleotide
ugaucuuuagccaacaggu

SEQ ID NO: 864020 - RNA, 19 nt, Artificial Sequence
  Description of Artificial Sequence: Synthetic oligonucleotide
agugauguaucccagggcg

SEQ ID NO: 864021 - RNA, 19 nt, Artificial Sequence
  Description of Artificial Sequence: Synthetic oligonucleotide
ucgauuuccauucaugaag

SEQ ID NO: 864022 - RNA, 19 nt, Artificial Sequence
  Description of Artificial Sequence: Synthetic oligonucleotide
aauugauugauaguggcug

SEQ ID NO: 864023 - RNA, 19 nt, Artificial Sequence
  Description of Artificial Sequence: Synthetic oligonucleotide
uauagugucagcuucaauu

SEQ ID NO: 864024 - RNA, 19 nt, Artificial Sequence
  Description of Artificial Sequence: Synthetic oligonucleotide
cuaagaagcaccaugagga

SEQ ID NO: 864025 - RNA, 19 nt, Artificial Sequence
  Description of Artificial Sequence: Synthetic oligonucleotide
uucaauugauugauagugg

SEQ ID NO: 864026 - RNA, 19 nt, Artificial Sequence
  Description of Artificial Sequence: Synthetic oligonucleotide
ucuggcauaguccagguac

SEQ ID NO: 864027 - RNA, 19 nt, Artificial Sequence
  Description of Artificial Sequence: Synthetic oligonucleotide
gauuucaggguauacauca

SEQ ID NO: 864028 - RNA, 19 nt, Artificial Sequence
  Description of Artificial Sequence: Synthetic oligonucleotide
uugaguacguuuccgaaag

SEQ ID NO: 864029 - RNA, 19 nt, Artificial Sequence
  Description of Artificial Sequence: Synthetic oligonucleotide
ugagugauguaucccaggg

SEQ ID NO: 864030 - RNA, 19 nt, Artificial Sequence
  Description of Artificial Sequence: Synthetic oligonucleotide
ucaauugauugauaguggc

SEQ ID NO: 864031 - RNA, 19 nt, Artificial Sequence
  Description of Artificial Sequence: Synthetic oligonucleotide
cuucaauugauugauagug

SEQ ID NO: 864032 - RNA, 19 nt, Artificial Sequence
  Description of Artificial Sequence: Synthetic oligonucleotide
uuuuaugauguccuucagc

SEQ ID NO: 864033 - RNA, 19 nt, Artificial Sequence
  Description of Artificial Sequence: Synthetic oligonucleotide
uaagguacugagaagaaua

SEQ ID NO: 864034 - RNA, 19 nt, Artificial Sequence
  Description of Artificial Sequence: Synthetic oligonucleotide
aguauccugauucuccugg

SEQ ID NO: 864035 - RNA, 19 nt, Artificial Sequence
  Description of Artificial Sequence: Synthetic oligonucleotide
ucguucuaugauuucaggg

SEQ ID NO: 864036 - RNA, 19 nt, Artificial Sequence
  Description of Artificial Sequence: Synthetic oligonucleotide
uguacugaccuucggauca

SEQ ID NO: 864037 - RNA, 19 nt, Artificial Sequence
  Description of Artificial Sequence: Synthetic oligonucleotide
cuucgucugaucuuuagcc

SEQ ID NO: 864038 - RNA, 19 nt, Artificial Sequence
  Description of Artificial Sequence: Synthetic oligonucleotide
agcuucaauugauugauag

SEQ ID NO: 864039 - RNA, 19 nt, Artificial Sequence
  Description of Artificial Sequence: Synthetic oligonucleotide
gagaaagcaaagcucugcg

SEQ ID NO: 864040 - RNA, 19 nt, Artificial Sequence
  Description of Artificial Sequence: Synthetic oligonucleotide
aguaccaacacugguaccg

SEQ ID NO: 864041 - RNA, 19 nt, Artificial Sequence
  Description of Artificial Sequence: Synthetic oligonucleotide
uggcaaauagauuuaauau

SEQ ID NO: 864042 - RNA, 19 nt, Artificial Sequence
  Description of Artificial Sequence: Synthetic oligonucleotide
gaugaugcuaagaagcacc

SEQ ID NO: 864043 - RNA, 19 nt, Artificial Sequence
  Description of Artificial Sequence: Synthetic oligonucleotide
auugcuauuggguacucug

SEQ ID NO: 864044 - RNA, 19 nt, Artificial Sequence
  Description of Artificial Sequence: Synthetic oligonucleotide
auucauuugcccuuccuug

SEQ ID NO: 864045 - RNA, 19 nt, Artificial Sequence
  Description of Artificial Sequence: Synthetic oligonucleotide
ugucauagccugcagguca

SEQ ID NO: 864046 - RNA, 19 nt, Artificial Sequence
  Description of Artificial Sequence: Synthetic oligonucleotide
agaagaauauauaaguggu

SEQ ID NO: 864047 - RNA, 19 nt, Artificial Sequence
  Description of Artificial Sequence: Synthetic oligonucleotide
ucuaaucucagcccucgcc

SEQ ID NO: 864048 - RNA, 19 nt, Artificial Sequence
  Description of Artificial Sequence: Synthetic oligonucleotide
uccaaauaccuucuccaag

SEQ ID NO: 864049 - RNA, 19 nt, Artificial Sequence
  Description of Artificial Sequence: Synthetic oligonucleotide
ugaccuucggaucaguaac

SEQ ID NO: 864050 - RNA, 19 nt, Artificial Sequence
  Description of Artificial Sequence: Synthetic oligonucleotide
uucagcauaucugagcgcc

SEQ ID NO: 864051 - RNA, 19 nt, Artificial Sequence
  Description of Artificial Sequence: Synthetic oligonucleotide
aaggcuauggguccccuug

SEQ ID NO: 864052 - RNA, 19 nt, Artificial Sequence
  Description of Artificial Sequence: Synthetic oligonucleotide
agaagcaccaugaggagac

SEQ ID NO: 864053 - RNA, 19 nt, Artificial Sequence
  Description of Artificial Sequence: Synthetic oligonucleotide
accuuuuggguauucuugg

SEQ ID NO: 864054 - RNA, 19 nt, Artificial Sequence
  Description of Artificial Sequence: Synthetic oligonucleotide
cuaaggccagcgaagagcc

SEQ ID NO: 864055 - RNA, 19 nt, Artificial Sequence
  Description of Artificial Sequence: Synthetic oligonucleotide
uuaguuucagcuccugccu

SEQ ID NO: 864056 - RNA, 19 nt, Artificial Sequence
  Description of Artificial Sequence: Synthetic oligonucleotide
uauauaaguggucacucuu

SEQ ID NO: 864057 - RNA, 19 nt, Artificial Sequence
  Description of Artificial Sequence: Synthetic oligonucleotide
uccacuaaggccagcgaag

SEQ ID NO: 864058 - RNA, 19 nt, Artificial Sequence
  Description of Artificial Sequence: Synthetic oligonucleotide
agcaauaucugaaucucac

SEQ ID NO: 864059 - RNA, 19 nt, Artificial Sequence
  Description of Artificial Sequence: Synthetic oligonucleotide
gaucgauuuccauucauga

SEQ ID NO: 864060 - RNA, 19 nt, Artificial Sequence
  Description of Artificial Sequence: Synthetic oligonucleotide
aauaucagcuucgucccag

SEQ ID NO: 864061 - RNA, 19 nt, Artificial Sequence
  Description of Artificial Sequence: Synthetic oligonucleotide
gugaauauagcaauaucug

SEQ ID NO: 864062 - RNA, 19 nt, Artificial Sequence
  Description of Artificial Sequence: Synthetic oligonucleotide
uauaaguggucacucuugu

SEQ ID NO: 864063 - RNA, 19 nt, Artificial Sequence
  Description of Artificial Sequence: Synthetic oligonucleotide
gaauauagcaauaucugaa

SEQ ID NO: 864064 - RNA, 19 nt, Artificial Sequence
  Description of Artificial Sequence: Synthetic oligonucleotide
cauggaggccauuagggcc

SEQ ID NO: 864065 - RNA, 19 nt, Artificial Sequence
  Description of Artificial Sequence: Synthetic oligonucleotide
agaugcugugaauauagca

SEQ ID NO: 864066 - RNA, 19 nt, Artificial Sequence
  Description of Artificial Sequence: Synthetic oligonucleotide
aguaaugagcuucuucaca

SEQ ID NO: 864067 - RNA, 19 nt, Artificial Sequence
  Description of Artificial Sequence: Synthetic oligonucleotide
uuuugcaccuuacaagcaa

SEQ ID NO: 864068 - RNA, 19 nt, Artificial Sequence
  Description of Artificial Sequence: Synthetic oligonucleotide
auugauaguggcugccuag

SEQ ID NO: 864069 - RNA, 19 nt, Artificial Sequence
  Description of Artificial Sequence: Synthetic oligonucleotide
ucuucgucugaucuuuagc

SEQ ID NO: 864070 - RNA, 19 nt, Artificial Sequence
  Description of Artificial Sequence: Synthetic oligonucleotide
uucggugucucugagaccu

SEQ ID NO: 864071 - RNA, 19 nt, Artificial Sequence
  Description of Artificial Sequence: Synthetic oligonucleotide
gaaagcacacccuggcuug

SEQ ID NO: 864072 - RNA, 19 nt, Artificial Sequence
  Description of Artificial Sequence: Synthetic oligonucleotide
gucgauuucuuucagcuga

SEQ ID NO: 864073 - RNA, 19 nt, Artificial Sequence
  Description of Artificial Sequence: Synthetic oligonucleotide
aagugagaguggcagucag

SEQ ID NO: 864074 - RNA, 19 nt, Artificial Sequence
  Description of Artificial Sequence: Synthetic oligonucleotide
ccaaauaccuucuccaagg

SEQ ID NO: 864075 - RNA, 19 nt, Artificial Sequence
  Description of Artificial Sequence: Synthetic oligonucleotide
uacguuuccgaaagcacac

SEQ ID NO: 864076 - RNA, 19 nt, Artificial Sequence
  Description of Artificial Sequence: Synthetic oligonucleotide
ugacucugaucacuguugc

SEQ ID NO: 864077 - RNA, 19 nt, Artificial Sequence
  Description of Artificial Sequence: Synthetic oligonucleotide
auauauaaguggucacucu

SEQ ID NO: 864078 - RNA, 19 nt, Artificial Sequence
  Description of Artificial Sequence: Synthetic oligonucleotide
ggaucaguaacacagcuga

SEQ ID NO: 864079 - RNA, 19 nt, Artificial Sequence
  Description of Artificial Sequence: Synthetic oligonucleotide
agagugagugauguauccc

SEQ ID NO: 864080 - RNA, 19 nt, Artificial Sequence
  Description of Artificial Sequence: Synthetic oligonucleotide
uaucugagcgccugauggg

SEQ ID NO: 864081 - RNA, 19 nt, Artificial Sequence
  Description of Artificial Sequence: Synthetic oligonucleotide
aaauaccuucuccaaggaa

SEQ ID NO: 864082 - RNA, 19 nt, Artificial Sequence
  Description of Artificial Sequence: Synthetic oligonucleotide
ugcccaggguccaauauca

SEQ ID NO: 864083 - RNA, 19 nt, Artificial Sequence
  Description of Artificial Sequence: Synthetic oligonucleotide
uguuucaccuuuuggguau

SEQ ID NO: 864084 - RNA, 19 nt, Artificial Sequence
  Description of Artificial Sequence: Synthetic oligonucleotide
ugcuaagaagcaccaugag

SEQ ID NO: 864085 - RNA, 19 nt, Artificial Sequence
  Description of Artificial Sequence: Synthetic oligonucleotide
ucggaucaguaacacagcu

SEQ ID NO: 864086 - RNA, 19 nt, Artificial Sequence
  Description of Artificial Sequence: Synthetic oligonucleotide
aguaugccugcaucagugg

SEQ ID NO: 864087 - RNA, 19 nt, Artificial Sequence
  Description of Artificial Sequence: Synthetic oligonucleotide
ucuaagguacugagaagaa

SEQ ID NO: 864088 - RNA, 19 nt, Artificial Sequence
  Description of Artificial Sequence: Synthetic oligonucleotide
cuucgucccaguugcaggg

SEQ ID NO: 864089 - RNA, 19 nt, Artificial Sequence
  Description of Artificial Sequence: Synthetic oligonucleotide
gaggauugcuauuggguac

SEQ ID NO: 864090 - RNA, 19 nt, Artificial Sequence
  Description of Artificial Sequence: Synthetic oligonucleotide
caguaugccugcaucagug

SEQ ID NO: 864091 - RNA, 19 nt, Artificial Sequence
  Description of Artificial Sequence: Synthetic oligonucleotide
auaaguggucacucuuguc

SEQ ID NO: 864092 - RNA, 19 nt, Artificial Sequence
  Description of Artificial Sequence: Synthetic oligonucleotide
uccccuugaagcucugcgg

SEQ ID NO: 864093 - RNA, 19 nt, Artificial Sequence
  Description of Artificial Sequence: Synthetic oligonucleotide
uucgucugaucuuuagcca

SEQ ID NO: 864094 - RNA, 19 nt, Artificial Sequence
  Description of Artificial Sequence: Synthetic oligonucleotide
caagcagccaaccgagucc

SEQ ID NO: 864095 - RNA, 19 nt, Artificial Sequence
  Description of Artificial Sequence: Synthetic oligonucleotide
caccuuuuggguauucuug

SEQ ID NO: 864096 - RNA, 19 nt, Artificial Sequence
  Description of Artificial Sequence: Synthetic oligonucleotide
ugauaguggcugccuagag

SEQ ID NO: 864097 - RNA, 19 nt, Artificial Sequence
  Description of Artificial Sequence: Synthetic oligonucleotide
uguugaguacguuuccgaa

SEQ ID NO: 864098 - RNA, 19 nt, Artificial Sequence
  Description of Artificial Sequence: Synthetic oligonucleotide
ccaaccgaguccuugaugc

SEQ ID NO: 864099 - RNA, 19 nt, Artificial Sequence
  Description of Artificial Sequence: Synthetic oligonucleotide
uuugcaccuuacaagcaaa

SEQ ID NO: 864100 - RNA, 19 nt, Artificial Sequence
  Description of Artificial Sequence: Synthetic oligonucleotide
guauauucuuuuaugaugu

SEQ ID NO: 864101 - RNA, 19 nt, Artificial Sequence
  Description of Artificial Sequence: Synthetic oligonucleotide
gaagaagaugcugugaaua

SEQ ID NO: 864102 - RNA, 19 nt, Artificial Sequence
  Description of Artificial Sequence: Synthetic oligonucleotide
aucagcuucgucccaguug

SEQ ID NO: 864103 - RNA, 19 nt, Artificial Sequence
  Description of Artificial Sequence: Synthetic oligonucleotide
ucaugaagaugaugcuaag

SEQ ID NO: 864104 - RNA, 19 nt, Artificial Sequence
  Description of Artificial Sequence: Synthetic oligonucleotide
agaaccuggguaucaguca

SEQ ID NO: 864105 - RNA, 19 nt, Artificial Sequence
  Description of Artificial Sequence: Synthetic oligonucleotide
uagcaauaucugaaucuca

SEQ ID NO: 864106 - RNA, 19 nt, Artificial Sequence
  Description of Artificial Sequence: Synthetic oligonucleotide
ugggaugcagacugcagcu

SEQ ID NO: 864107 - RNA, 19 nt, Artificial Sequence
  Description of Artificial Sequence: Synthetic oligonucleotide
auauaaguggucacucuug

SEQ ID NO: 864108 - RNA, 19 nt, Artificial Sequence
  Description of Artificial Sequence: Synthetic oligonucleotide
ucaggguauacaucaguau

SEQ ID NO: 864109 - RNA, 19 nt, Artificial Sequence
  Description of Artificial Sequence: Synthetic oligonucleotide
aggagacccagcuuaggug

SEQ ID NO: 864110 - RNA, 19 nt, Artificial Sequence
  Description of Artificial Sequence: Synthetic oligonucleotide
ucaagucugcuuccaucgc

SEQ ID NO: 864111 - RNA, 19 nt, Artificial Sequence
  Description of Artificial Sequence: Synthetic oligonucleotide
ccaauaucagcuucguccc

SEQ ID NO: 864112 - RNA, 19 nt, Artificial Sequence
  Description of Artificial Sequence: Synthetic oligonucleotide
uugauugauaguggcugcc

SEQ ID NO: 864113 - RNA, 19 nt, Artificial Sequence
  Description of Artificial Sequence: Synthetic oligonucleotide
uaguuucagcuccugccug

SEQ ID NO: 864114 - RNA, 19 nt, Artificial Sequence
  Description of Artificial Sequence: Synthetic oligonucleotide
aucuucgucugaucuuuag

SEQ ID NO: 864115 - RNA, 19 nt, Artificial Sequence
  Description of Artificial Sequence: Synthetic oligonucleotide
uuugagacccuccgaccac

SEQ ID NO: 864116 - RNA, 19 nt, Artificial Sequence
  Description of Artificial Sequence: Synthetic oligonucleotide
ugcugguuucauaguaaga

SEQ ID NO: 864117 - RNA, 19 nt, Artificial Sequence
  Description of Artificial Sequence: Synthetic oligonucleotide
cuuuuaugauguccuucag

SEQ ID NO: 864118 - RNA, 19 nt, Artificial Sequence
  Description of Artificial Sequence: Synthetic oligonucleotide
cugugaauauagcaauauc

SEQ ID NO: 864119 - RNA, 19 nt, Artificial Sequence
  Description of Artificial Sequence: Synthetic oligonucleotide
aaagugagaguggcaguca

SEQ ID NO: 864120 - RNA, 19 nt, Artificial Sequence
  Description of Artificial Sequence: Synthetic oligonucleotide
uaguaagagcgcaggcccc

SEQ ID NO: 864121 - RNA, 19 nt, Artificial Sequence
  Description of Artificial Sequence: Synthetic oligonucleotide
aaucucacuuguaggagaa

SEQ ID NO: 864122 - RNA, 19 nt, Artificial Sequence
  Description of Artificial Sequence: Synthetic oligonucleotide
ucccaguaugccugcauca

SEQ ID NO: 864123 - RNA, 19 nt, Artificial Sequence
  Description of Artificial Sequence: Synthetic oligonucleotide
agcaaacuugagaacuuuc

SEQ ID NO: 864124 - RNA, 19 nt, Artificial Sequence
  Description of Artificial Sequence: Synthetic oligonucleotide
gucucaggggccuuuguac

SEQ ID NO: 864125 - RNA, 19 nt, Artificial Sequence
  Description of Artificial Sequence: Synthetic oligonucleotide
auagccugcucguucuaug

SEQ ID NO: 864126 - RNA, 19 nt, Artificial Sequence
  Description of Artificial Sequence: Synthetic oligonucleotide
gaguacguuuccgaaagca

SEQ ID NO: 864127 - RNA, 19 nt, Artificial Sequence
  Description of Artificial Sequence: Synthetic oligonucleotide
ugcuguguugaguacguuu

SEQ ID NO: 864128 - RNA, 19 nt, Artificial Sequence
  Description of Artificial Sequence: Synthetic oligonucleotide
agcaccucccagaugacag

SEQ ID NO: 864129 - RNA, 19 nt, Artificial Sequence
  Description of Artificial Sequence: Synthetic oligonucleotide
aagguacugagaagaauau

SEQ ID NO: 864130 - RNA, 19 nt, Artificial Sequence
  Description of Artificial Sequence: Synthetic oligonucleotide
auauauagugucagcuuca

SEQ ID NO: 864131 - RNA, 19 nt, Artificial Sequence
  Description of Artificial Sequence: Synthetic oligonucleotide
uugcaccuuacaagcaaac

SEQ ID NO: 864132 - RNA, 19 nt, Artificial Sequence
  Description of Artificial Sequence: Synthetic oligonucleotide
cauuagggccuuugagacc

SEQ ID NO: 864133 - RNA, 19 nt, Artificial Sequence
  Description of Artificial Sequence: Synthetic oligonucleotide
cauucucagagccgagccc

SEQ ID NO: 864134 - RNA, 19 nt, Artificial Sequence
  Description of Artificial Sequence: Synthetic oligonucleotide
cacuuguaggagaaaccac

SEQ ID NO: 864135 - RNA, 19 nt, Artificial Sequence
  Description of Artificial Sequence: Synthetic oligonucleotide
uugaccuugggccgaguau

SEQ ID NO: 864136 - RNA, 19 nt, Artificial Sequence
  Description of Artificial Sequence: Synthetic oligonucleotide
ccauuagggccuuugagac

SEQ ID NO: 864137 - RNA, 19 nt, Artificial Sequence
  Description of Artificial Sequence: Synthetic oligonucleotide
gguauacaucaguauauuc

SEQ ID NO: 864138 - RNA, 19 nt, Artificial Sequence
  Description of Artificial Sequence: Synthetic oligonucleotide
augcuaagaagcaccauga

SEQ ID NO: 864139 - RNA, 19 nt, Artificial Sequence
  Description of Artificial Sequence: Synthetic oligonucleotide
aggaggauugcuauugggu

SEQ ID NO: 864140 - RNA, 19 nt, Artificial Sequence
  Description of Artificial Sequence: Synthetic oligonucleotide
ugaguacguuuccgaaagc

SEQ ID NO: 864141 - RNA, 19 nt, Artificial Sequence
  Description of Artificial Sequence: Synthetic oligonucleotide
gacucugaucacuguugcc

SEQ ID NO: 864142 - RNA, 19 nt, Artificial Sequence
  Description of Artificial Sequence: Synthetic oligonucleotide
ugaccuugggccgaguauc

SEQ ID NO: 864143 - RNA, 19 nt, Artificial Sequence
  Description of Artificial Sequence: Synthetic oligonucleotide
agaguggcagucagguugg

SEQ ID NO: 864144 - RNA, 19 nt, Artificial Sequence
  Description of Artificial Sequence: Synthetic oligonucleotide
cuuguaaaagggccacauc

SEQ ID NO: 864145 - RNA, 19 nt, Artificial Sequence
  Description of Artificial Sequence: Synthetic oligonucleotide
ucagaauccucuggggccu

SEQ ID NO: 864146 - RNA, 19 nt, Artificial Sequence
  Description of Artificial Sequence: Synthetic oligonucleotide
accuucggaucaguaacac

SEQ ID NO: 864147 - RNA, 19 nt, Artificial Sequence
  Description of Artificial Sequence: Synthetic oligonucleotide
ugauugauaguggcugccu

SEQ ID NO: 864148 - RNA, 19 nt, Artificial Sequence
  Description of Artificial Sequence: Synthetic oligonucleotide
uggauccgggccuuugccc

SEQ ID NO: 864149 - RNA, 19 nt, Artificial Sequence
  Description of Artificial Sequence: Synthetic oligonucleotide
guacguuuccgaaagcaca

SEQ ID NO: 864150 - RNA, 19 nt, Artificial Sequence
  Description of Artificial Sequence: Synthetic oligonucleotide
gagcccaaugcccaucuga

SEQ ID NO: 864151 - RNA, 19 nt, Artificial Sequence
  Description of Artificial Sequence: Synthetic oligonucleotide
guugaguacguuuccgaaa

SEQ ID NO: 864152 - RNA, 19 nt, Artificial Sequence
  Description of Artificial Sequence: Synthetic oligonucleotide
ucuugggaugcagacugca

SEQ ID NO: 864153 - RNA, 19 nt, Artificial Sequence
  Description of Artificial Sequence: Synthetic oligonucleotide
ugcgucuuggugucagcug

SEQ ID NO: 864154 - RNA, 19 nt, Artificial Sequence
  Description of Artificial Sequence: Synthetic oligonucleotide
cucuaggugaccucagaga

SEQ ID NO: 864155 - RNA, 19 nt, Artificial Sequence
  Description of Artificial Sequence: Synthetic oligonucleotide
uggaucgauuuccauucau

SEQ ID NO: 864156 - RNA, 19 nt, Artificial Sequence
  Description of Artificial Sequence: Synthetic oligonucleotide
ucagcccucgccuuggcuu

SEQ ID NO: 864157 - RNA, 19 nt, Artificial Sequence
  Description of Artificial Sequence: Synthetic oligonucleotide
acccagcuuaggugagucc

SEQ ID NO: 864158 - RNA, 19 nt, Artificial Sequence
  Description of Artificial Sequence: Synthetic oligonucleotide
cauaucugagcgccugaug

SEQ ID NO: 864159 - RNA, 19 nt, Artificial Sequence
  Description of Artificial Sequence: Synthetic oligonucleotide
guaaaagggccacaucucu

SEQ ID NO: 864160 - RNA, 19 nt, Artificial Sequence
  Description of Artificial Sequence: Synthetic oligonucleotide
ucuaugauuucaggguaua

SEQ ID NO: 864161 - RNA, 19 nt, Artificial Sequence
  Description of Artificial Sequence: Synthetic oligonucleotide
uccaucgccucucgguacu

SEQ ID NO: 864162 - RNA, 19 nt, Artificial Sequence
  Description of Artificial Sequence: Synthetic oligonucleotide
gguacugagaagaauauau

SEQ ID NO: 864163 - RNA, 19 nt, Artificial Sequence
  Description of Artificial Sequence: Synthetic oligonucleotide
gauaguggcugccuagagu

SEQ ID NO: 864164 - RNA, 19 nt, Artificial Sequence
  Description of Artificial Sequence: Synthetic oligonucleotide
cugagagucagcagccuca

SEQ ID NO: 864165 - RNA, 19 nt, Artificial Sequence
  Description of Artificial Sequence: Synthetic oligonucleotide
gccuucgagaccucugugg

SEQ ID NO: 864166 - RNA, 19 nt, Artificial Sequence
  Description of Artificial Sequence: Synthetic oligonucleotide
ucgucccaguugcagggcc

SEQ ID NO: 864167 - RNA, 19 nt, Artificial Sequence
  Description of Artificial Sequence: Synthetic oligonucleotide
uucgagaccucuguggcuu

SEQ ID NO: 864168 - RNA, 19 nt, Artificial Sequence
  Description of Artificial Sequence: Synthetic oligonucleotide
ugcgagcccaagcagccaa

SEQ ID NO: 864169 - RNA, 19 nt, Artificial Sequence
  Description of Artificial Sequence: Synthetic oligonucleotide
cuaugauuucaggguauac

SEQ ID NO: 864170 - RNA, 19 nt, Artificial Sequence
  Description of Artificial Sequence: Synthetic oligonucleotide
gguaucagucagcugugug

SEQ ID NO: 864171 - RNA, 19 nt, Artificial Sequence
  Description of Artificial Sequence: Synthetic oligonucleotide
gccauuagggccuuugaga

SEQ ID NO: 864172 - RNA, 19 nt, Artificial Sequence
  Description of Artificial Sequence: Synthetic oligonucleotide
guaccaacacugguaccgg

SEQ ID NO: 864173 - RNA, 19 nt, Artificial Sequence
  Description of Artificial Sequence: Synthetic oligonucleotide
cucagagccgagcccaaug

SEQ ID NO: 864174 - RNA, 19 nt, Artificial Sequence
  Description of Artificial Sequence: Synthetic oligonucleotide
aggauugcuauuggguacu

SEQ ID NO: 864175 - RNA, 19 nt, Artificial Sequence
  Description of Artificial Sequence: Synthetic oligonucleotide
gguaccgguacuggcaccg

SEQ ID NO: 864176 - RNA, 19 nt, Artificial Sequence
  Description of Artificial Sequence: Synthetic oligonucleotide
ucagcauaucugagcgccu

SEQ ID NO: 864177 - RNA, 19 nt, Artificial Sequence
  Description of Artificial Sequence: Synthetic oligonucleotide
cuggauccgggccuuugcc

SEQ ID NO: 864178 - RNA, 19 nt, Artificial Sequence
  Description of Artificial Sequence: Synthetic oligonucleotide
aagcaaacuugagaacuuu

SEQ ID NO: 864179 - RNA, 19 nt, Artificial Sequence
  Description of Artificial Sequence: Synthetic oligonucleotide
agugucagcuucaauugau

SEQ ID NO: 864180 - RNA, 19 nt, Artificial Sequence
  Description of Artificial Sequence: Synthetic oligonucleotide
uuucggguucccagaggcu

SEQ ID NO: 864181 - RNA, 19 nt, Artificial Sequence
  Description of Artificial Sequence: Synthetic oligonucleotide
gggccgaguauccugauuc

SEQ ID NO: 864182 - RNA, 19 nt, Artificial Sequence
  Description of Artificial Sequence: Synthetic oligonucleotide
auauucaggaggauugcua

SEQ ID NO: 864183 - RNA, 19 nt, Artificial Sequence
  Description of Artificial Sequence: Synthetic oligonucleotide
cugguaccgguacuggcac

SEQ ID NO: 864184 - RNA, 19 nt, Artificial Sequence
  Description of Artificial Sequence: Synthetic oligonucleotide
ucgccucucgguacugagc

SEQ ID NO: 864185 - RNA, 19 nt, Artificial Sequence
  Description of Artificial Sequence: Synthetic oligonucleotide
augaugcuaagaagcacca

SEQ ID NO: 864186 - RNA, 19 nt, Artificial Sequence
  Description of Artificial Sequence: Synthetic oligonucleotide
ggaucgauuuccauucaug

SEQ ID NO: 864187 - RNA, 19 nt, Artificial Sequence
  Description of Artificial Sequence: Synthetic oligonucleotide
ggccauuagggccuuugag

SEQ ID NO: 864188 - RNA, 19 nt, Artificial Sequence
  Description of Artificial Sequence: Synthetic oligonucleotide
cuaaucucagcccucgccu

SEQ ID NO: 864189 - RNA, 19 nt, Artificial Sequence
  Description of Artificial Sequence: Synthetic oligonucleotide
ugccuagagugcuguguug

SEQ ID NO: 864190 - RNA, 19 nt, Artificial Sequence
  Description of Artificial Sequence: Synthetic oligonucleotide
cucaggggccuuuguacug

SEQ ID NO: 864191 - RNA, 19 nt, Artificial Sequence
  Description of Artificial Sequence: Synthetic oligonucleotide
uaccgguacuggcaccggc

SEQ ID NO: 864192 - RNA, 19 nt, Artificial Sequence
  Description of Artificial Sequence: Synthetic oligonucleotide
auaucagcuucgucccagu

SEQ ID NO: 864193 - RNA, 19 nt, Artificial Sequence
  Description of Artificial Sequence: Synthetic oligonucleotide
caaccgaguccuugaugcc

SEQ ID NO: 864194 - RNA, 19 nt, Artificial Sequence
  Description of Artificial Sequence: Synthetic oligonucleotide
gauguaucccagggcgcag

SEQ ID NO: 864195 - RNA, 19 nt, Artificial Sequence
  Description of Artificial Sequence: Synthetic oligonucleotide
uggucacucuugucgauuu

SEQ ID NO: 864196 - RNA, 19 nt, Artificial Sequence
  Description of Artificial Sequence: Synthetic oligonucleotide
accaguaccaacacuggua

SEQ ID NO: 864197 - RNA, 19 nt, Artificial Sequence
  Description of Artificial Sequence: Synthetic oligonucleotide
ucaggggccuuuguacuga

SEQ ID NO: 864198 - RNA, 19 nt, Artificial Sequence
  Description of Artificial Sequence: Synthetic oligonucleotide
ccuucgagaccucuguggc

SEQ ID NO: 864199 - RNA, 19 nt, Artificial Sequence
  Description of Artificial Sequence: Synthetic oligonucleotide
ggaggauugcuauugggua

SEQ ID NO: 864200 - RNA, 19 nt, Artificial Sequence
  Description of Artificial Sequence: Synthetic oligonucleotide
uuccaucgccucucgguac

SEQ ID NO: 864201 - RNA, 19 nt, Artificial Sequence
  Description of Artificial Sequence: Synthetic oligonucleotide
caauugauugauaguggcu

SEQ ID NO: 864202 - RNA, 19 nt, Artificial Sequence
  Description of Artificial Sequence: Synthetic oligonucleotide
acucuggcauaguccaggu

SEQ ID NO: 864203 - RNA, 19 nt, Artificial Sequence
  Description of Artificial Sequence: Synthetic oligonucleotide
gcgucuuggugucagcugc

SEQ ID NO: 864204 - RNA, 19 nt, Artificial Sequence
  Description of Artificial Sequence: Synthetic oligonucleotide
agcauaucugagcgccuga

SEQ ID NO: 864205 - RNA, 19 nt, Artificial Sequence
  Description of Artificial Sequence: Synthetic oligonucleotide
ggguccaauaucagcuucg

SEQ ID NO: 864206 - RNA, 19 nt, Artificial Sequence
  Description of Artificial Sequence: Synthetic oligonucleotide
cagagccgagcccaaugcc

SEQ ID NO: 864207 - RNA, 19 nt, Artificial Sequence
  Description of Artificial Sequence: Synthetic oligonucleotide
agagcccaaaagugagagu

SEQ ID NO: 864208 - RNA, 19 nt, Artificial Sequence
  Description of Artificial Sequence: Synthetic oligonucleotide
cccagcggcauucucagag

SEQ ID NO: 864209 - RNA, 19 nt, Artificial Sequence
  Description of Artificial Sequence: Synthetic oligonucleotide
gggccacaucucuaggugg

SEQ ID NO: 864210 - RNA, 19 nt, Artificial Sequence
  Description of Artificial Sequence: Synthetic oligonucleotide
accuuacaagcaaacuuga

SEQ ID NO: 864211 - RNA, 19 nt, Artificial Sequence
  Description of Artificial Sequence: Synthetic oligonucleotide
cucgguacugagcugccca

SEQ ID NO: 864212 - RNA, 19 nt, Artificial Sequence
  Description of Artificial Sequence: Synthetic oligonucleotide
gccuuugagacccuccgac

SEQ ID NO: 864213 - RNA, 19 nt, Artificial Sequence
  Description of Artificial Sequence: Synthetic oligonucleotide
gagucagcagccucagucu

SEQ ID NO: 864214 - RNA, 19 nt, Artificial Sequence
  Description of Artificial Sequence: Synthetic oligonucleotide
gccucugagaccucuggug

SEQ ID NO: 864215 - RNA, 19 nt, Artificial Sequence
  Description of Artificial Sequence: Synthetic oligonucleotide
cacuaaggccagcgaagag

SEQ ID NO: 864216 - RNA, 19 nt, Artificial Sequence
  Description of Artificial Sequence: Synthetic oligonucleotide
aucugagcgccugauggga

SEQ ID NO: 864217 - RNA, 19 nt, Artificial Sequence
  Description of Artificial Sequence: Synthetic oligonucleotide
ugggaaucuucgucugauc

SEQ ID NO: 864218 - RNA, 19 nt, Artificial Sequence
  Description of Artificial Sequence: Synthetic oligonucleotide
caguaccaacacugguacc

SEQ ID NO: 864219 - RNA, 19 nt, Artificial Sequence
  Description of Artificial Sequence: Synthetic oligonucleotide
gcuguguugaguacguuuc

SEQ ID NO: 864220 - RNA, 19 nt, Artificial Sequence
  Description of Artificial Sequence: Synthetic oligonucleotide
cuucggugucucugagacc

SEQ ID NO: 864221 - RNA, 19 nt, Artificial Sequence
  Description of Artificial Sequence: Synthetic oligonucleotide
aacucauauucaggaggau

SEQ ID NO: 864222 - RNA, 19 nt, Artificial Sequence
  Description of Artificial Sequence: Synthetic oligonucleotide
gaaucuucgucugaucuuu

SEQ ID NO: 864223 - RNA, 19 nt, Artificial Sequence
  Description of Artificial Sequence: Synthetic oligonucleotide
guauccugauucuccugga

SEQ ID NO: 864224 - RNA, 19 nt, Artificial Sequence
  Description of Artificial Sequence: Synthetic oligonucleotide
gugccuuuucagccuucgg

SEQ ID NO: 864225 - RNA, 19 nt, Artificial Sequence
  Description of Artificial Sequence: Synthetic oligonucleotide
ccccuugaagcucugcggg

SEQ ID NO: 864226 - RNA, 19 nt, Artificial Sequence
  Description of Artificial Sequence: Synthetic oligonucleotide
uggguauucuuggcuuuga

SEQ ID NO: 864227 - RNA, 19 nt, Artificial Sequence
  Description of Artificial Sequence: Synthetic oligonucleotide
uaucagcuucgucccaguu

SEQ ID NO: 864228 - RNA, 19 nt, Artificial Sequence
  Description of Artificial Sequence: Synthetic oligonucleotide
caaggaauagccugcucgu

SEQ ID NO: 864229 - RNA, 19 nt, Artificial Sequence
  Description of Artificial Sequence: Synthetic oligonucleotide
gaccuugggccgaguaucc

SEQ ID NO: 864230 - RNA, 19 nt, Artificial Sequence
  Description of Artificial Sequence: Synthetic oligonucleotide
cucuaaucucagcccucgc

SEQ ID NO: 864231 - RNA, 19 nt, Artificial Sequence
  Description of Artificial Sequence: Synthetic oligonucleotide
ccucacuggaucgauuucc

SEQ ID NO: 864232 - RNA, 19 nt, Artificial Sequence
  Description of Artificial Sequence: Synthetic oligonucleotide
gggaaucuucgucugaucu

SEQ ID NO: 864233 - RNA, 19 nt, Artificial Sequence
  Description of Artificial Sequence: Synthetic oligonucleotide
ccuuuuggguauucuuggc

SEQ ID NO: 864234 - RNA, 19 nt, Artificial Sequence
  Description of Artificial Sequence: Synthetic oligonucleotide
ggccacaucucuagguggg

SEQ ID NO: 864235 - RNA, 19 nt, Artificial Sequence
  Description of Artificial Sequence: Synthetic oligonucleotide
uccuuguaaaagggccaca

SEQ ID NO: 864236 - RNA, 19 nt, Artificial Sequence
  Description of Artificial Sequence: Synthetic oligonucleotide
aggccauuagggccuuuga

SEQ ID NO: 864237 - RNA, 19 nt, Artificial Sequence
  Description of Artificial Sequence: Synthetic oligonucleotide
cuccacuaaggccagcgaa

SEQ ID NO: 864238 - RNA, 19 nt, Artificial Sequence
  Description of Artificial Sequence: Synthetic oligonucleotide
uguggcuuucggguuccca

SEQ ID NO: 864239 - RNA, 19 nt, Artificial Sequence
  Description of Artificial Sequence: Synthetic oligonucleotide
cagcauaucugagcgccug

SEQ ID NO: 864240 - RNA, 19 nt, Artificial Sequence
  Description of Artificial Sequence: Synthetic oligonucleotide
cucucgguacugagcugcc

SEQ ID NO: 864241 - RNA, 19 nt, Artificial Sequence
  Description of Artificial Sequence: Synthetic oligonucleotide
cacuagcaccaguaccaac

SEQ ID NO: 864242 - RNA, 19 nt, Artificial Sequence
  Description of Artificial Sequence: Synthetic oligonucleotide
uuuagccaacagguacuuc

SEQ ID NO: 864243 - RNA, 19 nt, Artificial Sequence
  Description of Artificial Sequence: Synthetic oligonucleotide
gcucguucuaugauuucag

SEQ ID NO: 864244 - RNA, 19 nt, Artificial Sequence
  Description of Artificial Sequence: Synthetic oligonucleotide
gaucuuuagccaacaggua

SEQ ID NO: 864245 - RNA, 19 nt, Artificial Sequence
  Description of Artificial Sequence: Synthetic oligonucleotide
ggugccuuuucagccuucg

SEQ ID NO: 864246 - RNA, 19 nt, Artificial Sequence
  Description of Artificial Sequence: Synthetic oligonucleotide
gaccuucggaucaguaaca

SEQ ID NO: 864247 - RNA, 19 nt, Artificial Sequence
  Description of Artificial Sequence: Synthetic oligonucleotide
cagcgaagagcccaaaagu

SEQ ID NO: 864248 - RNA, 19 nt, Artificial Sequence
  Description of Artificial Sequence: Synthetic oligonucleotide
gacccagcuuaggugaguc

SEQ ID NO: 864249 - RNA, 19 nt, Artificial Sequence
  Description of Artificial Sequence: Synthetic oligonucleotide
ccaacacugguaccgguac

SEQ ID NO: 864250 - RNA, 19 nt, Artificial Sequence
  Description of Artificial Sequence: Synthetic oligonucleotide
agccuucggugucucugag

SEQ ID NO: 864251 - RNA, 19 nt, Artificial Sequence
  Description of Artificial Sequence: Synthetic oligonucleotide
gugaccucagagaaagcaa

SEQ ID NO: 864252 - RNA, 19 nt, Artificial Sequence
  Description of Artificial Sequence: Synthetic oligonucleotide
aggcuauggguccccuuga

SEQ ID NO: 864253 - RNA, 19 nt, Artificial Sequence
  Description of Artificial Sequence: Synthetic oligonucleotide
ucgguacugagcugcccau

SEQ ID NO: 864254 - RNA, 19 nt, Artificial Sequence
  Description of Artificial Sequence: Synthetic oligonucleotide
guuuccgaagccugacucu

SEQ ID NO: 864255 - RNA, 19 nt, Artificial Sequence
  Description of Artificial Sequence: Synthetic oligonucleotide
ugaugcuaagaagcaccau

SEQ ID NO: 864256 - RNA, 19 nt, Artificial Sequence
  Description of Artificial Sequence: Synthetic oligonucleotide
ugguaccgguacuggcacc

SEQ ID NO: 864257 - RNA, 19 nt, Artificial Sequence
  Description of Artificial Sequence: Synthetic oligonucleotide
cgccugaugggaaucuucg

SEQ ID NO: 864258 - RNA, 19 nt, Artificial Sequence
  Description of Artificial Sequence: Synthetic oligonucleotide
ggcccagcggcauucucag

SEQ ID NO: 864259 - RNA, 19 nt, Artificial Sequence
  Description of Artificial Sequence: Synthetic oligonucleotide
ucucgguacugagcugccc

SEQ ID NO: 864260 - RNA, 19 nt, Artificial Sequence
  Description of Artificial Sequence: Synthetic oligonucleotide
cuuccaucgccucucggua

SEQ ID NO: 864261 - RNA, 19 nt, Artificial Sequence
  Description of Artificial Sequence: Synthetic oligonucleotide
ccucucgguacugagcugc

SEQ ID NO: 864262 - RNA, 19 nt, Artificial Sequence
  Description of Artificial Sequence: Synthetic oligonucleotide
cagcuuaggugaguccuug

SEQ ID NO: 864263 - RNA, 19 nt, Artificial Sequence
  Description of Artificial Sequence: Synthetic oligonucleotide
ugagcgccugaugggaauc

SEQ ID NO: 864264 - RNA, 19 nt, Artificial Sequence
  Description of Artificial Sequence: Synthetic oligonucleotide
guccaauaucagcuucguc

SEQ ID NO: 864265 - RNA, 19 nt, Artificial Sequence
  Description of Artificial Sequence: Synthetic oligonucleotide
uucgucccaguugcagggc

SEQ ID NO: 864266 - RNA, 19 nt, Artificial Sequence
  Description of Artificial Sequence: Synthetic oligonucleotide
gagccgagcccaaugccca

SEQ ID NO: 864267 - RNA, 19 nt, Artificial Sequence
  Description of Artificial Sequence: Synthetic oligonucleotide
agccugcucguucuaugau

SEQ ID NO: 864268 - RNA, 19 nt, Artificial Sequence
  Description of Artificial Sequence: Synthetic oligonucleotide
uggggaccuuugcagccuc

SEQ ID NO: 864269 - RNA, 19 nt, Artificial Sequence
  Description of Artificial Sequence: Synthetic oligonucleotide
aggugaccucagagaaagc

SEQ ID NO: 864270 - RNA, 19 nt, Artificial Sequence
  Description of Artificial Sequence: Synthetic oligonucleotide
gcaccuuacaagcaaacuu

SEQ ID NO: 864271 - RNA, 19 nt, Artificial Sequence
  Description of Artificial Sequence: Synthetic oligonucleotide
acucaucaguaaugagcuu

SEQ ID NO: 864272 - RNA, 19 nt, Artificial Sequence
  Description of Artificial Sequence: Synthetic oligonucleotide
gccuuuguacugaccuucg

SEQ ID NO: 864273 - RNA, 19 nt, Artificial Sequence
  Description of Artificial Sequence: Synthetic oligonucleotide
gacagccucacuggaucga

SEQ ID NO: 864274 - RNA, 19 nt, Artificial Sequence
  Description of Artificial Sequence: Synthetic oligonucleotide
cagccaaccgaguccuuga

SEQ ID NO: 864275 - RNA, 19 nt, Artificial Sequence
  Description of Artificial Sequence: Synthetic oligonucleotide
ugggccgaguauccugauu

SEQ ID NO: 864276 - RNA, 19 nt, Artificial Sequence
  Description of Artificial Sequence: Synthetic oligonucleotide
cacuggcaccaccacuuuc

SEQ ID NO: 864277 - RNA, 19 nt, Artificial Sequence
  Description of Artificial Sequence: Synthetic oligonucleotide
agccaaccgaguccuugau

SEQ ID NO: 864278 - RNA, 19 nt, Artificial Sequence
  Description of Artificial Sequence: Synthetic oligonucleotide
aaucuucgucugaucuuua

SEQ ID NO: 864279 - RNA, 19 nt, Artificial Sequence
  Description of Artificial Sequence: Synthetic oligonucleotide
uggcugccuagagugcugu

SEQ ID NO: 864280 - RNA, 19 nt, Artificial Sequence
  Description of Artificial Sequence: Synthetic oligonucleotide
acagccucacuggaucgau

SEQ ID NO: 864281 - RNA, 19 nt, Artificial Sequence
  Description of Artificial Sequence: Synthetic oligonucleotide
gcugccagaaccuggguau

SEQ ID NO: 864282 - RNA, 19 nt, Artificial Sequence
  Description of Artificial Sequence: Synthetic oligonucleotide
gccaaccgaguccuugaug

SEQ ID NO: 864283 - RNA, 19 nt, Artificial Sequence
  Description of Artificial Sequence: Synthetic oligonucleotide
guaccgguacuggcaccgg

SEQ ID NO: 864284 - RNA, 19 nt, Artificial Sequence
  Description of Artificial Sequence: Synthetic oligonucleotide
gcuuccaucgccucucggu

SEQ ID NO: 864285 - RNA, 19 nt, Artificial Sequence
  Description of Artificial Sequence: Synthetic oligonucleotide
gccuagagugcuguguuga

SEQ ID NO: 864286 - RNA, 19 nt, Artificial Sequence
  Description of Artificial Sequence: Synthetic oligonucleotide
ugagaccucuggugccuuu

SEQ ID NO: 864287 - RNA, 19 nt, Artificial Sequence
  Description of Artificial Sequence: Synthetic oligonucleotide
cuggaucgauuuccauuca

SEQ ID NO: 864288 - RNA, 19 nt, Artificial Sequence
  Description of Artificial Sequence: Synthetic oligonucleotide
cuaagguacugagaagaau

SEQ ID NO: 864289 - RNA, 19 nt, Artificial Sequence
  Description of Artificial Sequence: Synthetic oligonucleotide
augcccugcgggcccaaaa

SEQ ID NO: 864290 - RNA, 19 nt, Artificial Sequence
  Description of Artificial Sequence: Synthetic oligonucleotide
aucagucagcuguguggua

SEQ ID NO: 864291 - RNA, 19 nt, Artificial Sequence
  Description of Artificial Sequence: Synthetic oligonucleotide
acauccccaaagagugagu

SEQ ID NO: 864292 - RNA, 19 nt, Artificial Sequence
  Description of Artificial Sequence: Synthetic oligonucleotide
caggggccuuuguacugac

SEQ ID NO: 864293 - RNA, 19 nt, Artificial Sequence
  Description of Artificial Sequence: Synthetic oligonucleotide
gcggcauucucagagccga

SEQ ID NO: 864294 - RNA, 19 nt, Artificial Sequence
  Description of Artificial Sequence: Synthetic oligonucleotide
agacccagcuuaggugagu

SEQ ID NO: 864295 - RNA, 19 nt, Artificial Sequence
  Description of Artificial Sequence: Synthetic oligonucleotide
gcucuuguuuucagcugcc

SEQ ID NO: 864296 - RNA, 19 nt, Artificial Sequence
  Description of Artificial Sequence: Synthetic oligonucleotide
gcugugaauauagcaauau

SEQ ID NO: 864297 - RNA, 19 nt, Artificial Sequence
  Description of Artificial Sequence: Synthetic oligonucleotide
ucggugucucugagaccuc

SEQ ID NO: 864298 - RNA, 19 nt, Artificial Sequence
  Description of Artificial Sequence: Synthetic oligonucleotide
ggaaucuucgucugaucuu

SEQ ID NO: 864299 - RNA, 19 nt, Artificial Sequence
  Description of Artificial Sequence: Synthetic oligonucleotide
augcccaucugagcucuaa

SEQ ID NO: 864300 - RNA, 19 nt, Artificial Sequence
  Description of Artificial Sequence: Synthetic oligonucleotide
gcaggcauugucauagccu

SEQ ID NO: 864301 - RNA, 19 nt, Artificial Sequence
  Description of Artificial Sequence: Synthetic oligonucleotide
cgucugaucuuuagccaac

SEQ ID NO: 864302 - RNA, 19 nt, Artificial Sequence
  Description of Artificial Sequence: Synthetic oligonucleotide
aucucacuuguaggagaaa

SEQ ID NO: 864303 - RNA, 19 nt, Artificial Sequence
  Description of Artificial Sequence: Synthetic oligonucleotide
cugccagaaccuggguauc

SEQ ID NO: 864304 - RNA, 19 nt, Artificial Sequence
  Description of Artificial Sequence: Synthetic oligonucleotide
ucgagaccucuguggcuuu

SEQ ID NO: 864305 - RNA, 19 nt, Artificial Sequence
  Description of Artificial Sequence: Synthetic oligonucleotide
cccaaaagugagaguggca

SEQ ID NO: 864306 - RNA, 19 nt, Artificial Sequence
  Description of Artificial Sequence: Synthetic oligonucleotide
caccggcacuggcaccacc

SEQ ID NO: 864307 - RNA, 19 nt, Artificial Sequence
  Description of Artificial Sequence: Synthetic oligonucleotide
ccccaaagagugagugaug

SEQ ID NO: 864308 - RNA, 19 nt, Artificial Sequence
  Description of Artificial Sequence: Synthetic oligonucleotide
cacucuugucgauuucuuu

SEQ ID NO: 864309 - RNA, 19 nt, Artificial Sequence
  Description of Artificial Sequence: Synthetic oligonucleotide
ggaacuggccccagcucca

SEQ ID NO: 864310 - RNA, 19 nt, Artificial Sequence
  Description of Artificial Sequence: Synthetic oligonucleotide
agccgagcccaaugcccau

SEQ ID NO: 864311 - RNA, 19 nt, Artificial Sequence
  Description of Artificial Sequence: Synthetic oligonucleotide
ccaacuugcgcagcaccuc

SEQ ID NO: 864312 - RNA, 19 nt, Artificial Sequence
  Description of Artificial Sequence: Synthetic oligonucleotide
cagcuucaauugauugaua

SEQ ID NO: 864313 - RNA, 19 nt, Artificial Sequence
  Description of Artificial Sequence: Synthetic oligonucleotide
ccuggcuugagaagaagau

SEQ ID NO: 864314 - RNA, 19 nt, Artificial Sequence
  Description of Artificial Sequence: Synthetic oligonucleotide
cccaaagagugagugaugu

SEQ ID NO: 864315 - RNA, 19 nt, Artificial Sequence
  Description of Artificial Sequence: Synthetic oligonucleotide
gccucuccgagcucuaggu

SEQ ID NO: 864316 - RNA, 19 nt, Artificial Sequence
  Description of Artificial Sequence: Synthetic oligonucleotide
gccucacuggaucgauuuc

SEQ ID NO: 864317 - RNA, 19 nt, Artificial Sequence
  Description of Artificial Sequence: Synthetic oligonucleotide
ggugucucugagaccucca

SEQ ID NO: 864318 - RNA, 19 nt, Artificial Sequence
  Description of Artificial Sequence: Synthetic oligonucleotide
cgggccuugccucuccgag

SEQ ID NO: 864319 - RNA, 19 nt, Artificial Sequence
  Description of Artificial Sequence: Synthetic oligonucleotide
gggcccagcggcauucuca

SEQ ID NO: 864320 - RNA, 19 nt, Artificial Sequence
  Description of Artificial Sequence: Synthetic oligonucleotide
gcugccuagagugcugugu

SEQ ID NO: 864321 - RNA, 19 nt, Artificial Sequence
  Description of Artificial Sequence: Synthetic oligonucleotide
gguccaauaucagcuucgu

SEQ ID NO: 864322 - RNA, 19 nt, Artificial Sequence
  Description of Artificial Sequence: Synthetic oligonucleotide
ggcugccuagagugcugug

SEQ ID NO: 864323 - RNA, 19 nt, Artificial Sequence
  Description of Artificial Sequence: Synthetic oligonucleotide
cugcgucuuggugucagcu

SEQ ID NO: 864324 - RNA, 19 nt, Artificial Sequence
  Description of Artificial Sequence: Synthetic oligonucleotide
ccccauccaaguguuucac

SEQ ID NO: 864325 - RNA, 19 nt, Artificial Sequence
  Description of Artificial Sequence: Synthetic oligonucleotide
gugucagcuucaauugauu

SEQ ID NO: 864326 - RNA, 19 nt, Artificial Sequence
  Description of Artificial Sequence: Synthetic oligonucleotide
cucuggcauaguccaggua

SEQ ID NO: 864327 - RNA, 19 nt, Artificial Sequence
  Description of Artificial Sequence: Synthetic oligonucleotide
ggcuuugaccuugggccga

SEQ ID NO: 864328 - RNA, 19 nt, Artificial Sequence
  Description of Artificial Sequence: Synthetic oligonucleotide
ccugcucguucuaugauuu

SEQ ID NO: 864329 - RNA, 19 nt, Artificial Sequence
  Description of Artificial Sequence: Synthetic oligonucleotide
ggauugcuauuggguacuc

SEQ ID NO: 864330 - RNA, 19 nt, Artificial Sequence
  Description of Artificial Sequence: Synthetic oligonucleotide
gggcucuaagguacugaga

SEQ ID NO: 864331 - RNA, 19 nt, Artificial Sequence
  Description of Artificial Sequence: Synthetic oligonucleotide
ggguauacaucaguauauu

SEQ ID NO: 864332 - RNA, 19 nt, Artificial Sequence
  Description of Artificial Sequence: Synthetic oligonucleotide
gagcgccugaugggaaucu

SEQ ID NO: 864333 - RNA, 19 nt, Artificial Sequence
  Description of Artificial Sequence: Synthetic oligonucleotide
gccucucgguacugagcug

SEQ ID NO: 864334 - RNA, 19 nt, Artificial Sequence
  Description of Artificial Sequence: Synthetic oligonucleotide
cgagcucuaggugaccuca

SEQ ID NO: 864335 - RNA, 19 nt, Artificial Sequence
  Description of Artificial Sequence: Synthetic oligonucleotide
cuucagcugcagccuucaa

SEQ ID NO: 864336 - RNA, 19 nt, Artificial Sequence
  Description of Artificial Sequence: Synthetic oligonucleotide
cccagcuuaggugaguccu

SEQ ID NO: 864337 - RNA, 19 nt, Artificial Sequence
  Description of Artificial Sequence: Synthetic oligonucleotide
ccgagcucuaggugaccuc

SEQ ID NO: 864338 - RNA, 19 nt, Artificial Sequence
  Description of Artificial Sequence: Synthetic oligonucleotide
gccugcucguucuaugauu

SEQ ID NO: 864339 - RNA, 19 nt, Artificial Sequence
  Description of Artificial Sequence: Synthetic oligonucleotide
cagugggcucuaagguacu

SEQ ID NO: 864340 - RNA, 19 nt, Artificial Sequence
  Description of Artificial Sequence: Synthetic oligonucleotide
gcacuagcaccaguaccaa

SEQ ID NO: 864341 - RNA, 19 nt, Artificial Sequence
  Description of Artificial Sequence: Synthetic oligonucleotide
cucagcccucgccuuggcu

SEQ ID NO: 864342 - RNA, 19 nt, Artificial Sequence
  Description of Artificial Sequence: Synthetic oligonucleotide
ccaguaugccugcaucagu

SEQ ID NO: 864343 - RNA, 19 nt, Artificial Sequence
  Description of Artificial Sequence: Synthetic oligonucleotide
cagggcgcagccccaacuu

SEQ ID NO: 864344 - RNA, 19 nt, Artificial Sequence
  Description of Artificial Sequence: Synthetic oligonucleotide
ccgaguccuugaugcccug

SEQ ID NO: 864345 - RNA, 19 nt, Artificial Sequence
  Description of Artificial Sequence: Synthetic oligonucleotide
gcgagcccaagcagccaac

SEQ ID NO: 864346 - RNA, 19 nt, Artificial Sequence
  Description of Artificial Sequence: Synthetic oligonucleotide
cggcauucucagagccgag

SEQ ID NO: 864347 - RNA, 19 nt, Artificial Sequence
  Description of Artificial Sequence: Synthetic oligonucleotide
ccgaaagcacacccuggcu

SEQ ID NO: 864348 - RNA, 19 nt, Artificial Sequence
  Description of Artificial Sequence: Synthetic oligonucleotide
gccgagcccaaugcccauc

SEQ ID NO: 864349 - RNA, 19 nt, Artificial Sequence
  Description of Artificial Sequence: Synthetic oligonucleotide
ccaucgccucucgguacug

SEQ ID NO: 864350 - RNA, 19 nt, Artificial Sequence
  Description of Artificial Sequence: Synthetic oligonucleotide
gcgggcccaaaaggcuaug

SEQ ID NO: 864351 - RNA, 19 nt, Artificial Sequence
  Description of Artificial Sequence: Synthetic oligonucleotide
cuccgaccaccugugguuu

SEQ ID NO: 864352 - RNA, 19 nt, Artificial Sequence
  Description of Artificial Sequence: Synthetic oligonucleotide
ccgagcccaaugcccaucu

SEQ ID NO: 864353 - RNA, 19 nt, Artificial Sequence
  Description of Artificial Sequence: Synthetic oligonucleotide
cgagcccaaugcccaucug

SEQ ID NO: 864354 - RNA, 19 nt, Artificial Sequence
  Description of Artificial Sequence: Synthetic oligonucleotide
agcagccaaccgaguccuu

SEQ ID NO: 864355 - RNA, 19 nt, Artificial Sequence
  Description of Artificial Sequence: Synthetic oligonucleotide
ccagcuuaggugaguccuu

SEQ ID NO: 864356 - RNA, 19 nt, Artificial Sequence
  Description of Artificial Sequence: Synthetic oligonucleotide
gcccagcggcauucucaga

SEQ ID NO: 864357 - RNA, 19 nt, Artificial Sequence
  Description of Artificial Sequence: Synthetic oligonucleotide
gugcuguguugaguacguu

SEQ ID NO: 864358 - RNA, 19 nt, Artificial Sequence
  Description of Artificial Sequence: Synthetic oligonucleotide
gcacuggcaccaccacuuu

SEQ ID NO: 864359 - RNA, 19 nt, Artificial Sequence
  Description of Artificial Sequence: Synthetic oligonucleotide
cgucuuggugucagcugcu

SEQ ID NO: 864360 - RNA, 19 nt, Artificial Sequence
  Description of Artificial Sequence: Synthetic oligonucleotide
cagaauccucuggggccuu

SEQ ID NO: 864361 - RNA, 19 nt, Artificial Sequence
  Description of Artificial Sequence: Synthetic oligonucleotide
cgguacuggcaccggcacu

SEQ ID NO: 864362 - RNA, 19 nt, Artificial Sequence
  Description of Artificial Sequence: Synthetic oligonucleotide
cccauuccuugggauccuu

SEQ ID NO: 864363 - RNA, 19 nt, Artificial Sequence
  Description of Artificial Sequence: Synthetic oligonucleotide
ccgggccuuugcccagggu

SEQ ID NO: 864364 - RNA, 19 nt, Artificial Sequence
  Description of Artificial Sequence: Synthetic oligonucleotide
cagaggcuuuggggaccuu

SEQ ID NO: 864365 - RNA, 19 nt, Artificial Sequence
  Description of Artificial Sequence: Synthetic oligonucleotide
aauugaagcacauaucauc

SEQ ID NO: 864366 - RNA, 19 nt, Artificial Sequence
  Description of Artificial Sequence: Synthetic oligonucleotide
aauuccgagaguuuacacc

SEQ ID NO: 864367 - RNA, 19 nt, Artificial Sequence
  Description of Artificial Sequence: Synthetic oligonucleotide
ugcauuucaacuaaggcgc

SEQ ID NO: 864368 - RNA, 19 nt, Artificial Sequence
  Description of Artificial Sequence: Synthetic oligonucleotide
aaggaauaucaauagaaag

SEQ ID NO: 864369 - RNA, 19 nt, Artificial Sequence
  Description of Artificial Sequence: Synthetic oligonucleotide
uguaauugaugcuagaugu

SEQ ID NO: 864370 - RNA, 19 nt, Artificial Sequence
  Description of Artificial Sequence: Synthetic oligonucleotide
auuccgagaguuuacaccc

SEQ ID NO: 864371 - RNA, 19 nt, Artificial Sequence
  Description of Artificial Sequence: Synthetic oligonucleotide
uuaacuagcaacaagccuc

SEQ ID NO: 864372 - RNA, 19 nt, Artificial Sequence
  Description of Artificial Sequence: Synthetic oligonucleotide
ugaucaggcacuuaaacag

SEQ ID NO: 864373 - RNA, 19 nt, Artificial Sequence
  Description of Artificial Sequence: Synthetic oligonucleotide
aauucguuuaugguggacc

SEQ ID NO: 864374 - RNA, 19 nt, Artificial Sequence
  Description of Artificial Sequence: Synthetic oligonucleotide
uuaaaugaauccaagaguu

SEQ ID NO: 864375 - RNA, 19 nt, Artificial Sequence
  Description of Artificial Sequence: Synthetic oligonucleotide
acagguaacguccagcggc

SEQ ID NO: 864376 - RNA, 19 nt, Artificial Sequence
  Description of Artificial Sequence: Synthetic oligonucleotide
uugaaauuaagacuuacuc

SEQ ID NO: 864377 - RNA, 19 nt, Artificial Sequence
  Description of Artificial Sequence: Synthetic oligonucleotide
auucuuucauaacagacuc

SEQ ID NO: 864378 - RNA, 19 nt, Artificial Sequence
  Description of Artificial Sequence: Synthetic oligonucleotide
uaggauaacauccucaggu

SEQ ID NO: 864379 - RNA, 19 nt, Artificial Sequence
  Description of Artificial Sequence: Synthetic oligonucleotide
aauuaacuagcaacaagcc

SEQ ID NO: 864380 - RNA, 19 nt, Artificial Sequence
  Description of Artificial Sequence: Synthetic oligonucleotide
agccauuuaagguugcucc

SEQ ID NO: 864381 - RNA, 19 nt, Artificial Sequence
  Description of Artificial Sequence: Synthetic oligonucleotide
acuuaaacagguaacgucc

SEQ ID NO: 864382 - RNA, 19 nt, Artificial Sequence
  Description of Artificial Sequence: Synthetic oligonucleotide
uuauaaguguuagagauca

SEQ ID NO: 864383 - RNA, 19 nt, Artificial Sequence
  Description of Artificial Sequence: Synthetic oligonucleotide
uggauuauccuuuugacaa

SEQ ID NO: 864384 - RNA, 19 nt, Artificial Sequence
  Description of Artificial Sequence: Synthetic oligonucleotide
uguagaagaaauuaagaau

SEQ ID NO: 864385 - RNA, 19 nt, Artificial Sequence
  Description of Artificial Sequence: Synthetic oligonucleotide
uguaacaugauuccacaug

SEQ ID NO: 864386 - RNA, 19 nt, Artificial Sequence
  Description of Artificial Sequence: Synthetic oligonucleotide
uuuaagcgcauccauuagg

SEQ ID NO: 864387 - RNA, 19 nt, Artificial Sequence
  Description of Artificial Sequence: Synthetic oligonucleotide
cauucaacuaaauuucugc

SEQ ID NO: 864388 - RNA, 19 nt, Artificial Sequence
  Description of Artificial Sequence: Synthetic oligonucleotide
aacuccuaugccuuccacc

SEQ ID NO: 864389 - RNA, 19 nt, Artificial Sequence
  Description of Artificial Sequence: Synthetic oligonucleotide
agaguuuacacccugggcu

SEQ ID NO: 864390 - RNA, 19 nt, Artificial Sequence
  Description of Artificial Sequence: Synthetic oligonucleotide
aauauaguugagucucaag

SEQ ID NO: 864391 - RNA, 19 nt, Artificial Sequence
  Description of Artificial Sequence: Synthetic oligonucleotide
aaaauuugguuacguaugu

SEQ ID NO: 864392 - RNA, 19 nt, Artificial Sequence
  Description of Artificial Sequence: Synthetic oligonucleotide
uguauuuacggaacuaggu

SEQ ID NO: 864393 - RNA, 19 nt, Artificial Sequence
  Description of Artificial Sequence: Synthetic oligonucleotide
ucucagagcccaaagauga

SEQ ID NO: 864394 - RNA, 19 nt, Artificial Sequence
  Description of Artificial Sequence: Synthetic oligonucleotide
gauuauaaguguuagagau

SEQ ID NO: 864395 - RNA, 19 nt, Artificial Sequence
  Description of Artificial Sequence: Synthetic oligonucleotide
gaguacuuuugucagaagc

SEQ ID NO: 864396 - RNA, 19 nt, Artificial Sequence
  Description of Artificial Sequence: Synthetic oligonucleotide
ccaaguaagggauagaugc

SEQ ID NO: 864397 - RNA, 19 nt, Artificial Sequence
  Description of Artificial Sequence: Synthetic oligonucleotide
ucacuaauggaccaguggu

SEQ ID NO: 864398 - RNA, 19 nt, Artificial Sequence
  Description of Artificial Sequence: Synthetic oligonucleotide
ugacagaacucugugaagg

SEQ ID NO: 864399 - RNA, 19 nt, Artificial Sequence
  Description of Artificial Sequence: Synthetic oligonucleotide
guuuacuuggaggugaugg

SEQ ID NO: 864400 - RNA, 19 nt, Artificial Sequence
  Description of Artificial Sequence: Synthetic oligonucleotide
caaugaauauaguugaguc

SEQ ID NO: 864401 - RNA, 19 nt, Artificial Sequence
  Description of Artificial Sequence: Synthetic oligonucleotide
aaacugucauggauuaucc

SEQ ID NO: 864402 - RNA, 19 nt, Artificial Sequence
  Description of Artificial Sequence: Synthetic oligonucleotide
acuccuaugccuuccaccg

SEQ ID NO: 864403 - RNA, 19 nt, Artificial Sequence
  Description of Artificial Sequence: Synthetic oligonucleotide
acaaauucuaguucaccuc

SEQ ID NO: 864404 - RNA, 19 nt, Artificial Sequence
  Description of Artificial Sequence: Synthetic oligonucleotide
gaugcuagauguuaaggac

SEQ ID NO: 864405 - RNA, 19 nt, Artificial Sequence
  Description of Artificial Sequence: Synthetic oligonucleotide
uuaaggacucaacccaggg

SEQ ID NO: 864406 - RNA, 19 nt, Artificial Sequence
  Description of Artificial Sequence: Synthetic oligonucleotide
uaccacuuuaaugagauca

SEQ ID NO: 864407 - RNA, 19 nt, Artificial Sequence
  Description of Artificial Sequence: Synthetic oligonucleotide
uuaaguuguaaacugucau

SEQ ID NO: 864408 - RNA, 19 nt, Artificial Sequence
  Description of Artificial Sequence: Synthetic oligonucleotide
uuaggagcguacaagucag

SEQ ID NO: 864409 - RNA, 19 nt, Artificial Sequence
  Description of Artificial Sequence: Synthetic oligonucleotide
aauaugcugcuuaaaaucu

SEQ ID NO: 864410 - RNA, 19 nt, Artificial Sequence
  Description of Artificial Sequence: Synthetic oligonucleotide
caaauucuaguucaccucc

SEQ ID NO: 864411 - RNA, 19 nt, Artificial Sequence
  Description of Artificial Sequence: Synthetic oligonucleotide
ugaugcuagauguuaagga

SEQ ID NO: 864412 - RNA, 19 nt, Artificial Sequence
  Description of Artificial Sequence: Synthetic oligonucleotide
aaucagaucuucuacccaa

SEQ ID NO: 864413 - RNA, 19 nt, Artificial Sequence
  Description of Artificial Sequence: Synthetic oligonucleotide
gacuuuaggaaccccuugg

SEQ ID NO: 864414 - RNA, 19 nt, Artificial Sequence
  Description of Artificial Sequence: Synthetic oligonucleotide
cuuuguaacaugauuccac

SEQ ID NO: 864415 - RNA, 19 nt, Artificial Sequence
  Description of Artificial Sequence: Synthetic oligonucleotide
ucauagauuaucucagacu

SEQ ID NO: 864416 - RNA, 19 nt, Artificial Sequence
  Description of Artificial Sequence: Synthetic oligonucleotide
acggaauucguuuauggug

SEQ ID NO: 864417 - RNA, 19 nt, Artificial Sequence
  Description of Artificial Sequence: Synthetic oligonucleotide
auugcuagagcccuuacaa

SEQ ID NO: 864418 - RNA, 19 nt, Artificial Sequence
  Description of Artificial Sequence: Synthetic oligonucleotide
guauuuacggaacuaggug

SEQ ID NO: 864419 - RNA, 19 nt, Artificial Sequence
  Description of Artificial Sequence: Synthetic oligonucleotide
aagcgcauccauuaggagu

SEQ ID NO: 864420 - RNA, 19 nt, Artificial Sequence
  Description of Artificial Sequence: Synthetic oligonucleotide
uuaguugucucacucguuc

SEQ ID NO: 864421 - RNA, 19 nt, Artificial Sequence
  Description of Artificial Sequence: Synthetic oligonucleotide
uuugguuacguauguaggu

SEQ ID NO: 864422 - RNA, 19 nt, Artificial Sequence
  Description of Artificial Sequence: Synthetic oligonucleotide
uuaggaaccccuuggauuc

SEQ ID NO: 864423 - RNA, 19 nt, Artificial Sequence
  Description of Artificial Sequence: Synthetic oligonucleotide
auuaacuagcaacaagccu

SEQ ID NO: 864424 - RNA, 19 nt, Artificial Sequence
  Description of Artificial Sequence: Synthetic oligonucleotide
guugccaggaaauaccagc

SEQ ID NO: 864425 - RNA, 19 nt, Artificial Sequence
  Description of Artificial Sequence: Synthetic oligonucleotide
ugucacgaaaauacuaacu

SEQ ID NO: 864426 - RNA, 19 nt, Artificial Sequence
  Description of Artificial Sequence: Synthetic oligonucleotide
uguuaaggacucaacccag

SEQ ID NO: 864427 - RNA, 19 nt, Artificial Sequence
  Description of Artificial Sequence: Synthetic oligonucleotide
ugagggauaauucuuucau

SEQ ID NO: 864428 - RNA, 19 nt, Artificial Sequence
  Description of Artificial Sequence: Synthetic oligonucleotide
uuuaagguugcuccaagua

SEQ ID NO: 864429 - RNA, 19 nt, Artificial Sequence
  Description of Artificial Sequence: Synthetic oligonucleotide
aggaauaucaauagaaagu

SEQ ID NO: 864430 - RNA, 19 nt, Artificial Sequence
  Description of Artificial Sequence: Synthetic oligonucleotide
ucggagaguacuuuuguca

SEQ ID NO: 864431 - RNA, 19 nt, Artificial Sequence
  Description of Artificial Sequence: Synthetic oligonucleotide
ugaagcacauaucauccac

SEQ ID NO: 864432 - RNA, 19 nt, Artificial Sequence
  Description of Artificial Sequence: Synthetic oligonucleotide
cuuuccaugaccuccguuc

SEQ ID NO: 864433 - RNA, 19 nt, Artificial Sequence
  Description of Artificial Sequence: Synthetic oligonucleotide
cauuguccggccuugacag

SEQ ID NO: 864434 - RNA, 19 nt, Artificial Sequence
  Description of Artificial Sequence: Synthetic oligonucleotide
cauaacagacuccaacacc

SEQ ID NO: 864435 - RNA, 19 nt, Artificial Sequence
  Description of Artificial Sequence: Synthetic oligonucleotide
ucauaacagacuccaacac

SEQ ID NO: 864436 - RNA, 19 nt, Artificial Sequence
  Description of Artificial Sequence: Synthetic oligonucleotide
auaguugagucucaaggga

SEQ ID NO: 864437 - RNA, 19 nt, Artificial Sequence
  Description of Artificial Sequence: Synthetic oligonucleotide
acacggaauucguuuaugg

SEQ ID NO: 864438 - RNA, 19 nt, Artificial Sequence
  Description of Artificial Sequence: Synthetic oligonucleotide
auugaugcuagauguuaag

SEQ ID NO: 864439 - RNA, 19 nt, Artificial Sequence
  Description of Artificial Sequence: Synthetic oligonucleotide
acccaaugaauauaguuga

SEQ ID NO: 864440 - RNA, 19 nt, Artificial Sequence
  Description of Artificial Sequence: Synthetic oligonucleotide
cuguauuuacggaacuagg

SEQ ID NO: 864441 - RNA, 19 nt, Artificial Sequence
  Description of Artificial Sequence: Synthetic oligonucleotide
uuuaucugaauaugcugcu

SEQ ID NO: 864442 - RNA, 19 nt, Artificial Sequence
  Description of Artificial Sequence: Synthetic oligonucleotide
uaaacugucauggauuauc

SEQ ID NO: 864443 - RNA, 19 nt, Artificial Sequence
  Description of Artificial Sequence: Synthetic oligonucleotide
aaauacuaacuucuucuuu

SEQ ID NO: 864444 - RNA, 19 nt, Artificial Sequence
  Description of Artificial Sequence: Synthetic oligonucleotide
auaacagacuccaacacca

SEQ ID NO: 864445 - RNA, 19 nt, Artificial Sequence
  Description of Artificial Sequence: Synthetic oligonucleotide
gucacuaauggaccagugg

SEQ ID NO: 864446 - RNA, 19 nt, Artificial Sequence
  Description of Artificial Sequence: Synthetic oligonucleotide
auuugguuacguauguagg

SEQ ID NO: 864447 - RNA, 19 nt, Artificial Sequence
  Description of Artificial Sequence: Synthetic oligonucleotide
uguaaacugucauggauua

SEQ ID NO: 864448 - RNA, 19 nt, Artificial Sequence
  Description of Artificial Sequence: Synthetic oligonucleotide
aacagguaacguccagcgg

SEQ ID NO: 864449 - RNA, 19 nt, Artificial Sequence
  Description of Artificial Sequence: Synthetic oligonucleotide
cuguagaagaaauuaagaa

SEQ ID NO: 864450 - RNA, 19 nt, Artificial Sequence
  Description of Artificial Sequence: Synthetic oligonucleotide
uaucugaauaugcugcuua

SEQ ID NO: 864451 - RNA, 19 nt, Artificial Sequence
  Description of Artificial Sequence: Synthetic oligonucleotide
ucacgaaaauacuaacuuc

SEQ ID NO: 864452 - RNA, 19 nt, Artificial Sequence
  Description of Artificial Sequence: Synthetic oligonucleotide
ucauuguccggccuugaca

SEQ ID NO: 864453 - RNA, 19 nt, Artificial Sequence
  Description of Artificial Sequence: Synthetic oligonucleotide
gaauaucaauagaaagucc

SEQ ID NO: 864454 - RNA, 19 nt, Artificial Sequence
  Description of Artificial Sequence: Synthetic oligonucleotide
aaggugacuuuaggaaccc

SEQ ID NO: 864455 - RNA, 19 nt, Artificial Sequence
  Description of Artificial Sequence: Synthetic oligonucleotide
augaccuccguuccuuccc

SEQ ID NO: 864456 - RNA, 19 nt, Artificial Sequence
  Description of Artificial Sequence: Synthetic oligonucleotide
uuuccaugaccuccguucc

SEQ ID NO: 864457 - RNA, 19 nt, Artificial Sequence
  Description of Artificial Sequence: Synthetic oligonucleotide
uccauuaggagugucuucu

SEQ ID NO: 864458 - RNA, 19 nt, Artificial Sequence
  Description of Artificial Sequence: Synthetic oligonucleotide
uggaguuuccuccuggcaa

SEQ ID NO: 864459 - RNA, 19 nt, Artificial Sequence
  Description of Artificial Sequence: Synthetic oligonucleotide
uccaaguaagggauagaug

SEQ ID NO: 864460 - RNA, 19 nt, Artificial Sequence
  Description of Artificial Sequence: Synthetic oligonucleotide
ucucuuaggagcguacaag

SEQ ID NO: 864461 - RNA, 19 nt, Artificial Sequence
  Description of Artificial Sequence: Synthetic oligonucleotide
gaugccuccuguauuuacg

SEQ ID NO: 864462 - RNA, 19 nt, Artificial Sequence
  Description of Artificial Sequence: Synthetic oligonucleotide
cuggauauuuggaugccag

SEQ ID NO: 864463 - RNA, 19 nt, Artificial Sequence
  Description of Artificial Sequence: Synthetic oligonucleotide
uuuacuuggaggugauggu

SEQ ID NO: 864464 - RNA, 19 nt, Artificial Sequence
  Description of Artificial Sequence: Synthetic oligonucleotide
ugcuagauguuaaggacuc

SEQ ID NO: 864465 - RNA, 19 nt, Artificial Sequence
  Description of Artificial Sequence: Synthetic oligonucleotide
uaauugaagcacauaucau

SEQ ID NO: 864466 - RNA, 19 nt, Artificial Sequence
  Description of Artificial Sequence: Synthetic oligonucleotide
gcauacuaagcacacacag

SEQ ID NO: 864467 - RNA, 19 nt, Artificial Sequence
  Description of Artificial Sequence: Synthetic oligonucleotide
ggaauaucaauagaaaguc

SEQ ID NO: 864468 - RNA, 19 nt, Artificial Sequence
  Description of Artificial Sequence: Synthetic oligonucleotide
ggaauuagucucucuaaag

SEQ ID NO: 864469 - RNA, 19 nt, Artificial Sequence
  Description of Artificial Sequence: Synthetic oligonucleotide
ugguuacguauguaggugc

SEQ ID NO: 864470 - RNA, 19 nt, Artificial Sequence
  Description of Artificial Sequence: Synthetic oligonucleotide
uacguauguaggugcagag

SEQ ID NO: 864471 - RNA, 19 nt, Artificial Sequence
  Description of Artificial Sequence: Synthetic oligonucleotide
caagcuaaggcccaucuca

SEQ ID NO: 864472 - RNA, 19 nt, Artificial Sequence
  Description of Artificial Sequence: Synthetic oligonucleotide
gucauagauuaucucagac

SEQ ID NO: 864473 - RNA, 19 nt, Artificial Sequence
  Description of Artificial Sequence: Synthetic oligonucleotide
uucaacuaaauuucugcuu

SEQ ID NO: 864474 - RNA, 19 nt, Artificial Sequence
  Description of Artificial Sequence: Synthetic oligonucleotide
uacggaacuagguggaggu

SEQ ID NO: 864475 - RNA, 19 nt, Artificial Sequence
  Description of Artificial Sequence: Synthetic oligonucleotide
uagguuauucuguuccaca

SEQ ID NO: 864476 - RNA, 19 nt, Artificial Sequence
  Description of Artificial Sequence: Synthetic oligonucleotide
auagguuauucuguuccac

SEQ ID NO: 864477 - RNA, 19 nt, Artificial Sequence
  Description of Artificial Sequence: Synthetic oligonucleotide
gagaguuuacacccugggc

SEQ ID NO: 864478 - RNA, 19 nt, Artificial Sequence
  Description of Artificial Sequence: Synthetic oligonucleotide
uugagggauaauucuuuca

SEQ ID NO: 864479 - RNA, 19 nt, Artificial Sequence
  Description of Artificial Sequence: Synthetic oligonucleotide
auucguuuaugguggaccu

SEQ ID NO: 864480 - RNA, 19 nt, Artificial Sequence
  Description of Artificial Sequence: Synthetic oligonucleotide
cuuaggagcguacaaguca

SEQ ID NO: 864481 - RNA, 19 nt, Artificial Sequence
  Description of Artificial Sequence: Synthetic oligonucleotide
ugacuuuaggaaccccuug

SEQ ID NO: 864482 - RNA, 19 nt, Artificial Sequence
  Description of Artificial Sequence: Synthetic oligonucleotide
uucguuuacuuggagguga

SEQ ID NO: 864483 - RNA, 19 nt, Artificial Sequence
  Description of Artificial Sequence: Synthetic oligonucleotide
cuaugucaauuccucuucg

SEQ ID NO: 864484 - RNA, 19 nt, Artificial Sequence
  Description of Artificial Sequence: Synthetic oligonucleotide
cuaacuguagaagaaauua

SEQ ID NO: 864485 - RNA, 19 nt, Artificial Sequence
  Description of Artificial Sequence: Synthetic oligonucleotide
uccgccuuaaaugaaucca

SEQ ID NO: 864486 - RNA, 19 nt, Artificial Sequence
  Description of Artificial Sequence: Synthetic oligonucleotide
uaguugagucucaagggaa

SEQ ID NO: 864487 - RNA, 19 nt, Artificial Sequence
  Description of Artificial Sequence: Synthetic oligonucleotide
uaauugaugcuagauguua

SEQ ID NO: 864488 - RNA, 19 nt, Artificial Sequence
  Description of Artificial Sequence: Synthetic oligonucleotide
augccuccuguauuuacgg

SEQ ID NO: 864489 - RNA, 19 nt, Artificial Sequence
  Description of Artificial Sequence: Synthetic oligonucleotide
uugacagaacucugugaag

SEQ ID NO: 864490 - RNA, 19 nt, Artificial Sequence
  Description of Artificial Sequence: Synthetic oligonucleotide
ugcauacuaagcacacaca

SEQ ID NO: 864491 - RNA, 19 nt, Artificial Sequence
  Description of Artificial Sequence: Synthetic oligonucleotide
ugacaaauucuaguucacc

SEQ ID NO: 864492 - RNA, 19 nt, Artificial Sequence
  Description of Artificial Sequence: Synthetic oligonucleotide
gacuuacucucccacucag

SEQ ID NO: 864493 - RNA, 19 nt, Artificial Sequence
  Description of Artificial Sequence: Synthetic oligonucleotide
auuuaagguugcuccaagu

SEQ ID NO: 864494 - RNA, 19 nt, Artificial Sequence
  Description of Artificial Sequence: Synthetic oligonucleotide
gucaauuccucuucggaga

SEQ ID NO: 864495 - RNA, 19 nt, Artificial Sequence
  Description of Artificial Sequence: Synthetic oligonucleotide
acuaauggaccagugguga

SEQ ID NO: 864496 - RNA, 19 nt, Artificial Sequence
  Description of Artificial Sequence: Synthetic oligonucleotide
uccaagcuaaggcccaucu

SEQ ID NO: 864497 - RNA, 19 nt, Artificial Sequence
  Description of Artificial Sequence: Synthetic oligonucleotide
gaauuccgagaguuuacac

SEQ ID NO: 864498 - RNA, 19 nt, Artificial Sequence
  Description of Artificial Sequence: Synthetic oligonucleotide
ugggaauuagucucucuaa

SEQ ID NO: 864499 - RNA, 19 nt, Artificial Sequence
  Description of Artificial Sequence: Synthetic oligonucleotide
acguauguaggugcagagc

SEQ ID NO: 864500 - RNA, 19 nt, Artificial Sequence
  Description of Artificial Sequence: Synthetic oligonucleotide
uuacguauguaggugcaga

SEQ ID NO: 864501 - RNA, 19 nt, Artificial Sequence
  Description of Artificial Sequence: Synthetic oligonucleotide
gauagguuauucuguucca

SEQ ID NO: 864502 - RNA, 19 nt, Artificial Sequence
  Description of Artificial Sequence: Synthetic oligonucleotide
uucaguggcgccagacugc

SEQ ID NO: 864503 - RNA, 19 nt, Artificial Sequence
  Description of Artificial Sequence: Synthetic oligonucleotide
cuaggauaacauccucagg

SEQ ID NO: 864504 - RNA, 19 nt, Artificial Sequence
  Description of Artificial Sequence: Synthetic oligonucleotide
aacugucauggauuauccu

SEQ ID NO: 864505 - RNA, 19 nt, Artificial Sequence
  Description of Artificial Sequence: Synthetic oligonucleotide
ugucacuaauggaccagug

SEQ ID NO: 864506 - RNA, 19 nt, Artificial Sequence
  Description of Artificial Sequence: Synthetic oligonucleotide
uagauuaucucagacucuu

SEQ ID NO: 864507 - RNA, 19 nt, Artificial Sequence
  Description of Artificial Sequence: Synthetic oligonucleotide
aguggcgccagacugcacu

SEQ ID NO: 864508 - RNA, 19 nt, Artificial Sequence
  Description of Artificial Sequence: Synthetic oligonucleotide
cuuuaagcgcauccauuag

SEQ ID NO: 864509 - RNA, 19 nt, Artificial Sequence
  Description of Artificial Sequence: Synthetic oligonucleotide
ucucaagggaacuguggga

SEQ ID NO: 864510 - RNA, 19 nt, Artificial Sequence
  Description of Artificial Sequence: Synthetic oligonucleotide
agcgcauccauuaggagug

SEQ ID NO: 864511 - RNA, 19 nt, Artificial Sequence
  Description of Artificial Sequence: Synthetic oligonucleotide
uugggcguggacuuucucu

SEQ ID NO: 864512 - RNA, 19 nt, Artificial Sequence
  Description of Artificial Sequence: Synthetic oligonucleotide
ucaacuaaggcgccaucua

SEQ ID NO: 864513 - RNA, 19 nt, Artificial Sequence
  Description of Artificial Sequence: Synthetic oligonucleotide
aauucuaguucaccuccuu

SEQ ID NO: 864514 - RNA, 19 nt, Artificial Sequence
  Description of Artificial Sequence: Synthetic oligonucleotide
caaaaugacuccuggcuga

SEQ ID NO: 864515 - RNA, 19 nt, Artificial Sequence
  Description of Artificial Sequence: Synthetic oligonucleotide
acuuuaggaaccccuugga

SEQ ID NO: 864516 - RNA, 19 nt, Artificial Sequence
  Description of Artificial Sequence: Synthetic oligonucleotide
uauccacguugucacaacu

SEQ ID NO: 864517 - RNA, 19 nt, Artificial Sequence
  Description of Artificial Sequence: Synthetic oligonucleotide
uggaccaguggugaaauuc

SEQ ID NO: 864518 - RNA, 19 nt, Artificial Sequence
  Description of Artificial Sequence: Synthetic oligonucleotide
uucucuuaggagcguacaa

SEQ ID NO: 864519 - RNA, 19 nt, Artificial Sequence
  Description of Artificial Sequence: Synthetic oligonucleotide
uagguggaggucuucgaga

SEQ ID NO: 864520 - RNA, 19 nt, Artificial Sequence
  Description of Artificial Sequence: Synthetic oligonucleotide
uguugaucaggcacuuaaa

SEQ ID NO: 864521 - RNA, 19 nt, Artificial Sequence
  Description of Artificial Sequence: Synthetic oligonucleotide
uaagggauagaugcaggac

SEQ ID NO: 864522 - RNA, 19 nt, Artificial Sequence
  Description of Artificial Sequence: Synthetic oligonucleotide
ucucagaagccucuccguc

SEQ ID NO: 864523 - RNA, 19 nt, Artificial Sequence
  Description of Artificial Sequence: Synthetic oligonucleotide
aguaccuaugucaauuccu

SEQ ID NO: 864524 - RNA, 19 nt, Artificial Sequence
  Description of Artificial Sequence: Synthetic oligonucleotide
agagcccuuacaacuuucc

SEQ ID NO: 864525 - RNA, 19 nt, Artificial Sequence
  Description of Artificial Sequence: Synthetic oligonucleotide
cacuaauggaccaguggug

SEQ ID NO: 864526 - RNA, 19 nt, Artificial Sequence
  Description of Artificial Sequence: Synthetic oligonucleotide
aauggaccaguggugaaau

SEQ ID NO: 864527 - RNA, 19 nt, Artificial Sequence
  Description of Artificial Sequence: Synthetic oligonucleotide
cugucacgaaaauacuaac

SEQ ID NO: 864528 - RNA, 19 nt, Artificial Sequence
  Description of Artificial Sequence: Synthetic oligonucleotide
agguuauucuguuccacau

SEQ ID NO: 864529 - RNA, 19 nt, Artificial Sequence
  Description of Artificial Sequence: Synthetic oligonucleotide
acgcuuuucuaacuguaga

SEQ ID NO: 864530 - RNA, 19 nt, Artificial Sequence
  Description of Artificial Sequence: Synthetic oligonucleotide
agucauagauuaucucaga

SEQ ID NO: 864531 - RNA, 19 nt, Artificial Sequence
  Description of Artificial Sequence: Synthetic oligonucleotide
agcccuuacaacuuuccau

SEQ ID NO: 864532 - RNA, 19 nt, Artificial Sequence
  Description of Artificial Sequence: Synthetic oligonucleotide
ucccuuaguugucucacuc

SEQ ID NO: 864533 - RNA, 19 nt, Artificial Sequence
  Description of Artificial Sequence: Synthetic oligonucleotide
gacgcuuuucuaacuguag

SEQ ID NO: 864534 - RNA, 19 nt, Artificial Sequence
  Description of Artificial Sequence: Synthetic oligonucleotide
uccgagaguuuacacccug

SEQ ID NO: 864535 - RNA, 19 nt, Artificial Sequence
  Description of Artificial Sequence: Synthetic oligonucleotide
uuccacacggaauucguuu

SEQ ID NO: 864536 - RNA, 19 nt, Artificial Sequence
  Description of Artificial Sequence: Synthetic oligonucleotide
cggaauucguuuauggugg

SEQ ID NO: 864537 - RNA, 19 nt, Artificial Sequence
  Description of Artificial Sequence: Synthetic oligonucleotide
caacuaaggcgccaucuac

SEQ ID NO: 864538 - RNA, 19 nt, Artificial Sequence
  Description of Artificial Sequence: Synthetic oligonucleotide
cuuggcuaccacucaacuc

SEQ ID NO: 864539 - RNA, 19 nt, Artificial Sequence
  Description of Artificial Sequence: Synthetic oligonucleotide
agucucaagggaacugugg

SEQ ID NO: 864540 - RNA, 19 nt, Artificial Sequence
  Description of Artificial Sequence: Synthetic oligonucleotide
acauucaacuaaauuucug

SEQ ID NO: 864541 - RNA, 19 nt, Artificial Sequence
  Description of Artificial Sequence: Synthetic oligonucleotide
acuagcaacaagccucaaa

SEQ ID NO: 864542 - RNA, 19 nt, Artificial Sequence
  Description of Artificial Sequence: Synthetic oligonucleotide
agcaugggaccacaucuug

SEQ ID NO: 864543 - RNA, 19 nt, Artificial Sequence
  Description of Artificial Sequence: Synthetic oligonucleotide
uuuacggaacuagguggag

SEQ ID NO: 864544 - RNA, 19 nt, Artificial Sequence
  Description of Artificial Sequence: Synthetic oligonucleotide
agaauuccgagaguuuaca

SEQ ID NO: 864545 - RNA, 19 nt, Artificial Sequence
  Description of Artificial Sequence: Synthetic oligonucleotide
aaauucuaguucaccuccu

SEQ ID NO: 864546 - RNA, 19 nt, Artificial Sequence
  Description of Artificial Sequence: Synthetic oligonucleotide
uucggagaguacuuuuguc

SEQ ID NO: 864547 - RNA, 19 nt, Artificial Sequence
  Description of Artificial Sequence: Synthetic oligonucleotide
aggagcguacaagucagag

SEQ ID NO: 864548 - RNA, 19 nt, Artificial Sequence
  Description of Artificial Sequence: Synthetic oligonucleotide
auuuacggaacuaggugga

SEQ ID NO: 864549 - RNA, 19 nt, Artificial Sequence
  Description of Artificial Sequence: Synthetic oligonucleotide
uccaccgucucagagccca

SEQ ID NO: 864550 - RNA, 19 nt, Artificial Sequence
  Description of Artificial Sequence: Synthetic oligonucleotide
ucuggauauuuggaugcca

SEQ ID NO: 864551 - RNA, 19 nt, Artificial Sequence
  Description of Artificial Sequence: Synthetic oligonucleotide
uuguaacaugauuccacau

SEQ ID NO: 864552 - RNA, 19 nt, Artificial Sequence
  Description of Artificial Sequence: Synthetic oligonucleotide
gucacgaaaauacuaacuu

SEQ ID NO: 864553 - RNA, 19 nt, Artificial Sequence
  Description of Artificial Sequence: Synthetic oligonucleotide
ggauuauaaguguuagaga

SEQ ID NO: 864554 - RNA, 19 nt, Artificial Sequence
  Description of Artificial Sequence: Synthetic oligonucleotide
acccaaugcauuucaacua

SEQ ID NO: 864555 - RNA, 19 nt, Artificial Sequence
  Description of Artificial Sequence: Synthetic oligonucleotide
aucugaauaugcugcuuaa

SEQ ID NO: 864556 - RNA, 19 nt, Artificial Sequence
  Description of Artificial Sequence: Synthetic oligonucleotide
ugggaccacaucuuggcua

SEQ ID NO: 864557 - RNA, 19 nt, Artificial Sequence
  Description of Artificial Sequence: Synthetic oligonucleotide
guaccuaugucaauuccuc

SEQ ID NO: 864558 - RNA, 19 nt, Artificial Sequence
  Description of Artificial Sequence: Synthetic oligonucleotide
gagaauuccgagaguuuac

SEQ ID NO: 864559 - RNA, 19 nt, Artificial Sequence
  Description of Artificial Sequence: Synthetic oligonucleotide
acuaaggcgccaucuacuu

SEQ ID NO: 864560 - RNA, 19 nt, Artificial Sequence
  Description of Artificial Sequence: Synthetic oligonucleotide
aggcuaggauaacauccuc

SEQ ID NO: 864561 - RNA, 19 nt, Artificial Sequence
  Description of Artificial Sequence: Synthetic oligonucleotide
uccguccugggcuccauug

SEQ ID NO: 864562 - RNA, 19 nt, Artificial Sequence
  Description of Artificial Sequence: Synthetic oligonucleotide
gguugcuccaaguaaggga

SEQ ID NO: 864563 - RNA, 19 nt, Artificial Sequence
  Description of Artificial Sequence: Synthetic oligonucleotide
uaauggaccaguggugaaa

SEQ ID NO: 864564 - RNA, 19 nt, Artificial Sequence
  Description of Artificial Sequence: Synthetic oligonucleotide
ugugggaauuagucucucu

SEQ ID NO: 864565 - RNA, 19 nt, Artificial Sequence
  Description of Artificial Sequence: Synthetic oligonucleotide
agacuuacucucccacuca

SEQ ID NO: 864566 - RNA, 19 nt, Artificial Sequence
  Description of Artificial Sequence: Synthetic oligonucleotide
agaguacuuuugucagaag

SEQ ID NO: 864567 - RNA, 19 nt, Artificial Sequence
  Description of Artificial Sequence: Synthetic oligonucleotide
uccacacggaauucguuua

SEQ ID NO: 864568 - RNA, 19 nt, Artificial Sequence
  Description of Artificial Sequence: Synthetic oligonucleotide
uggcauaauugaagcacau

SEQ ID NO: 864569 - RNA, 19 nt, Artificial Sequence
  Description of Artificial Sequence: Synthetic oligonucleotide
gaacugugggaauuagucu

SEQ ID NO: 864570 - RNA, 19 nt, Artificial Sequence
  Description of Artificial Sequence: Synthetic oligonucleotide
uccuccgccuuaaaugaau

SEQ ID NO: 864571 - RNA, 19 nt, Artificial Sequence
  Description of Artificial Sequence: Synthetic oligonucleotide
cagacucgccuucugguac

SEQ ID NO: 864572 - RNA, 19 nt, Artificial Sequence
  Description of Artificial Sequence: Synthetic oligonucleotide
cuggcccucgacccaaugc

SEQ ID NO: 864573 - RNA, 19 nt, Artificial Sequence
  Description of Artificial Sequence: Synthetic oligonucleotide
aacuccaagcuaaggccca

SEQ ID NO: 864574 - RNA, 19 nt, Artificial Sequence
  Description of Artificial Sequence: Synthetic oligonucleotide
agaugaggcuuugagggau

SEQ ID NO: 864575 - RNA, 19 nt, Artificial Sequence
  Description of Artificial Sequence: Synthetic oligonucleotide
accaacaguggcagacucg

SEQ ID NO: 864576 - RNA, 19 nt, Artificial Sequence
  Description of Artificial Sequence: Synthetic oligonucleotide
aguuuacacccugggcuuc

SEQ ID NO: 864577 - RNA, 19 nt, Artificial Sequence
  Description of Artificial Sequence: Synthetic oligonucleotide
uggaggucuucgagaauuc

SEQ ID NO: 864578 - RNA, 19 nt, Artificial Sequence
  Description of Artificial Sequence: Synthetic oligonucleotide
ggauagaugcaggacgccc

SEQ ID NO: 864579 - RNA, 19 nt, Artificial Sequence
  Description of Artificial Sequence: Synthetic oligonucleotide
cccagccauauacagacgc

SEQ ID NO: 864580 - RNA, 19 nt, Artificial Sequence
  Description of Artificial Sequence: Synthetic oligonucleotide
ucaguggcgccagacugca

SEQ ID NO: 864581 - RNA, 19 nt, Artificial Sequence
  Description of Artificial Sequence: Synthetic oligonucleotide
uuguccggccuugacagaa

SEQ ID NO: 864582 - RNA, 19 nt, Artificial Sequence
  Description of Artificial Sequence: Synthetic oligonucleotide
augagaucagauagguuau

SEQ ID NO: 864583 - RNA, 19 nt, Artificial Sequence
  Description of Artificial Sequence: Synthetic oligonucleotide
ugaccuccguuccuucccu

SEQ ID NO: 864584 - RNA, 19 nt, Artificial Sequence
  Description of Artificial Sequence: Synthetic oligonucleotide
gguaacguccagcggcucc

SEQ ID NO: 864585 - RNA, 19 nt, Artificial Sequence
  Description of Artificial Sequence: Synthetic oligonucleotide
gaauucguuuaugguggac

SEQ ID NO: 864586 - RNA, 19 nt, Artificial Sequence
  Description of Artificial Sequence: Synthetic oligonucleotide
gagcccuuacaacuuucca

SEQ ID NO: 864587 - RNA, 19 nt, Artificial Sequence
  Description of Artificial Sequence: Synthetic oligonucleotide
cauugcuagagcccuuaca

SEQ ID NO: 864588 - RNA, 19 nt, Artificial Sequence
  Description of Artificial Sequence: Synthetic oligonucleotide
gaggcuuugagggauaauu

SEQ ID NO: 864589 - RNA, 19 nt, Artificial Sequence
  Description of Artificial Sequence: Synthetic oligonucleotide
ucguuuacuuggaggugau

SEQ ID NO: 864590 - RNA, 19 nt, Artificial Sequence
  Description of Artificial Sequence: Synthetic oligonucleotide
uuccgagaguuuacacccu

SEQ ID NO: 864591 - RNA, 19 nt, Artificial Sequence
  Description of Artificial Sequence: Synthetic oligonucleotide
cucauuguccggccuugac

SEQ ID NO: 864592 - RNA, 19 nt, Artificial Sequence
  Description of Artificial Sequence: Synthetic oligonucleotide
cuucguuuacuuggaggug

SEQ ID NO: 864593 - RNA, 19 nt, Artificial Sequence
  Description of Artificial Sequence: Synthetic oligonucleotide
ucucacucguucucuccuc

SEQ ID NO: 864594 - RNA, 19 nt, Artificial Sequence
  Description of Artificial Sequence: Synthetic oligonucleotide
aagggaacugugggaauua

SEQ ID NO: 864595 - RNA, 19 nt, Artificial Sequence
  Description of Artificial Sequence: Synthetic oligonucleotide
agacucgccuucugguaca

SEQ ID NO: 864596 - RNA, 19 nt, Artificial Sequence
  Description of Artificial Sequence: Synthetic oligonucleotide
ugccuccuguauuuacgga

SEQ ID NO: 864597 - RNA, 19 nt, Artificial Sequence
  Description of Artificial Sequence: Synthetic oligonucleotide
gggaccacaucuuggcuac

SEQ ID NO: 864598 - RNA, 19 nt, Artificial Sequence
  Description of Artificial Sequence: Synthetic oligonucleotide
cccuuaguugucucacucg

SEQ ID NO: 864599 - RNA, 19 nt, Artificial Sequence
  Description of Artificial Sequence: Synthetic oligonucleotide
gggaauuagucucucuaaa

SEQ ID NO: 864600 - RNA, 19 nt, Artificial Sequence
  Description of Artificial Sequence: Synthetic oligonucleotide
ucacucguucucuccuccu

SEQ ID NO: 864601 - RNA, 19 nt, Artificial Sequence
  Description of Artificial Sequence: Synthetic oligonucleotide
acguugucacaacuccuau

SEQ ID NO: 864602 - RNA, 19 nt, Artificial Sequence
  Description of Artificial Sequence: Synthetic oligonucleotide
aucucauuguccggccuug

SEQ ID NO: 864603 - RNA, 19 nt, Artificial Sequence
  Description of Artificial Sequence: Synthetic oligonucleotide
ucgacccaaugcauuucaa

SEQ ID NO: 864604 - RNA, 19 nt, Artificial Sequence
  Description of Artificial Sequence: Synthetic oligonucleotide
gaugcaggacgccccagua

SEQ ID NO: 864605 - RNA, 19 nt, Artificial Sequence
  Description of Artificial Sequence: Synthetic oligonucleotide
caccaacaguggcagacuc

SEQ ID NO: 864606 - RNA, 19 nt, Artificial Sequence
  Description of Artificial Sequence: Synthetic oligonucleotide
cacguugucacaacuccua

SEQ ID NO: 864607 - RNA, 19 nt, Artificial Sequence
  Description of Artificial Sequence: Synthetic oligonucleotide
cuaaggcgccaucuacuuc

SEQ ID NO: 864608 - RNA, 19 nt, Artificial Sequence
  Description of Artificial Sequence: Synthetic oligonucleotide
uuugggcguggacuuucuc

SEQ ID NO: 864609 - RNA, 19 nt, Artificial Sequence
  Description of Artificial Sequence: Synthetic oligonucleotide
cucgacccaaugcauuuca

SEQ ID NO: 864610 - RNA, 19 nt, Artificial Sequence
  Description of Artificial Sequence: Synthetic oligonucleotide
agggaacugugggaauuag

SEQ ID NO: 864611 - RNA, 19 nt, Artificial Sequence
  Description of Artificial Sequence: Synthetic oligonucleotide
gcugucacgaaaauacuaa

SEQ ID NO: 864612 - RNA, 19 nt, Artificial Sequence
  Description of Artificial Sequence: Synthetic oligonucleotide
cacacggaauucguuuaug

SEQ ID NO: 864613 - RNA, 19 nt, Artificial Sequence
  Description of Artificial Sequence: Synthetic oligonucleotide
cccacucagauuuaucuga

SEQ ID NO: 864614 - RNA, 19 nt, Artificial Sequence
  Description of Artificial Sequence: Synthetic oligonucleotide
cagccauuuaagguugcuc

SEQ ID NO: 864615 - RNA, 19 nt, Artificial Sequence
  Description of Artificial Sequence: Synthetic oligonucleotide
uguccggccuugacagaac

SEQ ID NO: 864616 - RNA, 19 nt, Artificial Sequence
  Description of Artificial Sequence: Synthetic oligonucleotide
aggguugcacaugcagaag

SEQ ID NO: 864617 - RNA, 19 nt, Artificial Sequence
  Description of Artificial Sequence: Synthetic oligonucleotide
cgagaguuuacacccuggg

SEQ ID NO: 864618 - RNA, 19 nt, Artificial Sequence
  Description of Artificial Sequence: Synthetic oligonucleotide
ggcacuuuuaccacuuuaa

SEQ ID NO: 864619 - RNA, 19 nt, Artificial Sequence
  Description of Artificial Sequence: Synthetic oligonucleotide
gaguuuacacccugggcuu

SEQ ID NO: 864620 - RNA, 19 nt, Artificial Sequence
  Description of Artificial Sequence: Synthetic oligonucleotide
gcaugggaccacaucuugg

SEQ ID NO: 864621 - RNA, 19 nt, Artificial Sequence
  Description of Artificial Sequence: Synthetic oligonucleotide
ccuuacaacuuuccaugac

SEQ ID NO: 864622 - RNA, 19 nt, Artificial Sequence
  Description of Artificial Sequence: Synthetic oligonucleotide
guaacguccagcggcucca

SEQ ID NO: 864623 - RNA, 19 nt, Artificial Sequence
  Description of Artificial Sequence: Synthetic oligonucleotide
ugagaucagauagguuauu

SEQ ID NO: 864624 - RNA, 19 nt, Artificial Sequence
  Description of Artificial Sequence: Synthetic oligonucleotide
cuaauggaccaguggugaa

SEQ ID NO: 864625 - RNA, 19 nt, Artificial Sequence
  Description of Artificial Sequence: Synthetic oligonucleotide
cacggaauucguuuauggu

SEQ ID NO: 864626 - RNA, 19 nt, Artificial Sequence
  Description of Artificial Sequence: Synthetic oligonucleotide
ucaacccagggugccuucu

SEQ ID NO: 864627 - RNA, 19 nt, Artificial Sequence
  Description of Artificial Sequence: Synthetic oligonucleotide
cuucucuuaggagcguaca

SEQ ID NO: 864628 - RNA, 19 nt, Artificial Sequence
  Description of Artificial Sequence: Synthetic oligonucleotide
acggaacuagguggagguc

SEQ ID NO: 864629 - RNA, 19 nt, Artificial Sequence
  Description of Artificial Sequence: Synthetic oligonucleotide
auuguccggccuugacaga

SEQ ID NO: 864630 - RNA, 19 nt, Artificial Sequence
  Description of Artificial Sequence: Synthetic oligonucleotide
agcguacaagucagagcuc

SEQ ID NO: 864631 - RNA, 19 nt, Artificial Sequence
  Description of Artificial Sequence: Synthetic oligonucleotide
ggagaguacuuuugucaga

SEQ ID NO: 864632 - RNA, 19 nt, Artificial Sequence
  Description of Artificial Sequence: Synthetic oligonucleotide
ccgagaguuuacacccugg

SEQ ID NO: 864633 - RNA, 19 nt, Artificial Sequence
  Description of Artificial Sequence: Synthetic oligonucleotide
ccaaggcuaggauaacauc

SEQ ID NO: 864634 - RNA, 19 nt, Artificial Sequence
  Description of Artificial Sequence: Synthetic oligonucleotide
ucucauuguccggccuuga

SEQ ID NO: 864635 - RNA, 19 nt, Artificial Sequence
  Description of Artificial Sequence: Synthetic oligonucleotide
ggauuauccuuuugacaaa

SEQ ID NO: 864636 - RNA, 19 nt, Artificial Sequence
  Description of Artificial Sequence: Synthetic oligonucleotide
cuucggagaguacuuuugu

SEQ ID NO: 864637 - RNA, 19 nt, Artificial Sequence
  Description of Artificial Sequence: Synthetic oligonucleotide
aggacgccccaguaccuau

SEQ ID NO: 864638 - RNA, 19 nt, Artificial Sequence
  Description of Artificial Sequence: Synthetic oligonucleotide
gguuacguauguaggugca

SEQ ID NO: 864639 - RNA, 19 nt, Artificial Sequence
  Description of Artificial Sequence: Synthetic oligonucleotide
uggcuaccacucaacucuu

SEQ ID NO: 864640 - RNA, 19 nt, Artificial Sequence
  Description of Artificial Sequence: Synthetic oligonucleotide
gucucacucguucucuccu

SEQ ID NO: 864641 - RNA, 19 nt, Artificial Sequence
  Description of Artificial Sequence: Synthetic oligonucleotide
aucagaucuucuacccaau

SEQ ID NO: 864642 - RNA, 19 nt, Artificial Sequence
  Description of Artificial Sequence: Synthetic oligonucleotide
gacucgccuucugguacag

SEQ ID NO: 864643 - RNA, 19 nt, Artificial Sequence
  Description of Artificial Sequence: Synthetic oligonucleotide
uucguuuaugguggaccuu

SEQ ID NO: 864644 - RNA, 19 nt, Artificial Sequence
  Description of Artificial Sequence: Synthetic oligonucleotide
guggcagacucgccuucug

SEQ ID NO: 864645 - RNA, 19 nt, Artificial Sequence
  Description of Artificial Sequence: Synthetic oligonucleotide
guggaggucuucgagaauu

SEQ ID NO: 864646 - RNA, 19 nt, Artificial Sequence
  Description of Artificial Sequence: Synthetic oligonucleotide
ggaauucguuuauggugga

SEQ ID NO: 864647 - RNA, 19 nt, Artificial Sequence
  Description of Artificial Sequence: Synthetic oligonucleotide
gacgccccaguaccuaugu

SEQ ID NO: 864648 - RNA, 19 nt, Artificial Sequence
  Description of Artificial Sequence: Synthetic oligonucleotide
cucaacccagggugccuuc

SEQ ID NO: 864649 - RNA, 19 nt, Artificial Sequence
  Description of Artificial Sequence: Synthetic oligonucleotide
agguaacguccagcggcuc

SEQ ID NO: 864650 - RNA, 19 nt, Artificial Sequence
  Description of Artificial Sequence: Synthetic oligonucleotide
guaauugaugcuagauguu

SEQ ID NO: 864651 - RNA, 19 nt, Artificial Sequence
  Description of Artificial Sequence: Synthetic oligonucleotide
gaacuagguggaggucuuc

SEQ ID NO: 864652 - RNA, 19 nt, Artificial Sequence
  Description of Artificial Sequence: Synthetic oligonucleotide
cugugggaauuagucucuc

SEQ ID NO: 864653 - RNA, 19 nt, Artificial Sequence
  Description of Artificial Sequence: Synthetic oligonucleotide
gaugaggcuuugagggaua

SEQ ID NO: 864654 - RNA, 19 nt, Artificial Sequence
  Description of Artificial Sequence: Synthetic oligonucleotide
gcauuucaacuaaggcgcc

SEQ ID NO: 864655 - RNA, 19 nt, Artificial Sequence
  Description of Artificial Sequence: Synthetic oligonucleotide
ggugaccaaucagaucuuc

SEQ ID NO: 864656 - RNA, 19 nt, Artificial Sequence
  Description of Artificial Sequence: Synthetic oligonucleotide
aacuagcaacaagccucaa

SEQ ID NO: 864657 - RNA, 19 nt, Artificial Sequence
  Description of Artificial Sequence: Synthetic oligonucleotide
ccuccgccuuaaaugaauc

SEQ ID NO: 864658 - RNA, 19 nt, Artificial Sequence
  Description of Artificial Sequence: Synthetic oligonucleotide
cagguaacguccagcggcu

SEQ ID NO: 864659 - RNA, 19 nt, Artificial Sequence
  Description of Artificial Sequence: Synthetic oligonucleotide
auggaccaguggugaaauu

SEQ ID NO: 864660 - RNA, 19 nt, Artificial Sequence
  Description of Artificial Sequence: Synthetic oligonucleotide
cagaucagugagaauucuu

SEQ ID NO: 864661 - RNA, 19 nt, Artificial Sequence
  Description of Artificial Sequence: Synthetic oligonucleotide
caggaaauaccagccauuu

SEQ ID NO: 864662 - RNA, 19 nt, Artificial Sequence
  Description of Artificial Sequence: Synthetic oligonucleotide
cauccauuaggagugucuu

SEQ ID NO: 864663 - RNA, 19 nt, Artificial Sequence
  Description of Artificial Sequence: Synthetic oligonucleotide
cuuaguugucucacucguu

SEQ ID NO: 864664 - RNA, 19 nt, Artificial Sequence
  Description of Artificial Sequence: Synthetic oligonucleotide
ccaagcuaaggcccaucuc

SEQ ID NO: 864665 - RNA, 19 nt, Artificial Sequence
  Description of Artificial Sequence: Synthetic oligonucleotide
caccucccuuaguugucuc

SEQ ID NO: 864666 - RNA, 19 nt, Artificial Sequence
  Description of Artificial Sequence: Synthetic oligonucleotide
cuaagcacacacagucauu

SEQ ID NO: 864667 - RNA, 19 nt, Artificial Sequence
  Description of Artificial Sequence: Synthetic oligonucleotide
ggcauaauugaagcacaua

SEQ ID NO: 864668 - RNA, 19 nt, Artificial Sequence
  Description of Artificial Sequence: Synthetic oligonucleotide
cgccccaguaccuauguca

SEQ ID NO: 864669 - RNA, 19 nt, Artificial Sequence
  Description of Artificial Sequence: Synthetic oligonucleotide
ucggggcaccucccuuagu

SEQ ID NO: 864670 - RNA, 19 nt, Artificial Sequence
  Description of Artificial Sequence: Synthetic oligonucleotide
ccgccuuaaaugaauccaa

SEQ ID NO: 864671 - RNA, 19 nt, Artificial Sequence
  Description of Artificial Sequence: Synthetic oligonucleotide
acuccaagcuaaggcccau

SEQ ID NO: 864672 - RNA, 19 nt, Artificial Sequence
  Description of Artificial Sequence: Synthetic oligonucleotide
cacacagucauugcaccau

SEQ ID NO: 864673 - RNA, 19 nt, Artificial Sequence
  Description of Artificial Sequence: Synthetic oligonucleotide
gcguacaagucagagcucu

SEQ ID NO: 864674 - RNA, 19 nt, Artificial Sequence
  Description of Artificial Sequence: Synthetic oligonucleotide
cccuuacaacuuuccauga

SEQ ID NO: 864675 - RNA, 19 nt, Artificial Sequence
  Description of Artificial Sequence: Synthetic oligonucleotide
ggauucugagcucuuccuu

SEQ ID NO: 864676 - RNA, 19 nt, Artificial Sequence
  Description of Artificial Sequence: Synthetic oligonucleotide
gcagacucgccuucuggua

SEQ ID NO: 864677 - RNA, 19 nt, Artificial Sequence
  Description of Artificial Sequence: Synthetic oligonucleotide
gggcaccucccuuaguugu

SEQ ID NO: 864678 - RNA, 19 nt, Artificial Sequence
  Description of Artificial Sequence: Synthetic oligonucleotide
guccggccuugacagaacu

SEQ ID NO: 864679 - RNA, 19 nt, Artificial Sequence
  Description of Artificial Sequence: Synthetic oligonucleotide
gcauccauuaggagugucu

SEQ ID NO: 864680 - RNA, 19 nt, Artificial Sequence
  Description of Artificial Sequence: Synthetic oligonucleotide
ccauugcuagagcccuuac

SEQ ID NO: 864681 - RNA, 19 nt, Artificial Sequence
  Description of Artificial Sequence: Synthetic oligonucleotide
gacucaacccagggugccu

SEQ ID NO: 864682 - RNA, 19 nt, Artificial Sequence
  Description of Artificial Sequence: Synthetic oligonucleotide
cacucagauuuaucugaau

SEQ ID NO: 864683 - RNA, 19 nt, Artificial Sequence
  Description of Artificial Sequence: Synthetic oligonucleotide
guaaacugucauggauuau

SEQ ID NO: 864684 - RNA, 19 nt, Artificial Sequence
  Description of Artificial Sequence: Synthetic oligonucleotide
gcuagauguuaaggacuca

SEQ ID NO: 864685 - RNA, 19 nt, Artificial Sequence
  Description of Artificial Sequence: Synthetic oligonucleotide
cgagaauuccgagaguuua

SEQ ID NO: 864686 - RNA, 19 nt, Artificial Sequence
  Description of Artificial Sequence: Synthetic oligonucleotide
ccgucucagagcccaaaga

SEQ ID NO: 864687 - RNA, 19 nt, Artificial Sequence
  Description of Artificial Sequence: Synthetic oligonucleotide
ggcgccagacugcacuucu

SEQ ID NO: 864688 - RNA, 19 nt, Artificial Sequence
  Description of Artificial Sequence: Synthetic oligonucleotide
ggcaccucccuuaguuguc

SEQ ID NO: 864689 - RNA, 19 nt, Artificial Sequence
  Description of Artificial Sequence: Synthetic oligonucleotide
gaccaguggugaaauucuu

SEQ ID NO: 864690 - RNA, 19 nt, Artificial Sequence
  Description of Artificial Sequence: Synthetic oligonucleotide
gugaugccuccuguauuua

SEQ ID NO: 864691 - RNA, 19 nt, Artificial Sequence
  Description of Artificial Sequence: Synthetic oligonucleotide
caguggcgccagacugcac

SEQ ID NO: 864692 - RNA, 19 nt, Artificial Sequence
  Description of Artificial Sequence: Synthetic oligonucleotide
ggaaccccuuggauucuga

SEQ ID NO: 864693 - RNA, 19 nt, Artificial Sequence
  Description of Artificial Sequence: Synthetic oligonucleotide
gccucuccguccugggcuc

SEQ ID NO: 864694 - RNA, 19 nt, Artificial Sequence
  Description of Artificial Sequence: Synthetic oligonucleotide
ccagccauauacagacgcu

SEQ ID NO: 864695 - RNA, 19 nt, Artificial Sequence
  Description of Artificial Sequence: Synthetic oligonucleotide
ggccuugacagaacucugu

SEQ ID NO: 864696 - RNA, 19 nt, Artificial Sequence
  Description of Artificial Sequence: Synthetic oligonucleotide
gcucggggcaccucccuua

SEQ ID NO: 864697 - RNA, 19 nt, Artificial Sequence
  Description of Artificial Sequence: Synthetic oligonucleotide
agggugccuucugcauacu

SEQ ID NO: 864698 - RNA, 19 nt, Artificial Sequence
  Description of Artificial Sequence: Synthetic oligonucleotide
ccucgacccaaugcauuuc

SEQ ID NO: 864699 - RNA, 19 nt, Artificial Sequence
  Description of Artificial Sequence: Synthetic oligonucleotide
ccacguugucacaacuccu

SEQ ID NO: 864700 - RNA, 19 nt, Artificial Sequence
  Description of Artificial Sequence: Synthetic oligonucleotide
guggcgccagacugcacuu

SEQ ID NO: 864701 - RNA, 19 nt, Artificial Sequence
  Description of Artificial Sequence: Synthetic oligonucleotide
ggaccacaucuuggcuacc

SEQ ID NO: 864702 - RNA, 19 nt, Artificial Sequence
  Description of Artificial Sequence: Synthetic oligonucleotide
ggaacuagguggaggucuu

SEQ ID NO: 864703 - RNA, 19 nt, Artificial Sequence
  Description of Artificial Sequence: Synthetic oligonucleotide
cggaacuagguggaggucu

SEQ ID NO: 864704 - RNA, 19 nt, Artificial Sequence
  Description of Artificial Sequence: Synthetic oligonucleotide
gaccuccguuccuucccuu

SEQ ID NO: 864705 - RNA, 19 nt, Artificial Sequence
  Description of Artificial Sequence: Synthetic oligonucleotide
gguggaggucuucgagaau

SEQ ID NO: 864706 - RNA, 19 nt, Artificial Sequence
  Description of Artificial Sequence: Synthetic oligonucleotide
cugaggcaauggccaccaa

SEQ ID NO: 864707 - RNA, 19 nt, Artificial Sequence
  Description of Artificial Sequence: Synthetic oligonucleotide
gcaccucccuuaguugucu

SEQ ID NO: 864708 - RNA, 19 nt, Artificial Sequence
  Description of Artificial Sequence: Synthetic oligonucleotide
ccuaugccuuccaccgucu

SEQ ID NO: 864709 - RNA, 19 nt, Artificial Sequence
  Description of Artificial Sequence: Synthetic oligonucleotide
cccucgacccaaugcauuu

SEQ ID NO: 864710 - RNA, 19 nt, Artificial Sequence
  Description of Artificial Sequence: Synthetic oligonucleotide
ccaucucauuguccggccu

SEQ ID NO: 864711 - RNA, 19 nt, Artificial Sequence
  Description of Artificial Sequence: Synthetic oligonucleotide
ccacacggaauucguuuau

SEQ ID NO: 864712 - RNA, 19 nt, Artificial Sequence
  Description of Artificial Sequence: Synthetic oligonucleotide
ggcccucgacccaaugcau

SEQ ID NO: 864713 - RNA, 19 nt, Artificial Sequence
  Description of Artificial Sequence: Synthetic oligonucleotide
ggcuaccacucaacucuuu

SEQ ID NO: 864714 - RNA, 19 nt, Artificial Sequence
  Description of Artificial Sequence: Synthetic oligonucleotide
gcgcauccauuaggagugu

SEQ ID NO: 864715 - RNA, 19 nt, Artificial Sequence
  Description of Artificial Sequence: Synthetic oligonucleotide
gcgccagacugcacuucuu

SEQ ID NO: 864716 - RNA, 19 nt, Artificial Sequence
  Description of Artificial Sequence: Synthetic oligonucleotide
cgccaucuacuuccuucuu

SEQ ID NO: 864717 - RNA, 19 nt, Artificial Sequence
  Description of Artificial Sequence: Synthetic oligonucleotide
aguaaaacacaauacaacc

SEQ ID NO: 864718 - RNA, 19 nt, Artificial Sequence
  Description of Artificial Sequence: Synthetic oligonucleotide
auacuuuuggaucauaggc

SEQ ID NO: 864719 - RNA, 19 nt, Artificial Sequence
  Description of Artificial Sequence: Synthetic oligonucleotide
uauggcaaaguaaugaagg

SEQ ID NO: 864720 - RNA, 19 nt, Artificial Sequence
  Description of Artificial Sequence: Synthetic oligonucleotide
ugaaguauggguuaggcag

SEQ ID NO: 864721 - RNA, 19 nt, Artificial Sequence
  Description of Artificial Sequence: Synthetic oligonucleotide
ucuaauaggaacaugacau

SEQ ID NO: 864722 - RNA, 19 nt, Artificial Sequence
  Description of Artificial Sequence: Synthetic oligonucleotide
aggaacaugacauaaggac

SEQ ID NO: 864723 - RNA, 19 nt, Artificial Sequence
  Description of Artificial Sequence: Synthetic oligonucleotide
auaaggacuucacaaaacc

SEQ ID NO: 864724 - RNA, 19 nt, Artificial Sequence
  Description of Artificial Sequence: Synthetic oligonucleotide
aaucaaaggaaucucagga

SEQ ID NO: 864725 - RNA, 19 nt, Artificial Sequence
  Description of Artificial Sequence: Synthetic oligonucleotide
uauacaaugaugcaacucu

SEQ ID NO: 864726 - RNA, 19 nt, Artificial Sequence
  Description of Artificial Sequence: Synthetic oligonucleotide
uacuguaucauauuuaaca

SEQ ID NO: 864727 - RNA, 19 nt, Artificial Sequence
  Description of Artificial Sequence: Synthetic oligonucleotide
agaaggaugcauuaggaac

SEQ ID NO: 864728 - RNA, 19 nt, Artificial Sequence
  Description of Artificial Sequence: Synthetic oligonucleotide
aaaaucuuucagcuugccc

SEQ ID NO: 864729 - RNA, 19 nt, Artificial Sequence
  Description of Artificial Sequence: Synthetic oligonucleotide
ucaaaaguguaacuuacag

SEQ ID NO: 864730 - RNA, 19 nt, Artificial Sequence
  Description of Artificial Sequence: Synthetic oligonucleotide
acuuuuggaucauaggccc

SEQ ID NO: 864731 - RNA, 19 nt, Artificial Sequence
  Description of Artificial Sequence: Synthetic oligonucleotide
uuuugagccucucuuaagg

SEQ ID NO: 864732 - RNA, 19 nt, Artificial Sequence
  Description of Artificial Sequence: Synthetic oligonucleotide
auaggaacaugacauaagg

SEQ ID NO: 864733 - RNA, 19 nt, Artificial Sequence
  Description of Artificial Sequence: Synthetic oligonucleotide
acaucacauaaacaaaccc

SEQ ID NO: 864734 - RNA, 19 nt, Artificial Sequence
  Description of Artificial Sequence: Synthetic oligonucleotide
agauuuaaguccuuaaucu

SEQ ID NO: 864735 - RNA, 19 nt, Artificial Sequence
  Description of Artificial Sequence: Synthetic oligonucleotide
aacaugcccucuuucaggc

SEQ ID NO: 864736 - RNA, 19 nt, Artificial Sequence
  Description of Artificial Sequence: Synthetic oligonucleotide
ucauauucugcauuuauga

SEQ ID NO: 864737 - RNA, 19 nt, Artificial Sequence
  Description of Artificial Sequence: Synthetic oligonucleotide
uuuaacaccuuaaauaaua

SEQ ID NO: 864738 - RNA, 19 nt, Artificial Sequence
  Description of Artificial Sequence: Synthetic oligonucleotide
auuauuacuacauuucuau

SEQ ID NO: 864739 - RNA, 19 nt, Artificial Sequence
  Description of Artificial Sequence: Synthetic oligonucleotide
ucaugaauugcccuuaaga

SEQ ID NO: 864740 - RNA, 19 nt, Artificial Sequence
  Description of Artificial Sequence: Synthetic oligonucleotide
aaugaugcaacucuuuaaa

SEQ ID NO: 864741 - RNA, 19 nt, Artificial Sequence
  Description of Artificial Sequence: Synthetic oligonucleotide
aaguguaacuuacaggcug

SEQ ID NO: 864742 - RNA, 19 nt, Artificial Sequence
  Description of Artificial Sequence: Synthetic oligonucleotide
aaguaaugaaggcacaacu

SEQ ID NO: 864743 - RNA, 19 nt, Artificial Sequence
  Description of Artificial Sequence: Synthetic oligonucleotide
gaaaacgcuuaucauagag

SEQ ID NO: 864744 - RNA, 19 nt, Artificial Sequence
  Description of Artificial Sequence: Synthetic oligonucleotide
uauaguauuacauuuuauu

SEQ ID NO: 864745 - RNA, 19 nt, Artificial Sequence
  Description of Artificial Sequence: Synthetic oligonucleotide
cugaaaacgcuuaucauag

SEQ ID NO: 864746 - RNA, 19 nt, Artificial Sequence
  Description of Artificial Sequence: Synthetic oligonucleotide
aacucuuuaaaauacugua

SEQ ID NO: 864747 - RNA, 19 nt, Artificial Sequence
  Description of Artificial Sequence: Synthetic oligonucleotide
auuucugagugccugcacc

SEQ ID NO: 864748 - RNA, 19 nt, Artificial Sequence
  Description of Artificial Sequence: Synthetic oligonucleotide
uacaauaaggaguaguagu

SEQ ID NO: 864749 - RNA, 19 nt, Artificial Sequence
  Description of Artificial Sequence: Synthetic oligonucleotide
agguuuucccuuucgagcc

SEQ ID NO: 864750 - RNA, 19 nt, Artificial Sequence
  Description of Artificial Sequence: Synthetic oligonucleotide
ugacaauuugcacagguac

SEQ ID NO: 864751 - RNA, 19 nt, Artificial Sequence
  Description of Artificial Sequence: Synthetic oligonucleotide
uuaacagcacuuuacauau

SEQ ID NO: 864752 - RNA, 19 nt, Artificial Sequence
  Description of Artificial Sequence: Synthetic oligonucleotide
aguauuacauuuuauuuaa

SEQ ID NO: 864753 - RNA, 19 nt, Artificial Sequence
  Description of Artificial Sequence: Synthetic oligonucleotide
aacacuguagcaccaaaca

SEQ ID NO: 864754 - RNA, 19 nt, Artificial Sequence
  Description of Artificial Sequence: Synthetic oligonucleotide
ucuuuaaaauacuguauca

SEQ ID NO: 864755 - RNA, 19 nt, Artificial Sequence
  Description of Artificial Sequence: Synthetic oligonucleotide
aacuagugcaagcagauuu

SEQ ID NO: 864756 - RNA, 19 nt, Artificial Sequence
  Description of Artificial Sequence: Synthetic oligonucleotide
auuaggaaccaaucuuggc

SEQ ID NO: 864757 - RNA, 19 nt, Artificial Sequence
  Description of Artificial Sequence: Synthetic oligonucleotide
uaguguucagguuauagga

SEQ ID NO: 864758 - RNA, 19 nt, Artificial Sequence
  Description of Artificial Sequence: Synthetic oligonucleotide
aaguaauagauugauuuca

SEQ ID NO: 864759 - RNA, 19 nt, Artificial Sequence
  Description of Artificial Sequence: Synthetic oligonucleotide
acuguaacaucuuuuccuc

SEQ ID NO: 864760 - RNA, 19 nt, Artificial Sequence
  Description of Artificial Sequence: Synthetic oligonucleotide
ugacauaaggacuucacaa

SEQ ID NO: 864761 - RNA, 19 nt, Artificial Sequence
  Description of Artificial Sequence: Synthetic oligonucleotide
uuaacaugcccucuuucag

SEQ ID NO: 864762 - RNA, 19 nt, Artificial Sequence
  Description of Artificial Sequence: Synthetic oligonucleotide
aacaccuuaaauaauacuu

SEQ ID NO: 864763 - RNA, 19 nt, Artificial Sequence
  Description of Artificial Sequence: Synthetic oligonucleotide
uuuaaguccuuaaucuucu

SEQ ID NO: 864764 - RNA, 19 nt, Artificial Sequence
  Description of Artificial Sequence: Synthetic oligonucleotide
ucugaaaacgcuuaucaua

SEQ ID NO: 864765 - RNA, 19 nt, Artificial Sequence
  Description of Artificial Sequence: Synthetic oligonucleotide
aaucuaauaggaacaugac

SEQ ID NO: 864766 - RNA, 19 nt, Artificial Sequence
  Description of Artificial Sequence: Synthetic oligonucleotide
uuagguuuucccuuucgag

SEQ ID NO: 864767 - RNA, 19 nt, Artificial Sequence
  Description of Artificial Sequence: Synthetic oligonucleotide
ucugguuuugaccuuauua

SEQ ID NO: 864768 - RNA, 19 nt, Artificial Sequence
  Description of Artificial Sequence: Synthetic oligonucleotide
cauuuaugaucugaaaacg

SEQ ID NO: 864769 - RNA, 19 nt, Artificial Sequence
  Description of Artificial Sequence: Synthetic oligonucleotide
agucuaaugugguacugac

SEQ ID NO: 864770 - RNA, 19 nt, Artificial Sequence
  Description of Artificial Sequence: Synthetic oligonucleotide
guaguguucagguuauagg

SEQ ID NO: 864771 - RNA, 19 nt, Artificial Sequence
  Description of Artificial Sequence: Synthetic oligonucleotide
aaaagucuaaugugguacu

SEQ ID NO: 864772 - RNA, 19 nt, Artificial Sequence
  Description of Artificial Sequence: Synthetic oligonucleotide
auuaacagcacuuuacaua

SEQ ID NO: 864773 - RNA, 19 nt, Artificial Sequence
  Description of Artificial Sequence: Synthetic oligonucleotide
gauuugucuaacaagucug

SEQ ID NO: 864774 - RNA, 19 nt, Artificial Sequence
  Description of Artificial Sequence: Synthetic oligonucleotide
agauuugucuaacaagucu

SEQ ID NO: 864775 - RNA, 19 nt, Artificial Sequence
  Description of Artificial Sequence: Synthetic oligonucleotide
uaguauuacauuuuauuua

SEQ ID NO: 864776 - RNA, 19 nt, Artificial Sequence
  Description of Artificial Sequence: Synthetic oligonucleotide
augaaggcacaacuagugc

SEQ ID NO: 864777 - RNA, 19 nt, Artificial Sequence
  Description of Artificial Sequence: Synthetic oligonucleotide
gaaggaugcauuaggaacc

SEQ ID NO: 864778 - RNA, 19 nt, Artificial Sequence
  Description of Artificial Sequence: Synthetic oligonucleotide
aguaguaguguucagguua

SEQ ID NO: 864779 - RNA, 19 nt, Artificial Sequence
  Description of Artificial Sequence: Synthetic oligonucleotide
ugaaggcacaacuagugca

SEQ ID NO: 864780 - RNA, 19 nt, Artificial Sequence
  Description of Artificial Sequence: Synthetic oligonucleotide
aauaaggaguaguaguguu

SEQ ID NO: 864781 - RNA, 19 nt, Artificial Sequence
  Description of Artificial Sequence: Synthetic oligonucleotide
aagaaagggucauagugau

SEQ ID NO: 864782 - RNA, 19 nt, Artificial Sequence
  Description of Artificial Sequence: Synthetic oligonucleotide
uauuauguaugucuucauc

SEQ ID NO: 864783 - RNA, 19 nt, Artificial Sequence
  Description of Artificial Sequence: Synthetic oligonucleotide
uuugagccucucuuaaggg

SEQ ID NO: 864784 - RNA, 19 nt, Artificial Sequence
  Description of Artificial Sequence: Synthetic oligonucleotide
uccguaaucccugacauca

SEQ ID NO: 864785 - RNA, 19 nt, Artificial Sequence
  Description of Artificial Sequence: Synthetic oligonucleotide
uaacaugcccucuuucagg

SEQ ID NO: 864786 - RNA, 19 nt, Artificial Sequence
  Description of Artificial Sequence: Synthetic oligonucleotide
uucuuuacgggcuucuucu

SEQ ID NO: 864787 - RNA, 19 nt, Artificial Sequence
  Description of Artificial Sequence: Synthetic oligonucleotide
aauaggaacaugacauaag

SEQ ID NO: 864788 - RNA, 19 nt, Artificial Sequence
  Description of Artificial Sequence: Synthetic oligonucleotide
caaucaaaggaaucucagg

SEQ ID NO: 864789 - RNA, 19 nt, Artificial Sequence
  Description of Artificial Sequence: Synthetic oligonucleotide
ugaugcaacucuuuaaaau

SEQ ID NO: 864790 - RNA, 19 nt, Artificial Sequence
  Description of Artificial Sequence: Synthetic oligonucleotide
ucuauuuugcagccuuugc

SEQ ID NO: 864791 - RNA, 19 nt, Artificial Sequence
  Description of Artificial Sequence: Synthetic oligonucleotide
caaaagucuaaugugguac

SEQ ID NO: 864792 - RNA, 19 nt, Artificial Sequence
  Description of Artificial Sequence: Synthetic oligonucleotide
aauguuuuaguuagcauua

SEQ ID NO: 864793 - RNA, 19 nt, Artificial Sequence
  Description of Artificial Sequence: Synthetic oligonucleotide
aucuaauaggaacaugaca

SEQ ID NO: 864794 - RNA, 19 nt, Artificial Sequence
  Description of Artificial Sequence: Synthetic oligonucleotide
gaugcaacucuuuaaaaua

SEQ ID NO: 864795 - RNA, 19 nt, Artificial Sequence
  Description of Artificial Sequence: Synthetic oligonucleotide
uuuacgggcuucuucuucc

SEQ ID NO: 864796 - RNA, 19 nt, Artificial Sequence
  Description of Artificial Sequence: Synthetic oligonucleotide
uuacaauaaggaguaguag

SEQ ID NO: 864797 - RNA, 19 nt, Artificial Sequence
  Description of Artificial Sequence: Synthetic oligonucleotide
acucuucaauuucccaucc

SEQ ID NO: 864798 - RNA, 19 nt, Artificial Sequence
  Description of Artificial Sequence: Synthetic oligonucleotide
acauuaacagcacuuuaca

SEQ ID NO: 864799 - RNA, 19 nt, Artificial Sequence
  Description of Artificial Sequence: Synthetic oligonucleotide
uugucuaacaagucugaca

SEQ ID NO: 864800 - RNA, 19 nt, Artificial Sequence
  Description of Artificial Sequence: Synthetic oligonucleotide
gacauuaucaugcaaaauu

SEQ ID NO: 864801 - RNA, 19 nt, Artificial Sequence
  Description of Artificial Sequence: Synthetic oligonucleotide
ucuauggcaaaguaaugaa

SEQ ID NO: 864802 - RNA, 19 nt, Artificial Sequence
  Description of Artificial Sequence: Synthetic oligonucleotide
uccucacccucuaagggcg

SEQ ID NO: 864803 - RNA, 19 nt, Artificial Sequence
  Description of Artificial Sequence: Synthetic oligonucleotide
cagauuuaaguccuuaauc

SEQ ID NO: 864804 - RNA, 19 nt, Artificial Sequence
  Description of Artificial Sequence: Synthetic oligonucleotide
ucaauuucccauccccaag

SEQ ID NO: 864805 - RNA, 19 nt, Artificial Sequence
  Description of Artificial Sequence: Synthetic oligonucleotide
caucacauaaacaaaccca

SEQ ID NO: 864806 - RNA, 19 nt, Artificial Sequence
  Description of Artificial Sequence: Synthetic oligonucleotide
cuucaggcuaacaucagac

SEQ ID NO: 864807 - RNA, 19 nt, Artificial Sequence
  Description of Artificial Sequence: Synthetic oligonucleotide
uauagaccaguacaucaca

SEQ ID NO: 864808 - RNA, 19 nt, Artificial Sequence
  Description of Artificial Sequence: Synthetic oligonucleotide
uuugcgucagggaacuuca

SEQ ID NO: 864809 - RNA, 19 nt, Artificial Sequence
  Description of Artificial Sequence: Synthetic oligonucleotide
agcaaagaaagggucauag

SEQ ID NO: 864810 - RNA, 19 nt, Artificial Sequence
  Description of Artificial Sequence: Synthetic oligonucleotide
acaauagaauguuuuaguu

SEQ ID NO: 864811 - RNA, 19 nt, Artificial Sequence
  Description of Artificial Sequence: Synthetic oligonucleotide
auuugaccaauuucaaagu

SEQ ID NO: 864812 - RNA, 19 nt, Artificial Sequence
  Description of Artificial Sequence: Synthetic oligonucleotide
gcauuuaugaucugaaaac

SEQ ID NO: 864813 - RNA, 19 nt, Artificial Sequence
  Description of Artificial Sequence: Synthetic oligonucleotide
ugugaaguaauagauugau

SEQ ID NO: 864814 - RNA, 19 nt, Artificial Sequence
  Description of Artificial Sequence: Synthetic oligonucleotide
ugcccuuaagaacaaggug

SEQ ID NO: 864815 - RNA, 19 nt, Artificial Sequence
  Description of Artificial Sequence: Synthetic oligonucleotide
auagagaggcuuauucagc

SEQ ID NO: 864816 - RNA, 19 nt, Artificial Sequence
  Description of Artificial Sequence: Synthetic oligonucleotide
auauacauuggcauuuaag

SEQ ID NO: 864817 - RNA, 19 nt, Artificial Sequence
  Description of Artificial Sequence: Synthetic oligonucleotide
uuuggaacauuaacagcac

SEQ ID NO: 864818 - RNA, 19 nt, Artificial Sequence
  Description of Artificial Sequence: Synthetic oligonucleotide
uaaaacagucagccaguag

SEQ ID NO: 864819 - RNA, 19 nt, Artificial Sequence
  Description of Artificial Sequence: Synthetic oligonucleotide
ucacuguaacaucuuuucc

SEQ ID NO: 864820 - RNA, 19 nt, Artificial Sequence
  Description of Artificial Sequence: Synthetic oligonucleotide
uuauaguauuacauuuuau

SEQ ID NO: 864821 - RNA, 19 nt, Artificial Sequence
  Description of Artificial Sequence: Synthetic oligonucleotide
uggaacauuaacagcacuu

SEQ ID NO: 864822 - RNA, 19 nt, Artificial Sequence
  Description of Artificial Sequence: Synthetic oligonucleotide
caugaauugcccuuaagaa

SEQ ID NO: 864823 - RNA, 19 nt, Artificial Sequence
  Description of Artificial Sequence: Synthetic oligonucleotide
aaaacgcuuaucauagaga

SEQ ID NO: 864824 - RNA, 19 nt, Artificial Sequence
  Description of Artificial Sequence: Synthetic oligonucleotide
uaauaggaacaugacauaa

SEQ ID NO: 864825 - RNA, 19 nt, Artificial Sequence
  Description of Artificial Sequence: Synthetic oligonucleotide
agaccaguacaucacauaa

SEQ ID NO: 864826 - RNA, 19 nt, Artificial Sequence
  Description of Artificial Sequence: Synthetic oligonucleotide
uaggaacaugacauaagga

SEQ ID NO: 864827 - RNA, 19 nt, Artificial Sequence
  Description of Artificial Sequence: Synthetic oligonucleotide
gaauguuuuaguuagcauu

SEQ ID NO: 864828 - RNA, 19 nt, Artificial Sequence
  Description of Artificial Sequence: Synthetic oligonucleotide
aguaguguucagguuauag

SEQ ID NO: 864829 - RNA, 19 nt, Artificial Sequence
  Description of Artificial Sequence: Synthetic oligonucleotide
ucaaguuuugcgucaggga

SEQ ID NO: 864830 - RNA, 19 nt, Artificial Sequence
  Description of Artificial Sequence: Synthetic oligonucleotide
uaacaccuuaaauaauacu

SEQ ID NO: 864831 - RNA, 19 nt, Artificial Sequence
  Description of Artificial Sequence: Synthetic oligonucleotide
ucugaaguauggguuaggc

SEQ ID NO: 864832 - RNA, 19 nt, Artificial Sequence
  Description of Artificial Sequence: Synthetic oligonucleotide
ccugugaaguaauagauug

SEQ ID NO: 864833 - RNA, 19 nt, Artificial Sequence
  Description of Artificial Sequence: Synthetic oligonucleotide
uuaaggggagcccuuggcu

SEQ ID NO: 864834 - RNA, 19 nt, Artificial Sequence
  Description of Artificial Sequence: Synthetic oligonucleotide
uuggcuggacuucaauugc

SEQ ID NO: 864835 - RNA, 19 nt, Artificial Sequence
  Description of Artificial Sequence: Synthetic oligonucleotide
uucacaauagaauguuuua

SEQ ID NO: 864836 - RNA, 19 nt, Artificial Sequence
  Description of Artificial Sequence: Synthetic oligonucleotide
cuuauuauguaugucuuca

SEQ ID NO: 864837 - RNA, 19 nt, Artificial Sequence
  Description of Artificial Sequence: Synthetic oligonucleotide
uucacuuguaguacuuccu

SEQ ID NO: 864838 - RNA, 19 nt, Artificial Sequence
  Description of Artificial Sequence: Synthetic oligonucleotide
aaaaugggcucaucauacu

SEQ ID NO: 864839 - RNA, 19 nt, Artificial Sequence
  Description of Artificial Sequence: Synthetic oligonucleotide
ucuuaaggggagcccuugg

SEQ ID NO: 864840 - RNA, 19 nt, Artificial Sequence
  Description of Artificial Sequence: Synthetic oligonucleotide
cuuucgagcccuuuuaaca

SEQ ID NO: 864841 - RNA, 19 nt, Artificial Sequence
  Description of Artificial Sequence: Synthetic oligonucleotide
uugcccuuaagaacaaggu

SEQ ID NO: 864842 - RNA, 19 nt, Artificial Sequence
  Description of Artificial Sequence: Synthetic oligonucleotide
guacaucacauaaacaaac

SEQ ID NO: 864843 - RNA, 19 nt, Artificial Sequence
  Description of Artificial Sequence: Synthetic oligonucleotide
agggaucauugauuucucc

SEQ ID NO: 864844 - RNA, 19 nt, Artificial Sequence
  Description of Artificial Sequence: Synthetic oligonucleotide
uuagcauuauuacuacauu

SEQ ID NO: 864845 - RNA, 19 nt, Artificial Sequence
  Description of Artificial Sequence: Synthetic oligonucleotide
uccuguuuccguaaucccu

SEQ ID NO: 864846 - RNA, 19 nt, Artificial Sequence
  Description of Artificial Sequence: Synthetic oligonucleotide
uuuaggaucuucucucuua

SEQ ID NO: 864847 - RNA, 19 nt, Artificial Sequence
  Description of Artificial Sequence: Synthetic oligonucleotide
uggcauuuaaguuuugcuu

SEQ ID NO: 864848 - RNA, 19 nt, Artificial Sequence
  Description of Artificial Sequence: Synthetic oligonucleotide
aagcaacuacauuucacaa

SEQ ID NO: 864849 - RNA, 19 nt, Artificial Sequence
  Description of Artificial Sequence: Synthetic oligonucleotide
aauugaagaaggaugcauu

SEQ ID NO: 864850 - RNA, 19 nt, Artificial Sequence
  Description of Artificial Sequence: Synthetic oligonucleotide
ucaaggauagcaucuucuc

SEQ ID NO: 864851 - RNA, 19 nt, Artificial Sequence
  Description of Artificial Sequence: Synthetic oligonucleotide
uucaggcaaagauuugucu

SEQ ID NO: 864852 - RNA, 19 nt, Artificial Sequence
  Description of Artificial Sequence: Synthetic oligonucleotide
gaugcauuaggaaccaauc

SEQ ID NO: 864853 - RNA, 19 nt, Artificial Sequence
  Description of Artificial Sequence: Synthetic oligonucleotide
augacauaaggacuucaca

SEQ ID NO: 864854 - RNA, 19 nt, Artificial Sequence
  Description of Artificial Sequence: Synthetic oligonucleotide
aaggucaugaauugcccuu

SEQ ID NO: 864855 - RNA, 19 nt, Artificial Sequence
  Description of Artificial Sequence: Synthetic oligonucleotide
gacauaaggacuucacaaa

SEQ ID NO: 864856 - RNA, 19 nt, Artificial Sequence
  Description of Artificial Sequence: Synthetic oligonucleotide
uuucaggcaaagauuuguc

SEQ ID NO: 864857 - RNA, 19 nt, Artificial Sequence
  Description of Artificial Sequence: Synthetic oligonucleotide
augacauuaucaugcaaaa

SEQ ID NO: 864858 - RNA, 19 nt, Artificial Sequence
  Description of Artificial Sequence: Synthetic oligonucleotide
uuaggcaggaaaugaaauu

SEQ ID NO: 864859 - RNA, 19 nt, Artificial Sequence
  Description of Artificial Sequence: Synthetic oligonucleotide
ugauuucaagaugacauua

SEQ ID NO: 864860 - RNA, 19 nt, Artificial Sequence
  Description of Artificial Sequence: Synthetic oligonucleotide
uuucgagcccuuuuaacau

SEQ ID NO: 864861 - RNA, 19 nt, Artificial Sequence
  Description of Artificial Sequence: Synthetic oligonucleotide
ucgagcccuuuuaacaugc

SEQ ID NO: 864862 - RNA, 19 nt, Artificial Sequence
  Description of Artificial Sequence: Synthetic oligonucleotide
uucaauuucccauccccaa

SEQ ID NO: 864863 - RNA, 19 nt, Artificial Sequence
  Description of Artificial Sequence: Synthetic oligonucleotide
aggcacaacuagugcaagc

SEQ ID NO: 864864 - RNA, 19 nt, Artificial Sequence
  Description of Artificial Sequence: Synthetic oligonucleotide
uuacuacauuucuauggca

SEQ ID NO: 864865 - RNA, 19 nt, Artificial Sequence
  Description of Artificial Sequence: Synthetic oligonucleotide
uaguagggaucauugauuu

SEQ ID NO: 864866 - RNA, 19 nt, Artificial Sequence
  Description of Artificial Sequence: Synthetic oligonucleotide
uuuugaccuuauuauguau

SEQ ID NO: 864867 - RNA, 19 nt, Artificial Sequence
  Description of Artificial Sequence: Synthetic oligonucleotide
uuaggugaaucuguuuuac

SEQ ID NO: 864868 - RNA, 19 nt, Artificial Sequence
  Description of Artificial Sequence: Synthetic oligonucleotide
acaaugaugcaacucuuua

SEQ ID NO: 864869 - RNA, 19 nt, Artificial Sequence
  Description of Artificial Sequence: Synthetic oligonucleotide
aguguaacuuacaggcugg

SEQ ID NO: 864870 - RNA, 19 nt, Artificial Sequence
  Description of Artificial Sequence: Synthetic oligonucleotide
aaacccacaaaagucuaau

SEQ ID NO: 864871 - RNA, 19 nt, Artificial Sequence
  Description of Artificial Sequence: Synthetic oligonucleotide
uucagguuauaggacaagu

SEQ ID NO: 864872 - RNA, 19 nt, Artificial Sequence
  Description of Artificial Sequence: Synthetic oligonucleotide
guacaaucuaauaggaaca

SEQ ID NO: 864873 - RNA, 19 nt, Artificial Sequence
  Description of Artificial Sequence: Synthetic oligonucleotide
ucagguuauaggacaaguu

SEQ ID NO: 864874 - RNA, 19 nt, Artificial Sequence
  Description of Artificial Sequence: Synthetic oligonucleotide
caccuugucguacucauuc

SEQ ID NO: 864875 - RNA, 19 nt, Artificial Sequence
  Description of Artificial Sequence: Synthetic oligonucleotide
aagucuaaugugguacuga

SEQ ID NO: 864876 - RNA, 19 nt, Artificial Sequence
  Description of Artificial Sequence: Synthetic oligonucleotide
acaagguuaggugaaucug

SEQ ID NO: 864877 - RNA, 19 nt, Artificial Sequence
  Description of Artificial Sequence: Synthetic oligonucleotide
cuuaaggggagcccuuggc

SEQ ID NO: 864878 - RNA, 19 nt, Artificial Sequence
  Description of Artificial Sequence: Synthetic oligonucleotide
acaucaugguaguagggau

SEQ ID NO: 864879 - RNA, 19 nt, Artificial Sequence
  Description of Artificial Sequence: Synthetic oligonucleotide
aguagggaucauugauuuc

SEQ ID NO: 864880 - RNA, 19 nt, Artificial Sequence
  Description of Artificial Sequence: Synthetic oligonucleotide
caaguuuugcgucagggaa

SEQ ID NO: 864881 - RNA, 19 nt, Artificial Sequence
  Description of Artificial Sequence: Synthetic oligonucleotide
gugcaagcagauuuaaguc

SEQ ID NO: 864882 - RNA, 19 nt, Artificial Sequence
  Description of Artificial Sequence: Synthetic oligonucleotide
agcaacuacauuucacaau

SEQ ID NO: 864883 - RNA, 19 nt, Artificial Sequence
  Description of Artificial Sequence: Synthetic oligonucleotide
cuguuuuacuucugcuugc

SEQ ID NO: 864884 - RNA, 19 nt, Artificial Sequence
  Description of Artificial Sequence: Synthetic oligonucleotide
uuggaacauuaacagcacu

SEQ ID NO: 864885 - RNA, 19 nt, Artificial Sequence
  Description of Artificial Sequence: Synthetic oligonucleotide
aguagucaggaauaccuuu

SEQ ID NO: 864886 - RNA, 19 nt, Artificial Sequence
  Description of Artificial Sequence: Synthetic oligonucleotide
caauagaauguuuuaguua

SEQ ID NO: 864887 - RNA, 19 nt, Artificial Sequence
  Description of Artificial Sequence: Synthetic oligonucleotide
uggguuaggcaggaaauga

SEQ ID NO: 864888 - RNA, 19 nt, Artificial Sequence
  Description of Artificial Sequence: Synthetic oligonucleotide
augguaguagggaucauug

SEQ ID NO: 864889 - RNA, 19 nt, Artificial Sequence
  Description of Artificial Sequence: Synthetic oligonucleotide
uccguaggcucauauucug

SEQ ID NO: 864890 - RNA, 19 nt, Artificial Sequence
  Description of Artificial Sequence: Synthetic oligonucleotide
uuauuauguaugucuucau

SEQ ID NO: 864891 - RNA, 19 nt, Artificial Sequence
  Description of Artificial Sequence: Synthetic oligonucleotide
aaaguguaacuuacaggcu

SEQ ID NO: 864892 - RNA, 19 nt, Artificial Sequence
  Description of Artificial Sequence: Synthetic oligonucleotide
caagucugacaauuugcac

SEQ ID NO: 864893 - RNA, 19 nt, Artificial Sequence
  Description of Artificial Sequence: Synthetic oligonucleotide
aucaugguaguagggauca

SEQ ID NO: 864894 - RNA, 19 nt, Artificial Sequence
  Description of Artificial Sequence: Synthetic oligonucleotide
aggauagcaucuucucuug

SEQ ID NO: 864895 - RNA, 19 nt, Artificial Sequence
  Description of Artificial Sequence: Synthetic oligonucleotide
ccgaguuccauucacauuc

SEQ ID NO: 864896 - RNA, 19 nt, Artificial Sequence
  Description of Artificial Sequence: Synthetic oligonucleotide
guuuccguaaucccugaca

SEQ ID NO: 864897 - RNA, 19 nt, Artificial Sequence
  Description of Artificial Sequence: Synthetic oligonucleotide
uguaacuuacaggcuggcc

SEQ ID NO: 864898 - RNA, 19 nt, Artificial Sequence
  Description of Artificial Sequence: Synthetic oligonucleotide
cuaagggcggcauuucauc

SEQ ID NO: 864899 - RNA, 19 nt, Artificial Sequence
  Description of Artificial Sequence: Synthetic oligonucleotide
acaauuugcacagguacaa

SEQ ID NO: 864900 - RNA, 19 nt, Artificial Sequence
  Description of Artificial Sequence: Synthetic oligonucleotide
aaagggucauagugaucug

SEQ ID NO: 864901 - RNA, 19 nt, Artificial Sequence
  Description of Artificial Sequence: Synthetic oligonucleotide
agauugauuucaagaugac

SEQ ID NO: 864902 - RNA, 19 nt, Artificial Sequence
  Description of Artificial Sequence: Synthetic oligonucleotide
acuucaggcuaacaucaga

SEQ ID NO: 864903 - RNA, 19 nt, Artificial Sequence
  Description of Artificial Sequence: Synthetic oligonucleotide
auacuguaucauauuuaac

SEQ ID NO: 864904 - RNA, 19 nt, Artificial Sequence
  Description of Artificial Sequence: Synthetic oligonucleotide
agggcggcauuucaucagg

SEQ ID NO: 864905 - RNA, 19 nt, Artificial Sequence
  Description of Artificial Sequence: Synthetic oligonucleotide
gacaauuugcacagguaca

SEQ ID NO: 864906 - RNA, 19 nt, Artificial Sequence
  Description of Artificial Sequence: Synthetic oligonucleotide
ggugaaucuguuuuacuuc

SEQ ID NO: 864907 - RNA, 19 nt, Artificial Sequence
  Description of Artificial Sequence: Synthetic oligonucleotide
cuucccaaucaaaggaauc

SEQ ID NO: 864908 - RNA, 19 nt, Artificial Sequence
  Description of Artificial Sequence: Synthetic oligonucleotide
agcagauuuaaguccuuaa

SEQ ID NO: 864909 - RNA, 19 nt, Artificial Sequence
  Description of Artificial Sequence: Synthetic oligonucleotide
gcaacuacauuucacaaua

SEQ ID NO: 864910 - RNA, 19 nt, Artificial Sequence
  Description of Artificial Sequence: Synthetic oligonucleotide
caucaugguaguagggauc

SEQ ID NO: 864911 - RNA, 19 nt, Artificial Sequence
  Description of Artificial Sequence: Synthetic oligonucleotide
uucgagcccuuuuaacaug

SEQ ID NO: 864912 - RNA, 19 nt, Artificial Sequence
  Description of Artificial Sequence: Synthetic oligonucleotide
uccugugaaguaauagauu

SEQ ID NO: 864913 - RNA, 19 nt, Artificial Sequence
  Description of Artificial Sequence: Synthetic oligonucleotide
uuucaccucaggacuuucu

SEQ ID NO: 864914 - RNA, 19 nt, Artificial Sequence
  Description of Artificial Sequence: Synthetic oligonucleotide
cacaacuagugcaagcaga

SEQ ID NO: 864915 - RNA, 19 nt, Artificial Sequence
  Description of Artificial Sequence: Synthetic oligonucleotide
uggccaggaguugagaacu

SEQ ID NO: 864916 - RNA, 19 nt, Artificial Sequence
  Description of Artificial Sequence: Synthetic oligonucleotide
uuuuggaucauaggcccaa

SEQ ID NO: 864917 - RNA, 19 nt, Artificial Sequence
  Description of Artificial Sequence: Synthetic oligonucleotide
uugucguacucauucugaa

SEQ ID NO: 864918 - RNA, 19 nt, Artificial Sequence
  Description of Artificial Sequence: Synthetic oligonucleotide
cuugucguacucauucuga

SEQ ID NO: 864919 - RNA, 19 nt, Artificial Sequence
  Description of Artificial Sequence: Synthetic oligonucleotide
guagggaucauugauuucu

SEQ ID NO: 864920 - RNA, 19 nt, Artificial Sequence
  Description of Artificial Sequence: Synthetic oligonucleotide
cauuauuacuacauuucua

SEQ ID NO: 864921 - RNA, 19 nt, Artificial Sequence
  Description of Artificial Sequence: Synthetic oligonucleotide
augaugcaacucuuuaaaa

SEQ ID NO: 864922 - RNA, 19 nt, Artificial Sequence
  Description of Artificial Sequence: Synthetic oligonucleotide
cauaggcccaagcuuauca

SEQ ID NO: 864923 - RNA, 19 nt, Artificial Sequence
  Description of Artificial Sequence: Synthetic oligonucleotide
aaggaugcauuaggaacca

SEQ ID NO: 864924 - RNA, 19 nt, Artificial Sequence
  Description of Artificial Sequence: Synthetic oligonucleotide
caacuacauuucacaauag

SEQ ID NO: 864925 - RNA, 19 nt, Artificial Sequence
  Description of Artificial Sequence: Synthetic oligonucleotide
aguaaugaaggcacaacua

SEQ ID NO: 864926 - RNA, 19 nt, Artificial Sequence
  Description of Artificial Sequence: Synthetic oligonucleotide
cuucaauuucccaucccca

SEQ ID NO: 864927 - RNA, 19 nt, Artificial Sequence
  Description of Artificial Sequence: Synthetic oligonucleotide
ugguaguagggaucauuga

SEQ ID NO: 864928 - RNA, 19 nt, Artificial Sequence
  Description of Artificial Sequence: Synthetic oligonucleotide
guauggguuaggcaggaaa

SEQ ID NO: 864929 - RNA, 19 nt, Artificial Sequence
  Description of Artificial Sequence: Synthetic oligonucleotide
aguaauagauugauuucaa

SEQ ID NO: 864930 - RNA, 19 nt, Artificial Sequence
  Description of Artificial Sequence: Synthetic oligonucleotide
aguuuugcgucagggaacu

SEQ ID NO: 864931 - RNA, 19 nt, Artificial Sequence
  Description of Artificial Sequence: Synthetic oligonucleotide
aacaagguguccaccuugu

SEQ ID NO: 864932 - RNA, 19 nt, Artificial Sequence
  Description of Artificial Sequence: Synthetic oligonucleotide
ugaaaacgcuuaucauaga

SEQ ID NO: 864933 - RNA, 19 nt, Artificial Sequence
  Description of Artificial Sequence: Synthetic oligonucleotide
uucugaaguauggguuagg

SEQ ID NO: 864934 - RNA, 19 nt, Artificial Sequence
  Description of Artificial Sequence: Synthetic oligonucleotide
ugugguacugacagauauu

SEQ ID NO: 864935 - RNA, 19 nt, Artificial Sequence
  Description of Artificial Sequence: Synthetic oligonucleotide
uagaccaguacaucacaua

SEQ ID NO: 864936 - RNA, 19 nt, Artificial Sequence
  Description of Artificial Sequence: Synthetic oligonucleotide
aaggcacaacuagugcaag

SEQ ID NO: 864937 - RNA, 19 nt, Artificial Sequence
  Description of Artificial Sequence: Synthetic oligonucleotide
gaucauugauuucuccugu

SEQ ID NO: 864938 - RNA, 19 nt, Artificial Sequence
  Description of Artificial Sequence: Synthetic oligonucleotide
gcuuggggaacuucuuugg

SEQ ID NO: 864939 - RNA, 19 nt, Artificial Sequence
  Description of Artificial Sequence: Synthetic oligonucleotide
uccuccgaguuccauucac

SEQ ID NO: 864940 - RNA, 19 nt, Artificial Sequence
  Description of Artificial Sequence: Synthetic oligonucleotide
uccgcauauuuccuuucaa

SEQ ID NO: 864941 - RNA, 19 nt, Artificial Sequence
  Description of Artificial Sequence: Synthetic oligonucleotide
gucaugaauugcccuuaag

SEQ ID NO: 864942 - RNA, 19 nt, Artificial Sequence
  Description of Artificial Sequence: Synthetic oligonucleotide
ugucguacucauucugaau

SEQ ID NO: 864943 - RNA, 19 nt, Artificial Sequence
  Description of Artificial Sequence: Synthetic oligonucleotide
agguuauaggacaaguuuu

SEQ ID NO: 864944 - RNA, 19 nt, Artificial Sequence
  Description of Artificial Sequence: Synthetic oligonucleotide
acaacuagugcaagcagau

SEQ ID NO: 864945 - RNA, 19 nt, Artificial Sequence
  Description of Artificial Sequence: Synthetic oligonucleotide
cuuuacgggcuucuucuuc

SEQ ID NO: 864946 - RNA, 19 nt, Artificial Sequence
  Description of Artificial Sequence: Synthetic oligonucleotide
uucugagugccugcacccg

SEQ ID NO: 864947 - RNA, 19 nt, Artificial Sequence
  Description of Artificial Sequence: Synthetic oligonucleotide
aacuuacaggcuggccagg

SEQ ID NO: 864948 - RNA, 19 nt, Artificial Sequence
  Description of Artificial Sequence: Synthetic oligonucleotide
cauugauuucuccugugaa

SEQ ID NO: 864949 - RNA, 19 nt, Artificial Sequence
  Description of Artificial Sequence: Synthetic oligonucleotide
aaguauggguuaggcagga

SEQ ID NO: 864950 - RNA, 19 nt, Artificial Sequence
  Description of Artificial Sequence: Synthetic oligonucleotide
cagccucuucuuuacgggc

SEQ ID NO: 864951 - RNA, 19 nt, Artificial Sequence
  Description of Artificial Sequence: Synthetic oligonucleotide
uguuuccguaaucccugac

SEQ ID NO: 864952 - RNA, 19 nt, Artificial Sequence
  Description of Artificial Sequence: Synthetic oligonucleotide
ugauuucuccugugaagua

SEQ ID NO: 864953 - RNA, 19 nt, Artificial Sequence
  Description of Artificial Sequence: Synthetic oligonucleotide
caccuucaaguuuugcguc

SEQ ID NO: 864954 - RNA, 19 nt, Artificial Sequence
  Description of Artificial Sequence: Synthetic oligonucleotide
cugaaguauggguuaggca

SEQ ID NO: 864955 - RNA, 19 nt, Artificial Sequence
  Description of Artificial Sequence: Synthetic oligonucleotide
ugacauuaucaugcaaaau

SEQ ID NO: 864956 - RNA, 19 nt, Artificial Sequence
  Description of Artificial Sequence: Synthetic oligonucleotide
agaugacauuaucaugcaa

SEQ ID NO: 864957 - RNA, 19 nt, Artificial Sequence
  Description of Artificial Sequence: Synthetic oligonucleotide
guuaggugaaucuguuuua

SEQ ID NO: 864958 - RNA, 19 nt, Artificial Sequence
  Description of Artificial Sequence: Synthetic oligonucleotide
auggguuaggcaggaaaug

SEQ ID NO: 864959 - RNA, 19 nt, Artificial Sequence
  Description of Artificial Sequence: Synthetic oligonucleotide
cugugaaguaauagauuga

SEQ ID NO: 864960 - RNA, 19 nt, Artificial Sequence
  Description of Artificial Sequence: Synthetic oligonucleotide
ucccuuucgagcccuuuua

SEQ ID NO: 864961 - RNA, 19 nt, Artificial Sequence
  Description of Artificial Sequence: Synthetic oligonucleotide
aacaugcuuuggaacauua

SEQ ID NO: 864962 - RNA, 19 nt, Artificial Sequence
  Description of Artificial Sequence: Synthetic oligonucleotide
ucauagugaucugguuuug

SEQ ID NO: 864963 - RNA, 19 nt, Artificial Sequence
  Description of Artificial Sequence: Synthetic oligonucleotide
agccaguagucaggaauac

SEQ ID NO: 864964 - RNA, 19 nt, Artificial Sequence
  Description of Artificial Sequence: Synthetic oligonucleotide
uuaaucuucugggcugaaa

SEQ ID NO: 864965 - RNA, 19 nt, Artificial Sequence
  Description of Artificial Sequence: Synthetic oligonucleotide
ugaccuuauuauguauguc

SEQ ID NO: 864966 - RNA, 19 nt, Artificial Sequence
  Description of Artificial Sequence: Synthetic oligonucleotide
aagguuaggugaaucuguu

SEQ ID NO: 864967 - RNA, 19 nt, Artificial Sequence
  Description of Artificial Sequence: Synthetic oligonucleotide
auauuacaauaaggaguag

SEQ ID NO: 864968 - RNA, 19 nt, Artificial Sequence
  Description of Artificial Sequence: Synthetic oligonucleotide
ucaccucaggacuuucuuu

SEQ ID NO: 864969 - RNA, 19 nt, Artificial Sequence
  Description of Artificial Sequence: Synthetic oligonucleotide
caagguuaggugaaucugu

SEQ ID NO: 864970 - RNA, 19 nt, Artificial Sequence
  Description of Artificial Sequence: Synthetic oligonucleotide
ccuccguaggcucauauuc

SEQ ID NO: 864971 - RNA, 19 nt, Artificial Sequence
  Description of Artificial Sequence: Synthetic oligonucleotide
guagcaccaaacaaaacau

SEQ ID NO: 864972 - RNA, 19 nt, Artificial Sequence
  Description of Artificial Sequence: Synthetic oligonucleotide
aaacaugcuuuggaacauu

SEQ ID NO: 864973 - RNA, 19 nt, Artificial Sequence
  Description of Artificial Sequence: Synthetic oligonucleotide
ccgcauauuuccuuucaag

SEQ ID NO: 864974 - RNA, 19 nt, Artificial Sequence
  Description of Artificial Sequence: Synthetic oligonucleotide
aaucuauuuugcagccuuu

SEQ ID NO: 864975 - RNA, 19 nt, Artificial Sequence
  Description of Artificial Sequence: Synthetic oligonucleotide
auagaccaguacaucacau

SEQ ID NO: 864976 - RNA, 19 nt, Artificial Sequence
  Description of Artificial Sequence: Synthetic oligonucleotide
cagguuauaggacaaguuu

SEQ ID NO: 864977 - RNA, 19 nt, Artificial Sequence
  Description of Artificial Sequence: Synthetic oligonucleotide
ggcacaacuagugcaagca

SEQ ID NO: 864978 - RNA, 19 nt, Artificial Sequence
  Description of Artificial Sequence: Synthetic oligonucleotide
gcauuauuacuacauuucu

SEQ ID NO: 864979 - RNA, 19 nt, Artificial Sequence
  Description of Artificial Sequence: Synthetic oligonucleotide
uuacgggcuucuucuuccu

SEQ ID NO: 864980 - RNA, 19 nt, Artificial Sequence
  Description of Artificial Sequence: Synthetic oligonucleotide
uccgaguuccauucacauu

SEQ ID NO: 864981 - RNA, 19 nt, Artificial Sequence
  Description of Artificial Sequence: Synthetic oligonucleotide
cuuuuggaucauaggccca

SEQ ID NO: 864982 - RNA, 19 nt, Artificial Sequence
  Description of Artificial Sequence: Synthetic oligonucleotide
guagucaggaauaccuuua

SEQ ID NO: 864983 - RNA, 19 nt, Artificial Sequence
  Description of Artificial Sequence: Synthetic oligonucleotide
aaugugguacugacagaua

SEQ ID NO: 864984 - RNA, 19 nt, Artificial Sequence
  Description of Artificial Sequence: Synthetic oligonucleotide
ucuuuacgggcuucuucuu

SEQ ID NO: 864985 - RNA, 19 nt, Artificial Sequence
  Description of Artificial Sequence: Synthetic oligonucleotide
ucaggccuugucucaggaa

SEQ ID NO: 864986 - RNA, 19 nt, Artificial Sequence
  Description of Artificial Sequence: Synthetic oligonucleotide
gggaucauugauuucuccu

SEQ ID NO: 864987 - RNA, 19 nt, Artificial Sequence
  Description of Artificial Sequence: Synthetic oligonucleotide
acaauacaaccaaaauaua

SEQ ID NO: 864988 - RNA, 19 nt, Artificial Sequence
  Description of Artificial Sequence: Synthetic oligonucleotide
ccaguagucaggaauaccu

SEQ ID NO: 864989 - RNA, 19 nt, Artificial Sequence
  Description of Artificial Sequence: Synthetic oligonucleotide
gaggcuuauucagcuccgc

SEQ ID NO: 864990 - RNA, 19 nt, Artificial Sequence
  Description of Artificial Sequence: Synthetic oligonucleotide
uuuucaccucaggacuuuc

SEQ ID NO: 864991 - RNA, 19 nt, Artificial Sequence
  Description of Artificial Sequence: Synthetic oligonucleotide
cccuuaagaacaagguguc

SEQ ID NO: 864992 - RNA, 19 nt, Artificial Sequence
  Description of Artificial Sequence: Synthetic oligonucleotide
agguacaaucuaauaggaa

SEQ ID NO: 864993 - RNA, 19 nt, Artificial Sequence
  Description of Artificial Sequence: Synthetic oligonucleotide
guuaggcaggaaaugaaau

SEQ ID NO: 864994 - RNA, 19 nt, Artificial Sequence
  Description of Artificial Sequence: Synthetic oligonucleotide
uccuccuccgaguuccauu

SEQ ID NO: 864995 - RNA, 19 nt, Artificial Sequence
  Description of Artificial Sequence: Synthetic oligonucleotide
agcuugcccuuuucacuug

SEQ ID NO: 864996 - RNA, 19 nt, Artificial Sequence
  Description of Artificial Sequence: Synthetic oligonucleotide
uccuccguaggcucauauu

SEQ ID NO: 864997 - RNA, 19 nt, Artificial Sequence
  Description of Artificial Sequence: Synthetic oligonucleotide
ccuuucgagcccuuuuaac

SEQ ID NO: 864998 - RNA, 19 nt, Artificial Sequence
  Description of Artificial Sequence: Synthetic oligonucleotide
acaaacccacaaaagucua

SEQ ID NO: 864999 - RNA, 19 nt, Artificial Sequence
  Description of Artificial Sequence: Synthetic oligonucleotide
aguuuucaccucaggacuu

SEQ ID NO: 865000 - RNA, 19 nt, Artificial Sequence
  Description of Artificial Sequence: Synthetic oligonucleotide
gucuaaugugguacugaca

SEQ ID NO: 865001 - RNA, 19 nt, Artificial Sequence
  Description of Artificial Sequence: Synthetic oligonucleotide
gguuuucccuuucgagccc

SEQ ID NO: 865002 - RNA, 19 nt, Artificial Sequence
  Description of Artificial Sequence: Synthetic oligonucleotide
ccuugucguacucauucug

SEQ ID NO: 865003 - RNA, 19 nt, Artificial Sequence
  Description of Artificial Sequence: Synthetic oligonucleotide
cucuaagggcggcauuuca

SEQ ID NO: 865004 - RNA, 19 nt, Artificial Sequence
  Description of Artificial Sequence: Synthetic oligonucleotide
ggcggcauuucaucaggug

SEQ ID NO: 865005 - RNA, 19 nt, Artificial Sequence
  Description of Artificial Sequence: Synthetic oligonucleotide
cccaaucaaaggaaucuca

SEQ ID NO: 865006 - RNA, 19 nt, Artificial Sequence
  Description of Artificial Sequence: Synthetic oligonucleotide
guaguagggaucauugauu

SEQ ID NO: 865007 - RNA, 19 nt, Artificial Sequence
  Description of Artificial Sequence: Synthetic oligonucleotide
caauaaggaguaguagugu

SEQ ID NO: 865008 - RNA, 19 nt, Artificial Sequence
  Description of Artificial Sequence: Synthetic oligonucleotide
caugcaaaauuugaccaau

SEQ ID NO: 865009 - RNA, 19 nt, Artificial Sequence
  Description of Artificial Sequence: Synthetic oligonucleotide
ccuccuccgaguuccauuc

SEQ ID NO: 865010 - RNA, 19 nt, Artificial Sequence
  Description of Artificial Sequence: Synthetic oligonucleotide
ucacccucuaagggcggca

SEQ ID NO: 865011 - RNA, 19 nt, Artificial Sequence
  Description of Artificial Sequence: Synthetic oligonucleotide
cucucuuagguuuucccuu

SEQ ID NO: 865012 - RNA, 19 nt, Artificial Sequence
  Description of Artificial Sequence: Synthetic oligonucleotide
gcccuuuuaacaugcccuc

SEQ ID NO: 865013 - RNA, 19 nt, Artificial Sequence
  Description of Artificial Sequence: Synthetic oligonucleotide
cggcauuucaucaggugug

SEQ ID NO: 865014 - RNA, 19 nt, Artificial Sequence
  Description of Artificial Sequence: Synthetic oligonucleotide
gaauugcccuuaagaacaa

SEQ ID NO: 865015 - RNA, 19 nt, Artificial Sequence
  Description of Artificial Sequence: Synthetic oligonucleotide
aggucaugaauugcccuua

SEQ ID NO: 865016 - RNA, 19 nt, Artificial Sequence
  Description of Artificial Sequence: Synthetic oligonucleotide
cuagugcaagcagauuuaa

SEQ ID NO: 865017 - RNA, 19 nt, Artificial Sequence
  Description of Artificial Sequence: Synthetic oligonucleotide
ggaucauaggcccaagcuu

SEQ ID NO: 865018 - RNA, 19 nt, Artificial Sequence
  Description of Artificial Sequence: Synthetic oligonucleotide
cuuuucacuuguaguacuu

SEQ ID NO: 865019 - RNA, 19 nt, Artificial Sequence
  Description of Artificial Sequence: Synthetic oligonucleotide
gcggcauuucaucaggugu

SEQ ID NO: 865020 - RNA, 19 nt, Artificial Sequence
  Description of Artificial Sequence: Synthetic oligonucleotide
ccguaggcucauauucugc

SEQ ID NO: 865021 - RNA, 19 nt, Artificial Sequence
  Description of Artificial Sequence: Synthetic oligonucleotide
ccuuaagaacaaggugucc

SEQ ID NO: 865022 - RNA, 19 nt, Artificial Sequence
  Description of Artificial Sequence: Synthetic oligonucleotide
gacccggggcgguugucac

SEQ ID NO: 865023 - RNA, 19 nt, Artificial Sequence
  Description of Artificial Sequence: Synthetic oligonucleotide
gggcgguugucacuguaac

SEQ ID NO: 865024 - RNA, 19 nt, Artificial Sequence
  Description of Artificial Sequence: Synthetic oligonucleotide
cuccguaggcucauauucu

SEQ ID NO: 865025 - RNA, 19 nt, Artificial Sequence
  Description of Artificial Sequence: Synthetic oligonucleotide
cucacccucuaagggcggc

SEQ ID NO: 865026 - RNA, 19 nt, Artificial Sequence
  Description of Artificial Sequence: Synthetic oligonucleotide
accaacacuguagcaccaa

SEQ ID NO: 865027 - RNA, 19 nt, Artificial Sequence
  Description of Artificial Sequence: Synthetic oligonucleotide
cuguuuccguaaucccuga

SEQ ID NO: 865028 - RNA, 19 nt, Artificial Sequence
  Description of Artificial Sequence: Synthetic oligonucleotide
cguaaucccugacaucaug

SEQ ID NO: 865029 - RNA, 19 nt, Artificial Sequence
  Description of Artificial Sequence: Synthetic oligonucleotide
gaguaguaguguucagguu

SEQ ID NO: 865030 - RNA, 19 nt, Artificial Sequence
  Description of Artificial Sequence: Synthetic oligonucleotide
ggcgguugucacuguaaca

SEQ ID NO: 865031 - RNA, 19 nt, Artificial Sequence
  Description of Artificial Sequence: Synthetic oligonucleotide
guaggcucauauucugcau

SEQ ID NO: 865032 - RNA, 19 nt, Artificial Sequence
  Description of Artificial Sequence: Synthetic oligonucleotide
cucucuuaaggggagcccu

SEQ ID NO: 865033 - RNA, 19 nt, Artificial Sequence
  Description of Artificial Sequence: Synthetic oligonucleotide
ggaacauuaacagcacuuu

SEQ ID NO: 865034 - RNA, 19 nt, Artificial Sequence
  Description of Artificial Sequence: Synthetic oligonucleotide
cguaggcucauauucugca

SEQ ID NO: 865035 - RNA, 19 nt, Artificial Sequence
  Description of Artificial Sequence: Synthetic oligonucleotide
cuccgaguuccauucacau

SEQ ID NO: 865036 - RNA, 19 nt, Artificial Sequence
  Description of Artificial Sequence: Synthetic oligonucleotide
ggaugcauuaggaaccaau

SEQ ID NO: 865037 - RNA, 19 nt, Artificial Sequence
  Description of Artificial Sequence: Synthetic oligonucleotide
ggaacauucuuuccuucuu

SEQ ID NO: 865038 - RNA, 19 nt, Artificial Sequence
  Description of Artificial Sequence: Synthetic oligonucleotide
gguguccaccuugucguac

SEQ ID NO: 865039 - RNA, 19 nt, Artificial Sequence
  Description of Artificial Sequence: Synthetic oligonucleotide
cagcuugcccuuuucacuu

SEQ ID NO: 865040 - RNA, 19 nt, Artificial Sequence
  Description of Artificial Sequence: Synthetic oligonucleotide
ggguuaggcaggaaaugaa

SEQ ID NO: 865041 - RNA, 19 nt, Artificial Sequence
  Description of Artificial Sequence: Synthetic oligonucleotide
ggcuggacuucaauugcuc

SEQ ID NO: 865042 - RNA, 19 nt, Artificial Sequence
  Description of Artificial Sequence: Synthetic oligonucleotide
ucaugguaguagggaucau

SEQ ID NO: 865043 - RNA, 19 nt, Artificial Sequence
  Description of Artificial Sequence: Synthetic oligonucleotide
aguauggguuaggcaggaa

SEQ ID NO: 865044 - RNA, 19 nt, Artificial Sequence
  Description of Artificial Sequence: Synthetic oligonucleotide
gcaccaaacaaaacaugcu

SEQ ID NO: 865045 - RNA, 19 nt, Artificial Sequence
  Description of Artificial Sequence: Synthetic oligonucleotide
ggucaugaauugcccuuaa

SEQ ID NO: 865046 - RNA, 19 nt, Artificial Sequence
  Description of Artificial Sequence: Synthetic oligonucleotide
ccucucuuaaggggagccc

SEQ ID NO: 865047 - RNA, 19 nt, Artificial Sequence
  Description of Artificial Sequence: Synthetic oligonucleotide
caucaccgcugaacuccuc

SEQ ID NO: 865048 - RNA, 19 nt, Artificial Sequence
  Description of Artificial Sequence: Synthetic oligonucleotide
uaguaguguucagguuaua

SEQ ID NO: 865049 - RNA, 19 nt, Artificial Sequence
  Description of Artificial Sequence: Synthetic oligonucleotide
gcuccgcauauuuccuuuc

SEQ ID NO: 865050 - RNA, 19 nt, Artificial Sequence
  Description of Artificial Sequence: Synthetic oligonucleotide
agguguccaccuugucgua

SEQ ID NO: 865051 - RNA, 19 nt, Artificial Sequence
  Description of Artificial Sequence: Synthetic oligonucleotide
ccaguagcagcugggcgac

SEQ ID NO: 865052 - RNA, 19 nt, Artificial Sequence
  Description of Artificial Sequence: Synthetic oligonucleotide
ccaagcuuaucaacauucu

SEQ ID NO: 865053 - RNA, 19 nt, Artificial Sequence
  Description of Artificial Sequence: Synthetic oligonucleotide
ccuccgaguuccauucaca

SEQ ID NO: 865054 - RNA, 19 nt, Artificial Sequence
  Description of Artificial Sequence: Synthetic oligonucleotide
aggaugcauuaggaaccaa

SEQ ID NO: 865055 - RNA, 19 nt, Artificial Sequence
  Description of Artificial Sequence: Synthetic oligonucleotide
ccuuaaucuucugggcuga

SEQ ID NO: 865056 - RNA, 19 nt, Artificial Sequence
  Description of Artificial Sequence: Synthetic oligonucleotide
ggacaaaguaaaacacaau

SEQ ID NO: 865057 - RNA, 19 nt, Artificial Sequence
  Description of Artificial Sequence: Synthetic oligonucleotide
guuuucaccucaggacuuu

SEQ ID NO: 865058 - RNA, 19 nt, Artificial Sequence
  Description of Artificial Sequence: Synthetic oligonucleotide
cuccuccgaguuccauuca

SEQ ID NO: 865059 - RNA, 19 nt, Artificial Sequence
  Description of Artificial Sequence: Synthetic oligonucleotide
ggcauuucaucaggugugu

SEQ ID NO: 865060 - RNA, 19 nt, Artificial Sequence
  Description of Artificial Sequence: Synthetic oligonucleotide
cgguugucacuguaacauc

SEQ ID NO: 865061 - RNA, 19 nt, Artificial Sequence
  Description of Artificial Sequence: Synthetic oligonucleotide
ggggcgguugucacuguaa

SEQ ID NO: 865062 - RNA, 19 nt, Artificial Sequence
  Description of Artificial Sequence: Synthetic oligonucleotide
ugggcgacccggggcgguu

SEQ ID NO: 865063 - RNA, 19 nt, Artificial Sequence
  Description of Artificial Sequence: Synthetic oligonucleotide
caacuagugcaagcagauu

SEQ ID NO: 865064 - RNA, 19 nt, Artificial Sequence
  Description of Artificial Sequence: Synthetic oligonucleotide
cacccucuaagggcggcau

SEQ ID NO: 865065 - RNA, 19 nt, Artificial Sequence
  Description of Artificial Sequence: Synthetic oligonucleotide
gggcgacccggggcgguug

SEQ ID NO: 865066 - RNA, 19 nt, Artificial Sequence
  Description of Artificial Sequence: Synthetic oligonucleotide
guuuugcgucagggaacuu

SEQ ID NO: 865067 - RNA, 19 nt, Artificial Sequence
  Description of Artificial Sequence: Synthetic oligonucleotide
gcauuugcuuggggaacuu

SEQ ID NO: 865068 - RNA, 19 nt, Artificial Sequence
  Description of Artificial Sequence: Synthetic oligonucleotide
ccguaaucccugacaucau

SEQ ID NO: 865069 - RNA, 19 nt, Artificial Sequence
  Description of Artificial Sequence: Synthetic oligonucleotide
ggcgacccggggcgguugu

SEQ ID NO: 865070 - RNA, 19 nt, Artificial Sequence
  Description of Artificial Sequence: Synthetic oligonucleotide
cgacccggggcgguuguca

SEQ ID NO: 865071 - RNA, 19 nt, Artificial Sequence
  Description of Artificial Sequence: Synthetic oligonucleotide
cugggcgacccggggcggu

SEQ ID NO: 865072 - RNA, 19 nt, Artificial Sequence
  Description of Artificial Sequence: Synthetic oligonucleotide
gcgacccggggcgguuguc

SEQ ID NO: 865073 - RNA, 19 nt, Artificial Sequence
  Description of Artificial Sequence: Synthetic oligonucleotide
cccugacaucaugguagua

SEQ ID NO: 865074 - RNA, 19 nt, Artificial Sequence
  Description of Artificial Sequence: Synthetic oligonucleotide
cggggcgguugucacugua

SEQ ID NO: 865075 - RNA, 19 nt, Artificial Sequence
  Description of Artificial Sequence: Synthetic oligonucleotide
acuauuaagagccaaauac

SEQ ID NO: 865076 - RNA, 19 nt, Artificial Sequence
  Description of Artificial Sequence: Synthetic oligonucleotide
auaaaauuaaguuuguggg

SEQ ID NO: 865077 - RNA, 19 nt, Artificial Sequence
  Description of Artificial Sequence: Synthetic oligonucleotide
aaaagcaagucccaaaugg

SEQ ID NO: 865078 - RNA, 19 nt, Artificial Sequence
  Description of Artificial Sequence: Synthetic oligonucleotide
uaugagauuauaaacauca

SEQ ID NO: 865079 - RNA, 19 nt, Artificial Sequence
  Description of Artificial Sequence: Synthetic oligonucleotide
agugcagugacccaaaagc

SEQ ID NO: 865080 - RNA, 19 nt, Artificial Sequence
  Description of Artificial Sequence: Synthetic oligonucleotide
cagaacaggaacuagaagg

SEQ ID NO: 865081 - RNA, 19 nt, Artificial Sequence
  Description of Artificial Sequence: Synthetic oligonucleotide
accaauucugaucagagac

SEQ ID NO: 865082 - RNA, 19 nt, Artificial Sequence
  Description of Artificial Sequence: Synthetic oligonucleotide
aguggcaugauuucuuucc

SEQ ID NO: 865083 - RNA, 19 nt, Artificial Sequence
  Description of Artificial Sequence: Synthetic oligonucleotide
aacuauugccucuuaaaag

SEQ ID NO: 865084 - RNA, 19 nt, Artificial Sequence
  Description of Artificial Sequence: Synthetic oligonucleotide
uuauuagcaagucugcuug

SEQ ID NO: 865085 - RNA, 19 nt, Artificial Sequence
  Description of Artificial Sequence: Synthetic oligonucleotide
uuaagagccaaauacccag

SEQ ID NO: 865086 - RNA, 19 nt, Artificial Sequence
  Description of Artificial Sequence: Synthetic oligonucleotide
cucgaagucaugaauaacc

SEQ ID NO: 865087 - RNA, 19 nt, Artificial Sequence
  Description of Artificial Sequence: Synthetic oligonucleotide
cuauuuguaacacuggaac

SEQ ID NO: 865088 - RNA, 19 nt, Artificial Sequence
  Description of Artificial Sequence: Synthetic oligonucleotide
caauauagucucaucaggg

SEQ ID NO: 865089 - RNA, 19 nt, Artificial Sequence
  Description of Artificial Sequence: Synthetic oligonucleotide
acuauugccucuuaaaagu

SEQ ID NO: 865090 - RNA, 19 nt, Artificial Sequence
  Description of Artificial Sequence: Synthetic oligonucleotide
acuagaaggguucuugaac

SEQ ID NO: 865091 - RNA, 19 nt, Artificial Sequence
  Description of Artificial Sequence: Synthetic oligonucleotide
ucacaagcaguuaugauac

SEQ ID NO: 865092 - RNA, 19 nt, Artificial Sequence
  Description of Artificial Sequence: Synthetic oligonucleotide
uuauauuuccagauuucag

SEQ ID NO: 865093 - RNA, 19 nt, Artificial Sequence
  Description of Artificial Sequence: Synthetic oligonucleotide
ugacccaaaagcaaguccc

SEQ ID NO: 865094 - RNA, 19 nt, Artificial Sequence
  Description of Artificial Sequence: Synthetic oligonucleotide
aacaaauauugucaguagu

SEQ ID NO: 865095 - RNA, 19 nt, Artificial Sequence
  Description of Artificial Sequence: Synthetic oligonucleotide
aaagcaagucccaaauggc

SEQ ID NO: 865096 - RNA, 19 nt, Artificial Sequence
  Description of Artificial Sequence: Synthetic oligonucleotide
uuuguugauugcaaaaggu

SEQ ID NO: 865097 - RNA, 19 nt, Artificial Sequence
  Description of Artificial Sequence: Synthetic oligonucleotide
guaagagucaucaaugugc

SEQ ID NO: 865098 - RNA, 19 nt, Artificial Sequence
  Description of Artificial Sequence: Synthetic oligonucleotide
cacauaugagauuauaaac

SEQ ID NO: 865099 - RNA, 19 nt, Artificial Sequence
  Description of Artificial Sequence: Synthetic oligonucleotide
aaacuauugccucuuaaaa

SEQ ID NO: 865100 - RNA, 19 nt, Artificial Sequence
  Description of Artificial Sequence: Synthetic oligonucleotide
uguaggagugaaaagcagc

SEQ ID NO: 865101 - RNA, 19 nt, Artificial Sequence
  Description of Artificial Sequence: Synthetic oligonucleotide
gguauaugaauauauuucc

SEQ ID NO: 865102 - RNA, 19 nt, Artificial Sequence
  Description of Artificial Sequence: Synthetic oligonucleotide
uguugauugcaaaagguuc

SEQ ID NO: 865103 - RNA, 19 nt, Artificial Sequence
  Description of Artificial Sequence: Synthetic oligonucleotide
uguaccugaccauuuaacc

SEQ ID NO: 865104 - RNA, 19 nt, Artificial Sequence
  Description of Artificial Sequence: Synthetic oligonucleotide
aggagugaaaagcagcacg

SEQ ID NO: 865105 - RNA, 19 nt, Artificial Sequence
  Description of Artificial Sequence: Synthetic oligonucleotide
gguucuugaacuuugagac

SEQ ID NO: 865106 - RNA, 19 nt, Artificial Sequence
  Description of Artificial Sequence: Synthetic oligonucleotide
ugucaagccaagcacagcu

SEQ ID NO: 865107 - RNA, 19 nt, Artificial Sequence
  Description of Artificial Sequence: Synthetic oligonucleotide
uugcaaaagguuccaaugc

SEQ ID NO: 865108 - RNA, 19 nt, Artificial Sequence
  Description of Artificial Sequence: Synthetic oligonucleotide
uccaaauuucccaaagcca

SEQ ID NO: 865109 - RNA, 19 nt, Artificial Sequence
  Description of Artificial Sequence: Synthetic oligonucleotide
uugccuaccugacacaugc

SEQ ID NO: 865110 - RNA, 19 nt, Artificial Sequence
  Description of Artificial Sequence: Synthetic oligonucleotide
uguaacuugaggcaugcau

SEQ ID NO: 865111 - RNA, 19 nt, Artificial Sequence
  Description of Artificial Sequence: Synthetic oligonucleotide
uuuuaaguuaggaggcuca

SEQ ID NO: 865112 - RNA, 19 nt, Artificial Sequence
  Description of Artificial Sequence: Synthetic oligonucleotide
augacucagaacaacaaac

SEQ ID NO: 865113 - RNA, 19 nt, Artificial Sequence
  Description of Artificial Sequence: Synthetic oligonucleotide
ugugacagaucgaagcuug

SEQ ID NO: 865114 - RNA, 19 nt, Artificial Sequence
  Description of Artificial Sequence: Synthetic oligonucleotide
agauuucaguaguacuugc

SEQ ID NO: 865115 - RNA, 19 nt, Artificial Sequence
  Description of Artificial Sequence: Synthetic oligonucleotide
agcaagucugccuaauuuc

SEQ ID NO: 865116 - RNA, 19 nt, Artificial Sequence
  Description of Artificial Sequence: Synthetic oligonucleotide
acauaugagauuauaaaca

SEQ ID NO: 865117 - RNA, 19 nt, Artificial Sequence
  Description of Artificial Sequence: Synthetic oligonucleotide
gauacaugguuccuuaaca

SEQ ID NO: 865118 - RNA, 19 nt, Artificial Sequence
  Description of Artificial Sequence: Synthetic oligonucleotide
ugcauuguuuguuauuagc

SEQ ID NO: 865119 - RNA, 19 nt, Artificial Sequence
  Description of Artificial Sequence: Synthetic oligonucleotide
aacuagucuucucuuuguc

SEQ ID NO: 865120 - RNA, 19 nt, Artificial Sequence
  Description of Artificial Sequence: Synthetic oligonucleotide
agugacaccaucaaaauaa

SEQ ID NO: 865121 - RNA, 19 nt, Artificial Sequence
  Description of Artificial Sequence: Synthetic oligonucleotide
auauauuuccauccuuuug

SEQ ID NO: 865122 - RNA, 19 nt, Artificial Sequence
  Description of Artificial Sequence: Synthetic oligonucleotide
cacaaacaaauauugucag

SEQ ID NO: 865123 - RNA, 19 nt, Artificial Sequence
  Description of Artificial Sequence: Synthetic oligonucleotide
acacauaugagauuauaaa

SEQ ID NO: 865124 - RNA, 19 nt, Artificial Sequence
  Description of Artificial Sequence: Synthetic oligonucleotide
aauuaauaacauucacaaa

SEQ ID NO: 865125 - RNA, 19 nt, Artificial Sequence
  Description of Artificial Sequence: Synthetic oligonucleotide
aaugacucaauggguagag

SEQ ID NO: 865126 - RNA, 19 nt, Artificial Sequence
  Description of Artificial Sequence: Synthetic oligonucleotide
aacauggggcuuccaaagg

SEQ ID NO: 865127 - RNA, 19 nt, Artificial Sequence
  Description of Artificial Sequence: Synthetic oligonucleotide
auucugaucagagacaggu

SEQ ID NO: 865128 - RNA, 19 nt, Artificial Sequence
  Description of Artificial Sequence: Synthetic oligonucleotide
aguuaggaggcucaaucag

SEQ ID NO: 865129 - RNA, 19 nt, Artificial Sequence
  Description of Artificial Sequence: Synthetic oligonucleotide
ugucucccaagugagaagg

SEQ ID NO: 865130 - RNA, 19 nt, Artificial Sequence
  Description of Artificial Sequence: Synthetic oligonucleotide
cacggaugaagaaaggccc

SEQ ID NO: 865131 - RNA, 19 nt, Artificial Sequence
  Description of Artificial Sequence: Synthetic oligonucleotide
acucauucaagcaaucagg

SEQ ID NO: 865132 - RNA, 19 nt, Artificial Sequence
  Description of Artificial Sequence: Synthetic oligonucleotide
acaaauauugucaguagug

SEQ ID NO: 865133 - RNA, 19 nt, Artificial Sequence
  Description of Artificial Sequence: Synthetic oligonucleotide
uuugugggaacucauucaa

SEQ ID NO: 865134 - RNA, 19 nt, Artificial Sequence
  Description of Artificial Sequence: Synthetic oligonucleotide
agaacaggaacuagaaggg

SEQ ID NO: 865135 - RNA, 19 nt, Artificial Sequence
  Description of Artificial Sequence: Synthetic oligonucleotide
uguagagcaagucugccua

SEQ ID NO: 865136 - RNA, 19 nt, Artificial Sequence
  Description of Artificial Sequence: Synthetic oligonucleotide
uuguuauuagcaagucugc

SEQ ID NO: 865137 - RNA, 19 nt, Artificial Sequence
  Description of Artificial Sequence: Synthetic oligonucleotide
ucgaagucaugaauaacca

SEQ ID NO: 865138 - RNA, 19 nt, Artificial Sequence
  Description of Artificial Sequence: Synthetic oligonucleotide
aauuaaguuugugggaacu

SEQ ID NO: 865139 - RNA, 19 nt, Artificial Sequence
  Description of Artificial Sequence: Synthetic oligonucleotide
uuaggaggcucaaucagcu

SEQ ID NO: 865140 - RNA, 19 nt, Artificial Sequence
  Description of Artificial Sequence: Synthetic oligonucleotide
uuaaaaguagcgguauaug

SEQ ID NO: 865141 - RNA, 19 nt, Artificial Sequence
  Description of Artificial Sequence: Synthetic oligonucleotide
ugcaaaagguuccaaugcu

SEQ ID NO: 865142 - RNA, 19 nt, Artificial Sequence
  Description of Artificial Sequence: Synthetic oligonucleotide
uugccucuuaaaaguagcg

SEQ ID NO: 865143 - RNA, 19 nt, Artificial Sequence
  Description of Artificial Sequence: Synthetic oligonucleotide
caaagaccaauucugauca

SEQ ID NO: 865144 - RNA, 19 nt, Artificial Sequence
  Description of Artificial Sequence: Synthetic oligonucleotide
uugcuugggaggcaaaagc

SEQ ID NO: 865145 - RNA, 19 nt, Artificial Sequence
  Description of Artificial Sequence: Synthetic oligonucleotide
ucugugaauugccagguau

SEQ ID NO: 865146 - RNA, 19 nt, Artificial Sequence
  Description of Artificial Sequence: Synthetic oligonucleotide
ugggauguagagcaagucu

SEQ ID NO: 865147 - RNA, 19 nt, Artificial Sequence
  Description of Artificial Sequence: Synthetic oligonucleotide
ugauacaugguuccuuaac

SEQ ID NO: 865148 - RNA, 19 nt, Artificial Sequence
  Description of Artificial Sequence: Synthetic oligonucleotide
uuauuugcuaguuccucca

SEQ ID NO: 865149 - RNA, 19 nt, Artificial Sequence
  Description of Artificial Sequence: Synthetic oligonucleotide
uaagagccaaauacccagg

SEQ ID NO: 865150 - RNA, 19 nt, Artificial Sequence
  Description of Artificial Sequence: Synthetic oligonucleotide
gaaacuauugccucuuaaa

SEQ ID NO: 865151 - RNA, 19 nt, Artificial Sequence
  Description of Artificial Sequence: Synthetic oligonucleotide
ggaacuauuuguaacacug

SEQ ID NO: 865152 - RNA, 19 nt, Artificial Sequence
  Description of Artificial Sequence: Synthetic oligonucleotide
uccuuuucaggguuggccc

SEQ ID NO: 865153 - RNA, 19 nt, Artificial Sequence
  Description of Artificial Sequence: Synthetic oligonucleotide
agcacggaugaagaaaggc

SEQ ID NO: 865154 - RNA, 19 nt, Artificial Sequence
  Description of Artificial Sequence: Synthetic oligonucleotide
augaauauauuuccauccu

SEQ ID NO: 865155 - RNA, 19 nt, Artificial Sequence
  Description of Artificial Sequence: Synthetic oligonucleotide
ucagguaacucgaagucau

SEQ ID NO: 865156 - RNA, 19 nt, Artificial Sequence
  Description of Artificial Sequence: Synthetic oligonucleotide
uucacauccccuuccagga

SEQ ID NO: 865157 - RNA, 19 nt, Artificial Sequence
  Description of Artificial Sequence: Synthetic oligonucleotide
cucugaaagugaaugacuc

SEQ ID NO: 865158 - RNA, 19 nt, Artificial Sequence
  Description of Artificial Sequence: Synthetic oligonucleotide
aacucgaagucaugaauaa

SEQ ID NO: 865159 - RNA, 19 nt, Artificial Sequence
  Description of Artificial Sequence: Synthetic oligonucleotide
ugaggcaugcauuuccaca

SEQ ID NO: 865160 - RNA, 19 nt, Artificial Sequence
  Description of Artificial Sequence: Synthetic oligonucleotide
agaacacgcacacucugag

SEQ ID NO: 865161 - RNA, 19 nt, Artificial Sequence
  Description of Artificial Sequence: Synthetic oligonucleotide
uaugauacaugguuccuua

SEQ ID NO: 865162 - RNA, 19 nt, Artificial Sequence
  Description of Artificial Sequence: Synthetic oligonucleotide
gaacuauuuguaacacugg

SEQ ID NO: 865163 - RNA, 19 nt, Artificial Sequence
  Description of Artificial Sequence: Synthetic oligonucleotide
uuuaagcuuaagaggccca

SEQ ID NO: 865164 - RNA, 19 nt, Artificial Sequence
  Description of Artificial Sequence: Synthetic oligonucleotide
caauucugaucagagacag

SEQ ID NO: 865165 - RNA, 19 nt, Artificial Sequence
  Description of Artificial Sequence: Synthetic oligonucleotide
aaagguuccaaugcuacua

SEQ ID NO: 865166 - RNA, 19 nt, Artificial Sequence
  Description of Artificial Sequence: Synthetic oligonucleotide
gcuacauucucacugguug

SEQ ID NO: 865167 - RNA, 19 nt, Artificial Sequence
  Description of Artificial Sequence: Synthetic oligonucleotide
uaccugaccauuuaaccaa

SEQ ID NO: 865168 - RNA, 19 nt, Artificial Sequence
  Description of Artificial Sequence: Synthetic oligonucleotide
ugcuguuccucucuugaug

SEQ ID NO: 865169 - RNA, 19 nt, Artificial Sequence
  Description of Artificial Sequence: Synthetic oligonucleotide
aaucaggucaaaugucuuu

SEQ ID NO: 865170 - RNA, 19 nt, Artificial Sequence
  Description of Artificial Sequence: Synthetic oligonucleotide
ugccucuuaaaaguagcgg

SEQ ID NO: 865171 - RNA, 19 nt, Artificial Sequence
  Description of Artificial Sequence: Synthetic oligonucleotide
aagucugcuugugucuccc

SEQ ID NO: 865172 - RNA, 19 nt, Artificial Sequence
  Description of Artificial Sequence: Synthetic oligonucleotide
acagaucgaagcuugguaa

SEQ ID NO: 865173 - RNA, 19 nt, Artificial Sequence
  Description of Artificial Sequence: Synthetic oligonucleotide
accggaacuauuuguaaca

SEQ ID NO: 865174 - RNA, 19 nt, Artificial Sequence
  Description of Artificial Sequence: Synthetic oligonucleotide
agucugccuaauuucagug

SEQ ID NO: 865175 - RNA, 19 nt, Artificial Sequence
  Description of Artificial Sequence: Synthetic oligonucleotide
aacuagaaggguucuugaa

SEQ ID NO: 865176 - RNA, 19 nt, Artificial Sequence
  Description of Artificial Sequence: Synthetic oligonucleotide
cuugauggagcgaggguag

SEQ ID NO: 865177 - RNA, 19 nt, Artificial Sequence
  Description of Artificial Sequence: Synthetic oligonucleotide
ugugaauugccagguauga

SEQ ID NO: 865178 - RNA, 19 nt, Artificial Sequence
  Description of Artificial Sequence: Synthetic oligonucleotide
ucuucacaagcaguuauga

SEQ ID NO: 865179 - RNA, 19 nt, Artificial Sequence
  Description of Artificial Sequence: Synthetic oligonucleotide
acuagucuucucuuuguca

SEQ ID NO: 865180 - RNA, 19 nt, Artificial Sequence
  Description of Artificial Sequence: Synthetic oligonucleotide
uggagucacgccuaagaca

SEQ ID NO: 865181 - RNA, 19 nt, Artificial Sequence
  Description of Artificial Sequence: Synthetic oligonucleotide
aagagucaucaaugugcac

SEQ ID NO: 865182 - RNA, 19 nt, Artificial Sequence
  Description of Artificial Sequence: Synthetic oligonucleotide
acaaacaaauauugucagu

SEQ ID NO: 865183 - RNA, 19 nt, Artificial Sequence
  Description of Artificial Sequence: Synthetic oligonucleotide
ggagucacgccuaagacag

SEQ ID NO: 865184 - RNA, 19 nt, Artificial Sequence
  Description of Artificial Sequence: Synthetic oligonucleotide
uauuugcuaguuccuccag

SEQ ID NO: 865185 - RNA, 19 nt, Artificial Sequence
  Description of Artificial Sequence: Synthetic oligonucleotide
uaguacuugcuuuucacuu

SEQ ID NO: 865186 - RNA, 19 nt, Artificial Sequence
  Description of Artificial Sequence: Synthetic oligonucleotide
aaucagcuuuucugaguag

SEQ ID NO: 865187 - RNA, 19 nt, Artificial Sequence
  Description of Artificial Sequence: Synthetic oligonucleotide
uagcgguauaugaauauau

SEQ ID NO: 865188 - RNA, 19 nt, Artificial Sequence
  Description of Artificial Sequence: Synthetic oligonucleotide
aaaugagagucuguaccug

SEQ ID NO: 865189 - RNA, 19 nt, Artificial Sequence
  Description of Artificial Sequence: Synthetic oligonucleotide
ugcagugacccaaaagcaa

SEQ ID NO: 865190 - RNA, 19 nt, Artificial Sequence
  Description of Artificial Sequence: Synthetic oligonucleotide
gaugacucagaacaacaaa

SEQ ID NO: 865191 - RNA, 19 nt, Artificial Sequence
  Description of Artificial Sequence: Synthetic oligonucleotide
aagaccaauucugaucaga

SEQ ID NO: 865192 - RNA, 19 nt, Artificial Sequence
  Description of Artificial Sequence: Synthetic oligonucleotide
auaugagauuauaaacauc

SEQ ID NO: 865193 - RNA, 19 nt, Artificial Sequence
  Description of Artificial Sequence: Synthetic oligonucleotide
aaagaccaauucugaucag

SEQ ID NO: 865194 - RNA, 19 nt, Artificial Sequence
  Description of Artificial Sequence: Synthetic oligonucleotide
caguuaugauacaugguuc

SEQ ID NO: 865195 - RNA, 19 nt, Artificial Sequence
  Description of Artificial Sequence: Synthetic oligonucleotide
agcucuuucccaccacacg

SEQ ID NO: 865196 - RNA, 19 nt, Artificial Sequence
  Description of Artificial Sequence: Synthetic oligonucleotide
uguuauuagcaagucugcu

SEQ ID NO: 865197 - RNA, 19 nt, Artificial Sequence
  Description of Artificial Sequence: Synthetic oligonucleotide
gaucgaagcuugguaagag

SEQ ID NO: 865198 - RNA, 19 nt, Artificial Sequence
  Description of Artificial Sequence: Synthetic oligonucleotide
aguagcgguauaugaauau

SEQ ID NO: 865199 - RNA, 19 nt, Artificial Sequence
  Description of Artificial Sequence: Synthetic oligonucleotide
uaaguuugugggaacucau

SEQ ID NO: 865200 - RNA, 19 nt, Artificial Sequence
  Description of Artificial Sequence: Synthetic oligonucleotide
agcuugguaagagucauca

SEQ ID NO: 865201 - RNA, 19 nt, Artificial Sequence
  Description of Artificial Sequence: Synthetic oligonucleotide
uugcauuguuuguuauuag

SEQ ID NO: 865202 - RNA, 19 nt, Artificial Sequence
  Description of Artificial Sequence: Synthetic oligonucleotide
gaaaggcccuugcugguag

SEQ ID NO: 865203 - RNA, 19 nt, Artificial Sequence
  Description of Artificial Sequence: Synthetic oligonucleotide
uaacuagucuucucuuugu

SEQ ID NO: 865204 - RNA, 19 nt, Artificial Sequence
  Description of Artificial Sequence: Synthetic oligonucleotide
acaugguuccuuaacacca

SEQ ID NO: 865205 - RNA, 19 nt, Artificial Sequence
  Description of Artificial Sequence: Synthetic oligonucleotide
gaaggguucuugaacuuug

SEQ ID NO: 865206 - RNA, 19 nt, Artificial Sequence
  Description of Artificial Sequence: Synthetic oligonucleotide
uauccaguuuuggugagcu

SEQ ID NO: 865207 - RNA, 19 nt, Artificial Sequence
  Description of Artificial Sequence: Synthetic oligonucleotide
guaucuguaggagugaaaa

SEQ ID NO: 865208 - RNA, 19 nt, Artificial Sequence
  Description of Artificial Sequence: Synthetic oligonucleotide
ucacgccuaagacagggaa

SEQ ID NO: 865209 - RNA, 19 nt, Artificial Sequence
  Description of Artificial Sequence: Synthetic oligonucleotide
guuuuggugagcuggcuga

SEQ ID NO: 865210 - RNA, 19 nt, Artificial Sequence
  Description of Artificial Sequence: Synthetic oligonucleotide
cagcuagcaaaugagaguc

SEQ ID NO: 865211 - RNA, 19 nt, Artificial Sequence
  Description of Artificial Sequence: Synthetic oligonucleotide
ggagugaaaagcagcacgg

SEQ ID NO: 865212 - RNA, 19 nt, Artificial Sequence
  Description of Artificial Sequence: Synthetic oligonucleotide
aagaaaggcccuugcuggu

SEQ ID NO: 865213 - RNA, 19 nt, Artificial Sequence
  Description of Artificial Sequence: Synthetic oligonucleotide
uaacuugaggcaugcauuu

SEQ ID NO: 865214 - RNA, 19 nt, Artificial Sequence
  Description of Artificial Sequence: Synthetic oligonucleotide
gugacccaaaagcaagucc

SEQ ID NO: 865215 - RNA, 19 nt, Artificial Sequence
  Description of Artificial Sequence: Synthetic oligonucleotide
acgccuaagacagggaaag

SEQ ID NO: 865216 - RNA, 19 nt, Artificial Sequence
  Description of Artificial Sequence: Synthetic oligonucleotide
cugugaauugccagguaug

SEQ ID NO: 865217 - RNA, 19 nt, Artificial Sequence
  Description of Artificial Sequence: Synthetic oligonucleotide
cuguaccugaccauuuaac

SEQ ID NO: 865218 - RNA, 19 nt, Artificial Sequence
  Description of Artificial Sequence: Synthetic oligonucleotide
uucugaucagagacaggug

SEQ ID NO: 865219 - RNA, 19 nt, Artificial Sequence
  Description of Artificial Sequence: Synthetic oligonucleotide
aguuaggugcagccguauc

SEQ ID NO: 865220 - RNA, 19 nt, Artificial Sequence
  Description of Artificial Sequence: Synthetic oligonucleotide
ucaggcaccggaacuauuu

SEQ ID NO: 865221 - RNA, 19 nt, Artificial Sequence
  Description of Artificial Sequence: Synthetic oligonucleotide
guuugugggaacucauuca

SEQ ID NO: 865222 - RNA, 19 nt, Artificial Sequence
  Description of Artificial Sequence: Synthetic oligonucleotide
ucuuaaaaguagcgguaua

SEQ ID NO: 865223 - RNA, 19 nt, Artificial Sequence
  Description of Artificial Sequence: Synthetic oligonucleotide
cagaucgaagcuugguaag

SEQ ID NO: 865224 - RNA, 19 nt, Artificial Sequence
  Description of Artificial Sequence: Synthetic oligonucleotide
aguggugguaccaagcaga

SEQ ID NO: 865225 - RNA, 19 nt, Artificial Sequence
  Description of Artificial Sequence: Synthetic oligonucleotide
guuaggaggcucaaucagc

SEQ ID NO: 865226 - RNA, 19 nt, Artificial Sequence
  Description of Artificial Sequence: Synthetic oligonucleotide
uaccaagcagagcauccug

SEQ ID NO: 865227 - RNA, 19 nt, Artificial Sequence
  Description of Artificial Sequence: Synthetic oligonucleotide
acucaauggguagaggugu

SEQ ID NO: 865228 - RNA, 19 nt, Artificial Sequence
  Description of Artificial Sequence: Synthetic oligonucleotide
gguaagagucaucaaugug

SEQ ID NO: 865229 - RNA, 19 nt, Artificial Sequence
  Description of Artificial Sequence: Synthetic oligonucleotide
auuugcuaguuccuccaga

SEQ ID NO: 865230 - RNA, 19 nt, Artificial Sequence
  Description of Artificial Sequence: Synthetic oligonucleotide
aauucugaucagagacagg

SEQ ID NO: 865231 - RNA, 19 nt, Artificial Sequence
  Description of Artificial Sequence: Synthetic oligonucleotide
gaacuagaaggguucuuga

SEQ ID NO: 865232 - RNA, 19 nt, Artificial Sequence
  Description of Artificial Sequence: Synthetic oligonucleotide
acuggaaccucugugaauu

SEQ ID NO: 865233 - RNA, 19 nt, Artificial Sequence
  Description of Artificial Sequence: Synthetic oligonucleotide
aaaggcccuugcugguagg

SEQ ID NO: 865234 - RNA, 19 nt, Artificial Sequence
  Description of Artificial Sequence: Synthetic oligonucleotide
aacaggaacuagaaggguu

SEQ ID NO: 865235 - RNA, 19 nt, Artificial Sequence
  Description of Artificial Sequence: Synthetic oligonucleotide
auuucaguggcuacauucu

SEQ ID NO: 865236 - RNA, 19 nt, Artificial Sequence
  Description of Artificial Sequence: Synthetic oligonucleotide
acuucagcaaaagucaaua

SEQ ID NO: 865237 - RNA, 19 nt, Artificial Sequence
  Description of Artificial Sequence: Synthetic oligonucleotide
uguuuguuauuagcaaguc

SEQ ID NO: 865238 - RNA, 19 nt, Artificial Sequence
  Description of Artificial Sequence: Synthetic oligonucleotide
cauguaacuugaggcaugc

SEQ ID NO: 865239 - RNA, 19 nt, Artificial Sequence
  Description of Artificial Sequence: Synthetic oligonucleotide
agugacccaaaagcaaguc

SEQ ID NO: 865240 - RNA, 19 nt, Artificial Sequence
  Description of Artificial Sequence: Synthetic oligonucleotide
agugaaugacucaaugggu

SEQ ID NO: 865241 - RNA, 19 nt, Artificial Sequence
  Description of Artificial Sequence: Synthetic oligonucleotide
caugguuccuuaacaccag

SEQ ID NO: 865242 - RNA, 19 nt, Artificial Sequence
  Description of Artificial Sequence: Synthetic oligonucleotide
cauaugagauuauaaacau

SEQ ID NO: 865243 - RNA, 19 nt, Artificial Sequence
  Description of Artificial Sequence: Synthetic oligonucleotide
ccuaagacagggaaagcag

SEQ ID NO: 865244 - RNA, 19 nt, Artificial Sequence
  Description of Artificial Sequence: Synthetic oligonucleotide
guaggagugaaaagcagca

SEQ ID NO: 865245 - RNA, 19 nt, Artificial Sequence
  Description of Artificial Sequence: Synthetic oligonucleotide
acucgaagucaugaauaac

SEQ ID NO: 865246 - RNA, 19 nt, Artificial Sequence
  Description of Artificial Sequence: Synthetic oligonucleotide
cagauuucaguaguacuug

SEQ ID NO: 865247 - RNA, 19 nt, Artificial Sequence
  Description of Artificial Sequence: Synthetic oligonucleotide
aguacuugcuuuucacuuu

SEQ ID NO: 865248 - RNA, 19 nt, Artificial Sequence
  Description of Artificial Sequence: Synthetic oligonucleotide
uggcacaaggaugacucag

SEQ ID NO: 865249 - RNA, 19 nt, Artificial Sequence
  Description of Artificial Sequence: Synthetic oligonucleotide
cuagaaggguucuugaacu

SEQ ID NO: 865250 - RNA, 19 nt, Artificial Sequence
  Description of Artificial Sequence: Synthetic oligonucleotide
agaucugccacuguaguua

SEQ ID NO: 865251 - RNA, 19 nt, Artificial Sequence
  Description of Artificial Sequence: Synthetic oligonucleotide
aguuggccagucuuuaaau

SEQ ID NO: 865252 - RNA, 19 nt, Artificial Sequence
  Description of Artificial Sequence: Synthetic oligonucleotide
acuaacuagucuucucuuu

SEQ ID NO: 865253 - RNA, 19 nt, Artificial Sequence
  Description of Artificial Sequence: Synthetic oligonucleotide
guugcauuguuuguuauua

SEQ ID NO: 865254 - RNA, 19 nt, Artificial Sequence
  Description of Artificial Sequence: Synthetic oligonucleotide
caccggaacuauuuguaac

SEQ ID NO: 865255 - RNA, 19 nt, Artificial Sequence
  Description of Artificial Sequence: Synthetic oligonucleotide
uguuguucacagugguggu

SEQ ID NO: 865256 - RNA, 19 nt, Artificial Sequence
  Description of Artificial Sequence: Synthetic oligonucleotide
caauggguagagguguugc

SEQ ID NO: 865257 - RNA, 19 nt, Artificial Sequence
  Description of Artificial Sequence: Synthetic oligonucleotide
ugcagguugguauccaguu

SEQ ID NO: 865258 - RNA, 19 nt, Artificial Sequence
  Description of Artificial Sequence: Synthetic oligonucleotide
gagaccaaguguaggcugc

SEQ ID NO: 865259 - RNA, 19 nt, Artificial Sequence
  Description of Artificial Sequence: Synthetic oligonucleotide
gacagaucgaagcuuggua

SEQ ID NO: 865260 - RNA, 19 nt, Artificial Sequence
  Description of Artificial Sequence: Synthetic oligonucleotide
ugaucagagacagguggga

SEQ ID NO: 865261 - RNA, 19 nt, Artificial Sequence
  Description of Artificial Sequence: Synthetic oligonucleotide
uagcaaaugagagucugua

SEQ ID NO: 865262 - RNA, 19 nt, Artificial Sequence
  Description of Artificial Sequence: Synthetic oligonucleotide
guuaaucaccagaagcuga

SEQ ID NO: 865263 - RNA, 19 nt, Artificial Sequence
  Description of Artificial Sequence: Synthetic oligonucleotide
ucuuaggguuaaucaccag

SEQ ID NO: 865264 - RNA, 19 nt, Artificial Sequence
  Description of Artificial Sequence: Synthetic oligonucleotide
gaacacgcacacucugagc

SEQ ID NO: 865265 - RNA, 19 nt, Artificial Sequence
  Description of Artificial Sequence: Synthetic oligonucleotide
caaaagcuggagucacgcc

SEQ ID NO: 865266 - RNA, 19 nt, Artificial Sequence
  Description of Artificial Sequence: Synthetic oligonucleotide
agcugucuuaggguuaauc

SEQ ID NO: 865267 - RNA, 19 nt, Artificial Sequence
  Description of Artificial Sequence: Synthetic oligonucleotide
cagcaaaugucaugauuug

SEQ ID NO: 865268 - RNA, 19 nt, Artificial Sequence
  Description of Artificial Sequence: Synthetic oligonucleotide
uuucucugauuuccaaauu

SEQ ID NO: 865269 - RNA, 19 nt, Artificial Sequence
  Description of Artificial Sequence: Synthetic oligonucleotide
guggcaugauuucuuuccc

SEQ ID NO: 865270 - RNA, 19 nt, Artificial Sequence
  Description of Artificial Sequence: Synthetic oligonucleotide
uuaugauacaugguuccuu

SEQ ID NO: 865271 - RNA, 19 nt, Artificial Sequence
  Description of Artificial Sequence: Synthetic oligonucleotide
uuaagcuuaagaggcccaa

SEQ ID NO: 865272 - RNA, 19 nt, Artificial Sequence
  Description of Artificial Sequence: Synthetic oligonucleotide
uacuaacuagucuucucuu

SEQ ID NO: 865273 - RNA, 19 nt, Artificial Sequence
  Description of Artificial Sequence: Synthetic oligonucleotide
caguggaauauucauguaa

SEQ ID NO: 865274 - RNA, 19 nt, Artificial Sequence
  Description of Artificial Sequence: Synthetic oligonucleotide
agguaacucgaagucauga

SEQ ID NO: 865275 - RNA, 19 nt, Artificial Sequence
  Description of Artificial Sequence: Synthetic oligonucleotide
aucagguaacucgaaguca

SEQ ID NO: 865276 - RNA, 19 nt, Artificial Sequence
  Description of Artificial Sequence: Synthetic oligonucleotide
ucucacugguugcuuggga

SEQ ID NO: 865277 - RNA, 19 nt, Artificial Sequence
  Description of Artificial Sequence: Synthetic oligonucleotide
uggaaccucugugaauugc

SEQ ID NO: 865278 - RNA, 19 nt, Artificial Sequence
  Description of Artificial Sequence: Synthetic oligonucleotide
cuguaguuaggugcagccg

SEQ ID NO: 865279 - RNA, 19 nt, Artificial Sequence
  Description of Artificial Sequence: Synthetic oligonucleotide
gauggagcgaggguaguuc

SEQ ID NO: 865280 - RNA, 19 nt, Artificial Sequence
  Description of Artificial Sequence: Synthetic oligonucleotide
agccguaucuguaggagug

SEQ ID NO: 865281 - RNA, 19 nt, Artificial Sequence
  Description of Artificial Sequence: Synthetic oligonucleotide
caaguguaggcugccgggg

SEQ ID NO: 865282 - RNA, 19 nt, Artificial Sequence
  Description of Artificial Sequence: Synthetic oligonucleotide
ucccaaggaagccucucuc

SEQ ID NO: 865283 - RNA, 19 nt, Artificial Sequence
  Description of Artificial Sequence: Synthetic oligonucleotide
uauugucaguagugacacc

SEQ ID NO: 865284 - RNA, 19 nt, Artificial Sequence
  Description of Artificial Sequence: Synthetic oligonucleotide
augucaugauuuguauuug

SEQ ID NO: 865285 - RNA, 19 nt, Artificial Sequence
  Description of Artificial Sequence: Synthetic oligonucleotide
guuaggugcagccguaucu

SEQ ID NO: 865286 - RNA, 19 nt, Artificial Sequence
  Description of Artificial Sequence: Synthetic oligonucleotide
agaccaaguguaggcugcc

SEQ ID NO: 865287 - RNA, 19 nt, Artificial Sequence
  Description of Artificial Sequence: Synthetic oligonucleotide
guaggcaguagaucugcca

SEQ ID NO: 865288 - RNA, 19 nt, Artificial Sequence
  Description of Artificial Sequence: Synthetic oligonucleotide
agagccaaauacccaggaa

SEQ ID NO: 865289 - RNA, 19 nt, Artificial Sequence
  Description of Artificial Sequence: Synthetic oligonucleotide
gaauugccagguaugaacu

SEQ ID NO: 865290 - RNA, 19 nt, Artificial Sequence
  Description of Artificial Sequence: Synthetic oligonucleotide
acaacaaacaggagcccca

SEQ ID NO: 865291 - RNA, 19 nt, Artificial Sequence
  Description of Artificial Sequence: Synthetic oligonucleotide
uauaaacaucaggcaccgg

SEQ ID NO: 865292 - RNA, 19 nt, Artificial Sequence
  Description of Artificial Sequence: Synthetic oligonucleotide
gaaugacucaauggguaga

SEQ ID NO: 865293 - RNA, 19 nt, Artificial Sequence
  Description of Artificial Sequence: Synthetic oligonucleotide
ugacagaucgaagcuuggu

SEQ ID NO: 865294 - RNA, 19 nt, Artificial Sequence
  Description of Artificial Sequence: Synthetic oligonucleotide
uucagucuguucaguggaa

SEQ ID NO: 865295 - RNA, 19 nt, Artificial Sequence
  Description of Artificial Sequence: Synthetic oligonucleotide
acuuugagaccaaguguag

SEQ ID NO: 865296 - RNA, 19 nt, Artificial Sequence
  Description of Artificial Sequence: Synthetic oligonucleotide
guuauuagcaagucugcuu

SEQ ID NO: 865297 - RNA, 19 nt, Artificial Sequence
  Description of Artificial Sequence: Synthetic oligonucleotide
cacauccccuuccaggaac

SEQ ID NO: 865298 - RNA, 19 nt, Artificial Sequence
  Description of Artificial Sequence: Synthetic oligonucleotide
ugcagccguaucuguagga

SEQ ID NO: 865299 - RNA, 19 nt, Artificial Sequence
  Description of Artificial Sequence: Synthetic oligonucleotide
uugccagguaugaacuuuu

SEQ ID NO: 865300 - RNA, 19 nt, Artificial Sequence
  Description of Artificial Sequence: Synthetic oligonucleotide
uugucaguagugacaccau

SEQ ID NO: 865301 - RNA, 19 nt, Artificial Sequence
  Description of Artificial Sequence: Synthetic oligonucleotide
guaacucgaagucaugaau

SEQ ID NO: 865302 - RNA, 19 nt, Artificial Sequence
  Description of Artificial Sequence: Synthetic oligonucleotide
agaucgaagcuugguaaga

SEQ ID NO: 865303 - RNA, 19 nt, Artificial Sequence
  Description of Artificial Sequence: Synthetic oligonucleotide
gcacggaugaagaaaggcc

SEQ ID NO: 865304 - RNA, 19 nt, Artificial Sequence
  Description of Artificial Sequence: Synthetic oligonucleotide
aaagcuggagucacgccua

SEQ ID NO: 865305 - RNA, 19 nt, Artificial Sequence
  Description of Artificial Sequence: Synthetic oligonucleotide
aggcaccggaacuauuugu

SEQ ID NO: 865306 - RNA, 19 nt, Artificial Sequence
  Description of Artificial Sequence: Synthetic oligonucleotide
gcaaaagcuggagucacgc

SEQ ID NO: 865307 - RNA, 19 nt, Artificial Sequence
  Description of Artificial Sequence: Synthetic oligonucleotide
cagaauaggcucugugaca

SEQ ID NO: 865308 - RNA, 19 nt, Artificial Sequence
  Description of Artificial Sequence: Synthetic oligonucleotide
agaguggcaugauuucuuu

SEQ ID NO: 865309 - RNA, 19 nt, Artificial Sequence
  Description of Artificial Sequence: Synthetic oligonucleotide
ucaguggaauauucaugua

SEQ ID NO: 865310 - RNA, 19 nt, Artificial Sequence
  Description of Artificial Sequence: Synthetic oligonucleotide
aaguagcgguauaugaaua

SEQ ID NO: 865311 - RNA, 19 nt, Artificial Sequence
  Description of Artificial Sequence: Synthetic oligonucleotide
gcaguuaugauacaugguu

SEQ ID NO: 865312 - RNA, 19 nt, Artificial Sequence
  Description of Artificial Sequence: Synthetic oligonucleotide
augacucaauggguagagg

SEQ ID NO: 865313 - RNA, 19 nt, Artificial Sequence
  Description of Artificial Sequence: Synthetic oligonucleotide
caguggugguaccaagcag

SEQ ID NO: 865314 - RNA, 19 nt, Artificial Sequence
  Description of Artificial Sequence: Synthetic oligonucleotide
gccuaccugacacaugcag

SEQ ID NO: 865315 - RNA, 19 nt, Artificial Sequence
  Description of Artificial Sequence: Synthetic oligonucleotide
ggcaugcauuuccacagag

SEQ ID NO: 865316 - RNA, 19 nt, Artificial Sequence
  Description of Artificial Sequence: Synthetic oligonucleotide
guaguacuugcuuuucacu

SEQ ID NO: 865317 - RNA, 19 nt, Artificial Sequence
  Description of Artificial Sequence: Synthetic oligonucleotide
ggaaccucugugaauugcc

SEQ ID NO: 865318 - RNA, 19 nt, Artificial Sequence
  Description of Artificial Sequence: Synthetic oligonucleotide
gcuagcaaaugagagucug

SEQ ID NO: 865319 - RNA, 19 nt, Artificial Sequence
  Description of Artificial Sequence: Synthetic oligonucleotide
uagaaggguucuugaacuu

SEQ ID NO: 865320 - RNA, 19 nt, Artificial Sequence
  Description of Artificial Sequence: Synthetic oligonucleotide
cauuuaaccaaagaccaau

SEQ ID NO: 865321 - RNA, 19 nt, Artificial Sequence
  Description of Artificial Sequence: Synthetic oligonucleotide
acaagcagggaggucugug

SEQ ID NO: 865322 - RNA, 19 nt, Artificial Sequence
  Description of Artificial Sequence: Synthetic oligonucleotide
gguauccaguuuuggugag

SEQ ID NO: 865323 - RNA, 19 nt, Artificial Sequence
  Description of Artificial Sequence: Synthetic oligonucleotide
cuugccuaccugacacaug

SEQ ID NO: 865324 - RNA, 19 nt, Artificial Sequence
  Description of Artificial Sequence: Synthetic oligonucleotide
cacaugcagguugguaucc

SEQ ID NO: 865325 - RNA, 19 nt, Artificial Sequence
  Description of Artificial Sequence: Synthetic oligonucleotide
acacgcacacucugagcug

SEQ ID NO: 865326 - RNA, 19 nt, Artificial Sequence
  Description of Artificial Sequence: Synthetic oligonucleotide
guagaucugccacuguagu

SEQ ID NO: 865327 - RNA, 19 nt, Artificial Sequence
  Description of Artificial Sequence: Synthetic oligonucleotide
guagugacaccaucaaaau

SEQ ID NO: 865328 - RNA, 19 nt, Artificial Sequence
  Description of Artificial Sequence: Synthetic oligonucleotide
agagcaagucugccuaauu

SEQ ID NO: 865329 - RNA, 19 nt, Artificial Sequence
  Description of Artificial Sequence: Synthetic oligonucleotide
cuauugccucuuaaaagua

SEQ ID NO: 865330 - RNA, 19 nt, Artificial Sequence
  Description of Artificial Sequence: Synthetic oligonucleotide
gaaccucugugaauugcca

SEQ ID NO: 865331 - RNA, 19 nt, Artificial Sequence
  Description of Artificial Sequence: Synthetic oligonucleotide
gguaacucgaagucaugaa

SEQ ID NO: 865332 - RNA, 19 nt, Artificial Sequence
  Description of Artificial Sequence: Synthetic oligonucleotide
gcuacuaacuagucuucuc

SEQ ID NO: 865333 - RNA, 19 nt, Artificial Sequence
  Description of Artificial Sequence: Synthetic oligonucleotide
cacagguaggcaguagauc

SEQ ID NO: 865334 - RNA, 19 nt, Artificial Sequence
  Description of Artificial Sequence: Synthetic oligonucleotide
gugacagaucgaagcuugg

SEQ ID NO: 865335 - RNA, 19 nt, Artificial Sequence
  Description of Artificial Sequence: Synthetic oligonucleotide
aggcucaaucagcuuuucu

SEQ ID NO: 865336 - RNA, 19 nt, Artificial Sequence
  Description of Artificial Sequence: Synthetic oligonucleotide
guggaauauucauguaacu

SEQ ID NO: 865337 - RNA, 19 nt, Artificial Sequence
  Description of Artificial Sequence: Synthetic oligonucleotide
ugguaccaagcagagcauc

SEQ ID NO: 865338 - RNA, 19 nt, Artificial Sequence
  Description of Artificial Sequence: Synthetic oligonucleotide
gccucuuaaaaguagcggu

SEQ ID NO: 865339 - RNA, 19 nt, Artificial Sequence
  Description of Artificial Sequence: Synthetic oligonucleotide
caggcaccggaacuauuug

SEQ ID NO: 865340 - RNA, 19 nt, Artificial Sequence
  Description of Artificial Sequence: Synthetic oligonucleotide
accacacggcacucacauc

SEQ ID NO: 865341 - RNA, 19 nt, Artificial Sequence
  Description of Artificial Sequence: Synthetic oligonucleotide
agcgguauaugaauauauu

SEQ ID NO: 865342 - RNA, 19 nt, Artificial Sequence
  Description of Artificial Sequence: Synthetic oligonucleotide
cagguaacucgaagucaug

SEQ ID NO: 865343 - RNA, 19 nt, Artificial Sequence
  Description of Artificial Sequence: Synthetic oligonucleotide
ggaaacuauugccucuuaa

SEQ ID NO: 865344 - RNA, 19 nt, Artificial Sequence
  Description of Artificial Sequence: Synthetic oligonucleotide
uuuuggugagcuggcugaa

SEQ ID NO: 865345 - RNA, 19 nt, Artificial Sequence
  Description of Artificial Sequence: Synthetic oligonucleotide
caucucagaauaggcucug

SEQ ID NO: 865346 - RNA, 19 nt, Artificial Sequence
  Description of Artificial Sequence: Synthetic oligonucleotide
acaucaggcaccggaacua

SEQ ID NO: 865347 - RNA, 19 nt, Artificial Sequence
  Description of Artificial Sequence: Synthetic oligonucleotide
guauccaguuuuggugagc

SEQ ID NO: 865348 - RNA, 19 nt, Artificial Sequence
  Description of Artificial Sequence: Synthetic oligonucleotide
guaacuugaggcaugcauu

SEQ ID NO: 865349 - RNA, 19 nt, Artificial Sequence
  Description of Artificial Sequence: Synthetic oligonucleotide
caguaguacuugcuuuuca

SEQ ID NO: 865350 - RNA, 19 nt, Artificial Sequence
  Description of Artificial Sequence: Synthetic oligonucleotide
caaugcuacuaacuagucu

SEQ ID NO: 865351 - RNA, 19 nt, Artificial Sequence
  Description of Artificial Sequence: Synthetic oligonucleotide
cccaaggaagccucucucc

SEQ ID NO: 865352 - RNA, 19 nt, Artificial Sequence
  Description of Artificial Sequence: Synthetic oligonucleotide
ccaagcacagcuuuuauau

SEQ ID NO: 865353 - RNA, 19 nt, Artificial Sequence
  Description of Artificial Sequence: Synthetic oligonucleotide
caagugagaaggcugggau

SEQ ID NO: 865354 - RNA, 19 nt, Artificial Sequence
  Description of Artificial Sequence: Synthetic oligonucleotide
gcagccguaucuguaggag

SEQ ID NO: 865355 - RNA, 19 nt, Artificial Sequence
  Description of Artificial Sequence: Synthetic oligonucleotide
aagcuggagucacgccuaa

SEQ ID NO: 865356 - RNA, 19 nt, Artificial Sequence
  Description of Artificial Sequence: Synthetic oligonucleotide
ccaauucugaucagagaca

SEQ ID NO: 865357 - RNA, 19 nt, Artificial Sequence
  Description of Artificial Sequence: Synthetic oligonucleotide
guagcgguauaugaauaua

SEQ ID NO: 865358 - RNA, 19 nt, Artificial Sequence
  Description of Artificial Sequence: Synthetic oligonucleotide
guuaugauacaugguuccu

SEQ ID NO: 865359 - RNA, 19 nt, Artificial Sequence
  Description of Artificial Sequence: Synthetic oligonucleotide
cagcaaaagucaauauagu

SEQ ID NO: 865360 - RNA, 19 nt, Artificial Sequence
  Description of Artificial Sequence: Synthetic oligonucleotide
cuagcaaaugagagucugu

SEQ ID NO: 865361 - RNA, 19 nt, Artificial Sequence
  Description of Artificial Sequence: Synthetic oligonucleotide
guccagcuagcaaaugaga

SEQ ID NO: 865362 - RNA, 19 nt, Artificial Sequence
  Description of Artificial Sequence: Synthetic oligonucleotide
cacgccuaagacagggaaa

SEQ ID NO: 865363 - RNA, 19 nt, Artificial Sequence
  Description of Artificial Sequence: Synthetic oligonucleotide
ugauggagcgaggguaguu

SEQ ID NO: 865364 - RNA, 19 nt, Artificial Sequence
  Description of Artificial Sequence: Synthetic oligonucleotide
uugauggagcgaggguagu

SEQ ID NO: 865365 - RNA, 19 nt, Artificial Sequence
  Description of Artificial Sequence: Synthetic oligonucleotide
ccaaugcuacuaacuaguc

SEQ ID NO: 865366 - RNA, 19 nt, Artificial Sequence
  Description of Artificial Sequence: Synthetic oligonucleotide
gcgguauaugaauauauuu

SEQ ID NO: 865367 - RNA, 19 nt, Artificial Sequence
  Description of Artificial Sequence: Synthetic oligonucleotide
agaggcccaaagucuucau

SEQ ID NO: 865368 - RNA, 19 nt, Artificial Sequence
  Description of Artificial Sequence: Synthetic oligonucleotide
uaguuaggugcagccguau

SEQ ID NO: 865369 - RNA, 19 nt, Artificial Sequence
  Description of Artificial Sequence: Synthetic oligonucleotide
guagagcaagucugccuaa

SEQ ID NO: 865370 - RNA, 19 nt, Artificial Sequence
  Description of Artificial Sequence: Synthetic oligonucleotide
cagguugguauccaguuuu

SEQ ID NO: 865371 - RNA, 19 nt, Artificial Sequence
  Description of Artificial Sequence: Synthetic oligonucleotide
cucugagcugucuuagggu

SEQ ID NO: 865372 - RNA, 19 nt, Artificial Sequence
  Description of Artificial Sequence: Synthetic oligonucleotide
aggaaacuauugccucuua

SEQ ID NO: 865373 - RNA, 19 nt, Artificial Sequence
  Description of Artificial Sequence: Synthetic oligonucleotide
gagucacgccuaagacagg

SEQ ID NO: 865374 - RNA, 19 nt, Artificial Sequence
  Description of Artificial Sequence: Synthetic oligonucleotide
agcgaggguaguuccucuu

SEQ ID NO: 865375 - RNA, 19 nt, Artificial Sequence
  Description of Artificial Sequence: Synthetic oligonucleotide
ggcaauugucccagaaguc

SEQ ID NO: 865376 - RNA, 19 nt, Artificial Sequence
  Description of Artificial Sequence: Synthetic oligonucleotide
agaaaggcccuugcuggua

SEQ ID NO: 865377 - RNA, 19 nt, Artificial Sequence
  Description of Artificial Sequence: Synthetic oligonucleotide
gugaauugccagguaugaa

SEQ ID NO: 865378 - RNA, 19 nt, Artificial Sequence
  Description of Artificial Sequence: Synthetic oligonucleotide
agcuagcaaaugagagucu

SEQ ID NO: 865379 - RNA, 19 nt, Artificial Sequence
  Description of Artificial Sequence: Synthetic oligonucleotide
aucucagaauaggcucugu

SEQ ID NO: 865380 - RNA, 19 nt, Artificial Sequence
  Description of Artificial Sequence: Synthetic oligonucleotide
gcuuuuauauuuccagauu

SEQ ID NO: 865381 - RNA, 19 nt, Artificial Sequence
  Description of Artificial Sequence: Synthetic oligonucleotide
ggaacucauucaagcaauc

SEQ ID NO: 865382 - RNA, 19 nt, Artificial Sequence
  Description of Artificial Sequence: Synthetic oligonucleotide
ggggcaucaaaagcuguuc

SEQ ID NO: 865383 - RNA, 19 nt, Artificial Sequence
  Description of Artificial Sequence: Synthetic oligonucleotide
gaguaggacuucaacuuuu

SEQ ID NO: 865384 - RNA, 19 nt, Artificial Sequence
  Description of Artificial Sequence: Synthetic oligonucleotide
gccccaucucagaauaggc

SEQ ID NO: 865385 - RNA, 19 nt, Artificial Sequence
  Description of Artificial Sequence: Synthetic oligonucleotide
uucaagcaaucaggucaaa

SEQ ID NO: 865386 - RNA, 19 nt, Artificial Sequence
  Description of Artificial Sequence: Synthetic oligonucleotide
auguaacuugaggcaugca

SEQ ID NO: 865387 - RNA, 19 nt, Artificial Sequence
  Description of Artificial Sequence: Synthetic oligonucleotide
gcaaaagguuccaaugcua

SEQ ID NO: 865388 - RNA, 19 nt, Artificial Sequence
  Description of Artificial Sequence: Synthetic oligonucleotide
ggcaucaaaagcuguucau

SEQ ID NO: 865389 - RNA, 19 nt, Artificial Sequence
  Description of Artificial Sequence: Synthetic oligonucleotide
ccggaacuauuuguaacac

SEQ ID NO: 865390 - RNA, 19 nt, Artificial Sequence
  Description of Artificial Sequence: Synthetic oligonucleotide
cugagcugucuuaggguua

SEQ ID NO: 865391 - RNA, 19 nt, Artificial Sequence
  Description of Artificial Sequence: Synthetic oligonucleotide
gcucucuuuggcacaagga

SEQ ID NO: 865392 - RNA, 19 nt, Artificial Sequence
  Description of Artificial Sequence: Synthetic oligonucleotide
guaguuaggugcagccgua

SEQ ID NO: 865393 - RNA, 19 nt, Artificial Sequence
  Description of Artificial Sequence: Synthetic oligonucleotide
caaucaggucaaaugucuu

SEQ ID NO: 865394 - RNA, 19 nt, Artificial Sequence
  Description of Artificial Sequence: Synthetic oligonucleotide
gcccugauuucucugauuu

SEQ ID NO: 865395 - RNA, 19 nt, Artificial Sequence
  Description of Artificial Sequence: Synthetic oligonucleotide
gccaagcacagcuuuuaua

SEQ ID NO: 865396 - RNA, 19 nt, Artificial Sequence
  Description of Artificial Sequence: Synthetic oligonucleotide
cgaagcuugguaagaguca

SEQ ID NO: 865397 - RNA, 19 nt, Artificial Sequence
  Description of Artificial Sequence: Synthetic oligonucleotide
ccagcuagcaaaugagagu

SEQ ID NO: 865398 - RNA, 19 nt, Artificial Sequence
  Description of Artificial Sequence: Synthetic oligonucleotide
gagcgaggguaguuccucu

SEQ ID NO: 865399 - RNA, 19 nt, Artificial Sequence
  Description of Artificial Sequence: Synthetic oligonucleotide
ccauuuaaccaaagaccaa

SEQ ID NO: 865400 - RNA, 19 nt, Artificial Sequence
  Description of Artificial Sequence: Synthetic oligonucleotide
ggacuucagcaaaagucaa

SEQ ID NO: 865401 - RNA, 19 nt, Artificial Sequence
  Description of Artificial Sequence: Synthetic oligonucleotide
gggaacucauucaagcaau

SEQ ID NO: 865402 - RNA, 19 nt, Artificial Sequence
  Description of Artificial Sequence: Synthetic oligonucleotide
gcuuuucugaguaggacuu

SEQ ID NO: 865403 - RNA, 19 nt, Artificial Sequence
  Description of Artificial Sequence: Synthetic oligonucleotide
uggcucucuuuggcacaag

SEQ ID NO: 865404 - RNA, 19 nt, Artificial Sequence
  Description of Artificial Sequence: Synthetic oligonucleotide
cagccguaucuguaggagu

SEQ ID NO: 865405 - RNA, 19 nt, Artificial Sequence
  Description of Artificial Sequence: Synthetic oligonucleotide
aggugcagccguaucugua

SEQ ID NO: 865406 - RNA, 19 nt, Artificial Sequence
  Description of Artificial Sequence: Synthetic oligonucleotide
gucacgccuaagacaggga

SEQ ID NO: 865407 - RNA, 19 nt, Artificial Sequence
  Description of Artificial Sequence: Synthetic oligonucleotide
ccaucucagaauaggcucu

SEQ ID NO: 865408 - RNA, 19 nt, Artificial Sequence
  Description of Artificial Sequence: Synthetic oligonucleotide
acgcacacucugagcuguc

SEQ ID NO: 865409 - RNA, 19 nt, Artificial Sequence
  Description of Artificial Sequence: Synthetic oligonucleotide
caagccaagcacagcuuuu

SEQ ID NO: 865410 - RNA, 19 nt, Artificial Sequence
  Description of Artificial Sequence: Synthetic oligonucleotide
caggaguuggccagucuuu

SEQ ID NO: 865411 - RNA, 19 nt, Artificial Sequence
  Description of Artificial Sequence: Synthetic oligonucleotide
cacgcacacucugagcugu

SEQ ID NO: 865412 - RNA, 19 nt, Artificial Sequence
  Description of Artificial Sequence: Synthetic oligonucleotide
ccaagugagaaggcuggga

SEQ ID NO: 865413 - RNA, 19 nt, Artificial Sequence
  Description of Artificial Sequence: Synthetic oligonucleotide
ugccgggguuccagcuguc

SEQ ID NO: 865414 - RNA, 19 nt, Artificial Sequence
  Description of Artificial Sequence: Synthetic oligonucleotide
caggaaacuauugccucuu

SEQ ID NO: 865415 - RNA, 19 nt, Artificial Sequence
  Description of Artificial Sequence: Synthetic oligonucleotide
gccguaucuguaggaguga

SEQ ID NO: 865416 - RNA, 19 nt, Artificial Sequence
  Description of Artificial Sequence: Synthetic oligonucleotide
caucaggcaccggaacuau

SEQ ID NO: 865417 - RNA, 19 nt, Artificial Sequence
  Description of Artificial Sequence: Synthetic oligonucleotide
gcccuugcugguaggcuuc

SEQ ID NO: 865418 - RNA, 19 nt, Artificial Sequence
  Description of Artificial Sequence: Synthetic oligonucleotide
ggaggcucaaucagcuuuu

SEQ ID NO: 865419 - RNA, 19 nt, Artificial Sequence
  Description of Artificial Sequence: Synthetic oligonucleotide
cggaacuauuuguaacacu

SEQ ID NO: 865420 - RNA, 19 nt, Artificial Sequence
  Description of Artificial Sequence: Synthetic oligonucleotide
ccguaucuguaggagugaa

SEQ ID NO: 865421 - RNA, 19 nt, Artificial Sequence
  Description of Artificial Sequence: Synthetic oligonucleotide
gcgaggguaguuccucuuu

SEQ ID NO: 865422 - RNA, 19 nt, Artificial Sequence
  Description of Artificial Sequence: Synthetic oligonucleotide
ggcccuggaugcuguuccu

SEQ ID NO: 865423 - RNA, 19 nt, Artificial Sequence
  Description of Artificial Sequence: Synthetic oligonucleotide
gagcugucuuaggguuaau

SEQ ID NO: 865424 - RNA, 19 nt, Artificial Sequence
  Description of Artificial Sequence: Synthetic oligonucleotide
aaggcuucgucucucaugg

SEQ ID NO: 865425 - RNA, 19 nt, Artificial Sequence
  Description of Artificial Sequence: Synthetic oligonucleotide
cauagagugcccauaaucg

SEQ ID NO: 865426 - RNA, 19 nt, Artificial Sequence
  Description of Artificial Sequence: Synthetic oligonucleotide
aagugaaagggcuuagccg

SEQ ID NO: 865427 - RNA, 19 nt, Artificial Sequence
  Description of Artificial Sequence: Synthetic oligonucleotide
uugguuuccggaaaggagg

SEQ ID NO: 865428 - RNA, 19 nt, Artificial Sequence
  Description of Artificial Sequence: Synthetic oligonucleotide
aaaggcgcaucucaaacuc

SEQ ID NO: 865429 - RNA, 19 nt, Artificial Sequence
  Description of Artificial Sequence: Synthetic oligonucleotide
ucauuuugucgguagaggg

SEQ ID NO: 865430 - RNA, 19 nt, Artificial Sequence
  Description of Artificial Sequence: Synthetic oligonucleotide
gaaaacuucgaucuugaug

SEQ ID NO: 865431 - RNA, 19 nt, Artificial Sequence
  Description of Artificial Sequence: Synthetic oligonucleotide
aaggacacacgauaccucg

SEQ ID NO: 865432 - RNA, 19 nt, Artificial Sequence
  Description of Artificial Sequence: Synthetic oligonucleotide
accgaugccaagcugaugg

SEQ ID NO: 865433 - RNA, 19 nt, Artificial Sequence
  Description of Artificial Sequence: Synthetic oligonucleotide
uagccgauuguacugaagg

SEQ ID NO: 865434 - RNA, 19 nt, Artificial Sequence
  Description of Artificial Sequence: Synthetic oligonucleotide
ugggguagauucuagagag

SEQ ID NO: 865435 - RNA, 19 nt, Artificial Sequence
  Description of Artificial Sequence: Synthetic oligonucleotide
aacaagcgcguucugugcc

SEQ ID NO: 865436 - RNA, 19 nt, Artificial Sequence
  Description of Artificial Sequence: Synthetic oligonucleotide
guaguuguucuucaaaggc

SEQ ID NO: 865437 - RNA, 19 nt, Artificial Sequence
  Description of Artificial Sequence: Synthetic oligonucleotide
ugaaacaguuggcuggagg

SEQ ID NO: 865438 - RNA, 19 nt, Artificial Sequence
  Description of Artificial Sequence: Synthetic oligonucleotide
uagagugcccauaaucggg

SEQ ID NO: 865439 - RNA, 19 nt, Artificial Sequence
  Description of Artificial Sequence: Synthetic oligonucleotide
ucauagagugcccauaauc

SEQ ID NO: 865440 - RNA, 19 nt, Artificial Sequence
  Description of Artificial Sequence: Synthetic oligonucleotide
agcuggcuaccacagaucc

SEQ ID NO: 865441 - RNA, 19 nt, Artificial Sequence
  Description of Artificial Sequence: Synthetic oligonucleotide
aauuggaggaguccagucu

SEQ ID NO: 865442 - RNA, 19 nt, Artificial Sequence
  Description of Artificial Sequence: Synthetic oligonucleotide
ucauaguaacugaugaggu

SEQ ID NO: 865443 - RNA, 19 nt, Artificial Sequence
  Description of Artificial Sequence: Synthetic oligonucleotide
auucgaaggagccuucccg

SEQ ID NO: 865444 - RNA, 19 nt, Artificial Sequence
  Description of Artificial Sequence: Synthetic oligonucleotide
aaucggguucagcuguccc

SEQ ID NO: 865445 - RNA, 19 nt, Artificial Sequence
  Description of Artificial Sequence: Synthetic oligonucleotide
aggguuacugaucuggaag

SEQ ID NO: 865446 - RNA, 19 nt, Artificial Sequence
  Description of Artificial Sequence: Synthetic oligonucleotide
uacacacacuugaaagucg

SEQ ID NO: 865447 - RNA, 19 nt, Artificial Sequence
  Description of Artificial Sequence: Synthetic oligonucleotide
ugaaaauugagugccacaa

SEQ ID NO: 865448 - RNA, 19 nt, Artificial Sequence
  Description of Artificial Sequence: Synthetic oligonucleotide
ugaaagucggcauaggguu

SEQ ID NO: 865449 - RNA, 19 nt, Artificial Sequence
  Description of Artificial Sequence: Synthetic oligonucleotide
uucauuuugucgguagagg

SEQ ID NO: 865450 - RNA, 19 nt, Artificial Sequence
  Description of Artificial Sequence: Synthetic oligonucleotide
auggcaaucugacaggcug

SEQ ID NO: 865451 - RNA, 19 nt, Artificial Sequence
  Description of Artificial Sequence: Synthetic oligonucleotide
gauugcggcccucauagag

SEQ ID NO: 865452 - RNA, 19 nt, Artificial Sequence
  Description of Artificial Sequence: Synthetic oligonucleotide
cauuuugucgguagagggg

SEQ ID NO: 865453 - RNA, 19 nt, Artificial Sequence
  Description of Artificial Sequence: Synthetic oligonucleotide
auaugaguugggcucauug

SEQ ID NO: 865454 - RNA, 19 nt, Artificial Sequence
  Description of Artificial Sequence: Synthetic oligonucleotide
cuugaucuuucccucagcc

SEQ ID NO: 865455 - RNA, 19 nt, Artificial Sequence
  Description of Artificial Sequence: Synthetic oligonucleotide
ucaaacucguugcagcgca

SEQ ID NO: 865456 - RNA, 19 nt, Artificial Sequence
  Description of Artificial Sequence: Synthetic oligonucleotide
aacuucgaucuugaugagc

SEQ ID NO: 865457 - RNA, 19 nt, Artificial Sequence
  Description of Artificial Sequence: Synthetic oligonucleotide
cuugggguagauucuagag

SEQ ID NO: 865458 - RNA, 19 nt, Artificial Sequence
  Description of Artificial Sequence: Synthetic oligonucleotide
uuuacugggaaaguagccu

SEQ ID NO: 865459 - RNA, 19 nt, Artificial Sequence
  Description of Artificial Sequence: Synthetic oligonucleotide
acugaucuggaagugaaag

SEQ ID NO: 865460 - RNA, 19 nt, Artificial Sequence
  Description of Artificial Sequence: Synthetic oligonucleotide
gaaaauugagugccacaag

SEQ ID NO: 865461 - RNA, 19 nt, Artificial Sequence
  Description of Artificial Sequence: Synthetic oligonucleotide
ugugccaaucuuuucuuca

SEQ ID NO: 865462 - RNA, 19 nt, Artificial Sequence
  Description of Artificial Sequence: Synthetic oligonucleotide
uuacugggaaaguagccug

SEQ ID NO: 865463 - RNA, 19 nt, Artificial Sequence
  Description of Artificial Sequence: Synthetic oligonucleotide
ucggcggcaacaucuaggg

SEQ ID NO: 865464 - RNA, 19 nt, Artificial Sequence
  Description of Artificial Sequence: Synthetic oligonucleotide
guaacaagcgcguucugug

SEQ ID NO: 865465 - RNA, 19 nt, Artificial Sequence
  Description of Artificial Sequence: Synthetic oligonucleotide
uuucccguagggauguacc

SEQ ID NO: 865466 - RNA, 19 nt, Artificial Sequence
  Description of Artificial Sequence: Synthetic oligonucleotide
uuacugaucuggaagugaa

SEQ ID NO: 865467 - RNA, 19 nt, Artificial Sequence
  Description of Artificial Sequence: Synthetic oligonucleotide
auuugucugugggacaggc

SEQ ID NO: 865468 - RNA, 19 nt, Artificial Sequence
  Description of Artificial Sequence: Synthetic oligonucleotide
aucuagggaccagugagcc

SEQ ID NO: 865469 - RNA, 19 nt, Artificial Sequence
  Description of Artificial Sequence: Synthetic oligonucleotide
aagagggccugguucaucu

SEQ ID NO: 865470 - RNA, 19 nt, Artificial Sequence
  Description of Artificial Sequence: Synthetic oligonucleotide
aacaucuagggaccaguga

SEQ ID NO: 865471 - RNA, 19 nt, Artificial Sequence
  Description of Artificial Sequence: Synthetic oligonucleotide
caaucugacaggcuggcac

SEQ ID NO: 865472 - RNA, 19 nt, Artificial Sequence
  Description of Artificial Sequence: Synthetic oligonucleotide
uacaccacaaagcguagaa

SEQ ID NO: 865473 - RNA, 19 nt, Artificial Sequence
  Description of Artificial Sequence: Synthetic oligonucleotide
ucucaugggcauuugucug

SEQ ID NO: 865474 - RNA, 19 nt, Artificial Sequence
  Description of Artificial Sequence: Synthetic oligonucleotide
ugguucaucugcauaggcu

SEQ ID NO: 865475 - RNA, 19 nt, Artificial Sequence
  Description of Artificial Sequence: Synthetic oligonucleotide
uuagcagggaaaacuucga

SEQ ID NO: 865476 - RNA, 19 nt, Artificial Sequence
  Description of Artificial Sequence: Synthetic oligonucleotide
ucuagugcuuccucguuga

SEQ ID NO: 865477 - RNA, 19 nt, Artificial Sequence
  Description of Artificial Sequence: Synthetic oligonucleotide
uggcauaugaguugggcuc

SEQ ID NO: 865478 - RNA, 19 nt, Artificial Sequence
  Description of Artificial Sequence: Synthetic oligonucleotide
ugcugucguacucugcucc

SEQ ID NO: 865479 - RNA, 19 nt, Artificial Sequence
  Description of Artificial Sequence: Synthetic oligonucleotide
acuucgaucuugaugagca

SEQ ID NO: 865480 - RNA, 19 nt, Artificial Sequence
  Description of Artificial Sequence: Synthetic oligonucleotide
aaaggacacacgauaccuc

SEQ ID NO: 865481 - RNA, 19 nt, Artificial Sequence
  Description of Artificial Sequence: Synthetic oligonucleotide
gauggcauaugaguugggc

SEQ ID NO: 865482 - RNA, 19 nt, Artificial Sequence
  Description of Artificial Sequence: Synthetic oligonucleotide
cugguaucgggauucgaag

SEQ ID NO: 865483 - RNA, 19 nt, Artificial Sequence
  Description of Artificial Sequence: Synthetic oligonucleotide
aacaggccggcaguagacc

SEQ ID NO: 865484 - RNA, 19 nt, Artificial Sequence
  Description of Artificial Sequence: Synthetic oligonucleotide
auggcauaugaguugggcu

SEQ ID NO: 865485 - RNA, 19 nt, Artificial Sequence
  Description of Artificial Sequence: Synthetic oligonucleotide
cuuccccucaguaagccug

SEQ ID NO: 865486 - RNA, 19 nt, Artificial Sequence
  Description of Artificial Sequence: Synthetic oligonucleotide
aggaucauaauuggaggag

SEQ ID NO: 865487 - RNA, 19 nt, Artificial Sequence
  Description of Artificial Sequence: Synthetic oligonucleotide
cauaguaacugaugagguc

SEQ ID NO: 865488 - RNA, 19 nt, Artificial Sequence
  Description of Artificial Sequence: Synthetic oligonucleotide
aaagucggcauaggguuug

SEQ ID NO: 865489 - RNA, 19 nt, Artificial Sequence
  Description of Artificial Sequence: Synthetic oligonucleotide
caaauggcugcugguaucg

SEQ ID NO: 865490 - RNA, 19 nt, Artificial Sequence
  Description of Artificial Sequence: Synthetic oligonucleotide
caucugaggcccuuucccg

SEQ ID NO: 865491 - RNA, 19 nt, Artificial Sequence
  Description of Artificial Sequence: Synthetic oligonucleotide
aggcuggcacaucuaagac

SEQ ID NO: 865492 - RNA, 19 nt, Artificial Sequence
  Description of Artificial Sequence: Synthetic oligonucleotide
ugagccaccgaugccaagc

SEQ ID NO: 865493 - RNA, 19 nt, Artificial Sequence
  Description of Artificial Sequence: Synthetic oligonucleotide
uccggaaaggaggacaugu

SEQ ID NO: 865494 - RNA, 19 nt, Artificial Sequence
  Description of Artificial Sequence: Synthetic oligonucleotide
caugucccgguaacaagcg

SEQ ID NO: 865495 - RNA, 19 nt, Artificial Sequence
  Description of Artificial Sequence: Synthetic oligonucleotide
ggcggcaacaucuagggac

SEQ ID NO: 865496 - RNA, 19 nt, Artificial Sequence
  Description of Artificial Sequence: Synthetic oligonucleotide
auggucugcgagaugcucc

SEQ ID NO: 865497 - RNA, 19 nt, Artificial Sequence
  Description of Artificial Sequence: Synthetic oligonucleotide
aagggaacaggccggcagu

SEQ ID NO: 865498 - RNA, 19 nt, Artificial Sequence
  Description of Artificial Sequence: Synthetic oligonucleotide
cucucaugguguuuggcug

SEQ ID NO: 865499 - RNA, 19 nt, Artificial Sequence
  Description of Artificial Sequence: Synthetic oligonucleotide
cucauugcguuuccguacc

SEQ ID NO: 865500 - RNA, 19 nt, Artificial Sequence
  Description of Artificial Sequence: Synthetic oligonucleotide
agcuguagccgauuguacu

SEQ ID NO: 865501 - RNA, 19 nt, Artificial Sequence
  Description of Artificial Sequence: Synthetic oligonucleotide
cuggcuaccacagauccac

SEQ ID NO: 865502 - RNA, 19 nt, Artificial Sequence
  Description of Artificial Sequence: Synthetic oligonucleotide
ugcgugguaccacucuuug

SEQ ID NO: 865503 - RNA, 19 nt, Artificial Sequence
  Description of Artificial Sequence: Synthetic oligonucleotide
gcuggcacaucuaagaccc

SEQ ID NO: 865504 - RNA, 19 nt, Artificial Sequence
  Description of Artificial Sequence: Synthetic oligonucleotide
gaauggcaaucugacaggc

SEQ ID NO: 865505 - RNA, 19 nt, Artificial Sequence
  Description of Artificial Sequence: Synthetic oligonucleotide
ggcagaggaucauaauugg

SEQ ID NO: 865506 - RNA, 19 nt, Artificial Sequence
  Description of Artificial Sequence: Synthetic oligonucleotide
ucggcauaggguuugccuc

SEQ ID NO: 865507 - RNA, 19 nt, Artificial Sequence
  Description of Artificial Sequence: Synthetic oligonucleotide
caucuagggaccagugagc

SEQ ID NO: 865508 - RNA, 19 nt, Artificial Sequence
  Description of Artificial Sequence: Synthetic oligonucleotide
uccuuagcagggaaaacuu

SEQ ID NO: 865509 - RNA, 19 nt, Artificial Sequence
  Description of Artificial Sequence: Synthetic oligonucleotide
ugguuuccggaaaggagga

SEQ ID NO: 865510 - RNA, 19 nt, Artificial Sequence
  Description of Artificial Sequence: Synthetic oligonucleotide
ggagaagacgaagagccgg

SEQ ID NO: 865511 - RNA, 19 nt, Artificial Sequence
  Description of Artificial Sequence: Synthetic oligonucleotide
aucuuccccucaguaagcc

SEQ ID NO: 865512 - RNA, 19 nt, Artificial Sequence
  Description of Artificial Sequence: Synthetic oligonucleotide
ucgaaggagccuucccggg

SEQ ID NO: 865513 - RNA, 19 nt, Artificial Sequence
  Description of Artificial Sequence: Synthetic oligonucleotide
acacacgauaccucggcca

SEQ ID NO: 865514 - RNA, 19 nt, Artificial Sequence
  Description of Artificial Sequence: Synthetic oligonucleotide
aggucaaccaggcugucaa

SEQ ID NO: 865515 - RNA, 19 nt, Artificial Sequence
  Description of Artificial Sequence: Synthetic oligonucleotide
cauuguccacuacaaacuc

SEQ ID NO: 865516 - RNA, 19 nt, Artificial Sequence
  Description of Artificial Sequence: Synthetic oligonucleotide
agagagcuguagccgauug

SEQ ID NO: 865517 - RNA, 19 nt, Artificial Sequence
  Description of Artificial Sequence: Synthetic oligonucleotide
uugcggcccucauagagug

SEQ ID NO: 865518 - RNA, 19 nt, Artificial Sequence
  Description of Artificial Sequence: Synthetic oligonucleotide
ucgucucucaugguguuug

SEQ ID NO: 865519 - RNA, 19 nt, Artificial Sequence
  Description of Artificial Sequence: Synthetic oligonucleotide
cucaaugcagaugacagaa

SEQ ID NO: 865520 - RNA, 19 nt, Artificial Sequence
  Description of Artificial Sequence: Synthetic oligonucleotide
guaagccuggcaucugcag

SEQ ID NO: 865521 - RNA, 19 nt, Artificial Sequence
  Description of Artificial Sequence: Synthetic oligonucleotide
gacacacgauaccucggcc

SEQ ID NO: 865522 - RNA, 19 nt, Artificial Sequence
  Description of Artificial Sequence: Synthetic oligonucleotide
auaauuggaggaguccagu

SEQ ID NO: 865523 - RNA, 19 nt, Artificial Sequence
  Description of Artificial Sequence: Synthetic oligonucleotide
auucuguaugauggcacuc

SEQ ID NO: 865524 - RNA, 19 nt, Artificial Sequence
  Description of Artificial Sequence: Synthetic oligonucleotide
cucgccaccagccaccauc

SEQ ID NO: 865525 - RNA, 19 nt, Artificial Sequence
  Description of Artificial Sequence: Synthetic oligonucleotide
cacuugaaagucggcauag

SEQ ID NO: 865526 - RNA, 19 nt, Artificial Sequence
  Description of Artificial Sequence: Synthetic oligonucleotide
gucaccguucuccuuagca

SEQ ID NO: 865527 - RNA, 19 nt, Artificial Sequence
  Description of Artificial Sequence: Synthetic oligonucleotide
ugcguuuccguaccaggaa

SEQ ID NO: 865528 - RNA, 19 nt, Artificial Sequence
  Description of Artificial Sequence: Synthetic oligonucleotide
ugugggacaggcuccgaaa

SEQ ID NO: 865529 - RNA, 19 nt, Artificial Sequence
  Description of Artificial Sequence: Synthetic oligonucleotide
uccgaaaggcgcaucucaa

SEQ ID NO: 865530 - RNA, 19 nt, Artificial Sequence
  Description of Artificial Sequence: Synthetic oligonucleotide
aaggcgcaucucaaacucg

SEQ ID NO: 865531 - RNA, 19 nt, Artificial Sequence
  Description of Artificial Sequence: Synthetic oligonucleotide
uucccguagggauguacca

SEQ ID NO: 865532 - RNA, 19 nt, Artificial Sequence
  Description of Artificial Sequence: Synthetic oligonucleotide
aaauggcugcugguaucgg

SEQ ID NO: 865533 - RNA, 19 nt, Artificial Sequence
  Description of Artificial Sequence: Synthetic oligonucleotide
ucaaagggaacaggccggc

SEQ ID NO: 865534 - RNA, 19 nt, Artificial Sequence
  Description of Artificial Sequence: Synthetic oligonucleotide
guaaaggucagcucauccu

SEQ ID NO: 865535 - RNA, 19 nt, Artificial Sequence
  Description of Artificial Sequence: Synthetic oligonucleotide
agaugcggaagucuucaaa

SEQ ID NO: 865536 - RNA, 19 nt, Artificial Sequence
  Description of Artificial Sequence: Synthetic oligonucleotide
gguuccagaccucggaggc

SEQ ID NO: 865537 - RNA, 19 nt, Artificial Sequence
  Description of Artificial Sequence: Synthetic oligonucleotide
gcagggaaaacuucgaucu

SEQ ID NO: 865538 - RNA, 19 nt, Artificial Sequence
  Description of Artificial Sequence: Synthetic oligonucleotide
gugggacaggcuccgaaag

SEQ ID NO: 865539 - RNA, 19 nt, Artificial Sequence
  Description of Artificial Sequence: Synthetic oligonucleotide
caguaagccuggcaucugc

SEQ ID NO: 865540 - RNA, 19 nt, Artificial Sequence
  Description of Artificial Sequence: Synthetic oligonucleotide
gucguacucugcuccagcc

SEQ ID NO: 865541 - RNA, 19 nt, Artificial Sequence
  Description of Artificial Sequence: Synthetic oligonucleotide
aaccaggcugucaaacuca

SEQ ID NO: 865542 - RNA, 19 nt, Artificial Sequence
  Description of Artificial Sequence: Synthetic oligonucleotide
uagcgcagcuucauuuugu

SEQ ID NO: 865543 - RNA, 19 nt, Artificial Sequence
  Description of Artificial Sequence: Synthetic oligonucleotide
augcagaugacagaagguu

SEQ ID NO: 865544 - RNA, 19 nt, Artificial Sequence
  Description of Artificial Sequence: Synthetic oligonucleotide
agccgauuguacugaagga

SEQ ID NO: 865545 - RNA, 19 nt, Artificial Sequence
  Description of Artificial Sequence: Synthetic oligonucleotide
guagccugagccaagaagu

SEQ ID NO: 865546 - RNA, 19 nt, Artificial Sequence
  Description of Artificial Sequence: Synthetic oligonucleotide
ucuguaugauggcacucuu

SEQ ID NO: 865547 - RNA, 19 nt, Artificial Sequence
  Description of Artificial Sequence: Synthetic oligonucleotide
ucggccauucuuuggcaga

SEQ ID NO: 865548 - RNA, 19 nt, Artificial Sequence
  Description of Artificial Sequence: Synthetic oligonucleotide
caggcuggcacaucuaaga

SEQ ID NO: 865549 - RNA, 19 nt, Artificial Sequence
  Description of Artificial Sequence: Synthetic oligonucleotide
cucaggacgaauggcaauc

SEQ ID NO: 865550 - RNA, 19 nt, Artificial Sequence
  Description of Artificial Sequence: Synthetic oligonucleotide
guuuccggaaaggaggaca

SEQ ID NO: 865551 - RNA, 19 nt, Artificial Sequence
  Description of Artificial Sequence: Synthetic oligonucleotide
uaccucggccauucuuugg

SEQ ID NO: 865552 - RNA, 19 nt, Artificial Sequence
  Description of Artificial Sequence: Synthetic oligonucleotide
aggacgaauggcaaucuga

SEQ ID NO: 865553 - RNA, 19 nt, Artificial Sequence
  Description of Artificial Sequence: Synthetic oligonucleotide
ucacggggcacgcgcauca

SEQ ID NO: 865554 - RNA, 19 nt, Artificial Sequence
  Description of Artificial Sequence: Synthetic oligonucleotide
agagcuguagccgauugua

SEQ ID NO: 865555 - RNA, 19 nt, Artificial Sequence
  Description of Artificial Sequence: Synthetic oligonucleotide
gcuguagccgauuguacug

SEQ ID NO: 865556 - RNA, 19 nt, Artificial Sequence
  Description of Artificial Sequence: Synthetic oligonucleotide
guagcgcagcuucauuuug

SEQ ID NO: 865557 - RNA, 19 nt, Artificial Sequence
  Description of Artificial Sequence: Synthetic oligonucleotide
uagcagggaaaacuucgau

SEQ ID NO: 865558 - RNA, 19 nt, Artificial Sequence
  Description of Artificial Sequence: Synthetic oligonucleotide
gacgaauggcaaucugaca

SEQ ID NO: 865559 - RNA, 19 nt, Artificial Sequence
  Description of Artificial Sequence: Synthetic oligonucleotide
cuguacucggcagugcuug

SEQ ID NO: 865560 - RNA, 19 nt, Artificial Sequence
  Description of Artificial Sequence: Synthetic oligonucleotide
aagucggcauaggguuugc

SEQ ID NO: 865561 - RNA, 19 nt, Artificial Sequence
  Description of Artificial Sequence: Synthetic oligonucleotide
uugugagucggcggcaaca

SEQ ID NO: 865562 - RNA, 19 nt, Artificial Sequence
  Description of Artificial Sequence: Synthetic oligonucleotide
ucccucagcccggaaagag

SEQ ID NO: 865563 - RNA, 19 nt, Artificial Sequence
  Description of Artificial Sequence: Synthetic oligonucleotide
gucggcggcaacaucuagg

SEQ ID NO: 865564 - RNA, 19 nt, Artificial Sequence
  Description of Artificial Sequence: Synthetic oligonucleotide
guuuccguaccaggaaggc

SEQ ID NO: 865565 - RNA, 19 nt, Artificial Sequence
  Description of Artificial Sequence: Synthetic oligonucleotide
aauggcaaucugacaggcu

SEQ ID NO: 865566 - RNA, 19 nt, Artificial Sequence
  Description of Artificial Sequence: Synthetic oligonucleotide
ccgauuguacugaaggaac

SEQ ID NO: 865567 - RNA, 19 nt, Artificial Sequence
  Description of Artificial Sequence: Synthetic oligonucleotide
gguaucgggauucgaagga

SEQ ID NO: 865568 - RNA, 19 nt, Artificial Sequence
  Description of Artificial Sequence: Synthetic oligonucleotide
uuagccggccacacagggu

SEQ ID NO: 865569 - RNA, 19 nt, Artificial Sequence
  Description of Artificial Sequence: Synthetic oligonucleotide
ucuagggaccagugagcca

SEQ ID NO: 865570 - RNA, 19 nt, Artificial Sequence
  Description of Artificial Sequence: Synthetic oligonucleotide
acaggccggcaguagacca

SEQ ID NO: 865571 - RNA, 19 nt, Artificial Sequence
  Description of Artificial Sequence: Synthetic oligonucleotide
cucaaacucguugcagcgc

SEQ ID NO: 865572 - RNA, 19 nt, Artificial Sequence
  Description of Artificial Sequence: Synthetic oligonucleotide
ggcuucgucucucauggug

SEQ ID NO: 865573 - RNA, 19 nt, Artificial Sequence
  Description of Artificial Sequence: Synthetic oligonucleotide
agcgcguucugugccaauc

SEQ ID NO: 865574 - RNA, 19 nt, Artificial Sequence
  Description of Artificial Sequence: Synthetic oligonucleotide
ucaggcuugcgugguacca

SEQ ID NO: 865575 - RNA, 19 nt, Artificial Sequence
  Description of Artificial Sequence: Synthetic oligonucleotide
ucguucccgacugucaaaa

SEQ ID NO: 865576 - RNA, 19 nt, Artificial Sequence
  Description of Artificial Sequence: Synthetic oligonucleotide
gaacaggccggcaguagac

SEQ ID NO: 865577 - RNA, 19 nt, Artificial Sequence
  Description of Artificial Sequence: Synthetic oligonucleotide
ggacacacgauaccucggc

SEQ ID NO: 865578 - RNA, 19 nt, Artificial Sequence
  Description of Artificial Sequence: Synthetic oligonucleotide
cacugaagggacugagguc

SEQ ID NO: 865579 - RNA, 19 nt, Artificial Sequence
  Description of Artificial Sequence: Synthetic oligonucleotide
ucaggacgaauggcaaucu

SEQ ID NO: 865580 - RNA, 19 nt, Artificial Sequence
  Description of Artificial Sequence: Synthetic oligonucleotide
uguagccgauuguacugaa

SEQ ID NO: 865581 - RNA, 19 nt, Artificial Sequence
  Description of Artificial Sequence: Synthetic oligonucleotide
acaagcgcguucugugcca

SEQ ID NO: 865582 - RNA, 19 nt, Artificial Sequence
  Description of Artificial Sequence: Synthetic oligonucleotide
ucauugcguuuccguacca

SEQ ID NO: 865583 - RNA, 19 nt, Artificial Sequence
  Description of Artificial Sequence: Synthetic oligonucleotide
cauugcguuuccguaccag

SEQ ID NO: 865584 - RNA, 19 nt, Artificial Sequence
  Description of Artificial Sequence: Synthetic oligonucleotide
ggacgaauggcaaucugac

SEQ ID NO: 865585 - RNA, 19 nt, Artificial Sequence
  Description of Artificial Sequence: Synthetic oligonucleotide
uaaucggguucagcugucc

SEQ ID NO: 865586 - RNA, 19 nt, Artificial Sequence
  Description of Artificial Sequence: Synthetic oligonucleotide
auaaucggguucagcuguc

SEQ ID NO: 865587 - RNA, 19 nt, Artificial Sequence
  Description of Artificial Sequence: Synthetic oligonucleotide
agagugcccauaaucgggu

SEQ ID NO: 865588 - RNA, 19 nt, Artificial Sequence
  Description of Artificial Sequence: Synthetic oligonucleotide
ucucuagugcuuccucguu

SEQ ID NO: 865589 - RNA, 19 nt, Artificial Sequence
  Description of Artificial Sequence: Synthetic oligonucleotide
cuccgaaaggcgcaucuca

SEQ ID NO: 865590 - RNA, 19 nt, Artificial Sequence
  Description of Artificial Sequence: Synthetic oligonucleotide
gcucauugcguuuccguac

SEQ ID NO: 865591 - RNA, 19 nt, Artificial Sequence
  Description of Artificial Sequence: Synthetic oligonucleotide
agucggcauaggguuugcc

SEQ ID NO: 865592 - RNA, 19 nt, Artificial Sequence
  Description of Artificial Sequence: Synthetic oligonucleotide
guauccugucuucaggccu

SEQ ID NO: 865593 - RNA, 19 nt, Artificial Sequence
  Description of Artificial Sequence: Synthetic oligonucleotide
gggaaaguagccugagcca

SEQ ID NO: 865594 - RNA, 19 nt, Artificial Sequence
  Description of Artificial Sequence: Synthetic oligonucleotide
uucaggccuuuuacuggga

SEQ ID NO: 865595 - RNA, 19 nt, Artificial Sequence
  Description of Artificial Sequence: Synthetic oligonucleotide
gcgcaucucaaacucguug

SEQ ID NO: 865596 - RNA, 19 nt, Artificial Sequence
  Description of Artificial Sequence: Synthetic oligonucleotide
uagccugagccaagaaguu

SEQ ID NO: 865597 - RNA, 19 nt, Artificial Sequence
  Description of Artificial Sequence: Synthetic oligonucleotide
ucccguagggauguaccac

SEQ ID NO: 865598 - RNA, 19 nt, Artificial Sequence
  Description of Artificial Sequence: Synthetic oligonucleotide
agucggcggcaacaucuag

SEQ ID NO: 865599 - RNA, 19 nt, Artificial Sequence
  Description of Artificial Sequence: Synthetic oligonucleotide
aggacacacgauaccucgg

SEQ ID NO: 865600 - RNA, 19 nt, Artificial Sequence
  Description of Artificial Sequence: Synthetic oligonucleotide
uggugcugucguacucugc

SEQ ID NO: 865601 - RNA, 19 nt, Artificial Sequence
  Description of Artificial Sequence: Synthetic oligonucleotide
agcauauguucagcuugag

SEQ ID NO: 865602 - RNA, 19 nt, Artificial Sequence
  Description of Artificial Sequence: Synthetic oligonucleotide
guagccgauuguacugaag

SEQ ID NO: 865603 - RNA, 19 nt, Artificial Sequence
  Description of Artificial Sequence: Synthetic oligonucleotide
uucguucccgacugucaaa

SEQ ID NO: 865604 - RNA, 19 nt, Artificial Sequence
  Description of Artificial Sequence: Synthetic oligonucleotide
aggcuugcgugguaccacu

SEQ ID NO: 865605 - RNA, 19 nt, Artificial Sequence
  Description of Artificial Sequence: Synthetic oligonucleotide
uaggaugacuggguugauc

SEQ ID NO: 865606 - RNA, 19 nt, Artificial Sequence
  Description of Artificial Sequence: Synthetic oligonucleotide
uugcgugguaccacucuuu

SEQ ID NO: 865607 - RNA, 19 nt, Artificial Sequence
  Description of Artificial Sequence: Synthetic oligonucleotide
acaggcuggcacaucuaag

SEQ ID NO: 865608 - RNA, 19 nt, Artificial Sequence
  Description of Artificial Sequence: Synthetic oligonucleotide
agcccggaaagagauggca

SEQ ID NO: 865609 - RNA, 19 nt, Artificial Sequence
  Description of Artificial Sequence: Synthetic oligonucleotide
cagugagccaccgaugcca

SEQ ID NO: 865610 - RNA, 19 nt, Artificial Sequence
  Description of Artificial Sequence: Synthetic oligonucleotide
gcaguagaccacaagcuca

SEQ ID NO: 865611 - RNA, 19 nt, Artificial Sequence
  Description of Artificial Sequence: Synthetic oligonucleotide
aguaagccuggcaucugca

SEQ ID NO: 865612 - RNA, 19 nt, Artificial Sequence
  Description of Artificial Sequence: Synthetic oligonucleotide
gcguuuccguaccaggaag

SEQ ID NO: 865613 - RNA, 19 nt, Artificial Sequence
  Description of Artificial Sequence: Synthetic oligonucleotide
cuuucccucagcccggaaa

SEQ ID NO: 865614 - RNA, 19 nt, Artificial Sequence
  Description of Artificial Sequence: Synthetic oligonucleotide
ucggcagugcuugaucuuu

SEQ ID NO: 865615 - RNA, 19 nt, Artificial Sequence
  Description of Artificial Sequence: Synthetic oligonucleotide
caggacgaauggcaaucug

SEQ ID NO: 865616 - RNA, 19 nt, Artificial Sequence
  Description of Artificial Sequence: Synthetic oligonucleotide
ucuugugagucggcggcaa

SEQ ID NO: 865617 - RNA, 19 nt, Artificial Sequence
  Description of Artificial Sequence: Synthetic oligonucleotide
gguuacugaucuggaagug

SEQ ID NO: 865618 - RNA, 19 nt, Artificial Sequence
  Description of Artificial Sequence: Synthetic oligonucleotide
gucaggcuugcgugguacc

SEQ ID NO: 865619 - RNA, 19 nt, Artificial Sequence
  Description of Artificial Sequence: Synthetic oligonucleotide
gucggcauaggguuugccu

SEQ ID NO: 865620 - RNA, 19 nt, Artificial Sequence
  Description of Artificial Sequence: Synthetic oligonucleotide
ggagaugcggaagucuuca

SEQ ID NO: 865621 - RNA, 19 nt, Artificial Sequence
  Description of Artificial Sequence: Synthetic oligonucleotide
ggugcugucguacucugcu

SEQ ID NO: 865622 - RNA, 19 nt, Artificial Sequence
  Description of Artificial Sequence: Synthetic oligonucleotide
aggcgcaucucaaacucgu

SEQ ID NO: 865623 - RNA, 19 nt, Artificial Sequence
  Description of Artificial Sequence: Synthetic oligonucleotide
ugccacaagcuggcuacca

SEQ ID NO: 865624 - RNA, 19 nt, Artificial Sequence
  Description of Artificial Sequence: Synthetic oligonucleotide
cuugugagucggcggcaac

SEQ ID NO: 865625 - RNA, 19 nt, Artificial Sequence
  Description of Artificial Sequence: Synthetic oligonucleotide
cacacuugaaagucggcau

SEQ ID NO: 865626 - RNA, 19 nt, Artificial Sequence
  Description of Artificial Sequence: Synthetic oligonucleotide
aggacaugucccgguaaca

SEQ ID NO: 865627 - RNA, 19 nt, Artificial Sequence
  Description of Artificial Sequence: Synthetic oligonucleotide
caccauaguccccucgcca

SEQ ID NO: 865628 - RNA, 19 nt, Artificial Sequence
  Description of Artificial Sequence: Synthetic oligonucleotide
gcgcagcuucauuuugucg

SEQ ID NO: 865629 - RNA, 19 nt, Artificial Sequence
  Description of Artificial Sequence: Synthetic oligonucleotide
uggcuaccacagauccaca

SEQ ID NO: 865630 - RNA, 19 nt, Artificial Sequence
  Description of Artificial Sequence: Synthetic oligonucleotide
ggguuacugaucuggaagu

SEQ ID NO: 865631 - RNA, 19 nt, Artificial Sequence
  Description of Artificial Sequence: Synthetic oligonucleotide
aucacggggcacgcgcauc

SEQ ID NO: 865632 - RNA, 19 nt, Artificial Sequence
  Description of Artificial Sequence: Synthetic oligonucleotide
gugcuugaucuuucccuca

SEQ ID NO: 865633 - RNA, 19 nt, Artificial Sequence
  Description of Artificial Sequence: Synthetic oligonucleotide
cccaucacggggcacgcgc

SEQ ID NO: 865634 - RNA, 19 nt, Artificial Sequence
  Description of Artificial Sequence: Synthetic oligonucleotide
uuccggaaaggaggacaug

SEQ ID NO: 865635 - RNA, 19 nt, Artificial Sequence
  Description of Artificial Sequence: Synthetic oligonucleotide
ccuuagcagggaaaacuuc

SEQ ID NO: 865636 - RNA, 19 nt, Artificial Sequence
  Description of Artificial Sequence: Synthetic oligonucleotide
acgcgcaucagcauauguu

SEQ ID NO: 865637 - RNA, 19 nt, Artificial Sequence
  Description of Artificial Sequence: Synthetic oligonucleotide
ggcaaucugacaggcuggc

SEQ ID NO: 865638 - RNA, 19 nt, Artificial Sequence
  Description of Artificial Sequence: Synthetic oligonucleotide
cugucguacucugcuccag

SEQ ID NO: 865639 - RNA, 19 nt, Artificial Sequence
  Description of Artificial Sequence: Synthetic oligonucleotide
gcggcaacaucuagggacc

SEQ ID NO: 865640 - RNA, 19 nt, Artificial Sequence
  Description of Artificial Sequence: Synthetic oligonucleotide
gaggucaaccaggcuguca

SEQ ID NO: 865641 - RNA, 19 nt, Artificial Sequence
  Description of Artificial Sequence: Synthetic oligonucleotide
gaagagggccugguucauc

SEQ ID NO: 865642 - RNA, 19 nt, Artificial Sequence
  Description of Artificial Sequence: Synthetic oligonucleotide
caggguuacugaucuggaa

SEQ ID NO: 865643 - RNA, 19 nt, Artificial Sequence
  Description of Artificial Sequence: Synthetic oligonucleotide
gagaugcggaagucuucaa

SEQ ID NO: 865644 - RNA, 19 nt, Artificial Sequence
  Description of Artificial Sequence: Synthetic oligonucleotide
cuguagccgauuguacuga

SEQ ID NO: 865645 - RNA, 19 nt, Artificial Sequence
  Description of Artificial Sequence: Synthetic oligonucleotide
ugcugguaucgggauucga

SEQ ID NO: 865646 - RNA, 19 nt, Artificial Sequence
  Description of Artificial Sequence: Synthetic oligonucleotide
ggccccaucacggggcacg

SEQ ID NO: 865647 - RNA, 19 nt, Artificial Sequence
  Description of Artificial Sequence: Synthetic oligonucleotide
gccgauuguacugaaggaa

SEQ ID NO: 865648 - RNA, 19 nt, Artificial Sequence
  Description of Artificial Sequence: Synthetic oligonucleotide
ggauucgaaggagccuucc

SEQ ID NO: 865649 - RNA, 19 nt, Artificial Sequence
  Description of Artificial Sequence: Synthetic oligonucleotide
gcggcccucauagagugcc

SEQ ID NO: 865650 - RNA, 19 nt, Artificial Sequence
  Description of Artificial Sequence: Synthetic oligonucleotide
ggcucauugcguuuccgua

SEQ ID NO: 865651 - RNA, 19 nt, Artificial Sequence
  Description of Artificial Sequence: Synthetic oligonucleotide
ggcauaugaguugggcuca

SEQ ID NO: 865652 - RNA, 19 nt, Artificial Sequence
  Description of Artificial Sequence: Synthetic oligonucleotide
gggcuuuuacacacacuug

SEQ ID NO: 865653 - RNA, 19 nt, Artificial Sequence
  Description of Artificial Sequence: Synthetic oligonucleotide
gugcugucguacucugcuc

SEQ ID NO: 865654 - RNA, 19 nt, Artificial Sequence
  Description of Artificial Sequence: Synthetic oligonucleotide
ggacaugucccgguaacaa

SEQ ID NO: 865655 - RNA, 19 nt, Artificial Sequence
  Description of Artificial Sequence: Synthetic oligonucleotide
gguaacaagcgcguucugu

SEQ ID NO: 865656 - RNA, 19 nt, Artificial Sequence
  Description of Artificial Sequence: Synthetic oligonucleotide
ccaagcugauggagaagac

SEQ ID NO: 865657 - RNA, 19 nt, Artificial Sequence
  Description of Artificial Sequence: Synthetic oligonucleotide
gcgugguaccacucuuugc

SEQ ID NO: 865658 - RNA, 19 nt, Artificial Sequence
  Description of Artificial Sequence: Synthetic oligonucleotide
aagcgcguucugugccaau

SEQ ID NO: 865659 - RNA, 19 nt, Artificial Sequence
  Description of Artificial Sequence: Synthetic oligonucleotide
ggucaggcuugcgugguac

SEQ ID NO: 865660 - RNA, 19 nt, Artificial Sequence
  Description of Artificial Sequence: Synthetic oligonucleotide
ccauaguccccucgccacc

SEQ ID NO: 865661 - RNA, 19 nt, Artificial Sequence
  Description of Artificial Sequence: Synthetic oligonucleotide
cccgguaacaagcgcguuc

SEQ ID NO: 865662 - RNA, 19 nt, Artificial Sequence
  Description of Artificial Sequence: Synthetic oligonucleotide
ccacauagaagccaggauu

SEQ ID NO: 865663 - RNA, 19 nt, Artificial Sequence
  Description of Artificial Sequence: Synthetic oligonucleotide
uucgucucucaugguguuu

SEQ ID NO: 865664 - RNA, 19 nt, Artificial Sequence
  Description of Artificial Sequence: Synthetic oligonucleotide
gccggcaguagaccacaag

SEQ ID NO: 865665 - RNA, 19 nt, Artificial Sequence
  Description of Artificial Sequence: Synthetic oligonucleotide
gggcccggacaugaaacag

SEQ ID NO: 865666 - RNA, 19 nt, Artificial Sequence
  Description of Artificial Sequence: Synthetic oligonucleotide
gagccaccgaugccaagcu

SEQ ID NO: 865667 - RNA, 19 nt, Artificial Sequence
  Description of Artificial Sequence: Synthetic oligonucleotide
gcgagaugcuccugggaga

SEQ ID NO: 865668 - RNA, 19 nt, Artificial Sequence
  Description of Artificial Sequence: Synthetic oligonucleotide
ccggaaaggaggacauguc

SEQ ID NO: 865669 - RNA, 19 nt, Artificial Sequence
  Description of Artificial Sequence: Synthetic oligonucleotide
cugcgagaugcuccuggga

SEQ ID NO: 865670 - RNA, 19 nt, Artificial Sequence
  Description of Artificial Sequence: Synthetic oligonucleotide
ccuugggguagauucuaga

SEQ ID NO: 865671 - RNA, 19 nt, Artificial Sequence
  Description of Artificial Sequence: Synthetic oligonucleotide
gaaagucggcauaggguuu

SEQ ID NO: 865672 - RNA, 19 nt, Artificial Sequence
  Description of Artificial Sequence: Synthetic oligonucleotide
ggggaaccacagcugcuuc

SEQ ID NO: 865673 - RNA, 19 nt, Artificial Sequence
  Description of Artificial Sequence: Synthetic oligonucleotide
aggcuucgucucucauggu

SEQ ID NO: 865674 - RNA, 19 nt, Artificial Sequence
  Description of Artificial Sequence: Synthetic oligonucleotide
cuugcgugguaccacucuu

SEQ ID NO: 865675 - RNA, 19 nt, Artificial Sequence
  Description of Artificial Sequence: Synthetic oligonucleotide
aggcuccgaaaggcgcauc

SEQ ID NO: 865676 - RNA, 19 nt, Artificial Sequence
  Description of Artificial Sequence: Synthetic oligonucleotide
gguagcgcagcuucauuuu

SEQ ID NO: 865677 - RNA, 19 nt, Artificial Sequence
  Description of Artificial Sequence: Synthetic oligonucleotide
agggaacaggccggcagua

SEQ ID NO: 865678 - RNA, 19 nt, Artificial Sequence
  Description of Artificial Sequence: Synthetic oligonucleotide
gcuucgucucucauggugu

SEQ ID NO: 865679 - RNA, 19 nt, Artificial Sequence
  Description of Artificial Sequence: Synthetic oligonucleotide
cucuugugagucggcggca

SEQ ID NO: 865680 - RNA, 19 nt, Artificial Sequence
  Description of Artificial Sequence: Synthetic oligonucleotide
gagucggcggcaacaucua

SEQ ID NO: 865681 - RNA, 19 nt, Artificial Sequence
  Description of Artificial Sequence: Synthetic oligonucleotide
ggcuccgaaaggcgcaucu

SEQ ID NO: 865682 - RNA, 19 nt, Artificial Sequence
  Description of Artificial Sequence: Synthetic oligonucleotide
gguuuccggaaaggaggac

SEQ ID NO: 865683 - RNA, 19 nt, Artificial Sequence
  Description of Artificial Sequence: Synthetic oligonucleotide
cccggaaagagauggcaua

SEQ ID NO: 865684 - RNA, 19 nt, Artificial Sequence
  Description of Artificial Sequence: Synthetic oligonucleotide
cacgcgcaucagcauaugu

SEQ ID NO: 865685 - RNA, 19 nt, Artificial Sequence
  Description of Artificial Sequence: Synthetic oligonucleotide
gcuugcgugguaccacucu

SEQ ID NO: 865686 - RNA, 19 nt, Artificial Sequence
  Description of Artificial Sequence: Synthetic oligonucleotide
cccggacaugaaacaguug

SEQ ID NO: 865687 - RNA, 19 nt, Artificial Sequence
  Description of Artificial Sequence: Synthetic oligonucleotide
cuucgucucucaugguguu

SEQ ID NO: 865688 - RNA, 19 nt, Artificial Sequence
  Description of Artificial Sequence: Synthetic oligonucleotide
ucccgguaacaagcgcguu

SEQ ID NO: 865689 - RNA, 19 nt, Artificial Sequence
  Description of Artificial Sequence: Synthetic oligonucleotide
ggcccucauagagugccca

SEQ ID NO: 865690 - RNA, 19 nt, Artificial Sequence
  Description of Artificial Sequence: Synthetic oligonucleotide
ggauugcggcccucauaga

SEQ ID NO: 865691 - RNA, 19 nt, Artificial Sequence
  Description of Artificial Sequence: Synthetic oligonucleotide
acacgauaccucggccauu

SEQ ID NO: 865692 - RNA, 19 nt, Artificial Sequence
  Description of Artificial Sequence: Synthetic oligonucleotide
cacggggcacgcgcaucag

SEQ ID NO: 865693 - RNA, 19 nt, Artificial Sequence
  Description of Artificial Sequence: Synthetic oligonucleotide
gagugcccauaaucggguu

SEQ ID NO: 865694 - RNA, 19 nt, Artificial Sequence
  Description of Artificial Sequence: Synthetic oligonucleotide
ccgaaaggcgcaucucaaa

SEQ ID NO: 865695 - RNA, 19 nt, Artificial Sequence
  Description of Artificial Sequence: Synthetic oligonucleotide
ccucagcccggaaagagau

SEQ ID NO: 865696 - RNA, 19 nt, Artificial Sequence
  Description of Artificial Sequence: Synthetic oligonucleotide
gggauucgaaggagccuuc

SEQ ID NO: 865697 - RNA, 19 nt, Artificial Sequence
  Description of Artificial Sequence: Synthetic oligonucleotide
caagcgcguucugugccaa

SEQ ID NO: 865698 - RNA, 19 nt, Artificial Sequence
  Description of Artificial Sequence: Synthetic oligonucleotide
gcuccgaaaggcgcaucuc

SEQ ID NO: 865699 - RNA, 19 nt, Artificial Sequence
  Description of Artificial Sequence: Synthetic oligonucleotide
ccaucacggggcacgcgca

SEQ ID NO: 865700 - RNA, 19 nt, Artificial Sequence
  Description of Artificial Sequence: Synthetic oligonucleotide
ccgguaacaagcgcguucu

SEQ ID NO: 865701 - RNA, 19 nt, Artificial Sequence
  Description of Artificial Sequence: Synthetic oligonucleotide
cucggcagugcuugaucuu

SEQ ID NO: 865702 - RNA, 19 nt, Artificial Sequence
  Description of Artificial Sequence: Synthetic oligonucleotide
ccgaugccaagcugaugga

SEQ ID NO: 865703 - RNA, 19 nt, Artificial Sequence
  Description of Artificial Sequence: Synthetic oligonucleotide
gcgcguucugugccaaucu

SEQ ID NO: 865704 - RNA, 19 nt, Artificial Sequence
  Description of Artificial Sequence: Synthetic oligonucleotide
cuagugcuuccucguugau

SEQ ID NO: 865705 - RNA, 19 nt, Artificial Sequence
  Description of Artificial Sequence: Synthetic oligonucleotide
ggcuugcgugguaccacuc

SEQ ID NO: 865706 - RNA, 19 nt, Artificial Sequence
  Description of Artificial Sequence: Synthetic oligonucleotide
gaccucggaggcugcucuu

SEQ ID NO: 865707 - RNA, 19 nt, Artificial Sequence
  Description of Artificial Sequence: Synthetic oligonucleotide
caucacggggcacgcgcau

SEQ ID NO: 865708 - RNA, 19 nt, Artificial Sequence
  Description of Artificial Sequence: Synthetic oligonucleotide
gcacgcgcaucagcauaug

SEQ ID NO: 865709 - RNA, 19 nt, Artificial Sequence
  Description of Artificial Sequence: Synthetic oligonucleotide
ggcacgcgcaucagcauau

SEQ ID NO: 865710 - RNA, 19 nt, Artificial Sequence
  Description of Artificial Sequence: Synthetic oligonucleotide
ccccucaguaagccuggca

SEQ ID NO: 865711 - RNA, 19 nt, Artificial Sequence
  Description of Artificial Sequence: Synthetic oligonucleotide
ccggaaagagauggcauau

SEQ ID NO: 865712 - RNA, 19 nt, Artificial Sequence
  Description of Artificial Sequence: Synthetic oligonucleotide
gcguucugugccaaucuuu

SEQ ID NO: 865713 - RNA, 19 nt, Artificial Sequence
  Description of Artificial Sequence: Synthetic oligonucleotide
cgggcccggacaugaaaca

SEQ ID NO: 865714 - RNA, 19 nt, Artificial Sequence
  Description of Artificial Sequence: Synthetic oligonucleotide
cgaucuugaugagcaggga

SEQ ID NO: 865715 - RNA, 19 nt, Artificial Sequence
  Description of Artificial Sequence: Synthetic oligonucleotide
cuaggaugacuggguugau

SEQ ID NO: 865716 - RNA, 19 nt, Artificial Sequence
  Description of Artificial Sequence: Synthetic oligonucleotide
cgguaacaagcgcguucug

SEQ ID NO: 865717 - RNA, 19 nt, Artificial Sequence
  Description of Artificial Sequence: Synthetic oligonucleotide
gggguagcgcagcuucauu

SEQ ID NO: 865718 - RNA, 19 nt, Artificial Sequence
  Description of Artificial Sequence: Synthetic oligonucleotide
ccccaucacggggcacgcg

SEQ ID NO: 865719 - RNA, 19 nt, Artificial Sequence
  Description of Artificial Sequence: Synthetic oligonucleotide
cgggauucgaaggagccuu

SEQ ID NO: 865720 - RNA, 19 nt, Artificial Sequence
  Description of Artificial Sequence: Synthetic oligonucleotide
gcauaugaguugggcucau

SEQ ID NO: 865721 - RNA, 19 nt, Artificial Sequence
  Description of Artificial Sequence: Synthetic oligonucleotide
cgauaccucggccauucuu

SEQ ID NO: 865722 - RNA, 19 nt, Artificial Sequence
  Description of Artificial Sequence: Synthetic oligonucleotide
ggcgcaucucaaacucguu

SEQ ID NO: 865723 - RNA, 19 nt, Artificial Sequence
  Description of Artificial Sequence: Synthetic oligonucleotide
cccucgccaccagccacca

SEQ ID NO: 865724 - RNA, 19 nt, Artificial Sequence
  Description of Artificial Sequence: Synthetic oligonucleotide
cggcggcaacaucuaggga

SEQ ID NO: 865725 - RNA, 19 nt, Artificial Sequence
  Description of Artificial Sequence: Synthetic oligonucleotide
cggcaacaucuagggacca

SEQ ID NO: 865726 - RNA, 19 nt, Artificial Sequence
  Description of Artificial Sequence: Synthetic oligonucleotide
cgcguucugugccaaucuu

SEQ ID NO: 865727 - RNA, 19 nt, Artificial Sequence
  Description of Artificial Sequence: Synthetic oligonucleotide
cguucccgacugucaaaau

SEQ ID NO: 865728 - RNA, 19 nt, Artificial Sequence
  Description of Artificial Sequence: Synthetic oligonucleotide
cggccauucuuuggcagau

SEQ ID NO: 865729 - RNA, 19 nt, Artificial Sequence
  Description of Artificial Sequence: Synthetic oligonucleotide
aauaugauuccccaaaggc

SEQ ID NO: 865730 - RNA, 19 nt, Artificial Sequence
  Description of Artificial Sequence: Synthetic oligonucleotide
aaucuuuugagauggaagc

SEQ ID NO: 865731 - RNA, 19 nt, Artificial Sequence
  Description of Artificial Sequence: Synthetic oligonucleotide
aaauagacaaccuaagccu

SEQ ID NO: 865732 - RNA, 19 nt, Artificial Sequence
  Description of Artificial Sequence: Synthetic oligonucleotide
gaaauagacaaccuaagcc

SEQ ID NO: 865733 - RNA, 19 nt, Artificial Sequence
  Description of Artificial Sequence: Synthetic oligonucleotide
aaacagaggaauaugauuc

SEQ ID NO: 865734 - RNA, 19 nt, Artificial Sequence
  Description of Artificial Sequence: Synthetic oligonucleotide
ugcaaaauaucuuacaaga

SEQ ID NO: 865735 - RNA, 19 nt, Artificial Sequence
  Description of Artificial Sequence: Synthetic oligonucleotide
ugaaugaugcacaugauac

SEQ ID NO: 865736 - RNA, 19 nt, Artificial Sequence
  Description of Artificial Sequence: Synthetic oligonucleotide
agaccuaugguacaguugg

SEQ ID NO: 865737 - RNA, 19 nt, Artificial Sequence
  Description of Artificial Sequence: Synthetic oligonucleotide
aacagaggaauaugauucc

SEQ ID NO: 865738 - RNA, 19 nt, Artificial Sequence
  Description of Artificial Sequence: Synthetic oligonucleotide
uaaaaccgaaacuacagcc

SEQ ID NO: 865739 - RNA, 19 nt, Artificial Sequence
  Description of Artificial Sequence: Synthetic oligonucleotide
uaucuuggcuguaaaaccg

SEQ ID NO: 865740 - RNA, 19 nt, Artificial Sequence
  Description of Artificial Sequence: Synthetic oligonucleotide
agaacuggucacuaagucc

SEQ ID NO: 865741 - RNA, 19 nt, Artificial Sequence
  Description of Artificial Sequence: Synthetic oligonucleotide
gaugauagcaucaucacac

SEQ ID NO: 865742 - RNA, 19 nt, Artificial Sequence
  Description of Artificial Sequence: Synthetic oligonucleotide
gaucuuagggaauacuugc

SEQ ID NO: 865743 - RNA, 19 nt, Artificial Sequence
  Description of Artificial Sequence: Synthetic oligonucleotide
acccguaaagauuuggucg

SEQ ID NO: 865744 - RNA, 19 nt, Artificial Sequence
  Description of Artificial Sequence: Synthetic oligonucleotide
uuaucuuggcuguaaaacc

SEQ ID NO: 865745 - RNA, 19 nt, Artificial Sequence
  Description of Artificial Sequence: Synthetic oligonucleotide
ucugguaaaucuucgcagg

SEQ ID NO: 865746 - RNA, 19 nt, Artificial Sequence
  Description of Artificial Sequence: Synthetic oligonucleotide
uucaugaggaguuuugggc

SEQ ID NO: 865747 - RNA, 19 nt, Artificial Sequence
  Description of Artificial Sequence: Synthetic oligonucleotide
ugacguaugaagcuggugu

SEQ ID NO: 865748 - RNA, 19 nt, Artificial Sequence
  Description of Artificial Sequence: Synthetic oligonucleotide
cacgaugcaauucauaaag

SEQ ID NO: 865749 - RNA, 19 nt, Artificial Sequence
  Description of Artificial Sequence: Synthetic oligonucleotide
uuugugguagaagaguagg

SEQ ID NO: 865750 - RNA, 19 nt, Artificial Sequence
  Description of Artificial Sequence: Synthetic oligonucleotide
uuggcuguaaaaccgaaac

SEQ ID NO: 865751 - RNA, 19 nt, Artificial Sequence
  Description of Artificial Sequence: Synthetic oligonucleotide
auaggaacgcaacagagga

SEQ ID NO: 865752 - RNA, 19 nt, Artificial Sequence
  Description of Artificial Sequence: Synthetic oligonucleotide
caaauucagguagagaugg

SEQ ID NO: 865753 - RNA, 19 nt, Artificial Sequence
  Description of Artificial Sequence: Synthetic oligonucleotide
agacccuagauuuuaaucu

SEQ ID NO: 865754 - RNA, 19 nt, Artificial Sequence
  Description of Artificial Sequence: Synthetic oligonucleotide
ugugccaauaggcuccugg

SEQ ID NO: 865755 - RNA, 19 nt, Artificial Sequence
  Description of Artificial Sequence: Synthetic oligonucleotide
auaucuuacaagaaacuuc

SEQ ID NO: 865756 - RNA, 19 nt, Artificial Sequence
  Description of Artificial Sequence: Synthetic oligonucleotide
uuugugcugacguaugaag

SEQ ID NO: 865757 - RNA, 19 nt, Artificial Sequence
  Description of Artificial Sequence: Synthetic oligonucleotide
cucauaaccugccaggugc

SEQ ID NO: 865758 - RNA, 19 nt, Artificial Sequence
  Description of Artificial Sequence: Synthetic oligonucleotide
ugugcaugaaugaugcaca

SEQ ID NO: 865759 - RNA, 19 nt, Artificial Sequence
  Description of Artificial Sequence: Synthetic oligonucleotide
aaagacacauaugugguga

SEQ ID NO: 865760 - RNA, 19 nt, Artificial Sequence
  Description of Artificial Sequence: Synthetic oligonucleotide
uauggguguucacaaacag

SEQ ID NO: 865761 - RNA, 19 nt, Artificial Sequence
  Description of Artificial Sequence: Synthetic oligonucleotide
aaagacacaugcaaaauau

SEQ ID NO: 865762 - RNA, 19 nt, Artificial Sequence
  Description of Artificial Sequence: Synthetic oligonucleotide
aacgcaacagaggagagca

SEQ ID NO: 865763 - RNA, 19 nt, Artificial Sequence
  Description of Artificial Sequence: Synthetic oligonucleotide
gauagcaucaucacacuug

SEQ ID NO: 865764 - RNA, 19 nt, Artificial Sequence
  Description of Artificial Sequence: Synthetic oligonucleotide
aauaucuuacaagaaacuu

SEQ ID NO: 865765 - RNA, 19 nt, Artificial Sequence
  Description of Artificial Sequence: Synthetic oligonucleotide
cauaaagggugucaugucc

SEQ ID NO: 865766 - RNA, 19 nt, Artificial Sequence
  Description of Artificial Sequence: Synthetic oligonucleotide
uucgcaggcagucuguaag

SEQ ID NO: 865767 - RNA, 19 nt, Artificial Sequence
  Description of Artificial Sequence: Synthetic oligonucleotide
agugguuaggguuguuggc

SEQ ID NO: 865768 - RNA, 19 nt, Artificial Sequence
  Description of Artificial Sequence: Synthetic oligonucleotide
ugcacgaugcaauucauaa

SEQ ID NO: 865769 - RNA, 19 nt, Artificial Sequence
  Description of Artificial Sequence: Synthetic oligonucleotide
ugccccauccaccagagug

SEQ ID NO: 865770 - RNA, 19 nt, Artificial Sequence
  Description of Artificial Sequence: Synthetic oligonucleotide
ucaagggccagaauggggu

SEQ ID NO: 865771 - RNA, 19 nt, Artificial Sequence
  Description of Artificial Sequence: Synthetic oligonucleotide
acaaccuaagccuugucca

SEQ ID NO: 865772 - RNA, 19 nt, Artificial Sequence
  Description of Artificial Sequence: Synthetic oligonucleotide
gaggaauucaugugcgucc

SEQ ID NO: 865773 - RNA, 19 nt, Artificial Sequence
  Description of Artificial Sequence: Synthetic oligonucleotide
uccacgaagaccuauggua

SEQ ID NO: 865774 - RNA, 19 nt, Artificial Sequence
  Description of Artificial Sequence: Synthetic oligonucleotide
ugcaauucauaaagcaugu

SEQ ID NO: 865775 - RNA, 19 nt, Artificial Sequence
  Description of Artificial Sequence: Synthetic oligonucleotide
cuacucauauuccaggaac

SEQ ID NO: 865776 - RNA, 19 nt, Artificial Sequence
  Description of Artificial Sequence: Synthetic oligonucleotide
uuaaucucuuagaaauaga

SEQ ID NO: 865777 - RNA, 19 nt, Artificial Sequence
  Description of Artificial Sequence: Synthetic oligonucleotide
agcggcauaaaagagaaga

SEQ ID NO: 865778 - RNA, 19 nt, Artificial Sequence
  Description of Artificial Sequence: Synthetic oligonucleotide
aggaguuuugggcucuggc

SEQ ID NO: 865779 - RNA, 19 nt, Artificial Sequence
  Description of Artificial Sequence: Synthetic oligonucleotide
ugacacaaugcaaugcagu

SEQ ID NO: 865780 - RNA, 19 nt, Artificial Sequence
  Description of Artificial Sequence: Synthetic oligonucleotide
agaauaggaacgcaacaga

SEQ ID NO: 865781 - RNA, 19 nt, Artificial Sequence
  Description of Artificial Sequence: Synthetic oligonucleotide
agaaaucucucagaagcgg

SEQ ID NO: 865782 - RNA, 19 nt, Artificial Sequence
  Description of Artificial Sequence: Synthetic oligonucleotide
ucuguaagagugguggugc

SEQ ID NO: 865783 - RNA, 19 nt, Artificial Sequence
  Description of Artificial Sequence: Synthetic oligonucleotide
aaaccgaaacuacagccaa

SEQ ID NO: 865784 - RNA, 19 nt, Artificial Sequence
  Description of Artificial Sequence: Synthetic oligonucleotide
uuggcaugugacaucagac

SEQ ID NO: 865785 - RNA, 19 nt, Artificial Sequence
  Description of Artificial Sequence: Synthetic oligonucleotide
ugugcugacguaugaagcu

SEQ ID NO: 865786 - RNA, 19 nt, Artificial Sequence
  Description of Artificial Sequence: Synthetic oligonucleotide
uguuugugguagaagagua

SEQ ID NO: 865787 - RNA, 19 nt, Artificial Sequence
  Description of Artificial Sequence: Synthetic oligonucleotide
gagagaggacaucucacag

SEQ ID NO: 865788 - RNA, 19 nt, Artificial Sequence
  Description of Artificial Sequence: Synthetic oligonucleotide
gacgccauggcagacuugg

SEQ ID NO: 865789 - RNA, 19 nt, Artificial Sequence
  Description of Artificial Sequence: Synthetic oligonucleotide
uagaccuacagcucagagc

SEQ ID NO: 865790 - RNA, 19 nt, Artificial Sequence
  Description of Artificial Sequence: Synthetic oligonucleotide
uacuugcugugcaugaaug

SEQ ID NO: 865791 - RNA, 19 nt, Artificial Sequence
  Description of Artificial Sequence: Synthetic oligonucleotide
uuuccuauggguguucaca

SEQ ID NO: 865792 - RNA, 19 nt, Artificial Sequence
  Description of Artificial Sequence: Synthetic oligonucleotide
ugcugacguaugaagcugg

SEQ ID NO: 865793 - RNA, 19 nt, Artificial Sequence
  Description of Artificial Sequence: Synthetic oligonucleotide
aagcauguguuucccaggu

SEQ ID NO: 865794 - RNA, 19 nt, Artificial Sequence
  Description of Artificial Sequence: Synthetic oligonucleotide
acccauguuucucucaaag

SEQ ID NO: 865795 - RNA, 19 nt, Artificial Sequence
  Description of Artificial Sequence: Synthetic oligonucleotide
acagaggaauaugauuccc

SEQ ID NO: 865796 - RNA, 19 nt, Artificial Sequence
  Description of Artificial Sequence: Synthetic oligonucleotide
ugcacaugauaccugcugu

SEQ ID NO: 865797 - RNA, 19 nt, Artificial Sequence
  Description of Artificial Sequence: Synthetic oligonucleotide
uucauggugagcugcuuug

SEQ ID NO: 865798 - RNA, 19 nt, Artificial Sequence
  Description of Artificial Sequence: Synthetic oligonucleotide
acacaugcaaaauaucuua

SEQ ID NO: 865799 - RNA, 19 nt, Artificial Sequence
  Description of Artificial Sequence: Synthetic oligonucleotide
uggaucuuagggaauacuu

SEQ ID NO: 865800 - RNA, 19 nt, Artificial Sequence
  Description of Artificial Sequence: Synthetic oligonucleotide
ugaucaguccacgaagacc

SEQ ID NO: 865801 - RNA, 19 nt, Artificial Sequence
  Description of Artificial Sequence: Synthetic oligonucleotide
cagugguuaggguuguugg

SEQ ID NO: 865802 - RNA, 19 nt, Artificial Sequence
  Description of Artificial Sequence: Synthetic oligonucleotide
gguaaaucuucgcaggcag

SEQ ID NO: 865803 - RNA, 19 nt, Artificial Sequence
  Description of Artificial Sequence: Synthetic oligonucleotide
ucuaaacugaugucccaga

SEQ ID NO: 865804 - RNA, 19 nt, Artificial Sequence
  Description of Artificial Sequence: Synthetic oligonucleotide
aguccacgaagaccuaugg

SEQ ID NO: 865805 - RNA, 19 nt, Artificial Sequence
  Description of Artificial Sequence: Synthetic oligonucleotide
aggcuacucauauuccagg

SEQ ID NO: 865806 - RNA, 19 nt, Artificial Sequence
  Description of Artificial Sequence: Synthetic oligonucleotide
uggcaagugucaaauagua

SEQ ID NO: 865807 - RNA, 19 nt, Artificial Sequence
  Description of Artificial Sequence: Synthetic oligonucleotide
ugcccauucauccugcuuu

SEQ ID NO: 865808 - RNA, 19 nt, Artificial Sequence
  Description of Artificial Sequence: Synthetic oligonucleotide
uucuggaugccccauccac

SEQ ID NO: 865809 - RNA, 19 nt, Artificial Sequence
  Description of Artificial Sequence: Synthetic oligonucleotide
gaagacacuaagacccuag

SEQ ID NO: 865810 - RNA, 19 nt, Artificial Sequence
  Description of Artificial Sequence: Synthetic oligonucleotide
cuccaagguccccugaugg

SEQ ID NO: 865811 - RNA, 19 nt, Artificial Sequence
  Description of Artificial Sequence: Synthetic oligonucleotide
gcaagugucaaauaguaaa

SEQ ID NO: 865812 - RNA, 19 nt, Artificial Sequence
  Description of Artificial Sequence: Synthetic oligonucleotide
uguucacaaacagaggaau

SEQ ID NO: 865813 - RNA, 19 nt, Artificial Sequence
  Description of Artificial Sequence: Synthetic oligonucleotide
gguugaucaguccacgaag

SEQ ID NO: 865814 - RNA, 19 nt, Artificial Sequence
  Description of Artificial Sequence: Synthetic oligonucleotide
augaaugaugcacaugaua

SEQ ID NO: 865815 - RNA, 19 nt, Artificial Sequence
  Description of Artificial Sequence: Synthetic oligonucleotide
guguuucccagguugauca

SEQ ID NO: 865816 - RNA, 19 nt, Artificial Sequence
  Description of Artificial Sequence: Synthetic oligonucleotide
uaaaucuucgcaggcaguc

SEQ ID NO: 865817 - RNA, 19 nt, Artificial Sequence
  Description of Artificial Sequence: Synthetic oligonucleotide
uuccgccgaaguuuggccg

SEQ ID NO: 865818 - RNA, 19 nt, Artificial Sequence
  Description of Artificial Sequence: Synthetic oligonucleotide
aaugcagaauaggaacgca

SEQ ID NO: 865819 - RNA, 19 nt, Artificial Sequence
  Description of Artificial Sequence: Synthetic oligonucleotide
uccccguuaaccacacugc

SEQ ID NO: 865820 - RNA, 19 nt, Artificial Sequence
  Description of Artificial Sequence: Synthetic oligonucleotide
gaucaguccacgaagaccu

SEQ ID NO: 865821 - RNA, 19 nt, Artificial Sequence
  Description of Artificial Sequence: Synthetic oligonucleotide
cauauguggugaucuuccg

SEQ ID NO: 865822 - RNA, 19 nt, Artificial Sequence
  Description of Artificial Sequence: Synthetic oligonucleotide
guacuuguugucauuguug

SEQ ID NO: 865823 - RNA, 19 nt, Artificial Sequence
  Description of Artificial Sequence: Synthetic oligonucleotide
ucugggcucacccauguuu

SEQ ID NO: 865824 - RNA, 19 nt, Artificial Sequence
  Description of Artificial Sequence: Synthetic oligonucleotide
uuguacggaaugugcgggg

SEQ ID NO: 865825 - RNA, 19 nt, Artificial Sequence
  Description of Artificial Sequence: Synthetic oligonucleotide
augauugacccugucagca

SEQ ID NO: 865826 - RNA, 19 nt, Artificial Sequence
  Description of Artificial Sequence: Synthetic oligonucleotide
cucuaggccaacugcagug

SEQ ID NO: 865827 - RNA, 19 nt, Artificial Sequence
  Description of Artificial Sequence: Synthetic oligonucleotide
cuccccguuaaccacacug

SEQ ID NO: 865828 - RNA, 19 nt, Artificial Sequence
  Description of Artificial Sequence: Synthetic oligonucleotide
aggaacgcaacagaggaga

SEQ ID NO: 865829 - RNA, 19 nt, Artificial Sequence
  Description of Artificial Sequence: Synthetic oligonucleotide
gaaccaggcaggucuaaac

SEQ ID NO: 865830 - RNA, 19 nt, Artificial Sequence
  Description of Artificial Sequence: Synthetic oligonucleotide
ggaauaugauuccccaaag

SEQ ID NO: 865831 - RNA, 19 nt, Artificial Sequence
  Description of Artificial Sequence: Synthetic oligonucleotide
gacacuaagacccuagauu

SEQ ID NO: 865832 - RNA, 19 nt, Artificial Sequence
  Description of Artificial Sequence: Synthetic oligonucleotide
ugaaacuccugugagugau

SEQ ID NO: 865833 - RNA, 19 nt, Artificial Sequence
  Description of Artificial Sequence: Synthetic oligonucleotide
ucauaaccugccaggugcc

SEQ ID NO: 865834 - RNA, 19 nt, Artificial Sequence
  Description of Artificial Sequence: Synthetic oligonucleotide
agcuuguacggaaugugcg

SEQ ID NO: 865835 - RNA, 19 nt, Artificial Sequence
  Description of Artificial Sequence: Synthetic oligonucleotide
gugccugucugacaggaag

SEQ ID NO: 865836 - RNA, 19 nt, Artificial Sequence
  Description of Artificial Sequence: Synthetic oligonucleotide
uugaucaguccacgaagac

SEQ ID NO: 865837 - RNA, 19 nt, Artificial Sequence
  Description of Artificial Sequence: Synthetic oligonucleotide
cauuguugagacuguccag

SEQ ID NO: 865838 - RNA, 19 nt, Artificial Sequence
  Description of Artificial Sequence: Synthetic oligonucleotide
gaggcuacucauauuccag

SEQ ID NO: 865839 - RNA, 19 nt, Artificial Sequence
  Description of Artificial Sequence: Synthetic oligonucleotide
aaauucagguagagauggg

SEQ ID NO: 865840 - RNA, 19 nt, Artificial Sequence
  Description of Artificial Sequence: Synthetic oligonucleotide
ggggaaaagacacauaugu

SEQ ID NO: 865841 - RNA, 19 nt, Artificial Sequence
  Description of Artificial Sequence: Synthetic oligonucleotide
aauagacaaccuaagccuu

SEQ ID NO: 865842 - RNA, 19 nt, Artificial Sequence
  Description of Artificial Sequence: Synthetic oligonucleotide
guagaccuacagcucagag

SEQ ID NO: 865843 - RNA, 19 nt, Artificial Sequence
  Description of Artificial Sequence: Synthetic oligonucleotide
aauaggcuccugggcaaac

SEQ ID NO: 865844 - RNA, 19 nt, Artificial Sequence
  Description of Artificial Sequence: Synthetic oligonucleotide
ggcaugugacaucagacug

SEQ ID NO: 865845 - RNA, 19 nt, Artificial Sequence
  Description of Artificial Sequence: Synthetic oligonucleotide
aguagguacccuucacugu

SEQ ID NO: 865846 - RNA, 19 nt, Artificial Sequence
  Description of Artificial Sequence: Synthetic oligonucleotide
gucuauggugguugagacg

SEQ ID NO: 865847 - RNA, 19 nt, Artificial Sequence
  Description of Artificial Sequence: Synthetic oligonucleotide
cagcuuguacggaaugugc

SEQ ID NO: 865848 - RNA, 19 nt, Artificial Sequence
  Description of Artificial Sequence: Synthetic oligonucleotide
cgaaacuacagccaaacac

SEQ ID NO: 865849 - RNA, 19 nt, Artificial Sequence
  Description of Artificial Sequence: Synthetic oligonucleotide
uagaagaguagguacccuu

SEQ ID NO: 865850 - RNA, 19 nt, Artificial Sequence
  Description of Artificial Sequence: Synthetic oligonucleotide
acuugcugugcaugaauga

SEQ ID NO: 865851 - RNA, 19 nt, Artificial Sequence
  Description of Artificial Sequence: Synthetic oligonucleotide
gcaauugcagugguuaggg

SEQ ID NO: 865852 - RNA, 19 nt, Artificial Sequence
  Description of Artificial Sequence: Synthetic oligonucleotide
gucgaugaugcaauugcag

SEQ ID NO: 865853 - RNA, 19 nt, Artificial Sequence
  Description of Artificial Sequence: Synthetic oligonucleotide
uuaaccacacugcccucac

SEQ ID NO: 865854 - RNA, 19 nt, Artificial Sequence
  Description of Artificial Sequence: Synthetic oligonucleotide
gacccugucagcagaacug

SEQ ID NO: 865855 - RNA, 19 nt, Artificial Sequence
  Description of Artificial Sequence: Synthetic oligonucleotide
uggucugguaaaucuucgc

SEQ ID NO: 865856 - RNA, 19 nt, Artificial Sequence
  Description of Artificial Sequence: Synthetic oligonucleotide
cagaacuggucacuaaguc

SEQ ID NO: 865857 - RNA, 19 nt, Artificial Sequence
  Description of Artificial Sequence: Synthetic oligonucleotide
gugaugugccaauaggcuc

SEQ ID NO: 865858 - RNA, 19 nt, Artificial Sequence
  Description of Artificial Sequence: Synthetic oligonucleotide
aagacacauauguggugau

SEQ ID NO: 865859 - RNA, 19 nt, Artificial Sequence
  Description of Artificial Sequence: Synthetic oligonucleotide
gcuuguacggaaugugcgg

SEQ ID NO: 865860 - RNA, 19 nt, Artificial Sequence
  Description of Artificial Sequence: Synthetic oligonucleotide
auguggugaucuuccgccg

SEQ ID NO: 865861 - RNA, 19 nt, Artificial Sequence
  Description of Artificial Sequence: Synthetic oligonucleotide
ggaagaaccaggcaggucu

SEQ ID NO: 865862 - RNA, 19 nt, Artificial Sequence
  Description of Artificial Sequence: Synthetic oligonucleotide
ugauagcaucaucacacuu

SEQ ID NO: 865863 - RNA, 19 nt, Artificial Sequence
  Description of Artificial Sequence: Synthetic oligonucleotide
gauugacccugucagcaga

SEQ ID NO: 865864 - RNA, 19 nt, Artificial Sequence
  Description of Artificial Sequence: Synthetic oligonucleotide
uaagacccuagauuuuaau

SEQ ID NO: 865865 - RNA, 19 nt, Artificial Sequence
  Description of Artificial Sequence: Synthetic oligonucleotide
guuggaggugaucuuccgc

SEQ ID NO: 865866 - RNA, 19 nt, Artificial Sequence
  Description of Artificial Sequence: Synthetic oligonucleotide
auaaccugccaggugccgg

SEQ ID NO: 865867 - RNA, 19 nt, Artificial Sequence
  Description of Artificial Sequence: Synthetic oligonucleotide
augauagcaucaucacacu

SEQ ID NO: 865868 - RNA, 19 nt, Artificial Sequence
  Description of Artificial Sequence: Synthetic oligonucleotide
ugccugucugacaggaaga

SEQ ID NO: 865869 - RNA, 19 nt, Artificial Sequence
  Description of Artificial Sequence: Synthetic oligonucleotide
uccccugaugguuaacaac

SEQ ID NO: 865870 - RNA, 19 nt, Artificial Sequence
  Description of Artificial Sequence: Synthetic oligonucleotide
auucagguagagaugggcu

SEQ ID NO: 865871 - RNA, 19 nt, Artificial Sequence
  Description of Artificial Sequence: Synthetic oligonucleotide
cuacagccaaacacagagc

SEQ ID NO: 865872 - RNA, 19 nt, Artificial Sequence
  Description of Artificial Sequence: Synthetic oligonucleotide
cuuccgccgaaguuuggcc

SEQ ID NO: 865873 - RNA, 19 nt, Artificial Sequence
  Description of Artificial Sequence: Synthetic oligonucleotide
uccugaaacuccugugagu

SEQ ID NO: 865874 - RNA, 19 nt, Artificial Sequence
  Description of Artificial Sequence: Synthetic oligonucleotide
gacacauauguggugaucu

SEQ ID NO: 865875 - RNA, 19 nt, Artificial Sequence
  Description of Artificial Sequence: Synthetic oligonucleotide
gucauuguugagacugucc

SEQ ID NO: 865876 - RNA, 19 nt, Artificial Sequence
  Description of Artificial Sequence: Synthetic oligonucleotide
cacccguaaagauuugguc

SEQ ID NO: 865877 - RNA, 19 nt, Artificial Sequence
  Description of Artificial Sequence: Synthetic oligonucleotide
ucuuccgccgaaguuuggc

SEQ ID NO: 865878 - RNA, 19 nt, Artificial Sequence
  Description of Artificial Sequence: Synthetic oligonucleotide
cuugcugguccugaaacuc

SEQ ID NO: 865879 - RNA, 19 nt, Artificial Sequence
  Description of Artificial Sequence: Synthetic oligonucleotide
cuuucuuugcuggaggcca

SEQ ID NO: 865880 - RNA, 19 nt, Artificial Sequence
  Description of Artificial Sequence: Synthetic oligonucleotide
auguuucucucaaaggggu

SEQ ID NO: 865881 - RNA, 19 nt, Artificial Sequence
  Description of Artificial Sequence: Synthetic oligonucleotide
aggaggcuacucauauucc

SEQ ID NO: 865882 - RNA, 19 nt, Artificial Sequence
  Description of Artificial Sequence: Synthetic oligonucleotide
cuuggcaugugacaucaga

SEQ ID NO: 865883 - RNA, 19 nt, Artificial Sequence
  Description of Artificial Sequence: Synthetic oligonucleotide
cuccugugagugaugugcc

SEQ ID NO: 865884 - RNA, 19 nt, Artificial Sequence
  Description of Artificial Sequence: Synthetic oligonucleotide
acgaagaccuaugguacag

SEQ ID NO: 865885 - RNA, 19 nt, Artificial Sequence
  Description of Artificial Sequence: Synthetic oligonucleotide
gcaagugggugacacaaug

SEQ ID NO: 865886 - RNA, 19 nt, Artificial Sequence
  Description of Artificial Sequence: Synthetic oligonucleotide
uggugguugagacgccaug

SEQ ID NO: 865887 - RNA, 19 nt, Artificial Sequence
  Description of Artificial Sequence: Synthetic oligonucleotide
acuaagacccuagauuuua

SEQ ID NO: 865888 - RNA, 19 nt, Artificial Sequence
  Description of Artificial Sequence: Synthetic oligonucleotide
agcggugugugggucagcg

SEQ ID NO: 865889 - RNA, 19 nt, Artificial Sequence
  Description of Artificial Sequence: Synthetic oligonucleotide
cuauggguguucacaaaca

SEQ ID NO: 865890 - RNA, 19 nt, Artificial Sequence
  Description of Artificial Sequence: Synthetic oligonucleotide
ugcuguagaccuacagcuc

SEQ ID NO: 865891 - RNA, 19 nt, Artificial Sequence
  Description of Artificial Sequence: Synthetic oligonucleotide
ggaucuuagggaauacuug

SEQ ID NO: 865892 - RNA, 19 nt, Artificial Sequence
  Description of Artificial Sequence: Synthetic oligonucleotide
aggagagcauggcaagugu

SEQ ID NO: 865893 - RNA, 19 nt, Artificial Sequence
  Description of Artificial Sequence: Synthetic oligonucleotide
uggcagacuuggcauguga

SEQ ID NO: 865894 - RNA, 19 nt, Artificial Sequence
  Description of Artificial Sequence: Synthetic oligonucleotide
ucagaagcggugugugggu

SEQ ID NO: 865895 - RNA, 19 nt, Artificial Sequence
  Description of Artificial Sequence: Synthetic oligonucleotide
uacggaaugugcggggagc

SEQ ID NO: 865896 - RNA, 19 nt, Artificial Sequence
  Description of Artificial Sequence: Synthetic oligonucleotide
uguacggaaugugcgggga

SEQ ID NO: 865897 - RNA, 19 nt, Artificial Sequence
  Description of Artificial Sequence: Synthetic oligonucleotide
auuuggucgaugaugcaau

SEQ ID NO: 865898 - RNA, 19 nt, Artificial Sequence
  Description of Artificial Sequence: Synthetic oligonucleotide
aaccgcuacacuugaucuu

SEQ ID NO: 865899 - RNA, 19 nt, Artificial Sequence
  Description of Artificial Sequence: Synthetic oligonucleotide
guugagacgccauggcaga

SEQ ID NO: 865900 - RNA, 19 nt, Artificial Sequence
  Description of Artificial Sequence: Synthetic oligonucleotide
uagacaaccuaagccuugu

SEQ ID NO: 865901 - RNA, 19 nt, Artificial Sequence
  Description of Artificial Sequence: Synthetic oligonucleotide
uguguuucccagguugauc

SEQ ID NO: 865902 - RNA, 19 nt, Artificial Sequence
  Description of Artificial Sequence: Synthetic oligonucleotide
acccugucagcagaacugg

SEQ ID NO: 865903 - RNA, 19 nt, Artificial Sequence
  Description of Artificial Sequence: Synthetic oligonucleotide
cugggcucacccauguuuc

SEQ ID NO: 865904 - RNA, 19 nt, Artificial Sequence
  Description of Artificial Sequence: Synthetic oligonucleotide
guugaucaguccacgaaga

SEQ ID NO: 865905 - RNA, 19 nt, Artificial Sequence
  Description of Artificial Sequence: Synthetic oligonucleotide
augauuccccaaaggcagc

SEQ ID NO: 865906 - RNA, 19 nt, Artificial Sequence
  Description of Artificial Sequence: Synthetic oligonucleotide
ccugaaacuccugugagug

SEQ ID NO: 865907 - RNA, 19 nt, Artificial Sequence
  Description of Artificial Sequence: Synthetic oligonucleotide
ccuauggguguucacaaac

SEQ ID NO: 865908 - RNA, 19 nt, Artificial Sequence
  Description of Artificial Sequence: Synthetic oligonucleotide
uuggccgaguguucaaauc

SEQ ID NO: 865909 - RNA, 19 nt, Artificial Sequence
  Description of Artificial Sequence: Synthetic oligonucleotide
ugccccaaauucagguaga

SEQ ID NO: 865910 - RNA, 19 nt, Artificial Sequence
  Description of Artificial Sequence: Synthetic oligonucleotide
uuccaggggaaaagacaca

SEQ ID NO: 865911 - RNA, 19 nt, Artificial Sequence
  Description of Artificial Sequence: Synthetic oligonucleotide
auagacaaccuaagccuug

SEQ ID NO: 865912 - RNA, 19 nt, Artificial Sequence
  Description of Artificial Sequence: Synthetic oligonucleotide
uccaagguccccugauggu

SEQ ID NO: 865913 - RNA, 19 nt, Artificial Sequence
  Description of Artificial Sequence: Synthetic oligonucleotide
ccaaauucagguagagaug

SEQ ID NO: 865914 - RNA, 19 nt, Artificial Sequence
  Description of Artificial Sequence: Synthetic oligonucleotide
gaugggcuaugugcugugg

SEQ ID NO: 865915 - RNA, 19 nt, Artificial Sequence
  Description of Artificial Sequence: Synthetic oligonucleotide
augugcguccugcugcuca

SEQ ID NO: 865916 - RNA, 19 nt, Artificial Sequence
  Description of Artificial Sequence: Synthetic oligonucleotide
cuaugugcuguggggacag

SEQ ID NO: 865917 - RNA, 19 nt, Artificial Sequence
  Description of Artificial Sequence: Synthetic oligonucleotide
acaaugcaaugcagucucc

SEQ ID NO: 865918 - RNA, 19 nt, Artificial Sequence
  Description of Artificial Sequence: Synthetic oligonucleotide
ucgcaggcagucuguaaga

SEQ ID NO: 865919 - RNA, 19 nt, Artificial Sequence
  Description of Artificial Sequence: Synthetic oligonucleotide
ugguagcuauggcaaccgc

SEQ ID NO: 865920 - RNA, 19 nt, Artificial Sequence
  Description of Artificial Sequence: Synthetic oligonucleotide
aacaccgguccaugccuga

SEQ ID NO: 865921 - RNA, 19 nt, Artificial Sequence
  Description of Artificial Sequence: Synthetic oligonucleotide
acggaaugugcggggagcg

SEQ ID NO: 865922 - RNA, 19 nt, Artificial Sequence
  Description of Artificial Sequence: Synthetic oligonucleotide
cauguguuucccagguuga

SEQ ID NO: 865923 - RNA, 19 nt, Artificial Sequence
  Description of Artificial Sequence: Synthetic oligonucleotide
aaacaugcuucagguuugu

SEQ ID NO: 865924 - RNA, 19 nt, Artificial Sequence
  Description of Artificial Sequence: Synthetic oligonucleotide
gcaugugacaucagacugg

SEQ ID NO: 865925 - RNA, 19 nt, Artificial Sequence
  Description of Artificial Sequence: Synthetic oligonucleotide
cagaaugggguggaagaac

SEQ ID NO: 865926 - RNA, 19 nt, Artificial Sequence
  Description of Artificial Sequence: Synthetic oligonucleotide
uguugucauuguugagacu

SEQ ID NO: 865927 - RNA, 19 nt, Artificial Sequence
  Description of Artificial Sequence: Synthetic oligonucleotide
ugccccgaguaaaacuccu

SEQ ID NO: 865928 - RNA, 19 nt, Artificial Sequence
  Description of Artificial Sequence: Synthetic oligonucleotide
uccgccgaaguuuggccga

SEQ ID NO: 865929 - RNA, 19 nt, Artificial Sequence
  Description of Artificial Sequence: Synthetic oligonucleotide
guacggaaugugcggggag

SEQ ID NO: 865930 - RNA, 19 nt, Artificial Sequence
  Description of Artificial Sequence: Synthetic oligonucleotide
uggaggugaucuuccgccu

SEQ ID NO: 865931 - RNA, 19 nt, Artificial Sequence
  Description of Artificial Sequence: Synthetic oligonucleotide
ugcguccugcugcucauaa

SEQ ID NO: 865932 - RNA, 19 nt, Artificial Sequence
  Description of Artificial Sequence: Synthetic oligonucleotide
aggaauucaugugcguccu

SEQ ID NO: 865933 - RNA, 19 nt, Artificial Sequence
  Description of Artificial Sequence: Synthetic oligonucleotide
gacguccagggcugcaaug

SEQ ID NO: 865934 - RNA, 19 nt, Artificial Sequence
  Description of Artificial Sequence: Synthetic oligonucleotide
aaacaccgguccaugccug

SEQ ID NO: 865935 - RNA, 19 nt, Artificial Sequence
  Description of Artificial Sequence: Synthetic oligonucleotide
uguagaccuacagcucaga

SEQ ID NO: 865936 - RNA, 19 nt, Artificial Sequence
  Description of Artificial Sequence: Synthetic oligonucleotide
aucuuagggaauacuugcu

SEQ ID NO: 865937 - RNA, 19 nt, Artificial Sequence
  Description of Artificial Sequence: Synthetic oligonucleotide
cuuuccuauggguguucac

SEQ ID NO: 865938 - RNA, 19 nt, Artificial Sequence
  Description of Artificial Sequence: Synthetic oligonucleotide
caggggaaaagacacauau

SEQ ID NO: 865939 - RNA, 19 nt, Artificial Sequence
  Description of Artificial Sequence: Synthetic oligonucleotide
gccaauaggcuccugggca

SEQ ID NO: 865940 - RNA, 19 nt, Artificial Sequence
  Description of Artificial Sequence: Synthetic oligonucleotide
caucucacagcggugccug

SEQ ID NO: 865941 - RNA, 19 nt, Artificial Sequence
  Description of Artificial Sequence: Synthetic oligonucleotide
gaaaucucucagaagcggu

SEQ ID NO: 865942 - RNA, 19 nt, Artificial Sequence
  Description of Artificial Sequence: Synthetic oligonucleotide
ucaccuuugcagugccggu

SEQ ID NO: 865943 - RNA, 19 nt, Artificial Sequence
  Description of Artificial Sequence: Synthetic oligonucleotide
guagcuauggcaaccgcua

SEQ ID NO: 865944 - RNA, 19 nt, Artificial Sequence
  Description of Artificial Sequence: Synthetic oligonucleotide
uacaguuggaggugaucuu

SEQ ID NO: 865945 - RNA, 19 nt, Artificial Sequence
  Description of Artificial Sequence: Synthetic oligonucleotide
ggaggcuacucauauucca

SEQ ID NO: 865946 - RNA, 19 nt, Artificial Sequence
  Description of Artificial Sequence: Synthetic oligonucleotide
guuaaccacacugcccuca

SEQ ID NO: 865947 - RNA, 19 nt, Artificial Sequence
  Description of Artificial Sequence: Synthetic oligonucleotide
cauaaccugccaggugccg

SEQ ID NO: 865948 - RNA, 19 nt, Artificial Sequence
  Description of Artificial Sequence: Synthetic oligonucleotide
auggguguucacaaacaga

SEQ ID NO: 865949 - RNA, 19 nt, Artificial Sequence
  Description of Artificial Sequence: Synthetic oligonucleotide
uccuauggguguucacaaa

SEQ ID NO: 865950 - RNA, 19 nt, Artificial Sequence
  Description of Artificial Sequence: Synthetic oligonucleotide
ugugagugaugugccaaua

SEQ ID NO: 865951 - RNA, 19 nt, Artificial Sequence
  Description of Artificial Sequence: Synthetic oligonucleotide
gaagaccuaugguacaguu

SEQ ID NO: 865952 - RNA, 19 nt, Artificial Sequence
  Description of Artificial Sequence: Synthetic oligonucleotide
cgaugaugcaauugcagug

SEQ ID NO: 865953 - RNA, 19 nt, Artificial Sequence
  Description of Artificial Sequence: Synthetic oligonucleotide
ccccgaguaaaacuccugg

SEQ ID NO: 865954 - RNA, 19 nt, Artificial Sequence
  Description of Artificial Sequence: Synthetic oligonucleotide
ccccugaugguuaacaaca

SEQ ID NO: 865955 - RNA, 19 nt, Artificial Sequence
  Description of Artificial Sequence: Synthetic oligonucleotide
cuuugcagugccgguggag

SEQ ID NO: 865956 - RNA, 19 nt, Artificial Sequence
  Description of Artificial Sequence: Synthetic oligonucleotide
gugcugacguaugaagcug

SEQ ID NO: 865957 - RNA, 19 nt, Artificial Sequence
  Description of Artificial Sequence: Synthetic oligonucleotide
caaccgcuacacuugaucu

SEQ ID NO: 865958 - RNA, 19 nt, Artificial Sequence
  Description of Artificial Sequence: Synthetic oligonucleotide
acguccagggcugcaauga

SEQ ID NO: 865959 - RNA, 19 nt, Artificial Sequence
  Description of Artificial Sequence: Synthetic oligonucleotide
ucaguccacgaagaccuau

SEQ ID NO: 865960 - RNA, 19 nt, Artificial Sequence
  Description of Artificial Sequence: Synthetic oligonucleotide
aucuuggcuguaaaaccga

SEQ ID NO: 865961 - RNA, 19 nt, Artificial Sequence
  Description of Artificial Sequence: Synthetic oligonucleotide
ggugccccgaguaaaacuc

SEQ ID NO: 865962 - RNA, 19 nt, Artificial Sequence
  Description of Artificial Sequence: Synthetic oligonucleotide
ugugcggggagcggugccc

SEQ ID NO: 865963 - RNA, 19 nt, Artificial Sequence
  Description of Artificial Sequence: Synthetic oligonucleotide
agaggagagcauggcaagu

SEQ ID NO: 865964 - RNA, 19 nt, Artificial Sequence
  Description of Artificial Sequence: Synthetic oligonucleotide
cccguuaaccacacugccc

SEQ ID NO: 865965 - RNA, 19 nt, Artificial Sequence
  Description of Artificial Sequence: Synthetic oligonucleotide
cgaugcaauucauaaagca

SEQ ID NO: 865966 - RNA, 19 nt, Artificial Sequence
  Description of Artificial Sequence: Synthetic oligonucleotide
cuggucuuugugcugacgu

SEQ ID NO: 865967 - RNA, 19 nt, Artificial Sequence
  Description of Artificial Sequence: Synthetic oligonucleotide
caucagacuggagcccacc

SEQ ID NO: 865968 - RNA, 19 nt, Artificial Sequence
  Description of Artificial Sequence: Synthetic oligonucleotide
ugugcguccugcugcucau

SEQ ID NO: 865969 - RNA, 19 nt, Artificial Sequence
  Description of Artificial Sequence: Synthetic oligonucleotide
aggcagucuguaagagugg

SEQ ID NO: 865970 - RNA, 19 nt, Artificial Sequence
  Description of Artificial Sequence: Synthetic oligonucleotide
agcccacccguaaagauuu

SEQ ID NO: 865971 - RNA, 19 nt, Artificial Sequence
  Description of Artificial Sequence: Synthetic oligonucleotide
guuaggguuguuggcuuuc

SEQ ID NO: 865972 - RNA, 19 nt, Artificial Sequence
  Description of Artificial Sequence: Synthetic oligonucleotide
cugacguaugaagcuggug

SEQ ID NO: 865973 - RNA, 19 nt, Artificial Sequence
  Description of Artificial Sequence: Synthetic oligonucleotide
acaucagacuggagcccac

SEQ ID NO: 865974 - RNA, 19 nt, Artificial Sequence
  Description of Artificial Sequence: Synthetic oligonucleotide
aggcagcggcauaaaagag

SEQ ID NO: 865975 - RNA, 19 nt, Artificial Sequence
  Description of Artificial Sequence: Synthetic oligonucleotide
gggugacacaaugcaaugc

SEQ ID NO: 865976 - RNA, 19 nt, Artificial Sequence
  Description of Artificial Sequence: Synthetic oligonucleotide
aaccgaaacuacagccaaa

SEQ ID NO: 865977 - RNA, 19 nt, Artificial Sequence
  Description of Artificial Sequence: Synthetic oligonucleotide
cauuuccccugcuucugga

SEQ ID NO: 865978 - RNA, 19 nt, Artificial Sequence
  Description of Artificial Sequence: Synthetic oligonucleotide
gcucauaaccugccaggug

SEQ ID NO: 865979 - RNA, 19 nt, Artificial Sequence
  Description of Artificial Sequence: Synthetic oligonucleotide
gagcauggcaagugucaaa

SEQ ID NO: 865980 - RNA, 19 nt, Artificial Sequence
  Description of Artificial Sequence: Synthetic oligonucleotide
ggcuaugugcuguggggac

SEQ ID NO: 865981 - RNA, 19 nt, Artificial Sequence
  Description of Artificial Sequence: Synthetic oligonucleotide
cccguaaagauuuggucga

SEQ ID NO: 865982 - RNA, 19 nt, Artificial Sequence
  Description of Artificial Sequence: Synthetic oligonucleotide
caccuuugcagugccggug

SEQ ID NO: 865983 - RNA, 19 nt, Artificial Sequence
  Description of Artificial Sequence: Synthetic oligonucleotide
aagcggugugugggucagc

SEQ ID NO: 865984 - RNA, 19 nt, Artificial Sequence
  Description of Artificial Sequence: Synthetic oligonucleotide
gccauaaagggugucaugu

SEQ ID NO: 865985 - RNA, 19 nt, Artificial Sequence
  Description of Artificial Sequence: Synthetic oligonucleotide
cuuugugcugacguaugaa

SEQ ID NO: 865986 - RNA, 19 nt, Artificial Sequence
  Description of Artificial Sequence: Synthetic oligonucleotide
cugaaacuccugugaguga

SEQ ID NO: 865987 - RNA, 19 nt, Artificial Sequence
  Description of Artificial Sequence: Synthetic oligonucleotide
gacaaggaggcaggccuuc

SEQ ID NO: 865988 - RNA, 19 nt, Artificial Sequence
  Description of Artificial Sequence: Synthetic oligonucleotide
gugguuaggguuguuggcu

SEQ ID NO: 865989 - RNA, 19 nt, Artificial Sequence
  Description of Artificial Sequence: Synthetic oligonucleotide
cuguuugugguagaagagu

SEQ ID NO: 865990 - RNA, 19 nt, Artificial Sequence
  Description of Artificial Sequence: Synthetic oligonucleotide
cagguugaucaguccacga

SEQ ID NO: 865991 - RNA, 19 nt, Artificial Sequence
  Description of Artificial Sequence: Synthetic oligonucleotide
ggucuaaacugauguccca

SEQ ID NO: 865992 - RNA, 19 nt, Artificial Sequence
  Description of Artificial Sequence: Synthetic oligonucleotide
agcgccugcacgaugcaau

SEQ ID NO: 865993 - RNA, 19 nt, Artificial Sequence
  Description of Artificial Sequence: Synthetic oligonucleotide
ggccauaaagggugucaug

SEQ ID NO: 865994 - RNA, 19 nt, Artificial Sequence
  Description of Artificial Sequence: Synthetic oligonucleotide
gacuggagcccacccguaa

SEQ ID NO: 865995 - RNA, 19 nt, Artificial Sequence
  Description of Artificial Sequence: Synthetic oligonucleotide
gccgaaguuuggccgagug

SEQ ID NO: 865996 - RNA, 19 nt, Artificial Sequence
  Description of Artificial Sequence: Synthetic oligonucleotide
cucacccauguuucucuca

SEQ ID NO: 865997 - RNA, 19 nt, Artificial Sequence
  Description of Artificial Sequence: Synthetic oligonucleotide
uugacccugucagcagaac

SEQ ID NO: 865998 - RNA, 19 nt, Artificial Sequence
  Description of Artificial Sequence: Synthetic oligonucleotide
agaagacacuaagacccua

SEQ ID NO: 865999 - RNA, 19 nt, Artificial Sequence
  Description of Artificial Sequence: Synthetic oligonucleotide
ggaacgcaacagaggagag

SEQ ID NO: 866000 - RNA, 19 nt, Artificial Sequence
  Description of Artificial Sequence: Synthetic oligonucleotide
cccugaugguuaacaacag

SEQ ID NO: 866001 - RNA, 19 nt, Artificial Sequence
  Description of Artificial Sequence: Synthetic oligonucleotide
gcggcauaaaagagaagac

SEQ ID NO: 866002 - RNA, 19 nt, Artificial Sequence
  Description of Artificial Sequence: Synthetic oligonucleotide
uguggacucuugguagcua

SEQ ID NO: 866003 - RNA, 19 nt, Artificial Sequence
  Description of Artificial Sequence: Synthetic oligonucleotide
gcaauucauaaagcaugug

SEQ ID NO: 866004 - RNA, 19 nt, Artificial Sequence
  Description of Artificial Sequence: Synthetic oligonucleotide
ucuucgcaggcagucugua

SEQ ID NO: 866005 - RNA, 19 nt, Artificial Sequence
  Description of Artificial Sequence: Synthetic oligonucleotide
cccagguugaucaguccac

SEQ ID NO: 866006 - RNA, 19 nt, Artificial Sequence
  Description of Artificial Sequence: Synthetic oligonucleotide
auugacccugucagcagaa

SEQ ID NO: 866007 - RNA, 19 nt, Artificial Sequence
  Description of Artificial Sequence: Synthetic oligonucleotide
agcauguguuucccagguu

SEQ ID NO: 866008 - RNA, 19 nt, Artificial Sequence
  Description of Artificial Sequence: Synthetic oligonucleotide
ccgaguaaaacuccuggaa

SEQ ID NO: 866009 - RNA, 19 nt, Artificial Sequence
  Description of Artificial Sequence: Synthetic oligonucleotide
cagcggcauaaaagagaag

SEQ ID NO: 866010 - RNA, 19 nt, Artificial Sequence
  Description of Artificial Sequence: Synthetic oligonucleotide
caaacagggaguacuuguu

SEQ ID NO: 866011 - RNA, 19 nt, Artificial Sequence
  Description of Artificial Sequence: Synthetic oligonucleotide
acaccgguccaugccugag

SEQ ID NO: 866012 - RNA, 19 nt, Artificial Sequence
  Description of Artificial Sequence: Synthetic oligonucleotide
ggcagacuuggcaugugac

SEQ ID NO: 866013 - RNA, 19 nt, Artificial Sequence
  Description of Artificial Sequence: Synthetic oligonucleotide
ccccguuaaccacacugcc

SEQ ID NO: 866014 - RNA, 19 nt, Artificial Sequence
  Description of Artificial Sequence: Synthetic oligonucleotide
ggaacuguuugugguagaa

SEQ ID NO: 866015 - RNA, 19 nt, Artificial Sequence
  Description of Artificial Sequence: Synthetic oligonucleotide
uugcagugguuaggguugu

SEQ ID NO: 866016 - RNA, 19 nt, Artificial Sequence
  Description of Artificial Sequence: Synthetic oligonucleotide
gcagugccgguggaggacg

SEQ ID NO: 866017 - RNA, 19 nt, Artificial Sequence
  Description of Artificial Sequence: Synthetic oligonucleotide
gaagaaccaggcaggucua

SEQ ID NO: 866018 - RNA, 19 nt, Artificial Sequence
  Description of Artificial Sequence: Synthetic oligonucleotide
gugccccgaguaaaacucc

SEQ ID NO: 866019 - RNA, 19 nt, Artificial Sequence
  Description of Artificial Sequence: Synthetic oligonucleotide
cagcuguacuugcugugca

SEQ ID NO: 866020 - RNA, 19 nt, Artificial Sequence
  Description of Artificial Sequence: Synthetic oligonucleotide
cagguagagaugggcuaug

SEQ ID NO: 866021 - RNA, 19 nt, Artificial Sequence
  Description of Artificial Sequence: Synthetic oligonucleotide
gagaagacacuaagacccu

SEQ ID NO: 866022 - RNA, 19 nt, Artificial Sequence
  Description of Artificial Sequence: Synthetic oligonucleotide
caggccuucaugaggaguu

SEQ ID NO: 866023 - RNA, 19 nt, Artificial Sequence
  Description of Artificial Sequence: Synthetic oligonucleotide
ugggcucaagggccagaau

SEQ ID NO: 866024 - RNA, 19 nt, Artificial Sequence
  Description of Artificial Sequence: Synthetic oligonucleotide
ggucgaugaugcaauugca

SEQ ID NO: 866025 - RNA, 19 nt, Artificial Sequence
  Description of Artificial Sequence: Synthetic oligonucleotide
ggagagcauggcaaguguc

SEQ ID NO: 866026 - RNA, 19 nt, Artificial Sequence
  Description of Artificial Sequence: Synthetic oligonucleotide
gguacaguuggaggugauc

SEQ ID NO: 866027 - RNA, 19 nt, Artificial Sequence
  Description of Artificial Sequence: Synthetic oligonucleotide
ggaggugaucuuccgccuc

SEQ ID NO: 866028 - RNA, 19 nt, Artificial Sequence
  Description of Artificial Sequence: Synthetic oligonucleotide
gcacgaugcaauucauaaa

SEQ ID NO: 866029 - RNA, 19 nt, Artificial Sequence
  Description of Artificial Sequence: Synthetic oligonucleotide
gguccccugaugguuaaca

SEQ ID NO: 866030 - RNA, 19 nt, Artificial Sequence
  Description of Artificial Sequence: Synthetic oligonucleotide
cuaggccaacugcagugaa

SEQ ID NO: 866031 - RNA, 19 nt, Artificial Sequence
  Description of Artificial Sequence: Synthetic oligonucleotide
auggcagacuuggcaugug

SEQ ID NO: 866032 - RNA, 19 nt, Artificial Sequence
  Description of Artificial Sequence: Synthetic oligonucleotide
gguagcuauggcaaccgcu

SEQ ID NO: 866033 - RNA, 19 nt, Artificial Sequence
  Description of Artificial Sequence: Synthetic oligonucleotide
cuucgcaggcagucuguaa

SEQ ID NO: 866034 - RNA, 19 nt, Artificial Sequence
  Description of Artificial Sequence: Synthetic oligonucleotide
guaaaucuucgcaggcagu

SEQ ID NO: 866035 - RNA, 19 nt, Artificial Sequence
  Description of Artificial Sequence: Synthetic oligonucleotide
ccguuaaccacacugcccu

SEQ ID NO: 866036 - RNA, 19 nt, Artificial Sequence
  Description of Artificial Sequence: Synthetic oligonucleotide
cugcacgaugcaauucaua

SEQ ID NO: 866037 - RNA, 19 nt, Artificial Sequence
  Description of Artificial Sequence: Synthetic oligonucleotide
gugugugggucagcgccug

SEQ ID NO: 866038 - RNA, 19 nt, Artificial Sequence
  Description of Artificial Sequence: Synthetic oligonucleotide
aucuuccgccgaaguuugg

SEQ ID NO: 866039 - RNA, 19 nt, Artificial Sequence
  Description of Artificial Sequence: Synthetic oligonucleotide
ggugaucuuccgccgaagu

SEQ ID NO: 866040 - RNA, 19 nt, Artificial Sequence
  Description of Artificial Sequence: Synthetic oligonucleotide
cccgaguaaaacuccugga

SEQ ID NO: 866041 - RNA, 19 nt, Artificial Sequence
  Description of Artificial Sequence: Synthetic oligonucleotide
agguccccugaugguuaac

SEQ ID NO: 866042 - RNA, 19 nt, Artificial Sequence
  Description of Artificial Sequence: Synthetic oligonucleotide
gccccaaauucagguagag

SEQ ID NO: 866043 - RNA, 19 nt, Artificial Sequence
  Description of Artificial Sequence: Synthetic oligonucleotide
ggcaagugucaaauaguaa

SEQ ID NO: 866044 - RNA, 19 nt, Artificial Sequence
  Description of Artificial Sequence: Synthetic oligonucleotide
ggcgugcguccacaccagg

SEQ ID NO: 866045 - RNA, 19 nt, Artificial Sequence
  Description of Artificial Sequence: Synthetic oligonucleotide
gagcggugccccgaguaaa

SEQ ID NO: 866046 - RNA, 19 nt, Artificial Sequence
  Description of Artificial Sequence: Synthetic oligonucleotide
cacagcugagucccacaaa

SEQ ID NO: 866047 - RNA, 19 nt, Artificial Sequence
  Description of Artificial Sequence: Synthetic oligonucleotide
ugccaggugccgggcgugc

SEQ ID NO: 866048 - RNA, 19 nt, Artificial Sequence
  Description of Artificial Sequence: Synthetic oligonucleotide
cacacugcccucacucccu

SEQ ID NO: 866049 - RNA, 19 nt, Artificial Sequence
  Description of Artificial Sequence: Synthetic oligonucleotide
ccgcuacacuugaucuugg

SEQ ID NO: 866050 - RNA, 19 nt, Artificial Sequence
  Description of Artificial Sequence: Synthetic oligonucleotide
caccgguccaugccugaga

SEQ ID NO: 866051 - RNA, 19 nt, Artificial Sequence
  Description of Artificial Sequence: Synthetic oligonucleotide
agcggugccccgaguaaaa

SEQ ID NO: 866052 - RNA, 19 nt, Artificial Sequence
  Description of Artificial Sequence: Synthetic oligonucleotide
ggucagcgccugcacgaug

SEQ ID NO: 866053 - RNA, 19 nt, Artificial Sequence
  Description of Artificial Sequence: Synthetic oligonucleotide
gcuaugugcuguggggaca

SEQ ID NO: 866054 - RNA, 19 nt, Artificial Sequence
  Description of Artificial Sequence: Synthetic oligonucleotide
ggagcggugccccgaguaa

SEQ ID NO: 866055 - RNA, 19 nt, Artificial Sequence
  Description of Artificial Sequence: Synthetic oligonucleotide
ugccgggcgugcguccaca

SEQ ID NO: 866056 - RNA, 19 nt, Artificial Sequence
  Description of Artificial Sequence: Synthetic oligonucleotide
cacuaagacccuagauuuu

SEQ ID NO: 866057 - RNA, 19 nt, Artificial Sequence
  Description of Artificial Sequence: Synthetic oligonucleotide
caauaggcuccugggcaaa

SEQ ID NO: 866058 - RNA, 19 nt, Artificial Sequence
  Description of Artificial Sequence: Synthetic oligonucleotide
gggagcggugccccgagua

SEQ ID NO: 866059 - RNA, 19 nt, Artificial Sequence
  Description of Artificial Sequence: Synthetic oligonucleotide
ccacuggucuuugugcuga

SEQ ID NO: 866060 - RNA, 19 nt, Artificial Sequence
  Description of Artificial Sequence: Synthetic oligonucleotide
ccgaaacuacagccaaaca

SEQ ID NO: 866061 - RNA, 19 nt, Artificial Sequence
  Description of Artificial Sequence: Synthetic oligonucleotide
gaaggggucuauggugguu

SEQ ID NO: 866062 - RNA, 19 nt, Artificial Sequence
  Description of Artificial Sequence: Synthetic oligonucleotide
ccacccguaaagauuuggu

SEQ ID NO: 866063 - RNA, 19 nt, Artificial Sequence
  Description of Artificial Sequence: Synthetic oligonucleotide
gccccgaguaaaacuccug

SEQ ID NO: 866064 - RNA, 19 nt, Artificial Sequence
  Description of Artificial Sequence: Synthetic oligonucleotide
gcauggcucuccccguuaa

SEQ ID NO: 866065 - RNA, 19 nt, Artificial Sequence
  Description of Artificial Sequence: Synthetic oligonucleotide
gcggugugugggucagcgc

SEQ ID NO: 866066 - RNA, 19 nt, Artificial Sequence
  Description of Artificial Sequence: Synthetic oligonucleotide
ugcagugguuaggguuguu

SEQ ID NO: 866067 - RNA, 19 nt, Artificial Sequence
  Description of Artificial Sequence: Synthetic oligonucleotide
cgggcgugcguccacacca

SEQ ID NO: 866068 - RNA, 19 nt, Artificial Sequence
  Description of Artificial Sequence: Synthetic oligonucleotide
ggaggccauaaaggguguc

SEQ ID NO: 866069 - RNA, 19 nt, Artificial Sequence
  Description of Artificial Sequence: Synthetic oligonucleotide
agacuggagcccacccgua

SEQ ID NO: 866070 - RNA, 19 nt, Artificial Sequence
  Description of Artificial Sequence: Synthetic oligonucleotide
augugccaauaggcuccug

SEQ ID NO: 866071 - RNA, 19 nt, Artificial Sequence
  Description of Artificial Sequence: Synthetic oligonucleotide
gguccaugccugagaaucu

SEQ ID NO: 866072 - RNA, 19 nt, Artificial Sequence
  Description of Artificial Sequence: Synthetic oligonucleotide
gguuaggguuguuggcuuu

SEQ ID NO: 866073 - RNA, 19 nt, Artificial Sequence
  Description of Artificial Sequence: Synthetic oligonucleotide
ccuuuccuauggguguuca

SEQ ID NO: 866074 - RNA, 19 nt, Artificial Sequence
  Description of Artificial Sequence: Synthetic oligonucleotide
cguuaaccacacugcccuc

SEQ ID NO: 866075 - RNA, 19 nt, Artificial Sequence
  Description of Artificial Sequence: Synthetic oligonucleotide
ccccaaauucagguagaga

SEQ ID NO: 866076 - RNA, 19 nt, Artificial Sequence
  Description of Artificial Sequence: Synthetic oligonucleotide
ccgggcgugcguccacacc

SEQ ID NO: 866077 - RNA, 19 nt, Artificial Sequence
  Description of Artificial Sequence: Synthetic oligonucleotide
gugccgggcgugcguccac

SEQ ID NO: 866078 - RNA, 19 nt, Artificial Sequence
  Description of Artificial Sequence: Synthetic oligonucleotide
ggugugugggucagcgccu

SEQ ID NO: 866079 - RNA, 19 nt, Artificial Sequence
  Description of Artificial Sequence: Synthetic oligonucleotide
ccaggggaaaagacacaua

SEQ ID NO: 866080 - RNA, 19 nt, Artificial Sequence
  Description of Artificial Sequence: Synthetic oligonucleotide
cggaaugugcggggagcgg

SEQ ID NO: 866081 - RNA, 19 nt, Artificial Sequence
  Description of Artificial Sequence: Synthetic oligonucleotide
gcggugccccgaguaaaac

SEQ ID NO: 866082 - RNA, 19 nt, Artificial Sequence
  Description of Artificial Sequence: Synthetic oligonucleotide
ccgaguguucaaaucuuuu

SEQ ID NO: 866083 - RNA, 19 nt, Artificial Sequence
  Description of Artificial Sequence: Synthetic oligonucleotide
ccgaaguuuggccgagugu

SEQ ID NO: 866084 - RNA, 19 nt, Artificial Sequence
  Description of Artificial Sequence: Synthetic oligonucleotide
gcugacguaugaagcuggu

SEQ ID NO: 866085 - RNA, 19 nt, Artificial Sequence
  Description of Artificial Sequence: Synthetic oligonucleotide
gcaucucacagcggugccu

SEQ ID NO: 866086 - RNA, 19 nt, Artificial Sequence
  Description of Artificial Sequence: Synthetic oligonucleotide
ggugccugucugacaggaa

SEQ ID NO: 866087 - RNA, 19 nt, Artificial Sequence
  Description of Artificial Sequence: Synthetic oligonucleotide
ggacguccagggcugcaau

SEQ ID NO: 866088 - RNA, 19 nt, Artificial Sequence
  Description of Artificial Sequence: Synthetic oligonucleotide
gccgggcgugcguccacac

SEQ ID NO: 866089 - RNA, 19 nt, Artificial Sequence
  Description of Artificial Sequence: Synthetic oligonucleotide
gcgugcguccacaccaggu

SEQ ID NO: 866090 - RNA, 19 nt, Artificial Sequence
  Description of Artificial Sequence: Synthetic oligonucleotide
ccgccgaaguuuggccgag

SEQ ID NO: 866091 - RNA, 19 nt, Artificial Sequence
  Description of Artificial Sequence: Synthetic oligonucleotide
gccgaguguucaaaucuuu

SEQ ID NO: 866092 - RNA, 19 nt, Artificial Sequence
  Description of Artificial Sequence: Synthetic oligonucleotide
ggcaagugggugacacaau

SEQ ID NO: 866093 - RNA, 19 nt, Artificial Sequence
  Description of Artificial Sequence: Synthetic oligonucleotide
gcccacccguaaagauuug

SEQ ID NO: 866094 - RNA, 19 nt, Artificial Sequence
  Description of Artificial Sequence: Synthetic oligonucleotide
ggccagcacaccugcucau

SEQ ID NO: 866095 - RNA, 19 nt, Artificial Sequence
  Description of Artificial Sequence: Synthetic oligonucleotide
gugcguccugcugcucaua

SEQ ID NO: 866096 - RNA, 19 nt, Artificial Sequence
  Description of Artificial Sequence: Synthetic oligonucleotide
cggggagcggugccccgag

SEQ ID NO: 866097 - RNA, 19 nt, Artificial Sequence
  Description of Artificial Sequence: Synthetic oligonucleotide
cggugccccgaguaaaacu

SEQ ID NO: 866098 - RNA, 19 nt, Artificial Sequence
  Description of Artificial Sequence: Synthetic oligonucleotide
cgccugcacgaugcaauuc

SEQ ID NO: 866099 - RNA, 19 nt, Artificial Sequence
  Description of Artificial Sequence: Synthetic oligonucleotide
gcgccugcacgaugcaauu

SEQ ID NO: 866100 - RNA, 19 nt, Artificial Sequence
  Description of Artificial Sequence: Synthetic oligonucleotide
gcggggagcggugccccga

SEQ ID NO: 866101 - RNA, 19 nt, Artificial Sequence
  Description of Artificial Sequence: Synthetic oligonucleotide
ggcaaccgcuacacuugau

SEQ ID NO: 866102 - RNA, 19 nt, Artificial Sequence
  Description of Artificial Sequence: Synthetic oligonucleotide
gggucagcgccugcacgau

SEQ ID NO: 866103 - RNA, 19 nt, Artificial Sequence
  Description of Artificial Sequence: Synthetic oligonucleotide
ccguaaagauuuggucgau

SEQ ID NO: 866104 - RNA, 19 nt, Artificial Sequence
  Description of Artificial Sequence: Synthetic oligonucleotide
cgccgaaguuuggccgagu

SEQ ID NO: 866105 - RNA, 19 nt, Artificial Sequence
  Description of Artificial Sequence: Synthetic oligonucleotide
uuaaucuauaacaagucgg

SEQ ID NO: 866106 - RNA, 19 nt, Artificial Sequence
  Description of Artificial Sequence: Synthetic oligonucleotide
acaggcauuaaucaggacc

SEQ ID NO: 866107 - RNA, 19 nt, Artificial Sequence
  Description of Artificial Sequence: Synthetic oligonucleotide
uuauuaaucuauaacaagu

SEQ ID NO: 866108 - RNA, 19 nt, Artificial Sequence
  Description of Artificial Sequence: Synthetic oligonucleotide
aagacuacaagguagccag

SEQ ID NO: 866109 - RNA, 19 nt, Artificial Sequence
  Description of Artificial Sequence: Synthetic oligonucleotide
ugcgauaauagccauaucc

SEQ ID NO: 866110 - RNA, 19 nt, Artificial Sequence
  Description of Artificial Sequence: Synthetic oligonucleotide
uuuauuaaucuauaacaag

SEQ ID NO: 866111 - RNA, 19 nt, Artificial Sequence
  Description of Artificial Sequence: Synthetic oligonucleotide
gauauuucgaagcaagaag

SEQ ID NO: 866112 - RNA, 19 nt, Artificial Sequence
  Description of Artificial Sequence: Synthetic oligonucleotide
auuaaucuauaacaagucg

SEQ ID NO: 866113 - RNA, 19 nt, Artificial Sequence
  Description of Artificial Sequence: Synthetic oligonucleotide
aacacagcccaccaagugc

SEQ ID NO: 866114 - RNA, 19 nt, Artificial Sequence
  Description of Artificial Sequence: Synthetic oligonucleotide
acugauaacuugcagcacc

SEQ ID NO: 866115 - RNA, 19 nt, Artificial Sequence
  Description of Artificial Sequence: Synthetic oligonucleotide
aauagccauauccuugggc

SEQ ID NO: 866116 - RNA, 19 nt, Artificial Sequence
  Description of Artificial Sequence: Synthetic oligonucleotide
auaaggaagaacuggcccc

SEQ ID NO: 866117 - RNA, 19 nt, Artificial Sequence
  Description of Artificial Sequence: Synthetic oligonucleotide
uuucgaagcaagaagaaga

SEQ ID NO: 866118 - RNA, 19 nt, Artificial Sequence
  Description of Artificial Sequence: Synthetic oligonucleotide
uuaaucaggaccuaggaaa

SEQ ID NO: 866119 - RNA, 19 nt, Artificial Sequence
  Description of Artificial Sequence: Synthetic oligonucleotide
aauugaagcugauggaguc

SEQ ID NO: 866120 - RNA, 19 nt, Artificial Sequence
  Description of Artificial Sequence: Synthetic oligonucleotide
aaacacagcucccaacacc

SEQ ID NO: 866121 - RNA, 19 nt, Artificial Sequence
  Description of Artificial Sequence: Synthetic oligonucleotide
ugaaggguaacccagccag

SEQ ID NO: 866122 - RNA, 19 nt, Artificial Sequence
  Description of Artificial Sequence: Synthetic oligonucleotide
uuuaaauagagcauaggau

SEQ ID NO: 866123 - RNA, 19 nt, Artificial Sequence
  Description of Artificial Sequence: Synthetic oligonucleotide
uaaucuauaacaagucggc

SEQ ID NO: 866124 - RNA, 19 nt, Artificial Sequence
  Description of Artificial Sequence: Synthetic oligonucleotide
aaucuaguuuuauuaaucu

SEQ ID NO: 866125 - RNA, 19 nt, Artificial Sequence
  Description of Artificial Sequence: Synthetic oligonucleotide
uaugacuccaaacaaggca

SEQ ID NO: 866126 - RNA, 19 nt, Artificial Sequence
  Description of Artificial Sequence: Synthetic oligonucleotide
auaauagccauauccuugg

SEQ ID NO: 866127 - RNA, 19 nt, Artificial Sequence
  Description of Artificial Sequence: Synthetic oligonucleotide
gguacaacaaaccacaggc

SEQ ID NO: 866128 - RNA, 19 nt, Artificial Sequence
  Description of Artificial Sequence: Synthetic oligonucleotide
caucugaucagauagcacc

SEQ ID NO: 866129 - RNA, 19 nt, Artificial Sequence
  Description of Artificial Sequence: Synthetic oligonucleotide
aaauaggucccagaccucc

SEQ ID NO: 866130 - RNA, 19 nt, Artificial Sequence
  Description of Artificial Sequence: Synthetic oligonucleotide
aacaagucggcuugccugc

SEQ ID NO: 866131 - RNA, 19 nt, Artificial Sequence
  Description of Artificial Sequence: Synthetic oligonucleotide
agagcacucauguaggaac

SEQ ID NO: 866132 - RNA, 19 nt, Artificial Sequence
  Description of Artificial Sequence: Synthetic oligonucleotide
uuagccacugauaacuugc

SEQ ID NO: 866133 - RNA, 19 nt, Artificial Sequence
  Description of Artificial Sequence: Synthetic oligonucleotide
uauuaaucuauaacaaguc

SEQ ID NO: 866134 - RNA, 19 nt, Artificial Sequence
  Description of Artificial Sequence: Synthetic oligonucleotide
gaaauugaagcugauggag

SEQ ID NO: 866135 - RNA, 19 nt, Artificial Sequence
  Description of Artificial Sequence: Synthetic oligonucleotide
ugacagugcgauaauagcc

SEQ ID NO: 866136 - RNA, 19 nt, Artificial Sequence
  Description of Artificial Sequence: Synthetic oligonucleotide
augacagugcgauaauagc

SEQ ID NO: 866137 - RNA, 19 nt, Artificial Sequence
  Description of Artificial Sequence: Synthetic oligonucleotide
gagaagacuacguugacca

SEQ ID NO: 866138 - RNA, 19 nt, Artificial Sequence
  Description of Artificial Sequence: Synthetic oligonucleotide
auaacuugcagcaccaugg

SEQ ID NO: 866139 - RNA, 19 nt, Artificial Sequence
  Description of Artificial Sequence: Synthetic oligonucleotide
uauacauaucacuucugcc

SEQ ID NO: 866140 - RNA, 19 nt, Artificial Sequence
  Description of Artificial Sequence: Synthetic oligonucleotide
gaaggagacagccacacac

SEQ ID NO: 866141 - RNA, 19 nt, Artificial Sequence
  Description of Artificial Sequence: Synthetic oligonucleotide
aaagaugacagugcgauaa

SEQ ID NO: 866142 - RNA, 19 nt, Artificial Sequence
  Description of Artificial Sequence: Synthetic oligonucleotide
augacgaggguuuccauac

SEQ ID NO: 866143 - RNA, 19 nt, Artificial Sequence
  Description of Artificial Sequence: Synthetic oligonucleotide
uaguguuuggcgauggugc

SEQ ID NO: 866144 - RNA, 19 nt, Artificial Sequence
  Description of Artificial Sequence: Synthetic oligonucleotide
ucauguaggaacuacccac

SEQ ID NO: 866145 - RNA, 19 nt, Artificial Sequence
  Description of Artificial Sequence: Synthetic oligonucleotide
ucauuagccacugauaacu

SEQ ID NO: 866146 - RNA, 19 nt, Artificial Sequence
  Description of Artificial Sequence: Synthetic oligonucleotide
gauaauagccauauccuug

SEQ ID NO: 866147 - RNA, 19 nt, Artificial Sequence
  Description of Artificial Sequence: Synthetic oligonucleotide
cauaggauggggaauuggg

SEQ ID NO: 866148 - RNA, 19 nt, Artificial Sequence
  Description of Artificial Sequence: Synthetic oligonucleotide
aagacuacguugaccaggc

SEQ ID NO: 866149 - RNA, 19 nt, Artificial Sequence
  Description of Artificial Sequence: Synthetic oligonucleotide
ucacuagucacuguuaccc

SEQ ID NO: 866150 - RNA, 19 nt, Artificial Sequence
  Description of Artificial Sequence: Synthetic oligonucleotide
cuauacauaucacuucugc

SEQ ID NO: 866151 - RNA, 19 nt, Artificial Sequence
  Description of Artificial Sequence: Synthetic oligonucleotide
ugggguacaacaaaccaca

SEQ ID NO: 866152 - RNA, 19 nt, Artificial Sequence
  Description of Artificial Sequence: Synthetic oligonucleotide
ucagauagcaccccacuca

SEQ ID NO: 866153 - RNA, 19 nt, Artificial Sequence
  Description of Artificial Sequence: Synthetic oligonucleotide
agaggugccacacaaguug

SEQ ID NO: 866154 - RNA, 19 nt, Artificial Sequence
  Description of Artificial Sequence: Synthetic oligonucleotide
auuggcuaugacuccaaac

SEQ ID NO: 866155 - RNA, 19 nt, Artificial Sequence
  Description of Artificial Sequence: Synthetic oligonucleotide
aggauuguugccaaaauag

SEQ ID NO: 866156 - RNA, 19 nt, Artificial Sequence
  Description of Artificial Sequence: Synthetic oligonucleotide
uuggggaugcuccauagug

SEQ ID NO: 866157 - RNA, 19 nt, Artificial Sequence
  Description of Artificial Sequence: Synthetic oligonucleotide
gaugacagugcgauaauag

SEQ ID NO: 866158 - RNA, 19 nt, Artificial Sequence
  Description of Artificial Sequence: Synthetic oligonucleotide
uaacaagucggcuugccug

SEQ ID NO: 866159 - RNA, 19 nt, Artificial Sequence
  Description of Artificial Sequence: Synthetic oligonucleotide
aaauagagcauaggauggg

SEQ ID NO: 866160 - RNA, 19 nt, Artificial Sequence
  Description of Artificial Sequence: Synthetic oligonucleotide
auagugaguacucucuuca

SEQ ID NO: 866161 - RNA, 19 nt, Artificial Sequence
  Description of Artificial Sequence: Synthetic oligonucleotide
ugagaggugccacacaagu

SEQ ID NO: 866162 - RNA, 19 nt, Artificial Sequence
  Description of Artificial Sequence: Synthetic oligonucleotide
gauaacuugcagcaccaug

SEQ ID NO: 866163 - RNA, 19 nt, Artificial Sequence
  Description of Artificial Sequence: Synthetic oligonucleotide
aaauccgcccacauuugcc

SEQ ID NO: 866164 - RNA, 19 nt, Artificial Sequence
  Description of Artificial Sequence: Synthetic oligonucleotide
uaucacuucugccacccag

SEQ ID NO: 866165 - RNA, 19 nt, Artificial Sequence
  Description of Artificial Sequence: Synthetic oligonucleotide
ggaacuacccacaagggcg

SEQ ID NO: 866166 - RNA, 19 nt, Artificial Sequence
  Description of Artificial Sequence: Synthetic oligonucleotide
ucuaugcuaaccagagcag

SEQ ID NO: 866167 - RNA, 19 nt, Artificial Sequence
  Description of Artificial Sequence: Synthetic oligonucleotide
aagagaagacuacguugac

SEQ ID NO: 866168 - RNA, 19 nt, Artificial Sequence
  Description of Artificial Sequence: Synthetic oligonucleotide
ucuugggugagucacuagu

SEQ ID NO: 866169 - RNA, 19 nt, Artificial Sequence
  Description of Artificial Sequence: Synthetic oligonucleotide
acucauguaggaacuaccc

SEQ ID NO: 866170 - RNA, 19 nt, Artificial Sequence
  Description of Artificial Sequence: Synthetic oligonucleotide
aaagacugguacuguggag

SEQ ID NO: 866171 - RNA, 19 nt, Artificial Sequence
  Description of Artificial Sequence: Synthetic oligonucleotide
uucgaagcaagaagaagac

SEQ ID NO: 866172 - RNA, 19 nt, Artificial Sequence
  Description of Artificial Sequence: Synthetic oligonucleotide
acuagucacuguuacccgg

SEQ ID NO: 866173 - RNA, 19 nt, Artificial Sequence
  Description of Artificial Sequence: Synthetic oligonucleotide
auauuucgaagcaagaaga

SEQ ID NO: 866174 - RNA, 19 nt, Artificial Sequence
  Description of Artificial Sequence: Synthetic oligonucleotide
agacauuguagacacagaa

SEQ ID NO: 866175 - RNA, 19 nt, Artificial Sequence
  Description of Artificial Sequence: Synthetic oligonucleotide
agaaauugaagcugaugga

SEQ ID NO: 866176 - RNA, 19 nt, Artificial Sequence
  Description of Artificial Sequence: Synthetic oligonucleotide
aaagacuacaagguagcca

SEQ ID NO: 866177 - RNA, 19 nt, Artificial Sequence
  Description of Artificial Sequence: Synthetic oligonucleotide
caggguauugaugagaaug

SEQ ID NO: 866178 - RNA, 19 nt, Artificial Sequence
  Description of Artificial Sequence: Synthetic oligonucleotide
aauagcaugagaggugcca

SEQ ID NO: 866179 - RNA, 19 nt, Artificial Sequence
  Description of Artificial Sequence: Synthetic oligonucleotide
uaguaucaaaucuaguuuu

SEQ ID NO: 866180 - RNA, 19 nt, Artificial Sequence
  Description of Artificial Sequence: Synthetic oligonucleotide
agaaugguggcuuccucuc

SEQ ID NO: 866181 - RNA, 19 nt, Artificial Sequence
  Description of Artificial Sequence: Synthetic oligonucleotide
ccauugagaaaccagagag

SEQ ID NO: 866182 - RNA, 19 nt, Artificial Sequence
  Description of Artificial Sequence: Synthetic oligonucleotide
cuccaaacaaggcaauggg

SEQ ID NO: 866183 - RNA, 19 nt, Artificial Sequence
  Description of Artificial Sequence: Synthetic oligonucleotide
uguaggaacuacccacaag

SEQ ID NO: 866184 - RNA, 19 nt, Artificial Sequence
  Description of Artificial Sequence: Synthetic oligonucleotide
ugaauacaggaguugucug

SEQ ID NO: 866185 - RNA, 19 nt, Artificial Sequence
  Description of Artificial Sequence: Synthetic oligonucleotide
acuacaagguagccagugg

SEQ ID NO: 866186 - RNA, 19 nt, Artificial Sequence
  Description of Artificial Sequence: Synthetic oligonucleotide
caacaggccaugacgaggg

SEQ ID NO: 866187 - RNA, 19 nt, Artificial Sequence
  Description of Artificial Sequence: Synthetic oligonucleotide
uugcgguugaaguaguaca

SEQ ID NO: 866188 - RNA, 19 nt, Artificial Sequence
  Description of Artificial Sequence: Synthetic oligonucleotide
uauuucgaagcaagaagaa

SEQ ID NO: 866189 - RNA, 19 nt, Artificial Sequence
  Description of Artificial Sequence: Synthetic oligonucleotide
aauccgcccacauuugcca

SEQ ID NO: 866190 - RNA, 19 nt, Artificial Sequence
  Description of Artificial Sequence: Synthetic oligonucleotide
caagagaagacuacguuga

SEQ ID NO: 866191 - RNA, 19 nt, Artificial Sequence
  Description of Artificial Sequence: Synthetic oligonucleotide
aucagauagcaccccacuc

SEQ ID NO: 866192 - RNA, 19 nt, Artificial Sequence
  Description of Artificial Sequence: Synthetic oligonucleotide
cugcuaagaagccuugggg

SEQ ID NO: 866193 - RNA, 19 nt, Artificial Sequence
  Description of Artificial Sequence: Synthetic oligonucleotide
auuaaucaggaccuaggaa

SEQ ID NO: 866194 - RNA, 19 nt, Artificial Sequence
  Description of Artificial Sequence: Synthetic oligonucleotide
gagguauuggcaauaacuc

SEQ ID NO: 866195 - RNA, 19 nt, Artificial Sequence
  Description of Artificial Sequence: Synthetic oligonucleotide
aaugggaccauaagaagaa

SEQ ID NO: 866196 - RNA, 19 nt, Artificial Sequence
  Description of Artificial Sequence: Synthetic oligonucleotide
gaauugggaccucauuagc

SEQ ID NO: 866197 - RNA, 19 nt, Artificial Sequence
  Description of Artificial Sequence: Synthetic oligonucleotide
aucuauaacaagucggcuu

SEQ ID NO: 866198 - RNA, 19 nt, Artificial Sequence
  Description of Artificial Sequence: Synthetic oligonucleotide
auuucgaagcaagaagaag

SEQ ID NO: 866199 - RNA, 19 nt, Artificial Sequence
  Description of Artificial Sequence: Synthetic oligonucleotide
caugagucccacaauagca

SEQ ID NO: 866200 - RNA, 19 nt, Artificial Sequence
  Description of Artificial Sequence: Synthetic oligonucleotide
uccacuaaggauggcauga

SEQ ID NO: 866201 - RNA, 19 nt, Artificial Sequence
  Description of Artificial Sequence: Synthetic oligonucleotide
acauaucacuucugccacc

SEQ ID NO: 866202 - RNA, 19 nt, Artificial Sequence
  Description of Artificial Sequence: Synthetic oligonucleotide
uugggugagucacuaguca

SEQ ID NO: 866203 - RNA, 19 nt, Artificial Sequence
  Description of Artificial Sequence: Synthetic oligonucleotide
aaucuauaacaagucggcu

SEQ ID NO: 866204 - RNA, 19 nt, Artificial Sequence
  Description of Artificial Sequence: Synthetic oligonucleotide
uguugccaaaauagguccc

SEQ ID NO: 866205 - RNA, 19 nt, Artificial Sequence
  Description of Artificial Sequence: Synthetic oligonucleotide
gcuaugacuccaaacaagg

SEQ ID NO: 866206 - RNA, 19 nt, Artificial Sequence
  Description of Artificial Sequence: Synthetic oligonucleotide
agguauuggcaauaacucu

SEQ ID NO: 866207 - RNA, 19 nt, Artificial Sequence
  Description of Artificial Sequence: Synthetic oligonucleotide
ggugcggauauuucgaagc

SEQ ID NO: 866208 - RNA, 19 nt, Artificial Sequence
  Description of Artificial Sequence: Synthetic oligonucleotide
gugaguacucucuucacuc

SEQ ID NO: 866209 - RNA, 19 nt, Artificial Sequence
  Description of Artificial Sequence: Synthetic oligonucleotide
aguacucucuucacucugc

SEQ ID NO: 866210 - RNA, 19 nt, Artificial Sequence
  Description of Artificial Sequence: Synthetic oligonucleotide
auagcaugagaggugccac

SEQ ID NO: 866211 - RNA, 19 nt, Artificial Sequence
  Description of Artificial Sequence: Synthetic oligonucleotide
gguauuggcaauaacucug

SEQ ID NO: 866212 - RNA, 19 nt, Artificial Sequence
  Description of Artificial Sequence: Synthetic oligonucleotide
agugcgauaauagccauau

SEQ ID NO: 866213 - RNA, 19 nt, Artificial Sequence
  Description of Artificial Sequence: Synthetic oligonucleotide
cacucauguaggaacuacc

SEQ ID NO: 866214 - RNA, 19 nt, Artificial Sequence
  Description of Artificial Sequence: Synthetic oligonucleotide
cuuuccuggauaaggaaga

SEQ ID NO: 866215 - RNA, 19 nt, Artificial Sequence
  Description of Artificial Sequence: Synthetic oligonucleotide
ccaaacaaggcaaugggac

SEQ ID NO: 866216 - RNA, 19 nt, Artificial Sequence
  Description of Artificial Sequence: Synthetic oligonucleotide
gaaauccgcccacauuugc

SEQ ID NO: 866217 - RNA, 19 nt, Artificial Sequence
  Description of Artificial Sequence: Synthetic oligonucleotide
ggugaugagccccaaauca

SEQ ID NO: 866218 - RNA, 19 nt, Artificial Sequence
  Description of Artificial Sequence: Synthetic oligonucleotide
agaagacaagugugcuggc

SEQ ID NO: 866219 - RNA, 19 nt, Artificial Sequence
  Description of Artificial Sequence: Synthetic oligonucleotide
cauaucacuucugccaccc

SEQ ID NO: 866220 - RNA, 19 nt, Artificial Sequence
  Description of Artificial Sequence: Synthetic oligonucleotide
agccauauccuugggcugc

SEQ ID NO: 866221 - RNA, 19 nt, Artificial Sequence
  Description of Artificial Sequence: Synthetic oligonucleotide
uccaagagaagacuacguu

SEQ ID NO: 866222 - RNA, 19 nt, Artificial Sequence
  Description of Artificial Sequence: Synthetic oligonucleotide
auaacaagucggcuugccu

SEQ ID NO: 866223 - RNA, 19 nt, Artificial Sequence
  Description of Artificial Sequence: Synthetic oligonucleotide
auaguguuuggcgauggug

SEQ ID NO: 866224 - RNA, 19 nt, Artificial Sequence
  Description of Artificial Sequence: Synthetic oligonucleotide
ugaucagauagcaccccac

SEQ ID NO: 866225 - RNA, 19 nt, Artificial Sequence
  Description of Artificial Sequence: Synthetic oligonucleotide
uggaugaguagcaggcaga

SEQ ID NO: 866226 - RNA, 19 nt, Artificial Sequence
  Description of Artificial Sequence: Synthetic oligonucleotide
aggagacagccacacacag

SEQ ID NO: 866227 - RNA, 19 nt, Artificial Sequence
  Description of Artificial Sequence: Synthetic oligonucleotide
uauaacaagucggcuugcc

SEQ ID NO: 866228 - RNA, 19 nt, Artificial Sequence
  Description of Artificial Sequence: Synthetic oligonucleotide
auacacagacagcccugcc

SEQ ID NO: 866229 - RNA, 19 nt, Artificial Sequence
  Description of Artificial Sequence: Synthetic oligonucleotide
guagaaauugaagcugaug

SEQ ID NO: 866230 - RNA, 19 nt, Artificial Sequence
  Description of Artificial Sequence: Synthetic oligonucleotide
agcaugagaggugccacac

SEQ ID NO: 866231 - RNA, 19 nt, Artificial Sequence
  Description of Artificial Sequence: Synthetic oligonucleotide
acuaaggauggcaugacaa

SEQ ID NO: 866232 - RNA, 19 nt, Artificial Sequence
  Description of Artificial Sequence: Synthetic oligonucleotide
cuaugcuaaccagagcagc

SEQ ID NO: 866233 - RNA, 19 nt, Artificial Sequence
  Description of Artificial Sequence: Synthetic oligonucleotide
cauuaaucaggaccuagga

SEQ ID NO: 866234 - RNA, 19 nt, Artificial Sequence
  Description of Artificial Sequence: Synthetic oligonucleotide
caggccauugagaaaccag

SEQ ID NO: 866235 - RNA, 19 nt, Artificial Sequence
  Description of Artificial Sequence: Synthetic oligonucleotide
ucucauuggcuaugacucc

SEQ ID NO: 866236 - RNA, 19 nt, Artificial Sequence
  Description of Artificial Sequence: Synthetic oligonucleotide
uggcuaugacuccaaacaa

SEQ ID NO: 866237 - RNA, 19 nt, Artificial Sequence
  Description of Artificial Sequence: Synthetic oligonucleotide
augacaaaggagaagguuu

SEQ ID NO: 866238 - RNA, 19 nt, Artificial Sequence
  Description of Artificial Sequence: Synthetic oligonucleotide
cauagugaguacucucuuc

SEQ ID NO: 866239 - RNA, 19 nt, Artificial Sequence
  Description of Artificial Sequence: Synthetic oligonucleotide
ugcuucgccagcuguagcu

SEQ ID NO: 866240 - RNA, 19 nt, Artificial Sequence
  Description of Artificial Sequence: Synthetic oligonucleotide
gcuaguagugcccagaucu

SEQ ID NO: 866241 - RNA, 19 nt, Artificial Sequence
  Description of Artificial Sequence: Synthetic oligonucleotide
ggauuguugccaaaauagg

SEQ ID NO: 866242 - RNA, 19 nt, Artificial Sequence
  Description of Artificial Sequence: Synthetic oligonucleotide
uccagcuauaguguuuggc

SEQ ID NO: 866243 - RNA, 19 nt, Artificial Sequence
  Description of Artificial Sequence: Synthetic oligonucleotide
ugggugagucacuagucac

SEQ ID NO: 866244 - RNA, 19 nt, Artificial Sequence
  Description of Artificial Sequence: Synthetic oligonucleotide
ccaagagaagacuacguug

SEQ ID NO: 866245 - RNA, 19 nt, Artificial Sequence
  Description of Artificial Sequence: Synthetic oligonucleotide
ugaguacucucuucacucu

SEQ ID NO: 866246 - RNA, 19 nt, Artificial Sequence
  Description of Artificial Sequence: Synthetic oligonucleotide
cuugacugcuccugcuugc

SEQ ID NO: 866247 - RNA, 19 nt, Artificial Sequence
  Description of Artificial Sequence: Synthetic oligonucleotide
gaugagaaugguggcuucc

SEQ ID NO: 866248 - RNA, 19 nt, Artificial Sequence
  Description of Artificial Sequence: Synthetic oligonucleotide
uacucggcccaucuuggug

SEQ ID NO: 866249 - RNA, 19 nt, Artificial Sequence
  Description of Artificial Sequence: Synthetic oligonucleotide
ugaacagcaacaggccaug

SEQ ID NO: 866250 - RNA, 19 nt, Artificial Sequence
  Description of Artificial Sequence: Synthetic oligonucleotide
cucauuagccacugauaac

SEQ ID NO: 866251 - RNA, 19 nt, Artificial Sequence
  Description of Artificial Sequence: Synthetic oligonucleotide
cuugggugagucacuaguc

SEQ ID NO: 866252 - RNA, 19 nt, Artificial Sequence
  Description of Artificial Sequence: Synthetic oligonucleotide
cacuagucacuguuacccg

SEQ ID NO: 866253 - RNA, 19 nt, Artificial Sequence
  Description of Artificial Sequence: Synthetic oligonucleotide
ugugcuucgccagcuguag

SEQ ID NO: 866254 - RNA, 19 nt, Artificial Sequence
  Description of Artificial Sequence: Synthetic oligonucleotide
gugcuggcuauacauauca

SEQ ID NO: 866255 - RNA, 19 nt, Artificial Sequence
  Description of Artificial Sequence: Synthetic oligonucleotide
auaggcugccgacuggcug

SEQ ID NO: 866256 - RNA, 19 nt, Artificial Sequence
  Description of Artificial Sequence: Synthetic oligonucleotide
uagccaguggagagcaccc

SEQ ID NO: 866257 - RNA, 19 nt, Artificial Sequence
  Description of Artificial Sequence: Synthetic oligonucleotide
uggcuauacauaucacuuc

SEQ ID NO: 866258 - RNA, 19 nt, Artificial Sequence
  Description of Artificial Sequence: Synthetic oligonucleotide
uugucccaggguauugaug

SEQ ID NO: 866259 - RNA, 19 nt, Artificial Sequence
  Description of Artificial Sequence: Synthetic oligonucleotide
ugccaaacugggauggcuc

SEQ ID NO: 866260 - RNA, 19 nt, Artificial Sequence
  Description of Artificial Sequence: Synthetic oligonucleotide
uggugcggauauuucgaag

SEQ ID NO: 866261 - RNA, 19 nt, Artificial Sequence
  Description of Artificial Sequence: Synthetic oligonucleotide
cuuggugcggauauuucga

SEQ ID NO: 866262 - RNA, 19 nt, Artificial Sequence
  Description of Artificial Sequence: Synthetic oligonucleotide
ggguacaacaaaccacagg

SEQ ID NO: 866263 - RNA, 19 nt, Artificial Sequence
  Description of Artificial Sequence: Synthetic oligonucleotide
agcucccaacaccaggauc

SEQ ID NO: 866264 - RNA, 19 nt, Artificial Sequence
  Description of Artificial Sequence: Synthetic oligonucleotide
uauaguguuuggcgauggu

SEQ ID NO: 866265 - RNA, 19 nt, Artificial Sequence
  Description of Artificial Sequence: Synthetic oligonucleotide
ggagacacccugaauacag

SEQ ID NO: 866266 - RNA, 19 nt, Artificial Sequence
  Description of Artificial Sequence: Synthetic oligonucleotide
aagaugacagugcgauaau

SEQ ID NO: 866267 - RNA, 19 nt, Artificial Sequence
  Description of Artificial Sequence: Synthetic oligonucleotide
gguauugaugagaauggug

SEQ ID NO: 866268 - RNA, 19 nt, Artificial Sequence
  Description of Artificial Sequence: Synthetic oligonucleotide
uggugaugagccccaaauc

SEQ ID NO: 866269 - RNA, 19 nt, Artificial Sequence
  Description of Artificial Sequence: Synthetic oligonucleotide
uguuacccggaagaggaac

SEQ ID NO: 866270 - RNA, 19 nt, Artificial Sequence
  Description of Artificial Sequence: Synthetic oligonucleotide
uuuugucccaggguauuga

SEQ ID NO: 866271 - RNA, 19 nt, Artificial Sequence
  Description of Artificial Sequence: Synthetic oligonucleotide
uuggggacugagguauugg

SEQ ID NO: 866272 - RNA, 19 nt, Artificial Sequence
  Description of Artificial Sequence: Synthetic oligonucleotide
cuaagaagccuugggguac

SEQ ID NO: 866273 - RNA, 19 nt, Artificial Sequence
  Description of Artificial Sequence: Synthetic oligonucleotide
uuccacuaaggauggcaug

SEQ ID NO: 866274 - RNA, 19 nt, Artificial Sequence
  Description of Artificial Sequence: Synthetic oligonucleotide
cccacaauagcaugagagg

SEQ ID NO: 866275 - RNA, 19 nt, Artificial Sequence
  Description of Artificial Sequence: Synthetic oligonucleotide
auaggucccagaccuccag

SEQ ID NO: 866276 - RNA, 19 nt, Artificial Sequence
  Description of Artificial Sequence: Synthetic oligonucleotide
cuguggagcuccaagagaa

SEQ ID NO: 866277 - RNA, 19 nt, Artificial Sequence
  Description of Artificial Sequence: Synthetic oligonucleotide
uugaugagaaugguggcuu

SEQ ID NO: 866278 - RNA, 19 nt, Artificial Sequence
  Description of Artificial Sequence: Synthetic oligonucleotide
agcuauaguguuuggcgau

SEQ ID NO: 866279 - RNA, 19 nt, Artificial Sequence
  Description of Artificial Sequence: Synthetic oligonucleotide
ucugaucagauagcacccc

SEQ ID NO: 866280 - RNA, 19 nt, Artificial Sequence
  Description of Artificial Sequence: Synthetic oligonucleotide
gucacuagucacuguuacc

SEQ ID NO: 866281 - RNA, 19 nt, Artificial Sequence
  Description of Artificial Sequence: Synthetic oligonucleotide
gcauuaaucaggaccuagg

SEQ ID NO: 866282 - RNA, 19 nt, Artificial Sequence
  Description of Artificial Sequence: Synthetic oligonucleotide
cauggagguccaaggagac

SEQ ID NO: 866283 - RNA, 19 nt, Artificial Sequence
  Description of Artificial Sequence: Synthetic oligonucleotide
guagccaguggagagcacc

SEQ ID NO: 866284 - RNA, 19 nt, Artificial Sequence
  Description of Artificial Sequence: Synthetic oligonucleotide
auggugcugaaggguaacc

SEQ ID NO: 866285 - RNA, 19 nt, Artificial Sequence
  Description of Artificial Sequence: Synthetic oligonucleotide
cuaguagugcccagaucug

SEQ ID NO: 866286 - RNA, 19 nt, Artificial Sequence
  Description of Artificial Sequence: Synthetic oligonucleotide
aaggguaacccagccagaa

SEQ ID NO: 866287 - RNA, 19 nt, Artificial Sequence
  Description of Artificial Sequence: Synthetic oligonucleotide
aacuggccccagucuguac

SEQ ID NO: 866288 - RNA, 19 nt, Artificial Sequence
  Description of Artificial Sequence: Synthetic oligonucleotide
ugagccccaaaucauccuu

SEQ ID NO: 866289 - RNA, 19 nt, Artificial Sequence
  Description of Artificial Sequence: Synthetic oligonucleotide
agacugguacuguggagcu

SEQ ID NO: 866290 - RNA, 19 nt, Artificial Sequence
  Description of Artificial Sequence: Synthetic oligonucleotide
uggagagcacccauagaua

SEQ ID NO: 866291 - RNA, 19 nt, Artificial Sequence
  Description of Artificial Sequence: Synthetic oligonucleotide
agcuaguagugcccagauc

SEQ ID NO: 866292 - RNA, 19 nt, Artificial Sequence
  Description of Artificial Sequence: Synthetic oligonucleotide
guggagagcacccauagau

SEQ ID NO: 866293 - RNA, 19 nt, Artificial Sequence
  Description of Artificial Sequence: Synthetic oligonucleotide
caugagaggugccacacaa

SEQ ID NO: 866294 - RNA, 19 nt, Artificial Sequence
  Description of Artificial Sequence: Synthetic oligonucleotide
agaucugcugagcuggguu

SEQ ID NO: 866295 - RNA, 19 nt, Artificial Sequence
  Description of Artificial Sequence: Synthetic oligonucleotide
guuuccauacacagacagc

SEQ ID NO: 866296 - RNA, 19 nt, Artificial Sequence
  Description of Artificial Sequence: Synthetic oligonucleotide
cugauaacuugcagcacca

SEQ ID NO: 866297 - RNA, 19 nt, Artificial Sequence
  Description of Artificial Sequence: Synthetic oligonucleotide
caaagacuacaagguagcc

SEQ ID NO: 866298 - RNA, 19 nt, Artificial Sequence
  Description of Artificial Sequence: Synthetic oligonucleotide
guacucucuucacucugcc

SEQ ID NO: 866299 - RNA, 19 nt, Artificial Sequence
  Description of Artificial Sequence: Synthetic oligonucleotide
ugucuguuagaagguagaa

SEQ ID NO: 866300 - RNA, 19 nt, Artificial Sequence
  Description of Artificial Sequence: Synthetic oligonucleotide
agccacugauaacuugcag

SEQ ID NO: 866301 - RNA, 19 nt, Artificial Sequence
  Description of Artificial Sequence: Synthetic oligonucleotide
ucgaagcaagaagaagaca

SEQ ID NO: 866302 - RNA, 19 nt, Artificial Sequence
  Description of Artificial Sequence: Synthetic oligonucleotide
aagaaggguacaggagaca

SEQ ID NO: 866303 - RNA, 19 nt, Artificial Sequence
  Description of Artificial Sequence: Synthetic oligonucleotide
acacagaauggcaaagggu

SEQ ID NO: 866304 - RNA, 19 nt, Artificial Sequence
  Description of Artificial Sequence: Synthetic oligonucleotide
ucacuucugccacccagaa

SEQ ID NO: 866305 - RNA, 19 nt, Artificial Sequence
  Description of Artificial Sequence: Synthetic oligonucleotide
cuaaggauggcaugacaaa

SEQ ID NO: 866306 - RNA, 19 nt, Artificial Sequence
  Description of Artificial Sequence: Synthetic oligonucleotide
uuugucccaggguauugau

SEQ ID NO: 866307 - RNA, 19 nt, Artificial Sequence
  Description of Artificial Sequence: Synthetic oligonucleotide
auaggauggggaauuggga

SEQ ID NO: 866308 - RNA, 19 nt, Artificial Sequence
  Description of Artificial Sequence: Synthetic oligonucleotide
agacaagugugcuggcuau

SEQ ID NO: 866309 - RNA, 19 nt, Artificial Sequence
  Description of Artificial Sequence: Synthetic oligonucleotide
ccugcuaagaagccuuggg

SEQ ID NO: 866310 - RNA, 19 nt, Artificial Sequence
  Description of Artificial Sequence: Synthetic oligonucleotide
uugaagcugauggagucua

SEQ ID NO: 866311 - RNA, 19 nt, Artificial Sequence
  Description of Artificial Sequence: Synthetic oligonucleotide
gaugcuccauagugaguac

SEQ ID NO: 866312 - RNA, 19 nt, Artificial Sequence
  Description of Artificial Sequence: Synthetic oligonucleotide
agugccaaacugggauggc

SEQ ID NO: 866313 - RNA, 19 nt, Artificial Sequence
  Description of Artificial Sequence: Synthetic oligonucleotide
aggccauugagaaaccaga

SEQ ID NO: 866314 - RNA, 19 nt, Artificial Sequence
  Description of Artificial Sequence: Synthetic oligonucleotide
uagcaugagaggugccaca

SEQ ID NO: 866315 - RNA, 19 nt, Artificial Sequence
  Description of Artificial Sequence: Synthetic oligonucleotide
cucauguaggaacuaccca

SEQ ID NO: 866316 - RNA, 19 nt, Artificial Sequence
  Description of Artificial Sequence: Synthetic oligonucleotide
aggaccuaggaaaggaaga

SEQ ID NO: 866317 - RNA, 19 nt, Artificial Sequence
  Description of Artificial Sequence: Synthetic oligonucleotide
uacguugaccaggccaacc

SEQ ID NO: 866318 - RNA, 19 nt, Artificial Sequence
  Description of Artificial Sequence: Synthetic oligonucleotide
gcggauauuucgaagcaag

SEQ ID NO: 866319 - RNA, 19 nt, Artificial Sequence
  Description of Artificial Sequence: Synthetic oligonucleotide
auacaggaguugucugucu

SEQ ID NO: 866320 - RNA, 19 nt, Artificial Sequence
  Description of Artificial Sequence: Synthetic oligonucleotide
cagaaauccgcccacauuu

SEQ ID NO: 866321 - RNA, 19 nt, Artificial Sequence
  Description of Artificial Sequence: Synthetic oligonucleotide
ggcuaugacuccaaacaag

SEQ ID NO: 866322 - RNA, 19 nt, Artificial Sequence
  Description of Artificial Sequence: Synthetic oligonucleotide
gggaauugggaccucauua

SEQ ID NO: 866323 - RNA, 19 nt, Artificial Sequence
  Description of Artificial Sequence: Synthetic oligonucleotide
agacuacguugaccaggcc

SEQ ID NO: 866324 - RNA, 19 nt, Artificial Sequence
  Description of Artificial Sequence: Synthetic oligonucleotide
uuggugcggauauuucgaa

SEQ ID NO: 866325 - RNA, 19 nt, Artificial Sequence
  Description of Artificial Sequence: Synthetic oligonucleotide
cagcuauaguguuuggcga

SEQ ID NO: 866326 - RNA, 19 nt, Artificial Sequence
  Description of Artificial Sequence: Synthetic oligonucleotide
ugcccucuuuccuggauaa

SEQ ID NO: 866327 - RNA, 19 nt, Artificial Sequence
  Description of Artificial Sequence: Synthetic oligonucleotide
ugcuggcuauacauaucac

SEQ ID NO: 866328 - RNA, 19 nt, Artificial Sequence
  Description of Artificial Sequence: Synthetic oligonucleotide
cuagucacuguuacccgga

SEQ ID NO: 866329 - RNA, 19 nt, Artificial Sequence
  Description of Artificial Sequence: Synthetic oligonucleotide
aauaggucccagaccucca

SEQ ID NO: 866330 - RNA, 19 nt, Artificial Sequence
  Description of Artificial Sequence: Synthetic oligonucleotide
cuggcuauacauaucacuu

SEQ ID NO: 866331 - RNA, 19 nt, Artificial Sequence
  Description of Artificial Sequence: Synthetic oligonucleotide
gugggguccagauuucgga

SEQ ID NO: 866332 - RNA, 19 nt, Artificial Sequence
  Description of Artificial Sequence: Synthetic oligonucleotide
uuuugcgguugaaguagua

SEQ ID NO: 866333 - RNA, 19 nt, Artificial Sequence
  Description of Artificial Sequence: Synthetic oligonucleotide
ggguacucggcccaucuug

SEQ ID NO: 866334 - RNA, 19 nt, Artificial Sequence
  Description of Artificial Sequence: Synthetic oligonucleotide
ugacuccaaacaaggcaau

SEQ ID NO: 866335 - RNA, 19 nt, Artificial Sequence
  Description of Artificial Sequence: Synthetic oligonucleotide
gauccuguagggugcucuc

SEQ ID NO: 866336 - RNA, 19 nt, Artificial Sequence
  Description of Artificial Sequence: Synthetic oligonucleotide
gaagaacuggccccagucu

SEQ ID NO: 866337 - RNA, 19 nt, Artificial Sequence
  Description of Artificial Sequence: Synthetic oligonucleotide
gcgagcacucaucugauca

SEQ ID NO: 866338 - RNA, 19 nt, Artificial Sequence
  Description of Artificial Sequence: Synthetic oligonucleotide
cuauaacaagucggcuugc

SEQ ID NO: 866339 - RNA, 19 nt, Artificial Sequence
  Description of Artificial Sequence: Synthetic oligonucleotide
aucuuggugcggauauuuc

SEQ ID NO: 866340 - RNA, 19 nt, Artificial Sequence
  Description of Artificial Sequence: Synthetic oligonucleotide
uaagaagccuugggguaca

SEQ ID NO: 866341 - RNA, 19 nt, Artificial Sequence
  Description of Artificial Sequence: Synthetic oligonucleotide
agcgagcacucaucugauc

SEQ ID NO: 866342 - RNA, 19 nt, Artificial Sequence
  Description of Artificial Sequence: Synthetic oligonucleotide
ccuugggguacaacaaacc

SEQ ID NO: 866343 - RNA, 19 nt, Artificial Sequence
  Description of Artificial Sequence: Synthetic oligonucleotide
gaguccaacaucagcaggu

SEQ ID NO: 866344 - RNA, 19 nt, Artificial Sequence
  Description of Artificial Sequence: Synthetic oligonucleotide
gauccagaucuugggugag

SEQ ID NO: 866345 - RNA, 19 nt, Artificial Sequence
  Description of Artificial Sequence: Synthetic oligonucleotide
uuaugcccugccggggagg

SEQ ID NO: 866346 - RNA, 19 nt, Artificial Sequence
  Description of Artificial Sequence: Synthetic oligonucleotide
ugacgaggguuuccauaca

SEQ ID NO: 866347 - RNA, 19 nt, Artificial Sequence
  Description of Artificial Sequence: Synthetic oligonucleotide
ccaugagucccacaauagc

SEQ ID NO: 866348 - RNA, 19 nt, Artificial Sequence
  Description of Artificial Sequence: Synthetic oligonucleotide
cugagguauuggcaauaac

SEQ ID NO: 866349 - RNA, 19 nt, Artificial Sequence
  Description of Artificial Sequence: Synthetic oligonucleotide
cugaauacaggaguugucu

SEQ ID NO: 866350 - RNA, 19 nt, Artificial Sequence
  Description of Artificial Sequence: Synthetic oligonucleotide
agaagccuugggguacaac

SEQ ID NO: 866351 - RNA, 19 nt, Artificial Sequence
  Description of Artificial Sequence: Synthetic oligonucleotide
gccgccaaccuccagagca

SEQ ID NO: 866352 - RNA, 19 nt, Artificial Sequence
  Description of Artificial Sequence: Synthetic oligonucleotide
agaaauccgcccacauuug

SEQ ID NO: 866353 - RNA, 19 nt, Artificial Sequence
  Description of Artificial Sequence: Synthetic oligonucleotide
ugcggauauuucgaagcaa

SEQ ID NO: 866354 - RNA, 19 nt, Artificial Sequence
  Description of Artificial Sequence: Synthetic oligonucleotide
agccccaaaucauccuugu

SEQ ID NO: 866355 - RNA, 19 nt, Artificial Sequence
  Description of Artificial Sequence: Synthetic oligonucleotide
ugaagcugauggagucuaa

SEQ ID NO: 866356 - RNA, 19 nt, Artificial Sequence
  Description of Artificial Sequence: Synthetic oligonucleotide
acccacaagggcggacugc

SEQ ID NO: 866357 - RNA, 19 nt, Artificial Sequence
  Description of Artificial Sequence: Synthetic oligonucleotide
gugcggauauuucgaagca

SEQ ID NO: 866358 - RNA, 19 nt, Artificial Sequence
  Description of Artificial Sequence: Synthetic oligonucleotide
guuacccggaagaggaaca

SEQ ID NO: 866359 - RNA, 19 nt, Artificial Sequence
  Description of Artificial Sequence: Synthetic oligonucleotide
caugacgaggguuuccaua

SEQ ID NO: 866360 - RNA, 19 nt, Artificial Sequence
  Description of Artificial Sequence: Synthetic oligonucleotide
acaacaaaccacaggcauu

SEQ ID NO: 866361 - RNA, 19 nt, Artificial Sequence
  Description of Artificial Sequence: Synthetic oligonucleotide
aucacuucugccacccaga

SEQ ID NO: 866362 - RNA, 19 nt, Artificial Sequence
  Description of Artificial Sequence: Synthetic oligonucleotide
uaugcccugccggggaggc

SEQ ID NO: 866363 - RNA, 19 nt, Artificial Sequence
  Description of Artificial Sequence: Synthetic oligonucleotide
gagacauuguagacacaga

SEQ ID NO: 866364 - RNA, 19 nt, Artificial Sequence
  Description of Artificial Sequence: Synthetic oligonucleotide
cugaucagauagcacccca

SEQ ID NO: 866365 - RNA, 19 nt, Artificial Sequence
  Description of Artificial Sequence: Synthetic oligonucleotide
aacaaggcaaugggaccau

SEQ ID NO: 866366 - RNA, 19 nt, Artificial Sequence
  Description of Artificial Sequence: Synthetic oligonucleotide
ucugccuucuuggguacuc

SEQ ID NO: 866367 - RNA, 19 nt, Artificial Sequence
  Description of Artificial Sequence: Synthetic oligonucleotide
ccucauuagccacugauaa

SEQ ID NO: 866368 - RNA, 19 nt, Artificial Sequence
  Description of Artificial Sequence: Synthetic oligonucleotide
ggccauugagaaaccagag

SEQ ID NO: 866369 - RNA, 19 nt, Artificial Sequence
  Description of Artificial Sequence: Synthetic oligonucleotide
cucggcccaucuuggugcg

SEQ ID NO: 866370 - RNA, 19 nt, Artificial Sequence
  Description of Artificial Sequence: Synthetic oligonucleotide
ugcccugccggggaggcug

SEQ ID NO: 866371 - RNA, 19 nt, Artificial Sequence
  Description of Artificial Sequence: Synthetic oligonucleotide
ccagacagggccagugugc

SEQ ID NO: 866372 - RNA, 19 nt, Artificial Sequence
  Description of Artificial Sequence: Synthetic oligonucleotide
aacaggccaugacgagggu

SEQ ID NO: 866373 - RNA, 19 nt, Artificial Sequence
  Description of Artificial Sequence: Synthetic oligonucleotide
uuacccggaagaggaacau

SEQ ID NO: 866374 - RNA, 19 nt, Artificial Sequence
  Description of Artificial Sequence: Synthetic oligonucleotide
gccauugagaaaccagaga

SEQ ID NO: 866375 - RNA, 19 nt, Artificial Sequence
  Description of Artificial Sequence: Synthetic oligonucleotide
ugcuugcagcuaguagugc

SEQ ID NO: 866376 - RNA, 19 nt, Artificial Sequence
  Description of Artificial Sequence: Synthetic oligonucleotide
gagcacucaucugaucaga

SEQ ID NO: 866377 - RNA, 19 nt, Artificial Sequence
  Description of Artificial Sequence: Synthetic oligonucleotide
agaugacagugcgauaaua

SEQ ID NO: 866378 - RNA, 19 nt, Artificial Sequence
  Description of Artificial Sequence: Synthetic oligonucleotide
gcauaggauggggaauugg

SEQ ID NO: 866379 - RNA, 19 nt, Artificial Sequence
  Description of Artificial Sequence: Synthetic oligonucleotide
ggucuaugcuaaccagagc

SEQ ID NO: 866380 - RNA, 19 nt, Artificial Sequence
  Description of Artificial Sequence: Synthetic oligonucleotide
gaucuugggugagucacua

SEQ ID NO: 866381 - RNA, 19 nt, Artificial Sequence
  Description of Artificial Sequence: Synthetic oligonucleotide
augcuccauagugaguacu

SEQ ID NO: 866382 - RNA, 19 nt, Artificial Sequence
  Description of Artificial Sequence: Synthetic oligonucleotide
agcauaggauggggaauug

SEQ ID NO: 866383 - RNA, 19 nt, Artificial Sequence
  Description of Artificial Sequence: Synthetic oligonucleotide
guacaggagacacccugaa

SEQ ID NO: 866384 - RNA, 19 nt, Artificial Sequence
  Description of Artificial Sequence: Synthetic oligonucleotide
auaucacuucugccaccca

SEQ ID NO: 866385 - RNA, 19 nt, Artificial Sequence
  Description of Artificial Sequence: Synthetic oligonucleotide
gcuggcuauacauaucacu

SEQ ID NO: 866386 - RNA, 19 nt, Artificial Sequence
  Description of Artificial Sequence: Synthetic oligonucleotide
auagcaccccacucacaaa

SEQ ID NO: 866387 - RNA, 19 nt, Artificial Sequence
  Description of Artificial Sequence: Synthetic oligonucleotide
agaauggcaaagggucuau

SEQ ID NO: 866388 - RNA, 19 nt, Artificial Sequence
  Description of Artificial Sequence: Synthetic oligonucleotide
auuugccaugagucccaca

SEQ ID NO: 866389 - RNA, 19 nt, Artificial Sequence
  Description of Artificial Sequence: Synthetic oligonucleotide
ggugggguccagauuucgg

SEQ ID NO: 866390 - RNA, 19 nt, Artificial Sequence
  Description of Artificial Sequence: Synthetic oligonucleotide
aggguaacccagccagaaa

SEQ ID NO: 866391 - RNA, 19 nt, Artificial Sequence
  Description of Artificial Sequence: Synthetic oligonucleotide
ucggcuugccugcuauauu

SEQ ID NO: 866392 - RNA, 19 nt, Artificial Sequence
  Description of Artificial Sequence: Synthetic oligonucleotide
cuggugaugagccccaaau

SEQ ID NO: 866393 - RNA, 19 nt, Artificial Sequence
  Description of Artificial Sequence: Synthetic oligonucleotide
ugauaacuugcagcaccau

SEQ ID NO: 866394 - RNA, 19 nt, Artificial Sequence
  Description of Artificial Sequence: Synthetic oligonucleotide
gaagacaagugugcuggcu

SEQ ID NO: 866395 - RNA, 19 nt, Artificial Sequence
  Description of Artificial Sequence: Synthetic oligonucleotide
ggcauaggcugccgacugg

SEQ ID NO: 866396 - RNA, 19 nt, Artificial Sequence
  Description of Artificial Sequence: Synthetic oligonucleotide
cuuccacuaaggauggcau

SEQ ID NO: 866397 - RNA, 19 nt, Artificial Sequence
  Description of Artificial Sequence: Synthetic oligonucleotide
accucauuagccacugaua

SEQ ID NO: 866398 - RNA, 19 nt, Artificial Sequence
  Description of Artificial Sequence: Synthetic oligonucleotide
gcuauaguguuuggcgaug

SEQ ID NO: 866399 - RNA, 19 nt, Artificial Sequence
  Description of Artificial Sequence: Synthetic oligonucleotide
agugugcuggcuauacaua

SEQ ID NO: 866400 - RNA, 19 nt, Artificial Sequence
  Description of Artificial Sequence: Synthetic oligonucleotide
gaaggguaacccagccaga

SEQ ID NO: 866401 - RNA, 19 nt, Artificial Sequence
  Description of Artificial Sequence: Synthetic oligonucleotide
gcgauaauagccauauccu

SEQ ID NO: 866402 - RNA, 19 nt, Artificial Sequence
  Description of Artificial Sequence: Synthetic oligonucleotide
aggugccacacaaguuggg

SEQ ID NO: 866403 - RNA, 19 nt, Artificial Sequence
  Description of Artificial Sequence: Synthetic oligonucleotide
agguuggggaugcuccaua

SEQ ID NO: 866404 - RNA, 19 nt, Artificial Sequence
  Description of Artificial Sequence: Synthetic oligonucleotide
acacaaguugggaggugca

SEQ ID NO: 866405 - RNA, 19 nt, Artificial Sequence
  Description of Artificial Sequence: Synthetic oligonucleotide
guagcucugggcaaggauu

SEQ ID NO: 866406 - RNA, 19 nt, Artificial Sequence
  Description of Artificial Sequence: Synthetic oligonucleotide
cugugccaggccauugaga

SEQ ID NO: 866407 - RNA, 19 nt, Artificial Sequence
  Description of Artificial Sequence: Synthetic oligonucleotide
gcauaggcugccgacuggc

SEQ ID NO: 866408 - RNA, 19 nt, Artificial Sequence
  Description of Artificial Sequence: Synthetic oligonucleotide
aguccaacaucagcagguu

SEQ ID NO: 866409 - RNA, 19 nt, Artificial Sequence
  Description of Artificial Sequence: Synthetic oligonucleotide
ggccagugugcuucgccag

SEQ ID NO: 866410 - RNA, 19 nt, Artificial Sequence
  Description of Artificial Sequence: Synthetic oligonucleotide
gagccagcgagcacucauc

SEQ ID NO: 866411 - RNA, 19 nt, Artificial Sequence
  Description of Artificial Sequence: Synthetic oligonucleotide
gguacaggagacacccuga

SEQ ID NO: 866412 - RNA, 19 nt, Artificial Sequence
  Description of Artificial Sequence: Synthetic oligonucleotide
gugcuucgccagcuguagc

SEQ ID NO: 866413 - RNA, 19 nt, Artificial Sequence
  Description of Artificial Sequence: Synthetic oligonucleotide
aacuacccacaagggcgga

SEQ ID NO: 866414 - RNA, 19 nt, Artificial Sequence
  Description of Artificial Sequence: Synthetic oligonucleotide
uggguacucggcccaucuu

SEQ ID NO: 866415 - RNA, 19 nt, Artificial Sequence
  Description of Artificial Sequence: Synthetic oligonucleotide
auccgcccacauuugccau

SEQ ID NO: 866416 - RNA, 19 nt, Artificial Sequence
  Description of Artificial Sequence: Synthetic oligonucleotide
auccuguagggugcucucu

SEQ ID NO: 866417 - RNA, 19 nt, Artificial Sequence
  Description of Artificial Sequence: Synthetic oligonucleotide
aggccaugacgaggguuuc

SEQ ID NO: 866418 - RNA, 19 nt, Artificial Sequence
  Description of Artificial Sequence: Synthetic oligonucleotide
caaagaugacagugcgaua

SEQ ID NO: 866419 - RNA, 19 nt, Artificial Sequence
  Description of Artificial Sequence: Synthetic oligonucleotide
cuguuagaagguagaaauu

SEQ ID NO: 866420 - RNA, 19 nt, Artificial Sequence
  Description of Artificial Sequence: Synthetic oligonucleotide
aagagccagcgagcacuca

SEQ ID NO: 866421 - RNA, 19 nt, Artificial Sequence
  Description of Artificial Sequence: Synthetic oligonucleotide
caaacugggauggcucaaa

SEQ ID NO: 866422 - RNA, 19 nt, Artificial Sequence
  Description of Artificial Sequence: Synthetic oligonucleotide
ccaagugccaaacugggau

SEQ ID NO: 866423 - RNA, 19 nt, Artificial Sequence
  Description of Artificial Sequence: Synthetic oligonucleotide
acaggccaugacgaggguu

SEQ ID NO: 866424 - RNA, 19 nt, Artificial Sequence
  Description of Artificial Sequence: Synthetic oligonucleotide
caggccaugacgaggguuu

SEQ ID NO: 866425 - RNA, 19 nt, Artificial Sequence
  Description of Artificial Sequence: Synthetic oligonucleotide
ggcggacugcccucuuucc

SEQ ID NO: 866426 - RNA, 19 nt, Artificial Sequence
  Description of Artificial Sequence: Synthetic oligonucleotide
cauuggcuaugacuccaaa

SEQ ID NO: 866427 - RNA, 19 nt, Artificial Sequence
  Description of Artificial Sequence: Synthetic oligonucleotide
gugaugagccccaaaucau

SEQ ID NO: 866428 - RNA, 19 nt, Artificial Sequence
  Description of Artificial Sequence: Synthetic oligonucleotide
cuacguugaccaggccaac

SEQ ID NO: 866429 - RNA, 19 nt, Artificial Sequence
  Description of Artificial Sequence: Synthetic oligonucleotide
guuggggaugcuccauagu

SEQ ID NO: 866430 - RNA, 19 nt, Artificial Sequence
  Description of Artificial Sequence: Synthetic oligonucleotide
ucuuggguacucggcccau

SEQ ID NO: 866431 - RNA, 19 nt, Artificial Sequence
  Description of Artificial Sequence: Synthetic oligonucleotide
aagaagccuugggguacaa

SEQ ID NO: 866432 - RNA, 19 nt, Artificial Sequence
  Description of Artificial Sequence: Synthetic oligonucleotide
gugcgauaauagccauauc

SEQ ID NO: 866433 - RNA, 19 nt, Artificial Sequence
  Description of Artificial Sequence: Synthetic oligonucleotide
gucugucuguuagaaggua

SEQ ID NO: 866434 - RNA, 19 nt, Artificial Sequence
  Description of Artificial Sequence: Synthetic oligonucleotide
gccaugacgaggguuucca

SEQ ID NO: 866435 - RNA, 19 nt, Artificial Sequence
  Description of Artificial Sequence: Synthetic oligonucleotide
agacuacaagguagccagu

SEQ ID NO: 866436 - RNA, 19 nt, Artificial Sequence
  Description of Artificial Sequence: Synthetic oligonucleotide
cagcccugccuuugccaug

SEQ ID NO: 866437 - RNA, 19 nt, Artificial Sequence
  Description of Artificial Sequence: Synthetic oligonucleotide
agccaguggagagcaccca

SEQ ID NO: 866438 - RNA, 19 nt, Artificial Sequence
  Description of Artificial Sequence: Synthetic oligonucleotide
cauuagccacugauaacuu

SEQ ID NO: 866439 - RNA, 19 nt, Artificial Sequence
  Description of Artificial Sequence: Synthetic oligonucleotide
gggcggacugcccucuuuc

SEQ ID NO: 866440 - RNA, 19 nt, Artificial Sequence
  Description of Artificial Sequence: Synthetic oligonucleotide
cguugaccaggccaaccag

SEQ ID NO: 866441 - RNA, 19 nt, Artificial Sequence
  Description of Artificial Sequence: Synthetic oligonucleotide
caaggccgccaaccuccag

SEQ ID NO: 866442 - RNA, 19 nt, Artificial Sequence
  Description of Artificial Sequence: Synthetic oligonucleotide
cagugcgauaauagccaua

SEQ ID NO: 866443 - RNA, 19 nt, Artificial Sequence
  Description of Artificial Sequence: Synthetic oligonucleotide
cugcccucuuuccuggaua

SEQ ID NO: 866444 - RNA, 19 nt, Artificial Sequence
  Description of Artificial Sequence: Synthetic oligonucleotide
cuguuacccggaagaggaa

SEQ ID NO: 866445 - RNA, 19 nt, Artificial Sequence
  Description of Artificial Sequence: Synthetic oligonucleotide
aagggcggacugcccucuu

SEQ ID NO: 866446 - RNA, 19 nt, Artificial Sequence
  Description of Artificial Sequence: Synthetic oligonucleotide
gccgacuggcugcugguga

SEQ ID NO: 866447 - RNA, 19 nt, Artificial Sequence
  Description of Artificial Sequence: Synthetic oligonucleotide
agggcggacugcccucuuu

SEQ ID NO: 866448 - RNA, 19 nt, Artificial Sequence
  Description of Artificial Sequence: Synthetic oligonucleotide
cacucacaaacuugcugau

SEQ ID NO: 866449 - RNA, 19 nt, Artificial Sequence
  Description of Artificial Sequence: Synthetic oligonucleotide
gugccaaacugggauggcu

SEQ ID NO: 866450 - RNA, 19 nt, Artificial Sequence
  Description of Artificial Sequence: Synthetic oligonucleotide
cauggcccugucagacaga

SEQ ID NO: 866451 - RNA, 19 nt, Artificial Sequence
  Description of Artificial Sequence: Synthetic oligonucleotide
cggauauuucgaagcaaga

SEQ ID NO: 866452 - RNA, 19 nt, Artificial Sequence
  Description of Artificial Sequence: Synthetic oligonucleotide
gucggcuugccugcuauau

SEQ ID NO: 866453 - RNA, 19 nt, Artificial Sequence
  Description of Artificial Sequence: Synthetic oligonucleotide
ggccaugacgaggguuucc

SEQ ID NO: 866454 - RNA, 19 nt, Artificial Sequence
  Description of Artificial Sequence: Synthetic oligonucleotide
cauaggcugccgacuggcu

SEQ ID NO: 866455 - RNA, 19 nt, Artificial Sequence
  Description of Artificial Sequence: Synthetic oligonucleotide
guacucggcccaucuuggu

SEQ ID NO: 866456 - RNA, 19 nt, Artificial Sequence
  Description of Artificial Sequence: Synthetic oligonucleotide
ccgccaaccuccagagcac

SEQ ID NO: 866457 - RNA, 19 nt, Artificial Sequence
  Description of Artificial Sequence: Synthetic oligonucleotide
cagcuaguagugcccagau

SEQ ID NO: 866458 - RNA, 19 nt, Artificial Sequence
  Description of Artificial Sequence: Synthetic oligonucleotide
gccauauccuugggcugcc

SEQ ID NO: 866459 - RNA, 19 nt, Artificial Sequence
  Description of Artificial Sequence: Synthetic oligonucleotide
gggugcucucuuccuuuga

SEQ ID NO: 866460 - RNA, 19 nt, Artificial Sequence
  Description of Artificial Sequence: Synthetic oligonucleotide
gcccugucagacagauagc

SEQ ID NO: 866461 - RNA, 19 nt, Artificial Sequence
  Description of Artificial Sequence: Synthetic oligonucleotide
gcuggugaugagccccaaa

SEQ ID NO: 866462 - RNA, 19 nt, Artificial Sequence
  Description of Artificial Sequence: Synthetic oligonucleotide
caagucggcuugccugcua

SEQ ID NO: 866463 - RNA, 19 nt, Artificial Sequence
  Description of Artificial Sequence: Synthetic oligonucleotide
cgauaauagccauauccuu

SEQ ID NO: 866464 - RNA, 19 nt, Artificial Sequence
  Description of Artificial Sequence: Synthetic oligonucleotide
ggagacagccacacacagu

SEQ ID NO: 866465 - RNA, 19 nt, Artificial Sequence
  Description of Artificial Sequence: Synthetic oligonucleotide
gccagaaauccgcccacau

SEQ ID NO: 866466 - RNA, 19 nt, Artificial Sequence
  Description of Artificial Sequence: Synthetic oligonucleotide
gcaugacaaaggagaaggu

SEQ ID NO: 866467 - RNA, 19 nt, Artificial Sequence
  Description of Artificial Sequence: Synthetic oligonucleotide
ggaccucauuagccacuga

SEQ ID NO: 866468 - RNA, 19 nt, Artificial Sequence
  Description of Artificial Sequence: Synthetic oligonucleotide
gcggacugcccucuuuccu

SEQ ID NO: 866469 - RNA, 19 nt, Artificial Sequence
  Description of Artificial Sequence: Synthetic oligonucleotide
ggccgccaaccuccagagc

SEQ ID NO: 866470 - RNA, 19 nt, Artificial Sequence
  Description of Artificial Sequence: Synthetic oligonucleotide
cagcagguucauuguggau

SEQ ID NO: 866471 - RNA, 19 nt, Artificial Sequence
  Description of Artificial Sequence: Synthetic oligonucleotide
caagggcggacugcccucu

SEQ ID NO: 866472 - RNA, 19 nt, Artificial Sequence
  Description of Artificial Sequence: Synthetic oligonucleotide
augcccugccggggaggcu

SEQ ID NO: 866473 - RNA, 19 nt, Artificial Sequence
  Description of Artificial Sequence: Synthetic oligonucleotide
gggaugcuccauagugagu

SEQ ID NO: 866474 - RNA, 19 nt, Artificial Sequence
  Description of Artificial Sequence: Synthetic oligonucleotide
gcucugggcaaggauuguu

SEQ ID NO: 866475 - RNA, 19 nt, Artificial Sequence
  Description of Artificial Sequence: Synthetic oligonucleotide
gcccaucuuggugcggaua

SEQ ID NO: 866476 - RNA, 19 nt, Artificial Sequence
  Description of Artificial Sequence: Synthetic oligonucleotide
ccuuuugucccaggguauu

SEQ ID NO: 866477 - RNA, 19 nt, Artificial Sequence
  Description of Artificial Sequence: Synthetic oligonucleotide
ccaugacgaggguuuccau

SEQ ID NO: 866478 - RNA, 19 nt, Artificial Sequence
  Description of Artificial Sequence: Synthetic oligonucleotide
gcccugccggggaggcuga

SEQ ID NO: 866479 - RNA, 19 nt, Artificial Sequence
  Description of Artificial Sequence: Synthetic oligonucleotide
gccccugugccaggccauu

SEQ ID NO: 866480 - RNA, 19 nt, Artificial Sequence
  Description of Artificial Sequence: Synthetic oligonucleotide
aauaagguugcgcauaggc

SEQ ID NO: 866481 - RNA, 19 nt, Artificial Sequence
  Description of Artificial Sequence: Synthetic oligonucleotide
ugcauugucguaaauaagg

SEQ ID NO: 866482 - RNA, 19 nt, Artificial Sequence
  Description of Artificial Sequence: Synthetic oligonucleotide
ugagacugcgcacagaugg

SEQ ID NO: 866483 - RNA, 19 nt, Artificial Sequence
  Description of Artificial Sequence: Synthetic oligonucleotide
uugaguacagcuaugaugu

SEQ ID NO: 866484 - RNA, 19 nt, Artificial Sequence
  Description of Artificial Sequence: Synthetic oligonucleotide
aaugggacuggcuaccacc

SEQ ID NO: 866485 - RNA, 19 nt, Artificial Sequence
  Description of Artificial Sequence: Synthetic oligonucleotide
uguaucucgggcuaggcgg

SEQ ID NO: 866486 - RNA, 19 nt, Artificial Sequence
  Description of Artificial Sequence: Synthetic oligonucleotide
auaucuccgccucagaggc

SEQ ID NO: 866487 - RNA, 19 nt, Artificial Sequence
  Description of Artificial Sequence: Synthetic oligonucleotide
uuugcguagcucaucaucc

SEQ ID NO: 866488 - RNA, 19 nt, Artificial Sequence
  Description of Artificial Sequence: Synthetic oligonucleotide
auugucguaaauaagguug

SEQ ID NO: 866489 - RNA, 19 nt, Artificial Sequence
  Description of Artificial Sequence: Synthetic oligonucleotide
ucguaaauaagguugcgca

SEQ ID NO: 866490 - RNA, 19 nt, Artificial Sequence
  Description of Artificial Sequence: Synthetic oligonucleotide
uaaauaagguugcgcauag

SEQ ID NO: 866491 - RNA, 19 nt, Artificial Sequence
  Description of Artificial Sequence: Synthetic oligonucleotide
auugugacuaaaucaccac

SEQ ID NO: 866492 - RNA, 19 nt, Artificial Sequence
  Description of Artificial Sequence: Synthetic oligonucleotide
uguaaagcagcccaccacu

SEQ ID NO: 866493 - RNA, 19 nt, Artificial Sequence
  Description of Artificial Sequence: Synthetic oligonucleotide
uaagguugcgcauaggcac

SEQ ID NO: 866494 - RNA, 19 nt, Artificial Sequence
  Description of Artificial Sequence: Synthetic oligonucleotide
guugcaacgccagagauag

SEQ ID NO: 866495 - RNA, 19 nt, Artificial Sequence
  Description of Artificial Sequence: Synthetic oligonucleotide
uucgaaaaugccauucucu

SEQ ID NO: 866496 - RNA, 19 nt, Artificial Sequence
  Description of Artificial Sequence: Synthetic oligonucleotide
gaauaucuccgccucagag

SEQ ID NO: 866497 - RNA, 19 nt, Artificial Sequence
  Description of Artificial Sequence: Synthetic oligonucleotide
agcagucgguuauacagcc

SEQ ID NO: 866498 - RNA, 19 nt, Artificial Sequence
  Description of Artificial Sequence: Synthetic oligonucleotide
ugacuaaaucaccacccgg

SEQ ID NO: 866499 - RNA, 19 nt, Artificial Sequence
  Description of Artificial Sequence: Synthetic oligonucleotide
uguuagaggaagcucgcgc

SEQ ID NO: 866500 - RNA, 19 nt, Artificial Sequence
  Description of Artificial Sequence: Synthetic oligonucleotide
uauacagccccacaaucug

SEQ ID NO: 866501 - RNA, 19 nt, Artificial Sequence
  Description of Artificial Sequence: Synthetic oligonucleotide
uuauacagccccacaaucu

SEQ ID NO: 866502 - RNA, 19 nt, Artificial Sequence
  Description of Artificial Sequence: Synthetic oligonucleotide
auaagccgcuccuagcacc

SEQ ID NO: 866503 - RNA, 19 nt, Artificial Sequence
  Description of Artificial Sequence: Synthetic oligonucleotide
aaguguccgcaacaguucg

SEQ ID NO: 866504 - RNA, 19 nt, Artificial Sequence
  Description of Artificial Sequence: Synthetic oligonucleotide
ugccauugugacuaaauca

SEQ ID NO: 866505 - RNA, 19 nt, Artificial Sequence
  Description of Artificial Sequence: Synthetic oligonucleotide
uguaugccgguuuaguuca

SEQ ID NO: 866506 - RNA, 19 nt, Artificial Sequence
  Description of Artificial Sequence: Synthetic oligonucleotide
uugugacuaaaucaccacc

SEQ ID NO: 866507 - RNA, 19 nt, Artificial Sequence
  Description of Artificial Sequence: Synthetic oligonucleotide
ucuguagugccccugcagc

SEQ ID NO: 866508 - RNA, 19 nt, Artificial Sequence
  Description of Artificial Sequence: Synthetic oligonucleotide
uguagaauaucuccgccuc

SEQ ID NO: 866509 - RNA, 19 nt, Artificial Sequence
  Description of Artificial Sequence: Synthetic oligonucleotide
ugaagaccagcuuucgaag

SEQ ID NO: 866510 - RNA, 19 nt, Artificial Sequence
  Description of Artificial Sequence: Synthetic oligonucleotide
uugucguaaauaagguugc

SEQ ID NO: 866511 - RNA, 19 nt, Artificial Sequence
  Description of Artificial Sequence: Synthetic oligonucleotide
auauaagccgcuccuagca

SEQ ID NO: 866512 - RNA, 19 nt, Artificial Sequence
  Description of Artificial Sequence: Synthetic oligonucleotide
uuuugcguagcucaucauc

SEQ ID NO: 866513 - RNA, 19 nt, Artificial Sequence
  Description of Artificial Sequence: Synthetic oligonucleotide
uucggaugaggccagucag

SEQ ID NO: 866514 - RNA, 19 nt, Artificial Sequence
  Description of Artificial Sequence: Synthetic oligonucleotide
aguagcauuguagaauauc

SEQ ID NO: 866515 - RNA, 19 nt, Artificial Sequence
  Description of Artificial Sequence: Synthetic oligonucleotide
aacucgguccagcaauggg

SEQ ID NO: 866516 - RNA, 19 nt, Artificial Sequence
  Description of Artificial Sequence: Synthetic oligonucleotide
ggugauauucuguagugcc

SEQ ID NO: 866517 - RNA, 19 nt, Artificial Sequence
  Description of Artificial Sequence: Synthetic oligonucleotide
cugugcuggauauaagccg

SEQ ID NO: 866518 - RNA, 19 nt, Artificial Sequence
  Description of Artificial Sequence: Synthetic oligonucleotide
gauauaagccgcuccuagc

SEQ ID NO: 866519 - RNA, 19 nt, Artificial Sequence
  Description of Artificial Sequence: Synthetic oligonucleotide
uucucacccacacugccag

SEQ ID NO: 866520 - RNA, 19 nt, Artificial Sequence
  Description of Artificial Sequence: Synthetic oligonucleotide
ugauauucuguagugcccc

SEQ ID NO: 866521 - RNA, 19 nt, Artificial Sequence
  Description of Artificial Sequence: Synthetic oligonucleotide
aacaguucgaaaaugccau

SEQ ID NO: 866522 - RNA, 19 nt, Artificial Sequence
  Description of Artificial Sequence: Synthetic oligonucleotide
aucauagaggcgguaagac

SEQ ID NO: 866523 - RNA, 19 nt, Artificial Sequence
  Description of Artificial Sequence: Synthetic oligonucleotide
agcuguuagaggaagcucg

SEQ ID NO: 866524 - RNA, 19 nt, Artificial Sequence
  Description of Artificial Sequence: Synthetic oligonucleotide
uuguaugccgguuuaguuc

SEQ ID NO: 866525 - RNA, 19 nt, Artificial Sequence
  Description of Artificial Sequence: Synthetic oligonucleotide
acuaaaucaccacccggag

SEQ ID NO: 866526 - RNA, 19 nt, Artificial Sequence
  Description of Artificial Sequence: Synthetic oligonucleotide
aucaauccccaguugcaac

SEQ ID NO: 866527 - RNA, 19 nt, Artificial Sequence
  Description of Artificial Sequence: Synthetic oligonucleotide
cuuccgauagcccuucgcc

SEQ ID NO: 866528 - RNA, 19 nt, Artificial Sequence
  Description of Artificial Sequence: Synthetic oligonucleotide
uuguagaauaucuccgccu

SEQ ID NO: 866529 - RNA, 19 nt, Artificial Sequence
  Description of Artificial Sequence: Synthetic oligonucleotide
cauagaggcgguaagacaa

SEQ ID NO: 866530 - RNA, 19 nt, Artificial Sequence
  Description of Artificial Sequence: Synthetic oligonucleotide
ugagccuaucuguuggaag

SEQ ID NO: 866531 - RNA, 19 nt, Artificial Sequence
  Description of Artificial Sequence: Synthetic oligonucleotide
caauccacguacaucuggc

SEQ ID NO: 866532 - RNA, 19 nt, Artificial Sequence
  Description of Artificial Sequence: Synthetic oligonucleotide
uagaauaucuccgccucag

SEQ ID NO: 866533 - RNA, 19 nt, Artificial Sequence
  Description of Artificial Sequence: Synthetic oligonucleotide
cagucgguuauacagcccc

SEQ ID NO: 866534 - RNA, 19 nt, Artificial Sequence
  Description of Artificial Sequence: Synthetic oligonucleotide
aagguugcgcauaggcacc

SEQ ID NO: 866535 - RNA, 19 nt, Artificial Sequence
  Description of Artificial Sequence: Synthetic oligonucleotide
ucauagaggcgguaagaca

SEQ ID NO: 866536 - RNA, 19 nt, Artificial Sequence
  Description of Artificial Sequence: Synthetic oligonucleotide
gaggcgguaagacaaguuc

SEQ ID NO: 866537 - RNA, 19 nt, Artificial Sequence
  Description of Artificial Sequence: Synthetic oligonucleotide
aguucgaaaaugccauucu

SEQ ID NO: 866538 - RNA, 19 nt, Artificial Sequence
  Description of Artificial Sequence: Synthetic oligonucleotide
cauugugacuaaaucacca

SEQ ID NO: 866539 - RNA, 19 nt, Artificial Sequence
  Description of Artificial Sequence: Synthetic oligonucleotide
aggcgguaagacaaguucc

SEQ ID NO: 866540 - RNA, 19 nt, Artificial Sequence
  Description of Artificial Sequence: Synthetic oligonucleotide
ugauguaggugaccagagc

SEQ ID NO: 866541 - RNA, 19 nt, Artificial Sequence
  Description of Artificial Sequence: Synthetic oligonucleotide
acuuccgcaaaggugagug

SEQ ID NO: 866542 - RNA, 19 nt, Artificial Sequence
  Description of Artificial Sequence: Synthetic oligonucleotide
acggguuccaggccgguac

SEQ ID NO: 866543 - RNA, 19 nt, Artificial Sequence
  Description of Artificial Sequence: Synthetic oligonucleotide
aguacagcuaugauguuga

SEQ ID NO: 866544 - RNA, 19 nt, Artificial Sequence
  Description of Artificial Sequence: Synthetic oligonucleotide
agcaaugggacuggcuacc

SEQ ID NO: 866545 - RNA, 19 nt, Artificial Sequence
  Description of Artificial Sequence: Synthetic oligonucleotide
gacuaaaucaccacccgga

SEQ ID NO: 866546 - RNA, 19 nt, Artificial Sequence
  Description of Artificial Sequence: Synthetic oligonucleotide
gccgcuguagugcugaugg

SEQ ID NO: 866547 - RNA, 19 nt, Artificial Sequence
  Description of Artificial Sequence: Synthetic oligonucleotide
cuaaaucaccacccggagc

SEQ ID NO: 866548 - RNA, 19 nt, Artificial Sequence
  Description of Artificial Sequence: Synthetic oligonucleotide
uggagcuugcuguacugcc

SEQ ID NO: 866549 - RNA, 19 nt, Artificial Sequence
  Description of Artificial Sequence: Synthetic oligonucleotide
caacaguucgaaaaugcca

SEQ ID NO: 866550 - RNA, 19 nt, Artificial Sequence
  Description of Artificial Sequence: Synthetic oligonucleotide
accagagcauccacuagcc

SEQ ID NO: 866551 - RNA, 19 nt, Artificial Sequence
  Description of Artificial Sequence: Synthetic oligonucleotide
ucucgaaguguccgcaaca

SEQ ID NO: 866552 - RNA, 19 nt, Artificial Sequence
  Description of Artificial Sequence: Synthetic oligonucleotide
uccgcaacaguucgaaaau

SEQ ID NO: 866553 - RNA, 19 nt, Artificial Sequence
  Description of Artificial Sequence: Synthetic oligonucleotide
uugguuggcgugguuaaag

SEQ ID NO: 866554 - RNA, 19 nt, Artificial Sequence
  Description of Artificial Sequence: Synthetic oligonucleotide
uauaagccgcuccuagcac

SEQ ID NO: 866555 - RNA, 19 nt, Artificial Sequence
  Description of Artificial Sequence: Synthetic oligonucleotide
uuccgauagcccuucgccc

SEQ ID NO: 866556 - RNA, 19 nt, Artificial Sequence
  Description of Artificial Sequence: Synthetic oligonucleotide
ucgcccugaagucacggug

SEQ ID NO: 866557 - RNA, 19 nt, Artificial Sequence
  Description of Artificial Sequence: Synthetic oligonucleotide
ccuaucaauccccaguugc

SEQ ID NO: 866558 - RNA, 19 nt, Artificial Sequence
  Description of Artificial Sequence: Synthetic oligonucleotide
caccuaugggcccaggaag

SEQ ID NO: 866559 - RNA, 19 nt, Artificial Sequence
  Description of Artificial Sequence: Synthetic oligonucleotide
ugucguaaauaagguugcg

SEQ ID NO: 866560 - RNA, 19 nt, Artificial Sequence
  Description of Artificial Sequence: Synthetic oligonucleotide
uuaguucacagcgcugcag

SEQ ID NO: 866561 - RNA, 19 nt, Artificial Sequence
  Description of Artificial Sequence: Synthetic oligonucleotide
guguaucucgggcuaggcg

SEQ ID NO: 866562 - RNA, 19 nt, Artificial Sequence
  Description of Artificial Sequence: Synthetic oligonucleotide
cuuagcaccaggucuguga

SEQ ID NO: 866563 - RNA, 19 nt, Artificial Sequence
  Description of Artificial Sequence: Synthetic oligonucleotide
uguuguaugccgguuuagu

SEQ ID NO: 866564 - RNA, 19 nt, Artificial Sequence
  Description of Artificial Sequence: Synthetic oligonucleotide
uucaccuaugggcccagga

SEQ ID NO: 866565 - RNA, 19 nt, Artificial Sequence
  Description of Artificial Sequence: Synthetic oligonucleotide
gcagguuggggucugaggc

SEQ ID NO: 866566 - RNA, 19 nt, Artificial Sequence
  Description of Artificial Sequence: Synthetic oligonucleotide
ggugcgauggccuguguag

SEQ ID NO: 866567 - RNA, 19 nt, Artificial Sequence
  Description of Artificial Sequence: Synthetic oligonucleotide
aguguaucucgggcuaggc

SEQ ID NO: 866568 - RNA, 19 nt, Artificial Sequence
  Description of Artificial Sequence: Synthetic oligonucleotide
gucguaaauaagguugcgc

SEQ ID NO: 866569 - RNA, 19 nt, Artificial Sequence
  Description of Artificial Sequence: Synthetic oligonucleotide
cuuagacacuuccgcaaag

SEQ ID NO: 866570 - RNA, 19 nt, Artificial Sequence
  Description of Artificial Sequence: Synthetic oligonucleotide
ugagugcaucagcuguuag

SEQ ID NO: 866571 - RNA, 19 nt, Artificial Sequence
  Description of Artificial Sequence: Synthetic oligonucleotide
gaagccuaucaauccccag

SEQ ID NO: 866572 - RNA, 19 nt, Artificial Sequence
  Description of Artificial Sequence: Synthetic oligonucleotide
cugcauugucguaaauaag

SEQ ID NO: 866573 - RNA, 19 nt, Artificial Sequence
  Description of Artificial Sequence: Synthetic oligonucleotide
auaagguugcgcauaggca

SEQ ID NO: 866574 - RNA, 19 nt, Artificial Sequence
  Description of Artificial Sequence: Synthetic oligonucleotide
cuaucaauccccaguugca

SEQ ID NO: 866575 - RNA, 19 nt, Artificial Sequence
  Description of Artificial Sequence: Synthetic oligonucleotide
ucgguuauacagccccaca

SEQ ID NO: 866576 - RNA, 19 nt, Artificial Sequence
  Description of Artificial Sequence: Synthetic oligonucleotide
uaagccgcuccuagcaccu

SEQ ID NO: 866577 - RNA, 19 nt, Artificial Sequence
  Description of Artificial Sequence: Synthetic oligonucleotide
uccaggaggcuucaccuau

SEQ ID NO: 866578 - RNA, 19 nt, Artificial Sequence
  Description of Artificial Sequence: Synthetic oligonucleotide
cagcagucgguuauacagc

SEQ ID NO: 866579 - RNA, 19 nt, Artificial Sequence
  Description of Artificial Sequence: Synthetic oligonucleotide
uccaguguaucucgggcua

SEQ ID NO: 866580 - RNA, 19 nt, Artificial Sequence
  Description of Artificial Sequence: Synthetic oligonucleotide
guuaaagagcuucaccagu

SEQ ID NO: 866581 - RNA, 19 nt, Artificial Sequence
  Description of Artificial Sequence: Synthetic oligonucleotide
cucaaggcccuugggaucc

SEQ ID NO: 866582 - RNA, 19 nt, Artificial Sequence
  Description of Artificial Sequence: Synthetic oligonucleotide
ccugugcuggauauaagcc

SEQ ID NO: 866583 - RNA, 19 nt, Artificial Sequence
  Description of Artificial Sequence: Synthetic oligonucleotide
ugguuggcgugguuaaaga

SEQ ID NO: 866584 - RNA, 19 nt, Artificial Sequence
  Description of Artificial Sequence: Synthetic oligonucleotide
guccgcaacaguucgaaaa

SEQ ID NO: 866585 - RNA, 19 nt, Artificial Sequence
  Description of Artificial Sequence: Synthetic oligonucleotide
guugugaucagcagugcga

SEQ ID NO: 866586 - RNA, 19 nt, Artificial Sequence
  Description of Artificial Sequence: Synthetic oligonucleotide
gugauauucuguagugccc

SEQ ID NO: 866587 - RNA, 19 nt, Artificial Sequence
  Description of Artificial Sequence: Synthetic oligonucleotide
agugagcgcaguugguugu

SEQ ID NO: 866588 - RNA, 19 nt, Artificial Sequence
  Description of Artificial Sequence: Synthetic oligonucleotide
uugugaucagcagugcgaa

SEQ ID NO: 866589 - RNA, 19 nt, Artificial Sequence
  Description of Artificial Sequence: Synthetic oligonucleotide
uguccaauccacguacauc

SEQ ID NO: 866590 - RNA, 19 nt, Artificial Sequence
  Description of Artificial Sequence: Synthetic oligonucleotide
gaucagcagugcgaacucg

SEQ ID NO: 866591 - RNA, 19 nt, Artificial Sequence
  Description of Artificial Sequence: Synthetic oligonucleotide
guguaaagcagcccaccac

SEQ ID NO: 866592 - RNA, 19 nt, Artificial Sequence
  Description of Artificial Sequence: Synthetic oligonucleotide
uaucaauccccaguugcaa

SEQ ID NO: 866593 - RNA, 19 nt, Artificial Sequence
  Description of Artificial Sequence: Synthetic oligonucleotide
gaaguguccgcaacaguuc

SEQ ID NO: 866594 - RNA, 19 nt, Artificial Sequence
  Description of Artificial Sequence: Synthetic oligonucleotide
gucacgguggagcuugcug

SEQ ID NO: 866595 - RNA, 19 nt, Artificial Sequence
  Description of Artificial Sequence: Synthetic oligonucleotide
ugguguaaagcagcccacc

SEQ ID NO: 866596 - RNA, 19 nt, Artificial Sequence
  Description of Artificial Sequence: Synthetic oligonucleotide
gguuggcgugguuaaagag

SEQ ID NO: 866597 - RNA, 19 nt, Artificial Sequence
  Description of Artificial Sequence: Synthetic oligonucleotide
gagacugcgcacagauggg

SEQ ID NO: 866598 - RNA, 19 nt, Artificial Sequence
  Description of Artificial Sequence: Synthetic oligonucleotide
cagugagcgcaguugguug

SEQ ID NO: 866599 - RNA, 19 nt, Artificial Sequence
  Description of Artificial Sequence: Synthetic oligonucleotide
cucgaaguguccgcaacag

SEQ ID NO: 866600 - RNA, 19 nt, Artificial Sequence
  Description of Artificial Sequence: Synthetic oligonucleotide
caaucagguggcucacuac

SEQ ID NO: 866601 - RNA, 19 nt, Artificial Sequence
  Description of Artificial Sequence: Synthetic oligonucleotide
uccuggcauuccgagacag

SEQ ID NO: 866602 - RNA, 19 nt, Artificial Sequence
  Description of Artificial Sequence: Synthetic oligonucleotide
gggauccuuagacacuucc

SEQ ID NO: 866603 - RNA, 19 nt, Artificial Sequence
  Description of Artificial Sequence: Synthetic oligonucleotide
ucgaaguguccgcaacagu

SEQ ID NO: 866604 - RNA, 19 nt, Artificial Sequence
  Description of Artificial Sequence: Synthetic oligonucleotide
uguggcgcgcugcaccucu

SEQ ID NO: 866605 - RNA, 19 nt, Artificial Sequence
  Description of Artificial Sequence: Synthetic oligonucleotide
caguucgaaaaugccauuc

SEQ ID NO: 866606 - RNA, 19 nt, Artificial Sequence
  Description of Artificial Sequence: Synthetic oligonucleotide
agaauaucuccgccucaga

SEQ ID NO: 866607 - RNA, 19 nt, Artificial Sequence
  Description of Artificial Sequence: Synthetic oligonucleotide
uggggcucgggccacgggu

SEQ ID NO: 866608 - RNA, 19 nt, Artificial Sequence
  Description of Artificial Sequence: Synthetic oligonucleotide
acucgguccagcaaugggu

SEQ ID NO: 866609 - RNA, 19 nt, Artificial Sequence
  Description of Artificial Sequence: Synthetic oligonucleotide
ugcagcagucgguuauaca

SEQ ID NO: 866610 - RNA, 19 nt, Artificial Sequence
  Description of Artificial Sequence: Synthetic oligonucleotide
aggcccuugggauccuuag

SEQ ID NO: 866611 - RNA, 19 nt, Artificial Sequence
  Description of Artificial Sequence: Synthetic oligonucleotide
acguccagggcaugguuga

SEQ ID NO: 866612 - RNA, 19 nt, Artificial Sequence
  Description of Artificial Sequence: Synthetic oligonucleotide
gcaacucuuccauggacug

SEQ ID NO: 866613 - RNA, 19 nt, Artificial Sequence
  Description of Artificial Sequence: Synthetic oligonucleotide
cuaugggcccaggaagucc

SEQ ID NO: 866614 - RNA, 19 nt, Artificial Sequence
  Description of Artificial Sequence: Synthetic oligonucleotide
cgcaacaguucgaaaaugc

SEQ ID NO: 866615 - RNA, 19 nt, Artificial Sequence
  Description of Artificial Sequence: Synthetic oligonucleotide
guagaauaucuccgccuca

SEQ ID NO: 866616 - RNA, 19 nt, Artificial Sequence
  Description of Artificial Sequence: Synthetic oligonucleotide
uccgcaaaggugagugcau

SEQ ID NO: 866617 - RNA, 19 nt, Artificial Sequence
  Description of Artificial Sequence: Synthetic oligonucleotide
agagaguuccuguggccau

SEQ ID NO: 866618 - RNA, 19 nt, Artificial Sequence
  Description of Artificial Sequence: Synthetic oligonucleotide
ccauugugacuaaaucacc

SEQ ID NO: 866619 - RNA, 19 nt, Artificial Sequence
  Description of Artificial Sequence: Synthetic oligonucleotide
cuguuagaggaagcucgcg

SEQ ID NO: 866620 - RNA, 19 nt, Artificial Sequence
  Description of Artificial Sequence: Synthetic oligonucleotide
aguaggagcugagccuauc

SEQ ID NO: 866621 - RNA, 19 nt, Artificial Sequence
  Description of Artificial Sequence: Synthetic oligonucleotide
ugcgaacucgguccagcaa

SEQ ID NO: 866622 - RNA, 19 nt, Artificial Sequence
  Description of Artificial Sequence: Synthetic oligonucleotide
gcggugauauucuguagug

SEQ ID NO: 866623 - RNA, 19 nt, Artificial Sequence
  Description of Artificial Sequence: Synthetic oligonucleotide
gacugcgcacagauggggc

SEQ ID NO: 866624 - RNA, 19 nt, Artificial Sequence
  Description of Artificial Sequence: Synthetic oligonucleotide
auagaggcgguaagacaag

SEQ ID NO: 866625 - RNA, 19 nt, Artificial Sequence
  Description of Artificial Sequence: Synthetic oligonucleotide
cuaccuuuguggacaucuc

SEQ ID NO: 866626 - RNA, 19 nt, Artificial Sequence
  Description of Artificial Sequence: Synthetic oligonucleotide
caauggguucaggaugcgc

SEQ ID NO: 866627 - RNA, 19 nt, Artificial Sequence
  Description of Artificial Sequence: Synthetic oligonucleotide
uaugccgguuuaguucaca

SEQ ID NO: 866628 - RNA, 19 nt, Artificial Sequence
  Description of Artificial Sequence: Synthetic oligonucleotide
agccaguagcauuguagaa

SEQ ID NO: 866629 - RNA, 19 nt, Artificial Sequence
  Description of Artificial Sequence: Synthetic oligonucleotide
ugcccgggaggacuucuca

SEQ ID NO: 866630 - RNA, 19 nt, Artificial Sequence
  Description of Artificial Sequence: Synthetic oligonucleotide
uuccaggccgguaccugac

SEQ ID NO: 866631 - RNA, 19 nt, Artificial Sequence
  Description of Artificial Sequence: Synthetic oligonucleotide
agcaccagagcagcucaag

SEQ ID NO: 866632 - RNA, 19 nt, Artificial Sequence
  Description of Artificial Sequence: Synthetic oligonucleotide
ucgcgcagccuccuacucu

SEQ ID NO: 866633 - RNA, 19 nt, Artificial Sequence
  Description of Artificial Sequence: Synthetic oligonucleotide
cuucgcccugaagucacgg

SEQ ID NO: 866634 - RNA, 19 nt, Artificial Sequence
  Description of Artificial Sequence: Synthetic oligonucleotide
uucgcccugaagucacggu

SEQ ID NO: 866635 - RNA, 19 nt, Artificial Sequence
  Description of Artificial Sequence: Synthetic oligonucleotide
uggacaucucauccuuguu

SEQ ID NO: 866636 - RNA, 19 nt, Artificial Sequence
  Description of Artificial Sequence: Synthetic oligonucleotide
uagaggcgguaagacaagu

SEQ ID NO: 866637 - RNA, 19 nt, Artificial Sequence
  Description of Artificial Sequence: Synthetic oligonucleotide
cuaucuguuggaagcugaa

SEQ ID NO: 866638 - RNA, 19 nt, Artificial Sequence
  Description of Artificial Sequence: Synthetic oligonucleotide
caguguaucucgggcuagg

SEQ ID NO: 866639 - RNA, 19 nt, Artificial Sequence
  Description of Artificial Sequence: Synthetic oligonucleotide
ucgggccacggguuccagg

SEQ ID NO: 866640 - RNA, 19 nt, Artificial Sequence
  Description of Artificial Sequence: Synthetic oligonucleotide
cagcggugauauucuguag

SEQ ID NO: 866641 - RNA, 19 nt, Artificial Sequence
  Description of Artificial Sequence: Synthetic oligonucleotide
uccuacucugugguguaaa

SEQ ID NO: 866642 - RNA, 19 nt, Artificial Sequence
  Description of Artificial Sequence: Synthetic oligonucleotide
acaguucgaaaaugccauu

SEQ ID NO: 866643 - RNA, 19 nt, Artificial Sequence
  Description of Artificial Sequence: Synthetic oligonucleotide
cuaggcgguccuucaggug

SEQ ID NO: 866644 - RNA, 19 nt, Artificial Sequence
  Description of Artificial Sequence: Synthetic oligonucleotide
aagucacgguggagcuugc

SEQ ID NO: 866645 - RNA, 19 nt, Artificial Sequence
  Description of Artificial Sequence: Synthetic oligonucleotide
cccgucaugucccugcggc

SEQ ID NO: 866646 - RNA, 19 nt, Artificial Sequence
  Description of Artificial Sequence: Synthetic oligonucleotide
accuaugggcccaggaagu

SEQ ID NO: 866647 - RNA, 19 nt, Artificial Sequence
  Description of Artificial Sequence: Synthetic oligonucleotide
uggcauuccgagacagguu

SEQ ID NO: 866648 - RNA, 19 nt, Artificial Sequence
  Description of Artificial Sequence: Synthetic oligonucleotide
guuguaugccgguuuaguu

SEQ ID NO: 866649 - RNA, 19 nt, Artificial Sequence
  Description of Artificial Sequence: Synthetic oligonucleotide
ggcgugguuaaagagcuuc

SEQ ID NO: 866650 - RNA, 19 nt, Artificial Sequence
  Description of Artificial Sequence: Synthetic oligonucleotide
ccuacucugugguguaaag

SEQ ID NO: 866651 - RNA, 19 nt, Artificial Sequence
  Description of Artificial Sequence: Synthetic oligonucleotide
gucaugucccugcggcccc

SEQ ID NO: 866652 - RNA, 19 nt, Artificial Sequence
  Description of Artificial Sequence: Synthetic oligonucleotide
guggagcuugcuguacugc

SEQ ID NO: 866653 - RNA, 19 nt, Artificial Sequence
  Description of Artificial Sequence: Synthetic oligonucleotide
gaggccagucagugagcgc

SEQ ID NO: 866654 - RNA, 19 nt, Artificial Sequence
  Description of Artificial Sequence: Synthetic oligonucleotide
ucacuaccuuuguggacau

SEQ ID NO: 866655 - RNA, 19 nt, Artificial Sequence
  Description of Artificial Sequence: Synthetic oligonucleotide
caccugugcuggauauaag

SEQ ID NO: 866656 - RNA, 19 nt, Artificial Sequence
  Description of Artificial Sequence: Synthetic oligonucleotide
cgcauaggcaccuguggcg

SEQ ID NO: 866657 - RNA, 19 nt, Artificial Sequence
  Description of Artificial Sequence: Synthetic oligonucleotide
gucuaggcaccgccugaag

SEQ ID NO: 866658 - RNA, 19 nt, Artificial Sequence
  Description of Artificial Sequence: Synthetic oligonucleotide
uaucuccgccucagaggca

SEQ ID NO: 866659 - RNA, 19 nt, Artificial Sequence
  Description of Artificial Sequence: Synthetic oligonucleotide
cugaaucacuucaccucca

SEQ ID NO: 866660 - RNA, 19 nt, Artificial Sequence
  Description of Artificial Sequence: Synthetic oligonucleotide
ugcuggauauaagccgcuc

SEQ ID NO: 866661 - RNA, 19 nt, Artificial Sequence
  Description of Artificial Sequence: Synthetic oligonucleotide
uguccgcaacaguucgaaa

SEQ ID NO: 866662 - RNA, 19 nt, Artificial Sequence
  Description of Artificial Sequence: Synthetic oligonucleotide
aguugcaacgccagagaua

SEQ ID NO: 866663 - RNA, 19 nt, Artificial Sequence
  Description of Artificial Sequence: Synthetic oligonucleotide
agguggucacuggaggaca

SEQ ID NO: 866664 - RNA, 19 nt, Artificial Sequence
  Description of Artificial Sequence: Synthetic oligonucleotide
ugagcgcaguugguuguga

SEQ ID NO: 866665 - RNA, 19 nt, Artificial Sequence
  Description of Artificial Sequence: Synthetic oligonucleotide
gcuccuagcaccugcaggu

SEQ ID NO: 866666 - RNA, 19 nt, Artificial Sequence
  Description of Artificial Sequence: Synthetic oligonucleotide
ucaccagucuaggcaccgc

SEQ ID NO: 866667 - RNA, 19 nt, Artificial Sequence
  Description of Artificial Sequence: Synthetic oligonucleotide
agguggcucacuaccuuug

SEQ ID NO: 866668 - RNA, 19 nt, Artificial Sequence
  Description of Artificial Sequence: Synthetic oligonucleotide
cauugucguaaauaagguu

SEQ ID NO: 866669 - RNA, 19 nt, Artificial Sequence
  Description of Artificial Sequence: Synthetic oligonucleotide
gccgguaccugacacugac

SEQ ID NO: 866670 - RNA, 19 nt, Artificial Sequence
  Description of Artificial Sequence: Synthetic oligonucleotide
cagcuguuagaggaagcuc

SEQ ID NO: 866671 - RNA, 19 nt, Artificial Sequence
  Description of Artificial Sequence: Synthetic oligonucleotide
gugcgauggccuguguagc

SEQ ID NO: 866672 - RNA, 19 nt, Artificial Sequence
  Description of Artificial Sequence: Synthetic oligonucleotide
gggcuuagcaccaggucug

SEQ ID NO: 866673 - RNA, 19 nt, Artificial Sequence
  Description of Artificial Sequence: Synthetic oligonucleotide
ugaguacagcuaugauguu

SEQ ID NO: 866674 - RNA, 19 nt, Artificial Sequence
  Description of Artificial Sequence: Synthetic oligonucleotide
gguuuaguucacagcgcug

SEQ ID NO: 866675 - RNA, 19 nt, Artificial Sequence
  Description of Artificial Sequence: Synthetic oligonucleotide
guuggccaagagacuggag

SEQ ID NO: 866676 - RNA, 19 nt, Artificial Sequence
  Description of Artificial Sequence: Synthetic oligonucleotide
guagcaccugugcuggaua

SEQ ID NO: 866677 - RNA, 19 nt, Artificial Sequence
  Description of Artificial Sequence: Synthetic oligonucleotide
agucuaggcaccgccugaa

SEQ ID NO: 866678 - RNA, 19 nt, Artificial Sequence
  Description of Artificial Sequence: Synthetic oligonucleotide
cuggcauuccgagacaggu

SEQ ID NO: 866679 - RNA, 19 nt, Artificial Sequence
  Description of Artificial Sequence: Synthetic oligonucleotide
ccuaucuguuggaagcuga

SEQ ID NO: 866680 - RNA, 19 nt, Artificial Sequence
  Description of Artificial Sequence: Synthetic oligonucleotide
gugcgaacucgguccagca

SEQ ID NO: 866681 - RNA, 19 nt, Artificial Sequence
  Description of Artificial Sequence: Synthetic oligonucleotide
ggcauuccgagacagguuu

SEQ ID NO: 866682 - RNA, 19 nt, Artificial Sequence
  Description of Artificial Sequence: Synthetic oligonucleotide
agccuccuacucuguggug

SEQ ID NO: 866683 - RNA, 19 nt, Artificial Sequence
  Description of Artificial Sequence: Synthetic oligonucleotide
accagucuaggcaccgccu

SEQ ID NO: 866684 - RNA, 19 nt, Artificial Sequence
  Description of Artificial Sequence: Synthetic oligonucleotide
guugcgcauaggcaccugu

SEQ ID NO: 866685 - RNA, 19 nt, Artificial Sequence
  Description of Artificial Sequence: Synthetic oligonucleotide
acacuuccgcaaaggugag

SEQ ID NO: 866686 - RNA, 19 nt, Artificial Sequence
  Description of Artificial Sequence: Synthetic oligonucleotide
cgcccugaagucacggugg

SEQ ID NO: 866687 - RNA, 19 nt, Artificial Sequence
  Description of Artificial Sequence: Synthetic oligonucleotide
guguccgcaacaguucgaa

SEQ ID NO: 866688 - RNA, 19 nt, Artificial Sequence
  Description of Artificial Sequence: Synthetic oligonucleotide
ccuuccgauagcccuucgc

SEQ ID NO: 866689 - RNA, 19 nt, Artificial Sequence
  Description of Artificial Sequence: Synthetic oligonucleotide
uccgccucagaggcauucu

SEQ ID NO: 866690 - RNA, 19 nt, Artificial Sequence
  Description of Artificial Sequence: Synthetic oligonucleotide
agucgguuauacagcccca

SEQ ID NO: 866691 - RNA, 19 nt, Artificial Sequence
  Description of Artificial Sequence: Synthetic oligonucleotide
gccuaucaauccccaguug

SEQ ID NO: 866692 - RNA, 19 nt, Artificial Sequence
  Description of Artificial Sequence: Synthetic oligonucleotide
cacuggccgugccauugug

SEQ ID NO: 866693 - RNA, 19 nt, Artificial Sequence
  Description of Artificial Sequence: Synthetic oligonucleotide
ccagucuaggcaccgccug

SEQ ID NO: 866694 - RNA, 19 nt, Artificial Sequence
  Description of Artificial Sequence: Synthetic oligonucleotide
agaggcgguaagacaaguu

SEQ ID NO: 866695 - RNA, 19 nt, Artificial Sequence
  Description of Artificial Sequence: Synthetic oligonucleotide
aguguccgcaacaguucga

SEQ ID NO: 866696 - RNA, 19 nt, Artificial Sequence
  Description of Artificial Sequence: Synthetic oligonucleotide
gugagcgcaguugguugug

SEQ ID NO: 866697 - RNA, 19 nt, Artificial Sequence
  Description of Artificial Sequence: Synthetic oligonucleotide
ccgccucuguuguaugccg

SEQ ID NO: 866698 - RNA, 19 nt, Artificial Sequence
  Description of Artificial Sequence: Synthetic oligonucleotide
ggccgugccauugugacua

SEQ ID NO: 866699 - RNA, 19 nt, Artificial Sequence
  Description of Artificial Sequence: Synthetic oligonucleotide
cucgcgcagccuccuacuc

SEQ ID NO: 866700 - RNA, 19 nt, Artificial Sequence
  Description of Artificial Sequence: Synthetic oligonucleotide
ccgagacagguuucggaug

SEQ ID NO: 866701 - RNA, 19 nt, Artificial Sequence
  Description of Artificial Sequence: Synthetic oligonucleotide
gcauugucguaaauaaggu

SEQ ID NO: 866702 - RNA, 19 nt, Artificial Sequence
  Description of Artificial Sequence: Synthetic oligonucleotide
gcaccucuugguuggcgug

SEQ ID NO: 866703 - RNA, 19 nt, Artificial Sequence
  Description of Artificial Sequence: Synthetic oligonucleotide
acgcaucuucuggcgagug

SEQ ID NO: 866704 - RNA, 19 nt, Artificial Sequence
  Description of Artificial Sequence: Synthetic oligonucleotide
agguugcgcauaggcaccu

SEQ ID NO: 866705 - RNA, 19 nt, Artificial Sequence
  Description of Artificial Sequence: Synthetic oligonucleotide
uugcaacgccagagauaga

SEQ ID NO: 866706 - RNA, 19 nt, Artificial Sequence
  Description of Artificial Sequence: Synthetic oligonucleotide
cuucaccuaugggcccagg

SEQ ID NO: 866707 - RNA, 19 nt, Artificial Sequence
  Description of Artificial Sequence: Synthetic oligonucleotide
aaggcccuugggauccuua

SEQ ID NO: 866708 - RNA, 19 nt, Artificial Sequence
  Description of Artificial Sequence: Synthetic oligonucleotide
agccgcuguagugcugaug

SEQ ID NO: 866709 - RNA, 19 nt, Artificial Sequence
  Description of Artificial Sequence: Synthetic oligonucleotide
cuccgccucagaggcauuc

SEQ ID NO: 866710 - RNA, 19 nt, Artificial Sequence
  Description of Artificial Sequence: Synthetic oligonucleotide
gcgaacucgguccagcaau

SEQ ID NO: 866711 - RNA, 19 nt, Artificial Sequence
  Description of Artificial Sequence: Synthetic oligonucleotide
gguuggccaagagacugga

SEQ ID NO: 866712 - RNA, 19 nt, Artificial Sequence
  Description of Artificial Sequence: Synthetic oligonucleotide
ccaggccgguaccugacac

SEQ ID NO: 866713 - RNA, 19 nt, Artificial Sequence
  Description of Artificial Sequence: Synthetic oligonucleotide
caguugcaacgccagagau

SEQ ID NO: 866714 - RNA, 19 nt, Artificial Sequence
  Description of Artificial Sequence: Synthetic oligonucleotide
cauccugcucucgaagugu

SEQ ID NO: 866715 - RNA, 19 nt, Artificial Sequence
  Description of Artificial Sequence: Synthetic oligonucleotide
cugagccuaucuguuggaa

SEQ ID NO: 866716 - RNA, 19 nt, Artificial Sequence
  Description of Artificial Sequence: Synthetic oligonucleotide
cucgguccagcaauggguu

SEQ ID NO: 866717 - RNA, 19 nt, Artificial Sequence
  Description of Artificial Sequence: Synthetic oligonucleotide
agucacgguggagcuugcu

SEQ ID NO: 866718 - RNA, 19 nt, Artificial Sequence
  Description of Artificial Sequence: Synthetic oligonucleotide
caggaucccuguaacguuu

SEQ ID NO: 866719 - RNA, 19 nt, Artificial Sequence
  Description of Artificial Sequence: Synthetic oligonucleotide
cgugguuaaagagcuucac

SEQ ID NO: 866720 - RNA, 19 nt, Artificial Sequence
  Description of Artificial Sequence: Synthetic oligonucleotide
ccuuagacacuuccgcaaa

SEQ ID NO: 866721 - RNA, 19 nt, Artificial Sequence
  Description of Artificial Sequence: Synthetic oligonucleotide
uggcgugguuaaagagcuu

SEQ ID NO: 866722 - RNA, 19 nt, Artificial Sequence
  Description of Artificial Sequence: Synthetic oligonucleotide
gcagugcgaacucggucca

SEQ ID NO: 866723 - RNA, 19 nt, Artificial Sequence
  Description of Artificial Sequence: Synthetic oligonucleotide
cacgguggagcuugcugua

SEQ ID NO: 866724 - RNA, 19 nt, Artificial Sequence
  Description of Artificial Sequence: Synthetic oligonucleotide
ggcgguaagacaaguuccu

SEQ ID NO: 866725 - RNA, 19 nt, Artificial Sequence
  Description of Artificial Sequence: Synthetic oligonucleotide
gcgauggccuguguagcug

SEQ ID NO: 866726 - RNA, 19 nt, Artificial Sequence
  Description of Artificial Sequence: Synthetic oligonucleotide
ccgucaugucccugcggcc

SEQ ID NO: 866727 - RNA, 19 nt, Artificial Sequence
  Description of Artificial Sequence: Synthetic oligonucleotide
ccgguaccugacacugacc

SEQ ID NO: 866728 - RNA, 19 nt, Artificial Sequence
  Description of Artificial Sequence: Synthetic oligonucleotide
agugccccugcagccgccu

SEQ ID NO: 866729 - RNA, 19 nt, Artificial Sequence
  Description of Artificial Sequence: Synthetic oligonucleotide
aggaucccuguaacguuuu

SEQ ID NO: 866730 - RNA, 19 nt, Artificial Sequence
  Description of Artificial Sequence: Synthetic oligonucleotide
cuguccaauccacguacau

SEQ ID NO: 866731 - RNA, 19 nt, Artificial Sequence
  Description of Artificial Sequence: Synthetic oligonucleotide
ccuucgcccugaagucacg

SEQ ID NO: 866732 - RNA, 19 nt, Artificial Sequence
  Description of Artificial Sequence: Synthetic oligonucleotide
guaugccgguuuaguucac

SEQ ID NO: 866733 - RNA, 19 nt, Artificial Sequence
  Description of Artificial Sequence: Synthetic oligonucleotide
cagugcgaacucgguccag

SEQ ID NO: 866734 - RNA, 19 nt, Artificial Sequence
  Description of Artificial Sequence: Synthetic oligonucleotide
cccuugggauccuuagaca

SEQ ID NO: 866735 - RNA, 19 nt, Artificial Sequence
  Description of Artificial Sequence: Synthetic oligonucleotide
ccgcaacaguucgaaaaug

SEQ ID NO: 866736 - RNA, 19 nt, Artificial Sequence
  Description of Artificial Sequence: Synthetic oligonucleotide
gcgguaagacaaguuccuc

SEQ ID NO: 866737 - RNA, 19 nt, Artificial Sequence
  Description of Artificial Sequence: Synthetic oligonucleotide
gcacuccugcccaccugcg

SEQ ID NO: 866738 - RNA, 19 nt, Artificial Sequence
  Description of Artificial Sequence: Synthetic oligonucleotide
ccuaugggcccaggaaguc

SEQ ID NO: 866739 - RNA, 19 nt, Artificial Sequence
  Description of Artificial Sequence: Synthetic oligonucleotide
gggugcgauggccugugua

SEQ ID NO: 866740 - RNA, 19 nt, Artificial Sequence
  Description of Artificial Sequence: Synthetic oligonucleotide
ggccagucagugagcgcag

SEQ ID NO: 866741 - RNA, 19 nt, Artificial Sequence
  Description of Artificial Sequence: Synthetic oligonucleotide
caccacccggagcaccaga

SEQ ID NO: 866742 - RNA, 19 nt, Artificial Sequence
  Description of Artificial Sequence: Synthetic oligonucleotide
ucuccgccucagaggcauu

SEQ ID NO: 866743 - RNA, 19 nt, Artificial Sequence
  Description of Artificial Sequence: Synthetic oligonucleotide
ccgccucagaggcauucug

SEQ ID NO: 866744 - RNA, 19 nt, Artificial Sequence
  Description of Artificial Sequence: Synthetic oligonucleotide
cguaaauaagguugcgcau

SEQ ID NO: 866745 - RNA, 19 nt, Artificial Sequence
  Description of Artificial Sequence: Synthetic oligonucleotide
gcuuagcaccaggucugug

SEQ ID NO: 866746 - RNA, 19 nt, Artificial Sequence
  Description of Artificial Sequence: Synthetic oligonucleotide
caggccgguaccugacacu

SEQ ID NO: 866747 - RNA, 19 nt, Artificial Sequence
  Description of Artificial Sequence: Synthetic oligonucleotide
caguagcauuguagaauau

SEQ ID NO: 866748 - RNA, 19 nt, Artificial Sequence
  Description of Artificial Sequence: Synthetic oligonucleotide
cuguagcaccugugcugga

SEQ ID NO: 866749 - RNA, 19 nt, Artificial Sequence
  Description of Artificial Sequence: Synthetic oligonucleotide
ccgauagcccuucgcccug

SEQ ID NO: 866750 - RNA, 19 nt, Artificial Sequence
  Description of Artificial Sequence: Synthetic oligonucleotide
gcauuccgagacagguuuc

SEQ ID NO: 866751 - RNA, 19 nt, Artificial Sequence
  Description of Artificial Sequence: Synthetic oligonucleotide
gccucuguuguaugccggu

SEQ ID NO: 866752 - RNA, 19 nt, Artificial Sequence
  Description of Artificial Sequence: Synthetic oligonucleotide
gguugcgcauaggcaccug

SEQ ID NO: 866753 - RNA, 19 nt, Artificial Sequence
  Description of Artificial Sequence: Synthetic oligonucleotide
cucgggccacggguuccag

SEQ ID NO: 866754 - RNA, 19 nt, Artificial Sequence
  Description of Artificial Sequence: Synthetic oligonucleotide
gggcaugguugauguaggu

SEQ ID NO: 866755 - RNA, 19 nt, Artificial Sequence
  Description of Artificial Sequence: Synthetic oligonucleotide
gugcuggauauaagccgcu

SEQ ID NO: 866756 - RNA, 19 nt, Artificial Sequence
  Description of Artificial Sequence: Synthetic oligonucleotide
cgguuuaguucacagcgcu

SEQ ID NO: 866757 - RNA, 19 nt, Artificial Sequence
  Description of Artificial Sequence: Synthetic oligonucleotide
ggccaagagacuggaggcu

SEQ ID NO: 866758 - RNA, 19 nt, Artificial Sequence
  Description of Artificial Sequence: Synthetic oligonucleotide
ccccgucaugucccugcgg

SEQ ID NO: 866759 - RNA, 19 nt, Artificial Sequence
  Description of Artificial Sequence: Synthetic oligonucleotide
cuccuacucugugguguaa

SEQ ID NO: 866760 - RNA, 19 nt, Artificial Sequence
  Description of Artificial Sequence: Synthetic oligonucleotide
cgugccauugugacuaaau

SEQ ID NO: 866761 - RNA, 19 nt, Artificial Sequence
  Description of Artificial Sequence: Synthetic oligonucleotide
ccgcuccuagcaccugcag

SEQ ID NO: 866762 - RNA, 19 nt, Artificial Sequence
  Description of Artificial Sequence: Synthetic oligonucleotide
gcccuucgcccugaaguca

SEQ ID NO: 866763 - RNA, 19 nt, Artificial Sequence
  Description of Artificial Sequence: Synthetic oligonucleotide
cacgcaucuucuggcgagu

SEQ ID NO: 866764 - RNA, 19 nt, Artificial Sequence
  Description of Artificial Sequence: Synthetic oligonucleotide
gcucgcgcagccuccuacu

SEQ ID NO: 866765 - RNA, 19 nt, Artificial Sequence
  Description of Artificial Sequence: Synthetic oligonucleotide
gccgcuccuagcaccugca

SEQ ID NO: 866766 - RNA, 19 nt, Artificial Sequence
  Description of Artificial Sequence: Synthetic oligonucleotide
ccggccuucaagccgcugu

SEQ ID NO: 866767 - RNA, 19 nt, Artificial Sequence
  Description of Artificial Sequence: Synthetic oligonucleotide
gcggucaccagcggugaua

SEQ ID NO: 866768 - RNA, 19 nt, Artificial Sequence
  Description of Artificial Sequence: Synthetic oligonucleotide
caguaggagcugagccuau

SEQ ID NO: 866769 - RNA, 19 nt, Artificial Sequence
  Description of Artificial Sequence: Synthetic oligonucleotide
cgcacagauggggcucggg

SEQ ID NO: 866770 - RNA, 19 nt, Artificial Sequence
  Description of Artificial Sequence: Synthetic oligonucleotide
gcaccgccugaaggcugcg

SEQ ID NO: 866771 - RNA, 19 nt, Artificial Sequence
  Description of Artificial Sequence: Synthetic oligonucleotide
gcgcgcugcaccucuuggu

SEQ ID NO: 866772 - RNA, 19 nt, Artificial Sequence
  Description of Artificial Sequence: Synthetic oligonucleotide
gcgcacagauggggcucgg

SEQ ID NO: 866773 - RNA, 19 nt, Artificial Sequence
  Description of Artificial Sequence: Synthetic oligonucleotide
cacuuccgcaaaggugagu

SEQ ID NO: 866774 - RNA, 19 nt, Artificial Sequence
  Description of Artificial Sequence: Synthetic oligonucleotide
ggccgguaccugacacuga

SEQ ID NO: 866775 - RNA, 19 nt, Artificial Sequence
  Description of Artificial Sequence: Synthetic oligonucleotide
ggcugcccgggaggacuuc

SEQ ID NO: 866776 - RNA, 19 nt, Artificial Sequence
  Description of Artificial Sequence: Synthetic oligonucleotide
caaggcccuugggauccuu

SEQ ID NO: 866777 - RNA, 19 nt, Artificial Sequence
  Description of Artificial Sequence: Synthetic oligonucleotide
cgauagcccuucgcccuga

SEQ ID NO: 866778 - RNA, 19 nt, Artificial Sequence
  Description of Artificial Sequence: Synthetic oligonucleotide
ccgugccauugugacuaaa

SEQ ID NO: 866779 - RNA, 19 nt, Artificial Sequence
  Description of Artificial Sequence: Synthetic oligonucleotide
aauuaaacaauuuagaucu

SEQ ID NO: 866780 - RNA, 19 nt, Artificial Sequence
  Description of Artificial Sequence: Synthetic oligonucleotide
aaacuaauaauucuacuac

SEQ ID NO: 866781 - RNA, 19 nt, Artificial Sequence
  Description of Artificial Sequence: Synthetic oligonucleotide
aaugcuacaaucuuucagg

SEQ ID NO: 866782 - RNA, 19 nt, Artificial Sequence
  Description of Artificial Sequence: Synthetic oligonucleotide
uuuauauccacuauaagga

SEQ ID NO: 866783 - RNA, 19 nt, Artificial Sequence
  Description of Artificial Sequence: Synthetic oligonucleotide
uacuacacuacaaauaugg

SEQ ID NO: 866784 - RNA, 19 nt, Artificial Sequence
  Description of Artificial Sequence: Synthetic oligonucleotide
acuauaauuauauaggaug

SEQ ID NO: 866785 - RNA, 19 nt, Artificial Sequence
  Description of Artificial Sequence: Synthetic oligonucleotide
aaauggacuaauugaaucg

SEQ ID NO: 866786 - RNA, 19 nt, Artificial Sequence
  Description of Artificial Sequence: Synthetic oligonucleotide
acuuauuugaaauacagca

SEQ ID NO: 866787 - RNA, 19 nt, Artificial Sequence
  Description of Artificial Sequence: Synthetic oligonucleotide
aauugaaucggcuugauuu

SEQ ID NO: 866788 - RNA, 19 nt, Artificial Sequence
  Description of Artificial Sequence: Synthetic oligonucleotide
aguuaagaaaguuaguguc

SEQ ID NO: 866789 - RNA, 19 nt, Artificial Sequence
  Description of Artificial Sequence: Synthetic oligonucleotide
uaggcuauuauuauuauac

SEQ ID NO: 866790 - RNA, 19 nt, Artificial Sequence
  Description of Artificial Sequence: Synthetic oligonucleotide
auuuaggcuaauaacaucc

SEQ ID NO: 866791 - RNA, 19 nt, Artificial Sequence
  Description of Artificial Sequence: Synthetic oligonucleotide
uauaggauguucuagaaaa

SEQ ID NO: 866792 - RNA, 19 nt, Artificial Sequence
  Description of Artificial Sequence: Synthetic oligonucleotide
cuaauaacauccaucaaag

SEQ ID NO: 866793 - RNA, 19 nt, Artificial Sequence
  Description of Artificial Sequence: Synthetic oligonucleotide
aguaaauucugaguuaggc

SEQ ID NO: 866794 - RNA, 19 nt, Artificial Sequence
  Description of Artificial Sequence: Synthetic oligonucleotide
cagacuaaaauucagacuc

SEQ ID NO: 866795 - RNA, 19 nt, Artificial Sequence
  Description of Artificial Sequence: Synthetic oligonucleotide
uaaacuuugaguuggaaau

SEQ ID NO: 866796 - RNA, 19 nt, Artificial Sequence
  Description of Artificial Sequence: Synthetic oligonucleotide
aguaaagucucugauauuc

SEQ ID NO: 866797 - RNA, 19 nt, Artificial Sequence
  Description of Artificial Sequence: Synthetic oligonucleotide
uguaaacauggacagaagc

SEQ ID NO: 866798 - RNA, 19 nt, Artificial Sequence
  Description of Artificial Sequence: Synthetic oligonucleotide
uugaguuggaaauaugugc

SEQ ID NO: 866799 - RNA, 19 nt, Artificial Sequence
  Description of Artificial Sequence: Synthetic oligonucleotide
uauuaagucacacacuuau

SEQ ID NO: 866800 - RNA, 19 nt, Artificial Sequence
  Description of Artificial Sequence: Synthetic oligonucleotide
uccacuauaaggaaaacau

SEQ ID NO: 866801 - RNA, 19 nt, Artificial Sequence
  Description of Artificial Sequence: Synthetic oligonucleotide
gacgagauuguaaacaugg

SEQ ID NO: 866802 - RNA, 19 nt, Artificial Sequence
  Description of Artificial Sequence: Synthetic oligonucleotide
aagcaugagaauuuaauau

SEQ ID NO: 866803 - RNA, 19 nt, Artificial Sequence
  Description of Artificial Sequence: Synthetic oligonucleotide
aauaccaacucaaagcuug

SEQ ID NO: 866804 - RNA, 19 nt, Artificial Sequence
  Description of Artificial Sequence: Synthetic oligonucleotide
uguaggguagagcuuacgg

SEQ ID NO: 866805 - RNA, 19 nt, Artificial Sequence
  Description of Artificial Sequence: Synthetic oligonucleotide
acagaugauaaguaauaac

SEQ ID NO: 866806 - RNA, 19 nt, Artificial Sequence
  Description of Artificial Sequence: Synthetic oligonucleotide
accagacuaaaauucagac

SEQ ID NO: 866807 - RNA, 19 nt, Artificial Sequence
  Description of Artificial Sequence: Synthetic oligonucleotide
auaauuauauaggauguuc

SEQ ID NO: 866808 - RNA, 19 nt, Artificial Sequence
  Description of Artificial Sequence: Synthetic oligonucleotide
auaauuuaggcuaauaaca

SEQ ID NO: 866809 - RNA, 19 nt, Artificial Sequence
  Description of Artificial Sequence: Synthetic oligonucleotide
aaacauccaucucuuaauc

SEQ ID NO: 866810 - RNA, 19 nt, Artificial Sequence
  Description of Artificial Sequence: Synthetic oligonucleotide
aaauaugugcuucaccaga

SEQ ID NO: 866811 - RNA, 19 nt, Artificial Sequence
  Description of Artificial Sequence: Synthetic oligonucleotide
uaauuauauaggauguucu

SEQ ID NO: 866812 - RNA, 19 nt, Artificial Sequence
  Description of Artificial Sequence: Synthetic oligonucleotide
uuauauaggauguucuaga

SEQ ID NO: 866813 - RNA, 19 nt, Artificial Sequence
  Description of Artificial Sequence: Synthetic oligonucleotide
gaaaguuagugucaucucc

SEQ ID NO: 866814 - RNA, 19 nt, Artificial Sequence
  Description of Artificial Sequence: Synthetic oligonucleotide
cuagguuagacuuaauaac

SEQ ID NO: 866815 - RNA, 19 nt, Artificial Sequence
  Description of Artificial Sequence: Synthetic oligonucleotide
aauggacuaauugaaucgg

SEQ ID NO: 866816 - RNA, 19 nt, Artificial Sequence
  Description of Artificial Sequence: Synthetic oligonucleotide
uuugaguuggaaauaugug

SEQ ID NO: 866817 - RNA, 19 nt, Artificial Sequence
  Description of Artificial Sequence: Synthetic oligonucleotide
aacauaaagaccauagggu

SEQ ID NO: 866818 - RNA, 19 nt, Artificial Sequence
  Description of Artificial Sequence: Synthetic oligonucleotide
aacuaauaauucuacuaca

SEQ ID NO: 866819 - RNA, 19 nt, Artificial Sequence
  Description of Artificial Sequence: Synthetic oligonucleotide
acauaaagaccauagggug

SEQ ID NO: 866820 - RNA, 19 nt, Artificial Sequence
  Description of Artificial Sequence: Synthetic oligonucleotide
gaugauaaguaauaacauc

SEQ ID NO: 866821 - RNA, 19 nt, Artificial Sequence
  Description of Artificial Sequence: Synthetic oligonucleotide
guaguuaagaaaguuagug

SEQ ID NO: 866822 - RNA, 19 nt, Artificial Sequence
  Description of Artificial Sequence: Synthetic oligonucleotide
aaaacauccaucucuuaau

SEQ ID NO: 866823 - RNA, 19 nt, Artificial Sequence
  Description of Artificial Sequence: Synthetic oligonucleotide
aaagcauguuacuacagaa

SEQ ID NO: 866824 - RNA, 19 nt, Artificial Sequence
  Description of Artificial Sequence: Synthetic oligonucleotide
uauguaucuaaauuaaauu

SEQ ID NO: 866825 - RNA, 19 nt, Artificial Sequence
  Description of Artificial Sequence: Synthetic oligonucleotide
acuaauaauucuacuacac

SEQ ID NO: 866826 - RNA, 19 nt, Artificial Sequence
  Description of Artificial Sequence: Synthetic oligonucleotide
aagucugacacuguuuaac

SEQ ID NO: 866827 - RNA, 19 nt, Artificial Sequence
  Description of Artificial Sequence: Synthetic oligonucleotide
uaggcugugauggaaagcg

SEQ ID NO: 866828 - RNA, 19 nt, Artificial Sequence
  Description of Artificial Sequence: Synthetic oligonucleotide
augauaaguaauaacauca

SEQ ID NO: 866829 - RNA, 19 nt, Artificial Sequence
  Description of Artificial Sequence: Synthetic oligonucleotide
aguauuaagucacacacuu

SEQ ID NO: 866830 - RNA, 19 nt, Artificial Sequence
  Description of Artificial Sequence: Synthetic oligonucleotide
ucuauugguaguuaagaaa

SEQ ID NO: 866831 - RNA, 19 nt, Artificial Sequence
  Description of Artificial Sequence: Synthetic oligonucleotide
cugaguuaggcugugaugg

SEQ ID NO: 866832 - RNA, 19 nt, Artificial Sequence
  Description of Artificial Sequence: Synthetic oligonucleotide
uaacguuauuauuuagggg

SEQ ID NO: 866833 - RNA, 19 nt, Artificial Sequence
  Description of Artificial Sequence: Synthetic oligonucleotide
aguguugggacccaaauaa

SEQ ID NO: 866834 - RNA, 19 nt, Artificial Sequence
  Description of Artificial Sequence: Synthetic oligonucleotide
gcuacaaucuuucaggucc

SEQ ID NO: 866835 - RNA, 19 nt, Artificial Sequence
  Description of Artificial Sequence: Synthetic oligonucleotide
auauauuccuucaaguuag

SEQ ID NO: 866836 - RNA, 19 nt, Artificial Sequence
  Description of Artificial Sequence: Synthetic oligonucleotide
aauaugugcuucaccagac

SEQ ID NO: 866837 - RNA, 19 nt, Artificial Sequence
  Description of Artificial Sequence: Synthetic oligonucleotide
uuaucuaaacuuugaguug

SEQ ID NO: 866838 - RNA, 19 nt, Artificial Sequence
  Description of Artificial Sequence: Synthetic oligonucleotide
aacuuaguguccccuuuac

SEQ ID NO: 866839 - RNA, 19 nt, Artificial Sequence
  Description of Artificial Sequence: Synthetic oligonucleotide
acaauuuagaucugcuuug

SEQ ID NO: 866840 - RNA, 19 nt, Artificial Sequence
  Description of Artificial Sequence: Synthetic oligonucleotide
aauuauauaggauguucua

SEQ ID NO: 866841 - RNA, 19 nt, Artificial Sequence
  Description of Artificial Sequence: Synthetic oligonucleotide
auuauauaggauguucuag

SEQ ID NO: 866842 - RNA, 19 nt, Artificial Sequence
  Description of Artificial Sequence: Synthetic oligonucleotide
auaugguauguuuaaauau

SEQ ID NO: 866843 - RNA, 19 nt, Artificial Sequence
  Description of Artificial Sequence: Synthetic oligonucleotide
uuaauaacguuauuauuua

SEQ ID NO: 866844 - RNA, 19 nt, Artificial Sequence
  Description of Artificial Sequence: Synthetic oligonucleotide
acacacuuauuugaaauac

SEQ ID NO: 866845 - RNA, 19 nt, Artificial Sequence
  Description of Artificial Sequence: Synthetic oligonucleotide
aggcuauuauuauuauacc

SEQ ID NO: 866846 - RNA, 19 nt, Artificial Sequence
  Description of Artificial Sequence: Synthetic oligonucleotide
cucuuaaucaccuagguua

SEQ ID NO: 866847 - RNA, 19 nt, Artificial Sequence
  Description of Artificial Sequence: Synthetic oligonucleotide
aggcuaauaacauccauca

SEQ ID NO: 866848 - RNA, 19 nt, Artificial Sequence
  Description of Artificial Sequence: Synthetic oligonucleotide
uaguuaagaaaguuagugu

SEQ ID NO: 866849 - RNA, 19 nt, Artificial Sequence
  Description of Artificial Sequence: Synthetic oligonucleotide
ugucucaugggcaaucuga

SEQ ID NO: 866850 - RNA, 19 nt, Artificial Sequence
  Description of Artificial Sequence: Synthetic oligonucleotide
aacucuuuaguaaauucug

SEQ ID NO: 866851 - RNA, 19 nt, Artificial Sequence
  Description of Artificial Sequence: Synthetic oligonucleotide
uagggugcucuuuauaucc

SEQ ID NO: 866852 - RNA, 19 nt, Artificial Sequence
  Description of Artificial Sequence: Synthetic oligonucleotide
cauaaagaccauagggugc

SEQ ID NO: 866853 - RNA, 19 nt, Artificial Sequence
  Description of Artificial Sequence: Synthetic oligonucleotide
cuugcucacaagcaaagag

SEQ ID NO: 866854 - RNA, 19 nt, Artificial Sequence
  Description of Artificial Sequence: Synthetic oligonucleotide
uaagaucaguuccaauaag

SEQ ID NO: 866855 - RNA, 19 nt, Artificial Sequence
  Description of Artificial Sequence: Synthetic oligonucleotide
uauauccacuauaaggaaa

SEQ ID NO: 866856 - RNA, 19 nt, Artificial Sequence
  Description of Artificial Sequence: Synthetic oligonucleotide
ugcagcaaaguaacugggg

SEQ ID NO: 866857 - RNA, 19 nt, Artificial Sequence
  Description of Artificial Sequence: Synthetic oligonucleotide
uaauaacguuauuauuuag

SEQ ID NO: 866858 - RNA, 19 nt, Artificial Sequence
  Description of Artificial Sequence: Synthetic oligonucleotide
uccgugguaacuuaguguc

SEQ ID NO: 866859 - RNA, 19 nt, Artificial Sequence
  Description of Artificial Sequence: Synthetic oligonucleotide
uacuaaaccacagucuccc

SEQ ID NO: 866860 - RNA, 19 nt, Artificial Sequence
  Description of Artificial Sequence: Synthetic oligonucleotide
agguauuauuuacaaaacu

SEQ ID NO: 866861 - RNA, 19 nt, Artificial Sequence
  Description of Artificial Sequence: Synthetic oligonucleotide
uucuacuacacuacaaaua

SEQ ID NO: 866862 - RNA, 19 nt, Artificial Sequence
  Description of Artificial Sequence: Synthetic oligonucleotide
aacgucucagguuccuuuc

SEQ ID NO: 866863 - RNA, 19 nt, Artificial Sequence
  Description of Artificial Sequence: Synthetic oligonucleotide
agaaaguuagugucaucuc

SEQ ID NO: 866864 - RNA, 19 nt, Artificial Sequence
  Description of Artificial Sequence: Synthetic oligonucleotide
ugauuuaaucugaaacuaa

SEQ ID NO: 866865 - RNA, 19 nt, Artificial Sequence
  Description of Artificial Sequence: Synthetic oligonucleotide
aaauauccuggguuaagau

SEQ ID NO: 866866 - RNA, 19 nt, Artificial Sequence
  Description of Artificial Sequence: Synthetic oligonucleotide
acagguauaugcccaguuc

SEQ ID NO: 866867 - RNA, 19 nt, Artificial Sequence
  Description of Artificial Sequence: Synthetic oligonucleotide
gagcuuacggaagaggagg

SEQ ID NO: 866868 - RNA, 19 nt, Artificial Sequence
  Description of Artificial Sequence: Synthetic oligonucleotide
ucaaagcauguuacuacag

SEQ ID NO: 866869 - RNA, 19 nt, Artificial Sequence
  Description of Artificial Sequence: Synthetic oligonucleotide
uuuaguaaauucugaguua

SEQ ID NO: 866870 - RNA, 19 nt, Artificial Sequence
  Description of Artificial Sequence: Synthetic oligonucleotide
aggaagauaauacuauaau

SEQ ID NO: 866871 - RNA, 19 nt, Artificial Sequence
  Description of Artificial Sequence: Synthetic oligonucleotide
ugcaguuccacaguaauuc

SEQ ID NO: 866872 - RNA, 19 nt, Artificial Sequence
  Description of Artificial Sequence: Synthetic oligonucleotide
aagacacacuaaaugcuac

SEQ ID NO: 866873 - RNA, 19 nt, Artificial Sequence
  Description of Artificial Sequence: Synthetic oligonucleotide
caucucuuaaucaccuagg

SEQ ID NO: 866874 - RNA, 19 nt, Artificial Sequence
  Description of Artificial Sequence: Synthetic oligonucleotide
uauauaggauguucuagaa

SEQ ID NO: 866875 - RNA, 19 nt, Artificial Sequence
  Description of Artificial Sequence: Synthetic oligonucleotide
cuuaucuaaacuuugaguu

SEQ ID NO: 866876 - RNA, 19 nt, Artificial Sequence
  Description of Artificial Sequence: Synthetic oligonucleotide
auaauucuacuacacuaca

SEQ ID NO: 866877 - RNA, 19 nt, Artificial Sequence
  Description of Artificial Sequence: Synthetic oligonucleotide
uuacggaagaggaggaacu

SEQ ID NO: 866878 - RNA, 19 nt, Artificial Sequence
  Description of Artificial Sequence: Synthetic oligonucleotide
cacuuauuugaaauacagc

SEQ ID NO: 866879 - RNA, 19 nt, Artificial Sequence
  Description of Artificial Sequence: Synthetic oligonucleotide
uuaaucaccuagguuagac

SEQ ID NO: 866880 - RNA, 19 nt, Artificial Sequence
  Description of Artificial Sequence: Synthetic oligonucleotide
aaaguuagugucaucuccu

SEQ ID NO: 866881 - RNA, 19 nt, Artificial Sequence
  Description of Artificial Sequence: Synthetic oligonucleotide
uuuccgugguaacuuagug

SEQ ID NO: 866882 - RNA, 19 nt, Artificial Sequence
  Description of Artificial Sequence: Synthetic oligonucleotide
uggacuaauugaaucggcu

SEQ ID NO: 866883 - RNA, 19 nt, Artificial Sequence
  Description of Artificial Sequence: Synthetic oligonucleotide
uugauuuaaucugaaacua

SEQ ID NO: 866884 - RNA, 19 nt, Artificial Sequence
  Description of Artificial Sequence: Synthetic oligonucleotide
caucauuaaaugcuugcug

SEQ ID NO: 866885 - RNA, 19 nt, Artificial Sequence
  Description of Artificial Sequence: Synthetic oligonucleotide
cacguuagcaucuguguag

SEQ ID NO: 866886 - RNA, 19 nt, Artificial Sequence
  Description of Artificial Sequence: Synthetic oligonucleotide
auagggugcucuuuauauc

SEQ ID NO: 866887 - RNA, 19 nt, Artificial Sequence
  Description of Artificial Sequence: Synthetic oligonucleotide
ccaaauaagccuuauucag

SEQ ID NO: 866888 - RNA, 19 nt, Artificial Sequence
  Description of Artificial Sequence: Synthetic oligonucleotide
agcaugagaauuuaauauu

SEQ ID NO: 866889 - RNA, 19 nt, Artificial Sequence
  Description of Artificial Sequence: Synthetic oligonucleotide
uuauauccacuauaaggaa

SEQ ID NO: 866890 - RNA, 19 nt, Artificial Sequence
  Description of Artificial Sequence: Synthetic oligonucleotide
uauuauuauuauacccaaa

SEQ ID NO: 866891 - RNA, 19 nt, Artificial Sequence
  Description of Artificial Sequence: Synthetic oligonucleotide
agaugcagcaaaguaacug

SEQ ID NO: 866892 - RNA, 19 nt, Artificial Sequence
  Description of Artificial Sequence: Synthetic oligonucleotide
aucaggucggucccaauag

SEQ ID NO: 866893 - RNA, 19 nt, Artificial Sequence
  Description of Artificial Sequence: Synthetic oligonucleotide
cugaaugaguuuuccuucc

SEQ ID NO: 866894 - RNA, 19 nt, Artificial Sequence
  Description of Artificial Sequence: Synthetic oligonucleotide
auucuacuacacuacaaau

SEQ ID NO: 866895 - RNA, 19 nt, Artificial Sequence
  Description of Artificial Sequence: Synthetic oligonucleotide
gcuaauaacauccaucaaa

SEQ ID NO: 866896 - RNA, 19 nt, Artificial Sequence
  Description of Artificial Sequence: Synthetic oligonucleotide
aacagaugauaaguaauaa

SEQ ID NO: 866897 - RNA, 19 nt, Artificial Sequence
  Description of Artificial Sequence: Synthetic oligonucleotide
agugucuaugacacaaaac

SEQ ID NO: 866898 - RNA, 19 nt, Artificial Sequence
  Description of Artificial Sequence: Synthetic oligonucleotide
agacuuaauaacguuauua

SEQ ID NO: 866899 - RNA, 19 nt, Artificial Sequence
  Description of Artificial Sequence: Synthetic oligonucleotide
cucacaagcaaagagagaa

SEQ ID NO: 866900 - RNA, 19 nt, Artificial Sequence
  Description of Artificial Sequence: Synthetic oligonucleotide
caaaguauuaagucacaca

SEQ ID NO: 866901 - RNA, 19 nt, Artificial Sequence
  Description of Artificial Sequence: Synthetic oligonucleotide
ugggacgagauuguaaaca

SEQ ID NO: 866902 - RNA, 19 nt, Artificial Sequence
  Description of Artificial Sequence: Synthetic oligonucleotide
cuauaauuauauaggaugu

SEQ ID NO: 866903 - RNA, 19 nt, Artificial Sequence
  Description of Artificial Sequence: Synthetic oligonucleotide
ugguacaguacauaauuuu

SEQ ID NO: 866904 - RNA, 19 nt, Artificial Sequence
  Description of Artificial Sequence: Synthetic oligonucleotide
agaguggacacucauggua

SEQ ID NO: 866905 - RNA, 19 nt, Artificial Sequence
  Description of Artificial Sequence: Synthetic oligonucleotide
aucucuuaaucaccuaggu

SEQ ID NO: 866906 - RNA, 19 nt, Artificial Sequence
  Description of Artificial Sequence: Synthetic oligonucleotide
acuaaaccacagucucccc

SEQ ID NO: 866907 - RNA, 19 nt, Artificial Sequence
  Description of Artificial Sequence: Synthetic oligonucleotide
cuauuauuauuauacccaa

SEQ ID NO: 866908 - RNA, 19 nt, Artificial Sequence
  Description of Artificial Sequence: Synthetic oligonucleotide
ccuuccgacaagcagaugc

SEQ ID NO: 866909 - RNA, 19 nt, Artificial Sequence
  Description of Artificial Sequence: Synthetic oligonucleotide
uccugagauuauuacaaau

SEQ ID NO: 866910 - RNA, 19 nt, Artificial Sequence
  Description of Artificial Sequence: Synthetic oligonucleotide
gcuauuauuauuauaccca

SEQ ID NO: 866911 - RNA, 19 nt, Artificial Sequence
  Description of Artificial Sequence: Synthetic oligonucleotide
ucucugauauucccuggga

SEQ ID NO: 866912 - RNA, 19 nt, Artificial Sequence
  Description of Artificial Sequence: Synthetic oligonucleotide
uccccuuaucuaaacuuug

SEQ ID NO: 866913 - RNA, 19 nt, Artificial Sequence
  Description of Artificial Sequence: Synthetic oligonucleotide
uuccgugguaacuuagugu

SEQ ID NO: 866914 - RNA, 19 nt, Artificial Sequence
  Description of Artificial Sequence: Synthetic oligonucleotide
ugagauuuccgugguaacu

SEQ ID NO: 866915 - RNA, 19 nt, Artificial Sequence
  Description of Artificial Sequence: Synthetic oligonucleotide
uucugaguuaggcugugau

SEQ ID NO: 866916 - RNA, 19 nt, Artificial Sequence
  Description of Artificial Sequence: Synthetic oligonucleotide
guuaggcugugauggaaag

SEQ ID NO: 866917 - RNA, 19 nt, Artificial Sequence
  Description of Artificial Sequence: Synthetic oligonucleotide
uuaccuaaggccccaucaa

SEQ ID NO: 866918 - RNA, 19 nt, Artificial Sequence
  Description of Artificial Sequence: Synthetic oligonucleotide
auauaggauguucuagaaa

SEQ ID NO: 866919 - RNA, 19 nt, Artificial Sequence
  Description of Artificial Sequence: Synthetic oligonucleotide
cugcuacuaaaccacaguc

SEQ ID NO: 866920 - RNA, 19 nt, Artificial Sequence
  Description of Artificial Sequence: Synthetic oligonucleotide
gaacacguuagcaucugug

SEQ ID NO: 866921 - RNA, 19 nt, Artificial Sequence
  Description of Artificial Sequence: Synthetic oligonucleotide
gcuguaaguguguaggcag

SEQ ID NO: 866922 - RNA, 19 nt, Artificial Sequence
  Description of Artificial Sequence: Synthetic oligonucleotide
aaauucugaguuaggcugu

SEQ ID NO: 866923 - RNA, 19 nt, Artificial Sequence
  Description of Artificial Sequence: Synthetic oligonucleotide
gaggcacgaagguuaagug

SEQ ID NO: 866924 - RNA, 19 nt, Artificial Sequence
  Description of Artificial Sequence: Synthetic oligonucleotide
auggacuaauugaaucggc

SEQ ID NO: 866925 - RNA, 19 nt, Artificial Sequence
  Description of Artificial Sequence: Synthetic oligonucleotide
cuugggacgagauuguaaa

SEQ ID NO: 866926 - RNA, 19 nt, Artificial Sequence
  Description of Artificial Sequence: Synthetic oligonucleotide
gaacugguucccugguggg

SEQ ID NO: 866927 - RNA, 19 nt, Artificial Sequence
  Description of Artificial Sequence: Synthetic oligonucleotide
cuuauucagugucuaugac

SEQ ID NO: 866928 - RNA, 19 nt, Artificial Sequence
  Description of Artificial Sequence: Synthetic oligonucleotide
uuauuuccgaggcucugaa

SEQ ID NO: 866929 - RNA, 19 nt, Artificial Sequence
  Description of Artificial Sequence: Synthetic oligonucleotide
ucucuuaaucaccuagguu

SEQ ID NO: 866930 - RNA, 19 nt, Artificial Sequence
  Description of Artificial Sequence: Synthetic oligonucleotide
cuuacggaagaggaggaac

SEQ ID NO: 866931 - RNA, 19 nt, Artificial Sequence
  Description of Artificial Sequence: Synthetic oligonucleotide
acgaagguuaagugauauc

SEQ ID NO: 866932 - RNA, 19 nt, Artificial Sequence
  Description of Artificial Sequence: Synthetic oligonucleotide
auauccacuauaaggaaaa

SEQ ID NO: 866933 - RNA, 19 nt, Artificial Sequence
  Description of Artificial Sequence: Synthetic oligonucleotide
uauaauuauauaggauguu

SEQ ID NO: 866934 - RNA, 19 nt, Artificial Sequence
  Description of Artificial Sequence: Synthetic oligonucleotide
cuacacuacaaauauggua

SEQ ID NO: 866935 - RNA, 19 nt, Artificial Sequence
  Description of Artificial Sequence: Synthetic oligonucleotide
cgaagguuaagugauaucc

SEQ ID NO: 866936 - RNA, 19 nt, Artificial Sequence
  Description of Artificial Sequence: Synthetic oligonucleotide
uguguaggcagaguagagu

SEQ ID NO: 866937 - RNA, 19 nt, Artificial Sequence
  Description of Artificial Sequence: Synthetic oligonucleotide
gauggaaagcggcugaggu

SEQ ID NO: 866938 - RNA, 19 nt, Artificial Sequence
  Description of Artificial Sequence: Synthetic oligonucleotide
guagagcuuacggaagagg

SEQ ID NO: 866939 - RNA, 19 nt, Artificial Sequence
  Description of Artificial Sequence: Synthetic oligonucleotide
acuaauugaaucggcuuga

SEQ ID NO: 866940 - RNA, 19 nt, Artificial Sequence
  Description of Artificial Sequence: Synthetic oligonucleotide
accuagguuagacuuaaua

SEQ ID NO: 866941 - RNA, 19 nt, Artificial Sequence
  Description of Artificial Sequence: Synthetic oligonucleotide
ugcauuuauuuccgaggcu

SEQ ID NO: 866942 - RNA, 19 nt, Artificial Sequence
  Description of Artificial Sequence: Synthetic oligonucleotide
aguguguaggcagaguaga

SEQ ID NO: 866943 - RNA, 19 nt, Artificial Sequence
  Description of Artificial Sequence: Synthetic oligonucleotide
guaggguagagcuuacgga

SEQ ID NO: 866944 - RNA, 19 nt, Artificial Sequence
  Description of Artificial Sequence: Synthetic oligonucleotide
guuggaaauaugugcuuca

SEQ ID NO: 866945 - RNA, 19 nt, Artificial Sequence
  Description of Artificial Sequence: Synthetic oligonucleotide
agacacacuaaaugcuaca

SEQ ID NO: 866946 - RNA, 19 nt, Artificial Sequence
  Description of Artificial Sequence: Synthetic oligonucleotide
ugauggaaagcggcugagg

SEQ ID NO: 866947 - RNA, 19 nt, Artificial Sequence
  Description of Artificial Sequence: Synthetic oligonucleotide
aggcacgaagguuaaguga

SEQ ID NO: 866948 - RNA, 19 nt, Artificial Sequence
  Description of Artificial Sequence: Synthetic oligonucleotide
acuaaaauucagacucuug

SEQ ID NO: 866949 - RNA, 19 nt, Artificial Sequence
  Description of Artificial Sequence: Synthetic oligonucleotide
gauuuccgugguaacuuag

SEQ ID NO: 866950 - RNA, 19 nt, Artificial Sequence
  Description of Artificial Sequence: Synthetic oligonucleotide
guuagacuuaauaacguua

SEQ ID NO: 866951 - RNA, 19 nt, Artificial Sequence
  Description of Artificial Sequence: Synthetic oligonucleotide
augcuacaaucuuucaggu

SEQ ID NO: 866952 - RNA, 19 nt, Artificial Sequence
  Description of Artificial Sequence: Synthetic oligonucleotide
acguuagcaucuguguagg

SEQ ID NO: 866953 - RNA, 19 nt, Artificial Sequence
  Description of Artificial Sequence: Synthetic oligonucleotide
aagcauguuacuacagaaa

SEQ ID NO: 866954 - RNA, 19 nt, Artificial Sequence
  Description of Artificial Sequence: Synthetic oligonucleotide
cuacuacacuacaaauaug

SEQ ID NO: 866955 - RNA, 19 nt, Artificial Sequence
  Description of Artificial Sequence: Synthetic oligonucleotide
caaagcauguuacuacaga

SEQ ID NO: 866956 - RNA, 19 nt, Artificial Sequence
  Description of Artificial Sequence: Synthetic oligonucleotide
ccuucugcuacuaaaccac

SEQ ID NO: 866957 - RNA, 19 nt, Artificial Sequence
  Description of Artificial Sequence: Synthetic oligonucleotide
gaaucggcuugauuucuuc

SEQ ID NO: 866958 - RNA, 19 nt, Artificial Sequence
  Description of Artificial Sequence: Synthetic oligonucleotide
acuaaaugcuacaaucuuu

SEQ ID NO: 866959 - RNA, 19 nt, Artificial Sequence
  Description of Artificial Sequence: Synthetic oligonucleotide
ccaagcaggugucaaaccc

SEQ ID NO: 866960 - RNA, 19 nt, Artificial Sequence
  Description of Artificial Sequence: Synthetic oligonucleotide
ugaacacguuagcaucugu

SEQ ID NO: 866961 - RNA, 19 nt, Artificial Sequence
  Description of Artificial Sequence: Synthetic oligonucleotide
aucggcuugauuucuucaa

SEQ ID NO: 866962 - RNA, 19 nt, Artificial Sequence
  Description of Artificial Sequence: Synthetic oligonucleotide
aagaccauagggugcucuu

SEQ ID NO: 866963 - RNA, 19 nt, Artificial Sequence
  Description of Artificial Sequence: Synthetic oligonucleotide
ugaguuaggcugugaugga

SEQ ID NO: 866964 - RNA, 19 nt, Artificial Sequence
  Description of Artificial Sequence: Synthetic oligonucleotide
ucggcuugauuucuucaaa

SEQ ID NO: 866965 - RNA, 19 nt, Artificial Sequence
  Description of Artificial Sequence: Synthetic oligonucleotide
ccaguuauagcaaauaggu

SEQ ID NO: 866966 - RNA, 19 nt, Artificial Sequence
  Description of Artificial Sequence: Synthetic oligonucleotide
acggaagaggaggaacugg

SEQ ID NO: 866967 - RNA, 19 nt, Artificial Sequence
  Description of Artificial Sequence: Synthetic oligonucleotide
ugggagguaggcuauuauu

SEQ ID NO: 866968 - RNA, 19 nt, Artificial Sequence
  Description of Artificial Sequence: Synthetic oligonucleotide
ccaucucuuaaucaccuag

SEQ ID NO: 866969 - RNA, 19 nt, Artificial Sequence
  Description of Artificial Sequence: Synthetic oligonucleotide
cacacuuauuugaaauaca

SEQ ID NO: 866970 - RNA, 19 nt, Artificial Sequence
  Description of Artificial Sequence: Synthetic oligonucleotide
agagcuuacggaagaggag

SEQ ID NO: 866971 - RNA, 19 nt, Artificial Sequence
  Description of Artificial Sequence: Synthetic oligonucleotide
ggaaaguguugcugcaugc

SEQ ID NO: 866972 - RNA, 19 nt, Artificial Sequence
  Description of Artificial Sequence: Synthetic oligonucleotide
ucuaaacuuugaguuggaa

SEQ ID NO: 866973 - RNA, 19 nt, Artificial Sequence
  Description of Artificial Sequence: Synthetic oligonucleotide
ugcuacaaucuuucagguc

SEQ ID NO: 866974 - RNA, 19 nt, Artificial Sequence
  Description of Artificial Sequence: Synthetic oligonucleotide
ccuagguuagacuuaauaa

SEQ ID NO: 866975 - RNA, 19 nt, Artificial Sequence
  Description of Artificial Sequence: Synthetic oligonucleotide
ucaccuagguuagacuuaa

SEQ ID NO: 866976 - RNA, 19 nt, Artificial Sequence
  Description of Artificial Sequence: Synthetic oligonucleotide
gucucaugggcaaucugag

SEQ ID NO: 866977 - RNA, 19 nt, Artificial Sequence
  Description of Artificial Sequence: Synthetic oligonucleotide
gugaccacaucagacuccc

SEQ ID NO: 866978 - RNA, 19 nt, Artificial Sequence
  Description of Artificial Sequence: Synthetic oligonucleotide
agguuagacuuaauaacgu

SEQ ID NO: 866979 - RNA, 19 nt, Artificial Sequence
  Description of Artificial Sequence: Synthetic oligonucleotide
gacacacuaaaugcuacaa

SEQ ID NO: 866980 - RNA, 19 nt, Artificial Sequence
  Description of Artificial Sequence: Synthetic oligonucleotide
caaauaagccuuauucagu

SEQ ID NO: 866981 - RNA, 19 nt, Artificial Sequence
  Description of Artificial Sequence: Synthetic oligonucleotide
cuccuuugauuuaaucuga

SEQ ID NO: 866982 - RNA, 19 nt, Artificial Sequence
  Description of Artificial Sequence: Synthetic oligonucleotide
uacggaagaggaggaacug

SEQ ID NO: 866983 - RNA, 19 nt, Artificial Sequence
  Description of Artificial Sequence: Synthetic oligonucleotide
uagacuuaauaacguuauu

SEQ ID NO: 866984 - RNA, 19 nt, Artificial Sequence
  Description of Artificial Sequence: Synthetic oligonucleotide
cugagauuuccgugguaac

SEQ ID NO: 866985 - RNA, 19 nt, Artificial Sequence
  Description of Artificial Sequence: Synthetic oligonucleotide
acacguuagcaucugugua

SEQ ID NO: 866986 - RNA, 19 nt, Artificial Sequence
  Description of Artificial Sequence: Synthetic oligonucleotide
aaauagguuugcaguucca

SEQ ID NO: 866987 - RNA, 19 nt, Artificial Sequence
  Description of Artificial Sequence: Synthetic oligonucleotide
aaauaccaacucaaagcuu

SEQ ID NO: 866988 - RNA, 19 nt, Artificial Sequence
  Description of Artificial Sequence: Synthetic oligonucleotide
uugggacgagauuguaaac

SEQ ID NO: 866989 - RNA, 19 nt, Artificial Sequence
  Description of Artificial Sequence: Synthetic oligonucleotide
ggucggucccaauagucag

SEQ ID NO: 866990 - RNA, 19 nt, Artificial Sequence
  Description of Artificial Sequence: Synthetic oligonucleotide
cauagggugcucuuuauau

SEQ ID NO: 866991 - RNA, 19 nt, Artificial Sequence
  Description of Artificial Sequence: Synthetic oligonucleotide
ggaagauaauacuauaauu

SEQ ID NO: 866992 - RNA, 19 nt, Artificial Sequence
  Description of Artificial Sequence: Synthetic oligonucleotide
uguguaggguagagcuuac

SEQ ID NO: 866993 - RNA, 19 nt, Artificial Sequence
  Description of Artificial Sequence: Synthetic oligonucleotide
aaagggagacagguauuau

SEQ ID NO: 866994 - RNA, 19 nt, Artificial Sequence
  Description of Artificial Sequence: Synthetic oligonucleotide
caggucggucccaauaguc

SEQ ID NO: 866995 - RNA, 19 nt, Artificial Sequence
  Description of Artificial Sequence: Synthetic oligonucleotide
uuccgacaagcagaugcag

SEQ ID NO: 866996 - RNA, 19 nt, Artificial Sequence
  Description of Artificial Sequence: Synthetic oligonucleotide
ugguaacuuaguguccccu

SEQ ID NO: 866997 - RNA, 19 nt, Artificial Sequence
  Description of Artificial Sequence: Synthetic oligonucleotide
ugaaucggcuugauuucuu

SEQ ID NO: 866998 - RNA, 19 nt, Artificial Sequence
  Description of Artificial Sequence: Synthetic oligonucleotide
uuccgaggcucugaaugag

SEQ ID NO: 866999 - RNA, 19 nt, Artificial Sequence
  Description of Artificial Sequence: Synthetic oligonucleotide
uccccuuuacuuuggccuc

SEQ ID NO: 867000 - RNA, 19 nt, Artificial Sequence
  Description of Artificial Sequence: Synthetic oligonucleotide
cuuccgacaagcagaugca

SEQ ID NO: 867001 - RNA, 19 nt, Artificial Sequence
  Description of Artificial Sequence: Synthetic oligonucleotide
uccgaggcucugaaugagu

SEQ ID NO: 867002 - RNA, 19 nt, Artificial Sequence
  Description of Artificial Sequence: Synthetic oligonucleotide
guaggcuauuauuauuaua

SEQ ID NO: 867003 - RNA, 19 nt, Artificial Sequence
  Description of Artificial Sequence: Synthetic oligonucleotide
agacuggcuugugaacacg

SEQ ID NO: 867004 - RNA, 19 nt, Artificial Sequence
  Description of Artificial Sequence: Synthetic oligonucleotide
acuuugaguuggaaauaug

SEQ ID NO: 867005 - RNA, 19 nt, Artificial Sequence
  Description of Artificial Sequence: Synthetic oligonucleotide
agacuaaaauucagacucu

SEQ ID NO: 867006 - RNA, 19 nt, Artificial Sequence
  Description of Artificial Sequence: Synthetic oligonucleotide
uggacacucaugguauaaa

SEQ ID NO: 867007 - RNA, 19 nt, Artificial Sequence
  Description of Artificial Sequence: Synthetic oligonucleotide
cccuuaucuaaacuuugag

SEQ ID NO: 867008 - RNA, 19 nt, Artificial Sequence
  Description of Artificial Sequence: Synthetic oligonucleotide
agauuuccgugguaacuua

SEQ ID NO: 867009 - RNA, 19 nt, Artificial Sequence
  Description of Artificial Sequence: Synthetic oligonucleotide
ccuuauucagugucuauga

SEQ ID NO: 867010 - RNA, 19 nt, Artificial Sequence
  Description of Artificial Sequence: Synthetic oligonucleotide
caucaacgucucagguucc

SEQ ID NO: 867011 - RNA, 19 nt, Artificial Sequence
  Description of Artificial Sequence: Synthetic oligonucleotide
guguugggacccaaauaag

SEQ ID NO: 867012 - RNA, 19 nt, Artificial Sequence
  Description of Artificial Sequence: Synthetic oligonucleotide
gugguaacuuagugucccc

SEQ ID NO: 867013 - RNA, 19 nt, Artificial Sequence
  Description of Artificial Sequence: Synthetic oligonucleotide
gaccauagggugcucuuua

SEQ ID NO: 867014 - RNA, 19 nt, Artificial Sequence
  Description of Artificial Sequence: Synthetic oligonucleotide
aguuaggcugugauggaaa

SEQ ID NO: 867015 - RNA, 19 nt, Artificial Sequence
  Description of Artificial Sequence: Synthetic oligonucleotide
cuaugacacaaaacaauau

SEQ ID NO: 867016 - RNA, 19 nt, Artificial Sequence
  Description of Artificial Sequence: Synthetic oligonucleotide
cuuuaccuaaggccccauc

SEQ ID NO: 867017 - RNA, 19 nt, Artificial Sequence
  Description of Artificial Sequence: Synthetic oligonucleotide
uaguaaagucucugauauu

SEQ ID NO: 867018 - RNA, 19 nt, Artificial Sequence
  Description of Artificial Sequence: Synthetic oligonucleotide
agacuccccaucaggucgg

SEQ ID NO: 867019 - RNA, 19 nt, Artificial Sequence
  Description of Artificial Sequence: Synthetic oligonucleotide
cuaaaccacagucuccccu

SEQ ID NO: 867020 - RNA, 19 nt, Artificial Sequence
  Description of Artificial Sequence: Synthetic oligonucleotide
guguaggguagagcuuacg

SEQ ID NO: 867021 - RNA, 19 nt, Artificial Sequence
  Description of Artificial Sequence: Synthetic oligonucleotide
acgagauuguaaacaugga

SEQ ID NO: 867022 - RNA, 19 nt, Artificial Sequence
  Description of Artificial Sequence: Synthetic oligonucleotide
gugaacacguuagcaucug

SEQ ID NO: 867023 - RNA, 19 nt, Artificial Sequence
  Description of Artificial Sequence: Synthetic oligonucleotide
gcaaauagguuugcaguuc

SEQ ID NO: 867024 - RNA, 19 nt, Artificial Sequence
  Description of Artificial Sequence: Synthetic oligonucleotide
ccuuaucuaaacuuugagu

SEQ ID NO: 867025 - RNA, 19 nt, Artificial Sequence
  Description of Artificial Sequence: Synthetic oligonucleotide
aucaacgucucagguuccu

SEQ ID NO: 867026 - RNA, 19 nt, Artificial Sequence
  Description of Artificial Sequence: Synthetic oligonucleotide
agcuuguguucagguacag

SEQ ID NO: 867027 - RNA, 19 nt, Artificial Sequence
  Description of Artificial Sequence: Synthetic oligonucleotide
ccccuaagaauaaaaguaa

SEQ ID NO: 867028 - RNA, 19 nt, Artificial Sequence
  Description of Artificial Sequence: Synthetic oligonucleotide
gaguggacacucaugguau

SEQ ID NO: 867029 - RNA, 19 nt, Artificial Sequence
  Description of Artificial Sequence: Synthetic oligonucleotide
caucaggucggucccaaua

SEQ ID NO: 867030 - RNA, 19 nt, Artificial Sequence
  Description of Artificial Sequence: Synthetic oligonucleotide
guccugagauuauuacaaa

SEQ ID NO: 867031 - RNA, 19 nt, Artificial Sequence
  Description of Artificial Sequence: Synthetic oligonucleotide
agcuuacggaagaggagga

SEQ ID NO: 867032 - RNA, 19 nt, Artificial Sequence
  Description of Artificial Sequence: Synthetic oligonucleotide
gggagguaggcuauuauua

SEQ ID NO: 867033 - RNA, 19 nt, Artificial Sequence
  Description of Artificial Sequence: Synthetic oligonucleotide
guauaugcccaguucuuuu

SEQ ID NO: 867034 - RNA, 19 nt, Artificial Sequence
  Description of Artificial Sequence: Synthetic oligonucleotide
ggcucugaaugaguuuucc

SEQ ID NO: 867035 - RNA, 19 nt, Artificial Sequence
  Description of Artificial Sequence: Synthetic oligonucleotide
auauucccugggagguagg

SEQ ID NO: 867036 - RNA, 19 nt, Artificial Sequence
  Description of Artificial Sequence: Synthetic oligonucleotide
gcaggaagauaauacuaua

SEQ ID NO: 867037 - RNA, 19 nt, Artificial Sequence
  Description of Artificial Sequence: Synthetic oligonucleotide
gucggucccaauagucagc

SEQ ID NO: 867038 - RNA, 19 nt, Artificial Sequence
  Description of Artificial Sequence: Synthetic oligonucleotide
aucuaaacuuugaguugga

SEQ ID NO: 867039 - RNA, 19 nt, Artificial Sequence
  Description of Artificial Sequence: Synthetic oligonucleotide
guuugcaguuccacaguaa

SEQ ID NO: 867040 - RNA, 19 nt, Artificial Sequence
  Description of Artificial Sequence: Synthetic oligonucleotide
ggacgagauuguaaacaug

SEQ ID NO: 867041 - RNA, 19 nt, Artificial Sequence
  Description of Artificial Sequence: Synthetic oligonucleotide
aucaccuagguuagacuua

SEQ ID NO: 867042 - RNA, 19 nt, Artificial Sequence
  Description of Artificial Sequence: Synthetic oligonucleotide
cuacaaucuuucagguccu

SEQ ID NO: 867043 - RNA, 19 nt, Artificial Sequence
  Description of Artificial Sequence: Synthetic oligonucleotide
ucaacgucucagguuccuu

SEQ ID NO: 867044 - RNA, 19 nt, Artificial Sequence
  Description of Artificial Sequence: Synthetic oligonucleotide
ggcacgaagguuaagugau

SEQ ID NO: 867045 - RNA, 19 nt, Artificial Sequence
  Description of Artificial Sequence: Synthetic oligonucleotide
gggacgagauuguaaacau

SEQ ID NO: 867046 - RNA, 19 nt, Artificial Sequence
  Description of Artificial Sequence: Synthetic oligonucleotide
cacuacaaauaugguaugu

SEQ ID NO: 867047 - RNA, 19 nt, Artificial Sequence
  Description of Artificial Sequence: Synthetic oligonucleotide
ggacacucaugguauaaau

SEQ ID NO: 867048 - RNA, 19 nt, Artificial Sequence
  Description of Artificial Sequence: Synthetic oligonucleotide
agaccauagggugcucuuu

SEQ ID NO: 867049 - RNA, 19 nt, Artificial Sequence
  Description of Artificial Sequence: Synthetic oligonucleotide
gucccaauagucagccaaa

SEQ ID NO: 867050 - RNA, 19 nt, Artificial Sequence
  Description of Artificial Sequence: Synthetic oligonucleotide
ccgugguaacuuagugucc

SEQ ID NO: 867051 - RNA, 19 nt, Artificial Sequence
  Description of Artificial Sequence: Synthetic oligonucleotide
ugcuugggacgagauugua

SEQ ID NO: 867052 - RNA, 19 nt, Artificial Sequence
  Description of Artificial Sequence: Synthetic oligonucleotide
gacccaaauaagccuuauu

SEQ ID NO: 867053 - RNA, 19 nt, Artificial Sequence
  Description of Artificial Sequence: Synthetic oligonucleotide
gguaggcuauuauuauuau

SEQ ID NO: 867054 - RNA, 19 nt, Artificial Sequence
  Description of Artificial Sequence: Synthetic oligonucleotide
cucucuugauggccgggaa

SEQ ID NO: 867055 - RNA, 19 nt, Artificial Sequence
  Description of Artificial Sequence: Synthetic oligonucleotide
ccccuuaucuaaacuuuga

SEQ ID NO: 867056 - RNA, 19 nt, Artificial Sequence
  Description of Artificial Sequence: Synthetic oligonucleotide
gguaacuuaguguccccuu

SEQ ID NO: 867057 - RNA, 19 nt, Artificial Sequence
  Description of Artificial Sequence: Synthetic oligonucleotide
gguuaagaucaguuccaau

SEQ ID NO: 867058 - RNA, 19 nt, Artificial Sequence
  Description of Artificial Sequence: Synthetic oligonucleotide
caacgucucagguuccuuu

SEQ ID NO: 867059 - RNA, 19 nt, Artificial Sequence
  Description of Artificial Sequence: Synthetic oligonucleotide
ggguuaagaucaguuccaa

SEQ ID NO: 867060 - RNA, 19 nt, Artificial Sequence
  Description of Artificial Sequence: Synthetic oligonucleotide
caccuuccgacaagcagau

SEQ ID NO: 867061 - RNA, 19 nt, Artificial Sequence
  Description of Artificial Sequence: Synthetic oligonucleotide
ccaucauuaaaugcuugcu

SEQ ID NO: 867062 - RNA, 19 nt, Artificial Sequence
  Description of Artificial Sequence: Synthetic oligonucleotide
cgggaagucacugagauuu

SEQ ID NO: 867063 - RNA, 19 nt, Artificial Sequence
  Description of Artificial Sequence: Synthetic oligonucleotide
cuaauugaaucggcuugau

SEQ ID NO: 867064 - RNA, 19 nt, Artificial Sequence
  Description of Artificial Sequence: Synthetic oligonucleotide
cacugagauuuccguggua

SEQ ID NO: 867065 - RNA, 19 nt, Artificial Sequence
  Description of Artificial Sequence: Synthetic oligonucleotide
ccccuuuacuuuggccucc

SEQ ID NO: 867066 - RNA, 19 nt, Artificial Sequence
  Description of Artificial Sequence: Synthetic oligonucleotide
accuuccgacaagcagaug

SEQ ID NO: 867067 - RNA, 19 nt, Artificial Sequence
  Description of Artificial Sequence: Synthetic oligonucleotide
gccaaaggauuccucucuu

SEQ ID NO: 867068 - RNA, 19 nt, Artificial Sequence
  Description of Artificial Sequence: Synthetic oligonucleotide
cccaucaacgucucagguu

SEQ ID NO: 867069 - RNA, 19 nt, Artificial Sequence
  Description of Artificial Sequence: Synthetic oligonucleotide
ggccgggaagucacugaga

SEQ ID NO: 867070 - RNA, 19 nt, Artificial Sequence
  Description of Artificial Sequence: Synthetic oligonucleotide
ccgaggcucugaaugaguu

SEQ ID NO: 867071 - RNA, 19 nt, Artificial Sequence
  Description of Artificial Sequence: Synthetic oligonucleotide
caccuagguuagacuuaau

SEQ ID NO: 867072 - RNA, 19 nt, Artificial Sequence
  Description of Artificial Sequence: Synthetic oligonucleotide
ccuuuaccuaaggccccau

SEQ ID NO: 867073 - RNA, 19 nt, Artificial Sequence
  Description of Artificial Sequence: Synthetic oligonucleotide
aaaggguacacuuauacgg

SEQ ID NO: 867074 - RNA, 19 nt, Artificial Sequence
  Description of Artificial Sequence: Synthetic oligonucleotide
auucagaacacuuauaugg

SEQ ID NO: 867075 - RNA, 19 nt, Artificial Sequence
  Description of Artificial Sequence: Synthetic oligonucleotide
cuuuauauuaauuaccagc

SEQ ID NO: 867076 - RNA, 19 nt, Artificial Sequence
  Description of Artificial Sequence: Synthetic oligonucleotide
uaaguuagaucuaugagag

SEQ ID NO: 867077 - RNA, 19 nt, Artificial Sequence
  Description of Artificial Sequence: Synthetic oligonucleotide
ugguuuguaagaaaggugg

SEQ ID NO: 867078 - RNA, 19 nt, Artificial Sequence
  Description of Artificial Sequence: Synthetic oligonucleotide
aacaccacuguuucuaacc

SEQ ID NO: 867079 - RNA, 19 nt, Artificial Sequence
  Description of Artificial Sequence: Synthetic oligonucleotide
ucuacauccauacacagcu

SEQ ID NO: 867080 - RNA, 19 nt, Artificial Sequence
  Description of Artificial Sequence: Synthetic oligonucleotide
uuaaguuagaucuaugaga

SEQ ID NO: 867081 - RNA, 19 nt, Artificial Sequence
  Description of Artificial Sequence: Synthetic oligonucleotide
aauaaguucacuuucucuu

SEQ ID NO: 867082 - RNA, 19 nt, Artificial Sequence
  Description of Artificial Sequence: Synthetic oligonucleotide
aaauacaccacauggacaa

SEQ ID NO: 867083 - RNA, 19 nt, Artificial Sequence
  Description of Artificial Sequence: Synthetic oligonucleotide
uuagguuugaguuauuaga

SEQ ID NO: 867084 - RNA, 19 nt, Artificial Sequence
  Description of Artificial Sequence: Synthetic oligonucleotide
acaaaggguacacuuauac

SEQ ID NO: 867085 - RNA, 19 nt, Artificial Sequence
  Description of Artificial Sequence: Synthetic oligonucleotide
ucucuuuauauuaauuacc

SEQ ID NO: 867086 - RNA, 19 nt, Artificial Sequence
  Description of Artificial Sequence: Synthetic oligonucleotide
ugaaagacgcccuagguug

SEQ ID NO: 867087 - RNA, 19 nt, Artificial Sequence
  Description of Artificial Sequence: Synthetic oligonucleotide
uauauuaauuaccagcaaa

SEQ ID NO: 867088 - RNA, 19 nt, Artificial Sequence
  Description of Artificial Sequence: Synthetic oligonucleotide
agaaguuuuccccacaaag

SEQ ID NO: 867089 - RNA, 19 nt, Artificial Sequence
  Description of Artificial Sequence: Synthetic oligonucleotide
uaugagagaaguuuucccc

SEQ ID NO: 867090 - RNA, 19 nt, Artificial Sequence
  Description of Artificial Sequence: Synthetic oligonucleotide
aaggguuacugcuucuucg

SEQ ID NO: 867091 - RNA, 19 nt, Artificial Sequence
  Description of Artificial Sequence: Synthetic oligonucleotide
aagaauaccagcuccggau

SEQ ID NO: 867092 - RNA, 19 nt, Artificial Sequence
  Description of Artificial Sequence: Synthetic oligonucleotide
uuuaagcuaguucuucacc

SEQ ID NO: 867093 - RNA, 19 nt, Artificial Sequence
  Description of Artificial Sequence: Synthetic oligonucleotide
uuugugguucccacuaagg

SEQ ID NO: 867094 - RNA, 19 nt, Artificial Sequence
  Description of Artificial Sequence: Synthetic oligonucleotide
ucucaggugacgaauccgg

SEQ ID NO: 867095 - RNA, 19 nt, Artificial Sequence
  Description of Artificial Sequence: Synthetic oligonucleotide
uuaagcuaguucuucaccu

SEQ ID NO: 867096 - RNA, 19 nt, Artificial Sequence
  Description of Artificial Sequence: Synthetic oligonucleotide
aaauggaguuucuugggcu

SEQ ID NO: 867097 - RNA, 19 nt, Artificial Sequence
  Description of Artificial Sequence: Synthetic oligonucleotide
auuagguuugaguuauuag

SEQ ID NO: 867098 - RNA, 19 nt, Artificial Sequence
  Description of Artificial Sequence: Synthetic oligonucleotide
ugacaagaugugaacuucg

SEQ ID NO: 867099 - RNA, 19 nt, Artificial Sequence
  Description of Artificial Sequence: Synthetic oligonucleotide
ggaacuaugagagaaacug

SEQ ID NO: 867100 - RNA, 19 nt, Artificial Sequence
  Description of Artificial Sequence: Synthetic oligonucleotide
ucuuuauauuaauuaccag

SEQ ID NO: 867101 - RNA, 19 nt, Artificial Sequence
  Description of Artificial Sequence: Synthetic oligonucleotide
aauggaguuucuugggcug

SEQ ID NO: 867102 - RNA, 19 nt, Artificial Sequence
  Description of Artificial Sequence: Synthetic oligonucleotide
cuugaaagcggaaccgucg

SEQ ID NO: 867103 - RNA, 19 nt, Artificial Sequence
  Description of Artificial Sequence: Synthetic oligonucleotide
uggugccugauuaaguuag

SEQ ID NO: 867104 - RNA, 19 nt, Artificial Sequence
  Description of Artificial Sequence: Synthetic oligonucleotide
aaggcgugagcuccgagag

SEQ ID NO: 867105 - RNA, 19 nt, Artificial Sequence
  Description of Artificial Sequence: Synthetic oligonucleotide
uuuguaagaaagguggcac

SEQ ID NO: 867106 - RNA, 19 nt, Artificial Sequence
  Description of Artificial Sequence: Synthetic oligonucleotide
ucgagagaaacuuuuccca

SEQ ID NO: 867107 - RNA, 19 nt, Artificial Sequence
  Description of Artificial Sequence: Synthetic oligonucleotide
caaaggguacacuuauacg

SEQ ID NO: 867108 - RNA, 19 nt, Artificial Sequence
  Description of Artificial Sequence: Synthetic oligonucleotide
acuugucuaccccuggaac

SEQ ID NO: 867109 - RNA, 19 nt, Artificial Sequence
  Description of Artificial Sequence: Synthetic oligonucleotide
ugcaccucccuuaaaauaa

SEQ ID NO: 867110 - RNA, 19 nt, Artificial Sequence
  Description of Artificial Sequence: Synthetic oligonucleotide
aggguuacugcuucuucgc

SEQ ID NO: 867111 - RNA, 19 nt, Artificial Sequence
  Description of Artificial Sequence: Synthetic oligonucleotide
cucuauuuuguccucuggg

SEQ ID NO: 867112 - RNA, 19 nt, Artificial Sequence
  Description of Artificial Sequence: Synthetic oligonucleotide
uggguauuuuggcugaagc

SEQ ID NO: 867113 - RNA, 19 nt, Artificial Sequence
  Description of Artificial Sequence: Synthetic oligonucleotide
aaagaauaccagcuccgga

SEQ ID NO: 867114 - RNA, 19 nt, Artificial Sequence
  Description of Artificial Sequence: Synthetic oligonucleotide
uccgguuggaacuaugaga

SEQ ID NO: 867115 - RNA, 19 nt, Artificial Sequence
  Description of Artificial Sequence: Synthetic oligonucleotide
uagguugcgugcaacagga

SEQ ID NO: 867116 - RNA, 19 nt, Artificial Sequence
  Description of Artificial Sequence: Synthetic oligonucleotide
agcggaaccgucgaaaacg

SEQ ID NO: 867117 - RNA, 19 nt, Artificial Sequence
  Description of Artificial Sequence: Synthetic oligonucleotide
acuuaugggcuuccucucc

SEQ ID NO: 867118 - RNA, 19 nt, Artificial Sequence
  Description of Artificial Sequence: Synthetic oligonucleotide
ucacuuucucuuuauauua

SEQ ID NO: 867119 - RNA, 19 nt, Artificial Sequence
  Description of Artificial Sequence: Synthetic oligonucleotide
uucuucgccgcucucuggg

SEQ ID NO: 867120 - RNA, 19 nt, Artificial Sequence
  Description of Artificial Sequence: Synthetic oligonucleotide
aguuuuaagcuaguucuuc

SEQ ID NO: 867121 - RNA, 19 nt, Artificial Sequence
  Description of Artificial Sequence: Synthetic oligonucleotide
gaaugcaagacucuagcaa

SEQ ID NO: 867122 - RNA, 19 nt, Artificial Sequence
  Description of Artificial Sequence: Synthetic oligonucleotide
acaccacuguuucuaaccg

SEQ ID NO: 867123 - RNA, 19 nt, Artificial Sequence
  Description of Artificial Sequence: Synthetic oligonucleotide
agaauagucaagaacugcu

SEQ ID NO: 867124 - RNA, 19 nt, Artificial Sequence
  Description of Artificial Sequence: Synthetic oligonucleotide
agaucuaugagagaaguuu

SEQ ID NO: 867125 - RNA, 19 nt, Artificial Sequence
  Description of Artificial Sequence: Synthetic oligonucleotide
ugauuaaguuagaucuaug

SEQ ID NO: 867126 - RNA, 19 nt, Artificial Sequence
  Description of Artificial Sequence: Synthetic oligonucleotide
ucucucuggguucucaaac

SEQ ID NO: 867127 - RNA, 19 nt, Artificial Sequence
  Description of Artificial Sequence: Synthetic oligonucleotide
uacaauuugugguucccac

SEQ ID NO: 867128 - RNA, 19 nt, Artificial Sequence
  Description of Artificial Sequence: Synthetic oligonucleotide
cuaugagagaaacugucuc

SEQ ID NO: 867129 - RNA, 19 nt, Artificial Sequence
  Description of Artificial Sequence: Synthetic oligonucleotide
aagcggaaccgucgaaaac

SEQ ID NO: 867130 - RNA, 19 nt, Artificial Sequence
  Description of Artificial Sequence: Synthetic oligonucleotide
uaaggugcaugcccugccg

SEQ ID NO: 867131 - RNA, 19 nt, Artificial Sequence
  Description of Artificial Sequence: Synthetic oligonucleotide
aguaccggaggaugggcac

SEQ ID NO: 867132 - RNA, 19 nt, Artificial Sequence
  Description of Artificial Sequence: Synthetic oligonucleotide
ugccuaauuagguuugagu

SEQ ID NO: 867133 - RNA, 19 nt, Artificial Sequence
  Description of Artificial Sequence: Synthetic oligonucleotide
gaaaacgcaggugggaggc

SEQ ID NO: 867134 - RNA, 19 nt, Artificial Sequence
  Description of Artificial Sequence: Synthetic oligonucleotide
ugacgaauccgguuggaac

SEQ ID NO: 867135 - RNA, 19 nt, Artificial Sequence
  Description of Artificial Sequence: Synthetic oligonucleotide
cuagguugcgugcaacagg

SEQ ID NO: 867136 - RNA, 19 nt, Artificial Sequence
  Description of Artificial Sequence: Synthetic oligonucleotide
aaagcggaaccgucgaaaa

SEQ ID NO: 867137 - RNA, 19 nt, Artificial Sequence
  Description of Artificial Sequence: Synthetic oligonucleotide
uccaccugggugcuuauga

SEQ ID NO: 867138 - RNA, 19 nt, Artificial Sequence
  Description of Artificial Sequence: Synthetic oligonucleotide
ugacaggaaaugugggugc

SEQ ID NO: 867139 - RNA, 19 nt, Artificial Sequence
  Description of Artificial Sequence: Synthetic oligonucleotide
uccuauguguguccugugc

SEQ ID NO: 867140 - RNA, 19 nt, Artificial Sequence
  Description of Artificial Sequence: Synthetic oligonucleotide
guugcgugcaacaggagag

SEQ ID NO: 867141 - RNA, 19 nt, Artificial Sequence
  Description of Artificial Sequence: Synthetic oligonucleotide
acucuacauccauacacag

SEQ ID NO: 867142 - RNA, 19 nt, Artificial Sequence
  Description of Artificial Sequence: Synthetic oligonucleotide
uugaaagcggaaccgucga

SEQ ID NO: 867143 - RNA, 19 nt, Artificial Sequence
  Description of Artificial Sequence: Synthetic oligonucleotide
uauuaauuaccagcaaaau

SEQ ID NO: 867144 - RNA, 19 nt, Artificial Sequence
  Description of Artificial Sequence: Synthetic oligonucleotide
aauuagguuugaguuauua

SEQ ID NO: 867145 - RNA, 19 nt, Artificial Sequence
  Description of Artificial Sequence: Synthetic oligonucleotide
cuaucaggagcccuuccgg

SEQ ID NO: 867146 - RNA, 19 nt, Artificial Sequence
  Description of Artificial Sequence: Synthetic oligonucleotide
uaagaaagguggcacuguc

SEQ ID NO: 867147 - RNA, 19 nt, Artificial Sequence
  Description of Artificial Sequence: Synthetic oligonucleotide
cuuaugaccuccugaccag

SEQ ID NO: 867148 - RNA, 19 nt, Artificial Sequence
  Description of Artificial Sequence: Synthetic oligonucleotide
ucgaaaacgcaggugggag

SEQ ID NO: 867149 - RNA, 19 nt, Artificial Sequence
  Description of Artificial Sequence: Synthetic oligonucleotide
gaaccgucgaaaacgcagg

SEQ ID NO: 867150 - RNA, 19 nt, Artificial Sequence
  Description of Artificial Sequence: Synthetic oligonucleotide
aacuuuucccacaagucaa

SEQ ID NO: 867151 - RNA, 19 nt, Artificial Sequence
  Description of Artificial Sequence: Synthetic oligonucleotide
uaaggcgugagcuccgaga

SEQ ID NO: 867152 - RNA, 19 nt, Artificial Sequence
  Description of Artificial Sequence: Synthetic oligonucleotide
uuggaacuaugagagaaac

SEQ ID NO: 867153 - RNA, 19 nt, Artificial Sequence
  Description of Artificial Sequence: Synthetic oligonucleotide
guuuuaagcuaguucuuca

SEQ ID NO: 867154 - RNA, 19 nt, Artificial Sequence
  Description of Artificial Sequence: Synthetic oligonucleotide
cucuuggggaagaauaguc

SEQ ID NO: 867155 - RNA, 19 nt, Artificial Sequence
  Description of Artificial Sequence: Synthetic oligonucleotide
aauaccagcuccggauaag

SEQ ID NO: 867156 - RNA, 19 nt, Artificial Sequence
  Description of Artificial Sequence: Synthetic oligonucleotide
cucuacauccauacacagc

SEQ ID NO: 867157 - RNA, 19 nt, Artificial Sequence
  Description of Artificial Sequence: Synthetic oligonucleotide
ucucauggguucuuucaug

SEQ ID NO: 867158 - RNA, 19 nt, Artificial Sequence
  Description of Artificial Sequence: Synthetic oligonucleotide
ucuugaaagcggaaccguc

SEQ ID NO: 867159 - RNA, 19 nt, Artificial Sequence
  Description of Artificial Sequence: Synthetic oligonucleotide
cugauggcgggugaggugg

SEQ ID NO: 867160 - RNA, 19 nt, Artificial Sequence
  Description of Artificial Sequence: Synthetic oligonucleotide
uuguaagaaagguggcacu

SEQ ID NO: 867161 - RNA, 19 nt, Artificial Sequence
  Description of Artificial Sequence: Synthetic oligonucleotide
ccgguuggaacuaugagag

SEQ ID NO: 867162 - RNA, 19 nt, Artificial Sequence
  Description of Artificial Sequence: Synthetic oligonucleotide
gccugauuaaguuagaucu

SEQ ID NO: 867163 - RNA, 19 nt, Artificial Sequence
  Description of Artificial Sequence: Synthetic oligonucleotide
uguucucaggugacgaauc

SEQ ID NO: 867164 - RNA, 19 nt, Artificial Sequence
  Description of Artificial Sequence: Synthetic oligonucleotide
gguuacugcuucuucgccg

SEQ ID NO: 867165 - RNA, 19 nt, Artificial Sequence
  Description of Artificial Sequence: Synthetic oligonucleotide
uagucaagaacugcuccag

SEQ ID NO: 867166 - RNA, 19 nt, Artificial Sequence
  Description of Artificial Sequence: Synthetic oligonucleotide
uaucaggagcccuuccggc

SEQ ID NO: 867167 - RNA, 19 nt, Artificial Sequence
  Description of Artificial Sequence: Synthetic oligonucleotide
caggugacgaauccgguug

SEQ ID NO: 867168 - RNA, 19 nt, Artificial Sequence
  Description of Artificial Sequence: Synthetic oligonucleotide
uguaccaguccucuacaau

SEQ ID NO: 867169 - RNA, 19 nt, Artificial Sequence
  Description of Artificial Sequence: Synthetic oligonucleotide
uccucuacaauuugugguu

SEQ ID NO: 867170 - RNA, 19 nt, Artificial Sequence
  Description of Artificial Sequence: Synthetic oligonucleotide
agucaaacauucaaagagu

SEQ ID NO: 867171 - RNA, 19 nt, Artificial Sequence
  Description of Artificial Sequence: Synthetic oligonucleotide
uggaacuaugagagaaacu

SEQ ID NO: 867172 - RNA, 19 nt, Artificial Sequence
  Description of Artificial Sequence: Synthetic oligonucleotide
ugccugauuaaguuagauc

SEQ ID NO: 867173 - RNA, 19 nt, Artificial Sequence
  Description of Artificial Sequence: Synthetic oligonucleotide
guuccuuugguuguaccag

SEQ ID NO: 867174 - RNA, 19 nt, Artificial Sequence
  Description of Artificial Sequence: Synthetic oligonucleotide
acacucaugacaaguguag

SEQ ID NO: 867175 - RNA, 19 nt, Artificial Sequence
  Description of Artificial Sequence: Synthetic oligonucleotide
aagacaacuuucugccaaa

SEQ ID NO: 867176 - RNA, 19 nt, Artificial Sequence
  Description of Artificial Sequence: Synthetic oligonucleotide
ugcuuaugaccuccugacc

SEQ ID NO: 867177 - RNA, 19 nt, Artificial Sequence
  Description of Artificial Sequence: Synthetic oligonucleotide
aucuaugagagaaguuuuc

SEQ ID NO: 867178 - RNA, 19 nt, Artificial Sequence
  Description of Artificial Sequence: Synthetic oligonucleotide
auacaccacauggacaaag

SEQ ID NO: 867179 - RNA, 19 nt, Artificial Sequence
  Description of Artificial Sequence: Synthetic oligonucleotide
uuguaaggcgugagcuccg

SEQ ID NO: 867180 - RNA, 19 nt, Artificial Sequence
  Description of Artificial Sequence: Synthetic oligonucleotide
uaagcuaguucuucaccuc

SEQ ID NO: 867181 - RNA, 19 nt, Artificial Sequence
  Description of Artificial Sequence: Synthetic oligonucleotide
aauccgguuggaacuauga

SEQ ID NO: 867182 - RNA, 19 nt, Artificial Sequence
  Description of Artificial Sequence: Synthetic oligonucleotide
aaguuagaucuaugagaga

SEQ ID NO: 867183 - RNA, 19 nt, Artificial Sequence
  Description of Artificial Sequence: Synthetic oligonucleotide
ggugagguggguauuuugg

SEQ ID NO: 867184 - RNA, 19 nt, Artificial Sequence
  Description of Artificial Sequence: Synthetic oligonucleotide
auccgguuggaacuaugag

SEQ ID NO: 867185 - RNA, 19 nt, Artificial Sequence
  Description of Artificial Sequence: Synthetic oligonucleotide
uccgcaaacauugcacuga

SEQ ID NO: 867186 - RNA, 19 nt, Artificial Sequence
  Description of Artificial Sequence: Synthetic oligonucleotide
agcuccgagagaaacuuuc

SEQ ID NO: 867187 - RNA, 19 nt, Artificial Sequence
  Description of Artificial Sequence: Synthetic oligonucleotide
ugaugacuuguaaggcgug

SEQ ID NO: 867188 - RNA, 19 nt, Artificial Sequence
  Description of Artificial Sequence: Synthetic oligonucleotide
gacgaauccgguuggaacu

SEQ ID NO: 867189 - RNA, 19 nt, Artificial Sequence
  Description of Artificial Sequence: Synthetic oligonucleotide
cccgaaaccagccacgucc

SEQ ID NO: 867190 - RNA, 19 nt, Artificial Sequence
  Description of Artificial Sequence: Synthetic oligonucleotide
ccgucgaaaacgcaggugg

SEQ ID NO: 867191 - RNA, 19 nt, Artificial Sequence
  Description of Artificial Sequence: Synthetic oligonucleotide
uuaugaccuccugaccagg

SEQ ID NO: 867192 - RNA, 19 nt, Artificial Sequence
  Description of Artificial Sequence: Synthetic oligonucleotide
ggaaccgucgaaaacgcag

SEQ ID NO: 867193 - RNA, 19 nt, Artificial Sequence
  Description of Artificial Sequence: Synthetic oligonucleotide
caaacuggagcugaaagaa

SEQ ID NO: 867194 - RNA, 19 nt, Artificial Sequence
  Description of Artificial Sequence: Synthetic oligonucleotide
gguuguaccaguccucuac

SEQ ID NO: 867195 - RNA, 19 nt, Artificial Sequence
  Description of Artificial Sequence: Synthetic oligonucleotide
agucucucuuucucauggg

SEQ ID NO: 867196 - RNA, 19 nt, Artificial Sequence
  Description of Artificial Sequence: Synthetic oligonucleotide
aaagacgcccuagguugcg

SEQ ID NO: 867197 - RNA, 19 nt, Artificial Sequence
  Description of Artificial Sequence: Synthetic oligonucleotide
auaagacaacuuucugcca

SEQ ID NO: 867198 - RNA, 19 nt, Artificial Sequence
  Description of Artificial Sequence: Synthetic oligonucleotide
uccucuauuuuguccucug

SEQ ID NO: 867199 - RNA, 19 nt, Artificial Sequence
  Description of Artificial Sequence: Synthetic oligonucleotide
cagguagcaguaccggagg

SEQ ID NO: 867200 - RNA, 19 nt, Artificial Sequence
  Description of Artificial Sequence: Synthetic oligonucleotide
acuaugagagaaacugucu

SEQ ID NO: 867201 - RNA, 19 nt, Artificial Sequence
  Description of Artificial Sequence: Synthetic oligonucleotide
guuuguaagaaagguggca

SEQ ID NO: 867202 - RNA, 19 nt, Artificial Sequence
  Description of Artificial Sequence: Synthetic oligonucleotide
agguuugaguuauuagaaa

SEQ ID NO: 867203 - RNA, 19 nt, Artificial Sequence
  Description of Artificial Sequence: Synthetic oligonucleotide
gugccuaagucccgaaacc

SEQ ID NO: 867204 - RNA, 19 nt, Artificial Sequence
  Description of Artificial Sequence: Synthetic oligonucleotide
agaacacuuauauggucuu

SEQ ID NO: 867205 - RNA, 19 nt, Artificial Sequence
  Description of Artificial Sequence: Synthetic oligonucleotide
cacucuacauccauacaca

SEQ ID NO: 867206 - RNA, 19 nt, Artificial Sequence
  Description of Artificial Sequence: Synthetic oligonucleotide
uugguuguaccaguccucu

SEQ ID NO: 867207 - RNA, 19 nt, Artificial Sequence
  Description of Artificial Sequence: Synthetic oligonucleotide
aaccgucgaaaacgcaggu

SEQ ID NO: 867208 - RNA, 19 nt, Artificial Sequence
  Description of Artificial Sequence: Synthetic oligonucleotide
uuuuccccacaaaggguac

SEQ ID NO: 867209 - RNA, 19 nt, Artificial Sequence
  Description of Artificial Sequence: Synthetic oligonucleotide
ugagcuccgagagaaacuu

SEQ ID NO: 867210 - RNA, 19 nt, Artificial Sequence
  Description of Artificial Sequence: Synthetic oligonucleotide
augacuuguaaggcgugag

SEQ ID NO: 867211 - RNA, 19 nt, Artificial Sequence
  Description of Artificial Sequence: Synthetic oligonucleotide
uagcaaggguuacugcuuc

SEQ ID NO: 867212 - RNA, 19 nt, Artificial Sequence
  Description of Artificial Sequence: Synthetic oligonucleotide
cacucaugacaaguguagg

SEQ ID NO: 867213 - RNA, 19 nt, Artificial Sequence
  Description of Artificial Sequence: Synthetic oligonucleotide
gaaugacaagaugugaacu

SEQ ID NO: 867214 - RNA, 19 nt, Artificial Sequence
  Description of Artificial Sequence: Synthetic oligonucleotide
augcaagacucuagcaagg

SEQ ID NO: 867215 - RNA, 19 nt, Artificial Sequence
  Description of Artificial Sequence: Synthetic oligonucleotide
uaccaguccucuacaauuu

SEQ ID NO: 867216 - RNA, 19 nt, Artificial Sequence
  Description of Artificial Sequence: Synthetic oligonucleotide
acacuagggucccacggcu

SEQ ID NO: 867217 - RNA, 19 nt, Artificial Sequence
  Description of Artificial Sequence: Synthetic oligonucleotide
uguguucucaggugacgaa

SEQ ID NO: 867218 - RNA, 19 nt, Artificial Sequence
  Description of Artificial Sequence: Synthetic oligonucleotide
agaauaccagcuccggaua

SEQ ID NO: 867219 - RNA, 19 nt, Artificial Sequence
  Description of Artificial Sequence: Synthetic oligonucleotide
uuucacuaucaggagcccu

SEQ ID NO: 867220 - RNA, 19 nt, Artificial Sequence
  Description of Artificial Sequence: Synthetic oligonucleotide
gaccuccugaccaggaaug

SEQ ID NO: 867221 - RNA, 19 nt, Artificial Sequence
  Description of Artificial Sequence: Synthetic oligonucleotide
aagacucuagcaaggguua

SEQ ID NO: 867222 - RNA, 19 nt, Artificial Sequence
  Description of Artificial Sequence: Synthetic oligonucleotide
agcaguaccggaggauggg

SEQ ID NO: 867223 - RNA, 19 nt, Artificial Sequence
  Description of Artificial Sequence: Synthetic oligonucleotide
aaaugugggugcccaccaa

SEQ ID NO: 867224 - RNA, 19 nt, Artificial Sequence
  Description of Artificial Sequence: Synthetic oligonucleotide
gaaagcggaaccgucgaaa

SEQ ID NO: 867225 - RNA, 19 nt, Artificial Sequence
  Description of Artificial Sequence: Synthetic oligonucleotide
cucccuugcagcucugcac

SEQ ID NO: 867226 - RNA, 19 nt, Artificial Sequence
  Description of Artificial Sequence: Synthetic oligonucleotide
gaaagacgcccuagguugc

SEQ ID NO: 867227 - RNA, 19 nt, Artificial Sequence
  Description of Artificial Sequence: Synthetic oligonucleotide
gaauaccagcuccggauaa

SEQ ID NO: 867228 - RNA, 19 nt, Artificial Sequence
  Description of Artificial Sequence: Synthetic oligonucleotide
ccacccguggcaaagcucc

SEQ ID NO: 867229 - RNA, 19 nt, Artificial Sequence
  Description of Artificial Sequence: Synthetic oligonucleotide
ugaaagcggaaccgucgaa

SEQ ID NO: 867230 - RNA, 19 nt, Artificial Sequence
  Description of Artificial Sequence: Synthetic oligonucleotide
gccucuugaaagcggaacc

SEQ ID NO: 867231 - RNA, 19 nt, Artificial Sequence
  Description of Artificial Sequence: Synthetic oligonucleotide
uaccagcuccggauaagac

SEQ ID NO: 867232 - RNA, 19 nt, Artificial Sequence
  Description of Artificial Sequence: Synthetic oligonucleotide
ggguauuuuggcugaagca

SEQ ID NO: 867233 - RNA, 19 nt, Artificial Sequence
  Description of Artificial Sequence: Synthetic oligonucleotide
augucugguaaggugcaug

SEQ ID NO: 867234 - RNA, 19 nt, Artificial Sequence
  Description of Artificial Sequence: Synthetic oligonucleotide
ugcaacaggagagcacgac

SEQ ID NO: 867235 - RNA, 19 nt, Artificial Sequence
  Description of Artificial Sequence: Synthetic oligonucleotide
agucccgaaaccagccacg

SEQ ID NO: 867236 - RNA, 19 nt, Artificial Sequence
  Description of Artificial Sequence: Synthetic oligonucleotide
gaugacuuguaaggcguga

SEQ ID NO: 867237 - RNA, 19 nt, Artificial Sequence
  Description of Artificial Sequence: Synthetic oligonucleotide
ugcccugccggaaacuuuu

SEQ ID NO: 867238 - RNA, 19 nt, Artificial Sequence
  Description of Artificial Sequence: Synthetic oligonucleotide
agacucuagcaaggguuac

SEQ ID NO: 867239 - RNA, 19 nt, Artificial Sequence
  Description of Artificial Sequence: Synthetic oligonucleotide
gacgcccuagguugcgugc

SEQ ID NO: 867240 - RNA, 19 nt, Artificial Sequence
  Description of Artificial Sequence: Synthetic oligonucleotide
agguggguauuuuggcuga

SEQ ID NO: 867241 - RNA, 19 nt, Artificial Sequence
  Description of Artificial Sequence: Synthetic oligonucleotide
cugaugacuuguaaggcgu

SEQ ID NO: 867242 - RNA, 19 nt, Artificial Sequence
  Description of Artificial Sequence: Synthetic oligonucleotide
guagccacccguggcaaag

SEQ ID NO: 867243 - RNA, 19 nt, Artificial Sequence
  Description of Artificial Sequence: Synthetic oligonucleotide
cugggugcuuaugaccucc

SEQ ID NO: 867244 - RNA, 19 nt, Artificial Sequence
  Description of Artificial Sequence: Synthetic oligonucleotide
ugcaugcccugccggaaac

SEQ ID NO: 867245 - RNA, 19 nt, Artificial Sequence
  Description of Artificial Sequence: Synthetic oligonucleotide
cacuuaugggcuuccucuc

SEQ ID NO: 867246 - RNA, 19 nt, Artificial Sequence
  Description of Artificial Sequence: Synthetic oligonucleotide
ugauggcgggugagguggg

SEQ ID NO: 867247 - RNA, 19 nt, Artificial Sequence
  Description of Artificial Sequence: Synthetic oligonucleotide
cuucuucgccgcucucugg

SEQ ID NO: 867248 - RNA, 19 nt, Artificial Sequence
  Description of Artificial Sequence: Synthetic oligonucleotide
cuaccccuggaacuggguc

SEQ ID NO: 867249 - RNA, 19 nt, Artificial Sequence
  Description of Artificial Sequence: Synthetic oligonucleotide
gguugcgugcaacaggaga

SEQ ID NO: 867250 - RNA, 19 nt, Artificial Sequence
  Description of Artificial Sequence: Synthetic oligonucleotide
cacacucaaggcacuuaug

SEQ ID NO: 867251 - RNA, 19 nt, Artificial Sequence
  Description of Artificial Sequence: Synthetic oligonucleotide
ggaaugcaagacucuagca

SEQ ID NO: 867252 - RNA, 19 nt, Artificial Sequence
  Description of Artificial Sequence: Synthetic oligonucleotide
auaccagcuccggauaaga

SEQ ID NO: 867253 - RNA, 19 nt, Artificial Sequence
  Description of Artificial Sequence: Synthetic oligonucleotide
guaccaguccucuacaauu

SEQ ID NO: 867254 - RNA, 19 nt, Artificial Sequence
  Description of Artificial Sequence: Synthetic oligonucleotide
ugguaaggugcaugcccug

SEQ ID NO: 867255 - RNA, 19 nt, Artificial Sequence
  Description of Artificial Sequence: Synthetic oligonucleotide
uaaccggugugaguucucu

SEQ ID NO: 867256 - RNA, 19 nt, Artificial Sequence
  Description of Artificial Sequence: Synthetic oligonucleotide
gguuuguaagaaagguggc

SEQ ID NO: 867257 - RNA, 19 nt, Artificial Sequence
  Description of Artificial Sequence: Synthetic oligonucleotide
ugcgugcaacaggagagca

SEQ ID NO: 867258 - RNA, 19 nt, Artificial Sequence
  Description of Artificial Sequence: Synthetic oligonucleotide
uugcgugcaacaggagagc

SEQ ID NO: 867259 - RNA, 19 nt, Artificial Sequence
  Description of Artificial Sequence: Synthetic oligonucleotide
ggucccacggcuucccucc

SEQ ID NO: 867260 - RNA, 19 nt, Artificial Sequence
  Description of Artificial Sequence: Synthetic oligonucleotide
cuccugaccaggaaugcaa

SEQ ID NO: 867261 - RNA, 19 nt, Artificial Sequence
  Description of Artificial Sequence: Synthetic oligonucleotide
cgugcaacaggagagcacg

SEQ ID NO: 867262 - RNA, 19 nt, Artificial Sequence
  Description of Artificial Sequence: Synthetic oligonucleotide
gaauccgguuggaacuaug

SEQ ID NO: 867263 - RNA, 19 nt, Artificial Sequence
  Description of Artificial Sequence: Synthetic oligonucleotide
gccuaauuagguuugaguu

SEQ ID NO: 867264 - RNA, 19 nt, Artificial Sequence
  Description of Artificial Sequence: Synthetic oligonucleotide
gaacuaugagagaaacugu

SEQ ID NO: 867265 - RNA, 19 nt, Artificial Sequence
  Description of Artificial Sequence: Synthetic oligonucleotide
agcuccggauaagacaacu

SEQ ID NO: 867266 - RNA, 19 nt, Artificial Sequence
  Description of Artificial Sequence: Synthetic oligonucleotide
agacgcccuagguugcgug

SEQ ID NO: 867267 - RNA, 19 nt, Artificial Sequence
  Description of Artificial Sequence: Synthetic oligonucleotide
aacugucuccacacucaug

SEQ ID NO: 867268 - RNA, 19 nt, Artificial Sequence
  Description of Artificial Sequence: Synthetic oligonucleotide
acguccgccuugaaagacg

SEQ ID NO: 867269 - RNA, 19 nt, Artificial Sequence
  Description of Artificial Sequence: Synthetic oligonucleotide
ccccagagugccuaagucc

SEQ ID NO: 867270 - RNA, 19 nt, Artificial Sequence
  Description of Artificial Sequence: Synthetic oligonucleotide
aauacaccacauggacaaa

SEQ ID NO: 867271 - RNA, 19 nt, Artificial Sequence
  Description of Artificial Sequence: Synthetic oligonucleotide
agguagcaguaccggagga

SEQ ID NO: 867272 - RNA, 19 nt, Artificial Sequence
  Description of Artificial Sequence: Synthetic oligonucleotide
gaucuaugagagaaguuuu

SEQ ID NO: 867273 - RNA, 19 nt, Artificial Sequence
  Description of Artificial Sequence: Synthetic oligonucleotide
ccucuugaaagcggaaccg

SEQ ID NO: 867274 - RNA, 19 nt, Artificial Sequence
  Description of Artificial Sequence: Synthetic oligonucleotide
ggcacugucauuauuaauu

SEQ ID NO: 867275 - RNA, 19 nt, Artificial Sequence
  Description of Artificial Sequence: Synthetic oligonucleotide
uguaaggcgugagcuccga

SEQ ID NO: 867276 - RNA, 19 nt, Artificial Sequence
  Description of Artificial Sequence: Synthetic oligonucleotide
aggugcaugcccugccgga

SEQ ID NO: 867277 - RNA, 19 nt, Artificial Sequence
  Description of Artificial Sequence: Synthetic oligonucleotide
guuggaacuaugagagaaa

SEQ ID NO: 867278 - RNA, 19 nt, Artificial Sequence
  Description of Artificial Sequence: Synthetic oligonucleotide
ccuuugguuguaccagucc

SEQ ID NO: 867279 - RNA, 19 nt, Artificial Sequence
  Description of Artificial Sequence: Synthetic oligonucleotide
guaaggcgugagcuccgag

SEQ ID NO: 867280 - RNA, 19 nt, Artificial Sequence
  Description of Artificial Sequence: Synthetic oligonucleotide
gugccuaauuagguuugag

SEQ ID NO: 867281 - RNA, 19 nt, Artificial Sequence
  Description of Artificial Sequence: Synthetic oligonucleotide
gagcugugagcaaagauuu

SEQ ID NO: 867282 - RNA, 19 nt, Artificial Sequence
  Description of Artificial Sequence: Synthetic oligonucleotide
aacgcaggugggaggccuc

SEQ ID NO: 867283 - RNA, 19 nt, Artificial Sequence
  Description of Artificial Sequence: Synthetic oligonucleotide
cuacaauuugugguuccca

SEQ ID NO: 867284 - RNA, 19 nt, Artificial Sequence
  Description of Artificial Sequence: Synthetic oligonucleotide
accgucgaaaacgcaggug

SEQ ID NO: 867285 - RNA, 19 nt, Artificial Sequence
  Description of Artificial Sequence: Synthetic oligonucleotide
agcugugagcaaagauuuc

SEQ ID NO: 867286 - RNA, 19 nt, Artificial Sequence
  Description of Artificial Sequence: Synthetic oligonucleotide
gguggcacugucauuauua

SEQ ID NO: 867287 - RNA, 19 nt, Artificial Sequence
  Description of Artificial Sequence: Synthetic oligonucleotide
agcuaguucuucaccucug

SEQ ID NO: 867288 - RNA, 19 nt, Artificial Sequence
  Description of Artificial Sequence: Synthetic oligonucleotide
gucgaaaacgcagguggga

SEQ ID NO: 867289 - RNA, 19 nt, Artificial Sequence
  Description of Artificial Sequence: Synthetic oligonucleotide
ucacuaucaggagcccuuc

SEQ ID NO: 867290 - RNA, 19 nt, Artificial Sequence
  Description of Artificial Sequence: Synthetic oligonucleotide
uaauuagguuugaguuauu

SEQ ID NO: 867291 - RNA, 19 nt, Artificial Sequence
  Description of Artificial Sequence: Synthetic oligonucleotide
ccucuauuuuguccucugg

SEQ ID NO: 867292 - RNA, 19 nt, Artificial Sequence
  Description of Artificial Sequence: Synthetic oligonucleotide
ccuaauuagguuugaguua

SEQ ID NO: 867293 - RNA, 19 nt, Artificial Sequence
  Description of Artificial Sequence: Synthetic oligonucleotide
gguaaggugcaugcccugc

SEQ ID NO: 867294 - RNA, 19 nt, Artificial Sequence
  Description of Artificial Sequence: Synthetic oligonucleotide
ggguuacugcuucuucgcc

SEQ ID NO: 867295 - RNA, 19 nt, Artificial Sequence
  Description of Artificial Sequence: Synthetic oligonucleotide
uuacugcuucuucgccgcu

SEQ ID NO: 867296 - RNA, 19 nt, Artificial Sequence
  Description of Artificial Sequence: Synthetic oligonucleotide
uggcgggugagguggguau

SEQ ID NO: 867297 - RNA, 19 nt, Artificial Sequence
  Description of Artificial Sequence: Synthetic oligonucleotide
ccgaaaccagccacguccg

SEQ ID NO: 867298 - RNA, 19 nt, Artificial Sequence
  Description of Artificial Sequence: Synthetic oligonucleotide
cugauuaaguuagaucuau

SEQ ID NO: 867299 - RNA, 19 nt, Artificial Sequence
  Description of Artificial Sequence: Synthetic oligonucleotide
caguaccggaggaugggca

SEQ ID NO: 867300 - RNA, 19 nt, Artificial Sequence
  Description of Artificial Sequence: Synthetic oligonucleotide
gagugccuaagucccgaaa

SEQ ID NO: 867301 - RNA, 19 nt, Artificial Sequence
  Description of Artificial Sequence: Synthetic oligonucleotide
agcggccucuugaaagcgg

SEQ ID NO: 867302 - RNA, 19 nt, Artificial Sequence
  Description of Artificial Sequence: Synthetic oligonucleotide
uccggccguagccacccgu

SEQ ID NO: 867303 - RNA, 19 nt, Artificial Sequence
  Description of Artificial Sequence: Synthetic oligonucleotide
agccacccguggcaaagcu

SEQ ID NO: 867304 - RNA, 19 nt, Artificial Sequence
  Description of Artificial Sequence: Synthetic oligonucleotide
aagacgcccuagguugcgu

SEQ ID NO: 867305 - RNA, 19 nt, Artificial Sequence
  Description of Artificial Sequence: Synthetic oligonucleotide
cuccuauguguguccugug

SEQ ID NO: 867306 - RNA, 19 nt, Artificial Sequence
  Description of Artificial Sequence: Synthetic oligonucleotide
gggugagguggguauuuug

SEQ ID NO: 867307 - RNA, 19 nt, Artificial Sequence
  Description of Artificial Sequence: Synthetic oligonucleotide
ugcgcaucuccggccguag

SEQ ID NO: 867308 - RNA, 19 nt, Artificial Sequence
  Description of Artificial Sequence: Synthetic oligonucleotide
cacguccgccuugaaagac

SEQ ID NO: 867309 - RNA, 19 nt, Artificial Sequence
  Description of Artificial Sequence: Synthetic oligonucleotide
cugcacacuagggucccac

SEQ ID NO: 867310 - RNA, 19 nt, Artificial Sequence
  Description of Artificial Sequence: Synthetic oligonucleotide
cagggagagggucaagucu

SEQ ID NO: 867311 - RNA, 19 nt, Artificial Sequence
  Description of Artificial Sequence: Synthetic oligonucleotide
gaggccuccgggcugggcu

SEQ ID NO: 867312 - RNA, 19 nt, Artificial Sequence
  Description of Artificial Sequence: Synthetic oligonucleotide
agagugccuaagucccgaa

SEQ ID NO: 867313 - RNA, 19 nt, Artificial Sequence
  Description of Artificial Sequence: Synthetic oligonucleotide
cuucucucuggguucucaa

SEQ ID NO: 867314 - RNA, 19 nt, Artificial Sequence
  Description of Artificial Sequence: Synthetic oligonucleotide
ccuagguugcgugcaacag

SEQ ID NO: 867315 - RNA, 19 nt, Artificial Sequence
  Description of Artificial Sequence: Synthetic oligonucleotide
guaagaaagguggcacugu

SEQ ID NO: 867316 - RNA, 19 nt, Artificial Sequence
  Description of Artificial Sequence: Synthetic oligonucleotide
cuggugccugauuaaguua

SEQ ID NO: 867317 - RNA, 19 nt, Artificial Sequence
  Description of Artificial Sequence: Synthetic oligonucleotide
gggcacuuucaggagaaac

SEQ ID NO: 867318 - RNA, 19 nt, Artificial Sequence
  Description of Artificial Sequence: Synthetic oligonucleotide
ggguucuuucaugaaugac

SEQ ID NO: 867319 - RNA, 19 nt, Artificial Sequence
  Description of Artificial Sequence: Synthetic oligonucleotide
ugguuguaccaguccucua

SEQ ID NO: 867320 - RNA, 19 nt, Artificial Sequence
  Description of Artificial Sequence: Synthetic oligonucleotide
cgucgaaaacgcagguggg

SEQ ID NO: 867321 - RNA, 19 nt, Artificial Sequence
  Description of Artificial Sequence: Synthetic oligonucleotide
uccccacaaaggguacacu

SEQ ID NO: 867322 - RNA, 19 nt, Artificial Sequence
  Description of Artificial Sequence: Synthetic oligonucleotide
ggggaagaauagucaagaa

SEQ ID NO: 867323 - RNA, 19 nt, Artificial Sequence
  Description of Artificial Sequence: Synthetic oligonucleotide
ggccucuugaaagcggaac

SEQ ID NO: 867324 - RNA, 19 nt, Artificial Sequence
  Description of Artificial Sequence: Synthetic oligonucleotide
cacaaaggguacacuuaua

SEQ ID NO: 867325 - RNA, 19 nt, Artificial Sequence
  Description of Artificial Sequence: Synthetic oligonucleotide
gccuugaaagacgcccuag

SEQ ID NO: 867326 - RNA, 19 nt, Artificial Sequence
  Description of Artificial Sequence: Synthetic oligonucleotide
acgaauccgguuggaacua

SEQ ID NO: 867327 - RNA, 19 nt, Artificial Sequence
  Description of Artificial Sequence: Synthetic oligonucleotide
ggugcaguccuccuccagu

SEQ ID NO: 867328 - RNA, 19 nt, Artificial Sequence
  Description of Artificial Sequence: Synthetic oligonucleotide
gugacgaauccgguuggaa

SEQ ID NO: 867329 - RNA, 19 nt, Artificial Sequence
  Description of Artificial Sequence: Synthetic oligonucleotide
cugggagcccggaccagca

SEQ ID NO: 867330 - RNA, 19 nt, Artificial Sequence
  Description of Artificial Sequence: Synthetic oligonucleotide
gcggaaccgucgaaaacgc

SEQ ID NO: 867331 - RNA, 19 nt, Artificial Sequence
  Description of Artificial Sequence: Synthetic oligonucleotide
ccaccugggugcuuaugac

SEQ ID NO: 867332 - RNA, 19 nt, Artificial Sequence
  Description of Artificial Sequence: Synthetic oligonucleotide
cguccgccuugaaagacgc

SEQ ID NO: 867333 - RNA, 19 nt, Artificial Sequence
  Description of Artificial Sequence: Synthetic oligonucleotide
acccguggcaaagcuccug

SEQ ID NO: 867334 - RNA, 19 nt, Artificial Sequence
  Description of Artificial Sequence: Synthetic oligonucleotide
acgcccuagguugcgugca

SEQ ID NO: 867335 - RNA, 19 nt, Artificial Sequence
  Description of Artificial Sequence: Synthetic oligonucleotide
gcaguaccggaggaugggc

SEQ ID NO: 867336 - RNA, 19 nt, Artificial Sequence
  Description of Artificial Sequence: Synthetic oligonucleotide
cucuugaaagcggaaccgu

SEQ ID NO: 867337 - RNA, 19 nt, Artificial Sequence
  Description of Artificial Sequence: Synthetic oligonucleotide
cagcuccggauaagacaac

SEQ ID NO: 867338 - RNA, 19 nt, Artificial Sequence
  Description of Artificial Sequence: Synthetic oligonucleotide
ggugcgcugauggcgggug

SEQ ID NO: 867339 - RNA, 19 nt, Artificial Sequence
  Description of Artificial Sequence: Synthetic oligonucleotide
ccacuguuucuaaccggug

SEQ ID NO: 867340 - RNA, 19 nt, Artificial Sequence
  Description of Artificial Sequence: Synthetic oligonucleotide
guguucucaggugacgaau

SEQ ID NO: 867341 - RNA, 19 nt, Artificial Sequence
  Description of Artificial Sequence: Synthetic oligonucleotide
gguccagcggccucuugaa

SEQ ID NO: 867342 - RNA, 19 nt, Artificial Sequence
  Description of Artificial Sequence: Synthetic oligonucleotide
cucaggugacgaauccggu

SEQ ID NO: 867343 - RNA, 19 nt, Artificial Sequence
  Description of Artificial Sequence: Synthetic oligonucleotide
gugagcuccgagagaaacu

SEQ ID NO: 867344 - RNA, 19 nt, Artificial Sequence
  Description of Artificial Sequence: Synthetic oligonucleotide
ccucuacaauuugugguuc

SEQ ID NO: 867345 - RNA, 19 nt, Artificial Sequence
  Description of Artificial Sequence: Synthetic oligonucleotide
gaacuucgagagaaacuuu

SEQ ID NO: 867346 - RNA, 19 nt, Artificial Sequence
  Description of Artificial Sequence: Synthetic oligonucleotide
gugcaugcccugccggaaa

SEQ ID NO: 867347 - RNA, 19 nt, Artificial Sequence
  Description of Artificial Sequence: Synthetic oligonucleotide
agguugcgugcaacaggag

SEQ ID NO: 867348 - RNA, 19 nt, Artificial Sequence
  Description of Artificial Sequence: Synthetic oligonucleotide
cccacuaaggacuccucua

SEQ ID NO: 867349 - RNA, 19 nt, Artificial Sequence
  Description of Artificial Sequence: Synthetic oligonucleotide
ggugccuaauuagguuuga

SEQ ID NO: 867350 - RNA, 19 nt, Artificial Sequence
  Description of Artificial Sequence: Synthetic oligonucleotide
gugccugauuaaguuagau

SEQ ID NO: 867351 - RNA, 19 nt, Artificial Sequence
  Description of Artificial Sequence: Synthetic oligonucleotide
ggugccugauuaaguuaga

SEQ ID NO: 867352 - RNA, 19 nt, Artificial Sequence
  Description of Artificial Sequence: Synthetic oligonucleotide
cccggaccagcagccaugg

SEQ ID NO: 867353 - RNA, 19 nt, Artificial Sequence
  Description of Artificial Sequence: Synthetic oligonucleotide
guccagcggccucuugaaa

SEQ ID NO: 867354 - RNA, 19 nt, Artificial Sequence
  Description of Artificial Sequence: Synthetic oligonucleotide
ggugacgaauccgguugga

SEQ ID NO: 867355 - RNA, 19 nt, Artificial Sequence
  Description of Artificial Sequence: Synthetic oligonucleotide
ccggccguagccacccgug

SEQ ID NO: 867356 - RNA, 19 nt, Artificial Sequence
  Description of Artificial Sequence: Synthetic oligonucleotide
gcgugcaacaggagagcac

SEQ ID NO: 867357 - RNA, 19 nt, Artificial Sequence
  Description of Artificial Sequence: Synthetic oligonucleotide
gggucccacggcuucccuc

SEQ ID NO: 867358 - RNA, 19 nt, Artificial Sequence
  Description of Artificial Sequence: Synthetic oligonucleotide
ccaguccucuacaauuugu

SEQ ID NO: 867359 - RNA, 19 nt, Artificial Sequence
  Description of Artificial Sequence: Synthetic oligonucleotide
ccggaggaugggcacuuuc

SEQ ID NO: 867360 - RNA, 19 nt, Artificial Sequence
  Description of Artificial Sequence: Synthetic oligonucleotide
gcggccucuugaaagcgga

SEQ ID NO: 867361 - RNA, 19 nt, Artificial Sequence
  Description of Artificial Sequence: Synthetic oligonucleotide
gugcgcugauggcggguga

SEQ ID NO: 867362 - RNA, 19 nt, Artificial Sequence
  Description of Artificial Sequence: Synthetic oligonucleotide
cacuaaggacuccucuauu

SEQ ID NO: 867363 - RNA, 19 nt, Artificial Sequence
  Description of Artificial Sequence: Synthetic oligonucleotide
cccguggcaaagcuccuga

SEQ ID NO: 867364 - RNA, 19 nt, Artificial Sequence
  Description of Artificial Sequence: Synthetic oligonucleotide
gucccgaaaccagccacgu

SEQ ID NO: 867365 - RNA, 19 nt, Artificial Sequence
  Description of Artificial Sequence: Synthetic oligonucleotide
cuacauccauacacagcuu

SEQ ID NO: 867366 - RNA, 19 nt, Artificial Sequence
  Description of Artificial Sequence: Synthetic oligonucleotide
augcccugccggaaacuuu

SEQ ID NO: 867367 - RNA, 19 nt, Artificial Sequence
  Description of Artificial Sequence: Synthetic oligonucleotide
ggugucugugaagguugga

SEQ ID NO: 867368 - RNA, 19 nt, Artificial Sequence
  Description of Artificial Sequence: Synthetic oligonucleotide
gguagcaguaccggaggau

SEQ ID NO: 867369 - RNA, 19 nt, Artificial Sequence
  Description of Artificial Sequence: Synthetic oligonucleotide
guaccggaggaugggcacu

SEQ ID NO: 867370 - RNA, 19 nt, Artificial Sequence
  Description of Artificial Sequence: Synthetic oligonucleotide
ccugggugcuuaugaccuc

SEQ ID NO: 867371 - RNA, 19 nt, Artificial Sequence
  Description of Artificial Sequence: Synthetic oligonucleotide
cacggcuucccuccuucgu

SEQ ID NO: 867372 - RNA, 19 nt, Artificial Sequence
  Description of Artificial Sequence: Synthetic oligonucleotide
cuccggccguagccacccg

SEQ ID NO: 867373 - RNA, 19 nt, Artificial Sequence
  Description of Artificial Sequence: Synthetic oligonucleotide
ccacuaaggacuccucuau

SEQ ID NO: 867374 - RNA, 19 nt, Artificial Sequence
  Description of Artificial Sequence: Synthetic oligonucleotide
gcgcaucuccggccguagc

SEQ ID NO: 867375 - RNA, 19 nt, Artificial Sequence
  Description of Artificial Sequence: Synthetic oligonucleotide
caugcccugccggaaacuu

SEQ ID NO: 867376 - RNA, 19 nt, Artificial Sequence
  Description of Artificial Sequence: Synthetic oligonucleotide
gcuccgagagaaacuuucu

SEQ ID NO: 867377 - RNA, 19 nt, Artificial Sequence
  Description of Artificial Sequence: Synthetic oligonucleotide
ccuccugaccaggaaugca

SEQ ID NO: 867378 - RNA, 19 nt, Artificial Sequence
  Description of Artificial Sequence: Synthetic oligonucleotide
gccacccguggcaaagcuc

SEQ ID NO: 867379 - RNA, 19 nt, Artificial Sequence
  Description of Artificial Sequence: Synthetic oligonucleotide
gcccuagguugcgugcaac

SEQ ID NO: 867380 - RNA, 19 nt, Artificial Sequence
  Description of Artificial Sequence: Synthetic oligonucleotide
gguggguauuuuggcugaa

SEQ ID NO: 867381 - RNA, 19 nt, Artificial Sequence
  Description of Artificial Sequence: Synthetic oligonucleotide
gagcuccgagagaaacuuu

SEQ ID NO: 867382 - RNA, 19 nt, Artificial Sequence
  Description of Artificial Sequence: Synthetic oligonucleotide
accggaggaugggcacuuu

SEQ ID NO: 867383 - RNA, 19 nt, Artificial Sequence
  Description of Artificial Sequence: Synthetic oligonucleotide
ccgccuugaaagacgcccu

SEQ ID NO: 867384 - RNA, 19 nt, Artificial Sequence
  Description of Artificial Sequence: Synthetic oligonucleotide
ucguuccaccugggugcuu

SEQ ID NO: 867385 - RNA, 19 nt, Artificial Sequence
  Description of Artificial Sequence: Synthetic oligonucleotide
cacccguggcaaagcuccu

SEQ ID NO: 867386 - RNA, 19 nt, Artificial Sequence
  Description of Artificial Sequence: Synthetic oligonucleotide
cgguuggaacuaugagaga

SEQ ID NO: 867387 - RNA, 19 nt, Artificial Sequence
  Description of Artificial Sequence: Synthetic oligonucleotide
ccgcaaacauugcacugau

SEQ ID NO: 867388 - RNA, 19 nt, Artificial Sequence
  Description of Artificial Sequence: Synthetic oligonucleotide
ccguggcaaagcuccugaa

SEQ ID NO: 867389 - RNA, 19 nt, Artificial Sequence
  Description of Artificial Sequence: Synthetic oligonucleotide
gcccugccggaaacuuuuc

SEQ ID NO: 867390 - RNA, 19 nt, Artificial Sequence
  Description of Artificial Sequence: Synthetic oligonucleotide
cguagccacccguggcaaa

SEQ ID NO: 867391 - RNA, 19 nt, Artificial Sequence
  Description of Artificial Sequence: Synthetic oligonucleotide
gcgggugagguggguauuu

SEQ ID NO: 867392 - RNA, 19 nt, Artificial Sequence
  Description of Artificial Sequence: Synthetic oligonucleotide
gcgugagcuccgagagaaa

SEQ ID NO: 867393 - RNA, 19 nt, Artificial Sequence
  Description of Artificial Sequence: Synthetic oligonucleotide
ggcgggugagguggguauu

SEQ ID NO: 867394 - RNA, 19 nt, Artificial Sequence
  Description of Artificial Sequence: Synthetic oligonucleotide
uuaacuaagaauaauuaag

SEQ ID NO: 867395 - RNA, 19 nt, Artificial Sequence
  Description of Artificial Sequence: Synthetic oligonucleotide
acuaagaauaauuaaguac

SEQ ID NO: 867396 - RNA, 19 nt, Artificial Sequence
  Description of Artificial Sequence: Synthetic oligonucleotide
uuucugaugaguuacauag

SEQ ID NO: 867397 - RNA, 19 nt, Artificial Sequence
  Description of Artificial Sequence: Synthetic oligonucleotide
acucaaaguaauuuaaggc

SEQ ID NO: 867398 - RNA, 19 nt, Artificial Sequence
  Description of Artificial Sequence: Synthetic oligonucleotide
aauucgucgucucucagcc

SEQ ID NO: 867399 - RNA, 19 nt, Artificial Sequence
  Description of Artificial Sequence: Synthetic oligonucleotide
auuauagaaaccuuuaugu

SEQ ID NO: 867400 - RNA, 19 nt, Artificial Sequence
  Description of Artificial Sequence: Synthetic oligonucleotide
acugaaacaaguaagacuc

SEQ ID NO: 867401 - RNA, 19 nt, Artificial Sequence
  Description of Artificial Sequence: Synthetic oligonucleotide
aauacugaugucaagcugg

SEQ ID NO: 867402 - RNA, 19 nt, Artificial Sequence
  Description of Artificial Sequence: Synthetic oligonucleotide
uauuauagaaaccuuuaug

SEQ ID NO: 867403 - RNA, 19 nt, Artificial Sequence
  Description of Artificial Sequence: Synthetic oligonucleotide
aauguuugaugccaaauga

SEQ ID NO: 867404 - RNA, 19 nt, Artificial Sequence
  Description of Artificial Sequence: Synthetic oligonucleotide
gaagcaacgagagagagag

SEQ ID NO: 867405 - RNA, 19 nt, Artificial Sequence
  Description of Artificial Sequence: Synthetic oligonucleotide
gacucaaaguaauuuaagg

SEQ ID NO: 867406 - RNA, 19 nt, Artificial Sequence
  Description of Artificial Sequence: Synthetic oligonucleotide
ucuacaaguaaauuugagc

SEQ ID NO: 867407 - RNA, 19 nt, Artificial Sequence
  Description of Artificial Sequence: Synthetic oligonucleotide
guaucguucaguuaauacg

SEQ ID NO: 867408 - RNA, 19 nt, Artificial Sequence
  Description of Artificial Sequence: Synthetic oligonucleotide
gauuguaauuaaaaggacg

SEQ ID NO: 867409 - RNA, 19 nt, Artificial Sequence
  Description of Artificial Sequence: Synthetic oligonucleotide
aaagugauuauuuuaugau

SEQ ID NO: 867410 - RNA, 19 nt, Artificial Sequence
  Description of Artificial Sequence: Synthetic oligonucleotide
uaacuaagaauaauuaagu

SEQ ID NO: 867411 - RNA, 19 nt, Artificial Sequence
  Description of Artificial Sequence: Synthetic oligonucleotide
aagauauguguuuagcuca

SEQ ID NO: 867412 - RNA, 19 nt, Artificial Sequence
  Description of Artificial Sequence: Synthetic oligonucleotide
aguucauauacacaaaaca

SEQ ID NO: 867413 - RNA, 19 nt, Artificial Sequence
  Description of Artificial Sequence: Synthetic oligonucleotide
caaaagucgagcaauuucc

SEQ ID NO: 867414 - RNA, 19 nt, Artificial Sequence
  Description of Artificial Sequence: Synthetic oligonucleotide
auuaagagcuguuuagcgg

SEQ ID NO: 867415 - RNA, 19 nt, Artificial Sequence
  Description of Artificial Sequence: Synthetic oligonucleotide
aauaaacguuuauaaaaca

SEQ ID NO: 867416 - RNA, 19 nt, Artificial Sequence
  Description of Artificial Sequence: Synthetic oligonucleotide
aacaaauuuuccaauacug

SEQ ID NO: 867417 - RNA, 19 nt, Artificial Sequence
  Description of Artificial Sequence: Synthetic oligonucleotide
guuaauacgugcuacagca

SEQ ID NO: 867418 - RNA, 19 nt, Artificial Sequence
  Description of Artificial Sequence: Synthetic oligonucleotide
gguuuuaugaauuguaugc

SEQ ID NO: 867419 - RNA, 19 nt, Artificial Sequence
  Description of Artificial Sequence: Synthetic oligonucleotide
uuuacugcuuauuauagaa

SEQ ID NO: 867420 - RNA, 19 nt, Artificial Sequence
  Description of Artificial Sequence: Synthetic oligonucleotide
agagagaggaaauagacaa

SEQ ID NO: 867421 - RNA, 19 nt, Artificial Sequence
  Description of Artificial Sequence: Synthetic oligonucleotide
uuuucuucggccaucaaaa

SEQ ID NO: 867422 - RNA, 19 nt, Artificial Sequence
  Description of Artificial Sequence: Synthetic oligonucleotide
uauuaacuaagaauaauua

SEQ ID NO: 867423 - RNA, 19 nt, Artificial Sequence
  Description of Artificial Sequence: Synthetic oligonucleotide
uaaauuugagcauuucuga

SEQ ID NO: 867424 - RNA, 19 nt, Artificial Sequence
  Description of Artificial Sequence: Synthetic oligonucleotide
aguauucugguuaaguggc

SEQ ID NO: 867425 - RNA, 19 nt, Artificial Sequence
  Description of Artificial Sequence: Synthetic oligonucleotide
acaacuuuugaaaaguaac

SEQ ID NO: 867426 - RNA, 19 nt, Artificial Sequence
  Description of Artificial Sequence: Synthetic oligonucleotide
uaucguucaguuaauacgu

SEQ ID NO: 867427 - RNA, 19 nt, Artificial Sequence
  Description of Artificial Sequence: Synthetic oligonucleotide
uugacuugcacucaggguc

SEQ ID NO: 867428 - RNA, 19 nt, Artificial Sequence
  Description of Artificial Sequence: Synthetic oligonucleotide
aguuaauacgugcuacagc

SEQ ID NO: 867429 - RNA, 19 nt, Artificial Sequence
  Description of Artificial Sequence: Synthetic oligonucleotide
uguuugaugccaaaugaug

SEQ ID NO: 867430 - RNA, 19 nt, Artificial Sequence
  Description of Artificial Sequence: Synthetic oligonucleotide
cacuauuugagugauagcc

SEQ ID NO: 867431 - RNA, 19 nt, Artificial Sequence
  Description of Artificial Sequence: Synthetic oligonucleotide
uacucauauaauacuuugg

SEQ ID NO: 867432 - RNA, 19 nt, Artificial Sequence
  Description of Artificial Sequence: Synthetic oligonucleotide
uggaaugcauuuuguaucg

SEQ ID NO: 867433 - RNA, 19 nt, Artificial Sequence
  Description of Artificial Sequence: Synthetic oligonucleotide
ucaaaguaauuuaaggcaa

SEQ ID NO: 867434 - RNA, 19 nt, Artificial Sequence
  Description of Artificial Sequence: Synthetic oligonucleotide
ugcaaaauggguguggucc

SEQ ID NO: 867435 - RNA, 19 nt, Artificial Sequence
  Description of Artificial Sequence: Synthetic oligonucleotide
augaauuguaugccaaugg

SEQ ID NO: 867436 - RNA, 19 nt, Artificial Sequence
  Description of Artificial Sequence: Synthetic oligonucleotide
uaucuucuuagucauaagu

SEQ ID NO: 867437 - RNA, 19 nt, Artificial Sequence
  Description of Artificial Sequence: Synthetic oligonucleotide
auguguuuagcucaaaccu

SEQ ID NO: 867438 - RNA, 19 nt, Artificial Sequence
  Description of Artificial Sequence: Synthetic oligonucleotide
uuauuaagagaagacaaga

SEQ ID NO: 867439 - RNA, 19 nt, Artificial Sequence
  Description of Artificial Sequence: Synthetic oligonucleotide
aaacaaguaagacuccagu

SEQ ID NO: 867440 - RNA, 19 nt, Artificial Sequence
  Description of Artificial Sequence: Synthetic oligonucleotide
auuguaugccaauggaggg

SEQ ID NO: 867441 - RNA, 19 nt, Artificial Sequence
  Description of Artificial Sequence: Synthetic oligonucleotide
auauguguuuagcucaaac

SEQ ID NO: 867442 - RNA, 19 nt, Artificial Sequence
  Description of Artificial Sequence: Synthetic oligonucleotide
uaaaaggacgacuuuauua

SEQ ID NO: 867443 - RNA, 19 nt, Artificial Sequence
  Description of Artificial Sequence: Synthetic oligonucleotide
agcagaagcaacgagagag

SEQ ID NO: 867444 - RNA, 19 nt, Artificial Sequence
  Description of Artificial Sequence: Synthetic oligonucleotide
acucauauaauacuuuggu

SEQ ID NO: 867445 - RNA, 19 nt, Artificial Sequence
  Description of Artificial Sequence: Synthetic oligonucleotide
uugagaguaauucccagga

SEQ ID NO: 867446 - RNA, 19 nt, Artificial Sequence
  Description of Artificial Sequence: Synthetic oligonucleotide
ugaauuguaugccaaugga

SEQ ID NO: 867447 - RNA, 19 nt, Artificial Sequence
  Description of Artificial Sequence: Synthetic oligonucleotide
uaaaaggcgugcuaugucc

SEQ ID NO: 867448 - RNA, 19 nt, Artificial Sequence
  Description of Artificial Sequence: Synthetic oligonucleotide
acauugcugacauaaagug

SEQ ID NO: 867449 - RNA, 19 nt, Artificial Sequence
  Description of Artificial Sequence: Synthetic oligonucleotide
cauuaagagcuguuuagcg

SEQ ID NO: 867450 - RNA, 19 nt, Artificial Sequence
  Description of Artificial Sequence: Synthetic oligonucleotide
aguaaauuugagcauuucu

SEQ ID NO: 867451 - RNA, 19 nt, Artificial Sequence
  Description of Artificial Sequence: Synthetic oligonucleotide
ucauaaguaguaauuacua

SEQ ID NO: 867452 - RNA, 19 nt, Artificial Sequence
  Description of Artificial Sequence: Synthetic oligonucleotide
auuugagcauuucugauga

SEQ ID NO: 867453 - RNA, 19 nt, Artificial Sequence
  Description of Artificial Sequence: Synthetic oligonucleotide
uuuuaugaauuguaugcca

SEQ ID NO: 867454 - RNA, 19 nt, Artificial Sequence
  Description of Artificial Sequence: Synthetic oligonucleotide
ucuucggccaucaaaaguc

SEQ ID NO: 867455 - RNA, 19 nt, Artificial Sequence
  Description of Artificial Sequence: Synthetic oligonucleotide
auagcuaucuccaaaagcu

SEQ ID NO: 867456 - RNA, 19 nt, Artificial Sequence
  Description of Artificial Sequence: Synthetic oligonucleotide
uuugagaaaugacgagugg

SEQ ID NO: 867457 - RNA, 19 nt, Artificial Sequence
  Description of Artificial Sequence: Synthetic oligonucleotide
gagagagagagagagagag

SEQ ID NO: 867458 - RNA, 19 nt, Artificial Sequence
  Description of Artificial Sequence: Synthetic oligonucleotide
uccgcugaauguuugaugc

SEQ ID NO: 867459 - RNA, 19 nt, Artificial Sequence
  Description of Artificial Sequence: Synthetic oligonucleotide
ugagaaaugacgaguggca

SEQ ID NO: 867460 - RNA, 19 nt, Artificial Sequence
  Description of Artificial Sequence: Synthetic oligonucleotide
aguaguaauuacuaauagu

SEQ ID NO: 867461 - RNA, 19 nt, Artificial Sequence
  Description of Artificial Sequence: Synthetic oligonucleotide
uuugccuaaaugcaagccu

SEQ ID NO: 867462 - RNA, 19 nt, Artificial Sequence
  Description of Artificial Sequence: Synthetic oligonucleotide
aagaaugcacuauuugagu

SEQ ID NO: 867463 - RNA, 19 nt, Artificial Sequence
  Description of Artificial Sequence: Synthetic oligonucleotide
uuagucauaaguaguaauu

SEQ ID NO: 867464 - RNA, 19 nt, Artificial Sequence
  Description of Artificial Sequence: Synthetic oligonucleotide
uuuaugaauuguaugccaa

SEQ ID NO: 867465 - RNA, 19 nt, Artificial Sequence
  Description of Artificial Sequence: Synthetic oligonucleotide
aguaauuacuaauagucuu

SEQ ID NO: 867466 - RNA, 19 nt, Artificial Sequence
  Description of Artificial Sequence: Synthetic oligonucleotide
uaagagaagacaagauaug

SEQ ID NO: 867467 - RNA, 19 nt, Artificial Sequence
  Description of Artificial Sequence: Synthetic oligonucleotide
uaguaauuacuaauagucu

SEQ ID NO: 867468 - RNA, 19 nt, Artificial Sequence
  Description of Artificial Sequence: Synthetic oligonucleotide
ugaaaucuaugaaaggcaa

SEQ ID NO: 867469 - RNA, 19 nt, Artificial Sequence
  Description of Artificial Sequence: Synthetic oligonucleotide
aguaaaagugauuauuuua

SEQ ID NO: 867470 - RNA, 19 nt, Artificial Sequence
  Description of Artificial Sequence: Synthetic oligonucleotide
agaaugcacuauuugagug

SEQ ID NO: 867471 - RNA, 19 nt, Artificial Sequence
  Description of Artificial Sequence: Synthetic oligonucleotide
uuuagcucaaaccuuccaa

SEQ ID NO: 867472 - RNA, 19 nt, Artificial Sequence
  Description of Artificial Sequence: Synthetic oligonucleotide
ugagaauauuaacuaagaa

SEQ ID NO: 867473 - RNA, 19 nt, Artificial Sequence
  Description of Artificial Sequence: Synthetic oligonucleotide
aaauuugagcauuucugau

SEQ ID NO: 867474 - RNA, 19 nt, Artificial Sequence
  Description of Artificial Sequence: Synthetic oligonucleotide
caagauauguguuuagcuc

SEQ ID NO: 867475 - RNA, 19 nt, Artificial Sequence
  Description of Artificial Sequence: Synthetic oligonucleotide
aguaauucccaggaauggc

SEQ ID NO: 867476 - RNA, 19 nt, Artificial Sequence
  Description of Artificial Sequence: Synthetic oligonucleotide
aaaguaaaagugauuauuu

SEQ ID NO: 867477 - RNA, 19 nt, Artificial Sequence
  Description of Artificial Sequence: Synthetic oligonucleotide
uguaucguucaguuaauac

SEQ ID NO: 867478 - RNA, 19 nt, Artificial Sequence
  Description of Artificial Sequence: Synthetic oligonucleotide
acaagauauguguuuagcu

SEQ ID NO: 867479 - RNA, 19 nt, Artificial Sequence
  Description of Artificial Sequence: Synthetic oligonucleotide
ugauuguaauuaaaaggac

SEQ ID NO: 867480 - RNA, 19 nt, Artificial Sequence
  Description of Artificial Sequence: Synthetic oligonucleotide
acacuuacucauauaauac

SEQ ID NO: 867481 - RNA, 19 nt, Artificial Sequence
  Description of Artificial Sequence: Synthetic oligonucleotide
guagcaguccauuaagagc

SEQ ID NO: 867482 - RNA, 19 nt, Artificial Sequence
  Description of Artificial Sequence: Synthetic oligonucleotide
agcaacgagagagagagag

SEQ ID NO: 867483 - RNA, 19 nt, Artificial Sequence
  Description of Artificial Sequence: Synthetic oligonucleotide
gacgacuuuauuaagagaa

SEQ ID NO: 867484 - RNA, 19 nt, Artificial Sequence
  Description of Artificial Sequence: Synthetic oligonucleotide
cuugagaguaauucccagg

SEQ ID NO: 867485 - RNA, 19 nt, Artificial Sequence
  Description of Artificial Sequence: Synthetic oligonucleotide
caauuuucgagcaauuuca

SEQ ID NO: 867486 - RNA, 19 nt, Artificial Sequence
  Description of Artificial Sequence: Synthetic oligonucleotide
ucaucucaaagaaugcacu

SEQ ID NO: 867487 - RNA, 19 nt, Artificial Sequence
  Description of Artificial Sequence: Synthetic oligonucleotide
uuugaugccaaaugaugcu

SEQ ID NO: 867488 - RNA, 19 nt, Artificial Sequence
  Description of Artificial Sequence: Synthetic oligonucleotide
agaguagcaguccauuaag

SEQ ID NO: 867489 - RNA, 19 nt, Artificial Sequence
  Description of Artificial Sequence: Synthetic oligonucleotide
uugagaaaugacgaguggc

SEQ ID NO: 867490 - RNA, 19 nt, Artificial Sequence
  Description of Artificial Sequence: Synthetic oligonucleotide
ucaaucuuggaacggugug

SEQ ID NO: 867491 - RNA, 19 nt, Artificial Sequence
  Description of Artificial Sequence: Synthetic oligonucleotide
aagucgagcaauuuccaaa

SEQ ID NO: 867492 - RNA, 19 nt, Artificial Sequence
  Description of Artificial Sequence: Synthetic oligonucleotide
ucaggguccaucacuguag

SEQ ID NO: 867493 - RNA, 19 nt, Artificial Sequence
  Description of Artificial Sequence: Synthetic oligonucleotide
cuguucaaggucuuuguag

SEQ ID NO: 867494 - RNA, 19 nt, Artificial Sequence
  Description of Artificial Sequence: Synthetic oligonucleotide
aagaguagcaguccauuaa

SEQ ID NO: 867495 - RNA, 19 nt, Artificial Sequence
  Description of Artificial Sequence: Synthetic oligonucleotide
ucuucaugauaauagcuau

SEQ ID NO: 867496 - RNA, 19 nt, Artificial Sequence
  Description of Artificial Sequence: Synthetic oligonucleotide
guuugaugccaaaugaugc

SEQ ID NO: 867497 - RNA, 19 nt, Artificial Sequence
  Description of Artificial Sequence: Synthetic oligonucleotide
acgagagagagagagagag

SEQ ID NO: 867498 - RNA, 19 nt, Artificial Sequence
  Description of Artificial Sequence: Synthetic oligonucleotide
gauaauagcuaucuccaaa

SEQ ID NO: 867499 - RNA, 19 nt, Artificial Sequence
  Description of Artificial Sequence: Synthetic oligonucleotide
uucuuagucauaaguagua

SEQ ID NO: 867500 - RNA, 19 nt, Artificial Sequence
  Description of Artificial Sequence: Synthetic oligonucleotide
uuuaugugaggacuccgac

SEQ ID NO: 867501 - RNA, 19 nt, Artificial Sequence
  Description of Artificial Sequence: Synthetic oligonucleotide
agugacucuaucauuaaug

SEQ ID NO: 867502 - RNA, 19 nt, Artificial Sequence
  Description of Artificial Sequence: Synthetic oligonucleotide
agagagagagaggaaauag

SEQ ID NO: 867503 - RNA, 19 nt, Artificial Sequence
  Description of Artificial Sequence: Synthetic oligonucleotide
aaguaagacuccaguauuc

SEQ ID NO: 867504 - RNA, 19 nt, Artificial Sequence
  Description of Artificial Sequence: Synthetic oligonucleotide
uuuuacugcuuauuauaga

SEQ ID NO: 867505 - RNA, 19 nt, Artificial Sequence
  Description of Artificial Sequence: Synthetic oligonucleotide
uugcuuuugacuugcacuc

SEQ ID NO: 867506 - RNA, 19 nt, Artificial Sequence
  Description of Artificial Sequence: Synthetic oligonucleotide
aaaugcaagccuuguuugu

SEQ ID NO: 867507 - RNA, 19 nt, Artificial Sequence
  Description of Artificial Sequence: Synthetic oligonucleotide
guuuuaugaauuguaugcc

SEQ ID NO: 867508 - RNA, 19 nt, Artificial Sequence
  Description of Artificial Sequence: Synthetic oligonucleotide
gaaaugacgaguggcacug

SEQ ID NO: 867509 - RNA, 19 nt, Artificial Sequence
  Description of Artificial Sequence: Synthetic oligonucleotide
ugcauuuuguaucguucag

SEQ ID NO: 867510 - RNA, 19 nt, Artificial Sequence
  Description of Artificial Sequence: Synthetic oligonucleotide
gacuuugagaaaugacgag

SEQ ID NO: 867511 - RNA, 19 nt, Artificial Sequence
  Description of Artificial Sequence: Synthetic oligonucleotide
cuaucaucucaaagaaugc

SEQ ID NO: 867512 - RNA, 19 nt, Artificial Sequence
  Description of Artificial Sequence: Synthetic oligonucleotide
ccgacuuugagaaaugacg

SEQ ID NO: 867513 - RNA, 19 nt, Artificial Sequence
  Description of Artificial Sequence: Synthetic oligonucleotide
aaugacgaguggcacugug

SEQ ID NO: 867514 - RNA, 19 nt, Artificial Sequence
  Description of Artificial Sequence: Synthetic oligonucleotide
gagagagagagagagagga

SEQ ID NO: 867515 - RNA, 19 nt, Artificial Sequence
  Description of Artificial Sequence: Synthetic oligonucleotide
auagcagaagcaacgagag

SEQ ID NO: 867516 - RNA, 19 nt, Artificial Sequence
  Description of Artificial Sequence: Synthetic oligonucleotide
uaucaucucaaagaaugca

SEQ ID NO: 867517 - RNA, 19 nt, Artificial Sequence
  Description of Artificial Sequence: Synthetic oligonucleotide
caacgagagagagagagag

SEQ ID NO: 867518 - RNA, 19 nt, Artificial Sequence
  Description of Artificial Sequence: Synthetic oligonucleotide
ucagaaaagugacucuauc

SEQ ID NO: 867519 - RNA, 19 nt, Artificial Sequence
  Description of Artificial Sequence: Synthetic oligonucleotide
aauccauuuucaaggcagg

SEQ ID NO: 867520 - RNA, 19 nt, Artificial Sequence
  Description of Artificial Sequence: Synthetic oligonucleotide
aauuuucgagcaauuucag

SEQ ID NO: 867521 - RNA, 19 nt, Artificial Sequence
  Description of Artificial Sequence: Synthetic oligonucleotide
aaguaaauuugagcauuuc

SEQ ID NO: 867522 - RNA, 19 nt, Artificial Sequence
  Description of Artificial Sequence: Synthetic oligonucleotide
uucuuauaagcuuucuuuu

SEQ ID NO: 867523 - RNA, 19 nt, Artificial Sequence
  Description of Artificial Sequence: Synthetic oligonucleotide
ucggccaucaaaagucgag

SEQ ID NO: 867524 - RNA, 19 nt, Artificial Sequence
  Description of Artificial Sequence: Synthetic oligonucleotide
gaauucgucgucucucagc

SEQ ID NO: 867525 - RNA, 19 nt, Artificial Sequence
  Description of Artificial Sequence: Synthetic oligonucleotide
acugugaugguuugcaaaa

SEQ ID NO: 867526 - RNA, 19 nt, Artificial Sequence
  Description of Artificial Sequence: Synthetic oligonucleotide
cucuacaaguaaauuugag

SEQ ID NO: 867527 - RNA, 19 nt, Artificial Sequence
  Description of Artificial Sequence: Synthetic oligonucleotide
gacaagauauguguuuagc

SEQ ID NO: 867528 - RNA, 19 nt, Artificial Sequence
  Description of Artificial Sequence: Synthetic oligonucleotide
ucguucaguuaauacgugc

SEQ ID NO: 867529 - RNA, 19 nt, Artificial Sequence
  Description of Artificial Sequence: Synthetic oligonucleotide
uguaaaaggcgugcuaugu

SEQ ID NO: 867530 - RNA, 19 nt, Artificial Sequence
  Description of Artificial Sequence: Synthetic oligonucleotide
uacgugcuacagcaaaucc

SEQ ID NO: 867531 - RNA, 19 nt, Artificial Sequence
  Description of Artificial Sequence: Synthetic oligonucleotide
uucuucggccaucaaaagu

SEQ ID NO: 867532 - RNA, 19 nt, Artificial Sequence
  Description of Artificial Sequence: Synthetic oligonucleotide
aaauauggcaaaagaugcu

SEQ ID NO: 867533 - RNA, 19 nt, Artificial Sequence
  Description of Artificial Sequence: Synthetic oligonucleotide
uucaguuaauacgugcuac

SEQ ID NO: 867534 - RNA, 19 nt, Artificial Sequence
  Description of Artificial Sequence: Synthetic oligonucleotide
uuaugugaggacuccgacu

SEQ ID NO: 867535 - RNA, 19 nt, Artificial Sequence
  Description of Artificial Sequence: Synthetic oligonucleotide
acuugagaguaauucccag

SEQ ID NO: 867536 - RNA, 19 nt, Artificial Sequence
  Description of Artificial Sequence: Synthetic oligonucleotide
agaaaugacgaguggcacu

SEQ ID NO: 867537 - RNA, 19 nt, Artificial Sequence
  Description of Artificial Sequence: Synthetic oligonucleotide
uguguuuagcucaaaccuu

SEQ ID NO: 867538 - RNA, 19 nt, Artificial Sequence
  Description of Artificial Sequence: Synthetic oligonucleotide
uggccugucaaucuuggaa

SEQ ID NO: 867539 - RNA, 19 nt, Artificial Sequence
  Description of Artificial Sequence: Synthetic oligonucleotide
agaguaauucccaggaaug

SEQ ID NO: 867540 - RNA, 19 nt, Artificial Sequence
  Description of Artificial Sequence: Synthetic oligonucleotide
agaacagccaauguggaau

SEQ ID NO: 867541 - RNA, 19 nt, Artificial Sequence
  Description of Artificial Sequence: Synthetic oligonucleotide
aaagucgagcaauuuccaa

SEQ ID NO: 867542 - RNA, 19 nt, Artificial Sequence
  Description of Artificial Sequence: Synthetic oligonucleotide
ugcuacagcaaauccauuu

SEQ ID NO: 867543 - RNA, 19 nt, Artificial Sequence
  Description of Artificial Sequence: Synthetic oligonucleotide
agcuaucuccaaaagcucg

SEQ ID NO: 867544 - RNA, 19 nt, Artificial Sequence
  Description of Artificial Sequence: Synthetic oligonucleotide
aguuacauagcagaagcaa

SEQ ID NO: 867545 - RNA, 19 nt, Artificial Sequence
  Description of Artificial Sequence: Synthetic oligonucleotide
uguuuagcucaaaccuucc

SEQ ID NO: 867546 - RNA, 19 nt, Artificial Sequence
  Description of Artificial Sequence: Synthetic oligonucleotide
augaaaucuaugaaaggca

SEQ ID NO: 867547 - RNA, 19 nt, Artificial Sequence
  Description of Artificial Sequence: Synthetic oligonucleotide
gguccaucacuguaggugg

SEQ ID NO: 867548 - RNA, 19 nt, Artificial Sequence
  Description of Artificial Sequence: Synthetic oligonucleotide
ucaucagaaaagugacucu

SEQ ID NO: 867549 - RNA, 19 nt, Artificial Sequence
  Description of Artificial Sequence: Synthetic oligonucleotide
uuaugaauuguaugccaau

SEQ ID NO: 867550 - RNA, 19 nt, Artificial Sequence
  Description of Artificial Sequence: Synthetic oligonucleotide
uccgacuuugagaaaugac

SEQ ID NO: 867551 - RNA, 19 nt, Artificial Sequence
  Description of Artificial Sequence: Synthetic oligonucleotide
uaauuaaaaggacgacuuu

SEQ ID NO: 867552 - RNA, 19 nt, Artificial Sequence
  Description of Artificial Sequence: Synthetic oligonucleotide
guuacauagcagaagcaac

SEQ ID NO: 867553 - RNA, 19 nt, Artificial Sequence
  Description of Artificial Sequence: Synthetic oligonucleotide
uuguaaaaggcgugcuaug

SEQ ID NO: 867554 - RNA, 19 nt, Artificial Sequence
  Description of Artificial Sequence: Synthetic oligonucleotide
agucgagcaauuuccaaaa

SEQ ID NO: 867555 - RNA, 19 nt, Artificial Sequence
  Description of Artificial Sequence: Synthetic oligonucleotide
ucucuugauuuugagugug

SEQ ID NO: 867556 - RNA, 19 nt, Artificial Sequence
  Description of Artificial Sequence: Synthetic oligonucleotide
agacaagauauguguuuag

SEQ ID NO: 867557 - RNA, 19 nt, Artificial Sequence
  Description of Artificial Sequence: Synthetic oligonucleotide
ugaauucgucgucucucag

SEQ ID NO: 867558 - RNA, 19 nt, Artificial Sequence
  Description of Artificial Sequence: Synthetic oligonucleotide
uuaaaaggacgacuuuauu

SEQ ID NO: 867559 - RNA, 19 nt, Artificial Sequence
  Description of Artificial Sequence: Synthetic oligonucleotide
augcaagccuuguuuguuc

SEQ ID NO: 867560 - RNA, 19 nt, Artificial Sequence
  Description of Artificial Sequence: Synthetic oligonucleotide
ugacgaguggcacugugau

SEQ ID NO: 867561 - RNA, 19 nt, Artificial Sequence
  Description of Artificial Sequence: Synthetic oligonucleotide
uugccuaaaugcaagccuu

SEQ ID NO: 867562 - RNA, 19 nt, Artificial Sequence
  Description of Artificial Sequence: Synthetic oligonucleotide
caauggagggcucacagga

SEQ ID NO: 867563 - RNA, 19 nt, Artificial Sequence
  Description of Artificial Sequence: Synthetic oligonucleotide
uuucgagcaauuucagcau

SEQ ID NO: 867564 - RNA, 19 nt, Artificial Sequence
  Description of Artificial Sequence: Synthetic oligonucleotide
accuuuaugugaggacucc

SEQ ID NO: 867565 - RNA, 19 nt, Artificial Sequence
  Description of Artificial Sequence: Synthetic oligonucleotide
ugugggucacucgugcagg

SEQ ID NO: 867566 - RNA, 19 nt, Artificial Sequence
  Description of Artificial Sequence: Synthetic oligonucleotide
uuguaauuaaaaggacgac

SEQ ID NO: 867567 - RNA, 19 nt, Artificial Sequence
  Description of Artificial Sequence: Synthetic oligonucleotide
gcuccuaucaucucaaaga

SEQ ID NO: 867568 - RNA, 19 nt, Artificial Sequence
  Description of Artificial Sequence: Synthetic oligonucleotide
auuaaaaggacgacuuuau

SEQ ID NO: 867569 - RNA, 19 nt, Artificial Sequence
  Description of Artificial Sequence: Synthetic oligonucleotide
ugaggacuccgacuuugag

SEQ ID NO: 867570 - RNA, 19 nt, Artificial Sequence
  Description of Artificial Sequence: Synthetic oligonucleotide
cuucggccaucaaaagucg

SEQ ID NO: 867571 - RNA, 19 nt, Artificial Sequence
  Description of Artificial Sequence: Synthetic oligonucleotide
gaggacuccgacuuugaga

SEQ ID NO: 867572 - RNA, 19 nt, Artificial Sequence
  Description of Artificial Sequence: Synthetic oligonucleotide
auuugagugauagccaaaa

SEQ ID NO: 867573 - RNA, 19 nt, Artificial Sequence
  Description of Artificial Sequence: Synthetic oligonucleotide
uacauagcagaagcaacga

SEQ ID NO: 867574 - RNA, 19 nt, Artificial Sequence
  Description of Artificial Sequence: Synthetic oligonucleotide
auacugaugucaagcuggc

SEQ ID NO: 867575 - RNA, 19 nt, Artificial Sequence
  Description of Artificial Sequence: Synthetic oligonucleotide
gcaauuuucgagcaauuuc

SEQ ID NO: 867576 - RNA, 19 nt, Artificial Sequence
  Description of Artificial Sequence: Synthetic oligonucleotide
uuucaaggcagguuuccau

SEQ ID NO: 867577 - RNA, 19 nt, Artificial Sequence
  Description of Artificial Sequence: Synthetic oligonucleotide
acuauuugagugauagcca

SEQ ID NO: 867578 - RNA, 19 nt, Artificial Sequence
  Description of Artificial Sequence: Synthetic oligonucleotide
caaucuuggaacggugugc

SEQ ID NO: 867579 - RNA, 19 nt, Artificial Sequence
  Description of Artificial Sequence: Synthetic oligonucleotide
aguaagacuccaguauucu

SEQ ID NO: 867580 - RNA, 19 nt, Artificial Sequence
  Description of Artificial Sequence: Synthetic oligonucleotide
ccucuugcaauuuucgagc

SEQ ID NO: 867581 - RNA, 19 nt, Artificial Sequence
  Description of Artificial Sequence: Synthetic oligonucleotide
ugcuuauuauagaaaccuu

SEQ ID NO: 867582 - RNA, 19 nt, Artificial Sequence
  Description of Artificial Sequence: Synthetic oligonucleotide
ugauuuugaguguguugac

SEQ ID NO: 867583 - RNA, 19 nt, Artificial Sequence
  Description of Artificial Sequence: Synthetic oligonucleotide
uuaauacgugcuacagcaa

SEQ ID NO: 867584 - RNA, 19 nt, Artificial Sequence
  Description of Artificial Sequence: Synthetic oligonucleotide
uguaccagacggcuccgcu

SEQ ID NO: 867585 - RNA, 19 nt, Artificial Sequence
  Description of Artificial Sequence: Synthetic oligonucleotide
ucuuagucauaaguaguaa

SEQ ID NO: 867586 - RNA, 19 nt, Artificial Sequence
  Description of Artificial Sequence: Synthetic oligonucleotide
cacauagaaggagaacagc

SEQ ID NO: 867587 - RNA, 19 nt, Artificial Sequence
  Description of Artificial Sequence: Synthetic oligonucleotide
gagaguaauucccaggaau

SEQ ID NO: 867588 - RNA, 19 nt, Artificial Sequence
  Description of Artificial Sequence: Synthetic oligonucleotide
aauacgugcuacagcaaau

SEQ ID NO: 867589 - RNA, 19 nt, Artificial Sequence
  Description of Artificial Sequence: Synthetic oligonucleotide
ugagaguaauucccaggaa

SEQ ID NO: 867590 - RNA, 19 nt, Artificial Sequence
  Description of Artificial Sequence: Synthetic oligonucleotide
caguuaauacgugcuacag

SEQ ID NO: 867591 - RNA, 19 nt, Artificial Sequence
  Description of Artificial Sequence: Synthetic oligonucleotide
gagagagagagagaggaaa

SEQ ID NO: 867592 - RNA, 19 nt, Artificial Sequence
  Description of Artificial Sequence: Synthetic oligonucleotide
ugccuaaaugcaagccuug

SEQ ID NO: 867593 - RNA, 19 nt, Artificial Sequence
  Description of Artificial Sequence: Synthetic oligonucleotide
cuuuaugugaggacuccga

SEQ ID NO: 867594 - RNA, 19 nt, Artificial Sequence
  Description of Artificial Sequence: Synthetic oligonucleotide
ugaauuuccugagcaauuu

SEQ ID NO: 867595 - RNA, 19 nt, Artificial Sequence
  Description of Artificial Sequence: Synthetic oligonucleotide
uguguugacuuugcuuuug

SEQ ID NO: 867596 - RNA, 19 nt, Artificial Sequence
  Description of Artificial Sequence: Synthetic oligonucleotide
uuuucaaggcagguuucca

SEQ ID NO: 867597 - RNA, 19 nt, Artificial Sequence
  Description of Artificial Sequence: Synthetic oligonucleotide
ugacucuaucauuaaugau

SEQ ID NO: 867598 - RNA, 19 nt, Artificial Sequence
  Description of Artificial Sequence: Synthetic oligonucleotide
gagaaaugacgaguggcac

SEQ ID NO: 867599 - RNA, 19 nt, Artificial Sequence
  Description of Artificial Sequence: Synthetic oligonucleotide
gaugguuugcaaaaugggu

SEQ ID NO: 867600 - RNA, 19 nt, Artificial Sequence
  Description of Artificial Sequence: Synthetic oligonucleotide
agcucaaaccuuccaacaa

SEQ ID NO: 867601 - RNA, 19 nt, Artificial Sequence
  Description of Artificial Sequence: Synthetic oligonucleotide
uagcuaucuccaaaagcuc

SEQ ID NO: 867602 - RNA, 19 nt, Artificial Sequence
  Description of Artificial Sequence: Synthetic oligonucleotide
acucuaucauuaaugauuu

SEQ ID NO: 867603 - RNA, 19 nt, Artificial Sequence
  Description of Artificial Sequence: Synthetic oligonucleotide
aucuucaugauaauagcua

SEQ ID NO: 867604 - RNA, 19 nt, Artificial Sequence
  Description of Artificial Sequence: Synthetic oligonucleotide
guaauuacuaauagucuua

SEQ ID NO: 867605 - RNA, 19 nt, Artificial Sequence
  Description of Artificial Sequence: Synthetic oligonucleotide
ugaguguguugacuuugcu

SEQ ID NO: 867606 - RNA, 19 nt, Artificial Sequence
  Description of Artificial Sequence: Synthetic oligonucleotide
aucuucuuagucauaagua

SEQ ID NO: 867607 - RNA, 19 nt, Artificial Sequence
  Description of Artificial Sequence: Synthetic oligonucleotide
cuuuucuucggccaucaaa

SEQ ID NO: 867608 - RNA, 19 nt, Artificial Sequence
  Description of Artificial Sequence: Synthetic oligonucleotide
gcaaauccauuuucaaggc

SEQ ID NO: 867609 - RNA, 19 nt, Artificial Sequence
  Description of Artificial Sequence: Synthetic oligonucleotide
gacauugcugacauaaagu

SEQ ID NO: 867610 - RNA, 19 nt, Artificial Sequence
  Description of Artificial Sequence: Synthetic oligonucleotide
caggaguaccaacagcuuc

SEQ ID NO: 867611 - RNA, 19 nt, Artificial Sequence
  Description of Artificial Sequence: Synthetic oligonucleotide
uugaugccaaaugaugcuc

SEQ ID NO: 867612 - RNA, 19 nt, Artificial Sequence
  Description of Artificial Sequence: Synthetic oligonucleotide
ccaguauucugguuaagug

SEQ ID NO: 867613 - RNA, 19 nt, Artificial Sequence
  Description of Artificial Sequence: Synthetic oligonucleotide
aggaguaccaacagcuucu

SEQ ID NO: 867614 - RNA, 19 nt, Artificial Sequence
  Description of Artificial Sequence: Synthetic oligonucleotide
ugaagaguagcaguccauu

SEQ ID NO: 867615 - RNA, 19 nt, Artificial Sequence
  Description of Artificial Sequence: Synthetic oligonucleotide
uccugaauucgucgucucu

SEQ ID NO: 867616 - RNA, 19 nt, Artificial Sequence
  Description of Artificial Sequence: Synthetic oligonucleotide
uccuaucaucucaaagaau

SEQ ID NO: 867617 - RNA, 19 nt, Artificial Sequence
  Description of Artificial Sequence: Synthetic oligonucleotide
cuaaaugcaagccuuguuu

SEQ ID NO: 867618 - RNA, 19 nt, Artificial Sequence
  Description of Artificial Sequence: Synthetic oligonucleotide
acgacuuuauuaagagaag

SEQ ID NO: 867619 - RNA, 19 nt, Artificial Sequence
  Description of Artificial Sequence: Synthetic oligonucleotide
gaagaguagcaguccauua

SEQ ID NO: 867620 - RNA, 19 nt, Artificial Sequence
  Description of Artificial Sequence: Synthetic oligonucleotide
guguuuagcucaaaccuuc

SEQ ID NO: 867621 - RNA, 19 nt, Artificial Sequence
  Description of Artificial Sequence: Synthetic oligonucleotide
cuccuaucaucucaaagaa

SEQ ID NO: 867622 - RNA, 19 nt, Artificial Sequence
  Description of Artificial Sequence: Synthetic oligonucleotide
agagagagagagagagagg

SEQ ID NO: 867623 - RNA, 19 nt, Artificial Sequence
  Description of Artificial Sequence: Synthetic oligonucleotide
ucacucgugcaggaguacc

SEQ ID NO: 867624 - RNA, 19 nt, Artificial Sequence
  Description of Artificial Sequence: Synthetic oligonucleotide
cuguuuagcggcuccuauc

SEQ ID NO: 867625 - RNA, 19 nt, Artificial Sequence
  Description of Artificial Sequence: Synthetic oligonucleotide
ggccugucaaucuuggaac

SEQ ID NO: 867626 - RNA, 19 nt, Artificial Sequence
  Description of Artificial Sequence: Synthetic oligonucleotide
guuuagcucaaaccuucca

SEQ ID NO: 867627 - RNA, 19 nt, Artificial Sequence
  Description of Artificial Sequence: Synthetic oligonucleotide
caggguccaucacuguagg

SEQ ID NO: 867628 - RNA, 19 nt, Artificial Sequence
  Description of Artificial Sequence: Synthetic oligonucleotide
gcuaucuccaaaagcucgg

SEQ ID NO: 867629 - RNA, 19 nt, Artificial Sequence
  Description of Artificial Sequence: Synthetic oligonucleotide
cuuagucauaaguaguaau

SEQ ID NO: 867630 - RNA, 19 nt, Artificial Sequence
  Description of Artificial Sequence: Synthetic oligonucleotide
ccuguuuugccuaaaugca

SEQ ID NO: 867631 - RNA, 19 nt, Artificial Sequence
  Description of Artificial Sequence: Synthetic oligonucleotide
gauuuccuagcuuauucuu

SEQ ID NO: 867632 - RNA, 19 nt, Artificial Sequence
  Description of Artificial Sequence: Synthetic oligonucleotide
uagcagaagcaacgagaga

SEQ ID NO: 867633 - RNA, 19 nt, Artificial Sequence
  Description of Artificial Sequence: Synthetic oligonucleotide
gauuuugaguguguugacu

SEQ ID NO: 867634 - RNA, 19 nt, Artificial Sequence
  Description of Artificial Sequence: Synthetic oligonucleotide
guaccagacggcuccgcug

SEQ ID NO: 867635 - RNA, 19 nt, Artificial Sequence
  Description of Artificial Sequence: Synthetic oligonucleotide
gccugucaaucuuggaacg

SEQ ID NO: 867636 - RNA, 19 nt, Artificial Sequence
  Description of Artificial Sequence: Synthetic oligonucleotide
cagugaagaguagcagucc

SEQ ID NO: 867637 - RNA, 19 nt, Artificial Sequence
  Description of Artificial Sequence: Synthetic oligonucleotide
cacuuacucauauaauacu

SEQ ID NO: 867638 - RNA, 19 nt, Artificial Sequence
  Description of Artificial Sequence: Synthetic oligonucleotide
uuggagccucuacaaguaa

SEQ ID NO: 867639 - RNA, 19 nt, Artificial Sequence
  Description of Artificial Sequence: Synthetic oligonucleotide
acgugcuacagcaaaucca

SEQ ID NO: 867640 - RNA, 19 nt, Artificial Sequence
  Description of Artificial Sequence: Synthetic oligonucleotide
agagagagagagaggaaau

SEQ ID NO: 867641 - RNA, 19 nt, Artificial Sequence
  Description of Artificial Sequence: Synthetic oligonucleotide
cauuaaugauuuccuagcu

SEQ ID NO: 867642 - RNA, 19 nt, Artificial Sequence
  Description of Artificial Sequence: Synthetic oligonucleotide
gcgugcuauguccucaucc

SEQ ID NO: 867643 - RNA, 19 nt, Artificial Sequence
  Description of Artificial Sequence: Synthetic oligonucleotide
caucucaaagaaugcacua

SEQ ID NO: 867644 - RNA, 19 nt, Artificial Sequence
  Description of Artificial Sequence: Synthetic oligonucleotide
aacgagagagagagagaga

SEQ ID NO: 867645 - RNA, 19 nt, Artificial Sequence
  Description of Artificial Sequence: Synthetic oligonucleotide
gaguagcaguccauuaaga

SEQ ID NO: 867646 - RNA, 19 nt, Artificial Sequence
  Description of Artificial Sequence: Synthetic oligonucleotide
ccauuaagagcuguuuagc

SEQ ID NO: 867647 - RNA, 19 nt, Artificial Sequence
  Description of Artificial Sequence: Synthetic oligonucleotide
ucgugauggccugucaauc

SEQ ID NO: 867648 - RNA, 19 nt, Artificial Sequence
  Description of Artificial Sequence: Synthetic oligonucleotide
gggcucaucagaaaaguga

SEQ ID NO: 867649 - RNA, 19 nt, Artificial Sequence
  Description of Artificial Sequence: Synthetic oligonucleotide
cuuacucauauaauacuuu

SEQ ID NO: 867650 - RNA, 19 nt, Artificial Sequence
  Description of Artificial Sequence: Synthetic oligonucleotide
caucagaaaagugacucua

SEQ ID NO: 867651 - RNA, 19 nt, Artificial Sequence
  Description of Artificial Sequence: Synthetic oligonucleotide
caaaaugggugugguccag

SEQ ID NO: 867652 - RNA, 19 nt, Artificial Sequence
  Description of Artificial Sequence: Synthetic oligonucleotide
cuggccacccacugaaaca

SEQ ID NO: 867653 - RNA, 19 nt, Artificial Sequence
  Description of Artificial Sequence: Synthetic oligonucleotide
cucgugcaggaguaccaac

SEQ ID NO: 867654 - RNA, 19 nt, Artificial Sequence
  Description of Artificial Sequence: Synthetic oligonucleotide
gagagagagagaggaaaua

SEQ ID NO: 867655 - RNA, 19 nt, Artificial Sequence
  Description of Artificial Sequence: Synthetic oligonucleotide
gacuccgacuuugagaaau

SEQ ID NO: 867656 - RNA, 19 nt, Artificial Sequence
  Description of Artificial Sequence: Synthetic oligonucleotide
accauuccuggucccugug

SEQ ID NO: 867657 - RNA, 19 nt, Artificial Sequence
  Description of Artificial Sequence: Synthetic oligonucleotide
acacacuuacucauauaau

SEQ ID NO: 867658 - RNA, 19 nt, Artificial Sequence
  Description of Artificial Sequence: Synthetic oligonucleotide
aucguucaguuaauacgug

SEQ ID NO: 867659 - RNA, 19 nt, Artificial Sequence
  Description of Artificial Sequence: Synthetic oligonucleotide
augacgaguggcacuguga

SEQ ID NO: 867660 - RNA, 19 nt, Artificial Sequence
  Description of Artificial Sequence: Synthetic oligonucleotide
uuaaguggcguggcauuuu

SEQ ID NO: 867661 - RNA, 19 nt, Artificial Sequence
  Description of Artificial Sequence: Synthetic oligonucleotide
agagagagagagagagaga

SEQ ID NO: 867662 - RNA, 19 nt, Artificial Sequence
  Description of Artificial Sequence: Synthetic oligonucleotide
aaaugacgaguggcacugu

SEQ ID NO: 867663 - RNA, 19 nt, Artificial Sequence
  Description of Artificial Sequence: Synthetic oligonucleotide
gcucaaaccuuccaacaaa

SEQ ID NO: 867664 - RNA, 19 nt, Artificial Sequence
  Description of Artificial Sequence: Synthetic oligonucleotide
cugaauguuugaugccaaa

SEQ ID NO: 867665 - RNA, 19 nt, Artificial Sequence
  Description of Artificial Sequence: Synthetic oligonucleotide
ggacgacuuuauuaagaga

SEQ ID NO: 867666 - RNA, 19 nt, Artificial Sequence
  Description of Artificial Sequence: Synthetic oligonucleotide
ccuuuaugugaggacuccg

SEQ ID NO: 867667 - RNA, 19 nt, Artificial Sequence
  Description of Artificial Sequence: Synthetic oligonucleotide
gcacuauuugagugauagc

SEQ ID NO: 867668 - RNA, 19 nt, Artificial Sequence
  Description of Artificial Sequence: Synthetic oligonucleotide
acuccgacuuugagaaaug

SEQ ID NO: 867669 - RNA, 19 nt, Artificial Sequence
  Description of Artificial Sequence: Synthetic oligonucleotide
cuuggaacggugugcuucu

SEQ ID NO: 867670 - RNA, 19 nt, Artificial Sequence
  Description of Artificial Sequence: Synthetic oligonucleotide
cucaggguccaucacugua

SEQ ID NO: 867671 - RNA, 19 nt, Artificial Sequence
  Description of Artificial Sequence: Synthetic oligonucleotide
auucgucgucucucagccu

SEQ ID NO: 867672 - RNA, 19 nt, Artificial Sequence
  Description of Artificial Sequence: Synthetic oligonucleotide
gauauguguuuagcucaaa

SEQ ID NO: 867673 - RNA, 19 nt, Artificial Sequence
  Description of Artificial Sequence: Synthetic oligonucleotide
gguuugcaaaaugggugug

SEQ ID NO: 867674 - RNA, 19 nt, Artificial Sequence
  Description of Artificial Sequence: Synthetic oligonucleotide
cagacauugcugacauaaa

SEQ ID NO: 867675 - RNA, 19 nt, Artificial Sequence
  Description of Artificial Sequence: Synthetic oligonucleotide
agagagagagagagaggaa

SEQ ID NO: 867676 - RNA, 19 nt, Artificial Sequence
  Description of Artificial Sequence: Synthetic oligonucleotide
ccauuccuggucccugugg

SEQ ID NO: 867677 - RNA, 19 nt, Artificial Sequence
  Description of Artificial Sequence: Synthetic oligonucleotide
gcuuauuauagaaaccuuu

SEQ ID NO: 867678 - RNA, 19 nt, Artificial Sequence
  Description of Artificial Sequence: Synthetic oligonucleotide
gccaucaaaagucgagcaa

SEQ ID NO: 867679 - RNA, 19 nt, Artificial Sequence
  Description of Artificial Sequence: Synthetic oligonucleotide
cucucuugauuuugagugu

SEQ ID NO: 867680 - RNA, 19 nt, Artificial Sequence
  Description of Artificial Sequence: Synthetic oligonucleotide
acucgugcaggaguaccaa

SEQ ID NO: 867681 - RNA, 19 nt, Artificial Sequence
  Description of Artificial Sequence: Synthetic oligonucleotide
ggucgugauggccugucaa

SEQ ID NO: 867682 - RNA, 19 nt, Artificial Sequence
  Description of Artificial Sequence: Synthetic oligonucleotide
gccaauguggaaugcauuu

SEQ ID NO: 867683 - RNA, 19 nt, Artificial Sequence
  Description of Artificial Sequence: Synthetic oligonucleotide
gucgugauggccugucaau

SEQ ID NO: 867684 - RNA, 19 nt, Artificial Sequence
  Description of Artificial Sequence: Synthetic oligonucleotide
aggcgugcuauguccucau

SEQ ID NO: 867685 - RNA, 19 nt, Artificial Sequence
  Description of Artificial Sequence: Synthetic oligonucleotide
cuccaguauucugguuaag

SEQ ID NO: 867686 - RNA, 19 nt, Artificial Sequence
  Description of Artificial Sequence: Synthetic oligonucleotide
ccauuuucaaggcagguuu

SEQ ID NO: 867687 - RNA, 19 nt, Artificial Sequence
  Description of Artificial Sequence: Synthetic oligonucleotide
caccugcagaucaugcugu

SEQ ID NO: 867688 - RNA, 19 nt, Artificial Sequence
  Description of Artificial Sequence: Synthetic oligonucleotide
gugguggucgugauggccu

SEQ ID NO: 867689 - RNA, 19 nt, Artificial Sequence
  Description of Artificial Sequence: Synthetic oligonucleotide
cuguaccagacggcuccgc

SEQ ID NO: 867690 - RNA, 19 nt, Artificial Sequence
  Description of Artificial Sequence: Synthetic oligonucleotide
aagcaacgagagagagaga

SEQ ID NO: 867691 - RNA, 19 nt, Artificial Sequence
  Description of Artificial Sequence: Synthetic oligonucleotide
gcucacaggaguucauaua

SEQ ID NO: 867692 - RNA, 19 nt, Artificial Sequence
  Description of Artificial Sequence: Synthetic oligonucleotide
ccgcugaauguuugaugcc

SEQ ID NO: 867693 - RNA, 19 nt, Artificial Sequence
  Description of Artificial Sequence: Synthetic oligonucleotide
cagccaauguggaaugcau

SEQ ID NO: 867694 - RNA, 19 nt, Artificial Sequence
  Description of Artificial Sequence: Synthetic oligonucleotide
augugaggacuccgacuuu

SEQ ID NO: 867695 - RNA, 19 nt, Artificial Sequence
  Description of Artificial Sequence: Synthetic oligonucleotide
gucacucgugcaggaguac

SEQ ID NO: 867696 - RNA, 19 nt, Artificial Sequence
  Description of Artificial Sequence: Synthetic oligonucleotide
gcauuuuguaucguucagu

SEQ ID NO: 867697 - RNA, 19 nt, Artificial Sequence
  Description of Artificial Sequence: Synthetic oligonucleotide
agcuguuuagcggcuccua

SEQ ID NO: 867698 - RNA, 19 nt, Artificial Sequence
  Description of Artificial Sequence: Synthetic oligonucleotide
guggucgugauggccuguc

SEQ ID NO: 867699 - RNA, 19 nt, Artificial Sequence
  Description of Artificial Sequence: Synthetic oligonucleotide
cauaccauuccuggucccu

SEQ ID NO: 867700 - RNA, 19 nt, Artificial Sequence
  Description of Artificial Sequence: Synthetic oligonucleotide
gguuaaguggcguggcauu

SEQ ID NO: 867701 - RNA, 19 nt, Artificial Sequence
  Description of Artificial Sequence: Synthetic oligonucleotide
guuaaguggcguggcauuu

SEQ ID NO: 867702 - RNA, 19 nt, Artificial Sequence
  Description of Artificial Sequence: Synthetic oligonucleotide
uagcggcuccuaucaucuc

SEQ ID NO: 867703 - RNA, 19 nt, Artificial Sequence
  Description of Artificial Sequence: Synthetic oligonucleotide
gcuguaccagacggcuccg

SEQ ID NO: 867704 - RNA, 19 nt, Artificial Sequence
  Description of Artificial Sequence: Synthetic oligonucleotide
ggcaaaagaaaugcauuuu

SEQ ID NO: 867705 - RNA, 19 nt, Artificial Sequence
  Description of Artificial Sequence: Synthetic oligonucleotide
cggccaucaaaagucgagc

SEQ ID NO: 867706 - RNA, 19 nt, Artificial Sequence
  Description of Artificial Sequence: Synthetic oligonucleotide
gcaacgagagagagagaga

SEQ ID NO: 867707 - RNA, 19 nt, Artificial Sequence
  Description of Artificial Sequence: Synthetic oligonucleotide
ggagccucuacaaguaaau

SEQ ID NO: 867708 - RNA, 19 nt, Artificial Sequence
  Description of Artificial Sequence: Synthetic oligonucleotide
cgugcuacagcaaauccau

SEQ ID NO: 867709 - RNA, 19 nt, Artificial Sequence
  Description of Artificial Sequence: Synthetic oligonucleotide
acggcuccgcugaauguuu

SEQ ID NO: 867710 - RNA, 19 nt, Artificial Sequence
  Description of Artificial Sequence: Synthetic oligonucleotide
guaugccaauggagggcuc

SEQ ID NO: 867711 - RNA, 19 nt, Artificial Sequence
  Description of Artificial Sequence: Synthetic oligonucleotide
gcuguuuagcggcuccuau

SEQ ID NO: 867712 - RNA, 19 nt, Artificial Sequence
  Description of Artificial Sequence: Synthetic oligonucleotide
gcacugugaugguuugcaa

SEQ ID NO: 867713 - RNA, 19 nt, Artificial Sequence
  Description of Artificial Sequence: Synthetic oligonucleotide
cugccuguuuugccuaaau

SEQ ID NO: 867714 - RNA, 19 nt, Artificial Sequence
  Description of Artificial Sequence: Synthetic oligonucleotide
cgagagagagagagagaga

SEQ ID NO: 867715 - RNA, 19 nt, Artificial Sequence
  Description of Artificial Sequence: Synthetic oligonucleotide
gccuaaaugcaagccuugu

SEQ ID NO: 867716 - RNA, 19 nt, Artificial Sequence
  Description of Artificial Sequence: Synthetic oligonucleotide
ggcgugcuauguccucauc

SEQ ID NO: 867717 - RNA, 19 nt, Artificial Sequence
  Description of Artificial Sequence: Synthetic oligonucleotide
ccuaaaugcaagccuuguu

SEQ ID NO: 867718 - RNA, 19 nt, Artificial Sequence
  Description of Artificial Sequence: Synthetic oligonucleotide
ggaaugcauuuuguaucgu

SEQ ID NO: 867719 - RNA, 19 nt, Artificial Sequence
  Description of Artificial Sequence: Synthetic oligonucleotide
gcggcuccuaucaucucaa

SEQ ID NO: 867720 - RNA, 19 nt, Artificial Sequence
  Description of Artificial Sequence: Synthetic oligonucleotide
cgugauggccugucaaucu

SEQ ID NO: 867721 - RNA, 19 nt, Artificial Sequence
  Description of Artificial Sequence: Synthetic oligonucleotide
guccaucacuguagguggu

SEQ ID NO: 867722 - RNA, 19 nt, Artificial Sequence
  Description of Artificial Sequence: Synthetic oligonucleotide
gcaaaagaugcugccuguu

SEQ ID NO: 867723 - RNA, 19 nt, Artificial Sequence
  Description of Artificial Sequence: Synthetic oligonucleotide
ggacuccgacuuugagaaa

SEQ ID NO: 867724 - RNA, 19 nt, Artificial Sequence
  Description of Artificial Sequence: Synthetic oligonucleotide
cggcuccgcugaauguuug

SEQ ID NO: 867725 - RNA, 19 nt, Artificial Sequence
  Description of Artificial Sequence: Synthetic oligonucleotide
gguggucgugauggccugu

SEQ ID NO: 867726 - RNA, 19 nt, Artificial Sequence
  Description of Artificial Sequence: Synthetic oligonucleotide
cggcuccuaucaucucaaa

SEQ ID NO: 867727 - RNA, 19 nt, Artificial Sequence
  Description of Artificial Sequence: Synthetic oligonucleotide
cuggucccugugggucacu

SEQ ID NO: 867728 - RNA, 19 nt, Artificial Sequence
  Description of Artificial Sequence: Synthetic oligonucleotide
ccagacggcuccgcugaau

SEQ ID NO: 867729 - RNA, 19 nt, Artificial Sequence
  Description of Artificial Sequence: Synthetic oligonucleotide
cgucgucucucagccucaa

SEQ ID NO: 867730 - RNA, 19 nt, Artificial Sequence
  Description of Artificial Sequence: Synthetic oligonucleotide
aacacuacggcauggaugg

SEQ ID NO: 867731 - RNA, 19 nt, Artificial Sequence
  Description of Artificial Sequence: Synthetic oligonucleotide
agucagaugacucuguagc

SEQ ID NO: 867732 - RNA, 19 nt, Artificial Sequence
  Description of Artificial Sequence: Synthetic oligonucleotide
gaugaaaucacuuuaaugu

SEQ ID NO: 867733 - RNA, 19 nt, Artificial Sequence
  Description of Artificial Sequence: Synthetic oligonucleotide
uuuagcaccgcucagcucc

SEQ ID NO: 867734 - RNA, 19 nt, Artificial Sequence
  Description of Artificial Sequence: Synthetic oligonucleotide
aagucaaacacauuccgag

SEQ ID NO: 867735 - RNA, 19 nt, Artificial Sequence
  Description of Artificial Sequence: Synthetic oligonucleotide
uugacuaggaguuuggagc

SEQ ID NO: 867736 - RNA, 19 nt, Artificial Sequence
  Description of Artificial Sequence: Synthetic oligonucleotide
ucaguaguauucauacacg

SEQ ID NO: 867737 - RNA, 19 nt, Artificial Sequence
  Description of Artificial Sequence: Synthetic oligonucleotide
agcauuccggguuagggcc

SEQ ID NO: 867738 - RNA, 19 nt, Artificial Sequence
  Description of Artificial Sequence: Synthetic oligonucleotide
uucggaaccgcuaaagcag

SEQ ID NO: 867739 - RNA, 19 nt, Artificial Sequence
  Description of Artificial Sequence: Synthetic oligonucleotide
uauucauacacguuaggcu

SEQ ID NO: 867740 - RNA, 19 nt, Artificial Sequence
  Description of Artificial Sequence: Synthetic oligonucleotide
cucaguaguauucauacac

SEQ ID NO: 867741 - RNA, 19 nt, Artificial Sequence
  Description of Artificial Sequence: Synthetic oligonucleotide
aacaguauaguagccauug

SEQ ID NO: 867742 - RNA, 19 nt, Artificial Sequence
  Description of Artificial Sequence: Synthetic oligonucleotide
ugcaguaagcucaagucug

SEQ ID NO: 867743 - RNA, 19 nt, Artificial Sequence
  Description of Artificial Sequence: Synthetic oligonucleotide
uucacuuuagcaccgcuca

SEQ ID NO: 867744 - RNA, 19 nt, Artificial Sequence
  Description of Artificial Sequence: Synthetic oligonucleotide
guugugauacucuagcgug

SEQ ID NO: 867745 - RNA, 19 nt, Artificial Sequence
  Description of Artificial Sequence: Synthetic oligonucleotide
uuccugaccgacaacaggc

SEQ ID NO: 867746 - RNA, 19 nt, Artificial Sequence
  Description of Artificial Sequence: Synthetic oligonucleotide
uaguauucauacacguuag

SEQ ID NO: 867747 - RNA, 19 nt, Artificial Sequence
  Description of Artificial Sequence: Synthetic oligonucleotide
ugcguugugauacucuagc

SEQ ID NO: 867748 - RNA, 19 nt, Artificial Sequence
  Description of Artificial Sequence: Synthetic oligonucleotide
ugcaugccgacccaaaccc

SEQ ID NO: 867749 - RNA, 19 nt, Artificial Sequence
  Description of Artificial Sequence: Synthetic oligonucleotide
cuugaagcggcauuuuccc

SEQ ID NO: 867750 - RNA, 19 nt, Artificial Sequence
  Description of Artificial Sequence: Synthetic oligonucleotide
aagcagacgagaccugagg

SEQ ID NO: 867751 - RNA, 19 nt, Artificial Sequence
  Description of Artificial Sequence: Synthetic oligonucleotide
aagggcgcagcucauccac

SEQ ID NO: 867752 - RNA, 19 nt, Artificial Sequence
  Description of Artificial Sequence: Synthetic oligonucleotide
agucaaacacauuccgagg

SEQ ID NO: 867753 - RNA, 19 nt, Artificial Sequence
  Description of Artificial Sequence: Synthetic oligonucleotide
guauguaccucccaaccag

SEQ ID NO: 867754 - RNA, 19 nt, Artificial Sequence
  Description of Artificial Sequence: Synthetic oligonucleotide
cacaauauaggcagggcug

SEQ ID NO: 867755 - RNA, 19 nt, Artificial Sequence
  Description of Artificial Sequence: Synthetic oligonucleotide
agugcccacaaccauugcg

SEQ ID NO: 867756 - RNA, 19 nt, Artificial Sequence
  Description of Artificial Sequence: Synthetic oligonucleotide
uguucaaaaucaacccuga

SEQ ID NO: 867757 - RNA, 19 nt, Artificial Sequence
  Description of Artificial Sequence: Synthetic oligonucleotide
ucuagcgugccccaagcgc

SEQ ID NO: 867758 - RNA, 19 nt, Artificial Sequence
  Description of Artificial Sequence: Synthetic oligonucleotide
guaguauucauacacguua

SEQ ID NO: 867759 - RNA, 19 nt, Artificial Sequence
  Description of Artificial Sequence: Synthetic oligonucleotide
uccgagucaucccacgggg

SEQ ID NO: 867760 - RNA, 19 nt, Artificial Sequence
  Description of Artificial Sequence: Synthetic oligonucleotide
ugacuaggaguuuggagcc

SEQ ID NO: 867761 - RNA, 19 nt, Artificial Sequence
  Description of Artificial Sequence: Synthetic oligonucleotide
ugaacaagggacagccuug

SEQ ID NO: 867762 - RNA, 19 nt, Artificial Sequence
  Description of Artificial Sequence: Synthetic oligonucleotide
guauucauacacguuaggc

SEQ ID NO: 867763 - RNA, 19 nt, Artificial Sequence
  Description of Artificial Sequence: Synthetic oligonucleotide
aguauucauacacguuagg

SEQ ID NO: 867764 - RNA, 19 nt, Artificial Sequence
  Description of Artificial Sequence: Synthetic oligonucleotide
agcagacgagaccugaggg

SEQ ID NO: 867765 - RNA, 19 nt, Artificial Sequence
  Description of Artificial Sequence: Synthetic oligonucleotide
uguccuaaggagcuacccc

SEQ ID NO: 867766 - RNA, 19 nt, Artificial Sequence
  Description of Artificial Sequence: Synthetic oligonucleotide
uugugaugaaaucacuuua

SEQ ID NO: 867767 - RNA, 19 nt, Artificial Sequence
  Description of Artificial Sequence: Synthetic oligonucleotide
agguagaguacgcgaacgc

SEQ ID NO: 867768 - RNA, 19 nt, Artificial Sequence
  Description of Artificial Sequence: Synthetic oligonucleotide
ugacaaggcugaacaaggg

SEQ ID NO: 867769 - RNA, 19 nt, Artificial Sequence
  Description of Artificial Sequence: Synthetic oligonucleotide
aguacgcgaacgcaugccg

SEQ ID NO: 867770 - RNA, 19 nt, Artificial Sequence
  Description of Artificial Sequence: Synthetic oligonucleotide
auugugaugaaaucacuuu

SEQ ID NO: 867771 - RNA, 19 nt, Artificial Sequence
  Description of Artificial Sequence: Synthetic oligonucleotide
aucgcuacaccgcgcaggc

SEQ ID NO: 867772 - RNA, 19 nt, Artificial Sequence
  Description of Artificial Sequence: Synthetic oligonucleotide
agagaaauugugaugaaau

SEQ ID NO: 867773 - RNA, 19 nt, Artificial Sequence
  Description of Artificial Sequence: Synthetic oligonucleotide
cagugagucaaauuuaaca

SEQ ID NO: 867774 - RNA, 19 nt, Artificial Sequence
  Description of Artificial Sequence: Synthetic oligonucleotide
gaaagggcgcagcucaucc

SEQ ID NO: 867775 - RNA, 19 nt, Artificial Sequence
  Description of Artificial Sequence: Synthetic oligonucleotide
agaguacgcgaacgcaugc

SEQ ID NO: 867776 - RNA, 19 nt, Artificial Sequence
  Description of Artificial Sequence: Synthetic oligonucleotide
cugaccgacaacaggcugg

SEQ ID NO: 867777 - RNA, 19 nt, Artificial Sequence
  Description of Artificial Sequence: Synthetic oligonucleotide
ugucuacucaguaguauuc

SEQ ID NO: 867778 - RNA, 19 nt, Artificial Sequence
  Description of Artificial Sequence: Synthetic oligonucleotide
ugauacucuagcgugcccc

SEQ ID NO: 867779 - RNA, 19 nt, Artificial Sequence
  Description of Artificial Sequence: Synthetic oligonucleotide
auacacguuaggcugacaa

SEQ ID NO: 867780 - RNA, 19 nt, Artificial Sequence
  Description of Artificial Sequence: Synthetic oligonucleotide
uauaguagccauuguccac

SEQ ID NO: 867781 - RNA, 19 nt, Artificial Sequence
  Description of Artificial Sequence: Synthetic oligonucleotide
aagcgcugugguaaggggc

SEQ ID NO: 867782 - RNA, 19 nt, Artificial Sequence
  Description of Artificial Sequence: Synthetic oligonucleotide
gaaccgcuaaagcagacga

SEQ ID NO: 867783 - RNA, 19 nt, Artificial Sequence
  Description of Artificial Sequence: Synthetic oligonucleotide
acucuagcgugccccaagc

SEQ ID NO: 867784 - RNA, 19 nt, Artificial Sequence
  Description of Artificial Sequence: Synthetic oligonucleotide
caacacuacggcauggaug

SEQ ID NO: 867785 - RNA, 19 nt, Artificial Sequence
  Description of Artificial Sequence: Synthetic oligonucleotide
uuguggguaggguacaggu

SEQ ID NO: 867786 - RNA, 19 nt, Artificial Sequence
  Description of Artificial Sequence: Synthetic oligonucleotide
uagaguacgcgaacgcaug

SEQ ID NO: 867787 - RNA, 19 nt, Artificial Sequence
  Description of Artificial Sequence: Synthetic oligonucleotide
uugugauacucuagcgugc

SEQ ID NO: 867788 - RNA, 19 nt, Artificial Sequence
  Description of Artificial Sequence: Synthetic oligonucleotide
uacacguuaggcugacaag

SEQ ID NO: 867789 - RNA, 19 nt, Artificial Sequence
  Description of Artificial Sequence: Synthetic oligonucleotide
ucuccgagucaucccacgg

SEQ ID NO: 867790 - RNA, 19 nt, Artificial Sequence
  Description of Artificial Sequence: Synthetic oligonucleotide
caucuuggaggccuauugg

SEQ ID NO: 867791 - RNA, 19 nt, Artificial Sequence
  Description of Artificial Sequence: Synthetic oligonucleotide
uacagguagaguacgcgaa

SEQ ID NO: 867792 - RNA, 19 nt, Artificial Sequence
  Description of Artificial Sequence: Synthetic oligonucleotide
ugaagcggcauuuucccuc

SEQ ID NO: 867793 - RNA, 19 nt, Artificial Sequence
  Description of Artificial Sequence: Synthetic oligonucleotide
acuuuagcaccgcucagcu

SEQ ID NO: 867794 - RNA, 19 nt, Artificial Sequence
  Description of Artificial Sequence: Synthetic oligonucleotide
accgacaacaggcuggccu

SEQ ID NO: 867795 - RNA, 19 nt, Artificial Sequence
  Description of Artificial Sequence: Synthetic oligonucleotide
agcucuaccugcccgagcu

SEQ ID NO: 867796 - RNA, 19 nt, Artificial Sequence
  Description of Artificial Sequence: Synthetic oligonucleotide
cagugauuucccucuaggc

SEQ ID NO: 867797 - RNA, 19 nt, Artificial Sequence
  Description of Artificial Sequence: Synthetic oligonucleotide
ucuaggcaacacuacggca

SEQ ID NO: 867798 - RNA, 19 nt, Artificial Sequence
  Description of Artificial Sequence: Synthetic oligonucleotide
agucacuugcaucaccacu

SEQ ID NO: 867799 - RNA, 19 nt, Artificial Sequence
  Description of Artificial Sequence: Synthetic oligonucleotide
cuuccugaccgacaacagg

SEQ ID NO: 867800 - RNA, 19 nt, Artificial Sequence
  Description of Artificial Sequence: Synthetic oligonucleotide
ugugauacucuagcgugcc

SEQ ID NO: 867801 - RNA, 19 nt, Artificial Sequence
  Description of Artificial Sequence: Synthetic oligonucleotide
aucuuggaggccuauuggu

SEQ ID NO: 867802 - RNA, 19 nt, Artificial Sequence
  Description of Artificial Sequence: Synthetic oligonucleotide
ugugccggccagcauuccg

SEQ ID NO: 867803 - RNA, 19 nt, Artificial Sequence
  Description of Artificial Sequence: Synthetic oligonucleotide
aaucaacccugacacccca

SEQ ID NO: 867804 - RNA, 19 nt, Artificial Sequence
  Description of Artificial Sequence: Synthetic oligonucleotide
cauggaugggcuccacucg

SEQ ID NO: 867805 - RNA, 19 nt, Artificial Sequence
  Description of Artificial Sequence: Synthetic oligonucleotide
aguuucggaaccgcuaaag

SEQ ID NO: 867806 - RNA, 19 nt, Artificial Sequence
  Description of Artificial Sequence: Synthetic oligonucleotide
ucagaugacucuguagccu

SEQ ID NO: 867807 - RNA, 19 nt, Artificial Sequence
  Description of Artificial Sequence: Synthetic oligonucleotide
uccgccacagccuucugga

SEQ ID NO: 867808 - RNA, 19 nt, Artificial Sequence
  Description of Artificial Sequence: Synthetic oligonucleotide
ucugccaacgcaguuugga

SEQ ID NO: 867809 - RNA, 19 nt, Artificial Sequence
  Description of Artificial Sequence: Synthetic oligonucleotide
gucagaugacucuguagcc

SEQ ID NO: 867810 - RNA, 19 nt, Artificial Sequence
  Description of Artificial Sequence: Synthetic oligonucleotide
uccaucgcuacaccgcgca

SEQ ID NO: 867811 - RNA, 19 nt, Artificial Sequence
  Description of Artificial Sequence: Synthetic oligonucleotide
gaagcggcauuuucccucc

SEQ ID NO: 867812 - RNA, 19 nt, Artificial Sequence
  Description of Artificial Sequence: Synthetic oligonucleotide
uucccucuaggcaacacua

SEQ ID NO: 867813 - RNA, 19 nt, Artificial Sequence
  Description of Artificial Sequence: Synthetic oligonucleotide
uaauguccuaaggagcuac

SEQ ID NO: 867814 - RNA, 19 nt, Artificial Sequence
  Description of Artificial Sequence: Synthetic oligonucleotide
uacucuagcgugccccaag

SEQ ID NO: 867815 - RNA, 19 nt, Artificial Sequence
  Description of Artificial Sequence: Synthetic oligonucleotide
agguccgcaagcucggaag

SEQ ID NO: 867816 - RNA, 19 nt, Artificial Sequence
  Description of Artificial Sequence: Synthetic oligonucleotide
auugcguugugauacucua

SEQ ID NO: 867817 - RNA, 19 nt, Artificial Sequence
  Description of Artificial Sequence: Synthetic oligonucleotide
aaagcagacgagaccugag

SEQ ID NO: 867818 - RNA, 19 nt, Artificial Sequence
  Description of Artificial Sequence: Synthetic oligonucleotide
acaucggugauccgugcug

SEQ ID NO: 867819 - RNA, 19 nt, Artificial Sequence
  Description of Artificial Sequence: Synthetic oligonucleotide
uugcguugugauacucuag

SEQ ID NO: 867820 - RNA, 19 nt, Artificial Sequence
  Description of Artificial Sequence: Synthetic oligonucleotide
ucggccuucugcaugccga

SEQ ID NO: 867821 - RNA, 19 nt, Artificial Sequence
  Description of Artificial Sequence: Synthetic oligonucleotide
ucacuuuagcaccgcucag

SEQ ID NO: 867822 - RNA, 19 nt, Artificial Sequence
  Description of Artificial Sequence: Synthetic oligonucleotide
cucguccaucgcuacaccg

SEQ ID NO: 867823 - RNA, 19 nt, Artificial Sequence
  Description of Artificial Sequence: Synthetic oligonucleotide
uagcccaucuugacuagga

SEQ ID NO: 867824 - RNA, 19 nt, Artificial Sequence
  Description of Artificial Sequence: Synthetic oligonucleotide
ugugcgcagaggaggcagg

SEQ ID NO: 867825 - RNA, 19 nt, Artificial Sequence
  Description of Artificial Sequence: Synthetic oligonucleotide
ugccaacgcaguuuggagu

SEQ ID NO: 867826 - RNA, 19 nt, Artificial Sequence
  Description of Artificial Sequence: Synthetic oligonucleotide
cagaucgcccugcagcugg

SEQ ID NO: 867827 - RNA, 19 nt, Artificial Sequence
  Description of Artificial Sequence: Synthetic oligonucleotide
aguuuggagccaaugccuc

SEQ ID NO: 867828 - RNA, 19 nt, Artificial Sequence
  Description of Artificial Sequence: Synthetic oligonucleotide
cugcaugccgacccaaacc

SEQ ID NO: 867829 - RNA, 19 nt, Artificial Sequence
  Description of Artificial Sequence: Synthetic oligonucleotide
guccuaaggagcuacccca

SEQ ID NO: 867830 - RNA, 19 nt, Artificial Sequence
  Description of Artificial Sequence: Synthetic oligonucleotide
cagcauuccggguuagggc

SEQ ID NO: 867831 - RNA, 19 nt, Artificial Sequence
  Description of Artificial Sequence: Synthetic oligonucleotide
augucuacucaguaguauu

SEQ ID NO: 867832 - RNA, 19 nt, Artificial Sequence
  Description of Artificial Sequence: Synthetic oligonucleotide
gucggcagagcucaggaca

SEQ ID NO: 867833 - RNA, 19 nt, Artificial Sequence
  Description of Artificial Sequence: Synthetic oligonucleotide
caagcgcugugguaagggg

SEQ ID NO: 867834 - RNA, 19 nt, Artificial Sequence
  Description of Artificial Sequence: Synthetic oligonucleotide
aucgcccugcagcuggcgc

SEQ ID NO: 867835 - RNA, 19 nt, Artificial Sequence
  Description of Artificial Sequence: Synthetic oligonucleotide
accgcuaaagcagacgaga

SEQ ID NO: 867836 - RNA, 19 nt, Artificial Sequence
  Description of Artificial Sequence: Synthetic oligonucleotide
uguugccaugcugugccgg

SEQ ID NO: 867837 - RNA, 19 nt, Artificial Sequence
  Description of Artificial Sequence: Synthetic oligonucleotide
guacagguagaguacgcga

SEQ ID NO: 867838 - RNA, 19 nt, Artificial Sequence
  Description of Artificial Sequence: Synthetic oligonucleotide
aggguacagguagaguacg

SEQ ID NO: 867839 - RNA, 19 nt, Artificial Sequence
  Description of Artificial Sequence: Synthetic oligonucleotide
cagguagaguacgcgaacg

SEQ ID NO: 867840 - RNA, 19 nt, Artificial Sequence
  Description of Artificial Sequence: Synthetic oligonucleotide
uguggguaucugccuuccg

SEQ ID NO: 867841 - RNA, 19 nt, Artificial Sequence
  Description of Artificial Sequence: Synthetic oligonucleotide
aaagggcgcagcucaucca

SEQ ID NO: 867842 - RNA, 19 nt, Artificial Sequence
  Description of Artificial Sequence: Synthetic oligonucleotide
cacuuuagcaccgcucagc

SEQ ID NO: 867843 - RNA, 19 nt, Artificial Sequence
  Description of Artificial Sequence: Synthetic oligonucleotide
cucggaagcguccaggcca

SEQ ID NO: 867844 - RNA, 19 nt, Artificial Sequence
  Description of Artificial Sequence: Synthetic oligonucleotide
gauacucuagcgugcccca

SEQ ID NO: 867845 - RNA, 19 nt, Artificial Sequence
  Description of Artificial Sequence: Synthetic oligonucleotide
cuccgagucaucccacggg

SEQ ID NO: 867846 - RNA, 19 nt, Artificial Sequence
  Description of Artificial Sequence: Synthetic oligonucleotide
cucugugcgcagaggaggc

SEQ ID NO: 867847 - RNA, 19 nt, Artificial Sequence
  Description of Artificial Sequence: Synthetic oligonucleotide
acucaguaguauucauaca

SEQ ID NO: 867848 - RNA, 19 nt, Artificial Sequence
  Description of Artificial Sequence: Synthetic oligonucleotide
caucgcuacaccgcgcagg

SEQ ID NO: 867849 - RNA, 19 nt, Artificial Sequence
  Description of Artificial Sequence: Synthetic oligonucleotide
ucggcagagcucaggacaa

SEQ ID NO: 867850 - RNA, 19 nt, Artificial Sequence
  Description of Artificial Sequence: Synthetic oligonucleotide
acaguauaguagccauugu

SEQ ID NO: 867851 - RNA, 19 nt, Artificial Sequence
  Description of Artificial Sequence: Synthetic oligonucleotide
uaacaguauaguagccauu

SEQ ID NO: 867852 - RNA, 19 nt, Artificial Sequence
  Description of Artificial Sequence: Synthetic oligonucleotide
ugcugucucccucuaccac

SEQ ID NO: 867853 - RNA, 19 nt, Artificial Sequence
  Description of Artificial Sequence: Synthetic oligonucleotide
agcccaucuugacuaggag

SEQ ID NO: 867854 - RNA, 19 nt, Artificial Sequence
  Description of Artificial Sequence: Synthetic oligonucleotide
acguuaggcugacaaggcu

SEQ ID NO: 867855 - RNA, 19 nt, Artificial Sequence
  Description of Artificial Sequence: Synthetic oligonucleotide
cuaaagcagacgagaccug

SEQ ID NO: 867856 - RNA, 19 nt, Artificial Sequence
  Description of Artificial Sequence: Synthetic oligonucleotide
cacgguguuugguuccacc

SEQ ID NO: 867857 - RNA, 19 nt, Artificial Sequence
  Description of Artificial Sequence: Synthetic oligonucleotide
cuaguuucggaaccgcuaa

SEQ ID NO: 867858 - RNA, 19 nt, Artificial Sequence
  Description of Artificial Sequence: Synthetic oligonucleotide
ugaccgacaacaggcuggc

SEQ ID NO: 867859 - RNA, 19 nt, Artificial Sequence
  Description of Artificial Sequence: Synthetic oligonucleotide
aaccgcuaaagcagacgag

SEQ ID NO: 867860 - RNA, 19 nt, Artificial Sequence
  Description of Artificial Sequence: Synthetic oligonucleotide
cauagcccaucuugacuag

SEQ ID NO: 867861 - RNA, 19 nt, Artificial Sequence
  Description of Artificial Sequence: Synthetic oligonucleotide
uuggguccgcucaaucuuc

SEQ ID NO: 867862 - RNA, 19 nt, Artificial Sequence
  Description of Artificial Sequence: Synthetic oligonucleotide
caucggugauccgugcugg

SEQ ID NO: 867863 - RNA, 19 nt, Artificial Sequence
  Description of Artificial Sequence: Synthetic oligonucleotide
uugaagcggcauuuucccu

SEQ ID NO: 867864 - RNA, 19 nt, Artificial Sequence
  Description of Artificial Sequence: Synthetic oligonucleotide
uccuaaggagcuaccccaa

SEQ ID NO: 867865 - RNA, 19 nt, Artificial Sequence
  Description of Artificial Sequence: Synthetic oligonucleotide
gguaucugccuuccgcugc

SEQ ID NO: 867866 - RNA, 19 nt, Artificial Sequence
  Description of Artificial Sequence: Synthetic oligonucleotide
ccagugauuucccucuagg

SEQ ID NO: 867867 - RNA, 19 nt, Artificial Sequence
  Description of Artificial Sequence: Synthetic oligonucleotide
cacuacggcauggaugggc

SEQ ID NO: 867868 - RNA, 19 nt, Artificial Sequence
  Description of Artificial Sequence: Synthetic oligonucleotide
caacgcaguuuggaguugg

SEQ ID NO: 867869 - RNA, 19 nt, Artificial Sequence
  Description of Artificial Sequence: Synthetic oligonucleotide
gucuccgagucaucccacg

SEQ ID NO: 867870 - RNA, 19 nt, Artificial Sequence
  Description of Artificial Sequence: Synthetic oligonucleotide
uacgcgaacgcaugccgaa

SEQ ID NO: 867871 - RNA, 19 nt, Artificial Sequence
  Description of Artificial Sequence: Synthetic oligonucleotide
accagcaaaggcagaacug

SEQ ID NO: 867872 - RNA, 19 nt, Artificial Sequence
  Description of Artificial Sequence: Synthetic oligonucleotide
ucccucuaggcaacacuac

SEQ ID NO: 867873 - RNA, 19 nt, Artificial Sequence
  Description of Artificial Sequence: Synthetic oligonucleotide
gaguacgcgaacgcaugcc

SEQ ID NO: 867874 - RNA, 19 nt, Artificial Sequence
  Description of Artificial Sequence: Synthetic oligonucleotide
caggcuaguuucggaaccg

SEQ ID NO: 867875 - RNA, 19 nt, Artificial Sequence
  Description of Artificial Sequence: Synthetic oligonucleotide
agcggcauuuucccuccag

SEQ ID NO: 867876 - RNA, 19 nt, Artificial Sequence
  Description of Artificial Sequence: Synthetic oligonucleotide
uaccugcccgagcugggcc

SEQ ID NO: 867877 - RNA, 19 nt, Artificial Sequence
  Description of Artificial Sequence: Synthetic oligonucleotide
cuaggcaacacuacggcau

SEQ ID NO: 867878 - RNA, 19 nt, Artificial Sequence
  Description of Artificial Sequence: Synthetic oligonucleotide
cugacccaguuuccgcugg

SEQ ID NO: 867879 - RNA, 19 nt, Artificial Sequence
  Description of Artificial Sequence: Synthetic oligonucleotide
gcguugugauacucuagcg

SEQ ID NO: 867880 - RNA, 19 nt, Artificial Sequence
  Description of Artificial Sequence: Synthetic oligonucleotide
cucuagcgugccccaagcg

SEQ ID NO: 867881 - RNA, 19 nt, Artificial Sequence
  Description of Artificial Sequence: Synthetic oligonucleotide
gauacauguccuuguuccu

SEQ ID NO: 867882 - RNA, 19 nt, Artificial Sequence
  Description of Artificial Sequence: Synthetic oligonucleotide
gaacgcaugccgaaccauc

SEQ ID NO: 867883 - RNA, 19 nt, Artificial Sequence
  Description of Artificial Sequence: Synthetic oligonucleotide
ggaaccgcuaaagcagacg

SEQ ID NO: 867884 - RNA, 19 nt, Artificial Sequence
  Description of Artificial Sequence: Synthetic oligonucleotide
aucggugauccgugcuggg

SEQ ID NO: 867885 - RNA, 19 nt, Artificial Sequence
  Description of Artificial Sequence: Synthetic oligonucleotide
caccgcgcaggcuaguuuc

SEQ ID NO: 867886 - RNA, 19 nt, Artificial Sequence
  Description of Artificial Sequence: Synthetic oligonucleotide
cuacucaguaguauucaua

SEQ ID NO: 867887 - RNA, 19 nt, Artificial Sequence
  Description of Artificial Sequence: Synthetic oligonucleotide
uggagccaaugccucgugu

SEQ ID NO: 867888 - RNA, 19 nt, Artificial Sequence
  Description of Artificial Sequence: Synthetic oligonucleotide
augcugucucccucuacca

SEQ ID NO: 867889 - RNA, 19 nt, Artificial Sequence
  Description of Artificial Sequence: Synthetic oligonucleotide
acuacggcauggaugggcu

SEQ ID NO: 867890 - RNA, 19 nt, Artificial Sequence
  Description of Artificial Sequence: Synthetic oligonucleotide
gaguuuggagccaaugccu

SEQ ID NO: 867891 - RNA, 19 nt, Artificial Sequence
  Description of Artificial Sequence: Synthetic oligonucleotide
gacgagaccugagggaaga

SEQ ID NO: 867892 - RNA, 19 nt, Artificial Sequence
  Description of Artificial Sequence: Synthetic oligonucleotide
uaguuucggaaccgcuaaa

SEQ ID NO: 867893 - RNA, 19 nt, Artificial Sequence
  Description of Artificial Sequence: Synthetic oligonucleotide
cuguaguaucucugugcac

SEQ ID NO: 867894 - RNA, 19 nt, Artificial Sequence
  Description of Artificial Sequence: Synthetic oligonucleotide
cacucuggcauagcuggag

SEQ ID NO: 867895 - RNA, 19 nt, Artificial Sequence
  Description of Artificial Sequence: Synthetic oligonucleotide
gucuacucaguaguauuca

SEQ ID NO: 867896 - RNA, 19 nt, Artificial Sequence
  Description of Artificial Sequence: Synthetic oligonucleotide
gcggcauuuucccuccagg

SEQ ID NO: 867897 - RNA, 19 nt, Artificial Sequence
  Description of Artificial Sequence: Synthetic oligonucleotide
uccgcaagcucggaagcgu

SEQ ID NO: 867898 - RNA, 19 nt, Artificial Sequence
  Description of Artificial Sequence: Synthetic oligonucleotide
accauugcguugugauacu

SEQ ID NO: 867899 - RNA, 19 nt, Artificial Sequence
  Description of Artificial Sequence: Synthetic oligonucleotide
cccucuaggcaacacuacg

SEQ ID NO: 867900 - RNA, 19 nt, Artificial Sequence
  Description of Artificial Sequence: Synthetic oligonucleotide
uuaauguccuaaggagcua

SEQ ID NO: 867901 - RNA, 19 nt, Artificial Sequence
  Description of Artificial Sequence: Synthetic oligonucleotide
ggcugcuaaaacucuguca

SEQ ID NO: 867902 - RNA, 19 nt, Artificial Sequence
  Description of Artificial Sequence: Synthetic oligonucleotide
cugcuaaaacucugucauc

SEQ ID NO: 867903 - RNA, 19 nt, Artificial Sequence
  Description of Artificial Sequence: Synthetic oligonucleotide
aguuuggaguuggucccag

SEQ ID NO: 867904 - RNA, 19 nt, Artificial Sequence
  Description of Artificial Sequence: Synthetic oligonucleotide
cuauuggucccagccuggc

SEQ ID NO: 867905 - RNA, 19 nt, Artificial Sequence
  Description of Artificial Sequence: Synthetic oligonucleotide
auacauguccuuguuccuu

SEQ ID NO: 867906 - RNA, 19 nt, Artificial Sequence
  Description of Artificial Sequence: Synthetic oligonucleotide
ggugauccgugcugggugc

SEQ ID NO: 867907 - RNA, 19 nt, Artificial Sequence
  Description of Artificial Sequence: Synthetic oligonucleotide
uccggguuagggccuccug

SEQ ID NO: 867908 - RNA, 19 nt, Artificial Sequence
  Description of Artificial Sequence: Synthetic oligonucleotide
gcaguaagcucaagucugg

SEQ ID NO: 867909 - RNA, 19 nt, Artificial Sequence
  Description of Artificial Sequence: Synthetic oligonucleotide
accccaagacacugguaga

SEQ ID NO: 867910 - RNA, 19 nt, Artificial Sequence
  Description of Artificial Sequence: Synthetic oligonucleotide
ccagcauuccggguuaggg

SEQ ID NO: 867911 - RNA, 19 nt, Artificial Sequence
  Description of Artificial Sequence: Synthetic oligonucleotide
acuaggaguuuggagccaa

SEQ ID NO: 867912 - RNA, 19 nt, Artificial Sequence
  Description of Artificial Sequence: Synthetic oligonucleotide
gugauacucuagcgugccc

SEQ ID NO: 867913 - RNA, 19 nt, Artificial Sequence
  Description of Artificial Sequence: Synthetic oligonucleotide
guuguccucguccaucgcu

SEQ ID NO: 867914 - RNA, 19 nt, Artificial Sequence
  Description of Artificial Sequence: Synthetic oligonucleotide
cuagcgugccccaagcgcu

SEQ ID NO: 867915 - RNA, 19 nt, Artificial Sequence
  Description of Artificial Sequence: Synthetic oligonucleotide
agccgucuuucugccaacg

SEQ ID NO: 867916 - RNA, 19 nt, Artificial Sequence
  Description of Artificial Sequence: Synthetic oligonucleotide
gguagaguacgcgaacgca

SEQ ID NO: 867917 - RNA, 19 nt, Artificial Sequence
  Description of Artificial Sequence: Synthetic oligonucleotide
aggcaacacuacggcaugg

SEQ ID NO: 867918 - RNA, 19 nt, Artificial Sequence
  Description of Artificial Sequence: Synthetic oligonucleotide
gaggccuauuggucccagc

SEQ ID NO: 867919 - RNA, 19 nt, Artificial Sequence
  Description of Artificial Sequence: Synthetic oligonucleotide
cuguggguaucugccuucc

SEQ ID NO: 867920 - RNA, 19 nt, Artificial Sequence
  Description of Artificial Sequence: Synthetic oligonucleotide
ugagcucuaucaguuccuu

SEQ ID NO: 867921 - RNA, 19 nt, Artificial Sequence
  Description of Artificial Sequence: Synthetic oligonucleotide
ucggugauccgugcugggu

SEQ ID NO: 867922 - RNA, 19 nt, Artificial Sequence
  Description of Artificial Sequence: Synthetic oligonucleotide
caagcucggaagcguccag

SEQ ID NO: 867923 - RNA, 19 nt, Artificial Sequence
  Description of Artificial Sequence: Synthetic oligonucleotide
cagacgagaccugagggaa

SEQ ID NO: 867924 - RNA, 19 nt, Artificial Sequence
  Description of Artificial Sequence: Synthetic oligonucleotide
cuaccaccacuccuccgac

SEQ ID NO: 867925 - RNA, 19 nt, Artificial Sequence
  Description of Artificial Sequence: Synthetic oligonucleotide
gacacugguagaugggcuu

SEQ ID NO: 867926 - RNA, 19 nt, Artificial Sequence
  Description of Artificial Sequence: Synthetic oligonucleotide
gucccguuggguccgcuca

SEQ ID NO: 867927 - RNA, 19 nt, Artificial Sequence
  Description of Artificial Sequence: Synthetic oligonucleotide
ccucugugcgcagaggagg

SEQ ID NO: 867928 - RNA, 19 nt, Artificial Sequence
  Description of Artificial Sequence: Synthetic oligonucleotide
accacgcucccagggacag

SEQ ID NO: 867929 - RNA, 19 nt, Artificial Sequence
  Description of Artificial Sequence: Synthetic oligonucleotide
acgcgaacgcaugccgaac

SEQ ID NO: 867930 - RNA, 19 nt, Artificial Sequence
  Description of Artificial Sequence: Synthetic oligonucleotide
cauugcguugugauacucu

SEQ ID NO: 867931 - RNA, 19 nt, Artificial Sequence
  Description of Artificial Sequence: Synthetic oligonucleotide
ccaguuuccgcugggcucc

SEQ ID NO: 867932 - RNA, 19 nt, Artificial Sequence
  Description of Artificial Sequence: Synthetic oligonucleotide
ggucuaccaccacuccucc

SEQ ID NO: 867933 - RNA, 19 nt, Artificial Sequence
  Description of Artificial Sequence: Synthetic oligonucleotide
gguccagugauuucccucu

SEQ ID NO: 867934 - RNA, 19 nt, Artificial Sequence
  Description of Artificial Sequence: Synthetic oligonucleotide
ccggguuagggccuccugg

SEQ ID NO: 867935 - RNA, 19 nt, Artificial Sequence
  Description of Artificial Sequence: Synthetic oligonucleotide
ccccaugucuacucaguag

SEQ ID NO: 867936 - RNA, 19 nt, Artificial Sequence
  Description of Artificial Sequence: Synthetic oligonucleotide
ugucccguuggguccgcuc

SEQ ID NO: 867937 - RNA, 19 nt, Artificial Sequence
  Description of Artificial Sequence: Synthetic oligonucleotide
ccaagcgcugugguaaggg

SEQ ID NO: 867938 - RNA, 19 nt, Artificial Sequence
  Description of Artificial Sequence: Synthetic oligonucleotide
guguuugguuccaccacuc

SEQ ID NO: 867939 - RNA, 19 nt, Artificial Sequence
  Description of Artificial Sequence: Synthetic oligonucleotide
guagaguacgcgaacgcau

SEQ ID NO: 867940 - RNA, 19 nt, Artificial Sequence
  Description of Artificial Sequence: Synthetic oligonucleotide
gaucgcccugcagcuggcg

SEQ ID NO: 867941 - RNA, 19 nt, Artificial Sequence
  Description of Artificial Sequence: Synthetic oligonucleotide
agacgagaccugagggaag

SEQ ID NO: 867942 - RNA, 19 nt, Artificial Sequence
  Description of Artificial Sequence: Synthetic oligonucleotide
ucucaggcgccuggcuuug

SEQ ID NO: 867943 - RNA, 19 nt, Artificial Sequence
  Description of Artificial Sequence: Synthetic oligonucleotide
agaucgcccugcagcuggc

SEQ ID NO: 867944 - RNA, 19 nt, Artificial Sequence
  Description of Artificial Sequence: Synthetic oligonucleotide
cuaccugcccgagcugggc

SEQ ID NO: 867945 - RNA, 19 nt, Artificial Sequence
  Description of Artificial Sequence: Synthetic oligonucleotide
ccucguguauguaccuccc

SEQ ID NO: 867946 - RNA, 19 nt, Artificial Sequence
  Description of Artificial Sequence: Synthetic oligonucleotide
ggagccaaugccucgugua

SEQ ID NO: 867947 - RNA, 19 nt, Artificial Sequence
  Description of Artificial Sequence: Synthetic oligonucleotide
ugauccgugcugggugcca

SEQ ID NO: 867948 - RNA, 19 nt, Artificial Sequence
  Description of Artificial Sequence: Synthetic oligonucleotide
caaccauugcguugugaua

SEQ ID NO: 867949 - RNA, 19 nt, Artificial Sequence
  Description of Artificial Sequence: Synthetic oligonucleotide
gccagacaagcagagccag

SEQ ID NO: 867950 - RNA, 19 nt, Artificial Sequence
  Description of Artificial Sequence: Synthetic oligonucleotide
ggaugucccguuggguccg

SEQ ID NO: 867951 - RNA, 19 nt, Artificial Sequence
  Description of Artificial Sequence: Synthetic oligonucleotide
gagccaaugccucguguau

SEQ ID NO: 867952 - RNA, 19 nt, Artificial Sequence
  Description of Artificial Sequence: Synthetic oligonucleotide
ucccguuggguccgcucaa

SEQ ID NO: 867953 - RNA, 19 nt, Artificial Sequence
  Description of Artificial Sequence: Synthetic oligonucleotide
cacuugcaucaccacuguc

SEQ ID NO: 867954 - RNA, 19 nt, Artificial Sequence
  Description of Artificial Sequence: Synthetic oligonucleotide
cguccaucgcuacaccgcg

SEQ ID NO: 867955 - RNA, 19 nt, Artificial Sequence
  Description of Artificial Sequence: Synthetic oligonucleotide
gacuaggaguuuggagcca

SEQ ID NO: 867956 - RNA, 19 nt, Artificial Sequence
  Description of Artificial Sequence: Synthetic oligonucleotide
accgcgcaggcuaguuucg

SEQ ID NO: 867957 - RNA, 19 nt, Artificial Sequence
  Description of Artificial Sequence: Synthetic oligonucleotide
ccgacaacaggcuggccuc

SEQ ID NO: 867958 - RNA, 19 nt, Artificial Sequence
  Description of Artificial Sequence: Synthetic oligonucleotide
gcccacaaccauugcguug

SEQ ID NO: 867959 - RNA, 19 nt, Artificial Sequence
  Description of Artificial Sequence: Synthetic oligonucleotide
cucguguauguaccuccca

SEQ ID NO: 867960 - RNA, 19 nt, Artificial Sequence
  Description of Artificial Sequence: Synthetic oligonucleotide
aagcggcauuuucccucca

SEQ ID NO: 867961 - RNA, 19 nt, Artificial Sequence
  Description of Artificial Sequence: Synthetic oligonucleotide
guacgcgaacgcaugccga

SEQ ID NO: 867962 - RNA, 19 nt, Artificial Sequence
  Description of Artificial Sequence: Synthetic oligonucleotide
ggcccucgggucuaccacc

SEQ ID NO: 867963 - RNA, 19 nt, Artificial Sequence
  Description of Artificial Sequence: Synthetic oligonucleotide
ccuaaggagcuaccccaag

SEQ ID NO: 867964 - RNA, 19 nt, Artificial Sequence
  Description of Artificial Sequence: Synthetic oligonucleotide
gcagugagucaaauuuaac

SEQ ID NO: 867965 - RNA, 19 nt, Artificial Sequence
  Description of Artificial Sequence: Synthetic oligonucleotide
guaucugccuuccgcugcu

SEQ ID NO: 867966 - RNA, 19 nt, Artificial Sequence
  Description of Artificial Sequence: Synthetic oligonucleotide
acucggccuucugcaugcc

SEQ ID NO: 867967 - RNA, 19 nt, Artificial Sequence
  Description of Artificial Sequence: Synthetic oligonucleotide
gcugugguaaggggcauuc

SEQ ID NO: 867968 - RNA, 19 nt, Artificial Sequence
  Description of Artificial Sequence: Synthetic oligonucleotide
cuacggcauggaugggcuc

SEQ ID NO: 867969 - RNA, 19 nt, Artificial Sequence
  Description of Artificial Sequence: Synthetic oligonucleotide
augccgacccaaacccuug

SEQ ID NO: 867970 - RNA, 19 nt, Artificial Sequence
  Description of Artificial Sequence: Synthetic oligonucleotide
cagcucuaccugcccgagc

SEQ ID NO: 867971 - RNA, 19 nt, Artificial Sequence
  Description of Artificial Sequence: Synthetic oligonucleotide
acaccgcgcaggcuaguuu

SEQ ID NO: 867972 - RNA, 19 nt, Artificial Sequence
  Description of Artificial Sequence: Synthetic oligonucleotide
gugucagggugccagccgu

SEQ ID NO: 867973 - RNA, 19 nt, Artificial Sequence
  Description of Artificial Sequence: Synthetic oligonucleotide
gccgucuuucugccaacgc

SEQ ID NO: 867974 - RNA, 19 nt, Artificial Sequence
  Description of Artificial Sequence: Synthetic oligonucleotide
gcucggaagcguccaggcc

SEQ ID NO: 867975 - RNA, 19 nt, Artificial Sequence
  Description of Artificial Sequence: Synthetic oligonucleotide
uccuccugaucuggauccu

SEQ ID NO: 867976 - RNA, 19 nt, Artificial Sequence
  Description of Artificial Sequence: Synthetic oligonucleotide
ccugaccgacaacaggcug

SEQ ID NO: 867977 - RNA, 19 nt, Artificial Sequence
  Description of Artificial Sequence: Synthetic oligonucleotide
uggaggccuauugguccca

SEQ ID NO: 867978 - RNA, 19 nt, Artificial Sequence
  Description of Artificial Sequence: Synthetic oligonucleotide
ccgucuuucugccaacgca

SEQ ID NO: 867979 - RNA, 19 nt, Artificial Sequence
  Description of Artificial Sequence: Synthetic oligonucleotide
gcuaguuucggaaccgcua

SEQ ID NO: 867980 - RNA, 19 nt, Artificial Sequence
  Description of Artificial Sequence: Synthetic oligonucleotide
uacaccgcgcaggcuaguu

SEQ ID NO: 867981 - RNA, 19 nt, Artificial Sequence
  Description of Artificial Sequence: Synthetic oligonucleotide
ccacaauauaggcagggcu

SEQ ID NO: 867982 - RNA, 19 nt, Artificial Sequence
  Description of Artificial Sequence: Synthetic oligonucleotide
cugagucagaugacucugu

SEQ ID NO: 867983 - RNA, 19 nt, Artificial Sequence
  Description of Artificial Sequence: Synthetic oligonucleotide
acacuacggcauggauggg

SEQ ID NO: 867984 - RNA, 19 nt, Artificial Sequence
  Description of Artificial Sequence: Synthetic oligonucleotide
ggauccuggaaagggcgca

SEQ ID NO: 867985 - RNA, 19 nt, Artificial Sequence
  Description of Artificial Sequence: Synthetic oligonucleotide
gcccaucuugacuaggagu

SEQ ID NO: 867986 - RNA, 19 nt, Artificial Sequence
  Description of Artificial Sequence: Synthetic oligonucleotide
gcuaccccaagacacuggu

SEQ ID NO: 867987 - RNA, 19 nt, Artificial Sequence
  Description of Artificial Sequence: Synthetic oligonucleotide
cagccgucuuucugccaac

SEQ ID NO: 867988 - RNA, 19 nt, Artificial Sequence
  Description of Artificial Sequence: Synthetic oligonucleotide
gugauccgugcugggugcc

SEQ ID NO: 867989 - RNA, 19 nt, Artificial Sequence
  Description of Artificial Sequence: Synthetic oligonucleotide
gauccgugcugggugccaa

SEQ ID NO: 867990 - RNA, 19 nt, Artificial Sequence
  Description of Artificial Sequence: Synthetic oligonucleotide
gcuacaccgcgcaggcuag

SEQ ID NO: 867991 - RNA, 19 nt, Artificial Sequence
  Description of Artificial Sequence: Synthetic oligonucleotide
cacaaccauugcguuguga

SEQ ID NO: 867992 - RNA, 19 nt, Artificial Sequence
  Description of Artificial Sequence: Synthetic oligonucleotide
ggcaacacuacggcaugga

SEQ ID NO: 867993 - RNA, 19 nt, Artificial Sequence
  Description of Artificial Sequence: Synthetic oligonucleotide
cgcgaacgcaugccgaacc

SEQ ID NO: 867994 - RNA, 19 nt, Artificial Sequence
  Description of Artificial Sequence: Synthetic oligonucleotide
caugccgacccaaacccuu

SEQ ID NO: 867995 - RNA, 19 nt, Artificial Sequence
  Description of Artificial Sequence: Synthetic oligonucleotide
uuccgguguccacgguguu

SEQ ID NO: 867996 - RNA, 19 nt, Artificial Sequence
  Description of Artificial Sequence: Synthetic oligonucleotide
gcgaacgcaugccgaacca

SEQ ID NO: 867997 - RNA, 19 nt, Artificial Sequence
  Description of Artificial Sequence: Synthetic oligonucleotide
ccgugcugggugccaaagg

SEQ ID NO: 867998 - RNA, 19 nt, Artificial Sequence
  Description of Artificial Sequence: Synthetic oligonucleotide
guccaucgcuacaccgcgc

SEQ ID NO: 867999 - RNA, 19 nt, Artificial Sequence
  Description of Artificial Sequence: Synthetic oligonucleotide
ccacaucggugauccgugc

SEQ ID NO: 868000 - RNA, 19 nt, Artificial Sequence
  Description of Artificial Sequence: Synthetic oligonucleotide
cacaucggugauccgugcu

SEQ ID NO: 868001 - RNA, 19 nt, Artificial Sequence
  Description of Artificial Sequence: Synthetic oligonucleotide
caccccaugucuacucagu

SEQ ID NO: 868002 - RNA, 19 nt, Artificial Sequence
  Description of Artificial Sequence: Synthetic oligonucleotide
gcgcaggcuaguuucggaa

SEQ ID NO: 868003 - RNA, 19 nt, Artificial Sequence
  Description of Artificial Sequence: Synthetic oligonucleotide
gccccaagcgcugugguaa

SEQ ID NO: 868004 - RNA, 19 nt, Artificial Sequence
  Description of Artificial Sequence: Synthetic oligonucleotide
gccaacgcaguuuggaguu

SEQ ID NO: 868005 - RNA, 19 nt, Artificial Sequence
  Description of Artificial Sequence: Synthetic oligonucleotide
cgcaggcuaguuucggaac

SEQ ID NO: 868006 - RNA, 19 nt, Artificial Sequence
  Description of Artificial Sequence: Synthetic oligonucleotide
cuaccccaagacacuggua

SEQ ID NO: 868007 - RNA, 19 nt, Artificial Sequence
  Description of Artificial Sequence: Synthetic oligonucleotide
gucucaggcgccuggcuuu

SEQ ID NO: 868008 - RNA, 19 nt, Artificial Sequence
  Description of Artificial Sequence: Synthetic oligonucleotide
ccgacccaaacccuugcca

SEQ ID NO: 868009 - RNA, 19 nt, Artificial Sequence
  Description of Artificial Sequence: Synthetic oligonucleotide
gaaugggcugaacccucuu

SEQ ID NO: 868010 - RNA, 19 nt, Artificial Sequence
  Description of Artificial Sequence: Synthetic oligonucleotide
aucaacccugacaccccau

SEQ ID NO: 868011 - RNA, 19 nt, Artificial Sequence
  Description of Artificial Sequence: Synthetic oligonucleotide
gccagcauuccggguuagg

SEQ ID NO: 868012 - RNA, 19 nt, Artificial Sequence
  Description of Artificial Sequence: Synthetic oligonucleotide
cguugugauacucuagcgu

SEQ ID NO: 868013 - RNA, 19 nt, Artificial Sequence
  Description of Artificial Sequence: Synthetic oligonucleotide
ccgcaccacgcucccaggg

SEQ ID NO: 868014 - RNA, 19 nt, Artificial Sequence
  Description of Artificial Sequence: Synthetic oligonucleotide
gaccgacaacaggcuggcc

SEQ ID NO: 868015 - RNA, 19 nt, Artificial Sequence
  Description of Artificial Sequence: Synthetic oligonucleotide
ggggcgacgggugcccucc

SEQ ID NO: 868016 - RNA, 19 nt, Artificial Sequence
  Description of Artificial Sequence: Synthetic oligonucleotide
ccucguccaucgcuacacc

SEQ ID NO: 868017 - RNA, 19 nt, Artificial Sequence
  Description of Artificial Sequence: Synthetic oligonucleotide
cccacaaccauugcguugu

SEQ ID NO: 868018 - RNA, 19 nt, Artificial Sequence
  Description of Artificial Sequence: Synthetic oligonucleotide
gcugugccggccagcauuc

SEQ ID NO: 868019 - RNA, 19 nt, Artificial Sequence
  Description of Artificial Sequence: Synthetic oligonucleotide
cauacacguuaggcugaca

SEQ ID NO: 868020 - RNA, 19 nt, Artificial Sequence
  Description of Artificial Sequence: Synthetic oligonucleotide
gccgcaccacgcucccagg

SEQ ID NO: 868021 - RNA, 19 nt, Artificial Sequence
  Description of Artificial Sequence: Synthetic oligonucleotide
gguaaggggcauucacuuu

SEQ ID NO: 868022 - RNA, 19 nt, Artificial Sequence
  Description of Artificial Sequence: Synthetic oligonucleotide
cccgguaggucugcagggc

SEQ ID NO: 868023 - RNA, 19 nt, Artificial Sequence
  Description of Artificial Sequence: Synthetic oligonucleotide
ucgcuacaccgcgcaggcu

SEQ ID NO: 868024 - RNA, 19 nt, Artificial Sequence
  Description of Artificial Sequence: Synthetic oligonucleotide
ccaugucuacucaguagua

SEQ ID NO: 868025 - RNA, 19 nt, Artificial Sequence
  Description of Artificial Sequence: Synthetic oligonucleotide
cugugccggccagcauucc

SEQ ID NO: 868026 - RNA, 19 nt, Artificial Sequence
  Description of Artificial Sequence: Synthetic oligonucleotide
ccaucgcuacaccgcgcag

SEQ ID NO: 868027 - RNA, 19 nt, Artificial Sequence
  Description of Artificial Sequence: Synthetic oligonucleotide
ccgcaagcucggaagcguc

SEQ ID NO: 868028 - RNA, 19 nt, Artificial Sequence
  Description of Artificial Sequence: Synthetic oligonucleotide
ccccaagcgcugugguaag

SEQ ID NO: 868029 - RNA, 19 nt, Artificial Sequence
  Description of Artificial Sequence: Synthetic oligonucleotide
caguuuccgcugggcuccc

SEQ ID NO: 868030 - RNA, 19 nt, Artificial Sequence
  Description of Artificial Sequence: Synthetic oligonucleotide
cucaggcgccuggcuuugc

SEQ ID NO: 868031 - RNA, 19 nt, Artificial Sequence
  Description of Artificial Sequence: Synthetic oligonucleotide
cccaagcgcugugguaagg

SEQ ID NO: 868032 - RNA, 19 nt, Artificial Sequence
  Description of Artificial Sequence: Synthetic oligonucleotide
guaggucugcagggccguc

SEQ ID NO: 868033 - RNA, 19 nt, Artificial Sequence
  Description of Artificial Sequence: Synthetic oligonucleotide
caccugcccaugggagaac

SEQ ID NO: 868034 - RNA, 19 nt, Artificial Sequence
  Description of Artificial Sequence: Synthetic oligonucleotide
ccguuggguccgcucaauc

SEQ ID NO: 868035 - RNA, 19 nt, Artificial Sequence
  Description of Artificial Sequence: Synthetic oligonucleotide
ggcuaguuucggaaccgcu

SEQ ID NO: 868036 - RNA, 19 nt, Artificial Sequence
  Description of Artificial Sequence: Synthetic oligonucleotide
cggguuagggccuccugga

SEQ ID NO: 868037 - RNA, 19 nt, Artificial Sequence
  Description of Artificial Sequence: Synthetic oligonucleotide
cgcuacaccgcgcaggcua

SEQ ID NO: 868038 - RNA, 19 nt, Artificial Sequence
  Description of Artificial Sequence: Synthetic oligonucleotide
ccaacgcaguuuggaguug

SEQ ID NO: 868039 - RNA, 19 nt, Artificial Sequence
  Description of Artificial Sequence: Synthetic oligonucleotide
cggaaccgcuaaagcagac

SEQ ID NO: 868040 - RNA, 19 nt, Artificial Sequence
  Description of Artificial Sequence: Synthetic oligonucleotide
ccgcgcaggcuaguuucgg

SEQ ID NO: 868041 - RNA, 19 nt, Artificial Sequence
  Description of Artificial Sequence: Synthetic oligonucleotide
cggugagcucuaucaguuc

SEQ ID NO: 868042 - RNA, 19 nt, Artificial Sequence
  Description of Artificial Sequence: Synthetic oligonucleotide
acgcucccagggacagucu

SEQ ID NO: 868043 - RNA, 19 nt, Artificial Sequence
  Description of Artificial Sequence: Synthetic oligonucleotide
ccucgggucuaccaccacu

SEQ ID NO: 868044 - RNA, 19 nt, Artificial Sequence
  Description of Artificial Sequence: Synthetic oligonucleotide
gcgugccccaagcgcugug

SEQ ID NO: 868045 - RNA, 19 nt, Artificial Sequence
  Description of Artificial Sequence: Synthetic oligonucleotide
gcccucgggucuaccacca

SEQ ID NO: 868046 - RNA, 19 nt, Artificial Sequence
  Description of Artificial Sequence: Synthetic oligonucleotide
gcgacgggugcccuccccu

SEQ ID NO: 868047 - RNA, 19 nt, Artificial Sequence
  Description of Artificial Sequence: Synthetic oligonucleotide
ggcgccuggcuuugcaguu

SEQ ID NO: 868048 - RNA, 19 nt, Artificial Sequence
  Description of Artificial Sequence: Synthetic oligonucleotide
gggucucaggcgccuggcu

SEQ ID NO: 868049 - RNA, 19 nt, Artificial Sequence
  Description of Artificial Sequence: Synthetic oligonucleotide
cgcgcaggcuaguuucgga

SEQ ID NO: 868050 - RNA, 19 nt, Artificial Sequence
  Description of Artificial Sequence: Synthetic oligonucleotide
aggccgcaccacgcuccca

SEQ ID NO: 868051 - RNA, 19 nt, Artificial Sequence
  Description of Artificial Sequence: Synthetic oligonucleotide
gggcgacgggugcccuccc

SEQ ID NO: 868052 - RNA, 19 nt, Artificial Sequence
  Description of Artificial Sequence: Synthetic oligonucleotide
ccccaagacacugguagau

SEQ ID NO: 868053 - RNA, 19 nt, Artificial Sequence
  Description of Artificial Sequence: Synthetic oligonucleotide
ccggccagcauuccggguu

SEQ ID NO: 868054 - RNA, 19 nt, Artificial Sequence
  Description of Artificial Sequence: Synthetic oligonucleotide
gcaugccgacccaaacccu

SEQ ID NO: 868055 - RNA, 19 nt, Artificial Sequence
  Description of Artificial Sequence: Synthetic oligonucleotide
cccucgggucuaccaccac

SEQ ID NO: 868056 - RNA, 19 nt, Artificial Sequence
  Description of Artificial Sequence: Synthetic oligonucleotide
gcacuuuugcuggcaugau

SEQ ID NO: 868057 - RNA, 19 nt, Artificial Sequence
  Description of Artificial Sequence: Synthetic oligonucleotide
cuacaccgcgcaggcuagu

SEQ ID NO: 868058 - RNA, 19 nt, Artificial Sequence
  Description of Artificial Sequence: Synthetic oligonucleotide
ccgccacagccuucuggaa

SEQ ID NO: 868059 - RNA, 19 nt, Artificial Sequence
  Description of Artificial Sequence: Synthetic oligonucleotide
gccggccagcauuccgggu

SEQ ID NO: 868060 - RNA, 19 nt, Artificial Sequence
  Description of Artificial Sequence: Synthetic oligonucleotide
cgaacgcaugccgaaccau

SEQ ID NO: 868061 - RNA, 19 nt, Artificial Sequence
  Description of Artificial Sequence: Synthetic oligonucleotide
cggaagcguccaggccagc

SEQ ID NO: 868062 - RNA, 19 nt, Artificial Sequence
  Description of Artificial Sequence: Synthetic oligonucleotide
gcgccuggcuuugcaguuu

SEQ ID NO: 868063 - RNA, 19 nt, Artificial Sequence
  Description of Artificial Sequence: Synthetic oligonucleotide
cccguuggguccgcucaau

SEQ ID NO: 868064 - RNA, 19 nt, Artificial Sequence
  Description of Artificial Sequence: Synthetic oligonucleotide
cgacgggugcccuccccuu

SEQ ID NO: 868065 - RNA, 19 nt, Artificial Sequence
  Description of Artificial Sequence: Synthetic oligonucleotide
ccacgcucccagggacagu

SEQ ID NO: 868066 - RNA, 19 nt, Artificial Sequence
  Description of Artificial Sequence: Synthetic oligonucleotide
acaauaucaaaacagguuc

SEQ ID NO: 868067 - RNA, 19 nt, Artificial Sequence
  Description of Artificial Sequence: Synthetic oligonucleotide
aaaugauuggaacugguag

SEQ ID NO: 868068 - RNA, 19 nt, Artificial Sequence
  Description of Artificial Sequence: Synthetic oligonucleotide
aauauagaaguccaccucu

SEQ ID NO: 868069 - RNA, 19 nt, Artificial Sequence
  Description of Artificial Sequence: Synthetic oligonucleotide
cauaauaguauguaguuac

SEQ ID NO: 868070 - RNA, 19 nt, Artificial Sequence
  Description of Artificial Sequence: Synthetic oligonucleotide
uguaguauaauucuuugua

SEQ ID NO: 868071 - RNA, 19 nt, Artificial Sequence
  Description of Artificial Sequence: Synthetic oligonucleotide
aucaauauagaaguccacc

SEQ ID NO: 868072 - RNA, 19 nt, Artificial Sequence
  Description of Artificial Sequence: Synthetic oligonucleotide
aggcauagggaucauacgc

SEQ ID NO: 868073 - RNA, 19 nt, Artificial Sequence
  Description of Artificial Sequence: Synthetic oligonucleotide
aaugauuggaacugguaga

SEQ ID NO: 868074 - RNA, 19 nt, Artificial Sequence
  Description of Artificial Sequence: Synthetic oligonucleotide
guuucaacucagcugaugg

SEQ ID NO: 868075 - RNA, 19 nt, Artificial Sequence
  Description of Artificial Sequence: Synthetic oligonucleotide
ugaacauuccagauuuuag

SEQ ID NO: 868076 - RNA, 19 nt, Artificial Sequence
  Description of Artificial Sequence: Synthetic oligonucleotide
aacauaauaguauguaguu

SEQ ID NO: 868077 - RNA, 19 nt, Artificial Sequence
  Description of Artificial Sequence: Synthetic oligonucleotide
ucugcaauauggaucaugu

SEQ ID NO: 868078 - RNA, 19 nt, Artificial Sequence
  Description of Artificial Sequence: Synthetic oligonucleotide
aacaaagacccuuuacuga

SEQ ID NO: 868079 - RNA, 19 nt, Artificial Sequence
  Description of Artificial Sequence: Synthetic oligonucleotide
ucaauauagaaguccaccu

SEQ ID NO: 868080 - RNA, 19 nt, Artificial Sequence
  Description of Artificial Sequence: Synthetic oligonucleotide
acaaagacccuuuacugag

SEQ ID NO: 868081 - RNA, 19 nt, Artificial Sequence
  Description of Artificial Sequence: Synthetic oligonucleotide
agaauacagcaucauugcc

SEQ ID NO: 868082 - RNA, 19 nt, Artificial Sequence
  Description of Artificial Sequence: Synthetic oligonucleotide
agauuuuaggguuggaucu

SEQ ID NO: 868083 - RNA, 19 nt, Artificial Sequence
  Description of Artificial Sequence: Synthetic oligonucleotide
uggaauucgccaucuaggg

SEQ ID NO: 868084 - RNA, 19 nt, Artificial Sequence
  Description of Artificial Sequence: Synthetic oligonucleotide
uacaauaucaaaacagguu

SEQ ID NO: 868085 - RNA, 19 nt, Artificial Sequence
  Description of Artificial Sequence: Synthetic oligonucleotide
gaagagauuacaguaguug

SEQ ID NO: 868086 - RNA, 19 nt, Artificial Sequence
  Description of Artificial Sequence: Synthetic oligonucleotide
uuacaguaguuguaguagg

SEQ ID NO: 868087 - RNA, 19 nt, Artificial Sequence
  Description of Artificial Sequence: Synthetic oligonucleotide
ucauaguugggcaccacag

SEQ ID NO: 868088 - RNA, 19 nt, Artificial Sequence
  Description of Artificial Sequence: Synthetic oligonucleotide
aaaucugagaccguuuugu

SEQ ID NO: 868089 - RNA, 19 nt, Artificial Sequence
  Description of Artificial Sequence: Synthetic oligonucleotide
cugacuaaaugauuggaac

SEQ ID NO: 868090 - RNA, 19 nt, Artificial Sequence
  Description of Artificial Sequence: Synthetic oligonucleotide
uugauuugaacaaguuuca

SEQ ID NO: 868091 - RNA, 19 nt, Artificial Sequence
  Description of Artificial Sequence: Synthetic oligonucleotide
uuuaggguucgauuaagcu

SEQ ID NO: 868092 - RNA, 19 nt, Artificial Sequence
  Description of Artificial Sequence: Synthetic oligonucleotide
uuaggguucgauuaagcuc

SEQ ID NO: 868093 - RNA, 19 nt, Artificial Sequence
  Description of Artificial Sequence: Synthetic oligonucleotide
aucaucaaauaugcaaagc

SEQ ID NO: 868094 - RNA, 19 nt, Artificial Sequence
  Description of Artificial Sequence: Synthetic oligonucleotide
aagcucguacacuuucugg

SEQ ID NO: 868095 - RNA, 19 nt, Artificial Sequence
  Description of Artificial Sequence: Synthetic oligonucleotide
ucgauuaagcucuucaaau

SEQ ID NO: 868096 - RNA, 19 nt, Artificial Sequence
  Description of Artificial Sequence: Synthetic oligonucleotide
gacgcaucaucaaauaugc

SEQ ID NO: 868097 - RNA, 19 nt, Artificial Sequence
  Description of Artificial Sequence: Synthetic oligonucleotide
agagcgauugccaacagag

SEQ ID NO: 868098 - RNA, 19 nt, Artificial Sequence
  Description of Artificial Sequence: Synthetic oligonucleotide
ucaaauaugcaaagccaac

SEQ ID NO: 868099 - RNA, 19 nt, Artificial Sequence
  Description of Artificial Sequence: Synthetic oligonucleotide
auagccugguaguaauccc

SEQ ID NO: 868100 - RNA, 19 nt, Artificial Sequence
  Description of Artificial Sequence: Synthetic oligonucleotide
aaagacccggauagcaucc

SEQ ID NO: 868101 - RNA, 19 nt, Artificial Sequence
  Description of Artificial Sequence: Synthetic oligonucleotide
ugauauuggauuugucuac

SEQ ID NO: 868102 - RNA, 19 nt, Artificial Sequence
  Description of Artificial Sequence: Synthetic oligonucleotide
uuuacugagagcucccuaa

SEQ ID NO: 868103 - RNA, 19 nt, Artificial Sequence
  Description of Artificial Sequence: Synthetic oligonucleotide
cagagcaugcaucugcucg

SEQ ID NO: 868104 - RNA, 19 nt, Artificial Sequence
  Description of Artificial Sequence: Synthetic oligonucleotide
uuaagaauacagcaucauu

SEQ ID NO: 868105 - RNA, 19 nt, Artificial Sequence
  Description of Artificial Sequence: Synthetic oligonucleotide
ucacuagagacacgacugg

SEQ ID NO: 868106 - RNA, 19 nt, Artificial Sequence
  Description of Artificial Sequence: Synthetic oligonucleotide
augacgucacuagagacac

SEQ ID NO: 868107 - RNA, 19 nt, Artificial Sequence
  Description of Artificial Sequence: Synthetic oligonucleotide
auaauaguauguaguuacc

SEQ ID NO: 868108 - RNA, 19 nt, Artificial Sequence
  Description of Artificial Sequence: Synthetic oligonucleotide
ucaucagcgggauaagaca

SEQ ID NO: 868109 - RNA, 19 nt, Artificial Sequence
  Description of Artificial Sequence: Synthetic oligonucleotide
agacccuuuacugagagcu

SEQ ID NO: 868110 - RNA, 19 nt, Artificial Sequence
  Description of Artificial Sequence: Synthetic oligonucleotide
gaucucguacaccuucugg

SEQ ID NO: 868111 - RNA, 19 nt, Artificial Sequence
  Description of Artificial Sequence: Synthetic oligonucleotide
uuucaguuaguuuggucca

SEQ ID NO: 868112 - RNA, 19 nt, Artificial Sequence
  Description of Artificial Sequence: Synthetic oligonucleotide
ucaucucauacuuguaugu

SEQ ID NO: 868113 - RNA, 19 nt, Artificial Sequence
  Description of Artificial Sequence: Synthetic oligonucleotide
cucauaaauguccuggauc

SEQ ID NO: 868114 - RNA, 19 nt, Artificial Sequence
  Description of Artificial Sequence: Synthetic oligonucleotide
auaguugggcaccacaggu

SEQ ID NO: 868115 - RNA, 19 nt, Artificial Sequence
  Description of Artificial Sequence: Synthetic oligonucleotide
aaugacgucacuagagaca

SEQ ID NO: 868116 - RNA, 19 nt, Artificial Sequence
  Description of Artificial Sequence: Synthetic oligonucleotide
cagauuuuaggguuggauc

SEQ ID NO: 868117 - RNA, 19 nt, Artificial Sequence
  Description of Artificial Sequence: Synthetic oligonucleotide
gaauacagcaucauugcca

SEQ ID NO: 868118 - RNA, 19 nt, Artificial Sequence
  Description of Artificial Sequence: Synthetic oligonucleotide
aaucugagaccguuuugug

SEQ ID NO: 868119 - RNA, 19 nt, Artificial Sequence
  Description of Artificial Sequence: Synthetic oligonucleotide
agcgggauaagacauggcu

SEQ ID NO: 868120 - RNA, 19 nt, Artificial Sequence
  Description of Artificial Sequence: Synthetic oligonucleotide
auuugucuaccagagaaug

SEQ ID NO: 868121 - RNA, 19 nt, Artificial Sequence
  Description of Artificial Sequence: Synthetic oligonucleotide
uuggaucuaaggaagucaa

SEQ ID NO: 868122 - RNA, 19 nt, Artificial Sequence
  Description of Artificial Sequence: Synthetic oligonucleotide
acuaaaugauuggaacugg

SEQ ID NO: 868123 - RNA, 19 nt, Artificial Sequence
  Description of Artificial Sequence: Synthetic oligonucleotide
acuugggacaggcauagcu

SEQ ID NO: 868124 - RNA, 19 nt, Artificial Sequence
  Description of Artificial Sequence: Synthetic oligonucleotide
guuaguuugguccagcugu

SEQ ID NO: 868125 - RNA, 19 nt, Artificial Sequence
  Description of Artificial Sequence: Synthetic oligonucleotide
ucagcgggauaagacaugg

SEQ ID NO: 868126 - RNA, 19 nt, Artificial Sequence
  Description of Artificial Sequence: Synthetic oligonucleotide
uuugaucacuucaggaauc

SEQ ID NO: 868127 - RNA, 19 nt, Artificial Sequence
  Description of Artificial Sequence: Synthetic oligonucleotide
auauaguugaagagauuac

SEQ ID NO: 868128 - RNA, 19 nt, Artificial Sequence
  Description of Artificial Sequence: Synthetic oligonucleotide
agacucguagucaucagcg

SEQ ID NO: 868129 - RNA, 19 nt, Artificial Sequence
  Description of Artificial Sequence: Synthetic oligonucleotide
agaauauaguugaagagau

SEQ ID NO: 868130 - RNA, 19 nt, Artificial Sequence
  Description of Artificial Sequence: Synthetic oligonucleotide
ggcauagcuaaacaguucc

SEQ ID NO: 868131 - RNA, 19 nt, Artificial Sequence
  Description of Artificial Sequence: Synthetic oligonucleotide
uacaguaguuguaguagga

SEQ ID NO: 868132 - RNA, 19 nt, Artificial Sequence
  Description of Artificial Sequence: Synthetic oligonucleotide
ucugcucuaaggaggggcc

SEQ ID NO: 868133 - RNA, 19 nt, Artificial Sequence
  Description of Artificial Sequence: Synthetic oligonucleotide
ugucgguugauauuggauu

SEQ ID NO: 868134 - RNA, 19 nt, Artificial Sequence
  Description of Artificial Sequence: Synthetic oligonucleotide
cuuuaggguucgauuaagc

SEQ ID NO: 868135 - RNA, 19 nt, Artificial Sequence
  Description of Artificial Sequence: Synthetic oligonucleotide
guaguuaccuggcacucag

SEQ ID NO: 868136 - RNA, 19 nt, Artificial Sequence
  Description of Artificial Sequence: Synthetic oligonucleotide
auguacaggaggauguugg

SEQ ID NO: 868137 - RNA, 19 nt, Artificial Sequence
  Description of Artificial Sequence: Synthetic oligonucleotide
caccugauaggucuguugc

SEQ ID NO: 868138 - RNA, 19 nt, Artificial Sequence
  Description of Artificial Sequence: Synthetic oligonucleotide
uccgucagcauugagaaua

SEQ ID NO: 868139 - RNA, 19 nt, Artificial Sequence
  Description of Artificial Sequence: Synthetic oligonucleotide
gauuacaguaguuguagua

SEQ ID NO: 868140 - RNA, 19 nt, Artificial Sequence
  Description of Artificial Sequence: Synthetic oligonucleotide
agcucguacacuuucuggu

SEQ ID NO: 868141 - RNA, 19 nt, Artificial Sequence
  Description of Artificial Sequence: Synthetic oligonucleotide
guauguaguuaccuggcac

SEQ ID NO: 868142 - RNA, 19 nt, Artificial Sequence
  Description of Artificial Sequence: Synthetic oligonucleotide
acuuuggcguauauaugcc

SEQ ID NO: 868143 - RNA, 19 nt, Artificial Sequence
  Description of Artificial Sequence: Synthetic oligonucleotide
ugacuuuggcguauauaug

SEQ ID NO: 868144 - RNA, 19 nt, Artificial Sequence
  Description of Artificial Sequence: Synthetic oligonucleotide
aauccccauagcgucuggc

SEQ ID NO: 868145 - RNA, 19 nt, Artificial Sequence
  Description of Artificial Sequence: Synthetic oligonucleotide
cugauaggucuguugcucg

SEQ ID NO: 868146 - RNA, 19 nt, Artificial Sequence
  Description of Artificial Sequence: Synthetic oligonucleotide
caauauagaaguccaccuc

SEQ ID NO: 868147 - RNA, 19 nt, Artificial Sequence
  Description of Artificial Sequence: Synthetic oligonucleotide
guucuaggggagcaggucc

SEQ ID NO: 868148 - RNA, 19 nt, Artificial Sequence
  Description of Artificial Sequence: Synthetic oligonucleotide
gaauacaugcucuucuugu

SEQ ID NO: 868149 - RNA, 19 nt, Artificial Sequence
  Description of Artificial Sequence: Synthetic oligonucleotide
ucgguacugacuaaaugau

SEQ ID NO: 868150 - RNA, 19 nt, Artificial Sequence
  Description of Artificial Sequence: Synthetic oligonucleotide
gaucuaaggaagucaaucu

SEQ ID NO: 868151 - RNA, 19 nt, Artificial Sequence
  Description of Artificial Sequence: Synthetic oligonucleotide
cauaguugggcaccacagg

SEQ ID NO: 868152 - RNA, 19 nt, Artificial Sequence
  Description of Artificial Sequence: Synthetic oligonucleotide
ucccuaaaacauccagucc

SEQ ID NO: 868153 - RNA, 19 nt, Artificial Sequence
  Description of Artificial Sequence: Synthetic oligonucleotide
agugccguccauauucccc

SEQ ID NO: 868154 - RNA, 19 nt, Artificial Sequence
  Description of Artificial Sequence: Synthetic oligonucleotide
guaggcauagggaucauac

SEQ ID NO: 868155 - RNA, 19 nt, Artificial Sequence
  Description of Artificial Sequence: Synthetic oligonucleotide
caaugacgucacuagagac

SEQ ID NO: 868156 - RNA, 19 nt, Artificial Sequence
  Description of Artificial Sequence: Synthetic oligonucleotide
aguugggcaccacagguga

SEQ ID NO: 868157 - RNA, 19 nt, Artificial Sequence
  Description of Artificial Sequence: Synthetic oligonucleotide
caacagggaaugcaggcgc

SEQ ID NO: 868158 - RNA, 19 nt, Artificial Sequence
  Description of Artificial Sequence: Synthetic oligonucleotide
ugugcauaucauagucccc

SEQ ID NO: 868159 - RNA, 19 nt, Artificial Sequence
  Description of Artificial Sequence: Synthetic oligonucleotide
gaagcucguacacuuucug

SEQ ID NO: 868160 - RNA, 19 nt, Artificial Sequence
  Description of Artificial Sequence: Synthetic oligonucleotide
agcucccuaaaacauccag

SEQ ID NO: 868161 - RNA, 19 nt, Artificial Sequence
  Description of Artificial Sequence: Synthetic oligonucleotide
uucuuuaggguucgauuaa

SEQ ID NO: 868162 - RNA, 19 nt, Artificial Sequence
  Description of Artificial Sequence: Synthetic oligonucleotide
ccguucauaggcaaggucc

SEQ ID NO: 868163 - RNA, 19 nt, Artificial Sequence
  Description of Artificial Sequence: Synthetic oligonucleotide
uccacuuguguagaccucc

SEQ ID NO: 868164 - RNA, 19 nt, Artificial Sequence
  Description of Artificial Sequence: Synthetic oligonucleotide
gacaagaaugcuucccauc

SEQ ID NO: 868165 - RNA, 19 nt, Artificial Sequence
  Description of Artificial Sequence: Synthetic oligonucleotide
cucguacugccguucauag

SEQ ID NO: 868166 - RNA, 19 nt, Artificial Sequence
  Description of Artificial Sequence: Synthetic oligonucleotide
caacauaauaguauguagu

SEQ ID NO: 868167 - RNA, 19 nt, Artificial Sequence
  Description of Artificial Sequence: Synthetic oligonucleotide
ugaagcucguacacuuucu

SEQ ID NO: 868168 - RNA, 19 nt, Artificial Sequence
  Description of Artificial Sequence: Synthetic oligonucleotide
ccaacauaauaguauguag

SEQ ID NO: 868169 - RNA, 19 nt, Artificial Sequence
  Description of Artificial Sequence: Synthetic oligonucleotide
uggaucugccggauaaaga

SEQ ID NO: 868170 - RNA, 19 nt, Artificial Sequence
  Description of Artificial Sequence: Synthetic oligonucleotide
cuucuuuaggguucgauua

SEQ ID NO: 868171 - RNA, 19 nt, Artificial Sequence
  Description of Artificial Sequence: Synthetic oligonucleotide
gacgucacuagagacacga

SEQ ID NO: 868172 - RNA, 19 nt, Artificial Sequence
  Description of Artificial Sequence: Synthetic oligonucleotide
aguauguaguuaccuggca

SEQ ID NO: 868173 - RNA, 19 nt, Artificial Sequence
  Description of Artificial Sequence: Synthetic oligonucleotide
ucaccugauaggucuguug

SEQ ID NO: 868174 - RNA, 19 nt, Artificial Sequence
  Description of Artificial Sequence: Synthetic oligonucleotide
aggucuguugcucguacug

SEQ ID NO: 868175 - RNA, 19 nt, Artificial Sequence
  Description of Artificial Sequence: Synthetic oligonucleotide
gcuacagcgcuccagaaac

SEQ ID NO: 868176 - RNA, 19 nt, Artificial Sequence
  Description of Artificial Sequence: Synthetic oligonucleotide
agcauccugguagcgacgc

SEQ ID NO: 868177 - RNA, 19 nt, Artificial Sequence
  Description of Artificial Sequence: Synthetic oligonucleotide
aaguacuggaugaaguuuu

SEQ ID NO: 868178 - RNA, 19 nt, Artificial Sequence
  Description of Artificial Sequence: Synthetic oligonucleotide
cuugcaucgguacugacua

SEQ ID NO: 868179 - RNA, 19 nt, Artificial Sequence
  Description of Artificial Sequence: Synthetic oligonucleotide
ucuuucaguuaguuugguc

SEQ ID NO: 868180 - RNA, 19 nt, Artificial Sequence
  Description of Artificial Sequence: Synthetic oligonucleotide
uugcaccucaucagaaaac

SEQ ID NO: 868181 - RNA, 19 nt, Artificial Sequence
  Description of Artificial Sequence: Synthetic oligonucleotide
ccggauagcauccugguag

SEQ ID NO: 868182 - RNA, 19 nt, Artificial Sequence
  Description of Artificial Sequence: Synthetic oligonucleotide
uugaucacuucaggaauca

SEQ ID NO: 868183 - RNA, 19 nt, Artificial Sequence
  Description of Artificial Sequence: Synthetic oligonucleotide
auuaagaauacagcaucau

SEQ ID NO: 868184 - RNA, 19 nt, Artificial Sequence
  Description of Artificial Sequence: Synthetic oligonucleotide
ugcucguucugcuuguuua

SEQ ID NO: 868185 - RNA, 19 nt, Artificial Sequence
  Description of Artificial Sequence: Synthetic oligonucleotide
guaugugguccucuggaac

SEQ ID NO: 868186 - RNA, 19 nt, Artificial Sequence
  Description of Artificial Sequence: Synthetic oligonucleotide
uaguaggauucgaaccucu

SEQ ID NO: 868187 - RNA, 19 nt, Artificial Sequence
  Description of Artificial Sequence: Synthetic oligonucleotide
auauuggauuugucuacca

SEQ ID NO: 868188 - RNA, 19 nt, Artificial Sequence
  Description of Artificial Sequence: Synthetic oligonucleotide
uguaugugguccucuggaa

SEQ ID NO: 868189 - RNA, 19 nt, Artificial Sequence
  Description of Artificial Sequence: Synthetic oligonucleotide
aaauccccauagcgucugg

SEQ ID NO: 868190 - RNA, 19 nt, Artificial Sequence
  Description of Artificial Sequence: Synthetic oligonucleotide
uguugcaccucaucagaaa

SEQ ID NO: 868191 - RNA, 19 nt, Artificial Sequence
  Description of Artificial Sequence: Synthetic oligonucleotide
uagcgucuggcaaccuugg

SEQ ID NO: 868192 - RNA, 19 nt, Artificial Sequence
  Description of Artificial Sequence: Synthetic oligonucleotide
caucgguacugacuaaaug

SEQ ID NO: 868193 - RNA, 19 nt, Artificial Sequence
  Description of Artificial Sequence: Synthetic oligonucleotide
aaaccgggaagagggaaga

SEQ ID NO: 868194 - RNA, 19 nt, Artificial Sequence
  Description of Artificial Sequence: Synthetic oligonucleotide
guuggaucuaaggaaguca

SEQ ID NO: 868195 - RNA, 19 nt, Artificial Sequence
  Description of Artificial Sequence: Synthetic oligonucleotide
ggaucugccggauaaagaa

SEQ ID NO: 868196 - RNA, 19 nt, Artificial Sequence
  Description of Artificial Sequence: Synthetic oligonucleotide
gcugaaguagcccagcauc

SEQ ID NO: 868197 - RNA, 19 nt, Artificial Sequence
  Description of Artificial Sequence: Synthetic oligonucleotide
cuuguguagaccuccagcu

SEQ ID NO: 868198 - RNA, 19 nt, Artificial Sequence
  Description of Artificial Sequence: Synthetic oligonucleotide
ggaucuaaggaagucaauc

SEQ ID NO: 868199 - RNA, 19 nt, Artificial Sequence
  Description of Artificial Sequence: Synthetic oligonucleotide
ucguacugccguucauagg

SEQ ID NO: 868200 - RNA, 19 nt, Artificial Sequence
  Description of Artificial Sequence: Synthetic oligonucleotide
acgacuggccugaagcucg

SEQ ID NO: 868201 - RNA, 19 nt, Artificial Sequence
  Description of Artificial Sequence: Synthetic oligonucleotide
uuggcguauauaugccugu

SEQ ID NO: 868202 - RNA, 19 nt, Artificial Sequence
  Description of Artificial Sequence: Synthetic oligonucleotide
caaaucugagaccguuuug

SEQ ID NO: 868203 - RNA, 19 nt, Artificial Sequence
  Description of Artificial Sequence: Synthetic oligonucleotide
gggagugccguccauauuc

SEQ ID NO: 868204 - RNA, 19 nt, Artificial Sequence
  Description of Artificial Sequence: Synthetic oligonucleotide
ggaaucaccugauaggucu

SEQ ID NO: 868205 - RNA, 19 nt, Artificial Sequence
  Description of Artificial Sequence: Synthetic oligonucleotide
cagcugauggcugacuuag

SEQ ID NO: 868206 - RNA, 19 nt, Artificial Sequence
  Description of Artificial Sequence: Synthetic oligonucleotide
ugguguauucuugaagaau

SEQ ID NO: 868207 - RNA, 19 nt, Artificial Sequence
  Description of Artificial Sequence: Synthetic oligonucleotide
ugguagcgacgcaucauca

SEQ ID NO: 868208 - RNA, 19 nt, Artificial Sequence
  Description of Artificial Sequence: Synthetic oligonucleotide
aauucgccaucuagggcag

SEQ ID NO: 868209 - RNA, 19 nt, Artificial Sequence
  Description of Artificial Sequence: Synthetic oligonucleotide
acugacuaaaugauuggaa

SEQ ID NO: 868210 - RNA, 19 nt, Artificial Sequence
  Description of Artificial Sequence: Synthetic oligonucleotide
uaguuaccuggcacucagg

SEQ ID NO: 868211 - RNA, 19 nt, Artificial Sequence
  Description of Artificial Sequence: Synthetic oligonucleotide
ucaguuaguuugguccagc

SEQ ID NO: 868212 - RNA, 19 nt, Artificial Sequence
  Description of Artificial Sequence: Synthetic oligonucleotide
augauuggaacugguagau

SEQ ID NO: 868213 - RNA, 19 nt, Artificial Sequence
  Description of Artificial Sequence: Synthetic oligonucleotide
uucaguuaguuugguccag

SEQ ID NO: 868214 - RNA, 19 nt, Artificial Sequence
  Description of Artificial Sequence: Synthetic oligonucleotide
auagcgucuggcaaccuug

SEQ ID NO: 868215 - RNA, 19 nt, Artificial Sequence
  Description of Artificial Sequence: Synthetic oligonucleotide
gguuggggaguucuagggg

SEQ ID NO: 868216 - RNA, 19 nt, Artificial Sequence
  Description of Artificial Sequence: Synthetic oligonucleotide
ugauaggucuguugcucgu

SEQ ID NO: 868217 - RNA, 19 nt, Artificial Sequence
  Description of Artificial Sequence: Synthetic oligonucleotide
auauaugccuguaguauaa

SEQ ID NO: 868218 - RNA, 19 nt, Artificial Sequence
  Description of Artificial Sequence: Synthetic oligonucleotide
gaaauccccauagcgucug

SEQ ID NO: 868219 - RNA, 19 nt, Artificial Sequence
  Description of Artificial Sequence: Synthetic oligonucleotide
uagcgacgcaucaucaaau

SEQ ID NO: 868220 - RNA, 19 nt, Artificial Sequence
  Description of Artificial Sequence: Synthetic oligonucleotide
ugauuugaacaaguuucaa

SEQ ID NO: 868221 - RNA, 19 nt, Artificial Sequence
  Description of Artificial Sequence: Synthetic oligonucleotide
ucugccggauaaagaaauc

SEQ ID NO: 868222 - RNA, 19 nt, Artificial Sequence
  Description of Artificial Sequence: Synthetic oligonucleotide
acauaauaguauguaguua

SEQ ID NO: 868223 - RNA, 19 nt, Artificial Sequence
  Description of Artificial Sequence: Synthetic oligonucleotide
guucgauuaagcucuucaa

SEQ ID NO: 868224 - RNA, 19 nt, Artificial Sequence
  Description of Artificial Sequence: Synthetic oligonucleotide
auauagaaguccaccucug

SEQ ID NO: 868225 - RNA, 19 nt, Artificial Sequence
  Description of Artificial Sequence: Synthetic oligonucleotide
caguccuugauuugaacaa

SEQ ID NO: 868226 - RNA, 19 nt, Artificial Sequence
  Description of Artificial Sequence: Synthetic oligonucleotide
uguaguuaccuggcacuca

SEQ ID NO: 868227 - RNA, 19 nt, Artificial Sequence
  Description of Artificial Sequence: Synthetic oligonucleotide
ugugguaguugggauggac

SEQ ID NO: 868228 - RNA, 19 nt, Artificial Sequence
  Description of Artificial Sequence: Synthetic oligonucleotide
aggcugacuggaauucgcc

SEQ ID NO: 868229 - RNA, 19 nt, Artificial Sequence
  Description of Artificial Sequence: Synthetic oligonucleotide
agagacacgacuggccuga

SEQ ID NO: 868230 - RNA, 19 nt, Artificial Sequence
  Description of Artificial Sequence: Synthetic oligonucleotide
ucgguugauauuggauuug

SEQ ID NO: 868231 - RNA, 19 nt, Artificial Sequence
  Description of Artificial Sequence: Synthetic oligonucleotide
gaccguuuuguggaaguac

SEQ ID NO: 868232 - RNA, 19 nt, Artificial Sequence
  Description of Artificial Sequence: Synthetic oligonucleotide
ugcaucgguacugacuaaa

SEQ ID NO: 868233 - RNA, 19 nt, Artificial Sequence
  Description of Artificial Sequence: Synthetic oligonucleotide
cacccuuuugcaugcgcag

SEQ ID NO: 868234 - RNA, 19 nt, Artificial Sequence
  Description of Artificial Sequence: Synthetic oligonucleotide
accguuuuguggaaguacu

SEQ ID NO: 868235 - RNA, 19 nt, Artificial Sequence
  Description of Artificial Sequence: Synthetic oligonucleotide
caucagaaaacaccuuuaa

SEQ ID NO: 868236 - RNA, 19 nt, Artificial Sequence
  Description of Artificial Sequence: Synthetic oligonucleotide
gguccgucagcauugagaa

SEQ ID NO: 868237 - RNA, 19 nt, Artificial Sequence
  Description of Artificial Sequence: Synthetic oligonucleotide
guagcgacgcaucaucaaa

SEQ ID NO: 868238 - RNA, 19 nt, Artificial Sequence
  Description of Artificial Sequence: Synthetic oligonucleotide
acacgacuggccugaagcu

SEQ ID NO: 868239 - RNA, 19 nt, Artificial Sequence
  Description of Artificial Sequence: Synthetic oligonucleotide
ugagaccguuuuguggaag

SEQ ID NO: 868240 - RNA, 19 nt, Artificial Sequence
  Description of Artificial Sequence: Synthetic oligonucleotide
gaugcggaacuccugcucu

SEQ ID NO: 868241 - RNA, 19 nt, Artificial Sequence
  Description of Artificial Sequence: Synthetic oligonucleotide
accucugcucuaaggaggg

SEQ ID NO: 868242 - RNA, 19 nt, Artificial Sequence
  Description of Artificial Sequence: Synthetic oligonucleotide
ugauuggaacugguagaug

SEQ ID NO: 868243 - RNA, 19 nt, Artificial Sequence
  Description of Artificial Sequence: Synthetic oligonucleotide
cacuagagacacgacuggc

SEQ ID NO: 868244 - RNA, 19 nt, Artificial Sequence
  Description of Artificial Sequence: Synthetic oligonucleotide
gggguacauggugagagcg

SEQ ID NO: 868245 - RNA, 19 nt, Artificial Sequence
  Description of Artificial Sequence: Synthetic oligonucleotide
gaucauacgcagccucaga

SEQ ID NO: 868246 - RNA, 19 nt, Artificial Sequence
  Description of Artificial Sequence: Synthetic oligonucleotide
aacuugggacaggcauagc

SEQ ID NO: 868247 - RNA, 19 nt, Artificial Sequence
  Description of Artificial Sequence: Synthetic oligonucleotide
uucucccgcagcugaaggu

SEQ ID NO: 868248 - RNA, 19 nt, Artificial Sequence
  Description of Artificial Sequence: Synthetic oligonucleotide
uugggcaccacaggugaca

SEQ ID NO: 868249 - RNA, 19 nt, Artificial Sequence
  Description of Artificial Sequence: Synthetic oligonucleotide
uggaucuaaggaagucaau

SEQ ID NO: 868250 - RNA, 19 nt, Artificial Sequence
  Description of Artificial Sequence: Synthetic oligonucleotide
aggcauagcuaaacaguuc

SEQ ID NO: 868251 - RNA, 19 nt, Artificial Sequence
  Description of Artificial Sequence: Synthetic oligonucleotide
ugcucuaaggaggggcccc

SEQ ID NO: 868252 - RNA, 19 nt, Artificial Sequence
  Description of Artificial Sequence: Synthetic oligonucleotide
ggcguauauaugccuguag

SEQ ID NO: 868253 - RNA, 19 nt, Artificial Sequence
  Description of Artificial Sequence: Synthetic oligonucleotide
auuucucccgcagcugaag

SEQ ID NO: 868254 - RNA, 19 nt, Artificial Sequence
  Description of Artificial Sequence: Synthetic oligonucleotide
agguccgucagcauugaga

SEQ ID NO: 868255 - RNA, 19 nt, Artificial Sequence
  Description of Artificial Sequence: Synthetic oligonucleotide
ggggucacccuuuugcaug

SEQ ID NO: 868256 - RNA, 19 nt, Artificial Sequence
  Description of Artificial Sequence: Synthetic oligonucleotide
ugacgucacuagagacacg

SEQ ID NO: 868257 - RNA, 19 nt, Artificial Sequence
  Description of Artificial Sequence: Synthetic oligonucleotide
gaaucaccugauaggucug

SEQ ID NO: 868258 - RNA, 19 nt, Artificial Sequence
  Description of Artificial Sequence: Synthetic oligonucleotide
agcaugcaucugcucguuc

SEQ ID NO: 868259 - RNA, 19 nt, Artificial Sequence
  Description of Artificial Sequence: Synthetic oligonucleotide
aucugccggauaaagaaau

SEQ ID NO: 868260 - RNA, 19 nt, Artificial Sequence
  Description of Artificial Sequence: Synthetic oligonucleotide
gugagagcgauugccaaca

SEQ ID NO: 868261 - RNA, 19 nt, Artificial Sequence
  Description of Artificial Sequence: Synthetic oligonucleotide
uugcucguacugccguuca

SEQ ID NO: 868262 - RNA, 19 nt, Artificial Sequence
  Description of Artificial Sequence: Synthetic oligonucleotide
ucuggcaaccuuggugucu

SEQ ID NO: 868263 - RNA, 19 nt, Artificial Sequence
  Description of Artificial Sequence: Synthetic oligonucleotide
aggaaucaccugauagguc

SEQ ID NO: 868264 - RNA, 19 nt, Artificial Sequence
  Description of Artificial Sequence: Synthetic oligonucleotide
cgacgcaucaucaaauaug

SEQ ID NO: 868265 - RNA, 19 nt, Artificial Sequence
  Description of Artificial Sequence: Synthetic oligonucleotide
gagagcgauugccaacaga

SEQ ID NO: 868266 - RNA, 19 nt, Artificial Sequence
  Description of Artificial Sequence: Synthetic oligonucleotide
aguaggauucgaaccucug

SEQ ID NO: 868267 - RNA, 19 nt, Artificial Sequence
  Description of Artificial Sequence: Synthetic oligonucleotide
agaaaccgggaagagggaa

SEQ ID NO: 868268 - RNA, 19 nt, Artificial Sequence
  Description of Artificial Sequence: Synthetic oligonucleotide
ugggcaccacaggugacag

SEQ ID NO: 868269 - RNA, 19 nt, Artificial Sequence
  Description of Artificial Sequence: Synthetic oligonucleotide
gccggauaaagaaaucccc

SEQ ID NO: 868270 - RNA, 19 nt, Artificial Sequence
  Description of Artificial Sequence: Synthetic oligonucleotide
auuuuaggguuggaucuaa

SEQ ID NO: 868271 - RNA, 19 nt, Artificial Sequence
  Description of Artificial Sequence: Synthetic oligonucleotide
gauugccaacagagcaugc

SEQ ID NO: 868272 - RNA, 19 nt, Artificial Sequence
  Description of Artificial Sequence: Synthetic oligonucleotide
gggugcaauggcuucugcc

SEQ ID NO: 868273 - RNA, 19 nt, Artificial Sequence
  Description of Artificial Sequence: Synthetic oligonucleotide
ggauaaagaaauccccaua

SEQ ID NO: 868274 - RNA, 19 nt, Artificial Sequence
  Description of Artificial Sequence: Synthetic oligonucleotide
gagcgauugccaacagagc

SEQ ID NO: 868275 - RNA, 19 nt, Artificial Sequence
  Description of Artificial Sequence: Synthetic oligonucleotide
uauuccccagccacacuuu

SEQ ID NO: 868276 - RNA, 19 nt, Artificial Sequence
  Description of Artificial Sequence: Synthetic oligonucleotide
cgggauaagacauggcuac

SEQ ID NO: 868277 - RNA, 19 nt, Artificial Sequence
  Description of Artificial Sequence: Synthetic oligonucleotide
caucaauccgcauggggua

SEQ ID NO: 868278 - RNA, 19 nt, Artificial Sequence
  Description of Artificial Sequence: Synthetic oligonucleotide
uauaugccuguaguauaau

SEQ ID NO: 868279 - RNA, 19 nt, Artificial Sequence
  Description of Artificial Sequence: Synthetic oligonucleotide
cucaucgaugaugucccac

SEQ ID NO: 868280 - RNA, 19 nt, Artificial Sequence
  Description of Artificial Sequence: Synthetic oligonucleotide
aaccgggaagagggaagag

SEQ ID NO: 868281 - RNA, 19 nt, Artificial Sequence
  Description of Artificial Sequence: Synthetic oligonucleotide
agcgacgcaucaucaaaua

SEQ ID NO: 868282 - RNA, 19 nt, Artificial Sequence
  Description of Artificial Sequence: Synthetic oligonucleotide
gcgucuggcaaccuuggug

SEQ ID NO: 868283 - RNA, 19 nt, Artificial Sequence
  Description of Artificial Sequence: Synthetic oligonucleotide
ggugagagcgauugccaac

SEQ ID NO: 868284 - RNA, 19 nt, Artificial Sequence
  Description of Artificial Sequence: Synthetic oligonucleotide
gauuuuaggguuggaucua

SEQ ID NO: 868285 - RNA, 19 nt, Artificial Sequence
  Description of Artificial Sequence: Synthetic oligonucleotide
cguuuuguggaaguacugg

SEQ ID NO: 868286 - RNA, 19 nt, Artificial Sequence
  Description of Artificial Sequence: Synthetic oligonucleotide
uccccauauuucucccgca

SEQ ID NO: 868287 - RNA, 19 nt, Artificial Sequence
  Description of Artificial Sequence: Synthetic oligonucleotide
agacacgacuggccugaag

SEQ ID NO: 868288 - RNA, 19 nt, Artificial Sequence
  Description of Artificial Sequence: Synthetic oligonucleotide
guagagcuugaggaagcug

SEQ ID NO: 868289 - RNA, 19 nt, Artificial Sequence
  Description of Artificial Sequence: Synthetic oligonucleotide
gagaccguuuuguggaagu

SEQ ID NO: 868290 - RNA, 19 nt, Artificial Sequence
  Description of Artificial Sequence: Synthetic oligonucleotide
guacacuuucuggucaauc

SEQ ID NO: 868291 - RNA, 19 nt, Artificial Sequence
  Description of Artificial Sequence: Synthetic oligonucleotide
cuguaguauaauucuuugu

SEQ ID NO: 868292 - RNA, 19 nt, Artificial Sequence
  Description of Artificial Sequence: Synthetic oligonucleotide
agccaacauaauaguaugu

SEQ ID NO: 868293 - RNA, 19 nt, Artificial Sequence
  Description of Artificial Sequence: Synthetic oligonucleotide
gaucugccggauaaagaaa

SEQ ID NO: 868294 - RNA, 19 nt, Artificial Sequence
  Description of Artificial Sequence: Synthetic oligonucleotide
acaagcaguuggaugcgga

SEQ ID NO: 868295 - RNA, 19 nt, Artificial Sequence
  Description of Artificial Sequence: Synthetic oligonucleotide
agucuugcaucgguacuga

SEQ ID NO: 868296 - RNA, 19 nt, Artificial Sequence
  Description of Artificial Sequence: Synthetic oligonucleotide
caaagacccuuuacugaga

SEQ ID NO: 868297 - RNA, 19 nt, Artificial Sequence
  Description of Artificial Sequence: Synthetic oligonucleotide
uuugcaugcgcagcaucuu

SEQ ID NO: 868298 - RNA, 19 nt, Artificial Sequence
  Description of Artificial Sequence: Synthetic oligonucleotide
ccguccauauuccccagcc

SEQ ID NO: 868299 - RNA, 19 nt, Artificial Sequence
  Description of Artificial Sequence: Synthetic oligonucleotide
ccuuaucaauauagaaguc

SEQ ID NO: 868300 - RNA, 19 nt, Artificial Sequence
  Description of Artificial Sequence: Synthetic oligonucleotide
ggcauagggaucauacgca

SEQ ID NO: 868301 - RNA, 19 nt, Artificial Sequence
  Description of Artificial Sequence: Synthetic oligonucleotide
uggcagucuugcaucggua

SEQ ID NO: 868302 - RNA, 19 nt, Artificial Sequence
  Description of Artificial Sequence: Synthetic oligonucleotide
ggaucauacgcagccucag

SEQ ID NO: 868303 - RNA, 19 nt, Artificial Sequence
  Description of Artificial Sequence: Synthetic oligonucleotide
gauuugucuaccagagaau

SEQ ID NO: 868304 - RNA, 19 nt, Artificial Sequence
  Description of Artificial Sequence: Synthetic oligonucleotide
cuuuggcguauauaugccu

SEQ ID NO: 868305 - RNA, 19 nt, Artificial Sequence
  Description of Artificial Sequence: Synthetic oligonucleotide
cccuaaaacauccaguccu

SEQ ID NO: 868306 - RNA, 19 nt, Artificial Sequence
  Description of Artificial Sequence: Synthetic oligonucleotide
ccggauaaagaaaucccca

SEQ ID NO: 868307 - RNA, 19 nt, Artificial Sequence
  Description of Artificial Sequence: Synthetic oligonucleotide
uggggaguucuaggggagc

SEQ ID NO: 868308 - RNA, 19 nt, Artificial Sequence
  Description of Artificial Sequence: Synthetic oligonucleotide
caccuuuaacugcugcaga

SEQ ID NO: 868309 - RNA, 19 nt, Artificial Sequence
  Description of Artificial Sequence: Synthetic oligonucleotide
gcguauauaugccuguagu

SEQ ID NO: 868310 - RNA, 19 nt, Artificial Sequence
  Description of Artificial Sequence: Synthetic oligonucleotide
aucagcgggauaagacaug

SEQ ID NO: 868311 - RNA, 19 nt, Artificial Sequence
  Description of Artificial Sequence: Synthetic oligonucleotide
caucagcgggauaagacau

SEQ ID NO: 868312 - RNA, 19 nt, Artificial Sequence
  Description of Artificial Sequence: Synthetic oligonucleotide
gguuggaucuaaggaaguc

SEQ ID NO: 868313 - RNA, 19 nt, Artificial Sequence
  Description of Artificial Sequence: Synthetic oligonucleotide
agcugucgguugauauugg

SEQ ID NO: 868314 - RNA, 19 nt, Artificial Sequence
  Description of Artificial Sequence: Synthetic oligonucleotide
cagcgggauaagacauggc

SEQ ID NO: 868315 - RNA, 19 nt, Artificial Sequence
  Description of Artificial Sequence: Synthetic oligonucleotide
cuccacuuguguagaccuc

SEQ ID NO: 868316 - RNA, 19 nt, Artificial Sequence
  Description of Artificial Sequence: Synthetic oligonucleotide
caggcauagcuaaacaguu

SEQ ID NO: 868317 - RNA, 19 nt, Artificial Sequence
  Description of Artificial Sequence: Synthetic oligonucleotide
gccaacauaauaguaugua

SEQ ID NO: 868318 - RNA, 19 nt, Artificial Sequence
  Description of Artificial Sequence: Synthetic oligonucleotide
guugcucguacugccguuc

SEQ ID NO: 868319 - RNA, 19 nt, Artificial Sequence
  Description of Artificial Sequence: Synthetic oligonucleotide
acgucacuagagacacgac

SEQ ID NO: 868320 - RNA, 19 nt, Artificial Sequence
  Description of Artificial Sequence: Synthetic oligonucleotide
cacgacuggccugaagcuc

SEQ ID NO: 868321 - RNA, 19 nt, Artificial Sequence
  Description of Artificial Sequence: Synthetic oligonucleotide
gcucguacacuuucugguc

SEQ ID NO: 868322 - RNA, 19 nt, Artificial Sequence
  Description of Artificial Sequence: Synthetic oligonucleotide
ccugauaggucuguugcuc

SEQ ID NO: 868323 - RNA, 19 nt, Artificial Sequence
  Description of Artificial Sequence: Synthetic oligonucleotide
ugcucguacugccguucau

SEQ ID NO: 868324 - RNA, 19 nt, Artificial Sequence
  Description of Artificial Sequence: Synthetic oligonucleotide
gauaggucuguugcucgua

SEQ ID NO: 868325 - RNA, 19 nt, Artificial Sequence
  Description of Artificial Sequence: Synthetic oligonucleotide
uggcguauauaugccugua

SEQ ID NO: 868326 - RNA, 19 nt, Artificial Sequence
  Description of Artificial Sequence: Synthetic oligonucleotide
gagggagugccguccauau

SEQ ID NO: 868327 - RNA, 19 nt, Artificial Sequence
  Description of Artificial Sequence: Synthetic oligonucleotide
ggcgagcuuggccacgggc

SEQ ID NO: 868328 - RNA, 19 nt, Artificial Sequence
  Description of Artificial Sequence: Synthetic oligonucleotide
cgcagaagccccaccaggc

SEQ ID NO: 868329 - RNA, 19 nt, Artificial Sequence
  Description of Artificial Sequence: Synthetic oligonucleotide
agcgucuggcaaccuuggu

SEQ ID NO: 868330 - RNA, 19 nt, Artificial Sequence
  Description of Artificial Sequence: Synthetic oligonucleotide
ugcucucaucaauccgcau

SEQ ID NO: 868331 - RNA, 19 nt, Artificial Sequence
  Description of Artificial Sequence: Synthetic oligonucleotide
uugcaucgguacugacuaa

SEQ ID NO: 868332 - RNA, 19 nt, Artificial Sequence
  Description of Artificial Sequence: Synthetic oligonucleotide
ugccucaggccauggugua

SEQ ID NO: 868333 - RNA, 19 nt, Artificial Sequence
  Description of Artificial Sequence: Synthetic oligonucleotide
ccccauauuucucccgcag

SEQ ID NO: 868334 - RNA, 19 nt, Artificial Sequence
  Description of Artificial Sequence: Synthetic oligonucleotide
gguagcgacgcaucaucaa

SEQ ID NO: 868335 - RNA, 19 nt, Artificial Sequence
  Description of Artificial Sequence: Synthetic oligonucleotide
ggagugccguccauauucc

SEQ ID NO: 868336 - RNA, 19 nt, Artificial Sequence
  Description of Artificial Sequence: Synthetic oligonucleotide
gucuugcaucgguacugac

SEQ ID NO: 868337 - RNA, 19 nt, Artificial Sequence
  Description of Artificial Sequence: Synthetic oligonucleotide
cagaaaccgggaagaggga

SEQ ID NO: 868338 - RNA, 19 nt, Artificial Sequence
  Description of Artificial Sequence: Synthetic oligonucleotide
ccguuuuguggaaguacug

SEQ ID NO: 868339 - RNA, 19 nt, Artificial Sequence
  Description of Artificial Sequence: Synthetic oligonucleotide
cccuuuacugagagcuccc

SEQ ID NO: 868340 - RNA, 19 nt, Artificial Sequence
  Description of Artificial Sequence: Synthetic oligonucleotide
augugguccucuggaacau

SEQ ID NO: 868341 - RNA, 19 nt, Artificial Sequence
  Description of Artificial Sequence: Synthetic oligonucleotide
ccccauagcgucuggcaac

SEQ ID NO: 868342 - RNA, 19 nt, Artificial Sequence
  Description of Artificial Sequence: Synthetic oligonucleotide
caguuaguuugguccagcu

SEQ ID NO: 868343 - RNA, 19 nt, Artificial Sequence
  Description of Artificial Sequence: Synthetic oligonucleotide
guacugccguucauaggca

SEQ ID NO: 868344 - RNA, 19 nt, Artificial Sequence
  Description of Artificial Sequence: Synthetic oligonucleotide
ggcuacagcgcuccagaaa

SEQ ID NO: 868345 - RNA, 19 nt, Artificial Sequence
  Description of Artificial Sequence: Synthetic oligonucleotide
gccguucauaggcaagguc

SEQ ID NO: 868346 - RNA, 19 nt, Artificial Sequence
  Description of Artificial Sequence: Synthetic oligonucleotide
gucuggcaaccuugguguc

SEQ ID NO: 868347 - RNA, 19 nt, Artificial Sequence
  Description of Artificial Sequence: Synthetic oligonucleotide
gggaucauacgcagccuca

SEQ ID NO: 868348 - RNA, 19 nt, Artificial Sequence
  Description of Artificial Sequence: Synthetic oligonucleotide
acgcaucaucaaauaugca

SEQ ID NO: 868349 - RNA, 19 nt, Artificial Sequence
  Description of Artificial Sequence: Synthetic oligonucleotide
aggcuccuugugguaguug

SEQ ID NO: 868350 - RNA, 19 nt, Artificial Sequence
  Description of Artificial Sequence: Synthetic oligonucleotide
cugagaccguuuuguggaa

SEQ ID NO: 868351 - RNA, 19 nt, Artificial Sequence
  Description of Artificial Sequence: Synthetic oligonucleotide
cgauugccaacagagcaug

SEQ ID NO: 868352 - RNA, 19 nt, Artificial Sequence
  Description of Artificial Sequence: Synthetic oligonucleotide
gguacauggugagagcgau

SEQ ID NO: 868353 - RNA, 19 nt, Artificial Sequence
  Description of Artificial Sequence: Synthetic oligonucleotide
ggggaguucuaggggagca

SEQ ID NO: 868354 - RNA, 19 nt, Artificial Sequence
  Description of Artificial Sequence: Synthetic oligonucleotide
gagcucccuaaaacaucca

SEQ ID NO: 868355 - RNA, 19 nt, Artificial Sequence
  Description of Artificial Sequence: Synthetic oligonucleotide
gcgggauaagacauggcua

SEQ ID NO: 868356 - RNA, 19 nt, Artificial Sequence
  Description of Artificial Sequence: Synthetic oligonucleotide
ccuuggugucugcaauaug

SEQ ID NO: 868357 - RNA, 19 nt, Artificial Sequence
  Description of Artificial Sequence: Synthetic oligonucleotide
ggguacauggugagagcga

SEQ ID NO: 868358 - RNA, 19 nt, Artificial Sequence
  Description of Artificial Sequence: Synthetic oligonucleotide
caauauggaucauguccuu

SEQ ID NO: 868359 - RNA, 19 nt, Artificial Sequence
  Description of Artificial Sequence: Synthetic oligonucleotide
cauagcgucuggcaaccuu

SEQ ID NO: 868360 - RNA, 19 nt, Artificial Sequence
  Description of Artificial Sequence: Synthetic oligonucleotide
gggauaagacauggcuaca

SEQ ID NO: 868361 - RNA, 19 nt, Artificial Sequence
  Description of Artificial Sequence: Synthetic oligonucleotide
cacgggaauacaugcucuu

SEQ ID NO: 868362 - RNA, 19 nt, Artificial Sequence
  Description of Artificial Sequence: Synthetic oligonucleotide
cacugguuggggaguucua

SEQ ID NO: 868363 - RNA, 19 nt, Artificial Sequence
  Description of Artificial Sequence: Synthetic oligonucleotide
gcucguacugccguucaua

SEQ ID NO: 868364 - RNA, 19 nt, Artificial Sequence
  Description of Artificial Sequence: Synthetic oligonucleotide
cgucacuagagacacgacu

SEQ ID NO: 868365 - RNA, 19 nt, Artificial Sequence
  Description of Artificial Sequence: Synthetic oligonucleotide
gcgacgcaucaucaaauau

SEQ ID NO: 868366 - RNA, 19 nt, Artificial Sequence
  Description of Artificial Sequence: Synthetic oligonucleotide
ccccggguaggcauaggga

SEQ ID NO: 868367 - RNA, 19 nt, Artificial Sequence
  Description of Artificial Sequence: Synthetic oligonucleotide
ccggcgagcuuggccacgg

SEQ ID NO: 868368 - RNA, 19 nt, Artificial Sequence
  Description of Artificial Sequence: Synthetic oligonucleotide
ggguuggaucuaaggaagu

SEQ ID NO: 868369 - RNA, 19 nt, Artificial Sequence
  Description of Artificial Sequence: Synthetic oligonucleotide
gagacacgacuggccugaa

SEQ ID NO: 868370 - RNA, 19 nt, Artificial Sequence
  Description of Artificial Sequence: Synthetic oligonucleotide
gcaccuugauagccuggua

SEQ ID NO: 868371 - RNA, 19 nt, Artificial Sequence
  Description of Artificial Sequence: Synthetic oligonucleotide
ggguucgauuaagcucuuc

SEQ ID NO: 868372 - RNA, 19 nt, Artificial Sequence
  Description of Artificial Sequence: Synthetic oligonucleotide
gcaucgguacugacuaaau

SEQ ID NO: 868373 - RNA, 19 nt, Artificial Sequence
  Description of Artificial Sequence: Synthetic oligonucleotide
aggguucgauuaagcucuu

SEQ ID NO: 868374 - RNA, 19 nt, Artificial Sequence
  Description of Artificial Sequence: Synthetic oligonucleotide
cugcucguucugcuuguuu

SEQ ID NO: 868375 - RNA, 19 nt, Artificial Sequence
  Description of Artificial Sequence: Synthetic oligonucleotide
ccagcugucgguugauauu

SEQ ID NO: 868376 - RNA, 19 nt, Artificial Sequence
  Description of Artificial Sequence: Synthetic oligonucleotide
caauccgcaugggguacau

SEQ ID NO: 868377 - RNA, 19 nt, Artificial Sequence
  Description of Artificial Sequence: Synthetic oligonucleotide
ccgucagcauugagaauau

SEQ ID NO: 868378 - RNA, 19 nt, Artificial Sequence
  Description of Artificial Sequence: Synthetic oligonucleotide
cgguugauauuggauuugu

SEQ ID NO: 868379 - RNA, 19 nt, Artificial Sequence
  Description of Artificial Sequence: Synthetic oligonucleotide
cgagcuuggccacgggcau

SEQ ID NO: 868380 - RNA, 19 nt, Artificial Sequence
  Description of Artificial Sequence: Synthetic oligonucleotide
cguacacuuucuggucaau

SEQ ID NO: 868381 - RNA, 19 nt, Artificial Sequence
  Description of Artificial Sequence: Synthetic oligonucleotide
ccauagcgucuggcaaccu

SEQ ID NO: 868382 - RNA, 19 nt, Artificial Sequence
  Description of Artificial Sequence: Synthetic oligonucleotide
uuuacuaagaccaacauug

SEQ ID NO: 868383 - RNA, 19 nt, Artificial Sequence
  Description of Artificial Sequence: Synthetic oligonucleotide
agucauauccuccauaacc

SEQ ID NO: 868384 - RNA, 19 nt, Artificial Sequence
  Description of Artificial Sequence: Synthetic oligonucleotide
aauagcacaaagccaaaac

SEQ ID NO: 868385 - RNA, 19 nt, Artificial Sequence
  Description of Artificial Sequence: Synthetic oligonucleotide
aaagauuuaaguagcagcg

SEQ ID NO: 868386 - RNA, 19 nt, Artificial Sequence
  Description of Artificial Sequence: Synthetic oligonucleotide
uuaaugagaacucagaauu

SEQ ID NO: 868387 - RNA, 19 nt, Artificial Sequence
  Description of Artificial Sequence: Synthetic oligonucleotide
auaaucaccauauccauag

SEQ ID NO: 868388 - RNA, 19 nt, Artificial Sequence
  Description of Artificial Sequence: Synthetic oligonucleotide
ucaaauuggaaaauacugc

SEQ ID NO: 868389 - RNA, 19 nt, Artificial Sequence
  Description of Artificial Sequence: Synthetic oligonucleotide
auuuaguaugguuuguagc

SEQ ID NO: 868390 - RNA, 19 nt, Artificial Sequence
  Description of Artificial Sequence: Synthetic oligonucleotide
aaaugaaucuucaaauugg

SEQ ID NO: 868391 - RNA, 19 nt, Artificial Sequence
  Description of Artificial Sequence: Synthetic oligonucleotide
ugaagcauagcaauuaaga

SEQ ID NO: 868392 - RNA, 19 nt, Artificial Sequence
  Description of Artificial Sequence: Synthetic oligonucleotide
uuuaguaugguuuguagcu

SEQ ID NO: 868393 - RNA, 19 nt, Artificial Sequence
  Description of Artificial Sequence: Synthetic oligonucleotide
acugcuauuagcaaggugg

SEQ ID NO: 868394 - RNA, 19 nt, Artificial Sequence
  Description of Artificial Sequence: Synthetic oligonucleotide
agauuuaaguagcagcggc

SEQ ID NO: 868395 - RNA, 19 nt, Artificial Sequence
  Description of Artificial Sequence: Synthetic oligonucleotide
aauuuaguaugguuuguag

SEQ ID NO: 868396 - RNA, 19 nt, Artificial Sequence
  Description of Artificial Sequence: Synthetic oligonucleotide
ugacaaaugagucaauaca

SEQ ID NO: 868397 - RNA, 19 nt, Artificial Sequence
  Description of Artificial Sequence: Synthetic oligonucleotide
aguuugaacugcuauuagc

SEQ ID NO: 868398 - RNA, 19 nt, Artificial Sequence
  Description of Artificial Sequence: Synthetic oligonucleotide
uuauuucacauuuacuaag

SEQ ID NO: 868399 - RNA, 19 nt, Artificial Sequence
  Description of Artificial Sequence: Synthetic oligonucleotide
ugugauaggaucuaacuuc

SEQ ID NO: 868400 - RNA, 19 nt, Artificial Sequence
  Description of Artificial Sequence: Synthetic oligonucleotide
auagccuugauuccaauag

SEQ ID NO: 868401 - RNA, 19 nt, Artificial Sequence
  Description of Artificial Sequence: Synthetic oligonucleotide
uccucuucgcuuuuaaugg

SEQ ID NO: 868402 - RNA, 19 nt, Artificial Sequence
  Description of Artificial Sequence: Synthetic oligonucleotide
gauacuuucccauaaccac

SEQ ID NO: 868403 - RNA, 19 nt, Artificial Sequence
  Description of Artificial Sequence: Synthetic oligonucleotide
ugagaacucagaauuaaac

SEQ ID NO: 868404 - RNA, 19 nt, Artificial Sequence
  Description of Artificial Sequence: Synthetic oligonucleotide
aaaccaguaagacacuacu

SEQ ID NO: 868405 - RNA, 19 nt, Artificial Sequence
  Description of Artificial Sequence: Synthetic oligonucleotide
uugauacugaagcauagca

SEQ ID NO: 868406 - RNA, 19 nt, Artificial Sequence
  Description of Artificial Sequence: Synthetic oligonucleotide
acuagcgucgaucuucgcc

SEQ ID NO: 868407 - RNA, 19 nt, Artificial Sequence
  Description of Artificial Sequence: Synthetic oligonucleotide
uguuauauccauaguugcc

SEQ ID NO: 868408 - RNA, 19 nt, Artificial Sequence
  Description of Artificial Sequence: Synthetic oligonucleotide
aacgucauacuuccauucg

SEQ ID NO: 868409 - RNA, 19 nt, Artificial Sequence
  Description of Artificial Sequence: Synthetic oligonucleotide
cacuacuacaucaugacac

SEQ ID NO: 868410 - RNA, 19 nt, Artificial Sequence
  Description of Artificial Sequence: Synthetic oligonucleotide
aaaucucucucucucucuc

SEQ ID NO: 868411 - RNA, 19 nt, Artificial Sequence
  Description of Artificial Sequence: Synthetic oligonucleotide
aagacuugcucuacaauac

SEQ ID NO: 868412 - RNA, 19 nt, Artificial Sequence
  Description of Artificial Sequence: Synthetic oligonucleotide
uuuaaugagaacucagaau

SEQ ID NO: 868413 - RNA, 19 nt, Artificial Sequence
  Description of Artificial Sequence: Synthetic oligonucleotide
auucaaccucaccaaaacc

SEQ ID NO: 868414 - RNA, 19 nt, Artificial Sequence
  Description of Artificial Sequence: Synthetic oligonucleotide
auaaccacucugcugauug

SEQ ID NO: 868415 - RNA, 19 nt, Artificial Sequence
  Description of Artificial Sequence: Synthetic oligonucleotide
aggaucuaacuucagagug

SEQ ID NO: 868416 - RNA, 19 nt, Artificial Sequence
  Description of Artificial Sequence: Synthetic oligonucleotide
uuaacacaagacuugcucu

SEQ ID NO: 868417 - RNA, 19 nt, Artificial Sequence
  Description of Artificial Sequence: Synthetic oligonucleotide
agguaauaaaacagaaccc

SEQ ID NO: 868418 - RNA, 19 nt, Artificial Sequence
  Description of Artificial Sequence: Synthetic oligonucleotide
aauaguuacuauaucccug

SEQ ID NO: 868419 - RNA, 19 nt, Artificial Sequence
  Description of Artificial Sequence: Synthetic oligonucleotide
uggauacuuucccauaacc

SEQ ID NO: 868420 - RNA, 19 nt, Artificial Sequence
  Description of Artificial Sequence: Synthetic oligonucleotide
aaaaccaguaagacacuac

SEQ ID NO: 868421 - RNA, 19 nt, Artificial Sequence
  Description of Artificial Sequence: Synthetic oligonucleotide
accaccguaaccuuggcug

SEQ ID NO: 868422 - RNA, 19 nt, Artificial Sequence
  Description of Artificial Sequence: Synthetic oligonucleotide
ucuagagccccacugcugc

SEQ ID NO: 868423 - RNA, 19 nt, Artificial Sequence
  Description of Artificial Sequence: Synthetic oligonucleotide
aagauuuaaguagcagcgg

SEQ ID NO: 868424 - RNA, 19 nt, Artificial Sequence
  Description of Artificial Sequence: Synthetic oligonucleotide
cuagcgucgaucuucgccc

SEQ ID NO: 868425 - RNA, 19 nt, Artificial Sequence
  Description of Artificial Sequence: Synthetic oligonucleotide
uccgacauagugcugcugc

SEQ ID NO: 868426 - RNA, 19 nt, Artificial Sequence
  Description of Artificial Sequence: Synthetic oligonucleotide
aauugauacugaagcauag

SEQ ID NO: 868427 - RNA, 19 nt, Artificial Sequence
  Description of Artificial Sequence: Synthetic oligonucleotide
accuuaucuacacucuccg

SEQ ID NO: 868428 - RNA, 19 nt, Artificial Sequence
  Description of Artificial Sequence: Synthetic oligonucleotide
gacacuacuacaucaugac

SEQ ID NO: 868429 - RNA, 19 nt, Artificial Sequence
  Description of Artificial Sequence: Synthetic oligonucleotide
uuacuagcgucgaucuucg

SEQ ID NO: 868430 - RNA, 19 nt, Artificial Sequence
  Description of Artificial Sequence: Synthetic oligonucleotide
acaaauugauacugaagca

SEQ ID NO: 868431 - RNA, 19 nt, Artificial Sequence
  Description of Artificial Sequence: Synthetic oligonucleotide
gaacccacgccucuuauug

SEQ ID NO: 868432 - RNA, 19 nt, Artificial Sequence
  Description of Artificial Sequence: Synthetic oligonucleotide
ugguguaucuggagaaagg

SEQ ID NO: 868433 - RNA, 19 nt, Artificial Sequence
  Description of Artificial Sequence: Synthetic oligonucleotide
agcauagcaauuaagaaau

SEQ ID NO: 868434 - RNA, 19 nt, Artificial Sequence
  Description of Artificial Sequence: Synthetic oligonucleotide
uugcaaauggaauaauuua

SEQ ID NO: 868435 - RNA, 19 nt, Artificial Sequence
  Description of Artificial Sequence: Synthetic oligonucleotide
aaaaucucucucucucucu

SEQ ID NO: 868436 - RNA, 19 nt, Artificial Sequence
  Description of Artificial Sequence: Synthetic oligonucleotide
uacuaagaccaacauugug

SEQ ID NO: 868437 - RNA, 19 nt, Artificial Sequence
  Description of Artificial Sequence: Synthetic oligonucleotide
gacccaacgucauacuucc

SEQ ID NO: 868438 - RNA, 19 nt, Artificial Sequence
  Description of Artificial Sequence: Synthetic oligonucleotide
cucacacacacacacacac

SEQ ID NO: 868439 - RNA, 19 nt, Artificial Sequence
  Description of Artificial Sequence: Synthetic oligonucleotide
gauccaugaccuuaucuac

SEQ ID NO: 868440 - RNA, 19 nt, Artificial Sequence
  Description of Artificial Sequence: Synthetic oligonucleotide
uagugucccagcuaaggcc

SEQ ID NO: 868441 - RNA, 19 nt, Artificial Sequence
  Description of Artificial Sequence: Synthetic oligonucleotide
aauggcgccgccgcggacc

SEQ ID NO: 868442 - RNA, 19 nt, Artificial Sequence
  Description of Artificial Sequence: Synthetic oligonucleotide
uucgcuuuuaauggcgccg

SEQ ID NO: 868443 - RNA, 19 nt, Artificial Sequence
  Description of Artificial Sequence: Synthetic oligonucleotide
uaaguugcaaauggaauaa

SEQ ID NO: 868444 - RNA, 19 nt, Artificial Sequence
  Description of Artificial Sequence: Synthetic oligonucleotide
cacacacacacacacacac

SEQ ID NO: 868445 - RNA, 19 nt, Artificial Sequence
  Description of Artificial Sequence: Synthetic oligonucleotide
uuaaguagcagcggcggcc

SEQ ID NO: 868446 - RNA, 19 nt, Artificial Sequence
  Description of Artificial Sequence: Synthetic oligonucleotide
acgucauacuuccauucgg

SEQ ID NO: 868447 - RNA, 19 nt, Artificial Sequence
  Description of Artificial Sequence: Synthetic oligonucleotide
uaguuugaacugcuauuag

SEQ ID NO: 868448 - RNA, 19 nt, Artificial Sequence
  Description of Artificial Sequence: Synthetic oligonucleotide
cucucucacacacacacac

SEQ ID NO: 868449 - RNA, 19 nt, Artificial Sequence
  Description of Artificial Sequence: Synthetic oligonucleotide
guuguaaccaguguaguca

SEQ ID NO: 868450 - RNA, 19 nt, Artificial Sequence
  Description of Artificial Sequence: Synthetic oligonucleotide
aagugauccccgccgccgc

SEQ ID NO: 868451 - RNA, 19 nt, Artificial Sequence
  Description of Artificial Sequence: Synthetic oligonucleotide
ucauacuuccauucgggaa

SEQ ID NO: 868452 - RNA, 19 nt, Artificial Sequence
  Description of Artificial Sequence: Synthetic oligonucleotide
uuuaaguagcagcggcggc

SEQ ID NO: 868453 - RNA, 19 nt, Artificial Sequence
  Description of Artificial Sequence: Synthetic oligonucleotide
uccuauaaacauuuuccau

SEQ ID NO: 868454 - RNA, 19 nt, Artificial Sequence
  Description of Artificial Sequence: Synthetic oligonucleotide
auaaccaccguaaccuugg

SEQ ID NO: 868455 - RNA, 19 nt, Artificial Sequence
  Description of Artificial Sequence: Synthetic oligonucleotide
gagaacucagaauuaaacu

SEQ ID NO: 868456 - RNA, 19 nt, Artificial Sequence
  Description of Artificial Sequence: Synthetic oligonucleotide
uuuuaacacaagacuugcu

SEQ ID NO: 868457 - RNA, 19 nt, Artificial Sequence
  Description of Artificial Sequence: Synthetic oligonucleotide
acuugcucuacaauacugg

SEQ ID NO: 868458 - RNA, 19 nt, Artificial Sequence
  Description of Artificial Sequence: Synthetic oligonucleotide
uucccauucaauuuauguu

SEQ ID NO: 868459 - RNA, 19 nt, Artificial Sequence
  Description of Artificial Sequence: Synthetic oligonucleotide
ggaaaauacugcuucacca

SEQ ID NO: 868460 - RNA, 19 nt, Artificial Sequence
  Description of Artificial Sequence: Synthetic oligonucleotide
uucaccaaauuuggaaaag

SEQ ID NO: 868461 - RNA, 19 nt, Artificial Sequence
  Description of Artificial Sequence: Synthetic oligonucleotide
cucucacacacacacacac

SEQ ID NO: 868462 - RNA, 19 nt, Artificial Sequence
  Description of Artificial Sequence: Synthetic oligonucleotide
cucuucgcuuuuaauggcg

SEQ ID NO: 868463 - RNA, 19 nt, Artificial Sequence
  Description of Artificial Sequence: Synthetic oligonucleotide
ucuucgcuuuuaauggcgc

SEQ ID NO: 868464 - RNA, 19 nt, Artificial Sequence
  Description of Artificial Sequence: Synthetic oligonucleotide
ccauucgggaacuugauag

SEQ ID NO: 868465 - RNA, 19 nt, Artificial Sequence
  Description of Artificial Sequence: Synthetic oligonucleotide
aacugcuauuagcaaggug

SEQ ID NO: 868466 - RNA, 19 nt, Artificial Sequence
  Description of Artificial Sequence: Synthetic oligonucleotide
ugcaaacccuccucuagag

SEQ ID NO: 868467 - RNA, 19 nt, Artificial Sequence
  Description of Artificial Sequence: Synthetic oligonucleotide
cuugaucgcccugugauag

SEQ ID NO: 868468 - RNA, 19 nt, Artificial Sequence
  Description of Artificial Sequence: Synthetic oligonucleotide
cugaagcauagcaauuaag

SEQ ID NO: 868469 - RNA, 19 nt, Artificial Sequence
  Description of Artificial Sequence: Synthetic oligonucleotide
aaccgaaacuagcagcaaa

SEQ ID NO: 868470 - RNA, 19 nt, Artificial Sequence
  Description of Artificial Sequence: Synthetic oligonucleotide
acauuuacuaagaccaaca

SEQ ID NO: 868471 - RNA, 19 nt, Artificial Sequence
  Description of Artificial Sequence: Synthetic oligonucleotide
gacucuuuaaauagcacaa

SEQ ID NO: 868472 - RNA, 19 nt, Artificial Sequence
  Description of Artificial Sequence: Synthetic oligonucleotide
cucucucucucucacacac

SEQ ID NO: 868473 - RNA, 19 nt, Artificial Sequence
  Description of Artificial Sequence: Synthetic oligonucleotide
guaguuguuguaaccagug

SEQ ID NO: 868474 - RNA, 19 nt, Artificial Sequence
  Description of Artificial Sequence: Synthetic oligonucleotide
aucgcccugugauaggauc

SEQ ID NO: 868475 - RNA, 19 nt, Artificial Sequence
  Description of Artificial Sequence: Synthetic oligonucleotide
gauugcuauaaucaccaua

SEQ ID NO: 868476 - RNA, 19 nt, Artificial Sequence
  Description of Artificial Sequence: Synthetic oligonucleotide
aacccacgccucuuauugg

SEQ ID NO: 868477 - RNA, 19 nt, Artificial Sequence
  Description of Artificial Sequence: Synthetic oligonucleotide
uacuuucccauaaccacuc

SEQ ID NO: 868478 - RNA, 19 nt, Artificial Sequence
  Description of Artificial Sequence: Synthetic oligonucleotide
auggcuacuuuuauuucac

SEQ ID NO: 868479 - RNA, 19 nt, Artificial Sequence
  Description of Artificial Sequence: Synthetic oligonucleotide
guagugucccagcuaaggc

SEQ ID NO: 868480 - RNA, 19 nt, Artificial Sequence
  Description of Artificial Sequence: Synthetic oligonucleotide
gcuauuagcaagguggcag

SEQ ID NO: 868481 - RNA, 19 nt, Artificial Sequence
  Description of Artificial Sequence: Synthetic oligonucleotide
aucucucucucucucucuc

SEQ ID NO: 868482 - RNA, 19 nt, Artificial Sequence
  Description of Artificial Sequence: Synthetic oligonucleotide
gcuaaggccuccuauaaac

SEQ ID NO: 868483 - RNA, 19 nt, Artificial Sequence
  Description of Artificial Sequence: Synthetic oligonucleotide
cacacacacacacaccuac

SEQ ID NO: 868484 - RNA, 19 nt, Artificial Sequence
  Description of Artificial Sequence: Synthetic oligonucleotide
cauaaccaccguaaccuug

SEQ ID NO: 868485 - RNA, 19 nt, Artificial Sequence
  Description of Artificial Sequence: Synthetic oligonucleotide
gcuguuauauccauaguug

SEQ ID NO: 868486 - RNA, 19 nt, Artificial Sequence
  Description of Artificial Sequence: Synthetic oligonucleotide
aaucucucucucucucucu

SEQ ID NO: 868487 - RNA, 19 nt, Artificial Sequence
  Description of Artificial Sequence: Synthetic oligonucleotide
ccuugauuccaauaguuac

SEQ ID NO: 868488 - RNA, 19 nt, Artificial Sequence
  Description of Artificial Sequence: Synthetic oligonucleotide
caagacuugcucuacaaua

SEQ ID NO: 868489 - RNA, 19 nt, Artificial Sequence
  Description of Artificial Sequence: Synthetic oligonucleotide
uugauuccaauaguuacua

SEQ ID NO: 868490 - RNA, 19 nt, Artificial Sequence
  Description of Artificial Sequence: Synthetic oligonucleotide
ucgcgaggcacacaagaca

SEQ ID NO: 868491 - RNA, 19 nt, Artificial Sequence
  Description of Artificial Sequence: Synthetic oligonucleotide
uaucuacacucuccgacuc

SEQ ID NO: 868492 - RNA, 19 nt, Artificial Sequence
  Description of Artificial Sequence: Synthetic oligonucleotide
gacuugcucuacaauacug

SEQ ID NO: 868493 - RNA, 19 nt, Artificial Sequence
  Description of Artificial Sequence: Synthetic oligonucleotide
uaauuuaguaugguuugua

SEQ ID NO: 868494 - RNA, 19 nt, Artificial Sequence
  Description of Artificial Sequence: Synthetic oligonucleotide
accgaaacuagcagcaaag

SEQ ID NO: 868495 - RNA, 19 nt, Artificial Sequence
  Description of Artificial Sequence: Synthetic oligonucleotide
cucucucucucucucacac

SEQ ID NO: 868496 - RNA, 19 nt, Artificial Sequence
  Description of Artificial Sequence: Synthetic oligonucleotide
ugaccuuaucuacacucuc

SEQ ID NO: 868497 - RNA, 19 nt, Artificial Sequence
  Description of Artificial Sequence: Synthetic oligonucleotide
cauaguugccauagccuug

SEQ ID NO: 868498 - RNA, 19 nt, Artificial Sequence
  Description of Artificial Sequence: Synthetic oligonucleotide
ucucacacacacacacaca

SEQ ID NO: 868499 - RNA, 19 nt, Artificial Sequence
  Description of Artificial Sequence: Synthetic oligonucleotide
acugaagcauagcaauuaa

SEQ ID NO: 868500 - RNA, 19 nt, Artificial Sequence
  Description of Artificial Sequence: Synthetic oligonucleotide
cucgccuggauacuuuccc

SEQ ID NO: 868501 - RNA, 19 nt, Artificial Sequence
  Description of Artificial Sequence: Synthetic oligonucleotide
acacuacuacaucaugaca

SEQ ID NO: 868502 - RNA, 19 nt, Artificial Sequence
  Description of Artificial Sequence: Synthetic oligonucleotide
uagccuugauuccaauagu

SEQ ID NO: 868503 - RNA, 19 nt, Artificial Sequence
  Description of Artificial Sequence: Synthetic oligonucleotide
agacacuacuacaucauga

SEQ ID NO: 868504 - RNA, 19 nt, Artificial Sequence
  Description of Artificial Sequence: Synthetic oligonucleotide
cuauggauucaaccucacc

SEQ ID NO: 868505 - RNA, 19 nt, Artificial Sequence
  Description of Artificial Sequence: Synthetic oligonucleotide
ucacacacacacacacaca

SEQ ID NO: 868506 - RNA, 19 nt, Artificial Sequence
  Description of Artificial Sequence: Synthetic oligonucleotide
gauaaguugcaaauggaau

SEQ ID NO: 868507 - RNA, 19 nt, Artificial Sequence
  Description of Artificial Sequence: Synthetic oligonucleotide
cacauuuacuaagaccaac

SEQ ID NO: 868508 - RNA, 19 nt, Artificial Sequence
  Description of Artificial Sequence: Synthetic oligonucleotide
uaccucgcgaggcacacaa

SEQ ID NO: 868509 - RNA, 19 nt, Artificial Sequence
  Description of Artificial Sequence: Synthetic oligonucleotide
acacacacacaccuaccug

SEQ ID NO: 868510 - RNA, 19 nt, Artificial Sequence
  Description of Artificial Sequence: Synthetic oligonucleotide
aaaaccccuugaucgcccu

SEQ ID NO: 868511 - RNA, 19 nt, Artificial Sequence
  Description of Artificial Sequence: Synthetic oligonucleotide
ucucucacacacacacaca

SEQ ID NO: 868512 - RNA, 19 nt, Artificial Sequence
  Description of Artificial Sequence: Synthetic oligonucleotide
uuguaaccaguguagucau

SEQ ID NO: 868513 - RNA, 19 nt, Artificial Sequence
  Description of Artificial Sequence: Synthetic oligonucleotide
gaccaccucgccuggauac

SEQ ID NO: 868514 - RNA, 19 nt, Artificial Sequence
  Description of Artificial Sequence: Synthetic oligonucleotide
aaccaccguaaccuuggcu

SEQ ID NO: 868515 - RNA, 19 nt, Artificial Sequence
  Description of Artificial Sequence: Synthetic oligonucleotide
acacaagacaaggcgcgcg

SEQ ID NO: 868516 - RNA, 19 nt, Artificial Sequence
  Description of Artificial Sequence: Synthetic oligonucleotide
acuauaucccugguuccag

SEQ ID NO: 868517 - RNA, 19 nt, Artificial Sequence
  Description of Artificial Sequence: Synthetic oligonucleotide
gucacacugggcuuuuaac

SEQ ID NO: 868518 - RNA, 19 nt, Artificial Sequence
  Description of Artificial Sequence: Synthetic oligonucleotide
cacaagacaaggcgcgcgc

SEQ ID NO: 868519 - RNA, 19 nt, Artificial Sequence
  Description of Artificial Sequence: Synthetic oligonucleotide
cuugauuccaauaguuacu

SEQ ID NO: 868520 - RNA, 19 nt, Artificial Sequence
  Description of Artificial Sequence: Synthetic oligonucleotide
acacacacacacacacacc

SEQ ID NO: 868521 - RNA, 19 nt, Artificial Sequence
  Description of Artificial Sequence: Synthetic oligonucleotide
cagagugcagucuacaacu

SEQ ID NO: 868522 - RNA, 19 nt, Artificial Sequence
  Description of Artificial Sequence: Synthetic oligonucleotide
acacacacacacaccuacc

SEQ ID NO: 868523 - RNA, 19 nt, Artificial Sequence
  Description of Artificial Sequence: Synthetic oligonucleotide
gagggacccaacgucauac

SEQ ID NO: 868524 - RNA, 19 nt, Artificial Sequence
  Description of Artificial Sequence: Synthetic oligonucleotide
uagucauauccuccauaac

SEQ ID NO: 868525 - RNA, 19 nt, Artificial Sequence
  Description of Artificial Sequence: Synthetic oligonucleotide
uaaacuucagagggaccca

SEQ ID NO: 868526 - RNA, 19 nt, Artificial Sequence
  Description of Artificial Sequence: Synthetic oligonucleotide
uugaucgcccugugauagg

SEQ ID NO: 868527 - RNA, 19 nt, Artificial Sequence
  Description of Artificial Sequence: Synthetic oligonucleotide
ucgcccugugauaggaucu

SEQ ID NO: 868528 - RNA, 19 nt, Artificial Sequence
  Description of Artificial Sequence: Synthetic oligonucleotide
agugauccccgccgccgcc

SEQ ID NO: 868529 - RNA, 19 nt, Artificial Sequence
  Description of Artificial Sequence: Synthetic oligonucleotide
aagacaaggcgcgcgcgug

SEQ ID NO: 868530 - RNA, 19 nt, Artificial Sequence
  Description of Artificial Sequence: Synthetic oligonucleotide
uaaccuuggcuguuauauc

SEQ ID NO: 868531 - RNA, 19 nt, Artificial Sequence
  Description of Artificial Sequence: Synthetic oligonucleotide
ucucucucacacacacaca

SEQ ID NO: 868532 - RNA, 19 nt, Artificial Sequence
  Description of Artificial Sequence: Synthetic oligonucleotide
agacaaggcgcgcgcgugg

SEQ ID NO: 868533 - RNA, 19 nt, Artificial Sequence
  Description of Artificial Sequence: Synthetic oligonucleotide
uaaccacucugcugauugc

SEQ ID NO: 868534 - RNA, 19 nt, Artificial Sequence
  Description of Artificial Sequence: Synthetic oligonucleotide
ugaucgcccugugauagga

SEQ ID NO: 868535 - RNA, 19 nt, Artificial Sequence
  Description of Artificial Sequence: Synthetic oligonucleotide
gugauaggaucuaacuuca

SEQ ID NO: 868536 - RNA, 19 nt, Artificial Sequence
  Description of Artificial Sequence: Synthetic oligonucleotide
uaacuucagagugcagucu

SEQ ID NO: 868537 - RNA, 19 nt, Artificial Sequence
  Description of Artificial Sequence: Synthetic oligonucleotide
acuuccauucgggaacuug

SEQ ID NO: 868538 - RNA, 19 nt, Artificial Sequence
  Description of Artificial Sequence: Synthetic oligonucleotide
ugccgcgaaccgaaacuag

SEQ ID NO: 868539 - RNA, 19 nt, Artificial Sequence
  Description of Artificial Sequence: Synthetic oligonucleotide
aguuuugacuggggccacc

SEQ ID NO: 868540 - RNA, 19 nt, Artificial Sequence
  Description of Artificial Sequence: Synthetic oligonucleotide
accucgccuggauacuuuc

SEQ ID NO: 868541 - RNA, 19 nt, Artificial Sequence
  Description of Artificial Sequence: Synthetic oligonucleotide
cucgcgaggcacacaagac

SEQ ID NO: 868542 - RNA, 19 nt, Artificial Sequence
  Description of Artificial Sequence: Synthetic oligonucleotide
uccauucgggaacuugaua

SEQ ID NO: 868543 - RNA, 19 nt, Artificial Sequence
  Description of Artificial Sequence: Synthetic oligonucleotide
uuccauucgggaacuugau

SEQ ID NO: 868544 - RNA, 19 nt, Artificial Sequence
  Description of Artificial Sequence: Synthetic oligonucleotide
cuggauacuuucccauaac

SEQ ID NO: 868545 - RNA, 19 nt, Artificial Sequence
  Description of Artificial Sequence: Synthetic oligonucleotide
acacaagacuugcucuaca

SEQ ID NO: 868546 - RNA, 19 nt, Artificial Sequence
  Description of Artificial Sequence: Synthetic oligonucleotide
ggaucuaacuucagagugc

SEQ ID NO: 868547 - RNA, 19 nt, Artificial Sequence
  Description of Artificial Sequence: Synthetic oligonucleotide
ucucucucucucucucuca

SEQ ID NO: 868548 - RNA, 19 nt, Artificial Sequence
  Description of Artificial Sequence: Synthetic oligonucleotide
ggauacuuucccauaacca

SEQ ID NO: 868549 - RNA, 19 nt, Artificial Sequence
  Description of Artificial Sequence: Synthetic oligonucleotide
gcgaaccgaaacuagcagc

SEQ ID NO: 868550 - RNA, 19 nt, Artificial Sequence
  Description of Artificial Sequence: Synthetic oligonucleotide
cucucucucucucucucac

SEQ ID NO: 868551 - RNA, 19 nt, Artificial Sequence
  Description of Artificial Sequence: Synthetic oligonucleotide
gucauacuuccauucggga

SEQ ID NO: 868552 - RNA, 19 nt, Artificial Sequence
  Description of Artificial Sequence: Synthetic oligonucleotide
acaaaugagucaauacauu

SEQ ID NO: 868553 - RNA, 19 nt, Artificial Sequence
  Description of Artificial Sequence: Synthetic oligonucleotide
acaagacaaggcgcgcgcg

SEQ ID NO: 868554 - RNA, 19 nt, Artificial Sequence
  Description of Artificial Sequence: Synthetic oligonucleotide
auccauaguaguuguugua

SEQ ID NO: 868555 - RNA, 19 nt, Artificial Sequence
  Description of Artificial Sequence: Synthetic oligonucleotide
ccgcggaccaccuaaaaug

SEQ ID NO: 868556 - RNA, 19 nt, Artificial Sequence
  Description of Artificial Sequence: Synthetic oligonucleotide
cacacacacacacacaccu

SEQ ID NO: 868557 - RNA, 19 nt, Artificial Sequence
  Description of Artificial Sequence: Synthetic oligonucleotide
augaccuuaucuacacucu

SEQ ID NO: 868558 - RNA, 19 nt, Artificial Sequence
  Description of Artificial Sequence: Synthetic oligonucleotide
ucucucucucucacacaca

SEQ ID NO: 868559 - RNA, 19 nt, Artificial Sequence
  Description of Artificial Sequence: Synthetic oligonucleotide
aaccaguaagacacuacua

SEQ ID NO: 868560 - RNA, 19 nt, Artificial Sequence
  Description of Artificial Sequence: Synthetic oligonucleotide
ucgccuggauacuuuccca

SEQ ID NO: 868561 - RNA, 19 nt, Artificial Sequence
  Description of Artificial Sequence: Synthetic oligonucleotide
ucucucucucucucucucu

SEQ ID NO: 868562 - RNA, 19 nt, Artificial Sequence
  Description of Artificial Sequence: Synthetic oligonucleotide
aucuacacucuccgacucu

SEQ ID NO: 868563 - RNA, 19 nt, Artificial Sequence
  Description of Artificial Sequence: Synthetic oligonucleotide
ggauaaguugcaaauggaa

SEQ ID NO: 868564 - RNA, 19 nt, Artificial Sequence
  Description of Artificial Sequence: Synthetic oligonucleotide
uggcuguuauauccauagu

SEQ ID NO: 868565 - RNA, 19 nt, Artificial Sequence
  Description of Artificial Sequence: Synthetic oligonucleotide
cucggcgcugccuccuucg

SEQ ID NO: 868566 - RNA, 19 nt, Artificial Sequence
  Description of Artificial Sequence: Synthetic oligonucleotide
ucugguguaucuggagaaa

SEQ ID NO: 868567 - RNA, 19 nt, Artificial Sequence
  Description of Artificial Sequence: Synthetic oligonucleotide
ucucucucucucucucaca

SEQ ID NO: 868568 - RNA, 19 nt, Artificial Sequence
  Description of Artificial Sequence: Synthetic oligonucleotide
ucucucucucucucacaca

SEQ ID NO: 868569 - RNA, 19 nt, Artificial Sequence
  Description of Artificial Sequence: Synthetic oligonucleotide
cccuuuuaggaucaaugac

SEQ ID NO: 868570 - RNA, 19 nt, Artificial Sequence
  Description of Artificial Sequence: Synthetic oligonucleotide
uaaccaccguaaccuuggc

SEQ ID NO: 868571 - RNA, 19 nt, Artificial Sequence
  Description of Artificial Sequence: Synthetic oligonucleotide
acacucuccgacucuuuaa

SEQ ID NO: 868572 - RNA, 19 nt, Artificial Sequence
  Description of Artificial Sequence: Synthetic oligonucleotide
cgucauacuuccauucggg

SEQ ID NO: 868573 - RNA, 19 nt, Artificial Sequence
  Description of Artificial Sequence: Synthetic oligonucleotide
ucuaccucgcgaggcacac

SEQ ID NO: 868574 - RNA, 19 nt, Artificial Sequence
  Description of Artificial Sequence: Synthetic oligonucleotide
cacaagacuugcucuacaa

SEQ ID NO: 868575 - RNA, 19 nt, Artificial Sequence
  Description of Artificial Sequence: Synthetic oligonucleotide
gacgacacccgccgcugcc

SEQ ID NO: 868576 - RNA, 19 nt, Artificial Sequence
  Description of Artificial Sequence: Synthetic oligonucleotide
cucucucucucucucucuc

SEQ ID NO: 868577 - RNA, 19 nt, Artificial Sequence
  Description of Artificial Sequence: Synthetic oligonucleotide
aacuagcagcaaagugauc

SEQ ID NO: 868578 - RNA, 19 nt, Artificial Sequence
  Description of Artificial Sequence: Synthetic oligonucleotide
agcuaaggccuccuauaaa

SEQ ID NO: 868579 - RNA, 19 nt, Artificial Sequence
  Description of Artificial Sequence: Synthetic oligonucleotide
ggaauaauuuaguaugguu

SEQ ID NO: 868580 - RNA, 19 nt, Artificial Sequence
  Description of Artificial Sequence: Synthetic oligonucleotide
aaccaccaaaguacucucu

SEQ ID NO: 868581 - RNA, 19 nt, Artificial Sequence
  Description of Artificial Sequence: Synthetic oligonucleotide
guaaccaguguagucauau

SEQ ID NO: 868582 - RNA, 19 nt, Artificial Sequence
  Description of Artificial Sequence: Synthetic oligonucleotide
uguaaccaguguagucaua

SEQ ID NO: 868583 - RNA, 19 nt, Artificial Sequence
  Description of Artificial Sequence: Synthetic oligonucleotide
auacuuccauucgggaacu

SEQ ID NO: 868584 - RNA, 19 nt, Artificial Sequence
  Description of Artificial Sequence: Synthetic oligonucleotide
agaccaacauugugguauu

SEQ ID NO: 868585 - RNA, 19 nt, Artificial Sequence
  Description of Artificial Sequence: Synthetic oligonucleotide
uguuggggauaaguugcaa

SEQ ID NO: 868586 - RNA, 19 nt, Artificial Sequence
  Description of Artificial Sequence: Synthetic oligonucleotide
uagcgucgaucuucgcccc

SEQ ID NO: 868587 - RNA, 19 nt, Artificial Sequence
  Description of Artificial Sequence: Synthetic oligonucleotide
cugcaaacccuccucuaga

SEQ ID NO: 868588 - RNA, 19 nt, Artificial Sequence
  Description of Artificial Sequence: Synthetic oligonucleotide
cauuuacuaagaccaacau

SEQ ID NO: 868589 - RNA, 19 nt, Artificial Sequence
  Description of Artificial Sequence: Synthetic oligonucleotide
gacaaggcgcgcgcguggc

SEQ ID NO: 868590 - RNA, 19 nt, Artificial Sequence
  Description of Artificial Sequence: Synthetic oligonucleotide
ugcucgcccgccgagccgc

SEQ ID NO: 868591 - RNA, 19 nt, Artificial Sequence
  Description of Artificial Sequence: Synthetic oligonucleotide
cgcggaccaccuaaaaugg

SEQ ID NO: 868592 - RNA, 19 nt, Artificial Sequence
  Description of Artificial Sequence: Synthetic oligonucleotide
ccucuucgcuuuuaauggc

SEQ ID NO: 868593 - RNA, 19 nt, Artificial Sequence
  Description of Artificial Sequence: Synthetic oligonucleotide
auggggagcucuauggauu

SEQ ID NO: 868594 - RNA, 19 nt, Artificial Sequence
  Description of Artificial Sequence: Synthetic oligonucleotide
cuucccgcugugccgucgc

SEQ ID NO: 868595 - RNA, 19 nt, Artificial Sequence
  Description of Artificial Sequence: Synthetic oligonucleotide
cugugauaggaucuaacuu

SEQ ID NO: 868596 - RNA, 19 nt, Artificial Sequence
  Description of Artificial Sequence: Synthetic oligonucleotide
ggacccaacgucauacuuc

SEQ ID NO: 868597 - RNA, 19 nt, Artificial Sequence
  Description of Artificial Sequence: Synthetic oligonucleotide
cacacacacacaccuaccu

SEQ ID NO: 868598 - RNA, 19 nt, Artificial Sequence
  Description of Artificial Sequence: Synthetic oligonucleotide
acgacacccgccgcugccg

SEQ ID NO: 868599 - RNA, 19 nt, Artificial Sequence
  Description of Artificial Sequence: Synthetic oligonucleotide
cgaaccgaaacuagcagca

SEQ ID NO: 868600 - RNA, 19 nt, Artificial Sequence
  Description of Artificial Sequence: Synthetic oligonucleotide
cuucagagggacccaacgu

SEQ ID NO: 868601 - RNA, 19 nt, Artificial Sequence
  Description of Artificial Sequence: Synthetic oligonucleotide
acacacacacacacacaca

SEQ ID NO: 868602 - RNA, 19 nt, Artificial Sequence
  Description of Artificial Sequence: Synthetic oligonucleotide
ucucgcgcggcgcgcacuc

SEQ ID NO: 868603 - RNA, 19 nt, Artificial Sequence
  Description of Artificial Sequence: Synthetic oligonucleotide
ggauucaaccucaccaaaa

SEQ ID NO: 868604 - RNA, 19 nt, Artificial Sequence
  Description of Artificial Sequence: Synthetic oligonucleotide
ccaaaaccccuugaucgcc

SEQ ID NO: 868605 - RNA, 19 nt, Artificial Sequence
  Description of Artificial Sequence: Synthetic oligonucleotide
agagggacccaacgucaua

SEQ ID NO: 868606 - RNA, 19 nt, Artificial Sequence
  Description of Artificial Sequence: Synthetic oligonucleotide
guagcagcggcggccacuc

SEQ ID NO: 868607 - RNA, 19 nt, Artificial Sequence
  Description of Artificial Sequence: Synthetic oligonucleotide
gaaccgaaacuagcagcaa

SEQ ID NO: 868608 - RNA, 19 nt, Artificial Sequence
  Description of Artificial Sequence: Synthetic oligonucleotide
aucuaacuucagagugcag

SEQ ID NO: 868609 - RNA, 19 nt, Artificial Sequence
  Description of Artificial Sequence: Synthetic oligonucleotide
ccgacauagugcugcugcc

SEQ ID NO: 868610 - RNA, 19 nt, Artificial Sequence
  Description of Artificial Sequence: Synthetic oligonucleotide
cucuaccucgcgaggcaca

SEQ ID NO: 868611 - RNA, 19 nt, Artificial Sequence
  Description of Artificial Sequence: Synthetic oligonucleotide
gccgcgaaccgaaacuagc

SEQ ID NO: 868612 - RNA, 19 nt, Artificial Sequence
  Description of Artificial Sequence: Synthetic oligonucleotide
agagugcagucuacaacuu

SEQ ID NO: 868613 - RNA, 19 nt, Artificial Sequence
  Description of Artificial Sequence: Synthetic oligonucleotide
ucccacucucgcgcggcgc

SEQ ID NO: 868614 - RNA, 19 nt, Artificial Sequence
  Description of Artificial Sequence: Synthetic oligonucleotide
ucgcgcggcgcgcacucuc

SEQ ID NO: 868615 - RNA, 19 nt, Artificial Sequence
  Description of Artificial Sequence: Synthetic oligonucleotide
ccucgcgaggcacacaaga

SEQ ID NO: 868616 - RNA, 19 nt, Artificial Sequence
  Description of Artificial Sequence: Synthetic oligonucleotide
cgcgaaccgaaacuagcag

SEQ ID NO: 868617 - RNA, 19 nt, Artificial Sequence
  Description of Artificial Sequence: Synthetic oligonucleotide
auggcgccgccgcggacca

SEQ ID NO: 868618 - RNA, 19 nt, Artificial Sequence
  Description of Artificial Sequence: Synthetic oligonucleotide
caguuuugacuggggccac

SEQ ID NO: 868619 - RNA, 19 nt, Artificial Sequence
  Description of Artificial Sequence: Synthetic oligonucleotide
ucccagcuaaggccuccua

SEQ ID NO: 868620 - RNA, 19 nt, Artificial Sequence
  Description of Artificial Sequence: Synthetic oligonucleotide
accaccucgccuggauacu

SEQ ID NO: 868621 - RNA, 19 nt, Artificial Sequence
  Description of Artificial Sequence: Synthetic oligonucleotide
ggaggaguuugaauggccu

SEQ ID NO: 868622 - RNA, 19 nt, Artificial Sequence
  Description of Artificial Sequence: Synthetic oligonucleotide
ggcgcgcacucucacucug

SEQ ID NO: 868623 - RNA, 19 nt, Artificial Sequence
  Description of Artificial Sequence: Synthetic oligonucleotide
accguaaccuuggcuguua

SEQ ID NO: 868624 - RNA, 19 nt, Artificial Sequence
  Description of Artificial Sequence: Synthetic oligonucleotide
gcugccgcgaaccgaaacu

SEQ ID NO: 868625 - RNA, 19 nt, Artificial Sequence
  Description of Artificial Sequence: Synthetic oligonucleotide
caagacaaggcgcgcgcgu

SEQ ID NO: 868626 - RNA, 19 nt, Artificial Sequence
  Description of Artificial Sequence: Synthetic oligonucleotide
ccgcgaaccgaaacuagca

SEQ ID NO: 868627 - RNA, 19 nt, Artificial Sequence
  Description of Artificial Sequence: Synthetic oligonucleotide
gcggcgcgcacucucacuc

SEQ ID NO: 868628 - RNA, 19 nt, Artificial Sequence
  Description of Artificial Sequence: Synthetic oligonucleotide
acacacacacacacaccua

SEQ ID NO: 868629 - RNA, 19 nt, Artificial Sequence
  Description of Artificial Sequence: Synthetic oligonucleotide
gcgcgcguggcugcaaagg

SEQ ID NO: 868630 - RNA, 19 nt, Artificial Sequence
  Description of Artificial Sequence: Synthetic oligonucleotide
ccuuaucuacacucuccga

SEQ ID NO: 868631 - RNA, 19 nt, Artificial Sequence
  Description of Artificial Sequence: Synthetic oligonucleotide
gccccggccgcacugaaaa

SEQ ID NO: 868632 - RNA, 19 nt, Artificial Sequence
  Description of Artificial Sequence: Synthetic oligonucleotide
ccgucgcugcuucagugug

SEQ ID NO: 868633 - RNA, 19 nt, Artificial Sequence
  Description of Artificial Sequence: Synthetic oligonucleotide
gccgccgagacgacacccg

SEQ ID NO: 868634 - RNA, 19 nt, Artificial Sequence
  Description of Artificial Sequence: Synthetic oligonucleotide
cgcgaggcacacaagacaa

SEQ ID NO: 868635 - RNA, 19 nt, Artificial Sequence
  Description of Artificial Sequence: Synthetic oligonucleotide
gggagcucuauggauucaa

SEQ ID NO: 868636 - RNA, 19 nt, Artificial Sequence
  Description of Artificial Sequence: Synthetic oligonucleotide
gcgcacucucacucugccc

SEQ ID NO: 868637 - RNA, 19 nt, Artificial Sequence
  Description of Artificial Sequence: Synthetic oligonucleotide
cgcgcguggcugcaaaggc

SEQ ID NO: 868638 - RNA, 19 nt, Artificial Sequence
  Description of Artificial Sequence: Synthetic oligonucleotide
cugccgcgaaccgaaacua

SEQ ID NO: 868639 - RNA, 19 nt, Artificial Sequence
  Description of Artificial Sequence: Synthetic oligonucleotide
accucgcgaggcacacaag

SEQ ID NO: 868640 - RNA, 19 nt, Artificial Sequence
  Description of Artificial Sequence: Synthetic oligonucleotide
cccgccgagccgccuaccg

SEQ ID NO: 868641 - RNA, 19 nt, Artificial Sequence
  Description of Artificial Sequence: Synthetic oligonucleotide
cgcgcacucucacucugcc

SEQ ID NO: 868642 - RNA, 19 nt, Artificial Sequence
  Description of Artificial Sequence: Synthetic oligonucleotide
gccgccgcggaccaccuaa

SEQ ID NO: 868643 - RNA, 19 nt, Artificial Sequence
  Description of Artificial Sequence: Synthetic oligonucleotide
acgccucuuauuggucuua

SEQ ID NO: 868644 - RNA, 19 nt, Artificial Sequence
  Description of Artificial Sequence: Synthetic oligonucleotide
ccgcucuaccucgcgaggc

SEQ ID NO: 868645 - RNA, 19 nt, Artificial Sequence
  Description of Artificial Sequence: Synthetic oligonucleotide
cccaacgucauacuuccau

SEQ ID NO: 868646 - RNA, 19 nt, Artificial Sequence
  Description of Artificial Sequence: Synthetic oligonucleotide
cccacgccucuuauugguc

SEQ ID NO: 868647 - RNA, 19 nt, Artificial Sequence
  Description of Artificial Sequence: Synthetic oligonucleotide
gcucuaccucgcgaggcac

SEQ ID NO: 868648 - RNA, 19 nt, Artificial Sequence
  Description of Artificial Sequence: Synthetic oligonucleotide
ccucgccucccacucucgc

SEQ ID NO: 868649 - RNA, 19 nt, Artificial Sequence
  Description of Artificial Sequence: Synthetic oligonucleotide
ccgccgagacgacacccgc

SEQ ID NO: 868650 - RNA, 19 nt, Artificial Sequence
  Description of Artificial Sequence: Synthetic oligonucleotide
ccuugaucgcccugugaua

SEQ ID NO: 868651 - RNA, 19 nt, Artificial Sequence
  Description of Artificial Sequence: Synthetic oligonucleotide
ccgccuaccgccgccguug

SEQ ID NO: 868652 - RNA, 19 nt, Artificial Sequence
  Description of Artificial Sequence: Synthetic oligonucleotide
ccucccacucucgcgcggc

SEQ ID NO: 868653 - RNA, 19 nt, Artificial Sequence
  Description of Artificial Sequence: Synthetic oligonucleotide
gccgcggaccaccuaaaau

SEQ ID NO: 868654 - RNA, 19 nt, Artificial Sequence
  Description of Artificial Sequence: Synthetic oligonucleotide
gccgcugccgcgaaccgaa

SEQ ID NO: 868655 - RNA, 19 nt, Artificial Sequence
  Description of Artificial Sequence: Synthetic oligonucleotide
cucugcugauugcuauaau

SEQ ID NO: 868656 - RNA, 19 nt, Artificial Sequence
  Description of Artificial Sequence: Synthetic oligonucleotide
gaucgcccugugauaggau

SEQ ID NO: 868657 - RNA, 19 nt, Artificial Sequence
  Description of Artificial Sequence: Synthetic oligonucleotide
cgccgagacgacacccgcc

SEQ ID NO: 868658 - RNA, 19 nt, Artificial Sequence
  Description of Artificial Sequence: Synthetic oligonucleotide
ccucuagagccccacugcu

SEQ ID NO: 868659 - RNA, 19 nt, Artificial Sequence
  Description of Artificial Sequence: Synthetic oligonucleotide
gugugucguggggaggagu

SEQ ID NO: 868660 - RNA, 19 nt, Artificial Sequence
  Description of Artificial Sequence: Synthetic oligonucleotide
gugccgucgcugcuucagu

SEQ ID NO: 868661 - RNA, 19 nt, Artificial Sequence
  Description of Artificial Sequence: Synthetic oligonucleotide
gcgcccgcucuaccucgcg

SEQ ID NO: 868662 - RNA, 19 nt, Artificial Sequence
  Description of Artificial Sequence: Synthetic oligonucleotide
cuaccucgcgaggcacaca

SEQ ID NO: 868663 - RNA, 19 nt, Artificial Sequence
  Description of Artificial Sequence: Synthetic oligonucleotide
cacucucgcgcggcgcgca

SEQ ID NO: 868664 - RNA, 19 nt, Artificial Sequence
  Description of Artificial Sequence: Synthetic oligonucleotide
gcgcgcacucucacucugc

SEQ ID NO: 868665 - RNA, 19 nt, Artificial Sequence
  Description of Artificial Sequence: Synthetic oligonucleotide
ccaccguaaccuuggcugu

SEQ ID NO: 868666 - RNA, 19 nt, Artificial Sequence
  Description of Artificial Sequence: Synthetic oligonucleotide
ccgaaacuagcagcaaagu

SEQ ID NO: 868667 - RNA, 19 nt, Artificial Sequence
  Description of Artificial Sequence: Synthetic oligonucleotide
cgacacccgccgcugccgc

SEQ ID NO: 868668 - RNA, 19 nt, Artificial Sequence
  Description of Artificial Sequence: Synthetic oligonucleotide
caccucgccuggauacuuu

SEQ ID NO: 868669 - RNA, 19 nt, Artificial Sequence
  Description of Artificial Sequence: Synthetic oligonucleotide
gccuaccgccgccguugcc

SEQ ID NO: 868670 - RNA, 19 nt, Artificial Sequence
  Description of Artificial Sequence: Synthetic oligonucleotide
cgcucuaccucgcgaggca

SEQ ID NO: 868671 - RNA, 19 nt, Artificial Sequence
  Description of Artificial Sequence: Synthetic oligonucleotide
ccgccgcugccgcgaaccg

SEQ ID NO: 868672 - RNA, 19 nt, Artificial Sequence
  Description of Artificial Sequence: Synthetic oligonucleotide
cguaaccuuggcuguuaua

SEQ ID NO: 868673 - RNA, 19 nt, Artificial Sequence
  Description of Artificial Sequence: Synthetic oligonucleotide
ccccguccccuccgaacug

SEQ ID NO: 868674 - RNA, 19 nt, Artificial Sequence
  Description of Artificial Sequence: Synthetic oligonucleotide
ccacucucgcgcggcgcgc

SEQ ID NO: 868675 - RNA, 19 nt, Artificial Sequence
  Description of Artificial Sequence: Synthetic oligonucleotide
ccauaaccaccguaaccuu

SEQ ID NO: 868676 - RNA, 19 nt, Artificial Sequence
  Description of Artificial Sequence: Synthetic oligonucleotide
cugccccggccgcacugaa

SEQ ID NO: 868677 - RNA, 19 nt, Artificial Sequence
  Description of Artificial Sequence: Synthetic oligonucleotide
gcgcguggcugcaaaggcu

SEQ ID NO: 868678 - RNA, 19 nt, Artificial Sequence
  Description of Artificial Sequence: Synthetic oligonucleotide
gcgcggcgcgcacucucac

SEQ ID NO: 868679 - RNA, 19 nt, Artificial Sequence
  Description of Artificial Sequence: Synthetic oligonucleotide
gugucguggggaggaguuu

SEQ ID NO: 868680 - RNA, 19 nt, Artificial Sequence
  Description of Artificial Sequence: Synthetic oligonucleotide
caccguaaccuuggcuguu

SEQ ID NO: 868681 - RNA, 19 nt, Artificial Sequence
  Description of Artificial Sequence: Synthetic oligonucleotide
cgcgcccgcucuaccucgc

SEQ ID NO: 868682 - RNA, 19 nt, Artificial Sequence
  Description of Artificial Sequence: Synthetic oligonucleotide
ccguaaccuuggcuguuau

SEQ ID NO: 868683 - RNA, 19 nt, Artificial Sequence
  Description of Artificial Sequence: Synthetic oligonucleotide
ccgccgcggaccaccuaaa

SEQ ID NO: 868684 - RNA, 19 nt, Artificial Sequence
  Description of Artificial Sequence: Synthetic oligonucleotide
cgccgcggaccaccuaaaa

SEQ ID NO: 868685 - RNA, 19 nt, Artificial Sequence
  Description of Artificial Sequence: Synthetic oligonucleotide
cucgcgcggcgcgcacucu

SEQ ID NO: 868686 - RNA, 19 nt, Artificial Sequence
  Description of Artificial Sequence: Synthetic oligonucleotide
gccgccuaccgccgccguu

SEQ ID NO: 868687 - RNA, 19 nt, Artificial Sequence
  Description of Artificial Sequence: Synthetic oligonucleotide
ccaccucgccuggauacuu

SEQ ID NO: 868688 - RNA, 19 nt, Artificial Sequence
  Description of Artificial Sequence: Synthetic oligonucleotide
cgccgcgcgcccgcucuac

SEQ ID NO: 868689 - RNA, 19 nt, Artificial Sequence
  Description of Artificial Sequence: Synthetic oligonucleotide
cgccgcugccgcgaaccga

SEQ ID NO: 868690 - RNA, 19 nt, Artificial Sequence
  Description of Artificial Sequence: Synthetic oligonucleotide
gccucggcgcugccuccuu

SEQ ID NO: 868691 - RNA, 19 nt, Artificial Sequence
  Description of Artificial Sequence: Synthetic oligonucleotide
cggcgcgcacucucacucu

SEQ ID NO: 868692 - RNA, 19 nt, Artificial Sequence
  Description of Artificial Sequence: Synthetic oligonucleotide
cggcgcugccuccuucggu

SEQ ID NO: 868693 - RNA, 19 nt, Artificial Sequence
  Description of Artificial Sequence: Synthetic oligonucleotide
aauguaaggucucagauga

SEQ ID NO: 868694 - RNA, 19 nt, Artificial Sequence
  Description of Artificial Sequence: Synthetic oligonucleotide
ugauuuaccacucauggag

SEQ ID NO: 868695 - RNA, 19 nt, Artificial Sequence
  Description of Artificial Sequence: Synthetic oligonucleotide
auuuguaagagcuuugagg

SEQ ID NO: 868696 - RNA, 19 nt, Artificial Sequence
  Description of Artificial Sequence: Synthetic oligonucleotide
uuaaaugagggccuguagg

SEQ ID NO: 868697 - RNA, 19 nt, Artificial Sequence
  Description of Artificial Sequence: Synthetic oligonucleotide
uuaaacugucucaugaggg

SEQ ID NO: 868698 - RNA, 19 nt, Artificial Sequence
  Description of Artificial Sequence: Synthetic oligonucleotide
uuuguaagagcuuugaggu

SEQ ID NO: 868699 - RNA, 19 nt, Artificial Sequence
  Description of Artificial Sequence: Synthetic oligonucleotide
ugugaugccacccacaaca

SEQ ID NO: 868700 - RNA, 19 nt, Artificial Sequence
  Description of Artificial Sequence: Synthetic oligonucleotide
uuuuaaggagaucagugag

SEQ ID NO: 868701 - RNA, 19 nt, Artificial Sequence
  Description of Artificial Sequence: Synthetic oligonucleotide
agaguaaauguauaugagg

SEQ ID NO: 868702 - RNA, 19 nt, Artificial Sequence
  Description of Artificial Sequence: Synthetic oligonucleotide
ucucuuagaugucagaagc

SEQ ID NO: 868703 - RNA, 19 nt, Artificial Sequence
  Description of Artificial Sequence: Synthetic oligonucleotide
augaagacugcucuggucg

SEQ ID NO: 868704 - RNA, 19 nt, Artificial Sequence
  Description of Artificial Sequence: Synthetic oligonucleotide
auuaacaguuccucggagc

SEQ ID NO: 868705 - RNA, 19 nt, Artificial Sequence
  Description of Artificial Sequence: Synthetic oligonucleotide
gaaaugucagguuaauugc

SEQ ID NO: 868706 - RNA, 19 nt, Artificial Sequence
  Description of Artificial Sequence: Synthetic oligonucleotide
uccaggaagauuacaauag

SEQ ID NO: 868707 - RNA, 19 nt, Artificial Sequence
  Description of Artificial Sequence: Synthetic oligonucleotide
uuaaucauagguagcagcu

SEQ ID NO: 868708 - RNA, 19 nt, Artificial Sequence
  Description of Artificial Sequence: Synthetic oligonucleotide
uucaugaacaugcugaauc

SEQ ID NO: 868709 - RNA, 19 nt, Artificial Sequence
  Description of Artificial Sequence: Synthetic oligonucleotide
ugcaugguuaugaagacug

SEQ ID NO: 868710 - RNA, 19 nt, Artificial Sequence
  Description of Artificial Sequence: Synthetic oligonucleotide
uuaaauauuuccuccacaa

SEQ ID NO: 868711 - RNA, 19 nt, Artificial Sequence
  Description of Artificial Sequence: Synthetic oligonucleotide
acaggaguaaaccaucuuc

SEQ ID NO: 868712 - RNA, 19 nt, Artificial Sequence
  Description of Artificial Sequence: Synthetic oligonucleotide
aaguuaucccacuuggcag

SEQ ID NO: 868713 - RNA, 19 nt, Artificial Sequence
  Description of Artificial Sequence: Synthetic oligonucleotide
acguaaauauaucauucac

SEQ ID NO: 868714 - RNA, 19 nt, Artificial Sequence
  Description of Artificial Sequence: Synthetic oligonucleotide
cauagacagacuuaaacug

SEQ ID NO: 868715 - RNA, 19 nt, Artificial Sequence
  Description of Artificial Sequence: Synthetic oligonucleotide
uuggagagaaacacaaucc

SEQ ID NO: 868716 - RNA, 19 nt, Artificial Sequence
  Description of Artificial Sequence: Synthetic oligonucleotide
gaagauuacaauaggggag

SEQ ID NO: 868717 - RNA, 19 nt, Artificial Sequence
  Description of Artificial Sequence: Synthetic oligonucleotide
gcugaauccaguuuuaagg

SEQ ID NO: 868718 - RNA, 19 nt, Artificial Sequence
  Description of Artificial Sequence: Synthetic oligonucleotide
uugagguuauucuugaaga

SEQ ID NO: 868719 - RNA, 19 nt, Artificial Sequence
  Description of Artificial Sequence: Synthetic oligonucleotide
acauagacagacuuaaacu

SEQ ID NO: 868720 - RNA, 19 nt, Artificial Sequence
  Description of Artificial Sequence: Synthetic oligonucleotide
aggauuaacaguuccucgg

SEQ ID NO: 868721 - RNA, 19 nt, Artificial Sequence
  Description of Artificial Sequence: Synthetic oligonucleotide
cuaacuccaaaccauaaug

SEQ ID NO: 868722 - RNA, 19 nt, Artificial Sequence
  Description of Artificial Sequence: Synthetic oligonucleotide
cuuaaucauagguagcagc

SEQ ID NO: 868723 - RNA, 19 nt, Artificial Sequence
  Description of Artificial Sequence: Synthetic oligonucleotide
gaccauuuuggcuucagag

SEQ ID NO: 868724 - RNA, 19 nt, Artificial Sequence
  Description of Artificial Sequence: Synthetic oligonucleotide
uucaacagugguuuauagg

SEQ ID NO: 868725 - RNA, 19 nt, Artificial Sequence
  Description of Artificial Sequence: Synthetic oligonucleotide
cuugaagagcugaauauag

SEQ ID NO: 868726 - RNA, 19 nt, Artificial Sequence
  Description of Artificial Sequence: Synthetic oligonucleotide
cuuaaacugucucaugagg

SEQ ID NO: 868727 - RNA, 19 nt, Artificial Sequence
  Description of Artificial Sequence: Synthetic oligonucleotide
agagugcucauauaauuuc

SEQ ID NO: 868728 - RNA, 19 nt, Artificial Sequence
  Description of Artificial Sequence: Synthetic oligonucleotide
uucacuuuugaagaacggg

SEQ ID NO: 868729 - RNA, 19 nt, Artificial Sequence
  Description of Artificial Sequence: Synthetic oligonucleotide
uuuguuacuccugagguga

SEQ ID NO: 868730 - RNA, 19 nt, Artificial Sequence
  Description of Artificial Sequence: Synthetic oligonucleotide
uuaacaguuccucggagcu

SEQ ID NO: 868731 - RNA, 19 nt, Artificial Sequence
  Description of Artificial Sequence: Synthetic oligonucleotide
uauuucaguaggaaucuga

SEQ ID NO: 868732 - RNA, 19 nt, Artificial Sequence
  Description of Artificial Sequence: Synthetic oligonucleotide
aauggugacagauggguau

SEQ ID NO: 868733 - RNA, 19 nt, Artificial Sequence
  Description of Artificial Sequence: Synthetic oligonucleotide
uuaaggagaucagugaggc

SEQ ID NO: 868734 - RNA, 19 nt, Artificial Sequence
  Description of Artificial Sequence: Synthetic oligonucleotide
uguauguucaaugucagua

SEQ ID NO: 868735 - RNA, 19 nt, Artificial Sequence
  Description of Artificial Sequence: Synthetic oligonucleotide
uuuucuguuaugaccaaaa

SEQ ID NO: 868736 - RNA, 19 nt, Artificial Sequence
  Description of Artificial Sequence: Synthetic oligonucleotide
agagcuuugagguuauucu

SEQ ID NO: 868737 - RNA, 19 nt, Artificial Sequence
  Description of Artificial Sequence: Synthetic oligonucleotide
gcuaaagacagcuugacac

SEQ ID NO: 868738 - RNA, 19 nt, Artificial Sequence
  Description of Artificial Sequence: Synthetic oligonucleotide
gaaguuaucccacuuggca

SEQ ID NO: 868739 - RNA, 19 nt, Artificial Sequence
  Description of Artificial Sequence: Synthetic oligonucleotide
caugguugaauccccaagg

SEQ ID NO: 868740 - RNA, 19 nt, Artificial Sequence
  Description of Artificial Sequence: Synthetic oligonucleotide
gaggauuaacaguuccucg

SEQ ID NO: 868741 - RNA, 19 nt, Artificial Sequence
  Description of Artificial Sequence: Synthetic oligonucleotide
uaggggagagguuaaauga

SEQ ID NO: 868742 - RNA, 19 nt, Artificial Sequence
  Description of Artificial Sequence: Synthetic oligonucleotide
agacguaaauauaucauuc

SEQ ID NO: 868743 - RNA, 19 nt, Artificial Sequence
  Description of Artificial Sequence: Synthetic oligonucleotide
auaccuauaauuaguaaug

SEQ ID NO: 868744 - RNA, 19 nt, Artificial Sequence
  Description of Artificial Sequence: Synthetic oligonucleotide
cuauaauuaguaaugcaga

SEQ ID NO: 868745 - RNA, 19 nt, Artificial Sequence
  Description of Artificial Sequence: Synthetic oligonucleotide
ugagguuauucuugaagag

SEQ ID NO: 868746 - RNA, 19 nt, Artificial Sequence
  Description of Artificial Sequence: Synthetic oligonucleotide
gacuuaaacugucucauga

SEQ ID NO: 868747 - RNA, 19 nt, Artificial Sequence
  Description of Artificial Sequence: Synthetic oligonucleotide
uaaaugagggccuguaggu

SEQ ID NO: 868748 - RNA, 19 nt, Artificial Sequence
  Description of Artificial Sequence: Synthetic oligonucleotide
uguaaggucucagaugaag

SEQ ID NO: 868749 - RNA, 19 nt, Artificial Sequence
  Description of Artificial Sequence: Synthetic oligonucleotide
uaaugcuuaucucuacuac

SEQ ID NO: 868750 - RNA, 19 nt, Artificial Sequence
  Description of Artificial Sequence: Synthetic oligonucleotide
agguuaauugcagagucac

SEQ ID NO: 868751 - RNA, 19 nt, Artificial Sequence
  Description of Artificial Sequence: Synthetic oligonucleotide
uaugaggaggauuaacagu

SEQ ID NO: 868752 - RNA, 19 nt, Artificial Sequence
  Description of Artificial Sequence: Synthetic oligonucleotide
aaaggggacaacucugacu

SEQ ID NO: 868753 - RNA, 19 nt, Artificial Sequence
  Description of Artificial Sequence: Synthetic oligonucleotide
ugauuuucuguagcaaagg

SEQ ID NO: 868754 - RNA, 19 nt, Artificial Sequence
  Description of Artificial Sequence: Synthetic oligonucleotide
ugugauuuucuguagcaaa

SEQ ID NO: 868755 - RNA, 19 nt, Artificial Sequence
  Description of Artificial Sequence: Synthetic oligonucleotide
aucucuacuacuacuugcc

SEQ ID NO: 868756 - RNA, 19 nt, Artificial Sequence
  Description of Artificial Sequence: Synthetic oligonucleotide
aagucagcuaaagacagcu

SEQ ID NO: 868757 - RNA, 19 nt, Artificial Sequence
  Description of Artificial Sequence: Synthetic oligonucleotide
uucucuuagaugucagaag

SEQ ID NO: 868758 - RNA, 19 nt, Artificial Sequence
  Description of Artificial Sequence: Synthetic oligonucleotide
agaaacacaaucccagggu

SEQ ID NO: 868759 - RNA, 19 nt, Artificial Sequence
  Description of Artificial Sequence: Synthetic oligonucleotide
auaggggagagguuaaaug

SEQ ID NO: 868760 - RNA, 19 nt, Artificial Sequence
  Description of Artificial Sequence: Synthetic oligonucleotide
gggacuuaaucauagguag

SEQ ID NO: 868761 - RNA, 19 nt, Artificial Sequence
  Description of Artificial Sequence: Synthetic oligonucleotide
agagaaacacaaucccagg

SEQ ID NO: 868762 - RNA, 19 nt, Artificial Sequence
  Description of Artificial Sequence: Synthetic oligonucleotide
gaaaucacagauuucagau

SEQ ID NO: 868763 - RNA, 19 nt, Artificial Sequence
  Description of Artificial Sequence: Synthetic oligonucleotide
uuucacuagaugcgucugg

SEQ ID NO: 868764 - RNA, 19 nt, Artificial Sequence
  Description of Artificial Sequence: Synthetic oligonucleotide
gucagcuaaagacagcuug

SEQ ID NO: 868765 - RNA, 19 nt, Artificial Sequence
  Description of Artificial Sequence: Synthetic oligonucleotide
ucagcuaaagacagcuuga

SEQ ID NO: 868766 - RNA, 19 nt, Artificial Sequence
  Description of Artificial Sequence: Synthetic oligonucleotide
acaacaaagaggaucaaga

SEQ ID NO: 868767 - RNA, 19 nt, Artificial Sequence
  Description of Artificial Sequence: Synthetic oligonucleotide
aggauguauguucaauguc

SEQ ID NO: 868768 - RNA, 19 nt, Artificial Sequence
  Description of Artificial Sequence: Synthetic oligonucleotide
aguucauacagguccuauc

SEQ ID NO: 868769 - RNA, 19 nt, Artificial Sequence
  Description of Artificial Sequence: Synthetic oligonucleotide
uggggacuuaaucauaggu

SEQ ID NO: 868770 - RNA, 19 nt, Artificial Sequence
  Description of Artificial Sequence: Synthetic oligonucleotide
uauaggaugccugaugggu

SEQ ID NO: 868771 - RNA, 19 nt, Artificial Sequence
  Description of Artificial Sequence: Synthetic oligonucleotide
cucuacuacuacuugccgg

SEQ ID NO: 868772 - RNA, 19 nt, Artificial Sequence
  Description of Artificial Sequence: Synthetic oligonucleotide
uuaaguggcuucaggaguc

SEQ ID NO: 868773 - RNA, 19 nt, Artificial Sequence
  Description of Artificial Sequence: Synthetic oligonucleotide
uuauaggaugccugauggg

SEQ ID NO: 868774 - RNA, 19 nt, Artificial Sequence
  Description of Artificial Sequence: Synthetic oligonucleotide
acuacuacuugccggcagg

SEQ ID NO: 868775 - RNA, 19 nt, Artificial Sequence
  Description of Artificial Sequence: Synthetic oligonucleotide
ugccugauggguaugauuu

SEQ ID NO: 868776 - RNA, 19 nt, Artificial Sequence
  Description of Artificial Sequence: Synthetic oligonucleotide
acagacuuaaacugucuca

SEQ ID NO: 868777 - RNA, 19 nt, Artificial Sequence
  Description of Artificial Sequence: Synthetic oligonucleotide
ucucuacuacuacuugccg

SEQ ID NO: 868778 - RNA, 19 nt, Artificial Sequence
  Description of Artificial Sequence: Synthetic oligonucleotide
gucgaauuaagucauaccu

SEQ ID NO: 868779 - RNA, 19 nt, Artificial Sequence
  Description of Artificial Sequence: Synthetic oligonucleotide
ugugacucuccccauacuc

SEQ ID NO: 868780 - RNA, 19 nt, Artificial Sequence
  Description of Artificial Sequence: Synthetic oligonucleotide
gacagaguaaauguauaug

SEQ ID NO: 868781 - RNA, 19 nt, Artificial Sequence
  Description of Artificial Sequence: Synthetic oligonucleotide
agaucagugaggccugagg

SEQ ID NO: 868782 - RNA, 19 nt, Artificial Sequence
  Description of Artificial Sequence: Synthetic oligonucleotide
gauuaacaguuccucggag

SEQ ID NO: 868783 - RNA, 19 nt, Artificial Sequence
  Description of Artificial Sequence: Synthetic oligonucleotide
caggauuaaauauuuccuc

SEQ ID NO: 868784 - RNA, 19 nt, Artificial Sequence
  Description of Artificial Sequence: Synthetic oligonucleotide
agcacaacagccaugguug

SEQ ID NO: 868785 - RNA, 19 nt, Artificial Sequence
  Description of Artificial Sequence: Synthetic oligonucleotide
guuuauaggaugccugaug

SEQ ID NO: 868786 - RNA, 19 nt, Artificial Sequence
  Description of Artificial Sequence: Synthetic oligonucleotide
gauguauguucaaugucag

SEQ ID NO: 868787 - RNA, 19 nt, Artificial Sequence
  Description of Artificial Sequence: Synthetic oligonucleotide
gacguaaauauaucauuca

SEQ ID NO: 868788 - RNA, 19 nt, Artificial Sequence
  Description of Artificial Sequence: Synthetic oligonucleotide
ucuggucgaauuaagucau

SEQ ID NO: 868789 - RNA, 19 nt, Artificial Sequence
  Description of Artificial Sequence: Synthetic oligonucleotide
uguaagagcuuugagguua

SEQ ID NO: 868790 - RNA, 19 nt, Artificial Sequence
  Description of Artificial Sequence: Synthetic oligonucleotide
uucacuagaugcgucuggg

SEQ ID NO: 868791 - RNA, 19 nt, Artificial Sequence
  Description of Artificial Sequence: Synthetic oligonucleotide
uggaguuggagagaaacac

SEQ ID NO: 868792 - RNA, 19 nt, Artificial Sequence
  Description of Artificial Sequence: Synthetic oligonucleotide
guaaggucucagaugaagg

SEQ ID NO: 868793 - RNA, 19 nt, Artificial Sequence
  Description of Artificial Sequence: Synthetic oligonucleotide
ucgaauuaagucauaccua

SEQ ID NO: 868794 - RNA, 19 nt, Artificial Sequence
  Description of Artificial Sequence: Synthetic oligonucleotide
uguaggagcccacagugau

SEQ ID NO: 868795 - RNA, 19 nt, Artificial Sequence
  Description of Artificial Sequence: Synthetic oligonucleotide
gacuuaaucauagguagca

SEQ ID NO: 868796 - RNA, 19 nt, Artificial Sequence
  Description of Artificial Sequence: Synthetic oligonucleotide
ugacagauggguauuggua

SEQ ID NO: 868797 - RNA, 19 nt, Artificial Sequence
  Description of Artificial Sequence: Synthetic oligonucleotide
gcugauuuagcacaacagc

SEQ ID NO: 868798 - RNA, 19 nt, Artificial Sequence
  Description of Artificial Sequence: Synthetic oligonucleotide
ugaacaugcugaauccagu

SEQ ID NO: 868799 - RNA, 19 nt, Artificial Sequence
  Description of Artificial Sequence: Synthetic oligonucleotide
guuaaaugagggccuguag

SEQ ID NO: 868800 - RNA, 19 nt, Artificial Sequence
  Description of Artificial Sequence: Synthetic oligonucleotide
uaccuauaauuaguaaugc

SEQ ID NO: 868801 - RNA, 19 nt, Artificial Sequence
  Description of Artificial Sequence: Synthetic oligonucleotide
aauguauaugaggaggauu

SEQ ID NO: 868802 - RNA, 19 nt, Artificial Sequence
  Description of Artificial Sequence: Synthetic oligonucleotide
ugguuuauaggaugccuga

SEQ ID NO: 868803 - RNA, 19 nt, Artificial Sequence
  Description of Artificial Sequence: Synthetic oligonucleotide
gauuacaauaggggagagg

SEQ ID NO: 868804 - RNA, 19 nt, Artificial Sequence
  Description of Artificial Sequence: Synthetic oligonucleotide
uuggaguuggagagaaaca

SEQ ID NO: 868805 - RNA, 19 nt, Artificial Sequence
  Description of Artificial Sequence: Synthetic oligonucleotide
ugacagaguaaauguauau

SEQ ID NO: 868806 - RNA, 19 nt, Artificial Sequence
  Description of Artificial Sequence: Synthetic oligonucleotide
agcaaguugugauuuggga

SEQ ID NO: 868807 - RNA, 19 nt, Artificial Sequence
  Description of Artificial Sequence: Synthetic oligonucleotide
aacacaaucccagggucug

SEQ ID NO: 868808 - RNA, 19 nt, Artificial Sequence
  Description of Artificial Sequence: Synthetic oligonucleotide
uucccuagagugcucauau

SEQ ID NO: 868809 - RNA, 19 nt, Artificial Sequence
  Description of Artificial Sequence: Synthetic oligonucleotide
uuucuacccagagcuaagg

SEQ ID NO: 868810 - RNA, 19 nt, Artificial Sequence
  Description of Artificial Sequence: Synthetic oligonucleotide
aacucugacuccuccgaga

SEQ ID NO: 868811 - RNA, 19 nt, Artificial Sequence
  Description of Artificial Sequence: Synthetic oligonucleotide
cucuggucgaauuaaguca

SEQ ID NO: 868812 - RNA, 19 nt, Artificial Sequence
  Description of Artificial Sequence: Synthetic oligonucleotide
aaggucucagaugaaggcu

SEQ ID NO: 868813 - RNA, 19 nt, Artificial Sequence
  Description of Artificial Sequence: Synthetic oligonucleotide
cuccgagaagacaugggcc

SEQ ID NO: 868814 - RNA, 19 nt, Artificial Sequence
  Description of Artificial Sequence: Synthetic oligonucleotide
agugcucauauaauuucac

SEQ ID NO: 868815 - RNA, 19 nt, Artificial Sequence
  Description of Artificial Sequence: Synthetic oligonucleotide
cacagugauuuguaagagc

SEQ ID NO: 868816 - RNA, 19 nt, Artificial Sequence
  Description of Artificial Sequence: Synthetic oligonucleotide
auaaugcuuaucucuacua

SEQ ID NO: 868817 - RNA, 19 nt, Artificial Sequence
  Description of Artificial Sequence: Synthetic oligonucleotide
ggcuucaggagucuugugg

SEQ ID NO: 868818 - RNA, 19 nt, Artificial Sequence
  Description of Artificial Sequence: Synthetic oligonucleotide
uaaagacagcuugacaccu

SEQ ID NO: 868819 - RNA, 19 nt, Artificial Sequence
  Description of Artificial Sequence: Synthetic oligonucleotide
guagcagcugauuuagcac

SEQ ID NO: 868820 - RNA, 19 nt, Artificial Sequence
  Description of Artificial Sequence: Synthetic oligonucleotide
ucauaccuauaauuaguaa

SEQ ID NO: 868821 - RNA, 19 nt, Artificial Sequence
  Description of Artificial Sequence: Synthetic oligonucleotide
gucaguaggaucuggcuuc

SEQ ID NO: 868822 - RNA, 19 nt, Artificial Sequence
  Description of Artificial Sequence: Synthetic oligonucleotide
caaguugugauuugggaaa

SEQ ID NO: 868823 - RNA, 19 nt, Artificial Sequence
  Description of Artificial Sequence: Synthetic oligonucleotide
acuaacuccaaaccauaau

SEQ ID NO: 868824 - RNA, 19 nt, Artificial Sequence
  Description of Artificial Sequence: Synthetic oligonucleotide
uuaccacucauggaggcca

SEQ ID NO: 868825 - RNA, 19 nt, Artificial Sequence
  Description of Artificial Sequence: Synthetic oligonucleotide
agcugaauauaggacauga

SEQ ID NO: 868826 - RNA, 19 nt, Artificial Sequence
  Description of Artificial Sequence: Synthetic oligonucleotide
uacuacuacuugccggcag

SEQ ID NO: 868827 - RNA, 19 nt, Artificial Sequence
  Description of Artificial Sequence: Synthetic oligonucleotide
auguauaugaggaggauua

SEQ ID NO: 868828 - RNA, 19 nt, Artificial Sequence
  Description of Artificial Sequence: Synthetic oligonucleotide
aaaugagggccuguaggug

SEQ ID NO: 868829 - RNA, 19 nt, Artificial Sequence
  Description of Artificial Sequence: Synthetic oligonucleotide
aauaggggagagguuaaau

SEQ ID NO: 868830 - RNA, 19 nt, Artificial Sequence
  Description of Artificial Sequence: Synthetic oligonucleotide
cauaccuauaauuaguaau

SEQ ID NO: 868831 - RNA, 19 nt, Artificial Sequence
  Description of Artificial Sequence: Synthetic oligonucleotide
uccuaucuucucuuagaug

SEQ ID NO: 868832 - RNA, 19 nt, Artificial Sequence
  Description of Artificial Sequence: Synthetic oligonucleotide
uggacaggaguaaaccauc

SEQ ID NO: 868833 - RNA, 19 nt, Artificial Sequence
  Description of Artificial Sequence: Synthetic oligonucleotide
uccuccgagaagacauggg

SEQ ID NO: 868834 - RNA, 19 nt, Artificial Sequence
  Description of Artificial Sequence: Synthetic oligonucleotide
uggaggcauaucuggaaug

SEQ ID NO: 868835 - RNA, 19 nt, Artificial Sequence
  Description of Artificial Sequence: Synthetic oligonucleotide
agaugaaggcuuucuauuu

SEQ ID NO: 868836 - RNA, 19 nt, Artificial Sequence
  Description of Artificial Sequence: Synthetic oligonucleotide
auagacagacuuaaacugu

SEQ ID NO: 868837 - RNA, 19 nt, Artificial Sequence
  Description of Artificial Sequence: Synthetic oligonucleotide
augaggaggauuaacaguu

SEQ ID NO: 868838 - RNA, 19 nt, Artificial Sequence
  Description of Artificial Sequence: Synthetic oligonucleotide
caggaguaaaccaucuuca

SEQ ID NO: 868839 - RNA, 19 nt, Artificial Sequence
  Description of Artificial Sequence: Synthetic oligonucleotide
gguguagccggucaguggc

SEQ ID NO: 868840 - RNA, 19 nt, Artificial Sequence
  Description of Artificial Sequence: Synthetic oligonucleotide
ugacuaacuccaaaccaua

SEQ ID NO: 868841 - RNA, 19 nt, Artificial Sequence
  Description of Artificial Sequence: Synthetic oligonucleotide
acuacuugccggcagguuu

SEQ ID NO: 868842 - RNA, 19 nt, Artificial Sequence
  Description of Artificial Sequence: Synthetic oligonucleotide
auacagguccuaucuucuc

SEQ ID NO: 868843 - RNA, 19 nt, Artificial Sequence
  Description of Artificial Sequence: Synthetic oligonucleotide
uuggggacuuaaucauagg

SEQ ID NO: 868844 - RNA, 19 nt, Artificial Sequence
  Description of Artificial Sequence: Synthetic oligonucleotide
ucuugaagagcugaauaua

SEQ ID NO: 868845 - RNA, 19 nt, Artificial Sequence
  Description of Artificial Sequence: Synthetic oligonucleotide
ugcucuggucgaauuaagu

SEQ ID NO: 868846 - RNA, 19 nt, Artificial Sequence
  Description of Artificial Sequence: Synthetic oligonucleotide
auccccaaggcucuguaga

SEQ ID NO: 868847 - RNA, 19 nt, Artificial Sequence
  Description of Artificial Sequence: Synthetic oligonucleotide
cagguuucuacccagagcu

SEQ ID NO: 868848 - RNA, 19 nt, Artificial Sequence
  Description of Artificial Sequence: Synthetic oligonucleotide
cuuggagagacguaaauau

SEQ ID NO: 868849 - RNA, 19 nt, Artificial Sequence
  Description of Artificial Sequence: Synthetic oligonucleotide
aguuccucggagcuguagu

SEQ ID NO: 868850 - RNA, 19 nt, Artificial Sequence
  Description of Artificial Sequence: Synthetic oligonucleotide
uuuaccacucauggaggcc

SEQ ID NO: 868851 - RNA, 19 nt, Artificial Sequence
  Description of Artificial Sequence: Synthetic oligonucleotide
acuuaaucauagguagcag

SEQ ID NO: 868852 - RNA, 19 nt, Artificial Sequence
  Description of Artificial Sequence: Synthetic oligonucleotide
uuggagagacguaaauaua

SEQ ID NO: 868853 - RNA, 19 nt, Artificial Sequence
  Description of Artificial Sequence: Synthetic oligonucleotide
aauccaguuuuaaggagau

SEQ ID NO: 868854 - RNA, 19 nt, Artificial Sequence
  Description of Artificial Sequence: Synthetic oligonucleotide
cagcuugacaccuuuagaa

SEQ ID NO: 868855 - RNA, 19 nt, Artificial Sequence
  Description of Artificial Sequence: Synthetic oligonucleotide
acugugaugccacccacaa

SEQ ID NO: 868856 - RNA, 19 nt, Artificial Sequence
  Description of Artificial Sequence: Synthetic oligonucleotide
ggauguauguucaauguca

SEQ ID NO: 868857 - RNA, 19 nt, Artificial Sequence
  Description of Artificial Sequence: Synthetic oligonucleotide
cagcaaguugugauuuggg

SEQ ID NO: 868858 - RNA, 19 nt, Artificial Sequence
  Description of Artificial Sequence: Synthetic oligonucleotide
acuagaugcgucuggguuu

SEQ ID NO: 868859 - RNA, 19 nt, Artificial Sequence
  Description of Artificial Sequence: Synthetic oligonucleotide
augucaguaggaucuggcu

SEQ ID NO: 868860 - RNA, 19 nt, Artificial Sequence
  Description of Artificial Sequence: Synthetic oligonucleotide
uauaggacaugagcugccc

SEQ ID NO: 868861 - RNA, 19 nt, Artificial Sequence
  Description of Artificial Sequence: Synthetic oligonucleotide
gaggaucaagaggggaugg

SEQ ID NO: 868862 - RNA, 19 nt, Artificial Sequence
  Description of Artificial Sequence: Synthetic oligonucleotide
gaggauguauguucaaugu

SEQ ID NO: 868863 - RNA, 19 nt, Artificial Sequence
  Description of Artificial Sequence: Synthetic oligonucleotide
ggauuaaauauuuccucca

SEQ ID NO: 868864 - RNA, 19 nt, Artificial Sequence
  Description of Artificial Sequence: Synthetic oligonucleotide
acagcuugacaccuuuaga

SEQ ID NO: 868865 - RNA, 19 nt, Artificial Sequence
  Description of Artificial Sequence: Synthetic oligonucleotide
agcuugacaccuuuagaaa

SEQ ID NO: 868866 - RNA, 19 nt, Artificial Sequence
  Description of Artificial Sequence: Synthetic oligonucleotide
cauacucauccugaugggc

SEQ ID NO: 868867 - RNA, 19 nt, Artificial Sequence
  Description of Artificial Sequence: Synthetic oligonucleotide
gaguuggagagaaacacaa

SEQ ID NO: 868868 - RNA, 19 nt, Artificial Sequence
  Description of Artificial Sequence: Synthetic oligonucleotide
agugguuuauaggaugccu

SEQ ID NO: 868869 - RNA, 19 nt, Artificial Sequence
  Description of Artificial Sequence: Synthetic oligonucleotide
uggucgaauuaagucauac

SEQ ID NO: 868870 - RNA, 19 nt, Artificial Sequence
  Description of Artificial Sequence: Synthetic oligonucleotide
agcuaaagacagcuugaca

SEQ ID NO: 868871 - RNA, 19 nt, Artificial Sequence
  Description of Artificial Sequence: Synthetic oligonucleotide
ugaggugauuuaccacuca

SEQ ID NO: 868872 - RNA, 19 nt, Artificial Sequence
  Description of Artificial Sequence: Synthetic oligonucleotide
ugacaccuuuagaaaagaa

SEQ ID NO: 868873 - RNA, 19 nt, Artificial Sequence
  Description of Artificial Sequence: Synthetic oligonucleotide
gccaaugcuuucuucaccc

SEQ ID NO: 868874 - RNA, 19 nt, Artificial Sequence
  Description of Artificial Sequence: Synthetic oligonucleotide
aaagaaugaugcacacgca

SEQ ID NO: 868875 - RNA, 19 nt, Artificial Sequence
  Description of Artificial Sequence: Synthetic oligonucleotide
gaaugaugcacacgcaagu

SEQ ID NO: 868876 - RNA, 19 nt, Artificial Sequence
  Description of Artificial Sequence: Synthetic oligonucleotide
aauuaguaaugcagacacu

SEQ ID NO: 868877 - RNA, 19 nt, Artificial Sequence
  Description of Artificial Sequence: Synthetic oligonucleotide
ugaccauuuuggcuucaga

SEQ ID NO: 868878 - RNA, 19 nt, Artificial Sequence
  Description of Artificial Sequence: Synthetic oligonucleotide
gcuagugcuggucaggcug

SEQ ID NO: 868879 - RNA, 19 nt, Artificial Sequence
  Description of Artificial Sequence: Synthetic oligonucleotide
gauuugggaaaugucaggu

SEQ ID NO: 868880 - RNA, 19 nt, Artificial Sequence
  Description of Artificial Sequence: Synthetic oligonucleotide
ggucgaauuaagucauacc

SEQ ID NO: 868881 - RNA, 19 nt, Artificial Sequence
  Description of Artificial Sequence: Synthetic oligonucleotide
ugaagacugcucuggucga

SEQ ID NO: 868882 - RNA, 19 nt, Artificial Sequence
  Description of Artificial Sequence: Synthetic oligonucleotide
ggaggcauaucuggaaugg

SEQ ID NO: 868883 - RNA, 19 nt, Artificial Sequence
  Description of Artificial Sequence: Synthetic oligonucleotide
agcagcccuuuguuacucc

SEQ ID NO: 868884 - RNA, 19 nt, Artificial Sequence
  Description of Artificial Sequence: Synthetic oligonucleotide
aggcuagugcuggucaggc

SEQ ID NO: 868885 - RNA, 19 nt, Artificial Sequence
  Description of Artificial Sequence: Synthetic oligonucleotide
agaggaucaagaggggaug

SEQ ID NO: 868886 - RNA, 19 nt, Artificial Sequence
  Description of Artificial Sequence: Synthetic oligonucleotide
guauugguauuuccaguuc

SEQ ID NO: 868887 - RNA, 19 nt, Artificial Sequence
  Description of Artificial Sequence: Synthetic oligonucleotide
acgcaagucuuuauuucac

SEQ ID NO: 868888 - RNA, 19 nt, Artificial Sequence
  Description of Artificial Sequence: Synthetic oligonucleotide
agagguuaaaugagggccu

SEQ ID NO: 868889 - RNA, 19 nt, Artificial Sequence
  Description of Artificial Sequence: Synthetic oligonucleotide
uaaggagaucagugaggcc

SEQ ID NO: 868890 - RNA, 19 nt, Artificial Sequence
  Description of Artificial Sequence: Synthetic oligonucleotide
cacgcaagucuuuauuuca

SEQ ID NO: 868891 - RNA, 19 nt, Artificial Sequence
  Description of Artificial Sequence: Synthetic oligonucleotide
gguaugauuuccaggaaca

SEQ ID NO: 868892 - RNA, 19 nt, Artificial Sequence
  Description of Artificial Sequence: Synthetic oligonucleotide
gggagagguuaaaugaggg

SEQ ID NO: 868893 - RNA, 19 nt, Artificial Sequence
  Description of Artificial Sequence: Synthetic oligonucleotide
agcaaaggggacaacucug

SEQ ID NO: 868894 - RNA, 19 nt, Artificial Sequence
  Description of Artificial Sequence: Synthetic oligonucleotide
auuucacuagaugcgucug

SEQ ID NO: 868895 - RNA, 19 nt, Artificial Sequence
  Description of Artificial Sequence: Synthetic oligonucleotide
ugaggaggauuaacaguuc

SEQ ID NO: 868896 - RNA, 19 nt, Artificial Sequence
  Description of Artificial Sequence: Synthetic oligonucleotide
uucauacagguccuaucuu

SEQ ID NO: 868897 - RNA, 19 nt, Artificial Sequence
  Description of Artificial Sequence: Synthetic oligonucleotide
uacuccugaggugauuuac

SEQ ID NO: 868898 - RNA, 19 nt, Artificial Sequence
  Description of Artificial Sequence: Synthetic oligonucleotide
uccugaggugauuuaccac

SEQ ID NO: 868899 - RNA, 19 nt, Artificial Sequence
  Description of Artificial Sequence: Synthetic oligonucleotide
aggcauaucuggaauggug

SEQ ID NO: 868900 - RNA, 19 nt, Artificial Sequence
  Description of Artificial Sequence: Synthetic oligonucleotide
uaggaugccugauggguau

SEQ ID NO: 868901 - RNA, 19 nt, Artificial Sequence
  Description of Artificial Sequence: Synthetic oligonucleotide
uuccacuagaugucuccga

SEQ ID NO: 868902 - RNA, 19 nt, Artificial Sequence
  Description of Artificial Sequence: Synthetic oligonucleotide
gagugcucauauaauuuca

SEQ ID NO: 868903 - RNA, 19 nt, Artificial Sequence
  Description of Artificial Sequence: Synthetic oligonucleotide
agauggguauugguauuuc

SEQ ID NO: 868904 - RNA, 19 nt, Artificial Sequence
  Description of Artificial Sequence: Synthetic oligonucleotide
cuacuugccggcagguuuc

SEQ ID NO: 868905 - RNA, 19 nt, Artificial Sequence
  Description of Artificial Sequence: Synthetic oligonucleotide
ucucuuggagagacguaaa

SEQ ID NO: 868906 - RNA, 19 nt, Artificial Sequence
  Description of Artificial Sequence: Synthetic oligonucleotide
uuucaaaagccaggaaguu

SEQ ID NO: 868907 - RNA, 19 nt, Artificial Sequence
  Description of Artificial Sequence: Synthetic oligonucleotide
ggaguaaaccaucuucauc

SEQ ID NO: 868908 - RNA, 19 nt, Artificial Sequence
  Description of Artificial Sequence: Synthetic oligonucleotide
auuugggaaaugucagguu

SEQ ID NO: 868909 - RNA, 19 nt, Artificial Sequence
  Description of Artificial Sequence: Synthetic oligonucleotide
gugauuuaccacucaugga

SEQ ID NO: 868910 - RNA, 19 nt, Artificial Sequence
  Description of Artificial Sequence: Synthetic oligonucleotide
uguauaugaggaggauuaa

SEQ ID NO: 868911 - RNA, 19 nt, Artificial Sequence
  Description of Artificial Sequence: Synthetic oligonucleotide
acaaagcagcccuuuguua

SEQ ID NO: 868912 - RNA, 19 nt, Artificial Sequence
  Description of Artificial Sequence: Synthetic oligonucleotide
accaggcuagugcugguca

SEQ ID NO: 868913 - RNA, 19 nt, Artificial Sequence
  Description of Artificial Sequence: Synthetic oligonucleotide
auaggacaugagcugcccu

SEQ ID NO: 868914 - RNA, 19 nt, Artificial Sequence
  Description of Artificial Sequence: Synthetic oligonucleotide
guagcaaaggggacaacuc

SEQ ID NO: 868915 - RNA, 19 nt, Artificial Sequence
  Description of Artificial Sequence: Synthetic oligonucleotide
gacaccuuuagaaaagaau

SEQ ID NO: 868916 - RNA, 19 nt, Artificial Sequence
  Description of Artificial Sequence: Synthetic oligonucleotide
agccugugauuuucuguag

SEQ ID NO: 868917 - RNA, 19 nt, Artificial Sequence
  Description of Artificial Sequence: Synthetic oligonucleotide
gcaaguugugauuugggaa

SEQ ID NO: 868918 - RNA, 19 nt, Artificial Sequence
  Description of Artificial Sequence: Synthetic oligonucleotide
guuucuacccagagcuaag

SEQ ID NO: 868919 - RNA, 19 nt, Artificial Sequence
  Description of Artificial Sequence: Synthetic oligonucleotide
gcucuggucgaauuaaguc

SEQ ID NO: 868920 - RNA, 19 nt, Artificial Sequence
  Description of Artificial Sequence: Synthetic oligonucleotide
uuacaauaggggagagguu

SEQ ID NO: 868921 - RNA, 19 nt, Artificial Sequence
  Description of Artificial Sequence: Synthetic oligonucleotide
gagguuaaaugagggccug

SEQ ID NO: 868922 - RNA, 19 nt, Artificial Sequence
  Description of Artificial Sequence: Synthetic oligonucleotide
ucccuugacuaacuccaaa

SEQ ID NO: 868923 - RNA, 19 nt, Artificial Sequence
  Description of Artificial Sequence: Synthetic oligonucleotide
agauuacaauaggggagag

SEQ ID NO: 868924 - RNA, 19 nt, Artificial Sequence
  Description of Artificial Sequence: Synthetic oligonucleotide
ucacuagaugcgucugggu

SEQ ID NO: 868925 - RNA, 19 nt, Artificial Sequence
  Description of Artificial Sequence: Synthetic oligonucleotide
ggggagagguuaaaugagg

SEQ ID NO: 868926 - RNA, 19 nt, Artificial Sequence
  Description of Artificial Sequence: Synthetic oligonucleotide
ucccugggagggaaugucu

SEQ ID NO: 868927 - RNA, 19 nt, Artificial Sequence
  Description of Artificial Sequence: Synthetic oligonucleotide
accauaaugcuuaucucua

SEQ ID NO: 868928 - RNA, 19 nt, Artificial Sequence
  Description of Artificial Sequence: Synthetic oligonucleotide
ccuccgagaagacaugggc

SEQ ID NO: 868929 - RNA, 19 nt, Artificial Sequence
  Description of Artificial Sequence: Synthetic oligonucleotide
ggauuaacaguuccucgga

SEQ ID NO: 868930 - RNA, 19 nt, Artificial Sequence
  Description of Artificial Sequence: Synthetic oligonucleotide
ggaggauuaacaguuccuc

SEQ ID NO: 868931 - RNA, 19 nt, Artificial Sequence
  Description of Artificial Sequence: Synthetic oligonucleotide
ggcugcuuccacuagaugu

SEQ ID NO: 868932 - RNA, 19 nt, Artificial Sequence
  Description of Artificial Sequence: Synthetic oligonucleotide
uggguguagccggucagug

SEQ ID NO: 868933 - RNA, 19 nt, Artificial Sequence
  Description of Artificial Sequence: Synthetic oligonucleotide
ugcuucaacagugguuuau

SEQ ID NO: 868934 - RNA, 19 nt, Artificial Sequence
  Description of Artificial Sequence: Synthetic oligonucleotide
cagcugauuuagcacaaca

SEQ ID NO: 868935 - RNA, 19 nt, Artificial Sequence
  Description of Artificial Sequence: Synthetic oligonucleotide
guuccucggagcuguaguc

SEQ ID NO: 868936 - RNA, 19 nt, Artificial Sequence
  Description of Artificial Sequence: Synthetic oligonucleotide
gucauaccuauaauuagua

SEQ ID NO: 868937 - RNA, 19 nt, Artificial Sequence
  Description of Artificial Sequence: Synthetic oligonucleotide
agagaugccacaaggucuu

SEQ ID NO: 868938 - RNA, 19 nt, Artificial Sequence
  Description of Artificial Sequence: Synthetic oligonucleotide
ggcauaucuggaaugguga

SEQ ID NO: 868939 - RNA, 19 nt, Artificial Sequence
  Description of Artificial Sequence: Synthetic oligonucleotide
cagguuaauugcagaguca

SEQ ID NO: 868940 - RNA, 19 nt, Artificial Sequence
  Description of Artificial Sequence: Synthetic oligonucleotide
cagccugugauuuucugua

SEQ ID NO: 868941 - RNA, 19 nt, Artificial Sequence
  Description of Artificial Sequence: Synthetic oligonucleotide
ggugacagauggguauugg

SEQ ID NO: 868942 - RNA, 19 nt, Artificial Sequence
  Description of Artificial Sequence: Synthetic oligonucleotide
ugucuuggaguuggagaga

SEQ ID NO: 868943 - RNA, 19 nt, Artificial Sequence
  Description of Artificial Sequence: Synthetic oligonucleotide
uuagcacaacagccauggu

SEQ ID NO: 868944 - RNA, 19 nt, Artificial Sequence
  Description of Artificial Sequence: Synthetic oligonucleotide
ugccggcagguuucuaccc

SEQ ID NO: 868945 - RNA, 19 nt, Artificial Sequence
  Description of Artificial Sequence: Synthetic oligonucleotide
cauacagguccuaucuucu

SEQ ID NO: 868946 - RNA, 19 nt, Artificial Sequence
  Description of Artificial Sequence: Synthetic oligonucleotide
gacuaacuccaaaccauaa

SEQ ID NO: 868947 - RNA, 19 nt, Artificial Sequence
  Description of Artificial Sequence: Synthetic oligonucleotide
gaacaugcugaauccaguu

SEQ ID NO: 868948 - RNA, 19 nt, Artificial Sequence
  Description of Artificial Sequence: Synthetic oligonucleotide
ggccugaggauguauguuc

SEQ ID NO: 868949 - RNA, 19 nt, Artificial Sequence
  Description of Artificial Sequence: Synthetic oligonucleotide
cuccagcaaucucuuggag

SEQ ID NO: 868950 - RNA, 19 nt, Artificial Sequence
  Description of Artificial Sequence: Synthetic oligonucleotide
uccaaaccauaaugcuuau

SEQ ID NO: 868951 - RNA, 19 nt, Artificial Sequence
  Description of Artificial Sequence: Synthetic oligonucleotide
uucccuugacuaacuccaa

SEQ ID NO: 868952 - RNA, 19 nt, Artificial Sequence
  Description of Artificial Sequence: Synthetic oligonucleotide
gaggugauuuaccacucau

SEQ ID NO: 868953 - RNA, 19 nt, Artificial Sequence
  Description of Artificial Sequence: Synthetic oligonucleotide
ggacuuaaucauagguagc

SEQ ID NO: 868954 - RNA, 19 nt, Artificial Sequence
  Description of Artificial Sequence: Synthetic oligonucleotide
uuucccuagagugcucaua

SEQ ID NO: 868955 - RNA, 19 nt, Artificial Sequence
  Description of Artificial Sequence: Synthetic oligonucleotide
gagaucagugaggccugag

SEQ ID NO: 868956 - RNA, 19 nt, Artificial Sequence
  Description of Artificial Sequence: Synthetic oligonucleotide
aggaacauagacagacuua

SEQ ID NO: 868957 - RNA, 19 nt, Artificial Sequence
  Description of Artificial Sequence: Synthetic oligonucleotide
gacaugggccaaugcuuuc

SEQ ID NO: 868958 - RNA, 19 nt, Artificial Sequence
  Description of Artificial Sequence: Synthetic oligonucleotide
gagcugaauauaggacaug

SEQ ID NO: 868959 - RNA, 19 nt, Artificial Sequence
  Description of Artificial Sequence: Synthetic oligonucleotide
gugacucuccccauacuca

SEQ ID NO: 868960 - RNA, 19 nt, Artificial Sequence
  Description of Artificial Sequence: Synthetic oligonucleotide
cuuuucccuagagugcuca

SEQ ID NO: 868961 - RNA, 19 nt, Artificial Sequence
  Description of Artificial Sequence: Synthetic oligonucleotide
ugacuccuccgagaagaca

SEQ ID NO: 868962 - RNA, 19 nt, Artificial Sequence
  Description of Artificial Sequence: Synthetic oligonucleotide
ugggaaaugucagguuaau

SEQ ID NO: 868963 - RNA, 19 nt, Artificial Sequence
  Description of Artificial Sequence: Synthetic oligonucleotide
cacaaacucuccagugaca

SEQ ID NO: 868964 - RNA, 19 nt, Artificial Sequence
  Description of Artificial Sequence: Synthetic oligonucleotide
ugaauccccaaggcucugu

SEQ ID NO: 868965 - RNA, 19 nt, Artificial Sequence
  Description of Artificial Sequence: Synthetic oligonucleotide
uuacuccugaggugauuua

SEQ ID NO: 868966 - RNA, 19 nt, Artificial Sequence
  Description of Artificial Sequence: Synthetic oligonucleotide
ggccaaugcuuucuucacc

SEQ ID NO: 868967 - RNA, 19 nt, Artificial Sequence
  Description of Artificial Sequence: Synthetic oligonucleotide
uuguuacuccugaggugau

SEQ ID NO: 868968 - RNA, 19 nt, Artificial Sequence
  Description of Artificial Sequence: Synthetic oligonucleotide
cucggagcuguagucauca

SEQ ID NO: 868969 - RNA, 19 nt, Artificial Sequence
  Description of Artificial Sequence: Synthetic oligonucleotide
uucacccugucuucagcuu

SEQ ID NO: 868970 - RNA, 19 nt, Artificial Sequence
  Description of Artificial Sequence: Synthetic oligonucleotide
caaucucuuggagagacgu

SEQ ID NO: 868971 - RNA, 19 nt, Artificial Sequence
  Description of Artificial Sequence: Synthetic oligonucleotide
ggcuucucaggauuaaaua

SEQ ID NO: 868972 - RNA, 19 nt, Artificial Sequence
  Description of Artificial Sequence: Synthetic oligonucleotide
ccauaaugcuuaucucuac

SEQ ID NO: 868973 - RNA, 19 nt, Artificial Sequence
  Description of Artificial Sequence: Synthetic oligonucleotide
ggagagacguaaauauauc

SEQ ID NO: 868974 - RNA, 19 nt, Artificial Sequence
  Description of Artificial Sequence: Synthetic oligonucleotide
uuugaccauuuuggcuuca

SEQ ID NO: 868975 - RNA, 19 nt, Artificial Sequence
  Description of Artificial Sequence: Synthetic oligonucleotide
ccaacuucccuugacuaac

SEQ ID NO: 868976 - RNA, 19 nt, Artificial Sequence
  Description of Artificial Sequence: Synthetic oligonucleotide
auaggaugccugaugggua

SEQ ID NO: 868977 - RNA, 19 nt, Artificial Sequence
  Description of Artificial Sequence: Synthetic oligonucleotide
gugacagauggguauuggu

SEQ ID NO: 868978 - RNA, 19 nt, Artificial Sequence
  Description of Artificial Sequence: Synthetic oligonucleotide
gagcuuugagguuauucuu

SEQ ID NO: 868979 - RNA, 19 nt, Artificial Sequence
  Description of Artificial Sequence: Synthetic oligonucleotide
aaucucuuggagagacgua

SEQ ID NO: 868980 - RNA, 19 nt, Artificial Sequence
  Description of Artificial Sequence: Synthetic oligonucleotide
uguagccggucaguggcaa

SEQ ID NO: 868981 - RNA, 19 nt, Artificial Sequence
  Description of Artificial Sequence: Synthetic oligonucleotide
caucaccuggguuccuguc

SEQ ID NO: 868982 - RNA, 19 nt, Artificial Sequence
  Description of Artificial Sequence: Synthetic oligonucleotide
acaauaggggagagguuaa

SEQ ID NO: 868983 - RNA, 19 nt, Artificial Sequence
  Description of Artificial Sequence: Synthetic oligonucleotide
aggucucagaugaaggcuu

SEQ ID NO: 868984 - RNA, 19 nt, Artificial Sequence
  Description of Artificial Sequence: Synthetic oligonucleotide
agacaugggccaaugcuuu

SEQ ID NO: 868985 - RNA, 19 nt, Artificial Sequence
  Description of Artificial Sequence: Synthetic oligonucleotide
gacacuggauuuggaggca

SEQ ID NO: 868986 - RNA, 19 nt, Artificial Sequence
  Description of Artificial Sequence: Synthetic oligonucleotide
uuggcagucuguggaugcu

SEQ ID NO: 868987 - RNA, 19 nt, Artificial Sequence
  Description of Artificial Sequence: Synthetic oligonucleotide
aggaucaagaggggauggu

SEQ ID NO: 868988 - RNA, 19 nt, Artificial Sequence
  Description of Artificial Sequence: Synthetic oligonucleotide
aguuggagagaaacacaau

SEQ ID NO: 868989 - RNA, 19 nt, Artificial Sequence
  Description of Artificial Sequence: Synthetic oligonucleotide
gaaaugucuuggaguugga

SEQ ID NO: 868990 - RNA, 19 nt, Artificial Sequence
  Description of Artificial Sequence: Synthetic oligonucleotide
caugguuaugaagacugcu

SEQ ID NO: 868991 - RNA, 19 nt, Artificial Sequence
  Description of Artificial Sequence: Synthetic oligonucleotide
uugaauccccaaggcucug

SEQ ID NO: 868992 - RNA, 19 nt, Artificial Sequence
  Description of Artificial Sequence: Synthetic oligonucleotide
ggggacuuaaucauaggua

SEQ ID NO: 868993 - RNA, 19 nt, Artificial Sequence
  Description of Artificial Sequence: Synthetic oligonucleotide
cugugaugccacccacaac

SEQ ID NO: 868994 - RNA, 19 nt, Artificial Sequence
  Description of Artificial Sequence: Synthetic oligonucleotide
guuacuccugaggugauuu

SEQ ID NO: 868995 - RNA, 19 nt, Artificial Sequence
  Description of Artificial Sequence: Synthetic oligonucleotide
uuaucccacuuggcagucu

SEQ ID NO: 868996 - RNA, 19 nt, Artificial Sequence
  Description of Artificial Sequence: Synthetic oligonucleotide
guuaucccacuuggcaguc

SEQ ID NO: 868997 - RNA, 19 nt, Artificial Sequence
  Description of Artificial Sequence: Synthetic oligonucleotide
agguuaaaugagggccugu

SEQ ID NO: 868998 - RNA, 19 nt, Artificial Sequence
  Description of Artificial Sequence: Synthetic oligonucleotide
uguuacuccugaggugauu

SEQ ID NO: 868999 - RNA, 19 nt, Artificial Sequence
  Description of Artificial Sequence: Synthetic oligonucleotide
guaggugaagucagcuaaa

SEQ ID NO: 869000 - RNA, 19 nt, Artificial Sequence
  Description of Artificial Sequence: Synthetic oligonucleotide
aggguccuagcuccagcaa

SEQ ID NO: 869001 - RNA, 19 nt, Artificial Sequence
  Description of Artificial Sequence: Synthetic oligonucleotide
ccucuggacaggaguaaac

SEQ ID NO: 869002 - RNA, 19 nt, Artificial Sequence
  Description of Artificial Sequence: Synthetic oligonucleotide
gguccuagcuccagcaauc

SEQ ID NO: 869003 - RNA, 19 nt, Artificial Sequence
  Description of Artificial Sequence: Synthetic oligonucleotide
ucccuagagugcucauaua

SEQ ID NO: 869004 - RNA, 19 nt, Artificial Sequence
  Description of Artificial Sequence: Synthetic oligonucleotide
cacuagaugcgucuggguu

SEQ ID NO: 869005 - RNA, 19 nt, Artificial Sequence
  Description of Artificial Sequence: Synthetic oligonucleotide
auccugaugggcagguuuu

SEQ ID NO: 869006 - RNA, 19 nt, Artificial Sequence
  Description of Artificial Sequence: Synthetic oligonucleotide
gguuaaaugagggccugua

SEQ ID NO: 869007 - RNA, 19 nt, Artificial Sequence
  Description of Artificial Sequence: Synthetic oligonucleotide
gacaggaguaaaccaucuu

SEQ ID NO: 869008 - RNA, 19 nt, Artificial Sequence
  Description of Artificial Sequence: Synthetic oligonucleotide
gcaaaggggacaacucuga

SEQ ID NO: 869009 - RNA, 19 nt, Artificial Sequence
  Description of Artificial Sequence: Synthetic oligonucleotide
gcaaucucuuggagagacg

SEQ ID NO: 869010 - RNA, 19 nt, Artificial Sequence
  Description of Artificial Sequence: Synthetic oligonucleotide
caacagugguuuauaggau

SEQ ID NO: 869011 - RNA, 19 nt, Artificial Sequence
  Description of Artificial Sequence: Synthetic oligonucleotide
uacuacuugccggcagguu

SEQ ID NO: 869012 - RNA, 19 nt, Artificial Sequence
  Description of Artificial Sequence: Synthetic oligonucleotide
gcaugguuaugaagacugc

SEQ ID NO: 869013 - RNA, 19 nt, Artificial Sequence
  Description of Artificial Sequence: Synthetic oligonucleotide
cuagugcuggucaggcugu

SEQ ID NO: 869014 - RNA, 19 nt, Artificial Sequence
  Description of Artificial Sequence: Synthetic oligonucleotide
aaguggcuucaggagucuu

SEQ ID NO: 869015 - RNA, 19 nt, Artificial Sequence
  Description of Artificial Sequence: Synthetic oligonucleotide
gcuguuccaaguggagggc

SEQ ID NO: 869016 - RNA, 19 nt, Artificial Sequence
  Description of Artificial Sequence: Synthetic oligonucleotide
gagcccacagugauuugua

SEQ ID NO: 869017 - RNA, 19 nt, Artificial Sequence
  Description of Artificial Sequence: Synthetic oligonucleotide
cauccugaugggcagguuu

SEQ ID NO: 869018 - RNA, 19 nt, Artificial Sequence
  Description of Artificial Sequence: Synthetic oligonucleotide
ggggcaguccaaacacugc

SEQ ID NO: 869019 - RNA, 19 nt, Artificial Sequence
  Description of Artificial Sequence: Synthetic oligonucleotide
ggcuuggggacuuaaucau

SEQ ID NO: 869020 - RNA, 19 nt, Artificial Sequence
  Description of Artificial Sequence: Synthetic oligonucleotide
aggaugccugauggguaug

SEQ ID NO: 869021 - RNA, 19 nt, Artificial Sequence
  Description of Artificial Sequence: Synthetic oligonucleotide
agccaugguugaaucccca

SEQ ID NO: 869022 - RNA, 19 nt, Artificial Sequence
  Description of Artificial Sequence: Synthetic oligonucleotide
gucucagaugaaggcuuuc

SEQ ID NO: 869023 - RNA, 19 nt, Artificial Sequence
  Description of Artificial Sequence: Synthetic oligonucleotide
ccggcagguuucuacccag

SEQ ID NO: 869024 - RNA, 19 nt, Artificial Sequence
  Description of Artificial Sequence: Synthetic oligonucleotide
gcccuuuguuacuccugag

SEQ ID NO: 869025 - RNA, 19 nt, Artificial Sequence
  Description of Artificial Sequence: Synthetic oligonucleotide
gaggcauaucuggaauggu

SEQ ID NO: 869026 - RNA, 19 nt, Artificial Sequence
  Description of Artificial Sequence: Synthetic oligonucleotide
caucacugguucucuggcu

SEQ ID NO: 869027 - RNA, 19 nt, Artificial Sequence
  Description of Artificial Sequence: Synthetic oligonucleotide
cggcucaccuucaugaaca

SEQ ID NO: 869028 - RNA, 19 nt, Artificial Sequence
  Description of Artificial Sequence: Synthetic oligonucleotide
cuacuacuacuugccggca

SEQ ID NO: 869029 - RNA, 19 nt, Artificial Sequence
  Description of Artificial Sequence: Synthetic oligonucleotide
caacuucccuugacuaacu

SEQ ID NO: 869030 - RNA, 19 nt, Artificial Sequence
  Description of Artificial Sequence: Synthetic oligonucleotide
caauaggggagagguuaaa

SEQ ID NO: 869031 - RNA, 19 nt, Artificial Sequence
  Description of Artificial Sequence: Synthetic oligonucleotide
gauggggccggcucaccuu

SEQ ID NO: 869032 - RNA, 19 nt, Artificial Sequence
  Description of Artificial Sequence: Synthetic oligonucleotide
uaagagcuuugagguuauu

SEQ ID NO: 869033 - RNA, 19 nt, Artificial Sequence
  Description of Artificial Sequence: Synthetic oligonucleotide
auguaaggucucagaugaa

SEQ ID NO: 869034 - RNA, 19 nt, Artificial Sequence
  Description of Artificial Sequence: Synthetic oligonucleotide
ggguuccugucuucagaga

SEQ ID NO: 869035 - RNA, 19 nt, Artificial Sequence
  Description of Artificial Sequence: Synthetic oligonucleotide
ccugcuucaacagugguuu

SEQ ID NO: 869036 - RNA, 19 nt, Artificial Sequence
  Description of Artificial Sequence: Synthetic oligonucleotide
cagguccuaucuucucuua

SEQ ID NO: 869037 - RNA, 19 nt, Artificial Sequence
  Description of Artificial Sequence: Synthetic oligonucleotide
guagccggucaguggcaaa

SEQ ID NO: 869038 - RNA, 19 nt, Artificial Sequence
  Description of Artificial Sequence: Synthetic oligonucleotide
gcucaccuucaugaacaug

SEQ ID NO: 869039 - RNA, 19 nt, Artificial Sequence
  Description of Artificial Sequence: Synthetic oligonucleotide
cccaacuucccuugacuaa

SEQ ID NO: 869040 - RNA, 19 nt, Artificial Sequence
  Description of Artificial Sequence: Synthetic oligonucleotide
agccaaggucuggguguag

SEQ ID NO: 869041 - RNA, 19 nt, Artificial Sequence
  Description of Artificial Sequence: Synthetic oligonucleotide
guaagagcuuugagguuau

SEQ ID NO: 869042 - RNA, 19 nt, Artificial Sequence
  Description of Artificial Sequence: Synthetic oligonucleotide
ccuagagugcucauauaau

SEQ ID NO: 869043 - RNA, 19 nt, Artificial Sequence
  Description of Artificial Sequence: Synthetic oligonucleotide
agacagcuugacaccuuua

SEQ ID NO: 869044 - RNA, 19 nt, Artificial Sequence
  Description of Artificial Sequence: Synthetic oligonucleotide
cuggucgaauuaagucaua

SEQ ID NO: 869045 - RNA, 19 nt, Artificial Sequence
  Description of Artificial Sequence: Synthetic oligonucleotide
cagugauuuguaagagcuu

SEQ ID NO: 869046 - RNA, 19 nt, Artificial Sequence
  Description of Artificial Sequence: Synthetic oligonucleotide
gcuaagggacuugcaggca

SEQ ID NO: 869047 - RNA, 19 nt, Artificial Sequence
  Description of Artificial Sequence: Synthetic oligonucleotide
ggacaggaguaaaccaucu

SEQ ID NO: 869048 - RNA, 19 nt, Artificial Sequence
  Description of Artificial Sequence: Synthetic oligonucleotide
agguuucuacccagagcua

SEQ ID NO: 869049 - RNA, 19 nt, Artificial Sequence
  Description of Artificial Sequence: Synthetic oligonucleotide
cuagaugcgucuggguuuu

SEQ ID NO: 869050 - RNA, 19 nt, Artificial Sequence
  Description of Artificial Sequence: Synthetic oligonucleotide
guggccaucccaagcugua

SEQ ID NO: 869051 - RNA, 19 nt, Artificial Sequence
  Description of Artificial Sequence: Synthetic oligonucleotide
gccuguaggugaagucagc

SEQ ID NO: 869052 - RNA, 19 nt, Artificial Sequence
  Description of Artificial Sequence: Synthetic oligonucleotide
ggguccuagcuccagcaau

SEQ ID NO: 869053 - RNA, 19 nt, Artificial Sequence
  Description of Artificial Sequence: Synthetic oligonucleotide
ggacuugcaggcagcucca

SEQ ID NO: 869054 - RNA, 19 nt, Artificial Sequence
  Description of Artificial Sequence: Synthetic oligonucleotide
gguuuauaggaugccugau

SEQ ID NO: 869055 - RNA, 19 nt, Artificial Sequence
  Description of Artificial Sequence: Synthetic oligonucleotide
guuccagccuacacucccu

SEQ ID NO: 869056 - RNA, 19 nt, Artificial Sequence
  Description of Artificial Sequence: Synthetic oligonucleotide
cuacuacuugccggcaggu

SEQ ID NO: 869057 - RNA, 19 nt, Artificial Sequence
  Description of Artificial Sequence: Synthetic oligonucleotide
cagauggguauugguauuu

SEQ ID NO: 869058 - RNA, 19 nt, Artificial Sequence
  Description of Artificial Sequence: Synthetic oligonucleotide
gggccggcucaccuucaug

SEQ ID NO: 869059 - RNA, 19 nt, Artificial Sequence
  Description of Artificial Sequence: Synthetic oligonucleotide
cugcuucaacagugguuua

SEQ ID NO: 869060 - RNA, 19 nt, Artificial Sequence
  Description of Artificial Sequence: Synthetic oligonucleotide
gcaucccaacuucccuuga

SEQ ID NO: 869061 - RNA, 19 nt, Artificial Sequence
  Description of Artificial Sequence: Synthetic oligonucleotide
cuacacucccugggaggga

SEQ ID NO: 869062 - RNA, 19 nt, Artificial Sequence
  Description of Artificial Sequence: Synthetic oligonucleotide
gcuuggggacuuaaucaua

SEQ ID NO: 869063 - RNA, 19 nt, Artificial Sequence
  Description of Artificial Sequence: Synthetic oligonucleotide
gcccugcuccuugaaccag

SEQ ID NO: 869064 - RNA, 19 nt, Artificial Sequence
  Description of Artificial Sequence: Synthetic oligonucleotide
cuggaacaaagcagcccuu

SEQ ID NO: 869065 - RNA, 19 nt, Artificial Sequence
  Description of Artificial Sequence: Synthetic oligonucleotide
guaggagcccacagugauu

SEQ ID NO: 869066 - RNA, 19 nt, Artificial Sequence
  Description of Artificial Sequence: Synthetic oligonucleotide
ggccaccaggcuagugcug

SEQ ID NO: 869067 - RNA, 19 nt, Artificial Sequence
  Description of Artificial Sequence: Synthetic oligonucleotide
acuugccggcagguuucua

SEQ ID NO: 869068 - RNA, 19 nt, Artificial Sequence
  Description of Artificial Sequence: Synthetic oligonucleotide
ggcucaccuucaugaacau

SEQ ID NO: 869069 - RNA, 19 nt, Artificial Sequence
  Description of Artificial Sequence: Synthetic oligonucleotide
acaguuccucggagcugua

SEQ ID NO: 869070 - RNA, 19 nt, Artificial Sequence
  Description of Artificial Sequence: Synthetic oligonucleotide
ccgagaagacaugggccaa

SEQ ID NO: 869071 - RNA, 19 nt, Artificial Sequence
  Description of Artificial Sequence: Synthetic oligonucleotide
uuuucuuaaacacucaucg

SEQ ID NO: 869072 - RNA, 19 nt, Artificial Sequence
  Description of Artificial Sequence: Synthetic oligonucleotide
aaccuuaagagcuacaagc

SEQ ID NO: 869073 - RNA, 19 nt, Artificial Sequence
  Description of Artificial Sequence: Synthetic oligonucleotide
uuguuuaauaaacagcacc

SEQ ID NO: 869074 - RNA, 19 nt, Artificial Sequence
  Description of Artificial Sequence: Synthetic oligonucleotide
agugacuggacaucgaacc

SEQ ID NO: 869075 - RNA, 19 nt, Artificial Sequence
  Description of Artificial Sequence: Synthetic oligonucleotide
guaagcuacagcuaagugg

SEQ ID NO: 869076 - RNA, 19 nt, Artificial Sequence
  Description of Artificial Sequence: Synthetic oligonucleotide
aaaauugaucaauugauuu

SEQ ID NO: 869077 - RNA, 19 nt, Artificial Sequence
  Description of Artificial Sequence: Synthetic oligonucleotide
aguaacuacaaauagcgcu

SEQ ID NO: 869078 - RNA, 19 nt, Artificial Sequence
  Description of Artificial Sequence: Synthetic oligonucleotide
aauuaaaugguaucccuga

SEQ ID NO: 869079 - RNA, 19 nt, Artificial Sequence
  Description of Artificial Sequence: Synthetic oligonucleotide
aguaauuuguaucugguga

SEQ ID NO: 869080 - RNA, 19 nt, Artificial Sequence
  Description of Artificial Sequence: Synthetic oligonucleotide
ucuuaaacacucaucguag

SEQ ID NO: 869081 - RNA, 19 nt, Artificial Sequence
  Description of Artificial Sequence: Synthetic oligonucleotide
acuacaaauagcgcuaugc

SEQ ID NO: 869082 - RNA, 19 nt, Artificial Sequence
  Description of Artificial Sequence: Synthetic oligonucleotide
uguucugacacuuuggagu

SEQ ID NO: 869083 - RNA, 19 nt, Artificial Sequence
  Description of Artificial Sequence: Synthetic oligonucleotide
gguguuaauguuuacaucc

SEQ ID NO: 869084 - RNA, 19 nt, Artificial Sequence
  Description of Artificial Sequence: Synthetic oligonucleotide
ucuacagucaugcugagua

SEQ ID NO: 869085 - RNA, 19 nt, Artificial Sequence
  Description of Artificial Sequence: Synthetic oligonucleotide
uuccauuaggucaauauac

SEQ ID NO: 869086 - RNA, 19 nt, Artificial Sequence
  Description of Artificial Sequence: Synthetic oligonucleotide
cuaaguggaagucaacugg

SEQ ID NO: 869087 - RNA, 19 nt, Artificial Sequence
  Description of Artificial Sequence: Synthetic oligonucleotide
uccauuaggucaauauacg

SEQ ID NO: 869088 - RNA, 19 nt, Artificial Sequence
  Description of Artificial Sequence: Synthetic oligonucleotide
agaaagcaaaaguaacuac

SEQ ID NO: 869089 - RNA, 19 nt, Artificial Sequence
  Description of Artificial Sequence: Synthetic oligonucleotide
ucuaaaguggucacggcug

SEQ ID NO: 869090 - RNA, 19 nt, Artificial Sequence
  Description of Artificial Sequence: Synthetic oligonucleotide
ugaguaauauccucugucc

SEQ ID NO: 869091 - RNA, 19 nt, Artificial Sequence
  Description of Artificial Sequence: Synthetic oligonucleotide
aaauugaucaauugauuua

SEQ ID NO: 869092 - RNA, 19 nt, Artificial Sequence
  Description of Artificial Sequence: Synthetic oligonucleotide
gaagggauaaacugagugc

SEQ ID NO: 869093 - RNA, 19 nt, Artificial Sequence
  Description of Artificial Sequence: Synthetic oligonucleotide
ucucccauaaacaaguaau

SEQ ID NO: 869094 - RNA, 19 nt, Artificial Sequence
  Description of Artificial Sequence: Synthetic oligonucleotide
aacaaagaacaaugugggg

SEQ ID NO: 869095 - RNA, 19 nt, Artificial Sequence
  Description of Artificial Sequence: Synthetic oligonucleotide
caucguagaaaccauaaac

SEQ ID NO: 869096 - RNA, 19 nt, Artificial Sequence
  Description of Artificial Sequence: Synthetic oligonucleotide
auguuaacuauguucugac

SEQ ID NO: 869097 - RNA, 19 nt, Artificial Sequence
  Description of Artificial Sequence: Synthetic oligonucleotide
ucucaagaaagcaaaagua

SEQ ID NO: 869098 - RNA, 19 nt, Artificial Sequence
  Description of Artificial Sequence: Synthetic oligonucleotide
aauuguuacuacauuccgg

SEQ ID NO: 869099 - RNA, 19 nt, Artificial Sequence
  Description of Artificial Sequence: Synthetic oligonucleotide
auagcgcuaugccagaaac

SEQ ID NO: 869100 - RNA, 19 nt, Artificial Sequence
  Description of Artificial Sequence: Synthetic oligonucleotide
uucuuaaacacucaucgua

SEQ ID NO: 869101 - RNA, 19 nt, Artificial Sequence
  Description of Artificial Sequence: Synthetic oligonucleotide
ucagcaugcaaugaacugg

SEQ ID NO: 869102 - RNA, 19 nt, Artificial Sequence
  Description of Artificial Sequence: Synthetic oligonucleotide
aagcgcucggaugugaucc

SEQ ID NO: 869103 - RNA, 19 nt, Artificial Sequence
  Description of Artificial Sequence: Synthetic oligonucleotide
acuuuggaguuacuguugc

SEQ ID NO: 869104 - RNA, 19 nt, Artificial Sequence
  Description of Artificial Sequence: Synthetic oligonucleotide
augauugcagcuugguuac

SEQ ID NO: 869105 - RNA, 19 nt, Artificial Sequence
  Description of Artificial Sequence: Synthetic oligonucleotide
cauuaagcuccaaugauug

SEQ ID NO: 869106 - RNA, 19 nt, Artificial Sequence
  Description of Artificial Sequence: Synthetic oligonucleotide
ugauuuaucuuguuuaaua

SEQ ID NO: 869107 - RNA, 19 nt, Artificial Sequence
  Description of Artificial Sequence: Synthetic oligonucleotide
acaucgaaccucuugcacg

SEQ ID NO: 869108 - RNA, 19 nt, Artificial Sequence
  Description of Artificial Sequence: Synthetic oligonucleotide
uccguauuuucuuaaacac

SEQ ID NO: 869109 - RNA, 19 nt, Artificial Sequence
  Description of Artificial Sequence: Synthetic oligonucleotide
uuuaccuggaauucuacaa

SEQ ID NO: 869110 - RNA, 19 nt, Artificial Sequence
  Description of Artificial Sequence: Synthetic oligonucleotide
aagggauaaacugagugca

SEQ ID NO: 869111 - RNA, 19 nt, Artificial Sequence
  Description of Artificial Sequence: Synthetic oligonucleotide
uuccguauuuucuuaaaca

SEQ ID NO: 869112 - RNA, 19 nt, Artificial Sequence
  Description of Artificial Sequence: Synthetic oligonucleotide
auaaacugagugcagacaa

SEQ ID NO: 869113 - RNA, 19 nt, Artificial Sequence
  Description of Artificial Sequence: Synthetic oligonucleotide
uacaaauagcgcuaugcca

SEQ ID NO: 869114 - RNA, 19 nt, Artificial Sequence
  Description of Artificial Sequence: Synthetic oligonucleotide
uuaacuauguucugacacu

SEQ ID NO: 869115 - RNA, 19 nt, Artificial Sequence
  Description of Artificial Sequence: Synthetic oligonucleotide
aaauuaaaugguaucccug

SEQ ID NO: 869116 - RNA, 19 nt, Artificial Sequence
  Description of Artificial Sequence: Synthetic oligonucleotide
ucaauauacgguucauggc

SEQ ID NO: 869117 - RNA, 19 nt, Artificial Sequence
  Description of Artificial Sequence: Synthetic oligonucleotide
acgguaacgaaccuuaaga

SEQ ID NO: 869118 - RNA, 19 nt, Artificial Sequence
  Description of Artificial Sequence: Synthetic oligonucleotide
uucauuacaggaaguaguc

SEQ ID NO: 869119 - RNA, 19 nt, Artificial Sequence
  Description of Artificial Sequence: Synthetic oligonucleotide
uucuuguaggcgaucaagc

SEQ ID NO: 869120 - RNA, 19 nt, Artificial Sequence
  Description of Artificial Sequence: Synthetic oligonucleotide
acuauguucugacacuuug

SEQ ID NO: 869121 - RNA, 19 nt, Artificial Sequence
  Description of Artificial Sequence: Synthetic oligonucleotide
auuaggucaauauacgguu

SEQ ID NO: 869122 - RNA, 19 nt, Artificial Sequence
  Description of Artificial Sequence: Synthetic oligonucleotide
ugagauuugagaagggaua

SEQ ID NO: 869123 - RNA, 19 nt, Artificial Sequence
  Description of Artificial Sequence: Synthetic oligonucleotide
uucuaaaguggucacggcu

SEQ ID NO: 869124 - RNA, 19 nt, Artificial Sequence
  Description of Artificial Sequence: Synthetic oligonucleotide
uacgacgagugacaugugg

SEQ ID NO: 869125 - RNA, 19 nt, Artificial Sequence
  Description of Artificial Sequence: Synthetic oligonucleotide
cuacaaauagcgcuaugcc

SEQ ID NO: 869126 - RNA, 19 nt, Artificial Sequence
  Description of Artificial Sequence: Synthetic oligonucleotide
ucguccaugaugacgcccg

SEQ ID NO: 869127 - RNA, 19 nt, Artificial Sequence
  Description of Artificial Sequence: Synthetic oligonucleotide
cuuggccaaagguauaacc

SEQ ID NO: 869128 - RNA, 19 nt, Artificial Sequence
  Description of Artificial Sequence: Synthetic oligonucleotide
uuaaacacucaucguagaa

SEQ ID NO: 869129 - RNA, 19 nt, Artificial Sequence
  Description of Artificial Sequence: Synthetic oligonucleotide
aaugaacugguucauucua

SEQ ID NO: 869130 - RNA, 19 nt, Artificial Sequence
  Description of Artificial Sequence: Synthetic oligonucleotide
agguauaaccagcuccucg

SEQ ID NO: 869131 - RNA, 19 nt, Artificial Sequence
  Description of Artificial Sequence: Synthetic oligonucleotide
uuuccauuaggucaauaua

SEQ ID NO: 869132 - RNA, 19 nt, Artificial Sequence
  Description of Artificial Sequence: Synthetic oligonucleotide
cuuguaggcgaucaagcgc

SEQ ID NO: 869133 - RNA, 19 nt, Artificial Sequence
  Description of Artificial Sequence: Synthetic oligonucleotide
uuggugaauaacuucucgu

SEQ ID NO: 869134 - RNA, 19 nt, Artificial Sequence
  Description of Artificial Sequence: Synthetic oligonucleotide
acgagugacauguggcucg

SEQ ID NO: 869135 - RNA, 19 nt, Artificial Sequence
  Description of Artificial Sequence: Synthetic oligonucleotide
uccucgaggagauaucccc

SEQ ID NO: 869136 - RNA, 19 nt, Artificial Sequence
  Description of Artificial Sequence: Synthetic oligonucleotide
aacaaugucgcgucagcau

SEQ ID NO: 869137 - RNA, 19 nt, Artificial Sequence
  Description of Artificial Sequence: Synthetic oligonucleotide
uucacgguaacgaaccuua

SEQ ID NO: 869138 - RNA, 19 nt, Artificial Sequence
  Description of Artificial Sequence: Synthetic oligonucleotide
accaacgugagaccauugg

SEQ ID NO: 869139 - RNA, 19 nt, Artificial Sequence
  Description of Artificial Sequence: Synthetic oligonucleotide
guagacagaagaucugccc

SEQ ID NO: 869140 - RNA, 19 nt, Artificial Sequence
  Description of Artificial Sequence: Synthetic oligonucleotide
cuggacaccaacgugagac

SEQ ID NO: 869141 - RNA, 19 nt, Artificial Sequence
  Description of Artificial Sequence: Synthetic oligonucleotide
cuguucaaaacaacucacc

SEQ ID NO: 869142 - RNA, 19 nt, Artificial Sequence
  Description of Artificial Sequence: Synthetic oligonucleotide
uaggucaauauacgguuca

SEQ ID NO: 869143 - RNA, 19 nt, Artificial Sequence
  Description of Artificial Sequence: Synthetic oligonucleotide
uuaccuggaauucuacaaa

SEQ ID NO: 869144 - RNA, 19 nt, Artificial Sequence
  Description of Artificial Sequence: Synthetic oligonucleotide
acaaugucgcgucagcaug

SEQ ID NO: 869145 - RNA, 19 nt, Artificial Sequence
  Description of Artificial Sequence: Synthetic oligonucleotide
aacgugagaccauuggcau

SEQ ID NO: 869146 - RNA, 19 nt, Artificial Sequence
  Description of Artificial Sequence: Synthetic oligonucleotide
acguucacgguaacgaacc

SEQ ID NO: 869147 - RNA, 19 nt, Artificial Sequence
  Description of Artificial Sequence: Synthetic oligonucleotide
uuaauguuuacauccuauu

SEQ ID NO: 869148 - RNA, 19 nt, Artificial Sequence
  Description of Artificial Sequence: Synthetic oligonucleotide
uguggcucgccucuacggg

SEQ ID NO: 869149 - RNA, 19 nt, Artificial Sequence
  Description of Artificial Sequence: Synthetic oligonucleotide
augacaagaggcuuuguau

SEQ ID NO: 869150 - RNA, 19 nt, Artificial Sequence
  Description of Artificial Sequence: Synthetic oligonucleotide
agguguuaauguuuacauc

SEQ ID NO: 869151 - RNA, 19 nt, Artificial Sequence
  Description of Artificial Sequence: Synthetic oligonucleotide
caugauugcagcuugguua

SEQ ID NO: 869152 - RNA, 19 nt, Artificial Sequence
  Description of Artificial Sequence: Synthetic oligonucleotide
aacgaaccuuaagagcuac

SEQ ID NO: 869153 - RNA, 19 nt, Artificial Sequence
  Description of Artificial Sequence: Synthetic oligonucleotide
uugaccaacaaugucgcgu

SEQ ID NO: 869154 - RNA, 19 nt, Artificial Sequence
  Description of Artificial Sequence: Synthetic oligonucleotide
acugcggugacuugugcag

SEQ ID NO: 869155 - RNA, 19 nt, Artificial Sequence
  Description of Artificial Sequence: Synthetic oligonucleotide
aacaaguaauuuguaucug

SEQ ID NO: 869156 - RNA, 19 nt, Artificial Sequence
  Description of Artificial Sequence: Synthetic oligonucleotide
cugaguaauauccucuguc

SEQ ID NO: 869157 - RNA, 19 nt, Artificial Sequence
  Description of Artificial Sequence: Synthetic oligonucleotide
aguaagcuacagcuaagug

SEQ ID NO: 869158 - RNA, 19 nt, Artificial Sequence
  Description of Artificial Sequence: Synthetic oligonucleotide
uaaacagcaccagucgugc

SEQ ID NO: 869159 - RNA, 19 nt, Artificial Sequence
  Description of Artificial Sequence: Synthetic oligonucleotide
gguaacgaaccuuaagagc

SEQ ID NO: 869160 - RNA, 19 nt, Artificial Sequence
  Description of Artificial Sequence: Synthetic oligonucleotide
gucaugaaauuguccaugc

SEQ ID NO: 869161 - RNA, 19 nt, Artificial Sequence
  Description of Artificial Sequence: Synthetic oligonucleotide
cugguucauucuaaagugg

SEQ ID NO: 869162 - RNA, 19 nt, Artificial Sequence
  Description of Artificial Sequence: Synthetic oligonucleotide
ucguagaaaccauaaacuu

SEQ ID NO: 869163 - RNA, 19 nt, Artificial Sequence
  Description of Artificial Sequence: Synthetic oligonucleotide
caaugauuguuugcuaucc

SEQ ID NO: 869164 - RNA, 19 nt, Artificial Sequence
  Description of Artificial Sequence: Synthetic oligonucleotide
agugcagacaaaucauaca

SEQ ID NO: 869165 - RNA, 19 nt, Artificial Sequence
  Description of Artificial Sequence: Synthetic oligonucleotide
auaaacuugugugaucugu

SEQ ID NO: 869166 - RNA, 19 nt, Artificial Sequence
  Description of Artificial Sequence: Synthetic oligonucleotide
uuucuuaaacacucaucgu

SEQ ID NO: 869167 - RNA, 19 nt, Artificial Sequence
  Description of Artificial Sequence: Synthetic oligonucleotide
uccaaugauuguuugcuau

SEQ ID NO: 869168 - RNA, 19 nt, Artificial Sequence
  Description of Artificial Sequence: Synthetic oligonucleotide
agcgcuaugccagaaacug

SEQ ID NO: 869169 - RNA, 19 nt, Artificial Sequence
  Description of Artificial Sequence: Synthetic oligonucleotide
uucauucuaaaguggucac

SEQ ID NO: 869170 - RNA, 19 nt, Artificial Sequence
  Description of Artificial Sequence: Synthetic oligonucleotide
uacguucacgguaacgaac

SEQ ID NO: 869171 - RNA, 19 nt, Artificial Sequence
  Description of Artificial Sequence: Synthetic oligonucleotide
ugucuauggauggcgacag

SEQ ID NO: 869172 - RNA, 19 nt, Artificial Sequence
  Description of Artificial Sequence: Synthetic oligonucleotide
guucauucuaaagugguca

SEQ ID NO: 869173 - RNA, 19 nt, Artificial Sequence
  Description of Artificial Sequence: Synthetic oligonucleotide
ucaacuggacucacaggug

SEQ ID NO: 869174 - RNA, 19 nt, Artificial Sequence
  Description of Artificial Sequence: Synthetic oligonucleotide
gaauguuaacuauguucug

SEQ ID NO: 869175 - RNA, 19 nt, Artificial Sequence
  Description of Artificial Sequence: Synthetic oligonucleotide
acgacgagugacauguggc

SEQ ID NO: 869176 - RNA, 19 nt, Artificial Sequence
  Description of Artificial Sequence: Synthetic oligonucleotide
uguuaacuauguucugaca

SEQ ID NO: 869177 - RNA, 19 nt, Artificial Sequence
  Description of Artificial Sequence: Synthetic oligonucleotide
ugauacguucacgguaacg

SEQ ID NO: 869178 - RNA, 19 nt, Artificial Sequence
  Description of Artificial Sequence: Synthetic oligonucleotide
gcuguugaugacaagaggc

SEQ ID NO: 869179 - RNA, 19 nt, Artificial Sequence
  Description of Artificial Sequence: Synthetic oligonucleotide
gugaauaacuucucgucca

SEQ ID NO: 869180 - RNA, 19 nt, Artificial Sequence
  Description of Artificial Sequence: Synthetic oligonucleotide
ugguccgugugaaaacaag

SEQ ID NO: 869181 - RNA, 19 nt, Artificial Sequence
  Description of Artificial Sequence: Synthetic oligonucleotide
ucuuuagccuucucgcaga

SEQ ID NO: 869182 - RNA, 19 nt, Artificial Sequence
  Description of Artificial Sequence: Synthetic oligonucleotide
ugucgcgucagcaugcaau

SEQ ID NO: 869183 - RNA, 19 nt, Artificial Sequence
  Description of Artificial Sequence: Synthetic oligonucleotide
gaguaauauccucugucca

SEQ ID NO: 869184 - RNA, 19 nt, Artificial Sequence
  Description of Artificial Sequence: Synthetic oligonucleotide
uccgugugaaaacaaguuu

SEQ ID NO: 869185 - RNA, 19 nt, Artificial Sequence
  Description of Artificial Sequence: Synthetic oligonucleotide
ugaccaacaaugucgcguc

SEQ ID NO: 869186 - RNA, 19 nt, Artificial Sequence
  Description of Artificial Sequence: Synthetic oligonucleotide
ucaucguagaaaccauaaa

SEQ ID NO: 869187 - RNA, 19 nt, Artificial Sequence
  Description of Artificial Sequence: Synthetic oligonucleotide
uccuauuucugcagucucu

SEQ ID NO: 869188 - RNA, 19 nt, Artificial Sequence
  Description of Artificial Sequence: Synthetic oligonucleotide
ugacauguggcucgccucu

SEQ ID NO: 869189 - RNA, 19 nt, Artificial Sequence
  Description of Artificial Sequence: Synthetic oligonucleotide
uggugauacguucacggua

SEQ ID NO: 869190 - RNA, 19 nt, Artificial Sequence
  Description of Artificial Sequence: Synthetic oligonucleotide
ucuuuaccuggaauucuac

SEQ ID NO: 869191 - RNA, 19 nt, Artificial Sequence
  Description of Artificial Sequence: Synthetic oligonucleotide
ucgcagaggcucuugaccu

SEQ ID NO: 869192 - RNA, 19 nt, Artificial Sequence
  Description of Artificial Sequence: Synthetic oligonucleotide
agugacauguggcucgccu

SEQ ID NO: 869193 - RNA, 19 nt, Artificial Sequence
  Description of Artificial Sequence: Synthetic oligonucleotide
gucaacuggacucacaggu

SEQ ID NO: 869194 - RNA, 19 nt, Artificial Sequence
  Description of Artificial Sequence: Synthetic oligonucleotide
aaacacugcggugacuugu

SEQ ID NO: 869195 - RNA, 19 nt, Artificial Sequence
  Description of Artificial Sequence: Synthetic oligonucleotide
auagucucccauaaacaag

SEQ ID NO: 869196 - RNA, 19 nt, Artificial Sequence
  Description of Artificial Sequence: Synthetic oligonucleotide
cauguagacagaagaucug

SEQ ID NO: 869197 - RNA, 19 nt, Artificial Sequence
  Description of Artificial Sequence: Synthetic oligonucleotide
gaugacaagaggcuuugua

SEQ ID NO: 869198 - RNA, 19 nt, Artificial Sequence
  Description of Artificial Sequence: Synthetic oligonucleotide
auaucuuggccaaagguau

SEQ ID NO: 869199 - RNA, 19 nt, Artificial Sequence
  Description of Artificial Sequence: Synthetic oligonucleotide
aacaacucaccagguuuuc

SEQ ID NO: 869200 - RNA, 19 nt, Artificial Sequence
  Description of Artificial Sequence: Synthetic oligonucleotide
aaagaauacuuaagaguau

SEQ ID NO: 869201 - RNA, 19 nt, Artificial Sequence
  Description of Artificial Sequence: Synthetic oligonucleotide
gauaaacugagugcagaca

SEQ ID NO: 869202 - RNA, 19 nt, Artificial Sequence
  Description of Artificial Sequence: Synthetic oligonucleotide
caacgugagaccauuggca

SEQ ID NO: 869203 - RNA, 19 nt, Artificial Sequence
  Description of Artificial Sequence: Synthetic oligonucleotide
uacgguucauggcaauacu

SEQ ID NO: 869204 - RNA, 19 nt, Artificial Sequence
  Description of Artificial Sequence: Synthetic oligonucleotide
caucaaguuccaugauugc

SEQ ID NO: 869205 - RNA, 19 nt, Artificial Sequence
  Description of Artificial Sequence: Synthetic oligonucleotide
ccauuaggucaauauacgg

SEQ ID NO: 869206 - RNA, 19 nt, Artificial Sequence
  Description of Artificial Sequence: Synthetic oligonucleotide
caaugucgcgucagcaugc

SEQ ID NO: 869207 - RNA, 19 nt, Artificial Sequence
  Description of Artificial Sequence: Synthetic oligonucleotide
guucccucggaguauggug

SEQ ID NO: 869208 - RNA, 19 nt, Artificial Sequence
  Description of Artificial Sequence: Synthetic oligonucleotide
agaauacuuaagaguauca

SEQ ID NO: 869209 - RNA, 19 nt, Artificial Sequence
  Description of Artificial Sequence: Synthetic oligonucleotide
guuaccacaacgauagcaa

SEQ ID NO: 869210 - RNA, 19 nt, Artificial Sequence
  Description of Artificial Sequence: Synthetic oligonucleotide
gguauaaccagcuccucga

SEQ ID NO: 869211 - RNA, 19 nt, Artificial Sequence
  Description of Artificial Sequence: Synthetic oligonucleotide
caaaacaagaggggcggcc

SEQ ID NO: 869212 - RNA, 19 nt, Artificial Sequence
  Description of Artificial Sequence: Synthetic oligonucleotide
cauuaggucaauauacggu

SEQ ID NO: 869213 - RNA, 19 nt, Artificial Sequence
  Description of Artificial Sequence: Synthetic oligonucleotide
auuaagcuccaaugauugu

SEQ ID NO: 869214 - RNA, 19 nt, Artificial Sequence
  Description of Artificial Sequence: Synthetic oligonucleotide
ucggaguauggugauacgu

SEQ ID NO: 869215 - RNA, 19 nt, Artificial Sequence
  Description of Artificial Sequence: Synthetic oligonucleotide
gcuaaguggaagucaacug

SEQ ID NO: 869216 - RNA, 19 nt, Artificial Sequence
  Description of Artificial Sequence: Synthetic oligonucleotide
aagguauaaccagcuccuc

SEQ ID NO: 869217 - RNA, 19 nt, Artificial Sequence
  Description of Artificial Sequence: Synthetic oligonucleotide
aaggcagugagaggaagau

SEQ ID NO: 869218 - RNA, 19 nt, Artificial Sequence
  Description of Artificial Sequence: Synthetic oligonucleotide
ucauuacaggaaguagucu

SEQ ID NO: 869219 - RNA, 19 nt, Artificial Sequence
  Description of Artificial Sequence: Synthetic oligonucleotide
gagauuugagaagggauaa

SEQ ID NO: 869220 - RNA, 19 nt, Artificial Sequence
  Description of Artificial Sequence: Synthetic oligonucleotide
acaaaacaagaggggcggc

SEQ ID NO: 869221 - RNA, 19 nt, Artificial Sequence
  Description of Artificial Sequence: Synthetic oligonucleotide
cacgguaacgaaccuuaag

SEQ ID NO: 869222 - RNA, 19 nt, Artificial Sequence
  Description of Artificial Sequence: Synthetic oligonucleotide
guaacuacaaauagcgcua

SEQ ID NO: 869223 - RNA, 19 nt, Artificial Sequence
  Description of Artificial Sequence: Synthetic oligonucleotide
ggauaaacugagugcagac

SEQ ID NO: 869224 - RNA, 19 nt, Artificial Sequence
  Description of Artificial Sequence: Synthetic oligonucleotide
cuuuaccuggaauucuaca

SEQ ID NO: 869225 - RNA, 19 nt, Artificial Sequence
  Description of Artificial Sequence: Synthetic oligonucleotide
augacgcccgcccgaaccg

SEQ ID NO: 869226 - RNA, 19 nt, Artificial Sequence
  Description of Artificial Sequence: Synthetic oligonucleotide
cuuaaacacucaucguaga

SEQ ID NO: 869227 - RNA, 19 nt, Artificial Sequence
  Description of Artificial Sequence: Synthetic oligonucleotide
agagcuacaagcaguguaa

SEQ ID NO: 869228 - RNA, 19 nt, Artificial Sequence
  Description of Artificial Sequence: Synthetic oligonucleotide
agcaauaguuuggagcacu

SEQ ID NO: 869229 - RNA, 19 nt, Artificial Sequence
  Description of Artificial Sequence: Synthetic oligonucleotide
uuaccacaacgauagcaau

SEQ ID NO: 869230 - RNA, 19 nt, Artificial Sequence
  Description of Artificial Sequence: Synthetic oligonucleotide
uugauuuaucuuguuuaau

SEQ ID NO: 869231 - RNA, 19 nt, Artificial Sequence
  Description of Artificial Sequence: Synthetic oligonucleotide
ccacugauacaauucaaac

SEQ ID NO: 869232 - RNA, 19 nt, Artificial Sequence
  Description of Artificial Sequence: Synthetic oligonucleotide
auggugauacguucacggu

SEQ ID NO: 869233 - RNA, 19 nt, Artificial Sequence
  Description of Artificial Sequence: Synthetic oligonucleotide
acacugcggugacuugugc

SEQ ID NO: 869234 - RNA, 19 nt, Artificial Sequence
  Description of Artificial Sequence: Synthetic oligonucleotide
gucgcgucagcaugcaaug

SEQ ID NO: 869235 - RNA, 19 nt, Artificial Sequence
  Description of Artificial Sequence: Synthetic oligonucleotide
guauggugauacguucacg

SEQ ID NO: 869236 - RNA, 19 nt, Artificial Sequence
  Description of Artificial Sequence: Synthetic oligonucleotide
cuugaccaacaaugucgcg

SEQ ID NO: 869237 - RNA, 19 nt, Artificial Sequence
  Description of Artificial Sequence: Synthetic oligonucleotide
guaauuuguaucuggugau

SEQ ID NO: 869238 - RNA, 19 nt, Artificial Sequence
  Description of Artificial Sequence: Synthetic oligonucleotide
aacacugcggugacuugug

SEQ ID NO: 869239 - RNA, 19 nt, Artificial Sequence
  Description of Artificial Sequence: Synthetic oligonucleotide
gguacgacgagugacaugu

SEQ ID NO: 869240 - RNA, 19 nt, Artificial Sequence
  Description of Artificial Sequence: Synthetic oligonucleotide
auacguucacgguaacgaa

SEQ ID NO: 869241 - RNA, 19 nt, Artificial Sequence
  Description of Artificial Sequence: Synthetic oligonucleotide
gauucuugaccaacaaugu

SEQ ID NO: 869242 - RNA, 19 nt, Artificial Sequence
  Description of Artificial Sequence: Synthetic oligonucleotide
uagcgcuaugccagaaacu

SEQ ID NO: 869243 - RNA, 19 nt, Artificial Sequence
  Description of Artificial Sequence: Synthetic oligonucleotide
cagacaaaucauacaauua

SEQ ID NO: 869244 - RNA, 19 nt, Artificial Sequence
  Description of Artificial Sequence: Synthetic oligonucleotide
ugacuggacaucgaaccuc

SEQ ID NO: 869245 - RNA, 19 nt, Artificial Sequence
  Description of Artificial Sequence: Synthetic oligonucleotide
caaguaauuuguaucuggu

SEQ ID NO: 869246 - RNA, 19 nt, Artificial Sequence
  Description of Artificial Sequence: Synthetic oligonucleotide
uaacgaaccuuaagagcua

SEQ ID NO: 869247 - RNA, 19 nt, Artificial Sequence
  Description of Artificial Sequence: Synthetic oligonucleotide
ugacuuucucaguucucaa

SEQ ID NO: 869248 - RNA, 19 nt, Artificial Sequence
  Description of Artificial Sequence: Synthetic oligonucleotide
gaauacuuaagaguaucau

SEQ ID NO: 869249 - RNA, 19 nt, Artificial Sequence
  Description of Artificial Sequence: Synthetic oligonucleotide
gcgacagaccaccauguag

SEQ ID NO: 869250 - RNA, 19 nt, Artificial Sequence
  Description of Artificial Sequence: Synthetic oligonucleotide
agcuugguuaccacaacga

SEQ ID NO: 869251 - RNA, 19 nt, Artificial Sequence
  Description of Artificial Sequence: Synthetic oligonucleotide
uacaagcaguguaacuguu

SEQ ID NO: 869252 - RNA, 19 nt, Artificial Sequence
  Description of Artificial Sequence: Synthetic oligonucleotide
uuguuacuacauuccgguc

SEQ ID NO: 869253 - RNA, 19 nt, Artificial Sequence
  Description of Artificial Sequence: Synthetic oligonucleotide
uaauuuguaucuggugauu

SEQ ID NO: 869254 - RNA, 19 nt, Artificial Sequence
  Description of Artificial Sequence: Synthetic oligonucleotide
cucggaguauggugauacg

SEQ ID NO: 869255 - RNA, 19 nt, Artificial Sequence
  Description of Artificial Sequence: Synthetic oligonucleotide
guggucacggcuguugaug

SEQ ID NO: 869256 - RNA, 19 nt, Artificial Sequence
  Description of Artificial Sequence: Synthetic oligonucleotide
aaugucgcgucagcaugca

SEQ ID NO: 869257 - RNA, 19 nt, Artificial Sequence
  Description of Artificial Sequence: Synthetic oligonucleotide
ccaacgugagaccauuggc

SEQ ID NO: 869258 - RNA, 19 nt, Artificial Sequence
  Description of Artificial Sequence: Synthetic oligonucleotide
cuccucgaggagauauccc

SEQ ID NO: 869259 - RNA, 19 nt, Artificial Sequence
  Description of Artificial Sequence: Synthetic oligonucleotide
uaacuacaaauagcgcuau

SEQ ID NO: 869260 - RNA, 19 nt, Artificial Sequence
  Description of Artificial Sequence: Synthetic oligonucleotide
uugcacguuggauucuuuu

SEQ ID NO: 869261 - RNA, 19 nt, Artificial Sequence
  Description of Artificial Sequence: Synthetic oligonucleotide
caaaauugaucaauugauu

SEQ ID NO: 869262 - RNA, 19 nt, Artificial Sequence
  Description of Artificial Sequence: Synthetic oligonucleotide
cugcaagaaagaauacuua

SEQ ID NO: 869263 - RNA, 19 nt, Artificial Sequence
  Description of Artificial Sequence: Synthetic oligonucleotide
ugguucccucggaguaugg

SEQ ID NO: 869264 - RNA, 19 nt, Artificial Sequence
  Description of Artificial Sequence: Synthetic oligonucleotide
gacgagugacauguggcuc

SEQ ID NO: 869265 - RNA, 19 nt, Artificial Sequence
  Description of Artificial Sequence: Synthetic oligonucleotide
agggauaaacugagugcag

SEQ ID NO: 869266 - RNA, 19 nt, Artificial Sequence
  Description of Artificial Sequence: Synthetic oligonucleotide
cucuacggggugcuggauc

SEQ ID NO: 869267 - RNA, 19 nt, Artificial Sequence
  Description of Artificial Sequence: Synthetic oligonucleotide
ggucaauauacgguucaug

SEQ ID NO: 869268 - RNA, 19 nt, Artificial Sequence
  Description of Artificial Sequence: Synthetic oligonucleotide
guaggcgaucaagcgcucg

SEQ ID NO: 869269 - RNA, 19 nt, Artificial Sequence
  Description of Artificial Sequence: Synthetic oligonucleotide
agucgugcccacugauaca

SEQ ID NO: 869270 - RNA, 19 nt, Artificial Sequence
  Description of Artificial Sequence: Synthetic oligonucleotide
cgguaacgaaccuuaagag

SEQ ID NO: 869271 - RNA, 19 nt, Artificial Sequence
  Description of Artificial Sequence: Synthetic oligonucleotide
ggugauacguucacgguaa

SEQ ID NO: 869272 - RNA, 19 nt, Artificial Sequence
  Description of Artificial Sequence: Synthetic oligonucleotide
ucacgguaacgaaccuuaa

SEQ ID NO: 869273 - RNA, 19 nt, Artificial Sequence
  Description of Artificial Sequence: Synthetic oligonucleotide
caaugaacugguucauucu

SEQ ID NO: 869274 - RNA, 19 nt, Artificial Sequence
  Description of Artificial Sequence: Synthetic oligonucleotide
uggaguuacuguugcucuu

SEQ ID NO: 869275 - RNA, 19 nt, Artificial Sequence
  Description of Artificial Sequence: Synthetic oligonucleotide
ugaaaacacugcggugacu

SEQ ID NO: 869276 - RNA, 19 nt, Artificial Sequence
  Description of Artificial Sequence: Synthetic oligonucleotide
agaguaucaucaaguucca

SEQ ID NO: 869277 - RNA, 19 nt, Artificial Sequence
  Description of Artificial Sequence: Synthetic oligonucleotide
gcucggaugugauccagug

SEQ ID NO: 869278 - RNA, 19 nt, Artificial Sequence
  Description of Artificial Sequence: Synthetic oligonucleotide
gaguaagcuacagcuaagu

SEQ ID NO: 869279 - RNA, 19 nt, Artificial Sequence
  Description of Artificial Sequence: Synthetic oligonucleotide
ggccuugguacuuauuuaa

SEQ ID NO: 869280 - RNA, 19 nt, Artificial Sequence
  Description of Artificial Sequence: Synthetic oligonucleotide
uggcaccaguuauaucccu

SEQ ID NO: 869281 - RNA, 19 nt, Artificial Sequence
  Description of Artificial Sequence: Synthetic oligonucleotide
caugaugacgcccgcccga

SEQ ID NO: 869282 - RNA, 19 nt, Artificial Sequence
  Description of Artificial Sequence: Synthetic oligonucleotide
ggcaauacuguacaaguuu

SEQ ID NO: 869283 - RNA, 19 nt, Artificial Sequence
  Description of Artificial Sequence: Synthetic oligonucleotide
ggccaaagguauaaccagc

SEQ ID NO: 869284 - RNA, 19 nt, Artificial Sequence
  Description of Artificial Sequence: Synthetic oligonucleotide
aacuauguucugacacuuu

SEQ ID NO: 869285 - RNA, 19 nt, Artificial Sequence
  Description of Artificial Sequence: Synthetic oligonucleotide
gcuacagcuaaguggaagu

SEQ ID NO: 869286 - RNA, 19 nt, Artificial Sequence
  Description of Artificial Sequence: Synthetic oligonucleotide
ucuugcacguuggauucuu

SEQ ID NO: 869287 - RNA, 19 nt, Artificial Sequence
  Description of Artificial Sequence: Synthetic oligonucleotide
augguucccucggaguaug

SEQ ID NO: 869288 - RNA, 19 nt, Artificial Sequence
  Description of Artificial Sequence: Synthetic oligonucleotide
gcgaucaagcgcucggaug

SEQ ID NO: 869289 - RNA, 19 nt, Artificial Sequence
  Description of Artificial Sequence: Synthetic oligonucleotide
ccaacaaugucgcgucagc

SEQ ID NO: 869290 - RNA, 19 nt, Artificial Sequence
  Description of Artificial Sequence: Synthetic oligonucleotide
gucgugcccacugauacaa

SEQ ID NO: 869291 - RNA, 19 nt, Artificial Sequence
  Description of Artificial Sequence: Synthetic oligonucleotide
caucgaaccucuugcacgu

SEQ ID NO: 869292 - RNA, 19 nt, Artificial Sequence
  Description of Artificial Sequence: Synthetic oligonucleotide
cacugcggugacuugugca

SEQ ID NO: 869293 - RNA, 19 nt, Artificial Sequence
  Description of Artificial Sequence: Synthetic oligonucleotide
gaucaagcgcucggaugug

SEQ ID NO: 869294 - RNA, 19 nt, Artificial Sequence
  Description of Artificial Sequence: Synthetic oligonucleotide
gggauaaacugagugcaga

SEQ ID NO: 869295 - RNA, 19 nt, Artificial Sequence
  Description of Artificial Sequence: Synthetic oligonucleotide
caagcgcucggaugugauc

SEQ ID NO: 869296 - RNA, 19 nt, Artificial Sequence
  Description of Artificial Sequence: Synthetic oligonucleotide
caacaaugucgcgucagca

SEQ ID NO: 869297 - RNA, 19 nt, Artificial Sequence
  Description of Artificial Sequence: Synthetic oligonucleotide
ccuggcggcugcuaggcgc

SEQ ID NO: 869298 - RNA, 19 nt, Artificial Sequence
  Description of Artificial Sequence: Synthetic oligonucleotide
ggugcuggaucaaacugca

SEQ ID NO: 869299 - RNA, 19 nt, Artificial Sequence
  Description of Artificial Sequence: Synthetic oligonucleotide
gguucauucuaaagugguc

SEQ ID NO: 869300 - RNA, 19 nt, Artificial Sequence
  Description of Artificial Sequence: Synthetic oligonucleotide
gcuccucgaggagauaucc

SEQ ID NO: 869301 - RNA, 19 nt, Artificial Sequence
  Description of Artificial Sequence: Synthetic oligonucleotide
agcuccucgaggagauauc

SEQ ID NO: 869302 - RNA, 19 nt, Artificial Sequence
  Description of Artificial Sequence: Synthetic oligonucleotide
acaagcaguguaacuguuu

SEQ ID NO: 869303 - RNA, 19 nt, Artificial Sequence
  Description of Artificial Sequence: Synthetic oligonucleotide
caccaacgugagaccauug

SEQ ID NO: 869304 - RNA, 19 nt, Artificial Sequence
  Description of Artificial Sequence: Synthetic oligonucleotide
gcaauacuguacaaguuua

SEQ ID NO: 869305 - RNA, 19 nt, Artificial Sequence
  Description of Artificial Sequence: Synthetic oligonucleotide
ugauugcagcuugguuacc

SEQ ID NO: 869306 - RNA, 19 nt, Artificial Sequence
  Description of Artificial Sequence: Synthetic oligonucleotide
aucaagcgcucggauguga

SEQ ID NO: 869307 - RNA, 19 nt, Artificial Sequence
  Description of Artificial Sequence: Synthetic oligonucleotide
gcuccaaugauuguuugcu

SEQ ID NO: 869308 - RNA, 19 nt, Artificial Sequence
  Description of Artificial Sequence: Synthetic oligonucleotide
gaccaacaaugucgcguca

SEQ ID NO: 869309 - RNA, 19 nt, Artificial Sequence
  Description of Artificial Sequence: Synthetic oligonucleotide
acaccaacgugagaccauu

SEQ ID NO: 869310 - RNA, 19 nt, Artificial Sequence
  Description of Artificial Sequence: Synthetic oligonucleotide
cucccauaaacaaguaauu

SEQ ID NO: 869311 - RNA, 19 nt, Artificial Sequence
  Description of Artificial Sequence: Synthetic oligonucleotide
agcgcucggaugugaucca

SEQ ID NO: 869312 - RNA, 19 nt, Artificial Sequence
  Description of Artificial Sequence: Synthetic oligonucleotide
gauggcgacagaccaccau

SEQ ID NO: 869313 - RNA, 19 nt, Artificial Sequence
  Description of Artificial Sequence: Synthetic oligonucleotide
gugauacguucacgguaac

SEQ ID NO: 869314 - RNA, 19 nt, Artificial Sequence
  Description of Artificial Sequence: Synthetic oligonucleotide
ucgcgucagcaugcaauga

SEQ ID NO: 869315 - RNA, 19 nt, Artificial Sequence
  Description of Artificial Sequence: Synthetic oligonucleotide
cuccaaugauuguuugcua

SEQ ID NO: 869316 - RNA, 19 nt, Artificial Sequence
  Description of Artificial Sequence: Synthetic oligonucleotide
cuaggcgcuggcgccggcc

SEQ ID NO: 869317 - RNA, 19 nt, Artificial Sequence
  Description of Artificial Sequence: Synthetic oligonucleotide
cgcuaugccagaaacugga

SEQ ID NO: 869318 - RNA, 19 nt, Artificial Sequence
  Description of Artificial Sequence: Synthetic oligonucleotide
cuucucgcagaggcucuug

SEQ ID NO: 869319 - RNA, 19 nt, Artificial Sequence
  Description of Artificial Sequence: Synthetic oligonucleotide
gcgcuaugccagaaacugg

SEQ ID NO: 869320 - RNA, 19 nt, Artificial Sequence
  Description of Artificial Sequence: Synthetic oligonucleotide
augaugacgcccgcccgaa

SEQ ID NO: 869321 - RNA, 19 nt, Artificial Sequence
  Description of Artificial Sequence: Synthetic oligonucleotide
aggcgaucaagcgcucgga

SEQ ID NO: 869322 - RNA, 19 nt, Artificial Sequence
  Description of Artificial Sequence: Synthetic oligonucleotide
cacacgccgccgccgcucc

SEQ ID NO: 869323 - RNA, 19 nt, Artificial Sequence
  Description of Artificial Sequence: Synthetic oligonucleotide
gguuacacaguggccuuga

SEQ ID NO: 869324 - RNA, 19 nt, Artificial Sequence
  Description of Artificial Sequence: Synthetic oligonucleotide
guccgugugaaaacaaguu

SEQ ID NO: 869325 - RNA, 19 nt, Artificial Sequence
  Description of Artificial Sequence: Synthetic oligonucleotide
uccgcagugcugggccgcc

SEQ ID NO: 869326 - RNA, 19 nt, Artificial Sequence
  Description of Artificial Sequence: Synthetic oligonucleotide
ucgugcccacugauacaau

SEQ ID NO: 869327 - RNA, 19 nt, Artificial Sequence
  Description of Artificial Sequence: Synthetic oligonucleotide
cuggacucacagguguuaa

SEQ ID NO: 869328 - RNA, 19 nt, Artificial Sequence
  Description of Artificial Sequence: Synthetic oligonucleotide
gguccgugugaaaacaagu

SEQ ID NO: 869329 - RNA, 19 nt, Artificial Sequence
  Description of Artificial Sequence: Synthetic oligonucleotide
cuggcucgcuccgcagugc

SEQ ID NO: 869330 - RNA, 19 nt, Artificial Sequence
  Description of Artificial Sequence: Synthetic oligonucleotide
cacucaucguagaaaccau

SEQ ID NO: 869331 - RNA, 19 nt, Artificial Sequence
  Description of Artificial Sequence: Synthetic oligonucleotide
cuccgcagugcugggccgc

SEQ ID NO: 869332 - RNA, 19 nt, Artificial Sequence
  Description of Artificial Sequence: Synthetic oligonucleotide
gagugacauguggcucgcc

SEQ ID NO: 869333 - RNA, 19 nt, Artificial Sequence
  Description of Artificial Sequence: Synthetic oligonucleotide
ccgugugaaaacaaguuuu

SEQ ID NO: 869334 - RNA, 19 nt, Artificial Sequence
  Description of Artificial Sequence: Synthetic oligonucleotide
gcuugguuaccacaacgau

SEQ ID NO: 869335 - RNA, 19 nt, Artificial Sequence
  Description of Artificial Sequence: Synthetic oligonucleotide
augucgcgucagcaugcaa

SEQ ID NO: 869336 - RNA, 19 nt, Artificial Sequence
  Description of Artificial Sequence: Synthetic oligonucleotide
cucggaugugauccagugu

SEQ ID NO: 869337 - RNA, 19 nt, Artificial Sequence
  Description of Artificial Sequence: Synthetic oligonucleotide
gcggccuugguacuuauuu

SEQ ID NO: 869338 - RNA, 19 nt, Artificial Sequence
  Description of Artificial Sequence: Synthetic oligonucleotide
gacaccaacgugagaccau

SEQ ID NO: 869339 - RNA, 19 nt, Artificial Sequence
  Description of Artificial Sequence: Synthetic oligonucleotide
guacgacgagugacaugug

SEQ ID NO: 869340 - RNA, 19 nt, Artificial Sequence
  Description of Artificial Sequence: Synthetic oligonucleotide
cgaucaagcgcucggaugu

SEQ ID NO: 869341 - RNA, 19 nt, Artificial Sequence
  Description of Artificial Sequence: Synthetic oligonucleotide
ggccacacgcacacgccgc

SEQ ID NO: 869342 - RNA, 19 nt, Artificial Sequence
  Description of Artificial Sequence: Synthetic oligonucleotide
guucacgguaacgaaccuu

SEQ ID NO: 869343 - RNA, 19 nt, Artificial Sequence
  Description of Artificial Sequence: Synthetic oligonucleotide
gccucuacggggugcugga

SEQ ID NO: 869344 - RNA, 19 nt, Artificial Sequence
  Description of Artificial Sequence: Synthetic oligonucleotide
gcacccgggccacacgcac

SEQ ID NO: 869345 - RNA, 19 nt, Artificial Sequence
  Description of Artificial Sequence: Synthetic oligonucleotide
ccgcacccgggccacacgc

SEQ ID NO: 869346 - RNA, 19 nt, Artificial Sequence
  Description of Artificial Sequence: Synthetic oligonucleotide
gacauguggcucgccucua

SEQ ID NO: 869347 - RNA, 19 nt, Artificial Sequence
  Description of Artificial Sequence: Synthetic oligonucleotide
gcggcugcuaggcgcuggc

SEQ ID NO: 869348 - RNA, 19 nt, Artificial Sequence
  Description of Artificial Sequence: Synthetic oligonucleotide
gaguaucaucaaguuccau

SEQ ID NO: 869349 - RNA, 19 nt, Artificial Sequence
  Description of Artificial Sequence: Synthetic oligonucleotide
cuggcggcugcuaggcgcu

SEQ ID NO: 869350 - RNA, 19 nt, Artificial Sequence
  Description of Artificial Sequence: Synthetic oligonucleotide
cggugacuugugcaguaac

SEQ ID NO: 869351 - RNA, 19 nt, Artificial Sequence
  Description of Artificial Sequence: Synthetic oligonucleotide
ucgccucuacggggugcug

SEQ ID NO: 869352 - RNA, 19 nt, Artificial Sequence
  Description of Artificial Sequence: Synthetic oligonucleotide
ggcgacagaccaccaugua

SEQ ID NO: 869353 - RNA, 19 nt, Artificial Sequence
  Description of Artificial Sequence: Synthetic oligonucleotide
cgucagcaugcaaugaacu

SEQ ID NO: 869354 - RNA, 19 nt, Artificial Sequence
  Description of Artificial Sequence: Synthetic oligonucleotide
ccacacgcacacgccgccg

SEQ ID NO: 869355 - RNA, 19 nt, Artificial Sequence
  Description of Artificial Sequence: Synthetic oligonucleotide
cgcgucagcaugcaaugaa

SEQ ID NO: 869356 - RNA, 19 nt, Artificial Sequence
  Description of Artificial Sequence: Synthetic oligonucleotide
gcgcucggaugugauccag

SEQ ID NO: 869357 - RNA, 19 nt, Artificial Sequence
  Description of Artificial Sequence: Synthetic oligonucleotide
ggcgaucaagcgcucggau

SEQ ID NO: 869358 - RNA, 19 nt, Artificial Sequence
  Description of Artificial Sequence: Synthetic oligonucleotide
cuugcacguuggauucuuu

SEQ ID NO: 869359 - RNA, 19 nt, Artificial Sequence
  Description of Artificial Sequence: Synthetic oligonucleotide
gcucgccucuacggggugc

SEQ ID NO: 869360 - RNA, 19 nt, Artificial Sequence
  Description of Artificial Sequence: Synthetic oligonucleotide
ggcucgccucuacggggug

SEQ ID NO: 869361 - RNA, 19 nt, Artificial Sequence
  Description of Artificial Sequence: Synthetic oligonucleotide
caccagguuuucugacaau

SEQ ID NO: 869362 - RNA, 19 nt, Artificial Sequence
  Description of Artificial Sequence: Synthetic oligonucleotide
cggaguauggugauacguu

SEQ ID NO: 869363 - RNA, 19 nt, Artificial Sequence
  Description of Artificial Sequence: Synthetic oligonucleotide
cugcggugacuugugcagu

SEQ ID NO: 869364 - RNA, 19 nt, Artificial Sequence
  Description of Artificial Sequence: Synthetic oligonucleotide
cccuggcggcugcuaggcg

SEQ ID NO: 869365 - RNA, 19 nt, Artificial Sequence
  Description of Artificial Sequence: Synthetic oligonucleotide
cccgcacccgggccacacg

SEQ ID NO: 869366 - RNA, 19 nt, Artificial Sequence
  Description of Artificial Sequence: Synthetic oligonucleotide
cuacggggugcuggaucaa

SEQ ID NO: 869367 - RNA, 19 nt, Artificial Sequence
  Description of Artificial Sequence: Synthetic oligonucleotide
gcuaugccagaaacuggau

SEQ ID NO: 869368 - RNA, 19 nt, Artificial Sequence
  Description of Artificial Sequence: Synthetic oligonucleotide
ccgcuggcucgcuccgcag

SEQ ID NO: 869369 - RNA, 19 nt, Artificial Sequence
  Description of Artificial Sequence: Synthetic oligonucleotide
cugccgcuccgcgcugcuc

SEQ ID NO: 869370 - RNA, 19 nt, Artificial Sequence
  Description of Artificial Sequence: Synthetic oligonucleotide
cggccuugguacuuauuua

SEQ ID NO: 869371 - RNA, 19 nt, Artificial Sequence
  Description of Artificial Sequence: Synthetic oligonucleotide
cccgcccgaaccggcugcc

SEQ ID NO: 869372 - RNA, 19 nt, Artificial Sequence
  Description of Artificial Sequence: Synthetic oligonucleotide
caguggccuugaucuuuau

SEQ ID NO: 869373 - RNA, 19 nt, Artificial Sequence
  Description of Artificial Sequence: Synthetic oligonucleotide
ggggcggccuugguacuua

SEQ ID NO: 869374 - RNA, 19 nt, Artificial Sequence
  Description of Artificial Sequence: Synthetic oligonucleotide
ccgcccgaaccggcugccg

SEQ ID NO: 869375 - RNA, 19 nt, Artificial Sequence
  Description of Artificial Sequence: Synthetic oligonucleotide
cggcugcuaggcgcuggcg

SEQ ID NO: 869376 - RNA, 19 nt, Artificial Sequence
  Description of Artificial Sequence: Synthetic oligonucleotide
cguucacgguaacgaaccu

SEQ ID NO: 869377 - RNA, 19 nt, Artificial Sequence
  Description of Artificial Sequence: Synthetic oligonucleotide
gggcggccuugguacuuau

SEQ ID NO: 869378 - RNA, 19 nt, Artificial Sequence
  Description of Artificial Sequence: Synthetic oligonucleotide
ccauuuccauuaggucaau

SEQ ID NO: 869379 - RNA, 19 nt, Artificial Sequence
  Description of Artificial Sequence: Synthetic oligonucleotide
cgccggccgcugugccucc

SEQ ID NO: 869380 - RNA, 19 nt, Artificial Sequence
  Description of Artificial Sequence: Synthetic oligonucleotide
ccucuacggggugcuggau

SEQ ID NO: 869381 - RNA, 19 nt, Artificial Sequence
  Description of Artificial Sequence: Synthetic oligonucleotide
aauauuaugacguugacca

SEQ ID NO: 869382 - RNA, 19 nt, Artificial Sequence
  Description of Artificial Sequence: Synthetic oligonucleotide
gaaaauacgaaauaaaaug

SEQ ID NO: 869383 - RNA, 19 nt, Artificial Sequence
  Description of Artificial Sequence: Synthetic oligonucleotide
aaaagguacauauugacag

SEQ ID NO: 869384 - RNA, 19 nt, Artificial Sequence
  Description of Artificial Sequence: Synthetic oligonucleotide
guuagugucacacacaagg

SEQ ID NO: 869385 - RNA, 19 nt, Artificial Sequence
  Description of Artificial Sequence: Synthetic oligonucleotide
uuaugaauggucaaguuca

SEQ ID NO: 869386 - RNA, 19 nt, Artificial Sequence
  Description of Artificial Sequence: Synthetic oligonucleotide
aaaagaucaggucagucag

SEQ ID NO: 869387 - RNA, 19 nt, Artificial Sequence
  Description of Artificial Sequence: Synthetic oligonucleotide
uuuagcaucacccucacgu

SEQ ID NO: 869388 - RNA, 19 nt, Artificial Sequence
  Description of Artificial Sequence: Synthetic oligonucleotide
gaucaggucagucagaaag

SEQ ID NO: 869389 - RNA, 19 nt, Artificial Sequence
  Description of Artificial Sequence: Synthetic oligonucleotide
guauaaacaguauugcacg

SEQ ID NO: 869390 - RNA, 19 nt, Artificial Sequence
  Description of Artificial Sequence: Synthetic oligonucleotide
uuuauuaccaaaaggccca

SEQ ID NO: 869391 - RNA, 19 nt, Artificial Sequence
  Description of Artificial Sequence: Synthetic oligonucleotide
auuuauuaccaaaaggccc

SEQ ID NO: 869392 - RNA, 19 nt, Artificial Sequence
  Description of Artificial Sequence: Synthetic oligonucleotide
uugguuguacuaauggucg

SEQ ID NO: 869393 - RNA, 19 nt, Artificial Sequence
  Description of Artificial Sequence: Synthetic oligonucleotide
aauuaagggaaauuuaaua

SEQ ID NO: 869394 - RNA, 19 nt, Artificial Sequence
  Description of Artificial Sequence: Synthetic oligonucleotide
aagagucgagguuaguuac

SEQ ID NO: 869395 - RNA, 19 nt, Artificial Sequence
  Description of Artificial Sequence: Synthetic oligonucleotide
uaaauugcacaauauauaa

SEQ ID NO: 869396 - RNA, 19 nt, Artificial Sequence
  Description of Artificial Sequence: Synthetic oligonucleotide
uacauuugaucacaguuag

SEQ ID NO: 869397 - RNA, 19 nt, Artificial Sequence
  Description of Artificial Sequence: Synthetic oligonucleotide
ucauuaaugucugacacag

SEQ ID NO: 869398 - RNA, 19 nt, Artificial Sequence
  Description of Artificial Sequence: Synthetic oligonucleotide
cacguaacaacaaagaguc

SEQ ID NO: 869399 - RNA, 19 nt, Artificial Sequence
  Description of Artificial Sequence: Synthetic oligonucleotide
uguaagaggauccuacgcc

SEQ ID NO: 869400 - RNA, 19 nt, Artificial Sequence
  Description of Artificial Sequence: Synthetic oligonucleotide
uauauaacagagcaccgca

SEQ ID NO: 869401 - RNA, 19 nt, Artificial Sequence
  Description of Artificial Sequence: Synthetic oligonucleotide
aauacaaacagaagagcuc

SEQ ID NO: 869402 - RNA, 19 nt, Artificial Sequence
  Description of Artificial Sequence: Synthetic oligonucleotide
aaugcuaaaagagugucca

SEQ ID NO: 869403 - RNA, 19 nt, Artificial Sequence
  Description of Artificial Sequence: Synthetic oligonucleotide
aaaguuacccaucuguuaa

SEQ ID NO: 869404 - RNA, 19 nt, Artificial Sequence
  Description of Artificial Sequence: Synthetic oligonucleotide
uuagacauaaucacuuuac

SEQ ID NO: 869405 - RNA, 19 nt, Artificial Sequence
  Description of Artificial Sequence: Synthetic oligonucleotide
agauaugaaagucccuccc

SEQ ID NO: 869406 - RNA, 19 nt, Artificial Sequence
  Description of Artificial Sequence: Synthetic oligonucleotide
aaugucuaaagucugcaau

SEQ ID NO: 869407 - RNA, 19 nt, Artificial Sequence
  Description of Artificial Sequence: Synthetic oligonucleotide
uuuacaggugaauccaggg

SEQ ID NO: 869408 - RNA, 19 nt, Artificial Sequence
  Description of Artificial Sequence: Synthetic oligonucleotide
aacaguauugcacguaaca

SEQ ID NO: 869409 - RNA, 19 nt, Artificial Sequence
  Description of Artificial Sequence: Synthetic oligonucleotide
aguuccgugagucacaaug

SEQ ID NO: 869410 - RNA, 19 nt, Artificial Sequence
  Description of Artificial Sequence: Synthetic oligonucleotide
caaaacuccacuuaguuca

SEQ ID NO: 869411 - RNA, 19 nt, Artificial Sequence
  Description of Artificial Sequence: Synthetic oligonucleotide
agcaguuagugucacacac

SEQ ID NO: 869412 - RNA, 19 nt, Artificial Sequence
  Description of Artificial Sequence: Synthetic oligonucleotide
uauaacagagcaccgcaag

SEQ ID NO: 869413 - RNA, 19 nt, Artificial Sequence
  Description of Artificial Sequence: Synthetic oligonucleotide
caaauaaacgaaaaucauc

SEQ ID NO: 869414 - RNA, 19 nt, Artificial Sequence
  Description of Artificial Sequence: Synthetic oligonucleotide
aacguucuagaauauaaaa

SEQ ID NO: 869415 - RNA, 19 nt, Artificial Sequence
  Description of Artificial Sequence: Synthetic oligonucleotide
auauauaacagagcaccgc

SEQ ID NO: 869416 - RNA, 19 nt, Artificial Sequence
  Description of Artificial Sequence: Synthetic oligonucleotide
ugcacguaacaacaaagag

SEQ ID NO: 869417 - RNA, 19 nt, Artificial Sequence
  Description of Artificial Sequence: Synthetic oligonucleotide
ucuaaagucugcaaugaaa

SEQ ID NO: 869418 - RNA, 19 nt, Artificial Sequence
  Description of Artificial Sequence: Synthetic oligonucleotide
agaggcuuuuaacaguuac

SEQ ID NO: 869419 - RNA, 19 nt, Artificial Sequence
  Description of Artificial Sequence: Synthetic oligonucleotide
aguacaaaggcuacguuac

SEQ ID NO: 869420 - RNA, 19 nt, Artificial Sequence
  Description of Artificial Sequence: Synthetic oligonucleotide
cauuugaucacaguuagac

SEQ ID NO: 869421 - RNA, 19 nt, Artificial Sequence
  Description of Artificial Sequence: Synthetic oligonucleotide
ugaaaauuugucucaguac

SEQ ID NO: 869422 - RNA, 19 nt, Artificial Sequence
  Description of Artificial Sequence: Synthetic oligonucleotide
gugacuuaaaucuacucug

SEQ ID NO: 869423 - RNA, 19 nt, Artificial Sequence
  Description of Artificial Sequence: Synthetic oligonucleotide
aaagaauuagcaucauaaa

SEQ ID NO: 869424 - RNA, 19 nt, Artificial Sequence
  Description of Artificial Sequence: Synthetic oligonucleotide
ucuaauaggcaucuuuuaa

SEQ ID NO: 869425 - RNA, 19 nt, Artificial Sequence
  Description of Artificial Sequence: Synthetic oligonucleotide
auaauauuaugacguugac

SEQ ID NO: 869426 - RNA, 19 nt, Artificial Sequence
  Description of Artificial Sequence: Synthetic oligonucleotide
guuauaaagcucuaacuuc

SEQ ID NO: 869427 - RNA, 19 nt, Artificial Sequence
  Description of Artificial Sequence: Synthetic oligonucleotide
ugcuaaaagaguguccacg

SEQ ID NO: 869428 - RNA, 19 nt, Artificial Sequence
  Description of Artificial Sequence: Synthetic oligonucleotide
auaacauuaagaacuuggg

SEQ ID NO: 869429 - RNA, 19 nt, Artificial Sequence
  Description of Artificial Sequence: Synthetic oligonucleotide
uaguuauaaagcucuaacu

SEQ ID NO: 869430 - RNA, 19 nt, Artificial Sequence
  Description of Artificial Sequence: Synthetic oligonucleotide
ucagaaagcgcgcuuuucc

SEQ ID NO: 869431 - RNA, 19 nt, Artificial Sequence
  Description of Artificial Sequence: Synthetic oligonucleotide
aaaacguucuagaauauaa

SEQ ID NO: 869432 - RNA, 19 nt, Artificial Sequence
  Description of Artificial Sequence: Synthetic oligonucleotide
auugguuguacuaaugguc

SEQ ID NO: 869433 - RNA, 19 nt, Artificial Sequence
  Description of Artificial Sequence: Synthetic oligonucleotide
aaacuauuuuguuucuccu

SEQ ID NO: 869434 - RNA, 19 nt, Artificial Sequence
  Description of Artificial Sequence: Synthetic oligonucleotide
ucaacacuugauuauaaau

SEQ ID NO: 869435 - RNA, 19 nt, Artificial Sequence
  Description of Artificial Sequence: Synthetic oligonucleotide
aaagaguguccacgguagc

SEQ ID NO: 869436 - RNA, 19 nt, Artificial Sequence
  Description of Artificial Sequence: Synthetic oligonucleotide
uuaaaucuacucugcagug

SEQ ID NO: 869437 - RNA, 19 nt, Artificial Sequence
  Description of Artificial Sequence: Synthetic oligonucleotide
uaaacaguauugcacguaa

SEQ ID NO: 869438 - RNA, 19 nt, Artificial Sequence
  Description of Artificial Sequence: Synthetic oligonucleotide
uaauauuaugacguugacc

SEQ ID NO: 869439 - RNA, 19 nt, Artificial Sequence
  Description of Artificial Sequence: Synthetic oligonucleotide
uuacauuugaucacaguua

SEQ ID NO: 869440 - RNA, 19 nt, Artificial Sequence
  Description of Artificial Sequence: Synthetic oligonucleotide
ucauaauauaccaguuaug

SEQ ID NO: 869441 - RNA, 19 nt, Artificial Sequence
  Description of Artificial Sequence: Synthetic oligonucleotide
cuugcaaucaccgugcgug

SEQ ID NO: 869442 - RNA, 19 nt, Artificial Sequence
  Description of Artificial Sequence: Synthetic oligonucleotide
cauaauauaccaguuauga

SEQ ID NO: 869443 - RNA, 19 nt, Artificial Sequence
  Description of Artificial Sequence: Synthetic oligonucleotide
aaagagucgagguuaguua

SEQ ID NO: 869444 - RNA, 19 nt, Artificial Sequence
  Description of Artificial Sequence: Synthetic oligonucleotide
cuaauggucguccuguuac

SEQ ID NO: 869445 - RNA, 19 nt, Artificial Sequence
  Description of Artificial Sequence: Synthetic oligonucleotide
ggaacuagcaguuaguguc

SEQ ID NO: 869446 - RNA, 19 nt, Artificial Sequence
  Description of Artificial Sequence: Synthetic oligonucleotide
acuccuuaaagaaaauacg

SEQ ID NO: 869447 - RNA, 19 nt, Artificial Sequence
  Description of Artificial Sequence: Synthetic oligonucleotide
uauucaagcuuuacaggug

SEQ ID NO: 869448 - RNA, 19 nt, Artificial Sequence
  Description of Artificial Sequence: Synthetic oligonucleotide
ugacuuaaaucuacucugc

SEQ ID NO: 869449 - RNA, 19 nt, Artificial Sequence
  Description of Artificial Sequence: Synthetic oligonucleotide
guuaugaauggucaaguuc

SEQ ID NO: 869450 - RNA, 19 nt, Artificial Sequence
  Description of Artificial Sequence: Synthetic oligonucleotide
uuagugucacacacaaggc

SEQ ID NO: 869451 - RNA, 19 nt, Artificial Sequence
  Description of Artificial Sequence: Synthetic oligonucleotide
aaggcuacguuacuauuga

SEQ ID NO: 869452 - RNA, 19 nt, Artificial Sequence
  Description of Artificial Sequence: Synthetic oligonucleotide
ucagauuguccccagaauu

SEQ ID NO: 869453 - RNA, 19 nt, Artificial Sequence
  Description of Artificial Sequence: Synthetic oligonucleotide
uccacuuaguucaaguguc

SEQ ID NO: 869454 - RNA, 19 nt, Artificial Sequence
  Description of Artificial Sequence: Synthetic oligonucleotide
gacgucuuuagcaucaccc

SEQ ID NO: 869455 - RNA, 19 nt, Artificial Sequence
  Description of Artificial Sequence: Synthetic oligonucleotide
uaaaagaguguccacggua

SEQ ID NO: 869456 - RNA, 19 nt, Artificial Sequence
  Description of Artificial Sequence: Synthetic oligonucleotide
aagcuuuacagucuugcaa

SEQ ID NO: 869457 - RNA, 19 nt, Artificial Sequence
  Description of Artificial Sequence: Synthetic oligonucleotide
uugcacaauauauaacaga

SEQ ID NO: 869458 - RNA, 19 nt, Artificial Sequence
  Description of Artificial Sequence: Synthetic oligonucleotide
aguaguagugcauaacaaa

SEQ ID NO: 869459 - RNA, 19 nt, Artificial Sequence
  Description of Artificial Sequence: Synthetic oligonucleotide
aaaggcuacguuacuauug

SEQ ID NO: 869460 - RNA, 19 nt, Artificial Sequence
  Description of Artificial Sequence: Synthetic oligonucleotide
uauuaugacguugaccaga

SEQ ID NO: 869461 - RNA, 19 nt, Artificial Sequence
  Description of Artificial Sequence: Synthetic oligonucleotide
uguacuaauggucguccug

SEQ ID NO: 869462 - RNA, 19 nt, Artificial Sequence
  Description of Artificial Sequence: Synthetic oligonucleotide
uacauauugacaguagaaa

SEQ ID NO: 869463 - RNA, 19 nt, Artificial Sequence
  Description of Artificial Sequence: Synthetic oligonucleotide
aggucagucagaaagcgcg

SEQ ID NO: 869464 - RNA, 19 nt, Artificial Sequence
  Description of Artificial Sequence: Synthetic oligonucleotide
ugucucaguacaaaggcua

SEQ ID NO: 869465 - RNA, 19 nt, Artificial Sequence
  Description of Artificial Sequence: Synthetic oligonucleotide
uaccaguuaugaaugguca

SEQ ID NO: 869466 - RNA, 19 nt, Artificial Sequence
  Description of Artificial Sequence: Synthetic oligonucleotide
cuuuacaggugaauccagg

SEQ ID NO: 869467 - RNA, 19 nt, Artificial Sequence
  Description of Artificial Sequence: Synthetic oligonucleotide
cugaaaacguucuagaaua

SEQ ID NO: 869468 - RNA, 19 nt, Artificial Sequence
  Description of Artificial Sequence: Synthetic oligonucleotide
aaaauuucccauagagaug

SEQ ID NO: 869469 - RNA, 19 nt, Artificial Sequence
  Description of Artificial Sequence: Synthetic oligonucleotide
uuacaggugaauccaggga

SEQ ID NO: 869470 - RNA, 19 nt, Artificial Sequence
  Description of Artificial Sequence: Synthetic oligonucleotide
aguauugcacguaacaaca

SEQ ID NO: 869471 - RNA, 19 nt, Artificial Sequence
  Description of Artificial Sequence: Synthetic oligonucleotide
aguagugcauaacaaaauu

SEQ ID NO: 869472 - RNA, 19 nt, Artificial Sequence
  Description of Artificial Sequence: Synthetic oligonucleotide
ucaaaacuccacuuaguuc

SEQ ID NO: 869473 - RNA, 19 nt, Artificial Sequence
  Description of Artificial Sequence: Synthetic oligonucleotide
ucacaaugucuaaagucug

SEQ ID NO: 869474 - RNA, 19 nt, Artificial Sequence
  Description of Artificial Sequence: Synthetic oligonucleotide
cuccgugucauaauauacc

SEQ ID NO: 869475 - RNA, 19 nt, Artificial Sequence
  Description of Artificial Sequence: Synthetic oligonucleotide
agucuugcaaucaccgugc

SEQ ID NO: 869476 - RNA, 19 nt, Artificial Sequence
  Description of Artificial Sequence: Synthetic oligonucleotide
aguugcagggcagaacacc

SEQ ID NO: 869477 - RNA, 19 nt, Artificial Sequence
  Description of Artificial Sequence: Synthetic oligonucleotide
aagaggauccuacgccuag

SEQ ID NO: 869478 - RNA, 19 nt, Artificial Sequence
  Description of Artificial Sequence: Synthetic oligonucleotide
agcuuuacagucuugcaau

SEQ ID NO: 869479 - RNA, 19 nt, Artificial Sequence
  Description of Artificial Sequence: Synthetic oligonucleotide
guuaccaggggcuucccag

SEQ ID NO: 869480 - RNA, 19 nt, Artificial Sequence
  Description of Artificial Sequence: Synthetic oligonucleotide
ucacacagugacuuaaauc

SEQ ID NO: 869481 - RNA, 19 nt, Artificial Sequence
  Description of Artificial Sequence: Synthetic oligonucleotide
ucuuuccuauauuucaaaa

SEQ ID NO: 869482 - RNA, 19 nt, Artificial Sequence
  Description of Artificial Sequence: Synthetic oligonucleotide
aauggucguccuguuacgg

SEQ ID NO: 869483 - RNA, 19 nt, Artificial Sequence
  Description of Artificial Sequence: Synthetic oligonucleotide
acaacuccaguagugauug

SEQ ID NO: 869484 - RNA, 19 nt, Artificial Sequence
  Description of Artificial Sequence: Synthetic oligonucleotide
uugagguauugcaaaagau

SEQ ID NO: 869485 - RNA, 19 nt, Artificial Sequence
  Description of Artificial Sequence: Synthetic oligonucleotide
uuaccaaaaggcccagaga

SEQ ID NO: 869486 - RNA, 19 nt, Artificial Sequence
  Description of Artificial Sequence: Synthetic oligonucleotide
auaccaguuaugaaugguc

SEQ ID NO: 869487 - RNA, 19 nt, Artificial Sequence
  Description of Artificial Sequence: Synthetic oligonucleotide
aaacaacuccaguagugau

SEQ ID NO: 869488 - RNA, 19 nt, Artificial Sequence
  Description of Artificial Sequence: Synthetic oligonucleotide
gaaaagguacauauugaca

SEQ ID NO: 869489 - RNA, 19 nt, Artificial Sequence
  Description of Artificial Sequence: Synthetic oligonucleotide
ggaaaagguacauauugac

SEQ ID NO: 869490 - RNA, 19 nt, Artificial Sequence
  Description of Artificial Sequence: Synthetic oligonucleotide
aauaaagauuuaugccuuu

SEQ ID NO: 869491 - RNA, 19 nt, Artificial Sequence
  Description of Artificial Sequence: Synthetic oligonucleotide
ccaguagugauugagaaag

SEQ ID NO: 869492 - RNA, 19 nt, Artificial Sequence
  Description of Artificial Sequence: Synthetic oligonucleotide
aaaugaguuccgugaguca

SEQ ID NO: 869493 - RNA, 19 nt, Artificial Sequence
  Description of Artificial Sequence: Synthetic oligonucleotide
cacagugacuuaaaucuac

SEQ ID NO: 869494 - RNA, 19 nt, Artificial Sequence
  Description of Artificial Sequence: Synthetic oligonucleotide
uccacagauuugcuguaag

SEQ ID NO: 869495 - RNA, 19 nt, Artificial Sequence
  Description of Artificial Sequence: Synthetic oligonucleotide
uaauggucguccuguuacg

SEQ ID NO: 869496 - RNA, 19 nt, Artificial Sequence
  Description of Artificial Sequence: Synthetic oligonucleotide
aaauuugucucaguacaaa

SEQ ID NO: 869497 - RNA, 19 nt, Artificial Sequence
  Description of Artificial Sequence: Synthetic oligonucleotide
cagauaugaaagucccucc

SEQ ID NO: 869498 - RNA, 19 nt, Artificial Sequence
  Description of Artificial Sequence: Synthetic oligonucleotide
acguugaccagauaugaaa

SEQ ID NO: 869499 - RNA, 19 nt, Artificial Sequence
  Description of Artificial Sequence: Synthetic oligonucleotide
uuucuauugguuguacuaa

SEQ ID NO: 869500 - RNA, 19 nt, Artificial Sequence
  Description of Artificial Sequence: Synthetic oligonucleotide
caggagugaaugcuaaaag

SEQ ID NO: 869501 - RNA, 19 nt, Artificial Sequence
  Description of Artificial Sequence: Synthetic oligonucleotide
auugcacaauauauaacag

SEQ ID NO: 869502 - RNA, 19 nt, Artificial Sequence
  Description of Artificial Sequence: Synthetic oligonucleotide
guucuauucaagcuuuaca

SEQ ID NO: 869503 - RNA, 19 nt, Artificial Sequence
  Description of Artificial Sequence: Synthetic oligonucleotide
cuguaagaggauccuacgc

SEQ ID NO: 869504 - RNA, 19 nt, Artificial Sequence
  Description of Artificial Sequence: Synthetic oligonucleotide
aaacaguauugcacguaac

SEQ ID NO: 869505 - RNA, 19 nt, Artificial Sequence
  Description of Artificial Sequence: Synthetic oligonucleotide
ccagagaaaaccccaaagg

SEQ ID NO: 869506 - RNA, 19 nt, Artificial Sequence
  Description of Artificial Sequence: Synthetic oligonucleotide
uucguucuauucaagcuuu

SEQ ID NO: 869507 - RNA, 19 nt, Artificial Sequence
  Description of Artificial Sequence: Synthetic oligonucleotide
gaaugcuaaaagagugucc

SEQ ID NO: 869508 - RNA, 19 nt, Artificial Sequence
  Description of Artificial Sequence: Synthetic oligonucleotide
ugacguugaccagauauga

SEQ ID NO: 869509 - RNA, 19 nt, Artificial Sequence
  Description of Artificial Sequence: Synthetic oligonucleotide
acaaaggcuacguuacuau

SEQ ID NO: 869510 - RNA, 19 nt, Artificial Sequence
  Description of Artificial Sequence: Synthetic oligonucleotide
aacaaagagucgagguuag

SEQ ID NO: 869511 - RNA, 19 nt, Artificial Sequence
  Description of Artificial Sequence: Synthetic oligonucleotide
cagauuguccccagaauuc

SEQ ID NO: 869512 - RNA, 19 nt, Artificial Sequence
  Description of Artificial Sequence: Synthetic oligonucleotide
gcgacauuuauuuacaaaa

SEQ ID NO: 869513 - RNA, 19 nt, Artificial Sequence
  Description of Artificial Sequence: Synthetic oligonucleotide
caagcuuuacaggugaauc

SEQ ID NO: 869514 - RNA, 19 nt, Artificial Sequence
  Description of Artificial Sequence: Synthetic oligonucleotide
agacgucuuuagcaucacc

SEQ ID NO: 869515 - RNA, 19 nt, Artificial Sequence
  Description of Artificial Sequence: Synthetic oligonucleotide
uccgugagucacaaugucu

SEQ ID NO: 869516 - RNA, 19 nt, Artificial Sequence
  Description of Artificial Sequence: Synthetic oligonucleotide
auauuaugacguugaccag

SEQ ID NO: 869517 - RNA, 19 nt, Artificial Sequence
  Description of Artificial Sequence: Synthetic oligonucleotide
uauucacacagugacuuaa

SEQ ID NO: 869518 - RNA, 19 nt, Artificial Sequence
  Description of Artificial Sequence: Synthetic oligonucleotide
uguguuaccaggggcuucc

SEQ ID NO: 869519 - RNA, 19 nt, Artificial Sequence
  Description of Artificial Sequence: Synthetic oligonucleotide
gucauaauauaccaguuau

SEQ ID NO: 869520 - RNA, 19 nt, Artificial Sequence
  Description of Artificial Sequence: Synthetic oligonucleotide
cacaauccuggucagucgc

SEQ ID NO: 869521 - RNA, 19 nt, Artificial Sequence
  Description of Artificial Sequence: Synthetic oligonucleotide
ucgagguuaguuacagccu

SEQ ID NO: 869522 - RNA, 19 nt, Artificial Sequence
  Description of Artificial Sequence: Synthetic oligonucleotide
ucucaguacaaaggcuacg

SEQ ID NO: 869523 - RNA, 19 nt, Artificial Sequence
  Description of Artificial Sequence: Synthetic oligonucleotide
guuguacuaauggucgucc

SEQ ID NO: 869524 - RNA, 19 nt, Artificial Sequence
  Description of Artificial Sequence: Synthetic oligonucleotide
aguuacauuugaucacagu

SEQ ID NO: 869525 - RNA, 19 nt, Artificial Sequence
  Description of Artificial Sequence: Synthetic oligonucleotide
uguccacaagcauuccacc

SEQ ID NO: 869526 - RNA, 19 nt, Artificial Sequence
  Description of Artificial Sequence: Synthetic oligonucleotide
acauccagucagauugucc

SEQ ID NO: 869527 - RNA, 19 nt, Artificial Sequence
  Description of Artificial Sequence: Synthetic oligonucleotide
guagugauugagaaagcac

SEQ ID NO: 869528 - RNA, 19 nt, Artificial Sequence
  Description of Artificial Sequence: Synthetic oligonucleotide
aaacguucuagaauauaaa

SEQ ID NO: 869529 - RNA, 19 nt, Artificial Sequence
  Description of Artificial Sequence: Synthetic oligonucleotide
agucagauuguccccagaa

SEQ ID NO: 869530 - RNA, 19 nt, Artificial Sequence
  Description of Artificial Sequence: Synthetic oligonucleotide
uuugcuguaagaggauccu

SEQ ID NO: 869531 - RNA, 19 nt, Artificial Sequence
  Description of Artificial Sequence: Synthetic oligonucleotide
acaguuagacauaaucacu

SEQ ID NO: 869532 - RNA, 19 nt, Artificial Sequence
  Description of Artificial Sequence: Synthetic oligonucleotide
uaaaucuacucugcagugu

SEQ ID NO: 869533 - RNA, 19 nt, Artificial Sequence
  Description of Artificial Sequence: Synthetic oligonucleotide
aagaguguccacgguagca

SEQ ID NO: 869534 - RNA, 19 nt, Artificial Sequence
  Description of Artificial Sequence: Synthetic oligonucleotide
aaagcacuccuuaaagaaa

SEQ ID NO: 869535 - RNA, 19 nt, Artificial Sequence
  Description of Artificial Sequence: Synthetic oligonucleotide
aggcuuuuaacaguuacau

SEQ ID NO: 869536 - RNA, 19 nt, Artificial Sequence
  Description of Artificial Sequence: Synthetic oligonucleotide
acgccuagguuuucuauug

SEQ ID NO: 869537 - RNA, 19 nt, Artificial Sequence
  Description of Artificial Sequence: Synthetic oligonucleotide
auggucguccuguuacggg

SEQ ID NO: 869538 - RNA, 19 nt, Artificial Sequence
  Description of Artificial Sequence: Synthetic oligonucleotide
ugaaaacguucuagaauau

SEQ ID NO: 869539 - RNA, 19 nt, Artificial Sequence
  Description of Artificial Sequence: Synthetic oligonucleotide
uucaucuaccauccacaga

SEQ ID NO: 869540 - RNA, 19 nt, Artificial Sequence
  Description of Artificial Sequence: Synthetic oligonucleotide
ugcguguuucuauuacucu

SEQ ID NO: 869541 - RNA, 19 nt, Artificial Sequence
  Description of Artificial Sequence: Synthetic oligonucleotide
uucuauugguuguacuaau

SEQ ID NO: 869542 - RNA, 19 nt, Artificial Sequence
  Description of Artificial Sequence: Synthetic oligonucleotide
aaauaccagcaugaggaaa

SEQ ID NO: 869543 - RNA, 19 nt, Artificial Sequence
  Description of Artificial Sequence: Synthetic oligonucleotide
ucgcacaaucaacacuuga

SEQ ID NO: 869544 - RNA, 19 nt, Artificial Sequence
  Description of Artificial Sequence: Synthetic oligonucleotide
gcuacguuacuauugaaaa

SEQ ID NO: 869545 - RNA, 19 nt, Artificial Sequence
  Description of Artificial Sequence: Synthetic oligonucleotide
guuagacauaaucacuuua

SEQ ID NO: 869546 - RNA, 19 nt, Artificial Sequence
  Description of Artificial Sequence: Synthetic oligonucleotide
aguuaugaauggucaaguu

SEQ ID NO: 869547 - RNA, 19 nt, Artificial Sequence
  Description of Artificial Sequence: Synthetic oligonucleotide
ggugaauccagggaacuag

SEQ ID NO: 869548 - RNA, 19 nt, Artificial Sequence
  Description of Artificial Sequence: Synthetic oligonucleotide
ccaacuucugaaaacguuc

SEQ ID NO: 869549 - RNA, 19 nt, Artificial Sequence
  Description of Artificial Sequence: Synthetic oligonucleotide
uaugaauggucaaguucau

SEQ ID NO: 869550 - RNA, 19 nt, Artificial Sequence
  Description of Artificial Sequence: Synthetic oligonucleotide
gguacauauugacaguaga

SEQ ID NO: 869551 - RNA, 19 nt, Artificial Sequence
  Description of Artificial Sequence: Synthetic oligonucleotide
gcuguaagaggauccuacg

SEQ ID NO: 869552 - RNA, 19 nt, Artificial Sequence
  Description of Artificial Sequence: Synthetic oligonucleotide
aguuagacauaaucacuuu

SEQ ID NO: 869553 - RNA, 19 nt, Artificial Sequence
  Description of Artificial Sequence: Synthetic oligonucleotide
uauaaagcucuaacuucuu

SEQ ID NO: 869554 - RNA, 19 nt, Artificial Sequence
  Description of Artificial Sequence: Synthetic oligonucleotide
uguuacgggcgcuuccugu

SEQ ID NO: 869555 - RNA, 19 nt, Artificial Sequence
  Description of Artificial Sequence: Synthetic oligonucleotide
aggaaaagguacauauuga

SEQ ID NO: 869556 - RNA, 19 nt, Artificial Sequence
  Description of Artificial Sequence: Synthetic oligonucleotide
aauccuggucagucgcaca

SEQ ID NO: 869557 - RNA, 19 nt, Artificial Sequence
  Description of Artificial Sequence: Synthetic oligonucleotide
uuucuugaaggacccucuc

SEQ ID NO: 869558 - RNA, 19 nt, Artificial Sequence
  Description of Artificial Sequence: Synthetic oligonucleotide
uuauuaccaaaaggcccag

SEQ ID NO: 869559 - RNA, 19 nt, Artificial Sequence
  Description of Artificial Sequence: Synthetic oligonucleotide
agggaacuagcaguuagug

SEQ ID NO: 869560 - RNA, 19 nt, Artificial Sequence
  Description of Artificial Sequence: Synthetic oligonucleotide
uacaaaggcuacguuacua

SEQ ID NO: 869561 - RNA, 19 nt, Artificial Sequence
  Description of Artificial Sequence: Synthetic oligonucleotide
guacauauugacaguagaa

SEQ ID NO: 869562 - RNA, 19 nt, Artificial Sequence
  Description of Artificial Sequence: Synthetic oligonucleotide
auaaaguuacccaucuguu

SEQ ID NO: 869563 - RNA, 19 nt, Artificial Sequence
  Description of Artificial Sequence: Synthetic oligonucleotide
uuccgugagucacaauguc

SEQ ID NO: 869564 - RNA, 19 nt, Artificial Sequence
  Description of Artificial Sequence: Synthetic oligonucleotide
agggcuucguucuauucaa

SEQ ID NO: 869565 - RNA, 19 nt, Artificial Sequence
  Description of Artificial Sequence: Synthetic oligonucleotide
uuuaaagaauuagcaucau

SEQ ID NO: 869566 - RNA, 19 nt, Artificial Sequence
  Description of Artificial Sequence: Synthetic oligonucleotide
cagugacuuaaaucuacuc

SEQ ID NO: 869567 - RNA, 19 nt, Artificial Sequence
  Description of Artificial Sequence: Synthetic oligonucleotide
agauuguccccagaauuca

SEQ ID NO: 869568 - RNA, 19 nt, Artificial Sequence
  Description of Artificial Sequence: Synthetic oligonucleotide
augacguugaccagauaug

SEQ ID NO: 869569 - RNA, 19 nt, Artificial Sequence
  Description of Artificial Sequence: Synthetic oligonucleotide
aggaccuguguuaccaggg

SEQ ID NO: 869570 - RNA, 19 nt, Artificial Sequence
  Description of Artificial Sequence: Synthetic oligonucleotide
uuacgggcgcuuccugucc

SEQ ID NO: 869571 - RNA, 19 nt, Artificial Sequence
  Description of Artificial Sequence: Synthetic oligonucleotide
cuaauaggcaucuuuuaau

SEQ ID NO: 869572 - RNA, 19 nt, Artificial Sequence
  Description of Artificial Sequence: Synthetic oligonucleotide
aggacccucucuuuuaaua

SEQ ID NO: 869573 - RNA, 19 nt, Artificial Sequence
  Description of Artificial Sequence: Synthetic oligonucleotide
uacgccuagguuuucuauu

SEQ ID NO: 869574 - RNA, 19 nt, Artificial Sequence
  Description of Artificial Sequence: Synthetic oligonucleotide
uacagacgucuuuagcauc

SEQ ID NO: 869575 - RNA, 19 nt, Artificial Sequence
  Description of Artificial Sequence: Synthetic oligonucleotide
aguguccacgguagcaugg

SEQ ID NO: 869576 - RNA, 19 nt, Artificial Sequence
  Description of Artificial Sequence: Synthetic oligonucleotide
ucuugcaaucaccgugcgu

SEQ ID NO: 869577 - RNA, 19 nt, Artificial Sequence
  Description of Artificial Sequence: Synthetic oligonucleotide
agguauugcaaaagaucag

SEQ ID NO: 869578 - RNA, 19 nt, Artificial Sequence
  Description of Artificial Sequence: Synthetic oligonucleotide
uccuguuacgggcgcuucc

SEQ ID NO: 869579 - RNA, 19 nt, Artificial Sequence
  Description of Artificial Sequence: Synthetic oligonucleotide
ucaagcuuuacaggugaau

SEQ ID NO: 869580 - RNA, 19 nt, Artificial Sequence
  Description of Artificial Sequence: Synthetic oligonucleotide
uguuaccaggggcuuccca

SEQ ID NO: 869581 - RNA, 19 nt, Artificial Sequence
  Description of Artificial Sequence: Synthetic oligonucleotide
acggcaggaccuguguuac

SEQ ID NO: 869582 - RNA, 19 nt, Artificial Sequence
  Description of Artificial Sequence: Synthetic oligonucleotide
accaguuaugaauggucaa

SEQ ID NO: 869583 - RNA, 19 nt, Artificial Sequence
  Description of Artificial Sequence: Synthetic oligonucleotide
uaagaggauccuacgccua

SEQ ID NO: 869584 - RNA, 19 nt, Artificial Sequence
  Description of Artificial Sequence: Synthetic oligonucleotide
agguuucuaauaggcaucu

SEQ ID NO: 869585 - RNA, 19 nt, Artificial Sequence
  Description of Artificial Sequence: Synthetic oligonucleotide
gaaagcgcgcuuuuccuua

SEQ ID NO: 869586 - RNA, 19 nt, Artificial Sequence
  Description of Artificial Sequence: Synthetic oligonucleotide
guaagaggauccuacgccu

SEQ ID NO: 869587 - RNA, 19 nt, Artificial Sequence
  Description of Artificial Sequence: Synthetic oligonucleotide
aguucaagugucccaucaa

SEQ ID NO: 869588 - RNA, 19 nt, Artificial Sequence
  Description of Artificial Sequence: Synthetic oligonucleotide
auuaugacguugaccagau

SEQ ID NO: 869589 - RNA, 19 nt, Artificial Sequence
  Description of Artificial Sequence: Synthetic oligonucleotide
gaguguccacgguagcaug

SEQ ID NO: 869590 - RNA, 19 nt, Artificial Sequence
  Description of Artificial Sequence: Synthetic oligonucleotide
cguguuucuauuacucucc

SEQ ID NO: 869591 - RNA, 19 nt, Artificial Sequence
  Description of Artificial Sequence: Synthetic oligonucleotide
ugguuguacuaauggucgu

SEQ ID NO: 869592 - RNA, 19 nt, Artificial Sequence
  Description of Artificial Sequence: Synthetic oligonucleotide
aagucccucccagaaacaa

SEQ ID NO: 869593 - RNA, 19 nt, Artificial Sequence
  Description of Artificial Sequence: Synthetic oligonucleotide
auaaacaguauugcacgua

SEQ ID NO: 869594 - RNA, 19 nt, Artificial Sequence
  Description of Artificial Sequence: Synthetic oligonucleotide
gagugaaugcuaaaagagu

SEQ ID NO: 869595 - RNA, 19 nt, Artificial Sequence
  Description of Artificial Sequence: Synthetic oligonucleotide
gaacuagcaguuaguguca

SEQ ID NO: 869596 - RNA, 19 nt, Artificial Sequence
  Description of Artificial Sequence: Synthetic oligonucleotide
acguggcuuucuuaaagau

SEQ ID NO: 869597 - RNA, 19 nt, Artificial Sequence
  Description of Artificial Sequence: Synthetic oligonucleotide
auccuggucagucgcacaa

SEQ ID NO: 869598 - RNA, 19 nt, Artificial Sequence
  Description of Artificial Sequence: Synthetic oligonucleotide
agucccucccagaaacaac

SEQ ID NO: 869599 - RNA, 19 nt, Artificial Sequence
  Description of Artificial Sequence: Synthetic oligonucleotide
aaucuacucugcaguguca

SEQ ID NO: 869600 - RNA, 19 nt, Artificial Sequence
  Description of Artificial Sequence: Synthetic oligonucleotide
gaaaacguucuagaauaua

SEQ ID NO: 869601 - RNA, 19 nt, Artificial Sequence
  Description of Artificial Sequence: Synthetic oligonucleotide
agaggauccuacgccuagg

SEQ ID NO: 869602 - RNA, 19 nt, Artificial Sequence
  Description of Artificial Sequence: Synthetic oligonucleotide
acuaauggucguccuguua

SEQ ID NO: 869603 - RNA, 19 nt, Artificial Sequence
  Description of Artificial Sequence: Synthetic oligonucleotide
guuacgggcgcuuccuguc

SEQ ID NO: 869604 - RNA, 19 nt, Artificial Sequence
  Description of Artificial Sequence: Synthetic oligonucleotide
aaagcgcgcuuuuccuuaa

SEQ ID NO: 869605 - RNA, 19 nt, Artificial Sequence
  Description of Artificial Sequence: Synthetic oligonucleotide
accgcaaguacuucaucua

SEQ ID NO: 869606 - RNA, 19 nt, Artificial Sequence
  Description of Artificial Sequence: Synthetic oligonucleotide
gugaauccagggaacuagc

SEQ ID NO: 869607 - RNA, 19 nt, Artificial Sequence
  Description of Artificial Sequence: Synthetic oligonucleotide
cuuuagcaucacccucacg

SEQ ID NO: 869608 - RNA, 19 nt, Artificial Sequence
  Description of Artificial Sequence: Synthetic oligonucleotide
agguuaguuacagccuuca

SEQ ID NO: 869609 - RNA, 19 nt, Artificial Sequence
  Description of Artificial Sequence: Synthetic oligonucleotide
gucuugcaaucaccgugcg

SEQ ID NO: 869610 - RNA, 19 nt, Artificial Sequence
  Description of Artificial Sequence: Synthetic oligonucleotide
ggaccuguguuaccagggg

SEQ ID NO: 869611 - RNA, 19 nt, Artificial Sequence
  Description of Artificial Sequence: Synthetic oligonucleotide
ggagguuucuaauaggcau

SEQ ID NO: 869612 - RNA, 19 nt, Artificial Sequence
  Description of Artificial Sequence: Synthetic oligonucleotide
ccaguuaugaauggucaag

SEQ ID NO: 869613 - RNA, 19 nt, Artificial Sequence
  Description of Artificial Sequence: Synthetic oligonucleotide
ucaccgugcguguuucuau

SEQ ID NO: 869614 - RNA, 19 nt, Artificial Sequence
  Description of Artificial Sequence: Synthetic oligonucleotide
cacguggcuuucuuaaaga

SEQ ID NO: 869615 - RNA, 19 nt, Artificial Sequence
  Description of Artificial Sequence: Synthetic oligonucleotide
ugcaaaagaucaggucagu

SEQ ID NO: 869616 - RNA, 19 nt, Artificial Sequence
  Description of Artificial Sequence: Synthetic oligonucleotide
aaucaccgugcguguuucu

SEQ ID NO: 869617 - RNA, 19 nt, Artificial Sequence
  Description of Artificial Sequence: Synthetic oligonucleotide
ugugccuccgugucauaau

SEQ ID NO: 869618 - RNA, 19 nt, Artificial Sequence
  Description of Artificial Sequence: Synthetic oligonucleotide
uugcaaucaccgugcgugu

SEQ ID NO: 869619 - RNA, 19 nt, Artificial Sequence
  Description of Artificial Sequence: Synthetic oligonucleotide
ucuccuugguacagacguc

SEQ ID NO: 869620 - RNA, 19 nt, Artificial Sequence
  Description of Artificial Sequence: Synthetic oligonucleotide
ccagggaacuagcaguuag

SEQ ID NO: 869621 - RNA, 19 nt, Artificial Sequence
  Description of Artificial Sequence: Synthetic oligonucleotide
caguuagacauaaucacuu

SEQ ID NO: 869622 - RNA, 19 nt, Artificial Sequence
  Description of Artificial Sequence: Synthetic oligonucleotide
gugcguguuucuauuacuc

SEQ ID NO: 869623 - RNA, 19 nt, Artificial Sequence
  Description of Artificial Sequence: Synthetic oligonucleotide
agagcaccgcaaguacuuc

SEQ ID NO: 869624 - RNA, 19 nt, Artificial Sequence
  Description of Artificial Sequence: Synthetic oligonucleotide
ccuccgugucauaauauac

SEQ ID NO: 869625 - RNA, 19 nt, Artificial Sequence
  Description of Artificial Sequence: Synthetic oligonucleotide
agaugugccuccgugucau

SEQ ID NO: 869626 - RNA, 19 nt, Artificial Sequence
  Description of Artificial Sequence: Synthetic oligonucleotide
cuccacuuaguucaagugu

SEQ ID NO: 869627 - RNA, 19 nt, Artificial Sequence
  Description of Artificial Sequence: Synthetic oligonucleotide
gacccucucuuuuaauaua

SEQ ID NO: 869628 - RNA, 19 nt, Artificial Sequence
  Description of Artificial Sequence: Synthetic oligonucleotide
cuucccagucaaguugcag

SEQ ID NO: 869629 - RNA, 19 nt, Artificial Sequence
  Description of Artificial Sequence: Synthetic oligonucleotide
guacuaauggucguccugu

SEQ ID NO: 869630 - RNA, 19 nt, Artificial Sequence
  Description of Artificial Sequence: Synthetic oligonucleotide
auauaacagagcaccgcaa

SEQ ID NO: 869631 - RNA, 19 nt, Artificial Sequence
  Description of Artificial Sequence: Synthetic oligonucleotide
guguccacgguagcauggg

SEQ ID NO: 869632 - RNA, 19 nt, Artificial Sequence
  Description of Artificial Sequence: Synthetic oligonucleotide
ccaucaaggaaggccacgg

SEQ ID NO: 869633 - RNA, 19 nt, Artificial Sequence
  Description of Artificial Sequence: Synthetic oligonucleotide
gucucaguacaaaggcuac

SEQ ID NO: 869634 - RNA, 19 nt, Artificial Sequence
  Description of Artificial Sequence: Synthetic oligonucleotide
cuggucagucgcacaauca

SEQ ID NO: 869635 - RNA, 19 nt, Artificial Sequence
  Description of Artificial Sequence: Synthetic oligonucleotide
agcgcgcuuuuccuuaaaa

SEQ ID NO: 869636 - RNA, 19 nt, Artificial Sequence
  Description of Artificial Sequence: Synthetic oligonucleotide
guauugcaaaagaucaggu

SEQ ID NO: 869637 - RNA, 19 nt, Artificial Sequence
  Description of Artificial Sequence: Synthetic oligonucleotide
ggauccuacgccuagguuu

SEQ ID NO: 869638 - RNA, 19 nt, Artificial Sequence
  Description of Artificial Sequence: Synthetic oligonucleotide
acguaacaacaaagagucg

SEQ ID NO: 869639 - RNA, 19 nt, Artificial Sequence
  Description of Artificial Sequence: Synthetic oligonucleotide
agucagaaagcgcgcuuuu

SEQ ID NO: 869640 - RNA, 19 nt, Artificial Sequence
  Description of Artificial Sequence: Synthetic oligonucleotide
ggcgacauuuauuuacaaa

SEQ ID NO: 869641 - RNA, 19 nt, Artificial Sequence
  Description of Artificial Sequence: Synthetic oligonucleotide
caccgcaaguacuucaucu

SEQ ID NO: 869642 - RNA, 19 nt, Artificial Sequence
  Description of Artificial Sequence: Synthetic oligonucleotide
ucguucuauucaagcuuua

SEQ ID NO: 869643 - RNA, 19 nt, Artificial Sequence
  Description of Artificial Sequence: Synthetic oligonucleotide
uacuaauggucguccuguu

SEQ ID NO: 869644 - RNA, 19 nt, Artificial Sequence
  Description of Artificial Sequence: Synthetic oligonucleotide
acacuugauuauaaauaua

SEQ ID NO: 869645 - RNA, 19 nt, Artificial Sequence
  Description of Artificial Sequence: Synthetic oligonucleotide
gugaaugcuaaaagagugu

SEQ ID NO: 869646 - RNA, 19 nt, Artificial Sequence
  Description of Artificial Sequence: Synthetic oligonucleotide
uccuacgccuagguuuucu

SEQ ID NO: 869647 - RNA, 19 nt, Artificial Sequence
  Description of Artificial Sequence: Synthetic oligonucleotide
agagucgagguuaguuaca

SEQ ID NO: 869648 - RNA, 19 nt, Artificial Sequence
  Description of Artificial Sequence: Synthetic oligonucleotide
caaucaccgugcguguuuc

SEQ ID NO: 869649 - RNA, 19 nt, Artificial Sequence
  Description of Artificial Sequence: Synthetic oligonucleotide
gaacaccucugugauuuaa

SEQ ID NO: 869650 - RNA, 19 nt, Artificial Sequence
  Description of Artificial Sequence: Synthetic oligonucleotide
gacguugaccagauaugaa

SEQ ID NO: 869651 - RNA, 19 nt, Artificial Sequence
  Description of Artificial Sequence: Synthetic oligonucleotide
acgguagcaugggcagggc

SEQ ID NO: 869652 - RNA, 19 nt, Artificial Sequence
  Description of Artificial Sequence: Synthetic oligonucleotide
acauuugaucacaguuaga

SEQ ID NO: 869653 - RNA, 19 nt, Artificial Sequence
  Description of Artificial Sequence: Synthetic oligonucleotide
augaguuccgugagucaca

SEQ ID NO: 869654 - RNA, 19 nt, Artificial Sequence
  Description of Artificial Sequence: Synthetic oligonucleotide
ccgugucauaauauaccag

SEQ ID NO: 869655 - RNA, 19 nt, Artificial Sequence
  Description of Artificial Sequence: Synthetic oligonucleotide
guauucacacagugacuua

SEQ ID NO: 869656 - RNA, 19 nt, Artificial Sequence
  Description of Artificial Sequence: Synthetic oligonucleotide
gcuuuacaggugaauccag

SEQ ID NO: 869657 - RNA, 19 nt, Artificial Sequence
  Description of Artificial Sequence: Synthetic oligonucleotide
aggauccuacgccuagguu

SEQ ID NO: 869658 - RNA, 19 nt, Artificial Sequence
  Description of Artificial Sequence: Synthetic oligonucleotide
agccaacuucugaaaacgu

SEQ ID NO: 869659 - RNA, 19 nt, Artificial Sequence
  Description of Artificial Sequence: Synthetic oligonucleotide
cuaaaagaguguccacggu

SEQ ID NO: 869660 - RNA, 19 nt, Artificial Sequence
  Description of Artificial Sequence: Synthetic oligonucleotide
uuaugacguugaccagaua

SEQ ID NO: 869661 - RNA, 19 nt, Artificial Sequence
  Description of Artificial Sequence: Synthetic oligonucleotide
cgugucauaauauaccagu

SEQ ID NO: 869662 - RNA, 19 nt, Artificial Sequence
  Description of Artificial Sequence: Synthetic oligonucleotide
gucguccuguuacgggcgc

SEQ ID NO: 869663 - RNA, 19 nt, Artificial Sequence
  Description of Artificial Sequence: Synthetic oligonucleotide
gucagaaagcgcgcuuuuc

SEQ ID NO: 869664 - RNA, 19 nt, Artificial Sequence
  Description of Artificial Sequence: Synthetic oligonucleotide
caguuaugaauggucaagu

SEQ ID NO: 869665 - RNA, 19 nt, Artificial Sequence
  Description of Artificial Sequence: Synthetic oligonucleotide
acaauccuggucagucgca

SEQ ID NO: 869666 - RNA, 19 nt, Artificial Sequence
  Description of Artificial Sequence: Synthetic oligonucleotide
ccgcaaguacuucaucuac

SEQ ID NO: 869667 - RNA, 19 nt, Artificial Sequence
  Description of Artificial Sequence: Synthetic oligonucleotide
cagccuucaaaacuccacu

SEQ ID NO: 869668 - RNA, 19 nt, Artificial Sequence
  Description of Artificial Sequence: Synthetic oligonucleotide
acaaagagucgagguuagu

SEQ ID NO: 869669 - RNA, 19 nt, Artificial Sequence
  Description of Artificial Sequence: Synthetic oligonucleotide
agcaccgcaaguacuucau

SEQ ID NO: 869670 - RNA, 19 nt, Artificial Sequence
  Description of Artificial Sequence: Synthetic oligonucleotide
cacggcaggaccuguguua

SEQ ID NO: 869671 - RNA, 19 nt, Artificial Sequence
  Description of Artificial Sequence: Synthetic oligonucleotide
aagcgcgcuuuuccuuaaa

SEQ ID NO: 869672 - RNA, 19 nt, Artificial Sequence
  Description of Artificial Sequence: Synthetic oligonucleotide
guauaguuauaaagcucua

SEQ ID NO: 869673 - RNA, 19 nt, Artificial Sequence
  Description of Artificial Sequence: Synthetic oligonucleotide
cuguuacgggcgcuuccug

SEQ ID NO: 869674 - RNA, 19 nt, Artificial Sequence
  Description of Artificial Sequence: Synthetic oligonucleotide
acacagugacuuaaaucua

SEQ ID NO: 869675 - RNA, 19 nt, Artificial Sequence
  Description of Artificial Sequence: Synthetic oligonucleotide
gauccuacgccuagguuuu

SEQ ID NO: 869676 - RNA, 19 nt, Artificial Sequence
  Description of Artificial Sequence: Synthetic oligonucleotide
accgugcguguuucuauua

SEQ ID NO: 869677 - RNA, 19 nt, Artificial Sequence
  Description of Artificial Sequence: Synthetic oligonucleotide
ggcagaacaccucugugau

SEQ ID NO: 869678 - RNA, 19 nt, Artificial Sequence
  Description of Artificial Sequence: Synthetic oligonucleotide
aucaccgugcguguuucua

SEQ ID NO: 869679 - RNA, 19 nt, Artificial Sequence
  Description of Artificial Sequence: Synthetic oligonucleotide
gugccuccgugucauaaua

SEQ ID NO: 869680 - RNA, 19 nt, Artificial Sequence
  Description of Artificial Sequence: Synthetic oligonucleotide
gucgcacaaucaacacuug

SEQ ID NO: 869681 - RNA, 19 nt, Artificial Sequence
  Description of Artificial Sequence: Synthetic oligonucleotide
cucacguggcuuucuuaaa

SEQ ID NO: 869682 - RNA, 19 nt, Artificial Sequence
  Description of Artificial Sequence: Synthetic oligonucleotide
agaacaccucugugauuua

SEQ ID NO: 869683 - RNA, 19 nt, Artificial Sequence
  Description of Artificial Sequence: Synthetic oligonucleotide
ccucacguggcuuucuuaa

SEQ ID NO: 869684 - RNA, 19 nt, Artificial Sequence
  Description of Artificial Sequence: Synthetic oligonucleotide
gggaacuagcaguuagugu

SEQ ID NO: 869685 - RNA, 19 nt, Artificial Sequence
  Description of Artificial Sequence: Synthetic oligonucleotide
ccgugagucacaaugucua

SEQ ID NO: 869686 - RNA, 19 nt, Artificial Sequence
  Description of Artificial Sequence: Synthetic oligonucleotide
ggacccucucuuuuaauau

SEQ ID NO: 869687 - RNA, 19 nt, Artificial Sequence
  Description of Artificial Sequence: Synthetic oligonucleotide
cagucgcacaaucaacacu

SEQ ID NO: 869688 - RNA, 19 nt, Artificial Sequence
  Description of Artificial Sequence: Synthetic oligonucleotide
cagggaacuagcaguuagu

SEQ ID NO: 869689 - RNA, 19 nt, Artificial Sequence
  Description of Artificial Sequence: Synthetic oligonucleotide
gcugcagaaaacacauuua

SEQ ID NO: 869690 - RNA, 19 nt, Artificial Sequence
  Description of Artificial Sequence: Synthetic oligonucleotide
cagacgucuuuagcaucac

SEQ ID NO: 869691 - RNA, 19 nt, Artificial Sequence
  Description of Artificial Sequence: Synthetic oligonucleotide
ugggcagggcuucguucua

SEQ ID NO: 869692 - RNA, 19 nt, Artificial Sequence
  Description of Artificial Sequence: Synthetic oligonucleotide
cagagcaccgcaaguacuu

SEQ ID NO: 869693 - RNA, 19 nt, Artificial Sequence
  Description of Artificial Sequence: Synthetic oligonucleotide
ccgugcguguuucuauuac

SEQ ID NO: 869694 - RNA, 19 nt, Artificial Sequence
  Description of Artificial Sequence: Synthetic oligonucleotide
cccaucaaggaaggccacg

SEQ ID NO: 869695 - RNA, 19 nt, Artificial Sequence
  Description of Artificial Sequence: Synthetic oligonucleotide
cguucuauucaagcuuuac

SEQ ID NO: 869696 - RNA, 19 nt, Artificial Sequence
  Description of Artificial Sequence: Synthetic oligonucleotide
acccucacguggcuuucuu

SEQ ID NO: 869697 - RNA, 19 nt, Artificial Sequence
  Description of Artificial Sequence: Synthetic oligonucleotide
ucguccuguuacgggcgcu

SEQ ID NO: 869698 - RNA, 19 nt, Artificial Sequence
  Description of Artificial Sequence: Synthetic oligonucleotide
cuacgccuagguuuucuau

SEQ ID NO: 869699 - RNA, 19 nt, Artificial Sequence
  Description of Artificial Sequence: Synthetic oligonucleotide
gccuccgugucauaauaua

SEQ ID NO: 869700 - RNA, 19 nt, Artificial Sequence
  Description of Artificial Sequence: Synthetic oligonucleotide
gccuagguuuucuauuggu

SEQ ID NO: 869701 - RNA, 19 nt, Artificial Sequence
  Description of Artificial Sequence: Synthetic oligonucleotide
cagucagauuguccccaga

SEQ ID NO: 869702 - RNA, 19 nt, Artificial Sequence
  Description of Artificial Sequence: Synthetic oligonucleotide
auccuacgccuagguuuuc

SEQ ID NO: 869703 - RNA, 19 nt, Artificial Sequence
  Description of Artificial Sequence: Synthetic oligonucleotide
cgccuagguuuucuauugg

SEQ ID NO: 869704 - RNA, 19 nt, Artificial Sequence
  Description of Artificial Sequence: Synthetic oligonucleotide
guguuaccaggggcuuccc

SEQ ID NO: 869705 - RNA, 19 nt, Artificial Sequence
  Description of Artificial Sequence: Synthetic oligonucleotide
caggugaauccagggaacu

SEQ ID NO: 869706 - RNA, 19 nt, Artificial Sequence
  Description of Artificial Sequence: Synthetic oligonucleotide
gggcgacauuuauuuacaa

SEQ ID NO: 869707 - RNA, 19 nt, Artificial Sequence
  Description of Artificial Sequence: Synthetic oligonucleotide
gggcuucguucuauucaag

SEQ ID NO: 869708 - RNA, 19 nt, Artificial Sequence
  Description of Artificial Sequence: Synthetic oligonucleotide
caacuccaguagugauuga

SEQ ID NO: 869709 - RNA, 19 nt, Artificial Sequence
  Description of Artificial Sequence: Synthetic oligonucleotide
ggcuuuuaacaguuacauu

SEQ ID NO: 869710 - RNA, 19 nt, Artificial Sequence
  Description of Artificial Sequence: Synthetic oligonucleotide
guccuguuacgggcgcuuc

SEQ ID NO: 869711 - RNA, 19 nt, Artificial Sequence
  Description of Artificial Sequence: Synthetic oligonucleotide
gaugugccuccgugucaua

SEQ ID NO: 869712 - RNA, 19 nt, Artificial Sequence
  Description of Artificial Sequence: Synthetic oligonucleotide
gcaccgcaaguacuucauc

SEQ ID NO: 869713 - RNA, 19 nt, Artificial Sequence
  Description of Artificial Sequence: Synthetic oligonucleotide
gcccagagaaaaccccaaa

SEQ ID NO: 869714 - RNA, 19 nt, Artificial Sequence
  Description of Artificial Sequence: Synthetic oligonucleotide
ugcgucugcccaggccauc

SEQ ID NO: 869715 - RNA, 19 nt, Artificial Sequence
  Description of Artificial Sequence: Synthetic oligonucleotide
gucacacacaaggcugcgu

SEQ ID NO: 869716 - RNA, 19 nt, Artificial Sequence
  Description of Artificial Sequence: Synthetic oligonucleotide
cagucagaaagcgcgcuuu

SEQ ID NO: 869717 - RNA, 19 nt, Artificial Sequence
  Description of Artificial Sequence: Synthetic oligonucleotide
gugucacauccagucagau

SEQ ID NO: 869718 - RNA, 19 nt, Artificial Sequence
  Description of Artificial Sequence: Synthetic oligonucleotide
gccaacuucugaaaacguu

SEQ ID NO: 869719 - RNA, 19 nt, Artificial Sequence
  Description of Artificial Sequence: Synthetic oligonucleotide
ccaggggcuucccagucaa

SEQ ID NO: 869720 - RNA, 19 nt, Artificial Sequence
  Description of Artificial Sequence: Synthetic oligonucleotide
caccgugcguguuucuauu

SEQ ID NO: 869721 - RNA, 19 nt, Artificial Sequence
  Description of Artificial Sequence: Synthetic oligonucleotide
cgugcguguuucuauuacu

SEQ ID NO: 869722 - RNA, 19 nt, Artificial Sequence
  Description of Artificial Sequence: Synthetic oligonucleotide
cccaggagugaaugcuaaa

SEQ ID NO: 869723 - RNA, 19 nt, Artificial Sequence
  Description of Artificial Sequence: Synthetic oligonucleotide
cgagguuaguuacagccuu

SEQ ID NO: 869724 - RNA, 19 nt, Artificial Sequence
  Description of Artificial Sequence: Synthetic oligonucleotide
gcagaacaccucugugauu

SEQ ID NO: 869725 - RNA, 19 nt, Artificial Sequence
  Description of Artificial Sequence: Synthetic oligonucleotide
cugcgucugcccaggccau

SEQ ID NO: 869726 - RNA, 19 nt, Artificial Sequence
  Description of Artificial Sequence: Synthetic oligonucleotide
ggcagggcuucguucuauu

SEQ ID NO: 869727 - RNA, 19 nt, Artificial Sequence
  Description of Artificial Sequence: Synthetic oligonucleotide
caucacccucacguggcuu

SEQ ID NO: 869728 - RNA, 19 nt, Artificial Sequence
  Description of Artificial Sequence: Synthetic oligonucleotide
cguccuguuacgggcgcuu

SEQ ID NO: 869729 - RNA, 19 nt, Artificial Sequence
  Description of Artificial Sequence: Synthetic oligonucleotide
aagaacugagaauauagcc

SEQ ID NO: 869730 - RNA, 19 nt, Artificial Sequence
  Description of Artificial Sequence: Synthetic oligonucleotide
aauauuguaaaacgagagc

SEQ ID NO: 869731 - RNA, 19 nt, Artificial Sequence
  Description of Artificial Sequence: Synthetic oligonucleotide
aaauaaaggauuuaggcau

SEQ ID NO: 869732 - RNA, 19 nt, Artificial Sequence
  Description of Artificial Sequence: Synthetic oligonucleotide
agaacuucaagguauuucc

SEQ ID NO: 869733 - RNA, 19 nt, Artificial Sequence
  Description of Artificial Sequence: Synthetic oligonucleotide
acaaacuuguuccacaacc

SEQ ID NO: 869734 - RNA, 19 nt, Artificial Sequence
  Description of Artificial Sequence: Synthetic oligonucleotide
aaguacacuccucaaaagc

SEQ ID NO: 869735 - RNA, 19 nt, Artificial Sequence
  Description of Artificial Sequence: Synthetic oligonucleotide
uuuagguugauaaugugag

SEQ ID NO: 869736 - RNA, 19 nt, Artificial Sequence
  Description of Artificial Sequence: Synthetic oligonucleotide
auauuguaaaacgagagcg

SEQ ID NO: 869737 - RNA, 19 nt, Artificial Sequence
  Description of Artificial Sequence: Synthetic oligonucleotide
auacaggaagacuagagac

SEQ ID NO: 869738 - RNA, 19 nt, Artificial Sequence
  Description of Artificial Sequence: Synthetic oligonucleotide
ucuuauuugucucuugucc

SEQ ID NO: 869739 - RNA, 19 nt, Artificial Sequence
  Description of Artificial Sequence: Synthetic oligonucleotide
uucacgacaguucugaccc

SEQ ID NO: 869740 - RNA, 19 nt, Artificial Sequence
  Description of Artificial Sequence: Synthetic oligonucleotide
auuugaaugaaauaucgga

SEQ ID NO: 869741 - RNA, 19 nt, Artificial Sequence
  Description of Artificial Sequence: Synthetic oligonucleotide
aaaggguaaaaugcuaccc

SEQ ID NO: 869742 - RNA, 19 nt, Artificial Sequence
  Description of Artificial Sequence: Synthetic oligonucleotide
gaaucuauagaugagaguc

SEQ ID NO: 869743 - RNA, 19 nt, Artificial Sequence
  Description of Artificial Sequence: Synthetic oligonucleotide
aacgaaauaaaggauuuag

SEQ ID NO: 869744 - RNA, 19 nt, Artificial Sequence
  Description of Artificial Sequence: Synthetic oligonucleotide
gaaauaucggauugaagag

SEQ ID NO: 869745 - RNA, 19 nt, Artificial Sequence
  Description of Artificial Sequence: Synthetic oligonucleotide
gaaauaaaggauuuaggca

SEQ ID NO: 869746 - RNA, 19 nt, Artificial Sequence
  Description of Artificial Sequence: Synthetic oligonucleotide
ugaaugaaauaucggauug

SEQ ID NO: 869747 - RNA, 19 nt, Artificial Sequence
  Description of Artificial Sequence: Synthetic oligonucleotide
aagaaaugacuauauccuc

SEQ ID NO: 869748 - RNA, 19 nt, Artificial Sequence
  Description of Artificial Sequence: Synthetic oligonucleotide
aaagaacugagaauauagc

SEQ ID NO: 869749 - RNA, 19 nt, Artificial Sequence
  Description of Artificial Sequence: Synthetic oligonucleotide
acuauauccucuuuggcag

SEQ ID NO: 869750 - RNA, 19 nt, Artificial Sequence
  Description of Artificial Sequence: Synthetic oligonucleotide
aaugcugaagccauaauug

SEQ ID NO: 869751 - RNA, 19 nt, Artificial Sequence
  Description of Artificial Sequence: Synthetic oligonucleotide
ucuaaacucugucugaaca

SEQ ID NO: 869752 - RNA, 19 nt, Artificial Sequence
  Description of Artificial Sequence: Synthetic oligonucleotide
uauuaaaggguaaaaugcu

SEQ ID NO: 869753 - RNA, 19 nt, Artificial Sequence
  Description of Artificial Sequence: Synthetic oligonucleotide
uguucauacaggaagacua

SEQ ID NO: 869754 - RNA, 19 nt, Artificial Sequence
  Description of Artificial Sequence: Synthetic oligonucleotide
auugcugauacccaaacga

SEQ ID NO: 869755 - RNA, 19 nt, Artificial Sequence
  Description of Artificial Sequence: Synthetic oligonucleotide
aaauaucggauugaagagg

SEQ ID NO: 869756 - RNA, 19 nt, Artificial Sequence
  Description of Artificial Sequence: Synthetic oligonucleotide
uuaaaggguaaaaugcuac

SEQ ID NO: 869757 - RNA, 19 nt, Artificial Sequence
  Description of Artificial Sequence: Synthetic oligonucleotide
ugugaaaguacacuccuca

SEQ ID NO: 869758 - RNA, 19 nt, Artificial Sequence
  Description of Artificial Sequence: Synthetic oligonucleotide
uuugaaugaaauaucggau

SEQ ID NO: 869759 - RNA, 19 nt, Artificial Sequence
  Description of Artificial Sequence: Synthetic oligonucleotide
augacuauauccucuuugg

SEQ ID NO: 869760 - RNA, 19 nt, Artificial Sequence
  Description of Artificial Sequence: Synthetic oligonucleotide
auuugcacagaaucuauag

SEQ ID NO: 869761 - RNA, 19 nt, Artificial Sequence
  Description of Artificial Sequence: Synthetic oligonucleotide
ugaauuuuguucucccagg

SEQ ID NO: 869762 - RNA, 19 nt, Artificial Sequence
  Description of Artificial Sequence: Synthetic oligonucleotide
aaucuauagaugagagucc

SEQ ID NO: 869763 - RNA, 19 nt, Artificial Sequence
  Description of Artificial Sequence: Synthetic oligonucleotide
ucaaaagcauuauacacaa

SEQ ID NO: 869764 - RNA, 19 nt, Artificial Sequence
  Description of Artificial Sequence: Synthetic oligonucleotide
aaugcuacccaugagcuca

SEQ ID NO: 869765 - RNA, 19 nt, Artificial Sequence
  Description of Artificial Sequence: Synthetic oligonucleotide
acccaaacgaaauaaagga

SEQ ID NO: 869766 - RNA, 19 nt, Artificial Sequence
  Description of Artificial Sequence: Synthetic oligonucleotide
gauaugaugccauccacac

SEQ ID NO: 869767 - RNA, 19 nt, Artificial Sequence
  Description of Artificial Sequence: Synthetic oligonucleotide
aaggauuuaggcaucuuuc

SEQ ID NO: 869768 - RNA, 19 nt, Artificial Sequence
  Description of Artificial Sequence: Synthetic oligonucleotide
uaguaacuugcucugcugg

SEQ ID NO: 869769 - RNA, 19 nt, Artificial Sequence
  Description of Artificial Sequence: Synthetic oligonucleotide
gauaaugugagucauugcu

SEQ ID NO: 869770 - RNA, 19 nt, Artificial Sequence
  Description of Artificial Sequence: Synthetic oligonucleotide
agcgagagggucaagaccc

SEQ ID NO: 869771 - RNA, 19 nt, Artificial Sequence
  Description of Artificial Sequence: Synthetic oligonucleotide
ugugagucauugcugauac

SEQ ID NO: 869772 - RNA, 19 nt, Artificial Sequence
  Description of Artificial Sequence: Synthetic oligonucleotide
uaucaggaaaggaauuugc

SEQ ID NO: 869773 - RNA, 19 nt, Artificial Sequence
  Description of Artificial Sequence: Synthetic oligonucleotide
uguaaaacgagagcgugcc

SEQ ID NO: 869774 - RNA, 19 nt, Artificial Sequence
  Description of Artificial Sequence: Synthetic oligonucleotide
aucuauagaugagaguccc

SEQ ID NO: 869775 - RNA, 19 nt, Artificial Sequence
  Description of Artificial Sequence: Synthetic oligonucleotide
aaggguaaaaugcuaccca

SEQ ID NO: 869776 - RNA, 19 nt, Artificial Sequence
  Description of Artificial Sequence: Synthetic oligonucleotide
gaugagagucccauggugg

SEQ ID NO: 869777 - RNA, 19 nt, Artificial Sequence
  Description of Artificial Sequence: Synthetic oligonucleotide
acaauguuuggauuguugu

SEQ ID NO: 869778 - RNA, 19 nt, Artificial Sequence
  Description of Artificial Sequence: Synthetic oligonucleotide
gacuauauccucuuuggca

SEQ ID NO: 869779 - RNA, 19 nt, Artificial Sequence
  Description of Artificial Sequence: Synthetic oligonucleotide
ugagcucaggcauauaaga

SEQ ID NO: 869780 - RNA, 19 nt, Artificial Sequence
  Description of Artificial Sequence: Synthetic oligonucleotide
uaucggauugaagagguag

SEQ ID NO: 869781 - RNA, 19 nt, Artificial Sequence
  Description of Artificial Sequence: Synthetic oligonucleotide
uauuguaaaacgagagcgu

SEQ ID NO: 869782 - RNA, 19 nt, Artificial Sequence
  Description of Artificial Sequence: Synthetic oligonucleotide
aaaaugcuacccaugagcu

SEQ ID NO: 869783 - RNA, 19 nt, Artificial Sequence
  Description of Artificial Sequence: Synthetic oligonucleotide
gaagacuagagacagcaga

SEQ ID NO: 869784 - RNA, 19 nt, Artificial Sequence
  Description of Artificial Sequence: Synthetic oligonucleotide
aacuucaagguauuuccgu

SEQ ID NO: 869785 - RNA, 19 nt, Artificial Sequence
  Description of Artificial Sequence: Synthetic oligonucleotide
aauaucggauugaagaggu

SEQ ID NO: 869786 - RNA, 19 nt, Artificial Sequence
  Description of Artificial Sequence: Synthetic oligonucleotide
ucacuugaacccaguaacg

SEQ ID NO: 869787 - RNA, 19 nt, Artificial Sequence
  Description of Artificial Sequence: Synthetic oligonucleotide
uuacauucgccaugaaugc

SEQ ID NO: 869788 - RNA, 19 nt, Artificial Sequence
  Description of Artificial Sequence: Synthetic oligonucleotide
gaagagguagcuuccauca

SEQ ID NO: 869789 - RNA, 19 nt, Artificial Sequence
  Description of Artificial Sequence: Synthetic oligonucleotide
ugauaugaugccauccaca

SEQ ID NO: 869790 - RNA, 19 nt, Artificial Sequence
  Description of Artificial Sequence: Synthetic oligonucleotide
gucacuugaacccaguaac

SEQ ID NO: 869791 - RNA, 19 nt, Artificial Sequence
  Description of Artificial Sequence: Synthetic oligonucleotide
cuugaacccaguaacguug

SEQ ID NO: 869792 - RNA, 19 nt, Artificial Sequence
  Description of Artificial Sequence: Synthetic oligonucleotide
uauagccuaaagaaaugac

SEQ ID NO: 869793 - RNA, 19 nt, Artificial Sequence
  Description of Artificial Sequence: Synthetic oligonucleotide
cauccauuucccaauaaug

SEQ ID NO: 869794 - RNA, 19 nt, Artificial Sequence
  Description of Artificial Sequence: Synthetic oligonucleotide
uuugcacagaaucuauaga

SEQ ID NO: 869795 - RNA, 19 nt, Artificial Sequence
  Description of Artificial Sequence: Synthetic oligonucleotide
ucugccaguguucaugaug

SEQ ID NO: 869796 - RNA, 19 nt, Artificial Sequence
  Description of Artificial Sequence: Synthetic oligonucleotide
augauaugaugccauccac

SEQ ID NO: 869797 - RNA, 19 nt, Artificial Sequence
  Description of Artificial Sequence: Synthetic oligonucleotide
gaagguuuaagagucuggc

SEQ ID NO: 869798 - RNA, 19 nt, Artificial Sequence
  Description of Artificial Sequence: Synthetic oligonucleotide
ugaacaucccauaggauua

SEQ ID NO: 869799 - RNA, 19 nt, Artificial Sequence
  Description of Artificial Sequence: Synthetic oligonucleotide
caugccuugcagaucaggg

SEQ ID NO: 869800 - RNA, 19 nt, Artificial Sequence
  Description of Artificial Sequence: Synthetic oligonucleotide
aauauagccuaaagaaaug

SEQ ID NO: 869801 - RNA, 19 nt, Artificial Sequence
  Description of Artificial Sequence: Synthetic oligonucleotide
ucauuggcucugaacaucc

SEQ ID NO: 869802 - RNA, 19 nt, Artificial Sequence
  Description of Artificial Sequence: Synthetic oligonucleotide
ucagaugccaauccagaac

SEQ ID NO: 869803 - RNA, 19 nt, Artificial Sequence
  Description of Artificial Sequence: Synthetic oligonucleotide
acuucugacaccccugcuc

SEQ ID NO: 869804 - RNA, 19 nt, Artificial Sequence
  Description of Artificial Sequence: Synthetic oligonucleotide
uuggggauaguuuuggguc

SEQ ID NO: 869805 - RNA, 19 nt, Artificial Sequence
  Description of Artificial Sequence: Synthetic oligonucleotide
aguaaugacaauguuugga

SEQ ID NO: 869806 - RNA, 19 nt, Artificial Sequence
  Description of Artificial Sequence: Synthetic oligonucleotide
ucgccaugaaugcugaagc

SEQ ID NO: 869807 - RNA, 19 nt, Artificial Sequence
  Description of Artificial Sequence: Synthetic oligonucleotide
uguauauauuaaaggguaa

SEQ ID NO: 869808 - RNA, 19 nt, Artificial Sequence
  Description of Artificial Sequence: Synthetic oligonucleotide
aguaacuugcucugcuggg

SEQ ID NO: 869809 - RNA, 19 nt, Artificial Sequence
  Description of Artificial Sequence: Synthetic oligonucleotide
aacgcgacagggaggaacc

SEQ ID NO: 869810 - RNA, 19 nt, Artificial Sequence
  Description of Artificial Sequence: Synthetic oligonucleotide
ugacccagaagccauauuu

SEQ ID NO: 869811 - RNA, 19 nt, Artificial Sequence
  Description of Artificial Sequence: Synthetic oligonucleotide
acgagagcgugccagcugc

SEQ ID NO: 869812 - RNA, 19 nt, Artificial Sequence
  Description of Artificial Sequence: Synthetic oligonucleotide
agcauacugucauuggcuc

SEQ ID NO: 869813 - RNA, 19 nt, Artificial Sequence
  Description of Artificial Sequence: Synthetic oligonucleotide
uugaaugaaauaucggauu

SEQ ID NO: 869814 - RNA, 19 nt, Artificial Sequence
  Description of Artificial Sequence: Synthetic oligonucleotide
uaacguugggcuucuauga

SEQ ID NO: 869815 - RNA, 19 nt, Artificial Sequence
  Description of Artificial Sequence: Synthetic oligonucleotide
aaaaggcaugacuccauga

SEQ ID NO: 869816 - RNA, 19 nt, Artificial Sequence
  Description of Artificial Sequence: Synthetic oligonucleotide
uagguugauaaugugaguc

SEQ ID NO: 869817 - RNA, 19 nt, Artificial Sequence
  Description of Artificial Sequence: Synthetic oligonucleotide
uuguaaaacgagagcgugc

SEQ ID NO: 869818 - RNA, 19 nt, Artificial Sequence
  Description of Artificial Sequence: Synthetic oligonucleotide
auaugaugccauccacacc

SEQ ID NO: 869819 - RNA, 19 nt, Artificial Sequence
  Description of Artificial Sequence: Synthetic oligonucleotide
guaacguugggcuucuaug

SEQ ID NO: 869820 - RNA, 19 nt, Artificial Sequence
  Description of Artificial Sequence: Synthetic oligonucleotide
uccgcaguaaugacaaugu

SEQ ID NO: 869821 - RNA, 19 nt, Artificial Sequence
  Description of Artificial Sequence: Synthetic oligonucleotide
auuguaaaacgagagcgug

SEQ ID NO: 869822 - RNA, 19 nt, Artificial Sequence
  Description of Artificial Sequence: Synthetic oligonucleotide
cauauaagauacacaccag

SEQ ID NO: 869823 - RNA, 19 nt, Artificial Sequence
  Description of Artificial Sequence: Synthetic oligonucleotide
uuguccgcaguaaugacaa

SEQ ID NO: 869824 - RNA, 19 nt, Artificial Sequence
  Description of Artificial Sequence: Synthetic oligonucleotide
ucuucgaugagaacuguuu

SEQ ID NO: 869825 - RNA, 19 nt, Artificial Sequence
  Description of Artificial Sequence: Synthetic oligonucleotide
aaaacgccaacgcgacagg

SEQ ID NO: 869826 - RNA, 19 nt, Artificial Sequence
  Description of Artificial Sequence: Synthetic oligonucleotide
aagacccugggcuugccug

SEQ ID NO: 869827 - RNA, 19 nt, Artificial Sequence
  Description of Artificial Sequence: Synthetic oligonucleotide
acgaaauaaaggauuuagg

SEQ ID NO: 869828 - RNA, 19 nt, Artificial Sequence
  Description of Artificial Sequence: Synthetic oligonucleotide
ugacuauauccucuuuggc

SEQ ID NO: 869829 - RNA, 19 nt, Artificial Sequence
  Description of Artificial Sequence: Synthetic oligonucleotide
uggucuucauaucuuauuu

SEQ ID NO: 869830 - RNA, 19 nt, Artificial Sequence
  Description of Artificial Sequence: Synthetic oligonucleotide
augagagucccaugguggg

SEQ ID NO: 869831 - RNA, 19 nt, Artificial Sequence
  Description of Artificial Sequence: Synthetic oligonucleotide
ucauugcugauacccaaac

SEQ ID NO: 869832 - RNA, 19 nt, Artificial Sequence
  Description of Artificial Sequence: Synthetic oligonucleotide
cuucacgacaguucugacc

SEQ ID NO: 869833 - RNA, 19 nt, Artificial Sequence
  Description of Artificial Sequence: Synthetic oligonucleotide
auacccaaacgaaauaaag

SEQ ID NO: 869834 - RNA, 19 nt, Artificial Sequence
  Description of Artificial Sequence: Synthetic oligonucleotide
ugauacccaaacgaaauaa

SEQ ID NO: 869835 - RNA, 19 nt, Artificial Sequence
  Description of Artificial Sequence: Synthetic oligonucleotide
aacccuaucaggaaaggaa

SEQ ID NO: 869836 - RNA, 19 nt, Artificial Sequence
  Description of Artificial Sequence: Synthetic oligonucleotide
aucccauaggauuaaaaua

SEQ ID NO: 869837 - RNA, 19 nt, Artificial Sequence
  Description of Artificial Sequence: Synthetic oligonucleotide
ucaaucaaugucacuugaa

SEQ ID NO: 869838 - RNA, 19 nt, Artificial Sequence
  Description of Artificial Sequence: Synthetic oligonucleotide
uuuggauuguuguuuucaa

SEQ ID NO: 869839 - RNA, 19 nt, Artificial Sequence
  Description of Artificial Sequence: Synthetic oligonucleotide
gaaaaggcaugacuccaug

SEQ ID NO: 869840 - RNA, 19 nt, Artificial Sequence
  Description of Artificial Sequence: Synthetic oligonucleotide
agagguagcuuccaucacu

SEQ ID NO: 869841 - RNA, 19 nt, Artificial Sequence
  Description of Artificial Sequence: Synthetic oligonucleotide
acagcagauauauguauau

SEQ ID NO: 869842 - RNA, 19 nt, Artificial Sequence
  Description of Artificial Sequence: Synthetic oligonucleotide
agaaugucucccuaguuuu

SEQ ID NO: 869843 - RNA, 19 nt, Artificial Sequence
  Description of Artificial Sequence: Synthetic oligonucleotide
uaguuuugggucucuugag

SEQ ID NO: 869844 - RNA, 19 nt, Artificial Sequence
  Description of Artificial Sequence: Synthetic oligonucleotide
aucggauugaagagguagc

SEQ ID NO: 869845 - RNA, 19 nt, Artificial Sequence
  Description of Artificial Sequence: Synthetic oligonucleotide
uggcagugaaagauguuca

SEQ ID NO: 869846 - RNA, 19 nt, Artificial Sequence
  Description of Artificial Sequence: Synthetic oligonucleotide
guaaaaugcuacccaugag

SEQ ID NO: 869847 - RNA, 19 nt, Artificial Sequence
  Description of Artificial Sequence: Synthetic oligonucleotide
auguauauauuaaagggua

SEQ ID NO: 869848 - RNA, 19 nt, Artificial Sequence
  Description of Artificial Sequence: Synthetic oligonucleotide
gguaaaaugcuacccauga

SEQ ID NO: 869849 - RNA, 19 nt, Artificial Sequence
  Description of Artificial Sequence: Synthetic oligonucleotide
auauagccuaaagaaauga

SEQ ID NO: 869850 - RNA, 19 nt, Artificial Sequence
  Description of Artificial Sequence: Synthetic oligonucleotide
aguacacuccucaaaagca

SEQ ID NO: 869851 - RNA, 19 nt, Artificial Sequence
  Description of Artificial Sequence: Synthetic oligonucleotide
gugggaaauauuguaaaac

SEQ ID NO: 869852 - RNA, 19 nt, Artificial Sequence
  Description of Artificial Sequence: Synthetic oligonucleotide
ucuacaucuuucugaauuu

SEQ ID NO: 869853 - RNA, 19 nt, Artificial Sequence
  Description of Artificial Sequence: Synthetic oligonucleotide
acaccuucacgacaguucu

SEQ ID NO: 869854 - RNA, 19 nt, Artificial Sequence
  Description of Artificial Sequence: Synthetic oligonucleotide
cauugcugauacccaaacg

SEQ ID NO: 869855 - RNA, 19 nt, Artificial Sequence
  Description of Artificial Sequence: Synthetic oligonucleotide
cuucgaugagaacuguuug

SEQ ID NO: 869856 - RNA, 19 nt, Artificial Sequence
  Description of Artificial Sequence: Synthetic oligonucleotide
caucacuuaaucccagaac

SEQ ID NO: 869857 - RNA, 19 nt, Artificial Sequence
  Description of Artificial Sequence: Synthetic oligonucleotide
gucucuugagugaaaaggc

SEQ ID NO: 869858 - RNA, 19 nt, Artificial Sequence
  Description of Artificial Sequence: Synthetic oligonucleotide
auggacucguaguucagug

SEQ ID NO: 869859 - RNA, 19 nt, Artificial Sequence
  Description of Artificial Sequence: Synthetic oligonucleotide
gauuggauagcaggguagc

SEQ ID NO: 869860 - RNA, 19 nt, Artificial Sequence
  Description of Artificial Sequence: Synthetic oligonucleotide
ucccuaguuuucuaaacuc

SEQ ID NO: 869861 - RNA, 19 nt, Artificial Sequence
  Description of Artificial Sequence: Synthetic oligonucleotide
aagacuagagacagcagau

SEQ ID NO: 869862 - RNA, 19 nt, Artificial Sequence
  Description of Artificial Sequence: Synthetic oligonucleotide
auaaugugagucauugcug

SEQ ID NO: 869863 - RNA, 19 nt, Artificial Sequence
  Description of Artificial Sequence: Synthetic oligonucleotide
aggucuccuaguaacuugc

SEQ ID NO: 869864 - RNA, 19 nt, Artificial Sequence
  Description of Artificial Sequence: Synthetic oligonucleotide
uugcugauacccaaacgaa

SEQ ID NO: 869865 - RNA, 19 nt, Artificial Sequence
  Description of Artificial Sequence: Synthetic oligonucleotide
aagccauaauugcuguggu

SEQ ID NO: 869866 - RNA, 19 nt, Artificial Sequence
  Description of Artificial Sequence: Synthetic oligonucleotide
uacccaugagcucaggcau

SEQ ID NO: 869867 - RNA, 19 nt, Artificial Sequence
  Description of Artificial Sequence: Synthetic oligonucleotide
ugcugauacccaaacgaaa

SEQ ID NO: 869868 - RNA, 19 nt, Artificial Sequence
  Description of Artificial Sequence: Synthetic oligonucleotide
uucaagguauuuccgucuc

SEQ ID NO: 869869 - RNA, 19 nt, Artificial Sequence
  Description of Artificial Sequence: Synthetic oligonucleotide
cucugaacaucccauagga

SEQ ID NO: 869870 - RNA, 19 nt, Artificial Sequence
  Description of Artificial Sequence: Synthetic oligonucleotide
caugauaugaugccaucca

SEQ ID NO: 869871 - RNA, 19 nt, Artificial Sequence
  Description of Artificial Sequence: Synthetic oligonucleotide
cauacaggaagacuagaga

SEQ ID NO: 869872 - RNA, 19 nt, Artificial Sequence
  Description of Artificial Sequence: Synthetic oligonucleotide
ugccugugaaaguacacuc

SEQ ID NO: 869873 - RNA, 19 nt, Artificial Sequence
  Description of Artificial Sequence: Synthetic oligonucleotide
ucuauagaugagaguccca

SEQ ID NO: 869874 - RNA, 19 nt, Artificial Sequence
  Description of Artificial Sequence: Synthetic oligonucleotide
aggaaaacgccaacgcgac

SEQ ID NO: 869875 - RNA, 19 nt, Artificial Sequence
  Description of Artificial Sequence: Synthetic oligonucleotide
uuagguugauaaugugagu

SEQ ID NO: 869876 - RNA, 19 nt, Artificial Sequence
  Description of Artificial Sequence: Synthetic oligonucleotide
gccauaauugcuguggucc

SEQ ID NO: 869877 - RNA, 19 nt, Artificial Sequence
  Description of Artificial Sequence: Synthetic oligonucleotide
cuaguaacuugcucugcug

SEQ ID NO: 869878 - RNA, 19 nt, Artificial Sequence
  Description of Artificial Sequence: Synthetic oligonucleotide
agaugcaacauuucuuguu

SEQ ID NO: 869879 - RNA, 19 nt, Artificial Sequence
  Description of Artificial Sequence: Synthetic oligonucleotide
aaggcaugacuccaugaua

SEQ ID NO: 869880 - RNA, 19 nt, Artificial Sequence
  Description of Artificial Sequence: Synthetic oligonucleotide
gucaggacuucugacaccc

SEQ ID NO: 869881 - RNA, 19 nt, Artificial Sequence
  Description of Artificial Sequence: Synthetic oligonucleotide
cuaucaggaaaggaauuug

SEQ ID NO: 869882 - RNA, 19 nt, Artificial Sequence
  Description of Artificial Sequence: Synthetic oligonucleotide
aggaauuugcacagaaucu

SEQ ID NO: 869883 - RNA, 19 nt, Artificial Sequence
  Description of Artificial Sequence: Synthetic oligonucleotide
ccagaugcaacauuucuug

SEQ ID NO: 869884 - RNA, 19 nt, Artificial Sequence
  Description of Artificial Sequence: Synthetic oligonucleotide
uuuccaugguugagcacug

SEQ ID NO: 869885 - RNA, 19 nt, Artificial Sequence
  Description of Artificial Sequence: Synthetic oligonucleotide
gauagcaggguagcccagg

SEQ ID NO: 869886 - RNA, 19 nt, Artificial Sequence
  Description of Artificial Sequence: Synthetic oligonucleotide
aacgagagcgugccagcug

SEQ ID NO: 869887 - RNA, 19 nt, Artificial Sequence
  Description of Artificial Sequence: Synthetic oligonucleotide
acgccaacgcgacagggag

SEQ ID NO: 869888 - RNA, 19 nt, Artificial Sequence
  Description of Artificial Sequence: Synthetic oligonucleotide
aaacccuaucaggaaagga

SEQ ID NO: 869889 - RNA, 19 nt, Artificial Sequence
  Description of Artificial Sequence: Synthetic oligonucleotide
guaaugacaauguuuggau

SEQ ID NO: 869890 - RNA, 19 nt, Artificial Sequence
  Description of Artificial Sequence: Synthetic oligonucleotide
aggguaaaaugcuacccau

SEQ ID NO: 869891 - RNA, 19 nt, Artificial Sequence
  Description of Artificial Sequence: Synthetic oligonucleotide
aguaacguugggcuucuau

SEQ ID NO: 869892 - RNA, 19 nt, Artificial Sequence
  Description of Artificial Sequence: Synthetic oligonucleotide
agccauaauugcugugguc

SEQ ID NO: 869893 - RNA, 19 nt, Artificial Sequence
  Description of Artificial Sequence: Synthetic oligonucleotide
gaaugaaauaucggauuga

SEQ ID NO: 869894 - RNA, 19 nt, Artificial Sequence
  Description of Artificial Sequence: Synthetic oligonucleotide
cuugccugugaaaguacac

SEQ ID NO: 869895 - RNA, 19 nt, Artificial Sequence
  Description of Artificial Sequence: Synthetic oligonucleotide
uggggauaguuuugggucu

SEQ ID NO: 869896 - RNA, 19 nt, Artificial Sequence
  Description of Artificial Sequence: Synthetic oligonucleotide
aguguucaugauguccuuc

SEQ ID NO: 869897 - RNA, 19 nt, Artificial Sequence
  Description of Artificial Sequence: Synthetic oligonucleotide
cuccuaguaacuugcucug

SEQ ID NO: 869898 - RNA, 19 nt, Artificial Sequence
  Description of Artificial Sequence: Synthetic oligonucleotide
uugccugugaaaguacacu

SEQ ID NO: 869899 - RNA, 19 nt, Artificial Sequence
  Description of Artificial Sequence: Synthetic oligonucleotide
caugagcucaggcauauaa

SEQ ID NO: 869900 - RNA, 19 nt, Artificial Sequence
  Description of Artificial Sequence: Synthetic oligonucleotide
ggacucguaguucagugug

SEQ ID NO: 869901 - RNA, 19 nt, Artificial Sequence
  Description of Artificial Sequence: Synthetic oligonucleotide
acauucgccaugaaugcug

SEQ ID NO: 869902 - RNA, 19 nt, Artificial Sequence
  Description of Artificial Sequence: Synthetic oligonucleotide
ucugaacaucccauaggau

SEQ ID NO: 869903 - RNA, 19 nt, Artificial Sequence
  Description of Artificial Sequence: Synthetic oligonucleotide
gaugcaacauuucuuguuu

SEQ ID NO: 869904 - RNA, 19 nt, Artificial Sequence
  Description of Artificial Sequence: Synthetic oligonucleotide
cagaacuucaagguauuuc

SEQ ID NO: 869905 - RNA, 19 nt, Artificial Sequence
  Description of Artificial Sequence: Synthetic oligonucleotide
ucggauugaagagguagcu

SEQ ID NO: 869906 - RNA, 19 nt, Artificial Sequence
  Description of Artificial Sequence: Synthetic oligonucleotide
acuugaacccaguaacguu

SEQ ID NO: 869907 - RNA, 19 nt, Artificial Sequence
  Description of Artificial Sequence: Synthetic oligonucleotide
cuuguccgcaguaaugaca

SEQ ID NO: 869908 - RNA, 19 nt, Artificial Sequence
  Description of Artificial Sequence: Synthetic oligonucleotide
uuaagagucuggccagcau

SEQ ID NO: 869909 - RNA, 19 nt, Artificial Sequence
  Description of Artificial Sequence: Synthetic oligonucleotide
augaaauaucggauugaag

SEQ ID NO: 869910 - RNA, 19 nt, Artificial Sequence
  Description of Artificial Sequence: Synthetic oligonucleotide
uauuugucucuuguccgca

SEQ ID NO: 869911 - RNA, 19 nt, Artificial Sequence
  Description of Artificial Sequence: Synthetic oligonucleotide
gacuagagacagcagauau

SEQ ID NO: 869912 - RNA, 19 nt, Artificial Sequence
  Description of Artificial Sequence: Synthetic oligonucleotide
auuaaaggguaaaaugcua

SEQ ID NO: 869913 - RNA, 19 nt, Artificial Sequence
  Description of Artificial Sequence: Synthetic oligonucleotide
guccgcaguaaugacaaug

SEQ ID NO: 869914 - RNA, 19 nt, Artificial Sequence
  Description of Artificial Sequence: Synthetic oligonucleotide
uccaucacuuaaucccaga

SEQ ID NO: 869915 - RNA, 19 nt, Artificial Sequence
  Description of Artificial Sequence: Synthetic oligonucleotide
uggacucguaguucagugu

SEQ ID NO: 869916 - RNA, 19 nt, Artificial Sequence
  Description of Artificial Sequence: Synthetic oligonucleotide
accuucacgacaguucuga

SEQ ID NO: 869917 - RNA, 19 nt, Artificial Sequence
  Description of Artificial Sequence: Synthetic oligonucleotide
augagcucaggcauauaag

SEQ ID NO: 869918 - RNA, 19 nt, Artificial Sequence
  Description of Artificial Sequence: Synthetic oligonucleotide
cagcgagagggucaagacc

SEQ ID NO: 869919 - RNA, 19 nt, Artificial Sequence
  Description of Artificial Sequence: Synthetic oligonucleotide
aggcaugacuccaugauau

SEQ ID NO: 869920 - RNA, 19 nt, Artificial Sequence
  Description of Artificial Sequence: Synthetic oligonucleotide
uugagugaaaaggcaugac

SEQ ID NO: 869921 - RNA, 19 nt, Artificial Sequence
  Description of Artificial Sequence: Synthetic oligonucleotide
aaacgagagcgugccagcu

SEQ ID NO: 869922 - RNA, 19 nt, Artificial Sequence
  Description of Artificial Sequence: Synthetic oligonucleotide
cugaacaucccauaggauu

SEQ ID NO: 869923 - RNA, 19 nt, Artificial Sequence
  Description of Artificial Sequence: Synthetic oligonucleotide
gggaaauauuguaaaacga

SEQ ID NO: 869924 - RNA, 19 nt, Artificial Sequence
  Description of Artificial Sequence: Synthetic oligonucleotide
ucaggggcucggaacacuc

SEQ ID NO: 869925 - RNA, 19 nt, Artificial Sequence
  Description of Artificial Sequence: Synthetic oligonucleotide
gguagcuuccaucacuuaa

SEQ ID NO: 869926 - RNA, 19 nt, Artificial Sequence
  Description of Artificial Sequence: Synthetic oligonucleotide
acuccucaaaagcauuaua

SEQ ID NO: 869927 - RNA, 19 nt, Artificial Sequence
  Description of Artificial Sequence: Synthetic oligonucleotide
cugugaaaguacacuccuc

SEQ ID NO: 869928 - RNA, 19 nt, Artificial Sequence
  Description of Artificial Sequence: Synthetic oligonucleotide
aggacuugcagcaugccuu

SEQ ID NO: 869929 - RNA, 19 nt, Artificial Sequence
  Description of Artificial Sequence: Synthetic oligonucleotide
aacgccaacgcgacaggga

SEQ ID NO: 869930 - RNA, 19 nt, Artificial Sequence
  Description of Artificial Sequence: Synthetic oligonucleotide
ugggucucuugagugaaaa

SEQ ID NO: 869931 - RNA, 19 nt, Artificial Sequence
  Description of Artificial Sequence: Synthetic oligonucleotide
ggcauauaagauacacacc

SEQ ID NO: 869932 - RNA, 19 nt, Artificial Sequence
  Description of Artificial Sequence: Synthetic oligonucleotide
ugugucugccugucaggac

SEQ ID NO: 869933 - RNA, 19 nt, Artificial Sequence
  Description of Artificial Sequence: Synthetic oligonucleotide
gcucggaacacucuucuuc

SEQ ID NO: 869934 - RNA, 19 nt, Artificial Sequence
  Description of Artificial Sequence: Synthetic oligonucleotide
uccuaguaacuugcucugc

SEQ ID NO: 869935 - RNA, 19 nt, Artificial Sequence
  Description of Artificial Sequence: Synthetic oligonucleotide
caacgcgacagggaggaac

SEQ ID NO: 869936 - RNA, 19 nt, Artificial Sequence
  Description of Artificial Sequence: Synthetic oligonucleotide
cugccugucaggacuucug

SEQ ID NO: 869937 - RNA, 19 nt, Artificial Sequence
  Description of Artificial Sequence: Synthetic oligonucleotide
uuuaggcaucuuucagcau

SEQ ID NO: 869938 - RNA, 19 nt, Artificial Sequence
  Description of Artificial Sequence: Synthetic oligonucleotide
gccagcauacugucauugg

SEQ ID NO: 869939 - RNA, 19 nt, Artificial Sequence
  Description of Artificial Sequence: Synthetic oligonucleotide
cuuuacauucgccaugaau

SEQ ID NO: 869940 - RNA, 19 nt, Artificial Sequence
  Description of Artificial Sequence: Synthetic oligonucleotide
cuucuucguuccuugggga

SEQ ID NO: 869941 - RNA, 19 nt, Artificial Sequence
  Description of Artificial Sequence: Synthetic oligonucleotide
acccuaucaggaaaggaau

SEQ ID NO: 869942 - RNA, 19 nt, Artificial Sequence
  Description of Artificial Sequence: Synthetic oligonucleotide
gccaauccagaacuucaag

SEQ ID NO: 869943 - RNA, 19 nt, Artificial Sequence
  Description of Artificial Sequence: Synthetic oligonucleotide
ucaggacuucugacacccc

SEQ ID NO: 869944 - RNA, 19 nt, Artificial Sequence
  Description of Artificial Sequence: Synthetic oligonucleotide
cuucaagguauuuccgucu

SEQ ID NO: 869945 - RNA, 19 nt, Artificial Sequence
  Description of Artificial Sequence: Synthetic oligonucleotide
ugagcucuugcaggacuug

SEQ ID NO: 869946 - RNA, 19 nt, Artificial Sequence
  Description of Artificial Sequence: Synthetic oligonucleotide
ugagagucccaugguggga

SEQ ID NO: 869947 - RNA, 19 nt, Artificial Sequence
  Description of Artificial Sequence: Synthetic oligonucleotide
ccaugauaugaugccaucc

SEQ ID NO: 869948 - RNA, 19 nt, Artificial Sequence
  Description of Artificial Sequence: Synthetic oligonucleotide
ucggaacacucuucuucgu

SEQ ID NO: 869949 - RNA, 19 nt, Artificial Sequence
  Description of Artificial Sequence: Synthetic oligonucleotide
cugauuggauagcagggua

SEQ ID NO: 869950 - RNA, 19 nt, Artificial Sequence
  Description of Artificial Sequence: Synthetic oligonucleotide
cagcauacugucauuggcu

SEQ ID NO: 869951 - RNA, 19 nt, Artificial Sequence
  Description of Artificial Sequence: Synthetic oligonucleotide
ugucugccugucaggacuu

SEQ ID NO: 869952 - RNA, 19 nt, Artificial Sequence
  Description of Artificial Sequence: Synthetic oligonucleotide
ugacaccccugcucagaug

SEQ ID NO: 869953 - RNA, 19 nt, Artificial Sequence
  Description of Artificial Sequence: Synthetic oligonucleotide
ggguaaaaugcuacccaug

SEQ ID NO: 869954 - RNA, 19 nt, Artificial Sequence
  Description of Artificial Sequence: Synthetic oligonucleotide
guaaaacgagagcgugcca

SEQ ID NO: 869955 - RNA, 19 nt, Artificial Sequence
  Description of Artificial Sequence: Synthetic oligonucleotide
cugauacccaaacgaaaua

SEQ ID NO: 869956 - RNA, 19 nt, Artificial Sequence
  Description of Artificial Sequence: Synthetic oligonucleotide
agagcgugccagcugcaua

SEQ ID NO: 869957 - RNA, 19 nt, Artificial Sequence
  Description of Artificial Sequence: Synthetic oligonucleotide
gacucguaguucaguguga

SEQ ID NO: 869958 - RNA, 19 nt, Artificial Sequence
  Description of Artificial Sequence: Synthetic oligonucleotide
aggaaccaucagcgagagg

SEQ ID NO: 869959 - RNA, 19 nt, Artificial Sequence
  Description of Artificial Sequence: Synthetic oligonucleotide
cuaugagcucuugcaggac

SEQ ID NO: 869960 - RNA, 19 nt, Artificial Sequence
  Description of Artificial Sequence: Synthetic oligonucleotide
cauuauacacaaacuuguu

SEQ ID NO: 869961 - RNA, 19 nt, Artificial Sequence
  Description of Artificial Sequence: Synthetic oligonucleotide
agacuagagacagcagaua

SEQ ID NO: 869962 - RNA, 19 nt, Artificial Sequence
  Description of Artificial Sequence: Synthetic oligonucleotide
gcaugacuccaugauauga

SEQ ID NO: 869963 - RNA, 19 nt, Artificial Sequence
  Description of Artificial Sequence: Synthetic oligonucleotide
ccaaacgaaauaaaggauu

SEQ ID NO: 869964 - RNA, 19 nt, Artificial Sequence
  Description of Artificial Sequence: Synthetic oligonucleotide
gaucaggggcucggaacac

SEQ ID NO: 869965 - RNA, 19 nt, Artificial Sequence
  Description of Artificial Sequence: Synthetic oligonucleotide
auauccucuuuggcaguga

SEQ ID NO: 869966 - RNA, 19 nt, Artificial Sequence
  Description of Artificial Sequence: Synthetic oligonucleotide
uuccaugguugagcacugc

SEQ ID NO: 869967 - RNA, 19 nt, Artificial Sequence
  Description of Artificial Sequence: Synthetic oligonucleotide
cugugucugccugucagga

SEQ ID NO: 869968 - RNA, 19 nt, Artificial Sequence
  Description of Artificial Sequence: Synthetic oligonucleotide
caccuucacgacaguucug

SEQ ID NO: 869969 - RNA, 19 nt, Artificial Sequence
  Description of Artificial Sequence: Synthetic oligonucleotide
ugcuacccaugagcucagg

SEQ ID NO: 869970 - RNA, 19 nt, Artificial Sequence
  Description of Artificial Sequence: Synthetic oligonucleotide
ucguuccuuggggauaguu

SEQ ID NO: 869971 - RNA, 19 nt, Artificial Sequence
  Description of Artificial Sequence: Synthetic oligonucleotide
gcugauacccaaacgaaau

SEQ ID NO: 869972 - RNA, 19 nt, Artificial Sequence
  Description of Artificial Sequence: Synthetic oligonucleotide
agagucccauggugggaaa

SEQ ID NO: 869973 - RNA, 19 nt, Artificial Sequence
  Description of Artificial Sequence: Synthetic oligonucleotide
cauaucuuauuugucucuu

SEQ ID NO: 869974 - RNA, 19 nt, Artificial Sequence
  Description of Artificial Sequence: Synthetic oligonucleotide
gccaacgcgacagggagga

SEQ ID NO: 869975 - RNA, 19 nt, Artificial Sequence
  Description of Artificial Sequence: Synthetic oligonucleotide
cagaugcaacauuucuugu

SEQ ID NO: 869976 - RNA, 19 nt, Artificial Sequence
  Description of Artificial Sequence: Synthetic oligonucleotide
cccaguaacguugggcuuc

SEQ ID NO: 869977 - RNA, 19 nt, Artificial Sequence
  Description of Artificial Sequence: Synthetic oligonucleotide
agguagcuuccaucacuua

SEQ ID NO: 869978 - RNA, 19 nt, Artificial Sequence
  Description of Artificial Sequence: Synthetic oligonucleotide
uguccgcaguaaugacaau

SEQ ID NO: 869979 - RNA, 19 nt, Artificial Sequence
  Description of Artificial Sequence: Synthetic oligonucleotide
uggccagcauacugucauu

SEQ ID NO: 869980 - RNA, 19 nt, Artificial Sequence
  Description of Artificial Sequence: Synthetic oligonucleotide
gcagaugaacucucccucu

SEQ ID NO: 869981 - RNA, 19 nt, Artificial Sequence
  Description of Artificial Sequence: Synthetic oligonucleotide
gcuugccugugaaaguaca

SEQ ID NO: 869982 - RNA, 19 nt, Artificial Sequence
  Description of Artificial Sequence: Synthetic oligonucleotide
cccuaguuuucuaaacucu

SEQ ID NO: 869983 - RNA, 19 nt, Artificial Sequence
  Description of Artificial Sequence: Synthetic oligonucleotide
auaucggauugaagaggua

SEQ ID NO: 869984 - RNA, 19 nt, Artificial Sequence
  Description of Artificial Sequence: Synthetic oligonucleotide
ccuaguaacuugcucugcu

SEQ ID NO: 869985 - RNA, 19 nt, Artificial Sequence
  Description of Artificial Sequence: Synthetic oligonucleotide
ccaugaaugcugaagccau

SEQ ID NO: 869986 - RNA, 19 nt, Artificial Sequence
  Description of Artificial Sequence: Synthetic oligonucleotide
ccuucacgacaguucugac

SEQ ID NO: 869987 - RNA, 19 nt, Artificial Sequence
  Description of Artificial Sequence: Synthetic oligonucleotide
ggcagugaaagauguucau

SEQ ID NO: 869988 - RNA, 19 nt, Artificial Sequence
  Description of Artificial Sequence: Synthetic oligonucleotide
ccaaagaacugagaauaua

SEQ ID NO: 869989 - RNA, 19 nt, Artificial Sequence
  Description of Artificial Sequence: Synthetic oligonucleotide
cucuucgaugagaacuguu

SEQ ID NO: 869990 - RNA, 19 nt, Artificial Sequence
  Description of Artificial Sequence: Synthetic oligonucleotide
ggggauaguuuugggucuc

SEQ ID NO: 869991 - RNA, 19 nt, Artificial Sequence
  Description of Artificial Sequence: Synthetic oligonucleotide
agcgugccagcugcauagu

SEQ ID NO: 869992 - RNA, 19 nt, Artificial Sequence
  Description of Artificial Sequence: Synthetic oligonucleotide
cugacaccccugcucagau

SEQ ID NO: 869993 - RNA, 19 nt, Artificial Sequence
  Description of Artificial Sequence: Synthetic oligonucleotide
uucguuccuuggggauagu

SEQ ID NO: 869994 - RNA, 19 nt, Artificial Sequence
  Description of Artificial Sequence: Synthetic oligonucleotide
cacuccucaaaagcauuau

SEQ ID NO: 869995 - RNA, 19 nt, Artificial Sequence
  Description of Artificial Sequence: Synthetic oligonucleotide
acgcgacagggaggaacca

SEQ ID NO: 869996 - RNA, 19 nt, Artificial Sequence
  Description of Artificial Sequence: Synthetic oligonucleotide
ggggcucggaacacucuuc

SEQ ID NO: 869997 - RNA, 19 nt, Artificial Sequence
  Description of Artificial Sequence: Synthetic oligonucleotide
ccuaucaggaaaggaauuu

SEQ ID NO: 869998 - RNA, 19 nt, Artificial Sequence
  Description of Artificial Sequence: Synthetic oligonucleotide
cccagaugcaacauuucuu

SEQ ID NO: 869999 - RNA, 19 nt, Artificial Sequence
  Description of Artificial Sequence: Synthetic oligonucleotide
cgccaacgcgacagggagg

SEQ ID NO: 870000 - RNA, 19 nt, Artificial Sequence
  Description of Artificial Sequence: Synthetic oligonucleotide
gggucaagacccugggcuu

SEQ ID NO: 870001 - RNA, 19 nt, Artificial Sequence
  Description of Artificial Sequence: Synthetic oligonucleotide
gggcuucuaugagcucuug

SEQ ID NO: 870002 - RNA, 19 nt, Artificial Sequence
  Description of Artificial Sequence: Synthetic oligonucleotide
caggggcucggaacacucu

SEQ ID NO: 870003 - RNA, 19 nt, Artificial Sequence
  Description of Artificial Sequence: Synthetic oligonucleotide
ggucuccuaguaacuugcu

SEQ ID NO: 870004 - RNA, 19 nt, Artificial Sequence
  Description of Artificial Sequence: Synthetic oligonucleotide
cccuaucaggaaaggaauu

SEQ ID NO: 870005 - RNA, 19 nt, Artificial Sequence
  Description of Artificial Sequence: Synthetic oligonucleotide
gggauaguuuugggucucu

SEQ ID NO: 870006 - RNA, 19 nt, Artificial Sequence
  Description of Artificial Sequence: Synthetic oligonucleotide
ggcucggaacacucuucuu

SEQ ID NO: 870007 - RNA, 19 nt, Artificial Sequence
  Description of Artificial Sequence: Synthetic oligonucleotide
ccuuuacauucgccaugaa

SEQ ID NO: 870008 - RNA, 19 nt, Artificial Sequence
  Description of Artificial Sequence: Synthetic oligonucleotide
ccucuucgaugagaacugu

SEQ ID NO: 870009 - RNA, 19 nt, Artificial Sequence
  Description of Artificial Sequence: Synthetic oligonucleotide
ccgcaguaaugacaauguu

SEQ ID NO: 870010 - RNA, 19 nt, Artificial Sequence
  Description of Artificial Sequence: Synthetic oligonucleotide
cgcgacagggaggaaccau

SEQ ID NO: 870011 - RNA, 19 nt, Artificial Sequence
  Description of Artificial Sequence: Synthetic oligonucleotide
auaagaaauauccacaugg

SEQ ID NO: 870012 - RNA, 19 nt, Artificial Sequence
  Description of Artificial Sequence: Synthetic oligonucleotide
acuuuaaccauauuuauag

SEQ ID NO: 870013 - RNA, 19 nt, Artificial Sequence
  Description of Artificial Sequence: Synthetic oligonucleotide
uccuacagaagaaagagcg

SEQ ID NO: 870014 - RNA, 19 nt, Artificial Sequence
  Description of Artificial Sequence: Synthetic oligonucleotide
uaauugaggaucuugaaga

SEQ ID NO: 870015 - RNA, 19 nt, Artificial Sequence
  Description of Artificial Sequence: Synthetic oligonucleotide
cagaauauggauaaccugg

SEQ ID NO: 870016 - RNA, 19 nt, Artificial Sequence
  Description of Artificial Sequence: Synthetic oligonucleotide
uaugauacaauuaguauaa

SEQ ID NO: 870017 - RNA, 19 nt, Artificial Sequence
  Description of Artificial Sequence: Synthetic oligonucleotide
aauaaggucauucuggcua

SEQ ID NO: 870018 - RNA, 19 nt, Artificial Sequence
  Description of Artificial Sequence: Synthetic oligonucleotide
agcuuuaugauacaauuag

SEQ ID NO: 870019 - RNA, 19 nt, Artificial Sequence
  Description of Artificial Sequence: Synthetic oligonucleotide
aauagaagaacuaucagaa

SEQ ID NO: 870020 - RNA, 19 nt, Artificial Sequence
  Description of Artificial Sequence: Synthetic oligonucleotide
uaaacuuauagcaauuagu

SEQ ID NO: 870021 - RNA, 19 nt, Artificial Sequence
  Description of Artificial Sequence: Synthetic oligonucleotide
cuuaguuccacuuugucug

SEQ ID NO: 870022 - RNA, 19 nt, Artificial Sequence
  Description of Artificial Sequence: Synthetic oligonucleotide
aaagucaacaggaccaccc

SEQ ID NO: 870023 - RNA, 19 nt, Artificial Sequence
  Description of Artificial Sequence: Synthetic oligonucleotide
aaugcaagcuauccacagc

SEQ ID NO: 870024 - RNA, 19 nt, Artificial Sequence
  Description of Artificial Sequence: Synthetic oligonucleotide
auauggauaaccugggguc

SEQ ID NO: 870025 - RNA, 19 nt, Artificial Sequence
  Description of Artificial Sequence: Synthetic oligonucleotide
uccauuuagaaucuucuug

SEQ ID NO: 870026 - RNA, 19 nt, Artificial Sequence
  Description of Artificial Sequence: Synthetic oligonucleotide
auaauugaggaucuugaag

SEQ ID NO: 870027 - RNA, 19 nt, Artificial Sequence
  Description of Artificial Sequence: Synthetic oligonucleotide
uuaugauacaauuaguaua

SEQ ID NO: 870028 - RNA, 19 nt, Artificial Sequence
  Description of Artificial Sequence: Synthetic oligonucleotide
aauuaguugugaucuuuuc

SEQ ID NO: 870029 - RNA, 19 nt, Artificial Sequence
  Description of Artificial Sequence: Synthetic oligonucleotide
uuuagaaucuucuugccuc

SEQ ID NO: 870030 - RNA, 19 nt, Artificial Sequence
  Description of Artificial Sequence: Synthetic oligonucleotide
aauuaaugcaagcuaucca

SEQ ID NO: 870031 - RNA, 19 nt, Artificial Sequence
  Description of Artificial Sequence: Synthetic oligonucleotide
aagaauagaagaacuauca

SEQ ID NO: 870032 - RNA, 19 nt, Artificial Sequence
  Description of Artificial Sequence: Synthetic oligonucleotide
ugcaagauguccuauguca

SEQ ID NO: 870033 - RNA, 19 nt, Artificial Sequence
  Description of Artificial Sequence: Synthetic oligonucleotide
aacuuauagcaauuaguug

SEQ ID NO: 870034 - RNA, 19 nt, Artificial Sequence
  Description of Artificial Sequence: Synthetic oligonucleotide
ugaaacugaaccaucgacu

SEQ ID NO: 870035 - RNA, 19 nt, Artificial Sequence
  Description of Artificial Sequence: Synthetic oligonucleotide
uagucaaacaaacucuggc

SEQ ID NO: 870036 - RNA, 19 nt, Artificial Sequence
  Description of Artificial Sequence: Synthetic oligonucleotide
ucuaauacauuauacuuua

SEQ ID NO: 870037 - RNA, 19 nt, Artificial Sequence
  Description of Artificial Sequence: Synthetic oligonucleotide
agaaagagcggcgagcucc

SEQ ID NO: 870038 - RNA, 19 nt, Artificial Sequence
  Description of Artificial Sequence: Synthetic oligonucleotide
uuuaaccauauuuauagua

SEQ ID NO: 870039 - RNA, 19 nt, Artificial Sequence
  Description of Artificial Sequence: Synthetic oligonucleotide
gagauuacagcccucguug

SEQ ID NO: 870040 - RNA, 19 nt, Artificial Sequence
  Description of Artificial Sequence: Synthetic oligonucleotide
aaacuugccugugacauuc

SEQ ID NO: 870041 - RNA, 19 nt, Artificial Sequence
  Description of Artificial Sequence: Synthetic oligonucleotide
ucgaugaugagaaaacacu

SEQ ID NO: 870042 - RNA, 19 nt, Artificial Sequence
  Description of Artificial Sequence: Synthetic oligonucleotide
uguuuuaaccggaagucca

SEQ ID NO: 870043 - RNA, 19 nt, Artificial Sequence
  Description of Artificial Sequence: Synthetic oligonucleotide
aagcuauccacagcuagcc

SEQ ID NO: 870044 - RNA, 19 nt, Artificial Sequence
  Description of Artificial Sequence: Synthetic oligonucleotide
aaggaaccgucuuugaucu

SEQ ID NO: 870045 - RNA, 19 nt, Artificial Sequence
  Description of Artificial Sequence: Synthetic oligonucleotide
auugcaacgaggcagcuga

SEQ ID NO: 870046 - RNA, 19 nt, Artificial Sequence
  Description of Artificial Sequence: Synthetic oligonucleotide
uucauccuacagaagaaag

SEQ ID NO: 870047 - RNA, 19 nt, Artificial Sequence
  Description of Artificial Sequence: Synthetic oligonucleotide
gaaaugaccauuuugcaua

SEQ ID NO: 870048 - RNA, 19 nt, Artificial Sequence
  Description of Artificial Sequence: Synthetic oligonucleotide
gaugcuucugugcacaaug

SEQ ID NO: 870049 - RNA, 19 nt, Artificial Sequence
  Description of Artificial Sequence: Synthetic oligonucleotide
uacauuauacuuuaaccau

SEQ ID NO: 870050 - RNA, 19 nt, Artificial Sequence
  Description of Artificial Sequence: Synthetic oligonucleotide
accgucuuugaucuuaaac

SEQ ID NO: 870051 - RNA, 19 nt, Artificial Sequence
  Description of Artificial Sequence: Synthetic oligonucleotide
aacucgaugaugagaaaac

SEQ ID NO: 870052 - RNA, 19 nt, Artificial Sequence
  Description of Artificial Sequence: Synthetic oligonucleotide
acaugaugugccuagaagu

SEQ ID NO: 870053 - RNA, 19 nt, Artificial Sequence
  Description of Artificial Sequence: Synthetic oligonucleotide
uucguagugugauaaagga

SEQ ID NO: 870054 - RNA, 19 nt, Artificial Sequence
  Description of Artificial Sequence: Synthetic oligonucleotide
agaauagaagaacuaucag

SEQ ID NO: 870055 - RNA, 19 nt, Artificial Sequence
  Description of Artificial Sequence: Synthetic oligonucleotide
uuugcauauaaaagcuacc

SEQ ID NO: 870056 - RNA, 19 nt, Artificial Sequence
  Description of Artificial Sequence: Synthetic oligonucleotide
aaagcuaccaaugaugcuu

SEQ ID NO: 870057 - RNA, 19 nt, Artificial Sequence
  Description of Artificial Sequence: Synthetic oligonucleotide
cauaacaugaugugccuag

SEQ ID NO: 870058 - RNA, 19 nt, Artificial Sequence
  Description of Artificial Sequence: Synthetic oligonucleotide
aagauagcuguuccuugac

SEQ ID NO: 870059 - RNA, 19 nt, Artificial Sequence
  Description of Artificial Sequence: Synthetic oligonucleotide
ugaugugccuagaaguucc

SEQ ID NO: 870060 - RNA, 19 nt, Artificial Sequence
  Description of Artificial Sequence: Synthetic oligonucleotide
ucagaauauggauaaccug

SEQ ID NO: 870061 - RNA, 19 nt, Artificial Sequence
  Description of Artificial Sequence: Synthetic oligonucleotide
aauaucuuuagggugcaga

SEQ ID NO: 870062 - RNA, 19 nt, Artificial Sequence
  Description of Artificial Sequence: Synthetic oligonucleotide
uccaccuuaacugaaggcc

SEQ ID NO: 870063 - RNA, 19 nt, Artificial Sequence
  Description of Artificial Sequence: Synthetic oligonucleotide
aguaaaggauucuuacaag

SEQ ID NO: 870064 - RNA, 19 nt, Artificial Sequence
  Description of Artificial Sequence: Synthetic oligonucleotide
cuucguagugugauaaagg

SEQ ID NO: 870065 - RNA, 19 nt, Artificial Sequence
  Description of Artificial Sequence: Synthetic oligonucleotide
agucgcuaaagucaacagg

SEQ ID NO: 870066 - RNA, 19 nt, Artificial Sequence
  Description of Artificial Sequence: Synthetic oligonucleotide
ggagucaguacauaaaagc

SEQ ID NO: 870067 - RNA, 19 nt, Artificial Sequence
  Description of Artificial Sequence: Synthetic oligonucleotide
acuuugauacuguagcugu

SEQ ID NO: 870068 - RNA, 19 nt, Artificial Sequence
  Description of Artificial Sequence: Synthetic oligonucleotide
auaucgaugccuauguggg

SEQ ID NO: 870069 - RNA, 19 nt, Artificial Sequence
  Description of Artificial Sequence: Synthetic oligonucleotide
gauaguaggccaguggaag

SEQ ID NO: 870070 - RNA, 19 nt, Artificial Sequence
  Description of Artificial Sequence: Synthetic oligonucleotide
uggcaagucgcuaaaguca

SEQ ID NO: 870071 - RNA, 19 nt, Artificial Sequence
  Description of Artificial Sequence: Synthetic oligonucleotide
uaaaacuugccugugacau

SEQ ID NO: 870072 - RNA, 19 nt, Artificial Sequence
  Description of Artificial Sequence: Synthetic oligonucleotide
ucuacagcggccauggcaa

SEQ ID NO: 870073 - RNA, 19 nt, Artificial Sequence
  Description of Artificial Sequence: Synthetic oligonucleotide
ugucgagaaacauacucca

SEQ ID NO: 870074 - RNA, 19 nt, Artificial Sequence
  Description of Artificial Sequence: Synthetic oligonucleotide
gauagucaaacaaacucug

SEQ ID NO: 870075 - RNA, 19 nt, Artificial Sequence
  Description of Artificial Sequence: Synthetic oligonucleotide
uauugguugagacaaugua

SEQ ID NO: 870076 - RNA, 19 nt, Artificial Sequence
  Description of Artificial Sequence: Synthetic oligonucleotide
cuggcuauaauugaggauc

SEQ ID NO: 870077 - RNA, 19 nt, Artificial Sequence
  Description of Artificial Sequence: Synthetic oligonucleotide
auaguaaaggauucuuaca

SEQ ID NO: 870078 - RNA, 19 nt, Artificial Sequence
  Description of Artificial Sequence: Synthetic oligonucleotide
ucuaucauaucgaugccua

SEQ ID NO: 870079 - RNA, 19 nt, Artificial Sequence
  Description of Artificial Sequence: Synthetic oligonucleotide
cuuugcgucaaugagucgc

SEQ ID NO: 870080 - RNA, 19 nt, Artificial Sequence
  Description of Artificial Sequence: Synthetic oligonucleotide
uguaaaacuucaccaguaa

SEQ ID NO: 870081 - RNA, 19 nt, Artificial Sequence
  Description of Artificial Sequence: Synthetic oligonucleotide
aucauaucgaugccuaugu

SEQ ID NO: 870082 - RNA, 19 nt, Artificial Sequence
  Description of Artificial Sequence: Synthetic oligonucleotide
uucucaccaagaauagaag

SEQ ID NO: 870083 - RNA, 19 nt, Artificial Sequence
  Description of Artificial Sequence: Synthetic oligonucleotide
uuagggugcagauagucaa

SEQ ID NO: 870084 - RNA, 19 nt, Artificial Sequence
  Description of Artificial Sequence: Synthetic oligonucleotide
ucccuauccaguaagcuuc

SEQ ID NO: 870085 - RNA, 19 nt, Artificial Sequence
  Description of Artificial Sequence: Synthetic oligonucleotide
ugagacaauguauucuacu

SEQ ID NO: 870086 - RNA, 19 nt, Artificial Sequence
  Description of Artificial Sequence: Synthetic oligonucleotide
caauuaaugcaagcuaucc

SEQ ID NO: 870087 - RNA, 19 nt, Artificial Sequence
  Description of Artificial Sequence: Synthetic oligonucleotide
ugacuuguaucaauggcuc

SEQ ID NO: 870088 - RNA, 19 nt, Artificial Sequence
  Description of Artificial Sequence: Synthetic oligonucleotide
uuaaccggaaguccagucu

SEQ ID NO: 870089 - RNA, 19 nt, Artificial Sequence
  Description of Artificial Sequence: Synthetic oligonucleotide
auaguaggccaguggaagg

SEQ ID NO: 870090 - RNA, 19 nt, Artificial Sequence
  Description of Artificial Sequence: Synthetic oligonucleotide
uauaauugaggaucuugaa

SEQ ID NO: 870091 - RNA, 19 nt, Artificial Sequence
  Description of Artificial Sequence: Synthetic oligonucleotide
acuuugucugaaguuacac

SEQ ID NO: 870092 - RNA, 19 nt, Artificial Sequence
  Description of Artificial Sequence: Synthetic oligonucleotide
ugcauauaaaagcuaccaa

SEQ ID NO: 870093 - RNA, 19 nt, Artificial Sequence
  Description of Artificial Sequence: Synthetic oligonucleotide
guaucaauggcucugagau

SEQ ID NO: 870094 - RNA, 19 nt, Artificial Sequence
  Description of Artificial Sequence: Synthetic oligonucleotide
uaucuguuuuaaccggaag

SEQ ID NO: 870095 - RNA, 19 nt, Artificial Sequence
  Description of Artificial Sequence: Synthetic oligonucleotide
cucgaugaugagaaaacac

SEQ ID NO: 870096 - RNA, 19 nt, Artificial Sequence
  Description of Artificial Sequence: Synthetic oligonucleotide
ugguagauugacuuguauc

SEQ ID NO: 870097 - RNA, 19 nt, Artificial Sequence
  Description of Artificial Sequence: Synthetic oligonucleotide
uggcaauaucuuuagggug

SEQ ID NO: 870098 - RNA, 19 nt, Artificial Sequence
  Description of Artificial Sequence: Synthetic oligonucleotide
agauaugccaaaauagcug

SEQ ID NO: 870099 - RNA, 19 nt, Artificial Sequence
  Description of Artificial Sequence: Synthetic oligonucleotide
aaguuccugugguagauau

SEQ ID NO: 870100 - RNA, 19 nt, Artificial Sequence
  Description of Artificial Sequence: Synthetic oligonucleotide
aaacucgaugaugagaaaa

SEQ ID NO: 870101 - RNA, 19 nt, Artificial Sequence
  Description of Artificial Sequence: Synthetic oligonucleotide
cuugagccugcccugauag

SEQ ID NO: 870102 - RNA, 19 nt, Artificial Sequence
  Description of Artificial Sequence: Synthetic oligonucleotide
agaauauggauaaccuggg

SEQ ID NO: 870103 - RNA, 19 nt, Artificial Sequence
  Description of Artificial Sequence: Synthetic oligonucleotide
uaucauaucgaugccuaug

SEQ ID NO: 870104 - RNA, 19 nt, Artificial Sequence
  Description of Artificial Sequence: Synthetic oligonucleotide
cacaugugaaugcagucgc

SEQ ID NO: 870105 - RNA, 19 nt, Artificial Sequence
  Description of Artificial Sequence: Synthetic oligonucleotide
uugaagacggacucagaga

SEQ ID NO: 870106 - RNA, 19 nt, Artificial Sequence
  Description of Artificial Sequence: Synthetic oligonucleotide
uuacacaugguagauugac

SEQ ID NO: 870107 - RNA, 19 nt, Artificial Sequence
  Description of Artificial Sequence: Synthetic oligonucleotide
aacaacaguauugguugag

SEQ ID NO: 870108 - RNA, 19 nt, Artificial Sequence
  Description of Artificial Sequence: Synthetic oligonucleotide
uagugugauaaaggaaccg

SEQ ID NO: 870109 - RNA, 19 nt, Artificial Sequence
  Description of Artificial Sequence: Synthetic oligonucleotide
auagcuguugcccucuggu

SEQ ID NO: 870110 - RNA, 19 nt, Artificial Sequence
  Description of Artificial Sequence: Synthetic oligonucleotide
acuucguagugugauaaag

SEQ ID NO: 870111 - RNA, 19 nt, Artificial Sequence
  Description of Artificial Sequence: Synthetic oligonucleotide
uggcccagggguuauaucu

SEQ ID NO: 870112 - RNA, 19 nt, Artificial Sequence
  Description of Artificial Sequence: Synthetic oligonucleotide
caagcuauccacagcuagc

SEQ ID NO: 870113 - RNA, 19 nt, Artificial Sequence
  Description of Artificial Sequence: Synthetic oligonucleotide
uacuugugauguucagugg

SEQ ID NO: 870114 - RNA, 19 nt, Artificial Sequence
  Description of Artificial Sequence: Synthetic oligonucleotide
gucgcuaaagucaacagga

SEQ ID NO: 870115 - RNA, 19 nt, Artificial Sequence
  Description of Artificial Sequence: Synthetic oligonucleotide
ugaggaaccacaugugaau

SEQ ID NO: 870116 - RNA, 19 nt, Artificial Sequence
  Description of Artificial Sequence: Synthetic oligonucleotide
gaagauagcuguuccuuga

SEQ ID NO: 870117 - RNA, 19 nt, Artificial Sequence
  Description of Artificial Sequence: Synthetic oligonucleotide
uucauaacaugaugugccu

SEQ ID NO: 870118 - RNA, 19 nt, Artificial Sequence
  Description of Artificial Sequence: Synthetic oligonucleotide
cuucugugcacaaugauua

SEQ ID NO: 870119 - RNA, 19 nt, Artificial Sequence
  Description of Artificial Sequence: Synthetic oligonucleotide
ucgcccaauugcaacgagg

SEQ ID NO: 870120 - RNA, 19 nt, Artificial Sequence
  Description of Artificial Sequence: Synthetic oligonucleotide
ugugauguucagugggcug

SEQ ID NO: 870121 - RNA, 19 nt, Artificial Sequence
  Description of Artificial Sequence: Synthetic oligonucleotide
auuuauaguaaaggauucu

SEQ ID NO: 870122 - RNA, 19 nt, Artificial Sequence
  Description of Artificial Sequence: Synthetic oligonucleotide
uaaugcacuuugauacugu

SEQ ID NO: 870123 - RNA, 19 nt, Artificial Sequence
  Description of Artificial Sequence: Synthetic oligonucleotide
gccaauaaggucauucugg

SEQ ID NO: 870124 - RNA, 19 nt, Artificial Sequence
  Description of Artificial Sequence: Synthetic oligonucleotide
uuuaaccggaaguccaguc

SEQ ID NO: 870125 - RNA, 19 nt, Artificial Sequence
  Description of Artificial Sequence: Synthetic oligonucleotide
agauugacuuguaucaaug

SEQ ID NO: 870126 - RNA, 19 nt, Artificial Sequence
  Description of Artificial Sequence: Synthetic oligonucleotide
uuugcgucaaugagucgcu

SEQ ID NO: 870127 - RNA, 19 nt, Artificial Sequence
  Description of Artificial Sequence: Synthetic oligonucleotide
gucaaugagucgcucccgg

SEQ ID NO: 870128 - RNA, 19 nt, Artificial Sequence
  Description of Artificial Sequence: Synthetic oligonucleotide
uucagauagccugugcugu

SEQ ID NO: 870129 - RNA, 19 nt, Artificial Sequence
  Description of Artificial Sequence: Synthetic oligonucleotide
aaaacgaauuucccaucua

SEQ ID NO: 870130 - RNA, 19 nt, Artificial Sequence
  Description of Artificial Sequence: Synthetic oligonucleotide
ucguagugugauaaaggaa

SEQ ID NO: 870131 - RNA, 19 nt, Artificial Sequence
  Description of Artificial Sequence: Synthetic oligonucleotide
uagauugacuuguaucaau

SEQ ID NO: 870132 - RNA, 19 nt, Artificial Sequence
  Description of Artificial Sequence: Synthetic oligonucleotide
gugucgagaaacauacucc

SEQ ID NO: 870133 - RNA, 19 nt, Artificial Sequence
  Description of Artificial Sequence: Synthetic oligonucleotide
aaacucuggccaauaaggu

SEQ ID NO: 870134 - RNA, 19 nt, Artificial Sequence
  Description of Artificial Sequence: Synthetic oligonucleotide
uuccccguucaacugguug

SEQ ID NO: 870135 - RNA, 19 nt, Artificial Sequence
  Description of Artificial Sequence: Synthetic oligonucleotide
ucauaucgaugccuaugug

SEQ ID NO: 870136 - RNA, 19 nt, Artificial Sequence
  Description of Artificial Sequence: Synthetic oligonucleotide
caugugaaugcagucgccc

SEQ ID NO: 870137 - RNA, 19 nt, Artificial Sequence
  Description of Artificial Sequence: Synthetic oligonucleotide
gucaacaggaccacccagg

SEQ ID NO: 870138 - RNA, 19 nt, Artificial Sequence
  Description of Artificial Sequence: Synthetic oligonucleotide
acaugguagauugacuugu

SEQ ID NO: 870139 - RNA, 19 nt, Artificial Sequence
  Description of Artificial Sequence: Synthetic oligonucleotide
ggcaauaucuuuagggugc

SEQ ID NO: 870140 - RNA, 19 nt, Artificial Sequence
  Description of Artificial Sequence: Synthetic oligonucleotide
ugcgucaaugagucgcucc

SEQ ID NO: 870141 - RNA, 19 nt, Artificial Sequence
  Description of Artificial Sequence: Synthetic oligonucleotide
uggcuauaauugaggaucu

SEQ ID NO: 870142 - RNA, 19 nt, Artificial Sequence
  Description of Artificial Sequence: Synthetic oligonucleotide
guucucaccaagaauagaa

SEQ ID NO: 870143 - RNA, 19 nt, Artificial Sequence
  Description of Artificial Sequence: Synthetic oligonucleotide
caaaauagcuguugcccuc

SEQ ID NO: 870144 - RNA, 19 nt, Artificial Sequence
  Description of Artificial Sequence: Synthetic oligonucleotide
cuguuuuaaccggaagucc

SEQ ID NO: 870145 - RNA, 19 nt, Artificial Sequence
  Description of Artificial Sequence: Synthetic oligonucleotide
cucguugucugguucguug

SEQ ID NO: 870146 - RNA, 19 nt, Artificial Sequence
  Description of Artificial Sequence: Synthetic oligonucleotide
augaugugccuagaaguuc

SEQ ID NO: 870147 - RNA, 19 nt, Artificial Sequence
  Description of Artificial Sequence: Synthetic oligonucleotide
uaucaauggcucugagaug

SEQ ID NO: 870148 - RNA, 19 nt, Artificial Sequence
  Description of Artificial Sequence: Synthetic oligonucleotide
aauugcaacgaggcagcug

SEQ ID NO: 870149 - RNA, 19 nt, Artificial Sequence
  Description of Artificial Sequence: Synthetic oligonucleotide
aucuauggcgugucgagaa

SEQ ID NO: 870150 - RNA, 19 nt, Artificial Sequence
  Description of Artificial Sequence: Synthetic oligonucleotide
aucgcugccucgucauuac

SEQ ID NO: 870151 - RNA, 19 nt, Artificial Sequence
  Description of Artificial Sequence: Synthetic oligonucleotide
uuguaucaauggcucugag

SEQ ID NO: 870152 - RNA, 19 nt, Artificial Sequence
  Description of Artificial Sequence: Synthetic oligonucleotide
ucuuauccuguggauuucc

SEQ ID NO: 870153 - RNA, 19 nt, Artificial Sequence
  Description of Artificial Sequence: Synthetic oligonucleotide
ucuggcuauaauugaggau

SEQ ID NO: 870154 - RNA, 19 nt, Artificial Sequence
  Description of Artificial Sequence: Synthetic oligonucleotide
cagucgcccaauugcaacg

SEQ ID NO: 870155 - RNA, 19 nt, Artificial Sequence
  Description of Artificial Sequence: Synthetic oligonucleotide
auagaagaacuaucagaau

SEQ ID NO: 870156 - RNA, 19 nt, Artificial Sequence
  Description of Artificial Sequence: Synthetic oligonucleotide
guaagcugugggaagguug

SEQ ID NO: 870157 - RNA, 19 nt, Artificial Sequence
  Description of Artificial Sequence: Synthetic oligonucleotide
gacggacucagagacgaag

SEQ ID NO: 870158 - RNA, 19 nt, Artificial Sequence
  Description of Artificial Sequence: Synthetic oligonucleotide
uaaccggaaguccagucuu

SEQ ID NO: 870159 - RNA, 19 nt, Artificial Sequence
  Description of Artificial Sequence: Synthetic oligonucleotide
auaaggucauucuggcuau

SEQ ID NO: 870160 - RNA, 19 nt, Artificial Sequence
  Description of Artificial Sequence: Synthetic oligonucleotide
guuuuaaccggaaguccag

SEQ ID NO: 870161 - RNA, 19 nt, Artificial Sequence
  Description of Artificial Sequence: Synthetic oligonucleotide
agugggaugaguccucuuu

SEQ ID NO: 870162 - RNA, 19 nt, Artificial Sequence
  Description of Artificial Sequence: Synthetic oligonucleotide
ccaauaaggucauucuggc

SEQ ID NO: 870163 - RNA, 19 nt, Artificial Sequence
  Description of Artificial Sequence: Synthetic oligonucleotide
uguugcacuucauccuaca

SEQ ID NO: 870164 - RNA, 19 nt, Artificial Sequence
  Description of Artificial Sequence: Synthetic oligonucleotide
agcggcgagcuccagagca

SEQ ID NO: 870165 - RNA, 19 nt, Artificial Sequence
  Description of Artificial Sequence: Synthetic oligonucleotide
ggaugaguccucuuugggc

SEQ ID NO: 870166 - RNA, 19 nt, Artificial Sequence
  Description of Artificial Sequence: Synthetic oligonucleotide
aucuuuguggguggccagc

SEQ ID NO: 870167 - RNA, 19 nt, Artificial Sequence
  Description of Artificial Sequence: Synthetic oligonucleotide
gucuuugcgucaaugaguc

SEQ ID NO: 870168 - RNA, 19 nt, Artificial Sequence
  Description of Artificial Sequence: Synthetic oligonucleotide
gaaccaucgacuucguagu

SEQ ID NO: 870169 - RNA, 19 nt, Artificial Sequence
  Description of Artificial Sequence: Synthetic oligonucleotide
uuggucguugucuaucaua

SEQ ID NO: 870170 - RNA, 19 nt, Artificial Sequence
  Description of Artificial Sequence: Synthetic oligonucleotide
guggaaggaaugucuggag

SEQ ID NO: 870171 - RNA, 19 nt, Artificial Sequence
  Description of Artificial Sequence: Synthetic oligonucleotide
aggauucuuacaaggaaga

SEQ ID NO: 870172 - RNA, 19 nt, Artificial Sequence
  Description of Artificial Sequence: Synthetic oligonucleotide
agauagcuguuccuugacu

SEQ ID NO: 870173 - RNA, 19 nt, Artificial Sequence
  Description of Artificial Sequence: Synthetic oligonucleotide
gggacuacuggauccuugg

SEQ ID NO: 870174 - RNA, 19 nt, Artificial Sequence
  Description of Artificial Sequence: Synthetic oligonucleotide
uuaguuccacuuugucuga

SEQ ID NO: 870175 - RNA, 19 nt, Artificial Sequence
  Description of Artificial Sequence: Synthetic oligonucleotide
uuauccuguggauuuccau

SEQ ID NO: 870176 - RNA, 19 nt, Artificial Sequence
  Description of Artificial Sequence: Synthetic oligonucleotide
cucagagacgaagaggauc

SEQ ID NO: 870177 - RNA, 19 nt, Artificial Sequence
  Description of Artificial Sequence: Synthetic oligonucleotide
gucauuacugggacuacug

SEQ ID NO: 870178 - RNA, 19 nt, Artificial Sequence
  Description of Artificial Sequence: Synthetic oligonucleotide
guugucuaucauaucgaug

SEQ ID NO: 870179 - RNA, 19 nt, Artificial Sequence
  Description of Artificial Sequence: Synthetic oligonucleotide
ugggacuacuggauccuug

SEQ ID NO: 870180 - RNA, 19 nt, Artificial Sequence
  Description of Artificial Sequence: Synthetic oligonucleotide
aaccaucgacuucguagug

SEQ ID NO: 870181 - RNA, 19 nt, Artificial Sequence
  Description of Artificial Sequence: Synthetic oligonucleotide
cuaaagucaacaggaccac

SEQ ID NO: 870182 - RNA, 19 nt, Artificial Sequence
  Description of Artificial Sequence: Synthetic oligonucleotide
gauagcuguuccuugacuu

SEQ ID NO: 870183 - RNA, 19 nt, Artificial Sequence
  Description of Artificial Sequence: Synthetic oligonucleotide
augugaaugcagucgccca

SEQ ID NO: 870184 - RNA, 19 nt, Artificial Sequence
  Description of Artificial Sequence: Synthetic oligonucleotide
agcuagcccaaacucgaug

SEQ ID NO: 870185 - RNA, 19 nt, Artificial Sequence
  Description of Artificial Sequence: Synthetic oligonucleotide
gauucuuacaaggaagaau

SEQ ID NO: 870186 - RNA, 19 nt, Artificial Sequence
  Description of Artificial Sequence: Synthetic oligonucleotide
ucgcuaaagucaacaggac

SEQ ID NO: 870187 - RNA, 19 nt, Artificial Sequence
  Description of Artificial Sequence: Synthetic oligonucleotide
cacggguucaugaaacuga

SEQ ID NO: 870188 - RNA, 19 nt, Artificial Sequence
  Description of Artificial Sequence: Synthetic oligonucleotide
agauuacagcccucguugu

SEQ ID NO: 870189 - RNA, 19 nt, Artificial Sequence
  Description of Artificial Sequence: Synthetic oligonucleotide
gcugccucgucauuacugg

SEQ ID NO: 870190 - RNA, 19 nt, Artificial Sequence
  Description of Artificial Sequence: Synthetic oligonucleotide
gaagacggacucagagacg

SEQ ID NO: 870191 - RNA, 19 nt, Artificial Sequence
  Description of Artificial Sequence: Synthetic oligonucleotide
ucuuugcgucaaugagucg

SEQ ID NO: 870192 - RNA, 19 nt, Artificial Sequence
  Description of Artificial Sequence: Synthetic oligonucleotide
gugggaugaguccucuuug

SEQ ID NO: 870193 - RNA, 19 nt, Artificial Sequence
  Description of Artificial Sequence: Synthetic oligonucleotide
gcugagauuacagcccucg

SEQ ID NO: 870194 - RNA, 19 nt, Artificial Sequence
  Description of Artificial Sequence: Synthetic oligonucleotide
uuuuaaccggaaguccagu

SEQ ID NO: 870195 - RNA, 19 nt, Artificial Sequence
  Description of Artificial Sequence: Synthetic oligonucleotide
uaguaggccaguggaagga

SEQ ID NO: 870196 - RNA, 19 nt, Artificial Sequence
  Description of Artificial Sequence: Synthetic oligonucleotide
ucucccuauccaguaagcu

SEQ ID NO: 870197 - RNA, 19 nt, Artificial Sequence
  Description of Artificial Sequence: Synthetic oligonucleotide
ggcgugucgagaaacauac

SEQ ID NO: 870198 - RNA, 19 nt, Artificial Sequence
  Description of Artificial Sequence: Synthetic oligonucleotide
gucaguacauaaaagcugu

SEQ ID NO: 870199 - RNA, 19 nt, Artificial Sequence
  Description of Artificial Sequence: Synthetic oligonucleotide
ccaaacucgaugaugagaa

SEQ ID NO: 870200 - RNA, 19 nt, Artificial Sequence
  Description of Artificial Sequence: Synthetic oligonucleotide
acagcuagcccaaacucga

SEQ ID NO: 870201 - RNA, 19 nt, Artificial Sequence
  Description of Artificial Sequence: Synthetic oligonucleotide
ucuauggcgugucgagaaa

SEQ ID NO: 870202 - RNA, 19 nt, Artificial Sequence
  Description of Artificial Sequence: Synthetic oligonucleotide
cucucccuauccaguaagc

SEQ ID NO: 870203 - RNA, 19 nt, Artificial Sequence
  Description of Artificial Sequence: Synthetic oligonucleotide
agccugcccugauaguagg

SEQ ID NO: 870204 - RNA, 19 nt, Artificial Sequence
  Description of Artificial Sequence: Synthetic oligonucleotide
caagucgcuaaagucaaca

SEQ ID NO: 870205 - RNA, 19 nt, Artificial Sequence
  Description of Artificial Sequence: Synthetic oligonucleotide
acagcggccauggcaaguc

SEQ ID NO: 870206 - RNA, 19 nt, Artificial Sequence
  Description of Artificial Sequence: Synthetic oligonucleotide
uugugauguucagugggcu

SEQ ID NO: 870207 - RNA, 19 nt, Artificial Sequence
  Description of Artificial Sequence: Synthetic oligonucleotide
aucgacuucguagugugau

SEQ ID NO: 870208 - RNA, 19 nt, Artificial Sequence
  Description of Artificial Sequence: Synthetic oligonucleotide
ggugcggugucugaggaag

SEQ ID NO: 870209 - RNA, 19 nt, Artificial Sequence
  Description of Artificial Sequence: Synthetic oligonucleotide
gggaugaguccucuuuggg

SEQ ID NO: 870210 - RNA, 19 nt, Artificial Sequence
  Description of Artificial Sequence: Synthetic oligonucleotide
ucccaucuauggcgugucg

SEQ ID NO: 870211 - RNA, 19 nt, Artificial Sequence
  Description of Artificial Sequence: Synthetic oligonucleotide
acauuauacuuuaaccaua

SEQ ID NO: 870212 - RNA, 19 nt, Artificial Sequence
  Description of Artificial Sequence: Synthetic oligonucleotide
caugaaacugaaccaucga

SEQ ID NO: 870213 - RNA, 19 nt, Artificial Sequence
  Description of Artificial Sequence: Synthetic oligonucleotide
cuaccaaugaugcuucugu

SEQ ID NO: 870214 - RNA, 19 nt, Artificial Sequence
  Description of Artificial Sequence: Synthetic oligonucleotide
cuauggcgugucgagaaac

SEQ ID NO: 870215 - RNA, 19 nt, Artificial Sequence
  Description of Artificial Sequence: Synthetic oligonucleotide
gcuagcccaaacucgauga

SEQ ID NO: 870216 - RNA, 19 nt, Artificial Sequence
  Description of Artificial Sequence: Synthetic oligonucleotide
uccacggguucaugaaacu

SEQ ID NO: 870217 - RNA, 19 nt, Artificial Sequence
  Description of Artificial Sequence: Synthetic oligonucleotide
uggcgugucgagaaacaua

SEQ ID NO: 870218 - RNA, 19 nt, Artificial Sequence
  Description of Artificial Sequence: Synthetic oligonucleotide
agggguuauaucuguuuua

SEQ ID NO: 870219 - RNA, 19 nt, Artificial Sequence
  Description of Artificial Sequence: Synthetic oligonucleotide
ccacaugugaaugcagucg

SEQ ID NO: 870220 - RNA, 19 nt, Artificial Sequence
  Description of Artificial Sequence: Synthetic oligonucleotide
gugugauaaaggaaccguc

SEQ ID NO: 870221 - RNA, 19 nt, Artificial Sequence
  Description of Artificial Sequence: Synthetic oligonucleotide
ucauaacaugaugugccua

SEQ ID NO: 870222 - RNA, 19 nt, Artificial Sequence
  Description of Artificial Sequence: Synthetic oligonucleotide
agucgggauggcccagggg

SEQ ID NO: 870223 - RNA, 19 nt, Artificial Sequence
  Description of Artificial Sequence: Synthetic oligonucleotide
uagaggcaaaguccuuauc

SEQ ID NO: 870224 - RNA, 19 nt, Artificial Sequence
  Description of Artificial Sequence: Synthetic oligonucleotide
auaacaugaugugccuaga

SEQ ID NO: 870225 - RNA, 19 nt, Artificial Sequence
  Description of Artificial Sequence: Synthetic oligonucleotide
augacccucuuauccugug

SEQ ID NO: 870226 - RNA, 19 nt, Artificial Sequence
  Description of Artificial Sequence: Synthetic oligonucleotide
agcggccauggcaagucgc

SEQ ID NO: 870227 - RNA, 19 nt, Artificial Sequence
  Description of Artificial Sequence: Synthetic oligonucleotide
ccaucuauggcgugucgag

SEQ ID NO: 870228 - RNA, 19 nt, Artificial Sequence
  Description of Artificial Sequence: Synthetic oligonucleotide
cgugucgagaaacauacuc

SEQ ID NO: 870229 - RNA, 19 nt, Artificial Sequence
  Description of Artificial Sequence: Synthetic oligonucleotide
gcgucaaugagucgcuccc

SEQ ID NO: 870230 - RNA, 19 nt, Artificial Sequence
  Description of Artificial Sequence: Synthetic oligonucleotide
cuguaaaacuugccuguga

SEQ ID NO: 870231 - RNA, 19 nt, Artificial Sequence
  Description of Artificial Sequence: Synthetic oligonucleotide
aggcgaugacccucuuauc

SEQ ID NO: 870232 - RNA, 19 nt, Artificial Sequence
  Description of Artificial Sequence: Synthetic oligonucleotide
accaucgacuucguagugu

SEQ ID NO: 870233 - RNA, 19 nt, Artificial Sequence
  Description of Artificial Sequence: Synthetic oligonucleotide
guccacggguucaugaaac

SEQ ID NO: 870234 - RNA, 19 nt, Artificial Sequence
  Description of Artificial Sequence: Synthetic oligonucleotide
auaucuguuuuaaccggaa

SEQ ID NO: 870235 - RNA, 19 nt, Artificial Sequence
  Description of Artificial Sequence: Synthetic oligonucleotide
ugcaagcuauccacagcua

SEQ ID NO: 870236 - RNA, 19 nt, Artificial Sequence
  Description of Artificial Sequence: Synthetic oligonucleotide
cucgucauuacugggacua

SEQ ID NO: 870237 - RNA, 19 nt, Artificial Sequence
  Description of Artificial Sequence: Synthetic oligonucleotide
ccgucuuugaucuuaaacu

SEQ ID NO: 870238 - RNA, 19 nt, Artificial Sequence
  Description of Artificial Sequence: Synthetic oligonucleotide
agcaauuaguugugaucuu

SEQ ID NO: 870239 - RNA, 19 nt, Artificial Sequence
  Description of Artificial Sequence: Synthetic oligonucleotide
uggcuuuuauggagucagu

SEQ ID NO: 870240 - RNA, 19 nt, Artificial Sequence
  Description of Artificial Sequence: Synthetic oligonucleotide
ucgacuucguagugugaua

SEQ ID NO: 870241 - RNA, 19 nt, Artificial Sequence
  Description of Artificial Sequence: Synthetic oligonucleotide
gcuuaguuccacuuugucu

SEQ ID NO: 870242 - RNA, 19 nt, Artificial Sequence
  Description of Artificial Sequence: Synthetic oligonucleotide
uugcaacgaggcagcugag

SEQ ID NO: 870243 - RNA, 19 nt, Artificial Sequence
  Description of Artificial Sequence: Synthetic oligonucleotide
ugagucgcucccggggugc

SEQ ID NO: 870244 - RNA, 19 nt, Artificial Sequence
  Description of Artificial Sequence: Synthetic oligonucleotide
acggacucagagacgaaga

SEQ ID NO: 870245 - RNA, 19 nt, Artificial Sequence
  Description of Artificial Sequence: Synthetic oligonucleotide
cgcccaauugcaacgaggc

SEQ ID NO: 870246 - RNA, 19 nt, Artificial Sequence
  Description of Artificial Sequence: Synthetic oligonucleotide
cgcuaaagucaacaggacc

SEQ ID NO: 870247 - RNA, 19 nt, Artificial Sequence
  Description of Artificial Sequence: Synthetic oligonucleotide
cauggcaagucgcuaaagu

SEQ ID NO: 870248 - RNA, 19 nt, Artificial Sequence
  Description of Artificial Sequence: Synthetic oligonucleotide
ggucauucuggcuauaauu

SEQ ID NO: 870249 - RNA, 19 nt, Artificial Sequence
  Description of Artificial Sequence: Synthetic oligonucleotide
cuggaaggcgaugacccuc

SEQ ID NO: 870250 - RNA, 19 nt, Artificial Sequence
  Description of Artificial Sequence: Synthetic oligonucleotide
uguaagcugugggaagguu

SEQ ID NO: 870251 - RNA, 19 nt, Artificial Sequence
  Description of Artificial Sequence: Synthetic oligonucleotide
gaaagagcggcgagcucca

SEQ ID NO: 870252 - RNA, 19 nt, Artificial Sequence
  Description of Artificial Sequence: Synthetic oligonucleotide
aaccgucuuugaucuuaaa

SEQ ID NO: 870253 - RNA, 19 nt, Artificial Sequence
  Description of Artificial Sequence: Synthetic oligonucleotide
auuuccccguucaacuggu

SEQ ID NO: 870254 - RNA, 19 nt, Artificial Sequence
  Description of Artificial Sequence: Synthetic oligonucleotide
ccacuuugucugaaguuac

SEQ ID NO: 870255 - RNA, 19 nt, Artificial Sequence
  Description of Artificial Sequence: Synthetic oligonucleotide
gcagucgcccaauugcaac

SEQ ID NO: 870256 - RNA, 19 nt, Artificial Sequence
  Description of Artificial Sequence: Synthetic oligonucleotide
gacuuguaucaauggcucu

SEQ ID NO: 870257 - RNA, 19 nt, Artificial Sequence
  Description of Artificial Sequence: Synthetic oligonucleotide
guccccgccuuccaggaca

SEQ ID NO: 870258 - RNA, 19 nt, Artificial Sequence
  Description of Artificial Sequence: Synthetic oligonucleotide
ggccgcuguaagcuguggg

SEQ ID NO: 870259 - RNA, 19 nt, Artificial Sequence
  Description of Artificial Sequence: Synthetic oligonucleotide
ggucucuugagccugcccu

SEQ ID NO: 870260 - RNA, 19 nt, Artificial Sequence
  Description of Artificial Sequence: Synthetic oligonucleotide
caggcccgcaucugcuucc

SEQ ID NO: 870261 - RNA, 19 nt, Artificial Sequence
  Description of Artificial Sequence: Synthetic oligonucleotide
ggguuauaucuguuuuaac

SEQ ID NO: 870262 - RNA, 19 nt, Artificial Sequence
  Description of Artificial Sequence: Synthetic oligonucleotide
acccucuuauccuguggau

SEQ ID NO: 870263 - RNA, 19 nt, Artificial Sequence
  Description of Artificial Sequence: Synthetic oligonucleotide
ugucuacagcggccauggc

SEQ ID NO: 870264 - RNA, 19 nt, Artificial Sequence
  Description of Artificial Sequence: Synthetic oligonucleotide
gcccucguugucugguucg

SEQ ID NO: 870265 - RNA, 19 nt, Artificial Sequence
  Description of Artificial Sequence: Synthetic oligonucleotide
uggauccuuggucguuguc

SEQ ID NO: 870266 - RNA, 19 nt, Artificial Sequence
  Description of Artificial Sequence: Synthetic oligonucleotide
ugcaaucauucgaccgauu

SEQ ID NO: 870267 - RNA, 19 nt, Artificial Sequence
  Description of Artificial Sequence: Synthetic oligonucleotide
aguccagucuuugcgucaa

SEQ ID NO: 870268 - RNA, 19 nt, Artificial Sequence
  Description of Artificial Sequence: Synthetic oligonucleotide
augaugcuucugugcacaa

SEQ ID NO: 870269 - RNA, 19 nt, Artificial Sequence
  Description of Artificial Sequence: Synthetic oligonucleotide
ggcuuaguuccacuuuguc

SEQ ID NO: 870270 - RNA, 19 nt, Artificial Sequence
  Description of Artificial Sequence: Synthetic oligonucleotide
aaagagcggcgagcuccag

SEQ ID NO: 870271 - RNA, 19 nt, Artificial Sequence
  Description of Artificial Sequence: Synthetic oligonucleotide
augugccuagaaguuccug

SEQ ID NO: 870272 - RNA, 19 nt, Artificial Sequence
  Description of Artificial Sequence: Synthetic oligonucleotide
ucgucauuacugggacuac

SEQ ID NO: 870273 - RNA, 19 nt, Artificial Sequence
  Description of Artificial Sequence: Synthetic oligonucleotide
gcuaccaaugaugcuucug

SEQ ID NO: 870274 - RNA, 19 nt, Artificial Sequence
  Description of Artificial Sequence: Synthetic oligonucleotide
cuacagcggccauggcaag

SEQ ID NO: 870275 - RNA, 19 nt, Artificial Sequence
  Description of Artificial Sequence: Synthetic oligonucleotide
ugaguccucuuugggccac

SEQ ID NO: 870276 - RNA, 19 nt, Artificial Sequence
  Description of Artificial Sequence: Synthetic oligonucleotide
acggguucaugaaacugaa

SEQ ID NO: 870277 - RNA, 19 nt, Artificial Sequence
  Description of Artificial Sequence: Synthetic oligonucleotide
ccagucuuugcgucaauga

SEQ ID NO: 870278 - RNA, 19 nt, Artificial Sequence
  Description of Artificial Sequence: Synthetic oligonucleotide
gcccgcaucugcuuccaag

SEQ ID NO: 870279 - RNA, 19 nt, Artificial Sequence
  Description of Artificial Sequence: Synthetic oligonucleotide
ucgggauggcccagggguu

SEQ ID NO: 870280 - RNA, 19 nt, Artificial Sequence
  Description of Artificial Sequence: Synthetic oligonucleotide
auggcgugucgagaaacau

SEQ ID NO: 870281 - RNA, 19 nt, Artificial Sequence
  Description of Artificial Sequence: Synthetic oligonucleotide
caugguagauugacuugua

SEQ ID NO: 870282 - RNA, 19 nt, Artificial Sequence
  Description of Artificial Sequence: Synthetic oligonucleotide
gcguacuugugauguucag

SEQ ID NO: 870283 - RNA, 19 nt, Artificial Sequence
  Description of Artificial Sequence: Synthetic oligonucleotide
gaaccgucuuugaucuuaa

SEQ ID NO: 870284 - RNA, 19 nt, Artificial Sequence
  Description of Artificial Sequence: Synthetic oligonucleotide
ggaaccgucuuugaucuua

SEQ ID NO: 870285 - RNA, 19 nt, Artificial Sequence
  Description of Artificial Sequence: Synthetic oligonucleotide
gcaaucauucgaccgauuu

SEQ ID NO: 870286 - RNA, 19 nt, Artificial Sequence
  Description of Artificial Sequence: Synthetic oligonucleotide
caucuauggcgugucgaga

SEQ ID NO: 870287 - RNA, 19 nt, Artificial Sequence
  Description of Artificial Sequence: Synthetic oligonucleotide
caaacucgaugaugagaaa

SEQ ID NO: 870288 - RNA, 19 nt, Artificial Sequence
  Description of Artificial Sequence: Synthetic oligonucleotide
cucccuauccaguaagcuu

SEQ ID NO: 870289 - RNA, 19 nt, Artificial Sequence
  Description of Artificial Sequence: Synthetic oligonucleotide
caaucauucgaccgauuuu

SEQ ID NO: 870290 - RNA, 19 nt, Artificial Sequence
  Description of Artificial Sequence: Synthetic oligonucleotide
aaccggaaguccagucuuu

SEQ ID NO: 870291 - RNA, 19 nt, Artificial Sequence
  Description of Artificial Sequence: Synthetic oligonucleotide
ccggaaguccagucuuugc

SEQ ID NO: 870292 - RNA, 19 nt, Artificial Sequence
  Description of Artificial Sequence: Synthetic oligonucleotide
ggauucuuacaaggaagaa

SEQ ID NO: 870293 - RNA, 19 nt, Artificial Sequence
  Description of Artificial Sequence: Synthetic oligonucleotide
guuggguccccgccuucca

SEQ ID NO: 870294 - RNA, 19 nt, Artificial Sequence
  Description of Artificial Sequence: Synthetic oligonucleotide
gagcggcgagcuccagagc

SEQ ID NO: 870295 - RNA, 19 nt, Artificial Sequence
  Description of Artificial Sequence: Synthetic oligonucleotide
caucgacuucguaguguga

SEQ ID NO: 870296 - RNA, 19 nt, Artificial Sequence
  Description of Artificial Sequence: Synthetic oligonucleotide
gguucucaccaagaauaga

SEQ ID NO: 870297 - RNA, 19 nt, Artificial Sequence
  Description of Artificial Sequence: Synthetic oligonucleotide
gcuuuaugauacaauuagu

SEQ ID NO: 870298 - RNA, 19 nt, Artificial Sequence
  Description of Artificial Sequence: Synthetic oligonucleotide
uuuccccguucaacugguu

SEQ ID NO: 870299 - RNA, 19 nt, Artificial Sequence
  Description of Artificial Sequence: Synthetic oligonucleotide
gggaggcguacuugugaug

SEQ ID NO: 870300 - RNA, 19 nt, Artificial Sequence
  Description of Artificial Sequence: Synthetic oligonucleotide
cggacucagagacgaagag

SEQ ID NO: 870301 - RNA, 19 nt, Artificial Sequence
  Description of Artificial Sequence: Synthetic oligonucleotide
gccuagaaguuccuguggu

SEQ ID NO: 870302 - RNA, 19 nt, Artificial Sequence
  Description of Artificial Sequence: Synthetic oligonucleotide
cagggguuauaucuguuuu

SEQ ID NO: 870303 - RNA, 19 nt, Artificial Sequence
  Description of Artificial Sequence: Synthetic oligonucleotide
gguccacggguucaugaaa

SEQ ID NO: 870304 - RNA, 19 nt, Artificial Sequence
  Description of Artificial Sequence: Synthetic oligonucleotide
uugcgucaaugagucgcuc

SEQ ID NO: 870305 - RNA, 19 nt, Artificial Sequence
  Description of Artificial Sequence: Synthetic oligonucleotide
cuaucauaucgaugccuau

SEQ ID NO: 870306 - RNA, 19 nt, Artificial Sequence
  Description of Artificial Sequence: Synthetic oligonucleotide
gucuucguccagccccauc

SEQ ID NO: 870307 - RNA, 19 nt, Artificial Sequence
  Description of Artificial Sequence: Synthetic oligonucleotide
ccacggguucaugaaacug

SEQ ID NO: 870308 - RNA, 19 nt, Artificial Sequence
  Description of Artificial Sequence: Synthetic oligonucleotide
uaaggucauucuggcuaua

SEQ ID NO: 870309 - RNA, 19 nt, Artificial Sequence
  Description of Artificial Sequence: Synthetic oligonucleotide
cuuccuugguccacggguu

SEQ ID NO: 870310 - RNA, 19 nt, Artificial Sequence
  Description of Artificial Sequence: Synthetic oligonucleotide
gggucucuugagccugccc

SEQ ID NO: 870311 - RNA, 19 nt, Artificial Sequence
  Description of Artificial Sequence: Synthetic oligonucleotide
gauggcccagggguuauau

SEQ ID NO: 870312 - RNA, 19 nt, Artificial Sequence
  Description of Artificial Sequence: Synthetic oligonucleotide
cccaaacucgaugaugaga

SEQ ID NO: 870313 - RNA, 19 nt, Artificial Sequence
  Description of Artificial Sequence: Synthetic oligonucleotide
cacagucgggauggcccag

SEQ ID NO: 870314 - RNA, 19 nt, Artificial Sequence
  Description of Artificial Sequence: Synthetic oligonucleotide
gcacagucgggauggccca

SEQ ID NO: 870315 - RNA, 19 nt, Artificial Sequence
  Description of Artificial Sequence: Synthetic oligonucleotide
cugagauuacagcccucgu

SEQ ID NO: 870316 - RNA, 19 nt, Artificial Sequence
  Description of Artificial Sequence: Synthetic oligonucleotide
gcccaauugcaacgaggca

SEQ ID NO: 870317 - RNA, 19 nt, Artificial Sequence
  Description of Artificial Sequence: Synthetic oligonucleotide
ccucuuauccuguggauuu

SEQ ID NO: 870318 - RNA, 19 nt, Artificial Sequence
  Description of Artificial Sequence: Synthetic oligonucleotide
ccuagaaguuccuguggua

SEQ ID NO: 870319 - RNA, 19 nt, Artificial Sequence
  Description of Artificial Sequence: Synthetic oligonucleotide
aggaaccgucuuugaucuu

SEQ ID NO: 870320 - RNA, 19 nt, Artificial Sequence
  Description of Artificial Sequence: Synthetic oligonucleotide
cuagcccaaacucgaugau

SEQ ID NO: 870321 - RNA, 19 nt, Artificial Sequence
  Description of Artificial Sequence: Synthetic oligonucleotide
gucgagaaacauacuccau

SEQ ID NO: 870322 - RNA, 19 nt, Artificial Sequence
  Description of Artificial Sequence: Synthetic oligonucleotide
cuguugcccucuggucuac

SEQ ID NO: 870323 - RNA, 19 nt, Artificial Sequence
  Description of Artificial Sequence: Synthetic oligonucleotide
cugaaccaucgacuucgua

SEQ ID NO: 870324 - RNA, 19 nt, Artificial Sequence
  Description of Artificial Sequence: Synthetic oligonucleotide
gucccuccauuuagaaucu

SEQ ID NO: 870325 - RNA, 19 nt, Artificial Sequence
  Description of Artificial Sequence: Synthetic oligonucleotide
caacgaggcagcugagauu

SEQ ID NO: 870326 - RNA, 19 nt, Artificial Sequence
  Description of Artificial Sequence: Synthetic oligonucleotide
ccaggcccgcaucugcuuc

SEQ ID NO: 870327 - RNA, 19 nt, Artificial Sequence
  Description of Artificial Sequence: Synthetic oligonucleotide
aggcccgcaucugcuucca

SEQ ID NO: 870328 - RNA, 19 nt, Artificial Sequence
  Description of Artificial Sequence: Synthetic oligonucleotide
gcaagucgcuaaagucaac

SEQ ID NO: 870329 - RNA, 19 nt, Artificial Sequence
  Description of Artificial Sequence: Synthetic oligonucleotide
cccuauccaguaagcuuca

SEQ ID NO: 870330 - RNA, 19 nt, Artificial Sequence
  Description of Artificial Sequence: Synthetic oligonucleotide
caggaccacccaggcccgc

SEQ ID NO: 870331 - RNA, 19 nt, Artificial Sequence
  Description of Artificial Sequence: Synthetic oligonucleotide
gcccagggguuauaucugu

SEQ ID NO: 870332 - RNA, 19 nt, Artificial Sequence
  Description of Artificial Sequence: Synthetic oligonucleotide
cguugucuaucauaucgau

SEQ ID NO: 870333 - RNA, 19 nt, Artificial Sequence
  Description of Artificial Sequence: Synthetic oligonucleotide
ccgcuguaagcugugggaa

SEQ ID NO: 870334 - RNA, 19 nt, Artificial Sequence
  Description of Artificial Sequence: Synthetic oligonucleotide
gcggcgagcuccagagcac

SEQ ID NO: 870335 - RNA, 19 nt, Artificial Sequence
  Description of Artificial Sequence: Synthetic oligonucleotide
gucgcucccggggugcggu

SEQ ID NO: 870336 - RNA, 19 nt, Artificial Sequence
  Description of Artificial Sequence: Synthetic oligonucleotide
cagcuagcccaaacucgau

SEQ ID NO: 870337 - RNA, 19 nt, Artificial Sequence
  Description of Artificial Sequence: Synthetic oligonucleotide
gcggccauggcaagucgcu

SEQ ID NO: 870338 - RNA, 19 nt, Artificial Sequence
  Description of Artificial Sequence: Synthetic oligonucleotide
guccagucuuugcgucaau

SEQ ID NO: 870339 - RNA, 19 nt, Artificial Sequence
  Description of Artificial Sequence: Synthetic oligonucleotide
ggcuauaauugaggaucuu

SEQ ID NO: 870340 - RNA, 19 nt, Artificial Sequence
  Description of Artificial Sequence: Synthetic oligonucleotide
cagugggaugaguccucuu

SEQ ID NO: 870341 - RNA, 19 nt, Artificial Sequence
  Description of Artificial Sequence: Synthetic oligonucleotide
ccucgucauuacugggacu

SEQ ID NO: 870342 - RNA, 19 nt, Artificial Sequence
  Description of Artificial Sequence: Synthetic oligonucleotide
cccucuuauccuguggauu

SEQ ID NO: 870343 - RNA, 19 nt, Artificial Sequence
  Description of Artificial Sequence: Synthetic oligonucleotide
cugggacuacuggauccuu

SEQ ID NO: 870344 - RNA, 19 nt, Artificial Sequence
  Description of Artificial Sequence: Synthetic oligonucleotide
cguccagccccaucuuugu

SEQ ID NO: 870345 - RNA, 19 nt, Artificial Sequence
  Description of Artificial Sequence: Synthetic oligonucleotide
gcgugucgagaaacauacu

SEQ ID NO: 870346 - RNA, 19 nt, Artificial Sequence
  Description of Artificial Sequence: Synthetic oligonucleotide
ggauggcccagggguuaua

SEQ ID NO: 870347 - RNA, 19 nt, Artificial Sequence
  Description of Artificial Sequence: Synthetic oligonucleotide
ggcccgcaucugcuuccaa

SEQ ID NO: 870348 - RNA, 19 nt, Artificial Sequence
  Description of Artificial Sequence: Synthetic oligonucleotide
gggauggcccagggguuau

SEQ ID NO: 870349 - RNA, 19 nt, Artificial Sequence
  Description of Artificial Sequence: Synthetic oligonucleotide
cggcgagcuccagagcaca

SEQ ID NO: 870350 - RNA, 19 nt, Artificial Sequence
  Description of Artificial Sequence: Synthetic oligonucleotide
ccucguugucugguucguu

SEQ ID NO: 870351 - RNA, 19 nt, Artificial Sequence
  Description of Artificial Sequence: Synthetic oligonucleotide
ccccgccuuccaggacauu

SEQ ID NO: 870352 - RNA, 19 nt, Artificial Sequence
  Description of Artificial Sequence: Synthetic oligonucleotide
aagacuuccacucugagug

SEQ ID NO: 870353 - RNA, 19 nt, Artificial Sequence
  Description of Artificial Sequence: Synthetic oligonucleotide
agaaaauucaccucgucgc

SEQ ID NO: 870354 - RNA, 19 nt, Artificial Sequence
  Description of Artificial Sequence: Synthetic oligonucleotide
uuuauguugaccuaaggug

SEQ ID NO: 870355 - RNA, 19 nt, Artificial Sequence
  Description of Artificial Sequence: Synthetic oligonucleotide
cuugcuaacaugauguugg

SEQ ID NO: 870356 - RNA, 19 nt, Artificial Sequence
  Description of Artificial Sequence: Synthetic oligonucleotide
guuucauugguacaaaccg

SEQ ID NO: 870357 - RNA, 19 nt, Artificial Sequence
  Description of Artificial Sequence: Synthetic oligonucleotide
aaauacuucccaucagggc

SEQ ID NO: 870358 - RNA, 19 nt, Artificial Sequence
  Description of Artificial Sequence: Synthetic oligonucleotide
aacgccucguuccacaucc

SEQ ID NO: 870359 - RNA, 19 nt, Artificial Sequence
  Description of Artificial Sequence: Synthetic oligonucleotide
aaagucacacguuucauug

SEQ ID NO: 870360 - RNA, 19 nt, Artificial Sequence
  Description of Artificial Sequence: Synthetic oligonucleotide
uuuguguuuacuuucggag

SEQ ID NO: 870361 - RNA, 19 nt, Artificial Sequence
  Description of Artificial Sequence: Synthetic oligonucleotide
ucauuaagguuccauaucc

SEQ ID NO: 870362 - RNA, 19 nt, Artificial Sequence
  Description of Artificial Sequence: Synthetic oligonucleotide
ugaaugaaaaggaaacugc

SEQ ID NO: 870363 - RNA, 19 nt, Artificial Sequence
  Description of Artificial Sequence: Synthetic oligonucleotide
uaccagaaaauucaccucg

SEQ ID NO: 870364 - RNA, 19 nt, Artificial Sequence
  Description of Artificial Sequence: Synthetic oligonucleotide
uuauguugaccuaaggugc

SEQ ID NO: 870365 - RNA, 19 nt, Artificial Sequence
  Description of Artificial Sequence: Synthetic oligonucleotide
aaaccaugcaccauguagc

SEQ ID NO: 870366 - RNA, 19 nt, Artificial Sequence
  Description of Artificial Sequence: Synthetic oligonucleotide
ugagugauuauuuauugca

SEQ ID NO: 870367 - RNA, 19 nt, Artificial Sequence
  Description of Artificial Sequence: Synthetic oligonucleotide
agaacugucgcuuugcuug

SEQ ID NO: 870368 - RNA, 19 nt, Artificial Sequence
  Description of Artificial Sequence: Synthetic oligonucleotide
agaguguggaugcaaacgc

SEQ ID NO: 870369 - RNA, 19 nt, Artificial Sequence
  Description of Artificial Sequence: Synthetic oligonucleotide
auauuccugugauacaacc

SEQ ID NO: 870370 - RNA, 19 nt, Artificial Sequence
  Description of Artificial Sequence: Synthetic oligonucleotide
aaagguaguguuguucugc

SEQ ID NO: 870371 - RNA, 19 nt, Artificial Sequence
  Description of Artificial Sequence: Synthetic oligonucleotide
gauuauuuauugcaugggc

SEQ ID NO: 870372 - RNA, 19 nt, Artificial Sequence
  Description of Artificial Sequence: Synthetic oligonucleotide
agggaaauaccauaagggg

SEQ ID NO: 870373 - RNA, 19 nt, Artificial Sequence
  Description of Artificial Sequence: Synthetic oligonucleotide
uccauauucuugcaaagcc

SEQ ID NO: 870374 - RNA, 19 nt, Artificial Sequence
  Description of Artificial Sequence: Synthetic oligonucleotide
ucggagaucuaaaacacag

SEQ ID NO: 870375 - RNA, 19 nt, Artificial Sequence
  Description of Artificial Sequence: Synthetic oligonucleotide
uauaauuccccuuuuguuc

SEQ ID NO: 870376 - RNA, 19 nt, Artificial Sequence
  Description of Artificial Sequence: Synthetic oligonucleotide
gagggaaauaccauaaggg

SEQ ID NO: 870377 - RNA, 19 nt, Artificial Sequence
  Description of Artificial Sequence: Synthetic oligonucleotide
aaauucaccucgucgcugg

SEQ ID NO: 870378 - RNA, 19 nt, Artificial Sequence
  Description of Artificial Sequence: Synthetic oligonucleotide
aagguaguguuguucugcc

SEQ ID NO: 870379 - RNA, 19 nt, Artificial Sequence
  Description of Artificial Sequence: Synthetic oligonucleotide
auagcauugaccucauuag

SEQ ID NO: 870380 - RNA, 19 nt, Artificial Sequence
  Description of Artificial Sequence: Synthetic oligonucleotide
gaacaguagaaucaaauga

SEQ ID NO: 870381 - RNA, 19 nt, Artificial Sequence
  Description of Artificial Sequence: Synthetic oligonucleotide
gaugcaaacgccucguucc

SEQ ID NO: 870382 - RNA, 19 nt, Artificial Sequence
  Description of Artificial Sequence: Synthetic oligonucleotide
gauacaaccauguguauga

SEQ ID NO: 870383 - RNA, 19 nt, Artificial Sequence
  Description of Artificial Sequence: Synthetic oligonucleotide
gaacaagucaaguucacac

SEQ ID NO: 870384 - RNA, 19 nt, Artificial Sequence
  Description of Artificial Sequence: Synthetic oligonucleotide
augguauauaucucuuugc

SEQ ID NO: 870385 - RNA, 19 nt, Artificial Sequence
  Description of Artificial Sequence: Synthetic oligonucleotide
agugucaugucaucagagc

SEQ ID NO: 870386 - RNA, 19 nt, Artificial Sequence
  Description of Artificial Sequence: Synthetic oligonucleotide
uucaaggcaaagauggggc

SEQ ID NO: 870387 - RNA, 19 nt, Artificial Sequence
  Description of Artificial Sequence: Synthetic oligonucleotide
gaagguuuugacugggcgg

SEQ ID NO: 870388 - RNA, 19 nt, Artificial Sequence
  Description of Artificial Sequence: Synthetic oligonucleotide
aaaccggucuuuuggagag

SEQ ID NO: 870389 - RNA, 19 nt, Artificial Sequence
  Description of Artificial Sequence: Synthetic oligonucleotide
ucaaauaugccgccugugc

SEQ ID NO: 870390 - RNA, 19 nt, Artificial Sequence
  Description of Artificial Sequence: Synthetic oligonucleotide
uuuauguucuuucuucccu

SEQ ID NO: 870391 - RNA, 19 nt, Artificial Sequence
  Description of Artificial Sequence: Synthetic oligonucleotide
gauauggacacacuuguca

SEQ ID NO: 870392 - RNA, 19 nt, Artificial Sequence
  Description of Artificial Sequence: Synthetic oligonucleotide
ucuggaugcagaguuaagg

SEQ ID NO: 870393 - RNA, 19 nt, Artificial Sequence
  Description of Artificial Sequence: Synthetic oligonucleotide
aaccaaaccaugcaccaug

SEQ ID NO: 870394 - RNA, 19 nt, Artificial Sequence
  Description of Artificial Sequence: Synthetic oligonucleotide
uguaguauccaaauugaua

SEQ ID NO: 870395 - RNA, 19 nt, Artificial Sequence
  Description of Artificial Sequence: Synthetic oligonucleotide
ugcgcaucccaaauuauag

SEQ ID NO: 870396 - RNA, 19 nt, Artificial Sequence
  Description of Artificial Sequence: Synthetic oligonucleotide
uuauuuauugcaugggcuc

SEQ ID NO: 870397 - RNA, 19 nt, Artificial Sequence
  Description of Artificial Sequence: Synthetic oligonucleotide
guacaaaccggucuuuugg

SEQ ID NO: 870398 - RNA, 19 nt, Artificial Sequence
  Description of Artificial Sequence: Synthetic oligonucleotide
cuagguggaaaccauauuc

SEQ ID NO: 870399 - RNA, 19 nt, Artificial Sequence
  Description of Artificial Sequence: Synthetic oligonucleotide
agugauuauuuauugcaug

SEQ ID NO: 870400 - RNA, 19 nt, Artificial Sequence
  Description of Artificial Sequence: Synthetic oligonucleotide
uuucggagaucuaaaacac

SEQ ID NO: 870401 - RNA, 19 nt, Artificial Sequence
  Description of Artificial Sequence: Synthetic oligonucleotide
uauaucucuuugcugugag

SEQ ID NO: 870402 - RNA, 19 nt, Artificial Sequence
  Description of Artificial Sequence: Synthetic oligonucleotide
uuuugagugauuauuuauu

SEQ ID NO: 870403 - RNA, 19 nt, Artificial Sequence
  Description of Artificial Sequence: Synthetic oligonucleotide
aaauaugccgccugugccu

SEQ ID NO: 870404 - RNA, 19 nt, Artificial Sequence
  Description of Artificial Sequence: Synthetic oligonucleotide
caguagaaucaaaugaagc

SEQ ID NO: 870405 - RNA, 19 nt, Artificial Sequence
  Description of Artificial Sequence: Synthetic oligonucleotide
gauagcauugaccucauua

SEQ ID NO: 870406 - RNA, 19 nt, Artificial Sequence
  Description of Artificial Sequence: Synthetic oligonucleotide
cugcaugaagcaaagguag

SEQ ID NO: 870407 - RNA, 19 nt, Artificial Sequence
  Description of Artificial Sequence: Synthetic oligonucleotide
uuccaaguagacucgaaca

SEQ ID NO: 870408 - RNA, 19 nt, Artificial Sequence
  Description of Artificial Sequence: Synthetic oligonucleotide
uagguuaccaucuucuguc

SEQ ID NO: 870409 - RNA, 19 nt, Artificial Sequence
  Description of Artificial Sequence: Synthetic oligonucleotide
guccuuauuacugggaacg

SEQ ID NO: 870410 - RNA, 19 nt, Artificial Sequence
  Description of Artificial Sequence: Synthetic oligonucleotide
uuuccaaguagacucgaac

SEQ ID NO: 870411 - RNA, 19 nt, Artificial Sequence
  Description of Artificial Sequence: Synthetic oligonucleotide
ugaagcaaagguaguguug

SEQ ID NO: 870412 - RNA, 19 nt, Artificial Sequence
  Description of Artificial Sequence: Synthetic oligonucleotide
ucgaacaguagaaucaaau

SEQ ID NO: 870413 - RNA, 19 nt, Artificial Sequence
  Description of Artificial Sequence: Synthetic oligonucleotide
cucauuaguauguccuugg

SEQ ID NO: 870414 - RNA, 19 nt, Artificial Sequence
  Description of Artificial Sequence: Synthetic oligonucleotide
uaccauaaggggcagauuu

SEQ ID NO: 870415 - RNA, 19 nt, Artificial Sequence
  Description of Artificial Sequence: Synthetic oligonucleotide
uugagugauuauuuauugc

SEQ ID NO: 870416 - RNA, 19 nt, Artificial Sequence
  Description of Artificial Sequence: Synthetic oligonucleotide
aacagugucccaucgcugu

SEQ ID NO: 870417 - RNA, 19 nt, Artificial Sequence
  Description of Artificial Sequence: Synthetic oligonucleotide
acugggaacgucauguccc

SEQ ID NO: 870418 - RNA, 19 nt, Artificial Sequence
  Description of Artificial Sequence: Synthetic oligonucleotide
uuugcuugguggaauuuca

SEQ ID NO: 870419 - RNA, 19 nt, Artificial Sequence
  Description of Artificial Sequence: Synthetic oligonucleotide
guagcgauauaccagaaaa

SEQ ID NO: 870420 - RNA, 19 nt, Artificial Sequence
  Description of Artificial Sequence: Synthetic oligonucleotide
aucagaugcacuggcaccc

SEQ ID NO: 870421 - RNA, 19 nt, Artificial Sequence
  Description of Artificial Sequence: Synthetic oligonucleotide
aguagacucgaacaaguca

SEQ ID NO: 870422 - RNA, 19 nt, Artificial Sequence
  Description of Artificial Sequence: Synthetic oligonucleotide
uccacuuaaugguauauau

SEQ ID NO: 870423 - RNA, 19 nt, Artificial Sequence
  Description of Artificial Sequence: Synthetic oligonucleotide
ugaggugacguccuuauua

SEQ ID NO: 870424 - RNA, 19 nt, Artificial Sequence
  Description of Artificial Sequence: Synthetic oligonucleotide
uguaugacuuuguauuugu

SEQ ID NO: 870425 - RNA, 19 nt, Artificial Sequence
  Description of Artificial Sequence: Synthetic oligonucleotide
aagucacacguuucauugg

SEQ ID NO: 870426 - RNA, 19 nt, Artificial Sequence
  Description of Artificial Sequence: Synthetic oligonucleotide
auccaaauugauaggaggg

SEQ ID NO: 870427 - RNA, 19 nt, Artificial Sequence
  Description of Artificial Sequence: Synthetic oligonucleotide
ggagggaaauaccauaagg

SEQ ID NO: 870428 - RNA, 19 nt, Artificial Sequence
  Description of Artificial Sequence: Synthetic oligonucleotide
cauuugauagcauugaccu

SEQ ID NO: 870429 - RNA, 19 nt, Artificial Sequence
  Description of Artificial Sequence: Synthetic oligonucleotide
uaagccugcacacaugaau

SEQ ID NO: 870430 - RNA, 19 nt, Artificial Sequence
  Description of Artificial Sequence: Synthetic oligonucleotide
aaauugauaggagggaaau

SEQ ID NO: 870431 - RNA, 19 nt, Artificial Sequence
  Description of Artificial Sequence: Synthetic oligonucleotide
uauuccugugauacaacca

SEQ ID NO: 870432 - RNA, 19 nt, Artificial Sequence
  Description of Artificial Sequence: Synthetic oligonucleotide
ugucccugauuccuggagg

SEQ ID NO: 870433 - RNA, 19 nt, Artificial Sequence
  Description of Artificial Sequence: Synthetic oligonucleotide
ucucauuaagguuccauau

SEQ ID NO: 870434 - RNA, 19 nt, Artificial Sequence
  Description of Artificial Sequence: Synthetic oligonucleotide
aauaccauaaggggcagau

SEQ ID NO: 870435 - RNA, 19 nt, Artificial Sequence
  Description of Artificial Sequence: Synthetic oligonucleotide
uggaaaccaaaccaugcac

SEQ ID NO: 870436 - RNA, 19 nt, Artificial Sequence
  Description of Artificial Sequence: Synthetic oligonucleotide
guagaaucaaaugaagcac

SEQ ID NO: 870437 - RNA, 19 nt, Artificial Sequence
  Description of Artificial Sequence: Synthetic oligonucleotide
cugaguguuccagauaugg

SEQ ID NO: 870438 - RNA, 19 nt, Artificial Sequence
  Description of Artificial Sequence: Synthetic oligonucleotide
uuauguucuuucuucccug

SEQ ID NO: 870439 - RNA, 19 nt, Artificial Sequence
  Description of Artificial Sequence: Synthetic oligonucleotide
ucccuguucagucaugaga

SEQ ID NO: 870440 - RNA, 19 nt, Artificial Sequence
  Description of Artificial Sequence: Synthetic oligonucleotide
auuauuuauugcaugggcu

SEQ ID NO: 870441 - RNA, 19 nt, Artificial Sequence
  Description of Artificial Sequence: Synthetic oligonucleotide
aggucaugaacacauacau

SEQ ID NO: 870442 - RNA, 19 nt, Artificial Sequence
  Description of Artificial Sequence: Synthetic oligonucleotide
caaauaugccgccugugcc

SEQ ID NO: 870443 - RNA, 19 nt, Artificial Sequence
  Description of Artificial Sequence: Synthetic oligonucleotide
uguccauauucuugcaaag

SEQ ID NO: 870444 - RNA, 19 nt, Artificial Sequence
  Description of Artificial Sequence: Synthetic oligonucleotide
uccugugauacaaccaugu

SEQ ID NO: 870445 - RNA, 19 nt, Artificial Sequence
  Description of Artificial Sequence: Synthetic oligonucleotide
uaaggugcuggcuagguua

SEQ ID NO: 870446 - RNA, 19 nt, Artificial Sequence
  Description of Artificial Sequence: Synthetic oligonucleotide
uuguguuuacuuucggaga

SEQ ID NO: 870447 - RNA, 19 nt, Artificial Sequence
  Description of Artificial Sequence: Synthetic oligonucleotide
uuggucagaguguggaugc

SEQ ID NO: 870448 - RNA, 19 nt, Artificial Sequence
  Description of Artificial Sequence: Synthetic oligonucleotide
uauauaucucuuugcugug

SEQ ID NO: 870449 - RNA, 19 nt, Artificial Sequence
  Description of Artificial Sequence: Synthetic oligonucleotide
ucacacguuucauugguac

SEQ ID NO: 870450 - RNA, 19 nt, Artificial Sequence
  Description of Artificial Sequence: Synthetic oligonucleotide
uggauggaaaccaaaccau

SEQ ID NO: 870451 - RNA, 19 nt, Artificial Sequence
  Description of Artificial Sequence: Synthetic oligonucleotide
uguucagucaugagagccu

SEQ ID NO: 870452 - RNA, 19 nt, Artificial Sequence
  Description of Artificial Sequence: Synthetic oligonucleotide
gugggacuccacuuaaugg

SEQ ID NO: 870453 - RNA, 19 nt, Artificial Sequence
  Description of Artificial Sequence: Synthetic oligonucleotide
gugacguccuuauuacugg

SEQ ID NO: 870454 - RNA, 19 nt, Artificial Sequence
  Description of Artificial Sequence: Synthetic oligonucleotide
aagguuuugacugggcggu

SEQ ID NO: 870455 - RNA, 19 nt, Artificial Sequence
  Description of Artificial Sequence: Synthetic oligonucleotide
uuugacugggcggucacag

SEQ ID NO: 870456 - RNA, 19 nt, Artificial Sequence
  Description of Artificial Sequence: Synthetic oligonucleotide
ucgcugguaaugcucaucu

SEQ ID NO: 870457 - RNA, 19 nt, Artificial Sequence
  Description of Artificial Sequence: Synthetic oligonucleotide
uauguugaccuaaggugcu

SEQ ID NO: 870458 - RNA, 19 nt, Artificial Sequence
  Description of Artificial Sequence: Synthetic oligonucleotide
uucuagguggaaaccauau

SEQ ID NO: 870459 - RNA, 19 nt, Artificial Sequence
  Description of Artificial Sequence: Synthetic oligonucleotide
aaccaugcaccauguagcu

SEQ ID NO: 870460 - RNA, 19 nt, Artificial Sequence
  Description of Artificial Sequence: Synthetic oligonucleotide
cuggauggaaaccaaacca

SEQ ID NO: 870461 - RNA, 19 nt, Artificial Sequence
  Description of Artificial Sequence: Synthetic oligonucleotide
acaccucaaauaugccgcc

SEQ ID NO: 870462 - RNA, 19 nt, Artificial Sequence
  Description of Artificial Sequence: Synthetic oligonucleotide
uacauccugcuucauacuc

SEQ ID NO: 870463 - RNA, 19 nt, Artificial Sequence
  Description of Artificial Sequence: Synthetic oligonucleotide
gagguagcgauauaccaga

SEQ ID NO: 870464 - RNA, 19 nt, Artificial Sequence
  Description of Artificial Sequence: Synthetic oligonucleotide
agcauucuagguggaaacc

SEQ ID NO: 870465 - RNA, 19 nt, Artificial Sequence
  Description of Artificial Sequence: Synthetic oligonucleotide
aauaugccgccugugccuc

SEQ ID NO: 870466 - RNA, 19 nt, Artificial Sequence
  Description of Artificial Sequence: Synthetic oligonucleotide
ugaaugcacaugucugugc

SEQ ID NO: 870467 - RNA, 19 nt, Artificial Sequence
  Description of Artificial Sequence: Synthetic oligonucleotide
aaaauucaccucgucgcug

SEQ ID NO: 870468 - RNA, 19 nt, Artificial Sequence
  Description of Artificial Sequence: Synthetic oligonucleotide
uucucauuaagguuccaua

SEQ ID NO: 870469 - RNA, 19 nt, Artificial Sequence
  Description of Artificial Sequence: Synthetic oligonucleotide
uccagauauggacacacuu

SEQ ID NO: 870470 - RNA, 19 nt, Artificial Sequence
  Description of Artificial Sequence: Synthetic oligonucleotide
ggaagguuuugacugggcg

SEQ ID NO: 870471 - RNA, 19 nt, Artificial Sequence
  Description of Artificial Sequence: Synthetic oligonucleotide
cacacuugucaaaggaccc

SEQ ID NO: 870472 - RNA, 19 nt, Artificial Sequence
  Description of Artificial Sequence: Synthetic oligonucleotide
auugguacaaaccggucuu

SEQ ID NO: 870473 - RNA, 19 nt, Artificial Sequence
  Description of Artificial Sequence: Synthetic oligonucleotide
ucuacauuuuguguuuacu

SEQ ID NO: 870474 - RNA, 19 nt, Artificial Sequence
  Description of Artificial Sequence: Synthetic oligonucleotide
ucaugaacacauacauccu

SEQ ID NO: 870475 - RNA, 19 nt, Artificial Sequence
  Description of Artificial Sequence: Synthetic oligonucleotide
aaugcacaugucugugcug

SEQ ID NO: 870476 - RNA, 19 nt, Artificial Sequence
  Description of Artificial Sequence: Synthetic oligonucleotide
uuacuuucggagaucuaaa

SEQ ID NO: 870477 - RNA, 19 nt, Artificial Sequence
  Description of Artificial Sequence: Synthetic oligonucleotide
uacaaaccggucuuuugga

SEQ ID NO: 870478 - RNA, 19 nt, Artificial Sequence
  Description of Artificial Sequence: Synthetic oligonucleotide
gaggugacguccuuauuac

SEQ ID NO: 870479 - RNA, 19 nt, Artificial Sequence
  Description of Artificial Sequence: Synthetic oligonucleotide
cagaguguggaugcaaacg

SEQ ID NO: 870480 - RNA, 19 nt, Artificial Sequence
  Description of Artificial Sequence: Synthetic oligonucleotide
ugaccuaaggugcuggcua

SEQ ID NO: 870481 - RNA, 19 nt, Artificial Sequence
  Description of Artificial Sequence: Synthetic oligonucleotide
agucacacguuucauuggu

SEQ ID NO: 870482 - RNA, 19 nt, Artificial Sequence
  Description of Artificial Sequence: Synthetic oligonucleotide
uccaaauugauaggaggga

SEQ ID NO: 870483 - RNA, 19 nt, Artificial Sequence
  Description of Artificial Sequence: Synthetic oligonucleotide
gguauauaucucuuugcug

SEQ ID NO: 870484 - RNA, 19 nt, Artificial Sequence
  Description of Artificial Sequence: Synthetic oligonucleotide
acuuaaugguauauaucuc

SEQ ID NO: 870485 - RNA, 19 nt, Artificial Sequence
  Description of Artificial Sequence: Synthetic oligonucleotide
acaaaccggucuuuuggag

SEQ ID NO: 870486 - RNA, 19 nt, Artificial Sequence
  Description of Artificial Sequence: Synthetic oligonucleotide
gaaaccauauuccugugau

SEQ ID NO: 870487 - RNA, 19 nt, Artificial Sequence
  Description of Artificial Sequence: Synthetic oligonucleotide
ugaacacauacauccugcu

SEQ ID NO: 870488 - RNA, 19 nt, Artificial Sequence
  Description of Artificial Sequence: Synthetic oligonucleotide
uucaccucgucgcugguaa

SEQ ID NO: 870489 - RNA, 19 nt, Artificial Sequence
  Description of Artificial Sequence: Synthetic oligonucleotide
uuagaaugguuuuguuuuc

SEQ ID NO: 870490 - RNA, 19 nt, Artificial Sequence
  Description of Artificial Sequence: Synthetic oligonucleotide
gaacugucgcuuugcuugg

SEQ ID NO: 870491 - RNA, 19 nt, Artificial Sequence
  Description of Artificial Sequence: Synthetic oligonucleotide
agcgagcuucucccgaagc

SEQ ID NO: 870492 - RNA, 19 nt, Artificial Sequence
  Description of Artificial Sequence: Synthetic oligonucleotide
cuuuauguugaccuaaggu

SEQ ID NO: 870493 - RNA, 19 nt, Artificial Sequence
  Description of Artificial Sequence: Synthetic oligonucleotide
uccacucugaguguuccag

SEQ ID NO: 870494 - RNA, 19 nt, Artificial Sequence
  Description of Artificial Sequence: Synthetic oligonucleotide
agcgauauaccagaaaauu

SEQ ID NO: 870495 - RNA, 19 nt, Artificial Sequence
  Description of Artificial Sequence: Synthetic oligonucleotide
gaguucggguugcuggugg

SEQ ID NO: 870496 - RNA, 19 nt, Artificial Sequence
  Description of Artificial Sequence: Synthetic oligonucleotide
ccauuugauagcauugacc

SEQ ID NO: 870497 - RNA, 19 nt, Artificial Sequence
  Description of Artificial Sequence: Synthetic oligonucleotide
ggaaauaccauaaggggca

SEQ ID NO: 870498 - RNA, 19 nt, Artificial Sequence
  Description of Artificial Sequence: Synthetic oligonucleotide
ugaccucauuaguaugucc

SEQ ID NO: 870499 - RNA, 19 nt, Artificial Sequence
  Description of Artificial Sequence: Synthetic oligonucleotide
uuggaagguuuugacuggg

SEQ ID NO: 870500 - RNA, 19 nt, Artificial Sequence
  Description of Artificial Sequence: Synthetic oligonucleotide
uucacguauacagugccuc

SEQ ID NO: 870501 - RNA, 19 nt, Artificial Sequence
  Description of Artificial Sequence: Synthetic oligonucleotide
cuuugguggguuuugcuga

SEQ ID NO: 870502 - RNA, 19 nt, Artificial Sequence
  Description of Artificial Sequence: Synthetic oligonucleotide
aaacgccucguuccacauc

SEQ ID NO: 870503 - RNA, 19 nt, Artificial Sequence
  Description of Artificial Sequence: Synthetic oligonucleotide
cccaucauaggaaggaugc

SEQ ID NO: 870504 - RNA, 19 nt, Artificial Sequence
  Description of Artificial Sequence: Synthetic oligonucleotide
ugcaugaagcaaagguagu

SEQ ID NO: 870505 - RNA, 19 nt, Artificial Sequence
  Description of Artificial Sequence: Synthetic oligonucleotide
uguggacaagacuuccacu

SEQ ID NO: 870506 - RNA, 19 nt, Artificial Sequence
  Description of Artificial Sequence: Synthetic oligonucleotide
aguucggguugcugguggc

SEQ ID NO: 870507 - RNA, 19 nt, Artificial Sequence
  Description of Artificial Sequence: Synthetic oligonucleotide
agguggaaaccauauuccu

SEQ ID NO: 870508 - RNA, 19 nt, Artificial Sequence
  Description of Artificial Sequence: Synthetic oligonucleotide
uuccugugauacaaccaug

SEQ ID NO: 870509 - RNA, 19 nt, Artificial Sequence
  Description of Artificial Sequence: Synthetic oligonucleotide
aaggugcuggcuagguuac

SEQ ID NO: 870510 - RNA, 19 nt, Artificial Sequence
  Description of Artificial Sequence: Synthetic oligonucleotide
uccucgagcauuccagcac

SEQ ID NO: 870511 - RNA, 19 nt, Artificial Sequence
  Description of Artificial Sequence: Synthetic oligonucleotide
uagcgauauaccagaaaau

SEQ ID NO: 870512 - RNA, 19 nt, Artificial Sequence
  Description of Artificial Sequence: Synthetic oligonucleotide
ugcuuggucagagugugga

SEQ ID NO: 870513 - RNA, 19 nt, Artificial Sequence
  Description of Artificial Sequence: Synthetic oligonucleotide
cccuguucagucaugagag

SEQ ID NO: 870514 - RNA, 19 nt, Artificial Sequence
  Description of Artificial Sequence: Synthetic oligonucleotide
cugucgcuuugcuuggugg

SEQ ID NO: 870515 - RNA, 19 nt, Artificial Sequence
  Description of Artificial Sequence: Synthetic oligonucleotide
uggagagcaacuguaguau

SEQ ID NO: 870516 - RNA, 19 nt, Artificial Sequence
  Description of Artificial Sequence: Synthetic oligonucleotide
cucgaacaagucaaguuca

SEQ ID NO: 870517 - RNA, 19 nt, Artificial Sequence
  Description of Artificial Sequence: Synthetic oligonucleotide
cauauuccugugauacaac

SEQ ID NO: 870518 - RNA, 19 nt, Artificial Sequence
  Description of Artificial Sequence: Synthetic oligonucleotide
uacuuucggagaucuaaaa

SEQ ID NO: 870519 - RNA, 19 nt, Artificial Sequence
  Description of Artificial Sequence: Synthetic oligonucleotide
ugagcauucuagguggaaa

SEQ ID NO: 870520 - RNA, 19 nt, Artificial Sequence
  Description of Artificial Sequence: Synthetic oligonucleotide
uugguggaauuucaacguc

SEQ ID NO: 870521 - RNA, 19 nt, Artificial Sequence
  Description of Artificial Sequence: Synthetic oligonucleotide
ugucgcuuugcuuggugga

SEQ ID NO: 870522 - RNA, 19 nt, Artificial Sequence
  Description of Artificial Sequence: Synthetic oligonucleotide
aagaacugucgcuuugcuu

SEQ ID NO: 870523 - RNA, 19 nt, Artificial Sequence
  Description of Artificial Sequence: Synthetic oligonucleotide
gaccuaaggugcuggcuag

SEQ ID NO: 870524 - RNA, 19 nt, Artificial Sequence
  Description of Artificial Sequence: Synthetic oligonucleotide
ucgaacaagucaaguucac

SEQ ID NO: 870525 - RNA, 19 nt, Artificial Sequence
  Description of Artificial Sequence: Synthetic oligonucleotide
gaagcaaagguaguguugu

SEQ ID NO: 870526 - RNA, 19 nt, Artificial Sequence
  Description of Artificial Sequence: Synthetic oligonucleotide
uugguuuaucacagcauuu

SEQ ID NO: 870527 - RNA, 19 nt, Artificial Sequence
  Description of Artificial Sequence: Synthetic oligonucleotide
ucacguauacagugccuca

SEQ ID NO: 870528 - RNA, 19 nt, Artificial Sequence
  Description of Artificial Sequence: Synthetic oligonucleotide
ucauaggaaccuguugcca

SEQ ID NO: 870529 - RNA, 19 nt, Artificial Sequence
  Description of Artificial Sequence: Synthetic oligonucleotide
ucccauuugauagcauuga

SEQ ID NO: 870530 - RNA, 19 nt, Artificial Sequence
  Description of Artificial Sequence: Synthetic oligonucleotide
ugguuuaucacagcauuuu

SEQ ID NO: 870531 - RNA, 19 nt, Artificial Sequence
  Description of Artificial Sequence: Synthetic oligonucleotide
ucuccucgagcauuccagc

SEQ ID NO: 870532 - RNA, 19 nt, Artificial Sequence
  Description of Artificial Sequence: Synthetic oligonucleotide
ucauugguacaaaccgguc

SEQ ID NO: 870533 - RNA, 19 nt, Artificial Sequence
  Description of Artificial Sequence: Synthetic oligonucleotide
uaguauguccuuggaaggu

SEQ ID NO: 870534 - RNA, 19 nt, Artificial Sequence
  Description of Artificial Sequence: Synthetic oligonucleotide
ucuagguggaaaccauauu

SEQ ID NO: 870535 - RNA, 19 nt, Artificial Sequence
  Description of Artificial Sequence: Synthetic oligonucleotide
uggaagguuuugacugggc

SEQ ID NO: 870536 - RNA, 19 nt, Artificial Sequence
  Description of Artificial Sequence: Synthetic oligonucleotide
aauugauaggagggaaaua

SEQ ID NO: 870537 - RNA, 19 nt, Artificial Sequence
  Description of Artificial Sequence: Synthetic oligonucleotide
gauaggugauuuccaagua

SEQ ID NO: 870538 - RNA, 19 nt, Artificial Sequence
  Description of Artificial Sequence: Synthetic oligonucleotide
acguccuuauuacugggaa

SEQ ID NO: 870539 - RNA, 19 nt, Artificial Sequence
  Description of Artificial Sequence: Synthetic oligonucleotide
uggccaaauacuucccauc

SEQ ID NO: 870540 - RNA, 19 nt, Artificial Sequence
  Description of Artificial Sequence: Synthetic oligonucleotide
gaaauaccauaaggggcag

SEQ ID NO: 870541 - RNA, 19 nt, Artificial Sequence
  Description of Artificial Sequence: Synthetic oligonucleotide
ggcacaaaugaacaccuca

SEQ ID NO: 870542 - RNA, 19 nt, Artificial Sequence
  Description of Artificial Sequence: Synthetic oligonucleotide
cgauauaccagaaaauuca

SEQ ID NO: 870543 - RNA, 19 nt, Artificial Sequence
  Description of Artificial Sequence: Synthetic oligonucleotide
agagcaacuguaguaucca

SEQ ID NO: 870544 - RNA, 19 nt, Artificial Sequence
  Description of Artificial Sequence: Synthetic oligonucleotide
gagggagaauccuguggcc

SEQ ID NO: 870545 - RNA, 19 nt, Artificial Sequence
  Description of Artificial Sequence: Synthetic oligonucleotide
gucaugagagccuguucug

SEQ ID NO: 870546 - RNA, 19 nt, Artificial Sequence
  Description of Artificial Sequence: Synthetic oligonucleotide
ggagguagcgauauaccag

SEQ ID NO: 870547 - RNA, 19 nt, Artificial Sequence
  Description of Artificial Sequence: Synthetic oligonucleotide
cuugguggaauuucaacgu

SEQ ID NO: 870548 - RNA, 19 nt, Artificial Sequence
  Description of Artificial Sequence: Synthetic oligonucleotide
cguuucauugguacaaacc

SEQ ID NO: 870549 - RNA, 19 nt, Artificial Sequence
  Description of Artificial Sequence: Synthetic oligonucleotide
cuuugcuugguggaauuuc

SEQ ID NO: 870550 - RNA, 19 nt, Artificial Sequence
  Description of Artificial Sequence: Synthetic oligonucleotide
guguaugacuuuguauuug

SEQ ID NO: 870551 - RNA, 19 nt, Artificial Sequence
  Description of Artificial Sequence: Synthetic oligonucleotide
acauacauccugcuucaua

SEQ ID NO: 870552 - RNA, 19 nt, Artificial Sequence
  Description of Artificial Sequence: Synthetic oligonucleotide
acacguuucauugguacaa

SEQ ID NO: 870553 - RNA, 19 nt, Artificial Sequence
  Description of Artificial Sequence: Synthetic oligonucleotide
caaaccggucuuuuggaga

SEQ ID NO: 870554 - RNA, 19 nt, Artificial Sequence
  Description of Artificial Sequence: Synthetic oligonucleotide
aggugcugaaugaaaagga

SEQ ID NO: 870555 - RNA, 19 nt, Artificial Sequence
  Description of Artificial Sequence: Synthetic oligonucleotide
caaauuauaguugucuuau

SEQ ID NO: 870556 - RNA, 19 nt, Artificial Sequence
  Description of Artificial Sequence: Synthetic oligonucleotide
auacaaccauguguaugac

SEQ ID NO: 870557 - RNA, 19 nt, Artificial Sequence
  Description of Artificial Sequence: Synthetic oligonucleotide
uguagcugauggcuucauc

SEQ ID NO: 870558 - RNA, 19 nt, Artificial Sequence
  Description of Artificial Sequence: Synthetic oligonucleotide
caaagguaguguuguucug

SEQ ID NO: 870559 - RNA, 19 nt, Artificial Sequence
  Description of Artificial Sequence: Synthetic oligonucleotide
cugugauacaaccaugugu

SEQ ID NO: 870560 - RNA, 19 nt, Artificial Sequence
  Description of Artificial Sequence: Synthetic oligonucleotide
uugcuaacaugauguugga

SEQ ID NO: 870561 - RNA, 19 nt, Artificial Sequence
  Description of Artificial Sequence: Synthetic oligonucleotide
accauauuccugugauaca

SEQ ID NO: 870562 - RNA, 19 nt, Artificial Sequence
  Description of Artificial Sequence: Synthetic oligonucleotide
cauaggaaccuguugccaa

SEQ ID NO: 870563 - RNA, 19 nt, Artificial Sequence
  Description of Artificial Sequence: Synthetic oligonucleotide
gggauaggugauuuccaag

SEQ ID NO: 870564 - RNA, 19 nt, Artificial Sequence
  Description of Artificial Sequence: Synthetic oligonucleotide
cuccaucuauuuccauugg

SEQ ID NO: 870565 - RNA, 19 nt, Artificial Sequence
  Description of Artificial Sequence: Synthetic oligonucleotide
auauaucucuuugcuguga

SEQ ID NO: 870566 - RNA, 19 nt, Artificial Sequence
  Description of Artificial Sequence: Synthetic oligonucleotide
ugugugcgcaucccaaauu

SEQ ID NO: 870567 - RNA, 19 nt, Artificial Sequence
  Description of Artificial Sequence: Synthetic oligonucleotide
cugggaacgucaugucccc

SEQ ID NO: 870568 - RNA, 19 nt, Artificial Sequence
  Description of Artificial Sequence: Synthetic oligonucleotide
caaguagacucgaacaagu

SEQ ID NO: 870569 - RNA, 19 nt, Artificial Sequence
  Description of Artificial Sequence: Synthetic oligonucleotide
aggcuccugaugcuugguc

SEQ ID NO: 870570 - RNA, 19 nt, Artificial Sequence
  Description of Artificial Sequence: Synthetic oligonucleotide
guccuuggaagguuuugac

SEQ ID NO: 870571 - RNA, 19 nt, Artificial Sequence
  Description of Artificial Sequence: Synthetic oligonucleotide
caggaggcuagcagcauuc

SEQ ID NO: 870572 - RNA, 19 nt, Artificial Sequence
  Description of Artificial Sequence: Synthetic oligonucleotide
aggcuagcagcauuccaga

SEQ ID NO: 870573 - RNA, 19 nt, Artificial Sequence
  Description of Artificial Sequence: Synthetic oligonucleotide
uucccuguucagucaugag

SEQ ID NO: 870574 - RNA, 19 nt, Artificial Sequence
  Description of Artificial Sequence: Synthetic oligonucleotide
guucagucaugagagccug

SEQ ID NO: 870575 - RNA, 19 nt, Artificial Sequence
  Description of Artificial Sequence: Synthetic oligonucleotide
ggauaggugauuuccaagu

SEQ ID NO: 870576 - RNA, 19 nt, Artificial Sequence
  Description of Artificial Sequence: Synthetic oligonucleotide
aaccggucuuuuggagagc

SEQ ID NO: 870577 - RNA, 19 nt, Artificial Sequence
  Description of Artificial Sequence: Synthetic oligonucleotide
gguggaaaccauauuccug

SEQ ID NO: 870578 - RNA, 19 nt, Artificial Sequence
  Description of Artificial Sequence: Synthetic oligonucleotide
ugaaggucaugaacacaua

SEQ ID NO: 870579 - RNA, 19 nt, Artificial Sequence
  Description of Artificial Sequence: Synthetic oligonucleotide
aaauaccauaaggggcaga

SEQ ID NO: 870580 - RNA, 19 nt, Artificial Sequence
  Description of Artificial Sequence: Synthetic oligonucleotide
aggaggcuagcagcauucc

SEQ ID NO: 870581 - RNA, 19 nt, Artificial Sequence
  Description of Artificial Sequence: Synthetic oligonucleotide
ccuucacguauacagugcc

SEQ ID NO: 870582 - RNA, 19 nt, Artificial Sequence
  Description of Artificial Sequence: Synthetic oligonucleotide
aggaucccauuugauagca

SEQ ID NO: 870583 - RNA, 19 nt, Artificial Sequence
  Description of Artificial Sequence: Synthetic oligonucleotide
ugagcgagcuucucccgaa

SEQ ID NO: 870584 - RNA, 19 nt, Artificial Sequence
  Description of Artificial Sequence: Synthetic oligonucleotide
gacucgaacaagucaaguu

SEQ ID NO: 870585 - RNA, 19 nt, Artificial Sequence
  Description of Artificial Sequence: Synthetic oligonucleotide
gcuaagccugcacacauga

SEQ ID NO: 870586 - RNA, 19 nt, Artificial Sequence
  Description of Artificial Sequence: Synthetic oligonucleotide
ggauggaaaccaaaccaug

SEQ ID NO: 870587 - RNA, 19 nt, Artificial Sequence
  Description of Artificial Sequence: Synthetic oligonucleotide
uccuuauuacugggaacgu

SEQ ID NO: 870588 - RNA, 19 nt, Artificial Sequence
  Description of Artificial Sequence: Synthetic oligonucleotide
gacucauggccucgaagaa

SEQ ID NO: 870589 - RNA, 19 nt, Artificial Sequence
  Description of Artificial Sequence: Synthetic oligonucleotide
ccuuuauguugaccuaagg

SEQ ID NO: 870590 - RNA, 19 nt, Artificial Sequence
  Description of Artificial Sequence: Synthetic oligonucleotide
augcaaacgccucguucca

SEQ ID NO: 870591 - RNA, 19 nt, Artificial Sequence
  Description of Artificial Sequence: Synthetic oligonucleotide
cacacguuucauugguaca

SEQ ID NO: 870592 - RNA, 19 nt, Artificial Sequence
  Description of Artificial Sequence: Synthetic oligonucleotide
ggacccgcuggccaaauac

SEQ ID NO: 870593 - RNA, 19 nt, Artificial Sequence
  Description of Artificial Sequence: Synthetic oligonucleotide
ccacuuaaugguauauauc

SEQ ID NO: 870594 - RNA, 19 nt, Artificial Sequence
  Description of Artificial Sequence: Synthetic oligonucleotide
ucgagcauuccagcacacc

SEQ ID NO: 870595 - RNA, 19 nt, Artificial Sequence
  Description of Artificial Sequence: Synthetic oligonucleotide
ucuccagauccagaagcaa

SEQ ID NO: 870596 - RNA, 19 nt, Artificial Sequence
  Description of Artificial Sequence: Synthetic oligonucleotide
gcgauauaccagaaaauuc

SEQ ID NO: 870597 - RNA, 19 nt, Artificial Sequence
  Description of Artificial Sequence: Synthetic oligonucleotide
aguauguccuuggaagguu

SEQ ID NO: 870598 - RNA, 19 nt, Artificial Sequence
  Description of Artificial Sequence: Synthetic oligonucleotide
gagcauuccagcacaccuc

SEQ ID NO: 870599 - RNA, 19 nt, Artificial Sequence
  Description of Artificial Sequence: Synthetic oligonucleotide
ggaugcaaacgccucguuc

SEQ ID NO: 870600 - RNA, 19 nt, Artificial Sequence
  Description of Artificial Sequence: Synthetic oligonucleotide
gaagaacugucgcuuugcu

SEQ ID NO: 870601 - RNA, 19 nt, Artificial Sequence
  Description of Artificial Sequence: Synthetic oligonucleotide
uuuugacugggcggucaca

SEQ ID NO: 870602 - RNA, 19 nt, Artificial Sequence
  Description of Artificial Sequence: Synthetic oligonucleotide
agacuuccacucugagugu

SEQ ID NO: 870603 - RNA, 19 nt, Artificial Sequence
  Description of Artificial Sequence: Synthetic oligonucleotide
guuccacaucccacagucg

SEQ ID NO: 870604 - RNA, 19 nt, Artificial Sequence
  Description of Artificial Sequence: Synthetic oligonucleotide
uuuauugcaugggcuccau

SEQ ID NO: 870605 - RNA, 19 nt, Artificial Sequence
  Description of Artificial Sequence: Synthetic oligonucleotide
accggucuuuuggagagca

SEQ ID NO: 870606 - RNA, 19 nt, Artificial Sequence
  Description of Artificial Sequence: Synthetic oligonucleotide
ccaaguagacucgaacaag

SEQ ID NO: 870607 - RNA, 19 nt, Artificial Sequence
  Description of Artificial Sequence: Synthetic oligonucleotide
cuugaaggucaugaacaca

SEQ ID NO: 870608 - RNA, 19 nt, Artificial Sequence
  Description of Artificial Sequence: Synthetic oligonucleotide
ugcacaugucugugcugca

SEQ ID NO: 870609 - RNA, 19 nt, Artificial Sequence
  Description of Artificial Sequence: Synthetic oligonucleotide
gagcgagcuucucccgaag

SEQ ID NO: 870610 - RNA, 19 nt, Artificial Sequence
  Description of Artificial Sequence: Synthetic oligonucleotide
auuccccuuuuguuccacu

SEQ ID NO: 870611 - RNA, 19 nt, Artificial Sequence
  Description of Artificial Sequence: Synthetic oligonucleotide
ccauauucuugcaaagcca

SEQ ID NO: 870612 - RNA, 19 nt, Artificial Sequence
  Description of Artificial Sequence: Synthetic oligonucleotide
guuaccaucuucuguccau

SEQ ID NO: 870613 - RNA, 19 nt, Artificial Sequence
  Description of Artificial Sequence: Synthetic oligonucleotide
gcacuugcuaacaugaugu

SEQ ID NO: 870614 - RNA, 19 nt, Artificial Sequence
  Description of Artificial Sequence: Synthetic oligonucleotide
gagugauuauuuauugcau

SEQ ID NO: 870615 - RNA, 19 nt, Artificial Sequence
  Description of Artificial Sequence: Synthetic oligonucleotide
acugggcggucacagcuaa

SEQ ID NO: 870616 - RNA, 19 nt, Artificial Sequence
  Description of Artificial Sequence: Synthetic oligonucleotide
auaugccgccugugccucg

SEQ ID NO: 870617 - RNA, 19 nt, Artificial Sequence
  Description of Artificial Sequence: Synthetic oligonucleotide
cauuaagguuccauauccu

SEQ ID NO: 870618 - RNA, 19 nt, Artificial Sequence
  Description of Artificial Sequence: Synthetic oligonucleotide
gcaacuguaguauccaaau

SEQ ID NO: 870619 - RNA, 19 nt, Artificial Sequence
  Description of Artificial Sequence: Synthetic oligonucleotide
uccauucuuugguggguuu

SEQ ID NO: 870620 - RNA, 19 nt, Artificial Sequence
  Description of Artificial Sequence: Synthetic oligonucleotide
uuauugcaugggcuccauu

SEQ ID NO: 870621 - RNA, 19 nt, Artificial Sequence
  Description of Artificial Sequence: Synthetic oligonucleotide
cagcacaagcuguguggag

SEQ ID NO: 870622 - RNA, 19 nt, Artificial Sequence
  Description of Artificial Sequence: Synthetic oligonucleotide
gagcaacuguaguauccaa

SEQ ID NO: 870623 - RNA, 19 nt, Artificial Sequence
  Description of Artificial Sequence: Synthetic oligonucleotide
gcauucuagguggaaacca

SEQ ID NO: 870624 - RNA, 19 nt, Artificial Sequence
  Description of Artificial Sequence: Synthetic oligonucleotide
cauuggcuugcugcugagc

SEQ ID NO: 870625 - RNA, 19 nt, Artificial Sequence
  Description of Artificial Sequence: Synthetic oligonucleotide
cugcaaucccacacauuca

SEQ ID NO: 870626 - RNA, 19 nt, Artificial Sequence
  Description of Artificial Sequence: Synthetic oligonucleotide
ucccaucgcuguuccaguc

SEQ ID NO: 870627 - RNA, 19 nt, Artificial Sequence
  Description of Artificial Sequence: Synthetic oligonucleotide
caguuuggagcccaucaua

SEQ ID NO: 870628 - RNA, 19 nt, Artificial Sequence
  Description of Artificial Sequence: Synthetic oligonucleotide
cccauuugauagcauugac

SEQ ID NO: 870629 - RNA, 19 nt, Artificial Sequence
  Description of Artificial Sequence: Synthetic oligonucleotide
aggcacaaaugaacaccuc

SEQ ID NO: 870630 - RNA, 19 nt, Artificial Sequence
  Description of Artificial Sequence: Synthetic oligonucleotide
cauucuagguggaaaccau

SEQ ID NO: 870631 - RNA, 19 nt, Artificial Sequence
  Description of Artificial Sequence: Synthetic oligonucleotide
ggagagcaacuguaguauc

SEQ ID NO: 870632 - RNA, 19 nt, Artificial Sequence
  Description of Artificial Sequence: Synthetic oligonucleotide
caccucgucgcugguaaug

SEQ ID NO: 870633 - RNA, 19 nt, Artificial Sequence
  Description of Artificial Sequence: Synthetic oligonucleotide
gguagcgauauaccagaaa

SEQ ID NO: 870634 - RNA, 19 nt, Artificial Sequence
  Description of Artificial Sequence: Synthetic oligonucleotide
cauuccagaaggaucccau

SEQ ID NO: 870635 - RNA, 19 nt, Artificial Sequence
  Description of Artificial Sequence: Synthetic oligonucleotide
caucgcuguuccaguccag

SEQ ID NO: 870636 - RNA, 19 nt, Artificial Sequence
  Description of Artificial Sequence: Synthetic oligonucleotide
gcaccauguagcugauggc

SEQ ID NO: 870637 - RNA, 19 nt, Artificial Sequence
  Description of Artificial Sequence: Synthetic oligonucleotide
ccugugauacaaccaugug

SEQ ID NO: 870638 - RNA, 19 nt, Artificial Sequence
  Description of Artificial Sequence: Synthetic oligonucleotide
guaguguuguucugccagu

SEQ ID NO: 870639 - RNA, 19 nt, Artificial Sequence
  Description of Artificial Sequence: Synthetic oligonucleotide
caaagucacacguuucauu

SEQ ID NO: 870640 - RNA, 19 nt, Artificial Sequence
  Description of Artificial Sequence: Synthetic oligonucleotide
ucgcuuugcuugguggaau

SEQ ID NO: 870641 - RNA, 19 nt, Artificial Sequence
  Description of Artificial Sequence: Synthetic oligonucleotide
caccauguagcugauggcu

SEQ ID NO: 870642 - RNA, 19 nt, Artificial Sequence
  Description of Artificial Sequence: Synthetic oligonucleotide
cucgguagcuguggacaag

SEQ ID NO: 870643 - RNA, 19 nt, Artificial Sequence
  Description of Artificial Sequence: Synthetic oligonucleotide
ccucauuaguauguccuug

SEQ ID NO: 870644 - RNA, 19 nt, Artificial Sequence
  Description of Artificial Sequence: Synthetic oligonucleotide
gccgccugugccucgguag

SEQ ID NO: 870645 - RNA, 19 nt, Artificial Sequence
  Description of Artificial Sequence: Synthetic oligonucleotide
ccauauuccugugauacaa

SEQ ID NO: 870646 - RNA, 19 nt, Artificial Sequence
  Description of Artificial Sequence: Synthetic oligonucleotide
agcuaagccugcacacaug

SEQ ID NO: 870647 - RNA, 19 nt, Artificial Sequence
  Description of Artificial Sequence: Synthetic oligonucleotide
aacugucgcuuugcuuggu

SEQ ID NO: 870648 - RNA, 19 nt, Artificial Sequence
  Description of Artificial Sequence: Synthetic oligonucleotide
gcauugaccucauuaguau

SEQ ID NO: 870649 - RNA, 19 nt, Artificial Sequence
  Description of Artificial Sequence: Synthetic oligonucleotide
agguuuugacugggcgguc

SEQ ID NO: 870650 - RNA, 19 nt, Artificial Sequence
  Description of Artificial Sequence: Synthetic oligonucleotide
gccaacagugucccaucgc

SEQ ID NO: 870651 - RNA, 19 nt, Artificial Sequence
  Description of Artificial Sequence: Synthetic oligonucleotide
uggucagaguguggaugca

SEQ ID NO: 870652 - RNA, 19 nt, Artificial Sequence
  Description of Artificial Sequence: Synthetic oligonucleotide
accauaaggggcagauuuu

SEQ ID NO: 870653 - RNA, 19 nt, Artificial Sequence
  Description of Artificial Sequence: Synthetic oligonucleotide
cugagcgagcuucucccga

SEQ ID NO: 870654 - RNA, 19 nt, Artificial Sequence
  Description of Artificial Sequence: Synthetic oligonucleotide
cuguaguauccaaauugau

SEQ ID NO: 870655 - RNA, 19 nt, Artificial Sequence
  Description of Artificial Sequence: Synthetic oligonucleotide
ggaggcuagcagcauucca

SEQ ID NO: 870656 - RNA, 19 nt, Artificial Sequence
  Description of Artificial Sequence: Synthetic oligonucleotide
gggcggucacagcuaagcc

SEQ ID NO: 870657 - RNA, 19 nt, Artificial Sequence
  Description of Artificial Sequence: Synthetic oligonucleotide
ugauagcauugaccucauu

SEQ ID NO: 870658 - RNA, 19 nt, Artificial Sequence
  Description of Artificial Sequence: Synthetic oligonucleotide
cuaagccugcacacaugaa

SEQ ID NO: 870659 - RNA, 19 nt, Artificial Sequence
  Description of Artificial Sequence: Synthetic oligonucleotide
cuucacguauacagugccu

SEQ ID NO: 870660 - RNA, 19 nt, Artificial Sequence
  Description of Artificial Sequence: Synthetic oligonucleotide
cccaucgcuguuccagucc

SEQ ID NO: 870661 - RNA, 19 nt, Artificial Sequence
  Description of Artificial Sequence: Synthetic oligonucleotide
gucgcugguaaugcucauc

SEQ ID NO: 870662 - RNA, 19 nt, Artificial Sequence
  Description of Artificial Sequence: Synthetic oligonucleotide
gguuuugacugggcgguca

SEQ ID NO: 870663 - RNA, 19 nt, Artificial Sequence
  Description of Artificial Sequence: Synthetic oligonucleotide
ggcggucacagcuaagccu

SEQ ID NO: 870664 - RNA, 19 nt, Artificial Sequence
  Description of Artificial Sequence: Synthetic oligonucleotide
ccaaauugauaggagggaa

SEQ ID NO: 870665 - RNA, 19 nt, Artificial Sequence
  Description of Artificial Sequence: Synthetic oligonucleotide
gugcgcaucccaaauuaua

SEQ ID NO: 870666 - RNA, 19 nt, Artificial Sequence
  Description of Artificial Sequence: Synthetic oligonucleotide
cuccacuuaaugguauaua

SEQ ID NO: 870667 - RNA, 19 nt, Artificial Sequence
  Description of Artificial Sequence: Synthetic oligonucleotide
auaccauaaggggcagauu

SEQ ID NO: 870668 - RNA, 19 nt, Artificial Sequence
  Description of Artificial Sequence: Synthetic oligonucleotide
gguccugugggacuccacu

SEQ ID NO: 870669 - RNA, 19 nt, Artificial Sequence
  Description of Artificial Sequence: Synthetic oligonucleotide
gcauuggcuugcugcugag

SEQ ID NO: 870670 - RNA, 19 nt, Artificial Sequence
  Description of Artificial Sequence: Synthetic oligonucleotide
gucgcuuugcuugguggaa

SEQ ID NO: 870671 - RNA, 19 nt, Artificial Sequence
  Description of Artificial Sequence: Synthetic oligonucleotide
ucaccucgucgcugguaau

SEQ ID NO: 870672 - RNA, 19 nt, Artificial Sequence
  Description of Artificial Sequence: Synthetic oligonucleotide
cugggcggucacagcuaag

SEQ ID NO: 870673 - RNA, 19 nt, Artificial Sequence
  Description of Artificial Sequence: Synthetic oligonucleotide
ggccuuuauguugaccuaa

SEQ ID NO: 870674 - RNA, 19 nt, Artificial Sequence
  Description of Artificial Sequence: Synthetic oligonucleotide
cagaaggaucccauuugau

SEQ ID NO: 870675 - RNA, 19 nt, Artificial Sequence
  Description of Artificial Sequence: Synthetic oligonucleotide
cguauacagugccucagca

SEQ ID NO: 870676 - RNA, 19 nt, Artificial Sequence
  Description of Artificial Sequence: Synthetic oligonucleotide
gucgaacaguagaaucaaa

SEQ ID NO: 870677 - RNA, 19 nt, Artificial Sequence
  Description of Artificial Sequence: Synthetic oligonucleotide
auucaccucgucgcuggua

SEQ ID NO: 870678 - RNA, 19 nt, Artificial Sequence
  Description of Artificial Sequence: Synthetic oligonucleotide
ugccgccugugccucggua

SEQ ID NO: 870679 - RNA, 19 nt, Artificial Sequence
  Description of Artificial Sequence: Synthetic oligonucleotide
acgccucguuccacauccc

SEQ ID NO: 870680 - RNA, 19 nt, Artificial Sequence
  Description of Artificial Sequence: Synthetic oligonucleotide
cacguuucauugguacaaa

SEQ ID NO: 870681 - RNA, 19 nt, Artificial Sequence
  Description of Artificial Sequence: Synthetic oligonucleotide
gacccgcuggccaaauacu

SEQ ID NO: 870682 - RNA, 19 nt, Artificial Sequence
  Description of Artificial Sequence: Synthetic oligonucleotide
acccgcuggccaaauacuu

SEQ ID NO: 870683 - RNA, 19 nt, Artificial Sequence
  Description of Artificial Sequence: Synthetic oligonucleotide
cagcuaagccugcacacau

SEQ ID NO: 870684 - RNA, 19 nt, Artificial Sequence
  Description of Artificial Sequence: Synthetic oligonucleotide
caacuguaguauccaaauu

SEQ ID NO: 870685 - RNA, 19 nt, Artificial Sequence
  Description of Artificial Sequence: Synthetic oligonucleotide
agguagcgauauaccagaa

SEQ ID NO: 870686 - RNA, 19 nt, Artificial Sequence
  Description of Artificial Sequence: Synthetic oligonucleotide
uccucccuuuugguuuauc

SEQ ID NO: 870687 - RNA, 19 nt, Artificial Sequence
  Description of Artificial Sequence: Synthetic oligonucleotide
uggccagggauaggugauu

SEQ ID NO: 870688 - RNA, 19 nt, Artificial Sequence
  Description of Artificial Sequence: Synthetic oligonucleotide
ggucagaguguggaugcaa

SEQ ID NO: 870689 - RNA, 19 nt, Artificial Sequence
  Description of Artificial Sequence: Synthetic oligonucleotide
guauguccuuggaagguuu

SEQ ID NO: 870690 - RNA, 19 nt, Artificial Sequence
  Description of Artificial Sequence: Synthetic oligonucleotide
cucgaagaacugucgcuuu

SEQ ID NO: 870691 - RNA, 19 nt, Artificial Sequence
  Description of Artificial Sequence: Synthetic oligonucleotide
ccgccugugccucgguagc

SEQ ID NO: 870692 - RNA, 19 nt, Artificial Sequence
  Description of Artificial Sequence: Synthetic oligonucleotide
gcgagcuucucccgaagcu

SEQ ID NO: 870693 - RNA, 19 nt, Artificial Sequence
  Description of Artificial Sequence: Synthetic oligonucleotide
gcgcaucccaaauuauagu

SEQ ID NO: 870694 - RNA, 19 nt, Artificial Sequence
  Description of Artificial Sequence: Synthetic oligonucleotide
caaacgccucguuccacau

SEQ ID NO: 870695 - RNA, 19 nt, Artificial Sequence
  Description of Artificial Sequence: Synthetic oligonucleotide
aggacccgcuggccaaaua

SEQ ID NO: 870696 - RNA, 19 nt, Artificial Sequence
  Description of Artificial Sequence: Synthetic oligonucleotide
cgagcauuccagcacaccu

SEQ ID NO: 870697 - RNA, 19 nt, Artificial Sequence
  Description of Artificial Sequence: Synthetic oligonucleotide
cacuugcuaacaugauguu

SEQ ID NO: 870698 - RNA, 19 nt, Artificial Sequence
  Description of Artificial Sequence: Synthetic oligonucleotide
ccugugggacuccacuuaa

SEQ ID NO: 870699 - RNA, 19 nt, Artificial Sequence
  Description of Artificial Sequence: Synthetic oligonucleotide
caaccauguguaugacuuu

SEQ ID NO: 870700 - RNA, 19 nt, Artificial Sequence
  Description of Artificial Sequence: Synthetic oligonucleotide
guucggguugcugguggcu

SEQ ID NO: 870701 - RNA, 19 nt, Artificial Sequence
  Description of Artificial Sequence: Synthetic oligonucleotide
cuguggcugcggggagccg

SEQ ID NO: 870702 - RNA, 19 nt, Artificial Sequence
  Description of Artificial Sequence: Synthetic oligonucleotide
caugcaccauguagcugau

SEQ ID NO: 870703 - RNA, 19 nt, Artificial Sequence
  Description of Artificial Sequence: Synthetic oligonucleotide
uuccucccuuuugguuuau

SEQ ID NO: 870704 - RNA, 19 nt, Artificial Sequence
  Description of Artificial Sequence: Synthetic oligonucleotide
cugugggacuccacuuaau

SEQ ID NO: 870705 - RNA, 19 nt, Artificial Sequence
  Description of Artificial Sequence: Synthetic oligonucleotide
caccucaaauaugccgccu

SEQ ID NO: 870706 - RNA, 19 nt, Artificial Sequence
  Description of Artificial Sequence: Synthetic oligonucleotide
ccucgguagcuguggacaa

SEQ ID NO: 870707 - RNA, 19 nt, Artificial Sequence
  Description of Artificial Sequence: Synthetic oligonucleotide
ggacuccacuuaaugguau

SEQ ID NO: 870708 - RNA, 19 nt, Artificial Sequence
  Description of Artificial Sequence: Synthetic oligonucleotide
ccauuagaaugguuuuguu

SEQ ID NO: 870709 - RNA, 19 nt, Artificial Sequence
  Description of Artificial Sequence: Synthetic oligonucleotide
gggcugaaugccacacugu

SEQ ID NO: 870710 - RNA, 19 nt, Artificial Sequence
  Description of Artificial Sequence: Synthetic oligonucleotide
ccuaaggugcuggcuaggu

SEQ ID NO: 870711 - RNA, 19 nt, Artificial Sequence
  Description of Artificial Sequence: Synthetic oligonucleotide
gcuucauacuccagaucuu

SEQ ID NO: 870712 - RNA, 19 nt, Artificial Sequence
  Description of Artificial Sequence: Synthetic oligonucleotide
ccaaaccaugcaccaugua

SEQ ID NO: 870713 - RNA, 19 nt, Artificial Sequence
  Description of Artificial Sequence: Synthetic oligonucleotide
ccugugccucgguagcugu

SEQ ID NO: 870714 - RNA, 19 nt, Artificial Sequence
  Description of Artificial Sequence: Synthetic oligonucleotide
cgccucguuccacauccca

SEQ ID NO: 870715 - RNA, 19 nt, Artificial Sequence
  Description of Artificial Sequence: Synthetic oligonucleotide
ggaucccauuugauagcau

SEQ ID NO: 870716 - RNA, 19 nt, Artificial Sequence
  Description of Artificial Sequence: Synthetic oligonucleotide
ccggucuuuuggagagcaa

SEQ ID NO: 870717 - RNA, 19 nt, Artificial Sequence
  Description of Artificial Sequence: Synthetic oligonucleotide
ccgcugcauuggcuugcug

SEQ ID NO: 870718 - RNA, 19 nt, Artificial Sequence
  Description of Artificial Sequence: Synthetic oligonucleotide
ccccauugcuguucucauu

SEQ ID NO: 870719 - RNA, 19 nt, Artificial Sequence
  Description of Artificial Sequence: Synthetic oligonucleotide
gcggggagccgccgccgcu

SEQ ID NO: 870720 - RNA, 19 nt, Artificial Sequence
  Description of Artificial Sequence: Synthetic oligonucleotide
cgcugguaaugcucaucuu

SEQ ID NO: 870721 - RNA, 19 nt, Artificial Sequence
  Description of Artificial Sequence: Synthetic oligonucleotide
cgccugugccucgguagcu

SEQ ID NO: 870722 - RNA, 19 nt, Artificial Sequence
  Description of Artificial Sequence: Synthetic oligonucleotide
uauuugaaaugauagggcg

SEQ ID NO: 870723 - RNA, 19 nt, Artificial Sequence
  Description of Artificial Sequence: Synthetic oligonucleotide
uccaugauaauccacagcu

SEQ ID NO: 870724 - RNA, 19 nt, Artificial Sequence
  Description of Artificial Sequence: Synthetic oligonucleotide
ucuugauaggcucaguagg

SEQ ID NO: 870725 - RNA, 19 nt, Artificial Sequence
  Description of Artificial Sequence: Synthetic oligonucleotide
uugggaaucaagaacagga

SEQ ID NO: 870726 - RNA, 19 nt, Artificial Sequence
  Description of Artificial Sequence: Synthetic oligonucleotide
caaguugugaccaucuugg

SEQ ID NO: 870727 - RNA, 19 nt, Artificial Sequence
  Description of Artificial Sequence: Synthetic oligonucleotide
ugcuauguggacuuggccg

SEQ ID NO: 870728 - RNA, 19 nt, Artificial Sequence
  Description of Artificial Sequence: Synthetic oligonucleotide
ugcucuaugaaaacuaaca

SEQ ID NO: 870729 - RNA, 19 nt, Artificial Sequence
  Description of Artificial Sequence: Synthetic oligonucleotide
uuauucuugggaaucaaga

SEQ ID NO: 870730 - RNA, 19 nt, Artificial Sequence
  Description of Artificial Sequence: Synthetic oligonucleotide
ucauccuuagucuagcagc

SEQ ID NO: 870731 - RNA, 19 nt, Artificial Sequence
  Description of Artificial Sequence: Synthetic oligonucleotide
ugcaccaucagcuugucug

SEQ ID NO: 870732 - RNA, 19 nt, Artificial Sequence
  Description of Artificial Sequence: Synthetic oligonucleotide
aaugcggucaagcuuggug

SEQ ID NO: 870733 - RNA, 19 nt, Artificial Sequence
  Description of Artificial Sequence: Synthetic oligonucleotide
aaugauagggcguuucuaa

SEQ ID NO: 870734 - RNA, 19 nt, Artificial Sequence
  Description of Artificial Sequence: Synthetic oligonucleotide
aaugucagaauccucggaa

SEQ ID NO: 870735 - RNA, 19 nt, Artificial Sequence
  Description of Artificial Sequence: Synthetic oligonucleotide
aauccucggaacuggacuc

SEQ ID NO: 870736 - RNA, 19 nt, Artificial Sequence
  Description of Artificial Sequence: Synthetic oligonucleotide
uaagcugacugcuugauaa

SEQ ID NO: 870737 - RNA, 19 nt, Artificial Sequence
  Description of Artificial Sequence: Synthetic oligonucleotide
aauacaucccugguguagg

SEQ ID NO: 870738 - RNA, 19 nt, Artificial Sequence
  Description of Artificial Sequence: Synthetic oligonucleotide
uggaccagguuuuagcagg

SEQ ID NO: 870739 - RNA, 19 nt, Artificial Sequence
  Description of Artificial Sequence: Synthetic oligonucleotide
gaaacguccagaugggacc

SEQ ID NO: 870740 - RNA, 19 nt, Artificial Sequence
  Description of Artificial Sequence: Synthetic oligonucleotide
uuugcaauugugacgcagc

SEQ ID NO: 870741 - RNA, 19 nt, Artificial Sequence
  Description of Artificial Sequence: Synthetic oligonucleotide
uacccaugagaucacacag

SEQ ID NO: 870742 - RNA, 19 nt, Artificial Sequence
  Description of Artificial Sequence: Synthetic oligonucleotide
uccuuauugaggcaggccu

SEQ ID NO: 870743 - RNA, 19 nt, Artificial Sequence
  Description of Artificial Sequence: Synthetic oligonucleotide
aagaaaaggcccaaaauaa

SEQ ID NO: 870744 - RNA, 19 nt, Artificial Sequence
  Description of Artificial Sequence: Synthetic oligonucleotide
gaaucguggguccuuauug

SEQ ID NO: 870745 - RNA, 19 nt, Artificial Sequence
  Description of Artificial Sequence: Synthetic oligonucleotide
aguugggucgcccggaaac

SEQ ID NO: 870746 - RNA, 19 nt, Artificial Sequence
  Description of Artificial Sequence: Synthetic oligonucleotide
aagccuacaggcuggcagg

SEQ ID NO: 870747 - RNA, 19 nt, Artificial Sequence
  Description of Artificial Sequence: Synthetic oligonucleotide
cuugauaggcucaguaggc

SEQ ID NO: 870748 - RNA, 19 nt, Artificial Sequence
  Description of Artificial Sequence: Synthetic oligonucleotide
gucgcuuucauccuuaguc

SEQ ID NO: 870749 - RNA, 19 nt, Artificial Sequence
  Description of Artificial Sequence: Synthetic oligonucleotide
gauguaagggcugucacac

SEQ ID NO: 870750 - RNA, 19 nt, Artificial Sequence
  Description of Artificial Sequence: Synthetic oligonucleotide
uccuuagucuagcagcugc

SEQ ID NO: 870751 - RNA, 19 nt, Artificial Sequence
  Description of Artificial Sequence: Synthetic oligonucleotide
aacgauucagaguacccau

SEQ ID NO: 870752 - RNA, 19 nt, Artificial Sequence
  Description of Artificial Sequence: Synthetic oligonucleotide
gacacgacuccucagccag

SEQ ID NO: 870753 - RNA, 19 nt, Artificial Sequence
  Description of Artificial Sequence: Synthetic oligonucleotide
cuuggugcucuucagguag

SEQ ID NO: 870754 - RNA, 19 nt, Artificial Sequence
  Description of Artificial Sequence: Synthetic oligonucleotide
ugagauaccaggacacgac

SEQ ID NO: 870755 - RNA, 19 nt, Artificial Sequence
  Description of Artificial Sequence: Synthetic oligonucleotide
auugugacgcagcacaaga

SEQ ID NO: 870756 - RNA, 19 nt, Artificial Sequence
  Description of Artificial Sequence: Synthetic oligonucleotide
acaggacucgcauagggug

SEQ ID NO: 870757 - RNA, 19 nt, Artificial Sequence
  Description of Artificial Sequence: Synthetic oligonucleotide
aaucguggguccuuauuga

SEQ ID NO: 870758 - RNA, 19 nt, Artificial Sequence
  Description of Artificial Sequence: Synthetic oligonucleotide
agaauacuuagcaaguuca

SEQ ID NO: 870759 - RNA, 19 nt, Artificial Sequence
  Description of Artificial Sequence: Synthetic oligonucleotide
aagcugacugcuugauaac

SEQ ID NO: 870760 - RNA, 19 nt, Artificial Sequence
  Description of Artificial Sequence: Synthetic oligonucleotide
ggaucuugcgcucugagug

SEQ ID NO: 870761 - RNA, 19 nt, Artificial Sequence
  Description of Artificial Sequence: Synthetic oligonucleotide
agaaaaggcccaaaauaac

SEQ ID NO: 870762 - RNA, 19 nt, Artificial Sequence
  Description of Artificial Sequence: Synthetic oligonucleotide
acacgagaauucugguucc

SEQ ID NO: 870763 - RNA, 19 nt, Artificial Sequence
  Description of Artificial Sequence: Synthetic oligonucleotide
uaggagccgaaguagcggg

SEQ ID NO: 870764 - RNA, 19 nt, Artificial Sequence
  Description of Artificial Sequence: Synthetic oligonucleotide
aucaguccgucguucagcg

SEQ ID NO: 870765 - RNA, 19 nt, Artificial Sequence
  Description of Artificial Sequence: Synthetic oligonucleotide
auuccaugauaauccacag

SEQ ID NO: 870766 - RNA, 19 nt, Artificial Sequence
  Description of Artificial Sequence: Synthetic oligonucleotide
gaaaccuggugcgugaagc

SEQ ID NO: 870767 - RNA, 19 nt, Artificial Sequence
  Description of Artificial Sequence: Synthetic oligonucleotide
uguaagagcagugcaucag

SEQ ID NO: 870768 - RNA, 19 nt, Artificial Sequence
  Description of Artificial Sequence: Synthetic oligonucleotide
aggacacgacuccucagcc

SEQ ID NO: 870769 - RNA, 19 nt, Artificial Sequence
  Description of Artificial Sequence: Synthetic oligonucleotide
uagcgugugaugaauuugu

SEQ ID NO: 870770 - RNA, 19 nt, Artificial Sequence
  Description of Artificial Sequence: Synthetic oligonucleotide
cucuugauaggcucaguag

SEQ ID NO: 870771 - RNA, 19 nt, Artificial Sequence
  Description of Artificial Sequence: Synthetic oligonucleotide
gaugucagaugguuccugc

SEQ ID NO: 870772 - RNA, 19 nt, Artificial Sequence
  Description of Artificial Sequence: Synthetic oligonucleotide
agugggucggaaucguggg

SEQ ID NO: 870773 - RNA, 19 nt, Artificial Sequence
  Description of Artificial Sequence: Synthetic oligonucleotide
gugcgugaagccuacaggc

SEQ ID NO: 870774 - RNA, 19 nt, Artificial Sequence
  Description of Artificial Sequence: Synthetic oligonucleotide
aguggaccagguuuuagca

SEQ ID NO: 870775 - RNA, 19 nt, Artificial Sequence
  Description of Artificial Sequence: Synthetic oligonucleotide
guacccacaaacguguucc

SEQ ID NO: 870776 - RNA, 19 nt, Artificial Sequence
  Description of Artificial Sequence: Synthetic oligonucleotide
aguacccacaaacguguuc

SEQ ID NO: 870777 - RNA, 19 nt, Artificial Sequence
  Description of Artificial Sequence: Synthetic oligonucleotide
aauugugacgcagcacaag

SEQ ID NO: 870778 - RNA, 19 nt, Artificial Sequence
  Description of Artificial Sequence: Synthetic oligonucleotide
aguagcgggugauguaagg

SEQ ID NO: 870779 - RNA, 19 nt, Artificial Sequence
  Description of Artificial Sequence: Synthetic oligonucleotide
acaagagggcuucccaguc

SEQ ID NO: 870780 - RNA, 19 nt, Artificial Sequence
  Description of Artificial Sequence: Synthetic oligonucleotide
gcuugauaaccucaggugc

SEQ ID NO: 870781 - RNA, 19 nt, Artificial Sequence
  Description of Artificial Sequence: Synthetic oligonucleotide
uugugacgcagcacaagag

SEQ ID NO: 870782 - RNA, 19 nt, Artificial Sequence
  Description of Artificial Sequence: Synthetic oligonucleotide
ucugagauaccaggacacg

SEQ ID NO: 870783 - RNA, 19 nt, Artificial Sequence
  Description of Artificial Sequence: Synthetic oligonucleotide
ucgcugacguguccgaucc

SEQ ID NO: 870784 - RNA, 19 nt, Artificial Sequence
  Description of Artificial Sequence: Synthetic oligonucleotide
ucuguaagagcagugcauc

SEQ ID NO: 870785 - RNA, 19 nt, Artificial Sequence
  Description of Artificial Sequence: Synthetic oligonucleotide
augcggucaagcuugguga

SEQ ID NO: 870786 - RNA, 19 nt, Artificial Sequence
  Description of Artificial Sequence: Synthetic oligonucleotide
cuagcguggacaagcacug

SEQ ID NO: 870787 - RNA, 19 nt, Artificial Sequence
  Description of Artificial Sequence: Synthetic oligonucleotide
accccuaugagccccagga

SEQ ID NO: 870788 - RNA, 19 nt, Artificial Sequence
  Description of Artificial Sequence: Synthetic oligonucleotide
cuugccaaugcggucaagc

SEQ ID NO: 870789 - RNA, 19 nt, Artificial Sequence
  Description of Artificial Sequence: Synthetic oligonucleotide
agggaguacccacaaacgu

SEQ ID NO: 870790 - RNA, 19 nt, Artificial Sequence
  Description of Artificial Sequence: Synthetic oligonucleotide
cucggaacuggacuccucg

SEQ ID NO: 870791 - RNA, 19 nt, Artificial Sequence
  Description of Artificial Sequence: Synthetic oligonucleotide
uugcaauugugacgcagca

SEQ ID NO: 870792 - RNA, 19 nt, Artificial Sequence
  Description of Artificial Sequence: Synthetic oligonucleotide
gcaauugugacgcagcaca

SEQ ID NO: 870793 - RNA, 19 nt, Artificial Sequence
  Description of Artificial Sequence: Synthetic oligonucleotide
cagugggucggaaucgugg

SEQ ID NO: 870794 - RNA, 19 nt, Artificial Sequence
  Description of Artificial Sequence: Synthetic oligonucleotide
cucgccaugccccucagac

SEQ ID NO: 870795 - RNA, 19 nt, Artificial Sequence
  Description of Artificial Sequence: Synthetic oligonucleotide
aggugagccauguccucgc

SEQ ID NO: 870796 - RNA, 19 nt, Artificial Sequence
  Description of Artificial Sequence: Synthetic oligonucleotide
guuauucuugggaaucaag

SEQ ID NO: 870797 - RNA, 19 nt, Artificial Sequence
  Description of Artificial Sequence: Synthetic oligonucleotide
cucagccucgccaucaaug

SEQ ID NO: 870798 - RNA, 19 nt, Artificial Sequence
  Description of Artificial Sequence: Synthetic oligonucleotide
acuagcguggacaagcacu

SEQ ID NO: 870799 - RNA, 19 nt, Artificial Sequence
  Description of Artificial Sequence: Synthetic oligonucleotide
caguggaccagguuuuagc

SEQ ID NO: 870800 - RNA, 19 nt, Artificial Sequence
  Description of Artificial Sequence: Synthetic oligonucleotide
gaggucagaguuuggcggc

SEQ ID NO: 870801 - RNA, 19 nt, Artificial Sequence
  Description of Artificial Sequence: Synthetic oligonucleotide
uucagcggguagaugucag

SEQ ID NO: 870802 - RNA, 19 nt, Artificial Sequence
  Description of Artificial Sequence: Synthetic oligonucleotide
gugacgcagcacaagaggg

SEQ ID NO: 870803 - RNA, 19 nt, Artificial Sequence
  Description of Artificial Sequence: Synthetic oligonucleotide
acucugaacgauucagagu

SEQ ID NO: 870804 - RNA, 19 nt, Artificial Sequence
  Description of Artificial Sequence: Synthetic oligonucleotide
gaaaaggcccaaaauaacu

SEQ ID NO: 870805 - RNA, 19 nt, Artificial Sequence
  Description of Artificial Sequence: Synthetic oligonucleotide
acucgcauaggguggaggu

SEQ ID NO: 870806 - RNA, 19 nt, Artificial Sequence
  Description of Artificial Sequence: Synthetic oligonucleotide
cuuucauccuuagucuagc

SEQ ID NO: 870807 - RNA, 19 nt, Artificial Sequence
  Description of Artificial Sequence: Synthetic oligonucleotide
aguacccaugagaucacac

SEQ ID NO: 870808 - RNA, 19 nt, Artificial Sequence
  Description of Artificial Sequence: Synthetic oligonucleotide
auuugaaaugauagggcgu

SEQ ID NO: 870809 - RNA, 19 nt, Artificial Sequence
  Description of Artificial Sequence: Synthetic oligonucleotide
gacaggccggacuagcgug

SEQ ID NO: 870810 - RNA, 19 nt, Artificial Sequence
  Description of Artificial Sequence: Synthetic oligonucleotide
ccuuuuagagcucaaaaca

SEQ ID NO: 870811 - RNA, 19 nt, Artificial Sequence
  Description of Artificial Sequence: Synthetic oligonucleotide
ggugcgugaagccuacagg

SEQ ID NO: 870812 - RNA, 19 nt, Artificial Sequence
  Description of Artificial Sequence: Synthetic oligonucleotide
cuucgcaguccccacggcg

SEQ ID NO: 870813 - RNA, 19 nt, Artificial Sequence
  Description of Artificial Sequence: Synthetic oligonucleotide
uguagcgugugaugaauuu

SEQ ID NO: 870814 - RNA, 19 nt, Artificial Sequence
  Description of Artificial Sequence: Synthetic oligonucleotide
agccacaccgaagucugcc

SEQ ID NO: 870815 - RNA, 19 nt, Artificial Sequence
  Description of Artificial Sequence: Synthetic oligonucleotide
ucgcauaggguggagguca

SEQ ID NO: 870816 - RNA, 19 nt, Artificial Sequence
  Description of Artificial Sequence: Synthetic oligonucleotide
acuugcuauguggacuugg

SEQ ID NO: 870817 - RNA, 19 nt, Artificial Sequence
  Description of Artificial Sequence: Synthetic oligonucleotide
guucccgaagccccggagg

SEQ ID NO: 870818 - RNA, 19 nt, Artificial Sequence
  Description of Artificial Sequence: Synthetic oligonucleotide
guaggagccgaaguagcgg

SEQ ID NO: 870819 - RNA, 19 nt, Artificial Sequence
  Description of Artificial Sequence: Synthetic oligonucleotide
auccggguagccucuccgc

SEQ ID NO: 870820 - RNA, 19 nt, Artificial Sequence
  Description of Artificial Sequence: Synthetic oligonucleotide
ucucccucucuguaagagc

SEQ ID NO: 870821 - RNA, 19 nt, Artificial Sequence
  Description of Artificial Sequence: Synthetic oligonucleotide
aacguggguggguuauucu

SEQ ID NO: 870822 - RNA, 19 nt, Artificial Sequence
  Description of Artificial Sequence: Synthetic oligonucleotide
gaacgauucagaguaccca

SEQ ID NO: 870823 - RNA, 19 nt, Artificial Sequence
  Description of Artificial Sequence: Synthetic oligonucleotide
agauaccaggacacgacuc

SEQ ID NO: 870824 - RNA, 19 nt, Artificial Sequence
  Description of Artificial Sequence: Synthetic oligonucleotide
agguaggagccgaaguagc

SEQ ID NO: 870825 - RNA, 19 nt, Artificial Sequence
  Description of Artificial Sequence: Synthetic oligonucleotide
aaguugugaccaucuugga

SEQ ID NO: 870826 - RNA, 19 nt, Artificial Sequence
  Description of Artificial Sequence: Synthetic oligonucleotide
caauguaggucuccuccag

SEQ ID NO: 870827 - RNA, 19 nt, Artificial Sequence
  Description of Artificial Sequence: Synthetic oligonucleotide
uccuaauccaggucuuuau

SEQ ID NO: 870828 - RNA, 19 nt, Artificial Sequence
  Description of Artificial Sequence: Synthetic oligonucleotide
gcaaguugugaccaucuug

SEQ ID NO: 870829 - RNA, 19 nt, Artificial Sequence
  Description of Artificial Sequence: Synthetic oligonucleotide
gaaguagcgggugauguaa

SEQ ID NO: 870830 - RNA, 19 nt, Artificial Sequence
  Description of Artificial Sequence: Synthetic oligonucleotide
aaacgagcccuugccaaug

SEQ ID NO: 870831 - RNA, 19 nt, Artificial Sequence
  Description of Artificial Sequence: Synthetic oligonucleotide
agcacaagagggcuuccca

SEQ ID NO: 870832 - RNA, 19 nt, Artificial Sequence
  Description of Artificial Sequence: Synthetic oligonucleotide
aacaggacucgcauagggu

SEQ ID NO: 870833 - RNA, 19 nt, Artificial Sequence
  Description of Artificial Sequence: Synthetic oligonucleotide
uugauaaccucaggugcca

SEQ ID NO: 870834 - RNA, 19 nt, Artificial Sequence
  Description of Artificial Sequence: Synthetic oligonucleotide
cugcucugagagcagcacg

SEQ ID NO: 870835 - RNA, 19 nt, Artificial Sequence
  Description of Artificial Sequence: Synthetic oligonucleotide
aaacgcccaggccucccag

SEQ ID NO: 870836 - RNA, 19 nt, Artificial Sequence
  Description of Artificial Sequence: Synthetic oligonucleotide
ugcaucaguccgucguuca

SEQ ID NO: 870837 - RNA, 19 nt, Artificial Sequence
  Description of Artificial Sequence: Synthetic oligonucleotide
ggacaauacaucccuggug

SEQ ID NO: 870838 - RNA, 19 nt, Artificial Sequence
  Description of Artificial Sequence: Synthetic oligonucleotide
ucgcaccgcaguugggucg

SEQ ID NO: 870839 - RNA, 19 nt, Artificial Sequence
  Description of Artificial Sequence: Synthetic oligonucleotide
guggaccagguuuuagcag

SEQ ID NO: 870840 - RNA, 19 nt, Artificial Sequence
  Description of Artificial Sequence: Synthetic oligonucleotide
acgagaauucugguucccg

SEQ ID NO: 870841 - RNA, 19 nt, Artificial Sequence
  Description of Artificial Sequence: Synthetic oligonucleotide
cuuagucuagcagcugcag

SEQ ID NO: 870842 - RNA, 19 nt, Artificial Sequence
  Description of Artificial Sequence: Synthetic oligonucleotide
accgcaguugggucgcccg

SEQ ID NO: 870843 - RNA, 19 nt, Artificial Sequence
  Description of Artificial Sequence: Synthetic oligonucleotide
ugucacacuggcugagcac

SEQ ID NO: 870844 - RNA, 19 nt, Artificial Sequence
  Description of Artificial Sequence: Synthetic oligonucleotide
acguguuccucuugauuug

SEQ ID NO: 870845 - RNA, 19 nt, Artificial Sequence
  Description of Artificial Sequence: Synthetic oligonucleotide
guagcgugugaugaauuug

SEQ ID NO: 870846 - RNA, 19 nt, Artificial Sequence
  Description of Artificial Sequence: Synthetic oligonucleotide
uccacacgagaauucuggu

SEQ ID NO: 870847 - RNA, 19 nt, Artificial Sequence
  Description of Artificial Sequence: Synthetic oligonucleotide
ucagaauacuuagcaaguu

SEQ ID NO: 870848 - RNA, 19 nt, Artificial Sequence
  Description of Artificial Sequence: Synthetic oligonucleotide
ucgaugccuuuguacaccu

SEQ ID NO: 870849 - RNA, 19 nt, Artificial Sequence
  Description of Artificial Sequence: Synthetic oligonucleotide
aucaagaacaggacucgca

SEQ ID NO: 870850 - RNA, 19 nt, Artificial Sequence
  Description of Artificial Sequence: Synthetic oligonucleotide
ucggaacuggacuccucgc

SEQ ID NO: 870851 - RNA, 19 nt, Artificial Sequence
  Description of Artificial Sequence: Synthetic oligonucleotide
uccgucguucagcggguag

SEQ ID NO: 870852 - RNA, 19 nt, Artificial Sequence
  Description of Artificial Sequence: Synthetic oligonucleotide
gacucgcauaggguggagg

SEQ ID NO: 870853 - RNA, 19 nt, Artificial Sequence
  Description of Artificial Sequence: Synthetic oligonucleotide
uggguggguuauucuuggg

SEQ ID NO: 870854 - RNA, 19 nt, Artificial Sequence
  Description of Artificial Sequence: Synthetic oligonucleotide
guugggucgcccggaaacg

SEQ ID NO: 870855 - RNA, 19 nt, Artificial Sequence
  Description of Artificial Sequence: Synthetic oligonucleotide
cugacguguccgauccggg

SEQ ID NO: 870856 - RNA, 19 nt, Artificial Sequence
  Description of Artificial Sequence: Synthetic oligonucleotide
gguggguuauucuugggaa

SEQ ID NO: 870857 - RNA, 19 nt, Artificial Sequence
  Description of Artificial Sequence: Synthetic oligonucleotide
ugacguguccgauccgggu

SEQ ID NO: 870858 - RNA, 19 nt, Artificial Sequence
  Description of Artificial Sequence: Synthetic oligonucleotide
gucgaugccuuuguacacc

SEQ ID NO: 870859 - RNA, 19 nt, Artificial Sequence
  Description of Artificial Sequence: Synthetic oligonucleotide
ugcaauugugacgcagcac

SEQ ID NO: 870860 - RNA, 19 nt, Artificial Sequence
  Description of Artificial Sequence: Synthetic oligonucleotide
aguagucgcuuucauccuu

SEQ ID NO: 870861 - RNA, 19 nt, Artificial Sequence
  Description of Artificial Sequence: Synthetic oligonucleotide
uggcaggucuuugcaauug

SEQ ID NO: 870862 - RNA, 19 nt, Artificial Sequence
  Description of Artificial Sequence: Synthetic oligonucleotide
ugggucggaaucguggguc

SEQ ID NO: 870863 - RNA, 19 nt, Artificial Sequence
  Description of Artificial Sequence: Synthetic oligonucleotide
caagcacugggaccuuggc

SEQ ID NO: 870864 - RNA, 19 nt, Artificial Sequence
  Description of Artificial Sequence: Synthetic oligonucleotide
ggaaacguccagaugggac

SEQ ID NO: 870865 - RNA, 19 nt, Artificial Sequence
  Description of Artificial Sequence: Synthetic oligonucleotide
gggaguacccacaaacgug

SEQ ID NO: 870866 - RNA, 19 nt, Artificial Sequence
  Description of Artificial Sequence: Synthetic oligonucleotide
cuuggaccccuaugagccc

SEQ ID NO: 870867 - RNA, 19 nt, Artificial Sequence
  Description of Artificial Sequence: Synthetic oligonucleotide
agaguacccaugagaucac

SEQ ID NO: 870868 - RNA, 19 nt, Artificial Sequence
  Description of Artificial Sequence: Synthetic oligonucleotide
ucaguccgucguucagcgg

SEQ ID NO: 870869 - RNA, 19 nt, Artificial Sequence
  Description of Artificial Sequence: Synthetic oligonucleotide
agaugucagaugguuccug

SEQ ID NO: 870870 - RNA, 19 nt, Artificial Sequence
  Description of Artificial Sequence: Synthetic oligonucleotide
ucuugcgcucugagugcag

SEQ ID NO: 870871 - RNA, 19 nt, Artificial Sequence
  Description of Artificial Sequence: Synthetic oligonucleotide
acaccacaaggcaaguugu

SEQ ID NO: 870872 - RNA, 19 nt, Artificial Sequence
  Description of Artificial Sequence: Synthetic oligonucleotide
agccauguccucgcugacg

SEQ ID NO: 870873 - RNA, 19 nt, Artificial Sequence
  Description of Artificial Sequence: Synthetic oligonucleotide
gagauaccaggacacgacu

SEQ ID NO: 870874 - RNA, 19 nt, Artificial Sequence
  Description of Artificial Sequence: Synthetic oligonucleotide
cuguaagagcagugcauca

SEQ ID NO: 870875 - RNA, 19 nt, Artificial Sequence
  Description of Artificial Sequence: Synthetic oligonucleotide
cagguuuuagcagguccag

SEQ ID NO: 870876 - RNA, 19 nt, Artificial Sequence
  Description of Artificial Sequence: Synthetic oligonucleotide
gacuagcguggacaagcac

SEQ ID NO: 870877 - RNA, 19 nt, Artificial Sequence
  Description of Artificial Sequence: Synthetic oligonucleotide
ccacaaggcaaguugugac

SEQ ID NO: 870878 - RNA, 19 nt, Artificial Sequence
  Description of Artificial Sequence: Synthetic oligonucleotide
gcccaaaauaacucugaac

SEQ ID NO: 870879 - RNA, 19 nt, Artificial Sequence
  Description of Artificial Sequence: Synthetic oligonucleotide
uuccuaauccaggucuuua

SEQ ID NO: 870880 - RNA, 19 nt, Artificial Sequence
  Description of Artificial Sequence: Synthetic oligonucleotide
ugcggucaagcuuggugaa

SEQ ID NO: 870881 - RNA, 19 nt, Artificial Sequence
  Description of Artificial Sequence: Synthetic oligonucleotide
uguccgauccggguagccu

SEQ ID NO: 870882 - RNA, 19 nt, Artificial Sequence
  Description of Artificial Sequence: Synthetic oligonucleotide
cuucagguaggagccgaag

SEQ ID NO: 870883 - RNA, 19 nt, Artificial Sequence
  Description of Artificial Sequence: Synthetic oligonucleotide
cugagauaccaggacacga

SEQ ID NO: 870884 - RNA, 19 nt, Artificial Sequence
  Description of Artificial Sequence: Synthetic oligonucleotide
gcuuucauccuuagucuag

SEQ ID NO: 870885 - RNA, 19 nt, Artificial Sequence
  Description of Artificial Sequence: Synthetic oligonucleotide
ccuugugcaacuugcuaug

SEQ ID NO: 870886 - RNA, 19 nt, Artificial Sequence
  Description of Artificial Sequence: Synthetic oligonucleotide
agggcguuucuaaugcucu

SEQ ID NO: 870887 - RNA, 19 nt, Artificial Sequence
  Description of Artificial Sequence: Synthetic oligonucleotide
gcugacguguccgauccgg

SEQ ID NO: 870888 - RNA, 19 nt, Artificial Sequence
  Description of Artificial Sequence: Synthetic oligonucleotide
uccaacguggguggguuau

SEQ ID NO: 870889 - RNA, 19 nt, Artificial Sequence
  Description of Artificial Sequence: Synthetic oligonucleotide
agucgcuuucauccuuagu

SEQ ID NO: 870890 - RNA, 19 nt, Artificial Sequence
  Description of Artificial Sequence: Synthetic oligonucleotide
cucgcugacguguccgauc

SEQ ID NO: 870891 - RNA, 19 nt, Artificial Sequence
  Description of Artificial Sequence: Synthetic oligonucleotide
guccgauccggguagccuc

SEQ ID NO: 870892 - RNA, 19 nt, Artificial Sequence
  Description of Artificial Sequence: Synthetic oligonucleotide
cuuggccggaugguugggg

SEQ ID NO: 870893 - RNA, 19 nt, Artificial Sequence
  Description of Artificial Sequence: Synthetic oligonucleotide
gacguguccgauccgggua

SEQ ID NO: 870894 - RNA, 19 nt, Artificial Sequence
  Description of Artificial Sequence: Synthetic oligonucleotide
uugggucgcccggaaacgc

SEQ ID NO: 870895 - RNA, 19 nt, Artificial Sequence
  Description of Artificial Sequence: Synthetic oligonucleotide
agcgggugauguaagggcu

SEQ ID NO: 870896 - RNA, 19 nt, Artificial Sequence
  Description of Artificial Sequence: Synthetic oligonucleotide
cauccuuagucuagcagcu

SEQ ID NO: 870897 - RNA, 19 nt, Artificial Sequence
  Description of Artificial Sequence: Synthetic oligonucleotide
ucuuugcaauugugacgca

SEQ ID NO: 870898 - RNA, 19 nt, Artificial Sequence
  Description of Artificial Sequence: Synthetic oligonucleotide
ggucaagcuuggugaagag

SEQ ID NO: 870899 - RNA, 19 nt, Artificial Sequence
  Description of Artificial Sequence: Synthetic oligonucleotide
cagaugggacccugcuccc

SEQ ID NO: 870900 - RNA, 19 nt, Artificial Sequence
  Description of Artificial Sequence: Synthetic oligonucleotide
auaccaggacacgacuccu

SEQ ID NO: 870901 - RNA, 19 nt, Artificial Sequence
  Description of Artificial Sequence: Synthetic oligonucleotide
cacaaacguguuccucuug

SEQ ID NO: 870902 - RNA, 19 nt, Artificial Sequence
  Description of Artificial Sequence: Synthetic oligonucleotide
gguagaugucagaugguuc

SEQ ID NO: 870903 - RNA, 19 nt, Artificial Sequence
  Description of Artificial Sequence: Synthetic oligonucleotide
gaaacgcccaggccuccca

SEQ ID NO: 870904 - RNA, 19 nt, Artificial Sequence
  Description of Artificial Sequence: Synthetic oligonucleotide
cgugugaugaauuugugcu

SEQ ID NO: 870905 - RNA, 19 nt, Artificial Sequence
  Description of Artificial Sequence: Synthetic oligonucleotide
aggcaaguugugaccaucu

SEQ ID NO: 870906 - RNA, 19 nt, Artificial Sequence
  Description of Artificial Sequence: Synthetic oligonucleotide
gcguuucuaaugcucuaug

SEQ ID NO: 870907 - RNA, 19 nt, Artificial Sequence
  Description of Artificial Sequence: Synthetic oligonucleotide
ucgccaugccccucagacu

SEQ ID NO: 870908 - RNA, 19 nt, Artificial Sequence
  Description of Artificial Sequence: Synthetic oligonucleotide
cacgagaauucugguuccc

SEQ ID NO: 870909 - RNA, 19 nt, Artificial Sequence
  Description of Artificial Sequence: Synthetic oligonucleotide
cgugaagccuacaggcugg

SEQ ID NO: 870910 - RNA, 19 nt, Artificial Sequence
  Description of Artificial Sequence: Synthetic oligonucleotide
cucgcaccgcaguuggguc

SEQ ID NO: 870911 - RNA, 19 nt, Artificial Sequence
  Description of Artificial Sequence: Synthetic oligonucleotide
ggaaaccuggugcgugaag

SEQ ID NO: 870912 - RNA, 19 nt, Artificial Sequence
  Description of Artificial Sequence: Synthetic oligonucleotide
caauugugacgcagcacaa

SEQ ID NO: 870913 - RNA, 19 nt, Artificial Sequence
  Description of Artificial Sequence: Synthetic oligonucleotide
gccucaagcaccuccggga

SEQ ID NO: 870914 - RNA, 19 nt, Artificial Sequence
  Description of Artificial Sequence: Synthetic oligonucleotide
gagccgaaguagcggguga

SEQ ID NO: 870915 - RNA, 19 nt, Artificial Sequence
  Description of Artificial Sequence: Synthetic oligonucleotide
caacguggguggguuauuc

SEQ ID NO: 870916 - RNA, 19 nt, Artificial Sequence
  Description of Artificial Sequence: Synthetic oligonucleotide
uggaccccuaugagcccca

SEQ ID NO: 870917 - RNA, 19 nt, Artificial Sequence
  Description of Artificial Sequence: Synthetic oligonucleotide
cggacuagcguggacaagc

SEQ ID NO: 870918 - RNA, 19 nt, Artificial Sequence
  Description of Artificial Sequence: Synthetic oligonucleotide
caucccggucucccggccc

SEQ ID NO: 870919 - RNA, 19 nt, Artificial Sequence
  Description of Artificial Sequence: Synthetic oligonucleotide
uugcgcucugagugcagau

SEQ ID NO: 870920 - RNA, 19 nt, Artificial Sequence
  Description of Artificial Sequence: Synthetic oligonucleotide
ugcgcucugagugcagaua

SEQ ID NO: 870921 - RNA, 19 nt, Artificial Sequence
  Description of Artificial Sequence: Synthetic oligonucleotide
ugauaaccucaggugccau

SEQ ID NO: 870922 - RNA, 19 nt, Artificial Sequence
  Description of Artificial Sequence: Synthetic oligonucleotide
auccuuagucuagcagcug

SEQ ID NO: 870923 - RNA, 19 nt, Artificial Sequence
  Description of Artificial Sequence: Synthetic oligonucleotide
cuaacacugucagaauacu

SEQ ID NO: 870924 - RNA, 19 nt, Artificial Sequence
  Description of Artificial Sequence: Synthetic oligonucleotide
aggacucgcauagggugga

SEQ ID NO: 870925 - RNA, 19 nt, Artificial Sequence
  Description of Artificial Sequence: Synthetic oligonucleotide
cugcccaguagucgcuuuc

SEQ ID NO: 870926 - RNA, 19 nt, Artificial Sequence
  Description of Artificial Sequence: Synthetic oligonucleotide
guucagcggguagauguca

SEQ ID NO: 870927 - RNA, 19 nt, Artificial Sequence
  Description of Artificial Sequence: Synthetic oligonucleotide
ggaguacccacaaacgugu

SEQ ID NO: 870928 - RNA, 19 nt, Artificial Sequence
  Description of Artificial Sequence: Synthetic oligonucleotide
uccucggaacuggacuccu

SEQ ID NO: 870929 - RNA, 19 nt, Artificial Sequence
  Description of Artificial Sequence: Synthetic oligonucleotide
cacaagagggcuucccagu

SEQ ID NO: 870930 - RNA, 19 nt, Artificial Sequence
  Description of Artificial Sequence: Synthetic oligonucleotide
acuuggccggaugguuggg

SEQ ID NO: 870931 - RNA, 19 nt, Artificial Sequence
  Description of Artificial Sequence: Synthetic oligonucleotide
gggucggaaucgugggucc

SEQ ID NO: 870932 - RNA, 19 nt, Artificial Sequence
  Description of Artificial Sequence: Synthetic oligonucleotide
uauguggacuuggccggau

SEQ ID NO: 870933 - RNA, 19 nt, Artificial Sequence
  Description of Artificial Sequence: Synthetic oligonucleotide
cucgcauaggguggagguc

SEQ ID NO: 870934 - RNA, 19 nt, Artificial Sequence
  Description of Artificial Sequence: Synthetic oligonucleotide
ugugaccaucuuggacccc

SEQ ID NO: 870935 - RNA, 19 nt, Artificial Sequence
  Description of Artificial Sequence: Synthetic oligonucleotide
ucggaaucguggguccuua

SEQ ID NO: 870936 - RNA, 19 nt, Artificial Sequence
  Description of Artificial Sequence: Synthetic oligonucleotide
gcgcuuguagcggucaaug

SEQ ID NO: 870937 - RNA, 19 nt, Artificial Sequence
  Description of Artificial Sequence: Synthetic oligonucleotide
cccaccgcucugcuuaugc

SEQ ID NO: 870938 - RNA, 19 nt, Artificial Sequence
  Description of Artificial Sequence: Synthetic oligonucleotide
ggguccuuauugaggcagg

SEQ ID NO: 870939 - RNA, 19 nt, Artificial Sequence
  Description of Artificial Sequence: Synthetic oligonucleotide
ggagccgaaguagcgggug

SEQ ID NO: 870940 - RNA, 19 nt, Artificial Sequence
  Description of Artificial Sequence: Synthetic oligonucleotide
cauguccucgcugacgugu

SEQ ID NO: 870941 - RNA, 19 nt, Artificial Sequence
  Description of Artificial Sequence: Synthetic oligonucleotide
acguccagaugggacccug

SEQ ID NO: 870942 - RNA, 19 nt, Artificial Sequence
  Description of Artificial Sequence: Synthetic oligonucleotide
ggcccaaaauaacucugaa

SEQ ID NO: 870943 - RNA, 19 nt, Artificial Sequence
  Description of Artificial Sequence: Synthetic oligonucleotide
gcgcucugagugcagauaa

SEQ ID NO: 870944 - RNA, 19 nt, Artificial Sequence
  Description of Artificial Sequence: Synthetic oligonucleotide
cuugcgcucugagugcaga

SEQ ID NO: 870945 - RNA, 19 nt, Artificial Sequence
  Description of Artificial Sequence: Synthetic oligonucleotide
gugugaugaauuugugcuu

SEQ ID NO: 870946 - RNA, 19 nt, Artificial Sequence
  Description of Artificial Sequence: Synthetic oligonucleotide
acacgacuccucagccagg

SEQ ID NO: 870947 - RNA, 19 nt, Artificial Sequence
  Description of Artificial Sequence: Synthetic oligonucleotide
cagccucgccaucaauguc

SEQ ID NO: 870948 - RNA, 19 nt, Artificial Sequence
  Description of Artificial Sequence: Synthetic oligonucleotide
ggacacgacuccucagcca

SEQ ID NO: 870949 - RNA, 19 nt, Artificial Sequence
  Description of Artificial Sequence: Synthetic oligonucleotide
gguuauucuugggaaucaa

SEQ ID NO: 870950 - RNA, 19 nt, Artificial Sequence
  Description of Artificial Sequence: Synthetic oligonucleotide
ggucucccggcccgcuucg

SEQ ID NO: 870951 - RNA, 19 nt, Artificial Sequence
  Description of Artificial Sequence: Synthetic oligonucleotide
ggggccgaaggaaggaaac

SEQ ID NO: 870952 - RNA, 19 nt, Artificial Sequence
  Description of Artificial Sequence: Synthetic oligonucleotide
uccaguggaccagguuuua

SEQ ID NO: 870953 - RNA, 19 nt, Artificial Sequence
  Description of Artificial Sequence: Synthetic oligonucleotide
aggaaaccuggugcgugaa

SEQ ID NO: 870954 - RNA, 19 nt, Artificial Sequence
  Description of Artificial Sequence: Synthetic oligonucleotide
agcgcuuguagcggucaau

SEQ ID NO: 870955 - RNA, 19 nt, Artificial Sequence
  Description of Artificial Sequence: Synthetic oligonucleotide
aguccgucguucagcgggu

SEQ ID NO: 870956 - RNA, 19 nt, Artificial Sequence
  Description of Artificial Sequence: Synthetic oligonucleotide
guguccgauccggguagcc

SEQ ID NO: 870957 - RNA, 19 nt, Artificial Sequence
  Description of Artificial Sequence: Synthetic oligonucleotide
cgcuucgcaguccccacgg

SEQ ID NO: 870958 - RNA, 19 nt, Artificial Sequence
  Description of Artificial Sequence: Synthetic oligonucleotide
ccuggugcgugaagccuac

SEQ ID NO: 870959 - RNA, 19 nt, Artificial Sequence
  Description of Artificial Sequence: Synthetic oligonucleotide
caguagucgcuuucauccu

SEQ ID NO: 870960 - RNA, 19 nt, Artificial Sequence
  Description of Artificial Sequence: Synthetic oligonucleotide
cuauguggacuuggccgga

SEQ ID NO: 870961 - RNA, 19 nt, Artificial Sequence
  Description of Artificial Sequence: Synthetic oligonucleotide
aggagccgaaguagcgggu

SEQ ID NO: 870962 - RNA, 19 nt, Artificial Sequence
  Description of Artificial Sequence: Synthetic oligonucleotide
cuugugcaacuugcuaugu

SEQ ID NO: 870963 - RNA, 19 nt, Artificial Sequence
  Description of Artificial Sequence: Synthetic oligonucleotide
caccgcaguugggucgccc

SEQ ID NO: 870964 - RNA, 19 nt, Artificial Sequence
  Description of Artificial Sequence: Synthetic oligonucleotide
ggaaacgcccaggccuccc

SEQ ID NO: 870965 - RNA, 19 nt, Artificial Sequence
  Description of Artificial Sequence: Synthetic oligonucleotide
cccuugugcaacuugcuau

SEQ ID NO: 870966 - RNA, 19 nt, Artificial Sequence
  Description of Artificial Sequence: Synthetic oligonucleotide
ccgcucgcccgccucaagc

SEQ ID NO: 870967 - RNA, 19 nt, Artificial Sequence
  Description of Artificial Sequence: Synthetic oligonucleotide
gguguagcgugugaugaau

SEQ ID NO: 870968 - RNA, 19 nt, Artificial Sequence
  Description of Artificial Sequence: Synthetic oligonucleotide
caguccuuuuagagcucaa

SEQ ID NO: 870969 - RNA, 19 nt, Artificial Sequence
  Description of Artificial Sequence: Synthetic oligonucleotide
ggaaucguggguccuuauu

SEQ ID NO: 870970 - RNA, 19 nt, Artificial Sequence
  Description of Artificial Sequence: Synthetic oligonucleotide
cguucagcggguagauguc

SEQ ID NO: 870971 - RNA, 19 nt, Artificial Sequence
  Description of Artificial Sequence: Synthetic oligonucleotide
gugggucggaaucgugggu

SEQ ID NO: 870972 - RNA, 19 nt, Artificial Sequence
  Description of Artificial Sequence: Synthetic oligonucleotide
gguugucgaugccuuugua

SEQ ID NO: 870973 - RNA, 19 nt, Artificial Sequence
  Description of Artificial Sequence: Synthetic oligonucleotide
acgcucccaccgcucugcu

SEQ ID NO: 870974 - RNA, 19 nt, Artificial Sequence
  Description of Artificial Sequence: Synthetic oligonucleotide
gccggacuagcguggacaa

SEQ ID NO: 870975 - RNA, 19 nt, Artificial Sequence
  Description of Artificial Sequence: Synthetic oligonucleotide
gggaaacguccagauggga

SEQ ID NO: 870976 - RNA, 19 nt, Artificial Sequence
  Description of Artificial Sequence: Synthetic oligonucleotide
ccgcaguugggucgcccgg

SEQ ID NO: 870977 - RNA, 19 nt, Artificial Sequence
  Description of Artificial Sequence: Synthetic oligonucleotide
ucccaccgcucugcuuaug

SEQ ID NO: 870978 - RNA, 19 nt, Artificial Sequence
  Description of Artificial Sequence: Synthetic oligonucleotide
cggcucgcaccgcaguugg

SEQ ID NO: 870979 - RNA, 19 nt, Artificial Sequence
  Description of Artificial Sequence: Synthetic oligonucleotide
ccccucagacuuccagcgc

SEQ ID NO: 870980 - RNA, 19 nt, Artificial Sequence
  Description of Artificial Sequence: Synthetic oligonucleotide
caugccccucagacuucca

SEQ ID NO: 870981 - RNA, 19 nt, Artificial Sequence
  Description of Artificial Sequence: Synthetic oligonucleotide
ccgcuucgcaguccccacg

SEQ ID NO: 870982 - RNA, 19 nt, Artificial Sequence
  Description of Artificial Sequence: Synthetic oligonucleotide
ggcguuucuaaugcucuau

SEQ ID NO: 870983 - RNA, 19 nt, Artificial Sequence
  Description of Artificial Sequence: Synthetic oligonucleotide
gcggcucgcaccgcaguug

SEQ ID NO: 870984 - RNA, 19 nt, Artificial Sequence
  Description of Artificial Sequence: Synthetic oligonucleotide
gggcguuucuaaugcucua

SEQ ID NO: 870985 - RNA, 19 nt, Artificial Sequence
  Description of Artificial Sequence: Synthetic oligonucleotide
caguugggucgcccggaaa

SEQ ID NO: 870986 - RNA, 19 nt, Artificial Sequence
  Description of Artificial Sequence: Synthetic oligonucleotide
ggacucgcauaggguggag

SEQ ID NO: 870987 - RNA, 19 nt, Artificial Sequence
  Description of Artificial Sequence: Synthetic oligonucleotide
guguagcgugugaugaauu

SEQ ID NO: 870988 - RNA, 19 nt, Artificial Sequence
  Description of Artificial Sequence: Synthetic oligonucleotide
cccgcuucgcaguccccac

SEQ ID NO: 870989 - RNA, 19 nt, Artificial Sequence
  Description of Artificial Sequence: Synthetic oligonucleotide
cccucagacuuccagcgcu

SEQ ID NO: 870990 - RNA, 19 nt, Artificial Sequence
  Description of Artificial Sequence: Synthetic oligonucleotide
cggucaagcuuggugaaga

SEQ ID NO: 870991 - RNA, 19 nt, Artificial Sequence
  Description of Artificial Sequence: Synthetic oligonucleotide
ccgcaagaugguggcaaug

SEQ ID NO: 870992 - RNA, 19 nt, Artificial Sequence
  Description of Artificial Sequence: Synthetic oligonucleotide
cuccaacguggguggguua

SEQ ID NO: 870993 - RNA, 19 nt, Artificial Sequence
  Description of Artificial Sequence: Synthetic oligonucleotide
ccucuggguccacacgaga

SEQ ID NO: 870994 - RNA, 19 nt, Artificial Sequence
  Description of Artificial Sequence: Synthetic oligonucleotide
ggcaaguugugaccaucuu

SEQ ID NO: 870995 - RNA, 19 nt, Artificial Sequence
  Description of Artificial Sequence: Synthetic oligonucleotide
acgcagcacaagagggcuu

SEQ ID NO: 870996 - RNA, 19 nt, Artificial Sequence
  Description of Artificial Sequence: Synthetic oligonucleotide
ccgucguucagcggguaga

SEQ ID NO: 870997 - RNA, 19 nt, Artificial Sequence
  Description of Artificial Sequence: Synthetic oligonucleotide
cgauccggguagccucucc

SEQ ID NO: 870998 - RNA, 19 nt, Artificial Sequence
  Description of Artificial Sequence: Synthetic oligonucleotide
cgcuuucauccuuagucua

SEQ ID NO: 870999 - RNA, 19 nt, Artificial Sequence
  Description of Artificial Sequence: Synthetic oligonucleotide
gcccgcuucgcagucccca

SEQ ID NO: 871000 - RNA, 19 nt, Artificial Sequence
  Description of Artificial Sequence: Synthetic oligonucleotide
ggaccagguuuuagcaggu

SEQ ID NO: 871001 - RNA, 19 nt, Artificial Sequence
  Description of Artificial Sequence: Synthetic oligonucleotide
gaguacccacaaacguguu

SEQ ID NO: 871002 - RNA, 19 nt, Artificial Sequence
  Description of Artificial Sequence: Synthetic oligonucleotide
cgcaccgcaguugggucgc

SEQ ID NO: 871003 - RNA, 19 nt, Artificial Sequence
  Description of Artificial Sequence: Synthetic oligonucleotide
ccacacgagaauucugguu

SEQ ID NO: 871004 - RNA, 19 nt, Artificial Sequence
  Description of Artificial Sequence: Synthetic oligonucleotide
guggcccuccaacgugggu

SEQ ID NO: 871005 - RNA, 19 nt, Artificial Sequence
  Description of Artificial Sequence: Synthetic oligonucleotide
gucggaaucguggguccuu

SEQ ID NO: 871006 - RNA, 19 nt, Artificial Sequence
  Description of Artificial Sequence: Synthetic oligonucleotide
ggcagugggucggaaucgu

SEQ ID NO: 871007 - RNA, 19 nt, Artificial Sequence
  Description of Artificial Sequence: Synthetic oligonucleotide
ccagcgcuuguagcgguca

SEQ ID NO: 871008 - RNA, 19 nt, Artificial Sequence
  Description of Artificial Sequence: Synthetic oligonucleotide
ccggacuagcguggacaag

SEQ ID NO: 871009 - RNA, 19 nt, Artificial Sequence
  Description of Artificial Sequence: Synthetic oligonucleotide
cuggugcgugaagccuaca

SEQ ID NO: 871010 - RNA, 19 nt, Artificial Sequence
  Description of Artificial Sequence: Synthetic oligonucleotide
cgaugccuuuguacaccuc

SEQ ID NO: 871011 - RNA, 19 nt, Artificial Sequence
  Description of Artificial Sequence: Synthetic oligonucleotide
ccacaaacguguuccucuu

SEQ ID NO: 871012 - RNA, 19 nt, Artificial Sequence
  Description of Artificial Sequence: Synthetic oligonucleotide
cgcugacguguccgauccg

SEQ ID NO: 871013 - RNA, 19 nt, Artificial Sequence
  Description of Artificial Sequence: Synthetic oligonucleotide
ggucggaaucguggguccu

SEQ ID NO: 871014 - RNA, 19 nt, Artificial Sequence
  Description of Artificial Sequence: Synthetic oligonucleotide
caaugcggucaagcuuggu

SEQ ID NO: 871015 - RNA, 19 nt, Artificial Sequence
  Description of Artificial Sequence: Synthetic oligonucleotide
gccaugccccucagacuuc

SEQ ID NO: 871016 - RNA, 19 nt, Artificial Sequence
  Description of Artificial Sequence: Synthetic oligonucleotide
gcagauaauccaggcccuu

SEQ ID NO: 871017 - RNA, 19 nt, Artificial Sequence
  Description of Artificial Sequence: Synthetic oligonucleotide
cccggaggugagccauguc

SEQ ID NO: 871018 - RNA, 19 nt, Artificial Sequence
  Description of Artificial Sequence: Synthetic oligonucleotide
cguguccgauccggguagc

SEQ ID NO: 871019 - RNA, 19 nt, Artificial Sequence
  Description of Artificial Sequence: Synthetic oligonucleotide
cucccaccgcucugcuuau

SEQ ID NO: 871020 - RNA, 19 nt, Artificial Sequence
  Description of Artificial Sequence: Synthetic oligonucleotide
guccgucguucagcgggua

SEQ ID NO: 871021 - RNA, 19 nt, Artificial Sequence
  Description of Artificial Sequence: Synthetic oligonucleotide
ggcggcucgcaccgcaguu

SEQ ID NO: 871022 - RNA, 19 nt, Artificial Sequence
  Description of Artificial Sequence: Synthetic oligonucleotide
caagcaccuccgggaggcu

SEQ ID NO: 871023 - RNA, 19 nt, Artificial Sequence
  Description of Artificial Sequence: Synthetic oligonucleotide
cgcaguugggucgcccgga

SEQ ID NO: 871024 - RNA, 19 nt, Artificial Sequence
  Description of Artificial Sequence: Synthetic oligonucleotide
gcucugagagcagcacguu

SEQ ID NO: 871025 - RNA, 19 nt, Artificial Sequence
  Description of Artificial Sequence: Synthetic oligonucleotide
cccgcaagaugguggcaau

SEQ ID NO: 871026 - RNA, 19 nt, Artificial Sequence
  Description of Artificial Sequence: Synthetic oligonucleotide
ccgauccggguagccucuc

SEQ ID NO: 871027 - RNA, 19 nt, Artificial Sequence
  Description of Artificial Sequence: Synthetic oligonucleotide
cgucguucagcggguagau

SEQ ID NO: 871028 - RNA, 19 nt, Artificial Sequence
  Description of Artificial Sequence: Synthetic oligonucleotide
ccccggaggugagccaugu

SEQ ID NO: 871029 - RNA, 19 nt, Artificial Sequence
  Description of Artificial Sequence: Synthetic oligonucleotide
ccucgcugacguguccgau

SEQ ID NO: 871030 - RNA, 19 nt, Artificial Sequence
  Description of Artificial Sequence: Synthetic oligonucleotide
cggaaucguggguccuuau

SEQ ID NO: 871031 - RNA, 19 nt, Artificial Sequence
  Description of Artificial Sequence: Synthetic oligonucleotide
ccaacguggguggguuauu

SEQ ID NO: 871032 - RNA, 19 nt, Artificial Sequence
  Description of Artificial Sequence: Synthetic oligonucleotide
caccuccgggaggcuccau

SEQ ID NO: 871033 - RNA, 19 nt, Artificial Sequence
  Description of Artificial Sequence: Synthetic oligonucleotide
cggcggcucgcaccgcagu

SEQ ID NO: 871034 - RNA, 19 nt, Artificial Sequence
  Description of Artificial Sequence: Synthetic oligonucleotide
ccggucucccggcccgcuu

SEQ ID NO: 871035 - RNA, 19 nt, Artificial Sequence
  Description of Artificial Sequence: Synthetic oligonucleotide
ucuccaagguuaaagaacg

SEQ ID NO: 871036 - RNA, 19 nt, Artificial Sequence
  Description of Artificial Sequence: Synthetic oligonucleotide
aaugagaacguuucacugg

SEQ ID NO: 871037 - RNA, 19 nt, Artificial Sequence
  Description of Artificial Sequence: Synthetic oligonucleotide
agacucaaaauccacgugc

SEQ ID NO: 871038 - RNA, 19 nt, Artificial Sequence
  Description of Artificial Sequence: Synthetic oligonucleotide
aaaacacugaccaaguguc

SEQ ID NO: 871039 - RNA, 19 nt, Artificial Sequence
  Description of Artificial Sequence: Synthetic oligonucleotide
cauuuuguugcccagaccc

SEQ ID NO: 871040 - RNA, 19 nt, Artificial Sequence
  Description of Artificial Sequence: Synthetic oligonucleotide
aagugaagaguaccgaggg

SEQ ID NO: 871041 - RNA, 19 nt, Artificial Sequence
  Description of Artificial Sequence: Synthetic oligonucleotide
aguucuggcacauaggcag

SEQ ID NO: 871042 - RNA, 19 nt, Artificial Sequence
  Description of Artificial Sequence: Synthetic oligonucleotide
aaaugagaacguuucacug

SEQ ID NO: 871043 - RNA, 19 nt, Artificial Sequence
  Description of Artificial Sequence: Synthetic oligonucleotide
gaugagaucgaccacaaga

SEQ ID NO: 871044 - RNA, 19 nt, Artificial Sequence
  Description of Artificial Sequence: Synthetic oligonucleotide
acugagauagccucucacc

SEQ ID NO: 871045 - RNA, 19 nt, Artificial Sequence
  Description of Artificial Sequence: Synthetic oligonucleotide
ucauagaccaguccggaag

SEQ ID NO: 871046 - RNA, 19 nt, Artificial Sequence
  Description of Artificial Sequence: Synthetic oligonucleotide
uccaguuaagacaaaugag

SEQ ID NO: 871047 - RNA, 19 nt, Artificial Sequence
  Description of Artificial Sequence: Synthetic oligonucleotide
aagugucggacgcugaggg

SEQ ID NO: 871048 - RNA, 19 nt, Artificial Sequence
  Description of Artificial Sequence: Synthetic oligonucleotide
gaagaguugccucuccugg

SEQ ID NO: 871049 - RNA, 19 nt, Artificial Sequence
  Description of Artificial Sequence: Synthetic oligonucleotide
aacacggggauguaggugu

SEQ ID NO: 871050 - RNA, 19 nt, Artificial Sequence
  Description of Artificial Sequence: Synthetic oligonucleotide
aaaagaggcugaagcaucc

SEQ ID NO: 871051 - RNA, 19 nt, Artificial Sequence
  Description of Artificial Sequence: Synthetic oligonucleotide
ucaagugaagaguaccgag

SEQ ID NO: 871052 - RNA, 19 nt, Artificial Sequence
  Description of Artificial Sequence: Synthetic oligonucleotide
aaagaaucggacaaaggcu

SEQ ID NO: 871053 - RNA, 19 nt, Artificial Sequence
  Description of Artificial Sequence: Synthetic oligonucleotide
uucacauugacgaggcgcc

SEQ ID NO: 871054 - RNA, 19 nt, Artificial Sequence
  Description of Artificial Sequence: Synthetic oligonucleotide
ugaagccuauuucuugugg

SEQ ID NO: 871055 - RNA, 19 nt, Artificial Sequence
  Description of Artificial Sequence: Synthetic oligonucleotide
aaauacucgaagaguugcc

SEQ ID NO: 871056 - RNA, 19 nt, Artificial Sequence
  Description of Artificial Sequence: Synthetic oligonucleotide
cugguacucaaugagaucc

SEQ ID NO: 871057 - RNA, 19 nt, Artificial Sequence
  Description of Artificial Sequence: Synthetic oligonucleotide
agaccuuuggcauccugcc

SEQ ID NO: 871058 - RNA, 19 nt, Artificial Sequence
  Description of Artificial Sequence: Synthetic oligonucleotide
uugaaaagaggcugaagca

SEQ ID NO: 871059 - RNA, 19 nt, Artificial Sequence
  Description of Artificial Sequence: Synthetic oligonucleotide
uccaagaucuuugaaaaga

SEQ ID NO: 871060 - RNA, 19 nt, Artificial Sequence
  Description of Artificial Sequence: Synthetic oligonucleotide
aaaggcuucggacaccacu

SEQ ID NO: 871061 - RNA, 19 nt, Artificial Sequence
  Description of Artificial Sequence: Synthetic oligonucleotide
ucuuagaggagacagcuuu

SEQ ID NO: 871062 - RNA, 19 nt, Artificial Sequence
  Description of Artificial Sequence: Synthetic oligonucleotide
uaaccgaaccuucugcucc

SEQ ID NO: 871063 - RNA, 19 nt, Artificial Sequence
  Description of Artificial Sequence: Synthetic oligonucleotide
uggaugaaaccacggaaag

SEQ ID NO: 871064 - RNA, 19 nt, Artificial Sequence
  Description of Artificial Sequence: Synthetic oligonucleotide
caagugaagaguaccgagg

SEQ ID NO: 871065 - RNA, 19 nt, Artificial Sequence
  Description of Artificial Sequence: Synthetic oligonucleotide
ucuccgaugggcaagguuc

SEQ ID NO: 871066 - RNA, 19 nt, Artificial Sequence
  Description of Artificial Sequence: Synthetic oligonucleotide
ucggaccucaaacagaccu

SEQ ID NO: 871067 - RNA, 19 nt, Artificial Sequence
  Description of Artificial Sequence: Synthetic oligonucleotide
ugaguuugcucucugugga

SEQ ID NO: 871068 - RNA, 19 nt, Artificial Sequence
  Description of Artificial Sequence: Synthetic oligonucleotide
uugaaugacuuuuccaacu

SEQ ID NO: 871069 - RNA, 19 nt, Artificial Sequence
  Description of Artificial Sequence: Synthetic oligonucleotide
ucugaggaaccgaucauug

SEQ ID NO: 871070 - RNA, 19 nt, Artificial Sequence
  Description of Artificial Sequence: Synthetic oligonucleotide
caugacacuccucaugagg

SEQ ID NO: 871071 - RNA, 19 nt, Artificial Sequence
  Description of Artificial Sequence: Synthetic oligonucleotide
agacaaaugagaacguuuc

SEQ ID NO: 871072 - RNA, 19 nt, Artificial Sequence
  Description of Artificial Sequence: Synthetic oligonucleotide
accucaaacagaccuuugg

SEQ ID NO: 871073 - RNA, 19 nt, Artificial Sequence
  Description of Artificial Sequence: Synthetic oligonucleotide
aaggccucucgcuguaggc

SEQ ID NO: 871074 - RNA, 19 nt, Artificial Sequence
  Description of Artificial Sequence: Synthetic oligonucleotide
uucauuuuguugcccagac

SEQ ID NO: 871075 - RNA, 19 nt, Artificial Sequence
  Description of Artificial Sequence: Synthetic oligonucleotide
ugagaucccggucaaguga

SEQ ID NO: 871076 - RNA, 19 nt, Artificial Sequence
  Description of Artificial Sequence: Synthetic oligonucleotide
acgaccacaaaauacucga

SEQ ID NO: 871077 - RNA, 19 nt, Artificial Sequence
  Description of Artificial Sequence: Synthetic oligonucleotide
uugaggaacuuauucacuc

SEQ ID NO: 871078 - RNA, 19 nt, Artificial Sequence
  Description of Artificial Sequence: Synthetic oligonucleotide
cugaguuugcucucugugg

SEQ ID NO: 871079 - RNA, 19 nt, Artificial Sequence
  Description of Artificial Sequence: Synthetic oligonucleotide
cauugauccgcaauaccag

SEQ ID NO: 871080 - RNA, 19 nt, Artificial Sequence
  Description of Artificial Sequence: Synthetic oligonucleotide
agaugaagccuauuucuug

SEQ ID NO: 871081 - RNA, 19 nt, Artificial Sequence
  Description of Artificial Sequence: Synthetic oligonucleotide
accagguggcgucauagac

SEQ ID NO: 871082 - RNA, 19 nt, Artificial Sequence
  Description of Artificial Sequence: Synthetic oligonucleotide
gucaggaacagugaagucc

SEQ ID NO: 871083 - RNA, 19 nt, Artificial Sequence
  Description of Artificial Sequence: Synthetic oligonucleotide
uugauccgcaauaccagcc

SEQ ID NO: 871084 - RNA, 19 nt, Artificial Sequence
  Description of Artificial Sequence: Synthetic oligonucleotide
auaaccgaaccuucugcuc

SEQ ID NO: 871085 - RNA, 19 nt, Artificial Sequence
  Description of Artificial Sequence: Synthetic oligonucleotide
agucgcuucccuuugccuc

SEQ ID NO: 871086 - RNA, 19 nt, Artificial Sequence
  Description of Artificial Sequence: Synthetic oligonucleotide
aucaccucaguccccgagc

SEQ ID NO: 871087 - RNA, 19 nt, Artificial Sequence
  Description of Artificial Sequence: Synthetic oligonucleotide
gauggaauccucguccucc

SEQ ID NO: 871088 - RNA, 19 nt, Artificial Sequence
  Description of Artificial Sequence: Synthetic oligonucleotide
uacucaaugagaucccggu

SEQ ID NO: 871089 - RNA, 19 nt, Artificial Sequence
  Description of Artificial Sequence: Synthetic oligonucleotide
aauacucgaagaguugccu

SEQ ID NO: 871090 - RNA, 19 nt, Artificial Sequence
  Description of Artificial Sequence: Synthetic oligonucleotide
caauaaccgaaccuucugc

SEQ ID NO: 871091 - RNA, 19 nt, Artificial Sequence
  Description of Artificial Sequence: Synthetic oligonucleotide
gaacuuauucacuccgcug

SEQ ID NO: 871092 - RNA, 19 nt, Artificial Sequence
  Description of Artificial Sequence: Synthetic oligonucleotide
ugcuagggguagaaggagg

SEQ ID NO: 871093 - RNA, 19 nt, Artificial Sequence
  Description of Artificial Sequence: Synthetic oligonucleotide
gaacaagggguagugaccc

SEQ ID NO: 871094 - RNA, 19 nt, Artificial Sequence
  Description of Artificial Sequence: Synthetic oligonucleotide
ggcgucauagaccaguccg

SEQ ID NO: 871095 - RNA, 19 nt, Artificial Sequence
  Description of Artificial Sequence: Synthetic oligonucleotide
auacucgaagaguugccuc

SEQ ID NO: 871096 - RNA, 19 nt, Artificial Sequence
  Description of Artificial Sequence: Synthetic oligonucleotide
gaacguuucacugguaaac

SEQ ID NO: 871097 - RNA, 19 nt, Artificial Sequence
  Description of Artificial Sequence: Synthetic oligonucleotide
gaggcgugacuucacauug

SEQ ID NO: 871098 - RNA, 19 nt, Artificial Sequence
  Description of Artificial Sequence: Synthetic oligonucleotide
cuccaguuaagacaaauga

SEQ ID NO: 871099 - RNA, 19 nt, Artificial Sequence
  Description of Artificial Sequence: Synthetic oligonucleotide
cuaccugaagcuuccgggg

SEQ ID NO: 871100 - RNA, 19 nt, Artificial Sequence
  Description of Artificial Sequence: Synthetic oligonucleotide
ggugaguucuggcacauag

SEQ ID NO: 871101 - RNA, 19 nt, Artificial Sequence
  Description of Artificial Sequence: Synthetic oligonucleotide
ccgaucauugaugagaucg

SEQ ID NO: 871102 - RNA, 19 nt, Artificial Sequence
  Description of Artificial Sequence: Synthetic oligonucleotide
cacgaccacaaaauacucg

SEQ ID NO: 871103 - RNA, 19 nt, Artificial Sequence
  Description of Artificial Sequence: Synthetic oligonucleotide
agaccaguccggaagaagg

SEQ ID NO: 871104 - RNA, 19 nt, Artificial Sequence
  Description of Artificial Sequence: Synthetic oligonucleotide
ccuugagcaaagaugaagc

SEQ ID NO: 871105 - RNA, 19 nt, Artificial Sequence
  Description of Artificial Sequence: Synthetic oligonucleotide
agugaagaguaccgagggg

SEQ ID NO: 871106 - RNA, 19 nt, Artificial Sequence
  Description of Artificial Sequence: Synthetic oligonucleotide
cuugugcagagacacgacc

SEQ ID NO: 871107 - RNA, 19 nt, Artificial Sequence
  Description of Artificial Sequence: Synthetic oligonucleotide
agaacugcgggauagccuu

SEQ ID NO: 871108 - RNA, 19 nt, Artificial Sequence
  Description of Artificial Sequence: Synthetic oligonucleotide
ucccaggcggcucacaaug

SEQ ID NO: 871109 - RNA, 19 nt, Artificial Sequence
  Description of Artificial Sequence: Synthetic oligonucleotide
aacuccuggaccggagccc

SEQ ID NO: 871110 - RNA, 19 nt, Artificial Sequence
  Description of Artificial Sequence: Synthetic oligonucleotide
uccaucccgacucagcuuc

SEQ ID NO: 871111 - RNA, 19 nt, Artificial Sequence
  Description of Artificial Sequence: Synthetic oligonucleotide
cuauuucuuguggagaaac

SEQ ID NO: 871112 - RNA, 19 nt, Artificial Sequence
  Description of Artificial Sequence: Synthetic oligonucleotide
aaagaacgugucauccggg

SEQ ID NO: 871113 - RNA, 19 nt, Artificial Sequence
  Description of Artificial Sequence: Synthetic oligonucleotide
ucggacaaaggcuucggac

SEQ ID NO: 871114 - RNA, 19 nt, Artificial Sequence
  Description of Artificial Sequence: Synthetic oligonucleotide
aacguuucacugguaaacu

SEQ ID NO: 871115 - RNA, 19 nt, Artificial Sequence
  Description of Artificial Sequence: Synthetic oligonucleotide
aacgugucauccgggcugc

SEQ ID NO: 871116 - RNA, 19 nt, Artificial Sequence
  Description of Artificial Sequence: Synthetic oligonucleotide
aagguuccuagguacuccu

SEQ ID NO: 871117 - RNA, 19 nt, Artificial Sequence
  Description of Artificial Sequence: Synthetic oligonucleotide
gaagccuauuucuugugga

SEQ ID NO: 871118 - RNA, 19 nt, Artificial Sequence
  Description of Artificial Sequence: Synthetic oligonucleotide
aaugaugguuuugcccagg

SEQ ID NO: 871119 - RNA, 19 nt, Artificial Sequence
  Description of Artificial Sequence: Synthetic oligonucleotide
aaucggacaaaggcuucgg

SEQ ID NO: 871120 - RNA, 19 nt, Artificial Sequence
  Description of Artificial Sequence: Synthetic oligonucleotide
uucgcuguugucaucuguc

SEQ ID NO: 871121 - RNA, 19 nt, Artificial Sequence
  Description of Artificial Sequence: Synthetic oligonucleotide
aagcagaacugcgggauag

SEQ ID NO: 871122 - RNA, 19 nt, Artificial Sequence
  Description of Artificial Sequence: Synthetic oligonucleotide
aagaaucggacaaaggcuu

SEQ ID NO: 871123 - RNA, 19 nt, Artificial Sequence
  Description of Artificial Sequence: Synthetic oligonucleotide
ucauuuuguugcccagacc

SEQ ID NO: 871124 - RNA, 19 nt, Artificial Sequence
  Description of Artificial Sequence: Synthetic oligonucleotide
aaaccacggaaagucuggg

SEQ ID NO: 871125 - RNA, 19 nt, Artificial Sequence
  Description of Artificial Sequence: Synthetic oligonucleotide
aggaaccgaucauugauga

SEQ ID NO: 871126 - RNA, 19 nt, Artificial Sequence
  Description of Artificial Sequence: Synthetic oligonucleotide
cucucaugaacuugaauga

SEQ ID NO: 871127 - RNA, 19 nt, Artificial Sequence
  Description of Artificial Sequence: Synthetic oligonucleotide
cugaccaagugucggacgc

SEQ ID NO: 871128 - RNA, 19 nt, Artificial Sequence
  Description of Artificial Sequence: Synthetic oligonucleotide
gcuaccugaagcuuccggg

SEQ ID NO: 871129 - RNA, 19 nt, Artificial Sequence
  Description of Artificial Sequence: Synthetic oligonucleotide
ugagaucgaccacaagaac

SEQ ID NO: 871130 - RNA, 19 nt, Artificial Sequence
  Description of Artificial Sequence: Synthetic oligonucleotide
ucagauucgcuguugucau

SEQ ID NO: 871131 - RNA, 19 nt, Artificial Sequence
  Description of Artificial Sequence: Synthetic oligonucleotide
uccggcaauaaccgaaccu

SEQ ID NO: 871132 - RNA, 19 nt, Artificial Sequence
  Description of Artificial Sequence: Synthetic oligonucleotide
guuccuagguacuccuggg

SEQ ID NO: 871133 - RNA, 19 nt, Artificial Sequence
  Description of Artificial Sequence: Synthetic oligonucleotide
aaaaccccagucaggaaca

SEQ ID NO: 871134 - RNA, 19 nt, Artificial Sequence
  Description of Artificial Sequence: Synthetic oligonucleotide
ugagauagccucucacccu

SEQ ID NO: 871135 - RNA, 19 nt, Artificial Sequence
  Description of Artificial Sequence: Synthetic oligonucleotide
aaacacugaccaagugucg

SEQ ID NO: 871136 - RNA, 19 nt, Artificial Sequence
  Description of Artificial Sequence: Synthetic oligonucleotide
gagacucaaaauccacgug

SEQ ID NO: 871137 - RNA, 19 nt, Artificial Sequence
  Description of Artificial Sequence: Synthetic oligonucleotide
aagaguugccucuccuggu

SEQ ID NO: 871138 - RNA, 19 nt, Artificial Sequence
  Description of Artificial Sequence: Synthetic oligonucleotide
gagaacguuucacugguaa

SEQ ID NO: 871139 - RNA, 19 nt, Artificial Sequence
  Description of Artificial Sequence: Synthetic oligonucleotide
cuugcagacucucacuguc

SEQ ID NO: 871140 - RNA, 19 nt, Artificial Sequence
  Description of Artificial Sequence: Synthetic oligonucleotide
gguuccuagguacuccugg

SEQ ID NO: 871141 - RNA, 19 nt, Artificial Sequence
  Description of Artificial Sequence: Synthetic oligonucleotide
uggaccggagcccaguccu

SEQ ID NO: 871142 - RNA, 19 nt, Artificial Sequence
  Description of Artificial Sequence: Synthetic oligonucleotide
gaugaagccuauuucuugu

SEQ ID NO: 871143 - RNA, 19 nt, Artificial Sequence
  Description of Artificial Sequence: Synthetic oligonucleotide
ucccguuccuggaugaaac

SEQ ID NO: 871144 - RNA, 19 nt, Artificial Sequence
  Description of Artificial Sequence: Synthetic oligonucleotide
gacuucacauugacgaggc

SEQ ID NO: 871145 - RNA, 19 nt, Artificial Sequence
  Description of Artificial Sequence: Synthetic oligonucleotide
agaucgaccacaagaaccu

SEQ ID NO: 871146 - RNA, 19 nt, Artificial Sequence
  Description of Artificial Sequence: Synthetic oligonucleotide
ccaguuaagacaaaugaga

SEQ ID NO: 871147 - RNA, 19 nt, Artificial Sequence
  Description of Artificial Sequence: Synthetic oligonucleotide
agagacacgaccacaaaau

SEQ ID NO: 871148 - RNA, 19 nt, Artificial Sequence
  Description of Artificial Sequence: Synthetic oligonucleotide
auggcauugauccgcaaua

SEQ ID NO: 871149 - RNA, 19 nt, Artificial Sequence
  Description of Artificial Sequence: Synthetic oligonucleotide
acaagggguagugacccac

SEQ ID NO: 871150 - RNA, 19 nt, Artificial Sequence
  Description of Artificial Sequence: Synthetic oligonucleotide
aggcucuuagaggagacag

SEQ ID NO: 871151 - RNA, 19 nt, Artificial Sequence
  Description of Artificial Sequence: Synthetic oligonucleotide
ugguacucaaugagauccc

SEQ ID NO: 871152 - RNA, 19 nt, Artificial Sequence
  Description of Artificial Sequence: Synthetic oligonucleotide
ucauccgggcugcuagggg

SEQ ID NO: 871153 - RNA, 19 nt, Artificial Sequence
  Description of Artificial Sequence: Synthetic oligonucleotide
gacugagauagccucucac

SEQ ID NO: 871154 - RNA, 19 nt, Artificial Sequence
  Description of Artificial Sequence: Synthetic oligonucleotide
agcagucuccggcaauaac

SEQ ID NO: 871155 - RNA, 19 nt, Artificial Sequence
  Description of Artificial Sequence: Synthetic oligonucleotide
gugucauccgggcugcuag

SEQ ID NO: 871156 - RNA, 19 nt, Artificial Sequence
  Description of Artificial Sequence: Synthetic oligonucleotide
agucaggaacagugaaguc

SEQ ID NO: 871157 - RNA, 19 nt, Artificial Sequence
  Description of Artificial Sequence: Synthetic oligonucleotide
acuuauucacuccgcugug

SEQ ID NO: 871158 - RNA, 19 nt, Artificial Sequence
  Description of Artificial Sequence: Synthetic oligonucleotide
agauucgcuguugucaucu

SEQ ID NO: 871159 - RNA, 19 nt, Artificial Sequence
  Description of Artificial Sequence: Synthetic oligonucleotide
gucagauucgcuguuguca

SEQ ID NO: 871160 - RNA, 19 nt, Artificial Sequence
  Description of Artificial Sequence: Synthetic oligonucleotide
augagaucccggucaagug

SEQ ID NO: 871161 - RNA, 19 nt, Artificial Sequence
  Description of Artificial Sequence: Synthetic oligonucleotide
auagccucucacccuuuuc

SEQ ID NO: 871162 - RNA, 19 nt, Artificial Sequence
  Description of Artificial Sequence: Synthetic oligonucleotide
ugucggacgcugagggagg

SEQ ID NO: 871163 - RNA, 19 nt, Artificial Sequence
  Description of Artificial Sequence: Synthetic oligonucleotide
uugcagacucucacugucc

SEQ ID NO: 871164 - RNA, 19 nt, Artificial Sequence
  Description of Artificial Sequence: Synthetic oligonucleotide
auugacgaggcgccggcug

SEQ ID NO: 871165 - RNA, 19 nt, Artificial Sequence
  Description of Artificial Sequence: Synthetic oligonucleotide
aagucgcuucccuuugccu

SEQ ID NO: 871166 - RNA, 19 nt, Artificial Sequence
  Description of Artificial Sequence: Synthetic oligonucleotide
ucuccggcaauaaccgaac

SEQ ID NO: 871167 - RNA, 19 nt, Artificial Sequence
  Description of Artificial Sequence: Synthetic oligonucleotide
agggccaugcacacagucc

SEQ ID NO: 871168 - RNA, 19 nt, Artificial Sequence
  Description of Artificial Sequence: Synthetic oligonucleotide
gaucauugaugagaucgac

SEQ ID NO: 871169 - RNA, 19 nt, Artificial Sequence
  Description of Artificial Sequence: Synthetic oligonucleotide
aagaguaccgaggggccug

SEQ ID NO: 871170 - RNA, 19 nt, Artificial Sequence
  Description of Artificial Sequence: Synthetic oligonucleotide
guaccgaggggccugcuug

SEQ ID NO: 871171 - RNA, 19 nt, Artificial Sequence
  Description of Artificial Sequence: Synthetic oligonucleotide
guccggaagaaggaagacg

SEQ ID NO: 871172 - RNA, 19 nt, Artificial Sequence
  Description of Artificial Sequence: Synthetic oligonucleotide
aaccacggaaagucugggu

SEQ ID NO: 871173 - RNA, 19 nt, Artificial Sequence
  Description of Artificial Sequence: Synthetic oligonucleotide
augagaucgaccacaagaa

SEQ ID NO: 871174 - RNA, 19 nt, Artificial Sequence
  Description of Artificial Sequence: Synthetic oligonucleotide
gcucaaucaccucaguccc

SEQ ID NO: 871175 - RNA, 19 nt, Artificial Sequence
  Description of Artificial Sequence: Synthetic oligonucleotide
ugaugagaucgaccacaag

SEQ ID NO: 871176 - RNA, 19 nt, Artificial Sequence
  Description of Artificial Sequence: Synthetic oligonucleotide
agaacguuucacugguaaa

SEQ ID NO: 871177 - RNA, 19 nt, Artificial Sequence
  Description of Artificial Sequence: Synthetic oligonucleotide
cuggaugaaaccacggaaa

SEQ ID NO: 871178 - RNA, 19 nt, Artificial Sequence
  Description of Artificial Sequence: Synthetic oligonucleotide
uuagaggagacagcuuuuc

SEQ ID NO: 871179 - RNA, 19 nt, Artificial Sequence
  Description of Artificial Sequence: Synthetic oligonucleotide
aaccgaucauugaugagau

SEQ ID NO: 871180 - RNA, 19 nt, Artificial Sequence
  Description of Artificial Sequence: Synthetic oligonucleotide
cagguggcgucauagacca

SEQ ID NO: 871181 - RNA, 19 nt, Artificial Sequence
  Description of Artificial Sequence: Synthetic oligonucleotide
ugucauccgggcugcuagg

SEQ ID NO: 871182 - RNA, 19 nt, Artificial Sequence
  Description of Artificial Sequence: Synthetic oligonucleotide
caaaugagaacguuucacu

SEQ ID NO: 871183 - RNA, 19 nt, Artificial Sequence
  Description of Artificial Sequence: Synthetic oligonucleotide
gugucggacgcugagggag

SEQ ID NO: 871184 - RNA, 19 nt, Artificial Sequence
  Description of Artificial Sequence: Synthetic oligonucleotide
ugagaaccuuucugggcug

SEQ ID NO: 871185 - RNA, 19 nt, Artificial Sequence
  Description of Artificial Sequence: Synthetic oligonucleotide
caagguuccuagguacucc

SEQ ID NO: 871186 - RNA, 19 nt, Artificial Sequence
  Description of Artificial Sequence: Synthetic oligonucleotide
ucgaccacaagaaccucuu

SEQ ID NO: 871187 - RNA, 19 nt, Artificial Sequence
  Description of Artificial Sequence: Synthetic oligonucleotide
auucgcuguugucaucugu

SEQ ID NO: 871188 - RNA, 19 nt, Artificial Sequence
  Description of Artificial Sequence: Synthetic oligonucleotide
ugucugaggaaccgaucau

SEQ ID NO: 871189 - RNA, 19 nt, Artificial Sequence
  Description of Artificial Sequence: Synthetic oligonucleotide
ucgcuguugucaucuguca

SEQ ID NO: 871190 - RNA, 19 nt, Artificial Sequence
  Description of Artificial Sequence: Synthetic oligonucleotide
gcaauaaccgaaccuucug

SEQ ID NO: 871191 - RNA, 19 nt, Artificial Sequence
  Description of Artificial Sequence: Synthetic oligonucleotide
ucucgcuguaggcuccucu

SEQ ID NO: 871192 - RNA, 19 nt, Artificial Sequence
  Description of Artificial Sequence: Synthetic oligonucleotide
ggcaacacggggauguagg

SEQ ID NO: 871193 - RNA, 19 nt, Artificial Sequence
  Description of Artificial Sequence: Synthetic oligonucleotide
cguuucacugguaaacucc

SEQ ID NO: 871194 - RNA, 19 nt, Artificial Sequence
  Description of Artificial Sequence: Synthetic oligonucleotide
aagggguagugacccacaa

SEQ ID NO: 871195 - RNA, 19 nt, Artificial Sequence
  Description of Artificial Sequence: Synthetic oligonucleotide
ucgcccgaugucaggaaca

SEQ ID NO: 871196 - RNA, 19 nt, Artificial Sequence
  Description of Artificial Sequence: Synthetic oligonucleotide
cuccgaugggcaagguucc

SEQ ID NO: 871197 - RNA, 19 nt, Artificial Sequence
  Description of Artificial Sequence: Synthetic oligonucleotide
agcagaacugcgggauagc

SEQ ID NO: 871198 - RNA, 19 nt, Artificial Sequence
  Description of Artificial Sequence: Synthetic oligonucleotide
aaggcuucggacaccacuu

SEQ ID NO: 871199 - RNA, 19 nt, Artificial Sequence
  Description of Artificial Sequence: Synthetic oligonucleotide
acacugaccaagugucgga

SEQ ID NO: 871200 - RNA, 19 nt, Artificial Sequence
  Description of Artificial Sequence: Synthetic oligonucleotide
cugaguuugucugcaauga

SEQ ID NO: 871201 - RNA, 19 nt, Artificial Sequence
  Description of Artificial Sequence: Synthetic oligonucleotide
cuccguccuggucacaggc

SEQ ID NO: 871202 - RNA, 19 nt, Artificial Sequence
  Description of Artificial Sequence: Synthetic oligonucleotide
uugacgaggcgccggcugu

SEQ ID NO: 871203 - RNA, 19 nt, Artificial Sequence
  Description of Artificial Sequence: Synthetic oligonucleotide
gccgaaggcucuuagagga

SEQ ID NO: 871204 - RNA, 19 nt, Artificial Sequence
  Description of Artificial Sequence: Synthetic oligonucleotide
aacaagggguagugaccca

SEQ ID NO: 871205 - RNA, 19 nt, Artificial Sequence
  Description of Artificial Sequence: Synthetic oligonucleotide
ugcuugaggcgugacuuca

SEQ ID NO: 871206 - RNA, 19 nt, Artificial Sequence
  Description of Artificial Sequence: Synthetic oligonucleotide
gguagugacccacaaucuc

SEQ ID NO: 871207 - RNA, 19 nt, Artificial Sequence
  Description of Artificial Sequence: Synthetic oligonucleotide
aguucccguuccuggauga

SEQ ID NO: 871208 - RNA, 19 nt, Artificial Sequence
  Description of Artificial Sequence: Synthetic oligonucleotide
ugcucuccgaugggcaagg

SEQ ID NO: 871209 - RNA, 19 nt, Artificial Sequence
  Description of Artificial Sequence: Synthetic oligonucleotide
caagugucggacgcugagg

SEQ ID NO: 871210 - RNA, 19 nt, Artificial Sequence
  Description of Artificial Sequence: Synthetic oligonucleotide
gaggagaauagagacucaa

SEQ ID NO: 871211 - RNA, 19 nt, Artificial Sequence
  Description of Artificial Sequence: Synthetic oligonucleotide
cauagaccaguccggaaga

SEQ ID NO: 871212 - RNA, 19 nt, Artificial Sequence
  Description of Artificial Sequence: Synthetic oligonucleotide
ugugcucuccgaugggcaa

SEQ ID NO: 871213 - RNA, 19 nt, Artificial Sequence
  Description of Artificial Sequence: Synthetic oligonucleotide
uugaggcgugacuucacau

SEQ ID NO: 871214 - RNA, 19 nt, Artificial Sequence
  Description of Artificial Sequence: Synthetic oligonucleotide
augguuuugcccagggcug

SEQ ID NO: 871215 - RNA, 19 nt, Artificial Sequence
  Description of Artificial Sequence: Synthetic oligonucleotide
ucacauugacgaggcgccg

SEQ ID NO: 871216 - RNA, 19 nt, Artificial Sequence
  Description of Artificial Sequence: Synthetic oligonucleotide
gaugacccuccuuuccaga

SEQ ID NO: 871217 - RNA, 19 nt, Artificial Sequence
  Description of Artificial Sequence: Synthetic oligonucleotide
gagacacgaccacaaaaua

SEQ ID NO: 871218 - RNA, 19 nt, Artificial Sequence
  Description of Artificial Sequence: Synthetic oligonucleotide
cacauugacgaggcgccgg

SEQ ID NO: 871219 - RNA, 19 nt, Artificial Sequence
  Description of Artificial Sequence: Synthetic oligonucleotide
uauucacuccgcugugcuc

SEQ ID NO: 871220 - RNA, 19 nt, Artificial Sequence
  Description of Artificial Sequence: Synthetic oligonucleotide
cugagaaccuuucugggcu

SEQ ID NO: 871221 - RNA, 19 nt, Artificial Sequence
  Description of Artificial Sequence: Synthetic oligonucleotide
gcgccgaaggcucuuagag

SEQ ID NO: 871222 - RNA, 19 nt, Artificial Sequence
  Description of Artificial Sequence: Synthetic oligonucleotide
augacccuccuuuccagaa

SEQ ID NO: 871223 - RNA, 19 nt, Artificial Sequence
  Description of Artificial Sequence: Synthetic oligonucleotide
ggaacaagggguagugacc

SEQ ID NO: 871224 - RNA, 19 nt, Artificial Sequence
  Description of Artificial Sequence: Synthetic oligonucleotide
ugcaccagagcaggggaga

SEQ ID NO: 871225 - RNA, 19 nt, Artificial Sequence
  Description of Artificial Sequence: Synthetic oligonucleotide
ucccggucaagugaagagu

SEQ ID NO: 871226 - RNA, 19 nt, Artificial Sequence
  Description of Artificial Sequence: Synthetic oligonucleotide
cucgcuguaggcuccucuc

SEQ ID NO: 871227 - RNA, 19 nt, Artificial Sequence
  Description of Artificial Sequence: Synthetic oligonucleotide
cgggauagccuucaguugg

SEQ ID NO: 871228 - RNA, 19 nt, Artificial Sequence
  Description of Artificial Sequence: Synthetic oligonucleotide
agcuuccuaguguccagca

SEQ ID NO: 871229 - RNA, 19 nt, Artificial Sequence
  Description of Artificial Sequence: Synthetic oligonucleotide
gauucgcuguugucaucug

SEQ ID NO: 871230 - RNA, 19 nt, Artificial Sequence
  Description of Artificial Sequence: Synthetic oligonucleotide
gccugagaaccuuucuggg

SEQ ID NO: 871231 - RNA, 19 nt, Artificial Sequence
  Description of Artificial Sequence: Synthetic oligonucleotide
caguccccgagccuggcag

SEQ ID NO: 871232 - RNA, 19 nt, Artificial Sequence
  Description of Artificial Sequence: Synthetic oligonucleotide
gaguugccucuccugguac

SEQ ID NO: 871233 - RNA, 19 nt, Artificial Sequence
  Description of Artificial Sequence: Synthetic oligonucleotide
cagcccgaugagaaagggc

SEQ ID NO: 871234 - RNA, 19 nt, Artificial Sequence
  Description of Artificial Sequence: Synthetic oligonucleotide
ccagguggcgucauagacc

SEQ ID NO: 871235 - RNA, 19 nt, Artificial Sequence
  Description of Artificial Sequence: Synthetic oligonucleotide
uggacugagauagccucuc

SEQ ID NO: 871236 - RNA, 19 nt, Artificial Sequence
  Description of Artificial Sequence: Synthetic oligonucleotide
cagagacacgaccacaaaa

SEQ ID NO: 871237 - RNA, 19 nt, Artificial Sequence
  Description of Artificial Sequence: Synthetic oligonucleotide
aacugcgggauagccuuca

SEQ ID NO: 871238 - RNA, 19 nt, Artificial Sequence
  Description of Artificial Sequence: Synthetic oligonucleotide
aguccccgagccuggcagg

SEQ ID NO: 871239 - RNA, 19 nt, Artificial Sequence
  Description of Artificial Sequence: Synthetic oligonucleotide
acagcgugcugaguuuguc

SEQ ID NO: 871240 - RNA, 19 nt, Artificial Sequence
  Description of Artificial Sequence: Synthetic oligonucleotide
uugguccucggccucucuc

SEQ ID NO: 871241 - RNA, 19 nt, Artificial Sequence
  Description of Artificial Sequence: Synthetic oligonucleotide
guuccaucccgacucagcu

SEQ ID NO: 871242 - RNA, 19 nt, Artificial Sequence
  Description of Artificial Sequence: Synthetic oligonucleotide
aucgaccacaagaaccucu

SEQ ID NO: 871243 - RNA, 19 nt, Artificial Sequence
  Description of Artificial Sequence: Synthetic oligonucleotide
gaucccggucaagugaaga

SEQ ID NO: 871244 - RNA, 19 nt, Artificial Sequence
  Description of Artificial Sequence: Synthetic oligonucleotide
gacucaaaauccacgugcu

SEQ ID NO: 871245 - RNA, 19 nt, Artificial Sequence
  Description of Artificial Sequence: Synthetic oligonucleotide
ggcggcacagcucaaucac

SEQ ID NO: 871246 - RNA, 19 nt, Artificial Sequence
  Description of Artificial Sequence: Synthetic oligonucleotide
gucauccgggcugcuaggg

SEQ ID NO: 871247 - RNA, 19 nt, Artificial Sequence
  Description of Artificial Sequence: Synthetic oligonucleotide
ggaaccgaucauugaugag

SEQ ID NO: 871248 - RNA, 19 nt, Artificial Sequence
  Description of Artificial Sequence: Synthetic oligonucleotide
cuugaggcgugacuucaca

SEQ ID NO: 871249 - RNA, 19 nt, Artificial Sequence
  Description of Artificial Sequence: Synthetic oligonucleotide
gagaucccggucaagugaa

SEQ ID NO: 871250 - RNA, 19 nt, Artificial Sequence
  Description of Artificial Sequence: Synthetic oligonucleotide
acggaaagucugggucucc

SEQ ID NO: 871251 - RNA, 19 nt, Artificial Sequence
  Description of Artificial Sequence: Synthetic oligonucleotide
ccaguccggaagaaggaag

SEQ ID NO: 871252 - RNA, 19 nt, Artificial Sequence
  Description of Artificial Sequence: Synthetic oligonucleotide
gacccaguuccaucccgac

SEQ ID NO: 871253 - RNA, 19 nt, Artificial Sequence
  Description of Artificial Sequence: Synthetic oligonucleotide
gcaaagaugaagccuauuu

SEQ ID NO: 871254 - RNA, 19 nt, Artificial Sequence
  Description of Artificial Sequence: Synthetic oligonucleotide
cagugggcggcacagcuca

SEQ ID NO: 871255 - RNA, 19 nt, Artificial Sequence
  Description of Artificial Sequence: Synthetic oligonucleotide
agugucggacgcugaggga

SEQ ID NO: 871256 - RNA, 19 nt, Artificial Sequence
  Description of Artificial Sequence: Synthetic oligonucleotide
cuccggcaauaaccgaacc

SEQ ID NO: 871257 - RNA, 19 nt, Artificial Sequence
  Description of Artificial Sequence: Synthetic oligonucleotide
cuggaccggagcccagucc

SEQ ID NO: 871258 - RNA, 19 nt, Artificial Sequence
  Description of Artificial Sequence: Synthetic oligonucleotide
cucgcccgaugucaggaac

SEQ ID NO: 871259 - RNA, 19 nt, Artificial Sequence
  Description of Artificial Sequence: Synthetic oligonucleotide
ugagaacguuucacuggua

SEQ ID NO: 871260 - RNA, 19 nt, Artificial Sequence
  Description of Artificial Sequence: Synthetic oligonucleotide
ggcgugacuucacauugac

SEQ ID NO: 871261 - RNA, 19 nt, Artificial Sequence
  Description of Artificial Sequence: Synthetic oligonucleotide
cacugaccaagugucggac

SEQ ID NO: 871262 - RNA, 19 nt, Artificial Sequence
  Description of Artificial Sequence: Synthetic oligonucleotide
aggagaauagagacucaaa

SEQ ID NO: 871263 - RNA, 19 nt, Artificial Sequence
  Description of Artificial Sequence: Synthetic oligonucleotide
agcgccgaaggcucuuaga

SEQ ID NO: 871264 - RNA, 19 nt, Artificial Sequence
  Description of Artificial Sequence: Synthetic oligonucleotide
agucuccggcaauaaccga

SEQ ID NO: 871265 - RNA, 19 nt, Artificial Sequence
  Description of Artificial Sequence: Synthetic oligonucleotide
gcaauaaacuucaggaagu

SEQ ID NO: 871266 - RNA, 19 nt, Artificial Sequence
  Description of Artificial Sequence: Synthetic oligonucleotide
gccuauuucuuguggagaa

SEQ ID NO: 871267 - RNA, 19 nt, Artificial Sequence
  Description of Artificial Sequence: Synthetic oligonucleotide
ccaagguuaaagaacgugu

SEQ ID NO: 871268 - RNA, 19 nt, Artificial Sequence
  Description of Artificial Sequence: Synthetic oligonucleotide
gagauagccucucacccuu

SEQ ID NO: 871269 - RNA, 19 nt, Artificial Sequence
  Description of Artificial Sequence: Synthetic oligonucleotide
gggacccaguuccaucccg

SEQ ID NO: 871270 - RNA, 19 nt, Artificial Sequence
  Description of Artificial Sequence: Synthetic oligonucleotide
agggguagugacccacaau

SEQ ID NO: 871271 - RNA, 19 nt, Artificial Sequence
  Description of Artificial Sequence: Synthetic oligonucleotide
gcgucauagaccaguccgg

SEQ ID NO: 871272 - RNA, 19 nt, Artificial Sequence
  Description of Artificial Sequence: Synthetic oligonucleotide
aaccccagucaggaacagu

SEQ ID NO: 871273 - RNA, 19 nt, Artificial Sequence
  Description of Artificial Sequence: Synthetic oligonucleotide
ggcucacaaugcaauaaac

SEQ ID NO: 871274 - RNA, 19 nt, Artificial Sequence
  Description of Artificial Sequence: Synthetic oligonucleotide
cucggaccucaaacagacc

SEQ ID NO: 871275 - RNA, 19 nt, Artificial Sequence
  Description of Artificial Sequence: Synthetic oligonucleotide
aguaccgaggggccugcuu

SEQ ID NO: 871276 - RNA, 19 nt, Artificial Sequence
  Description of Artificial Sequence: Synthetic oligonucleotide
gucauagaccaguccggaa

SEQ ID NO: 871277 - RNA, 19 nt, Artificial Sequence
  Description of Artificial Sequence: Synthetic oligonucleotide
ccaagugucggacgcugag

SEQ ID NO: 871278 - RNA, 19 nt, Artificial Sequence
  Description of Artificial Sequence: Synthetic oligonucleotide
ccuggaugaaaccacggaa

SEQ ID NO: 871279 - RNA, 19 nt, Artificial Sequence
  Description of Artificial Sequence: Synthetic oligonucleotide
acgcugagggaggagaaua

SEQ ID NO: 871280 - RNA, 19 nt, Artificial Sequence
  Description of Artificial Sequence: Synthetic oligonucleotide
cagcuuccuaguguccagc

SEQ ID NO: 871281 - RNA, 19 nt, Artificial Sequence
  Description of Artificial Sequence: Synthetic oligonucleotide
cucuccucgcccgauguca

SEQ ID NO: 871282 - RNA, 19 nt, Artificial Sequence
  Description of Artificial Sequence: Synthetic oligonucleotide
cacggaaagucugggucuc

SEQ ID NO: 871283 - RNA, 19 nt, Artificial Sequence
  Description of Artificial Sequence: Synthetic oligonucleotide
gcgggauagccuucaguug

SEQ ID NO: 871284 - RNA, 19 nt, Artificial Sequence
  Description of Artificial Sequence: Synthetic oligonucleotide
gcucacaaugcaauaaacu

SEQ ID NO: 871285 - RNA, 19 nt, Artificial Sequence
  Description of Artificial Sequence: Synthetic oligonucleotide
ucucugccaccagguggcg

SEQ ID NO: 871286 - RNA, 19 nt, Artificial Sequence
  Description of Artificial Sequence: Synthetic oligonucleotide
gaucgaccacaagaaccuc

SEQ ID NO: 871287 - RNA, 19 nt, Artificial Sequence
  Description of Artificial Sequence: Synthetic oligonucleotide
gaguccagugggcggcaca

SEQ ID NO: 871288 - RNA, 19 nt, Artificial Sequence
  Description of Artificial Sequence: Synthetic oligonucleotide
ggaagacguuuuccuugag

SEQ ID NO: 871289 - RNA, 19 nt, Artificial Sequence
  Description of Artificial Sequence: Synthetic oligonucleotide
auagaccaguccggaagaa

SEQ ID NO: 871290 - RNA, 19 nt, Artificial Sequence
  Description of Artificial Sequence: Synthetic oligonucleotide
ccgcugugcucuccgaugg

SEQ ID NO: 871291 - RNA, 19 nt, Artificial Sequence
  Description of Artificial Sequence: Synthetic oligonucleotide
agaaccuuucugggcugca

SEQ ID NO: 871292 - RNA, 19 nt, Artificial Sequence
  Description of Artificial Sequence: Synthetic oligonucleotide
gcagcccgaugagaaaggg

SEQ ID NO: 871293 - RNA, 19 nt, Artificial Sequence
  Description of Artificial Sequence: Synthetic oligonucleotide
cuuuggcauccugccugcg

SEQ ID NO: 871294 - RNA, 19 nt, Artificial Sequence
  Description of Artificial Sequence: Synthetic oligonucleotide
ccuuuggcauccugccugc

SEQ ID NO: 871295 - RNA, 19 nt, Artificial Sequence
  Description of Artificial Sequence: Synthetic oligonucleotide
acgaggcgccggcugugag

SEQ ID NO: 871296 - RNA, 19 nt, Artificial Sequence
  Description of Artificial Sequence: Synthetic oligonucleotide
agccgggaguccagugggc

SEQ ID NO: 871297 - RNA, 19 nt, Artificial Sequence
  Description of Artificial Sequence: Synthetic oligonucleotide
cagaacugcgggauagccu

SEQ ID NO: 871298 - RNA, 19 nt, Artificial Sequence
  Description of Artificial Sequence: Synthetic oligonucleotide
cauccugccugcgcaguuc

SEQ ID NO: 871299 - RNA, 19 nt, Artificial Sequence
  Description of Artificial Sequence: Synthetic oligonucleotide
ugacgaggcgccggcugug

SEQ ID NO: 871300 - RNA, 19 nt, Artificial Sequence
  Description of Artificial Sequence: Synthetic oligonucleotide
gaagaguaccgaggggccu

SEQ ID NO: 871301 - RNA, 19 nt, Artificial Sequence
  Description of Artificial Sequence: Synthetic oligonucleotide
cggucaagugaagaguacc

SEQ ID NO: 871302 - RNA, 19 nt, Artificial Sequence
  Description of Artificial Sequence: Synthetic oligonucleotide
gaccuuuggcauccugccu

SEQ ID NO: 871303 - RNA, 19 nt, Artificial Sequence
  Description of Artificial Sequence: Synthetic oligonucleotide
ucggacgcugagggaggag

SEQ ID NO: 871304 - RNA, 19 nt, Artificial Sequence
  Description of Artificial Sequence: Synthetic oligonucleotide
guggcgucauagaccaguc

SEQ ID NO: 871305 - RNA, 19 nt, Artificial Sequence
  Description of Artificial Sequence: Synthetic oligonucleotide
cccguuccuggaugaaacc

SEQ ID NO: 871306 - RNA, 19 nt, Artificial Sequence
  Description of Artificial Sequence: Synthetic oligonucleotide
gcccagacccuugaggaac

SEQ ID NO: 871307 - RNA, 19 nt, Artificial Sequence
  Description of Artificial Sequence: Synthetic oligonucleotide
ggcacauaggcagccccug

SEQ ID NO: 871308 - RNA, 19 nt, Artificial Sequence
  Description of Artificial Sequence: Synthetic oligonucleotide
ggccucucgcuguaggcuc

SEQ ID NO: 871309 - RNA, 19 nt, Artificial Sequence
  Description of Artificial Sequence: Synthetic oligonucleotide
cacuccucaugaggggcug

SEQ ID NO: 871310 - RNA, 19 nt, Artificial Sequence
  Description of Artificial Sequence: Synthetic oligonucleotide
gccgggaguccagugggcg

SEQ ID NO: 871311 - RNA, 19 nt, Artificial Sequence
  Description of Artificial Sequence: Synthetic oligonucleotide
gauagccucucacccuuuu

SEQ ID NO: 871312 - RNA, 19 nt, Artificial Sequence
  Description of Artificial Sequence: Synthetic oligonucleotide
agaucccggucaagugaag

SEQ ID NO: 871313 - RNA, 19 nt, Artificial Sequence
  Description of Artificial Sequence: Synthetic oligonucleotide
ggcaucagggaagcagaac

SEQ ID NO: 871314 - RNA, 19 nt, Artificial Sequence
  Description of Artificial Sequence: Synthetic oligonucleotide
gguggcgucauagaccagu

SEQ ID NO: 871315 - RNA, 19 nt, Artificial Sequence
  Description of Artificial Sequence: Synthetic oligonucleotide
gcaagguuccuagguacuc

SEQ ID NO: 871316 - RNA, 19 nt, Artificial Sequence
  Description of Artificial Sequence: Synthetic oligonucleotide
aucccgacucagcuuccua

SEQ ID NO: 871317 - RNA, 19 nt, Artificial Sequence
  Description of Artificial Sequence: Synthetic oligonucleotide
cucuccgggccucauagau

SEQ ID NO: 871318 - RNA, 19 nt, Artificial Sequence
  Description of Artificial Sequence: Synthetic oligonucleotide
ggaagcagaacugcgggau

SEQ ID NO: 871319 - RNA, 19 nt, Artificial Sequence
  Description of Artificial Sequence: Synthetic oligonucleotide
ggcaauaaccgaaccuucu

SEQ ID NO: 871320 - RNA, 19 nt, Artificial Sequence
  Description of Artificial Sequence: Synthetic oligonucleotide
aggcgugacuucacauuga

SEQ ID NO: 871321 - RNA, 19 nt, Artificial Sequence
  Description of Artificial Sequence: Synthetic oligonucleotide
ccggucaagugaagaguac

SEQ ID NO: 871322 - RNA, 19 nt, Artificial Sequence
  Description of Artificial Sequence: Synthetic oligonucleotide
ccgggaguccagugggcgg

SEQ ID NO: 871323 - RNA, 19 nt, Artificial Sequence
  Description of Artificial Sequence: Synthetic oligonucleotide
gaacugcgggauagccuuc

SEQ ID NO: 871324 - RNA, 19 nt, Artificial Sequence
  Description of Artificial Sequence: Synthetic oligonucleotide
cgaucauugaugagaucga

SEQ ID NO: 871325 - RNA, 19 nt, Artificial Sequence
  Description of Artificial Sequence: Synthetic oligonucleotide
ccgaaggcucuuagaggag

SEQ ID NO: 871326 - RNA, 19 nt, Artificial Sequence
  Description of Artificial Sequence: Synthetic oligonucleotide
ccaaagucucugccaccag

SEQ ID NO: 871327 - RNA, 19 nt, Artificial Sequence
  Description of Artificial Sequence: Synthetic oligonucleotide
cgaaccuucugcucccguc

SEQ ID NO: 871328 - RNA, 19 nt, Artificial Sequence
  Description of Artificial Sequence: Synthetic oligonucleotide
cuccuggaccggagcccag

SEQ ID NO: 871329 - RNA, 19 nt, Artificial Sequence
  Description of Artificial Sequence: Synthetic oligonucleotide
ggcucggaccucaaacaga

SEQ ID NO: 871330 - RNA, 19 nt, Artificial Sequence
  Description of Artificial Sequence: Synthetic oligonucleotide
cccggucaagugaagagua

SEQ ID NO: 871331 - RNA, 19 nt, Artificial Sequence
  Description of Artificial Sequence: Synthetic oligonucleotide
gacgaggcgccggcuguga

SEQ ID NO: 871332 - RNA, 19 nt, Artificial Sequence
  Description of Artificial Sequence: Synthetic oligonucleotide
ccuccguccuggucacagg

SEQ ID NO: 871333 - RNA, 19 nt, Artificial Sequence
  Description of Artificial Sequence: Synthetic oligonucleotide
ccgcaauaccagccugggg

SEQ ID NO: 871334 - RNA, 19 nt, Artificial Sequence
  Description of Artificial Sequence: Synthetic oligonucleotide
caaucaccucaguccccga

SEQ ID NO: 871335 - RNA, 19 nt, Artificial Sequence
  Description of Artificial Sequence: Synthetic oligonucleotide
gcggcacagcucaaucacc

SEQ ID NO: 871336 - RNA, 19 nt, Artificial Sequence
  Description of Artificial Sequence: Synthetic oligonucleotide
cggcaauaaccgaaccuuc

SEQ ID NO: 871337 - RNA, 19 nt, Artificial Sequence
  Description of Artificial Sequence: Synthetic oligonucleotide
gcggcucacaaugcaauaa

SEQ ID NO: 871338 - RNA, 19 nt, Artificial Sequence
  Description of Artificial Sequence: Synthetic oligonucleotide
cuucggacaccacuucauu

SEQ ID NO: 871339 - RNA, 19 nt, Artificial Sequence
  Description of Artificial Sequence: Synthetic oligonucleotide
gaagcgccgaaggcucuua

SEQ ID NO: 871340 - RNA, 19 nt, Artificial Sequence
  Description of Artificial Sequence: Synthetic oligonucleotide
ggacccaguuccaucccga

SEQ ID NO: 871341 - RNA, 19 nt, Artificial Sequence
  Description of Artificial Sequence: Synthetic oligonucleotide
gcaacacggggauguaggu

SEQ ID NO: 871342 - RNA, 19 nt, Artificial Sequence
  Description of Artificial Sequence: Synthetic oligonucleotide
gacagcgugcugaguuugu

SEQ ID NO: 871343 - RNA, 19 nt, Artificial Sequence
  Description of Artificial Sequence: Synthetic oligonucleotide
guaggucuccaagguuaaa

SEQ ID NO: 871344 - RNA, 19 nt, Artificial Sequence
  Description of Artificial Sequence: Synthetic oligonucleotide
ccucguccaagaucuuuga

SEQ ID NO: 871345 - RNA, 19 nt, Artificial Sequence
  Description of Artificial Sequence: Synthetic oligonucleotide
cugcgggauagccuucagu

SEQ ID NO: 871346 - RNA, 19 nt, Artificial Sequence
  Description of Artificial Sequence: Synthetic oligonucleotide
gcuugaggcgugacuucac

SEQ ID NO: 871347 - RNA, 19 nt, Artificial Sequence
  Description of Artificial Sequence: Synthetic oligonucleotide
ccacggaaagucugggucu

SEQ ID NO: 871348 - RNA, 19 nt, Artificial Sequence
  Description of Artificial Sequence: Synthetic oligonucleotide
gucggacgcugagggagga

SEQ ID NO: 871349 - RNA, 19 nt, Artificial Sequence
  Description of Artificial Sequence: Synthetic oligonucleotide
guucccguuccuggaugaa

SEQ ID NO: 871350 - RNA, 19 nt, Artificial Sequence
  Description of Artificial Sequence: Synthetic oligonucleotide
cuuccggggcaggauggaa

SEQ ID NO: 871351 - RNA, 19 nt, Artificial Sequence
  Description of Artificial Sequence: Synthetic oligonucleotide
agauagccucucacccuuu

SEQ ID NO: 871352 - RNA, 19 nt, Artificial Sequence
  Description of Artificial Sequence: Synthetic oligonucleotide
gacccuugaggaacuuauu

SEQ ID NO: 871353 - RNA, 19 nt, Artificial Sequence
  Description of Artificial Sequence: Synthetic oligonucleotide
cucuccgaugggcaagguu

SEQ ID NO: 871354 - RNA, 19 nt, Artificial Sequence
  Description of Artificial Sequence: Synthetic oligonucleotide
ccggcaauaaccgaaccuu

SEQ ID NO: 871355 - RNA, 19 nt, Artificial Sequence
  Description of Artificial Sequence: Synthetic oligonucleotide
gcccgaugucaggaacaag

SEQ ID NO: 871356 - RNA, 19 nt, Artificial Sequence
  Description of Artificial Sequence: Synthetic oligonucleotide
gcuucggacaccacuucau

SEQ ID NO: 871357 - RNA, 19 nt, Artificial Sequence
  Description of Artificial Sequence: Synthetic oligonucleotide
cgucauagaccaguccgga

SEQ ID NO: 871358 - RNA, 19 nt, Artificial Sequence
  Description of Artificial Sequence: Synthetic oligonucleotide
cacugucagauucgcuguu

SEQ ID NO: 871359 - RNA, 19 nt, Artificial Sequence
  Description of Artificial Sequence: Synthetic oligonucleotide
gccucucacccuuuucuuu

SEQ ID NO: 871360 - RNA, 19 nt, Artificial Sequence
  Description of Artificial Sequence: Synthetic oligonucleotide
gggcuuccaugacacuccu

SEQ ID NO: 871361 - RNA, 19 nt, Artificial Sequence
  Description of Artificial Sequence: Synthetic oligonucleotide
cccgacucagcuuccuagu

SEQ ID NO: 871362 - RNA, 19 nt, Artificial Sequence
  Description of Artificial Sequence: Synthetic oligonucleotide
caccucguccaagaucuuu

SEQ ID NO: 871363 - RNA, 19 nt, Artificial Sequence
  Description of Artificial Sequence: Synthetic oligonucleotide
cggcaacacggggauguag

SEQ ID NO: 871364 - RNA, 19 nt, Artificial Sequence
  Description of Artificial Sequence: Synthetic oligonucleotide
ccccugccugcuucuugug

SEQ ID NO: 871365 - RNA, 19 nt, Artificial Sequence
  Description of Artificial Sequence: Synthetic oligonucleotide
ggcagcagucuccggcaau

SEQ ID NO: 871366 - RNA, 19 nt, Artificial Sequence
  Description of Artificial Sequence: Synthetic oligonucleotide
ccucuccgggccucauaga

SEQ ID NO: 871367 - RNA, 19 nt, Artificial Sequence
  Description of Artificial Sequence: Synthetic oligonucleotide
gaguaccgaggggccugcu

SEQ ID NO: 871368 - RNA, 19 nt, Artificial Sequence
  Description of Artificial Sequence: Synthetic oligonucleotide
ccucgcccgaugucaggaa

SEQ ID NO: 871369 - RNA, 19 nt, Artificial Sequence
  Description of Artificial Sequence: Synthetic oligonucleotide
ccgaugggcaagguuccua

SEQ ID NO: 871370 - RNA, 19 nt, Artificial Sequence
  Description of Artificial Sequence: Synthetic oligonucleotide
ggcgccggcugugagcuuu

SEQ ID NO: 871371 - RNA, 19 nt, Artificial Sequence
  Description of Artificial Sequence: Synthetic oligonucleotide
ggaagcgccgaaggcucuu

SEQ ID NO: 871372 - RNA, 19 nt, Artificial Sequence
  Description of Artificial Sequence: Synthetic oligonucleotide
cggaccucaaacagaccuu

SEQ ID NO: 871373 - RNA, 19 nt, Artificial Sequence
  Description of Artificial Sequence: Synthetic oligonucleotide
ggucacaggccaggucguu

SEQ ID NO: 871374 - RNA, 19 nt, Artificial Sequence
  Description of Artificial Sequence: Synthetic oligonucleotide
gcggcaacacggggaugua

SEQ ID NO: 871375 - RNA, 19 nt, Artificial Sequence
  Description of Artificial Sequence: Synthetic oligonucleotide
gcgccggcugugagcuuuc

SEQ ID NO: 871376 - RNA, 19 nt, Artificial Sequence
  Description of Artificial Sequence: Synthetic oligonucleotide
ccucggccucucucaugaa

SEQ ID NO: 871377 - RNA, 19 nt, Artificial Sequence
  Description of Artificial Sequence: Synthetic oligonucleotide
gcucuccgaugggcaaggu

SEQ ID NO: 871378 - RNA, 19 nt, Artificial Sequence
  Description of Artificial Sequence: Synthetic oligonucleotide
ccgagccuggcaggaaguu

SEQ ID NO: 871379 - RNA, 19 nt, Artificial Sequence
  Description of Artificial Sequence: Synthetic oligonucleotide
cgccggcugugagcuuuca

SEQ ID NO: 871380 - RNA, 19 nt, Artificial Sequence
  Description of Artificial Sequence: Synthetic oligonucleotide
aagauguugaauuuguagc

SEQ ID NO: 871381 - RNA, 19 nt, Artificial Sequence
  Description of Artificial Sequence: Synthetic oligonucleotide
uugaguauggggaagagcg

SEQ ID NO: 871382 - RNA, 19 nt, Artificial Sequence
  Description of Artificial Sequence: Synthetic oligonucleotide
agaucaaugggcuuagccc

SEQ ID NO: 871383 - RNA, 19 nt, Artificial Sequence
  Description of Artificial Sequence: Synthetic oligonucleotide
agauguugaauuuguagcc

SEQ ID NO: 871384 - RNA, 19 nt, Artificial Sequence
  Description of Artificial Sequence: Synthetic oligonucleotide
gaauuuguagcccugcacg

SEQ ID NO: 871385 - RNA, 19 nt, Artificial Sequence
  Description of Artificial Sequence: Synthetic oligonucleotide
gaucaaugggcuuagcccg

SEQ ID NO: 871386 - RNA, 19 nt, Artificial Sequence
  Description of Artificial Sequence: Synthetic oligonucleotide
ugcacaucggagcugaccg

SEQ ID NO: 871387 - RNA, 19 nt, Artificial Sequence
  Description of Artificial Sequence: Synthetic oligonucleotide
aagucuacauucuugcccu

SEQ ID NO: 871388 - RNA, 19 nt, Artificial Sequence
  Description of Artificial Sequence: Synthetic oligonucleotide
gaauacggacugcacaucg

SEQ ID NO: 871389 - RNA, 19 nt, Artificial Sequence
  Description of Artificial Sequence: Synthetic oligonucleotide
accugcacggauuuugccc

SEQ ID NO: 871390 - RNA, 19 nt, Artificial Sequence
  Description of Artificial Sequence: Synthetic oligonucleotide
ucugcgcugauguacuugg

SEQ ID NO: 871391 - RNA, 19 nt, Artificial Sequence
  Description of Artificial Sequence: Synthetic oligonucleotide
aguacucccacucacggcu

SEQ ID NO: 871392 - RNA, 19 nt, Artificial Sequence
  Description of Artificial Sequence: Synthetic oligonucleotide
guuguugucgccgaagggg

SEQ ID NO: 871393 - RNA, 19 nt, Artificial Sequence
  Description of Artificial Sequence: Synthetic oligonucleotide
acggauuuugcccucaaug

SEQ ID NO: 871394 - RNA, 19 nt, Artificial Sequence
  Description of Artificial Sequence: Synthetic oligonucleotide
aagaagcgcggcuugcgcg

SEQ ID NO: 871395 - RNA, 19 nt, Artificial Sequence
  Description of Artificial Sequence: Synthetic oligonucleotide
ucggauucgaaucuuggaa

SEQ ID NO: 871396 - RNA, 19 nt, Artificial Sequence
  Description of Artificial Sequence: Synthetic oligonucleotide
ucucggauucgaaucuugg

SEQ ID NO: 871397 - RNA, 19 nt, Artificial Sequence
  Description of Artificial Sequence: Synthetic oligonucleotide
uugaauacggacugcacau

SEQ ID NO: 871398 - RNA, 19 nt, Artificial Sequence
  Description of Artificial Sequence: Synthetic oligonucleotide
gauuuugcccucaaugccc

SEQ ID NO: 871399 - RNA, 19 nt, Artificial Sequence
  Description of Artificial Sequence: Synthetic oligonucleotide
ugaauuuguagcccugcac

SEQ ID NO: 871400 - RNA, 19 nt, Artificial Sequence
  Description of Artificial Sequence: Synthetic oligonucleotide
cuuguuacgcuccuucagc

SEQ ID NO: 871401 - RNA, 19 nt, Artificial Sequence
  Description of Artificial Sequence: Synthetic oligonucleotide
gaagguguagggcucgugc

SEQ ID NO: 871402 - RNA, 19 nt, Artificial Sequence
  Description of Artificial Sequence: Synthetic oligonucleotide
uguauuuguuccauucaaa

SEQ ID NO: 871403 - RNA, 19 nt, Artificial Sequence
  Description of Artificial Sequence: Synthetic oligonucleotide
ggaguugacgcccucacgg

SEQ ID NO: 871404 - RNA, 19 nt, Artificial Sequence
  Description of Artificial Sequence: Synthetic oligonucleotide
cugaccgaggaguugacgc

SEQ ID NO: 871405 - RNA, 19 nt, Artificial Sequence
  Description of Artificial Sequence: Synthetic oligonucleotide
gauguugaauuuguagccc

SEQ ID NO: 871406 - RNA, 19 nt, Artificial Sequence
  Description of Artificial Sequence: Synthetic oligonucleotide
agcgcucucgcuugcaucg

SEQ ID NO: 871407 - RNA, 19 nt, Artificial Sequence
  Description of Artificial Sequence: Synthetic oligonucleotide
uucgaaucuuggaacgcag

SEQ ID NO: 871408 - RNA, 19 nt, Artificial Sequence
  Description of Artificial Sequence: Synthetic oligonucleotide
ugaguauggggaagagcgg

SEQ ID NO: 871409 - RNA, 19 nt, Artificial Sequence
  Description of Artificial Sequence: Synthetic oligonucleotide
gaagucucgguugucggcg

SEQ ID NO: 871410 - RNA, 19 nt, Artificial Sequence
  Description of Artificial Sequence: Synthetic oligonucleotide
uggcggguugucaaagucg

SEQ ID NO: 871411 - RNA, 19 nt, Artificial Sequence
  Description of Artificial Sequence: Synthetic oligonucleotide
agaucgucguccucugcgc

SEQ ID NO: 871412 - RNA, 19 nt, Artificial Sequence
  Description of Artificial Sequence: Synthetic oligonucleotide
gauggcgaagucucgguug

SEQ ID NO: 871413 - RNA, 19 nt, Artificial Sequence
  Description of Artificial Sequence: Synthetic oligonucleotide
agcacaugcgcguccaggg

SEQ ID NO: 871414 - RNA, 19 nt, Artificial Sequence
  Description of Artificial Sequence: Synthetic oligonucleotide
cagaucaaugggcuuagcc

SEQ ID NO: 871415 - RNA, 19 nt, Artificial Sequence
  Description of Artificial Sequence: Synthetic oligonucleotide
uccccuugaauacggacug

SEQ ID NO: 871416 - RNA, 19 nt, Artificial Sequence
  Description of Artificial Sequence: Synthetic oligonucleotide
uccggguagaagauguuga

SEQ ID NO: 871417 - RNA, 19 nt, Artificial Sequence
  Description of Artificial Sequence: Synthetic oligonucleotide
ggauucgaaucuuggaacg

SEQ ID NO: 871418 - RNA, 19 nt, Artificial Sequence
  Description of Artificial Sequence: Synthetic oligonucleotide
ugaugguugucaugucccg

SEQ ID NO: 871419 - RNA, 19 nt, Artificial Sequence
  Description of Artificial Sequence: Synthetic oligonucleotide
agguuguugucgccgaagg

SEQ ID NO: 871420 - RNA, 19 nt, Artificial Sequence
  Description of Artificial Sequence: Synthetic oligonucleotide
uugaauuuguagcccugca

SEQ ID NO: 871421 - RNA, 19 nt, Artificial Sequence
  Description of Artificial Sequence: Synthetic oligonucleotide
uccauucaaagcccgugug

SEQ ID NO: 871422 - RNA, 19 nt, Artificial Sequence
  Description of Artificial Sequence: Synthetic oligonucleotide
cuugucggcccacagguag

SEQ ID NO: 871423 - RNA, 19 nt, Artificial Sequence
  Description of Artificial Sequence: Synthetic oligonucleotide
cuugaaguggaaccacagc

SEQ ID NO: 871424 - RNA, 19 nt, Artificial Sequence
  Description of Artificial Sequence: Synthetic oligonucleotide
uguuccagaugaaggugcc

SEQ ID NO: 871425 - RNA, 19 nt, Artificial Sequence
  Description of Artificial Sequence: Synthetic oligonucleotide
aauacggacugcacaucgg

SEQ ID NO: 871426 - RNA, 19 nt, Artificial Sequence
  Description of Artificial Sequence: Synthetic oligonucleotide
agcggcucacucucuacgc

SEQ ID NO: 871427 - RNA, 19 nt, Artificial Sequence
  Description of Artificial Sequence: Synthetic oligonucleotide
cuugaauacggacugcaca

SEQ ID NO: 871428 - RNA, 19 nt, Artificial Sequence
  Description of Artificial Sequence: Synthetic oligonucleotide
aaugggcuuagcccggcca

SEQ ID NO: 871429 - RNA, 19 nt, Artificial Sequence
  Description of Artificial Sequence: Synthetic oligonucleotide
aacagaucaaugggcuuag

SEQ ID NO: 871430 - RNA, 19 nt, Artificial Sequence
  Description of Artificial Sequence: Synthetic oligonucleotide
cuuggaacgcagcuuggcc

SEQ ID NO: 871431 - RNA, 19 nt, Artificial Sequence
  Description of Artificial Sequence: Synthetic oligonucleotide
aaagcccgugugcacgcgg

SEQ ID NO: 871432 - RNA, 19 nt, Artificial Sequence
  Description of Artificial Sequence: Synthetic oligonucleotide
uuccauucaaagcccgugu

SEQ ID NO: 871433 - RNA, 19 nt, Artificial Sequence
  Description of Artificial Sequence: Synthetic oligonucleotide
gucguagugcgucugguug

SEQ ID NO: 871434 - RNA, 19 nt, Artificial Sequence
  Description of Artificial Sequence: Synthetic oligonucleotide
acgauuuugaaggcaaugu

SEQ ID NO: 871435 - RNA, 19 nt, Artificial Sequence
  Description of Artificial Sequence: Synthetic oligonucleotide
uuguugucgccgaaggggu

SEQ ID NO: 871436 - RNA, 19 nt, Artificial Sequence
  Description of Artificial Sequence: Synthetic oligonucleotide
ucgaaucuuggaacgcagc

SEQ ID NO: 871437 - RNA, 19 nt, Artificial Sequence
  Description of Artificial Sequence: Synthetic oligonucleotide
uucuuagccagucgccgug

SEQ ID NO: 871438 - RNA, 19 nt, Artificial Sequence
  Description of Artificial Sequence: Synthetic oligonucleotide
ugcacgcgguugaagaagc

SEQ ID NO: 871439 - RNA, 19 nt, Artificial Sequence
  Description of Artificial Sequence: Synthetic oligonucleotide
gacgauuuugaaggcaaug

SEQ ID NO: 871440 - RNA, 19 nt, Artificial Sequence
  Description of Artificial Sequence: Synthetic oligonucleotide
cucaccugggcccuugccg

SEQ ID NO: 871441 - RNA, 19 nt, Artificial Sequence
  Description of Artificial Sequence: Synthetic oligonucleotide
cuccuucuuagccagucgc

SEQ ID NO: 871442 - RNA, 19 nt, Artificial Sequence
  Description of Artificial Sequence: Synthetic oligonucleotide
uuguuacgcuccuucagcu

SEQ ID NO: 871443 - RNA, 19 nt, Artificial Sequence
  Description of Artificial Sequence: Synthetic oligonucleotide
cuuagcccggccaucucgg

SEQ ID NO: 871444 - RNA, 19 nt, Artificial Sequence
  Description of Artificial Sequence: Synthetic oligonucleotide
ucgccgaagggguugucgg

SEQ ID NO: 871445 - RNA, 19 nt, Artificial Sequence
  Description of Artificial Sequence: Synthetic oligonucleotide
guacuugucggcccacagg

SEQ ID NO: 871446 - RNA, 19 nt, Artificial Sequence
  Description of Artificial Sequence: Synthetic oligonucleotide
ugcgaguacucccacucac

SEQ ID NO: 871447 - RNA, 19 nt, Artificial Sequence
  Description of Artificial Sequence: Synthetic oligonucleotide
gauucgaaucuuggaacgc

SEQ ID NO: 871448 - RNA, 19 nt, Artificial Sequence
  Description of Artificial Sequence: Synthetic oligonucleotide
gagcggcucacucucuacg

SEQ ID NO: 871449 - RNA, 19 nt, Artificial Sequence
  Description of Artificial Sequence: Synthetic oligonucleotide
aguacucgggaguggcgcg

SEQ ID NO: 871450 - RNA, 19 nt, Artificial Sequence
  Description of Artificial Sequence: Synthetic oligonucleotide
gaagaagcgcggcuugcgc

SEQ ID NO: 871451 - RNA, 19 nt, Artificial Sequence
  Description of Artificial Sequence: Synthetic oligonucleotide
ugaccgaggaguugacgcc

SEQ ID NO: 871452 - RNA, 19 nt, Artificial Sequence
  Description of Artificial Sequence: Synthetic oligonucleotide
ugguuguauguuuuccccu

SEQ ID NO: 871453 - RNA, 19 nt, Artificial Sequence
  Description of Artificial Sequence: Synthetic oligonucleotide
auacggacugcacaucgga

SEQ ID NO: 871454 - RNA, 19 nt, Artificial Sequence
  Description of Artificial Sequence: Synthetic oligonucleotide
gugaugguugucauguccc

SEQ ID NO: 871455 - RNA, 19 nt, Artificial Sequence
  Description of Artificial Sequence: Synthetic oligonucleotide
cucgccgucuccuucugcc

SEQ ID NO: 871456 - RNA, 19 nt, Artificial Sequence
  Description of Artificial Sequence: Synthetic oligonucleotide
uugucggcccacagguagg

SEQ ID NO: 871457 - RNA, 19 nt, Artificial Sequence
  Description of Artificial Sequence: Synthetic oligonucleotide
ucgugcaucuccacagcca

SEQ ID NO: 871458 - RNA, 19 nt, Artificial Sequence
  Description of Artificial Sequence: Synthetic oligonucleotide
cuugaguauggggaagagc

SEQ ID NO: 871459 - RNA, 19 nt, Artificial Sequence
  Description of Artificial Sequence: Synthetic oligonucleotide
ucaaagcccgugugcacgc

SEQ ID NO: 871460 - RNA, 19 nt, Artificial Sequence
  Description of Artificial Sequence: Synthetic oligonucleotide
aagcgcaagauggcgaagu

SEQ ID NO: 871461 - RNA, 19 nt, Artificial Sequence
  Description of Artificial Sequence: Synthetic oligonucleotide
ugguguaccccauguacuc

SEQ ID NO: 871462 - RNA, 19 nt, Artificial Sequence
  Description of Artificial Sequence: Synthetic oligonucleotide
agagcggcucacucucuac

SEQ ID NO: 871463 - RNA, 19 nt, Artificial Sequence
  Description of Artificial Sequence: Synthetic oligonucleotide
acgcgguugaagaagcgcg

SEQ ID NO: 871464 - RNA, 19 nt, Artificial Sequence
  Description of Artificial Sequence: Synthetic oligonucleotide
ucguagucggccaggcucu

SEQ ID NO: 871465 - RNA, 19 nt, Artificial Sequence
  Description of Artificial Sequence: Synthetic oligonucleotide
agaacauccugguggcgcu

SEQ ID NO: 871466 - RNA, 19 nt, Artificial Sequence
  Description of Artificial Sequence: Synthetic oligonucleotide
ucggcccacagguaggcgc

SEQ ID NO: 871467 - RNA, 19 nt, Artificial Sequence
  Description of Artificial Sequence: Synthetic oligonucleotide
uggccaugugugcacgaag

SEQ ID NO: 871468 - RNA, 19 nt, Artificial Sequence
  Description of Artificial Sequence: Synthetic oligonucleotide
gucaaagucguagugcguc

SEQ ID NO: 871469 - RNA, 19 nt, Artificial Sequence
  Description of Artificial Sequence: Synthetic oligonucleotide
ucgggcgucucgaaggccu

SEQ ID NO: 871470 - RNA, 19 nt, Artificial Sequence
  Description of Artificial Sequence: Synthetic oligonucleotide
auucgaaucuuggaacgca

SEQ ID NO: 871471 - RNA, 19 nt, Artificial Sequence
  Description of Artificial Sequence: Synthetic oligonucleotide
aggaguugacgcccucacg

SEQ ID NO: 871472 - RNA, 19 nt, Artificial Sequence
  Description of Artificial Sequence: Synthetic oligonucleotide
uggccgugggcucagacuu

SEQ ID NO: 871473 - RNA, 19 nt, Artificial Sequence
  Description of Artificial Sequence: Synthetic oligonucleotide
cugacgauuuugaaggcaa

SEQ ID NO: 871474 - RNA, 19 nt, Artificial Sequence
  Description of Artificial Sequence: Synthetic oligonucleotide
cacaugcgcguccaggggc

SEQ ID NO: 871475 - RNA, 19 nt, Artificial Sequence
  Description of Artificial Sequence: Synthetic oligonucleotide
gaugguugucaugucccgc

SEQ ID NO: 871476 - RNA, 19 nt, Artificial Sequence
  Description of Artificial Sequence: Synthetic oligonucleotide
ucgcuugcaucgccugugg

SEQ ID NO: 871477 - RNA, 19 nt, Artificial Sequence
  Description of Artificial Sequence: Synthetic oligonucleotide
gaguacucccacucacggc

SEQ ID NO: 871478 - RNA, 19 nt, Artificial Sequence
  Description of Artificial Sequence: Synthetic oligonucleotide
auggcggugcgaguacucc

SEQ ID NO: 871479 - RNA, 19 nt, Artificial Sequence
  Description of Artificial Sequence: Synthetic oligonucleotide
agugcgucugguuguauuu

SEQ ID NO: 871480 - RNA, 19 nt, Artificial Sequence
  Description of Artificial Sequence: Synthetic oligonucleotide
gaggaguugacgcccucac

SEQ ID NO: 871481 - RNA, 19 nt, Artificial Sequence
  Description of Artificial Sequence: Synthetic oligonucleotide
uccucagcgcucucgcuug

SEQ ID NO: 871482 - RNA, 19 nt, Artificial Sequence
  Description of Artificial Sequence: Synthetic oligonucleotide
ucguagugcgucugguugu

SEQ ID NO: 871483 - RNA, 19 nt, Artificial Sequence
  Description of Artificial Sequence: Synthetic oligonucleotide
auggcgaagucucgguugu

SEQ ID NO: 871484 - RNA, 19 nt, Artificial Sequence
  Description of Artificial Sequence: Synthetic oligonucleotide
ugucccgccagaagucuac

SEQ ID NO: 871485 - RNA, 19 nt, Artificial Sequence
  Description of Artificial Sequence: Synthetic oligonucleotide
gugggcucagacuugagua

SEQ ID NO: 871486 - RNA, 19 nt, Artificial Sequence
  Description of Artificial Sequence: Synthetic oligonucleotide
caggagguuguugucgccg

SEQ ID NO: 871487 - RNA, 19 nt, Artificial Sequence
  Description of Artificial Sequence: Synthetic oligonucleotide
ucguccugccccaugcccu

SEQ ID NO: 871488 - RNA, 19 nt, Artificial Sequence
  Description of Artificial Sequence: Synthetic oligonucleotide
caauguccucguagggagg

SEQ ID NO: 871489 - RNA, 19 nt, Artificial Sequence
  Description of Artificial Sequence: Synthetic oligonucleotide
uagggcucgugcaucucca

SEQ ID NO: 871490 - RNA, 19 nt, Artificial Sequence
  Description of Artificial Sequence: Synthetic oligonucleotide
ugugcacgcgguugaagaa

SEQ ID NO: 871491 - RNA, 19 nt, Artificial Sequence
  Description of Artificial Sequence: Synthetic oligonucleotide
uggcgcgacagcugcaggc

SEQ ID NO: 871492 - RNA, 19 nt, Artificial Sequence
  Description of Artificial Sequence: Synthetic oligonucleotide
cauuggcgaacuggcagcg

SEQ ID NO: 871493 - RNA, 19 nt, Artificial Sequence
  Description of Artificial Sequence: Synthetic oligonucleotide
gguuguugucgccgaaggg

SEQ ID NO: 871494 - RNA, 19 nt, Artificial Sequence
  Description of Artificial Sequence: Synthetic oligonucleotide
uuggguggcggguugucaa

SEQ ID NO: 871495 - RNA, 19 nt, Artificial Sequence
  Description of Artificial Sequence: Synthetic oligonucleotide
agccgcgggcuguagcggc

SEQ ID NO: 871496 - RNA, 19 nt, Artificial Sequence
  Description of Artificial Sequence: Synthetic oligonucleotide
acuugaguauggggaagag

SEQ ID NO: 871497 - RNA, 19 nt, Artificial Sequence
  Description of Artificial Sequence: Synthetic oligonucleotide
ugacgauuuugaaggcaau

SEQ ID NO: 871498 - RNA, 19 nt, Artificial Sequence
  Description of Artificial Sequence: Synthetic oligonucleotide
cacaucggagcugaccgag

SEQ ID NO: 871499 - RNA, 19 nt, Artificial Sequence
  Description of Artificial Sequence: Synthetic oligonucleotide
ggugcgaguacucccacuc

SEQ ID NO: 871500 - RNA, 19 nt, Artificial Sequence
  Description of Artificial Sequence: Synthetic oligonucleotide
gcuuagcccggccaucucg

SEQ ID NO: 871501 - RNA, 19 nt, Artificial Sequence
  Description of Artificial Sequence: Synthetic oligonucleotide
cucguccugccccaugccc

SEQ ID NO: 871502 - RNA, 19 nt, Artificial Sequence
  Description of Artificial Sequence: Synthetic oligonucleotide
uggauccucuuguuacgcu

SEQ ID NO: 871503 - RNA, 19 nt, Artificial Sequence
  Description of Artificial Sequence: Synthetic oligonucleotide
caucagcacugccucgccg

SEQ ID NO: 871504 - RNA, 19 nt, Artificial Sequence
  Description of Artificial Sequence: Synthetic oligonucleotide
cucguagggaggcccggcg

SEQ ID NO: 871505 - RNA, 19 nt, Artificial Sequence
  Description of Artificial Sequence: Synthetic oligonucleotide
caggaaguacucgggagug

SEQ ID NO: 871506 - RNA, 19 nt, Artificial Sequence
  Description of Artificial Sequence: Synthetic oligonucleotide
ugccauuggcgaacuggca

SEQ ID NO: 871507 - RNA, 19 nt, Artificial Sequence
  Description of Artificial Sequence: Synthetic oligonucleotide
uacgcccugcuccugcuuc

SEQ ID NO: 871508 - RNA, 19 nt, Artificial Sequence
  Description of Artificial Sequence: Synthetic oligonucleotide
cucggauucgaaucuugga

SEQ ID NO: 871509 - RNA, 19 nt, Artificial Sequence
  Description of Artificial Sequence: Synthetic oligonucleotide
cuggauccucuuguuacgc

SEQ ID NO: 871510 - RNA, 19 nt, Artificial Sequence
  Description of Artificial Sequence: Synthetic oligonucleotide
aucaaugggcuuagcccgg

SEQ ID NO: 871511 - RNA, 19 nt, Artificial Sequence
  Description of Artificial Sequence: Synthetic oligonucleotide
agccagaucgucguccucu

SEQ ID NO: 871512 - RNA, 19 nt, Artificial Sequence
  Description of Artificial Sequence: Synthetic oligonucleotide
cacgaucuuggguggcggg

SEQ ID NO: 871513 - RNA, 19 nt, Artificial Sequence
  Description of Artificial Sequence: Synthetic oligonucleotide
ucucgcuugcaucgccugu

SEQ ID NO: 871514 - RNA, 19 nt, Artificial Sequence
  Description of Artificial Sequence: Synthetic oligonucleotide
gaccgaggaguugacgccc

SEQ ID NO: 871515 - RNA, 19 nt, Artificial Sequence
  Description of Artificial Sequence: Synthetic oligonucleotide
ggaaguacucgggaguggc

SEQ ID NO: 871516 - RNA, 19 nt, Artificial Sequence
  Description of Artificial Sequence: Synthetic oligonucleotide
agcccugcacgaucuuggg

SEQ ID NO: 871517 - RNA, 19 nt, Artificial Sequence
  Description of Artificial Sequence: Synthetic oligonucleotide
cacgcgguugaagaagcgc

SEQ ID NO: 871518 - RNA, 19 nt, Artificial Sequence
  Description of Artificial Sequence: Synthetic oligonucleotide
aucgucguccucugcgcug

SEQ ID NO: 871519 - RNA, 19 nt, Artificial Sequence
  Description of Artificial Sequence: Synthetic oligonucleotide
gcacgcuucuccucgggcg

SEQ ID NO: 871520 - RNA, 19 nt, Artificial Sequence
  Description of Artificial Sequence: Synthetic oligonucleotide
aggguccggggcugcaugg

SEQ ID NO: 871521 - RNA, 19 nt, Artificial Sequence
  Description of Artificial Sequence: Synthetic oligonucleotide
ucgggaguggcgcgcuugc

SEQ ID NO: 871522 - RNA, 19 nt, Artificial Sequence
  Description of Artificial Sequence: Synthetic oligonucleotide
ucaccggcgguagcgguag

SEQ ID NO: 871523 - RNA, 19 nt, Artificial Sequence
  Description of Artificial Sequence: Synthetic oligonucleotide
ugaauacggacugcacauc

SEQ ID NO: 871524 - RNA, 19 nt, Artificial Sequence
  Description of Artificial Sequence: Synthetic oligonucleotide
ucucgguugucggcgcagg

SEQ ID NO: 871525 - RNA, 19 nt, Artificial Sequence
  Description of Artificial Sequence: Synthetic oligonucleotide
uggcggugcgaguacuccc

SEQ ID NO: 871526 - RNA, 19 nt, Artificial Sequence
  Description of Artificial Sequence: Synthetic oligonucleotide
aagcgcggcuugcgcggcc

SEQ ID NO: 871527 - RNA, 19 nt, Artificial Sequence
  Description of Artificial Sequence: Synthetic oligonucleotide
ggcgaagucucgguugucg

SEQ ID NO: 871528 - RNA, 19 nt, Artificial Sequence
  Description of Artificial Sequence: Synthetic oligonucleotide
ucuuagccagucgccgugc

SEQ ID NO: 871529 - RNA, 19 nt, Artificial Sequence
  Description of Artificial Sequence: Synthetic oligonucleotide
guugucgccgaagggguug

SEQ ID NO: 871530 - RNA, 19 nt, Artificial Sequence
  Description of Artificial Sequence: Synthetic oligonucleotide
gaggccguugaggaaggug

SEQ ID NO: 871531 - RNA, 19 nt, Artificial Sequence
  Description of Artificial Sequence: Synthetic oligonucleotide
gagcugaccgaggaguuga

SEQ ID NO: 871532 - RNA, 19 nt, Artificial Sequence
  Description of Artificial Sequence: Synthetic oligonucleotide
guauguuuuccccuugaau

SEQ ID NO: 871533 - RNA, 19 nt, Artificial Sequence
  Description of Artificial Sequence: Synthetic oligonucleotide
cucgugugccgugagcagc

SEQ ID NO: 871534 - RNA, 19 nt, Artificial Sequence
  Description of Artificial Sequence: Synthetic oligonucleotide
ugucgguguugguguaccc

SEQ ID NO: 871535 - RNA, 19 nt, Artificial Sequence
  Description of Artificial Sequence: Synthetic oligonucleotide
cucgugaggcuccagcaca

SEQ ID NO: 871536 - RNA, 19 nt, Artificial Sequence
  Description of Artificial Sequence: Synthetic oligonucleotide
cucuacgcccugcuccugc

SEQ ID NO: 871537 - RNA, 19 nt, Artificial Sequence
  Description of Artificial Sequence: Synthetic oligonucleotide
gucgccgaagggguugucg

SEQ ID NO: 871538 - RNA, 19 nt, Artificial Sequence
  Description of Artificial Sequence: Synthetic oligonucleotide
auuuugcccucaaugcccu

SEQ ID NO: 871539 - RNA, 19 nt, Artificial Sequence
  Description of Artificial Sequence: Synthetic oligonucleotide
guccggguagaagauguug

SEQ ID NO: 871540 - RNA, 19 nt, Artificial Sequence
  Description of Artificial Sequence: Synthetic oligonucleotide
gggaguggcgcgcuugcgg

SEQ ID NO: 871541 - RNA, 19 nt, Artificial Sequence
  Description of Artificial Sequence: Synthetic oligonucleotide
gugcacgcgguugaagaag

SEQ ID NO: 871542 - RNA, 19 nt, Artificial Sequence
  Description of Artificial Sequence: Synthetic oligonucleotide
uagugcgucugguuguauu

SEQ ID NO: 871543 - RNA, 19 nt, Artificial Sequence
  Description of Artificial Sequence: Synthetic oligonucleotide
ccauuggcgaacuggcagc

SEQ ID NO: 871544 - RNA, 19 nt, Artificial Sequence
  Description of Artificial Sequence: Synthetic oligonucleotide
gcuugaaguggaaccacag

SEQ ID NO: 871545 - RNA, 19 nt, Artificial Sequence
  Description of Artificial Sequence: Synthetic oligonucleotide
ucagcgcucucgcuugcau

SEQ ID NO: 871546 - RNA, 19 nt, Artificial Sequence
  Description of Artificial Sequence: Synthetic oligonucleotide
guggcggguugucaaaguc

SEQ ID NO: 871547 - RNA, 19 nt, Artificial Sequence
  Description of Artificial Sequence: Synthetic oligonucleotide
uacucccacucacggcuga

SEQ ID NO: 871548 - RNA, 19 nt, Artificial Sequence
  Description of Artificial Sequence: Synthetic oligonucleotide
ucuacgcccugcuccugcu

SEQ ID NO: 871549 - RNA, 19 nt, Artificial Sequence
  Description of Artificial Sequence: Synthetic oligonucleotide
caaagucguagugcgucug

SEQ ID NO: 871550 - RNA, 19 nt, Artificial Sequence
  Description of Artificial Sequence: Synthetic oligonucleotide
augggcuuagcccggccau

SEQ ID NO: 871551 - RNA, 19 nt, Artificial Sequence
  Description of Artificial Sequence: Synthetic oligonucleotide
ugggguccacugagggucc

SEQ ID NO: 871552 - RNA, 19 nt, Artificial Sequence
  Description of Artificial Sequence: Synthetic oligonucleotide
gaggguccggggcugcaug

SEQ ID NO: 871553 - RNA, 19 nt, Artificial Sequence
  Description of Artificial Sequence: Synthetic oligonucleotide
aaguggaaccacagcugga

SEQ ID NO: 871554 - RNA, 19 nt, Artificial Sequence
  Description of Artificial Sequence: Synthetic oligonucleotide
ucgugaggcuccagcacau

SEQ ID NO: 871555 - RNA, 19 nt, Artificial Sequence
  Description of Artificial Sequence: Synthetic oligonucleotide
ugucggcccacagguaggc

SEQ ID NO: 871556 - RNA, 19 nt, Artificial Sequence
  Description of Artificial Sequence: Synthetic oligonucleotide
gcggaugagguccggguag

SEQ ID NO: 871557 - RNA, 19 nt, Artificial Sequence
  Description of Artificial Sequence: Synthetic oligonucleotide
cucgcuugcaucgccugug

SEQ ID NO: 871558 - RNA, 19 nt, Artificial Sequence
  Description of Artificial Sequence: Synthetic oligonucleotide
guagcccugcacgaucuug

SEQ ID NO: 871559 - RNA, 19 nt, Artificial Sequence
  Description of Artificial Sequence: Synthetic oligonucleotide
ggccaacagaucaaugggc

SEQ ID NO: 871560 - RNA, 19 nt, Artificial Sequence
  Description of Artificial Sequence: Synthetic oligonucleotide
agucguagugcgucugguu

SEQ ID NO: 871561 - RNA, 19 nt, Artificial Sequence
  Description of Artificial Sequence: Synthetic oligonucleotide
cagguccucgugaggcucc

SEQ ID NO: 871562 - RNA, 19 nt, Artificial Sequence
  Description of Artificial Sequence: Synthetic oligonucleotide
ggccaugugugcacgaagc

SEQ ID NO: 871563 - RNA, 19 nt, Artificial Sequence
  Description of Artificial Sequence: Synthetic oligonucleotide
cucucgcuugcaucgccug

SEQ ID NO: 871564 - RNA, 19 nt, Artificial Sequence
  Description of Artificial Sequence: Synthetic oligonucleotide
ugccucgccgucuccuucu

SEQ ID NO: 871565 - RNA, 19 nt, Artificial Sequence
  Description of Artificial Sequence: Synthetic oligonucleotide
uugucaugucccgccagaa

SEQ ID NO: 871566 - RNA, 19 nt, Artificial Sequence
  Description of Artificial Sequence: Synthetic oligonucleotide
guagggaggcccggcgugg

SEQ ID NO: 871567 - RNA, 19 nt, Artificial Sequence
  Description of Artificial Sequence: Synthetic oligonucleotide
uugacgcccucacggcgcu

SEQ ID NO: 871568 - RNA, 19 nt, Artificial Sequence
  Description of Artificial Sequence: Synthetic oligonucleotide
cgaguacucccacucacgg

SEQ ID NO: 871569 - RNA, 19 nt, Artificial Sequence
  Description of Artificial Sequence: Synthetic oligonucleotide
ggcguggaagcgcaagaug

SEQ ID NO: 871570 - RNA, 19 nt, Artificial Sequence
  Description of Artificial Sequence: Synthetic oligonucleotide
ugugcguggccgugggcuc

SEQ ID NO: 871571 - RNA, 19 nt, Artificial Sequence
  Description of Artificial Sequence: Synthetic oligonucleotide
agcgucguagucggccagg

SEQ ID NO: 871572 - RNA, 19 nt, Artificial Sequence
  Description of Artificial Sequence: Synthetic oligonucleotide
uuuugcccucaaugcccug

SEQ ID NO: 871573 - RNA, 19 nt, Artificial Sequence
  Description of Artificial Sequence: Synthetic oligonucleotide
ugguuguauuuguuccauu

SEQ ID NO: 871574 - RNA, 19 nt, Artificial Sequence
  Description of Artificial Sequence: Synthetic oligonucleotide
accggcgguagcgguagcg

SEQ ID NO: 871575 - RNA, 19 nt, Artificial Sequence
  Description of Artificial Sequence: Synthetic oligonucleotide
cccagcggcaucuccacgc

SEQ ID NO: 871576 - RNA, 19 nt, Artificial Sequence
  Description of Artificial Sequence: Synthetic oligonucleotide
cauggcggugcgaguacuc

SEQ ID NO: 871577 - RNA, 19 nt, Artificial Sequence
  Description of Artificial Sequence: Synthetic oligonucleotide
gcgcuugcggaugaggucc

SEQ ID NO: 871578 - RNA, 19 nt, Artificial Sequence
  Description of Artificial Sequence: Synthetic oligonucleotide
cgauuuugaaggcaauguc

SEQ ID NO: 871579 - RNA, 19 nt, Artificial Sequence
  Description of Artificial Sequence: Synthetic oligonucleotide
ccuugaauacggacugcac

SEQ ID NO: 871580 - RNA, 19 nt, Artificial Sequence
  Description of Artificial Sequence: Synthetic oligonucleotide
uugcaucgccuguggcuug

SEQ ID NO: 871581 - RNA, 19 nt, Artificial Sequence
  Description of Artificial Sequence: Synthetic oligonucleotide
caaugggcuuagcccggcc

SEQ ID NO: 871582 - RNA, 19 nt, Artificial Sequence
  Description of Artificial Sequence: Synthetic oligonucleotide
cucgguugucggcgcaggc

SEQ ID NO: 871583 - RNA, 19 nt, Artificial Sequence
  Description of Artificial Sequence: Synthetic oligonucleotide
uguugucgccgaagggguu

SEQ ID NO: 871584 - RNA, 19 nt, Artificial Sequence
  Description of Artificial Sequence: Synthetic oligonucleotide
gcacaugcgcguccagggg

SEQ ID NO: 871585 - RNA, 19 nt, Artificial Sequence
  Description of Artificial Sequence: Synthetic oligonucleotide
guauggggaagagcggcuc

SEQ ID NO: 871586 - RNA, 19 nt, Artificial Sequence
  Description of Artificial Sequence: Synthetic oligonucleotide
cuccucgggcgucucgaag

SEQ ID NO: 871587 - RNA, 19 nt, Artificial Sequence
  Description of Artificial Sequence: Synthetic oligonucleotide
caucgccuguggcuuggag

SEQ ID NO: 871588 - RNA, 19 nt, Artificial Sequence
  Description of Artificial Sequence: Synthetic oligonucleotide
guugucggcgcaggccucc

SEQ ID NO: 871589 - RNA, 19 nt, Artificial Sequence
  Description of Artificial Sequence: Synthetic oligonucleotide
ggcgcgacagcugcaggcg

SEQ ID NO: 871590 - RNA, 19 nt, Artificial Sequence
  Description of Artificial Sequence: Synthetic oligonucleotide
gcgaguacucccacucacg

SEQ ID NO: 871591 - RNA, 19 nt, Artificial Sequence
  Description of Artificial Sequence: Synthetic oligonucleotide
uggguggcggguugucaaa

SEQ ID NO: 871592 - RNA, 19 nt, Artificial Sequence
  Description of Artificial Sequence: Synthetic oligonucleotide
guugucgguguugguguac

SEQ ID NO: 871593 - RNA, 19 nt, Artificial Sequence
  Description of Artificial Sequence: Synthetic oligonucleotide
uugcgcggccgguacuugu

SEQ ID NO: 871594 - RNA, 19 nt, Artificial Sequence
  Description of Artificial Sequence: Synthetic oligonucleotide
gguccggggcugcaugggg

SEQ ID NO: 871595 - RNA, 19 nt, Artificial Sequence
  Description of Artificial Sequence: Synthetic oligonucleotide
ucgccgucuccuucugccu

SEQ ID NO: 871596 - RNA, 19 nt, Artificial Sequence
  Description of Artificial Sequence: Synthetic oligonucleotide
agucucgguugucggcgca

SEQ ID NO: 871597 - RNA, 19 nt, Artificial Sequence
  Description of Artificial Sequence: Synthetic oligonucleotide
cagcgcucucgcuugcauc

SEQ ID NO: 871598 - RNA, 19 nt, Artificial Sequence
  Description of Artificial Sequence: Synthetic oligonucleotide
cugaacugugccucguccu

SEQ ID NO: 871599 - RNA, 19 nt, Artificial Sequence
  Description of Artificial Sequence: Synthetic oligonucleotide
ucccgccagaagucuacau

SEQ ID NO: 871600 - RNA, 19 nt, Artificial Sequence
  Description of Artificial Sequence: Synthetic oligonucleotide
cuggcgcgacagcugcagg

SEQ ID NO: 871601 - RNA, 19 nt, Artificial Sequence
  Description of Artificial Sequence: Synthetic oligonucleotide
agguaggcgcgcccgccca

SEQ ID NO: 871602 - RNA, 19 nt, Artificial Sequence
  Description of Artificial Sequence: Synthetic oligonucleotide
caaagcccgugugcacgcg

SEQ ID NO: 871603 - RNA, 19 nt, Artificial Sequence
  Description of Artificial Sequence: Synthetic oligonucleotide
ccuccuucuuagccagucg

SEQ ID NO: 871604 - RNA, 19 nt, Artificial Sequence
  Description of Artificial Sequence: Synthetic oligonucleotide
agcugaccgaggaguugac

SEQ ID NO: 871605 - RNA, 19 nt, Artificial Sequence
  Description of Artificial Sequence: Synthetic oligonucleotide
gaucgucguccucugcgcu

SEQ ID NO: 871606 - RNA, 19 nt, Artificial Sequence
  Description of Artificial Sequence: Synthetic oligonucleotide
acaugcgcguccaggggca

SEQ ID NO: 871607 - RNA, 19 nt, Artificial Sequence
  Description of Artificial Sequence: Synthetic oligonucleotide
guacucgggaguggcgcgc

SEQ ID NO: 871608 - RNA, 19 nt, Artificial Sequence
  Description of Artificial Sequence: Synthetic oligonucleotide
gugugccgugagcagccgc

SEQ ID NO: 871609 - RNA, 19 nt, Artificial Sequence
  Description of Artificial Sequence: Synthetic oligonucleotide
cuucuuagccagucgccgu

SEQ ID NO: 871610 - RNA, 19 nt, Artificial Sequence
  Description of Artificial Sequence: Synthetic oligonucleotide
gccucguccugccccaugc

SEQ ID NO: 871611 - RNA, 19 nt, Artificial Sequence
  Description of Artificial Sequence: Synthetic oligonucleotide
gucucgguugucggcgcag

SEQ ID NO: 871612 - RNA, 19 nt, Artificial Sequence
  Description of Artificial Sequence: Synthetic oligonucleotide
gcugaccgaggaguugacg

SEQ ID NO: 871613 - RNA, 19 nt, Artificial Sequence
  Description of Artificial Sequence: Synthetic oligonucleotide
ggggaagagcggcucacuc

SEQ ID NO: 871614 - RNA, 19 nt, Artificial Sequence
  Description of Artificial Sequence: Synthetic oligonucleotide
agcggaagccauggcggug

SEQ ID NO: 871615 - RNA, 19 nt, Artificial Sequence
  Description of Artificial Sequence: Synthetic oligonucleotide
gugcgaguacucccacuca

SEQ ID NO: 871616 - RNA, 19 nt, Artificial Sequence
  Description of Artificial Sequence: Synthetic oligonucleotide
gacgcccucacggcgcuca

SEQ ID NO: 871617 - RNA, 19 nt, Artificial Sequence
  Description of Artificial Sequence: Synthetic oligonucleotide
uguagcggccagcgucgua

SEQ ID NO: 871618 - RNA, 19 nt, Artificial Sequence
  Description of Artificial Sequence: Synthetic oligonucleotide
gcugacgauuuugaaggca

SEQ ID NO: 871619 - RNA, 19 nt, Artificial Sequence
  Description of Artificial Sequence: Synthetic oligonucleotide
uugucgccgaagggguugu

SEQ ID NO: 871620 - RNA, 19 nt, Artificial Sequence
  Description of Artificial Sequence: Synthetic oligonucleotide
gcuugcaucgccuguggcu

SEQ ID NO: 871621 - RNA, 19 nt, Artificial Sequence
  Description of Artificial Sequence: Synthetic oligonucleotide
ggguugucgguguuggugu

SEQ ID NO: 871622 - RNA, 19 nt, Artificial Sequence
  Description of Artificial Sequence: Synthetic oligonucleotide
gccucagaacauccuggug

SEQ ID NO: 871623 - RNA, 19 nt, Artificial Sequence
  Description of Artificial Sequence: Synthetic oligonucleotide
gcucgugcaucuccacagc

SEQ ID NO: 871624 - RNA, 19 nt, Artificial Sequence
  Description of Artificial Sequence: Synthetic oligonucleotide
agcgcggcuugcgcggccg

SEQ ID NO: 871625 - RNA, 19 nt, Artificial Sequence
  Description of Artificial Sequence: Synthetic oligonucleotide
gaggcccggcguggaagcg

SEQ ID NO: 871626 - RNA, 19 nt, Artificial Sequence
  Description of Artificial Sequence: Synthetic oligonucleotide
cucgggaguggcgcgcuug

SEQ ID NO: 871627 - RNA, 19 nt, Artificial Sequence
  Description of Artificial Sequence: Synthetic oligonucleotide
uacucgggaguggcgcgcu

SEQ ID NO: 871628 - RNA, 19 nt, Artificial Sequence
  Description of Artificial Sequence: Synthetic oligonucleotide
gaagcgcggcuugcgcggc

SEQ ID NO: 871629 - RNA, 19 nt, Artificial Sequence
  Description of Artificial Sequence: Synthetic oligonucleotide
caugcccucccgcgcgcgc

SEQ ID NO: 871630 - RNA, 19 nt, Artificial Sequence
  Description of Artificial Sequence: Synthetic oligonucleotide
guacucccacucacggcug

SEQ ID NO: 871631 - RNA, 19 nt, Artificial Sequence
  Description of Artificial Sequence: Synthetic oligonucleotide
gcacgaucuuggguggcgg

SEQ ID NO: 871632 - RNA, 19 nt, Artificial Sequence
  Description of Artificial Sequence: Synthetic oligonucleotide
cgcgguugaagaagcgcgg

SEQ ID NO: 871633 - RNA, 19 nt, Artificial Sequence
  Description of Artificial Sequence: Synthetic oligonucleotide
cagcgucguagucggccag

SEQ ID NO: 871634 - RNA, 19 nt, Artificial Sequence
  Description of Artificial Sequence: Synthetic oligonucleotide
cacggcugacgauuuugaa

SEQ ID NO: 871635 - RNA, 19 nt, Artificial Sequence
  Description of Artificial Sequence: Synthetic oligonucleotide
gcuggcgcgacagcugcag

SEQ ID NO: 871636 - RNA, 19 nt, Artificial Sequence
  Description of Artificial Sequence: Synthetic oligonucleotide
cuugcaucgccuguggcuu

SEQ ID NO: 871637 - RNA, 19 nt, Artificial Sequence
  Description of Artificial Sequence: Synthetic oligonucleotide
gcgccggaagaagaugucc

SEQ ID NO: 871638 - RNA, 19 nt, Artificial Sequence
  Description of Artificial Sequence: Synthetic oligonucleotide
guggccgugggcucagacu

SEQ ID NO: 871639 - RNA, 19 nt, Artificial Sequence
  Description of Artificial Sequence: Synthetic oligonucleotide
acgcccucacggcgcucac

SEQ ID NO: 871640 - RNA, 19 nt, Artificial Sequence
  Description of Artificial Sequence: Synthetic oligonucleotide
ugaggguccggggcugcau

SEQ ID NO: 871641 - RNA, 19 nt, Artificial Sequence
  Description of Artificial Sequence: Synthetic oligonucleotide
cagucgccgugcacgcuuc

SEQ ID NO: 871642 - RNA, 19 nt, Artificial Sequence
  Description of Artificial Sequence: Synthetic oligonucleotide
ggccgguacuugucggccc

SEQ ID NO: 871643 - RNA, 19 nt, Artificial Sequence
  Description of Artificial Sequence: Synthetic oligonucleotide
cucgggcgucucgaaggcc

SEQ ID NO: 871644 - RNA, 19 nt, Artificial Sequence
  Description of Artificial Sequence: Synthetic oligonucleotide
ggguggcggguugucaaag

SEQ ID NO: 871645 - RNA, 19 nt, Artificial Sequence
  Description of Artificial Sequence: Synthetic oligonucleotide
cugccucgccgucuccuuc

SEQ ID NO: 871646 - RNA, 19 nt, Artificial Sequence
  Description of Artificial Sequence: Synthetic oligonucleotide
cugugcguggccgugggcu

SEQ ID NO: 871647 - RNA, 19 nt, Artificial Sequence
  Description of Artificial Sequence: Synthetic oligonucleotide
cucacggagccuggcccug

SEQ ID NO: 871648 - RNA, 19 nt, Artificial Sequence
  Description of Artificial Sequence: Synthetic oligonucleotide
gcggccgguacuugucggc

SEQ ID NO: 871649 - RNA, 19 nt, Artificial Sequence
  Description of Artificial Sequence: Synthetic oligonucleotide
cgcucacggagccuggccc

SEQ ID NO: 871650 - RNA, 19 nt, Artificial Sequence
  Description of Artificial Sequence: Synthetic oligonucleotide
cggccagcgucguagucgg

SEQ ID NO: 871651 - RNA, 19 nt, Artificial Sequence
  Description of Artificial Sequence: Synthetic oligonucleotide
cuugcgcggccgguacuug

SEQ ID NO: 871652 - RNA, 19 nt, Artificial Sequence
  Description of Artificial Sequence: Synthetic oligonucleotide
ccucgggcgucucgaaggc

SEQ ID NO: 871653 - RNA, 19 nt, Artificial Sequence
  Description of Artificial Sequence: Synthetic oligonucleotide
ccaucagcacugccucgcc

SEQ ID NO: 871654 - RNA, 19 nt, Artificial Sequence
  Description of Artificial Sequence: Synthetic oligonucleotide
accgaggaguugacgcccu

SEQ ID NO: 871655 - RNA, 19 nt, Artificial Sequence
  Description of Artificial Sequence: Synthetic oligonucleotide
ccccaugcccucccgcgcg

SEQ ID NO: 871656 - RNA, 19 nt, Artificial Sequence
  Description of Artificial Sequence: Synthetic oligonucleotide
cagcggcaucuccacgcug

SEQ ID NO: 871657 - RNA, 19 nt, Artificial Sequence
  Description of Artificial Sequence: Synthetic oligonucleotide
ccugcacggauuuugcccu

SEQ ID NO: 871658 - RNA, 19 nt, Artificial Sequence
  Description of Artificial Sequence: Synthetic oligonucleotide
ggcggugcgaguacuccca

SEQ ID NO: 871659 - RNA, 19 nt, Artificial Sequence
  Description of Artificial Sequence: Synthetic oligonucleotide
ggcggguugucaaagucgu

SEQ ID NO: 871660 - RNA, 19 nt, Artificial Sequence
  Description of Artificial Sequence: Synthetic oligonucleotide
cccuugaauacggacugca

SEQ ID NO: 871661 - RNA, 19 nt, Artificial Sequence
  Description of Artificial Sequence: Synthetic oligonucleotide
gcacgcgguugaagaagcg

SEQ ID NO: 871662 - RNA, 19 nt, Artificial Sequence
  Description of Artificial Sequence: Synthetic oligonucleotide
caugcgcguccaggggcag

SEQ ID NO: 871663 - RNA, 19 nt, Artificial Sequence
  Description of Artificial Sequence: Synthetic oligonucleotide
cgggcuguagcggccagcg

SEQ ID NO: 871664 - RNA, 19 nt, Artificial Sequence
  Description of Artificial Sequence: Synthetic oligonucleotide
gcgcucacggagccuggcc

SEQ ID NO: 871665 - RNA, 19 nt, Artificial Sequence
  Description of Artificial Sequence: Synthetic oligonucleotide
caugucccgccagaagucu

SEQ ID NO: 871666 - RNA, 19 nt, Artificial Sequence
  Description of Artificial Sequence: Synthetic oligonucleotide
ccagaucgucguccucugc

SEQ ID NO: 871667 - RNA, 19 nt, Artificial Sequence
  Description of Artificial Sequence: Synthetic oligonucleotide
cugccgcagguggaagcug

SEQ ID NO: 871668 - RNA, 19 nt, Artificial Sequence
  Description of Artificial Sequence: Synthetic oligonucleotide
cucccgcgcgcgccggaag

SEQ ID NO: 871669 - RNA, 19 nt, Artificial Sequence
  Description of Artificial Sequence: Synthetic oligonucleotide
ggguccggggcugcauggg

SEQ ID NO: 871670 - RNA, 19 nt, Artificial Sequence
  Description of Artificial Sequence: Synthetic oligonucleotide
cguagggaggcccggcgug

SEQ ID NO: 871671 - RNA, 19 nt, Artificial Sequence
  Description of Artificial Sequence: Synthetic oligonucleotide
ccggguagaagauguugaa

SEQ ID NO: 871672 - RNA, 19 nt, Artificial Sequence
  Description of Artificial Sequence: Synthetic oligonucleotide
ggguccacugaggguccgg

SEQ ID NO: 871673 - RNA, 19 nt, Artificial Sequence
  Description of Artificial Sequence: Synthetic oligonucleotide
gcgcuugaaguggaaccac

SEQ ID NO: 871674 - RNA, 19 nt, Artificial Sequence
  Description of Artificial Sequence: Synthetic oligonucleotide
uggcgaagucucgguuguc

SEQ ID NO: 871675 - RNA, 19 nt, Artificial Sequence
  Description of Artificial Sequence: Synthetic oligonucleotide
agguccucgugaggcucca

SEQ ID NO: 871676 - RNA, 19 nt, Artificial Sequence
  Description of Artificial Sequence: Synthetic oligonucleotide
gucgccgugcacgcuucuc

SEQ ID NO: 871677 - RNA, 19 nt, Artificial Sequence
  Description of Artificial Sequence: Synthetic oligonucleotide
acuugucggcccacaggua

SEQ ID NO: 871678 - RNA, 19 nt, Artificial Sequence
  Description of Artificial Sequence: Synthetic oligonucleotide
ccagcgucguagucggcca

SEQ ID NO: 871679 - RNA, 19 nt, Artificial Sequence
  Description of Artificial Sequence: Synthetic oligonucleotide
gcccucacggcgcucaccu

SEQ ID NO: 871680 - RNA, 19 nt, Artificial Sequence
  Description of Artificial Sequence: Synthetic oligonucleotide
gguugucgguguuggugua

SEQ ID NO: 871681 - RNA, 19 nt, Artificial Sequence
  Description of Artificial Sequence: Synthetic oligonucleotide
gcgcgacagcugcaggcgc

SEQ ID NO: 871682 - RNA, 19 nt, Artificial Sequence
  Description of Artificial Sequence: Synthetic oligonucleotide
ggcgucucgaaggccuuga

SEQ ID NO: 871683 - RNA, 19 nt, Artificial Sequence
  Description of Artificial Sequence: Synthetic oligonucleotide
ccucguccugccccaugcc

SEQ ID NO: 871684 - RNA, 19 nt, Artificial Sequence
  Description of Artificial Sequence: Synthetic oligonucleotide
augucccgccagaagucua

SEQ ID NO: 871685 - RNA, 19 nt, Artificial Sequence
  Description of Artificial Sequence: Synthetic oligonucleotide
gucaccggcgguagcggua

SEQ ID NO: 871686 - RNA, 19 nt, Artificial Sequence
  Description of Artificial Sequence: Synthetic oligonucleotide
gucccgccagaagucuaca

SEQ ID NO: 871687 - RNA, 19 nt, Artificial Sequence
  Description of Artificial Sequence: Synthetic oligonucleotide
cucagcgcucucgcuugca

SEQ ID NO: 871688 - RNA, 19 nt, Artificial Sequence
  Description of Artificial Sequence: Synthetic oligonucleotide
cgcuugcggaugagguccg

SEQ ID NO: 871689 - RNA, 19 nt, Artificial Sequence
  Description of Artificial Sequence: Synthetic oligonucleotide
ugucgccgaagggguuguc

SEQ ID NO: 871690 - RNA, 19 nt, Artificial Sequence
  Description of Artificial Sequence: Synthetic oligonucleotide
ccucguagggaggcccggc

SEQ ID NO: 871691 - RNA, 19 nt, Artificial Sequence
  Description of Artificial Sequence: Synthetic oligonucleotide
cacggauuuugcccucaau

SEQ ID NO: 871692 - RNA, 19 nt, Artificial Sequence
  Description of Artificial Sequence: Synthetic oligonucleotide
gggguccacugaggguccg

SEQ ID NO: 871693 - RNA, 19 nt, Artificial Sequence
  Description of Artificial Sequence: Synthetic oligonucleotide
ccccuugaauacggacugc

SEQ ID NO: 871694 - RNA, 19 nt, Artificial Sequence
  Description of Artificial Sequence: Synthetic oligonucleotide
cccggcguggaagcgcaag

SEQ ID NO: 871695 - RNA, 19 nt, Artificial Sequence
  Description of Artificial Sequence: Synthetic oligonucleotide
gccgugggcucagacuuga

SEQ ID NO: 871696 - RNA, 19 nt, Artificial Sequence
  Description of Artificial Sequence: Synthetic oligonucleotide
cccgugugcacgcgguuga

SEQ ID NO: 871697 - RNA, 19 nt, Artificial Sequence
  Description of Artificial Sequence: Synthetic oligonucleotide
gcccuugccggaggcuucc

SEQ ID NO: 871698 - RNA, 19 nt, Artificial Sequence
  Description of Artificial Sequence: Synthetic oligonucleotide
ggcgcucacggagccuggc

SEQ ID NO: 871699 - RNA, 19 nt, Artificial Sequence
  Description of Artificial Sequence: Synthetic oligonucleotide
gcucacggagccuggcccu

SEQ ID NO: 871700 - RNA, 19 nt, Artificial Sequence
  Description of Artificial Sequence: Synthetic oligonucleotide
cgcucucgcuugcaucgcc

SEQ ID NO: 871701 - RNA, 19 nt, Artificial Sequence
  Description of Artificial Sequence: Synthetic oligonucleotide
ccucgccgucuccuucugc

SEQ ID NO: 871702 - RNA, 19 nt, Artificial Sequence
  Description of Artificial Sequence: Synthetic oligonucleotide
caccggcgguagcgguagc

SEQ ID NO: 871703 - RNA, 19 nt, Artificial Sequence
  Description of Artificial Sequence: Synthetic oligonucleotide
ccggcguggaagcgcaaga

SEQ ID NO: 871704 - RNA, 19 nt, Artificial Sequence
  Description of Artificial Sequence: Synthetic oligonucleotide
gcacggauuuugcccucaa

SEQ ID NO: 871705 - RNA, 19 nt, Artificial Sequence
  Description of Artificial Sequence: Synthetic oligonucleotide
gccucgccgucuccuucug

SEQ ID NO: 871706 - RNA, 19 nt, Artificial Sequence
  Description of Artificial Sequence: Synthetic oligonucleotide
ggccgugggcucagacuug

SEQ ID NO: 871707 - RNA, 19 nt, Artificial Sequence
  Description of Artificial Sequence: Synthetic oligonucleotide
gggcgucucgaaggccuug

SEQ ID NO: 871708 - RNA, 19 nt, Artificial Sequence
  Description of Artificial Sequence: Synthetic oligonucleotide
cccaugcccucccgcgcgc

SEQ ID NO: 871709 - RNA, 19 nt, Artificial Sequence
  Description of Artificial Sequence: Synthetic oligonucleotide
gcccacagguaggcgcgcc

SEQ ID NO: 871710 - RNA, 19 nt, Artificial Sequence
  Description of Artificial Sequence: Synthetic oligonucleotide
ccaacagaucaaugggcuu

SEQ ID NO: 871711 - RNA, 19 nt, Artificial Sequence
  Description of Artificial Sequence: Synthetic oligonucleotide
cggccgguacuugucggcc

SEQ ID NO: 871712 - RNA, 19 nt, Artificial Sequence
  Description of Artificial Sequence: Synthetic oligonucleotide
gcgcgccggaagaagaugu

SEQ ID NO: 871713 - RNA, 19 nt, Artificial Sequence
  Description of Artificial Sequence: Synthetic oligonucleotide
ccgugggcucagacuugag

SEQ ID NO: 871714 - RNA, 19 nt, Artificial Sequence
  Description of Artificial Sequence: Synthetic oligonucleotide
cgcgccggaagaagauguc

SEQ ID NO: 871715 - RNA, 19 nt, Artificial Sequence
  Description of Artificial Sequence: Synthetic oligonucleotide
ccaugcccucccgcgcgcg

SEQ ID NO: 871716 - RNA, 19 nt, Artificial Sequence
  Description of Artificial Sequence: Synthetic oligonucleotide
gccgcgggcuguagcggcc

SEQ ID NO: 871717 - RNA, 19 nt, Artificial Sequence
  Description of Artificial Sequence: Synthetic oligonucleotide
gcggcaucuccacgcugaa

SEQ ID NO: 871718 - RNA, 19 nt, Artificial Sequence
  Description of Artificial Sequence: Synthetic oligonucleotide
gcgcucucgcuugcaucgc

SEQ ID NO: 871719 - RNA, 19 nt, Artificial Sequence
  Description of Artificial Sequence: Synthetic oligonucleotide
gcccugcacgaucuugggu

SEQ ID NO: 871720 - RNA, 19 nt, Artificial Sequence
  Description of Artificial Sequence: Synthetic oligonucleotide
guagugcgucugguuguau

SEQ ID NO: 871721 - RNA, 19 nt, Artificial Sequence
  Description of Artificial Sequence: Synthetic oligonucleotide
gcgcggcuugcgcggccgg

SEQ ID NO: 871722 - RNA, 19 nt, Artificial Sequence
  Description of Artificial Sequence: Synthetic oligonucleotide
gcucucgcuugcaucgccu

SEQ ID NO: 871723 - RNA, 19 nt, Artificial Sequence
  Description of Artificial Sequence: Synthetic oligonucleotide
cgugugccgugagcagccg

SEQ ID NO: 871724 - RNA, 19 nt, Artificial Sequence
  Description of Artificial Sequence: Synthetic oligonucleotide
ccacucacggcugacgauu

SEQ ID NO: 871725 - RNA, 19 nt, Artificial Sequence
  Description of Artificial Sequence: Synthetic oligonucleotide
cggcuugcgcggccgguac

SEQ ID NO: 871726 - RNA, 19 nt, Artificial Sequence
  Description of Artificial Sequence: Synthetic oligonucleotide
cgcgcgccggaagaagaug

SEQ ID NO: 871727 - RNA, 19 nt, Artificial Sequence
  Description of Artificial Sequence: Synthetic oligonucleotide
cgggaguggcgcgcuugcg

SEQ ID NO: 871728 - RNA, 19 nt, Artificial Sequence
  Description of Artificial Sequence: Synthetic oligonucleotide
ccgguacuugucggcccac

SEQ ID NO: 871729 - RNA, 19 nt, Artificial Sequence
  Description of Artificial Sequence: Synthetic oligonucleotide
ccagucgccgugcacgcuu

SEQ ID NO: 871730 - RNA, 19 nt, Artificial Sequence
  Description of Artificial Sequence: Synthetic oligonucleotide
ccggggcugcauggggcag

SEQ ID NO: 871731 - RNA, 19 nt, Artificial Sequence
  Description of Artificial Sequence: Synthetic oligonucleotide
ccagcggcaucuccacgcu

SEQ ID NO: 871732 - RNA, 19 nt, Artificial Sequence
  Description of Artificial Sequence: Synthetic oligonucleotide
ggcuugcgcggccgguacu

SEQ ID NO: 871733 - RNA, 19 nt, Artificial Sequence
  Description of Artificial Sequence: Synthetic oligonucleotide
cgguugaagaagcgcggcu

SEQ ID NO: 871734 - RNA, 19 nt, Artificial Sequence
  Description of Artificial Sequence: Synthetic oligonucleotide
ccagugccuuguuccagau

SEQ ID NO: 871735 - RNA, 19 nt, Artificial Sequence
  Description of Artificial Sequence: Synthetic oligonucleotide
gcuugcgcggccgguacuu

SEQ ID NO: 871736 - RNA, 19 nt, Artificial Sequence
  Description of Artificial Sequence: Synthetic oligonucleotide
gcgucugguuguauuuguu

SEQ ID NO: 871737 - RNA, 19 nt, Artificial Sequence
  Description of Artificial Sequence: Synthetic oligonucleotide
cguagugcgucugguugua

SEQ ID NO: 871738 - RNA, 19 nt, Artificial Sequence
  Description of Artificial Sequence: Synthetic oligonucleotide
cuguagcggccagcgucgu

SEQ ID NO: 871739 - RNA, 19 nt, Artificial Sequence
  Description of Artificial Sequence: Synthetic oligonucleotide
cggguagaagauguugaau

SEQ ID NO: 871740 - RNA, 19 nt, Artificial Sequence
  Description of Artificial Sequence: Synthetic oligonucleotide
gcggcuugcgcggccggua

SEQ ID NO: 871741 - RNA, 19 nt, Artificial Sequence
  Description of Artificial Sequence: Synthetic oligonucleotide
gcggguugucaaagucgua

SEQ ID NO: 871742 - RNA, 19 nt, Artificial Sequence
  Description of Artificial Sequence: Synthetic oligonucleotide
cccacucacggcugacgau

SEQ ID NO: 871743 - RNA, 19 nt, Artificial Sequence
  Description of Artificial Sequence: Synthetic oligonucleotide
gguccggguagaagauguu

SEQ ID NO: 871744 - RNA, 19 nt, Artificial Sequence
  Description of Artificial Sequence: Synthetic oligonucleotide
gggcuguagcggccagcgu

SEQ ID NO: 871745 - RNA, 19 nt, Artificial Sequence
  Description of Artificial Sequence: Synthetic oligonucleotide
cgcgacagcugcaggcgcu

SEQ ID NO: 871746 - RNA, 19 nt, Artificial Sequence
  Description of Artificial Sequence: Synthetic oligonucleotide
gcgcccgcccagcggcauc

SEQ ID NO: 871747 - RNA, 19 nt, Artificial Sequence
  Description of Artificial Sequence: Synthetic oligonucleotide
cgcgggcuguagcggccag

SEQ ID NO: 871748 - RNA, 19 nt, Artificial Sequence
  Description of Artificial Sequence: Synthetic oligonucleotide
cgcccucacggcgcucacc

SEQ ID NO: 871749 - RNA, 19 nt, Artificial Sequence
  Description of Artificial Sequence: Synthetic oligonucleotide
ccauggcggugcgaguacu

SEQ ID NO: 871750 - RNA, 19 nt, Artificial Sequence
  Description of Artificial Sequence: Synthetic oligonucleotide
ccgcgggcuguagcggcca

SEQ ID NO: 871751 - RNA, 19 nt, Artificial Sequence
  Description of Artificial Sequence: Synthetic oligonucleotide
ccgugugcacgcgguugaa

SEQ ID NO: 871752 - RNA, 19 nt, Artificial Sequence
  Description of Artificial Sequence: Synthetic oligonucleotide
cggugcgaguacucccacu

SEQ ID NO: 871753 - RNA, 19 nt, Artificial Sequence
  Description of Artificial Sequence: Synthetic oligonucleotide
cgucguagucggccaggcu

SEQ ID NO: 871754 - RNA, 19 nt, Artificial Sequence
  Description of Artificial Sequence: Synthetic oligonucleotide
gccagucgccgugcacgcu

SEQ ID NO: 871755 - RNA, 19 nt, Artificial Sequence
  Description of Artificial Sequence: Synthetic oligonucleotide
ccucugcgcugauguacuu

SEQ ID NO: 871756 - RNA, 19 nt, Artificial Sequence
  Description of Artificial Sequence: Synthetic oligonucleotide
cccuugccggaggcuucca

SEQ ID NO: 871757 - RNA, 19 nt, Artificial Sequence
  Description of Artificial Sequence: Synthetic oligonucleotide
cggcguggaagcgcaagau

SEQ ID NO: 871758 - RNA, 19 nt, Artificial Sequence
  Description of Artificial Sequence: Synthetic oligonucleotide
gcgcgcccgcccagcggca

SEQ ID NO: 871759 - RNA, 19 nt, Artificial Sequence
  Description of Artificial Sequence: Synthetic oligonucleotide
gcccgcccagcggcaucuc

SEQ ID NO: 871760 - RNA, 19 nt, Artificial Sequence
  Description of Artificial Sequence: Synthetic oligonucleotide
gcccggcguggaagcgcaa

SEQ ID NO: 871761 - RNA, 19 nt, Artificial Sequence
  Description of Artificial Sequence: Synthetic oligonucleotide
ggcgcucaccugggcccuu

SEQ ID NO: 871762 - RNA, 19 nt, Artificial Sequence
  Description of Artificial Sequence: Synthetic oligonucleotide
cgcgcccgcccagcggcau

SEQ ID NO: 871763 - RNA, 19 nt, Artificial Sequence
  Description of Artificial Sequence: Synthetic oligonucleotide
uguccuacaacuaugaugu

SEQ ID NO: 871764 - RNA, 19 nt, Artificial Sequence
  Description of Artificial Sequence: Synthetic oligonucleotide
aaagcuaagaaaucccaac

SEQ ID NO: 871765 - RNA, 19 nt, Artificial Sequence
  Description of Artificial Sequence: Synthetic oligonucleotide
ucuaagauagggaucagag

SEQ ID NO: 871766 - RNA, 19 nt, Artificial Sequence
  Description of Artificial Sequence: Synthetic oligonucleotide
uauucauuuauuaucaauc

SEQ ID NO: 871767 - RNA, 19 nt, Artificial Sequence
  Description of Artificial Sequence: Synthetic oligonucleotide
accauauucauuuauuauc

SEQ ID NO: 871768 - RNA, 19 nt, Artificial Sequence
  Description of Artificial Sequence: Synthetic oligonucleotide
aauaacaacacaaagcuaa

SEQ ID NO: 871769 - RNA, 19 nt, Artificial Sequence
  Description of Artificial Sequence: Synthetic oligonucleotide
ucugguuagaauuagagua

SEQ ID NO: 871770 - RNA, 19 nt, Artificial Sequence
  Description of Artificial Sequence: Synthetic oligonucleotide
agcauagcagauuagaaag

SEQ ID NO: 871771 - RNA, 19 nt, Artificial Sequence
  Description of Artificial Sequence: Synthetic oligonucleotide
cuaagaaaucccaacaacc

SEQ ID NO: 871772 - RNA, 19 nt, Artificial Sequence
  Description of Artificial Sequence: Synthetic oligonucleotide
uagaauuagaguauuuuca

SEQ ID NO: 871773 - RNA, 19 nt, Artificial Sequence
  Description of Artificial Sequence: Synthetic oligonucleotide
augauguucaccaaggucg

SEQ ID NO: 871774 - RNA, 19 nt, Artificial Sequence
  Description of Artificial Sequence: Synthetic oligonucleotide
uugaauaaaauauuccccu

SEQ ID NO: 871775 - RNA, 19 nt, Artificial Sequence
  Description of Artificial Sequence: Synthetic oligonucleotide
uguuguaaggcauuggaca

SEQ ID NO: 871776 - RNA, 19 nt, Artificial Sequence
  Description of Artificial Sequence: Synthetic oligonucleotide
aggauaauuugauugcuac

SEQ ID NO: 871777 - RNA, 19 nt, Artificial Sequence
  Description of Artificial Sequence: Synthetic oligonucleotide
aggucguucagauaagggc

SEQ ID NO: 871778 - RNA, 19 nt, Artificial Sequence
  Description of Artificial Sequence: Synthetic oligonucleotide
acaguuauccuuuguaccg

SEQ ID NO: 871779 - RNA, 19 nt, Artificial Sequence
  Description of Artificial Sequence: Synthetic oligonucleotide
uauuguaagugcuucaaga

SEQ ID NO: 871780 - RNA, 19 nt, Artificial Sequence
  Description of Artificial Sequence: Synthetic oligonucleotide
uauucuauugucaaggcuu

SEQ ID NO: 871781 - RNA, 19 nt, Artificial Sequence
  Description of Artificial Sequence: Synthetic oligonucleotide
uaagaaaucccaacaacca

SEQ ID NO: 871782 - RNA, 19 nt, Artificial Sequence
  Description of Artificial Sequence: Synthetic oligonucleotide
auaugcaucuaccaagggg

SEQ ID NO: 871783 - RNA, 19 nt, Artificial Sequence
  Description of Artificial Sequence: Synthetic oligonucleotide
uaauuugauugcuacauga

SEQ ID NO: 871784 - RNA, 19 nt, Artificial Sequence
  Description of Artificial Sequence: Synthetic oligonucleotide
gagauaugcaucuaccaag

SEQ ID NO: 871785 - RNA, 19 nt, Artificial Sequence
  Description of Artificial Sequence: Synthetic oligonucleotide
ucguauuugaauuuaucug

SEQ ID NO: 871786 - RNA, 19 nt, Artificial Sequence
  Description of Artificial Sequence: Synthetic oligonucleotide
aauagugccacaaggaugu

SEQ ID NO: 871787 - RNA, 19 nt, Artificial Sequence
  Description of Artificial Sequence: Synthetic oligonucleotide
uuucggaucagguuuaucu

SEQ ID NO: 871788 - RNA, 19 nt, Artificial Sequence
  Description of Artificial Sequence: Synthetic oligonucleotide
cuuucuaccggcaugguac

SEQ ID NO: 871789 - RNA, 19 nt, Artificial Sequence
  Description of Artificial Sequence: Synthetic oligonucleotide
ugcuacaugagcuucauaa

SEQ ID NO: 871790 - RNA, 19 nt, Artificial Sequence
  Description of Artificial Sequence: Synthetic oligonucleotide
cacgcuaccaauacaaucc

SEQ ID NO: 871791 - RNA, 19 nt, Artificial Sequence
  Description of Artificial Sequence: Synthetic oligonucleotide
auccgguacacucugaagg

SEQ ID NO: 871792 - RNA, 19 nt, Artificial Sequence
  Description of Artificial Sequence: Synthetic oligonucleotide
auuugaauuuaucuguucu

SEQ ID NO: 871793 - RNA, 19 nt, Artificial Sequence
  Description of Artificial Sequence: Synthetic oligonucleotide
uucgauaucaggcaaggaa

SEQ ID NO: 871794 - RNA, 19 nt, Artificial Sequence
  Description of Artificial Sequence: Synthetic oligonucleotide
aucguauuugaauuuaucu

SEQ ID NO: 871795 - RNA, 19 nt, Artificial Sequence
  Description of Artificial Sequence: Synthetic oligonucleotide
uguggagaaauuaauuuuc

SEQ ID NO: 871796 - RNA, 19 nt, Artificial Sequence
  Description of Artificial Sequence: Synthetic oligonucleotide
uucaccuuuacaaaauuaa

SEQ ID NO: 871797 - RNA, 19 nt, Artificial Sequence
  Description of Artificial Sequence: Synthetic oligonucleotide
uucucauucuuucuaccgg

SEQ ID NO: 871798 - RNA, 19 nt, Artificial Sequence
  Description of Artificial Sequence: Synthetic oligonucleotide
uagcagauuagaaagauuu

SEQ ID NO: 871799 - RNA, 19 nt, Artificial Sequence
  Description of Artificial Sequence: Synthetic oligonucleotide
aggauguaauaacaacugc

SEQ ID NO: 871800 - RNA, 19 nt, Artificial Sequence
  Description of Artificial Sequence: Synthetic oligonucleotide
auucucauucuuucuaccg

SEQ ID NO: 871801 - RNA, 19 nt, Artificial Sequence
  Description of Artificial Sequence: Synthetic oligonucleotide
cugauaaacaagaaaagga

SEQ ID NO: 871802 - RNA, 19 nt, Artificial Sequence
  Description of Artificial Sequence: Synthetic oligonucleotide
augaacuugagggaguagc

SEQ ID NO: 871803 - RNA, 19 nt, Artificial Sequence
  Description of Artificial Sequence: Synthetic oligonucleotide
ucacuaggcacacugucgg

SEQ ID NO: 871804 - RNA, 19 nt, Artificial Sequence
  Description of Artificial Sequence: Synthetic oligonucleotide
uucaaaucugggaauuugc

SEQ ID NO: 871805 - RNA, 19 nt, Artificial Sequence
  Description of Artificial Sequence: Synthetic oligonucleotide
gacaguuauccuuuguacc

SEQ ID NO: 871806 - RNA, 19 nt, Artificial Sequence
  Description of Artificial Sequence: Synthetic oligonucleotide
uguggaucgccccaguucc

SEQ ID NO: 871807 - RNA, 19 nt, Artificial Sequence
  Description of Artificial Sequence: Synthetic oligonucleotide
cacuucuucgauaucaggc

SEQ ID NO: 871808 - RNA, 19 nt, Artificial Sequence
  Description of Artificial Sequence: Synthetic oligonucleotide
uucaauguuucucuuccgc

SEQ ID NO: 871809 - RNA, 19 nt, Artificial Sequence
  Description of Artificial Sequence: Synthetic oligonucleotide
aaggauguaauaacaacug

SEQ ID NO: 871810 - RNA, 19 nt, Artificial Sequence
  Description of Artificial Sequence: Synthetic oligonucleotide
aacaacugcugauaaacaa

SEQ ID NO: 871811 - RNA, 19 nt, Artificial Sequence
  Description of Artificial Sequence: Synthetic oligonucleotide
acaucgaaaauuugcuuuc

SEQ ID NO: 871812 - RNA, 19 nt, Artificial Sequence
  Description of Artificial Sequence: Synthetic oligonucleotide
agaaggcuauuguaagugc

SEQ ID NO: 871813 - RNA, 19 nt, Artificial Sequence
  Description of Artificial Sequence: Synthetic oligonucleotide
aagaaggcuauuguaagug

SEQ ID NO: 871814 - RNA, 19 nt, Artificial Sequence
  Description of Artificial Sequence: Synthetic oligonucleotide
accaaggucguucagauaa

SEQ ID NO: 871815 - RNA, 19 nt, Artificial Sequence
  Description of Artificial Sequence: Synthetic oligonucleotide
uguuggaagugacaaaggu

SEQ ID NO: 871816 - RNA, 19 nt, Artificial Sequence
  Description of Artificial Sequence: Synthetic oligonucleotide
cucagugugcuuuucacgc

SEQ ID NO: 871817 - RNA, 19 nt, Artificial Sequence
  Description of Artificial Sequence: Synthetic oligonucleotide
uugucuaagauagggauca

SEQ ID NO: 871818 - RNA, 19 nt, Artificial Sequence
  Description of Artificial Sequence: Synthetic oligonucleotide
uggguagugagguaacggg

SEQ ID NO: 871819 - RNA, 19 nt, Artificial Sequence
  Description of Artificial Sequence: Synthetic oligonucleotide
ugagguaacgggcacagaa

SEQ ID NO: 871820 - RNA, 19 nt, Artificial Sequence
  Description of Artificial Sequence: Synthetic oligonucleotide
uugcuuuccauguuuucgg

SEQ ID NO: 871821 - RNA, 19 nt, Artificial Sequence
  Description of Artificial Sequence: Synthetic oligonucleotide
uuguucagccacuuuagcc

SEQ ID NO: 871822 - RNA, 19 nt, Artificial Sequence
  Description of Artificial Sequence: Synthetic oligonucleotide
guuguaaggcauuggacag

SEQ ID NO: 871823 - RNA, 19 nt, Artificial Sequence
  Description of Artificial Sequence: Synthetic oligonucleotide
ucaaaucugggaauuugca

SEQ ID NO: 871824 - RNA, 19 nt, Artificial Sequence
  Description of Artificial Sequence: Synthetic oligonucleotide
uucaagcagucuuaaagug

SEQ ID NO: 871825 - RNA, 19 nt, Artificial Sequence
  Description of Artificial Sequence: Synthetic oligonucleotide
acugcaacguugcuaguac

SEQ ID NO: 871826 - RNA, 19 nt, Artificial Sequence
  Description of Artificial Sequence: Synthetic oligonucleotide
aucaauauucuauugucaa

SEQ ID NO: 871827 - RNA, 19 nt, Artificial Sequence
  Description of Artificial Sequence: Synthetic oligonucleotide
aguucacauuuucucgucc

SEQ ID NO: 871828 - RNA, 19 nt, Artificial Sequence
  Description of Artificial Sequence: Synthetic oligonucleotide
uuuaucuacuccugguuga

SEQ ID NO: 871829 - RNA, 19 nt, Artificial Sequence
  Description of Artificial Sequence: Synthetic oligonucleotide
aacguugcuaguacugccc

SEQ ID NO: 871830 - RNA, 19 nt, Artificial Sequence
  Description of Artificial Sequence: Synthetic oligonucleotide
aaauagugccacaaggaug

SEQ ID NO: 871831 - RNA, 19 nt, Artificial Sequence
  Description of Artificial Sequence: Synthetic oligonucleotide
uuagaauuuuaccuugaau

SEQ ID NO: 871832 - RNA, 19 nt, Artificial Sequence
  Description of Artificial Sequence: Synthetic oligonucleotide
aacgcagcaccuccacugc

SEQ ID NO: 871833 - RNA, 19 nt, Artificial Sequence
  Description of Artificial Sequence: Synthetic oligonucleotide
ucgauaucaggcaaggaau

SEQ ID NO: 871834 - RNA, 19 nt, Artificial Sequence
  Description of Artificial Sequence: Synthetic oligonucleotide
uccacaacuuggcaaaugu

SEQ ID NO: 871835 - RNA, 19 nt, Artificial Sequence
  Description of Artificial Sequence: Synthetic oligonucleotide
aacauugccuuugaggaga

SEQ ID NO: 871836 - RNA, 19 nt, Artificial Sequence
  Description of Artificial Sequence: Synthetic oligonucleotide
aauaacaacugcugauaaa

SEQ ID NO: 871837 - RNA, 19 nt, Artificial Sequence
  Description of Artificial Sequence: Synthetic oligonucleotide
ucuuucacuucuucgauau

SEQ ID NO: 871838 - RNA, 19 nt, Artificial Sequence
  Description of Artificial Sequence: Synthetic oligonucleotide
uccucuuugauggugaccu

SEQ ID NO: 871839 - RNA, 19 nt, Artificial Sequence
  Description of Artificial Sequence: Synthetic oligonucleotide
guuuaucuacuccugguug

SEQ ID NO: 871840 - RNA, 19 nt, Artificial Sequence
  Description of Artificial Sequence: Synthetic oligonucleotide
auucuuucuaccggcaugg

SEQ ID NO: 871841 - RNA, 19 nt, Artificial Sequence
  Description of Artificial Sequence: Synthetic oligonucleotide
auuguaagugcuucaagau

SEQ ID NO: 871842 - RNA, 19 nt, Artificial Sequence
  Description of Artificial Sequence: Synthetic oligonucleotide
ucaagcauagcagauuaga

SEQ ID NO: 871843 - RNA, 19 nt, Artificial Sequence
  Description of Artificial Sequence: Synthetic oligonucleotide
ucucauucuuucuaccggc

SEQ ID NO: 871844 - RNA, 19 nt, Artificial Sequence
  Description of Artificial Sequence: Synthetic oligonucleotide
uggaguuggacacagcaau

SEQ ID NO: 871845 - RNA, 19 nt, Artificial Sequence
  Description of Artificial Sequence: Synthetic oligonucleotide
uagagauaugcaucuacca

SEQ ID NO: 871846 - RNA, 19 nt, Artificial Sequence
  Description of Artificial Sequence: Synthetic oligonucleotide
ugcccuauguacauauuca

SEQ ID NO: 871847 - RNA, 19 nt, Artificial Sequence
  Description of Artificial Sequence: Synthetic oligonucleotide
gaauucauggcacaucgaa

SEQ ID NO: 871848 - RNA, 19 nt, Artificial Sequence
  Description of Artificial Sequence: Synthetic oligonucleotide
cucaucacuaggcacacug

SEQ ID NO: 871849 - RNA, 19 nt, Artificial Sequence
  Description of Artificial Sequence: Synthetic oligonucleotide
ugcaacguugcuaguacug

SEQ ID NO: 871850 - RNA, 19 nt, Artificial Sequence
  Description of Artificial Sequence: Synthetic oligonucleotide
guagagcucacucaugcug

SEQ ID NO: 871851 - RNA, 19 nt, Artificial Sequence
  Description of Artificial Sequence: Synthetic oligonucleotide
auaauuugauugcuacaug

SEQ ID NO: 871852 - RNA, 19 nt, Artificial Sequence
  Description of Artificial Sequence: Synthetic oligonucleotide
agagauaugcaucuaccaa

SEQ ID NO: 871853 - RNA, 19 nt, Artificial Sequence
  Description of Artificial Sequence: Synthetic oligonucleotide
aauauuuccaugacaguua

SEQ ID NO: 871854 - RNA, 19 nt, Artificial Sequence
  Description of Artificial Sequence: Synthetic oligonucleotide
aagggcaacauccgguaca

SEQ ID NO: 871855 - RNA, 19 nt, Artificial Sequence
  Description of Artificial Sequence: Synthetic oligonucleotide
guaacgggcacagaagggg

SEQ ID NO: 871856 - RNA, 19 nt, Artificial Sequence
  Description of Artificial Sequence: Synthetic oligonucleotide
auauucuauugucaaggcu

SEQ ID NO: 871857 - RNA, 19 nt, Artificial Sequence
  Description of Artificial Sequence: Synthetic oligonucleotide
uaucguauuugaauuuauc

SEQ ID NO: 871858 - RNA, 19 nt, Artificial Sequence
  Description of Artificial Sequence: Synthetic oligonucleotide
uuaaagugggacagcugug

SEQ ID NO: 871859 - RNA, 19 nt, Artificial Sequence
  Description of Artificial Sequence: Synthetic oligonucleotide
aguggcgcguccuucuccc

SEQ ID NO: 871860 - RNA, 19 nt, Artificial Sequence
  Description of Artificial Sequence: Synthetic oligonucleotide
uuagcagcucuugacacgc

SEQ ID NO: 871861 - RNA, 19 nt, Artificial Sequence
  Description of Artificial Sequence: Synthetic oligonucleotide
aguuauccuuuguaccgcg

SEQ ID NO: 871862 - RNA, 19 nt, Artificial Sequence
  Description of Artificial Sequence: Synthetic oligonucleotide
cuuagcagcucuugacacg

SEQ ID NO: 871863 - RNA, 19 nt, Artificial Sequence
  Description of Artificial Sequence: Synthetic oligonucleotide
acgcuaccaauacaauccc

SEQ ID NO: 871864 - RNA, 19 nt, Artificial Sequence
  Description of Artificial Sequence: Synthetic oligonucleotide
uuucugcguaggaagacac

SEQ ID NO: 871865 - RNA, 19 nt, Artificial Sequence
  Description of Artificial Sequence: Synthetic oligonucleotide
uuguaagugcuucaagaua

SEQ ID NO: 871866 - RNA, 19 nt, Artificial Sequence
  Description of Artificial Sequence: Synthetic oligonucleotide
aaggucguucagauaaggg

SEQ ID NO: 871867 - RNA, 19 nt, Artificial Sequence
  Description of Artificial Sequence: Synthetic oligonucleotide
acaacugcugauaaacaag

SEQ ID NO: 871868 - RNA, 19 nt, Artificial Sequence
  Description of Artificial Sequence: Synthetic oligonucleotide
ucgaaaauuugcuuuccau

SEQ ID NO: 871869 - RNA, 19 nt, Artificial Sequence
  Description of Artificial Sequence: Synthetic oligonucleotide
ucucuugaucuucaaugcu

SEQ ID NO: 871870 - RNA, 19 nt, Artificial Sequence
  Description of Artificial Sequence: Synthetic oligonucleotide
gaacauugccuuugaggag

SEQ ID NO: 871871 - RNA, 19 nt, Artificial Sequence
  Description of Artificial Sequence: Synthetic oligonucleotide
ucugggaauuugcauaaua

SEQ ID NO: 871872 - RNA, 19 nt, Artificial Sequence
  Description of Artificial Sequence: Synthetic oligonucleotide
uccaugacaguuauccuuu

SEQ ID NO: 871873 - RNA, 19 nt, Artificial Sequence
  Description of Artificial Sequence: Synthetic oligonucleotide
uguaaggcauuggacagcu

SEQ ID NO: 871874 - RNA, 19 nt, Artificial Sequence
  Description of Artificial Sequence: Synthetic oligonucleotide
cuugacacgcgccugggug

SEQ ID NO: 871875 - RNA, 19 nt, Artificial Sequence
  Description of Artificial Sequence: Synthetic oligonucleotide
ucacgcuaccaauacaauc

SEQ ID NO: 871876 - RNA, 19 nt, Artificial Sequence
  Description of Artificial Sequence: Synthetic oligonucleotide
agggagaggucuguaaacg

SEQ ID NO: 871877 - RNA, 19 nt, Artificial Sequence
  Description of Artificial Sequence: Synthetic oligonucleotide
agcuaagaaaucccaacaa

SEQ ID NO: 871878 - RNA, 19 nt, Artificial Sequence
  Description of Artificial Sequence: Synthetic oligonucleotide
ugggaauuugcauaauauu

SEQ ID NO: 871879 - RNA, 19 nt, Artificial Sequence
  Description of Artificial Sequence: Synthetic oligonucleotide
cagucuuaaagugggacag

SEQ ID NO: 871880 - RNA, 19 nt, Artificial Sequence
  Description of Artificial Sequence: Synthetic oligonucleotide
guucuuccagccaugggcg

SEQ ID NO: 871881 - RNA, 19 nt, Artificial Sequence
  Description of Artificial Sequence: Synthetic oligonucleotide
ucgauuugucuaagauagg

SEQ ID NO: 871882 - RNA, 19 nt, Artificial Sequence
  Description of Artificial Sequence: Synthetic oligonucleotide
aggaaucuuaaaauuauaa

SEQ ID NO: 871883 - RNA, 19 nt, Artificial Sequence
  Description of Artificial Sequence: Synthetic oligonucleotide
aagaucacaagaaggcuau

SEQ ID NO: 871884 - RNA, 19 nt, Artificial Sequence
  Description of Artificial Sequence: Synthetic oligonucleotide
cuccguguccccauguugc

SEQ ID NO: 871885 - RNA, 19 nt, Artificial Sequence
  Description of Artificial Sequence: Synthetic oligonucleotide
agguuuaucuacuccuggu

SEQ ID NO: 871886 - RNA, 19 nt, Artificial Sequence
  Description of Artificial Sequence: Synthetic oligonucleotide
ugcuaguacugcccuaugu

SEQ ID NO: 871887 - RNA, 19 nt, Artificial Sequence
  Description of Artificial Sequence: Synthetic oligonucleotide
auacaaucccgcaaggugu

SEQ ID NO: 871888 - RNA, 19 nt, Artificial Sequence
  Description of Artificial Sequence: Synthetic oligonucleotide
ucgguaguuucacuuucug

SEQ ID NO: 871889 - RNA, 19 nt, Artificial Sequence
  Description of Artificial Sequence: Synthetic oligonucleotide
gagagagucaaaggcuuag

SEQ ID NO: 871890 - RNA, 19 nt, Artificial Sequence
  Description of Artificial Sequence: Synthetic oligonucleotide
aagaguggcgcguccuucu

SEQ ID NO: 871891 - RNA, 19 nt, Artificial Sequence
  Description of Artificial Sequence: Synthetic oligonucleotide
auccuuuguaccgcguggc

SEQ ID NO: 871892 - RNA, 19 nt, Artificial Sequence
  Description of Artificial Sequence: Synthetic oligonucleotide
cuucaaaucugggaauuug

SEQ ID NO: 871893 - RNA, 19 nt, Artificial Sequence
  Description of Artificial Sequence: Synthetic oligonucleotide
uaccgcguggcguucaagc

SEQ ID NO: 871894 - RNA, 19 nt, Artificial Sequence
  Description of Artificial Sequence: Synthetic oligonucleotide
ugaccguaggcaacgcagc

SEQ ID NO: 871895 - RNA, 19 nt, Artificial Sequence
  Description of Artificial Sequence: Synthetic oligonucleotide
ucaccaaggucguucagau

SEQ ID NO: 871896 - RNA, 19 nt, Artificial Sequence
  Description of Artificial Sequence: Synthetic oligonucleotide
uucaccaaggucguucaga

SEQ ID NO: 871897 - RNA, 19 nt, Artificial Sequence
  Description of Artificial Sequence: Synthetic oligonucleotide
auaacaacacaaagcuaag

SEQ ID NO: 871898 - RNA, 19 nt, Artificial Sequence
  Description of Artificial Sequence: Synthetic oligonucleotide
caacguugcuaguacugcc

SEQ ID NO: 871899 - RNA, 19 nt, Artificial Sequence
  Description of Artificial Sequence: Synthetic oligonucleotide
uccuacaacuaugauguuc

SEQ ID NO: 871900 - RNA, 19 nt, Artificial Sequence
  Description of Artificial Sequence: Synthetic oligonucleotide
ugucgguaguuucacuuuc

SEQ ID NO: 871901 - RNA, 19 nt, Artificial Sequence
  Description of Artificial Sequence: Synthetic oligonucleotide
uccgagugugcugugaaga

SEQ ID NO: 871902 - RNA, 19 nt, Artificial Sequence
  Description of Artificial Sequence: Synthetic oligonucleotide
agugagguaacgggcacag

SEQ ID NO: 871903 - RNA, 19 nt, Artificial Sequence
  Description of Artificial Sequence: Synthetic oligonucleotide
acuuucugcguaggaagac

SEQ ID NO: 871904 - RNA, 19 nt, Artificial Sequence
  Description of Artificial Sequence: Synthetic oligonucleotide
uuuagcccugguaucguau

SEQ ID NO: 871905 - RNA, 19 nt, Artificial Sequence
  Description of Artificial Sequence: Synthetic oligonucleotide
uuucuaccggcaugguacc

SEQ ID NO: 871906 - RNA, 19 nt, Artificial Sequence
  Description of Artificial Sequence: Synthetic oligonucleotide
augguacccucucagugug

SEQ ID NO: 871907 - RNA, 19 nt, Artificial Sequence
  Description of Artificial Sequence: Synthetic oligonucleotide
uggcggauuagugacaauc

SEQ ID NO: 871908 - RNA, 19 nt, Artificial Sequence
  Description of Artificial Sequence: Synthetic oligonucleotide
aaaucccaacaaccaccag

SEQ ID NO: 871909 - RNA, 19 nt, Artificial Sequence
  Description of Artificial Sequence: Synthetic oligonucleotide
cuaagauagggaucagaga

SEQ ID NO: 871910 - RNA, 19 nt, Artificial Sequence
  Description of Artificial Sequence: Synthetic oligonucleotide
gauaucaggcaaggaauuc

SEQ ID NO: 871911 - RNA, 19 nt, Artificial Sequence
  Description of Artificial Sequence: Synthetic oligonucleotide
ucaucacuaggcacacugu

SEQ ID NO: 871912 - RNA, 19 nt, Artificial Sequence
  Description of Artificial Sequence: Synthetic oligonucleotide
gagguaacgggcacagaag

SEQ ID NO: 871913 - RNA, 19 nt, Artificial Sequence
  Description of Artificial Sequence: Synthetic oligonucleotide
uucggaucagguuuaucua

SEQ ID NO: 871914 - RNA, 19 nt, Artificial Sequence
  Description of Artificial Sequence: Synthetic oligonucleotide
aggcuauuguaagugcuuc

SEQ ID NO: 871915 - RNA, 19 nt, Artificial Sequence
  Description of Artificial Sequence: Synthetic oligonucleotide
caucacuaggcacacuguc

SEQ ID NO: 871916 - RNA, 19 nt, Artificial Sequence
  Description of Artificial Sequence: Synthetic oligonucleotide
ucuuucuaccggcauggua

SEQ ID NO: 871917 - RNA, 19 nt, Artificial Sequence
  Description of Artificial Sequence: Synthetic oligonucleotide
agauagggaucagagagaa

SEQ ID NO: 871918 - RNA, 19 nt, Artificial Sequence
  Description of Artificial Sequence: Synthetic oligonucleotide
ccuacaacuaugauguuca

SEQ ID NO: 871919 - RNA, 19 nt, Artificial Sequence
  Description of Artificial Sequence: Synthetic oligonucleotide
guaauaacaacugcugaua

SEQ ID NO: 871920 - RNA, 19 nt, Artificial Sequence
  Description of Artificial Sequence: Synthetic oligonucleotide
caagaucacaagaaggcua

SEQ ID NO: 871921 - RNA, 19 nt, Artificial Sequence
  Description of Artificial Sequence: Synthetic oligonucleotide
cugguuuguuggaagugac

SEQ ID NO: 871922 - RNA, 19 nt, Artificial Sequence
  Description of Artificial Sequence: Synthetic oligonucleotide
cuucuccccuuguucagcc

SEQ ID NO: 871923 - RNA, 19 nt, Artificial Sequence
  Description of Artificial Sequence: Synthetic oligonucleotide
uugcuaagguacugcuugc

SEQ ID NO: 871924 - RNA, 19 nt, Artificial Sequence
  Description of Artificial Sequence: Synthetic oligonucleotide
gcuaccaauacaaucccgc

SEQ ID NO: 871925 - RNA, 19 nt, Artificial Sequence
  Description of Artificial Sequence: Synthetic oligonucleotide
caaggucguucagauaagg

SEQ ID NO: 871926 - RNA, 19 nt, Artificial Sequence
  Description of Artificial Sequence: Synthetic oligonucleotide
gguucuagagauaugcauc

SEQ ID NO: 871927 - RNA, 19 nt, Artificial Sequence
  Description of Artificial Sequence: Synthetic oligonucleotide
uugacacgcgccuggguga

SEQ ID NO: 871928 - RNA, 19 nt, Artificial Sequence
  Description of Artificial Sequence: Synthetic oligonucleotide
cuucgauuugucuaagaua

SEQ ID NO: 871929 - RNA, 19 nt, Artificial Sequence
  Description of Artificial Sequence: Synthetic oligonucleotide
ugcucugguuagaauuaga

SEQ ID NO: 871930 - RNA, 19 nt, Artificial Sequence
  Description of Artificial Sequence: Synthetic oligonucleotide
gccacaaggauguaauaac

SEQ ID NO: 871931 - RNA, 19 nt, Artificial Sequence
  Description of Artificial Sequence: Synthetic oligonucleotide
caucgaaaauuugcuuucc

SEQ ID NO: 871932 - RNA, 19 nt, Artificial Sequence
  Description of Artificial Sequence: Synthetic oligonucleotide
uaguucacauuuucucguc

SEQ ID NO: 871933 - RNA, 19 nt, Artificial Sequence
  Description of Artificial Sequence: Synthetic oligonucleotide
gcucugguuagaauuagag

SEQ ID NO: 871934 - RNA, 19 nt, Artificial Sequence
  Description of Artificial Sequence: Synthetic oligonucleotide
ucagugugcuuuucacgcu

SEQ ID NO: 871935 - RNA, 19 nt, Artificial Sequence
  Description of Artificial Sequence: Synthetic oligonucleotide
accggcaugguacccucuc

SEQ ID NO: 871936 - RNA, 19 nt, Artificial Sequence
  Description of Artificial Sequence: Synthetic oligonucleotide
acacugucgguaguuucac

SEQ ID NO: 871937 - RNA, 19 nt, Artificial Sequence
  Description of Artificial Sequence: Synthetic oligonucleotide
ugguaucguauuugaauuu

SEQ ID NO: 871938 - RNA, 19 nt, Artificial Sequence
  Description of Artificial Sequence: Synthetic oligonucleotide
caaagcuaagaaaucccaa

SEQ ID NO: 871939 - RNA, 19 nt, Artificial Sequence
  Description of Artificial Sequence: Synthetic oligonucleotide
auguggaacauugccuuug

SEQ ID NO: 871940 - RNA, 19 nt, Artificial Sequence
  Description of Artificial Sequence: Synthetic oligonucleotide
uucugcguaggaagacaca

SEQ ID NO: 871941 - RNA, 19 nt, Artificial Sequence
  Description of Artificial Sequence: Synthetic oligonucleotide
cgauuugucuaagauaggg

SEQ ID NO: 871942 - RNA, 19 nt, Artificial Sequence
  Description of Artificial Sequence: Synthetic oligonucleotide
uagugacaaucucuugauc

SEQ ID NO: 871943 - RNA, 19 nt, Artificial Sequence
  Description of Artificial Sequence: Synthetic oligonucleotide
ugcuaagguacugcuugcc

SEQ ID NO: 871944 - RNA, 19 nt, Artificial Sequence
  Description of Artificial Sequence: Synthetic oligonucleotide
uucacgcuaccaauacaau

SEQ ID NO: 871945 - RNA, 19 nt, Artificial Sequence
  Description of Artificial Sequence: Synthetic oligonucleotide
cucacucaugcugacuggc

SEQ ID NO: 871946 - RNA, 19 nt, Artificial Sequence
  Description of Artificial Sequence: Synthetic oligonucleotide
ucuggcggauuagugacaa

SEQ ID NO: 871947 - RNA, 19 nt, Artificial Sequence
  Description of Artificial Sequence: Synthetic oligonucleotide
ucuaccggcaugguacccu

SEQ ID NO: 871948 - RNA, 19 nt, Artificial Sequence
  Description of Artificial Sequence: Synthetic oligonucleotide
cuaccaauacaaucccgca

SEQ ID NO: 871949 - RNA, 19 nt, Artificial Sequence
  Description of Artificial Sequence: Synthetic oligonucleotide
cacacugucgguaguuuca

SEQ ID NO: 871950 - RNA, 19 nt, Artificial Sequence
  Description of Artificial Sequence: Synthetic oligonucleotide
gcauaauauuuccaugaca

SEQ ID NO: 871951 - RNA, 19 nt, Artificial Sequence
  Description of Artificial Sequence: Synthetic oligonucleotide
ggucguucagauaagggca

SEQ ID NO: 871952 - RNA, 19 nt, Artificial Sequence
  Description of Artificial Sequence: Synthetic oligonucleotide
gaaaucuguagaggguaga

SEQ ID NO: 871953 - RNA, 19 nt, Artificial Sequence
  Description of Artificial Sequence: Synthetic oligonucleotide
gcaugguacccucucagug

SEQ ID NO: 871954 - RNA, 19 nt, Artificial Sequence
  Description of Artificial Sequence: Synthetic oligonucleotide
guagugagguaacgggcac

SEQ ID NO: 871955 - RNA, 19 nt, Artificial Sequence
  Description of Artificial Sequence: Synthetic oligonucleotide
caguuauccuuuguaccgc

SEQ ID NO: 871956 - RNA, 19 nt, Artificial Sequence
  Description of Artificial Sequence: Synthetic oligonucleotide
cuugagggaguagcucugg

SEQ ID NO: 871957 - RNA, 19 nt, Artificial Sequence
  Description of Artificial Sequence: Synthetic oligonucleotide
agugugcuuuucacgcuac

SEQ ID NO: 871958 - RNA, 19 nt, Artificial Sequence
  Description of Artificial Sequence: Synthetic oligonucleotide
ucaaugcugcuguccagau

SEQ ID NO: 871959 - RNA, 19 nt, Artificial Sequence
  Description of Artificial Sequence: Synthetic oligonucleotide
ucgccccaguuccugaaga

SEQ ID NO: 871960 - RNA, 19 nt, Artificial Sequence
  Description of Artificial Sequence: Synthetic oligonucleotide
acguugcuaguacugcccu

SEQ ID NO: 871961 - RNA, 19 nt, Artificial Sequence
  Description of Artificial Sequence: Synthetic oligonucleotide
agaugucuucuugaugaca

SEQ ID NO: 871962 - RNA, 19 nt, Artificial Sequence
  Description of Artificial Sequence: Synthetic oligonucleotide
ggaagugacaaagguggcc

SEQ ID NO: 871963 - RNA, 19 nt, Artificial Sequence
  Description of Artificial Sequence: Synthetic oligonucleotide
guguggaucgccccaguuc

SEQ ID NO: 871964 - RNA, 19 nt, Artificial Sequence
  Description of Artificial Sequence: Synthetic oligonucleotide
gcuuagcagcucuugacac

SEQ ID NO: 871965 - RNA, 19 nt, Artificial Sequence
  Description of Artificial Sequence: Synthetic oligonucleotide
agaguggcgcguccuucuc

SEQ ID NO: 871966 - RNA, 19 nt, Artificial Sequence
  Description of Artificial Sequence: Synthetic oligonucleotide
uuaucuacuccugguugau

SEQ ID NO: 871967 - RNA, 19 nt, Artificial Sequence
  Description of Artificial Sequence: Synthetic oligonucleotide
uuagcccugguaucguauu

SEQ ID NO: 871968 - RNA, 19 nt, Artificial Sequence
  Description of Artificial Sequence: Synthetic oligonucleotide
uauuuccaugacaguuauc

SEQ ID NO: 871969 - RNA, 19 nt, Artificial Sequence
  Description of Artificial Sequence: Synthetic oligonucleotide
gguaacgggcacagaaggg

SEQ ID NO: 871970 - RNA, 19 nt, Artificial Sequence
  Description of Artificial Sequence: Synthetic oligonucleotide
gaaggcuauuguaagugcu

SEQ ID NO: 871971 - RNA, 19 nt, Artificial Sequence
  Description of Artificial Sequence: Synthetic oligonucleotide
cugggaauuugcauaauau

SEQ ID NO: 871972 - RNA, 19 nt, Artificial Sequence
  Description of Artificial Sequence: Synthetic oligonucleotide
uugcuaguacugcccuaug

SEQ ID NO: 871973 - RNA, 19 nt, Artificial Sequence
  Description of Artificial Sequence: Synthetic oligonucleotide
cucccggucaggccgacug

SEQ ID NO: 871974 - RNA, 19 nt, Artificial Sequence
  Description of Artificial Sequence: Synthetic oligonucleotide
caaaugucuggcggauuag

SEQ ID NO: 871975 - RNA, 19 nt, Artificial Sequence
  Description of Artificial Sequence: Synthetic oligonucleotide
ugaagaguggcgcguccuu

SEQ ID NO: 871976 - RNA, 19 nt, Artificial Sequence
  Description of Artificial Sequence: Synthetic oligonucleotide
cacuuccacaacuuggcaa

SEQ ID NO: 871977 - RNA, 19 nt, Artificial Sequence
  Description of Artificial Sequence: Synthetic oligonucleotide
ucuugacacgcgccugggu

SEQ ID NO: 871978 - RNA, 19 nt, Artificial Sequence
  Description of Artificial Sequence: Synthetic oligonucleotide
gagcuguuguaaggcauug

SEQ ID NO: 871979 - RNA, 19 nt, Artificial Sequence
  Description of Artificial Sequence: Synthetic oligonucleotide
cugguaucguauuugaauu

SEQ ID NO: 871980 - RNA, 19 nt, Artificial Sequence
  Description of Artificial Sequence: Synthetic oligonucleotide
guaguuucacuuucugcgu

SEQ ID NO: 871981 - RNA, 19 nt, Artificial Sequence
  Description of Artificial Sequence: Synthetic oligonucleotide
ugggacuguccuacaacua

SEQ ID NO: 871982 - RNA, 19 nt, Artificial Sequence
  Description of Artificial Sequence: Synthetic oligonucleotide
uguguggaucgccccaguu

SEQ ID NO: 871983 - RNA, 19 nt, Artificial Sequence
  Description of Artificial Sequence: Synthetic oligonucleotide
cucauucuuucuaccggca

SEQ ID NO: 871984 - RNA, 19 nt, Artificial Sequence
  Description of Artificial Sequence: Synthetic oligonucleotide
ugaaggcauuguuuccuuu

SEQ ID NO: 871985 - RNA, 19 nt, Artificial Sequence
  Description of Artificial Sequence: Synthetic oligonucleotide
ggcguucaagcauagcaga

SEQ ID NO: 871986 - RNA, 19 nt, Artificial Sequence
  Description of Artificial Sequence: Synthetic oligonucleotide
ggcuuagcagcucuugaca

SEQ ID NO: 871987 - RNA, 19 nt, Artificial Sequence
  Description of Artificial Sequence: Synthetic oligonucleotide
cuuucugcguaggaagaca

SEQ ID NO: 871988 - RNA, 19 nt, Artificial Sequence
  Description of Artificial Sequence: Synthetic oligonucleotide
accgcguggcguucaagca

SEQ ID NO: 871989 - RNA, 19 nt, Artificial Sequence
  Description of Artificial Sequence: Synthetic oligonucleotide
agcccugguaucguauuug

SEQ ID NO: 871990 - RNA, 19 nt, Artificial Sequence
  Description of Artificial Sequence: Synthetic oligonucleotide
ccaauacaaucccgcaagg

SEQ ID NO: 871991 - RNA, 19 nt, Artificial Sequence
  Description of Artificial Sequence: Synthetic oligonucleotide
aucgccccaguuccugaag

SEQ ID NO: 871992 - RNA, 19 nt, Artificial Sequence
  Description of Artificial Sequence: Synthetic oligonucleotide
ggccaugcugggcagcagg

SEQ ID NO: 871993 - RNA, 19 nt, Artificial Sequence
  Description of Artificial Sequence: Synthetic oligonucleotide
gguagugagguaacgggca

SEQ ID NO: 871994 - RNA, 19 nt, Artificial Sequence
  Description of Artificial Sequence: Synthetic oligonucleotide
aggccgacugcugcugggc

SEQ ID NO: 871995 - RNA, 19 nt, Artificial Sequence
  Description of Artificial Sequence: Synthetic oligonucleotide
cguauuugaauuuaucugu

SEQ ID NO: 871996 - RNA, 19 nt, Artificial Sequence
  Description of Artificial Sequence: Synthetic oligonucleotide
cuguggagaaauuaauuuu

SEQ ID NO: 871997 - RNA, 19 nt, Artificial Sequence
  Description of Artificial Sequence: Synthetic oligonucleotide
agcuguggagaaauuaauu

SEQ ID NO: 871998 - RNA, 19 nt, Artificial Sequence
  Description of Artificial Sequence: Synthetic oligonucleotide
gggaauuugcauaauauuu

SEQ ID NO: 871999 - RNA, 19 nt, Artificial Sequence
  Description of Artificial Sequence: Synthetic oligonucleotide
gcccuauguacauauucac

SEQ ID NO: 872000 - RNA, 19 nt, Artificial Sequence
  Description of Artificial Sequence: Synthetic oligonucleotide
gucuaagauagggaucaga

SEQ ID NO: 872001 - RNA, 19 nt, Artificial Sequence
  Description of Artificial Sequence: Synthetic oligonucleotide
cuccgagugugcugugaag

SEQ ID NO: 872002 - RNA, 19 nt, Artificial Sequence
  Description of Artificial Sequence: Synthetic oligonucleotide
cacagcaaucaauauucua

SEQ ID NO: 872003 - RNA, 19 nt, Artificial Sequence
  Description of Artificial Sequence: Synthetic oligonucleotide
ccguaggcaacgcagcacc

SEQ ID NO: 872004 - RNA, 19 nt, Artificial Sequence
  Description of Artificial Sequence: Synthetic oligonucleotide
acuugagggaguagcucug

SEQ ID NO: 872005 - RNA, 19 nt, Artificial Sequence
  Description of Artificial Sequence: Synthetic oligonucleotide
gaagaguggcgcguccuuc

SEQ ID NO: 872006 - RNA, 19 nt, Artificial Sequence
  Description of Artificial Sequence: Synthetic oligonucleotide
gcuaguacugcccuaugua

SEQ ID NO: 872007 - RNA, 19 nt, Artificial Sequence
  Description of Artificial Sequence: Synthetic oligonucleotide
gcaacguugcuaguacugc

SEQ ID NO: 872008 - RNA, 19 nt, Artificial Sequence
  Description of Artificial Sequence: Synthetic oligonucleotide
caggauaauuugauugcua

SEQ ID NO: 872009 - RNA, 19 nt, Artificial Sequence
  Description of Artificial Sequence: Synthetic oligonucleotide
ggguagugagguaacgggc

SEQ ID NO: 872010 - RNA, 19 nt, Artificial Sequence
  Description of Artificial Sequence: Synthetic oligonucleotide
caagaaggcuauuguaagu

SEQ ID NO: 872011 - RNA, 19 nt, Artificial Sequence
  Description of Artificial Sequence: Synthetic oligonucleotide
caugaacuugagggaguag

SEQ ID NO: 872012 - RNA, 19 nt, Artificial Sequence
  Description of Artificial Sequence: Synthetic oligonucleotide
gacugcaacguugcuagua

SEQ ID NO: 872013 - RNA, 19 nt, Artificial Sequence
  Description of Artificial Sequence: Synthetic oligonucleotide
uuuucggaucagguuuauc

SEQ ID NO: 872014 - RNA, 19 nt, Artificial Sequence
  Description of Artificial Sequence: Synthetic oligonucleotide
uggcgcguccuucuccccu

SEQ ID NO: 872015 - RNA, 19 nt, Artificial Sequence
  Description of Artificial Sequence: Synthetic oligonucleotide
guaggugcuccgugucccc

SEQ ID NO: 872016 - RNA, 19 nt, Artificial Sequence
  Description of Artificial Sequence: Synthetic oligonucleotide
ccagaugggacuguccuac

SEQ ID NO: 872017 - RNA, 19 nt, Artificial Sequence
  Description of Artificial Sequence: Synthetic oligonucleotide
ugguacccucucagugugc

SEQ ID NO: 872018 - RNA, 19 nt, Artificial Sequence
  Description of Artificial Sequence: Synthetic oligonucleotide
cauguuuucggaucagguu

SEQ ID NO: 872019 - RNA, 19 nt, Artificial Sequence
  Description of Artificial Sequence: Synthetic oligonucleotide
agcagauuagaaagauuuu

SEQ ID NO: 872020 - RNA, 19 nt, Artificial Sequence
  Description of Artificial Sequence: Synthetic oligonucleotide
gcuacaugagcuucauaaa

SEQ ID NO: 872021 - RNA, 19 nt, Artificial Sequence
  Description of Artificial Sequence: Synthetic oligonucleotide
cuaccggcaugguacccuc

SEQ ID NO: 872022 - RNA, 19 nt, Artificial Sequence
  Description of Artificial Sequence: Synthetic oligonucleotide
gguaucguauuugaauuua

SEQ ID NO: 872023 - RNA, 19 nt, Artificial Sequence
  Description of Artificial Sequence: Synthetic oligonucleotide
ucccggucaggccgacugc

SEQ ID NO: 872024 - RNA, 19 nt, Artificial Sequence
  Description of Artificial Sequence: Synthetic oligonucleotide
uguaccgcguggcguucaa

SEQ ID NO: 872025 - RNA, 19 nt, Artificial Sequence
  Description of Artificial Sequence: Synthetic oligonucleotide
cuugaccguaggcaacgca

SEQ ID NO: 872026 - RNA, 19 nt, Artificial Sequence
  Description of Artificial Sequence: Synthetic oligonucleotide
gccuugaccguaggcaacg

SEQ ID NO: 872027 - RNA, 19 nt, Artificial Sequence
  Description of Artificial Sequence: Synthetic oligonucleotide
cagguaggugcuccguguc

SEQ ID NO: 872028 - RNA, 19 nt, Artificial Sequence
  Description of Artificial Sequence: Synthetic oligonucleotide
aggagcuguuguaaggcau

SEQ ID NO: 872029 - RNA, 19 nt, Artificial Sequence
  Description of Artificial Sequence: Synthetic oligonucleotide
ggcuauuguaagugcuuca

SEQ ID NO: 872030 - RNA, 19 nt, Artificial Sequence
  Description of Artificial Sequence: Synthetic oligonucleotide
ucguucagauaagggcaac

SEQ ID NO: 872031 - RNA, 19 nt, Artificial Sequence
  Description of Artificial Sequence: Synthetic oligonucleotide
uucuaccggcaugguaccc

SEQ ID NO: 872032 - RNA, 19 nt, Artificial Sequence
  Description of Artificial Sequence: Synthetic oligonucleotide
ugcccuuguggcuguuggu

SEQ ID NO: 872033 - RNA, 19 nt, Artificial Sequence
  Description of Artificial Sequence: Synthetic oligonucleotide
gcuauuguaagugcuucaa

SEQ ID NO: 872034 - RNA, 19 nt, Artificial Sequence
  Description of Artificial Sequence: Synthetic oligonucleotide
caggagcuguuguaaggca

SEQ ID NO: 872035 - RNA, 19 nt, Artificial Sequence
  Description of Artificial Sequence: Synthetic oligonucleotide
acacgcgccugggugaugu

SEQ ID NO: 872036 - RNA, 19 nt, Artificial Sequence
  Description of Artificial Sequence: Synthetic oligonucleotide
aacauccgguacacucuga

SEQ ID NO: 872037 - RNA, 19 nt, Artificial Sequence
  Description of Artificial Sequence: Synthetic oligonucleotide
agcucuugacacgcgccug

SEQ ID NO: 872038 - RNA, 19 nt, Artificial Sequence
  Description of Artificial Sequence: Synthetic oligonucleotide
cgguaguuucacuuucugc

SEQ ID NO: 872039 - RNA, 19 nt, Artificial Sequence
  Description of Artificial Sequence: Synthetic oligonucleotide
gaucgccccaguuccugaa

SEQ ID NO: 872040 - RNA, 19 nt, Artificial Sequence
  Description of Artificial Sequence: Synthetic oligonucleotide
uggcccuagucucccgguc

SEQ ID NO: 872041 - RNA, 19 nt, Artificial Sequence
  Description of Artificial Sequence: Synthetic oligonucleotide
guugcuaguacugcccuau

SEQ ID NO: 872042 - RNA, 19 nt, Artificial Sequence
  Description of Artificial Sequence: Synthetic oligonucleotide
aacaaccaccagagagagu

SEQ ID NO: 872043 - RNA, 19 nt, Artificial Sequence
  Description of Artificial Sequence: Synthetic oligonucleotide
gcuccguguccccauguug

SEQ ID NO: 872044 - RNA, 19 nt, Artificial Sequence
  Description of Artificial Sequence: Synthetic oligonucleotide
guggcuguugguccaugaa

SEQ ID NO: 872045 - RNA, 19 nt, Artificial Sequence
  Description of Artificial Sequence: Synthetic oligonucleotide
uuuguaccgcguggcguuc

SEQ ID NO: 872046 - RNA, 19 nt, Artificial Sequence
  Description of Artificial Sequence: Synthetic oligonucleotide
gcagaucugguuuguugga

SEQ ID NO: 872047 - RNA, 19 nt, Artificial Sequence
  Description of Artificial Sequence: Synthetic oligonucleotide
uucuuucuaccggcauggu

SEQ ID NO: 872048 - RNA, 19 nt, Artificial Sequence
  Description of Artificial Sequence: Synthetic oligonucleotide
cuuuguaccgcguggcguu

SEQ ID NO: 872049 - RNA, 19 nt, Artificial Sequence
  Description of Artificial Sequence: Synthetic oligonucleotide
ccaaggucguucagauaag

SEQ ID NO: 872050 - RNA, 19 nt, Artificial Sequence
  Description of Artificial Sequence: Synthetic oligonucleotide
ccacaacuuggcaaauguc

SEQ ID NO: 872051 - RNA, 19 nt, Artificial Sequence
  Description of Artificial Sequence: Synthetic oligonucleotide
agccaugggcgcauucuca

SEQ ID NO: 872052 - RNA, 19 nt, Artificial Sequence
  Description of Artificial Sequence: Synthetic oligonucleotide
caauacaaucccgcaaggu

SEQ ID NO: 872053 - RNA, 19 nt, Artificial Sequence
  Description of Artificial Sequence: Synthetic oligonucleotide
aggguagagcucacucaug

SEQ ID NO: 872054 - RNA, 19 nt, Artificial Sequence
  Description of Artificial Sequence: Synthetic oligonucleotide
ggaguuggacacagcaauc

SEQ ID NO: 872055 - RNA, 19 nt, Artificial Sequence
  Description of Artificial Sequence: Synthetic oligonucleotide
guguccccauguugcuaag

SEQ ID NO: 872056 - RNA, 19 nt, Artificial Sequence
  Description of Artificial Sequence: Synthetic oligonucleotide
cuuuagcccugguaucgua

SEQ ID NO: 872057 - RNA, 19 nt, Artificial Sequence
  Description of Artificial Sequence: Synthetic oligonucleotide
gcagcucuugacacgcgcc

SEQ ID NO: 872058 - RNA, 19 nt, Artificial Sequence
  Description of Artificial Sequence: Synthetic oligonucleotide
gucaggccgacugcugcug

SEQ ID NO: 872059 - RNA, 19 nt, Artificial Sequence
  Description of Artificial Sequence: Synthetic oligonucleotide
uaccggcaugguacccucu

SEQ ID NO: 872060 - RNA, 19 nt, Artificial Sequence
  Description of Artificial Sequence: Synthetic oligonucleotide
caguguggucuccccucag

SEQ ID NO: 872061 - RNA, 19 nt, Artificial Sequence
  Description of Artificial Sequence: Synthetic oligonucleotide
agacugcaacguugcuagu

SEQ ID NO: 872062 - RNA, 19 nt, Artificial Sequence
  Description of Artificial Sequence: Synthetic oligonucleotide
ggagaaaucuguagagggu

SEQ ID NO: 872063 - RNA, 19 nt, Artificial Sequence
  Description of Artificial Sequence: Synthetic oligonucleotide
guaucguauuugaauuuau

SEQ ID NO: 872064 - RNA, 19 nt, Artificial Sequence
  Description of Artificial Sequence: Synthetic oligonucleotide
caaccaccagagagaguca

SEQ ID NO: 872065 - RNA, 19 nt, Artificial Sequence
  Description of Artificial Sequence: Synthetic oligonucleotide
gcguaggaagacacaggag

SEQ ID NO: 872066 - RNA, 19 nt, Artificial Sequence
  Description of Artificial Sequence: Synthetic oligonucleotide
aggugcuccguguccccau

SEQ ID NO: 872067 - RNA, 19 nt, Artificial Sequence
  Description of Artificial Sequence: Synthetic oligonucleotide
ggcguggguagugagguaa

SEQ ID NO: 872068 - RNA, 19 nt, Artificial Sequence
  Description of Artificial Sequence: Synthetic oligonucleotide
ugacacgcgccugggugau

SEQ ID NO: 872069 - RNA, 19 nt, Artificial Sequence
  Description of Artificial Sequence: Synthetic oligonucleotide
acgcgccugggugauguca

SEQ ID NO: 872070 - RNA, 19 nt, Artificial Sequence
  Description of Artificial Sequence: Synthetic oligonucleotide
ccuucgauuugucuaagau

SEQ ID NO: 872071 - RNA, 19 nt, Artificial Sequence
  Description of Artificial Sequence: Synthetic oligonucleotide
ggcggauuagugacaaucu

SEQ ID NO: 872072 - RNA, 19 nt, Artificial Sequence
  Description of Artificial Sequence: Synthetic oligonucleotide
ccauguugcuaagguacug

SEQ ID NO: 872073 - RNA, 19 nt, Artificial Sequence
  Description of Artificial Sequence: Synthetic oligonucleotide
gcagacugcaacguugcua

SEQ ID NO: 872074 - RNA, 19 nt, Artificial Sequence
  Description of Artificial Sequence: Synthetic oligonucleotide
cagaugggacuguccuaca

SEQ ID NO: 872075 - RNA, 19 nt, Artificial Sequence
  Description of Artificial Sequence: Synthetic oligonucleotide
gugccacaaggauguaaua

SEQ ID NO: 872076 - RNA, 19 nt, Artificial Sequence
  Description of Artificial Sequence: Synthetic oligonucleotide
ccaugacaguuauccuuug

SEQ ID NO: 872077 - RNA, 19 nt, Artificial Sequence
  Description of Artificial Sequence: Synthetic oligonucleotide
aucugggaauuugcauaau

SEQ ID NO: 872078 - RNA, 19 nt, Artificial Sequence
  Description of Artificial Sequence: Synthetic oligonucleotide
cggauuagugacaaucucu

SEQ ID NO: 872079 - RNA, 19 nt, Artificial Sequence
  Description of Artificial Sequence: Synthetic oligonucleotide
guaccgcguggcguucaag

SEQ ID NO: 872080 - RNA, 19 nt, Artificial Sequence
  Description of Artificial Sequence: Synthetic oligonucleotide
gucgguaguuucacuuucu

SEQ ID NO: 872081 - RNA, 19 nt, Artificial Sequence
  Description of Artificial Sequence: Synthetic oligonucleotide
agaucacaagaaggcuauu

SEQ ID NO: 872082 - RNA, 19 nt, Artificial Sequence
  Description of Artificial Sequence: Synthetic oligonucleotide
cugucgguaguuucacuuu

SEQ ID NO: 872083 - RNA, 19 nt, Artificial Sequence
  Description of Artificial Sequence: Synthetic oligonucleotide
cugcaacguugcuaguacu

SEQ ID NO: 872084 - RNA, 19 nt, Artificial Sequence
  Description of Artificial Sequence: Synthetic oligonucleotide
ggcuggaguccugaguuaa

SEQ ID NO: 872085 - RNA, 19 nt, Artificial Sequence
  Description of Artificial Sequence: Synthetic oligonucleotide
ccuguguggaucgccccag

SEQ ID NO: 872086 - RNA, 19 nt, Artificial Sequence
  Description of Artificial Sequence: Synthetic oligonucleotide
guggcgcguccuucucccc

SEQ ID NO: 872087 - RNA, 19 nt, Artificial Sequence
  Description of Artificial Sequence: Synthetic oligonucleotide
gcuccgagugugcugugaa

SEQ ID NO: 872088 - RNA, 19 nt, Artificial Sequence
  Description of Artificial Sequence: Synthetic oligonucleotide
ggaucgccccaguuccuga

SEQ ID NO: 872089 - RNA, 19 nt, Artificial Sequence
  Description of Artificial Sequence: Synthetic oligonucleotide
cguggguagugagguaacg

SEQ ID NO: 872090 - RNA, 19 nt, Artificial Sequence
  Description of Artificial Sequence: Synthetic oligonucleotide
guagaggguagagcucacu

SEQ ID NO: 872091 - RNA, 19 nt, Artificial Sequence
  Description of Artificial Sequence: Synthetic oligonucleotide
ggcaugguacccucucagu

SEQ ID NO: 872092 - RNA, 19 nt, Artificial Sequence
  Description of Artificial Sequence: Synthetic oligonucleotide
cgcgccugggugaugucag

SEQ ID NO: 872093 - RNA, 19 nt, Artificial Sequence
  Description of Artificial Sequence: Synthetic oligonucleotide
cugaagaguggcgcguccu

SEQ ID NO: 872094 - RNA, 19 nt, Artificial Sequence
  Description of Artificial Sequence: Synthetic oligonucleotide
ggcauuggacagcucuccu

SEQ ID NO: 872095 - RNA, 19 nt, Artificial Sequence
  Description of Artificial Sequence: Synthetic oligonucleotide
guaaggcauuggacagcuc

SEQ ID NO: 872096 - RNA, 19 nt, Artificial Sequence
  Description of Artificial Sequence: Synthetic oligonucleotide
cguguccccauguugcuaa

SEQ ID NO: 872097 - RNA, 19 nt, Artificial Sequence
  Description of Artificial Sequence: Synthetic oligonucleotide
ccgagugugcugugaagaa

SEQ ID NO: 872098 - RNA, 19 nt, Artificial Sequence
  Description of Artificial Sequence: Synthetic oligonucleotide
ucucccggucaggccgacu

SEQ ID NO: 872099 - RNA, 19 nt, Artificial Sequence
  Description of Artificial Sequence: Synthetic oligonucleotide
cacuaggcacacugucggu

SEQ ID NO: 872100 - RNA, 19 nt, Artificial Sequence
  Description of Artificial Sequence: Synthetic oligonucleotide
gacacgcgccugggugaug

SEQ ID NO: 872101 - RNA, 19 nt, Artificial Sequence
  Description of Artificial Sequence: Synthetic oligonucleotide
gugagguaacgggcacaga

SEQ ID NO: 872102 - RNA, 19 nt, Artificial Sequence
  Description of Artificial Sequence: Synthetic oligonucleotide
ggucaggccgacugcugcu

SEQ ID NO: 872103 - RNA, 19 nt, Artificial Sequence
  Description of Artificial Sequence: Synthetic oligonucleotide
cacugucgguaguuucacu

SEQ ID NO: 872104 - RNA, 19 nt, Artificial Sequence
  Description of Artificial Sequence: Synthetic oligonucleotide
ccgacugcugcugggcgug

SEQ ID NO: 872105 - RNA, 19 nt, Artificial Sequence
  Description of Artificial Sequence: Synthetic oligonucleotide
auagugccacaaggaugua

SEQ ID NO: 872106 - RNA, 19 nt, Artificial Sequence
  Description of Artificial Sequence: Synthetic oligonucleotide
ccuugaccguaggcaacgc

SEQ ID NO: 872107 - RNA, 19 nt, Artificial Sequence
  Description of Artificial Sequence: Synthetic oligonucleotide
gcgcauucucauucuuucu

SEQ ID NO: 872108 - RNA, 19 nt, Artificial Sequence
  Description of Artificial Sequence: Synthetic oligonucleotide
cccuucgauuugucuaaga

SEQ ID NO: 872109 - RNA, 19 nt, Artificial Sequence
  Description of Artificial Sequence: Synthetic oligonucleotide
ggggcuccgagugugcugu

SEQ ID NO: 872110 - RNA, 19 nt, Artificial Sequence
  Description of Artificial Sequence: Synthetic oligonucleotide
cguucagauaagggcaaca

SEQ ID NO: 872111 - RNA, 19 nt, Artificial Sequence
  Description of Artificial Sequence: Synthetic oligonucleotide
gccaugggcgcauucucau

SEQ ID NO: 872112 - RNA, 19 nt, Artificial Sequence
  Description of Artificial Sequence: Synthetic oligonucleotide
cuggcccuagucucccggu

SEQ ID NO: 872113 - RNA, 19 nt, Artificial Sequence
  Description of Artificial Sequence: Synthetic oligonucleotide
gcguggguagugagguaac

SEQ ID NO: 872114 - RNA, 19 nt, Artificial Sequence
  Description of Artificial Sequence: Synthetic oligonucleotide
ccgccaguguggucucccc

SEQ ID NO: 872115 - RNA, 19 nt, Artificial Sequence
  Description of Artificial Sequence: Synthetic oligonucleotide
cacgcgccugggugauguc

SEQ ID NO: 872116 - RNA, 19 nt, Artificial Sequence
  Description of Artificial Sequence: Synthetic oligonucleotide
cccauguugcuaagguacu

SEQ ID NO: 872117 - RNA, 19 nt, Artificial Sequence
  Description of Artificial Sequence: Synthetic oligonucleotide
ccggucaggccgacugcug

SEQ ID NO: 872118 - RNA, 19 nt, Artificial Sequence
  Description of Artificial Sequence: Synthetic oligonucleotide
cccugguaucguauuugaa

SEQ ID NO: 872119 - RNA, 19 nt, Artificial Sequence
  Description of Artificial Sequence: Synthetic oligonucleotide
ggcuccgagugugcuguga

SEQ ID NO: 872120 - RNA, 19 nt, Artificial Sequence
  Description of Artificial Sequence: Synthetic oligonucleotide
gcguggcguucaagcauag

SEQ ID NO: 872121 - RNA, 19 nt, Artificial Sequence
  Description of Artificial Sequence: Synthetic oligonucleotide
ccgguacacucugaaggca

SEQ ID NO: 872122 - RNA, 19 nt, Artificial Sequence
  Description of Artificial Sequence: Synthetic oligonucleotide
gcguucaagcauagcagau

SEQ ID NO: 872123 - RNA, 19 nt, Artificial Sequence
  Description of Artificial Sequence: Synthetic oligonucleotide
cgauaucaggcaaggaauu

SEQ ID NO: 872124 - RNA, 19 nt, Artificial Sequence
  Description of Artificial Sequence: Synthetic oligonucleotide
ccuuuguaccgcguggcgu

SEQ ID NO: 872125 - RNA, 19 nt, Artificial Sequence
  Description of Artificial Sequence: Synthetic oligonucleotide
cuguguggaucgccccagu

SEQ ID NO: 872126 - RNA, 19 nt, Artificial Sequence
  Description of Artificial Sequence: Synthetic oligonucleotide
cguggcguucaagcauagc

SEQ ID NO: 872127 - RNA, 19 nt, Artificial Sequence
  Description of Artificial Sequence: Synthetic oligonucleotide
cuuguggcuguugguccau

SEQ ID NO: 872128 - RNA, 19 nt, Artificial Sequence
  Description of Artificial Sequence: Synthetic oligonucleotide
cgcguggcguucaagcaua

SEQ ID NO: 872129 - RNA, 19 nt, Artificial Sequence
  Description of Artificial Sequence: Synthetic oligonucleotide
guccuacaacuaugauguu

SEQ ID NO: 872130 - RNA, 19 nt, Artificial Sequence
  Description of Artificial Sequence: Synthetic oligonucleotide
gggcuccgagugugcugug

SEQ ID NO: 872131 - RNA, 19 nt, Artificial Sequence
  Description of Artificial Sequence: Synthetic oligonucleotide
gcgccugggugaugucaga

SEQ ID NO: 872132 - RNA, 19 nt, Artificial Sequence
  Description of Artificial Sequence: Synthetic oligonucleotide
cuggcggauuagugacaau

SEQ ID NO: 872133 - RNA, 19 nt, Artificial Sequence
  Description of Artificial Sequence: Synthetic oligonucleotide
cguugcuaguacugcccua

SEQ ID NO: 872134 - RNA, 19 nt, Artificial Sequence
  Description of Artificial Sequence: Synthetic oligonucleotide
ggcgcguccuucuccccuu

SEQ ID NO: 872135 - RNA, 19 nt, Artificial Sequence
  Description of Artificial Sequence: Synthetic oligonucleotide
ccgcguggcguucaagcau

SEQ ID NO: 872136 - RNA, 19 nt, Artificial Sequence
  Description of Artificial Sequence: Synthetic oligonucleotide
ggucuccccucagcacucu

SEQ ID NO: 872137 - RNA, 19 nt, Artificial Sequence
  Description of Artificial Sequence: Synthetic oligonucleotide
ccaugggcgcauucucauu

SEQ ID NO: 872138 - RNA, 19 nt, Artificial Sequence
  Description of Artificial Sequence: Synthetic oligonucleotide
cccggucaggccgacugcu

SEQ ID NO: 872139 - RNA, 19 nt, Artificial Sequence
  Description of Artificial Sequence: Synthetic oligonucleotide
ccccuuguucagccacuuu

SEQ ID NO: 872140 - RNA, 19 nt, Artificial Sequence
  Description of Artificial Sequence: Synthetic oligonucleotide
uggauaaugaaauucgccg

SEQ ID NO: 872141 - RNA, 19 nt, Artificial Sequence
  Description of Artificial Sequence: Synthetic oligonucleotide
aagcgguuguaauacaugc

SEQ ID NO: 872142 - RNA, 19 nt, Artificial Sequence
  Description of Artificial Sequence: Synthetic oligonucleotide
uuuguugcgccacugaggg

SEQ ID NO: 872143 - RNA, 19 nt, Artificial Sequence
  Description of Artificial Sequence: Synthetic oligonucleotide
aaugaaauucgccgagccc

SEQ ID NO: 872144 - RNA, 19 nt, Artificial Sequence
  Description of Artificial Sequence: Synthetic oligonucleotide
cuccggauaaucuugaucc

SEQ ID NO: 872145 - RNA, 19 nt, Artificial Sequence
  Description of Artificial Sequence: Synthetic oligonucleotide
gagguuaauacccuugggg

SEQ ID NO: 872146 - RNA, 19 nt, Artificial Sequence
  Description of Artificial Sequence: Synthetic oligonucleotide
ugcuuauagccccaguugg

SEQ ID NO: 872147 - RNA, 19 nt, Artificial Sequence
  Description of Artificial Sequence: Synthetic oligonucleotide
gauaaugaaauucgccgag

SEQ ID NO: 872148 - RNA, 19 nt, Artificial Sequence
  Description of Artificial Sequence: Synthetic oligonucleotide
uggacaaugcgguagcggg

SEQ ID NO: 872149 - RNA, 19 nt, Artificial Sequence
  Description of Artificial Sequence: Synthetic oligonucleotide
augaaauucgccgagcccg

SEQ ID NO: 872150 - RNA, 19 nt, Artificial Sequence
  Description of Artificial Sequence: Synthetic oligonucleotide
gacgcugaacaguagagag

SEQ ID NO: 872151 - RNA, 19 nt, Artificial Sequence
  Description of Artificial Sequence: Synthetic oligonucleotide
uaugugucccugcuuauag

SEQ ID NO: 872152 - RNA, 19 nt, Artificial Sequence
  Description of Artificial Sequence: Synthetic oligonucleotide
uaaugaaauucgccgagcc

SEQ ID NO: 872153 - RNA, 19 nt, Artificial Sequence
  Description of Artificial Sequence: Synthetic oligonucleotide
uguaauacaugcaguacuc

SEQ ID NO: 872154 - RNA, 19 nt, Artificial Sequence
  Description of Artificial Sequence: Synthetic oligonucleotide
cuauaagccaaaugugagg

SEQ ID NO: 872155 - RNA, 19 nt, Artificial Sequence
  Description of Artificial Sequence: Synthetic oligonucleotide
aacggggcuagucuucccc

SEQ ID NO: 872156 - RNA, 19 nt, Artificial Sequence
  Description of Artificial Sequence: Synthetic oligonucleotide
ugcaucagacccuuguggg

SEQ ID NO: 872157 - RNA, 19 nt, Artificial Sequence
  Description of Artificial Sequence: Synthetic oligonucleotide
aaaggcuauaagccaaaug

SEQ ID NO: 872158 - RNA, 19 nt, Artificial Sequence
  Description of Artificial Sequence: Synthetic oligonucleotide
uggagguuaauacccuugg

SEQ ID NO: 872159 - RNA, 19 nt, Artificial Sequence
  Description of Artificial Sequence: Synthetic oligonucleotide
gguuacaccugccaaagcg

SEQ ID NO: 872160 - RNA, 19 nt, Artificial Sequence
  Description of Artificial Sequence: Synthetic oligonucleotide
cuggauaaugaaauucgcc

SEQ ID NO: 872161 - RNA, 19 nt, Artificial Sequence
  Description of Artificial Sequence: Synthetic oligonucleotide
accacggggacaaauaccc

SEQ ID NO: 872162 - RNA, 19 nt, Artificial Sequence
  Description of Artificial Sequence: Synthetic oligonucleotide
ugugucccugcuuauagcc

SEQ ID NO: 872163 - RNA, 19 nt, Artificial Sequence
  Description of Artificial Sequence: Synthetic oligonucleotide
acauaaaaugcccaccaga

SEQ ID NO: 872164 - RNA, 19 nt, Artificial Sequence
  Description of Artificial Sequence: Synthetic oligonucleotide
aguaggugcagcuguccgc

SEQ ID NO: 872165 - RNA, 19 nt, Artificial Sequence
  Description of Artificial Sequence: Synthetic oligonucleotide
guuaauacccuuggggagg

SEQ ID NO: 872166 - RNA, 19 nt, Artificial Sequence
  Description of Artificial Sequence: Synthetic oligonucleotide
auaaugaaauucgccgagc

SEQ ID NO: 872167 - RNA, 19 nt, Artificial Sequence
  Description of Artificial Sequence: Synthetic oligonucleotide
ugaacauaaaaugcccacc

SEQ ID NO: 872168 - RNA, 19 nt, Artificial Sequence
  Description of Artificial Sequence: Synthetic oligonucleotide
uaauacaugcaguacucuc

SEQ ID NO: 872169 - RNA, 19 nt, Artificial Sequence
  Description of Artificial Sequence: Synthetic oligonucleotide
accuggauaaugaaauucg

SEQ ID NO: 872170 - RNA, 19 nt, Artificial Sequence
  Description of Artificial Sequence: Synthetic oligonucleotide
uauuggaggguggaguccg

SEQ ID NO: 872171 - RNA, 19 nt, Artificial Sequence
  Description of Artificial Sequence: Synthetic oligonucleotide
cuuuguugcgccacugagg

SEQ ID NO: 872172 - RNA, 19 nt, Artificial Sequence
  Description of Artificial Sequence: Synthetic oligonucleotide
gauauaggggcagcgcucg

SEQ ID NO: 872173 - RNA, 19 nt, Artificial Sequence
  Description of Artificial Sequence: Synthetic oligonucleotide
uucgccugccggauaaugg

SEQ ID NO: 872174 - RNA, 19 nt, Artificial Sequence
  Description of Artificial Sequence: Synthetic oligonucleotide
gaugaaggauggcagcuug

SEQ ID NO: 872175 - RNA, 19 nt, Artificial Sequence
  Description of Artificial Sequence: Synthetic oligonucleotide
gaggaaugcaaggagauga

SEQ ID NO: 872176 - RNA, 19 nt, Artificial Sequence
  Description of Artificial Sequence: Synthetic oligonucleotide
ggacaaauaccccugcggg

SEQ ID NO: 872177 - RNA, 19 nt, Artificial Sequence
  Description of Artificial Sequence: Synthetic oligonucleotide
ucuugcaugugccucggac

SEQ ID NO: 872178 - RNA, 19 nt, Artificial Sequence
  Description of Artificial Sequence: Synthetic oligonucleotide
ucguccugugcgaaggagg

SEQ ID NO: 872179 - RNA, 19 nt, Artificial Sequence
  Description of Artificial Sequence: Synthetic oligonucleotide
uguugcgccacugagggga

SEQ ID NO: 872180 - RNA, 19 nt, Artificial Sequence
  Description of Artificial Sequence: Synthetic oligonucleotide
uugcgggacacauacacgu

SEQ ID NO: 872181 - RNA, 19 nt, Artificial Sequence
  Description of Artificial Sequence: Synthetic oligonucleotide
cuuauuggaggguggaguc

SEQ ID NO: 872182 - RNA, 19 nt, Artificial Sequence
  Description of Artificial Sequence: Synthetic oligonucleotide
gacaaauaccccugcgggc

SEQ ID NO: 872183 - RNA, 19 nt, Artificial Sequence
  Description of Artificial Sequence: Synthetic oligonucleotide
aauucgccgagcccgccag

SEQ ID NO: 872184 - RNA, 19 nt, Artificial Sequence
  Description of Artificial Sequence: Synthetic oligonucleotide
cugguuacgauggagcagc

SEQ ID NO: 872185 - RNA, 19 nt, Artificial Sequence
  Description of Artificial Sequence: Synthetic oligonucleotide
ucaccuuauuggagggugg

SEQ ID NO: 872186 - RNA, 19 nt, Artificial Sequence
  Description of Artificial Sequence: Synthetic oligonucleotide
ucuugcacuuugcacccag

SEQ ID NO: 872187 - RNA, 19 nt, Artificial Sequence
  Description of Artificial Sequence: Synthetic oligonucleotide
gucuucguuggacaaugcg

SEQ ID NO: 872188 - RNA, 19 nt, Artificial Sequence
  Description of Artificial Sequence: Synthetic oligonucleotide
aaagcgguuguaauacaug

SEQ ID NO: 872189 - RNA, 19 nt, Artificial Sequence
  Description of Artificial Sequence: Synthetic oligonucleotide
aaaaugcccaccagagaag

SEQ ID NO: 872190 - RNA, 19 nt, Artificial Sequence
  Description of Artificial Sequence: Synthetic oligonucleotide
auggauauaggggcagcgc

SEQ ID NO: 872191 - RNA, 19 nt, Artificial Sequence
  Description of Artificial Sequence: Synthetic oligonucleotide
aguaccagggaccuggaua

SEQ ID NO: 872192 - RNA, 19 nt, Artificial Sequence
  Description of Artificial Sequence: Synthetic oligonucleotide
gucgcuucugguuacgaug

SEQ ID NO: 872193 - RNA, 19 nt, Artificial Sequence
  Description of Artificial Sequence: Synthetic oligonucleotide
uuaauacccuuggggaggg

SEQ ID NO: 872194 - RNA, 19 nt, Artificial Sequence
  Description of Artificial Sequence: Synthetic oligonucleotide
uguguagcggcuucccuga

SEQ ID NO: 872195 - RNA, 19 nt, Artificial Sequence
  Description of Artificial Sequence: Synthetic oligonucleotide
ugcgggcaaagucaggaca

SEQ ID NO: 872196 - RNA, 19 nt, Artificial Sequence
  Description of Artificial Sequence: Synthetic oligonucleotide
gguuaauacccuuggggag

SEQ ID NO: 872197 - RNA, 19 nt, Artificial Sequence
  Description of Artificial Sequence: Synthetic oligonucleotide
uccugugcgaaggaggacc

SEQ ID NO: 872198 - RNA, 19 nt, Artificial Sequence
  Description of Artificial Sequence: Synthetic oligonucleotide
cauacacguggcuguaagg

SEQ ID NO: 872199 - RNA, 19 nt, Artificial Sequence
  Description of Artificial Sequence: Synthetic oligonucleotide
ugaaauucgccgagcccgc

SEQ ID NO: 872200 - RNA, 19 nt, Artificial Sequence
  Description of Artificial Sequence: Synthetic oligonucleotide
acaaaggucuccaaaggcu

SEQ ID NO: 872201 - RNA, 19 nt, Artificial Sequence
  Description of Artificial Sequence: Synthetic oligonucleotide
acaaauaccccugcgggca

SEQ ID NO: 872202 - RNA, 19 nt, Artificial Sequence
  Description of Artificial Sequence: Synthetic oligonucleotide
cuugcgggacacauacacg

SEQ ID NO: 872203 - RNA, 19 nt, Artificial Sequence
  Description of Artificial Sequence: Synthetic oligonucleotide
gcgguuguaauacaugcag

SEQ ID NO: 872204 - RNA, 19 nt, Artificial Sequence
  Description of Artificial Sequence: Synthetic oligonucleotide
gggacaaauaccccugcgg

SEQ ID NO: 872205 - RNA, 19 nt, Artificial Sequence
  Description of Artificial Sequence: Synthetic oligonucleotide
uuucccgccuccagugacg

SEQ ID NO: 872206 - RNA, 19 nt, Artificial Sequence
  Description of Artificial Sequence: Synthetic oligonucleotide
acagccgaugccuggugac

SEQ ID NO: 872207 - RNA, 19 nt, Artificial Sequence
  Description of Artificial Sequence: Synthetic oligonucleotide
aucuggugcacacggccac

SEQ ID NO: 872208 - RNA, 19 nt, Artificial Sequence
  Description of Artificial Sequence: Synthetic oligonucleotide
gguaggugcgggcugaucc

SEQ ID NO: 872209 - RNA, 19 nt, Artificial Sequence
  Description of Artificial Sequence: Synthetic oligonucleotide
ucguuggacaaugcgguag

SEQ ID NO: 872210 - RNA, 19 nt, Artificial Sequence
  Description of Artificial Sequence: Synthetic oligonucleotide
uccaaagaugggguugggg

SEQ ID NO: 872211 - RNA, 19 nt, Artificial Sequence
  Description of Artificial Sequence: Synthetic oligonucleotide
ggcuuaagggagaacaagg

SEQ ID NO: 872212 - RNA, 19 nt, Artificial Sequence
  Description of Artificial Sequence: Synthetic oligonucleotide
gguacuaccccuccuccgg

SEQ ID NO: 872213 - RNA, 19 nt, Artificial Sequence
  Description of Artificial Sequence: Synthetic oligonucleotide
ugguacuaccccuccuccg

SEQ ID NO: 872214 - RNA, 19 nt, Artificial Sequence
  Description of Artificial Sequence: Synthetic oligonucleotide
guagagagcuuccugagua

SEQ ID NO: 872215 - RNA, 19 nt, Artificial Sequence
  Description of Artificial Sequence: Synthetic oligonucleotide
auagccuuugagaaaguca

SEQ ID NO: 872216 - RNA, 19 nt, Artificial Sequence
  Description of Artificial Sequence: Synthetic oligonucleotide
aucaccuuauuggagggug

SEQ ID NO: 872217 - RNA, 19 nt, Artificial Sequence
  Description of Artificial Sequence: Synthetic oligonucleotide
aaccucacauggcacccug

SEQ ID NO: 872218 - RNA, 19 nt, Artificial Sequence
  Description of Artificial Sequence: Synthetic oligonucleotide
aaauucgccgagcccgcca

SEQ ID NO: 872219 - RNA, 19 nt, Artificial Sequence
  Description of Artificial Sequence: Synthetic oligonucleotide
aggacccuauuacuaucac

SEQ ID NO: 872220 - RNA, 19 nt, Artificial Sequence
  Description of Artificial Sequence: Synthetic oligonucleotide
agcuaugugucccugcuua

SEQ ID NO: 872221 - RNA, 19 nt, Artificial Sequence
  Description of Artificial Sequence: Synthetic oligonucleotide
ucgccugccggauaauggc

SEQ ID NO: 872222 - RNA, 19 nt, Artificial Sequence
  Description of Artificial Sequence: Synthetic oligonucleotide
ggauaaugaaauucgccga

SEQ ID NO: 872223 - RNA, 19 nt, Artificial Sequence
  Description of Artificial Sequence: Synthetic oligonucleotide
gucuccgucgcugaguaag

SEQ ID NO: 872224 - RNA, 19 nt, Artificial Sequence
  Description of Artificial Sequence: Synthetic oligonucleotide
uacacguggcuguaaggac

SEQ ID NO: 872225 - RNA, 19 nt, Artificial Sequence
  Description of Artificial Sequence: Synthetic oligonucleotide
guaaggacaguugcuguug

SEQ ID NO: 872226 - RNA, 19 nt, Artificial Sequence
  Description of Artificial Sequence: Synthetic oligonucleotide
cucggggaggaaugcaagg

SEQ ID NO: 872227 - RNA, 19 nt, Artificial Sequence
  Description of Artificial Sequence: Synthetic oligonucleotide
uuauuggaggguggagucc

SEQ ID NO: 872228 - RNA, 19 nt, Artificial Sequence
  Description of Artificial Sequence: Synthetic oligonucleotide
uccgcaggugcacauugga

SEQ ID NO: 872229 - RNA, 19 nt, Artificial Sequence
  Description of Artificial Sequence: Synthetic oligonucleotide
cgugguuugauguguagcg

SEQ ID NO: 872230 - RNA, 19 nt, Artificial Sequence
  Description of Artificial Sequence: Synthetic oligonucleotide
guagcggcuucccugaguc

SEQ ID NO: 872231 - RNA, 19 nt, Artificial Sequence
  Description of Artificial Sequence: Synthetic oligonucleotide
gcuauugccacacccacca

SEQ ID NO: 872232 - RNA, 19 nt, Artificial Sequence
  Description of Artificial Sequence: Synthetic oligonucleotide
uccgucgcugaguaagaug

SEQ ID NO: 872233 - RNA, 19 nt, Artificial Sequence
  Description of Artificial Sequence: Synthetic oligonucleotide
acgcugaacaguagagagc

SEQ ID NO: 872234 - RNA, 19 nt, Artificial Sequence
  Description of Artificial Sequence: Synthetic oligonucleotide
caguaggugcagcuguccg

SEQ ID NO: 872235 - RNA, 19 nt, Artificial Sequence
  Description of Artificial Sequence: Synthetic oligonucleotide
acgguuacaccugccaaag

SEQ ID NO: 872236 - RNA, 19 nt, Artificial Sequence
  Description of Artificial Sequence: Synthetic oligonucleotide
cuuguggggagucuuccuc

SEQ ID NO: 872237 - RNA, 19 nt, Artificial Sequence
  Description of Artificial Sequence: Synthetic oligonucleotide
ucccugaguccuugguacg

SEQ ID NO: 872238 - RNA, 19 nt, Artificial Sequence
  Description of Artificial Sequence: Synthetic oligonucleotide
uguccgccggccaugucgc

SEQ ID NO: 872239 - RNA, 19 nt, Artificial Sequence
  Description of Artificial Sequence: Synthetic oligonucleotide
gcagcgguagccuuuguug

SEQ ID NO: 872240 - RNA, 19 nt, Artificial Sequence
  Description of Artificial Sequence: Synthetic oligonucleotide
cacguggcuguaaggacag

SEQ ID NO: 872241 - RNA, 19 nt, Artificial Sequence
  Description of Artificial Sequence: Synthetic oligonucleotide
ggagaugaaggauggcagc

SEQ ID NO: 872242 - RNA, 19 nt, Artificial Sequence
  Description of Artificial Sequence: Synthetic oligonucleotide
aggaggacccuauuacuau

SEQ ID NO: 872243 - RNA, 19 nt, Artificial Sequence
  Description of Artificial Sequence: Synthetic oligonucleotide
agguuggggccucaguucu

SEQ ID NO: 872244 - RNA, 19 nt, Artificial Sequence
  Description of Artificial Sequence: Synthetic oligonucleotide
agcuauugccacacccacc

SEQ ID NO: 872245 - RNA, 19 nt, Artificial Sequence
  Description of Artificial Sequence: Synthetic oligonucleotide
caccacggggacaaauacc

SEQ ID NO: 872246 - RNA, 19 nt, Artificial Sequence
  Description of Artificial Sequence: Synthetic oligonucleotide
guaggugcagcuguccgcc

SEQ ID NO: 872247 - RNA, 19 nt, Artificial Sequence
  Description of Artificial Sequence: Synthetic oligonucleotide
ggagguuaauacccuuggg

SEQ ID NO: 872248 - RNA, 19 nt, Artificial Sequence
  Description of Artificial Sequence: Synthetic oligonucleotide
ucagaacggggcuagucuu

SEQ ID NO: 872249 - RNA, 19 nt, Artificial Sequence
  Description of Artificial Sequence: Synthetic oligonucleotide
auugaggggagaagguuug

SEQ ID NO: 872250 - RNA, 19 nt, Artificial Sequence
  Description of Artificial Sequence: Synthetic oligonucleotide
aauaccccugcgggcaaag

SEQ ID NO: 872251 - RNA, 19 nt, Artificial Sequence
  Description of Artificial Sequence: Synthetic oligonucleotide
ugcacccaguggacaauag

SEQ ID NO: 872252 - RNA, 19 nt, Artificial Sequence
  Description of Artificial Sequence: Synthetic oligonucleotide
guaguugugggacuacucu

SEQ ID NO: 872253 - RNA, 19 nt, Artificial Sequence
  Description of Artificial Sequence: Synthetic oligonucleotide
gacgcaggcgguucaguac

SEQ ID NO: 872254 - RNA, 19 nt, Artificial Sequence
  Description of Artificial Sequence: Synthetic oligonucleotide
gauggagcauugaggggag

SEQ ID NO: 872255 - RNA, 19 nt, Artificial Sequence
  Description of Artificial Sequence: Synthetic oligonucleotide
cugguacuaccccuccucc

SEQ ID NO: 872256 - RNA, 19 nt, Artificial Sequence
  Description of Artificial Sequence: Synthetic oligonucleotide
ugauguguagcggcuuccc

SEQ ID NO: 872257 - RNA, 19 nt, Artificial Sequence
  Description of Artificial Sequence: Synthetic oligonucleotide
ugccggauaauggccaggc

SEQ ID NO: 872258 - RNA, 19 nt, Artificial Sequence
  Description of Artificial Sequence: Synthetic oligonucleotide
ucggggaggaaugcaagga

SEQ ID NO: 872259 - RNA, 19 nt, Artificial Sequence
  Description of Artificial Sequence: Synthetic oligonucleotide
agagaaccccuccuaugca

SEQ ID NO: 872260 - RNA, 19 nt, Artificial Sequence
  Description of Artificial Sequence: Synthetic oligonucleotide
ugcuucgccugccggauaa

SEQ ID NO: 872261 - RNA, 19 nt, Artificial Sequence
  Description of Artificial Sequence: Synthetic oligonucleotide
uaccccugcgggcaaaguc

SEQ ID NO: 872262 - RNA, 19 nt, Artificial Sequence
  Description of Artificial Sequence: Synthetic oligonucleotide
ccuggauaaugaaauucgc

SEQ ID NO: 872263 - RNA, 19 nt, Artificial Sequence
  Description of Artificial Sequence: Synthetic oligonucleotide
ugcgggacacauacacgug

SEQ ID NO: 872264 - RNA, 19 nt, Artificial Sequence
  Description of Artificial Sequence: Synthetic oligonucleotide
gaaggaggacccuauuacu

SEQ ID NO: 872265 - RNA, 19 nt, Artificial Sequence
  Description of Artificial Sequence: Synthetic oligonucleotide
aggacgcugaacaguagag

SEQ ID NO: 872266 - RNA, 19 nt, Artificial Sequence
  Description of Artificial Sequence: Synthetic oligonucleotide
guaggugcgggcugauccc

SEQ ID NO: 872267 - RNA, 19 nt, Artificial Sequence
  Description of Artificial Sequence: Synthetic oligonucleotide
gacaaugcgguagcggguc

SEQ ID NO: 872268 - RNA, 19 nt, Artificial Sequence
  Description of Artificial Sequence: Synthetic oligonucleotide
gugacgguuggacgcaggc

SEQ ID NO: 872269 - RNA, 19 nt, Artificial Sequence
  Description of Artificial Sequence: Synthetic oligonucleotide
cacauggcacccugauggg

SEQ ID NO: 872270 - RNA, 19 nt, Artificial Sequence
  Description of Artificial Sequence: Synthetic oligonucleotide
cuucguuggacaaugcggu

SEQ ID NO: 872271 - RNA, 19 nt, Artificial Sequence
  Description of Artificial Sequence: Synthetic oligonucleotide
cagaaaguaggaacacaca

SEQ ID NO: 872272 - RNA, 19 nt, Artificial Sequence
  Description of Artificial Sequence: Synthetic oligonucleotide
gcuuaagggagaacaaggc

SEQ ID NO: 872273 - RNA, 19 nt, Artificial Sequence
  Description of Artificial Sequence: Synthetic oligonucleotide
ggcuauaagccaaauguga

SEQ ID NO: 872274 - RNA, 19 nt, Artificial Sequence
  Description of Artificial Sequence: Synthetic oligonucleotide
cagcuauugccacacccac

SEQ ID NO: 872275 - RNA, 19 nt, Artificial Sequence
  Description of Artificial Sequence: Synthetic oligonucleotide
gauaauggccaggcuucgc

SEQ ID NO: 872276 - RNA, 19 nt, Artificial Sequence
  Description of Artificial Sequence: Synthetic oligonucleotide
ucuccgucgcugaguaaga

SEQ ID NO: 872277 - RNA, 19 nt, Artificial Sequence
  Description of Artificial Sequence: Synthetic oligonucleotide
cuggccaaggaacgacugc

SEQ ID NO: 872278 - RNA, 19 nt, Artificial Sequence
  Description of Artificial Sequence: Synthetic oligonucleotide
cuccuaugcagcgguagcc

SEQ ID NO: 872279 - RNA, 19 nt, Artificial Sequence
  Description of Artificial Sequence: Synthetic oligonucleotide
gcgggacacauacacgugg

SEQ ID NO: 872280 - RNA, 19 nt, Artificial Sequence
  Description of Artificial Sequence: Synthetic oligonucleotide
uccuaugcagcgguagccu

SEQ ID NO: 872281 - RNA, 19 nt, Artificial Sequence
  Description of Artificial Sequence: Synthetic oligonucleotide
guggagguuaauacccuug

SEQ ID NO: 872282 - RNA, 19 nt, Artificial Sequence
  Description of Artificial Sequence: Synthetic oligonucleotide
ccuugcgggacacauacac

SEQ ID NO: 872283 - RNA, 19 nt, Artificial Sequence
  Description of Artificial Sequence: Synthetic oligonucleotide
uggagcauugaggggagaa

SEQ ID NO: 872284 - RNA, 19 nt, Artificial Sequence
  Description of Artificial Sequence: Synthetic oligonucleotide
cuuucccgccuccagugac

SEQ ID NO: 872285 - RNA, 19 nt, Artificial Sequence
  Description of Artificial Sequence: Synthetic oligonucleotide
gcaucagacccuugugggg

SEQ ID NO: 872286 - RNA, 19 nt, Artificial Sequence
  Description of Artificial Sequence: Synthetic oligonucleotide
gccaaagcgguuguaauac

SEQ ID NO: 872287 - RNA, 19 nt, Artificial Sequence
  Description of Artificial Sequence: Synthetic oligonucleotide
ugcgccacugaggggaacc

SEQ ID NO: 872288 - RNA, 19 nt, Artificial Sequence
  Description of Artificial Sequence: Synthetic oligonucleotide
ugagguaggugcgggcuga

SEQ ID NO: 872289 - RNA, 19 nt, Artificial Sequence
  Description of Artificial Sequence: Synthetic oligonucleotide
cacuuugcacccaguggac

SEQ ID NO: 872290 - RNA, 19 nt, Artificial Sequence
  Description of Artificial Sequence: Synthetic oligonucleotide
cacacccaccacaggagac

SEQ ID NO: 872291 - RNA, 19 nt, Artificial Sequence
  Description of Artificial Sequence: Synthetic oligonucleotide
ugucgcuucugguuacgau

SEQ ID NO: 872292 - RNA, 19 nt, Artificial Sequence
  Description of Artificial Sequence: Synthetic oligonucleotide
cucacauggcacccugaug

SEQ ID NO: 872293 - RNA, 19 nt, Artificial Sequence
  Description of Artificial Sequence: Synthetic oligonucleotide
ccaaaugugaggagcuaug

SEQ ID NO: 872294 - RNA, 19 nt, Artificial Sequence
  Description of Artificial Sequence: Synthetic oligonucleotide
ugugcgaaggaggacccua

SEQ ID NO: 872295 - RNA, 19 nt, Artificial Sequence
  Description of Artificial Sequence: Synthetic oligonucleotide
gcuuauagccccaguuggg

SEQ ID NO: 872296 - RNA, 19 nt, Artificial Sequence
  Description of Artificial Sequence: Synthetic oligonucleotide
uuguugcgccacugagggg

SEQ ID NO: 872297 - RNA, 19 nt, Artificial Sequence
  Description of Artificial Sequence: Synthetic oligonucleotide
ugguaguugugggacuacu

SEQ ID NO: 872298 - RNA, 19 nt, Artificial Sequence
  Description of Artificial Sequence: Synthetic oligonucleotide
ggaaggcugguacuacccc

SEQ ID NO: 872299 - RNA, 19 nt, Artificial Sequence
  Description of Artificial Sequence: Synthetic oligonucleotide
ggcuuggacacacaaaggu

SEQ ID NO: 872300 - RNA, 19 nt, Artificial Sequence
  Description of Artificial Sequence: Synthetic oligonucleotide
guagccuuuguugcgccac

SEQ ID NO: 872301 - RNA, 19 nt, Artificial Sequence
  Description of Artificial Sequence: Synthetic oligonucleotide
caucagacccuugugggga

SEQ ID NO: 872302 - RNA, 19 nt, Artificial Sequence
  Description of Artificial Sequence: Synthetic oligonucleotide
accuuauuggaggguggag

SEQ ID NO: 872303 - RNA, 19 nt, Artificial Sequence
  Description of Artificial Sequence: Synthetic oligonucleotide
ccuuuguugcgccacugag

SEQ ID NO: 872304 - RNA, 19 nt, Artificial Sequence
  Description of Artificial Sequence: Synthetic oligonucleotide
gacuucagccuugcgggac

SEQ ID NO: 872305 - RNA, 19 nt, Artificial Sequence
  Description of Artificial Sequence: Synthetic oligonucleotide
cgaaggaggacccuauuac

SEQ ID NO: 872306 - RNA, 19 nt, Artificial Sequence
  Description of Artificial Sequence: Synthetic oligonucleotide
agcauugaggggagaaggu

SEQ ID NO: 872307 - RNA, 19 nt, Artificial Sequence
  Description of Artificial Sequence: Synthetic oligonucleotide
gacagccgaugccugguga

SEQ ID NO: 872308 - RNA, 19 nt, Artificial Sequence
  Description of Artificial Sequence: Synthetic oligonucleotide
cagaacggggcuagucuuc

SEQ ID NO: 872309 - RNA, 19 nt, Artificial Sequence
  Description of Artificial Sequence: Synthetic oligonucleotide
guagagguggagguuaaua

SEQ ID NO: 872310 - RNA, 19 nt, Artificial Sequence
  Description of Artificial Sequence: Synthetic oligonucleotide
ucgccacgguuacaccugc

SEQ ID NO: 872311 - RNA, 19 nt, Artificial Sequence
  Description of Artificial Sequence: Synthetic oligonucleotide
caggacgcugaacaguaga

SEQ ID NO: 872312 - RNA, 19 nt, Artificial Sequence
  Description of Artificial Sequence: Synthetic oligonucleotide
ucgcuggacggcccggcug

SEQ ID NO: 872313 - RNA, 19 nt, Artificial Sequence
  Description of Artificial Sequence: Synthetic oligonucleotide
ucggacaaaucuggugcac

SEQ ID NO: 872314 - RNA, 19 nt, Artificial Sequence
  Description of Artificial Sequence: Synthetic oligonucleotide
agcgguuguaauacaugca

SEQ ID NO: 872315 - RNA, 19 nt, Artificial Sequence
  Description of Artificial Sequence: Synthetic oligonucleotide
ucugcuucgccugccggau

SEQ ID NO: 872316 - RNA, 19 nt, Artificial Sequence
  Description of Artificial Sequence: Synthetic oligonucleotide
cacgguuacaccugccaaa

SEQ ID NO: 872317 - RNA, 19 nt, Artificial Sequence
  Description of Artificial Sequence: Synthetic oligonucleotide
caugucgcuucugguuacg

SEQ ID NO: 872318 - RNA, 19 nt, Artificial Sequence
  Description of Artificial Sequence: Synthetic oligonucleotide
acggggacaaauaccccug

SEQ ID NO: 872319 - RNA, 19 nt, Artificial Sequence
  Description of Artificial Sequence: Synthetic oligonucleotide
caaggcuuggacacacaaa

SEQ ID NO: 872320 - RNA, 19 nt, Artificial Sequence
  Description of Artificial Sequence: Synthetic oligonucleotide
gucugagguaggugcgggc

SEQ ID NO: 872321 - RNA, 19 nt, Artificial Sequence
  Description of Artificial Sequence: Synthetic oligonucleotide
ggccuuugaagacagggua

SEQ ID NO: 872322 - RNA, 19 nt, Artificial Sequence
  Description of Artificial Sequence: Synthetic oligonucleotide
ggauaauggccaggcuucg

SEQ ID NO: 872323 - RNA, 19 nt, Artificial Sequence
  Description of Artificial Sequence: Synthetic oligonucleotide
gggucuucguuggacaaug

SEQ ID NO: 872324 - RNA, 19 nt, Artificial Sequence
  Description of Artificial Sequence: Synthetic oligonucleotide
gaaauucgccgagcccgcc

SEQ ID NO: 872325 - RNA, 19 nt, Artificial Sequence
  Description of Artificial Sequence: Synthetic oligonucleotide
cucagaacggggcuagucu

SEQ ID NO: 872326 - RNA, 19 nt, Artificial Sequence
  Description of Artificial Sequence: Synthetic oligonucleotide
aguggacaauagccuuuga

SEQ ID NO: 872327 - RNA, 19 nt, Artificial Sequence
  Description of Artificial Sequence: Synthetic oligonucleotide
gaacggggcuagucuuccc

SEQ ID NO: 872328 - RNA, 19 nt, Artificial Sequence
  Description of Artificial Sequence: Synthetic oligonucleotide
ugguuacgauggagcagcu

SEQ ID NO: 872329 - RNA, 19 nt, Artificial Sequence
  Description of Artificial Sequence: Synthetic oligonucleotide
uuggacgcaggcgguucag

SEQ ID NO: 872330 - RNA, 19 nt, Artificial Sequence
  Description of Artificial Sequence: Synthetic oligonucleotide
cauugaggggagaagguuu

SEQ ID NO: 872331 - RNA, 19 nt, Artificial Sequence
  Description of Artificial Sequence: Synthetic oligonucleotide
cuucgccugccggauaaug

SEQ ID NO: 872332 - RNA, 19 nt, Artificial Sequence
  Description of Artificial Sequence: Synthetic oligonucleotide
cugcgggcaaagucaggac

SEQ ID NO: 872333 - RNA, 19 nt, Artificial Sequence
  Description of Artificial Sequence: Synthetic oligonucleotide
gcaguacucucucuucuuc

SEQ ID NO: 872334 - RNA, 19 nt, Artificial Sequence
  Description of Artificial Sequence: Synthetic oligonucleotide
agugacgguuggacgcagg

SEQ ID NO: 872335 - RNA, 19 nt, Artificial Sequence
  Description of Artificial Sequence: Synthetic oligonucleotide
gaggagcuaugugucccug

SEQ ID NO: 872336 - RNA, 19 nt, Artificial Sequence
  Description of Artificial Sequence: Synthetic oligonucleotide
auucgccgagcccgccagg

SEQ ID NO: 872337 - RNA, 19 nt, Artificial Sequence
  Description of Artificial Sequence: Synthetic oligonucleotide
ugcgaaggaggacccuauu

SEQ ID NO: 872338 - RNA, 19 nt, Artificial Sequence
  Description of Artificial Sequence: Synthetic oligonucleotide
cacggggacaaauaccccu

SEQ ID NO: 872339 - RNA, 19 nt, Artificial Sequence
  Description of Artificial Sequence: Synthetic oligonucleotide
gcaccacggggacaaauac

SEQ ID NO: 872340 - RNA, 19 nt, Artificial Sequence
  Description of Artificial Sequence: Synthetic oligonucleotide
guuggacgcaggcgguuca

SEQ ID NO: 872341 - RNA, 19 nt, Artificial Sequence
  Description of Artificial Sequence: Synthetic oligonucleotide
ggagggccugucuccgucg

SEQ ID NO: 872342 - RNA, 19 nt, Artificial Sequence
  Description of Artificial Sequence: Synthetic oligonucleotide
uucuugcaugugccucgga

SEQ ID NO: 872343 - RNA, 19 nt, Artificial Sequence
  Description of Artificial Sequence: Synthetic oligonucleotide
ucgccgagcccgccaggag

SEQ ID NO: 872344 - RNA, 19 nt, Artificial Sequence
  Description of Artificial Sequence: Synthetic oligonucleotide
ugggcucggggaggaaugc

SEQ ID NO: 872345 - RNA, 19 nt, Artificial Sequence
  Description of Artificial Sequence: Synthetic oligonucleotide
agcgguggguagagccucc

SEQ ID NO: 872346 - RNA, 19 nt, Artificial Sequence
  Description of Artificial Sequence: Synthetic oligonucleotide
uacuaccccuccuccggau

SEQ ID NO: 872347 - RNA, 19 nt, Artificial Sequence
  Description of Artificial Sequence: Synthetic oligonucleotide
uggaguccgcaggugcaca

SEQ ID NO: 872348 - RNA, 19 nt, Artificial Sequence
  Description of Artificial Sequence: Synthetic oligonucleotide
gguaguugugggacuacuc

SEQ ID NO: 872349 - RNA, 19 nt, Artificial Sequence
  Description of Artificial Sequence: Synthetic oligonucleotide
cacaggcgugguuugaugu

SEQ ID NO: 872350 - RNA, 19 nt, Artificial Sequence
  Description of Artificial Sequence: Synthetic oligonucleotide
aggacagccgaugccuggu

SEQ ID NO: 872351 - RNA, 19 nt, Artificial Sequence
  Description of Artificial Sequence: Synthetic oligonucleotide
ggugaaccucacauggcac

SEQ ID NO: 872352 - RNA, 19 nt, Artificial Sequence
  Description of Artificial Sequence: Synthetic oligonucleotide
ggauauaggggcagcgcuc

SEQ ID NO: 872353 - RNA, 19 nt, Artificial Sequence
  Description of Artificial Sequence: Synthetic oligonucleotide
ggacacacaaaggucucca

SEQ ID NO: 872354 - RNA, 19 nt, Artificial Sequence
  Description of Artificial Sequence: Synthetic oligonucleotide
acuaccccuccuccggaua

SEQ ID NO: 872355 - RNA, 19 nt, Artificial Sequence
  Description of Artificial Sequence: Synthetic oligonucleotide
ccuccggauaaucuugauc

SEQ ID NO: 872356 - RNA, 19 nt, Artificial Sequence
  Description of Artificial Sequence: Synthetic oligonucleotide
gcuagcagagcaggaggag

SEQ ID NO: 872357 - RNA, 19 nt, Artificial Sequence
  Description of Artificial Sequence: Synthetic oligonucleotide
ccuccuaugcagcgguagc

SEQ ID NO: 872358 - RNA, 19 nt, Artificial Sequence
  Description of Artificial Sequence: Synthetic oligonucleotide
gacagggccuuggcuuaag

SEQ ID NO: 872359 - RNA, 19 nt, Artificial Sequence
  Description of Artificial Sequence: Synthetic oligonucleotide
guacuaccccuccuccgga

SEQ ID NO: 872360 - RNA, 19 nt, Artificial Sequence
  Description of Artificial Sequence: Synthetic oligonucleotide
gaggcagcgguggccuuug

SEQ ID NO: 872361 - RNA, 19 nt, Artificial Sequence
  Description of Artificial Sequence: Synthetic oligonucleotide
guccaaagaugggguuggg

SEQ ID NO: 872362 - RNA, 19 nt, Artificial Sequence
  Description of Artificial Sequence: Synthetic oligonucleotide
gguagcgggucuugaucac

SEQ ID NO: 872363 - RNA, 19 nt, Artificial Sequence
  Description of Artificial Sequence: Synthetic oligonucleotide
ugcacacggccaccuucuc

SEQ ID NO: 872364 - RNA, 19 nt, Artificial Sequence
  Description of Artificial Sequence: Synthetic oligonucleotide
agguaggugcgggcugauc

SEQ ID NO: 872365 - RNA, 19 nt, Artificial Sequence
  Description of Artificial Sequence: Synthetic oligonucleotide
gcgggcaaagucaggacac

SEQ ID NO: 872366 - RNA, 19 nt, Artificial Sequence
  Description of Artificial Sequence: Synthetic oligonucleotide
caccuuauuggagggugga

SEQ ID NO: 872367 - RNA, 19 nt, Artificial Sequence
  Description of Artificial Sequence: Synthetic oligonucleotide
cuaccccuccuccggauaa

SEQ ID NO: 872368 - RNA, 19 nt, Artificial Sequence
  Description of Artificial Sequence: Synthetic oligonucleotide
augucgcuucugguuacga

SEQ ID NO: 872369 - RNA, 19 nt, Artificial Sequence
  Description of Artificial Sequence: Synthetic oligonucleotide
ggacgcugaacaguagaga

SEQ ID NO: 872370 - RNA, 19 nt, Artificial Sequence
  Description of Artificial Sequence: Synthetic oligonucleotide
gcgguagcgggucuugauc

SEQ ID NO: 872371 - RNA, 19 nt, Artificial Sequence
  Description of Artificial Sequence: Synthetic oligonucleotide
gugcacauuggaagcugca

SEQ ID NO: 872372 - RNA, 19 nt, Artificial Sequence
  Description of Artificial Sequence: Synthetic oligonucleotide
ggacccuauuacuaucacu

SEQ ID NO: 872373 - RNA, 19 nt, Artificial Sequence
  Description of Artificial Sequence: Synthetic oligonucleotide
gugguaguugugggacuac

SEQ ID NO: 872374 - RNA, 19 nt, Artificial Sequence
  Description of Artificial Sequence: Synthetic oligonucleotide
gcgaaggaggacccuauua

SEQ ID NO: 872375 - RNA, 19 nt, Artificial Sequence
  Description of Artificial Sequence: Synthetic oligonucleotide
ggucugggacccacucugg

SEQ ID NO: 872376 - RNA, 19 nt, Artificial Sequence
  Description of Artificial Sequence: Synthetic oligonucleotide
cuaugugucccugcuuaua

SEQ ID NO: 872377 - RNA, 19 nt, Artificial Sequence
  Description of Artificial Sequence: Synthetic oligonucleotide
cgggcugauccccagggag

SEQ ID NO: 872378 - RNA, 19 nt, Artificial Sequence
  Description of Artificial Sequence: Synthetic oligonucleotide
cagacccuuguggggaguc

SEQ ID NO: 872379 - RNA, 19 nt, Artificial Sequence
  Description of Artificial Sequence: Synthetic oligonucleotide
gcgguagccuuuguugcgc

SEQ ID NO: 872380 - RNA, 19 nt, Artificial Sequence
  Description of Artificial Sequence: Synthetic oligonucleotide
ugucuccgucgcugaguaa

SEQ ID NO: 872381 - RNA, 19 nt, Artificial Sequence
  Description of Artificial Sequence: Synthetic oligonucleotide
ccugcgggcaaagucagga

SEQ ID NO: 872382 - RNA, 19 nt, Artificial Sequence
  Description of Artificial Sequence: Synthetic oligonucleotide
ccaugucgcuucugguuac

SEQ ID NO: 872383 - RNA, 19 nt, Artificial Sequence
  Description of Artificial Sequence: Synthetic oligonucleotide
ggugguaguugugggacua

SEQ ID NO: 872384 - RNA, 19 nt, Artificial Sequence
  Description of Artificial Sequence: Synthetic oligonucleotide
ccacggggacaaauacccc

SEQ ID NO: 872385 - RNA, 19 nt, Artificial Sequence
  Description of Artificial Sequence: Synthetic oligonucleotide
gccuuuguugcgccacuga

SEQ ID NO: 872386 - RNA, 19 nt, Artificial Sequence
  Description of Artificial Sequence: Synthetic oligonucleotide
ggucuucguuggacaaugc

SEQ ID NO: 872387 - RNA, 19 nt, Artificial Sequence
  Description of Artificial Sequence: Synthetic oligonucleotide
auaccccugcgggcaaagu

SEQ ID NO: 872388 - RNA, 19 nt, Artificial Sequence
  Description of Artificial Sequence: Synthetic oligonucleotide
gcacacggccaccuucuca

SEQ ID NO: 872389 - RNA, 19 nt, Artificial Sequence
  Description of Artificial Sequence: Synthetic oligonucleotide
agcgggucuugaucaccuu

SEQ ID NO: 872390 - RNA, 19 nt, Artificial Sequence
  Description of Artificial Sequence: Synthetic oligonucleotide
gcucgccacgguuacaccu

SEQ ID NO: 872391 - RNA, 19 nt, Artificial Sequence
  Description of Artificial Sequence: Synthetic oligonucleotide
gguuggacgcaggcgguuc

SEQ ID NO: 872392 - RNA, 19 nt, Artificial Sequence
  Description of Artificial Sequence: Synthetic oligonucleotide
cccuccuaugcagcgguag

SEQ ID NO: 872393 - RNA, 19 nt, Artificial Sequence
  Description of Artificial Sequence: Synthetic oligonucleotide
cgguagcgggucuugauca

SEQ ID NO: 872394 - RNA, 19 nt, Artificial Sequence
  Description of Artificial Sequence: Synthetic oligonucleotide
ccaaagcgguuguaauaca

SEQ ID NO: 872395 - RNA, 19 nt, Artificial Sequence
  Description of Artificial Sequence: Synthetic oligonucleotide
gucgcugaguaagaugguu

SEQ ID NO: 872396 - RNA, 19 nt, Artificial Sequence
  Description of Artificial Sequence: Synthetic oligonucleotide
ccucagaacggggcuaguc

SEQ ID NO: 872397 - RNA, 19 nt, Artificial Sequence
  Description of Artificial Sequence: Synthetic oligonucleotide
uaccccuccuccggauaau

SEQ ID NO: 872398 - RNA, 19 nt, Artificial Sequence
  Description of Artificial Sequence: Synthetic oligonucleotide
cgccgagcccgccaggagg

SEQ ID NO: 872399 - RNA, 19 nt, Artificial Sequence
  Description of Artificial Sequence: Synthetic oligonucleotide
cgccugccggauaauggcc

SEQ ID NO: 872400 - RNA, 19 nt, Artificial Sequence
  Description of Artificial Sequence: Synthetic oligonucleotide
ggcaccacggggacaaaua

SEQ ID NO: 872401 - RNA, 19 nt, Artificial Sequence
  Description of Artificial Sequence: Synthetic oligonucleotide
ccccggagggccugucucc

SEQ ID NO: 872402 - RNA, 19 nt, Artificial Sequence
  Description of Artificial Sequence: Synthetic oligonucleotide
cacauacacguggcuguaa

SEQ ID NO: 872403 - RNA, 19 nt, Artificial Sequence
  Description of Artificial Sequence: Synthetic oligonucleotide
uaccagggaccuggauaau

SEQ ID NO: 872404 - RNA, 19 nt, Artificial Sequence
  Description of Artificial Sequence: Synthetic oligonucleotide
gcuuucccgccuccaguga

SEQ ID NO: 872405 - RNA, 19 nt, Artificial Sequence
  Description of Artificial Sequence: Synthetic oligonucleotide
gguggagguuaauacccuu

SEQ ID NO: 872406 - RNA, 19 nt, Artificial Sequence
  Description of Artificial Sequence: Synthetic oligonucleotide
ggcucggggaggaaugcaa

SEQ ID NO: 872407 - RNA, 19 nt, Artificial Sequence
  Description of Artificial Sequence: Synthetic oligonucleotide
ggaccuggauaaugaaauu

SEQ ID NO: 872408 - RNA, 19 nt, Artificial Sequence
  Description of Artificial Sequence: Synthetic oligonucleotide
gccaaaugugaggagcuau

SEQ ID NO: 872409 - RNA, 19 nt, Artificial Sequence
  Description of Artificial Sequence: Synthetic oligonucleotide
ccacgguuacaccugccaa

SEQ ID NO: 872410 - RNA, 19 nt, Artificial Sequence
  Description of Artificial Sequence: Synthetic oligonucleotide
gacccuuguggggagucuu

SEQ ID NO: 872411 - RNA, 19 nt, Artificial Sequence
  Description of Artificial Sequence: Synthetic oligonucleotide
cggggacaaauaccccugc

SEQ ID NO: 872412 - RNA, 19 nt, Artificial Sequence
  Description of Artificial Sequence: Synthetic oligonucleotide
aggcgugguuugaugugua

SEQ ID NO: 872413 - RNA, 19 nt, Artificial Sequence
  Description of Artificial Sequence: Synthetic oligonucleotide
cccggagggccugucuccg

SEQ ID NO: 872414 - RNA, 19 nt, Artificial Sequence
  Description of Artificial Sequence: Synthetic oligonucleotide
ggacaaugcgguagcgggu

SEQ ID NO: 872415 - RNA, 19 nt, Artificial Sequence
  Description of Artificial Sequence: Synthetic oligonucleotide
cgguuacaccugccaaagc

SEQ ID NO: 872416 - RNA, 19 nt, Artificial Sequence
  Description of Artificial Sequence: Synthetic oligonucleotide
gggacccacucuggccucc

SEQ ID NO: 872417 - RNA, 19 nt, Artificial Sequence
  Description of Artificial Sequence: Synthetic oligonucleotide
gcagcgcucgccacgguua

SEQ ID NO: 872418 - RNA, 19 nt, Artificial Sequence
  Description of Artificial Sequence: Synthetic oligonucleotide
ccagugacgguuggacgca

SEQ ID NO: 872419 - RNA, 19 nt, Artificial Sequence
  Description of Artificial Sequence: Synthetic oligonucleotide
gugcgaaggaggacccuau

SEQ ID NO: 872420 - RNA, 19 nt, Artificial Sequence
  Description of Artificial Sequence: Synthetic oligonucleotide
ggaguccgcaggugcacau

SEQ ID NO: 872421 - RNA, 19 nt, Artificial Sequence
  Description of Artificial Sequence: Synthetic oligonucleotide
caggguccagucguccugu

SEQ ID NO: 872422 - RNA, 19 nt, Artificial Sequence
  Description of Artificial Sequence: Synthetic oligonucleotide
cccaguggacaauagccuu

SEQ ID NO: 872423 - RNA, 19 nt, Artificial Sequence
  Description of Artificial Sequence: Synthetic oligonucleotide
ccgccaggaggguagagau

SEQ ID NO: 872424 - RNA, 19 nt, Artificial Sequence
  Description of Artificial Sequence: Synthetic oligonucleotide
agccccaguugggcucagu

SEQ ID NO: 872425 - RNA, 19 nt, Artificial Sequence
  Description of Artificial Sequence: Synthetic oligonucleotide
gaguccgcaggugcacauu

SEQ ID NO: 872426 - RNA, 19 nt, Artificial Sequence
  Description of Artificial Sequence: Synthetic oligonucleotide
ccuuguggggagucuuccu

SEQ ID NO: 872427 - RNA, 19 nt, Artificial Sequence
  Description of Artificial Sequence: Synthetic oligonucleotide
cgcucgccacgguuacacc

SEQ ID NO: 872428 - RNA, 19 nt, Artificial Sequence
  Description of Artificial Sequence: Synthetic oligonucleotide
cugcuucgccugccggaua

SEQ ID NO: 872429 - RNA, 19 nt, Artificial Sequence
  Description of Artificial Sequence: Synthetic oligonucleotide
cgccacgguuacaccugcc

SEQ ID NO: 872430 - RNA, 19 nt, Artificial Sequence
  Description of Artificial Sequence: Synthetic oligonucleotide
ggcagcgcucgccacgguu

SEQ ID NO: 872431 - RNA, 19 nt, Artificial Sequence
  Description of Artificial Sequence: Synthetic oligonucleotide
ccguuggaaggcugguacu

SEQ ID NO: 872432 - RNA, 19 nt, Artificial Sequence
  Description of Artificial Sequence: Synthetic oligonucleotide
ggacggcccggcuggccaa

SEQ ID NO: 872433 - RNA, 19 nt, Artificial Sequence
  Description of Artificial Sequence: Synthetic oligonucleotide
gcgccacugaggggaacca

SEQ ID NO: 872434 - RNA, 19 nt, Artificial Sequence
  Description of Artificial Sequence: Synthetic oligonucleotide
gagguaggugcgggcugau

SEQ ID NO: 872435 - RNA, 19 nt, Artificial Sequence
  Description of Artificial Sequence: Synthetic oligonucleotide
caaugcgguagcgggucuu

SEQ ID NO: 872436 - RNA, 19 nt, Artificial Sequence
  Description of Artificial Sequence: Synthetic oligonucleotide
cuccgucgcugaguaagau

SEQ ID NO: 872437 - RNA, 19 nt, Artificial Sequence
  Description of Artificial Sequence: Synthetic oligonucleotide
gggccggcugcaggucuug

SEQ ID NO: 872438 - RNA, 19 nt, Artificial Sequence
  Description of Artificial Sequence: Synthetic oligonucleotide
ggacagggccuuggcuuaa

SEQ ID NO: 872439 - RNA, 19 nt, Artificial Sequence
  Description of Artificial Sequence: Synthetic oligonucleotide
ccuaugcagcgguagccuu

SEQ ID NO: 872440 - RNA, 19 nt, Artificial Sequence
  Description of Artificial Sequence: Synthetic oligonucleotide
cugugcgaaggaggacccu

SEQ ID NO: 872441 - RNA, 19 nt, Artificial Sequence
  Description of Artificial Sequence: Synthetic oligonucleotide
cccgccuccagugacgguu

SEQ ID NO: 872442 - RNA, 19 nt, Artificial Sequence
  Description of Artificial Sequence: Synthetic oligonucleotide
guccgccggccaugucgcu

SEQ ID NO: 872443 - RNA, 19 nt, Artificial Sequence
  Description of Artificial Sequence: Synthetic oligonucleotide
ccccuccuaugcagcggua

SEQ ID NO: 872444 - RNA, 19 nt, Artificial Sequence
  Description of Artificial Sequence: Synthetic oligonucleotide
gcuucgccugccggauaau

SEQ ID NO: 872445 - RNA, 19 nt, Artificial Sequence
  Description of Artificial Sequence: Synthetic oligonucleotide
ccggagggccugucuccgu

SEQ ID NO: 872446 - RNA, 19 nt, Artificial Sequence
  Description of Artificial Sequence: Synthetic oligonucleotide
cgguuggacgcaggcgguu

SEQ ID NO: 872447 - RNA, 19 nt, Artificial Sequence
  Description of Artificial Sequence: Synthetic oligonucleotide
ccgagcccgccaggagggu

SEQ ID NO: 872448 - RNA, 19 nt, Artificial Sequence
  Description of Artificial Sequence: Synthetic oligonucleotide
cgccggccaugucgcuucu

SEQ ID NO: 872449 - RNA, 19 nt, Artificial Sequence
  Description of Artificial Sequence: Synthetic oligonucleotide
aauagcacugcguauacuc

SEQ ID NO: 872450 - RNA, 19 nt, Artificial Sequence
  Description of Artificial Sequence: Synthetic oligonucleotide
gaucaggccauauagaggg

SEQ ID NO: 872451 - RNA, 19 nt, Artificial Sequence
  Description of Artificial Sequence: Synthetic oligonucleotide
ucuacgaggaaauucaucc

SEQ ID NO: 872452 - RNA, 19 nt, Artificial Sequence
  Description of Artificial Sequence: Synthetic oligonucleotide
aagugcacagauuuaacac

SEQ ID NO: 872453 - RNA, 19 nt, Artificial Sequence
  Description of Artificial Sequence: Synthetic oligonucleotide
aaaugauguagcauaacgc

SEQ ID NO: 872454 - RNA, 19 nt, Artificial Sequence
  Description of Artificial Sequence: Synthetic oligonucleotide
ucagauaugauuagcaugu

SEQ ID NO: 872455 - RNA, 19 nt, Artificial Sequence
  Description of Artificial Sequence: Synthetic oligonucleotide
uaagaguaugaaaacaucc

SEQ ID NO: 872456 - RNA, 19 nt, Artificial Sequence
  Description of Artificial Sequence: Synthetic oligonucleotide
uuagcauguacuuacauac

SEQ ID NO: 872457 - RNA, 19 nt, Artificial Sequence
  Description of Artificial Sequence: Synthetic oligonucleotide
uuugaagauccuaugauca

SEQ ID NO: 872458 - RNA, 19 nt, Artificial Sequence
  Description of Artificial Sequence: Synthetic oligonucleotide
uuuuauacgagccuuaauu

SEQ ID NO: 872459 - RNA, 19 nt, Artificial Sequence
  Description of Artificial Sequence: Synthetic oligonucleotide
aaugaucugacaucuacga

SEQ ID NO: 872460 - RNA, 19 nt, Artificial Sequence
  Description of Artificial Sequence: Synthetic oligonucleotide
aaagaauucuuuaacuuag

SEQ ID NO: 872461 - RNA, 19 nt, Artificial Sequence
  Description of Artificial Sequence: Synthetic oligonucleotide
uuauacgagccuuaauugg

SEQ ID NO: 872462 - RNA, 19 nt, Artificial Sequence
  Description of Artificial Sequence: Synthetic oligonucleotide
uguagcauaacgcugcugu

SEQ ID NO: 872463 - RNA, 19 nt, Artificial Sequence
  Description of Artificial Sequence: Synthetic oligonucleotide
uuuauacgagccuuaauug

SEQ ID NO: 872464 - RNA, 19 nt, Artificial Sequence
  Description of Artificial Sequence: Synthetic oligonucleotide
auaacuauguguuguugac

SEQ ID NO: 872465 - RNA, 19 nt, Artificial Sequence
  Description of Artificial Sequence: Synthetic oligonucleotide
uuguaaacuucucuucucg

SEQ ID NO: 872466 - RNA, 19 nt, Artificial Sequence
  Description of Artificial Sequence: Synthetic oligonucleotide
aagauccuaugaucaagcc

SEQ ID NO: 872467 - RNA, 19 nt, Artificial Sequence
  Description of Artificial Sequence: Synthetic oligonucleotide
uccuucaaaacccuuaaac

SEQ ID NO: 872468 - RNA, 19 nt, Artificial Sequence
  Description of Artificial Sequence: Synthetic oligonucleotide
aaccacaacauuuaguuua

SEQ ID NO: 872469 - RNA, 19 nt, Artificial Sequence
  Description of Artificial Sequence: Synthetic oligonucleotide
uacuuacauacuuuaagag

SEQ ID NO: 872470 - RNA, 19 nt, Artificial Sequence
  Description of Artificial Sequence: Synthetic oligonucleotide
uauacgagccuuaauuggc

SEQ ID NO: 872471 - RNA, 19 nt, Artificial Sequence
  Description of Artificial Sequence: Synthetic oligonucleotide
augaucaagccagaaagcc

SEQ ID NO: 872472 - RNA, 19 nt, Artificial Sequence
  Description of Artificial Sequence: Synthetic oligonucleotide
agaucuguaggguacauca

SEQ ID NO: 872473 - RNA, 19 nt, Artificial Sequence
  Description of Artificial Sequence: Synthetic oligonucleotide
ucuaaauccaguacuugga

SEQ ID NO: 872474 - RNA, 19 nt, Artificial Sequence
  Description of Artificial Sequence: Synthetic oligonucleotide
ucuuccgauagccaaagga

SEQ ID NO: 872475 - RNA, 19 nt, Artificial Sequence
  Description of Artificial Sequence: Synthetic oligonucleotide
agaguaugaaaacauccag

SEQ ID NO: 872476 - RNA, 19 nt, Artificial Sequence
  Description of Artificial Sequence: Synthetic oligonucleotide
gauuuaacacaguagcgac

SEQ ID NO: 872477 - RNA, 19 nt, Artificial Sequence
  Description of Artificial Sequence: Synthetic oligonucleotide
acuuacauacuuuaagagu

SEQ ID NO: 872478 - RNA, 19 nt, Artificial Sequence
  Description of Artificial Sequence: Synthetic oligonucleotide
uauguaacugaaugacagg

SEQ ID NO: 872479 - RNA, 19 nt, Artificial Sequence
  Description of Artificial Sequence: Synthetic oligonucleotide
auguguuuaucgcuauugc

SEQ ID NO: 872480 - RNA, 19 nt, Artificial Sequence
  Description of Artificial Sequence: Synthetic oligonucleotide
cacaguagcgacuauuugc

SEQ ID NO: 872481 - RNA, 19 nt, Artificial Sequence
  Description of Artificial Sequence: Synthetic oligonucleotide
uucucauauguucugauua

SEQ ID NO: 872482 - RNA, 19 nt, Artificial Sequence
  Description of Artificial Sequence: Synthetic oligonucleotide
agucuguccacacuguggg

SEQ ID NO: 872483 - RNA, 19 nt, Artificial Sequence
  Description of Artificial Sequence: Synthetic oligonucleotide
uaggguacaucacaaacac

SEQ ID NO: 872484 - RNA, 19 nt, Artificial Sequence
  Description of Artificial Sequence: Synthetic oligonucleotide
uguguuuaucgcuauugcc

SEQ ID NO: 872485 - RNA, 19 nt, Artificial Sequence
  Description of Artificial Sequence: Synthetic oligonucleotide
uuuacaugcaguuguagua

SEQ ID NO: 872486 - RNA, 19 nt, Artificial Sequence
  Description of Artificial Sequence: Synthetic oligonucleotide
auguucugauuauuuacac

SEQ ID NO: 872487 - RNA, 19 nt, Artificial Sequence
  Description of Artificial Sequence: Synthetic oligonucleotide
uguacaacaguaagcguac

SEQ ID NO: 872488 - RNA, 19 nt, Artificial Sequence
  Description of Artificial Sequence: Synthetic oligonucleotide
ucaaguugccugcagcucc

SEQ ID NO: 872489 - RNA, 19 nt, Artificial Sequence
  Description of Artificial Sequence: Synthetic oligonucleotide
ugaguaaccgauccacucc

SEQ ID NO: 872490 - RNA, 19 nt, Artificial Sequence
  Description of Artificial Sequence: Synthetic oligonucleotide
aaauaauacucaaaccaca

SEQ ID NO: 872491 - RNA, 19 nt, Artificial Sequence
  Description of Artificial Sequence: Synthetic oligonucleotide
acuaguagacauccgcuuc

SEQ ID NO: 872492 - RNA, 19 nt, Artificial Sequence
  Description of Artificial Sequence: Synthetic oligonucleotide
acaguaagcguacucagca

SEQ ID NO: 872493 - RNA, 19 nt, Artificial Sequence
  Description of Artificial Sequence: Synthetic oligonucleotide
acuggagguaaguaaaaug

SEQ ID NO: 872494 - RNA, 19 nt, Artificial Sequence
  Description of Artificial Sequence: Synthetic oligonucleotide
agcacggugacugaguaac

SEQ ID NO: 872495 - RNA, 19 nt, Artificial Sequence
  Description of Artificial Sequence: Synthetic oligonucleotide
aacaguaagcguacucagc

SEQ ID NO: 872496 - RNA, 19 nt, Artificial Sequence
  Description of Artificial Sequence: Synthetic oligonucleotide
aaauucauccuauguuccu

SEQ ID NO: 872497 - RNA, 19 nt, Artificial Sequence
  Description of Artificial Sequence: Synthetic oligonucleotide
aacguucaaaugcuguuga

SEQ ID NO: 872498 - RNA, 19 nt, Artificial Sequence
  Description of Artificial Sequence: Synthetic oligonucleotide
cuggagguaaguaaaauga

SEQ ID NO: 872499 - RNA, 19 nt, Artificial Sequence
  Description of Artificial Sequence: Synthetic oligonucleotide
aaccgauccacuccccaac

SEQ ID NO: 872500 - RNA, 19 nt, Artificial Sequence
  Description of Artificial Sequence: Synthetic oligonucleotide
ugcacugauuuacaugcag

SEQ ID NO: 872501 - RNA, 19 nt, Artificial Sequence
  Description of Artificial Sequence: Synthetic oligonucleotide
caaugaucugacaucuacg

SEQ ID NO: 872502 - RNA, 19 nt, Artificial Sequence
  Description of Artificial Sequence: Synthetic oligonucleotide
aagaguaugaaaacaucca

SEQ ID NO: 872503 - RNA, 19 nt, Artificial Sequence
  Description of Artificial Sequence: Synthetic oligonucleotide
uguacugagguuucuuucu

SEQ ID NO: 872504 - RNA, 19 nt, Artificial Sequence
  Description of Artificial Sequence: Synthetic oligonucleotide
acccuuaaacaucagauau

SEQ ID NO: 872505 - RNA, 19 nt, Artificial Sequence
  Description of Artificial Sequence: Synthetic oligonucleotide
acacuguacaggcagagca

SEQ ID NO: 872506 - RNA, 19 nt, Artificial Sequence
  Description of Artificial Sequence: Synthetic oligonucleotide
agauuuaacacaguagcga

SEQ ID NO: 872507 - RNA, 19 nt, Artificial Sequence
  Description of Artificial Sequence: Synthetic oligonucleotide
uuacaugcaguuguaguag

SEQ ID NO: 872508 - RNA, 19 nt, Artificial Sequence
  Description of Artificial Sequence: Synthetic oligonucleotide
ucuaagcugucuuuuacaa

SEQ ID NO: 872509 - RNA, 19 nt, Artificial Sequence
  Description of Artificial Sequence: Synthetic oligonucleotide
uggaucgagauaacuaugu

SEQ ID NO: 872510 - RNA, 19 nt, Artificial Sequence
  Description of Artificial Sequence: Synthetic oligonucleotide
cugacuaguagacauccgc

SEQ ID NO: 872511 - RNA, 19 nt, Artificial Sequence
  Description of Artificial Sequence: Synthetic oligonucleotide
uaggguaccuuucucauau

SEQ ID NO: 872512 - RNA, 19 nt, Artificial Sequence
  Description of Artificial Sequence: Synthetic oligonucleotide
ucuggcaggauaauucgcu

SEQ ID NO: 872513 - RNA, 19 nt, Artificial Sequence
  Description of Artificial Sequence: Synthetic oligonucleotide
guaugauuuuaauuaguac

SEQ ID NO: 872514 - RNA, 19 nt, Artificial Sequence
  Description of Artificial Sequence: Synthetic oligonucleotide
aagccugacuaguagacau

SEQ ID NO: 872515 - RNA, 19 nt, Artificial Sequence
  Description of Artificial Sequence: Synthetic oligonucleotide
ugggcuuucgcaauucugu

SEQ ID NO: 872516 - RNA, 19 nt, Artificial Sequence
  Description of Artificial Sequence: Synthetic oligonucleotide
aguuaccaaggguggaucg

SEQ ID NO: 872517 - RNA, 19 nt, Artificial Sequence
  Description of Artificial Sequence: Synthetic oligonucleotide
acugcguauacuccuaugu

SEQ ID NO: 872518 - RNA, 19 nt, Artificial Sequence
  Description of Artificial Sequence: Synthetic oligonucleotide
ugucaaugaucugacaucu

SEQ ID NO: 872519 - RNA, 19 nt, Artificial Sequence
  Description of Artificial Sequence: Synthetic oligonucleotide
guaccuuucucauauguuc

SEQ ID NO: 872520 - RNA, 19 nt, Artificial Sequence
  Description of Artificial Sequence: Synthetic oligonucleotide
ggaaauucauccuauguuc

SEQ ID NO: 872521 - RNA, 19 nt, Artificial Sequence
  Description of Artificial Sequence: Synthetic oligonucleotide
aacgcugcuguguguaaag

SEQ ID NO: 872522 - RNA, 19 nt, Artificial Sequence
  Description of Artificial Sequence: Synthetic oligonucleotide
ucuacucguucucugacaa

SEQ ID NO: 872523 - RNA, 19 nt, Artificial Sequence
  Description of Artificial Sequence: Synthetic oligonucleotide
ucgaagguauuuguaagcc

SEQ ID NO: 872524 - RNA, 19 nt, Artificial Sequence
  Description of Artificial Sequence: Synthetic oligonucleotide
ugacuaguagacauccgcu

SEQ ID NO: 872525 - RNA, 19 nt, Artificial Sequence
  Description of Artificial Sequence: Synthetic oligonucleotide
aggaaauucauccuauguu

SEQ ID NO: 872526 - RNA, 19 nt, Artificial Sequence
  Description of Artificial Sequence: Synthetic oligonucleotide
ucuccgugagcucuaagcu

SEQ ID NO: 872527 - RNA, 19 nt, Artificial Sequence
  Description of Artificial Sequence: Synthetic oligonucleotide
uucgcuuagcaaaguauga

SEQ ID NO: 872528 - RNA, 19 nt, Artificial Sequence
  Description of Artificial Sequence: Synthetic oligonucleotide
aagcguacucagcaaacca

SEQ ID NO: 872529 - RNA, 19 nt, Artificial Sequence
  Description of Artificial Sequence: Synthetic oligonucleotide
ugcguauacuccuauguaa

SEQ ID NO: 872530 - RNA, 19 nt, Artificial Sequence
  Description of Artificial Sequence: Synthetic oligonucleotide
ugaaauagcacugcguaua

SEQ ID NO: 872531 - RNA, 19 nt, Artificial Sequence
  Description of Artificial Sequence: Synthetic oligonucleotide
uuugccucuggcaggauaa

SEQ ID NO: 872532 - RNA, 19 nt, Artificial Sequence
  Description of Artificial Sequence: Synthetic oligonucleotide
uacaugcaguuguaguagg

SEQ ID NO: 872533 - RNA, 19 nt, Artificial Sequence
  Description of Artificial Sequence: Synthetic oligonucleotide
uccgugagcucuaagcugu

SEQ ID NO: 872534 - RNA, 19 nt, Artificial Sequence
  Description of Artificial Sequence: Synthetic oligonucleotide
gcuguugaagaucuguagg

SEQ ID NO: 872535 - RNA, 19 nt, Artificial Sequence
  Description of Artificial Sequence: Synthetic oligonucleotide
ugcauaacugggcuuucgc

SEQ ID NO: 872536 - RNA, 19 nt, Artificial Sequence
  Description of Artificial Sequence: Synthetic oligonucleotide
gaguaaccgauccacuccc

SEQ ID NO: 872537 - RNA, 19 nt, Artificial Sequence
  Description of Artificial Sequence: Synthetic oligonucleotide
aacccuuaaacaucagaua

SEQ ID NO: 872538 - RNA, 19 nt, Artificial Sequence
  Description of Artificial Sequence: Synthetic oligonucleotide
gaaauagcacugcguauac

SEQ ID NO: 872539 - RNA, 19 nt, Artificial Sequence
  Description of Artificial Sequence: Synthetic oligonucleotide
uuacaaaaguuaaggcaaa

SEQ ID NO: 872540 - RNA, 19 nt, Artificial Sequence
  Description of Artificial Sequence: Synthetic oligonucleotide
uguaaacuucucuucucgu

SEQ ID NO: 872541 - RNA, 19 nt, Artificial Sequence
  Description of Artificial Sequence: Synthetic oligonucleotide
gucuccgugagcucuaagc

SEQ ID NO: 872542 - RNA, 19 nt, Artificial Sequence
  Description of Artificial Sequence: Synthetic oligonucleotide
cauccuauguuccuuucac

SEQ ID NO: 872543 - RNA, 19 nt, Artificial Sequence
  Description of Artificial Sequence: Synthetic oligonucleotide
agcauaacgcugcugugug

SEQ ID NO: 872544 - RNA, 19 nt, Artificial Sequence
  Description of Artificial Sequence: Synthetic oligonucleotide
uuuaucgcuauugccuuug

SEQ ID NO: 872545 - RNA, 19 nt, Artificial Sequence
  Description of Artificial Sequence: Synthetic oligonucleotide
uuuguaagccugacuagua

SEQ ID NO: 872546 - RNA, 19 nt, Artificial Sequence
  Description of Artificial Sequence: Synthetic oligonucleotide
agacauccgcuucuguuuc

SEQ ID NO: 872547 - RNA, 19 nt, Artificial Sequence
  Description of Artificial Sequence: Synthetic oligonucleotide
auucgcuuagcaaaguaug

SEQ ID NO: 872548 - RNA, 19 nt, Artificial Sequence
  Description of Artificial Sequence: Synthetic oligonucleotide
caacaguaagcguacucag

SEQ ID NO: 872549 - RNA, 19 nt, Artificial Sequence
  Description of Artificial Sequence: Synthetic oligonucleotide
aguaagcguacucagcaaa

SEQ ID NO: 872550 - RNA, 19 nt, Artificial Sequence
  Description of Artificial Sequence: Synthetic oligonucleotide
ggggacuauacacuggagg

SEQ ID NO: 872551 - RNA, 19 nt, Artificial Sequence
  Description of Artificial Sequence: Synthetic oligonucleotide
guuguugaccaugucugcg

SEQ ID NO: 872552 - RNA, 19 nt, Artificial Sequence
  Description of Artificial Sequence: Synthetic oligonucleotide
auacacuggagguaaguaa

SEQ ID NO: 872553 - RNA, 19 nt, Artificial Sequence
  Description of Artificial Sequence: Synthetic oligonucleotide
aggauaauucgcuuagcaa

SEQ ID NO: 872554 - RNA, 19 nt, Artificial Sequence
  Description of Artificial Sequence: Synthetic oligonucleotide
uuaucagauucuucucugu

SEQ ID NO: 872555 - RNA, 19 nt, Artificial Sequence
  Description of Artificial Sequence: Synthetic oligonucleotide
aucgagauaacuauguguu

SEQ ID NO: 872556 - RNA, 19 nt, Artificial Sequence
  Description of Artificial Sequence: Synthetic oligonucleotide
guauacuccuauguaacug

SEQ ID NO: 872557 - RNA, 19 nt, Artificial Sequence
  Description of Artificial Sequence: Synthetic oligonucleotide
uguuuaucgcuauugccuu

SEQ ID NO: 872558 - RNA, 19 nt, Artificial Sequence
  Description of Artificial Sequence: Synthetic oligonucleotide
ugaguuugacugcuuguaa

SEQ ID NO: 872559 - RNA, 19 nt, Artificial Sequence
  Description of Artificial Sequence: Synthetic oligonucleotide
aguuaaggcaaagucauua

SEQ ID NO: 872560 - RNA, 19 nt, Artificial Sequence
  Description of Artificial Sequence: Synthetic oligonucleotide
aagaucuguaggguacauc

SEQ ID NO: 872561 - RNA, 19 nt, Artificial Sequence
  Description of Artificial Sequence: Synthetic oligonucleotide
gaacguucaaaugcuguug

SEQ ID NO: 872562 - RNA, 19 nt, Artificial Sequence
  Description of Artificial Sequence: Synthetic oligonucleotide
caggcauuugaaauagcac

SEQ ID NO: 872563 - RNA, 19 nt, Artificial Sequence
  Description of Artificial Sequence: Synthetic oligonucleotide
uuucuuccgauagccaaag

SEQ ID NO: 872564 - RNA, 19 nt, Artificial Sequence
  Description of Artificial Sequence: Synthetic oligonucleotide
acaucagauaugauuagca

SEQ ID NO: 872565 - RNA, 19 nt, Artificial Sequence
  Description of Artificial Sequence: Synthetic oligonucleotide
gcuuucgcaauucuguugc

SEQ ID NO: 872566 - RNA, 19 nt, Artificial Sequence
  Description of Artificial Sequence: Synthetic oligonucleotide
uuacauacuuuaagaguau

SEQ ID NO: 872567 - RNA, 19 nt, Artificial Sequence
  Description of Artificial Sequence: Synthetic oligonucleotide
gggugaucaggccauauag

SEQ ID NO: 872568 - RNA, 19 nt, Artificial Sequence
  Description of Artificial Sequence: Synthetic oligonucleotide
uaauucgcuuagcaaagua

SEQ ID NO: 872569 - RNA, 19 nt, Artificial Sequence
  Description of Artificial Sequence: Synthetic oligonucleotide
uguaggguaccuuucucau

SEQ ID NO: 872570 - RNA, 19 nt, Artificial Sequence
  Description of Artificial Sequence: Synthetic oligonucleotide
uaacuauguguuguugacc

SEQ ID NO: 872571 - RNA, 19 nt, Artificial Sequence
  Description of Artificial Sequence: Synthetic oligonucleotide
uggagcucuuguacaacag

SEQ ID NO: 872572 - RNA, 19 nt, Artificial Sequence
  Description of Artificial Sequence: Synthetic oligonucleotide
agcaaaguaugauuuuaau

SEQ ID NO: 872573 - RNA, 19 nt, Artificial Sequence
  Description of Artificial Sequence: Synthetic oligonucleotide
uuccgauagccaaaggaau

SEQ ID NO: 872574 - RNA, 19 nt, Artificial Sequence
  Description of Artificial Sequence: Synthetic oligonucleotide
uaagcguacucagcaaacc

SEQ ID NO: 872575 - RNA, 19 nt, Artificial Sequence
  Description of Artificial Sequence: Synthetic oligonucleotide
acugauuuacaugcaguug

SEQ ID NO: 872576 - RNA, 19 nt, Artificial Sequence
  Description of Artificial Sequence: Synthetic oligonucleotide
uuaccaaggguggaucgag

SEQ ID NO: 872577 - RNA, 19 nt, Artificial Sequence
  Description of Artificial Sequence: Synthetic oligonucleotide
cugaguaaccgauccacuc

SEQ ID NO: 872578 - RNA, 19 nt, Artificial Sequence
  Description of Artificial Sequence: Synthetic oligonucleotide
ucgagauaacuauguguug

SEQ ID NO: 872579 - RNA, 19 nt, Artificial Sequence
  Description of Artificial Sequence: Synthetic oligonucleotide
caagugcacagauuuaaca

SEQ ID NO: 872580 - RNA, 19 nt, Artificial Sequence
  Description of Artificial Sequence: Synthetic oligonucleotide
augcaguuguaguaggggu

SEQ ID NO: 872581 - RNA, 19 nt, Artificial Sequence
  Description of Artificial Sequence: Synthetic oligonucleotide
ucucguuucuuccgauagc

SEQ ID NO: 872582 - RNA, 19 nt, Artificial Sequence
  Description of Artificial Sequence: Synthetic oligonucleotide
uacauacuuuaagaguaug

SEQ ID NO: 872583 - RNA, 19 nt, Artificial Sequence
  Description of Artificial Sequence: Synthetic oligonucleotide
agccagaaagccuguuuuc

SEQ ID NO: 872584 - RNA, 19 nt, Artificial Sequence
  Description of Artificial Sequence: Synthetic oligonucleotide
auauagaggggaauugcug

SEQ ID NO: 872585 - RNA, 19 nt, Artificial Sequence
  Description of Artificial Sequence: Synthetic oligonucleotide
uacucguucucugacaaau

SEQ ID NO: 872586 - RNA, 19 nt, Artificial Sequence
  Description of Artificial Sequence: Synthetic oligonucleotide
acaguagcgacuauuugca

SEQ ID NO: 872587 - RNA, 19 nt, Artificial Sequence
  Description of Artificial Sequence: Synthetic oligonucleotide
cccuuuugcagcaaagagg

SEQ ID NO: 872588 - RNA, 19 nt, Artificial Sequence
  Description of Artificial Sequence: Synthetic oligonucleotide
guaaaugggcuggggaagg

SEQ ID NO: 872589 - RNA, 19 nt, Artificial Sequence
  Description of Artificial Sequence: Synthetic oligonucleotide
uagacauccgcuucuguuu

SEQ ID NO: 872590 - RNA, 19 nt, Artificial Sequence
  Description of Artificial Sequence: Synthetic oligonucleotide
aguagcgacuauuugcauu

SEQ ID NO: 872591 - RNA, 19 nt, Artificial Sequence
  Description of Artificial Sequence: Synthetic oligonucleotide
uccgauagccaaaggaauu

SEQ ID NO: 872592 - RNA, 19 nt, Artificial Sequence
  Description of Artificial Sequence: Synthetic oligonucleotide
aguuccaaucuaaauccag

SEQ ID NO: 872593 - RNA, 19 nt, Artificial Sequence
  Description of Artificial Sequence: Synthetic oligonucleotide
acauacuuuaagaguauga

SEQ ID NO: 872594 - RNA, 19 nt, Artificial Sequence
  Description of Artificial Sequence: Synthetic oligonucleotide
acguucaaaugcuguugac

SEQ ID NO: 872595 - RNA, 19 nt, Artificial Sequence
  Description of Artificial Sequence: Synthetic oligonucleotide
ugauuuacaugcaguugua

SEQ ID NO: 872596 - RNA, 19 nt, Artificial Sequence
  Description of Artificial Sequence: Synthetic oligonucleotide
aggaaauggucacaugcau

SEQ ID NO: 872597 - RNA, 19 nt, Artificial Sequence
  Description of Artificial Sequence: Synthetic oligonucleotide
uauacacuggagguaagua

SEQ ID NO: 872598 - RNA, 19 nt, Artificial Sequence
  Description of Artificial Sequence: Synthetic oligonucleotide
aauucauccuauguuccuu

SEQ ID NO: 872599 - RNA, 19 nt, Artificial Sequence
  Description of Artificial Sequence: Synthetic oligonucleotide
gauucaagacuacuuggcu

SEQ ID NO: 872600 - RNA, 19 nt, Artificial Sequence
  Description of Artificial Sequence: Synthetic oligonucleotide
cauaacugggcuuucgcaa

SEQ ID NO: 872601 - RNA, 19 nt, Artificial Sequence
  Description of Artificial Sequence: Synthetic oligonucleotide
uuucucauauguucugauu

SEQ ID NO: 872602 - RNA, 19 nt, Artificial Sequence
  Description of Artificial Sequence: Synthetic oligonucleotide
gaguuugacugcuuguaaa

SEQ ID NO: 872603 - RNA, 19 nt, Artificial Sequence
  Description of Artificial Sequence: Synthetic oligonucleotide
gaggaaauucauccuaugu

SEQ ID NO: 872604 - RNA, 19 nt, Artificial Sequence
  Description of Artificial Sequence: Synthetic oligonucleotide
ucgaagcucggugauggag

SEQ ID NO: 872605 - RNA, 19 nt, Artificial Sequence
  Description of Artificial Sequence: Synthetic oligonucleotide
uuucgcaauucuguugcug

SEQ ID NO: 872606 - RNA, 19 nt, Artificial Sequence
  Description of Artificial Sequence: Synthetic oligonucleotide
ucuguaggguaccuuucuc

SEQ ID NO: 872607 - RNA, 19 nt, Artificial Sequence
  Description of Artificial Sequence: Synthetic oligonucleotide
uagcauguacuuacauacu

SEQ ID NO: 872608 - RNA, 19 nt, Artificial Sequence
  Description of Artificial Sequence: Synthetic oligonucleotide
cuuggaaauggaguuacca

SEQ ID NO: 872609 - RNA, 19 nt, Artificial Sequence
  Description of Artificial Sequence: Synthetic oligonucleotide
ugacugaguaaccgaucca

SEQ ID NO: 872610 - RNA, 19 nt, Artificial Sequence
  Description of Artificial Sequence: Synthetic oligonucleotide
guaggguacaucacaaaca

SEQ ID NO: 872611 - RNA, 19 nt, Artificial Sequence
  Description of Artificial Sequence: Synthetic oligonucleotide
ugacaaaucucugcauaac

SEQ ID NO: 872612 - RNA, 19 nt, Artificial Sequence
  Description of Artificial Sequence: Synthetic oligonucleotide
ucgcuauugccuuugcuuu

SEQ ID NO: 872613 - RNA, 19 nt, Artificial Sequence
  Description of Artificial Sequence: Synthetic oligonucleotide
caggauaauucgcuuagca

SEQ ID NO: 872614 - RNA, 19 nt, Artificial Sequence
  Description of Artificial Sequence: Synthetic oligonucleotide
cuugcaucuguacugaggu

SEQ ID NO: 872615 - RNA, 19 nt, Artificial Sequence
  Description of Artificial Sequence: Synthetic oligonucleotide
aacccgaggggccggucuc

SEQ ID NO: 872616 - RNA, 19 nt, Artificial Sequence
  Description of Artificial Sequence: Synthetic oligonucleotide
uagcauaacgcugcugugu

SEQ ID NO: 872617 - RNA, 19 nt, Artificial Sequence
  Description of Artificial Sequence: Synthetic oligonucleotide
cacggugacugaguaaccg

SEQ ID NO: 872618 - RNA, 19 nt, Artificial Sequence
  Description of Artificial Sequence: Synthetic oligonucleotide
ucucuauacucuccuucaa

SEQ ID NO: 872619 - RNA, 19 nt, Artificial Sequence
  Description of Artificial Sequence: Synthetic oligonucleotide
uucuuccgauagccaaagg

SEQ ID NO: 872620 - RNA, 19 nt, Artificial Sequence
  Description of Artificial Sequence: Synthetic oligonucleotide
aggggaauugcugcugggg

SEQ ID NO: 872621 - RNA, 19 nt, Artificial Sequence
  Description of Artificial Sequence: Synthetic oligonucleotide
uuaucgcuauugccuuugc

SEQ ID NO: 872622 - RNA, 19 nt, Artificial Sequence
  Description of Artificial Sequence: Synthetic oligonucleotide
agggcgcuggcacggaagg

SEQ ID NO: 872623 - RNA, 19 nt, Artificial Sequence
  Description of Artificial Sequence: Synthetic oligonucleotide
ugcuuuuauacgagccuua

SEQ ID NO: 872624 - RNA, 19 nt, Artificial Sequence
  Description of Artificial Sequence: Synthetic oligonucleotide
agucucugcucucuauacu

SEQ ID NO: 872625 - RNA, 19 nt, Artificial Sequence
  Description of Artificial Sequence: Synthetic oligonucleotide
uguacaggcagagcacacu

SEQ ID NO: 872626 - RNA, 19 nt, Artificial Sequence
  Description of Artificial Sequence: Synthetic oligonucleotide
guguuuaucgcuauugccu

SEQ ID NO: 872627 - RNA, 19 nt, Artificial Sequence
  Description of Artificial Sequence: Synthetic oligonucleotide
  modified_base (17)..(17): a, c, u, g, unknown or other
aaagaggaguggacuunag

SEQ ID NO: 872628 - RNA, 19 nt, Artificial Sequence
  Description of Artificial Sequence: Synthetic oligonucleotide
aacaguguuugugcuugca

SEQ ID NO: 872629 - RNA, 19 nt, Artificial Sequence
  Description of Artificial Sequence: Synthetic oligonucleotide
guagcauaacgcugcugug

SEQ ID NO: 872630 - RNA, 19 nt, Artificial Sequence
  Description of Artificial Sequence: Synthetic oligonucleotide
aaauagcacugcguauacu

SEQ ID NO: 872631 - RNA, 19 nt, Artificial Sequence
  Description of Artificial Sequence: Synthetic oligonucleotide
ccuauguuccuuucacagg

SEQ ID NO: 872632 - RNA, 19 nt, Artificial Sequence
  Description of Artificial Sequence: Synthetic oligonucleotide
cuggggaaggggaacguuc

SEQ ID NO: 872633 - RNA, 19 nt, Artificial Sequence
  Description of Artificial Sequence: Synthetic oligonucleotide
  modified_base (9)..(9): a, c, u, g, unknown or other
guggacuunagggcagggg

SEQ ID NO: 872634 - RNA, 19 nt, Artificial Sequence
  Description of Artificial Sequence: Synthetic oligonucleotide
uggggacuauacacuggag

SEQ ID NO: 872635 - RNA, 19 nt, Artificial Sequence
  Description of Artificial Sequence: Synthetic oligonucleotide
cuccgugagcucuaagcug

SEQ ID NO: 872636 - RNA, 19 nt, Artificial Sequence
  Description of Artificial Sequence: Synthetic oligonucleotide
cuguaggguaccuuucuca

SEQ ID NO: 872637 - RNA, 19 nt, Artificial Sequence
  Description of Artificial Sequence: Synthetic oligonucleotide
uguuggagacugaguuuga

SEQ ID NO: 872638 - RNA, 19 nt, Artificial Sequence
  Description of Artificial Sequence: Synthetic oligonucleotide
agaggauucaagacuacuu

SEQ ID NO: 872639 - RNA, 19 nt, Artificial Sequence
  Description of Artificial Sequence: Synthetic oligonucleotide
aggguacaucacaaacacc

SEQ ID NO: 872640 - RNA, 19 nt, Artificial Sequence
  Description of Artificial Sequence: Synthetic oligonucleotide
acggugacugaguaaccga

SEQ ID NO: 872641 - RNA, 19 nt, Artificial Sequence
  Description of Artificial Sequence: Synthetic oligonucleotide
guaagcguacucagcaaac

SEQ ID NO: 872642 - RNA, 19 nt, Artificial Sequence
  Description of Artificial Sequence: Synthetic oligonucleotide
aguaaccgauccacucccc

SEQ ID NO: 872643 - RNA, 19 nt, Artificial Sequence
  Description of Artificial Sequence: Synthetic oligonucleotide
cugggcuuucgcaauucug

SEQ ID NO: 872644 - RNA, 19 nt, Artificial Sequence
  Description of Artificial Sequence: Synthetic oligonucleotide
ucugcggggugaucaggcc

SEQ ID NO: 872645 - RNA, 19 nt, Artificial Sequence
  Description of Artificial Sequence: Synthetic oligonucleotide
ggaucgagauaacuaugug

SEQ ID NO: 872646 - RNA, 19 nt, Artificial Sequence
  Description of Artificial Sequence: Synthetic oligonucleotide
ccuuaaacaucagauauga

SEQ ID NO: 872647 - RNA, 19 nt, Artificial Sequence
  Description of Artificial Sequence: Synthetic oligonucleotide
auaauucgcuuagcaaagu

SEQ ID NO: 872648 - RNA, 19 nt, Artificial Sequence
  Description of Artificial Sequence: Synthetic oligonucleotide
guagcgacuauuugcauuu

SEQ ID NO: 872649 - RNA, 19 nt, Artificial Sequence
  Description of Artificial Sequence: Synthetic oligonucleotide
caugucugcggggugauca

SEQ ID NO: 872650 - RNA, 19 nt, Artificial Sequence
  Description of Artificial Sequence: Synthetic oligonucleotide
caaaacccuuaaacaucag

SEQ ID NO: 872651 - RNA, 19 nt, Artificial Sequence
  Description of Artificial Sequence: Synthetic oligonucleotide
ggagacugaguuugacugc

SEQ ID NO: 872652 - RNA, 19 nt, Artificial Sequence
  Description of Artificial Sequence: Synthetic oligonucleotide
ucggguaaaugggcugggg

SEQ ID NO: 872653 - RNA, 19 nt, Artificial Sequence
  Description of Artificial Sequence: Synthetic oligonucleotide
ugcggggugaucaggccau

SEQ ID NO: 872654 - RNA, 19 nt, Artificial Sequence
  Description of Artificial Sequence: Synthetic oligonucleotide
cagcucaacaguaacauuu

SEQ ID NO: 872655 - RNA, 19 nt, Artificial Sequence
  Description of Artificial Sequence: Synthetic oligonucleotide
aggggaacguucaaaugcu

SEQ ID NO: 872656 - RNA, 19 nt, Artificial Sequence
  Description of Artificial Sequence: Synthetic oligonucleotide
guggaucgagauaacuaug

SEQ ID NO: 872657 - RNA, 19 nt, Artificial Sequence
  Description of Artificial Sequence: Synthetic oligonucleotide
agccuuaauuggcuuuccu

SEQ ID NO: 872658 - RNA, 19 nt, Artificial Sequence
  Description of Artificial Sequence: Synthetic oligonucleotide
gaucuguaggguacaucac

SEQ ID NO: 872659 - RNA, 19 nt, Artificial Sequence
  Description of Artificial Sequence: Synthetic oligonucleotide
guaaccgauccacucccca

SEQ ID NO: 872660 - RNA, 19 nt, Artificial Sequence
  Description of Artificial Sequence: Synthetic oligonucleotide
agccccaguucgaagcucg

SEQ ID NO: 872661 - RNA, 19 nt, Artificial Sequence
  Description of Artificial Sequence: Synthetic oligonucleotide
uggcacggaaggcucucug

SEQ ID NO: 872662 - RNA, 19 nt, Artificial Sequence
  Description of Artificial Sequence: Synthetic oligonucleotide
ccauauagaggggaauugc

SEQ ID NO: 872663 - RNA, 19 nt, Artificial Sequence
  Description of Artificial Sequence: Synthetic oligonucleotide
uggaguuaccaagggugga

SEQ ID NO: 872664 - RNA, 19 nt, Artificial Sequence
  Description of Artificial Sequence: Synthetic oligonucleotide
auacgagccuuaauuggcu

SEQ ID NO: 872665 - RNA, 19 nt, Artificial Sequence
  Description of Artificial Sequence: Synthetic oligonucleotide
ugaccaugucugcggggug

SEQ ID NO: 872666 - RNA, 19 nt, Artificial Sequence
  Description of Artificial Sequence: Synthetic oligonucleotide
cgaagcucggugauggagg

SEQ ID NO: 872667 - RNA, 19 nt, Artificial Sequence
  Description of Artificial Sequence: Synthetic oligonucleotide
cugcauaacugggcuuucg

SEQ ID NO: 872668 - RNA, 19 nt, Artificial Sequence
  Description of Artificial Sequence: Synthetic oligonucleotide
uugcaauggggaggaagga

SEQ ID NO: 872669 - RNA, 19 nt, Artificial Sequence
  Description of Artificial Sequence: Synthetic oligonucleotide
gaguuaccaaggguggauc

SEQ ID NO: 872670 - RNA, 19 nt, Artificial Sequence
  Description of Artificial Sequence: Synthetic oligonucleotide
gguggaucgagauaacuau

SEQ ID NO: 872671 - RNA, 19 nt, Artificial Sequence
  Description of Artificial Sequence: Synthetic oligonucleotide
acugaguaaccgauccacu

SEQ ID NO: 872672 - RNA, 19 nt, Artificial Sequence
  Description of Artificial Sequence: Synthetic oligonucleotide
caaucuaaauccaguacuu

SEQ ID NO: 872673 - RNA, 19 nt, Artificial Sequence
  Description of Artificial Sequence: Synthetic oligonucleotide
guagggguggaagggaguc

SEQ ID NO: 872674 - RNA, 19 nt, Artificial Sequence
  Description of Artificial Sequence: Synthetic oligonucleotide
ccaaucuaaauccaguacu

SEQ ID NO: 872675 - RNA, 19 nt, Artificial Sequence
  Description of Artificial Sequence: Synthetic oligonucleotide
gcaaaguaugauuuuaauu

SEQ ID NO: 872676 - RNA, 19 nt, Artificial Sequence
  Description of Artificial Sequence: Synthetic oligonucleotide
auaacgcugcuguguguaa

SEQ ID NO: 872677 - RNA, 19 nt, Artificial Sequence
  Description of Artificial Sequence: Synthetic oligonucleotide
gccugacuaguagacaucc

SEQ ID NO: 872678 - RNA, 19 nt, Artificial Sequence
  Description of Artificial Sequence: Synthetic oligonucleotide
caucagauaugauuagcau

SEQ ID NO: 872679 - RNA, 19 nt, Artificial Sequence
  Description of Artificial Sequence: Synthetic oligonucleotide
gcguauacuccuauguaac

SEQ ID NO: 872680 - RNA, 19 nt, Artificial Sequence
  Description of Artificial Sequence: Synthetic oligonucleotide
acgagccuuaauuggcuuu

SEQ ID NO: 872681 - RNA, 19 nt, Artificial Sequence
  Description of Artificial Sequence: Synthetic oligonucleotide
aggguggaucgagauaacu

SEQ ID NO: 872682 - RNA, 19 nt, Artificial Sequence
  Description of Artificial Sequence: Synthetic oligonucleotide
uacgagccuuaauuggcuu

SEQ ID NO: 872683 - RNA, 19 nt, Artificial Sequence
  Description of Artificial Sequence: Synthetic oligonucleotide
guuucuuccgauagccaaa

SEQ ID NO: 872684 - RNA, 19 nt, Artificial Sequence
  Description of Artificial Sequence: Synthetic oligonucleotide
cuaguagacauccgcuucu

SEQ ID NO: 872685 - RNA, 19 nt, Artificial Sequence
  Description of Artificial Sequence: Synthetic oligonucleotide
ucaagacuacuuggcucca

SEQ ID NO: 872686 - RNA, 19 nt, Artificial Sequence
  Description of Artificial Sequence: Synthetic oligonucleotide
gacuaguagacauccgcuu

SEQ ID NO: 872687 - RNA, 19 nt, Artificial Sequence
  Description of Artificial Sequence: Synthetic oligonucleotide
agccugacuaguagacauc

SEQ ID NO: 872688 - RNA, 19 nt, Artificial Sequence
  Description of Artificial Sequence: Synthetic oligonucleotide
guaguagggguggaaggga

SEQ ID NO: 872689 - RNA, 19 nt, Artificial Sequence
  Description of Artificial Sequence: Synthetic oligonucleotide
acuauacacuggagguaag

SEQ ID NO: 872690 - RNA, 19 nt, Artificial Sequence
  Description of Artificial Sequence: Synthetic oligonucleotide
gucugcggggugaucaggc

SEQ ID NO: 872691 - RNA, 19 nt, Artificial Sequence
  Description of Artificial Sequence: Synthetic oligonucleotide
gcauaacugggcuuucgca

SEQ ID NO: 872692 - RNA, 19 nt, Artificial Sequence
  Description of Artificial Sequence: Synthetic oligonucleotide
cauaacgcugcugugugua

SEQ ID NO: 872693 - RNA, 19 nt, Artificial Sequence
  Description of Artificial Sequence: Synthetic oligonucleotide
ccagaggcuuuuaauaaga

SEQ ID NO: 872694 - RNA, 19 nt, Artificial Sequence
  Description of Artificial Sequence: Synthetic oligonucleotide
gagccuuaauuggcuuucc

SEQ ID NO: 872695 - RNA, 19 nt, Artificial Sequence
  Description of Artificial Sequence: Synthetic oligonucleotide
gagaggauucaagacuacu

SEQ ID NO: 872696 - RNA, 19 nt, Artificial Sequence
  Description of Artificial Sequence: Synthetic oligonucleotide
cccaguucgaagcucggug

SEQ ID NO: 872697 - RNA, 19 nt, Artificial Sequence
  Description of Artificial Sequence: Synthetic oligonucleotide
aaggcucucuggggaccac

SEQ ID NO: 872698 - RNA, 19 nt, Artificial Sequence
  Description of Artificial Sequence: Synthetic oligonucleotide
cagggcgcuggcacggaag

SEQ ID NO: 872699 - RNA, 19 nt, Artificial Sequence
  Description of Artificial Sequence: Synthetic oligonucleotide
guuugacugcuuguaaacu

SEQ ID NO: 872700 - RNA, 19 nt, Artificial Sequence
  Description of Artificial Sequence: Synthetic oligonucleotide
cucggguaaaugggcuggg

SEQ ID NO: 872701 - RNA, 19 nt, Artificial Sequence
  Description of Artificial Sequence: Synthetic oligonucleotide
aggcuuuuaauaagacuuu

SEQ ID NO: 872702 - RNA, 19 nt, Artificial Sequence
  Description of Artificial Sequence: Synthetic oligonucleotide
ccugacuaguagacauccg

SEQ ID NO: 872703 - RNA, 19 nt, Artificial Sequence
  Description of Artificial Sequence: Synthetic oligonucleotide
aucagcacggugacugagu

SEQ ID NO: 872704 - RNA, 19 nt, Artificial Sequence
  Description of Artificial Sequence: Synthetic oligonucleotide
aucaggccauauagagggg

SEQ ID NO: 872705 - RNA, 19 nt, Artificial Sequence
  Description of Artificial Sequence: Synthetic oligonucleotide
cugcguauacuccuaugua

SEQ ID NO: 872706 - RNA, 19 nt, Artificial Sequence
  Description of Artificial Sequence: Synthetic oligonucleotide
auacuccuauguaacugaa

SEQ ID NO: 872707 - RNA, 19 nt, Artificial Sequence
  Description of Artificial Sequence: Synthetic oligonucleotide
auguagcauaacgcugcug

SEQ ID NO: 872708 - RNA, 19 nt, Artificial Sequence
  Description of Artificial Sequence: Synthetic oligonucleotide
gccuuugcuuuuauacgag

SEQ ID NO: 872709 - RNA, 19 nt, Artificial Sequence
  Description of Artificial Sequence: Synthetic oligonucleotide
guaggguaccuuucucaua

SEQ ID NO: 872710 - RNA, 19 nt, Artificial Sequence
  Description of Artificial Sequence: Synthetic oligonucleotide
caguaagcguacucagcaa

SEQ ID NO: 872711 - RNA, 19 nt, Artificial Sequence
  Description of Artificial Sequence: Synthetic oligonucleotide
cugcggggugaucaggcca

SEQ ID NO: 872712 - RNA, 19 nt, Artificial Sequence
  Description of Artificial Sequence: Synthetic oligonucleotide
aggcgacaguguuuggcuu

SEQ ID NO: 872713 - RNA, 19 nt, Artificial Sequence
  Description of Artificial Sequence: Synthetic oligonucleotide
cuauacacuggagguaagu

SEQ ID NO: 872714 - RNA, 19 nt, Artificial Sequence
  Description of Artificial Sequence: Synthetic oligonucleotide
cuuuuauacgagccuuaau

SEQ ID NO: 872715 - RNA, 19 nt, Artificial Sequence
  Description of Artificial Sequence: Synthetic oligonucleotide
aggccauauagaggggaau

SEQ ID NO: 872716 - RNA, 19 nt, Artificial Sequence
  Description of Artificial Sequence: Synthetic oligonucleotide
aucaagccagaaagccugu

SEQ ID NO: 872717 - RNA, 19 nt, Artificial Sequence
  Description of Artificial Sequence: Synthetic oligonucleotide
ggacagccccaguucgaag

SEQ ID NO: 872718 - RNA, 19 nt, Artificial Sequence
  Description of Artificial Sequence: Synthetic oligonucleotide
gggguugcaauggggagga

SEQ ID NO: 872719 - RNA, 19 nt, Artificial Sequence
  Description of Artificial Sequence: Synthetic oligonucleotide
ggguggaucgagauaacua

SEQ ID NO: 872720 - RNA, 19 nt, Artificial Sequence
  Description of Artificial Sequence: Synthetic oligonucleotide
cccaacccaacccgagggg

SEQ ID NO: 872721 - RNA, 19 nt, Artificial Sequence
  Description of Artificial Sequence: Synthetic oligonucleotide
gcuuuuauacgagccuuaa

SEQ ID NO: 872722 - RNA, 19 nt, Artificial Sequence
  Description of Artificial Sequence: Synthetic oligonucleotide
gcaggauaauucgcuuagc

SEQ ID NO: 872723 - RNA, 19 nt, Artificial Sequence
  Description of Artificial Sequence: Synthetic oligonucleotide
acgcccaguuccaaucuaa

SEQ ID NO: 872724 - RNA, 19 nt, Artificial Sequence
  Description of Artificial Sequence: Synthetic oligonucleotide
cuacucguucucugacaaa

SEQ ID NO: 872725 - RNA, 19 nt, Artificial Sequence
  Description of Artificial Sequence: Synthetic oligonucleotide
cugcucucuauacucuccu

SEQ ID NO: 872726 - RNA, 19 nt, Artificial Sequence
  Description of Artificial Sequence: Synthetic oligonucleotide
caaacaccacuggagcucu

SEQ ID NO: 872727 - RNA, 19 nt, Artificial Sequence
  Description of Artificial Sequence: Synthetic oligonucleotide
ggaauugcugcuggggacu

SEQ ID NO: 872728 - RNA, 19 nt, Artificial Sequence
  Description of Artificial Sequence: Synthetic oligonucleotide
ggggaacguucaaaugcug

SEQ ID NO: 872729 - RNA, 19 nt, Artificial Sequence
  Description of Artificial Sequence: Synthetic oligonucleotide
ggagaggauucaagacuac

SEQ ID NO: 872730 - RNA, 19 nt, Artificial Sequence
  Description of Artificial Sequence: Synthetic oligonucleotide
ggacuauacacuggaggua

SEQ ID NO: 872731 - RNA, 19 nt, Artificial Sequence
  Description of Artificial Sequence: Synthetic oligonucleotide
ccuaaaaccaggagaggau

SEQ ID NO: 872732 - RNA, 19 nt, Artificial Sequence
  Description of Artificial Sequence: Synthetic oligonucleotide
acagggcgcuggcacggaa

SEQ ID NO: 872733 - RNA, 19 nt, Artificial Sequence
  Description of Artificial Sequence: Synthetic oligonucleotide
gggaacguucaaaugcugu

SEQ ID NO: 872734 - RNA, 19 nt, Artificial Sequence
  Description of Artificial Sequence: Synthetic oligonucleotide
guuuaucgcuauugccuuu

SEQ ID NO: 872735 - RNA, 19 nt, Artificial Sequence
  Description of Artificial Sequence: Synthetic oligonucleotide
gagcucuaagcugucuuuu

SEQ ID NO: 872736 - RNA, 19 nt, Artificial Sequence
  Description of Artificial Sequence: Synthetic oligonucleotide
ggggugaucaggccauaua

SEQ ID NO: 872737 - RNA, 19 nt, Artificial Sequence
  Description of Artificial Sequence: Synthetic oligonucleotide
uagcgacuauuugcauuua

SEQ ID NO: 872738 - RNA, 19 nt, Artificial Sequence
  Description of Artificial Sequence: Synthetic oligonucleotide
cuuucgcaauucuguugcu

SEQ ID NO: 872739 - RNA, 19 nt, Artificial Sequence
  Description of Artificial Sequence: Synthetic oligonucleotide
gucaaugaucugacaucua

SEQ ID NO: 872740 - RNA, 19 nt, Artificial Sequence
  Description of Artificial Sequence: Synthetic oligonucleotide
cgagauaacuauguguugu

SEQ ID NO: 872741 - RNA, 19 nt, Artificial Sequence
  Description of Artificial Sequence: Synthetic oligonucleotide
gcuauugccuuugcuuuua

SEQ ID NO: 872742 - RNA, 19 nt, Artificial Sequence
  Description of Artificial Sequence: Synthetic oligonucleotide
ggguggaagggagucuguc

SEQ ID NO: 872743 - RNA, 19 nt, Artificial Sequence
  Description of Artificial Sequence: Synthetic oligonucleotide
cgagccuuaauuggcuuuc

SEQ ID NO: 872744 - RNA, 19 nt, Artificial Sequence
  Description of Artificial Sequence: Synthetic oligonucleotide
gguaccuuucucauauguu

SEQ ID NO: 872745 - RNA, 19 nt, Artificial Sequence
  Description of Artificial Sequence: Synthetic oligonucleotide
ggaguuaccaaggguggau

SEQ ID NO: 872746 - RNA, 19 nt, Artificial Sequence
  Description of Artificial Sequence: Synthetic oligonucleotide
cagcacggugacugaguaa

SEQ ID NO: 872747 - RNA, 19 nt, Artificial Sequence
  Description of Artificial Sequence: Synthetic oligonucleotide
guccucggguaaaugggcu

SEQ ID NO: 872748 - RNA, 19 nt, Artificial Sequence
  Description of Artificial Sequence: Synthetic oligonucleotide
gcacggugacugaguaacc

SEQ ID NO: 872749 - RNA, 19 nt, Artificial Sequence
  Description of Artificial Sequence: Synthetic oligonucleotide
agacugaguuugacugcuu

SEQ ID NO: 872750 - RNA, 19 nt, Artificial Sequence
  Description of Artificial Sequence: Synthetic oligonucleotide
cacgcccaguuccaaucua

SEQ ID NO: 872751 - RNA, 19 nt, Artificial Sequence
  Description of Artificial Sequence: Synthetic oligonucleotide
caacccgaggggccggucu

SEQ ID NO: 872752 - RNA, 19 nt, Artificial Sequence
  Description of Artificial Sequence: Synthetic oligonucleotide
cguauacuccuauguaacu

SEQ ID NO: 872753 - RNA, 19 nt, Artificial Sequence
  Description of Artificial Sequence: Synthetic oligonucleotide
ggcgacaguguuuggcuuu

SEQ ID NO: 872754 - RNA, 19 nt, Artificial Sequence
  Description of Artificial Sequence: Synthetic oligonucleotide
ccaaggguggaucgagaua

SEQ ID NO: 872755 - RNA, 19 nt, Artificial Sequence
  Description of Artificial Sequence: Synthetic oligonucleotide
caguagcgacuauuugcau

SEQ ID NO: 872756 - RNA, 19 nt, Artificial Sequence
  Description of Artificial Sequence: Synthetic oligonucleotide
cgaagguauuuguaagccu

SEQ ID NO: 872757 - RNA, 19 nt, Artificial Sequence
  Description of Artificial Sequence: Synthetic oligonucleotide
gccccaguucgaagcucgg

SEQ ID NO: 872758 - RNA, 19 nt, Artificial Sequence
  Description of Artificial Sequence: Synthetic oligonucleotide
gcauaacgcugcugugugu

SEQ ID NO: 872759 - RNA, 19 nt, Artificial Sequence
  Description of Artificial Sequence: Synthetic oligonucleotide
gccggucuccgugagcucu

SEQ ID NO: 872760 - RNA, 19 nt, Artificial Sequence
  Description of Artificial Sequence: Synthetic oligonucleotide
ccgugagcucuaagcuguc

SEQ ID NO: 872761 - RNA, 19 nt, Artificial Sequence
  Description of Artificial Sequence: Synthetic oligonucleotide
ccgauagccaaaggaauuu

SEQ ID NO: 872762 - RNA, 19 nt, Artificial Sequence
  Description of Artificial Sequence: Synthetic oligonucleotide
gcacugcguauacuccuau

SEQ ID NO: 872763 - RNA, 19 nt, Artificial Sequence
  Description of Artificial Sequence: Synthetic oligonucleotide
ccaugucugcggggugauc

SEQ ID NO: 872764 - RNA, 19 nt, Artificial Sequence
  Description of Artificial Sequence: Synthetic oligonucleotide
gcgacaguguuuggcuuuu

SEQ ID NO: 872765 - RNA, 19 nt, Artificial Sequence
  Description of Artificial Sequence: Synthetic oligonucleotide
ccggucuccgugagcucua

SEQ ID NO: 872766 - RNA, 19 nt, Artificial Sequence
  Description of Artificial Sequence: Synthetic oligonucleotide
ccccaguucgaagcucggu

SEQ ID NO: 872767 - RNA, 19 nt, Artificial Sequence
  Description of Artificial Sequence: Synthetic oligonucleotide
ggguugcaauggggaggaa

SEQ ID NO: 872768 - RNA, 19 nt, Artificial Sequence
  Description of Artificial Sequence: Synthetic oligonucleotide
cggggugaucaggccauau

SEQ ID NO: 872769 - RNA, 19 nt, Artificial Sequence
  Description of Artificial Sequence: Synthetic oligonucleotide
aauguuguagaacucuggc

SEQ ID NO: 872770 - RNA, 19 nt, Artificial Sequence
  Description of Artificial Sequence: Synthetic oligonucleotide
auuagcgucagagagaagc

SEQ ID NO: 872771 - RNA, 19 nt, Artificial Sequence
  Description of Artificial Sequence: Synthetic oligonucleotide
uaguaguugagaaaggucc

SEQ ID NO: 872772 - RNA, 19 nt, Artificial Sequence
  Description of Artificial Sequence: Synthetic oligonucleotide
aaguggauagccuucucgc

SEQ ID NO: 872773 - RNA, 19 nt, Artificial Sequence
  Description of Artificial Sequence: Synthetic oligonucleotide
aucaauuagcgucagagag

SEQ ID NO: 872774 - RNA, 19 nt, Artificial Sequence
  Description of Artificial Sequence: Synthetic oligonucleotide
ugagcaauguuguagaacu

SEQ ID NO: 872775 - RNA, 19 nt, Artificial Sequence
  Description of Artificial Sequence: Synthetic oligonucleotide
aaugaguagccggaaaggc

SEQ ID NO: 872776 - RNA, 19 nt, Artificial Sequence
  Description of Artificial Sequence: Synthetic oligonucleotide
aauauccccaauaaggcuc

SEQ ID NO: 872777 - RNA, 19 nt, Artificial Sequence
  Description of Artificial Sequence: Synthetic oligonucleotide
agagguauuucacagucuc

SEQ ID NO: 872778 - RNA, 19 nt, Artificial Sequence
  Description of Artificial Sequence: Synthetic oligonucleotide
aaggcauagagcucguguc

SEQ ID NO: 872779 - RNA, 19 nt, Artificial Sequence
  Description of Artificial Sequence: Synthetic oligonucleotide
uacucuagaaacaucgcca

SEQ ID NO: 872780 - RNA, 19 nt, Artificial Sequence
  Description of Artificial Sequence: Synthetic oligonucleotide
uuaugaggaaucuaggaaa

SEQ ID NO: 872781 - RNA, 19 nt, Artificial Sequence
  Description of Artificial Sequence: Synthetic oligonucleotide
uugguuucgaacacagagg

SEQ ID NO: 872782 - RNA, 19 nt, Artificial Sequence
  Description of Artificial Sequence: Synthetic oligonucleotide
ugguuucgaacacagaggc

SEQ ID NO: 872783 - RNA, 19 nt, Artificial Sequence
  Description of Artificial Sequence: Synthetic oligonucleotide
cacucuuuggaauucagag

SEQ ID NO: 872784 - RNA, 19 nt, Artificial Sequence
  Description of Artificial Sequence: Synthetic oligonucleotide
aauucagagguauucccca

SEQ ID NO: 872785 - RNA, 19 nt, Artificial Sequence
  Description of Artificial Sequence: Synthetic oligonucleotide
uuauagcuuacucucaaaa

SEQ ID NO: 872786 - RNA, 19 nt, Artificial Sequence
  Description of Artificial Sequence: Synthetic oligonucleotide
aguuguuugggugaaacag

SEQ ID NO: 872787 - RNA, 19 nt, Artificial Sequence
  Description of Artificial Sequence: Synthetic oligonucleotide
gucgauaucaaaguccacg

SEQ ID NO: 872788 - RNA, 19 nt, Artificial Sequence
  Description of Artificial Sequence: Synthetic oligonucleotide
aaccugauagccaaaagca

SEQ ID NO: 872789 - RNA, 19 nt, Artificial Sequence
  Description of Artificial Sequence: Synthetic oligonucleotide
ugaggaaucuaggaaaacc

SEQ ID NO: 872790 - RNA, 19 nt, Artificial Sequence
  Description of Artificial Sequence: Synthetic oligonucleotide
aguaggaguccacaccggc

SEQ ID NO: 872791 - RNA, 19 nt, Artificial Sequence
  Description of Artificial Sequence: Synthetic oligonucleotide
ugucaauauccccaauaag

SEQ ID NO: 872792 - RNA, 19 nt, Artificial Sequence
  Description of Artificial Sequence: Synthetic oligonucleotide
uuuuauagcuuacucucaa

SEQ ID NO: 872793 - RNA, 19 nt, Artificial Sequence
  Description of Artificial Sequence: Synthetic oligonucleotide
ucaauuagcgucagagaga

SEQ ID NO: 872794 - RNA, 19 nt, Artificial Sequence
  Description of Artificial Sequence: Synthetic oligonucleotide
uugucaauauccccaauaa

SEQ ID NO: 872795 - RNA, 19 nt, Artificial Sequence
  Description of Artificial Sequence: Synthetic oligonucleotide
uacauugcgcucucgauga

SEQ ID NO: 872796 - RNA, 19 nt, Artificial Sequence
  Description of Artificial Sequence: Synthetic oligonucleotide
uuuaccagguacucaaagu

SEQ ID NO: 872797 - RNA, 19 nt, Artificial Sequence
  Description of Artificial Sequence: Synthetic oligonucleotide
caugcgauuguccagcuug

SEQ ID NO: 872798 - RNA, 19 nt, Artificial Sequence
  Description of Artificial Sequence: Synthetic oligonucleotide
gaagugaagggcuggcuag

SEQ ID NO: 872799 - RNA, 19 nt, Artificial Sequence
  Description of Artificial Sequence: Synthetic oligonucleotide
uucacgucgauaucaaagu

SEQ ID NO: 872800 - RNA, 19 nt, Artificial Sequence
  Description of Artificial Sequence: Synthetic oligonucleotide
aucgaaguggguguaauuc

SEQ ID NO: 872801 - RNA, 19 nt, Artificial Sequence
  Description of Artificial Sequence: Synthetic oligonucleotide
ugguuaugaggaaucuagg

SEQ ID NO: 872802 - RNA, 19 nt, Artificial Sequence
  Description of Artificial Sequence: Synthetic oligonucleotide
gaagcagguucacaguucc

SEQ ID NO: 872803 - RNA, 19 nt, Artificial Sequence
  Description of Artificial Sequence: Synthetic oligonucleotide
ucuuugacagcagaugagc

SEQ ID NO: 872804 - RNA, 19 nt, Artificial Sequence
  Description of Artificial Sequence: Synthetic oligonucleotide
guggguguaauuccgaaug

SEQ ID NO: 872805 - RNA, 19 nt, Artificial Sequence
  Description of Artificial Sequence: Synthetic oligonucleotide
cacgucgauaucaaagucc

SEQ ID NO: 872806 - RNA, 19 nt, Artificial Sequence
  Description of Artificial Sequence: Synthetic oligonucleotide
gugguuaugaggaaucuag

SEQ ID NO: 872807 - RNA, 19 nt, Artificial Sequence
  Description of Artificial Sequence: Synthetic oligonucleotide
uugaucguggcaaauccac

SEQ ID NO: 872808 - RNA, 19 nt, Artificial Sequence
  Description of Artificial Sequence: Synthetic oligonucleotide
uaugaggaaucuaggaaaa

SEQ ID NO: 872809 - RNA, 19 nt, Artificial Sequence
  Description of Artificial Sequence: Synthetic oligonucleotide
ggugaaacagaagauagag

SEQ ID NO: 872810 - RNA, 19 nt, Artificial Sequence
  Description of Artificial Sequence: Synthetic oligonucleotide
gauacggugcccuuguaca

SEQ ID NO: 872811 - RNA, 19 nt, Artificial Sequence
  Description of Artificial Sequence: Synthetic oligonucleotide
gaaugaguagccggaaagg

SEQ ID NO: 872812 - RNA, 19 nt, Artificial Sequence
  Description of Artificial Sequence: Synthetic oligonucleotide
aggcauagagcucgugucc

SEQ ID NO: 872813 - RNA, 19 nt, Artificial Sequence
  Description of Artificial Sequence: Synthetic oligonucleotide
uaccagucaucgaaguggg

SEQ ID NO: 872814 - RNA, 19 nt, Artificial Sequence
  Description of Artificial Sequence: Synthetic oligonucleotide
agaacauggccuugacucg

SEQ ID NO: 872815 - RNA, 19 nt, Artificial Sequence
  Description of Artificial Sequence: Synthetic oligonucleotide
agaauggcuccuuuuacca

SEQ ID NO: 872816 - RNA, 19 nt, Artificial Sequence
  Description of Artificial Sequence: Synthetic oligonucleotide
uagccggaaaggcauagag

SEQ ID NO: 872817 - RNA, 19 nt, Artificial Sequence
  Description of Artificial Sequence: Synthetic oligonucleotide
ucgauaucaaaguccacgu

SEQ ID NO: 872818 - RNA, 19 nt, Artificial Sequence
  Description of Artificial Sequence: Synthetic oligonucleotide
guacucuagaaacaucgcc

SEQ ID NO: 872819 - RNA, 19 nt, Artificial Sequence
  Description of Artificial Sequence: Synthetic oligonucleotide
uggguguaauuccgaaugg

SEQ ID NO: 872820 - RNA, 19 nt, Artificial Sequence
  Description of Artificial Sequence: Synthetic oligonucleotide
aggaacacgcacacgaggc

SEQ ID NO: 872821 - RNA, 19 nt, Artificial Sequence
  Description of Artificial Sequence: Synthetic oligonucleotide
acgguagagguacauugcg

SEQ ID NO: 872822 - RNA, 19 nt, Artificial Sequence
  Description of Artificial Sequence: Synthetic oligonucleotide
cacagaggcguucacgucg

SEQ ID NO: 872823 - RNA, 19 nt, Artificial Sequence
  Description of Artificial Sequence: Synthetic oligonucleotide
uuugggugaaacagaagau

SEQ ID NO: 872824 - RNA, 19 nt, Artificial Sequence
  Description of Artificial Sequence: Synthetic oligonucleotide
ugucgugaccgucacaggu

SEQ ID NO: 872825 - RNA, 19 nt, Artificial Sequence
  Description of Artificial Sequence: Synthetic oligonucleotide
uuguuugggugaaacagaa

SEQ ID NO: 872826 - RNA, 19 nt, Artificial Sequence
  Description of Artificial Sequence: Synthetic oligonucleotide
cucccgaguucuaagagag

SEQ ID NO: 872827 - RNA, 19 nt, Artificial Sequence
  Description of Artificial Sequence: Synthetic oligonucleotide
uguacagguaacagggguc

SEQ ID NO: 872828 - RNA, 19 nt, Artificial Sequence
  Description of Artificial Sequence: Synthetic oligonucleotide
agcacgucuaugugauugc

SEQ ID NO: 872829 - RNA, 19 nt, Artificial Sequence
  Description of Artificial Sequence: Synthetic oligonucleotide
aucgccaugagcuucuuau

SEQ ID NO: 872830 - RNA, 19 nt, Artificial Sequence
  Description of Artificial Sequence: Synthetic oligonucleotide
augugauugccaaccagcc

SEQ ID NO: 872831 - RNA, 19 nt, Artificial Sequence
  Description of Artificial Sequence: Synthetic oligonucleotide
uuuggaagugaagggcugg

SEQ ID NO: 872832 - RNA, 19 nt, Artificial Sequence
  Description of Artificial Sequence: Synthetic oligonucleotide
ugugauugccaaccagccc

SEQ ID NO: 872833 - RNA, 19 nt, Artificial Sequence
  Description of Artificial Sequence: Synthetic oligonucleotide
uguggcacgguagagguac

SEQ ID NO: 872834 - RNA, 19 nt, Artificial Sequence
  Description of Artificial Sequence: Synthetic oligonucleotide
agcccaauaucugaccggc

SEQ ID NO: 872835 - RNA, 19 nt, Artificial Sequence
  Description of Artificial Sequence: Synthetic oligonucleotide
agcgucagagagaagcugc

SEQ ID NO: 872836 - RNA, 19 nt, Artificial Sequence
  Description of Artificial Sequence: Synthetic oligonucleotide
aaguccucuacuucccacu

SEQ ID NO: 872837 - RNA, 19 nt, Artificial Sequence
  Description of Artificial Sequence: Synthetic oligonucleotide
cucuggucgaaguggauag

SEQ ID NO: 872838 - RNA, 19 nt, Artificial Sequence
  Description of Artificial Sequence: Synthetic oligonucleotide
gagcggaaugaguagccgg

SEQ ID NO: 872839 - RNA, 19 nt, Artificial Sequence
  Description of Artificial Sequence: Synthetic oligonucleotide
agggaaaggcauuuuccag

SEQ ID NO: 872840 - RNA, 19 nt, Artificial Sequence
  Description of Artificial Sequence: Synthetic oligonucleotide
uguguaucccugagcaaug

SEQ ID NO: 872841 - RNA, 19 nt, Artificial Sequence
  Description of Artificial Sequence: Synthetic oligonucleotide
agcaaauuuauuauuuuau

SEQ ID NO: 872842 - RNA, 19 nt, Artificial Sequence
  Description of Artificial Sequence: Synthetic oligonucleotide
aaugaaggucccaaugccu

SEQ ID NO: 872843 - RNA, 19 nt, Artificial Sequence
  Description of Artificial Sequence: Synthetic oligonucleotide
ucuaugugauugccaacca

SEQ ID NO: 872844 - RNA, 19 nt, Artificial Sequence
  Description of Artificial Sequence: Synthetic oligonucleotide
agugagcacgucuauguga

SEQ ID NO: 872845 - RNA, 19 nt, Artificial Sequence
  Description of Artificial Sequence: Synthetic oligonucleotide
guuccauagggcaugcccg

SEQ ID NO: 872846 - RNA, 19 nt, Artificial Sequence
  Description of Artificial Sequence: Synthetic oligonucleotide
cagaacagggccauccagc

SEQ ID NO: 872847 - RNA, 19 nt, Artificial Sequence
  Description of Artificial Sequence: Synthetic oligonucleotide
aaacacagggucaccagug

SEQ ID NO: 872848 - RNA, 19 nt, Artificial Sequence
  Description of Artificial Sequence: Synthetic oligonucleotide
guaacugucguaggcgugg

SEQ ID NO: 872849 - RNA, 19 nt, Artificial Sequence
  Description of Artificial Sequence: Synthetic oligonucleotide
ucguaggcgugguagaaca

SEQ ID NO: 872850 - RNA, 19 nt, Artificial Sequence
  Description of Artificial Sequence: Synthetic oligonucleotide
uagaaacaucgccaugagc

SEQ ID NO: 872851 - RNA, 19 nt, Artificial Sequence
  Description of Artificial Sequence: Synthetic oligonucleotide
uggcaaauccacauuccac

SEQ ID NO: 872852 - RNA, 19 nt, Artificial Sequence
  Description of Artificial Sequence: Synthetic oligonucleotide
ucguggcaaauccacauuc

SEQ ID NO: 872853 - RNA, 19 nt, Artificial Sequence
  Description of Artificial Sequence: Synthetic oligonucleotide
gaacacgcacacgaggccg

SEQ ID NO: 872854 - RNA, 19 nt, Artificial Sequence
  Description of Artificial Sequence: Synthetic oligonucleotide
accuccaccacucuuugga

SEQ ID NO: 872855 - RNA, 19 nt, Artificial Sequence
  Description of Artificial Sequence: Synthetic oligonucleotide
ucagagguauuccccaaaa

SEQ ID NO: 872856 - RNA, 19 nt, Artificial Sequence
  Description of Artificial Sequence: Synthetic oligonucleotide
uggagaaccuccaccacuc

SEQ ID NO: 872857 - RNA, 19 nt, Artificial Sequence
  Description of Artificial Sequence: Synthetic oligonucleotide
auuccgaauggcucuguug

SEQ ID NO: 872858 - RNA, 19 nt, Artificial Sequence
  Description of Artificial Sequence: Synthetic oligonucleotide
uuuauagcuuacucucaaa

SEQ ID NO: 872859 - RNA, 19 nt, Artificial Sequence
  Description of Artificial Sequence: Synthetic oligonucleotide
acgucuaugugauugccaa

SEQ ID NO: 872860 - RNA, 19 nt, Artificial Sequence
  Description of Artificial Sequence: Synthetic oligonucleotide
cucuuuggaauucagaggu

SEQ ID NO: 872861 - RNA, 19 nt, Artificial Sequence
  Description of Artificial Sequence: Synthetic oligonucleotide
cuaugugauugccaaccag

SEQ ID NO: 872862 - RNA, 19 nt, Artificial Sequence
  Description of Artificial Sequence: Synthetic oligonucleotide
cucguguccugucagugcc

SEQ ID NO: 872863 - RNA, 19 nt, Artificial Sequence
  Description of Artificial Sequence: Synthetic oligonucleotide
uccccaauaaggcucugaa

SEQ ID NO: 872864 - RNA, 19 nt, Artificial Sequence
  Description of Artificial Sequence: Synthetic oligonucleotide
ucucccgaguucuaagaga

SEQ ID NO: 872865 - RNA, 19 nt, Artificial Sequence
  Description of Artificial Sequence: Synthetic oligonucleotide
cacuguguaucccugagca

SEQ ID NO: 872866 - RNA, 19 nt, Artificial Sequence
  Description of Artificial Sequence: Synthetic oligonucleotide
accgucacaggugagaggu

SEQ ID NO: 872867 - RNA, 19 nt, Artificial Sequence
  Description of Artificial Sequence: Synthetic oligonucleotide
cagccaggaagaaugacuc

SEQ ID NO: 872868 - RNA, 19 nt, Artificial Sequence
  Description of Artificial Sequence: Synthetic oligonucleotide
ugaucguggcaaauccaca

SEQ ID NO: 872869 - RNA, 19 nt, Artificial Sequence
  Description of Artificial Sequence: Synthetic oligonucleotide
cuagaaacaucgccaugag

SEQ ID NO: 872870 - RNA, 19 nt, Artificial Sequence
  Description of Artificial Sequence: Synthetic oligonucleotide
ggugucgugaccgucacag

SEQ ID NO: 872871 - RNA, 19 nt, Artificial Sequence
  Description of Artificial Sequence: Synthetic oligonucleotide
ccaugaagcagguucacag

SEQ ID NO: 872872 - RNA, 19 nt, Artificial Sequence
  Description of Artificial Sequence: Synthetic oligonucleotide
uucacagucucagccagga

SEQ ID NO: 872873 - RNA, 19 nt, Artificial Sequence
  Description of Artificial Sequence: Synthetic oligonucleotide
cacgguagagguacauugc

SEQ ID NO: 872874 - RNA, 19 nt, Artificial Sequence
  Description of Artificial Sequence: Synthetic oligonucleotide
uccggcaacagugcaaggc

SEQ ID NO: 872875 - RNA, 19 nt, Artificial Sequence
  Description of Artificial Sequence: Synthetic oligonucleotide
ucacgucgauaucaaaguc

SEQ ID NO: 872876 - RNA, 19 nt, Artificial Sequence
  Description of Artificial Sequence: Synthetic oligonucleotide
cuguuuuccaggugcggag

SEQ ID NO: 872877 - RNA, 19 nt, Artificial Sequence
  Description of Artificial Sequence: Synthetic oligonucleotide
aaguggguguaauuccgaa

SEQ ID NO: 872878 - RNA, 19 nt, Artificial Sequence
  Description of Artificial Sequence: Synthetic oligonucleotide
uaucugaccggcucuccca

SEQ ID NO: 872879 - RNA, 19 nt, Artificial Sequence
  Description of Artificial Sequence: Synthetic oligonucleotide
ucucucccgaguucuaaga

SEQ ID NO: 872880 - RNA, 19 nt, Artificial Sequence
  Description of Artificial Sequence: Synthetic oligonucleotide
agguauuccccaaaaucag

SEQ ID NO: 872881 - RNA, 19 nt, Artificial Sequence
  Description of Artificial Sequence: Synthetic oligonucleotide
ugaccgucacaggugagag

SEQ ID NO: 872882 - RNA, 19 nt, Artificial Sequence
  Description of Artificial Sequence: Synthetic oligonucleotide
uugacucgcucccuguagu

SEQ ID NO: 872883 - RNA, 19 nt, Artificial Sequence
  Description of Artificial Sequence: Synthetic oligonucleotide
gagagugggauccccugug

SEQ ID NO: 872884 - RNA, 19 nt, Artificial Sequence
  Description of Artificial Sequence: Synthetic oligonucleotide
agugggauccccuguggca

SEQ ID NO: 872885 - RNA, 19 nt, Artificial Sequence
  Description of Artificial Sequence: Synthetic oligonucleotide
agguaacugucguaggcgu

SEQ ID NO: 872886 - RNA, 19 nt, Artificial Sequence
  Description of Artificial Sequence: Synthetic oligonucleotide
guuucgaacacagaggcgu

SEQ ID NO: 872887 - RNA, 19 nt, Artificial Sequence
  Description of Artificial Sequence: Synthetic oligonucleotide
ugcucaggguggcaaauuc

SEQ ID NO: 872888 - RNA, 19 nt, Artificial Sequence
  Description of Artificial Sequence: Synthetic oligonucleotide
guaacaggggucucuccug

SEQ ID NO: 872889 - RNA, 19 nt, Artificial Sequence
  Description of Artificial Sequence: Synthetic oligonucleotide
augaggaaucuaggaaaac

SEQ ID NO: 872890 - RNA, 19 nt, Artificial Sequence
  Description of Artificial Sequence: Synthetic oligonucleotide
agagguacauugcgcucuc

SEQ ID NO: 872891 - RNA, 19 nt, Artificial Sequence
  Description of Artificial Sequence: Synthetic oligonucleotide
uucagagguauuccccaaa

SEQ ID NO: 872892 - RNA, 19 nt, Artificial Sequence
  Description of Artificial Sequence: Synthetic oligonucleotide
uggauagccuucucgcuuc

SEQ ID NO: 872893 - RNA, 19 nt, Artificial Sequence
  Description of Artificial Sequence: Synthetic oligonucleotide
gauagccaaaagcaaauuu

SEQ ID NO: 872894 - RNA, 19 nt, Artificial Sequence
  Description of Artificial Sequence: Synthetic oligonucleotide
ggugagaggucucagcuca

SEQ ID NO: 872895 - RNA, 19 nt, Artificial Sequence
  Description of Artificial Sequence: Synthetic oligonucleotide
cucaucguagggaaaggca

SEQ ID NO: 872896 - RNA, 19 nt, Artificial Sequence
  Description of Artificial Sequence: Synthetic oligonucleotide
cuggucgaaguggauagcc

SEQ ID NO: 872897 - RNA, 19 nt, Artificial Sequence
  Description of Artificial Sequence: Synthetic oligonucleotide
gcacgguagagguacauug

SEQ ID NO: 872898 - RNA, 19 nt, Artificial Sequence
  Description of Artificial Sequence: Synthetic oligonucleotide
gaacauggccuugacucgc

SEQ ID NO: 872899 - RNA, 19 nt, Artificial Sequence
  Description of Artificial Sequence: Synthetic oligonucleotide
uccaccacucuuuggaauu

SEQ ID NO: 872900 - RNA, 19 nt, Artificial Sequence
  Description of Artificial Sequence: Synthetic oligonucleotide
gaggaaucuaggaaaaccu

SEQ ID NO: 872901 - RNA, 19 nt, Artificial Sequence
  Description of Artificial Sequence: Synthetic oligonucleotide
agguacauugcgcucucga

SEQ ID NO: 872902 - RNA, 19 nt, Artificial Sequence
  Description of Artificial Sequence: Synthetic oligonucleotide
aauuccgaauggcucuguu

SEQ ID NO: 872903 - RNA, 19 nt, Artificial Sequence
  Description of Artificial Sequence: Synthetic oligonucleotide
gauagagguauuucacagu

SEQ ID NO: 872904 - RNA, 19 nt, Artificial Sequence
  Description of Artificial Sequence: Synthetic oligonucleotide
auggauacggugcccuugu

SEQ ID NO: 872905 - RNA, 19 nt, Artificial Sequence
  Description of Artificial Sequence: Synthetic oligonucleotide
aggaaucuaggaaaaccug

SEQ ID NO: 872906 - RNA, 19 nt, Artificial Sequence
  Description of Artificial Sequence: Synthetic oligonucleotide
augggaugagccucugugu

SEQ ID NO: 872907 - RNA, 19 nt, Artificial Sequence
  Description of Artificial Sequence: Synthetic oligonucleotide
uggucgaaguggauagccu

SEQ ID NO: 872908 - RNA, 19 nt, Artificial Sequence
  Description of Artificial Sequence: Synthetic oligonucleotide
cagaagauagagguauuuc

SEQ ID NO: 872909 - RNA, 19 nt, Artificial Sequence
  Description of Artificial Sequence: Synthetic oligonucleotide
gcgauuguccagcuugugg

SEQ ID NO: 872910 - RNA, 19 nt, Artificial Sequence
  Description of Artificial Sequence: Synthetic oligonucleotide
guguaauuccgaauggcuc

SEQ ID NO: 872911 - RNA, 19 nt, Artificial Sequence
  Description of Artificial Sequence: Synthetic oligonucleotide
gaagauguagccgccagcu

SEQ ID NO: 872912 - RNA, 19 nt, Artificial Sequence
  Description of Artificial Sequence: Synthetic oligonucleotide
ucuaagagagugggauccc

SEQ ID NO: 872913 - RNA, 19 nt, Artificial Sequence
  Description of Artificial Sequence: Synthetic oligonucleotide
cuccaugcgauuguccagc

SEQ ID NO: 872914 - RNA, 19 nt, Artificial Sequence
  Description of Artificial Sequence: Synthetic oligonucleotide
caauuagcgucagagagaa

SEQ ID NO: 872915 - RNA, 19 nt, Artificial Sequence
  Description of Artificial Sequence: Synthetic oligonucleotide
guucuaagagagugggauc

SEQ ID NO: 872916 - RNA, 19 nt, Artificial Sequence
  Description of Artificial Sequence: Synthetic oligonucleotide
caucaauuagcgucagaga

SEQ ID NO: 872917 - RNA, 19 nt, Artificial Sequence
  Description of Artificial Sequence: Synthetic oligonucleotide
gagguaccagucaucgaag

SEQ ID NO: 872918 - RNA, 19 nt, Artificial Sequence
  Description of Artificial Sequence: Synthetic oligonucleotide
aaagguccucauggcauug

SEQ ID NO: 872919 - RNA, 19 nt, Artificial Sequence
  Description of Artificial Sequence: Synthetic oligonucleotide
cuaagagagugggaucccc

SEQ ID NO: 872920 - RNA, 19 nt, Artificial Sequence
  Description of Artificial Sequence: Synthetic oligonucleotide
aguggguguaauuccgaau

SEQ ID NO: 872921 - RNA, 19 nt, Artificial Sequence
  Description of Artificial Sequence: Synthetic oligonucleotide
cagcccaauaucugaccgg

SEQ ID NO: 872922 - RNA, 19 nt, Artificial Sequence
  Description of Artificial Sequence: Synthetic oligonucleotide
cacaccagccuucuuugac

SEQ ID NO: 872923 - RNA, 19 nt, Artificial Sequence
  Description of Artificial Sequence: Synthetic oligonucleotide
guccucauggcauugucaa

SEQ ID NO: 872924 - RNA, 19 nt, Artificial Sequence
  Description of Artificial Sequence: Synthetic oligonucleotide
uagugggcggggucgggcg

SEQ ID NO: 872925 - RNA, 19 nt, Artificial Sequence
  Description of Artificial Sequence: Synthetic oligonucleotide
auugcgcucucgaugagcu

SEQ ID NO: 872926 - RNA, 19 nt, Artificial Sequence
  Description of Artificial Sequence: Synthetic oligonucleotide
gacucgcucccuguagugg

SEQ ID NO: 872927 - RNA, 19 nt, Artificial Sequence
  Description of Artificial Sequence: Synthetic oligonucleotide
agagagugggauccccugu

SEQ ID NO: 872928 - RNA, 19 nt, Artificial Sequence
  Description of Artificial Sequence: Synthetic oligonucleotide
cacccauuugccagugagc

SEQ ID NO: 872929 - RNA, 19 nt, Artificial Sequence
  Description of Artificial Sequence: Synthetic oligonucleotide
caaguccucuacuucccac

SEQ ID NO: 872930 - RNA, 19 nt, Artificial Sequence
  Description of Artificial Sequence: Synthetic oligonucleotide
ugucagugccgccgcagca

SEQ ID NO: 872931 - RNA, 19 nt, Artificial Sequence
  Description of Artificial Sequence: Synthetic oligonucleotide
cagcucaucguagggaaag

SEQ ID NO: 872932 - RNA, 19 nt, Artificial Sequence
  Description of Artificial Sequence: Synthetic oligonucleotide
ugacucgcucccuguagug

SEQ ID NO: 872933 - RNA, 19 nt, Artificial Sequence
  Description of Artificial Sequence: Synthetic oligonucleotide
gacuggcauggauacggug

SEQ ID NO: 872934 - RNA, 19 nt, Artificial Sequence
  Description of Artificial Sequence: Synthetic oligonucleotide
auggacuccacagcaucuc

SEQ ID NO: 872935 - RNA, 19 nt, Artificial Sequence
  Description of Artificial Sequence: Synthetic oligonucleotide
acccgcucauccuccgagc

SEQ ID NO: 872936 - RNA, 19 nt, Artificial Sequence
  Description of Artificial Sequence: Synthetic oligonucleotide
ucguguccugucagugccg

SEQ ID NO: 872937 - RNA, 19 nt, Artificial Sequence
  Description of Artificial Sequence: Synthetic oligonucleotide
agcgaguggagcucccuca

SEQ ID NO: 872938 - RNA, 19 nt, Artificial Sequence
  Description of Artificial Sequence: Synthetic oligonucleotide
guaggcgugguagaacaug

SEQ ID NO: 872939 - RNA, 19 nt, Artificial Sequence
  Description of Artificial Sequence: Synthetic oligonucleotide
ucuuuggaauucagaggua

SEQ ID NO: 872940 - RNA, 19 nt, Artificial Sequence
  Description of Artificial Sequence: Synthetic oligonucleotide
uccuguuuuccaggugcgg

SEQ ID NO: 872941 - RNA, 19 nt, Artificial Sequence
  Description of Artificial Sequence: Synthetic oligonucleotide
agguaccagucaucgaagu

SEQ ID NO: 872942 - RNA, 19 nt, Artificial Sequence
  Description of Artificial Sequence: Synthetic oligonucleotide
cuugagcgaguggagcucc

SEQ ID NO: 872943 - RNA, 19 nt, Artificial Sequence
  Description of Artificial Sequence: Synthetic oligonucleotide
gaccgucacaggugagagg

SEQ ID NO: 872944 - RNA, 19 nt, Artificial Sequence
  Description of Artificial Sequence: Synthetic oligonucleotide
ugaccggcucucccagagg

SEQ ID NO: 872945 - RNA, 19 nt, Artificial Sequence
  Description of Artificial Sequence: Synthetic oligonucleotide
ccagagguaccagucaucg

SEQ ID NO: 872946 - RNA, 19 nt, Artificial Sequence
  Description of Artificial Sequence: Synthetic oligonucleotide
cugaccggcucucccagag

SEQ ID NO: 872947 - RNA, 19 nt, Artificial Sequence
  Description of Artificial Sequence: Synthetic oligonucleotide
ucgaaguggauagccuucu

SEQ ID NO: 872948 - RNA, 19 nt, Artificial Sequence
  Description of Artificial Sequence: Synthetic oligonucleotide
gaucguggcaaauccacau

SEQ ID NO: 872949 - RNA, 19 nt, Artificial Sequence
  Description of Artificial Sequence: Synthetic oligonucleotide
guagagguacauugcgcuc

SEQ ID NO: 872950 - RNA, 19 nt, Artificial Sequence
  Description of Artificial Sequence: Synthetic oligonucleotide
agaaugacuccaugcgauu

SEQ ID NO: 872951 - RNA, 19 nt, Artificial Sequence
  Description of Artificial Sequence: Synthetic oligonucleotide
gucugaaaugcugggagga

SEQ ID NO: 872952 - RNA, 19 nt, Artificial Sequence
  Description of Artificial Sequence: Synthetic oligonucleotide
uguaucccugagcaauguu

SEQ ID NO: 872953 - RNA, 19 nt, Artificial Sequence
  Description of Artificial Sequence: Synthetic oligonucleotide
guaauuccgaauggcucug

SEQ ID NO: 872954 - RNA, 19 nt, Artificial Sequence
  Description of Artificial Sequence: Synthetic oligonucleotide
auucagagguauuccccaa

SEQ ID NO: 872955 - RNA, 19 nt, Artificial Sequence
  Description of Artificial Sequence: Synthetic oligonucleotide
guaggaguccacaccggcc

SEQ ID NO: 872956 - RNA, 19 nt, Artificial Sequence
  Description of Artificial Sequence: Synthetic oligonucleotide
ugauugccaaccagcccaa

SEQ ID NO: 872957 - RNA, 19 nt, Artificial Sequence
  Description of Artificial Sequence: Synthetic oligonucleotide
gggguucucugcuuggcag

SEQ ID NO: 872958 - RNA, 19 nt, Artificial Sequence
  Description of Artificial Sequence: Synthetic oligonucleotide
gguagagguacauugcgcu

SEQ ID NO: 872959 - RNA, 19 nt, Artificial Sequence
  Description of Artificial Sequence: Synthetic oligonucleotide
ccaaaaucagcaagguguc

SEQ ID NO: 872960 - RNA, 19 nt, Artificial Sequence
  Description of Artificial Sequence: Synthetic oligonucleotide
uagcgucagagagaagcug

SEQ ID NO: 872961 - RNA, 19 nt, Artificial Sequence
  Description of Artificial Sequence: Synthetic oligonucleotide
cucuagaaacaucgccaug

SEQ ID NO: 872962 - RNA, 19 nt, Artificial Sequence
  Description of Artificial Sequence: Synthetic oligonucleotide
cauugcgcucucgaugagc

SEQ ID NO: 872963 - RNA, 19 nt, Artificial Sequence
  Description of Artificial Sequence: Synthetic oligonucleotide
agcucaucguagggaaagg

SEQ ID NO: 872964 - RNA, 19 nt, Artificial Sequence
  Description of Artificial Sequence: Synthetic oligonucleotide
cuaggaaaaccuggcccag

SEQ ID NO: 872965 - RNA, 19 nt, Artificial Sequence
  Description of Artificial Sequence: Synthetic oligonucleotide
aggcgcaucagggccaauc

SEQ ID NO: 872966 - RNA, 19 nt, Artificial Sequence
  Description of Artificial Sequence: Synthetic oligonucleotide
ucaucgaaguggguguaau

SEQ ID NO: 872967 - RNA, 19 nt, Artificial Sequence
  Description of Artificial Sequence: Synthetic oligonucleotide
cgaaguggguguaauuccg

SEQ ID NO: 872968 - RNA, 19 nt, Artificial Sequence
  Description of Artificial Sequence: Synthetic oligonucleotide
uuccaggugcggaggguga

SEQ ID NO: 872969 - RNA, 19 nt, Artificial Sequence
  Description of Artificial Sequence: Synthetic oligonucleotide
agcggaaugaguagccgga

SEQ ID NO: 872970 - RNA, 19 nt, Artificial Sequence
  Description of Artificial Sequence: Synthetic oligonucleotide
auauccccaauaaggcucu

SEQ ID NO: 872971 - RNA, 19 nt, Artificial Sequence
  Description of Artificial Sequence: Synthetic oligonucleotide
gaugagcucuggucgaagu

SEQ ID NO: 872972 - RNA, 19 nt, Artificial Sequence
  Description of Artificial Sequence: Synthetic oligonucleotide
auacggugcccuuguacau

SEQ ID NO: 872973 - RNA, 19 nt, Artificial Sequence
  Description of Artificial Sequence: Synthetic oligonucleotide
cgaguucuaagagaguggg

SEQ ID NO: 872974 - RNA, 19 nt, Artificial Sequence
  Description of Artificial Sequence: Synthetic oligonucleotide
caauauccccaauaaggcu

SEQ ID NO: 872975 - RNA, 19 nt, Artificial Sequence
  Description of Artificial Sequence: Synthetic oligonucleotide
gaaguggguguaauuccga

SEQ ID NO: 872976 - RNA, 19 nt, Artificial Sequence
  Description of Artificial Sequence: Synthetic oligonucleotide
ucuggucgaaguggauagc

SEQ ID NO: 872977 - RNA, 19 nt, Artificial Sequence
  Description of Artificial Sequence: Synthetic oligonucleotide
ggaacacgcacacgaggcc

SEQ ID NO: 872978 - RNA, 19 nt, Artificial Sequence
  Description of Artificial Sequence: Synthetic oligonucleotide
ggagccguuguuguggaug

SEQ ID NO: 872979 - RNA, 19 nt, Artificial Sequence
  Description of Artificial Sequence: Synthetic oligonucleotide
cagugagcacgucuaugug

SEQ ID NO: 872980 - RNA, 19 nt, Artificial Sequence
  Description of Artificial Sequence: Synthetic oligonucleotide
caauaucugaccggcucuc

SEQ ID NO: 872981 - RNA, 19 nt, Artificial Sequence
  Description of Artificial Sequence: Synthetic oligonucleotide
aucguggcaaauccacauu

SEQ ID NO: 872982 - RNA, 19 nt, Artificial Sequence
  Description of Artificial Sequence: Synthetic oligonucleotide
agcucguguccugucagug

SEQ ID NO: 872983 - RNA, 19 nt, Artificial Sequence
  Description of Artificial Sequence: Synthetic oligonucleotide
uggaagugaagggcuggcu

SEQ ID NO: 872984 - RNA, 19 nt, Artificial Sequence
  Description of Artificial Sequence: Synthetic oligonucleotide
uuuuccaggugcggagggu

SEQ ID NO: 872985 - RNA, 19 nt, Artificial Sequence
  Description of Artificial Sequence: Synthetic oligonucleotide
ccugauagccaaaagcaaa

SEQ ID NO: 872986 - RNA, 19 nt, Artificial Sequence
  Description of Artificial Sequence: Synthetic oligonucleotide
gagguauuucacagucuca

SEQ ID NO: 872987 - RNA, 19 nt, Artificial Sequence
  Description of Artificial Sequence: Synthetic oligonucleotide
ccagugguuaugaggaauc

SEQ ID NO: 872988 - RNA, 19 nt, Artificial Sequence
  Description of Artificial Sequence: Synthetic oligonucleotide
ucugaagaccaggccagua

SEQ ID NO: 872989 - RNA, 19 nt, Artificial Sequence
  Description of Artificial Sequence: Synthetic oligonucleotide
ccacccauuugccagugag

SEQ ID NO: 872990 - RNA, 19 nt, Artificial Sequence
  Description of Artificial Sequence: Synthetic oligonucleotide
agugguuaugaggaaucua

SEQ ID NO: 872991 - RNA, 19 nt, Artificial Sequence
  Description of Artificial Sequence: Synthetic oligonucleotide
uagccgccagcucccagga

SEQ ID NO: 872992 - RNA, 19 nt, Artificial Sequence
  Description of Artificial Sequence: Synthetic oligonucleotide
accacucuuuggaauucag

SEQ ID NO: 872993 - RNA, 19 nt, Artificial Sequence
  Description of Artificial Sequence: Synthetic oligonucleotide
gguuucgaacacagaggcg

SEQ ID NO: 872994 - RNA, 19 nt, Artificial Sequence
  Description of Artificial Sequence: Synthetic oligonucleotide
cccaauaucugaccggcuc

SEQ ID NO: 872995 - RNA, 19 nt, Artificial Sequence
  Description of Artificial Sequence: Synthetic oligonucleotide
uccaugcgauuguccagcu

SEQ ID NO: 872996 - RNA, 19 nt, Artificial Sequence
  Description of Artificial Sequence: Synthetic oligonucleotide
gugggauccccuguggcac

SEQ ID NO: 872997 - RNA, 19 nt, Artificial Sequence
  Description of Artificial Sequence: Synthetic oligonucleotide
gugucgugaccgucacagg

SEQ ID NO: 872998 - RNA, 19 nt, Artificial Sequence
  Description of Artificial Sequence: Synthetic oligonucleotide
uguagugggcggggucggg

SEQ ID NO: 872999 - RNA, 19 nt, Artificial Sequence
  Description of Artificial Sequence: Synthetic oligonucleotide
ucgcucccuguagugggcg

SEQ ID NO: 873000 - RNA, 19 nt, Artificial Sequence
  Description of Artificial Sequence: Synthetic oligonucleotide
ugcguccugggccacccau

SEQ ID NO: 873001 - RNA, 19 nt, Artificial Sequence
  Description of Artificial Sequence: Synthetic oligonucleotide
gucgaaguggauagccuuc

SEQ ID NO: 873002 - RNA, 19 nt, Artificial Sequence
  Description of Artificial Sequence: Synthetic oligonucleotide
accugauagccaaaagcaa

SEQ ID NO: 873003 - RNA, 19 nt, Artificial Sequence
  Description of Artificial Sequence: Synthetic oligonucleotide
uccaggugcggagggugag

SEQ ID NO: 873004 - RNA, 19 nt, Artificial Sequence
  Description of Artificial Sequence: Synthetic oligonucleotide
uucgaacacagaggcguuc

SEQ ID NO: 873005 - RNA, 19 nt, Artificial Sequence
  Description of Artificial Sequence: Synthetic oligonucleotide
aauuagcgucagagagaag

SEQ ID NO: 873006 - RNA, 19 nt, Artificial Sequence
  Description of Artificial Sequence: Synthetic oligonucleotide
ucaaugggaugagccucug

SEQ ID NO: 873007 - RNA, 19 nt, Artificial Sequence
  Description of Artificial Sequence: Synthetic oligonucleotide
acauugcgcucucgaugag

SEQ ID NO: 873008 - RNA, 19 nt, Artificial Sequence
  Description of Artificial Sequence: Synthetic oligonucleotide
uccucauggcauugucaau

SEQ ID NO: 873009 - RNA, 19 nt, Artificial Sequence
  Description of Artificial Sequence: Synthetic oligonucleotide
ggaagugaagggcuggcua

SEQ ID NO: 873010 - RNA, 19 nt, Artificial Sequence
  Description of Artificial Sequence: Synthetic oligonucleotide
ugcgauuguccagcuugug

SEQ ID NO: 873011 - RNA, 19 nt, Artificial Sequence
  Description of Artificial Sequence: Synthetic oligonucleotide
ucccgaguucuaagagagu

SEQ ID NO: 873012 - RNA, 19 nt, Artificial Sequence
  Description of Artificial Sequence: Synthetic oligonucleotide
ggacuggaagacuggcaug

SEQ ID NO: 873013 - RNA, 19 nt, Artificial Sequence
  Description of Artificial Sequence: Synthetic oligonucleotide
uaauuccgaauggcucugu

SEQ ID NO: 873014 - RNA, 19 nt, Artificial Sequence
  Description of Artificial Sequence: Synthetic oligonucleotide
ggcguucacgucgauauca

SEQ ID NO: 873015 - RNA, 19 nt, Artificial Sequence
  Description of Artificial Sequence: Synthetic oligonucleotide
aguaggccuccaaggacug

SEQ ID NO: 873016 - RNA, 19 nt, Artificial Sequence
  Description of Artificial Sequence: Synthetic oligonucleotide
cuuuggaauucagagguau

SEQ ID NO: 873017 - RNA, 19 nt, Artificial Sequence
  Description of Artificial Sequence: Synthetic oligonucleotide
gagguacauugcgcucucg

SEQ ID NO: 873018 - RNA, 19 nt, Artificial Sequence
  Description of Artificial Sequence: Synthetic oligonucleotide
guacagguaacaggggucu

SEQ ID NO: 873019 - RNA, 19 nt, Artificial Sequence
  Description of Artificial Sequence: Synthetic oligonucleotide
gugaccgucacaggugaga

SEQ ID NO: 873020 - RNA, 19 nt, Artificial Sequence
  Description of Artificial Sequence: Synthetic oligonucleotide
gaaagguccucauggcauu

SEQ ID NO: 873021 - RNA, 19 nt, Artificial Sequence
  Description of Artificial Sequence: Synthetic oligonucleotide
auaaggcucugaagaccag

SEQ ID NO: 873022 - RNA, 19 nt, Artificial Sequence
  Description of Artificial Sequence: Synthetic oligonucleotide
gaguucuaagagaguggga

SEQ ID NO: 873023 - RNA, 19 nt, Artificial Sequence
  Description of Artificial Sequence: Synthetic oligonucleotide
ucugaccggcucucccaga

SEQ ID NO: 873024 - RNA, 19 nt, Artificial Sequence
  Description of Artificial Sequence: Synthetic oligonucleotide
ugccagugagcacgucuau

SEQ ID NO: 873025 - RNA, 19 nt, Artificial Sequence
  Description of Artificial Sequence: Synthetic oligonucleotide
caccagugaggcugcucag

SEQ ID NO: 873026 - RNA, 19 nt, Artificial Sequence
  Description of Artificial Sequence: Synthetic oligonucleotide
ggccaaucuggccacaucu

SEQ ID NO: 873027 - RNA, 19 nt, Artificial Sequence
  Description of Artificial Sequence: Synthetic oligonucleotide
ugagcgaguggagcucccu

SEQ ID NO: 873028 - RNA, 19 nt, Artificial Sequence
  Description of Artificial Sequence: Synthetic oligonucleotide
uaacugucguaggcguggu

SEQ ID NO: 873029 - RNA, 19 nt, Artificial Sequence
  Description of Artificial Sequence: Synthetic oligonucleotide
gcucaucguagggaaaggc

SEQ ID NO: 873030 - RNA, 19 nt, Artificial Sequence
  Description of Artificial Sequence: Synthetic oligonucleotide
ccuccuaccacucggaugu

SEQ ID NO: 873031 - RNA, 19 nt, Artificial Sequence
  Description of Artificial Sequence: Synthetic oligonucleotide
guagugggcggggucgggc

SEQ ID NO: 873032 - RNA, 19 nt, Artificial Sequence
  Description of Artificial Sequence: Synthetic oligonucleotide
acaccggccccaaugccug

SEQ ID NO: 873033 - RNA, 19 nt, Artificial Sequence
  Description of Artificial Sequence: Synthetic oligonucleotide
gcucguguccugucagugc

SEQ ID NO: 873034 - RNA, 19 nt, Artificial Sequence
  Description of Artificial Sequence: Synthetic oligonucleotide
cucccuguagugggcgggg

SEQ ID NO: 873035 - RNA, 19 nt, Artificial Sequence
  Description of Artificial Sequence: Synthetic oligonucleotide
acagaggcguucacgucga

SEQ ID NO: 873036 - RNA, 19 nt, Artificial Sequence
  Description of Artificial Sequence: Synthetic oligonucleotide
caccgccacccgcucaucc

SEQ ID NO: 873037 - RNA, 19 nt, Artificial Sequence
  Description of Artificial Sequence: Synthetic oligonucleotide
ccgagcggaaugaguagcc

SEQ ID NO: 873038 - RNA, 19 nt, Artificial Sequence
  Description of Artificial Sequence: Synthetic oligonucleotide
ccccaauaaggcucugaag

SEQ ID NO: 873039 - RNA, 19 nt, Artificial Sequence
  Description of Artificial Sequence: Synthetic oligonucleotide
cuguagugggcggggucgg

SEQ ID NO: 873040 - RNA, 19 nt, Artificial Sequence
  Description of Artificial Sequence: Synthetic oligonucleotide
cuccuggguucacaccaug

SEQ ID NO: 873041 - RNA, 19 nt, Artificial Sequence
  Description of Artificial Sequence: Synthetic oligonucleotide
guaggccuccaaggacugg

SEQ ID NO: 873042 - RNA, 19 nt, Artificial Sequence
  Description of Artificial Sequence: Synthetic oligonucleotide
agccuccggcaacagugca

SEQ ID NO: 873043 - RNA, 19 nt, Artificial Sequence
  Description of Artificial Sequence: Synthetic oligonucleotide
auuugccagugagcacguc

SEQ ID NO: 873044 - RNA, 19 nt, Artificial Sequence
  Description of Artificial Sequence: Synthetic oligonucleotide
gugagcacgucuaugugau

SEQ ID NO: 873045 - RNA, 19 nt, Artificial Sequence
  Description of Artificial Sequence: Synthetic oligonucleotide
uccugucagugccgccgca

SEQ ID NO: 873046 - RNA, 19 nt, Artificial Sequence
  Description of Artificial Sequence: Synthetic oligonucleotide
cgguagagguacauugcgc

SEQ ID NO: 873047 - RNA, 19 nt, Artificial Sequence
  Description of Artificial Sequence: Synthetic oligonucleotide
augcgauuguccagcuugu

SEQ ID NO: 873048 - RNA, 19 nt, Artificial Sequence
  Description of Artificial Sequence: Synthetic oligonucleotide
guggagccguuguugugga

SEQ ID NO: 873049 - RNA, 19 nt, Artificial Sequence
  Description of Artificial Sequence: Synthetic oligonucleotide
caccaugaagcagguucac

SEQ ID NO: 873050 - RNA, 19 nt, Artificial Sequence
  Description of Artificial Sequence: Synthetic oligonucleotide
ccagguacucaaaguagga

SEQ ID NO: 873051 - RNA, 19 nt, Artificial Sequence
  Description of Artificial Sequence: Synthetic oligonucleotide
uacagguaacaggggucuc

SEQ ID NO: 873052 - RNA, 19 nt, Artificial Sequence
  Description of Artificial Sequence: Synthetic oligonucleotide
gggugaaacagaagauaga

SEQ ID NO: 873053 - RNA, 19 nt, Artificial Sequence
  Description of Artificial Sequence: Synthetic oligonucleotide
acgaggccgagcggaauga

SEQ ID NO: 873054 - RNA, 19 nt, Artificial Sequence
  Description of Artificial Sequence: Synthetic oligonucleotide
gagaaccuccaccacucuu

SEQ ID NO: 873055 - RNA, 19 nt, Artificial Sequence
  Description of Artificial Sequence: Synthetic oligonucleotide
agaggcguucacgucgaua

SEQ ID NO: 873056 - RNA, 19 nt, Artificial Sequence
  Description of Artificial Sequence: Synthetic oligonucleotide
cacaccggccccaaugccu

SEQ ID NO: 873057 - RNA, 19 nt, Artificial Sequence
  Description of Artificial Sequence: Synthetic oligonucleotide
gccgagcggaaugaguagc

SEQ ID NO: 873058 - RNA, 19 nt, Artificial Sequence
  Description of Artificial Sequence: Synthetic oligonucleotide
gucaaugggaugagccucu

SEQ ID NO: 873059 - RNA, 19 nt, Artificial Sequence
  Description of Artificial Sequence: Synthetic oligonucleotide
gguacauugcgcucucgau

SEQ ID NO: 873060 - RNA, 19 nt, Artificial Sequence
  Description of Artificial Sequence: Synthetic oligonucleotide
gguccucauggcauuguca

SEQ ID NO: 873061 - RNA, 19 nt, Artificial Sequence
  Description of Artificial Sequence: Synthetic oligonucleotide
cccuccuaccacucggaug

SEQ ID NO: 873062 - RNA, 19 nt, Artificial Sequence
  Description of Artificial Sequence: Synthetic oligonucleotide
cccgcucauccuccgagcc

SEQ ID NO: 873063 - RNA, 19 nt, Artificial Sequence
  Description of Artificial Sequence: Synthetic oligonucleotide
cucggauguugguuucgaa

SEQ ID NO: 873064 - RNA, 19 nt, Artificial Sequence
  Description of Artificial Sequence: Synthetic oligonucleotide
ccacucuuuggaauucaga

SEQ ID NO: 873065 - RNA, 19 nt, Artificial Sequence
  Description of Artificial Sequence: Synthetic oligonucleotide
gcucccuguagugggcggg

SEQ ID NO: 873066 - RNA, 19 nt, Artificial Sequence
  Description of Artificial Sequence: Synthetic oligonucleotide
ccaggugucgugaccguca

SEQ ID NO: 873067 - RNA, 19 nt, Artificial Sequence
  Description of Artificial Sequence: Synthetic oligonucleotide
aggugucgugaccgucaca

SEQ ID NO: 873068 - RNA, 19 nt, Artificial Sequence
  Description of Artificial Sequence: Synthetic oligonucleotide
ggucgaaguggauagccuu

SEQ ID NO: 873069 - RNA, 19 nt, Artificial Sequence
  Description of Artificial Sequence: Synthetic oligonucleotide
gcgucagagagaagcugcc

SEQ ID NO: 873070 - RNA, 19 nt, Artificial Sequence
  Description of Artificial Sequence: Synthetic oligonucleotide
gccagugagcacgucuaug

SEQ ID NO: 873071 - RNA, 19 nt, Artificial Sequence
  Description of Artificial Sequence: Synthetic oligonucleotide
ggcuggcuagggcagcuga

SEQ ID NO: 873072 - RNA, 19 nt, Artificial Sequence
  Description of Artificial Sequence: Synthetic oligonucleotide
cauagagcucguguccugu

SEQ ID NO: 873073 - RNA, 19 nt, Artificial Sequence
  Description of Artificial Sequence: Synthetic oligonucleotide
caguuccauagggcaugcc

SEQ ID NO: 873074 - RNA, 19 nt, Artificial Sequence
  Description of Artificial Sequence: Synthetic oligonucleotide
gcacacgaggccgagcgga

SEQ ID NO: 873075 - RNA, 19 nt, Artificial Sequence
  Description of Artificial Sequence: Synthetic oligonucleotide
caucucucccgaguucuaa

SEQ ID NO: 873076 - RNA, 19 nt, Artificial Sequence
  Description of Artificial Sequence: Synthetic oligonucleotide
cgcuucuccacuguguauc

SEQ ID NO: 873077 - RNA, 19 nt, Artificial Sequence
  Description of Artificial Sequence: Synthetic oligonucleotide
ucccuguagugggcggggu

SEQ ID NO: 873078 - RNA, 19 nt, Artificial Sequence
  Description of Artificial Sequence: Synthetic oligonucleotide
caccacucuuuggaauuca

SEQ ID NO: 873079 - RNA, 19 nt, Artificial Sequence
  Description of Artificial Sequence: Synthetic oligonucleotide
uggcuccuuuuaccaggua

SEQ ID NO: 873080 - RNA, 19 nt, Artificial Sequence
  Description of Artificial Sequence: Synthetic oligonucleotide
ccuggguucacaccaugaa

SEQ ID NO: 873081 - RNA, 19 nt, Artificial Sequence
  Description of Artificial Sequence: Synthetic oligonucleotide
ccggaaaggcauagagcuc

SEQ ID NO: 873082 - RNA, 19 nt, Artificial Sequence
  Description of Artificial Sequence: Synthetic oligonucleotide
ccggcucucccagaggcgc

SEQ ID NO: 873083 - RNA, 19 nt, Artificial Sequence
  Description of Artificial Sequence: Synthetic oligonucleotide
cagagguauuccccaaaau

SEQ ID NO: 873084 - RNA, 19 nt, Artificial Sequence
  Description of Artificial Sequence: Synthetic oligonucleotide
uggagccguuguuguggau

SEQ ID NO: 873085 - RNA, 19 nt, Artificial Sequence
  Description of Artificial Sequence: Synthetic oligonucleotide
gggauccccuguggcacgg

SEQ ID NO: 873086 - RNA, 19 nt, Artificial Sequence
  Description of Artificial Sequence: Synthetic oligonucleotide
gcuugagcgaguggagcuc

SEQ ID NO: 873087 - RNA, 19 nt, Artificial Sequence
  Description of Artificial Sequence: Synthetic oligonucleotide
ccaauaucugaccggcucu

SEQ ID NO: 873088 - RNA, 19 nt, Artificial Sequence
  Description of Artificial Sequence: Synthetic oligonucleotide
cgagcggaaugaguagccg

SEQ ID NO: 873089 - RNA, 19 nt, Artificial Sequence
  Description of Artificial Sequence: Synthetic oligonucleotide
caucgaaguggguguaauu

SEQ ID NO: 873090 - RNA, 19 nt, Artificial Sequence
  Description of Artificial Sequence: Synthetic oligonucleotide
cgucuaugugauugccaac

SEQ ID NO: 873091 - RNA, 19 nt, Artificial Sequence
  Description of Artificial Sequence: Synthetic oligonucleotide
ccugucagugccgccgcag

SEQ ID NO: 873092 - RNA, 19 nt, Artificial Sequence
  Description of Artificial Sequence: Synthetic oligonucleotide
guguaucccugagcaaugu

SEQ ID NO: 873093 - RNA, 19 nt, Artificial Sequence
  Description of Artificial Sequence: Synthetic oligonucleotide
caccggccccaaugccugc

SEQ ID NO: 873094 - RNA, 19 nt, Artificial Sequence
  Description of Artificial Sequence: Synthetic oligonucleotide
cagugguuaugaggaaucu

SEQ ID NO: 873095 - RNA, 19 nt, Artificial Sequence
  Description of Artificial Sequence: Synthetic oligonucleotide
caaagguggagccguuguu

SEQ ID NO: 873096 - RNA, 19 nt, Artificial Sequence
  Description of Artificial Sequence: Synthetic oligonucleotide
acacgaggccgagcggaau

SEQ ID NO: 873097 - RNA, 19 nt, Artificial Sequence
  Description of Artificial Sequence: Synthetic oligonucleotide
gggcaucaauuagcgucag

SEQ ID NO: 873098 - RNA, 19 nt, Artificial Sequence
  Description of Artificial Sequence: Synthetic oligonucleotide
gggccaaucuggccacauc

SEQ ID NO: 873099 - RNA, 19 nt, Artificial Sequence
  Description of Artificial Sequence: Synthetic oligonucleotide
cgucagagagaagcugccc

SEQ ID NO: 873100 - RNA, 19 nt, Artificial Sequence
  Description of Artificial Sequence: Synthetic oligonucleotide
cuggcgcaccauggugcag

SEQ ID NO: 873101 - RNA, 19 nt, Artificial Sequence
  Description of Artificial Sequence: Synthetic oligonucleotide
cauugucaauauccccaau

SEQ ID NO: 873102 - RNA, 19 nt, Artificial Sequence
  Description of Artificial Sequence: Synthetic oligonucleotide
cguguccugucagugccgc

SEQ ID NO: 873103 - RNA, 19 nt, Artificial Sequence
  Description of Artificial Sequence: Synthetic oligonucleotide
agcucuggucgaaguggau

SEQ ID NO: 873104 - RNA, 19 nt, Artificial Sequence
  Description of Artificial Sequence: Synthetic oligonucleotide
gggguccagaacagggcca

SEQ ID NO: 873105 - RNA, 19 nt, Artificial Sequence
  Description of Artificial Sequence: Synthetic oligonucleotide
ccuggcgcaccauggugca

SEQ ID NO: 873106 - RNA, 19 nt, Artificial Sequence
  Description of Artificial Sequence: Synthetic oligonucleotide
ccaggugcggagggugagc

SEQ ID NO: 873107 - RNA, 19 nt, Artificial Sequence
  Description of Artificial Sequence: Synthetic oligonucleotide
cgucgauaucaaaguccac

SEQ ID NO: 873108 - RNA, 19 nt, Artificial Sequence
  Description of Artificial Sequence: Synthetic oligonucleotide
cagugcaaggcagcagggu

SEQ ID NO: 873109 - RNA, 19 nt, Artificial Sequence
  Description of Artificial Sequence: Synthetic oligonucleotide
cccuguagugggcgggguc

SEQ ID NO: 873110 - RNA, 19 nt, Artificial Sequence
  Description of Artificial Sequence: Synthetic oligonucleotide
gcguucacgucgauaucaa

SEQ ID NO: 873111 - RNA, 19 nt, Artificial Sequence
  Description of Artificial Sequence: Synthetic oligonucleotide
ggagaaccuccaccacucu

SEQ ID NO: 873112 - RNA, 19 nt, Artificial Sequence
  Description of Artificial Sequence: Synthetic oligonucleotide
guggcacgguagagguaca

SEQ ID NO: 873113 - RNA, 19 nt, Artificial Sequence
  Description of Artificial Sequence: Synthetic oligonucleotide
gcggaaugaguagccggaa

SEQ ID NO: 873114 - RNA, 19 nt, Artificial Sequence
  Description of Artificial Sequence: Synthetic oligonucleotide
gauugccaaccagcccaau

SEQ ID NO: 873115 - RNA, 19 nt, Artificial Sequence
  Description of Artificial Sequence: Synthetic oligonucleotide
gcgcggugccgucggggcc

SEQ ID NO: 873116 - RNA, 19 nt, Artificial Sequence
  Description of Artificial Sequence: Synthetic oligonucleotide
cgaauggcucuguuguacu

SEQ ID NO: 873117 - RNA, 19 nt, Artificial Sequence
  Description of Artificial Sequence: Synthetic oligonucleotide
gccuugacucgcucccugu

SEQ ID NO: 873118 - RNA, 19 nt, Artificial Sequence
  Description of Artificial Sequence: Synthetic oligonucleotide
ccgucacaggugagagguc

SEQ ID NO: 873119 - RNA, 19 nt, Artificial Sequence
  Description of Artificial Sequence: Synthetic oligonucleotide
gggccacccauuugccagu

SEQ ID NO: 873120 - RNA, 19 nt, Artificial Sequence
  Description of Artificial Sequence: Synthetic oligonucleotide
ggcccagcaaugccaguuu

SEQ ID NO: 873121 - RNA, 19 nt, Artificial Sequence
  Description of Artificial Sequence: Synthetic oligonucleotide
cguucacgucgauaucaaa

SEQ ID NO: 873122 - RNA, 19 nt, Artificial Sequence
  Description of Artificial Sequence: Synthetic oligonucleotide
gccccaaugccugcguccu

SEQ ID NO: 873123 - RNA, 19 nt, Artificial Sequence
  Description of Artificial Sequence: Synthetic oligonucleotide
cgucacaggugagaggucu

SEQ ID NO: 873124 - RNA, 19 nt, Artificial Sequence
  Description of Artificial Sequence: Synthetic oligonucleotide
ggcacgguagagguacauu

SEQ ID NO: 873125 - RNA, 19 nt, Artificial Sequence
  Description of Artificial Sequence: Synthetic oligonucleotide
gcugcucaggguggcaaau

SEQ ID NO: 873126 - RNA, 19 nt, Artificial Sequence
  Description of Artificial Sequence: Synthetic oligonucleotide
gcauggauacggugcccuu

SEQ ID NO: 873127 - RNA, 19 nt, Artificial Sequence
  Description of Artificial Sequence: Synthetic oligonucleotide
gccaaucuggccacaucuu

SEQ ID NO: 873128 - RNA, 19 nt, Artificial Sequence
  Description of Artificial Sequence: Synthetic oligonucleotide
cagggccaaucuggccaca

SEQ ID NO: 873129 - RNA, 19 nt, Artificial Sequence
  Description of Artificial Sequence: Synthetic oligonucleotide
gcaucucucccgaguucua

SEQ ID NO: 873130 - RNA, 19 nt, Artificial Sequence
  Description of Artificial Sequence: Synthetic oligonucleotide
cgauaucaaaguccacguu

SEQ ID NO: 873131 - RNA, 19 nt, Artificial Sequence
  Description of Artificial Sequence: Synthetic oligonucleotide
gcccuccuaccacucggau

SEQ ID NO: 873132 - RNA, 19 nt, Artificial Sequence
  Description of Artificial Sequence: Synthetic oligonucleotide
gcccaauaucugaccggcu

SEQ ID NO: 873133 - RNA, 19 nt, Artificial Sequence
  Description of Artificial Sequence: Synthetic oligonucleotide
cguaggcgugguagaacau

SEQ ID NO: 873134 - RNA, 19 nt, Artificial Sequence
  Description of Artificial Sequence: Synthetic oligonucleotide
gcggugccgucggggccug

SEQ ID NO: 873135 - RNA, 19 nt, Artificial Sequence
  Description of Artificial Sequence: Synthetic oligonucleotide
cccggagguccuugaucgu

SEQ ID NO: 873136 - RNA, 19 nt, Artificial Sequence
  Description of Artificial Sequence: Synthetic oligonucleotide
ccaugcgauuguccagcuu

SEQ ID NO: 873137 - RNA, 19 nt, Artificial Sequence
  Description of Artificial Sequence: Synthetic oligonucleotide
ccaccgccacccgcucauc

SEQ ID NO: 873138 - RNA, 19 nt, Artificial Sequence
  Description of Artificial Sequence: Synthetic oligonucleotide
ccccaggugucgugaccgu

SEQ ID NO: 873139 - RNA, 19 nt, Artificial Sequence
  Description of Artificial Sequence: Synthetic oligonucleotide
cgcggugccgucggggccu

SEQ ID NO: 873140 - RNA, 19 nt, Artificial Sequence
  Description of Artificial Sequence: Synthetic oligonucleotide
cccugagcucgucgucuuu

SEQ ID NO: 873141 - RNA, 19 nt, Artificial Sequence
  Description of Artificial Sequence: Synthetic oligonucleotide
cggugccgucggggccugg

SEQ ID NO: 873142 - RNA, 19 nt, Artificial Sequence
  Description of Artificial Sequence: Synthetic oligonucleotide
aucaguuacaccuugcagc

SEQ ID NO: 873143 - RNA, 19 nt, Artificial Sequence
  Description of Artificial Sequence: Synthetic oligonucleotide
auaaauccuacuuaaauca

SEQ ID NO: 873144 - RNA, 19 nt, Artificial Sequence
  Description of Artificial Sequence: Synthetic oligonucleotide
cuuacugaagucaauacgc

SEQ ID NO: 873145 - RNA, 19 nt, Artificial Sequence
  Description of Artificial Sequence: Synthetic oligonucleotide
uguguaaccuuucuguacg

SEQ ID NO: 873146 - RNA, 19 nt, Artificial Sequence
  Description of Artificial Sequence: Synthetic oligonucleotide
aguaacauuucauggggcc

SEQ ID NO: 873147 - RNA, 19 nt, Artificial Sequence
  Description of Artificial Sequence: Synthetic oligonucleotide
uuggaucaaaaucagauac

SEQ ID NO: 873148 - RNA, 19 nt, Artificial Sequence
  Description of Artificial Sequence: Synthetic oligonucleotide
uuaacgaucucaauaaauc

SEQ ID NO: 873149 - RNA, 19 nt, Artificial Sequence
  Description of Artificial Sequence: Synthetic oligonucleotide
uguuacacaauccucguca

SEQ ID NO: 873150 - RNA, 19 nt, Artificial Sequence
  Description of Artificial Sequence: Synthetic oligonucleotide
aacauaucuagccacguga

SEQ ID NO: 873151 - RNA, 19 nt, Artificial Sequence
  Description of Artificial Sequence: Synthetic oligonucleotide
acaccuugcagcuagacag

SEQ ID NO: 873152 - RNA, 19 nt, Artificial Sequence
  Description of Artificial Sequence: Synthetic oligonucleotide
gaaaccauccaucaguuac

SEQ ID NO: 873153 - RNA, 19 nt, Artificial Sequence
  Description of Artificial Sequence: Synthetic oligonucleotide
uguaacuugaguucuggcc

SEQ ID NO: 873154 - RNA, 19 nt, Artificial Sequence
  Description of Artificial Sequence: Synthetic oligonucleotide
acaguuguaaucuugcaug

SEQ ID NO: 873155 - RNA, 19 nt, Artificial Sequence
  Description of Artificial Sequence: Synthetic oligonucleotide
aaaucagauacaaagagaa

SEQ ID NO: 873156 - RNA, 19 nt, Artificial Sequence
  Description of Artificial Sequence: Synthetic oligonucleotide
accaaucucuuguaaaccc

SEQ ID NO: 873157 - RNA, 19 nt, Artificial Sequence
  Description of Artificial Sequence: Synthetic oligonucleotide
uuaauugguaaauccauac

SEQ ID NO: 873158 - RNA, 19 nt, Artificial Sequence
  Description of Artificial Sequence: Synthetic oligonucleotide
uuaccauaaaguaacauuu

SEQ ID NO: 873159 - RNA, 19 nt, Artificial Sequence
  Description of Artificial Sequence: Synthetic oligonucleotide
aauuaaauccuccauuguu

SEQ ID NO: 873160 - RNA, 19 nt, Artificial Sequence
  Description of Artificial Sequence: Synthetic oligonucleotide
guguacaucaaaaugagcc

SEQ ID NO: 873161 - RNA, 19 nt, Artificial Sequence
  Description of Artificial Sequence: Synthetic oligonucleotide
gauucuuugacuuuggagu

SEQ ID NO: 873162 - RNA, 19 nt, Artificial Sequence
  Description of Artificial Sequence: Synthetic oligonucleotide
uuuaacucugguaaccaca

SEQ ID NO: 873163 - RNA, 19 nt, Artificial Sequence
  Description of Artificial Sequence: Synthetic oligonucleotide
uuaacucugguaaccacag

SEQ ID NO: 873164 - RNA, 19 nt, Artificial Sequence
  Description of Artificial Sequence: Synthetic oligonucleotide
uaacgaucucaauaaaucc

SEQ ID NO: 873165 - RNA, 19 nt, Artificial Sequence
  Description of Artificial Sequence: Synthetic oligonucleotide
aaacacacuccaaauaguc

SEQ ID NO: 873166 - RNA, 19 nt, Artificial Sequence
  Description of Artificial Sequence: Synthetic oligonucleotide
aauccuacuuaaaucagag

SEQ ID NO: 873167 - RNA, 19 nt, Artificial Sequence
  Description of Artificial Sequence: Synthetic oligonucleotide
ugugacuuaguuaacgauc

SEQ ID NO: 873168 - RNA, 19 nt, Artificial Sequence
  Description of Artificial Sequence: Synthetic oligonucleotide
uguagucacguuauagugc

SEQ ID NO: 873169 - RNA, 19 nt, Artificial Sequence
  Description of Artificial Sequence: Synthetic oligonucleotide
acacuucuaauucaaacug

SEQ ID NO: 873170 - RNA, 19 nt, Artificial Sequence
  Description of Artificial Sequence: Synthetic oligonucleotide
agagaagcccgguauauuc

SEQ ID NO: 873171 - RNA, 19 nt, Artificial Sequence
  Description of Artificial Sequence: Synthetic oligonucleotide
cuuuagagaaccaauaaaa

SEQ ID NO: 873172 - RNA, 19 nt, Artificial Sequence
  Description of Artificial Sequence: Synthetic oligonucleotide
uaguuaacgaucucaauaa

SEQ ID NO: 873173 - RNA, 19 nt, Artificial Sequence
  Description of Artificial Sequence: Synthetic oligonucleotide
uguacaucaaaaugagcca

SEQ ID NO: 873174 - RNA, 19 nt, Artificial Sequence
  Description of Artificial Sequence: Synthetic oligonucleotide
uacuuaucauuguugacug

SEQ ID NO: 873175 - RNA, 19 nt, Artificial Sequence
  Description of Artificial Sequence: Synthetic oligonucleotide
ucuaguuguagucacguua

SEQ ID NO: 873176 - RNA, 19 nt, Artificial Sequence
  Description of Artificial Sequence: Synthetic oligonucleotide
aguugguugcccuggauuc

SEQ ID NO: 873177 - RNA, 19 nt, Artificial Sequence
  Description of Artificial Sequence: Synthetic oligonucleotide
cuucuguggaagaacagcc

SEQ ID NO: 873178 - RNA, 19 nt, Artificial Sequence
  Description of Artificial Sequence: Synthetic oligonucleotide
aaaaccaauccacgggucu

SEQ ID NO: 873179 - RNA, 19 nt, Artificial Sequence
  Description of Artificial Sequence: Synthetic oligonucleotide
uaguguguaaccuuucugu

SEQ ID NO: 873180 - RNA, 19 nt, Artificial Sequence
  Description of Artificial Sequence: Synthetic oligonucleotide
uaauugguaaauccauaca

SEQ ID NO: 873181 - RNA, 19 nt, Artificial Sequence
  Description of Artificial Sequence: Synthetic oligonucleotide
uuauagugcagcuuucgcu

SEQ ID NO: 873182 - RNA, 19 nt, Artificial Sequence
  Description of Artificial Sequence: Synthetic oligonucleotide
auacuuaucauuguugacu

SEQ ID NO: 873183 - RNA, 19 nt, Artificial Sequence
  Description of Artificial Sequence: Synthetic oligonucleotide
agauacaaagagaagcccg

SEQ ID NO: 873184 - RNA, 19 nt, Artificial Sequence
  Description of Artificial Sequence: Synthetic oligonucleotide
guugacuggacauacuuac

SEQ ID NO: 873185 - RNA, 19 nt, Artificial Sequence
  Description of Artificial Sequence: Synthetic oligonucleotide
ucguuaacgugucugcucc

SEQ ID NO: 873186 - RNA, 19 nt, Artificial Sequence
  Description of Artificial Sequence: Synthetic oligonucleotide
cacacuaucaucacuugug

SEQ ID NO: 873187 - RNA, 19 nt, Artificial Sequence
  Description of Artificial Sequence: Synthetic oligonucleotide
auaucuuccaccaaucucu

SEQ ID NO: 873188 - RNA, 19 nt, Artificial Sequence
  Description of Artificial Sequence: Synthetic oligonucleotide
aacuaguuuaauugguaaa

SEQ ID NO: 873189 - RNA, 19 nt, Artificial Sequence
  Description of Artificial Sequence: Synthetic oligonucleotide
uuaguguguaaccuuucug

SEQ ID NO: 873190 - RNA, 19 nt, Artificial Sequence
  Description of Artificial Sequence: Synthetic oligonucleotide
ucaguuacaccuugcagcu

SEQ ID NO: 873191 - RNA, 19 nt, Artificial Sequence
  Description of Artificial Sequence: Synthetic oligonucleotide
aaaucagacugcguuugac

SEQ ID NO: 873192 - RNA, 19 nt, Artificial Sequence
  Description of Artificial Sequence: Synthetic oligonucleotide
caguuacuaacauaucuag

SEQ ID NO: 873193 - RNA, 19 nt, Artificial Sequence
  Description of Artificial Sequence: Synthetic oligonucleotide
uccuaguaagugcagugag

SEQ ID NO: 873194 - RNA, 19 nt, Artificial Sequence
  Description of Artificial Sequence: Synthetic oligonucleotide
uuuaauugguaaauccaua

SEQ ID NO: 873195 - RNA, 19 nt, Artificial Sequence
  Description of Artificial Sequence: Synthetic oligonucleotide
uuggcuagaagcagaaggu

SEQ ID NO: 873196 - RNA, 19 nt, Artificial Sequence
  Description of Artificial Sequence: Synthetic oligonucleotide
uuuauaccacguauuaaau

SEQ ID NO: 873197 - RNA, 19 nt, Artificial Sequence
  Description of Artificial Sequence: Synthetic oligonucleotide
ugcguuugacacuuuagug

SEQ ID NO: 873198 - RNA, 19 nt, Artificial Sequence
  Description of Artificial Sequence: Synthetic oligonucleotide
agucacguuauagugcagc

SEQ ID NO: 873199 - RNA, 19 nt, Artificial Sequence
  Description of Artificial Sequence: Synthetic oligonucleotide
aguuacuaacauaucuagc

SEQ ID NO: 873200 - RNA, 19 nt, Artificial Sequence
  Description of Artificial Sequence: Synthetic oligonucleotide
uggugauuuagacaccaca

SEQ ID NO: 873201 - RNA, 19 nt, Artificial Sequence
  Description of Artificial Sequence: Synthetic oligonucleotide
acuuccauugagcggcacc

SEQ ID NO: 873202 - RNA, 19 nt, Artificial Sequence
  Description of Artificial Sequence: Synthetic oligonucleotide
uacuaacauaucuagccac

SEQ ID NO: 873203 - RNA, 19 nt, Artificial Sequence
  Description of Artificial Sequence: Synthetic oligonucleotide
ugguuucuagcuuuagcag

SEQ ID NO: 873204 - RNA, 19 nt, Artificial Sequence
  Description of Artificial Sequence: Synthetic oligonucleotide
uaacuaguuuaauugguaa

SEQ ID NO: 873205 - RNA, 19 nt, Artificial Sequence
  Description of Artificial Sequence: Synthetic oligonucleotide
uguacgaaguccacgugcu

SEQ ID NO: 873206 - RNA, 19 nt, Artificial Sequence
  Description of Artificial Sequence: Synthetic oligonucleotide
uagucucuauuuaacaguc

SEQ ID NO: 873207 - RNA, 19 nt, Artificial Sequence
  Description of Artificial Sequence: Synthetic oligonucleotide
uggaucaaaaucagauaca

SEQ ID NO: 873208 - RNA, 19 nt, Artificial Sequence
  Description of Artificial Sequence: Synthetic oligonucleotide
uccccuauggaagugaaca

SEQ ID NO: 873209 - RNA, 19 nt, Artificial Sequence
  Description of Artificial Sequence: Synthetic oligonucleotide
uguacagaaagcucuguua

SEQ ID NO: 873210 - RNA, 19 nt, Artificial Sequence
  Description of Artificial Sequence: Synthetic oligonucleotide
auguaacuugaguucuggc

SEQ ID NO: 873211 - RNA, 19 nt, Artificial Sequence
  Description of Artificial Sequence: Synthetic oligonucleotide
agucuugaaagccauucga

SEQ ID NO: 873212 - RNA, 19 nt, Artificial Sequence
  Description of Artificial Sequence: Synthetic oligonucleotide
ucuagcuuuagcaggcggu

SEQ ID NO: 873213 - RNA, 19 nt, Artificial Sequence
  Description of Artificial Sequence: Synthetic oligonucleotide
agaaccuuauccaauccuc

SEQ ID NO: 873214 - RNA, 19 nt, Artificial Sequence
  Description of Artificial Sequence: Synthetic oligonucleotide
agaagcccgguauauucac

SEQ ID NO: 873215 - RNA, 19 nt, Artificial Sequence
  Description of Artificial Sequence: Synthetic oligonucleotide
gaagguagguggcugugag

SEQ ID NO: 873216 - RNA, 19 nt, Artificial Sequence
  Description of Artificial Sequence: Synthetic oligonucleotide
gaaccuuauccaauccucg

SEQ ID NO: 873217 - RNA, 19 nt, Artificial Sequence
  Description of Artificial Sequence: Synthetic oligonucleotide
agauccacuuccauugagc

SEQ ID NO: 873218 - RNA, 19 nt, Artificial Sequence
  Description of Artificial Sequence: Synthetic oligonucleotide
acuaacauaucuagccacg

SEQ ID NO: 873219 - RNA, 19 nt, Artificial Sequence
  Description of Artificial Sequence: Synthetic oligonucleotide
gacacuugucguuaacgug

SEQ ID NO: 873220 - RNA, 19 nt, Artificial Sequence
  Description of Artificial Sequence: Synthetic oligonucleotide
ugagaaccuuauccaaucc

SEQ ID NO: 873221 - RNA, 19 nt, Artificial Sequence
  Description of Artificial Sequence: Synthetic oligonucleotide
guagucacguuauagugca

SEQ ID NO: 873222 - RNA, 19 nt, Artificial Sequence
  Description of Artificial Sequence: Synthetic oligonucleotide
acuaguuuaauugguaaau

SEQ ID NO: 873223 - RNA, 19 nt, Artificial Sequence
  Description of Artificial Sequence: Synthetic oligonucleotide
ugaaaaugacagagaguug

SEQ ID NO: 873224 - RNA, 19 nt, Artificial Sequence
  Description of Artificial Sequence: Synthetic oligonucleotide
ucuauuaauccagccacac

SEQ ID NO: 873225 - RNA, 19 nt, Artificial Sequence
  Description of Artificial Sequence: Synthetic oligonucleotide
auaugugccugguugagau

SEQ ID NO: 873226 - RNA, 19 nt, Artificial Sequence
  Description of Artificial Sequence: Synthetic oligonucleotide
aaggcauauuugauaacag

SEQ ID NO: 873227 - RNA, 19 nt, Artificial Sequence
  Description of Artificial Sequence: Synthetic oligonucleotide
gagacuuagggagauuacc

SEQ ID NO: 873228 - RNA, 19 nt, Artificial Sequence
  Description of Artificial Sequence: Synthetic oligonucleotide
uuaugcaaaugaauucuua

SEQ ID NO: 873229 - RNA, 19 nt, Artificial Sequence
  Description of Artificial Sequence: Synthetic oligonucleotide
aaauccuacuuaaaucaga

SEQ ID NO: 873230 - RNA, 19 nt, Artificial Sequence
  Description of Artificial Sequence: Synthetic oligonucleotide
uaccacguauuaaaugugu

SEQ ID NO: 873231 - RNA, 19 nt, Artificial Sequence
  Description of Artificial Sequence: Synthetic oligonucleotide
guuauagugcagcuuucgc

SEQ ID NO: 873232 - RNA, 19 nt, Artificial Sequence
  Description of Artificial Sequence: Synthetic oligonucleotide
ugccacaaugaauuaaauc

SEQ ID NO: 873233 - RNA, 19 nt, Artificial Sequence
  Description of Artificial Sequence: Synthetic oligonucleotide
aacauuucauggggccugc

SEQ ID NO: 873234 - RNA, 19 nt, Artificial Sequence
  Description of Artificial Sequence: Synthetic oligonucleotide
uugucguuaacgugucugc

SEQ ID NO: 873235 - RNA, 19 nt, Artificial Sequence
  Description of Artificial Sequence: Synthetic oligonucleotide
cuguacgaaguccacgugc

SEQ ID NO: 873236 - RNA, 19 nt, Artificial Sequence
  Description of Artificial Sequence: Synthetic oligonucleotide
gacauacuuacugaaguca

SEQ ID NO: 873237 - RNA, 19 nt, Artificial Sequence
  Description of Artificial Sequence: Synthetic oligonucleotide
uucuuacuaacuggggucc

SEQ ID NO: 873238 - RNA, 19 nt, Artificial Sequence
  Description of Artificial Sequence: Synthetic oligonucleotide
uaccauaaaguaacauuuc

SEQ ID NO: 873239 - RNA, 19 nt, Artificial Sequence
  Description of Artificial Sequence: Synthetic oligonucleotide
ucgagguuuuauuuggauc

SEQ ID NO: 873240 - RNA, 19 nt, Artificial Sequence
  Description of Artificial Sequence: Synthetic oligonucleotide
auaucuagccacgugauuu

SEQ ID NO: 873241 - RNA, 19 nt, Artificial Sequence
  Description of Artificial Sequence: Synthetic oligonucleotide
ugcauacuacuggaguugg

SEQ ID NO: 873242 - RNA, 19 nt, Artificial Sequence
  Description of Artificial Sequence: Synthetic oligonucleotide
uacaccuugcagcuagaca

SEQ ID NO: 873243 - RNA, 19 nt, Artificial Sequence
  Description of Artificial Sequence: Synthetic oligonucleotide
caugcauccgggcaggaug

SEQ ID NO: 873244 - RNA, 19 nt, Artificial Sequence
  Description of Artificial Sequence: Synthetic oligonucleotide
ugcuugguaaccuguggug

SEQ ID NO: 873245 - RNA, 19 nt, Artificial Sequence
  Description of Artificial Sequence: Synthetic oligonucleotide
aaucucuuguaaacccagg

SEQ ID NO: 873246 - RNA, 19 nt, Artificial Sequence
  Description of Artificial Sequence: Synthetic oligonucleotide
gacuuaguuaacgaucuca

SEQ ID NO: 873247 - RNA, 19 nt, Artificial Sequence
  Description of Artificial Sequence: Synthetic oligonucleotide
acuuguggucauaucuucc

SEQ ID NO: 873248 - RNA, 19 nt, Artificial Sequence
  Description of Artificial Sequence: Synthetic oligonucleotide
aguguacaucaaaaugagc

SEQ ID NO: 873249 - RNA, 19 nt, Artificial Sequence
  Description of Artificial Sequence: Synthetic oligonucleotide
uuagggguauccuccauau

SEQ ID NO: 873250 - RNA, 19 nt, Artificial Sequence
  Description of Artificial Sequence: Synthetic oligonucleotide
caggcgucacccuuaagcc

SEQ ID NO: 873251 - RNA, 19 nt, Artificial Sequence
  Description of Artificial Sequence: Synthetic oligonucleotide
cuuagggagauuaccauaa

SEQ ID NO: 873252 - RNA, 19 nt, Artificial Sequence
  Description of Artificial Sequence: Synthetic oligonucleotide
agcugugacuuaguuaacg

SEQ ID NO: 873253 - RNA, 19 nt, Artificial Sequence
  Description of Artificial Sequence: Synthetic oligonucleotide
aauccacgggucuucuugu

SEQ ID NO: 873254 - RNA, 19 nt, Artificial Sequence
  Description of Artificial Sequence: Synthetic oligonucleotide
ggucauaucuuccaggcuc

SEQ ID NO: 873255 - RNA, 19 nt, Artificial Sequence
  Description of Artificial Sequence: Synthetic oligonucleotide
ccuauggaagugaacauag

SEQ ID NO: 873256 - RNA, 19 nt, Artificial Sequence
  Description of Artificial Sequence: Synthetic oligonucleotide
caucaguuacaccuugcag

SEQ ID NO: 873257 - RNA, 19 nt, Artificial Sequence
  Description of Artificial Sequence: Synthetic oligonucleotide
aagcccgguauauucacaa

SEQ ID NO: 873258 - RNA, 19 nt, Artificial Sequence
  Description of Artificial Sequence: Synthetic oligonucleotide
cuugucguuaacgugucug

SEQ ID NO: 873259 - RNA, 19 nt, Artificial Sequence
  Description of Artificial Sequence: Synthetic oligonucleotide
auccauacaaauguaacuu

SEQ ID NO: 873260 - RNA, 19 nt, Artificial Sequence
  Description of Artificial Sequence: Synthetic oligonucleotide
caauccacgggucuucuug

SEQ ID NO: 873261 - RNA, 19 nt, Artificial Sequence
  Description of Artificial Sequence: Synthetic oligonucleotide
cauuucauggggccugcgg

SEQ ID NO: 873262 - RNA, 19 nt, Artificial Sequence
  Description of Artificial Sequence: Synthetic oligonucleotide
caaaaucagacugcguuug

SEQ ID NO: 873263 - RNA, 19 nt, Artificial Sequence
  Description of Artificial Sequence: Synthetic oligonucleotide
uuuagggguauccuccaua

SEQ ID NO: 873264 - RNA, 19 nt, Artificial Sequence
  Description of Artificial Sequence: Synthetic oligonucleotide
guaacuugaguucuggccu

SEQ ID NO: 873265 - RNA, 19 nt, Artificial Sequence
  Description of Artificial Sequence: Synthetic oligonucleotide
uccucgucaaggugaauca

SEQ ID NO: 873266 - RNA, 19 nt, Artificial Sequence
  Description of Artificial Sequence: Synthetic oligonucleotide
acuuaucauuguugacugg

SEQ ID NO: 873267 - RNA, 19 nt, Artificial Sequence
  Description of Artificial Sequence: Synthetic oligonucleotide
cucuauuuaacagucuuga

SEQ ID NO: 873268 - RNA, 19 nt, Artificial Sequence
  Description of Artificial Sequence: Synthetic oligonucleotide
gccauuauuucauucagga

SEQ ID NO: 873269 - RNA, 19 nt, Artificial Sequence
  Description of Artificial Sequence: Synthetic oligonucleotide
ucggauacuuaucauuguu

SEQ ID NO: 873270 - RNA, 19 nt, Artificial Sequence
  Description of Artificial Sequence: Synthetic oligonucleotide
acaauccucgucaagguga

SEQ ID NO: 873271 - RNA, 19 nt, Artificial Sequence
  Description of Artificial Sequence: Synthetic oligonucleotide
ugagacuuagggagauuac

SEQ ID NO: 873272 - RNA, 19 nt, Artificial Sequence
  Description of Artificial Sequence: Synthetic oligonucleotide
uguugacuggacauacuua

SEQ ID NO: 873273 - RNA, 19 nt, Artificial Sequence
  Description of Artificial Sequence: Synthetic oligonucleotide
acuggacauacuuacugaa

SEQ ID NO: 873274 - RNA, 19 nt, Artificial Sequence
  Description of Artificial Sequence: Synthetic oligonucleotide
cagucuugaaagccauucg

SEQ ID NO: 873275 - RNA, 19 nt, Artificial Sequence
  Description of Artificial Sequence: Synthetic oligonucleotide
uacuaacugggguccuugg

SEQ ID NO: 873276 - RNA, 19 nt, Artificial Sequence
  Description of Artificial Sequence: Synthetic oligonucleotide
uuaauccagccacacuauc

SEQ ID NO: 873277 - RNA, 19 nt, Artificial Sequence
  Description of Artificial Sequence: Synthetic oligonucleotide
ucacuuguggucauaucuu

SEQ ID NO: 873278 - RNA, 19 nt, Artificial Sequence
  Description of Artificial Sequence: Synthetic oligonucleotide
acccuuaagccgcugucuc

SEQ ID NO: 873279 - RNA, 19 nt, Artificial Sequence
  Description of Artificial Sequence: Synthetic oligonucleotide
auccgggcaggauggaaac

SEQ ID NO: 873280 - RNA, 19 nt, Artificial Sequence
  Description of Artificial Sequence: Synthetic oligonucleotide
guuauugcggugauguaca

SEQ ID NO: 873281 - RNA, 19 nt, Artificial Sequence
  Description of Artificial Sequence: Synthetic oligonucleotide
cagauacaaagagaagccc

SEQ ID NO: 873282 - RNA, 19 nt, Artificial Sequence
  Description of Artificial Sequence: Synthetic oligonucleotide
gugagaaccuuauccaauc

SEQ ID NO: 873283 - RNA, 19 nt, Artificial Sequence
  Description of Artificial Sequence: Synthetic oligonucleotide
accuuauccaauccucgcu

SEQ ID NO: 873284 - RNA, 19 nt, Artificial Sequence
  Description of Artificial Sequence: Synthetic oligonucleotide
guuguagucacguuauagu

SEQ ID NO: 873285 - RNA, 19 nt, Artificial Sequence
  Description of Artificial Sequence: Synthetic oligonucleotide
aaccaauccacgggucuuc

SEQ ID NO: 873286 - RNA, 19 nt, Artificial Sequence
  Description of Artificial Sequence: Synthetic oligonucleotide
ucuguacgaaguccacgug

SEQ ID NO: 873287 - RNA, 19 nt, Artificial Sequence
  Description of Artificial Sequence: Synthetic oligonucleotide
uuaacgugucugcuccugu

SEQ ID NO: 873288 - RNA, 19 nt, Artificial Sequence
  Description of Artificial Sequence: Synthetic oligonucleotide
guguguaaccuuucuguac

SEQ ID NO: 873289 - RNA, 19 nt, Artificial Sequence
  Description of Artificial Sequence: Synthetic oligonucleotide
caggaagagcugacaaucc

SEQ ID NO: 873290 - RNA, 19 nt, Artificial Sequence
  Description of Artificial Sequence: Synthetic oligonucleotide
uugccuguuauugcgguga

SEQ ID NO: 873291 - RNA, 19 nt, Artificial Sequence
  Description of Artificial Sequence: Synthetic oligonucleotide
auggaagugaacauagaaa

SEQ ID NO: 873292 - RNA, 19 nt, Artificial Sequence
  Description of Artificial Sequence: Synthetic oligonucleotide
guuuaacucugguaaccac

SEQ ID NO: 873293 - RNA, 19 nt, Artificial Sequence
  Description of Artificial Sequence: Synthetic oligonucleotide
uucgagguuuuauuuggau

SEQ ID NO: 873294 - RNA, 19 nt, Artificial Sequence
  Description of Artificial Sequence: Synthetic oligonucleotide
cuaguaagugcagugagaa

SEQ ID NO: 873295 - RNA, 19 nt, Artificial Sequence
  Description of Artificial Sequence: Synthetic oligonucleotide
uucggauacuuaucauugu

SEQ ID NO: 873296 - RNA, 19 nt, Artificial Sequence
  Description of Artificial Sequence: Synthetic oligonucleotide
cuaacuaguuuaauuggua

SEQ ID NO: 873297 - RNA, 19 nt, Artificial Sequence
  Description of Artificial Sequence: Synthetic oligonucleotide
uccaauccucgcucaaggc

SEQ ID NO: 873298 - RNA, 19 nt, Artificial Sequence
  Description of Artificial Sequence: Synthetic oligonucleotide
agucuaguuguagucacgu

SEQ ID NO: 873299 - RNA, 19 nt, Artificial Sequence
  Description of Artificial Sequence: Synthetic oligonucleotide
uuacuaacugggguccuug

SEQ ID NO: 873300 - RNA, 19 nt, Artificial Sequence
  Description of Artificial Sequence: Synthetic oligonucleotide
uuauugcggugauguacag

SEQ ID NO: 873301 - RNA, 19 nt, Artificial Sequence
  Description of Artificial Sequence: Synthetic oligonucleotide
aggcgucacccuuaagccg

SEQ ID NO: 873302 - RNA, 19 nt, Artificial Sequence
  Description of Artificial Sequence: Synthetic oligonucleotide
aguguguaaccuuucugua

SEQ ID NO: 873303 - RNA, 19 nt, Artificial Sequence
  Description of Artificial Sequence: Synthetic oligonucleotide
ugguuuggcgaugugagua

SEQ ID NO: 873304 - RNA, 19 nt, Artificial Sequence
  Description of Artificial Sequence: Synthetic oligonucleotide
gcuagaagcagaagguagg

SEQ ID NO: 873305 - RNA, 19 nt, Artificial Sequence
  Description of Artificial Sequence: Synthetic oligonucleotide
ccgguauauucacaaaugg

SEQ ID NO: 873306 - RNA, 19 nt, Artificial Sequence
  Description of Artificial Sequence: Synthetic oligonucleotide
ccaggcgucacccuuaagc

SEQ ID NO: 873307 - RNA, 19 nt, Artificial Sequence
  Description of Artificial Sequence: Synthetic oligonucleotide
caaugcuugguaaccugug

SEQ ID NO: 873308 - RNA, 19 nt, Artificial Sequence
  Description of Artificial Sequence: Synthetic oligonucleotide
aauacaaauuuggggccaa

SEQ ID NO: 873309 - RNA, 19 nt, Artificial Sequence
  Description of Artificial Sequence: Synthetic oligonucleotide
ugagauccacuuccauuga

SEQ ID NO: 873310 - RNA, 19 nt, Artificial Sequence
  Description of Artificial Sequence: Synthetic oligonucleotide
ucagggcuaaugacacuug

SEQ ID NO: 873311 - RNA, 19 nt, Artificial Sequence
  Description of Artificial Sequence: Synthetic oligonucleotide
acuuaguuaacgaucucaa

SEQ ID NO: 873312 - RNA, 19 nt, Artificial Sequence
  Description of Artificial Sequence: Synthetic oligonucleotide
gugugcaaugguuuggcga

SEQ ID NO: 873313 - RNA, 19 nt, Artificial Sequence
  Description of Artificial Sequence: Synthetic oligonucleotide
ucuagccacgugauuuuaa

SEQ ID NO: 873314 - RNA, 19 nt, Artificial Sequence
  Description of Artificial Sequence: Synthetic oligonucleotide
acagagaguugguugcccu

SEQ ID NO: 873315 - RNA, 19 nt, Artificial Sequence
  Description of Artificial Sequence: Synthetic oligonucleotide
accacgucggguuucugga

SEQ ID NO: 873316 - RNA, 19 nt, Artificial Sequence
  Description of Artificial Sequence: Synthetic oligonucleotide
uugcagcuagacaggauau

SEQ ID NO: 873317 - RNA, 19 nt, Artificial Sequence
  Description of Artificial Sequence: Synthetic oligonucleotide
cagucuaguuguagucacg

SEQ ID NO: 873318 - RNA, 19 nt, Artificial Sequence
  Description of Artificial Sequence: Synthetic oligonucleotide
uuagggagauuaccauaaa

SEQ ID NO: 873319 - RNA, 19 nt, Artificial Sequence
  Description of Artificial Sequence: Synthetic oligonucleotide
cuagcuuuagcaggcggug

SEQ ID NO: 873320 - RNA, 19 nt, Artificial Sequence
  Description of Artificial Sequence: Synthetic oligonucleotide
gggagauuaccauaaagua

SEQ ID NO: 873321 - RNA, 19 nt, Artificial Sequence
  Description of Artificial Sequence: Synthetic oligonucleotide
ucauggggccugcgguucg

SEQ ID NO: 873322 - RNA, 19 nt, Artificial Sequence
  Description of Artificial Sequence: Synthetic oligonucleotide
agagaaccaauaaaaugaa

SEQ ID NO: 873323 - RNA, 19 nt, Artificial Sequence
  Description of Artificial Sequence: Synthetic oligonucleotide
gugggaagcuguaaacgag

SEQ ID NO: 873324 - RNA, 19 nt, Artificial Sequence
  Description of Artificial Sequence: Synthetic oligonucleotide
ugcgguucggauacuuauc

SEQ ID NO: 873325 - RNA, 19 nt, Artificial Sequence
  Description of Artificial Sequence: Synthetic oligonucleotide
ugugaguauuucucucuua

SEQ ID NO: 873326 - RNA, 19 nt, Artificial Sequence
  Description of Artificial Sequence: Synthetic oligonucleotide
caaggugaaucaaaggagu

SEQ ID NO: 873327 - RNA, 19 nt, Artificial Sequence
  Description of Artificial Sequence: Synthetic oligonucleotide
cucuuguaaacccaggcgu

SEQ ID NO: 873328 - RNA, 19 nt, Artificial Sequence
  Description of Artificial Sequence: Synthetic oligonucleotide
uuagcaggcggugugcaau

SEQ ID NO: 873329 - RNA, 19 nt, Artificial Sequence
  Description of Artificial Sequence: Synthetic oligonucleotide
caccuugcagcuagacagg

SEQ ID NO: 873330 - RNA, 19 nt, Artificial Sequence
  Description of Artificial Sequence: Synthetic oligonucleotide
uaucuagccacgugauuuu

SEQ ID NO: 873331 - RNA, 19 nt, Artificial Sequence
  Description of Artificial Sequence: Synthetic oligonucleotide
gagaaccuuauccaauccu

SEQ ID NO: 873332 - RNA, 19 nt, Artificial Sequence
  Description of Artificial Sequence: Synthetic oligonucleotide
uugguugcccuggauucag

SEQ ID NO: 873333 - RNA, 19 nt, Artificial Sequence
  Description of Artificial Sequence: Synthetic oligonucleotide
auccuacuuaaaucagaga

SEQ ID NO: 873334 - RNA, 19 nt, Artificial Sequence
  Description of Artificial Sequence: Synthetic oligonucleotide
gucguuaacgugucugcuc

SEQ ID NO: 873335 - RNA, 19 nt, Artificial Sequence
  Description of Artificial Sequence: Synthetic oligonucleotide
gugucuggggagcugauaa

SEQ ID NO: 873336 - RNA, 19 nt, Artificial Sequence
  Description of Artificial Sequence: Synthetic oligonucleotide
guuuaauugguaaauccau

SEQ ID NO: 873337 - RNA, 19 nt, Artificial Sequence
  Description of Artificial Sequence: Synthetic oligonucleotide
agggcuaaugacacuuguc

SEQ ID NO: 873338 - RNA, 19 nt, Artificial Sequence
  Description of Artificial Sequence: Synthetic oligonucleotide
cacaauccucgucaaggug

SEQ ID NO: 873339 - RNA, 19 nt, Artificial Sequence
  Description of Artificial Sequence: Synthetic oligonucleotide
accagucuaguuguaguca

SEQ ID NO: 873340 - RNA, 19 nt, Artificial Sequence
  Description of Artificial Sequence: Synthetic oligonucleotide
ugcaaugguuuggcgaugu

SEQ ID NO: 873341 - RNA, 19 nt, Artificial Sequence
  Description of Artificial Sequence: Synthetic oligonucleotide
uggcgaugugaguauuucu

SEQ ID NO: 873342 - RNA, 19 nt, Artificial Sequence
  Description of Artificial Sequence: Synthetic oligonucleotide
auacaaauuuggggccaac

SEQ ID NO: 873343 - RNA, 19 nt, Artificial Sequence
  Description of Artificial Sequence: Synthetic oligonucleotide
ccacguauuaaauguguug

SEQ ID NO: 873344 - RNA, 19 nt, Artificial Sequence
  Description of Artificial Sequence: Synthetic oligonucleotide
ggagauuaccauaaaguaa

SEQ ID NO: 873345 - RNA, 19 nt, Artificial Sequence
  Description of Artificial Sequence: Synthetic oligonucleotide
ugucguuaacgugucugcu

SEQ ID NO: 873346 - RNA, 19 nt, Artificial Sequence
  Description of Artificial Sequence: Synthetic oligonucleotide
uaagccgcugucuccguau

SEQ ID NO: 873347 - RNA, 19 nt, Artificial Sequence
  Description of Artificial Sequence: Synthetic oligonucleotide
agugagaaccuuauccaau

SEQ ID NO: 873348 - RNA, 19 nt, Artificial Sequence
  Description of Artificial Sequence: Synthetic oligonucleotide
guaaucuugcaugauccaa

SEQ ID NO: 873349 - RNA, 19 nt, Artificial Sequence
  Description of Artificial Sequence: Synthetic oligonucleotide
gcuuucgcuuucuuggccc

SEQ ID NO: 873350 - RNA, 19 nt, Artificial Sequence
  Description of Artificial Sequence: Synthetic oligonucleotide
acguauuaaauguguuguu

SEQ ID NO: 873351 - RNA, 19 nt, Artificial Sequence
  Description of Artificial Sequence: Synthetic oligonucleotide
aaaccaauccacgggucuu

SEQ ID NO: 873352 - RNA, 19 nt, Artificial Sequence
  Description of Artificial Sequence: Synthetic oligonucleotide
cacguauuaaauguguugu

SEQ ID NO: 873353 - RNA, 19 nt, Artificial Sequence
  Description of Artificial Sequence: Synthetic oligonucleotide
aucauuugauucugcccaa

SEQ ID NO: 873354 - RNA, 19 nt, Artificial Sequence
  Description of Artificial Sequence: Synthetic oligonucleotide
ggaguagugcuggagauuc

SEQ ID NO: 873355 - RNA, 19 nt, Artificial Sequence
  Description of Artificial Sequence: Synthetic oligonucleotide
guuaacgugucugcuccug

SEQ ID NO: 873356 - RNA, 19 nt, Artificial Sequence
  Description of Artificial Sequence: Synthetic oligonucleotide
augcauccgggcaggaugg

SEQ ID NO: 873357 - RNA, 19 nt, Artificial Sequence
  Description of Artificial Sequence: Synthetic oligonucleotide
uugcuccuaguaagugcag

SEQ ID NO: 873358 - RNA, 19 nt, Artificial Sequence
  Description of Artificial Sequence: Synthetic oligonucleotide
ggacauacuuacugaaguc

SEQ ID NO: 873359 - RNA, 19 nt, Artificial Sequence
  Description of Artificial Sequence: Synthetic oligonucleotide
augugaguauuucucucuu

SEQ ID NO: 873360 - RNA, 19 nt, Artificial Sequence
  Description of Artificial Sequence: Synthetic oligonucleotide
cauucaggagcuggucagg

SEQ ID NO: 873361 - RNA, 19 nt, Artificial Sequence
  Description of Artificial Sequence: Synthetic oligonucleotide
cuaguuguagucacguuau

SEQ ID NO: 873362 - RNA, 19 nt, Artificial Sequence
  Description of Artificial Sequence: Synthetic oligonucleotide
cuagccacgugauuuuaaa

SEQ ID NO: 873363 - RNA, 19 nt, Artificial Sequence
  Description of Artificial Sequence: Synthetic oligonucleotide
ucggguuucuggagcuggc

SEQ ID NO: 873364 - RNA, 19 nt, Artificial Sequence
  Description of Artificial Sequence: Synthetic oligonucleotide
aagccgcugucuccguaug

SEQ ID NO: 873365 - RNA, 19 nt, Artificial Sequence
  Description of Artificial Sequence: Synthetic oligonucleotide
acgaucucaauaaauccua

SEQ ID NO: 873366 - RNA, 19 nt, Artificial Sequence
  Description of Artificial Sequence: Synthetic oligonucleotide
ugccaaaaucagacugcgu

SEQ ID NO: 873367 - RNA, 19 nt, Artificial Sequence
  Description of Artificial Sequence: Synthetic oligonucleotide
caaugguuuggcgauguga

SEQ ID NO: 873368 - RNA, 19 nt, Artificial Sequence
  Description of Artificial Sequence: Synthetic oligonucleotide
cccgguauauucacaaaug

SEQ ID NO: 873369 - RNA, 19 nt, Artificial Sequence
  Description of Artificial Sequence: Synthetic oligonucleotide
gguugcccuggauucagcc

SEQ ID NO: 873370 - RNA, 19 nt, Artificial Sequence
  Description of Artificial Sequence: Synthetic oligonucleotide
cucaacuggacaguuguaa

SEQ ID NO: 873371 - RNA, 19 nt, Artificial Sequence
  Description of Artificial Sequence: Synthetic oligonucleotide
uagucacguuauagugcag

SEQ ID NO: 873372 - RNA, 19 nt, Artificial Sequence
  Description of Artificial Sequence: Synthetic oligonucleotide
ccguaugcccaccacgucg

SEQ ID NO: 873373 - RNA, 19 nt, Artificial Sequence
  Description of Artificial Sequence: Synthetic oligonucleotide
cacgggucuucuuguacac

SEQ ID NO: 873374 - RNA, 19 nt, Artificial Sequence
  Description of Artificial Sequence: Synthetic oligonucleotide
gcugugacuuaguuaacga

SEQ ID NO: 873375 - RNA, 19 nt, Artificial Sequence
  Description of Artificial Sequence: Synthetic oligonucleotide
ggcgaugugaguauuucuc

SEQ ID NO: 873376 - RNA, 19 nt, Artificial Sequence
  Description of Artificial Sequence: Synthetic oligonucleotide
aauccccuauggaagugaa

SEQ ID NO: 873377 - RNA, 19 nt, Artificial Sequence
  Description of Artificial Sequence: Synthetic oligonucleotide
cuauggaagugaacauaga

SEQ ID NO: 873378 - RNA, 19 nt, Artificial Sequence
  Description of Artificial Sequence: Synthetic oligonucleotide
cacuugucguuaacguguc

SEQ ID NO: 873379 - RNA, 19 nt, Artificial Sequence
  Description of Artificial Sequence: Synthetic oligonucleotide
uugacacuuuaguguguaa

SEQ ID NO: 873380 - RNA, 19 nt, Artificial Sequence
  Description of Artificial Sequence: Synthetic oligonucleotide
cacucaacuggacaguugu

SEQ ID NO: 873381 - RNA, 19 nt, Artificial Sequence
  Description of Artificial Sequence: Synthetic oligonucleotide
ccuuaagccgcugucuccg

SEQ ID NO: 873382 - RNA, 19 nt, Artificial Sequence
  Description of Artificial Sequence: Synthetic oligonucleotide
uuaagccgcugucuccgua

SEQ ID NO: 873383 - RNA, 19 nt, Artificial Sequence
  Description of Artificial Sequence: Synthetic oligonucleotide
ugagcggcaccgccucuca

SEQ ID NO: 873384 - RNA, 19 nt, Artificial Sequence
  Description of Artificial Sequence: Synthetic oligonucleotide
ucuuacuaacugggguccu

SEQ ID NO: 873385 - RNA, 19 nt, Artificial Sequence
  Description of Artificial Sequence: Synthetic oligonucleotide
cacguuauagugcagcuuu

SEQ ID NO: 873386 - RNA, 19 nt, Artificial Sequence
  Description of Artificial Sequence: Synthetic oligonucleotide
ccagucuaguuguagucac

SEQ ID NO: 873387 - RNA, 19 nt, Artificial Sequence
  Description of Artificial Sequence: Synthetic oligonucleotide
cugcauugucacuuugcca

SEQ ID NO: 873388 - RNA, 19 nt, Artificial Sequence
  Description of Artificial Sequence: Synthetic oligonucleotide
uaucaucacuuguggucau

SEQ ID NO: 873389 - RNA, 19 nt, Artificial Sequence
  Description of Artificial Sequence: Synthetic oligonucleotide
acguuauagugcagcuuuc

SEQ ID NO: 873390 - RNA, 19 nt, Artificial Sequence
  Description of Artificial Sequence: Synthetic oligonucleotide
aguuguaaucuugcaugau

SEQ ID NO: 873391 - RNA, 19 nt, Artificial Sequence
  Description of Artificial Sequence: Synthetic oligonucleotide
ccuuauccaauccucgcuc

SEQ ID NO: 873392 - RNA, 19 nt, Artificial Sequence
  Description of Artificial Sequence: Synthetic oligonucleotide
ugcagcuagacaggauauc

SEQ ID NO: 873393 - RNA, 19 nt, Artificial Sequence
  Description of Artificial Sequence: Synthetic oligonucleotide
acaauccccuauggaagug

SEQ ID NO: 873394 - RNA, 19 nt, Artificial Sequence
  Description of Artificial Sequence: Synthetic oligonucleotide
gccaacauugagacuuagg

SEQ ID NO: 873395 - RNA, 19 nt, Artificial Sequence
  Description of Artificial Sequence: Synthetic oligonucleotide
cggauacuuaucauuguug

SEQ ID NO: 873396 - RNA, 19 nt, Artificial Sequence
  Description of Artificial Sequence: Synthetic oligonucleotide
aggauucaccagucuaguu

SEQ ID NO: 873397 - RNA, 19 nt, Artificial Sequence
  Description of Artificial Sequence: Synthetic oligonucleotide
ccuuuagagaaccaauaaa

SEQ ID NO: 873398 - RNA, 19 nt, Artificial Sequence
  Description of Artificial Sequence: Synthetic oligonucleotide
gcgguucggauacuuauca

SEQ ID NO: 873399 - RNA, 19 nt, Artificial Sequence
  Description of Artificial Sequence: Synthetic oligonucleotide
agaguugguugcccuggau

SEQ ID NO: 873400 - RNA, 19 nt, Artificial Sequence
  Description of Artificial Sequence: Synthetic oligonucleotide
ucacguuauagugcagcuu

SEQ ID NO: 873401 - RNA, 19 nt, Artificial Sequence
  Description of Artificial Sequence: Synthetic oligonucleotide
gucacguuauagugcagcu

SEQ ID NO: 873402 - RNA, 19 nt, Artificial Sequence
  Description of Artificial Sequence: Synthetic oligonucleotide
auucgagguuuuauuugga

SEQ ID NO: 873403 - RNA, 19 nt, Artificial Sequence
  Description of Artificial Sequence: Synthetic oligonucleotide
cauccgggcaggauggaaa

SEQ ID NO: 873404 - RNA, 19 nt, Artificial Sequence
  Description of Artificial Sequence: Synthetic oligonucleotide
ugguugcccuggauucagc

SEQ ID NO: 873405 - RNA, 19 nt, Artificial Sequence
  Description of Artificial Sequence: Synthetic oligonucleotide
ggcggugugcaaugguuug

SEQ ID NO: 873406 - RNA, 19 nt, Artificial Sequence
  Description of Artificial Sequence: Synthetic oligonucleotide
uagcuuuagcaggcggugu

SEQ ID NO: 873407 - RNA, 19 nt, Artificial Sequence
  Description of Artificial Sequence: Synthetic oligonucleotide
acuugucguuaacgugucu

SEQ ID NO: 873408 - RNA, 19 nt, Artificial Sequence
  Description of Artificial Sequence: Synthetic oligonucleotide
agcuguaaacgagcuggcu

SEQ ID NO: 873409 - RNA, 19 nt, Artificial Sequence
  Description of Artificial Sequence: Synthetic oligonucleotide
guuugccuguuauugcggu

SEQ ID NO: 873410 - RNA, 19 nt, Artificial Sequence
  Description of Artificial Sequence: Synthetic oligonucleotide
cuuucgcuuucuuggccca

SEQ ID NO: 873411 - RNA, 19 nt, Artificial Sequence
  Description of Artificial Sequence: Synthetic oligonucleotide
cuccuaguaagugcaguga

SEQ ID NO: 873412 - RNA, 19 nt, Artificial Sequence
  Description of Artificial Sequence: Synthetic oligonucleotide
gagaguugguugcccugga

SEQ ID NO: 873413 - RNA, 19 nt, Artificial Sequence
  Description of Artificial Sequence: Synthetic oligonucleotide
acauuucauggggccugcg

SEQ ID NO: 873414 - RNA, 19 nt, Artificial Sequence
  Description of Artificial Sequence: Synthetic oligonucleotide
gagguuuuauuuggaucaa

SEQ ID NO: 873415 - RNA, 19 nt, Artificial Sequence
  Description of Artificial Sequence: Synthetic oligonucleotide
caauccucgucaaggugaa

SEQ ID NO: 873416 - RNA, 19 nt, Artificial Sequence
  Description of Artificial Sequence: Synthetic oligonucleotide
guaugcccaccacgucggg

SEQ ID NO: 873417 - RNA, 19 nt, Artificial Sequence
  Description of Artificial Sequence: Synthetic oligonucleotide
ugccuguuauugcggugau

SEQ ID NO: 873418 - RNA, 19 nt, Artificial Sequence
  Description of Artificial Sequence: Synthetic oligonucleotide
accacguauuaaauguguu

SEQ ID NO: 873419 - RNA, 19 nt, Artificial Sequence
  Description of Artificial Sequence: Synthetic oligonucleotide
cguuauagugcagcuuucg

SEQ ID NO: 873420 - RNA, 19 nt, Artificial Sequence
  Description of Artificial Sequence: Synthetic oligonucleotide
gaagcccgguauauucaca

SEQ ID NO: 873421 - RNA, 19 nt, Artificial Sequence
  Description of Artificial Sequence: Synthetic oligonucleotide
gcggugauguacagaaagc

SEQ ID NO: 873422 - RNA, 19 nt, Artificial Sequence
  Description of Artificial Sequence: Synthetic oligonucleotide
uccgggcaggauggaaacc

SEQ ID NO: 873423 - RNA, 19 nt, Artificial Sequence
  Description of Artificial Sequence: Synthetic oligonucleotide
guugguugcccuggauuca

SEQ ID NO: 873424 - RNA, 19 nt, Artificial Sequence
  Description of Artificial Sequence: Synthetic oligonucleotide
cuuuagcaggcggugugca

SEQ ID NO: 873425 - RNA, 19 nt, Artificial Sequence
  Description of Artificial Sequence: Synthetic oligonucleotide
auugagcggcaccgccucu

SEQ ID NO: 873426 - RNA, 19 nt, Artificial Sequence
  Description of Artificial Sequence: Synthetic oligonucleotide
ggagauuccacaggagaaa

SEQ ID NO: 873427 - RNA, 19 nt, Artificial Sequence
  Description of Artificial Sequence: Synthetic oligonucleotide
cugugacuuaguuaacgau

SEQ ID NO: 873428 - RNA, 19 nt, Artificial Sequence
  Description of Artificial Sequence: Synthetic oligonucleotide
uugagcggcaccgccucuc

SEQ ID NO: 873429 - RNA, 19 nt, Artificial Sequence
  Description of Artificial Sequence: Synthetic oligonucleotide
ccuaacuaguuuaauuggu

SEQ ID NO: 873430 - RNA, 19 nt, Artificial Sequence
  Description of Artificial Sequence: Synthetic oligonucleotide
gcuaaugacacuugucguu

SEQ ID NO: 873431 - RNA, 19 nt, Artificial Sequence
  Description of Artificial Sequence: Synthetic oligonucleotide
agcccgguauauucacaaa

SEQ ID NO: 873432 - RNA, 19 nt, Artificial Sequence
  Description of Artificial Sequence: Synthetic oligonucleotide
ccuaguaagugcagugaga

SEQ ID NO: 873433 - RNA, 19 nt, Artificial Sequence
  Description of Artificial Sequence: Synthetic oligonucleotide
caauccccuauggaaguga

SEQ ID NO: 873434 - RNA, 19 nt, Artificial Sequence
  Description of Artificial Sequence: Synthetic oligonucleotide
ggauaucuuccaccaaucu

SEQ ID NO: 873435 - RNA, 19 nt, Artificial Sequence
  Description of Artificial Sequence: Synthetic oligonucleotide
cuagaagcagaagguaggu

SEQ ID NO: 873436 - RNA, 19 nt, Artificial Sequence
  Description of Artificial Sequence: Synthetic oligonucleotide
ggggccaacauugagacuu

SEQ ID NO: 873437 - RNA, 19 nt, Artificial Sequence
  Description of Artificial Sequence: Synthetic oligonucleotide
cauaucuuccaggcucaga

SEQ ID NO: 873438 - RNA, 19 nt, Artificial Sequence
  Description of Artificial Sequence: Synthetic oligonucleotide
gaaagcucuguuacacaau

SEQ ID NO: 873439 - RNA, 19 nt, Artificial Sequence
  Description of Artificial Sequence: Synthetic oligonucleotide
cagcugugacuuaguuaac

SEQ ID NO: 873440 - RNA, 19 nt, Artificial Sequence
  Description of Artificial Sequence: Synthetic oligonucleotide
accaauccacgggucuucu

SEQ ID NO: 873441 - RNA, 19 nt, Artificial Sequence
  Description of Artificial Sequence: Synthetic oligonucleotide
acgugauuuuaaagaguaa

SEQ ID NO: 873442 - RNA, 19 nt, Artificial Sequence
  Description of Artificial Sequence: Synthetic oligonucleotide
gcuuuagcaggcggugugc

SEQ ID NO: 873443 - RNA, 19 nt, Artificial Sequence
  Description of Artificial Sequence: Synthetic oligonucleotide
gguaaccacagcugugacu

SEQ ID NO: 873444 - RNA, 19 nt, Artificial Sequence
  Description of Artificial Sequence: Synthetic oligonucleotide
gcggugugcaaugguuugg

SEQ ID NO: 873445 - RNA, 19 nt, Artificial Sequence
  Description of Artificial Sequence: Synthetic oligonucleotide
auugagacuuagggagauu

SEQ ID NO: 873446 - RNA, 19 nt, Artificial Sequence
  Description of Artificial Sequence: Synthetic oligonucleotide
cauggggccugcgguucgg

SEQ ID NO: 873447 - RNA, 19 nt, Artificial Sequence
  Description of Artificial Sequence: Synthetic oligonucleotide
gcgaugugaguauuucucu

SEQ ID NO: 873448 - RNA, 19 nt, Artificial Sequence
  Description of Artificial Sequence: Synthetic oligonucleotide
cugaagucaauacgcuuuu

SEQ ID NO: 873449 - RNA, 19 nt, Artificial Sequence
  Description of Artificial Sequence: Synthetic oligonucleotide
aucuagccacgugauuuua

SEQ ID NO: 873450 - RNA, 19 nt, Artificial Sequence
  Description of Artificial Sequence: Synthetic oligonucleotide
cagacugcguuugacacuu

SEQ ID NO: 873451 - RNA, 19 nt, Artificial Sequence
  Description of Artificial Sequence: Synthetic oligonucleotide
aucaucacuuguggucaua

SEQ ID NO: 873452 - RNA, 19 nt, Artificial Sequence
  Description of Artificial Sequence: Synthetic oligonucleotide
ccacgggucuucuuguaca

SEQ ID NO: 873453 - RNA, 19 nt, Artificial Sequence
  Description of Artificial Sequence: Synthetic oligonucleotide
gcaaugguuuggcgaugug

SEQ ID NO: 873454 - RNA, 19 nt, Artificial Sequence
  Description of Artificial Sequence: Synthetic oligonucleotide
guuacaccuugcagcuaga

SEQ ID NO: 873455 - RNA, 19 nt, Artificial Sequence
  Description of Artificial Sequence: Synthetic oligonucleotide
cagggcuaaugacacuugu

SEQ ID NO: 873456 - RNA, 19 nt, Artificial Sequence
  Description of Artificial Sequence: Synthetic oligonucleotide
cacauugguuccuuuccuu

SEQ ID NO: 873457 - RNA, 19 nt, Artificial Sequence
  Description of Artificial Sequence: Synthetic oligonucleotide
acccaggcgucacccuuaa

SEQ ID NO: 873458 - RNA, 19 nt, Artificial Sequence
  Description of Artificial Sequence: Synthetic oligonucleotide
gcccgguauauucacaaau

SEQ ID NO: 873459 - RNA, 19 nt, Artificial Sequence
  Description of Artificial Sequence: Synthetic oligonucleotide
ggagucuugcuuugccacu

SEQ ID NO: 873460 - RNA, 19 nt, Artificial Sequence
  Description of Artificial Sequence: Synthetic oligonucleotide
gcuugguaaccuguggugu

SEQ ID NO: 873461 - RNA, 19 nt, Artificial Sequence
  Description of Artificial Sequence: Synthetic oligonucleotide
acucaacuggacaguugua

SEQ ID NO: 873462 - RNA, 19 nt, Artificial Sequence
  Description of Artificial Sequence: Synthetic oligonucleotide
ccaauccucgcucaaggcu

SEQ ID NO: 873463 - RNA, 19 nt, Artificial Sequence
  Description of Artificial Sequence: Synthetic oligonucleotide
gguuuggcgaugugaguau

SEQ ID NO: 873464 - RNA, 19 nt, Artificial Sequence
  Description of Artificial Sequence: Synthetic oligonucleotide
ggccaacauugagacuuag

SEQ ID NO: 873465 - RNA, 19 nt, Artificial Sequence
  Description of Artificial Sequence: Synthetic oligonucleotide
cgguauauucacaaauggu

SEQ ID NO: 873466 - RNA, 19 nt, Artificial Sequence
  Description of Artificial Sequence: Synthetic oligonucleotide
ggagugcacacauucucuu

SEQ ID NO: 873467 - RNA, 19 nt, Artificial Sequence
  Description of Artificial Sequence: Synthetic oligonucleotide
cacuccaaauagucucuau

SEQ ID NO: 873468 - RNA, 19 nt, Artificial Sequence
  Description of Artificial Sequence: Synthetic oligonucleotide
gucuaguuguagucacguu

SEQ ID NO: 873469 - RNA, 19 nt, Artificial Sequence
  Description of Artificial Sequence: Synthetic oligonucleotide
cacuuccauugagcggcac

SEQ ID NO: 873470 - RNA, 19 nt, Artificial Sequence
  Description of Artificial Sequence: Synthetic oligonucleotide
gguugagauccacuuccau

SEQ ID NO: 873471 - RNA, 19 nt, Artificial Sequence
  Description of Artificial Sequence: Synthetic oligonucleotide
ccgggcaggauggaaacca

SEQ ID NO: 873472 - RNA, 19 nt, Artificial Sequence
  Description of Artificial Sequence: Synthetic oligonucleotide
cggugugcaaugguuuggc

SEQ ID NO: 873473 - RNA, 19 nt, Artificial Sequence
  Description of Artificial Sequence: Synthetic oligonucleotide
cacccuuaagccgcugucu

SEQ ID NO: 873474 - RNA, 19 nt, Artificial Sequence
  Description of Artificial Sequence: Synthetic oligonucleotide
ccacgugauuuuaaagagu

SEQ ID NO: 873475 - RNA, 19 nt, Artificial Sequence
  Description of Artificial Sequence: Synthetic oligonucleotide
cuuaagccgcugucuccgu

SEQ ID NO: 873476 - RNA, 19 nt, Artificial Sequence
  Description of Artificial Sequence: Synthetic oligonucleotide
cuuacuaacugggguccuu

SEQ ID NO: 873477 - RNA, 19 nt, Artificial Sequence
  Description of Artificial Sequence: Synthetic oligonucleotide
gccuguuauugcggugaug

SEQ ID NO: 873478 - RNA, 19 nt, Artificial Sequence
  Description of Artificial Sequence: Synthetic oligonucleotide
cguauuaaauguguuguuu

SEQ ID NO: 873479 - RNA, 19 nt, Artificial Sequence
  Description of Artificial Sequence: Synthetic oligonucleotide
ccacacuaucaucacuugu

SEQ ID NO: 873480 - RNA, 19 nt, Artificial Sequence
  Description of Artificial Sequence: Synthetic oligonucleotide
guuuggcgaugugaguauu

SEQ ID NO: 873481 - RNA, 19 nt, Artificial Sequence
  Description of Artificial Sequence: Synthetic oligonucleotide
ccgccucucagggcuaaug

SEQ ID NO: 873482 - RNA, 19 nt, Artificial Sequence
  Description of Artificial Sequence: Synthetic oligonucleotide
cacaugcauccgggcagga

SEQ ID NO: 873483 - RNA, 19 nt, Artificial Sequence
  Description of Artificial Sequence: Synthetic oligonucleotide
ccugcgguucggauacuua

SEQ ID NO: 873484 - RNA, 19 nt, Artificial Sequence
  Description of Artificial Sequence: Synthetic oligonucleotide
gcauccgggcaggauggaa

SEQ ID NO: 873485 - RNA, 19 nt, Artificial Sequence
  Description of Artificial Sequence: Synthetic oligonucleotide
ccauuguuugccuguuauu

SEQ ID NO: 873486 - RNA, 19 nt, Artificial Sequence
  Description of Artificial Sequence: Synthetic oligonucleotide
cgagacuucuuggcuagaa

SEQ ID NO: 873487 - RNA, 19 nt, Artificial Sequence
  Description of Artificial Sequence: Synthetic oligonucleotide
ccccuauggaagugaacau

SEQ ID NO: 873488 - RNA, 19 nt, Artificial Sequence
  Description of Artificial Sequence: Synthetic oligonucleotide
accgccucucagggcuaau

SEQ ID NO: 873489 - RNA, 19 nt, Artificial Sequence
  Description of Artificial Sequence: Synthetic oligonucleotide
gcauacuacuggaguuggu

SEQ ID NO: 873490 - RNA, 19 nt, Artificial Sequence
  Description of Artificial Sequence: Synthetic oligonucleotide
ccacuuccauugagcggca

SEQ ID NO: 873491 - RNA, 19 nt, Artificial Sequence
  Description of Artificial Sequence: Synthetic oligonucleotide
cccaggcgucacccuuaag

SEQ ID NO: 873492 - RNA, 19 nt, Artificial Sequence
  Description of Artificial Sequence: Synthetic oligonucleotide
agacugcguuugacacuuu

SEQ ID NO: 873493 - RNA, 19 nt, Artificial Sequence
  Description of Artificial Sequence: Synthetic oligonucleotide
caccgccucucagggcuaa

SEQ ID NO: 873494 - RNA, 19 nt, Artificial Sequence
  Description of Artificial Sequence: Synthetic oligonucleotide
cggcaccgccucucagggc

SEQ ID NO: 873495 - RNA, 19 nt, Artificial Sequence
  Description of Artificial Sequence: Synthetic oligonucleotide
cguuaacgugucugcuccu

SEQ ID NO: 873496 - RNA, 19 nt, Artificial Sequence
  Description of Artificial Sequence: Synthetic oligonucleotide
ccaauccacgggucuucuu

SEQ ID NO: 873497 - RNA, 19 nt, Artificial Sequence
  Description of Artificial Sequence: Synthetic oligonucleotide
gccugcgguucggauacuu

SEQ ID NO: 873498 - RNA, 19 nt, Artificial Sequence
  Description of Artificial Sequence: Synthetic oligonucleotide
gcaccgccucucagggcua

SEQ ID NO: 873499 - RNA, 19 nt, Artificial Sequence
  Description of Artificial Sequence: Synthetic oligonucleotide
ggccugcgguucggauacu

SEQ ID NO: 873500 - RNA, 19 nt, Artificial Sequence
  Description of Artificial Sequence: Synthetic oligonucleotide
aaauauucuaacccgacug

SEQ ID NO: 873501 - RNA, 19 nt, Artificial Sequence
  Description of Artificial Sequence: Synthetic oligonucleotide
ugcuaauuccauuagaucc

SEQ ID NO: 873502 - RNA, 19 nt, Artificial Sequence
  Description of Artificial Sequence: Synthetic oligonucleotide
acuuccacuaaauauaaag

SEQ ID NO: 873503 - RNA, 19 nt, Artificial Sequence
  Description of Artificial Sequence: Synthetic oligonucleotide
aaagcuaauuucuauaaaa

SEQ ID NO: 873504 - RNA, 19 nt, Artificial Sequence
  Description of Artificial Sequence: Synthetic oligonucleotide
aacaaacccuaauccaucc

SEQ ID NO: 873505 - RNA, 19 nt, Artificial Sequence
  Description of Artificial Sequence: Synthetic oligonucleotide
ugguauauauauuuaagca

SEQ ID NO: 873506 - RNA, 19 nt, Artificial Sequence
  Description of Artificial Sequence: Synthetic oligonucleotide
auuagauccugauaagcac

SEQ ID NO: 873507 - RNA, 19 nt, Artificial Sequence
  Description of Artificial Sequence: Synthetic oligonucleotide
gaaacggcucauuugacgg

SEQ ID NO: 873508 - RNA, 19 nt, Artificial Sequence
  Description of Artificial Sequence: Synthetic oligonucleotide
uuaucaacuggauuaagca

SEQ ID NO: 873509 - RNA, 19 nt, Artificial Sequence
  Description of Artificial Sequence: Synthetic oligonucleotide
auucuaacccgacuguucc

SEQ ID NO: 873510 - RNA, 19 nt, Artificial Sequence
  Description of Artificial Sequence: Synthetic oligonucleotide
uauagugguauauauauuu

SEQ ID NO: 873511 - RNA, 19 nt, Artificial Sequence
  Description of Artificial Sequence: Synthetic oligonucleotide
gguauauauauuuaagcag

SEQ ID NO: 873512 - RNA, 19 nt, Artificial Sequence
  Description of Artificial Sequence: Synthetic oligonucleotide
acuaccgccgacaugaugc

SEQ ID NO: 873513 - RNA, 19 nt, Artificial Sequence
  Description of Artificial Sequence: Synthetic oligonucleotide
aaaauauucuaacccgacu

SEQ ID NO: 873514 - RNA, 19 nt, Artificial Sequence
  Description of Artificial Sequence: Synthetic oligonucleotide
aauauucuaacccgacugu

SEQ ID NO: 873515 - RNA, 19 nt, Artificial Sequence
  Description of Artificial Sequence: Synthetic oligonucleotide
aacaaaagcuaauuucuau

SEQ ID NO: 873516 - RNA, 19 nt, Artificial Sequence
  Description of Artificial Sequence: Synthetic oligonucleotide
aaaaccauuaucuguggua

SEQ ID NO: 873517 - RNA, 19 nt, Artificial Sequence
  Description of Artificial Sequence: Synthetic oligonucleotide
aaucuagagaccaaguaga

SEQ ID NO: 873518 - RNA, 19 nt, Artificial Sequence
  Description of Artificial Sequence: Synthetic oligonucleotide
auguauucaacacggagcu

SEQ ID NO: 873519 - RNA, 19 nt, Artificial Sequence
  Description of Artificial Sequence: Synthetic oligonucleotide
uucgauaguggcauggugu

SEQ ID NO: 873520 - RNA, 19 nt, Artificial Sequence
  Description of Artificial Sequence: Synthetic oligonucleotide
aaauaggucaccauaguaa

SEQ ID NO: 873521 - RNA, 19 nt, Artificial Sequence
  Description of Artificial Sequence: Synthetic oligonucleotide
caguguaaccacuaguugc

SEQ ID NO: 873522 - RNA, 19 nt, Artificial Sequence
  Description of Artificial Sequence: Synthetic oligonucleotide
agaaacggcucauuugacg

SEQ ID NO: 873523 - RNA, 19 nt, Artificial Sequence
  Description of Artificial Sequence: Synthetic oligonucleotide
uuucgauuuguucccaggc

SEQ ID NO: 873524 - RNA, 19 nt, Artificial Sequence
  Description of Artificial Sequence: Synthetic oligonucleotide
agcaacuuccacuaaauau

SEQ ID NO: 873525 - RNA, 19 nt, Artificial Sequence
  Description of Artificial Sequence: Synthetic oligonucleotide
acccuaauccauccuaggc

SEQ ID NO: 873526 - RNA, 19 nt, Artificial Sequence
  Description of Artificial Sequence: Synthetic oligonucleotide
aaagcgcgcgacucggacc

SEQ ID NO: 873527 - RNA, 19 nt, Artificial Sequence
  Description of Artificial Sequence: Synthetic oligonucleotide
auaagcacggguuacuccu

SEQ ID NO: 873528 - RNA, 19 nt, Artificial Sequence
  Description of Artificial Sequence: Synthetic oligonucleotide
ugcaacaaacccuaaucca

SEQ ID NO: 873529 - RNA, 19 nt, Artificial Sequence
  Description of Artificial Sequence: Synthetic oligonucleotide
uaacuggauauauaguggu

SEQ ID NO: 873530 - RNA, 19 nt, Artificial Sequence
  Description of Artificial Sequence: Synthetic oligonucleotide
aaaagcuaauuucuauaaa

SEQ ID NO: 873531 - RNA, 19 nt, Artificial Sequence
  Description of Artificial Sequence: Synthetic oligonucleotide
auuugacgguucuggaggc

SEQ ID NO: 873532 - RNA, 19 nt, Artificial Sequence
  Description of Artificial Sequence: Synthetic oligonucleotide
ucaguaugagccccguucc

SEQ ID NO: 873533 - RNA, 19 nt, Artificial Sequence
  Description of Artificial Sequence: Synthetic oligonucleotide
uuaugaaugggcguuuccc

SEQ ID NO: 873534 - RNA, 19 nt, Artificial Sequence
  Description of Artificial Sequence: Synthetic oligonucleotide
uggauuaagcacuccaacu

SEQ ID NO: 873535 - RNA, 19 nt, Artificial Sequence
  Description of Artificial Sequence: Synthetic oligonucleotide
aaaugcaacaaacccuaau

SEQ ID NO: 873536 - RNA, 19 nt, Artificial Sequence
  Description of Artificial Sequence: Synthetic oligonucleotide
uugccuaaacaaaagcuaa

SEQ ID NO: 873537 - RNA, 19 nt, Artificial Sequence
  Description of Artificial Sequence: Synthetic oligonucleotide
uuaagcacuccaacuuucc

SEQ ID NO: 873538 - RNA, 19 nt, Artificial Sequence
  Description of Artificial Sequence: Synthetic oligonucleotide
aacccuaauccauccuagg

SEQ ID NO: 873539 - RNA, 19 nt, Artificial Sequence
  Description of Artificial Sequence: Synthetic oligonucleotide
ugcaguguaaccacuaguu

SEQ ID NO: 873540 - RNA, 19 nt, Artificial Sequence
  Description of Artificial Sequence: Synthetic oligonucleotide
aaaccauuaucugugguaa

SEQ ID NO: 873541 - RNA, 19 nt, Artificial Sequence
  Description of Artificial Sequence: Synthetic oligonucleotide
ucaaggugccauuaugaca

SEQ ID NO: 873542 - RNA, 19 nt, Artificial Sequence
  Description of Artificial Sequence: Synthetic oligonucleotide
gucauugcgguauuugcag

SEQ ID NO: 873543 - RNA, 19 nt, Artificial Sequence
  Description of Artificial Sequence: Synthetic oligonucleotide
cuaguugccuaaacaaaag

SEQ ID NO: 873544 - RNA, 19 nt, Artificial Sequence
  Description of Artificial Sequence: Synthetic oligonucleotide
gacagaaacggcucauuug

SEQ ID NO: 873545 - RNA, 19 nt, Artificial Sequence
  Description of Artificial Sequence: Synthetic oligonucleotide
aaccacuaguugccuaaac

SEQ ID NO: 873546 - RNA, 19 nt, Artificial Sequence
  Description of Artificial Sequence: Synthetic oligonucleotide
aacaugcauucugucagcg

SEQ ID NO: 873547 - RNA, 19 nt, Artificial Sequence
  Description of Artificial Sequence: Synthetic oligonucleotide
cauuagauccugauaagca

SEQ ID NO: 873548 - RNA, 19 nt, Artificial Sequence
  Description of Artificial Sequence: Synthetic oligonucleotide
uucaacacggagcuacugu

SEQ ID NO: 873549 - RNA, 19 nt, Artificial Sequence
  Description of Artificial Sequence: Synthetic oligonucleotide
agaaggaguccuccgcggc

SEQ ID NO: 873550 - RNA, 19 nt, Artificial Sequence
  Description of Artificial Sequence: Synthetic oligonucleotide
ugcgucgcuggaaagcgcg

SEQ ID NO: 873551 - RNA, 19 nt, Artificial Sequence
  Description of Artificial Sequence: Synthetic oligonucleotide
aacuuuccgaagugcgcgg

SEQ ID NO: 873552 - RNA, 19 nt, Artificial Sequence
  Description of Artificial Sequence: Synthetic oligonucleotide
aaacccaugguagugucca

SEQ ID NO: 873553 - RNA, 19 nt, Artificial Sequence
  Description of Artificial Sequence: Synthetic oligonucleotide
gauaagcacggguuacucc

SEQ ID NO: 873554 - RNA, 19 nt, Artificial Sequence
  Description of Artificial Sequence: Synthetic oligonucleotide
uauucuaacccgacuguuc

SEQ ID NO: 873555 - RNA, 19 nt, Artificial Sequence
  Description of Artificial Sequence: Synthetic oligonucleotide
uggguuugugcaaugucug

SEQ ID NO: 873556 - RNA, 19 nt, Artificial Sequence
  Description of Artificial Sequence: Synthetic oligonucleotide
cuuucgauuuguucccagg

SEQ ID NO: 873557 - RNA, 19 nt, Artificial Sequence
  Description of Artificial Sequence: Synthetic oligonucleotide
uagugguauauauauuuaa

SEQ ID NO: 873558 - RNA, 19 nt, Artificial Sequence
  Description of Artificial Sequence: Synthetic oligonucleotide
uuaugacagaaacggcuca

SEQ ID NO: 873559 - RNA, 19 nt, Artificial Sequence
  Description of Artificial Sequence: Synthetic oligonucleotide
ugcuagcacacucuuaaaa

SEQ ID NO: 873560 - RNA, 19 nt, Artificial Sequence
  Description of Artificial Sequence: Synthetic oligonucleotide
acucggaccggcgagaggg

SEQ ID NO: 873561 - RNA, 19 nt, Artificial Sequence
  Description of Artificial Sequence: Synthetic oligonucleotide
guguccauagugcaaauuc

SEQ ID NO: 873562 - RNA, 19 nt, Artificial Sequence
  Description of Artificial Sequence: Synthetic oligonucleotide
accacuaguugccuaaaca

SEQ ID NO: 873563 - RNA, 19 nt, Artificial Sequence
  Description of Artificial Sequence: Synthetic oligonucleotide
ucaccauucgauaguggca

SEQ ID NO: 873564 - RNA, 19 nt, Artificial Sequence
  Description of Artificial Sequence: Synthetic oligonucleotide
ucgauaguggcauggugug

SEQ ID NO: 873565 - RNA, 19 nt, Artificial Sequence
  Description of Artificial Sequence: Synthetic oligonucleotide
agccagaccagacacugag

SEQ ID NO: 873566 - RNA, 19 nt, Artificial Sequence
  Description of Artificial Sequence: Synthetic oligonucleotide
aagugcgcggcccagugca

SEQ ID NO: 873567 - RNA, 19 nt, Artificial Sequence
  Description of Artificial Sequence: Synthetic oligonucleotide
aaacccuaauccauccuag

SEQ ID NO: 873568 - RNA, 19 nt, Artificial Sequence
  Description of Artificial Sequence: Synthetic oligonucleotide
uuccauuugucaauguauu

SEQ ID NO: 873569 - RNA, 19 nt, Artificial Sequence
  Description of Artificial Sequence: Synthetic oligonucleotide
aauccauccuaggcagagc

SEQ ID NO: 873570 - RNA, 19 nt, Artificial Sequence
  Description of Artificial Sequence: Synthetic oligonucleotide
caacuuuccgaagugcgcg

SEQ ID NO: 873571 - RNA, 19 nt, Artificial Sequence
  Description of Artificial Sequence: Synthetic oligonucleotide
gucaguaugagccccguuc

SEQ ID NO: 873572 - RNA, 19 nt, Artificial Sequence
  Description of Artificial Sequence: Synthetic oligonucleotide
ucucuuaguuaacuggaua

SEQ ID NO: 873573 - RNA, 19 nt, Artificial Sequence
  Description of Artificial Sequence: Synthetic oligonucleotide
aggggaaguccaaaugucc

SEQ ID NO: 873574 - RNA, 19 nt, Artificial Sequence
  Description of Artificial Sequence: Synthetic oligonucleotide
cauuaugacagaaacggcu

SEQ ID NO: 873575 - RNA, 19 nt, Artificial Sequence
  Description of Artificial Sequence: Synthetic oligonucleotide
uuacuccuguucuccaucc

SEQ ID NO: 873576 - RNA, 19 nt, Artificial Sequence
  Description of Artificial Sequence: Synthetic oligonucleotide
uugcuaauuccauuagauc

SEQ ID NO: 873577 - RNA, 19 nt, Artificial Sequence
  Description of Artificial Sequence: Synthetic oligonucleotide
ugagugcuccagcacacug

SEQ ID NO: 873578 - RNA, 19 nt, Artificial Sequence
  Description of Artificial Sequence: Synthetic oligonucleotide
caaaauucucuuaguuaac

SEQ ID NO: 873579 - RNA, 19 nt, Artificial Sequence
  Description of Artificial Sequence: Synthetic oligonucleotide
cuggauuaagcacuccaac

SEQ ID NO: 873580 - RNA, 19 nt, Artificial Sequence
  Description of Artificial Sequence: Synthetic oligonucleotide
gaagcgagcagagugucac

SEQ ID NO: 873581 - RNA, 19 nt, Artificial Sequence
  Description of Artificial Sequence: Synthetic oligonucleotide
gacuguuccuacaaacagc

SEQ ID NO: 873582 - RNA, 19 nt, Artificial Sequence
  Description of Artificial Sequence: Synthetic oligonucleotide
ugauugggaagcguguucu

SEQ ID NO: 873583 - RNA, 19 nt, Artificial Sequence
  Description of Artificial Sequence: Synthetic oligonucleotide
cuuaugaaugggcguuucc

SEQ ID NO: 873584 - RNA, 19 nt, Artificial Sequence
  Description of Artificial Sequence: Synthetic oligonucleotide
gauaucgggugguggagac

SEQ ID NO: 873585 - RNA, 19 nt, Artificial Sequence
  Description of Artificial Sequence: Synthetic oligonucleotide
ugcaccgauuguuauuaca

SEQ ID NO: 873586 - RNA, 19 nt, Artificial Sequence
  Description of Artificial Sequence: Synthetic oligonucleotide
ucuuucgauuuguucccag

SEQ ID NO: 873587 - RNA, 19 nt, Artificial Sequence
  Description of Artificial Sequence: Synthetic oligonucleotide
auucgauaguggcauggug

SEQ ID NO: 873588 - RNA, 19 nt, Artificial Sequence
  Description of Artificial Sequence: Synthetic oligonucleotide
cauugcgguauuugcagug

SEQ ID NO: 873589 - RNA, 19 nt, Artificial Sequence
  Description of Artificial Sequence: Synthetic oligonucleotide
aggcuaaugugauugggaa

SEQ ID NO: 873590 - RNA, 19 nt, Artificial Sequence
  Description of Artificial Sequence: Synthetic oligonucleotide
acuaguugccuaaacaaaa

SEQ ID NO: 873591 - RNA, 19 nt, Artificial Sequence
  Description of Artificial Sequence: Synthetic oligonucleotide
agcuugagugcuccagcac

SEQ ID NO: 873592 - RNA, 19 nt, Artificial Sequence
  Description of Artificial Sequence: Synthetic oligonucleotide
aacggagcgacagcagcuc

SEQ ID NO: 873593 - RNA, 19 nt, Artificial Sequence
  Description of Artificial Sequence: Synthetic oligonucleotide
agcaaugugggcguggggu

SEQ ID NO: 873594 - RNA, 19 nt, Artificial Sequence
  Description of Artificial Sequence: Synthetic oligonucleotide
aaacggcucauuugacggu

SEQ ID NO: 873595 - RNA, 19 nt, Artificial Sequence
  Description of Artificial Sequence: Synthetic oligonucleotide
cuugagugcuccagcacac

SEQ ID NO: 873596 - RNA, 19 nt, Artificial Sequence
  Description of Artificial Sequence: Synthetic oligonucleotide
cauucagugaggcgccugc

SEQ ID NO: 873597 - RNA, 19 nt, Artificial Sequence
  Description of Artificial Sequence: Synthetic oligonucleotide
ugaugcgucgcuggaaagc

SEQ ID NO: 873598 - RNA, 19 nt, Artificial Sequence
  Description of Artificial Sequence: Synthetic oligonucleotide
aaguagaaauguggaauaa

SEQ ID NO: 873599 - RNA, 19 nt, Artificial Sequence
  Description of Artificial Sequence: Synthetic oligonucleotide
aacccgacuguuccuacaa

SEQ ID NO: 873600 - RNA, 19 nt, Artificial Sequence
  Description of Artificial Sequence: Synthetic oligonucleotide
uggaaagcgcgcgacucgg

SEQ ID NO: 873601 - RNA, 19 nt, Artificial Sequence
  Description of Artificial Sequence: Synthetic oligonucleotide
uccucgcuagagaagccug

SEQ ID NO: 873602 - RNA, 19 nt, Artificial Sequence
  Description of Artificial Sequence: Synthetic oligonucleotide
acgcccauggucuuuucug

SEQ ID NO: 873603 - RNA, 19 nt, Artificial Sequence
  Description of Artificial Sequence: Synthetic oligonucleotide
ugugcggcagaagcgagca

SEQ ID NO: 873604 - RNA, 19 nt, Artificial Sequence
  Description of Artificial Sequence: Synthetic oligonucleotide
uugggaagcguguucucgu

SEQ ID NO: 873605 - RNA, 19 nt, Artificial Sequence
  Description of Artificial Sequence: Synthetic oligonucleotide
guaaccacuaguugccuaa

SEQ ID NO: 873606 - RNA, 19 nt, Artificial Sequence
  Description of Artificial Sequence: Synthetic oligonucleotide
cuaaugugauugggaagcg

SEQ ID NO: 873607 - RNA, 19 nt, Artificial Sequence
  Description of Artificial Sequence: Synthetic oligonucleotide
ugcggcagaagcgagcaga

SEQ ID NO: 873608 - RNA, 19 nt, Artificial Sequence
  Description of Artificial Sequence: Synthetic oligonucleotide
acucaaggugccauuauga

SEQ ID NO: 873609 - RNA, 19 nt, Artificial Sequence
  Description of Artificial Sequence: Synthetic oligonucleotide
ugcgguauuugcaguguaa

SEQ ID NO: 873610 - RNA, 19 nt, Artificial Sequence
  Description of Artificial Sequence: Synthetic oligonucleotide
ucuagagaccaaguagaaa

SEQ ID NO: 873611 - RNA, 19 nt, Artificial Sequence
  Description of Artificial Sequence: Synthetic oligonucleotide
uccugauaagcacggguua

SEQ ID NO: 873612 - RNA, 19 nt, Artificial Sequence
  Description of Artificial Sequence: Synthetic oligonucleotide
agagcgggccgccuuauga

SEQ ID NO: 873613 - RNA, 19 nt, Artificial Sequence
  Description of Artificial Sequence: Synthetic oligonucleotide
aaacggagcgacagcagcu

SEQ ID NO: 873614 - RNA, 19 nt, Artificial Sequence
  Description of Artificial Sequence: Synthetic oligonucleotide
uaucgggugguggagacau

SEQ ID NO: 873615 - RNA, 19 nt, Artificial Sequence
  Description of Artificial Sequence: Synthetic oligonucleotide
gaaagcgcgcgacucggac

SEQ ID NO: 873616 - RNA, 19 nt, Artificial Sequence
  Description of Artificial Sequence: Synthetic oligonucleotide
ucucgugagcuccacucaa

SEQ ID NO: 873617 - RNA, 19 nt, Artificial Sequence
  Description of Artificial Sequence: Synthetic oligonucleotide
cacucaaggugccauuaug

SEQ ID NO: 873618 - RNA, 19 nt, Artificial Sequence
  Description of Artificial Sequence: Synthetic oligonucleotide
ucagccucaccauucgaua

SEQ ID NO: 873619 - RNA, 19 nt, Artificial Sequence
  Description of Artificial Sequence: Synthetic oligonucleotide
gaaacugggugcacucuug

SEQ ID NO: 873620 - RNA, 19 nt, Artificial Sequence
  Description of Artificial Sequence: Synthetic oligonucleotide
ucauugcgguauuugcagu

SEQ ID NO: 873621 - RNA, 19 nt, Artificial Sequence
  Description of Artificial Sequence: Synthetic oligonucleotide
cuagagaagccugccuccg

SEQ ID NO: 873622 - RNA, 19 nt, Artificial Sequence
  Description of Artificial Sequence: Synthetic oligonucleotide
accggcgagagggacgugc

SEQ ID NO: 873623 - RNA, 19 nt, Artificial Sequence
  Description of Artificial Sequence: Synthetic oligonucleotide
cuggaaagcgcgcgacucg

SEQ ID NO: 873624 - RNA, 19 nt, Artificial Sequence
  Description of Artificial Sequence: Synthetic oligonucleotide
agucauugcgguauuugca

SEQ ID NO: 873625 - RNA, 19 nt, Artificial Sequence
  Description of Artificial Sequence: Synthetic oligonucleotide
auuuguucccaggcuaaug

SEQ ID NO: 873626 - RNA, 19 nt, Artificial Sequence
  Description of Artificial Sequence: Synthetic oligonucleotide
uaagcacggguuacuccug

SEQ ID NO: 873627 - RNA, 19 nt, Artificial Sequence
  Description of Artificial Sequence: Synthetic oligonucleotide
uacauaggucuuucucaga

SEQ ID NO: 873628 - RNA, 19 nt, Artificial Sequence
  Description of Artificial Sequence: Synthetic oligonucleotide
uguaaccacuaguugccua

SEQ ID NO: 873629 - RNA, 19 nt, Artificial Sequence
  Description of Artificial Sequence: Synthetic oligonucleotide
ggggucgugggcgauaucg

SEQ ID NO: 873630 - RNA, 19 nt, Artificial Sequence
  Description of Artificial Sequence: Synthetic oligonucleotide
cuaauuccauuagauccug

SEQ ID NO: 873631 - RNA, 19 nt, Artificial Sequence
  Description of Artificial Sequence: Synthetic oligonucleotide
acggguuacuccuguucuc

SEQ ID NO: 873632 - RNA, 19 nt, Artificial Sequence
  Description of Artificial Sequence: Synthetic oligonucleotide
acaguuuaucugcaccgau

SEQ ID NO: 873633 - RNA, 19 nt, Artificial Sequence
  Description of Artificial Sequence: Synthetic oligonucleotide
ugauaagcacggguuacuc

SEQ ID NO: 873634 - RNA, 19 nt, Artificial Sequence
  Description of Artificial Sequence: Synthetic oligonucleotide
ugcaaugucugcugccguc

SEQ ID NO: 873635 - RNA, 19 nt, Artificial Sequence
  Description of Artificial Sequence: Synthetic oligonucleotide
cucuuaguuaacuggauau

SEQ ID NO: 873636 - RNA, 19 nt, Artificial Sequence
  Description of Artificial Sequence: Synthetic oligonucleotide
ggaagcguguucucgugag

SEQ ID NO: 873637 - RNA, 19 nt, Artificial Sequence
  Description of Artificial Sequence: Synthetic oligonucleotide
uuuccgaagugcgcggccc

SEQ ID NO: 873638 - RNA, 19 nt, Artificial Sequence
  Description of Artificial Sequence: Synthetic oligonucleotide
gaagcguguucucgugagc

SEQ ID NO: 873639 - RNA, 19 nt, Artificial Sequence
  Description of Artificial Sequence: Synthetic oligonucleotide
uccuccgcggccaggugag

SEQ ID NO: 873640 - RNA, 19 nt, Artificial Sequence
  Description of Artificial Sequence: Synthetic oligonucleotide
ucccauuagcacacacaga

SEQ ID NO: 873641 - RNA, 19 nt, Artificial Sequence
  Description of Artificial Sequence: Synthetic oligonucleotide
ggcuaaugugauugggaag

SEQ ID NO: 873642 - RNA, 19 nt, Artificial Sequence
  Description of Artificial Sequence: Synthetic oligonucleotide
guuccuacaaacagcaacu

SEQ ID NO: 873643 - RNA, 19 nt, Artificial Sequence
  Description of Artificial Sequence: Synthetic oligonucleotide
aguaugagccccguucccu

SEQ ID NO: 873644 - RNA, 19 nt, Artificial Sequence
  Description of Artificial Sequence: Synthetic oligonucleotide
acaacuacuugggcucccg

SEQ ID NO: 873645 - RNA, 19 nt, Artificial Sequence
  Description of Artificial Sequence: Synthetic oligonucleotide
gauuaagcacuccaacuuu

SEQ ID NO: 873646 - RNA, 19 nt, Artificial Sequence
  Description of Artificial Sequence: Synthetic oligonucleotide
uacuccuguucuccauccc

SEQ ID NO: 873647 - RNA, 19 nt, Artificial Sequence
  Description of Artificial Sequence: Synthetic oligonucleotide
gagccuguuucuaaggaaa

SEQ ID NO: 873648 - RNA, 19 nt, Artificial Sequence
  Description of Artificial Sequence: Synthetic oligonucleotide
cuaccgccgacaugaugcg

SEQ ID NO: 873649 - RNA, 19 nt, Artificial Sequence
  Description of Artificial Sequence: Synthetic oligonucleotide
ugacgguucuggaggcuca

SEQ ID NO: 873650 - RNA, 19 nt, Artificial Sequence
  Description of Artificial Sequence: Synthetic oligonucleotide
acaugcauucugucagcgu

SEQ ID NO: 873651 - RNA, 19 nt, Artificial Sequence
  Description of Artificial Sequence: Synthetic oligonucleotide
auagugguauauauauuua

SEQ ID NO: 873652 - RNA, 19 nt, Artificial Sequence
  Description of Artificial Sequence: Synthetic oligonucleotide
uaacccgacuguuccuaca

SEQ ID NO: 873653 - RNA, 19 nt, Artificial Sequence
  Description of Artificial Sequence: Synthetic oligonucleotide
cuuuccgaagugcgcggcc

SEQ ID NO: 873654 - RNA, 19 nt, Artificial Sequence
  Description of Artificial Sequence: Synthetic oligonucleotide
cucgugagcuccacucaag

SEQ ID NO: 873655 - RNA, 19 nt, Artificial Sequence
  Description of Artificial Sequence: Synthetic oligonucleotide
uucuaacccgacuguuccu

SEQ ID NO: 873656 - RNA, 19 nt, Artificial Sequence
  Description of Artificial Sequence: Synthetic oligonucleotide
agccucaccauucgauagu

SEQ ID NO: 873657 - RNA, 19 nt, Artificial Sequence
  Description of Artificial Sequence: Synthetic oligonucleotide
gcaguguaaccacuaguug

SEQ ID NO: 873658 - RNA, 19 nt, Artificial Sequence
  Description of Artificial Sequence: Synthetic oligonucleotide
ccauuagauccugauaagc

SEQ ID NO: 873659 - RNA, 19 nt, Artificial Sequence
  Description of Artificial Sequence: Synthetic oligonucleotide
ugagcgcgcggcgugugcg

SEQ ID NO: 873660 - RNA, 19 nt, Artificial Sequence
  Description of Artificial Sequence: Synthetic oligonucleotide
caaacccuaauccauccua

SEQ ID NO: 873661 - RNA, 19 nt, Artificial Sequence
  Description of Artificial Sequence: Synthetic oligonucleotide
acggcacugucguagcgcu

SEQ ID NO: 873662 - RNA, 19 nt, Artificial Sequence
  Description of Artificial Sequence: Synthetic oligonucleotide
ucgcuagagaagccugccu

SEQ ID NO: 873663 - RNA, 19 nt, Artificial Sequence
  Description of Artificial Sequence: Synthetic oligonucleotide
cacagcuugagugcuccag

SEQ ID NO: 873664 - RNA, 19 nt, Artificial Sequence
  Description of Artificial Sequence: Synthetic oligonucleotide
aaacagcaacuuccacuaa

SEQ ID NO: 873665 - RNA, 19 nt, Artificial Sequence
  Description of Artificial Sequence: Synthetic oligonucleotide
guccauagugcaaauucuc

SEQ ID NO: 873666 - RNA, 19 nt, Artificial Sequence
  Description of Artificial Sequence: Synthetic oligonucleotide
ggucgugggcgauaucggg

SEQ ID NO: 873667 - RNA, 19 nt, Artificial Sequence
  Description of Artificial Sequence: Synthetic oligonucleotide
gugauugggaagcguguuc

SEQ ID NO: 873668 - RNA, 19 nt, Artificial Sequence
  Description of Artificial Sequence: Synthetic oligonucleotide
uggucuacauaggucuuuc

SEQ ID NO: 873669 - RNA, 19 nt, Artificial Sequence
  Description of Artificial Sequence: Synthetic oligonucleotide
ucgggugguggagacauuc

SEQ ID NO: 873670 - RNA, 19 nt, Artificial Sequence
  Description of Artificial Sequence: Synthetic oligonucleotide
aacuggauauauaguggua

SEQ ID NO: 873671 - RNA, 19 nt, Artificial Sequence
  Description of Artificial Sequence: Synthetic oligonucleotide
cugccgucaggccacuggc

SEQ ID NO: 873672 - RNA, 19 nt, Artificial Sequence
  Description of Artificial Sequence: Synthetic oligonucleotide
cucgcuagagaagccugcc

SEQ ID NO: 873673 - RNA, 19 nt, Artificial Sequence
  Description of Artificial Sequence: Synthetic oligonucleotide
ccauagugcaaauucucuc

SEQ ID NO: 873674 - RNA, 19 nt, Artificial Sequence
  Description of Artificial Sequence: Synthetic oligonucleotide
aacggcucauuugacgguu

SEQ ID NO: 873675 - RNA, 19 nt, Artificial Sequence
  Description of Artificial Sequence: Synthetic oligonucleotide
gauugggaagcguguucuc

SEQ ID NO: 873676 - RNA, 19 nt, Artificial Sequence
  Description of Artificial Sequence: Synthetic oligonucleotide
guagcgcugcuccacccgc

SEQ ID NO: 873677 - RNA, 19 nt, Artificial Sequence
  Description of Artificial Sequence: Synthetic oligonucleotide
gaagugcgcggcccagugc

SEQ ID NO: 873678 - RNA, 19 nt, Artificial Sequence
  Description of Artificial Sequence: Synthetic oligonucleotide
caguaugagccccguuccc

SEQ ID NO: 873679 - RNA, 19 nt, Artificial Sequence
  Description of Artificial Sequence: Synthetic oligonucleotide
aacuccgguucuagcuuuc

SEQ ID NO: 873680 - RNA, 19 nt, Artificial Sequence
  Description of Artificial Sequence: Synthetic oligonucleotide
cccaugguaguguccauag

SEQ ID NO: 873681 - RNA, 19 nt, Artificial Sequence
  Description of Artificial Sequence: Synthetic oligonucleotide
gccgccuuaugaaugggcg

SEQ ID NO: 873682 - RNA, 19 nt, Artificial Sequence
  Description of Artificial Sequence: Synthetic oligonucleotide
aaauggcuguccauugcua

SEQ ID NO: 873683 - RNA, 19 nt, Artificial Sequence
  Description of Artificial Sequence: Synthetic oligonucleotide
aacccuggguuugugcaau

SEQ ID NO: 873684 - RNA, 19 nt, Artificial Sequence
  Description of Artificial Sequence: Synthetic oligonucleotide
uuaacgcccauggucuuuu

SEQ ID NO: 873685 - RNA, 19 nt, Artificial Sequence
  Description of Artificial Sequence: Synthetic oligonucleotide
uuccgaagugcgcggccca

SEQ ID NO: 873686 - RNA, 19 nt, Artificial Sequence
  Description of Artificial Sequence: Synthetic oligonucleotide
gcugccgucaggccacugg

SEQ ID NO: 873687 - RNA, 19 nt, Artificial Sequence
  Description of Artificial Sequence: Synthetic oligonucleotide
augugauugggaagcgugu

SEQ ID NO: 873688 - RNA, 19 nt, Artificial Sequence
  Description of Artificial Sequence: Synthetic oligonucleotide
gucguagcgcugcuccacc

SEQ ID NO: 873689 - RNA, 19 nt, Artificial Sequence
  Description of Artificial Sequence: Synthetic oligonucleotide
ggguuugugcaaugucugc

SEQ ID NO: 873690 - RNA, 19 nt, Artificial Sequence
  Description of Artificial Sequence: Synthetic oligonucleotide
cgacuguuccuacaaacag

SEQ ID NO: 873691 - RNA, 19 nt, Artificial Sequence
  Description of Artificial Sequence: Synthetic oligonucleotide
ggcgauaucggguggugga

SEQ ID NO: 873692 - RNA, 19 nt, Artificial Sequence
  Description of Artificial Sequence: Synthetic oligonucleotide
uuugacgguucuggaggcu

SEQ ID NO: 873693 - RNA, 19 nt, Artificial Sequence
  Description of Artificial Sequence: Synthetic oligonucleotide
cccgacuguuccuacaaac

SEQ ID NO: 873694 - RNA, 19 nt, Artificial Sequence
  Description of Artificial Sequence: Synthetic oligonucleotide
aucuagagaccaaguagaa

SEQ ID NO: 873695 - RNA, 19 nt, Artificial Sequence
  Description of Artificial Sequence: Synthetic oligonucleotide
ugccgucaggccacuggca

SEQ ID NO: 873696 - RNA, 19 nt, Artificial Sequence
  Description of Artificial Sequence: Synthetic oligonucleotide
gucaccauaguaaaauauu

SEQ ID NO: 873697 - RNA, 19 nt, Artificial Sequence
  Description of Artificial Sequence: Synthetic oligonucleotide
ucccguucagaugcagaga

SEQ ID NO: 873698 - RNA, 19 nt, Artificial Sequence
  Description of Artificial Sequence: Synthetic oligonucleotide
gagagggacgugccggcga

SEQ ID NO: 873699 - RNA, 19 nt, Artificial Sequence
  Description of Artificial Sequence: Synthetic oligonucleotide
cuucaggagccauggugca

SEQ ID NO: 873700 - RNA, 19 nt, Artificial Sequence
  Description of Artificial Sequence: Synthetic oligonucleotide
cagugcacgggcguccagc

SEQ ID NO: 873701 - RNA, 19 nt, Artificial Sequence
  Description of Artificial Sequence: Synthetic oligonucleotide
agagggacgugccggcgaa

SEQ ID NO: 873702 - RNA, 19 nt, Artificial Sequence
  Description of Artificial Sequence: Synthetic oligonucleotide
ggcgccugcucuuaucaac

SEQ ID NO: 873703 - RNA, 19 nt, Artificial Sequence
  Description of Artificial Sequence: Synthetic oligonucleotide
ucacgcaggggaaguccaa

SEQ ID NO: 873704 - RNA, 19 nt, Artificial Sequence
  Description of Artificial Sequence: Synthetic oligonucleotide
acauucagugaggcgccug

SEQ ID NO: 873705 - RNA, 19 nt, Artificial Sequence
  Description of Artificial Sequence: Synthetic oligonucleotide
caccgauuguuauuacaaa

SEQ ID NO: 873706 - RNA, 19 nt, Artificial Sequence
  Description of Artificial Sequence: Synthetic oligonucleotide
ugggucacgcaggggaagu

SEQ ID NO: 873707 - RNA, 19 nt, Artificial Sequence
  Description of Artificial Sequence: Synthetic oligonucleotide
auaggucaccauaguaaaa

SEQ ID NO: 873708 - RNA, 19 nt, Artificial Sequence
  Description of Artificial Sequence: Synthetic oligonucleotide
cagaagcgagcagaguguc

SEQ ID NO: 873709 - RNA, 19 nt, Artificial Sequence
  Description of Artificial Sequence: Synthetic oligonucleotide
uaaccacuaguugccuaaa

SEQ ID NO: 873710 - RNA, 19 nt, Artificial Sequence
  Description of Artificial Sequence: Synthetic oligonucleotide
uguauucaacacggagcua

SEQ ID NO: 873711 - RNA, 19 nt, Artificial Sequence
  Description of Artificial Sequence: Synthetic oligonucleotide
gaaggccugcgaguccgcc

SEQ ID NO: 873712 - RNA, 19 nt, Artificial Sequence
  Description of Artificial Sequence: Synthetic oligonucleotide
uugagugcuccagcacacu

SEQ ID NO: 873713 - RNA, 19 nt, Artificial Sequence
  Description of Artificial Sequence: Synthetic oligonucleotide
gcgggaaacggagcgacag

SEQ ID NO: 873714 - RNA, 19 nt, Artificial Sequence
  Description of Artificial Sequence: Synthetic oligonucleotide
augcuagcacacucuuaaa

SEQ ID NO: 873715 - RNA, 19 nt, Artificial Sequence
  Description of Artificial Sequence: Synthetic oligonucleotide
gagcgcgcggcgugugcgg

SEQ ID NO: 873716 - RNA, 19 nt, Artificial Sequence
  Description of Artificial Sequence: Synthetic oligonucleotide
augcgucgcuggaaagcgc

SEQ ID NO: 873717 - RNA, 19 nt, Artificial Sequence
  Description of Artificial Sequence: Synthetic oligonucleotide
gcuaauuccauuagauccu

SEQ ID NO: 873718 - RNA, 19 nt, Artificial Sequence
  Description of Artificial Sequence: Synthetic oligonucleotide
ggcgugugcggcagaagcg

SEQ ID NO: 873719 - RNA, 19 nt, Artificial Sequence
  Description of Artificial Sequence: Synthetic oligonucleotide
ggggaaguccaaaugucca

SEQ ID NO: 873720 - RNA, 19 nt, Artificial Sequence
  Description of Artificial Sequence: Synthetic oligonucleotide
gagcgggccgccuuaugaa

SEQ ID NO: 873721 - RNA, 19 nt, Artificial Sequence
  Description of Artificial Sequence: Synthetic oligonucleotide
ccucagucccauuagcaca

SEQ ID NO: 873722 - RNA, 19 nt, Artificial Sequence
  Description of Artificial Sequence: Synthetic oligonucleotide
cacuaccgccgacaugaug

SEQ ID NO: 873723 - RNA, 19 nt, Artificial Sequence
  Description of Artificial Sequence: Synthetic oligonucleotide
uccgaagugcgcggcccag

SEQ ID NO: 873724 - RNA, 19 nt, Artificial Sequence
  Description of Artificial Sequence: Synthetic oligonucleotide
ccaggcuaaugugauuggg

SEQ ID NO: 873725 - RNA, 19 nt, Artificial Sequence
  Description of Artificial Sequence: Synthetic oligonucleotide
agcgggccgccuuaugaau

SEQ ID NO: 873726 - RNA, 19 nt, Artificial Sequence
  Description of Artificial Sequence: Synthetic oligonucleotide
ucgcuggaaagcgcgcgac

SEQ ID NO: 873727 - RNA, 19 nt, Artificial Sequence
  Description of Artificial Sequence: Synthetic oligonucleotide
cacugcucaguucagggau

SEQ ID NO: 873728 - RNA, 19 nt, Artificial Sequence
  Description of Artificial Sequence: Synthetic oligonucleotide
cacggguuacuccuguucu

SEQ ID NO: 873729 - RNA, 19 nt, Artificial Sequence
  Description of Artificial Sequence: Synthetic oligonucleotide
ccucgcuagagaagccugc

SEQ ID NO: 873730 - RNA, 19 nt, Artificial Sequence
  Description of Artificial Sequence: Synthetic oligonucleotide
cugcaccgauuguuauuac

SEQ ID NO: 873731 - RNA, 19 nt, Artificial Sequence
  Description of Artificial Sequence: Synthetic oligonucleotide
gugcacgggcguccagccg

SEQ ID NO: 873732 - RNA, 19 nt, Artificial Sequence
  Description of Artificial Sequence: Synthetic oligonucleotide
ggguuaacgcccauggucu

SEQ ID NO: 873733 - RNA, 19 nt, Artificial Sequence
  Description of Artificial Sequence: Synthetic oligonucleotide
cacaaucagccagaccaga

SEQ ID NO: 873734 - RNA, 19 nt, Artificial Sequence
  Description of Artificial Sequence: Synthetic oligonucleotide
gcaaugugggcgugggguc

SEQ ID NO: 873735 - RNA, 19 nt, Artificial Sequence
  Description of Artificial Sequence: Synthetic oligonucleotide
auaucgggugguggagaca

SEQ ID NO: 873736 - RNA, 19 nt, Artificial Sequence
  Description of Artificial Sequence: Synthetic oligonucleotide
cacugaugcacuccaggcu

SEQ ID NO: 873737 - RNA, 19 nt, Artificial Sequence
  Description of Artificial Sequence: Synthetic oligonucleotide
gucacgcaggggaagucca

SEQ ID NO: 873738 - RNA, 19 nt, Artificial Sequence
  Description of Artificial Sequence: Synthetic oligonucleotide
gucgcggcaggcgcggugc

SEQ ID NO: 873739 - RNA, 19 nt, Artificial Sequence
  Description of Artificial Sequence: Synthetic oligonucleotide
acggcucauuugacgguuc

SEQ ID NO: 873740 - RNA, 19 nt, Artificial Sequence
  Description of Artificial Sequence: Synthetic oligonucleotide
ggagcuacggaaggcccug

SEQ ID NO: 873741 - RNA, 19 nt, Artificial Sequence
  Description of Artificial Sequence: Synthetic oligonucleotide
gcaacaaacccuaauccau

SEQ ID NO: 873742 - RNA, 19 nt, Artificial Sequence
  Description of Artificial Sequence: Synthetic oligonucleotide
ccucaccauucgauagugg

SEQ ID NO: 873743 - RNA, 19 nt, Artificial Sequence
  Description of Artificial Sequence: Synthetic oligonucleotide
gcacggguuacuccuguuc

SEQ ID NO: 873744 - RNA, 19 nt, Artificial Sequence
  Description of Artificial Sequence: Synthetic oligonucleotide
ccgguucuagcuuucuuca

SEQ ID NO: 873745 - RNA, 19 nt, Artificial Sequence
  Description of Artificial Sequence: Synthetic oligonucleotide
gccguagaaggaguccucc

SEQ ID NO: 873746 - RNA, 19 nt, Artificial Sequence
  Description of Artificial Sequence: Synthetic oligonucleotide
gguuugugcaaugucugcu

SEQ ID NO: 873747 - RNA, 19 nt, Artificial Sequence
  Description of Artificial Sequence: Synthetic oligonucleotide
gggucgugggcgauaucgg

SEQ ID NO: 873748 - RNA, 19 nt, Artificial Sequence
  Description of Artificial Sequence: Synthetic oligonucleotide
cgcccauggucuuuucugg

SEQ ID NO: 873749 - RNA, 19 nt, Artificial Sequence
  Description of Artificial Sequence: Synthetic oligonucleotide
caccauucgauaguggcau

SEQ ID NO: 873750 - RNA, 19 nt, Artificial Sequence
  Description of Artificial Sequence: Synthetic oligonucleotide
caguuuaucugcaccgauu

SEQ ID NO: 873751 - RNA, 19 nt, Artificial Sequence
  Description of Artificial Sequence: Synthetic oligonucleotide
gccucaccauucgauagug

SEQ ID NO: 873752 - RNA, 19 nt, Artificial Sequence
  Description of Artificial Sequence: Synthetic oligonucleotide
gugcgcggcccagugcacg

SEQ ID NO: 873753 - RNA, 19 nt, Artificial Sequence
  Description of Artificial Sequence: Synthetic oligonucleotide
ucggaccggcgagagggac

SEQ ID NO: 873754 - RNA, 19 nt, Artificial Sequence
  Description of Artificial Sequence: Synthetic oligonucleotide
acccgacuguuccuacaaa

SEQ ID NO: 873755 - RNA, 19 nt, Artificial Sequence
  Description of Artificial Sequence: Synthetic oligonucleotide
gcgauaucgggugguggag

SEQ ID NO: 873756 - RNA, 19 nt, Artificial Sequence
  Description of Artificial Sequence: Synthetic oligonucleotide
agguccccgucgcggcagg

SEQ ID NO: 873757 - RNA, 19 nt, Artificial Sequence
  Description of Artificial Sequence: Synthetic oligonucleotide
cagcaacuuccacuaaaua

SEQ ID NO: 873758 - RNA, 19 nt, Artificial Sequence
  Description of Artificial Sequence: Synthetic oligonucleotide
cuacggaaggcccugucuu

SEQ ID NO: 873759 - RNA, 19 nt, Artificial Sequence
  Description of Artificial Sequence: Synthetic oligonucleotide
acccaugguaguguccaua

SEQ ID NO: 873760 - RNA, 19 nt, Artificial Sequence
  Description of Artificial Sequence: Synthetic oligonucleotide
cuugggcucccguucagau

SEQ ID NO: 873761 - RNA, 19 nt, Artificial Sequence
  Description of Artificial Sequence: Synthetic oligonucleotide
ugcucaguucagggaugcu

SEQ ID NO: 873762 - RNA, 19 nt, Artificial Sequence
  Description of Artificial Sequence: Synthetic oligonucleotide
agugcgcggcccagugcac

SEQ ID NO: 873763 - RNA, 19 nt, Artificial Sequence
  Description of Artificial Sequence: Synthetic oligonucleotide
gggaagcguguucucguga

SEQ ID NO: 873764 - RNA, 19 nt, Artificial Sequence
  Description of Artificial Sequence: Synthetic oligonucleotide
gugagcgcgcggcgugugc

SEQ ID NO: 873765 - RNA, 19 nt, Artificial Sequence
  Description of Artificial Sequence: Synthetic oligonucleotide
ccguucagaugcagagacc

SEQ ID NO: 873766 - RNA, 19 nt, Artificial Sequence
  Description of Artificial Sequence: Synthetic oligonucleotide
gaugcacuccaggcuccca

SEQ ID NO: 873767 - RNA, 19 nt, Artificial Sequence
  Description of Artificial Sequence: Synthetic oligonucleotide
uaacgcccauggucuuuuc

SEQ ID NO: 873768 - RNA, 19 nt, Artificial Sequence
  Description of Artificial Sequence: Synthetic oligonucleotide
ccagccguagaaggagucc

SEQ ID NO: 873769 - RNA, 19 nt, Artificial Sequence
  Description of Artificial Sequence: Synthetic oligonucleotide
ccucacaaucagccagacc

SEQ ID NO: 873770 - RNA, 19 nt, Artificial Sequence
  Description of Artificial Sequence: Synthetic oligonucleotide
gugccggcgaaggccugcg

SEQ ID NO: 873771 - RNA, 19 nt, Artificial Sequence
  Description of Artificial Sequence: Synthetic oligonucleotide
agugaggcgccugcucuua

SEQ ID NO: 873772 - RNA, 19 nt, Artificial Sequence
  Description of Artificial Sequence: Synthetic oligonucleotide
gcgagagggacgugccggc

SEQ ID NO: 873773 - RNA, 19 nt, Artificial Sequence
  Description of Artificial Sequence: Synthetic oligonucleotide
cugauaagcacggguuacu

SEQ ID NO: 873774 - RNA, 19 nt, Artificial Sequence
  Description of Artificial Sequence: Synthetic oligonucleotide
aggcgccugcucuuaucaa

SEQ ID NO: 873775 - RNA, 19 nt, Artificial Sequence
  Description of Artificial Sequence: Synthetic oligonucleotide
gacgugccggcgaaggccu

SEQ ID NO: 873776 - RNA, 19 nt, Artificial Sequence
  Description of Artificial Sequence: Synthetic oligonucleotide
cggguuacuccuguucucc

SEQ ID NO: 873777 - RNA, 19 nt, Artificial Sequence
  Description of Artificial Sequence: Synthetic oligonucleotide
cgggccgccuuaugaaugg

SEQ ID NO: 873778 - RNA, 19 nt, Artificial Sequence
  Description of Artificial Sequence: Synthetic oligonucleotide
cauucgauaguggcauggu

SEQ ID NO: 873779 - RNA, 19 nt, Artificial Sequence
  Description of Artificial Sequence: Synthetic oligonucleotide
ccauaaauuuaaugcaguu

SEQ ID NO: 873780 - RNA, 19 nt, Artificial Sequence
  Description of Artificial Sequence: Synthetic oligonucleotide
uaccgccgacaugaugcgu

SEQ ID NO: 873781 - RNA, 19 nt, Artificial Sequence
  Description of Artificial Sequence: Synthetic oligonucleotide
gugcagcgggaaacggagc

SEQ ID NO: 873782 - RNA, 19 nt, Artificial Sequence
  Description of Artificial Sequence: Synthetic oligonucleotide
gucgugggcgauaucgggu

SEQ ID NO: 873783 - RNA, 19 nt, Artificial Sequence
  Description of Artificial Sequence: Synthetic oligonucleotide
cguccagccguagaaggag

SEQ ID NO: 873784 - RNA, 19 nt, Artificial Sequence
  Description of Artificial Sequence: Synthetic oligonucleotide
gcuacggaaggcccugucu

SEQ ID NO: 873785 - RNA, 19 nt, Artificial Sequence
  Description of Artificial Sequence: Synthetic oligonucleotide
cacccgcacacagcuugag

SEQ ID NO: 873786 - RNA, 19 nt, Artificial Sequence
  Description of Artificial Sequence: Synthetic oligonucleotide
gagggacgugccggcgaag

SEQ ID NO: 873787 - RNA, 19 nt, Artificial Sequence
  Description of Artificial Sequence: Synthetic oligonucleotide
ccuuaugaaugggcguuuc

SEQ ID NO: 873788 - RNA, 19 nt, Artificial Sequence
  Description of Artificial Sequence: Synthetic oligonucleotide
ccggcgagagggacgugcc

SEQ ID NO: 873789 - RNA, 19 nt, Artificial Sequence
  Description of Artificial Sequence: Synthetic oligonucleotide
ggagcgacagcagcuccuc

SEQ ID NO: 873790 - RNA, 19 nt, Artificial Sequence
  Description of Artificial Sequence: Synthetic oligonucleotide
guguucucgugagcuccac

SEQ ID NO: 873791 - RNA, 19 nt, Artificial Sequence
  Description of Artificial Sequence: Synthetic oligonucleotide
cagagcgggccgccuuaug

SEQ ID NO: 873792 - RNA, 19 nt, Artificial Sequence
  Description of Artificial Sequence: Synthetic oligonucleotide
caacacggagcuacuguuu

SEQ ID NO: 873793 - RNA, 19 nt, Artificial Sequence
  Description of Artificial Sequence: Synthetic oligonucleotide
gguuacuccuguucuccau

SEQ ID NO: 873794 - RNA, 19 nt, Artificial Sequence
  Description of Artificial Sequence: Synthetic oligonucleotide
gcgugugcggcagaagcga

SEQ ID NO: 873795 - RNA, 19 nt, Artificial Sequence
  Description of Artificial Sequence: Synthetic oligonucleotide
gggcguccagccguagaag

SEQ ID NO: 873796 - RNA, 19 nt, Artificial Sequence
  Description of Artificial Sequence: Synthetic oligonucleotide
gcgggccgccuuaugaaug

SEQ ID NO: 873797 - RNA, 19 nt, Artificial Sequence
  Description of Artificial Sequence: Synthetic oligonucleotide
ccgacaugaugcgucgcug

SEQ ID NO: 873798 - RNA, 19 nt, Artificial Sequence
  Description of Artificial Sequence: Synthetic oligonucleotide
gcgcccgcacccacuaccg

SEQ ID NO: 873799 - RNA, 19 nt, Artificial Sequence
  Description of Artificial Sequence: Synthetic oligonucleotide
cacgcaggggaaguccaaa

SEQ ID NO: 873800 - RNA, 19 nt, Artificial Sequence
  Description of Artificial Sequence: Synthetic oligonucleotide
ccguucccuaccagggcac

SEQ ID NO: 873801 - RNA, 19 nt, Artificial Sequence
  Description of Artificial Sequence: Synthetic oligonucleotide
cgaagugcgcggcccagug

SEQ ID NO: 873802 - RNA, 19 nt, Artificial Sequence
  Description of Artificial Sequence: Synthetic oligonucleotide
cuccucgcuagagaagccu

SEQ ID NO: 873803 - RNA, 19 nt, Artificial Sequence
  Description of Artificial Sequence: Synthetic oligonucleotide
aggugagcgcgcggcgugu

SEQ ID NO: 873804 - RNA, 19 nt, Artificial Sequence
  Description of Artificial Sequence: Synthetic oligonucleotide
cgauuuguucccaggcuaa

SEQ ID NO: 873805 - RNA, 19 nt, Artificial Sequence
  Description of Artificial Sequence: Synthetic oligonucleotide
ggucuacauaggucuuucu

SEQ ID NO: 873806 - RNA, 19 nt, Artificial Sequence
  Description of Artificial Sequence: Synthetic oligonucleotide
guguaaccacuaguugccu

SEQ ID NO: 873807 - RNA, 19 nt, Artificial Sequence
  Description of Artificial Sequence: Synthetic oligonucleotide
gccgacaugaugcgucgcu

SEQ ID NO: 873808 - RNA, 19 nt, Artificial Sequence
  Description of Artificial Sequence: Synthetic oligonucleotide
gacauucagugaggcgccu

SEQ ID NO: 873809 - RNA, 19 nt, Artificial Sequence
  Description of Artificial Sequence: Synthetic oligonucleotide
cucggaccggcgagaggga

SEQ ID NO: 873810 - RNA, 19 nt, Artificial Sequence
  Description of Artificial Sequence: Synthetic oligonucleotide
ccccguucccuaccagggc

SEQ ID NO: 873811 - RNA, 19 nt, Artificial Sequence
  Description of Artificial Sequence: Synthetic oligonucleotide
cgguucuagcuuucuucac

SEQ ID NO: 873812 - RNA, 19 nt, Artificial Sequence
  Description of Artificial Sequence: Synthetic oligonucleotide
gcucccguucagaugcaga

SEQ ID NO: 873813 - RNA, 19 nt, Artificial Sequence
  Description of Artificial Sequence: Synthetic oligonucleotide
caacuacuugggcucccgu

SEQ ID NO: 873814 - RNA, 19 nt, Artificial Sequence
  Description of Artificial Sequence: Synthetic oligonucleotide
ugcugccgucaggccacug

SEQ ID NO: 873815 - RNA, 19 nt, Artificial Sequence
  Description of Artificial Sequence: Synthetic oligonucleotide
gcagcgggaaacggagcga

SEQ ID NO: 873816 - RNA, 19 nt, Artificial Sequence
  Description of Artificial Sequence: Synthetic oligonucleotide
ggugagcgcgcggcgugug

SEQ ID NO: 873817 - RNA, 19 nt, Artificial Sequence
  Description of Artificial Sequence: Synthetic oligonucleotide
gcggcccagugcacgggcg

SEQ ID NO: 873818 - RNA, 19 nt, Artificial Sequence
  Description of Artificial Sequence: Synthetic oligonucleotide
agcgcgcgacucggaccgg

SEQ ID NO: 873819 - RNA, 19 nt, Artificial Sequence
  Description of Artificial Sequence: Synthetic oligonucleotide
ggaccggcgagagggacgu

SEQ ID NO: 873820 - RNA, 19 nt, Artificial Sequence
  Description of Artificial Sequence: Synthetic oligonucleotide
gcgccugcucuuaucaacu

SEQ ID NO: 873821 - RNA, 19 nt, Artificial Sequence
  Description of Artificial Sequence: Synthetic oligonucleotide
cuccacucaaggugccauu

SEQ ID NO: 873822 - RNA, 19 nt, Artificial Sequence
  Description of Artificial Sequence: Synthetic oligonucleotide
gcgucgcuggaaagcgcgc

SEQ ID NO: 873823 - RNA, 19 nt, Artificial Sequence
  Description of Artificial Sequence: Synthetic oligonucleotide
cgagagggacgugccggcg

SEQ ID NO: 873824 - RNA, 19 nt, Artificial Sequence
  Description of Artificial Sequence: Synthetic oligonucleotide
gguuaacgcccauggucuu

SEQ ID NO: 873825 - RNA, 19 nt, Artificial Sequence
  Description of Artificial Sequence: Synthetic oligonucleotide
gagcuacggaaggcccugu

SEQ ID NO: 873826 - RNA, 19 nt, Artificial Sequence
  Description of Artificial Sequence: Synthetic oligonucleotide
ccagugcacgggcguccag

SEQ ID NO: 873827 - RNA, 19 nt, Artificial Sequence
  Description of Artificial Sequence: Synthetic oligonucleotide
cgauaucgggugguggaga

SEQ ID NO: 873828 - RNA, 19 nt, Artificial Sequence
  Description of Artificial Sequence: Synthetic oligonucleotide
gugaggcgccugcucuuau

SEQ ID NO: 873829 - RNA, 19 nt, Artificial Sequence
  Description of Artificial Sequence: Synthetic oligonucleotide
gcggcgugugcggcagaag

SEQ ID NO: 873830 - RNA, 19 nt, Artificial Sequence
  Description of Artificial Sequence: Synthetic oligonucleotide
cgacucggaccggcgagag

SEQ ID NO: 873831 - RNA, 19 nt, Artificial Sequence
  Description of Artificial Sequence: Synthetic oligonucleotide
ccgccuuaugaaugggcgu

SEQ ID NO: 873832 - RNA, 19 nt, Artificial Sequence
  Description of Artificial Sequence: Synthetic oligonucleotide
gaccggcgagagggacgug

SEQ ID NO: 873833 - RNA, 19 nt, Artificial Sequence
  Description of Artificial Sequence: Synthetic oligonucleotide
acgugccggcgaaggccug

SEQ ID NO: 873834 - RNA, 19 nt, Artificial Sequence
  Description of Artificial Sequence: Synthetic oligonucleotide
aucgggugguggagacauu

SEQ ID NO: 873835 - RNA, 19 nt, Artificial Sequence
  Description of Artificial Sequence: Synthetic oligonucleotide
cgugccggcgaaggccugc

SEQ ID NO: 873836 - RNA, 19 nt, Artificial Sequence
  Description of Artificial Sequence: Synthetic oligonucleotide
gcgcgcgacucggaccggc

SEQ ID NO: 873837 - RNA, 19 nt, Artificial Sequence
  Description of Artificial Sequence: Synthetic oligonucleotide
ggucaguaugagccccguu

SEQ ID NO: 873838 - RNA, 19 nt, Artificial Sequence
  Description of Artificial Sequence: Synthetic oligonucleotide
gccuuaugaaugggcguuu

SEQ ID NO: 873839 - RNA, 19 nt, Artificial Sequence
  Description of Artificial Sequence: Synthetic oligonucleotide
cgcacccacuaccgccgac

SEQ ID NO: 873840 - RNA, 19 nt, Artificial Sequence
  Description of Artificial Sequence: Synthetic oligonucleotide
cgccuuaugaaugggcguu

SEQ ID NO: 873841 - RNA, 19 nt, Artificial Sequence
  Description of Artificial Sequence: Synthetic oligonucleotide
gggcucccguucagaugca

SEQ ID NO: 873842 - RNA, 19 nt, Artificial Sequence
  Description of Artificial Sequence: Synthetic oligonucleotide
ccgcacccacuaccgccga

SEQ ID NO: 873843 - RNA, 19 nt, Artificial Sequence
  Description of Artificial Sequence: Synthetic oligonucleotide
ccgaagugcgcggcccagu

SEQ ID NO: 873844 - RNA, 19 nt, Artificial Sequence
  Description of Artificial Sequence: Synthetic oligonucleotide
cguucccuaccagggcacu

SEQ ID NO: 873845 - RNA, 19 nt, Artificial Sequence
  Description of Artificial Sequence: Synthetic oligonucleotide
ccagagcgggccgccuuau

SEQ ID NO: 873846 - RNA, 19 nt, Artificial Sequence
  Description of Artificial Sequence: Synthetic oligonucleotide
aacauuaccaaccagaggc

SEQ ID NO: 873847 - RNA, 19 nt, Artificial Sequence
  Description of Artificial Sequence: Synthetic oligonucleotide
aagggcauuuguuaagggc

SEQ ID NO: 873848 - RNA, 19 nt, Artificial Sequence
  Description of Artificial Sequence: Synthetic oligonucleotide
aguucgugaguucacaggc

SEQ ID NO: 873849 - RNA, 19 nt, Artificial Sequence
  Description of Artificial Sequence: Synthetic oligonucleotide
guagagaggauccaguucg

SEQ ID NO: 873850 - RNA, 19 nt, Artificial Sequence
  Description of Artificial Sequence: Synthetic oligonucleotide
uauugugugugcaacaggc

SEQ ID NO: 873851 - RNA, 19 nt, Artificial Sequence
  Description of Artificial Sequence: Synthetic oligonucleotide
ucagcagacacacuacagg

SEQ ID NO: 873852 - RNA, 19 nt, Artificial Sequence
  Description of Artificial Sequence: Synthetic oligonucleotide
uguugcggaaaccauaggc

SEQ ID NO: 873853 - RNA, 19 nt, Artificial Sequence
  Description of Artificial Sequence: Synthetic oligonucleotide
uacagguuaagccauccag

SEQ ID NO: 873854 - RNA, 19 nt, Artificial Sequence
  Description of Artificial Sequence: Synthetic oligonucleotide
uguuguaaggacacagucc

SEQ ID NO: 873855 - RNA, 19 nt, Artificial Sequence
  Description of Artificial Sequence: Synthetic oligonucleotide
aauuuugaaggucuccagu

SEQ ID NO: 873856 - RNA, 19 nt, Artificial Sequence
  Description of Artificial Sequence: Synthetic oligonucleotide
ucaucuucgauguggaucu

SEQ ID NO: 873857 - RNA, 19 nt, Artificial Sequence
  Description of Artificial Sequence: Synthetic oligonucleotide
uguaaggacacaguccacg

SEQ ID NO: 873858 - RNA, 19 nt, Artificial Sequence
  Description of Artificial Sequence: Synthetic oligonucleotide
uuauugagcugaauguccc

SEQ ID NO: 873859 - RNA, 19 nt, Artificial Sequence
  Description of Artificial Sequence: Synthetic oligonucleotide
aaugguagggacagcgacc

SEQ ID NO: 873860 - RNA, 19 nt, Artificial Sequence
  Description of Artificial Sequence: Synthetic oligonucleotide
agggcauuuguuaagggcc

SEQ ID NO: 873861 - RNA, 19 nt, Artificial Sequence
  Description of Artificial Sequence: Synthetic oligonucleotide
gaugaaauugccauguguc

SEQ ID NO: 873862 - RNA, 19 nt, Artificial Sequence
  Description of Artificial Sequence: Synthetic oligonucleotide
uaccuuauuagcaucuaga

SEQ ID NO: 873863 - RNA, 19 nt, Artificial Sequence
  Description of Artificial Sequence: Synthetic oligonucleotide
uucgauguggaucuuggcu

SEQ ID NO: 873864 - RNA, 19 nt, Artificial Sequence
  Description of Artificial Sequence: Synthetic oligonucleotide
uagggauuauuuauugagc

SEQ ID NO: 873865 - RNA, 19 nt, Artificial Sequence
  Description of Artificial Sequence: Synthetic oligonucleotide
uuguuaagggcccuccucc

SEQ ID NO: 873866 - RNA, 19 nt, Artificial Sequence
  Description of Artificial Sequence: Synthetic oligonucleotide
acaugcuccagguagccuc

SEQ ID NO: 873867 - RNA, 19 nt, Artificial Sequence
  Description of Artificial Sequence: Synthetic oligonucleotide
gguuaagccauccaggggc

SEQ ID NO: 873868 - RNA, 19 nt, Artificial Sequence
  Description of Artificial Sequence: Synthetic oligonucleotide
aaguuaauuuccuggcagu

SEQ ID NO: 873869 - RNA, 19 nt, Artificial Sequence
  Description of Artificial Sequence: Synthetic oligonucleotide
acgcaggucauguacugcc

SEQ ID NO: 873870 - RNA, 19 nt, Artificial Sequence
  Description of Artificial Sequence: Synthetic oligonucleotide
ugagacagaaacgaccacc

SEQ ID NO: 873871 - RNA, 19 nt, Artificial Sequence
  Description of Artificial Sequence: Synthetic oligonucleotide
ugcugauacacacaugguc

SEQ ID NO: 873872 - RNA, 19 nt, Artificial Sequence
  Description of Artificial Sequence: Synthetic oligonucleotide
uuaauuuccuggcaguguu

SEQ ID NO: 873873 - RNA, 19 nt, Artificial Sequence
  Description of Artificial Sequence: Synthetic oligonucleotide
agcgcaacagcaccuggcc

SEQ ID NO: 873874 - RNA, 19 nt, Artificial Sequence
  Description of Artificial Sequence: Synthetic oligonucleotide
cuuuagaguugcuuugccc

SEQ ID NO: 873875 - RNA, 19 nt, Artificial Sequence
  Description of Artificial Sequence: Synthetic oligonucleotide
cagguuaagccauccaggg

SEQ ID NO: 873876 - RNA, 19 nt, Artificial Sequence
  Description of Artificial Sequence: Synthetic oligonucleotide
cuggcuuuccaaaaggcug

SEQ ID NO: 873877 - RNA, 19 nt, Artificial Sequence
  Description of Artificial Sequence: Synthetic oligonucleotide
uccacauaaugguagggac

SEQ ID NO: 873878 - RNA, 19 nt, Artificial Sequence
  Description of Artificial Sequence: Synthetic oligonucleotide
ugcgaagguaguaucaaaa

SEQ ID NO: 873879 - RNA, 19 nt, Artificial Sequence
  Description of Artificial Sequence: Synthetic oligonucleotide
acgucggccacauggauuc

SEQ ID NO: 873880 - RNA, 19 nt, Artificial Sequence
  Description of Artificial Sequence: Synthetic oligonucleotide
acaagguucuggauguugc

SEQ ID NO: 873881 - RNA, 19 nt, Artificial Sequence
  Description of Artificial Sequence: Synthetic oligonucleotide
aagugacacacccacugca

SEQ ID NO: 873882 - RNA, 19 nt, Artificial Sequence
  Description of Artificial Sequence: Synthetic oligonucleotide
gaguuggucuucuccacgg

SEQ ID NO: 873883 - RNA, 19 nt, Artificial Sequence
  Description of Artificial Sequence: Synthetic oligonucleotide
ugcugcuaccuuauuagca

SEQ ID NO: 873884 - RNA, 19 nt, Artificial Sequence
  Description of Artificial Sequence: Synthetic oligonucleotide
gaauccguugcugauacac

SEQ ID NO: 873885 - RNA, 19 nt, Artificial Sequence
  Description of Artificial Sequence: Synthetic oligonucleotide
uucgugaguucacaggcca

SEQ ID NO: 873886 - RNA, 19 nt, Artificial Sequence
  Description of Artificial Sequence: Synthetic oligonucleotide
uuccucaccaugcuguaca

SEQ ID NO: 873887 - RNA, 19 nt, Artificial Sequence
  Description of Artificial Sequence: Synthetic oligonucleotide
acagcgaccucgcuucagc

SEQ ID NO: 873888 - RNA, 19 nt, Artificial Sequence
  Description of Artificial Sequence: Synthetic oligonucleotide
ggugcugcuaccuuauuag

SEQ ID NO: 873889 - RNA, 19 nt, Artificial Sequence
  Description of Artificial Sequence: Synthetic oligonucleotide
uggaauccguugcugauac

SEQ ID NO: 873890 - RNA, 19 nt, Artificial Sequence
  Description of Artificial Sequence: Synthetic oligonucleotide
acccacaugcagcuagugc

SEQ ID NO: 873891 - RNA, 19 nt, Artificial Sequence
  Description of Artificial Sequence: Synthetic oligonucleotide
ucuagaugcuucuagucuu

SEQ ID NO: 873892 - RNA, 19 nt, Artificial Sequence
  Description of Artificial Sequence: Synthetic oligonucleotide
aaaccgggcagccagugau

SEQ ID NO: 873893 - RNA, 19 nt, Artificial Sequence
  Description of Artificial Sequence: Synthetic oligonucleotide
cugaaguuccuugcgaagg

SEQ ID NO: 873894 - RNA, 19 nt, Artificial Sequence
  Description of Artificial Sequence: Synthetic oligonucleotide
cauacucuucccuguagag

SEQ ID NO: 873895 - RNA, 19 nt, Artificial Sequence
  Description of Artificial Sequence: Synthetic oligonucleotide
accuuauuagcaucuagaa

SEQ ID NO: 873896 - RNA, 19 nt, Artificial Sequence
  Description of Artificial Sequence: Synthetic oligonucleotide
ucggaaucgcugcacaaac

SEQ ID NO: 873897 - RNA, 19 nt, Artificial Sequence
  Description of Artificial Sequence: Synthetic oligonucleotide
ucgauguggaucuuggcua

SEQ ID NO: 873898 - RNA, 19 nt, Artificial Sequence
  Description of Artificial Sequence: Synthetic oligonucleotide
ugaaguuccuugcgaaggu

SEQ ID NO: 873899 - RNA, 19 nt, Artificial Sequence
  Description of Artificial Sequence: Synthetic oligonucleotide
aagagugacacuccuucuu

SEQ ID NO: 873900 - RNA, 19 nt, Artificial Sequence
  Description of Artificial Sequence: Synthetic oligonucleotide
aggcacgcaggucauguac

SEQ ID NO: 873901 - RNA, 19 nt, Artificial Sequence
  Description of Artificial Sequence: Synthetic oligonucleotide
ugcuaccuuauuagcaucu

SEQ ID NO: 873902 - RNA, 19 nt, Artificial Sequence
  Description of Artificial Sequence: Synthetic oligonucleotide
cacauggucuuccugggag

SEQ ID NO: 873903 - RNA, 19 nt, Artificial Sequence
  Description of Artificial Sequence: Synthetic oligonucleotide
ugguagguaacgucggcca

SEQ ID NO: 873904 - RNA, 19 nt, Artificial Sequence
  Description of Artificial Sequence: Synthetic oligonucleotide
ugcgugccggaacacaugc

SEQ ID NO: 873905 - RNA, 19 nt, Artificial Sequence
  Description of Artificial Sequence: Synthetic oligonucleotide
uucuggauguugcggaaac

SEQ ID NO: 873906 - RNA, 19 nt, Artificial Sequence
  Description of Artificial Sequence: Synthetic oligonucleotide
auaaccugcuguggggacc

SEQ ID NO: 873907 - RNA, 19 nt, Artificial Sequence
  Description of Artificial Sequence: Synthetic oligonucleotide
cuguuguaaggacacaguc

SEQ ID NO: 873908 - RNA, 19 nt, Artificial Sequence
  Description of Artificial Sequence: Synthetic oligonucleotide
caguucgugaguucacagg

SEQ ID NO: 873909 - RNA, 19 nt, Artificial Sequence
  Description of Artificial Sequence: Synthetic oligonucleotide
guagaucuugucuggaguc

SEQ ID NO: 873910 - RNA, 19 nt, Artificial Sequence
  Description of Artificial Sequence: Synthetic oligonucleotide
uuccacauaaugguaggga

SEQ ID NO: 873911 - RNA, 19 nt, Artificial Sequence
  Description of Artificial Sequence: Synthetic oligonucleotide
agguuaagccauccagggg

SEQ ID NO: 873912 - RNA, 19 nt, Artificial Sequence
  Description of Artificial Sequence: Synthetic oligonucleotide
cacgucacgggucugguac

SEQ ID NO: 873913 - RNA, 19 nt, Artificial Sequence
  Description of Artificial Sequence: Synthetic oligonucleotide
cuaccuuauuagcaucuag

SEQ ID NO: 873914 - RNA, 19 nt, Artificial Sequence
  Description of Artificial Sequence: Synthetic oligonucleotide
uuagcaucuagaacccuuu

SEQ ID NO: 873915 - RNA, 19 nt, Artificial Sequence
  Description of Artificial Sequence: Synthetic oligonucleotide
gagcccauaaccugcugug

SEQ ID NO: 873916 - RNA, 19 nt, Artificial Sequence
  Description of Artificial Sequence: Synthetic oligonucleotide
aguuaauuuccuggcagug

SEQ ID NO: 873917 - RNA, 19 nt, Artificial Sequence
  Description of Artificial Sequence: Synthetic oligonucleotide
ugagcugaaugucccuggc

SEQ ID NO: 873918 - RNA, 19 nt, Artificial Sequence
  Description of Artificial Sequence: Synthetic oligonucleotide
cuggguucuuccaucuggg

SEQ ID NO: 873919 - RNA, 19 nt, Artificial Sequence
  Description of Artificial Sequence: Synthetic oligonucleotide
auuaccaaccagaggcacg

SEQ ID NO: 873920 - RNA, 19 nt, Artificial Sequence
  Description of Artificial Sequence: Synthetic oligonucleotide
aggucauguacugccaagg

SEQ ID NO: 873921 - RNA, 19 nt, Artificial Sequence
  Description of Artificial Sequence: Synthetic oligonucleotide
gaagaagucaggucuagau

SEQ ID NO: 873922 - RNA, 19 nt, Artificial Sequence
  Description of Artificial Sequence: Synthetic oligonucleotide
gaguacgcccaggaaaagg

SEQ ID NO: 873923 - RNA, 19 nt, Artificial Sequence
  Description of Artificial Sequence: Synthetic oligonucleotide
guaucuagggauuauuuau

SEQ ID NO: 873924 - RNA, 19 nt, Artificial Sequence
  Description of Artificial Sequence: Synthetic oligonucleotide
cauggguugguagguaacg

SEQ ID NO: 873925 - RNA, 19 nt, Artificial Sequence
  Description of Artificial Sequence: Synthetic oligonucleotide
augagcaccgucucugcug

SEQ ID NO: 873926 - RNA, 19 nt, Artificial Sequence
  Description of Artificial Sequence: Synthetic oligonucleotide
cuggacuggggugagacag

SEQ ID NO: 873927 - RNA, 19 nt, Artificial Sequence
  Description of Artificial Sequence: Synthetic oligonucleotide
uuaagggcccuccuccuuc

SEQ ID NO: 873928 - RNA, 19 nt, Artificial Sequence
  Description of Artificial Sequence: Synthetic oligonucleotide
agaaugaaguuaauuuccu

SEQ ID NO: 873929 - RNA, 19 nt, Artificial Sequence
  Description of Artificial Sequence: Synthetic oligonucleotide
uugguagguaacgucggcc

SEQ ID NO: 873930 - RNA, 19 nt, Artificial Sequence
  Description of Artificial Sequence: Synthetic oligonucleotide
gucauguacugccaaggac

SEQ ID NO: 873931 - RNA, 19 nt, Artificial Sequence
  Description of Artificial Sequence: Synthetic oligonucleotide
ugguauugugugugcaaca

SEQ ID NO: 873932 - RNA, 19 nt, Artificial Sequence
  Description of Artificial Sequence: Synthetic oligonucleotide
aguguguucucugugugga

SEQ ID NO: 873933 - RNA, 19 nt, Artificial Sequence
  Description of Artificial Sequence: Synthetic oligonucleotide
gguagggacagcgaccucg

SEQ ID NO: 873934 - RNA, 19 nt, Artificial Sequence
  Description of Artificial Sequence: Synthetic oligonucleotide
accaccugaugcugaugcc

SEQ ID NO: 873935 - RNA, 19 nt, Artificial Sequence
  Description of Artificial Sequence: Synthetic oligonucleotide
aggucuagaugcuucuagu

SEQ ID NO: 873936 - RNA, 19 nt, Artificial Sequence
  Description of Artificial Sequence: Synthetic oligonucleotide
agguucuggauguugcgga

SEQ ID NO: 873937 - RNA, 19 nt, Artificial Sequence
  Description of Artificial Sequence: Synthetic oligonucleotide
agugacacuccuucuuccu

SEQ ID NO: 873938 - RNA, 19 nt, Artificial Sequence
  Description of Artificial Sequence: Synthetic oligonucleotide
gugugcaacaggcggcugg

SEQ ID NO: 873939 - RNA, 19 nt, Artificial Sequence
  Description of Artificial Sequence: Synthetic oligonucleotide
ucauggguugguagguaac

SEQ ID NO: 873940 - RNA, 19 nt, Artificial Sequence
  Description of Artificial Sequence: Synthetic oligonucleotide
ggagguacucugcagggag

SEQ ID NO: 873941 - RNA, 19 nt, Artificial Sequence
  Description of Artificial Sequence: Synthetic oligonucleotide
cauuuguuaagggcccucc

SEQ ID NO: 873942 - RNA, 19 nt, Artificial Sequence
  Description of Artificial Sequence: Synthetic oligonucleotide
uugcuuugcccucggaauc

SEQ ID NO: 873943 - RNA, 19 nt, Artificial Sequence
  Description of Artificial Sequence: Synthetic oligonucleotide
ucaugacucugcuggguga

SEQ ID NO: 873944 - RNA, 19 nt, Artificial Sequence
  Description of Artificial Sequence: Synthetic oligonucleotide
uguggaauccguugcugau

SEQ ID NO: 873945 - RNA, 19 nt, Artificial Sequence
  Description of Artificial Sequence: Synthetic oligonucleotide
ccagguagccuccugagcc

SEQ ID NO: 873946 - RNA, 19 nt, Artificial Sequence
  Description of Artificial Sequence: Synthetic oligonucleotide
caguguguucucugugugg

SEQ ID NO: 873947 - RNA, 19 nt, Artificial Sequence
  Description of Artificial Sequence: Synthetic oligonucleotide
auuuguuaagggcccuccu

SEQ ID NO: 873948 - RNA, 19 nt, Artificial Sequence
  Description of Artificial Sequence: Synthetic oligonucleotide
ucgggugccucauuccuca

SEQ ID NO: 873949 - RNA, 19 nt, Artificial Sequence
  Description of Artificial Sequence: Synthetic oligonucleotide
uuugaggaauccagcugaa

SEQ ID NO: 873950 - RNA, 19 nt, Artificial Sequence
  Description of Artificial Sequence: Synthetic oligonucleotide
gauccaguucgugaguuca

SEQ ID NO: 873951 - RNA, 19 nt, Artificial Sequence
  Description of Artificial Sequence: Synthetic oligonucleotide
gguauugugugugcaacag

SEQ ID NO: 873952 - RNA, 19 nt, Artificial Sequence
  Description of Artificial Sequence: Synthetic oligonucleotide
uccucaugacucugcuggg

SEQ ID NO: 873953 - RNA, 19 nt, Artificial Sequence
  Description of Artificial Sequence: Synthetic oligonucleotide
uacgcccaggaaaaggcaa

SEQ ID NO: 873954 - RNA, 19 nt, Artificial Sequence
  Description of Artificial Sequence: Synthetic oligonucleotide
gcaacauuaccaaccagag

SEQ ID NO: 873955 - RNA, 19 nt, Artificial Sequence
  Description of Artificial Sequence: Synthetic oligonucleotide
ggguugguagguaacgucg

SEQ ID NO: 873956 - RNA, 19 nt, Artificial Sequence
  Description of Artificial Sequence: Synthetic oligonucleotide
cucaugacucugcugggug

SEQ ID NO: 873957 - RNA, 19 nt, Artificial Sequence
  Description of Artificial Sequence: Synthetic oligonucleotide
gggauuauuuauugagcug

SEQ ID NO: 873958 - RNA, 19 nt, Artificial Sequence
  Description of Artificial Sequence: Synthetic oligonucleotide
uugcccucggaaucgcugc

SEQ ID NO: 873959 - RNA, 19 nt, Artificial Sequence
  Description of Artificial Sequence: Synthetic oligonucleotide
aaucgcugcacaaacucuu

SEQ ID NO: 873960 - RNA, 19 nt, Artificial Sequence
  Description of Artificial Sequence: Synthetic oligonucleotide
uguuaagggcccuccuccu

SEQ ID NO: 873961 - RNA, 19 nt, Artificial Sequence
  Description of Artificial Sequence: Synthetic oligonucleotide
ucacaugguagaucuuguc

SEQ ID NO: 873962 - RNA, 19 nt, Artificial Sequence
  Description of Artificial Sequence: Synthetic oligonucleotide
aauccguugcugauacaca

SEQ ID NO: 873963 - RNA, 19 nt, Artificial Sequence
  Description of Artificial Sequence: Synthetic oligonucleotide
cugaguacgcccaggaaaa

SEQ ID NO: 873964 - RNA, 19 nt, Artificial Sequence
  Description of Artificial Sequence: Synthetic oligonucleotide
caugcuccagguagccucc

SEQ ID NO: 873965 - RNA, 19 nt, Artificial Sequence
  Description of Artificial Sequence: Synthetic oligonucleotide
cuuggagguaacucccauc

SEQ ID NO: 873966 - RNA, 19 nt, Artificial Sequence
  Description of Artificial Sequence: Synthetic oligonucleotide
ucacgggucugguacuucu

SEQ ID NO: 873967 - RNA, 19 nt, Artificial Sequence
  Description of Artificial Sequence: Synthetic oligonucleotide
aaaccauaggccacagcaa

SEQ ID NO: 873968 - RNA, 19 nt, Artificial Sequence
  Description of Artificial Sequence: Synthetic oligonucleotide
guacucugcagggagcgag

SEQ ID NO: 873969 - RNA, 19 nt, Artificial Sequence
  Description of Artificial Sequence: Synthetic oligonucleotide
cuucgauguggaucuuggc

SEQ ID NO: 873970 - RNA, 19 nt, Artificial Sequence
  Description of Artificial Sequence: Synthetic oligonucleotide
ccuuauuagcaucuagaac

SEQ ID NO: 873971 - RNA, 19 nt, Artificial Sequence
  Description of Artificial Sequence: Synthetic oligonucleotide
uguaggggaggaugaaauu

SEQ ID NO: 873972 - RNA, 19 nt, Artificial Sequence
  Description of Artificial Sequence: Synthetic oligonucleotide
caggucauguacugccaag

SEQ ID NO: 873973 - RNA, 19 nt, Artificial Sequence
  Description of Artificial Sequence: Synthetic oligonucleotide
ccaaggacccacaugcagc

SEQ ID NO: 873974 - RNA, 19 nt, Artificial Sequence
  Description of Artificial Sequence: Synthetic oligonucleotide
auacucuucccuguagaga

SEQ ID NO: 873975 - RNA, 19 nt, Artificial Sequence
  Description of Artificial Sequence: Synthetic oligonucleotide
ugaagaagucaggucuaga

SEQ ID NO: 873976 - RNA, 19 nt, Artificial Sequence
  Description of Artificial Sequence: Synthetic oligonucleotide
ggcuaugccacuucccggc

SEQ ID NO: 873977 - RNA, 19 nt, Artificial Sequence
  Description of Artificial Sequence: Synthetic oligonucleotide
uccucaccaugcuguacag

SEQ ID NO: 873978 - RNA, 19 nt, Artificial Sequence
  Description of Artificial Sequence: Synthetic oligonucleotide
gucuagaugcuucuagucu

SEQ ID NO: 873979 - RNA, 19 nt, Artificial Sequence
  Description of Artificial Sequence: Synthetic oligonucleotide
gguacuucugguugaagaa

SEQ ID NO: 873980 - RNA, 19 nt, Artificial Sequence
  Description of Artificial Sequence: Synthetic oligonucleotide
uccaguucgugaguucaca

SEQ ID NO: 873981 - RNA, 19 nt, Artificial Sequence
  Description of Artificial Sequence: Synthetic oligonucleotide
agacacacuacagguuaag

SEQ ID NO: 873982 - RNA, 19 nt, Artificial Sequence
  Description of Artificial Sequence: Synthetic oligonucleotide
ggaggaugaaauugccaug

SEQ ID NO: 873983 - RNA, 19 nt, Artificial Sequence
  Description of Artificial Sequence: Synthetic oligonucleotide
uugcgaagguaguaucaaa

SEQ ID NO: 873984 - RNA, 19 nt, Artificial Sequence
  Description of Artificial Sequence: Synthetic oligonucleotide
ugucauagcagggcaucac

SEQ ID NO: 873985 - RNA, 19 nt, Artificial Sequence
  Description of Artificial Sequence: Synthetic oligonucleotide
gauuauuuauugagcugaa

SEQ ID NO: 873986 - RNA, 19 nt, Artificial Sequence
  Description of Artificial Sequence: Synthetic oligonucleotide
uccuaccaccugaugcuga

SEQ ID NO: 873987 - RNA, 19 nt, Artificial Sequence
  Description of Artificial Sequence: Synthetic oligonucleotide
agcgagcacgcuuccagcu

SEQ ID NO: 873988 - RNA, 19 nt, Artificial Sequence
  Description of Artificial Sequence: Synthetic oligonucleotide
uccuugcgaagguaguauc

SEQ ID NO: 873989 - RNA, 19 nt, Artificial Sequence
  Description of Artificial Sequence: Synthetic oligonucleotide
cuggauguugcggaaacca

SEQ ID NO: 873990 - RNA, 19 nt, Artificial Sequence
  Description of Artificial Sequence: Synthetic oligonucleotide
uuguaaggacacaguccac

SEQ ID NO: 873991 - RNA, 19 nt, Artificial Sequence
  Description of Artificial Sequence: Synthetic oligonucleotide
ugaaaccgggcagccagug

SEQ ID NO: 873992 - RNA, 19 nt, Artificial Sequence
  Description of Artificial Sequence: Synthetic oligonucleotide
ccagugaugcucuggacug

SEQ ID NO: 873993 - RNA, 19 nt, Artificial Sequence
  Description of Artificial Sequence: Synthetic oligonucleotide
gggugagacagaaacgacc

SEQ ID NO: 873994 - RNA, 19 nt, Artificial Sequence
  Description of Artificial Sequence: Synthetic oligonucleotide
uucccggcuucuuauccac

SEQ ID NO: 873995 - RNA, 19 nt, Artificial Sequence
  Description of Artificial Sequence: Synthetic oligonucleotide
cuagaacccuuuucagcuc

SEQ ID NO: 873996 - RNA, 19 nt, Artificial Sequence
  Description of Artificial Sequence: Synthetic oligonucleotide
gcuagugccccacuuuagc

SEQ ID NO: 873997 - RNA, 19 nt, Artificial Sequence
  Description of Artificial Sequence: Synthetic oligonucleotide
gguaucuagggauuauuua

SEQ ID NO: 873998 - RNA, 19 nt, Artificial Sequence
  Description of Artificial Sequence: Synthetic oligonucleotide
gcccauaaccugcuguggg

SEQ ID NO: 873999 - RNA, 19 nt, Artificial Sequence
  Description of Artificial Sequence: Synthetic oligonucleotide
ggucuagaugcuucuaguc

SEQ ID NO: 874000 - RNA, 19 nt, Artificial Sequence
  Description of Artificial Sequence: Synthetic oligonucleotide
gaaacgaccaccagccgcu

SEQ ID NO: 874001 - RNA, 19 nt, Artificial Sequence
  Description of Artificial Sequence: Synthetic oligonucleotide
cagucauucagggagaccu

SEQ ID NO: 874002 - RNA, 19 nt, Artificial Sequence
  Description of Artificial Sequence: Synthetic oligonucleotide
cagggagcgagcacgcuuc

SEQ ID NO: 874003 - RNA, 19 nt, Artificial Sequence
  Description of Artificial Sequence: Synthetic oligonucleotide
gcugaaguuccuugcgaag

SEQ ID NO: 874004 - RNA, 19 nt, Artificial Sequence
  Description of Artificial Sequence: Synthetic oligonucleotide
gguugguagguaacgucgg

SEQ ID NO: 874005 - RNA, 19 nt, Artificial Sequence
  Description of Artificial Sequence: Synthetic oligonucleotide
agcacacaauccaacacau

SEQ ID NO: 874006 - RNA, 19 nt, Artificial Sequence
  Description of Artificial Sequence: Synthetic oligonucleotide
cuucugaguacgcccagga

SEQ ID NO: 874007 - RNA, 19 nt, Artificial Sequence
  Description of Artificial Sequence: Synthetic oligonucleotide
uccucauggguugguaggu

SEQ ID NO: 874008 - RNA, 19 nt, Artificial Sequence
  Description of Artificial Sequence: Synthetic oligonucleotide
gauguaggggaggaugaaa

SEQ ID NO: 874009 - RNA, 19 nt, Artificial Sequence
  Description of Artificial Sequence: Synthetic oligonucleotide
accgucucugcugaaguga

SEQ ID NO: 874010 - RNA, 19 nt, Artificial Sequence
  Description of Artificial Sequence: Synthetic oligonucleotide
gaugcuguugcugggcaaa

SEQ ID NO: 874011 - RNA, 19 nt, Artificial Sequence
  Description of Artificial Sequence: Synthetic oligonucleotide
agcccauaaccugcugugg

SEQ ID NO: 874012 - RNA, 19 nt, Artificial Sequence
  Description of Artificial Sequence: Synthetic oligonucleotide
gggacagcgaccucgcuuc

SEQ ID NO: 874013 - RNA, 19 nt, Artificial Sequence
  Description of Artificial Sequence: Synthetic oligonucleotide
uucgggugccucauuccuc

SEQ ID NO: 874014 - RNA, 19 nt, Artificial Sequence
  Description of Artificial Sequence: Synthetic oligonucleotide
cacuccuggccuugcagug

SEQ ID NO: 874015 - RNA, 19 nt, Artificial Sequence
  Description of Artificial Sequence: Synthetic oligonucleotide
acggcaugguauugugugu

SEQ ID NO: 874016 - RNA, 19 nt, Artificial Sequence
  Description of Artificial Sequence: Synthetic oligonucleotide
cucggagcccucaccuugc

SEQ ID NO: 874017 - RNA, 19 nt, Artificial Sequence
  Description of Artificial Sequence: Synthetic oligonucleotide
acccucaugggcagcuggc

SEQ ID NO: 874018 - RNA, 19 nt, Artificial Sequence
  Description of Artificial Sequence: Synthetic oligonucleotide
cugcuaccuuauuagcauc

SEQ ID NO: 874019 - RNA, 19 nt, Artificial Sequence
  Description of Artificial Sequence: Synthetic oligonucleotide
guucgugaguucacaggcc

SEQ ID NO: 874020 - RNA, 19 nt, Artificial Sequence
  Description of Artificial Sequence: Synthetic oligonucleotide
agggacagcgaccucgcuu

SEQ ID NO: 874021 - RNA, 19 nt, Artificial Sequence
  Description of Artificial Sequence: Synthetic oligonucleotide
caaagcgcaacagcaccug

SEQ ID NO: 874022 - RNA, 19 nt, Artificial Sequence
  Description of Artificial Sequence: Synthetic oligonucleotide
cagggaagggcauuuguua

SEQ ID NO: 874023 - RNA, 19 nt, Artificial Sequence
  Description of Artificial Sequence: Synthetic oligonucleotide
acgcccaggaaaaggcaac

SEQ ID NO: 874024 - RNA, 19 nt, Artificial Sequence
  Description of Artificial Sequence: Synthetic oligonucleotide
acaguccacgucacggguc

SEQ ID NO: 874025 - RNA, 19 nt, Artificial Sequence
  Description of Artificial Sequence: Synthetic oligonucleotide
ugccaaggacccacaugca

SEQ ID NO: 874026 - RNA, 19 nt, Artificial Sequence
  Description of Artificial Sequence: Synthetic oligonucleotide
ucgugaguucacaggccaa

SEQ ID NO: 874027 - RNA, 19 nt, Artificial Sequence
  Description of Artificial Sequence: Synthetic oligonucleotide
cucaccaugcuguacaguu

SEQ ID NO: 874028 - RNA, 19 nt, Artificial Sequence
  Description of Artificial Sequence: Synthetic oligonucleotide
uggguucuuccaucugggu

SEQ ID NO: 874029 - RNA, 19 nt, Artificial Sequence
  Description of Artificial Sequence: Synthetic oligonucleotide
gggaggaugaaauugccau

SEQ ID NO: 874030 - RNA, 19 nt, Artificial Sequence
  Description of Artificial Sequence: Synthetic oligonucleotide
agagaggauccaguucgug

SEQ ID NO: 874031 - RNA, 19 nt, Artificial Sequence
  Description of Artificial Sequence: Synthetic oligonucleotide
auggguugguagguaacgu

SEQ ID NO: 874032 - RNA, 19 nt, Artificial Sequence
  Description of Artificial Sequence: Synthetic oligonucleotide
cagcagacacacuacaggu

SEQ ID NO: 874033 - RNA, 19 nt, Artificial Sequence
  Description of Artificial Sequence: Synthetic oligonucleotide
uggggacuucugaguacgc

SEQ ID NO: 874034 - RNA, 19 nt, Artificial Sequence
  Description of Artificial Sequence: Synthetic oligonucleotide
auccaguucgugaguucac

SEQ ID NO: 874035 - RNA, 19 nt, Artificial Sequence
  Description of Artificial Sequence: Synthetic oligonucleotide
uggguucacuuggagguaa

SEQ ID NO: 874036 - RNA, 19 nt, Artificial Sequence
  Description of Artificial Sequence: Synthetic oligonucleotide
aggccaaguggcaccugcc

SEQ ID NO: 874037 - RNA, 19 nt, Artificial Sequence
  Description of Artificial Sequence: Synthetic oligonucleotide
cacgcuuccagcuugcuuu

SEQ ID NO: 874038 - RNA, 19 nt, Artificial Sequence
  Description of Artificial Sequence: Synthetic oligonucleotide
gaaaccgggcagccaguga

SEQ ID NO: 874039 - RNA, 19 nt, Artificial Sequence
  Description of Artificial Sequence: Synthetic oligonucleotide
cucauggguugguagguaa

SEQ ID NO: 874040 - RNA, 19 nt, Artificial Sequence
  Description of Artificial Sequence: Synthetic oligonucleotide
guuaauuuccuggcagugu

SEQ ID NO: 874041 - RNA, 19 nt, Artificial Sequence
  Description of Artificial Sequence: Synthetic oligonucleotide
uagguaacgucggccacau

SEQ ID NO: 874042 - RNA, 19 nt, Artificial Sequence
  Description of Artificial Sequence: Synthetic oligonucleotide
uggagguacucugcaggga

SEQ ID NO: 874043 - RNA, 19 nt, Artificial Sequence
  Description of Artificial Sequence: Synthetic oligonucleotide
cuaggcagucauucaggga

SEQ ID NO: 874044 - RNA, 19 nt, Artificial Sequence
  Description of Artificial Sequence: Synthetic oligonucleotide
caugcagcuagugccccac

SEQ ID NO: 874045 - RNA, 19 nt, Artificial Sequence
  Description of Artificial Sequence: Synthetic oligonucleotide
aguuccuugcgaagguagu

SEQ ID NO: 874046 - RNA, 19 nt, Artificial Sequence
  Description of Artificial Sequence: Synthetic oligonucleotide
gugccggaacacaugcucc

SEQ ID NO: 874047 - RNA, 19 nt, Artificial Sequence
  Description of Artificial Sequence: Synthetic oligonucleotide
ugcauaucuggggccuuga

SEQ ID NO: 874048 - RNA, 19 nt, Artificial Sequence
  Description of Artificial Sequence: Synthetic oligonucleotide
guagguaacgucggccaca

SEQ ID NO: 874049 - RNA, 19 nt, Artificial Sequence
  Description of Artificial Sequence: Synthetic oligonucleotide
gcugacugggugcugcuac

SEQ ID NO: 874050 - RNA, 19 nt, Artificial Sequence
  Description of Artificial Sequence: Synthetic oligonucleotide
cuugcgaagguaguaucaa

SEQ ID NO: 874051 - RNA, 19 nt, Artificial Sequence
  Description of Artificial Sequence: Synthetic oligonucleotide
ugacugggugcugcuaccu

SEQ ID NO: 874052 - RNA, 19 nt, Artificial Sequence
  Description of Artificial Sequence: Synthetic oligonucleotide
ucccggcuucuuauccacc

SEQ ID NO: 874053 - RNA, 19 nt, Artificial Sequence
  Description of Artificial Sequence: Synthetic oligonucleotide
gcuguugcugggcaaagaa

SEQ ID NO: 874054 - RNA, 19 nt, Artificial Sequence
  Description of Artificial Sequence: Synthetic oligonucleotide
agcucccugccuugcauau

SEQ ID NO: 874055 - RNA, 19 nt, Artificial Sequence
  Description of Artificial Sequence: Synthetic oligonucleotide
ggucauguacugccaagga

SEQ ID NO: 874056 - RNA, 19 nt, Artificial Sequence
  Description of Artificial Sequence: Synthetic oligonucleotide
cagguccgggcacuccugg

SEQ ID NO: 874057 - RNA, 19 nt, Artificial Sequence
  Description of Artificial Sequence: Synthetic oligonucleotide
ccucucaaggccuccuacc

SEQ ID NO: 874058 - RNA, 19 nt, Artificial Sequence
  Description of Artificial Sequence: Synthetic oligonucleotide
gucauagcagggcaucacu

SEQ ID NO: 874059 - RNA, 19 nt, Artificial Sequence
  Description of Artificial Sequence: Synthetic oligonucleotide
acgcuuccagcuugcuuug

SEQ ID NO: 874060 - RNA, 19 nt, Artificial Sequence
  Description of Artificial Sequence: Synthetic oligonucleotide
cuucccggcuucuuaucca

SEQ ID NO: 874061 - RNA, 19 nt, Artificial Sequence
  Description of Artificial Sequence: Synthetic oligonucleotide
gaaucgcugcacaaacucu

SEQ ID NO: 874062 - RNA, 19 nt, Artificial Sequence
  Description of Artificial Sequence: Synthetic oligonucleotide
guuaagccauccaggggca

SEQ ID NO: 874063 - RNA, 19 nt, Artificial Sequence
  Description of Artificial Sequence: Synthetic oligonucleotide
caaguggcaccugcccagg

SEQ ID NO: 874064 - RNA, 19 nt, Artificial Sequence
  Description of Artificial Sequence: Synthetic oligonucleotide
gcaugcuaggcagucauuc

SEQ ID NO: 874065 - RNA, 19 nt, Artificial Sequence
  Description of Artificial Sequence: Synthetic oligonucleotide
agcuagugccccacuuuag

SEQ ID NO: 874066 - RNA, 19 nt, Artificial Sequence
  Description of Artificial Sequence: Synthetic oligonucleotide
ggaauccagcugaaaccgg

SEQ ID NO: 874067 - RNA, 19 nt, Artificial Sequence
  Description of Artificial Sequence: Synthetic oligonucleotide
cagugaugcucuggacugg

SEQ ID NO: 874068 - RNA, 19 nt, Artificial Sequence
  Description of Artificial Sequence: Synthetic oligonucleotide
gguccgggcacuccuggcc

SEQ ID NO: 874069 - RNA, 19 nt, Artificial Sequence
  Description of Artificial Sequence: Synthetic oligonucleotide
gacagcgaccucgcuucag

SEQ ID NO: 874070 - RNA, 19 nt, Artificial Sequence
  Description of Artificial Sequence: Synthetic oligonucleotide
gguagguaacgucggccac

SEQ ID NO: 874071 - RNA, 19 nt, Artificial Sequence
  Description of Artificial Sequence: Synthetic oligonucleotide
ugcugaugcccgaguuggu

SEQ ID NO: 874072 - RNA, 19 nt, Artificial Sequence
  Description of Artificial Sequence: Synthetic oligonucleotide
gcgaccucgcuucagcuuc

SEQ ID NO: 874073 - RNA, 19 nt, Artificial Sequence
  Description of Artificial Sequence: Synthetic oligonucleotide
cacgggucugguacuucug

SEQ ID NO: 874074 - RNA, 19 nt, Artificial Sequence
  Description of Artificial Sequence: Synthetic oligonucleotide
gcucggagcccucaccuug

SEQ ID NO: 874075 - RNA, 19 nt, Artificial Sequence
  Description of Artificial Sequence: Synthetic oligonucleotide
aggguaucuagggauuauu

SEQ ID NO: 874076 - RNA, 19 nt, Artificial Sequence
  Description of Artificial Sequence: Synthetic oligonucleotide
gccaugugucuucucagca

SEQ ID NO: 874077 - RNA, 19 nt, Artificial Sequence
  Description of Artificial Sequence: Synthetic oligonucleotide
aggauccaguucgugaguu

SEQ ID NO: 874078 - RNA, 19 nt, Artificial Sequence
  Description of Artificial Sequence: Synthetic oligonucleotide
gccgcugcugacugggugc

SEQ ID NO: 874079 - RNA, 19 nt, Artificial Sequence
  Description of Artificial Sequence: Synthetic oligonucleotide
aaacgaccaccagccgcug

SEQ ID NO: 874080 - RNA, 19 nt, Artificial Sequence
  Description of Artificial Sequence: Synthetic oligonucleotide
cacugcaugcuaggcaguc

SEQ ID NO: 874081 - RNA, 19 nt, Artificial Sequence
  Description of Artificial Sequence: Synthetic oligonucleotide
ugcaugcuaggcagucauu

SEQ ID NO: 874082 - RNA, 19 nt, Artificial Sequence
  Description of Artificial Sequence: Synthetic oligonucleotide
gacccacaugcagcuagug

SEQ ID NO: 874083 - RNA, 19 nt, Artificial Sequence
  Description of Artificial Sequence: Synthetic oligonucleotide
cugcgugccggaacacaug

SEQ ID NO: 874084 - RNA, 19 nt, Artificial Sequence
  Description of Artificial Sequence: Synthetic oligonucleotide
acgucacgggucugguacu

SEQ ID NO: 874085 - RNA, 19 nt, Artificial Sequence
  Description of Artificial Sequence: Synthetic oligonucleotide
agcgaccucgcuucagcuu

SEQ ID NO: 874086 - RNA, 19 nt, Artificial Sequence
  Description of Artificial Sequence: Synthetic oligonucleotide
ccaacaugggcaaggccuc

SEQ ID NO: 874087 - RNA, 19 nt, Artificial Sequence
  Description of Artificial Sequence: Synthetic oligonucleotide
gucaggucuagaugcuucu

SEQ ID NO: 874088 - RNA, 19 nt, Artificial Sequence
  Description of Artificial Sequence: Synthetic oligonucleotide
gaaguuccuugcgaaggua

SEQ ID NO: 874089 - RNA, 19 nt, Artificial Sequence
  Description of Artificial Sequence: Synthetic oligonucleotide
ucggagcccucaccuugca

SEQ ID NO: 874090 - RNA, 19 nt, Artificial Sequence
  Description of Artificial Sequence: Synthetic oligonucleotide
gaagucaggucuagaugcu

SEQ ID NO: 874091 - RNA, 19 nt, Artificial Sequence
  Description of Artificial Sequence: Synthetic oligonucleotide
ugggaguguuggugcuggc

SEQ ID NO: 874092 - RNA, 19 nt, Artificial Sequence
  Description of Artificial Sequence: Synthetic oligonucleotide
gcacgcaggucauguacug

SEQ ID NO: 874093 - RNA, 19 nt, Artificial Sequence
  Description of Artificial Sequence: Synthetic oligonucleotide
cagcugaaaccgggcagcc

SEQ ID NO: 874094 - RNA, 19 nt, Artificial Sequence
  Description of Artificial Sequence: Synthetic oligonucleotide
ccuugcgaagguaguauca

SEQ ID NO: 874095 - RNA, 19 nt, Artificial Sequence
  Description of Artificial Sequence: Synthetic oligonucleotide
cuccuaccaccugaugcug

SEQ ID NO: 874096 - RNA, 19 nt, Artificial Sequence
  Description of Artificial Sequence: Synthetic oligonucleotide
gggaguguuggugcuggcc

SEQ ID NO: 874097 - RNA, 19 nt, Artificial Sequence
  Description of Artificial Sequence: Synthetic oligonucleotide
cucggaaucgcugcacaaa

SEQ ID NO: 874098 - RNA, 19 nt, Artificial Sequence
  Description of Artificial Sequence: Synthetic oligonucleotide
cagacacacuacagguuaa

SEQ ID NO: 874099 - RNA, 19 nt, Artificial Sequence
  Description of Artificial Sequence: Synthetic oligonucleotide
gggugccucauuccucacc

SEQ ID NO: 874100 - RNA, 19 nt, Artificial Sequence
  Description of Artificial Sequence: Synthetic oligonucleotide
uccaccccgauggcuggug

SEQ ID NO: 874101 - RNA, 19 nt, Artificial Sequence
  Description of Artificial Sequence: Synthetic oligonucleotide
cagcuugcuuuggagccac

SEQ ID NO: 874102 - RNA, 19 nt, Artificial Sequence
  Description of Artificial Sequence: Synthetic oligonucleotide
cagcuagugccccacuuua

SEQ ID NO: 874103 - RNA, 19 nt, Artificial Sequence
  Description of Artificial Sequence: Synthetic oligonucleotide
gucuuugaccagggagccc

SEQ ID NO: 874104 - RNA, 19 nt, Artificial Sequence
  Description of Artificial Sequence: Synthetic oligonucleotide
guacgcccaggaaaaggca

SEQ ID NO: 874105 - RNA, 19 nt, Artificial Sequence
  Description of Artificial Sequence: Synthetic oligonucleotide
cuucgggugccucauuccu

SEQ ID NO: 874106 - RNA, 19 nt, Artificial Sequence
  Description of Artificial Sequence: Synthetic oligonucleotide
gagcacgcuuccagcuugc

SEQ ID NO: 874107 - RNA, 19 nt, Artificial Sequence
  Description of Artificial Sequence: Synthetic oligonucleotide
gcuccaagagugacacucc

SEQ ID NO: 874108 - RNA, 19 nt, Artificial Sequence
  Description of Artificial Sequence: Synthetic oligonucleotide
cuguagagaggauccaguu

SEQ ID NO: 874109 - RNA, 19 nt, Artificial Sequence
  Description of Artificial Sequence: Synthetic oligonucleotide
cauuccucaccaugcugua

SEQ ID NO: 874110 - RNA, 19 nt, Artificial Sequence
  Description of Artificial Sequence: Synthetic oligonucleotide
ggauccaguucgugaguuc

SEQ ID NO: 874111 - RNA, 19 nt, Artificial Sequence
  Description of Artificial Sequence: Synthetic oligonucleotide
cccacaauuccccagcaua

SEQ ID NO: 874112 - RNA, 19 nt, Artificial Sequence
  Description of Artificial Sequence: Synthetic oligonucleotide
cccgaguuggucuucucca

SEQ ID NO: 874113 - RNA, 19 nt, Artificial Sequence
  Description of Artificial Sequence: Synthetic oligonucleotide
ggauguugcggaaaccaua

SEQ ID NO: 874114 - RNA, 19 nt, Artificial Sequence
  Description of Artificial Sequence: Synthetic oligonucleotide
ccgucucugcugaagugac

SEQ ID NO: 874115 - RNA, 19 nt, Artificial Sequence
  Description of Artificial Sequence: Synthetic oligonucleotide
cuaccaccugaugcugaug

SEQ ID NO: 874116 - RNA, 19 nt, Artificial Sequence
  Description of Artificial Sequence: Synthetic oligonucleotide
gccucucaaggccuccuac

SEQ ID NO: 874117 - RNA, 19 nt, Artificial Sequence
  Description of Artificial Sequence: Synthetic oligonucleotide
guggaauccguugcugaua

SEQ ID NO: 874118 - RNA, 19 nt, Artificial Sequence
  Description of Artificial Sequence: Synthetic oligonucleotide
gaguugcuuugcccucgga

SEQ ID NO: 874119 - RNA, 19 nt, Artificial Sequence
  Description of Artificial Sequence: Synthetic oligonucleotide
ccgaguuggucuucuccac

SEQ ID NO: 874120 - RNA, 19 nt, Artificial Sequence
  Description of Artificial Sequence: Synthetic oligonucleotide
cugcaugcuaggcagucau

SEQ ID NO: 874121 - RNA, 19 nt, Artificial Sequence
  Description of Artificial Sequence: Synthetic oligonucleotide
ugcugauguaggggaggau

SEQ ID NO: 874122 - RNA, 19 nt, Artificial Sequence
  Description of Artificial Sequence: Synthetic oligonucleotide
cuagaugcuucuagucuuu

SEQ ID NO: 874123 - RNA, 19 nt, Artificial Sequence
  Description of Artificial Sequence: Synthetic oligonucleotide
agggagcccauaaccugcu

SEQ ID NO: 874124 - RNA, 19 nt, Artificial Sequence
  Description of Artificial Sequence: Synthetic oligonucleotide
ggggaggaugaaauugcca

SEQ ID NO: 874125 - RNA, 19 nt, Artificial Sequence
  Description of Artificial Sequence: Synthetic oligonucleotide
ggggugagacagaaacgac

SEQ ID NO: 874126 - RNA, 19 nt, Artificial Sequence
  Description of Artificial Sequence: Synthetic oligonucleotide
cugaagugacacacccacu

SEQ ID NO: 874127 - RNA, 19 nt, Artificial Sequence
  Description of Artificial Sequence: Synthetic oligonucleotide
gcaugguauugugugugca

SEQ ID NO: 874128 - RNA, 19 nt, Artificial Sequence
  Description of Artificial Sequence: Synthetic oligonucleotide
auguacugccaaggaccca

SEQ ID NO: 874129 - RNA, 19 nt, Artificial Sequence
  Description of Artificial Sequence: Synthetic oligonucleotide
ugguagggacagcgaccuc

SEQ ID NO: 874130 - RNA, 19 nt, Artificial Sequence
  Description of Artificial Sequence: Synthetic oligonucleotide
cugcucggagcccucaccu

SEQ ID NO: 874131 - RNA, 19 nt, Artificial Sequence
  Description of Artificial Sequence: Synthetic oligonucleotide
gcaggucauguacugccaa

SEQ ID NO: 874132 - RNA, 19 nt, Artificial Sequence
  Description of Artificial Sequence: Synthetic oligonucleotide
augcccgaguuggucuucu

SEQ ID NO: 874133 - RNA, 19 nt, Artificial Sequence
  Description of Artificial Sequence: Synthetic oligonucleotide
cacaguccacgucacgggu

SEQ ID NO: 874134 - RNA, 19 nt, Artificial Sequence
  Description of Artificial Sequence: Synthetic oligonucleotide
ggccccacccucaugggca

SEQ ID NO: 874135 - RNA, 19 nt, Artificial Sequence
  Description of Artificial Sequence: Synthetic oligonucleotide
aaggacccacaugcagcua

SEQ ID NO: 874136 - RNA, 19 nt, Artificial Sequence
  Description of Artificial Sequence: Synthetic oligonucleotide
gugaguucacaggccaagu

SEQ ID NO: 874137 - RNA, 19 nt, Artificial Sequence
  Description of Artificial Sequence: Synthetic oligonucleotide
gcggaaaccauaggccaca

SEQ ID NO: 874138 - RNA, 19 nt, Artificial Sequence
  Description of Artificial Sequence: Synthetic oligonucleotide
ccuccuaccaccugaugcu

SEQ ID NO: 874139 - RNA, 19 nt, Artificial Sequence
  Description of Artificial Sequence: Synthetic oligonucleotide
ugcccgaguuggucuucuc

SEQ ID NO: 874140 - RNA, 19 nt, Artificial Sequence
  Description of Artificial Sequence: Synthetic oligonucleotide
ccgggcugugcugauguag

SEQ ID NO: 874141 - RNA, 19 nt, Artificial Sequence
  Description of Artificial Sequence: Synthetic oligonucleotide
gggcccuccuccuuccauc

SEQ ID NO: 874142 - RNA, 19 nt, Artificial Sequence
  Description of Artificial Sequence: Synthetic oligonucleotide
guuaagggcccuccuccuu

SEQ ID NO: 874143 - RNA, 19 nt, Artificial Sequence
  Description of Artificial Sequence: Synthetic oligonucleotide
ccuguagagaggauccagu

SEQ ID NO: 874144 - RNA, 19 nt, Artificial Sequence
  Description of Artificial Sequence: Synthetic oligonucleotide
agcacgcuuccagcuugcu

SEQ ID NO: 874145 - RNA, 19 nt, Artificial Sequence
  Description of Artificial Sequence: Synthetic oligonucleotide
ccauaaccugcugugggga

SEQ ID NO: 874146 - RNA, 19 nt, Artificial Sequence
  Description of Artificial Sequence: Synthetic oligonucleotide
ccaucuggguucacuugga

SEQ ID NO: 874147 - RNA, 19 nt, Artificial Sequence
  Description of Artificial Sequence: Synthetic oligonucleotide
ggaauccguugcugauaca

SEQ ID NO: 874148 - RNA, 19 nt, Artificial Sequence
  Description of Artificial Sequence: Synthetic oligonucleotide
ggguaucuagggauuauuu

SEQ ID NO: 874149 - RNA, 19 nt, Artificial Sequence
  Description of Artificial Sequence: Synthetic oligonucleotide
ccaccccgauggcuggugg

SEQ ID NO: 874150 - RNA, 19 nt, Artificial Sequence
  Description of Artificial Sequence: Synthetic oligonucleotide
gcaccgucucugcugaagu

SEQ ID NO: 874151 - RNA, 19 nt, Artificial Sequence
  Description of Artificial Sequence: Synthetic oligonucleotide
gacugggugcugcuaccuu

SEQ ID NO: 874152 - RNA, 19 nt, Artificial Sequence
  Description of Artificial Sequence: Synthetic oligonucleotide
cuccuguuguaaggacaca

SEQ ID NO: 874153 - RNA, 19 nt, Artificial Sequence
  Description of Artificial Sequence: Synthetic oligonucleotide
cugaaaccgggcagccagu

SEQ ID NO: 874154 - RNA, 19 nt, Artificial Sequence
  Description of Artificial Sequence: Synthetic oligonucleotide
gccccacccucaugggcag

SEQ ID NO: 874155 - RNA, 19 nt, Artificial Sequence
  Description of Artificial Sequence: Synthetic oligonucleotide
aggccuccuaccaccugau

SEQ ID NO: 874156 - RNA, 19 nt, Artificial Sequence
  Description of Artificial Sequence: Synthetic oligonucleotide
ggguucacuuggagguaac

SEQ ID NO: 874157 - RNA, 19 nt, Artificial Sequence
  Description of Artificial Sequence: Synthetic oligonucleotide
ccagguccgggcacuccug

SEQ ID NO: 874158 - RNA, 19 nt, Artificial Sequence
  Description of Artificial Sequence: Synthetic oligonucleotide
ccgauggcuggugggcucc

SEQ ID NO: 874159 - RNA, 19 nt, Artificial Sequence
  Description of Artificial Sequence: Synthetic oligonucleotide
gguucacuuggagguaacu

SEQ ID NO: 874160 - RNA, 19 nt, Artificial Sequence
  Description of Artificial Sequence: Synthetic oligonucleotide
cuggaccccaggugcgucu

SEQ ID NO: 874161 - RNA, 19 nt, Artificial Sequence
  Description of Artificial Sequence: Synthetic oligonucleotide
ggcacgcaggucauguacu

SEQ ID NO: 874162 - RNA, 19 nt, Artificial Sequence
  Description of Artificial Sequence: Synthetic oligonucleotide
gccccacuuuagcacacaa

SEQ ID NO: 874163 - RNA, 19 nt, Artificial Sequence
  Description of Artificial Sequence: Synthetic oligonucleotide
gguacucugcagggagcga

SEQ ID NO: 874164 - RNA, 19 nt, Artificial Sequence
  Description of Artificial Sequence: Synthetic oligonucleotide
ccguugcugauacacacau

SEQ ID NO: 874165 - RNA, 19 nt, Artificial Sequence
  Description of Artificial Sequence: Synthetic oligonucleotide
cccgauggcuggugggcuc

SEQ ID NO: 874166 - RNA, 19 nt, Artificial Sequence
  Description of Artificial Sequence: Synthetic oligonucleotide
ccaugugucuucucagcau

SEQ ID NO: 874167 - RNA, 19 nt, Artificial Sequence
  Description of Artificial Sequence: Synthetic oligonucleotide
gcuaugccacuucccggcu

SEQ ID NO: 874168 - RNA, 19 nt, Artificial Sequence
  Description of Artificial Sequence: Synthetic oligonucleotide
gugcgucuucgggugccuc

SEQ ID NO: 874169 - RNA, 19 nt, Artificial Sequence
  Description of Artificial Sequence: Synthetic oligonucleotide
cuugggcugcgugccggaa

SEQ ID NO: 874170 - RNA, 19 nt, Artificial Sequence
  Description of Artificial Sequence: Synthetic oligonucleotide
cuaugccacuucccggcuu

SEQ ID NO: 874171 - RNA, 19 nt, Artificial Sequence
  Description of Artificial Sequence: Synthetic oligonucleotide
gcugcgugccggaacacau

SEQ ID NO: 874172 - RNA, 19 nt, Artificial Sequence
  Description of Artificial Sequence: Synthetic oligonucleotide
gcccucggaaucgcugcac

SEQ ID NO: 874173 - RNA, 19 nt, Artificial Sequence
  Description of Artificial Sequence: Synthetic oligonucleotide
ccuaccaccugaugcugau

SEQ ID NO: 874174 - RNA, 19 nt, Artificial Sequence
  Description of Artificial Sequence: Synthetic oligonucleotide
gcgcaacagcaccuggccu

SEQ ID NO: 874175 - RNA, 19 nt, Artificial Sequence
  Description of Artificial Sequence: Synthetic oligonucleotide
gggagcgagcacgcuucca

SEQ ID NO: 874176 - RNA, 19 nt, Artificial Sequence
  Description of Artificial Sequence: Synthetic oligonucleotide
ggacccacaugcagcuagu

SEQ ID NO: 874177 - RNA, 19 nt, Artificial Sequence
  Description of Artificial Sequence: Synthetic oligonucleotide
gcacgcuuccagcuugcuu

SEQ ID NO: 874178 - RNA, 19 nt, Artificial Sequence
  Description of Artificial Sequence: Synthetic oligonucleotide
ccacggcaugguauugugu

SEQ ID NO: 874179 - RNA, 19 nt, Artificial Sequence
  Description of Artificial Sequence: Synthetic oligonucleotide
ccccacuuuagcacacaau

SEQ ID NO: 874180 - RNA, 19 nt, Artificial Sequence
  Description of Artificial Sequence: Synthetic oligonucleotide
gcgagcacgcuuccagcuu

SEQ ID NO: 874181 - RNA, 19 nt, Artificial Sequence
  Description of Artificial Sequence: Synthetic oligonucleotide
ccucaugacucugcugggu

SEQ ID NO: 874182 - RNA, 19 nt, Artificial Sequence
  Description of Artificial Sequence: Synthetic oligonucleotide
cggaaucgcugcacaaacu

SEQ ID NO: 874183 - RNA, 19 nt, Artificial Sequence
  Description of Artificial Sequence: Synthetic oligonucleotide
ccgggcacuccuggccuug

SEQ ID NO: 874184 - RNA, 19 nt, Artificial Sequence
  Description of Artificial Sequence: Synthetic oligonucleotide
ccucauggguugguaggua

SEQ ID NO: 874185 - RNA, 19 nt, Artificial Sequence
  Description of Artificial Sequence: Synthetic oligonucleotide
ccacgucacgggucuggua

SEQ ID NO: 874186 - RNA, 19 nt, Artificial Sequence
  Description of Artificial Sequence: Synthetic oligonucleotide
cgucggccacauggauucc

SEQ ID NO: 874187 - RNA, 19 nt, Artificial Sequence
  Description of Artificial Sequence: Synthetic oligonucleotide
cuccaccccgauggcuggu

SEQ ID NO: 874188 - RNA, 19 nt, Artificial Sequence
  Description of Artificial Sequence: Synthetic oligonucleotide
caucuucgauguggaucuu

SEQ ID NO: 874189 - RNA, 19 nt, Artificial Sequence
  Description of Artificial Sequence: Synthetic oligonucleotide
gcgugccggaacacaugcu

SEQ ID NO: 874190 - RNA, 19 nt, Artificial Sequence
  Description of Artificial Sequence: Synthetic oligonucleotide
ccgcugcugacugggugcu

SEQ ID NO: 874191 - RNA, 19 nt, Artificial Sequence
  Description of Artificial Sequence: Synthetic oligonucleotide
cgaccucgcuucagcuucu

SEQ ID NO: 874192 - RNA, 19 nt, Artificial Sequence
  Description of Artificial Sequence: Synthetic oligonucleotide
ccccgauggcuggugggcu

SEQ ID NO: 874193 - RNA, 19 nt, Artificial Sequence
  Description of Artificial Sequence: Synthetic oligonucleotide
aacacuauggaguuuaaug

SEQ ID NO: 874194 - RNA, 19 nt, Artificial Sequence
  Description of Artificial Sequence: Synthetic oligonucleotide
gauaaaauaucccugaugu

SEQ ID NO: 874195 - RNA, 19 nt, Artificial Sequence
  Description of Artificial Sequence: Synthetic oligonucleotide
uauugaagucugaugaggg

SEQ ID NO: 874196 - RNA, 19 nt, Artificial Sequence
  Description of Artificial Sequence: Synthetic oligonucleotide
acacuauggaguuuaaugg

SEQ ID NO: 874197 - RNA, 19 nt, Artificial Sequence
  Description of Artificial Sequence: Synthetic oligonucleotide
cuuguaacaagaaaccaag

SEQ ID NO: 874198 - RNA, 19 nt, Artificial Sequence
  Description of Artificial Sequence: Synthetic oligonucleotide
ugugaaaguaggaaugcag

SEQ ID NO: 874199 - RNA, 19 nt, Artificial Sequence
  Description of Artificial Sequence: Synthetic oligonucleotide
gauaaggucagcuuuaaaa

SEQ ID NO: 874200 - RNA, 19 nt, Artificial Sequence
  Description of Artificial Sequence: Synthetic oligonucleotide
uugugugcaaccuugcggg

SEQ ID NO: 874201 - RNA, 19 nt, Artificial Sequence
  Description of Artificial Sequence: Synthetic oligonucleotide
gauagaucagaugaagagg

SEQ ID NO: 874202 - RNA, 19 nt, Artificial Sequence
  Description of Artificial Sequence: Synthetic oligonucleotide
gauguugaaggcuugucag

SEQ ID NO: 874203 - RNA, 19 nt, Artificial Sequence
  Description of Artificial Sequence: Synthetic oligonucleotide
acagauucgcacuuguaac

SEQ ID NO: 874204 - RNA, 19 nt, Artificial Sequence
  Description of Artificial Sequence: Synthetic oligonucleotide
acuuggacucaucaggccc

SEQ ID NO: 874205 - RNA, 19 nt, Artificial Sequence
  Description of Artificial Sequence: Synthetic oligonucleotide
gaaaaggaccccaagcucg

SEQ ID NO: 874206 - RNA, 19 nt, Artificial Sequence
  Description of Artificial Sequence: Synthetic oligonucleotide
uuauugaagucugaugagg

SEQ ID NO: 874207 - RNA, 19 nt, Artificial Sequence
  Description of Artificial Sequence: Synthetic oligonucleotide
uggaugacgacucggaggc

SEQ ID NO: 874208 - RNA, 19 nt, Artificial Sequence
  Description of Artificial Sequence: Synthetic oligonucleotide
caagucguggguauaaagg

SEQ ID NO: 874209 - RNA, 19 nt, Artificial Sequence
  Description of Artificial Sequence: Synthetic oligonucleotide
agaauguugacagugacca

SEQ ID NO: 874210 - RNA, 19 nt, Artificial Sequence
  Description of Artificial Sequence: Synthetic oligonucleotide
uuuauugaagucugaugag

SEQ ID NO: 874211 - RNA, 19 nt, Artificial Sequence
  Description of Artificial Sequence: Synthetic oligonucleotide
ucauguacgucuuaauaug

SEQ ID NO: 874212 - RNA, 19 nt, Artificial Sequence
  Description of Artificial Sequence: Synthetic oligonucleotide
guuaaacugagcugaagag

SEQ ID NO: 874213 - RNA, 19 nt, Artificial Sequence
  Description of Artificial Sequence: Synthetic oligonucleotide
ugaaaguaggaaugcagcc

SEQ ID NO: 874214 - RNA, 19 nt, Artificial Sequence
  Description of Artificial Sequence: Synthetic oligonucleotide
uuguaggacaucaaguaac

SEQ ID NO: 874215 - RNA, 19 nt, Artificial Sequence
  Description of Artificial Sequence: Synthetic oligonucleotide
agagagaucgugcucuugg

SEQ ID NO: 874216 - RNA, 19 nt, Artificial Sequence
  Description of Artificial Sequence: Synthetic oligonucleotide
aggagcaucauuuucgugu

SEQ ID NO: 874217 - RNA, 19 nt, Artificial Sequence
  Description of Artificial Sequence: Synthetic oligonucleotide
guacuuauuaggcugcucc

SEQ ID NO: 874218 - RNA, 19 nt, Artificial Sequence
  Description of Artificial Sequence: Synthetic oligonucleotide
ugaaccaacaagguaaaca

SEQ ID NO: 874219 - RNA, 19 nt, Artificial Sequence
  Description of Artificial Sequence: Synthetic oligonucleotide
ucaaccauauuccuugggu

SEQ ID NO: 874220 - RNA, 19 nt, Artificial Sequence
  Description of Artificial Sequence: Synthetic oligonucleotide
aaacagaggggauaaaaua

SEQ ID NO: 874221 - RNA, 19 nt, Artificial Sequence
  Description of Artificial Sequence: Synthetic oligonucleotide
aaagcaguaguuaaacuga

SEQ ID NO: 874222 - RNA, 19 nt, Artificial Sequence
  Description of Artificial Sequence: Synthetic oligonucleotide
auaaggucagcuuuaaaau

SEQ ID NO: 874223 - RNA, 19 nt, Artificial Sequence
  Description of Artificial Sequence: Synthetic oligonucleotide
uuugccuuaaucccugaga

SEQ ID NO: 874224 - RNA, 19 nt, Artificial Sequence
  Description of Artificial Sequence: Synthetic oligonucleotide
ucuuuaaacucugagcaca

SEQ ID NO: 874225 - RNA, 19 nt, Artificial Sequence
  Description of Artificial Sequence: Synthetic oligonucleotide
agaucgugcucuuggaugg

SEQ ID NO: 874226 - RNA, 19 nt, Artificial Sequence
  Description of Artificial Sequence: Synthetic oligonucleotide
uuaauauguggcauggcau

SEQ ID NO: 874227 - RNA, 19 nt, Artificial Sequence
  Description of Artificial Sequence: Synthetic oligonucleotide
uccuaagccuaaaaugucc

SEQ ID NO: 874228 - RNA, 19 nt, Artificial Sequence
  Description of Artificial Sequence: Synthetic oligonucleotide
aaggauagaucagaugaag

SEQ ID NO: 874229 - RNA, 19 nt, Artificial Sequence
  Description of Artificial Sequence: Synthetic oligonucleotide
gaucguaucaucagcuggg

SEQ ID NO: 874230 - RNA, 19 nt, Artificial Sequence
  Description of Artificial Sequence: Synthetic oligonucleotide
cuugugugcaaccuugcgg

SEQ ID NO: 874231 - RNA, 19 nt, Artificial Sequence
  Description of Artificial Sequence: Synthetic oligonucleotide
acguggacuccuucgaugc

SEQ ID NO: 874232 - RNA, 19 nt, Artificial Sequence
  Description of Artificial Sequence: Synthetic oligonucleotide
gacaucaaguaacugauaa

SEQ ID NO: 874233 - RNA, 19 nt, Artificial Sequence
  Description of Artificial Sequence: Synthetic oligonucleotide
aguaacacugagucuaugu

SEQ ID NO: 874234 - RNA, 19 nt, Artificial Sequence
  Description of Artificial Sequence: Synthetic oligonucleotide
cuuuagguacagauggggc

SEQ ID NO: 874235 - RNA, 19 nt, Artificial Sequence
  Description of Artificial Sequence: Synthetic oligonucleotide
uguaggacaucaaguaacu

SEQ ID NO: 874236 - RNA, 19 nt, Artificial Sequence
  Description of Artificial Sequence: Synthetic oligonucleotide
agaucagaugaagaggaac

SEQ ID NO: 874237 - RNA, 19 nt, Artificial Sequence
  Description of Artificial Sequence: Synthetic oligonucleotide
auggccgaucuuuacuucc

SEQ ID NO: 874238 - RNA, 19 nt, Artificial Sequence
  Description of Artificial Sequence: Synthetic oligonucleotide
uuuaaaaugggugcucgac

SEQ ID NO: 874239 - RNA, 19 nt, Artificial Sequence
  Description of Artificial Sequence: Synthetic oligonucleotide
ucuugugugcaaccuugcg

SEQ ID NO: 874240 - RNA, 19 nt, Artificial Sequence
  Description of Artificial Sequence: Synthetic oligonucleotide
uucuaagcugguccgaaca

SEQ ID NO: 874241 - RNA, 19 nt, Artificial Sequence
  Description of Artificial Sequence: Synthetic oligonucleotide
cacuauggaguuuaauggc

SEQ ID NO: 874242 - RNA, 19 nt, Artificial Sequence
  Description of Artificial Sequence: Synthetic oligonucleotide
aauaggccagcacucgucu

SEQ ID NO: 874243 - RNA, 19 nt, Artificial Sequence
  Description of Artificial Sequence: Synthetic oligonucleotide
ucaagucguggguauaaag

SEQ ID NO: 874244 - RNA, 19 nt, Artificial Sequence
  Description of Artificial Sequence: Synthetic oligonucleotide
auagaucagaugaagagga

SEQ ID NO: 874245 - RNA, 19 nt, Artificial Sequence
  Description of Artificial Sequence: Synthetic oligonucleotide
aaugcaauauccagcuuug

SEQ ID NO: 874246 - RNA, 19 nt, Artificial Sequence
  Description of Artificial Sequence: Synthetic oligonucleotide
gagaucgugcucuuggaug

SEQ ID NO: 874247 - RNA, 19 nt, Artificial Sequence
  Description of Artificial Sequence: Synthetic oligonucleotide
ugagaauguugacagugac

SEQ ID NO: 874248 - RNA, 19 nt, Artificial Sequence
  Description of Artificial Sequence: Synthetic oligonucleotide
cuuauuaggcugcuccugc

SEQ ID NO: 874249 - RNA, 19 nt, Artificial Sequence
  Description of Artificial Sequence: Synthetic oligonucleotide
agauauccuggccuucccc

SEQ ID NO: 874250 - RNA, 19 nt, Artificial Sequence
  Description of Artificial Sequence: Synthetic oligonucleotide
uggauacugcuuuaugagc

SEQ ID NO: 874251 - RNA, 19 nt, Artificial Sequence
  Description of Artificial Sequence: Synthetic oligonucleotide
uguugaaggcuugucaggc

SEQ ID NO: 874252 - RNA, 19 nt, Artificial Sequence
  Description of Artificial Sequence: Synthetic oligonucleotide
uuuucgugugauguguucc

SEQ ID NO: 874253 - RNA, 19 nt, Artificial Sequence
  Description of Artificial Sequence: Synthetic oligonucleotide
aaauccauggccgaucuuu

SEQ ID NO: 874254 - RNA, 19 nt, Artificial Sequence
  Description of Artificial Sequence: Synthetic oligonucleotide
uacgucuuaauauguggca

SEQ ID NO: 874255 - RNA, 19 nt, Artificial Sequence
  Description of Artificial Sequence: Synthetic oligonucleotide
aagcucguaggaucguauc

SEQ ID NO: 874256 - RNA, 19 nt, Artificial Sequence
  Description of Artificial Sequence: Synthetic oligonucleotide
auuuucgugugauguguuc

SEQ ID NO: 874257 - RNA, 19 nt, Artificial Sequence
  Description of Artificial Sequence: Synthetic oligonucleotide
ucgucuuuagguacagaug

SEQ ID NO: 874258 - RNA, 19 nt, Artificial Sequence
  Description of Artificial Sequence: Synthetic oligonucleotide
aauauguggcauggcauug

SEQ ID NO: 874259 - RNA, 19 nt, Artificial Sequence
  Description of Artificial Sequence: Synthetic oligonucleotide
aaccauauuccuuggguuu

SEQ ID NO: 874260 - RNA, 19 nt, Artificial Sequence
  Description of Artificial Sequence: Synthetic oligonucleotide
gaaggcacccacauguucc

SEQ ID NO: 874261 - RNA, 19 nt, Artificial Sequence
  Description of Artificial Sequence: Synthetic oligonucleotide
agcaagcucucuuuaaacu

SEQ ID NO: 874262 - RNA, 19 nt, Artificial Sequence
  Description of Artificial Sequence: Synthetic oligonucleotide
gacagauucgcacuuguaa

SEQ ID NO: 874263 - RNA, 19 nt, Artificial Sequence
  Description of Artificial Sequence: Synthetic oligonucleotide
gcuuccuaagccuaaaaug

SEQ ID NO: 874264 - RNA, 19 nt, Artificial Sequence
  Description of Artificial Sequence: Synthetic oligonucleotide
ucagaugaagaggaacugc

SEQ ID NO: 874265 - RNA, 19 nt, Artificial Sequence
  Description of Artificial Sequence: Synthetic oligonucleotide
uucccuuuauccagcaugu

SEQ ID NO: 874266 - RNA, 19 nt, Artificial Sequence
  Description of Artificial Sequence: Synthetic oligonucleotide
ucugcugaccacuugugaa

SEQ ID NO: 874267 - RNA, 19 nt, Artificial Sequence
  Description of Artificial Sequence: Synthetic oligonucleotide
aguuauccuugugacuucc

SEQ ID NO: 874268 - RNA, 19 nt, Artificial Sequence
  Description of Artificial Sequence: Synthetic oligonucleotide
gugaaaguaggaaugcagc

SEQ ID NO: 874269 - RNA, 19 nt, Artificial Sequence
  Description of Artificial Sequence: Synthetic oligonucleotide
guaggaucguaucaucagc

SEQ ID NO: 874270 - RNA, 19 nt, Artificial Sequence
  Description of Artificial Sequence: Synthetic oligonucleotide
agcugguccgaacauuuuc

SEQ ID NO: 874271 - RNA, 19 nt, Artificial Sequence
  Description of Artificial Sequence: Synthetic oligonucleotide
uucgaucuauaacuuucug

SEQ ID NO: 874272 - RNA, 19 nt, Artificial Sequence
  Description of Artificial Sequence: Synthetic oligonucleotide
uaauauguggcauggcauu

SEQ ID NO: 874273 - RNA, 19 nt, Artificial Sequence
  Description of Artificial Sequence: Synthetic oligonucleotide
cuuccuaagccuaaaaugu

SEQ ID NO: 874274 - RNA, 19 nt, Artificial Sequence
  Description of Artificial Sequence: Synthetic oligonucleotide
cuuggacucaucaggcccc

SEQ ID NO: 874275 - RNA, 19 nt, Artificial Sequence
  Description of Artificial Sequence: Synthetic oligonucleotide
gguauaaagggcucaacca

SEQ ID NO: 874276 - RNA, 19 nt, Artificial Sequence
  Description of Artificial Sequence: Synthetic oligonucleotide
ggaucguaucaucagcugg

SEQ ID NO: 874277 - RNA, 19 nt, Artificial Sequence
  Description of Artificial Sequence: Synthetic oligonucleotide
uugaacacuauggaguuua

SEQ ID NO: 874278 - RNA, 19 nt, Artificial Sequence
  Description of Artificial Sequence: Synthetic oligonucleotide
acugcuuuaugagccaguc

SEQ ID NO: 874279 - RNA, 19 nt, Artificial Sequence
  Description of Artificial Sequence: Synthetic oligonucleotide
ggauaaaauaucccugaug

SEQ ID NO: 874280 - RNA, 19 nt, Artificial Sequence
  Description of Artificial Sequence: Synthetic oligonucleotide
agucguggguauaaagggc

SEQ ID NO: 874281 - RNA, 19 nt, Artificial Sequence
  Description of Artificial Sequence: Synthetic oligonucleotide
auauguggcauggcauugc

SEQ ID NO: 874282 - RNA, 19 nt, Artificial Sequence
  Description of Artificial Sequence: Synthetic oligonucleotide
cuaagccuaaaaugucccc

SEQ ID NO: 874283 - RNA, 19 nt, Artificial Sequence
  Description of Artificial Sequence: Synthetic oligonucleotide
ggguauaaagggcucaacc

SEQ ID NO: 874284 - RNA, 19 nt, Artificial Sequence
  Description of Artificial Sequence: Synthetic oligonucleotide
guguacguggacuccuucg

SEQ ID NO: 874285 - RNA, 19 nt, Artificial Sequence
  Description of Artificial Sequence: Synthetic oligonucleotide
aauguuugcauagggcuuu

SEQ ID NO: 874286 - RNA, 19 nt, Artificial Sequence
  Description of Artificial Sequence: Synthetic oligonucleotide
uuucgugugauguguucca

SEQ ID NO: 874287 - RNA, 19 nt, Artificial Sequence
  Description of Artificial Sequence: Synthetic oligonucleotide
guaaaauuggaagggguuc

SEQ ID NO: 874288 - RNA, 19 nt, Artificial Sequence
  Description of Artificial Sequence: Synthetic oligonucleotide
uccauggccgaucuuuacu

SEQ ID NO: 874289 - RNA, 19 nt, Artificial Sequence
  Description of Artificial Sequence: Synthetic oligonucleotide
ucccauaauugcuuuccug

SEQ ID NO: 874290 - RNA, 19 nt, Artificial Sequence
  Description of Artificial Sequence: Synthetic oligonucleotide
acuuucuguggaaucacuc

SEQ ID NO: 874291 - RNA, 19 nt, Artificial Sequence
  Description of Artificial Sequence: Synthetic oligonucleotide
gauucgcacuuguaacaag

SEQ ID NO: 874292 - RNA, 19 nt, Artificial Sequence
  Description of Artificial Sequence: Synthetic oligonucleotide
uuccuaagccuaaaauguc

SEQ ID NO: 874293 - RNA, 19 nt, Artificial Sequence
  Description of Artificial Sequence: Synthetic oligonucleotide
acuuguaacaagaaaccaa

SEQ ID NO: 874294 - RNA, 19 nt, Artificial Sequence
  Description of Artificial Sequence: Synthetic oligonucleotide
uauuguccacuucccauaa

SEQ ID NO: 874295 - RNA, 19 nt, Artificial Sequence
  Description of Artificial Sequence: Synthetic oligonucleotide
uacguggacuccuucgaug

SEQ ID NO: 874296 - RNA, 19 nt, Artificial Sequence
  Description of Artificial Sequence: Synthetic oligonucleotide
ucgacucuccagaugugug

SEQ ID NO: 874297 - RNA, 19 nt, Artificial Sequence
  Description of Artificial Sequence: Synthetic oligonucleotide
guacgucuuaauauguggc

SEQ ID NO: 874298 - RNA, 19 nt, Artificial Sequence
  Description of Artificial Sequence: Synthetic oligonucleotide
uccgcagaagcuuccuaag

SEQ ID NO: 874299 - RNA, 19 nt, Artificial Sequence
  Description of Artificial Sequence: Synthetic oligonucleotide
uauguggcauggcauugcu

SEQ ID NO: 874300 - RNA, 19 nt, Artificial Sequence
  Description of Artificial Sequence: Synthetic oligonucleotide
cauugcuucggccagaugu

SEQ ID NO: 874301 - RNA, 19 nt, Artificial Sequence
  Description of Artificial Sequence: Synthetic oligonucleotide
agauggggcauguguccgc

SEQ ID NO: 874302 - RNA, 19 nt, Artificial Sequence
  Description of Artificial Sequence: Synthetic oligonucleotide
gaaccaaugcuugaaaacu

SEQ ID NO: 874303 - RNA, 19 nt, Artificial Sequence
  Description of Artificial Sequence: Synthetic oligonucleotide
ucuaagcugguccgaacau

SEQ ID NO: 874304 - RNA, 19 nt, Artificial Sequence
  Description of Artificial Sequence: Synthetic oligonucleotide
ugugcaaccuugcgggccu

SEQ ID NO: 874305 - RNA, 19 nt, Artificial Sequence
  Description of Artificial Sequence: Synthetic oligonucleotide
uuauccuugugacuuccuu

SEQ ID NO: 874306 - RNA, 19 nt, Artificial Sequence
  Description of Artificial Sequence: Synthetic oligonucleotide
ggauauccuucuaagcugg

SEQ ID NO: 874307 - RNA, 19 nt, Artificial Sequence
  Description of Artificial Sequence: Synthetic oligonucleotide
ugccgaugggaggaaaagg

SEQ ID NO: 874308 - RNA, 19 nt, Artificial Sequence
  Description of Artificial Sequence: Synthetic oligonucleotide
agcucguaggaucguauca

SEQ ID NO: 874309 - RNA, 19 nt, Artificial Sequence
  Description of Artificial Sequence: Synthetic oligonucleotide
uuggggaguaacacugagu

SEQ ID NO: 874310 - RNA, 19 nt, Artificial Sequence
  Description of Artificial Sequence: Synthetic oligonucleotide
uaacugauaaggucagcuu

SEQ ID NO: 874311 - RNA, 19 nt, Artificial Sequence
  Description of Artificial Sequence: Synthetic oligonucleotide
ucgcacuuguaacaagaaa

SEQ ID NO: 874312 - RNA, 19 nt, Artificial Sequence
  Description of Artificial Sequence: Synthetic oligonucleotide
cagaaggauagaucagaug

SEQ ID NO: 874313 - RNA, 19 nt, Artificial Sequence
  Description of Artificial Sequence: Synthetic oligonucleotide
uuauuaggcugcuccugcu

SEQ ID NO: 874314 - RNA, 19 nt, Artificial Sequence
  Description of Artificial Sequence: Synthetic oligonucleotide
aggaucguaucaucagcug

SEQ ID NO: 874315 - RNA, 19 nt, Artificial Sequence
  Description of Artificial Sequence: Synthetic oligonucleotide
uucgcacuuguaacaagaa

SEQ ID NO: 874316 - RNA, 19 nt, Artificial Sequence
  Description of Artificial Sequence: Synthetic oligonucleotide
uugugaaaguaggaaugca

SEQ ID NO: 874317 - RNA, 19 nt, Artificial Sequence
  Description of Artificial Sequence: Synthetic oligonucleotide
auccauggccgaucuuuac

SEQ ID NO: 874318 - RNA, 19 nt, Artificial Sequence
  Description of Artificial Sequence: Synthetic oligonucleotide
caggauauccuucuaagcu

SEQ ID NO: 874319 - RNA, 19 nt, Artificial Sequence
  Description of Artificial Sequence: Synthetic oligonucleotide
auauuccuuggguuuucug

SEQ ID NO: 874320 - RNA, 19 nt, Artificial Sequence
  Description of Artificial Sequence: Synthetic oligonucleotide
uuccccugaggucucguac

SEQ ID NO: 874321 - RNA, 19 nt, Artificial Sequence
  Description of Artificial Sequence: Synthetic oligonucleotide
cacaauaggccagcacucg

SEQ ID NO: 874322 - RNA, 19 nt, Artificial Sequence
  Description of Artificial Sequence: Synthetic oligonucleotide
gagucuauguugcugaauu

SEQ ID NO: 874323 - RNA, 19 nt, Artificial Sequence
  Description of Artificial Sequence: Synthetic oligonucleotide
gcaguaguuaaacugagcu

SEQ ID NO: 874324 - RNA, 19 nt, Artificial Sequence
  Description of Artificial Sequence: Synthetic oligonucleotide
cuugaaaacugacccacaa

SEQ ID NO: 874325 - RNA, 19 nt, Artificial Sequence
  Description of Artificial Sequence: Synthetic oligonucleotide
acaauaggccagcacucgu

SEQ ID NO: 874326 - RNA, 19 nt, Artificial Sequence
  Description of Artificial Sequence: Synthetic oligonucleotide
ggugucuauccacuccugg

SEQ ID NO: 874327 - RNA, 19 nt, Artificial Sequence
  Description of Artificial Sequence: Synthetic oligonucleotide
uugaaagcguccagggguu

SEQ ID NO: 874328 - RNA, 19 nt, Artificial Sequence
  Description of Artificial Sequence: Synthetic oligonucleotide
ucguaucaucagcugggug

SEQ ID NO: 874329 - RNA, 19 nt, Artificial Sequence
  Description of Artificial Sequence: Synthetic oligonucleotide
ccuaagccuaaaauguccc

SEQ ID NO: 874330 - RNA, 19 nt, Artificial Sequence
  Description of Artificial Sequence: Synthetic oligonucleotide
uucccauaauugcuuuccu

SEQ ID NO: 874331 - RNA, 19 nt, Artificial Sequence
  Description of Artificial Sequence: Synthetic oligonucleotide
cagauucgcacuuguaaca

SEQ ID NO: 874332 - RNA, 19 nt, Artificial Sequence
  Description of Artificial Sequence: Synthetic oligonucleotide
cucauguacgucuuaauau

SEQ ID NO: 874333 - RNA, 19 nt, Artificial Sequence
  Description of Artificial Sequence: Synthetic oligonucleotide
gcacuuguaacaagaaacc

SEQ ID NO: 874334 - RNA, 19 nt, Artificial Sequence
  Description of Artificial Sequence: Synthetic oligonucleotide
ggggauaaaauaucccuga

SEQ ID NO: 874335 - RNA, 19 nt, Artificial Sequence
  Description of Artificial Sequence: Synthetic oligonucleotide
cuuugccuuaaucccugag

SEQ ID NO: 874336 - RNA, 19 nt, Artificial Sequence
  Description of Artificial Sequence: Synthetic oligonucleotide
caauaggccagcacucguc

SEQ ID NO: 874337 - RNA, 19 nt, Artificial Sequence
  Description of Artificial Sequence: Synthetic oligonucleotide
ggagcaucauuuucgugug

SEQ ID NO: 874338 - RNA, 19 nt, Artificial Sequence
  Description of Artificial Sequence: Synthetic oligonucleotide
gguauggaugacgacucgg

SEQ ID NO: 874339 - RNA, 19 nt, Artificial Sequence
  Description of Artificial Sequence: Synthetic oligonucleotide
uauuaggcugcuccugcuu

SEQ ID NO: 874340 - RNA, 19 nt, Artificial Sequence
  Description of Artificial Sequence: Synthetic oligonucleotide
accaagccaguuuauugaa

SEQ ID NO: 874341 - RNA, 19 nt, Artificial Sequence
  Description of Artificial Sequence: Synthetic oligonucleotide
cuuaaucccugagacucug

SEQ ID NO: 874342 - RNA, 19 nt, Artificial Sequence
  Description of Artificial Sequence: Synthetic oligonucleotide
uccuucgaugcucccugcc

SEQ ID NO: 874343 - RNA, 19 nt, Artificial Sequence
  Description of Artificial Sequence: Synthetic oligonucleotide
uggcauggcauugcuucgg

SEQ ID NO: 874344 - RNA, 19 nt, Artificial Sequence
  Description of Artificial Sequence: Synthetic oligonucleotide
aagcuuccuaagccuaaaa

SEQ ID NO: 874345 - RNA, 19 nt, Artificial Sequence
  Description of Artificial Sequence: Synthetic oligonucleotide
ucggccagaugucucugcu

SEQ ID NO: 874346 - RNA, 19 nt, Artificial Sequence
  Description of Artificial Sequence: Synthetic oligonucleotide
ugucucuugugugcaaccu

SEQ ID NO: 874347 - RNA, 19 nt, Artificial Sequence
  Description of Artificial Sequence: Synthetic oligonucleotide
agucacauuggguggggaa

SEQ ID NO: 874348 - RNA, 19 nt, Artificial Sequence
  Description of Artificial Sequence: Synthetic oligonucleotide
ucguacucaucgucugccc

SEQ ID NO: 874349 - RNA, 19 nt, Artificial Sequence
  Description of Artificial Sequence: Synthetic oligonucleotide
ugccuuaaucccugagacu

SEQ ID NO: 874350 - RNA, 19 nt, Artificial Sequence
  Description of Artificial Sequence: Synthetic oligonucleotide
ggcgaauucugguggauac

SEQ ID NO: 874351 - RNA, 19 nt, Artificial Sequence
  Description of Artificial Sequence: Synthetic oligonucleotide
ucgugcucuuggauggugu

SEQ ID NO: 874352 - RNA, 19 nt, Artificial Sequence
  Description of Artificial Sequence: Synthetic oligonucleotide
gcaauauccagcuuugccu

SEQ ID NO: 874353 - RNA, 19 nt, Artificial Sequence
  Description of Artificial Sequence: Synthetic oligonucleotide
cagccgagacuuucugugg

SEQ ID NO: 874354 - RNA, 19 nt, Artificial Sequence
  Description of Artificial Sequence: Synthetic oligonucleotide
auguacgucuuaauaugug

SEQ ID NO: 874355 - RNA, 19 nt, Artificial Sequence
  Description of Artificial Sequence: Synthetic oligonucleotide
aaugccgaugggaggaaaa

SEQ ID NO: 874356 - RNA, 19 nt, Artificial Sequence
  Description of Artificial Sequence: Synthetic oligonucleotide
cagauguguggcuucccug

SEQ ID NO: 874357 - RNA, 19 nt, Artificial Sequence
  Description of Artificial Sequence: Synthetic oligonucleotide
uauaacuuucugggcagua

SEQ ID NO: 874358 - RNA, 19 nt, Artificial Sequence
  Description of Artificial Sequence: Synthetic oligonucleotide
auguguaucaggggccuug

SEQ ID NO: 874359 - RNA, 19 nt, Artificial Sequence
  Description of Artificial Sequence: Synthetic oligonucleotide
ugaacacuauggaguuuaa

SEQ ID NO: 874360 - RNA, 19 nt, Artificial Sequence
  Description of Artificial Sequence: Synthetic oligonucleotide
caucaaagcaguaguuaaa

SEQ ID NO: 874361 - RNA, 19 nt, Artificial Sequence
  Description of Artificial Sequence: Synthetic oligonucleotide
ugugugcaaccuugcgggc

SEQ ID NO: 874362 - RNA, 19 nt, Artificial Sequence
  Description of Artificial Sequence: Synthetic oligonucleotide
ggagcauuguaggacauca

SEQ ID NO: 874363 - RNA, 19 nt, Artificial Sequence
  Description of Artificial Sequence: Synthetic oligonucleotide
agccgagacuuucugugga

SEQ ID NO: 874364 - RNA, 19 nt, Artificial Sequence
  Description of Artificial Sequence: Synthetic oligonucleotide
gagagaucgugcucuugga

SEQ ID NO: 874365 - RNA, 19 nt, Artificial Sequence
  Description of Artificial Sequence: Synthetic oligonucleotide
agauucgcacuuguaacaa

SEQ ID NO: 874366 - RNA, 19 nt, Artificial Sequence
  Description of Artificial Sequence: Synthetic oligonucleotide
acaagaaaccaagccaguu

SEQ ID NO: 874367 - RNA, 19 nt, Artificial Sequence
  Description of Artificial Sequence: Synthetic oligonucleotide
uguguaucaggggccuuga

SEQ ID NO: 874368 - RNA, 19 nt, Artificial Sequence
  Description of Artificial Sequence: Synthetic oligonucleotide
acgucuuaauauguggcau

SEQ ID NO: 874369 - RNA, 19 nt, Artificial Sequence
  Description of Artificial Sequence: Synthetic oligonucleotide
agucuauguugcugaauuu

SEQ ID NO: 874370 - RNA, 19 nt, Artificial Sequence
  Description of Artificial Sequence: Synthetic oligonucleotide
guuccaaauccauggccga

SEQ ID NO: 874371 - RNA, 19 nt, Artificial Sequence
  Description of Artificial Sequence: Synthetic oligonucleotide
auggaguuuaauggcuuga

SEQ ID NO: 874372 - RNA, 19 nt, Artificial Sequence
  Description of Artificial Sequence: Synthetic oligonucleotide
cucgucuuuagguacagau

SEQ ID NO: 874373 - RNA, 19 nt, Artificial Sequence
  Description of Artificial Sequence: Synthetic oligonucleotide
ucgugugauguguuccaaa

SEQ ID NO: 874374 - RNA, 19 nt, Artificial Sequence
  Description of Artificial Sequence: Synthetic oligonucleotide
augccgaugggaggaaaag

SEQ ID NO: 874375 - RNA, 19 nt, Artificial Sequence
  Description of Artificial Sequence: Synthetic oligonucleotide
uguacuuauuaggcugcuc

SEQ ID NO: 874376 - RNA, 19 nt, Artificial Sequence
  Description of Artificial Sequence: Synthetic oligonucleotide
acugauaaggucagcuuua

SEQ ID NO: 874377 - RNA, 19 nt, Artificial Sequence
  Description of Artificial Sequence: Synthetic oligonucleotide
uagugagaauguugacagu

SEQ ID NO: 874378 - RNA, 19 nt, Artificial Sequence
  Description of Artificial Sequence: Synthetic oligonucleotide
gggcaguagucacauuggg

SEQ ID NO: 874379 - RNA, 19 nt, Artificial Sequence
  Description of Artificial Sequence: Synthetic oligonucleotide
uggggccuauggcuggcag

SEQ ID NO: 874380 - RNA, 19 nt, Artificial Sequence
  Description of Artificial Sequence: Synthetic oligonucleotide
ugggugcucgacucuccag

SEQ ID NO: 874381 - RNA, 19 nt, Artificial Sequence
  Description of Artificial Sequence: Synthetic oligonucleotide
gucuucccggaugagguug

SEQ ID NO: 874382 - RNA, 19 nt, Artificial Sequence
  Description of Artificial Sequence: Synthetic oligonucleotide
cauguacgucuuaauaugu

SEQ ID NO: 874383 - RNA, 19 nt, Artificial Sequence
  Description of Artificial Sequence: Synthetic oligonucleotide
guaggacaucaaguaacug

SEQ ID NO: 874384 - RNA, 19 nt, Artificial Sequence
  Description of Artificial Sequence: Synthetic oligonucleotide
caggccaaaugccgauggg

SEQ ID NO: 874385 - RNA, 19 nt, Artificial Sequence
  Description of Artificial Sequence: Synthetic oligonucleotide
cauggccgaucuuuacuuc

SEQ ID NO: 874386 - RNA, 19 nt, Artificial Sequence
  Description of Artificial Sequence: Synthetic oligonucleotide
cgcagaagcuuccuaagcc

SEQ ID NO: 874387 - RNA, 19 nt, Artificial Sequence
  Description of Artificial Sequence: Synthetic oligonucleotide
aauccauggccgaucuuua

SEQ ID NO: 874388 - RNA, 19 nt, Artificial Sequence
  Description of Artificial Sequence: Synthetic oligonucleotide
ugagucuauguugcugaau

SEQ ID NO: 874389 - RNA, 19 nt, Artificial Sequence
  Description of Artificial Sequence: Synthetic oligonucleotide
ugcuucggccagaugucuc

SEQ ID NO: 874390 - RNA, 19 nt, Artificial Sequence
  Description of Artificial Sequence: Synthetic oligonucleotide
guccgcagaagcuuccuaa

SEQ ID NO: 874391 - RNA, 19 nt, Artificial Sequence
  Description of Artificial Sequence: Synthetic oligonucleotide
uccucgcuuucaucacugc

SEQ ID NO: 874392 - RNA, 19 nt, Artificial Sequence
  Description of Artificial Sequence: Synthetic oligonucleotide
cauccaggccaaaugccga

SEQ ID NO: 874393 - RNA, 19 nt, Artificial Sequence
  Description of Artificial Sequence: Synthetic oligonucleotide
cacuugugaaaguaggaau

SEQ ID NO: 874394 - RNA, 19 nt, Artificial Sequence
  Description of Artificial Sequence: Synthetic oligonucleotide
uccgaacauuuuccacaga

SEQ ID NO: 874395 - RNA, 19 nt, Artificial Sequence
  Description of Artificial Sequence: Synthetic oligonucleotide
gaugacgacucggaggccu

SEQ ID NO: 874396 - RNA, 19 nt, Artificial Sequence
  Description of Artificial Sequence: Synthetic oligonucleotide
ggagguauggaugacgacu

SEQ ID NO: 874397 - RNA, 19 nt, Artificial Sequence
  Description of Artificial Sequence: Synthetic oligonucleotide
uccuugugacuuccuugaa

SEQ ID NO: 874398 - RNA, 19 nt, Artificial Sequence
  Description of Artificial Sequence: Synthetic oligonucleotide
uaaagggcucaaccauauu

SEQ ID NO: 874399 - RNA, 19 nt, Artificial Sequence
  Description of Artificial Sequence: Synthetic oligonucleotide
ccauaggguaaagagcccc

SEQ ID NO: 874400 - RNA, 19 nt, Artificial Sequence
  Description of Artificial Sequence: Synthetic oligonucleotide
gugugcaaccuugcgggcc

SEQ ID NO: 874401 - RNA, 19 nt, Artificial Sequence
  Description of Artificial Sequence: Synthetic oligonucleotide
caacaagguaaacauuggu

SEQ ID NO: 874402 - RNA, 19 nt, Artificial Sequence
  Description of Artificial Sequence: Synthetic oligonucleotide
aaaugccgaugggaggaaa

SEQ ID NO: 874403 - RNA, 19 nt, Artificial Sequence
  Description of Artificial Sequence: Synthetic oligonucleotide
aucguaucaucagcugggu

SEQ ID NO: 874404 - RNA, 19 nt, Artificial Sequence
  Description of Artificial Sequence: Synthetic oligonucleotide
cuccagauguguggcuucc

SEQ ID NO: 874405 - RNA, 19 nt, Artificial Sequence
  Description of Artificial Sequence: Synthetic oligonucleotide
uccaggccaaaugccgaug

SEQ ID NO: 874406 - RNA, 19 nt, Artificial Sequence
  Description of Artificial Sequence: Synthetic oligonucleotide
ugaaagcguccagggguug

SEQ ID NO: 874407 - RNA, 19 nt, Artificial Sequence
  Description of Artificial Sequence: Synthetic oligonucleotide
gaaagcguccagggguuga

SEQ ID NO: 874408 - RNA, 19 nt, Artificial Sequence
  Description of Artificial Sequence: Synthetic oligonucleotide
uagguacagauggggcaug

SEQ ID NO: 874409 - RNA, 19 nt, Artificial Sequence
  Description of Artificial Sequence: Synthetic oligonucleotide
ccgaacauuuuccacagaa

SEQ ID NO: 874410 - RNA, 19 nt, Artificial Sequence
  Description of Artificial Sequence: Synthetic oligonucleotide
ccacaauaggccagcacuc

SEQ ID NO: 874411 - RNA, 19 nt, Artificial Sequence
  Description of Artificial Sequence: Synthetic oligonucleotide
auguacuuauuaggcugcu

SEQ ID NO: 874412 - RNA, 19 nt, Artificial Sequence
  Description of Artificial Sequence: Synthetic oligonucleotide
gucguggguauaaagggcu

SEQ ID NO: 874413 - RNA, 19 nt, Artificial Sequence
  Description of Artificial Sequence: Synthetic oligonucleotide
uguuggcucacagcugcua

SEQ ID NO: 874414 - RNA, 19 nt, Artificial Sequence
  Description of Artificial Sequence: Synthetic oligonucleotide
guggacuccuucgaugcuc

SEQ ID NO: 874415 - RNA, 19 nt, Artificial Sequence
  Description of Artificial Sequence: Synthetic oligonucleotide
gccgaugggaggaaaagga

SEQ ID NO: 874416 - RNA, 19 nt, Artificial Sequence
  Description of Artificial Sequence: Synthetic oligonucleotide
guacuuugccuuaaucccu

SEQ ID NO: 874417 - RNA, 19 nt, Artificial Sequence
  Description of Artificial Sequence: Synthetic oligonucleotide
ccuaaaauguccccaguua

SEQ ID NO: 874418 - RNA, 19 nt, Artificial Sequence
  Description of Artificial Sequence: Synthetic oligonucleotide
aucgugcucuuggauggug

SEQ ID NO: 874419 - RNA, 19 nt, Artificial Sequence
  Description of Artificial Sequence: Synthetic oligonucleotide
ccgaugggaggaaaaggac

SEQ ID NO: 874420 - RNA, 19 nt, Artificial Sequence
  Description of Artificial Sequence: Synthetic oligonucleotide
caccagccgagacuuucug

SEQ ID NO: 874421 - RNA, 19 nt, Artificial Sequence
  Description of Artificial Sequence: Synthetic oligonucleotide
cuccuucgaugcucccugc

SEQ ID NO: 874422 - RNA, 19 nt, Artificial Sequence
  Description of Artificial Sequence: Synthetic oligonucleotide
ccaaaugccgaugggagga

SEQ ID NO: 874423 - RNA, 19 nt, Artificial Sequence
  Description of Artificial Sequence: Synthetic oligonucleotide
uacucaucgucugcccuuu

SEQ ID NO: 874424 - RNA, 19 nt, Artificial Sequence
  Description of Artificial Sequence: Synthetic oligonucleotide
ggaguuguacuuugccuua

SEQ ID NO: 874425 - RNA, 19 nt, Artificial Sequence
  Description of Artificial Sequence: Synthetic oligonucleotide
ggguugaaccaacaaggua

SEQ ID NO: 874426 - RNA, 19 nt, Artificial Sequence
  Description of Artificial Sequence: Synthetic oligonucleotide
ucaucagcugggugccguu

SEQ ID NO: 874427 - RNA, 19 nt, Artificial Sequence
  Description of Artificial Sequence: Synthetic oligonucleotide
gguaaaauuggaagggguu

SEQ ID NO: 874428 - RNA, 19 nt, Artificial Sequence
  Description of Artificial Sequence: Synthetic oligonucleotide
auaggccagcacucgucuu

SEQ ID NO: 874429 - RNA, 19 nt, Artificial Sequence
  Description of Artificial Sequence: Synthetic oligonucleotide
gaguuguacuuugccuuaa

SEQ ID NO: 874430 - RNA, 19 nt, Artificial Sequence
  Description of Artificial Sequence: Synthetic oligonucleotide
ccgcagaagcuuccuaagc

SEQ ID NO: 874431 - RNA, 19 nt, Artificial Sequence
  Description of Artificial Sequence: Synthetic oligonucleotide
guguaucaggggccuugac

SEQ ID NO: 874432 - RNA, 19 nt, Artificial Sequence
  Description of Artificial Sequence: Synthetic oligonucleotide
cugauaaggucagcuuuaa

SEQ ID NO: 874433 - RNA, 19 nt, Artificial Sequence
  Description of Artificial Sequence: Synthetic oligonucleotide
ggaaaggaggcuguuggcu

SEQ ID NO: 874434 - RNA, 19 nt, Artificial Sequence
  Description of Artificial Sequence: Synthetic oligonucleotide
acucaucgucugcccuuug

SEQ ID NO: 874435 - RNA, 19 nt, Artificial Sequence
  Description of Artificial Sequence: Synthetic oligonucleotide
gaggucucguacucaucgu

SEQ ID NO: 874436 - RNA, 19 nt, Artificial Sequence
  Description of Artificial Sequence: Synthetic oligonucleotide
cacauguucccauguguau

SEQ ID NO: 874437 - RNA, 19 nt, Artificial Sequence
  Description of Artificial Sequence: Synthetic oligonucleotide
gcauggcauugcuucggcc

SEQ ID NO: 874438 - RNA, 19 nt, Artificial Sequence
  Description of Artificial Sequence: Synthetic oligonucleotide
cugggcgaauucuggugga

SEQ ID NO: 874439 - RNA, 19 nt, Artificial Sequence
  Description of Artificial Sequence: Synthetic oligonucleotide
cagagagaucgugcucuug

SEQ ID NO: 874440 - RNA, 19 nt, Artificial Sequence
  Description of Artificial Sequence: Synthetic oligonucleotide
ugggcgaauucugguggau

SEQ ID NO: 874441 - RNA, 19 nt, Artificial Sequence
  Description of Artificial Sequence: Synthetic oligonucleotide
uggucaagucguggguaua

SEQ ID NO: 874442 - RNA, 19 nt, Artificial Sequence
  Description of Artificial Sequence: Synthetic oligonucleotide
cagccugguggggagagga

SEQ ID NO: 874443 - RNA, 19 nt, Artificial Sequence
  Description of Artificial Sequence: Synthetic oligonucleotide
guacucaucgucugcccuu

SEQ ID NO: 874444 - RNA, 19 nt, Artificial Sequence
  Description of Artificial Sequence: Synthetic oligonucleotide
caagcucguaggaucguau

SEQ ID NO: 874445 - RNA, 19 nt, Artificial Sequence
  Description of Artificial Sequence: Synthetic oligonucleotide
acucgucuuuagguacaga

SEQ ID NO: 874446 - RNA, 19 nt, Artificial Sequence
  Description of Artificial Sequence: Synthetic oligonucleotide
gucaagucguggguauaaa

SEQ ID NO: 874447 - RNA, 19 nt, Artificial Sequence
  Description of Artificial Sequence: Synthetic oligonucleotide
gggauaaaauaucccugau

SEQ ID NO: 874448 - RNA, 19 nt, Artificial Sequence
  Description of Artificial Sequence: Synthetic oligonucleotide
ggaugccauaggguaaaga

SEQ ID NO: 874449 - RNA, 19 nt, Artificial Sequence
  Description of Artificial Sequence: Synthetic oligonucleotide
cauuuucgugugauguguu

SEQ ID NO: 874450 - RNA, 19 nt, Artificial Sequence
  Description of Artificial Sequence: Synthetic oligonucleotide
ugacgacucggaggccuuc

SEQ ID NO: 874451 - RNA, 19 nt, Artificial Sequence
  Description of Artificial Sequence: Synthetic oligonucleotide
gccauaggguaaagagccc

SEQ ID NO: 874452 - RNA, 19 nt, Artificial Sequence
  Description of Artificial Sequence: Synthetic oligonucleotide
guacguggacuccuucgau

SEQ ID NO: 874453 - RNA, 19 nt, Artificial Sequence
  Description of Artificial Sequence: Synthetic oligonucleotide
ggugccguucuucuccagu

SEQ ID NO: 874454 - RNA, 19 nt, Artificial Sequence
  Description of Artificial Sequence: Synthetic oligonucleotide
cuucauagagcaggagcau

SEQ ID NO: 874455 - RNA, 19 nt, Artificial Sequence
  Description of Artificial Sequence: Synthetic oligonucleotide
cuuccccugaggucucgua

SEQ ID NO: 874456 - RNA, 19 nt, Artificial Sequence
  Description of Artificial Sequence: Synthetic oligonucleotide
aggccagcacucgucuuua

SEQ ID NO: 874457 - RNA, 19 nt, Artificial Sequence
  Description of Artificial Sequence: Synthetic oligonucleotide
gacgacucggaggccuucu

SEQ ID NO: 874458 - RNA, 19 nt, Artificial Sequence
  Description of Artificial Sequence: Synthetic oligonucleotide
gggcuuuucguccucgcuu

SEQ ID NO: 874459 - RNA, 19 nt, Artificial Sequence
  Description of Artificial Sequence: Synthetic oligonucleotide
caaaugccgaugggaggaa

SEQ ID NO: 874460 - RNA, 19 nt, Artificial Sequence
  Description of Artificial Sequence: Synthetic oligonucleotide
cuaagcugguccgaacauu

SEQ ID NO: 874461 - RNA, 19 nt, Artificial Sequence
  Description of Artificial Sequence: Synthetic oligonucleotide
gggguugaaccaacaaggu

SEQ ID NO: 874462 - RNA, 19 nt, Artificial Sequence
  Description of Artificial Sequence: Synthetic oligonucleotide
cgugcucuuggaugguguc

SEQ ID NO: 874463 - RNA, 19 nt, Artificial Sequence
  Description of Artificial Sequence: Synthetic oligonucleotide
augacgacucggaggccuu

SEQ ID NO: 874464 - RNA, 19 nt, Artificial Sequence
  Description of Artificial Sequence: Synthetic oligonucleotide
aggagggcuucgaucuaua

SEQ ID NO: 874465 - RNA, 19 nt, Artificial Sequence
  Description of Artificial Sequence: Synthetic oligonucleotide
gaucgugcucuuggauggu

SEQ ID NO: 874466 - RNA, 19 nt, Artificial Sequence
  Description of Artificial Sequence: Synthetic oligonucleotide
cagguguacguggacuccu

SEQ ID NO: 874467 - RNA, 19 nt, Artificial Sequence
  Description of Artificial Sequence: Synthetic oligonucleotide
ggcuucgaucuauaacuuu

SEQ ID NO: 874468 - RNA, 19 nt, Artificial Sequence
  Description of Artificial Sequence: Synthetic oligonucleotide
cgugugauguguuccaaau

SEQ ID NO: 874469 - RNA, 19 nt, Artificial Sequence
  Description of Artificial Sequence: Synthetic oligonucleotide
ggaugacgacucggaggcc

SEQ ID NO: 874470 - RNA, 19 nt, Artificial Sequence
  Description of Artificial Sequence: Synthetic oligonucleotide
ccauggccgaucuuuacuu

SEQ ID NO: 874471 - RNA, 19 nt, Artificial Sequence
  Description of Artificial Sequence: Synthetic oligonucleotide
gggcgaauucugguggaua

SEQ ID NO: 874472 - RNA, 19 nt, Artificial Sequence
  Description of Artificial Sequence: Synthetic oligonucleotide
ccuuaaucccugagacucu

SEQ ID NO: 874473 - RNA, 19 nt, Artificial Sequence
  Description of Artificial Sequence: Synthetic oligonucleotide
ggugccagucuucccggau

SEQ ID NO: 874474 - RNA, 19 nt, Artificial Sequence
  Description of Artificial Sequence: Synthetic oligonucleotide
gccucauguacgucuuaau

SEQ ID NO: 874475 - RNA, 19 nt, Artificial Sequence
  Description of Artificial Sequence: Synthetic oligonucleotide
cccagauauccuggccuuc

SEQ ID NO: 874476 - RNA, 19 nt, Artificial Sequence
  Description of Artificial Sequence: Synthetic oligonucleotide
gcgaauucugguggauacu

SEQ ID NO: 874477 - RNA, 19 nt, Artificial Sequence
  Description of Artificial Sequence: Synthetic oligonucleotide
ccauguguaucaggggccu

SEQ ID NO: 874478 - RNA, 19 nt, Artificial Sequence
  Description of Artificial Sequence: Synthetic oligonucleotide
ccaagcucguaggaucgua

SEQ ID NO: 874479 - RNA, 19 nt, Artificial Sequence
  Description of Artificial Sequence: Synthetic oligonucleotide
gggcuucgaucuauaacuu

SEQ ID NO: 874480 - RNA, 19 nt, Artificial Sequence
  Description of Artificial Sequence: Synthetic oligonucleotide
ccacuccuggagagaggga

SEQ ID NO: 874481 - RNA, 19 nt, Artificial Sequence
  Description of Artificial Sequence: Synthetic oligonucleotide
cauguguaucaggggccuu

SEQ ID NO: 874482 - RNA, 19 nt, Artificial Sequence
  Description of Artificial Sequence: Synthetic oligonucleotide
ccgagacuuucuguggaau

SEQ ID NO: 874483 - RNA, 19 nt, Artificial Sequence
  Description of Artificial Sequence: Synthetic oligonucleotide
cccaagcucguaggaucgu

SEQ ID NO: 874484 - RNA, 19 nt, Artificial Sequence
  Description of Artificial Sequence: Synthetic oligonucleotide
gggcuuugccugggcgaau

SEQ ID NO: 874485 - RNA, 19 nt, Artificial Sequence
  Description of Artificial Sequence: Synthetic oligonucleotide
cccugauguggagggcuuu

SEQ ID NO: 874486 - RNA, 19 nt, Artificial Sequence
  Description of Artificial Sequence: Synthetic oligonucleotide
aauaaggacagguucagcc

SEQ ID NO: 874487 - RNA, 19 nt, Artificial Sequence
  Description of Artificial Sequence: Synthetic oligonucleotide
aauugaguuuaccauaggc

SEQ ID NO: 874488 - RNA, 19 nt, Artificial Sequence
  Description of Artificial Sequence: Synthetic oligonucleotide
uauacuuuaaccuucgcag

SEQ ID NO: 874489 - RNA, 19 nt, Artificial Sequence
  Description of Artificial Sequence: Synthetic oligonucleotide
agcacuaguguauacaugc

SEQ ID NO: 874490 - RNA, 19 nt, Artificial Sequence
  Description of Artificial Sequence: Synthetic oligonucleotide
aaaguggccauccguaucc

SEQ ID NO: 874491 - RNA, 19 nt, Artificial Sequence
  Description of Artificial Sequence: Synthetic oligonucleotide
uccucuacaagcaaggucc

SEQ ID NO: 874492 - RNA, 19 nt, Artificial Sequence
  Description of Artificial Sequence: Synthetic oligonucleotide
aaagcgagaagaaugcugc

SEQ ID NO: 874493 - RNA, 19 nt, Artificial Sequence
  Description of Artificial Sequence: Synthetic oligonucleotide
aaagcgauccuuuuagcuc

SEQ ID NO: 874494 - RNA, 19 nt, Artificial Sequence
  Description of Artificial Sequence: Synthetic oligonucleotide
ucuacuaccaggaagccug

SEQ ID NO: 874495 - RNA, 19 nt, Artificial Sequence
  Description of Artificial Sequence: Synthetic oligonucleotide
aagcgauccuuuuagcucc

SEQ ID NO: 874496 - RNA, 19 nt, Artificial Sequence
  Description of Artificial Sequence: Synthetic oligonucleotide
auaugggacaucuacuacc

SEQ ID NO: 874497 - RNA, 19 nt, Artificial Sequence
  Description of Artificial Sequence: Synthetic oligonucleotide
auaaccaccaccuagcagu

SEQ ID NO: 874498 - RNA, 19 nt, Artificial Sequence
  Description of Artificial Sequence: Synthetic oligonucleotide
aauaugggacaucuacuac

SEQ ID NO: 874499 - RNA, 19 nt, Artificial Sequence
  Description of Artificial Sequence: Synthetic oligonucleotide
uuuauauucagggugcucc

SEQ ID NO: 874500 - RNA, 19 nt, Artificial Sequence
  Description of Artificial Sequence: Synthetic oligonucleotide
aauccgacugacaaguugc

SEQ ID NO: 874501 - RNA, 19 nt, Artificial Sequence
  Description of Artificial Sequence: Synthetic oligonucleotide
cauaauaugggacaucuac

SEQ ID NO: 874502 - RNA, 19 nt, Artificial Sequence
  Description of Artificial Sequence: Synthetic oligonucleotide
ucaaauaaggacagguuca

SEQ ID NO: 874503 - RNA, 19 nt, Artificial Sequence
  Description of Artificial Sequence: Synthetic oligonucleotide
uuauacuuuaaccuucgca

SEQ ID NO: 874504 - RNA, 19 nt, Artificial Sequence
  Description of Artificial Sequence: Synthetic oligonucleotide
uucaaauaaggacagguuc

SEQ ID NO: 874505 - RNA, 19 nt, Artificial Sequence
  Description of Artificial Sequence: Synthetic oligonucleotide
gaugggaacggucauuugg

SEQ ID NO: 874506 - RNA, 19 nt, Artificial Sequence
  Description of Artificial Sequence: Synthetic oligonucleotide
aaaccugacugucaauccg

SEQ ID NO: 874507 - RNA, 19 nt, Artificial Sequence
  Description of Artificial Sequence: Synthetic oligonucleotide
acuaguguauacaugcucc

SEQ ID NO: 874508 - RNA, 19 nt, Artificial Sequence
  Description of Artificial Sequence: Synthetic oligonucleotide
ugaaccaacuucuggaaag

SEQ ID NO: 874509 - RNA, 19 nt, Artificial Sequence
  Description of Artificial Sequence: Synthetic oligonucleotide
acugacaaguugcagaaag

SEQ ID NO: 874510 - RNA, 19 nt, Artificial Sequence
  Description of Artificial Sequence: Synthetic oligonucleotide
aaguuagggaacucccagc

SEQ ID NO: 874511 - RNA, 19 nt, Artificial Sequence
  Description of Artificial Sequence: Synthetic oligonucleotide
ucaugguuaccacuguacg

SEQ ID NO: 874512 - RNA, 19 nt, Artificial Sequence
  Description of Artificial Sequence: Synthetic oligonucleotide
ugacaaguugcagaaagcg

SEQ ID NO: 874513 - RNA, 19 nt, Artificial Sequence
  Description of Artificial Sequence: Synthetic oligonucleotide
cuggaaaguacucuggucc

SEQ ID NO: 874514 - RNA, 19 nt, Artificial Sequence
  Description of Artificial Sequence: Synthetic oligonucleotide
gaugugaaccaacuucugg

SEQ ID NO: 874515 - RNA, 19 nt, Artificial Sequence
  Description of Artificial Sequence: Synthetic oligonucleotide
aaagcgagcauccucuaca

SEQ ID NO: 874516 - RNA, 19 nt, Artificial Sequence
  Description of Artificial Sequence: Synthetic oligonucleotide
aguuagggaacucccagcg

SEQ ID NO: 874517 - RNA, 19 nt, Artificial Sequence
  Description of Artificial Sequence: Synthetic oligonucleotide
augguuaccacuguacggc

SEQ ID NO: 874518 - RNA, 19 nt, Artificial Sequence
  Description of Artificial Sequence: Synthetic oligonucleotide
uuagggaacucccagcgca

SEQ ID NO: 874519 - RNA, 19 nt, Artificial Sequence
  Description of Artificial Sequence: Synthetic oligonucleotide
ugcaccaauuugaagaacu

SEQ ID NO: 874520 - RNA, 19 nt, Artificial Sequence
  Description of Artificial Sequence: Synthetic oligonucleotide
gaaguuagggaacucccag

SEQ ID NO: 874521 - RNA, 19 nt, Artificial Sequence
  Description of Artificial Sequence: Synthetic oligonucleotide
aaagucuuacaggccaccc

SEQ ID NO: 874522 - RNA, 19 nt, Artificial Sequence
  Description of Artificial Sequence: Synthetic oligonucleotide
agaaauugugugugaaguc

SEQ ID NO: 874523 - RNA, 19 nt, Artificial Sequence
  Description of Artificial Sequence: Synthetic oligonucleotide
aggaaagcgauccuuuuag

SEQ ID NO: 874524 - RNA, 19 nt, Artificial Sequence
  Description of Artificial Sequence: Synthetic oligonucleotide
agaaaccugacugucaauc

SEQ ID NO: 874525 - RNA, 19 nt, Artificial Sequence
  Description of Artificial Sequence: Synthetic oligonucleotide
uagaaauugugugugaagu

SEQ ID NO: 874526 - RNA, 19 nt, Artificial Sequence
  Description of Artificial Sequence: Synthetic oligonucleotide
auauucagggugcuccagc

SEQ ID NO: 874527 - RNA, 19 nt, Artificial Sequence
  Description of Artificial Sequence: Synthetic oligonucleotide
aaauugaguuuaccauagg

SEQ ID NO: 874528 - RNA, 19 nt, Artificial Sequence
  Description of Artificial Sequence: Synthetic oligonucleotide
ugcggugcaggcuauaacc

SEQ ID NO: 874529 - RNA, 19 nt, Artificial Sequence
  Description of Artificial Sequence: Synthetic oligonucleotide
uuucucaauaagguggucc

SEQ ID NO: 874530 - RNA, 19 nt, Artificial Sequence
  Description of Artificial Sequence: Synthetic oligonucleotide
gucacuaacaccuuccgca

SEQ ID NO: 874531 - RNA, 19 nt, Artificial Sequence
  Description of Artificial Sequence: Synthetic oligonucleotide
gaguuuaccauaggcauag

SEQ ID NO: 874532 - RNA, 19 nt, Artificial Sequence
  Description of Artificial Sequence: Synthetic oligonucleotide
uuaaccuucgcagacgcca

SEQ ID NO: 874533 - RNA, 19 nt, Artificial Sequence
  Description of Artificial Sequence: Synthetic oligonucleotide
agggaguaaacacuugcuc

SEQ ID NO: 874534 - RNA, 19 nt, Artificial Sequence
  Description of Artificial Sequence: Synthetic oligonucleotide
ugaggagcaacaaaaucuc

SEQ ID NO: 874535 - RNA, 19 nt, Artificial Sequence
  Description of Artificial Sequence: Synthetic oligonucleotide
caggaugaaaguucagacg

SEQ ID NO: 874536 - RNA, 19 nt, Artificial Sequence
  Description of Artificial Sequence: Synthetic oligonucleotide
aguucagacgggcgaaagc

SEQ ID NO: 874537 - RNA, 19 nt, Artificial Sequence
  Description of Artificial Sequence: Synthetic oligonucleotide
gagguaggcaccuuucugc

SEQ ID NO: 874538 - RNA, 19 nt, Artificial Sequence
  Description of Artificial Sequence: Synthetic oligonucleotide
augugaaccaacuucugga

SEQ ID NO: 874539 - RNA, 19 nt, Artificial Sequence
  Description of Artificial Sequence: Synthetic oligonucleotide
aaguacucugguccuuugg

SEQ ID NO: 874540 - RNA, 19 nt, Artificial Sequence
  Description of Artificial Sequence: Synthetic oligonucleotide
caugguuaccacuguacgg

SEQ ID NO: 874541 - RNA, 19 nt, Artificial Sequence
  Description of Artificial Sequence: Synthetic oligonucleotide
guucagacgggcgaaagcg

SEQ ID NO: 874542 - RNA, 19 nt, Artificial Sequence
  Description of Artificial Sequence: Synthetic oligonucleotide
aacuggaguaaugguaggg

SEQ ID NO: 874543 - RNA, 19 nt, Artificial Sequence
  Description of Artificial Sequence: Synthetic oligonucleotide
gaaaccugacugucaaucc

SEQ ID NO: 874544 - RNA, 19 nt, Artificial Sequence
  Description of Artificial Sequence: Synthetic oligonucleotide
gaguaaaggcuucaaauaa

SEQ ID NO: 874545 - RNA, 19 nt, Artificial Sequence
  Description of Artificial Sequence: Synthetic oligonucleotide
uauugggugaccacaucca

SEQ ID NO: 874546 - RNA, 19 nt, Artificial Sequence
  Description of Artificial Sequence: Synthetic oligonucleotide
gaugaaaguucagacgggc

SEQ ID NO: 874547 - RNA, 19 nt, Artificial Sequence
  Description of Artificial Sequence: Synthetic oligonucleotide
gaaagcgagaagaaugcug

SEQ ID NO: 874548 - RNA, 19 nt, Artificial Sequence
  Description of Artificial Sequence: Synthetic oligonucleotide
ugcuuauacuuuaaccuuc

SEQ ID NO: 874549 - RNA, 19 nt, Artificial Sequence
  Description of Artificial Sequence: Synthetic oligonucleotide
auccucuacaagcaagguc

SEQ ID NO: 874550 - RNA, 19 nt, Artificial Sequence
  Description of Artificial Sequence: Synthetic oligonucleotide
agggagacauccuggacuc

SEQ ID NO: 874551 - RNA, 19 nt, Artificial Sequence
  Description of Artificial Sequence: Synthetic oligonucleotide
aaaggacuugguacaacgg

SEQ ID NO: 874552 - RNA, 19 nt, Artificial Sequence
  Description of Artificial Sequence: Synthetic oligonucleotide
ggugucaucugcuugcuag

SEQ ID NO: 874553 - RNA, 19 nt, Artificial Sequence
  Description of Artificial Sequence: Synthetic oligonucleotide
aaggugaggagcaacaaaa

SEQ ID NO: 874554 - RNA, 19 nt, Artificial Sequence
  Description of Artificial Sequence: Synthetic oligonucleotide
ugaaguuagggaacuccca

SEQ ID NO: 874555 - RNA, 19 nt, Artificial Sequence
  Description of Artificial Sequence: Synthetic oligonucleotide
cuggguagggaguaaacac

SEQ ID NO: 874556 - RNA, 19 nt, Artificial Sequence
  Description of Artificial Sequence: Synthetic oligonucleotide
uaagagagccggaugagua

SEQ ID NO: 874557 - RNA, 19 nt, Artificial Sequence
  Description of Artificial Sequence: Synthetic oligonucleotide
ucuuacaggccacccagca

SEQ ID NO: 874558 - RNA, 19 nt, Artificial Sequence
  Description of Artificial Sequence: Synthetic oligonucleotide
ugaacugaugggaacgguc

SEQ ID NO: 874559 - RNA, 19 nt, Artificial Sequence
  Description of Artificial Sequence: Synthetic oligonucleotide
aggacuugguacaacgggc

SEQ ID NO: 874560 - RNA, 19 nt, Artificial Sequence
  Description of Artificial Sequence: Synthetic oligonucleotide
agaccaagugcuuauacuu

SEQ ID NO: 874561 - RNA, 19 nt, Artificial Sequence
  Description of Artificial Sequence: Synthetic oligonucleotide
aucaugguuaccacuguac

SEQ ID NO: 874562 - RNA, 19 nt, Artificial Sequence
  Description of Artificial Sequence: Synthetic oligonucleotide
ucagacgggcgaaagcgag

SEQ ID NO: 874563 - RNA, 19 nt, Artificial Sequence
  Description of Artificial Sequence: Synthetic oligonucleotide
augggaacggucauuuggc

SEQ ID NO: 874564 - RNA, 19 nt, Artificial Sequence
  Description of Artificial Sequence: Synthetic oligonucleotide
ucauugaucucuguccagc

SEQ ID NO: 874565 - RNA, 19 nt, Artificial Sequence
  Description of Artificial Sequence: Synthetic oligonucleotide
ggagaugcugaguaaaggc

SEQ ID NO: 874566 - RNA, 19 nt, Artificial Sequence
  Description of Artificial Sequence: Synthetic oligonucleotide
auccguauccaggagcacc

SEQ ID NO: 874567 - RNA, 19 nt, Artificial Sequence
  Description of Artificial Sequence: Synthetic oligonucleotide
uggguagggaguaaacacu

SEQ ID NO: 874568 - RNA, 19 nt, Artificial Sequence
  Description of Artificial Sequence: Synthetic oligonucleotide
gaagaaaccugacugucaa

SEQ ID NO: 874569 - RNA, 19 nt, Artificial Sequence
  Description of Artificial Sequence: Synthetic oligonucleotide
cugaagaggugucaucugc

SEQ ID NO: 874570 - RNA, 19 nt, Artificial Sequence
  Description of Artificial Sequence: Synthetic oligonucleotide
cagcagauaagagagccgg

SEQ ID NO: 874571 - RNA, 19 nt, Artificial Sequence
  Description of Artificial Sequence: Synthetic oligonucleotide
ucugaacugaugggaacgg

SEQ ID NO: 874572 - RNA, 19 nt, Artificial Sequence
  Description of Artificial Sequence: Synthetic oligonucleotide
uagggaguaaacacuugcu

SEQ ID NO: 874573 - RNA, 19 nt, Artificial Sequence
  Description of Artificial Sequence: Synthetic oligonucleotide
aggagcaacaaaaucucuc

SEQ ID NO: 874574 - RNA, 19 nt, Artificial Sequence
  Description of Artificial Sequence: Synthetic oligonucleotide
cacuguacggcugucauug

SEQ ID NO: 874575 - RNA, 19 nt, Artificial Sequence
  Description of Artificial Sequence: Synthetic oligonucleotide
auggaagaaaccugacugu

SEQ ID NO: 874576 - RNA, 19 nt, Artificial Sequence
  Description of Artificial Sequence: Synthetic oligonucleotide
auaauaugggacaucuacu

SEQ ID NO: 874577 - RNA, 19 nt, Artificial Sequence
  Description of Artificial Sequence: Synthetic oligonucleotide
ugcuagaggaugagggaca

SEQ ID NO: 874578 - RNA, 19 nt, Artificial Sequence
  Description of Artificial Sequence: Synthetic oligonucleotide
gauaagagagccggaugag

SEQ ID NO: 874579 - RNA, 19 nt, Artificial Sequence
  Description of Artificial Sequence: Synthetic oligonucleotide
agcgucacuaacaccuucc

SEQ ID NO: 874580 - RNA, 19 nt, Artificial Sequence
  Description of Artificial Sequence: Synthetic oligonucleotide
caaguugcagaaagcgagc

SEQ ID NO: 874581 - RNA, 19 nt, Artificial Sequence
  Description of Artificial Sequence: Synthetic oligonucleotide
aacgggcuaccucaccaag

SEQ ID NO: 874582 - RNA, 19 nt, Artificial Sequence
  Description of Artificial Sequence: Synthetic oligonucleotide
ggcuauaaccaccaccuag

SEQ ID NO: 874583 - RNA, 19 nt, Artificial Sequence
  Description of Artificial Sequence: Synthetic oligonucleotide
cacccagccauauugggug

SEQ ID NO: 874584 - RNA, 19 nt, Artificial Sequence
  Description of Artificial Sequence: Synthetic oligonucleotide
gguggcuuucucaauaagg

SEQ ID NO: 874585 - RNA, 19 nt, Artificial Sequence
  Description of Artificial Sequence: Synthetic oligonucleotide
ucuggaaaguacucugguc

SEQ ID NO: 874586 - RNA, 19 nt, Artificial Sequence
  Description of Artificial Sequence: Synthetic oligonucleotide
ugaugugaaccaacuucug

SEQ ID NO: 874587 - RNA, 19 nt, Artificial Sequence
  Description of Artificial Sequence: Synthetic oligonucleotide
ucccuagaaauugugugug

SEQ ID NO: 874588 - RNA, 19 nt, Artificial Sequence
  Description of Artificial Sequence: Synthetic oligonucleotide
gaaagcgauccuuuuagcu

SEQ ID NO: 874589 - RNA, 19 nt, Artificial Sequence
  Description of Artificial Sequence: Synthetic oligonucleotide
gcuugcuagaggaugaggg

SEQ ID NO: 874590 - RNA, 19 nt, Artificial Sequence
  Description of Artificial Sequence: Synthetic oligonucleotide
acaacgggcuaccucacca

SEQ ID NO: 874591 - RNA, 19 nt, Artificial Sequence
  Description of Artificial Sequence: Synthetic oligonucleotide
cuucacgagggucccaugc

SEQ ID NO: 874592 - RNA, 19 nt, Artificial Sequence
  Description of Artificial Sequence: Synthetic oligonucleotide
aauugugugugaaguccag

SEQ ID NO: 874593 - RNA, 19 nt, Artificial Sequence
  Description of Artificial Sequence: Synthetic oligonucleotide
cacgccuuucgucaguggg

SEQ ID NO: 874594 - RNA, 19 nt, Artificial Sequence
  Description of Artificial Sequence: Synthetic oligonucleotide
ugaguuuaccauaggcaua

SEQ ID NO: 874595 - RNA, 19 nt, Artificial Sequence
  Description of Artificial Sequence: Synthetic oligonucleotide
aagagagccggaugaguau

SEQ ID NO: 874596 - RNA, 19 nt, Artificial Sequence
  Description of Artificial Sequence: Synthetic oligonucleotide
ucuacaagcaagguccuuu

SEQ ID NO: 874597 - RNA, 19 nt, Artificial Sequence
  Description of Artificial Sequence: Synthetic oligonucleotide
cugucaaggaacccgagga

SEQ ID NO: 874598 - RNA, 19 nt, Artificial Sequence
  Description of Artificial Sequence: Synthetic oligonucleotide
ucucgaacuugcugcagca

SEQ ID NO: 874599 - RNA, 19 nt, Artificial Sequence
  Description of Artificial Sequence: Synthetic oligonucleotide
agcacccagccauauuggg

SEQ ID NO: 874600 - RNA, 19 nt, Artificial Sequence
  Description of Artificial Sequence: Synthetic oligonucleotide
caauccgacugacaaguug

SEQ ID NO: 874601 - RNA, 19 nt, Artificial Sequence
  Description of Artificial Sequence: Synthetic oligonucleotide
agccauauugggugaccac

SEQ ID NO: 874602 - RNA, 19 nt, Artificial Sequence
  Description of Artificial Sequence: Synthetic oligonucleotide
uuuaaccuucgcagacgcc

SEQ ID NO: 874603 - RNA, 19 nt, Artificial Sequence
  Description of Artificial Sequence: Synthetic oligonucleotide
ugcucccuagaaauugugu

SEQ ID NO: 874604 - RNA, 19 nt, Artificial Sequence
  Description of Artificial Sequence: Synthetic oligonucleotide
gaagggcuucuguaccagg

SEQ ID NO: 874605 - RNA, 19 nt, Artificial Sequence
  Description of Artificial Sequence: Synthetic oligonucleotide
gaacugaugggaacgguca

SEQ ID NO: 874606 - RNA, 19 nt, Artificial Sequence
  Description of Artificial Sequence: Synthetic oligonucleotide
ggcgaaagcgagaagaaug

SEQ ID NO: 874607 - RNA, 19 nt, Artificial Sequence
  Description of Artificial Sequence: Synthetic oligonucleotide
uucgcaucuuguccuugag

SEQ ID NO: 874608 - RNA, 19 nt, Artificial Sequence
  Description of Artificial Sequence: Synthetic oligonucleotide
acucccagcgcaggaaagc

SEQ ID NO: 874609 - RNA, 19 nt, Artificial Sequence
  Description of Artificial Sequence: Synthetic oligonucleotide
uauauucagggugcuccag

SEQ ID NO: 874610 - RNA, 19 nt, Artificial Sequence
  Description of Artificial Sequence: Synthetic oligonucleotide
gaaaguggccauccguauc

SEQ ID NO: 874611 - RNA, 19 nt, Artificial Sequence
  Description of Artificial Sequence: Synthetic oligonucleotide
cuuauacuuuaaccuucgc

SEQ ID NO: 874612 - RNA, 19 nt, Artificial Sequence
  Description of Artificial Sequence: Synthetic oligonucleotide
cacuaguguauacaugcuc

SEQ ID NO: 874613 - RNA, 19 nt, Artificial Sequence
  Description of Artificial Sequence: Synthetic oligonucleotide
ugucaucugcuugcuagag

SEQ ID NO: 874614 - RNA, 19 nt, Artificial Sequence
  Description of Artificial Sequence: Synthetic oligonucleotide
agagugcccacaccagguc

SEQ ID NO: 874615 - RNA, 19 nt, Artificial Sequence
  Description of Artificial Sequence: Synthetic oligonucleotide
aggacaaaacggcccaaca

SEQ ID NO: 874616 - RNA, 19 nt, Artificial Sequence
  Description of Artificial Sequence: Synthetic oligonucleotide
uggaagaaaccugacuguc

SEQ ID NO: 874617 - RNA, 19 nt, Artificial Sequence
  Description of Artificial Sequence: Synthetic oligonucleotide
uucagacgggcgaaagcga

SEQ ID NO: 874618 - RNA, 19 nt, Artificial Sequence
  Description of Artificial Sequence: Synthetic oligonucleotide
gcuauaaccaccaccuagc

SEQ ID NO: 874619 - RNA, 19 nt, Artificial Sequence
  Description of Artificial Sequence: Synthetic oligonucleotide
ggaaauugaguuuaccaua

SEQ ID NO: 874620 - RNA, 19 nt, Artificial Sequence
  Description of Artificial Sequence: Synthetic oligonucleotide
uggccauccguauccagga

SEQ ID NO: 874621 - RNA, 19 nt, Artificial Sequence
  Description of Artificial Sequence: Synthetic oligonucleotide
cagauaagagagccggaug

SEQ ID NO: 874622 - RNA, 19 nt, Artificial Sequence
  Description of Artificial Sequence: Synthetic oligonucleotide
acggucauuuggcuagcuc

SEQ ID NO: 874623 - RNA, 19 nt, Artificial Sequence
  Description of Artificial Sequence: Synthetic oligonucleotide
gcucccuagaaauugugug

SEQ ID NO: 874624 - RNA, 19 nt, Artificial Sequence
  Description of Artificial Sequence: Synthetic oligonucleotide
ugguggcuuucucaauaag

SEQ ID NO: 874625 - RNA, 19 nt, Artificial Sequence
  Description of Artificial Sequence: Synthetic oligonucleotide
gacaaguugcagaaagcga

SEQ ID NO: 874626 - RNA, 19 nt, Artificial Sequence
  Description of Artificial Sequence: Synthetic oligonucleotide
cacuugaggaaggcaaagg

SEQ ID NO: 874627 - RNA, 19 nt, Artificial Sequence
  Description of Artificial Sequence: Synthetic oligonucleotide
caggcacuugucuuccagg

SEQ ID NO: 874628 - RNA, 19 nt, Artificial Sequence
  Description of Artificial Sequence: Synthetic oligonucleotide
aagcgagcauccucuacaa

SEQ ID NO: 874629 - RNA, 19 nt, Artificial Sequence
  Description of Artificial Sequence: Synthetic oligonucleotide
uugcucccuagaaauugug

SEQ ID NO: 874630 - RNA, 19 nt, Artificial Sequence
  Description of Artificial Sequence: Synthetic oligonucleotide
caagugucaugcugggaac

SEQ ID NO: 874631 - RNA, 19 nt, Artificial Sequence
  Description of Artificial Sequence: Synthetic oligonucleotide
acgggcgaaagcgagaaga

SEQ ID NO: 874632 - RNA, 19 nt, Artificial Sequence
  Description of Artificial Sequence: Synthetic oligonucleotide
ugagggccggaugauugcg

SEQ ID NO: 874633 - RNA, 19 nt, Artificial Sequence
  Description of Artificial Sequence: Synthetic oligonucleotide
aaccugacugucaauccga

SEQ ID NO: 874634 - RNA, 19 nt, Artificial Sequence
  Description of Artificial Sequence: Synthetic oligonucleotide
ugcuugcuagaggaugagg

SEQ ID NO: 874635 - RNA, 19 nt, Artificial Sequence
  Description of Artificial Sequence: Synthetic oligonucleotide
agaaaguggccauccguau

SEQ ID NO: 874636 - RNA, 19 nt, Artificial Sequence
  Description of Artificial Sequence: Synthetic oligonucleotide
aagcgagaagaaugcugca

SEQ ID NO: 874637 - RNA, 19 nt, Artificial Sequence
  Description of Artificial Sequence: Synthetic oligonucleotide
caucagugacucugagagg

SEQ ID NO: 874638 - RNA, 19 nt, Artificial Sequence
  Description of Artificial Sequence: Synthetic oligonucleotide
ucggccaacuggaguaaug

SEQ ID NO: 874639 - RNA, 19 nt, Artificial Sequence
  Description of Artificial Sequence: Synthetic oligonucleotide
gcuuauacuuuaaccuucg

SEQ ID NO: 874640 - RNA, 19 nt, Artificial Sequence
  Description of Artificial Sequence: Synthetic oligonucleotide
ucacucggccaacuggagu

SEQ ID NO: 874641 - RNA, 19 nt, Artificial Sequence
  Description of Artificial Sequence: Synthetic oligonucleotide
aagugucaugcugggaaca

SEQ ID NO: 874642 - RNA, 19 nt, Artificial Sequence
  Description of Artificial Sequence: Synthetic oligonucleotide
cugcuuuucgcaucuuguc

SEQ ID NO: 874643 - RNA, 19 nt, Artificial Sequence
  Description of Artificial Sequence: Synthetic oligonucleotide
ggugaggagcaacaaaauc

SEQ ID NO: 874644 - RNA, 19 nt, Artificial Sequence
  Description of Artificial Sequence: Synthetic oligonucleotide
ucauaauaugggacaucua

SEQ ID NO: 874645 - RNA, 19 nt, Artificial Sequence
  Description of Artificial Sequence: Synthetic oligonucleotide
uacaacgggcuaccucacc

SEQ ID NO: 874646 - RNA, 19 nt, Artificial Sequence
  Description of Artificial Sequence: Synthetic oligonucleotide
ugggucugguggaaauuga

SEQ ID NO: 874647 - RNA, 19 nt, Artificial Sequence
  Description of Artificial Sequence: Synthetic oligonucleotide
ggcgagccaggacaaaacg

SEQ ID NO: 874648 - RNA, 19 nt, Artificial Sequence
  Description of Artificial Sequence: Synthetic oligonucleotide
guuagggaacucccagcgc

SEQ ID NO: 874649 - RNA, 19 nt, Artificial Sequence
  Description of Artificial Sequence: Synthetic oligonucleotide
caugcaccaauuugaagaa

SEQ ID NO: 874650 - RNA, 19 nt, Artificial Sequence
  Description of Artificial Sequence: Synthetic oligonucleotide
cagguucagccacuugagg

SEQ ID NO: 874651 - RNA, 19 nt, Artificial Sequence
  Description of Artificial Sequence: Synthetic oligonucleotide
caggcgguucaucagugac

SEQ ID NO: 874652 - RNA, 19 nt, Artificial Sequence
  Description of Artificial Sequence: Synthetic oligonucleotide
aggcuucaaauaaggacag

SEQ ID NO: 874653 - RNA, 19 nt, Artificial Sequence
  Description of Artificial Sequence: Synthetic oligonucleotide
ccauucauaauaugggaca

SEQ ID NO: 874654 - RNA, 19 nt, Artificial Sequence
  Description of Artificial Sequence: Synthetic oligonucleotide
accacuguacggcugucau

SEQ ID NO: 874655 - RNA, 19 nt, Artificial Sequence
  Description of Artificial Sequence: Synthetic oligonucleotide
uucggcuguugaaguuagg

SEQ ID NO: 874656 - RNA, 19 nt, Artificial Sequence
  Description of Artificial Sequence: Synthetic oligonucleotide
cugccagcgucacuaacac

SEQ ID NO: 874657 - RNA, 19 nt, Artificial Sequence
  Description of Artificial Sequence: Synthetic oligonucleotide
gaaaguucagacgggcgaa

SEQ ID NO: 874658 - RNA, 19 nt, Artificial Sequence
  Description of Artificial Sequence: Synthetic oligonucleotide
accuucgcagacgccagcg

SEQ ID NO: 874659 - RNA, 19 nt, Artificial Sequence
  Description of Artificial Sequence: Synthetic oligonucleotide
uggccugguggcuuucuca

SEQ ID NO: 874660 - RNA, 19 nt, Artificial Sequence
  Description of Artificial Sequence: Synthetic oligonucleotide
aggugggucagggagacau

SEQ ID NO: 874661 - RNA, 19 nt, Artificial Sequence
  Description of Artificial Sequence: Synthetic oligonucleotide
uccgacugacaaguugcag

SEQ ID NO: 874662 - RNA, 19 nt, Artificial Sequence
  Description of Artificial Sequence: Synthetic oligonucleotide
cagaaaguggccauccgua

SEQ ID NO: 874663 - RNA, 19 nt, Artificial Sequence
  Description of Artificial Sequence: Synthetic oligonucleotide
cggucauuuggcuagcucc

SEQ ID NO: 874664 - RNA, 19 nt, Artificial Sequence
  Description of Artificial Sequence: Synthetic oligonucleotide
ugggaacggucauuuggcu

SEQ ID NO: 874665 - RNA, 19 nt, Artificial Sequence
  Description of Artificial Sequence: Synthetic oligonucleotide
cccaacaaguccuugcuuc

SEQ ID NO: 874666 - RNA, 19 nt, Artificial Sequence
  Description of Artificial Sequence: Synthetic oligonucleotide
cagaaagcgagcauccucu

SEQ ID NO: 874667 - RNA, 19 nt, Artificial Sequence
  Description of Artificial Sequence: Synthetic oligonucleotide
ugguuaccacuguacggcu

SEQ ID NO: 874668 - RNA, 19 nt, Artificial Sequence
  Description of Artificial Sequence: Synthetic oligonucleotide
ugaugggaacggucauuug

SEQ ID NO: 874669 - RNA, 19 nt, Artificial Sequence
  Description of Artificial Sequence: Synthetic oligonucleotide
cgagccaggacaaaacggc

SEQ ID NO: 874670 - RNA, 19 nt, Artificial Sequence
  Description of Artificial Sequence: Synthetic oligonucleotide
augaguaugagggccggau

SEQ ID NO: 874671 - RNA, 19 nt, Artificial Sequence
  Description of Artificial Sequence: Synthetic oligonucleotide
aggagguacaggacucaac

SEQ ID NO: 874672 - RNA, 19 nt, Artificial Sequence
  Description of Artificial Sequence: Synthetic oligonucleotide
agucucacucggccaacug

SEQ ID NO: 874673 - RNA, 19 nt, Artificial Sequence
  Description of Artificial Sequence: Synthetic oligonucleotide
aacucccagcgcaggaaag

SEQ ID NO: 874674 - RNA, 19 nt, Artificial Sequence
  Description of Artificial Sequence: Synthetic oligonucleotide
augcaccaauuugaagaac

SEQ ID NO: 874675 - RNA, 19 nt, Artificial Sequence
  Description of Artificial Sequence: Synthetic oligonucleotide
ugguggaaauugaguuuac

SEQ ID NO: 874676 - RNA, 19 nt, Artificial Sequence
  Description of Artificial Sequence: Synthetic oligonucleotide
gcgaaagcgagaagaaugc

SEQ ID NO: 874677 - RNA, 19 nt, Artificial Sequence
  Description of Artificial Sequence: Synthetic oligonucleotide
uaguguauacaugcuccuc

SEQ ID NO: 874678 - RNA, 19 nt, Artificial Sequence
  Description of Artificial Sequence: Synthetic oligonucleotide
cacgagggucccaugccag

SEQ ID NO: 874679 - RNA, 19 nt, Artificial Sequence
  Description of Artificial Sequence: Synthetic oligonucleotide
ggaaagcgauccuuuuagc

SEQ ID NO: 874680 - RNA, 19 nt, Artificial Sequence
  Description of Artificial Sequence: Synthetic oligonucleotide
cauauugggugaccacauc

SEQ ID NO: 874681 - RNA, 19 nt, Artificial Sequence
  Description of Artificial Sequence: Synthetic oligonucleotide
ucucaauaaggugguccac

SEQ ID NO: 874682 - RNA, 19 nt, Artificial Sequence
  Description of Artificial Sequence: Synthetic oligonucleotide
aggccacccagcaagucuc

SEQ ID NO: 874683 - RNA, 19 nt, Artificial Sequence
  Description of Artificial Sequence: Synthetic oligonucleotide
cuacuaccaggaagccugc

SEQ ID NO: 874684 - RNA, 19 nt, Artificial Sequence
  Description of Artificial Sequence: Synthetic oligonucleotide
cacuuccuguuccacggac

SEQ ID NO: 874685 - RNA, 19 nt, Artificial Sequence
  Description of Artificial Sequence: Synthetic oligonucleotide
caucuacuaccaggaagcc

SEQ ID NO: 874686 - RNA, 19 nt, Artificial Sequence
  Description of Artificial Sequence: Synthetic oligonucleotide
guuaccacuguacggcugu

SEQ ID NO: 874687 - RNA, 19 nt, Artificial Sequence
  Description of Artificial Sequence: Synthetic oligonucleotide
cacuaacaccuuccgcagc

SEQ ID NO: 874688 - RNA, 19 nt, Artificial Sequence
  Description of Artificial Sequence: Synthetic oligonucleotide
uuucgucagugggaagggc

SEQ ID NO: 874689 - RNA, 19 nt, Artificial Sequence
  Description of Artificial Sequence: Synthetic oligonucleotide
uccuugcuucggcuguuga

SEQ ID NO: 874690 - RNA, 19 nt, Artificial Sequence
  Description of Artificial Sequence: Synthetic oligonucleotide
agcgagcauccucuacaag

SEQ ID NO: 874691 - RNA, 19 nt, Artificial Sequence
  Description of Artificial Sequence: Synthetic oligonucleotide
caccaauuugaagaacuca

SEQ ID NO: 874692 - RNA, 19 nt, Artificial Sequence
  Description of Artificial Sequence: Synthetic oligonucleotide
gguggaaauugaguuuacc

SEQ ID NO: 874693 - RNA, 19 nt, Artificial Sequence
  Description of Artificial Sequence: Synthetic oligonucleotide
ugcacaggugggucaggga

SEQ ID NO: 874694 - RNA, 19 nt, Artificial Sequence
  Description of Artificial Sequence: Synthetic oligonucleotide
ucccagcgcaggaaagcga

SEQ ID NO: 874695 - RNA, 19 nt, Artificial Sequence
  Description of Artificial Sequence: Synthetic oligonucleotide
augggacaucuacuaccag

SEQ ID NO: 874696 - RNA, 19 nt, Artificial Sequence
  Description of Artificial Sequence: Synthetic oligonucleotide
cucacucggccaacuggag

SEQ ID NO: 874697 - RNA, 19 nt, Artificial Sequence
  Description of Artificial Sequence: Synthetic oligonucleotide
gaacucccagcgcaggaaa

SEQ ID NO: 874698 - RNA, 19 nt, Artificial Sequence
  Description of Artificial Sequence: Synthetic oligonucleotide
ggacaaaacggcccaacaa

SEQ ID NO: 874699 - RNA, 19 nt, Artificial Sequence
  Description of Artificial Sequence: Synthetic oligonucleotide
gggucagggagacauccug

SEQ ID NO: 874700 - RNA, 19 nt, Artificial Sequence
  Description of Artificial Sequence: Synthetic oligonucleotide
cugguggaaauugaguuua

SEQ ID NO: 874701 - RNA, 19 nt, Artificial Sequence
  Description of Artificial Sequence: Synthetic oligonucleotide
gacugucaauccgacugac

SEQ ID NO: 874702 - RNA, 19 nt, Artificial Sequence
  Description of Artificial Sequence: Synthetic oligonucleotide
ugucggcgagccaggacaa

SEQ ID NO: 874703 - RNA, 19 nt, Artificial Sequence
  Description of Artificial Sequence: Synthetic oligonucleotide
gugaaccaacuucuggaaa

SEQ ID NO: 874704 - RNA, 19 nt, Artificial Sequence
  Description of Artificial Sequence: Synthetic oligonucleotide
cuucaaauaaggacagguu

SEQ ID NO: 874705 - RNA, 19 nt, Artificial Sequence
  Description of Artificial Sequence: Synthetic oligonucleotide
aaccaacuucuggaaagua

SEQ ID NO: 874706 - RNA, 19 nt, Artificial Sequence
  Description of Artificial Sequence: Synthetic oligonucleotide
ccaagugucaugcugggaa

SEQ ID NO: 874707 - RNA, 19 nt, Artificial Sequence
  Description of Artificial Sequence: Synthetic oligonucleotide
agcgcacuuccuguuccac

SEQ ID NO: 874708 - RNA, 19 nt, Artificial Sequence
  Description of Artificial Sequence: Synthetic oligonucleotide
cucccuagaaauugugugu

SEQ ID NO: 874709 - RNA, 19 nt, Artificial Sequence
  Description of Artificial Sequence: Synthetic oligonucleotide
caggaaggggccuuuauau

SEQ ID NO: 874710 - RNA, 19 nt, Artificial Sequence
  Description of Artificial Sequence: Synthetic oligonucleotide
gcgucacuaacaccuuccg

SEQ ID NO: 874711 - RNA, 19 nt, Artificial Sequence
  Description of Artificial Sequence: Synthetic oligonucleotide
gugcuuauacuuuaaccuu

SEQ ID NO: 874712 - RNA, 19 nt, Artificial Sequence
  Description of Artificial Sequence: Synthetic oligonucleotide
ggagacauccuggacucug

SEQ ID NO: 874713 - RNA, 19 nt, Artificial Sequence
  Description of Artificial Sequence: Synthetic oligonucleotide
gcuguugaaguuagggaac

SEQ ID NO: 874714 - RNA, 19 nt, Artificial Sequence
  Description of Artificial Sequence: Synthetic oligonucleotide
cagccagcacaugucggcg

SEQ ID NO: 874715 - RNA, 19 nt, Artificial Sequence
  Description of Artificial Sequence: Synthetic oligonucleotide
agacgggcgaaagcgagaa

SEQ ID NO: 874716 - RNA, 19 nt, Artificial Sequence
  Description of Artificial Sequence: Synthetic oligonucleotide
acgccagcgcacuuccugu

SEQ ID NO: 874717 - RNA, 19 nt, Artificial Sequence
  Description of Artificial Sequence: Synthetic oligonucleotide
ggaguaaugguagggacua

SEQ ID NO: 874718 - RNA, 19 nt, Artificial Sequence
  Description of Artificial Sequence: Synthetic oligonucleotide
aguggccgguucccaacug

SEQ ID NO: 874719 - RNA, 19 nt, Artificial Sequence
  Description of Artificial Sequence: Synthetic oligonucleotide
caggacaaaacggcccaac

SEQ ID NO: 874720 - RNA, 19 nt, Artificial Sequence
  Description of Artificial Sequence: Synthetic oligonucleotide
cuaguguauacaugcuccu

SEQ ID NO: 874721 - RNA, 19 nt, Artificial Sequence
  Description of Artificial Sequence: Synthetic oligonucleotide
ggagacuugcucccuagaa

SEQ ID NO: 874722 - RNA, 19 nt, Artificial Sequence
  Description of Artificial Sequence: Synthetic oligonucleotide
ccggaugaguaugagggcc

SEQ ID NO: 874723 - RNA, 19 nt, Artificial Sequence
  Description of Artificial Sequence: Synthetic oligonucleotide
ggccggaugauugcggugc

SEQ ID NO: 874724 - RNA, 19 nt, Artificial Sequence
  Description of Artificial Sequence: Synthetic oligonucleotide
guacaggacucaaccagga

SEQ ID NO: 874725 - RNA, 19 nt, Artificial Sequence
  Description of Artificial Sequence: Synthetic oligonucleotide
ccgacugacaaguugcaga

SEQ ID NO: 874726 - RNA, 19 nt, Artificial Sequence
  Description of Artificial Sequence: Synthetic oligonucleotide
acuugcugcagcacacaga

SEQ ID NO: 874727 - RNA, 19 nt, Artificial Sequence
  Description of Artificial Sequence: Synthetic oligonucleotide
caugucggcgagccaggac

SEQ ID NO: 874728 - RNA, 19 nt, Artificial Sequence
  Description of Artificial Sequence: Synthetic oligonucleotide
ggcgguucaucagugacuc

SEQ ID NO: 874729 - RNA, 19 nt, Artificial Sequence
  Description of Artificial Sequence: Synthetic oligonucleotide
agaaagcgagcauccucua

SEQ ID NO: 874730 - RNA, 19 nt, Artificial Sequence
  Description of Artificial Sequence: Synthetic oligonucleotide
gccgguucccaacuggcug

SEQ ID NO: 874731 - RNA, 19 nt, Artificial Sequence
  Description of Artificial Sequence: Synthetic oligonucleotide
agccagcacaugucggcga

SEQ ID NO: 874732 - RNA, 19 nt, Artificial Sequence
  Description of Artificial Sequence: Synthetic oligonucleotide
ggaugaguaugagggccgg

SEQ ID NO: 874733 - RNA, 19 nt, Artificial Sequence
  Description of Artificial Sequence: Synthetic oligonucleotide
gcuuuucgcaucuuguccu

SEQ ID NO: 874734 - RNA, 19 nt, Artificial Sequence
  Description of Artificial Sequence: Synthetic oligonucleotide
acugucaauccgacugaca

SEQ ID NO: 874735 - RNA, 19 nt, Artificial Sequence
  Description of Artificial Sequence: Synthetic oligonucleotide
gacuugguacaacgggcua

SEQ ID NO: 874736 - RNA, 19 nt, Artificial Sequence
  Description of Artificial Sequence: Synthetic oligonucleotide
aggggccuuuauauucagg

SEQ ID NO: 874737 - RNA, 19 nt, Artificial Sequence
  Description of Artificial Sequence: Synthetic oligonucleotide
agcacgccuuucgucagug

SEQ ID NO: 874738 - RNA, 19 nt, Artificial Sequence
  Description of Artificial Sequence: Synthetic oligonucleotide
gaacggucauuuggcuagc

SEQ ID NO: 874739 - RNA, 19 nt, Artificial Sequence
  Description of Artificial Sequence: Synthetic oligonucleotide
gacgggcgaaagcgagaag

SEQ ID NO: 874740 - RNA, 19 nt, Artificial Sequence
  Description of Artificial Sequence: Synthetic oligonucleotide
ugguaggagauggcccgca

SEQ ID NO: 874741 - RNA, 19 nt, Artificial Sequence
  Description of Artificial Sequence: Synthetic oligonucleotide
cuuacaggccacccagcaa

SEQ ID NO: 874742 - RNA, 19 nt, Artificial Sequence
  Description of Artificial Sequence: Synthetic oligonucleotide
acuguacggcugucauuga

SEQ ID NO: 874743 - RNA, 19 nt, Artificial Sequence
  Description of Artificial Sequence: Synthetic oligonucleotide
cuugcucccuagaaauugu

SEQ ID NO: 874744 - RNA, 19 nt, Artificial Sequence
  Description of Artificial Sequence: Synthetic oligonucleotide
agauggcccgcagcagggg

SEQ ID NO: 874745 - RNA, 19 nt, Artificial Sequence
  Description of Artificial Sequence: Synthetic oligonucleotide
cugguggcuuucucaauaa

SEQ ID NO: 874746 - RNA, 19 nt, Artificial Sequence
  Description of Artificial Sequence: Synthetic oligonucleotide
ggagcacgccuuucgucag

SEQ ID NO: 874747 - RNA, 19 nt, Artificial Sequence
  Description of Artificial Sequence: Synthetic oligonucleotide
agcuucacgagggucccau

SEQ ID NO: 874748 - RNA, 19 nt, Artificial Sequence
  Description of Artificial Sequence: Synthetic oligonucleotide
gagagccggaugaguauga

SEQ ID NO: 874749 - RNA, 19 nt, Artificial Sequence
  Description of Artificial Sequence: Synthetic oligonucleotide
uuccuguuccacggaccgc

SEQ ID NO: 874750 - RNA, 19 nt, Artificial Sequence
  Description of Artificial Sequence: Synthetic oligonucleotide
aggcgguucaucagugacu

SEQ ID NO: 874751 - RNA, 19 nt, Artificial Sequence
  Description of Artificial Sequence: Synthetic oligonucleotide
cuuucucaauaaggugguc

SEQ ID NO: 874752 - RNA, 19 nt, Artificial Sequence
  Description of Artificial Sequence: Synthetic oligonucleotide
guaggagguacaggacuca

SEQ ID NO: 874753 - RNA, 19 nt, Artificial Sequence
  Description of Artificial Sequence: Synthetic oligonucleotide
augcugaguaaaggcuuca

SEQ ID NO: 874754 - RNA, 19 nt, Artificial Sequence
  Description of Artificial Sequence: Synthetic oligonucleotide
cauucauaauaugggacau

SEQ ID NO: 874755 - RNA, 19 nt, Artificial Sequence
  Description of Artificial Sequence: Synthetic oligonucleotide
caccaccuagcaguucaag

SEQ ID NO: 874756 - RNA, 19 nt, Artificial Sequence
  Description of Artificial Sequence: Synthetic oligonucleotide
gaugaguaugagggccgga

SEQ ID NO: 874757 - RNA, 19 nt, Artificial Sequence
  Description of Artificial Sequence: Synthetic oligonucleotide
gucuuacaggccacccagc

SEQ ID NO: 874758 - RNA, 19 nt, Artificial Sequence
  Description of Artificial Sequence: Synthetic oligonucleotide
acagagggcuacagcugag

SEQ ID NO: 874759 - RNA, 19 nt, Artificial Sequence
  Description of Artificial Sequence: Synthetic oligonucleotide
acgccuuucgucaguggga

SEQ ID NO: 874760 - RNA, 19 nt, Artificial Sequence
  Description of Artificial Sequence: Synthetic oligonucleotide
cagcgucacuaacaccuuc

SEQ ID NO: 874761 - RNA, 19 nt, Artificial Sequence
  Description of Artificial Sequence: Synthetic oligonucleotide
cugcuugcuagaggaugag

SEQ ID NO: 874762 - RNA, 19 nt, Artificial Sequence
  Description of Artificial Sequence: Synthetic oligonucleotide
ggcuucaaauaaggacagg

SEQ ID NO: 874763 - RNA, 19 nt, Artificial Sequence
  Description of Artificial Sequence: Synthetic oligonucleotide
ccagcgcacuuccuguucc

SEQ ID NO: 874764 - RNA, 19 nt, Artificial Sequence
  Description of Artificial Sequence: Synthetic oligonucleotide
gggcagaaaguggccaucc

SEQ ID NO: 874765 - RNA, 19 nt, Artificial Sequence
  Description of Artificial Sequence: Synthetic oligonucleotide
uugguacaacgggcuaccu

SEQ ID NO: 874766 - RNA, 19 nt, Artificial Sequence
  Description of Artificial Sequence: Synthetic oligonucleotide
gcagaaaguggccauccgu

SEQ ID NO: 874767 - RNA, 19 nt, Artificial Sequence
  Description of Artificial Sequence: Synthetic oligonucleotide
acgggcuaccucaccaagu

SEQ ID NO: 874768 - RNA, 19 nt, Artificial Sequence
  Description of Artificial Sequence: Synthetic oligonucleotide
cuaacaccuuccgcagcuc

SEQ ID NO: 874769 - RNA, 19 nt, Artificial Sequence
  Description of Artificial Sequence: Synthetic oligonucleotide
auccgacugacaaguugca

SEQ ID NO: 874770 - RNA, 19 nt, Artificial Sequence
  Description of Artificial Sequence: Synthetic oligonucleotide
gguuaccacuguacggcug

SEQ ID NO: 874771 - RNA, 19 nt, Artificial Sequence
  Description of Artificial Sequence: Synthetic oligonucleotide
gcaccaauuugaagaacuc

SEQ ID NO: 874772 - RNA, 19 nt, Artificial Sequence
  Description of Artificial Sequence: Synthetic oligonucleotide
ggucccaugccagauggaa

SEQ ID NO: 874773 - RNA, 19 nt, Artificial Sequence
  Description of Artificial Sequence: Synthetic oligonucleotide
aggcuauaaccaccaccua

SEQ ID NO: 874774 - RNA, 19 nt, Artificial Sequence
  Description of Artificial Sequence: Synthetic oligonucleotide
cagacgggcgaaagcgaga

SEQ ID NO: 874775 - RNA, 19 nt, Artificial Sequence
  Description of Artificial Sequence: Synthetic oligonucleotide
gaccaagugcuuauacuuu

SEQ ID NO: 874776 - RNA, 19 nt, Artificial Sequence
  Description of Artificial Sequence: Synthetic oligonucleotide
cggccaacuggaguaaugg

SEQ ID NO: 874777 - RNA, 19 nt, Artificial Sequence
  Description of Artificial Sequence: Synthetic oligonucleotide
guacaacgggcuaccucac

SEQ ID NO: 874778 - RNA, 19 nt, Artificial Sequence
  Description of Artificial Sequence: Synthetic oligonucleotide
gugguaggagauggcccgc

SEQ ID NO: 874779 - RNA, 19 nt, Artificial Sequence
  Description of Artificial Sequence: Synthetic oligonucleotide
cuguugaaguuagggaacu

SEQ ID NO: 874780 - RNA, 19 nt, Artificial Sequence
  Description of Artificial Sequence: Synthetic oligonucleotide
auaaggugguccaccucuu

SEQ ID NO: 874781 - RNA, 19 nt, Artificial Sequence
  Description of Artificial Sequence: Synthetic oligonucleotide
ugaccacauccagccugcc

SEQ ID NO: 874782 - RNA, 19 nt, Artificial Sequence
  Description of Artificial Sequence: Synthetic oligonucleotide
uuaccacuguacggcuguc

SEQ ID NO: 874783 - RNA, 19 nt, Artificial Sequence
  Description of Artificial Sequence: Synthetic oligonucleotide
caacgggcuaccucaccaa

SEQ ID NO: 874784 - RNA, 19 nt, Artificial Sequence
  Description of Artificial Sequence: Synthetic oligonucleotide
aggcgcugggacacuuggg

SEQ ID NO: 874785 - RNA, 19 nt, Artificial Sequence
  Description of Artificial Sequence: Synthetic oligonucleotide
ccgaccgccggcucugugc

SEQ ID NO: 874786 - RNA, 19 nt, Artificial Sequence
  Description of Artificial Sequence: Synthetic oligonucleotide
cgucacuaacaccuuccgc

SEQ ID NO: 874787 - RNA, 19 nt, Artificial Sequence
  Description of Artificial Sequence: Synthetic oligonucleotide
ggcgcugggacacuugggu

SEQ ID NO: 874788 - RNA, 19 nt, Artificial Sequence
  Description of Artificial Sequence: Synthetic oligonucleotide
uaggcaccuuucugccauc

SEQ ID NO: 874789 - RNA, 19 nt, Artificial Sequence
  Description of Artificial Sequence: Synthetic oligonucleotide
gcuaccucaccaaguguca

SEQ ID NO: 874790 - RNA, 19 nt, Artificial Sequence
  Description of Artificial Sequence: Synthetic oligonucleotide
gaguaaacacuugcucuuu

SEQ ID NO: 874791 - RNA, 19 nt, Artificial Sequence
  Description of Artificial Sequence: Synthetic oligonucleotide
acaugucggcgagccagga

SEQ ID NO: 874792 - RNA, 19 nt, Artificial Sequence
  Description of Artificial Sequence: Synthetic oligonucleotide
cacggaccgcagcuccuug

SEQ ID NO: 874793 - RNA, 19 nt, Artificial Sequence
  Description of Artificial Sequence: Synthetic oligonucleotide
cauccguauccaggagcac

SEQ ID NO: 874794 - RNA, 19 nt, Artificial Sequence
  Description of Artificial Sequence: Synthetic oligonucleotide
ggccauccguauccaggag

SEQ ID NO: 874795 - RNA, 19 nt, Artificial Sequence
  Description of Artificial Sequence: Synthetic oligonucleotide
ggucauuuggcuagcuccu

SEQ ID NO: 874796 - RNA, 19 nt, Artificial Sequence
  Description of Artificial Sequence: Synthetic oligonucleotide
cugguccuuuggagacuug

SEQ ID NO: 874797 - RNA, 19 nt, Artificial Sequence
  Description of Artificial Sequence: Synthetic oligonucleotide
cgacugacaaguugcagaa

SEQ ID NO: 874798 - RNA, 19 nt, Artificial Sequence
  Description of Artificial Sequence: Synthetic oligonucleotide
ccagccauauugggugacc

SEQ ID NO: 874799 - RNA, 19 nt, Artificial Sequence
  Description of Artificial Sequence: Synthetic oligonucleotide
gcacgccuuucgucagugg

SEQ ID NO: 874800 - RNA, 19 nt, Artificial Sequence
  Description of Artificial Sequence: Synthetic oligonucleotide
caggggcaccgaccgccgg

SEQ ID NO: 874801 - RNA, 19 nt, Artificial Sequence
  Description of Artificial Sequence: Synthetic oligonucleotide
acucggccaacuggaguaa

SEQ ID NO: 874802 - RNA, 19 nt, Artificial Sequence
  Description of Artificial Sequence: Synthetic oligonucleotide
guaccaggugguaggagau

SEQ ID NO: 874803 - RNA, 19 nt, Artificial Sequence
  Description of Artificial Sequence: Synthetic oligonucleotide
gcuucggcuguugaaguua

SEQ ID NO: 874804 - RNA, 19 nt, Artificial Sequence
  Description of Artificial Sequence: Synthetic oligonucleotide
agcgauccuuuuagcuccu

SEQ ID NO: 874805 - RNA, 19 nt, Artificial Sequence
  Description of Artificial Sequence: Synthetic oligonucleotide
gggccggaugauugcggug

SEQ ID NO: 874806 - RNA, 19 nt, Artificial Sequence
  Description of Artificial Sequence: Synthetic oligonucleotide
cuguacggcugucauugau

SEQ ID NO: 874807 - RNA, 19 nt, Artificial Sequence
  Description of Artificial Sequence: Synthetic oligonucleotide
cccuagaaauuguguguga

SEQ ID NO: 874808 - RNA, 19 nt, Artificial Sequence
  Description of Artificial Sequence: Synthetic oligonucleotide
ccuggucagugcuccccag

SEQ ID NO: 874809 - RNA, 19 nt, Artificial Sequence
  Description of Artificial Sequence: Synthetic oligonucleotide
gcuucacgagggucccaug

SEQ ID NO: 874810 - RNA, 19 nt, Artificial Sequence
  Description of Artificial Sequence: Synthetic oligonucleotide
guccuugagguaggcaccu

SEQ ID NO: 874811 - RNA, 19 nt, Artificial Sequence
  Description of Artificial Sequence: Synthetic oligonucleotide
gcgcugggacacuuggguc

SEQ ID NO: 874812 - RNA, 19 nt, Artificial Sequence
  Description of Artificial Sequence: Synthetic oligonucleotide
gccuuucgucagugggaag

SEQ ID NO: 874813 - RNA, 19 nt, Artificial Sequence
  Description of Artificial Sequence: Synthetic oligonucleotide
ggccaacuggaguaauggu

SEQ ID NO: 874814 - RNA, 19 nt, Artificial Sequence
  Description of Artificial Sequence: Synthetic oligonucleotide
gauugcggugcaggcuaua

SEQ ID NO: 874815 - RNA, 19 nt, Artificial Sequence
  Description of Artificial Sequence: Synthetic oligonucleotide
ccuagcaguucaagcagcu

SEQ ID NO: 874816 - RNA, 19 nt, Artificial Sequence
  Description of Artificial Sequence: Synthetic oligonucleotide
cugaacugaugggaacggu

SEQ ID NO: 874817 - RNA, 19 nt, Artificial Sequence
  Description of Artificial Sequence: Synthetic oligonucleotide
cugacuggaggaggucaaa

SEQ ID NO: 874818 - RNA, 19 nt, Artificial Sequence
  Description of Artificial Sequence: Synthetic oligonucleotide
ggaagaccaagugcuuaua

SEQ ID NO: 874819 - RNA, 19 nt, Artificial Sequence
  Description of Artificial Sequence: Synthetic oligonucleotide
ggguagggaguaaacacuu

SEQ ID NO: 874820 - RNA, 19 nt, Artificial Sequence
  Description of Artificial Sequence: Synthetic oligonucleotide
gacuugagauccagccauu

SEQ ID NO: 874821 - RNA, 19 nt, Artificial Sequence
  Description of Artificial Sequence: Synthetic oligonucleotide
guaugagggccggaugauu

SEQ ID NO: 874822 - RNA, 19 nt, Artificial Sequence
  Description of Artificial Sequence: Synthetic oligonucleotide
gggcuacagcugaggcugg

SEQ ID NO: 874823 - RNA, 19 nt, Artificial Sequence
  Description of Artificial Sequence: Synthetic oligonucleotide
cagguccaggagcacgccu

SEQ ID NO: 874824 - RNA, 19 nt, Artificial Sequence
  Description of Artificial Sequence: Synthetic oligonucleotide
caguggccgguucccaacu

SEQ ID NO: 874825 - RNA, 19 nt, Artificial Sequence
  Description of Artificial Sequence: Synthetic oligonucleotide
gcaccgaccgccggcucug

SEQ ID NO: 874826 - RNA, 19 nt, Artificial Sequence
  Description of Artificial Sequence: Synthetic oligonucleotide
gcggugguguugaugugaa

SEQ ID NO: 874827 - RNA, 19 nt, Artificial Sequence
  Description of Artificial Sequence: Synthetic oligonucleotide
cuaccucaccaagugucau

SEQ ID NO: 874828 - RNA, 19 nt, Artificial Sequence
  Description of Artificial Sequence: Synthetic oligonucleotide
gcacccagccauauugggu

SEQ ID NO: 874829 - RNA, 19 nt, Artificial Sequence
  Description of Artificial Sequence: Synthetic oligonucleotide
ccagcacaugucggcgagc

SEQ ID NO: 874830 - RNA, 19 nt, Artificial Sequence
  Description of Artificial Sequence: Synthetic oligonucleotide
ccggaugauugcggugcag

SEQ ID NO: 874831 - RNA, 19 nt, Artificial Sequence
  Description of Artificial Sequence: Synthetic oligonucleotide
cgggcgaaagcgagaagaa

SEQ ID NO: 874832 - RNA, 19 nt, Artificial Sequence
  Description of Artificial Sequence: Synthetic oligonucleotide
cgcugggacacuugggucu

SEQ ID NO: 874833 - RNA, 19 nt, Artificial Sequence
  Description of Artificial Sequence: Synthetic oligonucleotide
ccacccagcaagucucacu

SEQ ID NO: 874834 - RNA, 19 nt, Artificial Sequence
  Description of Artificial Sequence: Synthetic oligonucleotide
gcgauccuuuuagcuccug

SEQ ID NO: 874835 - RNA, 19 nt, Artificial Sequence
  Description of Artificial Sequence: Synthetic oligonucleotide
gucggcgagccaggacaaa

SEQ ID NO: 874836 - RNA, 19 nt, Artificial Sequence
  Description of Artificial Sequence: Synthetic oligonucleotide
cucuacaagcaagguccuu

SEQ ID NO: 874837 - RNA, 19 nt, Artificial Sequence
  Description of Artificial Sequence: Synthetic oligonucleotide
ggccacccagcaagucuca

SEQ ID NO: 874838 - RNA, 19 nt, Artificial Sequence
  Description of Artificial Sequence: Synthetic oligonucleotide
ccguauccaggagcaccuc

SEQ ID NO: 874839 - RNA, 19 nt, Artificial Sequence
  Description of Artificial Sequence: Synthetic oligonucleotide
ccaacuggcugggcaaggu

SEQ ID NO: 874840 - RNA, 19 nt, Artificial Sequence
  Description of Artificial Sequence: Synthetic oligonucleotide
cgaaagcgagaagaaugcu

SEQ ID NO: 874841 - RNA, 19 nt, Artificial Sequence
  Description of Artificial Sequence: Synthetic oligonucleotide
ccaggacaaaacggcccaa

SEQ ID NO: 874842 - RNA, 19 nt, Artificial Sequence
  Description of Artificial Sequence: Synthetic oligonucleotide
gggcaccgaccgccggcuc

SEQ ID NO: 874843 - RNA, 19 nt, Artificial Sequence
  Description of Artificial Sequence: Synthetic oligonucleotide
gggagacauccuggacucu

SEQ ID NO: 874844 - RNA, 19 nt, Artificial Sequence
  Description of Artificial Sequence: Synthetic oligonucleotide
ccagcgucacuaacaccuu

SEQ ID NO: 874845 - RNA, 19 nt, Artificial Sequence
  Description of Artificial Sequence: Synthetic oligonucleotide
cgaccgccggcucugugcu

SEQ ID NO: 874846 - RNA, 19 nt, Artificial Sequence
  Description of Artificial Sequence: Synthetic oligonucleotide
ccagccugcccuggucagu

SEQ ID NO: 874847 - RNA, 19 nt, Artificial Sequence
  Description of Artificial Sequence: Synthetic oligonucleotide
caccgaccgccggcucugu

SEQ ID NO: 874848 - RNA, 19 nt, Artificial Sequence
  Description of Artificial Sequence: Synthetic oligonucleotide
aaaucuauaauucagucga

SEQ ID NO: 874849 - RNA, 19 nt, Artificial Sequence
  Description of Artificial Sequence: Synthetic oligonucleotide
auaggaaagacuuggaugc

SEQ ID NO: 874850 - RNA, 19 nt, Artificial Sequence
  Description of Artificial Sequence: Synthetic oligonucleotide
acagcuugaaucuagacgc

SEQ ID NO: 874851 - RNA, 19 nt, Artificial Sequence
  Description of Artificial Sequence: Synthetic oligonucleotide
aaagaccacaauuauaaag

SEQ ID NO: 874852 - RNA, 19 nt, Artificial Sequence
  Description of Artificial Sequence: Synthetic oligonucleotide
guggauuugacugagaacg

SEQ ID NO: 874853 - RNA, 19 nt, Artificial Sequence
  Description of Artificial Sequence: Synthetic oligonucleotide
uggagauaaauuuucagcc

SEQ ID NO: 874854 - RNA, 19 nt, Artificial Sequence
  Description of Artificial Sequence: Synthetic oligonucleotide
aaaccaaacuugaauaccc

SEQ ID NO: 874855 - RNA, 19 nt, Artificial Sequence
  Description of Artificial Sequence: Synthetic oligonucleotide
acuggagaagucuuuaagc

SEQ ID NO: 874856 - RNA, 19 nt, Artificial Sequence
  Description of Artificial Sequence: Synthetic oligonucleotide
uuaucaucagagcagguag

SEQ ID NO: 874857 - RNA, 19 nt, Artificial Sequence
  Description of Artificial Sequence: Synthetic oligonucleotide
uauaggaaagacuuggaug

SEQ ID NO: 874858 - RNA, 19 nt, Artificial Sequence
  Description of Artificial Sequence: Synthetic oligonucleotide
gaaucuaaaaccaaacuug

SEQ ID NO: 874859 - RNA, 19 nt, Artificial Sequence
  Description of Artificial Sequence: Synthetic oligonucleotide
uguguuaucaucagagcag

SEQ ID NO: 874860 - RNA, 19 nt, Artificial Sequence
  Description of Artificial Sequence: Synthetic oligonucleotide
cacaguaacacucugcugg

SEQ ID NO: 874861 - RNA, 19 nt, Artificial Sequence
  Description of Artificial Sequence: Synthetic oligonucleotide
uaguguguuaucaucagag

SEQ ID NO: 874862 - RNA, 19 nt, Artificial Sequence
  Description of Artificial Sequence: Synthetic oligonucleotide
aacauaaggacugacagga

SEQ ID NO: 874863 - RNA, 19 nt, Artificial Sequence
  Description of Artificial Sequence: Synthetic oligonucleotide
ucuguuaacuuucugauua

SEQ ID NO: 874864 - RNA, 19 nt, Artificial Sequence
  Description of Artificial Sequence: Synthetic oligonucleotide
auagaaaccuuccaaaugu

SEQ ID NO: 874865 - RNA, 19 nt, Artificial Sequence
  Description of Artificial Sequence: Synthetic oligonucleotide
uguaccagcgccuucaacc

SEQ ID NO: 874866 - RNA, 19 nt, Artificial Sequence
  Description of Artificial Sequence: Synthetic oligonucleotide
uuuuaguguguuaucauca

SEQ ID NO: 874867 - RNA, 19 nt, Artificial Sequence
  Description of Artificial Sequence: Synthetic oligonucleotide
ucgauaagcaguauaauuc

SEQ ID NO: 874868 - RNA, 19 nt, Artificial Sequence
  Description of Artificial Sequence: Synthetic oligonucleotide
auucagagcaagcaucugc

SEQ ID NO: 874869 - RNA, 19 nt, Artificial Sequence
  Description of Artificial Sequence: Synthetic oligonucleotide
ucugauuagaaaucuauaa

SEQ ID NO: 874870 - RNA, 19 nt, Artificial Sequence
  Description of Artificial Sequence: Synthetic oligonucleotide
auaauguugccaucucucc

SEQ ID NO: 874871 - RNA, 19 nt, Artificial Sequence
  Description of Artificial Sequence: Synthetic oligonucleotide
ucuauaauucagucgagug

SEQ ID NO: 874872 - RNA, 19 nt, Artificial Sequence
  Description of Artificial Sequence: Synthetic oligonucleotide
guuucuaagagacaucuug

SEQ ID NO: 874873 - RNA, 19 nt, Artificial Sequence
  Description of Artificial Sequence: Synthetic oligonucleotide
gauuucacauaaaagguag

SEQ ID NO: 874874 - RNA, 19 nt, Artificial Sequence
  Description of Artificial Sequence: Synthetic oligonucleotide
uauucacacacacacacac

SEQ ID NO: 874875 - RNA, 19 nt, Artificial Sequence
  Description of Artificial Sequence: Synthetic oligonucleotide
cauauugaacauauaaaug

SEQ ID NO: 874876 - RNA, 19 nt, Artificial Sequence
  Description of Artificial Sequence: Synthetic oligonucleotide
ucccagaucauaauguugc

SEQ ID NO: 874877 - RNA, 19 nt, Artificial Sequence
  Description of Artificial Sequence: Synthetic oligonucleotide
guacagaucuuccucaugg

SEQ ID NO: 874878 - RNA, 19 nt, Artificial Sequence
  Description of Artificial Sequence: Synthetic oligonucleotide
uuuggcaggaccuucggag

SEQ ID NO: 874879 - RNA, 19 nt, Artificial Sequence
  Description of Artificial Sequence: Synthetic oligonucleotide
uggaauguuuaucauuucc

SEQ ID NO: 874880 - RNA, 19 nt, Artificial Sequence
  Description of Artificial Sequence: Synthetic oligonucleotide
agcaguauaauucuugcgu

SEQ ID NO: 874881 - RNA, 19 nt, Artificial Sequence
  Description of Artificial Sequence: Synthetic oligonucleotide
guuauucacacacacacac

SEQ ID NO: 874882 - RNA, 19 nt, Artificial Sequence
  Description of Artificial Sequence: Synthetic oligonucleotide
gacaucuugaaagacgagg

SEQ ID NO: 874883 - RNA, 19 nt, Artificial Sequence
  Description of Artificial Sequence: Synthetic oligonucleotide
aauacccuaguuuucgagu

SEQ ID NO: 874884 - RNA, 19 nt, Artificial Sequence
  Description of Artificial Sequence: Synthetic oligonucleotide
uucacacacacacacacac

SEQ ID NO: 874885 - RNA, 19 nt, Artificial Sequence
  Description of Artificial Sequence: Synthetic oligonucleotide
uuucugauuagaaaucuau

SEQ ID NO: 874886 - RNA, 19 nt, Artificial Sequence
  Description of Artificial Sequence: Synthetic oligonucleotide
uugaauacccuaguuuucg

SEQ ID NO: 874887 - RNA, 19 nt, Artificial Sequence
  Description of Artificial Sequence: Synthetic oligonucleotide
uagaccucuauucaagcgc

SEQ ID NO: 874888 - RNA, 19 nt, Artificial Sequence
  Description of Artificial Sequence: Synthetic oligonucleotide
agcgccacugaucugauuc

SEQ ID NO: 874889 - RNA, 19 nt, Artificial Sequence
  Description of Artificial Sequence: Synthetic oligonucleotide
aagcaguauaauucuugcg

SEQ ID NO: 874890 - RNA, 19 nt, Artificial Sequence
  Description of Artificial Sequence: Synthetic oligonucleotide
uguucaggacuacagaagu

SEQ ID NO: 874891 - RNA, 19 nt, Artificial Sequence
  Description of Artificial Sequence: Synthetic oligonucleotide
auggccaacaaccaguucu

SEQ ID NO: 874892 - RNA, 19 nt, Artificial Sequence
  Description of Artificial Sequence: Synthetic oligonucleotide
ucaaccuugcuugauuugg

SEQ ID NO: 874893 - RNA, 19 nt, Artificial Sequence
  Description of Artificial Sequence: Synthetic oligonucleotide
ucacuuuucacccaucuuu

SEQ ID NO: 874894 - RNA, 19 nt, Artificial Sequence
  Description of Artificial Sequence: Synthetic oligonucleotide
acaaccaguucuuauucuc

SEQ ID NO: 874895 - RNA, 19 nt, Artificial Sequence
  Description of Artificial Sequence: Synthetic oligonucleotide
aacuugaauacccuaguuu

SEQ ID NO: 874896 - RNA, 19 nt, Artificial Sequence
  Description of Artificial Sequence: Synthetic oligonucleotide
ucuacggaaguauguacag

SEQ ID NO: 874897 - RNA, 19 nt, Artificial Sequence
  Description of Artificial Sequence: Synthetic oligonucleotide
agcuucaucacuugaacca

SEQ ID NO: 874898 - RNA, 19 nt, Artificial Sequence
  Description of Artificial Sequence: Synthetic oligonucleotide
acuugcuaccauuacuagg

SEQ ID NO: 874899 - RNA, 19 nt, Artificial Sequence
  Description of Artificial Sequence: Synthetic oligonucleotide
ucuugcguaaaucccacac

SEQ ID NO: 874900 - RNA, 19 nt, Artificial Sequence
  Description of Artificial Sequence: Synthetic oligonucleotide
ugauuuggcaggaccuucg

SEQ ID NO: 874901 - RNA, 19 nt, Artificial Sequence
  Description of Artificial Sequence: Synthetic oligonucleotide
uucuacggaaguauguaca

SEQ ID NO: 874902 - RNA, 19 nt, Artificial Sequence
  Description of Artificial Sequence: Synthetic oligonucleotide
cacaacaaauauauuuccc

SEQ ID NO: 874903 - RNA, 19 nt, Artificial Sequence
  Description of Artificial Sequence: Synthetic oligonucleotide
ucuuaaagaccacaauuau

SEQ ID NO: 874904 - RNA, 19 nt, Artificial Sequence
  Description of Artificial Sequence: Synthetic oligonucleotide
gaccucuugagaaugaccc

SEQ ID NO: 874905 - RNA, 19 nt, Artificial Sequence
  Description of Artificial Sequence: Synthetic oligonucleotide
ucacucuauuucuagauuc

SEQ ID NO: 874906 - RNA, 19 nt, Artificial Sequence
  Description of Artificial Sequence: Synthetic oligonucleotide
cauaauguugccaucucuc

SEQ ID NO: 874907 - RNA, 19 nt, Artificial Sequence
  Description of Artificial Sequence: Synthetic oligonucleotide
uaaaagguagaguucuggu

SEQ ID NO: 874908 - RNA, 19 nt, Artificial Sequence
  Description of Artificial Sequence: Synthetic oligonucleotide
aauucuugcguaaauccca

SEQ ID NO: 874909 - RNA, 19 nt, Artificial Sequence
  Description of Artificial Sequence: Synthetic oligonucleotide
ucuaagagacaucuugaaa

SEQ ID NO: 874910 - RNA, 19 nt, Artificial Sequence
  Description of Artificial Sequence: Synthetic oligonucleotide
uagauucagagcaagcauc

SEQ ID NO: 874911 - RNA, 19 nt, Artificial Sequence
  Description of Artificial Sequence: Synthetic oligonucleotide
acuuggaugcuauggguuc

SEQ ID NO: 874912 - RNA, 19 nt, Artificial Sequence
  Description of Artificial Sequence: Synthetic oligonucleotide
cauagaaaccuuccaaaug

SEQ ID NO: 874913 - RNA, 19 nt, Artificial Sequence
  Description of Artificial Sequence: Synthetic oligonucleotide
uccugaaccaggaccacag

SEQ ID NO: 874914 - RNA, 19 nt, Artificial Sequence
  Description of Artificial Sequence: Synthetic oligonucleotide
uccaaauguaggcagcuuc

SEQ ID NO: 874915 - RNA, 19 nt, Artificial Sequence
  Description of Artificial Sequence: Synthetic oligonucleotide
uacggaaguauguacagau

SEQ ID NO: 874916 - RNA, 19 nt, Artificial Sequence
  Description of Artificial Sequence: Synthetic oligonucleotide
ugaucugauucacuugucu

SEQ ID NO: 874917 - RNA, 19 nt, Artificial Sequence
  Description of Artificial Sequence: Synthetic oligonucleotide
gaauacccuaguuuucgag

SEQ ID NO: 874918 - RNA, 19 nt, Artificial Sequence
  Description of Artificial Sequence: Synthetic oligonucleotide
augcuauggguucuugucg

SEQ ID NO: 874919 - RNA, 19 nt, Artificial Sequence
  Description of Artificial Sequence: Synthetic oligonucleotide
cuagaccucuauucaagcg

SEQ ID NO: 874920 - RNA, 19 nt, Artificial Sequence
  Description of Artificial Sequence: Synthetic oligonucleotide
gguauucgaaggaagaggg

SEQ ID NO: 874921 - RNA, 19 nt, Artificial Sequence
  Description of Artificial Sequence: Synthetic oligonucleotide
cuauuucuagauucagagc

SEQ ID NO: 874922 - RNA, 19 nt, Artificial Sequence
  Description of Artificial Sequence: Synthetic oligonucleotide
ucggaguccuugcuaaggg

SEQ ID NO: 874923 - RNA, 19 nt, Artificial Sequence
  Description of Artificial Sequence: Synthetic oligonucleotide
ucauaauguugccaucucu

SEQ ID NO: 874924 - RNA, 19 nt, Artificial Sequence
  Description of Artificial Sequence: Synthetic oligonucleotide
uacuaggccagcuuucgcc

SEQ ID NO: 874925 - RNA, 19 nt, Artificial Sequence
  Description of Artificial Sequence: Synthetic oligonucleotide
ugugcaguuggcaaauaaa

SEQ ID NO: 874926 - RNA, 19 nt, Artificial Sequence
  Description of Artificial Sequence: Synthetic oligonucleotide
aguuuucgagugcugguuc

SEQ ID NO: 874927 - RNA, 19 nt, Artificial Sequence
  Description of Artificial Sequence: Synthetic oligonucleotide
ucuagaccucuauucaagc

SEQ ID NO: 874928 - RNA, 19 nt, Artificial Sequence
  Description of Artificial Sequence: Synthetic oligonucleotide
uccucuagaccucuauuca

SEQ ID NO: 874929 - RNA, 19 nt, Artificial Sequence
  Description of Artificial Sequence: Synthetic oligonucleotide
ugugaugacuucuggcuca

SEQ ID NO: 874930 - RNA, 19 nt, Artificial Sequence
  Description of Artificial Sequence: Synthetic oligonucleotide
cacccaguuucuaagagac

SEQ ID NO: 874931 - RNA, 19 nt, Artificial Sequence
  Description of Artificial Sequence: Synthetic oligonucleotide
uucaucacuugaaccacug

SEQ ID NO: 874932 - RNA, 19 nt, Artificial Sequence
  Description of Artificial Sequence: Synthetic oligonucleotide
auugaacauauaaauguug

SEQ ID NO: 874933 - RNA, 19 nt, Artificial Sequence
  Description of Artificial Sequence: Synthetic oligonucleotide
cacacacacacacacacac

SEQ ID NO: 874934 - RNA, 19 nt, Artificial Sequence
  Description of Artificial Sequence: Synthetic oligonucleotide
uauggguucuugucgauaa

SEQ ID NO: 874935 - RNA, 19 nt, Artificial Sequence
  Description of Artificial Sequence: Synthetic oligonucleotide
uuccguuuggcugccaugg

SEQ ID NO: 874936 - RNA, 19 nt, Artificial Sequence
  Description of Artificial Sequence: Synthetic oligonucleotide
agaggaaauggacggacug

SEQ ID NO: 874937 - RNA, 19 nt, Artificial Sequence
  Description of Artificial Sequence: Synthetic oligonucleotide
auacccuaguuuucgagug

SEQ ID NO: 874938 - RNA, 19 nt, Artificial Sequence
  Description of Artificial Sequence: Synthetic oligonucleotide
uaagacuugauuucacaua

SEQ ID NO: 874939 - RNA, 19 nt, Artificial Sequence
  Description of Artificial Sequence: Synthetic oligonucleotide
uggagaagucuuuaagcca

SEQ ID NO: 874940 - RNA, 19 nt, Artificial Sequence
  Description of Artificial Sequence: Synthetic oligonucleotide
ucugguguccauugaagac

SEQ ID NO: 874941 - RNA, 19 nt, Artificial Sequence
  Description of Artificial Sequence: Synthetic oligonucleotide
ugguguccauugaagacag

SEQ ID NO: 874942 - RNA, 19 nt, Artificial Sequence
  Description of Artificial Sequence: Synthetic oligonucleotide
aguaggagggugccagggc

SEQ ID NO: 874943 - RNA, 19 nt, Artificial Sequence
  Description of Artificial Sequence: Synthetic oligonucleotide
auuacuaggccagcuuucg

SEQ ID NO: 874944 - RNA, 19 nt, Artificial Sequence
  Description of Artificial Sequence: Synthetic oligonucleotide
gaguacaagcugcugauga

SEQ ID NO: 874945 - RNA, 19 nt, Artificial Sequence
  Description of Artificial Sequence: Synthetic oligonucleotide
gaagacucuccacuuggcc

SEQ ID NO: 874946 - RNA, 19 nt, Artificial Sequence
  Description of Artificial Sequence: Synthetic oligonucleotide
uuauucacacacacacaca

SEQ ID NO: 874947 - RNA, 19 nt, Artificial Sequence
  Description of Artificial Sequence: Synthetic oligonucleotide
auaagcaguauaauucuug

SEQ ID NO: 874948 - RNA, 19 nt, Artificial Sequence
  Description of Artificial Sequence: Synthetic oligonucleotide
uuucuacggaaguauguac

SEQ ID NO: 874949 - RNA, 19 nt, Artificial Sequence
  Description of Artificial Sequence: Synthetic oligonucleotide
aauugggugucugggauga

SEQ ID NO: 874950 - RNA, 19 nt, Artificial Sequence
  Description of Artificial Sequence: Synthetic oligonucleotide
cucuagaccucuauucaag

SEQ ID NO: 874951 - RNA, 19 nt, Artificial Sequence
  Description of Artificial Sequence: Synthetic oligonucleotide
uuucuagauucagagcaag

SEQ ID NO: 874952 - RNA, 19 nt, Artificial Sequence
  Description of Artificial Sequence: Synthetic oligonucleotide
uucugauuagaaaucuaua

SEQ ID NO: 874953 - RNA, 19 nt, Artificial Sequence
  Description of Artificial Sequence: Synthetic oligonucleotide
agacagcuugaaucuagac

SEQ ID NO: 874954 - RNA, 19 nt, Artificial Sequence
  Description of Artificial Sequence: Synthetic oligonucleotide
uacagaagucgucuugaga

SEQ ID NO: 874955 - RNA, 19 nt, Artificial Sequence
  Description of Artificial Sequence: Synthetic oligonucleotide
ugaaguccgauggacacca

SEQ ID NO: 874956 - RNA, 19 nt, Artificial Sequence
  Description of Artificial Sequence: Synthetic oligonucleotide
ucuucacucuauuucuaga

SEQ ID NO: 874957 - RNA, 19 nt, Artificial Sequence
  Description of Artificial Sequence: Synthetic oligonucleotide
gaaguauguacagaucuuc

SEQ ID NO: 874958 - RNA, 19 nt, Artificial Sequence
  Description of Artificial Sequence: Synthetic oligonucleotide
uugcguaaaucccacacuu

SEQ ID NO: 874959 - RNA, 19 nt, Artificial Sequence
  Description of Artificial Sequence: Synthetic oligonucleotide
aggucgcaaaggaagaggc

SEQ ID NO: 874960 - RNA, 19 nt, Artificial Sequence
  Description of Artificial Sequence: Synthetic oligonucleotide
ugaccucuugagaaugacc

SEQ ID NO: 874961 - RNA, 19 nt, Artificial Sequence
  Description of Artificial Sequence: Synthetic oligonucleotide
uucuaagagacaucuugaa

SEQ ID NO: 874962 - RNA, 19 nt, Artificial Sequence
  Description of Artificial Sequence: Synthetic oligonucleotide
ggaaugagggcuuuucuug

SEQ ID NO: 874963 - RNA, 19 nt, Artificial Sequence
  Description of Artificial Sequence: Synthetic oligonucleotide
cugggaguaacggucaccg

SEQ ID NO: 874964 - RNA, 19 nt, Artificial Sequence
  Description of Artificial Sequence: Synthetic oligonucleotide
gauuuggcaggaccuucgg

SEQ ID NO: 874965 - RNA, 19 nt, Artificial Sequence
  Description of Artificial Sequence: Synthetic oligonucleotide
ggguauaggaaagacuugg

SEQ ID NO: 874966 - RNA, 19 nt, Artificial Sequence
  Description of Artificial Sequence: Synthetic oligonucleotide
guguuaucaucagagcagg

SEQ ID NO: 874967 - RNA, 19 nt, Artificial Sequence
  Description of Artificial Sequence: Synthetic oligonucleotide
uguacagaucuuccucaug

SEQ ID NO: 874968 - RNA, 19 nt, Artificial Sequence
  Description of Artificial Sequence: Synthetic oligonucleotide
auuugacugagaacguggg

SEQ ID NO: 874969 - RNA, 19 nt, Artificial Sequence
  Description of Artificial Sequence: Synthetic oligonucleotide
ugcuauggguucuugucga

SEQ ID NO: 874970 - RNA, 19 nt, Artificial Sequence
  Description of Artificial Sequence: Synthetic oligonucleotide
ugcaacucuucacacacuu

SEQ ID NO: 874971 - RNA, 19 nt, Artificial Sequence
  Description of Artificial Sequence: Synthetic oligonucleotide
gagcagguagcaaucuugg

SEQ ID NO: 874972 - RNA, 19 nt, Artificial Sequence
  Description of Artificial Sequence: Synthetic oligonucleotide
cacuuuucacccaucuuug

SEQ ID NO: 874973 - RNA, 19 nt, Artificial Sequence
  Description of Artificial Sequence: Synthetic oligonucleotide
uucuugucgauaagcagua

SEQ ID NO: 874974 - RNA, 19 nt, Artificial Sequence
  Description of Artificial Sequence: Synthetic oligonucleotide
uucggaguccuugcuaagg

SEQ ID NO: 874975 - RNA, 19 nt, Artificial Sequence
  Description of Artificial Sequence: Synthetic oligonucleotide
agugaagacucuccacuug

SEQ ID NO: 874976 - RNA, 19 nt, Artificial Sequence
  Description of Artificial Sequence: Synthetic oligonucleotide
gacgaggguggcuugggag

SEQ ID NO: 874977 - RNA, 19 nt, Artificial Sequence
  Description of Artificial Sequence: Synthetic oligonucleotide
ugauucacuugucuauaaa

SEQ ID NO: 874978 - RNA, 19 nt, Artificial Sequence
  Description of Artificial Sequence: Synthetic oligonucleotide
uacuugcuaccauuacuag

SEQ ID NO: 874979 - RNA, 19 nt, Artificial Sequence
  Description of Artificial Sequence: Synthetic oligonucleotide
aguaacacucugcugggaa

SEQ ID NO: 874980 - RNA, 19 nt, Artificial Sequence
  Description of Artificial Sequence: Synthetic oligonucleotide
ucgcaaaggaagaggcaag

SEQ ID NO: 874981 - RNA, 19 nt, Artificial Sequence
  Description of Artificial Sequence: Synthetic oligonucleotide
gaagaggcaagguuccaca

SEQ ID NO: 874982 - RNA, 19 nt, Artificial Sequence
  Description of Artificial Sequence: Synthetic oligonucleotide
uauucaagcgccagauuuu

SEQ ID NO: 874983 - RNA, 19 nt, Artificial Sequence
  Description of Artificial Sequence: Synthetic oligonucleotide
aaucuauaauucagucgag

SEQ ID NO: 874984 - RNA, 19 nt, Artificial Sequence
  Description of Artificial Sequence: Synthetic oligonucleotide
agguguucgggucacccag

SEQ ID NO: 874985 - RNA, 19 nt, Artificial Sequence
  Description of Artificial Sequence: Synthetic oligonucleotide
cacacacacacacacaaca

SEQ ID NO: 874986 - RNA, 19 nt, Artificial Sequence
  Description of Artificial Sequence: Synthetic oligonucleotide
agaaguggagccucuucug

SEQ ID NO: 874987 - RNA, 19 nt, Artificial Sequence
  Description of Artificial Sequence: Synthetic oligonucleotide
uggguucuugucgauaagc

SEQ ID NO: 874988 - RNA, 19 nt, Artificial Sequence
  Description of Artificial Sequence: Synthetic oligonucleotide
cuaagggauuccugguugc

SEQ ID NO: 874989 - RNA, 19 nt, Artificial Sequence
  Description of Artificial Sequence: Synthetic oligonucleotide
aggacuacagaagucgucu

SEQ ID NO: 874990 - RNA, 19 nt, Artificial Sequence
  Description of Artificial Sequence: Synthetic oligonucleotide
gaguggauuugacugagaa

SEQ ID NO: 874991 - RNA, 19 nt, Artificial Sequence
  Description of Artificial Sequence: Synthetic oligonucleotide
cacaguugcaacucuucac

SEQ ID NO: 874992 - RNA, 19 nt, Artificial Sequence
  Description of Artificial Sequence: Synthetic oligonucleotide
cuggaauugggugucuggg

SEQ ID NO: 874993 - RNA, 19 nt, Artificial Sequence
  Description of Artificial Sequence: Synthetic oligonucleotide
gaaccaggaccacaguaac

SEQ ID NO: 874994 - RNA, 19 nt, Artificial Sequence
  Description of Artificial Sequence: Synthetic oligonucleotide
auucgaaggaagagggagg

SEQ ID NO: 874995 - RNA, 19 nt, Artificial Sequence
  Description of Artificial Sequence: Synthetic oligonucleotide
ugaaagacgaggguggcuu

SEQ ID NO: 874996 - RNA, 19 nt, Artificial Sequence
  Description of Artificial Sequence: Synthetic oligonucleotide
uaaagucacuuuucaccca

SEQ ID NO: 874997 - RNA, 19 nt, Artificial Sequence
  Description of Artificial Sequence: Synthetic oligonucleotide
aagucgucuugagacuuuc

SEQ ID NO: 874998 - RNA, 19 nt, Artificial Sequence
  Description of Artificial Sequence: Synthetic oligonucleotide
uuaagccagucauauugaa

SEQ ID NO: 874999 - RNA, 19 nt, Artificial Sequence
  Description of Artificial Sequence: Synthetic oligonucleotide
aagcagguggagugacggg

SEQ ID NO: 875000 - RNA, 19 nt, Artificial Sequence
  Description of Artificial Sequence: Synthetic oligonucleotide
gaaauggacggacugcucu

SEQ ID NO: 875001 - RNA, 19 nt, Artificial Sequence
  Description of Artificial Sequence: Synthetic oligonucleotide
ucaggacuacagaagucgu

SEQ ID NO: 875002 - RNA, 19 nt, Artificial Sequence
  Description of Artificial Sequence: Synthetic oligonucleotide
cuuaaagaccacaauuaua

SEQ ID NO: 875003 - RNA, 19 nt, Artificial Sequence
  Description of Artificial Sequence: Synthetic oligonucleotide
cauggagcugggaguaacg

SEQ ID NO: 875004 - RNA, 19 nt, Artificial Sequence
  Description of Artificial Sequence: Synthetic oligonucleotide
uguuaacuuucugauuaga

SEQ ID NO: 875005 - RNA, 19 nt, Artificial Sequence
  Description of Artificial Sequence: Synthetic oligonucleotide
uucacucuauuucuagauu

SEQ ID NO: 875006 - RNA, 19 nt, Artificial Sequence
  Description of Artificial Sequence: Synthetic oligonucleotide
uggaguacaagcugcugau

SEQ ID NO: 875007 - RNA, 19 nt, Artificial Sequence
  Description of Artificial Sequence: Synthetic oligonucleotide
cagacccuucuccacaagg

SEQ ID NO: 875008 - RNA, 19 nt, Artificial Sequence
  Description of Artificial Sequence: Synthetic oligonucleotide
uucaaccuugcuugauuug

SEQ ID NO: 875009 - RNA, 19 nt, Artificial Sequence
  Description of Artificial Sequence: Synthetic oligonucleotide
cuacuugcuaccauuacua

SEQ ID NO: 875010 - RNA, 19 nt, Artificial Sequence
  Description of Artificial Sequence: Synthetic oligonucleotide
ugaauacccuaguuuucga

SEQ ID NO: 875011 - RNA, 19 nt, Artificial Sequence
  Description of Artificial Sequence: Synthetic oligonucleotide
uaaagaccacaauuauaaa

SEQ ID NO: 875012 - RNA, 19 nt, Artificial Sequence
  Description of Artificial Sequence: Synthetic oligonucleotide
cuguuaacuuucugauuag

SEQ ID NO: 875013 - RNA, 19 nt, Artificial Sequence
  Description of Artificial Sequence: Synthetic oligonucleotide
ugugaccucuugagaauga

SEQ ID NO: 875014 - RNA, 19 nt, Artificial Sequence
  Description of Artificial Sequence: Synthetic oligonucleotide
uggaauugggugucuggga

SEQ ID NO: 875015 - RNA, 19 nt, Artificial Sequence
  Description of Artificial Sequence: Synthetic oligonucleotide
gguucuugucgauaagcag

SEQ ID NO: 875016 - RNA, 19 nt, Artificial Sequence
  Description of Artificial Sequence: Synthetic oligonucleotide
uucgaaggaagagggaggu

SEQ ID NO: 875017 - RNA, 19 nt, Artificial Sequence
  Description of Artificial Sequence: Synthetic oligonucleotide
aaauggacggacugcucuu

SEQ ID NO: 875018 - RNA, 19 nt, Artificial Sequence
  Description of Artificial Sequence: Synthetic oligonucleotide
acggacugcucuuggcucg

SEQ ID NO: 875019 - RNA, 19 nt, Artificial Sequence
  Description of Artificial Sequence: Synthetic oligonucleotide
ucaucuggacuaagacuug

SEQ ID NO: 875020 - RNA, 19 nt, Artificial Sequence
  Description of Artificial Sequence: Synthetic oligonucleotide
agacucuccacuuggccgu

SEQ ID NO: 875021 - RNA, 19 nt, Artificial Sequence
  Description of Artificial Sequence: Synthetic oligonucleotide
gaagguguucgggucaccc

SEQ ID NO: 875022 - RNA, 19 nt, Artificial Sequence
  Description of Artificial Sequence: Synthetic oligonucleotide
uggauuugacugagaacgu

SEQ ID NO: 875023 - RNA, 19 nt, Artificial Sequence
  Description of Artificial Sequence: Synthetic oligonucleotide
accaucucagacccuucuc

SEQ ID NO: 875024 - RNA, 19 nt, Artificial Sequence
  Description of Artificial Sequence: Synthetic oligonucleotide
uacaguguugugagcgcca

SEQ ID NO: 875025 - RNA, 19 nt, Artificial Sequence
  Description of Artificial Sequence: Synthetic oligonucleotide
cuugucuacaguguuguga

SEQ ID NO: 875026 - RNA, 19 nt, Artificial Sequence
  Description of Artificial Sequence: Synthetic oligonucleotide
ucacacacacacacacaca

SEQ ID NO: 875027 - RNA, 19 nt, Artificial Sequence
  Description of Artificial Sequence: Synthetic oligonucleotide
uuacuaggccagcuuucgc

SEQ ID NO: 875028 - RNA, 19 nt, Artificial Sequence
  Description of Artificial Sequence: Synthetic oligonucleotide
uacagaucuuccucaugga

SEQ ID NO: 875029 - RNA, 19 nt, Artificial Sequence
  Description of Artificial Sequence: Synthetic oligonucleotide
ucaucacuugaaccacuga

SEQ ID NO: 875030 - RNA, 19 nt, Artificial Sequence
  Description of Artificial Sequence: Synthetic oligonucleotide
uacccuaguuuucgagugc

SEQ ID NO: 875031 - RNA, 19 nt, Artificial Sequence
  Description of Artificial Sequence: Synthetic oligonucleotide
aucugcuugugaugacuuc

SEQ ID NO: 875032 - RNA, 19 nt, Artificial Sequence
  Description of Artificial Sequence: Synthetic oligonucleotide
uccaacccacuauggaaug

SEQ ID NO: 875033 - RNA, 19 nt, Artificial Sequence
  Description of Artificial Sequence: Synthetic oligonucleotide
ucuuauucucuggggagcu

SEQ ID NO: 875034 - RNA, 19 nt, Artificial Sequence
  Description of Artificial Sequence: Synthetic oligonucleotide
agaccaaggugcucucauc

SEQ ID NO: 875035 - RNA, 19 nt, Artificial Sequence
  Description of Artificial Sequence: Synthetic oligonucleotide
cuuuggcaggaguagucug

SEQ ID NO: 875036 - RNA, 19 nt, Artificial Sequence
  Description of Artificial Sequence: Synthetic oligonucleotide
gcguaaaucccacacuuug

SEQ ID NO: 875037 - RNA, 19 nt, Artificial Sequence
  Description of Artificial Sequence: Synthetic oligonucleotide
aggagagcgggucuuggca

SEQ ID NO: 875038 - RNA, 19 nt, Artificial Sequence
  Description of Artificial Sequence: Synthetic oligonucleotide
ggugaaguccgauggacac

SEQ ID NO: 875039 - RNA, 19 nt, Artificial Sequence
  Description of Artificial Sequence: Synthetic oligonucleotide
guuccuggguauaggaaag

SEQ ID NO: 875040 - RNA, 19 nt, Artificial Sequence
  Description of Artificial Sequence: Synthetic oligonucleotide
cgucuugagacuuucuacg

SEQ ID NO: 875041 - RNA, 19 nt, Artificial Sequence
  Description of Artificial Sequence: Synthetic oligonucleotide
uagaaaccuuccaaaugua

SEQ ID NO: 875042 - RNA, 19 nt, Artificial Sequence
  Description of Artificial Sequence: Synthetic oligonucleotide
auggagcugggaguaacgg

SEQ ID NO: 875043 - RNA, 19 nt, Artificial Sequence
  Description of Artificial Sequence: Synthetic oligonucleotide
cacacacacacacacacaa

SEQ ID NO: 875044 - RNA, 19 nt, Artificial Sequence
  Description of Artificial Sequence: Synthetic oligonucleotide
aaccaaacuugaauacccu

SEQ ID NO: 875045 - RNA, 19 nt, Artificial Sequence
  Description of Artificial Sequence: Synthetic oligonucleotide
gagauaaauuuucagccuu

SEQ ID NO: 875046 - RNA, 19 nt, Artificial Sequence
  Description of Artificial Sequence: Synthetic oligonucleotide
agacuuucuacggaaguau

SEQ ID NO: 875047 - RNA, 19 nt, Artificial Sequence
  Description of Artificial Sequence: Synthetic oligonucleotide
acacacacacacaacaaau

SEQ ID NO: 875048 - RNA, 19 nt, Artificial Sequence
  Description of Artificial Sequence: Synthetic oligonucleotide
guaacggucaccgggccug

SEQ ID NO: 875049 - RNA, 19 nt, Artificial Sequence
  Description of Artificial Sequence: Synthetic oligonucleotide
aguccgauggacaccagca

SEQ ID NO: 875050 - RNA, 19 nt, Artificial Sequence
  Description of Artificial Sequence: Synthetic oligonucleotide
acuuucuacggaaguaugu

SEQ ID NO: 875051 - RNA, 19 nt, Artificial Sequence
  Description of Artificial Sequence: Synthetic oligonucleotide
gcgccuucaaccuugcuug

SEQ ID NO: 875052 - RNA, 19 nt, Artificial Sequence
  Description of Artificial Sequence: Synthetic oligonucleotide
uucugccgacaggagagcg

SEQ ID NO: 875053 - RNA, 19 nt, Artificial Sequence
  Description of Artificial Sequence: Synthetic oligonucleotide
gaaagacgaggguggcuug

SEQ ID NO: 875054 - RNA, 19 nt, Artificial Sequence
  Description of Artificial Sequence: Synthetic oligonucleotide
ucagucgaguguucaggac

SEQ ID NO: 875055 - RNA, 19 nt, Artificial Sequence
  Description of Artificial Sequence: Synthetic oligonucleotide
cuugaaagacgaggguggc

SEQ ID NO: 875056 - RNA, 19 nt, Artificial Sequence
  Description of Artificial Sequence: Synthetic oligonucleotide
guagcaaucuuggugaagu

SEQ ID NO: 875057 - RNA, 19 nt, Artificial Sequence
  Description of Artificial Sequence: Synthetic oligonucleotide
uuggcaggaccuucggagu

SEQ ID NO: 875058 - RNA, 19 nt, Artificial Sequence
  Description of Artificial Sequence: Synthetic oligonucleotide
uaacacucugcugggaauc

SEQ ID NO: 875059 - RNA, 19 nt, Artificial Sequence
  Description of Artificial Sequence: Synthetic oligonucleotide
ugcuaagggauuccugguu

SEQ ID NO: 875060 - RNA, 19 nt, Artificial Sequence
  Description of Artificial Sequence: Synthetic oligonucleotide
agacccgaguucuguuaac

SEQ ID NO: 875061 - RNA, 19 nt, Artificial Sequence
  Description of Artificial Sequence: Synthetic oligonucleotide
agguccaacccacuaugga

SEQ ID NO: 875062 - RNA, 19 nt, Artificial Sequence
  Description of Artificial Sequence: Synthetic oligonucleotide
gcuugugaugacuucuggc

SEQ ID NO: 875063 - RNA, 19 nt, Artificial Sequence
  Description of Artificial Sequence: Synthetic oligonucleotide
gagguccaacccacuaugg

SEQ ID NO: 875064 - RNA, 19 nt, Artificial Sequence
  Description of Artificial Sequence: Synthetic oligonucleotide
uggccgucaagcucaguga

SEQ ID NO: 875065 - RNA, 19 nt, Artificial Sequence
  Description of Artificial Sequence: Synthetic oligonucleotide
guaggagggugccagggca

SEQ ID NO: 875066 - RNA, 19 nt, Artificial Sequence
  Description of Artificial Sequence: Synthetic oligonucleotide
aggaguggauuugacugag

SEQ ID NO: 875067 - RNA, 19 nt, Artificial Sequence
  Description of Artificial Sequence: Synthetic oligonucleotide
auaauucagucgaguguuc

SEQ ID NO: 875068 - RNA, 19 nt, Artificial Sequence
  Description of Artificial Sequence: Synthetic oligonucleotide
cugauuagaaaucuauaau

SEQ ID NO: 875069 - RNA, 19 nt, Artificial Sequence
  Description of Artificial Sequence: Synthetic oligonucleotide
cacagauggagcaaguccu

SEQ ID NO: 875070 - RNA, 19 nt, Artificial Sequence
  Description of Artificial Sequence: Synthetic oligonucleotide
gacggacugcucuuggcuc

SEQ ID NO: 875071 - RNA, 19 nt, Artificial Sequence
  Description of Artificial Sequence: Synthetic oligonucleotide
caguugcaacucuucacac

SEQ ID NO: 875072 - RNA, 19 nt, Artificial Sequence
  Description of Artificial Sequence: Synthetic oligonucleotide
aguuauucacacacacaca

SEQ ID NO: 875073 - RNA, 19 nt, Artificial Sequence
  Description of Artificial Sequence: Synthetic oligonucleotide
ccuaguuuucgagugcugg

SEQ ID NO: 875074 - RNA, 19 nt, Artificial Sequence
  Description of Artificial Sequence: Synthetic oligonucleotide
aggaccuucggaguccuug

SEQ ID NO: 875075 - RNA, 19 nt, Artificial Sequence
  Description of Artificial Sequence: Synthetic oligonucleotide
ugggaguaacggucaccgg

SEQ ID NO: 875076 - RNA, 19 nt, Artificial Sequence
  Description of Artificial Sequence: Synthetic oligonucleotide
aguaacggucaccgggccu

SEQ ID NO: 875077 - RNA, 19 nt, Artificial Sequence
  Description of Artificial Sequence: Synthetic oligonucleotide
ucauggagcugggaguaac

SEQ ID NO: 875078 - RNA, 19 nt, Artificial Sequence
  Description of Artificial Sequence: Synthetic oligonucleotide
accucuauucaagcgccag

SEQ ID NO: 875079 - RNA, 19 nt, Artificial Sequence
  Description of Artificial Sequence: Synthetic oligonucleotide
accauuacuaggccagcuu

SEQ ID NO: 875080 - RNA, 19 nt, Artificial Sequence
  Description of Artificial Sequence: Synthetic oligonucleotide
acacacacacacacacaac

SEQ ID NO: 875081 - RNA, 19 nt, Artificial Sequence
  Description of Artificial Sequence: Synthetic oligonucleotide
guauaggaaagacuuggau

SEQ ID NO: 875082 - RNA, 19 nt, Artificial Sequence
  Description of Artificial Sequence: Synthetic oligonucleotide
ugcguaaaucccacacuuu

SEQ ID NO: 875083 - RNA, 19 nt, Artificial Sequence
  Description of Artificial Sequence: Synthetic oligonucleotide
uggacggacugcucuuggc

SEQ ID NO: 875084 - RNA, 19 nt, Artificial Sequence
  Description of Artificial Sequence: Synthetic oligonucleotide
gaguaacggucaccgggcc

SEQ ID NO: 875085 - RNA, 19 nt, Artificial Sequence
  Description of Artificial Sequence: Synthetic oligonucleotide
agcagguggagugacgggu

SEQ ID NO: 875086 - RNA, 19 nt, Artificial Sequence
  Description of Artificial Sequence: Synthetic oligonucleotide
acggaaguauguacagauc

SEQ ID NO: 875087 - RNA, 19 nt, Artificial Sequence
  Description of Artificial Sequence: Synthetic oligonucleotide
acaaggucgcaaaggaaga

SEQ ID NO: 875088 - RNA, 19 nt, Artificial Sequence
  Description of Artificial Sequence: Synthetic oligonucleotide
gcuugggagacacagaagu

SEQ ID NO: 875089 - RNA, 19 nt, Artificial Sequence
  Description of Artificial Sequence: Synthetic oligonucleotide
accucuugagaaugaccca

SEQ ID NO: 875090 - RNA, 19 nt, Artificial Sequence
  Description of Artificial Sequence: Synthetic oligonucleotide
ucgaguguucaggacuaca

SEQ ID NO: 875091 - RNA, 19 nt, Artificial Sequence
  Description of Artificial Sequence: Synthetic oligonucleotide
auguacagaucuuccucau

SEQ ID NO: 875092 - RNA, 19 nt, Artificial Sequence
  Description of Artificial Sequence: Synthetic oligonucleotide
cagcuugaaucuagacgcc

SEQ ID NO: 875093 - RNA, 19 nt, Artificial Sequence
  Description of Artificial Sequence: Synthetic oligonucleotide
gauucagagcaagcaucug

SEQ ID NO: 875094 - RNA, 19 nt, Artificial Sequence
  Description of Artificial Sequence: Synthetic oligonucleotide
caaggucgcaaaggaagag

SEQ ID NO: 875095 - RNA, 19 nt, Artificial Sequence
  Description of Artificial Sequence: Synthetic oligonucleotide
uggccaacaaccaguucuu

SEQ ID NO: 875096 - RNA, 19 nt, Artificial Sequence
  Description of Artificial Sequence: Synthetic oligonucleotide
aucacuugaaccacugauu

SEQ ID NO: 875097 - RNA, 19 nt, Artificial Sequence
  Description of Artificial Sequence: Synthetic oligonucleotide
caguauaauucuugcguaa

SEQ ID NO: 875098 - RNA, 19 nt, Artificial Sequence
  Description of Artificial Sequence: Synthetic oligonucleotide
aagucacuuuucacccauc

SEQ ID NO: 875099 - RNA, 19 nt, Artificial Sequence
  Description of Artificial Sequence: Synthetic oligonucleotide
uaguuuucgagugcugguu

SEQ ID NO: 875100 - RNA, 19 nt, Artificial Sequence
  Description of Artificial Sequence: Synthetic oligonucleotide
caggacuacagaagucguc

SEQ ID NO: 875101 - RNA, 19 nt, Artificial Sequence
  Description of Artificial Sequence: Synthetic oligonucleotide
ggagagcgggucuuggcag

SEQ ID NO: 875102 - RNA, 19 nt, Artificial Sequence
  Description of Artificial Sequence: Synthetic oligonucleotide
uaccauuacuaggccagcu

SEQ ID NO: 875103 - RNA, 19 nt, Artificial Sequence
  Description of Artificial Sequence: Synthetic oligonucleotide
gugagcgccacugaucuga

SEQ ID NO: 875104 - RNA, 19 nt, Artificial Sequence
  Description of Artificial Sequence: Synthetic oligonucleotide
uuucgagugcugguuccug

SEQ ID NO: 875105 - RNA, 19 nt, Artificial Sequence
  Description of Artificial Sequence: Synthetic oligonucleotide
gugacggguggcgaugagg

SEQ ID NO: 875106 - RNA, 19 nt, Artificial Sequence
  Description of Artificial Sequence: Synthetic oligonucleotide
cuggucaucuggacuaaga

SEQ ID NO: 875107 - RNA, 19 nt, Artificial Sequence
  Description of Artificial Sequence: Synthetic oligonucleotide
uucuugcguaaaucccaca

SEQ ID NO: 875108 - RNA, 19 nt, Artificial Sequence
  Description of Artificial Sequence: Synthetic oligonucleotide
gucgucuugagacuuucua

SEQ ID NO: 875109 - RNA, 19 nt, Artificial Sequence
  Description of Artificial Sequence: Synthetic oligonucleotide
cacacacacacacaacaaa

SEQ ID NO: 875110 - RNA, 19 nt, Artificial Sequence
  Description of Artificial Sequence: Synthetic oligonucleotide
gguccaacccacuauggaa

SEQ ID NO: 875111 - RNA, 19 nt, Artificial Sequence
  Description of Artificial Sequence: Synthetic oligonucleotide
cuuucuacggaaguaugua

SEQ ID NO: 875112 - RNA, 19 nt, Artificial Sequence
  Description of Artificial Sequence: Synthetic oligonucleotide
agcagguagcaaucuuggu

SEQ ID NO: 875113 - RNA, 19 nt, Artificial Sequence
  Description of Artificial Sequence: Synthetic oligonucleotide
ggaguaacggucaccgggc

SEQ ID NO: 875114 - RNA, 19 nt, Artificial Sequence
  Description of Artificial Sequence: Synthetic oligonucleotide
uggcaggaccuucggaguc

SEQ ID NO: 875115 - RNA, 19 nt, Artificial Sequence
  Description of Artificial Sequence: Synthetic oligonucleotide
cacacacacacaacaaaua

SEQ ID NO: 875116 - RNA, 19 nt, Artificial Sequence
  Description of Artificial Sequence: Synthetic oligonucleotide
uccguuuggcugccauggc

SEQ ID NO: 875117 - RNA, 19 nt, Artificial Sequence
  Description of Artificial Sequence: Synthetic oligonucleotide
agcuugaaucuagacgccu

SEQ ID NO: 875118 - RNA, 19 nt, Artificial Sequence
  Description of Artificial Sequence: Synthetic oligonucleotide
cugguuccuggguauagga

SEQ ID NO: 875119 - RNA, 19 nt, Artificial Sequence
  Description of Artificial Sequence: Synthetic oligonucleotide
ggagauaaauuuucagccu

SEQ ID NO: 875120 - RNA, 19 nt, Artificial Sequence
  Description of Artificial Sequence: Synthetic oligonucleotide
caucacuugaaccacugau

SEQ ID NO: 875121 - RNA, 19 nt, Artificial Sequence
  Description of Artificial Sequence: Synthetic oligonucleotide
cuucggaguccuugcuaag

SEQ ID NO: 875122 - RNA, 19 nt, Artificial Sequence
  Description of Artificial Sequence: Synthetic oligonucleotide
auggacaccagcacacaga

SEQ ID NO: 875123 - RNA, 19 nt, Artificial Sequence
  Description of Artificial Sequence: Synthetic oligonucleotide
cuagauucagagcaagcau

SEQ ID NO: 875124 - RNA, 19 nt, Artificial Sequence
  Description of Artificial Sequence: Synthetic oligonucleotide
ccgaguucuguuaacuuuc

SEQ ID NO: 875125 - RNA, 19 nt, Artificial Sequence
  Description of Artificial Sequence: Synthetic oligonucleotide
gcaggaguagucuggcuac

SEQ ID NO: 875126 - RNA, 19 nt, Artificial Sequence
  Description of Artificial Sequence: Synthetic oligonucleotide
ggauuugacugagaacgug

SEQ ID NO: 875127 - RNA, 19 nt, Artificial Sequence
  Description of Artificial Sequence: Synthetic oligonucleotide
ccuggugacgucuuuccac

SEQ ID NO: 875128 - RNA, 19 nt, Artificial Sequence
  Description of Artificial Sequence: Synthetic oligonucleotide
uccuugcuaagggauuccu

SEQ ID NO: 875129 - RNA, 19 nt, Artificial Sequence
  Description of Artificial Sequence: Synthetic oligonucleotide
acccuaguuuucgagugcu

SEQ ID NO: 875130 - RNA, 19 nt, Artificial Sequence
  Description of Artificial Sequence: Synthetic oligonucleotide
cagaugugaccucuugaga

SEQ ID NO: 875131 - RNA, 19 nt, Artificial Sequence
  Description of Artificial Sequence: Synthetic oligonucleotide
ggagaggaaauggacggac

SEQ ID NO: 875132 - RNA, 19 nt, Artificial Sequence
  Description of Artificial Sequence: Synthetic oligonucleotide
auucacacacacacacaca

SEQ ID NO: 875133 - RNA, 19 nt, Artificial Sequence
  Description of Artificial Sequence: Synthetic oligonucleotide
caggaguggauuugacuga

SEQ ID NO: 875134 - RNA, 19 nt, Artificial Sequence
  Description of Artificial Sequence: Synthetic oligonucleotide
uggagugacggguggcgau

SEQ ID NO: 875135 - RNA, 19 nt, Artificial Sequence
  Description of Artificial Sequence: Synthetic oligonucleotide
cuuggugaaguccgaugga

SEQ ID NO: 875136 - RNA, 19 nt, Artificial Sequence
  Description of Artificial Sequence: Synthetic oligonucleotide
gugaaguccgauggacacc

SEQ ID NO: 875137 - RNA, 19 nt, Artificial Sequence
  Description of Artificial Sequence: Synthetic oligonucleotide
gcaguauaauucuugcgua

SEQ ID NO: 875138 - RNA, 19 nt, Artificial Sequence
  Description of Artificial Sequence: Synthetic oligonucleotide
acauaaggacugacaggag

SEQ ID NO: 875139 - RNA, 19 nt, Artificial Sequence
  Description of Artificial Sequence: Synthetic oligonucleotide
ccaagugaagacucuccac

SEQ ID NO: 875140 - RNA, 19 nt, Artificial Sequence
  Description of Artificial Sequence: Synthetic oligonucleotide
uaggagggugccagggcau

SEQ ID NO: 875141 - RNA, 19 nt, Artificial Sequence
  Description of Artificial Sequence: Synthetic oligonucleotide
ugagaccaaggugcucuca

SEQ ID NO: 875142 - RNA, 19 nt, Artificial Sequence
  Description of Artificial Sequence: Synthetic oligonucleotide
ggaccuucggaguccuugc

SEQ ID NO: 875143 - RNA, 19 nt, Artificial Sequence
  Description of Artificial Sequence: Synthetic oligonucleotide
cuugaaucuagacgccucu

SEQ ID NO: 875144 - RNA, 19 nt, Artificial Sequence
  Description of Artificial Sequence: Synthetic oligonucleotide
cuaguuuucgagugcuggu

SEQ ID NO: 875145 - RNA, 19 nt, Artificial Sequence
  Description of Artificial Sequence: Synthetic oligonucleotide
acacacacacacacaacaa

SEQ ID NO: 875146 - RNA, 19 nt, Artificial Sequence
  Description of Artificial Sequence: Synthetic oligonucleotide
ugugagcgccacugaucug

SEQ ID NO: 875147 - RNA, 19 nt, Artificial Sequence
  Description of Artificial Sequence: Synthetic oligonucleotide
cuugcguaaaucccacacu

SEQ ID NO: 875148 - RNA, 19 nt, Artificial Sequence
  Description of Artificial Sequence: Synthetic oligonucleotide
agggugccagggcauagaa

SEQ ID NO: 875149 - RNA, 19 nt, Artificial Sequence
  Description of Artificial Sequence: Synthetic oligonucleotide
acggucaccgggccuggug

SEQ ID NO: 875150 - RNA, 19 nt, Artificial Sequence
  Description of Artificial Sequence: Synthetic oligonucleotide
agugacggguggcgaugag

SEQ ID NO: 875151 - RNA, 19 nt, Artificial Sequence
  Description of Artificial Sequence: Synthetic oligonucleotide
cagucgaguguucaggacu

SEQ ID NO: 875152 - RNA, 19 nt, Artificial Sequence
  Description of Artificial Sequence: Synthetic oligonucleotide
gcuacuugcuaccauuacu

SEQ ID NO: 875153 - RNA, 19 nt, Artificial Sequence
  Description of Artificial Sequence: Synthetic oligonucleotide
gagagguccaacccacuau

SEQ ID NO: 875154 - RNA, 19 nt, Artificial Sequence
  Description of Artificial Sequence: Synthetic oligonucleotide
gugaccucuugagaaugac

SEQ ID NO: 875155 - RNA, 19 nt, Artificial Sequence
  Description of Artificial Sequence: Synthetic oligonucleotide
uguucgggucacccaguuu

SEQ ID NO: 875156 - RNA, 19 nt, Artificial Sequence
  Description of Artificial Sequence: Synthetic oligonucleotide
gagaccaaggugcucucau

SEQ ID NO: 875157 - RNA, 19 nt, Artificial Sequence
  Description of Artificial Sequence: Synthetic oligonucleotide
guaccagcgccuucaaccu

SEQ ID NO: 875158 - RNA, 19 nt, Artificial Sequence
  Description of Artificial Sequence: Synthetic oligonucleotide
agacgaggguggcuuggga

SEQ ID NO: 875159 - RNA, 19 nt, Artificial Sequence
  Description of Artificial Sequence: Synthetic oligonucleotide
agucgaguguucaggacua

SEQ ID NO: 875160 - RNA, 19 nt, Artificial Sequence
  Description of Artificial Sequence: Synthetic oligonucleotide
gguauaggaaagacuugga

SEQ ID NO: 875161 - RNA, 19 nt, Artificial Sequence
  Description of Artificial Sequence: Synthetic oligonucleotide
uaacggucaccgggccugg

SEQ ID NO: 875162 - RNA, 19 nt, Artificial Sequence
  Description of Artificial Sequence: Synthetic oligonucleotide
gggaauccacagauggagc

SEQ ID NO: 875163 - RNA, 19 nt, Artificial Sequence
  Description of Artificial Sequence: Synthetic oligonucleotide
cacuugaaccacugauuaa

SEQ ID NO: 875164 - RNA, 19 nt, Artificial Sequence
  Description of Artificial Sequence: Synthetic oligonucleotide
ugagcgccacugaucugau

SEQ ID NO: 875165 - RNA, 19 nt, Artificial Sequence
  Description of Artificial Sequence: Synthetic oligonucleotide
acacacacacacacacaca

SEQ ID NO: 875166 - RNA, 19 nt, Artificial Sequence
  Description of Artificial Sequence: Synthetic oligonucleotide
agguagcaaucuuggugaa

SEQ ID NO: 875167 - RNA, 19 nt, Artificial Sequence
  Description of Artificial Sequence: Synthetic oligonucleotide
aggagcacaguaggagggu

SEQ ID NO: 875168 - RNA, 19 nt, Artificial Sequence
  Description of Artificial Sequence: Synthetic oligonucleotide
ggccgucaagcucagugac

SEQ ID NO: 875169 - RNA, 19 nt, Artificial Sequence
  Description of Artificial Sequence: Synthetic oligonucleotide
gacuucguggagauaaauu

SEQ ID NO: 875170 - RNA, 19 nt, Artificial Sequence
  Description of Artificial Sequence: Synthetic oligonucleotide
caucuggacuaagacuuga

SEQ ID NO: 875171 - RNA, 19 nt, Artificial Sequence
  Description of Artificial Sequence: Synthetic oligonucleotide
ggcuacuugcuaccauuac

SEQ ID NO: 875172 - RNA, 19 nt, Artificial Sequence
  Description of Artificial Sequence: Synthetic oligonucleotide
cuacggaaguauguacaga

SEQ ID NO: 875173 - RNA, 19 nt, Artificial Sequence
  Description of Artificial Sequence: Synthetic oligonucleotide
gcuccugcugagaccaagg

SEQ ID NO: 875174 - RNA, 19 nt, Artificial Sequence
  Description of Artificial Sequence: Synthetic oligonucleotide
guaacacucugcugggaau

SEQ ID NO: 875175 - RNA, 19 nt, Artificial Sequence
  Description of Artificial Sequence: Synthetic oligonucleotide
cuggaaaggcagcacagau

SEQ ID NO: 875176 - RNA, 19 nt, Artificial Sequence
  Description of Artificial Sequence: Synthetic oligonucleotide
uuccaaauguaggcagcuu

SEQ ID NO: 875177 - RNA, 19 nt, Artificial Sequence
  Description of Artificial Sequence: Synthetic oligonucleotide
cuagacgccucuucacucu

SEQ ID NO: 875178 - RNA, 19 nt, Artificial Sequence
  Description of Artificial Sequence: Synthetic oligonucleotide
uggugacgucuuuccacuc

SEQ ID NO: 875179 - RNA, 19 nt, Artificial Sequence
  Description of Artificial Sequence: Synthetic oligonucleotide
gaugccuguaccagcgccu

SEQ ID NO: 875180 - RNA, 19 nt, Artificial Sequence
  Description of Artificial Sequence: Synthetic oligonucleotide
cugagaccaaggugcucuc

SEQ ID NO: 875181 - RNA, 19 nt, Artificial Sequence
  Description of Artificial Sequence: Synthetic oligonucleotide
cuguaccagcgccuucaac

SEQ ID NO: 875182 - RNA, 19 nt, Artificial Sequence
  Description of Artificial Sequence: Synthetic oligonucleotide
cacucugucuccuggaauu

SEQ ID NO: 875183 - RNA, 19 nt, Artificial Sequence
  Description of Artificial Sequence: Synthetic oligonucleotide
uccagacagcuugaaucua

SEQ ID NO: 875184 - RNA, 19 nt, Artificial Sequence
  Description of Artificial Sequence: Synthetic oligonucleotide
ucuugucgauaagcaguau

SEQ ID NO: 875185 - RNA, 19 nt, Artificial Sequence
  Description of Artificial Sequence: Synthetic oligonucleotide
gcuauucucuuugcccacc

SEQ ID NO: 875186 - RNA, 19 nt, Artificial Sequence
  Description of Artificial Sequence: Synthetic oligonucleotide
gagaggaaauggacggacu

SEQ ID NO: 875187 - RNA, 19 nt, Artificial Sequence
  Description of Artificial Sequence: Synthetic oligonucleotide
gcuuuucuuggagaugaga

SEQ ID NO: 875188 - RNA, 19 nt, Artificial Sequence
  Description of Artificial Sequence: Synthetic oligonucleotide
ggaguacaagcugcugaug

SEQ ID NO: 875189 - RNA, 19 nt, Artificial Sequence
  Description of Artificial Sequence: Synthetic oligonucleotide
cauccugaaccaggaccac

SEQ ID NO: 875190 - RNA, 19 nt, Artificial Sequence
  Description of Artificial Sequence: Synthetic oligonucleotide
gagugacggguggcgauga

SEQ ID NO: 875191 - RNA, 19 nt, Artificial Sequence
  Description of Artificial Sequence: Synthetic oligonucleotide
guccaacccacuauggaau

SEQ ID NO: 875192 - RNA, 19 nt, Artificial Sequence
  Description of Artificial Sequence: Synthetic oligonucleotide
gaaguccgauggacaccag

SEQ ID NO: 875193 - RNA, 19 nt, Artificial Sequence
  Description of Artificial Sequence: Synthetic oligonucleotide
ccuucggaguccuugcuaa

SEQ ID NO: 875194 - RNA, 19 nt, Artificial Sequence
  Description of Artificial Sequence: Synthetic oligonucleotide
agagcgggucuuggcagga

SEQ ID NO: 875195 - RNA, 19 nt, Artificial Sequence
  Description of Artificial Sequence: Synthetic oligonucleotide
cgauaagcaguauaauucu

SEQ ID NO: 875196 - RNA, 19 nt, Artificial Sequence
  Description of Artificial Sequence: Synthetic oligonucleotide
ggugacgucuuuccacucu

SEQ ID NO: 875197 - RNA, 19 nt, Artificial Sequence
  Description of Artificial Sequence: Synthetic oligonucleotide
aggaguagucuggcuacuu

SEQ ID NO: 875198 - RNA, 19 nt, Artificial Sequence
  Description of Artificial Sequence: Synthetic oligonucleotide
acccaucuuugcagacccg

SEQ ID NO: 875199 - RNA, 19 nt, Artificial Sequence
  Description of Artificial Sequence: Synthetic oligonucleotide
gaccucuauucaagcgcca

SEQ ID NO: 875200 - RNA, 19 nt, Artificial Sequence
  Description of Artificial Sequence: Synthetic oligonucleotide
ggacggacugcucuuggcu

SEQ ID NO: 875201 - RNA, 19 nt, Artificial Sequence
  Description of Artificial Sequence: Synthetic oligonucleotide
cuauggguucuugucgaua

SEQ ID NO: 875202 - RNA, 19 nt, Artificial Sequence
  Description of Artificial Sequence: Synthetic oligonucleotide
ugcugagaccaaggugcuc

SEQ ID NO: 875203 - RNA, 19 nt, Artificial Sequence
  Description of Artificial Sequence: Synthetic oligonucleotide
ccagaucauaauguugcca

SEQ ID NO: 875204 - RNA, 19 nt, Artificial Sequence
  Description of Artificial Sequence: Synthetic oligonucleotide
gacggguggcgaugaggaa

SEQ ID NO: 875205 - RNA, 19 nt, Artificial Sequence
  Description of Artificial Sequence: Synthetic oligonucleotide
ccucuagaccucuauucaa

SEQ ID NO: 875206 - RNA, 19 nt, Artificial Sequence
  Description of Artificial Sequence: Synthetic oligonucleotide
ggaaauggacggacugcuc

SEQ ID NO: 875207 - RNA, 19 nt, Artificial Sequence
  Description of Artificial Sequence: Synthetic oligonucleotide
gccuguaccagcgccuuca

SEQ ID NO: 875208 - RNA, 19 nt, Artificial Sequence
  Description of Artificial Sequence: Synthetic oligonucleotide
ccaacaaccaguucuuauu

SEQ ID NO: 875209 - RNA, 19 nt, Artificial Sequence
  Description of Artificial Sequence: Synthetic oligonucleotide
gucuggcuacuugcuacca

SEQ ID NO: 875210 - RNA, 19 nt, Artificial Sequence
  Description of Artificial Sequence: Synthetic oligonucleotide
gagaagucuuuaagccagu

SEQ ID NO: 875211 - RNA, 19 nt, Artificial Sequence
  Description of Artificial Sequence: Synthetic oligonucleotide
ggucgcaaaggaagaggca

SEQ ID NO: 875212 - RNA, 19 nt, Artificial Sequence
  Description of Artificial Sequence: Synthetic oligonucleotide
ggaguccuugcuaagggau

SEQ ID NO: 875213 - RNA, 19 nt, Artificial Sequence
  Description of Artificial Sequence: Synthetic oligonucleotide
ggcgaugaggaagguguuc

SEQ ID NO: 875214 - RNA, 19 nt, Artificial Sequence
  Description of Artificial Sequence: Synthetic oligonucleotide
gccaacaaccaguucuuau

SEQ ID NO: 875215 - RNA, 19 nt, Artificial Sequence
  Description of Artificial Sequence: Synthetic oligonucleotide
ccuggguauaggaaagacu

SEQ ID NO: 875216 - RNA, 19 nt, Artificial Sequence
  Description of Artificial Sequence: Synthetic oligonucleotide
gucgaguguucaggacuac

SEQ ID NO: 875217 - RNA, 19 nt, Artificial Sequence
  Description of Artificial Sequence: Synthetic oligonucleotide
gcgggucuuggcaggagug

SEQ ID NO: 875218 - RNA, 19 nt, Artificial Sequence
  Description of Artificial Sequence: Synthetic oligonucleotide
gcgccacugaucugauuca

SEQ ID NO: 875219 - RNA, 19 nt, Artificial Sequence
  Description of Artificial Sequence: Synthetic oligonucleotide
cccuaguuuucgagugcug

SEQ ID NO: 875220 - RNA, 19 nt, Artificial Sequence
  Description of Artificial Sequence: Synthetic oligonucleotide
ggaaguauguacagaucuu

SEQ ID NO: 875221 - RNA, 19 nt, Artificial Sequence
  Description of Artificial Sequence: Synthetic oligonucleotide
gccgacaggagagcggguc

SEQ ID NO: 875222 - RNA, 19 nt, Artificial Sequence
  Description of Artificial Sequence: Synthetic oligonucleotide
cucuccacuuggccgucaa

SEQ ID NO: 875223 - RNA, 19 nt, Artificial Sequence
  Description of Artificial Sequence: Synthetic oligonucleotide
cuuauucucuggggagcua

SEQ ID NO: 875224 - RNA, 19 nt, Artificial Sequence
  Description of Artificial Sequence: Synthetic oligonucleotide
gccuggugacgucuuucca

SEQ ID NO: 875225 - RNA, 19 nt, Artificial Sequence
  Description of Artificial Sequence: Synthetic oligonucleotide
ggaagguguucgggucacc

SEQ ID NO: 875226 - RNA, 19 nt, Artificial Sequence
  Description of Artificial Sequence: Synthetic oligonucleotide
gcacacagaugugaccucu

SEQ ID NO: 875227 - RNA, 19 nt, Artificial Sequence
  Description of Artificial Sequence: Synthetic oligonucleotide
guguucgggucacccaguu

SEQ ID NO: 875228 - RNA, 19 nt, Artificial Sequence
  Description of Artificial Sequence: Synthetic oligonucleotide
gccgucaagcucagugaca

SEQ ID NO: 875229 - RNA, 19 nt, Artificial Sequence
  Description of Artificial Sequence: Synthetic oligonucleotide
cucauggagcugggaguaa

SEQ ID NO: 875230 - RNA, 19 nt, Artificial Sequence
  Description of Artificial Sequence: Synthetic oligonucleotide
gggccuggugacgucuuuc

SEQ ID NO: 875231 - RNA, 19 nt, Artificial Sequence
  Description of Artificial Sequence: Synthetic oligonucleotide
ccucauggagcugggagua

SEQ ID NO: 875232 - RNA, 19 nt, Artificial Sequence
  Description of Artificial Sequence: Synthetic oligonucleotide
ggacuacagaagucgucuu

SEQ ID NO: 875233 - RNA, 19 nt, Artificial Sequence
  Description of Artificial Sequence: Synthetic oligonucleotide
gggugccagggcauagaaa

SEQ ID NO: 875234 - RNA, 19 nt, Artificial Sequence
  Description of Artificial Sequence: Synthetic oligonucleotide
gguguucgggucacccagu

SEQ ID NO: 875235 - RNA, 19 nt, Artificial Sequence
  Description of Artificial Sequence: Synthetic oligonucleotide
ccauggccaacaaccaguu

SEQ ID NO: 875236 - RNA, 19 nt, Artificial Sequence
  Description of Artificial Sequence: Synthetic oligonucleotide
ggccaacaaccaguucuua

SEQ ID NO: 875237 - RNA, 19 nt, Artificial Sequence
  Description of Artificial Sequence: Synthetic oligonucleotide
cacagaaguggagccucuu

SEQ ID NO: 875238 - RNA, 19 nt, Artificial Sequence
  Description of Artificial Sequence: Synthetic oligonucleotide
ccaacccacuauggaaugu

SEQ ID NO: 875239 - RNA, 19 nt, Artificial Sequence
  Description of Artificial Sequence: Synthetic oligonucleotide
cuccuggaauugggugucu

SEQ ID NO: 875240 - RNA, 19 nt, Artificial Sequence
  Description of Artificial Sequence: Synthetic oligonucleotide
gccuucaaccuugcuugau

SEQ ID NO: 875241 - RNA, 19 nt, Artificial Sequence
  Description of Artificial Sequence: Synthetic oligonucleotide
cgccuucaaccuugcuuga

SEQ ID NO: 875242 - RNA, 19 nt, Artificial Sequence
  Description of Artificial Sequence: Synthetic oligonucleotide
cuuggccgucaagcucagu

SEQ ID NO: 875243 - RNA, 19 nt, Artificial Sequence
  Description of Artificial Sequence: Synthetic oligonucleotide
caggaccuucggaguccuu

SEQ ID NO: 875244 - RNA, 19 nt, Artificial Sequence
  Description of Artificial Sequence: Synthetic oligonucleotide
agauuaauuaauuuucugg

SEQ ID NO: 875245 - RNA, 19 nt, Artificial Sequence
  Description of Artificial Sequence: Synthetic oligonucleotide
uuuauuauccaccagugug

SEQ ID NO: 875246 - RNA, 19 nt, Artificial Sequence
  Description of Artificial Sequence: Synthetic oligonucleotide
aguggaguggcccagagcc

SEQ ID NO: 875247 - RNA, 19 nt, Artificial Sequence
  Description of Artificial Sequence: Synthetic oligonucleotide
aacacacacacacacacac

SEQ ID NO: 875248 - RNA, 19 nt, Artificial Sequence
  Description of Artificial Sequence: Synthetic oligonucleotide
acagucaaaacucaaagag

SEQ ID NO: 875249 - RNA, 19 nt, Artificial Sequence
  Description of Artificial Sequence: Synthetic oligonucleotide
aauaauagggcuuccccuc

SEQ ID NO: 875250 - RNA, 19 nt, Artificial Sequence
  Description of Artificial Sequence: Synthetic oligonucleotide
aaacauguaggugugaggg

SEQ ID NO: 875251 - RNA, 19 nt, Artificial Sequence
  Description of Artificial Sequence: Synthetic oligonucleotide
aauuacaucagccuauaga

SEQ ID NO: 875252 - RNA, 19 nt, Artificial Sequence
  Description of Artificial Sequence: Synthetic oligonucleotide
gaugcacccaauuugacag

SEQ ID NO: 875253 - RNA, 19 nt, Artificial Sequence
  Description of Artificial Sequence: Synthetic oligonucleotide
ucucuauacgguuugaaag

SEQ ID NO: 875254 - RNA, 19 nt, Artificial Sequence
  Description of Artificial Sequence: Synthetic oligonucleotide
auggaugugagcccaaugc

SEQ ID NO: 875255 - RNA, 19 nt, Artificial Sequence
  Description of Artificial Sequence: Synthetic oligonucleotide
auuacaucagccuauagau

SEQ ID NO: 875256 - RNA, 19 nt, Artificial Sequence
  Description of Artificial Sequence: Synthetic oligonucleotide
uuauccucaggacauacag

SEQ ID NO: 875257 - RNA, 19 nt, Artificial Sequence
  Description of Artificial Sequence: Synthetic oligonucleotide
aaccuaaagucaucugugc

SEQ ID NO: 875258 - RNA, 19 nt, Artificial Sequence
  Description of Artificial Sequence: Synthetic oligonucleotide
acgguuugaaagcucaacc

SEQ ID NO: 875259 - RNA, 19 nt, Artificial Sequence
  Description of Artificial Sequence: Synthetic oligonucleotide
cagagaaugagccaagucc

SEQ ID NO: 875260 - RNA, 19 nt, Artificial Sequence
  Description of Artificial Sequence: Synthetic oligonucleotide
ugcuucaacacacacacac

SEQ ID NO: 875261 - RNA, 19 nt, Artificial Sequence
  Description of Artificial Sequence: Synthetic oligonucleotide
ucaacacacacacacacac

SEQ ID NO: 875262 - RNA, 19 nt, Artificial Sequence
  Description of Artificial Sequence: Synthetic oligonucleotide
aagagcgccaccucugccc

SEQ ID NO: 875263 - RNA, 19 nt, Artificial Sequence
  Description of Artificial Sequence: Synthetic oligonucleotide
ucuggacccagcaugacag

SEQ ID NO: 875264 - RNA, 19 nt, Artificial Sequence
  Description of Artificial Sequence: Synthetic oligonucleotide
agucaaaacucaaagagag

SEQ ID NO: 875265 - RNA, 19 nt, Artificial Sequence
  Description of Artificial Sequence: Synthetic oligonucleotide
uauacgguuugaaagcuca

SEQ ID NO: 875266 - RNA, 19 nt, Artificial Sequence
  Description of Artificial Sequence: Synthetic oligonucleotide
cacacauacacacacacac

SEQ ID NO: 875267 - RNA, 19 nt, Artificial Sequence
  Description of Artificial Sequence: Synthetic oligonucleotide
ugggucuacacccauagga

SEQ ID NO: 875268 - RNA, 19 nt, Artificial Sequence
  Description of Artificial Sequence: Synthetic oligonucleotide
guuaguguaggcuuggcac

SEQ ID NO: 875269 - RNA, 19 nt, Artificial Sequence
  Description of Artificial Sequence: Synthetic oligonucleotide
agagugacuaugugugugc

SEQ ID NO: 875270 - RNA, 19 nt, Artificial Sequence
  Description of Artificial Sequence: Synthetic oligonucleotide
ugugaugcacccaauuuga

SEQ ID NO: 875271 - RNA, 19 nt, Artificial Sequence
  Description of Artificial Sequence: Synthetic oligonucleotide
ucuguaugaaaagaccuag

SEQ ID NO: 875272 - RNA, 19 nt, Artificial Sequence
  Description of Artificial Sequence: Synthetic oligonucleotide
cucuauacgguuugaaagc

SEQ ID NO: 875273 - RNA, 19 nt, Artificial Sequence
  Description of Artificial Sequence: Synthetic oligonucleotide
aaaaccucgagagugcaug

SEQ ID NO: 875274 - RNA, 19 nt, Artificial Sequence
  Description of Artificial Sequence: Synthetic oligonucleotide
uucaguguaaaguuuaauu

SEQ ID NO: 875275 - RNA, 19 nt, Artificial Sequence
  Description of Artificial Sequence: Synthetic oligonucleotide
auaggaauuacaucagccu

SEQ ID NO: 875276 - RNA, 19 nt, Artificial Sequence
  Description of Artificial Sequence: Synthetic oligonucleotide
aauugcuuucucucuaagu

SEQ ID NO: 875277 - RNA, 19 nt, Artificial Sequence
  Description of Artificial Sequence: Synthetic oligonucleotide
aauuugacagagaucuguc

SEQ ID NO: 875278 - RNA, 19 nt, Artificial Sequence
  Description of Artificial Sequence: Synthetic oligonucleotide
aagggaaguguccccauag

SEQ ID NO: 875279 - RNA, 19 nt, Artificial Sequence
  Description of Artificial Sequence: Synthetic oligonucleotide
uuugcaacaagcagaugcu

SEQ ID NO: 875280 - RNA, 19 nt, Artificial Sequence
  Description of Artificial Sequence: Synthetic oligonucleotide
cauccaucuguguacaggg

SEQ ID NO: 875281 - RNA, 19 nt, Artificial Sequence
  Description of Artificial Sequence: Synthetic oligonucleotide
ccaccaauacuaaagaugg

SEQ ID NO: 875282 - RNA, 19 nt, Artificial Sequence
  Description of Artificial Sequence: Synthetic oligonucleotide
auaauagggcuuccccucc

SEQ ID NO: 875283 - RNA, 19 nt, Artificial Sequence
  Description of Artificial Sequence: Synthetic oligonucleotide
ucaucugugccugacaccc

SEQ ID NO: 875284 - RNA, 19 nt, Artificial Sequence
  Description of Artificial Sequence: Synthetic oligonucleotide
aggacauacagucuuccag

SEQ ID NO: 875285 - RNA, 19 nt, Artificial Sequence
  Description of Artificial Sequence: Synthetic oligonucleotide
uccgccaucacgcauacuc

SEQ ID NO: 875286 - RNA, 19 nt, Artificial Sequence
  Description of Artificial Sequence: Synthetic oligonucleotide
cauacacacacacacacuc

SEQ ID NO: 875287 - RNA, 19 nt, Artificial Sequence
  Description of Artificial Sequence: Synthetic oligonucleotide
ucuaagucugugcaugugu

SEQ ID NO: 875288 - RNA, 19 nt, Artificial Sequence
  Description of Artificial Sequence: Synthetic oligonucleotide
ucauaguugccuaguaaca

SEQ ID NO: 875289 - RNA, 19 nt, Artificial Sequence
  Description of Artificial Sequence: Synthetic oligonucleotide
cacacacacacacacaccc

SEQ ID NO: 875290 - RNA, 19 nt, Artificial Sequence
  Description of Artificial Sequence: Synthetic oligonucleotide
ggaaacuucagucagggca

SEQ ID NO: 875291 - RNA, 19 nt, Artificial Sequence
  Description of Artificial Sequence: Synthetic oligonucleotide
acuaaagaugggugacugc

SEQ ID NO: 875292 - RNA, 19 nt, Artificial Sequence
  Description of Artificial Sequence: Synthetic oligonucleotide
ugcgcuuggaauuccauga

SEQ ID NO: 875293 - RNA, 19 nt, Artificial Sequence
  Description of Artificial Sequence: Synthetic oligonucleotide
uuugguuaguguaggcuug

SEQ ID NO: 875294 - RNA, 19 nt, Artificial Sequence
  Description of Artificial Sequence: Synthetic oligonucleotide
aaagcucaaccccuauuug

SEQ ID NO: 875295 - RNA, 19 nt, Artificial Sequence
  Description of Artificial Sequence: Synthetic oligonucleotide
ucagccuauagauccauga

SEQ ID NO: 875296 - RNA, 19 nt, Artificial Sequence
  Description of Artificial Sequence: Synthetic oligonucleotide
cuucaacacacacacacac

SEQ ID NO: 875297 - RNA, 19 nt, Artificial Sequence
  Description of Artificial Sequence: Synthetic oligonucleotide
gagaggaucugacugacca

SEQ ID NO: 875298 - RNA, 19 nt, Artificial Sequence
  Description of Artificial Sequence: Synthetic oligonucleotide
aagcucaaccccuauuuga

SEQ ID NO: 875299 - RNA, 19 nt, Artificial Sequence
  Description of Artificial Sequence: Synthetic oligonucleotide
agcaugacagagaaugagc

SEQ ID NO: 875300 - RNA, 19 nt, Artificial Sequence
  Description of Artificial Sequence: Synthetic oligonucleotide
cacauacacacacacacac

SEQ ID NO: 875301 - RNA, 19 nt, Artificial Sequence
  Description of Artificial Sequence: Synthetic oligonucleotide
aagcccuuauccucaggac

SEQ ID NO: 875302 - RNA, 19 nt, Artificial Sequence
  Description of Artificial Sequence: Synthetic oligonucleotide
aaaccucgagagugcaugg

SEQ ID NO: 875303 - RNA, 19 nt, Artificial Sequence
  Description of Artificial Sequence: Synthetic oligonucleotide
uccuagaggguucagugcu

SEQ ID NO: 875304 - RNA, 19 nt, Artificial Sequence
  Description of Artificial Sequence: Synthetic oligonucleotide
accccacaagcccuuaucc

SEQ ID NO: 875305 - RNA, 19 nt, Artificial Sequence
  Description of Artificial Sequence: Synthetic oligonucleotide
uaagucugugcaugugugg

SEQ ID NO: 875306 - RNA, 19 nt, Artificial Sequence
  Description of Artificial Sequence: Synthetic oligonucleotide
uauaggucauggcaucccc

SEQ ID NO: 875307 - RNA, 19 nt, Artificial Sequence
  Description of Artificial Sequence: Synthetic oligonucleotide
acagagaaugagccaaguc

SEQ ID NO: 875308 - RNA, 19 nt, Artificial Sequence
  Description of Artificial Sequence: Synthetic oligonucleotide
caaccuaaagucaucugug

SEQ ID NO: 875309 - RNA, 19 nt, Artificial Sequence
  Description of Artificial Sequence: Synthetic oligonucleotide
accaauacuaaagaugggu

SEQ ID NO: 875310 - RNA, 19 nt, Artificial Sequence
  Description of Artificial Sequence: Synthetic oligonucleotide
uuugacuauaggucauggc

SEQ ID NO: 875311 - RNA, 19 nt, Artificial Sequence
  Description of Artificial Sequence: Synthetic oligonucleotide
uuaguguaggcuuggcaca

SEQ ID NO: 875312 - RNA, 19 nt, Artificial Sequence
  Description of Artificial Sequence: Synthetic oligonucleotide
cacacacacacacacacac

SEQ ID NO: 875313 - RNA, 19 nt, Artificial Sequence
  Description of Artificial Sequence: Synthetic oligonucleotide
ugaugcacccaauuugaca

SEQ ID NO: 875314 - RNA, 19 nt, Artificial Sequence
  Description of Artificial Sequence: Synthetic oligonucleotide
uguccgggcaaccuaaagu

SEQ ID NO: 875315 - RNA, 19 nt, Artificial Sequence
  Description of Artificial Sequence: Synthetic oligonucleotide
aaaccucucucucucucug

SEQ ID NO: 875316 - RNA, 19 nt, Artificial Sequence
  Description of Artificial Sequence: Synthetic oligonucleotide
caaacauguaggugugagg

SEQ ID NO: 875317 - RNA, 19 nt, Artificial Sequence
  Description of Artificial Sequence: Synthetic oligonucleotide
acuauaggucauggcaucc

SEQ ID NO: 875318 - RNA, 19 nt, Artificial Sequence
  Description of Artificial Sequence: Synthetic oligonucleotide
auggcauccccacaauuag

SEQ ID NO: 875319 - RNA, 19 nt, Artificial Sequence
  Description of Artificial Sequence: Synthetic oligonucleotide
cagagagccgccaaccucc

SEQ ID NO: 875320 - RNA, 19 nt, Artificial Sequence
  Description of Artificial Sequence: Synthetic oligonucleotide
ugcuaagucugcuuggaaa

SEQ ID NO: 875321 - RNA, 19 nt, Artificial Sequence
  Description of Artificial Sequence: Synthetic oligonucleotide
gugggauucucagagagcc

SEQ ID NO: 875322 - RNA, 19 nt, Artificial Sequence
  Description of Artificial Sequence: Synthetic oligonucleotide
gugugaugcacccaauuug

SEQ ID NO: 875323 - RNA, 19 nt, Artificial Sequence
  Description of Artificial Sequence: Synthetic oligonucleotide
cacacacacacacucaaac

SEQ ID NO: 875324 - RNA, 19 nt, Artificial Sequence
  Description of Artificial Sequence: Synthetic oligonucleotide
agccuauagauccaugaga

SEQ ID NO: 875325 - RNA, 19 nt, Artificial Sequence
  Description of Artificial Sequence: Synthetic oligonucleotide
auuugacuauaggucaugg

SEQ ID NO: 875326 - RNA, 19 nt, Artificial Sequence
  Description of Artificial Sequence: Synthetic oligonucleotide
gaagagauguugcauaggu

SEQ ID NO: 875327 - RNA, 19 nt, Artificial Sequence
  Description of Artificial Sequence: Synthetic oligonucleotide
uacacacacacacacucaa

SEQ ID NO: 875328 - RNA, 19 nt, Artificial Sequence
  Description of Artificial Sequence: Synthetic oligonucleotide
cuaagucugugcaugugug

SEQ ID NO: 875329 - RNA, 19 nt, Artificial Sequence
  Description of Artificial Sequence: Synthetic oligonucleotide
gauguugcauagguagggg

SEQ ID NO: 875330 - RNA, 19 nt, Artificial Sequence
  Description of Artificial Sequence: Synthetic oligonucleotide
cauaguugccuaguaacag

SEQ ID NO: 875331 - RNA, 19 nt, Artificial Sequence
  Description of Artificial Sequence: Synthetic oligonucleotide
agaucugucuuaucccgag

SEQ ID NO: 875332 - RNA, 19 nt, Artificial Sequence
  Description of Artificial Sequence: Synthetic oligonucleotide
uaguaacagucaaaacuca

SEQ ID NO: 875333 - RNA, 19 nt, Artificial Sequence
  Description of Artificial Sequence: Synthetic oligonucleotide
uucaacacacacacacaca

SEQ ID NO: 875334 - RNA, 19 nt, Artificial Sequence
  Description of Artificial Sequence: Synthetic oligonucleotide
auaguugccuaguaacagu

SEQ ID NO: 875335 - RNA, 19 nt, Artificial Sequence
  Description of Artificial Sequence: Synthetic oligonucleotide
aaugagccaaguccuuccu

SEQ ID NO: 875336 - RNA, 19 nt, Artificial Sequence
  Description of Artificial Sequence: Synthetic oligonucleotide
agagaaugagccaaguccu

SEQ ID NO: 875337 - RNA, 19 nt, Artificial Sequence
  Description of Artificial Sequence: Synthetic oligonucleotide
accccuauuugacuauagg

SEQ ID NO: 875338 - RNA, 19 nt, Artificial Sequence
  Description of Artificial Sequence: Synthetic oligonucleotide
aaacgagucucccaucaua

SEQ ID NO: 875339 - RNA, 19 nt, Artificial Sequence
  Description of Artificial Sequence: Synthetic oligonucleotide
cucucucucucugacaucc

SEQ ID NO: 875340 - RNA, 19 nt, Artificial Sequence
  Description of Artificial Sequence: Synthetic oligonucleotide
ucuauacgguuugaaagcu

SEQ ID NO: 875341 - RNA, 19 nt, Artificial Sequence
  Description of Artificial Sequence: Synthetic oligonucleotide
auuugacagagaucugucu

SEQ ID NO: 875342 - RNA, 19 nt, Artificial Sequence
  Description of Artificial Sequence: Synthetic oligonucleotide
uguguguguguguagccac

SEQ ID NO: 875343 - RNA, 19 nt, Artificial Sequence
  Description of Artificial Sequence: Synthetic oligonucleotide
ucugucuuaucccgagcca

SEQ ID NO: 875344 - RNA, 19 nt, Artificial Sequence
  Description of Artificial Sequence: Synthetic oligonucleotide
agcucaaccccuauuugac

SEQ ID NO: 875345 - RNA, 19 nt, Artificial Sequence
  Description of Artificial Sequence: Synthetic oligonucleotide
ucacgcauacuccgccugg

SEQ ID NO: 875346 - RNA, 19 nt, Artificial Sequence
  Description of Artificial Sequence: Synthetic oligonucleotide
accucucucucucucugac

SEQ ID NO: 875347 - RNA, 19 nt, Artificial Sequence
  Description of Artificial Sequence: Synthetic oligonucleotide
aagccccuuaucucccaac

SEQ ID NO: 875348 - RNA, 19 nt, Artificial Sequence
  Description of Artificial Sequence: Synthetic oligonucleotide
acacacacacacucaaacu

SEQ ID NO: 875349 - RNA, 19 nt, Artificial Sequence
  Description of Artificial Sequence: Synthetic oligonucleotide
ugccuaguaacagucaaaa

SEQ ID NO: 875350 - RNA, 19 nt, Artificial Sequence
  Description of Artificial Sequence: Synthetic oligonucleotide
ucuguguguguguguagcc

SEQ ID NO: 875351 - RNA, 19 nt, Artificial Sequence
  Description of Artificial Sequence: Synthetic oligonucleotide
agugugaugcacccaauuu

SEQ ID NO: 875352 - RNA, 19 nt, Artificial Sequence
  Description of Artificial Sequence: Synthetic oligonucleotide
gauggaugugagcccaaug

SEQ ID NO: 875353 - RNA, 19 nt, Artificial Sequence
  Description of Artificial Sequence: Synthetic oligonucleotide
uggcauccccacaauuagg

SEQ ID NO: 875354 - RNA, 19 nt, Artificial Sequence
  Description of Artificial Sequence: Synthetic oligonucleotide
uccccauaggaacucggug

SEQ ID NO: 875355 - RNA, 19 nt, Artificial Sequence
  Description of Artificial Sequence: Synthetic oligonucleotide
gaucccgucugcccaaacc

SEQ ID NO: 875356 - RNA, 19 nt, Artificial Sequence
  Description of Artificial Sequence: Synthetic oligonucleotide
uauuugacuauaggucaug

SEQ ID NO: 875357 - RNA, 19 nt, Artificial Sequence
  Description of Artificial Sequence: Synthetic oligonucleotide
uauccucaggacauacagu

SEQ ID NO: 875358 - RNA, 19 nt, Artificial Sequence
  Description of Artificial Sequence: Synthetic oligonucleotide
agcccuuauccucaggaca

SEQ ID NO: 875359 - RNA, 19 nt, Artificial Sequence
  Description of Artificial Sequence: Synthetic oligonucleotide
ccugccuacacacagggag

SEQ ID NO: 875360 - RNA, 19 nt, Artificial Sequence
  Description of Artificial Sequence: Synthetic oligonucleotide
cacccuuugguuaguguag

SEQ ID NO: 875361 - RNA, 19 nt, Artificial Sequence
  Description of Artificial Sequence: Synthetic oligonucleotide
acucugugacugcccaccc

SEQ ID NO: 875362 - RNA, 19 nt, Artificial Sequence
  Description of Artificial Sequence: Synthetic oligonucleotide
uugcgcuuggaauuccaug

SEQ ID NO: 875363 - RNA, 19 nt, Artificial Sequence
  Description of Artificial Sequence: Synthetic oligonucleotide
agggaaguguccccauagg

SEQ ID NO: 875364 - RNA, 19 nt, Artificial Sequence
  Description of Artificial Sequence: Synthetic oligonucleotide
cccuauuugacuauagguc

SEQ ID NO: 875365 - RNA, 19 nt, Artificial Sequence
  Description of Artificial Sequence: Synthetic oligonucleotide
ucuuaucccgagccaggcc

SEQ ID NO: 875366 - RNA, 19 nt, Artificial Sequence
  Description of Artificial Sequence: Synthetic oligonucleotide
aucccgucugcccaaaccu

SEQ ID NO: 875367 - RNA, 19 nt, Artificial Sequence
  Description of Artificial Sequence: Synthetic oligonucleotide
ucuuccgccaucacgcaua

SEQ ID NO: 875368 - RNA, 19 nt, Artificial Sequence
  Description of Artificial Sequence: Synthetic oligonucleotide
uccaugagaggaucugacu

SEQ ID NO: 875369 - RNA, 19 nt, Artificial Sequence
  Description of Artificial Sequence: Synthetic oligonucleotide
guccgggcaaccuaaaguc

SEQ ID NO: 875370 - RNA, 19 nt, Artificial Sequence
  Description of Artificial Sequence: Synthetic oligonucleotide
ucaggacauacagucuucc

SEQ ID NO: 875371 - RNA, 19 nt, Artificial Sequence
  Description of Artificial Sequence: Synthetic oligonucleotide
cuagcagagguucuaauua

SEQ ID NO: 875372 - RNA, 19 nt, Artificial Sequence
  Description of Artificial Sequence: Synthetic oligonucleotide
cacacacacacacacccac

SEQ ID NO: 875373 - RNA, 19 nt, Artificial Sequence
  Description of Artificial Sequence: Synthetic oligonucleotide
ugagcccaaugccugggug

SEQ ID NO: 875374 - RNA, 19 nt, Artificial Sequence
  Description of Artificial Sequence: Synthetic oligonucleotide
aggggccaaacacagacau

SEQ ID NO: 875375 - RNA, 19 nt, Artificial Sequence
  Description of Artificial Sequence: Synthetic oligonucleotide
cagccuauagauccaugag

SEQ ID NO: 875376 - RNA, 19 nt, Artificial Sequence
  Description of Artificial Sequence: Synthetic oligonucleotide
uagauccaugagaggaucu

SEQ ID NO: 875377 - RNA, 19 nt, Artificial Sequence
  Description of Artificial Sequence: Synthetic oligonucleotide
ugugugucuguguguguug

SEQ ID NO: 875378 - RNA, 19 nt, Artificial Sequence
  Description of Artificial Sequence: Synthetic oligonucleotide
uccucgcccaaccaucucu

SEQ ID NO: 875379 - RNA, 19 nt, Artificial Sequence
  Description of Artificial Sequence: Synthetic oligonucleotide
uuucccuggcaaucaauaa

SEQ ID NO: 875380 - RNA, 19 nt, Artificial Sequence
  Description of Artificial Sequence: Synthetic oligonucleotide
acacccuuugguuagugua

SEQ ID NO: 875381 - RNA, 19 nt, Artificial Sequence
  Description of Artificial Sequence: Synthetic oligonucleotide
gaagccgagggaacaauac

SEQ ID NO: 875382 - RNA, 19 nt, Artificial Sequence
  Description of Artificial Sequence: Synthetic oligonucleotide
ccuauuugacuauagguca

SEQ ID NO: 875383 - RNA, 19 nt, Artificial Sequence
  Description of Artificial Sequence: Synthetic oligonucleotide
cacacacacacacccacac

SEQ ID NO: 875384 - RNA, 19 nt, Artificial Sequence
  Description of Artificial Sequence: Synthetic oligonucleotide
caugagaggaucugacuga

SEQ ID NO: 875385 - RNA, 19 nt, Artificial Sequence
  Description of Artificial Sequence: Synthetic oligonucleotide
aucuuugcgcuuggaauuc

SEQ ID NO: 875386 - RNA, 19 nt, Artificial Sequence
  Description of Artificial Sequence: Synthetic oligonucleotide
ugaaagcucaaccccuauu

SEQ ID NO: 875387 - RNA, 19 nt, Artificial Sequence
  Description of Artificial Sequence: Synthetic oligonucleotide
ggcauccccacaauuaggg

SEQ ID NO: 875388 - RNA, 19 nt, Artificial Sequence
  Description of Artificial Sequence: Synthetic oligonucleotide
uacgguuugaaagcucaac

SEQ ID NO: 875389 - RNA, 19 nt, Artificial Sequence
  Description of Artificial Sequence: Synthetic oligonucleotide
acgcauacuccgccuggcc

SEQ ID NO: 875390 - RNA, 19 nt, Artificial Sequence
  Description of Artificial Sequence: Synthetic oligonucleotide
cugccuacacacagggagc

SEQ ID NO: 875391 - RNA, 19 nt, Artificial Sequence
  Description of Artificial Sequence: Synthetic oligonucleotide
cagguacccuccaugaguc

SEQ ID NO: 875392 - RNA, 19 nt, Artificial Sequence
  Description of Artificial Sequence: Synthetic oligonucleotide
acacacacacacacacacc

SEQ ID NO: 875393 - RNA, 19 nt, Artificial Sequence
  Description of Artificial Sequence: Synthetic oligonucleotide
gaucugucuuaucccgagc

SEQ ID NO: 875394 - RNA, 19 nt, Artificial Sequence
  Description of Artificial Sequence: Synthetic oligonucleotide
gguggggacuggaagagcg

SEQ ID NO: 875395 - RNA, 19 nt, Artificial Sequence
  Description of Artificial Sequence: Synthetic oligonucleotide
uccgggcaaccuaaaguca

SEQ ID NO: 875396 - RNA, 19 nt, Artificial Sequence
  Description of Artificial Sequence: Synthetic oligonucleotide
uugccuaguaacagucaaa

SEQ ID NO: 875397 - RNA, 19 nt, Artificial Sequence
  Description of Artificial Sequence: Synthetic oligonucleotide
ugagaggaucugacugacc

SEQ ID NO: 875398 - RNA, 19 nt, Artificial Sequence
  Description of Artificial Sequence: Synthetic oligonucleotide
ucuacacccauaggaauua

SEQ ID NO: 875399 - RNA, 19 nt, Artificial Sequence
  Description of Artificial Sequence: Synthetic oligonucleotide
ccaugagaggaucugacug

SEQ ID NO: 875400 - RNA, 19 nt, Artificial Sequence
  Description of Artificial Sequence: Synthetic oligonucleotide
gugagaggcugucuguaug

SEQ ID NO: 875401 - RNA, 19 nt, Artificial Sequence
  Description of Artificial Sequence: Synthetic oligonucleotide
uggccaagaaauggggccc

SEQ ID NO: 875402 - RNA, 19 nt, Artificial Sequence
  Description of Artificial Sequence: Synthetic oligonucleotide
ugugugucugugugugugu

SEQ ID NO: 875403 - RNA, 19 nt, Artificial Sequence
  Description of Artificial Sequence: Synthetic oligonucleotide
aucacgcauacuccgccug

SEQ ID NO: 875404 - RNA, 19 nt, Artificial Sequence
  Description of Artificial Sequence: Synthetic oligonucleotide
ugucuguguguguguguag

SEQ ID NO: 875405 - RNA, 19 nt, Artificial Sequence
  Description of Artificial Sequence: Synthetic oligonucleotide
uuugcgcuuggaauuccau

SEQ ID NO: 875406 - RNA, 19 nt, Artificial Sequence
  Description of Artificial Sequence: Synthetic oligonucleotide
gugccugacacccucugac

SEQ ID NO: 875407 - RNA, 19 nt, Artificial Sequence
  Description of Artificial Sequence: Synthetic oligonucleotide
agccagaagagauguugca

SEQ ID NO: 875408 - RNA, 19 nt, Artificial Sequence
  Description of Artificial Sequence: Synthetic oligonucleotide
cuauacgguuugaaagcuc

SEQ ID NO: 875409 - RNA, 19 nt, Artificial Sequence
  Description of Artificial Sequence: Synthetic oligonucleotide
gucaaaacucaaagagagc

SEQ ID NO: 875410 - RNA, 19 nt, Artificial Sequence
  Description of Artificial Sequence: Synthetic oligonucleotide
auacuaaagaugggugacu

SEQ ID NO: 875411 - RNA, 19 nt, Artificial Sequence
  Description of Artificial Sequence: Synthetic oligonucleotide
aaccccuauuugacuauag

SEQ ID NO: 875412 - RNA, 19 nt, Artificial Sequence
  Description of Artificial Sequence: Synthetic oligonucleotide
accuaggcagaaaugguca

SEQ ID NO: 875413 - RNA, 19 nt, Artificial Sequence
  Description of Artificial Sequence: Synthetic oligonucleotide
gucuguguguguguguagc

SEQ ID NO: 875414 - RNA, 19 nt, Artificial Sequence
  Description of Artificial Sequence: Synthetic oligonucleotide
aguaacagucaaaacucaa

SEQ ID NO: 875415 - RNA, 19 nt, Artificial Sequence
  Description of Artificial Sequence: Synthetic oligonucleotide
aggaauuacaucagccuau

SEQ ID NO: 875416 - RNA, 19 nt, Artificial Sequence
  Description of Artificial Sequence: Synthetic oligonucleotide
gugugugugucugugugug

SEQ ID NO: 875417 - RNA, 19 nt, Artificial Sequence
  Description of Artificial Sequence: Synthetic oligonucleotide
caaggccaagcucuguuuc

SEQ ID NO: 875418 - RNA, 19 nt, Artificial Sequence
  Description of Artificial Sequence: Synthetic oligonucleotide
cauagguaggggccacacc

SEQ ID NO: 875419 - RNA, 19 nt, Artificial Sequence
  Description of Artificial Sequence: Synthetic oligonucleotide
gaagagcgccaccucugcc

SEQ ID NO: 875420 - RNA, 19 nt, Artificial Sequence
  Description of Artificial Sequence: Synthetic oligonucleotide
caauacuggauggauguga

SEQ ID NO: 875421 - RNA, 19 nt, Artificial Sequence
  Description of Artificial Sequence: Synthetic oligonucleotide
uggggacuggaagagcgcc

SEQ ID NO: 875422 - RNA, 19 nt, Artificial Sequence
  Description of Artificial Sequence: Synthetic oligonucleotide
gagugacuaugugugugcc

SEQ ID NO: 875423 - RNA, 19 nt, Artificial Sequence
  Description of Artificial Sequence: Synthetic oligonucleotide
uuaucccgagccaggccca

SEQ ID NO: 875424 - RNA, 19 nt, Artificial Sequence
  Description of Artificial Sequence: Synthetic oligonucleotide
uugcaacaagcagaugcug

SEQ ID NO: 875425 - RNA, 19 nt, Artificial Sequence
  Description of Artificial Sequence: Synthetic oligonucleotide
aaccucucucucucucuga

SEQ ID NO: 875426 - RNA, 19 nt, Artificial Sequence
  Description of Artificial Sequence: Synthetic oligonucleotide
uugaaagcucaaccccuau

SEQ ID NO: 875427 - RNA, 19 nt, Artificial Sequence
  Description of Artificial Sequence: Synthetic oligonucleotide
ugugucugugugugugugu

SEQ ID NO: 875428 - RNA, 19 nt, Artificial Sequence
  Description of Artificial Sequence: Synthetic oligonucleotide
acccuuugguuaguguagg

SEQ ID NO: 875429 - RNA, 19 nt, Artificial Sequence
  Description of Artificial Sequence: Synthetic oligonucleotide
aaguguccccauaggaacu

SEQ ID NO: 875430 - RNA, 19 nt, Artificial Sequence
  Description of Artificial Sequence: Synthetic oligonucleotide
cccaauuugacagagaucu

SEQ ID NO: 875431 - RNA, 19 nt, Artificial Sequence
  Description of Artificial Sequence: Synthetic oligonucleotide
caaucuuugcgcuuggaau

SEQ ID NO: 875432 - RNA, 19 nt, Artificial Sequence
  Description of Artificial Sequence: Synthetic oligonucleotide
gggauucucagagagccgc

SEQ ID NO: 875433 - RNA, 19 nt, Artificial Sequence
  Description of Artificial Sequence: Synthetic oligonucleotide
gugugugucugugugugug

SEQ ID NO: 875434 - RNA, 19 nt, Artificial Sequence
  Description of Artificial Sequence: Synthetic oligonucleotide
aggccagaaacgagucucc

SEQ ID NO: 875435 - RNA, 19 nt, Artificial Sequence
  Description of Artificial Sequence: Synthetic oligonucleotide
gcugucuguaugaaaagac

SEQ ID NO: 875436 - RNA, 19 nt, Artificial Sequence
  Description of Artificial Sequence: Synthetic oligonucleotide
cucaaccccuauuugacua

SEQ ID NO: 875437 - RNA, 19 nt, Artificial Sequence
  Description of Artificial Sequence: Synthetic oligonucleotide
ugacagagaucugucuuau

SEQ ID NO: 875438 - RNA, 19 nt, Artificial Sequence
  Description of Artificial Sequence: Synthetic oligonucleotide
accucgagagugcauggaa

SEQ ID NO: 875439 - RNA, 19 nt, Artificial Sequence
  Description of Artificial Sequence: Synthetic oligonucleotide
caucauaguugccuaguaa

SEQ ID NO: 875440 - RNA, 19 nt, Artificial Sequence
  Description of Artificial Sequence: Synthetic oligonucleotide
gcaaccuaaagucaucugu

SEQ ID NO: 875441 - RNA, 19 nt, Artificial Sequence
  Description of Artificial Sequence: Synthetic oligonucleotide
gaguggaguggcccagagc

SEQ ID NO: 875442 - RNA, 19 nt, Artificial Sequence
  Description of Artificial Sequence: Synthetic oligonucleotide
cccaaccaucucuauacgg

SEQ ID NO: 875443 - RNA, 19 nt, Artificial Sequence
  Description of Artificial Sequence: Synthetic oligonucleotide
caauuugacagagaucugu

SEQ ID NO: 875444 - RNA, 19 nt, Artificial Sequence
  Description of Artificial Sequence: Synthetic oligonucleotide
acacacacacacccacaca

SEQ ID NO: 875445 - RNA, 19 nt, Artificial Sequence
  Description of Artificial Sequence: Synthetic oligonucleotide
guguguguagccacagcug

SEQ ID NO: 875446 - RNA, 19 nt, Artificial Sequence
  Description of Artificial Sequence: Synthetic oligonucleotide
acccaauuugacagagauc

SEQ ID NO: 875447 - RNA, 19 nt, Artificial Sequence
  Description of Artificial Sequence: Synthetic oligonucleotide
gggugugugugucugugug

SEQ ID NO: 875448 - RNA, 19 nt, Artificial Sequence
  Description of Artificial Sequence: Synthetic oligonucleotide
cucgguggggacuggaaga

SEQ ID NO: 875449 - RNA, 19 nt, Artificial Sequence
  Description of Artificial Sequence: Synthetic oligonucleotide
cuuugguuaguguaggcuu

SEQ ID NO: 875450 - RNA, 19 nt, Artificial Sequence
  Description of Artificial Sequence: Synthetic oligonucleotide
cccacacauacacacacac

SEQ ID NO: 875451 - RNA, 19 nt, Artificial Sequence
  Description of Artificial Sequence: Synthetic oligonucleotide
caccagugugauuuguaca

SEQ ID NO: 875452 - RNA, 19 nt, Artificial Sequence
  Description of Artificial Sequence: Synthetic oligonucleotide
ucuuugcgcuuggaauucc

SEQ ID NO: 875453 - RNA, 19 nt, Artificial Sequence
  Description of Artificial Sequence: Synthetic oligonucleotide
gauucucagagagccgcca

SEQ ID NO: 875454 - RNA, 19 nt, Artificial Sequence
  Description of Artificial Sequence: Synthetic oligonucleotide
ugugugugucugugugugu

SEQ ID NO: 875455 - RNA, 19 nt, Artificial Sequence
  Description of Artificial Sequence: Synthetic oligonucleotide
auacacacacacacacuca

SEQ ID NO: 875456 - RNA, 19 nt, Artificial Sequence
  Description of Artificial Sequence: Synthetic oligonucleotide
acacauacacacacacaca

SEQ ID NO: 875457 - RNA, 19 nt, Artificial Sequence
  Description of Artificial Sequence: Synthetic oligonucleotide
acauacacacacacacacu

SEQ ID NO: 875458 - RNA, 19 nt, Artificial Sequence
  Description of Artificial Sequence: Synthetic oligonucleotide
gguuaguguaggcuuggca

SEQ ID NO: 875459 - RNA, 19 nt, Artificial Sequence
  Description of Artificial Sequence: Synthetic oligonucleotide
ugcuagcagagguucuaau

SEQ ID NO: 875460 - RNA, 19 nt, Artificial Sequence
  Description of Artificial Sequence: Synthetic oligonucleotide
gggugcuaagucugcuugg

SEQ ID NO: 875461 - RNA, 19 nt, Artificial Sequence
  Description of Artificial Sequence: Synthetic oligonucleotide
aaccucgagagugcaugga

SEQ ID NO: 875462 - RNA, 19 nt, Artificial Sequence
  Description of Artificial Sequence: Synthetic oligonucleotide
ucgcccaaccaucucuaua

SEQ ID NO: 875463 - RNA, 19 nt, Artificial Sequence
  Description of Artificial Sequence: Synthetic oligonucleotide
cgagagugcauggaaaggg

SEQ ID NO: 875464 - RNA, 19 nt, Artificial Sequence
  Description of Artificial Sequence: Synthetic oligonucleotide
aaauggggcccaaggcaca

SEQ ID NO: 875465 - RNA, 19 nt, Artificial Sequence
  Description of Artificial Sequence: Synthetic oligonucleotide
cugggucuacacccauagg

SEQ ID NO: 875466 - RNA, 19 nt, Artificial Sequence
  Description of Artificial Sequence: Synthetic oligonucleotide
acauacagucuuccaggua

SEQ ID NO: 875467 - RNA, 19 nt, Artificial Sequence
  Description of Artificial Sequence: Synthetic oligonucleotide
uaggaacucgguggggacu

SEQ ID NO: 875468 - RNA, 19 nt, Artificial Sequence
  Description of Artificial Sequence: Synthetic oligonucleotide
cacacacacacccacacau

SEQ ID NO: 875469 - RNA, 19 nt, Artificial Sequence
  Description of Artificial Sequence: Synthetic oligonucleotide
cuguccgggcaaccuaaag

SEQ ID NO: 875470 - RNA, 19 nt, Artificial Sequence
  Description of Artificial Sequence: Synthetic oligonucleotide
cacccaauuugacagagau

SEQ ID NO: 875471 - RNA, 19 nt, Artificial Sequence
  Description of Artificial Sequence: Synthetic oligonucleotide
caacacacacacacacaca

SEQ ID NO: 875472 - RNA, 19 nt, Artificial Sequence
  Description of Artificial Sequence: Synthetic oligonucleotide
ucccgucugcccaaaccuc

SEQ ID NO: 875473 - RNA, 19 nt, Artificial Sequence
  Description of Artificial Sequence: Synthetic oligonucleotide
gacuaugugugugccuguc

SEQ ID NO: 875474 - RNA, 19 nt, Artificial Sequence
  Description of Artificial Sequence: Synthetic oligonucleotide
gaccaaagaauugcuuucu

SEQ ID NO: 875475 - RNA, 19 nt, Artificial Sequence
  Description of Artificial Sequence: Synthetic oligonucleotide
cgcccaaccaucucuauac

SEQ ID NO: 875476 - RNA, 19 nt, Artificial Sequence
  Description of Artificial Sequence: Synthetic oligonucleotide
ggaagagcgccaccucugc

SEQ ID NO: 875477 - RNA, 19 nt, Artificial Sequence
  Description of Artificial Sequence: Synthetic oligonucleotide
augcacaccaugguggcuu

SEQ ID NO: 875478 - RNA, 19 nt, Artificial Sequence
  Description of Artificial Sequence: Synthetic oligonucleotide
aguugccuaguaacaguca

SEQ ID NO: 875479 - RNA, 19 nt, Artificial Sequence
  Description of Artificial Sequence: Synthetic oligonucleotide
cuuugcgcuuggaauucca

SEQ ID NO: 875480 - RNA, 19 nt, Artificial Sequence
  Description of Artificial Sequence: Synthetic oligonucleotide
agagaccaaagaauugcuu

SEQ ID NO: 875481 - RNA, 19 nt, Artificial Sequence
  Description of Artificial Sequence: Synthetic oligonucleotide
agagugcauggaaagggaa

SEQ ID NO: 875482 - RNA, 19 nt, Artificial Sequence
  Description of Artificial Sequence: Synthetic oligonucleotide
ugguuaguguaggcuuggc

SEQ ID NO: 875483 - RNA, 19 nt, Artificial Sequence
  Description of Artificial Sequence: Synthetic oligonucleotide
agagagccgccaaccuccc

SEQ ID NO: 875484 - RNA, 19 nt, Artificial Sequence
  Description of Artificial Sequence: Synthetic oligonucleotide
cagaaacgagucucccauc

SEQ ID NO: 875485 - RNA, 19 nt, Artificial Sequence
  Description of Artificial Sequence: Synthetic oligonucleotide
gugcaugugugggagguga

SEQ ID NO: 875486 - RNA, 19 nt, Artificial Sequence
  Description of Artificial Sequence: Synthetic oligonucleotide
gugugucugugugugugug

SEQ ID NO: 875487 - RNA, 19 nt, Artificial Sequence
  Description of Artificial Sequence: Synthetic oligonucleotide
aagauggaguucagaugau

SEQ ID NO: 875488 - RNA, 19 nt, Artificial Sequence
  Description of Artificial Sequence: Synthetic oligonucleotide
augcacccaauuugacaga

SEQ ID NO: 875489 - RNA, 19 nt, Artificial Sequence
  Description of Artificial Sequence: Synthetic oligonucleotide
auaggucauggcaucccca

SEQ ID NO: 875490 - RNA, 19 nt, Artificial Sequence
  Description of Artificial Sequence: Synthetic oligonucleotide
uguaggugugagggugugu

SEQ ID NO: 875491 - RNA, 19 nt, Artificial Sequence
  Description of Artificial Sequence: Synthetic oligonucleotide
caggacauacagucuucca

SEQ ID NO: 875492 - RNA, 19 nt, Artificial Sequence
  Description of Artificial Sequence: Synthetic oligonucleotide
cuuccgccaucacgcauac

SEQ ID NO: 875493 - RNA, 19 nt, Artificial Sequence
  Description of Artificial Sequence: Synthetic oligonucleotide
caccccacaagcccuuauc

SEQ ID NO: 875494 - RNA, 19 nt, Artificial Sequence
  Description of Artificial Sequence: Synthetic oligonucleotide
uggggucuugcugggcugc

SEQ ID NO: 875495 - RNA, 19 nt, Artificial Sequence
  Description of Artificial Sequence: Synthetic oligonucleotide
cucucucucucucugacau

SEQ ID NO: 875496 - RNA, 19 nt, Artificial Sequence
  Description of Artificial Sequence: Synthetic oligonucleotide
ucucucucucucugacauc

SEQ ID NO: 875497 - RNA, 19 nt, Artificial Sequence
  Description of Artificial Sequence: Synthetic oligonucleotide
cugugcugaucccgucugc

SEQ ID NO: 875498 - RNA, 19 nt, Artificial Sequence
  Description of Artificial Sequence: Synthetic oligonucleotide
aucuuccgccaucacgcau

SEQ ID NO: 875499 - RNA, 19 nt, Artificial Sequence
  Description of Artificial Sequence: Synthetic oligonucleotide
cacgcauacuccgccuggc

SEQ ID NO: 875500 - RNA, 19 nt, Artificial Sequence
  Description of Artificial Sequence: Synthetic oligonucleotide
gaauucuggugggcagcug

SEQ ID NO: 875501 - RNA, 19 nt, Artificial Sequence
  Description of Artificial Sequence: Synthetic oligonucleotide
augagccaaguccuuccuu

SEQ ID NO: 875502 - RNA, 19 nt, Artificial Sequence
  Description of Artificial Sequence: Synthetic oligonucleotide
uugaguggaguggcccaga

SEQ ID NO: 875503 - RNA, 19 nt, Artificial Sequence
  Description of Artificial Sequence: Synthetic oligonucleotide
aacucgguggggacuggaa

SEQ ID NO: 875504 - RNA, 19 nt, Artificial Sequence
  Description of Artificial Sequence: Synthetic oligonucleotide
cuguguguguguguagcca

SEQ ID NO: 875505 - RNA, 19 nt, Artificial Sequence
  Description of Artificial Sequence: Synthetic oligonucleotide
acacacacacacacacaca

SEQ ID NO: 875506 - RNA, 19 nt, Artificial Sequence
  Description of Artificial Sequence: Synthetic oligonucleotide
gugaugcacccaauuugac

SEQ ID NO: 875507 - RNA, 19 nt, Artificial Sequence
  Description of Artificial Sequence: Synthetic oligonucleotide
gcccaaccaucucuauacg

SEQ ID NO: 875508 - RNA, 19 nt, Artificial Sequence
  Description of Artificial Sequence: Synthetic oligonucleotide
aucagccuauagauccaug

SEQ ID NO: 875509 - RNA, 19 nt, Artificial Sequence
  Description of Artificial Sequence: Synthetic oligonucleotide
acacacacacacacaccca

SEQ ID NO: 875510 - RNA, 19 nt, Artificial Sequence
  Description of Artificial Sequence: Synthetic oligonucleotide
acacacacacacacccaca

SEQ ID NO: 875511 - RNA, 19 nt, Artificial Sequence
  Description of Artificial Sequence: Synthetic oligonucleotide
cuacacccauaggaauuac

SEQ ID NO: 875512 - RNA, 19 nt, Artificial Sequence
  Description of Artificial Sequence: Synthetic oligonucleotide
gugucugugugugugugua

SEQ ID NO: 875513 - RNA, 19 nt, Artificial Sequence
  Description of Artificial Sequence: Synthetic oligonucleotide
caaaccucucucucucucu

SEQ ID NO: 875514 - RNA, 19 nt, Artificial Sequence
  Description of Artificial Sequence: Synthetic oligonucleotide
ccaaccaucucuauacggu

SEQ ID NO: 875515 - RNA, 19 nt, Artificial Sequence
  Description of Artificial Sequence: Synthetic oligonucleotide
ggaacaauacuggauggau

SEQ ID NO: 875516 - RNA, 19 nt, Artificial Sequence
  Description of Artificial Sequence: Synthetic oligonucleotide
ccaguggacauugcugccc

SEQ ID NO: 875517 - RNA, 19 nt, Artificial Sequence
  Description of Artificial Sequence: Synthetic oligonucleotide
agguaggggccacacccuu

SEQ ID NO: 875518 - RNA, 19 nt, Artificial Sequence
  Description of Artificial Sequence: Synthetic oligonucleotide
cccacaauuagggcuuccc

SEQ ID NO: 875519 - RNA, 19 nt, Artificial Sequence
  Description of Artificial Sequence: Synthetic oligonucleotide
cccuuaucucccaacucuc

SEQ ID NO: 875520 - RNA, 19 nt, Artificial Sequence
  Description of Artificial Sequence: Synthetic oligonucleotide
ccaaaccucucucucucuc

SEQ ID NO: 875521 - RNA, 19 nt, Artificial Sequence
  Description of Artificial Sequence: Synthetic oligonucleotide
cgccaucacgcauacuccg

SEQ ID NO: 875522 - RNA, 19 nt, Artificial Sequence
  Description of Artificial Sequence: Synthetic oligonucleotide
cauguaggugugagggugu

SEQ ID NO: 875523 - RNA, 19 nt, Artificial Sequence
  Description of Artificial Sequence: Synthetic oligonucleotide
ccccuauuugacuauaggu

SEQ ID NO: 875524 - RNA, 19 nt, Artificial Sequence
  Description of Artificial Sequence: Synthetic oligonucleotide
ccgccaucacgcauacucc

SEQ ID NO: 875525 - RNA, 19 nt, Artificial Sequence
  Description of Artificial Sequence: Synthetic oligonucleotide
acacacacacacacucaaa

SEQ ID NO: 875526 - RNA, 19 nt, Artificial Sequence
  Description of Artificial Sequence: Synthetic oligonucleotide
gugcuaagucugcuuggaa

SEQ ID NO: 875527 - RNA, 19 nt, Artificial Sequence
  Description of Artificial Sequence: Synthetic oligonucleotide
ggauucucagagagccgcc

SEQ ID NO: 875528 - RNA, 19 nt, Artificial Sequence
  Description of Artificial Sequence: Synthetic oligonucleotide
gcuucaacacacacacaca

SEQ ID NO: 875529 - RNA, 19 nt, Artificial Sequence
  Description of Artificial Sequence: Synthetic oligonucleotide
caucuuccgccaucacgca

SEQ ID NO: 875530 - RNA, 19 nt, Artificial Sequence
  Description of Artificial Sequence: Synthetic oligonucleotide
ggaauuacaucagccuaua

SEQ ID NO: 875531 - RNA, 19 nt, Artificial Sequence
  Description of Artificial Sequence: Synthetic oligonucleotide
caaccaucucuauacgguu

SEQ ID NO: 875532 - RNA, 19 nt, Artificial Sequence
  Description of Artificial Sequence: Synthetic oligonucleotide
auacgguuugaaagcucaa

SEQ ID NO: 875533 - RNA, 19 nt, Artificial Sequence
  Description of Artificial Sequence: Synthetic oligonucleotide
gaacucgguggggacugga

SEQ ID NO: 875534 - RNA, 19 nt, Artificial Sequence
  Description of Artificial Sequence: Synthetic oligonucleotide
gcuagcagagguucuaauu

SEQ ID NO: 875535 - RNA, 19 nt, Artificial Sequence
  Description of Artificial Sequence: Synthetic oligonucleotide
guguguguguguagccaca

SEQ ID NO: 875536 - RNA, 19 nt, Artificial Sequence
  Description of Artificial Sequence: Synthetic oligonucleotide
ccacaagcccuuauccuca

SEQ ID NO: 875537 - RNA, 19 nt, Artificial Sequence
  Description of Artificial Sequence: Synthetic oligonucleotide
ccacaauuagggcuuccca

SEQ ID NO: 875538 - RNA, 19 nt, Artificial Sequence
  Description of Artificial Sequence: Synthetic oligonucleotide
gcauagguaggggccacac

SEQ ID NO: 875539 - RNA, 19 nt, Artificial Sequence
  Description of Artificial Sequence: Synthetic oligonucleotide
agcugcuagcagagguucu

SEQ ID NO: 875540 - RNA, 19 nt, Artificial Sequence
  Description of Artificial Sequence: Synthetic oligonucleotide
ggccagaaacgagucuccc

SEQ ID NO: 875541 - RNA, 19 nt, Artificial Sequence
  Description of Artificial Sequence: Synthetic oligonucleotide
ccacacauacacacacaca

SEQ ID NO: 875542 - RNA, 19 nt, Artificial Sequence
  Description of Artificial Sequence: Synthetic oligonucleotide
acacacacacccacacaua

SEQ ID NO: 875543 - RNA, 19 nt, Artificial Sequence
  Description of Artificial Sequence: Synthetic oligonucleotide
cauacuccgccuggccuca

SEQ ID NO: 875544 - RNA, 19 nt, Artificial Sequence
  Description of Artificial Sequence: Synthetic oligonucleotide
caucacgcauacuccgccu

SEQ ID NO: 875545 - RNA, 19 nt, Artificial Sequence
  Description of Artificial Sequence: Synthetic oligonucleotide
ggugugugugucugugugu

SEQ ID NO: 875546 - RNA, 19 nt, Artificial Sequence
  Description of Artificial Sequence: Synthetic oligonucleotide
cuggacccagcaugacaga

SEQ ID NO: 875547 - RNA, 19 nt, Artificial Sequence
  Description of Artificial Sequence: Synthetic oligonucleotide
ggcuuggcacagccaggag

SEQ ID NO: 875548 - RNA, 19 nt, Artificial Sequence
  Description of Artificial Sequence: Synthetic oligonucleotide
ccaggaauucuggugggca

SEQ ID NO: 875549 - RNA, 19 nt, Artificial Sequence
  Description of Artificial Sequence: Synthetic oligonucleotide
cccuccucgcccaaccauc

SEQ ID NO: 875550 - RNA, 19 nt, Artificial Sequence
  Description of Artificial Sequence: Synthetic oligonucleotide
ccagguacccuccaugagu

SEQ ID NO: 875551 - RNA, 19 nt, Artificial Sequence
  Description of Artificial Sequence: Synthetic oligonucleotide
gccccuuaucucccaacuc

SEQ ID NO: 875552 - RNA, 19 nt, Artificial Sequence
  Description of Artificial Sequence: Synthetic oligonucleotide
ccucgagagugcauggaaa

SEQ ID NO: 875553 - RNA, 19 nt, Artificial Sequence
  Description of Artificial Sequence: Synthetic oligonucleotide
gugugugucuguguguguu

SEQ ID NO: 875554 - RNA, 19 nt, Artificial Sequence
  Description of Artificial Sequence: Synthetic oligonucleotide
ggggccaaacacagacaug

SEQ ID NO: 875555 - RNA, 19 nt, Artificial Sequence
  Description of Artificial Sequence: Synthetic oligonucleotide
uccccacaauuagggcuuc

SEQ ID NO: 875556 - RNA, 19 nt, Artificial Sequence
  Description of Artificial Sequence: Synthetic oligonucleotide
cugacacccucugacaguu

SEQ ID NO: 875557 - RNA, 19 nt, Artificial Sequence
  Description of Artificial Sequence: Synthetic oligonucleotide
ggcuugagagugacuaugu

SEQ ID NO: 875558 - RNA, 19 nt, Artificial Sequence
  Description of Artificial Sequence: Synthetic oligonucleotide
ggaauucuggugggcagcu

SEQ ID NO: 875559 - RNA, 19 nt, Artificial Sequence
  Description of Artificial Sequence: Synthetic oligonucleotide
cagugugaugcacccaauu

SEQ ID NO: 875560 - RNA, 19 nt, Artificial Sequence
  Description of Artificial Sequence: Synthetic oligonucleotide
guccccauaggaacucggu

SEQ ID NO: 875561 - RNA, 19 nt, Artificial Sequence
  Description of Artificial Sequence: Synthetic oligonucleotide
ccuuugguuaguguaggcu

SEQ ID NO: 875562 - RNA, 19 nt, Artificial Sequence
  Description of Artificial Sequence: Synthetic oligonucleotide
gcugaucccgucugcccaa

SEQ ID NO: 875563 - RNA, 19 nt, Artificial Sequence
  Description of Artificial Sequence: Synthetic oligonucleotide
caaccccuauuugacuaua

SEQ ID NO: 875564 - RNA, 19 nt, Artificial Sequence
  Description of Artificial Sequence: Synthetic oligonucleotide
cuguuucuggacccagcau

SEQ ID NO: 875565 - RNA, 19 nt, Artificial Sequence
  Description of Artificial Sequence: Synthetic oligonucleotide
ccucaggacauacagucuu

SEQ ID NO: 875566 - RNA, 19 nt, Artificial Sequence
  Description of Artificial Sequence: Synthetic oligonucleotide
ccucucucucucucugaca

SEQ ID NO: 875567 - RNA, 19 nt, Artificial Sequence
  Description of Artificial Sequence: Synthetic oligonucleotide
ccgucugcccaaaccucuc

SEQ ID NO: 875568 - RNA, 19 nt, Artificial Sequence
  Description of Artificial Sequence: Synthetic oligonucleotide
auacuccgccuggccucag

SEQ ID NO: 875569 - RNA, 19 nt, Artificial Sequence
  Description of Artificial Sequence: Synthetic oligonucleotide
cccagugagugggauucuc

SEQ ID NO: 875570 - RNA, 19 nt, Artificial Sequence
  Description of Artificial Sequence: Synthetic oligonucleotide
uuccgccaucacgcauacu

SEQ ID NO: 875571 - RNA, 19 nt, Artificial Sequence
  Description of Artificial Sequence: Synthetic oligonucleotide
ccgccuggccucagucacc

SEQ ID NO: 875572 - RNA, 19 nt, Artificial Sequence
  Description of Artificial Sequence: Synthetic oligonucleotide
gccuguccgggcaaccuaa

SEQ ID NO: 875573 - RNA, 19 nt, Artificial Sequence
  Description of Artificial Sequence: Synthetic oligonucleotide
ccugacacccucugacagu

SEQ ID NO: 875574 - RNA, 19 nt, Artificial Sequence
  Description of Artificial Sequence: Synthetic oligonucleotide
cccagagcccaccaauacu

SEQ ID NO: 875575 - RNA, 19 nt, Artificial Sequence
  Description of Artificial Sequence: Synthetic oligonucleotide
ccgggcaaccuaaagucau

SEQ ID NO: 875576 - RNA, 19 nt, Artificial Sequence
  Description of Artificial Sequence: Synthetic oligonucleotide
ccccacaagcccuuauccu

SEQ ID NO: 875577 - RNA, 19 nt, Artificial Sequence
  Description of Artificial Sequence: Synthetic oligonucleotide
gcccacccugggucuacac

SEQ ID NO: 875578 - RNA, 19 nt, Artificial Sequence
  Description of Artificial Sequence: Synthetic oligonucleotide
ccaucucuauacgguuuga

SEQ ID NO: 875579 - RNA, 19 nt, Artificial Sequence
  Description of Artificial Sequence: Synthetic oligonucleotide
ccucgcccaaccaucucua

SEQ ID NO: 875580 - RNA, 19 nt, Artificial Sequence
  Description of Artificial Sequence: Synthetic oligonucleotide
cucgcccaaccaucucuau

SEQ ID NO: 875581 - RNA, 19 nt, Artificial Sequence
  Description of Artificial Sequence: Synthetic oligonucleotide
cugaucccgucugcccaaa

SEQ ID NO: 875582 - RNA, 19 nt, Artificial Sequence
  Description of Artificial Sequence: Synthetic oligonucleotide
ggauggaugugagcccaau

SEQ ID NO: 875583 - RNA, 19 nt, Artificial Sequence
  Description of Artificial Sequence: Synthetic oligonucleotide
ccuccucgcccaaccaucu

SEQ ID NO: 875584 - RNA, 19 nt, Artificial Sequence
  Description of Artificial Sequence: Synthetic oligonucleotide
cccaaaccucucucucucu

SEQ ID NO: 875585 - RNA, 19 nt, Artificial Sequence
  Description of Artificial Sequence: Synthetic oligonucleotide
gguaggggccacacccuuu

SEQ ID NO: 875586 - RNA, 19 nt, Artificial Sequence
  Description of Artificial Sequence: Synthetic oligonucleotide
cccuuauccucaggacaua

SEQ ID NO: 875587 - RNA, 19 nt, Artificial Sequence
  Description of Artificial Sequence: Synthetic oligonucleotide
cgccaaccuccccauccau

SEQ ID NO: 875588 - RNA, 19 nt, Artificial Sequence
  Description of Artificial Sequence: Synthetic oligonucleotide
aaugccuagaguuuucucc

SEQ ID NO: 875589 - RNA, 19 nt, Artificial Sequence
  Description of Artificial Sequence: Synthetic oligonucleotide
auaauuggagugcugauag

SEQ ID NO: 875590 - RNA, 19 nt, Artificial Sequence
  Description of Artificial Sequence: Synthetic oligonucleotide
aacucaguaggcguuaagc

SEQ ID NO: 875591 - RNA, 19 nt, Artificial Sequence
  Description of Artificial Sequence: Synthetic oligonucleotide
ucaucgauauggaugacag

SEQ ID NO: 875592 - RNA, 19 nt, Artificial Sequence
  Description of Artificial Sequence: Synthetic oligonucleotide
uaaacuaugugacgagagg

SEQ ID NO: 875593 - RNA, 19 nt, Artificial Sequence
  Description of Artificial Sequence: Synthetic oligonucleotide
uaagccagaauaaaagcug

SEQ ID NO: 875594 - RNA, 19 nt, Artificial Sequence
  Description of Artificial Sequence: Synthetic oligonucleotide
uucgugucgaagaucaggg

SEQ ID NO: 875595 - RNA, 19 nt, Artificial Sequence
  Description of Artificial Sequence: Synthetic oligonucleotide
acucaguaggcguuaagcc

SEQ ID NO: 875596 - RNA, 19 nt, Artificial Sequence
  Description of Artificial Sequence: Synthetic oligonucleotide
cauguauccuguuucagcc

SEQ ID NO: 875597 - RNA, 19 nt, Artificial Sequence
  Description of Artificial Sequence: Synthetic oligonucleotide
agcuugacaagaauaaagc

SEQ ID NO: 875598 - RNA, 19 nt, Artificial Sequence
  Description of Artificial Sequence: Synthetic oligonucleotide
ucaguaggcguuaagccag

SEQ ID NO: 875599 - RNA, 19 nt, Artificial Sequence
  Description of Artificial Sequence: Synthetic oligonucleotide
agagagcagcaucacaugc

SEQ ID NO: 875600 - RNA, 19 nt, Artificial Sequence
  Description of Artificial Sequence: Synthetic oligonucleotide
gauacgguccaauugguac

SEQ ID NO: 875601 - RNA, 19 nt, Artificial Sequence
  Description of Artificial Sequence: Synthetic oligonucleotide
auaauccgcaucgucaucc

SEQ ID NO: 875602 - RNA, 19 nt, Artificial Sequence
  Description of Artificial Sequence: Synthetic oligonucleotide
guuucagccgucuuuacag

SEQ ID NO: 875603 - RNA, 19 nt, Artificial Sequence
  Description of Artificial Sequence: Synthetic oligonucleotide
uaggcguuaagccagaaua

SEQ ID NO: 875604 - RNA, 19 nt, Artificial Sequence
  Description of Artificial Sequence: Synthetic oligonucleotide
aggacaaggagccaauauc

SEQ ID NO: 875605 - RNA, 19 nt, Artificial Sequence
  Description of Artificial Sequence: Synthetic oligonucleotide
acccuuuuaaacuccagag

SEQ ID NO: 875606 - RNA, 19 nt, Artificial Sequence
  Description of Artificial Sequence: Synthetic oligonucleotide
ugcucaucgauauggauga

SEQ ID NO: 875607 - RNA, 19 nt, Artificial Sequence
  Description of Artificial Sequence: Synthetic oligonucleotide
uugaugaugguuguucggg

SEQ ID NO: 875608 - RNA, 19 nt, Artificial Sequence
  Description of Artificial Sequence: Synthetic oligonucleotide
ugcuauaaacuaugugacg

SEQ ID NO: 875609 - RNA, 19 nt, Artificial Sequence
  Description of Artificial Sequence: Synthetic oligonucleotide
auuggaauucccaugauga

SEQ ID NO: 875610 - RNA, 19 nt, Artificial Sequence
  Description of Artificial Sequence: Synthetic oligonucleotide
uguucgggcagccucaaug

SEQ ID NO: 875611 - RNA, 19 nt, Artificial Sequence
  Description of Artificial Sequence: Synthetic oligonucleotide
agcucguucuuacugagag

SEQ ID NO: 875612 - RNA, 19 nt, Artificial Sequence
  Description of Artificial Sequence: Synthetic oligonucleotide
uagaguuuucuccaccuca

SEQ ID NO: 875613 - RNA, 19 nt, Artificial Sequence
  Description of Artificial Sequence: Synthetic oligonucleotide
uugaccaucguguacugga

SEQ ID NO: 875614 - RNA, 19 nt, Artificial Sequence
  Description of Artificial Sequence: Synthetic oligonucleotide
cagcuugacaagaauaaag

SEQ ID NO: 875615 - RNA, 19 nt, Artificial Sequence
  Description of Artificial Sequence: Synthetic oligonucleotide
ucaaagugaggcaaagauc

SEQ ID NO: 875616 - RNA, 19 nt, Artificial Sequence
  Description of Artificial Sequence: Synthetic oligonucleotide
cugcuauaaacuaugugac

SEQ ID NO: 875617 - RNA, 19 nt, Artificial Sequence
  Description of Artificial Sequence: Synthetic oligonucleotide
uuugauccguggcacaccc

SEQ ID NO: 875618 - RNA, 19 nt, Artificial Sequence
  Description of Artificial Sequence: Synthetic oligonucleotide
ugugacgagagggaugugg

SEQ ID NO: 875619 - RNA, 19 nt, Artificial Sequence
  Description of Artificial Sequence: Synthetic oligonucleotide
ucagguauggugaucuccu

SEQ ID NO: 875620 - RNA, 19 nt, Artificial Sequence
  Description of Artificial Sequence: Synthetic oligonucleotide
uucacucggagcuuggaug

SEQ ID NO: 875621 - RNA, 19 nt, Artificial Sequence
  Description of Artificial Sequence: Synthetic oligonucleotide
caggaagcugucuugacag

SEQ ID NO: 875622 - RNA, 19 nt, Artificial Sequence
  Description of Artificial Sequence: Synthetic oligonucleotide
uggauauacugcuuugaug

SEQ ID NO: 875623 - RNA, 19 nt, Artificial Sequence
  Description of Artificial Sequence: Synthetic oligonucleotide
gugcugauagccuuggaag

SEQ ID NO: 875624 - RNA, 19 nt, Artificial Sequence
  Description of Artificial Sequence: Synthetic oligonucleotide
gccaauaucagguauggug

SEQ ID NO: 875625 - RNA, 19 nt, Artificial Sequence
  Description of Artificial Sequence: Synthetic oligonucleotide
acauaauacauggagcucu

SEQ ID NO: 875626 - RNA, 19 nt, Artificial Sequence
  Description of Artificial Sequence: Synthetic oligonucleotide
cuuaaagagcccuguuccg

SEQ ID NO: 875627 - RNA, 19 nt, Artificial Sequence
  Description of Artificial Sequence: Synthetic oligonucleotide
cuauaaacuaugugacgag

SEQ ID NO: 875628 - RNA, 19 nt, Artificial Sequence
  Description of Artificial Sequence: Synthetic oligonucleotide
aauaucagguauggugauc

SEQ ID NO: 875629 - RNA, 19 nt, Artificial Sequence
  Description of Artificial Sequence: Synthetic oligonucleotide
aaccugguaauacccagga

SEQ ID NO: 875630 - RNA, 19 nt, Artificial Sequence
  Description of Artificial Sequence: Synthetic oligonucleotide
uggaguaccgcacugucuc

SEQ ID NO: 875631 - RNA, 19 nt, Artificial Sequence
  Description of Artificial Sequence: Synthetic oligonucleotide
gaugccauauuuaucucug

SEQ ID NO: 875632 - RNA, 19 nt, Artificial Sequence
  Description of Artificial Sequence: Synthetic oligonucleotide
uguauccuguuucagccgu

SEQ ID NO: 875633 - RNA, 19 nt, Artificial Sequence
  Description of Artificial Sequence: Synthetic oligonucleotide
uguuccgauguucauugga

SEQ ID NO: 875634 - RNA, 19 nt, Artificial Sequence
  Description of Artificial Sequence: Synthetic oligonucleotide
uauaaacuaugugacgaga

SEQ ID NO: 875635 - RNA, 19 nt, Artificial Sequence
  Description of Artificial Sequence: Synthetic oligonucleotide
caggaucuaagccaucucc

SEQ ID NO: 875636 - RNA, 19 nt, Artificial Sequence
  Description of Artificial Sequence: Synthetic oligonucleotide
cugcucaucgauauggaug

SEQ ID NO: 875637 - RNA, 19 nt, Artificial Sequence
  Description of Artificial Sequence: Synthetic oligonucleotide
uccguagaugaacuggaug

SEQ ID NO: 875638 - RNA, 19 nt, Artificial Sequence
  Description of Artificial Sequence: Synthetic oligonucleotide
ggauauacugcuuugaugu

SEQ ID NO: 875639 - RNA, 19 nt, Artificial Sequence
  Description of Artificial Sequence: Synthetic oligonucleotide
ucaggggucuccugggugg

SEQ ID NO: 875640 - RNA, 19 nt, Artificial Sequence
  Description of Artificial Sequence: Synthetic oligonucleotide
acaugccuccugucgaugc

SEQ ID NO: 875641 - RNA, 19 nt, Artificial Sequence
  Description of Artificial Sequence: Synthetic oligonucleotide
acagagugcacccacugca

SEQ ID NO: 875642 - RNA, 19 nt, Artificial Sequence
  Description of Artificial Sequence: Synthetic oligonucleotide
auaucagguauggugaucu

SEQ ID NO: 875643 - RNA, 19 nt, Artificial Sequence
  Description of Artificial Sequence: Synthetic oligonucleotide
uguuucagccgucuuuaca

SEQ ID NO: 875644 - RNA, 19 nt, Artificial Sequence
  Description of Artificial Sequence: Synthetic oligonucleotide
guugaugaugguuguucgg

SEQ ID NO: 875645 - RNA, 19 nt, Artificial Sequence
  Description of Artificial Sequence: Synthetic oligonucleotide
gaauucauucgugucgaag

SEQ ID NO: 875646 - RNA, 19 nt, Artificial Sequence
  Description of Artificial Sequence: Synthetic oligonucleotide
uccuccguagaugaacugg

SEQ ID NO: 875647 - RNA, 19 nt, Artificial Sequence
  Description of Artificial Sequence: Synthetic oligonucleotide
ggaauucccaugaugaugc

SEQ ID NO: 875648 - RNA, 19 nt, Artificial Sequence
  Description of Artificial Sequence: Synthetic oligonucleotide
caaaccugguaauacccag

SEQ ID NO: 875649 - RNA, 19 nt, Artificial Sequence
  Description of Artificial Sequence: Synthetic oligonucleotide
aguggucaaggugagcucg

SEQ ID NO: 875650 - RNA, 19 nt, Artificial Sequence
  Description of Artificial Sequence: Synthetic oligonucleotide
ucuagucucagaagucgga

SEQ ID NO: 875651 - RNA, 19 nt, Artificial Sequence
  Description of Artificial Sequence: Synthetic oligonucleotide
aaaccugguaauacccagg

SEQ ID NO: 875652 - RNA, 19 nt, Artificial Sequence
  Description of Artificial Sequence: Synthetic oligonucleotide
ugggauuccuuguaccacc

SEQ ID NO: 875653 - RNA, 19 nt, Artificial Sequence
  Description of Artificial Sequence: Synthetic oligonucleotide
ugugauaauuggagugcug

SEQ ID NO: 875654 - RNA, 19 nt, Artificial Sequence
  Description of Artificial Sequence: Synthetic oligonucleotide
gguuuugggucccuguugg

SEQ ID NO: 875655 - RNA, 19 nt, Artificial Sequence
  Description of Artificial Sequence: Synthetic oligonucleotide
ucaacaagacccucucgac

SEQ ID NO: 875656 - RNA, 19 nt, Artificial Sequence
  Description of Artificial Sequence: Synthetic oligonucleotide
aaacucaguaggcguuaag

SEQ ID NO: 875657 - RNA, 19 nt, Artificial Sequence
  Description of Artificial Sequence: Synthetic oligonucleotide
ucagaagucggauccguuc

SEQ ID NO: 875658 - RNA, 19 nt, Artificial Sequence
  Description of Artificial Sequence: Synthetic oligonucleotide
auauacugcuuugauguug

SEQ ID NO: 875659 - RNA, 19 nt, Artificial Sequence
  Description of Artificial Sequence: Synthetic oligonucleotide
ugaugaugguuguucgggc

SEQ ID NO: 875660 - RNA, 19 nt, Artificial Sequence
  Description of Artificial Sequence: Synthetic oligonucleotide
aagugaggcaaagaucugu

SEQ ID NO: 875661 - RNA, 19 nt, Artificial Sequence
  Description of Artificial Sequence: Synthetic oligonucleotide
ugagcucguucuuacugag

SEQ ID NO: 875662 - RNA, 19 nt, Artificial Sequence
  Description of Artificial Sequence: Synthetic oligonucleotide
cucuagucucagaagucgg

SEQ ID NO: 875663 - RNA, 19 nt, Artificial Sequence
  Description of Artificial Sequence: Synthetic oligonucleotide
uuauuggaagugguccggg

SEQ ID NO: 875664 - RNA, 19 nt, Artificial Sequence
  Description of Artificial Sequence: Synthetic oligonucleotide
ugauccguggcacacccaa

SEQ ID NO: 875665 - RNA, 19 nt, Artificial Sequence
  Description of Artificial Sequence: Synthetic oligonucleotide
aaauccuuuggcagcagga

SEQ ID NO: 875666 - RNA, 19 nt, Artificial Sequence
  Description of Artificial Sequence: Synthetic oligonucleotide
aagacccucucgaccagcc

SEQ ID NO: 875667 - RNA, 19 nt, Artificial Sequence
  Description of Artificial Sequence: Synthetic oligonucleotide
uguuuucucaaaggaggcc

SEQ ID NO: 875668 - RNA, 19 nt, Artificial Sequence
  Description of Artificial Sequence: Synthetic oligonucleotide
caacaagacccucucgacc

SEQ ID NO: 875669 - RNA, 19 nt, Artificial Sequence
  Description of Artificial Sequence: Synthetic oligonucleotide
ucacccuuguaagucauca

SEQ ID NO: 875670 - RNA, 19 nt, Artificial Sequence
  Description of Artificial Sequence: Synthetic oligonucleotide
auguauccuguuucagccg

SEQ ID NO: 875671 - RNA, 19 nt, Artificial Sequence
  Description of Artificial Sequence: Synthetic oligonucleotide
ucuccuccguagaugaacu

SEQ ID NO: 875672 - RNA, 19 nt, Artificial Sequence
  Description of Artificial Sequence: Synthetic oligonucleotide
ucacucggagcuuggaugu

SEQ ID NO: 875673 - RNA, 19 nt, Artificial Sequence
  Description of Artificial Sequence: Synthetic oligonucleotide
ugguuuugggucccuguug

SEQ ID NO: 875674 - RNA, 19 nt, Artificial Sequence
  Description of Artificial Sequence: Synthetic oligonucleotide
auacgguccaauugguaca

SEQ ID NO: 875675 - RNA, 19 nt, Artificial Sequence
  Description of Artificial Sequence: Synthetic oligonucleotide
cucagacaccccuuuaaug

SEQ ID NO: 875676 - RNA, 19 nt, Artificial Sequence
  Description of Artificial Sequence: Synthetic oligonucleotide
agggauuugaccagccuuc

SEQ ID NO: 875677 - RNA, 19 nt, Artificial Sequence
  Description of Artificial Sequence: Synthetic oligonucleotide
cguuaagccagaauaaaag

SEQ ID NO: 875678 - RNA, 19 nt, Artificial Sequence
  Description of Artificial Sequence: Synthetic oligonucleotide
ugacaagaauaaagcaguc

SEQ ID NO: 875679 - RNA, 19 nt, Artificial Sequence
  Description of Artificial Sequence: Synthetic oligonucleotide
uucucaaagugaggcaaag

SEQ ID NO: 875680 - RNA, 19 nt, Artificial Sequence
  Description of Artificial Sequence: Synthetic oligonucleotide
accgcauacagagucuuuc

SEQ ID NO: 875681 - RNA, 19 nt, Artificial Sequence
  Description of Artificial Sequence: Synthetic oligonucleotide
gcuauaaacuaugugacga

SEQ ID NO: 875682 - RNA, 19 nt, Artificial Sequence
  Description of Artificial Sequence: Synthetic oligonucleotide
aaagagcccuguuccgaug

SEQ ID NO: 875683 - RNA, 19 nt, Artificial Sequence
  Description of Artificial Sequence: Synthetic oligonucleotide
auacccaggacuucacccu

SEQ ID NO: 875684 - RNA, 19 nt, Artificial Sequence
  Description of Artificial Sequence: Synthetic oligonucleotide
gauguggaauucauucgug

SEQ ID NO: 875685 - RNA, 19 nt, Artificial Sequence
  Description of Artificial Sequence: Synthetic oligonucleotide
gauggaguaccgcacuguc

SEQ ID NO: 875686 - RNA, 19 nt, Artificial Sequence
  Description of Artificial Sequence: Synthetic oligonucleotide
guucgggcagccucaaugc

SEQ ID NO: 875687 - RNA, 19 nt, Artificial Sequence
  Description of Artificial Sequence: Synthetic oligonucleotide
auacugugagcagaggucu

SEQ ID NO: 875688 - RNA, 19 nt, Artificial Sequence
  Description of Artificial Sequence: Synthetic oligonucleotide
gacaaggagccaauaucag

SEQ ID NO: 875689 - RNA, 19 nt, Artificial Sequence
  Description of Artificial Sequence: Synthetic oligonucleotide
auucauucgugucgaagau

SEQ ID NO: 875690 - RNA, 19 nt, Artificial Sequence
  Description of Artificial Sequence: Synthetic oligonucleotide
cuaugugacgagagggaug

SEQ ID NO: 875691 - RNA, 19 nt, Artificial Sequence
  Description of Artificial Sequence: Synthetic oligonucleotide
cauucagcagcugacagga

SEQ ID NO: 875692 - RNA, 19 nt, Artificial Sequence
  Description of Artificial Sequence: Synthetic oligonucleotide
acuucacccuuguaaguca

SEQ ID NO: 875693 - RNA, 19 nt, Artificial Sequence
  Description of Artificial Sequence: Synthetic oligonucleotide
uccgauguucauuggaauu

SEQ ID NO: 875694 - RNA, 19 nt, Artificial Sequence
  Description of Artificial Sequence: Synthetic oligonucleotide
ucucgaccagccauugugu

SEQ ID NO: 875695 - RNA, 19 nt, Artificial Sequence
  Description of Artificial Sequence: Synthetic oligonucleotide
ucgugucgaagaucagggg

SEQ ID NO: 875696 - RNA, 19 nt, Artificial Sequence
  Description of Artificial Sequence: Synthetic oligonucleotide
ucgauauggaugacagcuc

SEQ ID NO: 875697 - RNA, 19 nt, Artificial Sequence
  Description of Artificial Sequence: Synthetic oligonucleotide
uaauuggagugcugauagc

SEQ ID NO: 875698 - RNA, 19 nt, Artificial Sequence
  Description of Artificial Sequence: Synthetic oligonucleotide
cuugugcaacagcuuaaag

SEQ ID NO: 875699 - RNA, 19 nt, Artificial Sequence
  Description of Artificial Sequence: Synthetic oligonucleotide
gauaauuggagugcugaua

SEQ ID NO: 875700 - RNA, 19 nt, Artificial Sequence
  Description of Artificial Sequence: Synthetic oligonucleotide
caucguguacuggaucucg

SEQ ID NO: 875701 - RNA, 19 nt, Artificial Sequence
  Description of Artificial Sequence: Synthetic oligonucleotide
gauagccuuggaagcauug

SEQ ID NO: 875702 - RNA, 19 nt, Artificial Sequence
  Description of Artificial Sequence: Synthetic oligonucleotide
ugcccucauguacuugucc

SEQ ID NO: 875703 - RNA, 19 nt, Artificial Sequence
  Description of Artificial Sequence: Synthetic oligonucleotide
uguacuggaucucguugau

SEQ ID NO: 875704 - RNA, 19 nt, Artificial Sequence
  Description of Artificial Sequence: Synthetic oligonucleotide
uacgguccaauugguacag

SEQ ID NO: 875705 - RNA, 19 nt, Artificial Sequence
  Description of Artificial Sequence: Synthetic oligonucleotide
caauugguacagcacacga

SEQ ID NO: 875706 - RNA, 19 nt, Artificial Sequence
  Description of Artificial Sequence: Synthetic oligonucleotide
ucgggcagccucaaugccu

SEQ ID NO: 875707 - RNA, 19 nt, Artificial Sequence
  Description of Artificial Sequence: Synthetic oligonucleotide
ugccauuaucauugaugcc

SEQ ID NO: 875708 - RNA, 19 nt, Artificial Sequence
  Description of Artificial Sequence: Synthetic oligonucleotide
gauguucauuggaauuccc

SEQ ID NO: 875709 - RNA, 19 nt, Artificial Sequence
  Description of Artificial Sequence: Synthetic oligonucleotide
ucgaccagccauuguguga

SEQ ID NO: 875710 - RNA, 19 nt, Artificial Sequence
  Description of Artificial Sequence: Synthetic oligonucleotide
uuggaauucccaugaugau

SEQ ID NO: 875711 - RNA, 19 nt, Artificial Sequence
  Description of Artificial Sequence: Synthetic oligonucleotide
ucugguacccgggagccac

SEQ ID NO: 875712 - RNA, 19 nt, Artificial Sequence
  Description of Artificial Sequence: Synthetic oligonucleotide
acuucucuauuuggguggg

SEQ ID NO: 875713 - RNA, 19 nt, Artificial Sequence
  Description of Artificial Sequence: Synthetic oligonucleotide
uggcggcaggaucuaagcc

SEQ ID NO: 875714 - RNA, 19 nt, Artificial Sequence
  Description of Artificial Sequence: Synthetic oligonucleotide
gcuugacaagaauaaagca

SEQ ID NO: 875715 - RNA, 19 nt, Artificial Sequence
  Description of Artificial Sequence: Synthetic oligonucleotide
gaugucaccaguggagcuc

SEQ ID NO: 875716 - RNA, 19 nt, Artificial Sequence
  Description of Artificial Sequence: Synthetic oligonucleotide
uagucucagaagucggauc

SEQ ID NO: 875717 - RNA, 19 nt, Artificial Sequence
  Description of Artificial Sequence: Synthetic oligonucleotide
ccuguuccgauguucauug

SEQ ID NO: 875718 - RNA, 19 nt, Artificial Sequence
  Description of Artificial Sequence: Synthetic oligonucleotide
uggguggccaugacugccc

SEQ ID NO: 875719 - RNA, 19 nt, Artificial Sequence
  Description of Artificial Sequence: Synthetic oligonucleotide
aaagugaggcaaagaucug

SEQ ID NO: 875720 - RNA, 19 nt, Artificial Sequence
  Description of Artificial Sequence: Synthetic oligonucleotide
agcuuugaaugcuucucaa

SEQ ID NO: 875721 - RNA, 19 nt, Artificial Sequence
  Description of Artificial Sequence: Synthetic oligonucleotide
gucaaggugagcucguucu

SEQ ID NO: 875722 - RNA, 19 nt, Artificial Sequence
  Description of Artificial Sequence: Synthetic oligonucleotide
uuccgauguucauuggaau

SEQ ID NO: 875723 - RNA, 19 nt, Artificial Sequence
  Description of Artificial Sequence: Synthetic oligonucleotide
caucgauauggaugacagc

SEQ ID NO: 875724 - RNA, 19 nt, Artificial Sequence
  Description of Artificial Sequence: Synthetic oligonucleotide
gaagaucaggggucuccug

SEQ ID NO: 875725 - RNA, 19 nt, Artificial Sequence
  Description of Artificial Sequence: Synthetic oligonucleotide
ggacaaggagccaauauca

SEQ ID NO: 875726 - RNA, 19 nt, Artificial Sequence
  Description of Artificial Sequence: Synthetic oligonucleotide
accaguggagcuccgcacu

SEQ ID NO: 875727 - RNA, 19 nt, Artificial Sequence
  Description of Artificial Sequence: Synthetic oligonucleotide
uugucuagcugugcuguga

SEQ ID NO: 875728 - RNA, 19 nt, Artificial Sequence
  Description of Artificial Sequence: Synthetic oligonucleotide
acuaugugacgagagggau

SEQ ID NO: 875729 - RNA, 19 nt, Artificial Sequence
  Description of Artificial Sequence: Synthetic oligonucleotide
gguaauacccaggacuuca

SEQ ID NO: 875730 - RNA, 19 nt, Artificial Sequence
  Description of Artificial Sequence: Synthetic oligonucleotide
aggaucuaagccaucuccu

SEQ ID NO: 875731 - RNA, 19 nt, Artificial Sequence
  Description of Artificial Sequence: Synthetic oligonucleotide
cuagaguuuucuccaccuc

SEQ ID NO: 875732 - RNA, 19 nt, Artificial Sequence
  Description of Artificial Sequence: Synthetic oligonucleotide
aggaagcuuugaaugcuuc

SEQ ID NO: 875733 - RNA, 19 nt, Artificial Sequence
  Description of Artificial Sequence: Synthetic oligonucleotide
agaagucggauccguucca

SEQ ID NO: 875734 - RNA, 19 nt, Artificial Sequence
  Description of Artificial Sequence: Synthetic oligonucleotide
uccgcaucgucauccuugu

SEQ ID NO: 875735 - RNA, 19 nt, Artificial Sequence
  Description of Artificial Sequence: Synthetic oligonucleotide
aucauugaugccauauuua

SEQ ID NO: 875736 - RNA, 19 nt, Artificial Sequence
  Description of Artificial Sequence: Synthetic oligonucleotide
acgagagggauguggaauu

SEQ ID NO: 875737 - RNA, 19 nt, Artificial Sequence
  Description of Artificial Sequence: Synthetic oligonucleotide
gggugauacgguccaauug

SEQ ID NO: 875738 - RNA, 19 nt, Artificial Sequence
  Description of Artificial Sequence: Synthetic oligonucleotide
ugaugguuguucgggcagc

SEQ ID NO: 875739 - RNA, 19 nt, Artificial Sequence
  Description of Artificial Sequence: Synthetic oligonucleotide
uauccuguuucagccgucu

SEQ ID NO: 875740 - RNA, 19 nt, Artificial Sequence
  Description of Artificial Sequence: Synthetic oligonucleotide
aaaacucaguaggcguuaa

SEQ ID NO: 875741 - RNA, 19 nt, Artificial Sequence
  Description of Artificial Sequence: Synthetic oligonucleotide
guccgggugccuuucacac

SEQ ID NO: 875742 - RNA, 19 nt, Artificial Sequence
  Description of Artificial Sequence: Synthetic oligonucleotide
gccagaauaaaagcuguug

SEQ ID NO: 875743 - RNA, 19 nt, Artificial Sequence
  Description of Artificial Sequence: Synthetic oligonucleotide
ugaccaucguguacuggau

SEQ ID NO: 875744 - RNA, 19 nt, Artificial Sequence
  Description of Artificial Sequence: Synthetic oligonucleotide
ccacaaauccuuuggcagc

SEQ ID NO: 875745 - RNA, 19 nt, Artificial Sequence
  Description of Artificial Sequence: Synthetic oligonucleotide
caggucauacugugagcag

SEQ ID NO: 875746 - RNA, 19 nt, Artificial Sequence
  Description of Artificial Sequence: Synthetic oligonucleotide
ugucgaagaucaggggucu

SEQ ID NO: 875747 - RNA, 19 nt, Artificial Sequence
  Description of Artificial Sequence: Synthetic oligonucleotide
uaccccugcaaaguggaaa

SEQ ID NO: 875748 - RNA, 19 nt, Artificial Sequence
  Description of Artificial Sequence: Synthetic oligonucleotide
uaauccgcaucgucauccu

SEQ ID NO: 875749 - RNA, 19 nt, Artificial Sequence
  Description of Artificial Sequence: Synthetic oligonucleotide
uccguggcacacccaaggu

SEQ ID NO: 875750 - RNA, 19 nt, Artificial Sequence
  Description of Artificial Sequence: Synthetic oligonucleotide
ggcauaauccgcaucguca

SEQ ID NO: 875751 - RNA, 19 nt, Artificial Sequence
  Description of Artificial Sequence: Synthetic oligonucleotide
gaguaccgcacugucucag

SEQ ID NO: 875752 - RNA, 19 nt, Artificial Sequence
  Description of Artificial Sequence: Synthetic oligonucleotide
agcacacgaggcucuguug

SEQ ID NO: 875753 - RNA, 19 nt, Artificial Sequence
  Description of Artificial Sequence: Synthetic oligonucleotide
cucgaccagccauugugug

SEQ ID NO: 875754 - RNA, 19 nt, Artificial Sequence
  Description of Artificial Sequence: Synthetic oligonucleotide
ccauucagcagcugacagg

SEQ ID NO: 875755 - RNA, 19 nt, Artificial Sequence
  Description of Artificial Sequence: Synthetic oligonucleotide
gcccucauguacuuguccc

SEQ ID NO: 875756 - RNA, 19 nt, Artificial Sequence
  Description of Artificial Sequence: Synthetic oligonucleotide
acaggcgaucaucugugau

SEQ ID NO: 875757 - RNA, 19 nt, Artificial Sequence
  Description of Artificial Sequence: Synthetic oligonucleotide
caacacacucuccuucauc

SEQ ID NO: 875758 - RNA, 19 nt, Artificial Sequence
  Description of Artificial Sequence: Synthetic oligonucleotide
gugucgaagaucagggguc

SEQ ID NO: 875759 - RNA, 19 nt, Artificial Sequence
  Description of Artificial Sequence: Synthetic oligonucleotide
acaagacccucucgaccag

SEQ ID NO: 875760 - RNA, 19 nt, Artificial Sequence
  Description of Artificial Sequence: Synthetic oligonucleotide
ucaaggugagcucguucuu

SEQ ID NO: 875761 - RNA, 19 nt, Artificial Sequence
  Description of Artificial Sequence: Synthetic oligonucleotide
cuuugauccguggcacacc

SEQ ID NO: 875762 - RNA, 19 nt, Artificial Sequence
  Description of Artificial Sequence: Synthetic oligonucleotide
caaaggaacucguucuucu

SEQ ID NO: 875763 - RNA, 19 nt, Artificial Sequence
  Description of Artificial Sequence: Synthetic oligonucleotide
guugaccaucguguacugg

SEQ ID NO: 875764 - RNA, 19 nt, Artificial Sequence
  Description of Artificial Sequence: Synthetic oligonucleotide
auaauacauggagcucuug

SEQ ID NO: 875765 - RNA, 19 nt, Artificial Sequence
  Description of Artificial Sequence: Synthetic oligonucleotide
auacugcuuugauguuguc

SEQ ID NO: 875766 - RNA, 19 nt, Artificial Sequence
  Description of Artificial Sequence: Synthetic oligonucleotide
cugugcugugauaauugga

SEQ ID NO: 875767 - RNA, 19 nt, Artificial Sequence
  Description of Artificial Sequence: Synthetic oligonucleotide
agaguuuucuccaccucau

SEQ ID NO: 875768 - RNA, 19 nt, Artificial Sequence
  Description of Artificial Sequence: Synthetic oligonucleotide
ugacgagagggauguggaa

SEQ ID NO: 875769 - RNA, 19 nt, Artificial Sequence
  Description of Artificial Sequence: Synthetic oligonucleotide
aggcuaccccugcaaagug

SEQ ID NO: 875770 - RNA, 19 nt, Artificial Sequence
  Description of Artificial Sequence: Synthetic oligonucleotide
gccaugguugaccaucgug

SEQ ID NO: 875771 - RNA, 19 nt, Artificial Sequence
  Description of Artificial Sequence: Synthetic oligonucleotide
ugccuagaguuuucuccac

SEQ ID NO: 875772 - RNA, 19 nt, Artificial Sequence
  Description of Artificial Sequence: Synthetic oligonucleotide
ucggagcuuggaugugcag

SEQ ID NO: 875773 - RNA, 19 nt, Artificial Sequence
  Description of Artificial Sequence: Synthetic oligonucleotide
cauagguguuauuggaagu

SEQ ID NO: 875774 - RNA, 19 nt, Artificial Sequence
  Description of Artificial Sequence: Synthetic oligonucleotide
cacacgaggcucuguugug

SEQ ID NO: 875775 - RNA, 19 nt, Artificial Sequence
  Description of Artificial Sequence: Synthetic oligonucleotide
ugauagccuuggaagcauu

SEQ ID NO: 875776 - RNA, 19 nt, Artificial Sequence
  Description of Artificial Sequence: Synthetic oligonucleotide
accgcacugucucagcauu

SEQ ID NO: 875777 - RNA, 19 nt, Artificial Sequence
  Description of Artificial Sequence: Synthetic oligonucleotide
uggugaucuccugcuauaa

SEQ ID NO: 875778 - RNA, 19 nt, Artificial Sequence
  Description of Artificial Sequence: Synthetic oligonucleotide
uucacccuuguaagucauc

SEQ ID NO: 875779 - RNA, 19 nt, Artificial Sequence
  Description of Artificial Sequence: Synthetic oligonucleotide
gucaucaggaagaaacacu

SEQ ID NO: 875780 - RNA, 19 nt, Artificial Sequence
  Description of Artificial Sequence: Synthetic oligonucleotide
cuguuccgauguucauugg

SEQ ID NO: 875781 - RNA, 19 nt, Artificial Sequence
  Description of Artificial Sequence: Synthetic oligonucleotide
gccugguuccaucugugcc

SEQ ID NO: 875782 - RNA, 19 nt, Artificial Sequence
  Description of Artificial Sequence: Synthetic oligonucleotide
uuacugagagcagguucac

SEQ ID NO: 875783 - RNA, 19 nt, Artificial Sequence
  Description of Artificial Sequence: Synthetic oligonucleotide
ggauguggaauucauucgu

SEQ ID NO: 875784 - RNA, 19 nt, Artificial Sequence
  Description of Artificial Sequence: Synthetic oligonucleotide
uccgggugccuuucacacc

SEQ ID NO: 875785 - RNA, 19 nt, Artificial Sequence
  Description of Artificial Sequence: Synthetic oligonucleotide
caccaguggagcuccgcac

SEQ ID NO: 875786 - RNA, 19 nt, Artificial Sequence
  Description of Artificial Sequence: Synthetic oligonucleotide
ucguguacuggaucucguu

SEQ ID NO: 875787 - RNA, 19 nt, Artificial Sequence
  Description of Artificial Sequence: Synthetic oligonucleotide
gugcaacagcuuaaagagc

SEQ ID NO: 875788 - RNA, 19 nt, Artificial Sequence
  Description of Artificial Sequence: Synthetic oligonucleotide
agugaggcaaagaucuguu

SEQ ID NO: 875789 - RNA, 19 nt, Artificial Sequence
  Description of Artificial Sequence: Synthetic oligonucleotide
gguauggugaucuccugcu

SEQ ID NO: 875790 - RNA, 19 nt, Artificial Sequence
  Description of Artificial Sequence: Synthetic oligonucleotide
ggccacaaauccuuuggca

SEQ ID NO: 875791 - RNA, 19 nt, Artificial Sequence
  Description of Artificial Sequence: Synthetic oligonucleotide
gugacgagagggaugugga

SEQ ID NO: 875792 - RNA, 19 nt, Artificial Sequence
  Description of Artificial Sequence: Synthetic oligonucleotide
guaccgcacugucucagca

SEQ ID NO: 875793 - RNA, 19 nt, Artificial Sequence
  Description of Artificial Sequence: Synthetic oligonucleotide
gucggauccguuccaggga

SEQ ID NO: 875794 - RNA, 19 nt, Artificial Sequence
  Description of Artificial Sequence: Synthetic oligonucleotide
gagcagguucacucugaca

SEQ ID NO: 875795 - RNA, 19 nt, Artificial Sequence
  Description of Artificial Sequence: Synthetic oligonucleotide
cagguauggugaucuccug

SEQ ID NO: 875796 - RNA, 19 nt, Artificial Sequence
  Description of Artificial Sequence: Synthetic oligonucleotide
uugauccguggcacaccca

SEQ ID NO: 875797 - RNA, 19 nt, Artificial Sequence
  Description of Artificial Sequence: Synthetic oligonucleotide
uaccgcacugucucagcau

SEQ ID NO: 875798 - RNA, 19 nt, Artificial Sequence
  Description of Artificial Sequence: Synthetic oligonucleotide
ggucauuugggugccuggc

SEQ ID NO: 875799 - RNA, 19 nt, Artificial Sequence
  Description of Artificial Sequence: Synthetic oligonucleotide
cacacaggcgaucaucugu

SEQ ID NO: 875800 - RNA, 19 nt, Artificial Sequence
  Description of Artificial Sequence: Synthetic oligonucleotide
aggcguuaagccagaauaa

SEQ ID NO: 875801 - RNA, 19 nt, Artificial Sequence
  Description of Artificial Sequence: Synthetic oligonucleotide
uacugagagcagguucacu

SEQ ID NO: 875802 - RNA, 19 nt, Artificial Sequence
  Description of Artificial Sequence: Synthetic oligonucleotide
uucuuacugagagcagguu

SEQ ID NO: 875803 - RNA, 19 nt, Artificial Sequence
  Description of Artificial Sequence: Synthetic oligonucleotide
gggauacaaaguucuucca

SEQ ID NO: 875804 - RNA, 19 nt, Artificial Sequence
  Description of Artificial Sequence: Synthetic oligonucleotide
gaggcuaccccugcaaagu

SEQ ID NO: 875805 - RNA, 19 nt, Artificial Sequence
  Description of Artificial Sequence: Synthetic oligonucleotide
agcccuguuccgauguuca

SEQ ID NO: 875806 - RNA, 19 nt, Artificial Sequence
  Description of Artificial Sequence: Synthetic oligonucleotide
gauauacugcuuugauguu

SEQ ID NO: 875807 - RNA, 19 nt, Artificial Sequence
  Description of Artificial Sequence: Synthetic oligonucleotide
acaccauggguggccauga

SEQ ID NO: 875808 - RNA, 19 nt, Artificial Sequence
  Description of Artificial Sequence: Synthetic oligonucleotide
auggaguaccgcacugucu

SEQ ID NO: 875809 - RNA, 19 nt, Artificial Sequence
  Description of Artificial Sequence: Synthetic oligonucleotide
ggcuaccccugcaaagugg

SEQ ID NO: 875810 - RNA, 19 nt, Artificial Sequence
  Description of Artificial Sequence: Synthetic oligonucleotide
acgguccaauugguacagc

SEQ ID NO: 875811 - RNA, 19 nt, Artificial Sequence
  Description of Artificial Sequence: Synthetic oligonucleotide
ucgccaggcuucacucgga

SEQ ID NO: 875812 - RNA, 19 nt, Artificial Sequence
  Description of Artificial Sequence: Synthetic oligonucleotide
cuccauggcggcaggaucu

SEQ ID NO: 875813 - RNA, 19 nt, Artificial Sequence
  Description of Artificial Sequence: Synthetic oligonucleotide
cuacuagaagcuugaacuu

SEQ ID NO: 875814 - RNA, 19 nt, Artificial Sequence
  Description of Artificial Sequence: Synthetic oligonucleotide
gcugauagccuuggaagca

SEQ ID NO: 875815 - RNA, 19 nt, Artificial Sequence
  Description of Artificial Sequence: Synthetic oligonucleotide
guucuuacugagagcaggu

SEQ ID NO: 875816 - RNA, 19 nt, Artificial Sequence
  Description of Artificial Sequence: Synthetic oligonucleotide
cagacacaccgcauacaga

SEQ ID NO: 875817 - RNA, 19 nt, Artificial Sequence
  Description of Artificial Sequence: Synthetic oligonucleotide
ugacugcccgcagauuguc

SEQ ID NO: 875818 - RNA, 19 nt, Artificial Sequence
  Description of Artificial Sequence: Synthetic oligonucleotide
ugccaugguugaccaucgu

SEQ ID NO: 875819 - RNA, 19 nt, Artificial Sequence
  Description of Artificial Sequence: Synthetic oligonucleotide
gcucguucuuacugagagc

SEQ ID NO: 875820 - RNA, 19 nt, Artificial Sequence
  Description of Artificial Sequence: Synthetic oligonucleotide
ccaugguugaccaucgugu

SEQ ID NO: 875821 - RNA, 19 nt, Artificial Sequence
  Description of Artificial Sequence: Synthetic oligonucleotide
gaucucguugaugaugguu

SEQ ID NO: 875822 - RNA, 19 nt, Artificial Sequence
  Description of Artificial Sequence: Synthetic oligonucleotide
ggucaaggugagcucguuc

SEQ ID NO: 875823 - RNA, 19 nt, Artificial Sequence
  Description of Artificial Sequence: Synthetic oligonucleotide
agacccucucgaccagcca

SEQ ID NO: 875824 - RNA, 19 nt, Artificial Sequence
  Description of Artificial Sequence: Synthetic oligonucleotide
ccauauuuaucucugguuu

SEQ ID NO: 875825 - RNA, 19 nt, Artificial Sequence
  Description of Artificial Sequence: Synthetic oligonucleotide
aucguguacuggaucucgu

SEQ ID NO: 875826 - RNA, 19 nt, Artificial Sequence
  Description of Artificial Sequence: Synthetic oligonucleotide
cugagagcagguucacucu

SEQ ID NO: 875827 - RNA, 19 nt, Artificial Sequence
  Description of Artificial Sequence: Synthetic oligonucleotide
uggcacacccaaggugaug

SEQ ID NO: 875828 - RNA, 19 nt, Artificial Sequence
  Description of Artificial Sequence: Synthetic oligonucleotide
ggaagcuuugaaugcuucu

SEQ ID NO: 875829 - RNA, 19 nt, Artificial Sequence
  Description of Artificial Sequence: Synthetic oligonucleotide
ugguacccgggagccacug

SEQ ID NO: 875830 - RNA, 19 nt, Artificial Sequence
  Description of Artificial Sequence: Synthetic oligonucleotide
ccagccauugugugaaaga

SEQ ID NO: 875831 - RNA, 19 nt, Artificial Sequence
  Description of Artificial Sequence: Synthetic oligonucleotide
caauaucagguauggugau

SEQ ID NO: 875832 - RNA, 19 nt, Artificial Sequence
  Description of Artificial Sequence: Synthetic oligonucleotide
acaccgcauacagagucuu

SEQ ID NO: 875833 - RNA, 19 nt, Artificial Sequence
  Description of Artificial Sequence: Synthetic oligonucleotide
agccaauaucagguauggu

SEQ ID NO: 875834 - RNA, 19 nt, Artificial Sequence
  Description of Artificial Sequence: Synthetic oligonucleotide
cugggugguuuuggguccc

SEQ ID NO: 875835 - RNA, 19 nt, Artificial Sequence
  Description of Artificial Sequence: Synthetic oligonucleotide
ccuccguagaugaacugga

SEQ ID NO: 875836 - RNA, 19 nt, Artificial Sequence
  Description of Artificial Sequence: Synthetic oligonucleotide
gcguuaagccagaauaaaa

SEQ ID NO: 875837 - RNA, 19 nt, Artificial Sequence
  Description of Artificial Sequence: Synthetic oligonucleotide
ggauuugaccagccuucuc

SEQ ID NO: 875838 - RNA, 19 nt, Artificial Sequence
  Description of Artificial Sequence: Synthetic oligonucleotide
gcuaccccugcaaagugga

SEQ ID NO: 875839 - RNA, 19 nt, Artificial Sequence
  Description of Artificial Sequence: Synthetic oligonucleotide
guacccgggagccacugau

SEQ ID NO: 875840 - RNA, 19 nt, Artificial Sequence
  Description of Artificial Sequence: Synthetic oligonucleotide
guaggcguuaagccagaau

SEQ ID NO: 875841 - RNA, 19 nt, Artificial Sequence
  Description of Artificial Sequence: Synthetic oligonucleotide
gcacacgaggcucuguugu

SEQ ID NO: 875842 - RNA, 19 nt, Artificial Sequence
  Description of Artificial Sequence: Synthetic oligonucleotide
ccucugggauuccuuguac

SEQ ID NO: 875843 - RNA, 19 nt, Artificial Sequence
  Description of Artificial Sequence: Synthetic oligonucleotide
ggauuccuuguaccaccac

SEQ ID NO: 875844 - RNA, 19 nt, Artificial Sequence
  Description of Artificial Sequence: Synthetic oligonucleotide
agccgucuuuacagcagug

SEQ ID NO: 875845 - RNA, 19 nt, Artificial Sequence
  Description of Artificial Sequence: Synthetic oligonucleotide
cuagucucagaagucggau

SEQ ID NO: 875846 - RNA, 19 nt, Artificial Sequence
  Description of Artificial Sequence: Synthetic oligonucleotide
ccgggugccuuucacacca

SEQ ID NO: 875847 - RNA, 19 nt, Artificial Sequence
  Description of Artificial Sequence: Synthetic oligonucleotide
gugguuuugggucccuguu

SEQ ID NO: 875848 - RNA, 19 nt, Artificial Sequence
  Description of Artificial Sequence: Synthetic oligonucleotide
gacugcccgcagauuguca

SEQ ID NO: 875849 - RNA, 19 nt, Artificial Sequence
  Description of Artificial Sequence: Synthetic oligonucleotide
ugcccaaaguaggcagcau

SEQ ID NO: 875850 - RNA, 19 nt, Artificial Sequence
  Description of Artificial Sequence: Synthetic oligonucleotide
ccguggcacacccaaggug

SEQ ID NO: 875851 - RNA, 19 nt, Artificial Sequence
  Description of Artificial Sequence: Synthetic oligonucleotide
ucacaccauggguggccau

SEQ ID NO: 875852 - RNA, 19 nt, Artificial Sequence
  Description of Artificial Sequence: Synthetic oligonucleotide
cacaccgcauacagagucu

SEQ ID NO: 875853 - RNA, 19 nt, Artificial Sequence
  Description of Artificial Sequence: Synthetic oligonucleotide
ggaguaccgcacugucuca

SEQ ID NO: 875854 - RNA, 19 nt, Artificial Sequence
  Description of Artificial Sequence: Synthetic oligonucleotide
cuucacccuuguaagucau

SEQ ID NO: 875855 - RNA, 19 nt, Artificial Sequence
  Description of Artificial Sequence: Synthetic oligonucleotide
caccauggguggccaugac

SEQ ID NO: 875856 - RNA, 19 nt, Artificial Sequence
  Description of Artificial Sequence: Synthetic oligonucleotide
cccgcagauugucaccuuc

SEQ ID NO: 875857 - RNA, 19 nt, Artificial Sequence
  Description of Artificial Sequence: Synthetic oligonucleotide
cuagcugugcugugauaau

SEQ ID NO: 875858 - RNA, 19 nt, Artificial Sequence
  Description of Artificial Sequence: Synthetic oligonucleotide
cugucccacacaggcgauc

SEQ ID NO: 875859 - RNA, 19 nt, Artificial Sequence
  Description of Artificial Sequence: Synthetic oligonucleotide
gggauuccuuguaccacca

SEQ ID NO: 875860 - RNA, 19 nt, Artificial Sequence
  Description of Artificial Sequence: Synthetic oligonucleotide
ccuccugucgaugcucaug

SEQ ID NO: 875861 - RNA, 19 nt, Artificial Sequence
  Description of Artificial Sequence: Synthetic oligonucleotide
gucuagcugugcugugaua

SEQ ID NO: 875862 - RNA, 19 nt, Artificial Sequence
  Description of Artificial Sequence: Synthetic oligonucleotide
ccacacaggcgaucaucug

SEQ ID NO: 875863 - RNA, 19 nt, Artificial Sequence
  Description of Artificial Sequence: Synthetic oligonucleotide
gcuguuggccacaaauccu

SEQ ID NO: 875864 - RNA, 19 nt, Artificial Sequence
  Description of Artificial Sequence: Synthetic oligonucleotide
gaagugguccgggugccuu

SEQ ID NO: 875865 - RNA, 19 nt, Artificial Sequence
  Description of Artificial Sequence: Synthetic oligonucleotide
cuaccccugcaaaguggaa

SEQ ID NO: 875866 - RNA, 19 nt, Artificial Sequence
  Description of Artificial Sequence: Synthetic oligonucleotide
cgugucgaagaucaggggu

SEQ ID NO: 875867 - RNA, 19 nt, Artificial Sequence
  Description of Artificial Sequence: Synthetic oligonucleotide
guuguucgggcagccucaa

SEQ ID NO: 875868 - RNA, 19 nt, Artificial Sequence
  Description of Artificial Sequence: Synthetic oligonucleotide
gucgaagaucaggggucuc

SEQ ID NO: 875869 - RNA, 19 nt, Artificial Sequence
  Description of Artificial Sequence: Synthetic oligonucleotide
caccccuuuaaugaauguu

SEQ ID NO: 875870 - RNA, 19 nt, Artificial Sequence
  Description of Artificial Sequence: Synthetic oligonucleotide
cugauagccuuggaagcau

SEQ ID NO: 875871 - RNA, 19 nt, Artificial Sequence
  Description of Artificial Sequence: Synthetic oligonucleotide
gacaccucugggauuccuu

SEQ ID NO: 875872 - RNA, 19 nt, Artificial Sequence
  Description of Artificial Sequence: Synthetic oligonucleotide
cucagaagucggauccguu

SEQ ID NO: 875873 - RNA, 19 nt, Artificial Sequence
  Description of Artificial Sequence: Synthetic oligonucleotide
gguacccgggagccacuga

SEQ ID NO: 875874 - RNA, 19 nt, Artificial Sequence
  Description of Artificial Sequence: Synthetic oligonucleotide
cuuucaccaggcgggcaua

SEQ ID NO: 875875 - RNA, 19 nt, Artificial Sequence
  Description of Artificial Sequence: Synthetic oligonucleotide
ccuugugcaacagcuuaaa

SEQ ID NO: 875876 - RNA, 19 nt, Artificial Sequence
  Description of Artificial Sequence: Synthetic oligonucleotide
cagcacacgaggcucuguu

SEQ ID NO: 875877 - RNA, 19 nt, Artificial Sequence
  Description of Artificial Sequence: Synthetic oligonucleotide
ccaucguguacuggaucuc

SEQ ID NO: 875878 - RNA, 19 nt, Artificial Sequence
  Description of Artificial Sequence: Synthetic oligonucleotide
gggugguuuugggucccug

SEQ ID NO: 875879 - RNA, 19 nt, Artificial Sequence
  Description of Artificial Sequence: Synthetic oligonucleotide
guggucaaggugagcucgu

SEQ ID NO: 875880 - RNA, 19 nt, Artificial Sequence
  Description of Artificial Sequence: Synthetic oligonucleotide
cggagcuuggaugugcaga

SEQ ID NO: 875881 - RNA, 19 nt, Artificial Sequence
  Description of Artificial Sequence: Synthetic oligonucleotide
gggauuugaccagccuucu

SEQ ID NO: 875882 - RNA, 19 nt, Artificial Sequence
  Description of Artificial Sequence: Synthetic oligonucleotide
ccgcauacagagucuuucu

SEQ ID NO: 875883 - RNA, 19 nt, Artificial Sequence
  Description of Artificial Sequence: Synthetic oligonucleotide
ggcaucuguccaagggaua

SEQ ID NO: 875884 - RNA, 19 nt, Artificial Sequence
  Description of Artificial Sequence: Synthetic oligonucleotide
cgagagggauguggaauuc

SEQ ID NO: 875885 - RNA, 19 nt, Artificial Sequence
  Description of Artificial Sequence: Synthetic oligonucleotide
cccucucgaccagccauug

SEQ ID NO: 875886 - RNA, 19 nt, Artificial Sequence
  Description of Artificial Sequence: Synthetic oligonucleotide
ccgcagauugucaccuucu

SEQ ID NO: 875887 - RNA, 19 nt, Artificial Sequence
  Description of Artificial Sequence: Synthetic oligonucleotide
caguggagcuccgcacugu

SEQ ID NO: 875888 - RNA, 19 nt, Artificial Sequence
  Description of Artificial Sequence: Synthetic oligonucleotide
cugguacccgggagccacu

SEQ ID NO: 875889 - RNA, 19 nt, Artificial Sequence
  Description of Artificial Sequence: Synthetic oligonucleotide
cgcagauugucaccuucua

SEQ ID NO: 875890 - RNA, 19 nt, Artificial Sequence
  Description of Artificial Sequence: Synthetic oligonucleotide
ggacaccucugggauuccu

SEQ ID NO: 875891 - RNA, 19 nt, Artificial Sequence
  Description of Artificial Sequence: Synthetic oligonucleotide
gcccuguuccgauguucau

SEQ ID NO: 875892 - RNA, 19 nt, Artificial Sequence
  Description of Artificial Sequence: Synthetic oligonucleotide
ccucucgaccagccauugu

SEQ ID NO: 875893 - RNA, 19 nt, Artificial Sequence
  Description of Artificial Sequence: Synthetic oligonucleotide
gcccgcagauugucaccuu

SEQ ID NO: 875894 - RNA, 19 nt, Artificial Sequence
  Description of Artificial Sequence: Synthetic oligonucleotide
aaaggauuaguuuaugucc

SEQ ID NO: 875895 - RNA, 19 nt, Artificial Sequence
  Description of Artificial Sequence: Synthetic oligonucleotide
aaacaugaaaguuucgguc

SEQ ID NO: 875896 - RNA, 19 nt, Artificial Sequence
  Description of Artificial Sequence: Synthetic oligonucleotide
aaaguuucggucuuuacug

SEQ ID NO: 875897 - RNA, 19 nt, Artificial Sequence
  Description of Artificial Sequence: Synthetic oligonucleotide
aagagugucaugcagccac

SEQ ID NO: 875898 - RNA, 19 nt, Artificial Sequence
  Description of Artificial Sequence: Synthetic oligonucleotide
uauuaguaauuccugacag

SEQ ID NO: 875899 - RNA, 19 nt, Artificial Sequence
  Description of Artificial Sequence: Synthetic oligonucleotide
aaauccaccuaacaguguc

SEQ ID NO: 875900 - RNA, 19 nt, Artificial Sequence
  Description of Artificial Sequence: Synthetic oligonucleotide
ucagaguaaagacacauca

SEQ ID NO: 875901 - RNA, 19 nt, Artificial Sequence
  Description of Artificial Sequence: Synthetic oligonucleotide
uuauguccaaguaacaugc

SEQ ID NO: 875902 - RNA, 19 nt, Artificial Sequence
  Description of Artificial Sequence: Synthetic oligonucleotide
ucaauuagggcuuuugugc

SEQ ID NO: 875903 - RNA, 19 nt, Artificial Sequence
  Description of Artificial Sequence: Synthetic oligonucleotide
uuaaaucuucaucugauga

SEQ ID NO: 875904 - RNA, 19 nt, Artificial Sequence
  Description of Artificial Sequence: Synthetic oligonucleotide
ucugaaguuaucuugacaa

SEQ ID NO: 875905 - RNA, 19 nt, Artificial Sequence
  Description of Artificial Sequence: Synthetic oligonucleotide
uaauaguuaauaaggaagu

SEQ ID NO: 875906 - RNA, 19 nt, Artificial Sequence
  Description of Artificial Sequence: Synthetic oligonucleotide
cuuaaagacagcgagauac

SEQ ID NO: 875907 - RNA, 19 nt, Artificial Sequence
  Description of Artificial Sequence: Synthetic oligonucleotide
uuagguucuuucuaaaugc

SEQ ID NO: 875908 - RNA, 19 nt, Artificial Sequence
  Description of Artificial Sequence: Synthetic oligonucleotide
uugaauaagucaaugcagc

SEQ ID NO: 875909 - RNA, 19 nt, Artificial Sequence
  Description of Artificial Sequence: Synthetic oligonucleotide
ucuauguugagcauguagu

SEQ ID NO: 875910 - RNA, 19 nt, Artificial Sequence
  Description of Artificial Sequence: Synthetic oligonucleotide
cuuuguaggagcaggaggg

SEQ ID NO: 875911 - RNA, 19 nt, Artificial Sequence
  Description of Artificial Sequence: Synthetic oligonucleotide
aacaugaaaguuucggucu

SEQ ID NO: 875912 - RNA, 19 nt, Artificial Sequence
  Description of Artificial Sequence: Synthetic oligonucleotide
uuuauguccaaguaacaug

SEQ ID NO: 875913 - RNA, 19 nt, Artificial Sequence
  Description of Artificial Sequence: Synthetic oligonucleotide
aaagcuauuucuuuugcaa

SEQ ID NO: 875914 - RNA, 19 nt, Artificial Sequence
  Description of Artificial Sequence: Synthetic oligonucleotide
uuugaauucucauagucaa

SEQ ID NO: 875915 - RNA, 19 nt, Artificial Sequence
  Description of Artificial Sequence: Synthetic oligonucleotide
uaguuuauguccaaguaac

SEQ ID NO: 875916 - RNA, 19 nt, Artificial Sequence
  Description of Artificial Sequence: Synthetic oligonucleotide
aacuagucaaagcuauuuc

SEQ ID NO: 875917 - RNA, 19 nt, Artificial Sequence
  Description of Artificial Sequence: Synthetic oligonucleotide
uuauuaguaauuccugaca

SEQ ID NO: 875918 - RNA, 19 nt, Artificial Sequence
  Description of Artificial Sequence: Synthetic oligonucleotide
uuauaucccagucacaaaa

SEQ ID NO: 875919 - RNA, 19 nt, Artificial Sequence
  Description of Artificial Sequence: Synthetic oligonucleotide
uuuauuaguaauuccugac

SEQ ID NO: 875920 - RNA, 19 nt, Artificial Sequence
  Description of Artificial Sequence: Synthetic oligonucleotide
aaucuguuagauucuaccu

SEQ ID NO: 875921 - RNA, 19 nt, Artificial Sequence
  Description of Artificial Sequence: Synthetic oligonucleotide
uguaagagugucaugcagc

SEQ ID NO: 875922 - RNA, 19 nt, Artificial Sequence
  Description of Artificial Sequence: Synthetic oligonucleotide
aaagacuucaugggaagac

SEQ ID NO: 875923 - RNA, 19 nt, Artificial Sequence
  Description of Artificial Sequence: Synthetic oligonucleotide
uucuguaagagugucaugc

SEQ ID NO: 875924 - RNA, 19 nt, Artificial Sequence
  Description of Artificial Sequence: Synthetic oligonucleotide
aguuaucuugacaagaggg

SEQ ID NO: 875925 - RNA, 19 nt, Artificial Sequence
  Description of Artificial Sequence: Synthetic oligonucleotide
uuaaacuagucaaagcuau

SEQ ID NO: 875926 - RNA, 19 nt, Artificial Sequence
  Description of Artificial Sequence: Synthetic oligonucleotide
auaguuaauaaggaaguuc

SEQ ID NO: 875927 - RNA, 19 nt, Artificial Sequence
  Description of Artificial Sequence: Synthetic oligonucleotide
aaguuaucuugacaagagg

SEQ ID NO: 875928 - RNA, 19 nt, Artificial Sequence
  Description of Artificial Sequence: Synthetic oligonucleotide
uguaauaguuaauaaggaa

SEQ ID NO: 875929 - RNA, 19 nt, Artificial Sequence
  Description of Artificial Sequence: Synthetic oligonucleotide
uguuugaauucucauaguc

SEQ ID NO: 875930 - RNA, 19 nt, Artificial Sequence
  Description of Artificial Sequence: Synthetic oligonucleotide
uuguaauaguuaauaagga

SEQ ID NO: 875931 - RNA, 19 nt, Artificial Sequence
  Description of Artificial Sequence: Synthetic oligonucleotide
gcaauagugauuuaugugc

SEQ ID NO: 875932 - RNA, 19 nt, Artificial Sequence
  Description of Artificial Sequence: Synthetic oligonucleotide
aaagccgcugaagaaagac

SEQ ID NO: 875933 - RNA, 19 nt, Artificial Sequence
  Description of Artificial Sequence: Synthetic oligonucleotide
ugagcauguaguaucggag

SEQ ID NO: 875934 - RNA, 19 nt, Artificial Sequence
  Description of Artificial Sequence: Synthetic oligonucleotide
gagugcaucggguaugucg

SEQ ID NO: 875935 - RNA, 19 nt, Artificial Sequence
  Description of Artificial Sequence: Synthetic oligonucleotide
uuuugugcgucuguaaagg

SEQ ID NO: 875936 - RNA, 19 nt, Artificial Sequence
  Description of Artificial Sequence: Synthetic oligonucleotide
uguugagcauguaguaucg

SEQ ID NO: 875937 - RNA, 19 nt, Artificial Sequence
  Description of Artificial Sequence: Synthetic oligonucleotide
uugucauagauccuucacc

SEQ ID NO: 875938 - RNA, 19 nt, Artificial Sequence
  Description of Artificial Sequence: Synthetic oligonucleotide
uaaaggagauccuuugcag

SEQ ID NO: 875939 - RNA, 19 nt, Artificial Sequence
  Description of Artificial Sequence: Synthetic oligonucleotide
aacaugguuaaauguuaag

SEQ ID NO: 875940 - RNA, 19 nt, Artificial Sequence
  Description of Artificial Sequence: Synthetic oligonucleotide
ucuuucacugagugcaucg

SEQ ID NO: 875941 - RNA, 19 nt, Artificial Sequence
  Description of Artificial Sequence: Synthetic oligonucleotide
ugcaauagugauuuaugug

SEQ ID NO: 875942 - RNA, 19 nt, Artificial Sequence
  Description of Artificial Sequence: Synthetic oligonucleotide
ucuguuagauucuaccuac

SEQ ID NO: 875943 - RNA, 19 nt, Artificial Sequence
  Description of Artificial Sequence: Synthetic oligonucleotide
auucuaccuacuuugaggu

SEQ ID NO: 875944 - RNA, 19 nt, Artificial Sequence
  Description of Artificial Sequence: Synthetic oligonucleotide
uuuaaaucuucaucugaug

SEQ ID NO: 875945 - RNA, 19 nt, Artificial Sequence
  Description of Artificial Sequence: Synthetic oligonucleotide
aaagggugcauaaagacaa

SEQ ID NO: 875946 - RNA, 19 nt, Artificial Sequence
  Description of Artificial Sequence: Synthetic oligonucleotide
ucggucuuuacugagaaca

SEQ ID NO: 875947 - RNA, 19 nt, Artificial Sequence
  Description of Artificial Sequence: Synthetic oligonucleotide
uucaaauagcucugcaacc

SEQ ID NO: 875948 - RNA, 19 nt, Artificial Sequence
  Description of Artificial Sequence: Synthetic oligonucleotide
uaugcaagcaggcugcagu

SEQ ID NO: 875949 - RNA, 19 nt, Artificial Sequence
  Description of Artificial Sequence: Synthetic oligonucleotide
ucauagauccuucaccuuc

SEQ ID NO: 875950 - RNA, 19 nt, Artificial Sequence
  Description of Artificial Sequence: Synthetic oligonucleotide
uuuuccgccuaacacuuag

SEQ ID NO: 875951 - RNA, 19 nt, Artificial Sequence
  Description of Artificial Sequence: Synthetic oligonucleotide
uuaucuugacaagagggag

SEQ ID NO: 875952 - RNA, 19 nt, Artificial Sequence
  Description of Artificial Sequence: Synthetic oligonucleotide
aagcaguuaccauuuguug

SEQ ID NO: 875953 - RNA, 19 nt, Artificial Sequence
  Description of Artificial Sequence: Synthetic oligonucleotide
ccgccuaacacuuagaucc

SEQ ID NO: 875954 - RNA, 19 nt, Artificial Sequence
  Description of Artificial Sequence: Synthetic oligonucleotide
aaagacaaaugagaucuug

SEQ ID NO: 875955 - RNA, 19 nt, Artificial Sequence
  Description of Artificial Sequence: Synthetic oligonucleotide
uguacaagcaucugaaguu

SEQ ID NO: 875956 - RNA, 19 nt, Artificial Sequence
  Description of Artificial Sequence: Synthetic oligonucleotide
uucaugggaagacacaguc

SEQ ID NO: 875957 - RNA, 19 nt, Artificial Sequence
  Description of Artificial Sequence: Synthetic oligonucleotide
gguaugucgaucugaagcg

SEQ ID NO: 875958 - RNA, 19 nt, Artificial Sequence
  Description of Artificial Sequence: Synthetic oligonucleotide
agauucagaaagcugcuca

SEQ ID NO: 875959 - RNA, 19 nt, Artificial Sequence
  Description of Artificial Sequence: Synthetic oligonucleotide
cuuuacugagaacagggug

SEQ ID NO: 875960 - RNA, 19 nt, Artificial Sequence
  Description of Artificial Sequence: Synthetic oligonucleotide
uacuuguacaagcaucuga

SEQ ID NO: 875961 - RNA, 19 nt, Artificial Sequence
  Description of Artificial Sequence: Synthetic oligonucleotide
aacccuagauuuuccuuuc

SEQ ID NO: 875962 - RNA, 19 nt, Artificial Sequence
  Description of Artificial Sequence: Synthetic oligonucleotide
uccgcuugaaguuuaccag

SEQ ID NO: 875963 - RNA, 19 nt, Artificial Sequence
  Description of Artificial Sequence: Synthetic oligonucleotide
cuguaaagggugcauaaag

SEQ ID NO: 875964 - RNA, 19 nt, Artificial Sequence
  Description of Artificial Sequence: Synthetic oligonucleotide
aauaagcccggcauaaucu

SEQ ID NO: 875965 - RNA, 19 nt, Artificial Sequence
  Description of Artificial Sequence: Synthetic oligonucleotide
ugagacucgaccuuccacu

SEQ ID NO: 875966 - RNA, 19 nt, Artificial Sequence
  Description of Artificial Sequence: Synthetic oligonucleotide
ugagguauuaaaugcuuaa

SEQ ID NO: 875967 - RNA, 19 nt, Artificial Sequence
  Description of Artificial Sequence: Synthetic oligonucleotide
agcaguuaccauuuguugu

SEQ ID NO: 875968 - RNA, 19 nt, Artificial Sequence
  Description of Artificial Sequence: Synthetic oligonucleotide
agcaauuauaucccaguca

SEQ ID NO: 875969 - RNA, 19 nt, Artificial Sequence
  Description of Artificial Sequence: Synthetic oligonucleotide
uguccaaguaacaugcaau

SEQ ID NO: 875970 - RNA, 19 nt, Artificial Sequence
  Description of Artificial Sequence: Synthetic oligonucleotide
uaauaagcccggcauaauc

SEQ ID NO: 875971 - RNA, 19 nt, Artificial Sequence
  Description of Artificial Sequence: Synthetic oligonucleotide
ugaauaagucaaugcagcu

SEQ ID NO: 875972 - RNA, 19 nt, Artificial Sequence
  Description of Artificial Sequence: Synthetic oligonucleotide
uuccgcuugaaguuuacca

SEQ ID NO: 875973 - RNA, 19 nt, Artificial Sequence
  Description of Artificial Sequence: Synthetic oligonucleotide
ggguaugucgaucugaagc

SEQ ID NO: 875974 - RNA, 19 nt, Artificial Sequence
  Description of Artificial Sequence: Synthetic oligonucleotide
agacacagaucucagcuug

SEQ ID NO: 875975 - RNA, 19 nt, Artificial Sequence
  Description of Artificial Sequence: Synthetic oligonucleotide
uguuguaauuggcaccuga

SEQ ID NO: 875976 - RNA, 19 nt, Artificial Sequence
  Description of Artificial Sequence: Synthetic oligonucleotide
agggugagaagaaagccgc

SEQ ID NO: 875977 - RNA, 19 nt, Artificial Sequence
  Description of Artificial Sequence: Synthetic oligonucleotide
gcaauuauaucccagucac

SEQ ID NO: 875978 - RNA, 19 nt, Artificial Sequence
  Description of Artificial Sequence: Synthetic oligonucleotide
cagggugagaagaaagccg

SEQ ID NO: 875979 - RNA, 19 nt, Artificial Sequence
  Description of Artificial Sequence: Synthetic oligonucleotide
acucucuuccgcuugaagu

SEQ ID NO: 875980 - RNA, 19 nt, Artificial Sequence
  Description of Artificial Sequence: Synthetic oligonucleotide
uuuaaccgggccuugucca

SEQ ID NO: 875981 - RNA, 19 nt, Artificial Sequence
  Description of Artificial Sequence: Synthetic oligonucleotide
aaggauuaguuuaugucca

SEQ ID NO: 875982 - RNA, 19 nt, Artificial Sequence
  Description of Artificial Sequence: Synthetic oligonucleotide
auagugauuuaugugcaag

SEQ ID NO: 875983 - RNA, 19 nt, Artificial Sequence
  Description of Artificial Sequence: Synthetic oligonucleotide
cuuuugugcgucuguaaag

SEQ ID NO: 875984 - RNA, 19 nt, Artificial Sequence
  Description of Artificial Sequence: Synthetic oligonucleotide
uaucuugacaagagggagu

SEQ ID NO: 875985 - RNA, 19 nt, Artificial Sequence
  Description of Artificial Sequence: Synthetic oligonucleotide
guaauuggcaccugacaug

SEQ ID NO: 875986 - RNA, 19 nt, Artificial Sequence
  Description of Artificial Sequence: Synthetic oligonucleotide
auuaguaauuccugacagu

SEQ ID NO: 875987 - RNA, 19 nt, Artificial Sequence
  Description of Artificial Sequence: Synthetic oligonucleotide
uaauuggcaccugacaugu

SEQ ID NO: 875988 - RNA, 19 nt, Artificial Sequence
  Description of Artificial Sequence: Synthetic oligonucleotide
gaaaguuucggucuuuacu

SEQ ID NO: 875989 - RNA, 19 nt, Artificial Sequence
  Description of Artificial Sequence: Synthetic oligonucleotide
ucuaccuacuuugagguau

SEQ ID NO: 875990 - RNA, 19 nt, Artificial Sequence
  Description of Artificial Sequence: Synthetic oligonucleotide
augagacucgaccuuccac

SEQ ID NO: 875991 - RNA, 19 nt, Artificial Sequence
  Description of Artificial Sequence: Synthetic oligonucleotide
agauucuaccuacuuugag

SEQ ID NO: 875992 - RNA, 19 nt, Artificial Sequence
  Description of Artificial Sequence: Synthetic oligonucleotide
uuucggucuuuacugagaa

SEQ ID NO: 875993 - RNA, 19 nt, Artificial Sequence
  Description of Artificial Sequence: Synthetic oligonucleotide
aggagggauaauaagcccg

SEQ ID NO: 875994 - RNA, 19 nt, Artificial Sequence
  Description of Artificial Sequence: Synthetic oligonucleotide
agugauuuaugugcaagug

SEQ ID NO: 875995 - RNA, 19 nt, Artificial Sequence
  Description of Artificial Sequence: Synthetic oligonucleotide
guauucuucagaguaaaga

SEQ ID NO: 875996 - RNA, 19 nt, Artificial Sequence
  Description of Artificial Sequence: Synthetic oligonucleotide
augguuaaauguuaagauu

SEQ ID NO: 875997 - RNA, 19 nt, Artificial Sequence
  Description of Artificial Sequence: Synthetic oligonucleotide
gaacagggugagaagaaag

SEQ ID NO: 875998 - RNA, 19 nt, Artificial Sequence
  Description of Artificial Sequence: Synthetic oligonucleotide
ucuuuacugagaacagggu

SEQ ID NO: 875999 - RNA, 19 nt, Artificial Sequence
  Description of Artificial Sequence: Synthetic oligonucleotide
aaagacagcgagauacuca

SEQ ID NO: 876000 - RNA, 19 nt, Artificial Sequence
  Description of Artificial Sequence: Synthetic oligonucleotide
ugucgaucugaagcgaagg

SEQ ID NO: 876001 - RNA, 19 nt, Artificial Sequence
  Description of Artificial Sequence: Synthetic oligonucleotide
ucauagucaauuagggcuu

SEQ ID NO: 876002 - RNA, 19 nt, Artificial Sequence
  Description of Artificial Sequence: Synthetic oligonucleotide
cuugauccuguuguaauag

SEQ ID NO: 876003 - RNA, 19 nt, Artificial Sequence
  Description of Artificial Sequence: Synthetic oligonucleotide
cauguaguaucggaggagc

SEQ ID NO: 876004 - RNA, 19 nt, Artificial Sequence
  Description of Artificial Sequence: Synthetic oligonucleotide
agucaauuagggcuuuugu

SEQ ID NO: 876005 - RNA, 19 nt, Artificial Sequence
  Description of Artificial Sequence: Synthetic oligonucleotide
ucagggagugucagaaccc

SEQ ID NO: 876006 - RNA, 19 nt, Artificial Sequence
  Description of Artificial Sequence: Synthetic oligonucleotide
cucugcaaccuucaauagg

SEQ ID NO: 876007 - RNA, 19 nt, Artificial Sequence
  Description of Artificial Sequence: Synthetic oligonucleotide
ucuucaugcugccuuguaa

SEQ ID NO: 876008 - RNA, 19 nt, Artificial Sequence
  Description of Artificial Sequence: Synthetic oligonucleotide
aauuagggcuuuugugcgu

SEQ ID NO: 876009 - RNA, 19 nt, Artificial Sequence
  Description of Artificial Sequence: Synthetic oligonucleotide
aauaguuaauaaggaaguu

SEQ ID NO: 876010 - RNA, 19 nt, Artificial Sequence
  Description of Artificial Sequence: Synthetic oligonucleotide
gaauaagucaaugcagcuc

SEQ ID NO: 876011 - RNA, 19 nt, Artificial Sequence
  Description of Artificial Sequence: Synthetic oligonucleotide
gacauuguuucuggcaugc

SEQ ID NO: 876012 - RNA, 19 nt, Artificial Sequence
  Description of Artificial Sequence: Synthetic oligonucleotide
uaacacuuagauccugauc

SEQ ID NO: 876013 - RNA, 19 nt, Artificial Sequence
  Description of Artificial Sequence: Synthetic oligonucleotide
ucuguaagagugucaugca

SEQ ID NO: 876014 - RNA, 19 nt, Artificial Sequence
  Description of Artificial Sequence: Synthetic oligonucleotide
uguuagauucuaccuacuu

SEQ ID NO: 876015 - RNA, 19 nt, Artificial Sequence
  Description of Artificial Sequence: Synthetic oligonucleotide
aaguuucggucuuuacuga

SEQ ID NO: 876016 - RNA, 19 nt, Artificial Sequence
  Description of Artificial Sequence: Synthetic oligonucleotide
guguacuguaaacuugacc

SEQ ID NO: 876017 - RNA, 19 nt, Artificial Sequence
  Description of Artificial Sequence: Synthetic oligonucleotide
gucgaucugaagcgaaggg

SEQ ID NO: 876018 - RNA, 19 nt, Artificial Sequence
  Description of Artificial Sequence: Synthetic oligonucleotide
uucagaguaaagacacauc

SEQ ID NO: 876019 - RNA, 19 nt, Artificial Sequence
  Description of Artificial Sequence: Synthetic oligonucleotide
ugauccuguuguaauaguu

SEQ ID NO: 876020 - RNA, 19 nt, Artificial Sequence
  Description of Artificial Sequence: Synthetic oligonucleotide
uaguaauuccugacagucu

SEQ ID NO: 876021 - RNA, 19 nt, Artificial Sequence
  Description of Artificial Sequence: Synthetic oligonucleotide
ucuauaggagaaucuguua

SEQ ID NO: 876022 - RNA, 19 nt, Artificial Sequence
  Description of Artificial Sequence: Synthetic oligonucleotide
uugacaagagggaguaaaa

SEQ ID NO: 876023 - RNA, 19 nt, Artificial Sequence
  Description of Artificial Sequence: Synthetic oligonucleotide
auaagcccggcauaaucug

SEQ ID NO: 876024 - RNA, 19 nt, Artificial Sequence
  Description of Artificial Sequence: Synthetic oligonucleotide
agauccugaucauauucca

SEQ ID NO: 876025 - RNA, 19 nt, Artificial Sequence
  Description of Artificial Sequence: Synthetic oligonucleotide
uagauucuaccuacuuuga

SEQ ID NO: 876026 - RNA, 19 nt, Artificial Sequence
  Description of Artificial Sequence: Synthetic oligonucleotide
agggccaucgaagucuggc

SEQ ID NO: 876027 - RNA, 19 nt, Artificial Sequence
  Description of Artificial Sequence: Synthetic oligonucleotide
ugccuuguaacagaaaauu

SEQ ID NO: 876028 - RNA, 19 nt, Artificial Sequence
  Description of Artificial Sequence: Synthetic oligonucleotide
gagaagaaagccgcugaag

SEQ ID NO: 876029 - RNA, 19 nt, Artificial Sequence
  Description of Artificial Sequence: Synthetic oligonucleotide
ucaugcugccuuguaacag

SEQ ID NO: 876030 - RNA, 19 nt, Artificial Sequence
  Description of Artificial Sequence: Synthetic oligonucleotide
uaugucgaucugaagcgaa

SEQ ID NO: 876031 - RNA, 19 nt, Artificial Sequence
  Description of Artificial Sequence: Synthetic oligonucleotide
cagaucucagcuugcugcg

SEQ ID NO: 876032 - RNA, 19 nt, Artificial Sequence
  Description of Artificial Sequence: Synthetic oligonucleotide
aucuguuagauucuaccua

SEQ ID NO: 876033 - RNA, 19 nt, Artificial Sequence
  Description of Artificial Sequence: Synthetic oligonucleotide
gcacaggaauccuugaucc

SEQ ID NO: 876034 - RNA, 19 nt, Artificial Sequence
  Description of Artificial Sequence: Synthetic oligonucleotide
gcgucuguaaaggagaucc

SEQ ID NO: 876035 - RNA, 19 nt, Artificial Sequence
  Description of Artificial Sequence: Synthetic oligonucleotide
caaguaacaugcaaugaaa

SEQ ID NO: 876036 - RNA, 19 nt, Artificial Sequence
  Description of Artificial Sequence: Synthetic oligonucleotide
acaggaauccuugauccug

SEQ ID NO: 876037 - RNA, 19 nt, Artificial Sequence
  Description of Artificial Sequence: Synthetic oligonucleotide
uugaaguuuaccaguucuu

SEQ ID NO: 876038 - RNA, 19 nt, Artificial Sequence
  Description of Artificial Sequence: Synthetic oligonucleotide
ugcuccagcaacucgggaa

SEQ ID NO: 876039 - RNA, 19 nt, Artificial Sequence
  Description of Artificial Sequence: Synthetic oligonucleotide
uuuccccucaagcaauuau

SEQ ID NO: 876040 - RNA, 19 nt, Artificial Sequence
  Description of Artificial Sequence: Synthetic oligonucleotide
uauguugagcauguaguau

SEQ ID NO: 876041 - RNA, 19 nt, Artificial Sequence
  Description of Artificial Sequence: Synthetic oligonucleotide
gucaugcagccacacaaag

SEQ ID NO: 876042 - RNA, 19 nt, Artificial Sequence
  Description of Artificial Sequence: Synthetic oligonucleotide
acuuagauccugaucauau

SEQ ID NO: 876043 - RNA, 19 nt, Artificial Sequence
  Description of Artificial Sequence: Synthetic oligonucleotide
ugaaaguuucggucuuuac

SEQ ID NO: 876044 - RNA, 19 nt, Artificial Sequence
  Description of Artificial Sequence: Synthetic oligonucleotide
acuuguacaagcaucugaa

SEQ ID NO: 876045 - RNA, 19 nt, Artificial Sequence
  Description of Artificial Sequence: Synthetic oligonucleotide
caucaguuguucuugaaua

SEQ ID NO: 876046 - RNA, 19 nt, Artificial Sequence
  Description of Artificial Sequence: Synthetic oligonucleotide
agggauaauaagcccggca

SEQ ID NO: 876047 - RNA, 19 nt, Artificial Sequence
  Description of Artificial Sequence: Synthetic oligonucleotide
gacucgaccuuccacuuuc

SEQ ID NO: 876048 - RNA, 19 nt, Artificial Sequence
  Description of Artificial Sequence: Synthetic oligonucleotide
acuugaccuuaucucuuuc

SEQ ID NO: 876049 - RNA, 19 nt, Artificial Sequence
  Description of Artificial Sequence: Synthetic oligonucleotide
gacagcgagauacucagcu

SEQ ID NO: 876050 - RNA, 19 nt, Artificial Sequence
  Description of Artificial Sequence: Synthetic oligonucleotide
uuccgccuaacacuuagau

SEQ ID NO: 876051 - RNA, 19 nt, Artificial Sequence
  Description of Artificial Sequence: Synthetic oligonucleotide
uuccccucaagcaauuaua

SEQ ID NO: 876052 - RNA, 19 nt, Artificial Sequence
  Description of Artificial Sequence: Synthetic oligonucleotide
caggagggauaauaagccc

SEQ ID NO: 876053 - RNA, 19 nt, Artificial Sequence
  Description of Artificial Sequence: Synthetic oligonucleotide
ugguguguacuguaaacuu

SEQ ID NO: 876054 - RNA, 19 nt, Artificial Sequence
  Description of Artificial Sequence: Synthetic oligonucleotide
uuagcacaggaauccuuga

SEQ ID NO: 876055 - RNA, 19 nt, Artificial Sequence
  Description of Artificial Sequence: Synthetic oligonucleotide
uguaguaucggaggagcuc

SEQ ID NO: 876056 - RNA, 19 nt, Artificial Sequence
  Description of Artificial Sequence: Synthetic oligonucleotide
ucgaucugaagcgaagggu

SEQ ID NO: 876057 - RNA, 19 nt, Artificial Sequence
  Description of Artificial Sequence: Synthetic oligonucleotide
acccuagauuuuccuuucc

SEQ ID NO: 876058 - RNA, 19 nt, Artificial Sequence
  Description of Artificial Sequence: Synthetic oligonucleotide
ucggguaugucgaucugaa

SEQ ID NO: 876059 - RNA, 19 nt, Artificial Sequence
  Description of Artificial Sequence: Synthetic oligonucleotide
gauucagaaagcugcucaa

SEQ ID NO: 876060 - RNA, 19 nt, Artificial Sequence
  Description of Artificial Sequence: Synthetic oligonucleotide
uccccucaagcaauuauau

SEQ ID NO: 876061 - RNA, 19 nt, Artificial Sequence
  Description of Artificial Sequence: Synthetic oligonucleotide
aacuugaccuuaucucuuu

SEQ ID NO: 876062 - RNA, 19 nt, Artificial Sequence
  Description of Artificial Sequence: Synthetic oligonucleotide
gacagucuauaggagaauc

SEQ ID NO: 876063 - RNA, 19 nt, Artificial Sequence
  Description of Artificial Sequence: Synthetic oligonucleotide
ccaccaaacaucucuuugg

SEQ ID NO: 876064 - RNA, 19 nt, Artificial Sequence
  Description of Artificial Sequence: Synthetic oligonucleotide
ccuagauuuuccuuucccc

SEQ ID NO: 876065 - RNA, 19 nt, Artificial Sequence
  Description of Artificial Sequence: Synthetic oligonucleotide
gccaacuugacaucuuugc

SEQ ID NO: 876066 - RNA, 19 nt, Artificial Sequence
  Description of Artificial Sequence: Synthetic oligonucleotide
ccucaagcaauuauauccc

SEQ ID NO: 876067 - RNA, 19 nt, Artificial Sequence
  Description of Artificial Sequence: Synthetic oligonucleotide
ugacauguuuggaggggca

SEQ ID NO: 876068 - RNA, 19 nt, Artificial Sequence
  Description of Artificial Sequence: Synthetic oligonucleotide
agugcaucggguaugucga

SEQ ID NO: 876069 - RNA, 19 nt, Artificial Sequence
  Description of Artificial Sequence: Synthetic oligonucleotide
ucgaccuuccacuuuccuc

SEQ ID NO: 876070 - RNA, 19 nt, Artificial Sequence
  Description of Artificial Sequence: Synthetic oligonucleotide
cagcgagauacucagcuuc

SEQ ID NO: 876071 - RNA, 19 nt, Artificial Sequence
  Description of Artificial Sequence: Synthetic oligonucleotide
uaaagacagcgagauacuc

SEQ ID NO: 876072 - RNA, 19 nt, Artificial Sequence
  Description of Artificial Sequence: Synthetic oligonucleotide
ucaucugaugagacucgac

SEQ ID NO: 876073 - RNA, 19 nt, Artificial Sequence
  Description of Artificial Sequence: Synthetic oligonucleotide
cugacagucuauaggagaa

SEQ ID NO: 876074 - RNA, 19 nt, Artificial Sequence
  Description of Artificial Sequence: Synthetic oligonucleotide
ucucgagggccaucgaagu

SEQ ID NO: 876075 - RNA, 19 nt, Artificial Sequence
  Description of Artificial Sequence: Synthetic oligonucleotide
uugauccuguuguaauagu

SEQ ID NO: 876076 - RNA, 19 nt, Artificial Sequence
  Description of Artificial Sequence: Synthetic oligonucleotide
uaagcccggcauaaucugu

SEQ ID NO: 876077 - RNA, 19 nt, Artificial Sequence
  Description of Artificial Sequence: Synthetic oligonucleotide
accaacaugguuaaauguu

SEQ ID NO: 876078 - RNA, 19 nt, Artificial Sequence
  Description of Artificial Sequence: Synthetic oligonucleotide
aaccgggccuuguccaaag

SEQ ID NO: 876079 - RNA, 19 nt, Artificial Sequence
  Description of Artificial Sequence: Synthetic oligonucleotide
agaacccuagauuuuccuu

SEQ ID NO: 876080 - RNA, 19 nt, Artificial Sequence
  Description of Artificial Sequence: Synthetic oligonucleotide
agucuauaggagaaucugu

SEQ ID NO: 876081 - RNA, 19 nt, Artificial Sequence
  Description of Artificial Sequence: Synthetic oligonucleotide
auaccauuuauuaguaauu

SEQ ID NO: 876082 - RNA, 19 nt, Artificial Sequence
  Description of Artificial Sequence: Synthetic oligonucleotide
cacauugguauucuucaga

SEQ ID NO: 876083 - RNA, 19 nt, Artificial Sequence
  Description of Artificial Sequence: Synthetic oligonucleotide
gcaggagggauaauaagcc

SEQ ID NO: 876084 - RNA, 19 nt, Artificial Sequence
  Description of Artificial Sequence: Synthetic oligonucleotide
cuagauuuuccuuuccccu

SEQ ID NO: 876085 - RNA, 19 nt, Artificial Sequence
  Description of Artificial Sequence: Synthetic oligonucleotide
aguuuaccaguucuucuuu

SEQ ID NO: 876086 - RNA, 19 nt, Artificial Sequence
  Description of Artificial Sequence: Synthetic oligonucleotide
uccgccuaacacuuagauc

SEQ ID NO: 876087 - RNA, 19 nt, Artificial Sequence
  Description of Artificial Sequence: Synthetic oligonucleotide
cuugaccuuaucucuuuca

SEQ ID NO: 876088 - RNA, 19 nt, Artificial Sequence
  Description of Artificial Sequence: Synthetic oligonucleotide
cugacauguuuggaggggc

SEQ ID NO: 876089 - RNA, 19 nt, Artificial Sequence
  Description of Artificial Sequence: Synthetic oligonucleotide
agagggagacauuguuucu

SEQ ID NO: 876090 - RNA, 19 nt, Artificial Sequence
  Description of Artificial Sequence: Synthetic oligonucleotide
uagcacaggaauccuugau

SEQ ID NO: 876091 - RNA, 19 nt, Artificial Sequence
  Description of Artificial Sequence: Synthetic oligonucleotide
uuacuuguacaagcaucug

SEQ ID NO: 876092 - RNA, 19 nt, Artificial Sequence
  Description of Artificial Sequence: Synthetic oligonucleotide
ggagggauaauaagcccgg

SEQ ID NO: 876093 - RNA, 19 nt, Artificial Sequence
  Description of Artificial Sequence: Synthetic oligonucleotide
aauccaccuaacagugucu

SEQ ID NO: 876094 - RNA, 19 nt, Artificial Sequence
  Description of Artificial Sequence: Synthetic oligonucleotide
aacucgggaaccgcggcca

SEQ ID NO: 876095 - RNA, 19 nt, Artificial Sequence
  Description of Artificial Sequence: Synthetic oligonucleotide
ugucagaacccuagauuuu

SEQ ID NO: 876096 - RNA, 19 nt, Artificial Sequence
  Description of Artificial Sequence: Synthetic oligonucleotide
guaucggaggagcucugug

SEQ ID NO: 876097 - RNA, 19 nt, Artificial Sequence
  Description of Artificial Sequence: Synthetic oligonucleotide
cagcaacucgggaaccgcg

SEQ ID NO: 876098 - RNA, 19 nt, Artificial Sequence
  Description of Artificial Sequence: Synthetic oligonucleotide
cuauguugagcauguagua

SEQ ID NO: 876099 - RNA, 19 nt, Artificial Sequence
  Description of Artificial Sequence: Synthetic oligonucleotide
ggucuuuacugagaacagg

SEQ ID NO: 876100 - RNA, 19 nt, Artificial Sequence
  Description of Artificial Sequence: Synthetic oligonucleotide
uuuccgccuaacacuuaga

SEQ ID NO: 876101 - RNA, 19 nt, Artificial Sequence
  Description of Artificial Sequence: Synthetic oligonucleotide
uccaccuaacagugucugc

SEQ ID NO: 876102 - RNA, 19 nt, Artificial Sequence
  Description of Artificial Sequence: Synthetic oligonucleotide
ccuacuuugagguauuaaa

SEQ ID NO: 876103 - RNA, 19 nt, Artificial Sequence
  Description of Artificial Sequence: Synthetic oligonucleotide
gucagaacccuagauuuuc

SEQ ID NO: 876104 - RNA, 19 nt, Artificial Sequence
  Description of Artificial Sequence: Synthetic oligonucleotide
acaugaaaguuucggucuu

SEQ ID NO: 876105 - RNA, 19 nt, Artificial Sequence
  Description of Artificial Sequence: Synthetic oligonucleotide
gaacccuagauuuuccuuu

SEQ ID NO: 876106 - RNA, 19 nt, Artificial Sequence
  Description of Artificial Sequence: Synthetic oligonucleotide
gacaaaugagaucuugcuu

SEQ ID NO: 876107 - RNA, 19 nt, Artificial Sequence
  Description of Artificial Sequence: Synthetic oligonucleotide
gguguguacuguaaacuug

SEQ ID NO: 876108 - RNA, 19 nt, Artificial Sequence
  Description of Artificial Sequence: Synthetic oligonucleotide
gaugagacucgaccuucca

SEQ ID NO: 876109 - RNA, 19 nt, Artificial Sequence
  Description of Artificial Sequence: Synthetic oligonucleotide
accuuaucucuuucacuga

SEQ ID NO: 876110 - RNA, 19 nt, Artificial Sequence
  Description of Artificial Sequence: Synthetic oligonucleotide
cacaugccccaccaucagg

SEQ ID NO: 876111 - RNA, 19 nt, Artificial Sequence
  Description of Artificial Sequence: Synthetic oligonucleotide
agcaacucgggaaccgcgg

SEQ ID NO: 876112 - RNA, 19 nt, Artificial Sequence
  Description of Artificial Sequence: Synthetic oligonucleotide
gaagcgaagggucaacauu

SEQ ID NO: 876113 - RNA, 19 nt, Artificial Sequence
  Description of Artificial Sequence: Synthetic oligonucleotide
uuaaccgggccuuguccaa

SEQ ID NO: 876114 - RNA, 19 nt, Artificial Sequence
  Description of Artificial Sequence: Synthetic oligonucleotide
guuuauguccaaguaacau

SEQ ID NO: 876115 - RNA, 19 nt, Artificial Sequence
  Description of Artificial Sequence: Synthetic oligonucleotide
gggugcauaaagacaaaug

SEQ ID NO: 876116 - RNA, 19 nt, Artificial Sequence
  Description of Artificial Sequence: Synthetic oligonucleotide
ucugaagcgaagggucaac

SEQ ID NO: 876117 - RNA, 19 nt, Artificial Sequence
  Description of Artificial Sequence: Synthetic oligonucleotide
uaguaucggaggagcucug

SEQ ID NO: 876118 - RNA, 19 nt, Artificial Sequence
  Description of Artificial Sequence: Synthetic oligonucleotide
ccaccuaacagugucugcc

SEQ ID NO: 876119 - RNA, 19 nt, Artificial Sequence
  Description of Artificial Sequence: Synthetic oligonucleotide
ugcccacaagcaguuacca

SEQ ID NO: 876120 - RNA, 19 nt, Artificial Sequence
  Description of Artificial Sequence: Synthetic oligonucleotide
gacuguggguucuucuaaa

SEQ ID NO: 876121 - RNA, 19 nt, Artificial Sequence
  Description of Artificial Sequence: Synthetic oligonucleotide
acuguaaagggugcauaaa

SEQ ID NO: 876122 - RNA, 19 nt, Artificial Sequence
  Description of Artificial Sequence: Synthetic oligonucleotide
accgggccuuguccaaagc

SEQ ID NO: 876123 - RNA, 19 nt, Artificial Sequence
  Description of Artificial Sequence: Synthetic oligonucleotide
uucggucuuuacugagaac

SEQ ID NO: 876124 - RNA, 19 nt, Artificial Sequence
  Description of Artificial Sequence: Synthetic oligonucleotide
ccaaguaacaugcaaugaa

SEQ ID NO: 876125 - RNA, 19 nt, Artificial Sequence
  Description of Artificial Sequence: Synthetic oligonucleotide
augucgaucugaagcgaag

SEQ ID NO: 876126 - RNA, 19 nt, Artificial Sequence
  Description of Artificial Sequence: Synthetic oligonucleotide
aucggguaugucgaucuga

SEQ ID NO: 876127 - RNA, 19 nt, Artificial Sequence
  Description of Artificial Sequence: Synthetic oligonucleotide
ggcuaugcaagcaggcugc

SEQ ID NO: 876128 - RNA, 19 nt, Artificial Sequence
  Description of Artificial Sequence: Synthetic oligonucleotide
caagcaucugaaguuaucu

SEQ ID NO: 876129 - RNA, 19 nt, Artificial Sequence
  Description of Artificial Sequence: Synthetic oligonucleotide
agggcuuuugugcgucugu

SEQ ID NO: 876130 - RNA, 19 nt, Artificial Sequence
  Description of Artificial Sequence: Synthetic oligonucleotide
caagcaguuaccauuuguu

SEQ ID NO: 876131 - RNA, 19 nt, Artificial Sequence
  Description of Artificial Sequence: Synthetic oligonucleotide
acagcgagauacucagcuu

SEQ ID NO: 876132 - RNA, 19 nt, Artificial Sequence
  Description of Artificial Sequence: Synthetic oligonucleotide
gcuuuugugcgucuguaaa

SEQ ID NO: 876133 - RNA, 19 nt, Artificial Sequence
  Description of Artificial Sequence: Synthetic oligonucleotide
gccacacaaagucuucaug

SEQ ID NO: 876134 - RNA, 19 nt, Artificial Sequence
  Description of Artificial Sequence: Synthetic oligonucleotide
gcaguuaccauuuguugua

SEQ ID NO: 876135 - RNA, 19 nt, Artificial Sequence
  Description of Artificial Sequence: Synthetic oligonucleotide
cauagauccuucaccuucu

SEQ ID NO: 876136 - RNA, 19 nt, Artificial Sequence
  Description of Artificial Sequence: Synthetic oligonucleotide
cccuagauuuuccuuuccc

SEQ ID NO: 876137 - RNA, 19 nt, Artificial Sequence
  Description of Artificial Sequence: Synthetic oligonucleotide
cuuccgcuugaaguuuacc

SEQ ID NO: 876138 - RNA, 19 nt, Artificial Sequence
  Description of Artificial Sequence: Synthetic oligonucleotide
guacaagcaucugaaguua

SEQ ID NO: 876139 - RNA, 19 nt, Artificial Sequence
  Description of Artificial Sequence: Synthetic oligonucleotide
auaauaagcccggcauaau

SEQ ID NO: 876140 - RNA, 19 nt, Artificial Sequence
  Description of Artificial Sequence: Synthetic oligonucleotide
gggauaauaagcccggcau

SEQ ID NO: 876141 - RNA, 19 nt, Artificial Sequence
  Description of Artificial Sequence: Synthetic oligonucleotide
ccugacagucuauaggaga

SEQ ID NO: 876142 - RNA, 19 nt, Artificial Sequence
  Description of Artificial Sequence: Synthetic oligonucleotide
agcccggcauaaucuguug

SEQ ID NO: 876143 - RNA, 19 nt, Artificial Sequence
  Description of Artificial Sequence: Synthetic oligonucleotide
acucgaccuuccacuuucc

SEQ ID NO: 876144 - RNA, 19 nt, Artificial Sequence
  Description of Artificial Sequence: Synthetic oligonucleotide
uagggcuuuugugcgucug

SEQ ID NO: 876145 - RNA, 19 nt, Artificial Sequence
  Description of Artificial Sequence: Synthetic oligonucleotide
caggaaauguugagacaga

SEQ ID NO: 876146 - RNA, 19 nt, Artificial Sequence
  Description of Artificial Sequence: Synthetic oligonucleotide
gcauguaguaucggaggag

SEQ ID NO: 876147 - RNA, 19 nt, Artificial Sequence
  Description of Artificial Sequence: Synthetic oligonucleotide
ugacagucuauaggagaau

SEQ ID NO: 876148 - RNA, 19 nt, Artificial Sequence
  Description of Artificial Sequence: Synthetic oligonucleotide
ugcaucggguaugucgauc

SEQ ID NO: 876149 - RNA, 19 nt, Artificial Sequence
  Description of Artificial Sequence: Synthetic oligonucleotide
aguaucggaggagcucugu

SEQ ID NO: 876150 - RNA, 19 nt, Artificial Sequence
  Description of Artificial Sequence: Synthetic oligonucleotide
cuaugcaagcaggcugcag

SEQ ID NO: 876151 - RNA, 19 nt, Artificial Sequence
  Description of Artificial Sequence: Synthetic oligonucleotide
uuaaaccaacaugguuaaa

SEQ ID NO: 876152 - RNA, 19 nt, Artificial Sequence
  Description of Artificial Sequence: Synthetic oligonucleotide
cuaacagugucugccaccu

SEQ ID NO: 876153 - RNA, 19 nt, Artificial Sequence
  Description of Artificial Sequence: Synthetic oligonucleotide
cacaucuccauaccauuua

SEQ ID NO: 876154 - RNA, 19 nt, Artificial Sequence
  Description of Artificial Sequence: Synthetic oligonucleotide
caucagcacucuucaccac

SEQ ID NO: 876155 - RNA, 19 nt, Artificial Sequence
  Description of Artificial Sequence: Synthetic oligonucleotide
cuuaucucuuucacugagu

SEQ ID NO: 876156 - RNA, 19 nt, Artificial Sequence
  Description of Artificial Sequence: Synthetic oligonucleotide
ccuguuguaauaguuaaua

SEQ ID NO: 876157 - RNA, 19 nt, Artificial Sequence
  Description of Artificial Sequence: Synthetic oligonucleotide
ggaaccgcggccauggcga

SEQ ID NO: 876158 - RNA, 19 nt, Artificial Sequence
  Description of Artificial Sequence: Synthetic oligonucleotide
ggauaauaagcccggcaua

SEQ ID NO: 876159 - RNA, 19 nt, Artificial Sequence
  Description of Artificial Sequence: Synthetic oligonucleotide
auaagucaaugcagcucug

SEQ ID NO: 876160 - RNA, 19 nt, Artificial Sequence
  Description of Artificial Sequence: Synthetic oligonucleotide
gcuggugagucucagccaa

SEQ ID NO: 876161 - RNA, 19 nt, Artificial Sequence
  Description of Artificial Sequence: Synthetic oligonucleotide
guaugucgaucugaagcga

SEQ ID NO: 876162 - RNA, 19 nt, Artificial Sequence
  Description of Artificial Sequence: Synthetic oligonucleotide
accuacuuugagguauuaa

SEQ ID NO: 876163 - RNA, 19 nt, Artificial Sequence
  Description of Artificial Sequence: Synthetic oligonucleotide
aagcccggcauaaucuguu

SEQ ID NO: 876164 - RNA, 19 nt, Artificial Sequence
  Description of Artificial Sequence: Synthetic oligonucleotide
cacaagcaguuaccauuug

SEQ ID NO: 876165 - RNA, 19 nt, Artificial Sequence
  Description of Artificial Sequence: Synthetic oligonucleotide
uuguuguaauuggcaccug

SEQ ID NO: 876166 - RNA, 19 nt, Artificial Sequence
  Description of Artificial Sequence: Synthetic oligonucleotide
uucucucgagggccaucga

SEQ ID NO: 876167 - RNA, 19 nt, Artificial Sequence
  Description of Artificial Sequence: Synthetic oligonucleotide
gucuauaggagaaucuguu

SEQ ID NO: 876168 - RNA, 19 nt, Artificial Sequence
  Description of Artificial Sequence: Synthetic oligonucleotide
ccuaacacuuagauccuga

SEQ ID NO: 876169 - RNA, 19 nt, Artificial Sequence
  Description of Artificial Sequence: Synthetic oligonucleotide
gccuuguaacagaaaauuc

SEQ ID NO: 876170 - RNA, 19 nt, Artificial Sequence
  Description of Artificial Sequence: Synthetic oligonucleotide
gaaagccgcugaagaaaga

SEQ ID NO: 876171 - RNA, 19 nt, Artificial Sequence
  Description of Artificial Sequence: Synthetic oligonucleotide
cuggugagucucagccaac

SEQ ID NO: 876172 - RNA, 19 nt, Artificial Sequence
  Description of Artificial Sequence: Synthetic oligonucleotide
caucggguaugucgaucug

SEQ ID NO: 876173 - RNA, 19 nt, Artificial Sequence
  Description of Artificial Sequence: Synthetic oligonucleotide
gagcucugugaguuuuaaa

SEQ ID NO: 876174 - RNA, 19 nt, Artificial Sequence
  Description of Artificial Sequence: Synthetic oligonucleotide
gcgggccucgagcagaggc

SEQ ID NO: 876175 - RNA, 19 nt, Artificial Sequence
  Description of Artificial Sequence: Synthetic oligonucleotide
cauggcgacgcgggccucg

SEQ ID NO: 876176 - RNA, 19 nt, Artificial Sequence
  Description of Artificial Sequence: Synthetic oligonucleotide
ugcgucuguaaaggagauc

SEQ ID NO: 876177 - RNA, 19 nt, Artificial Sequence
  Description of Artificial Sequence: Synthetic oligonucleotide
gcaacucgggaaccgcggc

SEQ ID NO: 876178 - RNA, 19 nt, Artificial Sequence
  Description of Artificial Sequence: Synthetic oligonucleotide
ucuugacaagagggaguaa

SEQ ID NO: 876179 - RNA, 19 nt, Artificial Sequence
  Description of Artificial Sequence: Synthetic oligonucleotide
cauugguauucuucagagu

SEQ ID NO: 876180 - RNA, 19 nt, Artificial Sequence
  Description of Artificial Sequence: Synthetic oligonucleotide
agcgaagggucaacauuca

SEQ ID NO: 876181 - RNA, 19 nt, Artificial Sequence
  Description of Artificial Sequence: Synthetic oligonucleotide
agacucgaccuuccacuuu

SEQ ID NO: 876182 - RNA, 19 nt, Artificial Sequence
  Description of Artificial Sequence: Synthetic oligonucleotide
cuucaugggaagacacagu

SEQ ID NO: 876183 - RNA, 19 nt, Artificial Sequence
  Description of Artificial Sequence: Synthetic oligonucleotide
acauuguuucuggcaugcu

SEQ ID NO: 876184 - RNA, 19 nt, Artificial Sequence
  Description of Artificial Sequence: Synthetic oligonucleotide
guacuguaaacuugaccuu

SEQ ID NO: 876185 - RNA, 19 nt, Artificial Sequence
  Description of Artificial Sequence: Synthetic oligonucleotide
uaaccgggccuuguccaaa

SEQ ID NO: 876186 - RNA, 19 nt, Artificial Sequence
  Description of Artificial Sequence: Synthetic oligonucleotide
agagugucaugcagccaca

SEQ ID NO: 876187 - RNA, 19 nt, Artificial Sequence
  Description of Artificial Sequence: Synthetic oligonucleotide
cagcucugcaagagggaga

SEQ ID NO: 876188 - RNA, 19 nt, Artificial Sequence
  Description of Artificial Sequence: Synthetic oligonucleotide
cagaacccuagauuuuccu

SEQ ID NO: 876189 - RNA, 19 nt, Artificial Sequence
  Description of Artificial Sequence: Synthetic oligonucleotide
gcaucggguaugucgaucu

SEQ ID NO: 876190 - RNA, 19 nt, Artificial Sequence
  Description of Artificial Sequence: Synthetic oligonucleotide
cuuagauccugaucauauu

SEQ ID NO: 876191 - RNA, 19 nt, Artificial Sequence
  Description of Artificial Sequence: Synthetic oligonucleotide
cugccuuguaacagaaaau

SEQ ID NO: 876192 - RNA, 19 nt, Artificial Sequence
  Description of Artificial Sequence: Synthetic oligonucleotide
cggucuuuacugagaacag

SEQ ID NO: 876193 - RNA, 19 nt, Artificial Sequence
  Description of Artificial Sequence: Synthetic oligonucleotide
gucuugguguguacuguaa

SEQ ID NO: 876194 - RNA, 19 nt, Artificial Sequence
  Description of Artificial Sequence: Synthetic oligonucleotide
cuguuagauucuaccuacu

SEQ ID NO: 876195 - RNA, 19 nt, Artificial Sequence
  Description of Artificial Sequence: Synthetic oligonucleotide
cucagccaacuugacaucu

SEQ ID NO: 876196 - RNA, 19 nt, Artificial Sequence
  Description of Artificial Sequence: Synthetic oligonucleotide
uaccuacuuugagguauua

SEQ ID NO: 876197 - RNA, 19 nt, Artificial Sequence
  Description of Artificial Sequence: Synthetic oligonucleotide
ccccucaagcaauuauauc

SEQ ID NO: 876198 - RNA, 19 nt, Artificial Sequence
  Description of Artificial Sequence: Synthetic oligonucleotide
cacuuagauccugaucaua

SEQ ID NO: 876199 - RNA, 19 nt, Artificial Sequence
  Description of Artificial Sequence: Synthetic oligonucleotide
gguuaaauguuaagauuuu

SEQ ID NO: 876200 - RNA, 19 nt, Artificial Sequence
  Description of Artificial Sequence: Synthetic oligonucleotide
ccagcaacucgggaaccgc

SEQ ID NO: 876201 - RNA, 19 nt, Artificial Sequence
  Description of Artificial Sequence: Synthetic oligonucleotide
aauuggcaccugacauguu

SEQ ID NO: 876202 - RNA, 19 nt, Artificial Sequence
  Description of Artificial Sequence: Synthetic oligonucleotide
caaccuucaauagguacuu

SEQ ID NO: 876203 - RNA, 19 nt, Artificial Sequence
  Description of Artificial Sequence: Synthetic oligonucleotide
ccuugauccuguuguaaua

SEQ ID NO: 876204 - RNA, 19 nt, Artificial Sequence
  Description of Artificial Sequence: Synthetic oligonucleotide
ccaacuugacaucuuugcu

SEQ ID NO: 876205 - RNA, 19 nt, Artificial Sequence
  Description of Artificial Sequence: Synthetic oligonucleotide
cugcaaccuucaauaggua

SEQ ID NO: 876206 - RNA, 19 nt, Artificial Sequence
  Description of Artificial Sequence: Synthetic oligonucleotide
uggcgacgcgggccucgag

SEQ ID NO: 876207 - RNA, 19 nt, Artificial Sequence
  Description of Artificial Sequence: Synthetic oligonucleotide
ggaacuguaaagggugcau

SEQ ID NO: 876208 - RNA, 19 nt, Artificial Sequence
  Description of Artificial Sequence: Synthetic oligonucleotide
cucgggaaccgcggccaug

SEQ ID NO: 876209 - RNA, 19 nt, Artificial Sequence
  Description of Artificial Sequence: Synthetic oligonucleotide
ccauaccauuuauuaguaa

SEQ ID NO: 876210 - RNA, 19 nt, Artificial Sequence
  Description of Artificial Sequence: Synthetic oligonucleotide
cuaccuacuuugagguauu

SEQ ID NO: 876211 - RNA, 19 nt, Artificial Sequence
  Description of Artificial Sequence: Synthetic oligonucleotide
gcagauucagaaagcugcu

SEQ ID NO: 876212 - RNA, 19 nt, Artificial Sequence
  Description of Artificial Sequence: Synthetic oligonucleotide
gccucuauguugagcaugu

SEQ ID NO: 876213 - RNA, 19 nt, Artificial Sequence
  Description of Artificial Sequence: Synthetic oligonucleotide
cagggagugucagaacccu

SEQ ID NO: 876214 - RNA, 19 nt, Artificial Sequence
  Description of Artificial Sequence: Synthetic oligonucleotide
cugagugcaucggguaugu

SEQ ID NO: 876215 - RNA, 19 nt, Artificial Sequence
  Description of Artificial Sequence: Synthetic oligonucleotide
gggccaucgaagucuggcu

SEQ ID NO: 876216 - RNA, 19 nt, Artificial Sequence
  Description of Artificial Sequence: Synthetic oligonucleotide
agggagugucagaacccua

SEQ ID NO: 876217 - RNA, 19 nt, Artificial Sequence
  Description of Artificial Sequence: Synthetic oligonucleotide
cucgaccuuccacuuuccu

SEQ ID NO: 876218 - RNA, 19 nt, Artificial Sequence
  Description of Artificial Sequence: Synthetic oligonucleotide
ccaccaucagggaguguca

SEQ ID NO: 876219 - RNA, 19 nt, Artificial Sequence
  Description of Artificial Sequence: Synthetic oligonucleotide
ccgcuugaaguuuaccagu

SEQ ID NO: 876220 - RNA, 19 nt, Artificial Sequence
  Description of Artificial Sequence: Synthetic oligonucleotide
cggguaugucgaucugaag

SEQ ID NO: 876221 - RNA, 19 nt, Artificial Sequence
  Description of Artificial Sequence: Synthetic oligonucleotide
auggcgacgcgggccucga

SEQ ID NO: 876222 - RNA, 19 nt, Artificial Sequence
  Description of Artificial Sequence: Synthetic oligonucleotide
gcgagauacucagcuucca

SEQ ID NO: 876223 - RNA, 19 nt, Artificial Sequence
  Description of Artificial Sequence: Synthetic oligonucleotide
gcuuuagcacaggaauccu

SEQ ID NO: 876224 - RNA, 19 nt, Artificial Sequence
  Description of Artificial Sequence: Synthetic oligonucleotide
caugaaaguuucggucuuu

SEQ ID NO: 876225 - RNA, 19 nt, Artificial Sequence
  Description of Artificial Sequence: Synthetic oligonucleotide
gugcgucuguaaaggagau

SEQ ID NO: 876226 - RNA, 19 nt, Artificial Sequence
  Description of Artificial Sequence: Synthetic oligonucleotide
gggcuuuugugcgucugua

SEQ ID NO: 876227 - RNA, 19 nt, Artificial Sequence
  Description of Artificial Sequence: Synthetic oligonucleotide
gcuaugcaagcaggcugca

SEQ ID NO: 876228 - RNA, 19 nt, Artificial Sequence
  Description of Artificial Sequence: Synthetic oligonucleotide
gcccggcauaaucuguugu

SEQ ID NO: 876229 - RNA, 19 nt, Artificial Sequence
  Description of Artificial Sequence: Synthetic oligonucleotide
gccucgagcagaggcuguc

SEQ ID NO: 876230 - RNA, 19 nt, Artificial Sequence
  Description of Artificial Sequence: Synthetic oligonucleotide
cccggcauaaucuguuguu

SEQ ID NO: 876231 - RNA, 19 nt, Artificial Sequence
  Description of Artificial Sequence: Synthetic oligonucleotide
cgucuguaaaggagauccu

SEQ ID NO: 876232 - RNA, 19 nt, Artificial Sequence
  Description of Artificial Sequence: Synthetic oligonucleotide
ccggcauaaucuguuguuu

SEQ ID NO: 876233 - RNA, 19 nt, Artificial Sequence
  Description of Artificial Sequence: Synthetic oligonucleotide
cgacgcgggccucgagcag

SEQ ID NO: 876234 - RNA, 19 nt, Artificial Sequence
  Description of Artificial Sequence: Synthetic oligonucleotide
cgccuaacacuuagauccu

SEQ ID NO: 876235 - RNA, 19 nt, Artificial Sequence
  Description of Artificial Sequence: Synthetic oligonucleotide
cgggaaccgcggccauggc

SEQ ID NO: 876236 - RNA, 19 nt, Artificial Sequence
  Description of Artificial Sequence: Synthetic oligonucleotide
accacuucgaauuugaugc

SEQ ID NO: 876237 - RNA, 19 nt, Artificial Sequence
  Description of Artificial Sequence: Synthetic oligonucleotide
aaggcuagcacacuaaggc

SEQ ID NO: 876238 - RNA, 19 nt, Artificial Sequence
  Description of Artificial Sequence: Synthetic oligonucleotide
gauaagggaagucaaagcg

SEQ ID NO: 876239 - RNA, 19 nt, Artificial Sequence
  Description of Artificial Sequence: Synthetic oligonucleotide
acuaaggcuaugcaggggc

SEQ ID NO: 876240 - RNA, 19 nt, Artificial Sequence
  Description of Artificial Sequence: Synthetic oligonucleotide
aaguaaagugcuugcaggg

SEQ ID NO: 876241 - RNA, 19 nt, Artificial Sequence
  Description of Artificial Sequence: Synthetic oligonucleotide
aacaggacucuccaaggcc

SEQ ID NO: 876242 - RNA, 19 nt, Artificial Sequence
  Description of Artificial Sequence: Synthetic oligonucleotide
uauugcuugacaaugcgcu

SEQ ID NO: 876243 - RNA, 19 nt, Artificial Sequence
  Description of Artificial Sequence: Synthetic oligonucleotide
cacacuaaggcuaugcagg

SEQ ID NO: 876244 - RNA, 19 nt, Artificial Sequence
  Description of Artificial Sequence: Synthetic oligonucleotide
uuuaggguguccaugcucc

SEQ ID NO: 876245 - RNA, 19 nt, Artificial Sequence
  Description of Artificial Sequence: Synthetic oligonucleotide
uguagucuccaacugcugg

SEQ ID NO: 876246 - RNA, 19 nt, Artificial Sequence
  Description of Artificial Sequence: Synthetic oligonucleotide
ucgaauuugaugcccuugg

SEQ ID NO: 876247 - RNA, 19 nt, Artificial Sequence
  Description of Artificial Sequence: Synthetic oligonucleotide
aguuucagcaauguugccc

SEQ ID NO: 876248 - RNA, 19 nt, Artificial Sequence
  Description of Artificial Sequence: Synthetic oligonucleotide
uguggcgugguucagacac

SEQ ID NO: 876249 - RNA, 19 nt, Artificial Sequence
  Description of Artificial Sequence: Synthetic oligonucleotide
uuccacauugggauaaggg

SEQ ID NO: 876250 - RNA, 19 nt, Artificial Sequence
  Description of Artificial Sequence: Synthetic oligonucleotide
gacuguaggguuaagacug

SEQ ID NO: 876251 - RNA, 19 nt, Artificial Sequence
  Description of Artificial Sequence: Synthetic oligonucleotide
uugauauugcuugacaaug

SEQ ID NO: 876252 - RNA, 19 nt, Artificial Sequence
  Description of Artificial Sequence: Synthetic oligonucleotide
uaagggaagucaaagcgga

SEQ ID NO: 876253 - RNA, 19 nt, Artificial Sequence
  Description of Artificial Sequence: Synthetic oligonucleotide
uccgcuuacagucuucugc

SEQ ID NO: 876254 - RNA, 19 nt, Artificial Sequence
  Description of Artificial Sequence: Synthetic oligonucleotide
uauagaaguucaguuggcg

SEQ ID NO: 876255 - RNA, 19 nt, Artificial Sequence
  Description of Artificial Sequence: Synthetic oligonucleotide
uuuguguuggcccggggag

SEQ ID NO: 876256 - RNA, 19 nt, Artificial Sequence
  Description of Artificial Sequence: Synthetic oligonucleotide
ucgaauggcgucuugauau

SEQ ID NO: 876257 - RNA, 19 nt, Artificial Sequence
  Description of Artificial Sequence: Synthetic oligonucleotide
ugguucagacacaagcagg

SEQ ID NO: 876258 - RNA, 19 nt, Artificial Sequence
  Description of Artificial Sequence: Synthetic oligonucleotide
auccagaucacuaggagac

SEQ ID NO: 876259 - RNA, 19 nt, Artificial Sequence
  Description of Artificial Sequence: Synthetic oligonucleotide
ugauauugcuugacaaugc

SEQ ID NO: 876260 - RNA, 19 nt, Artificial Sequence
  Description of Artificial Sequence: Synthetic oligonucleotide
uugucugcuugucugcucg

SEQ ID NO: 876261 - RNA, 19 nt, Artificial Sequence
  Description of Artificial Sequence: Synthetic oligonucleotide
ugccuuaugggcucgaaug

SEQ ID NO: 876262 - RNA, 19 nt, Artificial Sequence
  Description of Artificial Sequence: Synthetic oligonucleotide
aauggcgucuugauauugc

SEQ ID NO: 876263 - RNA, 19 nt, Artificial Sequence
  Description of Artificial Sequence: Synthetic oligonucleotide
uguacuacauccugguacu

SEQ ID NO: 876264 - RNA, 19 nt, Artificial Sequence
  Description of Artificial Sequence: Synthetic oligonucleotide
cuguacuacauccugguac

SEQ ID NO: 876265 - RNA, 19 nt, Artificial Sequence
  Description of Artificial Sequence: Synthetic oligonucleotide
aaagaccuugaugacacug

SEQ ID NO: 876266 - RNA, 19 nt, Artificial Sequence
  Description of Artificial Sequence: Synthetic oligonucleotide
uuuaggagccucauccucu

SEQ ID NO: 876267 - RNA, 19 nt, Artificial Sequence
  Description of Artificial Sequence: Synthetic oligonucleotide
ugaugcacaguuugaacug

SEQ ID NO: 876268 - RNA, 19 nt, Artificial Sequence
  Description of Artificial Sequence: Synthetic oligonucleotide
aacuugauaguuucagcaa

SEQ ID NO: 876269 - RNA, 19 nt, Artificial Sequence
  Description of Artificial Sequence: Synthetic oligonucleotide
caugguaccgcuccauucg

SEQ ID NO: 876270 - RNA, 19 nt, Artificial Sequence
  Description of Artificial Sequence: Synthetic oligonucleotide
cuuaugggcucgaauggcg

SEQ ID NO: 876271 - RNA, 19 nt, Artificial Sequence
  Description of Artificial Sequence: Synthetic oligonucleotide
cuuuggagaggacuguagg

SEQ ID NO: 876272 - RNA, 19 nt, Artificial Sequence
  Description of Artificial Sequence: Synthetic oligonucleotide
ugaaguucgcucuccacca

SEQ ID NO: 876273 - RNA, 19 nt, Artificial Sequence
  Description of Artificial Sequence: Synthetic oligonucleotide
aguaaagugcuugcagggc

SEQ ID NO: 876274 - RNA, 19 nt, Artificial Sequence
  Description of Artificial Sequence: Synthetic oligonucleotide
ugcccuucacgauaaacag

SEQ ID NO: 876275 - RNA, 19 nt, Artificial Sequence
  Description of Artificial Sequence: Synthetic oligonucleotide
gaggugaucaaugaccagc

SEQ ID NO: 876276 - RNA, 19 nt, Artificial Sequence
  Description of Artificial Sequence: Synthetic oligonucleotide
aaugcgcucaugcauucgu

SEQ ID NO: 876277 - RNA, 19 nt, Artificial Sequence
  Description of Artificial Sequence: Synthetic oligonucleotide
ucucacggacuucacaagc

SEQ ID NO: 876278 - RNA, 19 nt, Artificial Sequence
  Description of Artificial Sequence: Synthetic oligonucleotide
ucgaacuugauaguuucag

SEQ ID NO: 876279 - RNA, 19 nt, Artificial Sequence
  Description of Artificial Sequence: Synthetic oligonucleotide
aaaggcuagcacacuaagg

SEQ ID NO: 876280 - RNA, 19 nt, Artificial Sequence
  Description of Artificial Sequence: Synthetic oligonucleotide
cugaaguucgcucuccacc

SEQ ID NO: 876281 - RNA, 19 nt, Artificial Sequence
  Description of Artificial Sequence: Synthetic oligonucleotide
cauucgcugcuccagagcc

SEQ ID NO: 876282 - RNA, 19 nt, Artificial Sequence
  Description of Artificial Sequence: Synthetic oligonucleotide
auauugcuugacaaugcgc

SEQ ID NO: 876283 - RNA, 19 nt, Artificial Sequence
  Description of Artificial Sequence: Synthetic oligonucleotide
uuguggaccacuucgaauu

SEQ ID NO: 876284 - RNA, 19 nt, Artificial Sequence
  Description of Artificial Sequence: Synthetic oligonucleotide
uacgcuguacuacauccug

SEQ ID NO: 876285 - RNA, 19 nt, Artificial Sequence
  Description of Artificial Sequence: Synthetic oligonucleotide
uccuugcucaagaugcucc

SEQ ID NO: 876286 - RNA, 19 nt, Artificial Sequence
  Description of Artificial Sequence: Synthetic oligonucleotide
aacuguguggcgugguuca

SEQ ID NO: 876287 - RNA, 19 nt, Artificial Sequence
  Description of Artificial Sequence: Synthetic oligonucleotide
gaugcauacucccugcgga

SEQ ID NO: 876288 - RNA, 19 nt, Artificial Sequence
  Description of Artificial Sequence: Synthetic oligonucleotide
acacuaaggcuaugcaggg

SEQ ID NO: 876289 - RNA, 19 nt, Artificial Sequence
  Description of Artificial Sequence: Synthetic oligonucleotide
ucucgaacuugauaguuuc

SEQ ID NO: 876290 - RNA, 19 nt, Artificial Sequence
  Description of Artificial Sequence: Synthetic oligonucleotide
ugacaaugcgcucaugcau

SEQ ID NO: 876291 - RNA, 19 nt, Artificial Sequence
  Description of Artificial Sequence: Synthetic oligonucleotide
ucgguauagaaguucaguu

SEQ ID NO: 876292 - RNA, 19 nt, Artificial Sequence
  Description of Artificial Sequence: Synthetic oligonucleotide
uccguugauugucugcuug

SEQ ID NO: 876293 - RNA, 19 nt, Artificial Sequence
  Description of Artificial Sequence: Synthetic oligonucleotide
gugaucaaugaccagccac

SEQ ID NO: 876294 - RNA, 19 nt, Artificial Sequence
  Description of Artificial Sequence: Synthetic oligonucleotide
auugcuugacaaugcgcuc

SEQ ID NO: 876295 - RNA, 19 nt, Artificial Sequence
  Description of Artificial Sequence: Synthetic oligonucleotide
agcucggccugccuuaugg

SEQ ID NO: 876296 - RNA, 19 nt, Artificial Sequence
  Description of Artificial Sequence: Synthetic oligonucleotide
guagacugugggcaaaggc

SEQ ID NO: 876297 - RNA, 19 nt, Artificial Sequence
  Description of Artificial Sequence: Synthetic oligonucleotide
acccugucagucuugaaca

SEQ ID NO: 876298 - RNA, 19 nt, Artificial Sequence
  Description of Artificial Sequence: Synthetic oligonucleotide
uuugaugcccuugguuugg

SEQ ID NO: 876299 - RNA, 19 nt, Artificial Sequence
  Description of Artificial Sequence: Synthetic oligonucleotide
acggcugaugcacaguuug

SEQ ID NO: 876300 - RNA, 19 nt, Artificial Sequence
  Description of Artificial Sequence: Synthetic oligonucleotide
uggaccacuucgaauuuga

SEQ ID NO: 876301 - RNA, 19 nt, Artificial Sequence
  Description of Artificial Sequence: Synthetic oligonucleotide
uagaaguucaguuggcguu

SEQ ID NO: 876302 - RNA, 19 nt, Artificial Sequence
  Description of Artificial Sequence: Synthetic oligonucleotide
ggcgucuugauauugcuug

SEQ ID NO: 876303 - RNA, 19 nt, Artificial Sequence
  Description of Artificial Sequence: Synthetic oligonucleotide
ucaaaggcuagcacacuaa

SEQ ID NO: 876304 - RNA, 19 nt, Artificial Sequence
  Description of Artificial Sequence: Synthetic oligonucleotide
uuagacagccucaguggca

SEQ ID NO: 876305 - RNA, 19 nt, Artificial Sequence
  Description of Artificial Sequence: Synthetic oligonucleotide
gguacagugccucuuuugc

SEQ ID NO: 876306 - RNA, 19 nt, Artificial Sequence
  Description of Artificial Sequence: Synthetic oligonucleotide
uuuggauggcccuucggaa

SEQ ID NO: 876307 - RNA, 19 nt, Artificial Sequence
  Description of Artificial Sequence: Synthetic oligonucleotide
agaaguucaguuggcguuc

SEQ ID NO: 876308 - RNA, 19 nt, Artificial Sequence
  Description of Artificial Sequence: Synthetic oligonucleotide
gucagucuugaacagcccc

SEQ ID NO: 876309 - RNA, 19 nt, Artificial Sequence
  Description of Artificial Sequence: Synthetic oligonucleotide
cucacggacuucacaagcc

SEQ ID NO: 876310 - RNA, 19 nt, Artificial Sequence
  Description of Artificial Sequence: Synthetic oligonucleotide
aaaccuccagggucucacg

SEQ ID NO: 876311 - RNA, 19 nt, Artificial Sequence
  Description of Artificial Sequence: Synthetic oligonucleotide
gcuacgcuguacuacaucc

SEQ ID NO: 876312 - RNA, 19 nt, Artificial Sequence
  Description of Artificial Sequence: Synthetic oligonucleotide
augguaccgcuccauucgc

SEQ ID NO: 876313 - RNA, 19 nt, Artificial Sequence
  Description of Artificial Sequence: Synthetic oligonucleotide
caaaggcuagcacacuaag

SEQ ID NO: 876314 - RNA, 19 nt, Artificial Sequence
  Description of Artificial Sequence: Synthetic oligonucleotide
ggauaagggaagucaaagc

SEQ ID NO: 876315 - RNA, 19 nt, Artificial Sequence
  Description of Artificial Sequence: Synthetic oligonucleotide
guuuggauggcccuucgga

SEQ ID NO: 876316 - RNA, 19 nt, Artificial Sequence
  Description of Artificial Sequence: Synthetic oligonucleotide
uguccguugauugucugcu

SEQ ID NO: 876317 - RNA, 19 nt, Artificial Sequence
  Description of Artificial Sequence: Synthetic oligonucleotide
uguguggcgugguucagac

SEQ ID NO: 876318 - RNA, 19 nt, Artificial Sequence
  Description of Artificial Sequence: Synthetic oligonucleotide
cacccugucagucuugaac

SEQ ID NO: 876319 - RNA, 19 nt, Artificial Sequence
  Description of Artificial Sequence: Synthetic oligonucleotide
uuaugggcucgaauggcgu

SEQ ID NO: 876320 - RNA, 19 nt, Artificial Sequence
  Description of Artificial Sequence: Synthetic oligonucleotide
ugcgcucaugcauucgugc

SEQ ID NO: 876321 - RNA, 19 nt, Artificial Sequence
  Description of Artificial Sequence: Synthetic oligonucleotide
uaggguuaagacuggggaa

SEQ ID NO: 876322 - RNA, 19 nt, Artificial Sequence
  Description of Artificial Sequence: Synthetic oligonucleotide
uucgaauuugaugcccuug

SEQ ID NO: 876323 - RNA, 19 nt, Artificial Sequence
  Description of Artificial Sequence: Synthetic oligonucleotide
gucaagggcucccggaucc

SEQ ID NO: 876324 - RNA, 19 nt, Artificial Sequence
  Description of Artificial Sequence: Synthetic oligonucleotide
gguguggguagacuguggg

SEQ ID NO: 876325 - RNA, 19 nt, Artificial Sequence
  Description of Artificial Sequence: Synthetic oligonucleotide
cauucgugccuuccgcugg

SEQ ID NO: 876326 - RNA, 19 nt, Artificial Sequence
  Description of Artificial Sequence: Synthetic oligonucleotide
uagccuaagcgccgggcag

SEQ ID NO: 876327 - RNA, 19 nt, Artificial Sequence
  Description of Artificial Sequence: Synthetic oligonucleotide
uucucgaacuugauaguuu

SEQ ID NO: 876328 - RNA, 19 nt, Artificial Sequence
  Description of Artificial Sequence: Synthetic oligonucleotide
ugggaugcauacucccugc

SEQ ID NO: 876329 - RNA, 19 nt, Artificial Sequence
  Description of Artificial Sequence: Synthetic oligonucleotide
aguucaguuggcguuccag

SEQ ID NO: 876330 - RNA, 19 nt, Artificial Sequence
  Description of Artificial Sequence: Synthetic oligonucleotide
gacucuccaaggcccagcc

SEQ ID NO: 876331 - RNA, 19 nt, Artificial Sequence
  Description of Artificial Sequence: Synthetic oligonucleotide
uagcacacuaaggcuaugc

SEQ ID NO: 876332 - RNA, 19 nt, Artificial Sequence
  Description of Artificial Sequence: Synthetic oligonucleotide
cuaaggcuaugcaggggcc

SEQ ID NO: 876333 - RNA, 19 nt, Artificial Sequence
  Description of Artificial Sequence: Synthetic oligonucleotide
ucugaaguucgcucuccac

SEQ ID NO: 876334 - RNA, 19 nt, Artificial Sequence
  Description of Artificial Sequence: Synthetic oligonucleotide
gcggcggccaucuaaaacc

SEQ ID NO: 876335 - RNA, 19 nt, Artificial Sequence
  Description of Artificial Sequence: Synthetic oligonucleotide
ucggccugccuuaugggcu

SEQ ID NO: 876336 - RNA, 19 nt, Artificial Sequence
  Description of Artificial Sequence: Synthetic oligonucleotide
gcuccuugaauucagggga

SEQ ID NO: 876337 - RNA, 19 nt, Artificial Sequence
  Description of Artificial Sequence: Synthetic oligonucleotide
accucuccguuguagucuc

SEQ ID NO: 876338 - RNA, 19 nt, Artificial Sequence
  Description of Artificial Sequence: Synthetic oligonucleotide
gagacugugggcacagcug

SEQ ID NO: 876339 - RNA, 19 nt, Artificial Sequence
  Description of Artificial Sequence: Synthetic oligonucleotide
acagaagcaugucauuguu

SEQ ID NO: 876340 - RNA, 19 nt, Artificial Sequence
  Description of Artificial Sequence: Synthetic oligonucleotide
cugaucuguucccugguuc

SEQ ID NO: 876341 - RNA, 19 nt, Artificial Sequence
  Description of Artificial Sequence: Synthetic oligonucleotide
gaugcccuucacgauaaac

SEQ ID NO: 876342 - RNA, 19 nt, Artificial Sequence
  Description of Artificial Sequence: Synthetic oligonucleotide
cacugaagguccuuugcuc

SEQ ID NO: 876343 - RNA, 19 nt, Artificial Sequence
  Description of Artificial Sequence: Synthetic oligonucleotide
gcacacuaaggcuaugcag

SEQ ID NO: 876344 - RNA, 19 nt, Artificial Sequence
  Description of Artificial Sequence: Synthetic oligonucleotide
ugguuuggauggcccuucg

SEQ ID NO: 876345 - RNA, 19 nt, Artificial Sequence
  Description of Artificial Sequence: Synthetic oligonucleotide
agggccagaaucuuccuuu

SEQ ID NO: 876346 - RNA, 19 nt, Artificial Sequence
  Description of Artificial Sequence: Synthetic oligonucleotide
cagaucacuaggagacagc

SEQ ID NO: 876347 - RNA, 19 nt, Artificial Sequence
  Description of Artificial Sequence: Synthetic oligonucleotide
guugggaaccucuggccug

SEQ ID NO: 876348 - RNA, 19 nt, Artificial Sequence
  Description of Artificial Sequence: Synthetic oligonucleotide
uucccugguucccuccaag

SEQ ID NO: 876349 - RNA, 19 nt, Artificial Sequence
  Description of Artificial Sequence: Synthetic oligonucleotide
ucauagccuaagcgccggg

SEQ ID NO: 876350 - RNA, 19 nt, Artificial Sequence
  Description of Artificial Sequence: Synthetic oligonucleotide
cugaguuagacagccucag

SEQ ID NO: 876351 - RNA, 19 nt, Artificial Sequence
  Description of Artificial Sequence: Synthetic oligonucleotide
aggcuagcacacuaaggcu

SEQ ID NO: 876352 - RNA, 19 nt, Artificial Sequence
  Description of Artificial Sequence: Synthetic oligonucleotide
aucauagccuaagcgccgg

SEQ ID NO: 876353 - RNA, 19 nt, Artificial Sequence
  Description of Artificial Sequence: Synthetic oligonucleotide
ccugguucccuccaagugg

SEQ ID NO: 876354 - RNA, 19 nt, Artificial Sequence
  Description of Artificial Sequence: Synthetic oligonucleotide
ugaauucaggggagucugu

SEQ ID NO: 876355 - RNA, 19 nt, Artificial Sequence
  Description of Artificial Sequence: Synthetic oligonucleotide
cuguccguugauugucugc

SEQ ID NO: 876356 - RNA, 19 nt, Artificial Sequence
  Description of Artificial Sequence: Synthetic oligonucleotide
guauagaaguucaguuggc

SEQ ID NO: 876357 - RNA, 19 nt, Artificial Sequence
  Description of Artificial Sequence: Synthetic oligonucleotide
ugcauucgugccuuccgcu

SEQ ID NO: 876358 - RNA, 19 nt, Artificial Sequence
  Description of Artificial Sequence: Synthetic oligonucleotide
ggaugcauacucccugcgg

SEQ ID NO: 876359 - RNA, 19 nt, Artificial Sequence
  Description of Artificial Sequence: Synthetic oligonucleotide
cuccuggaugugcaaacag

SEQ ID NO: 876360 - RNA, 19 nt, Artificial Sequence
  Description of Artificial Sequence: Synthetic oligonucleotide
ugcggagucucugaaguuc

SEQ ID NO: 876361 - RNA, 19 nt, Artificial Sequence
  Description of Artificial Sequence: Synthetic oligonucleotide
gaaguucgcucuccaccag

SEQ ID NO: 876362 - RNA, 19 nt, Artificial Sequence
  Description of Artificial Sequence: Synthetic oligonucleotide
gaauggcgucuugauauug

SEQ ID NO: 876363 - RNA, 19 nt, Artificial Sequence
  Description of Artificial Sequence: Synthetic oligonucleotide
ccaugcuccgcuuacaguc

SEQ ID NO: 876364 - RNA, 19 nt, Artificial Sequence
  Description of Artificial Sequence: Synthetic oligonucleotide
cacuucgaauuugaugccc

SEQ ID NO: 876365 - RNA, 19 nt, Artificial Sequence
  Description of Artificial Sequence: Synthetic oligonucleotide
ucaugcauucgugccuucc

SEQ ID NO: 876366 - RNA, 19 nt, Artificial Sequence
  Description of Artificial Sequence: Synthetic oligonucleotide
ugcacaguuugaacugcuc

SEQ ID NO: 876367 - RNA, 19 nt, Artificial Sequence
  Description of Artificial Sequence: Synthetic oligonucleotide
cuucacaagccgucuccag

SEQ ID NO: 876368 - RNA, 19 nt, Artificial Sequence
  Description of Artificial Sequence: Synthetic oligonucleotide
uucaggggagucuguauuu

SEQ ID NO: 876369 - RNA, 19 nt, Artificial Sequence
  Description of Artificial Sequence: Synthetic oligonucleotide
uuguguuggcccggggagg

SEQ ID NO: 876370 - RNA, 19 nt, Artificial Sequence
  Description of Artificial Sequence: Synthetic oligonucleotide
gugaguccagaaccaacug

SEQ ID NO: 876371 - RNA, 19 nt, Artificial Sequence
  Description of Artificial Sequence: Synthetic oligonucleotide
cuaagcgccgggcagccuc

SEQ ID NO: 876372 - RNA, 19 nt, Artificial Sequence
  Description of Artificial Sequence: Synthetic oligonucleotide
guucagacacaagcagggg

SEQ ID NO: 876373 - RNA, 19 nt, Artificial Sequence
  Description of Artificial Sequence: Synthetic oligonucleotide
agccucgguauagaaguuc

SEQ ID NO: 876374 - RNA, 19 nt, Artificial Sequence
  Description of Artificial Sequence: Synthetic oligonucleotide
acggacuucacaagccguc

SEQ ID NO: 876375 - RNA, 19 nt, Artificial Sequence
  Description of Artificial Sequence: Synthetic oligonucleotide
ugcugaucuguucccuggu

SEQ ID NO: 876376 - RNA, 19 nt, Artificial Sequence
  Description of Artificial Sequence: Synthetic oligonucleotide
gcauccagaucacuaggag

SEQ ID NO: 876377 - RNA, 19 nt, Artificial Sequence
  Description of Artificial Sequence: Synthetic oligonucleotide
cuccguuguagucuccaac

SEQ ID NO: 876378 - RNA, 19 nt, Artificial Sequence
  Description of Artificial Sequence: Synthetic oligonucleotide
ggaugugcaaacaggacuc

SEQ ID NO: 876379 - RNA, 19 nt, Artificial Sequence
  Description of Artificial Sequence: Synthetic oligonucleotide
cuggcuacgcuguacuaca

SEQ ID NO: 876380 - RNA, 19 nt, Artificial Sequence
  Description of Artificial Sequence: Synthetic oligonucleotide
ugucaagggcucccggauc

SEQ ID NO: 876381 - RNA, 19 nt, Artificial Sequence
  Description of Artificial Sequence: Synthetic oligonucleotide
ggucucacggacuucacaa

SEQ ID NO: 876382 - RNA, 19 nt, Artificial Sequence
  Description of Artificial Sequence: Synthetic oligonucleotide
cuugauauugcuugacaau

SEQ ID NO: 876383 - RNA, 19 nt, Artificial Sequence
  Description of Artificial Sequence: Synthetic oligonucleotide
aguugaugcccuucacgau

SEQ ID NO: 876384 - RNA, 19 nt, Artificial Sequence
  Description of Artificial Sequence: Synthetic oligonucleotide
uaugggcucgaauggcguc

SEQ ID NO: 876385 - RNA, 19 nt, Artificial Sequence
  Description of Artificial Sequence: Synthetic oligonucleotide
ugaugacacugaagguccu

SEQ ID NO: 876386 - RNA, 19 nt, Artificial Sequence
  Description of Artificial Sequence: Synthetic oligonucleotide
acuucgaauuugaugcccu

SEQ ID NO: 876387 - RNA, 19 nt, Artificial Sequence
  Description of Artificial Sequence: Synthetic oligonucleotide
aaggcuaugcaggggccgu

SEQ ID NO: 876388 - RNA, 19 nt, Artificial Sequence
  Description of Artificial Sequence: Synthetic oligonucleotide
agcagggguguuuugcuuu

SEQ ID NO: 876389 - RNA, 19 nt, Artificial Sequence
  Description of Artificial Sequence: Synthetic oligonucleotide
gaggacuguaggguuaaga

SEQ ID NO: 876390 - RNA, 19 nt, Artificial Sequence
  Description of Artificial Sequence: Synthetic oligonucleotide
ucaucgugguuagcaagcu

SEQ ID NO: 876391 - RNA, 19 nt, Artificial Sequence
  Description of Artificial Sequence: Synthetic oligonucleotide
uaccgcuccauucgcugcu

SEQ ID NO: 876392 - RNA, 19 nt, Artificial Sequence
  Description of Artificial Sequence: Synthetic oligonucleotide
gaaguucaguuggcguucc

SEQ ID NO: 876393 - RNA, 19 nt, Artificial Sequence
  Description of Artificial Sequence: Synthetic oligonucleotide
uguggaccacuucgaauuu

SEQ ID NO: 876394 - RNA, 19 nt, Artificial Sequence
  Description of Artificial Sequence: Synthetic oligonucleotide
gguaccgcuccauucgcug

SEQ ID NO: 876395 - RNA, 19 nt, Artificial Sequence
  Description of Artificial Sequence: Synthetic oligonucleotide
uggcagcuauggaaggcac

SEQ ID NO: 876396 - RNA, 19 nt, Artificial Sequence
  Description of Artificial Sequence: Synthetic oligonucleotide
aagcagggguguuuugcuu

SEQ ID NO: 876397 - RNA, 19 nt, Artificial Sequence
  Description of Artificial Sequence: Synthetic oligonucleotide
gccgcucuuggucaaaggc

SEQ ID NO: 876398 - RNA, 19 nt, Artificial Sequence
  Description of Artificial Sequence: Synthetic oligonucleotide
cucuuggucaaaggcuagc

SEQ ID NO: 876399 - RNA, 19 nt, Artificial Sequence
  Description of Artificial Sequence: Synthetic oligonucleotide
ccccuuguggaccacuucg

SEQ ID NO: 876400 - RNA, 19 nt, Artificial Sequence
  Description of Artificial Sequence: Synthetic oligonucleotide
ggagagccagcugaguuag

SEQ ID NO: 876401 - RNA, 19 nt, Artificial Sequence
  Description of Artificial Sequence: Synthetic oligonucleotide
ccgcuuacagucuucugcc

SEQ ID NO: 876402 - RNA, 19 nt, Artificial Sequence
  Description of Artificial Sequence: Synthetic oligonucleotide
gcagccucgguauagaagu

SEQ ID NO: 876403 - RNA, 19 nt, Artificial Sequence
  Description of Artificial Sequence: Synthetic oligonucleotide
cccuucacgauaaacagaa

SEQ ID NO: 876404 - RNA, 19 nt, Artificial Sequence
  Description of Artificial Sequence: Synthetic oligonucleotide
ucgugccuuccgcugguca

SEQ ID NO: 876405 - RNA, 19 nt, Artificial Sequence
  Description of Artificial Sequence: Synthetic oligonucleotide
aaguucaguuggcguucca

SEQ ID NO: 876406 - RNA, 19 nt, Artificial Sequence
  Description of Artificial Sequence: Synthetic oligonucleotide
gcauacucccugcggaugc

SEQ ID NO: 876407 - RNA, 19 nt, Artificial Sequence
  Description of Artificial Sequence: Synthetic oligonucleotide
uagcaagcuucauggcagu

SEQ ID NO: 876408 - RNA, 19 nt, Artificial Sequence
  Description of Artificial Sequence: Synthetic oligonucleotide
cuaugcaggggccgugcug

SEQ ID NO: 876409 - RNA, 19 nt, Artificial Sequence
  Description of Artificial Sequence: Synthetic oligonucleotide
cacuaaggcuaugcagggg

SEQ ID NO: 876410 - RNA, 19 nt, Artificial Sequence
  Description of Artificial Sequence: Synthetic oligonucleotide
augcauacucccugcggau

SEQ ID NO: 876411 - RNA, 19 nt, Artificial Sequence
  Description of Artificial Sequence: Synthetic oligonucleotide
gguuuggauggcccuucgg

SEQ ID NO: 876412 - RNA, 19 nt, Artificial Sequence
  Description of Artificial Sequence: Synthetic oligonucleotide
ugguaccgcuccauucgcu

SEQ ID NO: 876413 - RNA, 19 nt, Artificial Sequence
  Description of Artificial Sequence: Synthetic oligonucleotide
agguuccggcgguacagug

SEQ ID NO: 876414 - RNA, 19 nt, Artificial Sequence
  Description of Artificial Sequence: Synthetic oligonucleotide
uccagaucacuaggagaca

SEQ ID NO: 876415 - RNA, 19 nt, Artificial Sequence
  Description of Artificial Sequence: Synthetic oligonucleotide
ugcccucugccacuggcua

SEQ ID NO: 876416 - RNA, 19 nt, Artificial Sequence
  Description of Artificial Sequence: Synthetic oligonucleotide
gaauucaggggagucugua

SEQ ID NO: 876417 - RNA, 19 nt, Artificial Sequence
  Description of Artificial Sequence: Synthetic oligonucleotide
ucaaagcgggcagcaggug

SEQ ID NO: 876418 - RNA, 19 nt, Artificial Sequence
  Description of Artificial Sequence: Synthetic oligonucleotide
cauugggauaagggaaguc

SEQ ID NO: 876419 - RNA, 19 nt, Artificial Sequence
  Description of Artificial Sequence: Synthetic oligonucleotide
caaugcgcucaugcauucg

SEQ ID NO: 876420 - RNA, 19 nt, Artificial Sequence
  Description of Artificial Sequence: Synthetic oligonucleotide
cucgaacuugauaguuuca

SEQ ID NO: 876421 - RNA, 19 nt, Artificial Sequence
  Description of Artificial Sequence: Synthetic oligonucleotide
ugcagccacaugguaccgc

SEQ ID NO: 876422 - RNA, 19 nt, Artificial Sequence
  Description of Artificial Sequence: Synthetic oligonucleotide
uguccaugcuccgcuuaca

SEQ ID NO: 876423 - RNA, 19 nt, Artificial Sequence
  Description of Artificial Sequence: Synthetic oligonucleotide
guuggcguuccagauggga

SEQ ID NO: 876424 - RNA, 19 nt, Artificial Sequence
  Description of Artificial Sequence: Synthetic oligonucleotide
cagggugaguccagaacca

SEQ ID NO: 876425 - RNA, 19 nt, Artificial Sequence
  Description of Artificial Sequence: Synthetic oligonucleotide
ccagaucacuaggagacag

SEQ ID NO: 876426 - RNA, 19 nt, Artificial Sequence
  Description of Artificial Sequence: Synthetic oligonucleotide
cuugcucaagaugcuccug

SEQ ID NO: 876427 - RNA, 19 nt, Artificial Sequence
  Description of Artificial Sequence: Synthetic oligonucleotide
gaugcuccuggaugugcaa

SEQ ID NO: 876428 - RNA, 19 nt, Artificial Sequence
  Description of Artificial Sequence: Synthetic oligonucleotide
guggcagcuauggaaggca

SEQ ID NO: 876429 - RNA, 19 nt, Artificial Sequence
  Description of Artificial Sequence: Synthetic oligonucleotide
augacacugaagguccuuu

SEQ ID NO: 876430 - RNA, 19 nt, Artificial Sequence
  Description of Artificial Sequence: Synthetic oligonucleotide
uccuuuccagccgcucuug

SEQ ID NO: 876431 - RNA, 19 nt, Artificial Sequence
  Description of Artificial Sequence: Synthetic oligonucleotide
gguagacugugggcaaagg

SEQ ID NO: 876432 - RNA, 19 nt, Artificial Sequence
  Description of Artificial Sequence: Synthetic oligonucleotide
cucaaagcgggcagcaggu

SEQ ID NO: 876433 - RNA, 19 nt, Artificial Sequence
  Description of Artificial Sequence: Synthetic oligonucleotide
gcggagucucugaaguucg

SEQ ID NO: 876434 - RNA, 19 nt, Artificial Sequence
  Description of Artificial Sequence: Synthetic oligonucleotide
gcauucgugccuuccgcug

SEQ ID NO: 876435 - RNA, 19 nt, Artificial Sequence
  Description of Artificial Sequence: Synthetic oligonucleotide
ugggugugggcaaguugau

SEQ ID NO: 876436 - RNA, 19 nt, Artificial Sequence
  Description of Artificial Sequence: Synthetic oligonucleotide
cauacucccugcggaugcc

SEQ ID NO: 876437 - RNA, 19 nt, Artificial Sequence
  Description of Artificial Sequence: Synthetic oligonucleotide
uggcgugguucagacacaa

SEQ ID NO: 876438 - RNA, 19 nt, Artificial Sequence
  Description of Artificial Sequence: Synthetic oligonucleotide
agccucaguggcaucuuug

SEQ ID NO: 876439 - RNA, 19 nt, Artificial Sequence
  Description of Artificial Sequence: Synthetic oligonucleotide
gcgcucaugcauucgugcc

SEQ ID NO: 876440 - RNA, 19 nt, Artificial Sequence
  Description of Artificial Sequence: Synthetic oligonucleotide
gacaaugcgcucaugcauu

SEQ ID NO: 876441 - RNA, 19 nt, Artificial Sequence
  Description of Artificial Sequence: Synthetic oligonucleotide
gagacagcccugugggugu

SEQ ID NO: 876442 - RNA, 19 nt, Artificial Sequence
  Description of Artificial Sequence: Synthetic oligonucleotide
gagaggacuguaggguuaa

SEQ ID NO: 876443 - RNA, 19 nt, Artificial Sequence
  Description of Artificial Sequence: Synthetic oligonucleotide
ggcagccucgguauagaag

SEQ ID NO: 876444 - RNA, 19 nt, Artificial Sequence
  Description of Artificial Sequence: Synthetic oligonucleotide
acaagccgucuccagcaua

SEQ ID NO: 876445 - RNA, 19 nt, Artificial Sequence
  Description of Artificial Sequence: Synthetic oligonucleotide
ugcuccgcuuacagucuuc

SEQ ID NO: 876446 - RNA, 19 nt, Artificial Sequence
  Description of Artificial Sequence: Synthetic oligonucleotide
gccuucaucgugguuagca

SEQ ID NO: 876447 - RNA, 19 nt, Artificial Sequence
  Description of Artificial Sequence: Synthetic oligonucleotide
acacaagcagggguguuuu

SEQ ID NO: 876448 - RNA, 19 nt, Artificial Sequence
  Description of Artificial Sequence: Synthetic oligonucleotide
cucugaaguucgcucucca

SEQ ID NO: 876449 - RNA, 19 nt, Artificial Sequence
  Description of Artificial Sequence: Synthetic oligonucleotide
ccacuucgaauuugaugcc

SEQ ID NO: 876450 - RNA, 19 nt, Artificial Sequence
  Description of Artificial Sequence: Synthetic oligonucleotide
ugaugcccuugguuuggau

SEQ ID NO: 876451 - RNA, 19 nt, Artificial Sequence
  Description of Artificial Sequence: Synthetic oligonucleotide
uggcuacgcuguacuacau

SEQ ID NO: 876452 - RNA, 19 nt, Artificial Sequence
  Description of Artificial Sequence: Synthetic oligonucleotide
cuccgcuuacagucuucug

SEQ ID NO: 876453 - RNA, 19 nt, Artificial Sequence
  Description of Artificial Sequence: Synthetic oligonucleotide
cucgaauggcgucuugaua

SEQ ID NO: 876454 - RNA, 19 nt, Artificial Sequence
  Description of Artificial Sequence: Synthetic oligonucleotide
gaaccaacuguccguugau

SEQ ID NO: 876455 - RNA, 19 nt, Artificial Sequence
  Description of Artificial Sequence: Synthetic oligonucleotide
caagccgucuccagcauau

SEQ ID NO: 876456 - RNA, 19 nt, Artificial Sequence
  Description of Artificial Sequence: Synthetic oligonucleotide
gguuccggcgguacagugc

SEQ ID NO: 876457 - RNA, 19 nt, Artificial Sequence
  Description of Artificial Sequence: Synthetic oligonucleotide
ggcggcggccaucuaaaac

SEQ ID NO: 876458 - RNA, 19 nt, Artificial Sequence
  Description of Artificial Sequence: Synthetic oligonucleotide
ccugucagucuugaacagc

SEQ ID NO: 876459 - RNA, 19 nt, Artificial Sequence
  Description of Artificial Sequence: Synthetic oligonucleotide
ggaccaucacuucaagccu

SEQ ID NO: 876460 - RNA, 19 nt, Artificial Sequence
  Description of Artificial Sequence: Synthetic oligonucleotide
ggagacugugggcacagcu

SEQ ID NO: 876461 - RNA, 19 nt, Artificial Sequence
  Description of Artificial Sequence: Synthetic oligonucleotide
ugcccuugguuuggauggc

SEQ ID NO: 876462 - RNA, 19 nt, Artificial Sequence
  Description of Artificial Sequence: Synthetic oligonucleotide
gcucagguccggaaagacc

SEQ ID NO: 876463 - RNA, 19 nt, Artificial Sequence
  Description of Artificial Sequence: Synthetic oligonucleotide
ggcugucaagggcucccgg

SEQ ID NO: 876464 - RNA, 19 nt, Artificial Sequence
  Description of Artificial Sequence: Synthetic oligonucleotide
cagcaauguugcccaggug

SEQ ID NO: 876465 - RNA, 19 nt, Artificial Sequence
  Description of Artificial Sequence: Synthetic oligonucleotide
gcugaguuagacagccuca

SEQ ID NO: 876466 - RNA, 19 nt, Artificial Sequence
  Description of Artificial Sequence: Synthetic oligonucleotide
gcucggccugccuuauggg

SEQ ID NO: 876467 - RNA, 19 nt, Artificial Sequence
  Description of Artificial Sequence: Synthetic oligonucleotide
augcgcucaugcauucgug

SEQ ID NO: 876468 - RNA, 19 nt, Artificial Sequence
  Description of Artificial Sequence: Synthetic oligonucleotide
auccggaccaucacuucaa

SEQ ID NO: 876469 - RNA, 19 nt, Artificial Sequence
  Description of Artificial Sequence: Synthetic oligonucleotide
ccauucgcugcuccagagc

SEQ ID NO: 876470 - RNA, 19 nt, Artificial Sequence
  Description of Artificial Sequence: Synthetic oligonucleotide
ccggaccaucacuucaagc

SEQ ID NO: 876471 - RNA, 19 nt, Artificial Sequence
  Description of Artificial Sequence: Synthetic oligonucleotide
gaaaggaaguaaagugcuu

SEQ ID NO: 876472 - RNA, 19 nt, Artificial Sequence
  Description of Artificial Sequence: Synthetic oligonucleotide
ggcuagcacacuaaggcua

SEQ ID NO: 876473 - RNA, 19 nt, Artificial Sequence
  Description of Artificial Sequence: Synthetic oligonucleotide
ggugaucaaugaccagcca

SEQ ID NO: 876474 - RNA, 19 nt, Artificial Sequence
  Description of Artificial Sequence: Synthetic oligonucleotide
ugaugcccuucacgauaaa

SEQ ID NO: 876475 - RNA, 19 nt, Artificial Sequence
  Description of Artificial Sequence: Synthetic oligonucleotide
ggacuucacaagccgucuc

SEQ ID NO: 876476 - RNA, 19 nt, Artificial Sequence
  Description of Artificial Sequence: Synthetic oligonucleotide
ggcuacgcuguacuacauc

SEQ ID NO: 876477 - RNA, 19 nt, Artificial Sequence
  Description of Artificial Sequence: Synthetic oligonucleotide
guuccagaugggaugcaua

SEQ ID NO: 876478 - RNA, 19 nt, Artificial Sequence
  Description of Artificial Sequence: Synthetic oligonucleotide
ugggcaaguugaugcccuu

SEQ ID NO: 876479 - RNA, 19 nt, Artificial Sequence
  Description of Artificial Sequence: Synthetic oligonucleotide
agaggacuguaggguuaag

SEQ ID NO: 876480 - RNA, 19 nt, Artificial Sequence
  Description of Artificial Sequence: Synthetic oligonucleotide
cuacgcuguacuacauccu

SEQ ID NO: 876481 - RNA, 19 nt, Artificial Sequence
  Description of Artificial Sequence: Synthetic oligonucleotide
cccugucagucuugaacag

SEQ ID NO: 876482 - RNA, 19 nt, Artificial Sequence
  Description of Artificial Sequence: Synthetic oligonucleotide
gccgugcugaucuguuccc

SEQ ID NO: 876483 - RNA, 19 nt, Artificial Sequence
  Description of Artificial Sequence: Synthetic oligonucleotide
gccucgguauagaaguuca

SEQ ID NO: 876484 - RNA, 19 nt, Artificial Sequence
  Description of Artificial Sequence: Synthetic oligonucleotide
accgcuccauucgcugcuc

SEQ ID NO: 876485 - RNA, 19 nt, Artificial Sequence
  Description of Artificial Sequence: Synthetic oligonucleotide
gcaggggccgugcugaucu

SEQ ID NO: 876486 - RNA, 19 nt, Artificial Sequence
  Description of Artificial Sequence: Synthetic oligonucleotide
caugcuccgcuuacagucu

SEQ ID NO: 876487 - RNA, 19 nt, Artificial Sequence
  Description of Artificial Sequence: Synthetic oligonucleotide
agguccggaaagaccuuga

SEQ ID NO: 876488 - RNA, 19 nt, Artificial Sequence
  Description of Artificial Sequence: Synthetic oligonucleotide
gcagcuauggaaggcaccu

SEQ ID NO: 876489 - RNA, 19 nt, Artificial Sequence
  Description of Artificial Sequence: Synthetic oligonucleotide
augcuccgcuuacagucuu

SEQ ID NO: 876490 - RNA, 19 nt, Artificial Sequence
  Description of Artificial Sequence: Synthetic oligonucleotide
ggauccggaccaucacuuc

SEQ ID NO: 876491 - RNA, 19 nt, Artificial Sequence
  Description of Artificial Sequence: Synthetic oligonucleotide
aguuggcguuccagauggg

SEQ ID NO: 876492 - RNA, 19 nt, Artificial Sequence
  Description of Artificial Sequence: Synthetic oligonucleotide
gguuaagacuggggaagga

SEQ ID NO: 876493 - RNA, 19 nt, Artificial Sequence
  Description of Artificial Sequence: Synthetic oligonucleotide
gggugaguccagaaccaac

SEQ ID NO: 876494 - RNA, 19 nt, Artificial Sequence
  Description of Artificial Sequence: Synthetic oligonucleotide
ggcugaugcacaguuugaa

SEQ ID NO: 876495 - RNA, 19 nt, Artificial Sequence
  Description of Artificial Sequence: Synthetic oligonucleotide
gcgucuugauauugcuuga

SEQ ID NO: 876496 - RNA, 19 nt, Artificial Sequence
  Description of Artificial Sequence: Synthetic oligonucleotide
cuucucgaacuugauaguu

SEQ ID NO: 876497 - RNA, 19 nt, Artificial Sequence
  Description of Artificial Sequence: Synthetic oligonucleotide
cauugggccguggggccug

SEQ ID NO: 876498 - RNA, 19 nt, Artificial Sequence
  Description of Artificial Sequence: Synthetic oligonucleotide
cacggacuucacaagccgu

SEQ ID NO: 876499 - RNA, 19 nt, Artificial Sequence
  Description of Artificial Sequence: Synthetic oligonucleotide
gcucuuggucaaaggcuag

SEQ ID NO: 876500 - RNA, 19 nt, Artificial Sequence
  Description of Artificial Sequence: Synthetic oligonucleotide
acaggccggcgugccugcc

SEQ ID NO: 876501 - RNA, 19 nt, Artificial Sequence
  Description of Artificial Sequence: Synthetic oligonucleotide
ggcccuucggaagccgcgg

SEQ ID NO: 876502 - RNA, 19 nt, Artificial Sequence
  Description of Artificial Sequence: Synthetic oligonucleotide
gggccagaaucuuccuuuc

SEQ ID NO: 876503 - RNA, 19 nt, Artificial Sequence
  Description of Artificial Sequence: Synthetic oligonucleotide
ggcucgaauggcgucuuga

SEQ ID NO: 876504 - RNA, 19 nt, Artificial Sequence
  Description of Artificial Sequence: Synthetic oligonucleotide
ccuucaucgugguuagcaa

SEQ ID NO: 876505 - RNA, 19 nt, Artificial Sequence
  Description of Artificial Sequence: Synthetic oligonucleotide
gcagccacaugguaccgcu

SEQ ID NO: 876506 - RNA, 19 nt, Artificial Sequence
  Description of Artificial Sequence: Synthetic oligonucleotide
guucccugguucccuccaa

SEQ ID NO: 876507 - RNA, 19 nt, Artificial Sequence
  Description of Artificial Sequence: Synthetic oligonucleotide
gaugacacugaagguccuu

SEQ ID NO: 876508 - RNA, 19 nt, Artificial Sequence
  Description of Artificial Sequence: Synthetic oligonucleotide
cuguguggcgugguucaga

SEQ ID NO: 876509 - RNA, 19 nt, Artificial Sequence
  Description of Artificial Sequence: Synthetic oligonucleotide
aggggccgugcugaucugu

SEQ ID NO: 876510 - RNA, 19 nt, Artificial Sequence
  Description of Artificial Sequence: Synthetic oligonucleotide
ggugggcucugcacucucc

SEQ ID NO: 876511 - RNA, 19 nt, Artificial Sequence
  Description of Artificial Sequence: Synthetic oligonucleotide
guguggcgugguucagaca

SEQ ID NO: 876512 - RNA, 19 nt, Artificial Sequence
  Description of Artificial Sequence: Synthetic oligonucleotide
caccucuccguuguagucu

SEQ ID NO: 876513 - RNA, 19 nt, Artificial Sequence
  Description of Artificial Sequence: Synthetic oligonucleotide
cuucgaauuugaugcccuu

SEQ ID NO: 876514 - RNA, 19 nt, Artificial Sequence
  Description of Artificial Sequence: Synthetic oligonucleotide
ggauggcccuucggaagcc

SEQ ID NO: 876515 - RNA, 19 nt, Artificial Sequence
  Description of Artificial Sequence: Synthetic oligonucleotide
gggcucccggauccggacc

SEQ ID NO: 876516 - RNA, 19 nt, Artificial Sequence
  Description of Artificial Sequence: Synthetic oligonucleotide
gcccuucacgauaaacaga

SEQ ID NO: 876517 - RNA, 19 nt, Artificial Sequence
  Description of Artificial Sequence: Synthetic oligonucleotide
gcuccuggaugugcaaaca

SEQ ID NO: 876518 - RNA, 19 nt, Artificial Sequence
  Description of Artificial Sequence: Synthetic oligonucleotide
acagcucggccugccuuau

SEQ ID NO: 876519 - RNA, 19 nt, Artificial Sequence
  Description of Artificial Sequence: Synthetic oligonucleotide
uucgugccuuccgcugguc

SEQ ID NO: 876520 - RNA, 19 nt, Artificial Sequence
  Description of Artificial Sequence: Synthetic oligonucleotide
gccacuggcuacgcuguac

SEQ ID NO: 876521 - RNA, 19 nt, Artificial Sequence
  Description of Artificial Sequence: Synthetic oligonucleotide
ggagucucugaaguucgcu

SEQ ID NO: 876522 - RNA, 19 nt, Artificial Sequence
  Description of Artificial Sequence: Synthetic oligonucleotide
cacuaggagacagcccugu

SEQ ID NO: 876523 - RNA, 19 nt, Artificial Sequence
  Description of Artificial Sequence: Synthetic oligonucleotide
gguggccacggcugaugca

SEQ ID NO: 876524 - RNA, 19 nt, Artificial Sequence
  Description of Artificial Sequence: Synthetic oligonucleotide
cuugguuuggauggcccuu

SEQ ID NO: 876525 - RNA, 19 nt, Artificial Sequence
  Description of Artificial Sequence: Synthetic oligonucleotide
cuuuugcagccucccugcu

SEQ ID NO: 876526 - RNA, 19 nt, Artificial Sequence
  Description of Artificial Sequence: Synthetic oligonucleotide
guggcgugguucagacaca

SEQ ID NO: 876527 - RNA, 19 nt, Artificial Sequence
  Description of Artificial Sequence: Synthetic oligonucleotide
agcgccgggcagccucggu

SEQ ID NO: 876528 - RNA, 19 nt, Artificial Sequence
  Description of Artificial Sequence: Synthetic oligonucleotide
gggcaaguugaugcccuuc

SEQ ID NO: 876529 - RNA, 19 nt, Artificial Sequence
  Description of Artificial Sequence: Synthetic oligonucleotide
ccuuguggaccacuucgaa

SEQ ID NO: 876530 - RNA, 19 nt, Artificial Sequence
  Description of Artificial Sequence: Synthetic oligonucleotide
gccuaagcgccgggcagcc

SEQ ID NO: 876531 - RNA, 19 nt, Artificial Sequence
  Description of Artificial Sequence: Synthetic oligonucleotide
cacucuccaagcccugaau

SEQ ID NO: 876532 - RNA, 19 nt, Artificial Sequence
  Description of Artificial Sequence: Synthetic oligonucleotide
cugccuuaugggcucgaau

SEQ ID NO: 876533 - RNA, 19 nt, Artificial Sequence
  Description of Artificial Sequence: Synthetic oligonucleotide
caggggccgugcugaucug

SEQ ID NO: 876534 - RNA, 19 nt, Artificial Sequence
  Description of Artificial Sequence: Synthetic oligonucleotide
gcuuuaggguguccaugcu

SEQ ID NO: 876535 - RNA, 19 nt, Artificial Sequence
  Description of Artificial Sequence: Synthetic oligonucleotide
gagagccagcugaguuaga

SEQ ID NO: 876536 - RNA, 19 nt, Artificial Sequence
  Description of Artificial Sequence: Synthetic oligonucleotide
gcuagcacacuaaggcuau

SEQ ID NO: 876537 - RNA, 19 nt, Artificial Sequence
  Description of Artificial Sequence: Synthetic oligonucleotide
cuuugggcccggagacugu

SEQ ID NO: 876538 - RNA, 19 nt, Artificial Sequence
  Description of Artificial Sequence: Synthetic oligonucleotide
gguccggaaagaccuugau

SEQ ID NO: 876539 - RNA, 19 nt, Artificial Sequence
  Description of Artificial Sequence: Synthetic oligonucleotide
gggcagccucgguauagaa

SEQ ID NO: 876540 - RNA, 19 nt, Artificial Sequence
  Description of Artificial Sequence: Synthetic oligonucleotide
ccuugguuuggauggcccu

SEQ ID NO: 876541 - RNA, 19 nt, Artificial Sequence
  Description of Artificial Sequence: Synthetic oligonucleotide
ggccugccuuaugggcucg

SEQ ID NO: 876542 - RNA, 19 nt, Artificial Sequence
  Description of Artificial Sequence: Synthetic oligonucleotide
gggcucgaauggcgucuug

SEQ ID NO: 876543 - RNA, 19 nt, Artificial Sequence
  Description of Artificial Sequence: Synthetic oligonucleotide
cugccuggcauugggccgu

SEQ ID NO: 876544 - RNA, 19 nt, Artificial Sequence
  Description of Artificial Sequence: Synthetic oligonucleotide
guucgcucuccaccagguu

SEQ ID NO: 876545 - RNA, 19 nt, Artificial Sequence
  Description of Artificial Sequence: Synthetic oligonucleotide
gcccggagacugugggcac

SEQ ID NO: 876546 - RNA, 19 nt, Artificial Sequence
  Description of Artificial Sequence: Synthetic oligonucleotide
gcugaucuguucccugguu

SEQ ID NO: 876547 - RNA, 19 nt, Artificial Sequence
  Description of Artificial Sequence: Synthetic oligonucleotide
gcuccgcuuacagucuucu

SEQ ID NO: 876548 - RNA, 19 nt, Artificial Sequence
  Description of Artificial Sequence: Synthetic oligonucleotide
ugggaaccucuggccugau

SEQ ID NO: 876549 - RNA, 19 nt, Artificial Sequence
  Description of Artificial Sequence: Synthetic oligonucleotide
guccguugauugucugcuu

SEQ ID NO: 876550 - RNA, 19 nt, Artificial Sequence
  Description of Artificial Sequence: Synthetic oligonucleotide
gccucaccugcggagucuc

SEQ ID NO: 876551 - RNA, 19 nt, Artificial Sequence
  Description of Artificial Sequence: Synthetic oligonucleotide
cacggcugaugcacaguuu

SEQ ID NO: 876552 - RNA, 19 nt, Artificial Sequence
  Description of Artificial Sequence: Synthetic oligonucleotide
cacaagccgucuccagcau

SEQ ID NO: 876553 - RNA, 19 nt, Artificial Sequence
  Description of Artificial Sequence: Synthetic oligonucleotide
ggcggccaucuaaaaccuc

SEQ ID NO: 876554 - RNA, 19 nt, Artificial Sequence
  Description of Artificial Sequence: Synthetic oligonucleotide
gcagggguguuuugcuuuu

SEQ ID NO: 876555 - RNA, 19 nt, Artificial Sequence
  Description of Artificial Sequence: Synthetic oligonucleotide
cgcuuacagucuucugcca

SEQ ID NO: 876556 - RNA, 19 nt, Artificial Sequence
  Description of Artificial Sequence: Synthetic oligonucleotide
gcgccgggcagccucggua

SEQ ID NO: 876557 - RNA, 19 nt, Artificial Sequence
  Description of Artificial Sequence: Synthetic oligonucleotide
cugcugggaggugaucaau

SEQ ID NO: 876558 - RNA, 19 nt, Artificial Sequence
  Description of Artificial Sequence: Synthetic oligonucleotide
guccagggaugggccucac

SEQ ID NO: 876559 - RNA, 19 nt, Artificial Sequence
  Description of Artificial Sequence: Synthetic oligonucleotide
cagccucgguauagaaguu

SEQ ID NO: 876560 - RNA, 19 nt, Artificial Sequence
  Description of Artificial Sequence: Synthetic oligonucleotide
cgcucaugcauucgugccu

SEQ ID NO: 876561 - RNA, 19 nt, Artificial Sequence
  Description of Artificial Sequence: Synthetic oligonucleotide
gcgguacagugccucuuuu

SEQ ID NO: 876562 - RNA, 19 nt, Artificial Sequence
  Description of Artificial Sequence: Synthetic oligonucleotide
cagcuauggaaggcaccuu

SEQ ID NO: 876563 - RNA, 19 nt, Artificial Sequence
  Description of Artificial Sequence: Synthetic oligonucleotide
cgaauggcgucuugauauu

SEQ ID NO: 876564 - RNA, 19 nt, Artificial Sequence
  Description of Artificial Sequence: Synthetic oligonucleotide
cggacuucacaagccgucu

SEQ ID NO: 876565 - RNA, 19 nt, Artificial Sequence
  Description of Artificial Sequence: Synthetic oligonucleotide
cgggcagccucgguauaga

SEQ ID NO: 876566 - RNA, 19 nt, Artificial Sequence
  Description of Artificial Sequence: Synthetic oligonucleotide
ccgugcugaucuguucccu

SEQ ID NO: 876567 - RNA, 19 nt, Artificial Sequence
  Description of Artificial Sequence: Synthetic oligonucleotide
ccucaccugcggagucucu

SEQ ID NO: 876568 - RNA, 19 nt, Artificial Sequence
  Description of Artificial Sequence: Synthetic oligonucleotide
ccuaagcgccgggcagccu

SEQ ID NO: 876569 - RNA, 19 nt, Artificial Sequence
  Description of Artificial Sequence: Synthetic oligonucleotide
aaaccgaugauccagaaac

SEQ ID NO: 876570 - RNA, 19 nt, Artificial Sequence
  Description of Artificial Sequence: Synthetic oligonucleotide
auacuuggaaauuagauac

SEQ ID NO: 876571 - RNA, 19 nt, Artificial Sequence
  Description of Artificial Sequence: Synthetic oligonucleotide
aauaucuaagcuuuggcag

SEQ ID NO: 876572 - RNA, 19 nt, Artificial Sequence
  Description of Artificial Sequence: Synthetic oligonucleotide
aauuaaauaagacuucgug

SEQ ID NO: 876573 - RNA, 19 nt, Artificial Sequence
  Description of Artificial Sequence: Synthetic oligonucleotide
aaauaagacuucgugaugc

SEQ ID NO: 876574 - RNA, 19 nt, Artificial Sequence
  Description of Artificial Sequence: Synthetic oligonucleotide
ugagaguucgggcagaagg

SEQ ID NO: 876575 - RNA, 19 nt, Artificial Sequence
  Description of Artificial Sequence: Synthetic oligonucleotide
uacacuagaguuuagagaa

SEQ ID NO: 876576 - RNA, 19 nt, Artificial Sequence
  Description of Artificial Sequence: Synthetic oligonucleotide
uuaaauaagacuucgugau

SEQ ID NO: 876577 - RNA, 19 nt, Artificial Sequence
  Description of Artificial Sequence: Synthetic oligonucleotide
uucagaauuaaauaagacu

SEQ ID NO: 876578 - RNA, 19 nt, Artificial Sequence
  Description of Artificial Sequence: Synthetic oligonucleotide
aaacgaaaugcaucuggcc

SEQ ID NO: 876579 - RNA, 19 nt, Artificial Sequence
  Description of Artificial Sequence: Synthetic oligonucleotide
auuaaauaagacuucguga

SEQ ID NO: 876580 - RNA, 19 nt, Artificial Sequence
  Description of Artificial Sequence: Synthetic oligonucleotide
agaauaucuaagcuuuggc

SEQ ID NO: 876581 - RNA, 19 nt, Artificial Sequence
  Description of Artificial Sequence: Synthetic oligonucleotide
uccaaggaaaauaugaccu

SEQ ID NO: 876582 - RNA, 19 nt, Artificial Sequence
  Description of Artificial Sequence: Synthetic oligonucleotide
aaucucuuuggguagcagg

SEQ ID NO: 876583 - RNA, 19 nt, Artificial Sequence
  Description of Artificial Sequence: Synthetic oligonucleotide
uucuucagaauuaaauaag

SEQ ID NO: 876584 - RNA, 19 nt, Artificial Sequence
  Description of Artificial Sequence: Synthetic oligonucleotide
ucggagaacaucaaacagg

SEQ ID NO: 876585 - RNA, 19 nt, Artificial Sequence
  Description of Artificial Sequence: Synthetic oligonucleotide
uuuaagaagggaguugugg

SEQ ID NO: 876586 - RNA, 19 nt, Artificial Sequence
  Description of Artificial Sequence: Synthetic oligonucleotide
aaaacgaaaugcaucuggc

SEQ ID NO: 876587 - RNA, 19 nt, Artificial Sequence
  Description of Artificial Sequence: Synthetic oligonucleotide
auaucuaagcuuuggcagc

SEQ ID NO: 876588 - RNA, 19 nt, Artificial Sequence
  Description of Artificial Sequence: Synthetic oligonucleotide
aaacgagcccuuuagcuuc

SEQ ID NO: 876589 - RNA, 19 nt, Artificial Sequence
  Description of Artificial Sequence: Synthetic oligonucleotide
aagaucaccacgcugucug

SEQ ID NO: 876590 - RNA, 19 nt, Artificial Sequence
  Description of Artificial Sequence: Synthetic oligonucleotide
aauuugccaccuuucuagc

SEQ ID NO: 876591 - RNA, 19 nt, Artificial Sequence
  Description of Artificial Sequence: Synthetic oligonucleotide
auccuguagaaucuuaaac

SEQ ID NO: 876592 - RNA, 19 nt, Artificial Sequence
  Description of Artificial Sequence: Synthetic oligonucleotide
aauauauguagcccugugu

SEQ ID NO: 876593 - RNA, 19 nt, Artificial Sequence
  Description of Artificial Sequence: Synthetic oligonucleotide
aguugguauauccauugac

SEQ ID NO: 876594 - RNA, 19 nt, Artificial Sequence
  Description of Artificial Sequence: Synthetic oligonucleotide
aauucucauuucugguggc

SEQ ID NO: 876595 - RNA, 19 nt, Artificial Sequence
  Description of Artificial Sequence: Synthetic oligonucleotide
uauacuuggaaauuagaua

SEQ ID NO: 876596 - RNA, 19 nt, Artificial Sequence
  Description of Artificial Sequence: Synthetic oligonucleotide
ucuggcgguaguaauagcc

SEQ ID NO: 876597 - RNA, 19 nt, Artificial Sequence
  Description of Artificial Sequence: Synthetic oligonucleotide
aaauauauguagcccugug

SEQ ID NO: 876598 - RNA, 19 nt, Artificial Sequence
  Description of Artificial Sequence: Synthetic oligonucleotide
uagagaauaucuaagcuuu

SEQ ID NO: 876599 - RNA, 19 nt, Artificial Sequence
  Description of Artificial Sequence: Synthetic oligonucleotide
ucgaacuguuguaaugucg

SEQ ID NO: 876600 - RNA, 19 nt, Artificial Sequence
  Description of Artificial Sequence: Synthetic oligonucleotide
aaauaugaccucauccagg

SEQ ID NO: 876601 - RNA, 19 nt, Artificial Sequence
  Description of Artificial Sequence: Synthetic oligonucleotide
uuagagaauaucuaagcuu

SEQ ID NO: 876602 - RNA, 19 nt, Artificial Sequence
  Description of Artificial Sequence: Synthetic oligonucleotide
ugugguuguaaauuucacc

SEQ ID NO: 876603 - RNA, 19 nt, Artificial Sequence
  Description of Artificial Sequence: Synthetic oligonucleotide
uggaaauuagauacauacc

SEQ ID NO: 876604 - RNA, 19 nt, Artificial Sequence
  Description of Artificial Sequence: Synthetic oligonucleotide
gaauaucuaagcuuuggca

SEQ ID NO: 876605 - RNA, 19 nt, Artificial Sequence
  Description of Artificial Sequence: Synthetic oligonucleotide
ucucaguucaagaccgugg

SEQ ID NO: 876606 - RNA, 19 nt, Artificial Sequence
  Description of Artificial Sequence: Synthetic oligonucleotide
aauaaugggucagccaauc

SEQ ID NO: 876607 - RNA, 19 nt, Artificial Sequence
  Description of Artificial Sequence: Synthetic oligonucleotide
acuguuguaaugucguaag

SEQ ID NO: 876608 - RNA, 19 nt, Artificial Sequence
  Description of Artificial Sequence: Synthetic oligonucleotide
uauagugggugagaguucg

SEQ ID NO: 876609 - RNA, 19 nt, Artificial Sequence
  Description of Artificial Sequence: Synthetic oligonucleotide
uguuguagcgccuuguggu

SEQ ID NO: 876610 - RNA, 19 nt, Artificial Sequence
  Description of Artificial Sequence: Synthetic oligonucleotide
ucuagcggcuaguagauca

SEQ ID NO: 876611 - RNA, 19 nt, Artificial Sequence
  Description of Artificial Sequence: Synthetic oligonucleotide
ugggcauccaauaaugggu

SEQ ID NO: 876612 - RNA, 19 nt, Artificial Sequence
  Description of Artificial Sequence: Synthetic oligonucleotide
auagagaugcaggauaauc

SEQ ID NO: 876613 - RNA, 19 nt, Artificial Sequence
  Description of Artificial Sequence: Synthetic oligonucleotide
aguaauagccuucuuuagu

SEQ ID NO: 876614 - RNA, 19 nt, Artificial Sequence
  Description of Artificial Sequence: Synthetic oligonucleotide
augucguaaguuuccaagg

SEQ ID NO: 876615 - RNA, 19 nt, Artificial Sequence
  Description of Artificial Sequence: Synthetic oligonucleotide
uaaauaagacuucgugaug

SEQ ID NO: 876616 - RNA, 19 nt, Artificial Sequence
  Description of Artificial Sequence: Synthetic oligonucleotide
ugucauggcuuuaaacaag

SEQ ID NO: 876617 - RNA, 19 nt, Artificial Sequence
  Description of Artificial Sequence: Synthetic oligonucleotide
accggugaaauccaaagca

SEQ ID NO: 876618 - RNA, 19 nt, Artificial Sequence
  Description of Artificial Sequence: Synthetic oligonucleotide
cuucagaauuaaauaagac

SEQ ID NO: 876619 - RNA, 19 nt, Artificial Sequence
  Description of Artificial Sequence: Synthetic oligonucleotide
ugcauuacuguguuugucu

SEQ ID NO: 876620 - RNA, 19 nt, Artificial Sequence
  Description of Artificial Sequence: Synthetic oligonucleotide
gacucucaguucaagaccg

SEQ ID NO: 876621 - RNA, 19 nt, Artificial Sequence
  Description of Artificial Sequence: Synthetic oligonucleotide
ucaaacgucucucgaagga

SEQ ID NO: 876622 - RNA, 19 nt, Artificial Sequence
  Description of Artificial Sequence: Synthetic oligonucleotide
ggaucgguggcauugaucc

SEQ ID NO: 876623 - RNA, 19 nt, Artificial Sequence
  Description of Artificial Sequence: Synthetic oligonucleotide
gaggcggcaaccaagcucg

SEQ ID NO: 876624 - RNA, 19 nt, Artificial Sequence
  Description of Artificial Sequence: Synthetic oligonucleotide
ugaggugaucccaucacug

SEQ ID NO: 876625 - RNA, 19 nt, Artificial Sequence
  Description of Artificial Sequence: Synthetic oligonucleotide
gauaaucucaccauccaca

SEQ ID NO: 876626 - RNA, 19 nt, Artificial Sequence
  Description of Artificial Sequence: Synthetic oligonucleotide
uccgaauauacuuggaaau

SEQ ID NO: 876627 - RNA, 19 nt, Artificial Sequence
  Description of Artificial Sequence: Synthetic oligonucleotide
uggcagcugacuuauagug

SEQ ID NO: 876628 - RNA, 19 nt, Artificial Sequence
  Description of Artificial Sequence: Synthetic oligonucleotide
aauaggaggaaaaccgaug

SEQ ID NO: 876629 - RNA, 19 nt, Artificial Sequence
  Description of Artificial Sequence: Synthetic oligonucleotide
aaucuuaaaccaggaguuc

SEQ ID NO: 876630 - RNA, 19 nt, Artificial Sequence
  Description of Artificial Sequence: Synthetic oligonucleotide
uucaaagcguuguuguagc

SEQ ID NO: 876631 - RNA, 19 nt, Artificial Sequence
  Description of Artificial Sequence: Synthetic oligonucleotide
aauagccuucuuuaguuuu

SEQ ID NO: 876632 - RNA, 19 nt, Artificial Sequence
  Description of Artificial Sequence: Synthetic oligonucleotide
cuucguaguguccaggaag

SEQ ID NO: 876633 - RNA, 19 nt, Artificial Sequence
  Description of Artificial Sequence: Synthetic oligonucleotide
aacaggauacgaagauugc

SEQ ID NO: 876634 - RNA, 19 nt, Artificial Sequence
  Description of Artificial Sequence: Synthetic oligonucleotide
cuuucuagcggcuaguaga

SEQ ID NO: 876635 - RNA, 19 nt, Artificial Sequence
  Description of Artificial Sequence: Synthetic oligonucleotide
ugucguaaguuuccaagga

SEQ ID NO: 876636 - RNA, 19 nt, Artificial Sequence
  Description of Artificial Sequence: Synthetic oligonucleotide
ugagaagaacacuuuuaca

SEQ ID NO: 876637 - RNA, 19 nt, Artificial Sequence
  Description of Artificial Sequence: Synthetic oligonucleotide
aauaagacuucgugaugcu

SEQ ID NO: 876638 - RNA, 19 nt, Artificial Sequence
  Description of Artificial Sequence: Synthetic oligonucleotide
gguauauccauugacauuc

SEQ ID NO: 876639 - RNA, 19 nt, Artificial Sequence
  Description of Artificial Sequence: Synthetic oligonucleotide
uuuuacacuagaguuuaga

SEQ ID NO: 876640 - RNA, 19 nt, Artificial Sequence
  Description of Artificial Sequence: Synthetic oligonucleotide
auggcguucaaagaucugg

SEQ ID NO: 876641 - RNA, 19 nt, Artificial Sequence
  Description of Artificial Sequence: Synthetic oligonucleotide
cucaguucaagaccguggg

SEQ ID NO: 876642 - RNA, 19 nt, Artificial Sequence
  Description of Artificial Sequence: Synthetic oligonucleotide
uauugaagggaaacuucug

SEQ ID NO: 876643 - RNA, 19 nt, Artificial Sequence
  Description of Artificial Sequence: Synthetic oligonucleotide
uugguauauccauugacau

SEQ ID NO: 876644 - RNA, 19 nt, Artificial Sequence
  Description of Artificial Sequence: Synthetic oligonucleotide
ucguaaguuuccaaggaaa

SEQ ID NO: 876645 - RNA, 19 nt, Artificial Sequence
  Description of Artificial Sequence: Synthetic oligonucleotide
ucuaacucaaagccuugga

SEQ ID NO: 876646 - RNA, 19 nt, Artificial Sequence
  Description of Artificial Sequence: Synthetic oligonucleotide
ggaaauuagauacauaccu

SEQ ID NO: 876647 - RNA, 19 nt, Artificial Sequence
  Description of Artificial Sequence: Synthetic oligonucleotide
agaaacgggacucucaguu

SEQ ID NO: 876648 - RNA, 19 nt, Artificial Sequence
  Description of Artificial Sequence: Synthetic oligonucleotide
uuccgaauauacuuggaaa

SEQ ID NO: 876649 - RNA, 19 nt, Artificial Sequence
  Description of Artificial Sequence: Synthetic oligonucleotide
cacggaaaggcagucaucg

SEQ ID NO: 876650 - RNA, 19 nt, Artificial Sequence
  Description of Artificial Sequence: Synthetic oligonucleotide
aacuucguaguguccagga

SEQ ID NO: 876651 - RNA, 19 nt, Artificial Sequence
  Description of Artificial Sequence: Synthetic oligonucleotide
auauaauuugccaccuuuc

SEQ ID NO: 876652 - RNA, 19 nt, Artificial Sequence
  Description of Artificial Sequence: Synthetic oligonucleotide
ugccaauugcaaaugucug

SEQ ID NO: 876653 - RNA, 19 nt, Artificial Sequence
  Description of Artificial Sequence: Synthetic oligonucleotide
uaauaggaggaaaaccgau

SEQ ID NO: 876654 - RNA, 19 nt, Artificial Sequence
  Description of Artificial Sequence: Synthetic oligonucleotide
aggaaacgagcccuuuagc

SEQ ID NO: 876655 - RNA, 19 nt, Artificial Sequence
  Description of Artificial Sequence: Synthetic oligonucleotide
ggcagugacaaguaauagg

SEQ ID NO: 876656 - RNA, 19 nt, Artificial Sequence
  Description of Artificial Sequence: Synthetic oligonucleotide
aaugcaucuggcccucugu

SEQ ID NO: 876657 - RNA, 19 nt, Artificial Sequence
  Description of Artificial Sequence: Synthetic oligonucleotide
uuaacugaggugaucccau

SEQ ID NO: 876658 - RNA, 19 nt, Artificial Sequence
  Description of Artificial Sequence: Synthetic oligonucleotide
accaagcucgaguccaggc

SEQ ID NO: 876659 - RNA, 19 nt, Artificial Sequence
  Description of Artificial Sequence: Synthetic oligonucleotide
aguucgggcagaaggaucg

SEQ ID NO: 876660 - RNA, 19 nt, Artificial Sequence
  Description of Artificial Sequence: Synthetic oligonucleotide
uggucugauacucgaauuc

SEQ ID NO: 876661 - RNA, 19 nt, Artificial Sequence
  Description of Artificial Sequence: Synthetic oligonucleotide
uuuuaagaagggaguugug

SEQ ID NO: 876662 - RNA, 19 nt, Artificial Sequence
  Description of Artificial Sequence: Synthetic oligonucleotide
cucggagaacaucaaacag

SEQ ID NO: 876663 - RNA, 19 nt, Artificial Sequence
  Description of Artificial Sequence: Synthetic oligonucleotide
caggauacgaagauugcuc

SEQ ID NO: 876664 - RNA, 19 nt, Artificial Sequence
  Description of Artificial Sequence: Synthetic oligonucleotide
aaaaccgaugauccagaaa

SEQ ID NO: 876665 - RNA, 19 nt, Artificial Sequence
  Description of Artificial Sequence: Synthetic oligonucleotide
gaucuggcgguaguaauag

SEQ ID NO: 876666 - RNA, 19 nt, Artificial Sequence
  Description of Artificial Sequence: Synthetic oligonucleotide
aucaagcgcuuccugacag

SEQ ID NO: 876667 - RNA, 19 nt, Artificial Sequence
  Description of Artificial Sequence: Synthetic oligonucleotide
gucauggcuuuaaacaagg

SEQ ID NO: 876668 - RNA, 19 nt, Artificial Sequence
  Description of Artificial Sequence: Synthetic oligonucleotide
uguuguaaugucguaaguu

SEQ ID NO: 876669 - RNA, 19 nt, Artificial Sequence
  Description of Artificial Sequence: Synthetic oligonucleotide
aggauacgaagauugcucu

SEQ ID NO: 876670 - RNA, 19 nt, Artificial Sequence
  Description of Artificial Sequence: Synthetic oligonucleotide
ucgcuuccaauauaauuug

SEQ ID NO: 876671 - RNA, 19 nt, Artificial Sequence
  Description of Artificial Sequence: Synthetic oligonucleotide
ucaaagcguuguuguagcg

SEQ ID NO: 876672 - RNA, 19 nt, Artificial Sequence
  Description of Artificial Sequence: Synthetic oligonucleotide
gauacgaagauugcucuuc

SEQ ID NO: 876673 - RNA, 19 nt, Artificial Sequence
  Description of Artificial Sequence: Synthetic oligonucleotide
auuggucugauacucgaau

SEQ ID NO: 876674 - RNA, 19 nt, Artificial Sequence
  Description of Artificial Sequence: Synthetic oligonucleotide
uccaauaaugggucagcca

SEQ ID NO: 876675 - RNA, 19 nt, Artificial Sequence
  Description of Artificial Sequence: Synthetic oligonucleotide
ucaaagaucuggcgguagu

SEQ ID NO: 876676 - RNA, 19 nt, Artificial Sequence
  Description of Artificial Sequence: Synthetic oligonucleotide
uauauguagcccuguguaa

SEQ ID NO: 876677 - RNA, 19 nt, Artificial Sequence
  Description of Artificial Sequence: Synthetic oligonucleotide
uucaccguuucuaacucaa

SEQ ID NO: 876678 - RNA, 19 nt, Artificial Sequence
  Description of Artificial Sequence: Synthetic oligonucleotide
uuccaugccuauguaagcc

SEQ ID NO: 876679 - RNA, 19 nt, Artificial Sequence
  Description of Artificial Sequence: Synthetic oligonucleotide
uuucuagcggcuaguagau

SEQ ID NO: 876680 - RNA, 19 nt, Artificial Sequence
  Description of Artificial Sequence: Synthetic oligonucleotide
auauccauugacauucuca

SEQ ID NO: 876681 - RNA, 19 nt, Artificial Sequence
  Description of Artificial Sequence: Synthetic oligonucleotide
aaacuucguaguguccagg

SEQ ID NO: 876682 - RNA, 19 nt, Artificial Sequence
  Description of Artificial Sequence: Synthetic oligonucleotide
caccguuucuaacucaaag

SEQ ID NO: 876683 - RNA, 19 nt, Artificial Sequence
  Description of Artificial Sequence: Synthetic oligonucleotide
aacuguuguaaugucguaa

SEQ ID NO: 876684 - RNA, 19 nt, Artificial Sequence
  Description of Artificial Sequence: Synthetic oligonucleotide
aguucaagaccgugggcag

SEQ ID NO: 876685 - RNA, 19 nt, Artificial Sequence
  Description of Artificial Sequence: Synthetic oligonucleotide
cucaaaacgaaaugcaucu

SEQ ID NO: 876686 - RNA, 19 nt, Artificial Sequence
  Description of Artificial Sequence: Synthetic oligonucleotide
acgaaaugcaucuggcccu

SEQ ID NO: 876687 - RNA, 19 nt, Artificial Sequence
  Description of Artificial Sequence: Synthetic oligonucleotide
ucuucaccguuucuaacuc

SEQ ID NO: 876688 - RNA, 19 nt, Artificial Sequence
  Description of Artificial Sequence: Synthetic oligonucleotide
ugguuugcucgauaccucc

SEQ ID NO: 876689 - RNA, 19 nt, Artificial Sequence
  Description of Artificial Sequence: Synthetic oligonucleotide
uuugcauuacuguguuugu

SEQ ID NO: 876690 - RNA, 19 nt, Artificial Sequence
  Description of Artificial Sequence: Synthetic oligonucleotide
cucaaacgucucucgaagg

SEQ ID NO: 876691 - RNA, 19 nt, Artificial Sequence
  Description of Artificial Sequence: Synthetic oligonucleotide
ugcaggauaaucucaccau

SEQ ID NO: 876692 - RNA, 19 nt, Artificial Sequence
  Description of Artificial Sequence: Synthetic oligonucleotide
aggauaaucucaccaucca

SEQ ID NO: 876693 - RNA, 19 nt, Artificial Sequence
  Description of Artificial Sequence: Synthetic oligonucleotide
uacucgaauucaaagcguu

SEQ ID NO: 876694 - RNA, 19 nt, Artificial Sequence
  Description of Artificial Sequence: Synthetic oligonucleotide
ccguuucuaacucaaagcc

SEQ ID NO: 876695 - RNA, 19 nt, Artificial Sequence
  Description of Artificial Sequence: Synthetic oligonucleotide
caguaguucggucggcucg

SEQ ID NO: 876696 - RNA, 19 nt, Artificial Sequence
  Description of Artificial Sequence: Synthetic oligonucleotide
ugcacggaaaggcagucau

SEQ ID NO: 876697 - RNA, 19 nt, Artificial Sequence
  Description of Artificial Sequence: Synthetic oligonucleotide
ucuuaaaccaggaguucuu

SEQ ID NO: 876698 - RNA, 19 nt, Artificial Sequence
  Description of Artificial Sequence: Synthetic oligonucleotide
gcguucaaagaucuggcgg

SEQ ID NO: 876699 - RNA, 19 nt, Artificial Sequence
  Description of Artificial Sequence: Synthetic oligonucleotide
aguucggucggcucggaga

SEQ ID NO: 876700 - RNA, 19 nt, Artificial Sequence
  Description of Artificial Sequence: Synthetic oligonucleotide
gaguggauacuguacuuga

SEQ ID NO: 876701 - RNA, 19 nt, Artificial Sequence
  Description of Artificial Sequence: Synthetic oligonucleotide
uuuaaggaaacgagcccuu

SEQ ID NO: 876702 - RNA, 19 nt, Artificial Sequence
  Description of Artificial Sequence: Synthetic oligonucleotide
acggaaaggcagucaucgc

SEQ ID NO: 876703 - RNA, 19 nt, Artificial Sequence
  Description of Artificial Sequence: Synthetic oligonucleotide
aaggcagucaucgcugcca

SEQ ID NO: 876704 - RNA, 19 nt, Artificial Sequence
  Description of Artificial Sequence: Synthetic oligonucleotide
caaagcguuguuguagcgc

SEQ ID NO: 876705 - RNA, 19 nt, Artificial Sequence
  Description of Artificial Sequence: Synthetic oligonucleotide
ugcucgauaccuccuuugu

SEQ ID NO: 876706 - RNA, 19 nt, Artificial Sequence
  Description of Artificial Sequence: Synthetic oligonucleotide
uuggcagcugacuuauagu

SEQ ID NO: 876707 - RNA, 19 nt, Artificial Sequence
  Description of Artificial Sequence: Synthetic oligonucleotide
gaaucuuaaaccaggaguu

SEQ ID NO: 876708 - RNA, 19 nt, Artificial Sequence
  Description of Artificial Sequence: Synthetic oligonucleotide
gaagggaaacuucugggcu

SEQ ID NO: 876709 - RNA, 19 nt, Artificial Sequence
  Description of Artificial Sequence: Synthetic oligonucleotide
ugauaaaaggcagccgauc

SEQ ID NO: 876710 - RNA, 19 nt, Artificial Sequence
  Description of Artificial Sequence: Synthetic oligonucleotide
aaacgucucucgaaggaga

SEQ ID NO: 876711 - RNA, 19 nt, Artificial Sequence
  Description of Artificial Sequence: Synthetic oligonucleotide
gucaaccacggccaaccgg

SEQ ID NO: 876712 - RNA, 19 nt, Artificial Sequence
  Description of Artificial Sequence: Synthetic oligonucleotide
cagccgauccuccuguccg

SEQ ID NO: 876713 - RNA, 19 nt, Artificial Sequence
  Description of Artificial Sequence: Synthetic oligonucleotide
aaacaagggccugacucca

SEQ ID NO: 876714 - RNA, 19 nt, Artificial Sequence
  Description of Artificial Sequence: Synthetic oligonucleotide
uuauagugggugagaguuc

SEQ ID NO: 876715 - RNA, 19 nt, Artificial Sequence
  Description of Artificial Sequence: Synthetic oligonucleotide
uaguagaucagggcugucu

SEQ ID NO: 876716 - RNA, 19 nt, Artificial Sequence
  Description of Artificial Sequence: Synthetic oligonucleotide
auacgaagauugcucuuca

SEQ ID NO: 876717 - RNA, 19 nt, Artificial Sequence
  Description of Artificial Sequence: Synthetic oligonucleotide
uccucaaacgucucucgaa

SEQ ID NO: 876718 - RNA, 19 nt, Artificial Sequence
  Description of Artificial Sequence: Synthetic oligonucleotide
uucaaagaucuggcgguag

SEQ ID NO: 876719 - RNA, 19 nt, Artificial Sequence
  Description of Artificial Sequence: Synthetic oligonucleotide
uccaugccuauguaagccu

SEQ ID NO: 876720 - RNA, 19 nt, Artificial Sequence
  Description of Artificial Sequence: Synthetic oligonucleotide
cuuccugacagcacuguca

SEQ ID NO: 876721 - RNA, 19 nt, Artificial Sequence
  Description of Artificial Sequence: Synthetic oligonucleotide
aguaguucggucggcucgg

SEQ ID NO: 876722 - RNA, 19 nt, Artificial Sequence
  Description of Artificial Sequence: Synthetic oligonucleotide
uucaagaccgugggcagca

SEQ ID NO: 876723 - RNA, 19 nt, Artificial Sequence
  Description of Artificial Sequence: Synthetic oligonucleotide
acauaccuacagaugcucg

SEQ ID NO: 876724 - RNA, 19 nt, Artificial Sequence
  Description of Artificial Sequence: Synthetic oligonucleotide
caauugcaaaugucuggag

SEQ ID NO: 876725 - RNA, 19 nt, Artificial Sequence
  Description of Artificial Sequence: Synthetic oligonucleotide
gcauugauccacuugggca

SEQ ID NO: 876726 - RNA, 19 nt, Artificial Sequence
  Description of Artificial Sequence: Synthetic oligonucleotide
auaaugggucagccaauca

SEQ ID NO: 876727 - RNA, 19 nt, Artificial Sequence
  Description of Artificial Sequence: Synthetic oligonucleotide
uugcucgauaccuccuuug

SEQ ID NO: 876728 - RNA, 19 nt, Artificial Sequence
  Description of Artificial Sequence: Synthetic oligonucleotide
caaacgucucucgaaggag

SEQ ID NO: 876729 - RNA, 19 nt, Artificial Sequence
  Description of Artificial Sequence: Synthetic oligonucleotide
uacauaccuacagaugcuc

SEQ ID NO: 876730 - RNA, 19 nt, Artificial Sequence
  Description of Artificial Sequence: Synthetic oligonucleotide
ucgaauucaaagcguuguu

SEQ ID NO: 876731 - RNA, 19 nt, Artificial Sequence
  Description of Artificial Sequence: Synthetic oligonucleotide
uguagcccuguguaaguuc

SEQ ID NO: 876732 - RNA, 19 nt, Artificial Sequence
  Description of Artificial Sequence: Synthetic oligonucleotide
agggccugacuccauaggu

SEQ ID NO: 876733 - RNA, 19 nt, Artificial Sequence
  Description of Artificial Sequence: Synthetic oligonucleotide
ugguauauccauugacauu

SEQ ID NO: 876734 - RNA, 19 nt, Artificial Sequence
  Description of Artificial Sequence: Synthetic oligonucleotide
agaguuuagagaauaucua

SEQ ID NO: 876735 - RNA, 19 nt, Artificial Sequence
  Description of Artificial Sequence: Synthetic oligonucleotide
gcuuuaaggaaacgagccc

SEQ ID NO: 876736 - RNA, 19 nt, Artificial Sequence
  Description of Artificial Sequence: Synthetic oligonucleotide
aucuggcgguaguaauagc

SEQ ID NO: 876737 - RNA, 19 nt, Artificial Sequence
  Description of Artificial Sequence: Synthetic oligonucleotide
cuagcggcuaguagaucag

SEQ ID NO: 876738 - RNA, 19 nt, Artificial Sequence
  Description of Artificial Sequence: Synthetic oligonucleotide
ugacuuauagugggugaga

SEQ ID NO: 876739 - RNA, 19 nt, Artificial Sequence
  Description of Artificial Sequence: Synthetic oligonucleotide
cuuauagugggugagaguu

SEQ ID NO: 876740 - RNA, 19 nt, Artificial Sequence
  Description of Artificial Sequence: Synthetic oligonucleotide
uuggucugauacucgaauu

SEQ ID NO: 876741 - RNA, 19 nt, Artificial Sequence
  Description of Artificial Sequence: Synthetic oligonucleotide
guaauggcguucaaagauc

SEQ ID NO: 876742 - RNA, 19 nt, Artificial Sequence
  Description of Artificial Sequence: Synthetic oligonucleotide
ggaaauauauguagcccug

SEQ ID NO: 876743 - RNA, 19 nt, Artificial Sequence
  Description of Artificial Sequence: Synthetic oligonucleotide
ugacaaguaauaggaggaa

SEQ ID NO: 876744 - RNA, 19 nt, Artificial Sequence
  Description of Artificial Sequence: Synthetic oligonucleotide
gguaauggcguucaaagau

SEQ ID NO: 876745 - RNA, 19 nt, Artificial Sequence
  Description of Artificial Sequence: Synthetic oligonucleotide
ugccuauguaagccugagc

SEQ ID NO: 876746 - RNA, 19 nt, Artificial Sequence
  Description of Artificial Sequence: Synthetic oligonucleotide
caguucaagaccgugggca

SEQ ID NO: 876747 - RNA, 19 nt, Artificial Sequence
  Description of Artificial Sequence: Synthetic oligonucleotide
ugguucaucucugcaguga

SEQ ID NO: 876748 - RNA, 19 nt, Artificial Sequence
  Description of Artificial Sequence: Synthetic oligonucleotide
gaguuucuccacgcugucg

SEQ ID NO: 876749 - RNA, 19 nt, Artificial Sequence
  Description of Artificial Sequence: Synthetic oligonucleotide
aaccaagcucgaguccagg

SEQ ID NO: 876750 - RNA, 19 nt, Artificial Sequence
  Description of Artificial Sequence: Synthetic oligonucleotide
uguagcgccuugugguugu

SEQ ID NO: 876751 - RNA, 19 nt, Artificial Sequence
  Description of Artificial Sequence: Synthetic oligonucleotide
acggccaaccggugaaauc

SEQ ID NO: 876752 - RNA, 19 nt, Artificial Sequence
  Description of Artificial Sequence: Synthetic oligonucleotide
cuuauuggcugcauuccaa

SEQ ID NO: 876753 - RNA, 19 nt, Artificial Sequence
  Description of Artificial Sequence: Synthetic oligonucleotide
uuugcucgauaccuccuuu

SEQ ID NO: 876754 - RNA, 19 nt, Artificial Sequence
  Description of Artificial Sequence: Synthetic oligonucleotide
ccugauaaaaggcagccga

SEQ ID NO: 876755 - RNA, 19 nt, Artificial Sequence
  Description of Artificial Sequence: Synthetic oligonucleotide
gagaugcaggauaaucuca

SEQ ID NO: 876756 - RNA, 19 nt, Artificial Sequence
  Description of Artificial Sequence: Synthetic oligonucleotide
ggauaaucucaccauccac

SEQ ID NO: 876757 - RNA, 19 nt, Artificial Sequence
  Description of Artificial Sequence: Synthetic oligonucleotide
cuguccgucaucaagcgcu

SEQ ID NO: 876758 - RNA, 19 nt, Artificial Sequence
  Description of Artificial Sequence: Synthetic oligonucleotide
aaccacggccaaccgguga

SEQ ID NO: 876759 - RNA, 19 nt, Artificial Sequence
  Description of Artificial Sequence: Synthetic oligonucleotide
gaaacgagcccuuuagcuu

SEQ ID NO: 876760 - RNA, 19 nt, Artificial Sequence
  Description of Artificial Sequence: Synthetic oligonucleotide
cuuuaaggaaacgagcccu

SEQ ID NO: 876761 - RNA, 19 nt, Artificial Sequence
  Description of Artificial Sequence: Synthetic oligonucleotide
uacgaagauugcucuucac

SEQ ID NO: 876762 - RNA, 19 nt, Artificial Sequence
  Description of Artificial Sequence: Synthetic oligonucleotide
gaagauugcucuucaccgu

SEQ ID NO: 876763 - RNA, 19 nt, Artificial Sequence
  Description of Artificial Sequence: Synthetic oligonucleotide
aggugaucccaucacugaa

SEQ ID NO: 876764 - RNA, 19 nt, Artificial Sequence
  Description of Artificial Sequence: Synthetic oligonucleotide
cucgaacuguuguaauguc

SEQ ID NO: 876765 - RNA, 19 nt, Artificial Sequence
  Description of Artificial Sequence: Synthetic oligonucleotide
ucgauaccuccuuugucau

SEQ ID NO: 876766 - RNA, 19 nt, Artificial Sequence
  Description of Artificial Sequence: Synthetic oligonucleotide
gaaaaccgaugauccagaa

SEQ ID NO: 876767 - RNA, 19 nt, Artificial Sequence
  Description of Artificial Sequence: Synthetic oligonucleotide
auacauaccuacagaugcu

SEQ ID NO: 876768 - RNA, 19 nt, Artificial Sequence
  Description of Artificial Sequence: Synthetic oligonucleotide
auacucgaauucaaagcgu

SEQ ID NO: 876769 - RNA, 19 nt, Artificial Sequence
  Description of Artificial Sequence: Synthetic oligonucleotide
gucguaaguuuccaaggaa

SEQ ID NO: 876770 - RNA, 19 nt, Artificial Sequence
  Description of Artificial Sequence: Synthetic oligonucleotide
cauuacuguguuugucuca

SEQ ID NO: 876771 - RNA, 19 nt, Artificial Sequence
  Description of Artificial Sequence: Synthetic oligonucleotide
augguuugcucgauaccuc

SEQ ID NO: 876772 - RNA, 19 nt, Artificial Sequence
  Description of Artificial Sequence: Synthetic oligonucleotide
ucggucggcucggagaaca

SEQ ID NO: 876773 - RNA, 19 nt, Artificial Sequence
  Description of Artificial Sequence: Synthetic oligonucleotide
ccucaaacgucucucgaag

SEQ ID NO: 876774 - RNA, 19 nt, Artificial Sequence
  Description of Artificial Sequence: Synthetic oligonucleotide
ggaaacgagcccuuuagcu

SEQ ID NO: 876775 - RNA, 19 nt, Artificial Sequence
  Description of Artificial Sequence: Synthetic oligonucleotide
ggcaguguccagcaagaug

SEQ ID NO: 876776 - RNA, 19 nt, Artificial Sequence
  Description of Artificial Sequence: Synthetic oligonucleotide
aaggaucgguggcauugau

SEQ ID NO: 876777 - RNA, 19 nt, Artificial Sequence
  Description of Artificial Sequence: Synthetic oligonucleotide
agcgccuugugguuguaaa

SEQ ID NO: 876778 - RNA, 19 nt, Artificial Sequence
  Description of Artificial Sequence: Synthetic oligonucleotide
agagaauaucuaagcuuug

SEQ ID NO: 876779 - RNA, 19 nt, Artificial Sequence
  Description of Artificial Sequence: Synthetic oligonucleotide
uagcggcuaguagaucagg

SEQ ID NO: 876780 - RNA, 19 nt, Artificial Sequence
  Description of Artificial Sequence: Synthetic oligonucleotide
cauugauccacuugggcau

SEQ ID NO: 876781 - RNA, 19 nt, Artificial Sequence
  Description of Artificial Sequence: Synthetic oligonucleotide
aggaucgguggcauugauc

SEQ ID NO: 876782 - RNA, 19 nt, Artificial Sequence
  Description of Artificial Sequence: Synthetic oligonucleotide
uaguucggucggcucggag

SEQ ID NO: 876783 - RNA, 19 nt, Artificial Sequence
  Description of Artificial Sequence: Synthetic oligonucleotide
gucggcucggagaacauca

SEQ ID NO: 876784 - RNA, 19 nt, Artificial Sequence
  Description of Artificial Sequence: Synthetic oligonucleotide
cacagauaaggguauuucu

SEQ ID NO: 876785 - RNA, 19 nt, Artificial Sequence
  Description of Artificial Sequence: Synthetic oligonucleotide
uuguagcgccuugugguug

SEQ ID NO: 876786 - RNA, 19 nt, Artificial Sequence
  Description of Artificial Sequence: Synthetic oligonucleotide
ggaguggauacuguacuug

SEQ ID NO: 876787 - RNA, 19 nt, Artificial Sequence
  Description of Artificial Sequence: Synthetic oligonucleotide
ggcucggagaacaucaaac

SEQ ID NO: 876788 - RNA, 19 nt, Artificial Sequence
  Description of Artificial Sequence: Synthetic oligonucleotide
gaucaccacgcugucugug

SEQ ID NO: 876789 - RNA, 19 nt, Artificial Sequence
  Description of Artificial Sequence: Synthetic oligonucleotide
ccggugaaauccaaagcag

SEQ ID NO: 876790 - RNA, 19 nt, Artificial Sequence
  Description of Artificial Sequence: Synthetic oligonucleotide
uucgugaugcucgcuucca

SEQ ID NO: 876791 - RNA, 19 nt, Artificial Sequence
  Description of Artificial Sequence: Synthetic oligonucleotide
augccuauguaagccugag

SEQ ID NO: 876792 - RNA, 19 nt, Artificial Sequence
  Description of Artificial Sequence: Synthetic oligonucleotide
cuagggccagaggaggcgg

SEQ ID NO: 876793 - RNA, 19 nt, Artificial Sequence
  Description of Artificial Sequence: Synthetic oligonucleotide
acuucguaguguccaggaa

SEQ ID NO: 876794 - RNA, 19 nt, Artificial Sequence
  Description of Artificial Sequence: Synthetic oligonucleotide
ucucucgaaggagauguuu

SEQ ID NO: 876795 - RNA, 19 nt, Artificial Sequence
  Description of Artificial Sequence: Synthetic oligonucleotide
ucaccguuucuaacucaaa

SEQ ID NO: 876796 - RNA, 19 nt, Artificial Sequence
  Description of Artificial Sequence: Synthetic oligonucleotide
gaugcucgcuuccaauaua

SEQ ID NO: 876797 - RNA, 19 nt, Artificial Sequence
  Description of Artificial Sequence: Synthetic oligonucleotide
cucucaguucaagaccgug

SEQ ID NO: 876798 - RNA, 19 nt, Artificial Sequence
  Description of Artificial Sequence: Synthetic oligonucleotide
caaccaagcucgaguccag

SEQ ID NO: 876799 - RNA, 19 nt, Artificial Sequence
  Description of Artificial Sequence: Synthetic oligonucleotide
gaagggaguuguggagugc

SEQ ID NO: 876800 - RNA, 19 nt, Artificial Sequence
  Description of Artificial Sequence: Synthetic oligonucleotide
guucggucggcucggagaa

SEQ ID NO: 876801 - RNA, 19 nt, Artificial Sequence
  Description of Artificial Sequence: Synthetic oligonucleotide
ccaagcucgaguccaggcc

SEQ ID NO: 876802 - RNA, 19 nt, Artificial Sequence
  Description of Artificial Sequence: Synthetic oligonucleotide
gggucaaccacggccaacc

SEQ ID NO: 876803 - RNA, 19 nt, Artificial Sequence
  Description of Artificial Sequence: Synthetic oligonucleotide
ucgugaugcucgcuuccaa

SEQ ID NO: 876804 - RNA, 19 nt, Artificial Sequence
  Description of Artificial Sequence: Synthetic oligonucleotide
gcaaucuucauugcacuca

SEQ ID NO: 876805 - RNA, 19 nt, Artificial Sequence
  Description of Artificial Sequence: Synthetic oligonucleotide
gcggcuaguagaucagggc

SEQ ID NO: 876806 - RNA, 19 nt, Artificial Sequence
  Description of Artificial Sequence: Synthetic oligonucleotide
ugagcaguugaugguugau

SEQ ID NO: 876807 - RNA, 19 nt, Artificial Sequence
  Description of Artificial Sequence: Synthetic oligonucleotide
agagggcccaaaugccaca

SEQ ID NO: 876808 - RNA, 19 nt, Artificial Sequence
  Description of Artificial Sequence: Synthetic oligonucleotide
caugccuauguaagccuga

SEQ ID NO: 876809 - RNA, 19 nt, Artificial Sequence
  Description of Artificial Sequence: Synthetic oligonucleotide
ggcuaguagaucagggcug

SEQ ID NO: 876810 - RNA, 19 nt, Artificial Sequence
  Description of Artificial Sequence: Synthetic oligonucleotide
ucgcugccaaagagggccc

SEQ ID NO: 876811 - RNA, 19 nt, Artificial Sequence
  Description of Artificial Sequence: Synthetic oligonucleotide
cucgaauucaaagcguugu

SEQ ID NO: 876812 - RNA, 19 nt, Artificial Sequence
  Description of Artificial Sequence: Synthetic oligonucleotide
augcucgaacuguuguaau

SEQ ID NO: 876813 - RNA, 19 nt, Artificial Sequence
  Description of Artificial Sequence: Synthetic oligonucleotide
augcucgcuuccaauauaa

SEQ ID NO: 876814 - RNA, 19 nt, Artificial Sequence
  Description of Artificial Sequence: Synthetic oligonucleotide
cggugaaauccaaagcagc

SEQ ID NO: 876815 - RNA, 19 nt, Artificial Sequence
  Description of Artificial Sequence: Synthetic oligonucleotide
gaguucgggcagaaggauc

SEQ ID NO: 876816 - RNA, 19 nt, Artificial Sequence
  Description of Artificial Sequence: Synthetic oligonucleotide
accccauccaacauacaaa

SEQ ID NO: 876817 - RNA, 19 nt, Artificial Sequence
  Description of Artificial Sequence: Synthetic oligonucleotide
ugcucgcuuccaauauaau

SEQ ID NO: 876818 - RNA, 19 nt, Artificial Sequence
  Description of Artificial Sequence: Synthetic oligonucleotide
cuucaccguuucuaacuca

SEQ ID NO: 876819 - RNA, 19 nt, Artificial Sequence
  Description of Artificial Sequence: Synthetic oligonucleotide
guagagggcgugcaguggu

SEQ ID NO: 876820 - RNA, 19 nt, Artificial Sequence
  Description of Artificial Sequence: Synthetic oligonucleotide
gcaaccaagcucgagucca

SEQ ID NO: 876821 - RNA, 19 nt, Artificial Sequence
  Description of Artificial Sequence: Synthetic oligonucleotide
agaccgugggcagcaguag

SEQ ID NO: 876822 - RNA, 19 nt, Artificial Sequence
  Description of Artificial Sequence: Synthetic oligonucleotide
ucaccacgcugucuguguu

SEQ ID NO: 876823 - RNA, 19 nt, Artificial Sequence
  Description of Artificial Sequence: Synthetic oligonucleotide
ucggcucggagaacaucaa

SEQ ID NO: 876824 - RNA, 19 nt, Artificial Sequence
  Description of Artificial Sequence: Synthetic oligonucleotide
auagugggugagaguucgg

SEQ ID NO: 876825 - RNA, 19 nt, Artificial Sequence
  Description of Artificial Sequence: Synthetic oligonucleotide
uguccgucaucaagcgcuu

SEQ ID NO: 876826 - RNA, 19 nt, Artificial Sequence
  Description of Artificial Sequence: Synthetic oligonucleotide
ggcaaccaagcucgagucc

SEQ ID NO: 876827 - RNA, 19 nt, Artificial Sequence
  Description of Artificial Sequence: Synthetic oligonucleotide
caucaagcgcuuccugaca

SEQ ID NO: 876828 - RNA, 19 nt, Artificial Sequence
  Description of Artificial Sequence: Synthetic oligonucleotide
ccuuucuagcggcuaguag

SEQ ID NO: 876829 - RNA, 19 nt, Artificial Sequence
  Description of Artificial Sequence: Synthetic oligonucleotide
gacuucgugaugcucgcuu

SEQ ID NO: 876830 - RNA, 19 nt, Artificial Sequence
  Description of Artificial Sequence: Synthetic oligonucleotide
ucguaguguccaggaagga

SEQ ID NO: 876831 - RNA, 19 nt, Artificial Sequence
  Description of Artificial Sequence: Synthetic oligonucleotide
cuuaaaccaggaguucuua

SEQ ID NO: 876832 - RNA, 19 nt, Artificial Sequence
  Description of Artificial Sequence: Synthetic oligonucleotide
cuggcgguaguaauagccu

SEQ ID NO: 876833 - RNA, 19 nt, Artificial Sequence
  Description of Artificial Sequence: Synthetic oligonucleotide
caguugguauauccauuga

SEQ ID NO: 876834 - RNA, 19 nt, Artificial Sequence
  Description of Artificial Sequence: Synthetic oligonucleotide
ccaugccuauguaagccug

SEQ ID NO: 876835 - RNA, 19 nt, Artificial Sequence
  Description of Artificial Sequence: Synthetic oligonucleotide
cgaauucaaagcguuguug

SEQ ID NO: 876836 - RNA, 19 nt, Artificial Sequence
  Description of Artificial Sequence: Synthetic oligonucleotide
aacgagcccuuuagcuucu

SEQ ID NO: 876837 - RNA, 19 nt, Artificial Sequence
  Description of Artificial Sequence: Synthetic oligonucleotide
acgggacucucaguucaag

SEQ ID NO: 876838 - RNA, 19 nt, Artificial Sequence
  Description of Artificial Sequence: Synthetic oligonucleotide
ucaagaccgugggcagcag

SEQ ID NO: 876839 - RNA, 19 nt, Artificial Sequence
  Description of Artificial Sequence: Synthetic oligonucleotide
cccggccuggguaauggcg

SEQ ID NO: 876840 - RNA, 19 nt, Artificial Sequence
  Description of Artificial Sequence: Synthetic oligonucleotide
guucgggcagaaggaucgg

SEQ ID NO: 876841 - RNA, 19 nt, Artificial Sequence
  Description of Artificial Sequence: Synthetic oligonucleotide
ggaguauugaagggaaacu

SEQ ID NO: 876842 - RNA, 19 nt, Artificial Sequence
  Description of Artificial Sequence: Synthetic oligonucleotide
agccgauccuccuguccgu

SEQ ID NO: 876843 - RNA, 19 nt, Artificial Sequence
  Description of Artificial Sequence: Synthetic oligonucleotide
uagagggcgugcagugguu

SEQ ID NO: 876844 - RNA, 19 nt, Artificial Sequence
  Description of Artificial Sequence: Synthetic oligonucleotide
aagcguuguuguagcgccu

SEQ ID NO: 876845 - RNA, 19 nt, Artificial Sequence
  Description of Artificial Sequence: Synthetic oligonucleotide
gugagaguucgggcagaag

SEQ ID NO: 876846 - RNA, 19 nt, Artificial Sequence
  Description of Artificial Sequence: Synthetic oligonucleotide
agcguuguuguagcgccuu

SEQ ID NO: 876847 - RNA, 19 nt, Artificial Sequence
  Description of Artificial Sequence: Synthetic oligonucleotide
cugaggugaucccaucacu

SEQ ID NO: 876848 - RNA, 19 nt, Artificial Sequence
  Description of Artificial Sequence: Synthetic oligonucleotide
caaccacggccaaccggug

SEQ ID NO: 876849 - RNA, 19 nt, Artificial Sequence
  Description of Artificial Sequence: Synthetic oligonucleotide
uucuagcggcuaguagauc

SEQ ID NO: 876850 - RNA, 19 nt, Artificial Sequence
  Description of Artificial Sequence: Synthetic oligonucleotide
gcucgaacuguuguaaugu

SEQ ID NO: 876851 - RNA, 19 nt, Artificial Sequence
  Description of Artificial Sequence: Synthetic oligonucleotide
cgcuuccaauauaauuugc

SEQ ID NO: 876852 - RNA, 19 nt, Artificial Sequence
  Description of Artificial Sequence: Synthetic oligonucleotide
ccacuuuuaagaagggagu

SEQ ID NO: 876853 - RNA, 19 nt, Artificial Sequence
  Description of Artificial Sequence: Synthetic oligonucleotide
accuuucuagcggcuagua

SEQ ID NO: 876854 - RNA, 19 nt, Artificial Sequence
  Description of Artificial Sequence: Synthetic oligonucleotide
guuugcucgauaccuccuu

SEQ ID NO: 876855 - RNA, 19 nt, Artificial Sequence
  Description of Artificial Sequence: Synthetic oligonucleotide
gcaguaguucggucggcuc

SEQ ID NO: 876856 - RNA, 19 nt, Artificial Sequence
  Description of Artificial Sequence: Synthetic oligonucleotide
gcucgcuuccaauauaauu

SEQ ID NO: 876857 - RNA, 19 nt, Artificial Sequence
  Description of Artificial Sequence: Synthetic oligonucleotide
guuguagcgccuugugguu

SEQ ID NO: 876858 - RNA, 19 nt, Artificial Sequence
  Description of Artificial Sequence: Synthetic oligonucleotide
cacuuuuaagaagggaguu

SEQ ID NO: 876859 - RNA, 19 nt, Artificial Sequence
  Description of Artificial Sequence: Synthetic oligonucleotide
gucguagagggcgugcagu

SEQ ID NO: 876860 - RNA, 19 nt, Artificial Sequence
  Description of Artificial Sequence: Synthetic oligonucleotide
gcggcaaccaagcucgagu

SEQ ID NO: 876861 - RNA, 19 nt, Artificial Sequence
  Description of Artificial Sequence: Synthetic oligonucleotide
cuaguagaucagggcuguc

SEQ ID NO: 876862 - RNA, 19 nt, Artificial Sequence
  Description of Artificial Sequence: Synthetic oligonucleotide
cguucaaagaucuggcggu

SEQ ID NO: 876863 - RNA, 19 nt, Artificial Sequence
  Description of Artificial Sequence: Synthetic oligonucleotide
agacuucgugaugcucgcu

SEQ ID NO: 876864 - RNA, 19 nt, Artificial Sequence
  Description of Artificial Sequence: Synthetic oligonucleotide
uagcgccuugugguuguaa

SEQ ID NO: 876865 - RNA, 19 nt, Artificial Sequence
  Description of Artificial Sequence: Synthetic oligonucleotide
gguagcagguuggaguccu

SEQ ID NO: 876866 - RNA, 19 nt, Artificial Sequence
  Description of Artificial Sequence: Synthetic oligonucleotide
cggcaaccaagcucgaguc

SEQ ID NO: 876867 - RNA, 19 nt, Artificial Sequence
  Description of Artificial Sequence: Synthetic oligonucleotide
gcguuguuguagcgccuug

SEQ ID NO: 876868 - RNA, 19 nt, Artificial Sequence
  Description of Artificial Sequence: Synthetic oligonucleotide
ccaaucagcccggccuggg

SEQ ID NO: 876869 - RNA, 19 nt, Artificial Sequence
  Description of Artificial Sequence: Synthetic oligonucleotide
cagaaacgggacucucagu

SEQ ID NO: 876870 - RNA, 19 nt, Artificial Sequence
  Description of Artificial Sequence: Synthetic oligonucleotide
uucggucggcucggagaac

SEQ ID NO: 876871 - RNA, 19 nt, Artificial Sequence
  Description of Artificial Sequence: Synthetic oligonucleotide
gcuaguagaucagggcugu

SEQ ID NO: 876872 - RNA, 19 nt, Artificial Sequence
  Description of Artificial Sequence: Synthetic oligonucleotide
gccaaucagcccggccugg

SEQ ID NO: 876873 - RNA, 19 nt, Artificial Sequence
  Description of Artificial Sequence: Synthetic oligonucleotide
ccaaccggugaaauccaaa

SEQ ID NO: 876874 - RNA, 19 nt, Artificial Sequence
  Description of Artificial Sequence: Synthetic oligonucleotide
cugcacggaaaggcaguca

SEQ ID NO: 876875 - RNA, 19 nt, Artificial Sequence
  Description of Artificial Sequence: Synthetic oligonucleotide
ggguagcagguuggagucc

SEQ ID NO: 876876 - RNA, 19 nt, Artificial Sequence
  Description of Artificial Sequence: Synthetic oligonucleotide
caagaccgugggcagcagu

SEQ ID NO: 876877 - RNA, 19 nt, Artificial Sequence
  Description of Artificial Sequence: Synthetic oligonucleotide
ggauacgaagauugcucuu

SEQ ID NO: 876878 - RNA, 19 nt, Artificial Sequence
  Description of Artificial Sequence: Synthetic oligonucleotide
cugccaaagagggcccaaa

SEQ ID NO: 876879 - RNA, 19 nt, Artificial Sequence
  Description of Artificial Sequence: Synthetic oligonucleotide
cgucaucaagcgcuuccug

SEQ ID NO: 876880 - RNA, 19 nt, Artificial Sequence
  Description of Artificial Sequence: Synthetic oligonucleotide
guagcagguuggaguccuc

SEQ ID NO: 876881 - RNA, 19 nt, Artificial Sequence
  Description of Artificial Sequence: Synthetic oligonucleotide
cauagagaugcaggauaau

SEQ ID NO: 876882 - RNA, 19 nt, Artificial Sequence
  Description of Artificial Sequence: Synthetic oligonucleotide
ggcgugcagugguucaucu

SEQ ID NO: 876883 - RNA, 19 nt, Artificial Sequence
  Description of Artificial Sequence: Synthetic oligonucleotide
cgucucucgaaggagaugu

SEQ ID NO: 876884 - RNA, 19 nt, Artificial Sequence
  Description of Artificial Sequence: Synthetic oligonucleotide
gcgguaguaauagccuucu

SEQ ID NO: 876885 - RNA, 19 nt, Artificial Sequence
  Description of Artificial Sequence: Synthetic oligonucleotide
ggucggcucggagaacauc

SEQ ID NO: 876886 - RNA, 19 nt, Artificial Sequence
  Description of Artificial Sequence: Synthetic oligonucleotide
gucucacggucucugccuu

SEQ ID NO: 876887 - RNA, 19 nt, Artificial Sequence
  Description of Artificial Sequence: Synthetic oligonucleotide
guaguucggucggcucgga

SEQ ID NO: 876888 - RNA, 19 nt, Artificial Sequence
  Description of Artificial Sequence: Synthetic oligonucleotide
cucugcucgcugguggcua

SEQ ID NO: 876889 - RNA, 19 nt, Artificial Sequence
  Description of Artificial Sequence: Synthetic oligonucleotide
cggcuaguagaucagggcu

SEQ ID NO: 876890 - RNA, 19 nt, Artificial Sequence
  Description of Artificial Sequence: Synthetic oligonucleotide
ggccaaccggugaaaucca

SEQ ID NO: 876891 - RNA, 19 nt, Artificial Sequence
  Description of Artificial Sequence: Synthetic oligonucleotide
cgggacucucaguucaaga

SEQ ID NO: 876892 - RNA, 19 nt, Artificial Sequence
  Description of Artificial Sequence: Synthetic oligonucleotide
ccgugggcagcaguaguuc

SEQ ID NO: 876893 - RNA, 19 nt, Artificial Sequence
  Description of Artificial Sequence: Synthetic oligonucleotide
ggggucaaccacggccaac

SEQ ID NO: 876894 - RNA, 19 nt, Artificial Sequence
  Description of Artificial Sequence: Synthetic oligonucleotide
gcgcuuccugacagcacug

SEQ ID NO: 876895 - RNA, 19 nt, Artificial Sequence
  Description of Artificial Sequence: Synthetic oligonucleotide
ccgaauauacuuggaaauu

SEQ ID NO: 876896 - RNA, 19 nt, Artificial Sequence
  Description of Artificial Sequence: Synthetic oligonucleotide
ggagaacaucaaacaggua

SEQ ID NO: 876897 - RNA, 19 nt, Artificial Sequence
  Description of Artificial Sequence: Synthetic oligonucleotide
caccuuucuagcggcuagu

SEQ ID NO: 876898 - RNA, 19 nt, Artificial Sequence
  Description of Artificial Sequence: Synthetic oligonucleotide
gcccggccuggguaauggc

SEQ ID NO: 876899 - RNA, 19 nt, Artificial Sequence
  Description of Artificial Sequence: Synthetic oligonucleotide
gggcgugcagugguucauc

SEQ ID NO: 876900 - RNA, 19 nt, Artificial Sequence
  Description of Artificial Sequence: Synthetic oligonucleotide
gcgccuugugguuguaaau

SEQ ID NO: 876901 - RNA, 19 nt, Artificial Sequence
  Description of Artificial Sequence: Synthetic oligonucleotide
gcugccaaagagggcccaa

SEQ ID NO: 876902 - RNA, 19 nt, Artificial Sequence
  Description of Artificial Sequence: Synthetic oligonucleotide
gccaaccggugaaauccaa

SEQ ID NO: 876903 - RNA, 19 nt, Artificial Sequence
  Description of Artificial Sequence: Synthetic oligonucleotide
cacggccaaccggugaaau

SEQ ID NO: 876904 - RNA, 19 nt, Artificial Sequence
  Description of Artificial Sequence: Synthetic oligonucleotide
guagcgccuugugguugua

SEQ ID NO: 876905 - RNA, 19 nt, Artificial Sequence
  Description of Artificial Sequence: Synthetic oligonucleotide
gucucucgaaggagauguu

SEQ ID NO: 876906 - RNA, 19 nt, Artificial Sequence
  Description of Artificial Sequence: Synthetic oligonucleotide
cguuguuguagcgccuugu

SEQ ID NO: 876907 - RNA, 19 nt, Artificial Sequence
  Description of Artificial Sequence: Synthetic oligonucleotide
ccacggccaaccggugaaa

SEQ ID NO: 876908 - RNA, 19 nt, Artificial Sequence
  Description of Artificial Sequence: Synthetic oligonucleotide
cggucggcucggagaacau

SEQ ID NO: 876909 - RNA, 19 nt, Artificial Sequence
  Description of Artificial Sequence: Synthetic oligonucleotide
guaauugagggccagagug

SEQ ID NO: 876910 - RNA, 19 nt, Artificial Sequence
  Description of Artificial Sequence: Synthetic oligonucleotide
uugggguuaaaccugaugu

SEQ ID NO: 876911 - RNA, 19 nt, Artificial Sequence
  Description of Artificial Sequence: Synthetic oligonucleotide
aaguguaugaugaaggucu

SEQ ID NO: 876912 - RNA, 19 nt, Artificial Sequence
  Description of Artificial Sequence: Synthetic oligonucleotide
uuaggauagagguccaccg

SEQ ID NO: 876913 - RNA, 19 nt, Artificial Sequence
  Description of Artificial Sequence: Synthetic oligonucleotide
aucgacaggagugugagcc

SEQ ID NO: 876914 - RNA, 19 nt, Artificial Sequence
  Description of Artificial Sequence: Synthetic oligonucleotide
agugccuugacaccgauug

SEQ ID NO: 876915 - RNA, 19 nt, Artificial Sequence
  Description of Artificial Sequence: Synthetic oligonucleotide
ucuccguagaagcagaugu

SEQ ID NO: 876916 - RNA, 19 nt, Artificial Sequence
  Description of Artificial Sequence: Synthetic oligonucleotide
aauaaggcaucgauggccg

SEQ ID NO: 876917 - RNA, 19 nt, Artificial Sequence
  Description of Artificial Sequence: Synthetic oligonucleotide
ugcauugugccucucguag

SEQ ID NO: 876918 - RNA, 19 nt, Artificial Sequence
  Description of Artificial Sequence: Synthetic oligonucleotide
ucacacauaggccaugaug

SEQ ID NO: 876919 - RNA, 19 nt, Artificial Sequence
  Description of Artificial Sequence: Synthetic oligonucleotide
uuugagccaguuaggauag

SEQ ID NO: 876920 - RNA, 19 nt, Artificial Sequence
  Description of Artificial Sequence: Synthetic oligonucleotide
acuggugaucuucugagag

SEQ ID NO: 876921 - RNA, 19 nt, Artificial Sequence
  Description of Artificial Sequence: Synthetic oligonucleotide
uccgaauucacugaauuca

SEQ ID NO: 876922 - RNA, 19 nt, Artificial Sequence
  Description of Artificial Sequence: Synthetic oligonucleotide
acaccgauuguccagagcu

SEQ ID NO: 876923 - RNA, 19 nt, Artificial Sequence
  Description of Artificial Sequence: Synthetic oligonucleotide
ugaucauccuaccagccca

SEQ ID NO: 876924 - RNA, 19 nt, Artificial Sequence
  Description of Artificial Sequence: Synthetic oligonucleotide
auuugagccaguuaggaua

SEQ ID NO: 876925 - RNA, 19 nt, Artificial Sequence
  Description of Artificial Sequence: Synthetic oligonucleotide
guaguaggaacacucuccg

SEQ ID NO: 876926 - RNA, 19 nt, Artificial Sequence
  Description of Artificial Sequence: Synthetic oligonucleotide
acuaccucucaguggaggc

SEQ ID NO: 876927 - RNA, 19 nt, Artificial Sequence
  Description of Artificial Sequence: Synthetic oligonucleotide
aacccguccuucuccacgc

SEQ ID NO: 876928 - RNA, 19 nt, Artificial Sequence
  Description of Artificial Sequence: Synthetic oligonucleotide
auagcuggucauuuguauc

SEQ ID NO: 876929 - RNA, 19 nt, Artificial Sequence
  Description of Artificial Sequence: Synthetic oligonucleotide
agccaguuaggauagaggu

SEQ ID NO: 876930 - RNA, 19 nt, Artificial Sequence
  Description of Artificial Sequence: Synthetic oligonucleotide
gauccugucgaggugaaag

SEQ ID NO: 876931 - RNA, 19 nt, Artificial Sequence
  Description of Artificial Sequence: Synthetic oligonucleotide
uuagccugaugcccuaggg

SEQ ID NO: 876932 - RNA, 19 nt, Artificial Sequence
  Description of Artificial Sequence: Synthetic oligonucleotide
ugugaguauuucccaaacc

SEQ ID NO: 876933 - RNA, 19 nt, Artificial Sequence
  Description of Artificial Sequence: Synthetic oligonucleotide
augugaguauuucccaaac

SEQ ID NO: 876934 - RNA, 19 nt, Artificial Sequence
  Description of Artificial Sequence: Synthetic oligonucleotide
cuuaucgcgugugacaucc

SEQ ID NO: 876935 - RNA, 19 nt, Artificial Sequence
  Description of Artificial Sequence: Synthetic oligonucleotide
uucccgaacuucucaaagg

SEQ ID NO: 876936 - RNA, 19 nt, Artificial Sequence
  Description of Artificial Sequence: Synthetic oligonucleotide
caauaaggcaucgauggcc

SEQ ID NO: 876937 - RNA, 19 nt, Artificial Sequence
  Description of Artificial Sequence: Synthetic oligonucleotide
aauuugagccaguuaggau

SEQ ID NO: 876938 - RNA, 19 nt, Artificial Sequence
  Description of Artificial Sequence: Synthetic oligonucleotide
uugaucauccuaccagccc

SEQ ID NO: 876939 - RNA, 19 nt, Artificial Sequence
  Description of Artificial Sequence: Synthetic oligonucleotide
uuguaauugagggccagag

SEQ ID NO: 876940 - RNA, 19 nt, Artificial Sequence
  Description of Artificial Sequence: Synthetic oligonucleotide
auuucccaaacccgcgccc

SEQ ID NO: 876941 - RNA, 19 nt, Artificial Sequence
  Description of Artificial Sequence: Synthetic oligonucleotide
gauucgguggccacugucg

SEQ ID NO: 876942 - RNA, 19 nt, Artificial Sequence
  Description of Artificial Sequence: Synthetic oligonucleotide
aguacuaugcgcagccgcc

SEQ ID NO: 876943 - RNA, 19 nt, Artificial Sequence
  Description of Artificial Sequence: Synthetic oligonucleotide
aacaaguggauagcugguc

SEQ ID NO: 876944 - RNA, 19 nt, Artificial Sequence
  Description of Artificial Sequence: Synthetic oligonucleotide
gaguauuucccaaacccgc

SEQ ID NO: 876945 - RNA, 19 nt, Artificial Sequence
  Description of Artificial Sequence: Synthetic oligonucleotide
ucguagucagagaauaaaa

SEQ ID NO: 876946 - RNA, 19 nt, Artificial Sequence
  Description of Artificial Sequence: Synthetic oligonucleotide
guaggaacgacgccagggg

SEQ ID NO: 876947 - RNA, 19 nt, Artificial Sequence
  Description of Artificial Sequence: Synthetic oligonucleotide
gucacuaccucucagugga

SEQ ID NO: 876948 - RNA, 19 nt, Artificial Sequence
  Description of Artificial Sequence: Synthetic oligonucleotide
aaacccgcgcccguugucc

SEQ ID NO: 876949 - RNA, 19 nt, Artificial Sequence
  Description of Artificial Sequence: Synthetic oligonucleotide
uauggggacgaccuacccc

SEQ ID NO: 876950 - RNA, 19 nt, Artificial Sequence
  Description of Artificial Sequence: Synthetic oligonucleotide
ugcucaauggcuaggucgu

SEQ ID NO: 876951 - RNA, 19 nt, Artificial Sequence
  Description of Artificial Sequence: Synthetic oligonucleotide
aauucuggaaggucaugau

SEQ ID NO: 876952 - RNA, 19 nt, Artificial Sequence
  Description of Artificial Sequence: Synthetic oligonucleotide
acaacuaguaaggccuggc

SEQ ID NO: 876953 - RNA, 19 nt, Artificial Sequence
  Description of Artificial Sequence: Synthetic oligonucleotide
uaauugagggccagagugu

SEQ ID NO: 876954 - RNA, 19 nt, Artificial Sequence
  Description of Artificial Sequence: Synthetic oligonucleotide
guuugaauagcgccugccc

SEQ ID NO: 876955 - RNA, 19 nt, Artificial Sequence
  Description of Artificial Sequence: Synthetic oligonucleotide
uccguggaacaguaguagg

SEQ ID NO: 876956 - RNA, 19 nt, Artificial Sequence
  Description of Artificial Sequence: Synthetic oligonucleotide
ucugcauugugccucucgu

SEQ ID NO: 876957 - RNA, 19 nt, Artificial Sequence
  Description of Artificial Sequence: Synthetic oligonucleotide
uguaucuuuauugcacugu

SEQ ID NO: 876958 - RNA, 19 nt, Artificial Sequence
  Description of Artificial Sequence: Synthetic oligonucleotide
ugagggagaccccacacuc

SEQ ID NO: 876959 - RNA, 19 nt, Artificial Sequence
  Description of Artificial Sequence: Synthetic oligonucleotide
caguaggcaagaauucugc

SEQ ID NO: 876960 - RNA, 19 nt, Artificial Sequence
  Description of Artificial Sequence: Synthetic oligonucleotide
agugugagccuuuuguuaa

SEQ ID NO: 876961 - RNA, 19 nt, Artificial Sequence
  Description of Artificial Sequence: Synthetic oligonucleotide
cuugacaccgauuguccag

SEQ ID NO: 876962 - RNA, 19 nt, Artificial Sequence
  Description of Artificial Sequence: Synthetic oligonucleotide
gaaaguggguuguaauuga

SEQ ID NO: 876963 - RNA, 19 nt, Artificial Sequence
  Description of Artificial Sequence: Synthetic oligonucleotide
cucguagugaugccggucc

SEQ ID NO: 876964 - RNA, 19 nt, Artificial Sequence
  Description of Artificial Sequence: Synthetic oligonucleotide
ugcuccguggaacaguagu

SEQ ID NO: 876965 - RNA, 19 nt, Artificial Sequence
  Description of Artificial Sequence: Synthetic oligonucleotide
ugcccguaauucuggaagg

SEQ ID NO: 876966 - RNA, 19 nt, Artificial Sequence
  Description of Artificial Sequence: Synthetic oligonucleotide
cugcccguaauucuggaag

SEQ ID NO: 876967 - RNA, 19 nt, Artificial Sequence
  Description of Artificial Sequence: Synthetic oligonucleotide
uaccgguugaugccgaugu

SEQ ID NO: 876968 - RNA, 19 nt, Artificial Sequence
  Description of Artificial Sequence: Synthetic oligonucleotide
uaggauagagguccaccgc

SEQ ID NO: 876969 - RNA, 19 nt, Artificial Sequence
  Description of Artificial Sequence: Synthetic oligonucleotide
gagccuucgaucuggucag

SEQ ID NO: 876970 - RNA, 19 nt, Artificial Sequence
  Description of Artificial Sequence: Synthetic oligonucleotide
aagguccugcaauaaggca

SEQ ID NO: 876971 - RNA, 19 nt, Artificial Sequence
  Description of Artificial Sequence: Synthetic oligonucleotide
uccacgcaaucucgaaugg

SEQ ID NO: 876972 - RNA, 19 nt, Artificial Sequence
  Description of Artificial Sequence: Synthetic oligonucleotide
accccauccgaauucacug

SEQ ID NO: 876973 - RNA, 19 nt, Artificial Sequence
  Description of Artificial Sequence: Synthetic oligonucleotide
aguaaucgggguccacuuc

SEQ ID NO: 876974 - RNA, 19 nt, Artificial Sequence
  Description of Artificial Sequence: Synthetic oligonucleotide
aguauuucccaaacccgcg

SEQ ID NO: 876975 - RNA, 19 nt, Artificial Sequence
  Description of Artificial Sequence: Synthetic oligonucleotide
gacucuucggaaguccagg

SEQ ID NO: 876976 - RNA, 19 nt, Artificial Sequence
  Description of Artificial Sequence: Synthetic oligonucleotide
cugucgaggugaaaggcag

SEQ ID NO: 876977 - RNA, 19 nt, Artificial Sequence
  Description of Artificial Sequence: Synthetic oligonucleotide
auccugucgaggugaaagg

SEQ ID NO: 876978 - RNA, 19 nt, Artificial Sequence
  Description of Artificial Sequence: Synthetic oligonucleotide
aggauagagguccaccgcu

SEQ ID NO: 876979 - RNA, 19 nt, Artificial Sequence
  Description of Artificial Sequence: Synthetic oligonucleotide
uuggccagagacaggucag

SEQ ID NO: 876980 - RNA, 19 nt, Artificial Sequence
  Description of Artificial Sequence: Synthetic oligonucleotide
ugcauagugccuugacacc

SEQ ID NO: 876981 - RNA, 19 nt, Artificial Sequence
  Description of Artificial Sequence: Synthetic oligonucleotide
uuaccucacugcaaacuac

SEQ ID NO: 876982 - RNA, 19 nt, Artificial Sequence
  Description of Artificial Sequence: Synthetic oligonucleotide
gaggcgcuagaauggagag

SEQ ID NO: 876983 - RNA, 19 nt, Artificial Sequence
  Description of Artificial Sequence: Synthetic oligonucleotide
ucaugugaguauuucccaa

SEQ ID NO: 876984 - RNA, 19 nt, Artificial Sequence
  Description of Artificial Sequence: Synthetic oligonucleotide
gauagagguccaccgcugc

SEQ ID NO: 876985 - RNA, 19 nt, Artificial Sequence
  Description of Artificial Sequence: Synthetic oligonucleotide
guuaggauagagguccacc

SEQ ID NO: 876986 - RNA, 19 nt, Artificial Sequence
  Description of Artificial Sequence: Synthetic oligonucleotide
agcgaucucugcauugugc

SEQ ID NO: 876987 - RNA, 19 nt, Artificial Sequence
  Description of Artificial Sequence: Synthetic oligonucleotide
gagccuuuuguuaaguaca

SEQ ID NO: 876988 - RNA, 19 nt, Artificial Sequence
  Description of Artificial Sequence: Synthetic oligonucleotide
cuugucgugcugcagggac

SEQ ID NO: 876989 - RNA, 19 nt, Artificial Sequence
  Description of Artificial Sequence: Synthetic oligonucleotide
cacguuuuccucuuggcca

SEQ ID NO: 876990 - RNA, 19 nt, Artificial Sequence
  Description of Artificial Sequence: Synthetic oligonucleotide
ugccuugggguuaaaccug

SEQ ID NO: 876991 - RNA, 19 nt, Artificial Sequence
  Description of Artificial Sequence: Synthetic oligonucleotide
ugugucuggaguacagcuc

SEQ ID NO: 876992 - RNA, 19 nt, Artificial Sequence
  Description of Artificial Sequence: Synthetic oligonucleotide
gggguuaaaccugaugucg

SEQ ID NO: 876993 - RNA, 19 nt, Artificial Sequence
  Description of Artificial Sequence: Synthetic oligonucleotide
caccacacugcucaacccg

SEQ ID NO: 876994 - RNA, 19 nt, Artificial Sequence
  Description of Artificial Sequence: Synthetic oligonucleotide
uacuaugcgcagccgccgg

SEQ ID NO: 876995 - RNA, 19 nt, Artificial Sequence
  Description of Artificial Sequence: Synthetic oligonucleotide
cugcaauaaggcaucgaug

SEQ ID NO: 876996 - RNA, 19 nt, Artificial Sequence
  Description of Artificial Sequence: Synthetic oligonucleotide
acguuuuccucuuggccag

SEQ ID NO: 876997 - RNA, 19 nt, Artificial Sequence
  Description of Artificial Sequence: Synthetic oligonucleotide
ugaugccgguccauguucc

SEQ ID NO: 876998 - RNA, 19 nt, Artificial Sequence
  Description of Artificial Sequence: Synthetic oligonucleotide
uucuuaucgcgugugacau

SEQ ID NO: 876999 - RNA, 19 nt, Artificial Sequence
  Description of Artificial Sequence: Synthetic oligonucleotide
uuauuggcuggagacacaa

SEQ ID NO: 877000 - RNA, 19 nt, Artificial Sequence
  Description of Artificial Sequence: Synthetic oligonucleotide
gucgaggugaaaggcagcg

SEQ ID NO: 877001 - RNA, 19 nt, Artificial Sequence
  Description of Artificial Sequence: Synthetic oligonucleotide
ucauccuaccagcccacug

SEQ ID NO: 877002 - RNA, 19 nt, Artificial Sequence
  Description of Artificial Sequence: Synthetic oligonucleotide
ucgguggccacugucguag

SEQ ID NO: 877003 - RNA, 19 nt, Artificial Sequence
  Description of Artificial Sequence: Synthetic oligonucleotide
aauagcgccugcccguaau

SEQ ID NO: 877004 - RNA, 19 nt, Artificial Sequence
  Description of Artificial Sequence: Synthetic oligonucleotide
caccuugucgugcugcagg

SEQ ID NO: 877005 - RNA, 19 nt, Artificial Sequence
  Description of Artificial Sequence: Synthetic oligonucleotide
uugugccucucguagucag

SEQ ID NO: 877006 - RNA, 19 nt, Artificial Sequence
  Description of Artificial Sequence: Synthetic oligonucleotide
guauuucccaaacccgcgc

SEQ ID NO: 877007 - RNA, 19 nt, Artificial Sequence
  Description of Artificial Sequence: Synthetic oligonucleotide
aggugaaaggcagcgaucu

SEQ ID NO: 877008 - RNA, 19 nt, Artificial Sequence
  Description of Artificial Sequence: Synthetic oligonucleotide
uccaucgacaggaguguga

SEQ ID NO: 877009 - RNA, 19 nt, Artificial Sequence
  Description of Artificial Sequence: Synthetic oligonucleotide
uguccaccaacaacuagua

SEQ ID NO: 877010 - RNA, 19 nt, Artificial Sequence
  Description of Artificial Sequence: Synthetic oligonucleotide
agcuuccccucccuagagc

SEQ ID NO: 877011 - RNA, 19 nt, Artificial Sequence
  Description of Artificial Sequence: Synthetic oligonucleotide
ucauucccgaacuucucaa

SEQ ID NO: 877012 - RNA, 19 nt, Artificial Sequence
  Description of Artificial Sequence: Synthetic oligonucleotide
uguccaagcuuccccuccc

SEQ ID NO: 877013 - RNA, 19 nt, Artificial Sequence
  Description of Artificial Sequence: Synthetic oligonucleotide
guuagccugaugcccuagg

SEQ ID NO: 877014 - RNA, 19 nt, Artificial Sequence
  Description of Artificial Sequence: Synthetic oligonucleotide
agguggcuaggcucugugc

SEQ ID NO: 877015 - RNA, 19 nt, Artificial Sequence
  Description of Artificial Sequence: Synthetic oligonucleotide
ugggguuaaaccugauguc

SEQ ID NO: 877016 - RNA, 19 nt, Artificial Sequence
  Description of Artificial Sequence: Synthetic oligonucleotide
gugucuggaguacagcuca

SEQ ID NO: 877017 - RNA, 19 nt, Artificial Sequence
  Description of Artificial Sequence: Synthetic oligonucleotide
cuucuuaucgcgugugaca

SEQ ID NO: 877018 - RNA, 19 nt, Artificial Sequence
  Description of Artificial Sequence: Synthetic oligonucleotide
acauaggccaugaugucug

SEQ ID NO: 877019 - RNA, 19 nt, Artificial Sequence
  Description of Artificial Sequence: Synthetic oligonucleotide
cccaggguuagccugaugc

SEQ ID NO: 877020 - RNA, 19 nt, Artificial Sequence
  Description of Artificial Sequence: Synthetic oligonucleotide
aacacucuccguagaagca

SEQ ID NO: 877021 - RNA, 19 nt, Artificial Sequence
  Description of Artificial Sequence: Synthetic oligonucleotide
cuucugagggaggaggccc

SEQ ID NO: 877022 - RNA, 19 nt, Artificial Sequence
  Description of Artificial Sequence: Synthetic oligonucleotide
caacccguccuucuccacg

SEQ ID NO: 877023 - RNA, 19 nt, Artificial Sequence
  Description of Artificial Sequence: Synthetic oligonucleotide
guugaucauccuaccagcc

SEQ ID NO: 877024 - RNA, 19 nt, Artificial Sequence
  Description of Artificial Sequence: Synthetic oligonucleotide
gcuacugugcagcagaaaa

SEQ ID NO: 877025 - RNA, 19 nt, Artificial Sequence
  Description of Artificial Sequence: Synthetic oligonucleotide
uugacaccgauuguccaga

SEQ ID NO: 877026 - RNA, 19 nt, Artificial Sequence
  Description of Artificial Sequence: Synthetic oligonucleotide
ugcauguccagagugcuuu

SEQ ID NO: 877027 - RNA, 19 nt, Artificial Sequence
  Description of Artificial Sequence: Synthetic oligonucleotide
ucuggucaggcuucccaca

SEQ ID NO: 877028 - RNA, 19 nt, Artificial Sequence
  Description of Artificial Sequence: Synthetic oligonucleotide
caugaugagcuucaguugu

SEQ ID NO: 877029 - RNA, 19 nt, Artificial Sequence
  Description of Artificial Sequence: Synthetic oligonucleotide
gcauagugccuugacaccg

SEQ ID NO: 877030 - RNA, 19 nt, Artificial Sequence
  Description of Artificial Sequence: Synthetic oligonucleotide
ugccuugacaccgauuguc

SEQ ID NO: 877031 - RNA, 19 nt, Artificial Sequence
  Description of Artificial Sequence: Synthetic oligonucleotide
ugucgaggugaaaggcagc

SEQ ID NO: 877032 - RNA, 19 nt, Artificial Sequence
  Description of Artificial Sequence: Synthetic oligonucleotide
gaugcccuagggccauagg

SEQ ID NO: 877033 - RNA, 19 nt, Artificial Sequence
  Description of Artificial Sequence: Synthetic oligonucleotide
ggucacuaccucucagugg

SEQ ID NO: 877034 - RNA, 19 nt, Artificial Sequence
  Description of Artificial Sequence: Synthetic oligonucleotide
ucgcgugugacaucccgga

SEQ ID NO: 877035 - RNA, 19 nt, Artificial Sequence
  Description of Artificial Sequence: Synthetic oligonucleotide
caggguuagccugaugccc

SEQ ID NO: 877036 - RNA, 19 nt, Artificial Sequence
  Description of Artificial Sequence: Synthetic oligonucleotide
augagggagaccccacacu

SEQ ID NO: 877037 - RNA, 19 nt, Artificial Sequence
  Description of Artificial Sequence: Synthetic oligonucleotide
uccguagaagcagauguua

SEQ ID NO: 877038 - RNA, 19 nt, Artificial Sequence
  Description of Artificial Sequence: Synthetic oligonucleotide
ucacugcaaacuacuccac

SEQ ID NO: 877039 - RNA, 19 nt, Artificial Sequence
  Description of Artificial Sequence: Synthetic oligonucleotide
caccaguaggcaagaauuc

SEQ ID NO: 877040 - RNA, 19 nt, Artificial Sequence
  Description of Artificial Sequence: Synthetic oligonucleotide
aacgacgccagggguuccg

SEQ ID NO: 877041 - RNA, 19 nt, Artificial Sequence
  Description of Artificial Sequence: Synthetic oligonucleotide
ucgauggccggguuguguc

SEQ ID NO: 877042 - RNA, 19 nt, Artificial Sequence
  Description of Artificial Sequence: Synthetic oligonucleotide
uaugcgcagccgccggucc

SEQ ID NO: 877043 - RNA, 19 nt, Artificial Sequence
  Description of Artificial Sequence: Synthetic oligonucleotide
uugaugccgauguggaauu

SEQ ID NO: 877044 - RNA, 19 nt, Artificial Sequence
  Description of Artificial Sequence: Synthetic oligonucleotide
agaggcgcuagaauggaga

SEQ ID NO: 877045 - RNA, 19 nt, Artificial Sequence
  Description of Artificial Sequence: Synthetic oligonucleotide
ugugagccuuuuguuaagu

SEQ ID NO: 877046 - RNA, 19 nt, Artificial Sequence
  Description of Artificial Sequence: Synthetic oligonucleotide
ccaacaacuaguaaggccu

SEQ ID NO: 877047 - RNA, 19 nt, Artificial Sequence
  Description of Artificial Sequence: Synthetic oligonucleotide
ugucgcuguucacauuaaa

SEQ ID NO: 877048 - RNA, 19 nt, Artificial Sequence
  Description of Artificial Sequence: Synthetic oligonucleotide
ucauaccgguugaugccga

SEQ ID NO: 877049 - RNA, 19 nt, Artificial Sequence
  Description of Artificial Sequence: Synthetic oligonucleotide
gggacgaccuaccccaucc

SEQ ID NO: 877050 - RNA, 19 nt, Artificial Sequence
  Description of Artificial Sequence: Synthetic oligonucleotide
auucgguggccacugucgu

SEQ ID NO: 877051 - RNA, 19 nt, Artificial Sequence
  Description of Artificial Sequence: Synthetic oligonucleotide
cuggcuacugugcagcaga

SEQ ID NO: 877052 - RNA, 19 nt, Artificial Sequence
  Description of Artificial Sequence: Synthetic oligonucleotide
cguaggucacccuaugggg

SEQ ID NO: 877053 - RNA, 19 nt, Artificial Sequence
  Description of Artificial Sequence: Synthetic oligonucleotide
aaggcaucgauggccgggu

SEQ ID NO: 877054 - RNA, 19 nt, Artificial Sequence
  Description of Artificial Sequence: Synthetic oligonucleotide
caugugaguauuucccaaa

SEQ ID NO: 877055 - RNA, 19 nt, Artificial Sequence
  Description of Artificial Sequence: Synthetic oligonucleotide
aggcgcuagaauggagagc

SEQ ID NO: 877056 - RNA, 19 nt, Artificial Sequence
  Description of Artificial Sequence: Synthetic oligonucleotide
ccguaggucacccuauggg

SEQ ID NO: 877057 - RNA, 19 nt, Artificial Sequence
  Description of Artificial Sequence: Synthetic oligonucleotide
guacuaugcgcagccgccg

SEQ ID NO: 877058 - RNA, 19 nt, Artificial Sequence
  Description of Artificial Sequence: Synthetic oligonucleotide
ugugccucucguagucaga

SEQ ID NO: 877059 - RNA, 19 nt, Artificial Sequence
  Description of Artificial Sequence: Synthetic oligonucleotide
guagugaugccgguccaug

SEQ ID NO: 877060 - RNA, 19 nt, Artificial Sequence
  Description of Artificial Sequence: Synthetic oligonucleotide
agcgccugcccguaauucu

SEQ ID NO: 877061 - RNA, 19 nt, Artificial Sequence
  Description of Artificial Sequence: Synthetic oligonucleotide
ucacccuauggggacgacc

SEQ ID NO: 877062 - RNA, 19 nt, Artificial Sequence
  Description of Artificial Sequence: Synthetic oligonucleotide
ggaacaguaguaggaacac

SEQ ID NO: 877063 - RNA, 19 nt, Artificial Sequence
  Description of Artificial Sequence: Synthetic oligonucleotide
ggucucguagugaugccgg

SEQ ID NO: 877064 - RNA, 19 nt, Artificial Sequence
  Description of Artificial Sequence: Synthetic oligonucleotide
gugaugccgguccauguuc

SEQ ID NO: 877065 - RNA, 19 nt, Artificial Sequence
  Description of Artificial Sequence: Synthetic oligonucleotide
ucguagugaugccggucca

SEQ ID NO: 877066 - RNA, 19 nt, Artificial Sequence
  Description of Artificial Sequence: Synthetic oligonucleotide
ugccguaggucacccuaug

SEQ ID NO: 877067 - RNA, 19 nt, Artificial Sequence
  Description of Artificial Sequence: Synthetic oligonucleotide
ucuuucgcuugugguagga

SEQ ID NO: 877068 - RNA, 19 nt, Artificial Sequence
  Description of Artificial Sequence: Synthetic oligonucleotide
aucgcgugugacaucccgg

SEQ ID NO: 877069 - RNA, 19 nt, Artificial Sequence
  Description of Artificial Sequence: Synthetic oligonucleotide
guagguggaccuccggauc

SEQ ID NO: 877070 - RNA, 19 nt, Artificial Sequence
  Description of Artificial Sequence: Synthetic oligonucleotide
agcuucuuaucgcguguga

SEQ ID NO: 877071 - RNA, 19 nt, Artificial Sequence
  Description of Artificial Sequence: Synthetic oligonucleotide
cacgcaaucucgaauggcu

SEQ ID NO: 877072 - RNA, 19 nt, Artificial Sequence
  Description of Artificial Sequence: Synthetic oligonucleotide
ucacuaccucucaguggag

SEQ ID NO: 877073 - RNA, 19 nt, Artificial Sequence
  Description of Artificial Sequence: Synthetic oligonucleotide
aguggauagcuggucauuu

SEQ ID NO: 877074 - RNA, 19 nt, Artificial Sequence
  Description of Artificial Sequence: Synthetic oligonucleotide
ugaugcccuagggccauag

SEQ ID NO: 877075 - RNA, 19 nt, Artificial Sequence
  Description of Artificial Sequence: Synthetic oligonucleotide
ucgcuugugguaggaacga

SEQ ID NO: 877076 - RNA, 19 nt, Artificial Sequence
  Description of Artificial Sequence: Synthetic oligonucleotide
guccagagcucagccaagg

SEQ ID NO: 877077 - RNA, 19 nt, Artificial Sequence
  Description of Artificial Sequence: Synthetic oligonucleotide
ucgacaggagugugagccu

SEQ ID NO: 877078 - RNA, 19 nt, Artificial Sequence
  Description of Artificial Sequence: Synthetic oligonucleotide
guaggucacccuaugggga

SEQ ID NO: 877079 - RNA, 19 nt, Artificial Sequence
  Description of Artificial Sequence: Synthetic oligonucleotide
cucguagucagagaauaaa

SEQ ID NO: 877080 - RNA, 19 nt, Artificial Sequence
  Description of Artificial Sequence: Synthetic oligonucleotide
cugccuugggguuaaaccu

SEQ ID NO: 877081 - RNA, 19 nt, Artificial Sequence
  Description of Artificial Sequence: Synthetic oligonucleotide
gacgaccuaccccauccga

SEQ ID NO: 877082 - RNA, 19 nt, Artificial Sequence
  Description of Artificial Sequence: Synthetic oligonucleotide
gugguaggaacgacgccag

SEQ ID NO: 877083 - RNA, 19 nt, Artificial Sequence
  Description of Artificial Sequence: Synthetic oligonucleotide
ugucguaggguggcgucug

SEQ ID NO: 877084 - RNA, 19 nt, Artificial Sequence
  Description of Artificial Sequence: Synthetic oligonucleotide
uuaucgcgugugacauccc

SEQ ID NO: 877085 - RNA, 19 nt, Artificial Sequence
  Description of Artificial Sequence: Synthetic oligonucleotide
gguuugaauagcgccugcc

SEQ ID NO: 877086 - RNA, 19 nt, Artificial Sequence
  Description of Artificial Sequence: Synthetic oligonucleotide
ugucgugcugcagggacuc

SEQ ID NO: 877087 - RNA, 19 nt, Artificial Sequence
  Description of Artificial Sequence: Synthetic oligonucleotide
ggguuaaaccugaugucgc

SEQ ID NO: 877088 - RNA, 19 nt, Artificial Sequence
  Description of Artificial Sequence: Synthetic oligonucleotide
ucgucugcuucauggguuu

SEQ ID NO: 877089 - RNA, 19 nt, Artificial Sequence
  Description of Artificial Sequence: Synthetic oligonucleotide
gaucauccuaccagcccac

SEQ ID NO: 877090 - RNA, 19 nt, Artificial Sequence
  Description of Artificial Sequence: Synthetic oligonucleotide
uaguaaggccuggcuacug

SEQ ID NO: 877091 - RNA, 19 nt, Artificial Sequence
  Description of Artificial Sequence: Synthetic oligonucleotide
guguccaccaacaacuagu

SEQ ID NO: 877092 - RNA, 19 nt, Artificial Sequence
  Description of Artificial Sequence: Synthetic oligonucleotide
ccgaauucacugaauucac

SEQ ID NO: 877093 - RNA, 19 nt, Artificial Sequence
  Description of Artificial Sequence: Synthetic oligonucleotide
aggguuagccugaugcccu

SEQ ID NO: 877094 - RNA, 19 nt, Artificial Sequence
  Description of Artificial Sequence: Synthetic oligonucleotide
ccguaauucuggaagguca

SEQ ID NO: 877095 - RNA, 19 nt, Artificial Sequence
  Description of Artificial Sequence: Synthetic oligonucleotide
ucucguagugaugccgguc

SEQ ID NO: 877096 - RNA, 19 nt, Artificial Sequence
  Description of Artificial Sequence: Synthetic oligonucleotide
ggcgcuagaauggagagcu

SEQ ID NO: 877097 - RNA, 19 nt, Artificial Sequence
  Description of Artificial Sequence: Synthetic oligonucleotide
cauagugccuugacaccga

SEQ ID NO: 877098 - RNA, 19 nt, Artificial Sequence
  Description of Artificial Sequence: Synthetic oligonucleotide
cauggcgacacuggugauc

SEQ ID NO: 877099 - RNA, 19 nt, Artificial Sequence
  Description of Artificial Sequence: Synthetic oligonucleotide
ccuagagcucuccagcuuc

SEQ ID NO: 877100 - RNA, 19 nt, Artificial Sequence
  Description of Artificial Sequence: Synthetic oligonucleotide
caucgacaggagugugagc

SEQ ID NO: 877101 - RNA, 19 nt, Artificial Sequence
  Description of Artificial Sequence: Synthetic oligonucleotide
auaccgguugaugccgaug

SEQ ID NO: 877102 - RNA, 19 nt, Artificial Sequence
  Description of Artificial Sequence: Synthetic oligonucleotide
uccugcaauaaggcaucga

SEQ ID NO: 877103 - RNA, 19 nt, Artificial Sequence
  Description of Artificial Sequence: Synthetic oligonucleotide
gcuaggucguccuccacca

SEQ ID NO: 877104 - RNA, 19 nt, Artificial Sequence
  Description of Artificial Sequence: Synthetic oligonucleotide
aggcaagaauucugcuccu

SEQ ID NO: 877105 - RNA, 19 nt, Artificial Sequence
  Description of Artificial Sequence: Synthetic oligonucleotide
ccaggguuagccugaugcc

SEQ ID NO: 877106 - RNA, 19 nt, Artificial Sequence
  Description of Artificial Sequence: Synthetic oligonucleotide
auagugccuugacaccgau

SEQ ID NO: 877107 - RNA, 19 nt, Artificial Sequence
  Description of Artificial Sequence: Synthetic oligonucleotide
aacccgcgcccguugucca

SEQ ID NO: 877108 - RNA, 19 nt, Artificial Sequence
  Description of Artificial Sequence: Synthetic oligonucleotide
caugcuccguggaacagua

SEQ ID NO: 877109 - RNA, 19 nt, Artificial Sequence
  Description of Artificial Sequence: Synthetic oligonucleotide
uggcuacugugcagcagaa

SEQ ID NO: 877110 - RNA, 19 nt, Artificial Sequence
  Description of Artificial Sequence: Synthetic oligonucleotide
ccuauggggacgaccuacc

SEQ ID NO: 877111 - RNA, 19 nt, Artificial Sequence
  Description of Artificial Sequence: Synthetic oligonucleotide
cacccuauggggacgaccu

SEQ ID NO: 877112 - RNA, 19 nt, Artificial Sequence
  Description of Artificial Sequence: Synthetic oligonucleotide
cagguggcuaggcucugug

SEQ ID NO: 877113 - RNA, 19 nt, Artificial Sequence
  Description of Artificial Sequence: Synthetic oligonucleotide
gccguaggucacccuaugg

SEQ ID NO: 877114 - RNA, 19 nt, Artificial Sequence
  Description of Artificial Sequence: Synthetic oligonucleotide
gcucaacccguccuucucc

SEQ ID NO: 877115 - RNA, 19 nt, Artificial Sequence
  Description of Artificial Sequence: Synthetic oligonucleotide
ugaauagcgccugcccgua

SEQ ID NO: 877116 - RNA, 19 nt, Artificial Sequence
  Description of Artificial Sequence: Synthetic oligonucleotide
auugugccucucguaguca

SEQ ID NO: 877117 - RNA, 19 nt, Artificial Sequence
  Description of Artificial Sequence: Synthetic oligonucleotide
ccaucgacaggagugugag

SEQ ID NO: 877118 - RNA, 19 nt, Artificial Sequence
  Description of Artificial Sequence: Synthetic oligonucleotide
cucuccguagaagcagaug

SEQ ID NO: 877119 - RNA, 19 nt, Artificial Sequence
  Description of Artificial Sequence: Synthetic oligonucleotide
caccgauuguccagagcuc

SEQ ID NO: 877120 - RNA, 19 nt, Artificial Sequence
  Description of Artificial Sequence: Synthetic oligonucleotide
ggauccugcagcacugaug

SEQ ID NO: 877121 - RNA, 19 nt, Artificial Sequence
  Description of Artificial Sequence: Synthetic oligonucleotide
gccucucguagucagagaa

SEQ ID NO: 877122 - RNA, 19 nt, Artificial Sequence
  Description of Artificial Sequence: Synthetic oligonucleotide
acgcuugcuguaucuuuau

SEQ ID NO: 877123 - RNA, 19 nt, Artificial Sequence
  Description of Artificial Sequence: Synthetic oligonucleotide
cucaaaggucucguaguga

SEQ ID NO: 877124 - RNA, 19 nt, Artificial Sequence
  Description of Artificial Sequence: Synthetic oligonucleotide
cacgcuugcuguaucuuua

SEQ ID NO: 877125 - RNA, 19 nt, Artificial Sequence
  Description of Artificial Sequence: Synthetic oligonucleotide
accacacugcucaacccgu

SEQ ID NO: 877126 - RNA, 19 nt, Artificial Sequence
  Description of Artificial Sequence: Synthetic oligonucleotide
ggacgaccuaccccauccg

SEQ ID NO: 877127 - RNA, 19 nt, Artificial Sequence
  Description of Artificial Sequence: Synthetic oligonucleotide
ccaugaugucuguccaagc

SEQ ID NO: 877128 - RNA, 19 nt, Artificial Sequence
  Description of Artificial Sequence: Synthetic oligonucleotide
cagcgaucucugcauugug

SEQ ID NO: 877129 - RNA, 19 nt, Artificial Sequence
  Description of Artificial Sequence: Synthetic oligonucleotide
acgacgccagggguuccgc

SEQ ID NO: 877130 - RNA, 19 nt, Artificial Sequence
  Description of Artificial Sequence: Synthetic oligonucleotide
cacuguuaccucacugcaa

SEQ ID NO: 877131 - RNA, 19 nt, Artificial Sequence
  Description of Artificial Sequence: Synthetic oligonucleotide
ggauagagguccaccgcug

SEQ ID NO: 877132 - RNA, 19 nt, Artificial Sequence
  Description of Artificial Sequence: Synthetic oligonucleotide
cagcuucuuaucgcgugug

SEQ ID NO: 877133 - RNA, 19 nt, Artificial Sequence
  Description of Artificial Sequence: Synthetic oligonucleotide
gccuugacaccgauugucc

SEQ ID NO: 877134 - RNA, 19 nt, Artificial Sequence
  Description of Artificial Sequence: Synthetic oligonucleotide
aggguggcgucugcuucac

SEQ ID NO: 877135 - RNA, 19 nt, Artificial Sequence
  Description of Artificial Sequence: Synthetic oligonucleotide
ggauucgguggccacuguc

SEQ ID NO: 877136 - RNA, 19 nt, Artificial Sequence
  Description of Artificial Sequence: Synthetic oligonucleotide
gguuaaaccugaugucgcu

SEQ ID NO: 877137 - RNA, 19 nt, Artificial Sequence
  Description of Artificial Sequence: Synthetic oligonucleotide
uucgguggccacugucgua

SEQ ID NO: 877138 - RNA, 19 nt, Artificial Sequence
  Description of Artificial Sequence: Synthetic oligonucleotide
uagcgccugcccguaauuc

SEQ ID NO: 877139 - RNA, 19 nt, Artificial Sequence
  Description of Artificial Sequence: Synthetic oligonucleotide
uucggaaguccaggauccu

SEQ ID NO: 877140 - RNA, 19 nt, Artificial Sequence
  Description of Artificial Sequence: Synthetic oligonucleotide
acgaccuaccccauccgaa

SEQ ID NO: 877141 - RNA, 19 nt, Artificial Sequence
  Description of Artificial Sequence: Synthetic oligonucleotide
caacuaguaaggccuggcu

SEQ ID NO: 877142 - RNA, 19 nt, Artificial Sequence
  Description of Artificial Sequence: Synthetic oligonucleotide
ggcgacacuggugaucuuc

SEQ ID NO: 877143 - RNA, 19 nt, Artificial Sequence
  Description of Artificial Sequence: Synthetic oligonucleotide
aggaacgacgccagggguu

SEQ ID NO: 877144 - RNA, 19 nt, Artificial Sequence
  Description of Artificial Sequence: Synthetic oligonucleotide
ucauggcgacacuggugau

SEQ ID NO: 877145 - RNA, 19 nt, Artificial Sequence
  Description of Artificial Sequence: Synthetic oligonucleotide
ggacucuucggaaguccag

SEQ ID NO: 877146 - RNA, 19 nt, Artificial Sequence
  Description of Artificial Sequence: Synthetic oligonucleotide
cgcaaucucgaauggcuug

SEQ ID NO: 877147 - RNA, 19 nt, Artificial Sequence
  Description of Artificial Sequence: Synthetic oligonucleotide
ggaacgacgccagggguuc

SEQ ID NO: 877148 - RNA, 19 nt, Artificial Sequence
  Description of Artificial Sequence: Synthetic oligonucleotide
caguuaggauagaggucca

SEQ ID NO: 877149 - RNA, 19 nt, Artificial Sequence
  Description of Artificial Sequence: Synthetic oligonucleotide
caaacccgcgcccguuguc

SEQ ID NO: 877150 - RNA, 19 nt, Artificial Sequence
  Description of Artificial Sequence: Synthetic oligonucleotide
cuccaucgacaggagugug

SEQ ID NO: 877151 - RNA, 19 nt, Artificial Sequence
  Description of Artificial Sequence: Synthetic oligonucleotide
ucccugccguaggucaccc

SEQ ID NO: 877152 - RNA, 19 nt, Artificial Sequence
  Description of Artificial Sequence: Synthetic oligonucleotide
ccguuguccaaguguauga

SEQ ID NO: 877153 - RNA, 19 nt, Artificial Sequence
  Description of Artificial Sequence: Synthetic oligonucleotide
ccugcaauaaggcaucgau

SEQ ID NO: 877154 - RNA, 19 nt, Artificial Sequence
  Description of Artificial Sequence: Synthetic oligonucleotide
aucauccuaccagcccacu

SEQ ID NO: 877155 - RNA, 19 nt, Artificial Sequence
  Description of Artificial Sequence: Synthetic oligonucleotide
cccguuguccaaguguaug

SEQ ID NO: 877156 - RNA, 19 nt, Artificial Sequence
  Description of Artificial Sequence: Synthetic oligonucleotide
acccacucuuggguguuca

SEQ ID NO: 877157 - RNA, 19 nt, Artificial Sequence
  Description of Artificial Sequence: Synthetic oligonucleotide
gccaguuaggauagagguc

SEQ ID NO: 877158 - RNA, 19 nt, Artificial Sequence
  Description of Artificial Sequence: Synthetic oligonucleotide
gaauagcgccugcccguaa

SEQ ID NO: 877159 - RNA, 19 nt, Artificial Sequence
  Description of Artificial Sequence: Synthetic oligonucleotide
ccgauuguccagagcucag

SEQ ID NO: 877160 - RNA, 19 nt, Artificial Sequence
  Description of Artificial Sequence: Synthetic oligonucleotide
guccaccgcugccucacca

SEQ ID NO: 877161 - RNA, 19 nt, Artificial Sequence
  Description of Artificial Sequence: Synthetic oligonucleotide
cagcccacuggagggacuc

SEQ ID NO: 877162 - RNA, 19 nt, Artificial Sequence
  Description of Artificial Sequence: Synthetic oligonucleotide
acgcaaucucgaauggcuu

SEQ ID NO: 877163 - RNA, 19 nt, Artificial Sequence
  Description of Artificial Sequence: Synthetic oligonucleotide
ccaaguguaugaugaaggu

SEQ ID NO: 877164 - RNA, 19 nt, Artificial Sequence
  Description of Artificial Sequence: Synthetic oligonucleotide
cccuauggggacgaccuac

SEQ ID NO: 877165 - RNA, 19 nt, Artificial Sequence
  Description of Artificial Sequence: Synthetic oligonucleotide
cugcauugugccucucgua

SEQ ID NO: 877166 - RNA, 19 nt, Artificial Sequence
  Description of Artificial Sequence: Synthetic oligonucleotide
cucgucugcuucauggguu

SEQ ID NO: 877167 - RNA, 19 nt, Artificial Sequence
  Description of Artificial Sequence: Synthetic oligonucleotide
gggcaugcuccguggaaca

SEQ ID NO: 877168 - RNA, 19 nt, Artificial Sequence
  Description of Artificial Sequence: Synthetic oligonucleotide
gagccaccuugucgugcug

SEQ ID NO: 877169 - RNA, 19 nt, Artificial Sequence
  Description of Artificial Sequence: Synthetic oligonucleotide
gguuagccugaugcccuag

SEQ ID NO: 877170 - RNA, 19 nt, Artificial Sequence
  Description of Artificial Sequence: Synthetic oligonucleotide
gaacgacgccagggguucc

SEQ ID NO: 877171 - RNA, 19 nt, Artificial Sequence
  Description of Artificial Sequence: Synthetic oligonucleotide
ggagugugagccuuuuguu

SEQ ID NO: 877172 - RNA, 19 nt, Artificial Sequence
  Description of Artificial Sequence: Synthetic oligonucleotide
ugaugccgauguggaauuu

SEQ ID NO: 877173 - RNA, 19 nt, Artificial Sequence
  Description of Artificial Sequence: Synthetic oligonucleotide
ccacgcaaucucgaauggc

SEQ ID NO: 877174 - RNA, 19 nt, Artificial Sequence
  Description of Artificial Sequence: Synthetic oligonucleotide
gccaaggcgggcagugucc

SEQ ID NO: 877175 - RNA, 19 nt, Artificial Sequence
  Description of Artificial Sequence: Synthetic oligonucleotide
ggcaugcuccguggaacag

SEQ ID NO: 877176 - RNA, 19 nt, Artificial Sequence
  Description of Artificial Sequence: Synthetic oligonucleotide
ccuugacaccgauugucca

SEQ ID NO: 877177 - RNA, 19 nt, Artificial Sequence
  Description of Artificial Sequence: Synthetic oligonucleotide
cuuucgcuugugguaggaa

SEQ ID NO: 877178 - RNA, 19 nt, Artificial Sequence
  Description of Artificial Sequence: Synthetic oligonucleotide
cccguaauucuggaagguc

SEQ ID NO: 877179 - RNA, 19 nt, Artificial Sequence
  Description of Artificial Sequence: Synthetic oligonucleotide
uggggacgaccuaccccau

SEQ ID NO: 877180 - RNA, 19 nt, Artificial Sequence
  Description of Artificial Sequence: Synthetic oligonucleotide
cuaguaaggccuggcuacu

SEQ ID NO: 877181 - RNA, 19 nt, Artificial Sequence
  Description of Artificial Sequence: Synthetic oligonucleotide
acccuauggggacgaccua

SEQ ID NO: 877182 - RNA, 19 nt, Artificial Sequence
  Description of Artificial Sequence: Synthetic oligonucleotide
cucuucggaaguccaggau

SEQ ID NO: 877183 - RNA, 19 nt, Artificial Sequence
  Description of Artificial Sequence: Synthetic oligonucleotide
gcgccugcccguaauucug

SEQ ID NO: 877184 - RNA, 19 nt, Artificial Sequence
  Description of Artificial Sequence: Synthetic oligonucleotide
cuaccucucaguggaggcu

SEQ ID NO: 877185 - RNA, 19 nt, Artificial Sequence
  Description of Artificial Sequence: Synthetic oligonucleotide
cuccguagaagcagauguu

SEQ ID NO: 877186 - RNA, 19 nt, Artificial Sequence
  Description of Artificial Sequence: Synthetic oligonucleotide
gucucguagugaugccggu

SEQ ID NO: 877187 - RNA, 19 nt, Artificial Sequence
  Description of Artificial Sequence: Synthetic oligonucleotide
caucgauggccggguugug

SEQ ID NO: 877188 - RNA, 19 nt, Artificial Sequence
  Description of Artificial Sequence: Synthetic oligonucleotide
gccggguugugucuggagu

SEQ ID NO: 877189 - RNA, 19 nt, Artificial Sequence
  Description of Artificial Sequence: Synthetic oligonucleotide
cacacucccugccguaggu

SEQ ID NO: 877190 - RNA, 19 nt, Artificial Sequence
  Description of Artificial Sequence: Synthetic oligonucleotide
cgcuagaauggagagcuca

SEQ ID NO: 877191 - RNA, 19 nt, Artificial Sequence
  Description of Artificial Sequence: Synthetic oligonucleotide
ccccugacuucauggcgac

SEQ ID NO: 877192 - RNA, 19 nt, Artificial Sequence
  Description of Artificial Sequence: Synthetic oligonucleotide
gcuccguggaacaguagua

SEQ ID NO: 877193 - RNA, 19 nt, Artificial Sequence
  Description of Artificial Sequence: Synthetic oligonucleotide
cccauccgaauucacugaa

SEQ ID NO: 877194 - RNA, 19 nt, Artificial Sequence
  Description of Artificial Sequence: Synthetic oligonucleotide
cgccugcccguaauucugg

SEQ ID NO: 877195 - RNA, 19 nt, Artificial Sequence
  Description of Artificial Sequence: Synthetic oligonucleotide
cugcucacacauaggccau

SEQ ID NO: 877196 - RNA, 19 nt, Artificial Sequence
  Description of Artificial Sequence: Synthetic oligonucleotide
ccuaccccauccgaauuca

SEQ ID NO: 877197 - RNA, 19 nt, Artificial Sequence
  Description of Artificial Sequence: Synthetic oligonucleotide
aggcaucgauggccggguu

SEQ ID NO: 877198 - RNA, 19 nt, Artificial Sequence
  Description of Artificial Sequence: Synthetic oligonucleotide
ggguuccgccacguuuucc

SEQ ID NO: 877199 - RNA, 19 nt, Artificial Sequence
  Description of Artificial Sequence: Synthetic oligonucleotide
gcuagaauggagagcucau

SEQ ID NO: 877200 - RNA, 19 nt, Artificial Sequence
  Description of Artificial Sequence: Synthetic oligonucleotide
gcagcgaucucugcauugu

SEQ ID NO: 877201 - RNA, 19 nt, Artificial Sequence
  Description of Artificial Sequence: Synthetic oligonucleotide
ccggguugugucuggagua

SEQ ID NO: 877202 - RNA, 19 nt, Artificial Sequence
  Description of Artificial Sequence: Synthetic oligonucleotide
ggggacgaccuaccccauc

SEQ ID NO: 877203 - RNA, 19 nt, Artificial Sequence
  Description of Artificial Sequence: Synthetic oligonucleotide
gcgcccguuguccaagugu

SEQ ID NO: 877204 - RNA, 19 nt, Artificial Sequence
  Description of Artificial Sequence: Synthetic oligonucleotide
ggcugccagggagccuucg

SEQ ID NO: 877205 - RNA, 19 nt, Artificial Sequence
  Description of Artificial Sequence: Synthetic oligonucleotide
ccuucgaucuggucaggcu

SEQ ID NO: 877206 - RNA, 19 nt, Artificial Sequence
  Description of Artificial Sequence: Synthetic oligonucleotide
gccugaugcccuagggcca

SEQ ID NO: 877207 - RNA, 19 nt, Artificial Sequence
  Description of Artificial Sequence: Synthetic oligonucleotide
cauaccgguugaugccgau

SEQ ID NO: 877208 - RNA, 19 nt, Artificial Sequence
  Description of Artificial Sequence: Synthetic oligonucleotide
acccgcgcccguuguccaa

SEQ ID NO: 877209 - RNA, 19 nt, Artificial Sequence
  Description of Artificial Sequence: Synthetic oligonucleotide
cugccguaggucacccuau

SEQ ID NO: 877210 - RNA, 19 nt, Artificial Sequence
  Description of Artificial Sequence: Synthetic oligonucleotide
gucacccuauggggacgac

SEQ ID NO: 877211 - RNA, 19 nt, Artificial Sequence
  Description of Artificial Sequence: Synthetic oligonucleotide
ccguagaagcagauguuau

SEQ ID NO: 877212 - RNA, 19 nt, Artificial Sequence
  Description of Artificial Sequence: Synthetic oligonucleotide
ggcucaguuugugcuccuc

SEQ ID NO: 877213 - RNA, 19 nt, Artificial Sequence
  Description of Artificial Sequence: Synthetic oligonucleotide
gccugcccguaauucugga

SEQ ID NO: 877214 - RNA, 19 nt, Artificial Sequence
  Description of Artificial Sequence: Synthetic oligonucleotide
cgaggugaaaggcagcgau

SEQ ID NO: 877215 - RNA, 19 nt, Artificial Sequence
  Description of Artificial Sequence: Synthetic oligonucleotide
ccacugucguaggguggcg

SEQ ID NO: 877216 - RNA, 19 nt, Artificial Sequence
  Description of Artificial Sequence: Synthetic oligonucleotide
gcgacacuggugaucuucu

SEQ ID NO: 877217 - RNA, 19 nt, Artificial Sequence
  Description of Artificial Sequence: Synthetic oligonucleotide
ggguuagccugaugcccua

SEQ ID NO: 877218 - RNA, 19 nt, Artificial Sequence
  Description of Artificial Sequence: Synthetic oligonucleotide
cacugucguaggguggcgu

SEQ ID NO: 877219 - RNA, 19 nt, Artificial Sequence
  Description of Artificial Sequence: Synthetic oligonucleotide
gcaugcuccguggaacagu

SEQ ID NO: 877220 - RNA, 19 nt, Artificial Sequence
  Description of Artificial Sequence: Synthetic oligonucleotide
cugcauguccagagugcuu

SEQ ID NO: 877221 - RNA, 19 nt, Artificial Sequence
  Description of Artificial Sequence: Synthetic oligonucleotide
ggccagagugugaucacau

SEQ ID NO: 877222 - RNA, 19 nt, Artificial Sequence
  Description of Artificial Sequence: Synthetic oligonucleotide
ggguggcgucugcuucacc

SEQ ID NO: 877223 - RNA, 19 nt, Artificial Sequence
  Description of Artificial Sequence: Synthetic oligonucleotide
ccucgucugcuucaugggu

SEQ ID NO: 877224 - RNA, 19 nt, Artificial Sequence
  Description of Artificial Sequence: Synthetic oligonucleotide
cgacgccagggguuccgcc

SEQ ID NO: 877225 - RNA, 19 nt, Artificial Sequence
  Description of Artificial Sequence: Synthetic oligonucleotide
ccaaggcgggcagugucca

SEQ ID NO: 877226 - RNA, 19 nt, Artificial Sequence
  Description of Artificial Sequence: Synthetic oligonucleotide
gcccguaauucuggaaggu

SEQ ID NO: 877227 - RNA, 19 nt, Artificial Sequence
  Description of Artificial Sequence: Synthetic oligonucleotide
cccgcgcccguuguccaag

SEQ ID NO: 877228 - RNA, 19 nt, Artificial Sequence
  Description of Artificial Sequence: Synthetic oligonucleotide
ggauccugucgaggugaaa

SEQ ID NO: 877229 - RNA, 19 nt, Artificial Sequence
  Description of Artificial Sequence: Synthetic oligonucleotide
cgaccuaccccauccgaau

SEQ ID NO: 877230 - RNA, 19 nt, Artificial Sequence
  Description of Artificial Sequence: Synthetic oligonucleotide
gcgcuagaauggagagcuc

SEQ ID NO: 877231 - RNA, 19 nt, Artificial Sequence
  Description of Artificial Sequence: Synthetic oligonucleotide
gcaccuucauguggccagu

SEQ ID NO: 877232 - RNA, 19 nt, Artificial Sequence
  Description of Artificial Sequence: Synthetic oligonucleotide
ccgccacguuuuccucuug

SEQ ID NO: 877233 - RNA, 19 nt, Artificial Sequence
  Description of Artificial Sequence: Synthetic oligonucleotide
cgcgcccguuguccaagug

SEQ ID NO: 877234 - RNA, 19 nt, Artificial Sequence
  Description of Artificial Sequence: Synthetic oligonucleotide
gggagaccccacacucccu

SEQ ID NO: 877235 - RNA, 19 nt, Artificial Sequence
  Description of Artificial Sequence: Synthetic oligonucleotide
cccuagagcucuccagcuu

SEQ ID NO: 877236 - RNA, 19 nt, Artificial Sequence
  Description of Artificial Sequence: Synthetic oligonucleotide
ccgccgguccagggccucc

SEQ ID NO: 877237 - RNA, 19 nt, Artificial Sequence
  Description of Artificial Sequence: Synthetic oligonucleotide
cccugacuucauggcgaca

SEQ ID NO: 877238 - RNA, 19 nt, Artificial Sequence
  Description of Artificial Sequence: Synthetic oligonucleotide
cgauggccggguugugucu

SEQ ID NO: 877239 - RNA, 19 nt, Artificial Sequence
  Description of Artificial Sequence: Synthetic oligonucleotide
gccgccgguccagggccuc

SEQ ID NO: 877240 - RNA, 19 nt, Artificial Sequence
  Description of Artificial Sequence: Synthetic oligonucleotide
cguagugaugccgguccau

SEQ ID NO: 877241 - RNA, 19 nt, Artificial Sequence
  Description of Artificial Sequence: Synthetic oligonucleotide
cgcgugugacaucccggau

SEQ ID NO: 877242 - RNA, 19 nt, Artificial Sequence
  Description of Artificial Sequence: Synthetic oligonucleotide
ccagggguuccgccacguu

SEQ ID NO: 877243 - RNA, 19 nt, Artificial Sequence
  Description of Artificial Sequence: Synthetic oligonucleotide
ccgcgcccguuguccaagu

SEQ ID NO: 877244 - RNA, 19 nt, Artificial Sequence
  Description of Artificial Sequence: Synthetic oligonucleotide
auaaaguggaaccagaggg

SEQ ID NO: 877245 - RNA, 19 nt, Artificial Sequence
  Description of Artificial Sequence: Synthetic oligonucleotide
uggguuaaaacuaagucag

SEQ ID NO: 877246 - RNA, 19 nt, Artificial Sequence
  Description of Artificial Sequence: Synthetic oligonucleotide
uauaaaguggaaccagagg

SEQ ID NO: 877247 - RNA, 19 nt, Artificial Sequence
  Description of Artificial Sequence: Synthetic oligonucleotide
uuuacuucaugcuccacgg

SEQ ID NO: 877248 - RNA, 19 nt, Artificial Sequence
  Description of Artificial Sequence: Synthetic oligonucleotide
aaaauuagaacaaaaggaa

SEQ ID NO: 877249 - RNA, 19 nt, Artificial Sequence
  Description of Artificial Sequence: Synthetic oligonucleotide
ucuuaguuucagaaggccg

SEQ ID NO: 877250 - RNA, 19 nt, Artificial Sequence
  Description of Artificial Sequence: Synthetic oligonucleotide
uuggguuaaaacuaaguca

SEQ ID NO: 877251 - RNA, 19 nt, Artificial Sequence
  Description of Artificial Sequence: Synthetic oligonucleotide
uaagguaucuccuaacgug

SEQ ID NO: 877252 - RNA, 19 nt, Artificial Sequence
  Description of Artificial Sequence: Synthetic oligonucleotide
cugucuuaguuucagaagg

SEQ ID NO: 877253 - RNA, 19 nt, Artificial Sequence
  Description of Artificial Sequence: Synthetic oligonucleotide
uuauaguucagcacugagc

SEQ ID NO: 877254 - RNA, 19 nt, Artificial Sequence
  Description of Artificial Sequence: Synthetic oligonucleotide
aaccaaguuggaaauaugg

SEQ ID NO: 877255 - RNA, 19 nt, Artificial Sequence
  Description of Artificial Sequence: Synthetic oligonucleotide
guuaagguaucuccuaacg

SEQ ID NO: 877256 - RNA, 19 nt, Artificial Sequence
  Description of Artificial Sequence: Synthetic oligonucleotide
ugcucuauuugguaugugg

SEQ ID NO: 877257 - RNA, 19 nt, Artificial Sequence
  Description of Artificial Sequence: Synthetic oligonucleotide
uaaagugaagggucgaacc

SEQ ID NO: 877258 - RNA, 19 nt, Artificial Sequence
  Description of Artificial Sequence: Synthetic oligonucleotide
aaagguggauauaaagugg

SEQ ID NO: 877259 - RNA, 19 nt, Artificial Sequence
  Description of Artificial Sequence: Synthetic oligonucleotide
guuguaguacgucacaaag

SEQ ID NO: 877260 - RNA, 19 nt, Artificial Sequence
  Description of Artificial Sequence: Synthetic oligonucleotide
uuaccucucagacuuaaug

SEQ ID NO: 877261 - RNA, 19 nt, Artificial Sequence
  Description of Artificial Sequence: Synthetic oligonucleotide
aacgaguucucucccgucg

SEQ ID NO: 877262 - RNA, 19 nt, Artificial Sequence
  Description of Artificial Sequence: Synthetic oligonucleotide
uucagaacgaguucucucc

SEQ ID NO: 877263 - RNA, 19 nt, Artificial Sequence
  Description of Artificial Sequence: Synthetic oligonucleotide
ugaacaaucuggcucucag

SEQ ID NO: 877264 - RNA, 19 nt, Artificial Sequence
  Description of Artificial Sequence: Synthetic oligonucleotide
uacgucacaaagcaaugag

SEQ ID NO: 877265 - RNA, 19 nt, Artificial Sequence
  Description of Artificial Sequence: Synthetic oligonucleotide
ugggucaucaauuguaaug

SEQ ID NO: 877266 - RNA, 19 nt, Artificial Sequence
  Description of Artificial Sequence: Synthetic oligonucleotide
uuagucuuacggaaaaggu

SEQ ID NO: 877267 - RNA, 19 nt, Artificial Sequence
  Description of Artificial Sequence: Synthetic oligonucleotide
gaagggucgaaccaaguug

SEQ ID NO: 877268 - RNA, 19 nt, Artificial Sequence
  Description of Artificial Sequence: Synthetic oligonucleotide
uuuuggguuaaaacuaagu

SEQ ID NO: 877269 - RNA, 19 nt, Artificial Sequence
  Description of Artificial Sequence: Synthetic oligonucleotide
ucacaaagcaaugagauuu

SEQ ID NO: 877270 - RNA, 19 nt, Artificial Sequence
  Description of Artificial Sequence: Synthetic oligonucleotide
uaaaguggaaccagagggc

SEQ ID NO: 877271 - RNA, 19 nt, Artificial Sequence
  Description of Artificial Sequence: Synthetic oligonucleotide
gacuuaaugggaagaaagg

SEQ ID NO: 877272 - RNA, 19 nt, Artificial Sequence
  Description of Artificial Sequence: Synthetic oligonucleotide
uuuugcucgcucuuugcgg

SEQ ID NO: 877273 - RNA, 19 nt, Artificial Sequence
  Description of Artificial Sequence: Synthetic oligonucleotide
uaguacgucacaaagcaau

SEQ ID NO: 877274 - RNA, 19 nt, Artificial Sequence
  Description of Artificial Sequence: Synthetic oligonucleotide
auaaccuagcucuuaccuc

SEQ ID NO: 877275 - RNA, 19 nt, Artificial Sequence
  Description of Artificial Sequence: Synthetic oligonucleotide
acuaaguuccaagaguuag

SEQ ID NO: 877276 - RNA, 19 nt, Artificial Sequence
  Description of Artificial Sequence: Synthetic oligonucleotide
uuaagguaucuccuaacgu

SEQ ID NO: 877277 - RNA, 19 nt, Artificial Sequence
  Description of Artificial Sequence: Synthetic oligonucleotide
uaaccuagcucuuaccucu

SEQ ID NO: 877278 - RNA, 19 nt, Artificial Sequence
  Description of Artificial Sequence: Synthetic oligonucleotide
uuguaguacgucacaaagc

SEQ ID NO: 877279 - RNA, 19 nt, Artificial Sequence
  Description of Artificial Sequence: Synthetic oligonucleotide
aaacccuuccuuccauaac

SEQ ID NO: 877280 - RNA, 19 nt, Artificial Sequence
  Description of Artificial Sequence: Synthetic oligonucleotide
aguguuuucuuagcuagcg

SEQ ID NO: 877281 - RNA, 19 nt, Artificial Sequence
  Description of Artificial Sequence: Synthetic oligonucleotide
ggaaaagguggauauaaag

SEQ ID NO: 877282 - RNA, 19 nt, Artificial Sequence
  Description of Artificial Sequence: Synthetic oligonucleotide
uuggaaauauggacaaugu

SEQ ID NO: 877283 - RNA, 19 nt, Artificial Sequence
  Description of Artificial Sequence: Synthetic oligonucleotide
cucuauuugguaugugggg

SEQ ID NO: 877284 - RNA, 19 nt, Artificial Sequence
  Description of Artificial Sequence: Synthetic oligonucleotide
ugugagagacccuugguuc

SEQ ID NO: 877285 - RNA, 19 nt, Artificial Sequence
  Description of Artificial Sequence: Synthetic oligonucleotide
uggccuuuaaccucccagg

SEQ ID NO: 877286 - RNA, 19 nt, Artificial Sequence
  Description of Artificial Sequence: Synthetic oligonucleotide
uagucuuacggaaaagguc

SEQ ID NO: 877287 - RNA, 19 nt, Artificial Sequence
  Description of Artificial Sequence: Synthetic oligonucleotide
uccggguuaagguaucucc

SEQ ID NO: 877288 - RNA, 19 nt, Artificial Sequence
  Description of Artificial Sequence: Synthetic oligonucleotide
guuauaguucagcacugag

SEQ ID NO: 877289 - RNA, 19 nt, Artificial Sequence
  Description of Artificial Sequence: Synthetic oligonucleotide
uuuuagauuuugcucgcuc

SEQ ID NO: 877290 - RNA, 19 nt, Artificial Sequence
  Description of Artificial Sequence: Synthetic oligonucleotide
uacuucaugcuccacgggu

SEQ ID NO: 877291 - RNA, 19 nt, Artificial Sequence
  Description of Artificial Sequence: Synthetic oligonucleotide
aacgugacuuucuuuacuu

SEQ ID NO: 877292 - RNA, 19 nt, Artificial Sequence
  Description of Artificial Sequence: Synthetic oligonucleotide
caauuguaauggaaacucc

SEQ ID NO: 877293 - RNA, 19 nt, Artificial Sequence
  Description of Artificial Sequence: Synthetic oligonucleotide
uuacugaucuugccccugg

SEQ ID NO: 877294 - RNA, 19 nt, Artificial Sequence
  Description of Artificial Sequence: Synthetic oligonucleotide
uuugcucgcucuuugcggc

SEQ ID NO: 877295 - RNA, 19 nt, Artificial Sequence
  Description of Artificial Sequence: Synthetic oligonucleotide
gacggagggaagaugagag

SEQ ID NO: 877296 - RNA, 19 nt, Artificial Sequence
  Description of Artificial Sequence: Synthetic oligonucleotide
uaaguuccaagaguuaggu

SEQ ID NO: 877297 - RNA, 19 nt, Artificial Sequence
  Description of Artificial Sequence: Synthetic oligonucleotide
uccauagaccacaucauuu

SEQ ID NO: 877298 - RNA, 19 nt, Artificial Sequence
  Description of Artificial Sequence: Synthetic oligonucleotide
auauaaaguggaaccagag

SEQ ID NO: 877299 - RNA, 19 nt, Artificial Sequence
  Description of Artificial Sequence: Synthetic oligonucleotide
uccauaaccuagcucuuac

SEQ ID NO: 877300 - RNA, 19 nt, Artificial Sequence
  Description of Artificial Sequence: Synthetic oligonucleotide
cuaccugugugacuguccg

SEQ ID NO: 877301 - RNA, 19 nt, Artificial Sequence
  Description of Artificial Sequence: Synthetic oligonucleotide
uggugauuguaccuauccc

SEQ ID NO: 877302 - RNA, 19 nt, Artificial Sequence
  Description of Artificial Sequence: Synthetic oligonucleotide
gauuguaccuaucccucug

SEQ ID NO: 877303 - RNA, 19 nt, Artificial Sequence
  Description of Artificial Sequence: Synthetic oligonucleotide
ucuaguguuuucuuagcua

SEQ ID NO: 877304 - RNA, 19 nt, Artificial Sequence
  Description of Artificial Sequence: Synthetic oligonucleotide
auggguggcaguuauaguu

SEQ ID NO: 877305 - RNA, 19 nt, Artificial Sequence
  Description of Artificial Sequence: Synthetic oligonucleotide
guggugauuguaccuaucc

SEQ ID NO: 877306 - RNA, 19 nt, Artificial Sequence
  Description of Artificial Sequence: Synthetic oligonucleotide
guuggccuaaagugaaggg

SEQ ID NO: 877307 - RNA, 19 nt, Artificial Sequence
  Description of Artificial Sequence: Synthetic oligonucleotide
ugagcaauggugugagaga

SEQ ID NO: 877308 - RNA, 19 nt, Artificial Sequence
  Description of Artificial Sequence: Synthetic oligonucleotide
gguacuaccugugugacug

SEQ ID NO: 877309 - RNA, 19 nt, Artificial Sequence
  Description of Artificial Sequence: Synthetic oligonucleotide
gauauaaaguggaaccaga

SEQ ID NO: 877310 - RNA, 19 nt, Artificial Sequence
  Description of Artificial Sequence: Synthetic oligonucleotide
aggccgaucaaccaagagu

SEQ ID NO: 877311 - RNA, 19 nt, Artificial Sequence
  Description of Artificial Sequence: Synthetic oligonucleotide
aauggugugagagacccuu

SEQ ID NO: 877312 - RNA, 19 nt, Artificial Sequence
  Description of Artificial Sequence: Synthetic oligonucleotide
agcauagucagcacagagg

SEQ ID NO: 877313 - RNA, 19 nt, Artificial Sequence
  Description of Artificial Sequence: Synthetic oligonucleotide
ugggguuaaggccaccucu

SEQ ID NO: 877314 - RNA, 19 nt, Artificial Sequence
  Description of Artificial Sequence: Synthetic oligonucleotide
ucucagacuuaaugggaag

SEQ ID NO: 877315 - RNA, 19 nt, Artificial Sequence
  Description of Artificial Sequence: Synthetic oligonucleotide
ucagaacgaguucucuccc

SEQ ID NO: 877316 - RNA, 19 nt, Artificial Sequence
  Description of Artificial Sequence: Synthetic oligonucleotide
cucucagucagugggagcc

SEQ ID NO: 877317 - RNA, 19 nt, Artificial Sequence
  Description of Artificial Sequence: Synthetic oligonucleotide
uacuguuguaguacgucac

SEQ ID NO: 877318 - RNA, 19 nt, Artificial Sequence
  Description of Artificial Sequence: Synthetic oligonucleotide
uaacgugacuuucuuuacu

SEQ ID NO: 877319 - RNA, 19 nt, Artificial Sequence
  Description of Artificial Sequence: Synthetic oligonucleotide
ucuccuaacgugacuuucu

SEQ ID NO: 877320 - RNA, 19 nt, Artificial Sequence
  Description of Artificial Sequence: Synthetic oligonucleotide
uuucuuagcuagcggcgcc

SEQ ID NO: 877321 - RNA, 19 nt, Artificial Sequence
  Description of Artificial Sequence: Synthetic oligonucleotide
aagguaucuccuaacguga

SEQ ID NO: 877322 - RNA, 19 nt, Artificial Sequence
  Description of Artificial Sequence: Synthetic oligonucleotide
uuacuucaugcuccacggg

SEQ ID NO: 877323 - RNA, 19 nt, Artificial Sequence
  Description of Artificial Sequence: Synthetic oligonucleotide
uggcaguuauaguucagca

SEQ ID NO: 877324 - RNA, 19 nt, Artificial Sequence
  Description of Artificial Sequence: Synthetic oligonucleotide
aucaauuguaauggaaacu

SEQ ID NO: 877325 - RNA, 19 nt, Artificial Sequence
  Description of Artificial Sequence: Synthetic oligonucleotide
ucucuaguguuuucuuagc

SEQ ID NO: 877326 - RNA, 19 nt, Artificial Sequence
  Description of Artificial Sequence: Synthetic oligonucleotide
ugucaauccagaaggccuc

SEQ ID NO: 877327 - RNA, 19 nt, Artificial Sequence
  Description of Artificial Sequence: Synthetic oligonucleotide
ucuaacuuuugucccgauc

SEQ ID NO: 877328 - RNA, 19 nt, Artificial Sequence
  Description of Artificial Sequence: Synthetic oligonucleotide
auuugguauguggggaugg

SEQ ID NO: 877329 - RNA, 19 nt, Artificial Sequence
  Description of Artificial Sequence: Synthetic oligonucleotide
aaggccgaucaaccaagag

SEQ ID NO: 877330 - RNA, 19 nt, Artificial Sequence
  Description of Artificial Sequence: Synthetic oligonucleotide
uuagauuuugcucgcucuu

SEQ ID NO: 877331 - RNA, 19 nt, Artificial Sequence
  Description of Artificial Sequence: Synthetic oligonucleotide
aaccaagaguccccgguga

SEQ ID NO: 877332 - RNA, 19 nt, Artificial Sequence
  Description of Artificial Sequence: Synthetic oligonucleotide
uggaccuccggguuaaggu

SEQ ID NO: 877333 - RNA, 19 nt, Artificial Sequence
  Description of Artificial Sequence: Synthetic oligonucleotide
uguccgucccaguaauucc

SEQ ID NO: 877334 - RNA, 19 nt, Artificial Sequence
  Description of Artificial Sequence: Synthetic oligonucleotide
ugaagggucgaaccaaguu

SEQ ID NO: 877335 - RNA, 19 nt, Artificial Sequence
  Description of Artificial Sequence: Synthetic oligonucleotide
ggucacgggaccgugaucg

SEQ ID NO: 877336 - RNA, 19 nt, Artificial Sequence
  Description of Artificial Sequence: Synthetic oligonucleotide
caagaguccccggugauag

SEQ ID NO: 877337 - RNA, 19 nt, Artificial Sequence
  Description of Artificial Sequence: Synthetic oligonucleotide
uccucuacuguuguaguac

SEQ ID NO: 877338 - RNA, 19 nt, Artificial Sequence
  Description of Artificial Sequence: Synthetic oligonucleotide
ucuacuguuguaguacguc

SEQ ID NO: 877339 - RNA, 19 nt, Artificial Sequence
  Description of Artificial Sequence: Synthetic oligonucleotide
cucgucuugcucagcauag

SEQ ID NO: 877340 - RNA, 19 nt, Artificial Sequence
  Description of Artificial Sequence: Synthetic oligonucleotide
guuccaagaguuaggucgg

SEQ ID NO: 877341 - RNA, 19 nt, Artificial Sequence
  Description of Artificial Sequence: Synthetic oligonucleotide
cuaacgugacuuucuuuac

SEQ ID NO: 877342 - RNA, 19 nt, Artificial Sequence
  Description of Artificial Sequence: Synthetic oligonucleotide
ucagacuuaaugggaagaa

SEQ ID NO: 877343 - RNA, 19 nt, Artificial Sequence
  Description of Artificial Sequence: Synthetic oligonucleotide
ggcugauucagcucauagg

SEQ ID NO: 877344 - RNA, 19 nt, Artificial Sequence
  Description of Artificial Sequence: Synthetic oligonucleotide
agaacgaguucucucccgu

SEQ ID NO: 877345 - RNA, 19 nt, Artificial Sequence
  Description of Artificial Sequence: Synthetic oligonucleotide
gagcaauggugugagagac

SEQ ID NO: 877346 - RNA, 19 nt, Artificial Sequence
  Description of Artificial Sequence: Synthetic oligonucleotide
uggguggcaguuauaguuc

SEQ ID NO: 877347 - RNA, 19 nt, Artificial Sequence
  Description of Artificial Sequence: Synthetic oligonucleotide
cuaaagugaagggucgaac

SEQ ID NO: 877348 - RNA, 19 nt, Artificial Sequence
  Description of Artificial Sequence: Synthetic oligonucleotide
uuguaccuaucccucugug

SEQ ID NO: 877349 - RNA, 19 nt, Artificial Sequence
  Description of Artificial Sequence: Synthetic oligonucleotide
ugauuguaccuaucccucu

SEQ ID NO: 877350 - RNA, 19 nt, Artificial Sequence
  Description of Artificial Sequence: Synthetic oligonucleotide
acuaccugugugacugucc

SEQ ID NO: 877351 - RNA, 19 nt, Artificial Sequence
  Description of Artificial Sequence: Synthetic oligonucleotide
acgugacuuucuuuacuuc

SEQ ID NO: 877352 - RNA, 19 nt, Artificial Sequence
  Description of Artificial Sequence: Synthetic oligonucleotide
cagcauagucagcacagag

SEQ ID NO: 877353 - RNA, 19 nt, Artificial Sequence
  Description of Artificial Sequence: Synthetic oligonucleotide
gugagagacccuugguucc

SEQ ID NO: 877354 - RNA, 19 nt, Artificial Sequence
  Description of Artificial Sequence: Synthetic oligonucleotide
agaguccccggugauaguc

SEQ ID NO: 877355 - RNA, 19 nt, Artificial Sequence
  Description of Artificial Sequence: Synthetic oligonucleotide
uauuugguauguggggaug

SEQ ID NO: 877356 - RNA, 19 nt, Artificial Sequence
  Description of Artificial Sequence: Synthetic oligonucleotide
ccggugauaguccagcucg

SEQ ID NO: 877357 - RNA, 19 nt, Artificial Sequence
  Description of Artificial Sequence: Synthetic oligonucleotide
gcuauucccacuucuggcc

SEQ ID NO: 877358 - RNA, 19 nt, Artificial Sequence
  Description of Artificial Sequence: Synthetic oligonucleotide
gcucuauuugguauguggg

SEQ ID NO: 877359 - RNA, 19 nt, Artificial Sequence
  Description of Artificial Sequence: Synthetic oligonucleotide
uuaaccucccagggcagag

SEQ ID NO: 877360 - RNA, 19 nt, Artificial Sequence
  Description of Artificial Sequence: Synthetic oligonucleotide
cuacuguuguaguacguca

SEQ ID NO: 877361 - RNA, 19 nt, Artificial Sequence
  Description of Artificial Sequence: Synthetic oligonucleotide
uccaagaguuaggucgggg

SEQ ID NO: 877362 - RNA, 19 nt, Artificial Sequence
  Description of Artificial Sequence: Synthetic oligonucleotide
uccggcuucugcuguggcg

SEQ ID NO: 877363 - RNA, 19 nt, Artificial Sequence
  Description of Artificial Sequence: Synthetic oligonucleotide
cugauucagcucauaggug

SEQ ID NO: 877364 - RNA, 19 nt, Artificial Sequence
  Description of Artificial Sequence: Synthetic oligonucleotide
ucucguucagaacgaguuc

SEQ ID NO: 877365 - RNA, 19 nt, Artificial Sequence
  Description of Artificial Sequence: Synthetic oligonucleotide
cagacucgggaacugcagg

SEQ ID NO: 877366 - RNA, 19 nt, Artificial Sequence
  Description of Artificial Sequence: Synthetic oligonucleotide
acggagggaagaugagagg

SEQ ID NO: 877367 - RNA, 19 nt, Artificial Sequence
  Description of Artificial Sequence: Synthetic oligonucleotide
aucuccuaacgugacuuuc

SEQ ID NO: 877368 - RNA, 19 nt, Artificial Sequence
  Description of Artificial Sequence: Synthetic oligonucleotide
uuagcuagcggcgcccacc

SEQ ID NO: 877369 - RNA, 19 nt, Artificial Sequence
  Description of Artificial Sequence: Synthetic oligonucleotide
gcaguuauaguucagcacu

SEQ ID NO: 877370 - RNA, 19 nt, Artificial Sequence
  Description of Artificial Sequence: Synthetic oligonucleotide
gucuuaguuucagaaggcc

SEQ ID NO: 877371 - RNA, 19 nt, Artificial Sequence
  Description of Artificial Sequence: Synthetic oligonucleotide
gcaauggugugagagaccc

SEQ ID NO: 877372 - RNA, 19 nt, Artificial Sequence
  Description of Artificial Sequence: Synthetic oligonucleotide
cagaacgaguucucucccg

SEQ ID NO: 877373 - RNA, 19 nt, Artificial Sequence
  Description of Artificial Sequence: Synthetic oligonucleotide
uguuacugaucuugccccu

SEQ ID NO: 877374 - RNA, 19 nt, Artificial Sequence
  Description of Artificial Sequence: Synthetic oligonucleotide
agaaggccgaucaaccaag

SEQ ID NO: 877375 - RNA, 19 nt, Artificial Sequence
  Description of Artificial Sequence: Synthetic oligonucleotide
agaccacaucauuuaauaa

SEQ ID NO: 877376 - RNA, 19 nt, Artificial Sequence
  Description of Artificial Sequence: Synthetic oligonucleotide
ggauggguggcaguuauag

SEQ ID NO: 877377 - RNA, 19 nt, Artificial Sequence
  Description of Artificial Sequence: Synthetic oligonucleotide
gcugauucagcucauaggu

SEQ ID NO: 877378 - RNA, 19 nt, Artificial Sequence
  Description of Artificial Sequence: Synthetic oligonucleotide
agcucuuaccucucagacu

SEQ ID NO: 877379 - RNA, 19 nt, Artificial Sequence
  Description of Artificial Sequence: Synthetic oligonucleotide
gguggauauaaaguggaac

SEQ ID NO: 877380 - RNA, 19 nt, Artificial Sequence
  Description of Artificial Sequence: Synthetic oligonucleotide
cauaaccuagcucuuaccu

SEQ ID NO: 877381 - RNA, 19 nt, Artificial Sequence
  Description of Artificial Sequence: Synthetic oligonucleotide
ucucuaacuuuugucccga

SEQ ID NO: 877382 - RNA, 19 nt, Artificial Sequence
  Description of Artificial Sequence: Synthetic oligonucleotide
uguacgggucggcaaccgc

SEQ ID NO: 877383 - RNA, 19 nt, Artificial Sequence
  Description of Artificial Sequence: Synthetic oligonucleotide
cugcccauugcucucgaac

SEQ ID NO: 877384 - RNA, 19 nt, Artificial Sequence
  Description of Artificial Sequence: Synthetic oligonucleotide
ugugugacuguccggcaua

SEQ ID NO: 877385 - RNA, 19 nt, Artificial Sequence
  Description of Artificial Sequence: Synthetic oligonucleotide
aguacgucacaaagcaaug

SEQ ID NO: 877386 - RNA, 19 nt, Artificial Sequence
  Description of Artificial Sequence: Synthetic oligonucleotide
guacaggcggcucugcuuc

SEQ ID NO: 877387 - RNA, 19 nt, Artificial Sequence
  Description of Artificial Sequence: Synthetic oligonucleotide
uaccuaucccucuguggcc

SEQ ID NO: 877388 - RNA, 19 nt, Artificial Sequence
  Description of Artificial Sequence: Synthetic oligonucleotide
aucaaccaagaguccccgg

SEQ ID NO: 877389 - RNA, 19 nt, Artificial Sequence
  Description of Artificial Sequence: Synthetic oligonucleotide
ggcuauucccacuucuggc

SEQ ID NO: 877390 - RNA, 19 nt, Artificial Sequence
  Description of Artificial Sequence: Synthetic oligonucleotide
uagcuagcggcgcccaccc

SEQ ID NO: 877391 - RNA, 19 nt, Artificial Sequence
  Description of Artificial Sequence: Synthetic oligonucleotide
uucccguucugcccauugc

SEQ ID NO: 877392 - RNA, 19 nt, Artificial Sequence
  Description of Artificial Sequence: Synthetic oligonucleotide
uucucccguuccuuggccc

SEQ ID NO: 877393 - RNA, 19 nt, Artificial Sequence
  Description of Artificial Sequence: Synthetic oligonucleotide
ggucgaaccaaguuggaaa

SEQ ID NO: 877394 - RNA, 19 nt, Artificial Sequence
  Description of Artificial Sequence: Synthetic oligonucleotide
ggugauuguaccuaucccu

SEQ ID NO: 877395 - RNA, 19 nt, Artificial Sequence
  Description of Artificial Sequence: Synthetic oligonucleotide
ugccuuagucuuacggaaa

SEQ ID NO: 877396 - RNA, 19 nt, Artificial Sequence
  Description of Artificial Sequence: Synthetic oligonucleotide
guuaaaacuaagucagauu

SEQ ID NO: 877397 - RNA, 19 nt, Artificial Sequence
  Description of Artificial Sequence: Synthetic oligonucleotide
ggcaguuauaguucagcac

SEQ ID NO: 877398 - RNA, 19 nt, Artificial Sequence
  Description of Artificial Sequence: Synthetic oligonucleotide
uuccuuccauaaccuagcu

SEQ ID NO: 877399 - RNA, 19 nt, Artificial Sequence
  Description of Artificial Sequence: Synthetic oligonucleotide
ggccuuuaaccucccaggg

SEQ ID NO: 877400 - RNA, 19 nt, Artificial Sequence
  Description of Artificial Sequence: Synthetic oligonucleotide
agcggggccccucucuaac

SEQ ID NO: 877401 - RNA, 19 nt, Artificial Sequence
  Description of Artificial Sequence: Synthetic oligonucleotide
ucuuaccucucagacuuaa

SEQ ID NO: 877402 - RNA, 19 nt, Artificial Sequence
  Description of Artificial Sequence: Synthetic oligonucleotide
cugucucuuucccuauccc

SEQ ID NO: 877403 - RNA, 19 nt, Artificial Sequence
  Description of Artificial Sequence: Synthetic oligonucleotide
acuuggcuauucccacuuc

SEQ ID NO: 877404 - RNA, 19 nt, Artificial Sequence
  Description of Artificial Sequence: Synthetic oligonucleotide
ccuaucccgaucucggucc

SEQ ID NO: 877405 - RNA, 19 nt, Artificial Sequence
  Description of Artificial Sequence: Synthetic oligonucleotide
cauugcucucgaacagccc

SEQ ID NO: 877406 - RNA, 19 nt, Artificial Sequence
  Description of Artificial Sequence: Synthetic oligonucleotide
aguuauaguucagcacuga

SEQ ID NO: 877407 - RNA, 19 nt, Artificial Sequence
  Description of Artificial Sequence: Synthetic oligonucleotide
ugucgguuccguucccucu

SEQ ID NO: 877408 - RNA, 19 nt, Artificial Sequence
  Description of Artificial Sequence: Synthetic oligonucleotide
gguuaagguaucuccuaac

SEQ ID NO: 877409 - RNA, 19 nt, Artificial Sequence
  Description of Artificial Sequence: Synthetic oligonucleotide
caaccaagaguccccggug

SEQ ID NO: 877410 - RNA, 19 nt, Artificial Sequence
  Description of Artificial Sequence: Synthetic oligonucleotide
ucccguacaggugugcuuc

SEQ ID NO: 877411 - RNA, 19 nt, Artificial Sequence
  Description of Artificial Sequence: Synthetic oligonucleotide
uuuaaccucccagggcaga

SEQ ID NO: 877412 - RNA, 19 nt, Artificial Sequence
  Description of Artificial Sequence: Synthetic oligonucleotide
ugcuggcuaauggaccucc

SEQ ID NO: 877413 - RNA, 19 nt, Artificial Sequence
  Description of Artificial Sequence: Synthetic oligonucleotide
gccacuugaccccaugcag

SEQ ID NO: 877414 - RNA, 19 nt, Artificial Sequence
  Description of Artificial Sequence: Synthetic oligonucleotide
ucacgggaccgugaucggg

SEQ ID NO: 877415 - RNA, 19 nt, Artificial Sequence
  Description of Artificial Sequence: Synthetic oligonucleotide
ucguucagaacgaguucuc

SEQ ID NO: 877416 - RNA, 19 nt, Artificial Sequence
  Description of Artificial Sequence: Synthetic oligonucleotide
gaaaggaggaggacuaagu

SEQ ID NO: 877417 - RNA, 19 nt, Artificial Sequence
  Description of Artificial Sequence: Synthetic oligonucleotide
ccuuuaaccucccagggca

SEQ ID NO: 877418 - RNA, 19 nt, Artificial Sequence
  Description of Artificial Sequence: Synthetic oligonucleotide
uuaguuucagaaggccgau

SEQ ID NO: 877419 - RNA, 19 nt, Artificial Sequence
  Description of Artificial Sequence: Synthetic oligonucleotide
uccuguccgucccaguaau

SEQ ID NO: 877420 - RNA, 19 nt, Artificial Sequence
  Description of Artificial Sequence: Synthetic oligonucleotide
accugggcaguccggacug

SEQ ID NO: 877421 - RNA, 19 nt, Artificial Sequence
  Description of Artificial Sequence: Synthetic oligonucleotide
gaugagagguccggggcac

SEQ ID NO: 877422 - RNA, 19 nt, Artificial Sequence
  Description of Artificial Sequence: Synthetic oligonucleotide
uuccuguccgucccaguaa

SEQ ID NO: 877423 - RNA, 19 nt, Artificial Sequence
  Description of Artificial Sequence: Synthetic oligonucleotide
uaggugacccaguccuggc

SEQ ID NO: 877424 - RNA, 19 nt, Artificial Sequence
  Description of Artificial Sequence: Synthetic oligonucleotide
uaauggaccuccggguuaa

SEQ ID NO: 877425 - RNA, 19 nt, Artificial Sequence
  Description of Artificial Sequence: Synthetic oligonucleotide
accccggucccguacaggu

SEQ ID NO: 877426 - RNA, 19 nt, Artificial Sequence
  Description of Artificial Sequence: Synthetic oligonucleotide
uacgggucggcaaccgccu

SEQ ID NO: 877427 - RNA, 19 nt, Artificial Sequence
  Description of Artificial Sequence: Synthetic oligonucleotide
gcaaugagauuugaucuug

SEQ ID NO: 877428 - RNA, 19 nt, Artificial Sequence
  Description of Artificial Sequence: Synthetic oligonucleotide
gcagguacuaccuguguga

SEQ ID NO: 877429 - RNA, 19 nt, Artificial Sequence
  Description of Artificial Sequence: Synthetic oligonucleotide
cuguccgucccaguaauuc

SEQ ID NO: 877430 - RNA, 19 nt, Artificial Sequence
  Description of Artificial Sequence: Synthetic oligonucleotide
guacgggucggcaaccgcc

SEQ ID NO: 877431 - RNA, 19 nt, Artificial Sequence
  Description of Artificial Sequence: Synthetic oligonucleotide
gcuagcggcgcccaccccg

SEQ ID NO: 877432 - RNA, 19 nt, Artificial Sequence
  Description of Artificial Sequence: Synthetic oligonucleotide
ugcuguggcgcuugguguc

SEQ ID NO: 877433 - RNA, 19 nt, Artificial Sequence
  Description of Artificial Sequence: Synthetic oligonucleotide
acaaagcaaugagauuuga

SEQ ID NO: 877434 - RNA, 19 nt, Artificial Sequence
  Description of Artificial Sequence: Synthetic oligonucleotide
uccccggugauaguccagc

SEQ ID NO: 877435 - RNA, 19 nt, Artificial Sequence
  Description of Artificial Sequence: Synthetic oligonucleotide
agaugcagggagcugccuu

SEQ ID NO: 877436 - RNA, 19 nt, Artificial Sequence
  Description of Artificial Sequence: Synthetic oligonucleotide
ugagagacccuugguucca

SEQ ID NO: 877437 - RNA, 19 nt, Artificial Sequence
  Description of Artificial Sequence: Synthetic oligonucleotide
ggcgcuuggugucucugcg

SEQ ID NO: 877438 - RNA, 19 nt, Artificial Sequence
  Description of Artificial Sequence: Synthetic oligonucleotide
acagacucgggaacugcag

SEQ ID NO: 877439 - RNA, 19 nt, Artificial Sequence
  Description of Artificial Sequence: Synthetic oligonucleotide
gaucccauucucguucaga

SEQ ID NO: 877440 - RNA, 19 nt, Artificial Sequence
  Description of Artificial Sequence: Synthetic oligonucleotide
ucgggaacugcaggggccc

SEQ ID NO: 877441 - RNA, 19 nt, Artificial Sequence
  Description of Artificial Sequence: Synthetic oligonucleotide
uagauuuugcucgcucuuu

SEQ ID NO: 877442 - RNA, 19 nt, Artificial Sequence
  Description of Artificial Sequence: Synthetic oligonucleotide
aaccuagcucuuaccucuc

SEQ ID NO: 877443 - RNA, 19 nt, Artificial Sequence
  Description of Artificial Sequence: Synthetic oligonucleotide
uuccaagaguuaggucggg

SEQ ID NO: 877444 - RNA, 19 nt, Artificial Sequence
  Description of Artificial Sequence: Synthetic oligonucleotide
acgaguucucucccgucgu

SEQ ID NO: 877445 - RNA, 19 nt, Artificial Sequence
  Description of Artificial Sequence: Synthetic oligonucleotide
cuagcggcgcccaccccgg

SEQ ID NO: 877446 - RNA, 19 nt, Artificial Sequence
  Description of Artificial Sequence: Synthetic oligonucleotide
caaacccuuccuuccauaa

SEQ ID NO: 877447 - RNA, 19 nt, Artificial Sequence
  Description of Artificial Sequence: Synthetic oligonucleotide
gaacgaguucucucccguc

SEQ ID NO: 877448 - RNA, 19 nt, Artificial Sequence
  Description of Artificial Sequence: Synthetic oligonucleotide
agguccggggcacuuggcu

SEQ ID NO: 877449 - RNA, 19 nt, Artificial Sequence
  Description of Artificial Sequence: Synthetic oligonucleotide
guuacugaucuugccccug

SEQ ID NO: 877450 - RNA, 19 nt, Artificial Sequence
  Description of Artificial Sequence: Synthetic oligonucleotide
ucuuacggaaaaggucauc

SEQ ID NO: 877451 - RNA, 19 nt, Artificial Sequence
  Description of Artificial Sequence: Synthetic oligonucleotide
augcagagcuguacggguc

SEQ ID NO: 877452 - RNA, 19 nt, Artificial Sequence
  Description of Artificial Sequence: Synthetic oligonucleotide
caggugugcuucgacuccg

SEQ ID NO: 877453 - RNA, 19 nt, Artificial Sequence
  Description of Artificial Sequence: Synthetic oligonucleotide
agagcuguacgggucggca

SEQ ID NO: 877454 - RNA, 19 nt, Artificial Sequence
  Description of Artificial Sequence: Synthetic oligonucleotide
agggagcugccuuagucuu

SEQ ID NO: 877455 - RNA, 19 nt, Artificial Sequence
  Description of Artificial Sequence: Synthetic oligonucleotide
ucccucuguggccuuuaac

SEQ ID NO: 877456 - RNA, 19 nt, Artificial Sequence
  Description of Artificial Sequence: Synthetic oligonucleotide
ugguggugauuguaccuau

SEQ ID NO: 877457 - RNA, 19 nt, Artificial Sequence
  Description of Artificial Sequence: Synthetic oligonucleotide
cuucgacuccggcuucugc

SEQ ID NO: 877458 - RNA, 19 nt, Artificial Sequence
  Description of Artificial Sequence: Synthetic oligonucleotide
uaucuccuaacgugacuuu

SEQ ID NO: 877459 - RNA, 19 nt, Artificial Sequence
  Description of Artificial Sequence: Synthetic oligonucleotide
caguuggccuaaagugaag

SEQ ID NO: 877460 - RNA, 19 nt, Artificial Sequence
  Description of Artificial Sequence: Synthetic oligonucleotide
guacgucacaaagcaauga

SEQ ID NO: 877461 - RNA, 19 nt, Artificial Sequence
  Description of Artificial Sequence: Synthetic oligonucleotide
uccagacuucugcuggcua

SEQ ID NO: 877462 - RNA, 19 nt, Artificial Sequence
  Description of Artificial Sequence: Synthetic oligonucleotide
aguccccggugauagucca

SEQ ID NO: 877463 - RNA, 19 nt, Artificial Sequence
  Description of Artificial Sequence: Synthetic oligonucleotide
uccuaacgugacuuucuuu

SEQ ID NO: 877464 - RNA, 19 nt, Artificial Sequence
  Description of Artificial Sequence: Synthetic oligonucleotide
ucccuuugcucugcccggg

SEQ ID NO: 877465 - RNA, 19 nt, Artificial Sequence
  Description of Artificial Sequence: Synthetic oligonucleotide
gugauaguccagcucgucu

SEQ ID NO: 877466 - RNA, 19 nt, Artificial Sequence
  Description of Artificial Sequence: Synthetic oligonucleotide
aagaguccccggugauagu

SEQ ID NO: 877467 - RNA, 19 nt, Artificial Sequence
  Description of Artificial Sequence: Synthetic oligonucleotide
ucuuagcuagcggcgccca

SEQ ID NO: 877468 - RNA, 19 nt, Artificial Sequence
  Description of Artificial Sequence: Synthetic oligonucleotide
agguacuaccugugugacu

SEQ ID NO: 877469 - RNA, 19 nt, Artificial Sequence
  Description of Artificial Sequence: Synthetic oligonucleotide
cagguacuaccugugugac

SEQ ID NO: 877470 - RNA, 19 nt, Artificial Sequence
  Description of Artificial Sequence: Synthetic oligonucleotide
cagaggaauuugggguugg

SEQ ID NO: 877471 - RNA, 19 nt, Artificial Sequence
  Description of Artificial Sequence: Synthetic oligonucleotide
cuaucccgaucucgguccc

SEQ ID NO: 877472 - RNA, 19 nt, Artificial Sequence
  Description of Artificial Sequence: Synthetic oligonucleotide
ccuuucgccgcuucucccg

SEQ ID NO: 877473 - RNA, 19 nt, Artificial Sequence
  Description of Artificial Sequence: Synthetic oligonucleotide
accgugaucgggagcgggg

SEQ ID NO: 877474 - RNA, 19 nt, Artificial Sequence
  Description of Artificial Sequence: Synthetic oligonucleotide
uuccauaaccuagcucuua

SEQ ID NO: 877475 - RNA, 19 nt, Artificial Sequence
  Description of Artificial Sequence: Synthetic oligonucleotide
guaccugcagcucucuagu

SEQ ID NO: 877476 - RNA, 19 nt, Artificial Sequence
  Description of Artificial Sequence: Synthetic oligonucleotide
guacaggugugcuucgacu

SEQ ID NO: 877477 - RNA, 19 nt, Artificial Sequence
  Description of Artificial Sequence: Synthetic oligonucleotide
gaguggcagguaccugcag

SEQ ID NO: 877478 - RNA, 19 nt, Artificial Sequence
  Description of Artificial Sequence: Synthetic oligonucleotide
aguccggacugggucauca

SEQ ID NO: 877479 - RNA, 19 nt, Artificial Sequence
  Description of Artificial Sequence: Synthetic oligonucleotide
cccgucguuccauuucucg

SEQ ID NO: 877480 - RNA, 19 nt, Artificial Sequence
  Description of Artificial Sequence: Synthetic oligonucleotide
cccaugcagagcuguacgg

SEQ ID NO: 877481 - RNA, 19 nt, Artificial Sequence
  Description of Artificial Sequence: Synthetic oligonucleotide
ccauaaccuagcucuuacc

SEQ ID NO: 877482 - RNA, 19 nt, Artificial Sequence
  Description of Artificial Sequence: Synthetic oligonucleotide
ccgaucaaccaagaguccc

SEQ ID NO: 877483 - RNA, 19 nt, Artificial Sequence
  Description of Artificial Sequence: Synthetic oligonucleotide
ucuagcugucgguuccguu

SEQ ID NO: 877484 - RNA, 19 nt, Artificial Sequence
  Description of Artificial Sequence: Synthetic oligonucleotide
uacuaccugugugacuguc

SEQ ID NO: 877485 - RNA, 19 nt, Artificial Sequence
  Description of Artificial Sequence: Synthetic oligonucleotide
gacuccggcuucugcugug

SEQ ID NO: 877486 - RNA, 19 nt, Artificial Sequence
  Description of Artificial Sequence: Synthetic oligonucleotide
ucuuuacuucaugcuccac

SEQ ID NO: 877487 - RNA, 19 nt, Artificial Sequence
  Description of Artificial Sequence: Synthetic oligonucleotide
cuuggcuauucccacuucu

SEQ ID NO: 877488 - RNA, 19 nt, Artificial Sequence
  Description of Artificial Sequence: Synthetic oligonucleotide
ucccuaucccgaucucggu

SEQ ID NO: 877489 - RNA, 19 nt, Artificial Sequence
  Description of Artificial Sequence: Synthetic oligonucleotide
gucacgggaccgugaucgg

SEQ ID NO: 877490 - RNA, 19 nt, Artificial Sequence
  Description of Artificial Sequence: Synthetic oligonucleotide
cucuaguguuuucuuagcu

SEQ ID NO: 877491 - RNA, 19 nt, Artificial Sequence
  Description of Artificial Sequence: Synthetic oligonucleotide
gugaucgggagcggggccc

SEQ ID NO: 877492 - RNA, 19 nt, Artificial Sequence
  Description of Artificial Sequence: Synthetic oligonucleotide
cuaauggaccuccggguua

SEQ ID NO: 877493 - RNA, 19 nt, Artificial Sequence
  Description of Artificial Sequence: Synthetic oligonucleotide
cuugccccuggguggggag

SEQ ID NO: 877494 - RNA, 19 nt, Artificial Sequence
  Description of Artificial Sequence: Synthetic oligonucleotide
cucguucagaacgaguucu

SEQ ID NO: 877495 - RNA, 19 nt, Artificial Sequence
  Description of Artificial Sequence: Synthetic oligonucleotide
accuagcucuuaccucuca

SEQ ID NO: 877496 - RNA, 19 nt, Artificial Sequence
  Description of Artificial Sequence: Synthetic oligonucleotide
uuccguucccucucagcuu

SEQ ID NO: 877497 - RNA, 19 nt, Artificial Sequence
  Description of Artificial Sequence: Synthetic oligonucleotide
guggguugguggcugaacu

SEQ ID NO: 877498 - RNA, 19 nt, Artificial Sequence
  Description of Artificial Sequence: Synthetic oligonucleotide
agagguugccacugcucua

SEQ ID NO: 877499 - RNA, 19 nt, Artificial Sequence
  Description of Artificial Sequence: Synthetic oligonucleotide
aguuccuguccgucccagu

SEQ ID NO: 877500 - RNA, 19 nt, Artificial Sequence
  Description of Artificial Sequence: Synthetic oligonucleotide
ccaugcagagcuguacggg

SEQ ID NO: 877501 - RNA, 19 nt, Artificial Sequence
  Description of Artificial Sequence: Synthetic oligonucleotide
cuguacgggucggcaaccg

SEQ ID NO: 877502 - RNA, 19 nt, Artificial Sequence
  Description of Artificial Sequence: Synthetic oligonucleotide
gcccauugcucucgaacag

SEQ ID NO: 877503 - RNA, 19 nt, Artificial Sequence
  Description of Artificial Sequence: Synthetic oligonucleotide
cuauuugguauguggggau

SEQ ID NO: 877504 - RNA, 19 nt, Artificial Sequence
  Description of Artificial Sequence: Synthetic oligonucleotide
gagagacccuugguuccag

SEQ ID NO: 877505 - RNA, 19 nt, Artificial Sequence
  Description of Artificial Sequence: Synthetic oligonucleotide
ggcugcaggacaaaacaga

SEQ ID NO: 877506 - RNA, 19 nt, Artificial Sequence
  Description of Artificial Sequence: Synthetic oligonucleotide
agcuagcggcgcccacccc

SEQ ID NO: 877507 - RNA, 19 nt, Artificial Sequence
  Description of Artificial Sequence: Synthetic oligonucleotide
gacuaaguuccaagaguua

SEQ ID NO: 877508 - RNA, 19 nt, Artificial Sequence
  Description of Artificial Sequence: Synthetic oligonucleotide
uccgucccaguaauuccuu

SEQ ID NO: 877509 - RNA, 19 nt, Artificial Sequence
  Description of Artificial Sequence: Synthetic oligonucleotide
ggguuaagguaucuccuaa

SEQ ID NO: 877510 - RNA, 19 nt, Artificial Sequence
  Description of Artificial Sequence: Synthetic oligonucleotide
cuuagcuagcggcgcccac

SEQ ID NO: 877511 - RNA, 19 nt, Artificial Sequence
  Description of Artificial Sequence: Synthetic oligonucleotide
ucgucuugcucagcauagu

SEQ ID NO: 877512 - RNA, 19 nt, Artificial Sequence
  Description of Artificial Sequence: Synthetic oligonucleotide
acugagcaauggugugaga

SEQ ID NO: 877513 - RNA, 19 nt, Artificial Sequence
  Description of Artificial Sequence: Synthetic oligonucleotide
cauagucagcacagaggaa

SEQ ID NO: 877514 - RNA, 19 nt, Artificial Sequence
  Description of Artificial Sequence: Synthetic oligonucleotide
uaaccucccagggcagagu

SEQ ID NO: 877515 - RNA, 19 nt, Artificial Sequence
  Description of Artificial Sequence: Synthetic oligonucleotide
gugggguuaaggccaccuc

SEQ ID NO: 877516 - RNA, 19 nt, Artificial Sequence
  Description of Artificial Sequence: Synthetic oligonucleotide
ucugaacaaucuggcucuc

SEQ ID NO: 877517 - RNA, 19 nt, Artificial Sequence
  Description of Artificial Sequence: Synthetic oligonucleotide
agaggaauuugggguugga

SEQ ID NO: 877518 - RNA, 19 nt, Artificial Sequence
  Description of Artificial Sequence: Synthetic oligonucleotide
cccgaucccauucucguuc

SEQ ID NO: 877519 - RNA, 19 nt, Artificial Sequence
  Description of Artificial Sequence: Synthetic oligonucleotide
gaaggccgaucaaccaaga

SEQ ID NO: 877520 - RNA, 19 nt, Artificial Sequence
  Description of Artificial Sequence: Synthetic oligonucleotide
cagggagcugccuuagucu

SEQ ID NO: 877521 - RNA, 19 nt, Artificial Sequence
  Description of Artificial Sequence: Synthetic oligonucleotide
uucuagcugucgguuccgu

SEQ ID NO: 877522 - RNA, 19 nt, Artificial Sequence
  Description of Artificial Sequence: Synthetic oligonucleotide
gugugcuucgacuccggcu

SEQ ID NO: 877523 - RNA, 19 nt, Artificial Sequence
  Description of Artificial Sequence: Synthetic oligonucleotide
agcucgucuugcucagcau

SEQ ID NO: 877524 - RNA, 19 nt, Artificial Sequence
  Description of Artificial Sequence: Synthetic oligonucleotide
ggccacuugaccccaugca

SEQ ID NO: 877525 - RNA, 19 nt, Artificial Sequence
  Description of Artificial Sequence: Synthetic oligonucleotide
gccuuagucuuacggaaaa

SEQ ID NO: 877526 - RNA, 19 nt, Artificial Sequence
  Description of Artificial Sequence: Synthetic oligonucleotide
ggguggcaguuauaguuca

SEQ ID NO: 877527 - RNA, 19 nt, Artificial Sequence
  Description of Artificial Sequence: Synthetic oligonucleotide
guaguacgucacaaagcaa

SEQ ID NO: 877528 - RNA, 19 nt, Artificial Sequence
  Description of Artificial Sequence: Synthetic oligonucleotide
acgggucggcaaccgccuc

SEQ ID NO: 877529 - RNA, 19 nt, Artificial Sequence
  Description of Artificial Sequence: Synthetic oligonucleotide
uaucccgaucucggucccc

SEQ ID NO: 877530 - RNA, 19 nt, Artificial Sequence
  Description of Artificial Sequence: Synthetic oligonucleotide
ggcaguccggacuggguca

SEQ ID NO: 877531 - RNA, 19 nt, Artificial Sequence
  Description of Artificial Sequence: Synthetic oligonucleotide
ggacuaaguuccaagaguu

SEQ ID NO: 877532 - RNA, 19 nt, Artificial Sequence
  Description of Artificial Sequence: Synthetic oligonucleotide
gggccacuugaccccaugc

SEQ ID NO: 877533 - RNA, 19 nt, Artificial Sequence
  Description of Artificial Sequence: Synthetic oligonucleotide
uguaggggccuuggugcuc

SEQ ID NO: 877534 - RNA, 19 nt, Artificial Sequence
  Description of Artificial Sequence: Synthetic oligonucleotide
ucccgaucccauucucguu

SEQ ID NO: 877535 - RNA, 19 nt, Artificial Sequence
  Description of Artificial Sequence: Synthetic oligonucleotide
caguagaugcagggagcug

SEQ ID NO: 877536 - RNA, 19 nt, Artificial Sequence
  Description of Artificial Sequence: Synthetic oligonucleotide
ucccgucguuccauuucuc

SEQ ID NO: 877537 - RNA, 19 nt, Artificial Sequence
  Description of Artificial Sequence: Synthetic oligonucleotide
accuccggguuaagguauc

SEQ ID NO: 877538 - RNA, 19 nt, Artificial Sequence
  Description of Artificial Sequence: Synthetic oligonucleotide
gcgcuuggugucucugcgg

SEQ ID NO: 877539 - RNA, 19 nt, Artificial Sequence
  Description of Artificial Sequence: Synthetic oligonucleotide
gguuaaggccaccucuacu

SEQ ID NO: 877540 - RNA, 19 nt, Artificial Sequence
  Description of Artificial Sequence: Synthetic oligonucleotide
ucaauccagaaggccucuu

SEQ ID NO: 877541 - RNA, 19 nt, Artificial Sequence
  Description of Artificial Sequence: Synthetic oligonucleotide
cucucuucgcuucucccgu

SEQ ID NO: 877542 - RNA, 19 nt, Artificial Sequence
  Description of Artificial Sequence: Synthetic oligonucleotide
cagagcuguacgggucggc

SEQ ID NO: 877543 - RNA, 19 nt, Artificial Sequence
  Description of Artificial Sequence: Synthetic oligonucleotide
ucuuugcggcggcggucac

SEQ ID NO: 877544 - RNA, 19 nt, Artificial Sequence
  Description of Artificial Sequence: Synthetic oligonucleotide
cuccggguuaagguaucuc

SEQ ID NO: 877545 - RNA, 19 nt, Artificial Sequence
  Description of Artificial Sequence: Synthetic oligonucleotide
cgucacaaagcaaugagau

SEQ ID NO: 877546 - RNA, 19 nt, Artificial Sequence
  Description of Artificial Sequence: Synthetic oligonucleotide
gcucucagucagugggagc

SEQ ID NO: 877547 - RNA, 19 nt, Artificial Sequence
  Description of Artificial Sequence: Synthetic oligonucleotide
ucucucccgucguuccauu

SEQ ID NO: 877548 - RNA, 19 nt, Artificial Sequence
  Description of Artificial Sequence: Synthetic oligonucleotide
gguaucuccuaacgugacu

SEQ ID NO: 877549 - RNA, 19 nt, Artificial Sequence
  Description of Artificial Sequence: Synthetic oligonucleotide
gcucucuaguguuuucuua

SEQ ID NO: 877550 - RNA, 19 nt, Artificial Sequence
  Description of Artificial Sequence: Synthetic oligonucleotide
ggacggagggaagaugaga

SEQ ID NO: 877551 - RNA, 19 nt, Artificial Sequence
  Description of Artificial Sequence: Synthetic oligonucleotide
cucuacuguuguaguacgu

SEQ ID NO: 877552 - RNA, 19 nt, Artificial Sequence
  Description of Artificial Sequence: Synthetic oligonucleotide
cugaacaaucuggcucuca

SEQ ID NO: 877553 - RNA, 19 nt, Artificial Sequence
  Description of Artificial Sequence: Synthetic oligonucleotide
uaucccucuguggccuuua

SEQ ID NO: 877554 - RNA, 19 nt, Artificial Sequence
  Description of Artificial Sequence: Synthetic oligonucleotide
cugcucuauuugguaugug

SEQ ID NO: 877555 - RNA, 19 nt, Artificial Sequence
  Description of Artificial Sequence: Synthetic oligonucleotide
gcucgucuugcucagcaua

SEQ ID NO: 877556 - RNA, 19 nt, Artificial Sequence
  Description of Artificial Sequence: Synthetic oligonucleotide
ggugauaguccagcucguc

SEQ ID NO: 877557 - RNA, 19 nt, Artificial Sequence
  Description of Artificial Sequence: Synthetic oligonucleotide
ccaagggagguggaaagca

SEQ ID NO: 877558 - RNA, 19 nt, Artificial Sequence
  Description of Artificial Sequence: Synthetic oligonucleotide
cccuaucccgaucucgguc

SEQ ID NO: 877559 - RNA, 19 nt, Artificial Sequence
  Description of Artificial Sequence: Synthetic oligonucleotide
guccgucccaguaauuccu

SEQ ID NO: 877560 - RNA, 19 nt, Artificial Sequence
  Description of Artificial Sequence: Synthetic oligonucleotide
cguacaggugugcuucgac

SEQ ID NO: 877561 - RNA, 19 nt, Artificial Sequence
  Description of Artificial Sequence: Synthetic oligonucleotide
gaccuccggguuaagguau

SEQ ID NO: 877562 - RNA, 19 nt, Artificial Sequence
  Description of Artificial Sequence: Synthetic oligonucleotide
cuuuuagauuuugcucgcu

SEQ ID NO: 877563 - RNA, 19 nt, Artificial Sequence
  Description of Artificial Sequence: Synthetic oligonucleotide
gcuguacgggucggcaacc

SEQ ID NO: 877564 - RNA, 19 nt, Artificial Sequence
  Description of Artificial Sequence: Synthetic oligonucleotide
cucuucuaccaaaguuccu

SEQ ID NO: 877565 - RNA, 19 nt, Artificial Sequence
  Description of Artificial Sequence: Synthetic oligonucleotide
ccuggccccgggcuguucc

SEQ ID NO: 877566 - RNA, 19 nt, Artificial Sequence
  Description of Artificial Sequence: Synthetic oligonucleotide
caccccggucccguacagg

SEQ ID NO: 877567 - RNA, 19 nt, Artificial Sequence
  Description of Artificial Sequence: Synthetic oligonucleotide
cuuaccucucagacuuaau

SEQ ID NO: 877568 - RNA, 19 nt, Artificial Sequence
  Description of Artificial Sequence: Synthetic oligonucleotide
agggucgaaccaaguugga

SEQ ID NO: 877569 - RNA, 19 nt, Artificial Sequence
  Description of Artificial Sequence: Synthetic oligonucleotide
cccguacaggugugcuucg

SEQ ID NO: 877570 - RNA, 19 nt, Artificial Sequence
  Description of Artificial Sequence: Synthetic oligonucleotide
cacuuggcuauucccacuu

SEQ ID NO: 877571 - RNA, 19 nt, Artificial Sequence
  Description of Artificial Sequence: Synthetic oligonucleotide
gcuaauggaccuccggguu

SEQ ID NO: 877572 - RNA, 19 nt, Artificial Sequence
  Description of Artificial Sequence: Synthetic oligonucleotide
agaggcugauucagcucau

SEQ ID NO: 877573 - RNA, 19 nt, Artificial Sequence
  Description of Artificial Sequence: Synthetic oligonucleotide
gccgaucaaccaagagucc

SEQ ID NO: 877574 - RNA, 19 nt, Artificial Sequence
  Description of Artificial Sequence: Synthetic oligonucleotide
gguccggggcacuuggcua

SEQ ID NO: 877575 - RNA, 19 nt, Artificial Sequence
  Description of Artificial Sequence: Synthetic oligonucleotide
guccccggugauaguccag

SEQ ID NO: 877576 - RNA, 19 nt, Artificial Sequence
  Description of Artificial Sequence: Synthetic oligonucleotide
cuuccauaaccuagcucuu

SEQ ID NO: 877577 - RNA, 19 nt, Artificial Sequence
  Description of Artificial Sequence: Synthetic oligonucleotide
ggugucucugcggucccuc

SEQ ID NO: 877578 - RNA, 19 nt, Artificial Sequence
  Description of Artificial Sequence: Synthetic oligonucleotide
ggggccacuugaccccaug

SEQ ID NO: 877579 - RNA, 19 nt, Artificial Sequence
  Description of Artificial Sequence: Synthetic oligonucleotide
gggucgaaccaaguuggaa

SEQ ID NO: 877580 - RNA, 19 nt, Artificial Sequence
  Description of Artificial Sequence: Synthetic oligonucleotide
cuuuugucccgaucccauu

SEQ ID NO: 877581 - RNA, 19 nt, Artificial Sequence
  Description of Artificial Sequence: Synthetic oligonucleotide
agguugccacugcucuauu

SEQ ID NO: 877582 - RNA, 19 nt, Artificial Sequence
  Description of Artificial Sequence: Synthetic oligonucleotide
gagcggggccccucucuaa

SEQ ID NO: 877583 - RNA, 19 nt, Artificial Sequence
  Description of Artificial Sequence: Synthetic oligonucleotide
cugugugacuguccggcau

SEQ ID NO: 877584 - RNA, 19 nt, Artificial Sequence
  Description of Artificial Sequence: Synthetic oligonucleotide
ggacugggucaucaauugu

SEQ ID NO: 877585 - RNA, 19 nt, Artificial Sequence
  Description of Artificial Sequence: Synthetic oligonucleotide
gguacaggcggcucugcuu

SEQ ID NO: 877586 - RNA, 19 nt, Artificial Sequence
  Description of Artificial Sequence: Synthetic oligonucleotide
augcuccacgggugggguu

SEQ ID NO: 877587 - RNA, 19 nt, Artificial Sequence
  Description of Artificial Sequence: Synthetic oligonucleotide
caccugggcaguccggacu

SEQ ID NO: 877588 - RNA, 19 nt, Artificial Sequence
  Description of Artificial Sequence: Synthetic oligonucleotide
gccuaaagugaagggucga

SEQ ID NO: 877589 - RNA, 19 nt, Artificial Sequence
  Description of Artificial Sequence: Synthetic oligonucleotide
cccuuugcucugcccgggg

SEQ ID NO: 877590 - RNA, 19 nt, Artificial Sequence
  Description of Artificial Sequence: Synthetic oligonucleotide
cuccuaacgugacuuucuu

SEQ ID NO: 877591 - RNA, 19 nt, Artificial Sequence
  Description of Artificial Sequence: Synthetic oligonucleotide
cuuucgccgcuucucccgu

SEQ ID NO: 877592 - RNA, 19 nt, Artificial Sequence
  Description of Artificial Sequence: Synthetic oligonucleotide
ccgugaucgggagcggggc

SEQ ID NO: 877593 - RNA, 19 nt, Artificial Sequence
  Description of Artificial Sequence: Synthetic oligonucleotide
ggugggguuaaggccaccu

SEQ ID NO: 877594 - RNA, 19 nt, Artificial Sequence
  Description of Artificial Sequence: Synthetic oligonucleotide
guccggacugggucaucaa

SEQ ID NO: 877595 - RNA, 19 nt, Artificial Sequence
  Description of Artificial Sequence: Synthetic oligonucleotide
guacuaccugugugacugu

SEQ ID NO: 877596 - RNA, 19 nt, Artificial Sequence
  Description of Artificial Sequence: Synthetic oligonucleotide
ccggguuaagguaucuccu

SEQ ID NO: 877597 - RNA, 19 nt, Artificial Sequence
  Description of Artificial Sequence: Synthetic oligonucleotide
cucuuaccucucagacuua

SEQ ID NO: 877598 - RNA, 19 nt, Artificial Sequence
  Description of Artificial Sequence: Synthetic oligonucleotide
ccgucccaguaauuccuuc

SEQ ID NO: 877599 - RNA, 19 nt, Artificial Sequence
  Description of Artificial Sequence: Synthetic oligonucleotide
ccgaucccauucucguuca

SEQ ID NO: 877600 - RNA, 19 nt, Artificial Sequence
  Description of Artificial Sequence: Synthetic oligonucleotide
ccugugugacuguccggca

SEQ ID NO: 877601 - RNA, 19 nt, Artificial Sequence
  Description of Artificial Sequence: Synthetic oligonucleotide
cuguggcgcuuggugucuc

SEQ ID NO: 877602 - RNA, 19 nt, Artificial Sequence
  Description of Artificial Sequence: Synthetic oligonucleotide
ggccccucucuaacuuuug

SEQ ID NO: 877603 - RNA, 19 nt, Artificial Sequence
  Description of Artificial Sequence: Synthetic oligonucleotide
ggagcggggccccucucua

SEQ ID NO: 877604 - RNA, 19 nt, Artificial Sequence
  Description of Artificial Sequence: Synthetic oligonucleotide
cgggucggcaaccgccucc

SEQ ID NO: 877605 - RNA, 19 nt, Artificial Sequence
  Description of Artificial Sequence: Synthetic oligonucleotide
gucccguacaggugugcuu

SEQ ID NO: 877606 - RNA, 19 nt, Artificial Sequence
  Description of Artificial Sequence: Synthetic oligonucleotide
ccgucguuccauuucucgu

SEQ ID NO: 877607 - RNA, 19 nt, Artificial Sequence
  Description of Artificial Sequence: Synthetic oligonucleotide
ccaguagaugcagggagcu

SEQ ID NO: 877608 - RNA, 19 nt, Artificial Sequence
  Description of Artificial Sequence: Synthetic oligonucleotide
cucuaacuuuugucccgau

SEQ ID NO: 877609 - RNA, 19 nt, Artificial Sequence
  Description of Artificial Sequence: Synthetic oligonucleotide
caaccgccuccucuacugu

SEQ ID NO: 877610 - RNA, 19 nt, Artificial Sequence
  Description of Artificial Sequence: Synthetic oligonucleotide
cggguuaagguaucuccua

SEQ ID NO: 877611 - RNA, 19 nt, Artificial Sequence
  Description of Artificial Sequence: Synthetic oligonucleotide
cccggucccguacaggugu

SEQ ID NO: 877612 - RNA, 19 nt, Artificial Sequence
  Description of Artificial Sequence: Synthetic oligonucleotide
ccaccccggucccguacag

SEQ ID NO: 877613 - RNA, 19 nt, Artificial Sequence
  Description of Artificial Sequence: Synthetic oligonucleotide
ccccggucccguacaggug

SEQ ID NO: 877614 - RNA, 19 nt, Artificial Sequence
  Description of Artificial Sequence: Synthetic oligonucleotide
ccggucccguacaggugug

SEQ ID NO: 877615 - RNA, 19 nt, Artificial Sequence
  Description of Artificial Sequence: Synthetic oligonucleotide
gcggucacgggaccgugau

SEQ ID NO: 877616 - RNA, 19 nt, Artificial Sequence
  Description of Artificial Sequence: Synthetic oligonucleotide
uccuggccccgggcuguuc

SEQ ID NO: 877617 - RNA, 19 nt, Artificial Sequence
  Description of Artificial Sequence: Synthetic oligonucleotide
ggcggucacgggaccguga

SEQ ID NO: 877618 - RNA, 19 nt, Artificial Sequence
  Description of Artificial Sequence: Synthetic oligonucleotide
gggagcugccuuagucuua

SEQ ID NO: 877619 - RNA, 19 nt, Artificial Sequence
  Description of Artificial Sequence: Synthetic oligonucleotide
ccaagaguccccggugaua

SEQ ID NO: 877620 - RNA, 19 nt, Artificial Sequence
  Description of Artificial Sequence: Synthetic oligonucleotide
cccaccccggucccguaca

SEQ ID NO: 877621 - RNA, 19 nt, Artificial Sequence
  Description of Artificial Sequence: Synthetic oligonucleotide
gggucggcaaccgccuccu

SEQ ID NO: 877622 - RNA, 19 nt, Artificial Sequence
  Description of Artificial Sequence: Synthetic oligonucleotide
gguuggacuggggccacuu

SEQ ID NO: 877623 - RNA, 19 nt, Artificial Sequence
  Description of Artificial Sequence: Synthetic oligonucleotide
gggauggguggcaguuaua

SEQ ID NO: 877624 - RNA, 19 nt, Artificial Sequence
  Description of Artificial Sequence: Synthetic oligonucleotide
ggucggcaaccgccuccuc

SEQ ID NO: 877625 - RNA, 19 nt, Artificial Sequence
  Description of Artificial Sequence: Synthetic oligonucleotide
ggguggguugguggcugaa

SEQ ID NO: 877626 - RNA, 19 nt, Artificial Sequence
  Description of Artificial Sequence: Synthetic oligonucleotide
ggggccccucucuaacuuu

SEQ ID NO: 877627 - RNA, 19 nt, Artificial Sequence
  Description of Artificial Sequence: Synthetic oligonucleotide
gcggggccccucucuaacu

SEQ ID NO: 877628 - RNA, 19 nt, Artificial Sequence
  Description of Artificial Sequence: Synthetic oligonucleotide
ccguacaggugugcuucga

SEQ ID NO: 877629 - RNA, 19 nt, Artificial Sequence
  Description of Artificial Sequence: Synthetic oligonucleotide
gaucgggagcggggccccu

SEQ ID NO: 877630 - RNA, 19 nt, Artificial Sequence
  Description of Artificial Sequence: Synthetic oligonucleotide
cggcaaccgccuccucuac

SEQ ID NO: 877631 - RNA, 19 nt, Artificial Sequence
  Description of Artificial Sequence: Synthetic oligonucleotide
cggucccguacaggugugc

SEQ ID NO: 877632 - RNA, 19 nt, Artificial Sequence
  Description of Artificial Sequence: Synthetic oligonucleotide
gggccccucucuaacuuuu

SEQ ID NO: 877633 - RNA, 19 nt, Artificial Sequence
  Description of Artificial Sequence: Synthetic oligonucleotide
cggucacgggaccgugauc

SEQ ID NO: 877634 - RNA, 19 nt, Artificial Sequence
  Description of Artificial Sequence: Synthetic oligonucleotide
ccggggcacuuggcuauuc

SEQ ID NO: 877635 - RNA, 19 nt, Artificial Sequence
  Description of Artificial Sequence: Synthetic oligonucleotide
cccguucuagcugucgguu

SEQ ID NO: 877636 - RNA, 19 nt, Artificial Sequence
  Description of Artificial Sequence: Synthetic oligonucleotide
cggugauaguccagcucgu

SEQ ID NO: 877637 - RNA, 19 nt, Artificial Sequence
  Description of Artificial Sequence: Synthetic oligonucleotide
ccuccggguuaagguaucu

SEQ ID NO: 877638 - RNA, 19 nt, Artificial Sequence
  Description of Artificial Sequence: Synthetic oligonucleotide
ccuguccgucccaguaauu

SEQ ID NO: 877639 - RNA, 19 nt, Artificial Sequence
  Description of Artificial Sequence: Synthetic oligonucleotide
cgcucuuugcggcggcggu

SEQ ID NO: 877640 - RNA, 19 nt, Artificial Sequence
  Description of Artificial Sequence: Synthetic oligonucleotide
cggcggucacgggaccgug

SEQ ID NO: 877641 - RNA, 19 nt, Artificial Sequence
  Description of Artificial Sequence: Synthetic oligonucleotide
gcggucccucucccugccu

SEQ ID NO: 877642 - RNA, 19 nt, Artificial Sequence
  Description of Artificial Sequence: Synthetic oligonucleotide
cccuugguuccaggguggu

SEQ ID NO: 877643 - RNA, 19 nt, Artificial Sequence
  Description of Artificial Sequence: Synthetic oligonucleotide
ggguuggacuggggccacu

SEQ ID NO: 877644 - RNA, 19 nt, Artificial Sequence
  Description of Artificial Sequence: Synthetic oligonucleotide
aaacauggcaaguucgagc

SEQ ID NO: 877645 - RNA, 19 nt, Artificial Sequence
  Description of Artificial Sequence: Synthetic oligonucleotide
aaaguggcaagucucgggc

SEQ ID NO: 877646 - RNA, 19 nt, Artificial Sequence
  Description of Artificial Sequence: Synthetic oligonucleotide
aaacuguaacuccagggcc

SEQ ID NO: 877647 - RNA, 19 nt, Artificial Sequence
  Description of Artificial Sequence: Synthetic oligonucleotide
ucugucaccagcaaaaggc

SEQ ID NO: 877648 - RNA, 19 nt, Artificial Sequence
  Description of Artificial Sequence: Synthetic oligonucleotide
uuuauuuaaccuuuugugu

SEQ ID NO: 877649 - RNA, 19 nt, Artificial Sequence
  Description of Artificial Sequence: Synthetic oligonucleotide
uccauuagcagaucaaugc

SEQ ID NO: 877650 - RNA, 19 nt, Artificial Sequence
  Description of Artificial Sequence: Synthetic oligonucleotide
uuuugcuaacuucacaccc

SEQ ID NO: 877651 - RNA, 19 nt, Artificial Sequence
  Description of Artificial Sequence: Synthetic oligonucleotide
uguccugacauucaguggc

SEQ ID NO: 877652 - RNA, 19 nt, Artificial Sequence
  Description of Artificial Sequence: Synthetic oligonucleotide
uauaagacggcacugcacu

SEQ ID NO: 877653 - RNA, 19 nt, Artificial Sequence
  Description of Artificial Sequence: Synthetic oligonucleotide
aaaaguggcaagucucggg

SEQ ID NO: 877654 - RNA, 19 nt, Artificial Sequence
  Description of Artificial Sequence: Synthetic oligonucleotide
uuauuuaaccuuuuguguc

SEQ ID NO: 877655 - RNA, 19 nt, Artificial Sequence
  Description of Artificial Sequence: Synthetic oligonucleotide
accacguggaucuucagcg

SEQ ID NO: 877656 - RNA, 19 nt, Artificial Sequence
  Description of Artificial Sequence: Synthetic oligonucleotide
caaagaggcuccuaggugg

SEQ ID NO: 877657 - RNA, 19 nt, Artificial Sequence
  Description of Artificial Sequence: Synthetic oligonucleotide
aauccaauaaccaggucag

SEQ ID NO: 877658 - RNA, 19 nt, Artificial Sequence
  Description of Artificial Sequence: Synthetic oligonucleotide
uuguagaccaaauggaaga

SEQ ID NO: 877659 - RNA, 19 nt, Artificial Sequence
  Description of Artificial Sequence: Synthetic oligonucleotide
uauuuaaccuuuugugucc

SEQ ID NO: 877660 - RNA, 19 nt, Artificial Sequence
  Description of Artificial Sequence: Synthetic oligonucleotide
guguuuguggcaaacaugg

SEQ ID NO: 877661 - RNA, 19 nt, Artificial Sequence
  Description of Artificial Sequence: Synthetic oligonucleotide
uuaaagguuucgcugguca

SEQ ID NO: 877662 - RNA, 19 nt, Artificial Sequence
  Description of Artificial Sequence: Synthetic oligonucleotide
ugccaugaaccaaagaggc

SEQ ID NO: 877663 - RNA, 19 nt, Artificial Sequence
  Description of Artificial Sequence: Synthetic oligonucleotide
agagaggcgaaaguaaagc

SEQ ID NO: 877664 - RNA, 19 nt, Artificial Sequence
  Description of Artificial Sequence: Synthetic oligonucleotide
aaaaucugugacucacauc

SEQ ID NO: 877665 - RNA, 19 nt, Artificial Sequence
  Description of Artificial Sequence: Synthetic oligonucleotide
caugcuauggcaaaggaga

SEQ ID NO: 877666 - RNA, 19 nt, Artificial Sequence
  Description of Artificial Sequence: Synthetic oligonucleotide
accaaauggaagaugaagg

SEQ ID NO: 877667 - RNA, 19 nt, Artificial Sequence
  Description of Artificial Sequence: Synthetic oligonucleotide
guaggugagaagcacagcc

SEQ ID NO: 877668 - RNA, 19 nt, Artificial Sequence
  Description of Artificial Sequence: Synthetic oligonucleotide
ugggugaugacauaguaaa

SEQ ID NO: 877669 - RNA, 19 nt, Artificial Sequence
  Description of Artificial Sequence: Synthetic oligonucleotide
aaggcguugcaguaccacg

SEQ ID NO: 877670 - RNA, 19 nt, Artificial Sequence
  Description of Artificial Sequence: Synthetic oligonucleotide
ugacauaguaaacggucag

SEQ ID NO: 877671 - RNA, 19 nt, Artificial Sequence
  Description of Artificial Sequence: Synthetic oligonucleotide
ggugaugacauaguaaacg

SEQ ID NO: 877672 - RNA, 19 nt, Artificial Sequence
  Description of Artificial Sequence: Synthetic oligonucleotide
cauuagcagaucaaugccc

SEQ ID NO: 877673 - RNA, 19 nt, Artificial Sequence
  Description of Artificial Sequence: Synthetic oligonucleotide
agaaccaggacgcacagaa

SEQ ID NO: 877674 - RNA, 19 nt, Artificial Sequence
  Description of Artificial Sequence: Synthetic oligonucleotide
cugccaugaaccaaagagg

SEQ ID NO: 877675 - RNA, 19 nt, Artificial Sequence
  Description of Artificial Sequence: Synthetic oligonucleotide
accaaaaucugugacucac

SEQ ID NO: 877676 - RNA, 19 nt, Artificial Sequence
  Description of Artificial Sequence: Synthetic oligonucleotide
uuagucccagagcugagcc

SEQ ID NO: 877677 - RNA, 19 nt, Artificial Sequence
  Description of Artificial Sequence: Synthetic oligonucleotide
gaggcaucaaggcaggccc

SEQ ID NO: 877678 - RNA, 19 nt, Artificial Sequence
  Description of Artificial Sequence: Synthetic oligonucleotide
caguauaggugaaaggcag

SEQ ID NO: 877679 - RNA, 19 nt, Artificial Sequence
  Description of Artificial Sequence: Synthetic oligonucleotide
cuguaaucggggcagagag

SEQ ID NO: 877680 - RNA, 19 nt, Artificial Sequence
  Description of Artificial Sequence: Synthetic oligonucleotide
uuugcagaucccuucgccc

SEQ ID NO: 877681 - RNA, 19 nt, Artificial Sequence
  Description of Artificial Sequence: Synthetic oligonucleotide
uccuugagaccaaagccag

SEQ ID NO: 877682 - RNA, 19 nt, Artificial Sequence
  Description of Artificial Sequence: Synthetic oligonucleotide
uaaacggucagcggguagg

SEQ ID NO: 877683 - RNA, 19 nt, Artificial Sequence
  Description of Artificial Sequence: Synthetic oligonucleotide
cugaucguccaucacacag

SEQ ID NO: 877684 - RNA, 19 nt, Artificial Sequence
  Description of Artificial Sequence: Synthetic oligonucleotide
uccaauaaccaggucaggc

SEQ ID NO: 877685 - RNA, 19 nt, Artificial Sequence
  Description of Artificial Sequence: Synthetic oligonucleotide
cauaguaaacggucagcgg

SEQ ID NO: 877686 - RNA, 19 nt, Artificial Sequence
  Description of Artificial Sequence: Synthetic oligonucleotide
uguaguaauccugccauga

SEQ ID NO: 877687 - RNA, 19 nt, Artificial Sequence
  Description of Artificial Sequence: Synthetic oligonucleotide
gcuaacuucacacccaacc

SEQ ID NO: 877688 - RNA, 19 nt, Artificial Sequence
  Description of Artificial Sequence: Synthetic oligonucleotide
ucccacaguaaguugucgg

SEQ ID NO: 877689 - RNA, 19 nt, Artificial Sequence
  Description of Artificial Sequence: Synthetic oligonucleotide
gagaggcgaaaguaaagcc

SEQ ID NO: 877690 - RNA, 19 nt, Artificial Sequence
  Description of Artificial Sequence: Synthetic oligonucleotide
uucacacccaaccuuggga

SEQ ID NO: 877691 - RNA, 19 nt, Artificial Sequence
  Description of Artificial Sequence: Synthetic oligonucleotide
uaguaauccugccaugaac

SEQ ID NO: 877692 - RNA, 19 nt, Artificial Sequence
  Description of Artificial Sequence: Synthetic oligonucleotide
ugaucguccaucacacagc

SEQ ID NO: 877693 - RNA, 19 nt, Artificial Sequence
  Description of Artificial Sequence: Synthetic oligonucleotide
aaguugucggggcuuucgg

SEQ ID NO: 877694 - RNA, 19 nt, Artificial Sequence
  Description of Artificial Sequence: Synthetic oligonucleotide
guugucggggcuuucgggg

SEQ ID NO: 877695 - RNA, 19 nt, Artificial Sequence
  Description of Artificial Sequence: Synthetic oligonucleotide
aaaccuccccucugcauag

SEQ ID NO: 877696 - RNA, 19 nt, Artificial Sequence
  Description of Artificial Sequence: Synthetic oligonucleotide
aaagccuggccgaggaccc

SEQ ID NO: 877697 - RNA, 19 nt, Artificial Sequence
  Description of Artificial Sequence: Synthetic oligonucleotide
aguggcaagucucgggcac

SEQ ID NO: 877698 - RNA, 19 nt, Artificial Sequence
  Description of Artificial Sequence: Synthetic oligonucleotide
gagacuguaaucggggcag

SEQ ID NO: 877699 - RNA, 19 nt, Artificial Sequence
  Description of Artificial Sequence: Synthetic oligonucleotide
uaagggucaccguugagaa

SEQ ID NO: 877700 - RNA, 19 nt, Artificial Sequence
  Description of Artificial Sequence: Synthetic oligonucleotide
aguauaagacggcacugca

SEQ ID NO: 877701 - RNA, 19 nt, Artificial Sequence
  Description of Artificial Sequence: Synthetic oligonucleotide
uaaagccuggccgaggacc

SEQ ID NO: 877702 - RNA, 19 nt, Artificial Sequence
  Description of Artificial Sequence: Synthetic oligonucleotide
ugcucgcuccauaaaagug

SEQ ID NO: 877703 - RNA, 19 nt, Artificial Sequence
  Description of Artificial Sequence: Synthetic oligonucleotide
aguucgagcccgaagagag

SEQ ID NO: 877704 - RNA, 19 nt, Artificial Sequence
  Description of Artificial Sequence: Synthetic oligonucleotide
aagcuuccuuguuaaaggu

SEQ ID NO: 877705 - RNA, 19 nt, Artificial Sequence
  Description of Artificial Sequence: Synthetic oligonucleotide
guagccacgagugagcccc

SEQ ID NO: 877706 - RNA, 19 nt, Artificial Sequence
  Description of Artificial Sequence: Synthetic oligonucleotide
uccuagguggggucuaggg

SEQ ID NO: 877707 - RNA, 19 nt, Artificial Sequence
  Description of Artificial Sequence: Synthetic oligonucleotide
aaaguaaagccuggccgag

SEQ ID NO: 877708 - RNA, 19 nt, Artificial Sequence
  Description of Artificial Sequence: Synthetic oligonucleotide
uaagacggcacugcacugg

SEQ ID NO: 877709 - RNA, 19 nt, Artificial Sequence
  Description of Artificial Sequence: Synthetic oligonucleotide
ucggagagacuguaaucgg

SEQ ID NO: 877710 - RNA, 19 nt, Artificial Sequence
  Description of Artificial Sequence: Synthetic oligonucleotide
uaaguugucggggcuuucg

SEQ ID NO: 877711 - RNA, 19 nt, Artificial Sequence
  Description of Artificial Sequence: Synthetic oligonucleotide
ucaccguugagaaggcggc

SEQ ID NO: 877712 - RNA, 19 nt, Artificial Sequence
  Description of Artificial Sequence: Synthetic oligonucleotide
aaccaggucaggcuugggu

SEQ ID NO: 877713 - RNA, 19 nt, Artificial Sequence
  Description of Artificial Sequence: Synthetic oligonucleotide
aucggcgccaaucagccug

SEQ ID NO: 877714 - RNA, 19 nt, Artificial Sequence
  Description of Artificial Sequence: Synthetic oligonucleotide
acucggagagacuguaauc

SEQ ID NO: 877715 - RNA, 19 nt, Artificial Sequence
  Description of Artificial Sequence: Synthetic oligonucleotide
gaggcgaaaguaaagccug

SEQ ID NO: 877716 - RNA, 19 nt, Artificial Sequence
  Description of Artificial Sequence: Synthetic oligonucleotide
aguaaagccuggccgagga

SEQ ID NO: 877717 - RNA, 19 nt, Artificial Sequence
  Description of Artificial Sequence: Synthetic oligonucleotide
caaccuugggacaaggcuc

SEQ ID NO: 877718 - RNA, 19 nt, Artificial Sequence
  Description of Artificial Sequence: Synthetic oligonucleotide
ucacacccaaccuugggac

SEQ ID NO: 877719 - RNA, 19 nt, Artificial Sequence
  Description of Artificial Sequence: Synthetic oligonucleotide
cacaguaaguugucggggc

SEQ ID NO: 877720 - RNA, 19 nt, Artificial Sequence
  Description of Artificial Sequence: Synthetic oligonucleotide
caagaucaaauuccuuccc

SEQ ID NO: 877721 - RNA, 19 nt, Artificial Sequence
  Description of Artificial Sequence: Synthetic oligonucleotide
cauggcaaguucgagcccg

SEQ ID NO: 877722 - RNA, 19 nt, Artificial Sequence
  Description of Artificial Sequence: Synthetic oligonucleotide
uuccuuguuaaagguuucg

SEQ ID NO: 877723 - RNA, 19 nt, Artificial Sequence
  Description of Artificial Sequence: Synthetic oligonucleotide
uaguaaacggucagcgggu

SEQ ID NO: 877724 - RNA, 19 nt, Artificial Sequence
  Description of Artificial Sequence: Synthetic oligonucleotide
accuuuuguguccugacau

SEQ ID NO: 877725 - RNA, 19 nt, Artificial Sequence
  Description of Artificial Sequence: Synthetic oligonucleotide
cacccugauuugcagaucc

SEQ ID NO: 877726 - RNA, 19 nt, Artificial Sequence
  Description of Artificial Sequence: Synthetic oligonucleotide
aggcccuggaauuagcaug

SEQ ID NO: 877727 - RNA, 19 nt, Artificial Sequence
  Description of Artificial Sequence: Synthetic oligonucleotide
uccgcacucaucugcggcg

SEQ ID NO: 877728 - RNA, 19 nt, Artificial Sequence
  Description of Artificial Sequence: Synthetic oligonucleotide
uguuaaagguuucgcuggu

SEQ ID NO: 877729 - RNA, 19 nt, Artificial Sequence
  Description of Artificial Sequence: Synthetic oligonucleotide
agcagaucaaugcccaaga

SEQ ID NO: 877730 - RNA, 19 nt, Artificial Sequence
  Description of Artificial Sequence: Synthetic oligonucleotide
aaucggggcagagagcuca

SEQ ID NO: 877731 - RNA, 19 nt, Artificial Sequence
  Description of Artificial Sequence: Synthetic oligonucleotide
aggacgcacagaaaccucc

SEQ ID NO: 877732 - RNA, 19 nt, Artificial Sequence
  Description of Artificial Sequence: Synthetic oligonucleotide
ugggguaccagguggguga

SEQ ID NO: 877733 - RNA, 19 nt, Artificial Sequence
  Description of Artificial Sequence: Synthetic oligonucleotide
gucaccguugagaaggcgg

SEQ ID NO: 877734 - RNA, 19 nt, Artificial Sequence
  Description of Artificial Sequence: Synthetic oligonucleotide
aguaccacggcaugcaguu

SEQ ID NO: 877735 - RNA, 19 nt, Artificial Sequence
  Description of Artificial Sequence: Synthetic oligonucleotide
auguguaguaauccugcca

SEQ ID NO: 877736 - RNA, 19 nt, Artificial Sequence
  Description of Artificial Sequence: Synthetic oligonucleotide
uguaaucggggcagagagc

SEQ ID NO: 877737 - RNA, 19 nt, Artificial Sequence
  Description of Artificial Sequence: Synthetic oligonucleotide
ucuugggguaauucccugc

SEQ ID NO: 877738 - RNA, 19 nt, Artificial Sequence
  Description of Artificial Sequence: Synthetic oligonucleotide
cacgugugggagaaggacc

SEQ ID NO: 877739 - RNA, 19 nt, Artificial Sequence
  Description of Artificial Sequence: Synthetic oligonucleotide
uucgagcccgaagagaggc

SEQ ID NO: 877740 - RNA, 19 nt, Artificial Sequence
  Description of Artificial Sequence: Synthetic oligonucleotide
cgaaaguaaagccuggccg

SEQ ID NO: 877741 - RNA, 19 nt, Artificial Sequence
  Description of Artificial Sequence: Synthetic oligonucleotide
agacuugccaguucuccug

SEQ ID NO: 877742 - RNA, 19 nt, Artificial Sequence
  Description of Artificial Sequence: Synthetic oligonucleotide
ugaggcggaauggggaacg

SEQ ID NO: 877743 - RNA, 19 nt, Artificial Sequence
  Description of Artificial Sequence: Synthetic oligonucleotide
guaaaaugcugcuggucac

SEQ ID NO: 877744 - RNA, 19 nt, Artificial Sequence
  Description of Artificial Sequence: Synthetic oligonucleotide
aacuguaacuccagggcca

SEQ ID NO: 877745 - RNA, 19 nt, Artificial Sequence
  Description of Artificial Sequence: Synthetic oligonucleotide
uguaacuccagggccacgu

SEQ ID NO: 877746 - RNA, 19 nt, Artificial Sequence
  Description of Artificial Sequence: Synthetic oligonucleotide
ugggucaccucugacucgg

SEQ ID NO: 877747 - RNA, 19 nt, Artificial Sequence
  Description of Artificial Sequence: Synthetic oligonucleotide
gagagacuguaaucggggc

SEQ ID NO: 877748 - RNA, 19 nt, Artificial Sequence
  Description of Artificial Sequence: Synthetic oligonucleotide
uagcagaucaaugcccaag

SEQ ID NO: 877749 - RNA, 19 nt, Artificial Sequence
  Description of Artificial Sequence: Synthetic oligonucleotide
aacuccgcacucaucugcg

SEQ ID NO: 877750 - RNA, 19 nt, Artificial Sequence
  Description of Artificial Sequence: Synthetic oligonucleotide
uccugcucgcuccauaaaa

SEQ ID NO: 877751 - RNA, 19 nt, Artificial Sequence
  Description of Artificial Sequence: Synthetic oligonucleotide
ugggcaucggcgccaauca

SEQ ID NO: 877752 - RNA, 19 nt, Artificial Sequence
  Description of Artificial Sequence: Synthetic oligonucleotide
cugcaguauaggugaaagg

SEQ ID NO: 877753 - RNA, 19 nt, Artificial Sequence
  Description of Artificial Sequence: Synthetic oligonucleotide
ugagccgugcugauacccc

SEQ ID NO: 877754 - RNA, 19 nt, Artificial Sequence
  Description of Artificial Sequence: Synthetic oligonucleotide
aagguuucgcuggucaccu

SEQ ID NO: 877755 - RNA, 19 nt, Artificial Sequence
  Description of Artificial Sequence: Synthetic oligonucleotide
gugaaaggcagacuugcca

SEQ ID NO: 877756 - RNA, 19 nt, Artificial Sequence
  Description of Artificial Sequence: Synthetic oligonucleotide
uggggaacggaagggauug

SEQ ID NO: 877757 - RNA, 19 nt, Artificial Sequence
  Description of Artificial Sequence: Synthetic oligonucleotide
accaggacgcacagaaacc

SEQ ID NO: 877758 - RNA, 19 nt, Artificial Sequence
  Description of Artificial Sequence: Synthetic oligonucleotide
uugcagaucccuucgcccu

SEQ ID NO: 877759 - RNA, 19 nt, Artificial Sequence
  Description of Artificial Sequence: Synthetic oligonucleotide
ugcugggucaccucugacu

SEQ ID NO: 877760 - RNA, 19 nt, Artificial Sequence
  Description of Artificial Sequence: Synthetic oligonucleotide
cauccucacagcuugccuc

SEQ ID NO: 877761 - RNA, 19 nt, Artificial Sequence
  Description of Artificial Sequence: Synthetic oligonucleotide
aaguaaagccuggccgagg

SEQ ID NO: 877762 - RNA, 19 nt, Artificial Sequence
  Description of Artificial Sequence: Synthetic oligonucleotide
uaagaccccgccaugugua

SEQ ID NO: 877763 - RNA, 19 nt, Artificial Sequence
  Description of Artificial Sequence: Synthetic oligonucleotide
agaggcgaaaguaaagccu

SEQ ID NO: 877764 - RNA, 19 nt, Artificial Sequence
  Description of Artificial Sequence: Synthetic oligonucleotide
cacggcaugcaguugucag

SEQ ID NO: 877765 - RNA, 19 nt, Artificial Sequence
  Description of Artificial Sequence: Synthetic oligonucleotide
uggaauuagcaugcugagc

SEQ ID NO: 877766 - RNA, 19 nt, Artificial Sequence
  Description of Artificial Sequence: Synthetic oligonucleotide
gaaaccuccccucugcaua

SEQ ID NO: 877767 - RNA, 19 nt, Artificial Sequence
  Description of Artificial Sequence: Synthetic oligonucleotide
ucucgggcaccaaaaucug

SEQ ID NO: 877768 - RNA, 19 nt, Artificial Sequence
  Description of Artificial Sequence: Synthetic oligonucleotide
caguauaagacggcacugc

SEQ ID NO: 877769 - RNA, 19 nt, Artificial Sequence
  Description of Artificial Sequence: Synthetic oligonucleotide
guaagggucaccguugaga

SEQ ID NO: 877770 - RNA, 19 nt, Artificial Sequence
  Description of Artificial Sequence: Synthetic oligonucleotide
caacuccgcacucaucugc

SEQ ID NO: 877771 - RNA, 19 nt, Artificial Sequence
  Description of Artificial Sequence: Synthetic oligonucleotide
acaguauaagacggcacug

SEQ ID NO: 877772 - RNA, 19 nt, Artificial Sequence
  Description of Artificial Sequence: Synthetic oligonucleotide
ccauguguaguaauccugc

SEQ ID NO: 877773 - RNA, 19 nt, Artificial Sequence
  Description of Artificial Sequence: Synthetic oligonucleotide
aaguggcaagucucgggca

SEQ ID NO: 877774 - RNA, 19 nt, Artificial Sequence
  Description of Artificial Sequence: Synthetic oligonucleotide
aggcggaaggccugucacc

SEQ ID NO: 877775 - RNA, 19 nt, Artificial Sequence
  Description of Artificial Sequence: Synthetic oligonucleotide
ggcacuggaggcaucaagg

SEQ ID NO: 877776 - RNA, 19 nt, Artificial Sequence
  Description of Artificial Sequence: Synthetic oligonucleotide
gucucgaugcaggugggcg

SEQ ID NO: 877777 - RNA, 19 nt, Artificial Sequence
  Description of Artificial Sequence: Synthetic oligonucleotide
uccucuuuucaggagcucu

SEQ ID NO: 877778 - RNA, 19 nt, Artificial Sequence
  Description of Artificial Sequence: Synthetic oligonucleotide
guguccugacauucagugg

SEQ ID NO: 877779 - RNA, 19 nt, Artificial Sequence
  Description of Artificial Sequence: Synthetic oligonucleotide
ucugaggcggaauggggaa

SEQ ID NO: 877780 - RNA, 19 nt, Artificial Sequence
  Description of Artificial Sequence: Synthetic oligonucleotide
guugcaguaccacggcaug

SEQ ID NO: 877781 - RNA, 19 nt, Artificial Sequence
  Description of Artificial Sequence: Synthetic oligonucleotide
aauucccugcuuggagggg

SEQ ID NO: 877782 - RNA, 19 nt, Artificial Sequence
  Description of Artificial Sequence: Synthetic oligonucleotide
agggauggugugccgcccc

SEQ ID NO: 877783 - RNA, 19 nt, Artificial Sequence
  Description of Artificial Sequence: Synthetic oligonucleotide
ggcaaacauggcaaguucg

SEQ ID NO: 877784 - RNA, 19 nt, Artificial Sequence
  Description of Artificial Sequence: Synthetic oligonucleotide
cugauaccccagaaccagg

SEQ ID NO: 877785 - RNA, 19 nt, Artificial Sequence
  Description of Artificial Sequence: Synthetic oligonucleotide
auaagacggcacugcacug

SEQ ID NO: 877786 - RNA, 19 nt, Artificial Sequence
  Description of Artificial Sequence: Synthetic oligonucleotide
uguagaccaaauggaagau

SEQ ID NO: 877787 - RNA, 19 nt, Artificial Sequence
  Description of Artificial Sequence: Synthetic oligonucleotide
augacauaguaaacgguca

SEQ ID NO: 877788 - RNA, 19 nt, Artificial Sequence
  Description of Artificial Sequence: Synthetic oligonucleotide
ugguaagggucaccguuga

SEQ ID NO: 877789 - RNA, 19 nt, Artificial Sequence
  Description of Artificial Sequence: Synthetic oligonucleotide
ugcaguaccacggcaugca

SEQ ID NO: 877790 - RNA, 19 nt, Artificial Sequence
  Description of Artificial Sequence: Synthetic oligonucleotide
gaagagaggcgaaaguaaa

SEQ ID NO: 877791 - RNA, 19 nt, Artificial Sequence
  Description of Artificial Sequence: Synthetic oligonucleotide
uucuugggguaauucccug

SEQ ID NO: 877792 - RNA, 19 nt, Artificial Sequence
  Description of Artificial Sequence: Synthetic oligonucleotide
caaguucgagcccgaagag

SEQ ID NO: 877793 - RNA, 19 nt, Artificial Sequence
  Description of Artificial Sequence: Synthetic oligonucleotide
aaccuugggacaaggcucu

SEQ ID NO: 877794 - RNA, 19 nt, Artificial Sequence
  Description of Artificial Sequence: Synthetic oligonucleotide
uucgcuggucaccucugca

SEQ ID NO: 877795 - RNA, 19 nt, Artificial Sequence
  Description of Artificial Sequence: Synthetic oligonucleotide
aaguucgagcccgaagaga

SEQ ID NO: 877796 - RNA, 19 nt, Artificial Sequence
  Description of Artificial Sequence: Synthetic oligonucleotide
agaccaaagccagaguuaa

SEQ ID NO: 877797 - RNA, 19 nt, Artificial Sequence
  Description of Artificial Sequence: Synthetic oligonucleotide
aucccuucgcccucccuuc

SEQ ID NO: 877798 - RNA, 19 nt, Artificial Sequence
  Description of Artificial Sequence: Synthetic oligonucleotide
uaguaaaaugcugcugguc

SEQ ID NO: 877799 - RNA, 19 nt, Artificial Sequence
  Description of Artificial Sequence: Synthetic oligonucleotide
caccgccauggucugaucg

SEQ ID NO: 877800 - RNA, 19 nt, Artificial Sequence
  Description of Artificial Sequence: Synthetic oligonucleotide
aggcguugcaguaccacgg

SEQ ID NO: 877801 - RNA, 19 nt, Artificial Sequence
  Description of Artificial Sequence: Synthetic oligonucleotide
ucucgaugcaggugggcgu

SEQ ID NO: 877802 - RNA, 19 nt, Artificial Sequence
  Description of Artificial Sequence: Synthetic oligonucleotide
auggucugaucguccauca

SEQ ID NO: 877803 - RNA, 19 nt, Artificial Sequence
  Description of Artificial Sequence: Synthetic oligonucleotide
ucgagcccgaagagaggcg

SEQ ID NO: 877804 - RNA, 19 nt, Artificial Sequence
  Description of Artificial Sequence: Synthetic oligonucleotide
ggucugaucguccaucaca

SEQ ID NO: 877805 - RNA, 19 nt, Artificial Sequence
  Description of Artificial Sequence: Synthetic oligonucleotide
gucuaggggcacuggaggc

SEQ ID NO: 877806 - RNA, 19 nt, Artificial Sequence
  Description of Artificial Sequence: Synthetic oligonucleotide
guaauccugccaugaacca

SEQ ID NO: 877807 - RNA, 19 nt, Artificial Sequence
  Description of Artificial Sequence: Synthetic oligonucleotide
guucugccuucucagugcc

SEQ ID NO: 877808 - RNA, 19 nt, Artificial Sequence
  Description of Artificial Sequence: Synthetic oligonucleotide
cugugacucacaucaucug

SEQ ID NO: 877809 - RNA, 19 nt, Artificial Sequence
  Description of Artificial Sequence: Synthetic oligonucleotide
ucggcgccaaucagccugg

SEQ ID NO: 877810 - RNA, 19 nt, Artificial Sequence
  Description of Artificial Sequence: Synthetic oligonucleotide
agggauugggcuguggcga

SEQ ID NO: 877811 - RNA, 19 nt, Artificial Sequence
  Description of Artificial Sequence: Synthetic oligonucleotide
guaaacggucagcggguag

SEQ ID NO: 877812 - RNA, 19 nt, Artificial Sequence
  Description of Artificial Sequence: Synthetic oligonucleotide
agacacccugauuugcaga

SEQ ID NO: 877813 - RNA, 19 nt, Artificial Sequence
  Description of Artificial Sequence: Synthetic oligonucleotide
guaaucggggcagagagcu

SEQ ID NO: 877814 - RNA, 19 nt, Artificial Sequence
  Description of Artificial Sequence: Synthetic oligonucleotide
guauaagacggcacugcac

SEQ ID NO: 877815 - RNA, 19 nt, Artificial Sequence
  Description of Artificial Sequence: Synthetic oligonucleotide
aguccaggcuaagaccccg

SEQ ID NO: 877816 - RNA, 19 nt, Artificial Sequence
  Description of Artificial Sequence: Synthetic oligonucleotide
ugacaagaucaaauuccuu

SEQ ID NO: 877817 - RNA, 19 nt, Artificial Sequence
  Description of Artificial Sequence: Synthetic oligonucleotide
cccacaguaaguugucggg

SEQ ID NO: 877818 - RNA, 19 nt, Artificial Sequence
  Description of Artificial Sequence: Synthetic oligonucleotide
gaauggggaacggaaggga

SEQ ID NO: 877819 - RNA, 19 nt, Artificial Sequence
  Description of Artificial Sequence: Synthetic oligonucleotide
uugggcaggcuuguagacc

SEQ ID NO: 877820 - RNA, 19 nt, Artificial Sequence
  Description of Artificial Sequence: Synthetic oligonucleotide
gcgaaaguaaagccuggcc

SEQ ID NO: 877821 - RNA, 19 nt, Artificial Sequence
  Description of Artificial Sequence: Synthetic oligonucleotide
aauggaagaugaaggcguu

SEQ ID NO: 877822 - RNA, 19 nt, Artificial Sequence
  Description of Artificial Sequence: Synthetic oligonucleotide
gggaguccaggcuaagacc

SEQ ID NO: 877823 - RNA, 19 nt, Artificial Sequence
  Description of Artificial Sequence: Synthetic oligonucleotide
gaaggcguugcaguaccac

SEQ ID NO: 877824 - RNA, 19 nt, Artificial Sequence
  Description of Artificial Sequence: Synthetic oligonucleotide
cauggucugaucguccauc

SEQ ID NO: 877825 - RNA, 19 nt, Artificial Sequence
  Description of Artificial Sequence: Synthetic oligonucleotide
cacaguauaagacggcacu

SEQ ID NO: 877826 - RNA, 19 nt, Artificial Sequence
  Description of Artificial Sequence: Synthetic oligonucleotide
agaaaccuccccucugcau

SEQ ID NO: 877827 - RNA, 19 nt, Artificial Sequence
  Description of Artificial Sequence: Synthetic oligonucleotide
cuccgcacucaucugcggc

SEQ ID NO: 877828 - RNA, 19 nt, Artificial Sequence
  Description of Artificial Sequence: Synthetic oligonucleotide
ccaugacaagaucaaauuc

SEQ ID NO: 877829 - RNA, 19 nt, Artificial Sequence
  Description of Artificial Sequence: Synthetic oligonucleotide
ggggaguccaggcuaagac

SEQ ID NO: 877830 - RNA, 19 nt, Artificial Sequence
  Description of Artificial Sequence: Synthetic oligonucleotide
ucugaucguccaucacaca

SEQ ID NO: 877831 - RNA, 19 nt, Artificial Sequence
  Description of Artificial Sequence: Synthetic oligonucleotide
gucucgggcaccaaaaucu

SEQ ID NO: 877832 - RNA, 19 nt, Artificial Sequence
  Description of Artificial Sequence: Synthetic oligonucleotide
aaacggucagcggguaggu

SEQ ID NO: 877833 - RNA, 19 nt, Artificial Sequence
  Description of Artificial Sequence: Synthetic oligonucleotide
guguaguaauccugccaug

SEQ ID NO: 877834 - RNA, 19 nt, Artificial Sequence
  Description of Artificial Sequence: Synthetic oligonucleotide
agacaagccucuccacagu

SEQ ID NO: 877835 - RNA, 19 nt, Artificial Sequence
  Description of Artificial Sequence: Synthetic oligonucleotide
aguauaggugaaaggcaga

SEQ ID NO: 877836 - RNA, 19 nt, Artificial Sequence
  Description of Artificial Sequence: Synthetic oligonucleotide
cugagccgugcugauaccc

SEQ ID NO: 877837 - RNA, 19 nt, Artificial Sequence
  Description of Artificial Sequence: Synthetic oligonucleotide
guaguaauccugccaugaa

SEQ ID NO: 877838 - RNA, 19 nt, Artificial Sequence
  Description of Artificial Sequence: Synthetic oligonucleotide
ccuagguggggucuagggg

SEQ ID NO: 877839 - RNA, 19 nt, Artificial Sequence
  Description of Artificial Sequence: Synthetic oligonucleotide
uguggccaccgccaugguc

SEQ ID NO: 877840 - RNA, 19 nt, Artificial Sequence
  Description of Artificial Sequence: Synthetic oligonucleotide
caagucucgggcaccaaaa

SEQ ID NO: 877841 - RNA, 19 nt, Artificial Sequence
  Description of Artificial Sequence: Synthetic oligonucleotide
gucguccagagcccauagg

SEQ ID NO: 877842 - RNA, 19 nt, Artificial Sequence
  Description of Artificial Sequence: Synthetic oligonucleotide
uccugccaugaaccaaaga

SEQ ID NO: 877843 - RNA, 19 nt, Artificial Sequence
  Description of Artificial Sequence: Synthetic oligonucleotide
gacacccugauuugcagau

SEQ ID NO: 877844 - RNA, 19 nt, Artificial Sequence
  Description of Artificial Sequence: Synthetic oligonucleotide
caggcggaaggccugucac

SEQ ID NO: 877845 - RNA, 19 nt, Artificial Sequence
  Description of Artificial Sequence: Synthetic oligonucleotide
cuucgagcggggacaggag

SEQ ID NO: 877846 - RNA, 19 nt, Artificial Sequence
  Description of Artificial Sequence: Synthetic oligonucleotide
acucaucugcggcggcggg

SEQ ID NO: 877847 - RNA, 19 nt, Artificial Sequence
  Description of Artificial Sequence: Synthetic oligonucleotide
ugcuaacuucacacccaac

SEQ ID NO: 877848 - RNA, 19 nt, Artificial Sequence
  Description of Artificial Sequence: Synthetic oligonucleotide
agcgacugcuuguucugga

SEQ ID NO: 877849 - RNA, 19 nt, Artificial Sequence
  Description of Artificial Sequence: Synthetic oligonucleotide
caguagccacgagugagcc

SEQ ID NO: 877850 - RNA, 19 nt, Artificial Sequence
  Description of Artificial Sequence: Synthetic oligonucleotide
uccccucugcauaguaaaa

SEQ ID NO: 877851 - RNA, 19 nt, Artificial Sequence
  Description of Artificial Sequence: Synthetic oligonucleotide
cugggucaccucugacucg

SEQ ID NO: 877852 - RNA, 19 nt, Artificial Sequence
  Description of Artificial Sequence: Synthetic oligonucleotide
auccaauaaccaggucagg

SEQ ID NO: 877853 - RNA, 19 nt, Artificial Sequence
  Description of Artificial Sequence: Synthetic oligonucleotide
acgugugggagaaggacca

SEQ ID NO: 877854 - RNA, 19 nt, Artificial Sequence
  Description of Artificial Sequence: Synthetic oligonucleotide
uggucugaucguccaucac

SEQ ID NO: 877855 - RNA, 19 nt, Artificial Sequence
  Description of Artificial Sequence: Synthetic oligonucleotide
gugugggagaaggaccaag

SEQ ID NO: 877856 - RNA, 19 nt, Artificial Sequence
  Description of Artificial Sequence: Synthetic oligonucleotide
gcagcucugaggcggaaug

SEQ ID NO: 877857 - RNA, 19 nt, Artificial Sequence
  Description of Artificial Sequence: Synthetic oligonucleotide
cucggcgccuucgagcggg

SEQ ID NO: 877858 - RNA, 19 nt, Artificial Sequence
  Description of Artificial Sequence: Synthetic oligonucleotide
ggcuguggcgagcuggugc

SEQ ID NO: 877859 - RNA, 19 nt, Artificial Sequence
  Description of Artificial Sequence: Synthetic oligonucleotide
ccugacauucaguggcugc

SEQ ID NO: 877860 - RNA, 19 nt, Artificial Sequence
  Description of Artificial Sequence: Synthetic oligonucleotide
ccaaagaggcuccuaggug

SEQ ID NO: 877861 - RNA, 19 nt, Artificial Sequence
  Description of Artificial Sequence: Synthetic oligonucleotide
agcucccaaaacaccauga

SEQ ID NO: 877862 - RNA, 19 nt, Artificial Sequence
  Description of Artificial Sequence: Synthetic oligonucleotide
cucucaggcggaaggccug

SEQ ID NO: 877863 - RNA, 19 nt, Artificial Sequence
  Description of Artificial Sequence: Synthetic oligonucleotide
ggaggcaucaaggcaggcc

SEQ ID NO: 877864 - RNA, 19 nt, Artificial Sequence
  Description of Artificial Sequence: Synthetic oligonucleotide
ggggucgaggugcagggcc

SEQ ID NO: 877865 - RNA, 19 nt, Artificial Sequence
  Description of Artificial Sequence: Synthetic oligonucleotide
caggaaagcuuccuuguua

SEQ ID NO: 877866 - RNA, 19 nt, Artificial Sequence
  Description of Artificial Sequence: Synthetic oligonucleotide
cucccacaguaaguugucg

SEQ ID NO: 877867 - RNA, 19 nt, Artificial Sequence
  Description of Artificial Sequence: Synthetic oligonucleotide
cacucaucugcggcggcgg

SEQ ID NO: 877868 - RNA, 19 nt, Artificial Sequence
  Description of Artificial Sequence: Synthetic oligonucleotide
auagggccggguagacacc

SEQ ID NO: 877869 - RNA, 19 nt, Artificial Sequence
  Description of Artificial Sequence: Synthetic oligonucleotide
aggcgaaaguaaagccugg

SEQ ID NO: 877870 - RNA, 19 nt, Artificial Sequence
  Description of Artificial Sequence: Synthetic oligonucleotide
ugggcgucucccacaguaa

SEQ ID NO: 877871 - RNA, 19 nt, Artificial Sequence
  Description of Artificial Sequence: Synthetic oligonucleotide
gcaguauaggugaaaggca

SEQ ID NO: 877872 - RNA, 19 nt, Artificial Sequence
  Description of Artificial Sequence: Synthetic oligonucleotide
ccaguagccacgagugagc

SEQ ID NO: 877873 - RNA, 19 nt, Artificial Sequence
  Description of Artificial Sequence: Synthetic oligonucleotide
gccauguguaguaauccug

SEQ ID NO: 877874 - RNA, 19 nt, Artificial Sequence
  Description of Artificial Sequence: Synthetic oligonucleotide
gagccgugcugauacccca

SEQ ID NO: 877875 - RNA, 19 nt, Artificial Sequence
  Description of Artificial Sequence: Synthetic oligonucleotide
acggaagggauugggcugu

SEQ ID NO: 877876 - RNA, 19 nt, Artificial Sequence
  Description of Artificial Sequence: Synthetic oligonucleotide
cugggcaucggcgccaauc

SEQ ID NO: 877877 - RNA, 19 nt, Artificial Sequence
  Description of Artificial Sequence: Synthetic oligonucleotide
caggacgcacagaaaccuc

SEQ ID NO: 877878 - RNA, 19 nt, Artificial Sequence
  Description of Artificial Sequence: Synthetic oligonucleotide
gccagaguuaaauccaaua

SEQ ID NO: 877879 - RNA, 19 nt, Artificial Sequence
  Description of Artificial Sequence: Synthetic oligonucleotide
uugggguaauucccugcuu

SEQ ID NO: 877880 - RNA, 19 nt, Artificial Sequence
  Description of Artificial Sequence: Synthetic oligonucleotide
gcaucggcgccaaucagcc

SEQ ID NO: 877881 - RNA, 19 nt, Artificial Sequence
  Description of Artificial Sequence: Synthetic oligonucleotide
cagcucugaggcggaaugg

SEQ ID NO: 877882 - RNA, 19 nt, Artificial Sequence
  Description of Artificial Sequence: Synthetic oligonucleotide
gugggugaugacauaguaa

SEQ ID NO: 877883 - RNA, 19 nt, Artificial Sequence
  Description of Artificial Sequence: Synthetic oligonucleotide
ggcggaaggccugucaccc

SEQ ID NO: 877884 - RNA, 19 nt, Artificial Sequence
  Description of Artificial Sequence: Synthetic oligonucleotide
acacccaaccuugggacaa

SEQ ID NO: 877885 - RNA, 19 nt, Artificial Sequence
  Description of Artificial Sequence: Synthetic oligonucleotide
cggagagacuguaaucggg

SEQ ID NO: 877886 - RNA, 19 nt, Artificial Sequence
  Description of Artificial Sequence: Synthetic oligonucleotide
ggugccaugcucaucuguc

SEQ ID NO: 877887 - RNA, 19 nt, Artificial Sequence
  Description of Artificial Sequence: Synthetic oligonucleotide
gaggcggaauggggaacgg

SEQ ID NO: 877888 - RNA, 19 nt, Artificial Sequence
  Description of Artificial Sequence: Synthetic oligonucleotide
ccacaguaaguugucgggg

SEQ ID NO: 877889 - RNA, 19 nt, Artificial Sequence
  Description of Artificial Sequence: Synthetic oligonucleotide
cuucuugggguaauucccu

SEQ ID NO: 877890 - RNA, 19 nt, Artificial Sequence
  Description of Artificial Sequence: Synthetic oligonucleotide
ggcaucggcgccaaucagc

SEQ ID NO: 877891 - RNA, 19 nt, Artificial Sequence
  Description of Artificial Sequence: Synthetic oligonucleotide
acccaaccuugggacaagg

SEQ ID NO: 877892 - RNA, 19 nt, Artificial Sequence
  Description of Artificial Sequence: Synthetic oligonucleotide
gggcaccaaaaucugugac

SEQ ID NO: 877893 - RNA, 19 nt, Artificial Sequence
  Description of Artificial Sequence: Synthetic oligonucleotide
uaaucggggcagagagcuc

SEQ ID NO: 877894 - RNA, 19 nt, Artificial Sequence
  Description of Artificial Sequence: Synthetic oligonucleotide
aggcuaagaccccgccaug

SEQ ID NO: 877895 - RNA, 19 nt, Artificial Sequence
  Description of Artificial Sequence: Synthetic oligonucleotide
gcuaagaccccgccaugug

SEQ ID NO: 877896 - RNA, 19 nt, Artificial Sequence
  Description of Artificial Sequence: Synthetic oligonucleotide
aggccaugcuauggcaaag

SEQ ID NO: 877897 - RNA, 19 nt, Artificial Sequence
  Description of Artificial Sequence: Synthetic oligonucleotide
cuccauaaaaguggcaagu

SEQ ID NO: 877898 - RNA, 19 nt, Artificial Sequence
  Description of Artificial Sequence: Synthetic oligonucleotide
gaguccaggcuaagacccc

SEQ ID NO: 877899 - RNA, 19 nt, Artificial Sequence
  Description of Artificial Sequence: Synthetic oligonucleotide
ggucguccagagcccauag

SEQ ID NO: 877900 - RNA, 19 nt, Artificial Sequence
  Description of Artificial Sequence: Synthetic oligonucleotide
gggcgucucccacaguaag

SEQ ID NO: 877901 - RNA, 19 nt, Artificial Sequence
  Description of Artificial Sequence: Synthetic oligonucleotide
ggugggugaugacauagua

SEQ ID NO: 877902 - RNA, 19 nt, Artificial Sequence
  Description of Artificial Sequence: Synthetic oligonucleotide
gaucccuucgcccucccuu

SEQ ID NO: 877903 - RNA, 19 nt, Artificial Sequence
  Description of Artificial Sequence: Synthetic oligonucleotide
agcugguaagggucaccgu

SEQ ID NO: 877904 - RNA, 19 nt, Artificial Sequence
  Description of Artificial Sequence: Synthetic oligonucleotide
ccacaguauaagacggcac

SEQ ID NO: 877905 - RNA, 19 nt, Artificial Sequence
  Description of Artificial Sequence: Synthetic oligonucleotide
aggagcucucucauccucu

SEQ ID NO: 877906 - RNA, 19 nt, Artificial Sequence
  Description of Artificial Sequence: Synthetic oligonucleotide
ggcgaaaguaaagccuggc

SEQ ID NO: 877907 - RNA, 19 nt, Artificial Sequence
  Description of Artificial Sequence: Synthetic oligonucleotide
gguaagggucaccguugag

SEQ ID NO: 877908 - RNA, 19 nt, Artificial Sequence
  Description of Artificial Sequence: Synthetic oligonucleotide
gccgaggaccccauguccg

SEQ ID NO: 877909 - RNA, 19 nt, Artificial Sequence
  Description of Artificial Sequence: Synthetic oligonucleotide
gaccccgccauguguagua

SEQ ID NO: 877910 - RNA, 19 nt, Artificial Sequence
  Description of Artificial Sequence: Synthetic oligonucleotide
ggcguugcaguaccacggc

SEQ ID NO: 877911 - RNA, 19 nt, Artificial Sequence
  Description of Artificial Sequence: Synthetic oligonucleotide
agguuucgcuggucaccuc

SEQ ID NO: 877912 - RNA, 19 nt, Artificial Sequence
  Description of Artificial Sequence: Synthetic oligonucleotide
cucgaugcaggugggcguc

SEQ ID NO: 877913 - RNA, 19 nt, Artificial Sequence
  Description of Artificial Sequence: Synthetic oligonucleotide
cagcgacugcuuguucugg

SEQ ID NO: 877914 - RNA, 19 nt, Artificial Sequence
  Description of Artificial Sequence: Synthetic oligonucleotide
cuaagaccccgccaugugu

SEQ ID NO: 877915 - RNA, 19 nt, Artificial Sequence
  Description of Artificial Sequence: Synthetic oligonucleotide
gcucugaggcggaaugggg

SEQ ID NO: 877916 - RNA, 19 nt, Artificial Sequence
  Description of Artificial Sequence: Synthetic oligonucleotide
ccuggguuccauccauuag

SEQ ID NO: 877917 - RNA, 19 nt, Artificial Sequence
  Description of Artificial Sequence: Synthetic oligonucleotide
gagggauggugugccgccc

SEQ ID NO: 877918 - RNA, 19 nt, Artificial Sequence
  Description of Artificial Sequence: Synthetic oligonucleotide
agcgaaccgggccgccuug

SEQ ID NO: 877919 - RNA, 19 nt, Artificial Sequence
  Description of Artificial Sequence: Synthetic oligonucleotide
caggcuaagaccccgccau

SEQ ID NO: 877920 - RNA, 19 nt, Artificial Sequence
  Description of Artificial Sequence: Synthetic oligonucleotide
acguggaucuucagcgacu

SEQ ID NO: 877921 - RNA, 19 nt, Artificial Sequence
  Description of Artificial Sequence: Synthetic oligonucleotide
ugagcgaaccgggccgccu

SEQ ID NO: 877922 - RNA, 19 nt, Artificial Sequence
  Description of Artificial Sequence: Synthetic oligonucleotide
ugccaacuccgcacucauc

SEQ ID NO: 877923 - RNA, 19 nt, Artificial Sequence
  Description of Artificial Sequence: Synthetic oligonucleotide
gccagauucucagucccug

SEQ ID NO: 877924 - RNA, 19 nt, Artificial Sequence
  Description of Artificial Sequence: Synthetic oligonucleotide
cgccaaucagccuggagac

SEQ ID NO: 877925 - RNA, 19 nt, Artificial Sequence
  Description of Artificial Sequence: Synthetic oligonucleotide
aguaaacggucagcgggua

SEQ ID NO: 877926 - RNA, 19 nt, Artificial Sequence
  Description of Artificial Sequence: Synthetic oligonucleotide
ucccuucgcccucccuucu

SEQ ID NO: 877927 - RNA, 19 nt, Artificial Sequence
  Description of Artificial Sequence: Synthetic oligonucleotide
cgugcugauaccccagaac

SEQ ID NO: 877928 - RNA, 19 nt, Artificial Sequence
  Description of Artificial Sequence: Synthetic oligonucleotide
agcggguaggugagaagca

SEQ ID NO: 877929 - RNA, 19 nt, Artificial Sequence
  Description of Artificial Sequence: Synthetic oligonucleotide
gggugucaacuucacuuca

SEQ ID NO: 877930 - RNA, 19 nt, Artificial Sequence
  Description of Artificial Sequence: Synthetic oligonucleotide
accacggcaugcaguuguc

SEQ ID NO: 877931 - RNA, 19 nt, Artificial Sequence
  Description of Artificial Sequence: Synthetic oligonucleotide
cugcucgcuccauaaaagu

SEQ ID NO: 877932 - RNA, 19 nt, Artificial Sequence
  Description of Artificial Sequence: Synthetic oligonucleotide
cuccuagguggggucuagg

SEQ ID NO: 877933 - RNA, 19 nt, Artificial Sequence
  Description of Artificial Sequence: Synthetic oligonucleotide
cccgccauguguaguaauc

SEQ ID NO: 877934 - RNA, 19 nt, Artificial Sequence
  Description of Artificial Sequence: Synthetic oligonucleotide
acaagccucuccacaguau

SEQ ID NO: 877935 - RNA, 19 nt, Artificial Sequence
  Description of Artificial Sequence: Synthetic oligonucleotide
agaucccuucgcccucccu

SEQ ID NO: 877936 - RNA, 19 nt, Artificial Sequence
  Description of Artificial Sequence: Synthetic oligonucleotide
caccaggcccuggaauuag

SEQ ID NO: 877937 - RNA, 19 nt, Artificial Sequence
  Description of Artificial Sequence: Synthetic oligonucleotide
ccaauaaccaggucaggcu

SEQ ID NO: 877938 - RNA, 19 nt, Artificial Sequence
  Description of Artificial Sequence: Synthetic oligonucleotide
aggucucgaugcagguggg

SEQ ID NO: 877939 - RNA, 19 nt, Artificial Sequence
  Description of Artificial Sequence: Synthetic oligonucleotide
gccaugcuauggcaaagga

SEQ ID NO: 877940 - RNA, 19 nt, Artificial Sequence
  Description of Artificial Sequence: Synthetic oligonucleotide
aggugggugaugacauagu

SEQ ID NO: 877941 - RNA, 19 nt, Artificial Sequence
  Description of Artificial Sequence: Synthetic oligonucleotide
aucugcggcggcgggcccg

SEQ ID NO: 877942 - RNA, 19 nt, Artificial Sequence
  Description of Artificial Sequence: Synthetic oligonucleotide
ccgccauguguaguaaucc

SEQ ID NO: 877943 - RNA, 19 nt, Artificial Sequence
  Description of Artificial Sequence: Synthetic oligonucleotide
cucuccaggucucgaugca

SEQ ID NO: 877944 - RNA, 19 nt, Artificial Sequence
  Description of Artificial Sequence: Synthetic oligonucleotide
ucggcgccuucgagcgggg

SEQ ID NO: 877945 - RNA, 19 nt, Artificial Sequence
  Description of Artificial Sequence: Synthetic oligonucleotide
gucagcggguaggugagaa

SEQ ID NO: 877946 - RNA, 19 nt, Artificial Sequence
  Description of Artificial Sequence: Synthetic oligonucleotide
ggcggaauggggaacggaa

SEQ ID NO: 877947 - RNA, 19 nt, Artificial Sequence
  Description of Artificial Sequence: Synthetic oligonucleotide
cauacucacugcucucagu

SEQ ID NO: 877948 - RNA, 19 nt, Artificial Sequence
  Description of Artificial Sequence: Synthetic oligonucleotide
gggugaugacauaguaaac

SEQ ID NO: 877949 - RNA, 19 nt, Artificial Sequence
  Description of Artificial Sequence: Synthetic oligonucleotide
cccaaccuugggacaaggc

SEQ ID NO: 877950 - RNA, 19 nt, Artificial Sequence
  Description of Artificial Sequence: Synthetic oligonucleotide
auggggaacggaagggauu

SEQ ID NO: 877951 - RNA, 19 nt, Artificial Sequence
  Description of Artificial Sequence: Synthetic oligonucleotide
gccauggucugaucgucca

SEQ ID NO: 877952 - RNA, 19 nt, Artificial Sequence
  Description of Artificial Sequence: Synthetic oligonucleotide
cacucggagagacuguaau

SEQ ID NO: 877953 - RNA, 19 nt, Artificial Sequence
  Description of Artificial Sequence: Synthetic oligonucleotide
caggugauagggccgggua

SEQ ID NO: 877954 - RNA, 19 nt, Artificial Sequence
  Description of Artificial Sequence: Synthetic oligonucleotide
gcacucaucugcggcggcg

SEQ ID NO: 877955 - RNA, 19 nt, Artificial Sequence
  Description of Artificial Sequence: Synthetic oligonucleotide
ccacgugugggagaaggac

SEQ ID NO: 877956 - RNA, 19 nt, Artificial Sequence
  Description of Artificial Sequence: Synthetic oligonucleotide
gggucgaggugcagggccg

SEQ ID NO: 877957 - RNA, 19 nt, Artificial Sequence
  Description of Artificial Sequence: Synthetic oligonucleotide
agccgugcugauaccccag

SEQ ID NO: 877958 - RNA, 19 nt, Artificial Sequence
  Description of Artificial Sequence: Synthetic oligonucleotide
ccaaccuugggacaaggcu

SEQ ID NO: 877959 - RNA, 19 nt, Artificial Sequence
  Description of Artificial Sequence: Synthetic oligonucleotide
ggguccaguagccacgagu

SEQ ID NO: 877960 - RNA, 19 nt, Artificial Sequence
  Description of Artificial Sequence: Synthetic oligonucleotide
agacuguaaucggggcaga

SEQ ID NO: 877961 - RNA, 19 nt, Artificial Sequence
  Description of Artificial Sequence: Synthetic oligonucleotide
gcugguaagggucaccguu

SEQ ID NO: 877962 - RNA, 19 nt, Artificial Sequence
  Description of Artificial Sequence: Synthetic oligonucleotide
ggaccccauguccgcauug

SEQ ID NO: 877963 - RNA, 19 nt, Artificial Sequence
  Description of Artificial Sequence: Synthetic oligonucleotide
ggcgccaaucagccuggag

SEQ ID NO: 877964 - RNA, 19 nt, Artificial Sequence
  Description of Artificial Sequence: Synthetic oligonucleotide
ggucaccguugagaaggcg

SEQ ID NO: 877965 - RNA, 19 nt, Artificial Sequence
  Description of Artificial Sequence: Synthetic oligonucleotide
gcccgaagagaggcgaaag

SEQ ID NO: 877966 - RNA, 19 nt, Artificial Sequence
  Description of Artificial Sequence: Synthetic oligonucleotide
aaggcggcugagggauggu

SEQ ID NO: 877967 - RNA, 19 nt, Artificial Sequence
  Description of Artificial Sequence: Synthetic oligonucleotide
agcccgaagagaggcgaaa

SEQ ID NO: 877968 - RNA, 19 nt, Artificial Sequence
  Description of Artificial Sequence: Synthetic oligonucleotide
aggcggaauggggaacgga

SEQ ID NO: 877969 - RNA, 19 nt, Artificial Sequence
  Description of Artificial Sequence: Synthetic oligonucleotide
ccaacuccgcacucaucug

SEQ ID NO: 877970 - RNA, 19 nt, Artificial Sequence
  Description of Artificial Sequence: Synthetic oligonucleotide
guaaguugucggggcuuuc

SEQ ID NO: 877971 - RNA, 19 nt, Artificial Sequence
  Description of Artificial Sequence: Synthetic oligonucleotide
agaccccgccauguguagu

SEQ ID NO: 877972 - RNA, 19 nt, Artificial Sequence
  Description of Artificial Sequence: Synthetic oligonucleotide
gggccggguagacacccug

SEQ ID NO: 877973 - RNA, 19 nt, Artificial Sequence
  Description of Artificial Sequence: Synthetic oligonucleotide
guaccacggcaugcaguug

SEQ ID NO: 877974 - RNA, 19 nt, Artificial Sequence
  Description of Artificial Sequence: Synthetic oligonucleotide
ucgaugcaggugggcgucu

SEQ ID NO: 877975 - RNA, 19 nt, Artificial Sequence
  Description of Artificial Sequence: Synthetic oligonucleotide
cagaucccuucgcccuccc

SEQ ID NO: 877976 - RNA, 19 nt, Artificial Sequence
  Description of Artificial Sequence: Synthetic oligonucleotide
gggcaucggcgccaaucag

SEQ ID NO: 877977 - RNA, 19 nt, Artificial Sequence
  Description of Artificial Sequence: Synthetic oligonucleotide
gaccaaagccagaguuaaa

SEQ ID NO: 877978 - RNA, 19 nt, Artificial Sequence
  Description of Artificial Sequence: Synthetic oligonucleotide
aggaccccauguccgcauu

SEQ ID NO: 877979 - RNA, 19 nt, Artificial Sequence
  Description of Artificial Sequence: Synthetic oligonucleotide
ccuucgagcggggacagga

SEQ ID NO: 877980 - RNA, 19 nt, Artificial Sequence
  Description of Artificial Sequence: Synthetic oligonucleotide
aggcaucaaggcaggccca

SEQ ID NO: 877981 - RNA, 19 nt, Artificial Sequence
  Description of Artificial Sequence: Synthetic oligonucleotide
gccgccuugggcaggcuug

SEQ ID NO: 877982 - RNA, 19 nt, Artificial Sequence
  Description of Artificial Sequence: Synthetic oligonucleotide
auggcaaguucgagcccga

SEQ ID NO: 877983 - RNA, 19 nt, Artificial Sequence
  Description of Artificial Sequence: Synthetic oligonucleotide
ccgaagagaggcgaaagua

SEQ ID NO: 877984 - RNA, 19 nt, Artificial Sequence
  Description of Artificial Sequence: Synthetic oligonucleotide
cugagcgaaccgggccgcc

SEQ ID NO: 877985 - RNA, 19 nt, Artificial Sequence
  Description of Artificial Sequence: Synthetic oligonucleotide
cgcuccauaaaaguggcaa

SEQ ID NO: 877986 - RNA, 19 nt, Artificial Sequence
  Description of Artificial Sequence: Synthetic oligonucleotide
cuggguccaguagccacga

SEQ ID NO: 877987 - RNA, 19 nt, Artificial Sequence
  Description of Artificial Sequence: Synthetic oligonucleotide
cucgggcaccaaaaucugu

SEQ ID NO: 877988 - RNA, 19 nt, Artificial Sequence
  Description of Artificial Sequence: Synthetic oligonucleotide
ggucucgaugcaggugggc

SEQ ID NO: 877989 - RNA, 19 nt, Artificial Sequence
  Description of Artificial Sequence: Synthetic oligonucleotide
gaggaccccauguccgcau

SEQ ID NO: 877990 - RNA, 19 nt, Artificial Sequence
  Description of Artificial Sequence: Synthetic oligonucleotide
ggauggugugccgccccag

SEQ ID NO: 877991 - RNA, 19 nt, Artificial Sequence
  Description of Artificial Sequence: Synthetic oligonucleotide
gcagaucccuucgcccucc

SEQ ID NO: 877992 - RNA, 19 nt, Artificial Sequence
  Description of Artificial Sequence: Synthetic oligonucleotide
ggggcugagcgaaccgggc

SEQ ID NO: 877993 - RNA, 19 nt, Artificial Sequence
  Description of Artificial Sequence: Synthetic oligonucleotide
caucugcggcggcgggccc

SEQ ID NO: 877994 - RNA, 19 nt, Artificial Sequence
  Description of Artificial Sequence: Synthetic oligonucleotide
gcguugcaguaccacggca

SEQ ID NO: 877995 - RNA, 19 nt, Artificial Sequence
  Description of Artificial Sequence: Synthetic oligonucleotide
ggauugggcuguggcgagc

SEQ ID NO: 877996 - RNA, 19 nt, Artificial Sequence
  Description of Artificial Sequence: Synthetic oligonucleotide
cuccugcucgcuccauaaa

SEQ ID NO: 877997 - RNA, 19 nt, Artificial Sequence
  Description of Artificial Sequence: Synthetic oligonucleotide
gcuccuagguggggucuag

SEQ ID NO: 877998 - RNA, 19 nt, Artificial Sequence
  Description of Artificial Sequence: Synthetic oligonucleotide
ccgcacucaucugcggcgg

SEQ ID NO: 877999 - RNA, 19 nt, Artificial Sequence
  Description of Artificial Sequence: Synthetic oligonucleotide
ccaggcuaagaccccgcca

SEQ ID NO: 878000 - RNA, 19 nt, Artificial Sequence
  Description of Artificial Sequence: Synthetic oligonucleotide
gcagaucaaugcccaagau

SEQ ID NO: 878001 - RNA, 19 nt, Artificial Sequence
  Description of Artificial Sequence: Synthetic oligonucleotide
gggucaccguugagaaggc

SEQ ID NO: 878002 - RNA, 19 nt, Artificial Sequence
  Description of Artificial Sequence: Synthetic oligonucleotide
ggcacucggagagacugua

SEQ ID NO: 878003 - RNA, 19 nt, Artificial Sequence
  Description of Artificial Sequence: Synthetic oligonucleotide
ggcuaagaccccgccaugu

SEQ ID NO: 878004 - RNA, 19 nt, Artificial Sequence
  Description of Artificial Sequence: Synthetic oligonucleotide
auguccgcauugggguuuu

SEQ ID NO: 878005 - RNA, 19 nt, Artificial Sequence
  Description of Artificial Sequence: Synthetic oligonucleotide
gccgugcugauaccccaga

SEQ ID NO: 878006 - RNA, 19 nt, Artificial Sequence
  Description of Artificial Sequence: Synthetic oligonucleotide
gagcgaaccgggccgccuu

SEQ ID NO: 878007 - RNA, 19 nt, Artificial Sequence
  Description of Artificial Sequence: Synthetic oligonucleotide
gccuacacuccccuggguu

SEQ ID NO: 878008 - RNA, 19 nt, Artificial Sequence
  Description of Artificial Sequence: Synthetic oligonucleotide
gcgaaccgggccgccuugg

SEQ ID NO: 878009 - RNA, 19 nt, Artificial Sequence
  Description of Artificial Sequence: Synthetic oligonucleotide
ccaggacgcacagaaaccu

SEQ ID NO: 878010 - RNA, 19 nt, Artificial Sequence
  Description of Artificial Sequence: Synthetic oligonucleotide
cgaaccgggccgccuuggg

SEQ ID NO: 878011 - RNA, 19 nt, Artificial Sequence
  Description of Artificial Sequence: Synthetic oligonucleotide
cccgaggagccagauucuc

SEQ ID NO: 878012 - RNA, 19 nt, Artificial Sequence
  Description of Artificial Sequence: Synthetic oligonucleotide
gccaaucagccuggagaca

SEQ ID NO: 878013 - RNA, 19 nt, Artificial Sequence
  Description of Artificial Sequence: Synthetic oligonucleotide
ggccggguagacacccuga

SEQ ID NO: 878014 - RNA, 19 nt, Artificial Sequence
  Description of Artificial Sequence: Synthetic oligonucleotide
ggcgucucccacaguaagu

SEQ ID NO: 878015 - RNA, 19 nt, Artificial Sequence
  Description of Artificial Sequence: Synthetic oligonucleotide
gcgacugcuuguucuggau

SEQ ID NO: 878016 - RNA, 19 nt, Artificial Sequence
  Description of Artificial Sequence: Synthetic oligonucleotide
gcggaaggccugucaccca

SEQ ID NO: 878017 - RNA, 19 nt, Artificial Sequence
  Description of Artificial Sequence: Synthetic oligonucleotide
gcgucucccacaguaaguu

SEQ ID NO: 878018 - RNA, 19 nt, Artificial Sequence
  Description of Artificial Sequence: Synthetic oligonucleotide
ccgccauggucugaucguc

SEQ ID NO: 878019 - RNA, 19 nt, Artificial Sequence
  Description of Artificial Sequence: Synthetic oligonucleotide
cccgaagagaggcgaaagu

SEQ ID NO: 878020 - RNA, 19 nt, Artificial Sequence
  Description of Artificial Sequence: Synthetic oligonucleotide
ccuuuuguguccugacauu

SEQ ID NO: 878021 - RNA, 19 nt, Artificial Sequence
  Description of Artificial Sequence: Synthetic oligonucleotide
caucggcgccaaucagccu

SEQ ID NO: 878022 - RNA, 19 nt, Artificial Sequence
  Description of Artificial Sequence: Synthetic oligonucleotide
cgccauguguaguaauccu

SEQ ID NO: 878023 - RNA, 19 nt, Artificial Sequence
  Description of Artificial Sequence: Synthetic oligonucleotide
cccuucgcccucccuucuc

SEQ ID NO: 878024 - RNA, 19 nt, Artificial Sequence
  Description of Artificial Sequence: Synthetic oligonucleotide
ccgugcugauaccccagaa

SEQ ID NO: 878025 - RNA, 19 nt, Artificial Sequence
  Description of Artificial Sequence: Synthetic oligonucleotide
caccguugagaaggcggcu

SEQ ID NO: 878026 - RNA, 19 nt, Artificial Sequence
  Description of Artificial Sequence: Synthetic oligonucleotide
ccucggcgccuucgagcgg

SEQ ID NO: 878027 - RNA, 19 nt, Artificial Sequence
  Description of Artificial Sequence: Synthetic oligonucleotide
gcaggugauagggccgggu

SEQ ID NO: 878028 - RNA, 19 nt, Artificial Sequence
  Description of Artificial Sequence: Synthetic oligonucleotide
cgcacucaucugcggcggc

SEQ ID NO: 878029 - RNA, 19 nt, Artificial Sequence
  Description of Artificial Sequence: Synthetic oligonucleotide
ccccucugcauaguaaaau

SEQ ID NO: 878030 - RNA, 19 nt, Artificial Sequence
  Description of Artificial Sequence: Synthetic oligonucleotide
ccacggcaugcaguuguca

SEQ ID NO: 878031 - RNA, 19 nt, Artificial Sequence
  Description of Artificial Sequence: Synthetic oligonucleotide
ggccuacacuccccugggu

SEQ ID NO: 878032 - RNA, 19 nt, Artificial Sequence
  Description of Artificial Sequence: Synthetic oligonucleotide
ggcuccuagguggggucua

SEQ ID NO: 878033 - RNA, 19 nt, Artificial Sequence
  Description of Artificial Sequence: Synthetic oligonucleotide
ccaccgccauggucugauc

SEQ ID NO: 878034 - RNA, 19 nt, Artificial Sequence
  Description of Artificial Sequence: Synthetic oligonucleotide
cgcgcgcagcuuucuuuuc

SEQ ID NO: 878035 - RNA, 19 nt, Artificial Sequence
  Description of Artificial Sequence: Synthetic oligonucleotide
ggcaagucucgggcaccaa

SEQ ID NO: 878036 - RNA, 19 nt, Artificial Sequence
  Description of Artificial Sequence: Synthetic oligonucleotide
ccauguccgcauugggguu

SEQ ID NO: 878037 - RNA, 19 nt, Artificial Sequence
  Description of Artificial Sequence: Synthetic oligonucleotide
ggcgggcccgcgcgcagcu

SEQ ID NO: 878038 - RNA, 19 nt, Artificial Sequence
  Description of Artificial Sequence: Synthetic oligonucleotide
ccgcgcgcagcuuucuuuu

SEQ ID NO: 878039 - RNA, 19 nt, Artificial Sequence
  Description of Artificial Sequence: Synthetic oligonucleotide
cccgcgcgcagcuuucuuu

SEQ ID NO: 878040 - RNA, 19 nt, Artificial Sequence
  Description of Artificial Sequence: Synthetic oligonucleotide
cgugugggagaaggaccaa

SEQ ID NO: 878041 - RNA, 19 nt, Artificial Sequence
  Description of Artificial Sequence: Synthetic oligonucleotide
gcccgcgcgcagcuuucuu

SEQ ID NO: 878042 - RNA, 19 nt, Artificial Sequence
  Description of Artificial Sequence: Synthetic oligonucleotide
cggcgccaaucagccugga

SEQ ID NO: 878043 - RNA, 19 nt, Artificial Sequence
  Description of Artificial Sequence: Synthetic oligonucleotide
ucauguaucacagggaugg

SEQ ID NO: 878044 - RNA, 19 nt, Artificial Sequence
  Description of Artificial Sequence: Synthetic oligonucleotide
uuagacuuaugaaacaggc

SEQ ID NO: 878045 - RNA, 19 nt, Artificial Sequence
  Description of Artificial Sequence: Synthetic oligonucleotide
auaauaagaaccaacugac

SEQ ID NO: 878046 - RNA, 19 nt, Artificial Sequence
  Description of Artificial Sequence: Synthetic oligonucleotide
agugcaugcaacuuaaaag

SEQ ID NO: 878047 - RNA, 19 nt, Artificial Sequence
  Description of Artificial Sequence: Synthetic oligonucleotide
aauaagaaccaacugacua

SEQ ID NO: 878048 - RNA, 19 nt, Artificial Sequence
  Description of Artificial Sequence: Synthetic oligonucleotide
agaaucuagggccagcagc

SEQ ID NO: 878049 - RNA, 19 nt, Artificial Sequence
  Description of Artificial Sequence: Synthetic oligonucleotide
uuaaaagucucuauagcac

SEQ ID NO: 878050 - RNA, 19 nt, Artificial Sequence
  Description of Artificial Sequence: Synthetic oligonucleotide
agaggagaccuuuacuucc

SEQ ID NO: 878051 - RNA, 19 nt, Artificial Sequence
  Description of Artificial Sequence: Synthetic oligonucleotide
caugccaccacgcaaaggg

SEQ ID NO: 878052 - RNA, 19 nt, Artificial Sequence
  Description of Artificial Sequence: Synthetic oligonucleotide
aguuacugcauaccaagcg

SEQ ID NO: 878053 - RNA, 19 nt, Artificial Sequence
  Description of Artificial Sequence: Synthetic oligonucleotide
gcuaugaauaauaagaacc

SEQ ID NO: 878054 - RNA, 19 nt, Artificial Sequence
  Description of Artificial Sequence: Synthetic oligonucleotide
guuacugcauaccaagcgg

SEQ ID NO: 878055 - RNA, 19 nt, Artificial Sequence
  Description of Artificial Sequence: Synthetic oligonucleotide
uguaucacagggaugggga

SEQ ID NO: 878056 - RNA, 19 nt, Artificial Sequence
  Description of Artificial Sequence: Synthetic oligonucleotide
uucaguauggcuucgacuu

SEQ ID NO: 878057 - RNA, 19 nt, Artificial Sequence
  Description of Artificial Sequence: Synthetic oligonucleotide
cuuagacuuaugaaacagg

SEQ ID NO: 878058 - RNA, 19 nt, Artificial Sequence
  Description of Artificial Sequence: Synthetic oligonucleotide
ugguccacgaagaagggcc

SEQ ID NO: 878059 - RNA, 19 nt, Artificial Sequence
  Description of Artificial Sequence: Synthetic oligonucleotide
aagucucuauagcaccagc

SEQ ID NO: 878060 - RNA, 19 nt, Artificial Sequence
  Description of Artificial Sequence: Synthetic oligonucleotide
aauguagcccggccggagc

SEQ ID NO: 878061 - RNA, 19 nt, Artificial Sequence
  Description of Artificial Sequence: Synthetic oligonucleotide
aaaguugucuacagccugc

SEQ ID NO: 878062 - RNA, 19 nt, Artificial Sequence
  Description of Artificial Sequence: Synthetic oligonucleotide
uuaugaaacaggcaaccuc

SEQ ID NO: 878063 - RNA, 19 nt, Artificial Sequence
  Description of Artificial Sequence: Synthetic oligonucleotide
ugaccugggacaucgauug

SEQ ID NO: 878064 - RNA, 19 nt, Artificial Sequence
  Description of Artificial Sequence: Synthetic oligonucleotide
ucgacuuucagaacaccag

SEQ ID NO: 878065 - RNA, 19 nt, Artificial Sequence
  Description of Artificial Sequence: Synthetic oligonucleotide
acgaagaagggccagccgg

SEQ ID NO: 878066 - RNA, 19 nt, Artificial Sequence
  Description of Artificial Sequence: Synthetic oligonucleotide
auggcuucgacuuucagaa

SEQ ID NO: 878067 - RNA, 19 nt, Artificial Sequence
  Description of Artificial Sequence: Synthetic oligonucleotide
aggaugagcaaaucugagg

SEQ ID NO: 878068 - RNA, 19 nt, Artificial Sequence
  Description of Artificial Sequence: Synthetic oligonucleotide
augguaaaggugugguggc

SEQ ID NO: 878069 - RNA, 19 nt, Artificial Sequence
  Description of Artificial Sequence: Synthetic oligonucleotide
ucucuauagcaccagcuga

SEQ ID NO: 878070 - RNA, 19 nt, Artificial Sequence
  Description of Artificial Sequence: Synthetic oligonucleotide
agaggaugcaguuuccuug

SEQ ID NO: 878071 - RNA, 19 nt, Artificial Sequence
  Description of Artificial Sequence: Synthetic oligonucleotide
uucgacuuucagaacacca

SEQ ID NO: 878072 - RNA, 19 nt, Artificial Sequence
  Description of Artificial Sequence: Synthetic oligonucleotide
uuacugcauaccaagcggc

SEQ ID NO: 878073 - RNA, 19 nt, Artificial Sequence
  Description of Artificial Sequence: Synthetic oligonucleotide
agaaagugcucucaaacaa

SEQ ID NO: 878074 - RNA, 19 nt, Artificial Sequence
  Description of Artificial Sequence: Synthetic oligonucleotide
cucuguucgaaaucgcugc

SEQ ID NO: 878075 - RNA, 19 nt, Artificial Sequence
  Description of Artificial Sequence: Synthetic oligonucleotide
acaucgauugcuuucugcu

SEQ ID NO: 878076 - RNA, 19 nt, Artificial Sequence
  Description of Artificial Sequence: Synthetic oligonucleotide
uacuugaccugggacaucg

SEQ ID NO: 878077 - RNA, 19 nt, Artificial Sequence
  Description of Artificial Sequence: Synthetic oligonucleotide
ugggaauguagcccggccg

SEQ ID NO: 878078 - RNA, 19 nt, Artificial Sequence
  Description of Artificial Sequence: Synthetic oligonucleotide
aaccaacugacuacaaguc

SEQ ID NO: 878079 - RNA, 19 nt, Artificial Sequence
  Description of Artificial Sequence: Synthetic oligonucleotide
caugcaacuuaaaagucuc

SEQ ID NO: 878080 - RNA, 19 nt, Artificial Sequence
  Description of Artificial Sequence: Synthetic oligonucleotide
aaccacggugugcacacgg

SEQ ID NO: 878081 - RNA, 19 nt, Artificial Sequence
  Description of Artificial Sequence: Synthetic oligonucleotide
aaugggaauguagcccggc

SEQ ID NO: 878082 - RNA, 19 nt, Artificial Sequence
  Description of Artificial Sequence: Synthetic oligonucleotide
ugggcuugguggaaggagg

SEQ ID NO: 878083 - RNA, 19 nt, Artificial Sequence
  Description of Artificial Sequence: Synthetic oligonucleotide
cuuguuagugcuuucccuc

SEQ ID NO: 878084 - RNA, 19 nt, Artificial Sequence
  Description of Artificial Sequence: Synthetic oligonucleotide
uguucgaaaucgcugcacu

SEQ ID NO: 878085 - RNA, 19 nt, Artificial Sequence
  Description of Artificial Sequence: Synthetic oligonucleotide
uaccaagcggcuaugaaua

SEQ ID NO: 878086 - RNA, 19 nt, Artificial Sequence
  Description of Artificial Sequence: Synthetic oligonucleotide
uaauaagaaccaacugacu

SEQ ID NO: 878087 - RNA, 19 nt, Artificial Sequence
  Description of Artificial Sequence: Synthetic oligonucleotide
ucgaucaucagguacuuuu

SEQ ID NO: 878088 - RNA, 19 nt, Artificial Sequence
  Description of Artificial Sequence: Synthetic oligonucleotide
uuggagacgaggcugacuu

SEQ ID NO: 878089 - RNA, 19 nt, Artificial Sequence
  Description of Artificial Sequence: Synthetic oligonucleotide
accaaguuacugcauacca

SEQ ID NO: 878090 - RNA, 19 nt, Artificial Sequence
  Description of Artificial Sequence: Synthetic oligonucleotide
uucgaaaucgcugcacucc

SEQ ID NO: 878091 - RNA, 19 nt, Artificial Sequence
  Description of Artificial Sequence: Synthetic oligonucleotide
acgcaaaggggacugggac

SEQ ID NO: 878092 - RNA, 19 nt, Artificial Sequence
  Description of Artificial Sequence: Synthetic oligonucleotide
uuagagucugccuccuugc

SEQ ID NO: 878093 - RNA, 19 nt, Artificial Sequence
  Description of Artificial Sequence: Synthetic oligonucleotide
ucguuuucaggacuuuucu

SEQ ID NO: 878094 - RNA, 19 nt, Artificial Sequence
  Description of Artificial Sequence: Synthetic oligonucleotide
gucugaaccuuccugacac

SEQ ID NO: 878095 - RNA, 19 nt, Artificial Sequence
  Description of Artificial Sequence: Synthetic oligonucleotide
ugcagaucacuugaauggg

SEQ ID NO: 878096 - RNA, 19 nt, Artificial Sequence
  Description of Artificial Sequence: Synthetic oligonucleotide
ugucaugccaccacgcaaa

SEQ ID NO: 878097 - RNA, 19 nt, Artificial Sequence
  Description of Artificial Sequence: Synthetic oligonucleotide
aggcuuagagucugccucc

SEQ ID NO: 878098 - RNA, 19 nt, Artificial Sequence
  Description of Artificial Sequence: Synthetic oligonucleotide
augaggaugagcaaaucug

SEQ ID NO: 878099 - RNA, 19 nt, Artificial Sequence
  Description of Artificial Sequence: Synthetic oligonucleotide
acucaugcacagaaagugc

SEQ ID NO: 878100 - RNA, 19 nt, Artificial Sequence
  Description of Artificial Sequence: Synthetic oligonucleotide
accgcucagguccaugggc

SEQ ID NO: 878101 - RNA, 19 nt, Artificial Sequence
  Description of Artificial Sequence: Synthetic oligonucleotide
auaccaagcggcuaugaau

SEQ ID NO: 878102 - RNA, 19 nt, Artificial Sequence
  Description of Artificial Sequence: Synthetic oligonucleotide
cacacuguuuaucuggcug

SEQ ID NO: 878103 - RNA, 19 nt, Artificial Sequence
  Description of Artificial Sequence: Synthetic oligonucleotide
aaaagucucuauagcacca

SEQ ID NO: 878104 - RNA, 19 nt, Artificial Sequence
  Description of Artificial Sequence: Synthetic oligonucleotide
ucaaccacggugugcacac

SEQ ID NO: 878105 - RNA, 19 nt, Artificial Sequence
  Description of Artificial Sequence: Synthetic oligonucleotide
ugcaugcaacuuaaaaguc

SEQ ID NO: 878106 - RNA, 19 nt, Artificial Sequence
  Description of Artificial Sequence: Synthetic oligonucleotide
caaaguugucuacagccug

SEQ ID NO: 878107 - RNA, 19 nt, Artificial Sequence
  Description of Artificial Sequence: Synthetic oligonucleotide
ugugguccacgaagaaggg

SEQ ID NO: 878108 - RNA, 19 nt, Artificial Sequence
  Description of Artificial Sequence: Synthetic oligonucleotide
acaccaggauguuuagcgg

SEQ ID NO: 878109 - RNA, 19 nt, Artificial Sequence
  Description of Artificial Sequence: Synthetic oligonucleotide
agcggcuaugaauaauaag

SEQ ID NO: 878110 - RNA, 19 nt, Artificial Sequence
  Description of Artificial Sequence: Synthetic oligonucleotide
ucauagaccuguacuugac

SEQ ID NO: 878111 - RNA, 19 nt, Artificial Sequence
  Description of Artificial Sequence: Synthetic oligonucleotide
ugguggccgauuuucagug

SEQ ID NO: 878112 - RNA, 19 nt, Artificial Sequence
  Description of Artificial Sequence: Synthetic oligonucleotide
gucaaucuugaucucccag

SEQ ID NO: 878113 - RNA, 19 nt, Artificial Sequence
  Description of Artificial Sequence: Synthetic oligonucleotide
ucuguuuuguuuucagguu

SEQ ID NO: 878114 - RNA, 19 nt, Artificial Sequence
  Description of Artificial Sequence: Synthetic oligonucleotide
ucgaaaucgcugcacucca

SEQ ID NO: 878115 - RNA, 19 nt, Artificial Sequence
  Description of Artificial Sequence: Synthetic oligonucleotide
cacgagaagggccauuggc

SEQ ID NO: 878116 - RNA, 19 nt, Artificial Sequence
  Description of Artificial Sequence: Synthetic oligonucleotide
gugcaugcaacuuaaaagu

SEQ ID NO: 878117 - RNA, 19 nt, Artificial Sequence
  Description of Artificial Sequence: Synthetic oligonucleotide
ccaacugacuacaaguccc

SEQ ID NO: 878118 - RNA, 19 nt, Artificial Sequence
  Description of Artificial Sequence: Synthetic oligonucleotide
uggagccuucacgagaagg

SEQ ID NO: 878119 - RNA, 19 nt, Artificial Sequence
  Description of Artificial Sequence: Synthetic oligonucleotide
uucacgagaagggccauug

SEQ ID NO: 878120 - RNA, 19 nt, Artificial Sequence
  Description of Artificial Sequence: Synthetic oligonucleotide
ucaccguacucaugcacag

SEQ ID NO: 878121 - RNA, 19 nt, Artificial Sequence
  Description of Artificial Sequence: Synthetic oligonucleotide
cauagaccuguacuugacc

SEQ ID NO: 878122 - RNA, 19 nt, Artificial Sequence
  Description of Artificial Sequence: Synthetic oligonucleotide
uggccugacgcacaucagc

SEQ ID NO: 878123 - RNA, 19 nt, Artificial Sequence
  Description of Artificial Sequence: Synthetic oligonucleotide
gcggcuaugaauaauaaga

SEQ ID NO: 878124 - RNA, 19 nt, Artificial Sequence
  Description of Artificial Sequence: Synthetic oligonucleotide
cucguuuucaggacuuuuc

SEQ ID NO: 878125 - RNA, 19 nt, Artificial Sequence
  Description of Artificial Sequence: Synthetic oligonucleotide
aaacaagcagcaggcuuag

SEQ ID NO: 878126 - RNA, 19 nt, Artificial Sequence
  Description of Artificial Sequence: Synthetic oligonucleotide
gauagcucacagccguggc

SEQ ID NO: 878127 - RNA, 19 nt, Artificial Sequence
  Description of Artificial Sequence: Synthetic oligonucleotide
ugcaacuuaaaagucucua

SEQ ID NO: 878128 - RNA, 19 nt, Artificial Sequence
  Description of Artificial Sequence: Synthetic oligonucleotide
agggucuacagaaucuagg

SEQ ID NO: 878129 - RNA, 19 nt, Artificial Sequence
  Description of Artificial Sequence: Synthetic oligonucleotide
agauagcucacagccgugg

SEQ ID NO: 878130 - RNA, 19 nt, Artificial Sequence
  Description of Artificial Sequence: Synthetic oligonucleotide
uauauggaguggccuuccc

SEQ ID NO: 878131 - RNA, 19 nt, Artificial Sequence
  Description of Artificial Sequence: Synthetic oligonucleotide
aacugacuacaagucccac

SEQ ID NO: 878132 - RNA, 19 nt, Artificial Sequence
  Description of Artificial Sequence: Synthetic oligonucleotide
acgcacaucagcucgcccu

SEQ ID NO: 878133 - RNA, 19 nt, Artificial Sequence
  Description of Artificial Sequence: Synthetic oligonucleotide
uagugcuuucccucuacac

SEQ ID NO: 878134 - RNA, 19 nt, Artificial Sequence
  Description of Artificial Sequence: Synthetic oligonucleotide
gcuuagacuuaugaaacag

SEQ ID NO: 878135 - RNA, 19 nt, Artificial Sequence
  Description of Artificial Sequence: Synthetic oligonucleotide
auauggaguggccuucccu

SEQ ID NO: 878136 - RNA, 19 nt, Artificial Sequence
  Description of Artificial Sequence: Synthetic oligonucleotide
ggcuaugaauaauaagaac

SEQ ID NO: 878137 - RNA, 19 nt, Artificial Sequence
  Description of Artificial Sequence: Synthetic oligonucleotide
cuugguggaaggagggcug

SEQ ID NO: 878138 - RNA, 19 nt, Artificial Sequence
  Description of Artificial Sequence: Synthetic oligonucleotide
gggaauguagcccggccgg

SEQ ID NO: 878139 - RNA, 19 nt, Artificial Sequence
  Description of Artificial Sequence: Synthetic oligonucleotide
ggagccuucacgagaaggg

SEQ ID NO: 878140 - RNA, 19 nt, Artificial Sequence
  Description of Artificial Sequence: Synthetic oligonucleotide
aaccggugaccugaauggg

SEQ ID NO: 878141 - RNA, 19 nt, Artificial Sequence
  Description of Artificial Sequence: Synthetic oligonucleotide
uugaucucccagcccggag

SEQ ID NO: 878142 - RNA, 19 nt, Artificial Sequence
  Description of Artificial Sequence: Synthetic oligonucleotide
aagggccauuggcagagga

SEQ ID NO: 878143 - RNA, 19 nt, Artificial Sequence
  Description of Artificial Sequence: Synthetic oligonucleotide
cagaggagaccuuuacuuc

SEQ ID NO: 878144 - RNA, 19 nt, Artificial Sequence
  Description of Artificial Sequence: Synthetic oligonucleotide
cucaagguugcugggcugg

SEQ ID NO: 878145 - RNA, 19 nt, Artificial Sequence
  Description of Artificial Sequence: Synthetic oligonucleotide
uaucuggcuggguagucuc

SEQ ID NO: 878146 - RNA, 19 nt, Artificial Sequence
  Description of Artificial Sequence: Synthetic oligonucleotide
gguaaaggugugguggccg

SEQ ID NO: 878147 - RNA, 19 nt, Artificial Sequence
  Description of Artificial Sequence: Synthetic oligonucleotide
ggagacgaggcugacuugg

SEQ ID NO: 878148 - RNA, 19 nt, Artificial Sequence
  Description of Artificial Sequence: Synthetic oligonucleotide
ggucuacagaaucuagggc

SEQ ID NO: 878149 - RNA, 19 nt, Artificial Sequence
  Description of Artificial Sequence: Synthetic oligonucleotide
cagaucacuugaaugggga

SEQ ID NO: 878150 - RNA, 19 nt, Artificial Sequence
  Description of Artificial Sequence: Synthetic oligonucleotide
cucaccguacucaugcaca

SEQ ID NO: 878151 - RNA, 19 nt, Artificial Sequence
  Description of Artificial Sequence: Synthetic oligonucleotide
ggugcgacuguuguggucc

SEQ ID NO: 878152 - RNA, 19 nt, Artificial Sequence
  Description of Artificial Sequence: Synthetic oligonucleotide
gugaccugaauggggaugc

SEQ ID NO: 878153 - RNA, 19 nt, Artificial Sequence
  Description of Artificial Sequence: Synthetic oligonucleotide
ccugacgcacaucagcucg

SEQ ID NO: 878154 - RNA, 19 nt, Artificial Sequence
  Description of Artificial Sequence: Synthetic oligonucleotide
guagucucugucaugccac

SEQ ID NO: 878155 - RNA, 19 nt, Artificial Sequence
  Description of Artificial Sequence: Synthetic oligonucleotide
uuaucuggcuggguagucu

SEQ ID NO: 878156 - RNA, 19 nt, Artificial Sequence
  Description of Artificial Sequence: Synthetic oligonucleotide
aguugucuacagccugcuc

SEQ ID NO: 878157 - RNA, 19 nt, Artificial Sequence
  Description of Artificial Sequence: Synthetic oligonucleotide
auggaguggccuucccuag

SEQ ID NO: 878158 - RNA, 19 nt, Artificial Sequence
  Description of Artificial Sequence: Synthetic oligonucleotide
caucgauugcuuucugcuc

SEQ ID NO: 878159 - RNA, 19 nt, Artificial Sequence
  Description of Artificial Sequence: Synthetic oligonucleotide
ggcuucgacuuucagaaca

SEQ ID NO: 878160 - RNA, 19 nt, Artificial Sequence
  Description of Artificial Sequence: Synthetic oligonucleotide
caagcggcuaugaauaaua

SEQ ID NO: 878161 - RNA, 19 nt, Artificial Sequence
  Description of Artificial Sequence: Synthetic oligonucleotide
gaaucuagggccagcagcu

SEQ ID NO: 878162 - RNA, 19 nt, Artificial Sequence
  Description of Artificial Sequence: Synthetic oligonucleotide
ugucguggugcgacuguug

SEQ ID NO: 878163 - RNA, 19 nt, Artificial Sequence
  Description of Artificial Sequence: Synthetic oligonucleotide
cagggucuacagaaucuag

SEQ ID NO: 878164 - RNA, 19 nt, Artificial Sequence
  Description of Artificial Sequence: Synthetic oligonucleotide
cacggugugcacacggaug

SEQ ID NO: 878165 - RNA, 19 nt, Artificial Sequence
  Description of Artificial Sequence: Synthetic oligonucleotide
acgagaagggccauuggca

SEQ ID NO: 878166 - RNA, 19 nt, Artificial Sequence
  Description of Artificial Sequence: Synthetic oligonucleotide
uucucagcaggaggcggcg

SEQ ID NO: 878167 - RNA, 19 nt, Artificial Sequence
  Description of Artificial Sequence: Synthetic oligonucleotide
ugggaguaggcaugguaaa

SEQ ID NO: 878168 - RNA, 19 nt, Artificial Sequence
  Description of Artificial Sequence: Synthetic oligonucleotide
guugggugacagguggagg

SEQ ID NO: 878169 - RNA, 19 nt, Artificial Sequence
  Description of Artificial Sequence: Synthetic oligonucleotide
gaaugggaauguagcccgg

SEQ ID NO: 878170 - RNA, 19 nt, Artificial Sequence
  Description of Artificial Sequence: Synthetic oligonucleotide
guucgaaaucgcugcacuc

SEQ ID NO: 878171 - RNA, 19 nt, Artificial Sequence
  Description of Artificial Sequence: Synthetic oligonucleotide
cacgaagaagggccagccg

SEQ ID NO: 878172 - RNA, 19 nt, Artificial Sequence
  Description of Artificial Sequence: Synthetic oligonucleotide
caccaaguuacugcauacc

SEQ ID NO: 878173 - RNA, 19 nt, Artificial Sequence
  Description of Artificial Sequence: Synthetic oligonucleotide
cuacccagacugcuccugc

SEQ ID NO: 878174 - RNA, 19 nt, Artificial Sequence
  Description of Artificial Sequence: Synthetic oligonucleotide
gaccgcucagguccauggg

SEQ ID NO: 878175 - RNA, 19 nt, Artificial Sequence
  Description of Artificial Sequence: Synthetic oligonucleotide
ucaugccaccacgcaaagg

SEQ ID NO: 878176 - RNA, 19 nt, Artificial Sequence
  Description of Artificial Sequence: Synthetic oligonucleotide
uguuagugcuuucccucua

SEQ ID NO: 878177 - RNA, 19 nt, Artificial Sequence
  Description of Artificial Sequence: Synthetic oligonucleotide
uggaugcaccucgaaccgg

SEQ ID NO: 878178 - RNA, 19 nt, Artificial Sequence
  Description of Artificial Sequence: Synthetic oligonucleotide
uggugggucugguauucac

SEQ ID NO: 878179 - RNA, 19 nt, Artificial Sequence
  Description of Artificial Sequence: Synthetic oligonucleotide
gaacaccaggauguuuagc

SEQ ID NO: 878180 - RNA, 19 nt, Artificial Sequence
  Description of Artificial Sequence: Synthetic oligonucleotide
aggaugcaguuuccuuggg

SEQ ID NO: 878181 - RNA, 19 nt, Artificial Sequence
  Description of Artificial Sequence: Synthetic oligonucleotide
acagccguggcuagcucac

SEQ ID NO: 878182 - RNA, 19 nt, Artificial Sequence
  Description of Artificial Sequence: Synthetic oligonucleotide
ugccucuguucgaaaucgc

SEQ ID NO: 878183 - RNA, 19 nt, Artificial Sequence
  Description of Artificial Sequence: Synthetic oligonucleotide
cuguuuaucuggcugggua

SEQ ID NO: 878184 - RNA, 19 nt, Artificial Sequence
  Description of Artificial Sequence: Synthetic oligonucleotide
acucaagguugcugggcug

SEQ ID NO: 878185 - RNA, 19 nt, Artificial Sequence
  Description of Artificial Sequence: Synthetic oligonucleotide
cagugcaugcaacuuaaaa

SEQ ID NO: 878186 - RNA, 19 nt, Artificial Sequence
  Description of Artificial Sequence: Synthetic oligonucleotide
uuuggagacgaggcugacu

SEQ ID NO: 878187 - RNA, 19 nt, Artificial Sequence
  Description of Artificial Sequence: Synthetic oligonucleotide
cugacgcacaucagcucgc

SEQ ID NO: 878188 - RNA, 19 nt, Artificial Sequence
  Description of Artificial Sequence: Synthetic oligonucleotide
guauauggaguggccuucc

SEQ ID NO: 878189 - RNA, 19 nt, Artificial Sequence
  Description of Artificial Sequence: Synthetic oligonucleotide
uggccuucccuagugggca

SEQ ID NO: 878190 - RNA, 19 nt, Artificial Sequence
  Description of Artificial Sequence: Synthetic oligonucleotide
uuuaucuggcuggguaguc

SEQ ID NO: 878191 - RNA, 19 nt, Artificial Sequence
  Description of Artificial Sequence: Synthetic oligonucleotide
gacucaagguugcugggcu

SEQ ID NO: 878192 - RNA, 19 nt, Artificial Sequence
  Description of Artificial Sequence: Synthetic oligonucleotide
aggcaugguaaaggugugg

SEQ ID NO: 878193 - RNA, 19 nt, Artificial Sequence
  Description of Artificial Sequence: Synthetic oligonucleotide
agacgaggcugacuuggcu

SEQ ID NO: 878194 - RNA, 19 nt, Artificial Sequence
  Description of Artificial Sequence: Synthetic oligonucleotide
ucaguauggcuucgacuuu

SEQ ID NO: 878195 - RNA, 19 nt, Artificial Sequence
  Description of Artificial Sequence: Synthetic oligonucleotide
gauggggauguagccccgg

SEQ ID NO: 878196 - RNA, 19 nt, Artificial Sequence
  Description of Artificial Sequence: Synthetic oligonucleotide
auggcacccaugaugauuu

SEQ ID NO: 878197 - RNA, 19 nt, Artificial Sequence
  Description of Artificial Sequence: Synthetic oligonucleotide
cuucgacuuucagaacacc

SEQ ID NO: 878198 - RNA, 19 nt, Artificial Sequence
  Description of Artificial Sequence: Synthetic oligonucleotide
caacugacuacaaguccca

SEQ ID NO: 878199 - RNA, 19 nt, Artificial Sequence
  Description of Artificial Sequence: Synthetic oligonucleotide
cuagcucaccguacucaug

SEQ ID NO: 878200 - RNA, 19 nt, Artificial Sequence
  Description of Artificial Sequence: Synthetic oligonucleotide
uggaguggccuucccuagu

SEQ ID NO: 878201 - RNA, 19 nt, Artificial Sequence
  Description of Artificial Sequence: Synthetic oligonucleotide
cauguaucacagggauggg

SEQ ID NO: 878202 - RNA, 19 nt, Artificial Sequence
  Description of Artificial Sequence: Synthetic oligonucleotide
ucgauugcuuucugcucaa

SEQ ID NO: 878203 - RNA, 19 nt, Artificial Sequence
  Description of Artificial Sequence: Synthetic oligonucleotide
uguuggcuuucaguuugug

SEQ ID NO: 878204 - RNA, 19 nt, Artificial Sequence
  Description of Artificial Sequence: Synthetic oligonucleotide
ccucuguucgaaaucgcug

SEQ ID NO: 878205 - RNA, 19 nt, Artificial Sequence
  Description of Artificial Sequence: Synthetic oligonucleotide
gcagaucacuugaaugggg

SEQ ID NO: 878206 - RNA, 19 nt, Artificial Sequence
  Description of Artificial Sequence: Synthetic oligonucleotide
gauccucguuuucaggacu

SEQ ID NO: 878207 - RNA, 19 nt, Artificial Sequence
  Description of Artificial Sequence: Synthetic oligonucleotide
ucguggugcgacuguugug

SEQ ID NO: 878208 - RNA, 19 nt, Artificial Sequence
  Description of Artificial Sequence: Synthetic oligonucleotide
cugcuccgacucaagguug

SEQ ID NO: 878209 - RNA, 19 nt, Artificial Sequence
  Description of Artificial Sequence: Synthetic oligonucleotide
aagcggcuaugaauaauaa

SEQ ID NO: 878210 - RNA, 19 nt, Artificial Sequence
  Description of Artificial Sequence: Synthetic oligonucleotide
gaggagaccuuuacuucca

SEQ ID NO: 878211 - RNA, 19 nt, Artificial Sequence
  Description of Artificial Sequence: Synthetic oligonucleotide
gggccauuggcagaggaug

SEQ ID NO: 878212 - RNA, 19 nt, Artificial Sequence
  Description of Artificial Sequence: Synthetic oligonucleotide
cauaccaagcggcuaugaa

SEQ ID NO: 878213 - RNA, 19 nt, Artificial Sequence
  Description of Artificial Sequence: Synthetic oligonucleotide
gugugcacacggaugggug

SEQ ID NO: 878214 - RNA, 19 nt, Artificial Sequence
  Description of Artificial Sequence: Synthetic oligonucleotide
ugcauaccaagcggcuaug

SEQ ID NO: 878215 - RNA, 19 nt, Artificial Sequence
  Description of Artificial Sequence: Synthetic oligonucleotide
ggaguggccuucccuagug

SEQ ID NO: 878216 - RNA, 19 nt, Artificial Sequence
  Description of Artificial Sequence: Synthetic oligonucleotide
uccaugucguggugcgacu

SEQ ID NO: 878217 - RNA, 19 nt, Artificial Sequence
  Description of Artificial Sequence: Synthetic oligonucleotide
guagacaggcugguggguc

SEQ ID NO: 878218 - RNA, 19 nt, Artificial Sequence
  Description of Artificial Sequence: Synthetic oligonucleotide
ugacgcacaucagcucgcc

SEQ ID NO: 878219 - RNA, 19 nt, Artificial Sequence
  Description of Artificial Sequence: Synthetic oligonucleotide
gaggcggcggcuucuggga

SEQ ID NO: 878220 - RNA, 19 nt, Artificial Sequence
  Description of Artificial Sequence: Synthetic oligonucleotide
ggauccucguuuucaggac

SEQ ID NO: 878221 - RNA, 19 nt, Artificial Sequence
  Description of Artificial Sequence: Synthetic oligonucleotide
cugaaccuuccugacacca

SEQ ID NO: 878222 - RNA, 19 nt, Artificial Sequence
  Description of Artificial Sequence: Synthetic oligonucleotide
ggcuuagacuuaugaaaca

SEQ ID NO: 878223 - RNA, 19 nt, Artificial Sequence
  Description of Artificial Sequence: Synthetic oligonucleotide
ggacugggaccucugagga

SEQ ID NO: 878224 - RNA, 19 nt, Artificial Sequence
  Description of Artificial Sequence: Synthetic oligonucleotide
gaccuguacuugaccuggg

SEQ ID NO: 878225 - RNA, 19 nt, Artificial Sequence
  Description of Artificial Sequence: Synthetic oligonucleotide
ggugggucugguauucacc

SEQ ID NO: 878226 - RNA, 19 nt, Artificial Sequence
  Description of Artificial Sequence: Synthetic oligonucleotide
cgaaccggugaccugaaug

SEQ ID NO: 878227 - RNA, 19 nt, Artificial Sequence
  Description of Artificial Sequence: Synthetic oligonucleotide
cagcccuugcaccuucuuc

SEQ ID NO: 878228 - RNA, 19 nt, Artificial Sequence
  Description of Artificial Sequence: Synthetic oligonucleotide
ggugaccugaauggggaug

SEQ ID NO: 878229 - RNA, 19 nt, Artificial Sequence
  Description of Artificial Sequence: Synthetic oligonucleotide
gaccugggacaucgauugc

SEQ ID NO: 878230 - RNA, 19 nt, Artificial Sequence
  Description of Artificial Sequence: Synthetic oligonucleotide
cacagccguggcuagcuca

SEQ ID NO: 878231 - RNA, 19 nt, Artificial Sequence
  Description of Artificial Sequence: Synthetic oligonucleotide
gcacacggaugggugaugg

SEQ ID NO: 878232 - RNA, 19 nt, Artificial Sequence
  Description of Artificial Sequence: Synthetic oligonucleotide
gacgaggcugacuuggcuu

SEQ ID NO: 878233 - RNA, 19 nt, Artificial Sequence
  Description of Artificial Sequence: Synthetic oligonucleotide
gcagaggagaccuuuacuu

SEQ ID NO: 878234 - RNA, 19 nt, Artificial Sequence
  Description of Artificial Sequence: Synthetic oligonucleotide
guagcccggccggagcugg

SEQ ID NO: 878235 - RNA, 19 nt, Artificial Sequence
  Description of Artificial Sequence: Synthetic oligonucleotide
guagugggucuucugggcu

SEQ ID NO: 878236 - RNA, 19 nt, Artificial Sequence
  Description of Artificial Sequence: Synthetic oligonucleotide
cccuuguuagugcuuuccc

SEQ ID NO: 878237 - RNA, 19 nt, Artificial Sequence
  Description of Artificial Sequence: Synthetic oligonucleotide
gucaaccacggugugcaca

SEQ ID NO: 878238 - RNA, 19 nt, Artificial Sequence
  Description of Artificial Sequence: Synthetic oligonucleotide
caccacgcaaaggggacug

SEQ ID NO: 878239 - RNA, 19 nt, Artificial Sequence
  Description of Artificial Sequence: Synthetic oligonucleotide
agcucaccguacucaugca

SEQ ID NO: 878240 - RNA, 19 nt, Artificial Sequence
  Description of Artificial Sequence: Synthetic oligonucleotide
gcucauguaucacagggau

SEQ ID NO: 878241 - RNA, 19 nt, Artificial Sequence
  Description of Artificial Sequence: Synthetic oligonucleotide
gcaacuuaaaagucucuau

SEQ ID NO: 878242 - RNA, 19 nt, Artificial Sequence
  Description of Artificial Sequence: Synthetic oligonucleotide
cuuaugaaacaggcaaccu

SEQ ID NO: 878243 - RNA, 19 nt, Artificial Sequence
  Description of Artificial Sequence: Synthetic oligonucleotide
acugcauaccaagcggcua

SEQ ID NO: 878244 - RNA, 19 nt, Artificial Sequence
  Description of Artificial Sequence: Synthetic oligonucleotide
gaugcaccucgaaccggug

SEQ ID NO: 878245 - RNA, 19 nt, Artificial Sequence
  Description of Artificial Sequence: Synthetic oligonucleotide
accucgaaccggugaccug

SEQ ID NO: 878246 - RNA, 19 nt, Artificial Sequence
  Description of Artificial Sequence: Synthetic oligonucleotide
gucguuccaugucguggug

SEQ ID NO: 878247 - RNA, 19 nt, Artificial Sequence
  Description of Artificial Sequence: Synthetic oligonucleotide
guuuguggauccucguuuu

SEQ ID NO: 878248 - RNA, 19 nt, Artificial Sequence
  Description of Artificial Sequence: Synthetic oligonucleotide
gcggcuucugggaaacagg

SEQ ID NO: 878249 - RNA, 19 nt, Artificial Sequence
  Description of Artificial Sequence: Synthetic oligonucleotide
gcucaccguacucaugcac

SEQ ID NO: 878250 - RNA, 19 nt, Artificial Sequence
  Description of Artificial Sequence: Synthetic oligonucleotide
cuccgacucaagguugcug

SEQ ID NO: 878251 - RNA, 19 nt, Artificial Sequence
  Description of Artificial Sequence: Synthetic oligonucleotide
uguagcccggccggagcug

SEQ ID NO: 878252 - RNA, 19 nt, Artificial Sequence
  Description of Artificial Sequence: Synthetic oligonucleotide
cccggcuggaugcaccucg

SEQ ID NO: 878253 - RNA, 19 nt, Artificial Sequence
  Description of Artificial Sequence: Synthetic oligonucleotide
cccagacugcuccugcagg

SEQ ID NO: 878254 - RNA, 19 nt, Artificial Sequence
  Description of Artificial Sequence: Synthetic oligonucleotide
uggccgggugauguucugc

SEQ ID NO: 878255 - RNA, 19 nt, Artificial Sequence
  Description of Artificial Sequence: Synthetic oligonucleotide
gucguggugcgacuguugu

SEQ ID NO: 878256 - RNA, 19 nt, Artificial Sequence
  Description of Artificial Sequence: Synthetic oligonucleotide
ugcacacggaugggugaug

SEQ ID NO: 878257 - RNA, 19 nt, Artificial Sequence
  Description of Artificial Sequence: Synthetic oligonucleotide
agucugccuccuugcagau

SEQ ID NO: 878258 - RNA, 19 nt, Artificial Sequence
  Description of Artificial Sequence: Synthetic oligonucleotide
accacgcaaaggggacugg

SEQ ID NO: 878259 - RNA, 19 nt, Artificial Sequence
  Description of Artificial Sequence: Synthetic oligonucleotide
cgcaaaggggacugggacc

SEQ ID NO: 878260 - RNA, 19 nt, Artificial Sequence
  Description of Artificial Sequence: Synthetic oligonucleotide
ggggagugaacuggugugc

SEQ ID NO: 878261 - RNA, 19 nt, Artificial Sequence
  Description of Artificial Sequence: Synthetic oligonucleotide
agcuggguagugggucuuc

SEQ ID NO: 878262 - RNA, 19 nt, Artificial Sequence
  Description of Artificial Sequence: Synthetic oligonucleotide
gagggagaucugguccggc

SEQ ID NO: 878263 - RNA, 19 nt, Artificial Sequence
  Description of Artificial Sequence: Synthetic oligonucleotide
guuuaucuggcuggguagu

SEQ ID NO: 878264 - RNA, 19 nt, Artificial Sequence
  Description of Artificial Sequence: Synthetic oligonucleotide
gcuucgacuuucagaacac

SEQ ID NO: 878265 - RNA, 19 nt, Artificial Sequence
  Description of Artificial Sequence: Synthetic oligonucleotide
gacaaggaauuggggcaga

SEQ ID NO: 878266 - RNA, 19 nt, Artificial Sequence
  Description of Artificial Sequence: Synthetic oligonucleotide
aacaagcagcaggcuuaga

SEQ ID NO: 878267 - RNA, 19 nt, Artificial Sequence
  Description of Artificial Sequence: Synthetic oligonucleotide
gguggccgauuuucagugc

SEQ ID NO: 878268 - RNA, 19 nt, Artificial Sequence
  Description of Artificial Sequence: Synthetic oligonucleotide
gcaugcaacuuaaaagucu

SEQ ID NO: 878269 - RNA, 19 nt, Artificial Sequence
  Description of Artificial Sequence: Synthetic oligonucleotide
ggucugguauucacccugc

SEQ ID NO: 878270 - RNA, 19 nt, Artificial Sequence
  Description of Artificial Sequence: Synthetic oligonucleotide
ggucguuccaugucguggu

SEQ ID NO: 878271 - RNA, 19 nt, Artificial Sequence
  Description of Artificial Sequence: Synthetic oligonucleotide
ccgacucaagguugcuggg

SEQ ID NO: 878272 - RNA, 19 nt, Artificial Sequence
  Description of Artificial Sequence: Synthetic oligonucleotide
ucugugcugcugggauuug

SEQ ID NO: 878273 - RNA, 19 nt, Artificial Sequence
  Description of Artificial Sequence: Synthetic oligonucleotide
ggcuagcucaccguacuca

SEQ ID NO: 878274 - RNA, 19 nt, Artificial Sequence
  Description of Artificial Sequence: Synthetic oligonucleotide
ucgaaccggugaccugaau

SEQ ID NO: 878275 - RNA, 19 nt, Artificial Sequence
  Description of Artificial Sequence: Synthetic oligonucleotide
ccgauuuucagugccuuca

SEQ ID NO: 878276 - RNA, 19 nt, Artificial Sequence
  Description of Artificial Sequence: Synthetic oligonucleotide
uagcccggccggagcuggg

SEQ ID NO: 878277 - RNA, 19 nt, Artificial Sequence
  Description of Artificial Sequence: Synthetic oligonucleotide
cgcgggucguuccaugucg

SEQ ID NO: 878278 - RNA, 19 nt, Artificial Sequence
  Description of Artificial Sequence: Synthetic oligonucleotide
ugggaccucugaggagcag

SEQ ID NO: 878279 - RNA, 19 nt, Artificial Sequence
  Description of Artificial Sequence: Synthetic oligonucleotide
cugcauaccaagcggcuau

SEQ ID NO: 878280 - RNA, 19 nt, Artificial Sequence
  Description of Artificial Sequence: Synthetic oligonucleotide
uucgaucaucagguacuuu

SEQ ID NO: 878281 - RNA, 19 nt, Artificial Sequence
  Description of Artificial Sequence: Synthetic oligonucleotide
gcugggaguaggcauggua

SEQ ID NO: 878282 - RNA, 19 nt, Artificial Sequence
  Description of Artificial Sequence: Synthetic oligonucleotide
ccugucaaccacggugugc

SEQ ID NO: 878283 - RNA, 19 nt, Artificial Sequence
  Description of Artificial Sequence: Synthetic oligonucleotide
cuggagccuucacgagaag

SEQ ID NO: 878284 - RNA, 19 nt, Artificial Sequence
  Description of Artificial Sequence: Synthetic oligonucleotide
agggccauuggcagaggau

SEQ ID NO: 878285 - RNA, 19 nt, Artificial Sequence
  Description of Artificial Sequence: Synthetic oligonucleotide
ccuggagccuucacgagaa

SEQ ID NO: 878286 - RNA, 19 nt, Artificial Sequence
  Description of Artificial Sequence: Synthetic oligonucleotide
ggcaugguaaagguguggu

SEQ ID NO: 878287 - RNA, 19 nt, Artificial Sequence
  Description of Artificial Sequence: Synthetic oligonucleotide
cggcuaugaauaauaagaa

SEQ ID NO: 878288 - RNA, 19 nt, Artificial Sequence
  Description of Artificial Sequence: Synthetic oligonucleotide
ccggugaccugaaugggga

SEQ ID NO: 878289 - RNA, 19 nt, Artificial Sequence
  Description of Artificial Sequence: Synthetic oligonucleotide
acgcgcgggucguuccaug

SEQ ID NO: 878290 - RNA, 19 nt, Artificial Sequence
  Description of Artificial Sequence: Synthetic oligonucleotide
caaccacggugugcacacg

SEQ ID NO: 878291 - RNA, 19 nt, Artificial Sequence
  Description of Artificial Sequence: Synthetic oligonucleotide
augucguggugcgacuguu

SEQ ID NO: 878292 - RNA, 19 nt, Artificial Sequence
  Description of Artificial Sequence: Synthetic oligonucleotide
gcuacccagacugcuccug

SEQ ID NO: 878293 - RNA, 19 nt, Artificial Sequence
  Description of Artificial Sequence: Synthetic oligonucleotide
uccucguuuucaggacuuu

SEQ ID NO: 878294 - RNA, 19 nt, Artificial Sequence
  Description of Artificial Sequence: Synthetic oligonucleotide
ggauggggauguagccccg

SEQ ID NO: 878295 - RNA, 19 nt, Artificial Sequence
  Description of Artificial Sequence: Synthetic oligonucleotide
ucgggagcacgcgcggguc

SEQ ID NO: 878296 - RNA, 19 nt, Artificial Sequence
  Description of Artificial Sequence: Synthetic oligonucleotide
cgggucaaucuugaucucc

SEQ ID NO: 878297 - RNA, 19 nt, Artificial Sequence
  Description of Artificial Sequence: Synthetic oligonucleotide
gccaccacgcaaaggggac

SEQ ID NO: 878298 - RNA, 19 nt, Artificial Sequence
  Description of Artificial Sequence: Synthetic oligonucleotide
ggguauauggaguggccuu

SEQ ID NO: 878299 - RNA, 19 nt, Artificial Sequence
  Description of Artificial Sequence: Synthetic oligonucleotide
caugucguggugcgacugu

SEQ ID NO: 878300 - RNA, 19 nt, Artificial Sequence
  Description of Artificial Sequence: Synthetic oligonucleotide
ccucgaaccggugaccuga

SEQ ID NO: 878301 - RNA, 19 nt, Artificial Sequence
  Description of Artificial Sequence: Synthetic oligonucleotide
acagugcaugcaacuuaaa

SEQ ID NO: 878302 - RNA, 19 nt, Artificial Sequence
  Description of Artificial Sequence: Synthetic oligonucleotide
cguggcuagcucaccguac

SEQ ID NO: 878303 - RNA, 19 nt, Artificial Sequence
  Description of Artificial Sequence: Synthetic oligonucleotide
ggccuucccuagugggcag

SEQ ID NO: 878304 - RNA, 19 nt, Artificial Sequence
  Description of Artificial Sequence: Synthetic oligonucleotide
cgaaaucgcugcacuccag

SEQ ID NO: 878305 - RNA, 19 nt, Artificial Sequence
  Description of Artificial Sequence: Synthetic oligonucleotide
gagcacgcgcgggucguuc

SEQ ID NO: 878306 - RNA, 19 nt, Artificial Sequence
  Description of Artificial Sequence: Synthetic oligonucleotide
guacuugaccugggacauc

SEQ ID NO: 878307 - RNA, 19 nt, Artificial Sequence
  Description of Artificial Sequence: Synthetic oligonucleotide
gggguauauggaguggccu

SEQ ID NO: 878308 - RNA, 19 nt, Artificial Sequence
  Description of Artificial Sequence: Synthetic oligonucleotide
guuccaugucguggugcga

SEQ ID NO: 878309 - RNA, 19 nt, Artificial Sequence
  Description of Artificial Sequence: Synthetic oligonucleotide
cucgaaccggugaccugaa

SEQ ID NO: 878310 - RNA, 19 nt, Artificial Sequence
  Description of Artificial Sequence: Synthetic oligonucleotide
cuacaccaaguuacugcau

SEQ ID NO: 878311 - RNA, 19 nt, Artificial Sequence
  Description of Artificial Sequence: Synthetic oligonucleotide
gcuuacuuucuguuuuguu

SEQ ID NO: 878312 - RNA, 19 nt, Artificial Sequence
  Description of Artificial Sequence: Synthetic oligonucleotide
ggaugcaccucgaaccggu

SEQ ID NO: 878313 - RNA, 19 nt, Artificial Sequence
  Description of Artificial Sequence: Synthetic oligonucleotide
cgacucaagguugcugggc

SEQ ID NO: 878314 - RNA, 19 nt, Artificial Sequence
  Description of Artificial Sequence: Synthetic oligonucleotide
gcauaccaagcggcuauga

SEQ ID NO: 878315 - RNA, 19 nt, Artificial Sequence
  Description of Artificial Sequence: Synthetic oligonucleotide
ggccugacgcacaucagcu

SEQ ID NO: 878316 - RNA, 19 nt, Artificial Sequence
  Description of Artificial Sequence: Synthetic oligonucleotide
ggaauguagcccggccgga

SEQ ID NO: 878317 - RNA, 19 nt, Artificial Sequence
  Description of Artificial Sequence: Synthetic oligonucleotide
ggccugucaaccacggugu

SEQ ID NO: 878318 - RNA, 19 nt, Artificial Sequence
  Description of Artificial Sequence: Synthetic oligonucleotide
gccauuggcagaggaugca

SEQ ID NO: 878319 - RNA, 19 nt, Artificial Sequence
  Description of Artificial Sequence: Synthetic oligonucleotide
gcaccucgaaccggugacc

SEQ ID NO: 878320 - RNA, 19 nt, Artificial Sequence
  Description of Artificial Sequence: Synthetic oligonucleotide
ccaugucguggugcgacug

SEQ ID NO: 878321 - RNA, 19 nt, Artificial Sequence
  Description of Artificial Sequence: Synthetic oligonucleotide
caccguacucaugcacaga

SEQ ID NO: 878322 - RNA, 19 nt, Artificial Sequence
  Description of Artificial Sequence: Synthetic oligonucleotide
guccggcugagccuggcuu

SEQ ID NO: 878323 - RNA, 19 nt, Artificial Sequence
  Description of Artificial Sequence: Synthetic oligonucleotide
cuggcuggguagucucugu

SEQ ID NO: 878324 - RNA, 19 nt, Artificial Sequence
  Description of Artificial Sequence: Synthetic oligonucleotide
caccucgaaccggugaccu

SEQ ID NO: 878325 - RNA, 19 nt, Artificial Sequence
  Description of Artificial Sequence: Synthetic oligonucleotide
cucgggagcacgcgcgggu

SEQ ID NO: 878326 - RNA, 19 nt, Artificial Sequence
  Description of Artificial Sequence: Synthetic oligonucleotide
gccucuguucgaaaucgcu

SEQ ID NO: 878327 - RNA, 19 nt, Artificial Sequence
  Description of Artificial Sequence: Synthetic oligonucleotide
ccgaagaggccggggcucc

SEQ ID NO: 878328 - RNA, 19 nt, Artificial Sequence
  Description of Artificial Sequence: Synthetic oligonucleotide
cuucgaucaucagguacuu

SEQ ID NO: 878329 - RNA, 19 nt, Artificial Sequence
  Description of Artificial Sequence: Synthetic oligonucleotide
ggcuuacuuucuguuuugu

SEQ ID NO: 878330 - RNA, 19 nt, Artificial Sequence
  Description of Artificial Sequence: Synthetic oligonucleotide
gcggcggcuucugggaaac

SEQ ID NO: 878331 - RNA, 19 nt, Artificial Sequence
  Description of Artificial Sequence: Synthetic oligonucleotide
gcgcgggucguuccauguc

SEQ ID NO: 878332 - RNA, 19 nt, Artificial Sequence
  Description of Artificial Sequence: Synthetic oligonucleotide
cucgcccuucagggucuac

SEQ ID NO: 878333 - RNA, 19 nt, Artificial Sequence
  Description of Artificial Sequence: Synthetic oligonucleotide
ccguacucaugcacagaaa

SEQ ID NO: 878334 - RNA, 19 nt, Artificial Sequence
  Description of Artificial Sequence: Synthetic oligonucleotide
gccggucugcgggucaauc

SEQ ID NO: 878335 - RNA, 19 nt, Artificial Sequence
  Description of Artificial Sequence: Synthetic oligonucleotide
gcacgcgcgggucguucca

SEQ ID NO: 878336 - RNA, 19 nt, Artificial Sequence
  Description of Artificial Sequence: Synthetic oligonucleotide
ccggcugagccuggcuuac

SEQ ID NO: 878337 - RNA, 19 nt, Artificial Sequence
  Description of Artificial Sequence: Synthetic oligonucleotide
gccguggcuagcucaccgu

SEQ ID NO: 878338 - RNA, 19 nt, Artificial Sequence
  Description of Artificial Sequence: Synthetic oligonucleotide
cgauugcuuucugcucaag

SEQ ID NO: 878339 - RNA, 19 nt, Artificial Sequence
  Description of Artificial Sequence: Synthetic oligonucleotide
gugaacuggugugccgcuu

SEQ ID NO: 878340 - RNA, 19 nt, Artificial Sequence
  Description of Artificial Sequence: Synthetic oligonucleotide
ccuucccuagugggcagca

SEQ ID NO: 878341 - RNA, 19 nt, Artificial Sequence
  Description of Artificial Sequence: Synthetic oligonucleotide
ccggucugcgggucaaucu

SEQ ID NO: 878342 - RNA, 19 nt, Artificial Sequence
  Description of Artificial Sequence: Synthetic oligonucleotide
ggcuggugggucugguauu

SEQ ID NO: 878343 - RNA, 19 nt, Artificial Sequence
  Description of Artificial Sequence: Synthetic oligonucleotide
gguccggcugagccuggcu

SEQ ID NO: 878344 - RNA, 19 nt, Artificial Sequence
  Description of Artificial Sequence: Synthetic oligonucleotide
cuucacgagaagggccauu

SEQ ID NO: 878345 - RNA, 19 nt, Artificial Sequence
  Description of Artificial Sequence: Synthetic oligonucleotide
ccguggcuagcucaccgua

SEQ ID NO: 878346 - RNA, 19 nt, Artificial Sequence
  Description of Artificial Sequence: Synthetic oligonucleotide
ccggcuggaugcaccucga

SEQ ID NO: 878347 - RNA, 19 nt, Artificial Sequence
  Description of Artificial Sequence: Synthetic oligonucleotide
cagccggucugcgggucaa

SEQ ID NO: 878348 - RNA, 19 nt, Artificial Sequence
  Description of Artificial Sequence: Synthetic oligonucleotide
ggccgauuuucagugccuu

SEQ ID NO: 878349 - RNA, 19 nt, Artificial Sequence
  Description of Artificial Sequence: Synthetic oligonucleotide
ccagccggucugcggguca

SEQ ID NO: 878350 - RNA, 19 nt, Artificial Sequence
  Description of Artificial Sequence: Synthetic oligonucleotide
ccaagcggcuaugaauaau

SEQ ID NO: 878351 - RNA, 19 nt, Artificial Sequence
  Description of Artificial Sequence: Synthetic oligonucleotide
gggagcacgcgcgggucgu

SEQ ID NO: 878352 - RNA, 19 nt, Artificial Sequence
  Description of Artificial Sequence: Synthetic oligonucleotide
gcgggucguuccaugucgu

SEQ ID NO: 878353 - RNA, 19 nt, Artificial Sequence
  Description of Artificial Sequence: Synthetic oligonucleotide
ccucguuuucaggacuuuu

SEQ ID NO: 878354 - RNA, 19 nt, Artificial Sequence
  Description of Artificial Sequence: Synthetic oligonucleotide
cggucugcgggucaaucuu

SEQ ID NO: 878355 - RNA, 19 nt, Artificial Sequence
  Description of Artificial Sequence: Synthetic oligonucleotide
cacgcgcgggucguuccau

SEQ ID NO: 878356 - RNA, 19 nt, Artificial Sequence
  Description of Artificial Sequence: Synthetic oligonucleotide
cgggugauguucugcucau

SEQ ID NO: 878357 - RNA, 19 nt, Artificial Sequence
  Description of Artificial Sequence: Synthetic oligonucleotide
ccaccacgcaaaggggacu

SEQ ID NO: 878358 - RNA, 19 nt, Artificial Sequence
  Description of Artificial Sequence: Synthetic oligonucleotide
cgcgcgggucguuccaugu

SEQ ID NO: 878359 - RNA, 19 nt, Artificial Sequence
  Description of Artificial Sequence: Synthetic oligonucleotide
ccuucacgagaagggccau

SEQ ID NO: 878360 - RNA, 19 nt, Artificial Sequence
  Description of Artificial Sequence: Synthetic oligonucleotide
cggcuggaugcaccucgaa

SEQ ID NO: 878361 - RNA, 19 nt, Artificial Sequence
  Description of Artificial Sequence: Synthetic oligonucleotide
cggugaccugaauggggau

SEQ ID NO: 878362 - RNA, 19 nt, Artificial Sequence
  Description of Artificial Sequence: Synthetic oligonucleotide
ucuuuaaccaccaugaucc

SEQ ID NO: 878363 - RNA, 19 nt, Artificial Sequence
  Description of Artificial Sequence: Synthetic oligonucleotide
uauuugauuauccauaucu

SEQ ID NO: 878364 - RNA, 19 nt, Artificial Sequence
  Description of Artificial Sequence: Synthetic oligonucleotide
uccagaaccauuuaaauug

SEQ ID NO: 878365 - RNA, 19 nt, Artificial Sequence
  Description of Artificial Sequence: Synthetic oligonucleotide
ugcaagaucacuaagcgca

SEQ ID NO: 878366 - RNA, 19 nt, Artificial Sequence
  Description of Artificial Sequence: Synthetic oligonucleotide
ucuguuacuguagaaaugg

SEQ ID NO: 878367 - RNA, 19 nt, Artificial Sequence
  Description of Artificial Sequence: Synthetic oligonucleotide
aaagcacgaacacaguagg

SEQ ID NO: 878368 - RNA, 19 nt, Artificial Sequence
  Description of Artificial Sequence: Synthetic oligonucleotide
uuucagcuaguguagaugg

SEQ ID NO: 878369 - RNA, 19 nt, Artificial Sequence
  Description of Artificial Sequence: Synthetic oligonucleotide
aagaucuacacugguagcc

SEQ ID NO: 878370 - RNA, 19 nt, Artificial Sequence
  Description of Artificial Sequence: Synthetic oligonucleotide
ugaguauugagagacaacc

SEQ ID NO: 878371 - RNA, 19 nt, Artificial Sequence
  Description of Artificial Sequence: Synthetic oligonucleotide
aaauauaggcucucucuuc

SEQ ID NO: 878372 - RNA, 19 nt, Artificial Sequence
  Description of Artificial Sequence: Synthetic oligonucleotide
aaaauguuggaaauuccac

SEQ ID NO: 878373 - RNA, 19 nt, Artificial Sequence
  Description of Artificial Sequence: Synthetic oligonucleotide
agaaaugauaguuggaugu

SEQ ID NO: 878374 - RNA, 19 nt, Artificial Sequence
  Description of Artificial Sequence: Synthetic oligonucleotide
aucguuucaauacaauuuc

SEQ ID NO: 878375 - RNA, 19 nt, Artificial Sequence
  Description of Artificial Sequence: Synthetic oligonucleotide
uaagauagacuucuguaug

SEQ ID NO: 878376 - RNA, 19 nt, Artificial Sequence
  Description of Artificial Sequence: Synthetic oligonucleotide
aagcacucgauccaucugg

SEQ ID NO: 878377 - RNA, 19 nt, Artificial Sequence
  Description of Artificial Sequence: Synthetic oligonucleotide
uauauccugagcuuuagac

SEQ ID NO: 878378 - RNA, 19 nt, Artificial Sequence
  Description of Artificial Sequence: Synthetic oligonucleotide
uucuucacgauuuuaauau

SEQ ID NO: 878379 - RNA, 19 nt, Artificial Sequence
  Description of Artificial Sequence: Synthetic oligonucleotide
ugcauugacacucauugga

SEQ ID NO: 878380 - RNA, 19 nt, Artificial Sequence
  Description of Artificial Sequence: Synthetic oligonucleotide
aauauaggcucucucuucu

SEQ ID NO: 878381 - RNA, 19 nt, Artificial Sequence
  Description of Artificial Sequence: Synthetic oligonucleotide
ugaguacucagucagucgc

SEQ ID NO: 878382 - RNA, 19 nt, Artificial Sequence
  Description of Artificial Sequence: Synthetic oligonucleotide
agauuaucgaguauuuacc

SEQ ID NO: 878383 - RNA, 19 nt, Artificial Sequence
  Description of Artificial Sequence: Synthetic oligonucleotide
auuaucgaguauuuaccac

SEQ ID NO: 878384 - RNA, 19 nt, Artificial Sequence
  Description of Artificial Sequence: Synthetic oligonucleotide
uuaucgaguauuuaccaca

SEQ ID NO: 878385 - RNA, 19 nt, Artificial Sequence
  Description of Artificial Sequence: Synthetic oligonucleotide
aacuguuuugccugggcuc

SEQ ID NO: 878386 - RNA, 19 nt, Artificial Sequence
  Description of Artificial Sequence: Synthetic oligonucleotide
aucuuuaaccaccaugauc

SEQ ID NO: 878387 - RNA, 19 nt, Artificial Sequence
  Description of Artificial Sequence: Synthetic oligonucleotide
aaauuccacccuuucggac

SEQ ID NO: 878388 - RNA, 19 nt, Artificial Sequence
  Description of Artificial Sequence: Synthetic oligonucleotide
auuaaaucguuucaauaca

SEQ ID NO: 878389 - RNA, 19 nt, Artificial Sequence
  Description of Artificial Sequence: Synthetic oligonucleotide
cagcgaauaacacaaagag

SEQ ID NO: 878390 - RNA, 19 nt, Artificial Sequence
  Description of Artificial Sequence: Synthetic oligonucleotide
caguacuuuguccauaugg

SEQ ID NO: 878391 - RNA, 19 nt, Artificial Sequence
  Description of Artificial Sequence: Synthetic oligonucleotide
uuaagauagacuucuguau

SEQ ID NO: 878392 - RNA, 19 nt, Artificial Sequence
  Description of Artificial Sequence: Synthetic oligonucleotide
uacuaagcagcgaauaaca

SEQ ID NO: 878393 - RNA, 19 nt, Artificial Sequence
  Description of Artificial Sequence: Synthetic oligonucleotide
agagacaaccuuugaauuc

SEQ ID NO: 878394 - RNA, 19 nt, Artificial Sequence
  Description of Artificial Sequence: Synthetic oligonucleotide
acuuugacgacgucugcgc

SEQ ID NO: 878395 - RNA, 19 nt, Artificial Sequence
  Description of Artificial Sequence: Synthetic oligonucleotide
ugucuuacaaaugaacuca

SEQ ID NO: 878396 - RNA, 19 nt, Artificial Sequence
  Description of Artificial Sequence: Synthetic oligonucleotide
uauaggcucucucuucucg

SEQ ID NO: 878397 - RNA, 19 nt, Artificial Sequence
  Description of Artificial Sequence: Synthetic oligonucleotide
aauuccacccuuucggaca

SEQ ID NO: 878398 - RNA, 19 nt, Artificial Sequence
  Description of Artificial Sequence: Synthetic oligonucleotide
uuaaauugacuuccucugc

SEQ ID NO: 878399 - RNA, 19 nt, Artificial Sequence
  Description of Artificial Sequence: Synthetic oligonucleotide
aguugcuagggucagagca

SEQ ID NO: 878400 - RNA, 19 nt, Artificial Sequence
  Description of Artificial Sequence: Synthetic oligonucleotide
uggaaauuccacccuuucg

SEQ ID NO: 878401 - RNA, 19 nt, Artificial Sequence
  Description of Artificial Sequence: Synthetic oligonucleotide
uuucauuacugcauugaca

SEQ ID NO: 878402 - RNA, 19 nt, Artificial Sequence
  Description of Artificial Sequence: Synthetic oligonucleotide
acggauuccggccugcugc

SEQ ID NO: 878403 - RNA, 19 nt, Artificial Sequence
  Description of Artificial Sequence: Synthetic oligonucleotide
ugcacuauuuaacaaaguu

SEQ ID NO: 878404 - RNA, 19 nt, Artificial Sequence
  Description of Artificial Sequence: Synthetic oligonucleotide
aagauagacuucuguauga

SEQ ID NO: 878405 - RNA, 19 nt, Artificial Sequence
  Description of Artificial Sequence: Synthetic oligonucleotide
ugagagacaaccuuugaau

SEQ ID NO: 878406 - RNA, 19 nt, Artificial Sequence
  Description of Artificial Sequence: Synthetic oligonucleotide
aagaucacuaagcgcaucu

SEQ ID NO: 878407 - RNA, 19 nt, Artificial Sequence
  Description of Artificial Sequence: Synthetic oligonucleotide
agauacuacuauuugauua

SEQ ID NO: 878408 - RNA, 19 nt, Artificial Sequence
  Description of Artificial Sequence: Synthetic oligonucleotide
uuaggagcagauaagcaaa

SEQ ID NO: 878409 - RNA, 19 nt, Artificial Sequence
  Description of Artificial Sequence: Synthetic oligonucleotide
uauggucccaccaagcuuc

SEQ ID NO: 878410 - RNA, 19 nt, Artificial Sequence
  Description of Artificial Sequence: Synthetic oligonucleotide
uuaaaucguuucaauacaa

SEQ ID NO: 878411 - RNA, 19 nt, Artificial Sequence
  Description of Artificial Sequence: Synthetic oligonucleotide
aggcuggacaaccauuucc

SEQ ID NO: 878412 - RNA, 19 nt, Artificial Sequence
  Description of Artificial Sequence: Synthetic oligonucleotide
agaugccagaauuugccac

SEQ ID NO: 878413 - RNA, 19 nt, Artificial Sequence
  Description of Artificial Sequence: Synthetic oligonucleotide
ucaauaucuuuaaccacca

SEQ ID NO: 878414 - RNA, 19 nt, Artificial Sequence
  Description of Artificial Sequence: Synthetic oligonucleotide
uggaaugacuuccauggca

SEQ ID NO: 878415 - RNA, 19 nt, Artificial Sequence
  Description of Artificial Sequence: Synthetic oligonucleotide
aacuuugacgacgucugcg

SEQ ID NO: 878416 - RNA, 19 nt, Artificial Sequence
  Description of Artificial Sequence: Synthetic oligonucleotide
gauuaucgaguauuuacca

SEQ ID NO: 878417 - RNA, 19 nt, Artificial Sequence
  Description of Artificial Sequence: Synthetic oligonucleotide
ugcaauaagagcucucuuc

SEQ ID NO: 878418 - RNA, 19 nt, Artificial Sequence
  Description of Artificial Sequence: Synthetic oligonucleotide
augcaagaucacuaagcgc

SEQ ID NO: 878419 - RNA, 19 nt, Artificial Sequence
  Description of Artificial Sequence: Synthetic oligonucleotide
guaguuuucucuccuuggg

SEQ ID NO: 878420 - RNA, 19 nt, Artificial Sequence
  Description of Artificial Sequence: Synthetic oligonucleotide
uucaaacaaaugucaacug

SEQ ID NO: 878421 - RNA, 19 nt, Artificial Sequence
  Description of Artificial Sequence: Synthetic oligonucleotide
auguauaccuuucuguaga

SEQ ID NO: 878422 - RNA, 19 nt, Artificial Sequence
  Description of Artificial Sequence: Synthetic oligonucleotide
uugaguacucagucagucg

SEQ ID NO: 878423 - RNA, 19 nt, Artificial Sequence
  Description of Artificial Sequence: Synthetic oligonucleotide
gcgaauaacacaaagagca

SEQ ID NO: 878424 - RNA, 19 nt, Artificial Sequence
  Description of Artificial Sequence: Synthetic oligonucleotide
agcgaauaacacaaagagc

SEQ ID NO: 878425 - RNA, 19 nt, Artificial Sequence
  Description of Artificial Sequence: Synthetic oligonucleotide
ugucaguaaggauuucaag

SEQ ID NO: 878426 - RNA, 19 nt, Artificial Sequence
  Description of Artificial Sequence: Synthetic oligonucleotide
uguaugagaaggacauuac

SEQ ID NO: 878427 - RNA, 19 nt, Artificial Sequence
  Description of Artificial Sequence: Synthetic oligonucleotide
uuucggacauuaaugccug

SEQ ID NO: 878428 - RNA, 19 nt, Artificial Sequence
  Description of Artificial Sequence: Synthetic oligonucleotide
uccaauugucuuacaaaug

SEQ ID NO: 878429 - RNA, 19 nt, Artificial Sequence
  Description of Artificial Sequence: Synthetic oligonucleotide
uuugacgacgucugcgcgg

SEQ ID NO: 878430 - RNA, 19 nt, Artificial Sequence
  Description of Artificial Sequence: Synthetic oligonucleotide
agcagcgaauaacacaaag

SEQ ID NO: 878431 - RNA, 19 nt, Artificial Sequence
  Description of Artificial Sequence: Synthetic oligonucleotide
agcuuuagacagcuccacc

SEQ ID NO: 878432 - RNA, 19 nt, Artificial Sequence
  Description of Artificial Sequence: Synthetic oligonucleotide
uuuucagcuaguguagaug

SEQ ID NO: 878433 - RNA, 19 nt, Artificial Sequence
  Description of Artificial Sequence: Synthetic oligonucleotide
caugucaguagugaacugg

SEQ ID NO: 878434 - RNA, 19 nt, Artificial Sequence
  Description of Artificial Sequence: Synthetic oligonucleotide
ucuaagaucuacacuggua

SEQ ID NO: 878435 - RNA, 19 nt, Artificial Sequence
  Description of Artificial Sequence: Synthetic oligonucleotide
ucugcgaaagcacgaacac

SEQ ID NO: 878436 - RNA, 19 nt, Artificial Sequence
  Description of Artificial Sequence: Synthetic oligonucleotide
auuggagagaguaaacuug

SEQ ID NO: 878437 - RNA, 19 nt, Artificial Sequence
  Description of Artificial Sequence: Synthetic oligonucleotide
ucauuuguaauggucacau

SEQ ID NO: 878438 - RNA, 19 nt, Artificial Sequence
  Description of Artificial Sequence: Synthetic oligonucleotide
aauugacuuccucugcuaa

SEQ ID NO: 878439 - RNA, 19 nt, Artificial Sequence
  Description of Artificial Sequence: Synthetic oligonucleotide
ucaguugcuagggucagag

SEQ ID NO: 878440 - RNA, 19 nt, Artificial Sequence
  Description of Artificial Sequence: Synthetic oligonucleotide
aucaccaguuuguuagaac

SEQ ID NO: 878441 - RNA, 19 nt, Artificial Sequence
  Description of Artificial Sequence: Synthetic oligonucleotide
agagcaucaugaauggaac

SEQ ID NO: 878442 - RNA, 19 nt, Artificial Sequence
  Description of Artificial Sequence: Synthetic oligonucleotide
cuugucgcgguccugguag

SEQ ID NO: 878443 - RNA, 19 nt, Artificial Sequence
  Description of Artificial Sequence: Synthetic oligonucleotide
gucgagacaugucaguaag

SEQ ID NO: 878444 - RNA, 19 nt, Artificial Sequence
  Description of Artificial Sequence: Synthetic oligonucleotide
agcgcaucucuuaagauag

SEQ ID NO: 878445 - RNA, 19 nt, Artificial Sequence
  Description of Artificial Sequence: Synthetic oligonucleotide
cuuaagauagacuucugua

SEQ ID NO: 878446 - RNA, 19 nt, Artificial Sequence
  Description of Artificial Sequence: Synthetic oligonucleotide
gaaugcuccggacaguuuc

SEQ ID NO: 878447 - RNA, 19 nt, Artificial Sequence
  Description of Artificial Sequence: Synthetic oligonucleotide
cuuucauuacugcauugac

SEQ ID NO: 878448 - RNA, 19 nt, Artificial Sequence
  Description of Artificial Sequence: Synthetic oligonucleotide
ucaucuauggucccaccaa

SEQ ID NO: 878449 - RNA, 19 nt, Artificial Sequence
  Description of Artificial Sequence: Synthetic oligonucleotide
uuggccgcggaaauguugc

SEQ ID NO: 878450 - RNA, 19 nt, Artificial Sequence
  Description of Artificial Sequence: Synthetic oligonucleotide
ugaacucaaugucuucucu

SEQ ID NO: 878451 - RNA, 19 nt, Artificial Sequence
  Description of Artificial Sequence: Synthetic oligonucleotide
uaagaucuacacugguagc

SEQ ID NO: 878452 - RNA, 19 nt, Artificial Sequence
  Description of Artificial Sequence: Synthetic oligonucleotide
aaacaaaugucaacuggga

SEQ ID NO: 878453 - RNA, 19 nt, Artificial Sequence
  Description of Artificial Sequence: Synthetic oligonucleotide
aagcgcaucucuuaagaua

SEQ ID NO: 878454 - RNA, 19 nt, Artificial Sequence
  Description of Artificial Sequence: Synthetic oligonucleotide
cauggcaacuuugacgacg

SEQ ID NO: 878455 - RNA, 19 nt, Artificial Sequence
  Description of Artificial Sequence: Synthetic oligonucleotide
agcuaguguagauggaaug

SEQ ID NO: 878456 - RNA, 19 nt, Artificial Sequence
  Description of Artificial Sequence: Synthetic oligonucleotide
aguucccagacauggaaca

SEQ ID NO: 878457 - RNA, 19 nt, Artificial Sequence
  Description of Artificial Sequence: Synthetic oligonucleotide
aguacuuuguccauauggu

SEQ ID NO: 878458 - RNA, 19 nt, Artificial Sequence
  Description of Artificial Sequence: Synthetic oligonucleotide
accaguuuguuagaaccac

SEQ ID NO: 878459 - RNA, 19 nt, Artificial Sequence
  Description of Artificial Sequence: Synthetic oligonucleotide
uaguguagauggaaugacu

SEQ ID NO: 878460 - RNA, 19 nt, Artificial Sequence
  Description of Artificial Sequence: Synthetic oligonucleotide
auuugauuauccauaucug

SEQ ID NO: 878461 - RNA, 19 nt, Artificial Sequence
  Description of Artificial Sequence: Synthetic oligonucleotide
cuaagcagcgaauaacaca

SEQ ID NO: 878462 - RNA, 19 nt, Artificial Sequence
  Description of Artificial Sequence: Synthetic oligonucleotide
caaucacuuucauuacugc

SEQ ID NO: 878463 - RNA, 19 nt, Artificial Sequence
  Description of Artificial Sequence: Synthetic oligonucleotide
ucgagacaugucaguaagg

SEQ ID NO: 878464 - RNA, 19 nt, Artificial Sequence
  Description of Artificial Sequence: Synthetic oligonucleotide
gucagauacuacuauuuga

SEQ ID NO: 878465 - RNA, 19 nt, Artificial Sequence
  Description of Artificial Sequence: Synthetic oligonucleotide
uuguaacuguuuugccugg

SEQ ID NO: 878466 - RNA, 19 nt, Artificial Sequence
  Description of Artificial Sequence: Synthetic oligonucleotide
ucauccagauuaucgagua

SEQ ID NO: 878467 - RNA, 19 nt, Artificial Sequence
  Description of Artificial Sequence: Synthetic oligonucleotide
gguucaggaggaccgaugg

SEQ ID NO: 878468 - RNA, 19 nt, Artificial Sequence
  Description of Artificial Sequence: Synthetic oligonucleotide
agcagaacccagcauguca

SEQ ID NO: 878469 - RNA, 19 nt, Artificial Sequence
  Description of Artificial Sequence: Synthetic oligonucleotide
uaucgaguauuuaccacau

SEQ ID NO: 878470 - RNA, 19 nt, Artificial Sequence
  Description of Artificial Sequence: Synthetic oligonucleotide
accgccugcaauaagagcu

SEQ ID NO: 878471 - RNA, 19 nt, Artificial Sequence
  Description of Artificial Sequence: Synthetic oligonucleotide
caguaaggauuucaagacc

SEQ ID NO: 878472 - RNA, 19 nt, Artificial Sequence
  Description of Artificial Sequence: Synthetic oligonucleotide
aaaugauaguuggauguau

SEQ ID NO: 878473 - RNA, 19 nt, Artificial Sequence
  Description of Artificial Sequence: Synthetic oligonucleotide
ucuacacugguagccgugg

SEQ ID NO: 878474 - RNA, 19 nt, Artificial Sequence
  Description of Artificial Sequence: Synthetic oligonucleotide
aaauugacuuccucugcua

SEQ ID NO: 878475 - RNA, 19 nt, Artificial Sequence
  Description of Artificial Sequence: Synthetic oligonucleotide
aaugaagugguugcacuau

SEQ ID NO: 878476 - RNA, 19 nt, Artificial Sequence
  Description of Artificial Sequence: Synthetic oligonucleotide
aacugguuugguuccaauu

SEQ ID NO: 878477 - RNA, 19 nt, Artificial Sequence
  Description of Artificial Sequence: Synthetic oligonucleotide
acuaagcgcaucucuuaag

SEQ ID NO: 878478 - RNA, 19 nt, Artificial Sequence
  Description of Artificial Sequence: Synthetic oligonucleotide
ugcugggugcaauacuugc

SEQ ID NO: 878479 - RNA, 19 nt, Artificial Sequence
  Description of Artificial Sequence: Synthetic oligonucleotide
acuaagcagcgaauaacac

SEQ ID NO: 878480 - RNA, 19 nt, Artificial Sequence
  Description of Artificial Sequence: Synthetic oligonucleotide
uccggacaguuucaguugc

SEQ ID NO: 878481 - RNA, 19 nt, Artificial Sequence
  Description of Artificial Sequence: Synthetic oligonucleotide
gauggacacggauuccggc

SEQ ID NO: 878482 - RNA, 19 nt, Artificial Sequence
  Description of Artificial Sequence: Synthetic oligonucleotide
ugacaacugauguggugcc

SEQ ID NO: 878483 - RNA, 19 nt, Artificial Sequence
  Description of Artificial Sequence: Synthetic oligonucleotide
ggucacaucaccuuuucca

SEQ ID NO: 878484 - RNA, 19 nt, Artificial Sequence
  Description of Artificial Sequence: Synthetic oligonucleotide
cacgaacacaguaggauuc

SEQ ID NO: 878485 - RNA, 19 nt, Artificial Sequence
  Description of Artificial Sequence: Synthetic oligonucleotide
guauuuaccacaucaucua

SEQ ID NO: 878486 - RNA, 19 nt, Artificial Sequence
  Description of Artificial Sequence: Synthetic oligonucleotide
auagucagauacuacuauu

SEQ ID NO: 878487 - RNA, 19 nt, Artificial Sequence
  Description of Artificial Sequence: Synthetic oligonucleotide
acgaaccacaauuguaacu

SEQ ID NO: 878488 - RNA, 19 nt, Artificial Sequence
  Description of Artificial Sequence: Synthetic oligonucleotide
ucuugagaugccagaauuu

SEQ ID NO: 878489 - RNA, 19 nt, Artificial Sequence
  Description of Artificial Sequence: Synthetic oligonucleotide
guagaagcuugguacagga

SEQ ID NO: 878490 - RNA, 19 nt, Artificial Sequence
  Description of Artificial Sequence: Synthetic oligonucleotide
cauuuaaauugacuuccuc

SEQ ID NO: 878491 - RNA, 19 nt, Artificial Sequence
  Description of Artificial Sequence: Synthetic oligonucleotide
cauaugguaccagucaguc

SEQ ID NO: 878492 - RNA, 19 nt, Artificial Sequence
  Description of Artificial Sequence: Synthetic oligonucleotide
agauagacuucuguaugag

SEQ ID NO: 878493 - RNA, 19 nt, Artificial Sequence
  Description of Artificial Sequence: Synthetic oligonucleotide
agucaucuauggucccacc

SEQ ID NO: 878494 - RNA, 19 nt, Artificial Sequence
  Description of Artificial Sequence: Synthetic oligonucleotide
ucuuuacuaagcagcgaau

SEQ ID NO: 878495 - RNA, 19 nt, Artificial Sequence
  Description of Artificial Sequence: Synthetic oligonucleotide
cacucaaaguucuugagua

SEQ ID NO: 878496 - RNA, 19 nt, Artificial Sequence
  Description of Artificial Sequence: Synthetic oligonucleotide
aucuauggucccaccaagc

SEQ ID NO: 878497 - RNA, 19 nt, Artificial Sequence
  Description of Artificial Sequence: Synthetic oligonucleotide
uugacgacgucugcgcggg

SEQ ID NO: 878498 - RNA, 19 nt, Artificial Sequence
  Description of Artificial Sequence: Synthetic oligonucleotide
guaugagaaggacauuaca

SEQ ID NO: 878499 - RNA, 19 nt, Artificial Sequence
  Description of Artificial Sequence: Synthetic oligonucleotide
uccggcauggcaacuuuga

SEQ ID NO: 878500 - RNA, 19 nt, Artificial Sequence
  Description of Artificial Sequence: Synthetic oligonucleotide
aaugauaguuggauguaua

SEQ ID NO: 878501 - RNA, 19 nt, Artificial Sequence
  Description of Artificial Sequence: Synthetic oligonucleotide
gcggaaauguugcugaagc

SEQ ID NO: 878502 - RNA, 19 nt, Artificial Sequence
  Description of Artificial Sequence: Synthetic oligonucleotide
cauaucuguuuuaggagca

SEQ ID NO: 878503 - RNA, 19 nt, Artificial Sequence
  Description of Artificial Sequence: Synthetic oligonucleotide
cuugaguacucagucaguc

SEQ ID NO: 878504 - RNA, 19 nt, Artificial Sequence
  Description of Artificial Sequence: Synthetic oligonucleotide
gaccgauggacacggauuc

SEQ ID NO: 878505 - RNA, 19 nt, Artificial Sequence
  Description of Artificial Sequence: Synthetic oligonucleotide
cuaguguagauggaaugac

SEQ ID NO: 878506 - RNA, 19 nt, Artificial Sequence
  Description of Artificial Sequence: Synthetic oligonucleotide
uguaacuguuuugccuggg

SEQ ID NO: 878507 - RNA, 19 nt, Artificial Sequence
  Description of Artificial Sequence: Synthetic oligonucleotide
caucuauggucccaccaag

SEQ ID NO: 878508 - RNA, 19 nt, Artificial Sequence
  Description of Artificial Sequence: Synthetic oligonucleotide
gaaccacgaaccacaauug

SEQ ID NO: 878509 - RNA, 19 nt, Artificial Sequence
  Description of Artificial Sequence: Synthetic oligonucleotide
uacacugguagccguggcu

SEQ ID NO: 878510 - RNA, 19 nt, Artificial Sequence
  Description of Artificial Sequence: Synthetic oligonucleotide
gaagcuugguacaggaguc

SEQ ID NO: 878511 - RNA, 19 nt, Artificial Sequence
  Description of Artificial Sequence: Synthetic oligonucleotide
cuuucggacauuaaugccu

SEQ ID NO: 878512 - RNA, 19 nt, Artificial Sequence
  Description of Artificial Sequence: Synthetic oligonucleotide
aaaugggauucaggccagc

SEQ ID NO: 878513 - RNA, 19 nt, Artificial Sequence
  Description of Artificial Sequence: Synthetic oligonucleotide
aauggaacgcucagcuucu

SEQ ID NO: 878514 - RNA, 19 nt, Artificial Sequence
  Description of Artificial Sequence: Synthetic oligonucleotide
ugaagugguugcacuauuu

SEQ ID NO: 878515 - RNA, 19 nt, Artificial Sequence
  Description of Artificial Sequence: Synthetic oligonucleotide
uguauaccuuucuguagaa

SEQ ID NO: 878516 - RNA, 19 nt, Artificial Sequence
  Description of Artificial Sequence: Synthetic oligonucleotide
gaagcacucgauccaucug

SEQ ID NO: 878517 - RNA, 19 nt, Artificial Sequence
  Description of Artificial Sequence: Synthetic oligonucleotide
cuuugacgacgucugcgcg

SEQ ID NO: 878518 - RNA, 19 nt, Artificial Sequence
  Description of Artificial Sequence: Synthetic oligonucleotide
cacgauuuuaauaucucua

SEQ ID NO: 878519 - RNA, 19 nt, Artificial Sequence
  Description of Artificial Sequence: Synthetic oligonucleotide
ucuugaguacucagucagu

SEQ ID NO: 878520 - RNA, 19 nt, Artificial Sequence
  Description of Artificial Sequence: Synthetic oligonucleotide
caguuuguuagaaccacga

SEQ ID NO: 878521 - RNA, 19 nt, Artificial Sequence
  Description of Artificial Sequence: Synthetic oligonucleotide
ccaauugucuuacaaauga

SEQ ID NO: 878522 - RNA, 19 nt, Artificial Sequence
  Description of Artificial Sequence: Synthetic oligonucleotide
cugcauugacacucauugg

SEQ ID NO: 878523 - RNA, 19 nt, Artificial Sequence
  Description of Artificial Sequence: Synthetic oligonucleotide
caucaugaauggaacgcuc

SEQ ID NO: 878524 - RNA, 19 nt, Artificial Sequence
  Description of Artificial Sequence: Synthetic oligonucleotide
ggugagaacaagcccuucc

SEQ ID NO: 878525 - RNA, 19 nt, Artificial Sequence
  Description of Artificial Sequence: Synthetic oligonucleotide
ucugucgcucaguugcaca

SEQ ID NO: 878526 - RNA, 19 nt, Artificial Sequence
  Description of Artificial Sequence: Synthetic oligonucleotide
uacguucuccggcauggca

SEQ ID NO: 878527 - RNA, 19 nt, Artificial Sequence
  Description of Artificial Sequence: Synthetic oligonucleotide
cacaggucgagacauguca

SEQ ID NO: 878528 - RNA, 19 nt, Artificial Sequence
  Description of Artificial Sequence: Synthetic oligonucleotide
auacuugcauuuguuucag

SEQ ID NO: 878529 - RNA, 19 nt, Artificial Sequence
  Description of Artificial Sequence: Synthetic oligonucleotide
acacucauuggagagagua

SEQ ID NO: 878530 - RNA, 19 nt, Artificial Sequence
  Description of Artificial Sequence: Synthetic oligonucleotide
acccuuucggacauuaaug

SEQ ID NO: 878531 - RNA, 19 nt, Artificial Sequence
  Description of Artificial Sequence: Synthetic oligonucleotide
aguguagauggaaugacuu

SEQ ID NO: 878532 - RNA, 19 nt, Artificial Sequence
  Description of Artificial Sequence: Synthetic oligonucleotide
uggacacggauuccggccu

SEQ ID NO: 878533 - RNA, 19 nt, Artificial Sequence
  Description of Artificial Sequence: Synthetic oligonucleotide
acuauuuaacaaaguuucu

SEQ ID NO: 878534 - RNA, 19 nt, Artificial Sequence
  Description of Artificial Sequence: Synthetic oligonucleotide
gaagugguugcacuauuua

SEQ ID NO: 878535 - RNA, 19 nt, Artificial Sequence
  Description of Artificial Sequence: Synthetic oligonucleotide
gaaaugggauucaggccag

SEQ ID NO: 878536 - RNA, 19 nt, Artificial Sequence
  Description of Artificial Sequence: Synthetic oligonucleotide
auaugguaccagucaguca

SEQ ID NO: 878537 - RNA, 19 nt, Artificial Sequence
  Description of Artificial Sequence: Synthetic oligonucleotide
ugcggaguaacggucuccc

SEQ ID NO: 878538 - RNA, 19 nt, Artificial Sequence
  Description of Artificial Sequence: Synthetic oligonucleotide
aguacucagucagucgcag

SEQ ID NO: 878539 - RNA, 19 nt, Artificial Sequence
  Description of Artificial Sequence: Synthetic oligonucleotide
ucacuaagcgcaucucuua

SEQ ID NO: 878540 - RNA, 19 nt, Artificial Sequence
  Description of Artificial Sequence: Synthetic oligonucleotide
cccuuucggacauuaaugc

SEQ ID NO: 878541 - RNA, 19 nt, Artificial Sequence
  Description of Artificial Sequence: Synthetic oligonucleotide
ugguugcacuauuuaacaa

SEQ ID NO: 878542 - RNA, 19 nt, Artificial Sequence
  Description of Artificial Sequence: Synthetic oligonucleotide
gugagaacaagcccuucca

SEQ ID NO: 878543 - RNA, 19 nt, Artificial Sequence
  Description of Artificial Sequence: Synthetic oligonucleotide
aaucaccaguuuguuagaa

SEQ ID NO: 878544 - RNA, 19 nt, Artificial Sequence
  Description of Artificial Sequence: Synthetic oligonucleotide
auccagauuaucgaguauu

SEQ ID NO: 878545 - RNA, 19 nt, Artificial Sequence
  Description of Artificial Sequence: Synthetic oligonucleotide
guguagauggaaugacuuc

SEQ ID NO: 878546 - RNA, 19 nt, Artificial Sequence
  Description of Artificial Sequence: Synthetic oligonucleotide
aucugcgaaagcacgaaca

SEQ ID NO: 878547 - RNA, 19 nt, Artificial Sequence
  Description of Artificial Sequence: Synthetic oligonucleotide
uuucucugucgcucaguug

SEQ ID NO: 878548 - RNA, 19 nt, Artificial Sequence
  Description of Artificial Sequence: Synthetic oligonucleotide
ucuauuucuggagcaccac

SEQ ID NO: 878549 - RNA, 19 nt, Artificial Sequence
  Description of Artificial Sequence: Synthetic oligonucleotide
gaucacuaagcgcaucucu

SEQ ID NO: 878550 - RNA, 19 nt, Artificial Sequence
  Description of Artificial Sequence: Synthetic oligonucleotide
cauugacacucauuggaga

SEQ ID NO: 878551 - RNA, 19 nt, Artificial Sequence
  Description of Artificial Sequence: Synthetic oligonucleotide
uuuaaccaccaugauccuc

SEQ ID NO: 878552 - RNA, 19 nt, Artificial Sequence
  Description of Artificial Sequence: Synthetic oligonucleotide
ucuguuuuaggagcagaua

SEQ ID NO: 878553 - RNA, 19 nt, Artificial Sequence
  Description of Artificial Sequence: Synthetic oligonucleotide
ugcacaggucgagacaugu

SEQ ID NO: 878554 - RNA, 19 nt, Artificial Sequence
  Description of Artificial Sequence: Synthetic oligonucleotide
auguaaugcaagaucacua

SEQ ID NO: 878555 - RNA, 19 nt, Artificial Sequence
  Description of Artificial Sequence: Synthetic oligonucleotide
agcaccaccgccugcaaua

SEQ ID NO: 878556 - RNA, 19 nt, Artificial Sequence
  Description of Artificial Sequence: Synthetic oligonucleotide
aacgcucagcuucuucaau

SEQ ID NO: 878557 - RNA, 19 nt, Artificial Sequence
  Description of Artificial Sequence: Synthetic oligonucleotide
auuauccauaucuguuuua

SEQ ID NO: 878558 - RNA, 19 nt, Artificial Sequence
  Description of Artificial Sequence: Synthetic oligonucleotide
cacgaaccacaauuguaac

SEQ ID NO: 878559 - RNA, 19 nt, Artificial Sequence
  Description of Artificial Sequence: Synthetic oligonucleotide
aacugugaagaagcaaguu

SEQ ID NO: 878560 - RNA, 19 nt, Artificial Sequence
  Description of Artificial Sequence: Synthetic oligonucleotide
ugggcauagucagauacua

SEQ ID NO: 878561 - RNA, 19 nt, Artificial Sequence
  Description of Artificial Sequence: Synthetic oligonucleotide
caugccgguuucuuaguuc

SEQ ID NO: 878562 - RNA, 19 nt, Artificial Sequence
  Description of Artificial Sequence: Synthetic oligonucleotide
cuaagagagagccagcaau

SEQ ID NO: 878563 - RNA, 19 nt, Artificial Sequence
  Description of Artificial Sequence: Synthetic oligonucleotide
cuugaguauugagagacaa

SEQ ID NO: 878564 - RNA, 19 nt, Artificial Sequence
  Description of Artificial Sequence: Synthetic oligonucleotide
uacaggagucuaagagaga

SEQ ID NO: 878565 - RNA, 19 nt, Artificial Sequence
  Description of Artificial Sequence: Synthetic oligonucleotide
ggaacgcucagcuucuuca

SEQ ID NO: 878566 - RNA, 19 nt, Artificial Sequence
  Description of Artificial Sequence: Synthetic oligonucleotide
guacucagucagucgcagg

SEQ ID NO: 878567 - RNA, 19 nt, Artificial Sequence
  Description of Artificial Sequence: Synthetic oligonucleotide
acgacgucugcgcggguuc

SEQ ID NO: 878568 - RNA, 19 nt, Artificial Sequence
  Description of Artificial Sequence: Synthetic oligonucleotide
aucauuuguaauggucaca

SEQ ID NO: 878569 - RNA, 19 nt, Artificial Sequence
  Description of Artificial Sequence: Synthetic oligonucleotide
ggauguauaccuuucugua

SEQ ID NO: 878570 - RNA, 19 nt, Artificial Sequence
  Description of Artificial Sequence: Synthetic oligonucleotide
ugucaguagugaacugguc

SEQ ID NO: 878571 - RNA, 19 nt, Artificial Sequence
  Description of Artificial Sequence: Synthetic oligonucleotide
cucagaaaugauaguugga

SEQ ID NO: 878572 - RNA, 19 nt, Artificial Sequence
  Description of Artificial Sequence: Synthetic oligonucleotide
gaaaugauaguuggaugua

SEQ ID NO: 878573 - RNA, 19 nt, Artificial Sequence
  Description of Artificial Sequence: Synthetic oligonucleotide
ucguacaaccuguaaucuu

SEQ ID NO: 878574 - RNA, 19 nt, Artificial Sequence
  Description of Artificial Sequence: Synthetic oligonucleotide
ugucgcucaguugcacagg

SEQ ID NO: 878575 - RNA, 19 nt, Artificial Sequence
  Description of Artificial Sequence: Synthetic oligonucleotide
uacugcauugacacucauu

SEQ ID NO: 878576 - RNA, 19 nt, Artificial Sequence
  Description of Artificial Sequence: Synthetic oligonucleotide
caauugucuuacaaaugaa

SEQ ID NO: 878577 - RNA, 19 nt, Artificial Sequence
  Description of Artificial Sequence: Synthetic oligonucleotide
acaggucgagacaugucag

SEQ ID NO: 878578 - RNA, 19 nt, Artificial Sequence
  Description of Artificial Sequence: Synthetic oligonucleotide
guaggcgccuuucccgcgg

SEQ ID NO: 878579 - RNA, 19 nt, Artificial Sequence
  Description of Artificial Sequence: Synthetic oligonucleotide
gggcaugccgguuucuuag

SEQ ID NO: 878580 - RNA, 19 nt, Artificial Sequence
  Description of Artificial Sequence: Synthetic oligonucleotide
accuguaaucuugaauagu

SEQ ID NO: 878581 - RNA, 19 nt, Artificial Sequence
  Description of Artificial Sequence: Synthetic oligonucleotide
gucuaagagagagccagca

SEQ ID NO: 878582 - RNA, 19 nt, Artificial Sequence
  Description of Artificial Sequence: Synthetic oligonucleotide
ucucugucgcucaguugca

SEQ ID NO: 878583 - RNA, 19 nt, Artificial Sequence
  Description of Artificial Sequence: Synthetic oligonucleotide
ggaggaccgauggacacgg

SEQ ID NO: 878584 - RNA, 19 nt, Artificial Sequence
  Description of Artificial Sequence: Synthetic oligonucleotide
accaccgccugcaauaaga

SEQ ID NO: 878585 - RNA, 19 nt, Artificial Sequence
  Description of Artificial Sequence: Synthetic oligonucleotide
cuuuacuaagcagcgaaua

SEQ ID NO: 878586 - RNA, 19 nt, Artificial Sequence
  Description of Artificial Sequence: Synthetic oligonucleotide
aggaggaccgauggacacg

SEQ ID NO: 878587 - RNA, 19 nt, Artificial Sequence
  Description of Artificial Sequence: Synthetic oligonucleotide
aggaccgauggacacggau

SEQ ID NO: 878588 - RNA, 19 nt, Artificial Sequence
  Description of Artificial Sequence: Synthetic oligonucleotide
gcauugacacucauuggag

SEQ ID NO: 878589 - RNA, 19 nt, Artificial Sequence
  Description of Artificial Sequence: Synthetic oligonucleotide
accgauggacacggauucc

SEQ ID NO: 878590 - RNA, 19 nt, Artificial Sequence
  Description of Artificial Sequence: Synthetic oligonucleotide
caucugcgaaagcacgaac

SEQ ID NO: 878591 - RNA, 19 nt, Artificial Sequence
  Description of Artificial Sequence: Synthetic oligonucleotide
agggccaacucuauuucug

SEQ ID NO: 878592 - RNA, 19 nt, Artificial Sequence
  Description of Artificial Sequence: Synthetic oligonucleotide
cauuuguaauggucacauc

SEQ ID NO: 878593 - RNA, 19 nt, Artificial Sequence
  Description of Artificial Sequence: Synthetic oligonucleotide
auuccacccuuucggacau

SEQ ID NO: 878594 - RNA, 19 nt, Artificial Sequence
  Description of Artificial Sequence: Synthetic oligonucleotide
augucaguaaggauuucaa

SEQ ID NO: 878595 - RNA, 19 nt, Artificial Sequence
  Description of Artificial Sequence: Synthetic oligonucleotide
acaacugauguggugccau

SEQ ID NO: 878596 - RNA, 19 nt, Artificial Sequence
  Description of Artificial Sequence: Synthetic oligonucleotide
uugucgcgguccugguagg

SEQ ID NO: 878597 - RNA, 19 nt, Artificial Sequence
  Description of Artificial Sequence: Synthetic oligonucleotide
auuccggccugcugcggag

SEQ ID NO: 878598 - RNA, 19 nt, Artificial Sequence
  Description of Artificial Sequence: Synthetic oligonucleotide
uugcuagggucagagcacu

SEQ ID NO: 878599 - RNA, 19 nt, Artificial Sequence
  Description of Artificial Sequence: Synthetic oligonucleotide
auggcaacuuugacgacgu

SEQ ID NO: 878600 - RNA, 19 nt, Artificial Sequence
  Description of Artificial Sequence: Synthetic oligonucleotide
gcuaguguagauggaauga

SEQ ID NO: 878601 - RNA, 19 nt, Artificial Sequence
  Description of Artificial Sequence: Synthetic oligonucleotide
gaacgcucagcuucuucaa

SEQ ID NO: 878602 - RNA, 19 nt, Artificial Sequence
  Description of Artificial Sequence: Synthetic oligonucleotide
caccgccugcaauaagagc

SEQ ID NO: 878603 - RNA, 19 nt, Artificial Sequence
  Description of Artificial Sequence: Synthetic oligonucleotide
ggagcuacguucuccggca

SEQ ID NO: 878604 - RNA, 19 nt, Artificial Sequence
  Description of Artificial Sequence: Synthetic oligonucleotide
guaauggucacaucaccuu

SEQ ID NO: 878605 - RNA, 19 nt, Artificial Sequence
  Description of Artificial Sequence: Synthetic oligonucleotide
ugcuagggucagagcacug

SEQ ID NO: 878606 - RNA, 19 nt, Artificial Sequence
  Description of Artificial Sequence: Synthetic oligonucleotide
gcagcgaauaacacaaaga

SEQ ID NO: 878607 - RNA, 19 nt, Artificial Sequence
  Description of Artificial Sequence: Synthetic oligonucleotide
uugcacaggucgagacaug

SEQ ID NO: 878608 - RNA, 19 nt, Artificial Sequence
  Description of Artificial Sequence: Synthetic oligonucleotide
gaguauugagagacaaccu

SEQ ID NO: 878609 - RNA, 19 nt, Artificial Sequence
  Description of Artificial Sequence: Synthetic oligonucleotide
aaccgcuuuggccgcggaa

SEQ ID NO: 878610 - RNA, 19 nt, Artificial Sequence
  Description of Artificial Sequence: Synthetic oligonucleotide
cucauccagauuaucgagu

SEQ ID NO: 878611 - RNA, 19 nt, Artificial Sequence
  Description of Artificial Sequence: Synthetic oligonucleotide
accacgaaccacaauugua

SEQ ID NO: 878612 - RNA, 19 nt, Artificial Sequence
  Description of Artificial Sequence: Synthetic oligonucleotide
ccacgaaccacaauuguaa

SEQ ID NO: 878613 - RNA, 19 nt, Artificial Sequence
  Description of Artificial Sequence: Synthetic oligonucleotide
gucgcgguccugguaggcg

SEQ ID NO: 878614 - RNA, 19 nt, Artificial Sequence
  Description of Artificial Sequence: Synthetic oligonucleotide
caguugcuagggucagagc

SEQ ID NO: 878615 - RNA, 19 nt, Artificial Sequence
  Description of Artificial Sequence: Synthetic oligonucleotide
accgcuuuggccgcggaaa

SEQ ID NO: 878616 - RNA, 19 nt, Artificial Sequence
  Description of Artificial Sequence: Synthetic oligonucleotide
ucuccggcauggcaacuuu

SEQ ID NO: 878617 - RNA, 19 nt, Artificial Sequence
  Description of Artificial Sequence: Synthetic oligonucleotide
aucuacacugguagccgug

SEQ ID NO: 878618 - RNA, 19 nt, Artificial Sequence
  Description of Artificial Sequence: Synthetic oligonucleotide
cuuucccgcggcugcccgg

SEQ ID NO: 878619 - RNA, 19 nt, Artificial Sequence
  Description of Artificial Sequence: Synthetic oligonucleotide
ugcuccggacaguuucagu

SEQ ID NO: 878620 - RNA, 19 nt, Artificial Sequence
  Description of Artificial Sequence: Synthetic oligonucleotide
gaguacucagucagucgca

SEQ ID NO: 878621 - RNA, 19 nt, Artificial Sequence
  Description of Artificial Sequence: Synthetic oligonucleotide
cacucauuggagagaguaa

SEQ ID NO: 878622 - RNA, 19 nt, Artificial Sequence
  Description of Artificial Sequence: Synthetic oligonucleotide
uccacccuuucggacauua

SEQ ID NO: 878623 - RNA, 19 nt, Artificial Sequence
  Description of Artificial Sequence: Synthetic oligonucleotide
cucaacucuugagaugcca

SEQ ID NO: 878624 - RNA, 19 nt, Artificial Sequence
  Description of Artificial Sequence: Synthetic oligonucleotide
cacuaagcgcaucucuuaa

SEQ ID NO: 878625 - RNA, 19 nt, Artificial Sequence
  Description of Artificial Sequence: Synthetic oligonucleotide
acuugaguauugagagaca

SEQ ID NO: 878626 - RNA, 19 nt, Artificial Sequence
  Description of Artificial Sequence: Synthetic oligonucleotide
uuucccgcggcugcccggc

SEQ ID NO: 878627 - RNA, 19 nt, Artificial Sequence
  Description of Artificial Sequence: Synthetic oligonucleotide
guauugagagacaaccuuu

SEQ ID NO: 878628 - RNA, 19 nt, Artificial Sequence
  Description of Artificial Sequence: Synthetic oligonucleotide
aggucgagacaugucagua

SEQ ID NO: 878629 - RNA, 19 nt, Artificial Sequence
  Description of Artificial Sequence: Synthetic oligonucleotide
cauuacauccuguuuucuu

SEQ ID NO: 878630 - RNA, 19 nt, Artificial Sequence
  Description of Artificial Sequence: Synthetic oligonucleotide
uucaguugcuagggucaga

SEQ ID NO: 878631 - RNA, 19 nt, Artificial Sequence
  Description of Artificial Sequence: Synthetic oligonucleotide
ccaccaagcuucuucacga

SEQ ID NO: 878632 - RNA, 19 nt, Artificial Sequence
  Description of Artificial Sequence: Synthetic oligonucleotide
ccgauggacacggauuccg

SEQ ID NO: 878633 - RNA, 19 nt, Artificial Sequence
  Description of Artificial Sequence: Synthetic oligonucleotide
cuccggcauggcaacuuug

SEQ ID NO: 878634 - RNA, 19 nt, Artificial Sequence
  Description of Artificial Sequence: Synthetic oligonucleotide
cucugcuaacucagcagaa

SEQ ID NO: 878635 - RNA, 19 nt, Artificial Sequence
  Description of Artificial Sequence: Synthetic oligonucleotide
gguaggcgccuuucccgcg

SEQ ID NO: 878636 - RNA, 19 nt, Artificial Sequence
  Description of Artificial Sequence: Synthetic oligonucleotide
cacggauuccggccugcug

SEQ ID NO: 878637 - RNA, 19 nt, Artificial Sequence
  Description of Artificial Sequence: Synthetic oligonucleotide
ggucgagacaugucaguaa

SEQ ID NO: 878638 - RNA, 19 nt, Artificial Sequence
  Description of Artificial Sequence: Synthetic oligonucleotide
ucgcucaguugcacagguc

SEQ ID NO: 878639 - RNA, 19 nt, Artificial Sequence
  Description of Artificial Sequence: Synthetic oligonucleotide
ugucgcgguccugguaggc

SEQ ID NO: 878640 - RNA, 19 nt, Artificial Sequence
  Description of Artificial Sequence: Synthetic oligonucleotide
ccagaaccauuuaaauuga

SEQ ID NO: 878641 - RNA, 19 nt, Artificial Sequence
  Description of Artificial Sequence: Synthetic oligonucleotide
augcuccggacaguuucag

SEQ ID NO: 878642 - RNA, 19 nt, Artificial Sequence
  Description of Artificial Sequence: Synthetic oligonucleotide
cugcggaguaacggucucc

SEQ ID NO: 878643 - RNA, 19 nt, Artificial Sequence
  Description of Artificial Sequence: Synthetic oligonucleotide
agucagucgcagggccaac

SEQ ID NO: 878644 - RNA, 19 nt, Artificial Sequence
  Description of Artificial Sequence: Synthetic oligonucleotide
ccaccgccugcaauaagag

SEQ ID NO: 878645 - RNA, 19 nt, Artificial Sequence
  Description of Artificial Sequence: Synthetic oligonucleotide
cugcgaaagcacgaacaca

SEQ ID NO: 878646 - RNA, 19 nt, Artificial Sequence
  Description of Artificial Sequence: Synthetic oligonucleotide
gcaugucaguagugaacug

SEQ ID NO: 878647 - RNA, 19 nt, Artificial Sequence
  Description of Artificial Sequence: Synthetic oligonucleotide
ggcucguacaaccuguaau

SEQ ID NO: 878648 - RNA, 19 nt, Artificial Sequence
  Description of Artificial Sequence: Synthetic oligonucleotide
ggaaugacuuccauggcau

SEQ ID NO: 878649 - RNA, 19 nt, Artificial Sequence
  Description of Artificial Sequence: Synthetic oligonucleotide
gacgucugcgcggguucag

SEQ ID NO: 878650 - RNA, 19 nt, Artificial Sequence
  Description of Artificial Sequence: Synthetic oligonucleotide
ccuuuagguccaaggcuug

SEQ ID NO: 878651 - RNA, 19 nt, Artificial Sequence
  Description of Artificial Sequence: Synthetic oligonucleotide
uguuuugccugggcucgua

SEQ ID NO: 878652 - RNA, 19 nt, Artificial Sequence
  Description of Artificial Sequence: Synthetic oligonucleotide
ggccaacucuauuucugga

SEQ ID NO: 878653 - RNA, 19 nt, Artificial Sequence
  Description of Artificial Sequence: Synthetic oligonucleotide
guagccguggcugggucaa

SEQ ID NO: 878654 - RNA, 19 nt, Artificial Sequence
  Description of Artificial Sequence: Synthetic oligonucleotide
ugggccggcuugucgcggu

SEQ ID NO: 878655 - RNA, 19 nt, Artificial Sequence
  Description of Artificial Sequence: Synthetic oligonucleotide
ucgcagggccaacucuauu

SEQ ID NO: 878656 - RNA, 19 nt, Artificial Sequence
  Description of Artificial Sequence: Synthetic oligonucleotide
caucaucuauuuucagaau

SEQ ID NO: 878657 - RNA, 19 nt, Artificial Sequence
  Description of Artificial Sequence: Synthetic oligonucleotide
agcaaccgcuuuggccgcg

SEQ ID NO: 878658 - RNA, 19 nt, Artificial Sequence
  Description of Artificial Sequence: Synthetic oligonucleotide
uggccgcggaaauguugcu

SEQ ID NO: 878659 - RNA, 19 nt, Artificial Sequence
  Description of Artificial Sequence: Synthetic oligonucleotide
ggcgccccgcuucugggag

SEQ ID NO: 878660 - RNA, 19 nt, Artificial Sequence
  Description of Artificial Sequence: Synthetic oligonucleotide
gcuagggucagagcacuga

SEQ ID NO: 878661 - RNA, 19 nt, Artificial Sequence
  Description of Artificial Sequence: Synthetic oligonucleotide
gaccccuuuccaaagcuuu

SEQ ID NO: 878662 - RNA, 19 nt, Artificial Sequence
  Description of Artificial Sequence: Synthetic oligonucleotide
cuuuaaccaccaugauccu

SEQ ID NO: 878663 - RNA, 19 nt, Artificial Sequence
  Description of Artificial Sequence: Synthetic oligonucleotide
cuauggucccaccaagcuu

SEQ ID NO: 878664 - RNA, 19 nt, Artificial Sequence
  Description of Artificial Sequence: Synthetic oligonucleotide
caccaccgccugcaauaag

SEQ ID NO: 878665 - RNA, 19 nt, Artificial Sequence
  Description of Artificial Sequence: Synthetic oligonucleotide
cagcuaguguagauggaau

SEQ ID NO: 878666 - RNA, 19 nt, Artificial Sequence
  Description of Artificial Sequence: Synthetic oligonucleotide
gguagccguggcuggguca

SEQ ID NO: 878667 - RNA, 19 nt, Artificial Sequence
  Description of Artificial Sequence: Synthetic oligonucleotide
gggcauagucagauacuac

SEQ ID NO: 878668 - RNA, 19 nt, Artificial Sequence
  Description of Artificial Sequence: Synthetic oligonucleotide
caauaagagcucucuucuu

SEQ ID NO: 878669 - RNA, 19 nt, Artificial Sequence
  Description of Artificial Sequence: Synthetic oligonucleotide
cugcgcggguucaggagga

SEQ ID NO: 878670 - RNA, 19 nt, Artificial Sequence
  Description of Artificial Sequence: Synthetic oligonucleotide
agaccccuuuccaaagcuu

SEQ ID NO: 878671 - RNA, 19 nt, Artificial Sequence
  Description of Artificial Sequence: Synthetic oligonucleotide
gcuuuggccgcggaaaugu

SEQ ID NO: 878672 - RNA, 19 nt, Artificial Sequence
  Description of Artificial Sequence: Synthetic oligonucleotide
ggccgcggaaauguugcug

SEQ ID NO: 878673 - RNA, 19 nt, Artificial Sequence
  Description of Artificial Sequence: Synthetic oligonucleotide
gguccaaggcuuguccuaa

SEQ ID NO: 878674 - RNA, 19 nt, Artificial Sequence
  Description of Artificial Sequence: Synthetic oligonucleotide
acacggauuccggccugcu

SEQ ID NO: 878675 - RNA, 19 nt, Artificial Sequence
  Description of Artificial Sequence: Synthetic oligonucleotide
gcgccuuucccgcggcugc

SEQ ID NO: 878676 - RNA, 19 nt, Artificial Sequence
  Description of Artificial Sequence: Synthetic oligonucleotide
gcacgaacacaguaggauu

SEQ ID NO: 878677 - RNA, 19 nt, Artificial Sequence
  Description of Artificial Sequence: Synthetic oligonucleotide
ccggcauggcaacuuugac

SEQ ID NO: 878678 - RNA, 19 nt, Artificial Sequence
  Description of Artificial Sequence: Synthetic oligonucleotide
cgaaagcacgaacacagua

SEQ ID NO: 878679 - RNA, 19 nt, Artificial Sequence
  Description of Artificial Sequence: Synthetic oligonucleotide
cagggccaacucuauuucu

SEQ ID NO: 878680 - RNA, 19 nt, Artificial Sequence
  Description of Artificial Sequence: Synthetic oligonucleotide
cguucuccggcauggcaac

SEQ ID NO: 878681 - RNA, 19 nt, Artificial Sequence
  Description of Artificial Sequence: Synthetic oligonucleotide
gguaccagucagucagccu

SEQ ID NO: 878682 - RNA, 19 nt, Artificial Sequence
  Description of Artificial Sequence: Synthetic oligonucleotide
cggauuccggccugcugcg

SEQ ID NO: 878683 - RNA, 19 nt, Artificial Sequence
  Description of Artificial Sequence: Synthetic oligonucleotide
gcgggcgccccgcuucugg

SEQ ID NO: 878684 - RNA, 19 nt, Artificial Sequence
  Description of Artificial Sequence: Synthetic oligonucleotide
ccgccugcaauaagagcuc

SEQ ID NO: 878685 - RNA, 19 nt, Artificial Sequence
  Description of Artificial Sequence: Synthetic oligonucleotide
cuuuagguccaaggcuugu

SEQ ID NO: 878686 - RNA, 19 nt, Artificial Sequence
  Description of Artificial Sequence: Synthetic oligonucleotide
gcaucugcgaaagcacgaa

SEQ ID NO: 878687 - RNA, 19 nt, Artificial Sequence
  Description of Artificial Sequence: Synthetic oligonucleotide
gcugcggaguaacggucuc

SEQ ID NO: 878688 - RNA, 19 nt, Artificial Sequence
  Description of Artificial Sequence: Synthetic oligonucleotide
uucccgcggcugcccggcc

SEQ ID NO: 878689 - RNA, 19 nt, Artificial Sequence
  Description of Artificial Sequence: Synthetic oligonucleotide
gcucaguugcacaggucga

SEQ ID NO: 878690 - RNA, 19 nt, Artificial Sequence
  Description of Artificial Sequence: Synthetic oligonucleotide
ggcgccuuucccgcggcug

SEQ ID NO: 878691 - RNA, 19 nt, Artificial Sequence
  Description of Artificial Sequence: Synthetic oligonucleotide
gcaaccgcuuuggccgcgg

SEQ ID NO: 878692 - RNA, 19 nt, Artificial Sequence
  Description of Artificial Sequence: Synthetic oligonucleotide
cauccagauuaucgaguau

SEQ ID NO: 878693 - RNA, 19 nt, Artificial Sequence
  Description of Artificial Sequence: Synthetic oligonucleotide
ugcgcggguucaggaggac

SEQ ID NO: 878694 - RNA, 19 nt, Artificial Sequence
  Description of Artificial Sequence: Synthetic oligonucleotide
ccguggcugggucaaucac

SEQ ID NO: 878695 - RNA, 19 nt, Artificial Sequence
  Description of Artificial Sequence: Synthetic oligonucleotide
cagucgcagggccaacucu

SEQ ID NO: 878696 - RNA, 19 nt, Artificial Sequence
  Description of Artificial Sequence: Synthetic oligonucleotide
ccuugggcaugccgguuuc

SEQ ID NO: 878697 - RNA, 19 nt, Artificial Sequence
  Description of Artificial Sequence: Synthetic oligonucleotide
cgcggaaauguugcugaag

SEQ ID NO: 878698 - RNA, 19 nt, Artificial Sequence
  Description of Artificial Sequence: Synthetic oligonucleotide
aggcgccuuucccgcggcu

SEQ ID NO: 878699 - RNA, 19 nt, Artificial Sequence
  Description of Artificial Sequence: Synthetic oligonucleotide
gacgacgucugcgcggguu

SEQ ID NO: 878700 - RNA, 19 nt, Artificial Sequence
  Description of Artificial Sequence: Synthetic oligonucleotide
ccccugcuucuauauccug

SEQ ID NO: 878701 - RNA, 19 nt, Artificial Sequence
  Description of Artificial Sequence: Synthetic oligonucleotide
ggaccgauggacacggauu

SEQ ID NO: 878702 - RNA, 19 nt, Artificial Sequence
  Description of Artificial Sequence: Synthetic oligonucleotide
gcgcggguucaggaggacc

SEQ ID NO: 878703 - RNA, 19 nt, Artificial Sequence
  Description of Artificial Sequence: Synthetic oligonucleotide
gcaacugguuugguuccaa

SEQ ID NO: 878704 - RNA, 19 nt, Artificial Sequence
  Description of Artificial Sequence: Synthetic oligonucleotide
ggcaugccgguuucuuagu

SEQ ID NO: 878705 - RNA, 19 nt, Artificial Sequence
  Description of Artificial Sequence: Synthetic oligonucleotide
caaccgcuuuggccgcgga

SEQ ID NO: 878706 - RNA, 19 nt, Artificial Sequence
  Description of Artificial Sequence: Synthetic oligonucleotide
gggugagaacaagcccuuc

SEQ ID NO: 878707 - RNA, 19 nt, Artificial Sequence
  Description of Artificial Sequence: Synthetic oligonucleotide
cgaauaacacaaagagcau

SEQ ID NO: 878708 - RNA, 19 nt, Artificial Sequence
  Description of Artificial Sequence: Synthetic oligonucleotide
gggauucaggccagcauuu

SEQ ID NO: 878709 - RNA, 19 nt, Artificial Sequence
  Description of Artificial Sequence: Synthetic oligonucleotide
gcuugucgcgguccuggua

SEQ ID NO: 878710 - RNA, 19 nt, Artificial Sequence
  Description of Artificial Sequence: Synthetic oligonucleotide
cuuuggccgcggaaauguu

SEQ ID NO: 878711 - RNA, 19 nt, Artificial Sequence
  Description of Artificial Sequence: Synthetic oligonucleotide
guccaaggcuuguccuaau

SEQ ID NO: 878712 - RNA, 19 nt, Artificial Sequence
  Description of Artificial Sequence: Synthetic oligonucleotide
gcaagaucacuaagcgcau

SEQ ID NO: 878713 - RNA, 19 nt, Artificial Sequence
  Description of Artificial Sequence: Synthetic oligonucleotide
gcaugccgguuucuuaguu

SEQ ID NO: 878714 - RNA, 19 nt, Artificial Sequence
  Description of Artificial Sequence: Synthetic oligonucleotide
guucuccggcauggcaacu

SEQ ID NO: 878715 - RNA, 19 nt, Artificial Sequence
  Description of Artificial Sequence: Synthetic oligonucleotide
gcgccccgcuucugggagc

SEQ ID NO: 878716 - RNA, 19 nt, Artificial Sequence
  Description of Artificial Sequence: Synthetic oligonucleotide
gcgaaagcacgaacacagu

SEQ ID NO: 878717 - RNA, 19 nt, Artificial Sequence
  Description of Artificial Sequence: Synthetic oligonucleotide
gcggguucaggaggaccga

SEQ ID NO: 878718 - RNA, 19 nt, Artificial Sequence
  Description of Artificial Sequence: Synthetic oligonucleotide
cuguuuugccugggcucgu

SEQ ID NO: 878719 - RNA, 19 nt, Artificial Sequence
  Description of Artificial Sequence: Synthetic oligonucleotide
gccggcuugucgcgguccu

SEQ ID NO: 878720 - RNA, 19 nt, Artificial Sequence
  Description of Artificial Sequence: Synthetic oligonucleotide
ccgcggaaauguugcugaa

SEQ ID NO: 878721 - RNA, 19 nt, Artificial Sequence
  Description of Artificial Sequence: Synthetic oligonucleotide
ccggacaguuucaguugcu

SEQ ID NO: 878722 - RNA, 19 nt, Artificial Sequence
  Description of Artificial Sequence: Synthetic oligonucleotide
ccgcuuuggccgcggaaau

SEQ ID NO: 878723 - RNA, 19 nt, Artificial Sequence
  Description of Artificial Sequence: Synthetic oligonucleotide
cgacgucugcgcggguuca

SEQ ID NO: 878724 - RNA, 19 nt, Artificial Sequence
  Description of Artificial Sequence: Synthetic oligonucleotide
cgcuucugggagcuacguu

SEQ ID NO: 878725 - RNA, 19 nt, Artificial Sequence
  Description of Artificial Sequence: Synthetic oligonucleotide
cggguucaggaggaccgau

SEQ ID NO: 878726 - RNA, 19 nt, Artificial Sequence
  Description of Artificial Sequence: Synthetic oligonucleotide
cggcgggcgccccgcuucu

SEQ ID NO: 878727 - RNA, 19 nt, Artificial Sequence
  Description of Artificial Sequence: Synthetic oligonucleotide
uaagauuugaguuacaugg

SEQ ID NO: 878728 - RNA, 19 nt, Artificial Sequence
  Description of Artificial Sequence: Synthetic oligonucleotide
uguacaaguacucugaucu

SEQ ID NO: 878729 - RNA, 19 nt, Artificial Sequence
  Description of Artificial Sequence: Synthetic oligonucleotide
ucuaguaaaagauuuguca

SEQ ID NO: 878730 - RNA, 19 nt, Artificial Sequence
  Description of Artificial Sequence: Synthetic oligonucleotide
aaagaaucaucauauucuc

SEQ ID NO: 878731 - RNA, 19 nt, Artificial Sequence
  Description of Artificial Sequence: Synthetic oligonucleotide
uuauuauguauucuguuag

SEQ ID NO: 878732 - RNA, 19 nt, Artificial Sequence
  Description of Artificial Sequence: Synthetic oligonucleotide
ugaaauauggauaaaggau

SEQ ID NO: 878733 - RNA, 19 nt, Artificial Sequence
  Description of Artificial Sequence: Synthetic oligonucleotide
aauguagauugguuguugc

SEQ ID NO: 878734 - RNA, 19 nt, Artificial Sequence
  Description of Artificial Sequence: Synthetic oligonucleotide
uuuaccuggagaauuagcc

SEQ ID NO: 878735 - RNA, 19 nt, Artificial Sequence
  Description of Artificial Sequence: Synthetic oligonucleotide
ugugauaauucaaggaagg

SEQ ID NO: 878736 - RNA, 19 nt, Artificial Sequence
  Description of Artificial Sequence: Synthetic oligonucleotide
uguguuuuaagacuugacc

SEQ ID NO: 878737 - RNA, 19 nt, Artificial Sequence
  Description of Artificial Sequence: Synthetic oligonucleotide
ugaugaaagacuuugccgc

SEQ ID NO: 878738 - RNA, 19 nt, Artificial Sequence
  Description of Artificial Sequence: Synthetic oligonucleotide
acugguaaagauuuucuac

SEQ ID NO: 878739 - RNA, 19 nt, Artificial Sequence
  Description of Artificial Sequence: Synthetic oligonucleotide
uaagauuugaaauauggau

SEQ ID NO: 878740 - RNA, 19 nt, Artificial Sequence
  Description of Artificial Sequence: Synthetic oligonucleotide
aggaacaaugaauacauag

SEQ ID NO: 878741 - RNA, 19 nt, Artificial Sequence
  Description of Artificial Sequence: Synthetic oligonucleotide
aucacaucgauguacaaag

SEQ ID NO: 878742 - RNA, 19 nt, Artificial Sequence
  Description of Artificial Sequence: Synthetic oligonucleotide
ucuguuaggauuuguaggc

SEQ ID NO: 878743 - RNA, 19 nt, Artificial Sequence
  Description of Artificial Sequence: Synthetic oligonucleotide
aaugaauacauagauggcu

SEQ ID NO: 878744 - RNA, 19 nt, Artificial Sequence
  Description of Artificial Sequence: Synthetic oligonucleotide
uaaacucuucauuaaaggc

SEQ ID NO: 878745 - RNA, 19 nt, Artificial Sequence
  Description of Artificial Sequence: Synthetic oligonucleotide
uucuguuaggauuuguagg

SEQ ID NO: 878746 - RNA, 19 nt, Artificial Sequence
  Description of Artificial Sequence: Synthetic oligonucleotide
uugaaauauggauaaagga

SEQ ID NO: 878747 - RNA, 19 nt, Artificial Sequence
  Description of Artificial Sequence: Synthetic oligonucleotide
gaugaauagugugugaagg

SEQ ID NO: 878748 - RNA, 19 nt, Artificial Sequence
  Description of Artificial Sequence: Synthetic oligonucleotide
uaagugugaaagcugauga

SEQ ID NO: 878749 - RNA, 19 nt, Artificial Sequence
  Description of Artificial Sequence: Synthetic oligonucleotide
acuguuacaucccugaaug

SEQ ID NO: 878750 - RNA, 19 nt, Artificial Sequence
  Description of Artificial Sequence: Synthetic oligonucleotide
uagagaaugaguuuucuga

SEQ ID NO: 878751 - RNA, 19 nt, Artificial Sequence
  Description of Artificial Sequence: Synthetic oligonucleotide
uaaaggauaugucacaguc

SEQ ID NO: 878752 - RNA, 19 nt, Artificial Sequence
  Description of Artificial Sequence: Synthetic oligonucleotide
ucugaugccuucuaaauga

SEQ ID NO: 878753 - RNA, 19 nt, Artificial Sequence
  Description of Artificial Sequence: Synthetic oligonucleotide
cuuauguauucucucaugg

SEQ ID NO: 878754 - RNA, 19 nt, Artificial Sequence
  Description of Artificial Sequence: Synthetic oligonucleotide
cuauaaagugcacaugugg

SEQ ID NO: 878755 - RNA, 19 nt, Artificial Sequence
  Description of Artificial Sequence: Synthetic oligonucleotide
cuaaaugaugaauagugug

SEQ ID NO: 878756 - RNA, 19 nt, Artificial Sequence
  Description of Artificial Sequence: Synthetic oligonucleotide
uaaagauuuucuacaaucu

SEQ ID NO: 878757 - RNA, 19 nt, Artificial Sequence
  Description of Artificial Sequence: Synthetic oligonucleotide
uguauucucucauggauag

SEQ ID NO: 878758 - RNA, 19 nt, Artificial Sequence
  Description of Artificial Sequence: Synthetic oligonucleotide
cuaguaaaagauuugucac

SEQ ID NO: 878759 - RNA, 19 nt, Artificial Sequence
  Description of Artificial Sequence: Synthetic oligonucleotide
uguugcaaaagccuguaug

SEQ ID NO: 878760 - RNA, 19 nt, Artificial Sequence
  Description of Artificial Sequence: Synthetic oligonucleotide
uugaguuacaugguaaagg

SEQ ID NO: 878761 - RNA, 19 nt, Artificial Sequence
  Description of Artificial Sequence: Synthetic oligonucleotide
ucauuaaaggcauucacaa

SEQ ID NO: 878762 - RNA, 19 nt, Artificial Sequence
  Description of Artificial Sequence: Synthetic oligonucleotide
caaucuuugcacuuguagg

SEQ ID NO: 878763 - RNA, 19 nt, Artificial Sequence
  Description of Artificial Sequence: Synthetic oligonucleotide
ugaaguuagaauagugggc

SEQ ID NO: 878764 - RNA, 19 nt, Artificial Sequence
  Description of Artificial Sequence: Synthetic oligonucleotide
uuuucgauaguucuccaca

SEQ ID NO: 878765 - RNA, 19 nt, Artificial Sequence
  Description of Artificial Sequence: Synthetic oligonucleotide
aauucccuuauguauucuc

SEQ ID NO: 878766 - RNA, 19 nt, Artificial Sequence
  Description of Artificial Sequence: Synthetic oligonucleotide
ugagcaucuaguaaaagau

SEQ ID NO: 878767 - RNA, 19 nt, Artificial Sequence
  Description of Artificial Sequence: Synthetic oligonucleotide
guaaagauuuucuacaauc

SEQ ID NO: 878768 - RNA, 19 nt, Artificial Sequence
  Description of Artificial Sequence: Synthetic oligonucleotide
uuuacgguguacaaguacu

SEQ ID NO: 878769 - RNA, 19 nt, Artificial Sequence
  Description of Artificial Sequence: Synthetic oligonucleotide
acauuuucgauaguucucc

SEQ ID NO: 878770 - RNA, 19 nt, Artificial Sequence
  Description of Artificial Sequence: Synthetic oligonucleotide
uguucuuuucuuuacggug

SEQ ID NO: 878771 - RNA, 19 nt, Artificial Sequence
  Description of Artificial Sequence: Synthetic oligonucleotide
uugaguacugaguaaaaga

SEQ ID NO: 878772 - RNA, 19 nt, Artificial Sequence
  Description of Artificial Sequence: Synthetic oligonucleotide
uuaagaguugaguacugag

SEQ ID NO: 878773 - RNA, 19 nt, Artificial Sequence
  Description of Artificial Sequence: Synthetic oligonucleotide
aaaggcauucacaagcuuc

SEQ ID NO: 878774 - RNA, 19 nt, Artificial Sequence
  Description of Artificial Sequence: Synthetic oligonucleotide
auucuuugcacuuguacag

SEQ ID NO: 878775 - RNA, 19 nt, Artificial Sequence
  Description of Artificial Sequence: Synthetic oligonucleotide
uaagauuugaguacuuagu

SEQ ID NO: 878776 - RNA, 19 nt, Artificial Sequence
  Description of Artificial Sequence: Synthetic oligonucleotide
uauuauguauucuguuagg

SEQ ID NO: 878777 - RNA, 19 nt, Artificial Sequence
  Description of Artificial Sequence: Synthetic oligonucleotide
ucgauaguucuccacaaag

SEQ ID NO: 878778 - RNA, 19 nt, Artificial Sequence
  Description of Artificial Sequence: Synthetic oligonucleotide
uuugaguacuuaguaaagg

SEQ ID NO: 878779 - RNA, 19 nt, Artificial Sequence
  Description of Artificial Sequence: Synthetic oligonucleotide
uucuuuacgguguacaagu

SEQ ID NO: 878780 - RNA, 19 nt, Artificial Sequence
  Description of Artificial Sequence: Synthetic oligonucleotide
guugcaaaagccuguaugc

SEQ ID NO: 878781 - RNA, 19 nt, Artificial Sequence
  Description of Artificial Sequence: Synthetic oligonucleotide
ugaguacugaguaaaagau

SEQ ID NO: 878782 - RNA, 19 nt, Artificial Sequence
  Description of Artificial Sequence: Synthetic oligonucleotide
uuaccuuuauauuuuauua

SEQ ID NO: 878783 - RNA, 19 nt, Artificial Sequence
  Description of Artificial Sequence: Synthetic oligonucleotide
uuuaauucccuuauguauu

SEQ ID NO: 878784 - RNA, 19 nt, Artificial Sequence
  Description of Artificial Sequence: Synthetic oligonucleotide
ucuucuaagauuugaaaua

SEQ ID NO: 878785 - RNA, 19 nt, Artificial Sequence
  Description of Artificial Sequence: Synthetic oligonucleotide
agauuugaaauauggauaa

SEQ ID NO: 878786 - RNA, 19 nt, Artificial Sequence
  Description of Artificial Sequence: Synthetic oligonucleotide
uugagcaucuaguaaaaga

SEQ ID NO: 878787 - RNA, 19 nt, Artificial Sequence
  Description of Artificial Sequence: Synthetic oligonucleotide
uuuaagacuugaccacugg

SEQ ID NO: 878788 - RNA, 19 nt, Artificial Sequence
  Description of Artificial Sequence: Synthetic oligonucleotide
gauuugaguacuuaguaaa

SEQ ID NO: 878789 - RNA, 19 nt, Artificial Sequence
  Description of Artificial Sequence: Synthetic oligonucleotide
accuuuauauuuuauuaug

SEQ ID NO: 878790 - RNA, 19 nt, Artificial Sequence
  Description of Artificial Sequence: Synthetic oligonucleotide
uugaguacuuaguaaagga

SEQ ID NO: 878791 - RNA, 19 nt, Artificial Sequence
  Description of Artificial Sequence: Synthetic oligonucleotide
ugaucuucaguaaagucaa

SEQ ID NO: 878792 - RNA, 19 nt, Artificial Sequence
  Description of Artificial Sequence: Synthetic oligonucleotide
auucuguuaggauuuguag

SEQ ID NO: 878793 - RNA, 19 nt, Artificial Sequence
  Description of Artificial Sequence: Synthetic oligonucleotide
aaggauaugucacagucuu

SEQ ID NO: 878794 - RNA, 19 nt, Artificial Sequence
  Description of Artificial Sequence: Synthetic oligonucleotide
gacuuugccgcauucuugg

SEQ ID NO: 878795 - RNA, 19 nt, Artificial Sequence
  Description of Artificial Sequence: Synthetic oligonucleotide
uguuuuaagacuugaccac

SEQ ID NO: 878796 - RNA, 19 nt, Artificial Sequence
  Description of Artificial Sequence: Synthetic oligonucleotide
uagaauagugggcaaaggu

SEQ ID NO: 878797 - RNA, 19 nt, Artificial Sequence
  Description of Artificial Sequence: Synthetic oligonucleotide
ucuaaaugaugaauagugu

SEQ ID NO: 878798 - RNA, 19 nt, Artificial Sequence
  Description of Artificial Sequence: Synthetic oligonucleotide
aagauuugaguacuuagua

SEQ ID NO: 878799 - RNA, 19 nt, Artificial Sequence
  Description of Artificial Sequence: Synthetic oligonucleotide
gauugguuguugcaaaagc

SEQ ID NO: 878800 - RNA, 19 nt, Artificial Sequence
  Description of Artificial Sequence: Synthetic oligonucleotide
aguacuguagcauuuccca

SEQ ID NO: 878801 - RNA, 19 nt, Artificial Sequence
  Description of Artificial Sequence: Synthetic oligonucleotide
auauggauaaaggauaugu

SEQ ID NO: 878802 - RNA, 19 nt, Artificial Sequence
  Description of Artificial Sequence: Synthetic oligonucleotide
uucaaggaaggacuuacca

SEQ ID NO: 878803 - RNA, 19 nt, Artificial Sequence
  Description of Artificial Sequence: Synthetic oligonucleotide
ugaggcaugaggcaguacu

SEQ ID NO: 878804 - RNA, 19 nt, Artificial Sequence
  Description of Artificial Sequence: Synthetic oligonucleotide
aagcuucuuaccuuuauau

SEQ ID NO: 878805 - RNA, 19 nt, Artificial Sequence
  Description of Artificial Sequence: Synthetic oligonucleotide
uaaaugcuaugucacauuc

SEQ ID NO: 878806 - RNA, 19 nt, Artificial Sequence
  Description of Artificial Sequence: Synthetic oligonucleotide
ugauaauucaaggaaggac

SEQ ID NO: 878807 - RNA, 19 nt, Artificial Sequence
  Description of Artificial Sequence: Synthetic oligonucleotide
agucuuuacauuuguaagu

SEQ ID NO: 878808 - RNA, 19 nt, Artificial Sequence
  Description of Artificial Sequence: Synthetic oligonucleotide
aguacucugaucuucagua

SEQ ID NO: 878809 - RNA, 19 nt, Artificial Sequence
  Description of Artificial Sequence: Synthetic oligonucleotide
aaagccuguaugcagcgcu

SEQ ID NO: 878810 - RNA, 19 nt, Artificial Sequence
  Description of Artificial Sequence: Synthetic oligonucleotide
guguuuuaagacuugacca

SEQ ID NO: 878811 - RNA, 19 nt, Artificial Sequence
  Description of Artificial Sequence: Synthetic oligonucleotide
guuauuggaguuucuguag

SEQ ID NO: 878812 - RNA, 19 nt, Artificial Sequence
  Description of Artificial Sequence: Synthetic oligonucleotide
ugaaagcugaugaaagacu

SEQ ID NO: 878813 - RNA, 19 nt, Artificial Sequence
  Description of Artificial Sequence: Synthetic oligonucleotide
cagauaaaugcuaugucac

SEQ ID NO: 878814 - RNA, 19 nt, Artificial Sequence
  Description of Artificial Sequence: Synthetic oligonucleotide
aucauauucucccugccug

SEQ ID NO: 878815 - RNA, 19 nt, Artificial Sequence
  Description of Artificial Sequence: Synthetic oligonucleotide
gaaguuagaauagugggca

SEQ ID NO: 878816 - RNA, 19 nt, Artificial Sequence
  Description of Artificial Sequence: Synthetic oligonucleotide
ucuauaaagugcacaugug

SEQ ID NO: 878817 - RNA, 19 nt, Artificial Sequence
  Description of Artificial Sequence: Synthetic oligonucleotide
gacaggaucacauuuucga

SEQ ID NO: 878818 - RNA, 19 nt, Artificial Sequence
  Description of Artificial Sequence: Synthetic oligonucleotide
uguguuuuaagaguugagu

SEQ ID NO: 878819 - RNA, 19 nt, Artificial Sequence
  Description of Artificial Sequence: Synthetic oligonucleotide
uuaaaggcauucacaagcu

SEQ ID NO: 878820 - RNA, 19 nt, Artificial Sequence
  Description of Artificial Sequence: Synthetic oligonucleotide
ugcaaaagccuguaugcag

SEQ ID NO: 878821 - RNA, 19 nt, Artificial Sequence
  Description of Artificial Sequence: Synthetic oligonucleotide
uugguuguugcaaaagccu

SEQ ID NO: 878822 - RNA, 19 nt, Artificial Sequence
  Description of Artificial Sequence: Synthetic oligonucleotide
uuuuaagacuugaccacug

SEQ ID NO: 878823 - RNA, 19 nt, Artificial Sequence
  Description of Artificial Sequence: Synthetic oligonucleotide
uguuaggauuuguaggcag

SEQ ID NO: 878824 - RNA, 19 nt, Artificial Sequence
  Description of Artificial Sequence: Synthetic oligonucleotide
ugaugaauagugugugaag

SEQ ID NO: 878825 - RNA, 19 nt, Artificial Sequence
  Description of Artificial Sequence: Synthetic oligonucleotide
aaugucagcagaccccugu

SEQ ID NO: 878826 - RNA, 19 nt, Artificial Sequence
  Description of Artificial Sequence: Synthetic oligonucleotide
aaugaugaauaguguguga

SEQ ID NO: 878827 - RNA, 19 nt, Artificial Sequence
  Description of Artificial Sequence: Synthetic oligonucleotide
uccaauguagauugguugu

SEQ ID NO: 878828 - RNA, 19 nt, Artificial Sequence
  Description of Artificial Sequence: Synthetic oligonucleotide
uguaguuucacuuguucua

SEQ ID NO: 878829 - RNA, 19 nt, Artificial Sequence
  Description of Artificial Sequence: Synthetic oligonucleotide
uauggauaaaggauauguc

SEQ ID NO: 878830 - RNA, 19 nt, Artificial Sequence
  Description of Artificial Sequence: Synthetic oligonucleotide
gaaauauggauaaaggaua

SEQ ID NO: 878831 - RNA, 19 nt, Artificial Sequence
  Description of Artificial Sequence: Synthetic oligonucleotide
uuaagugugaaagcugaug

SEQ ID NO: 878832 - RNA, 19 nt, Artificial Sequence
  Description of Artificial Sequence: Synthetic oligonucleotide
uuuguaggcagagaaugcc

SEQ ID NO: 878833 - RNA, 19 nt, Artificial Sequence
  Description of Artificial Sequence: Synthetic oligonucleotide
ugugauuacugcaugugua

SEQ ID NO: 878834 - RNA, 19 nt, Artificial Sequence
  Description of Artificial Sequence: Synthetic oligonucleotide
ugaguacuuaguaaaggau

SEQ ID NO: 878835 - RNA, 19 nt, Artificial Sequence
  Description of Artificial Sequence: Synthetic oligonucleotide
uagcauuucccacauuucu

SEQ ID NO: 878836 - RNA, 19 nt, Artificial Sequence
  Description of Artificial Sequence: Synthetic oligonucleotide
ugugaaagcugaugaaaga

SEQ ID NO: 878837 - RNA, 19 nt, Artificial Sequence
  Description of Artificial Sequence: Synthetic oligonucleotide
uuugaguuacaugguaaag

SEQ ID NO: 878838 - RNA, 19 nt, Artificial Sequence
  Description of Artificial Sequence: Synthetic oligonucleotide
uuauguauucucucaugga

SEQ ID NO: 878839 - RNA, 19 nt, Artificial Sequence
  Description of Artificial Sequence: Synthetic oligonucleotide
cucucauggauagugaggc

SEQ ID NO: 878840 - RNA, 19 nt, Artificial Sequence
  Description of Artificial Sequence: Synthetic oligonucleotide
uccugaaguuagaauagug

SEQ ID NO: 878841 - RNA, 19 nt, Artificial Sequence
  Description of Artificial Sequence: Synthetic oligonucleotide
auuuuaagauuugaguacu

SEQ ID NO: 878842 - RNA, 19 nt, Artificial Sequence
  Description of Artificial Sequence: Synthetic oligonucleotide
uauucuguuaggauuugua

SEQ ID NO: 878843 - RNA, 19 nt, Artificial Sequence
  Description of Artificial Sequence: Synthetic oligonucleotide
aguuauuggaguuucugua

SEQ ID NO: 878844 - RNA, 19 nt, Artificial Sequence
  Description of Artificial Sequence: Synthetic oligonucleotide
ugguuguugcaaaagccug

SEQ ID NO: 878845 - RNA, 19 nt, Artificial Sequence
  Description of Artificial Sequence: Synthetic oligonucleotide
uuauguauucuguuaggau

SEQ ID NO: 878846 - RNA, 19 nt, Artificial Sequence
  Description of Artificial Sequence: Synthetic oligonucleotide
ucaacagaggcaucgcugu

SEQ ID NO: 878847 - RNA, 19 nt, Artificial Sequence
  Description of Artificial Sequence: Synthetic oligonucleotide
gugauuacugcauguguag

SEQ ID NO: 878848 - RNA, 19 nt, Artificial Sequence
  Description of Artificial Sequence: Synthetic oligonucleotide
aauacauagauggcuugcu

SEQ ID NO: 878849 - RNA, 19 nt, Artificial Sequence
  Description of Artificial Sequence: Synthetic oligonucleotide
agaauagugggcaaaggug

SEQ ID NO: 878850 - RNA, 19 nt, Artificial Sequence
  Description of Artificial Sequence: Synthetic oligonucleotide
ucuacaaucuuugcacuug

SEQ ID NO: 878851 - RNA, 19 nt, Artificial Sequence
  Description of Artificial Sequence: Synthetic oligonucleotide
uaguuauuggaguuucugu

SEQ ID NO: 878852 - RNA, 19 nt, Artificial Sequence
  Description of Artificial Sequence: Synthetic oligonucleotide
uuagaauagugggcaaagg

SEQ ID NO: 878853 - RNA, 19 nt, Artificial Sequence
  Description of Artificial Sequence: Synthetic oligonucleotide
uccacuguuacaucccuga

SEQ ID NO: 878854 - RNA, 19 nt, Artificial Sequence
  Description of Artificial Sequence: Synthetic oligonucleotide
uacuguagcauuucccaca

SEQ ID NO: 878855 - RNA, 19 nt, Artificial Sequence
  Description of Artificial Sequence: Synthetic oligonucleotide
ugaauagugugugaaggcu

SEQ ID NO: 878856 - RNA, 19 nt, Artificial Sequence
  Description of Artificial Sequence: Synthetic oligonucleotide
caaugaauacauagauggc

SEQ ID NO: 878857 - RNA, 19 nt, Artificial Sequence
  Description of Artificial Sequence: Synthetic oligonucleotide
ccugaaguuagaauagugg

SEQ ID NO: 878858 - RNA, 19 nt, Artificial Sequence
  Description of Artificial Sequence: Synthetic oligonucleotide
gagaaugaguuuucugaug

SEQ ID NO: 878859 - RNA, 19 nt, Artificial Sequence
  Description of Artificial Sequence: Synthetic oligonucleotide
aaauauggauaaaggauau

SEQ ID NO: 878860 - RNA, 19 nt, Artificial Sequence
  Description of Artificial Sequence: Synthetic oligonucleotide
ucuaagauuugaguuacau

SEQ ID NO: 878861 - RNA, 19 nt, Artificial Sequence
  Description of Artificial Sequence: Synthetic oligonucleotide
auuauguauucuguuagga

SEQ ID NO: 878862 - RNA, 19 nt, Artificial Sequence
  Description of Artificial Sequence: Synthetic oligonucleotide
uacugaguaaaagauuugu

SEQ ID NO: 878863 - RNA, 19 nt, Artificial Sequence
  Description of Artificial Sequence: Synthetic oligonucleotide
aguuucuguaguuucacuu

SEQ ID NO: 878864 - RNA, 19 nt, Artificial Sequence
  Description of Artificial Sequence: Synthetic oligonucleotide
agauuugaguacuuaguaa

SEQ ID NO: 878865 - RNA, 19 nt, Artificial Sequence
  Description of Artificial Sequence: Synthetic oligonucleotide
ucugaucuucaguaaaguc

SEQ ID NO: 878866 - RNA, 19 nt, Artificial Sequence
  Description of Artificial Sequence: Synthetic oligonucleotide
gaauacauagauggcuugc

SEQ ID NO: 878867 - RNA, 19 nt, Artificial Sequence
  Description of Artificial Sequence: Synthetic oligonucleotide
guuagaauagugggcaaag

SEQ ID NO: 878868 - RNA, 19 nt, Artificial Sequence
  Description of Artificial Sequence: Synthetic oligonucleotide
cuaagauuugaaauaugga

SEQ ID NO: 878869 - RNA, 19 nt, Artificial Sequence
  Description of Artificial Sequence: Synthetic oligonucleotide
uucuaagauuugaaauaug

SEQ ID NO: 878870 - RNA, 19 nt, Artificial Sequence
  Description of Artificial Sequence: Synthetic oligonucleotide
gaacaaugaauacauagau

SEQ ID NO: 878871 - RNA, 19 nt, Artificial Sequence
  Description of Artificial Sequence: Synthetic oligonucleotide
uuaauucccuuauguauuc

SEQ ID NO: 878872 - RNA, 19 nt, Artificial Sequence
  Description of Artificial Sequence: Synthetic oligonucleotide
auuugaguuacaugguaaa

SEQ ID NO: 878873 - RNA, 19 nt, Artificial Sequence
  Description of Artificial Sequence: Synthetic oligonucleotide
auagugucuucucagcagu

SEQ ID NO: 878874 - RNA, 19 nt, Artificial Sequence
  Description of Artificial Sequence: Synthetic oligonucleotide
aauagugugugaaggcucu

SEQ ID NO: 878875 - RNA, 19 nt, Artificial Sequence
  Description of Artificial Sequence: Synthetic oligonucleotide
agugugugaaggcucuguc

SEQ ID NO: 878876 - RNA, 19 nt, Artificial Sequence
  Description of Artificial Sequence: Synthetic oligonucleotide
uacuuaguaaaggauuugu

SEQ ID NO: 878877 - RNA, 19 nt, Artificial Sequence
  Description of Artificial Sequence: Synthetic oligonucleotide
cuguaugcagcgcucaaag

SEQ ID NO: 878878 - RNA, 19 nt, Artificial Sequence
  Description of Artificial Sequence: Synthetic oligonucleotide
aguaaagucaacagaggca

SEQ ID NO: 878879 - RNA, 19 nt, Artificial Sequence
  Description of Artificial Sequence: Synthetic oligonucleotide
ucauggauagugaggcaug

SEQ ID NO: 878880 - RNA, 19 nt, Artificial Sequence
  Description of Artificial Sequence: Synthetic oligonucleotide
uaugcagcgcucaaagaau

SEQ ID NO: 878881 - RNA, 19 nt, Artificial Sequence
  Description of Artificial Sequence: Synthetic oligonucleotide
cuagagaaugaguuuucug

SEQ ID NO: 878882 - RNA, 19 nt, Artificial Sequence
  Description of Artificial Sequence: Synthetic oligonucleotide
uguuacaucccugaauguc

SEQ ID NO: 878883 - RNA, 19 nt, Artificial Sequence
  Description of Artificial Sequence: Synthetic oligonucleotide
ucaucauauucucccugcc

SEQ ID NO: 878884 - RNA, 19 nt, Artificial Sequence
  Description of Artificial Sequence: Synthetic oligonucleotide
acuuaguaaaggauuuguc

SEQ ID NO: 878885 - RNA, 19 nt, Artificial Sequence
  Description of Artificial Sequence: Synthetic oligonucleotide
uuguaggcagagaaugcca

SEQ ID NO: 878886 - RNA, 19 nt, Artificial Sequence
  Description of Artificial Sequence: Synthetic oligonucleotide
guuuaauucccuuauguau

SEQ ID NO: 878887 - RNA, 19 nt, Artificial Sequence
  Description of Artificial Sequence: Synthetic oligonucleotide
ugccagauaaaugcuaugu

SEQ ID NO: 878888 - RNA, 19 nt, Artificial Sequence
  Description of Artificial Sequence: Synthetic oligonucleotide
cuucuaagauuugaguuac

SEQ ID NO: 878889 - RNA, 19 nt, Artificial Sequence
  Description of Artificial Sequence: Synthetic oligonucleotide
aaugccagauaaaugcuau

SEQ ID NO: 878890 - RNA, 19 nt, Artificial Sequence
  Description of Artificial Sequence: Synthetic oligonucleotide
guugaguacugaguaaaag

SEQ ID NO: 878891 - RNA, 19 nt, Artificial Sequence
  Description of Artificial Sequence: Synthetic oligonucleotide
agaggcaucgcugugauua

SEQ ID NO: 878892 - RNA, 19 nt, Artificial Sequence
  Description of Artificial Sequence: Synthetic oligonucleotide
guaugcagcgcucaaagaa

SEQ ID NO: 878893 - RNA, 19 nt, Artificial Sequence
  Description of Artificial Sequence: Synthetic oligonucleotide
cugcauguguaguuauugg

SEQ ID NO: 878894 - RNA, 19 nt, Artificial Sequence
  Description of Artificial Sequence: Synthetic oligonucleotide
aguuucacuuguucuauaa

SEQ ID NO: 878895 - RNA, 19 nt, Artificial Sequence
  Description of Artificial Sequence: Synthetic oligonucleotide
uuguucuauaaagugcaca

SEQ ID NO: 878896 - RNA, 19 nt, Artificial Sequence
  Description of Artificial Sequence: Synthetic oligonucleotide
auuugaguacuuaguaaag

SEQ ID NO: 878897 - RNA, 19 nt, Artificial Sequence
  Description of Artificial Sequence: Synthetic oligonucleotide
ucccuuauguauucucuca

SEQ ID NO: 878898 - RNA, 19 nt, Artificial Sequence
  Description of Artificial Sequence: Synthetic oligonucleotide
uuuaagauuugaguacuua

SEQ ID NO: 878899 - RNA, 19 nt, Artificial Sequence
  Description of Artificial Sequence: Synthetic oligonucleotide
auagauggcuugcuggccu

SEQ ID NO: 878900 - RNA, 19 nt, Artificial Sequence
  Description of Artificial Sequence: Synthetic oligonucleotide
uaccuggagaauuagccau

SEQ ID NO: 878901 - RNA, 19 nt, Artificial Sequence
  Description of Artificial Sequence: Synthetic oligonucleotide
guaguuauuggaguuucug

SEQ ID NO: 878902 - RNA, 19 nt, Artificial Sequence
  Description of Artificial Sequence: Synthetic oligonucleotide
acugcauguguaguuauug

SEQ ID NO: 878903 - RNA, 19 nt, Artificial Sequence
  Description of Artificial Sequence: Synthetic oligonucleotide
aagugugaaagcugaugaa

SEQ ID NO: 878904 - RNA, 19 nt, Artificial Sequence
  Description of Artificial Sequence: Synthetic oligonucleotide
gugaaagcugaugaaagac

SEQ ID NO: 878905 - RNA, 19 nt, Artificial Sequence
  Description of Artificial Sequence: Synthetic oligonucleotide
cacaucgauguacaaaguc

SEQ ID NO: 878906 - RNA, 19 nt, Artificial Sequence
  Description of Artificial Sequence: Synthetic oligonucleotide
uuucgauaguucuccacaa

SEQ ID NO: 878907 - RNA, 19 nt, Artificial Sequence
  Description of Artificial Sequence: Synthetic oligonucleotide
ggauaugucacagucuuug

SEQ ID NO: 878908 - RNA, 19 nt, Artificial Sequence
  Description of Artificial Sequence: Synthetic oligonucleotide
cauucacaagcuucuuacc

SEQ ID NO: 878909 - RNA, 19 nt, Artificial Sequence
  Description of Artificial Sequence: Synthetic oligonucleotide
ucgauguacaaaguccucu

SEQ ID NO: 878910 - RNA, 19 nt, Artificial Sequence
  Description of Artificial Sequence: Synthetic oligonucleotide
gaugaaagacuuugccgca

SEQ ID NO: 878911 - RNA, 19 nt, Artificial Sequence
  Description of Artificial Sequence: Synthetic oligonucleotide
agauuugaguuacauggua

SEQ ID NO: 878912 - RNA, 19 nt, Artificial Sequence
  Description of Artificial Sequence: Synthetic oligonucleotide
aagauuugaguuacauggu

SEQ ID NO: 878913 - RNA, 19 nt, Artificial Sequence
  Description of Artificial Sequence: Synthetic oligonucleotide
auucaaggaaggacuuacc

SEQ ID NO: 878914 - RNA, 19 nt, Artificial Sequence
  Description of Artificial Sequence: Synthetic oligonucleotide
uggacaggaucacauuuuc

SEQ ID NO: 878915 - RNA, 19 nt, Artificial Sequence
  Description of Artificial Sequence: Synthetic oligonucleotide
gucuuuuaagauuugaguu

SEQ ID NO: 878916 - RNA, 19 nt, Artificial Sequence
  Description of Artificial Sequence: Synthetic oligonucleotide
auuuucuggugucuccuga

SEQ ID NO: 878917 - RNA, 19 nt, Artificial Sequence
  Description of Artificial Sequence: Synthetic oligonucleotide
uguaguuauuggaguuucu

SEQ ID NO: 878918 - RNA, 19 nt, Artificial Sequence
  Description of Artificial Sequence: Synthetic oligonucleotide
gcauucacaagcuucuuac

SEQ ID NO: 878919 - RNA, 19 nt, Artificial Sequence
  Description of Artificial Sequence: Synthetic oligonucleotide
gauuugaguuacaugguaa

SEQ ID NO: 878920 - RNA, 19 nt, Artificial Sequence
  Description of Artificial Sequence: Synthetic oligonucleotide
uguuuaccuggagaauuag

SEQ ID NO: 878921 - RNA, 19 nt, Artificial Sequence
  Description of Artificial Sequence: Synthetic oligonucleotide
ccuucuaaaugaugaauag

SEQ ID NO: 878922 - RNA, 19 nt, Artificial Sequence
  Description of Artificial Sequence: Synthetic oligonucleotide
ucuuaccuuuauauuuuau

SEQ ID NO: 878923 - RNA, 19 nt, Artificial Sequence
  Description of Artificial Sequence: Synthetic oligonucleotide
guuacaucccugaauguca

SEQ ID NO: 878924 - RNA, 19 nt, Artificial Sequence
  Description of Artificial Sequence: Synthetic oligonucleotide
augaugaauagugugugaa

SEQ ID NO: 878925 - RNA, 19 nt, Artificial Sequence
  Description of Artificial Sequence: Synthetic oligonucleotide
uuuaagugugaaagcugau

SEQ ID NO: 878926 - RNA, 19 nt, Artificial Sequence
  Description of Artificial Sequence: Synthetic oligonucleotide
agcaucuaguaaaagauuu

SEQ ID NO: 878927 - RNA, 19 nt, Artificial Sequence
  Description of Artificial Sequence: Synthetic oligonucleotide
agugggcaaaggugaaguc

SEQ ID NO: 878928 - RNA, 19 nt, Artificial Sequence
  Description of Artificial Sequence: Synthetic oligonucleotide
uuacgguguacaaguacuc

SEQ ID NO: 878929 - RNA, 19 nt, Artificial Sequence
  Description of Artificial Sequence: Synthetic oligonucleotide
aguacuuaguaaaggauuu

SEQ ID NO: 878930 - RNA, 19 nt, Artificial Sequence
  Description of Artificial Sequence: Synthetic oligonucleotide
auguagauugguuguugca

SEQ ID NO: 878931 - RNA, 19 nt, Artificial Sequence
  Description of Artificial Sequence: Synthetic oligonucleotide
acaugguaaaggauuuguc

SEQ ID NO: 878932 - RNA, 19 nt, Artificial Sequence
  Description of Artificial Sequence: Synthetic oligonucleotide
gaauagugugugaaggcuc

SEQ ID NO: 878933 - RNA, 19 nt, Artificial Sequence
  Description of Artificial Sequence: Synthetic oligonucleotide
uguaugcagcgcucaaaga

SEQ ID NO: 878934 - RNA, 19 nt, Artificial Sequence
  Description of Artificial Sequence: Synthetic oligonucleotide
agauuugaguucaugguaa

SEQ ID NO: 878935 - RNA, 19 nt, Artificial Sequence
  Description of Artificial Sequence: Synthetic oligonucleotide
ucucuccucucucucuacc

SEQ ID NO: 878936 - RNA, 19 nt, Artificial Sequence
  Description of Artificial Sequence: Synthetic oligonucleotide
aaaugcuaugucacauucu

SEQ ID NO: 878937 - RNA, 19 nt, Artificial Sequence
  Description of Artificial Sequence: Synthetic oligonucleotide
uagugggcaaaggugaagu

SEQ ID NO: 878938 - RNA, 19 nt, Artificial Sequence
  Description of Artificial Sequence: Synthetic oligonucleotide
aaguuagaauagugggcaa

SEQ ID NO: 878939 - RNA, 19 nt, Artificial Sequence
  Description of Artificial Sequence: Synthetic oligonucleotide
acucugaucuucaguaaag

SEQ ID NO: 878940 - RNA, 19 nt, Artificial Sequence
  Description of Artificial Sequence: Synthetic oligonucleotide
ggaacaaugaauacauaga

SEQ ID NO: 878941 - RNA, 19 nt, Artificial Sequence
  Description of Artificial Sequence: Synthetic oligonucleotide
cauuucucacacuggugug

SEQ ID NO: 878942 - RNA, 19 nt, Artificial Sequence
  Description of Artificial Sequence: Synthetic oligonucleotide
uucgauaguucuccacaaa

SEQ ID NO: 878943 - RNA, 19 nt, Artificial Sequence
  Description of Artificial Sequence: Synthetic oligonucleotide
auguguaguuauuggaguu

SEQ ID NO: 878944 - RNA, 19 nt, Artificial Sequence
  Description of Artificial Sequence: Synthetic oligonucleotide
ucacaagcuucuuaccuuu

SEQ ID NO: 878945 - RNA, 19 nt, Artificial Sequence
  Description of Artificial Sequence: Synthetic oligonucleotide
agcgcucaaagaaucauca

SEQ ID NO: 878946 - RNA, 19 nt, Artificial Sequence
  Description of Artificial Sequence: Synthetic oligonucleotide
gauaaaugcuaugucacau

SEQ ID NO: 878947 - RNA, 19 nt, Artificial Sequence
  Description of Artificial Sequence: Synthetic oligonucleotide
gaguugaguacugaguaaa

SEQ ID NO: 878948 - RNA, 19 nt, Artificial Sequence
  Description of Artificial Sequence: Synthetic oligonucleotide
gucaacagaggcaucgcug

SEQ ID NO: 878949 - RNA, 19 nt, Artificial Sequence
  Description of Artificial Sequence: Synthetic oligonucleotide
gcauguguaguuauuggag

SEQ ID NO: 878950 - RNA, 19 nt, Artificial Sequence
  Description of Artificial Sequence: Synthetic oligonucleotide
ccagauaaaugcuauguca

SEQ ID NO: 878951 - RNA, 19 nt, Artificial Sequence
  Description of Artificial Sequence: Synthetic oligonucleotide
ugauuacugcauguguagu

SEQ ID NO: 878952 - RNA, 19 nt, Artificial Sequence
  Description of Artificial Sequence: Synthetic oligonucleotide
uucuacaaucuuugcacuu

SEQ ID NO: 878953 - RNA, 19 nt, Artificial Sequence
  Description of Artificial Sequence: Synthetic oligonucleotide
guaaagucaacagaggcau

SEQ ID NO: 878954 - RNA, 19 nt, Artificial Sequence
  Description of Artificial Sequence: Synthetic oligonucleotide
guagauugguuguugcaaa

SEQ ID NO: 878955 - RNA, 19 nt, Artificial Sequence
  Description of Artificial Sequence: Synthetic oligonucleotide
ucuuggcaccuauaguguc

SEQ ID NO: 878956 - RNA, 19 nt, Artificial Sequence
  Description of Artificial Sequence: Synthetic oligonucleotide
auuacugcauguguaguua

SEQ ID NO: 878957 - RNA, 19 nt, Artificial Sequence
  Description of Artificial Sequence: Synthetic oligonucleotide
uguaggguuuaauucccuu

SEQ ID NO: 878958 - RNA, 19 nt, Artificial Sequence
  Description of Artificial Sequence: Synthetic oligonucleotide
augaauacauagauggcuu

SEQ ID NO: 878959 - RNA, 19 nt, Artificial Sequence
  Description of Artificial Sequence: Synthetic oligonucleotide
caauguagauugguuguug

SEQ ID NO: 878960 - RNA, 19 nt, Artificial Sequence
  Description of Artificial Sequence: Synthetic oligonucleotide
ugaggcaguacuguagcau

SEQ ID NO: 878961 - RNA, 19 nt, Artificial Sequence
  Description of Artificial Sequence: Synthetic oligonucleotide
aggguuuaauucccuuaug

SEQ ID NO: 878962 - RNA, 19 nt, Artificial Sequence
  Description of Artificial Sequence: Synthetic oligonucleotide
uguauucuguuaggauuug

SEQ ID NO: 878963 - RNA, 19 nt, Artificial Sequence
  Description of Artificial Sequence: Synthetic oligonucleotide
gucagcagaccccugugac

SEQ ID NO: 878964 - RNA, 19 nt, Artificial Sequence
  Description of Artificial Sequence: Synthetic oligonucleotide
uguguaguuauuggaguuu

SEQ ID NO: 878965 - RNA, 19 nt, Artificial Sequence
  Description of Artificial Sequence: Synthetic oligonucleotide
auucccuuauguauucucu

SEQ ID NO: 878966 - RNA, 19 nt, Artificial Sequence
  Description of Artificial Sequence: Synthetic oligonucleotide
agcuucuuaccuuuauauu

SEQ ID NO: 878967 - RNA, 19 nt, Artificial Sequence
  Description of Artificial Sequence: Synthetic oligonucleotide
guacuguagcauuucccac

SEQ ID NO: 878968 - RNA, 19 nt, Artificial Sequence
  Description of Artificial Sequence: Synthetic oligonucleotide
uuacugcauguguaguuau

SEQ ID NO: 878969 - RNA, 19 nt, Artificial Sequence
  Description of Artificial Sequence: Synthetic oligonucleotide
ucgcugugauuacugcaug

SEQ ID NO: 878970 - RNA, 19 nt, Artificial Sequence
  Description of Artificial Sequence: Synthetic oligonucleotide
ugaaagacuuugccgcauu

SEQ ID NO: 878971 - RNA, 19 nt, Artificial Sequence
  Description of Artificial Sequence: Synthetic oligonucleotide
auguauucuguuaggauuu

SEQ ID NO: 878972 - RNA, 19 nt, Artificial Sequence
  Description of Artificial Sequence: Synthetic oligonucleotide
ugucucuccaauguagauu

SEQ ID NO: 878973 - RNA, 19 nt, Artificial Sequence
  Description of Artificial Sequence: Synthetic oligonucleotide
ugccuucuaaaugaugaau

SEQ ID NO: 878974 - RNA, 19 nt, Artificial Sequence
  Description of Artificial Sequence: Synthetic oligonucleotide
gcugagucgaggcauugcc

SEQ ID NO: 878975 - RNA, 19 nt, Artificial Sequence
  Description of Artificial Sequence: Synthetic oligonucleotide
cugauguauuuuaagauuu

SEQ ID NO: 878976 - RNA, 19 nt, Artificial Sequence
  Description of Artificial Sequence: Synthetic oligonucleotide
uucuaagauuugaguuaca

SEQ ID NO: 878977 - RNA, 19 nt, Artificial Sequence
  Description of Artificial Sequence: Synthetic oligonucleotide
aguccacuguuacaucccu

SEQ ID NO: 878978 - RNA, 19 nt, Artificial Sequence
  Description of Artificial Sequence: Synthetic oligonucleotide
aguuagaauagugggcaaa

SEQ ID NO: 878979 - RNA, 19 nt, Artificial Sequence
  Description of Artificial Sequence: Synthetic oligonucleotide
uaaaggcauucacaagcuu

SEQ ID NO: 878980 - RNA, 19 nt, Artificial Sequence
  Description of Artificial Sequence: Synthetic oligonucleotide
uucuuaccuuuauauuuua

SEQ ID NO: 878981 - RNA, 19 nt, Artificial Sequence
  Description of Artificial Sequence: Synthetic oligonucleotide
agcugagucgaggcauugc

SEQ ID NO: 878982 - RNA, 19 nt, Artificial Sequence
  Description of Artificial Sequence: Synthetic oligonucleotide
ucuuuacgguguacaagua

SEQ ID NO: 878983 - RNA, 19 nt, Artificial Sequence
  Description of Artificial Sequence: Synthetic oligonucleotide
cauagauggcuugcuggcc

SEQ ID NO: 878984 - RNA, 19 nt, Artificial Sequence
  Description of Artificial Sequence: Synthetic oligonucleotide
gcuaugucacauucuuugc

SEQ ID NO: 878985 - RNA, 19 nt, Artificial Sequence
  Description of Artificial Sequence: Synthetic oligonucleotide
uaaagucaacagaggcauc

SEQ ID NO: 878986 - RNA, 19 nt, Artificial Sequence
  Description of Artificial Sequence: Synthetic oligonucleotide
auagugggcaaaggugaag

SEQ ID NO: 878987 - RNA, 19 nt, Artificial Sequence
  Description of Artificial Sequence: Synthetic oligonucleotide
guaggguuuaauucccuua

SEQ ID NO: 878988 - RNA, 19 nt, Artificial Sequence
  Description of Artificial Sequence: Synthetic oligonucleotide
caucgauguacaaaguccu

SEQ ID NO: 878989 - RNA, 19 nt, Artificial Sequence
  Description of Artificial Sequence: Synthetic oligonucleotide
augucagcagaccccugug

SEQ ID NO: 878990 - RNA, 19 nt, Artificial Sequence
  Description of Artificial Sequence: Synthetic oligonucleotide
acauguggaggggucauga

SEQ ID NO: 878991 - RNA, 19 nt, Artificial Sequence
  Description of Artificial Sequence: Synthetic oligonucleotide
aagccuguaugcagcgcuc

SEQ ID NO: 878992 - RNA, 19 nt, Artificial Sequence
  Description of Artificial Sequence: Synthetic oligonucleotide
gauuacugcauguguaguu

SEQ ID NO: 878993 - RNA, 19 nt, Artificial Sequence
  Description of Artificial Sequence: Synthetic oligonucleotide
cauguguaguuauuggagu

SEQ ID NO: 878994 - RNA, 19 nt, Artificial Sequence
  Description of Artificial Sequence: Synthetic oligonucleotide
aucgauguacaaaguccuc

SEQ ID NO: 878995 - RNA, 19 nt, Artificial Sequence
  Description of Artificial Sequence: Synthetic oligonucleotide
gaguucaugguaaaggauu

SEQ ID NO: 878996 - RNA, 19 nt, Artificial Sequence
  Description of Artificial Sequence: Synthetic oligonucleotide
guacugaguaaaagauuug

SEQ ID NO: 878997 - RNA, 19 nt, Artificial Sequence
  Description of Artificial Sequence: Synthetic oligonucleotide
aaggaaggacuuaccacau

SEQ ID NO: 878998 - RNA, 19 nt, Artificial Sequence
  Description of Artificial Sequence: Synthetic oligonucleotide
gaguacuuaguaaaggauu

SEQ ID NO: 878999 - RNA, 19 nt, Artificial Sequence
  Description of Artificial Sequence: Synthetic oligonucleotide
uagauggcuugcuggccug

SEQ ID NO: 879000 - RNA, 19 nt, Artificial Sequence
  Description of Artificial Sequence: Synthetic oligonucleotide
uucuuugcauuuguauuuu

SEQ ID NO: 879001 - RNA, 19 nt, Artificial Sequence
  Description of Artificial Sequence: Synthetic oligonucleotide
guguaguuauuggaguuuc

SEQ ID NO: 879002 - RNA, 19 nt, Artificial Sequence
  Description of Artificial Sequence: Synthetic oligonucleotide
uagugugugaaggcucugu

SEQ ID NO: 879003 - RNA, 19 nt, Artificial Sequence
  Description of Artificial Sequence: Synthetic oligonucleotide
aucgcugugauuacugcau

SEQ ID NO: 879004 - RNA, 19 nt, Artificial Sequence
  Description of Artificial Sequence: Synthetic oligonucleotide
agacuugaccacugguaaa

SEQ ID NO: 879005 - RNA, 19 nt, Artificial Sequence
  Description of Artificial Sequence: Synthetic oligonucleotide
aguucaugguaaaggauuu

SEQ ID NO: 879006 - RNA, 19 nt, Artificial Sequence
  Description of Artificial Sequence: Synthetic oligonucleotide
ucuaagauuugagcaucua

SEQ ID NO: 879007 - RNA, 19 nt, Artificial Sequence
  Description of Artificial Sequence: Synthetic oligonucleotide
augccuucuaaaugaugaa

SEQ ID NO: 879008 - RNA, 19 nt, Artificial Sequence
  Description of Artificial Sequence: Synthetic oligonucleotide
caucgcugugauuacugca

SEQ ID NO: 879009 - RNA, 19 nt, Artificial Sequence
  Description of Artificial Sequence: Synthetic oligonucleotide
ugcucucuccucucucucu

SEQ ID NO: 879010 - RNA, 19 nt, Artificial Sequence
  Description of Artificial Sequence: Synthetic oligonucleotide
cagcgcucaaagaaucauc

SEQ ID NO: 879011 - RNA, 19 nt, Artificial Sequence
  Description of Artificial Sequence: Synthetic oligonucleotide
uuguugcaaaagccuguau

SEQ ID NO: 879012 - RNA, 19 nt, Artificial Sequence
  Description of Artificial Sequence: Synthetic oligonucleotide
uaauucccuuauguauucu

SEQ ID NO: 879013 - RNA, 19 nt, Artificial Sequence
  Description of Artificial Sequence: Synthetic oligonucleotide
ggguuuaauucccuuaugu

SEQ ID NO: 879014 - RNA, 19 nt, Artificial Sequence
  Description of Artificial Sequence: Synthetic oligonucleotide
uacugcauguguaguuauu

SEQ ID NO: 879015 - RNA, 19 nt, Artificial Sequence
  Description of Artificial Sequence: Synthetic oligonucleotide
ccuuauguauucucucaug

SEQ ID NO: 879016 - RNA, 19 nt, Artificial Sequence
  Description of Artificial Sequence: Synthetic oligonucleotide
guuuuaagacuugaccacu

SEQ ID NO: 879017 - RNA, 19 nt, Artificial Sequence
  Description of Artificial Sequence: Synthetic oligonucleotide
cuuguacaguuucucuaga

SEQ ID NO: 879018 - RNA, 19 nt, Artificial Sequence
  Description of Artificial Sequence: Synthetic oligonucleotide
cuucuuaccuuuauauuuu

SEQ ID NO: 879019 - RNA, 19 nt, Artificial Sequence
  Description of Artificial Sequence: Synthetic oligonucleotide
gcaguacuguagcauuucc

SEQ ID NO: 879020 - RNA, 19 nt, Artificial Sequence
  Description of Artificial Sequence: Synthetic oligonucleotide
agugcacauguggaggggu

SEQ ID NO: 879021 - RNA, 19 nt, Artificial Sequence
  Description of Artificial Sequence: Synthetic oligonucleotide
gaggcaucgcugugauuac

SEQ ID NO: 879022 - RNA, 19 nt, Artificial Sequence
  Description of Artificial Sequence: Synthetic oligonucleotide
ggacaggaucacauuuucg

SEQ ID NO: 879023 - RNA, 19 nt, Artificial Sequence
  Description of Artificial Sequence: Synthetic oligonucleotide
guguggugucucuccaaug

SEQ ID NO: 879024 - RNA, 19 nt, Artificial Sequence
  Description of Artificial Sequence: Synthetic oligonucleotide
gccagauaaaugcuauguc

SEQ ID NO: 879025 - RNA, 19 nt, Artificial Sequence
  Description of Artificial Sequence: Synthetic oligonucleotide
uaguuucacuuguucuaua

SEQ ID NO: 879026 - RNA, 19 nt, Artificial Sequence
  Description of Artificial Sequence: Synthetic oligonucleotide
acauguuuaccuggagaau

SEQ ID NO: 879027 - RNA, 19 nt, Artificial Sequence
  Description of Artificial Sequence: Synthetic oligonucleotide
cauuuucgauaguucucca

SEQ ID NO: 879028 - RNA, 19 nt, Artificial Sequence
  Description of Artificial Sequence: Synthetic oligonucleotide
gcaugaggcaguacuguag

SEQ ID NO: 879029 - RNA, 19 nt, Artificial Sequence
  Description of Artificial Sequence: Synthetic oligonucleotide
aggcaugaggcaguacugu

SEQ ID NO: 879030 - RNA, 19 nt, Artificial Sequence
  Description of Artificial Sequence: Synthetic oligonucleotide
gcucaaagaaucaucauau

SEQ ID NO: 879031 - RNA, 19 nt, Artificial Sequence
  Description of Artificial Sequence: Synthetic oligonucleotide
ucccugccuguucuuuucu

SEQ ID NO: 879032 - RNA, 19 nt, Artificial Sequence
  Description of Artificial Sequence: Synthetic oligonucleotide
caccuauagugucuucuca

SEQ ID NO: 879033 - RNA, 19 nt, Artificial Sequence
  Description of Artificial Sequence: Synthetic oligonucleotide
cugagucgaggcauugcca

SEQ ID NO: 879034 - RNA, 19 nt, Artificial Sequence
  Description of Artificial Sequence: Synthetic oligonucleotide
auguuuaccuggagaauua

SEQ ID NO: 879035 - RNA, 19 nt, Artificial Sequence
  Description of Artificial Sequence: Synthetic oligonucleotide
gaggcaguacuguagcauu

SEQ ID NO: 879036 - RNA, 19 nt, Artificial Sequence
  Description of Artificial Sequence: Synthetic oligonucleotide
augaaagacuuugccgcau

SEQ ID NO: 879037 - RNA, 19 nt, Artificial Sequence
  Description of Artificial Sequence: Synthetic oligonucleotide
caacagaggcaucgcugug

SEQ ID NO: 879038 - RNA, 19 nt, Artificial Sequence
  Description of Artificial Sequence: Synthetic oligonucleotide
agauggcuugcuggccugg

SEQ ID NO: 879039 - RNA, 19 nt, Artificial Sequence
  Description of Artificial Sequence: Synthetic oligonucleotide
cuguucuuuucuuuacggu

SEQ ID NO: 879040 - RNA, 19 nt, Artificial Sequence
  Description of Artificial Sequence: Synthetic oligonucleotide
agaccccugugacauguuu

SEQ ID NO: 879041 - RNA, 19 nt, Artificial Sequence
  Description of Artificial Sequence: Synthetic oligonucleotide
ggcaucgcugugauuacug

SEQ ID NO: 879042 - RNA, 19 nt, Artificial Sequence
  Description of Artificial Sequence: Synthetic oligonucleotide
guuguugcaaaagccugua

SEQ ID NO: 879043 - RNA, 19 nt, Artificial Sequence
  Description of Artificial Sequence: Synthetic oligonucleotide
ucucccugccuguucuuuu

SEQ ID NO: 879044 - RNA, 19 nt, Artificial Sequence
  Description of Artificial Sequence: Synthetic oligonucleotide
cauguuuaccuggagaauu

SEQ ID NO: 879045 - RNA, 19 nt, Artificial Sequence
  Description of Artificial Sequence: Synthetic oligonucleotide
uuggcaccuauagugucuu

SEQ ID NO: 879046 - RNA, 19 nt, Artificial Sequence
  Description of Artificial Sequence: Synthetic oligonucleotide
gcaucgcugugauuacugc

SEQ ID NO: 879047 - RNA, 19 nt, Artificial Sequence
  Description of Artificial Sequence: Synthetic oligonucleotide
cugugauuacugcaugugu

SEQ ID NO: 879048 - RNA, 19 nt, Artificial Sequence
  Description of Artificial Sequence: Synthetic oligonucleotide
cucucuccucucucucuac

SEQ ID NO: 879049 - RNA, 19 nt, Artificial Sequence
  Description of Artificial Sequence: Synthetic oligonucleotide
caucauauucucccugccu

SEQ ID NO: 879050 - RNA, 19 nt, Artificial Sequence
  Description of Artificial Sequence: Synthetic oligonucleotide
gcaccuauagugucuucuc

SEQ ID NO: 879051 - RNA, 19 nt, Artificial Sequence
  Description of Artificial Sequence: Synthetic oligonucleotide
auagugugugaaggcucug

SEQ ID NO: 879052 - RNA, 19 nt, Artificial Sequence
  Description of Artificial Sequence: Synthetic oligonucleotide
agucucugauguguuuuaa

SEQ ID NO: 879053 - RNA, 19 nt, Artificial Sequence
  Description of Artificial Sequence: Synthetic oligonucleotide
guaguuucacuuguucuau

SEQ ID NO: 879054 - RNA, 19 nt, Artificial Sequence
  Description of Artificial Sequence: Synthetic oligonucleotide
ugccgcauucuuggcaccu

SEQ ID NO: 879055 - RNA, 19 nt, Artificial Sequence
  Description of Artificial Sequence: Synthetic oligonucleotide
cuguuaggauuuguaggca

SEQ ID NO: 879056 - RNA, 19 nt, Artificial Sequence
  Description of Artificial Sequence: Synthetic oligonucleotide
cuugaccacugguaaagau

SEQ ID NO: 879057 - RNA, 19 nt, Artificial Sequence
  Description of Artificial Sequence: Synthetic oligonucleotide
aggcagagaaugccagaua

SEQ ID NO: 879058 - RNA, 19 nt, Artificial Sequence
  Description of Artificial Sequence: Synthetic oligonucleotide
aggaaggacuuaccacauu

SEQ ID NO: 879059 - RNA, 19 nt, Artificial Sequence
  Description of Artificial Sequence: Synthetic oligonucleotide
cucauggauagugaggcau

SEQ ID NO: 879060 - RNA, 19 nt, Artificial Sequence
  Description of Artificial Sequence: Synthetic oligonucleotide
cugcucucuccucucucuc

SEQ ID NO: 879061 - RNA, 19 nt, Artificial Sequence
  Description of Artificial Sequence: Synthetic oligonucleotide
cacuguuacaucccugaau

SEQ ID NO: 879062 - RNA, 19 nt, Artificial Sequence
  Description of Artificial Sequence: Synthetic oligonucleotide
agccuguaugcagcgcuca

SEQ ID NO: 879063 - RNA, 19 nt, Artificial Sequence
  Description of Artificial Sequence: Synthetic oligonucleotide
gaguuacaugguaaaggau

SEQ ID NO: 879064 - RNA, 19 nt, Artificial Sequence
  Description of Artificial Sequence: Synthetic oligonucleotide
gagcaucuaguaaaagauu

SEQ ID NO: 879065 - RNA, 19 nt, Artificial Sequence
  Description of Artificial Sequence: Synthetic oligonucleotide
agcagaccccugugacaug

SEQ ID NO: 879066 - RNA, 19 nt, Artificial Sequence
  Description of Artificial Sequence: Synthetic oligonucleotide
cauguggaggggucaugaa

SEQ ID NO: 879067 - RNA, 19 nt, Artificial Sequence
  Description of Artificial Sequence: Synthetic oligonucleotide
agugaggcaugaggcagua

SEQ ID NO: 879068 - RNA, 19 nt, Artificial Sequence
  Description of Artificial Sequence: Synthetic oligonucleotide
cucugaucuucaguaaagu

SEQ ID NO: 879069 - RNA, 19 nt, Artificial Sequence
  Description of Artificial Sequence: Synthetic oligonucleotide
cacauguggaggggucaug

SEQ ID NO: 879070 - RNA, 19 nt, Artificial Sequence
  Description of Artificial Sequence: Synthetic oligonucleotide
ggcaguacuguagcauuuc

SEQ ID NO: 879071 - RNA, 19 nt, Artificial Sequence
  Description of Artificial Sequence: Synthetic oligonucleotide
cucuccucucucucuaccu

SEQ ID NO: 879072 - RNA, 19 nt, Artificial Sequence
  Description of Artificial Sequence: Synthetic oligonucleotide
cucaaagaaucaucauauu

SEQ ID NO: 879073 - RNA, 19 nt, Artificial Sequence
  Description of Artificial Sequence: Synthetic oligonucleotide
cccugugacauguuuaccu

SEQ ID NO: 879074 - RNA, 19 nt, Artificial Sequence
  Description of Artificial Sequence: Synthetic oligonucleotide
ggcaugaggcaguacugua

SEQ ID NO: 879075 - RNA, 19 nt, Artificial Sequence
  Description of Artificial Sequence: Synthetic oligonucleotide
aggcaucgcugugauuacu

SEQ ID NO: 879076 - RNA, 19 nt, Artificial Sequence
  Description of Artificial Sequence: Synthetic oligonucleotide
guauucuguuaggauuugu

SEQ ID NO: 879077 - RNA, 19 nt, Artificial Sequence
  Description of Artificial Sequence: Synthetic oligonucleotide
cuguuacaucccugaaugu

SEQ ID NO: 879078 - RNA, 19 nt, Artificial Sequence
  Description of Artificial Sequence: Synthetic oligonucleotide
cgcucaaagaaucaucaua

SEQ ID NO: 879079 - RNA, 19 nt, Artificial Sequence
  Description of Artificial Sequence: Synthetic oligonucleotide
cuggugucuccugaaguua

SEQ ID NO: 879080 - RNA, 19 nt, Artificial Sequence
  Description of Artificial Sequence: Synthetic oligonucleotide
ggcaccuauagugucuucu

SEQ ID NO: 879081 - RNA, 19 nt, Artificial Sequence
  Description of Artificial Sequence: Synthetic oligonucleotide
guacaaguacucugaucuu

SEQ ID NO: 879082 - RNA, 19 nt, Artificial Sequence
  Description of Artificial Sequence: Synthetic oligonucleotide
uggcaccuauagugucuuc

SEQ ID NO: 879083 - RNA, 19 nt, Artificial Sequence
  Description of Artificial Sequence: Synthetic oligonucleotide
gguguggugucucuccaau

SEQ ID NO: 879084 - RNA, 19 nt, Artificial Sequence
  Description of Artificial Sequence: Synthetic oligonucleotide
aggauaugucacagucuuu

SEQ ID NO: 879085 - RNA, 19 nt, Artificial Sequence
  Description of Artificial Sequence: Synthetic oligonucleotide
cugagcugagucgaggcau

SEQ ID NO: 879086 - RNA, 19 nt, Artificial Sequence
  Description of Artificial Sequence: Synthetic oligonucleotide
cagcagaccccugugacau

SEQ ID NO: 879087 - RNA, 19 nt, Artificial Sequence
  Description of Artificial Sequence: Synthetic oligonucleotide
cugaugccuucuaaaugau

SEQ ID NO: 879088 - RNA, 19 nt, Artificial Sequence
  Description of Artificial Sequence: Synthetic oligonucleotide
cuccugaaguuagaauagu

SEQ ID NO: 879089 - RNA, 19 nt, Artificial Sequence
  Description of Artificial Sequence: Synthetic oligonucleotide
ggauccuuggcugcucucu

SEQ ID NO: 879090 - RNA, 19 nt, Artificial Sequence
  Description of Artificial Sequence: Synthetic oligonucleotide
ggugucuccugaaguuaga

SEQ ID NO: 879091 - RNA, 19 nt, Artificial Sequence
  Description of Artificial Sequence: Synthetic oligonucleotide
gcugcucucuccucucucu

SEQ ID NO: 879092 - RNA, 19 nt, Artificial Sequence
  Description of Artificial Sequence: Synthetic oligonucleotide
gcucucuccucucucucua

SEQ ID NO: 879093 - RNA, 19 nt, Artificial Sequence
  Description of Artificial Sequence: Synthetic oligonucleotide
guauucucucauggauagu

SEQ ID NO: 879094 - RNA, 19 nt, Artificial Sequence
  Description of Artificial Sequence: Synthetic oligonucleotide
gugaggcaugaggcaguac

SEQ ID NO: 879095 - RNA, 19 nt, Artificial Sequence
  Description of Artificial Sequence: Synthetic oligonucleotide
gcagaccccugugacaugu

SEQ ID NO: 879096 - RNA, 19 nt, Artificial Sequence
  Description of Artificial Sequence: Synthetic oligonucleotide
ggagucuguagugucuuuu

SEQ ID NO: 879097 - RNA, 19 nt, Artificial Sequence
  Description of Artificial Sequence: Synthetic oligonucleotide
cauauucucccugccuguu

SEQ ID NO: 879098 - RNA, 19 nt, Artificial Sequence
  Description of Artificial Sequence: Synthetic oligonucleotide
cccuuauguauucucucau

SEQ ID NO: 879099 - RNA, 19 nt, Artificial Sequence
  Description of Artificial Sequence: Synthetic oligonucleotide
gcagcgcucaaagaaucau

SEQ ID NO: 879100 - RNA, 19 nt, Artificial Sequence
  Description of Artificial Sequence: Synthetic oligonucleotide
ccacuguuacaucccugaa

SEQ ID NO: 879101 - RNA, 19 nt, Artificial Sequence
  Description of Artificial Sequence: Synthetic oligonucleotide
gcgcucaaagaaucaucau

SEQ ID NO: 879102 - RNA, 19 nt, Artificial Sequence
  Description of Artificial Sequence: Synthetic oligonucleotide
ccaauguagauugguuguu

SEQ ID NO: 879103 - RNA, 19 nt, Artificial Sequence
  Description of Artificial Sequence: Synthetic oligonucleotide
gccgcauucuuggcaccua

SEQ ID NO: 879104 - RNA, 19 nt, Artificial Sequence
  Description of Artificial Sequence: Synthetic oligonucleotide
cagaccccugugacauguu

SEQ ID NO: 879105 - RNA, 19 nt, Artificial Sequence
  Description of Artificial Sequence: Synthetic oligonucleotide
cagaggcaucgcugugauu

SEQ ID NO: 879106 - RNA, 19 nt, Artificial Sequence
  Description of Artificial Sequence: Synthetic oligonucleotide
ccgcauucuuggcaccuau

SEQ ID NO: 879107 - RNA, 19 nt, Artificial Sequence
  Description of Artificial Sequence: Synthetic oligonucleotide
ugagaauacagucagaugg

SEQ ID NO: 879108 - RNA, 19 nt, Artificial Sequence
  Description of Artificial Sequence: Synthetic oligonucleotide
aaaagucuaaaucagugag

SEQ ID NO: 879109 - RNA, 19 nt, Artificial Sequence
  Description of Artificial Sequence: Synthetic oligonucleotide
aacuguuugauagagagcg

SEQ ID NO: 879110 - RNA, 19 nt, Artificial Sequence
  Description of Artificial Sequence: Synthetic oligonucleotide
aacauauucaagcauuggg

SEQ ID NO: 879111 - RNA, 19 nt, Artificial Sequence
  Description of Artificial Sequence: Synthetic oligonucleotide
aauaaauggaucaaauccg

SEQ ID NO: 879112 - RNA, 19 nt, Artificial Sequence
  Description of Artificial Sequence: Synthetic oligonucleotide
agauguacuccacugaugc

SEQ ID NO: 879113 - RNA, 19 nt, Artificial Sequence
  Description of Artificial Sequence: Synthetic oligonucleotide
ucagcuacauuacaggugg

SEQ ID NO: 879114 - RNA, 19 nt, Artificial Sequence
  Description of Artificial Sequence: Synthetic oligonucleotide
aaaagauuaacuucucuca

SEQ ID NO: 879115 - RNA, 19 nt, Artificial Sequence
  Description of Artificial Sequence: Synthetic oligonucleotide
uuuaccaagaguaacgaga

SEQ ID NO: 879116 - RNA, 19 nt, Artificial Sequence
  Description of Artificial Sequence: Synthetic oligonucleotide
uaaucgauggaacagaagu

SEQ ID NO: 879117 - RNA, 19 nt, Artificial Sequence
  Description of Artificial Sequence: Synthetic oligonucleotide
auuagucuugaucuugucc

SEQ ID NO: 879118 - RNA, 19 nt, Artificial Sequence
  Description of Artificial Sequence: Synthetic oligonucleotide
aucgauacucccuaugugc

SEQ ID NO: 879119 - RNA, 19 nt, Artificial Sequence
  Description of Artificial Sequence: Synthetic oligonucleotide
aguuuuaacagcuggguag

SEQ ID NO: 879120 - RNA, 19 nt, Artificial Sequence
  Description of Artificial Sequence: Synthetic oligonucleotide
uauaggaagggcuccaugg

SEQ ID NO: 879121 - RNA, 19 nt, Artificial Sequence
  Description of Artificial Sequence: Synthetic oligonucleotide
aacaugaaaguaccacacc

SEQ ID NO: 879122 - RNA, 19 nt, Artificial Sequence
  Description of Artificial Sequence: Synthetic oligonucleotide
uugguuaauaagcauucgg

SEQ ID NO: 879123 - RNA, 19 nt, Artificial Sequence
  Description of Artificial Sequence: Synthetic oligonucleotide
aguaacgagaguuuuaaca

SEQ ID NO: 879124 - RNA, 19 nt, Artificial Sequence
  Description of Artificial Sequence: Synthetic oligonucleotide
uaaauaacagcaucgguac

SEQ ID NO: 879125 - RNA, 19 nt, Artificial Sequence
  Description of Artificial Sequence: Synthetic oligonucleotide
ugggaaugcauauaagagg

SEQ ID NO: 879126 - RNA, 19 nt, Artificial Sequence
  Description of Artificial Sequence: Synthetic oligonucleotide
uucuuuguacucaaucacg

SEQ ID NO: 879127 - RNA, 19 nt, Artificial Sequence
  Description of Artificial Sequence: Synthetic oligonucleotide
guaacgagaguuuuaacag

SEQ ID NO: 879128 - RNA, 19 nt, Artificial Sequence
  Description of Artificial Sequence: Synthetic oligonucleotide
ugcgcagaaacauauauga

SEQ ID NO: 879129 - RNA, 19 nt, Artificial Sequence
  Description of Artificial Sequence: Synthetic oligonucleotide
ugugggaacaacaucguug

SEQ ID NO: 879130 - RNA, 19 nt, Artificial Sequence
  Description of Artificial Sequence: Synthetic oligonucleotide
gaugagacggcacauaaac

SEQ ID NO: 879131 - RNA, 19 nt, Artificial Sequence
  Description of Artificial Sequence: Synthetic oligonucleotide
aacuaaucccacugaaggg

SEQ ID NO: 879132 - RNA, 19 nt, Artificial Sequence
  Description of Artificial Sequence: Synthetic oligonucleotide
uuaccaagaguaacgagag

SEQ ID NO: 879133 - RNA, 19 nt, Artificial Sequence
  Description of Artificial Sequence: Synthetic oligonucleotide
ucacuuaucuuaauggaca

SEQ ID NO: 879134 - RNA, 19 nt, Artificial Sequence
  Description of Artificial Sequence: Synthetic oligonucleotide
agcauucggaaagagaugc

SEQ ID NO: 879135 - RNA, 19 nt, Artificial Sequence
  Description of Artificial Sequence: Synthetic oligonucleotide
acuaaucccacugaagggc

SEQ ID NO: 879136 - RNA, 19 nt, Artificial Sequence
  Description of Artificial Sequence: Synthetic oligonucleotide
guuaucuaaaacccguggg

SEQ ID NO: 879137 - RNA, 19 nt, Artificial Sequence
  Description of Artificial Sequence: Synthetic oligonucleotide
aagucuaaaucagugagug

SEQ ID NO: 879138 - RNA, 19 nt, Artificial Sequence
  Description of Artificial Sequence: Synthetic oligonucleotide
ugaugggugcaaaugaugc

SEQ ID NO: 879139 - RNA, 19 nt, Artificial Sequence
  Description of Artificial Sequence: Synthetic oligonucleotide
uuaacuauaggaagggcuc

SEQ ID NO: 879140 - RNA, 19 nt, Artificial Sequence
  Description of Artificial Sequence: Synthetic oligonucleotide
ugguuaauaagcauucgga

SEQ ID NO: 879141 - RNA, 19 nt, Artificial Sequence
  Description of Artificial Sequence: Synthetic oligonucleotide
agacuuauugaaaacgggc

SEQ ID NO: 879142 - RNA, 19 nt, Artificial Sequence
  Description of Artificial Sequence: Synthetic oligonucleotide
cacugagccaauauaaagg

SEQ ID NO: 879143 - RNA, 19 nt, Artificial Sequence
  Description of Artificial Sequence: Synthetic oligonucleotide
uuaucuaaaacccgugggu

SEQ ID NO: 879144 - RNA, 19 nt, Artificial Sequence
  Description of Artificial Sequence: Synthetic oligonucleotide
uuuagagugcuuuaaucga

SEQ ID NO: 879145 - RNA, 19 nt, Artificial Sequence
  Description of Artificial Sequence: Synthetic oligonucleotide
aacaacaucguugugucug

SEQ ID NO: 879146 - RNA, 19 nt, Artificial Sequence
  Description of Artificial Sequence: Synthetic oligonucleotide
aguuaucuaaaacccgugg

SEQ ID NO: 879147 - RNA, 19 nt, Artificial Sequence
  Description of Artificial Sequence: Synthetic oligonucleotide
auuaucucuuccgaagucc

SEQ ID NO: 879148 - RNA, 19 nt, Artificial Sequence
  Description of Artificial Sequence: Synthetic oligonucleotide
ugaaagggccuucagauaa

SEQ ID NO: 879149 - RNA, 19 nt, Artificial Sequence
  Description of Artificial Sequence: Synthetic oligonucleotide
aaugcauauaagaggacag

SEQ ID NO: 879150 - RNA, 19 nt, Artificial Sequence
  Description of Artificial Sequence: Synthetic oligonucleotide
ugcauuaucucuuccgaag

SEQ ID NO: 879151 - RNA, 19 nt, Artificial Sequence
  Description of Artificial Sequence: Synthetic oligonucleotide
ugcagacuuauugaaaacg

SEQ ID NO: 879152 - RNA, 19 nt, Artificial Sequence
  Description of Artificial Sequence: Synthetic oligonucleotide
aaaguuaucuaaaacccgu

SEQ ID NO: 879153 - RNA, 19 nt, Artificial Sequence
  Description of Artificial Sequence: Synthetic oligonucleotide
uaacaugaaaguaccacac

SEQ ID NO: 879154 - RNA, 19 nt, Artificial Sequence
  Description of Artificial Sequence: Synthetic oligonucleotide
ugguauaaaaccgauccag

SEQ ID NO: 879155 - RNA, 19 nt, Artificial Sequence
  Description of Artificial Sequence: Synthetic oligonucleotide
ucugcauguaccaacucug

SEQ ID NO: 879156 - RNA, 19 nt, Artificial Sequence
  Description of Artificial Sequence: Synthetic oligonucleotide
gaaaguuaucuaaaacccg

SEQ ID NO: 879157 - RNA, 19 nt, Artificial Sequence
  Description of Artificial Sequence: Synthetic oligonucleotide
aguugguagaauaaggguc

SEQ ID NO: 879158 - RNA, 19 nt, Artificial Sequence
  Description of Artificial Sequence: Synthetic oligonucleotide
accugaauagguuuguuug

SEQ ID NO: 879159 - RNA, 19 nt, Artificial Sequence
  Description of Artificial Sequence: Synthetic oligonucleotide
agauaaauaacagcaucgg

SEQ ID NO: 879160 - RNA, 19 nt, Artificial Sequence
  Description of Artificial Sequence: Synthetic oligonucleotide
auaucuggcauacagucga

SEQ ID NO: 879161 - RNA, 19 nt, Artificial Sequence
  Description of Artificial Sequence: Synthetic oligonucleotide
ugggaauaacaauagugcc

SEQ ID NO: 879162 - RNA, 19 nt, Artificial Sequence
  Description of Artificial Sequence: Synthetic oligonucleotide
aaagauuaacuucucucau

SEQ ID NO: 879163 - RNA, 19 nt, Artificial Sequence
  Description of Artificial Sequence: Synthetic oligonucleotide
augaauagguucuaacaug

SEQ ID NO: 879164 - RNA, 19 nt, Artificial Sequence
  Description of Artificial Sequence: Synthetic oligonucleotide
cuuguauuuugaugcaucc

SEQ ID NO: 879165 - RNA, 19 nt, Artificial Sequence
  Description of Artificial Sequence: Synthetic oligonucleotide
uuaagaguugguagaauaa

SEQ ID NO: 879166 - RNA, 19 nt, Artificial Sequence
  Description of Artificial Sequence: Synthetic oligonucleotide
caacuuuaguggaagauac

SEQ ID NO: 879167 - RNA, 19 nt, Artificial Sequence
  Description of Artificial Sequence: Synthetic oligonucleotide
ucuaaaucagugagugaag

SEQ ID NO: 879168 - RNA, 19 nt, Artificial Sequence
  Description of Artificial Sequence: Synthetic oligonucleotide
cacucgauuuucuacaaag

SEQ ID NO: 879169 - RNA, 19 nt, Artificial Sequence
  Description of Artificial Sequence: Synthetic oligonucleotide
auaugcaucuuucacgaca

SEQ ID NO: 879170 - RNA, 19 nt, Artificial Sequence
  Description of Artificial Sequence: Synthetic oligonucleotide
acaguuuuagaucucccug

SEQ ID NO: 879171 - RNA, 19 nt, Artificial Sequence
  Description of Artificial Sequence: Synthetic oligonucleotide
acaucguugugucuguuuc

SEQ ID NO: 879172 - RNA, 19 nt, Artificial Sequence
  Description of Artificial Sequence: Synthetic oligonucleotide
agaguugguagaauaaggg

SEQ ID NO: 879173 - RNA, 19 nt, Artificial Sequence
  Description of Artificial Sequence: Synthetic oligonucleotide
cucaaucacgccuugggcc

SEQ ID NO: 879174 - RNA, 19 nt, Artificial Sequence
  Description of Artificial Sequence: Synthetic oligonucleotide
acugagccaauauaaagga

SEQ ID NO: 879175 - RNA, 19 nt, Artificial Sequence
  Description of Artificial Sequence: Synthetic oligonucleotide
uaagaguugguagaauaag

SEQ ID NO: 879176 - RNA, 19 nt, Artificial Sequence
  Description of Artificial Sequence: Synthetic oligonucleotide
agggccuucagauaaauaa

SEQ ID NO: 879177 - RNA, 19 nt, Artificial Sequence
  Description of Artificial Sequence: Synthetic oligonucleotide
ugaagggcgguucaacaag

SEQ ID NO: 879178 - RNA, 19 nt, Artificial Sequence
  Description of Artificial Sequence: Synthetic oligonucleotide
guucuauuagucuugaucu

SEQ ID NO: 879179 - RNA, 19 nt, Artificial Sequence
  Description of Artificial Sequence: Synthetic oligonucleotide
uguacuccacugaugcagg

SEQ ID NO: 879180 - RNA, 19 nt, Artificial Sequence
  Description of Artificial Sequence: Synthetic oligonucleotide
uguuugauagagagcggag

SEQ ID NO: 879181 - RNA, 19 nt, Artificial Sequence
  Description of Artificial Sequence: Synthetic oligonucleotide
ucuauuagucuugaucuug

SEQ ID NO: 879182 - RNA, 19 nt, Artificial Sequence
  Description of Artificial Sequence: Synthetic oligonucleotide
acaaaguucuauuagucuu

SEQ ID NO: 879183 - RNA, 19 nt, Artificial Sequence
  Description of Artificial Sequence: Synthetic oligonucleotide
auuaacuauaggaagggcu

SEQ ID NO: 879184 - RNA, 19 nt, Artificial Sequence
  Description of Artificial Sequence: Synthetic oligonucleotide
uuuaaucgauggaacagaa

SEQ ID NO: 879185 - RNA, 19 nt, Artificial Sequence
  Description of Artificial Sequence: Synthetic oligonucleotide
auacaaguggauuaacuau

SEQ ID NO: 879186 - RNA, 19 nt, Artificial Sequence
  Description of Artificial Sequence: Synthetic oligonucleotide
auaaauaacagcaucggua

SEQ ID NO: 879187 - RNA, 19 nt, Artificial Sequence
  Description of Artificial Sequence: Synthetic oligonucleotide
cagguaauacuguucacag

SEQ ID NO: 879188 - RNA, 19 nt, Artificial Sequence
  Description of Artificial Sequence: Synthetic oligonucleotide
aauaagcauucggaaagag

SEQ ID NO: 879189 - RNA, 19 nt, Artificial Sequence
  Description of Artificial Sequence: Synthetic oligonucleotide
uuaaucgauggaacagaag

SEQ ID NO: 879190 - RNA, 19 nt, Artificial Sequence
  Description of Artificial Sequence: Synthetic oligonucleotide
agagugcuuuaaucgaugg

SEQ ID NO: 879191 - RNA, 19 nt, Artificial Sequence
  Description of Artificial Sequence: Synthetic oligonucleotide
ucgccagucguacaggaag

SEQ ID NO: 879192 - RNA, 19 nt, Artificial Sequence
  Description of Artificial Sequence: Synthetic oligonucleotide
agcggagacggagagaagc

SEQ ID NO: 879193 - RNA, 19 nt, Artificial Sequence
  Description of Artificial Sequence: Synthetic oligonucleotide
uacaaguggauuaacuaua

SEQ ID NO: 879194 - RNA, 19 nt, Artificial Sequence
  Description of Artificial Sequence: Synthetic oligonucleotide
accuaagucacuuaucuua

SEQ ID NO: 879195 - RNA, 19 nt, Artificial Sequence
  Description of Artificial Sequence: Synthetic oligonucleotide
cagacuuauugaaaacggg

SEQ ID NO: 879196 - RNA, 19 nt, Artificial Sequence
  Description of Artificial Sequence: Synthetic oligonucleotide
guuaacuugcagaagaaga

SEQ ID NO: 879197 - RNA, 19 nt, Artificial Sequence
  Description of Artificial Sequence: Synthetic oligonucleotide
agucacuuaucuuaaugga

SEQ ID NO: 879198 - RNA, 19 nt, Artificial Sequence
  Description of Artificial Sequence: Synthetic oligonucleotide
aguugucuuguaauggcgc

SEQ ID NO: 879199 - RNA, 19 nt, Artificial Sequence
  Description of Artificial Sequence: Synthetic oligonucleotide
guagaauaagggucucugg

SEQ ID NO: 879200 - RNA, 19 nt, Artificial Sequence
  Description of Artificial Sequence: Synthetic oligonucleotide
aaguuauccggcaaaagau

SEQ ID NO: 879201 - RNA, 19 nt, Artificial Sequence
  Description of Artificial Sequence: Synthetic oligonucleotide
agugcuuuaaucgauggaa

SEQ ID NO: 879202 - RNA, 19 nt, Artificial Sequence
  Description of Artificial Sequence: Synthetic oligonucleotide
cacgacaucagcuacauua

SEQ ID NO: 879203 - RNA, 19 nt, Artificial Sequence
  Description of Artificial Sequence: Synthetic oligonucleotide
uaacgagaguuuuaacagc

SEQ ID NO: 879204 - RNA, 19 nt, Artificial Sequence
  Description of Artificial Sequence: Synthetic oligonucleotide
uuaucucuuccgaagucca

SEQ ID NO: 879205 - RNA, 19 nt, Artificial Sequence
  Description of Artificial Sequence: Synthetic oligonucleotide
auaacaauagugccacggu

SEQ ID NO: 879206 - RNA, 19 nt, Artificial Sequence
  Description of Artificial Sequence: Synthetic oligonucleotide
uaugcaucuuucacgacau

SEQ ID NO: 879207 - RNA, 19 nt, Artificial Sequence
  Description of Artificial Sequence: Synthetic oligonucleotide
ucaaucacgccuugggcca

SEQ ID NO: 879208 - RNA, 19 nt, Artificial Sequence
  Description of Artificial Sequence: Synthetic oligonucleotide
ucuuguaauggcgccaugc

SEQ ID NO: 879209 - RNA, 19 nt, Artificial Sequence
  Description of Artificial Sequence: Synthetic oligonucleotide
cugauauuaaucaaaacau

SEQ ID NO: 879210 - RNA, 19 nt, Artificial Sequence
  Description of Artificial Sequence: Synthetic oligonucleotide
cuaaucccacugaagggcg

SEQ ID NO: 879211 - RNA, 19 nt, Artificial Sequence
  Description of Artificial Sequence: Synthetic oligonucleotide
ucccuaugugcuuaggaug

SEQ ID NO: 879212 - RNA, 19 nt, Artificial Sequence
  Description of Artificial Sequence: Synthetic oligonucleotide
uggauguuacugcuaauaa

SEQ ID NO: 879213 - RNA, 19 nt, Artificial Sequence
  Description of Artificial Sequence: Synthetic oligonucleotide
uggacaagucuucuuuacc

SEQ ID NO: 879214 - RNA, 19 nt, Artificial Sequence
  Description of Artificial Sequence: Synthetic oligonucleotide
aagauacaaguggauuaac

SEQ ID NO: 879215 - RNA, 19 nt, Artificial Sequence
  Description of Artificial Sequence: Synthetic oligonucleotide
aagauuaacuucucucauu

SEQ ID NO: 879216 - RNA, 19 nt, Artificial Sequence
  Description of Artificial Sequence: Synthetic oligonucleotide
aaguaugcaaaugaacuuu

SEQ ID NO: 879217 - RNA, 19 nt, Artificial Sequence
  Description of Artificial Sequence: Synthetic oligonucleotide
uucaacaaguuauccggca

SEQ ID NO: 879218 - RNA, 19 nt, Artificial Sequence
  Description of Artificial Sequence: Synthetic oligonucleotide
acagucgagaaauuggcaa

SEQ ID NO: 879219 - RNA, 19 nt, Artificial Sequence
  Description of Artificial Sequence: Synthetic oligonucleotide
gaugcgguugguauaaaac

SEQ ID NO: 879220 - RNA, 19 nt, Artificial Sequence
  Description of Artificial Sequence: Synthetic oligonucleotide
gcugagacgucccagacag

SEQ ID NO: 879221 - RNA, 19 nt, Artificial Sequence
  Description of Artificial Sequence: Synthetic oligonucleotide
gauguuacugcuaauaaau

SEQ ID NO: 879222 - RNA, 19 nt, Artificial Sequence
  Description of Artificial Sequence: Synthetic oligonucleotide
cauucggaaagagaugcgg

SEQ ID NO: 879223 - RNA, 19 nt, Artificial Sequence
  Description of Artificial Sequence: Synthetic oligonucleotide
uugcgcagaaacauauaug

SEQ ID NO: 879224 - RNA, 19 nt, Artificial Sequence
  Description of Artificial Sequence: Synthetic oligonucleotide
gguucuaacaugaaaguac

SEQ ID NO: 879225 - RNA, 19 nt, Artificial Sequence
  Description of Artificial Sequence: Synthetic oligonucleotide
guggaauacauguaguuaa

SEQ ID NO: 879226 - RNA, 19 nt, Artificial Sequence
  Description of Artificial Sequence: Synthetic oligonucleotide
aguggauuaacuauaggaa

SEQ ID NO: 879227 - RNA, 19 nt, Artificial Sequence
  Description of Artificial Sequence: Synthetic oligonucleotide
uagcuuagcuguuucauau

SEQ ID NO: 879228 - RNA, 19 nt, Artificial Sequence
  Description of Artificial Sequence: Synthetic oligonucleotide
aaaccaccugaauagguuu

SEQ ID NO: 879229 - RNA, 19 nt, Artificial Sequence
  Description of Artificial Sequence: Synthetic oligonucleotide
ucaacaaguuauccggcaa

SEQ ID NO: 879230 - RNA, 19 nt, Artificial Sequence
  Description of Artificial Sequence: Synthetic oligonucleotide
ugaauagguuuguuuggug

SEQ ID NO: 879231 - RNA, 19 nt, Artificial Sequence
  Description of Artificial Sequence: Synthetic oligonucleotide
ucguacaggaagcuccuug

SEQ ID NO: 879232 - RNA, 19 nt, Artificial Sequence
  Description of Artificial Sequence: Synthetic oligonucleotide
agaaacauauaugaaguuu

SEQ ID NO: 879233 - RNA, 19 nt, Artificial Sequence
  Description of Artificial Sequence: Synthetic oligonucleotide
ucuggcauacagucgagaa

SEQ ID NO: 879234 - RNA, 19 nt, Artificial Sequence
  Description of Artificial Sequence: Synthetic oligonucleotide
acgguuaagaguugguaga

SEQ ID NO: 879235 - RNA, 19 nt, Artificial Sequence
  Description of Artificial Sequence: Synthetic oligonucleotide
gagacgaccacagcacucg

SEQ ID NO: 879236 - RNA, 19 nt, Artificial Sequence
  Description of Artificial Sequence: Synthetic oligonucleotide
ucuuuaccaagaguaacga

SEQ ID NO: 879237 - RNA, 19 nt, Artificial Sequence
  Description of Artificial Sequence: Synthetic oligonucleotide
uccggcaaaagauuaacuu

SEQ ID NO: 879238 - RNA, 19 nt, Artificial Sequence
  Description of Artificial Sequence: Synthetic oligonucleotide
cuugcagaagaagauaauc

SEQ ID NO: 879239 - RNA, 19 nt, Artificial Sequence
  Description of Artificial Sequence: Synthetic oligonucleotide
gaguuuuaccuccacccug

SEQ ID NO: 879240 - RNA, 19 nt, Artificial Sequence
  Description of Artificial Sequence: Synthetic oligonucleotide
ucgauacucccuaugugcu

SEQ ID NO: 879241 - RNA, 19 nt, Artificial Sequence
  Description of Artificial Sequence: Synthetic oligonucleotide
aggaguugucuuguaaugg

SEQ ID NO: 879242 - RNA, 19 nt, Artificial Sequence
  Description of Artificial Sequence: Synthetic oligonucleotide
gucuaaaucagugagugaa

SEQ ID NO: 879243 - RNA, 19 nt, Artificial Sequence
  Description of Artificial Sequence: Synthetic oligonucleotide
guuaagaguugguagaaua

SEQ ID NO: 879244 - RNA, 19 nt, Artificial Sequence
  Description of Artificial Sequence: Synthetic oligonucleotide
ucgauggaacagaaguaug

SEQ ID NO: 879245 - RNA, 19 nt, Artificial Sequence
  Description of Artificial Sequence: Synthetic oligonucleotide
gaucgauacucccuaugug

SEQ ID NO: 879246 - RNA, 19 nt, Artificial Sequence
  Description of Artificial Sequence: Synthetic oligonucleotide
acuuuaguggaagauacaa

SEQ ID NO: 879247 - RNA, 19 nt, Artificial Sequence
  Description of Artificial Sequence: Synthetic oligonucleotide
uuagaucucccugaaaaua

SEQ ID NO: 879248 - RNA, 19 nt, Artificial Sequence
  Description of Artificial Sequence: Synthetic oligonucleotide
caagcauugggaauaacaa

SEQ ID NO: 879249 - RNA, 19 nt, Artificial Sequence
  Description of Artificial Sequence: Synthetic oligonucleotide
caugaaaguaccacaccuc

SEQ ID NO: 879250 - RNA, 19 nt, Artificial Sequence
  Description of Artificial Sequence: Synthetic oligonucleotide
acaacuuuuagagugcuuu

SEQ ID NO: 879251 - RNA, 19 nt, Artificial Sequence
  Description of Artificial Sequence: Synthetic oligonucleotide
uuguuuggugcuuuggcau

SEQ ID NO: 879252 - RNA, 19 nt, Artificial Sequence
  Description of Artificial Sequence: Synthetic oligonucleotide
uaucuaaaacccguggguc

SEQ ID NO: 879253 - RNA, 19 nt, Artificial Sequence
  Description of Artificial Sequence: Synthetic oligonucleotide
aucuaaaacccgugggucu

SEQ ID NO: 879254 - RNA, 19 nt, Artificial Sequence
  Description of Artificial Sequence: Synthetic oligonucleotide
caggauuagugucaccacc

SEQ ID NO: 879255 - RNA, 19 nt, Artificial Sequence
  Description of Artificial Sequence: Synthetic oligonucleotide
uacagucgagaaauuggca

SEQ ID NO: 879256 - RNA, 19 nt, Artificial Sequence
  Description of Artificial Sequence: Synthetic oligonucleotide
cuuuaccaagaguaacgag

SEQ ID NO: 879257 - RNA, 19 nt, Artificial Sequence
  Description of Artificial Sequence: Synthetic oligonucleotide
agugccacgguuaagaguu

SEQ ID NO: 879258 - RNA, 19 nt, Artificial Sequence
  Description of Artificial Sequence: Synthetic oligonucleotide
cauauucaagcauugggaa

SEQ ID NO: 879259 - RNA, 19 nt, Artificial Sequence
  Description of Artificial Sequence: Synthetic oligonucleotide
cuacauuacaggugggauc

SEQ ID NO: 879260 - RNA, 19 nt, Artificial Sequence
  Description of Artificial Sequence: Synthetic oligonucleotide
guuuuaacagcuggguagc

SEQ ID NO: 879261 - RNA, 19 nt, Artificial Sequence
  Description of Artificial Sequence: Synthetic oligonucleotide
accaagaguaacgagaguu

SEQ ID NO: 879262 - RNA, 19 nt, Artificial Sequence
  Description of Artificial Sequence: Synthetic oligonucleotide
aaguaccacaccucacacu

SEQ ID NO: 879263 - RNA, 19 nt, Artificial Sequence
  Description of Artificial Sequence: Synthetic oligonucleotide
aacuuuuagagugcuuuaa

SEQ ID NO: 879264 - RNA, 19 nt, Artificial Sequence
  Description of Artificial Sequence: Synthetic oligonucleotide
gaucuguuugggcaccggc

SEQ ID NO: 879265 - RNA, 19 nt, Artificial Sequence
  Description of Artificial Sequence: Synthetic oligonucleotide
uggaauacauguaguuaaa

SEQ ID NO: 879266 - RNA, 19 nt, Artificial Sequence
  Description of Artificial Sequence: Synthetic oligonucleotide
aaguuaucuaaaacccgug

SEQ ID NO: 879267 - RNA, 19 nt, Artificial Sequence
  Description of Artificial Sequence: Synthetic oligonucleotide
gauggaacagaaguaugca

SEQ ID NO: 879268 - RNA, 19 nt, Artificial Sequence
  Description of Artificial Sequence: Synthetic oligonucleotide
uucaggaguugucuuguaa

SEQ ID NO: 879269 - RNA, 19 nt, Artificial Sequence
  Description of Artificial Sequence: Synthetic oligonucleotide
augagacggcacauaaacc

SEQ ID NO: 879270 - RNA, 19 nt, Artificial Sequence
  Description of Artificial Sequence: Synthetic oligonucleotide
ucucaucgaguucuugaac

SEQ ID NO: 879271 - RNA, 19 nt, Artificial Sequence
  Description of Artificial Sequence: Synthetic oligonucleotide
acaaguggauuaacuauag

SEQ ID NO: 879272 - RNA, 19 nt, Artificial Sequence
  Description of Artificial Sequence: Synthetic oligonucleotide
uuauccggcaaaagauuaa

SEQ ID NO: 879273 - RNA, 19 nt, Artificial Sequence
  Description of Artificial Sequence: Synthetic oligonucleotide
agaguaacgagaguuuuaa

SEQ ID NO: 879274 - RNA, 19 nt, Artificial Sequence
  Description of Artificial Sequence: Synthetic oligonucleotide
uagcgcucgaucuguuugg

SEQ ID NO: 879275 - RNA, 19 nt, Artificial Sequence
  Description of Artificial Sequence: Synthetic oligonucleotide
uaaucccacugaagggcgg

SEQ ID NO: 879276 - RNA, 19 nt, Artificial Sequence
  Description of Artificial Sequence: Synthetic oligonucleotide
cuuucacgacaucagcuac

SEQ ID NO: 879277 - RNA, 19 nt, Artificial Sequence
  Description of Artificial Sequence: Synthetic oligonucleotide
caaguggauuaacuauagg

SEQ ID NO: 879278 - RNA, 19 nt, Artificial Sequence
  Description of Artificial Sequence: Synthetic oligonucleotide
ggaguugucuuguaauggc

SEQ ID NO: 879279 - RNA, 19 nt, Artificial Sequence
  Description of Artificial Sequence: Synthetic oligonucleotide
uguacucaaucacgccuug

SEQ ID NO: 879280 - RNA, 19 nt, Artificial Sequence
  Description of Artificial Sequence: Synthetic oligonucleotide
agauacaaguggauuaacu

SEQ ID NO: 879281 - RNA, 19 nt, Artificial Sequence
  Description of Artificial Sequence: Synthetic oligonucleotide
acgacaucagcuacauuac

SEQ ID NO: 879282 - RNA, 19 nt, Artificial Sequence
  Description of Artificial Sequence: Synthetic oligonucleotide
aaccccuggaacuguauuu

SEQ ID NO: 879283 - RNA, 19 nt, Artificial Sequence
  Description of Artificial Sequence: Synthetic oligonucleotide
gaagauacaaguggauuaa

SEQ ID NO: 879284 - RNA, 19 nt, Artificial Sequence
  Description of Artificial Sequence: Synthetic oligonucleotide
gucacuuaucuuaauggac

SEQ ID NO: 879285 - RNA, 19 nt, Artificial Sequence
  Description of Artificial Sequence: Synthetic oligonucleotide
gcuuagcuguuucauaugc

SEQ ID NO: 879286 - RNA, 19 nt, Artificial Sequence
  Description of Artificial Sequence: Synthetic oligonucleotide
auaggaagggcuccaugga

SEQ ID NO: 879287 - RNA, 19 nt, Artificial Sequence
  Description of Artificial Sequence: Synthetic oligonucleotide
aagagaugcgguugguaua

SEQ ID NO: 879288 - RNA, 19 nt, Artificial Sequence
  Description of Artificial Sequence: Synthetic oligonucleotide
uauccggcaaaagauuaac

SEQ ID NO: 879289 - RNA, 19 nt, Artificial Sequence
  Description of Artificial Sequence: Synthetic oligonucleotide
ucuggagcuaccagguaau

SEQ ID NO: 879290 - RNA, 19 nt, Artificial Sequence
  Description of Artificial Sequence: Synthetic oligonucleotide
aucgauggaacagaaguau

SEQ ID NO: 879291 - RNA, 19 nt, Artificial Sequence
  Description of Artificial Sequence: Synthetic oligonucleotide
cauguaccaacucugaacu

SEQ ID NO: 879292 - RNA, 19 nt, Artificial Sequence
  Description of Artificial Sequence: Synthetic oligonucleotide
aacaucguugugucuguuu

SEQ ID NO: 879293 - RNA, 19 nt, Artificial Sequence
  Description of Artificial Sequence: Synthetic oligonucleotide
ugguuaacuugcagaagaa

SEQ ID NO: 879294 - RNA, 19 nt, Artificial Sequence
  Description of Artificial Sequence: Synthetic oligonucleotide
ugguucgcuacugggauug

SEQ ID NO: 879295 - RNA, 19 nt, Artificial Sequence
  Description of Artificial Sequence: Synthetic oligonucleotide
accagguaauacuguucac

SEQ ID NO: 879296 - RNA, 19 nt, Artificial Sequence
  Description of Artificial Sequence: Synthetic oligonucleotide
agacggcacauaaaccacc

SEQ ID NO: 879297 - RNA, 19 nt, Artificial Sequence
  Description of Artificial Sequence: Synthetic oligonucleotide
agagcggagacggagagaa

SEQ ID NO: 879298 - RNA, 19 nt, Artificial Sequence
  Description of Artificial Sequence: Synthetic oligonucleotide
gguuaauaagcauucggaa

SEQ ID NO: 879299 - RNA, 19 nt, Artificial Sequence
  Description of Artificial Sequence: Synthetic oligonucleotide
augugcuuaggaugagcag

SEQ ID NO: 879300 - RNA, 19 nt, Artificial Sequence
  Description of Artificial Sequence: Synthetic oligonucleotide
gggaaugcauauaagagga

SEQ ID NO: 879301 - RNA, 19 nt, Artificial Sequence
  Description of Artificial Sequence: Synthetic oligonucleotide
cacagaguagcuuagcugu

SEQ ID NO: 879302 - RNA, 19 nt, Artificial Sequence
  Description of Artificial Sequence: Synthetic oligonucleotide
ugcauguaccaacucugaa

SEQ ID NO: 879303 - RNA, 19 nt, Artificial Sequence
  Description of Artificial Sequence: Synthetic oligonucleotide
guguucgccagucguacag

SEQ ID NO: 879304 - RNA, 19 nt, Artificial Sequence
  Description of Artificial Sequence: Synthetic oligonucleotide
gaaacagaugagacggcac

SEQ ID NO: 879305 - RNA, 19 nt, Artificial Sequence
  Description of Artificial Sequence: Synthetic oligonucleotide
aaucgauggaacagaagua

SEQ ID NO: 879306 - RNA, 19 nt, Artificial Sequence
  Description of Artificial Sequence: Synthetic oligonucleotide
cuuuaaucgauggaacaga

SEQ ID NO: 879307 - RNA, 19 nt, Artificial Sequence
  Description of Artificial Sequence: Synthetic oligonucleotide
gcauguaccaacucugaac

SEQ ID NO: 879308 - RNA, 19 nt, Artificial Sequence
  Description of Artificial Sequence: Synthetic oligonucleotide
acucccuaugugcuuagga

SEQ ID NO: 879309 - RNA, 19 nt, Artificial Sequence
  Description of Artificial Sequence: Synthetic oligonucleotide
gauggaagucagcaaaagu

SEQ ID NO: 879310 - RNA, 19 nt, Artificial Sequence
  Description of Artificial Sequence: Synthetic oligonucleotide
gaguugguagaauaagggu

SEQ ID NO: 879311 - RNA, 19 nt, Artificial Sequence
  Description of Artificial Sequence: Synthetic oligonucleotide
ccugaauagguuuguuugg

SEQ ID NO: 879312 - RNA, 19 nt, Artificial Sequence
  Description of Artificial Sequence: Synthetic oligonucleotide
uaucuggcauacagucgag

SEQ ID NO: 879313 - RNA, 19 nt, Artificial Sequence
  Description of Artificial Sequence: Synthetic oligonucleotide
caguuuuagaucucccuga

SEQ ID NO: 879314 - RNA, 19 nt, Artificial Sequence
  Description of Artificial Sequence: Synthetic oligonucleotide
uucggaaagagaugcgguu

SEQ ID NO: 879315 - RNA, 19 nt, Artificial Sequence
  Description of Artificial Sequence: Synthetic oligonucleotide
gaagcgggaguagcgcucg

SEQ ID NO: 879316 - RNA, 19 nt, Artificial Sequence
  Description of Artificial Sequence: Synthetic oligonucleotide
gaaguaugcaaaugaacuu

SEQ ID NO: 879317 - RNA, 19 nt, Artificial Sequence
  Description of Artificial Sequence: Synthetic oligonucleotide
ucccuugguucgcuacugg

SEQ ID NO: 879318 - RNA, 19 nt, Artificial Sequence
  Description of Artificial Sequence: Synthetic oligonucleotide
uauuagucuugaucuuguc

SEQ ID NO: 879319 - RNA, 19 nt, Artificial Sequence
  Description of Artificial Sequence: Synthetic oligonucleotide
uccgaaguccaagaacugu

SEQ ID NO: 879320 - RNA, 19 nt, Artificial Sequence
  Description of Artificial Sequence: Synthetic oligonucleotide
cuuguaauggcgccaugca

SEQ ID NO: 879321 - RNA, 19 nt, Artificial Sequence
  Description of Artificial Sequence: Synthetic oligonucleotide
aagcauucggaaagagaug

SEQ ID NO: 879322 - RNA, 19 nt, Artificial Sequence
  Description of Artificial Sequence: Synthetic oligonucleotide
uguucgccagucguacagg

SEQ ID NO: 879323 - RNA, 19 nt, Artificial Sequence
  Description of Artificial Sequence: Synthetic oligonucleotide
aucguugugucuguuucug

SEQ ID NO: 879324 - RNA, 19 nt, Artificial Sequence
  Description of Artificial Sequence: Synthetic oligonucleotide
aaauagcaugugaaacaga

SEQ ID NO: 879325 - RNA, 19 nt, Artificial Sequence
  Description of Artificial Sequence: Synthetic oligonucleotide
acaacaucguugugucugu

SEQ ID NO: 879326 - RNA, 19 nt, Artificial Sequence
  Description of Artificial Sequence: Synthetic oligonucleotide
ccucacacugagaauacag

SEQ ID NO: 879327 - RNA, 19 nt, Artificial Sequence
  Description of Artificial Sequence: Synthetic oligonucleotide
auguuacugcuaauaaaug

SEQ ID NO: 879328 - RNA, 19 nt, Artificial Sequence
  Description of Artificial Sequence: Synthetic oligonucleotide
agucuaaaucagugaguga

SEQ ID NO: 879329 - RNA, 19 nt, Artificial Sequence
  Description of Artificial Sequence: Synthetic oligonucleotide
uucuauuagucuugaucuu

SEQ ID NO: 879330 - RNA, 19 nt, Artificial Sequence
  Description of Artificial Sequence: Synthetic oligonucleotide
cacgccuugggccauugug

SEQ ID NO: 879331 - RNA, 19 nt, Artificial Sequence
  Description of Artificial Sequence: Synthetic oligonucleotide
uagugccacgguuaagagu

SEQ ID NO: 879332 - RNA, 19 nt, Artificial Sequence
  Description of Artificial Sequence: Synthetic oligonucleotide
agaucucccugaaaauauc

SEQ ID NO: 879333 - RNA, 19 nt, Artificial Sequence
  Description of Artificial Sequence: Synthetic oligonucleotide
guuugauagagagcggaga

SEQ ID NO: 879334 - RNA, 19 nt, Artificial Sequence
  Description of Artificial Sequence: Synthetic oligonucleotide
cuaugugcuuaggaugagc

SEQ ID NO: 879335 - RNA, 19 nt, Artificial Sequence
  Description of Artificial Sequence: Synthetic oligonucleotide
cugugaugggugcaaauga

SEQ ID NO: 879336 - RNA, 19 nt, Artificial Sequence
  Description of Artificial Sequence: Synthetic oligonucleotide
uuguguucgccagucguac

SEQ ID NO: 879337 - RNA, 19 nt, Artificial Sequence
  Description of Artificial Sequence: Synthetic oligonucleotide
uuuuaacagcuggguagcc

SEQ ID NO: 879338 - RNA, 19 nt, Artificial Sequence
  Description of Artificial Sequence: Synthetic oligonucleotide
guucaacaaguuauccggc

SEQ ID NO: 879339 - RNA, 19 nt, Artificial Sequence
  Description of Artificial Sequence: Synthetic oligonucleotide
uggagcuaccagguaauac

SEQ ID NO: 879340 - RNA, 19 nt, Artificial Sequence
  Description of Artificial Sequence: Synthetic oligonucleotide
guugguagaauaagggucu

SEQ ID NO: 879341 - RNA, 19 nt, Artificial Sequence
  Description of Artificial Sequence: Synthetic oligonucleotide
agagaugcgguugguauaa

SEQ ID NO: 879342 - RNA, 19 nt, Artificial Sequence
  Description of Artificial Sequence: Synthetic oligonucleotide
gaguaacgagaguuuuaac

SEQ ID NO: 879343 - RNA, 19 nt, Artificial Sequence
  Description of Artificial Sequence: Synthetic oligonucleotide
aaacgggcagccucucaaa

SEQ ID NO: 879344 - RNA, 19 nt, Artificial Sequence
  Description of Artificial Sequence: Synthetic oligonucleotide
uugucuuguaauggcgcca

SEQ ID NO: 879345 - RNA, 19 nt, Artificial Sequence
  Description of Artificial Sequence: Synthetic oligonucleotide
acgaccacagcacucgauu

SEQ ID NO: 879346 - RNA, 19 nt, Artificial Sequence
  Description of Artificial Sequence: Synthetic oligonucleotide
aaaacccgugggucuucug

SEQ ID NO: 879347 - RNA, 19 nt, Artificial Sequence
  Description of Artificial Sequence: Synthetic oligonucleotide
cgauggaacagaaguaugc

SEQ ID NO: 879348 - RNA, 19 nt, Artificial Sequence
  Description of Artificial Sequence: Synthetic oligonucleotide
auucggaaagagaugcggu

SEQ ID NO: 879349 - RNA, 19 nt, Artificial Sequence
  Description of Artificial Sequence: Synthetic oligonucleotide
agagacgaccacagcacuc

SEQ ID NO: 879350 - RNA, 19 nt, Artificial Sequence
  Description of Artificial Sequence: Synthetic oligonucleotide
agaugcgguugguauaaaa

SEQ ID NO: 879351 - RNA, 19 nt, Artificial Sequence
  Description of Artificial Sequence: Synthetic oligonucleotide
aagaguaacgagaguuuua

SEQ ID NO: 879352 - RNA, 19 nt, Artificial Sequence
  Description of Artificial Sequence: Synthetic oligonucleotide
ucuaaaacccgugggucuu

SEQ ID NO: 879353 - RNA, 19 nt, Artificial Sequence
  Description of Artificial Sequence: Synthetic oligonucleotide
ggagcuaccagguaauacu

SEQ ID NO: 879354 - RNA, 19 nt, Artificial Sequence
  Description of Artificial Sequence: Synthetic oligonucleotide
ccggcaaaagauuaacuuc

SEQ ID NO: 879355 - RNA, 19 nt, Artificial Sequence
  Description of Artificial Sequence: Synthetic oligonucleotide
agcuacauuacagguggga

SEQ ID NO: 879356 - RNA, 19 nt, Artificial Sequence
  Description of Artificial Sequence: Synthetic oligonucleotide
auaacagcaucgguaccca

SEQ ID NO: 879357 - RNA, 19 nt, Artificial Sequence
  Description of Artificial Sequence: Synthetic oligonucleotide
ugucuuguaauggcgccau

SEQ ID NO: 879358 - RNA, 19 nt, Artificial Sequence
  Description of Artificial Sequence: Synthetic oligonucleotide
agccuuguauuuugaugca

SEQ ID NO: 879359 - RNA, 19 nt, Artificial Sequence
  Description of Artificial Sequence: Synthetic oligonucleotide
ggagacggagagaagcggg

SEQ ID NO: 879360 - RNA, 19 nt, Artificial Sequence
  Description of Artificial Sequence: Synthetic oligonucleotide
accaccuaagucacuuauc

SEQ ID NO: 879361 - RNA, 19 nt, Artificial Sequence
  Description of Artificial Sequence: Synthetic oligonucleotide
gauacucccuaugugcuua

SEQ ID NO: 879362 - RNA, 19 nt, Artificial Sequence
  Description of Artificial Sequence: Synthetic oligonucleotide
uaguucaacuguugcucuc

SEQ ID NO: 879363 - RNA, 19 nt, Artificial Sequence
  Description of Artificial Sequence: Synthetic oligonucleotide
guuauccggcaaaagauua

SEQ ID NO: 879364 - RNA, 19 nt, Artificial Sequence
  Description of Artificial Sequence: Synthetic oligonucleotide
agaauacagucagauggaa

SEQ ID NO: 879365 - RNA, 19 nt, Artificial Sequence
  Description of Artificial Sequence: Synthetic oligonucleotide
gacgccgggccgcaacgcg

SEQ ID NO: 879366 - RNA, 19 nt, Artificial Sequence
  Description of Artificial Sequence: Synthetic oligonucleotide
ggauguuacugcuaauaaa

SEQ ID NO: 879367 - RNA, 19 nt, Artificial Sequence
  Description of Artificial Sequence: Synthetic oligonucleotide
uaccaagaguaacgagagu

SEQ ID NO: 879368 - RNA, 19 nt, Artificial Sequence
  Description of Artificial Sequence: Synthetic oligonucleotide
agacaacuuuuagagugcu

SEQ ID NO: 879369 - RNA, 19 nt, Artificial Sequence
  Description of Artificial Sequence: Synthetic oligonucleotide
aguuauccggcaaaagauu

SEQ ID NO: 879370 - RNA, 19 nt, Artificial Sequence
  Description of Artificial Sequence: Synthetic oligonucleotide
cuugcgcagaaacauauau

SEQ ID NO: 879371 - RNA, 19 nt, Artificial Sequence
  Description of Artificial Sequence: Synthetic oligonucleotide
auacucccuaugugcuuag

SEQ ID NO: 879372 - RNA, 19 nt, Artificial Sequence
  Description of Artificial Sequence: Synthetic oligonucleotide
acuguugcucucaucgagu

SEQ ID NO: 879373 - RNA, 19 nt, Artificial Sequence
  Description of Artificial Sequence: Synthetic oligonucleotide
ugggauugcuccagucauc

SEQ ID NO: 879374 - RNA, 19 nt, Artificial Sequence
  Description of Artificial Sequence: Synthetic oligonucleotide
cgguucaacaaguuauccg

SEQ ID NO: 879375 - RNA, 19 nt, Artificial Sequence
  Description of Artificial Sequence: Synthetic oligonucleotide
caccucacacugagaauac

SEQ ID NO: 879376 - RNA, 19 nt, Artificial Sequence
  Description of Artificial Sequence: Synthetic oligonucleotide
uucucucauuguguucgcc

SEQ ID NO: 879377 - RNA, 19 nt, Artificial Sequence
  Description of Artificial Sequence: Synthetic oligonucleotide
aucuguuugggcaccggcu

SEQ ID NO: 879378 - RNA, 19 nt, Artificial Sequence
  Description of Artificial Sequence: Synthetic oligonucleotide
uacugggauugcuccaguc

SEQ ID NO: 879379 - RNA, 19 nt, Artificial Sequence
  Description of Artificial Sequence: Synthetic oligonucleotide
uucgccagucguacaggaa

SEQ ID NO: 879380 - RNA, 19 nt, Artificial Sequence
  Description of Artificial Sequence: Synthetic oligonucleotide
gggucucugguuaacuugc

SEQ ID NO: 879381 - RNA, 19 nt, Artificial Sequence
  Description of Artificial Sequence: Synthetic oligonucleotide
agcucugcauguaccaacu

SEQ ID NO: 879382 - RNA, 19 nt, Artificial Sequence
  Description of Artificial Sequence: Synthetic oligonucleotide
gaaagagaugcgguuggua

SEQ ID NO: 879383 - RNA, 19 nt, Artificial Sequence
  Description of Artificial Sequence: Synthetic oligonucleotide
agggcgguucaacaaguua

SEQ ID NO: 879384 - RNA, 19 nt, Artificial Sequence
  Description of Artificial Sequence: Synthetic oligonucleotide
uacucccuaugugcuuagg

SEQ ID NO: 879385 - RNA, 19 nt, Artificial Sequence
  Description of Artificial Sequence: Synthetic oligonucleotide
cauuguguucgccagucgu

SEQ ID NO: 879386 - RNA, 19 nt, Artificial Sequence
  Description of Artificial Sequence: Synthetic oligonucleotide
agcgcucgaucuguuuggg

SEQ ID NO: 879387 - RNA, 19 nt, Artificial Sequence
  Description of Artificial Sequence: Synthetic oligonucleotide
gggaucgauacucccuaug

SEQ ID NO: 879388 - RNA, 19 nt, Artificial Sequence
  Description of Artificial Sequence: Synthetic oligonucleotide
cucgaucuguuugggcacc

SEQ ID NO: 879389 - RNA, 19 nt, Artificial Sequence
  Description of Artificial Sequence: Synthetic oligonucleotide
gcucagguuacaacuuuag

SEQ ID NO: 879390 - RNA, 19 nt, Artificial Sequence
  Description of Artificial Sequence: Synthetic oligonucleotide
ggaucgauacucccuaugu

SEQ ID NO: 879391 - RNA, 19 nt, Artificial Sequence
  Description of Artificial Sequence: Synthetic oligonucleotide
gagacggagagaagcggga

SEQ ID NO: 879392 - RNA, 19 nt, Artificial Sequence
  Description of Artificial Sequence: Synthetic oligonucleotide
cugcauguaccaacucuga

SEQ ID NO: 879393 - RNA, 19 nt, Artificial Sequence
  Description of Artificial Sequence: Synthetic oligonucleotide
uaacagcuggguagcccuc

SEQ ID NO: 879394 - RNA, 19 nt, Artificial Sequence
  Description of Artificial Sequence: Synthetic oligonucleotide
cccggcaaugcgcaggucc

SEQ ID NO: 879395 - RNA, 19 nt, Artificial Sequence
  Description of Artificial Sequence: Synthetic oligonucleotide
caacuuuuagagugcuuua

SEQ ID NO: 879396 - RNA, 19 nt, Artificial Sequence
  Description of Artificial Sequence: Synthetic oligonucleotide
acggcacauaaaccaccug

SEQ ID NO: 879397 - RNA, 19 nt, Artificial Sequence
  Description of Artificial Sequence: Synthetic oligonucleotide
auuacaggugggaucgaua

SEQ ID NO: 879398 - RNA, 19 nt, Artificial Sequence
  Description of Artificial Sequence: Synthetic oligonucleotide
auuguguucgccagucgua

SEQ ID NO: 879399 - RNA, 19 nt, Artificial Sequence
  Description of Artificial Sequence: Synthetic oligonucleotide
auccggcaaaagauuaacu

SEQ ID NO: 879400 - RNA, 19 nt, Artificial Sequence
  Description of Artificial Sequence: Synthetic oligonucleotide
aucccuugguucgcuacug

SEQ ID NO: 879401 - RNA, 19 nt, Artificial Sequence
  Description of Artificial Sequence: Synthetic oligonucleotide
accaccugaauagguuugu

SEQ ID NO: 879402 - RNA, 19 nt, Artificial Sequence
  Description of Artificial Sequence: Synthetic oligonucleotide
uugguagaauaagggucuc

SEQ ID NO: 879403 - RNA, 19 nt, Artificial Sequence
  Description of Artificial Sequence: Synthetic oligonucleotide
ccgauccaggaaauacugg

SEQ ID NO: 879404 - RNA, 19 nt, Artificial Sequence
  Description of Artificial Sequence: Synthetic oligonucleotide
caaugcgcagguccgcuga

SEQ ID NO: 879405 - RNA, 19 nt, Artificial Sequence
  Description of Artificial Sequence: Synthetic oligonucleotide
caaauccgaacuuuucuuu

SEQ ID NO: 879406 - RNA, 19 nt, Artificial Sequence
  Description of Artificial Sequence: Synthetic oligonucleotide
gcaggauuagugucaccac

SEQ ID NO: 879407 - RNA, 19 nt, Artificial Sequence
  Description of Artificial Sequence: Synthetic oligonucleotide
guaugcaaaugaacuuuaa

SEQ ID NO: 879408 - RNA, 19 nt, Artificial Sequence
  Description of Artificial Sequence: Synthetic oligonucleotide
guccuguuuagccuuguau

SEQ ID NO: 879409 - RNA, 19 nt, Artificial Sequence
  Description of Artificial Sequence: Synthetic oligonucleotide
ccggcaaugcgcagguccg

SEQ ID NO: 879410 - RNA, 19 nt, Artificial Sequence
  Description of Artificial Sequence: Synthetic oligonucleotide
aucagugagugaaguggga

SEQ ID NO: 879411 - RNA, 19 nt, Artificial Sequence
  Description of Artificial Sequence: Synthetic oligonucleotide
gacggagagaagcgggagu

SEQ ID NO: 879412 - RNA, 19 nt, Artificial Sequence
  Description of Artificial Sequence: Synthetic oligonucleotide
uugguucgcuacugggauu

SEQ ID NO: 879413 - RNA, 19 nt, Artificial Sequence
  Description of Artificial Sequence: Synthetic oligonucleotide
gcggagacggagagaagcg

SEQ ID NO: 879414 - RNA, 19 nt, Artificial Sequence
  Description of Artificial Sequence: Synthetic oligonucleotide
gauagagagcggagacgga

SEQ ID NO: 879415 - RNA, 19 nt, Artificial Sequence
  Description of Artificial Sequence: Synthetic oligonucleotide
ccagguaauacuguucaca

SEQ ID NO: 879416 - RNA, 19 nt, Artificial Sequence
  Description of Artificial Sequence: Synthetic oligonucleotide
gguugguauaaaaccgauc

SEQ ID NO: 879417 - RNA, 19 nt, Artificial Sequence
  Description of Artificial Sequence: Synthetic oligonucleotide
cugaauagguuuguuuggu

SEQ ID NO: 879418 - RNA, 19 nt, Artificial Sequence
  Description of Artificial Sequence: Synthetic oligonucleotide
ugggaucgauacucccuau

SEQ ID NO: 879419 - RNA, 19 nt, Artificial Sequence
  Description of Artificial Sequence: Synthetic oligonucleotide
agaugagacggcacauaaa

SEQ ID NO: 879420 - RNA, 19 nt, Artificial Sequence
  Description of Artificial Sequence: Synthetic oligonucleotide
agacgaccacagcacucga

SEQ ID NO: 879421 - RNA, 19 nt, Artificial Sequence
  Description of Artificial Sequence: Synthetic oligonucleotide
gcauucggaaagagaugcg

SEQ ID NO: 879422 - RNA, 19 nt, Artificial Sequence
  Description of Artificial Sequence: Synthetic oligonucleotide
gacggcacauaaaccaccu

SEQ ID NO: 879423 - RNA, 19 nt, Artificial Sequence
  Description of Artificial Sequence: Synthetic oligonucleotide
gcgguucaacaaguuaucc

SEQ ID NO: 879424 - RNA, 19 nt, Artificial Sequence
  Description of Artificial Sequence: Synthetic oligonucleotide
gaaagggccuucagauaaa

SEQ ID NO: 879425 - RNA, 19 nt, Artificial Sequence
  Description of Artificial Sequence: Synthetic oligonucleotide
ccacaccucacacugagaa

SEQ ID NO: 879426 - RNA, 19 nt, Artificial Sequence
  Description of Artificial Sequence: Synthetic oligonucleotide
gguuacaacuuuaguggaa

SEQ ID NO: 879427 - RNA, 19 nt, Artificial Sequence
  Description of Artificial Sequence: Synthetic oligonucleotide
ggaguuuuaccuccacccu

SEQ ID NO: 879428 - RNA, 19 nt, Artificial Sequence
  Description of Artificial Sequence: Synthetic oligonucleotide
cugggauugcuccagucau

SEQ ID NO: 879429 - RNA, 19 nt, Artificial Sequence
  Description of Artificial Sequence: Synthetic oligonucleotide
cucuuccgaaguccaagaa

SEQ ID NO: 879430 - RNA, 19 nt, Artificial Sequence
  Description of Artificial Sequence: Synthetic oligonucleotide
ccaccuaagucacuuaucu

SEQ ID NO: 879431 - RNA, 19 nt, Artificial Sequence
  Description of Artificial Sequence: Synthetic oligonucleotide
guagcccucuuuucuauuu

SEQ ID NO: 879432 - RNA, 19 nt, Artificial Sequence
  Description of Artificial Sequence: Synthetic oligonucleotide
ggauugcuccagucaucag

SEQ ID NO: 879433 - RNA, 19 nt, Artificial Sequence
  Description of Artificial Sequence: Synthetic oligonucleotide
cugggucgaggagcagugg

SEQ ID NO: 879434 - RNA, 19 nt, Artificial Sequence
  Description of Artificial Sequence: Synthetic oligonucleotide
gaaccccuggaacuguauu

SEQ ID NO: 879435 - RNA, 19 nt, Artificial Sequence
  Description of Artificial Sequence: Synthetic oligonucleotide
cagguccgcugagacgucc

SEQ ID NO: 879436 - RNA, 19 nt, Artificial Sequence
  Description of Artificial Sequence: Synthetic oligonucleotide
ucacgccuugggccauugu

SEQ ID NO: 879437 - RNA, 19 nt, Artificial Sequence
  Description of Artificial Sequence: Synthetic oligonucleotide
caccggcugcuugagcagc

SEQ ID NO: 879438 - RNA, 19 nt, Artificial Sequence
  Description of Artificial Sequence: Synthetic oligonucleotide
cgcucgaucuguuugggca

SEQ ID NO: 879439 - RNA, 19 nt, Artificial Sequence
  Description of Artificial Sequence: Synthetic oligonucleotide
gcugggucgaggagcagug

SEQ ID NO: 879440 - RNA, 19 nt, Artificial Sequence
  Description of Artificial Sequence: Synthetic oligonucleotide
gaagaaccccuggaacugu

SEQ ID NO: 879441 - RNA, 19 nt, Artificial Sequence
  Description of Artificial Sequence: Synthetic oligonucleotide
ggcgguucaacaaguuauc

SEQ ID NO: 879442 - RNA, 19 nt, Artificial Sequence
  Description of Artificial Sequence: Synthetic oligonucleotide
caucguugugucuguuucu

SEQ ID NO: 879443 - RNA, 19 nt, Artificial Sequence
  Description of Artificial Sequence: Synthetic oligonucleotide
gcgguugguauaaaaccga

SEQ ID NO: 879444 - RNA, 19 nt, Artificial Sequence
  Description of Artificial Sequence: Synthetic oligonucleotide
ugcuuaggaugagcaggau

SEQ ID NO: 879445 - RNA, 19 nt, Artificial Sequence
  Description of Artificial Sequence: Synthetic oligonucleotide
caccugaauagguuuguuu

SEQ ID NO: 879446 - RNA, 19 nt, Artificial Sequence
  Description of Artificial Sequence: Synthetic oligonucleotide
ucacgacaucagcuacauu

SEQ ID NO: 879447 - RNA, 19 nt, Artificial Sequence
  Description of Artificial Sequence: Synthetic oligonucleotide
gcaaugcgcagguccgcug

SEQ ID NO: 879448 - RNA, 19 nt, Artificial Sequence
  Description of Artificial Sequence: Synthetic oligonucleotide
cuccuugcgcagaaacaua

SEQ ID NO: 879449 - RNA, 19 nt, Artificial Sequence
  Description of Artificial Sequence: Synthetic oligonucleotide
acgccgggccgcaacgcgg

SEQ ID NO: 879450 - RNA, 19 nt, Artificial Sequence
  Description of Artificial Sequence: Synthetic oligonucleotide
acagaguagcuuagcuguu

SEQ ID NO: 879451 - RNA, 19 nt, Artificial Sequence
  Description of Artificial Sequence: Synthetic oligonucleotide
gagcggagacggagagaag

SEQ ID NO: 879452 - RNA, 19 nt, Artificial Sequence
  Description of Artificial Sequence: Synthetic oligonucleotide
caccaccuaagucacuuau

SEQ ID NO: 879453 - RNA, 19 nt, Artificial Sequence
  Description of Artificial Sequence: Synthetic oligonucleotide
gcgggaguagcgcucgauc

SEQ ID NO: 879454 - RNA, 19 nt, Artificial Sequence
  Description of Artificial Sequence: Synthetic oligonucleotide
gggcgguucaacaaguuau

SEQ ID NO: 879455 - RNA, 19 nt, Artificial Sequence
  Description of Artificial Sequence: Synthetic oligonucleotide
gcuacauuacaggugggau

SEQ ID NO: 879456 - RNA, 19 nt, Artificial Sequence
  Description of Artificial Sequence: Synthetic oligonucleotide
cgccagucguacaggaagc

SEQ ID NO: 879457 - RNA, 19 nt, Artificial Sequence
  Description of Artificial Sequence: Synthetic oligonucleotide
caucccuugguucgcuacu

SEQ ID NO: 879458 - RNA, 19 nt, Artificial Sequence
  Description of Artificial Sequence: Synthetic oligonucleotide
caacgcggaggcggcgccg

SEQ ID NO: 879459 - RNA, 19 nt, Artificial Sequence
  Description of Artificial Sequence: Synthetic oligonucleotide
aaucacgccuugggccauu

SEQ ID NO: 879460 - RNA, 19 nt, Artificial Sequence
  Description of Artificial Sequence: Synthetic oligonucleotide
ccuugggccauugugggaa

SEQ ID NO: 879461 - RNA, 19 nt, Artificial Sequence
  Description of Artificial Sequence: Synthetic oligonucleotide
gcuuaggaugagcaggauu

SEQ ID NO: 879462 - RNA, 19 nt, Artificial Sequence
  Description of Artificial Sequence: Synthetic oligonucleotide
ggaucaaauccgaacuuuu

SEQ ID NO: 879463 - RNA, 19 nt, Artificial Sequence
  Description of Artificial Sequence: Synthetic oligonucleotide
ccuaugugcuuaggaugag

SEQ ID NO: 879464 - RNA, 19 nt, Artificial Sequence
  Description of Artificial Sequence: Synthetic oligonucleotide
gcgccggcggaguuuuacc

SEQ ID NO: 879465 - RNA, 19 nt, Artificial Sequence
  Description of Artificial Sequence: Synthetic oligonucleotide
gacaacuuuuagagugcuu

SEQ ID NO: 879466 - RNA, 19 nt, Artificial Sequence
  Description of Artificial Sequence: Synthetic oligonucleotide
gaaguguguguugguuaau

SEQ ID NO: 879467 - RNA, 19 nt, Artificial Sequence
  Description of Artificial Sequence: Synthetic oligonucleotide
cacaccucacacugagaau

SEQ ID NO: 879468 - RNA, 19 nt, Artificial Sequence
  Description of Artificial Sequence: Synthetic oligonucleotide
gggccauugugggaacaac

SEQ ID NO: 879469 - RNA, 19 nt, Artificial Sequence
  Description of Artificial Sequence: Synthetic oligonucleotide
cgggccgcaacgcggaggc

SEQ ID NO: 879470 - RNA, 19 nt, Artificial Sequence
  Description of Artificial Sequence: Synthetic oligonucleotide
guucgcuacugggauugcu

SEQ ID NO: 879471 - RNA, 19 nt, Artificial Sequence
  Description of Artificial Sequence: Synthetic oligonucleotide
gcacucgauuuucuacaaa

SEQ ID NO: 879472 - RNA, 19 nt, Artificial Sequence
  Description of Artificial Sequence: Synthetic oligonucleotide
caccuaagucacuuaucuu

SEQ ID NO: 879473 - RNA, 19 nt, Artificial Sequence
  Description of Artificial Sequence: Synthetic oligonucleotide
ccgacgccgggccgcaacg

SEQ ID NO: 879474 - RNA, 19 nt, Artificial Sequence
  Description of Artificial Sequence: Synthetic oligonucleotide
gcgcagaaacauauaugaa

SEQ ID NO: 879475 - RNA, 19 nt, Artificial Sequence
  Description of Artificial Sequence: Synthetic oligonucleotide
ccaagaguaacgagaguuu

SEQ ID NO: 879476 - RNA, 19 nt, Artificial Sequence
  Description of Artificial Sequence: Synthetic oligonucleotide
gacgaccacagcacucgau

SEQ ID NO: 879477 - RNA, 19 nt, Artificial Sequence
  Description of Artificial Sequence: Synthetic oligonucleotide
ggucucugguuaacuugca

SEQ ID NO: 879478 - RNA, 19 nt, Artificial Sequence
  Description of Artificial Sequence: Synthetic oligonucleotide
ggcgccggcggaguuuuac

SEQ ID NO: 879479 - RNA, 19 nt, Artificial Sequence
  Description of Artificial Sequence: Synthetic oligonucleotide
gguucgcuacugggauugc

SEQ ID NO: 879480 - RNA, 19 nt, Artificial Sequence
  Description of Artificial Sequence: Synthetic oligonucleotide
ccgaaguccaagaacuguu

SEQ ID NO: 879481 - RNA, 19 nt, Artificial Sequence
  Description of Artificial Sequence: Synthetic oligonucleotide
ggaaagagaugcgguuggu

SEQ ID NO: 879482 - RNA, 19 nt, Artificial Sequence
  Description of Artificial Sequence: Synthetic oligonucleotide
ccacgguuaagaguuggua

SEQ ID NO: 879483 - RNA, 19 nt, Artificial Sequence
  Description of Artificial Sequence: Synthetic oligonucleotide
cuggagcuaccagguaaua

SEQ ID NO: 879484 - RNA, 19 nt, Artificial Sequence
  Description of Artificial Sequence: Synthetic oligonucleotide
ggguagcccucuuuucuau

SEQ ID NO: 879485 - RNA, 19 nt, Artificial Sequence
  Description of Artificial Sequence: Synthetic oligonucleotide
cgacaucagcuacauuaca

SEQ ID NO: 879486 - RNA, 19 nt, Artificial Sequence
  Description of Artificial Sequence: Synthetic oligonucleotide
gccgacgccgggccgcaac

SEQ ID NO: 879487 - RNA, 19 nt, Artificial Sequence
  Description of Artificial Sequence: Synthetic oligonucleotide
ccuugcgcagaaacauaua

SEQ ID NO: 879488 - RNA, 19 nt, Artificial Sequence
  Description of Artificial Sequence: Synthetic oligonucleotide
ccgggccgcaacgcggagg

SEQ ID NO: 879489 - RNA, 19 nt, Artificial Sequence
  Description of Artificial Sequence: Synthetic oligonucleotide
cgguuaagaguugguagaa

SEQ ID NO: 879490 - RNA, 19 nt, Artificial Sequence
  Description of Artificial Sequence: Synthetic oligonucleotide
cgcuacugggauugcucca

SEQ ID NO: 879491 - RNA, 19 nt, Artificial Sequence
  Description of Artificial Sequence: Synthetic oligonucleotide
cgcugagacgucccagaca

SEQ ID NO: 879492 - RNA, 19 nt, Artificial Sequence
  Description of Artificial Sequence: Synthetic oligonucleotide
gccacgguuaagaguuggu

SEQ ID NO: 879493 - RNA, 19 nt, Artificial Sequence
  Description of Artificial Sequence: Synthetic oligonucleotide
cgguugguauaaaaccgau

SEQ ID NO: 879494 - RNA, 19 nt, Artificial Sequence
  Description of Artificial Sequence: Synthetic oligonucleotide
caacaucguugugucuguu

SEQ ID NO: 879495 - RNA, 19 nt, Artificial Sequence
  Description of Artificial Sequence: Synthetic oligonucleotide
caaucacgccuugggccau

SEQ ID NO: 879496 - RNA, 19 nt, Artificial Sequence
  Description of Artificial Sequence: Synthetic oligonucleotide
gucguacaggaagcuccuu

SEQ ID NO: 879497 - RNA, 19 nt, Artificial Sequence
  Description of Artificial Sequence: Synthetic oligonucleotide
ccgcaacgcggaggcggcg

SEQ ID NO: 879498 - RNA, 19 nt, Artificial Sequence
  Description of Artificial Sequence: Synthetic oligonucleotide
cgaccacagcacucgauuu

SEQ ID NO: 879499 - RNA, 19 nt, Artificial Sequence
  Description of Artificial Sequence: Synthetic oligonucleotide
cgacgccgggccgcaacgc

SEQ ID NO: 879500 - RNA, 19 nt, Artificial Sequence
  Description of Artificial Sequence: Synthetic oligonucleotide
cgccggcggaguuuuaccu

SEQ ID NO: 879501 - RNA, 19 nt, Artificial Sequence
  Description of Artificial Sequence: Synthetic oligonucleotide
cgauacucccuaugugcuu

SEQ ID NO: 879502 - RNA, 19 nt, Artificial Sequence
  Description of Artificial Sequence: Synthetic oligonucleotide
gggcagccucucaaaugau

SEQ ID NO: 879503 - RNA, 19 nt, Artificial Sequence
  Description of Artificial Sequence: Synthetic oligonucleotide
ccaccugaauagguuuguu

SEQ ID NO: 879504 - RNA, 19 nt, Artificial Sequence
  Description of Artificial Sequence: Synthetic oligonucleotide
cgguacccacuccuuccau

SEQ ID NO: 879505 - RNA, 19 nt, Artificial Sequence
  Description of Artificial Sequence: Synthetic oligonucleotide
aauguuaggacauucagua

SEQ ID NO: 879506 - RNA, 19 nt, Artificial Sequence
  Description of Artificial Sequence: Synthetic oligonucleotide
ugaguaggaucccagaagg

SEQ ID NO: 879507 - RNA, 19 nt, Artificial Sequence
  Description of Artificial Sequence: Synthetic oligonucleotide
uugagaaggguuuacaagc

SEQ ID NO: 879508 - RNA, 19 nt, Artificial Sequence
  Description of Artificial Sequence: Synthetic oligonucleotide
aaauggaagccccugagcu

SEQ ID NO: 879509 - RNA, 19 nt, Artificial Sequence
  Description of Artificial Sequence: Synthetic oligonucleotide
uguuaggacauucaguaga

SEQ ID NO: 879510 - RNA, 19 nt, Artificial Sequence
  Description of Artificial Sequence: Synthetic oligonucleotide
uagaucaugggucacguug

SEQ ID NO: 879511 - RNA, 19 nt, Artificial Sequence
  Description of Artificial Sequence: Synthetic oligonucleotide
uucaguuggagaauuuucc

SEQ ID NO: 879512 - RNA, 19 nt, Artificial Sequence
  Description of Artificial Sequence: Synthetic oligonucleotide
aaauccuagucacuuaaga

SEQ ID NO: 879513 - RNA, 19 nt, Artificial Sequence
  Description of Artificial Sequence: Synthetic oligonucleotide
aauggggccagguacagga

SEQ ID NO: 879514 - RNA, 19 nt, Artificial Sequence
  Description of Artificial Sequence: Synthetic oligonucleotide
aaaaggccgguucagggag

SEQ ID NO: 879515 - RNA, 19 nt, Artificial Sequence
  Description of Artificial Sequence: Synthetic oligonucleotide
agguaggucccgcagagcc

SEQ ID NO: 879516 - RNA, 19 nt, Artificial Sequence
  Description of Artificial Sequence: Synthetic oligonucleotide
ucauguagcccuuucacca

SEQ ID NO: 879517 - RNA, 19 nt, Artificial Sequence
  Description of Artificial Sequence: Synthetic oligonucleotide
acuaccaaaaggccgguuc

SEQ ID NO: 879518 - RNA, 19 nt, Artificial Sequence
  Description of Artificial Sequence: Synthetic oligonucleotide
agcuagaucaggucgucgc

SEQ ID NO: 879519 - RNA, 19 nt, Artificial Sequence
  Description of Artificial Sequence: Synthetic oligonucleotide
uaagcauccccucuggccc

SEQ ID NO: 879520 - RNA, 19 nt, Artificial Sequence
  Description of Artificial Sequence: Synthetic oligonucleotide
aauccuagucacuuaagaa

SEQ ID NO: 879521 - RNA, 19 nt, Artificial Sequence
  Description of Artificial Sequence: Synthetic oligonucleotide
uugaguaggaucccagaag

SEQ ID NO: 879522 - RNA, 19 nt, Artificial Sequence
  Description of Artificial Sequence: Synthetic oligonucleotide
ugaugguagaaucguaggc

SEQ ID NO: 879523 - RNA, 19 nt, Artificial Sequence
  Description of Artificial Sequence: Synthetic oligonucleotide
aaguagaucugcaugacca

SEQ ID NO: 879524 - RNA, 19 nt, Artificial Sequence
  Description of Artificial Sequence: Synthetic oligonucleotide
cuugagaaggguuuacaag

SEQ ID NO: 879525 - RNA, 19 nt, Artificial Sequence
  Description of Artificial Sequence: Synthetic oligonucleotide
aaguccaacaucuggcugu

SEQ ID NO: 879526 - RNA, 19 nt, Artificial Sequence
  Description of Artificial Sequence: Synthetic oligonucleotide
aaucguaggcaggaucucc

SEQ ID NO: 879527 - RNA, 19 nt, Artificial Sequence
  Description of Artificial Sequence: Synthetic oligonucleotide
agaauuuuccaguuacucu

SEQ ID NO: 879528 - RNA, 19 nt, Artificial Sequence
  Description of Artificial Sequence: Synthetic oligonucleotide
aguagaaccugggucaggc

SEQ ID NO: 879529 - RNA, 19 nt, Artificial Sequence
  Description of Artificial Sequence: Synthetic oligonucleotide
gagauaggagaagagacag

SEQ ID NO: 879530 - RNA, 19 nt, Artificial Sequence
  Description of Artificial Sequence: Synthetic oligonucleotide
acgauccccaaacacaagg

SEQ ID NO: 879531 - RNA, 19 nt, Artificial Sequence
  Description of Artificial Sequence: Synthetic oligonucleotide
auuaccucucccuaugaug

SEQ ID NO: 879532 - RNA, 19 nt, Artificial Sequence
  Description of Artificial Sequence: Synthetic oligonucleotide
uccuagucacuuaagaaau

SEQ ID NO: 879533 - RNA, 19 nt, Artificial Sequence
  Description of Artificial Sequence: Synthetic oligonucleotide
cuuugcaaauggaagcccc

SEQ ID NO: 879534 - RNA, 19 nt, Artificial Sequence
  Description of Artificial Sequence: Synthetic oligonucleotide
cuaagcauccccucuggcc

SEQ ID NO: 879535 - RNA, 19 nt, Artificial Sequence
  Description of Artificial Sequence: Synthetic oligonucleotide
auccuagucacuuaagaaa

SEQ ID NO: 879536 - RNA, 19 nt, Artificial Sequence
  Description of Artificial Sequence: Synthetic oligonucleotide
gucacuuaagaaauggggc

SEQ ID NO: 879537 - RNA, 19 nt, Artificial Sequence
  Description of Artificial Sequence: Synthetic oligonucleotide
uucgguucaauguuaggac

SEQ ID NO: 879538 - RNA, 19 nt, Artificial Sequence
  Description of Artificial Sequence: Synthetic oligonucleotide
aauggaagccccugagcug

SEQ ID NO: 879539 - RNA, 19 nt, Artificial Sequence
  Description of Artificial Sequence: Synthetic oligonucleotide
ugcuggucggacuacagug

SEQ ID NO: 879540 - RNA, 19 nt, Artificial Sequence
  Description of Artificial Sequence: Synthetic oligonucleotide
ucgucggauaucauguacc

SEQ ID NO: 879541 - RNA, 19 nt, Artificial Sequence
  Description of Artificial Sequence: Synthetic oligonucleotide
gcuggugccaaguauaucc

SEQ ID NO: 879542 - RNA, 19 nt, Artificial Sequence
  Description of Artificial Sequence: Synthetic oligonucleotide
uagaaccugggucaggcca

SEQ ID NO: 879543 - RNA, 19 nt, Artificial Sequence
  Description of Artificial Sequence: Synthetic oligonucleotide
acugacgucaccauuacca

SEQ ID NO: 879544 - RNA, 19 nt, Artificial Sequence
  Description of Artificial Sequence: Synthetic oligonucleotide
aggacccaugaucagcacc

SEQ ID NO: 879545 - RNA, 19 nt, Artificial Sequence
  Description of Artificial Sequence: Synthetic oligonucleotide
ucaguuggagaauuuucca

SEQ ID NO: 879546 - RNA, 19 nt, Artificial Sequence
  Description of Artificial Sequence: Synthetic oligonucleotide
gugaugguagaaucguagg

SEQ ID NO: 879547 - RNA, 19 nt, Artificial Sequence
  Description of Artificial Sequence: Synthetic oligonucleotide
uccaguuacucugggauag

SEQ ID NO: 879548 - RNA, 19 nt, Artificial Sequence
  Description of Artificial Sequence: Synthetic oligonucleotide
  modified_base (16)..(16): a, c, u, g, unknown or other
cauguaccagcaucanacc

SEQ ID NO: 879549 - RNA, 19 nt, Artificial Sequence
  Description of Artificial Sequence: Synthetic oligonucleotide
caguaccucagcuagauca

SEQ ID NO: 879550 - RNA, 19 nt, Artificial Sequence
  Description of Artificial Sequence: Synthetic oligonucleotide
gaugguagaaucguaggca

SEQ ID NO: 879551 - RNA, 19 nt, Artificial Sequence
  Description of Artificial Sequence: Synthetic oligonucleotide
accccaaugcucuacagga

SEQ ID NO: 879552 - RNA, 19 nt, Artificial Sequence
  Description of Artificial Sequence: Synthetic oligonucleotide
ggagaaguccaacaucugg

SEQ ID NO: 879553 - RNA, 19 nt, Artificial Sequence
  Description of Artificial Sequence: Synthetic oligonucleotide
auuucgucggauaucaugu

SEQ ID NO: 879554 - RNA, 19 nt, Artificial Sequence
  Description of Artificial Sequence: Synthetic oligonucleotide
agugaugguagaaucguag

SEQ ID NO: 879555 - RNA, 19 nt, Artificial Sequence
  Description of Artificial Sequence: Synthetic oligonucleotide
caagauaagacaucuaccu

SEQ ID NO: 879556 - RNA, 19 nt, Artificial Sequence
  Description of Artificial Sequence: Synthetic oligonucleotide
uucagggagcugaccaugg

SEQ ID NO: 879557 - RNA, 19 nt, Artificial Sequence
  Description of Artificial Sequence: Synthetic oligonucleotide
guugugagacccuugagaa

SEQ ID NO: 879558 - RNA, 19 nt, Artificial Sequence
  Description of Artificial Sequence: Synthetic oligonucleotide
gucacuuagguuucgguuc

SEQ ID NO: 879559 - RNA, 19 nt, Artificial Sequence
  Description of Artificial Sequence: Synthetic oligonucleotide
uagacccaugcucucagug

SEQ ID NO: 879560 - RNA, 19 nt, Artificial Sequence
  Description of Artificial Sequence: Synthetic oligonucleotide
caguuggagaauuuuccag

SEQ ID NO: 879561 - RNA, 19 nt, Artificial Sequence
  Description of Artificial Sequence: Synthetic oligonucleotide
gagaacagagaucccgccc

SEQ ID NO: 879562 - RNA, 19 nt, Artificial Sequence
  Description of Artificial Sequence: Synthetic oligonucleotide
agcaauauucuuucuuuaa

SEQ ID NO: 879563 - RNA, 19 nt, Artificial Sequence
  Description of Artificial Sequence: Synthetic oligonucleotide
ugugcaacgggaggcaucc

SEQ ID NO: 879564 - RNA, 19 nt, Artificial Sequence
  Description of Artificial Sequence: Synthetic oligonucleotide
ugcaagguaggucccgcag

SEQ ID NO: 879565 - RNA, 19 nt, Artificial Sequence
  Description of Artificial Sequence: Synthetic oligonucleotide
uuugcaaauggaagccccu

SEQ ID NO: 879566 - RNA, 19 nt, Artificial Sequence
  Description of Artificial Sequence: Synthetic oligonucleotide
agaaacuguguggagccac

SEQ ID NO: 879567 - RNA, 19 nt, Artificial Sequence
  Description of Artificial Sequence: Synthetic oligonucleotide
cugagaccaaaccugggag

SEQ ID NO: 879568 - RNA, 19 nt, Artificial Sequence
  Description of Artificial Sequence: Synthetic oligonucleotide
ucgguucaauguuaggaca

SEQ ID NO: 879569 - RNA, 19 nt, Artificial Sequence
  Description of Artificial Sequence: Synthetic oligonucleotide
ucagugaugguagaaucgu

SEQ ID NO: 879570 - RNA, 19 nt, Artificial Sequence
  Description of Artificial Sequence: Synthetic oligonucleotide
agccacgauccccaaacac

SEQ ID NO: 879571 - RNA, 19 nt, Artificial Sequence
  Description of Artificial Sequence: Synthetic oligonucleotide
caugcaaaggcggagaaca

SEQ ID NO: 879572 - RNA, 19 nt, Artificial Sequence
  Description of Artificial Sequence: Synthetic oligonucleotide
gguuaagcaauauucuuuc

SEQ ID NO: 879573 - RNA, 19 nt, Artificial Sequence
  Description of Artificial Sequence: Synthetic oligonucleotide
uucgucggauaucauguac

SEQ ID NO: 879574 - RNA, 19 nt, Artificial Sequence
  Description of Artificial Sequence: Synthetic oligonucleotide
uagaaucguaggcaggauc

SEQ ID NO: 879575 - RNA, 19 nt, Artificial Sequence
  Description of Artificial Sequence: Synthetic oligonucleotide
gugguuagcaguccuguug

SEQ ID NO: 879576 - RNA, 19 nt, Artificial Sequence
  Description of Artificial Sequence: Synthetic oligonucleotide
agaaucguaggcaggaucu

SEQ ID NO: 879577 - RNA, 19 nt, Artificial Sequence
  Description of Artificial Sequence: Synthetic oligonucleotide
guucagacgcguugggagg

SEQ ID NO: 879578 - RNA, 19 nt, Artificial Sequence
  Description of Artificial Sequence: Synthetic oligonucleotide
gacauucaguagaaccugg

SEQ ID NO: 879579 - RNA, 19 nt, Artificial Sequence
  Description of Artificial Sequence: Synthetic oligonucleotide
aagugcaaggcccugccuu

SEQ ID NO: 879580 - RNA, 19 nt, Artificial Sequence
  Description of Artificial Sequence: Synthetic oligonucleotide
ugccuuaaccugguggacg

SEQ ID NO: 879581 - RNA, 19 nt, Artificial Sequence
  Description of Artificial Sequence: Synthetic oligonucleotide
aucccgcccaccccaaugc

SEQ ID NO: 879582 - RNA, 19 nt, Artificial Sequence
  Description of Artificial Sequence: Synthetic oligonucleotide
ugggcuagaucauggguca

SEQ ID NO: 879583 - RNA, 19 nt, Artificial Sequence
  Description of Artificial Sequence: Synthetic oligonucleotide
ugucacuuagguuucgguu

SEQ ID NO: 879584 - RNA, 19 nt, Artificial Sequence
  Description of Artificial Sequence: Synthetic oligonucleotide
ucccggaaaucaaucaggu

SEQ ID NO: 879585 - RNA, 19 nt, Artificial Sequence
  Description of Artificial Sequence: Synthetic oligonucleotide
uguugaguaggaucccaga

SEQ ID NO: 879586 - RNA, 19 nt, Artificial Sequence
  Description of Artificial Sequence: Synthetic oligonucleotide
uuaauuccccuuugcaaau

SEQ ID NO: 879587 - RNA, 19 nt, Artificial Sequence
  Description of Artificial Sequence: Synthetic oligonucleotide
uguugggguugugagaccc

SEQ ID NO: 879588 - RNA, 19 nt, Artificial Sequence
  Description of Artificial Sequence: Synthetic oligonucleotide
aaugcucuacaggacggug

SEQ ID NO: 879589 - RNA, 19 nt, Artificial Sequence
  Description of Artificial Sequence: Synthetic oligonucleotide
aggauuaccucucccuaug

SEQ ID NO: 879590 - RNA, 19 nt, Artificial Sequence
  Description of Artificial Sequence: Synthetic oligonucleotide
uuaagaaauggggccaggu

SEQ ID NO: 879591 - RNA, 19 nt, Artificial Sequence
  Description of Artificial Sequence: Synthetic oligonucleotide
ucaagggcagcauggcuga

SEQ ID NO: 879592 - RNA, 19 nt, Artificial Sequence
  Description of Artificial Sequence: Synthetic oligonucleotide
cacaucccuaagcucaagg

SEQ ID NO: 879593 - RNA, 19 nt, Artificial Sequence
  Description of Artificial Sequence: Synthetic oligonucleotide
auguuaggacauucaguag

SEQ ID NO: 879594 - RNA, 19 nt, Artificial Sequence
  Description of Artificial Sequence: Synthetic oligonucleotide
gacgucaccauuaccacca

SEQ ID NO: 879595 - RNA, 19 nt, Artificial Sequence
  Description of Artificial Sequence: Synthetic oligonucleotide
aacagagaucccgcccacc

SEQ ID NO: 879596 - RNA, 19 nt, Artificial Sequence
  Description of Artificial Sequence: Synthetic oligonucleotide
ggaucucccagucugcuag

SEQ ID NO: 879597 - RNA, 19 nt, Artificial Sequence
  Description of Artificial Sequence: Synthetic oligonucleotide
uucaccauuccaggaaccc

SEQ ID NO: 879598 - RNA, 19 nt, Artificial Sequence
  Description of Artificial Sequence: Synthetic oligonucleotide
acggaagagccuuguuuac

SEQ ID NO: 879599 - RNA, 19 nt, Artificial Sequence
  Description of Artificial Sequence: Synthetic oligonucleotide
accucagcuagaucagguc

SEQ ID NO: 879600 - RNA, 19 nt, Artificial Sequence
  Description of Artificial Sequence: Synthetic oligonucleotide
cuuaaccugguggacgggg

SEQ ID NO: 879601 - RNA, 19 nt, Artificial Sequence
  Description of Artificial Sequence: Synthetic oligonucleotide
acaucuggcuguugaguag

SEQ ID NO: 879602 - RNA, 19 nt, Artificial Sequence
  Description of Artificial Sequence: Synthetic oligonucleotide
aucguaggcaggaucuccc

SEQ ID NO: 879603 - RNA, 19 nt, Artificial Sequence
  Description of Artificial Sequence: Synthetic oligonucleotide
ccaagauaagacaucuacc

SEQ ID NO: 879604 - RNA, 19 nt, Artificial Sequence
  Description of Artificial Sequence: Synthetic oligonucleotide
ugaagcgccugcucacggg

SEQ ID NO: 879605 - RNA, 19 nt, Artificial Sequence
  Description of Artificial Sequence: Synthetic oligonucleotide
cccaagauaagacaucuac

SEQ ID NO: 879606 - RNA, 19 nt, Artificial Sequence
  Description of Artificial Sequence: Synthetic oligonucleotide
aaggguuuacaagcacauc

SEQ ID NO: 879607 - RNA, 19 nt, Artificial Sequence
  Description of Artificial Sequence: Synthetic oligonucleotide
caaggccuagaucagacca

SEQ ID NO: 879608 - RNA, 19 nt, Artificial Sequence
  Description of Artificial Sequence: Synthetic oligonucleotide
ucccuaagcucaagggcag

SEQ ID NO: 879609 - RNA, 19 nt, Artificial Sequence
  Description of Artificial Sequence: Synthetic oligonucleotide
gagccuuguuuacugagca

SEQ ID NO: 879610 - RNA, 19 nt, Artificial Sequence
  Description of Artificial Sequence: Synthetic oligonucleotide
cauagacccaugcucucag

SEQ ID NO: 879611 - RNA, 19 nt, Artificial Sequence
  Description of Artificial Sequence: Synthetic oligonucleotide
ucuacaggacgguggcucc

SEQ ID NO: 879612 - RNA, 19 nt, Artificial Sequence
  Description of Artificial Sequence: Synthetic oligonucleotide
uaaccugguggacggggag

SEQ ID NO: 879613 - RNA, 19 nt, Artificial Sequence
  Description of Artificial Sequence: Synthetic oligonucleotide
gaucuggggauccccgaag

SEQ ID NO: 879614 - RNA, 19 nt, Artificial Sequence
  Description of Artificial Sequence: Synthetic oligonucleotide
ugcaacgggaggcauccgu

SEQ ID NO: 879615 - RNA, 19 nt, Artificial Sequence
  Description of Artificial Sequence: Synthetic oligonucleotide
aucccuaagcucaagggca

SEQ ID NO: 879616 - RNA, 19 nt, Artificial Sequence
  Description of Artificial Sequence: Synthetic oligonucleotide
caucuggcuguugaguagg

SEQ ID NO: 879617 - RNA, 19 nt, Artificial Sequence
  Description of Artificial Sequence: Synthetic oligonucleotide
acauucaguagaaccuggg

SEQ ID NO: 879618 - RNA, 19 nt, Artificial Sequence
  Description of Artificial Sequence: Synthetic oligonucleotide
cucauuucgucggauauca

SEQ ID NO: 879619 - RNA, 19 nt, Artificial Sequence
  Description of Artificial Sequence: Synthetic oligonucleotide
gguugugagacccuugaga

SEQ ID NO: 879620 - RNA, 19 nt, Artificial Sequence
  Description of Artificial Sequence: Synthetic oligonucleotide
cuggucggacuacaguggg

SEQ ID NO: 879621 - RNA, 19 nt, Artificial Sequence
  Description of Artificial Sequence: Synthetic oligonucleotide
accaggcaaaggugggugg

SEQ ID NO: 879622 - RNA, 19 nt, Artificial Sequence
  Description of Artificial Sequence: Synthetic oligonucleotide
ccuagaucagaccagucug

SEQ ID NO: 879623 - RNA, 19 nt, Artificial Sequence
  Description of Artificial Sequence: Synthetic oligonucleotide
ggcuugguaucccaggacc

SEQ ID NO: 879624 - RNA, 19 nt, Artificial Sequence
  Description of Artificial Sequence: Synthetic oligonucleotide
uuggagaauuuuccaguua

SEQ ID NO: 879625 - RNA, 19 nt, Artificial Sequence
  Description of Artificial Sequence: Synthetic oligonucleotide
ggagccacgauccccaaac

SEQ ID NO: 879626 - RNA, 19 nt, Artificial Sequence
  Description of Artificial Sequence: Synthetic oligonucleotide
gagguagcugcucagccaa

SEQ ID NO: 879627 - RNA, 19 nt, Artificial Sequence
  Description of Artificial Sequence: Synthetic oligonucleotide
ucauagacccaugcucuca

SEQ ID NO: 879628 - RNA, 19 nt, Artificial Sequence
  Description of Artificial Sequence: Synthetic oligonucleotide
ccucagcuagaucaggucg

SEQ ID NO: 879629 - RNA, 19 nt, Artificial Sequence
  Description of Artificial Sequence: Synthetic oligonucleotide
aaaggccgguucagggagc

SEQ ID NO: 879630 - RNA, 19 nt, Artificial Sequence
  Description of Artificial Sequence: Synthetic oligonucleotide
gucgcagcagggcaccagg

SEQ ID NO: 879631 - RNA, 19 nt, Artificial Sequence
  Description of Artificial Sequence: Synthetic oligonucleotide
agagccccucugcuggucg

SEQ ID NO: 879632 - RNA, 19 nt, Artificial Sequence
  Description of Artificial Sequence: Synthetic oligonucleotide
cuagaucaggucgucgcag

SEQ ID NO: 879633 - RNA, 19 nt, Artificial Sequence
  Description of Artificial Sequence: Synthetic oligonucleotide
uguagcccuuucaccauuc

SEQ ID NO: 879634 - RNA, 19 nt, Artificial Sequence
  Description of Artificial Sequence: Synthetic oligonucleotide
acuccgaggguccuucaca

SEQ ID NO: 879635 - RNA, 19 nt, Artificial Sequence
  Description of Artificial Sequence: Synthetic oligonucleotide
augcucuacaggacggugg

SEQ ID NO: 879636 - RNA, 19 nt, Artificial Sequence
  Description of Artificial Sequence: Synthetic oligonucleotide
agugaagcgccugcucacg

SEQ ID NO: 879637 - RNA, 19 nt, Artificial Sequence
  Description of Artificial Sequence: Synthetic oligonucleotide
gacacugacgucaccauua

SEQ ID NO: 879638 - RNA, 19 nt, Artificial Sequence
  Description of Artificial Sequence: Synthetic oligonucleotide
gccuuguuuacugagcacc

SEQ ID NO: 879639 - RNA, 19 nt, Artificial Sequence
  Description of Artificial Sequence: Synthetic oligonucleotide
cuaccaaaaggccgguuca

SEQ ID NO: 879640 - RNA, 19 nt, Artificial Sequence
  Description of Artificial Sequence: Synthetic oligonucleotide
ugccacccagugaagcgcc

SEQ ID NO: 879641 - RNA, 19 nt, Artificial Sequence
  Description of Artificial Sequence: Synthetic oligonucleotide
cuccgaggguccuucacac

SEQ ID NO: 879642 - RNA, 19 nt, Artificial Sequence
  Description of Artificial Sequence: Synthetic oligonucleotide
caggaagcguucagacgcg

SEQ ID NO: 879643 - RNA, 19 nt, Artificial Sequence
  Description of Artificial Sequence: Synthetic oligonucleotide
guuugcuaagcauccccuc

SEQ ID NO: 879644 - RNA, 19 nt, Artificial Sequence
  Description of Artificial Sequence: Synthetic oligonucleotide
ucucauuucgucggauauc

SEQ ID NO: 879645 - RNA, 19 nt, Artificial Sequence
  Description of Artificial Sequence: Synthetic oligonucleotide
cacggaagagccuuguuua

SEQ ID NO: 879646 - RNA, 19 nt, Artificial Sequence
  Description of Artificial Sequence: Synthetic oligonucleotide
ugccauagagcuggugagc

SEQ ID NO: 879647 - RNA, 19 nt, Artificial Sequence
  Description of Artificial Sequence: Synthetic oligonucleotide
gauccccaaacacaaggcu

SEQ ID NO: 879648 - RNA, 19 nt, Artificial Sequence
  Description of Artificial Sequence: Synthetic oligonucleotide
uacccgacugccuggggac

SEQ ID NO: 879649 - RNA, 19 nt, Artificial Sequence
  Description of Artificial Sequence: Synthetic oligonucleotide
gugaagcgccugcucacgg

SEQ ID NO: 879650 - RNA, 19 nt, Artificial Sequence
  Description of Artificial Sequence: Synthetic oligonucleotide
aggucgucgcagcagggca

SEQ ID NO: 879651 - RNA, 19 nt, Artificial Sequence
  Description of Artificial Sequence: Synthetic oligonucleotide
gagaccaaaccugggagaa

SEQ ID NO: 879652 - RNA, 19 nt, Artificial Sequence
  Description of Artificial Sequence: Synthetic oligonucleotide
gcggagaacagagaucccg

SEQ ID NO: 879653 - RNA, 19 nt, Artificial Sequence
  Description of Artificial Sequence: Synthetic oligonucleotide
ugcggacucccggaaauca

SEQ ID NO: 879654 - RNA, 19 nt, Artificial Sequence
  Description of Artificial Sequence: Synthetic oligonucleotide
  modified_base (19)..(19): a, c, u, g, unknown or other
uaucauguaccagcaucan

SEQ ID NO: 879655 - RNA, 19 nt, Artificial Sequence
  Description of Artificial Sequence: Synthetic oligonucleotide
uggucggacuacagugggc

SEQ ID NO: 879656 - RNA, 19 nt, Artificial Sequence
  Description of Artificial Sequence: Synthetic oligonucleotide
uagaucagaccagucugaa

SEQ ID NO: 879657 - RNA, 19 nt, Artificial Sequence
  Description of Artificial Sequence: Synthetic oligonucleotide
ggccacuaccaaaaggccg

SEQ ID NO: 879658 - RNA, 19 nt, Artificial Sequence
  Description of Artificial Sequence: Synthetic oligonucleotide
gacggggaggauuaccucu

SEQ ID NO: 879659 - RNA, 19 nt, Artificial Sequence
  Description of Artificial Sequence: Synthetic oligonucleotide
ugggguugugagacccuug

SEQ ID NO: 879660 - RNA, 19 nt, Artificial Sequence
  Description of Artificial Sequence: Synthetic oligonucleotide
cacuuaagaaauggggcca

SEQ ID NO: 879661 - RNA, 19 nt, Artificial Sequence
  Description of Artificial Sequence: Synthetic oligonucleotide
gguuucgguucaauguuag

SEQ ID NO: 879662 - RNA, 19 nt, Artificial Sequence
  Description of Artificial Sequence: Synthetic oligonucleotide
cucauagacccaugcucuc

SEQ ID NO: 879663 - RNA, 19 nt, Artificial Sequence
  Description of Artificial Sequence: Synthetic oligonucleotide
uucagacgcguugggaggu

SEQ ID NO: 879664 - RNA, 19 nt, Artificial Sequence
  Description of Artificial Sequence: Synthetic oligonucleotide
ucguaggcaggaucuccca

SEQ ID NO: 879665 - RNA, 19 nt, Artificial Sequence
  Description of Artificial Sequence: Synthetic oligonucleotide
guagaaccugggucaggcc

SEQ ID NO: 879666 - RNA, 19 nt, Artificial Sequence
  Description of Artificial Sequence: Synthetic oligonucleotide
ugaccagcgccacggugac

SEQ ID NO: 879667 - RNA, 19 nt, Artificial Sequence
  Description of Artificial Sequence: Synthetic oligonucleotide
uuucgucggauaucaugua

SEQ ID NO: 879668 - RNA, 19 nt, Artificial Sequence
  Description of Artificial Sequence: Synthetic oligonucleotide
cuggguggaggcguccucg

SEQ ID NO: 879669 - RNA, 19 nt, Artificial Sequence
  Description of Artificial Sequence: Synthetic oligonucleotide
aucaugggucacguugaag

SEQ ID NO: 879670 - RNA, 19 nt, Artificial Sequence
  Description of Artificial Sequence: Synthetic oligonucleotide
gcugagauaggagaagaga

SEQ ID NO: 879671 - RNA, 19 nt, Artificial Sequence
  Description of Artificial Sequence: Synthetic oligonucleotide
acccuugagaaggguuuac

SEQ ID NO: 879672 - RNA, 19 nt, Artificial Sequence
  Description of Artificial Sequence: Synthetic oligonucleotide
cucugccacccagugaagc

SEQ ID NO: 879673 - RNA, 19 nt, Artificial Sequence
  Description of Artificial Sequence: Synthetic oligonucleotide
agagugguuagcaguccug

SEQ ID NO: 879674 - RNA, 19 nt, Artificial Sequence
  Description of Artificial Sequence: Synthetic oligonucleotide
gucggauaucauguaccag

SEQ ID NO: 879675 - RNA, 19 nt, Artificial Sequence
  Description of Artificial Sequence: Synthetic oligonucleotide
ggcuagaucaugggucacg

SEQ ID NO: 879676 - RNA, 19 nt, Artificial Sequence
  Description of Artificial Sequence: Synthetic oligonucleotide
gacuccgaggguccuucac

SEQ ID NO: 879677 - RNA, 19 nt, Artificial Sequence
  Description of Artificial Sequence: Synthetic oligonucleotide
cuuguuuacugagcaccuc

SEQ ID NO: 879678 - RNA, 19 nt, Artificial Sequence
  Description of Artificial Sequence: Synthetic oligonucleotide
acagacaaucugacuccuc

SEQ ID NO: 879679 - RNA, 19 nt, Artificial Sequence
  Description of Artificial Sequence: Synthetic oligonucleotide
acggggaggauuaccucuc

SEQ ID NO: 879680 - RNA, 19 nt, Artificial Sequence
  Description of Artificial Sequence: Synthetic oligonucleotide
auagacccaugcucucagu

SEQ ID NO: 879681 - RNA, 19 nt, Artificial Sequence
  Description of Artificial Sequence: Synthetic oligonucleotide
ccagcucauagacccaugc

SEQ ID NO: 879682 - RNA, 19 nt, Artificial Sequence
  Description of Artificial Sequence: Synthetic oligonucleotide
aaggccgguucagggagcu

SEQ ID NO: 879683 - RNA, 19 nt, Artificial Sequence
  Description of Artificial Sequence: Synthetic oligonucleotide
ugcaaggcccugccuuaac

SEQ ID NO: 879684 - RNA, 19 nt, Artificial Sequence
  Description of Artificial Sequence: Synthetic oligonucleotide
agugguuagcaguccuguu

SEQ ID NO: 879685 - RNA, 19 nt, Artificial Sequence
  Description of Artificial Sequence: Synthetic oligonucleotide
ggaagacaaggccuagauc

SEQ ID NO: 879686 - RNA, 19 nt, Artificial Sequence
  Description of Artificial Sequence: Synthetic oligonucleotide
gauuaccucucccuaugau

SEQ ID NO: 879687 - RNA, 19 nt, Artificial Sequence
  Description of Artificial Sequence: Synthetic oligonucleotide
gguuagcaguccuguuggg

SEQ ID NO: 879688 - RNA, 19 nt, Artificial Sequence
  Description of Artificial Sequence: Synthetic oligonucleotide
cacgauccccaaacacaag

SEQ ID NO: 879689 - RNA, 19 nt, Artificial Sequence
  Description of Artificial Sequence: Synthetic oligonucleotide
agacgcguugggagguagc

SEQ ID NO: 879690 - RNA, 19 nt, Artificial Sequence
  Description of Artificial Sequence: Synthetic oligonucleotide
agacccuugagaaggguuu

SEQ ID NO: 879691 - RNA, 19 nt, Artificial Sequence
  Description of Artificial Sequence: Synthetic oligonucleotide
gcuggucggacuacagugg

SEQ ID NO: 879692 - RNA, 19 nt, Artificial Sequence
  Description of Artificial Sequence: Synthetic oligonucleotide
gcaaggcccugccuuaacc

SEQ ID NO: 879693 - RNA, 19 nt, Artificial Sequence
  Description of Artificial Sequence: Synthetic oligonucleotide
agcacccugcuggaagauc

SEQ ID NO: 879694 - RNA, 19 nt, Artificial Sequence
  Description of Artificial Sequence: Synthetic oligonucleotide
ucauuucgucggauaucau

SEQ ID NO: 879695 - RNA, 19 nt, Artificial Sequence
  Description of Artificial Sequence: Synthetic oligonucleotide
ggacgguggcuccagcugc

SEQ ID NO: 879696 - RNA, 19 nt, Artificial Sequence
  Description of Artificial Sequence: Synthetic oligonucleotide
ucuccacauggugaccccu

SEQ ID NO: 879697 - RNA, 19 nt, Artificial Sequence
  Description of Artificial Sequence: Synthetic oligonucleotide
ugagacccuugagaagggu

SEQ ID NO: 879698 - RNA, 19 nt, Artificial Sequence
  Description of Artificial Sequence: Synthetic oligonucleotide
cuacccgacugccugggga

SEQ ID NO: 879699 - RNA, 19 nt, Artificial Sequence
  Description of Artificial Sequence: Synthetic oligonucleotide
gaggauuaccucucccuau

SEQ ID NO: 879700 - RNA, 19 nt, Artificial Sequence
  Description of Artificial Sequence: Synthetic oligonucleotide
uggcucucauuucgucgga

SEQ ID NO: 879701 - RNA, 19 nt, Artificial Sequence
  Description of Artificial Sequence: Synthetic oligonucleotide
ccuagucacuuaagaaaug

SEQ ID NO: 879702 - RNA, 19 nt, Artificial Sequence
  Description of Artificial Sequence: Synthetic oligonucleotide
ucccuaugauggccuauuu

SEQ ID NO: 879703 - RNA, 19 nt, Artificial Sequence
  Description of Artificial Sequence: Synthetic oligonucleotide
ggcuguacugaguucucca

SEQ ID NO: 879704 - RNA, 19 nt, Artificial Sequence
  Description of Artificial Sequence: Synthetic oligonucleotide
ggauaggguuugcuaagca

SEQ ID NO: 879705 - RNA, 19 nt, Artificial Sequence
  Description of Artificial Sequence: Synthetic oligonucleotide
augcaaaggcggagaacag

SEQ ID NO: 879706 - RNA, 19 nt, Artificial Sequence
  Description of Artificial Sequence: Synthetic oligonucleotide
ugcuagccagggccaaauc

SEQ ID NO: 879707 - RNA, 19 nt, Artificial Sequence
  Description of Artificial Sequence: Synthetic oligonucleotide
cagcuagaucaggucgucg

SEQ ID NO: 879708 - RNA, 19 nt, Artificial Sequence
  Description of Artificial Sequence: Synthetic oligonucleotide
gggguugugagacccuuga

SEQ ID NO: 879709 - RNA, 19 nt, Artificial Sequence
  Description of Artificial Sequence: Synthetic oligonucleotide
uggacuccgaggguccuuc

SEQ ID NO: 879710 - RNA, 19 nt, Artificial Sequence
  Description of Artificial Sequence: Synthetic oligonucleotide
ccccugagaccaaaccugg

SEQ ID NO: 879711 - RNA, 19 nt, Artificial Sequence
  Description of Artificial Sequence: Synthetic oligonucleotide
cauccacggaagagccuug

SEQ ID NO: 879712 - RNA, 19 nt, Artificial Sequence
  Description of Artificial Sequence: Synthetic oligonucleotide
caacgggaggcauccguca

SEQ ID NO: 879713 - RNA, 19 nt, Artificial Sequence
  Description of Artificial Sequence: Synthetic oligonucleotide
cugcucacggggacaccag

SEQ ID NO: 879714 - RNA, 19 nt, Artificial Sequence
  Description of Artificial Sequence: Synthetic oligonucleotide
gagugguuagcaguccugu

SEQ ID NO: 879715 - RNA, 19 nt, Artificial Sequence
  Description of Artificial Sequence: Synthetic oligonucleotide
caugggcuagaucaugggu

SEQ ID NO: 879716 - RNA, 19 nt, Artificial Sequence
  Description of Artificial Sequence: Synthetic oligonucleotide
gcuaagcauccccucuggc

SEQ ID NO: 879717 - RNA, 19 nt, Artificial Sequence
  Description of Artificial Sequence: Synthetic oligonucleotide
gccacgauccccaaacaca

SEQ ID NO: 879718 - RNA, 19 nt, Artificial Sequence
  Description of Artificial Sequence: Synthetic oligonucleotide
ggaggauuaccucucccua

SEQ ID NO: 879719 - RNA, 19 nt, Artificial Sequence
  Description of Artificial Sequence: Synthetic oligonucleotide
uggugcggacucccggaaa

SEQ ID NO: 879720 - RNA, 19 nt, Artificial Sequence
  Description of Artificial Sequence: Synthetic oligonucleotide
gcuagaucaggucgucgca

SEQ ID NO: 879721 - RNA, 19 nt, Artificial Sequence
  Description of Artificial Sequence: Synthetic oligonucleotide
cucucauuucgucggauau

SEQ ID NO: 879722 - RNA, 19 nt, Artificial Sequence
  Description of Artificial Sequence: Synthetic oligonucleotide
cagcauggcugagauagga

SEQ ID NO: 879723 - RNA, 19 nt, Artificial Sequence
  Description of Artificial Sequence: Synthetic oligonucleotide
ggguugugagacccuugag

SEQ ID NO: 879724 - RNA, 19 nt, Artificial Sequence
  Description of Artificial Sequence: Synthetic oligonucleotide
gagggacucugggaacaug

SEQ ID NO: 879725 - RNA, 19 nt, Artificial Sequence
  Description of Artificial Sequence: Synthetic oligonucleotide
ccuuugcaaauggaagccc

SEQ ID NO: 879726 - RNA, 19 nt, Artificial Sequence
  Description of Artificial Sequence: Synthetic oligonucleotide
aggaucucccagucugcua

SEQ ID NO: 879727 - RNA, 19 nt, Artificial Sequence
  Description of Artificial Sequence: Synthetic oligonucleotide
ggauuaccucucccuauga

SEQ ID NO: 879728 - RNA, 19 nt, Artificial Sequence
  Description of Artificial Sequence: Synthetic oligonucleotide
gccuagaucagaccagucu

SEQ ID NO: 879729 - RNA, 19 nt, Artificial Sequence
  Description of Artificial Sequence: Synthetic oligonucleotide
ucuggacuccgaggguccu

SEQ ID NO: 879730 - RNA, 19 nt, Artificial Sequence
  Description of Artificial Sequence: Synthetic oligonucleotide
cugccuuaaccugguggac

SEQ ID NO: 879731 - RNA, 19 nt, Artificial Sequence
  Description of Artificial Sequence: Synthetic oligonucleotide
cugaggcauccaugggguc

SEQ ID NO: 879732 - RNA, 19 nt, Artificial Sequence
  Description of Artificial Sequence: Synthetic oligonucleotide
gcucauagacccaugcucu

SEQ ID NO: 879733 - RNA, 19 nt, Artificial Sequence
  Description of Artificial Sequence: Synthetic oligonucleotide
gacgcguugggagguagcu

SEQ ID NO: 879734 - RNA, 19 nt, Artificial Sequence
  Description of Artificial Sequence: Synthetic oligonucleotide
ccacgauccccaaacacaa

SEQ ID NO: 879735 - RNA, 19 nt, Artificial Sequence
  Description of Artificial Sequence: Synthetic oligonucleotide
auccacggaagagccuugu

SEQ ID NO: 879736 - RNA, 19 nt, Artificial Sequence
  Description of Artificial Sequence: Synthetic oligonucleotide
cagacgcguugggagguag

SEQ ID NO: 879737 - RNA, 19 nt, Artificial Sequence
  Description of Artificial Sequence: Synthetic oligonucleotide
gguaggucccgcagagccc

SEQ ID NO: 879738 - RNA, 19 nt, Artificial Sequence
  Description of Artificial Sequence: Synthetic oligonucleotide
cagugaugguagaaucgua

SEQ ID NO: 879739 - RNA, 19 nt, Artificial Sequence
  Description of Artificial Sequence: Synthetic oligonucleotide
cuggaagacaaggccuaga

SEQ ID NO: 879740 - RNA, 19 nt, Artificial Sequence
  Description of Artificial Sequence: Synthetic oligonucleotide
acgcguugggagguagcug

SEQ ID NO: 879741 - RNA, 19 nt, Artificial Sequence
  Description of Artificial Sequence: Synthetic oligonucleotide
gaggcguccucgggccagg

SEQ ID NO: 879742 - RNA, 19 nt, Artificial Sequence
  Description of Artificial Sequence: Synthetic oligonucleotide
gugcaagguaggucccgca

SEQ ID NO: 879743 - RNA, 19 nt, Artificial Sequence
  Description of Artificial Sequence: Synthetic oligonucleotide
gaggggccguuucccuggc

SEQ ID NO: 879744 - RNA, 19 nt, Artificial Sequence
  Description of Artificial Sequence: Synthetic oligonucleotide
aggaagcguucagacgcgu

SEQ ID NO: 879745 - RNA, 19 nt, Artificial Sequence
  Description of Artificial Sequence: Synthetic oligonucleotide
ggugaccccuggcuuccag

SEQ ID NO: 879746 - RNA, 19 nt, Artificial Sequence
  Description of Artificial Sequence: Synthetic oligonucleotide
cccggaaaucaaucaggug

SEQ ID NO: 879747 - RNA, 19 nt, Artificial Sequence
  Description of Artificial Sequence: Synthetic oligonucleotide
gcucacggggacaccaggc

SEQ ID NO: 879748 - RNA, 19 nt, Artificial Sequence
  Description of Artificial Sequence: Synthetic oligonucleotide
ggucauggacacugacguc

SEQ ID NO: 879749 - RNA, 19 nt, Artificial Sequence
  Description of Artificial Sequence: Synthetic oligonucleotide
agaccaaaccugggagaaa

SEQ ID NO: 879750 - RNA, 19 nt, Artificial Sequence
  Description of Artificial Sequence: Synthetic oligonucleotide
gcagagugguuagcagucc

SEQ ID NO: 879751 - RNA, 19 nt, Artificial Sequence
  Description of Artificial Sequence: Synthetic oligonucleotide
gucacguugaagccaucuu

SEQ ID NO: 879752 - RNA, 19 nt, Artificial Sequence
  Description of Artificial Sequence: Synthetic oligonucleotide
cauguagcccuuucaccau

SEQ ID NO: 879753 - RNA, 19 nt, Artificial Sequence
  Description of Artificial Sequence: Synthetic oligonucleotide
cggauaucauguaccagca

SEQ ID NO: 879754 - RNA, 19 nt, Artificial Sequence
  Description of Artificial Sequence: Synthetic oligonucleotide
gagacccuugagaaggguu

SEQ ID NO: 879755 - RNA, 19 nt, Artificial Sequence
  Description of Artificial Sequence: Synthetic oligonucleotide
auccaguaccucagcuaga

SEQ ID NO: 879756 - RNA, 19 nt, Artificial Sequence
  Description of Artificial Sequence: Synthetic oligonucleotide
uccgacugccguggaccca

SEQ ID NO: 879757 - RNA, 19 nt, Artificial Sequence
  Description of Artificial Sequence: Synthetic oligonucleotide
cagcucauagacccaugcu

SEQ ID NO: 879758 - RNA, 19 nt, Artificial Sequence
  Description of Artificial Sequence: Synthetic oligonucleotide
ggcuguugaguaggauccc

SEQ ID NO: 879759 - RNA, 19 nt, Artificial Sequence
  Description of Artificial Sequence: Synthetic oligonucleotide
cgucggauaucauguacca

SEQ ID NO: 879760 - RNA, 19 nt, Artificial Sequence
  Description of Artificial Sequence: Synthetic oligonucleotide
cguaggcaggaucucccag

SEQ ID NO: 879761 - RNA, 19 nt, Artificial Sequence
  Description of Artificial Sequence: Synthetic oligonucleotide
ggagaauuuuccaguuacu

SEQ ID NO: 879762 - RNA, 19 nt, Artificial Sequence
  Description of Artificial Sequence: Synthetic oligonucleotide
gcaacgggaggcauccguc

SEQ ID NO: 879763 - RNA, 19 nt, Artificial Sequence
  Description of Artificial Sequence: Synthetic oligonucleotide
cgaaguagaucugcaugac

SEQ ID NO: 879764 - RNA, 19 nt, Artificial Sequence
  Description of Artificial Sequence: Synthetic oligonucleotide
ucagacgcguugggaggua

SEQ ID NO: 879765 - RNA, 19 nt, Artificial Sequence
  Description of Artificial Sequence: Synthetic oligonucleotide
gcuagaucaugggucacgu

SEQ ID NO: 879766 - RNA, 19 nt, Artificial Sequence
  Description of Artificial Sequence: Synthetic oligonucleotide
ggaggcguccucgggccag

SEQ ID NO: 879767 - RNA, 19 nt, Artificial Sequence
  Description of Artificial Sequence: Synthetic oligonucleotide
caggacgguggcuccagcu

SEQ ID NO: 879768 - RNA, 19 nt, Artificial Sequence
  Description of Artificial Sequence: Synthetic oligonucleotide
aggucccgcagagccccuc

SEQ ID NO: 879769 - RNA, 19 nt, Artificial Sequence
  Description of Artificial Sequence: Synthetic oligonucleotide
ccauuaccaccaaaggccu

SEQ ID NO: 879770 - RNA, 19 nt, Artificial Sequence
  Description of Artificial Sequence: Synthetic oligonucleotide
ggucacguugaagccaucu

SEQ ID NO: 879771 - RNA, 19 nt, Artificial Sequence
  Description of Artificial Sequence: Synthetic oligonucleotide
ccuuguuuacugagcaccu

SEQ ID NO: 879772 - RNA, 19 nt, Artificial Sequence
  Description of Artificial Sequence: Synthetic oligonucleotide
acccaagauaagacaucua

SEQ ID NO: 879773 - RNA, 19 nt, Artificial Sequence
  Description of Artificial Sequence: Synthetic oligonucleotide
gugcaacgggaggcauccg

SEQ ID NO: 879774 - RNA, 19 nt, Artificial Sequence
  Description of Artificial Sequence: Synthetic oligonucleotide
guagaaucguaggcaggau

SEQ ID NO: 879775 - RNA, 19 nt, Artificial Sequence
  Description of Artificial Sequence: Synthetic oligonucleotide
ccuggugcggacucccgga

SEQ ID NO: 879776 - RNA, 19 nt, Artificial Sequence
  Description of Artificial Sequence: Synthetic oligonucleotide
gugcggacucccggaaauc

SEQ ID NO: 879777 - RNA, 19 nt, Artificial Sequence
  Description of Artificial Sequence: Synthetic oligonucleotide
cccagugaagcgccugcuc

SEQ ID NO: 879778 - RNA, 19 nt, Artificial Sequence
  Description of Artificial Sequence: Synthetic oligonucleotide
ucgucgcagcagggcacca

SEQ ID NO: 879779 - RNA, 19 nt, Artificial Sequence
  Description of Artificial Sequence: Synthetic oligonucleotide
gggauccccgaaguagauc

SEQ ID NO: 879780 - RNA, 19 nt, Artificial Sequence
  Description of Artificial Sequence: Synthetic oligonucleotide
cucucccuaugauggccua

SEQ ID NO: 879781 - RNA, 19 nt, Artificial Sequence
  Description of Artificial Sequence: Synthetic oligonucleotide
cccuaugauggccuauuua

SEQ ID NO: 879782 - RNA, 19 nt, Artificial Sequence
  Description of Artificial Sequence: Synthetic oligonucleotide
gcuugguaucccaggaccu

SEQ ID NO: 879783 - RNA, 19 nt, Artificial Sequence
  Description of Artificial Sequence: Synthetic oligonucleotide
agcugcgucuggacuccga

SEQ ID NO: 879784 - RNA, 19 nt, Artificial Sequence
  Description of Artificial Sequence: Synthetic oligonucleotide
ccuacccgacugccugggg

SEQ ID NO: 879785 - RNA, 19 nt, Artificial Sequence
  Description of Artificial Sequence: Synthetic oligonucleotide
gcauccacggaagagccuu

SEQ ID NO: 879786 - RNA, 19 nt, Artificial Sequence
  Description of Artificial Sequence: Synthetic oligonucleotide
ccaguaccucagcuagauc

SEQ ID NO: 879787 - RNA, 19 nt, Artificial Sequence
  Description of Artificial Sequence: Synthetic oligonucleotide
gagaucccgcccaccccaa

SEQ ID NO: 879788 - RNA, 19 nt, Artificial Sequence
  Description of Artificial Sequence: Synthetic oligonucleotide
cccuacccgacugccuggg

SEQ ID NO: 879789 - RNA, 19 nt, Artificial Sequence
  Description of Artificial Sequence: Synthetic oligonucleotide
gcguucagacgcguuggga

SEQ ID NO: 879790 - RNA, 19 nt, Artificial Sequence
  Description of Artificial Sequence: Synthetic oligonucleotide
cuagaucaugggucacguu

SEQ ID NO: 879791 - RNA, 19 nt, Artificial Sequence
  Description of Artificial Sequence: Synthetic oligonucleotide
gucugcuagccagggccaa

SEQ ID NO: 879792 - RNA, 19 nt, Artificial Sequence
  Description of Artificial Sequence: Synthetic oligonucleotide
ggcuggugccaaguauauc

SEQ ID NO: 879793 - RNA, 19 nt, Artificial Sequence
  Description of Artificial Sequence: Synthetic oligonucleotide
ggccuagaucagaccaguc

SEQ ID NO: 879794 - RNA, 19 nt, Artificial Sequence
  Description of Artificial Sequence: Synthetic oligonucleotide
cauccccucuggccccuga

SEQ ID NO: 879795 - RNA, 19 nt, Artificial Sequence
  Description of Artificial Sequence: Synthetic oligonucleotide
cucccuaugauggccuauu

SEQ ID NO: 879796 - RNA, 19 nt, Artificial Sequence
  Description of Artificial Sequence: Synthetic oligonucleotide
gguucaauguuaggacauu

SEQ ID NO: 879797 - RNA, 19 nt, Artificial Sequence
  Description of Artificial Sequence: Synthetic oligonucleotide
ccacggaagagccuuguuu

SEQ ID NO: 879798 - RNA, 19 nt, Artificial Sequence
  Description of Artificial Sequence: Synthetic oligonucleotide
ggacuacagugggcagcag

SEQ ID NO: 879799 - RNA, 19 nt, Artificial Sequence
  Description of Artificial Sequence: Synthetic oligonucleotide
ggacuccgaggguccuuca

SEQ ID NO: 879800 - RNA, 19 nt, Artificial Sequence
  Description of Artificial Sequence: Synthetic oligonucleotide
gggcuagaucaugggucac

SEQ ID NO: 879801 - RNA, 19 nt, Artificial Sequence
  Description of Artificial Sequence: Synthetic oligonucleotide
cggacuacagugggcagca

SEQ ID NO: 879802 - RNA, 19 nt, Artificial Sequence
  Description of Artificial Sequence: Synthetic oligonucleotide
aggccgguucagggagcug

SEQ ID NO: 879803 - RNA, 19 nt, Artificial Sequence
  Description of Artificial Sequence: Synthetic oligonucleotide
ccgucaccacagcacccug

SEQ ID NO: 879804 - RNA, 19 nt, Artificial Sequence
  Description of Artificial Sequence: Synthetic oligonucleotide
cgguucaauguuaggacau

SEQ ID NO: 879805 - RNA, 19 nt, Artificial Sequence
  Description of Artificial Sequence: Synthetic oligonucleotide
gggccguuucccuggcugu

SEQ ID NO: 879806 - RNA, 19 nt, Artificial Sequence
  Description of Artificial Sequence: Synthetic oligonucleotide
gcggacucccggaaaucaa

SEQ ID NO: 879807 - RNA, 19 nt, Artificial Sequence
  Description of Artificial Sequence: Synthetic oligonucleotide
ggccccugaucugaggcau

SEQ ID NO: 879808 - RNA, 19 nt, Artificial Sequence
  Description of Artificial Sequence: Synthetic oligonucleotide
ccgacugccguggacccaa

SEQ ID NO: 879809 - RNA, 19 nt, Artificial Sequence
  Description of Artificial Sequence: Synthetic oligonucleotide
cgucgcagcagggcaccag

SEQ ID NO: 879810 - RNA, 19 nt, Artificial Sequence
  Description of Artificial Sequence: Synthetic oligonucleotide
caccgaugaugaaguuguu

SEQ ID NO: 879811 - RNA, 19 nt, Artificial Sequence
  Description of Artificial Sequence: Synthetic oligonucleotide
ggaagcguucagacgcguu

SEQ ID NO: 879812 - RNA, 19 nt, Artificial Sequence
  Description of Artificial Sequence: Synthetic oligonucleotide
cccgcagagccccucugcu

SEQ ID NO: 879813 - RNA, 19 nt, Artificial Sequence
  Description of Artificial Sequence: Synthetic oligonucleotide
gccccugaucugaggcauc

SEQ ID NO: 879814 - RNA, 19 nt, Artificial Sequence
  Description of Artificial Sequence: Synthetic oligonucleotide
cccggauggcaggaaaggu

SEQ ID NO: 879815 - RNA, 19 nt, Artificial Sequence
  Description of Artificial Sequence: Synthetic oligonucleotide
ccgcccaggcccagaaacu

SEQ ID NO: 879816 - RNA, 19 nt, Artificial Sequence
  Description of Artificial Sequence: Synthetic oligonucleotide
cccugaucugaggcaucca

SEQ ID NO: 879817 - RNA, 19 nt, Artificial Sequence
  Description of Artificial Sequence: Synthetic oligonucleotide
cgacugccguggacccaag

SEQ ID NO: 879818 - RNA, 19 nt, Artificial Sequence
  Description of Artificial Sequence: Synthetic oligonucleotide
gcguugggagguagcugcu

SEQ ID NO: 879819 - RNA, 19 nt, Artificial Sequence
  Description of Artificial Sequence: Synthetic oligonucleotide
cuggacuccgaggguccuu

SEQ ID NO: 879820 - RNA, 19 nt, Artificial Sequence
  Description of Artificial Sequence: Synthetic oligonucleotide
ccgacugccuggggaccuu

SEQ ID NO: 879821 - RNA, 19 nt, Artificial Sequence
  Description of Artificial Sequence: Synthetic oligonucleotide
aacucaacuaacuugagcg

SEQ ID NO: 879822 - RNA, 19 nt, Artificial Sequence
  Description of Artificial Sequence: Synthetic oligonucleotide
aaaagauccuccuugguac

SEQ ID NO: 879823 - RNA, 19 nt, Artificial Sequence
  Description of Artificial Sequence: Synthetic oligonucleotide
gauaaagucauucacugag

SEQ ID NO: 879824 - RNA, 19 nt, Artificial Sequence
  Description of Artificial Sequence: Synthetic oligonucleotide
uuugacagaaccuucacag

SEQ ID NO: 879825 - RNA, 19 nt, Artificial Sequence
  Description of Artificial Sequence: Synthetic oligonucleotide
uggaaauacuaaaagaucc

SEQ ID NO: 879826 - RNA, 19 nt, Artificial Sequence
  Description of Artificial Sequence: Synthetic oligonucleotide
auaaauaagcauuucaccu

SEQ ID NO: 879827 - RNA, 19 nt, Artificial Sequence
  Description of Artificial Sequence: Synthetic oligonucleotide
aaauacuaaaagauccucc

SEQ ID NO: 879828 - RNA, 19 nt, Artificial Sequence
  Description of Artificial Sequence: Synthetic oligonucleotide
ucaucgaugccaaacaucc

SEQ ID NO: 879829 - RNA, 19 nt, Artificial Sequence
  Description of Artificial Sequence: Synthetic oligonucleotide
ucuagguuugcuuugaaac

SEQ ID NO: 879830 - RNA, 19 nt, Artificial Sequence
  Description of Artificial Sequence: Synthetic oligonucleotide
uugucuaacuuuuaaaacu

SEQ ID NO: 879831 - RNA, 19 nt, Artificial Sequence
  Description of Artificial Sequence: Synthetic oligonucleotide
aucuaaggugaccacagcc

SEQ ID NO: 879832 - RNA, 19 nt, Artificial Sequence
  Description of Artificial Sequence: Synthetic oligonucleotide
ugggacgugauuuacauca

SEQ ID NO: 879833 - RNA, 19 nt, Artificial Sequence
  Description of Artificial Sequence: Synthetic oligonucleotide
aaauggauuugacuaacca

SEQ ID NO: 879834 - RNA, 19 nt, Artificial Sequence
  Description of Artificial Sequence: Synthetic oligonucleotide
aaucauaacuucaacacga

SEQ ID NO: 879835 - RNA, 19 nt, Artificial Sequence
  Description of Artificial Sequence: Synthetic oligonucleotide
uugacuaaccaaauguucu

SEQ ID NO: 879836 - RNA, 19 nt, Artificial Sequence
  Description of Artificial Sequence: Synthetic oligonucleotide
uuaaaccuuuaucaguugc

SEQ ID NO: 879837 - RNA, 19 nt, Artificial Sequence
  Description of Artificial Sequence: Synthetic oligonucleotide
ucgccuuauauaaauaagc

SEQ ID NO: 879838 - RNA, 19 nt, Artificial Sequence
  Description of Artificial Sequence: Synthetic oligonucleotide
ucucaauuucacauaauga

SEQ ID NO: 879839 - RNA, 19 nt, Artificial Sequence
  Description of Artificial Sequence: Synthetic oligonucleotide
ucuugucuaacuuuuaaaa

SEQ ID NO: 879840 - RNA, 19 nt, Artificial Sequence
  Description of Artificial Sequence: Synthetic oligonucleotide
ugauugguguaauuaaacc

SEQ ID NO: 879841 - RNA, 19 nt, Artificial Sequence
  Description of Artificial Sequence: Synthetic oligonucleotide
aauggauuugacuaaccaa

SEQ ID NO: 879842 - RNA, 19 nt, Artificial Sequence
  Description of Artificial Sequence: Synthetic oligonucleotide
cacauaaugagucuccagc

SEQ ID NO: 879843 - RNA, 19 nt, Artificial Sequence
  Description of Artificial Sequence: Synthetic oligonucleotide
uauuagucacaguuuauca

SEQ ID NO: 879844 - RNA, 19 nt, Artificial Sequence
  Description of Artificial Sequence: Synthetic oligonucleotide
acuacuauuccaaaauuuc

SEQ ID NO: 879845 - RNA, 19 nt, Artificial Sequence
  Description of Artificial Sequence: Synthetic oligonucleotide
uucacuacuauuccaaaau

SEQ ID NO: 879846 - RNA, 19 nt, Artificial Sequence
  Description of Artificial Sequence: Synthetic oligonucleotide
acaguuauaagcuggugcu

SEQ ID NO: 879847 - RNA, 19 nt, Artificial Sequence
  Description of Artificial Sequence: Synthetic oligonucleotide
aguuauaagcuggugcugc

SEQ ID NO: 879848 - RNA, 19 nt, Artificial Sequence
  Description of Artificial Sequence: Synthetic oligonucleotide
uuaagguagaguucuauau

SEQ ID NO: 879849 - RNA, 19 nt, Artificial Sequence
  Description of Artificial Sequence: Synthetic oligonucleotide
aagcuuucgccuuauauaa

SEQ ID NO: 879850 - RNA, 19 nt, Artificial Sequence
  Description of Artificial Sequence: Synthetic oligonucleotide
aauuucacauaaugagucu

SEQ ID NO: 879851 - RNA, 19 nt, Artificial Sequence
  Description of Artificial Sequence: Synthetic oligonucleotide
acucauacccaaucuggcc

SEQ ID NO: 879852 - RNA, 19 nt, Artificial Sequence
  Description of Artificial Sequence: Synthetic oligonucleotide
uuaagcgaaaccgaggugu

SEQ ID NO: 879853 - RNA, 19 nt, Artificial Sequence
  Description of Artificial Sequence: Synthetic oligonucleotide
uucgccuuauauaaauaag

SEQ ID NO: 879854 - RNA, 19 nt, Artificial Sequence
  Description of Artificial Sequence: Synthetic oligonucleotide
uauuauacauucacuacua

SEQ ID NO: 879855 - RNA, 19 nt, Artificial Sequence
  Description of Artificial Sequence: Synthetic oligonucleotide
uuugcaucuaaggugacca

SEQ ID NO: 879856 - RNA, 19 nt, Artificial Sequence
  Description of Artificial Sequence: Synthetic oligonucleotide
aaccuuuaucaguugccac

SEQ ID NO: 879857 - RNA, 19 nt, Artificial Sequence
  Description of Artificial Sequence: Synthetic oligonucleotide
ucaguuaaccucuuggcaa

SEQ ID NO: 879858 - RNA, 19 nt, Artificial Sequence
  Description of Artificial Sequence: Synthetic oligonucleotide
ucuaaggugaccacagccu

SEQ ID NO: 879859 - RNA, 19 nt, Artificial Sequence
  Description of Artificial Sequence: Synthetic oligonucleotide
uaaaagauccuccuuggua

SEQ ID NO: 879860 - RNA, 19 nt, Artificial Sequence
  Description of Artificial Sequence: Synthetic oligonucleotide
acucaacuaacuugagcgc

SEQ ID NO: 879861 - RNA, 19 nt, Artificial Sequence
  Description of Artificial Sequence: Synthetic oligonucleotide
uuuggcuaagaugccaucg

SEQ ID NO: 879862 - RNA, 19 nt, Artificial Sequence
  Description of Artificial Sequence: Synthetic oligonucleotide
caaucauaacuucaacacg

SEQ ID NO: 879863 - RNA, 19 nt, Artificial Sequence
  Description of Artificial Sequence: Synthetic oligonucleotide
auaacucuccgaauguugc

SEQ ID NO: 879864 - RNA, 19 nt, Artificial Sequence
  Description of Artificial Sequence: Synthetic oligonucleotide
cauaacuucaacacgauua

SEQ ID NO: 879865 - RNA, 19 nt, Artificial Sequence
  Description of Artificial Sequence: Synthetic oligonucleotide
cuuuagugaagaucccucg

SEQ ID NO: 879866 - RNA, 19 nt, Artificial Sequence
  Description of Artificial Sequence: Synthetic oligonucleotide
uguuuaagaguaacagcug

SEQ ID NO: 879867 - RNA, 19 nt, Artificial Sequence
  Description of Artificial Sequence: Synthetic oligonucleotide
auucacugagacuuuaaca

SEQ ID NO: 879868 - RNA, 19 nt, Artificial Sequence
  Description of Artificial Sequence: Synthetic oligonucleotide
ugcaauaaacauacaggga

SEQ ID NO: 879869 - RNA, 19 nt, Artificial Sequence
  Description of Artificial Sequence: Synthetic oligonucleotide
uggccuuugaagacuaugc

SEQ ID NO: 879870 - RNA, 19 nt, Artificial Sequence
  Description of Artificial Sequence: Synthetic oligonucleotide
aauaacucuccgaauguug

SEQ ID NO: 879871 - RNA, 19 nt, Artificial Sequence
  Description of Artificial Sequence: Synthetic oligonucleotide
uaaccucuuggcaauaacu

SEQ ID NO: 879872 - RNA, 19 nt, Artificial Sequence
  Description of Artificial Sequence: Synthetic oligonucleotide
uuucgccuuauauaaauaa

SEQ ID NO: 879873 - RNA, 19 nt, Artificial Sequence
  Description of Artificial Sequence: Synthetic oligonucleotide
gacauugugacaguuauaa

SEQ ID NO: 879874 - RNA, 19 nt, Artificial Sequence
  Description of Artificial Sequence: Synthetic oligonucleotide
ucgucguuugcaucuaagg

SEQ ID NO: 879875 - RNA, 19 nt, Artificial Sequence
  Description of Artificial Sequence: Synthetic oligonucleotide
augaaccaaacaugggacg

SEQ ID NO: 879876 - RNA, 19 nt, Artificial Sequence
  Description of Artificial Sequence: Synthetic oligonucleotide
agggcucgaaaucuguggc

SEQ ID NO: 879877 - RNA, 19 nt, Artificial Sequence
  Description of Artificial Sequence: Synthetic oligonucleotide
uaucaguugccacagccac

SEQ ID NO: 879878 - RNA, 19 nt, Artificial Sequence
  Description of Artificial Sequence: Synthetic oligonucleotide
ucuuuuaugauugguguaa

SEQ ID NO: 879879 - RNA, 19 nt, Artificial Sequence
  Description of Artificial Sequence: Synthetic oligonucleotide
augauugguguaauuaaac

SEQ ID NO: 879880 - RNA, 19 nt, Artificial Sequence
  Description of Artificial Sequence: Synthetic oligonucleotide
agcgaaaccgagguguucc

SEQ ID NO: 879881 - RNA, 19 nt, Artificial Sequence
  Description of Artificial Sequence: Synthetic oligonucleotide
ucuauacagcaccagaguu

SEQ ID NO: 879882 - RNA, 19 nt, Artificial Sequence
  Description of Artificial Sequence: Synthetic oligonucleotide
gauugguguaauuaaaccu

SEQ ID NO: 879883 - RNA, 19 nt, Artificial Sequence
  Description of Artificial Sequence: Synthetic oligonucleotide
uauaagcuggugcugccgc

SEQ ID NO: 879884 - RNA, 19 nt, Artificial Sequence
  Description of Artificial Sequence: Synthetic oligonucleotide
uccuguacacccuuagcag

SEQ ID NO: 879885 - RNA, 19 nt, Artificial Sequence
  Description of Artificial Sequence: Synthetic oligonucleotide
ugggcgaaaagcuuucgcc

SEQ ID NO: 879886 - RNA, 19 nt, Artificial Sequence
  Description of Artificial Sequence: Synthetic oligonucleotide
ugaagaucccucgagggcc

SEQ ID NO: 879887 - RNA, 19 nt, Artificial Sequence
  Description of Artificial Sequence: Synthetic oligonucleotide
uggacuuaagcgaaaccga

SEQ ID NO: 879888 - RNA, 19 nt, Artificial Sequence
  Description of Artificial Sequence: Synthetic oligonucleotide
uuaucaguugccacagcca

SEQ ID NO: 879889 - RNA, 19 nt, Artificial Sequence
  Description of Artificial Sequence: Synthetic oligonucleotide
auaacuucaacacgauuaa

SEQ ID NO: 879890 - RNA, 19 nt, Artificial Sequence
  Description of Artificial Sequence: Synthetic oligonucleotide
gaucuuaauaggauccgcc

SEQ ID NO: 879891 - RNA, 19 nt, Artificial Sequence
  Description of Artificial Sequence: Synthetic oligonucleotide
aacacgauuaagguagagu

SEQ ID NO: 879892 - RNA, 19 nt, Artificial Sequence
  Description of Artificial Sequence: Synthetic oligonucleotide
gauacuggugggaucauug

SEQ ID NO: 879893 - RNA, 19 nt, Artificial Sequence
  Description of Artificial Sequence: Synthetic oligonucleotide
acaguuuaucaucacacau

SEQ ID NO: 879894 - RNA, 19 nt, Artificial Sequence
  Description of Artificial Sequence: Synthetic oligonucleotide
ggaauuucaguaaaugugc

SEQ ID NO: 879895 - RNA, 19 nt, Artificial Sequence
  Description of Artificial Sequence: Synthetic oligonucleotide
ucuuuauuagucacaguuu

SEQ ID NO: 879896 - RNA, 19 nt, Artificial Sequence
  Description of Artificial Sequence: Synthetic oligonucleotide
uaagguagaguucuauaua

SEQ ID NO: 879897 - RNA, 19 nt, Artificial Sequence
  Description of Artificial Sequence: Synthetic oligonucleotide
aacaugggacgugauuuac

SEQ ID NO: 879898 - RNA, 19 nt, Artificial Sequence
  Description of Artificial Sequence: Synthetic oligonucleotide
guguaauuaaaccuuuauc

SEQ ID NO: 879899 - RNA, 19 nt, Artificial Sequence
  Description of Artificial Sequence: Synthetic oligonucleotide
acgauuaagguagaguucu

SEQ ID NO: 879900 - RNA, 19 nt, Artificial Sequence
  Description of Artificial Sequence: Synthetic oligonucleotide
ucccagcugacauuaaccc

SEQ ID NO: 879901 - RNA, 19 nt, Artificial Sequence
  Description of Artificial Sequence: Synthetic oligonucleotide
aacauccccaaguuggaaa

SEQ ID NO: 879902 - RNA, 19 nt, Artificial Sequence
  Description of Artificial Sequence: Synthetic oligonucleotide
gucggaaucucccaacugc

SEQ ID NO: 879903 - RNA, 19 nt, Artificial Sequence
  Description of Artificial Sequence: Synthetic oligonucleotide
ugaagacuaugcaagucuc

SEQ ID NO: 879904 - RNA, 19 nt, Artificial Sequence
  Description of Artificial Sequence: Synthetic oligonucleotide
ggcaauaacucuccgaaug

SEQ ID NO: 879905 - RNA, 19 nt, Artificial Sequence
  Description of Artificial Sequence: Synthetic oligonucleotide
aucuuaauaggauccgccu

SEQ ID NO: 879906 - RNA, 19 nt, Artificial Sequence
  Description of Artificial Sequence: Synthetic oligonucleotide
uauacagcaccagaguuaa

SEQ ID NO: 879907 - RNA, 19 nt, Artificial Sequence
  Description of Artificial Sequence: Synthetic oligonucleotide
uuuauuagucacaguuuau

SEQ ID NO: 879908 - RNA, 19 nt, Artificial Sequence
  Description of Artificial Sequence: Synthetic oligonucleotide
gagguaacguagcagcggc

SEQ ID NO: 879909 - RNA, 19 nt, Artificial Sequence
  Description of Artificial Sequence: Synthetic oligonucleotide
uuuugaaacuggaggugga

SEQ ID NO: 879910 - RNA, 19 nt, Artificial Sequence
  Description of Artificial Sequence: Synthetic oligonucleotide
ucggaaucucccaacugcc

SEQ ID NO: 879911 - RNA, 19 nt, Artificial Sequence
  Description of Artificial Sequence: Synthetic oligonucleotide
uacuccucagguaacaauu

SEQ ID NO: 879912 - RNA, 19 nt, Artificial Sequence
  Description of Artificial Sequence: Synthetic oligonucleotide
uccuacauguuuccuaauc

SEQ ID NO: 879913 - RNA, 19 nt, Artificial Sequence
  Description of Artificial Sequence: Synthetic oligonucleotide
aaaugugcccguugcauua

SEQ ID NO: 879914 - RNA, 19 nt, Artificial Sequence
  Description of Artificial Sequence: Synthetic oligonucleotide
auacuggugggaucauugg

SEQ ID NO: 879915 - RNA, 19 nt, Artificial Sequence
  Description of Artificial Sequence: Synthetic oligonucleotide
ugaagcccaaucauaacuu

SEQ ID NO: 879916 - RNA, 19 nt, Artificial Sequence
  Description of Artificial Sequence: Synthetic oligonucleotide
guugcauuagguugcccag

SEQ ID NO: 879917 - RNA, 19 nt, Artificial Sequence
  Description of Artificial Sequence: Synthetic oligonucleotide
ucacauaaugagucuccag

SEQ ID NO: 879918 - RNA, 19 nt, Artificial Sequence
  Description of Artificial Sequence: Synthetic oligonucleotide
uuauaagcuggugcugccg

SEQ ID NO: 879919 - RNA, 19 nt, Artificial Sequence
  Description of Artificial Sequence: Synthetic oligonucleotide
uauuuuggcuaagaugcca

SEQ ID NO: 879920 - RNA, 19 nt, Artificial Sequence
  Description of Artificial Sequence: Synthetic oligonucleotide
uuuaguccccuucuucaac

SEQ ID NO: 879921 - RNA, 19 nt, Artificial Sequence
  Description of Artificial Sequence: Synthetic oligonucleotide
agcaccgacaucuuuugga

SEQ ID NO: 879922 - RNA, 19 nt, Artificial Sequence
  Description of Artificial Sequence: Synthetic oligonucleotide
auuaagguagaguucuaua

SEQ ID NO: 879923 - RNA, 19 nt, Artificial Sequence
  Description of Artificial Sequence: Synthetic oligonucleotide
uuccagaauguuucgggca

SEQ ID NO: 879924 - RNA, 19 nt, Artificial Sequence
  Description of Artificial Sequence: Synthetic oligonucleotide
agagucagcgaucuccugu

SEQ ID NO: 879925 - RNA, 19 nt, Artificial Sequence
  Description of Artificial Sequence: Synthetic oligonucleotide
agcgccaugaaaccaccuc

SEQ ID NO: 879926 - RNA, 19 nt, Artificial Sequence
  Description of Artificial Sequence: Synthetic oligonucleotide
uccuugguacuccucaggu

SEQ ID NO: 879927 - RNA, 19 nt, Artificial Sequence
  Description of Artificial Sequence: Synthetic oligonucleotide
uacaucaguuuaauacccu

SEQ ID NO: 879928 - RNA, 19 nt, Artificial Sequence
  Description of Artificial Sequence: Synthetic oligonucleotide
aacuaacuugagcgcaucu

SEQ ID NO: 879929 - RNA, 19 nt, Artificial Sequence
  Description of Artificial Sequence: Synthetic oligonucleotide
caacucaacuaacuugagc

SEQ ID NO: 879930 - RNA, 19 nt, Artificial Sequence
  Description of Artificial Sequence: Synthetic oligonucleotide
auugguguaauuaaaccuu

SEQ ID NO: 879931 - RNA, 19 nt, Artificial Sequence
  Description of Artificial Sequence: Synthetic oligonucleotide
aacaucgucuuugaccaga

SEQ ID NO: 879932 - RNA, 19 nt, Artificial Sequence
  Description of Artificial Sequence: Synthetic oligonucleotide
aacucuccgaauguugcug

SEQ ID NO: 879933 - RNA, 19 nt, Artificial Sequence
  Description of Artificial Sequence: Synthetic oligonucleotide
uuugaagcccaaucauaac

SEQ ID NO: 879934 - RNA, 19 nt, Artificial Sequence
  Description of Artificial Sequence: Synthetic oligonucleotide
uucacagagucagcgaucu

SEQ ID NO: 879935 - RNA, 19 nt, Artificial Sequence
  Description of Artificial Sequence: Synthetic oligonucleotide
gaaaccgagguguuccuuc

SEQ ID NO: 879936 - RNA, 19 nt, Artificial Sequence
  Description of Artificial Sequence: Synthetic oligonucleotide
cuugguacuccucagguaa

SEQ ID NO: 879937 - RNA, 19 nt, Artificial Sequence
  Description of Artificial Sequence: Synthetic oligonucleotide
auaagcauuucaccuacuu

SEQ ID NO: 879938 - RNA, 19 nt, Artificial Sequence
  Description of Artificial Sequence: Synthetic oligonucleotide
gcauuaggaucuuaauagg

SEQ ID NO: 879939 - RNA, 19 nt, Artificial Sequence
  Description of Artificial Sequence: Synthetic oligonucleotide
aaaccgagguguuccuucu

SEQ ID NO: 879940 - RNA, 19 nt, Artificial Sequence
  Description of Artificial Sequence: Synthetic oligonucleotide
uugggcgaaaagcuuucgc

SEQ ID NO: 879941 - RNA, 19 nt, Artificial Sequence
  Description of Artificial Sequence: Synthetic oligonucleotide
uugaucaccgcagcaaacu

SEQ ID NO: 879942 - RNA, 19 nt, Artificial Sequence
  Description of Artificial Sequence: Synthetic oligonucleotide
auuaggaucuuaauaggau

SEQ ID NO: 879943 - RNA, 19 nt, Artificial Sequence
  Description of Artificial Sequence: Synthetic oligonucleotide
uggauuugacuaaccaaau

SEQ ID NO: 879944 - RNA, 19 nt, Artificial Sequence
  Description of Artificial Sequence: Synthetic oligonucleotide
agucacaguuuaucaucac

SEQ ID NO: 879945 - RNA, 19 nt, Artificial Sequence
  Description of Artificial Sequence: Synthetic oligonucleotide
aggcaugaggcacagugcu

SEQ ID NO: 879946 - RNA, 19 nt, Artificial Sequence
  Description of Artificial Sequence: Synthetic oligonucleotide
uuguccgucucaauuucac

SEQ ID NO: 879947 - RNA, 19 nt, Artificial Sequence
  Description of Artificial Sequence: Synthetic oligonucleotide
aggaucuuaauaggauccg

SEQ ID NO: 879948 - RNA, 19 nt, Artificial Sequence
  Description of Artificial Sequence: Synthetic oligonucleotide
aguaaaugugcccguugca

SEQ ID NO: 879949 - RNA, 19 nt, Artificial Sequence
  Description of Artificial Sequence: Synthetic oligonucleotide
ucaacuaacuugagcgcau

SEQ ID NO: 879950 - RNA, 19 nt, Artificial Sequence
  Description of Artificial Sequence: Synthetic oligonucleotide
ugauuuacaucaguuuaau

SEQ ID NO: 879951 - RNA, 19 nt, Artificial Sequence
  Description of Artificial Sequence: Synthetic oligonucleotide
auggauacuggugggauca

SEQ ID NO: 879952 - RNA, 19 nt, Artificial Sequence
  Description of Artificial Sequence: Synthetic oligonucleotide
guuauaagcuggugcugcc

SEQ ID NO: 879953 - RNA, 19 nt, Artificial Sequence
  Description of Artificial Sequence: Synthetic oligonucleotide
ucgaugccaaacaucccca

SEQ ID NO: 879954 - RNA, 19 nt, Artificial Sequence
  Description of Artificial Sequence: Synthetic oligonucleotide
ccucagguaacaauuuucc

SEQ ID NO: 879955 - RNA, 19 nt, Artificial Sequence
  Description of Artificial Sequence: Synthetic oligonucleotide
accgacaucuuuuggaauu

SEQ ID NO: 879956 - RNA, 19 nt, Artificial Sequence
  Description of Artificial Sequence: Synthetic oligonucleotide
ugcaucuaaggugaccaca

SEQ ID NO: 879957 - RNA, 19 nt, Artificial Sequence
  Description of Artificial Sequence: Synthetic oligonucleotide
gugaagaucccucgagggc

SEQ ID NO: 879958 - RNA, 19 nt, Artificial Sequence
  Description of Artificial Sequence: Synthetic oligonucleotide
aaccaaacaugggacguga

SEQ ID NO: 879959 - RNA, 19 nt, Artificial Sequence
  Description of Artificial Sequence: Synthetic oligonucleotide
acuaaccaaauguucuuua

SEQ ID NO: 879960 - RNA, 19 nt, Artificial Sequence
  Description of Artificial Sequence: Synthetic oligonucleotide
cacgauuaagguagaguuc

SEQ ID NO: 879961 - RNA, 19 nt, Artificial Sequence
  Description of Artificial Sequence: Synthetic oligonucleotide
ugacuaaccaaauguucuu

SEQ ID NO: 879962 - RNA, 19 nt, Artificial Sequence
  Description of Artificial Sequence: Synthetic oligonucleotide
ugcaucuuuuaugauuggu

SEQ ID NO: 879963 - RNA, 19 nt, Artificial Sequence
  Description of Artificial Sequence: Synthetic oligonucleotide
aguucgucaucaaccacuc

SEQ ID NO: 879964 - RNA, 19 nt, Artificial Sequence
  Description of Artificial Sequence: Synthetic oligonucleotide
gauggcauuaggaucuuaa

SEQ ID NO: 879965 - RNA, 19 nt, Artificial Sequence
  Description of Artificial Sequence: Synthetic oligonucleotide
uaacguagcagcggcaggu

SEQ ID NO: 879966 - RNA, 19 nt, Artificial Sequence
  Description of Artificial Sequence: Synthetic oligonucleotide
ucauaacuucaacacgauu

SEQ ID NO: 879967 - RNA, 19 nt, Artificial Sequence
  Description of Artificial Sequence: Synthetic oligonucleotide
uaacuucaacacgauuaag

SEQ ID NO: 879968 - RNA, 19 nt, Artificial Sequence
  Description of Artificial Sequence: Synthetic oligonucleotide
acaucaguuuaauacccuu

SEQ ID NO: 879969 - RNA, 19 nt, Artificial Sequence
  Description of Artificial Sequence: Synthetic oligonucleotide
guaacguagcagcggcagg

SEQ ID NO: 879970 - RNA, 19 nt, Artificial Sequence
  Description of Artificial Sequence: Synthetic oligonucleotide
ggauuugacuaaccaaaug

SEQ ID NO: 879971 - RNA, 19 nt, Artificial Sequence
  Description of Artificial Sequence: Synthetic oligonucleotide
guagcauaggcaugaggca

SEQ ID NO: 879972 - RNA, 19 nt, Artificial Sequence
  Description of Artificial Sequence: Synthetic oligonucleotide
agcuggacuuaagcgaaac

SEQ ID NO: 879973 - RNA, 19 nt, Artificial Sequence
  Description of Artificial Sequence: Synthetic oligonucleotide
acagagggcagcugcuuug

SEQ ID NO: 879974 - RNA, 19 nt, Artificial Sequence
  Description of Artificial Sequence: Synthetic oligonucleotide
aaugugcccguugcauuag

SEQ ID NO: 879975 - RNA, 19 nt, Artificial Sequence
  Description of Artificial Sequence: Synthetic oligonucleotide
gauggauacuggugggauc

SEQ ID NO: 879976 - RNA, 19 nt, Artificial Sequence
  Description of Artificial Sequence: Synthetic oligonucleotide
ucaacacgauuaagguaga

SEQ ID NO: 879977 - RNA, 19 nt, Artificial Sequence
  Description of Artificial Sequence: Synthetic oligonucleotide
acagaugccgacagaguag

SEQ ID NO: 879978 - RNA, 19 nt, Artificial Sequence
  Description of Artificial Sequence: Synthetic oligonucleotide
uguccgucucaauuucaca

SEQ ID NO: 879979 - RNA, 19 nt, Artificial Sequence
  Description of Artificial Sequence: Synthetic oligonucleotide
cuguuucaacucaacuaac

SEQ ID NO: 879980 - RNA, 19 nt, Artificial Sequence
  Description of Artificial Sequence: Synthetic oligonucleotide
uggucggaaucucccaacu

SEQ ID NO: 879981 - RNA, 19 nt, Artificial Sequence
  Description of Artificial Sequence: Synthetic oligonucleotide
uaacucuccgaauguugcu

SEQ ID NO: 879982 - RNA, 19 nt, Artificial Sequence
  Description of Artificial Sequence: Synthetic oligonucleotide
uucgacggcugccgaagcc

SEQ ID NO: 879983 - RNA, 19 nt, Artificial Sequence
  Description of Artificial Sequence: Synthetic oligonucleotide
uuaauaggauccgccugca

SEQ ID NO: 879984 - RNA, 19 nt, Artificial Sequence
  Description of Artificial Sequence: Synthetic oligonucleotide
aacguagcagcggcagguc

SEQ ID NO: 879985 - RNA, 19 nt, Artificial Sequence
  Description of Artificial Sequence: Synthetic oligonucleotide
cuuaagcgaaaccgaggug

SEQ ID NO: 879986 - RNA, 19 nt, Artificial Sequence
  Description of Artificial Sequence: Synthetic oligonucleotide
cuauacagcaccagaguua

SEQ ID NO: 879987 - RNA, 19 nt, Artificial Sequence
  Description of Artificial Sequence: Synthetic oligonucleotide
caguagcauaggcaugagg

SEQ ID NO: 879988 - RNA, 19 nt, Artificial Sequence
  Description of Artificial Sequence: Synthetic oligonucleotide
augggacgugauuuacauc

SEQ ID NO: 879989 - RNA, 19 nt, Artificial Sequence
  Description of Artificial Sequence: Synthetic oligonucleotide
ccuuauauaaauaagcauu

SEQ ID NO: 879990 - RNA, 19 nt, Artificial Sequence
  Description of Artificial Sequence: Synthetic oligonucleotide
auaaagucauucacugaga

SEQ ID NO: 879991 - RNA, 19 nt, Artificial Sequence
  Description of Artificial Sequence: Synthetic oligonucleotide
uacccaaucuggccuuuga

SEQ ID NO: 879992 - RNA, 19 nt, Artificial Sequence
  Description of Artificial Sequence: Synthetic oligonucleotide
ugugcccguugcauuaggu

SEQ ID NO: 879993 - RNA, 19 nt, Artificial Sequence
  Description of Artificial Sequence: Synthetic oligonucleotide
ggcacagaugccgacagag

SEQ ID NO: 879994 - RNA, 19 nt, Artificial Sequence
  Description of Artificial Sequence: Synthetic oligonucleotide
uggcauccaaugaauguuu

SEQ ID NO: 879995 - RNA, 19 nt, Artificial Sequence
  Description of Artificial Sequence: Synthetic oligonucleotide
caucaagccaaugagugaa

SEQ ID NO: 879996 - RNA, 19 nt, Artificial Sequence
  Description of Artificial Sequence: Synthetic oligonucleotide
aagcgaaaccgagguguuc

SEQ ID NO: 879997 - RNA, 19 nt, Artificial Sequence
  Description of Artificial Sequence: Synthetic oligonucleotide
aaccacucggcugucacuu

SEQ ID NO: 879998 - RNA, 19 nt, Artificial Sequence
  Description of Artificial Sequence: Synthetic oligonucleotide
agucagcgaucuccuguac

SEQ ID NO: 879999 - RNA, 19 nt, Artificial Sequence
  Description of Artificial Sequence: Synthetic oligonucleotide
cuucacagagucagcgauc

SEQ ID NO: 880000 - RNA, 19 nt, Artificial Sequence
  Description of Artificial Sequence: Synthetic oligonucleotide
gguaacguagcagcggcag

SEQ ID NO: 880001 - RNA, 19 nt, Artificial Sequence
  Description of Artificial Sequence: Synthetic oligonucleotide
ugguguaauuaaaccuuua

SEQ ID NO: 880002 - RNA, 19 nt, Artificial Sequence
  Description of Artificial Sequence: Synthetic oligonucleotide
accgagguguuccuucugu

SEQ ID NO: 880003 - RNA, 19 nt, Artificial Sequence
  Description of Artificial Sequence: Synthetic oligonucleotide
ugacaguuauaagcuggug

SEQ ID NO: 880004 - RNA, 19 nt, Artificial Sequence
  Description of Artificial Sequence: Synthetic oligonucleotide
ggcagcuggacuuaagcga

SEQ ID NO: 880005 - RNA, 19 nt, Artificial Sequence
  Description of Artificial Sequence: Synthetic oligonucleotide
aggaggcacagaugccgac

SEQ ID NO: 880006 - RNA, 19 nt, Artificial Sequence
  Description of Artificial Sequence: Synthetic oligonucleotide
accacuauuuuggcuaaga

SEQ ID NO: 880007 - RNA, 19 nt, Artificial Sequence
  Description of Artificial Sequence: Synthetic oligonucleotide
cucaacuaacuugagcgca

SEQ ID NO: 880008 - RNA, 19 nt, Artificial Sequence
  Description of Artificial Sequence: Synthetic oligonucleotide
gaagacuaugcaagucuca

SEQ ID NO: 880009 - RNA, 19 nt, Artificial Sequence
  Description of Artificial Sequence: Synthetic oligonucleotide
ggacuuaagcgaaaccgag

SEQ ID NO: 880010 - RNA, 19 nt, Artificial Sequence
  Description of Artificial Sequence: Synthetic oligonucleotide
ucgacggcugccgaagccc

SEQ ID NO: 880011 - RNA, 19 nt, Artificial Sequence
  Description of Artificial Sequence: Synthetic oligonucleotide
aauaagcauuucaccuacu

SEQ ID NO: 880012 - RNA, 19 nt, Artificial Sequence
  Description of Artificial Sequence: Synthetic oligonucleotide
auuuuggcuaagaugccau

SEQ ID NO: 880013 - RNA, 19 nt, Artificial Sequence
  Description of Artificial Sequence: Synthetic oligonucleotide
caucuaaggugaccacagc

SEQ ID NO: 880014 - RNA, 19 nt, Artificial Sequence
  Description of Artificial Sequence: Synthetic oligonucleotide
uccccaaguuggaaauacu

SEQ ID NO: 880015 - RNA, 19 nt, Artificial Sequence
  Description of Artificial Sequence: Synthetic oligonucleotide
gcaucuaaggugaccacag

SEQ ID NO: 880016 - RNA, 19 nt, Artificial Sequence
  Description of Artificial Sequence: Synthetic oligonucleotide
cuucaacacgauuaaggua

SEQ ID NO: 880017 - RNA, 19 nt, Artificial Sequence
  Description of Artificial Sequence: Synthetic oligonucleotide
caucgaugccaaacauccc

SEQ ID NO: 880018 - RNA, 19 nt, Artificial Sequence
  Description of Artificial Sequence: Synthetic oligonucleotide
ggagguaacguagcagcgg

SEQ ID NO: 880019 - RNA, 19 nt, Artificial Sequence
  Description of Artificial Sequence: Synthetic oligonucleotide
ccuguacacccuuagcagc

SEQ ID NO: 880020 - RNA, 19 nt, Artificial Sequence
  Description of Artificial Sequence: Synthetic oligonucleotide
acuggucggaaucucccaa

SEQ ID NO: 880021 - RNA, 19 nt, Artificial Sequence
  Description of Artificial Sequence: Synthetic oligonucleotide
aaccgagguguuccuucug

SEQ ID NO: 880022 - RNA, 19 nt, Artificial Sequence
  Description of Artificial Sequence: Synthetic oligonucleotide
cuuuaucaguugccacagc

SEQ ID NO: 880023 - RNA, 19 nt, Artificial Sequence
  Description of Artificial Sequence: Synthetic oligonucleotide
ggucccaauauggacagac

SEQ ID NO: 880024 - RNA, 19 nt, Artificial Sequence
  Description of Artificial Sequence: Synthetic oligonucleotide
ggugggaucauuggccuag

SEQ ID NO: 880025 - RNA, 19 nt, Artificial Sequence
  Description of Artificial Sequence: Synthetic oligonucleotide
gaucauuggccuaggguaa

SEQ ID NO: 880026 - RNA, 19 nt, Artificial Sequence
  Description of Artificial Sequence: Synthetic oligonucleotide
caaacauccccaaguugga

SEQ ID NO: 880027 - RNA, 19 nt, Artificial Sequence
  Description of Artificial Sequence: Synthetic oligonucleotide
aggguugaucaccgcagca

SEQ ID NO: 880028 - RNA, 19 nt, Artificial Sequence
  Description of Artificial Sequence: Synthetic oligonucleotide
agcccaggagguaacguag

SEQ ID NO: 880029 - RNA, 19 nt, Artificial Sequence
  Description of Artificial Sequence: Synthetic oligonucleotide
uaacaucgucuuugaccag

SEQ ID NO: 880030 - RNA, 19 nt, Artificial Sequence
  Description of Artificial Sequence: Synthetic oligonucleotide
cacagcgaagccuccagga

SEQ ID NO: 880031 - RNA, 19 nt, Artificial Sequence
  Description of Artificial Sequence: Synthetic oligonucleotide
cuggucggaaucucccaac

SEQ ID NO: 880032 - RNA, 19 nt, Artificial Sequence
  Description of Artificial Sequence: Synthetic oligonucleotide
agcggcaggucacagcgaa

SEQ ID NO: 880033 - RNA, 19 nt, Artificial Sequence
  Description of Artificial Sequence: Synthetic oligonucleotide
gaccagaucuugucuaacu

SEQ ID NO: 880034 - RNA, 19 nt, Artificial Sequence
  Description of Artificial Sequence: Synthetic oligonucleotide
ccucuuggcaauaacucuc

SEQ ID NO: 880035 - RNA, 19 nt, Artificial Sequence
  Description of Artificial Sequence: Synthetic oligonucleotide
uugcaucuaaggugaccac

SEQ ID NO: 880036 - RNA, 19 nt, Artificial Sequence
  Description of Artificial Sequence: Synthetic oligonucleotide
aucauuggccuaggguaag

SEQ ID NO: 880037 - RNA, 19 nt, Artificial Sequence
  Description of Artificial Sequence: Synthetic oligonucleotide
cuggcuggcauccaaugaa

SEQ ID NO: 880038 - RNA, 19 nt, Artificial Sequence
  Description of Artificial Sequence: Synthetic oligonucleotide
ggaucuuaauaggauccgc

SEQ ID NO: 880039 - RNA, 19 nt, Artificial Sequence
  Description of Artificial Sequence: Synthetic oligonucleotide
guacacccuuagcagcugc

SEQ ID NO: 880040 - RNA, 19 nt, Artificial Sequence
  Description of Artificial Sequence: Synthetic oligonucleotide
cuugggcgaaaagcuuucg

SEQ ID NO: 880041 - RNA, 19 nt, Artificial Sequence
  Description of Artificial Sequence: Synthetic oligonucleotide
aucgucguuugcaucuaag

SEQ ID NO: 880042 - RNA, 19 nt, Artificial Sequence
  Description of Artificial Sequence: Synthetic oligonucleotide
agacuuuaacaucgucuuu

SEQ ID NO: 880043 - RNA, 19 nt, Artificial Sequence
  Description of Artificial Sequence: Synthetic oligonucleotide
cuugagcgcaucuucuuua

SEQ ID NO: 880044 - RNA, 19 nt, Artificial Sequence
  Description of Artificial Sequence: Synthetic oligonucleotide
uguacacccuuagcagcug

SEQ ID NO: 880045 - RNA, 19 nt, Artificial Sequence
  Description of Artificial Sequence: Synthetic oligonucleotide
uucaaccaucaagccaaug

SEQ ID NO: 880046 - RNA, 19 nt, Artificial Sequence
  Description of Artificial Sequence: Synthetic oligonucleotide
gauuaagguagaguucuau

SEQ ID NO: 880047 - RNA, 19 nt, Artificial Sequence
  Description of Artificial Sequence: Synthetic oligonucleotide
cccaauauggacagacauc

SEQ ID NO: 880048 - RNA, 19 nt, Artificial Sequence
  Description of Artificial Sequence: Synthetic oligonucleotide
augccaucgucguuugcau

SEQ ID NO: 880049 - RNA, 19 nt, Artificial Sequence
  Description of Artificial Sequence: Synthetic oligonucleotide
cacuacuauuccaaaauuu

SEQ ID NO: 880050 - RNA, 19 nt, Artificial Sequence
  Description of Artificial Sequence: Synthetic oligonucleotide
ucauuggccuaggguaaga

SEQ ID NO: 880051 - RNA, 19 nt, Artificial Sequence
  Description of Artificial Sequence: Synthetic oligonucleotide
gccuuugaagacuaugcaa

SEQ ID NO: 880052 - RNA, 19 nt, Artificial Sequence
  Description of Artificial Sequence: Synthetic oligonucleotide
caugggacgugauuuacau

SEQ ID NO: 880053 - RNA, 19 nt, Artificial Sequence
  Description of Artificial Sequence: Synthetic oligonucleotide
ucgggcagcuggacuuaag

SEQ ID NO: 880054 - RNA, 19 nt, Artificial Sequence
  Description of Artificial Sequence: Synthetic oligonucleotide
gauggcccgccuguggcug

SEQ ID NO: 880055 - RNA, 19 nt, Artificial Sequence
  Description of Artificial Sequence: Synthetic oligonucleotide
cuuucgccuuauauaaaua

SEQ ID NO: 880056 - RNA, 19 nt, Artificial Sequence
  Description of Artificial Sequence: Synthetic oligonucleotide
auguuucgggcagcuggac

SEQ ID NO: 880057 - RNA, 19 nt, Artificial Sequence
  Description of Artificial Sequence: Synthetic oligonucleotide
cuuguccgucucaauuuca

SEQ ID NO: 880058 - RNA, 19 nt, Artificial Sequence
  Description of Artificial Sequence: Synthetic oligonucleotide
aucauaacuucaacacgau

SEQ ID NO: 880059 - RNA, 19 nt, Artificial Sequence
  Description of Artificial Sequence: Synthetic oligonucleotide
uuccuggcagggcucgaaa

SEQ ID NO: 880060 - RNA, 19 nt, Artificial Sequence
  Description of Artificial Sequence: Synthetic oligonucleotide
ggcucgaaaucuguggcug

SEQ ID NO: 880061 - RNA, 19 nt, Artificial Sequence
  Description of Artificial Sequence: Synthetic oligonucleotide
agcauaggcaugaggcaca

SEQ ID NO: 880062 - RNA, 19 nt, Artificial Sequence
  Description of Artificial Sequence: Synthetic oligonucleotide
caacacgauuaagguagag

SEQ ID NO: 880063 - RNA, 19 nt, Artificial Sequence
  Description of Artificial Sequence: Synthetic oligonucleotide
accccaggcauuuguuuaa

SEQ ID NO: 880064 - RNA, 19 nt, Artificial Sequence
  Description of Artificial Sequence: Synthetic oligonucleotide
cacccuuagcagcugcauc

SEQ ID NO: 880065 - RNA, 19 nt, Artificial Sequence
  Description of Artificial Sequence: Synthetic oligonucleotide
cccagcugacauuaacccc

SEQ ID NO: 880066 - RNA, 19 nt, Artificial Sequence
  Description of Artificial Sequence: Synthetic oligonucleotide
acaugggacgugauuuaca

SEQ ID NO: 880067 - RNA, 19 nt, Artificial Sequence
  Description of Artificial Sequence: Synthetic oligonucleotide
gguugaucaccgcagcaaa

SEQ ID NO: 880068 - RNA, 19 nt, Artificial Sequence
  Description of Artificial Sequence: Synthetic oligonucleotide
guaagauggcccgccugug

SEQ ID NO: 880069 - RNA, 19 nt, Artificial Sequence
  Description of Artificial Sequence: Synthetic oligonucleotide
cuucgacggcugccgaagc

SEQ ID NO: 880070 - RNA, 19 nt, Artificial Sequence
  Description of Artificial Sequence: Synthetic oligonucleotide
agauggcccgccuguggcu

SEQ ID NO: 880071 - RNA, 19 nt, Artificial Sequence
  Description of Artificial Sequence: Synthetic oligonucleotide
ggucggaaucucccaacug

SEQ ID NO: 880072 - RNA, 19 nt, Artificial Sequence
  Description of Artificial Sequence: Synthetic oligonucleotide
cuacauguuuccuaaucuu

SEQ ID NO: 880073 - RNA, 19 nt, Artificial Sequence
  Description of Artificial Sequence: Synthetic oligonucleotide
guuucgggcagcuggacuu

SEQ ID NO: 880074 - RNA, 19 nt, Artificial Sequence
  Description of Artificial Sequence: Synthetic oligonucleotide
gguaagauggcccgccugu

SEQ ID NO: 880075 - RNA, 19 nt, Artificial Sequence
  Description of Artificial Sequence: Synthetic oligonucleotide
gaucccucgagggccugug

SEQ ID NO: 880076 - RNA, 19 nt, Artificial Sequence
  Description of Artificial Sequence: Synthetic oligonucleotide
gccuuauauaaauaagcau

SEQ ID NO: 880077 - RNA, 19 nt, Artificial Sequence
  Description of Artificial Sequence: Synthetic oligonucleotide
cuguacacccuuagcagcu

SEQ ID NO: 880078 - RNA, 19 nt, Artificial Sequence
  Description of Artificial Sequence: Synthetic oligonucleotide
caacuaacuugagcgcauc

SEQ ID NO: 880079 - RNA, 19 nt, Artificial Sequence
  Description of Artificial Sequence: Synthetic oligonucleotide
ccaucuguuucaacucaac

SEQ ID NO: 880080 - RNA, 19 nt, Artificial Sequence
  Description of Artificial Sequence: Synthetic oligonucleotide
gacauuaaccccaggcauu

SEQ ID NO: 880081 - RNA, 19 nt, Artificial Sequence
  Description of Artificial Sequence: Synthetic oligonucleotide
gcuuucgccuuauauaaau

SEQ ID NO: 880082 - RNA, 19 nt, Artificial Sequence
  Description of Artificial Sequence: Synthetic oligonucleotide
cguugcauuagguugccca

SEQ ID NO: 880083 - RNA, 19 nt, Artificial Sequence
  Description of Artificial Sequence: Synthetic oligonucleotide
aucaguugccacagccacu

SEQ ID NO: 880084 - RNA, 19 nt, Artificial Sequence
  Description of Artificial Sequence: Synthetic oligonucleotide
ggguaagauggcccgccug

SEQ ID NO: 880085 - RNA, 19 nt, Artificial Sequence
  Description of Artificial Sequence: Synthetic oligonucleotide
auacccaaucuggccuuug

SEQ ID NO: 880086 - RNA, 19 nt, Artificial Sequence
  Description of Artificial Sequence: Synthetic oligonucleotide
agaugccgacagaguaggg

SEQ ID NO: 880087 - RNA, 19 nt, Artificial Sequence
  Description of Artificial Sequence: Synthetic oligonucleotide
ccuacauguuuccuaaucu

SEQ ID NO: 880088 - RNA, 19 nt, Artificial Sequence
  Description of Artificial Sequence: Synthetic oligonucleotide
cacuggucggaaucuccca

SEQ ID NO: 880089 - RNA, 19 nt, Artificial Sequence
  Description of Artificial Sequence: Synthetic oligonucleotide
guacuccucagguaacaau

SEQ ID NO: 880090 - RNA, 19 nt, Artificial Sequence
  Description of Artificial Sequence: Synthetic oligonucleotide
cgcagcaaacucaucgaug

SEQ ID NO: 880091 - RNA, 19 nt, Artificial Sequence
  Description of Artificial Sequence: Synthetic oligonucleotide
caucgucuuugaccagauc

SEQ ID NO: 880092 - RNA, 19 nt, Artificial Sequence
  Description of Artificial Sequence: Synthetic oligonucleotide
cuaaggugaccacagccuu

SEQ ID NO: 880093 - RNA, 19 nt, Artificial Sequence
  Description of Artificial Sequence: Synthetic oligonucleotide
uggugggaucauuggccua

SEQ ID NO: 880094 - RNA, 19 nt, Artificial Sequence
  Description of Artificial Sequence: Synthetic oligonucleotide
gauccgccugcagcggcug

SEQ ID NO: 880095 - RNA, 19 nt, Artificial Sequence
  Description of Artificial Sequence: Synthetic oligonucleotide
ggcuggcauccaaugaaug

SEQ ID NO: 880096 - RNA, 19 nt, Artificial Sequence
  Description of Artificial Sequence: Synthetic oligonucleotide
gggacgugauuuacaucag

SEQ ID NO: 880097 - RNA, 19 nt, Artificial Sequence
  Description of Artificial Sequence: Synthetic oligonucleotide
cgggcagcuggacuuaagc

SEQ ID NO: 880098 - RNA, 19 nt, Artificial Sequence
  Description of Artificial Sequence: Synthetic oligonucleotide
gucuuugaccagaucuugu

SEQ ID NO: 880099 - RNA, 19 nt, Artificial Sequence
  Description of Artificial Sequence: Synthetic oligonucleotide
cccuuguuccauuguagga

SEQ ID NO: 880100 - RNA, 19 nt, Artificial Sequence
  Description of Artificial Sequence: Synthetic oligonucleotide
ggguugaucaccgcagcaa

SEQ ID NO: 880101 - RNA, 19 nt, Artificial Sequence
  Description of Artificial Sequence: Synthetic oligonucleotide
cuuuuaugauugguguaau

SEQ ID NO: 880102 - RNA, 19 nt, Artificial Sequence
  Description of Artificial Sequence: Synthetic oligonucleotide
agcuuucgccuuauauaaa

SEQ ID NO: 880103 - RNA, 19 nt, Artificial Sequence
  Description of Artificial Sequence: Synthetic oligonucleotide
gaagaucccucgagggccu

SEQ ID NO: 880104 - RNA, 19 nt, Artificial Sequence
  Description of Artificial Sequence: Synthetic oligonucleotide
ccccaaguuggaaauacua

SEQ ID NO: 880105 - RNA, 19 nt, Artificial Sequence
  Description of Artificial Sequence: Synthetic oligonucleotide
agguaacguagcagcggca

SEQ ID NO: 880106 - RNA, 19 nt, Artificial Sequence
  Description of Artificial Sequence: Synthetic oligonucleotide
ccgucucaauuucacauaa

SEQ ID NO: 880107 - RNA, 19 nt, Artificial Sequence
  Description of Artificial Sequence: Synthetic oligonucleotide
agcggcugagcgccaugaa

SEQ ID NO: 880108 - RNA, 19 nt, Artificial Sequence
  Description of Artificial Sequence: Synthetic oligonucleotide
ggacgugauuuacaucagu

SEQ ID NO: 880109 - RNA, 19 nt, Artificial Sequence
  Description of Artificial Sequence: Synthetic oligonucleotide
cccggcccaggcuucgacg

SEQ ID NO: 880110 - RNA, 19 nt, Artificial Sequence
  Description of Artificial Sequence: Synthetic oligonucleotide
accaaacaugggacgugau

SEQ ID NO: 880111 - RNA, 19 nt, Artificial Sequence
  Description of Artificial Sequence: Synthetic oligonucleotide
gcuugggcgaaaagcuuuc

SEQ ID NO: 880112 - RNA, 19 nt, Artificial Sequence
  Description of Artificial Sequence: Synthetic oligonucleotide
gggauggauacugguggga

SEQ ID NO: 880113 - RNA, 19 nt, Artificial Sequence
  Description of Artificial Sequence: Synthetic oligonucleotide
agaucccucgagggccugu

SEQ ID NO: 880114 - RNA, 19 nt, Artificial Sequence
  Description of Artificial Sequence: Synthetic oligonucleotide
caauaacucuccgaauguu

SEQ ID NO: 880115 - RNA, 19 nt, Artificial Sequence
  Description of Artificial Sequence: Synthetic oligonucleotide
ggcauuuguuuaagaguaa

SEQ ID NO: 880116 - RNA, 19 nt, Artificial Sequence
  Description of Artificial Sequence: Synthetic oligonucleotide
gcgaaaagcuuucgccuua

SEQ ID NO: 880117 - RNA, 19 nt, Artificial Sequence
  Description of Artificial Sequence: Synthetic oligonucleotide
gcggcugagcgccaugaaa

SEQ ID NO: 880118 - RNA, 19 nt, Artificial Sequence
  Description of Artificial Sequence: Synthetic oligonucleotide
caucgucguuugcaucuaa

SEQ ID NO: 880119 - RNA, 19 nt, Artificial Sequence
  Description of Artificial Sequence: Synthetic oligonucleotide
cuaagaugccaucgucguu

SEQ ID NO: 880120 - RNA, 19 nt, Artificial Sequence
  Description of Artificial Sequence: Synthetic oligonucleotide
cagcggcugagcgccauga

SEQ ID NO: 880121 - RNA, 19 nt, Artificial Sequence
  Description of Artificial Sequence: Synthetic oligonucleotide
gggcucgaaaucuguggcu

SEQ ID NO: 880122 - RNA, 19 nt, Artificial Sequence
  Description of Artificial Sequence: Synthetic oligonucleotide
cagcuggacuuaagcgaaa

SEQ ID NO: 880123 - RNA, 19 nt, Artificial Sequence
  Description of Artificial Sequence: Synthetic oligonucleotide
gcaugaggcacagugcuuu

SEQ ID NO: 880124 - RNA, 19 nt, Artificial Sequence
  Description of Artificial Sequence: Synthetic oligonucleotide
cauuggccuaggguaagau

SEQ ID NO: 880125 - RNA, 19 nt, Artificial Sequence
  Description of Artificial Sequence: Synthetic oligonucleotide
cauccccaaguuggaaaua

SEQ ID NO: 880126 - RNA, 19 nt, Artificial Sequence
  Description of Artificial Sequence: Synthetic oligonucleotide
ccacucggcugucacuuga

SEQ ID NO: 880127 - RNA, 19 nt, Artificial Sequence
  Description of Artificial Sequence: Synthetic oligonucleotide
aggucccaauauggacaga

SEQ ID NO: 880128 - RNA, 19 nt, Artificial Sequence
  Description of Artificial Sequence: Synthetic oligonucleotide
ccccaggcauuuguuuaag

SEQ ID NO: 880129 - RNA, 19 nt, Artificial Sequence
  Description of Artificial Sequence: Synthetic oligonucleotide
cccguugcauuagguugcc

SEQ ID NO: 880130 - RNA, 19 nt, Artificial Sequence
  Description of Artificial Sequence: Synthetic oligonucleotide
cagcuugggcgaaaagcuu

SEQ ID NO: 880131 - RNA, 19 nt, Artificial Sequence
  Description of Artificial Sequence: Synthetic oligonucleotide
cuucaaccaucaagccaau

SEQ ID NO: 880132 - RNA, 19 nt, Artificial Sequence
  Description of Artificial Sequence: Synthetic oligonucleotide
caugaggcacagugcuuuu

SEQ ID NO: 880133 - RNA, 19 nt, Artificial Sequence
  Description of Artificial Sequence: Synthetic oligonucleotide
cguuugcaucuaaggugac

SEQ ID NO: 880134 - RNA, 19 nt, Artificial Sequence
  Description of Artificial Sequence: Synthetic oligonucleotide
gagcgccaugaaaccaccu

SEQ ID NO: 880135 - RNA, 19 nt, Artificial Sequence
  Description of Artificial Sequence: Synthetic oligonucleotide
gggauucucuagguuugcu

SEQ ID NO: 880136 - RNA, 19 nt, Artificial Sequence
  Description of Artificial Sequence: Synthetic oligonucleotide
ccgacaggccacgcugcag

SEQ ID NO: 880137 - RNA, 19 nt, Artificial Sequence
  Description of Artificial Sequence: Synthetic oligonucleotide
gcgaaaccgagguguuccu

SEQ ID NO: 880138 - RNA, 19 nt, Artificial Sequence
  Description of Artificial Sequence: Synthetic oligonucleotide
ccguugcauuagguugccc

SEQ ID NO: 880139 - RNA, 19 nt, Artificial Sequence
  Description of Artificial Sequence: Synthetic oligonucleotide
gcccggcccaggcuucgac

SEQ ID NO: 880140 - RNA, 19 nt, Artificial Sequence
  Description of Artificial Sequence: Synthetic oligonucleotide
cgauuaagguagaguucua

SEQ ID NO: 880141 - RNA, 19 nt, Artificial Sequence
  Description of Artificial Sequence: Synthetic oligonucleotide
gcgaagccuccaggaggcc

SEQ ID NO: 880142 - RNA, 19 nt, Artificial Sequence
  Description of Artificial Sequence: Synthetic oligonucleotide
ggauacuggugggaucauu

SEQ ID NO: 880143 - RNA, 19 nt, Artificial Sequence
  Description of Artificial Sequence: Synthetic oligonucleotide
cauacccaaucuggccuuu

SEQ ID NO: 880144 - RNA, 19 nt, Artificial Sequence
  Description of Artificial Sequence: Synthetic oligonucleotide
ccgcagcaaacucaucgau

SEQ ID NO: 880145 - RNA, 19 nt, Artificial Sequence
  Description of Artificial Sequence: Synthetic oligonucleotide
ggcaugaggcacagugcuu

SEQ ID NO: 880146 - RNA, 19 nt, Artificial Sequence
  Description of Artificial Sequence: Synthetic oligonucleotide
ccgacaucuuuuggaauuu

SEQ ID NO: 880147 - RNA, 19 nt, Artificial Sequence
  Description of Artificial Sequence: Synthetic oligonucleotide
cgucucaauuucacauaau

SEQ ID NO: 880148 - RNA, 19 nt, Artificial Sequence
  Description of Artificial Sequence: Synthetic oligonucleotide
cgaaaccgagguguuccuu

SEQ ID NO: 880149 - RNA, 19 nt, Artificial Sequence
  Description of Artificial Sequence: Synthetic oligonucleotide
aacaagugauacuugaugc

SEQ ID NO: 880150 - RNA, 19 nt, Artificial Sequence
  Description of Artificial Sequence: Synthetic oligonucleotide
uguuuuauaauucacguga

SEQ ID NO: 880151 - RNA, 19 nt, Artificial Sequence
  Description of Artificial Sequence: Synthetic oligonucleotide
uguacuuaaaugauggaag

SEQ ID NO: 880152 - RNA, 19 nt, Artificial Sequence
  Description of Artificial Sequence: Synthetic oligonucleotide
uucuguacuuaaaugaugg

SEQ ID NO: 880153 - RNA, 19 nt, Artificial Sequence
  Description of Artificial Sequence: Synthetic oligonucleotide
uuaguuauaucuaucacgu

SEQ ID NO: 880154 - RNA, 19 nt, Artificial Sequence
  Description of Artificial Sequence: Synthetic oligonucleotide
aauaauaacaagugauacu

SEQ ID NO: 880155 - RNA, 19 nt, Artificial Sequence
  Description of Artificial Sequence: Synthetic oligonucleotide
aauuuagauagcaugcucg

SEQ ID NO: 880156 - RNA, 19 nt, Artificial Sequence
  Description of Artificial Sequence: Synthetic oligonucleotide
aauaacaagugauacuuga

SEQ ID NO: 880157 - RNA, 19 nt, Artificial Sequence
  Description of Artificial Sequence: Synthetic oligonucleotide
uucgagaucacuguuaagg

SEQ ID NO: 880158 - RNA, 19 nt, Artificial Sequence
  Description of Artificial Sequence: Synthetic oligonucleotide
accuaagucauacaaaauc

SEQ ID NO: 880159 - RNA, 19 nt, Artificial Sequence
  Description of Artificial Sequence: Synthetic oligonucleotide
uuacuaauauccaauucag

SEQ ID NO: 880160 - RNA, 19 nt, Artificial Sequence
  Description of Artificial Sequence: Synthetic oligonucleotide
aguuauaucuaucacgucu

SEQ ID NO: 880161 - RNA, 19 nt, Artificial Sequence
  Description of Artificial Sequence: Synthetic oligonucleotide
ugugauuaaggaaacggcc

SEQ ID NO: 880162 - RNA, 19 nt, Artificial Sequence
  Description of Artificial Sequence: Synthetic oligonucleotide
aacagaaggauuaaccacg

SEQ ID NO: 880163 - RNA, 19 nt, Artificial Sequence
  Description of Artificial Sequence: Synthetic oligonucleotide
uucucaguauucaaugugg

SEQ ID NO: 880164 - RNA, 19 nt, Artificial Sequence
  Description of Artificial Sequence: Synthetic oligonucleotide
uucuaauucauauaaaguu

SEQ ID NO: 880165 - RNA, 19 nt, Artificial Sequence
  Description of Artificial Sequence: Synthetic oligonucleotide
acaaucugaacauacaacu

SEQ ID NO: 880166 - RNA, 19 nt, Artificial Sequence
  Description of Artificial Sequence: Synthetic oligonucleotide
aacaauaauaacaagugau

SEQ ID NO: 880167 - RNA, 19 nt, Artificial Sequence
  Description of Artificial Sequence: Synthetic oligonucleotide
aucaguauuaguuuucuca

SEQ ID NO: 880168 - RNA, 19 nt, Artificial Sequence
  Description of Artificial Sequence: Synthetic oligonucleotide
cuugagcugguuuaaaucc

SEQ ID NO: 880169 - RNA, 19 nt, Artificial Sequence
  Description of Artificial Sequence: Synthetic oligonucleotide
ugaagcauccaacagaaau

SEQ ID NO: 880170 - RNA, 19 nt, Artificial Sequence
  Description of Artificial Sequence: Synthetic oligonucleotide
aguuuauguguucuugagc

SEQ ID NO: 880171 - RNA, 19 nt, Artificial Sequence
  Description of Artificial Sequence: Synthetic oligonucleotide
uuauuaaccccacauuggc

SEQ ID NO: 880172 - RNA, 19 nt, Artificial Sequence
  Description of Artificial Sequence: Synthetic oligonucleotide
aauuuagggcuucuaauga

SEQ ID NO: 880173 - RNA, 19 nt, Artificial Sequence
  Description of Artificial Sequence: Synthetic oligonucleotide
aaucagauauaaaacauga

SEQ ID NO: 880174 - RNA, 19 nt, Artificial Sequence
  Description of Artificial Sequence: Synthetic oligonucleotide
ucuaauucauauaaaguua

SEQ ID NO: 880175 - RNA, 19 nt, Artificial Sequence
  Description of Artificial Sequence: Synthetic oligonucleotide
cuuauuaaccccacauugg

SEQ ID NO: 880176 - RNA, 19 nt, Artificial Sequence
  Description of Artificial Sequence: Synthetic oligonucleotide
uaacaagugauacuugaug

SEQ ID NO: 880177 - RNA, 19 nt, Artificial Sequence
  Description of Artificial Sequence: Synthetic oligonucleotide
uuuuaggacuucuaggaug

SEQ ID NO: 880178 - RNA, 19 nt, Artificial Sequence
  Description of Artificial Sequence: Synthetic oligonucleotide
aagaaugagaguuugucuu

SEQ ID NO: 880179 - RNA, 19 nt, Artificial Sequence
  Description of Artificial Sequence: Synthetic oligonucleotide
aaugagaguuugucuuugc

SEQ ID NO: 880180 - RNA, 19 nt, Artificial Sequence
  Description of Artificial Sequence: Synthetic oligonucleotide
aacauaaguauugaaagaa

SEQ ID NO: 880181 - RNA, 19 nt, Artificial Sequence
  Description of Artificial Sequence: Synthetic oligonucleotide
uuuaguauucucaguauuc

SEQ ID NO: 880182 - RNA, 19 nt, Artificial Sequence
  Description of Artificial Sequence: Synthetic oligonucleotide
agaaggauuaaccacgacu

SEQ ID NO: 880183 - RNA, 19 nt, Artificial Sequence
  Description of Artificial Sequence: Synthetic oligonucleotide
uuaaccacgacuucauuga

SEQ ID NO: 880184 - RNA, 19 nt, Artificial Sequence
  Description of Artificial Sequence: Synthetic oligonucleotide
uguucuguuguucuauugc

SEQ ID NO: 880185 - RNA, 19 nt, Artificial Sequence
  Description of Artificial Sequence: Synthetic oligonucleotide
ucgguuuugacacaacuga

SEQ ID NO: 880186 - RNA, 19 nt, Artificial Sequence
  Description of Artificial Sequence: Synthetic oligonucleotide
aaucucauuacagaaagaa

SEQ ID NO: 880187 - RNA, 19 nt, Artificial Sequence
  Description of Artificial Sequence: Synthetic oligonucleotide
uuuacugagccucauuaga

SEQ ID NO: 880188 - RNA, 19 nt, Artificial Sequence
  Description of Artificial Sequence: Synthetic oligonucleotide
auuaaccacgacuucauug

SEQ ID NO: 880189 - RNA, 19 nt, Artificial Sequence
  Description of Artificial Sequence: Synthetic oligonucleotide
auagguugcauucauaaau

SEQ ID NO: 880190 - RNA, 19 nt, Artificial Sequence
  Description of Artificial Sequence: Synthetic oligonucleotide
uuuuggguaauuccgaguc

SEQ ID NO: 880191 - RNA, 19 nt, Artificial Sequence
  Description of Artificial Sequence: Synthetic oligonucleotide
agaaauuggcacugauucc

SEQ ID NO: 880192 - RNA, 19 nt, Artificial Sequence
  Description of Artificial Sequence: Synthetic oligonucleotide
  modified_base (5)..(5): a, c, u, g, unknown or other
uuuangucuaugcaucccu

SEQ ID NO: 880193 - RNA, 19 nt, Artificial Sequence
  Description of Artificial Sequence: Synthetic oligonucleotide
aguauuaguuuucucagga

SEQ ID NO: 880194 - RNA, 19 nt, Artificial Sequence
  Description of Artificial Sequence: Synthetic oligonucleotide
uuauauccaguacacauuc

SEQ ID NO: 880195 - RNA, 19 nt, Artificial Sequence
  Description of Artificial Sequence: Synthetic oligonucleotide
ucuaaugacugagugacgc

SEQ ID NO: 880196 - RNA, 19 nt, Artificial Sequence
  Description of Artificial Sequence: Synthetic oligonucleotide
aucaagaaaacaugacuag

SEQ ID NO: 880197 - RNA, 19 nt, Artificial Sequence
  Description of Artificial Sequence: Synthetic oligonucleotide
aguucauuuccacaacagg

SEQ ID NO: 880198 - RNA, 19 nt, Artificial Sequence
  Description of Artificial Sequence: Synthetic oligonucleotide
uccaauucagaaacuacug

SEQ ID NO: 880199 - RNA, 19 nt, Artificial Sequence
  Description of Artificial Sequence: Synthetic oligonucleotide
uuacugagccucauuagag

SEQ ID NO: 880200 - RNA, 19 nt, Artificial Sequence
  Description of Artificial Sequence: Synthetic oligonucleotide
uuuccguacacuuauuaac

SEQ ID NO: 880201 - RNA, 19 nt, Artificial Sequence
  Description of Artificial Sequence: Synthetic oligonucleotide
cuucuaaugacugagugac

SEQ ID NO: 880202 - RNA, 19 nt, Artificial Sequence
  Description of Artificial Sequence: Synthetic oligonucleotide
aaucaagaaaacaugacua

SEQ ID NO: 880203 - RNA, 19 nt, Artificial Sequence
  Description of Artificial Sequence: Synthetic oligonucleotide
aaacguucuguaugcagag

SEQ ID NO: 880204 - RNA, 19 nt, Artificial Sequence
  Description of Artificial Sequence: Synthetic oligonucleotide
ugaaucaagaaaacaugac

SEQ ID NO: 880205 - RNA, 19 nt, Artificial Sequence
  Description of Artificial Sequence: Synthetic oligonucleotide
uuaaaugauggaaguuucc

SEQ ID NO: 880206 - RNA, 19 nt, Artificial Sequence
  Description of Artificial Sequence: Synthetic oligonucleotide
auuuagggcuucuaaugac

SEQ ID NO: 880207 - RNA, 19 nt, Artificial Sequence
  Description of Artificial Sequence: Synthetic oligonucleotide
ugaccuaagucauacaaaa

SEQ ID NO: 880208 - RNA, 19 nt, Artificial Sequence
  Description of Artificial Sequence: Synthetic oligonucleotide
uucauaaaugccaguaggu

SEQ ID NO: 880209 - RNA, 19 nt, Artificial Sequence
  Description of Artificial Sequence: Synthetic oligonucleotide
ugcuuaguaaucuuccuga

SEQ ID NO: 880210 - RNA, 19 nt, Artificial Sequence
  Description of Artificial Sequence: Synthetic oligonucleotide
uguuucuuagacuccgucc

SEQ ID NO: 880211 - RNA, 19 nt, Artificial Sequence
  Description of Artificial Sequence: Synthetic oligonucleotide
guauucucaguauucaaug

SEQ ID NO: 880212 - RNA, 19 nt, Artificial Sequence
  Description of Artificial Sequence: Synthetic oligonucleotide
uuaguaggagaacauuucu

SEQ ID NO: 880213 - RNA, 19 nt, Artificial Sequence
  Description of Artificial Sequence: Synthetic oligonucleotide
gacgacucgguuuugacac

SEQ ID NO: 880214 - RNA, 19 nt, Artificial Sequence
  Description of Artificial Sequence: Synthetic oligonucleotide
  modified_base (2)..(2): a, c, u, g, unknown or other
angucuaugcaucccucag

SEQ ID NO: 880215 - RNA, 19 nt, Artificial Sequence
  Description of Artificial Sequence: Synthetic oligonucleotide
cuaagucauacaaaaucag

SEQ ID NO: 880216 - RNA, 19 nt, Artificial Sequence
  Description of Artificial Sequence: Synthetic oligonucleotide
ugcaugucgucuuuggaag

SEQ ID NO: 880217 - RNA, 19 nt, Artificial Sequence
  Description of Artificial Sequence: Synthetic oligonucleotide
agugacaucugauggguag

SEQ ID NO: 880218 - RNA, 19 nt, Artificial Sequence
  Description of Artificial Sequence: Synthetic oligonucleotide
uguaugcagagauucggag

SEQ ID NO: 880219 - RNA, 19 nt, Artificial Sequence
  Description of Artificial Sequence: Synthetic oligonucleotide
guagguaugagucucuuca

SEQ ID NO: 880220 - RNA, 19 nt, Artificial Sequence
  Description of Artificial Sequence: Synthetic oligonucleotide
ucuuuacugagccucauua

SEQ ID NO: 880221 - RNA, 19 nt, Artificial Sequence
  Description of Artificial Sequence: Synthetic oligonucleotide
guuacacuugcacaauagg

SEQ ID NO: 880222 - RNA, 19 nt, Artificial Sequence
  Description of Artificial Sequence: Synthetic oligonucleotide
uauugcauuuucaucagua

SEQ ID NO: 880223 - RNA, 19 nt, Artificial Sequence
  Description of Artificial Sequence: Synthetic oligonucleotide
ucaggagugauucugcuua

SEQ ID NO: 880224 - RNA, 19 nt, Artificial Sequence
  Description of Artificial Sequence: Synthetic oligonucleotide
agguugcauucauaaaugc

SEQ ID NO: 880225 - RNA, 19 nt, Artificial Sequence
  Description of Artificial Sequence: Synthetic oligonucleotide
caauaauaacaagugauac

SEQ ID NO: 880226 - RNA, 19 nt, Artificial Sequence
  Description of Artificial Sequence: Synthetic oligonucleotide
aagucauacaaaaucagau

SEQ ID NO: 880227 - RNA, 19 nt, Artificial Sequence
  Description of Artificial Sequence: Synthetic oligonucleotide
uucuuuugaagcauccaac

SEQ ID NO: 880228 - RNA, 19 nt, Artificial Sequence
  Description of Artificial Sequence: Synthetic oligonucleotide
ucacgucugauucaaucag

SEQ ID NO: 880229 - RNA, 19 nt, Artificial Sequence
  Description of Artificial Sequence: Synthetic oligonucleotide
uucacauaccuguugguga

SEQ ID NO: 880230 - RNA, 19 nt, Artificial Sequence
  Description of Artificial Sequence: Synthetic oligonucleotide
auaaaugcacacaaauguc

SEQ ID NO: 880231 - RNA, 19 nt, Artificial Sequence
  Description of Artificial Sequence: Synthetic oligonucleotide
acaacugacgguuacacuu

SEQ ID NO: 880232 - RNA, 19 nt, Artificial Sequence
  Description of Artificial Sequence: Synthetic oligonucleotide
cuaugcaucccucagaaca

SEQ ID NO: 880233 - RNA, 19 nt, Artificial Sequence
  Description of Artificial Sequence: Synthetic oligonucleotide
uguuucacaaucugaacau

SEQ ID NO: 880234 - RNA, 19 nt, Artificial Sequence
  Description of Artificial Sequence: Synthetic oligonucleotide
aacugacgguuacacuugc

SEQ ID NO: 880235 - RNA, 19 nt, Artificial Sequence
  Description of Artificial Sequence: Synthetic oligonucleotide
uuuagggcuucuaaugacu

SEQ ID NO: 880236 - RNA, 19 nt, Artificial Sequence
  Description of Artificial Sequence: Synthetic oligonucleotide
uaagguuaguaggagaaca

SEQ ID NO: 880237 - RNA, 19 nt, Artificial Sequence
  Description of Artificial Sequence: Synthetic oligonucleotide
gaagaaagcgaccaaugga

SEQ ID NO: 880238 - RNA, 19 nt, Artificial Sequence
  Description of Artificial Sequence: Synthetic oligonucleotide
auaaaacaugaauacccug

SEQ ID NO: 880239 - RNA, 19 nt, Artificial Sequence
  Description of Artificial Sequence: Synthetic oligonucleotide
cugucaacugaagacaugg

SEQ ID NO: 880240 - RNA, 19 nt, Artificial Sequence
  Description of Artificial Sequence: Synthetic oligonucleotide
uuuauauccaguacacauu

SEQ ID NO: 880241 - RNA, 19 nt, Artificial Sequence
  Description of Artificial Sequence: Synthetic oligonucleotide
gaaucaagaaaacaugacu

SEQ ID NO: 880242 - RNA, 19 nt, Artificial Sequence
  Description of Artificial Sequence: Synthetic oligonucleotide
guuuauguguucuugagcu

SEQ ID NO: 880243 - RNA, 19 nt, Artificial Sequence
  Description of Artificial Sequence: Synthetic oligonucleotide
cugugauuaaggaaacggc

SEQ ID NO: 880244 - RNA, 19 nt, Artificial Sequence
  Description of Artificial Sequence: Synthetic oligonucleotide
aagaaagcgaccaauggaa

SEQ ID NO: 880245 - RNA, 19 nt, Artificial Sequence
  Description of Artificial Sequence: Synthetic oligonucleotide
aauauuucuauaguucauu

SEQ ID NO: 880246 - RNA, 19 nt, Artificial Sequence
  Description of Artificial Sequence: Synthetic oligonucleotide
caacugaacauaaguauug

SEQ ID NO: 880247 - RNA, 19 nt, Artificial Sequence
  Description of Artificial Sequence: Synthetic oligonucleotide
uaaaugauggaaguuuccu

SEQ ID NO: 880248 - RNA, 19 nt, Artificial Sequence
  Description of Artificial Sequence: Synthetic oligonucleotide
uuaguauucucaguauuca

SEQ ID NO: 880249 - RNA, 19 nt, Artificial Sequence
  Description of Artificial Sequence: Synthetic oligonucleotide
uaauaacaagugauacuug

SEQ ID NO: 880250 - RNA, 19 nt, Artificial Sequence
  Description of Artificial Sequence: Synthetic oligonucleotide
auaucuaucacgucugauu

SEQ ID NO: 880251 - RNA, 19 nt, Artificial Sequence
  Description of Artificial Sequence: Synthetic oligonucleotide
gaaaauuccugucaugugu

SEQ ID NO: 880252 - RNA, 19 nt, Artificial Sequence
  Description of Artificial Sequence: Synthetic oligonucleotide
auaauucacgugaagagca

SEQ ID NO: 880253 - RNA, 19 nt, Artificial Sequence
  Description of Artificial Sequence: Synthetic oligonucleotide
uguuaagguuaguaggaga

SEQ ID NO: 880254 - RNA, 19 nt, Artificial Sequence
  Description of Artificial Sequence: Synthetic oligonucleotide
auaaucccauguuaguucu

SEQ ID NO: 880255 - RNA, 19 nt, Artificial Sequence
  Description of Artificial Sequence: Synthetic oligonucleotide
aaaugauggaaguuuccua

SEQ ID NO: 880256 - RNA, 19 nt, Artificial Sequence
  Description of Artificial Sequence: Synthetic oligonucleotide
ugguuugaccuuaaguccu

SEQ ID NO: 880257 - RNA, 19 nt, Artificial Sequence
  Description of Artificial Sequence: Synthetic oligonucleotide
uauaguucauuuccacaac

SEQ ID NO: 880258 - RNA, 19 nt, Artificial Sequence
  Description of Artificial Sequence: Synthetic oligonucleotide
auuuagauagcaugcucga

SEQ ID NO: 880259 - RNA, 19 nt, Artificial Sequence
  Description of Artificial Sequence: Synthetic oligonucleotide
uauaacuauuuacauucua

SEQ ID NO: 880260 - RNA, 19 nt, Artificial Sequence
  Description of Artificial Sequence: Synthetic oligonucleotide
acacuuauuaaccccacau

SEQ ID NO: 880261 - RNA, 19 nt, Artificial Sequence
  Description of Artificial Sequence: Synthetic oligonucleotide
ucuucgagaucacuguuaa

SEQ ID NO: 880262 - RNA, 19 nt, Artificial Sequence
  Description of Artificial Sequence: Synthetic oligonucleotide
uuuuccguacacuuauuaa

SEQ ID NO: 880263 - RNA, 19 nt, Artificial Sequence
  Description of Artificial Sequence: Synthetic oligonucleotide
uaaccauaaucccauguua

SEQ ID NO: 880264 - RNA, 19 nt, Artificial Sequence
  Description of Artificial Sequence: Synthetic oligonucleotide
guuauaucuaucacgucug

SEQ ID NO: 880265 - RNA, 19 nt, Artificial Sequence
  Description of Artificial Sequence: Synthetic oligonucleotide
uaucacgucugauucaauc

SEQ ID NO: 880266 - RNA, 19 nt, Artificial Sequence
  Description of Artificial Sequence: Synthetic oligonucleotide
auaaccauaaucccauguu

SEQ ID NO: 880267 - RNA, 19 nt, Artificial Sequence
  Description of Artificial Sequence: Synthetic oligonucleotide
aaagcgaccaauggaaaau

SEQ ID NO: 880268 - RNA, 19 nt, Artificial Sequence
  Description of Artificial Sequence: Synthetic oligonucleotide
aucacgucugauucaauca

SEQ ID NO: 880269 - RNA, 19 nt, Artificial Sequence
  Description of Artificial Sequence: Synthetic oligonucleotide
acuuaaaugauggaaguuu

SEQ ID NO: 880270 - RNA, 19 nt, Artificial Sequence
  Description of Artificial Sequence: Synthetic oligonucleotide
uaauucacgugaagagcag

SEQ ID NO: 880271 - RNA, 19 nt, Artificial Sequence
  Description of Artificial Sequence: Synthetic oligonucleotide
gaccuuaaguccucgugag

SEQ ID NO: 880272 - RNA, 19 nt, Artificial Sequence
  Description of Artificial Sequence: Synthetic oligonucleotide
gagaacaacugugauuaag

SEQ ID NO: 880273 - RNA, 19 nt, Artificial Sequence
  Description of Artificial Sequence: Synthetic oligonucleotide
cuuuacugagccucauuag

SEQ ID NO: 880274 - RNA, 19 nt, Artificial Sequence
  Description of Artificial Sequence: Synthetic oligonucleotide
uaggagaacauuucucagu

SEQ ID NO: 880275 - RNA, 19 nt, Artificial Sequence
  Description of Artificial Sequence: Synthetic oligonucleotide
agagauucggagaacaacu

SEQ ID NO: 880276 - RNA, 19 nt, Artificial Sequence
  Description of Artificial Sequence: Synthetic oligonucleotide
acaagugauacuugaugca

SEQ ID NO: 880277 - RNA, 19 nt, Artificial Sequence
  Description of Artificial Sequence: Synthetic oligonucleotide
guaauuccgagucaacuga

SEQ ID NO: 880278 - RNA, 19 nt, Artificial Sequence
  Description of Artificial Sequence: Synthetic oligonucleotide
auuccgagucaacugaaca

SEQ ID NO: 880279 - RNA, 19 nt, Artificial Sequence
  Description of Artificial Sequence: Synthetic oligonucleotide
  modified_base (6)..(6): a, c, u, g, unknown or other
uuuuangucuaugcauccc

SEQ ID NO: 880280 - RNA, 19 nt, Artificial Sequence
  Description of Artificial Sequence: Synthetic oligonucleotide
augaaucaagaaaacauga

SEQ ID NO: 880281 - RNA, 19 nt, Artificial Sequence
  Description of Artificial Sequence: Synthetic oligonucleotide
gauucaaucagcugucugu

SEQ ID NO: 880282 - RNA, 19 nt, Artificial Sequence
  Description of Artificial Sequence: Synthetic oligonucleotide
uauuuuguuucugaccuaa

SEQ ID NO: 880283 - RNA, 19 nt, Artificial Sequence
  Description of Artificial Sequence: Synthetic oligonucleotide
aauuccgagucaacugaac

SEQ ID NO: 880284 - RNA, 19 nt, Artificial Sequence
  Description of Artificial Sequence: Synthetic oligonucleotide
auaacuauuuacauucuaa

SEQ ID NO: 880285 - RNA, 19 nt, Artificial Sequence
  Description of Artificial Sequence: Synthetic oligonucleotide
uguggcuaugugcuuacac

SEQ ID NO: 880286 - RNA, 19 nt, Artificial Sequence
  Description of Artificial Sequence: Synthetic oligonucleotide
cauuacuaauauccaauuc

SEQ ID NO: 880287 - RNA, 19 nt, Artificial Sequence
  Description of Artificial Sequence: Synthetic oligonucleotide
gugauuaaggaaacggccc

SEQ ID NO: 880288 - RNA, 19 nt, Artificial Sequence
  Description of Artificial Sequence: Synthetic oligonucleotide
uagaguuuauguguucuug

SEQ ID NO: 880289 - RNA, 19 nt, Artificial Sequence
  Description of Artificial Sequence: Synthetic oligonucleotide
aagggaaacagaaggauua

SEQ ID NO: 880290 - RNA, 19 nt, Artificial Sequence
  Description of Artificial Sequence: Synthetic oligonucleotide
  modified_base (3)..(3): a, c, u, g, unknown or other
uangucuaugcaucccuca

SEQ ID NO: 880291 - RNA, 19 nt, Artificial Sequence
  Description of Artificial Sequence: Synthetic oligonucleotide
gguaauuccgagucaacug

SEQ ID NO: 880292 - RNA, 19 nt, Artificial Sequence
  Description of Artificial Sequence: Synthetic oligonucleotide
uugcaugucgucuuuggaa

SEQ ID NO: 880293 - RNA, 19 nt, Artificial Sequence
  Description of Artificial Sequence: Synthetic oligonucleotide
uugagcugguuuaaaucca

SEQ ID NO: 880294 - RNA, 19 nt, Artificial Sequence
  Description of Artificial Sequence: Synthetic oligonucleotide
gaacagacauccgagauaa

SEQ ID NO: 880295 - RNA, 19 nt, Artificial Sequence
  Description of Artificial Sequence: Synthetic oligonucleotide
uuugcaugucgucuuugga

SEQ ID NO: 880296 - RNA, 19 nt, Artificial Sequence
  Description of Artificial Sequence: Synthetic oligonucleotide
  modified_base (4)..(4): a, c, u, g, unknown or other
uuangucuaugcaucccuc

SEQ ID NO: 880297 - RNA, 19 nt, Artificial Sequence
  Description of Artificial Sequence: Synthetic oligonucleotide
guaggagaacauuucucag

SEQ ID NO: 880298 - RNA, 19 nt, Artificial Sequence
  Description of Artificial Sequence: Synthetic oligonucleotide
ucugauggguagcuguaga

SEQ ID NO: 880299 - RNA, 19 nt, Artificial Sequence
  Description of Artificial Sequence: Synthetic oligonucleotide
uucuaaugacugagugacg

SEQ ID NO: 880300 - RNA, 19 nt, Artificial Sequence
  Description of Artificial Sequence: Synthetic oligonucleotide
acacaacugacgguuacac

SEQ ID NO: 880301 - RNA, 19 nt, Artificial Sequence
  Description of Artificial Sequence: Synthetic oligonucleotide
caguauuaguuuucucagg

SEQ ID NO: 880302 - RNA, 19 nt, Artificial Sequence
  Description of Artificial Sequence: Synthetic oligonucleotide
ucgagaucacuguuaaggu

SEQ ID NO: 880303 - RNA, 19 nt, Artificial Sequence
  Description of Artificial Sequence: Synthetic oligonucleotide
gucucaauaagguaaugaa

SEQ ID NO: 880304 - RNA, 19 nt, Artificial Sequence
  Description of Artificial Sequence: Synthetic oligonucleotide
uuauaucuaucacgucuga

SEQ ID NO: 880305 - RNA, 19 nt, Artificial Sequence
  Description of Artificial Sequence: Synthetic oligonucleotide
ugacgguuacacuugcaca

SEQ ID NO: 880306 - RNA, 19 nt, Artificial Sequence
  Description of Artificial Sequence: Synthetic oligonucleotide
caugaauacccugaacaag

SEQ ID NO: 880307 - RNA, 19 nt, Artificial Sequence
  Description of Artificial Sequence: Synthetic oligonucleotide
agacauccgagauaaaguu

SEQ ID NO: 880308 - RNA, 19 nt, Artificial Sequence
  Description of Artificial Sequence: Synthetic oligonucleotide
ugaacagacauccgagaua

SEQ ID NO: 880309 - RNA, 19 nt, Artificial Sequence
  Description of Artificial Sequence: Synthetic oligonucleotide
ucgucuuuggaagugacau

SEQ ID NO: 880310 - RNA, 19 nt, Artificial Sequence
  Description of Artificial Sequence: Synthetic oligonucleotide
aaauuggcacugauuccac

SEQ ID NO: 880311 - RNA, 19 nt, Artificial Sequence
  Description of Artificial Sequence: Synthetic oligonucleotide
aaucccauguuaguucugu

SEQ ID NO: 880312 - RNA, 19 nt, Artificial Sequence
  Description of Artificial Sequence: Synthetic oligonucleotide
gacgguuacacuugcacaa

SEQ ID NO: 880313 - RNA, 19 nt, Artificial Sequence
  Description of Artificial Sequence: Synthetic oligonucleotide
cucgguuuugacacaacug

SEQ ID NO: 880314 - RNA, 19 nt, Artificial Sequence
  Description of Artificial Sequence: Synthetic oligonucleotide
uguuggacgacucgguuuu

SEQ ID NO: 880315 - RNA, 19 nt, Artificial Sequence
  Description of Artificial Sequence: Synthetic oligonucleotide
acuguuaagguuaguagga

SEQ ID NO: 880316 - RNA, 19 nt, Artificial Sequence
  Description of Artificial Sequence: Synthetic oligonucleotide
gguuuugacacaacugacg

SEQ ID NO: 880317 - RNA, 19 nt, Artificial Sequence
  Description of Artificial Sequence: Synthetic oligonucleotide
uuaguuuucucaggaguga

SEQ ID NO: 880318 - RNA, 19 nt, Artificial Sequence
  Description of Artificial Sequence: Synthetic oligonucleotide
uuuggguaauuccgaguca

SEQ ID NO: 880319 - RNA, 19 nt, Artificial Sequence
  Description of Artificial Sequence: Synthetic oligonucleotide
cuacugucaaucucauuac

SEQ ID NO: 880320 - RNA, 19 nt, Artificial Sequence
  Description of Artificial Sequence: Synthetic oligonucleotide
ucuaucacgucugauucaa

SEQ ID NO: 880321 - RNA, 19 nt, Artificial Sequence
  Description of Artificial Sequence: Synthetic oligonucleotide
auugacaaaugauguaguu

SEQ ID NO: 880322 - RNA, 19 nt, Artificial Sequence
  Description of Artificial Sequence: Synthetic oligonucleotide
auauccaacuugguuugac

SEQ ID NO: 880323 - RNA, 19 nt, Artificial Sequence
  Description of Artificial Sequence: Synthetic oligonucleotide
accuuaaguccucgugagc

SEQ ID NO: 880324 - RNA, 19 nt, Artificial Sequence
  Description of Artificial Sequence: Synthetic oligonucleotide
cugacgguuacacuugcac

SEQ ID NO: 880325 - RNA, 19 nt, Artificial Sequence
  Description of Artificial Sequence: Synthetic oligonucleotide
ucauaaaugccaguaggua

SEQ ID NO: 880326 - RNA, 19 nt, Artificial Sequence
  Description of Artificial Sequence: Synthetic oligonucleotide
ugacaagggacaugcuuug

SEQ ID NO: 880327 - RNA, 19 nt, Artificial Sequence
  Description of Artificial Sequence: Synthetic oligonucleotide
agauucggagaacaacugu

SEQ ID NO: 880328 - RNA, 19 nt, Artificial Sequence
  Description of Artificial Sequence: Synthetic oligonucleotide
ucuguacuuaaaugaugga

SEQ ID NO: 880329 - RNA, 19 nt, Artificial Sequence
  Description of Artificial Sequence: Synthetic oligonucleotide
acucgguuuugacacaacu

SEQ ID NO: 880330 - RNA, 19 nt, Artificial Sequence
  Description of Artificial Sequence: Synthetic oligonucleotide
ugcagagauucggagaaca

SEQ ID NO: 880331 - RNA, 19 nt, Artificial Sequence
  Description of Artificial Sequence: Synthetic oligonucleotide
acugagccucauuagagaa

SEQ ID NO: 880332 - RNA, 19 nt, Artificial Sequence
  Description of Artificial Sequence: Synthetic oligonucleotide
acguucuguaugcagagau

SEQ ID NO: 880333 - RNA, 19 nt, Artificial Sequence
  Description of Artificial Sequence: Synthetic oligonucleotide
ugaugcauaugaguguccu

SEQ ID NO: 880334 - RNA, 19 nt, Artificial Sequence
  Description of Artificial Sequence: Synthetic oligonucleotide
uguguucuugagcugguuu

SEQ ID NO: 880335 - RNA, 19 nt, Artificial Sequence
  Description of Artificial Sequence: Synthetic oligonucleotide
guuaguaggagaacauuuc

SEQ ID NO: 880336 - RNA, 19 nt, Artificial Sequence
  Description of Artificial Sequence: Synthetic oligonucleotide
ucccauguuaguucuguuc

SEQ ID NO: 880337 - RNA, 19 nt, Artificial Sequence
  Description of Artificial Sequence: Synthetic oligonucleotide
aguauucucaguauucaau

SEQ ID NO: 880338 - RNA, 19 nt, Artificial Sequence
  Description of Artificial Sequence: Synthetic oligonucleotide
gaaugagaguuugucuuug

SEQ ID NO: 880339 - RNA, 19 nt, Artificial Sequence
  Description of Artificial Sequence: Synthetic oligonucleotide
aauucacgugaagagcaga

SEQ ID NO: 880340 - RNA, 19 nt, Artificial Sequence
  Description of Artificial Sequence: Synthetic oligonucleotide
gaaagcgaccaauggaaaa

SEQ ID NO: 880341 - RNA, 19 nt, Artificial Sequence
  Description of Artificial Sequence: Synthetic oligonucleotide
ugacacaacugacgguuac

SEQ ID NO: 880342 - RNA, 19 nt, Artificial Sequence
  Description of Artificial Sequence: Synthetic oligonucleotide
aacggcccacguuuccuuc

SEQ ID NO: 880343 - RNA, 19 nt, Artificial Sequence
  Description of Artificial Sequence: Synthetic oligonucleotide
acauccgagauaaaguuau

SEQ ID NO: 880344 - RNA, 19 nt, Artificial Sequence
  Description of Artificial Sequence: Synthetic oligonucleotide
uaguauucucaguauucaa

SEQ ID NO: 880345 - RNA, 19 nt, Artificial Sequence
  Description of Artificial Sequence: Synthetic oligonucleotide
ugucaacugaagacaugga

SEQ ID NO: 880346 - RNA, 19 nt, Artificial Sequence
  Description of Artificial Sequence: Synthetic oligonucleotide
uuaagguuaguaggagaac

SEQ ID NO: 880347 - RNA, 19 nt, Artificial Sequence
  Description of Artificial Sequence: Synthetic oligonucleotide
ccuaagucauacaaaauca

SEQ ID NO: 880348 - RNA, 19 nt, Artificial Sequence
  Description of Artificial Sequence: Synthetic oligonucleotide
ucuuagacuccguccacaa

SEQ ID NO: 880349 - RNA, 19 nt, Artificial Sequence
  Description of Artificial Sequence: Synthetic oligonucleotide
uacuuggaacuucaagcau

SEQ ID NO: 880350 - RNA, 19 nt, Artificial Sequence
  Description of Artificial Sequence: Synthetic oligonucleotide
cacgucugauucaaucagc

SEQ ID NO: 880351 - RNA, 19 nt, Artificial Sequence
  Description of Artificial Sequence: Synthetic oligonucleotide
uuucuuagacuccguccac

SEQ ID NO: 880352 - RNA, 19 nt, Artificial Sequence
  Description of Artificial Sequence: Synthetic oligonucleotide
guacacauuccaucaggug

SEQ ID NO: 880353 - RNA, 19 nt, Artificial Sequence
  Description of Artificial Sequence: Synthetic oligonucleotide
uuaaguccucgugagcucu

SEQ ID NO: 880354 - RNA, 19 nt, Artificial Sequence
  Description of Artificial Sequence: Synthetic oligonucleotide
uguugacugugagaggcug

SEQ ID NO: 880355 - RNA, 19 nt, Artificial Sequence
  Description of Artificial Sequence: Synthetic oligonucleotide
acagucacaugaaucaaga

SEQ ID NO: 880356 - RNA, 19 nt, Artificial Sequence
  Description of Artificial Sequence: Synthetic oligonucleotide
uggcuaugugcuuacacuu

SEQ ID NO: 880357 - RNA, 19 nt, Artificial Sequence
  Description of Artificial Sequence: Synthetic oligonucleotide
uucggagaacaacugugau

SEQ ID NO: 880358 - RNA, 19 nt, Artificial Sequence
  Description of Artificial Sequence: Synthetic oligonucleotide
uuggguaauuccgagucaa

SEQ ID NO: 880359 - RNA, 19 nt, Artificial Sequence
  Description of Artificial Sequence: Synthetic oligonucleotide
cacuugcacaauagguugc

SEQ ID NO: 880360 - RNA, 19 nt, Artificial Sequence
  Description of Artificial Sequence: Synthetic oligonucleotide
agaaugagaguuugucuuu

SEQ ID NO: 880361 - RNA, 19 nt, Artificial Sequence
  Description of Artificial Sequence: Synthetic oligonucleotide
agaaacuacugcaucuugu

SEQ ID NO: 880362 - RNA, 19 nt, Artificial Sequence
  Description of Artificial Sequence: Synthetic oligonucleotide
augucccucugucaauguc

SEQ ID NO: 880363 - RNA, 19 nt, Artificial Sequence
  Description of Artificial Sequence: Synthetic oligonucleotide
caacugugauuaaggaaac

SEQ ID NO: 880364 - RNA, 19 nt, Artificial Sequence
  Description of Artificial Sequence: Synthetic oligonucleotide
uuagaguuuauguguucuu

SEQ ID NO: 880365 - RNA, 19 nt, Artificial Sequence
  Description of Artificial Sequence: Synthetic oligonucleotide
caacugacgguuacacuug

SEQ ID NO: 880366 - RNA, 19 nt, Artificial Sequence
  Description of Artificial Sequence: Synthetic oligonucleotide
guuacacucugucucaaua

SEQ ID NO: 880367 - RNA, 19 nt, Artificial Sequence
  Description of Artificial Sequence: Synthetic oligonucleotide
uaaggaaacggcccacguu

SEQ ID NO: 880368 - RNA, 19 nt, Artificial Sequence
  Description of Artificial Sequence: Synthetic oligonucleotide
cugagccucauuagagaag

SEQ ID NO: 880369 - RNA, 19 nt, Artificial Sequence
  Description of Artificial Sequence: Synthetic oligonucleotide
guacuuaaaugauggaagu

SEQ ID NO: 880370 - RNA, 19 nt, Artificial Sequence
  Description of Artificial Sequence: Synthetic oligonucleotide
cagagauucggagaacaac

SEQ ID NO: 880371 - RNA, 19 nt, Artificial Sequence
  Description of Artificial Sequence: Synthetic oligonucleotide
aguccucgugagcucuagc

SEQ ID NO: 880372 - RNA, 19 nt, Artificial Sequence
  Description of Artificial Sequence: Synthetic oligonucleotide
ugaguguccuuauuuuguu

SEQ ID NO: 880373 - RNA, 19 nt, Artificial Sequence
  Description of Artificial Sequence: Synthetic oligonucleotide
uuaaccccacauuggcaga

SEQ ID NO: 880374 - RNA, 19 nt, Artificial Sequence
  Description of Artificial Sequence: Synthetic oligonucleotide
ugucuuugcaugucgucuu

SEQ ID NO: 880375 - RNA, 19 nt, Artificial Sequence
  Description of Artificial Sequence: Synthetic oligonucleotide
cauaaaugccaguagguau

SEQ ID NO: 880376 - RNA, 19 nt, Artificial Sequence
  Description of Artificial Sequence: Synthetic oligonucleotide
uauaucuaucacgucugau

SEQ ID NO: 880377 - RNA, 19 nt, Artificial Sequence
  Description of Artificial Sequence: Synthetic oligonucleotide
cuguuaagguuaguaggag

SEQ ID NO: 880378 - RNA, 19 nt, Artificial Sequence
  Description of Artificial Sequence: Synthetic oligonucleotide
aucuaucacgucugauuca

SEQ ID NO: 880379 - RNA, 19 nt, Artificial Sequence
  Description of Artificial Sequence: Synthetic oligonucleotide
uccgagucaacugaacaua

SEQ ID NO: 880380 - RNA, 19 nt, Artificial Sequence
  Description of Artificial Sequence: Synthetic oligonucleotide
acauaaguauugaaagaaa

SEQ ID NO: 880381 - RNA, 19 nt, Artificial Sequence
  Description of Artificial Sequence: Synthetic oligonucleotide
uaaccccacauuggcagag

SEQ ID NO: 880382 - RNA, 19 nt, Artificial Sequence
  Description of Artificial Sequence: Synthetic oligonucleotide
uacuuaaaugauggaaguu

SEQ ID NO: 880383 - RNA, 19 nt, Artificial Sequence
  Description of Artificial Sequence: Synthetic oligonucleotide
gacaagggacaugcuuugg

SEQ ID NO: 880384 - RNA, 19 nt, Artificial Sequence
  Description of Artificial Sequence: Synthetic oligonucleotide
uuauuuuguuucugaccua

SEQ ID NO: 880385 - RNA, 19 nt, Artificial Sequence
  Description of Artificial Sequence: Synthetic oligonucleotide
uaaucccauguuaguucug

SEQ ID NO: 880386 - RNA, 19 nt, Artificial Sequence
  Description of Artificial Sequence: Synthetic oligonucleotide
auaccuguuggugaagaaa

SEQ ID NO: 880387 - RNA, 19 nt, Artificial Sequence
  Description of Artificial Sequence: Synthetic oligonucleotide
cuuagacuccguccacaag

SEQ ID NO: 880388 - RNA, 19 nt, Artificial Sequence
  Description of Artificial Sequence: Synthetic oligonucleotide
ugcauaugaguguccuuau

SEQ ID NO: 880389 - RNA, 19 nt, Artificial Sequence
  Description of Artificial Sequence: Synthetic oligonucleotide
auccgagauaaaguuauau

SEQ ID NO: 880390 - RNA, 19 nt, Artificial Sequence
  Description of Artificial Sequence: Synthetic oligonucleotide
cucacuuuugaacaccugu

SEQ ID NO: 880391 - RNA, 19 nt, Artificial Sequence
  Description of Artificial Sequence: Synthetic oligonucleotide
ccgagauaaaguuauauua

SEQ ID NO: 880392 - RNA, 19 nt, Artificial Sequence
  Description of Artificial Sequence: Synthetic oligonucleotide
ugccaguagguaugagucu

SEQ ID NO: 880393 - RNA, 19 nt, Artificial Sequence
  Description of Artificial Sequence: Synthetic oligonucleotide
uaguuauaucuaucacguc

SEQ ID NO: 880394 - RNA, 19 nt, Artificial Sequence
  Description of Artificial Sequence: Synthetic oligonucleotide
auguuggacgacucgguuu

SEQ ID NO: 880395 - RNA, 19 nt, Artificial Sequence
  Description of Artificial Sequence: Synthetic oligonucleotide
cacgugaagagcagaagaa

SEQ ID NO: 880396 - RNA, 19 nt, Artificial Sequence
  Description of Artificial Sequence: Synthetic oligonucleotide
agcgaccaauggaaaauuc

SEQ ID NO: 880397 - RNA, 19 nt, Artificial Sequence
  Description of Artificial Sequence: Synthetic oligonucleotide
acgucugauucaaucagcu

SEQ ID NO: 880398 - RNA, 19 nt, Artificial Sequence
  Description of Artificial Sequence: Synthetic oligonucleotide
guaaucuuccugaauaaau

SEQ ID NO: 880399 - RNA, 19 nt, Artificial Sequence
  Description of Artificial Sequence: Synthetic oligonucleotide
guuuuauaauucacgugaa

SEQ ID NO: 880400 - RNA, 19 nt, Artificial Sequence
  Description of Artificial Sequence: Synthetic oligonucleotide
agaucacuguuaagguuag

SEQ ID NO: 880401 - RNA, 19 nt, Artificial Sequence
  Description of Artificial Sequence: Synthetic oligonucleotide
gcuucuaaugacugaguga

SEQ ID NO: 880402 - RNA, 19 nt, Artificial Sequence
  Description of Artificial Sequence: Synthetic oligonucleotide
cagacauccgagauaaagu

SEQ ID NO: 880403 - RNA, 19 nt, Artificial Sequence
  Description of Artificial Sequence: Synthetic oligonucleotide
aagugauacuugaugcaua

SEQ ID NO: 880404 - RNA, 19 nt, Artificial Sequence
  Description of Artificial Sequence: Synthetic oligonucleotide
guggcuaugugcuuacacu

SEQ ID NO: 880405 - RNA, 19 nt, Artificial Sequence
  Description of Artificial Sequence: Synthetic oligonucleotide
uucugaccuaagucauaca

SEQ ID NO: 880406 - RNA, 19 nt, Artificial Sequence
  Description of Artificial Sequence: Synthetic oligonucleotide
aacguucuguaugcagaga

SEQ ID NO: 880407 - RNA, 19 nt, Artificial Sequence
  Description of Artificial Sequence: Synthetic oligonucleotide
cuucgagaucacuguuaag

SEQ ID NO: 880408 - RNA, 19 nt, Artificial Sequence
  Description of Artificial Sequence: Synthetic oligonucleotide
acacucugaggaaacaaau

SEQ ID NO: 880409 - RNA, 19 nt, Artificial Sequence
  Description of Artificial Sequence: Synthetic oligonucleotide
gcagaagaaugagaguuug

SEQ ID NO: 880410 - RNA, 19 nt, Artificial Sequence
  Description of Artificial Sequence: Synthetic oligonucleotide
ccguacacuuauuaacccc

SEQ ID NO: 880411 - RNA, 19 nt, Artificial Sequence
  Description of Artificial Sequence: Synthetic oligonucleotide
uugacacaacugacgguua

SEQ ID NO: 880412 - RNA, 19 nt, Artificial Sequence
  Description of Artificial Sequence: Synthetic oligonucleotide
acagaaggauuaaccacga

SEQ ID NO: 880413 - RNA, 19 nt, Artificial Sequence
  Description of Artificial Sequence: Synthetic oligonucleotide
caggagugauucugcuuag

SEQ ID NO: 880414 - RNA, 19 nt, Artificial Sequence
  Description of Artificial Sequence: Synthetic oligonucleotide
gcgaccaauggaaaauucc

SEQ ID NO: 880415 - RNA, 19 nt, Artificial Sequence
  Description of Artificial Sequence: Synthetic oligonucleotide
gacuccguccacaaggugu

SEQ ID NO: 880416 - RNA, 19 nt, Artificial Sequence
  Description of Artificial Sequence: Synthetic oligonucleotide
gacacaacugacgguuaca

SEQ ID NO: 880417 - RNA, 19 nt, Artificial Sequence
  Description of Artificial Sequence: Synthetic oligonucleotide
gaguuugucuuugcauguc

SEQ ID NO: 880418 - RNA, 19 nt, Artificial Sequence
  Description of Artificial Sequence: Synthetic oligonucleotide
gauucugcuuaguaaucuu

SEQ ID NO: 880419 - RNA, 19 nt, Artificial Sequence
  Description of Artificial Sequence: Synthetic oligonucleotide
gacauccgagauaaaguua

SEQ ID NO: 880420 - RNA, 19 nt, Artificial Sequence
  Description of Artificial Sequence: Synthetic oligonucleotide
cacguugucuuucuguacu

SEQ ID NO: 880421 - RNA, 19 nt, Artificial Sequence
  Description of Artificial Sequence: Synthetic oligonucleotide
aguauucaauguggcuaug

SEQ ID NO: 880422 - RNA, 19 nt, Artificial Sequence
  Description of Artificial Sequence: Synthetic oligonucleotide
accccacauuggcagagga

SEQ ID NO: 880423 - RNA, 19 nt, Artificial Sequence
  Description of Artificial Sequence: Synthetic oligonucleotide
ggcagcguacuccccagcc

SEQ ID NO: 880424 - RNA, 19 nt, Artificial Sequence
  Description of Artificial Sequence: Synthetic oligonucleotide
cucaguauucaauguggcu

SEQ ID NO: 880425 - RNA, 19 nt, Artificial Sequence
  Description of Artificial Sequence: Synthetic oligonucleotide
agaaagcgaccaauggaaa

SEQ ID NO: 880426 - RNA, 19 nt, Artificial Sequence
  Description of Artificial Sequence: Synthetic oligonucleotide
cucuucgagaucacuguua

SEQ ID NO: 880427 - RNA, 19 nt, Artificial Sequence
  Description of Artificial Sequence: Synthetic oligonucleotide
guuuuaggacuucuaggau

SEQ ID NO: 880428 - RNA, 19 nt, Artificial Sequence
  Description of Artificial Sequence: Synthetic oligonucleotide
aggaaacggcccacguuuc

SEQ ID NO: 880429 - RNA, 19 nt, Artificial Sequence
  Description of Artificial Sequence: Synthetic oligonucleotide
ggagugauucugcuuagua

SEQ ID NO: 880430 - RNA, 19 nt, Artificial Sequence
  Description of Artificial Sequence: Synthetic oligonucleotide
gcauccaacagaaauacau

SEQ ID NO: 880431 - RNA, 19 nt, Artificial Sequence
  Description of Artificial Sequence: Synthetic oligonucleotide
cuuaguaaucuuccugaau

SEQ ID NO: 880432 - RNA, 19 nt, Artificial Sequence
  Description of Artificial Sequence: Synthetic oligonucleotide
ggaaacggcccacguuucc

SEQ ID NO: 880433 - RNA, 19 nt, Artificial Sequence
  Description of Artificial Sequence: Synthetic oligonucleotide
agggaaacagaaggauuaa

SEQ ID NO: 880434 - RNA, 19 nt, Artificial Sequence
  Description of Artificial Sequence: Synthetic oligonucleotide
cguacacuuauuaacccca

SEQ ID NO: 880435 - RNA, 19 nt, Artificial Sequence
  Description of Artificial Sequence: Synthetic oligonucleotide
cugaacagacauccgagau

SEQ ID NO: 880436 - RNA, 19 nt, Artificial Sequence
  Description of Artificial Sequence: Synthetic oligonucleotide
ggacgacucgguuuugaca

SEQ ID NO: 880437 - RNA, 19 nt, Artificial Sequence
  Description of Artificial Sequence: Synthetic oligonucleotide
ggucccagcuucauaacca

SEQ ID NO: 880438 - RNA, 19 nt, Artificial Sequence
  Description of Artificial Sequence: Synthetic oligonucleotide
acguugucuuucuguacuu

SEQ ID NO: 880439 - RNA, 19 nt, Artificial Sequence
  Description of Artificial Sequence: Synthetic oligonucleotide
guauucaauguggcuaugu

SEQ ID NO: 880440 - RNA, 19 nt, Artificial Sequence
  Description of Artificial Sequence: Synthetic oligonucleotide
gguaugagucucuucaguu

SEQ ID NO: 880441 - RNA, 19 nt, Artificial Sequence
  Description of Artificial Sequence: Synthetic oligonucleotide
cauaccuguuggugaagaa

SEQ ID NO: 880442 - RNA, 19 nt, Artificial Sequence
  Description of Artificial Sequence: Synthetic oligonucleotide
gugacaagggacaugcuuu

SEQ ID NO: 880443 - RNA, 19 nt, Artificial Sequence
  Description of Artificial Sequence: Synthetic oligonucleotide
ucgugagcucuagcuuuag

SEQ ID NO: 880444 - RNA, 19 nt, Artificial Sequence
  Description of Artificial Sequence: Synthetic oligonucleotide
acgacucgguuuugacaca

SEQ ID NO: 880445 - RNA, 19 nt, Artificial Sequence
  Description of Artificial Sequence: Synthetic oligonucleotide
gccaguagguaugagucuc

SEQ ID NO: 880446 - RNA, 19 nt, Artificial Sequence
  Description of Artificial Sequence: Synthetic oligonucleotide
ugacugagugacgcugaau

SEQ ID NO: 880447 - RNA, 19 nt, Artificial Sequence
  Description of Artificial Sequence: Synthetic oligonucleotide
gaaacggcccacguuuccu

SEQ ID NO: 880448 - RNA, 19 nt, Artificial Sequence
  Description of Artificial Sequence: Synthetic oligonucleotide
gguuaguaggagaacauuu

SEQ ID NO: 880449 - RNA, 19 nt, Artificial Sequence
  Description of Artificial Sequence: Synthetic oligonucleotide
uccguccacaagguguuuu

SEQ ID NO: 880450 - RNA, 19 nt, Artificial Sequence
  Description of Artificial Sequence: Synthetic oligonucleotide
aggagugauucugcuuagu

SEQ ID NO: 880451 - RNA, 19 nt, Artificial Sequence
  Description of Artificial Sequence: Synthetic oligonucleotide
gcuuaguaaucuuccugaa

SEQ ID NO: 880452 - RNA, 19 nt, Artificial Sequence
  Description of Artificial Sequence: Synthetic oligonucleotide
agcauccaacagaaauaca

SEQ ID NO: 880453 - RNA, 19 nt, Artificial Sequence
  Description of Artificial Sequence: Synthetic oligonucleotide
augcucgaggccacguugu

SEQ ID NO: 880454 - RNA, 19 nt, Artificial Sequence
  Description of Artificial Sequence: Synthetic oligonucleotide
gucgucuuuggaagugaca

SEQ ID NO: 880455 - RNA, 19 nt, Artificial Sequence
  Description of Artificial Sequence: Synthetic oligonucleotide
uuccugucauguguuucua

SEQ ID NO: 880456 - RNA, 19 nt, Artificial Sequence
  Description of Artificial Sequence: Synthetic oligonucleotide
cacuuauuaaccccacauu

SEQ ID NO: 880457 - RNA, 19 nt, Artificial Sequence
  Description of Artificial Sequence: Synthetic oligonucleotide
cagaagaccuguugacugu

SEQ ID NO: 880458 - RNA, 19 nt, Artificial Sequence
  Description of Artificial Sequence: Synthetic oligonucleotide
acgguuacacuugcacaau

SEQ ID NO: 880459 - RNA, 19 nt, Artificial Sequence
  Description of Artificial Sequence: Synthetic oligonucleotide
cugauuccacuccauuacu

SEQ ID NO: 880460 - RNA, 19 nt, Artificial Sequence
  Description of Artificial Sequence: Synthetic oligonucleotide
gacucgguuuugacacaac

SEQ ID NO: 880461 - RNA, 19 nt, Artificial Sequence
  Description of Artificial Sequence: Synthetic oligonucleotide
acugacgguuacacuugca

SEQ ID NO: 880462 - RNA, 19 nt, Artificial Sequence
  Description of Artificial Sequence: Synthetic oligonucleotide
cgagauaaaguuauauuau

SEQ ID NO: 880463 - RNA, 19 nt, Artificial Sequence
  Description of Artificial Sequence: Synthetic oligonucleotide
cuauugcauuuucaucagu

SEQ ID NO: 880464 - RNA, 19 nt, Artificial Sequence
  Description of Artificial Sequence: Synthetic oligonucleotide
ccuuaaguccucgugagcu

SEQ ID NO: 880465 - RNA, 19 nt, Artificial Sequence
  Description of Artificial Sequence: Synthetic oligonucleotide
cauguuucuuagacuccgu

SEQ ID NO: 880466 - RNA, 19 nt, Artificial Sequence
  Description of Artificial Sequence: Synthetic oligonucleotide
gcugucaacugaagacaug

SEQ ID NO: 880467 - RNA, 19 nt, Artificial Sequence
  Description of Artificial Sequence: Synthetic oligonucleotide
cacaacugacgguuacacu

SEQ ID NO: 880468 - RNA, 19 nt, Artificial Sequence
  Description of Artificial Sequence: Synthetic oligonucleotide
gguuugaccuuaaguccuc

SEQ ID NO: 880469 - RNA, 19 nt, Artificial Sequence
  Description of Artificial Sequence: Synthetic oligonucleotide
cagcguacuccccagcccu

SEQ ID NO: 880470 - RNA, 19 nt, Artificial Sequence
  Description of Artificial Sequence: Synthetic oligonucleotide
gcacaauagguugcauuca

SEQ ID NO: 880471 - RNA, 19 nt, Artificial Sequence
  Description of Artificial Sequence: Synthetic oligonucleotide
cauccgagauaaaguuaua

SEQ ID NO: 880472 - RNA, 19 nt, Artificial Sequence
  Description of Artificial Sequence: Synthetic oligonucleotide
aacagacauccgagauaaa

SEQ ID NO: 880473 - RNA, 19 nt, Artificial Sequence
  Description of Artificial Sequence: Synthetic oligonucleotide
guuggacgacucgguuuug

SEQ ID NO: 880474 - RNA, 19 nt, Artificial Sequence
  Description of Artificial Sequence: Synthetic oligonucleotide
ggauuaaccacgacuucau

SEQ ID NO: 880475 - RNA, 19 nt, Artificial Sequence
  Description of Artificial Sequence: Synthetic oligonucleotide
cgaccaauggaaaauuccu

SEQ ID NO: 880476 - RNA, 19 nt, Artificial Sequence
  Description of Artificial Sequence: Synthetic oligonucleotide
cauguuggacgacucgguu

SEQ ID NO: 880477 - RNA, 19 nt, Artificial Sequence
  Description of Artificial Sequence: Synthetic oligonucleotide
auguggcuaugugcuuaca

SEQ ID NO: 880478 - RNA, 19 nt, Artificial Sequence
  Description of Artificial Sequence: Synthetic oligonucleotide
cugugagaggcugcuagau

SEQ ID NO: 880479 - RNA, 19 nt, Artificial Sequence
  Description of Artificial Sequence: Synthetic oligonucleotide
gucauccaggcagcguacu

SEQ ID NO: 880480 - RNA, 19 nt, Artificial Sequence
  Description of Artificial Sequence: Synthetic oligonucleotide
cuaucacgucugauucaau

SEQ ID NO: 880481 - RNA, 19 nt, Artificial Sequence
  Description of Artificial Sequence: Synthetic oligonucleotide
gcauaugaguguccuuauu

SEQ ID NO: 880482 - RNA, 19 nt, Artificial Sequence
  Description of Artificial Sequence: Synthetic oligonucleotide
agcguacuccccagcccuu

SEQ ID NO: 880483 - RNA, 19 nt, Artificial Sequence
  Description of Artificial Sequence: Synthetic oligonucleotide
ccaguagguaugagucucu

SEQ ID NO: 880484 - RNA, 19 nt, Artificial Sequence
  Description of Artificial Sequence: Synthetic oligonucleotide
gcguacuccccagcccuuc

SEQ ID NO: 880485 - RNA, 19 nt, Artificial Sequence
  Description of Artificial Sequence: Synthetic oligonucleotide
gcucgaggccacguugucu

SEQ ID NO: 880486 - RNA, 19 nt, Artificial Sequence
  Description of Artificial Sequence: Synthetic oligonucleotide
cgacucgguuuugacacaa

SEQ ID NO: 880487 - RNA, 19 nt, Artificial Sequence
  Description of Artificial Sequence: Synthetic oligonucleotide
cguucuguaugcagagauu

SEQ ID NO: 880488 - RNA, 19 nt, Artificial Sequence
  Description of Artificial Sequence: Synthetic oligonucleotide
ggcccacguuuccuucuuu

SEQ ID NO: 880489 - RNA, 19 nt, Artificial Sequence
  Description of Artificial Sequence: Synthetic oligonucleotide
cguacuccccagcccuucu

SEQ ID NO: 880490 - RNA, 19 nt, Artificial Sequence
  Description of Artificial Sequence: Synthetic oligonucleotide
cuccguccacaagguguuu

SEQ ID NO: 880491 - RNA, 19 nt, Artificial Sequence
  Description of Artificial Sequence: Synthetic oligonucleotide
aauuaggcagcuaugaagc

SEQ ID NO: 880492 - RNA, 19 nt, Artificial Sequence
  Description of Artificial Sequence: Synthetic oligonucleotide
uacucuaacaguuaggacc

SEQ ID NO: 880493 - RNA, 19 nt, Artificial Sequence
  Description of Artificial Sequence: Synthetic oligonucleotide
aaucccaaaaccugcagcg

SEQ ID NO: 880494 - RNA, 19 nt, Artificial Sequence
  Description of Artificial Sequence: Synthetic oligonucleotide
uuuguggauaaucauagag

SEQ ID NO: 880495 - RNA, 19 nt, Artificial Sequence
  Description of Artificial Sequence: Synthetic oligonucleotide
uuguggauaaucauagagg

SEQ ID NO: 880496 - RNA, 19 nt, Artificial Sequence
  Description of Artificial Sequence: Synthetic oligonucleotide
aaaacagacacagcuacac

SEQ ID NO: 880497 - RNA, 19 nt, Artificial Sequence
  Description of Artificial Sequence: Synthetic oligonucleotide
ucagucauggcucuaaggc

SEQ ID NO: 880498 - RNA, 19 nt, Artificial Sequence
  Description of Artificial Sequence: Synthetic oligonucleotide
uggauaaucauagagguug

SEQ ID NO: 880499 - RNA, 19 nt, Artificial Sequence
  Description of Artificial Sequence: Synthetic oligonucleotide
aagagagagagagagagag

SEQ ID NO: 880500 - RNA, 19 nt, Artificial Sequence
  Description of Artificial Sequence: Synthetic oligonucleotide
ucaggauugagacaggcug

SEQ ID NO: 880501 - RNA, 19 nt, Artificial Sequence
  Description of Artificial Sequence: Synthetic oligonucleotide
gaauuaggcagcuaugaag

SEQ ID NO: 880502 - RNA, 19 nt, Artificial Sequence
  Description of Artificial Sequence: Synthetic oligonucleotide
ucuauagacgcacugacaa

SEQ ID NO: 880503 - RNA, 19 nt, Artificial Sequence
  Description of Artificial Sequence: Synthetic oligonucleotide
aguagggucaggcuggccc

SEQ ID NO: 880504 - RNA, 19 nt, Artificial Sequence
  Description of Artificial Sequence: Synthetic oligonucleotide
agugcgaucagguagucag

SEQ ID NO: 880505 - RNA, 19 nt, Artificial Sequence
  Description of Artificial Sequence: Synthetic oligonucleotide
agagagaagagagagagag

SEQ ID NO: 880506 - RNA, 19 nt, Artificial Sequence
  Description of Artificial Sequence: Synthetic oligonucleotide
acaguuaggaccuccaaag

SEQ ID NO: 880507 - RNA, 19 nt, Artificial Sequence
  Description of Artificial Sequence: Synthetic oligonucleotide
uacguagucauauuuauuc

SEQ ID NO: 880508 - RNA, 19 nt, Artificial Sequence
  Description of Artificial Sequence: Synthetic oligonucleotide
ucuugagaccuucauacag

SEQ ID NO: 880509 - RNA, 19 nt, Artificial Sequence
  Description of Artificial Sequence: Synthetic oligonucleotide
uauagacgcacugacaagg

SEQ ID NO: 880510 - RNA, 19 nt, Artificial Sequence
  Description of Artificial Sequence: Synthetic oligonucleotide
uuuacucuaacaguuagga

SEQ ID NO: 880511 - RNA, 19 nt, Artificial Sequence
  Description of Artificial Sequence: Synthetic oligonucleotide
guuugcaacacauagguga

SEQ ID NO: 880512 - RNA, 19 nt, Artificial Sequence
  Description of Artificial Sequence: Synthetic oligonucleotide
agaagagagagagagagag

SEQ ID NO: 880513 - RNA, 19 nt, Artificial Sequence
  Description of Artificial Sequence: Synthetic oligonucleotide
agagaagagagagagagag

SEQ ID NO: 880514 - RNA, 19 nt, Artificial Sequence
  Description of Artificial Sequence: Synthetic oligonucleotide
aauaguagggucaggcugg

SEQ ID NO: 880515 - RNA, 19 nt, Artificial Sequence
  Description of Artificial Sequence: Synthetic oligonucleotide
agagagagaagagagagag

SEQ ID NO: 880516 - RNA, 19 nt, Artificial Sequence
  Description of Artificial Sequence: Synthetic oligonucleotide
caugauggcacauugucag

SEQ ID NO: 880517 - RNA, 19 nt, Artificial Sequence
  Description of Artificial Sequence: Synthetic oligonucleotide
augugaaagagagagagag

SEQ ID NO: 880518 - RNA, 19 nt, Artificial Sequence
  Description of Artificial Sequence: Synthetic oligonucleotide
aacauggccgcccgguugc

SEQ ID NO: 880519 - RNA, 19 nt, Artificial Sequence
  Description of Artificial Sequence: Synthetic oligonucleotide
gagagagagagagagagag

SEQ ID NO: 880520 - RNA, 19 nt, Artificial Sequence
  Description of Artificial Sequence: Synthetic oligonucleotide
uucgccauuccacuugucg

SEQ ID NO: 880521 - RNA, 19 nt, Artificial Sequence
  Description of Artificial Sequence: Synthetic oligonucleotide
aggaauaguagggucaggc

SEQ ID NO: 880522 - RNA, 19 nt, Artificial Sequence
  Description of Artificial Sequence: Synthetic oligonucleotide
gaaagagagagagagaaga

SEQ ID NO: 880523 - RNA, 19 nt, Artificial Sequence
  Description of Artificial Sequence: Synthetic oligonucleotide
gacgacauggcucuggaug

SEQ ID NO: 880524 - RNA, 19 nt, Artificial Sequence
  Description of Artificial Sequence: Synthetic oligonucleotide
ucauauuuauucacgcugu

SEQ ID NO: 880525 - RNA, 19 nt, Artificial Sequence
  Description of Artificial Sequence: Synthetic oligonucleotide
agguuugcaacacauaggu

SEQ ID NO: 880526 - RNA, 19 nt, Artificial Sequence
  Description of Artificial Sequence: Synthetic oligonucleotide
uucagauugguccagguuu

SEQ ID NO: 880527 - RNA, 19 nt, Artificial Sequence
  Description of Artificial Sequence: Synthetic oligonucleotide
agagagagagaagagagag

SEQ ID NO: 880528 - RNA, 19 nt, Artificial Sequence
  Description of Artificial Sequence: Synthetic oligonucleotide
ugagcuuuugcacaccgga

SEQ ID NO: 880529 - RNA, 19 nt, Artificial Sequence
  Description of Artificial Sequence: Synthetic oligonucleotide
uaugaagcuaagagcauga

SEQ ID NO: 880530 - RNA, 19 nt, Artificial Sequence
  Description of Artificial Sequence: Synthetic oligonucleotide
agucaggaggcccacggcc

SEQ ID NO: 880531 - RNA, 19 nt, Artificial Sequence
  Description of Artificial Sequence: Synthetic oligonucleotide
ugugauuggaaaacugcac

SEQ ID NO: 880532 - RNA, 19 nt, Artificial Sequence
  Description of Artificial Sequence: Synthetic oligonucleotide
ugaggcauggcaaugguua

SEQ ID NO: 880533 - RNA, 19 nt, Artificial Sequence
  Description of Artificial Sequence: Synthetic oligonucleotide
agagagagagagaagagag

SEQ ID NO: 880534 - RNA, 19 nt, Artificial Sequence
  Description of Artificial Sequence: Synthetic oligonucleotide
agcuacaccgugcugacag

SEQ ID NO: 880535 - RNA, 19 nt, Artificial Sequence
  Description of Artificial Sequence: Synthetic oligonucleotide
gugaauucagcacuuggcc

SEQ ID NO: 880536 - RNA, 19 nt, Artificial Sequence
  Description of Artificial Sequence: Synthetic oligonucleotide
ugucuauagacgcacugac

SEQ ID NO: 880537 - RNA, 19 nt, Artificial Sequence
  Description of Artificial Sequence: Synthetic oligonucleotide
auaccugugagucuacaug

SEQ ID NO: 880538 - RNA, 19 nt, Artificial Sequence
  Description of Artificial Sequence: Synthetic oligonucleotide
gaugcguugggucaccgug

SEQ ID NO: 880539 - RNA, 19 nt, Artificial Sequence
  Description of Artificial Sequence: Synthetic oligonucleotide
ugaaagagagagagagaag

SEQ ID NO: 880540 - RNA, 19 nt, Artificial Sequence
  Description of Artificial Sequence: Synthetic oligonucleotide
acgacauggcucuggaugg

SEQ ID NO: 880541 - RNA, 19 nt, Artificial Sequence
  Description of Artificial Sequence: Synthetic oligonucleotide
uaccugugagucuacauga

SEQ ID NO: 880542 - RNA, 19 nt, Artificial Sequence
  Description of Artificial Sequence: Synthetic oligonucleotide
ugcucaagcggugucacgg

SEQ ID NO: 880543 - RNA, 19 nt, Artificial Sequence
  Description of Artificial Sequence: Synthetic oligonucleotide
aggugaaauucugacaagg

SEQ ID NO: 880544 - RNA, 19 nt, Artificial Sequence
  Description of Artificial Sequence: Synthetic oligonucleotide
aaagagagagagagaagag

SEQ ID NO: 880545 - RNA, 19 nt, Artificial Sequence
  Description of Artificial Sequence: Synthetic oligonucleotide
aagagagagagagaagaga

SEQ ID NO: 880546 - RNA, 19 nt, Artificial Sequence
  Description of Artificial Sequence: Synthetic oligonucleotide
aguacguagucauauuuau

SEQ ID NO: 880547 - RNA, 19 nt, Artificial Sequence
  Description of Artificial Sequence: Synthetic oligonucleotide
uuugcaacacauaggugaa

SEQ ID NO: 880548 - RNA, 19 nt, Artificial Sequence
  Description of Artificial Sequence: Synthetic oligonucleotide
ugacaaggucuauaucagg

SEQ ID NO: 880549 - RNA, 19 nt, Artificial Sequence
  Description of Artificial Sequence: Synthetic oligonucleotide
cugaggaacguacauggag

SEQ ID NO: 880550 - RNA, 19 nt, Artificial Sequence
  Description of Artificial Sequence: Synthetic oligonucleotide
uuugcacaccggauggucc

SEQ ID NO: 880551 - RNA, 19 nt, Artificial Sequence
  Description of Artificial Sequence: Synthetic oligonucleotide
ugaguacguagucauauuu

SEQ ID NO: 880552 - RNA, 19 nt, Artificial Sequence
  Description of Artificial Sequence: Synthetic oligonucleotide
cacgccagaagcauggcag

SEQ ID NO: 880553 - RNA, 19 nt, Artificial Sequence
  Description of Artificial Sequence: Synthetic oligonucleotide
uugcgcguugcucaagcgg

SEQ ID NO: 880554 - RNA, 19 nt, Artificial Sequence
  Description of Artificial Sequence: Synthetic oligonucleotide
agucauauuuauucacgcu

SEQ ID NO: 880555 - RNA, 19 nt, Artificial Sequence
  Description of Artificial Sequence: Synthetic oligonucleotide
auucugacaaggucuauau

SEQ ID NO: 880556 - RNA, 19 nt, Artificial Sequence
  Description of Artificial Sequence: Synthetic oligonucleotide
agcuuuugcacaccggaug

SEQ ID NO: 880557 - RNA, 19 nt, Artificial Sequence
  Description of Artificial Sequence: Synthetic oligonucleotide
ucucguguaaccagugagu

SEQ ID NO: 880558 - RNA, 19 nt, Artificial Sequence
  Description of Artificial Sequence: Synthetic oligonucleotide
ugugaaagagagagagaga

SEQ ID NO: 880559 - RNA, 19 nt, Artificial Sequence
  Description of Artificial Sequence: Synthetic oligonucleotide
cacuugucgcccaucacgg

SEQ ID NO: 880560 - RNA, 19 nt, Artificial Sequence
  Description of Artificial Sequence: Synthetic oligonucleotide
ccagagaccaccuaagccc

SEQ ID NO: 880561 - RNA, 19 nt, Artificial Sequence
  Description of Artificial Sequence: Synthetic oligonucleotide
augaccacggugucaggac

SEQ ID NO: 880562 - RNA, 19 nt, Artificial Sequence
  Description of Artificial Sequence: Synthetic oligonucleotide
uugucucucguguaaccag

SEQ ID NO: 880563 - RNA, 19 nt, Artificial Sequence
  Description of Artificial Sequence: Synthetic oligonucleotide
aggacuuggaccagagacc

SEQ ID NO: 880564 - RNA, 19 nt, Artificial Sequence
  Description of Artificial Sequence: Synthetic oligonucleotide
gagagagagagagagaaaa

SEQ ID NO: 880565 - RNA, 19 nt, Artificial Sequence
  Description of Artificial Sequence: Synthetic oligonucleotide
gagagagagagagagagaa

SEQ ID NO: 880566 - RNA, 19 nt, Artificial Sequence
  Description of Artificial Sequence: Synthetic oligonucleotide
acggaauccggcuacccag

SEQ ID NO: 880567 - RNA, 19 nt, Artificial Sequence
  Description of Artificial Sequence: Synthetic oligonucleotide
agacgcacugacaagggac

SEQ ID NO: 880568 - RNA, 19 nt, Artificial Sequence
  Description of Artificial Sequence: Synthetic oligonucleotide
acguacauggagccuucgc

SEQ ID NO: 880569 - RNA, 19 nt, Artificial Sequence
  Description of Artificial Sequence: Synthetic oligonucleotide
gugaaagagagagagagaa

SEQ ID NO: 880570 - RNA, 19 nt, Artificial Sequence
  Description of Artificial Sequence: Synthetic oligonucleotide
caguacacagggcuggagg

SEQ ID NO: 880571 - RNA, 19 nt, Artificial Sequence
  Description of Artificial Sequence: Synthetic oligonucleotide
ucgccauuccacuugucgc

SEQ ID NO: 880572 - RNA, 19 nt, Artificial Sequence
  Description of Artificial Sequence: Synthetic oligonucleotide
aagacggcauccaccuugc

SEQ ID NO: 880573 - RNA, 19 nt, Artificial Sequence
  Description of Artificial Sequence: Synthetic oligonucleotide
agucauggcucuaaggcag

SEQ ID NO: 880574 - RNA, 19 nt, Artificial Sequence
  Description of Artificial Sequence: Synthetic oligonucleotide
acagcuacaccgugcugac

SEQ ID NO: 880575 - RNA, 19 nt, Artificial Sequence
  Description of Artificial Sequence: Synthetic oligonucleotide
gacggcauccaccuugcgc

SEQ ID NO: 880576 - RNA, 19 nt, Artificial Sequence
  Description of Artificial Sequence: Synthetic oligonucleotide
ugcgcguugcucaagcggu

SEQ ID NO: 880577 - RNA, 19 nt, Artificial Sequence
  Description of Artificial Sequence: Synthetic oligonucleotide
agcggugucacggaauccg

SEQ ID NO: 880578 - RNA, 19 nt, Artificial Sequence
  Description of Artificial Sequence: Synthetic oligonucleotide
gcuuuugcacaccggaugg

SEQ ID NO: 880579 - RNA, 19 nt, Artificial Sequence
  Description of Artificial Sequence: Synthetic oligonucleotide
aacaaguccccagugccca

SEQ ID NO: 880580 - RNA, 19 nt, Artificial Sequence
  Description of Artificial Sequence: Synthetic oligonucleotide
acguagucauauuuauuca

SEQ ID NO: 880581 - RNA, 19 nt, Artificial Sequence
  Description of Artificial Sequence: Synthetic oligonucleotide
cuauaucaggaauuaggca

SEQ ID NO: 880582 - RNA, 19 nt, Artificial Sequence
  Description of Artificial Sequence: Synthetic oligonucleotide
agugaguacguagucauau

SEQ ID NO: 880583 - RNA, 19 nt, Artificial Sequence
  Description of Artificial Sequence: Synthetic oligonucleotide
uucacgcuguucaucuuga

SEQ ID NO: 880584 - RNA, 19 nt, Artificial Sequence
  Description of Artificial Sequence: Synthetic oligonucleotide
ugguuacaccccaaggccu

SEQ ID NO: 880585 - RNA, 19 nt, Artificial Sequence
  Description of Artificial Sequence: Synthetic oligonucleotide
cuauagacgcacugacaag

SEQ ID NO: 880586 - RNA, 19 nt, Artificial Sequence
  Description of Artificial Sequence: Synthetic oligonucleotide
ggaaaaggagaccccagcc

SEQ ID NO: 880587 - RNA, 19 nt, Artificial Sequence
  Description of Artificial Sequence: Synthetic oligonucleotide
caucacgggaucacacacg

SEQ ID NO: 880588 - RNA, 19 nt, Artificial Sequence
  Description of Artificial Sequence: Synthetic oligonucleotide
cuaagagcaugaggcaugg

SEQ ID NO: 880589 - RNA, 19 nt, Artificial Sequence
  Description of Artificial Sequence: Synthetic oligonucleotide
acguacacgagcugggagu

SEQ ID NO: 880590 - RNA, 19 nt, Artificial Sequence
  Description of Artificial Sequence: Synthetic oligonucleotide
uccccagugcccacgaaga

SEQ ID NO: 880591 - RNA, 19 nt, Artificial Sequence
  Description of Artificial Sequence: Synthetic oligonucleotide
augggcauagccuguguga

SEQ ID NO: 880592 - RNA, 19 nt, Artificial Sequence
  Description of Artificial Sequence: Synthetic oligonucleotide
augauggcacauugucagg

SEQ ID NO: 880593 - RNA, 19 nt, Artificial Sequence
  Description of Artificial Sequence: Synthetic oligonucleotide
cacacguacacgagcuggg

SEQ ID NO: 880594 - RNA, 19 nt, Artificial Sequence
  Description of Artificial Sequence: Synthetic oligonucleotide
ugucaggauugagacaggc

SEQ ID NO: 880595 - RNA, 19 nt, Artificial Sequence
  Description of Artificial Sequence: Synthetic oligonucleotide
guagccccggacgacaugg

SEQ ID NO: 880596 - RNA, 19 nt, Artificial Sequence
  Description of Artificial Sequence: Synthetic oligonucleotide
ugucaggcgaguccacggc

SEQ ID NO: 880597 - RNA, 19 nt, Artificial Sequence
  Description of Artificial Sequence: Synthetic oligonucleotide
guugggucaccguggagcc

SEQ ID NO: 880598 - RNA, 19 nt, Artificial Sequence
  Description of Artificial Sequence: Synthetic oligonucleotide
cguguaaccagugaguacg

SEQ ID NO: 880599 - RNA, 19 nt, Artificial Sequence
  Description of Artificial Sequence: Synthetic oligonucleotide
gaccagagaccaccuaagc

SEQ ID NO: 880600 - RNA, 19 nt, Artificial Sequence
  Description of Artificial Sequence: Synthetic oligonucleotide
gaacauggccgcccgguug

SEQ ID NO: 880601 - RNA, 19 nt, Artificial Sequence
  Description of Artificial Sequence: Synthetic oligonucleotide
ugcgaucagguagucagug

SEQ ID NO: 880602 - RNA, 19 nt, Artificial Sequence
  Description of Artificial Sequence: Synthetic oligonucleotide
ggugcuccugucuauagac

SEQ ID NO: 880603 - RNA, 19 nt, Artificial Sequence
  Description of Artificial Sequence: Synthetic oligonucleotide
gugucaggcgaguccacgg

SEQ ID NO: 880604 - RNA, 19 nt, Artificial Sequence
  Description of Artificial Sequence: Synthetic oligonucleotide
guugaguuucagucauggc

SEQ ID NO: 880605 - RNA, 19 nt, Artificial Sequence
  Description of Artificial Sequence: Synthetic oligonucleotide
uagacgcacugacaaggga

SEQ ID NO: 880606 - RNA, 19 nt, Artificial Sequence
  Description of Artificial Sequence: Synthetic oligonucleotide
aaggaauaguagggucagg

SEQ ID NO: 880607 - RNA, 19 nt, Artificial Sequence
  Description of Artificial Sequence: Synthetic oligonucleotide
cuuggcccuuccaaugggc

SEQ ID NO: 880608 - RNA, 19 nt, Artificial Sequence
  Description of Artificial Sequence: Synthetic oligonucleotide
uuuugcacaccggaugguc

SEQ ID NO: 880609 - RNA, 19 nt, Artificial Sequence
  Description of Artificial Sequence: Synthetic oligonucleotide
aagcggugucacggaaucc

SEQ ID NO: 880610 - RNA, 19 nt, Artificial Sequence
  Description of Artificial Sequence: Synthetic oligonucleotide
guucaugcagcuccuguga

SEQ ID NO: 880611 - RNA, 19 nt, Artificial Sequence
  Description of Artificial Sequence: Synthetic oligonucleotide
caggaauuaggcagcuaug

SEQ ID NO: 880612 - RNA, 19 nt, Artificial Sequence
  Description of Artificial Sequence: Synthetic oligonucleotide
ccaccuaccuuccacauac

SEQ ID NO: 880613 - RNA, 19 nt, Artificial Sequence
  Description of Artificial Sequence: Synthetic oligonucleotide
aucuugagaccuucauaca

SEQ ID NO: 880614 - RNA, 19 nt, Artificial Sequence
  Description of Artificial Sequence: Synthetic oligonucleotide
ggcagaucgugguugcgcg

SEQ ID NO: 880615 - RNA, 19 nt, Artificial Sequence
  Description of Artificial Sequence: Synthetic oligonucleotide
ccucaaaucccaaaaccug

SEQ ID NO: 880616 - RNA, 19 nt, Artificial Sequence
  Description of Artificial Sequence: Synthetic oligonucleotide
caagcggugucacggaauc

SEQ ID NO: 880617 - RNA, 19 nt, Artificial Sequence
  Description of Artificial Sequence: Synthetic oligonucleotide
ucguguaaccagugaguac

SEQ ID NO: 880618 - RNA, 19 nt, Artificial Sequence
  Description of Artificial Sequence: Synthetic oligonucleotide
guccacgccagaagcaugg

SEQ ID NO: 880619 - RNA, 19 nt, Artificial Sequence
  Description of Artificial Sequence: Synthetic oligonucleotide
ucaagcggugucacggaau

SEQ ID NO: 880620 - RNA, 19 nt, Artificial Sequence
  Description of Artificial Sequence: Synthetic oligonucleotide
cuuccaaugggcauagccu

SEQ ID NO: 880621 - RNA, 19 nt, Artificial Sequence
  Description of Artificial Sequence: Synthetic oligonucleotide
aacguacauggagccuucg

SEQ ID NO: 880622 - RNA, 19 nt, Artificial Sequence
  Description of Artificial Sequence: Synthetic oligonucleotide
uugcacaccggaugguccu

SEQ ID NO: 880623 - RNA, 19 nt, Artificial Sequence
  Description of Artificial Sequence: Synthetic oligonucleotide
auccggaugcguuggguca

SEQ ID NO: 880624 - RNA, 19 nt, Artificial Sequence
  Description of Artificial Sequence: Synthetic oligonucleotide
guugcgcguugcucaagcg

SEQ ID NO: 880625 - RNA, 19 nt, Artificial Sequence
  Description of Artificial Sequence: Synthetic oligonucleotide
gcaaugguuacaccccaag

SEQ ID NO: 880626 - RNA, 19 nt, Artificial Sequence
  Description of Artificial Sequence: Synthetic oligonucleotide
cacgcugcugugucaggcg

SEQ ID NO: 880627 - RNA, 19 nt, Artificial Sequence
  Description of Artificial Sequence: Synthetic oligonucleotide
ugcguugggucaccgugga

SEQ ID NO: 880628 - RNA, 19 nt, Artificial Sequence
  Description of Artificial Sequence: Synthetic oligonucleotide
ucaaacugguuaggaguga

SEQ ID NO: 880629 - RNA, 19 nt, Artificial Sequence
  Description of Artificial Sequence: Synthetic oligonucleotide
cauccggaugcguuggguc

SEQ ID NO: 880630 - RNA, 19 nt, Artificial Sequence
  Description of Artificial Sequence: Synthetic oligonucleotide
ggugcuuguguguccacgc

SEQ ID NO: 880631 - RNA, 19 nt, Artificial Sequence
  Description of Artificial Sequence: Synthetic oligonucleotide
uugcucaagcggugucacg

SEQ ID NO: 880632 - RNA, 19 nt, Artificial Sequence
  Description of Artificial Sequence: Synthetic oligonucleotide
auagagguugacagaccag

SEQ ID NO: 880633 - RNA, 19 nt, Artificial Sequence
  Description of Artificial Sequence: Synthetic oligonucleotide
uugucgcccaucacgggau

SEQ ID NO: 880634 - RNA, 19 nt, Artificial Sequence
  Description of Artificial Sequence: Synthetic oligonucleotide
uccagguuugcaacacaua

SEQ ID NO: 880635 - RNA, 19 nt, Artificial Sequence
  Description of Artificial Sequence: Synthetic oligonucleotide
agcuaagagcaugaggcau

SEQ ID NO: 880636 - RNA, 19 nt, Artificial Sequence
  Description of Artificial Sequence: Synthetic oligonucleotide
cacguucgguuucuucucc

SEQ ID NO: 880637 - RNA, 19 nt, Artificial Sequence
  Description of Artificial Sequence: Synthetic oligonucleotide
guuaggagugaugaugucu

SEQ ID NO: 880638 - RNA, 19 nt, Artificial Sequence
  Description of Artificial Sequence: Synthetic oligonucleotide
uucugggagcuuccaugug

SEQ ID NO: 880639 - RNA, 19 nt, Artificial Sequence
  Description of Artificial Sequence: Synthetic oligonucleotide
gagagagagagaagagaga

SEQ ID NO: 880640 - RNA, 19 nt, Artificial Sequence
  Description of Artificial Sequence: Synthetic oligonucleotide
aggucuauaucaggaauua

SEQ ID NO: 880641 - RNA, 19 nt, Artificial Sequence
  Description of Artificial Sequence: Synthetic oligonucleotide
gaguacguagucauauuua

SEQ ID NO: 880642 - RNA, 19 nt, Artificial Sequence
  Description of Artificial Sequence: Synthetic oligonucleotide
cacggugucaggacccaug

SEQ ID NO: 880643 - RNA, 19 nt, Artificial Sequence
  Description of Artificial Sequence: Synthetic oligonucleotide
cguacauggagccuucgcc

SEQ ID NO: 880644 - RNA, 19 nt, Artificial Sequence
  Description of Artificial Sequence: Synthetic oligonucleotide
gacgcacugacaagggaca

SEQ ID NO: 880645 - RNA, 19 nt, Artificial Sequence
  Description of Artificial Sequence: Synthetic oligonucleotide
caggacccaugcaaugcag

SEQ ID NO: 880646 - RNA, 19 nt, Artificial Sequence
  Description of Artificial Sequence: Synthetic oligonucleotide
gagucuacaugaggcaguc

SEQ ID NO: 880647 - RNA, 19 nt, Artificial Sequence
  Description of Artificial Sequence: Synthetic oligonucleotide
gucaggcgaguccacggcc

SEQ ID NO: 880648 - RNA, 19 nt, Artificial Sequence
  Description of Artificial Sequence: Synthetic oligonucleotide
gaagagagagagagagaga

SEQ ID NO: 880649 - RNA, 19 nt, Artificial Sequence
  Description of Artificial Sequence: Synthetic oligonucleotide
cuccugucuauagacgcac

SEQ ID NO: 880650 - RNA, 19 nt, Artificial Sequence
  Description of Artificial Sequence: Synthetic oligonucleotide
uccugucuauagacgcacu

SEQ ID NO: 880651 - RNA, 19 nt, Artificial Sequence
  Description of Artificial Sequence: Synthetic oligonucleotide
cuugucucucguguaacca

SEQ ID NO: 880652 - RNA, 19 nt, Artificial Sequence
  Description of Artificial Sequence: Synthetic oligonucleotide
agucagugcccugugggga

SEQ ID NO: 880653 - RNA, 19 nt, Artificial Sequence
  Description of Artificial Sequence: Synthetic oligonucleotide
gaccacggugucaggaccc

SEQ ID NO: 880654 - RNA, 19 nt, Artificial Sequence
  Description of Artificial Sequence: Synthetic oligonucleotide
gagagagagaagagagaga

SEQ ID NO: 880655 - RNA, 19 nt, Artificial Sequence
  Description of Artificial Sequence: Synthetic oligonucleotide
gguugcgcguugcucaagc

SEQ ID NO: 880656 - RNA, 19 nt, Artificial Sequence
  Description of Artificial Sequence: Synthetic oligonucleotide
guccugaggaacguacaug

SEQ ID NO: 880657 - RNA, 19 nt, Artificial Sequence
  Description of Artificial Sequence: Synthetic oligonucleotide
cugucuauagacgcacuga

SEQ ID NO: 880658 - RNA, 19 nt, Artificial Sequence
  Description of Artificial Sequence: Synthetic oligonucleotide
gcuaagagcaugaggcaug

SEQ ID NO: 880659 - RNA, 19 nt, Artificial Sequence
  Description of Artificial Sequence: Synthetic oligonucleotide
guucaccgcaucaaccuca

SEQ ID NO: 880660 - RNA, 19 nt, Artificial Sequence
  Description of Artificial Sequence: Synthetic oligonucleotide
gugcuuguguguccacgcc

SEQ ID NO: 880661 - RNA, 19 nt, Artificial Sequence
  Description of Artificial Sequence: Synthetic oligonucleotide
caccggaugguccugucca

SEQ ID NO: 880662 - RNA, 19 nt, Artificial Sequence
  Description of Artificial Sequence: Synthetic oligonucleotide
gagaagagagagagagaga

SEQ ID NO: 880663 - RNA, 19 nt, Artificial Sequence
  Description of Artificial Sequence: Synthetic oligonucleotide
gagagaagagagagagaga

SEQ ID NO: 880664 - RNA, 19 nt, Artificial Sequence
  Description of Artificial Sequence: Synthetic oligonucleotide
accuucagauugucugggu

SEQ ID NO: 880665 - RNA, 19 nt, Artificial Sequence
  Description of Artificial Sequence: Synthetic oligonucleotide
accuaagcccagagccucc

SEQ ID NO: 880666 - RNA, 19 nt, Artificial Sequence
  Description of Artificial Sequence: Synthetic oligonucleotide
agaucgugguugcgcguug

SEQ ID NO: 880667 - RNA, 19 nt, Artificial Sequence
  Description of Artificial Sequence: Synthetic oligonucleotide
ucacggaauccggcuaccc

SEQ ID NO: 880668 - RNA, 19 nt, Artificial Sequence
  Description of Artificial Sequence: Synthetic oligonucleotide
gcaucaaccucaaauccca

SEQ ID NO: 880669 - RNA, 19 nt, Artificial Sequence
  Description of Artificial Sequence: Synthetic oligonucleotide
ggucuauaucaggaauuag

SEQ ID NO: 880670 - RNA, 19 nt, Artificial Sequence
  Description of Artificial Sequence: Synthetic oligonucleotide
gucuauagacgcacugaca

SEQ ID NO: 880671 - RNA, 19 nt, Artificial Sequence
  Description of Artificial Sequence: Synthetic oligonucleotide
gaucgugguugcgcguugc

SEQ ID NO: 880672 - RNA, 19 nt, Artificial Sequence
  Description of Artificial Sequence: Synthetic oligonucleotide
cugaggcacgacccucagg

SEQ ID NO: 880673 - RNA, 19 nt, Artificial Sequence
  Description of Artificial Sequence: Synthetic oligonucleotide
cacuuugucccuguacaca

SEQ ID NO: 880674 - RNA, 19 nt, Artificial Sequence
  Description of Artificial Sequence: Synthetic oligonucleotide
agagagagagagagagaga

SEQ ID NO: 880675 - RNA, 19 nt, Artificial Sequence
  Description of Artificial Sequence: Synthetic oligonucleotide
ccugucuauagacgcacug

SEQ ID NO: 880676 - RNA, 19 nt, Artificial Sequence
  Description of Artificial Sequence: Synthetic oligonucleotide
caaggucuauaucaggaau

SEQ ID NO: 880677 - RNA, 19 nt, Artificial Sequence
  Description of Artificial Sequence: Synthetic oligonucleotide
gcuuguguguccacgccag

SEQ ID NO: 880678 - RNA, 19 nt, Artificial Sequence
  Description of Artificial Sequence: Synthetic oligonucleotide
caguuaggaccuccaaaga

SEQ ID NO: 880679 - RNA, 19 nt, Artificial Sequence
  Description of Artificial Sequence: Synthetic oligonucleotide
gagagagaagagagagaga

SEQ ID NO: 880680 - RNA, 19 nt, Artificial Sequence
  Description of Artificial Sequence: Synthetic oligonucleotide
cacgagcugggaguucugc

SEQ ID NO: 880681 - RNA, 19 nt, Artificial Sequence
  Description of Artificial Sequence: Synthetic oligonucleotide
aggccgcacguucgguuuc

SEQ ID NO: 880682 - RNA, 19 nt, Artificial Sequence
  Description of Artificial Sequence: Synthetic oligonucleotide
gcagcgggaacauggccgc

SEQ ID NO: 880683 - RNA, 19 nt, Artificial Sequence
  Description of Artificial Sequence: Synthetic oligonucleotide
aucgugguugcgcguugcu

SEQ ID NO: 880684 - RNA, 19 nt, Artificial Sequence
  Description of Artificial Sequence: Synthetic oligonucleotide
gagccuucgccauuccacu

SEQ ID NO: 880685 - RNA, 19 nt, Artificial Sequence
  Description of Artificial Sequence: Synthetic oligonucleotide
auagccugugugauuggaa

SEQ ID NO: 880686 - RNA, 19 nt, Artificial Sequence
  Description of Artificial Sequence: Synthetic oligonucleotide
uuggaccagagaccaccua

SEQ ID NO: 880687 - RNA, 19 nt, Artificial Sequence
  Description of Artificial Sequence: Synthetic oligonucleotide
ccaucaggcuuccgcaucc

SEQ ID NO: 880688 - RNA, 19 nt, Artificial Sequence
  Description of Artificial Sequence: Synthetic oligonucleotide
cucguguaaccagugagua

SEQ ID NO: 880689 - RNA, 19 nt, Artificial Sequence
  Description of Artificial Sequence: Synthetic oligonucleotide
cacauaccugugagucuac

SEQ ID NO: 880690 - RNA, 19 nt, Artificial Sequence
  Description of Artificial Sequence: Synthetic oligonucleotide
gaacguacauggagccuuc

SEQ ID NO: 880691 - RNA, 19 nt, Artificial Sequence
  Description of Artificial Sequence: Synthetic oligonucleotide
aggaacguacauggagccu

SEQ ID NO: 880692 - RNA, 19 nt, Artificial Sequence
  Description of Artificial Sequence: Synthetic oligonucleotide
cacggaauccggcuaccca

SEQ ID NO: 880693 - RNA, 19 nt, Artificial Sequence
  Description of Artificial Sequence: Synthetic oligonucleotide
agacggcauccaccuugcg

SEQ ID NO: 880694 - RNA, 19 nt, Artificial Sequence
  Description of Artificial Sequence: Synthetic oligonucleotide
accgugcugacaggugcuc

SEQ ID NO: 880695 - RNA, 19 nt, Artificial Sequence
  Description of Artificial Sequence: Synthetic oligonucleotide
gcuacaccgugcugacagg

SEQ ID NO: 880696 - RNA, 19 nt, Artificial Sequence
  Description of Artificial Sequence: Synthetic oligonucleotide
cauagccugugugauugga

SEQ ID NO: 880697 - RNA, 19 nt, Artificial Sequence
  Description of Artificial Sequence: Synthetic oligonucleotide
gguuugcaacacauaggug

SEQ ID NO: 880698 - RNA, 19 nt, Artificial Sequence
  Description of Artificial Sequence: Synthetic oligonucleotide
gagaccaccuaagcccaga

SEQ ID NO: 880699 - RNA, 19 nt, Artificial Sequence
  Description of Artificial Sequence: Synthetic oligonucleotide
agagagagagagagagaaa

SEQ ID NO: 880700 - RNA, 19 nt, Artificial Sequence
  Description of Artificial Sequence: Synthetic oligonucleotide
uugcaacacauaggugaaa

SEQ ID NO: 880701 - RNA, 19 nt, Artificial Sequence
  Description of Artificial Sequence: Synthetic oligonucleotide
gcgaucagguagucagugc

SEQ ID NO: 880702 - RNA, 19 nt, Artificial Sequence
  Description of Artificial Sequence: Synthetic oligonucleotide
ucgugguugcgcguugcuc

SEQ ID NO: 880703 - RNA, 19 nt, Artificial Sequence
  Description of Artificial Sequence: Synthetic oligonucleotide
ggauaaucauagagguuga

SEQ ID NO: 880704 - RNA, 19 nt, Artificial Sequence
  Description of Artificial Sequence: Synthetic oligonucleotide
acacguacacgagcuggga

SEQ ID NO: 880705 - RNA, 19 nt, Artificial Sequence
  Description of Artificial Sequence: Synthetic oligonucleotide
cacggcccucacagcacgg

SEQ ID NO: 880706 - RNA, 19 nt, Artificial Sequence
  Description of Artificial Sequence: Synthetic oligonucleotide
cauaccugugagucuacau

SEQ ID NO: 880707 - RNA, 19 nt, Artificial Sequence
  Description of Artificial Sequence: Synthetic oligonucleotide
acgggaucacacacguaca

SEQ ID NO: 880708 - RNA, 19 nt, Artificial Sequence
  Description of Artificial Sequence: Synthetic oligonucleotide
ggugucacggaauccggcu

SEQ ID NO: 880709 - RNA, 19 nt, Artificial Sequence
  Description of Artificial Sequence: Synthetic oligonucleotide
gucacggaauccggcuacc

SEQ ID NO: 880710 - RNA, 19 nt, Artificial Sequence
  Description of Artificial Sequence: Synthetic oligonucleotide
cagaggugcagucuguuuu

SEQ ID NO: 880711 - RNA, 19 nt, Artificial Sequence
  Description of Artificial Sequence: Synthetic oligonucleotide
cugugucaggcgaguccac

SEQ ID NO: 880712 - RNA, 19 nt, Artificial Sequence
  Description of Artificial Sequence: Synthetic oligonucleotide
gugucacggaauccggcua

SEQ ID NO: 880713 - RNA, 19 nt, Artificial Sequence
  Description of Artificial Sequence: Synthetic oligonucleotide
caucaaccucaaaucccaa

SEQ ID NO: 880714 - RNA, 19 nt, Artificial Sequence
  Description of Artificial Sequence: Synthetic oligonucleotide
cucaagcggugucacggaa

SEQ ID NO: 880715 - RNA, 19 nt, Artificial Sequence
  Description of Artificial Sequence: Synthetic oligonucleotide
ugguugcgcguugcucaag

SEQ ID NO: 880716 - RNA, 19 nt, Artificial Sequence
  Description of Artificial Sequence: Synthetic oligonucleotide
agccuucgccauuccacuu

SEQ ID NO: 880717 - RNA, 19 nt, Artificial Sequence
  Description of Artificial Sequence: Synthetic oligonucleotide
cgugguugcgcguugcuca

SEQ ID NO: 880718 - RNA, 19 nt, Artificial Sequence
  Description of Artificial Sequence: Synthetic oligonucleotide
ugggugcuuguguguccac

SEQ ID NO: 880719 - RNA, 19 nt, Artificial Sequence
  Description of Artificial Sequence: Synthetic oligonucleotide
gacaggugcuccugucuau

SEQ ID NO: 880720 - RNA, 19 nt, Artificial Sequence
  Description of Artificial Sequence: Synthetic oligonucleotide
gucaggauugagacaggcu

SEQ ID NO: 880721 - RNA, 19 nt, Artificial Sequence
  Description of Artificial Sequence: Synthetic oligonucleotide
augaggcauggcaaugguu

SEQ ID NO: 880722 - RNA, 19 nt, Artificial Sequence
  Description of Artificial Sequence: Synthetic oligonucleotide
gcauggcaaugguuacacc

SEQ ID NO: 880723 - RNA, 19 nt, Artificial Sequence
  Description of Artificial Sequence: Synthetic oligonucleotide
guuacaccccaaggccuuc

SEQ ID NO: 880724 - RNA, 19 nt, Artificial Sequence
  Description of Artificial Sequence: Synthetic oligonucleotide
ccuaagcccagagccuccg

SEQ ID NO: 880725 - RNA, 19 nt, Artificial Sequence
  Description of Artificial Sequence: Synthetic oligonucleotide
gugguugcgcguugcucaa

SEQ ID NO: 880726 - RNA, 19 nt, Artificial Sequence
  Description of Artificial Sequence: Synthetic oligonucleotide
cacguagccccggacgaca

SEQ ID NO: 880727 - RNA, 19 nt, Artificial Sequence
  Description of Artificial Sequence: Synthetic oligonucleotide
ggaacguacauggagccuu

SEQ ID NO: 880728 - RNA, 19 nt, Artificial Sequence
  Description of Artificial Sequence: Synthetic oligonucleotide
ccacggcccucacagcacg

SEQ ID NO: 880729 - RNA, 19 nt, Artificial Sequence
  Description of Artificial Sequence: Synthetic oligonucleotide
gcggugucacggaauccgg

SEQ ID NO: 880730 - RNA, 19 nt, Artificial Sequence
  Description of Artificial Sequence: Synthetic oligonucleotide
gugaguacguagucauauu

SEQ ID NO: 880731 - RNA, 19 nt, Artificial Sequence
  Description of Artificial Sequence: Synthetic oligonucleotide
ccagugaguacguagucau

SEQ ID NO: 880732 - RNA, 19 nt, Artificial Sequence
  Description of Artificial Sequence: Synthetic oligonucleotide
gagcuuuugcacaccggau

SEQ ID NO: 880733 - RNA, 19 nt, Artificial Sequence
  Description of Artificial Sequence: Synthetic oligonucleotide
cgggaucacacacguacac

SEQ ID NO: 880734 - RNA, 19 nt, Artificial Sequence
  Description of Artificial Sequence: Synthetic oligonucleotide
ggaggacuuggaccagaga

SEQ ID NO: 880735 - RNA, 19 nt, Artificial Sequence
  Description of Artificial Sequence: Synthetic oligonucleotide
ccaaugggcauagccugug

SEQ ID NO: 880736 - RNA, 19 nt, Artificial Sequence
  Description of Artificial Sequence: Synthetic oligonucleotide
guacguagucauauuuauu

SEQ ID NO: 880737 - RNA, 19 nt, Artificial Sequence
  Description of Artificial Sequence: Synthetic oligonucleotide
gcucaagcggugucacgga

SEQ ID NO: 880738 - RNA, 19 nt, Artificial Sequence
  Description of Artificial Sequence: Synthetic oligonucleotide
cuacaccgugcugacaggu

SEQ ID NO: 880739 - RNA, 19 nt, Artificial Sequence
  Description of Artificial Sequence: Synthetic oligonucleotide
gcuccugucuauagacgca

SEQ ID NO: 880740 - RNA, 19 nt, Artificial Sequence
  Description of Artificial Sequence: Synthetic oligonucleotide
guggauaaucauagagguu

SEQ ID NO: 880741 - RNA, 19 nt, Artificial Sequence
  Description of Artificial Sequence: Synthetic oligonucleotide
cgcccgguugcccacguag

SEQ ID NO: 880742 - RNA, 19 nt, Artificial Sequence
  Description of Artificial Sequence: Synthetic oligonucleotide
gucgcccaucacgggauca

SEQ ID NO: 880743 - RNA, 19 nt, Artificial Sequence
  Description of Artificial Sequence: Synthetic oligonucleotide
cucuaacaguuaggaccuc

SEQ ID NO: 880744 - RNA, 19 nt, Artificial Sequence
  Description of Artificial Sequence: Synthetic oligonucleotide
ccggacgacauggcucugg

SEQ ID NO: 880745 - RNA, 19 nt, Artificial Sequence
  Description of Artificial Sequence: Synthetic oligonucleotide
guacacgagcugggaguuc

SEQ ID NO: 880746 - RNA, 19 nt, Artificial Sequence
  Description of Artificial Sequence: Synthetic oligonucleotide
cagugcgaucagguaguca

SEQ ID NO: 880747 - RNA, 19 nt, Artificial Sequence
  Description of Artificial Sequence: Synthetic oligonucleotide
guguaaccagugaguacgu

SEQ ID NO: 880748 - RNA, 19 nt, Artificial Sequence
  Description of Artificial Sequence: Synthetic oligonucleotide
guugcauggcagacacagu

SEQ ID NO: 880749 - RNA, 19 nt, Artificial Sequence
  Description of Artificial Sequence: Synthetic oligonucleotide
cgcacguucgguuucuucu

SEQ ID NO: 880750 - RNA, 19 nt, Artificial Sequence
  Description of Artificial Sequence: Synthetic oligonucleotide
cagcgggaacauggccgcc

SEQ ID NO: 880751 - RNA, 19 nt, Artificial Sequence
  Description of Artificial Sequence: Synthetic oligonucleotide
ggcccuuccaaugggcaua

SEQ ID NO: 880752 - RNA, 19 nt, Artificial Sequence
  Description of Artificial Sequence: Synthetic oligonucleotide
acguagccccggacgacau

SEQ ID NO: 880753 - RNA, 19 nt, Artificial Sequence
  Description of Artificial Sequence: Synthetic oligonucleotide
gcguugggucaccguggag

SEQ ID NO: 880754 - RNA, 19 nt, Artificial Sequence
  Description of Artificial Sequence: Synthetic oligonucleotide
ccgcacguucgguuucuuc

SEQ ID NO: 880755 - RNA, 19 nt, Artificial Sequence
  Description of Artificial Sequence: Synthetic oligonucleotide
cagaucgugguugcgcguu

SEQ ID NO: 880756 - RNA, 19 nt, Artificial Sequence
  Description of Artificial Sequence: Synthetic oligonucleotide
caggccgcacguucgguuu

SEQ ID NO: 880757 - RNA, 19 nt, Artificial Sequence
  Description of Artificial Sequence: Synthetic oligonucleotide
gugcgaucagguagucagu

SEQ ID NO: 880758 - RNA, 19 nt, Artificial Sequence
  Description of Artificial Sequence: Synthetic oligonucleotide
ggaugcguugggucaccgu

SEQ ID NO: 880759 - RNA, 19 nt, Artificial Sequence
  Description of Artificial Sequence: Synthetic oligonucleotide
ccaaaaccugcagcgggaa

SEQ ID NO: 880760 - RNA, 19 nt, Artificial Sequence
  Description of Artificial Sequence: Synthetic oligonucleotide
gcagaucgugguugcgcgu

SEQ ID NO: 880761 - RNA, 19 nt, Artificial Sequence
  Description of Artificial Sequence: Synthetic oligonucleotide
ggaacauggccgcccgguu

SEQ ID NO: 880762 - RNA, 19 nt, Artificial Sequence
  Description of Artificial Sequence: Synthetic oligonucleotide
ccccggacgacauggcucu

SEQ ID NO: 880763 - RNA, 19 nt, Artificial Sequence
  Description of Artificial Sequence: Synthetic oligonucleotide
cggcuacccaggccgcacg

SEQ ID NO: 880764 - RNA, 19 nt, Artificial Sequence
  Description of Artificial Sequence: Synthetic oligonucleotide
cagcuacaccgugcugaca

SEQ ID NO: 880765 - RNA, 19 nt, Artificial Sequence
  Description of Artificial Sequence: Synthetic oligonucleotide
ccuucgccauuccacuugu

SEQ ID NO: 880766 - RNA, 19 nt, Artificial Sequence
  Description of Artificial Sequence: Synthetic oligonucleotide
ggcuacccaggccgcacgu

SEQ ID NO: 880767 - RNA, 19 nt, Artificial Sequence
  Description of Artificial Sequence: Synthetic oligonucleotide
caucaggcuuccgcauccu

SEQ ID NO: 880768 - RNA, 19 nt, Artificial Sequence
  Description of Artificial Sequence: Synthetic oligonucleotide
cguagccccggacgacaug

SEQ ID NO: 880769 - RNA, 19 nt, Artificial Sequence
  Description of Artificial Sequence: Synthetic oligonucleotide
ggacgacauggcucuggau

SEQ ID NO: 880770 - RNA, 19 nt, Artificial Sequence
  Description of Artificial Sequence: Synthetic oligonucleotide
gcgaguccacggcccucac

SEQ ID NO: 880771 - RNA, 19 nt, Artificial Sequence
  Description of Artificial Sequence: Synthetic oligonucleotide
ggccgcccgguugcccacg

SEQ ID NO: 880772 - RNA, 19 nt, Artificial Sequence
  Description of Artificial Sequence: Synthetic oligonucleotide
ccguggagccaucaggcuu

SEQ ID NO: 880773 - RNA, 19 nt, Artificial Sequence
  Description of Artificial Sequence: Synthetic oligonucleotide
gcacaccggaugguccugu

SEQ ID NO: 880774 - RNA, 19 nt, Artificial Sequence
  Description of Artificial Sequence: Synthetic oligonucleotide
ccauccggaugcguugggu

SEQ ID NO: 880775 - RNA, 19 nt, Artificial Sequence
  Description of Artificial Sequence: Synthetic oligonucleotide
ggccgcacguucgguuucu

SEQ ID NO: 880776 - RNA, 19 nt, Artificial Sequence
  Description of Artificial Sequence: Synthetic oligonucleotide
cguacacgagcugggaguu

SEQ ID NO: 880777 - RNA, 19 nt, Artificial Sequence
  Description of Artificial Sequence: Synthetic oligonucleotide
cgcccaucacgggaucaca

SEQ ID NO: 880778 - RNA, 19 nt, Artificial Sequence
  Description of Artificial Sequence: Synthetic oligonucleotide
cccggacgacauggcucug

SEQ ID NO: 880779 - RNA, 19 nt, Artificial Sequence
  Description of Artificial Sequence: Synthetic oligonucleotide
gccgcccgguugcccacgu

SEQ ID NO: 880780 - RNA, 19 nt, Artificial Sequence
  Description of Artificial Sequence: Synthetic oligonucleotide
gccgcacguucgguuucuu

SEQ ID NO: 880781 - RNA, 19 nt, Artificial Sequence
  Description of Artificial Sequence: Synthetic oligonucleotide
ccgcccgguugcccacgua

SEQ ID NO: 880782 - RNA, 19 nt, Artificial Sequence
  Description of Artificial Sequence: Synthetic oligonucleotide
uuaagcaacccacugaagg

SEQ ID NO: 880783 - RNA, 19 nt, Artificial Sequence
  Description of Artificial Sequence: Synthetic oligonucleotide
ucuggaaaugcgaagagcg

SEQ ID NO: 880784 - RNA, 19 nt, Artificial Sequence
  Description of Artificial Sequence: Synthetic oligonucleotide
aaacauagcagccugcggg

SEQ ID NO: 880785 - RNA, 19 nt, Artificial Sequence
  Description of Artificial Sequence: Synthetic oligonucleotide
aaugccaucauucggcuuc

SEQ ID NO: 880786 - RNA, 19 nt, Artificial Sequence
  Description of Artificial Sequence: Synthetic oligonucleotide
gaagcuauggcucaggagc

SEQ ID NO: 880787 - RNA, 19 nt, Artificial Sequence
  Description of Artificial Sequence: Synthetic oligonucleotide
gacgaugugugucagaagg

SEQ ID NO: 880788 - RNA, 19 nt, Artificial Sequence
  Description of Artificial Sequence: Synthetic oligonucleotide
aagucagaaaucuuaagca

SEQ ID NO: 880789 - RNA, 19 nt, Artificial Sequence
  Description of Artificial Sequence: Synthetic oligonucleotide
acuaauaguacucucguug

SEQ ID NO: 880790 - RNA, 19 nt, Artificial Sequence
  Description of Artificial Sequence: Synthetic oligonucleotide
aggaguguggauuugugcc

SEQ ID NO: 880791 - RNA, 19 nt, Artificial Sequence
  Description of Artificial Sequence: Synthetic oligonucleotide
acaugauuccugcugagcc

SEQ ID NO: 880792 - RNA, 19 nt, Artificial Sequence
  Description of Artificial Sequence: Synthetic oligonucleotide
aauucggcauaccaucccc

SEQ ID NO: 880793 - RNA, 19 nt, Artificial Sequence
  Description of Artificial Sequence: Synthetic oligonucleotide
gaaacuaauaguacucucg

SEQ ID NO: 880794 - RNA, 19 nt, Artificial Sequence
  Description of Artificial Sequence: Synthetic oligonucleotide
aaugucugagacugggugg

SEQ ID NO: 880795 - RNA, 19 nt, Artificial Sequence
  Description of Artificial Sequence: Synthetic oligonucleotide
uguagaaacuaauaguacu

SEQ ID NO: 880796 - RNA, 19 nt, Artificial Sequence
  Description of Artificial Sequence: Synthetic oligonucleotide
gacaaggucaucuugggug

SEQ ID NO: 880797 - RNA, 19 nt, Artificial Sequence
  Description of Artificial Sequence: Synthetic oligonucleotide
aaauucggcauaccauccc

SEQ ID NO: 880798 - RNA, 19 nt, Artificial Sequence
  Description of Artificial Sequence: Synthetic oligonucleotide
ucagaaaucuuaagcaacc

SEQ ID NO: 880799 - RNA, 19 nt, Artificial Sequence
  Description of Artificial Sequence: Synthetic oligonucleotide
ugggucuacacucaguucc

SEQ ID NO: 880800 - RNA, 19 nt, Artificial Sequence
  Description of Artificial Sequence: Synthetic oligonucleotide
aaacuaauaguacucucgu

SEQ ID NO: 880801 - RNA, 19 nt, Artificial Sequence
  Description of Artificial Sequence: Synthetic oligonucleotide
agcacgaacauccagugug

SEQ ID NO: 880802 - RNA, 19 nt, Artificial Sequence
  Description of Artificial Sequence: Synthetic oligonucleotide
ucuuaagcaacccacugaa

SEQ ID NO: 880803 - RNA, 19 nt, Artificial Sequence
  Description of Artificial Sequence: Synthetic oligonucleotide
uguucguccauccauggcu

SEQ ID NO: 880804 - RNA, 19 nt, Artificial Sequence
  Description of Artificial Sequence: Synthetic oligonucleotide
ucucguuguccuuuuaggg

SEQ ID NO: 880805 - RNA, 19 nt, Artificial Sequence
  Description of Artificial Sequence: Synthetic oligonucleotide
  modified_base (10)..(10): a, c, u, g, unknown or other
uaagcaaggnggauaggcu

SEQ ID NO: 880806 - RNA, 19 nt, Artificial Sequence
  Description of Artificial Sequence: Synthetic oligonucleotide
gaaugucugagacugggug

SEQ ID NO: 880807 - RNA, 19 nt, Artificial Sequence
  Description of Artificial Sequence: Synthetic oligonucleotide
gaugcagcagacucaaccc

SEQ ID NO: 880808 - RNA, 19 nt, Artificial Sequence
  Description of Artificial Sequence: Synthetic oligonucleotide
  modified_base (9)..(9): a, c, u, g, unknown or other
aagcaaggnggauaggcug

SEQ ID NO: 880809 - RNA, 19 nt, Artificial Sequence
  Description of Artificial Sequence: Synthetic oligonucleotide
ugcaugaaacccauguaug

SEQ ID NO: 880810 - RNA, 19 nt, Artificial Sequence
  Description of Artificial Sequence: Synthetic oligonucleotide
ugaaacauagcagccugcg

SEQ ID NO: 880811 - RNA, 19 nt, Artificial Sequence
  Description of Artificial Sequence: Synthetic oligonucleotide
aagccuaucggucucggcu

SEQ ID NO: 880812 - RNA, 19 nt, Artificial Sequence
  Description of Artificial Sequence: Synthetic oligonucleotide
aagguguugaucaauacau

SEQ ID NO: 880813 - RNA, 19 nt, Artificial Sequence
  Description of Artificial Sequence: Synthetic oligonucleotide
ucugacuucggugggaccg

SEQ ID NO: 880814 - RNA, 19 nt, Artificial Sequence
  Description of Artificial Sequence: Synthetic oligonucleotide
  modified_base (5)..(5): a, c, u, g, unknown or other
aaggnggauaggcugccuc

SEQ ID NO: 880815 - RNA, 19 nt, Artificial Sequence
  Description of Artificial Sequence: Synthetic oligonucleotide
  modified_base (4)..(4): a, c, u, g, unknown or other
aggnggauaggcugccucc

SEQ ID NO: 880816 - RNA, 19 nt, Artificial Sequence
  Description of Artificial Sequence: Synthetic oligonucleotide
  modified_base (11)..(11): a, c, u, g, unknown or other
cuaagcaaggnggauaggc

SEQ ID NO: 880817 - RNA, 19 nt, Artificial Sequence
  Description of Artificial Sequence: Synthetic oligonucleotide
acaaggucaucuugggugg

SEQ ID NO: 880818 - RNA, 19 nt, Artificial Sequence
  Description of Artificial Sequence: Synthetic oligonucleotide
cucguuguccuuuuagggg

SEQ ID NO: 880819 - RNA, 19 nt, Artificial Sequence
  Description of Artificial Sequence: Synthetic oligonucleotide
cuuagugacacccacuuca

SEQ ID NO: 880820 - RNA, 19 nt, Artificial Sequence
  Description of Artificial Sequence: Synthetic oligonucleotide
uuuagggguccccacacug

SEQ ID NO: 880821 - RNA, 19 nt, Artificial Sequence
  Description of Artificial Sequence: Synthetic oligonucleotide
agggcggucgaccaguggc

SEQ ID NO: 880822 - RNA, 19 nt, Artificial Sequence
  Description of Artificial Sequence: Synthetic oligonucleotide
cauauacugcaguaguccc

SEQ ID NO: 880823 - RNA, 19 nt, Artificial Sequence
  Description of Artificial Sequence: Synthetic oligonucleotide
cucaggagcguuuggauag

SEQ ID NO: 880824 - RNA, 19 nt, Artificial Sequence
  Description of Artificial Sequence: Synthetic oligonucleotide
agaaaucuuaagcaaccca

SEQ ID NO: 880825 - RNA, 19 nt, Artificial Sequence
  Description of Artificial Sequence: Synthetic oligonucleotide
uagacaaggucaucuuggg

SEQ ID NO: 880826 - RNA, 19 nt, Artificial Sequence
  Description of Artificial Sequence: Synthetic oligonucleotide
gaagguguugaucaauaca

SEQ ID NO: 880827 - RNA, 19 nt, Artificial Sequence
  Description of Artificial Sequence: Synthetic oligonucleotide
uguaugacgaggagagcug

SEQ ID NO: 880828 - RNA, 19 nt, Artificial Sequence
  Description of Artificial Sequence: Synthetic oligonucleotide
aucugacguguguagaaac

SEQ ID NO: 880829 - RNA, 19 nt, Artificial Sequence
  Description of Artificial Sequence: Synthetic oligonucleotide
uaagcaacccacugaaggu

SEQ ID NO: 880830 - RNA, 19 nt, Artificial Sequence
  Description of Artificial Sequence: Synthetic oligonucleotide
uucaguugggcccgggucc

SEQ ID NO: 880831 - RNA, 19 nt, Artificial Sequence
  Description of Artificial Sequence: Synthetic oligonucleotide
ugcuuuacugcacuccucu

SEQ ID NO: 880832 - RNA, 19 nt, Artificial Sequence
  Description of Artificial Sequence: Synthetic oligonucleotide
uccaaauucggcauaccau

SEQ ID NO: 880833 - RNA, 19 nt, Artificial Sequence
  Description of Artificial Sequence: Synthetic oligonucleotide
uugagagaguggcugcggg

SEQ ID NO: 880834 - RNA, 19 nt, Artificial Sequence
  Description of Artificial Sequence: Synthetic oligonucleotide
ucgcaagaggcccagcugc

SEQ ID NO: 880835 - RNA, 19 nt, Artificial Sequence
  Description of Artificial Sequence: Synthetic oligonucleotide
agggucugaagggugaagc

SEQ ID NO: 880836 - RNA, 19 nt, Artificial Sequence
  Description of Artificial Sequence: Synthetic oligonucleotide
caugauuccugcugagccg

SEQ ID NO: 880837 - RNA, 19 nt, Artificial Sequence
  Description of Artificial Sequence: Synthetic oligonucleotide
caugaagaucuugagguag

SEQ ID NO: 880838 - RNA, 19 nt, Artificial Sequence
  Description of Artificial Sequence: Synthetic oligonucleotide
caaauucggcauaccaucc

SEQ ID NO: 880839 - RNA, 19 nt, Artificial Sequence
  Description of Artificial Sequence: Synthetic oligonucleotide
uggaaaugcgaagagcggc

SEQ ID NO: 880840 - RNA, 19 nt, Artificial Sequence
  Description of Artificial Sequence: Synthetic oligonucleotide
uuaggaguguggauuugug

SEQ ID NO: 880841 - RNA, 19 nt, Artificial Sequence
  Description of Artificial Sequence: Synthetic oligonucleotide
caucauucggcuucccggg

SEQ ID NO: 880842 - RNA, 19 nt, Artificial Sequence
  Description of Artificial Sequence: Synthetic oligonucleotide
ucugacguguguagaaacu

SEQ ID NO: 880843 - RNA, 19 nt, Artificial Sequence
  Description of Artificial Sequence: Synthetic oligonucleotide
ugaagcuauggcucaggag

SEQ ID NO: 880844 - RNA, 19 nt, Artificial Sequence
  Description of Artificial Sequence: Synthetic oligonucleotide
ucguuguccuuuuaggggu

SEQ ID NO: 880845 - RNA, 19 nt, Artificial Sequence
  Description of Artificial Sequence: Synthetic oligonucleotide
ugugcggcaucccugggug

SEQ ID NO: 880846 - RNA, 19 nt, Artificial Sequence
  Description of Artificial Sequence: Synthetic oligonucleotide
uuuggauaguggcuggguc

SEQ ID NO: 880847 - RNA, 19 nt, Artificial Sequence
  Description of Artificial Sequence: Synthetic oligonucleotide
auaguggcugggucuacac

SEQ ID NO: 880848 - RNA, 19 nt, Artificial Sequence
  Description of Artificial Sequence: Synthetic oligonucleotide
aguagauucucugccagug

SEQ ID NO: 880849 - RNA, 19 nt, Artificial Sequence
  Description of Artificial Sequence: Synthetic oligonucleotide
gauagcugagucccugcag

SEQ ID NO: 880850 - RNA, 19 nt, Artificial Sequence
  Description of Artificial Sequence: Synthetic oligonucleotide
ugggacucugcuuuacugc

SEQ ID NO: 880851 - RNA, 19 nt, Artificial Sequence
  Description of Artificial Sequence: Synthetic oligonucleotide
gauuugugccccgaggcag

SEQ ID NO: 880852 - RNA, 19 nt, Artificial Sequence
  Description of Artificial Sequence: Synthetic oligonucleotide
cucccuaguucauggaagg

SEQ ID NO: 880853 - RNA, 19 nt, Artificial Sequence
  Description of Artificial Sequence: Synthetic oligonucleotide
ugucagaaggucucugugu

SEQ ID NO: 880854 - RNA, 19 nt, Artificial Sequence
  Description of Artificial Sequence: Synthetic oligonucleotide
aaacccauguauggccugg

SEQ ID NO: 880855 - RNA, 19 nt, Artificial Sequence
  Description of Artificial Sequence: Synthetic oligonucleotide
gcaugaaacccauguaugg

SEQ ID NO: 880856 - RNA, 19 nt, Artificial Sequence
  Description of Artificial Sequence: Synthetic oligonucleotide
ucgaccaguggccaucuca

SEQ ID NO: 880857 - RNA, 19 nt, Artificial Sequence
  Description of Artificial Sequence: Synthetic oligonucleotide
ucucauggagauagcugag

SEQ ID NO: 880858 - RNA, 19 nt, Artificial Sequence
  Description of Artificial Sequence: Synthetic oligonucleotide
acucucguuguccuuuuag

SEQ ID NO: 880859 - RNA, 19 nt, Artificial Sequence
  Description of Artificial Sequence: Synthetic oligonucleotide
  modified_base (8)..(8): a, c, u, g, unknown or other
agcaaggnggauaggcugc

SEQ ID NO: 880860 - RNA, 19 nt, Artificial Sequence
  Description of Artificial Sequence: Synthetic oligonucleotide
cuggaaaugcgaagagcgg

SEQ ID NO: 880861 - RNA, 19 nt, Artificial Sequence
  Description of Artificial Sequence: Synthetic oligonucleotide
auaguacucucguuguccu

SEQ ID NO: 880862 - RNA, 19 nt, Artificial Sequence
  Description of Artificial Sequence: Synthetic oligonucleotide
cugguguggcucuugcucg

SEQ ID NO: 880863 - RNA, 19 nt, Artificial Sequence
  Description of Artificial Sequence: Synthetic oligonucleotide
ccuaguucauggaagggcg

SEQ ID NO: 880864 - RNA, 19 nt, Artificial Sequence
  Description of Artificial Sequence: Synthetic oligonucleotide
ugaagguguugaucaauac

SEQ ID NO: 880865 - RNA, 19 nt, Artificial Sequence
  Description of Artificial Sequence: Synthetic oligonucleotide
uguggauuugugccccgag

SEQ ID NO: 880866 - RNA, 19 nt, Artificial Sequence
  Description of Artificial Sequence: Synthetic oligonucleotide
aagcaacccacugaaggug

SEQ ID NO: 880867 - RNA, 19 nt, Artificial Sequence
  Description of Artificial Sequence: Synthetic oligonucleotide
ggagcguuuggauaguggc

SEQ ID NO: 880868 - RNA, 19 nt, Artificial Sequence
  Description of Artificial Sequence: Synthetic oligonucleotide
ccaccugaaacauagcagc

SEQ ID NO: 880869 - RNA, 19 nt, Artificial Sequence
  Description of Artificial Sequence: Synthetic oligonucleotide
uugacugugugcggcaucc

SEQ ID NO: 880870 - RNA, 19 nt, Artificial Sequence
  Description of Artificial Sequence: Synthetic oligonucleotide
ugacguguguagaaacuaa

SEQ ID NO: 880871 - RNA, 19 nt, Artificial Sequence
  Description of Artificial Sequence: Synthetic oligonucleotide
ucucgaagccuaucggucu

SEQ ID NO: 880872 - RNA, 19 nt, Artificial Sequence
  Description of Artificial Sequence: Synthetic oligonucleotide
aacuaauaguacucucguu

SEQ ID NO: 880873 - RNA, 19 nt, Artificial Sequence
  Description of Artificial Sequence: Synthetic oligonucleotide
ugacgaggagagcuggggc

SEQ ID NO: 880874 - RNA, 19 nt, Artificial Sequence
  Description of Artificial Sequence: Synthetic oligonucleotide
guggauuugugccccgagg

SEQ ID NO: 880875 - RNA, 19 nt, Artificial Sequence
  Description of Artificial Sequence: Synthetic oligonucleotide
ucugcaugaaacccaugua

SEQ ID NO: 880876 - RNA, 19 nt, Artificial Sequence
  Description of Artificial Sequence: Synthetic oligonucleotide
agcguuuggauaguggcug

SEQ ID NO: 880877 - RNA, 19 nt, Artificial Sequence
  Description of Artificial Sequence: Synthetic oligonucleotide
aggugccaaagucagaaau

SEQ ID NO: 880878 - RNA, 19 nt, Artificial Sequence
  Description of Artificial Sequence: Synthetic oligonucleotide
agccuaucggucucggcuc

SEQ ID NO: 880879 - RNA, 19 nt, Artificial Sequence
  Description of Artificial Sequence: Synthetic oligonucleotide
caaaagugcaggccccagg

SEQ ID NO: 880880 - RNA, 19 nt, Artificial Sequence
  Description of Artificial Sequence: Synthetic oligonucleotide
uguacaugcccaccugaaa

SEQ ID NO: 880881 - RNA, 19 nt, Artificial Sequence
  Description of Artificial Sequence: Synthetic oligonucleotide
uaauaguacucucguuguc

SEQ ID NO: 880882 - RNA, 19 nt, Artificial Sequence
  Description of Artificial Sequence: Synthetic oligonucleotide
uucaaaagguucggaggag

SEQ ID NO: 880883 - RNA, 19 nt, Artificial Sequence
  Description of Artificial Sequence: Synthetic oligonucleotide
ugaccuuuaaugccaucau

SEQ ID NO: 880884 - RNA, 19 nt, Artificial Sequence
  Description of Artificial Sequence: Synthetic oligonucleotide
ucagccaggacaucucgaa

SEQ ID NO: 880885 - RNA, 19 nt, Artificial Sequence
  Description of Artificial Sequence: Synthetic oligonucleotide
guucauggaagggcggucg

SEQ ID NO: 880886 - RNA, 19 nt, Artificial Sequence
  Description of Artificial Sequence: Synthetic oligonucleotide
ucugugcaaggugugauuc

SEQ ID NO: 880887 - RNA, 19 nt, Artificial Sequence
  Description of Artificial Sequence: Synthetic oligonucleotide
aaaugcgaagagcggccca

SEQ ID NO: 880888 - RNA, 19 nt, Artificial Sequence
  Description of Artificial Sequence: Synthetic oligonucleotide
uuagggguccccacacuga

SEQ ID NO: 880889 - RNA, 19 nt, Artificial Sequence
  Description of Artificial Sequence: Synthetic oligonucleotide
cuuaagcaacccacugaag

SEQ ID NO: 880890 - RNA, 19 nt, Artificial Sequence
  Description of Artificial Sequence: Synthetic oligonucleotide
ugagagaguggcugcgggc

SEQ ID NO: 880891 - RNA, 19 nt, Artificial Sequence
  Description of Artificial Sequence: Synthetic oligonucleotide
aucucgaagccuaucgguc

SEQ ID NO: 880892 - RNA, 19 nt, Artificial Sequence
  Description of Artificial Sequence: Synthetic oligonucleotide
ggguguaugacgaggagag

SEQ ID NO: 880893 - RNA, 19 nt, Artificial Sequence
  Description of Artificial Sequence: Synthetic oligonucleotide
uuguacaugcccaccugaa

SEQ ID NO: 880894 - RNA, 19 nt, Artificial Sequence
  Description of Artificial Sequence: Synthetic oligonucleotide
augugugucagaaggucuc

SEQ ID NO: 880895 - RNA, 19 nt, Artificial Sequence
  Description of Artificial Sequence: Synthetic oligonucleotide
ccaaauucggcauaccauc

SEQ ID NO: 880896 - RNA, 19 nt, Artificial Sequence
  Description of Artificial Sequence: Synthetic oligonucleotide
cuuugagagaguggcugcg

SEQ ID NO: 880897 - RNA, 19 nt, Artificial Sequence
  Description of Artificial Sequence: Synthetic oligonucleotide
uccgguucaaaagguucgg

SEQ ID NO: 880898 - RNA, 19 nt, Artificial Sequence
  Description of Artificial Sequence: Synthetic oligonucleotide
aggugugauuccugccagc

SEQ ID NO: 880899 - RNA, 19 nt, Artificial Sequence
  Description of Artificial Sequence: Synthetic oligonucleotide
guccgguucaaaagguucg

SEQ ID NO: 880900 - RNA, 19 nt, Artificial Sequence
  Description of Artificial Sequence: Synthetic oligonucleotide
ccaucauucggcuucccgg

SEQ ID NO: 880901 - RNA, 19 nt, Artificial Sequence
  Description of Artificial Sequence: Synthetic oligonucleotide
cugaaacauagcagccugc

SEQ ID NO: 880902 - RNA, 19 nt, Artificial Sequence
  Description of Artificial Sequence: Synthetic oligonucleotide
guaugacgaggagagcugg

SEQ ID NO: 880903 - RNA, 19 nt, Artificial Sequence
  Description of Artificial Sequence: Synthetic oligonucleotide
augacgaggagagcugggg

SEQ ID NO: 880904 - RNA, 19 nt, Artificial Sequence
  Description of Artificial Sequence: Synthetic oligonucleotide
ucggucucggcucgcaaga

SEQ ID NO: 880905 - RNA, 19 nt, Artificial Sequence
  Description of Artificial Sequence: Synthetic oligonucleotide
cuuuacugcacuccucuga

SEQ ID NO: 880906 - RNA, 19 nt, Artificial Sequence
  Description of Artificial Sequence: Synthetic oligonucleotide
agauucucugccagugugg

SEQ ID NO: 880907 - RNA, 19 nt, Artificial Sequence
  Description of Artificial Sequence: Synthetic oligonucleotide
cugggacucugcuuuacug

SEQ ID NO: 880908 - RNA, 19 nt, Artificial Sequence
  Description of Artificial Sequence: Synthetic oligonucleotide
ucauucggcuucccgggga

SEQ ID NO: 880909 - RNA, 19 nt, Artificial Sequence
  Description of Artificial Sequence: Synthetic oligonucleotide
ugggguguaugacgaggag

SEQ ID NO: 880910 - RNA, 19 nt, Artificial Sequence
  Description of Artificial Sequence: Synthetic oligonucleotide
uauggcucaggagcguuug

SEQ ID NO: 880911 - RNA, 19 nt, Artificial Sequence
  Description of Artificial Sequence: Synthetic oligonucleotide
agauagcugagucccugca

SEQ ID NO: 880912 - RNA, 19 nt, Artificial Sequence
  Description of Artificial Sequence: Synthetic oligonucleotide
cacuccucugacuucggug

SEQ ID NO: 880913 - RNA, 19 nt, Artificial Sequence
  Description of Artificial Sequence: Synthetic oligonucleotide
gaaaugcgaagagcggccc

SEQ ID NO: 880914 - RNA, 19 nt, Artificial Sequence
  Description of Artificial Sequence: Synthetic oligonucleotide
aaccagcggaaggaguguc

SEQ ID NO: 880915 - RNA, 19 nt, Artificial Sequence
  Description of Artificial Sequence: Synthetic oligonucleotide
gucaucuuggguggcacag

SEQ ID NO: 880916 - RNA, 19 nt, Artificial Sequence
  Description of Artificial Sequence: Synthetic oligonucleotide
cauggaagggcggucgacc

SEQ ID NO: 880917 - RNA, 19 nt, Artificial Sequence
  Description of Artificial Sequence: Synthetic oligonucleotide
aucauucggcuucccgggg

SEQ ID NO: 880918 - RNA, 19 nt, Artificial Sequence
  Description of Artificial Sequence: Synthetic oligonucleotide
ccauauacugcaguagucc

SEQ ID NO: 880919 - RNA, 19 nt, Artificial Sequence
  Description of Artificial Sequence: Synthetic oligonucleotide
cuaauaguacucucguugu

SEQ ID NO: 880920 - RNA, 19 nt, Artificial Sequence
  Description of Artificial Sequence: Synthetic oligonucleotide
ugucucccuccuuagugac

SEQ ID NO: 880921 - RNA, 19 nt, Artificial Sequence
  Description of Artificial Sequence: Synthetic oligonucleotide
aaugcgaagagcggcccau

SEQ ID NO: 880922 - RNA, 19 nt, Artificial Sequence
  Description of Artificial Sequence: Synthetic oligonucleotide
cucugcuuuacugcacucc

SEQ ID NO: 880923 - RNA, 19 nt, Artificial Sequence
  Description of Artificial Sequence: Synthetic oligonucleotide
ugcucgcugugccaagaug

SEQ ID NO: 880924 - RNA, 19 nt, Artificial Sequence
  Description of Artificial Sequence: Synthetic oligonucleotide
gggaaugucugagacuggg

SEQ ID NO: 880925 - RNA, 19 nt, Artificial Sequence
  Description of Artificial Sequence: Synthetic oligonucleotide
  modified_base (2)..(2): a, c, u, g, unknown or other
gnggauaggcugccuccag

SEQ ID NO: 880926 - RNA, 19 nt, Artificial Sequence
  Description of Artificial Sequence: Synthetic oligonucleotide
gcgguucucauggagauag

SEQ ID NO: 880927 - RNA, 19 nt, Artificial Sequence
  Description of Artificial Sequence: Synthetic oligonucleotide
caucucaaucacagugcag

SEQ ID NO: 880928 - RNA, 19 nt, Artificial Sequence
  Description of Artificial Sequence: Synthetic oligonucleotide
gaucuggcgucugcggagg

SEQ ID NO: 880929 - RNA, 19 nt, Artificial Sequence
  Description of Artificial Sequence: Synthetic oligonucleotide
uucauggaagggcggucga

SEQ ID NO: 880930 - RNA, 19 nt, Artificial Sequence
  Description of Artificial Sequence: Synthetic oligonucleotide
aguucauggaagggcgguc

SEQ ID NO: 880931 - RNA, 19 nt, Artificial Sequence
  Description of Artificial Sequence: Synthetic oligonucleotide
ggaguguggauuugugccc

SEQ ID NO: 880932 - RNA, 19 nt, Artificial Sequence
  Description of Artificial Sequence: Synthetic oligonucleotide
uguggcucuugcucgcugu

SEQ ID NO: 880933 - RNA, 19 nt, Artificial Sequence
  Description of Artificial Sequence: Synthetic oligonucleotide
gacugcgcggcugagcagc

SEQ ID NO: 880934 - RNA, 19 nt, Artificial Sequence
  Description of Artificial Sequence: Synthetic oligonucleotide
gacgcggguuccucggcgg

SEQ ID NO: 880935 - RNA, 19 nt, Artificial Sequence
  Description of Artificial Sequence: Synthetic oligonucleotide
uuugacugugugcggcauc

SEQ ID NO: 880936 - RNA, 19 nt, Artificial Sequence
  Description of Artificial Sequence: Synthetic oligonucleotide
agacucaaccccgaacucu

SEQ ID NO: 880937 - RNA, 19 nt, Artificial Sequence
  Description of Artificial Sequence: Synthetic oligonucleotide
aguguggauuugugccccg

SEQ ID NO: 880938 - RNA, 19 nt, Artificial Sequence
  Description of Artificial Sequence: Synthetic oligonucleotide
uccgacgggagcuggcucu

SEQ ID NO: 880939 - RNA, 19 nt, Artificial Sequence
  Description of Artificial Sequence: Synthetic oligonucleotide
ugcacggucagcggcggag

SEQ ID NO: 880940 - RNA, 19 nt, Artificial Sequence
  Description of Artificial Sequence: Synthetic oligonucleotide
ugcaguagucccugugaaa

SEQ ID NO: 880941 - RNA, 19 nt, Artificial Sequence
  Description of Artificial Sequence: Synthetic oligonucleotide
cuuguacaugcccaccuga

SEQ ID NO: 880942 - RNA, 19 nt, Artificial Sequence
  Description of Artificial Sequence: Synthetic oligonucleotide
ucaaccccgaacucuccuc

SEQ ID NO: 880943 - RNA, 19 nt, Artificial Sequence
  Description of Artificial Sequence: Synthetic oligonucleotide
  modified_base (14)..(14): a, c, u, g, unknown or other
gaccuaagcaaggnggaua

SEQ ID NO: 880944 - RNA, 19 nt, Artificial Sequence
  Description of Artificial Sequence: Synthetic oligonucleotide
augauuccugcugagccga

SEQ ID NO: 880945 - RNA, 19 nt, Artificial Sequence
  Description of Artificial Sequence: Synthetic oligonucleotide
guggcugggacgaugugug

SEQ ID NO: 880946 - RNA, 19 nt, Artificial Sequence
  Description of Artificial Sequence: Synthetic oligonucleotide
augcgguucucauggagau

SEQ ID NO: 880947 - RNA, 19 nt, Artificial Sequence
  Description of Artificial Sequence: Synthetic oligonucleotide
guggcugcgggcucugaag

SEQ ID NO: 880948 - RNA, 19 nt, Artificial Sequence
  Description of Artificial Sequence: Synthetic oligonucleotide
auauacugcaguagucccu

SEQ ID NO: 880949 - RNA, 19 nt, Artificial Sequence
  Description of Artificial Sequence: Synthetic oligonucleotide
cauacguccuggccucugc

SEQ ID NO: 880950 - RNA, 19 nt, Artificial Sequence
  Description of Artificial Sequence: Synthetic oligonucleotide
ugggaccgcuuucuucucc

SEQ ID NO: 880951 - RNA, 19 nt, Artificial Sequence
  Description of Artificial Sequence: Synthetic oligonucleotide
ccugaaacauagcagccug

SEQ ID NO: 880952 - RNA, 19 nt, Artificial Sequence
  Description of Artificial Sequence: Synthetic oligonucleotide
ggaaaugcgaagagcggcc

SEQ ID NO: 880953 - RNA, 19 nt, Artificial Sequence
  Description of Artificial Sequence: Synthetic oligonucleotide
gacucaaccccgaacucuc

SEQ ID NO: 880954 - RNA, 19 nt, Artificial Sequence
  Description of Artificial Sequence: Synthetic oligonucleotide
ugucgcggugcacgaugcg

SEQ ID NO: 880955 - RNA, 19 nt, Artificial Sequence
  Description of Artificial Sequence: Synthetic oligonucleotide
acguccuggccucugcaug

SEQ ID NO: 880956 - RNA, 19 nt, Artificial Sequence
  Description of Artificial Sequence: Synthetic oligonucleotide
uucaccgcuucuggaaaug

SEQ ID NO: 880957 - RNA, 19 nt, Artificial Sequence
  Description of Artificial Sequence: Synthetic oligonucleotide
ucugaagcccgggcauacg

SEQ ID NO: 880958 - RNA, 19 nt, Artificial Sequence
  Description of Artificial Sequence: Synthetic oligonucleotide
gaagccuaucggucucggc

SEQ ID NO: 880959 - RNA, 19 nt, Artificial Sequence
  Description of Artificial Sequence: Synthetic oligonucleotide
cuugggccucagcugacag

SEQ ID NO: 880960 - RNA, 19 nt, Artificial Sequence
  Description of Artificial Sequence: Synthetic oligonucleotide
ucucggcucgcaagaggcc

SEQ ID NO: 880961 - RNA, 19 nt, Artificial Sequence
  Description of Artificial Sequence: Synthetic oligonucleotide
ugcgaagagcggcccauuc

SEQ ID NO: 880962 - RNA, 19 nt, Artificial Sequence
  Description of Artificial Sequence: Synthetic oligonucleotide
aggagcguuuggauagugg

SEQ ID NO: 880963 - RNA, 19 nt, Artificial Sequence
  Description of Artificial Sequence: Synthetic oligonucleotide
ucgaagccuaucggucucg

SEQ ID NO: 880964 - RNA, 19 nt, Artificial Sequence
  Description of Artificial Sequence: Synthetic oligonucleotide
ugcacuccucugacuucgg

SEQ ID NO: 880965 - RNA, 19 nt, Artificial Sequence
  Description of Artificial Sequence: Synthetic oligonucleotide
ugugugucagaaggucucu

SEQ ID NO: 880966 - RNA, 19 nt, Artificial Sequence
  Description of Artificial Sequence: Synthetic oligonucleotide
gauaggcugccuccaggca

SEQ ID NO: 880967 - RNA, 19 nt, Artificial Sequence
  Description of Artificial Sequence: Synthetic oligonucleotide
ucuugcucgcugugccaag

SEQ ID NO: 880968 - RNA, 19 nt, Artificial Sequence
  Description of Artificial Sequence: Synthetic oligonucleotide
guguaugacgaggagagcu

SEQ ID NO: 880969 - RNA, 19 nt, Artificial Sequence
  Description of Artificial Sequence: Synthetic oligonucleotide
cuguucguccauccauggc

SEQ ID NO: 880970 - RNA, 19 nt, Artificial Sequence
  Description of Artificial Sequence: Synthetic oligonucleotide
augucgcggugcacgaugc

SEQ ID NO: 880971 - RNA, 19 nt, Artificial Sequence
  Description of Artificial Sequence: Synthetic oligonucleotide
ggucuugggaaugucugag

SEQ ID NO: 880972 - RNA, 19 nt, Artificial Sequence
  Description of Artificial Sequence: Synthetic oligonucleotide
aaggucaucuuggguggca

SEQ ID NO: 880973 - RNA, 19 nt, Artificial Sequence
  Description of Artificial Sequence: Synthetic oligonucleotide
cucggcucgcaagaggccc

SEQ ID NO: 880974 - RNA, 19 nt, Artificial Sequence
  Description of Artificial Sequence: Synthetic oligonucleotide
cucgcaagaggcccagcug

SEQ ID NO: 880975 - RNA, 19 nt, Artificial Sequence
  Description of Artificial Sequence: Synthetic oligonucleotide
acuucggugggaccgcuuu

SEQ ID NO: 880976 - RNA, 19 nt, Artificial Sequence
  Description of Artificial Sequence: Synthetic oligonucleotide
guucguccauccauggcug

SEQ ID NO: 880977 - RNA, 19 nt, Artificial Sequence
  Description of Artificial Sequence: Synthetic oligonucleotide
ugguguggcucuugcucgc

SEQ ID NO: 880978 - RNA, 19 nt, Artificial Sequence
  Description of Artificial Sequence: Synthetic oligonucleotide
gagccgcccggacugcgcg

SEQ ID NO: 880979 - RNA, 19 nt, Artificial Sequence
  Description of Artificial Sequence: Synthetic oligonucleotide
  modified_base (19)..(19): a, c, u, g, unknown or other
acacugaccuaagcaaggn

SEQ ID NO: 880980 - RNA, 19 nt, Artificial Sequence
  Description of Artificial Sequence: Synthetic oligonucleotide
gugaagcuauggcucagga

SEQ ID NO: 880981 - RNA, 19 nt, Artificial Sequence
  Description of Artificial Sequence: Synthetic oligonucleotide
ucggcggacgggcuccuca

SEQ ID NO: 880982 - RNA, 19 nt, Artificial Sequence
  Description of Artificial Sequence: Synthetic oligonucleotide
cccauucaaaagugcaggc

SEQ ID NO: 880983 - RNA, 19 nt, Artificial Sequence
  Description of Artificial Sequence: Synthetic oligonucleotide
cugcaugaaacccauguau

SEQ ID NO: 880984 - RNA, 19 nt, Artificial Sequence
  Description of Artificial Sequence: Synthetic oligonucleotide
gaucugacguguguagaaa

SEQ ID NO: 880985 - RNA, 19 nt, Artificial Sequence
  Description of Artificial Sequence: Synthetic oligonucleotide
auacguccuggccucugca

SEQ ID NO: 880986 - RNA, 19 nt, Artificial Sequence
  Description of Artificial Sequence: Synthetic oligonucleotide
cauucggcuucccggggac

SEQ ID NO: 880987 - RNA, 19 nt, Artificial Sequence
  Description of Artificial Sequence: Synthetic oligonucleotide
acggucagcggcggaggcc

SEQ ID NO: 880988 - RNA, 19 nt, Artificial Sequence
  Description of Artificial Sequence: Synthetic oligonucleotide
aggaucugacguguguaga

SEQ ID NO: 880989 - RNA, 19 nt, Artificial Sequence
  Description of Artificial Sequence: Synthetic oligonucleotide
ggucucggcucgcaagagg

SEQ ID NO: 880990 - RNA, 19 nt, Artificial Sequence
  Description of Artificial Sequence: Synthetic oligonucleotide
gacacccacuucaguuggg

SEQ ID NO: 880991 - RNA, 19 nt, Artificial Sequence
  Description of Artificial Sequence: Synthetic oligonucleotide
ccauguauggccuggugca

SEQ ID NO: 880992 - RNA, 19 nt, Artificial Sequence
  Description of Artificial Sequence: Synthetic oligonucleotide
cugggucuacacucaguuc

SEQ ID NO: 880993 - RNA, 19 nt, Artificial Sequence
  Description of Artificial Sequence: Synthetic oligonucleotide
cuccucugacuucgguggg

SEQ ID NO: 880994 - RNA, 19 nt, Artificial Sequence
  Description of Artificial Sequence: Synthetic oligonucleotide
gccaagauggcucuccaaa

SEQ ID NO: 880995 - RNA, 19 nt, Artificial Sequence
  Description of Artificial Sequence: Synthetic oligonucleotide
acccauguauggccuggug

SEQ ID NO: 880996 - RNA, 19 nt, Artificial Sequence
  Description of Artificial Sequence: Synthetic oligonucleotide
uucccggggaccaggggua

SEQ ID NO: 880997 - RNA, 19 nt, Artificial Sequence
  Description of Artificial Sequence: Synthetic oligonucleotide
  modified_base (15)..(15): a, c, u, g, unknown or other
ugaccuaagcaaggnggau

SEQ ID NO: 880998 - RNA, 19 nt, Artificial Sequence
  Description of Artificial Sequence: Synthetic oligonucleotide
ggagauagcugagucccug

SEQ ID NO: 880999 - RNA, 19 nt, Artificial Sequence
  Description of Artificial Sequence: Synthetic oligonucleotide
uaucggucucggcucgcaa

SEQ ID NO: 881000 - RNA, 19 nt, Artificial Sequence
  Description of Artificial Sequence: Synthetic oligonucleotide
gcucccuaguucauggaag

SEQ ID NO: 881001 - RNA, 19 nt, Artificial Sequence
  Description of Artificial Sequence: Synthetic oligonucleotide
uggcacucccguuccuucu

SEQ ID NO: 881002 - RNA, 19 nt, Artificial Sequence
  Description of Artificial Sequence: Synthetic oligonucleotide
caucucgaagccuaucggu

SEQ ID NO: 881003 - RNA, 19 nt, Artificial Sequence
  Description of Artificial Sequence: Synthetic oligonucleotide
uacguccuggccucugcau

SEQ ID NO: 881004 - RNA, 19 nt, Artificial Sequence
  Description of Artificial Sequence: Synthetic oligonucleotide
acguguguagaaacuaaua

SEQ ID NO: 881005 - RNA, 19 nt, Artificial Sequence
  Description of Artificial Sequence: Synthetic oligonucleotide
agacuggguggcugaguca

SEQ ID NO: 881006 - RNA, 19 nt, Artificial Sequence
  Description of Artificial Sequence: Synthetic oligonucleotide
cagccugcgggcucccuag

SEQ ID NO: 881007 - RNA, 19 nt, Artificial Sequence
  Description of Artificial Sequence: Synthetic oligonucleotide
cucugacuucggugggacc

SEQ ID NO: 881008 - RNA, 19 nt, Artificial Sequence
  Description of Artificial Sequence: Synthetic oligonucleotide
gcacgaacauccagugugg

SEQ ID NO: 881009 - RNA, 19 nt, Artificial Sequence
  Description of Artificial Sequence: Synthetic oligonucleotide
ugccaagauggcucuccaa

SEQ ID NO: 881010 - RNA, 19 nt, Artificial Sequence
  Description of Artificial Sequence: Synthetic oligonucleotide
gagagaguggcugcgggcu

SEQ ID NO: 881011 - RNA, 19 nt, Artificial Sequence
  Description of Artificial Sequence: Synthetic oligonucleotide
acgaugugugucagaaggu

SEQ ID NO: 881012 - RNA, 19 nt, Artificial Sequence
  Description of Artificial Sequence: Synthetic oligonucleotide
aacccauguauggccuggu

SEQ ID NO: 881013 - RNA, 19 nt, Artificial Sequence
  Description of Artificial Sequence: Synthetic oligonucleotide
uugcucgcugugccaagau

SEQ ID NO: 881014 - RNA, 19 nt, Artificial Sequence
  Description of Artificial Sequence: Synthetic oligonucleotide
uccucugacuucgguggga

SEQ ID NO: 881015 - RNA, 19 nt, Artificial Sequence
  Description of Artificial Sequence: Synthetic oligonucleotide
ugcgggcucugaagcccgg

SEQ ID NO: 881016 - RNA, 19 nt, Artificial Sequence
  Description of Artificial Sequence: Synthetic oligonucleotide
ugggacgaugugugucaga

SEQ ID NO: 881017 - RNA, 19 nt, Artificial Sequence
  Description of Artificial Sequence: Synthetic oligonucleotide
gguccgguucaaaagguuc

SEQ ID NO: 881018 - RNA, 19 nt, Artificial Sequence
  Description of Artificial Sequence: Synthetic oligonucleotide
gcugggacgauguguguca

SEQ ID NO: 881019 - RNA, 19 nt, Artificial Sequence
  Description of Artificial Sequence: Synthetic oligonucleotide
gguuccucggcggacgggc

SEQ ID NO: 881020 - RNA, 19 nt, Artificial Sequence
  Description of Artificial Sequence: Synthetic oligonucleotide
gcguuuggauaguggcugg

SEQ ID NO: 881021 - RNA, 19 nt, Artificial Sequence
  Description of Artificial Sequence: Synthetic oligonucleotide
cugacuucggugggaccgc

SEQ ID NO: 881022 - RNA, 19 nt, Artificial Sequence
  Description of Artificial Sequence: Synthetic oligonucleotide
uccucggcggacgggcucc

SEQ ID NO: 881023 - RNA, 19 nt, Artificial Sequence
  Description of Artificial Sequence: Synthetic oligonucleotide
gacugugugcggcaucccu

SEQ ID NO: 881024 - RNA, 19 nt, Artificial Sequence
  Description of Artificial Sequence: Synthetic oligonucleotide
caacccacugaagguguug

SEQ ID NO: 881025 - RNA, 19 nt, Artificial Sequence
  Description of Artificial Sequence: Synthetic oligonucleotide
cugcgggcucccuaguuca

SEQ ID NO: 881026 - RNA, 19 nt, Artificial Sequence
  Description of Artificial Sequence: Synthetic oligonucleotide
ucaggagcguuuggauagu

SEQ ID NO: 881027 - RNA, 19 nt, Artificial Sequence
  Description of Artificial Sequence: Synthetic oligonucleotide
agccgagaauccuguuccu

SEQ ID NO: 881028 - RNA, 19 nt, Artificial Sequence
  Description of Artificial Sequence: Synthetic oligonucleotide
gaccagggguaacuggugu

SEQ ID NO: 881029 - RNA, 19 nt, Artificial Sequence
  Description of Artificial Sequence: Synthetic oligonucleotide
ggacgaugugugucagaag

SEQ ID NO: 881030 - RNA, 19 nt, Artificial Sequence
  Description of Artificial Sequence: Synthetic oligonucleotide
ggacgcggguuccucggcg

SEQ ID NO: 881031 - RNA, 19 nt, Artificial Sequence
  Description of Artificial Sequence: Synthetic oligonucleotide
  modified_base (7)..(7): a, c, u, g, unknown or other
gcaaggnggauaggcugcc

SEQ ID NO: 881032 - RNA, 19 nt, Artificial Sequence
  Description of Artificial Sequence: Synthetic oligonucleotide
cugacguguguagaaacua

SEQ ID NO: 881033 - RNA, 19 nt, Artificial Sequence
  Description of Artificial Sequence: Synthetic oligonucleotide
cugcaguagucccugugaa

SEQ ID NO: 881034 - RNA, 19 nt, Artificial Sequence
  Description of Artificial Sequence: Synthetic oligonucleotide
gacguguguagaaacuaau

SEQ ID NO: 881035 - RNA, 19 nt, Artificial Sequence
  Description of Artificial Sequence: Synthetic oligonucleotide
uuccucggcggacgggcuc

SEQ ID NO: 881036 - RNA, 19 nt, Artificial Sequence
  Description of Artificial Sequence: Synthetic oligonucleotide
gcggaucuggcgucugcgg

SEQ ID NO: 881037 - RNA, 19 nt, Artificial Sequence
  Description of Artificial Sequence: Synthetic oligonucleotide
cacggucagcggcggaggc

SEQ ID NO: 881038 - RNA, 19 nt, Artificial Sequence
  Description of Artificial Sequence: Synthetic oligonucleotide
ggcggaucuggcgucugcg

SEQ ID NO: 881039 - RNA, 19 nt, Artificial Sequence
  Description of Artificial Sequence: Synthetic oligonucleotide
cagcgaagcagcugcucca

SEQ ID NO: 881040 - RNA, 19 nt, Artificial Sequence
  Description of Artificial Sequence: Synthetic oligonucleotide
cuucggugggaccgcuuuc

SEQ ID NO: 881041 - RNA, 19 nt, Artificial Sequence
  Description of Artificial Sequence: Synthetic oligonucleotide
cccacuucaguugggcccg

SEQ ID NO: 881042 - RNA, 19 nt, Artificial Sequence
  Description of Artificial Sequence: Synthetic oligonucleotide
uacucucguuguccuuuua

SEQ ID NO: 881043 - RNA, 19 nt, Artificial Sequence
  Description of Artificial Sequence: Synthetic oligonucleotide
cuguuccgacgggagcugg

SEQ ID NO: 881044 - RNA, 19 nt, Artificial Sequence
  Description of Artificial Sequence: Synthetic oligonucleotide
gccuaucggucucggcucg

SEQ ID NO: 881045 - RNA, 19 nt, Artificial Sequence
  Description of Artificial Sequence: Synthetic oligonucleotide
gugccaagauggcucucca

SEQ ID NO: 881046 - RNA, 19 nt, Artificial Sequence
  Description of Artificial Sequence: Synthetic oligonucleotide
cugggacgaugugugucag

SEQ ID NO: 881047 - RNA, 19 nt, Artificial Sequence
  Description of Artificial Sequence: Synthetic oligonucleotide
gggguguaugacgaggaga

SEQ ID NO: 881048 - RNA, 19 nt, Artificial Sequence
  Description of Artificial Sequence: Synthetic oligonucleotide
ccuguuccagcaccgcggc

SEQ ID NO: 881049 - RNA, 19 nt, Artificial Sequence
  Description of Artificial Sequence: Synthetic oligonucleotide
agguguugaucaauacauu

SEQ ID NO: 881050 - RNA, 19 nt, Artificial Sequence
  Description of Artificial Sequence: Synthetic oligonucleotide
cauggcccggcgcuugcuc

SEQ ID NO: 881051 - RNA, 19 nt, Artificial Sequence
  Description of Artificial Sequence: Synthetic oligonucleotide
gccauauacugcaguaguc

SEQ ID NO: 881052 - RNA, 19 nt, Artificial Sequence
  Description of Artificial Sequence: Synthetic oligonucleotide
ggggccauauacugcagua

SEQ ID NO: 881053 - RNA, 19 nt, Artificial Sequence
  Description of Artificial Sequence: Synthetic oligonucleotide
gcggacgggcuccucaggc

SEQ ID NO: 881054 - RNA, 19 nt, Artificial Sequence
  Description of Artificial Sequence: Synthetic oligonucleotide
gggucuugggaaugucuga

SEQ ID NO: 881055 - RNA, 19 nt, Artificial Sequence
  Description of Artificial Sequence: Synthetic oligonucleotide
uccuggccucugcaugaaa

SEQ ID NO: 881056 - RNA, 19 nt, Artificial Sequence
  Description of Artificial Sequence: Synthetic oligonucleotide
caagauggcucuccaaauu

SEQ ID NO: 881057 - RNA, 19 nt, Artificial Sequence
  Description of Artificial Sequence: Synthetic oligonucleotide
gcacgaugcgguucucaug

SEQ ID NO: 881058 - RNA, 19 nt, Artificial Sequence
  Description of Artificial Sequence: Synthetic oligonucleotide
acgaugcgguucucaugga

SEQ ID NO: 881059 - RNA, 19 nt, Artificial Sequence
  Description of Artificial Sequence: Synthetic oligonucleotide
gcugccggcgguuaggagu

SEQ ID NO: 881060 - RNA, 19 nt, Artificial Sequence
  Description of Artificial Sequence: Synthetic oligonucleotide
ggcucccuaguucauggaa

SEQ ID NO: 881061 - RNA, 19 nt, Artificial Sequence
  Description of Artificial Sequence: Synthetic oligonucleotide
uggcugggacgaugugugu

SEQ ID NO: 881062 - RNA, 19 nt, Artificial Sequence
  Description of Artificial Sequence: Synthetic oligonucleotide
agcuauggcucaggagcgu

SEQ ID NO: 881063 - RNA, 19 nt, Artificial Sequence
  Description of Artificial Sequence: Synthetic oligonucleotide
ggcugcgggcucugaagcc

SEQ ID NO: 881064 - RNA, 19 nt, Artificial Sequence
  Description of Artificial Sequence: Synthetic oligonucleotide
cugcggaggauccgcuuca

SEQ ID NO: 881065 - RNA, 19 nt, Artificial Sequence
  Description of Artificial Sequence: Synthetic oligonucleotide
gguguaugacgaggagagc

SEQ ID NO: 881066 - RNA, 19 nt, Artificial Sequence
  Description of Artificial Sequence: Synthetic oligonucleotide
ugacuucggugggaccgcu

SEQ ID NO: 881067 - RNA, 19 nt, Artificial Sequence
  Description of Artificial Sequence: Synthetic oligonucleotide
guucggaggaggaaggcuu

SEQ ID NO: 881068 - RNA, 19 nt, Artificial Sequence
  Description of Artificial Sequence: Synthetic oligonucleotide
agccgcccggacugcgcgg

SEQ ID NO: 881069 - RNA, 19 nt, Artificial Sequence
  Description of Artificial Sequence: Synthetic oligonucleotide
gcgaagagcggcccauuca

SEQ ID NO: 881070 - RNA, 19 nt, Artificial Sequence
  Description of Artificial Sequence: Synthetic oligonucleotide
cugaagcccgggcauacgu

SEQ ID NO: 881071 - RNA, 19 nt, Artificial Sequence
  Description of Artificial Sequence: Synthetic oligonucleotide
caggagcguuuggauagug

SEQ ID NO: 881072 - RNA, 19 nt, Artificial Sequence
  Description of Artificial Sequence: Synthetic oligonucleotide
ccccgaacucuccucgggg

SEQ ID NO: 881073 - RNA, 19 nt, Artificial Sequence
  Description of Artificial Sequence: Synthetic oligonucleotide
ucggugggaccgcuuucuu

SEQ ID NO: 881074 - RNA, 19 nt, Artificial Sequence
  Description of Artificial Sequence: Synthetic oligonucleotide
cuugcucgcugugccaaga

SEQ ID NO: 881075 - RNA, 19 nt, Artificial Sequence
  Description of Artificial Sequence: Synthetic oligonucleotide
  modified_base (3)..(3): a, c, u, g, unknown or other
ggnggauaggcugccucca

SEQ ID NO: 881076 - RNA, 19 nt, Artificial Sequence
  Description of Artificial Sequence: Synthetic oligonucleotide
guagucccugugaaagucu

SEQ ID NO: 881077 - RNA, 19 nt, Artificial Sequence
  Description of Artificial Sequence: Synthetic oligonucleotide
ugcgggcucccuaguucau

SEQ ID NO: 881078 - RNA, 19 nt, Artificial Sequence
  Description of Artificial Sequence: Synthetic oligonucleotide
ugcggaggauccgcuucac

SEQ ID NO: 881079 - RNA, 19 nt, Artificial Sequence
  Description of Artificial Sequence: Synthetic oligonucleotide
ugcgguucucauggagaua

SEQ ID NO: 881080 - RNA, 19 nt, Artificial Sequence
  Description of Artificial Sequence: Synthetic oligonucleotide
gaccagaugucagcugccu

SEQ ID NO: 881081 - RNA, 19 nt, Artificial Sequence
  Description of Artificial Sequence: Synthetic oligonucleotide
gcgguuucugcugggacuc

SEQ ID NO: 881082 - RNA, 19 nt, Artificial Sequence
  Description of Artificial Sequence: Synthetic oligonucleotide
cacuucaguugggcccggg

SEQ ID NO: 881083 - RNA, 19 nt, Artificial Sequence
  Description of Artificial Sequence: Synthetic oligonucleotide
gccgagaauccuguuccug

SEQ ID NO: 881084 - RNA, 19 nt, Artificial Sequence
  Description of Artificial Sequence: Synthetic oligonucleotide
cgaugugugucagaagguc

SEQ ID NO: 881085 - RNA, 19 nt, Artificial Sequence
  Description of Artificial Sequence: Synthetic oligonucleotide
agccgcuuggaggugccaa

SEQ ID NO: 881086 - RNA, 19 nt, Artificial Sequence
  Description of Artificial Sequence: Synthetic oligonucleotide
cacacggagcuggcagcgc

SEQ ID NO: 881087 - RNA, 19 nt, Artificial Sequence
  Description of Artificial Sequence: Synthetic oligonucleotide
ccgggcauacguccuggcc

SEQ ID NO: 881088 - RNA, 19 nt, Artificial Sequence
  Description of Artificial Sequence: Synthetic oligonucleotide
ccugcgggcucccuaguuc

SEQ ID NO: 881089 - RNA, 19 nt, Artificial Sequence
  Description of Artificial Sequence: Synthetic oligonucleotide
ggucuacacucaguuccug

SEQ ID NO: 881090 - RNA, 19 nt, Artificial Sequence
  Description of Artificial Sequence: Synthetic oligonucleotide
ggcugggacgauguguguc

SEQ ID NO: 881091 - RNA, 19 nt, Artificial Sequence
  Description of Artificial Sequence: Synthetic oligonucleotide
agggucuggcacucccguu

SEQ ID NO: 881092 - RNA, 19 nt, Artificial Sequence
  Description of Artificial Sequence: Synthetic oligonucleotide
cucaaccccgaacucuccu

SEQ ID NO: 881093 - RNA, 19 nt, Artificial Sequence
  Description of Artificial Sequence: Synthetic oligonucleotide
  modified_base (12)..(12): a, c, u, g, unknown or other
ccuaagcaaggnggauagg

SEQ ID NO: 881094 - RNA, 19 nt, Artificial Sequence
  Description of Artificial Sequence: Synthetic oligonucleotide
acgcggguuccucggcgga

SEQ ID NO: 881095 - RNA, 19 nt, Artificial Sequence
  Description of Artificial Sequence: Synthetic oligonucleotide
cuaucggucucggcucgca

SEQ ID NO: 881096 - RNA, 19 nt, Artificial Sequence
  Description of Artificial Sequence: Synthetic oligonucleotide
gugggaccgcuuucuucuc

SEQ ID NO: 881097 - RNA, 19 nt, Artificial Sequence
  Description of Artificial Sequence: Synthetic oligonucleotide
acauccagugugggcggau

SEQ ID NO: 881098 - RNA, 19 nt, Artificial Sequence
  Description of Artificial Sequence: Synthetic oligonucleotide
gguccccacacugaccuaa

SEQ ID NO: 881099 - RNA, 19 nt, Artificial Sequence
  Description of Artificial Sequence: Synthetic oligonucleotide
ugccaucauucggcuuccc

SEQ ID NO: 881100 - RNA, 19 nt, Artificial Sequence
  Description of Artificial Sequence: Synthetic oligonucleotide
gugcacgaugcgguucuca

SEQ ID NO: 881101 - RNA, 19 nt, Artificial Sequence
  Description of Artificial Sequence: Synthetic oligonucleotide
ccauuguaccaggcucugg

SEQ ID NO: 881102 - RNA, 19 nt, Artificial Sequence
  Description of Artificial Sequence: Synthetic oligonucleotide
gugugcggcaucccugggu

SEQ ID NO: 881103 - RNA, 19 nt, Artificial Sequence
  Description of Artificial Sequence: Synthetic oligonucleotide
gcgucugcggaggauccgc

SEQ ID NO: 881104 - RNA, 19 nt, Artificial Sequence
  Description of Artificial Sequence: Synthetic oligonucleotide
gcacggucagcggcggagg

SEQ ID NO: 881105 - RNA, 19 nt, Artificial Sequence
  Description of Artificial Sequence: Synthetic oligonucleotide
ugggcggaucuggcgucug

SEQ ID NO: 881106 - RNA, 19 nt, Artificial Sequence
  Description of Artificial Sequence: Synthetic oligonucleotide
ccucugacuucggugggac

SEQ ID NO: 881107 - RNA, 19 nt, Artificial Sequence
  Description of Artificial Sequence: Synthetic oligonucleotide
gacgggcuccucaggcaca

SEQ ID NO: 881108 - RNA, 19 nt, Artificial Sequence
  Description of Artificial Sequence: Synthetic oligonucleotide
gcggaggauccgcuucacc

SEQ ID NO: 881109 - RNA, 19 nt, Artificial Sequence
  Description of Artificial Sequence: Synthetic oligonucleotide
gcucgcaagaggcccagcu

SEQ ID NO: 881110 - RNA, 19 nt, Artificial Sequence
  Description of Artificial Sequence: Synthetic oligonucleotide
gggcggucgaccaguggcc

SEQ ID NO: 881111 - RNA, 19 nt, Artificial Sequence
  Description of Artificial Sequence: Synthetic oligonucleotide
gucucccuccuuagugaca

SEQ ID NO: 881112 - RNA, 19 nt, Artificial Sequence
  Description of Artificial Sequence: Synthetic oligonucleotide
uagccucgugggcccuggu

SEQ ID NO: 881113 - RNA, 19 nt, Artificial Sequence
  Description of Artificial Sequence: Synthetic oligonucleotide
gcccuggucaaugauuucu

SEQ ID NO: 881114 - RNA, 19 nt, Artificial Sequence
  Description of Artificial Sequence: Synthetic oligonucleotide
ggcgucugcggaggauccg

SEQ ID NO: 881115 - RNA, 19 nt, Artificial Sequence
  Description of Artificial Sequence: Synthetic oligonucleotide
agccugcgggcucccuagu

SEQ ID NO: 881116 - RNA, 19 nt, Artificial Sequence
  Description of Artificial Sequence: Synthetic oligonucleotide
uugugccccgaggcagcga

SEQ ID NO: 881117 - RNA, 19 nt, Artificial Sequence
  Description of Artificial Sequence: Synthetic oligonucleotide
gcgguuaggaguguggauu

SEQ ID NO: 881118 - RNA, 19 nt, Artificial Sequence
  Description of Artificial Sequence: Synthetic oligonucleotide
cagggucuggcacucccgu

SEQ ID NO: 881119 - RNA, 19 nt, Artificial Sequence
  Description of Artificial Sequence: Synthetic oligonucleotide
gggcggaucuggcgucugc

SEQ ID NO: 881120 - RNA, 19 nt, Artificial Sequence
  Description of Artificial Sequence: Synthetic oligonucleotide
gggacgcggguuccucggc

SEQ ID NO: 881121 - RNA, 19 nt, Artificial Sequence
  Description of Artificial Sequence: Synthetic oligonucleotide
ggaagggcggucgaccagu

SEQ ID NO: 881122 - RNA, 19 nt, Artificial Sequence
  Description of Artificial Sequence: Synthetic oligonucleotide
ggaaugucugagacugggu

SEQ ID NO: 881123 - RNA, 19 nt, Artificial Sequence
  Description of Artificial Sequence: Synthetic oligonucleotide
ccuggugcaucagggucug

SEQ ID NO: 881124 - RNA, 19 nt, Artificial Sequence
  Description of Artificial Sequence: Synthetic oligonucleotide
cggacugcgcggcugagca

SEQ ID NO: 881125 - RNA, 19 nt, Artificial Sequence
  Description of Artificial Sequence: Synthetic oligonucleotide
cuauggcucaggagcguuu

SEQ ID NO: 881126 - RNA, 19 nt, Artificial Sequence
  Description of Artificial Sequence: Synthetic oligonucleotide
ccgcuuggaggugccaaag

SEQ ID NO: 881127 - RNA, 19 nt, Artificial Sequence
  Description of Artificial Sequence: Synthetic oligonucleotide
cuggugcaucagggucugg

SEQ ID NO: 881128 - RNA, 19 nt, Artificial Sequence
  Description of Artificial Sequence: Synthetic oligonucleotide
cgaccaguggccaucucaa

SEQ ID NO: 881129 - RNA, 19 nt, Artificial Sequence
  Description of Artificial Sequence: Synthetic oligonucleotide
gcauacguccuggccucug

SEQ ID NO: 881130 - RNA, 19 nt, Artificial Sequence
  Description of Artificial Sequence: Synthetic oligonucleotide
gcucuccaaauucggcaua

SEQ ID NO: 881131 - RNA, 19 nt, Artificial Sequence
  Description of Artificial Sequence: Synthetic oligonucleotide
gcggcggaggccccuguuc

SEQ ID NO: 881132 - RNA, 19 nt, Artificial Sequence
  Description of Artificial Sequence: Synthetic oligonucleotide
ggauaguggcugggucuac

SEQ ID NO: 881133 - RNA, 19 nt, Artificial Sequence
  Description of Artificial Sequence: Synthetic oligonucleotide
cagcacgaacauccagugu

SEQ ID NO: 881134 - RNA, 19 nt, Artificial Sequence
  Description of Artificial Sequence: Synthetic oligonucleotide
augcgaagagcggcccauu

SEQ ID NO: 881135 - RNA, 19 nt, Artificial Sequence
  Description of Artificial Sequence: Synthetic oligonucleotide
gccgcuuggaggugccaaa

SEQ ID NO: 881136 - RNA, 19 nt, Artificial Sequence
  Description of Artificial Sequence: Synthetic oligonucleotide
gucgaccaguggccaucuc

SEQ ID NO: 881137 - RNA, 19 nt, Artificial Sequence
  Description of Artificial Sequence: Synthetic oligonucleotide
cgaagccuaucggucucgg

SEQ ID NO: 881138 - RNA, 19 nt, Artificial Sequence
  Description of Artificial Sequence: Synthetic oligonucleotide
ccguuccuucucagccagg

SEQ ID NO: 881139 - RNA, 19 nt, Artificial Sequence
  Description of Artificial Sequence: Synthetic oligonucleotide
cauguauggccuggugcau

SEQ ID NO: 881140 - RNA, 19 nt, Artificial Sequence
  Description of Artificial Sequence: Synthetic oligonucleotide
ggcggucgaccaguggcca

SEQ ID NO: 881141 - RNA, 19 nt, Artificial Sequence
  Description of Artificial Sequence: Synthetic oligonucleotide
ccuaucggucucggcucgc

SEQ ID NO: 881142 - RNA, 19 nt, Artificial Sequence
  Description of Artificial Sequence: Synthetic oligonucleotide
gggguccgguucaaaaggu

SEQ ID NO: 881143 - RNA, 19 nt, Artificial Sequence
  Description of Artificial Sequence: Synthetic oligonucleotide
cgggcauacguccuggccu

SEQ ID NO: 881144 - RNA, 19 nt, Artificial Sequence
  Description of Artificial Sequence: Synthetic oligonucleotide
guccuggccucugcaugaa

SEQ ID NO: 881145 - RNA, 19 nt, Artificial Sequence
  Description of Artificial Sequence: Synthetic oligonucleotide
  modified_base (6)..(6): a, c, u, g, unknown or other
caaggnggauaggcugccu

SEQ ID NO: 881146 - RNA, 19 nt, Artificial Sequence
  Description of Artificial Sequence: Synthetic oligonucleotide
ggccccuguuccgacggga

SEQ ID NO: 881147 - RNA, 19 nt, Artificial Sequence
  Description of Artificial Sequence: Synthetic oligonucleotide
gcgaguccagcacgaacau

SEQ ID NO: 881148 - RNA, 19 nt, Artificial Sequence
  Description of Artificial Sequence: Synthetic oligonucleotide
ccccugauuuugguguaga

SEQ ID NO: 881149 - RNA, 19 nt, Artificial Sequence
  Description of Artificial Sequence: Synthetic oligonucleotide
ccggacugcgcggcugagc

SEQ ID NO: 881150 - RNA, 19 nt, Artificial Sequence
  Description of Artificial Sequence: Synthetic oligonucleotide
cggguuccucggcggacgg

SEQ ID NO: 881151 - RNA, 19 nt, Artificial Sequence
  Description of Artificial Sequence: Synthetic oligonucleotide
cggcggacgggcuccucag

SEQ ID NO: 881152 - RNA, 19 nt, Artificial Sequence
  Description of Artificial Sequence: Synthetic oligonucleotide
cugcacggucagcggcgga

SEQ ID NO: 881153 - RNA, 19 nt, Artificial Sequence
  Description of Artificial Sequence: Synthetic oligonucleotide
gcacuccucugacuucggu

SEQ ID NO: 881154 - RNA, 19 nt, Artificial Sequence
  Description of Artificial Sequence: Synthetic oligonucleotide
ccgcuucaccgcuucugga

SEQ ID NO: 881155 - RNA, 19 nt, Artificial Sequence
  Description of Artificial Sequence: Synthetic oligonucleotide
ccucgugggcccuggucaa

SEQ ID NO: 881156 - RNA, 19 nt, Artificial Sequence
  Description of Artificial Sequence: Synthetic oligonucleotide
gcuauggcucaggagcguu

SEQ ID NO: 881157 - RNA, 19 nt, Artificial Sequence
  Description of Artificial Sequence: Synthetic oligonucleotide
ggucgaccaguggccaucu

SEQ ID NO: 881158 - RNA, 19 nt, Artificial Sequence
  Description of Artificial Sequence: Synthetic oligonucleotide
gugggcggaucuggcgucu

SEQ ID NO: 881159 - RNA, 19 nt, Artificial Sequence
  Description of Artificial Sequence: Synthetic oligonucleotide
cggacgggcuccucaggca

SEQ ID NO: 881160 - RNA, 19 nt, Artificial Sequence
  Description of Artificial Sequence: Synthetic oligonucleotide
gacuucggugggaccgcuu

SEQ ID NO: 881161 - RNA, 19 nt, Artificial Sequence
  Description of Artificial Sequence: Synthetic oligonucleotide
cucggcggacgggcuccuc

SEQ ID NO: 881162 - RNA, 19 nt, Artificial Sequence
  Description of Artificial Sequence: Synthetic oligonucleotide
cggucucggcucgcaagag

SEQ ID NO: 881163 - RNA, 19 nt, Artificial Sequence
  Description of Artificial Sequence: Synthetic oligonucleotide
gucagcggcggaggccccu

SEQ ID NO: 881164 - RNA, 19 nt, Artificial Sequence
  Description of Artificial Sequence: Synthetic oligonucleotide
ggguccgguucaaaagguu

SEQ ID NO: 881165 - RNA, 19 nt, Artificial Sequence
  Description of Artificial Sequence: Synthetic oligonucleotide
cagccgcuuggaggugcca

SEQ ID NO: 881166 - RNA, 19 nt, Artificial Sequence
  Description of Artificial Sequence: Synthetic oligonucleotide
cugcgcggcugagcagcga

SEQ ID NO: 881167 - RNA, 19 nt, Artificial Sequence
  Description of Artificial Sequence: Synthetic oligonucleotide
cgcggguuccucggcggac

SEQ ID NO: 881168 - RNA, 19 nt, Artificial Sequence
  Description of Artificial Sequence: Synthetic oligonucleotide
cgcuuggaggugccaaagu

SEQ ID NO: 881169 - RNA, 19 nt, Artificial Sequence
  Description of Artificial Sequence: Synthetic oligonucleotide
cccggggaccagggguaac

SEQ ID NO: 881170 - RNA, 19 nt, Artificial Sequence
  Description of Artificial Sequence: Synthetic oligonucleotide
gcggucgaccaguggccau

SEQ ID NO: 881171 - RNA, 19 nt, Artificial Sequence
  Description of Artificial Sequence: Synthetic oligonucleotide
gccugcgggcucccuaguu

SEQ ID NO: 881172 - RNA, 19 nt, Artificial Sequence
  Description of Artificial Sequence: Synthetic oligonucleotide
gcaacccacugaagguguu

SEQ ID NO: 881173 - RNA, 19 nt, Artificial Sequence
  Description of Artificial Sequence: Synthetic oligonucleotide
cucgugggcccuggucaau

SEQ ID NO: 881174 - RNA, 19 nt, Artificial Sequence
  Description of Artificial Sequence: Synthetic oligonucleotide
cccggguccugcaguugcu

SEQ ID NO: 881175 - RNA, 19 nt, Artificial Sequence
  Description of Artificial Sequence: Synthetic oligonucleotide
cgucugcggaggauccgcu

SEQ ID NO: 881176 - RNA, 19 nt, Artificial Sequence
  Description of Artificial Sequence: Synthetic oligonucleotide
cggcaucccugggugucuc

SEQ ID NO: 881177 - RNA, 19 nt, Artificial Sequence
  Description of Artificial Sequence: Synthetic oligonucleotide
cagcggcggaggccccugu

SEQ ID NO: 881178 - RNA, 19 nt, Artificial Sequence
  Description of Artificial Sequence: Synthetic oligonucleotide
gcgcggcugagcagcgagu

SEQ ID NO: 881179 - RNA, 19 nt, Artificial Sequence
  Description of Artificial Sequence: Synthetic oligonucleotide
aaaguugugaaccugaaac

SEQ ID NO: 881180 - RNA, 19 nt, Artificial Sequence
  Description of Artificial Sequence: Synthetic oligonucleotide
aaggguauccguuagagcc

SEQ ID NO: 881181 - RNA, 19 nt, Artificial Sequence
  Description of Artificial Sequence: Synthetic oligonucleotide
aaacucccaacuuucaugc

SEQ ID NO: 881182 - RNA, 19 nt, Artificial Sequence
  Description of Artificial Sequence: Synthetic oligonucleotide
uuaccaaagacccagagac

SEQ ID NO: 881183 - RNA, 19 nt, Artificial Sequence
  Description of Artificial Sequence: Synthetic oligonucleotide
gauguuggaaguaagagag

SEQ ID NO: 881184 - RNA, 19 nt, Artificial Sequence
  Description of Artificial Sequence: Synthetic oligonucleotide
cuuauuaaaggcaucacug

SEQ ID NO: 881185 - RNA, 19 nt, Artificial Sequence
  Description of Artificial Sequence: Synthetic oligonucleotide
uauccaauaugcuaucugg

SEQ ID NO: 881186 - RNA, 19 nt, Artificial Sequence
  Description of Artificial Sequence: Synthetic oligonucleotide
aaagaacacacaaacuccc

SEQ ID NO: 881187 - RNA, 19 nt, Artificial Sequence
  Description of Artificial Sequence: Synthetic oligonucleotide
aacauccugacccagcuag

SEQ ID NO: 881188 - RNA, 19 nt, Artificial Sequence
  Description of Artificial Sequence: Synthetic oligonucleotide
agccagagagaauugaugc

SEQ ID NO: 881189 - RNA, 19 nt, Artificial Sequence
  Description of Artificial Sequence: Synthetic oligonucleotide
ucuagagggaaccagcaag

SEQ ID NO: 881190 - RNA, 19 nt, Artificial Sequence
  Description of Artificial Sequence: Synthetic oligonucleotide
aaguaagagaggaaaaggg

SEQ ID NO: 881191 - RNA, 19 nt, Artificial Sequence
  Description of Artificial Sequence: Synthetic oligonucleotide
auuuacaaaggccagggug

SEQ ID NO: 881192 - RNA, 19 nt, Artificial Sequence
  Description of Artificial Sequence: Synthetic oligonucleotide
aaagguucgagacugucca

SEQ ID NO: 881193 - RNA, 19 nt, Artificial Sequence
  Description of Artificial Sequence: Synthetic oligonucleotide
uuaaaggcaucacuguucc

SEQ ID NO: 881194 - RNA, 19 nt, Artificial Sequence
  Description of Artificial Sequence: Synthetic oligonucleotide
ugagcuaaaccuaauuucu

SEQ ID NO: 881195 - RNA, 19 nt, Artificial Sequence
  Description of Artificial Sequence: Synthetic oligonucleotide
ucuuauuaaaggcaucacu

SEQ ID NO: 881196 - RNA, 19 nt, Artificial Sequence
  Description of Artificial Sequence: Synthetic oligonucleotide
cauuuauuuacaaaggcca

SEQ ID NO: 881197 - RNA, 19 nt, Artificial Sequence
  Description of Artificial Sequence: Synthetic oligonucleotide
uggauuugcagcaaggccu

SEQ ID NO: 881198 - RNA, 19 nt, Artificial Sequence
  Description of Artificial Sequence: Synthetic oligonucleotide
aaaucucacuucuggcacc

SEQ ID NO: 881199 - RNA, 19 nt, Artificial Sequence
  Description of Artificial Sequence: Synthetic oligonucleotide
aguaagagaggaaaagggc

SEQ ID NO: 881200 - RNA, 19 nt, Artificial Sequence
  Description of Artificial Sequence: Synthetic oligonucleotide
uccguuagagccauuaucu

SEQ ID NO: 881201 - RNA, 19 nt, Artificial Sequence
  Description of Artificial Sequence: Synthetic oligonucleotide
aaaagguucgagacugucc

SEQ ID NO: 881202 - RNA, 19 nt, Artificial Sequence
  Description of Artificial Sequence: Synthetic oligonucleotide
uaucuuuagaauuauccaa

SEQ ID NO: 881203 - RNA, 19 nt, Artificial Sequence
  Description of Artificial Sequence: Synthetic oligonucleotide
ggucuugaugacuagaugg

SEQ ID NO: 881204 - RNA, 19 nt, Artificial Sequence
  Description of Artificial Sequence: Synthetic oligonucleotide
agagccauuaucuuuagaa

SEQ ID NO: 881205 - RNA, 19 nt, Artificial Sequence
  Description of Artificial Sequence: Synthetic oligonucleotide
guugacaaagcccauggag

SEQ ID NO: 881206 - RNA, 19 nt, Artificial Sequence
  Description of Artificial Sequence: Synthetic oligonucleotide
gauccaaaagguucgagac

SEQ ID NO: 881207 - RNA, 19 nt, Artificial Sequence
  Description of Artificial Sequence: Synthetic oligonucleotide
aucugguuaccaaagaccc

SEQ ID NO: 881208 - RNA, 19 nt, Artificial Sequence
  Description of Artificial Sequence: Synthetic oligonucleotide
ugaaaucucacuucuggca

SEQ ID NO: 881209 - RNA, 19 nt, Artificial Sequence
  Description of Artificial Sequence: Synthetic oligonucleotide
uaaaccuaauuucuuauua

SEQ ID NO: 881210 - RNA, 19 nt, Artificial Sequence
  Description of Artificial Sequence: Synthetic oligonucleotide
agaguaauggugguaaggg

SEQ ID NO: 881211 - RNA, 19 nt, Artificial Sequence
  Description of Artificial Sequence: Synthetic oligonucleotide
cuauauuccuccacuaggc

SEQ ID NO: 881212 - RNA, 19 nt, Artificial Sequence
  Description of Artificial Sequence: Synthetic oligonucleotide
uccaaaggagccaaggcug

SEQ ID NO: 881213 - RNA, 19 nt, Artificial Sequence
  Description of Artificial Sequence: Synthetic oligonucleotide
uugacaaagcccauggagu

SEQ ID NO: 881214 - RNA, 19 nt, Artificial Sequence
  Description of Artificial Sequence: Synthetic oligonucleotide
ucacgguugacaaagccca

SEQ ID NO: 881215 - RNA, 19 nt, Artificial Sequence
  Description of Artificial Sequence: Synthetic oligonucleotide
gaugacuagauggacagug

SEQ ID NO: 881216 - RNA, 19 nt, Artificial Sequence
  Description of Artificial Sequence: Synthetic oligonucleotide
acuacuugggacccuuccc

SEQ ID NO: 881217 - RNA, 19 nt, Artificial Sequence
  Description of Artificial Sequence: Synthetic oligonucleotide
uccaaaagguucgagacug

SEQ ID NO: 881218 - RNA, 19 nt, Artificial Sequence
  Description of Artificial Sequence: Synthetic oligonucleotide
ugacaucauauccuggacc

SEQ ID NO: 881219 - RNA, 19 nt, Artificial Sequence
  Description of Artificial Sequence: Synthetic oligonucleotide
ucucccaaugcuauauucc

SEQ ID NO: 881220 - RNA, 19 nt, Artificial Sequence
  Description of Artificial Sequence: Synthetic oligonucleotide
ugauccaaaagguucgaga

SEQ ID NO: 881221 - RNA, 19 nt, Artificial Sequence
  Description of Artificial Sequence: Synthetic oligonucleotide
aagggaucaggagagcugg

SEQ ID NO: 881222 - RNA, 19 nt, Artificial Sequence
  Description of Artificial Sequence: Synthetic oligonucleotide
gaaaucucacuucuggcac

SEQ ID NO: 881223 - RNA, 19 nt, Artificial Sequence
  Description of Artificial Sequence: Synthetic oligonucleotide
uuccaaaggagccaaggcu

SEQ ID NO: 881224 - RNA, 19 nt, Artificial Sequence
  Description of Artificial Sequence: Synthetic oligonucleotide
uguuggaaguaagagagga

SEQ ID NO: 881225 - RNA, 19 nt, Artificial Sequence
  Description of Artificial Sequence: Synthetic oligonucleotide
ugacuagauggacagugag

SEQ ID NO: 881226 - RNA, 19 nt, Artificial Sequence
  Description of Artificial Sequence: Synthetic oligonucleotide
ugcuauauuccuccacuag

SEQ ID NO: 881227 - RNA, 19 nt, Artificial Sequence
  Description of Artificial Sequence: Synthetic oligonucleotide
cuagagggaaccagcaagg

SEQ ID NO: 881228 - RNA, 19 nt, Artificial Sequence
  Description of Artificial Sequence: Synthetic oligonucleotide
cagcuagccgcauugaucc

SEQ ID NO: 881229 - RNA, 19 nt, Artificial Sequence
  Description of Artificial Sequence: Synthetic oligonucleotide
ggaauugaaaggcaggagc

SEQ ID NO: 881230 - RNA, 19 nt, Artificial Sequence
  Description of Artificial Sequence: Synthetic oligonucleotide
cuugaucccaugcugauuc

SEQ ID NO: 881231 - RNA, 19 nt, Artificial Sequence
  Description of Artificial Sequence: Synthetic oligonucleotide
uagaauuauccaauaugcu

SEQ ID NO: 881232 - RNA, 19 nt, Artificial Sequence
  Description of Artificial Sequence: Synthetic oligonucleotide
uccgggauguuccaaagga

SEQ ID NO: 881233 - RNA, 19 nt, Artificial Sequence
  Description of Artificial Sequence: Synthetic oligonucleotide
ucgggguuggacaugagcu

SEQ ID NO: 881234 - RNA, 19 nt, Artificial Sequence
  Description of Artificial Sequence: Synthetic oligonucleotide
cugagcuaaaccuaauuuc

SEQ ID NO: 881235 - RNA, 19 nt, Artificial Sequence
  Description of Artificial Sequence: Synthetic oligonucleotide
auccguuagagccauuauc

SEQ ID NO: 881236 - RNA, 19 nt, Artificial Sequence
  Description of Artificial Sequence: Synthetic oligonucleotide
cauauccuggaccaagggg

SEQ ID NO: 881237 - RNA, 19 nt, Artificial Sequence
  Description of Artificial Sequence: Synthetic oligonucleotide
caauaugcuaucugguuac

SEQ ID NO: 881238 - RNA, 19 nt, Artificial Sequence
  Description of Artificial Sequence: Synthetic oligonucleotide
aauaugcuaucugguuacc

SEQ ID NO: 881239 - RNA, 19 nt, Artificial Sequence
  Description of Artificial Sequence: Synthetic oligonucleotide
caugcuucgcauguaaggg

SEQ ID NO: 881240 - RNA, 19 nt, Artificial Sequence
  Description of Artificial Sequence: Synthetic oligonucleotide
uccucaguacuccagcuga

SEQ ID NO: 881241 - RNA, 19 nt, Artificial Sequence
  Description of Artificial Sequence: Synthetic oligonucleotide
aagacccagagacccagag

SEQ ID NO: 881242 - RNA, 19 nt, Artificial Sequence
  Description of Artificial Sequence: Synthetic oligonucleotide
caaacucccaacuuucaug

SEQ ID NO: 881243 - RNA, 19 nt, Artificial Sequence
  Description of Artificial Sequence: Synthetic oligonucleotide
cuugacagagagccaaagg

SEQ ID NO: 881244 - RNA, 19 nt, Artificial Sequence
  Description of Artificial Sequence: Synthetic oligonucleotide
gcuauauuccuccacuagg

SEQ ID NO: 881245 - RNA, 19 nt, Artificial Sequence
  Description of Artificial Sequence: Synthetic oligonucleotide
cuaucugguuaccaaagac

SEQ ID NO: 881246 - RNA, 19 nt, Artificial Sequence
  Description of Artificial Sequence: Synthetic oligonucleotide
ugcuucgcauguaaggggc

SEQ ID NO: 881247 - RNA, 19 nt, Artificial Sequence
  Description of Artificial Sequence: Synthetic oligonucleotide
auguaaggggcugagauca

SEQ ID NO: 881248 - RNA, 19 nt, Artificial Sequence
  Description of Artificial Sequence: Synthetic oligonucleotide
gagagaauugaugcaguag

SEQ ID NO: 881249 - RNA, 19 nt, Artificial Sequence
  Description of Artificial Sequence: Synthetic oligonucleotide
auauccuggaccaaggggu

SEQ ID NO: 881250 - RNA, 19 nt, Artificial Sequence
  Description of Artificial Sequence: Synthetic oligonucleotide
aaccagaguugcugccugc

SEQ ID NO: 881251 - RNA, 19 nt, Artificial Sequence
  Description of Artificial Sequence: Synthetic oligonucleotide
cuggauuugcagcaaggcc

SEQ ID NO: 881252 - RNA, 19 nt, Artificial Sequence
  Description of Artificial Sequence: Synthetic oligonucleotide
uuucggaaaaucugcugga

SEQ ID NO: 881253 - RNA, 19 nt, Artificial Sequence
  Description of Artificial Sequence: Synthetic oligonucleotide
uaaggggcugagaucaugu

SEQ ID NO: 881254 - RNA, 19 nt, Artificial Sequence
  Description of Artificial Sequence: Synthetic oligonucleotide
agagaggaaaagggcaggc

SEQ ID NO: 881255 - RNA, 19 nt, Artificial Sequence
  Description of Artificial Sequence: Synthetic oligonucleotide
cugguuaccaaagacccag

SEQ ID NO: 881256 - RNA, 19 nt, Artificial Sequence
  Description of Artificial Sequence: Synthetic oligonucleotide
uguagugucugcaggcccu

SEQ ID NO: 881257 - RNA, 19 nt, Artificial Sequence
  Description of Artificial Sequence: Synthetic oligonucleotide
aguugugaaccugaaacca

SEQ ID NO: 881258 - RNA, 19 nt, Artificial Sequence
  Description of Artificial Sequence: Synthetic oligonucleotide
augcuucgcauguaagggg

SEQ ID NO: 881259 - RNA, 19 nt, Artificial Sequence
  Description of Artificial Sequence: Synthetic oligonucleotide
gaauuauccaauaugcuau

SEQ ID NO: 881260 - RNA, 19 nt, Artificial Sequence
  Description of Artificial Sequence: Synthetic oligonucleotide
gaauugaugcaguagcacu

SEQ ID NO: 881261 - RNA, 19 nt, Artificial Sequence
  Description of Artificial Sequence: Synthetic oligonucleotide
ugucuggacuacuugggac

SEQ ID NO: 881262 - RNA, 19 nt, Artificial Sequence
  Description of Artificial Sequence: Synthetic oligonucleotide
ugguaaggguauccguuag

SEQ ID NO: 881263 - RNA, 19 nt, Artificial Sequence
  Description of Artificial Sequence: Synthetic oligonucleotide
ucaugugucgcaucagguc

SEQ ID NO: 881264 - RNA, 19 nt, Artificial Sequence
  Description of Artificial Sequence: Synthetic oligonucleotide
ggaaguaagagaggaaaag

SEQ ID NO: 881265 - RNA, 19 nt, Artificial Sequence
  Description of Artificial Sequence: Synthetic oligonucleotide
cuggguaccagcccagggg

SEQ ID NO: 881266 - RNA, 19 nt, Artificial Sequence
  Description of Artificial Sequence: Synthetic oligonucleotide
uaaggguauccguuagagc

SEQ ID NO: 881267 - RNA, 19 nt, Artificial Sequence
  Description of Artificial Sequence: Synthetic oligonucleotide
uccaauaugcuaucugguu

SEQ ID NO: 881268 - RNA, 19 nt, Artificial Sequence
  Description of Artificial Sequence: Synthetic oligonucleotide
guagaggucaaagaagaca

SEQ ID NO: 881269 - RNA, 19 nt, Artificial Sequence
  Description of Artificial Sequence: Synthetic oligonucleotide
gagugcugcauuucugggc

SEQ ID NO: 881270 - RNA, 19 nt, Artificial Sequence
  Description of Artificial Sequence: Synthetic oligonucleotide
aagccagagagaauugaug

SEQ ID NO: 881271 - RNA, 19 nt, Artificial Sequence
  Description of Artificial Sequence: Synthetic oligonucleotide
cugccuaggccaaggaugc

SEQ ID NO: 881272 - RNA, 19 nt, Artificial Sequence
  Description of Artificial Sequence: Synthetic oligonucleotide
guuaccaaagacccagaga

SEQ ID NO: 881273 - RNA, 19 nt, Artificial Sequence
  Description of Artificial Sequence: Synthetic oligonucleotide
ggugucuccguccuugagg

SEQ ID NO: 881274 - RNA, 19 nt, Artificial Sequence
  Description of Artificial Sequence: Synthetic oligonucleotide
agaacacacaaacucccaa

SEQ ID NO: 881275 - RNA, 19 nt, Artificial Sequence
  Description of Artificial Sequence: Synthetic oligonucleotide
agcuaaaccuaauuucuua

SEQ ID NO: 881276 - RNA, 19 nt, Artificial Sequence
  Description of Artificial Sequence: Synthetic oligonucleotide
caugugucgcaucagguca

SEQ ID NO: 881277 - RNA, 19 nt, Artificial Sequence
  Description of Artificial Sequence: Synthetic oligonucleotide
aucuuuagaauuauccaau

SEQ ID NO: 881278 - RNA, 19 nt, Artificial Sequence
  Description of Artificial Sequence: Synthetic oligonucleotide
caucauauccuggaccaag

SEQ ID NO: 881279 - RNA, 19 nt, Artificial Sequence
  Description of Artificial Sequence: Synthetic oligonucleotide
aaagccagagagaauugau

SEQ ID NO: 881280 - RNA, 19 nt, Artificial Sequence
  Description of Artificial Sequence: Synthetic oligonucleotide
ugacaaagcccauggaguu

SEQ ID NO: 881281 - RNA, 19 nt, Artificial Sequence
  Description of Artificial Sequence: Synthetic oligonucleotide
ucugguuaccaaagaccca

SEQ ID NO: 881282 - RNA, 19 nt, Artificial Sequence
  Description of Artificial Sequence: Synthetic oligonucleotide
uuuccacaagaguaauggu

SEQ ID NO: 881283 - RNA, 19 nt, Artificial Sequence
  Description of Artificial Sequence: Synthetic oligonucleotide
acuguccaugaucaugugu

SEQ ID NO: 881284 - RNA, 19 nt, Artificial Sequence
  Description of Artificial Sequence: Synthetic oligonucleotide
aauguguugacagccucuu

SEQ ID NO: 881285 - RNA, 19 nt, Artificial Sequence
  Description of Artificial Sequence: Synthetic oligonucleotide
gacagcaucucgggguugg

SEQ ID NO: 881286 - RNA, 19 nt, Artificial Sequence
  Description of Artificial Sequence: Synthetic oligonucleotide
auccugacccagcuagccg

SEQ ID NO: 881287 - RNA, 19 nt, Artificial Sequence
  Description of Artificial Sequence: Synthetic oligonucleotide
cauguaaggggcugagauc

SEQ ID NO: 881288 - RNA, 19 nt, Artificial Sequence
  Description of Artificial Sequence: Synthetic oligonucleotide
auggugguaaggguauccg

SEQ ID NO: 881289 - RNA, 19 nt, Artificial Sequence
  Description of Artificial Sequence: Synthetic oligonucleotide
ugggcgagugucugcauca

SEQ ID NO: 881290 - RNA, 19 nt, Artificial Sequence
  Description of Artificial Sequence: Synthetic oligonucleotide
cucucccaaugcuauauuc

SEQ ID NO: 881291 - RNA, 19 nt, Artificial Sequence
  Description of Artificial Sequence: Synthetic oligonucleotide
auggagagagacucugggu

SEQ ID NO: 881292 - RNA, 19 nt, Artificial Sequence
  Description of Artificial Sequence: Synthetic oligonucleotide
agacccagagacccagcuc

SEQ ID NO: 881293 - RNA, 19 nt, Artificial Sequence
  Description of Artificial Sequence: Synthetic oligonucleotide
caagaguaauggugguaag

SEQ ID NO: 881294 - RNA, 19 nt, Artificial Sequence
  Description of Artificial Sequence: Synthetic oligonucleotide
aaccugaaaccaacaaaga

SEQ ID NO: 881295 - RNA, 19 nt, Artificial Sequence
  Description of Artificial Sequence: Synthetic oligonucleotide
gagaauugaugcaguagca

SEQ ID NO: 881296 - RNA, 19 nt, Artificial Sequence
  Description of Artificial Sequence: Synthetic oligonucleotide
uccagccaaaagcuggauc

SEQ ID NO: 881297 - RNA, 19 nt, Artificial Sequence
  Description of Artificial Sequence: Synthetic oligonucleotide
uugauccaaaagguucgag

SEQ ID NO: 881298 - RNA, 19 nt, Artificial Sequence
  Description of Artificial Sequence: Synthetic oligonucleotide
cuagauggacagugagccc

SEQ ID NO: 881299 - RNA, 19 nt, Artificial Sequence
  Description of Artificial Sequence: Synthetic oligonucleotide
aguccgggauguuccaaag

SEQ ID NO: 881300 - RNA, 19 nt, Artificial Sequence
  Description of Artificial Sequence: Synthetic oligonucleotide
ggugaggcagguguggugg

SEQ ID NO: 881301 - RNA, 19 nt, Artificial Sequence
  Description of Artificial Sequence: Synthetic oligonucleotide
aagacaggcuacagaaggu

SEQ ID NO: 881302 - RNA, 19 nt, Artificial Sequence
  Description of Artificial Sequence: Synthetic oligonucleotide
accggcaccugugaguuuc

SEQ ID NO: 881303 - RNA, 19 nt, Artificial Sequence
  Description of Artificial Sequence: Synthetic oligonucleotide
aggaaaagggcaggcaugu

SEQ ID NO: 881304 - RNA, 19 nt, Artificial Sequence
  Description of Artificial Sequence: Synthetic oligonucleotide
ugcugauucagggugucuc

SEQ ID NO: 881305 - RNA, 19 nt, Artificial Sequence
  Description of Artificial Sequence: Synthetic oligonucleotide
agagggaaccagcaaggaa

SEQ ID NO: 881306 - RNA, 19 nt, Artificial Sequence
  Description of Artificial Sequence: Synthetic oligonucleotide
gcaaggaauugaaaggcag

SEQ ID NO: 881307 - RNA, 19 nt, Artificial Sequence
  Description of Artificial Sequence: Synthetic oligonucleotide
cuguagugucugcaggccc

SEQ ID NO: 881308 - RNA, 19 nt, Artificial Sequence
  Description of Artificial Sequence: Synthetic oligonucleotide
ggagcucuggaagagaaac

SEQ ID NO: 881309 - RNA, 19 nt, Artificial Sequence
  Description of Artificial Sequence: Synthetic oligonucleotide
uauccguuagagccauuau

SEQ ID NO: 881310 - RNA, 19 nt, Artificial Sequence
  Description of Artificial Sequence: Synthetic oligonucleotide
augucuggacuacuuggga

SEQ ID NO: 881311 - RNA, 19 nt, Artificial Sequence
  Description of Artificial Sequence: Synthetic oligonucleotide
gagggaaccagcaaggaau

SEQ ID NO: 881312 - RNA, 19 nt, Artificial Sequence
  Description of Artificial Sequence: Synthetic oligonucleotide
uuguacccacucaucucug

SEQ ID NO: 881313 - RNA, 19 nt, Artificial Sequence
  Description of Artificial Sequence: Synthetic oligonucleotide
uguacccacucaucucugu

SEQ ID NO: 881314 - RNA, 19 nt, Artificial Sequence
  Description of Artificial Sequence: Synthetic oligonucleotide
uggugguaaggguauccgu

SEQ ID NO: 881315 - RNA, 19 nt, Artificial Sequence
  Description of Artificial Sequence: Synthetic oligonucleotide
ugcuguuuguagaggucaa

SEQ ID NO: 881316 - RNA, 19 nt, Artificial Sequence
  Description of Artificial Sequence: Synthetic oligonucleotide
uuacaaaggccagggugga

SEQ ID NO: 881317 - RNA, 19 nt, Artificial Sequence
  Description of Artificial Sequence: Synthetic oligonucleotide
cauccugacccagcuagcc

SEQ ID NO: 881318 - RNA, 19 nt, Artificial Sequence
  Description of Artificial Sequence: Synthetic oligonucleotide
cuuguacccacucaucucu

SEQ ID NO: 881319 - RNA, 19 nt, Artificial Sequence
  Description of Artificial Sequence: Synthetic oligonucleotide
gaaccagccgcagccacug

SEQ ID NO: 881320 - RNA, 19 nt, Artificial Sequence
  Description of Artificial Sequence: Synthetic oligonucleotide
auaugcuaucugguuacca

SEQ ID NO: 881321 - RNA, 19 nt, Artificial Sequence
  Description of Artificial Sequence: Synthetic oligonucleotide
aggagacguggcugggacg

SEQ ID NO: 881322 - RNA, 19 nt, Artificial Sequence
  Description of Artificial Sequence: Synthetic oligonucleotide
gcugccuaggccaaggaug

SEQ ID NO: 881323 - RNA, 19 nt, Artificial Sequence
  Description of Artificial Sequence: Synthetic oligonucleotide
agguucgagacuguccaug

SEQ ID NO: 881324 - RNA, 19 nt, Artificial Sequence
  Description of Artificial Sequence: Synthetic oligonucleotide
auccaauaugcuaucuggu

SEQ ID NO: 881325 - RNA, 19 nt, Artificial Sequence
  Description of Artificial Sequence: Synthetic oligonucleotide
cuacagaagguagggcuug

SEQ ID NO: 881326 - RNA, 19 nt, Artificial Sequence
  Description of Artificial Sequence: Synthetic oligonucleotide
gaggguuuucggaaaaucu

SEQ ID NO: 881327 - RNA, 19 nt, Artificial Sequence
  Description of Artificial Sequence: Synthetic oligonucleotide
gagaaccagccgcagccac

SEQ ID NO: 881328 - RNA, 19 nt, Artificial Sequence
  Description of Artificial Sequence: Synthetic oligonucleotide
cucaguacuccagcugagc

SEQ ID NO: 881329 - RNA, 19 nt, Artificial Sequence
  Description of Artificial Sequence: Synthetic oligonucleotide
caucaguugcugcugggca

SEQ ID NO: 881330 - RNA, 19 nt, Artificial Sequence
  Description of Artificial Sequence: Synthetic oligonucleotide
cacuggaacccgguguagg

SEQ ID NO: 881331 - RNA, 19 nt, Artificial Sequence
  Description of Artificial Sequence: Synthetic oligonucleotide
auugauccaaaagguucga

SEQ ID NO: 881332 - RNA, 19 nt, Artificial Sequence
  Description of Artificial Sequence: Synthetic oligonucleotide
uagagggaaccagcaagga

SEQ ID NO: 881333 - RNA, 19 nt, Artificial Sequence
  Description of Artificial Sequence: Synthetic oligonucleotide
uucgcauguaaggggcuga

SEQ ID NO: 881334 - RNA, 19 nt, Artificial Sequence
  Description of Artificial Sequence: Synthetic oligonucleotide
caaaagcuggaucaucugu

SEQ ID NO: 881335 - RNA, 19 nt, Artificial Sequence
  Description of Artificial Sequence: Synthetic oligonucleotide
auggcccggggauugguga

SEQ ID NO: 881336 - RNA, 19 nt, Artificial Sequence
  Description of Artificial Sequence: Synthetic oligonucleotide
uggcccuuguacccacuca

SEQ ID NO: 881337 - RNA, 19 nt, Artificial Sequence
  Description of Artificial Sequence: Synthetic oligonucleotide
uugaucccaugcugauuca

SEQ ID NO: 881338 - RNA, 19 nt, Artificial Sequence
  Description of Artificial Sequence: Synthetic oligonucleotide
guggauguuggaaguaaga

SEQ ID NO: 881339 - RNA, 19 nt, Artificial Sequence
  Description of Artificial Sequence: Synthetic oligonucleotide
ucgcauguaaggggcugag

SEQ ID NO: 881340 - RNA, 19 nt, Artificial Sequence
  Description of Artificial Sequence: Synthetic oligonucleotide
agcucucccaaugcuauau

SEQ ID NO: 881341 - RNA, 19 nt, Artificial Sequence
  Description of Artificial Sequence: Synthetic oligonucleotide
cccagagacccagagaccc

SEQ ID NO: 881342 - RNA, 19 nt, Artificial Sequence
  Description of Artificial Sequence: Synthetic oligonucleotide
acgguugacaaagcccaug

SEQ ID NO: 881343 - RNA, 19 nt, Artificial Sequence
  Description of Artificial Sequence: Synthetic oligonucleotide
gguggauguuggaaguaag

SEQ ID NO: 881344 - RNA, 19 nt, Artificial Sequence
  Description of Artificial Sequence: Synthetic oligonucleotide
cucccaaugcuauauuccu

SEQ ID NO: 881345 - RNA, 19 nt, Artificial Sequence
  Description of Artificial Sequence: Synthetic oligonucleotide
agcugauccugcugcgccu

SEQ ID NO: 881346 - RNA, 19 nt, Artificial Sequence
  Description of Artificial Sequence: Synthetic oligonucleotide
guauccguuagagccauua

SEQ ID NO: 881347 - RNA, 19 nt, Artificial Sequence
  Description of Artificial Sequence: Synthetic oligonucleotide
gguucgagacuguccauga

SEQ ID NO: 881348 - RNA, 19 nt, Artificial Sequence
  Description of Artificial Sequence: Synthetic oligonucleotide
uucugggcuguugaacauc

SEQ ID NO: 881349 - RNA, 19 nt, Artificial Sequence
  Description of Artificial Sequence: Synthetic oligonucleotide
caggucaggguuugacauc

SEQ ID NO: 881350 - RNA, 19 nt, Artificial Sequence
  Description of Artificial Sequence: Synthetic oligonucleotide
aucucgggguuggacauga

SEQ ID NO: 881351 - RNA, 19 nt, Artificial Sequence
  Description of Artificial Sequence: Synthetic oligonucleotide
uguaaggggcugagaucau

SEQ ID NO: 881352 - RNA, 19 nt, Artificial Sequence
  Description of Artificial Sequence: Synthetic oligonucleotide
ugaugacuagauggacagu

SEQ ID NO: 881353 - RNA, 19 nt, Artificial Sequence
  Description of Artificial Sequence: Synthetic oligonucleotide
cgguugacaaagcccaugg

SEQ ID NO: 881354 - RNA, 19 nt, Artificial Sequence
  Description of Artificial Sequence: Synthetic oligonucleotide
uacagaagguagggcuuga

SEQ ID NO: 881355 - RNA, 19 nt, Artificial Sequence
  Description of Artificial Sequence: Synthetic oligonucleotide
ccuaggccaaggaugcccc

SEQ ID NO: 881356 - RNA, 19 nt, Artificial Sequence
  Description of Artificial Sequence: Synthetic oligonucleotide
ccagcuagccgcauugauc

SEQ ID NO: 881357 - RNA, 19 nt, Artificial Sequence
  Description of Artificial Sequence: Synthetic oligonucleotide
caauagcagcauugauguc

SEQ ID NO: 881358 - RNA, 19 nt, Artificial Sequence
  Description of Artificial Sequence: Synthetic oligonucleotide
gcccgcgaagaucaggacc

SEQ ID NO: 881359 - RNA, 19 nt, Artificial Sequence
  Description of Artificial Sequence: Synthetic oligonucleotide
gcauguaaggggcugagau

SEQ ID NO: 881360 - RNA, 19 nt, Artificial Sequence
  Description of Artificial Sequence: Synthetic oligonucleotide
ucgcaucaggucaggguuu

SEQ ID NO: 881361 - RNA, 19 nt, Artificial Sequence
  Description of Artificial Sequence: Synthetic oligonucleotide
aggguauccguuagagcca

SEQ ID NO: 881362 - RNA, 19 nt, Artificial Sequence
  Description of Artificial Sequence: Synthetic oligonucleotide
guuggaaguaagagaggaa

SEQ ID NO: 881363 - RNA, 19 nt, Artificial Sequence
  Description of Artificial Sequence: Synthetic oligonucleotide
cccaggagucucucaauag

SEQ ID NO: 881364 - RNA, 19 nt, Artificial Sequence
  Description of Artificial Sequence: Synthetic oligonucleotide
guaauggugguaaggguau

SEQ ID NO: 881365 - RNA, 19 nt, Artificial Sequence
  Description of Artificial Sequence: Synthetic oligonucleotide
aucugaaguggcacugcca

SEQ ID NO: 881366 - RNA, 19 nt, Artificial Sequence
  Description of Artificial Sequence: Synthetic oligonucleotide
ggcggcggcaucugaagug

SEQ ID NO: 881367 - RNA, 19 nt, Artificial Sequence
  Description of Artificial Sequence: Synthetic oligonucleotide
cuugcaccggcggcggcgg

SEQ ID NO: 881368 - RNA, 19 nt, Artificial Sequence
  Description of Artificial Sequence: Synthetic oligonucleotide
aggggucuugaugacuaga

SEQ ID NO: 881369 - RNA, 19 nt, Artificial Sequence
  Description of Artificial Sequence: Synthetic oligonucleotide
gcuaaaccuaauuucuuau

SEQ ID NO: 881370 - RNA, 19 nt, Artificial Sequence
  Description of Artificial Sequence: Synthetic oligonucleotide
gguaaggguauccguuaga

SEQ ID NO: 881371 - RNA, 19 nt, Artificial Sequence
  Description of Artificial Sequence: Synthetic oligonucleotide
caugcugauucaggguguc

SEQ ID NO: 881372 - RNA, 19 nt, Artificial Sequence
  Description of Artificial Sequence: Synthetic oligonucleotide
uaauggugguaaggguauc

SEQ ID NO: 881373 - RNA, 19 nt, Artificial Sequence
  Description of Artificial Sequence: Synthetic oligonucleotide
uggacuacuugggacccuu

SEQ ID NO: 881374 - RNA, 19 nt, Artificial Sequence
  Description of Artificial Sequence: Synthetic oligonucleotide
cccgcgaagaucaggacca

SEQ ID NO: 881375 - RNA, 19 nt, Artificial Sequence
  Description of Artificial Sequence: Synthetic oligonucleotide
gcuugacagagagccaaag

SEQ ID NO: 881376 - RNA, 19 nt, Artificial Sequence
  Description of Artificial Sequence: Synthetic oligonucleotide
uugagccuucugagggguc

SEQ ID NO: 881377 - RNA, 19 nt, Artificial Sequence
  Description of Artificial Sequence: Synthetic oligonucleotide
gcugagcuaaaccuaauuu

SEQ ID NO: 881378 - RNA, 19 nt, Artificial Sequence
  Description of Artificial Sequence: Synthetic oligonucleotide
acguggcugggacgccugg

SEQ ID NO: 881379 - RNA, 19 nt, Artificial Sequence
  Description of Artificial Sequence: Synthetic oligonucleotide
ccuuguacccacucaucuc

SEQ ID NO: 881380 - RNA, 19 nt, Artificial Sequence
  Description of Artificial Sequence: Synthetic oligonucleotide
ugacccagcuagccgcauu

SEQ ID NO: 881381 - RNA, 19 nt, Artificial Sequence
  Description of Artificial Sequence: Synthetic oligonucleotide
cagagagaauugaugcagu

SEQ ID NO: 881382 - RNA, 19 nt, Artificial Sequence
  Description of Artificial Sequence: Synthetic oligonucleotide
cuagccgcauugauccaaa

SEQ ID NO: 881383 - RNA, 19 nt, Artificial Sequence
  Description of Artificial Sequence: Synthetic oligonucleotide
gaacccgguguaggaggag

SEQ ID NO: 881384 - RNA, 19 nt, Artificial Sequence
  Description of Artificial Sequence: Synthetic oligonucleotide
ggucuagagggaaccagca

SEQ ID NO: 881385 - RNA, 19 nt, Artificial Sequence
  Description of Artificial Sequence: Synthetic oligonucleotide
cuggcccuuguacccacuc

SEQ ID NO: 881386 - RNA, 19 nt, Artificial Sequence
  Description of Artificial Sequence: Synthetic oligonucleotide
gcggcggcaucugaagugg

SEQ ID NO: 881387 - RNA, 19 nt, Artificial Sequence
  Description of Artificial Sequence: Synthetic oligonucleotide
gaacauccugacccagcua

SEQ ID NO: 881388 - RNA, 19 nt, Artificial Sequence
  Description of Artificial Sequence: Synthetic oligonucleotide
gguugacaaagcccaugga

SEQ ID NO: 881389 - RNA, 19 nt, Artificial Sequence
  Description of Artificial Sequence: Synthetic oligonucleotide
cuuccucaguacuccagcu

SEQ ID NO: 881390 - RNA, 19 nt, Artificial Sequence
  Description of Artificial Sequence: Synthetic oligonucleotide
ugacagcaucucgggguug

SEQ ID NO: 881391 - RNA, 19 nt, Artificial Sequence
  Description of Artificial Sequence: Synthetic oligonucleotide
cugcauggcccggggauug

SEQ ID NO: 881392 - RNA, 19 nt, Artificial Sequence
  Description of Artificial Sequence: Synthetic oligonucleotide
auccuggaccaagggguug

SEQ ID NO: 881393 - RNA, 19 nt, Artificial Sequence
  Description of Artificial Sequence: Synthetic oligonucleotide
agcuagccgcauugaucca

SEQ ID NO: 881394 - RNA, 19 nt, Artificial Sequence
  Description of Artificial Sequence: Synthetic oligonucleotide
agggaaccagcaaggaauu

SEQ ID NO: 881395 - RNA, 19 nt, Artificial Sequence
  Description of Artificial Sequence: Synthetic oligonucleotide
ccggggauuggugaggaug

SEQ ID NO: 881396 - RNA, 19 nt, Artificial Sequence
  Description of Artificial Sequence: Synthetic oligonucleotide
agacguggcugggacgccu

SEQ ID NO: 881397 - RNA, 19 nt, Artificial Sequence
  Description of Artificial Sequence: Synthetic oligonucleotide
cacaagaguaaugguggua

SEQ ID NO: 881398 - RNA, 19 nt, Artificial Sequence
  Description of Artificial Sequence: Synthetic oligonucleotide
cugagaucauguucugcau

SEQ ID NO: 881399 - RNA, 19 nt, Artificial Sequence
  Description of Artificial Sequence: Synthetic oligonucleotide
gagcuaaaccuaauuucuu

SEQ ID NO: 881400 - RNA, 19 nt, Artificial Sequence
  Description of Artificial Sequence: Synthetic oligonucleotide
gggaucaggagagcuggga

SEQ ID NO: 881401 - RNA, 19 nt, Artificial Sequence
  Description of Artificial Sequence: Synthetic oligonucleotide
cuugagccuucugaggggu

SEQ ID NO: 881402 - RNA, 19 nt, Artificial Sequence
  Description of Artificial Sequence: Synthetic oligonucleotide
aggguggauguuggaagua

SEQ ID NO: 881403 - RNA, 19 nt, Artificial Sequence
  Description of Artificial Sequence: Synthetic oligonucleotide
caucucgggguuggacaug

SEQ ID NO: 881404 - RNA, 19 nt, Artificial Sequence
  Description of Artificial Sequence: Synthetic oligonucleotide
gggauccuccaaguagcug

SEQ ID NO: 881405 - RNA, 19 nt, Artificial Sequence
  Description of Artificial Sequence: Synthetic oligonucleotide
ggugguaaggguauccguu

SEQ ID NO: 881406 - RNA, 19 nt, Artificial Sequence
  Description of Artificial Sequence: Synthetic oligonucleotide
ccgcauugauccaaaaggu

SEQ ID NO: 881407 - RNA, 19 nt, Artificial Sequence
  Description of Artificial Sequence: Synthetic oligonucleotide
gcagccaccgggguggguc

SEQ ID NO: 881408 - RNA, 19 nt, Artificial Sequence
  Description of Artificial Sequence: Synthetic oligonucleotide
ggguggauguuggaaguaa

SEQ ID NO: 881409 - RNA, 19 nt, Artificial Sequence
  Description of Artificial Sequence: Synthetic oligonucleotide
gggguuguccaugaucugu

SEQ ID NO: 881410 - RNA, 19 nt, Artificial Sequence
  Description of Artificial Sequence: Synthetic oligonucleotide
ggaacccgguguaggagga

SEQ ID NO: 881411 - RNA, 19 nt, Artificial Sequence
  Description of Artificial Sequence: Synthetic oligonucleotide
cugggaccccaggagucuc

SEQ ID NO: 881412 - RNA, 19 nt, Artificial Sequence
  Description of Artificial Sequence: Synthetic oligonucleotide
acccagcuagccgcauuga

SEQ ID NO: 881413 - RNA, 19 nt, Artificial Sequence
  Description of Artificial Sequence: Synthetic oligonucleotide
ggcccuuguacccacucau

SEQ ID NO: 881414 - RNA, 19 nt, Artificial Sequence
  Description of Artificial Sequence: Synthetic oligonucleotide
guucgagacuguccaugau

SEQ ID NO: 881415 - RNA, 19 nt, Artificial Sequence
  Description of Artificial Sequence: Synthetic oligonucleotide
gcuagccgcauugauccaa

SEQ ID NO: 881416 - RNA, 19 nt, Artificial Sequence
  Description of Artificial Sequence: Synthetic oligonucleotide
ggcccggggauuggugagg

SEQ ID NO: 881417 - RNA, 19 nt, Artificial Sequence
  Description of Artificial Sequence: Synthetic oligonucleotide
gggguuggacaugagcugu

SEQ ID NO: 881418 - RNA, 19 nt, Artificial Sequence
  Description of Artificial Sequence: Synthetic oligonucleotide
cccuuguacccacucaucu

SEQ ID NO: 881419 - RNA, 19 nt, Artificial Sequence
  Description of Artificial Sequence: Synthetic oligonucleotide
ggaaaagggcaggcauguc

SEQ ID NO: 881420 - RNA, 19 nt, Artificial Sequence
  Description of Artificial Sequence: Synthetic oligonucleotide
gcacuggaacccgguguag

SEQ ID NO: 881421 - RNA, 19 nt, Artificial Sequence
  Description of Artificial Sequence: Synthetic oligonucleotide
gcgcugagagguggggaag

SEQ ID NO: 881422 - RNA, 19 nt, Artificial Sequence
  Description of Artificial Sequence: Synthetic oligonucleotide
caucacuguucccacccuu

SEQ ID NO: 881423 - RNA, 19 nt, Artificial Sequence
  Description of Artificial Sequence: Synthetic oligonucleotide
ggcuggcccuuguacccac

SEQ ID NO: 881424 - RNA, 19 nt, Artificial Sequence
  Description of Artificial Sequence: Synthetic oligonucleotide
ggggccucggcugcagaac

SEQ ID NO: 881425 - RNA, 19 nt, Artificial Sequence
  Description of Artificial Sequence: Synthetic oligonucleotide
gccaagggaucaggagagc

SEQ ID NO: 881426 - RNA, 19 nt, Artificial Sequence
  Description of Artificial Sequence: Synthetic oligonucleotide
ccagagacccagagaccca

SEQ ID NO: 881427 - RNA, 19 nt, Artificial Sequence
  Description of Artificial Sequence: Synthetic oligonucleotide
gcccuuguacccacucauc

SEQ ID NO: 881428 - RNA, 19 nt, Artificial Sequence
  Description of Artificial Sequence: Synthetic oligonucleotide
ccaagggaucaggagagcu

SEQ ID NO: 881429 - RNA, 19 nt, Artificial Sequence
  Description of Artificial Sequence: Synthetic oligonucleotide
ggcugccuaggccaaggau

SEQ ID NO: 881430 - RNA, 19 nt, Artificial Sequence
  Description of Artificial Sequence: Synthetic oligonucleotide
ccugacccagcuagccgca

SEQ ID NO: 881431 - RNA, 19 nt, Artificial Sequence
  Description of Artificial Sequence: Synthetic oligonucleotide
cacgguugacaaagcccau

SEQ ID NO: 881432 - RNA, 19 nt, Artificial Sequence
  Description of Artificial Sequence: Synthetic oligonucleotide
ccacaagaguaaugguggu

SEQ ID NO: 881433 - RNA, 19 nt, Artificial Sequence
  Description of Artificial Sequence: Synthetic oligonucleotide
ggaguccgggauguuccaa

SEQ ID NO: 881434 - RNA, 19 nt, Artificial Sequence
  Description of Artificial Sequence: Synthetic oligonucleotide
cagugagcccauccuugau

SEQ ID NO: 881435 - RNA, 19 nt, Artificial Sequence
  Description of Artificial Sequence: Synthetic oligonucleotide
cccacccuuuccucaaaua

SEQ ID NO: 881436 - RNA, 19 nt, Artificial Sequence
  Description of Artificial Sequence: Synthetic oligonucleotide
cugggacgccuggggaaga

SEQ ID NO: 881437 - RNA, 19 nt, Artificial Sequence
  Description of Artificial Sequence: Synthetic oligonucleotide
ccccuugcaccggcggcgg

SEQ ID NO: 881438 - RNA, 19 nt, Artificial Sequence
  Description of Artificial Sequence: Synthetic oligonucleotide
ggguauccguuagagccau

SEQ ID NO: 881439 - RNA, 19 nt, Artificial Sequence
  Description of Artificial Sequence: Synthetic oligonucleotide
cugcaucagcugaggguuu

SEQ ID NO: 881440 - RNA, 19 nt, Artificial Sequence
  Description of Artificial Sequence: Synthetic oligonucleotide
gcuucgcauguaaggggcu

SEQ ID NO: 881441 - RNA, 19 nt, Artificial Sequence
  Description of Artificial Sequence: Synthetic oligonucleotide
ccgcgaagaucaggaccag

SEQ ID NO: 881442 - RNA, 19 nt, Artificial Sequence
  Description of Artificial Sequence: Synthetic oligonucleotide
cuggacuacuugggacccu

SEQ ID NO: 881443 - RNA, 19 nt, Artificial Sequence
  Description of Artificial Sequence: Synthetic oligonucleotide
cccagcuagccgcauugau

SEQ ID NO: 881444 - RNA, 19 nt, Artificial Sequence
  Description of Artificial Sequence: Synthetic oligonucleotide
cgcauguaaggggcugaga

SEQ ID NO: 881445 - RNA, 19 nt, Artificial Sequence
  Description of Artificial Sequence: Synthetic oligonucleotide
ccuugaucccaugcugauu

SEQ ID NO: 881446 - RNA, 19 nt, Artificial Sequence
  Description of Artificial Sequence: Synthetic oligonucleotide
cggagcugcuccugaaguu

SEQ ID NO: 881447 - RNA, 19 nt, Artificial Sequence
  Description of Artificial Sequence: Synthetic oligonucleotide
ccacuaggcuggcccuugu

SEQ ID NO: 881448 - RNA, 19 nt, Artificial Sequence
  Description of Artificial Sequence: Synthetic oligonucleotide
caccgggguggguccccuu

SEQ ID NO: 881449 - RNA, 19 nt, Artificial Sequence
  Description of Artificial Sequence: Synthetic oligonucleotide
acauaaaugacuaaguucc

SEQ ID NO: 881450 - RNA, 19 nt, Artificial Sequence
  Description of Artificial Sequence: Synthetic oligonucleotide
aacauaaaugacuaaguuc

SEQ ID NO: 881451 - RNA, 19 nt, Artificial Sequence
  Description of Artificial Sequence: Synthetic oligonucleotide
agaacauucuuauuugucc

SEQ ID NO: 881452 - RNA, 19 nt, Artificial Sequence
  Description of Artificial Sequence: Synthetic oligonucleotide
aauuugacuagaaacagac

SEQ ID NO: 881453 - RNA, 19 nt, Artificial Sequence
  Description of Artificial Sequence: Synthetic oligonucleotide
aauuuaauagcacaggcau

SEQ ID NO: 881454 - RNA, 19 nt, Artificial Sequence
  Description of Artificial Sequence: Synthetic oligonucleotide
uacacaauuaggcucaagg

SEQ ID NO: 881455 - RNA, 19 nt, Artificial Sequence
  Description of Artificial Sequence: Synthetic oligonucleotide
aaaaccaagguucuguuca

SEQ ID NO: 881456 - RNA, 19 nt, Artificial Sequence
  Description of Artificial Sequence: Synthetic oligonucleotide
gaucauaugauccuguuac

SEQ ID NO: 881457 - RNA, 19 nt, Artificial Sequence
  Description of Artificial Sequence: Synthetic oligonucleotide
uuuaacaugucccagacuu

SEQ ID NO: 881458 - RNA, 19 nt, Artificial Sequence
  Description of Artificial Sequence: Synthetic oligonucleotide
cuuaguuugucaaagggag

SEQ ID NO: 881459 - RNA, 19 nt, Artificial Sequence
  Description of Artificial Sequence: Synthetic oligonucleotide
auuauguuaaaacacuuca

SEQ ID NO: 881460 - RNA, 19 nt, Artificial Sequence
  Description of Artificial Sequence: Synthetic oligonucleotide
aagguuucgguaugcaggc

SEQ ID NO: 881461 - RNA, 19 nt, Artificial Sequence
  Description of Artificial Sequence: Synthetic oligonucleotide
gauccgaaaacuuuucagg

SEQ ID NO: 881462 - RNA, 19 nt, Artificial Sequence
  Description of Artificial Sequence: Synthetic oligonucleotide
ugucauaccauucuaggug

SEQ ID NO: 881463 - RNA, 19 nt, Artificial Sequence
  Description of Artificial Sequence: Synthetic oligonucleotide
  modified_base (4)..(4): a, c, u, g, unknown or other
aaunuccauaauuaacugu

SEQ ID NO: 881464 - RNA, 19 nt, Artificial Sequence
  Description of Artificial Sequence: Synthetic oligonucleotide
auucauuugaguucaauca

SEQ ID NO: 881465 - RNA, 19 nt, Artificial Sequence
  Description of Artificial Sequence: Synthetic oligonucleotide
auaugauccuguuacaaag

SEQ ID NO: 881466 - RNA, 19 nt, Artificial Sequence
  Description of Artificial Sequence: Synthetic oligonucleotide
  modified_base (16)..(16): a, c, u, g, unknown or other
uuuggaguuuggaaunucc

SEQ ID NO: 881467 - RNA, 19 nt, Artificial Sequence
  Description of Artificial Sequence: Synthetic oligonucleotide
  modified_base (7)..(7): a, c, u, g, unknown or other
uggaaunuccauaauuaac

SEQ ID NO: 881468 - RNA, 19 nt, Artificial Sequence
  Description of Artificial Sequence: Synthetic oligonucleotide
uuacuauaaauuuuacaca

SEQ ID NO: 881469 - RNA, 19 nt, Artificial Sequence
  Description of Artificial Sequence: Synthetic oligonucleotide
ucaagugccuuugagaucc

SEQ ID NO: 881470 - RNA, 19 nt, Artificial Sequence
  Description of Artificial Sequence: Synthetic oligonucleotide
uuuaacauaacgaccuccu

SEQ ID NO: 881471 - RNA, 19 nt, Artificial Sequence
  Description of Artificial Sequence: Synthetic oligonucleotide
cagacuuuaacauaacgac

SEQ ID NO: 881472 - RNA, 19 nt, Artificial Sequence
  Description of Artificial Sequence: Synthetic oligonucleotide
uguuuaacgcucaguaucc

SEQ ID NO: 881473 - RNA, 19 nt, Artificial Sequence
  Description of Artificial Sequence: Synthetic oligonucleotide
aaucaguggaguuccuaac

SEQ ID NO: 881474 - RNA, 19 nt, Artificial Sequence
  Description of Artificial Sequence: Synthetic oligonucleotide
uaucgucucaucuucauga

SEQ ID NO: 881475 - RNA, 19 nt, Artificial Sequence
  Description of Artificial Sequence: Synthetic oligonucleotide
uuuaaguuugaguuaacau

SEQ ID NO: 881476 - RNA, 19 nt, Artificial Sequence
  Description of Artificial Sequence: Synthetic oligonucleotide
uccuuuaugauggaaacug

SEQ ID NO: 881477 - RNA, 19 nt, Artificial Sequence
  Description of Artificial Sequence: Synthetic oligonucleotide
uuuaacaaagguuucggua

SEQ ID NO: 881478 - RNA, 19 nt, Artificial Sequence
  Description of Artificial Sequence: Synthetic oligonucleotide
ucauuaagcauuugacucc

SEQ ID NO: 881479 - RNA, 19 nt, Artificial Sequence
  Description of Artificial Sequence: Synthetic oligonucleotide
auucuuauuuguccgggcg

SEQ ID NO: 881480 - RNA, 19 nt, Artificial Sequence
  Description of Artificial Sequence: Synthetic oligonucleotide
uugaguuaacauaauaaau

SEQ ID NO: 881481 - RNA, 19 nt, Artificial Sequence
  Description of Artificial Sequence: Synthetic oligonucleotide
aagagaucaggguucagcu

SEQ ID NO: 881482 - RNA, 19 nt, Artificial Sequence
  Description of Artificial Sequence: Synthetic oligonucleotide
uuuguaagaaguugugcug

SEQ ID NO: 881483 - RNA, 19 nt, Artificial Sequence
  Description of Artificial Sequence: Synthetic oligonucleotide
  modified_base (5)..(5): a, c, u, g, unknown or other
gaaunuccauaauuaacug

SEQ ID NO: 881484 - RNA, 19 nt, Artificial Sequence
  Description of Artificial Sequence: Synthetic oligonucleotide
aacauaacgaccuccugaa

SEQ ID NO: 881485 - RNA, 19 nt, Artificial Sequence
  Description of Artificial Sequence: Synthetic oligonucleotide
aaaaguucagaacccgggu

SEQ ID NO: 881486 - RNA, 19 nt, Artificial Sequence
  Description of Artificial Sequence: Synthetic oligonucleotide
aucacagggagauauauau

SEQ ID NO: 881487 - RNA, 19 nt, Artificial Sequence
  Description of Artificial Sequence: Synthetic oligonucleotide
uacuauuucagcagcauua

SEQ ID NO: 881488 - RNA, 19 nt, Artificial Sequence
  Description of Artificial Sequence: Synthetic oligonucleotide
aguaaucucuguccagagc

SEQ ID NO: 881489 - RNA, 19 nt, Artificial Sequence
  Description of Artificial Sequence: Synthetic oligonucleotide
caaaucucggcugagacag

SEQ ID NO: 881490 - RNA, 19 nt, Artificial Sequence
  Description of Artificial Sequence: Synthetic oligonucleotide
agauccgaaaacuuuucag

SEQ ID NO: 881491 - RNA, 19 nt, Artificial Sequence
  Description of Artificial Sequence: Synthetic oligonucleotide
ugaguaguuaacaccucag

SEQ ID NO: 881492 - RNA, 19 nt, Artificial Sequence
  Description of Artificial Sequence: Synthetic oligonucleotide
uccuugaaguacuauaaac

SEQ ID NO: 881493 - RNA, 19 nt, Artificial Sequence
  Description of Artificial Sequence: Synthetic oligonucleotide
cauucucugacagagagac

SEQ ID NO: 881494 - RNA, 19 nt, Artificial Sequence
  Description of Artificial Sequence: Synthetic oligonucleotide
uaagaaguugugcuguaga

SEQ ID NO: 881495 - RNA, 19 nt, Artificial Sequence
  Description of Artificial Sequence: Synthetic oligonucleotide
ucuuuaaaaccaagguucu

SEQ ID NO: 881496 - RNA, 19 nt, Artificial Sequence
  Description of Artificial Sequence: Synthetic oligonucleotide
cacaauuaggcucaaggac

SEQ ID NO: 881497 - RNA, 19 nt, Artificial Sequence
  Description of Artificial Sequence: Synthetic oligonucleotide
ucggaauguucucugaaug

SEQ ID NO: 881498 - RNA, 19 nt, Artificial Sequence
  Description of Artificial Sequence: Synthetic oligonucleotide
aaaccaagguucuguucac

SEQ ID NO: 881499 - RNA, 19 nt, Artificial Sequence
  Description of Artificial Sequence: Synthetic oligonucleotide
auuugaguucaaucagugg

SEQ ID NO: 881500 - RNA, 19 nt, Artificial Sequence
  Description of Artificial Sequence: Synthetic oligonucleotide
ucccauuugacaucaauuc

SEQ ID NO: 881501 - RNA, 19 nt, Artificial Sequence
  Description of Artificial Sequence: Synthetic oligonucleotide
agcauuaaucagaacaggg

SEQ ID NO: 881502 - RNA, 19 nt, Artificial Sequence
  Description of Artificial Sequence: Synthetic oligonucleotide
acacaagcaacuguccucc

SEQ ID NO: 881503 - RNA, 19 nt, Artificial Sequence
  Description of Artificial Sequence: Synthetic oligonucleotide
aguaguuaacaccucagaa

SEQ ID NO: 881504 - RNA, 19 nt, Artificial Sequence
  Description of Artificial Sequence: Synthetic oligonucleotide
cuccuaauccuuucaaggg

SEQ ID NO: 881505 - RNA, 19 nt, Artificial Sequence
  Description of Artificial Sequence: Synthetic oligonucleotide
uucuacgaguccuugaagu

SEQ ID NO: 881506 - RNA, 19 nt, Artificial Sequence
  Description of Artificial Sequence: Synthetic oligonucleotide
ugagaaauuugacuagaaa

SEQ ID NO: 881507 - RNA, 19 nt, Artificial Sequence
  Description of Artificial Sequence: Synthetic oligonucleotide
gaaacagacagaccuuccc

SEQ ID NO: 881508 - RNA, 19 nt, Artificial Sequence
  Description of Artificial Sequence: Synthetic oligonucleotide
ucaacuacuggugacuggc

SEQ ID NO: 881509 - RNA, 19 nt, Artificial Sequence
  Description of Artificial Sequence: Synthetic oligonucleotide
ugguaaaauaucaaauauu

SEQ ID NO: 881510 - RNA, 19 nt, Artificial Sequence
  Description of Artificial Sequence: Synthetic oligonucleotide
cagaaagccaagaagacga

SEQ ID NO: 881511 - RNA, 19 nt, Artificial Sequence
  Description of Artificial Sequence: Synthetic oligonucleotide
guguuuaacgcucaguauc

SEQ ID NO: 881512 - RNA, 19 nt, Artificial Sequence
  Description of Artificial Sequence: Synthetic oligonucleotide
agagcauuggcuaggacuc

SEQ ID NO: 881513 - RNA, 19 nt, Artificial Sequence
  Description of Artificial Sequence: Synthetic oligonucleotide
cauuugaguucaaucagug

SEQ ID NO: 881514 - RNA, 19 nt, Artificial Sequence
  Description of Artificial Sequence: Synthetic oligonucleotide
cauucuagguguuucuuug

SEQ ID NO: 881515 - RNA, 19 nt, Artificial Sequence
  Description of Artificial Sequence: Synthetic oligonucleotide
uaugauccuguuacaaaga

SEQ ID NO: 881516 - RNA, 19 nt, Artificial Sequence
  Description of Artificial Sequence: Synthetic oligonucleotide
accuuaacauaauugcaug

SEQ ID NO: 881517 - RNA, 19 nt, Artificial Sequence
  Description of Artificial Sequence: Synthetic oligonucleotide
augauccuguuacaaagag

SEQ ID NO: 881518 - RNA, 19 nt, Artificial Sequence
  Description of Artificial Sequence: Synthetic oligonucleotide
auaaucggaauguucucug

SEQ ID NO: 881519 - RNA, 19 nt, Artificial Sequence
  Description of Artificial Sequence: Synthetic oligonucleotide
caauuacuauuucagcagc

SEQ ID NO: 881520 - RNA, 19 nt, Artificial Sequence
  Description of Artificial Sequence: Synthetic oligonucleotide
cuuuuaacaugucccagac

SEQ ID NO: 881521 - RNA, 19 nt, Artificial Sequence
  Description of Artificial Sequence: Synthetic oligonucleotide
agaacaggggcaaaucucg

SEQ ID NO: 881522 - RNA, 19 nt, Artificial Sequence
  Description of Artificial Sequence: Synthetic oligonucleotide
uuccuaaccaucccauuug

SEQ ID NO: 881523 - RNA, 19 nt, Artificial Sequence
  Description of Artificial Sequence: Synthetic oligonucleotide
cacagggagauauauauca

SEQ ID NO: 881524 - RNA, 19 nt, Artificial Sequence
  Description of Artificial Sequence: Synthetic oligonucleotide
gucauucccacaacuaucg

SEQ ID NO: 881525 - RNA, 19 nt, Artificial Sequence
  Description of Artificial Sequence: Synthetic oligonucleotide
uauguuuaaguuugaguua

SEQ ID NO: 881526 - RNA, 19 nt, Artificial Sequence
  Description of Artificial Sequence: Synthetic oligonucleotide
acacaauuaggcucaagga

SEQ ID NO: 881527 - RNA, 19 nt, Artificial Sequence
  Description of Artificial Sequence: Synthetic oligonucleotide
aguuaggaguucuugucug

SEQ ID NO: 881528 - RNA, 19 nt, Artificial Sequence
  Description of Artificial Sequence: Synthetic oligonucleotide
cuaaccaucccauuugaca

SEQ ID NO: 881529 - RNA, 19 nt, Artificial Sequence
  Description of Artificial Sequence: Synthetic oligonucleotide
gacgaaaagaaucucuuua

SEQ ID NO: 881530 - RNA, 19 nt, Artificial Sequence
  Description of Artificial Sequence: Synthetic oligonucleotide
auccgaaaacuuuucaggu

SEQ ID NO: 881531 - RNA, 19 nt, Artificial Sequence
  Description of Artificial Sequence: Synthetic oligonucleotide
aacccggguaaucuccuuc

SEQ ID NO: 881532 - RNA, 19 nt, Artificial Sequence
  Description of Artificial Sequence: Synthetic oligonucleotide
cauccagugagccggagag

SEQ ID NO: 881533 - RNA, 19 nt, Artificial Sequence
  Description of Artificial Sequence: Synthetic oligonucleotide
  modified_base (15)..(15): a, c, u, g, unknown or other
uuggaguuuggaaunucca

SEQ ID NO: 881534 - RNA, 19 nt, Artificial Sequence
  Description of Artificial Sequence: Synthetic oligonucleotide
uugaaguacuauaaacuuu

SEQ ID NO: 881535 - RNA, 19 nt, Artificial Sequence
  Description of Artificial Sequence: Synthetic oligonucleotide
uguccgggcguucaaacca

SEQ ID NO: 881536 - RNA, 19 nt, Artificial Sequence
  Description of Artificial Sequence: Synthetic oligonucleotide
  modified_base (3)..(3): a, c, u, g, unknown or other
aunuccauaauuaacugua

SEQ ID NO: 881537 - RNA, 19 nt, Artificial Sequence
  Description of Artificial Sequence: Synthetic oligonucleotide
ugugaucauaugauccugu

SEQ ID NO: 881538 - RNA, 19 nt, Artificial Sequence
  Description of Artificial Sequence: Synthetic oligonucleotide
uuuaacgcucaguauccca

SEQ ID NO: 881539 - RNA, 19 nt, Artificial Sequence
  Description of Artificial Sequence: Synthetic oligonucleotide
uuucuugacaugguggcga

SEQ ID NO: 881540 - RNA, 19 nt, Artificial Sequence
  Description of Artificial Sequence: Synthetic oligonucleotide
uccaacuaagaagaacaag

SEQ ID NO: 881541 - RNA, 19 nt, Artificial Sequence
  Description of Artificial Sequence: Synthetic oligonucleotide
aacuacuggugacuggcca

SEQ ID NO: 881542 - RNA, 19 nt, Artificial Sequence
  Description of Artificial Sequence: Synthetic oligonucleotide
uauuuccgguguuuaacgc

SEQ ID NO: 881543 - RNA, 19 nt, Artificial Sequence
  Description of Artificial Sequence: Synthetic oligonucleotide
cuucaugagacagugccag

SEQ ID NO: 881544 - RNA, 19 nt, Artificial Sequence
  Description of Artificial Sequence: Synthetic oligonucleotide
acuauaaauuuuacacagg

SEQ ID NO: 881545 - RNA, 19 nt, Artificial Sequence
  Description of Artificial Sequence: Synthetic oligonucleotide
aaauuugacuagaaacaga

SEQ ID NO: 881546 - RNA, 19 nt, Artificial Sequence
  Description of Artificial Sequence: Synthetic oligonucleotide
aaucggaauguucucugaa

SEQ ID NO: 881547 - RNA, 19 nt, Artificial Sequence
  Description of Artificial Sequence: Synthetic oligonucleotide
aagggagugaguaguuaac

SEQ ID NO: 881548 - RNA, 19 nt, Artificial Sequence
  Description of Artificial Sequence: Synthetic oligonucleotide
ugauccuguuacaaagaga

SEQ ID NO: 881549 - RNA, 19 nt, Artificial Sequence
  Description of Artificial Sequence: Synthetic oligonucleotide
uagucauucccacaacuau

SEQ ID NO: 881550 - RNA, 19 nt, Artificial Sequence
  Description of Artificial Sequence: Synthetic oligonucleotide
acuuuaacauaacgaccuc

SEQ ID NO: 881551 - RNA, 19 nt, Artificial Sequence
  Description of Artificial Sequence: Synthetic oligonucleotide
  modified_base (12)..(12): a, c, u, g, unknown or other
gaguuuggaaunuccauaa

SEQ ID NO: 881552 - RNA, 19 nt, Artificial Sequence
  Description of Artificial Sequence: Synthetic oligonucleotide
acgaaaagaaucucuuuaa

SEQ ID NO: 881553 - RNA, 19 nt, Artificial Sequence
  Description of Artificial Sequence: Synthetic oligonucleotide
uuaucaacuacuggugacu

SEQ ID NO: 881554 - RNA, 19 nt, Artificial Sequence
  Description of Artificial Sequence: Synthetic oligonucleotide
gacuuuaacauaacgaccu

SEQ ID NO: 881555 - RNA, 19 nt, Artificial Sequence
  Description of Artificial Sequence: Synthetic oligonucleotide
uucuuauuuguccgggcgu

SEQ ID NO: 881556 - RNA, 19 nt, Artificial Sequence
  Description of Artificial Sequence: Synthetic oligonucleotide
ucccgaggggaaaagcagg

SEQ ID NO: 881557 - RNA, 19 nt, Artificial Sequence
  Description of Artificial Sequence: Synthetic oligonucleotide
cuaaguuccagcaacauuu

SEQ ID NO: 881558 - RNA, 19 nt, Artificial Sequence
  Description of Artificial Sequence: Synthetic oligonucleotide
acaacuaucgucucaucuu

SEQ ID NO: 881559 - RNA, 19 nt, Artificial Sequence
  Description of Artificial Sequence: Synthetic oligonucleotide
gguucuguucacuuggcag

SEQ ID NO: 881560 - RNA, 19 nt, Artificial Sequence
  Description of Artificial Sequence: Synthetic oligonucleotide
cauaacgaccuccugaaga

SEQ ID NO: 881561 - RNA, 19 nt, Artificial Sequence
  Description of Artificial Sequence: Synthetic oligonucleotide
aauuacuauuucagcagca

SEQ ID NO: 881562 - RNA, 19 nt, Artificial Sequence
  Description of Artificial Sequence: Synthetic oligonucleotide
ggagugaguaguuaacacc

SEQ ID NO: 881563 - RNA, 19 nt, Artificial Sequence
  Description of Artificial Sequence: Synthetic oligonucleotide
cuuuguaagaaguugugcu

SEQ ID NO: 881564 - RNA, 19 nt, Artificial Sequence
  Description of Artificial Sequence: Synthetic oligonucleotide
uggccuauugaucaugaua

SEQ ID NO: 881565 - RNA, 19 nt, Artificial Sequence
  Description of Artificial Sequence: Synthetic oligonucleotide
auuuccgguguuuaacgcu

SEQ ID NO: 881566 - RNA, 19 nt, Artificial Sequence
  Description of Artificial Sequence: Synthetic oligonucleotide
uuuccgguguuuaacgcuc

SEQ ID NO: 881567 - RNA, 19 nt, Artificial Sequence
  Description of Artificial Sequence: Synthetic oligonucleotide
uuaguuugucaaagggagu

SEQ ID NO: 881568 - RNA, 19 nt, Artificial Sequence
  Description of Artificial Sequence: Synthetic oligonucleotide
auuggcuaggacuccucuc

SEQ ID NO: 881569 - RNA, 19 nt, Artificial Sequence
  Description of Artificial Sequence: Synthetic oligonucleotide
ugacuaaguuccagcaaca

SEQ ID NO: 881570 - RNA, 19 nt, Artificial Sequence
  Description of Artificial Sequence: Synthetic oligonucleotide
uuaacaccucagaaagcca

SEQ ID NO: 881571 - RNA, 19 nt, Artificial Sequence
  Description of Artificial Sequence: Synthetic oligonucleotide
uacgaguccuugaaguacu

SEQ ID NO: 881572 - RNA, 19 nt, Artificial Sequence
  Description of Artificial Sequence: Synthetic oligonucleotide
acauucuuauuuguccggg

SEQ ID NO: 881573 - RNA, 19 nt, Artificial Sequence
  Description of Artificial Sequence: Synthetic oligonucleotide
ucaaggguucuguaauuac

SEQ ID NO: 881574 - RNA, 19 nt, Artificial Sequence
  Description of Artificial Sequence: Synthetic oligonucleotide
ugucaccggguugacaugg

SEQ ID NO: 881575 - RNA, 19 nt, Artificial Sequence
  Description of Artificial Sequence: Synthetic oligonucleotide
auuaaucagaacaggggca

SEQ ID NO: 881576 - RNA, 19 nt, Artificial Sequence
  Description of Artificial Sequence: Synthetic oligonucleotide
gcauuaaucagaacagggg

SEQ ID NO: 881577 - RNA, 19 nt, Artificial Sequence
  Description of Artificial Sequence: Synthetic oligonucleotide
ucgggcgucuuuauuacac

SEQ ID NO: 881578 - RNA, 19 nt, Artificial Sequence
  Description of Artificial Sequence: Synthetic oligonucleotide
ucauaugauccuguuacaa

SEQ ID NO: 881579 - RNA, 19 nt, Artificial Sequence
  Description of Artificial Sequence: Synthetic oligonucleotide
agacagauuccuuaucaaa

SEQ ID NO: 881580 - RNA, 19 nt, Artificial Sequence
  Description of Artificial Sequence: Synthetic oligonucleotide
aagucuccuaauccuuuca

SEQ ID NO: 881581 - RNA, 19 nt, Artificial Sequence
  Description of Artificial Sequence: Synthetic oligonucleotide
aaacuaccuuaacauaauu

SEQ ID NO: 881582 - RNA, 19 nt, Artificial Sequence
  Description of Artificial Sequence: Synthetic oligonucleotide
ugagauccgaaaacuuuuc

SEQ ID NO: 881583 - RNA, 19 nt, Artificial Sequence
  Description of Artificial Sequence: Synthetic oligonucleotide
auguuuaaguuugaguuaa

SEQ ID NO: 881584 - RNA, 19 nt, Artificial Sequence
  Description of Artificial Sequence: Synthetic oligonucleotide
uuuuaacaugucccagacu

SEQ ID NO: 881585 - RNA, 19 nt, Artificial Sequence
  Description of Artificial Sequence: Synthetic oligonucleotide
agaagacgaaaagaaucuc

SEQ ID NO: 881586 - RNA, 19 nt, Artificial Sequence
  Description of Artificial Sequence: Synthetic oligonucleotide
gagaaagucuccuaauccu

SEQ ID NO: 881587 - RNA, 19 nt, Artificial Sequence
  Description of Artificial Sequence: Synthetic oligonucleotide
gcauuugacuccuaaggcc

SEQ ID NO: 881588 - RNA, 19 nt, Artificial Sequence
  Description of Artificial Sequence: Synthetic oligonucleotide
  modified_base (2)..(2): a, c, u, g, unknown or other
unuccauaauuaacuguau

SEQ ID NO: 881589 - RNA, 19 nt, Artificial Sequence
  Description of Artificial Sequence: Synthetic oligonucleotide
ccgaaaacuuuucaggucc

SEQ ID NO: 881590 - RNA, 19 nt, Artificial Sequence
  Description of Artificial Sequence: Synthetic oligonucleotide
cauucccacaacuaucguc

SEQ ID NO: 881591 - RNA, 19 nt, Artificial Sequence
  Description of Artificial Sequence: Synthetic oligonucleotide
uccuaaggccaacauuaca

SEQ ID NO: 881592 - RNA, 19 nt, Artificial Sequence
  Description of Artificial Sequence: Synthetic oligonucleotide
uguggacuacuuuguaaga

SEQ ID NO: 881593 - RNA, 19 nt, Artificial Sequence
  Description of Artificial Sequence: Synthetic oligonucleotide
agaguaaucucuguccaga

SEQ ID NO: 881594 - RNA, 19 nt, Artificial Sequence
  Description of Artificial Sequence: Synthetic oligonucleotide
cauucuuauuuguccgggc

SEQ ID NO: 881595 - RNA, 19 nt, Artificial Sequence
  Description of Artificial Sequence: Synthetic oligonucleotide
ugucauuucuugacauggu

SEQ ID NO: 881596 - RNA, 19 nt, Artificial Sequence
  Description of Artificial Sequence: Synthetic oligonucleotide
uccgaaaacuuuucagguc

SEQ ID NO: 881597 - RNA, 19 nt, Artificial Sequence
  Description of Artificial Sequence: Synthetic oligonucleotide
ccuuaacauaauugcaugg

SEQ ID NO: 881598 - RNA, 19 nt, Artificial Sequence
  Description of Artificial Sequence: Synthetic oligonucleotide
uccuaaccaucccauuuga

SEQ ID NO: 881599 - RNA, 19 nt, Artificial Sequence
  Description of Artificial Sequence: Synthetic oligonucleotide
gagauauauaucaauuacu

SEQ ID NO: 881600 - RNA, 19 nt, Artificial Sequence
  Description of Artificial Sequence: Synthetic oligonucleotide
uuuguccgggcguucaaac

SEQ ID NO: 881601 - RNA, 19 nt, Artificial Sequence
  Description of Artificial Sequence: Synthetic oligonucleotide
uuccaacuaagaagaacaa

SEQ ID NO: 881602 - RNA, 19 nt, Artificial Sequence
  Description of Artificial Sequence: Synthetic oligonucleotide
ugauggaaacuguaaccuc

SEQ ID NO: 881603 - RNA, 19 nt, Artificial Sequence
  Description of Artificial Sequence: Synthetic oligonucleotide
cagaacccggguaaucucc

SEQ ID NO: 881604 - RNA, 19 nt, Artificial Sequence
  Description of Artificial Sequence: Synthetic oligonucleotide
uggaguuccuaaccauccc

SEQ ID NO: 881605 - RNA, 19 nt, Artificial Sequence
  Description of Artificial Sequence: Synthetic oligonucleotide
accucacauaaucggaaug

SEQ ID NO: 881606 - RNA, 19 nt, Artificial Sequence
  Description of Artificial Sequence: Synthetic oligonucleotide
cagaacaggggcaaaucuc

SEQ ID NO: 881607 - RNA, 19 nt, Artificial Sequence
  Description of Artificial Sequence: Synthetic oligonucleotide
auaauugcauggaggacug

SEQ ID NO: 881608 - RNA, 19 nt, Artificial Sequence
  Description of Artificial Sequence: Synthetic oligonucleotide
caacuaucgucucaucuuc

SEQ ID NO: 881609 - RNA, 19 nt, Artificial Sequence
  Description of Artificial Sequence: Synthetic oligonucleotide
  modified_base (6)..(6): a, c, u, g, unknown or other
ggaaunuccauaauuaacu

SEQ ID NO: 881610 - RNA, 19 nt, Artificial Sequence
  Description of Artificial Sequence: Synthetic oligonucleotide
ucccauuagucauucccac

SEQ ID NO: 881611 - RNA, 19 nt, Artificial Sequence
  Description of Artificial Sequence: Synthetic oligonucleotide
uucccguugcuucauguua

SEQ ID NO: 881612 - RNA, 19 nt, Artificial Sequence
  Description of Artificial Sequence: Synthetic oligonucleotide
ucggcugagacagauuccu

SEQ ID NO: 881613 - RNA, 19 nt, Artificial Sequence
  Description of Artificial Sequence: Synthetic oligonucleotide
aucauaugauccuguuaca

SEQ ID NO: 881614 - RNA, 19 nt, Artificial Sequence
  Description of Artificial Sequence: Synthetic oligonucleotide
ucacagggagauauauauc

SEQ ID NO: 881615 - RNA, 19 nt, Artificial Sequence
  Description of Artificial Sequence: Synthetic oligonucleotide
uuauuuguccgggcguuca

SEQ ID NO: 881616 - RNA, 19 nt, Artificial Sequence
  Description of Artificial Sequence: Synthetic oligonucleotide
cuuugcuggccuauugauc

SEQ ID NO: 881617 - RNA, 19 nt, Artificial Sequence
  Description of Artificial Sequence: Synthetic oligonucleotide
cauaugauccuguuacaaa

SEQ ID NO: 881618 - RNA, 19 nt, Artificial Sequence
  Description of Artificial Sequence: Synthetic oligonucleotide
gagauccgaaaacuuuuca

SEQ ID NO: 881619 - RNA, 19 nt, Artificial Sequence
  Description of Artificial Sequence: Synthetic oligonucleotide
gccaacauuacauauugaa

SEQ ID NO: 881620 - RNA, 19 nt, Artificial Sequence
  Description of Artificial Sequence: Synthetic oligonucleotide
aguccuugaaguacuauaa

SEQ ID NO: 881621 - RNA, 19 nt, Artificial Sequence
  Description of Artificial Sequence: Synthetic oligonucleotide
aucggaauguucucugaau

SEQ ID NO: 881622 - RNA, 19 nt, Artificial Sequence
  Description of Artificial Sequence: Synthetic oligonucleotide
ugucccagacuuuaacaua

SEQ ID NO: 881623 - RNA, 19 nt, Artificial Sequence
  Description of Artificial Sequence: Synthetic oligonucleotide
ccagacuuuaacauaacga

SEQ ID NO: 881624 - RNA, 19 nt, Artificial Sequence
  Description of Artificial Sequence: Synthetic oligonucleotide
auggaaacuguaaccucgg

SEQ ID NO: 881625 - RNA, 19 nt, Artificial Sequence
  Description of Artificial Sequence: Synthetic oligonucleotide
cucccgaggggaaaagcag

SEQ ID NO: 881626 - RNA, 19 nt, Artificial Sequence
  Description of Artificial Sequence: Synthetic oligonucleotide
ucuccgauucaauuccuuu

SEQ ID NO: 881627 - RNA, 19 nt, Artificial Sequence
  Description of Artificial Sequence: Synthetic oligonucleotide
ucaaagggagugaguaguu

SEQ ID NO: 881628 - RNA, 19 nt, Artificial Sequence
  Description of Artificial Sequence: Synthetic oligonucleotide
uuaacaugucccagacuuu

SEQ ID NO: 881629 - RNA, 19 nt, Artificial Sequence
  Description of Artificial Sequence: Synthetic oligonucleotide
ggaguuaggaguucuuguc

SEQ ID NO: 881630 - RNA, 19 nt, Artificial Sequence
  Description of Artificial Sequence: Synthetic oligonucleotide
uucaaggguucuguaauua

SEQ ID NO: 881631 - RNA, 19 nt, Artificial Sequence
  Description of Artificial Sequence: Synthetic oligonucleotide
ggaaaagcaggacacucuc

SEQ ID NO: 881632 - RNA, 19 nt, Artificial Sequence
  Description of Artificial Sequence: Synthetic oligonucleotide
ucagaacccggguaaucuc

SEQ ID NO: 881633 - RNA, 19 nt, Artificial Sequence
  Description of Artificial Sequence: Synthetic oligonucleotide
agucuccuaauccuuucaa

SEQ ID NO: 881634 - RNA, 19 nt, Artificial Sequence
  Description of Artificial Sequence: Synthetic oligonucleotide
ccacaccucacauaaucgg

SEQ ID NO: 881635 - RNA, 19 nt, Artificial Sequence
  Description of Artificial Sequence: Synthetic oligonucleotide
acgcucaguaucccauuag

SEQ ID NO: 881636 - RNA, 19 nt, Artificial Sequence
  Description of Artificial Sequence: Synthetic oligonucleotide
ucaccggguugacauggug

SEQ ID NO: 881637 - RNA, 19 nt, Artificial Sequence
  Description of Artificial Sequence: Synthetic oligonucleotide
cacaccucacauaaucgga

SEQ ID NO: 881638 - RNA, 19 nt, Artificial Sequence
  Description of Artificial Sequence: Synthetic oligonucleotide
ucuuauuuguccgggcguu

SEQ ID NO: 881639 - RNA, 19 nt, Artificial Sequence
  Description of Artificial Sequence: Synthetic oligonucleotide
uccgguguuuaacgcucag

SEQ ID NO: 881640 - RNA, 19 nt, Artificial Sequence
  Description of Artificial Sequence: Synthetic oligonucleotide
agugaguaguuaacaccuc

SEQ ID NO: 881641 - RNA, 19 nt, Artificial Sequence
  Description of Artificial Sequence: Synthetic oligonucleotide
aaucacagggagauauaua

SEQ ID NO: 881642 - RNA, 19 nt, Artificial Sequence
  Description of Artificial Sequence: Synthetic oligonucleotide
gacagaccuucccauaugu

SEQ ID NO: 881643 - RNA, 19 nt, Artificial Sequence
  Description of Artificial Sequence: Synthetic oligonucleotide
caucccgaccugcaagagc

SEQ ID NO: 881644 - RNA, 19 nt, Artificial Sequence
  Description of Artificial Sequence: Synthetic oligonucleotide
ugacuccuaaggccaacau

SEQ ID NO: 881645 - RNA, 19 nt, Artificial Sequence
  Description of Artificial Sequence: Synthetic oligonucleotide
cucggcugagacagauucc

SEQ ID NO: 881646 - RNA, 19 nt, Artificial Sequence
  Description of Artificial Sequence: Synthetic oligonucleotide
uauuuguccgggcguucaa

SEQ ID NO: 881647 - RNA, 19 nt, Artificial Sequence
  Description of Artificial Sequence: Synthetic oligonucleotide
aacuaucgucucaucuuca

SEQ ID NO: 881648 - RNA, 19 nt, Artificial Sequence
  Description of Artificial Sequence: Synthetic oligonucleotide
ggcucaaggacucugucaa

SEQ ID NO: 881649 - RNA, 19 nt, Artificial Sequence
  Description of Artificial Sequence: Synthetic oligonucleotide
ggaauguucucugaauguc

SEQ ID NO: 881650 - RNA, 19 nt, Artificial Sequence
  Description of Artificial Sequence: Synthetic oligonucleotide
aucccauuugacaucaauu

SEQ ID NO: 881651 - RNA, 19 nt, Artificial Sequence
  Description of Artificial Sequence: Synthetic oligonucleotide
cuucccauauguuuaaguu

SEQ ID NO: 881652 - RNA, 19 nt, Artificial Sequence
  Description of Artificial Sequence: Synthetic oligonucleotide
augguggcgaacagcaugu

SEQ ID NO: 881653 - RNA, 19 nt, Artificial Sequence
  Description of Artificial Sequence: Synthetic oligonucleotide
cggagaguaaucucugucc

SEQ ID NO: 881654 - RNA, 19 nt, Artificial Sequence
  Description of Artificial Sequence: Synthetic oligonucleotide
agaaagucuccuaauccuu

SEQ ID NO: 881655 - RNA, 19 nt, Artificial Sequence
  Description of Artificial Sequence: Synthetic oligonucleotide
guuuaacgcucaguauccc

SEQ ID NO: 881656 - RNA, 19 nt, Artificial Sequence
  Description of Artificial Sequence: Synthetic oligonucleotide
gcauccaugguaaaauauc

SEQ ID NO: 881657 - RNA, 19 nt, Artificial Sequence
  Description of Artificial Sequence: Synthetic oligonucleotide
agagaucaggguucagcuu

SEQ ID NO: 881658 - RNA, 19 nt, Artificial Sequence
  Description of Artificial Sequence: Synthetic oligonucleotide
gggcguucaaaccaucuuc

SEQ ID NO: 881659 - RNA, 19 nt, Artificial Sequence
  Description of Artificial Sequence: Synthetic oligonucleotide
uuccgguguuuaacgcuca

SEQ ID NO: 881660 - RNA, 19 nt, Artificial Sequence
  Description of Artificial Sequence: Synthetic oligonucleotide
gaccugcaagagcauuggc

SEQ ID NO: 881661 - RNA, 19 nt, Artificial Sequence
  Description of Artificial Sequence: Synthetic oligonucleotide
ggaguuccuaaccauccca

SEQ ID NO: 881662 - RNA, 19 nt, Artificial Sequence
  Description of Artificial Sequence: Synthetic oligonucleotide
gucugugucaccggguuga

SEQ ID NO: 881663 - RNA, 19 nt, Artificial Sequence
  Description of Artificial Sequence: Synthetic oligonucleotide
auucccguugcuucauguu

SEQ ID NO: 881664 - RNA, 19 nt, Artificial Sequence
  Description of Artificial Sequence: Synthetic oligonucleotide
cacaacuaucgucucaucu

SEQ ID NO: 881665 - RNA, 19 nt, Artificial Sequence
  Description of Artificial Sequence: Synthetic oligonucleotide
uuucgguaugcaggccucc

SEQ ID NO: 881666 - RNA, 19 nt, Artificial Sequence
  Description of Artificial Sequence: Synthetic oligonucleotide
acaagcaacuguccuccuu

SEQ ID NO: 881667 - RNA, 19 nt, Artificial Sequence
  Description of Artificial Sequence: Synthetic oligonucleotide
aguuccuaaccaucccauu

SEQ ID NO: 881668 - RNA, 19 nt, Artificial Sequence
  Description of Artificial Sequence: Synthetic oligonucleotide
ucaucccgaccugcaagag

SEQ ID NO: 881669 - RNA, 19 nt, Artificial Sequence
  Description of Artificial Sequence: Synthetic oligonucleotide
ugcuggccuauugaucaug

SEQ ID NO: 881670 - RNA, 19 nt, Artificial Sequence
  Description of Artificial Sequence: Synthetic oligonucleotide
caccggguugacaugguga

SEQ ID NO: 881671 - RNA, 19 nt, Artificial Sequence
  Description of Artificial Sequence: Synthetic oligonucleotide
ggccuauugaucaugauau

SEQ ID NO: 881672 - RNA, 19 nt, Artificial Sequence
  Description of Artificial Sequence: Synthetic oligonucleotide
guuccuaaccaucccauuu

SEQ ID NO: 881673 - RNA, 19 nt, Artificial Sequence
  Description of Artificial Sequence: Synthetic oligonucleotide
agugagccggagaguaauc

SEQ ID NO: 881674 - RNA, 19 nt, Artificial Sequence
  Description of Artificial Sequence: Synthetic oligonucleotide
cauaaucggaauguucucu

SEQ ID NO: 881675 - RNA, 19 nt, Artificial Sequence
  Description of Artificial Sequence: Synthetic oligonucleotide
auccuguuacaaagagauc

SEQ ID NO: 881676 - RNA, 19 nt, Artificial Sequence
  Description of Artificial Sequence: Synthetic oligonucleotide
ccuuuuaacaugucccaga

SEQ ID NO: 881677 - RNA, 19 nt, Artificial Sequence
  Description of Artificial Sequence: Synthetic oligonucleotide
acaccucacauaaucggaa

SEQ ID NO: 881678 - RNA, 19 nt, Artificial Sequence
  Description of Artificial Sequence: Synthetic oligonucleotide
uguaaccucgggcgucuuu

SEQ ID NO: 881679 - RNA, 19 nt, Artificial Sequence
  Description of Artificial Sequence: Synthetic oligonucleotide
ucauaccauucuagguguu

SEQ ID NO: 881680 - RNA, 19 nt, Artificial Sequence
  Description of Artificial Sequence: Synthetic oligonucleotide
  modified_base (13)..(13): a, c, u, g, unknown or other
ggaguuuggaaunuccaua

SEQ ID NO: 881681 - RNA, 19 nt, Artificial Sequence
  Description of Artificial Sequence: Synthetic oligonucleotide
guaucccauuagucauucc

SEQ ID NO: 881682 - RNA, 19 nt, Artificial Sequence
  Description of Artificial Sequence: Synthetic oligonucleotide
uggaagcugcauagucaaa

SEQ ID NO: 881683 - RNA, 19 nt, Artificial Sequence
  Description of Artificial Sequence: Synthetic oligonucleotide
uucgguaugcaggccuccu

SEQ ID NO: 881684 - RNA, 19 nt, Artificial Sequence
  Description of Artificial Sequence: Synthetic oligonucleotide
auuuuacacaggagcugca

SEQ ID NO: 881685 - RNA, 19 nt, Artificial Sequence
  Description of Artificial Sequence: Synthetic oligonucleotide
cuuauuuguccgggcguuc

SEQ ID NO: 881686 - RNA, 19 nt, Artificial Sequence
  Description of Artificial Sequence: Synthetic oligonucleotide
caagagcauuggcuaggac

SEQ ID NO: 881687 - RNA, 19 nt, Artificial Sequence
  Description of Artificial Sequence: Synthetic oligonucleotide
guaaccucgggcgucuuua

SEQ ID NO: 881688 - RNA, 19 nt, Artificial Sequence
  Description of Artificial Sequence: Synthetic oligonucleotide
ggcguucaaaccaucuuca

SEQ ID NO: 881689 - RNA, 19 nt, Artificial Sequence
  Description of Artificial Sequence: Synthetic oligonucleotide
guuucgguaugcaggccuc

SEQ ID NO: 881690 - RNA, 19 nt, Artificial Sequence
  Description of Artificial Sequence: Synthetic oligonucleotide
uucccacaacuaucgucuc

SEQ ID NO: 881691 - RNA, 19 nt, Artificial Sequence
  Description of Artificial Sequence: Synthetic oligonucleotide
gagcauuggcuaggacucc

SEQ ID NO: 881692 - RNA, 19 nt, Artificial Sequence
  Description of Artificial Sequence: Synthetic oligonucleotide
auuuguccgggcguucaaa

SEQ ID NO: 881693 - RNA, 19 nt, Artificial Sequence
  Description of Artificial Sequence: Synthetic oligonucleotide
uaaccucgggcgucuuuau

SEQ ID NO: 881694 - RNA, 19 nt, Artificial Sequence
  Description of Artificial Sequence: Synthetic oligonucleotide
accauucuagguguuucuu

SEQ ID NO: 881695 - RNA, 19 nt, Artificial Sequence
  Description of Artificial Sequence: Synthetic oligonucleotide
caagugccuuugagauccg

SEQ ID NO: 881696 - RNA, 19 nt, Artificial Sequence
  Description of Artificial Sequence: Synthetic oligonucleotide
ccgaccugcaagagcauug

SEQ ID NO: 881697 - RNA, 19 nt, Artificial Sequence
  Description of Artificial Sequence: Synthetic oligonucleotide
agccggagaguaaucucug

SEQ ID NO: 881698 - RNA, 19 nt, Artificial Sequence
  Description of Artificial Sequence: Synthetic oligonucleotide
gcucaguaucccauuaguc

SEQ ID NO: 881699 - RNA, 19 nt, Artificial Sequence
  Description of Artificial Sequence: Synthetic oligonucleotide
ccuaaccaucccauuugac

SEQ ID NO: 881700 - RNA, 19 nt, Artificial Sequence
  Description of Artificial Sequence: Synthetic oligonucleotide
gcugagacauggaucucug

SEQ ID NO: 881701 - RNA, 19 nt, Artificial Sequence
  Description of Artificial Sequence: Synthetic oligonucleotide
ccggagaguaaucucuguc

SEQ ID NO: 881702 - RNA, 19 nt, Artificial Sequence
  Description of Artificial Sequence: Synthetic oligonucleotide
aaaucucggcugagacaga

SEQ ID NO: 881703 - RNA, 19 nt, Artificial Sequence
  Description of Artificial Sequence: Synthetic oligonucleotide
cggguugacauggugauuc

SEQ ID NO: 881704 - RNA, 19 nt, Artificial Sequence
  Description of Artificial Sequence: Synthetic oligonucleotide
auuacacaauuaggcucaa

SEQ ID NO: 881705 - RNA, 19 nt, Artificial Sequence
  Description of Artificial Sequence: Synthetic oligonucleotide
gcgucuuuauuacacaauu

SEQ ID NO: 881706 - RNA, 19 nt, Artificial Sequence
  Description of Artificial Sequence: Synthetic oligonucleotide
gcugcaacacucuuaguuu

SEQ ID NO: 881707 - RNA, 19 nt, Artificial Sequence
  Description of Artificial Sequence: Synthetic oligonucleotide
ggguaaucuccuucucauc

SEQ ID NO: 881708 - RNA, 19 nt, Artificial Sequence
  Description of Artificial Sequence: Synthetic oligonucleotide
cauucccguugcuucaugu

SEQ ID NO: 881709 - RNA, 19 nt, Artificial Sequence
  Description of Artificial Sequence: Synthetic oligonucleotide
gaguuccuaaccaucccau

SEQ ID NO: 881710 - RNA, 19 nt, Artificial Sequence
  Description of Artificial Sequence: Synthetic oligonucleotide
gaccucccgaggggaaaag

SEQ ID NO: 881711 - RNA, 19 nt, Artificial Sequence
  Description of Artificial Sequence: Synthetic oligonucleotide
uccgggcguucaaaccauc

SEQ ID NO: 881712 - RNA, 19 nt, Artificial Sequence
  Description of Artificial Sequence: Synthetic oligonucleotide
gcguucaaaccaucuucac

SEQ ID NO: 881713 - RNA, 19 nt, Artificial Sequence
  Description of Artificial Sequence: Synthetic oligonucleotide
ccucgggcgucuuuauuac

SEQ ID NO: 881714 - RNA, 19 nt, Artificial Sequence
  Description of Artificial Sequence: Synthetic oligonucleotide
ccgauucaauuccuuuaug

SEQ ID NO: 881715 - RNA, 19 nt, Artificial Sequence
  Description of Artificial Sequence: Synthetic oligonucleotide
gccuauugaucaugauauc

SEQ ID NO: 881716 - RNA, 19 nt, Artificial Sequence
  Description of Artificial Sequence: Synthetic oligonucleotide
ccucccgaggggaaaagca

SEQ ID NO: 881717 - RNA, 19 nt, Artificial Sequence
  Description of Artificial Sequence: Synthetic oligonucleotide
gugagccggagaguaaucu

SEQ ID NO: 881718 - RNA, 19 nt, Artificial Sequence
  Description of Artificial Sequence: Synthetic oligonucleotide
cucgggcgucuuuauuaca

SEQ ID NO: 881719 - RNA, 19 nt, Artificial Sequence
  Description of Artificial Sequence: Synthetic oligonucleotide
gcuggccuauugaucauga

SEQ ID NO: 881720 - RNA, 19 nt, Artificial Sequence
  Description of Artificial Sequence: Synthetic oligonucleotide
cgguguuuaacgcucagua

SEQ ID NO: 881721 - RNA, 19 nt, Artificial Sequence
  Description of Artificial Sequence: Synthetic oligonucleotide
ggaguucccuuugguaauc

SEQ ID NO: 881722 - RNA, 19 nt, Artificial Sequence
  Description of Artificial Sequence: Synthetic oligonucleotide
ggcuaggacuccucuccga

SEQ ID NO: 881723 - RNA, 19 nt, Artificial Sequence
  Description of Artificial Sequence: Synthetic oligonucleotide
cgaccugcaagagcauugg

SEQ ID NO: 881724 - RNA, 19 nt, Artificial Sequence
  Description of Artificial Sequence: Synthetic oligonucleotide
ccuuuaugauggaaacugu

SEQ ID NO: 881725 - RNA, 19 nt, Artificial Sequence
  Description of Artificial Sequence: Synthetic oligonucleotide
ggggcaaaucucggcugag

SEQ ID NO: 881726 - RNA, 19 nt, Artificial Sequence
  Description of Artificial Sequence: Synthetic oligonucleotide
auuaagcauuugacuccua

SEQ ID NO: 881727 - RNA, 19 nt, Artificial Sequence
  Description of Artificial Sequence: Synthetic oligonucleotide
cucacauaaucggaauguu

SEQ ID NO: 881728 - RNA, 19 nt, Artificial Sequence
  Description of Artificial Sequence: Synthetic oligonucleotide
cagugagccggagaguaau

SEQ ID NO: 881729 - RNA, 19 nt, Artificial Sequence
  Description of Artificial Sequence: Synthetic oligonucleotide
guccaucauccccaagguu

SEQ ID NO: 881730 - RNA, 19 nt, Artificial Sequence
  Description of Artificial Sequence: Synthetic oligonucleotide
gacuccucuccgauucaau

SEQ ID NO: 881731 - RNA, 19 nt, Artificial Sequence
  Description of Artificial Sequence: Synthetic oligonucleotide
ggccaacauuacauauuga

SEQ ID NO: 881732 - RNA, 19 nt, Artificial Sequence
  Description of Artificial Sequence: Synthetic oligonucleotide
ccacaacuaucgucucauc

SEQ ID NO: 881733 - RNA, 19 nt, Artificial Sequence
  Description of Artificial Sequence: Synthetic oligonucleotide
acgaguccuugaaguacua

SEQ ID NO: 881734 - RNA, 19 nt, Artificial Sequence
  Description of Artificial Sequence: Synthetic oligonucleotide
cuucaguauuuccgguguu

SEQ ID NO: 881735 - RNA, 19 nt, Artificial Sequence
  Description of Artificial Sequence: Synthetic oligonucleotide
ccaaucacagggagauaua

SEQ ID NO: 881736 - RNA, 19 nt, Artificial Sequence
  Description of Artificial Sequence: Synthetic oligonucleotide
cuggccuauugaucaugau

SEQ ID NO: 881737 - RNA, 19 nt, Artificial Sequence
  Description of Artificial Sequence: Synthetic oligonucleotide
cggguaaucuccuucucau

SEQ ID NO: 881738 - RNA, 19 nt, Artificial Sequence
  Description of Artificial Sequence: Synthetic oligonucleotide
cgcucaguaucccauuagu

SEQ ID NO: 881739 - RNA, 19 nt, Artificial Sequence
  Description of Artificial Sequence: Synthetic oligonucleotide
cgggcgucuuuauuacaca

SEQ ID NO: 881740 - RNA, 19 nt, Artificial Sequence
  Description of Artificial Sequence: Synthetic oligonucleotide
guccgggcguucaaaccau

SEQ ID NO: 881741 - RNA, 19 nt, Artificial Sequence
  Description of Artificial Sequence: Synthetic oligonucleotide
gucaccggguugacauggu

SEQ ID NO: 881742 - RNA, 19 nt, Artificial Sequence
  Description of Artificial Sequence: Synthetic oligonucleotide
ccgggcguucaaaccaucu

SEQ ID NO: 881743 - RNA, 19 nt, Artificial Sequence
  Description of Artificial Sequence: Synthetic oligonucleotide
ccguugcuucauguuaaaa

SEQ ID NO: 881744 - RNA, 19 nt, Artificial Sequence
  Description of Artificial Sequence: Synthetic oligonucleotide
gcaggaguuaggaguucuu

SEQ ID NO: 881745 - RNA, 19 nt, Artificial Sequence
  Description of Artificial Sequence: Synthetic oligonucleotide
ccgguguuuaacgcucagu

SEQ ID NO: 881746 - RNA, 19 nt, Artificial Sequence
  Description of Artificial Sequence: Synthetic oligonucleotide
cgggcguucaaaccaucuu

SEQ ID NO: 881747 - RNA, 19 nt, Artificial Sequence
  Description of Artificial Sequence: Synthetic oligonucleotide
cccgaccugcaagagcauu

SEQ ID NO: 881748 - RNA, 19 nt, Artificial Sequence
  Description of Artificial Sequence: Synthetic oligonucleotide
ccggguugacauggugauu

SEQ ID NO: 881749 - RNA, 19 nt, Artificial Sequence
  Description of Artificial Sequence: Synthetic oligonucleotide
auaaguucuauccagacac

SEQ ID NO: 881750 - RNA, 19 nt, Artificial Sequence
  Description of Artificial Sequence: Synthetic oligonucleotide
ucgguuuucaucaaggagg

SEQ ID NO: 881751 - RNA, 19 nt, Artificial Sequence
  Description of Artificial Sequence: Synthetic oligonucleotide
uuugaauccacauacuuag

SEQ ID NO: 881752 - RNA, 19 nt, Artificial Sequence
  Description of Artificial Sequence: Synthetic oligonucleotide
ucuaaauuguacuuaauug

SEQ ID NO: 881753 - RNA, 19 nt, Artificial Sequence
  Description of Artificial Sequence: Synthetic oligonucleotide
uaaguaauaagucugucug

SEQ ID NO: 881754 - RNA, 19 nt, Artificial Sequence
  Description of Artificial Sequence: Synthetic oligonucleotide
aauuguacuuaauugaagu

SEQ ID NO: 881755 - RNA, 19 nt, Artificial Sequence
  Description of Artificial Sequence: Synthetic oligonucleotide
acagcauugacuuuucagc

SEQ ID NO: 881756 - RNA, 19 nt, Artificial Sequence
  Description of Artificial Sequence: Synthetic oligonucleotide
aauucuccauccucuaucc

SEQ ID NO: 881757 - RNA, 19 nt, Artificial Sequence
  Description of Artificial Sequence: Synthetic oligonucleotide
uaaguaaguaauaagucug

SEQ ID NO: 881758 - RNA, 19 nt, Artificial Sequence
  Description of Artificial Sequence: Synthetic oligonucleotide
guuaauucgauauugccag

SEQ ID NO: 881759 - RNA, 19 nt, Artificial Sequence
  Description of Artificial Sequence: Synthetic oligonucleotide
ucaaucaagagaaggaugc

SEQ ID NO: 881760 - RNA, 19 nt, Artificial Sequence
  Description of Artificial Sequence: Synthetic oligonucleotide
ugaaguacuauucugaaua

SEQ ID NO: 881761 - RNA, 19 nt, Artificial Sequence
  Description of Artificial Sequence: Synthetic oligonucleotide
aucuuuaaaguccaacagc

SEQ ID NO: 881762 - RNA, 19 nt, Artificial Sequence
  Description of Artificial Sequence: Synthetic oligonucleotide
uugaauucgguuuucauca

SEQ ID NO: 881763 - RNA, 19 nt, Artificial Sequence
  Description of Artificial Sequence: Synthetic oligonucleotide
uuaaacauuagcagcacca

SEQ ID NO: 881764 - RNA, 19 nt, Artificial Sequence
  Description of Artificial Sequence: Synthetic oligonucleotide
aaggcuucgaaguaacuuc

SEQ ID NO: 881765 - RNA, 19 nt, Artificial Sequence
  Description of Artificial Sequence: Synthetic oligonucleotide
aaguaauaagucugucugc

SEQ ID NO: 881766 - RNA, 19 nt, Artificial Sequence
  Description of Artificial Sequence: Synthetic oligonucleotide
auaaucauuauuuuaucca

SEQ ID NO: 881767 - RNA, 19 nt, Artificial Sequence
  Description of Artificial Sequence: Synthetic oligonucleotide
aacaauaguacuuccaaaa

SEQ ID NO: 881768 - RNA, 19 nt, Artificial Sequence
  Description of Artificial Sequence: Synthetic oligonucleotide
uaucuuuaaaguccaacag

SEQ ID NO: 881769 - RNA, 19 nt, Artificial Sequence
  Description of Artificial Sequence: Synthetic oligonucleotide
uuuaggcuuaucuuuaaag

SEQ ID NO: 881770 - RNA, 19 nt, Artificial Sequence
  Description of Artificial Sequence: Synthetic oligonucleotide
uaggcguuuauuaacauga

SEQ ID NO: 881771 - RNA, 19 nt, Artificial Sequence
  Description of Artificial Sequence: Synthetic oligonucleotide
agaacucuagcuuugccac

SEQ ID NO: 881772 - RNA, 19 nt, Artificial Sequence
  Description of Artificial Sequence: Synthetic oligonucleotide
aauuguuuucgucuggacu

SEQ ID NO: 881773 - RNA, 19 nt, Artificial Sequence
  Description of Artificial Sequence: Synthetic oligonucleotide
ucuaaguaaguaauaaguc

SEQ ID NO: 881774 - RNA, 19 nt, Artificial Sequence
  Description of Artificial Sequence: Synthetic oligonucleotide
ugaucuuuauccugaauag

SEQ ID NO: 881775 - RNA, 19 nt, Artificial Sequence
  Description of Artificial Sequence: Synthetic oligonucleotide
uugaucacuaacuucuuag

SEQ ID NO: 881776 - RNA, 19 nt, Artificial Sequence
  Description of Artificial Sequence: Synthetic oligonucleotide
uuaauugaaguacuauucu

SEQ ID NO: 881777 - RNA, 19 nt, Artificial Sequence
  Description of Artificial Sequence: Synthetic oligonucleotide
guagaguucuucuaaauug

SEQ ID NO: 881778 - RNA, 19 nt, Artificial Sequence
  Description of Artificial Sequence: Synthetic oligonucleotide
uuuauuuggucucuuauua

SEQ ID NO: 881779 - RNA, 19 nt, Artificial Sequence
  Description of Artificial Sequence: Synthetic oligonucleotide
uguuagcaaagcuagagac

SEQ ID NO: 881780 - RNA, 19 nt, Artificial Sequence
  Description of Artificial Sequence: Synthetic oligonucleotide
ugaaucaugaugucuuuag

SEQ ID NO: 881781 - RNA, 19 nt, Artificial Sequence
  Description of Artificial Sequence: Synthetic oligonucleotide
aauuagugacuucugggug

SEQ ID NO: 881782 - RNA, 19 nt, Artificial Sequence
  Description of Artificial Sequence: Synthetic oligonucleotide
uguuugaacugaaucauga

SEQ ID NO: 881783 - RNA, 19 nt, Artificial Sequence
  Description of Artificial Sequence: Synthetic oligonucleotide
acucuugccaacuaauagg

SEQ ID NO: 881784 - RNA, 19 nt, Artificial Sequence
  Description of Artificial Sequence: Synthetic oligonucleotide
uguacuuaauugaaguacu

SEQ ID NO: 881785 - RNA, 19 nt, Artificial Sequence
  Description of Artificial Sequence: Synthetic oligonucleotide
auuaaugaauguuucaaau

SEQ ID NO: 881786 - RNA, 19 nt, Artificial Sequence
  Description of Artificial Sequence: Synthetic oligonucleotide
auauaaucauuauuuuauc

SEQ ID NO: 881787 - RNA, 19 nt, Artificial Sequence
  Description of Artificial Sequence: Synthetic oligonucleotide
auacuuaaaggcuucgaag

SEQ ID NO: 881788 - RNA, 19 nt, Artificial Sequence
  Description of Artificial Sequence: Synthetic oligonucleotide
auuagugacuucugggugg

SEQ ID NO: 881789 - RNA, 19 nt, Artificial Sequence
  Description of Artificial Sequence: Synthetic oligonucleotide
uccauaggcacauauguug

SEQ ID NO: 881790 - RNA, 19 nt, Artificial Sequence
  Description of Artificial Sequence: Synthetic oligonucleotide
ucuaucaauugcuucacca

SEQ ID NO: 881791 - RNA, 19 nt, Artificial Sequence
  Description of Artificial Sequence: Synthetic oligonucleotide
uuuuaguacacaguguccc

SEQ ID NO: 881792 - RNA, 19 nt, Artificial Sequence
  Description of Artificial Sequence: Synthetic oligonucleotide
ugguaauuuaggcuuaucu

SEQ ID NO: 881793 - RNA, 19 nt, Artificial Sequence
  Description of Artificial Sequence: Synthetic oligonucleotide
uuuucugguaauuuaggcu

SEQ ID NO: 881794 - RNA, 19 nt, Artificial Sequence
  Description of Artificial Sequence: Synthetic oligonucleotide
cauguuucaguuuggacag

SEQ ID NO: 881795 - RNA, 19 nt, Artificial Sequence
  Description of Artificial Sequence: Synthetic oligonucleotide
uuaggcuuaucuuuaaagu

SEQ ID NO: 881796 - RNA, 19 nt, Artificial Sequence
  Description of Artificial Sequence: Synthetic oligonucleotide
aaaagagagaccugaaguu

SEQ ID NO: 881797 - RNA, 19 nt, Artificial Sequence
  Description of Artificial Sequence: Synthetic oligonucleotide
ugauauacucaauccauug

SEQ ID NO: 881798 - RNA, 19 nt, Artificial Sequence
  Description of Artificial Sequence: Synthetic oligonucleotide
auucgauauugccagguac

SEQ ID NO: 881799 - RNA, 19 nt, Artificial Sequence
  Description of Artificial Sequence: Synthetic oligonucleotide
ucuuguaagagcaaagauu

SEQ ID NO: 881800 - RNA, 19 nt, Artificial Sequence
  Description of Artificial Sequence: Synthetic oligonucleotide
uaauugaaguacuauucug

SEQ ID NO: 881801 - RNA, 19 nt, Artificial Sequence
  Description of Artificial Sequence: Synthetic oligonucleotide
auauacucaauccauugcu

SEQ ID NO: 881802 - RNA, 19 nt, Artificial Sequence
  Description of Artificial Sequence: Synthetic oligonucleotide
auaguuuguguuugaaauc

SEQ ID NO: 881803 - RNA, 19 nt, Artificial Sequence
  Description of Artificial Sequence: Synthetic oligonucleotide
aauugaaguacuauucuga

SEQ ID NO: 881804 - RNA, 19 nt, Artificial Sequence
  Description of Artificial Sequence: Synthetic oligonucleotide
aaucuaaauauaaucauua

SEQ ID NO: 881805 - RNA, 19 nt, Artificial Sequence
  Description of Artificial Sequence: Synthetic oligonucleotide
uuagaaagagaacacuauc

SEQ ID NO: 881806 - RNA, 19 nt, Artificial Sequence
  Description of Artificial Sequence: Synthetic oligonucleotide
ucuucgauaucuuugcccu

SEQ ID NO: 881807 - RNA, 19 nt, Artificial Sequence
  Description of Artificial Sequence: Synthetic oligonucleotide
aacuaauaggcguuuggcu

SEQ ID NO: 881808 - RNA, 19 nt, Artificial Sequence
  Description of Artificial Sequence: Synthetic oligonucleotide
uuauuaaugaauguuucaa

SEQ ID NO: 881809 - RNA, 19 nt, Artificial Sequence
  Description of Artificial Sequence: Synthetic oligonucleotide
acauaaguucuauccagac

SEQ ID NO: 881810 - RNA, 19 nt, Artificial Sequence
  Description of Artificial Sequence: Synthetic oligonucleotide
aaccuuucugaagaauugc

SEQ ID NO: 881811 - RNA, 19 nt, Artificial Sequence
  Description of Artificial Sequence: Synthetic oligonucleotide
aagcuagagaccguggugg

SEQ ID NO: 881812 - RNA, 19 nt, Artificial Sequence
  Description of Artificial Sequence: Synthetic oligonucleotide
uucgguuuucaucaaggag

SEQ ID NO: 881813 - RNA, 19 nt, Artificial Sequence
  Description of Artificial Sequence: Synthetic oligonucleotide
ucucucaaucaagagaagg

SEQ ID NO: 881814 - RNA, 19 nt, Artificial Sequence
  Description of Artificial Sequence: Synthetic oligonucleotide
auaacaauaguacuuccaa

SEQ ID NO: 881815 - RNA, 19 nt, Artificial Sequence
  Description of Artificial Sequence: Synthetic oligonucleotide
aaguacuauucugaauagc

SEQ ID NO: 881816 - RNA, 19 nt, Artificial Sequence
  Description of Artificial Sequence: Synthetic oligonucleotide
agauaucaauuauaugauc

SEQ ID NO: 881817 - RNA, 19 nt, Artificial Sequence
  Description of Artificial Sequence: Synthetic oligonucleotide
caaauggacuuccauaggc

SEQ ID NO: 881818 - RNA, 19 nt, Artificial Sequence
  Description of Artificial Sequence: Synthetic oligonucleotide
uuucugguaauuuaggcuu

SEQ ID NO: 881819 - RNA, 19 nt, Artificial Sequence
  Description of Artificial Sequence: Synthetic oligonucleotide
agcaauuagugacuucugg

SEQ ID NO: 881820 - RNA, 19 nt, Artificial Sequence
  Description of Artificial Sequence: Synthetic oligonucleotide
aucuaaguaaguaauaagu

SEQ ID NO: 881821 - RNA, 19 nt, Artificial Sequence
  Description of Artificial Sequence: Synthetic oligonucleotide
aauaagucugucugcuucu

SEQ ID NO: 881822 - RNA, 19 nt, Artificial Sequence
  Description of Artificial Sequence: Synthetic oligonucleotide
uacuauucugaauagcuuc

SEQ ID NO: 881823 - RNA, 19 nt, Artificial Sequence
  Description of Artificial Sequence: Synthetic oligonucleotide
aacuucuuagccgagccag

SEQ ID NO: 881824 - RNA, 19 nt, Artificial Sequence
  Description of Artificial Sequence: Synthetic oligonucleotide
uucgauauugccagguaca

SEQ ID NO: 881825 - RNA, 19 nt, Artificial Sequence
  Description of Artificial Sequence: Synthetic oligonucleotide
ucaauuauaugaucaacuu

SEQ ID NO: 881826 - RNA, 19 nt, Artificial Sequence
  Description of Artificial Sequence: Synthetic oligonucleotide
cuugaauucgguuuucauc

SEQ ID NO: 881827 - RNA, 19 nt, Artificial Sequence
  Description of Artificial Sequence: Synthetic oligonucleotide
uaggcguuuggcuaaaucu

SEQ ID NO: 881828 - RNA, 19 nt, Artificial Sequence
  Description of Artificial Sequence: Synthetic oligonucleotide
gauuuggucagaccguuug

SEQ ID NO: 881829 - RNA, 19 nt, Artificial Sequence
  Description of Artificial Sequence: Synthetic oligonucleotide
uuuguugccugcacgaagu

SEQ ID NO: 881830 - RNA, 19 nt, Artificial Sequence
  Description of Artificial Sequence: Synthetic oligonucleotide
ugaauguuucaaaugcuuc

SEQ ID NO: 881831 - RNA, 19 nt, Artificial Sequence
  Description of Artificial Sequence: Synthetic oligonucleotide
gaaccugaacuccaccucg

SEQ ID NO: 881832 - RNA, 19 nt, Artificial Sequence
  Description of Artificial Sequence: Synthetic oligonucleotide
acuauucugaauagcuucc

SEQ ID NO: 881833 - RNA, 19 nt, Artificial Sequence
  Description of Artificial Sequence: Synthetic oligonucleotide
uguaagagcaaagauuuuc

SEQ ID NO: 881834 - RNA, 19 nt, Artificial Sequence
  Description of Artificial Sequence: Synthetic oligonucleotide
aaauuguacuuaauugaag

SEQ ID NO: 881835 - RNA, 19 nt, Artificial Sequence
  Description of Artificial Sequence: Synthetic oligonucleotide
agcaucuacagaugcacuc

SEQ ID NO: 881836 - RNA, 19 nt, Artificial Sequence
  Description of Artificial Sequence: Synthetic oligonucleotide
gaaguacuauucugaauag

SEQ ID NO: 881837 - RNA, 19 nt, Artificial Sequence
  Description of Artificial Sequence: Synthetic oligonucleotide
aguacuauucugaauagcu

SEQ ID NO: 881838 - RNA, 19 nt, Artificial Sequence
  Description of Artificial Sequence: Synthetic oligonucleotide
uugccuaaguaaaaugucu

SEQ ID NO: 881839 - RNA, 19 nt, Artificial Sequence
  Description of Artificial Sequence: Synthetic oligonucleotide
aauucagcuuuuaguacac

SEQ ID NO: 881840 - RNA, 19 nt, Artificial Sequence
  Description of Artificial Sequence: Synthetic oligonucleotide
cauccguauaguuuucugg

SEQ ID NO: 881841 - RNA, 19 nt, Artificial Sequence
  Description of Artificial Sequence: Synthetic oligonucleotide
uugcauggugcacugaagc

SEQ ID NO: 881842 - RNA, 19 nt, Artificial Sequence
  Description of Artificial Sequence: Synthetic oligonucleotide
uguuugccuaaguaaaaug

SEQ ID NO: 881843 - RNA, 19 nt, Artificial Sequence
  Description of Artificial Sequence: Synthetic oligonucleotide
cauagauaaaucuaaauau

SEQ ID NO: 881844 - RNA, 19 nt, Artificial Sequence
  Description of Artificial Sequence: Synthetic oligonucleotide
aacucuacugaagagcuga

SEQ ID NO: 881845 - RNA, 19 nt, Artificial Sequence
  Description of Artificial Sequence: Synthetic oligonucleotide
uagaguucuucuaaauugu

SEQ ID NO: 881846 - RNA, 19 nt, Artificial Sequence
  Description of Artificial Sequence: Synthetic oligonucleotide
uuagugagaacucuagcuu

SEQ ID NO: 881847 - RNA, 19 nt, Artificial Sequence
  Description of Artificial Sequence: Synthetic oligonucleotide
uuaaaggcuucgaaguaac

SEQ ID NO: 881848 - RNA, 19 nt, Artificial Sequence
  Description of Artificial Sequence: Synthetic oligonucleotide
auuuggucagaccguuugc

SEQ ID NO: 881849 - RNA, 19 nt, Artificial Sequence
  Description of Artificial Sequence: Synthetic oligonucleotide
ucugccaugucucauccgu

SEQ ID NO: 881850 - RNA, 19 nt, Artificial Sequence
  Description of Artificial Sequence: Synthetic oligonucleotide
caauccauugcuguaagag

SEQ ID NO: 881851 - RNA, 19 nt, Artificial Sequence
  Description of Artificial Sequence: Synthetic oligonucleotide
uuuucuauuuuggauuuga

SEQ ID NO: 881852 - RNA, 19 nt, Artificial Sequence
  Description of Artificial Sequence: Synthetic oligonucleotide
caguuaauucgauauugcc

SEQ ID NO: 881853 - RNA, 19 nt, Artificial Sequence
  Description of Artificial Sequence: Synthetic oligonucleotide
uuuauccugaauaguuugu

SEQ ID NO: 881854 - RNA, 19 nt, Artificial Sequence
  Description of Artificial Sequence: Synthetic oligonucleotide
aucaauuauaugaucaacu

SEQ ID NO: 881855 - RNA, 19 nt, Artificial Sequence
  Description of Artificial Sequence: Synthetic oligonucleotide
gauaucuuugcccuuugga

SEQ ID NO: 881856 - RNA, 19 nt, Artificial Sequence
  Description of Artificial Sequence: Synthetic oligonucleotide
aaguaacuucuaucaauug

SEQ ID NO: 881857 - RNA, 19 nt, Artificial Sequence
  Description of Artificial Sequence: Synthetic oligonucleotide
auaucuuugcccuuuggau

SEQ ID NO: 881858 - RNA, 19 nt, Artificial Sequence
  Description of Artificial Sequence: Synthetic oligonucleotide
uccaccucgaacucuacug

SEQ ID NO: 881859 - RNA, 19 nt, Artificial Sequence
  Description of Artificial Sequence: Synthetic oligonucleotide
uugauaacaauaguacuuc

SEQ ID NO: 881860 - RNA, 19 nt, Artificial Sequence
  Description of Artificial Sequence: Synthetic oligonucleotide
uugacuuuucagcaucuac

SEQ ID NO: 881861 - RNA, 19 nt, Artificial Sequence
  Description of Artificial Sequence: Synthetic oligonucleotide
acuaauaggcguuuggcua

SEQ ID NO: 881862 - RNA, 19 nt, Artificial Sequence
  Description of Artificial Sequence: Synthetic oligonucleotide
aguuaauucgauauugcca

SEQ ID NO: 881863 - RNA, 19 nt, Artificial Sequence
  Description of Artificial Sequence: Synthetic oligonucleotide
uaacccauugucaggauau

SEQ ID NO: 881864 - RNA, 19 nt, Artificial Sequence
  Description of Artificial Sequence: Synthetic oligonucleotide
ucuacagccugguagaguu

SEQ ID NO: 881865 - RNA, 19 nt, Artificial Sequence
  Description of Artificial Sequence: Synthetic oligonucleotide
aagaauccucucugaauug

SEQ ID NO: 881866 - RNA, 19 nt, Artificial Sequence
  Description of Artificial Sequence: Synthetic oligonucleotide
cuaaguguucaccuagaag

SEQ ID NO: 881867 - RNA, 19 nt, Artificial Sequence
  Description of Artificial Sequence: Synthetic oligonucleotide
ugauaacaauaguacuucc

SEQ ID NO: 881868 - RNA, 19 nt, Artificial Sequence
  Description of Artificial Sequence: Synthetic oligonucleotide
ugaagaaacauaaguucua

SEQ ID NO: 881869 - RNA, 19 nt, Artificial Sequence
  Description of Artificial Sequence: Synthetic oligonucleotide
agagaaccugaacuccacc

SEQ ID NO: 881870 - RNA, 19 nt, Artificial Sequence
  Description of Artificial Sequence: Synthetic oligonucleotide
agaaccugaacuccaccuc

SEQ ID NO: 881871 - RNA, 19 nt, Artificial Sequence
  Description of Artificial Sequence: Synthetic oligonucleotide
uaucuuguaagagcaaaga

SEQ ID NO: 881872 - RNA, 19 nt, Artificial Sequence
  Description of Artificial Sequence: Synthetic oligonucleotide
ucgaacucuacugaagagc

SEQ ID NO: 881873 - RNA, 19 nt, Artificial Sequence
  Description of Artificial Sequence: Synthetic oligonucleotide
cagauaucuuguaagagca

SEQ ID NO: 881874 - RNA, 19 nt, Artificial Sequence
  Description of Artificial Sequence: Synthetic oligonucleotide
gcaauuagugacuucuggg

SEQ ID NO: 881875 - RNA, 19 nt, Artificial Sequence
  Description of Artificial Sequence: Synthetic oligonucleotide
ucuucuaggcguuuauuaa

SEQ ID NO: 881876 - RNA, 19 nt, Artificial Sequence
  Description of Artificial Sequence: Synthetic oligonucleotide
aggcuuaucuuuaaaguuc

SEQ ID NO: 881877 - RNA, 19 nt, Artificial Sequence
  Description of Artificial Sequence: Synthetic oligonucleotide
uaucaauuauaugaucaac

SEQ ID NO: 881878 - RNA, 19 nt, Artificial Sequence
  Description of Artificial Sequence: Synthetic oligonucleotide
auccguauaguuuucuggu

SEQ ID NO: 881879 - RNA, 19 nt, Artificial Sequence
  Description of Artificial Sequence: Synthetic oligonucleotide
uuaauucgauauugccagg

SEQ ID NO: 881880 - RNA, 19 nt, Artificial Sequence
  Description of Artificial Sequence: Synthetic oligonucleotide
acuaacuucuuagccgagc

SEQ ID NO: 881881 - RNA, 19 nt, Artificial Sequence
  Description of Artificial Sequence: Synthetic oligonucleotide
guucuauccagacacaaaa

SEQ ID NO: 881882 - RNA, 19 nt, Artificial Sequence
  Description of Artificial Sequence: Synthetic oligonucleotide
auugaaguacuauucugaa

SEQ ID NO: 881883 - RNA, 19 nt, Artificial Sequence
  Description of Artificial Sequence: Synthetic oligonucleotide
aaccguuucuuuucuauuu

SEQ ID NO: 881884 - RNA, 19 nt, Artificial Sequence
  Description of Artificial Sequence: Synthetic oligonucleotide
aagguugacugccacugga

SEQ ID NO: 881885 - RNA, 19 nt, Artificial Sequence
  Description of Artificial Sequence: Synthetic oligonucleotide
ucucuuauuaaugaauguu

SEQ ID NO: 881886 - RNA, 19 nt, Artificial Sequence
  Description of Artificial Sequence: Synthetic oligonucleotide
ucugaagaauugcugcuaa

SEQ ID NO: 881887 - RNA, 19 nt, Artificial Sequence
  Description of Artificial Sequence: Synthetic oligonucleotide
gauaacaauaguacuucca

SEQ ID NO: 881888 - RNA, 19 nt, Artificial Sequence
  Description of Artificial Sequence: Synthetic oligonucleotide
cuaaguaaguaauaagucu

SEQ ID NO: 881889 - RNA, 19 nt, Artificial Sequence
  Description of Artificial Sequence: Synthetic oligonucleotide
auacucaauccauugcugu

SEQ ID NO: 881890 - RNA, 19 nt, Artificial Sequence
  Description of Artificial Sequence: Synthetic oligonucleotide
ucaucaaggagguuauuua

SEQ ID NO: 881891 - RNA, 19 nt, Artificial Sequence
  Description of Artificial Sequence: Synthetic oligonucleotide
auaggcguuuggcuaaauc

SEQ ID NO: 881892 - RNA, 19 nt, Artificial Sequence
  Description of Artificial Sequence: Synthetic oligonucleotide
uaggcuuaucuuuaaaguu

SEQ ID NO: 881893 - RNA, 19 nt, Artificial Sequence
  Description of Artificial Sequence: Synthetic oligonucleotide
uuauccugaauaguuugug

SEQ ID NO: 881894 - RNA, 19 nt, Artificial Sequence
  Description of Artificial Sequence: Synthetic oligonucleotide
cacucuugccaacuaauag

SEQ ID NO: 881895 - RNA, 19 nt, Artificial Sequence
  Description of Artificial Sequence: Synthetic oligonucleotide
uucuucuaggcguuuauua

SEQ ID NO: 881896 - RNA, 19 nt, Artificial Sequence
  Description of Artificial Sequence: Synthetic oligonucleotide
uuuaguacacaguguccca

SEQ ID NO: 881897 - RNA, 19 nt, Artificial Sequence
  Description of Artificial Sequence: Synthetic oligonucleotide
gaauucgguuuucaucaag

SEQ ID NO: 881898 - RNA, 19 nt, Artificial Sequence
  Description of Artificial Sequence: Synthetic oligonucleotide
gaacacuauccaaagaauc

SEQ ID NO: 881899 - RNA, 19 nt, Artificial Sequence
  Description of Artificial Sequence: Synthetic oligonucleotide
aagauacucaggaaccucu

SEQ ID NO: 881900 - RNA, 19 nt, Artificial Sequence
  Description of Artificial Sequence: Synthetic oligonucleotide
uauccugaauaguuugugu

SEQ ID NO: 881901 - RNA, 19 nt, Artificial Sequence
  Description of Artificial Sequence: Synthetic oligonucleotide
aaaggcuucgaaguaacuu

SEQ ID NO: 881902 - RNA, 19 nt, Artificial Sequence
  Description of Artificial Sequence: Synthetic oligonucleotide
caucaauuguuuucgucug

SEQ ID NO: 881903 - RNA, 19 nt, Artificial Sequence
  Description of Artificial Sequence: Synthetic oligonucleotide
agaauccucucugaauugg

SEQ ID NO: 881904 - RNA, 19 nt, Artificial Sequence
  Description of Artificial Sequence: Synthetic oligonucleotide
uuuaccaucucugguggca

SEQ ID NO: 881905 - RNA, 19 nt, Artificial Sequence
  Description of Artificial Sequence: Synthetic oligonucleotide
aaguaaguaauaagucugu

SEQ ID NO: 881906 - RNA, 19 nt, Artificial Sequence
  Description of Artificial Sequence: Synthetic oligonucleotide
aucuaaauauaaucauuau

SEQ ID NO: 881907 - RNA, 19 nt, Artificial Sequence
  Description of Artificial Sequence: Synthetic oligonucleotide
gaaagagaacacuauccaa

SEQ ID NO: 881908 - RNA, 19 nt, Artificial Sequence
  Description of Artificial Sequence: Synthetic oligonucleotide
uccccuucauuaaacauua

SEQ ID NO: 881909 - RNA, 19 nt, Artificial Sequence
  Description of Artificial Sequence: Synthetic oligonucleotide
ugcauggugcacugaagcc

SEQ ID NO: 881910 - RNA, 19 nt, Artificial Sequence
  Description of Artificial Sequence: Synthetic oligonucleotide
uacacagugucccaagguu

SEQ ID NO: 881911 - RNA, 19 nt, Artificial Sequence
  Description of Artificial Sequence: Synthetic oligonucleotide
uucauguuucaguuuggac

SEQ ID NO: 881912 - RNA, 19 nt, Artificial Sequence
  Description of Artificial Sequence: Synthetic oligonucleotide
aucuuguaagagcaaagau

SEQ ID NO: 881913 - RNA, 19 nt, Artificial Sequence
  Description of Artificial Sequence: Synthetic oligonucleotide
gcguuuauuaacaugauga

SEQ ID NO: 881914 - RNA, 19 nt, Artificial Sequence
  Description of Artificial Sequence: Synthetic oligonucleotide
ugucucauccguauaguuu

SEQ ID NO: 881915 - RNA, 19 nt, Artificial Sequence
  Description of Artificial Sequence: Synthetic oligonucleotide
ugcuuguucuucuaaccgu

SEQ ID NO: 881916 - RNA, 19 nt, Artificial Sequence
  Description of Artificial Sequence: Synthetic oligonucleotide
cuacagaugcacucuugcc

SEQ ID NO: 881917 - RNA, 19 nt, Artificial Sequence
  Description of Artificial Sequence: Synthetic oligonucleotide
cucucaaucaagagaagga

SEQ ID NO: 881918 - RNA, 19 nt, Artificial Sequence
  Description of Artificial Sequence: Synthetic oligonucleotide
gauacaggagacacaaauc

SEQ ID NO: 881919 - RNA, 19 nt, Artificial Sequence
  Description of Artificial Sequence: Synthetic oligonucleotide
uugauauacucaauccauu

SEQ ID NO: 881920 - RNA, 19 nt, Artificial Sequence
  Description of Artificial Sequence: Synthetic oligonucleotide
uaugcuccugaucauuauc

SEQ ID NO: 881921 - RNA, 19 nt, Artificial Sequence
  Description of Artificial Sequence: Synthetic oligonucleotide
caacuaauaggcguuuggc

SEQ ID NO: 881922 - RNA, 19 nt, Artificial Sequence
  Description of Artificial Sequence: Synthetic oligonucleotide
cuuuaaaguucuugaucac

SEQ ID NO: 881923 - RNA, 19 nt, Artificial Sequence
  Description of Artificial Sequence: Synthetic oligonucleotide
cuauuuuggauuugauuga

SEQ ID NO: 881924 - RNA, 19 nt, Artificial Sequence
  Description of Artificial Sequence: Synthetic oligonucleotide
cuaggcguuuauuaacaug

SEQ ID NO: 881925 - RNA, 19 nt, Artificial Sequence
  Description of Artificial Sequence: Synthetic oligonucleotide
ucucaaucaagagaaggau

SEQ ID NO: 881926 - RNA, 19 nt, Artificial Sequence
  Description of Artificial Sequence: Synthetic oligonucleotide
ucauccguauaguuuucug

SEQ ID NO: 881927 - RNA, 19 nt, Artificial Sequence
  Description of Artificial Sequence: Synthetic oligonucleotide
ugucccaagguugacugcc

SEQ ID NO: 881928 - RNA, 19 nt, Artificial Sequence
  Description of Artificial Sequence: Synthetic oligonucleotide
ggauauucacaguuaauuc

SEQ ID NO: 881929 - RNA, 19 nt, Artificial Sequence
  Description of Artificial Sequence: Synthetic oligonucleotide
cuugcuguuagcaaagcua

SEQ ID NO: 881930 - RNA, 19 nt, Artificial Sequence
  Description of Artificial Sequence: Synthetic oligonucleotide
uggucagaccguuugcaug

SEQ ID NO: 881931 - RNA, 19 nt, Artificial Sequence
  Description of Artificial Sequence: Synthetic oligonucleotide
uuuggucagaccguuugca

SEQ ID NO: 881932 - RNA, 19 nt, Artificial Sequence
  Description of Artificial Sequence: Synthetic oligonucleotide
uacaaugauucugccagca

SEQ ID NO: 881933 - RNA, 19 nt, Artificial Sequence
  Description of Artificial Sequence: Synthetic oligonucleotide
gaucauuaucauuugccua

SEQ ID NO: 881934 - RNA, 19 nt, Artificial Sequence
  Description of Artificial Sequence: Synthetic oligonucleotide
acuguuugaacugaaucau

SEQ ID NO: 881935 - RNA, 19 nt, Artificial Sequence
  Description of Artificial Sequence: Synthetic oligonucleotide
cauuuaucuaucuucuuua

SEQ ID NO: 881936 - RNA, 19 nt, Artificial Sequence
  Description of Artificial Sequence: Synthetic oligonucleotide
acagaugcacucuugccaa

SEQ ID NO: 881937 - RNA, 19 nt, Artificial Sequence
  Description of Artificial Sequence: Synthetic oligonucleotide
guaaguaauaagucugucu

SEQ ID NO: 881938 - RNA, 19 nt, Artificial Sequence
  Description of Artificial Sequence: Synthetic oligonucleotide
ugaucaacuuuaucuuuaa

SEQ ID NO: 881939 - RNA, 19 nt, Artificial Sequence
  Description of Artificial Sequence: Synthetic oligonucleotide
uacuuagcuaugaguucag

SEQ ID NO: 881940 - RNA, 19 nt, Artificial Sequence
  Description of Artificial Sequence: Synthetic oligonucleotide
uucuaucaauugcuucacc

SEQ ID NO: 881941 - RNA, 19 nt, Artificial Sequence
  Description of Artificial Sequence: Synthetic oligonucleotide
ucuuagccgagccaggcuu

SEQ ID NO: 881942 - RNA, 19 nt, Artificial Sequence
  Description of Artificial Sequence: Synthetic oligonucleotide
uaguacacagugucccaag

SEQ ID NO: 881943 - RNA, 19 nt, Artificial Sequence
  Description of Artificial Sequence: Synthetic oligonucleotide
cugcuaaguguucaccuag

SEQ ID NO: 881944 - RNA, 19 nt, Artificial Sequence
  Description of Artificial Sequence: Synthetic oligonucleotide
ucgaaguaacuucuaucaa

SEQ ID NO: 881945 - RNA, 19 nt, Artificial Sequence
  Description of Artificial Sequence: Synthetic oligonucleotide
caucccuucaagcuugcug

SEQ ID NO: 881946 - RNA, 19 nt, Artificial Sequence
  Description of Artificial Sequence: Synthetic oligonucleotide
uucuaaccguuucuuuucu

SEQ ID NO: 881947 - RNA, 19 nt, Artificial Sequence
  Description of Artificial Sequence: Synthetic oligonucleotide
auccugaauaguuuguguu

SEQ ID NO: 881948 - RNA, 19 nt, Artificial Sequence
  Description of Artificial Sequence: Synthetic oligonucleotide
acuuuaucuuuaaagucca

SEQ ID NO: 881949 - RNA, 19 nt, Artificial Sequence
  Description of Artificial Sequence: Synthetic oligonucleotide
ugcauacuuaaaggcuucg

SEQ ID NO: 881950 - RNA, 19 nt, Artificial Sequence
  Description of Artificial Sequence: Synthetic oligonucleotide
ugcacucuugccaacuaau

SEQ ID NO: 881951 - RNA, 19 nt, Artificial Sequence
  Description of Artificial Sequence: Synthetic oligonucleotide
cuguaagagaaccugaacu

SEQ ID NO: 881952 - RNA, 19 nt, Artificial Sequence
  Description of Artificial Sequence: Synthetic oligonucleotide
guaacuucuaucaauugcu

SEQ ID NO: 881953 - RNA, 19 nt, Artificial Sequence
  Description of Artificial Sequence: Synthetic oligonucleotide
ugaagauacucaggaaccu

SEQ ID NO: 881954 - RNA, 19 nt, Artificial Sequence
  Description of Artificial Sequence: Synthetic oligonucleotide
uugaaguacuauucugaau

SEQ ID NO: 881955 - RNA, 19 nt, Artificial Sequence
  Description of Artificial Sequence: Synthetic oligonucleotide
uucgcucucucucaaucaa

SEQ ID NO: 881956 - RNA, 19 nt, Artificial Sequence
  Description of Artificial Sequence: Synthetic oligonucleotide
uaacuucuuagccgagcca

SEQ ID NO: 881957 - RNA, 19 nt, Artificial Sequence
  Description of Artificial Sequence: Synthetic oligonucleotide
uuggucucuuauuaaugaa

SEQ ID NO: 881958 - RNA, 19 nt, Artificial Sequence
  Description of Artificial Sequence: Synthetic oligonucleotide
aauaugcuccugaucauua

SEQ ID NO: 881959 - RNA, 19 nt, Artificial Sequence
  Description of Artificial Sequence: Synthetic oligonucleotide
uuggccaguaacccauugu

SEQ ID NO: 881960 - RNA, 19 nt, Artificial Sequence
  Description of Artificial Sequence: Synthetic oligonucleotide
ugcuaaguguucaccuaga

SEQ ID NO: 881961 - RNA, 19 nt, Artificial Sequence
  Description of Artificial Sequence: Synthetic oligonucleotide
cuugauauacucaauccau

SEQ ID NO: 881962 - RNA, 19 nt, Artificial Sequence
  Description of Artificial Sequence: Synthetic oligonucleotide
gaugugaucuucacagauc

SEQ ID NO: 881963 - RNA, 19 nt, Artificial Sequence
  Description of Artificial Sequence: Synthetic oligonucleotide
gccuugauauacucaaucc

SEQ ID NO: 881964 - RNA, 19 nt, Artificial Sequence
  Description of Artificial Sequence: Synthetic oligonucleotide
cuagagaccgugguggaug

SEQ ID NO: 881965 - RNA, 19 nt, Artificial Sequence
  Description of Artificial Sequence: Synthetic oligonucleotide
cauaaguucuauccagaca

SEQ ID NO: 881966 - RNA, 19 nt, Artificial Sequence
  Description of Artificial Sequence: Synthetic oligonucleotide
gcuguuagcaaagcuagag

SEQ ID NO: 881967 - RNA, 19 nt, Artificial Sequence
  Description of Artificial Sequence: Synthetic oligonucleotide
uccugaucauuaucauuug

SEQ ID NO: 881968 - RNA, 19 nt, Artificial Sequence
  Description of Artificial Sequence: Synthetic oligonucleotide
ucucugaauuggugaaucu

SEQ ID NO: 881969 - RNA, 19 nt, Artificial Sequence
  Description of Artificial Sequence: Synthetic oligonucleotide
aacgcagcuccacauucau

SEQ ID NO: 881970 - RNA, 19 nt, Artificial Sequence
  Description of Artificial Sequence: Synthetic oligonucleotide
cuugccaacuaauaggcgu

SEQ ID NO: 881971 - RNA, 19 nt, Artificial Sequence
  Description of Artificial Sequence: Synthetic oligonucleotide
uaaaggcuucgaaguaacu

SEQ ID NO: 881972 - RNA, 19 nt, Artificial Sequence
  Description of Artificial Sequence: Synthetic oligonucleotide
ugauucugccagcauuuau

SEQ ID NO: 881973 - RNA, 19 nt, Artificial Sequence
  Description of Artificial Sequence: Synthetic oligonucleotide
ccaucuucgauaucuuugc

SEQ ID NO: 881974 - RNA, 19 nt, Artificial Sequence
  Description of Artificial Sequence: Synthetic oligonucleotide
auacucuuucuuguaguug

SEQ ID NO: 881975 - RNA, 19 nt, Artificial Sequence
  Description of Artificial Sequence: Synthetic oligonucleotide
ucaauccauugcuguaaga

SEQ ID NO: 881976 - RNA, 19 nt, Artificial Sequence
  Description of Artificial Sequence: Synthetic oligonucleotide
ugcaggguucuccuuaauu

SEQ ID NO: 881977 - RNA, 19 nt, Artificial Sequence
  Description of Artificial Sequence: Synthetic oligonucleotide
caauuguuuucgucuggac

SEQ ID NO: 881978 - RNA, 19 nt, Artificial Sequence
  Description of Artificial Sequence: Synthetic oligonucleotide
gaagauacucaggaaccuc

SEQ ID NO: 881979 - RNA, 19 nt, Artificial Sequence
  Description of Artificial Sequence: Synthetic oligonucleotide
caauuagugacuucugggu

SEQ ID NO: 881980 - RNA, 19 nt, Artificial Sequence
  Description of Artificial Sequence: Synthetic oligonucleotide
uuaguacacagugucccaa

SEQ ID NO: 881981 - RNA, 19 nt, Artificial Sequence
  Description of Artificial Sequence: Synthetic oligonucleotide
cuuugccauagauaaaucu

SEQ ID NO: 881982 - RNA, 19 nt, Artificial Sequence
  Description of Artificial Sequence: Synthetic oligonucleotide
cuaauaggcguuuggcuaa

SEQ ID NO: 881983 - RNA, 19 nt, Artificial Sequence
  Description of Artificial Sequence: Synthetic oligonucleotide
agagaccugaaguucuuuu

SEQ ID NO: 881984 - RNA, 19 nt, Artificial Sequence
  Description of Artificial Sequence: Synthetic oligonucleotide
aaacugaauuccuccccuu

SEQ ID NO: 881985 - RNA, 19 nt, Artificial Sequence
  Description of Artificial Sequence: Synthetic oligonucleotide
ucgauaucuuugcccuuug

SEQ ID NO: 881986 - RNA, 19 nt, Artificial Sequence
  Description of Artificial Sequence: Synthetic oligonucleotide
agaccguuugcauggugca

SEQ ID NO: 881987 - RNA, 19 nt, Artificial Sequence
  Description of Artificial Sequence: Synthetic oligonucleotide
gaaggaugccaucaauugu

SEQ ID NO: 881988 - RNA, 19 nt, Artificial Sequence
  Description of Artificial Sequence: Synthetic oligonucleotide
ccauagauaaaucuaaaua

SEQ ID NO: 881989 - RNA, 19 nt, Artificial Sequence
  Description of Artificial Sequence: Synthetic oligonucleotide
uucuuagccgagccaggcu

SEQ ID NO: 881990 - RNA, 19 nt, Artificial Sequence
  Description of Artificial Sequence: Synthetic oligonucleotide
acuuccauaggcacauaug

SEQ ID NO: 881991 - RNA, 19 nt, Artificial Sequence
  Description of Artificial Sequence: Synthetic oligonucleotide
ccaacuaauaggcguuugg

SEQ ID NO: 881992 - RNA, 19 nt, Artificial Sequence
  Description of Artificial Sequence: Synthetic oligonucleotide
agaacacuauccaaagaau

SEQ ID NO: 881993 - RNA, 19 nt, Artificial Sequence
  Description of Artificial Sequence: Synthetic oligonucleotide
agugagaacucuagcuuug

SEQ ID NO: 881994 - RNA, 19 nt, Artificial Sequence
  Description of Artificial Sequence: Synthetic oligonucleotide
cuucuuagccgagccaggc

SEQ ID NO: 881995 - RNA, 19 nt, Artificial Sequence
  Description of Artificial Sequence: Synthetic oligonucleotide
uccugaaccaugguuuuau

SEQ ID NO: 881996 - RNA, 19 nt, Artificial Sequence
  Description of Artificial Sequence: Synthetic oligonucleotide
gccagguacauucugguuc

SEQ ID NO: 881997 - RNA, 19 nt, Artificial Sequence
  Description of Artificial Sequence: Synthetic oligonucleotide
guaguugcuuugcuuguuc

SEQ ID NO: 881998 - RNA, 19 nt, Artificial Sequence
  Description of Artificial Sequence: Synthetic oligonucleotide
uaaccguuucuuuucuauu

SEQ ID NO: 881999 - RNA, 19 nt, Artificial Sequence
  Description of Artificial Sequence: Synthetic oligonucleotide
auaguacuuccaaaagccu

SEQ ID NO: 882000 - RNA, 19 nt, Artificial Sequence
  Description of Artificial Sequence: Synthetic oligonucleotide
uucugguaauuuaggcuua

SEQ ID NO: 882001 - RNA, 19 nt, Artificial Sequence
  Description of Artificial Sequence: Synthetic oligonucleotide
gccuaaguaaaaugucuug

SEQ ID NO: 882002 - RNA, 19 nt, Artificial Sequence
  Description of Artificial Sequence: Synthetic oligonucleotide
cuuuaccaucucugguggc

SEQ ID NO: 882003 - RNA, 19 nt, Artificial Sequence
  Description of Artificial Sequence: Synthetic oligonucleotide
ugcuguuagcaaagcuaga

SEQ ID NO: 882004 - RNA, 19 nt, Artificial Sequence
  Description of Artificial Sequence: Synthetic oligonucleotide
agauacucaggaaccucuc

SEQ ID NO: 882005 - RNA, 19 nt, Artificial Sequence
  Description of Artificial Sequence: Synthetic oligonucleotide
cuuaaaggcuucgaaguaa

SEQ ID NO: 882006 - RNA, 19 nt, Artificial Sequence
  Description of Artificial Sequence: Synthetic oligonucleotide
uuagugacuucuggguggu

SEQ ID NO: 882007 - RNA, 19 nt, Artificial Sequence
  Description of Artificial Sequence: Synthetic oligonucleotide
acacagugucccaagguug

SEQ ID NO: 882008 - RNA, 19 nt, Artificial Sequence
  Description of Artificial Sequence: Synthetic oligonucleotide
uucgauaucuuugcccuuu

SEQ ID NO: 882009 - RNA, 19 nt, Artificial Sequence
  Description of Artificial Sequence: Synthetic oligonucleotide
acucaauccauugcuguaa

SEQ ID NO: 882010 - RNA, 19 nt, Artificial Sequence
  Description of Artificial Sequence: Synthetic oligonucleotide
caagguugacugccacugg

SEQ ID NO: 882011 - RNA, 19 nt, Artificial Sequence
  Description of Artificial Sequence: Synthetic oligonucleotide
ugaauucgguuuucaucaa

SEQ ID NO: 882012 - RNA, 19 nt, Artificial Sequence
  Description of Artificial Sequence: Synthetic oligonucleotide
guuuugaauccacauacuu

SEQ ID NO: 882013 - RNA, 19 nt, Artificial Sequence
  Description of Artificial Sequence: Synthetic oligonucleotide
cauauacuguuugaacuga

SEQ ID NO: 882014 - RNA, 19 nt, Artificial Sequence
  Description of Artificial Sequence: Synthetic oligonucleotide
uccguauaguuuucuggua

SEQ ID NO: 882015 - RNA, 19 nt, Artificial Sequence
  Description of Artificial Sequence: Synthetic oligonucleotide
ccuuucugaagaauugcug

SEQ ID NO: 882016 - RNA, 19 nt, Artificial Sequence
  Description of Artificial Sequence: Synthetic oligonucleotide
ucagaccguuugcauggug

SEQ ID NO: 882017 - RNA, 19 nt, Artificial Sequence
  Description of Artificial Sequence: Synthetic oligonucleotide
uuggucagaccguuugcau

SEQ ID NO: 882018 - RNA, 19 nt, Artificial Sequence
  Description of Artificial Sequence: Synthetic oligonucleotide
aguuuugaauccacauacu

SEQ ID NO: 882019 - RNA, 19 nt, Artificial Sequence
  Description of Artificial Sequence: Synthetic oligonucleotide
acaaugauucugccagcau

SEQ ID NO: 882020 - RNA, 19 nt, Artificial Sequence
  Description of Artificial Sequence: Synthetic oligonucleotide
accguuugcauggugcacu

SEQ ID NO: 882021 - RNA, 19 nt, Artificial Sequence
  Description of Artificial Sequence: Synthetic oligonucleotide
auuugccuacaaugauucu

SEQ ID NO: 882022 - RNA, 19 nt, Artificial Sequence
  Description of Artificial Sequence: Synthetic oligonucleotide
auaugcuccugaucauuau

SEQ ID NO: 882023 - RNA, 19 nt, Artificial Sequence
  Description of Artificial Sequence: Synthetic oligonucleotide
ucgauauugccagguacau

SEQ ID NO: 882024 - RNA, 19 nt, Artificial Sequence
  Description of Artificial Sequence: Synthetic oligonucleotide
ugccucaguugcuuauaca

SEQ ID NO: 882025 - RNA, 19 nt, Artificial Sequence
  Description of Artificial Sequence: Synthetic oligonucleotide
cucaguugcuuauacaaau

SEQ ID NO: 882026 - RNA, 19 nt, Artificial Sequence
  Description of Artificial Sequence: Synthetic oligonucleotide
ccaugucucauccguauag

SEQ ID NO: 882027 - RNA, 19 nt, Artificial Sequence
  Description of Artificial Sequence: Synthetic oligonucleotide
cuuagccgagccaggcuug

SEQ ID NO: 882028 - RNA, 19 nt, Artificial Sequence
  Description of Artificial Sequence: Synthetic oligonucleotide
uggugaaucugugcucuga

SEQ ID NO: 882029 - RNA, 19 nt, Artificial Sequence
  Description of Artificial Sequence: Synthetic oligonucleotide
gguaauuuaggcuuaucuu

SEQ ID NO: 882030 - RNA, 19 nt, Artificial Sequence
  Description of Artificial Sequence: Synthetic oligonucleotide
gaugauuuggucagaccgu

SEQ ID NO: 882031 - RNA, 19 nt, Artificial Sequence
  Description of Artificial Sequence: Synthetic oligonucleotide
cacagugucccaagguuga

SEQ ID NO: 882032 - RNA, 19 nt, Artificial Sequence
  Description of Artificial Sequence: Synthetic oligonucleotide
ugcuccugaucauuaucau

SEQ ID NO: 882033 - RNA, 19 nt, Artificial Sequence
  Description of Artificial Sequence: Synthetic oligonucleotide
cucucucaaucaagagaag

SEQ ID NO: 882034 - RNA, 19 nt, Artificial Sequence
  Description of Artificial Sequence: Synthetic oligonucleotide
uugccugcacgaaguuuug

SEQ ID NO: 882035 - RNA, 19 nt, Artificial Sequence
  Description of Artificial Sequence: Synthetic oligonucleotide
aggagacacaaaucuugaa

SEQ ID NO: 882036 - RNA, 19 nt, Artificial Sequence
  Description of Artificial Sequence: Synthetic oligonucleotide
ucuaaccguuucuuuucua

SEQ ID NO: 882037 - RNA, 19 nt, Artificial Sequence
  Description of Artificial Sequence: Synthetic oligonucleotide
ucucauccguauaguuuuc

SEQ ID NO: 882038 - RNA, 19 nt, Artificial Sequence
  Description of Artificial Sequence: Synthetic oligonucleotide
cugaucuaaguaaguaaua

SEQ ID NO: 882039 - RNA, 19 nt, Artificial Sequence
  Description of Artificial Sequence: Synthetic oligonucleotide
caguuuggacagcauugac

SEQ ID NO: 882040 - RNA, 19 nt, Artificial Sequence
  Description of Artificial Sequence: Synthetic oligonucleotide
ccuugauauacucaaucca

SEQ ID NO: 882041 - RNA, 19 nt, Artificial Sequence
  Description of Artificial Sequence: Synthetic oligonucleotide
agccgagccaggcuugcug

SEQ ID NO: 882042 - RNA, 19 nt, Artificial Sequence
  Description of Artificial Sequence: Synthetic oligonucleotide
cagcauuuaucuaucuucu

SEQ ID NO: 882043 - RNA, 19 nt, Artificial Sequence
  Description of Artificial Sequence: Synthetic oligonucleotide
gcuguaagagaaccugaac

SEQ ID NO: 882044 - RNA, 19 nt, Artificial Sequence
  Description of Artificial Sequence: Synthetic oligonucleotide
uuggugaaucugugcucug

SEQ ID NO: 882045 - RNA, 19 nt, Artificial Sequence
  Description of Artificial Sequence: Synthetic oligonucleotide
cugaaccaugguuuuaucu

SEQ ID NO: 882046 - RNA, 19 nt, Artificial Sequence
  Description of Artificial Sequence: Synthetic oligonucleotide
cuaucaauugcuucaccau

SEQ ID NO: 882047 - RNA, 19 nt, Artificial Sequence
  Description of Artificial Sequence: Synthetic oligonucleotide
uguucaccuagaaguuguu

SEQ ID NO: 882048 - RNA, 19 nt, Artificial Sequence
  Description of Artificial Sequence: Synthetic oligonucleotide
agcuagagaccguggugga

SEQ ID NO: 882049 - RNA, 19 nt, Artificial Sequence
  Description of Artificial Sequence: Synthetic oligonucleotide
ccaagguugacugccacug

SEQ ID NO: 882050 - RNA, 19 nt, Artificial Sequence
  Description of Artificial Sequence: Synthetic oligonucleotide
guaacccauugucaggaua

SEQ ID NO: 882051 - RNA, 19 nt, Artificial Sequence
  Description of Artificial Sequence: Synthetic oligonucleotide
cuuugccacaggcuaguga

SEQ ID NO: 882052 - RNA, 19 nt, Artificial Sequence
  Description of Artificial Sequence: Synthetic oligonucleotide
ccuaaguaaaaugucuuga

SEQ ID NO: 882053 - RNA, 19 nt, Artificial Sequence
  Description of Artificial Sequence: Synthetic oligonucleotide
augauuuggucagaccguu

SEQ ID NO: 882054 - RNA, 19 nt, Artificial Sequence
  Description of Artificial Sequence: Synthetic oligonucleotide
aaccugaacuccaccucga

SEQ ID NO: 882055 - RNA, 19 nt, Artificial Sequence
  Description of Artificial Sequence: Synthetic oligonucleotide
cacuaacuucuuagccgag

SEQ ID NO: 882056 - RNA, 19 nt, Artificial Sequence
  Description of Artificial Sequence: Synthetic oligonucleotide
augaguucagcugguuuau

SEQ ID NO: 882057 - RNA, 19 nt, Artificial Sequence
  Description of Artificial Sequence: Synthetic oligonucleotide
gugagaacucuagcuuugc

SEQ ID NO: 882058 - RNA, 19 nt, Artificial Sequence
  Description of Artificial Sequence: Synthetic oligonucleotide
aucuacagaugcacucuug

SEQ ID NO: 882059 - RNA, 19 nt, Artificial Sequence
  Description of Artificial Sequence: Synthetic oligonucleotide
uuagccgagccaggcuugc

SEQ ID NO: 882060 - RNA, 19 nt, Artificial Sequence
  Description of Artificial Sequence: Synthetic oligonucleotide
aguaacccauugucaggau

SEQ ID NO: 882061 - RNA, 19 nt, Artificial Sequence
  Description of Artificial Sequence: Synthetic oligonucleotide
gaccgugguggaugauuug

SEQ ID NO: 882062 - RNA, 19 nt, Artificial Sequence
  Description of Artificial Sequence: Synthetic oligonucleotide
uacuuccaaaagccuugau

SEQ ID NO: 882063 - RNA, 19 nt, Artificial Sequence
  Description of Artificial Sequence: Synthetic oligonucleotide
cugguagaguucuucuaaa

SEQ ID NO: 882064 - RNA, 19 nt, Artificial Sequence
  Description of Artificial Sequence: Synthetic oligonucleotide
auauacuguuugaacugaa

SEQ ID NO: 882065 - RNA, 19 nt, Artificial Sequence
  Description of Artificial Sequence: Synthetic oligonucleotide
uguugccugcacgaaguuu

SEQ ID NO: 882066 - RNA, 19 nt, Artificial Sequence
  Description of Artificial Sequence: Synthetic oligonucleotide
gaauugcugcuaaguguuc

SEQ ID NO: 882067 - RNA, 19 nt, Artificial Sequence
  Description of Artificial Sequence: Synthetic oligonucleotide
guacacagugucccaaggu

SEQ ID NO: 882068 - RNA, 19 nt, Artificial Sequence
  Description of Artificial Sequence: Synthetic oligonucleotide
gcaaagcuagagaccgugg

SEQ ID NO: 882069 - RNA, 19 nt, Artificial Sequence
  Description of Artificial Sequence: Synthetic oligonucleotide
gguagaguucuucuaaauu

SEQ ID NO: 882070 - RNA, 19 nt, Artificial Sequence
  Description of Artificial Sequence: Synthetic oligonucleotide
guugccugcacgaaguuuu

SEQ ID NO: 882071 - RNA, 19 nt, Artificial Sequence
  Description of Artificial Sequence: Synthetic oligonucleotide
uaauaggcguuuggcuaaa

SEQ ID NO: 882072 - RNA, 19 nt, Artificial Sequence
  Description of Artificial Sequence: Synthetic oligonucleotide
guacuuaauugaaguacua

SEQ ID NO: 882073 - RNA, 19 nt, Artificial Sequence
  Description of Artificial Sequence: Synthetic oligonucleotide
agcucuucgucuguagcuu

SEQ ID NO: 882074 - RNA, 19 nt, Artificial Sequence
  Description of Artificial Sequence: Synthetic oligonucleotide
ggaagcagauaucaauuau

SEQ ID NO: 882075 - RNA, 19 nt, Artificial Sequence
  Description of Artificial Sequence: Synthetic oligonucleotide
uuguugccugcacgaaguu

SEQ ID NO: 882076 - RNA, 19 nt, Artificial Sequence
  Description of Artificial Sequence: Synthetic oligonucleotide
cuccccuucauuaaacauu

SEQ ID NO: 882077 - RNA, 19 nt, Artificial Sequence
  Description of Artificial Sequence: Synthetic oligonucleotide
aauaggcguuuggcuaaau

SEQ ID NO: 882078 - RNA, 19 nt, Artificial Sequence
  Description of Artificial Sequence: Synthetic oligonucleotide
gcauggugcacugaagcca

SEQ ID NO: 882079 - RNA, 19 nt, Artificial Sequence
  Description of Artificial Sequence: Synthetic oligonucleotide
caguagcuugcuugauguc

SEQ ID NO: 882080 - RNA, 19 nt, Artificial Sequence
  Description of Artificial Sequence: Synthetic oligonucleotide
cauugacuuuucagcaucu

SEQ ID NO: 882081 - RNA, 19 nt, Artificial Sequence
  Description of Artificial Sequence: Synthetic oligonucleotide
gaccguuugcauggugcac

SEQ ID NO: 882082 - RNA, 19 nt, Artificial Sequence
  Description of Artificial Sequence: Synthetic oligonucleotide
agaccgugguggaugauuu

SEQ ID NO: 882083 - RNA, 19 nt, Artificial Sequence
  Description of Artificial Sequence: Synthetic oligonucleotide
gcuaaguguucaccuagaa

SEQ ID NO: 882084 - RNA, 19 nt, Artificial Sequence
  Description of Artificial Sequence: Synthetic oligonucleotide
cugguaauuuaggcuuauc

SEQ ID NO: 882085 - RNA, 19 nt, Artificial Sequence
  Description of Artificial Sequence: Synthetic oligonucleotide
cugguggcaaauggacuuc

SEQ ID NO: 882086 - RNA, 19 nt, Artificial Sequence
  Description of Artificial Sequence: Synthetic oligonucleotide
auccucuaucccaguagcu

SEQ ID NO: 882087 - RNA, 19 nt, Artificial Sequence
  Description of Artificial Sequence: Synthetic oligonucleotide
ugccugcacgaaguuuuga

SEQ ID NO: 882088 - RNA, 19 nt, Artificial Sequence
  Description of Artificial Sequence: Synthetic oligonucleotide
uguuuucgucuggacuuuu

SEQ ID NO: 882089 - RNA, 19 nt, Artificial Sequence
  Description of Artificial Sequence: Synthetic oligonucleotide
caccucgaacucuacugaa

SEQ ID NO: 882090 - RNA, 19 nt, Artificial Sequence
  Description of Artificial Sequence: Synthetic oligonucleotide
ggcuuaucuuuaaaguucu

SEQ ID NO: 882091 - RNA, 19 nt, Artificial Sequence
  Description of Artificial Sequence: Synthetic oligonucleotide
ccaugucuuuaaacauccc

SEQ ID NO: 882092 - RNA, 19 nt, Artificial Sequence
  Description of Artificial Sequence: Synthetic oligonucleotide
ccguauaguuuucugguaa

SEQ ID NO: 882093 - RNA, 19 nt, Artificial Sequence
  Description of Artificial Sequence: Synthetic oligonucleotide
ggguggucugaucuaagua

SEQ ID NO: 882094 - RNA, 19 nt, Artificial Sequence
  Description of Artificial Sequence: Synthetic oligonucleotide
ccaaagaauccucucugaa

SEQ ID NO: 882095 - RNA, 19 nt, Artificial Sequence
  Description of Artificial Sequence: Synthetic oligonucleotide
guacuauucugaauagcuu

SEQ ID NO: 882096 - RNA, 19 nt, Artificial Sequence
  Description of Artificial Sequence: Synthetic oligonucleotide
gcuagugauugcaggguuc

SEQ ID NO: 882097 - RNA, 19 nt, Artificial Sequence
  Description of Artificial Sequence: Synthetic oligonucleotide
ggugcacugaagccacaga

SEQ ID NO: 882098 - RNA, 19 nt, Artificial Sequence
  Description of Artificial Sequence: Synthetic oligonucleotide
ugaguucagcugguuuauu

SEQ ID NO: 882099 - RNA, 19 nt, Artificial Sequence
  Description of Artificial Sequence: Synthetic oligonucleotide
gcugcuaaguguucaccua

SEQ ID NO: 882100 - RNA, 19 nt, Artificial Sequence
  Description of Artificial Sequence: Synthetic oligonucleotide
augauucugccagcauuua

SEQ ID NO: 882101 - RNA, 19 nt, Artificial Sequence
  Description of Artificial Sequence: Synthetic oligonucleotide
agagagaccugaaguucuu

SEQ ID NO: 882102 - RNA, 19 nt, Artificial Sequence
  Description of Artificial Sequence: Synthetic oligonucleotide
caggauauucacaguuaau

SEQ ID NO: 882103 - RNA, 19 nt, Artificial Sequence
  Description of Artificial Sequence: Synthetic oligonucleotide
cgauaucuuugcccuuugg

SEQ ID NO: 882104 - RNA, 19 nt, Artificial Sequence
  Description of Artificial Sequence: Synthetic oligonucleotide
aggcguuuauuaacaugau

SEQ ID NO: 882105 - RNA, 19 nt, Artificial Sequence
  Description of Artificial Sequence: Synthetic oligonucleotide
cugauacaggagacacaaa

SEQ ID NO: 882106 - RNA, 19 nt, Artificial Sequence
  Description of Artificial Sequence: Synthetic oligonucleotide
caugucucauccguauagu

SEQ ID NO: 882107 - RNA, 19 nt, Artificial Sequence
  Description of Artificial Sequence: Synthetic oligonucleotide
gcuucgaaguaacuucuau

SEQ ID NO: 882108 - RNA, 19 nt, Artificial Sequence
  Description of Artificial Sequence: Synthetic oligonucleotide
gccaacuaauaggcguuug

SEQ ID NO: 882109 - RNA, 19 nt, Artificial Sequence
  Description of Artificial Sequence: Synthetic oligonucleotide
acucuacugaagagcugau

SEQ ID NO: 882110 - RNA, 19 nt, Artificial Sequence
  Description of Artificial Sequence: Synthetic oligonucleotide
ggugaaucugugcucugau

SEQ ID NO: 882111 - RNA, 19 nt, Artificial Sequence
  Description of Artificial Sequence: Synthetic oligonucleotide
ccucaguugcuuauacaaa

SEQ ID NO: 882112 - RNA, 19 nt, Artificial Sequence
  Description of Artificial Sequence: Synthetic oligonucleotide
ccugaaccaugguuuuauc

SEQ ID NO: 882113 - RNA, 19 nt, Artificial Sequence
  Description of Artificial Sequence: Synthetic oligonucleotide
cucuacugaagagcugaua

SEQ ID NO: 882114 - RNA, 19 nt, Artificial Sequence
  Description of Artificial Sequence: Synthetic oligonucleotide
ccguuugcauggugcacug

SEQ ID NO: 882115 - RNA, 19 nt, Artificial Sequence
  Description of Artificial Sequence: Synthetic oligonucleotide
acaucccuucaagcuugcu

SEQ ID NO: 882116 - RNA, 19 nt, Artificial Sequence
  Description of Artificial Sequence: Synthetic oligonucleotide
ccaccucgaacucuacuga

SEQ ID NO: 882117 - RNA, 19 nt, Artificial Sequence
  Description of Artificial Sequence: Synthetic oligonucleotide
cgaaguuuugaauccacau

SEQ ID NO: 882118 - RNA, 19 nt, Artificial Sequence
  Description of Artificial Sequence: Synthetic oligonucleotide
cugccaugucucauccgua

SEQ ID NO: 882119 - RNA, 19 nt, Artificial Sequence
  Description of Artificial Sequence: Synthetic oligonucleotide
ggagguuauuuaaaccuuu

SEQ ID NO: 882120 - RNA, 19 nt, Artificial Sequence
  Description of Artificial Sequence: Synthetic oligonucleotide
cucauccguauaguuuucu

SEQ ID NO: 882121 - RNA, 19 nt, Artificial Sequence
  Description of Artificial Sequence: Synthetic oligonucleotide
cauuucgcucucucucaau

SEQ ID NO: 882122 - RNA, 19 nt, Artificial Sequence
  Description of Artificial Sequence: Synthetic oligonucleotide
gguggaugauuuggucaga

SEQ ID NO: 882123 - RNA, 19 nt, Artificial Sequence
  Description of Artificial Sequence: Synthetic oligonucleotide
gcacucuugccaacuaaua

SEQ ID NO: 882124 - RNA, 19 nt, Artificial Sequence
  Description of Artificial Sequence: Synthetic oligonucleotide
uagugacuucugggugguc

SEQ ID NO: 882125 - RNA, 19 nt, Artificial Sequence
  Description of Artificial Sequence: Synthetic oligonucleotide
gagagaccugaaguucuuu

SEQ ID NO: 882126 - RNA, 19 nt, Artificial Sequence
  Description of Artificial Sequence: Synthetic oligonucleotide
ggcuagugauugcaggguu

SEQ ID NO: 882127 - RNA, 19 nt, Artificial Sequence
  Description of Artificial Sequence: Synthetic oligonucleotide
gccaugucucauccguaua

SEQ ID NO: 882128 - RNA, 19 nt, Artificial Sequence
  Description of Artificial Sequence: Synthetic oligonucleotide
cuucgauaucuuugcccuu

SEQ ID NO: 882129 - RNA, 19 nt, Artificial Sequence
  Description of Artificial Sequence: Synthetic oligonucleotide
gccgagccaggcuugcugu

SEQ ID NO: 882130 - RNA, 19 nt, Artificial Sequence
  Description of Artificial Sequence: Synthetic oligonucleotide
ggcguuuggcuaaaucuuu

SEQ ID NO: 882131 - RNA, 19 nt, Artificial Sequence
  Description of Artificial Sequence: Synthetic oligonucleotide
gcuccugaaccaugguuuu

SEQ ID NO: 882132 - RNA, 19 nt, Artificial Sequence
  Description of Artificial Sequence: Synthetic oligonucleotide
cguauaguuuucugguaau

SEQ ID NO: 882133 - RNA, 19 nt, Artificial Sequence
  Description of Artificial Sequence: Synthetic oligonucleotide
ccuccccuucauuaaacau

SEQ ID NO: 882134 - RNA, 19 nt, Artificial Sequence
  Description of Artificial Sequence: Synthetic oligonucleotide
ggcuucgaaguaacuucua

SEQ ID NO: 882135 - RNA, 19 nt, Artificial Sequence
  Description of Artificial Sequence: Synthetic oligonucleotide
ggcacauauguuggccagu

SEQ ID NO: 882136 - RNA, 19 nt, Artificial Sequence
  Description of Artificial Sequence: Synthetic oligonucleotide
gcuagagaccgugguggau

SEQ ID NO: 882137 - RNA, 19 nt, Artificial Sequence
  Description of Artificial Sequence: Synthetic oligonucleotide
gguuuucaucaaggagguu

SEQ ID NO: 882138 - RNA, 19 nt, Artificial Sequence
  Description of Artificial Sequence: Synthetic oligonucleotide
cguuugcauggugcacuga

SEQ ID NO: 882139 - RNA, 19 nt, Artificial Sequence
  Description of Artificial Sequence: Synthetic oligonucleotide
ccgagccaggcuugcuguu

SEQ ID NO: 882140 - RNA, 19 nt, Artificial Sequence
  Description of Artificial Sequence: Synthetic oligonucleotide
agggauauaaaauuguccc

SEQ ID NO: 882141 - RNA, 19 nt, Artificial Sequence
  Description of Artificial Sequence: Synthetic oligonucleotide
uucaaugcugcucaggugg

SEQ ID NO: 882142 - RNA, 19 nt, Artificial Sequence
  Description of Artificial Sequence: Synthetic oligonucleotide
uuuugucauacucagaggc

SEQ ID NO: 882143 - RNA, 19 nt, Artificial Sequence
  Description of Artificial Sequence: Synthetic oligonucleotide
uguaauggccuucaggagg

SEQ ID NO: 882144 - RNA, 19 nt, Artificial Sequence
  Description of Artificial Sequence: Synthetic oligonucleotide
ucuuuaaggagacggaagc

SEQ ID NO: 882145 - RNA, 19 nt, Artificial Sequence
  Description of Artificial Sequence: Synthetic oligonucleotide
aagaugacuucccacgggg

SEQ ID NO: 882146 - RNA, 19 nt, Artificial Sequence
  Description of Artificial Sequence: Synthetic oligonucleotide
acacauucgaauaaucucc

SEQ ID NO: 882147 - RNA, 19 nt, Artificial Sequence
  Description of Artificial Sequence: Synthetic oligonucleotide
gaggauuucaaacugggac

SEQ ID NO: 882148 - RNA, 19 nt, Artificial Sequence
  Description of Artificial Sequence: Synthetic oligonucleotide
uaaaauugucccaucaagu

SEQ ID NO: 882149 - RNA, 19 nt, Artificial Sequence
  Description of Artificial Sequence: Synthetic oligonucleotide
uccguaugaacucuugccg

SEQ ID NO: 882150 - RNA, 19 nt, Artificial Sequence
  Description of Artificial Sequence: Synthetic oligonucleotide
auccguaugaacucuugcc

SEQ ID NO: 882151 - RNA, 19 nt, Artificial Sequence
  Description of Artificial Sequence: Synthetic oligonucleotide
aaaauugucccaucaaguu

SEQ ID NO: 882152 - RNA, 19 nt, Artificial Sequence
  Description of Artificial Sequence: Synthetic oligonucleotide
acggagugcaccuggaugc

SEQ ID NO: 882153 - RNA, 19 nt, Artificial Sequence
  Description of Artificial Sequence: Synthetic oligonucleotide
ugacaaguugccauggagc

SEQ ID NO: 882154 - RNA, 19 nt, Artificial Sequence
  Description of Artificial Sequence: Synthetic oligonucleotide
agaucagacgcuccaagac

SEQ ID NO: 882155 - RNA, 19 nt, Artificial Sequence
  Description of Artificial Sequence: Synthetic oligonucleotide
uucaaugucaagcccacgu

SEQ ID NO: 882156 - RNA, 19 nt, Artificial Sequence
  Description of Artificial Sequence: Synthetic oligonucleotide
ucucccaccagagagacag

SEQ ID NO: 882157 - RNA, 19 nt, Artificial Sequence
  Description of Artificial Sequence: Synthetic oligonucleotide
aaugugcaugcggugagcc

SEQ ID NO: 882158 - RNA, 19 nt, Artificial Sequence
  Description of Artificial Sequence: Synthetic oligonucleotide
aaguugaucacuguuuuca

SEQ ID NO: 882159 - RNA, 19 nt, Artificial Sequence
  Description of Artificial Sequence: Synthetic oligonucleotide
uucuuuaaggagacggaag

SEQ ID NO: 882160 - RNA, 19 nt, Artificial Sequence
  Description of Artificial Sequence: Synthetic oligonucleotide
aauugucccaucaaguucu

SEQ ID NO: 882161 - RNA, 19 nt, Artificial Sequence
  Description of Artificial Sequence: Synthetic oligonucleotide
auauaaaauugucccauca

SEQ ID NO: 882162 - RNA, 19 nt, Artificial Sequence
  Description of Artificial Sequence: Synthetic oligonucleotide
auucgaauaaucuccuuca

SEQ ID NO: 882163 - RNA, 19 nt, Artificial Sequence
  Description of Artificial Sequence: Synthetic oligonucleotide
uccuuaaagcgccggaggg

SEQ ID NO: 882164 - RNA, 19 nt, Artificial Sequence
  Description of Artificial Sequence: Synthetic oligonucleotide
ucaaggccaaaucaaacuc

SEQ ID NO: 882165 - RNA, 19 nt, Artificial Sequence
  Description of Artificial Sequence: Synthetic oligonucleotide
ucuugccgaagaaagggag

SEQ ID NO: 882166 - RNA, 19 nt, Artificial Sequence
  Description of Artificial Sequence: Synthetic oligonucleotide
uuuaaggagacggaagcca

SEQ ID NO: 882167 - RNA, 19 nt, Artificial Sequence
  Description of Artificial Sequence: Synthetic oligonucleotide
uccuucaaugucaagccca

SEQ ID NO: 882168 - RNA, 19 nt, Artificial Sequence
  Description of Artificial Sequence: Synthetic oligonucleotide
ugcaguucgcccuacccgg

SEQ ID NO: 882169 - RNA, 19 nt, Artificial Sequence
  Description of Artificial Sequence: Synthetic oligonucleotide
caaguugccauggagcucg

SEQ ID NO: 882170 - RNA, 19 nt, Artificial Sequence
  Description of Artificial Sequence: Synthetic oligonucleotide
acaauugcuucccgguccc

SEQ ID NO: 882171 - RNA, 19 nt, Artificial Sequence
  Description of Artificial Sequence: Synthetic oligonucleotide
acaagaugacuucccacgg

SEQ ID NO: 882172 - RNA, 19 nt, Artificial Sequence
  Description of Artificial Sequence: Synthetic oligonucleotide
gggauaacaagccuucugg

SEQ ID NO: 882173 - RNA, 19 nt, Artificial Sequence
  Description of Artificial Sequence: Synthetic oligonucleotide
accaagacaagaugacuuc

SEQ ID NO: 882174 - RNA, 19 nt, Artificial Sequence
  Description of Artificial Sequence: Synthetic oligonucleotide
auauucauccagcauucug

SEQ ID NO: 882175 - RNA, 19 nt, Artificial Sequence
  Description of Artificial Sequence: Synthetic oligonucleotide
aaugaggaugucuggugcu

SEQ ID NO: 882176 - RNA, 19 nt, Artificial Sequence
  Description of Artificial Sequence: Synthetic oligonucleotide
caggcaacgcaaaagcugc

SEQ ID NO: 882177 - RNA, 19 nt, Artificial Sequence
  Description of Artificial Sequence: Synthetic oligonucleotide
uaaagcugccacaauugcu

SEQ ID NO: 882178 - RNA, 19 nt, Artificial Sequence
  Description of Artificial Sequence: Synthetic oligonucleotide
cauucgaauaaucuccuuc

SEQ ID NO: 882179 - RNA, 19 nt, Artificial Sequence
  Description of Artificial Sequence: Synthetic oligonucleotide
auaacaagccuucuggauu

SEQ ID NO: 882180 - RNA, 19 nt, Artificial Sequence
  Description of Artificial Sequence: Synthetic oligonucleotide
ucucuggcgggacagaccu

SEQ ID NO: 882181 - RNA, 19 nt, Artificial Sequence
  Description of Artificial Sequence: Synthetic oligonucleotide
ugcguacacaucuuucucc

SEQ ID NO: 882182 - RNA, 19 nt, Artificial Sequence
  Description of Artificial Sequence: Synthetic oligonucleotide
cuuuugucauacucagagg

SEQ ID NO: 882183 - RNA, 19 nt, Artificial Sequence
  Description of Artificial Sequence: Synthetic oligonucleotide
agacuucacauccaggcca

SEQ ID NO: 882184 - RNA, 19 nt, Artificial Sequence
  Description of Artificial Sequence: Synthetic oligonucleotide
caagacaagaugacuuccc

SEQ ID NO: 882185 - RNA, 19 nt, Artificial Sequence
  Description of Artificial Sequence: Synthetic oligonucleotide
auccuuaaagcgccggagg

SEQ ID NO: 882186 - RNA, 19 nt, Artificial Sequence
  Description of Artificial Sequence: Synthetic oligonucleotide
agaccuaacuguuuccucu

SEQ ID NO: 882187 - RNA, 19 nt, Artificial Sequence
  Description of Artificial Sequence: Synthetic oligonucleotide
gaaguucccucuucucugg

SEQ ID NO: 882188 - RNA, 19 nt, Artificial Sequence
  Description of Artificial Sequence: Synthetic oligonucleotide
caagaccaagacaagauga

SEQ ID NO: 882189 - RNA, 19 nt, Artificial Sequence
  Description of Artificial Sequence: Synthetic oligonucleotide
cauguagugacacugcaga

SEQ ID NO: 882190 - RNA, 19 nt, Artificial Sequence
  Description of Artificial Sequence: Synthetic oligonucleotide
aucacguggucagugaagg

SEQ ID NO: 882191 - RNA, 19 nt, Artificial Sequence
  Description of Artificial Sequence: Synthetic oligonucleotide
gcuguaauggccuucagga

SEQ ID NO: 882192 - RNA, 19 nt, Artificial Sequence
  Description of Artificial Sequence: Synthetic oligonucleotide
ucgaauaaucuccuucauc

SEQ ID NO: 882193 - RNA, 19 nt, Artificial Sequence
  Description of Artificial Sequence: Synthetic oligonucleotide
aguaaagcugccacaauug

SEQ ID NO: 882194 - RNA, 19 nt, Artificial Sequence
  Description of Artificial Sequence: Synthetic oligonucleotide
uggucgaugagccggccag

SEQ ID NO: 882195 - RNA, 19 nt, Artificial Sequence
  Description of Artificial Sequence: Synthetic oligonucleotide
aaguucccucuucucuggc

SEQ ID NO: 882196 - RNA, 19 nt, Artificial Sequence
  Description of Artificial Sequence: Synthetic oligonucleotide
aauuugaggaugacguccu

SEQ ID NO: 882197 - RNA, 19 nt, Artificial Sequence
  Description of Artificial Sequence: Synthetic oligonucleotide
cuuaaagcgccggagggcc

SEQ ID NO: 882198 - RNA, 19 nt, Artificial Sequence
  Description of Artificial Sequence: Synthetic oligonucleotide
guaaagcugccacaauugc

SEQ ID NO: 882199 - RNA, 19 nt, Artificial Sequence
  Description of Artificial Sequence: Synthetic oligonucleotide
gauccguaugaacucuugc

SEQ ID NO: 882200 - RNA, 19 nt, Artificial Sequence
  Description of Artificial Sequence: Synthetic oligonucleotide
agaaugugcaugcggugag

SEQ ID NO: 882201 - RNA, 19 nt, Artificial Sequence
  Description of Artificial Sequence: Synthetic oligonucleotide
guaauggccuucaggaggg

SEQ ID NO: 882202 - RNA, 19 nt, Artificial Sequence
  Description of Artificial Sequence: Synthetic oligonucleotide
cacaauugcuucccggucc

SEQ ID NO: 882203 - RNA, 19 nt, Artificial Sequence
  Description of Artificial Sequence: Synthetic oligonucleotide
ucugccucuagccgcagca

SEQ ID NO: 882204 - RNA, 19 nt, Artificial Sequence
  Description of Artificial Sequence: Synthetic oligonucleotide
aaauauccgcacaggguuc

SEQ ID NO: 882205 - RNA, 19 nt, Artificial Sequence
  Description of Artificial Sequence: Synthetic oligonucleotide
aacgaagggcaguugugca

SEQ ID NO: 882206 - RNA, 19 nt, Artificial Sequence
  Description of Artificial Sequence: Synthetic oligonucleotide
gggcuuguagaucagacgc

SEQ ID NO: 882207 - RNA, 19 nt, Artificial Sequence
  Description of Artificial Sequence: Synthetic oligonucleotide
gagacuucacauccaggcc

SEQ ID NO: 882208 - RNA, 19 nt, Artificial Sequence
  Description of Artificial Sequence: Synthetic oligonucleotide
gugacaaguugccauggag

SEQ ID NO: 882209 - RNA, 19 nt, Artificial Sequence
  Description of Artificial Sequence: Synthetic oligonucleotide
uccaagagccgcuuugcug

SEQ ID NO: 882210 - RNA, 19 nt, Artificial Sequence
  Description of Artificial Sequence: Synthetic oligonucleotide
gaggcaucuucaaagaauc

SEQ ID NO: 882211 - RNA, 19 nt, Artificial Sequence
  Description of Artificial Sequence: Synthetic oligonucleotide
guagaucagacgcuccaag

SEQ ID NO: 882212 - RNA, 19 nt, Artificial Sequence
  Description of Artificial Sequence: Synthetic oligonucleotide
uagaucagacgcuccaaga

SEQ ID NO: 882213 - RNA, 19 nt, Artificial Sequence
  Description of Artificial Sequence: Synthetic oligonucleotide
cuugccgaagaaagggagc

SEQ ID NO: 882214 - RNA, 19 nt, Artificial Sequence
  Description of Artificial Sequence: Synthetic oligonucleotide
gacggagugcaccuggaug

SEQ ID NO: 882215 - RNA, 19 nt, Artificial Sequence
  Description of Artificial Sequence: Synthetic oligonucleotide
gacagauucauguccugga

SEQ ID NO: 882216 - RNA, 19 nt, Artificial Sequence
  Description of Artificial Sequence: Synthetic oligonucleotide
agggauaacaagccuucug

SEQ ID NO: 882217 - RNA, 19 nt, Artificial Sequence
  Description of Artificial Sequence: Synthetic oligonucleotide
ugaugcuuggcacggccug

SEQ ID NO: 882218 - RNA, 19 nt, Artificial Sequence
  Description of Artificial Sequence: Synthetic oligonucleotide
aaacugggaccucuccucu

SEQ ID NO: 882219 - RNA, 19 nt, Artificial Sequence
  Description of Artificial Sequence: Synthetic oligonucleotide
aagggagcuacgucugugu

SEQ ID NO: 882220 - RNA, 19 nt, Artificial Sequence
  Description of Artificial Sequence: Synthetic oligonucleotide
aguucgcccuacccggugc

SEQ ID NO: 882221 - RNA, 19 nt, Artificial Sequence
  Description of Artificial Sequence: Synthetic oligonucleotide
acagggauaacaagccuuc

SEQ ID NO: 882222 - RNA, 19 nt, Artificial Sequence
  Description of Artificial Sequence: Synthetic oligonucleotide
aggcgcagaugucuuuucc

SEQ ID NO: 882223 - RNA, 19 nt, Artificial Sequence
  Description of Artificial Sequence: Synthetic oligonucleotide
ucauccuuaaagcgccgga

SEQ ID NO: 882224 - RNA, 19 nt, Artificial Sequence
  Description of Artificial Sequence: Synthetic oligonucleotide
ugggaacacauucgaauaa

SEQ ID NO: 882225 - RNA, 19 nt, Artificial Sequence
  Description of Artificial Sequence: Synthetic oligonucleotide
agugaagguucucaucagu

SEQ ID NO: 882226 - RNA, 19 nt, Artificial Sequence
  Description of Artificial Sequence: Synthetic oligonucleotide
acggggaagggauauaaaa

SEQ ID NO: 882227 - RNA, 19 nt, Artificial Sequence
  Description of Artificial Sequence: Synthetic oligonucleotide
ugccacaauugcuucccgg

SEQ ID NO: 882228 - RNA, 19 nt, Artificial Sequence
  Description of Artificial Sequence: Synthetic oligonucleotide
cuuguagaucagacgcucc

SEQ ID NO: 882229 - RNA, 19 nt, Artificial Sequence
  Description of Artificial Sequence: Synthetic oligonucleotide
caagaugacuucccacggg

SEQ ID NO: 882230 - RNA, 19 nt, Artificial Sequence
  Description of Artificial Sequence: Synthetic oligonucleotide
cuuggugacggagugcacc

SEQ ID NO: 882231 - RNA, 19 nt, Artificial Sequence
  Description of Artificial Sequence: Synthetic oligonucleotide
uggccaaccgcucugcaaa

SEQ ID NO: 882232 - RNA, 19 nt, Artificial Sequence
  Description of Artificial Sequence: Synthetic oligonucleotide
aauauccgcacaggguucu

SEQ ID NO: 882233 - RNA, 19 nt, Artificial Sequence
  Description of Artificial Sequence: Synthetic oligonucleotide
uacccggugcacauagugc

SEQ ID NO: 882234 - RNA, 19 nt, Artificial Sequence
  Description of Artificial Sequence: Synthetic oligonucleotide
uucauccuuaaagcgccgg

SEQ ID NO: 882235 - RNA, 19 nt, Artificial Sequence
  Description of Artificial Sequence: Synthetic oligonucleotide
uuaggccggauccguauga

SEQ ID NO: 882236 - RNA, 19 nt, Artificial Sequence
  Description of Artificial Sequence: Synthetic oligonucleotide
aaagggagcuacgucugug

SEQ ID NO: 882237 - RNA, 19 nt, Artificial Sequence
  Description of Artificial Sequence: Synthetic oligonucleotide
ucucugguagggaccagca

SEQ ID NO: 882238 - RNA, 19 nt, Artificial Sequence
  Description of Artificial Sequence: Synthetic oligonucleotide
acaggcaacgcaaaagcug

SEQ ID NO: 882239 - RNA, 19 nt, Artificial Sequence
  Description of Artificial Sequence: Synthetic oligonucleotide
gcuguucacaaauauccgc

SEQ ID NO: 882240 - RNA, 19 nt, Artificial Sequence
  Description of Artificial Sequence: Synthetic oligonucleotide
gacaaguugccauggagcu

SEQ ID NO: 882241 - RNA, 19 nt, Artificial Sequence
  Description of Artificial Sequence: Synthetic oligonucleotide
augauccgugccuucacug

SEQ ID NO: 882242 - RNA, 19 nt, Artificial Sequence
  Description of Artificial Sequence: Synthetic oligonucleotide
ugugacaaguugccaugga

SEQ ID NO: 882243 - RNA, 19 nt, Artificial Sequence
  Description of Artificial Sequence: Synthetic oligonucleotide
ugucaagcccacgugcugc

SEQ ID NO: 882244 - RNA, 19 nt, Artificial Sequence
  Description of Artificial Sequence: Synthetic oligonucleotide
gaugagcacuucaaugcug

SEQ ID NO: 882245 - RNA, 19 nt, Artificial Sequence
  Description of Artificial Sequence: Synthetic oligonucleotide
guagugacacugcagaacu

SEQ ID NO: 882246 - RNA, 19 nt, Artificial Sequence
  Description of Artificial Sequence: Synthetic oligonucleotide
uugucauacucagaggcau

SEQ ID NO: 882247 - RNA, 19 nt, Artificial Sequence
  Description of Artificial Sequence: Synthetic oligonucleotide
ucagacgcuccaagacagg

SEQ ID NO: 882248 - RNA, 19 nt, Artificial Sequence
  Description of Artificial Sequence: Synthetic oligonucleotide
uugccgaagaaagggagcu

SEQ ID NO: 882249 - RNA, 19 nt, Artificial Sequence
  Description of Artificial Sequence: Synthetic oligonucleotide
ugucuuuucccagcagacc

SEQ ID NO: 882250 - RNA, 19 nt, Artificial Sequence
  Description of Artificial Sequence: Synthetic oligonucleotide
ugcacaggcgcagaugucu

SEQ ID NO: 882251 - RNA, 19 nt, Artificial Sequence
  Description of Artificial Sequence: Synthetic oligonucleotide
agcacgugcaguucgcccu

SEQ ID NO: 882252 - RNA, 19 nt, Artificial Sequence
  Description of Artificial Sequence: Synthetic oligonucleotide
uucgaauaaucuccuucau

SEQ ID NO: 882253 - RNA, 19 nt, Artificial Sequence
  Description of Artificial Sequence: Synthetic oligonucleotide
cugagacuucacauccagg

SEQ ID NO: 882254 - RNA, 19 nt, Artificial Sequence
  Description of Artificial Sequence: Synthetic oligonucleotide
gaaguugaucacuguuuuc

SEQ ID NO: 882255 - RNA, 19 nt, Artificial Sequence
  Description of Artificial Sequence: Synthetic oligonucleotide
cagcagaaugugcaugcgg

SEQ ID NO: 882256 - RNA, 19 nt, Artificial Sequence
  Description of Artificial Sequence: Synthetic oligonucleotide
caccucaucugucauggug

SEQ ID NO: 882257 - RNA, 19 nt, Artificial Sequence
  Description of Artificial Sequence: Synthetic oligonucleotide
gauaacaagccuucuggau

SEQ ID NO: 882258 - RNA, 19 nt, Artificial Sequence
  Description of Artificial Sequence: Synthetic oligonucleotide
uuguaccuggacuuggauu

SEQ ID NO: 882259 - RNA, 19 nt, Artificial Sequence
  Description of Artificial Sequence: Synthetic oligonucleotide
gacgcuccaagacaggcaa

SEQ ID NO: 882260 - RNA, 19 nt, Artificial Sequence
  Description of Artificial Sequence: Synthetic oligonucleotide
gauuggggugggcugcuug

SEQ ID NO: 882261 - RNA, 19 nt, Artificial Sequence
  Description of Artificial Sequence: Synthetic oligonucleotide
ucccaccagagagacagag

SEQ ID NO: 882262 - RNA, 19 nt, Artificial Sequence
  Description of Artificial Sequence: Synthetic oligonucleotide
acguggucagugaagguuc

SEQ ID NO: 882263 - RNA, 19 nt, Artificial Sequence
  Description of Artificial Sequence: Synthetic oligonucleotide
uguuaggccggauccguau

SEQ ID NO: 882264 - RNA, 19 nt, Artificial Sequence
  Description of Artificial Sequence: Synthetic oligonucleotide
acagauucauguccuggaa

SEQ ID NO: 882265 - RNA, 19 nt, Artificial Sequence
  Description of Artificial Sequence: Synthetic oligonucleotide
cauccuuaaagcgccggag

SEQ ID NO: 882266 - RNA, 19 nt, Artificial Sequence
  Description of Artificial Sequence: Synthetic oligonucleotide
cuucaaugcugcucaggug

SEQ ID NO: 882267 - RNA, 19 nt, Artificial Sequence
  Description of Artificial Sequence: Synthetic oligonucleotide
ggagacggaagccagaucu

SEQ ID NO: 882268 - RNA, 19 nt, Artificial Sequence
  Description of Artificial Sequence: Synthetic oligonucleotide
uucccuguuaggccggauc

SEQ ID NO: 882269 - RNA, 19 nt, Artificial Sequence
  Description of Artificial Sequence: Synthetic oligonucleotide
gggaagggauauaaaauug

SEQ ID NO: 882270 - RNA, 19 nt, Artificial Sequence
  Description of Artificial Sequence: Synthetic oligonucleotide
acagaccuaacuguuuccu

SEQ ID NO: 882271 - RNA, 19 nt, Artificial Sequence
  Description of Artificial Sequence: Synthetic oligonucleotide
aggaugucaaucuguucau

SEQ ID NO: 882272 - RNA, 19 nt, Artificial Sequence
  Description of Artificial Sequence: Synthetic oligonucleotide
gguucugcgguuucucuug

SEQ ID NO: 882273 - RNA, 19 nt, Artificial Sequence
  Description of Artificial Sequence: Synthetic oligonucleotide
gagacagagcgcccagccc

SEQ ID NO: 882274 - RNA, 19 nt, Artificial Sequence
  Description of Artificial Sequence: Synthetic oligonucleotide
uagugacacugcagaacug

SEQ ID NO: 882275 - RNA, 19 nt, Artificial Sequence
  Description of Artificial Sequence: Synthetic oligonucleotide
gaccuaacuguuuccucuc

SEQ ID NO: 882276 - RNA, 19 nt, Artificial Sequence
  Description of Artificial Sequence: Synthetic oligonucleotide
ucuggcgggacagaccuaa

SEQ ID NO: 882277 - RNA, 19 nt, Artificial Sequence
  Description of Artificial Sequence: Synthetic oligonucleotide
gggauauaaaauuguccca

SEQ ID NO: 882278 - RNA, 19 nt, Artificial Sequence
  Description of Artificial Sequence: Synthetic oligonucleotide
ggcgggacagaccuaacug

SEQ ID NO: 882279 - RNA, 19 nt, Artificial Sequence
  Description of Artificial Sequence: Synthetic oligonucleotide
uggcgggacagaccuaacu

SEQ ID NO: 882280 - RNA, 19 nt, Artificial Sequence
  Description of Artificial Sequence: Synthetic oligonucleotide
aggccggauccguaugaac

SEQ ID NO: 882281 - RNA, 19 nt, Artificial Sequence
  Description of Artificial Sequence: Synthetic oligonucleotide
gcaguugugcagguggucg

SEQ ID NO: 882282 - RNA, 19 nt, Artificial Sequence
  Description of Artificial Sequence: Synthetic oligonucleotide
cccacagggauaacaagcc

SEQ ID NO: 882283 - RNA, 19 nt, Artificial Sequence
  Description of Artificial Sequence: Synthetic oligonucleotide
gucuaucugggccucugac

SEQ ID NO: 882284 - RNA, 19 nt, Artificial Sequence
  Description of Artificial Sequence: Synthetic oligonucleotide
acaaguugccauggagcuc

SEQ ID NO: 882285 - RNA, 19 nt, Artificial Sequence
  Description of Artificial Sequence: Synthetic oligonucleotide
cuucuucuucuucuucuuc

SEQ ID NO: 882286 - RNA, 19 nt, Artificial Sequence
  Description of Artificial Sequence: Synthetic oligonucleotide
guucugcgguuucucuugg

SEQ ID NO: 882287 - RNA, 19 nt, Artificial Sequence
  Description of Artificial Sequence: Synthetic oligonucleotide
guaugaacucuugccgaag

SEQ ID NO: 882288 - RNA, 19 nt, Artificial Sequence
  Description of Artificial Sequence: Synthetic oligonucleotide
augucaagcccacgugcug

SEQ ID NO: 882289 - RNA, 19 nt, Artificial Sequence
  Description of Artificial Sequence: Synthetic oligonucleotide
acgcaaaagcugcaguuuu

SEQ ID NO: 882290 - RNA, 19 nt, Artificial Sequence
  Description of Artificial Sequence: Synthetic oligonucleotide
cacugcguacacaucuuuc

SEQ ID NO: 882291 - RNA, 19 nt, Artificial Sequence
  Description of Artificial Sequence: Synthetic oligonucleotide
cuucucccaccagagagac

SEQ ID NO: 882292 - RNA, 19 nt, Artificial Sequence
  Description of Artificial Sequence: Synthetic oligonucleotide
auugcccgugcucgcuugg

SEQ ID NO: 882293 - RNA, 19 nt, Artificial Sequence
  Description of Artificial Sequence: Synthetic oligonucleotide
guuaggccggauccguaug

SEQ ID NO: 882294 - RNA, 19 nt, Artificial Sequence
  Description of Artificial Sequence: Synthetic oligonucleotide
auguagugacacugcagaa

SEQ ID NO: 882295 - RNA, 19 nt, Artificial Sequence
  Description of Artificial Sequence: Synthetic oligonucleotide
guucuuuaaggagacggaa

SEQ ID NO: 882296 - RNA, 19 nt, Artificial Sequence
  Description of Artificial Sequence: Synthetic oligonucleotide
aaagcgccggagggccucc

SEQ ID NO: 882297 - RNA, 19 nt, Artificial Sequence
  Description of Artificial Sequence: Synthetic oligonucleotide
uugcuuguguuggugaguu

SEQ ID NO: 882298 - RNA, 19 nt, Artificial Sequence
  Description of Artificial Sequence: Synthetic oligonucleotide
ggacagaccuaacuguuuc

SEQ ID NO: 882299 - RNA, 19 nt, Artificial Sequence
  Description of Artificial Sequence: Synthetic oligonucleotide
aggagacggaagccagauc

SEQ ID NO: 882300 - RNA, 19 nt, Artificial Sequence
  Description of Artificial Sequence: Synthetic oligonucleotide
gaaugugcaugcggugagc

SEQ ID NO: 882301 - RNA, 19 nt, Artificial Sequence
  Description of Artificial Sequence: Synthetic oligonucleotide
cugcguacacaucuuucuc

SEQ ID NO: 882302 - RNA, 19 nt, Artificial Sequence
  Description of Artificial Sequence: Synthetic oligonucleotide
acucgagugacugcagccu

SEQ ID NO: 882303 - RNA, 19 nt, Artificial Sequence
  Description of Artificial Sequence: Synthetic oligonucleotide
uuggugaguucuucaucaa

SEQ ID NO: 882304 - RNA, 19 nt, Artificial Sequence
  Description of Artificial Sequence: Synthetic oligonucleotide
uggugggaacacauucgaa

SEQ ID NO: 882305 - RNA, 19 nt, Artificial Sequence
  Description of Artificial Sequence: Synthetic oligonucleotide
cagaccuaacuguuuccuc

SEQ ID NO: 882306 - RNA, 19 nt, Artificial Sequence
  Description of Artificial Sequence: Synthetic oligonucleotide
cucgagugacugcagccug

SEQ ID NO: 882307 - RNA, 19 nt, Artificial Sequence
  Description of Artificial Sequence: Synthetic oligonucleotide
ggauaacaagccuucugga

SEQ ID NO: 882308 - RNA, 19 nt, Artificial Sequence
  Description of Artificial Sequence: Synthetic oligonucleotide
gaugcuuggcacggccugc

SEQ ID NO: 882309 - RNA, 19 nt, Artificial Sequence
  Description of Artificial Sequence: Synthetic oligonucleotide
ggcgcagaugucuuuuccc

SEQ ID NO: 882310 - RNA, 19 nt, Artificial Sequence
  Description of Artificial Sequence: Synthetic oligonucleotide
ucgaugagccggccaggug

SEQ ID NO: 882311 - RNA, 19 nt, Artificial Sequence
  Description of Artificial Sequence: Synthetic oligonucleotide
acgugcaguucgcccuacc

SEQ ID NO: 882312 - RNA, 19 nt, Artificial Sequence
  Description of Artificial Sequence: Synthetic oligonucleotide
agcuacgucuguguugcug

SEQ ID NO: 882313 - RNA, 19 nt, Artificial Sequence
  Description of Artificial Sequence: Synthetic oligonucleotide
cucucugguagggaccagc

SEQ ID NO: 882314 - RNA, 19 nt, Artificial Sequence
  Description of Artificial Sequence: Synthetic oligonucleotide
aguguugggcauggugaag

SEQ ID NO: 882315 - RNA, 19 nt, Artificial Sequence
  Description of Artificial Sequence: Synthetic oligonucleotide
ucgggcauugcccgugcuc

SEQ ID NO: 882316 - RNA, 19 nt, Artificial Sequence
  Description of Artificial Sequence: Synthetic oligonucleotide
cuucaaugucaagcccacg

SEQ ID NO: 882317 - RNA, 19 nt, Artificial Sequence
  Description of Artificial Sequence: Synthetic oligonucleotide
ggugggaacacauucgaau

SEQ ID NO: 882318 - RNA, 19 nt, Artificial Sequence
  Description of Artificial Sequence: Synthetic oligonucleotide
ugcugcccgaagagcagcu

SEQ ID NO: 882319 - RNA, 19 nt, Artificial Sequence
  Description of Artificial Sequence: Synthetic oligonucleotide
aagaauccuccugcuuccu

SEQ ID NO: 882320 - RNA, 19 nt, Artificial Sequence
  Description of Artificial Sequence: Synthetic oligonucleotide
gacggaagccagaucuuuc

SEQ ID NO: 882321 - RNA, 19 nt, Artificial Sequence
  Description of Artificial Sequence: Synthetic oligonucleotide
ggauauaaaauugucccau

SEQ ID NO: 882322 - RNA, 19 nt, Artificial Sequence
  Description of Artificial Sequence: Synthetic oligonucleotide
ggagaggcuuuugucauac

SEQ ID NO: 882323 - RNA, 19 nt, Artificial Sequence
  Description of Artificial Sequence: Synthetic oligonucleotide
gaugucuggugcugcccga

SEQ ID NO: 882324 - RNA, 19 nt, Artificial Sequence
  Description of Artificial Sequence: Synthetic oligonucleotide
guucauccuuaaagcgccg

SEQ ID NO: 882325 - RNA, 19 nt, Artificial Sequence
  Description of Artificial Sequence: Synthetic oligonucleotide
acauucgaauaaucuccuu

SEQ ID NO: 882326 - RNA, 19 nt, Artificial Sequence
  Description of Artificial Sequence: Synthetic oligonucleotide
cugcgguuucucuuggcca

SEQ ID NO: 882327 - RNA, 19 nt, Artificial Sequence
  Description of Artificial Sequence: Synthetic oligonucleotide
gugaacagcaucacguggu

SEQ ID NO: 882328 - RNA, 19 nt, Artificial Sequence
  Description of Artificial Sequence: Synthetic oligonucleotide
uguugggcauggugaaguu

SEQ ID NO: 882329 - RNA, 19 nt, Artificial Sequence
  Description of Artificial Sequence: Synthetic oligonucleotide
ugccugucccaguggcugc

SEQ ID NO: 882330 - RNA, 19 nt, Artificial Sequence
  Description of Artificial Sequence: Synthetic oligonucleotide
aguugccauggagcucgcc

SEQ ID NO: 882331 - RNA, 19 nt, Artificial Sequence
  Description of Artificial Sequence: Synthetic oligonucleotide
cauugcccgugcucgcuug

SEQ ID NO: 882332 - RNA, 19 nt, Artificial Sequence
  Description of Artificial Sequence: Synthetic oligonucleotide
gugcucgcuugguucugcg

SEQ ID NO: 882333 - RNA, 19 nt, Artificial Sequence
  Description of Artificial Sequence: Synthetic oligonucleotide
cucugguagggaccagcac

SEQ ID NO: 882334 - RNA, 19 nt, Artificial Sequence
  Description of Artificial Sequence: Synthetic oligonucleotide
auccgcacaggguucuuua

SEQ ID NO: 882335 - RNA, 19 nt, Artificial Sequence
  Description of Artificial Sequence: Synthetic oligonucleotide
gaacagcaucacgugguca

SEQ ID NO: 882336 - RNA, 19 nt, Artificial Sequence
  Description of Artificial Sequence: Synthetic oligonucleotide
ggcauguagugacacugca

SEQ ID NO: 882337 - RNA, 19 nt, Artificial Sequence
  Description of Artificial Sequence: Synthetic oligonucleotide
gagugcaccuggaugccca

SEQ ID NO: 882338 - RNA, 19 nt, Artificial Sequence
  Description of Artificial Sequence: Synthetic oligonucleotide
gguucuuuaaggagacgga

SEQ ID NO: 882339 - RNA, 19 nt, Artificial Sequence
  Description of Artificial Sequence: Synthetic oligonucleotide
cuagccgcagcacugcgua

SEQ ID NO: 882340 - RNA, 19 nt, Artificial Sequence
  Description of Artificial Sequence: Synthetic oligonucleotide
accaggaugucaaucuguu

SEQ ID NO: 882341 - RNA, 19 nt, Artificial Sequence
  Description of Artificial Sequence: Synthetic oligonucleotide
gccgaagaaagggagcuac

SEQ ID NO: 882342 - RNA, 19 nt, Artificial Sequence
  Description of Artificial Sequence: Synthetic oligonucleotide
aaguugccauggagcucgc

SEQ ID NO: 882343 - RNA, 19 nt, Artificial Sequence
  Description of Artificial Sequence: Synthetic oligonucleotide
ccccuucccuguuaggccg

SEQ ID NO: 882344 - RNA, 19 nt, Artificial Sequence
  Description of Artificial Sequence: Synthetic oligonucleotide
ccgaagaaagggagcuacg

SEQ ID NO: 882345 - RNA, 19 nt, Artificial Sequence
  Description of Artificial Sequence: Synthetic oligonucleotide
caguaaagcugccacaauu

SEQ ID NO: 882346 - RNA, 19 nt, Artificial Sequence
  Description of Artificial Sequence: Synthetic oligonucleotide
uccucgggcauugcccgug

SEQ ID NO: 882347 - RNA, 19 nt, Artificial Sequence
  Description of Artificial Sequence: Synthetic oligonucleotide
agggagcuacgucuguguu

SEQ ID NO: 882348 - RNA, 19 nt, Artificial Sequence
  Description of Artificial Sequence: Synthetic oligonucleotide
caagagccgcuuugcugug

SEQ ID NO: 882349 - RNA, 19 nt, Artificial Sequence
  Description of Artificial Sequence: Synthetic oligonucleotide
agaugacuucccacgggga

SEQ ID NO: 882350 - RNA, 19 nt, Artificial Sequence
  Description of Artificial Sequence: Synthetic oligonucleotide
agacggaagccagaucuuu

SEQ ID NO: 882351 - RNA, 19 nt, Artificial Sequence
  Description of Artificial Sequence: Synthetic oligonucleotide
uucucccaccagagagaca

SEQ ID NO: 882352 - RNA, 19 nt, Artificial Sequence
  Description of Artificial Sequence: Synthetic oligonucleotide
agacgcuccaagacaggca

SEQ ID NO: 882353 - RNA, 19 nt, Artificial Sequence
  Description of Artificial Sequence: Synthetic oligonucleotide
acagagcgcccagcccugc

SEQ ID NO: 882354 - RNA, 19 nt, Artificial Sequence
  Description of Artificial Sequence: Synthetic oligonucleotide
gcgcagaugucuuuuccca

SEQ ID NO: 882355 - RNA, 19 nt, Artificial Sequence
  Description of Artificial Sequence: Synthetic oligonucleotide
gaaagggagcuacgucugu

SEQ ID NO: 882356 - RNA, 19 nt, Artificial Sequence
  Description of Artificial Sequence: Synthetic oligonucleotide
ccuuaaagcgccggagggc

SEQ ID NO: 882357 - RNA, 19 nt, Artificial Sequence
  Description of Artificial Sequence: Synthetic oligonucleotide
caguugugcagguggucga

SEQ ID NO: 882358 - RNA, 19 nt, Artificial Sequence
  Description of Artificial Sequence: Synthetic oligonucleotide
ggaugauccgugccuucac

SEQ ID NO: 882359 - RNA, 19 nt, Artificial Sequence
  Description of Artificial Sequence: Synthetic oligonucleotide
gcuacgucuguguugcugu

SEQ ID NO: 882360 - RNA, 19 nt, Artificial Sequence
  Description of Artificial Sequence: Synthetic oligonucleotide
ggauccguaugaacucuug

SEQ ID NO: 882361 - RNA, 19 nt, Artificial Sequence
  Description of Artificial Sequence: Synthetic oligonucleotide
aggagaggcuuuugucaua

SEQ ID NO: 882362 - RNA, 19 nt, Artificial Sequence
  Description of Artificial Sequence: Synthetic oligonucleotide
ugcuuguguuggugaguuc

SEQ ID NO: 882363 - RNA, 19 nt, Artificial Sequence
  Description of Artificial Sequence: Synthetic oligonucleotide
caggcgcagaugucuuuuc

SEQ ID NO: 882364 - RNA, 19 nt, Artificial Sequence
  Description of Artificial Sequence: Synthetic oligonucleotide
guaccuggacuuggauuug

SEQ ID NO: 882365 - RNA, 19 nt, Artificial Sequence
  Description of Artificial Sequence: Synthetic oligonucleotide
gccggauccguaugaacuc

SEQ ID NO: 882366 - RNA, 19 nt, Artificial Sequence
  Description of Artificial Sequence: Synthetic oligonucleotide
gccagcucgguacuucuuc

SEQ ID NO: 882367 - RNA, 19 nt, Artificial Sequence
  Description of Artificial Sequence: Synthetic oligonucleotide
cccuacccggugcacauag

SEQ ID NO: 882368 - RNA, 19 nt, Artificial Sequence
  Description of Artificial Sequence: Synthetic oligonucleotide
ucgcccuacccggugcaca

SEQ ID NO: 882369 - RNA, 19 nt, Artificial Sequence
  Description of Artificial Sequence: Synthetic oligonucleotide
ucaagcccacgugcugcca

SEQ ID NO: 882370 - RNA, 19 nt, Artificial Sequence
  Description of Artificial Sequence: Synthetic oligonucleotide
caguucgcccuacccggug

SEQ ID NO: 882371 - RNA, 19 nt, Artificial Sequence
  Description of Artificial Sequence: Synthetic oligonucleotide
ccguaugaacucuugccga

SEQ ID NO: 882372 - RNA, 19 nt, Artificial Sequence
  Description of Artificial Sequence: Synthetic oligonucleotide
cuguguugcuguucacaaa

SEQ ID NO: 882373 - RNA, 19 nt, Artificial Sequence
  Description of Artificial Sequence: Synthetic oligonucleotide
ggccgggacagauucaugu

SEQ ID NO: 882374 - RNA, 19 nt, Artificial Sequence
  Description of Artificial Sequence: Synthetic oligonucleotide
ggaccucuccucugcaguc

SEQ ID NO: 882375 - RNA, 19 nt, Artificial Sequence
  Description of Artificial Sequence: Synthetic oligonucleotide
cgugcaguucgcccuaccc

SEQ ID NO: 882376 - RNA, 19 nt, Artificial Sequence
  Description of Artificial Sequence: Synthetic oligonucleotide
caccaggaugucaaucugu

SEQ ID NO: 882377 - RNA, 19 nt, Artificial Sequence
  Description of Artificial Sequence: Synthetic oligonucleotide
guggucgaugagccggcca

SEQ ID NO: 882378 - RNA, 19 nt, Artificial Sequence
  Description of Artificial Sequence: Synthetic oligonucleotide
ccgcacaggguucuuuaag

SEQ ID NO: 882379 - RNA, 19 nt, Artificial Sequence
  Description of Artificial Sequence: Synthetic oligonucleotide
uucccacggggaagggaua

SEQ ID NO: 882380 - RNA, 19 nt, Artificial Sequence
  Description of Artificial Sequence: Synthetic oligonucleotide
guucgcccuacccggugca

SEQ ID NO: 882381 - RNA, 19 nt, Artificial Sequence
  Description of Artificial Sequence: Synthetic oligonucleotide
gaagggccagcucgguacu

SEQ ID NO: 882382 - RNA, 19 nt, Artificial Sequence
  Description of Artificial Sequence: Synthetic oligonucleotide
agccgcuuugcugugucua

SEQ ID NO: 882383 - RNA, 19 nt, Artificial Sequence
  Description of Artificial Sequence: Synthetic oligonucleotide
ugcccgugcucgcuugguu

SEQ ID NO: 882384 - RNA, 19 nt, Artificial Sequence
  Description of Artificial Sequence: Synthetic oligonucleotide
ccagcacucgagugacugc

SEQ ID NO: 882385 - RNA, 19 nt, Artificial Sequence
  Description of Artificial Sequence: Synthetic oligonucleotide
cgggcauugcccgugcucg

SEQ ID NO: 882386 - RNA, 19 nt, Artificial Sequence
  Description of Artificial Sequence: Synthetic oligonucleotide
ugccgaagaaagggagcua

SEQ ID NO: 882387 - RNA, 19 nt, Artificial Sequence
  Description of Artificial Sequence: Synthetic oligonucleotide
ggucgaugagccggccagg

SEQ ID NO: 882388 - RNA, 19 nt, Artificial Sequence
  Description of Artificial Sequence: Synthetic oligonucleotide
cacggggaagggauauaaa

SEQ ID NO: 882389 - RNA, 19 nt, Artificial Sequence
  Description of Artificial Sequence: Synthetic oligonucleotide
augagccggccaggugugg

SEQ ID NO: 882390 - RNA, 19 nt, Artificial Sequence
  Description of Artificial Sequence: Synthetic oligonucleotide
ggccggauccguaugaacu

SEQ ID NO: 882391 - RNA, 19 nt, Artificial Sequence
  Description of Artificial Sequence: Synthetic oligonucleotide
cuuggccaaccgcucugca

SEQ ID NO: 882392 - RNA, 19 nt, Artificial Sequence
  Description of Artificial Sequence: Synthetic oligonucleotide
ggcaaugaggaugucuggu

SEQ ID NO: 882393 - RNA, 19 nt, Artificial Sequence
  Description of Artificial Sequence: Synthetic oligonucleotide
gcucgcuugguucugcggu

SEQ ID NO: 882394 - RNA, 19 nt, Artificial Sequence
  Description of Artificial Sequence: Synthetic oligonucleotide
cggggcuuguagaucagac

SEQ ID NO: 882395 - RNA, 19 nt, Artificial Sequence
  Description of Artificial Sequence: Synthetic oligonucleotide
agcacugcguacacaucuu

SEQ ID NO: 882396 - RNA, 19 nt, Artificial Sequence
  Description of Artificial Sequence: Synthetic oligonucleotide
ucgcuugguucugcgguuu

SEQ ID NO: 882397 - RNA, 19 nt, Artificial Sequence
  Description of Artificial Sequence: Synthetic oligonucleotide
cuggcggggcuuguagauc

SEQ ID NO: 882398 - RNA, 19 nt, Artificial Sequence
  Description of Artificial Sequence: Synthetic oligonucleotide
gccaggcauguagugacac

SEQ ID NO: 882399 - RNA, 19 nt, Artificial Sequence
  Description of Artificial Sequence: Synthetic oligonucleotide
cugacugcugcaucucuuu

SEQ ID NO: 882400 - RNA, 19 nt, Artificial Sequence
  Description of Artificial Sequence: Synthetic oligonucleotide
ccgugccuucacuggagcc

SEQ ID NO: 882401 - RNA, 19 nt, Artificial Sequence
  Description of Artificial Sequence: Synthetic oligonucleotide
uucgcccuacccggugcac

SEQ ID NO: 882402 - RNA, 19 nt, Artificial Sequence
  Description of Artificial Sequence: Synthetic oligonucleotide
cacguggucagugaagguu

SEQ ID NO: 882403 - RNA, 19 nt, Artificial Sequence
  Description of Artificial Sequence: Synthetic oligonucleotide
gcccgugcucgcuugguuc

SEQ ID NO: 882404 - RNA, 19 nt, Artificial Sequence
  Description of Artificial Sequence: Synthetic oligonucleotide
ggagugcaccuggaugccc

SEQ ID NO: 882405 - RNA, 19 nt, Artificial Sequence
  Description of Artificial Sequence: Synthetic oligonucleotide
gcacauagugcuugacagu

SEQ ID NO: 882406 - RNA, 19 nt, Artificial Sequence
  Description of Artificial Sequence: Synthetic oligonucleotide
gugacggagugcaccugga

SEQ ID NO: 882407 - RNA, 19 nt, Artificial Sequence
  Description of Artificial Sequence: Synthetic oligonucleotide
cccuguuaggccggauccg

SEQ ID NO: 882408 - RNA, 19 nt, Artificial Sequence
  Description of Artificial Sequence: Synthetic oligonucleotide
cuguuaggccggauccgua

SEQ ID NO: 882409 - RNA, 19 nt, Artificial Sequence
  Description of Artificial Sequence: Synthetic oligonucleotide
ccacugggucacuucuuuc

SEQ ID NO: 882410 - RNA, 19 nt, Artificial Sequence
  Description of Artificial Sequence: Synthetic oligonucleotide
cccuucuucuucuucuucu

SEQ ID NO: 882411 - RNA, 19 nt, Artificial Sequence
  Description of Artificial Sequence: Synthetic oligonucleotide
gucgaugagccggccaggu

SEQ ID NO: 882412 - RNA, 19 nt, Artificial Sequence
  Description of Artificial Sequence: Synthetic oligonucleotide
gccgcagcacugcguacac

SEQ ID NO: 882413 - RNA, 19 nt, Artificial Sequence
  Description of Artificial Sequence: Synthetic oligonucleotide
gagacggaagccagaucuu

SEQ ID NO: 882414 - RNA, 19 nt, Artificial Sequence
  Description of Artificial Sequence: Synthetic oligonucleotide
cacgugcaguucgcccuac

SEQ ID NO: 882415 - RNA, 19 nt, Artificial Sequence
  Description of Artificial Sequence: Synthetic oligonucleotide
auauccgcacaggguucuu

SEQ ID NO: 882416 - RNA, 19 nt, Artificial Sequence
  Description of Artificial Sequence: Synthetic oligonucleotide
gagccgcuuugcugugucu

SEQ ID NO: 882417 - RNA, 19 nt, Artificial Sequence
  Description of Artificial Sequence: Synthetic oligonucleotide
cucccaccagagagacaga

SEQ ID NO: 882418 - RNA, 19 nt, Artificial Sequence
  Description of Artificial Sequence: Synthetic oligonucleotide
gcagucaucuccccuucuu

SEQ ID NO: 882419 - RNA, 19 nt, Artificial Sequence
  Description of Artificial Sequence: Synthetic oligonucleotide
ccucgggcauugcccgugc

SEQ ID NO: 882420 - RNA, 19 nt, Artificial Sequence
  Description of Artificial Sequence: Synthetic oligonucleotide
cagggauaacaagccuucu

SEQ ID NO: 882421 - RNA, 19 nt, Artificial Sequence
  Description of Artificial Sequence: Synthetic oligonucleotide
cccggaauuugaggaugac

SEQ ID NO: 882422 - RNA, 19 nt, Artificial Sequence
  Description of Artificial Sequence: Synthetic oligonucleotide
gccaaccgcucugcaaaca

SEQ ID NO: 882423 - RNA, 19 nt, Artificial Sequence
  Description of Artificial Sequence: Synthetic oligonucleotide
cgcagcacugcguacacau

SEQ ID NO: 882424 - RNA, 19 nt, Artificial Sequence
  Description of Artificial Sequence: Synthetic oligonucleotide
cagguguggcaaugaggau

SEQ ID NO: 882425 - RNA, 19 nt, Artificial Sequence
  Description of Artificial Sequence: Synthetic oligonucleotide
ccaaccgcucugcaaacau

SEQ ID NO: 882426 - RNA, 19 nt, Artificial Sequence
  Description of Artificial Sequence: Synthetic oligonucleotide
gcgguuucucuuggccaac

SEQ ID NO: 882427 - RNA, 19 nt, Artificial Sequence
  Description of Artificial Sequence: Synthetic oligonucleotide
gcacgugcaguucgcccua

SEQ ID NO: 882428 - RNA, 19 nt, Artificial Sequence
  Description of Artificial Sequence: Synthetic oligonucleotide
cgugcucgcuugguucugc

SEQ ID NO: 882429 - RNA, 19 nt, Artificial Sequence
  Description of Artificial Sequence: Synthetic oligonucleotide
ccuucuucuucuucuucuu

SEQ ID NO: 882430 - RNA, 19 nt, Artificial Sequence
  Description of Artificial Sequence: Synthetic oligonucleotide
gggccgggacagauucaug

SEQ ID NO: 882431 - RNA, 19 nt, Artificial Sequence
  Description of Artificial Sequence: Synthetic oligonucleotide
gcacugcguacacaucuuu

SEQ ID NO: 882432 - RNA, 19 nt, Artificial Sequence
  Description of Artificial Sequence: Synthetic oligonucleotide
gggacagaccuaacuguuu

SEQ ID NO: 882433 - RNA, 19 nt, Artificial Sequence
  Description of Artificial Sequence: Synthetic oligonucleotide
ccuguuaggccggauccgu

SEQ ID NO: 882434 - RNA, 19 nt, Artificial Sequence
  Description of Artificial Sequence: Synthetic oligonucleotide
gagcuacgucuguguugcu

SEQ ID NO: 882435 - RNA, 19 nt, Artificial Sequence
  Description of Artificial Sequence: Synthetic oligonucleotide
gcggggcuuguagaucaga

SEQ ID NO: 882436 - RNA, 19 nt, Artificial Sequence
  Description of Artificial Sequence: Synthetic oligonucleotide
cucuggcgggacagaccua

SEQ ID NO: 882437 - RNA, 19 nt, Artificial Sequence
  Description of Artificial Sequence: Synthetic oligonucleotide
cccgugcucgcuugguucu

SEQ ID NO: 882438 - RNA, 19 nt, Artificial Sequence
  Description of Artificial Sequence: Synthetic oligonucleotide
ccgcugugucugugacaag

SEQ ID NO: 882439 - RNA, 19 nt, Artificial Sequence
  Description of Artificial Sequence: Synthetic oligonucleotide
cucgggcauugcccgugcu

SEQ ID NO: 882440 - RNA, 19 nt, Artificial Sequence
  Description of Artificial Sequence: Synthetic oligonucleotide
caccagcacucgagugacu

SEQ ID NO: 882441 - RNA, 19 nt, Artificial Sequence
  Description of Artificial Sequence: Synthetic oligonucleotide
gcauugcccgugcucgcuu

SEQ ID NO: 882442 - RNA, 19 nt, Artificial Sequence
  Description of Artificial Sequence: Synthetic oligonucleotide
gggccucugacugcugcau

SEQ ID NO: 882443 - RNA, 19 nt, Artificial Sequence
  Description of Artificial Sequence: Synthetic oligonucleotide
gcagacccacagggauaac

SEQ ID NO: 882444 - RNA, 19 nt, Artificial Sequence
  Description of Artificial Sequence: Synthetic oligonucleotide
ccggauccguaugaacucu

SEQ ID NO: 882445 - RNA, 19 nt, Artificial Sequence
  Description of Artificial Sequence: Synthetic oligonucleotide
ccgugcucgcuugguucug

SEQ ID NO: 882446 - RNA, 19 nt, Artificial Sequence
  Description of Artificial Sequence: Synthetic oligonucleotide
cguggucagugaagguucu

SEQ ID NO: 882447 - RNA, 19 nt, Artificial Sequence
  Description of Artificial Sequence: Synthetic oligonucleotide
gcaguucgcccuacccggu

SEQ ID NO: 882448 - RNA, 19 nt, Artificial Sequence
  Description of Artificial Sequence: Synthetic oligonucleotide
ccuacccggugcacauagu

SEQ ID NO: 882449 - RNA, 19 nt, Artificial Sequence
  Description of Artificial Sequence: Synthetic oligonucleotide
ccgcagcacugcguacaca

SEQ ID NO: 882450 - RNA, 19 nt, Artificial Sequence
  Description of Artificial Sequence: Synthetic oligonucleotide
cggauccguaugaacucuu

SEQ ID NO: 882451 - RNA, 19 nt, Artificial Sequence
  Description of Artificial Sequence: Synthetic oligonucleotide
ggccagcucgguacuucuu

SEQ ID NO: 882452 - RNA, 19 nt, Artificial Sequence
  Description of Artificial Sequence: Synthetic oligonucleotide
cgcccuacccggugcacau

SEQ ID NO: 882453 - RNA, 19 nt, Artificial Sequence
  Description of Artificial Sequence: Synthetic oligonucleotide
ggauuggggugggcugcuu

SEQ ID NO: 882454 - RNA, 19 nt, Artificial Sequence
  Description of Artificial Sequence: Synthetic oligonucleotide
gcccuacccggugcacaua

SEQ ID NO: 882455 - RNA, 19 nt, Artificial Sequence
  Description of Artificial Sequence: Synthetic oligonucleotide
ucaaauggaccuaagaagg

SEQ ID NO: 882456 - RNA, 19 nt, Artificial Sequence
  Description of Artificial Sequence: Synthetic oligonucleotide
acaagaaucauuaaaagag

SEQ ID NO: 882457 - RNA, 19 nt, Artificial Sequence
  Description of Artificial Sequence: Synthetic oligonucleotide
aaauuuaaggaugaggcug

SEQ ID NO: 882458 - RNA, 19 nt, Artificial Sequence
  Description of Artificial Sequence: Synthetic oligonucleotide
uuaaggaugaggcuguugc

SEQ ID NO: 882459 - RNA, 19 nt, Artificial Sequence
  Description of Artificial Sequence: Synthetic oligonucleotide
aucaaauggaccuaagaag

SEQ ID NO: 882460 - RNA, 19 nt, Artificial Sequence
  Description of Artificial Sequence: Synthetic oligonucleotide
aagaaggccaaaccauagc

SEQ ID NO: 882461 - RNA, 19 nt, Artificial Sequence
  Description of Artificial Sequence: Synthetic oligonucleotide
aaaauuuaaggaugaggcu

SEQ ID NO: 882462 - RNA, 19 nt, Artificial Sequence
  Description of Artificial Sequence: Synthetic oligonucleotide
uugaauguugauugguggg

SEQ ID NO: 882463 - RNA, 19 nt, Artificial Sequence
  Description of Artificial Sequence: Synthetic oligonucleotide
agaaaccaaaauuuaagga

SEQ ID NO: 882464 - RNA, 19 nt, Artificial Sequence
  Description of Artificial Sequence: Synthetic oligonucleotide
ucacaagaaucauuaaaag

SEQ ID NO: 882465 - RNA, 19 nt, Artificial Sequence
  Description of Artificial Sequence: Synthetic oligonucleotide
ucuggguacaaacaaccag

SEQ ID NO: 882466 - RNA, 19 nt, Artificial Sequence
  Description of Artificial Sequence: Synthetic oligonucleotide
uuuagccacagccaaggag

SEQ ID NO: 882467 - RNA, 19 nt, Artificial Sequence
  Description of Artificial Sequence: Synthetic oligonucleotide
agaaucauuaaaagagccc

SEQ ID NO: 882468 - RNA, 19 nt, Artificial Sequence
  Description of Artificial Sequence: Synthetic oligonucleotide
gauaaacuggcccaccuug

SEQ ID NO: 882469 - RNA, 19 nt, Artificial Sequence
  Description of Artificial Sequence: Synthetic oligonucleotide
aagggagcgggccaauccc

SEQ ID NO: 882470 - RNA, 19 nt, Artificial Sequence
  Description of Artificial Sequence: Synthetic oligonucleotide
agucgagggacaaaggucc

SEQ ID NO: 882471 - RNA, 19 nt, Artificial Sequence
  Description of Artificial Sequence: Synthetic oligonucleotide
ucaucuugcccggagaacg

SEQ ID NO: 882472 - RNA, 19 nt, Artificial Sequence
  Description of Artificial Sequence: Synthetic oligonucleotide
uaagaaggccaaaccauag

SEQ ID NO: 882473 - RNA, 19 nt, Artificial Sequence
  Description of Artificial Sequence: Synthetic oligonucleotide
ucuuuagccacagccaagg

SEQ ID NO: 882474 - RNA, 19 nt, Artificial Sequence
  Description of Artificial Sequence: Synthetic oligonucleotide
caucacauguagucgaggg

SEQ ID NO: 882475 - RNA, 19 nt, Artificial Sequence
  Description of Artificial Sequence: Synthetic oligonucleotide
caggaaaaucacaagaauc

SEQ ID NO: 882476 - RNA, 19 nt, Artificial Sequence
  Description of Artificial Sequence: Synthetic oligonucleotide
ugauguccuaggcagacug

SEQ ID NO: 882477 - RNA, 19 nt, Artificial Sequence
  Description of Artificial Sequence: Synthetic oligonucleotide
uuagacuugucgcugugca

SEQ ID NO: 882478 - RNA, 19 nt, Artificial Sequence
  Description of Artificial Sequence: Synthetic oligonucleotide
aaucuggguccacugcucg

SEQ ID NO: 882479 - RNA, 19 nt, Artificial Sequence
  Description of Artificial Sequence: Synthetic oligonucleotide
gacaaagguccacacuugg

SEQ ID NO: 882480 - RNA, 19 nt, Artificial Sequence
  Description of Artificial Sequence: Synthetic oligonucleotide
agaaggccaaaccauagcu

SEQ ID NO: 882481 - RNA, 19 nt, Artificial Sequence
  Description of Artificial Sequence: Synthetic oligonucleotide
cuugcuacugcgcuucugg

SEQ ID NO: 882482 - RNA, 19 nt, Artificial Sequence
  Description of Artificial Sequence: Synthetic oligonucleotide
ugagaguagaaaccaaaau

SEQ ID NO: 882483 - RNA, 19 nt, Artificial Sequence
  Description of Artificial Sequence: Synthetic oligonucleotide
uuaaaagagccccucuaaa

SEQ ID NO: 882484 - RNA, 19 nt, Artificial Sequence
  Description of Artificial Sequence: Synthetic oligonucleotide
cuaaauucugcagugcuac

SEQ ID NO: 882485 - RNA, 19 nt, Artificial Sequence
  Description of Artificial Sequence: Synthetic oligonucleotide
aaaccauagcugugaggac

SEQ ID NO: 882486 - RNA, 19 nt, Artificial Sequence
  Description of Artificial Sequence: Synthetic oligonucleotide
ucacugguaucgcuggagg

SEQ ID NO: 882487 - RNA, 19 nt, Artificial Sequence
  Description of Artificial Sequence: Synthetic oligonucleotide
caaaccauagcugugagga

SEQ ID NO: 882488 - RNA, 19 nt, Artificial Sequence
  Description of Artificial Sequence: Synthetic oligonucleotide
aauuuaaggaugaggcugu

SEQ ID NO: 882489 - RNA, 19 nt, Artificial Sequence
  Description of Artificial Sequence: Synthetic oligonucleotide
ugauuggugggugauuggg

SEQ ID NO: 882490 - RNA, 19 nt, Artificial Sequence
  Description of Artificial Sequence: Synthetic oligonucleotide
uugcccuccaugcagacac

SEQ ID NO: 882491 - RNA, 19 nt, Artificial Sequence
  Description of Artificial Sequence: Synthetic oligonucleotide
uaaaagagccccucuaaau

SEQ ID NO: 882492 - RNA, 19 nt, Artificial Sequence
  Description of Artificial Sequence: Synthetic oligonucleotide
auuaaaagagccccucuaa

SEQ ID NO: 882493 - RNA, 19 nt, Artificial Sequence
  Description of Artificial Sequence: Synthetic oligonucleotide
ugcagugcuacacuaacua

SEQ ID NO: 882494 - RNA, 19 nt, Artificial Sequence
  Description of Artificial Sequence: Synthetic oligonucleotide
aauguugauugguggguga

SEQ ID NO: 882495 - RNA, 19 nt, Artificial Sequence
  Description of Artificial Sequence: Synthetic oligonucleotide
uguagucgagggacaaagg

SEQ ID NO: 882496 - RNA, 19 nt, Artificial Sequence
  Description of Artificial Sequence: Synthetic oligonucleotide
agccguaaccguucggacc

SEQ ID NO: 882497 - RNA, 19 nt, Artificial Sequence
  Description of Artificial Sequence: Synthetic oligonucleotide
aacagucaagucccugguc

SEQ ID NO: 882498 - RNA, 19 nt, Artificial Sequence
  Description of Artificial Sequence: Synthetic oligonucleotide
ucacauguagucgagggac

SEQ ID NO: 882499 - RNA, 19 nt, Artificial Sequence
  Description of Artificial Sequence: Synthetic oligonucleotide
guagacuccugucucuugg

SEQ ID NO: 882500 - RNA, 19 nt, Artificial Sequence
  Description of Artificial Sequence: Synthetic oligonucleotide
uucuugagaugcucguccg

SEQ ID NO: 882501 - RNA, 19 nt, Artificial Sequence
  Description of Artificial Sequence: Synthetic oligonucleotide
aagccguaaccguucggac

SEQ ID NO: 882502 - RNA, 19 nt, Artificial Sequence
  Description of Artificial Sequence: Synthetic oligonucleotide
ucauuaaaagagccccucu

SEQ ID NO: 882503 - RNA, 19 nt, Artificial Sequence
  Description of Artificial Sequence: Synthetic oligonucleotide
ucucuuuagccacagccaa

SEQ ID NO: 882504 - RNA, 19 nt, Artificial Sequence
  Description of Artificial Sequence: Synthetic oligonucleotide
gaaccagugaauuucugaa

SEQ ID NO: 882505 - RNA, 19 nt, Artificial Sequence
  Description of Artificial Sequence: Synthetic oligonucleotide
uguugaaguccaagauggg

SEQ ID NO: 882506 - RNA, 19 nt, Artificial Sequence
  Description of Artificial Sequence: Synthetic oligonucleotide
uuguucggacuucugggag

SEQ ID NO: 882507 - RNA, 19 nt, Artificial Sequence
  Description of Artificial Sequence: Synthetic oligonucleotide
acugguaucgcuggaggcg

SEQ ID NO: 882508 - RNA, 19 nt, Artificial Sequence
  Description of Artificial Sequence: Synthetic oligonucleotide
cuuuucggccucauucugg

SEQ ID NO: 882509 - RNA, 19 nt, Artificial Sequence
  Description of Artificial Sequence: Synthetic oligonucleotide
ucgcugugcagguugaagc

SEQ ID NO: 882510 - RNA, 19 nt, Artificial Sequence
  Description of Artificial Sequence: Synthetic oligonucleotide
gacgggaucacuuugcacu

SEQ ID NO: 882511 - RNA, 19 nt, Artificial Sequence
  Description of Artificial Sequence: Synthetic oligonucleotide
gcuacugcgcuucuggugg

SEQ ID NO: 882512 - RNA, 19 nt, Artificial Sequence
  Description of Artificial Sequence: Synthetic oligonucleotide
gaugcugauuugaauguug

SEQ ID NO: 882513 - RNA, 19 nt, Artificial Sequence
  Description of Artificial Sequence: Synthetic oligonucleotide
aauggaccuaagaaggcca

SEQ ID NO: 882514 - RNA, 19 nt, Artificial Sequence
  Description of Artificial Sequence: Synthetic oligonucleotide
uugggaauuuagcuccuca

SEQ ID NO: 882515 - RNA, 19 nt, Artificial Sequence
  Description of Artificial Sequence: Synthetic oligonucleotide
auuugaauguugauuggug

SEQ ID NO: 882516 - RNA, 19 nt, Artificial Sequence
  Description of Artificial Sequence: Synthetic oligonucleotide
auguagucgagggacaaag

SEQ ID NO: 882517 - RNA, 19 nt, Artificial Sequence
  Description of Artificial Sequence: Synthetic oligonucleotide
uggguacaaacaaccagga

SEQ ID NO: 882518 - RNA, 19 nt, Artificial Sequence
  Description of Artificial Sequence: Synthetic oligonucleotide
uagucgagggacaaagguc

SEQ ID NO: 882519 - RNA, 19 nt, Artificial Sequence
  Description of Artificial Sequence: Synthetic oligonucleotide
ggcagaacagaauuccuag

SEQ ID NO: 882520 - RNA, 19 nt, Artificial Sequence
  Description of Artificial Sequence: Synthetic oligonucleotide
ucgaccaccagcaggcgca

SEQ ID NO: 882521 - RNA, 19 nt, Artificial Sequence
  Description of Artificial Sequence: Synthetic oligonucleotide
auggcagauaccacguccc

SEQ ID NO: 882522 - RNA, 19 nt, Artificial Sequence
  Description of Artificial Sequence: Synthetic oligonucleotide
uguagguggaagccguaac

SEQ ID NO: 882523 - RNA, 19 nt, Artificial Sequence
  Description of Artificial Sequence: Synthetic oligonucleotide
gaggccggagcucacgccg

SEQ ID NO: 882524 - RNA, 19 nt, Artificial Sequence
  Description of Artificial Sequence: Synthetic oligonucleotide
ugaugcgucuccuucucca

SEQ ID NO: 882525 - RNA, 19 nt, Artificial Sequence
  Description of Artificial Sequence: Synthetic oligonucleotide
gaagggagcgggccaaucc

SEQ ID NO: 882526 - RNA, 19 nt, Artificial Sequence
  Description of Artificial Sequence: Synthetic oligonucleotide
aaccguucggacccuucuc

SEQ ID NO: 882527 - RNA, 19 nt, Artificial Sequence
  Description of Artificial Sequence: Synthetic oligonucleotide
ugacccuuaugagcaaugg

SEQ ID NO: 882528 - RNA, 19 nt, Artificial Sequence
  Description of Artificial Sequence: Synthetic oligonucleotide
aacgcacaggaagggagcg

SEQ ID NO: 882529 - RNA, 19 nt, Artificial Sequence
  Description of Artificial Sequence: Synthetic oligonucleotide
gaauuccuaggaaacucag

SEQ ID NO: 882530 - RNA, 19 nt, Artificial Sequence
  Description of Artificial Sequence: Synthetic oligonucleotide
uccuaggcagacugguggg

SEQ ID NO: 882531 - RNA, 19 nt, Artificial Sequence
  Description of Artificial Sequence: Synthetic oligonucleotide
ugggaauuuagcuccucac

SEQ ID NO: 882532 - RNA, 19 nt, Artificial Sequence
  Description of Artificial Sequence: Synthetic oligonucleotide
gcagcgaacgcacaggaag

SEQ ID NO: 882533 - RNA, 19 nt, Artificial Sequence
  Description of Artificial Sequence: Synthetic oligonucleotide
uugauuggugggugauugg

SEQ ID NO: 882534 - RNA, 19 nt, Artificial Sequence
  Description of Artificial Sequence: Synthetic oligonucleotide
gcuuguucggacuucuggg

SEQ ID NO: 882535 - RNA, 19 nt, Artificial Sequence
  Description of Artificial Sequence: Synthetic oligonucleotide
aggaaacucagauguguca

SEQ ID NO: 882536 - RNA, 19 nt, Artificial Sequence
  Description of Artificial Sequence: Synthetic oligonucleotide
aucagucuccuugucuacc

SEQ ID NO: 882537 - RNA, 19 nt, Artificial Sequence
  Description of Artificial Sequence: Synthetic oligonucleotide
uguucggacuucugggagc

SEQ ID NO: 882538 - RNA, 19 nt, Artificial Sequence
  Description of Artificial Sequence: Synthetic oligonucleotide
agaacgcucagcacgguuc

SEQ ID NO: 882539 - RNA, 19 nt, Artificial Sequence
  Description of Artificial Sequence: Synthetic oligonucleotide
gacccuuaugagcaauggc

SEQ ID NO: 882540 - RNA, 19 nt, Artificial Sequence
  Description of Artificial Sequence: Synthetic oligonucleotide
aguacggggcaccgugagc

SEQ ID NO: 882541 - RNA, 19 nt, Artificial Sequence
  Description of Artificial Sequence: Synthetic oligonucleotide
gaauguugauuggugggug

SEQ ID NO: 882542 - RNA, 19 nt, Artificial Sequence
  Description of Artificial Sequence: Synthetic oligonucleotide
gaucgggacgcccagcuuc

SEQ ID NO: 882543 - RNA, 19 nt, Artificial Sequence
  Description of Artificial Sequence: Synthetic oligonucleotide
uggaagccguaaccguucg

SEQ ID NO: 882544 - RNA, 19 nt, Artificial Sequence
  Description of Artificial Sequence: Synthetic oligonucleotide
ucaucacauguagucgagg

SEQ ID NO: 882545 - RNA, 19 nt, Artificial Sequence
  Description of Artificial Sequence: Synthetic oligonucleotide
ugcucuggguacaaacaac

SEQ ID NO: 882546 - RNA, 19 nt, Artificial Sequence
  Description of Artificial Sequence: Synthetic oligonucleotide
cagcgaacgcacaggaagg

SEQ ID NO: 882547 - RNA, 19 nt, Artificial Sequence
  Description of Artificial Sequence: Synthetic oligonucleotide
agcuagguugggugggugg

SEQ ID NO: 882548 - RNA, 19 nt, Artificial Sequence
  Description of Artificial Sequence: Synthetic oligonucleotide
guucggacccuucuccagg

SEQ ID NO: 882549 - RNA, 19 nt, Artificial Sequence
  Description of Artificial Sequence: Synthetic oligonucleotide
uccacguucucgccguuca

SEQ ID NO: 882550 - RNA, 19 nt, Artificial Sequence
  Description of Artificial Sequence: Synthetic oligonucleotide
gaaggccaaaccauagcug

SEQ ID NO: 882551 - RNA, 19 nt, Artificial Sequence
  Description of Artificial Sequence: Synthetic oligonucleotide
ugcucggaugaacuggccu

SEQ ID NO: 882552 - RNA, 19 nt, Artificial Sequence
  Description of Artificial Sequence: Synthetic oligonucleotide
gggagcugagcacaguacg

SEQ ID NO: 882553 - RNA, 19 nt, Artificial Sequence
  Description of Artificial Sequence: Synthetic oligonucleotide
gagaugcucguccgucucg

SEQ ID NO: 882554 - RNA, 19 nt, Artificial Sequence
  Description of Artificial Sequence: Synthetic oligonucleotide
uguuccugugacgggauca

SEQ ID NO: 882555 - RNA, 19 nt, Artificial Sequence
  Description of Artificial Sequence: Synthetic oligonucleotide
aucacauguagucgaggga

SEQ ID NO: 882556 - RNA, 19 nt, Artificial Sequence
  Description of Artificial Sequence: Synthetic oligonucleotide
uuuaaggaugaggcuguug

SEQ ID NO: 882557 - RNA, 19 nt, Artificial Sequence
  Description of Artificial Sequence: Synthetic oligonucleotide
uaaccguucggacccuucu

SEQ ID NO: 882558 - RNA, 19 nt, Artificial Sequence
  Description of Artificial Sequence: Synthetic oligonucleotide
gaagccguaaccguucgga

SEQ ID NO: 882559 - RNA, 19 nt, Artificial Sequence
  Description of Artificial Sequence: Synthetic oligonucleotide
gacuccugucucuugggac

SEQ ID NO: 882560 - RNA, 19 nt, Artificial Sequence
  Description of Artificial Sequence: Synthetic oligonucleotide
uagacuugucgcugugcag

SEQ ID NO: 882561 - RNA, 19 nt, Artificial Sequence
  Description of Artificial Sequence: Synthetic oligonucleotide
ucguucagggugagaguag

SEQ ID NO: 882562 - RNA, 19 nt, Artificial Sequence
  Description of Artificial Sequence: Synthetic oligonucleotide
agccggauaaacuggccca

SEQ ID NO: 882563 - RNA, 19 nt, Artificial Sequence
  Description of Artificial Sequence: Synthetic oligonucleotide
cacaguacggggcaccgug

SEQ ID NO: 882564 - RNA, 19 nt, Artificial Sequence
  Description of Artificial Sequence: Synthetic oligonucleotide
ugacuggucaucacaugua

SEQ ID NO: 882565 - RNA, 19 nt, Artificial Sequence
  Description of Artificial Sequence: Synthetic oligonucleotide
guucggacuucugggagcg

SEQ ID NO: 882566 - RNA, 19 nt, Artificial Sequence
  Description of Artificial Sequence: Synthetic oligonucleotide
aacucagaugugucaggaa

SEQ ID NO: 882567 - RNA, 19 nt, Artificial Sequence
  Description of Artificial Sequence: Synthetic oligonucleotide
ccggagaacgcucagcacg

SEQ ID NO: 882568 - RNA, 19 nt, Artificial Sequence
  Description of Artificial Sequence: Synthetic oligonucleotide
agugcuacacuaacuaaaa

SEQ ID NO: 882569 - RNA, 19 nt, Artificial Sequence
  Description of Artificial Sequence: Synthetic oligonucleotide
augcucuggguacaaacaa

SEQ ID NO: 882570 - RNA, 19 nt, Artificial Sequence
  Description of Artificial Sequence: Synthetic oligonucleotide
uccugugacgggaucacuu

SEQ ID NO: 882571 - RNA, 19 nt, Artificial Sequence
  Description of Artificial Sequence: Synthetic oligonucleotide
ugagaugcucguccgucuc

SEQ ID NO: 882572 - RNA, 19 nt, Artificial Sequence
  Description of Artificial Sequence: Synthetic oligonucleotide
gaugaacuggccuggcuua

SEQ ID NO: 882573 - RNA, 19 nt, Artificial Sequence
  Description of Artificial Sequence: Synthetic oligonucleotide
cuaagaaggccaaaccaua

SEQ ID NO: 882574 - RNA, 19 nt, Artificial Sequence
  Description of Artificial Sequence: Synthetic oligonucleotide
cacugguaucgcuggaggc

SEQ ID NO: 882575 - RNA, 19 nt, Artificial Sequence
  Description of Artificial Sequence: Synthetic oligonucleotide
acgcccagcuucuugagau

SEQ ID NO: 882576 - RNA, 19 nt, Artificial Sequence
  Description of Artificial Sequence: Synthetic oligonucleotide
uucggacccuucuccaggc

SEQ ID NO: 882577 - RNA, 19 nt, Artificial Sequence
  Description of Artificial Sequence: Synthetic oligonucleotide
acguucucgccguucaccu

SEQ ID NO: 882578 - RNA, 19 nt, Artificial Sequence
  Description of Artificial Sequence: Synthetic oligonucleotide
cugguaucgcuggaggcgg

SEQ ID NO: 882579 - RNA, 19 nt, Artificial Sequence
  Description of Artificial Sequence: Synthetic oligonucleotide
cuuagacuugucgcugugc

SEQ ID NO: 882580 - RNA, 19 nt, Artificial Sequence
  Description of Artificial Sequence: Synthetic oligonucleotide
ugcugaugcgucuccuucu

SEQ ID NO: 882581 - RNA, 19 nt, Artificial Sequence
  Description of Artificial Sequence: Synthetic oligonucleotide
gaacgcacaggaagggagc

SEQ ID NO: 882582 - RNA, 19 nt, Artificial Sequence
  Description of Artificial Sequence: Synthetic oligonucleotide
cuugagaugcucguccguc

SEQ ID NO: 882583 - RNA, 19 nt, Artificial Sequence
  Description of Artificial Sequence: Synthetic oligonucleotide
aaugcggucuugggcucgg

SEQ ID NO: 882584 - RNA, 19 nt, Artificial Sequence
  Description of Artificial Sequence: Synthetic oligonucleotide
guagucgagggacaaaggu

SEQ ID NO: 882585 - RNA, 19 nt, Artificial Sequence
  Description of Artificial Sequence: Synthetic oligonucleotide
cuuguucggacuucuggga

SEQ ID NO: 882586 - RNA, 19 nt, Artificial Sequence
  Description of Artificial Sequence: Synthetic oligonucleotide
acggccuuucuccccgcgc

SEQ ID NO: 882587 - RNA, 19 nt, Artificial Sequence
  Description of Artificial Sequence: Synthetic oligonucleotide
gccguaaccguucggaccc

SEQ ID NO: 882588 - RNA, 19 nt, Artificial Sequence
  Description of Artificial Sequence: Synthetic oligonucleotide
cucaaguugggagcugagc

SEQ ID NO: 882589 - RNA, 19 nt, Artificial Sequence
  Description of Artificial Sequence: Synthetic oligonucleotide
ggacgcacggccuuucucc

SEQ ID NO: 882590 - RNA, 19 nt, Artificial Sequence
  Description of Artificial Sequence: Synthetic oligonucleotide
agaugcucguccgucucgg

SEQ ID NO: 882591 - RNA, 19 nt, Artificial Sequence
  Description of Artificial Sequence: Synthetic oligonucleotide
gagggacaaagguccacac

SEQ ID NO: 882592 - RNA, 19 nt, Artificial Sequence
  Description of Artificial Sequence: Synthetic oligonucleotide
uggcagauaccacgucccc

SEQ ID NO: 882593 - RNA, 19 nt, Artificial Sequence
  Description of Artificial Sequence: Synthetic oligonucleotide
cauuaaaagagccccucua

SEQ ID NO: 882594 - RNA, 19 nt, Artificial Sequence
  Description of Artificial Sequence: Synthetic oligonucleotide
ugcggucuugggcucggag

SEQ ID NO: 882595 - RNA, 19 nt, Artificial Sequence
  Description of Artificial Sequence: Synthetic oligonucleotide
agggcuucacggcugcucu

SEQ ID NO: 882596 - RNA, 19 nt, Artificial Sequence
  Description of Artificial Sequence: Synthetic oligonucleotide
cugacccuuaugagcaaug

SEQ ID NO: 882597 - RNA, 19 nt, Artificial Sequence
  Description of Artificial Sequence: Synthetic oligonucleotide
ugggcccucucuuuagcca

SEQ ID NO: 882598 - RNA, 19 nt, Artificial Sequence
  Description of Artificial Sequence: Synthetic oligonucleotide
ggucaucacauguagucga

SEQ ID NO: 882599 - RNA, 19 nt, Artificial Sequence
  Description of Artificial Sequence: Synthetic oligonucleotide
agcgaacgcacaggaaggg

SEQ ID NO: 882600 - RNA, 19 nt, Artificial Sequence
  Description of Artificial Sequence: Synthetic oligonucleotide
gucccggugauguccuagg

SEQ ID NO: 882601 - RNA, 19 nt, Artificial Sequence
  Description of Artificial Sequence: Synthetic oligonucleotide
ucggacuucugggagcgca

SEQ ID NO: 882602 - RNA, 19 nt, Artificial Sequence
  Description of Artificial Sequence: Synthetic oligonucleotide
gcucuggguacaaacaacc

SEQ ID NO: 882603 - RNA, 19 nt, Artificial Sequence
  Description of Artificial Sequence: Synthetic oligonucleotide
gacgcacggccuuucuccc

SEQ ID NO: 882604 - RNA, 19 nt, Artificial Sequence
  Description of Artificial Sequence: Synthetic oligonucleotide
guacggggcaccgugagca

SEQ ID NO: 882605 - RNA, 19 nt, Artificial Sequence
  Description of Artificial Sequence: Synthetic oligonucleotide
acuucucggcgggcgagcc

SEQ ID NO: 882606 - RNA, 19 nt, Artificial Sequence
  Description of Artificial Sequence: Synthetic oligonucleotide
agcacaguacggggcaccg

SEQ ID NO: 882607 - RNA, 19 nt, Artificial Sequence
  Description of Artificial Sequence: Synthetic oligonucleotide
uuuccccgugccacccagg

SEQ ID NO: 882608 - RNA, 19 nt, Artificial Sequence
  Description of Artificial Sequence: Synthetic oligonucleotide
uuccccgugccacccaggu

SEQ ID NO: 882609 - RNA, 19 nt, Artificial Sequence
  Description of Artificial Sequence: Synthetic oligonucleotide
gauggggucggaggaggag

SEQ ID NO: 882610 - RNA, 19 nt, Artificial Sequence
  Description of Artificial Sequence: Synthetic oligonucleotide
ucuugcccggagaacgcuc

SEQ ID NO: 882611 - RNA, 19 nt, Artificial Sequence
  Description of Artificial Sequence: Synthetic oligonucleotide
cauagcugugaggaccuug

SEQ ID NO: 882612 - RNA, 19 nt, Artificial Sequence
  Description of Artificial Sequence: Synthetic oligonucleotide
ggaggcggaucucaccagg

SEQ ID NO: 882613 - RNA, 19 nt, Artificial Sequence
  Description of Artificial Sequence: Synthetic oligonucleotide
caguacaggcagaggcugc

SEQ ID NO: 882614 - RNA, 19 nt, Artificial Sequence
  Description of Artificial Sequence: Synthetic oligonucleotide
ucccggugauguccuaggc

SEQ ID NO: 882615 - RNA, 19 nt, Artificial Sequence
  Description of Artificial Sequence: Synthetic oligonucleotide
uggugggcccucucuuuag

SEQ ID NO: 882616 - RNA, 19 nt, Artificial Sequence
  Description of Artificial Sequence: Synthetic oligonucleotide
guccccaugcugcuugccc

SEQ ID NO: 882617 - RNA, 19 nt, Artificial Sequence
  Description of Artificial Sequence: Synthetic oligonucleotide
agcccgacuucucggcggg

SEQ ID NO: 882618 - RNA, 19 nt, Artificial Sequence
  Description of Artificial Sequence: Synthetic oligonucleotide
auguccuaggcagacuggu

SEQ ID NO: 882619 - RNA, 19 nt, Artificial Sequence
  Description of Artificial Sequence: Synthetic oligonucleotide
gggcucggaguccagaggc

SEQ ID NO: 882620 - RNA, 19 nt, Artificial Sequence
  Description of Artificial Sequence: Synthetic oligonucleotide
uugucgcugugcagguuga

SEQ ID NO: 882621 - RNA, 19 nt, Artificial Sequence
  Description of Artificial Sequence: Synthetic oligonucleotide
guuuccccgugccacccag

SEQ ID NO: 882622 - RNA, 19 nt, Artificial Sequence
  Description of Artificial Sequence: Synthetic oligonucleotide
acgcacggccuuucucccc

SEQ ID NO: 882623 - RNA, 19 nt, Artificial Sequence
  Description of Artificial Sequence: Synthetic oligonucleotide
agggagcgggccaaucccc

SEQ ID NO: 882624 - RNA, 19 nt, Artificial Sequence
  Description of Artificial Sequence: Synthetic oligonucleotide
gcggaugcggcucaccacc

SEQ ID NO: 882625 - RNA, 19 nt, Artificial Sequence
  Description of Artificial Sequence: Synthetic oligonucleotide
gucgcugugcagguugaag

SEQ ID NO: 882626 - RNA, 19 nt, Artificial Sequence
  Description of Artificial Sequence: Synthetic oligonucleotide
cagcccgacuucucggcgg

SEQ ID NO: 882627 - RNA, 19 nt, Artificial Sequence
  Description of Artificial Sequence: Synthetic oligonucleotide
ggaccuaagaaggccaaac

SEQ ID NO: 882628 - RNA, 19 nt, Artificial Sequence
  Description of Artificial Sequence: Synthetic oligonucleotide
gccuugauggcagauacca

SEQ ID NO: 882629 - RNA, 19 nt, Artificial Sequence
  Description of Artificial Sequence: Synthetic oligonucleotide
gccuggcuuagacuugucg

SEQ ID NO: 882630 - RNA, 19 nt, Artificial Sequence
  Description of Artificial Sequence: Synthetic oligonucleotide
gagcgggccaauccccgcc

SEQ ID NO: 882631 - RNA, 19 nt, Artificial Sequence
  Description of Artificial Sequence: Synthetic oligonucleotide
ggggccuuucuucauggug

SEQ ID NO: 882632 - RNA, 19 nt, Artificial Sequence
  Description of Artificial Sequence: Synthetic oligonucleotide
accauagcugugaggaccu

SEQ ID NO: 882633 - RNA, 19 nt, Artificial Sequence
  Description of Artificial Sequence: Synthetic oligonucleotide
gucgaccaccagcaggcgc

SEQ ID NO: 882634 - RNA, 19 nt, Artificial Sequence
  Description of Artificial Sequence: Synthetic oligonucleotide
ccaaaccauagcugugagg

SEQ ID NO: 882635 - RNA, 19 nt, Artificial Sequence
  Description of Artificial Sequence: Synthetic oligonucleotide
caguacggggcaccgugag

SEQ ID NO: 882636 - RNA, 19 nt, Artificial Sequence
  Description of Artificial Sequence: Synthetic oligonucleotide
ugcagcgaacgcacaggaa

SEQ ID NO: 882637 - RNA, 19 nt, Artificial Sequence
  Description of Artificial Sequence: Synthetic oligonucleotide
ggaugggacagaaaccuuc

SEQ ID NO: 882638 - RNA, 19 nt, Artificial Sequence
  Description of Artificial Sequence: Synthetic oligonucleotide
gcuagguuggguggguggg

SEQ ID NO: 882639 - RNA, 19 nt, Artificial Sequence
  Description of Artificial Sequence: Synthetic oligonucleotide
cugaugcgucuccuucucc

SEQ ID NO: 882640 - RNA, 19 nt, Artificial Sequence
  Description of Artificial Sequence: Synthetic oligonucleotide
gggaaucuggguccacugc

SEQ ID NO: 882641 - RNA, 19 nt, Artificial Sequence
  Description of Artificial Sequence: Synthetic oligonucleotide
aguccaucugcggggcccg

SEQ ID NO: 882642 - RNA, 19 nt, Artificial Sequence
  Description of Artificial Sequence: Synthetic oligonucleotide
uggguccacugcucggaug

SEQ ID NO: 882643 - RNA, 19 nt, Artificial Sequence
  Description of Artificial Sequence: Synthetic oligonucleotide
ucggcuuguucggacuucu

SEQ ID NO: 882644 - RNA, 19 nt, Artificial Sequence
  Description of Artificial Sequence: Synthetic oligonucleotide
uccuuacagugguggcacc

SEQ ID NO: 882645 - RNA, 19 nt, Artificial Sequence
  Description of Artificial Sequence: Synthetic oligonucleotide
guggccgguguucagaggu

SEQ ID NO: 882646 - RNA, 19 nt, Artificial Sequence
  Description of Artificial Sequence: Synthetic oligonucleotide
ggugagaguagaaaccaaa

SEQ ID NO: 882647 - RNA, 19 nt, Artificial Sequence
  Description of Artificial Sequence: Synthetic oligonucleotide
gucguucagggugagagua

SEQ ID NO: 882648 - RNA, 19 nt, Artificial Sequence
  Description of Artificial Sequence: Synthetic oligonucleotide
cuugcccggagaacgcuca

SEQ ID NO: 882649 - RNA, 19 nt, Artificial Sequence
  Description of Artificial Sequence: Synthetic oligonucleotide
acgggaucacuuugcacuu

SEQ ID NO: 882650 - RNA, 19 nt, Artificial Sequence
  Description of Artificial Sequence: Synthetic oligonucleotide
cuggcuuagacuugucgcu

SEQ ID NO: 882651 - RNA, 19 nt, Artificial Sequence
  Description of Artificial Sequence: Synthetic oligonucleotide
cucaucuugcccggagaac

SEQ ID NO: 882652 - RNA, 19 nt, Artificial Sequence
  Description of Artificial Sequence: Synthetic oligonucleotide
caccagucgguccccggcc

SEQ ID NO: 882653 - RNA, 19 nt, Artificial Sequence
  Description of Artificial Sequence: Synthetic oligonucleotide
acgguucccgucggaggcc

SEQ ID NO: 882654 - RNA, 19 nt, Artificial Sequence
  Description of Artificial Sequence: Synthetic oligonucleotide
uguugauuggugggugauu

SEQ ID NO: 882655 - RNA, 19 nt, Artificial Sequence
  Description of Artificial Sequence: Synthetic oligonucleotide
ggggaaucuggguccacug

SEQ ID NO: 882656 - RNA, 19 nt, Artificial Sequence
  Description of Artificial Sequence: Synthetic oligonucleotide
ggcugcagcgaacgcacag

SEQ ID NO: 882657 - RNA, 19 nt, Artificial Sequence
  Description of Artificial Sequence: Synthetic oligonucleotide
auguugauuggugggugau

SEQ ID NO: 882658 - RNA, 19 nt, Artificial Sequence
  Description of Artificial Sequence: Synthetic oligonucleotide
guccccggccagcagcccg

SEQ ID NO: 882659 - RNA, 19 nt, Artificial Sequence
  Description of Artificial Sequence: Synthetic oligonucleotide
uacggggcaccgugagcag

SEQ ID NO: 882660 - RNA, 19 nt, Artificial Sequence
  Description of Artificial Sequence: Synthetic oligonucleotide
guuccugugacgggaucac

SEQ ID NO: 882661 - RNA, 19 nt, Artificial Sequence
  Description of Artificial Sequence: Synthetic oligonucleotide
gaacggcugcagcgaacgc

SEQ ID NO: 882662 - RNA, 19 nt, Artificial Sequence
  Description of Artificial Sequence: Synthetic oligonucleotide
gcugcagcgaacgcacagg

SEQ ID NO: 882663 - RNA, 19 nt, Artificial Sequence
  Description of Artificial Sequence: Synthetic oligonucleotide
acacuuggugcaggucccg

SEQ ID NO: 882664 - RNA, 19 nt, Artificial Sequence
  Description of Artificial Sequence: Synthetic oligonucleotide
gccgcggagcucaaguugg

SEQ ID NO: 882665 - RNA, 19 nt, Artificial Sequence
  Description of Artificial Sequence: Synthetic oligonucleotide
caaugcggucuugggcucg

SEQ ID NO: 882666 - RNA, 19 nt, Artificial Sequence
  Description of Artificial Sequence: Synthetic oligonucleotide
aggaacggcugcagcgaac

SEQ ID NO: 882667 - RNA, 19 nt, Artificial Sequence
  Description of Artificial Sequence: Synthetic oligonucleotide
gacgcccagcuucuugaga

SEQ ID NO: 882668 - RNA, 19 nt, Artificial Sequence
  Description of Artificial Sequence: Synthetic oligonucleotide
acgccguuccagguggcuc

SEQ ID NO: 882669 - RNA, 19 nt, Artificial Sequence
  Description of Artificial Sequence: Synthetic oligonucleotide
guggaagccguaaccguuc

SEQ ID NO: 882670 - RNA, 19 nt, Artificial Sequence
  Description of Artificial Sequence: Synthetic oligonucleotide
cacuuggugcaggucccgg

SEQ ID NO: 882671 - RNA, 19 nt, Artificial Sequence
  Description of Artificial Sequence: Synthetic oligonucleotide
cuucucggcgggcgagccg

SEQ ID NO: 882672 - RNA, 19 nt, Artificial Sequence
  Description of Artificial Sequence: Synthetic oligonucleotide
cugcucggaugaacuggcc

SEQ ID NO: 882673 - RNA, 19 nt, Artificial Sequence
  Description of Artificial Sequence: Synthetic oligonucleotide
ggaagccguaaccguucgg

SEQ ID NO: 882674 - RNA, 19 nt, Artificial Sequence
  Description of Artificial Sequence: Synthetic oligonucleotide
ucuggucgucagcggcggc

SEQ ID NO: 882675 - RNA, 19 nt, Artificial Sequence
  Description of Artificial Sequence: Synthetic oligonucleotide
ggacaaagguccacacuug

SEQ ID NO: 882676 - RNA, 19 nt, Artificial Sequence
  Description of Artificial Sequence: Synthetic oligonucleotide
cugcagcgaacgcacagga

SEQ ID NO: 882677 - RNA, 19 nt, Artificial Sequence
  Description of Artificial Sequence: Synthetic oligonucleotide
cagaugugucaggaaggug

SEQ ID NO: 882678 - RNA, 19 nt, Artificial Sequence
  Description of Artificial Sequence: Synthetic oligonucleotide
ggcggcucggcuuguucgg

SEQ ID NO: 882679 - RNA, 19 nt, Artificial Sequence
  Description of Artificial Sequence: Synthetic oligonucleotide
uucccgucggaggccgggg

SEQ ID NO: 882680 - RNA, 19 nt, Artificial Sequence
  Description of Artificial Sequence: Synthetic oligonucleotide
ucacggcugcucuccuucu

SEQ ID NO: 882681 - RNA, 19 nt, Artificial Sequence
  Description of Artificial Sequence: Synthetic oligonucleotide
acgcacaggaagggagcgg

SEQ ID NO: 882682 - RNA, 19 nt, Artificial Sequence
  Description of Artificial Sequence: Synthetic oligonucleotide
aucgcuggaggcggaucuc

SEQ ID NO: 882683 - RNA, 19 nt, Artificial Sequence
  Description of Artificial Sequence: Synthetic oligonucleotide
guccgcgcucaucuugccc

SEQ ID NO: 882684 - RNA, 19 nt, Artificial Sequence
  Description of Artificial Sequence: Synthetic oligonucleotide
caggugucccaggaacggc

SEQ ID NO: 882685 - RNA, 19 nt, Artificial Sequence
  Description of Artificial Sequence: Synthetic oligonucleotide
ucggaugaacuggccuggc

SEQ ID NO: 882686 - RNA, 19 nt, Artificial Sequence
  Description of Artificial Sequence: Synthetic oligonucleotide
uggaccuaagaaggccaaa

SEQ ID NO: 882687 - RNA, 19 nt, Artificial Sequence
  Description of Artificial Sequence: Synthetic oligonucleotide
cucggaguccagaggccuc

SEQ ID NO: 882688 - RNA, 19 nt, Artificial Sequence
  Description of Artificial Sequence: Synthetic oligonucleotide
agcgcuggccagggguggc

SEQ ID NO: 882689 - RNA, 19 nt, Artificial Sequence
  Description of Artificial Sequence: Synthetic oligonucleotide
guucccgucggaggccggg

SEQ ID NO: 882690 - RNA, 19 nt, Artificial Sequence
  Description of Artificial Sequence: Synthetic oligonucleotide
gacuucucggcgggcgagc

SEQ ID NO: 882691 - RNA, 19 nt, Artificial Sequence
  Description of Artificial Sequence: Synthetic oligonucleotide
cuuuagccacagccaagga

SEQ ID NO: 882692 - RNA, 19 nt, Artificial Sequence
  Description of Artificial Sequence: Synthetic oligonucleotide
gagcuagguugggugggug

SEQ ID NO: 882693 - RNA, 19 nt, Artificial Sequence
  Description of Artificial Sequence: Synthetic oligonucleotide
ucccgucggaggccgggga

SEQ ID NO: 882694 - RNA, 19 nt, Artificial Sequence
  Description of Artificial Sequence: Synthetic oligonucleotide
gcagcccgacuucucggcg

SEQ ID NO: 882695 - RNA, 19 nt, Artificial Sequence
  Description of Artificial Sequence: Synthetic oligonucleotide
cuccugucucuugggacug

SEQ ID NO: 882696 - RNA, 19 nt, Artificial Sequence
  Description of Artificial Sequence: Synthetic oligonucleotide
cagauaccacguccccaug

SEQ ID NO: 882697 - RNA, 19 nt, Artificial Sequence
  Description of Artificial Sequence: Synthetic oligonucleotide
uuccugugacgggaucacu

SEQ ID NO: 882698 - RNA, 19 nt, Artificial Sequence
  Description of Artificial Sequence: Synthetic oligonucleotide
gguccucccggaucgggac

SEQ ID NO: 882699 - RNA, 19 nt, Artificial Sequence
  Description of Artificial Sequence: Synthetic oligonucleotide
gcccggagaacgcucagca

SEQ ID NO: 882700 - RNA, 19 nt, Artificial Sequence
  Description of Artificial Sequence: Synthetic oligonucleotide
ucucggcgggcgagccggg

SEQ ID NO: 882701 - RNA, 19 nt, Artificial Sequence
  Description of Artificial Sequence: Synthetic oligonucleotide
cacggccuuucuccccgcg

SEQ ID NO: 882702 - RNA, 19 nt, Artificial Sequence
  Description of Artificial Sequence: Synthetic oligonucleotide
ccguucaccuccaccaguc

SEQ ID NO: 882703 - RNA, 19 nt, Artificial Sequence
  Description of Artificial Sequence: Synthetic oligonucleotide
auggaccuaagaaggccaa

SEQ ID NO: 882704 - RNA, 19 nt, Artificial Sequence
  Description of Artificial Sequence: Synthetic oligonucleotide
gguggccgguguucagagg

SEQ ID NO: 882705 - RNA, 19 nt, Artificial Sequence
  Description of Artificial Sequence: Synthetic oligonucleotide
guaaccguucggacccuuc

SEQ ID NO: 882706 - RNA, 19 nt, Artificial Sequence
  Description of Artificial Sequence: Synthetic oligonucleotide
gccgggcuccaccagccgg

SEQ ID NO: 882707 - RNA, 19 nt, Artificial Sequence
  Description of Artificial Sequence: Synthetic oligonucleotide
ggucagcccugacugguca

SEQ ID NO: 882708 - RNA, 19 nt, Artificial Sequence
  Description of Artificial Sequence: Synthetic oligonucleotide
cagggcuucacggcugcuc

SEQ ID NO: 882709 - RNA, 19 nt, Artificial Sequence
  Description of Artificial Sequence: Synthetic oligonucleotide
auuuaaggaugaggcuguu

SEQ ID NO: 882710 - RNA, 19 nt, Artificial Sequence
  Description of Artificial Sequence: Synthetic oligonucleotide
caucugcggggcccgcuug

SEQ ID NO: 882711 - RNA, 19 nt, Artificial Sequence
  Description of Artificial Sequence: Synthetic oligonucleotide
aucgggacgcccagcuucu

SEQ ID NO: 882712 - RNA, 19 nt, Artificial Sequence
  Description of Artificial Sequence: Synthetic oligonucleotide
ugagcgccccgcggaugcg

SEQ ID NO: 882713 - RNA, 19 nt, Artificial Sequence
  Description of Artificial Sequence: Synthetic oligonucleotide
uggcugcaacagucaaguc

SEQ ID NO: 882714 - RNA, 19 nt, Artificial Sequence
  Description of Artificial Sequence: Synthetic oligonucleotide
acaguacggggcaccguga

SEQ ID NO: 882715 - RNA, 19 nt, Artificial Sequence
  Description of Artificial Sequence: Synthetic oligonucleotide
cuucccuaaggugggcaga

SEQ ID NO: 882716 - RNA, 19 nt, Artificial Sequence
  Description of Artificial Sequence: Synthetic oligonucleotide
guguagguggaagccguaa

SEQ ID NO: 882717 - RNA, 19 nt, Artificial Sequence
  Description of Artificial Sequence: Synthetic oligonucleotide
guugagcgccccgcggaug

SEQ ID NO: 882718 - RNA, 19 nt, Artificial Sequence
  Description of Artificial Sequence: Synthetic oligonucleotide
ggucccggugauguccuag

SEQ ID NO: 882719 - RNA, 19 nt, Artificial Sequence
  Description of Artificial Sequence: Synthetic oligonucleotide
uggccgguguucagagguu

SEQ ID NO: 882720 - RNA, 19 nt, Artificial Sequence
  Description of Artificial Sequence: Synthetic oligonucleotide
uccccgugccacccagguc

SEQ ID NO: 882721 - RNA, 19 nt, Artificial Sequence
  Description of Artificial Sequence: Synthetic oligonucleotide
ucugcggggcccgcuugcu

SEQ ID NO: 882722 - RNA, 19 nt, Artificial Sequence
  Description of Artificial Sequence: Synthetic oligonucleotide
gagaacgcucagcacgguu

SEQ ID NO: 882723 - RNA, 19 nt, Artificial Sequence
  Description of Artificial Sequence: Synthetic oligonucleotide
agucgguccccggccagca

SEQ ID NO: 882724 - RNA, 19 nt, Artificial Sequence
  Description of Artificial Sequence: Synthetic oligonucleotide
guaucgcuggaggcggauc

SEQ ID NO: 882725 - RNA, 19 nt, Artificial Sequence
  Description of Artificial Sequence: Synthetic oligonucleotide
uccaucugcggggcccgcu

SEQ ID NO: 882726 - RNA, 19 nt, Artificial Sequence
  Description of Artificial Sequence: Synthetic oligonucleotide
cugccaggguuuccccgug

SEQ ID NO: 882727 - RNA, 19 nt, Artificial Sequence
  Description of Artificial Sequence: Synthetic oligonucleotide
gguggcucuuuucggccuc

SEQ ID NO: 882728 - RNA, 19 nt, Artificial Sequence
  Description of Artificial Sequence: Synthetic oligonucleotide
ugucgcugugcagguugaa

SEQ ID NO: 882729 - RNA, 19 nt, Artificial Sequence
  Description of Artificial Sequence: Synthetic oligonucleotide
agcaggcgcacggcguuga

SEQ ID NO: 882730 - RNA, 19 nt, Artificial Sequence
  Description of Artificial Sequence: Synthetic oligonucleotide
ggccgguguucagagguug

SEQ ID NO: 882731 - RNA, 19 nt, Artificial Sequence
  Description of Artificial Sequence: Synthetic oligonucleotide
gggcagaacagaauuccua

SEQ ID NO: 882732 - RNA, 19 nt, Artificial Sequence
  Description of Artificial Sequence: Synthetic oligonucleotide
gcucaaguugggagcugag

SEQ ID NO: 882733 - RNA, 19 nt, Artificial Sequence
  Description of Artificial Sequence: Synthetic oligonucleotide
cagucgguccccggccagc

SEQ ID NO: 882734 - RNA, 19 nt, Artificial Sequence
  Description of Artificial Sequence: Synthetic oligonucleotide
uccugucucuugggacugu

SEQ ID NO: 882735 - RNA, 19 nt, Artificial Sequence
  Description of Artificial Sequence: Synthetic oligonucleotide
ugccucuaccagggcuuca

SEQ ID NO: 882736 - RNA, 19 nt, Artificial Sequence
  Description of Artificial Sequence: Synthetic oligonucleotide
gucgagggacaaaggucca

SEQ ID NO: 882737 - RNA, 19 nt, Artificial Sequence
  Description of Artificial Sequence: Synthetic oligonucleotide
cguucggacccuucuccag

SEQ ID NO: 882738 - RNA, 19 nt, Artificial Sequence
  Description of Artificial Sequence: Synthetic oligonucleotide
gggccaauccccgcccugc

SEQ ID NO: 882739 - RNA, 19 nt, Artificial Sequence
  Description of Artificial Sequence: Synthetic oligonucleotide
ggagcucaaguugggagcu

SEQ ID NO: 882740 - RNA, 19 nt, Artificial Sequence
  Description of Artificial Sequence: Synthetic oligonucleotide
cccgacuucucggcgggcg

SEQ ID NO: 882741 - RNA, 19 nt, Artificial Sequence
  Description of Artificial Sequence: Synthetic oligonucleotide
gccucuaccagggcuucac

SEQ ID NO: 882742 - RNA, 19 nt, Artificial Sequence
  Description of Artificial Sequence: Synthetic oligonucleotide
gcgcacggcguugagcgcc

SEQ ID NO: 882743 - RNA, 19 nt, Artificial Sequence
  Description of Artificial Sequence: Synthetic oligonucleotide
gcguugagcgccccgcgga

SEQ ID NO: 882744 - RNA, 19 nt, Artificial Sequence
  Description of Artificial Sequence: Synthetic oligonucleotide
gccggauaaacuggcccac

SEQ ID NO: 882745 - RNA, 19 nt, Artificial Sequence
  Description of Artificial Sequence: Synthetic oligonucleotide
gggacgcacggccuuucuc

SEQ ID NO: 882746 - RNA, 19 nt, Artificial Sequence
  Description of Artificial Sequence: Synthetic oligonucleotide
cguucaccuccaccagucg

SEQ ID NO: 882747 - RNA, 19 nt, Artificial Sequence
  Description of Artificial Sequence: Synthetic oligonucleotide
gccgcguccgcgcucaucu

SEQ ID NO: 882748 - RNA, 19 nt, Artificial Sequence
  Description of Artificial Sequence: Synthetic oligonucleotide
gcguccgcgcucaucuugc

SEQ ID NO: 882749 - RNA, 19 nt, Artificial Sequence
  Description of Artificial Sequence: Synthetic oligonucleotide
ggcucggaguccagaggcc

SEQ ID NO: 882750 - RNA, 19 nt, Artificial Sequence
  Description of Artificial Sequence: Synthetic oligonucleotide
cccggugauguccuaggca

SEQ ID NO: 882751 - RNA, 19 nt, Artificial Sequence
  Description of Artificial Sequence: Synthetic oligonucleotide
aaggggccauccagguguu

SEQ ID NO: 882752 - RNA, 19 nt, Artificial Sequence
  Description of Artificial Sequence: Synthetic oligonucleotide
ccggauaaacuggcccacc

SEQ ID NO: 882753 - RNA, 19 nt, Artificial Sequence
  Description of Artificial Sequence: Synthetic oligonucleotide
gccgguguucagagguugc

SEQ ID NO: 882754 - RNA, 19 nt, Artificial Sequence
  Description of Artificial Sequence: Synthetic oligonucleotide
aggggccauccagguguuc

SEQ ID NO: 882755 - RNA, 19 nt, Artificial Sequence
  Description of Artificial Sequence: Synthetic oligonucleotide
ggucguucagggugagagu

SEQ ID NO: 882756 - RNA, 19 nt, Artificial Sequence
  Description of Artificial Sequence: Synthetic oligonucleotide
ccgugagcaggugucccag

SEQ ID NO: 882757 - RNA, 19 nt, Artificial Sequence
  Description of Artificial Sequence: Synthetic oligonucleotide
gguggaagccguaaccguu

SEQ ID NO: 882758 - RNA, 19 nt, Artificial Sequence
  Description of Artificial Sequence: Synthetic oligonucleotide
gcgaacgcacaggaaggga

SEQ ID NO: 882759 - RNA, 19 nt, Artificial Sequence
  Description of Artificial Sequence: Synthetic oligonucleotide
gguuuccccgugccaccca

SEQ ID NO: 882760 - RNA, 19 nt, Artificial Sequence
  Description of Artificial Sequence: Synthetic oligonucleotide
ggcgcacggcguugagcgc

SEQ ID NO: 882761 - RNA, 19 nt, Artificial Sequence
  Description of Artificial Sequence: Synthetic oligonucleotide
cgccgcggagcucaaguug

SEQ ID NO: 882762 - RNA, 19 nt, Artificial Sequence
  Description of Artificial Sequence: Synthetic oligonucleotide
ggcucggcuuguucggacu

SEQ ID NO: 882763 - RNA, 19 nt, Artificial Sequence
  Description of Artificial Sequence: Synthetic oligonucleotide
gucagcccugacuggucau

SEQ ID NO: 882764 - RNA, 19 nt, Artificial Sequence
  Description of Artificial Sequence: Synthetic oligonucleotide
ccguucggacccuucucca

SEQ ID NO: 882765 - RNA, 19 nt, Artificial Sequence
  Description of Artificial Sequence: Synthetic oligonucleotide
ccaguccaucugcggggcc

SEQ ID NO: 882766 - RNA, 19 nt, Artificial Sequence
  Description of Artificial Sequence: Synthetic oligonucleotide
cgcguccgcgcucaucuug

SEQ ID NO: 882767 - RNA, 19 nt, Artificial Sequence
  Description of Artificial Sequence: Synthetic oligonucleotide
ggcccgcuugcuacugcgc

SEQ ID NO: 882768 - RNA, 19 nt, Artificial Sequence
  Description of Artificial Sequence: Synthetic oligonucleotide
ccacguucucgccguucac

SEQ ID NO: 882769 - RNA, 19 nt, Artificial Sequence
  Description of Artificial Sequence: Synthetic oligonucleotide
cccgucggaggccggggac

SEQ ID NO: 882770 - RNA, 19 nt, Artificial Sequence
  Description of Artificial Sequence: Synthetic oligonucleotide
ggaugcugauuugaauguu

SEQ ID NO: 882771 - RNA, 19 nt, Artificial Sequence
  Description of Artificial Sequence: Synthetic oligonucleotide
ccguguagguggaagccgu

SEQ ID NO: 882772 - RNA, 19 nt, Artificial Sequence
  Description of Artificial Sequence: Synthetic oligonucleotide
gcccgcuugcuacugcgcu

SEQ ID NO: 882773 - RNA, 19 nt, Artificial Sequence
  Description of Artificial Sequence: Synthetic oligonucleotide
gccguucaccuccaccagu

SEQ ID NO: 882774 - RNA, 19 nt, Artificial Sequence
  Description of Artificial Sequence: Synthetic oligonucleotide
gcucggaguccagaggccu

SEQ ID NO: 882775 - RNA, 19 nt, Artificial Sequence
  Description of Artificial Sequence: Synthetic oligonucleotide
gguucccgucggaggccgg

SEQ ID NO: 882776 - RNA, 19 nt, Artificial Sequence
  Description of Artificial Sequence: Synthetic oligonucleotide
cugcaacagucaagucccu

SEQ ID NO: 882777 - RNA, 19 nt, Artificial Sequence
  Description of Artificial Sequence: Synthetic oligonucleotide
gggacugucuugggaauuu

SEQ ID NO: 882778 - RNA, 19 nt, Artificial Sequence
  Description of Artificial Sequence: Synthetic oligonucleotide
cacccaggucguucagggu

SEQ ID NO: 882779 - RNA, 19 nt, Artificial Sequence
  Description of Artificial Sequence: Synthetic oligonucleotide
cuucacggcugcucuccuu

SEQ ID NO: 882780 - RNA, 19 nt, Artificial Sequence
  Description of Artificial Sequence: Synthetic oligonucleotide
caggucguucagggugaga

SEQ ID NO: 882781 - RNA, 19 nt, Artificial Sequence
  Description of Artificial Sequence: Synthetic oligonucleotide
cagcacgguucccgucgga

SEQ ID NO: 882782 - RNA, 19 nt, Artificial Sequence
  Description of Artificial Sequence: Synthetic oligonucleotide
cgcacggcguugagcgccc

SEQ ID NO: 882783 - RNA, 19 nt, Artificial Sequence
  Description of Artificial Sequence: Synthetic oligonucleotide
cguucucgccguucaccuc

SEQ ID NO: 882784 - RNA, 19 nt, Artificial Sequence
  Description of Artificial Sequence: Synthetic oligonucleotide
gcacggccuuucuccccgc

SEQ ID NO: 882785 - RNA, 19 nt, Artificial Sequence
  Description of Artificial Sequence: Synthetic oligonucleotide
cgguucccgucggaggccg

SEQ ID NO: 882786 - RNA, 19 nt, Artificial Sequence
  Description of Artificial Sequence: Synthetic oligonucleotide
gguguuccugugacgggau

SEQ ID NO: 882787 - RNA, 19 nt, Artificial Sequence
  Description of Artificial Sequence: Synthetic oligonucleotide
cggaggccggggacgcacg

SEQ ID NO: 882788 - RNA, 19 nt, Artificial Sequence
  Description of Artificial Sequence: Synthetic oligonucleotide
cguccgcgcucaucuugcc

SEQ ID NO: 882789 - RNA, 19 nt, Artificial Sequence
  Description of Artificial Sequence: Synthetic oligonucleotide
cccuucccuaaggugggca

SEQ ID NO: 882790 - RNA, 19 nt, Artificial Sequence
  Description of Artificial Sequence: Synthetic oligonucleotide
ucgggacgcccagcuucuu

SEQ ID NO: 882791 - RNA, 19 nt, Artificial Sequence
  Description of Artificial Sequence: Synthetic oligonucleotide
cuugggcacccugacccuu

SEQ ID NO: 882792 - RNA, 19 nt, Artificial Sequence
  Description of Artificial Sequence: Synthetic oligonucleotide
cggcucggcuuguucggac

SEQ ID NO: 882793 - RNA, 19 nt, Artificial Sequence
  Description of Artificial Sequence: Synthetic oligonucleotide
gguaucgcuggaggcggau

SEQ ID NO: 882794 - RNA, 19 nt, Artificial Sequence
  Description of Artificial Sequence: Synthetic oligonucleotide
ccggaucgggacgcccagc

SEQ ID NO: 882795 - RNA, 19 nt, Artificial Sequence
  Description of Artificial Sequence: Synthetic oligonucleotide
gcucggcuuguucggacuu

SEQ ID NO: 882796 - RNA, 19 nt, Artificial Sequence
  Description of Artificial Sequence: Synthetic oligonucleotide
gguccccggccagcagccc

SEQ ID NO: 882797 - RNA, 19 nt, Artificial Sequence
  Description of Artificial Sequence: Synthetic oligonucleotide
cacgccguuccagguggcu

SEQ ID NO: 882798 - RNA, 19 nt, Artificial Sequence
  Description of Artificial Sequence: Synthetic oligonucleotide
cccgcggaugcggcucacc

SEQ ID NO: 882799 - RNA, 19 nt, Artificial Sequence
  Description of Artificial Sequence: Synthetic oligonucleotide
ccccuucccuaaggugggc

SEQ ID NO: 882800 - RNA, 19 nt, Artificial Sequence
  Description of Artificial Sequence: Synthetic oligonucleotide
ggagaacgcucagcacggu

SEQ ID NO: 882801 - RNA, 19 nt, Artificial Sequence
  Description of Artificial Sequence: Synthetic oligonucleotide
ggaucgggacgcccagcuu

SEQ ID NO: 882802 - RNA, 19 nt, Artificial Sequence
  Description of Artificial Sequence: Synthetic oligonucleotide
ccuugggcacccugacccu

SEQ ID NO: 882803 - RNA, 19 nt, Artificial Sequence
  Description of Artificial Sequence: Synthetic oligonucleotide
cggaucgggacgcccagcu

SEQ ID NO: 882804 - RNA, 19 nt, Artificial Sequence
  Description of Artificial Sequence: Synthetic oligonucleotide
cccugacccuuaugagcaa

SEQ ID NO: 882805 - RNA, 19 nt, Artificial Sequence
  Description of Artificial Sequence: Synthetic oligonucleotide
ccgguguucagagguugcu

SEQ ID NO: 882806 - RNA, 19 nt, Artificial Sequence
  Description of Artificial Sequence: Synthetic oligonucleotide
ccugacccuuaugagcaau

SEQ ID NO: 882807 - RNA, 19 nt, Artificial Sequence
  Description of Artificial Sequence: Synthetic oligonucleotide
gcccgacuucucggcgggc

SEQ ID NO: 882808 - RNA, 19 nt, Artificial Sequence
  Description of Artificial Sequence: Synthetic oligonucleotide
cgcgccgcggagcucaagu

SEQ ID NO: 882809 - RNA, 19 nt, Artificial Sequence
  Description of Artificial Sequence: Synthetic oligonucleotide
cgcggagcucaaguuggga

SEQ ID NO: 882810 - RNA, 19 nt, Artificial Sequence
  Description of Artificial Sequence: Synthetic oligonucleotide
gcacggcguugagcgcccc

SEQ ID NO: 882811 - RNA, 19 nt, Artificial Sequence
  Description of Artificial Sequence: Synthetic oligonucleotide
gcggggcccgcuugcuacu

SEQ ID NO: 882812 - RNA, 19 nt, Artificial Sequence
  Description of Artificial Sequence: Synthetic oligonucleotide
gcgccgcggagcucaaguu

SEQ ID NO: 882813 - RNA, 19 nt, Artificial Sequence
  Description of Artificial Sequence: Synthetic oligonucleotide
ccaucugcggggcccgcuu

SEQ ID NO: 882814 - RNA, 19 nt, Artificial Sequence
  Description of Artificial Sequence: Synthetic oligonucleotide
cggggcccgcuugcuacug

SEQ ID NO: 882815 - RNA, 19 nt, Artificial Sequence
  Description of Artificial Sequence: Synthetic oligonucleotide
cggaugcggcucaccaccu

SEQ ID NO: 882816 - RNA, 19 nt, Artificial Sequence
  Description of Artificial Sequence: Synthetic oligonucleotide
cggggacgcacggccuuuc

SEQ ID NO: 882817 - RNA, 19 nt, Artificial Sequence
  Description of Artificial Sequence: Synthetic oligonucleotide
cguugagcgccccgcggau

SEQ ID NO: 882818 - RNA, 19 nt, Artificial Sequence
  Description of Artificial Sequence: Synthetic oligonucleotide
cccgugccacccaggucgu

SEQ ID NO: 882819 - RNA, 19 nt, Artificial Sequence
  Description of Artificial Sequence: Synthetic oligonucleotide
ccgcgccgcggagcucaag

SEQ ID NO: 882820 - RNA, 19 nt, Artificial Sequence
  Description of Artificial Sequence: Synthetic oligonucleotide
cgccgcguccgcgcucauc

SEQ ID NO: 882821 - RNA, 19 nt, Artificial Sequence
  Description of Artificial Sequence: Synthetic oligonucleotide
cgcgcucaucuugcccgga

SEQ ID NO: 882822 - RNA, 19 nt, Artificial Sequence
  Description of Artificial Sequence: Synthetic oligonucleotide
ccguaaccguucggacccu

SEQ ID NO: 882823 - RNA, 19 nt, Artificial Sequence
  Description of Artificial Sequence: Synthetic oligonucleotide
cgcuugcuacugcgcuucu

SEQ ID NO: 882824 - RNA, 19 nt, Artificial Sequence
  Description of Artificial Sequence: Synthetic oligonucleotide
ccauagcugugaggaccuu

SEQ ID NO: 882825 - RNA, 19 nt, Artificial Sequence
  Description of Artificial Sequence: Synthetic oligonucleotide
cguaaccguucggacccuu

SEQ ID NO: 882826 - RNA, 19 nt, Artificial Sequence
  Description of Artificial Sequence: Synthetic oligonucleotide
ccggggacgcacggccuuu

SEQ ID NO: 882827 - RNA, 19 nt, Artificial Sequence
  Description of Artificial Sequence: Synthetic oligonucleotide
ccgcguccgcgcucaucuu

SEQ ID NO: 882828 - RNA, 19 nt, Artificial Sequence
  Description of Artificial Sequence: Synthetic oligonucleotide
aaaauaaucacgaagguga

SEQ ID NO: 882829 - RNA, 19 nt, Artificial Sequence
  Description of Artificial Sequence: Synthetic oligonucleotide
uaauggaugauacacaagc

SEQ ID NO: 882830 - RNA, 19 nt, Artificial Sequence
  Description of Artificial Sequence: Synthetic oligonucleotide
acauuuagcaaucaacagc

SEQ ID NO: 882831 - RNA, 19 nt, Artificial Sequence
  Description of Artificial Sequence: Synthetic oligonucleotide
aauuaaaucguuuauugau

SEQ ID NO: 882832 - RNA, 19 nt, Artificial Sequence
  Description of Artificial Sequence: Synthetic oligonucleotide
auuagucacaaauacaguc

SEQ ID NO: 882833 - RNA, 19 nt, Artificial Sequence
  Description of Artificial Sequence: Synthetic oligonucleotide
gaaacgagagccuucagcg

SEQ ID NO: 882834 - RNA, 19 nt, Artificial Sequence
  Description of Artificial Sequence: Synthetic oligonucleotide
ugaauaacaaucuugucca

SEQ ID NO: 882835 - RNA, 19 nt, Artificial Sequence
  Description of Artificial Sequence: Synthetic oligonucleotide
aauuagaaccuccugccac

SEQ ID NO: 882836 - RNA, 19 nt, Artificial Sequence
  Description of Artificial Sequence: Synthetic oligonucleotide
uuuaacuacaccaagguuu

SEQ ID NO: 882837 - RNA, 19 nt, Artificial Sequence
  Description of Artificial Sequence: Synthetic oligonucleotide
uccgacuuagacaugacgg

SEQ ID NO: 882838 - RNA, 19 nt, Artificial Sequence
  Description of Artificial Sequence: Synthetic oligonucleotide
caaauuucgacuuugcuug

SEQ ID NO: 882839 - RNA, 19 nt, Artificial Sequence
  Description of Artificial Sequence: Synthetic oligonucleotide
augauaauggaugauacac

SEQ ID NO: 882840 - RNA, 19 nt, Artificial Sequence
  Description of Artificial Sequence: Synthetic oligonucleotide
aacuaaaauaaccuguuau

SEQ ID NO: 882841 - RNA, 19 nt, Artificial Sequence
  Description of Artificial Sequence: Synthetic oligonucleotide
aaaguauuggccuccacca

SEQ ID NO: 882842 - RNA, 19 nt, Artificial Sequence
  Description of Artificial Sequence: Synthetic oligonucleotide
gauaccauuauucaauuga

SEQ ID NO: 882843 - RNA, 19 nt, Artificial Sequence
  Description of Artificial Sequence: Synthetic oligonucleotide
aguauugucuaacacaugu

SEQ ID NO: 882844 - RNA, 19 nt, Artificial Sequence
  Description of Artificial Sequence: Synthetic oligonucleotide
uuagucacaaauacagucc

SEQ ID NO: 882845 - RNA, 19 nt, Artificial Sequence
  Description of Artificial Sequence: Synthetic oligonucleotide
uaaccuguuauacaauuag

SEQ ID NO: 882846 - RNA, 19 nt, Artificial Sequence
  Description of Artificial Sequence: Synthetic oligonucleotide
aacucauuaaagucacaac

SEQ ID NO: 882847 - RNA, 19 nt, Artificial Sequence
  Description of Artificial Sequence: Synthetic oligonucleotide
acucauuaaagucacaaca

SEQ ID NO: 882848 - RNA, 19 nt, Artificial Sequence
  Description of Artificial Sequence: Synthetic oligonucleotide
aucuguuguaaccuguagc

SEQ ID NO: 882849 - RNA, 19 nt, Artificial Sequence
  Description of Artificial Sequence: Synthetic oligonucleotide
caauugauauugcauaggg

SEQ ID NO: 882850 - RNA, 19 nt, Artificial Sequence
  Description of Artificial Sequence: Synthetic oligonucleotide
auacacaagcuucauuccc

SEQ ID NO: 882851 - RNA, 19 nt, Artificial Sequence
  Description of Artificial Sequence: Synthetic oligonucleotide
aaucguuuauugauuacac

SEQ ID NO: 882852 - RNA, 19 nt, Artificial Sequence
  Description of Artificial Sequence: Synthetic oligonucleotide
acgugacaaaaccaaagcc

SEQ ID NO: 882853 - RNA, 19 nt, Artificial Sequence
  Description of Artificial Sequence: Synthetic oligonucleotide
auuaccaaauccauuauag

SEQ ID NO: 882854 - RNA, 19 nt, Artificial Sequence
  Description of Artificial Sequence: Synthetic oligonucleotide
uucaauugauauugcauag

SEQ ID NO: 882855 - RNA, 19 nt, Artificial Sequence
  Description of Artificial Sequence: Synthetic oligonucleotide
ucuacaguaaaacccuuug

SEQ ID NO: 882856 - RNA, 19 nt, Artificial Sequence
  Description of Artificial Sequence: Synthetic oligonucleotide
uccgucaugauuucaauca

SEQ ID NO: 882857 - RNA, 19 nt, Artificial Sequence
  Description of Artificial Sequence: Synthetic oligonucleotide
gaguagacuaacuuuacac

SEQ ID NO: 882858 - RNA, 19 nt, Artificial Sequence
  Description of Artificial Sequence: Synthetic oligonucleotide
guaauuagaaccuccugcc

SEQ ID NO: 882859 - RNA, 19 nt, Artificial Sequence
  Description of Artificial Sequence: Synthetic oligonucleotide
uugauuacacaugauaaug

SEQ ID NO: 882860 - RNA, 19 nt, Artificial Sequence
  Description of Artificial Sequence: Synthetic oligonucleotide
aauccauuauagccauccc

SEQ ID NO: 882861 - RNA, 19 nt, Artificial Sequence
  Description of Artificial Sequence: Synthetic oligonucleotide
auugcuuccacuaccaccg

SEQ ID NO: 882862 - RNA, 19 nt, Artificial Sequence
  Description of Artificial Sequence: Synthetic oligonucleotide
uuagguuccacaacucugc

SEQ ID NO: 882863 - RNA, 19 nt, Artificial Sequence
  Description of Artificial Sequence: Synthetic oligonucleotide
auaaucacgaaggugaugu

SEQ ID NO: 882864 - RNA, 19 nt, Artificial Sequence
  Description of Artificial Sequence: Synthetic oligonucleotide
cauuuagcaaucaacagca

SEQ ID NO: 882865 - RNA, 19 nt, Artificial Sequence
  Description of Artificial Sequence: Synthetic oligonucleotide
ugucauugccgccaaaacc

SEQ ID NO: 882866 - RNA, 19 nt, Artificial Sequence
  Description of Artificial Sequence: Synthetic oligonucleotide
uacauuuagcaaucaacag

SEQ ID NO: 882867 - RNA, 19 nt, Artificial Sequence
  Description of Artificial Sequence: Synthetic oligonucleotide
uuggaugacccuuuuaaug

SEQ ID NO: 882868 - RNA, 19 nt, Artificial Sequence
  Description of Artificial Sequence: Synthetic oligonucleotide
aaaucguuuauugauuaca

SEQ ID NO: 882869 - RNA, 19 nt, Artificial Sequence
  Description of Artificial Sequence: Synthetic oligonucleotide
aguuuaacuacaccaaggu

SEQ ID NO: 882870 - RNA, 19 nt, Artificial Sequence
  Description of Artificial Sequence: Synthetic oligonucleotide
guuuccauaaccccugucc

SEQ ID NO: 882871 - RNA, 19 nt, Artificial Sequence
  Description of Artificial Sequence: Synthetic oligonucleotide
augucuucuuuguagcagc

SEQ ID NO: 882872 - RNA, 19 nt, Artificial Sequence
  Description of Artificial Sequence: Synthetic oligonucleotide
aaauuugaagacugauugu

SEQ ID NO: 882873 - RNA, 19 nt, Artificial Sequence
  Description of Artificial Sequence: Synthetic oligonucleotide
ucucuuagguuccacaacu

SEQ ID NO: 882874 - RNA, 19 nt, Artificial Sequence
  Description of Artificial Sequence: Synthetic oligonucleotide
uuauagcugucauagcugc

SEQ ID NO: 882875 - RNA, 19 nt, Artificial Sequence
  Description of Artificial Sequence: Synthetic oligonucleotide
aucgcuucguauuuggauc

SEQ ID NO: 882876 - RNA, 19 nt, Artificial Sequence
  Description of Artificial Sequence: Synthetic oligonucleotide
accacuucgaccucuuugg

SEQ ID NO: 882877 - RNA, 19 nt, Artificial Sequence
  Description of Artificial Sequence: Synthetic oligonucleotide
aagacugauuguuauaauu

SEQ ID NO: 882878 - RNA, 19 nt, Artificial Sequence
  Description of Artificial Sequence: Synthetic oligonucleotide
gauaauggaugauacacaa

SEQ ID NO: 882879 - RNA, 19 nt, Artificial Sequence
  Description of Artificial Sequence: Synthetic oligonucleotide
ucaugaucagacuauuaca

SEQ ID NO: 882880 - RNA, 19 nt, Artificial Sequence
  Description of Artificial Sequence: Synthetic oligonucleotide
ugauaauggaugauacaca

SEQ ID NO: 882881 - RNA, 19 nt, Artificial Sequence
  Description of Artificial Sequence: Synthetic oligonucleotide
uuauucaauugauauugca

SEQ ID NO: 882882 - RNA, 19 nt, Artificial Sequence
  Description of Artificial Sequence: Synthetic oligonucleotide
uccggaaccacuucgaccu

SEQ ID NO: 882883 - RNA, 19 nt, Artificial Sequence
  Description of Artificial Sequence: Synthetic oligonucleotide
caaaguauuggccuccacc

SEQ ID NO: 882884 - RNA, 19 nt, Artificial Sequence
  Description of Artificial Sequence: Synthetic oligonucleotide
aaaacccuuuguuggaaug

SEQ ID NO: 882885 - RNA, 19 nt, Artificial Sequence
  Description of Artificial Sequence: Synthetic oligonucleotide
uuaagugggccccuggucu

SEQ ID NO: 882886 - RNA, 19 nt, Artificial Sequence
  Description of Artificial Sequence: Synthetic oligonucleotide
auagggugugccaacaacc

SEQ ID NO: 882887 - RNA, 19 nt, Artificial Sequence
  Description of Artificial Sequence: Synthetic oligonucleotide
uguuguaaccuguagcuuc

SEQ ID NO: 882888 - RNA, 19 nt, Artificial Sequence
  Description of Artificial Sequence: Synthetic oligonucleotide
ccuagcuguaauuagaacc

SEQ ID NO: 882889 - RNA, 19 nt, Artificial Sequence
  Description of Artificial Sequence: Synthetic oligonucleotide
agaaacuaaaauaaccugu

SEQ ID NO: 882890 - RNA, 19 nt, Artificial Sequence
  Description of Artificial Sequence: Synthetic oligonucleotide
cauacugcucaaaauaauc

SEQ ID NO: 882891 - RNA, 19 nt, Artificial Sequence
  Description of Artificial Sequence: Synthetic oligonucleotide
ucaauugauauugcauagg

SEQ ID NO: 882892 - RNA, 19 nt, Artificial Sequence
  Description of Artificial Sequence: Synthetic oligonucleotide
uuaaaucguuuauugauua

SEQ ID NO: 882893 - RNA, 19 nt, Artificial Sequence
  Description of Artificial Sequence: Synthetic oligonucleotide
ugaucagacuauuacauuu

SEQ ID NO: 882894 - RNA, 19 nt, Artificial Sequence
  Description of Artificial Sequence: Synthetic oligonucleotide
uagcguacgugacaaaacc

SEQ ID NO: 882895 - RNA, 19 nt, Artificial Sequence
  Description of Artificial Sequence: Synthetic oligonucleotide
ggaauucuaaacuucacac

SEQ ID NO: 882896 - RNA, 19 nt, Artificial Sequence
  Description of Artificial Sequence: Synthetic oligonucleotide
acaugauaauggaugauac

SEQ ID NO: 882897 - RNA, 19 nt, Artificial Sequence
  Description of Artificial Sequence: Synthetic oligonucleotide
uuucucacuucacaguugu

SEQ ID NO: 882898 - RNA, 19 nt, Artificial Sequence
  Description of Artificial Sequence: Synthetic oligonucleotide
uacacaugauaauggauga

SEQ ID NO: 882899 - RNA, 19 nt, Artificial Sequence
  Description of Artificial Sequence: Synthetic oligonucleotide
uugccaaaaucauuguagc

SEQ ID NO: 882900 - RNA, 19 nt, Artificial Sequence
  Description of Artificial Sequence: Synthetic oligonucleotide
aaauuucgacuuugcuugg

SEQ ID NO: 882901 - RNA, 19 nt, Artificial Sequence
  Description of Artificial Sequence: Synthetic oligonucleotide
caacaaccauuuuauaacc

SEQ ID NO: 882902 - RNA, 19 nt, Artificial Sequence
  Description of Artificial Sequence: Synthetic oligonucleotide
aauaaccggcaguuuaacu

SEQ ID NO: 882903 - RNA, 19 nt, Artificial Sequence
  Description of Artificial Sequence: Synthetic oligonucleotide
uucacaguuaagugggccc

SEQ ID NO: 882904 - RNA, 19 nt, Artificial Sequence
  Description of Artificial Sequence: Synthetic oligonucleotide
ucauuaaagucacaacaau

SEQ ID NO: 882905 - RNA, 19 nt, Artificial Sequence
  Description of Artificial Sequence: Synthetic oligonucleotide
ucccaaauggaacuuggca

SEQ ID NO: 882906 - RNA, 19 nt, Artificial Sequence
  Description of Artificial Sequence: Synthetic oligonucleotide
ucgaccaaaguugucauug

SEQ ID NO: 882907 - RNA, 19 nt, Artificial Sequence
  Description of Artificial Sequence: Synthetic oligonucleotide
aaguauuggccuccaccac

SEQ ID NO: 882908 - RNA, 19 nt, Artificial Sequence
  Description of Artificial Sequence: Synthetic oligonucleotide
accuguuauacaauuaguc

SEQ ID NO: 882909 - RNA, 19 nt, Artificial Sequence
  Description of Artificial Sequence: Synthetic oligonucleotide
aaucccaaauggaacuugg

SEQ ID NO: 882910 - RNA, 19 nt, Artificial Sequence
  Description of Artificial Sequence: Synthetic oligonucleotide
auaaccggcaguuuaacua

SEQ ID NO: 882911 - RNA, 19 nt, Artificial Sequence
  Description of Artificial Sequence: Synthetic oligonucleotide
gacuauuacauuuagcaau

SEQ ID NO: 882912 - RNA, 19 nt, Artificial Sequence
  Description of Artificial Sequence: Synthetic oligonucleotide
uacacaagcuucauuccca

SEQ ID NO: 882913 - RNA, 19 nt, Artificial Sequence
  Description of Artificial Sequence: Synthetic oligonucleotide
ucagacuauuacauuuagc

SEQ ID NO: 882914 - RNA, 19 nt, Artificial Sequence
  Description of Artificial Sequence: Synthetic oligonucleotide
ugauuguuauaauugccaa

SEQ ID NO: 882915 - RNA, 19 nt, Artificial Sequence
  Description of Artificial Sequence: Synthetic oligonucleotide
uuaacuacaccaagguuuu

SEQ ID NO: 882916 - RNA, 19 nt, Artificial Sequence
  Description of Artificial Sequence: Synthetic oligonucleotide
agagaauuaaaucguuuau

SEQ ID NO: 882917 - RNA, 19 nt, Artificial Sequence
  Description of Artificial Sequence: Synthetic oligonucleotide
aguuuaccaagauggcuuc

SEQ ID NO: 882918 - RNA, 19 nt, Artificial Sequence
  Description of Artificial Sequence: Synthetic oligonucleotide
aaaauugcuuccacuacca

SEQ ID NO: 882919 - RNA, 19 nt, Artificial Sequence
  Description of Artificial Sequence: Synthetic oligonucleotide
uugcccauauacaugagua

SEQ ID NO: 882920 - RNA, 19 nt, Artificial Sequence
  Description of Artificial Sequence: Synthetic oligonucleotide
cacaaauacaguccuggag

SEQ ID NO: 882921 - RNA, 19 nt, Artificial Sequence
  Description of Artificial Sequence: Synthetic oligonucleotide
accccuguccaccacuucc

SEQ ID NO: 882922 - RNA, 19 nt, Artificial Sequence
  Description of Artificial Sequence: Synthetic oligonucleotide
uugucuaacacaugucuuc

SEQ ID NO: 882923 - RNA, 19 nt, Artificial Sequence
  Description of Artificial Sequence: Synthetic oligonucleotide
uugguuucgugguuuagca

SEQ ID NO: 882924 - RNA, 19 nt, Artificial Sequence
  Description of Artificial Sequence: Synthetic oligonucleotide
ucuaacacaugucuucuuu

SEQ ID NO: 882925 - RNA, 19 nt, Artificial Sequence
  Description of Artificial Sequence: Synthetic oligonucleotide
cugauuguuauaauugcca

SEQ ID NO: 882926 - RNA, 19 nt, Artificial Sequence
  Description of Artificial Sequence: Synthetic oligonucleotide
ucgguuguuucgaagcuca

SEQ ID NO: 882927 - RNA, 19 nt, Artificial Sequence
  Description of Artificial Sequence: Synthetic oligonucleotide
cuaacuuuacacagcaaca

SEQ ID NO: 882928 - RNA, 19 nt, Artificial Sequence
  Description of Artificial Sequence: Synthetic oligonucleotide
aaguuuaccaagauggcuu

SEQ ID NO: 882929 - RNA, 19 nt, Artificial Sequence
  Description of Artificial Sequence: Synthetic oligonucleotide
uaauuagaaccuccugcca

SEQ ID NO: 882930 - RNA, 19 nt, Artificial Sequence
  Description of Artificial Sequence: Synthetic oligonucleotide
accaaaguugucauugccg

SEQ ID NO: 882931 - RNA, 19 nt, Artificial Sequence
  Description of Artificial Sequence: Synthetic oligonucleotide
uaacacaugucuucuuugu

SEQ ID NO: 882932 - RNA, 19 nt, Artificial Sequence
  Description of Artificial Sequence: Synthetic oligonucleotide
uuuaucugauaccauuauu

SEQ ID NO: 882933 - RNA, 19 nt, Artificial Sequence
  Description of Artificial Sequence: Synthetic oligonucleotide
gguuuagcaaaguauuggc

SEQ ID NO: 882934 - RNA, 19 nt, Artificial Sequence
  Description of Artificial Sequence: Synthetic oligonucleotide
cacaguaugguauuucuga

SEQ ID NO: 882935 - RNA, 19 nt, Artificial Sequence
  Description of Artificial Sequence: Synthetic oligonucleotide
ucgucgguuguuucgaagc

SEQ ID NO: 882936 - RNA, 19 nt, Artificial Sequence
  Description of Artificial Sequence: Synthetic oligonucleotide
ucguauuuggaucucucau

SEQ ID NO: 882937 - RNA, 19 nt, Artificial Sequence
  Description of Artificial Sequence: Synthetic oligonucleotide
ucgugguuuagcaaaguau

SEQ ID NO: 882938 - RNA, 19 nt, Artificial Sequence
  Description of Artificial Sequence: Synthetic oligonucleotide
agcuguaauuagaaccucc

SEQ ID NO: 882939 - RNA, 19 nt, Artificial Sequence
  Description of Artificial Sequence: Synthetic oligonucleotide
uaaccggcaguuuaacuac

SEQ ID NO: 882940 - RNA, 19 nt, Artificial Sequence
  Description of Artificial Sequence: Synthetic oligonucleotide
uuguuggaaugcuuuacac

SEQ ID NO: 882941 - RNA, 19 nt, Artificial Sequence
  Description of Artificial Sequence: Synthetic oligonucleotide
ugauauugcauagggugug

SEQ ID NO: 882942 - RNA, 19 nt, Artificial Sequence
  Description of Artificial Sequence: Synthetic oligonucleotide
uaaaucguuuauugauuac

SEQ ID NO: 882943 - RNA, 19 nt, Artificial Sequence
  Description of Artificial Sequence: Synthetic oligonucleotide
ugaguguuccccauugcuc

SEQ ID NO: 882944 - RNA, 19 nt, Artificial Sequence
  Description of Artificial Sequence: Synthetic oligonucleotide
auuagaaccuccugccacu

SEQ ID NO: 882945 - RNA, 19 nt, Artificial Sequence
  Description of Artificial Sequence: Synthetic oligonucleotide
uuuauugauuacacaugau

SEQ ID NO: 882946 - RNA, 19 nt, Artificial Sequence
  Description of Artificial Sequence: Synthetic oligonucleotide
aauggaugauacacaagcu

SEQ ID NO: 882947 - RNA, 19 nt, Artificial Sequence
  Description of Artificial Sequence: Synthetic oligonucleotide
uaaccuguagcuucccugu

SEQ ID NO: 882948 - RNA, 19 nt, Artificial Sequence
  Description of Artificial Sequence: Synthetic oligonucleotide
cuaacacaugucuucuuug

SEQ ID NO: 882949 - RNA, 19 nt, Artificial Sequence
  Description of Artificial Sequence: Synthetic oligonucleotide
aauuagucacaaauacagu

SEQ ID NO: 882950 - RNA, 19 nt, Artificial Sequence
  Description of Artificial Sequence: Synthetic oligonucleotide
uuagacaugacggcaggga

SEQ ID NO: 882951 - RNA, 19 nt, Artificial Sequence
  Description of Artificial Sequence: Synthetic oligonucleotide
aauaaucacgaaggugaug

SEQ ID NO: 882952 - RNA, 19 nt, Artificial Sequence
  Description of Artificial Sequence: Synthetic oligonucleotide
uccugcuaagcuuuguuuc

SEQ ID NO: 882953 - RNA, 19 nt, Artificial Sequence
  Description of Artificial Sequence: Synthetic oligonucleotide
uuccuagcuguaauuagaa

SEQ ID NO: 882954 - RNA, 19 nt, Artificial Sequence
  Description of Artificial Sequence: Synthetic oligonucleotide
uucagcgaugcuuccuccg

SEQ ID NO: 882955 - RNA, 19 nt, Artificial Sequence
  Description of Artificial Sequence: Synthetic oligonucleotide
ugccacucccgccauagcc

SEQ ID NO: 882956 - RNA, 19 nt, Artificial Sequence
  Description of Artificial Sequence: Synthetic oligonucleotide
gucauugccgccaaaacca

SEQ ID NO: 882957 - RNA, 19 nt, Artificial Sequence
  Description of Artificial Sequence: Synthetic oligonucleotide
uaccaccgaagccaccucg

SEQ ID NO: 882958 - RNA, 19 nt, Artificial Sequence
  Description of Artificial Sequence: Synthetic oligonucleotide
guuuagcaaaguauuggcc

SEQ ID NO: 882959 - RNA, 19 nt, Artificial Sequence
  Description of Artificial Sequence: Synthetic oligonucleotide
uauucagcgucaugaucag

SEQ ID NO: 882960 - RNA, 19 nt, Artificial Sequence
  Description of Artificial Sequence: Synthetic oligonucleotide
guacgugacaaaaccaaag

SEQ ID NO: 882961 - RNA, 19 nt, Artificial Sequence
  Description of Artificial Sequence: Synthetic oligonucleotide
cugcucaaaauaaucacga

SEQ ID NO: 882962 - RNA, 19 nt, Artificial Sequence
  Description of Artificial Sequence: Synthetic oligonucleotide
uuucgacuuugcuuggaug

SEQ ID NO: 882963 - RNA, 19 nt, Artificial Sequence
  Description of Artificial Sequence: Synthetic oligonucleotide
gauuguuauaauugccaaa

SEQ ID NO: 882964 - RNA, 19 nt, Artificial Sequence
  Description of Artificial Sequence: Synthetic oligonucleotide
caaucaacagcauggguga

SEQ ID NO: 882965 - RNA, 19 nt, Artificial Sequence
  Description of Artificial Sequence: Synthetic oligonucleotide
auggaugauacacaagcuu

SEQ ID NO: 882966 - RNA, 19 nt, Artificial Sequence
  Description of Artificial Sequence: Synthetic oligonucleotide
gcaaucaacagcaugggug

SEQ ID NO: 882967 - RNA, 19 nt, Artificial Sequence
  Description of Artificial Sequence: Synthetic oligonucleotide
auuuauucagcgucaugau

SEQ ID NO: 882968 - RNA, 19 nt, Artificial Sequence
  Description of Artificial Sequence: Synthetic oligonucleotide
uugucauugccgccaaaac

SEQ ID NO: 882969 - RNA, 19 nt, Artificial Sequence
  Description of Artificial Sequence: Synthetic oligonucleotide
acaugaguauugucuaaca

SEQ ID NO: 882970 - RNA, 19 nt, Artificial Sequence
  Description of Artificial Sequence: Synthetic oligonucleotide
ucagcgaugcuuccuccgc

SEQ ID NO: 882971 - RNA, 19 nt, Artificial Sequence
  Description of Artificial Sequence: Synthetic oligonucleotide
acaauuagucacaaauaca

SEQ ID NO: 882972 - RNA, 19 nt, Artificial Sequence
  Description of Artificial Sequence: Synthetic oligonucleotide
aucguuuauugauuacaca

SEQ ID NO: 882973 - RNA, 19 nt, Artificial Sequence
  Description of Artificial Sequence: Synthetic oligonucleotide
cuugguuucgugguuuagc

SEQ ID NO: 882974 - RNA, 19 nt, Artificial Sequence
  Description of Artificial Sequence: Synthetic oligonucleotide
uucauagcggcaucuacuu

SEQ ID NO: 882975 - RNA, 19 nt, Artificial Sequence
  Description of Artificial Sequence: Synthetic oligonucleotide
ugccaaaaucauuguagcu

SEQ ID NO: 882976 - RNA, 19 nt, Artificial Sequence
  Description of Artificial Sequence: Synthetic oligonucleotide
aaacgagagccuucagcga

SEQ ID NO: 882977 - RNA, 19 nt, Artificial Sequence
  Description of Artificial Sequence: Synthetic oligonucleotide
uuccggaaccacuucgacc

SEQ ID NO: 882978 - RNA, 19 nt, Artificial Sequence
  Description of Artificial Sequence: Synthetic oligonucleotide
aaauggaacuuggcaccac

SEQ ID NO: 882979 - RNA, 19 nt, Artificial Sequence
  Description of Artificial Sequence: Synthetic oligonucleotide
ggaaacgagagccuucagc

SEQ ID NO: 882980 - RNA, 19 nt, Artificial Sequence
  Description of Artificial Sequence: Synthetic oligonucleotide
cuagcuguaauuagaaccu

SEQ ID NO: 882981 - RNA, 19 nt, Artificial Sequence
  Description of Artificial Sequence: Synthetic oligonucleotide
auuaaaucguuuauugauu

SEQ ID NO: 882982 - RNA, 19 nt, Artificial Sequence
  Description of Artificial Sequence: Synthetic oligonucleotide
gacaugacggcagggaaac

SEQ ID NO: 882983 - RNA, 19 nt, Artificial Sequence
  Description of Artificial Sequence: Synthetic oligonucleotide
cauucauagcggcaucuac

SEQ ID NO: 882984 - RNA, 19 nt, Artificial Sequence
  Description of Artificial Sequence: Synthetic oligonucleotide
uguuuccuagcuguaauua

SEQ ID NO: 882985 - RNA, 19 nt, Artificial Sequence
  Description of Artificial Sequence: Synthetic oligonucleotide
accgucauuaccaaaucca

SEQ ID NO: 882986 - RNA, 19 nt, Artificial Sequence
  Description of Artificial Sequence: Synthetic oligonucleotide
uucgugguuuagcaaagua

SEQ ID NO: 882987 - RNA, 19 nt, Artificial Sequence
  Description of Artificial Sequence: Synthetic oligonucleotide
uggaacuuggcaccacccu

SEQ ID NO: 882988 - RNA, 19 nt, Artificial Sequence
  Description of Artificial Sequence: Synthetic oligonucleotide
cuccgacuuagacaugacg

SEQ ID NO: 882989 - RNA, 19 nt, Artificial Sequence
  Description of Artificial Sequence: Synthetic oligonucleotide
uguagcuucccugucacuu

SEQ ID NO: 882990 - RNA, 19 nt, Artificial Sequence
  Description of Artificial Sequence: Synthetic oligonucleotide
gugacuccgacuuagacau

SEQ ID NO: 882991 - RNA, 19 nt, Artificial Sequence
  Description of Artificial Sequence: Synthetic oligonucleotide
aaccuguuauacaauuagu

SEQ ID NO: 882992 - RNA, 19 nt, Artificial Sequence
  Description of Artificial Sequence: Synthetic oligonucleotide
aaccuguagcuucccuguc

SEQ ID NO: 882993 - RNA, 19 nt, Artificial Sequence
  Description of Artificial Sequence: Synthetic oligonucleotide
aguuaagugggccccuggu

SEQ ID NO: 882994 - RNA, 19 nt, Artificial Sequence
  Description of Artificial Sequence: Synthetic oligonucleotide
auucauagcggcaucuacu

SEQ ID NO: 882995 - RNA, 19 nt, Artificial Sequence
  Description of Artificial Sequence: Synthetic oligonucleotide
cuaccaccgcccaaagccg

SEQ ID NO: 882996 - RNA, 19 nt, Artificial Sequence
  Description of Artificial Sequence: Synthetic oligonucleotide
gaccucuuuggcuggauga

SEQ ID NO: 882997 - RNA, 19 nt, Artificial Sequence
  Description of Artificial Sequence: Synthetic oligonucleotide
uuuugcccauauacaugag

SEQ ID NO: 882998 - RNA, 19 nt, Artificial Sequence
  Description of Artificial Sequence: Synthetic oligonucleotide
uccguuguuauagcuguca

SEQ ID NO: 882999 - RNA, 19 nt, Artificial Sequence
  Description of Artificial Sequence: Synthetic oligonucleotide
caugauaauggaugauaca

SEQ ID NO: 883000 - RNA, 19 nt, Artificial Sequence
  Description of Artificial Sequence: Synthetic oligonucleotide
acauuuauucagcgucaug

SEQ ID NO: 883001 - RNA, 19 nt, Artificial Sequence
  Description of Artificial Sequence: Synthetic oligonucleotide
ucgcuucguauuuggaucu

SEQ ID NO: 883002 - RNA, 19 nt, Artificial Sequence
  Description of Artificial Sequence: Synthetic oligonucleotide
uuguuauagcugucauagc

SEQ ID NO: 883003 - RNA, 19 nt, Artificial Sequence
  Description of Artificial Sequence: Synthetic oligonucleotide
aaauaaucacgaaggugau

SEQ ID NO: 883004 - RNA, 19 nt, Artificial Sequence
  Description of Artificial Sequence: Synthetic oligonucleotide
uuggcuggaugaagcacug

SEQ ID NO: 883005 - RNA, 19 nt, Artificial Sequence
  Description of Artificial Sequence: Synthetic oligonucleotide
gucacaacaauaaccggca

SEQ ID NO: 883006 - RNA, 19 nt, Artificial Sequence
  Description of Artificial Sequence: Synthetic oligonucleotide
caugaucagacuauuacau

SEQ ID NO: 883007 - RNA, 19 nt, Artificial Sequence
  Description of Artificial Sequence: Synthetic oligonucleotide
aaauaaccuguuauacaau

SEQ ID NO: 883008 - RNA, 19 nt, Artificial Sequence
  Description of Artificial Sequence: Synthetic oligonucleotide
auaauggaugauacacaag

SEQ ID NO: 883009 - RNA, 19 nt, Artificial Sequence
  Description of Artificial Sequence: Synthetic oligonucleotide
aacccuuuguuggaaugcu

SEQ ID NO: 883010 - RNA, 19 nt, Artificial Sequence
  Description of Artificial Sequence: Synthetic oligonucleotide
ugcucaaaauaaucacgaa

SEQ ID NO: 883011 - RNA, 19 nt, Artificial Sequence
  Description of Artificial Sequence: Synthetic oligonucleotide
auuacacaugauaauggau

SEQ ID NO: 883012 - RNA, 19 nt, Artificial Sequence
  Description of Artificial Sequence: Synthetic oligonucleotide
auaaccccuguccaccacu

SEQ ID NO: 883013 - RNA, 19 nt, Artificial Sequence
  Description of Artificial Sequence: Synthetic oligonucleotide
ccuguuauacaauuaguca

SEQ ID NO: 883014 - RNA, 19 nt, Artificial Sequence
  Description of Artificial Sequence: Synthetic oligonucleotide
ucgaccacugaaguuuccc

SEQ ID NO: 883015 - RNA, 19 nt, Artificial Sequence
  Description of Artificial Sequence: Synthetic oligonucleotide
caccgucauuaccaaaucc

SEQ ID NO: 883016 - RNA, 19 nt, Artificial Sequence
  Description of Artificial Sequence: Synthetic oligonucleotide
auuucgacuuugcuuggau

SEQ ID NO: 883017 - RNA, 19 nt, Artificial Sequence
  Description of Artificial Sequence: Synthetic oligonucleotide
gguuucgugguuuagcaaa

SEQ ID NO: 883018 - RNA, 19 nt, Artificial Sequence
  Description of Artificial Sequence: Synthetic oligonucleotide
acgaccaccaccaaaguuu

SEQ ID NO: 883019 - RNA, 19 nt, Artificial Sequence
  Description of Artificial Sequence: Synthetic oligonucleotide
acugugcuuggcugaguuc

SEQ ID NO: 883020 - RNA, 19 nt, Artificial Sequence
  Description of Artificial Sequence: Synthetic oligonucleotide
aauuucgacuuugcuugga

SEQ ID NO: 883021 - RNA, 19 nt, Artificial Sequence
  Description of Artificial Sequence: Synthetic oligonucleotide
agcaaucaacagcaugggu

SEQ ID NO: 883022 - RNA, 19 nt, Artificial Sequence
  Description of Artificial Sequence: Synthetic oligonucleotide
acagucggugaguguuccc

SEQ ID NO: 883023 - RNA, 19 nt, Artificial Sequence
  Description of Artificial Sequence: Synthetic oligonucleotide
cuuagacaugacggcaggg

SEQ ID NO: 883024 - RNA, 19 nt, Artificial Sequence
  Description of Artificial Sequence: Synthetic oligonucleotide
uccuagcuguaauuagaac

SEQ ID NO: 883025 - RNA, 19 nt, Artificial Sequence
  Description of Artificial Sequence: Synthetic oligonucleotide
auaccauuauucaauugau

SEQ ID NO: 883026 - RNA, 19 nt, Artificial Sequence
  Description of Artificial Sequence: Synthetic oligonucleotide
guuucgugguuuagcaaag

SEQ ID NO: 883027 - RNA, 19 nt, Artificial Sequence
  Description of Artificial Sequence: Synthetic oligonucleotide
uagcaaaguauuggccucc

SEQ ID NO: 883028 - RNA, 19 nt, Artificial Sequence
  Description of Artificial Sequence: Synthetic oligonucleotide
cauagcggcaucuacuucu

SEQ ID NO: 883029 - RNA, 19 nt, Artificial Sequence
  Description of Artificial Sequence: Synthetic oligonucleotide
ucauugccgccaaaaccac

SEQ ID NO: 883030 - RNA, 19 nt, Artificial Sequence
  Description of Artificial Sequence: Synthetic oligonucleotide
acaguagcguacgugacaa

SEQ ID NO: 883031 - RNA, 19 nt, Artificial Sequence
  Description of Artificial Sequence: Synthetic oligonucleotide
ggugacuccgacuuagaca

SEQ ID NO: 883032 - RNA, 19 nt, Artificial Sequence
  Description of Artificial Sequence: Synthetic oligonucleotide
gaaguuuaccaagauggcu

SEQ ID NO: 883033 - RNA, 19 nt, Artificial Sequence
  Description of Artificial Sequence: Synthetic oligonucleotide
ugcuuggcugaguucacaa

SEQ ID NO: 883034 - RNA, 19 nt, Artificial Sequence
  Description of Artificial Sequence: Synthetic oligonucleotide
guuaagugggccccugguc

SEQ ID NO: 883035 - RNA, 19 nt, Artificial Sequence
  Description of Artificial Sequence: Synthetic oligonucleotide
ucuccugcuaagcuuuguu

SEQ ID NO: 883036 - RNA, 19 nt, Artificial Sequence
  Description of Artificial Sequence: Synthetic oligonucleotide
ugcauucauagcggcaucu

SEQ ID NO: 883037 - RNA, 19 nt, Artificial Sequence
  Description of Artificial Sequence: Synthetic oligonucleotide
agaguaacccagggccgcc

SEQ ID NO: 883038 - RNA, 19 nt, Artificial Sequence
  Description of Artificial Sequence: Synthetic oligonucleotide
ugcccauauacaugaguau

SEQ ID NO: 883039 - RNA, 19 nt, Artificial Sequence
  Description of Artificial Sequence: Synthetic oligonucleotide
uuccacaguagcguacgug

SEQ ID NO: 883040 - RNA, 19 nt, Artificial Sequence
  Description of Artificial Sequence: Synthetic oligonucleotide
uccacccaagcaauauaaa

SEQ ID NO: 883041 - RNA, 19 nt, Artificial Sequence
  Description of Artificial Sequence: Synthetic oligonucleotide
accucgaccacugaaguuu

SEQ ID NO: 883042 - RNA, 19 nt, Artificial Sequence
  Description of Artificial Sequence: Synthetic oligonucleotide
auucuaaacuucacacugu

SEQ ID NO: 883043 - RNA, 19 nt, Artificial Sequence
  Description of Artificial Sequence: Synthetic oligonucleotide
gucauagcugccacucccg

SEQ ID NO: 883044 - RNA, 19 nt, Artificial Sequence
  Description of Artificial Sequence: Synthetic oligonucleotide
cuucacacuguuggggaag

SEQ ID NO: 883045 - RNA, 19 nt, Artificial Sequence
  Description of Artificial Sequence: Synthetic oligonucleotide
aguuguggccauucacagu

SEQ ID NO: 883046 - RNA, 19 nt, Artificial Sequence
  Description of Artificial Sequence: Synthetic oligonucleotide
aaccccuguccaccacuuc

SEQ ID NO: 883047 - RNA, 19 nt, Artificial Sequence
  Description of Artificial Sequence: Synthetic oligonucleotide
accaccgucauuaccaaau

SEQ ID NO: 883048 - RNA, 19 nt, Artificial Sequence
  Description of Artificial Sequence: Synthetic oligonucleotide
ccugcuaagcuuuguuucc

SEQ ID NO: 883049 - RNA, 19 nt, Artificial Sequence
  Description of Artificial Sequence: Synthetic oligonucleotide
uuagaaccuccugccacug

SEQ ID NO: 883050 - RNA, 19 nt, Artificial Sequence
  Description of Artificial Sequence: Synthetic oligonucleotide
cagucggugaguguucccc

SEQ ID NO: 883051 - RNA, 19 nt, Artificial Sequence
  Description of Artificial Sequence: Synthetic oligonucleotide
uggcuucuccacccaagca

SEQ ID NO: 883052 - RNA, 19 nt, Artificial Sequence
  Description of Artificial Sequence: Synthetic oligonucleotide
cuucagcgaugcuuccucc

SEQ ID NO: 883053 - RNA, 19 nt, Artificial Sequence
  Description of Artificial Sequence: Synthetic oligonucleotide
uggggaaguuuaccaagau

SEQ ID NO: 883054 - RNA, 19 nt, Artificial Sequence
  Description of Artificial Sequence: Synthetic oligonucleotide
cauugccgccaaaaccacc

SEQ ID NO: 883055 - RNA, 19 nt, Artificial Sequence
  Description of Artificial Sequence: Synthetic oligonucleotide
gaucgcuucguauuuggau

SEQ ID NO: 883056 - RNA, 19 nt, Artificial Sequence
  Description of Artificial Sequence: Synthetic oligonucleotide
acaauaaccggcaguuuaa

SEQ ID NO: 883057 - RNA, 19 nt, Artificial Sequence
  Description of Artificial Sequence: Synthetic oligonucleotide
gaucagacuauuacauuua

SEQ ID NO: 883058 - RNA, 19 nt, Artificial Sequence
  Description of Artificial Sequence: Synthetic oligonucleotide
augauacacaagcuucauu

SEQ ID NO: 883059 - RNA, 19 nt, Artificial Sequence
  Description of Artificial Sequence: Synthetic oligonucleotide
gagaauuaaaucguuuauu

SEQ ID NO: 883060 - RNA, 19 nt, Artificial Sequence
  Description of Artificial Sequence: Synthetic oligonucleotide
guagcguacgugacaaaac

SEQ ID NO: 883061 - RNA, 19 nt, Artificial Sequence
  Description of Artificial Sequence: Synthetic oligonucleotide
cguuuauugauuacacaug

SEQ ID NO: 883062 - RNA, 19 nt, Artificial Sequence
  Description of Artificial Sequence: Synthetic oligonucleotide
agggaaacgagagccuuca

SEQ ID NO: 883063 - RNA, 19 nt, Artificial Sequence
  Description of Artificial Sequence: Synthetic oligonucleotide
auugucuaacacaugucuu

SEQ ID NO: 883064 - RNA, 19 nt, Artificial Sequence
  Description of Artificial Sequence: Synthetic oligonucleotide
gagccuucagcgaugcuuc

SEQ ID NO: 883065 - RNA, 19 nt, Artificial Sequence
  Description of Artificial Sequence: Synthetic oligonucleotide
agccuucagcgaugcuucc

SEQ ID NO: 883066 - RNA, 19 nt, Artificial Sequence
  Description of Artificial Sequence: Synthetic oligonucleotide
cacaugauaauggaugaua

SEQ ID NO: 883067 - RNA, 19 nt, Artificial Sequence
  Description of Artificial Sequence: Synthetic oligonucleotide
cuucgaccucuuuggcugg

SEQ ID NO: 883068 - RNA, 19 nt, Artificial Sequence
  Description of Artificial Sequence: Synthetic oligonucleotide
guauugucuaacacauguc

SEQ ID NO: 883069 - RNA, 19 nt, Artificial Sequence
  Description of Artificial Sequence: Synthetic oligonucleotide
guccgucaugauuucaauc

SEQ ID NO: 883070 - RNA, 19 nt, Artificial Sequence
  Description of Artificial Sequence: Synthetic oligonucleotide
caugacggcagggaaacga

SEQ ID NO: 883071 - RNA, 19 nt, Artificial Sequence
  Description of Artificial Sequence: Synthetic oligonucleotide
caguuaagugggccccugg

SEQ ID NO: 883072 - RNA, 19 nt, Artificial Sequence
  Description of Artificial Sequence: Synthetic oligonucleotide
ccgacuuagacaugacggc

SEQ ID NO: 883073 - RNA, 19 nt, Artificial Sequence
  Description of Artificial Sequence: Synthetic oligonucleotide
agcuuccgcagcuguuccg

SEQ ID NO: 883074 - RNA, 19 nt, Artificial Sequence
  Description of Artificial Sequence: Synthetic oligonucleotide
ccaaaauugcuuccacuac

SEQ ID NO: 883075 - RNA, 19 nt, Artificial Sequence
  Description of Artificial Sequence: Synthetic oligonucleotide
augacggcagggaaacgag

SEQ ID NO: 883076 - RNA, 19 nt, Artificial Sequence
  Description of Artificial Sequence: Synthetic oligonucleotide
ugguuucgugguuuagcaa

SEQ ID NO: 883077 - RNA, 19 nt, Artificial Sequence
  Description of Artificial Sequence: Synthetic oligonucleotide
uaaccaccgucauuaccaa

SEQ ID NO: 883078 - RNA, 19 nt, Artificial Sequence
  Description of Artificial Sequence: Synthetic oligonucleotide
ucgacuuugcuuggaugac

SEQ ID NO: 883079 - RNA, 19 nt, Artificial Sequence
  Description of Artificial Sequence: Synthetic oligonucleotide
cagaguaacccagggccgc

SEQ ID NO: 883080 - RNA, 19 nt, Artificial Sequence
  Description of Artificial Sequence: Synthetic oligonucleotide
uugcauucauagcggcauc

SEQ ID NO: 883081 - RNA, 19 nt, Artificial Sequence
  Description of Artificial Sequence: Synthetic oligonucleotide
agucggugaguguucccca

SEQ ID NO: 883082 - RNA, 19 nt, Artificial Sequence
  Description of Artificial Sequence: Synthetic oligonucleotide
gaguauugucuaacacaug

SEQ ID NO: 883083 - RNA, 19 nt, Artificial Sequence
  Description of Artificial Sequence: Synthetic oligonucleotide
accggcaguuuaacuacac

SEQ ID NO: 883084 - RNA, 19 nt, Artificial Sequence
  Description of Artificial Sequence: Synthetic oligonucleotide
uuucgugguuuagcaaagu

SEQ ID NO: 883085 - RNA, 19 nt, Artificial Sequence
  Description of Artificial Sequence: Synthetic oligonucleotide
cuuggcugaguucacaaau

SEQ ID NO: 883086 - RNA, 19 nt, Artificial Sequence
  Description of Artificial Sequence: Synthetic oligonucleotide
acucccgccauagccacug

SEQ ID NO: 883087 - RNA, 19 nt, Artificial Sequence
  Description of Artificial Sequence: Synthetic oligonucleotide
agcguacgugacaaaacca

SEQ ID NO: 883088 - RNA, 19 nt, Artificial Sequence
  Description of Artificial Sequence: Synthetic oligonucleotide
agcgucaugaucagacuau

SEQ ID NO: 883089 - RNA, 19 nt, Artificial Sequence
  Description of Artificial Sequence: Synthetic oligonucleotide
cuaggcccugccaccacug

SEQ ID NO: 883090 - RNA, 19 nt, Artificial Sequence
  Description of Artificial Sequence: Synthetic oligonucleotide
ugcuaagcuuuguuuccua

SEQ ID NO: 883091 - RNA, 19 nt, Artificial Sequence
  Description of Artificial Sequence: Synthetic oligonucleotide
aaccaccgucauuaccaaa

SEQ ID NO: 883092 - RNA, 19 nt, Artificial Sequence
  Description of Artificial Sequence: Synthetic oligonucleotide
gcugaguucacaaaucugu

SEQ ID NO: 883093 - RNA, 19 nt, Artificial Sequence
  Description of Artificial Sequence: Synthetic oligonucleotide
ucuguccgucaugauuuca

SEQ ID NO: 883094 - RNA, 19 nt, Artificial Sequence
  Description of Artificial Sequence: Synthetic oligonucleotide
accacggcuaccaccgaag

SEQ ID NO: 883095 - RNA, 19 nt, Artificial Sequence
  Description of Artificial Sequence: Synthetic oligonucleotide
gugaguguuccccauugcu

SEQ ID NO: 883096 - RNA, 19 nt, Artificial Sequence
  Description of Artificial Sequence: Synthetic oligonucleotide
cagggaaacgagagccuuc

SEQ ID NO: 883097 - RNA, 19 nt, Artificial Sequence
  Description of Artificial Sequence: Synthetic oligonucleotide
ugggugacuccgacuuaga

SEQ ID NO: 883098 - RNA, 19 nt, Artificial Sequence
  Description of Artificial Sequence: Synthetic oligonucleotide
uaaccccuguccaccacuu

SEQ ID NO: 883099 - RNA, 19 nt, Artificial Sequence
  Description of Artificial Sequence: Synthetic oligonucleotide
ugcuuggaugacccuuuua

SEQ ID NO: 883100 - RNA, 19 nt, Artificial Sequence
  Description of Artificial Sequence: Synthetic oligonucleotide
uuccgcagcuguuccggcu

SEQ ID NO: 883101 - RNA, 19 nt, Artificial Sequence
  Description of Artificial Sequence: Synthetic oligonucleotide
guaaaacccuuuguuggaa

SEQ ID NO: 883102 - RNA, 19 nt, Artificial Sequence
  Description of Artificial Sequence: Synthetic oligonucleotide
gaagacugauuguuauaau

SEQ ID NO: 883103 - RNA, 19 nt, Artificial Sequence
  Description of Artificial Sequence: Synthetic oligonucleotide
agcuaggcccugccaccac

SEQ ID NO: 883104 - RNA, 19 nt, Artificial Sequence
  Description of Artificial Sequence: Synthetic oligonucleotide
gacucucgucgguuguuuc

SEQ ID NO: 883105 - RNA, 19 nt, Artificial Sequence
  Description of Artificial Sequence: Synthetic oligonucleotide
cacuaccaccgcccaaagc

SEQ ID NO: 883106 - RNA, 19 nt, Artificial Sequence
  Description of Artificial Sequence: Synthetic oligonucleotide
guuuccggaaccacuucga

SEQ ID NO: 883107 - RNA, 19 nt, Artificial Sequence
  Description of Artificial Sequence: Synthetic oligonucleotide
cacaacaauaaccggcagu

SEQ ID NO: 883108 - RNA, 19 nt, Artificial Sequence
  Description of Artificial Sequence: Synthetic oligonucleotide
cucgaccacugaaguuucc

SEQ ID NO: 883109 - RNA, 19 nt, Artificial Sequence
  Description of Artificial Sequence: Synthetic oligonucleotide
uagcuguaauuagaaccuc

SEQ ID NO: 883110 - RNA, 19 nt, Artificial Sequence
  Description of Artificial Sequence: Synthetic oligonucleotide
gcuguuccggcuccuuggg

SEQ ID NO: 883111 - RNA, 19 nt, Artificial Sequence
  Description of Artificial Sequence: Synthetic oligonucleotide
auaagggccggagcuucug

SEQ ID NO: 883112 - RNA, 19 nt, Artificial Sequence
  Description of Artificial Sequence: Synthetic oligonucleotide
uaaucacgaaggugauguu

SEQ ID NO: 883113 - RNA, 19 nt, Artificial Sequence
  Description of Artificial Sequence: Synthetic oligonucleotide
acaguuaagugggccccug

SEQ ID NO: 883114 - RNA, 19 nt, Artificial Sequence
  Description of Artificial Sequence: Synthetic oligonucleotide
uugcuuccacuaccaccgc

SEQ ID NO: 883115 - RNA, 19 nt, Artificial Sequence
  Description of Artificial Sequence: Synthetic oligonucleotide
cuugcauucauagcggcau

SEQ ID NO: 883116 - RNA, 19 nt, Artificial Sequence
  Description of Artificial Sequence: Synthetic oligonucleotide
ggugaguguuccccauugc

SEQ ID NO: 883117 - RNA, 19 nt, Artificial Sequence
  Description of Artificial Sequence: Synthetic oligonucleotide
caccauaagggccggagcu

SEQ ID NO: 883118 - RNA, 19 nt, Artificial Sequence
  Description of Artificial Sequence: Synthetic oligonucleotide
accaccgcccaaagccgcc

SEQ ID NO: 883119 - RNA, 19 nt, Artificial Sequence
  Description of Artificial Sequence: Synthetic oligonucleotide
cccugguuuccauaacccc

SEQ ID NO: 883120 - RNA, 19 nt, Artificial Sequence
  Description of Artificial Sequence: Synthetic oligonucleotide
ccuccagaguaacccaggg

SEQ ID NO: 883121 - RNA, 19 nt, Artificial Sequence
  Description of Artificial Sequence: Synthetic oligonucleotide
aaccggcaguuuaacuaca

SEQ ID NO: 883122 - RNA, 19 nt, Artificial Sequence
  Description of Artificial Sequence: Synthetic oligonucleotide
gggcuuuucucacuucaca

SEQ ID NO: 883123 - RNA, 19 nt, Artificial Sequence
  Description of Artificial Sequence: Synthetic oligonucleotide
gugccaacaaccauuuuau

SEQ ID NO: 883124 - RNA, 19 nt, Artificial Sequence
  Description of Artificial Sequence: Synthetic oligonucleotide
agcaaaguauuggccucca

SEQ ID NO: 883125 - RNA, 19 nt, Artificial Sequence
  Description of Artificial Sequence: Synthetic oligonucleotide
gcucucuuagguuccacaa

SEQ ID NO: 883126 - RNA, 19 nt, Artificial Sequence
  Description of Artificial Sequence: Synthetic oligonucleotide
ccaccaaaguuuccggaac

SEQ ID NO: 883127 - RNA, 19 nt, Artificial Sequence
  Description of Artificial Sequence: Synthetic oligonucleotide
cggcaguuuaacuacacca

SEQ ID NO: 883128 - RNA, 19 nt, Artificial Sequence
  Description of Artificial Sequence: Synthetic oligonucleotide
agcuucauucccaucuguu

SEQ ID NO: 883129 - RNA, 19 nt, Artificial Sequence
  Description of Artificial Sequence: Synthetic oligonucleotide
ggcugaguucacaaaucug

SEQ ID NO: 883130 - RNA, 19 nt, Artificial Sequence
  Description of Artificial Sequence: Synthetic oligonucleotide
gggugacuccgacuuagac

SEQ ID NO: 883131 - RNA, 19 nt, Artificial Sequence
  Description of Artificial Sequence: Synthetic oligonucleotide
ucucgucgguuguuucgaa

SEQ ID NO: 883132 - RNA, 19 nt, Artificial Sequence
  Description of Artificial Sequence: Synthetic oligonucleotide
cuggaucgcuucguauuug

SEQ ID NO: 883133 - RNA, 19 nt, Artificial Sequence
  Description of Artificial Sequence: Synthetic oligonucleotide
gucgguuguuucgaagcuc

SEQ ID NO: 883134 - RNA, 19 nt, Artificial Sequence
  Description of Artificial Sequence: Synthetic oligonucleotide
ggcuucagaguagacuaac

SEQ ID NO: 883135 - RNA, 19 nt, Artificial Sequence
  Description of Artificial Sequence: Synthetic oligonucleotide
acaugacggcagggaaacg

SEQ ID NO: 883136 - RNA, 19 nt, Artificial Sequence
  Description of Artificial Sequence: Synthetic oligonucleotide
cagcgucaugaucagacua

SEQ ID NO: 883137 - RNA, 19 nt, Artificial Sequence
  Description of Artificial Sequence: Synthetic oligonucleotide
gccuugcauucauagcggc

SEQ ID NO: 883138 - RNA, 19 nt, Artificial Sequence
  Description of Artificial Sequence: Synthetic oligonucleotide
cucuguccgucaugauuuc

SEQ ID NO: 883139 - RNA, 19 nt, Artificial Sequence
  Description of Artificial Sequence: Synthetic oligonucleotide
ccuucagcgaugcuuccuc

SEQ ID NO: 883140 - RNA, 19 nt, Artificial Sequence
  Description of Artificial Sequence: Synthetic oligonucleotide
auuuagcaaucaacagcau

SEQ ID NO: 883141 - RNA, 19 nt, Artificial Sequence
  Description of Artificial Sequence: Synthetic oligonucleotide
cugauaccauuauucaauu

SEQ ID NO: 883142 - RNA, 19 nt, Artificial Sequence
  Description of Artificial Sequence: Synthetic oligonucleotide
ccgucaugauuucaaucac

SEQ ID NO: 883143 - RNA, 19 nt, Artificial Sequence
  Description of Artificial Sequence: Synthetic oligonucleotide
ccggcaguuuaacuacacc

SEQ ID NO: 883144 - RNA, 19 nt, Artificial Sequence
  Description of Artificial Sequence: Synthetic oligonucleotide
cuccguuguuauagcuguc

SEQ ID NO: 883145 - RNA, 19 nt, Artificial Sequence
  Description of Artificial Sequence: Synthetic oligonucleotide
cacuucgaccucuuuggcu

SEQ ID NO: 883146 - RNA, 19 nt, Artificial Sequence
  Description of Artificial Sequence: Synthetic oligonucleotide
acgagagccuucagcgaug

SEQ ID NO: 883147 - RNA, 19 nt, Artificial Sequence
  Description of Artificial Sequence: Synthetic oligonucleotide
uucgaccucuuuggcugga

SEQ ID NO: 883148 - RNA, 19 nt, Artificial Sequence
  Description of Artificial Sequence: Synthetic oligonucleotide
accauaagggccggagcuu

SEQ ID NO: 883149 - RNA, 19 nt, Artificial Sequence
  Description of Artificial Sequence: Synthetic oligonucleotide
gcguacgugacaaaaccaa

SEQ ID NO: 883150 - RNA, 19 nt, Artificial Sequence
  Description of Artificial Sequence: Synthetic oligonucleotide
auucagcgucaugaucaga

SEQ ID NO: 883151 - RNA, 19 nt, Artificial Sequence
  Description of Artificial Sequence: Synthetic oligonucleotide
gcuguaauuagaaccuccu

SEQ ID NO: 883152 - RNA, 19 nt, Artificial Sequence
  Description of Artificial Sequence: Synthetic oligonucleotide
ggccauucacaguauggua

SEQ ID NO: 883153 - RNA, 19 nt, Artificial Sequence
  Description of Artificial Sequence: Synthetic oligonucleotide
agacucucgucgguuguuu

SEQ ID NO: 883154 - RNA, 19 nt, Artificial Sequence
  Description of Artificial Sequence: Synthetic oligonucleotide
auagcggcaucuacuucuu

SEQ ID NO: 883155 - RNA, 19 nt, Artificial Sequence
  Description of Artificial Sequence: Synthetic oligonucleotide
gggaaacgagagccuucag

SEQ ID NO: 883156 - RNA, 19 nt, Artificial Sequence
  Description of Artificial Sequence: Synthetic oligonucleotide
gccaccuugguuucguggu

SEQ ID NO: 883157 - RNA, 19 nt, Artificial Sequence
  Description of Artificial Sequence: Synthetic oligonucleotide
cccucgaccaaaguuguca

SEQ ID NO: 883158 - RNA, 19 nt, Artificial Sequence
  Description of Artificial Sequence: Synthetic oligonucleotide
gcaaaguauuggccuccac

SEQ ID NO: 883159 - RNA, 19 nt, Artificial Sequence
  Description of Artificial Sequence: Synthetic oligonucleotide
ccaaaaccaccuccacgac

SEQ ID NO: 883160 - RNA, 19 nt, Artificial Sequence
  Description of Artificial Sequence: Synthetic oligonucleotide
ccuugcauucauagcggca

SEQ ID NO: 883161 - RNA, 19 nt, Artificial Sequence
  Description of Artificial Sequence: Synthetic oligonucleotide
ccuccguuguuauagcugu

SEQ ID NO: 883162 - RNA, 19 nt, Artificial Sequence
  Description of Artificial Sequence: Synthetic oligonucleotide
cuccugcuaagcuuuguuu

SEQ ID NO: 883163 - RNA, 19 nt, Artificial Sequence
  Description of Artificial Sequence: Synthetic oligonucleotide
agugggccccuggucuuug

SEQ ID NO: 883164 - RNA, 19 nt, Artificial Sequence
  Description of Artificial Sequence: Synthetic oligonucleotide
ccacggcuaccaccgaagc

SEQ ID NO: 883165 - RNA, 19 nt, Artificial Sequence
  Description of Artificial Sequence: Synthetic oligonucleotide
ccauuauucaauugauauu

SEQ ID NO: 883166 - RNA, 19 nt, Artificial Sequence
  Description of Artificial Sequence: Synthetic oligonucleotide
ccaccgucauuaccaaauc

SEQ ID NO: 883167 - RNA, 19 nt, Artificial Sequence
  Description of Artificial Sequence: Synthetic oligonucleotide
ccucgaccacugaaguuuc

SEQ ID NO: 883168 - RNA, 19 nt, Artificial Sequence
  Description of Artificial Sequence: Synthetic oligonucleotide
cgacuuugcuuggaugacc

SEQ ID NO: 883169 - RNA, 19 nt, Artificial Sequence
  Description of Artificial Sequence: Synthetic oligonucleotide
gggccccuggucuuugaga

SEQ ID NO: 883170 - RNA, 19 nt, Artificial Sequence
  Description of Artificial Sequence: Synthetic oligonucleotide
caccacggcuaccaccgaa

SEQ ID NO: 883171 - RNA, 19 nt, Artificial Sequence
  Description of Artificial Sequence: Synthetic oligonucleotide
acccuuuguuggaaugcuu

SEQ ID NO: 883172 - RNA, 19 nt, Artificial Sequence
  Description of Artificial Sequence: Synthetic oligonucleotide
uuccggcuccuugggugac

SEQ ID NO: 883173 - RNA, 19 nt, Artificial Sequence
  Description of Artificial Sequence: Synthetic oligonucleotide
cccaagcaauauaaauaaa

SEQ ID NO: 883174 - RNA, 19 nt, Artificial Sequence
  Description of Artificial Sequence: Synthetic oligonucleotide
cguacgugacaaaaccaaa

SEQ ID NO: 883175 - RNA, 19 nt, Artificial Sequence
  Description of Artificial Sequence: Synthetic oligonucleotide
ggaucgcuucguauuugga

SEQ ID NO: 883176 - RNA, 19 nt, Artificial Sequence
  Description of Artificial Sequence: Synthetic oligonucleotide
cugcuaagcuuuguuuccu

SEQ ID NO: 883177 - RNA, 19 nt, Artificial Sequence
  Description of Artificial Sequence: Synthetic oligonucleotide
gcauagggugugccaacaa

SEQ ID NO: 883178 - RNA, 19 nt, Artificial Sequence
  Description of Artificial Sequence: Synthetic oligonucleotide
ccauugcucaaaauggcuu

SEQ ID NO: 883179 - RNA, 19 nt, Artificial Sequence
  Description of Artificial Sequence: Synthetic oligonucleotide
cacauuuauucagcgucau

SEQ ID NO: 883180 - RNA, 19 nt, Artificial Sequence
  Description of Artificial Sequence: Synthetic oligonucleotide
ccuugguuucgugguuuag

SEQ ID NO: 883181 - RNA, 19 nt, Artificial Sequence
  Description of Artificial Sequence: Synthetic oligonucleotide
cucccgccauagccacugc

SEQ ID NO: 883182 - RNA, 19 nt, Artificial Sequence
  Description of Artificial Sequence: Synthetic oligonucleotide
cucccuucauugguccaaa

SEQ ID NO: 883183 - RNA, 19 nt, Artificial Sequence
  Description of Artificial Sequence: Synthetic oligonucleotide
ccgucauuaccaaauccau

SEQ ID NO: 883184 - RNA, 19 nt, Artificial Sequence
  Description of Artificial Sequence: Synthetic oligonucleotide
ccccuguccaccacuucca

SEQ ID NO: 883185 - RNA, 19 nt, Artificial Sequence
  Description of Artificial Sequence: Synthetic oligonucleotide
gaaccacuucgaccucuuu

SEQ ID NO: 883186 - RNA, 19 nt, Artificial Sequence
  Description of Artificial Sequence: Synthetic oligonucleotide
caguagcguacgugacaaa

SEQ ID NO: 883187 - RNA, 19 nt, Artificial Sequence
  Description of Artificial Sequence: Synthetic oligonucleotide
cuuccacaguagcguacgu

SEQ ID NO: 883188 - RNA, 19 nt, Artificial Sequence
  Description of Artificial Sequence: Synthetic oligonucleotide
cuguuguaaccuguagcuu

SEQ ID NO: 883189 - RNA, 19 nt, Artificial Sequence
  Description of Artificial Sequence: Synthetic oligonucleotide
cucgaccaaaguugucauu

SEQ ID NO: 883190 - RNA, 19 nt, Artificial Sequence
  Description of Artificial Sequence: Synthetic oligonucleotide
cgaccucuuuggcuggaug

SEQ ID NO: 883191 - RNA, 19 nt, Artificial Sequence
  Description of Artificial Sequence: Synthetic oligonucleotide
gcuucguauuuggaucucu

SEQ ID NO: 883192 - RNA, 19 nt, Artificial Sequence
  Description of Artificial Sequence: Synthetic oligonucleotide
cacaguuaagugggccccu

SEQ ID NO: 883193 - RNA, 19 nt, Artificial Sequence
  Description of Artificial Sequence: Synthetic oligonucleotide
cccuucauugguccaaaau

SEQ ID NO: 883194 - RNA, 19 nt, Artificial Sequence
  Description of Artificial Sequence: Synthetic oligonucleotide
caccucgaccacugaaguu

SEQ ID NO: 883195 - RNA, 19 nt, Artificial Sequence
  Description of Artificial Sequence: Synthetic oligonucleotide
cgucaugaucagacuauua

SEQ ID NO: 883196 - RNA, 19 nt, Artificial Sequence
  Description of Artificial Sequence: Synthetic oligonucleotide
cccuggaucgcuucguauu

SEQ ID NO: 883197 - RNA, 19 nt, Artificial Sequence
  Description of Artificial Sequence: Synthetic oligonucleotide
caccuugguuucgugguuu

SEQ ID NO: 883198 - RNA, 19 nt, Artificial Sequence
  Description of Artificial Sequence: Synthetic oligonucleotide
cggcuaccaccgaagccac

SEQ ID NO: 883199 - RNA, 19 nt, Artificial Sequence
  Description of Artificial Sequence: Synthetic oligonucleotide
ccuggaucgcuucguauuu

SEQ ID NO: 883200 - RNA, 19 nt, Artificial Sequence
  Description of Artificial Sequence: Synthetic oligonucleotide
guguggccuugcauucaua

SEQ ID NO: 883201 - RNA, 19 nt, Artificial Sequence
  Description of Artificial Sequence: Synthetic oligonucleotide
ccccucgaccaaaguuguc

SEQ ID NO: 883202 - RNA, 19 nt, Artificial Sequence
  Description of Artificial Sequence: Synthetic oligonucleotide
ccguuguuauagcugucau

SEQ ID NO: 883203 - RNA, 19 nt, Artificial Sequence
  Description of Artificial Sequence: Synthetic oligonucleotide
cagacucucgucgguuguu

SEQ ID NO: 883204 - RNA, 19 nt, Artificial Sequence
  Description of Artificial Sequence: Synthetic oligonucleotide
gccccuggaucgcuucgua

SEQ ID NO: 883205 - RNA, 19 nt, Artificial Sequence
  Description of Artificial Sequence: Synthetic oligonucleotide
cgucgguuguuucgaagcu

SEQ ID NO: 883206 - RNA, 19 nt, Artificial Sequence
  Description of Artificial Sequence: Synthetic oligonucleotide
caccaccauaagggccgga

SEQ ID NO: 883207 - RNA, 19 nt, Artificial Sequence
  Description of Artificial Sequence: Synthetic oligonucleotide
gcgucaugaucagacuauu

SEQ ID NO: 883208 - RNA, 19 nt, Artificial Sequence
  Description of Artificial Sequence: Synthetic oligonucleotide
cgcuucguauuuggaucuc

SEQ ID NO: 883209 - RNA, 19 nt, Artificial Sequence
  Description of Artificial Sequence: Synthetic oligonucleotide
ccccuggaucgcuucguau

SEQ ID NO: 883210 - RNA, 19 nt, Artificial Sequence
  Description of Artificial Sequence: Synthetic oligonucleotide
ccgccuccuccguuguuau

SEQ ID NO: 883211 - RNA, 19 nt, Artificial Sequence
  Description of Artificial Sequence: Synthetic oligonucleotide
cuccgccuccuccguuguu

SEQ ID NO: 883212 - RNA, 19 nt, Artificial Sequence
  Description of Artificial Sequence: Synthetic oligonucleotide
ccaccgcccaaagccgccu

SEQ ID NO: 883213 - RNA, 19 nt, Artificial Sequence
  Description of Artificial Sequence: Synthetic oligonucleotide
aaaggaauaaaacucuaag

SEQ ID NO: 883214 - RNA, 19 nt, Artificial Sequence
  Description of Artificial Sequence: Synthetic oligonucleotide
aaaggaauagauuucccag

SEQ ID NO: 883215 - RNA, 19 nt, Artificial Sequence
  Description of Artificial Sequence: Synthetic oligonucleotide
auaaggcugaguuuggugc

SEQ ID NO: 883216 - RNA, 19 nt, Artificial Sequence
  Description of Artificial Sequence: Synthetic oligonucleotide
uuagugaccgccacaaugg

SEQ ID NO: 883217 - RNA, 19 nt, Artificial Sequence
  Description of Artificial Sequence: Synthetic oligonucleotide
uggucaagcgcaaacagag

SEQ ID NO: 883218 - RNA, 19 nt, Artificial Sequence
  Description of Artificial Sequence: Synthetic oligonucleotide
ucugugaucuucuaggccu

SEQ ID NO: 883219 - RNA, 19 nt, Artificial Sequence
  Description of Artificial Sequence: Synthetic oligonucleotide
auaagauucguacuucuug

SEQ ID NO: 883220 - RNA, 19 nt, Artificial Sequence
  Description of Artificial Sequence: Synthetic oligonucleotide
ucgaugcucaacuugcucg

SEQ ID NO: 883221 - RNA, 19 nt, Artificial Sequence
  Description of Artificial Sequence: Synthetic oligonucleotide
aaauuguugccuuccaggu

SEQ ID NO: 883222 - RNA, 19 nt, Artificial Sequence
  Description of Artificial Sequence: Synthetic oligonucleotide
uuuguugccccgauaauca

SEQ ID NO: 883223 - RNA, 19 nt, Artificial Sequence
  Description of Artificial Sequence: Synthetic oligonucleotide
ucaucgaugcucaacuugc

SEQ ID NO: 883224 - RNA, 19 nt, Artificial Sequence
  Description of Artificial Sequence: Synthetic oligonucleotide
gaaguacaccuccucaucg

SEQ ID NO: 883225 - RNA, 19 nt, Artificial Sequence
  Description of Artificial Sequence: Synthetic oligonucleotide
aaucgucuguagcagcuuc

SEQ ID NO: 883226 - RNA, 19 nt, Artificial Sequence
  Description of Artificial Sequence: Synthetic oligonucleotide
ucaagcgcaaacagaggcg

SEQ ID NO: 883227 - RNA, 19 nt, Artificial Sequence
  Description of Artificial Sequence: Synthetic oligonucleotide
acugcgguagaauucaucu

SEQ ID NO: 883228 - RNA, 19 nt, Artificial Sequence
  Description of Artificial Sequence: Synthetic oligonucleotide
cucgcaugguacaugaugc

SEQ ID NO: 883229 - RNA, 19 nt, Artificial Sequence
  Description of Artificial Sequence: Synthetic oligonucleotide
aaggcacucgcccaaagga

SEQ ID NO: 883230 - RNA, 19 nt, Artificial Sequence
  Description of Artificial Sequence: Synthetic oligonucleotide
auaaaacucuaagaaggcg

SEQ ID NO: 883231 - RNA, 19 nt, Artificial Sequence
  Description of Artificial Sequence: Synthetic oligonucleotide
aaaacucuaagaaggcgag

SEQ ID NO: 883232 - RNA, 19 nt, Artificial Sequence
  Description of Artificial Sequence: Synthetic oligonucleotide
ucacaggugcagcucaugg

SEQ ID NO: 883233 - RNA, 19 nt, Artificial Sequence
  Description of Artificial Sequence: Synthetic oligonucleotide
guugcgucaugacagaggc

SEQ ID NO: 883234 - RNA, 19 nt, Artificial Sequence
  Description of Artificial Sequence: Synthetic oligonucleotide
agaugccaggccuaggugg

SEQ ID NO: 883235 - RNA, 19 nt, Artificial Sequence
  Description of Artificial Sequence: Synthetic oligonucleotide
cuuagugaccgccacaaug

SEQ ID NO: 883236 - RNA, 19 nt, Artificial Sequence
  Description of Artificial Sequence: Synthetic oligonucleotide
ucgaagauaguccaccaaa

SEQ ID NO: 883237 - RNA, 19 nt, Artificial Sequence
  Description of Artificial Sequence: Synthetic oligonucleotide
acugacuuuggccacguug

SEQ ID NO: 883238 - RNA, 19 nt, Artificial Sequence
  Description of Artificial Sequence: Synthetic oligonucleotide
uuuaacagacgccugccuc

SEQ ID NO: 883239 - RNA, 19 nt, Artificial Sequence
  Description of Artificial Sequence: Synthetic oligonucleotide
uccucaucgaugcucaacu

SEQ ID NO: 883240 - RNA, 19 nt, Artificial Sequence
  Description of Artificial Sequence: Synthetic oligonucleotide
gucaagcgcaaacagaggc

SEQ ID NO: 883241 - RNA, 19 nt, Artificial Sequence
  Description of Artificial Sequence: Synthetic oligonucleotide
cagagaaggauuccgaaac

SEQ ID NO: 883242 - RNA, 19 nt, Artificial Sequence
  Description of Artificial Sequence: Synthetic oligonucleotide
uaaggcacucgcccaaagg

SEQ ID NO: 883243 - RNA, 19 nt, Artificial Sequence
  Description of Artificial Sequence: Synthetic oligonucleotide
uggaaaauuucuucucucu

SEQ ID NO: 883244 - RNA, 19 nt, Artificial Sequence
  Description of Artificial Sequence: Synthetic oligonucleotide
aauagauuucccagagaag

SEQ ID NO: 883245 - RNA, 19 nt, Artificial Sequence
  Description of Artificial Sequence: Synthetic oligonucleotide
ugugguguagugcuccacc

SEQ ID NO: 883246 - RNA, 19 nt, Artificial Sequence
  Description of Artificial Sequence: Synthetic oligonucleotide
uggguagagaagccgcucg

SEQ ID NO: 883247 - RNA, 19 nt, Artificial Sequence
  Description of Artificial Sequence: Synthetic oligonucleotide
gucuagugagaauuugagg

SEQ ID NO: 883248 - RNA, 19 nt, Artificial Sequence
  Description of Artificial Sequence: Synthetic oligonucleotide
ugaucgaagauaguccacc

SEQ ID NO: 883249 - RNA, 19 nt, Artificial Sequence
  Description of Artificial Sequence: Synthetic oligonucleotide
aagcccuauaggugggugg

SEQ ID NO: 883250 - RNA, 19 nt, Artificial Sequence
  Description of Artificial Sequence: Synthetic oligonucleotide
gugaucggucccuagagag

SEQ ID NO: 883251 - RNA, 19 nt, Artificial Sequence
  Description of Artificial Sequence: Synthetic oligonucleotide
gaugcgguaguguuccacc

SEQ ID NO: 883252 - RNA, 19 nt, Artificial Sequence
  Description of Artificial Sequence: Synthetic oligonucleotide
aagaaggcgagugauggga

SEQ ID NO: 883253 - RNA, 19 nt, Artificial Sequence
  Description of Artificial Sequence: Synthetic oligonucleotide
ugccuucacacccucacgc

SEQ ID NO: 883254 - RNA, 19 nt, Artificial Sequence
  Description of Artificial Sequence: Synthetic oligonucleotide
ugggagugguuuaacagac

SEQ ID NO: 883255 - RNA, 19 nt, Artificial Sequence
  Description of Artificial Sequence: Synthetic oligonucleotide
acgugaucgaagauagucc

SEQ ID NO: 883256 - RNA, 19 nt, Artificial Sequence
  Description of Artificial Sequence: Synthetic oligonucleotide
uauugggagugguuuaaca

SEQ ID NO: 883257 - RNA, 19 nt, Artificial Sequence
  Description of Artificial Sequence: Synthetic oligonucleotide
cuggguacuuucuuucucc

SEQ ID NO: 883258 - RNA, 19 nt, Artificial Sequence
  Description of Artificial Sequence: Synthetic oligonucleotide
uaguguuccaccuugccuu

SEQ ID NO: 883259 - RNA, 19 nt, Artificial Sequence
  Description of Artificial Sequence: Synthetic oligonucleotide
auuccgaaacuccacacau

SEQ ID NO: 883260 - RNA, 19 nt, Artificial Sequence
  Description of Artificial Sequence: Synthetic oligonucleotide
uuauagcccuuuuccaccc

SEQ ID NO: 883261 - RNA, 19 nt, Artificial Sequence
  Description of Artificial Sequence: Synthetic oligonucleotide
gaucggucccuagagagag

SEQ ID NO: 883262 - RNA, 19 nt, Artificial Sequence
  Description of Artificial Sequence: Synthetic oligonucleotide
uguugccccgauaaucacc

SEQ ID NO: 883263 - RNA, 19 nt, Artificial Sequence
  Description of Artificial Sequence: Synthetic oligonucleotide
aauguagagcccacccuuc

SEQ ID NO: 883264 - RNA, 19 nt, Artificial Sequence
  Description of Artificial Sequence: Synthetic oligonucleotide
gauucguacuucuuguaaa

SEQ ID NO: 883265 - RNA, 19 nt, Artificial Sequence
  Description of Artificial Sequence: Synthetic oligonucleotide
uccuucaggggaauucuug

SEQ ID NO: 883266 - RNA, 19 nt, Artificial Sequence
  Description of Artificial Sequence: Synthetic oligonucleotide
uaaggcugaguuuggugcc

SEQ ID NO: 883267 - RNA, 19 nt, Artificial Sequence
  Description of Artificial Sequence: Synthetic oligonucleotide
gggacgacguccuucaggg

SEQ ID NO: 883268 - RNA, 19 nt, Artificial Sequence
  Description of Artificial Sequence: Synthetic oligonucleotide
uggacauggaacacgggau

SEQ ID NO: 883269 - RNA, 19 nt, Artificial Sequence
  Description of Artificial Sequence: Synthetic oligonucleotide
aucgaugcucaacuugcuc

SEQ ID NO: 883270 - RNA, 19 nt, Artificial Sequence
  Description of Artificial Sequence: Synthetic oligonucleotide
ucccgauguacaaaauugu

SEQ ID NO: 883271 - RNA, 19 nt, Artificial Sequence
  Description of Artificial Sequence: Synthetic oligonucleotide
augaggcgagugcagaguc

SEQ ID NO: 883272 - RNA, 19 nt, Artificial Sequence
  Description of Artificial Sequence: Synthetic oligonucleotide
agugccccaagcccuauag

SEQ ID NO: 883273 - RNA, 19 nt, Artificial Sequence
  Description of Artificial Sequence: Synthetic oligonucleotide
agcaucacgucuccaaacu

SEQ ID NO: 883274 - RNA, 19 nt, Artificial Sequence
  Description of Artificial Sequence: Synthetic oligonucleotide
aggccuaccagcccacugg

SEQ ID NO: 883275 - RNA, 19 nt, Artificial Sequence
  Description of Artificial Sequence: Synthetic oligonucleotide
gaaggcgagugaugggagg

SEQ ID NO: 883276 - RNA, 19 nt, Artificial Sequence
  Description of Artificial Sequence: Synthetic oligonucleotide
ugaugaggcgagugcagag

SEQ ID NO: 883277 - RNA, 19 nt, Artificial Sequence
  Description of Artificial Sequence: Synthetic oligonucleotide
agcgcaaacagaggcgacc

SEQ ID NO: 883278 - RNA, 19 nt, Artificial Sequence
  Description of Artificial Sequence: Synthetic oligonucleotide
accacgugaucgaagauag

SEQ ID NO: 883279 - RNA, 19 nt, Artificial Sequence
  Description of Artificial Sequence: Synthetic oligonucleotide
ugccccgauaaucacccag

SEQ ID NO: 883280 - RNA, 19 nt, Artificial Sequence
  Description of Artificial Sequence: Synthetic oligonucleotide
agauucguacuucuuguaa

SEQ ID NO: 883281 - RNA, 19 nt, Artificial Sequence
  Description of Artificial Sequence: Synthetic oligonucleotide
cacgugaucgaagauaguc

SEQ ID NO: 883282 - RNA, 19 nt, Artificial Sequence
  Description of Artificial Sequence: Synthetic oligonucleotide
ugcgucaugacagaggcuu

SEQ ID NO: 883283 - RNA, 19 nt, Artificial Sequence
  Description of Artificial Sequence: Synthetic oligonucleotide
gaccuuugguuugaugagg

SEQ ID NO: 883284 - RNA, 19 nt, Artificial Sequence
  Description of Artificial Sequence: Synthetic oligonucleotide
ccgauaaucacccagcauc

SEQ ID NO: 883285 - RNA, 19 nt, Artificial Sequence
  Description of Artificial Sequence: Synthetic oligonucleotide
ugcauuuaacugcaacuuu

SEQ ID NO: 883286 - RNA, 19 nt, Artificial Sequence
  Description of Artificial Sequence: Synthetic oligonucleotide
guagagaagccgcucggcc

SEQ ID NO: 883287 - RNA, 19 nt, Artificial Sequence
  Description of Artificial Sequence: Synthetic oligonucleotide
ucgcaugguacaugaugcg

SEQ ID NO: 883288 - RNA, 19 nt, Artificial Sequence
  Description of Artificial Sequence: Synthetic oligonucleotide
caacuugcucgcaugguac

SEQ ID NO: 883289 - RNA, 19 nt, Artificial Sequence
  Description of Artificial Sequence: Synthetic oligonucleotide
aacuugcucgcaugguaca

SEQ ID NO: 883290 - RNA, 19 nt, Artificial Sequence
  Description of Artificial Sequence: Synthetic oligonucleotide
acgaccacgugaucgaaga

SEQ ID NO: 883291 - RNA, 19 nt, Artificial Sequence
  Description of Artificial Sequence: Synthetic oligonucleotide
aggcugauuccucccgacc

SEQ ID NO: 883292 - RNA, 19 nt, Artificial Sequence
  Description of Artificial Sequence: Synthetic oligonucleotide
gaugccaggccuagguggg

SEQ ID NO: 883293 - RNA, 19 nt, Artificial Sequence
  Description of Artificial Sequence: Synthetic oligonucleotide
cuaggccuuguccuuacag

SEQ ID NO: 883294 - RNA, 19 nt, Artificial Sequence
  Description of Artificial Sequence: Synthetic oligonucleotide
cuagcaccgaacgaccacg

SEQ ID NO: 883295 - RNA, 19 nt, Artificial Sequence
  Description of Artificial Sequence: Synthetic oligonucleotide
agcugcaugagguucucga

SEQ ID NO: 883296 - RNA, 19 nt, Artificial Sequence
  Description of Artificial Sequence: Synthetic oligonucleotide
guugccccgauaaucaccc

SEQ ID NO: 883297 - RNA, 19 nt, Artificial Sequence
  Description of Artificial Sequence: Synthetic oligonucleotide
cgaaguugcgucaugacag

SEQ ID NO: 883298 - RNA, 19 nt, Artificial Sequence
  Description of Artificial Sequence: Synthetic oligonucleotide
gaaggauuccgaaacucca

SEQ ID NO: 883299 - RNA, 19 nt, Artificial Sequence
  Description of Artificial Sequence: Synthetic oligonucleotide
agagaaggauuccgaaacu

SEQ ID NO: 883300 - RNA, 19 nt, Artificial Sequence
  Description of Artificial Sequence: Synthetic oligonucleotide
aggauuccgaaacuccaca

SEQ ID NO: 883301 - RNA, 19 nt, Artificial Sequence
  Description of Artificial Sequence: Synthetic oligonucleotide
ucgaaguacaccuccucau

SEQ ID NO: 883302 - RNA, 19 nt, Artificial Sequence
  Description of Artificial Sequence: Synthetic oligonucleotide
uugcucgcaugguacauga

SEQ ID NO: 883303 - RNA, 19 nt, Artificial Sequence
  Description of Artificial Sequence: Synthetic oligonucleotide
aagauucguacuucuugua

SEQ ID NO: 883304 - RNA, 19 nt, Artificial Sequence
  Description of Artificial Sequence: Synthetic oligonucleotide
ucacagacgucuagugaga

SEQ ID NO: 883305 - RNA, 19 nt, Artificial Sequence
  Description of Artificial Sequence: Synthetic oligonucleotide
uccaucggcaucuguggug

SEQ ID NO: 883306 - RNA, 19 nt, Artificial Sequence
  Description of Artificial Sequence: Synthetic oligonucleotide
ugaucggucccuagagaga

SEQ ID NO: 883307 - RNA, 19 nt, Artificial Sequence
  Description of Artificial Sequence: Synthetic oligonucleotide
aauaagauucguacuucuu

SEQ ID NO: 883308 - RNA, 19 nt, Artificial Sequence
  Description of Artificial Sequence: Synthetic oligonucleotide
aguugcgucaugacagagg

SEQ ID NO: 883309 - RNA, 19 nt, Artificial Sequence
  Description of Artificial Sequence: Synthetic oligonucleotide
gaucgaagauaguccacca

SEQ ID NO: 883310 - RNA, 19 nt, Artificial Sequence
  Description of Artificial Sequence: Synthetic oligonucleotide
ccuagagagaggcugauuc

SEQ ID NO: 883311 - RNA, 19 nt, Artificial Sequence
  Description of Artificial Sequence: Synthetic oligonucleotide
aggguaguuggugcuuucc

SEQ ID NO: 883312 - RNA, 19 nt, Artificial Sequence
  Description of Artificial Sequence: Synthetic oligonucleotide
guaguuggugcuuucccuc

SEQ ID NO: 883313 - RNA, 19 nt, Artificial Sequence
  Description of Artificial Sequence: Synthetic oligonucleotide
uccuuagccccuucaguga

SEQ ID NO: 883314 - RNA, 19 nt, Artificial Sequence
  Description of Artificial Sequence: Synthetic oligonucleotide
ucgggcacaugcaaacagu

SEQ ID NO: 883315 - RNA, 19 nt, Artificial Sequence
  Description of Artificial Sequence: Synthetic oligonucleotide
gcauuuaacugcaacuuug

SEQ ID NO: 883316 - RNA, 19 nt, Artificial Sequence
  Description of Artificial Sequence: Synthetic oligonucleotide
gugaccgccacaaugguga

SEQ ID NO: 883317 - RNA, 19 nt, Artificial Sequence
  Description of Artificial Sequence: Synthetic oligonucleotide
caugagguucucgaaguac

SEQ ID NO: 883318 - RNA, 19 nt, Artificial Sequence
  Description of Artificial Sequence: Synthetic oligonucleotide
aaguugcgucaugacagag

SEQ ID NO: 883319 - RNA, 19 nt, Artificial Sequence
  Description of Artificial Sequence: Synthetic oligonucleotide
ccgauguacaaaauuguug

SEQ ID NO: 883320 - RNA, 19 nt, Artificial Sequence
  Description of Artificial Sequence: Synthetic oligonucleotide
agucccgauguacaaaauu

SEQ ID NO: 883321 - RNA, 19 nt, Artificial Sequence
  Description of Artificial Sequence: Synthetic oligonucleotide
agcccuauagguggguggg

SEQ ID NO: 883322 - RNA, 19 nt, Artificial Sequence
  Description of Artificial Sequence: Synthetic oligonucleotide
uggguaaggcacucgccca

SEQ ID NO: 883323 - RNA, 19 nt, Artificial Sequence
  Description of Artificial Sequence: Synthetic oligonucleotide
agguauuccauggccucac

SEQ ID NO: 883324 - RNA, 19 nt, Artificial Sequence
  Description of Artificial Sequence: Synthetic oligonucleotide
guggguccauaagagaugc

SEQ ID NO: 883325 - RNA, 19 nt, Artificial Sequence
  Description of Artificial Sequence: Synthetic oligonucleotide
gaauucaucuugggcggcc

SEQ ID NO: 883326 - RNA, 19 nt, Artificial Sequence
  Description of Artificial Sequence: Synthetic oligonucleotide
aauucaucuugggcggcca

SEQ ID NO: 883327 - RNA, 19 nt, Artificial Sequence
  Description of Artificial Sequence: Synthetic oligonucleotide
uaacagacgccugccucgg

SEQ ID NO: 883328 - RNA, 19 nt, Artificial Sequence
  Description of Artificial Sequence: Synthetic oligonucleotide
ugguuugaugaggcgagug

SEQ ID NO: 883329 - RNA, 19 nt, Artificial Sequence
  Description of Artificial Sequence: Synthetic oligonucleotide
acauggaacacgggauggg

SEQ ID NO: 883330 - RNA, 19 nt, Artificial Sequence
  Description of Artificial Sequence: Synthetic oligonucleotide
gaaguugcgucaugacaga

SEQ ID NO: 883331 - RNA, 19 nt, Artificial Sequence
  Description of Artificial Sequence: Synthetic oligonucleotide
gacgucuagugagaauuug

SEQ ID NO: 883332 - RNA, 19 nt, Artificial Sequence
  Description of Artificial Sequence: Synthetic oligonucleotide
aguguguaguccccagggu

SEQ ID NO: 883333 - RNA, 19 nt, Artificial Sequence
  Description of Artificial Sequence: Synthetic oligonucleotide
uguagagcccacccuucuc

SEQ ID NO: 883334 - RNA, 19 nt, Artificial Sequence
  Description of Artificial Sequence: Synthetic oligonucleotide
acccucacgcuucuggaca

SEQ ID NO: 883335 - RNA, 19 nt, Artificial Sequence
  Description of Artificial Sequence: Synthetic oligonucleotide
aguacaccuccucaucgau

SEQ ID NO: 883336 - RNA, 19 nt, Artificial Sequence
  Description of Artificial Sequence: Synthetic oligonucleotide
aacgaccacgugaucgaag

SEQ ID NO: 883337 - RNA, 19 nt, Artificial Sequence
  Description of Artificial Sequence: Synthetic oligonucleotide
guacauuccgggcagccaa

SEQ ID NO: 883338 - RNA, 19 nt, Artificial Sequence
  Description of Artificial Sequence: Synthetic oligonucleotide
cuccgccuagcaccgaacg

SEQ ID NO: 883339 - RNA, 19 nt, Artificial Sequence
  Description of Artificial Sequence: Synthetic oligonucleotide
uuccgaaacuccacacauc

SEQ ID NO: 883340 - RNA, 19 nt, Artificial Sequence
  Description of Artificial Sequence: Synthetic oligonucleotide
aucgaagauaguccaccaa

SEQ ID NO: 883341 - RNA, 19 nt, Artificial Sequence
  Description of Artificial Sequence: Synthetic oligonucleotide
uggugcuuucccucaccag

SEQ ID NO: 883342 - RNA, 19 nt, Artificial Sequence
  Description of Artificial Sequence: Synthetic oligonucleotide
uccgccuagcaccgaacga

SEQ ID NO: 883343 - RNA, 19 nt, Artificial Sequence
  Description of Artificial Sequence: Synthetic oligonucleotide
guuggugcuuucccucacc

SEQ ID NO: 883344 - RNA, 19 nt, Artificial Sequence
  Description of Artificial Sequence: Synthetic oligonucleotide
ucgcccaaaggaauagauu

SEQ ID NO: 883345 - RNA, 19 nt, Artificial Sequence
  Description of Artificial Sequence: Synthetic oligonucleotide
guaaggcacucgcccaaag

SEQ ID NO: 883346 - RNA, 19 nt, Artificial Sequence
  Description of Artificial Sequence: Synthetic oligonucleotide
uuccacccgagggacgacg

SEQ ID NO: 883347 - RNA, 19 nt, Artificial Sequence
  Description of Artificial Sequence: Synthetic oligonucleotide
ccccaagcccuauaggugg

SEQ ID NO: 883348 - RNA, 19 nt, Artificial Sequence
  Description of Artificial Sequence: Synthetic oligonucleotide
uagugaccgccacaauggu

SEQ ID NO: 883349 - RNA, 19 nt, Artificial Sequence
  Description of Artificial Sequence: Synthetic oligonucleotide
aagcgcaaacagaggcgac

SEQ ID NO: 883350 - RNA, 19 nt, Artificial Sequence
  Description of Artificial Sequence: Synthetic oligonucleotide
ugcaacuuuguugccccga

SEQ ID NO: 883351 - RNA, 19 nt, Artificial Sequence
  Description of Artificial Sequence: Synthetic oligonucleotide
aaccagggcauaaggcuga

SEQ ID NO: 883352 - RNA, 19 nt, Artificial Sequence
  Description of Artificial Sequence: Synthetic oligonucleotide
acgucuagugagaauuuga

SEQ ID NO: 883353 - RNA, 19 nt, Artificial Sequence
  Description of Artificial Sequence: Synthetic oligonucleotide
auaguccaccaaacucccc

SEQ ID NO: 883354 - RNA, 19 nt, Artificial Sequence
  Description of Artificial Sequence: Synthetic oligonucleotide
ugaugcgguaguguuccac

SEQ ID NO: 883355 - RNA, 19 nt, Artificial Sequence
  Description of Artificial Sequence: Synthetic oligonucleotide
ccgaacgaccacgugaucg

SEQ ID NO: 883356 - RNA, 19 nt, Artificial Sequence
  Description of Artificial Sequence: Synthetic oligonucleotide
gguuuaacagacgccugcc

SEQ ID NO: 883357 - RNA, 19 nt, Artificial Sequence
  Description of Artificial Sequence: Synthetic oligonucleotide
uggcgguguuccucuauug

SEQ ID NO: 883358 - RNA, 19 nt, Artificial Sequence
  Description of Artificial Sequence: Synthetic oligonucleotide
cucacgcuucuggacauag

SEQ ID NO: 883359 - RNA, 19 nt, Artificial Sequence
  Description of Artificial Sequence: Synthetic oligonucleotide
gaggccuaccagcccacug

SEQ ID NO: 883360 - RNA, 19 nt, Artificial Sequence
  Description of Artificial Sequence: Synthetic oligonucleotide
acuuuguugccccgauaau

SEQ ID NO: 883361 - RNA, 19 nt, Artificial Sequence
  Description of Artificial Sequence: Synthetic oligonucleotide
cugccuucacacccucacg

SEQ ID NO: 883362 - RNA, 19 nt, Artificial Sequence
  Description of Artificial Sequence: Synthetic oligonucleotide
uccaucuuauagcccuuuu

SEQ ID NO: 883363 - RNA, 19 nt, Artificial Sequence
  Description of Artificial Sequence: Synthetic oligonucleotide
agaaggcgagugaugggag

SEQ ID NO: 883364 - RNA, 19 nt, Artificial Sequence
  Description of Artificial Sequence: Synthetic oligonucleotide
ugggccguguggcagcauc

SEQ ID NO: 883365 - RNA, 19 nt, Artificial Sequence
  Description of Artificial Sequence: Synthetic oligonucleotide
guguguaguccccagggua

SEQ ID NO: 883366 - RNA, 19 nt, Artificial Sequence
  Description of Artificial Sequence: Synthetic oligonucleotide
uccggggcauccaucuuau

SEQ ID NO: 883367 - RNA, 19 nt, Artificial Sequence
  Description of Artificial Sequence: Synthetic oligonucleotide
agacgccugccucgggcac

SEQ ID NO: 883368 - RNA, 19 nt, Artificial Sequence
  Description of Artificial Sequence: Synthetic oligonucleotide
gcauccaucuuauagcccu

SEQ ID NO: 883369 - RNA, 19 nt, Artificial Sequence
  Description of Artificial Sequence: Synthetic oligonucleotide
caagcgcaaacagaggcga

SEQ ID NO: 883370 - RNA, 19 nt, Artificial Sequence
  Description of Artificial Sequence: Synthetic oligonucleotide
gggaauucuuggguaaggc

SEQ ID NO: 883371 - RNA, 19 nt, Artificial Sequence
  Description of Artificial Sequence: Synthetic oligonucleotide
gaccacgugaucgaagaua

SEQ ID NO: 883372 - RNA, 19 nt, Artificial Sequence
  Description of Artificial Sequence: Synthetic oligonucleotide
ucuaggccuuguccuuaca

SEQ ID NO: 883373 - RNA, 19 nt, Artificial Sequence
  Description of Artificial Sequence: Synthetic oligonucleotide
cacugcgguagaauucauc

SEQ ID NO: 883374 - RNA, 19 nt, Artificial Sequence
  Description of Artificial Sequence: Synthetic oligonucleotide
ugcucccgugugauuuugc

SEQ ID NO: 883375 - RNA, 19 nt, Artificial Sequence
  Description of Artificial Sequence: Synthetic oligonucleotide
uagcaccgaacgaccacgu

SEQ ID NO: 883376 - RNA, 19 nt, Artificial Sequence
  Description of Artificial Sequence: Synthetic oligonucleotide
cuugcucgcaugguacaug

SEQ ID NO: 883377 - RNA, 19 nt, Artificial Sequence
  Description of Artificial Sequence: Synthetic oligonucleotide
ucacgcuucuggacauagu

SEQ ID NO: 883378 - RNA, 19 nt, Artificial Sequence
  Description of Artificial Sequence: Synthetic oligonucleotide
acguuguccucggacacca

SEQ ID NO: 883379 - RNA, 19 nt, Artificial Sequence
  Description of Artificial Sequence: Synthetic oligonucleotide
gcaccgaacgaccacguga

SEQ ID NO: 883380 - RNA, 19 nt, Artificial Sequence
  Description of Artificial Sequence: Synthetic oligonucleotide
ccuauaggugggugggucc

SEQ ID NO: 883381 - RNA, 19 nt, Artificial Sequence
  Description of Artificial Sequence: Synthetic oligonucleotide
ugugccgaaguugcgucau

SEQ ID NO: 883382 - RNA, 19 nt, Artificial Sequence
  Description of Artificial Sequence: Synthetic oligonucleotide
cugugacaauguagagccc

SEQ ID NO: 883383 - RNA, 19 nt, Artificial Sequence
  Description of Artificial Sequence: Synthetic oligonucleotide
agugaccgccacaauggug

SEQ ID NO: 883384 - RNA, 19 nt, Artificial Sequence
  Description of Artificial Sequence: Synthetic oligonucleotide
ggggaauucuuggguaagg

SEQ ID NO: 883385 - RNA, 19 nt, Artificial Sequence
  Description of Artificial Sequence: Synthetic oligonucleotide
gaggcgaccgaggcaacac

SEQ ID NO: 883386 - RNA, 19 nt, Artificial Sequence
  Description of Artificial Sequence: Synthetic oligonucleotide
guacaccuccucaucgaug

SEQ ID NO: 883387 - RNA, 19 nt, Artificial Sequence
  Description of Artificial Sequence: Synthetic oligonucleotide
ugcuuucccucaccaggaa

SEQ ID NO: 883388 - RNA, 19 nt, Artificial Sequence
  Description of Artificial Sequence: Synthetic oligonucleotide
ucggccugcucccguguga

SEQ ID NO: 883389 - RNA, 19 nt, Artificial Sequence
  Description of Artificial Sequence: Synthetic oligonucleotide
gaaggugggccguguggca

SEQ ID NO: 883390 - RNA, 19 nt, Artificial Sequence
  Description of Artificial Sequence: Synthetic oligonucleotide
cucguagacugcggguggg

SEQ ID NO: 883391 - RNA, 19 nt, Artificial Sequence
  Description of Artificial Sequence: Synthetic oligonucleotide
cacucgcccaaaggaauag

SEQ ID NO: 883392 - RNA, 19 nt, Artificial Sequence
  Description of Artificial Sequence: Synthetic oligonucleotide
caguucaaguucaggccca

SEQ ID NO: 883393 - RNA, 19 nt, Artificial Sequence
  Description of Artificial Sequence: Synthetic oligonucleotide
agcaccgaacgaccacgug

SEQ ID NO: 883394 - RNA, 19 nt, Artificial Sequence
  Description of Artificial Sequence: Synthetic oligonucleotide
cuucauaaccucguagacu

SEQ ID NO: 883395 - RNA, 19 nt, Artificial Sequence
  Description of Artificial Sequence: Synthetic oligonucleotide
gcgcaaacagaggcgaccg

SEQ ID NO: 883396 - RNA, 19 nt, Artificial Sequence
  Description of Artificial Sequence: Synthetic oligonucleotide
ggucaagcgcaaacagagg

SEQ ID NO: 883397 - RNA, 19 nt, Artificial Sequence
  Description of Artificial Sequence: Synthetic oligonucleotide
caagcccuauaggugggug

SEQ ID NO: 883398 - RNA, 19 nt, Artificial Sequence
  Description of Artificial Sequence: Synthetic oligonucleotide
accgaacgaccacgugauc

SEQ ID NO: 883399 - RNA, 19 nt, Artificial Sequence
  Description of Artificial Sequence: Synthetic oligonucleotide
gugaucgaagauaguccac

SEQ ID NO: 883400 - RNA, 19 nt, Artificial Sequence
  Description of Artificial Sequence: Synthetic oligonucleotide
ggcucaguucaaguucagg

SEQ ID NO: 883401 - RNA, 19 nt, Artificial Sequence
  Description of Artificial Sequence: Synthetic oligonucleotide
cucuauugggagugguuua

SEQ ID NO: 883402 - RNA, 19 nt, Artificial Sequence
  Description of Artificial Sequence: Synthetic oligonucleotide
ggcauaaggcugaguuugg

SEQ ID NO: 883403 - RNA, 19 nt, Artificial Sequence
  Description of Artificial Sequence: Synthetic oligonucleotide
cuaggcggaggcagagguc

SEQ ID NO: 883404 - RNA, 19 nt, Artificial Sequence
  Description of Artificial Sequence: Synthetic oligonucleotide
guccucggacaccaguaca

SEQ ID NO: 883405 - RNA, 19 nt, Artificial Sequence
  Description of Artificial Sequence: Synthetic oligonucleotide
cuauaggugggugggucca

SEQ ID NO: 883406 - RNA, 19 nt, Artificial Sequence
  Description of Artificial Sequence: Synthetic oligonucleotide
cacguuguccucggacacc

SEQ ID NO: 883407 - RNA, 19 nt, Artificial Sequence
  Description of Artificial Sequence: Synthetic oligonucleotide
gcccucacggcccacuuug

SEQ ID NO: 883408 - RNA, 19 nt, Artificial Sequence
  Description of Artificial Sequence: Synthetic oligonucleotide
gaugaggcgagugcagagu

SEQ ID NO: 883409 - RNA, 19 nt, Artificial Sequence
  Description of Artificial Sequence: Synthetic oligonucleotide
caucugugguguagugcuc

SEQ ID NO: 883410 - RNA, 19 nt, Artificial Sequence
  Description of Artificial Sequence: Synthetic oligonucleotide
caauguagagcccacccuu

SEQ ID NO: 883411 - RNA, 19 nt, Artificial Sequence
  Description of Artificial Sequence: Synthetic oligonucleotide
cagacgucuagugagaauu

SEQ ID NO: 883412 - RNA, 19 nt, Artificial Sequence
  Description of Artificial Sequence: Synthetic oligonucleotide
gguaguuggugcuuucccu

SEQ ID NO: 883413 - RNA, 19 nt, Artificial Sequence
  Description of Artificial Sequence: Synthetic oligonucleotide
gaugcucaacuugcucgca

SEQ ID NO: 883414 - RNA, 19 nt, Artificial Sequence
  Description of Artificial Sequence: Synthetic oligonucleotide
cgugaucgaagauagucca

SEQ ID NO: 883415 - RNA, 19 nt, Artificial Sequence
  Description of Artificial Sequence: Synthetic oligonucleotide
gguccuuagugaccgccac

SEQ ID NO: 883416 - RNA, 19 nt, Artificial Sequence
  Description of Artificial Sequence: Synthetic oligonucleotide
ggugaucggucccuagaga

SEQ ID NO: 883417 - RNA, 19 nt, Artificial Sequence
  Description of Artificial Sequence: Synthetic oligonucleotide
cgaugcucaacuugcucgc

SEQ ID NO: 883418 - RNA, 19 nt, Artificial Sequence
  Description of Artificial Sequence: Synthetic oligonucleotide
acuugcucgcaugguacau

SEQ ID NO: 883419 - RNA, 19 nt, Artificial Sequence
  Description of Artificial Sequence: Synthetic oligonucleotide
cacgcuucuggacauaguu

SEQ ID NO: 883420 - RNA, 19 nt, Artificial Sequence
  Description of Artificial Sequence: Synthetic oligonucleotide
gaacaggcccgucucuggu

SEQ ID NO: 883421 - RNA, 19 nt, Artificial Sequence
  Description of Artificial Sequence: Synthetic oligonucleotide
gcugugccgaaguugcguc

SEQ ID NO: 883422 - RNA, 19 nt, Artificial Sequence
  Description of Artificial Sequence: Synthetic oligonucleotide
cccaaucgucuguagcagc

SEQ ID NO: 883423 - RNA, 19 nt, Artificial Sequence
  Description of Artificial Sequence: Synthetic oligonucleotide
aagucccgauguacaaaau

SEQ ID NO: 883424 - RNA, 19 nt, Artificial Sequence
  Description of Artificial Sequence: Synthetic oligonucleotide
ccucguagacugcgggugg

SEQ ID NO: 883425 - RNA, 19 nt, Artificial Sequence
  Description of Artificial Sequence: Synthetic oligonucleotide
caggaaggugggccgugug

SEQ ID NO: 883426 - RNA, 19 nt, Artificial Sequence
  Description of Artificial Sequence: Synthetic oligonucleotide
ggccacguuguccucggac

SEQ ID NO: 883427 - RNA, 19 nt, Artificial Sequence
  Description of Artificial Sequence: Synthetic oligonucleotide
cucgcccaaaggaauagau

SEQ ID NO: 883428 - RNA, 19 nt, Artificial Sequence
  Description of Artificial Sequence: Synthetic oligonucleotide
gcaguggcaucauucuuaa

SEQ ID NO: 883429 - RNA, 19 nt, Artificial Sequence
  Description of Artificial Sequence: Synthetic oligonucleotide
acucgcccaaaggaauaga

SEQ ID NO: 883430 - RNA, 19 nt, Artificial Sequence
  Description of Artificial Sequence: Synthetic oligonucleotide
uuguaccaguuuggguccu

SEQ ID NO: 883431 - RNA, 19 nt, Artificial Sequence
  Description of Artificial Sequence: Synthetic oligonucleotide
guccggggcauccaucuua

SEQ ID NO: 883432 - RNA, 19 nt, Artificial Sequence
  Description of Artificial Sequence: Synthetic oligonucleotide
ggcaguggcaucauucuua

SEQ ID NO: 883433 - RNA, 19 nt, Artificial Sequence
  Description of Artificial Sequence: Synthetic oligonucleotide
uuuuggcgguguuccucua

SEQ ID NO: 883434 - RNA, 19 nt, Artificial Sequence
  Description of Artificial Sequence: Synthetic oligonucleotide
ugcucgcaugguacaugau

SEQ ID NO: 883435 - RNA, 19 nt, Artificial Sequence
  Description of Artificial Sequence: Synthetic oligonucleotide
aggcacucgcccaaaggaa

SEQ ID NO: 883436 - RNA, 19 nt, Artificial Sequence
  Description of Artificial Sequence: Synthetic oligonucleotide
cuugacgggcaguuugccu

SEQ ID NO: 883437 - RNA, 19 nt, Artificial Sequence
  Description of Artificial Sequence: Synthetic oligonucleotide
gcgaccgaggcaacacugg

SEQ ID NO: 883438 - RNA, 19 nt, Artificial Sequence
  Description of Artificial Sequence: Synthetic oligonucleotide
uguaguccccaggguaguu

SEQ ID NO: 883439 - RNA, 19 nt, Artificial Sequence
  Description of Artificial Sequence: Synthetic oligonucleotide
gccccgauaaucacccagc

SEQ ID NO: 883440 - RNA, 19 nt, Artificial Sequence
  Description of Artificial Sequence: Synthetic oligonucleotide
caccgaacgaccacgugau

SEQ ID NO: 883441 - RNA, 19 nt, Artificial Sequence
  Description of Artificial Sequence: Synthetic oligonucleotide
cugugccgaaguugcguca

SEQ ID NO: 883442 - RNA, 19 nt, Artificial Sequence
  Description of Artificial Sequence: Synthetic oligonucleotide
aucggucccuagagagagg

SEQ ID NO: 883443 - RNA, 19 nt, Artificial Sequence
  Description of Artificial Sequence: Synthetic oligonucleotide
agacgucuagugagaauuu

SEQ ID NO: 883444 - RNA, 19 nt, Artificial Sequence
  Description of Artificial Sequence: Synthetic oligonucleotide
gccgaaguugcgucaugac

SEQ ID NO: 883445 - RNA, 19 nt, Artificial Sequence
  Description of Artificial Sequence: Synthetic oligonucleotide
acgacguccuucaggggaa

SEQ ID NO: 883446 - RNA, 19 nt, Artificial Sequence
  Description of Artificial Sequence: Synthetic oligonucleotide
ccgccuagcaccgaacgac

SEQ ID NO: 883447 - RNA, 19 nt, Artificial Sequence
  Description of Artificial Sequence: Synthetic oligonucleotide
caggcccgucucugguggg

SEQ ID NO: 883448 - RNA, 19 nt, Artificial Sequence
  Description of Artificial Sequence: Synthetic oligonucleotide
auccaucuuauagcccuuu

SEQ ID NO: 883449 - RNA, 19 nt, Artificial Sequence
  Description of Artificial Sequence: Synthetic oligonucleotide
ccacguuguccucggacac

SEQ ID NO: 883450 - RNA, 19 nt, Artificial Sequence
  Description of Artificial Sequence: Synthetic oligonucleotide
uugccccgauaaucaccca

SEQ ID NO: 883451 - RNA, 19 nt, Artificial Sequence
  Description of Artificial Sequence: Synthetic oligonucleotide
gaacgaccacgugaucgaa

SEQ ID NO: 883452 - RNA, 19 nt, Artificial Sequence
  Description of Artificial Sequence: Synthetic oligonucleotide
cucacggcccacuuuguuu

SEQ ID NO: 883453 - RNA, 19 nt, Artificial Sequence
  Description of Artificial Sequence: Synthetic oligonucleotide
cacagacgucuagugagaa

SEQ ID NO: 883454 - RNA, 19 nt, Artificial Sequence
  Description of Artificial Sequence: Synthetic oligonucleotide
uuuccacccgagggacgac

SEQ ID NO: 883455 - RNA, 19 nt, Artificial Sequence
  Description of Artificial Sequence: Synthetic oligonucleotide
gccguguggcagcauccag

SEQ ID NO: 883456 - RNA, 19 nt, Artificial Sequence
  Description of Artificial Sequence: Synthetic oligonucleotide
gcaugguacaugaugcggu

SEQ ID NO: 883457 - RNA, 19 nt, Artificial Sequence
  Description of Artificial Sequence: Synthetic oligonucleotide
gcacaugcaaacagugcaa

SEQ ID NO: 883458 - RNA, 19 nt, Artificial Sequence
  Description of Artificial Sequence: Synthetic oligonucleotide
ggcgagugcagaguccauc

SEQ ID NO: 883459 - RNA, 19 nt, Artificial Sequence
  Description of Artificial Sequence: Synthetic oligonucleotide
ggguaaggcacucgcccaa

SEQ ID NO: 883460 - RNA, 19 nt, Artificial Sequence
  Description of Artificial Sequence: Synthetic oligonucleotide
cugccucgggcacaugcaa

SEQ ID NO: 883461 - RNA, 19 nt, Artificial Sequence
  Description of Artificial Sequence: Synthetic oligonucleotide
ccaaucgucuguagcagcu

SEQ ID NO: 883462 - RNA, 19 nt, Artificial Sequence
  Description of Artificial Sequence: Synthetic oligonucleotide
cugcgggugggcagccguc

SEQ ID NO: 883463 - RNA, 19 nt, Artificial Sequence
  Description of Artificial Sequence: Synthetic oligonucleotide
guccaucggcaucuguggu

SEQ ID NO: 883464 - RNA, 19 nt, Artificial Sequence
  Description of Artificial Sequence: Synthetic oligonucleotide
cgaacgaccacgugaucga

SEQ ID NO: 883465 - RNA, 19 nt, Artificial Sequence
  Description of Artificial Sequence: Synthetic oligonucleotide
cgccuagcaccgaacgacc

SEQ ID NO: 883466 - RNA, 19 nt, Artificial Sequence
  Description of Artificial Sequence: Synthetic oligonucleotide
cccuauagguggguggguc

SEQ ID NO: 883467 - RNA, 19 nt, Artificial Sequence
  Description of Artificial Sequence: Synthetic oligonucleotide
cuuacaggcccagggccua

SEQ ID NO: 883468 - RNA, 19 nt, Artificial Sequence
  Description of Artificial Sequence: Synthetic oligonucleotide
cuuagccccuucagugagu

SEQ ID NO: 883469 - RNA, 19 nt, Artificial Sequence
  Description of Artificial Sequence: Synthetic oligonucleotide
guaccaguuuggguccuua

SEQ ID NO: 883470 - RNA, 19 nt, Artificial Sequence
  Description of Artificial Sequence: Synthetic oligonucleotide
cucgaagcugcaggaaggu

SEQ ID NO: 883471 - RNA, 19 nt, Artificial Sequence
  Description of Artificial Sequence: Synthetic oligonucleotide
ggcgagugaugggaggcca

SEQ ID NO: 883472 - RNA, 19 nt, Artificial Sequence
  Description of Artificial Sequence: Synthetic oligonucleotide
cucaacuugcucgcauggu

SEQ ID NO: 883473 - RNA, 19 nt, Artificial Sequence
  Description of Artificial Sequence: Synthetic oligonucleotide
caacauggucaagcgcaaa

SEQ ID NO: 883474 - RNA, 19 nt, Artificial Sequence
  Description of Artificial Sequence: Synthetic oligonucleotide
ccuaggcggaggcagaggu

SEQ ID NO: 883475 - RNA, 19 nt, Artificial Sequence
  Description of Artificial Sequence: Synthetic oligonucleotide
ucccgaccccaggggcagg

SEQ ID NO: 883476 - RNA, 19 nt, Artificial Sequence
  Description of Artificial Sequence: Synthetic oligonucleotide
gcaacuuuguugccccgau

SEQ ID NO: 883477 - RNA, 19 nt, Artificial Sequence
  Description of Artificial Sequence: Synthetic oligonucleotide
gguaaggcacucgcccaaa

SEQ ID NO: 883478 - RNA, 19 nt, Artificial Sequence
  Description of Artificial Sequence: Synthetic oligonucleotide
cccgauguacaaaauuguu

SEQ ID NO: 883479 - RNA, 19 nt, Artificial Sequence
  Description of Artificial Sequence: Synthetic oligonucleotide
ggcacucgcccaaaggaau

SEQ ID NO: 883480 - RNA, 19 nt, Artificial Sequence
  Description of Artificial Sequence: Synthetic oligonucleotide
acgccugccucgggcacau

SEQ ID NO: 883481 - RNA, 19 nt, Artificial Sequence
  Description of Artificial Sequence: Synthetic oligonucleotide
gccuagcaccgaacgacca

SEQ ID NO: 883482 - RNA, 19 nt, Artificial Sequence
  Description of Artificial Sequence: Synthetic oligonucleotide
ccaagucccgauguacaaa

SEQ ID NO: 883483 - RNA, 19 nt, Artificial Sequence
  Description of Artificial Sequence: Synthetic oligonucleotide
aggcaacacuggacaugga

SEQ ID NO: 883484 - RNA, 19 nt, Artificial Sequence
  Description of Artificial Sequence: Synthetic oligonucleotide
caucuugggcggccacugu

SEQ ID NO: 883485 - RNA, 19 nt, Artificial Sequence
  Description of Artificial Sequence: Synthetic oligonucleotide
ccaucggcaucuguggugu

SEQ ID NO: 883486 - RNA, 19 nt, Artificial Sequence
  Description of Artificial Sequence: Synthetic oligonucleotide
gcgucaugacagaggcuuc

SEQ ID NO: 883487 - RNA, 19 nt, Artificial Sequence
  Description of Artificial Sequence: Synthetic oligonucleotide
cgaccgaggcaacacugga

SEQ ID NO: 883488 - RNA, 19 nt, Artificial Sequence
  Description of Artificial Sequence: Synthetic oligonucleotide
gacguccuucaggggaauu

SEQ ID NO: 883489 - RNA, 19 nt, Artificial Sequence
  Description of Artificial Sequence: Synthetic oligonucleotide
caucggcaucuguggugua

SEQ ID NO: 883490 - RNA, 19 nt, Artificial Sequence
  Description of Artificial Sequence: Synthetic oligonucleotide
gcgagugaugggaggccaa

SEQ ID NO: 883491 - RNA, 19 nt, Artificial Sequence
  Description of Artificial Sequence: Synthetic oligonucleotide
cagccguccggggcaucca

SEQ ID NO: 883492 - RNA, 19 nt, Artificial Sequence
  Description of Artificial Sequence: Synthetic oligonucleotide
caguggcaucauucuuaau

SEQ ID NO: 883493 - RNA, 19 nt, Artificial Sequence
  Description of Artificial Sequence: Synthetic oligonucleotide
cgcaaacagaggcgaccga

SEQ ID NO: 883494 - RNA, 19 nt, Artificial Sequence
  Description of Artificial Sequence: Synthetic oligonucleotide
ggcccgucucuggugggua

SEQ ID NO: 883495 - RNA, 19 nt, Artificial Sequence
  Description of Artificial Sequence: Synthetic oligonucleotide
cccucacgcuucuggacau

SEQ ID NO: 883496 - RNA, 19 nt, Artificial Sequence
  Description of Artificial Sequence: Synthetic oligonucleotide
ccacgugaucgaagauagu

SEQ ID NO: 883497 - RNA, 19 nt, Artificial Sequence
  Description of Artificial Sequence: Synthetic oligonucleotide
ccgaccccaggggcaggac

SEQ ID NO: 883498 - RNA, 19 nt, Artificial Sequence
  Description of Artificial Sequence: Synthetic oligonucleotide
gcccuauaggugggugggu

SEQ ID NO: 883499 - RNA, 19 nt, Artificial Sequence
  Description of Artificial Sequence: Synthetic oligonucleotide
cccgaccccaggggcagga

SEQ ID NO: 883500 - RNA, 19 nt, Artificial Sequence
  Description of Artificial Sequence: Synthetic oligonucleotide
cacugacuuuggccacguu

SEQ ID NO: 883501 - RNA, 19 nt, Artificial Sequence
  Description of Artificial Sequence: Synthetic oligonucleotide
ccucacggcccacuuuguu

SEQ ID NO: 883502 - RNA, 19 nt, Artificial Sequence
  Description of Artificial Sequence: Synthetic oligonucleotide
cccucacggcccacuuugu

SEQ ID NO: 883503 - RNA, 19 nt, Artificial Sequence
  Description of Artificial Sequence: Synthetic oligonucleotide
ccacugcgguagaauucau

SEQ ID NO: 883504 - RNA, 19 nt, Artificial Sequence
  Description of Artificial Sequence: Synthetic oligonucleotide
ggcagccguccggggcauc

SEQ ID NO: 883505 - RNA, 19 nt, Artificial Sequence
  Description of Artificial Sequence: Synthetic oligonucleotide
cgaccacgugaucgaagau

SEQ ID NO: 883506 - RNA, 19 nt, Artificial Sequence
  Description of Artificial Sequence: Synthetic oligonucleotide
ccggggcauccaucuuaua

SEQ ID NO: 883507 - RNA, 19 nt, Artificial Sequence
  Description of Artificial Sequence: Synthetic oligonucleotide
cccgagggacgacguccuu

SEQ ID NO: 883508 - RNA, 19 nt, Artificial Sequence
  Description of Artificial Sequence: Synthetic oligonucleotide
cguccggggcauccaucuu

SEQ ID NO: 883509 - RNA, 19 nt, Artificial Sequence
  Description of Artificial Sequence: Synthetic oligonucleotide
cgacguccuucaggggaau

SEQ ID NO: 883510 - RNA, 19 nt, Artificial Sequence
  Description of Artificial Sequence: Synthetic oligonucleotide
auugcuaagaaauauacca

SEQ ID NO: 883511 - RNA, 19 nt, Artificial Sequence
  Description of Artificial Sequence: Synthetic oligonucleotide
aauaguaauucauguauag

SEQ ID NO: 883512 - RNA, 19 nt, Artificial Sequence
  Description of Artificial Sequence: Synthetic oligonucleotide
aaaguuacugucugaacac

SEQ ID NO: 883513 - RNA, 19 nt, Artificial Sequence
  Description of Artificial Sequence: Synthetic oligonucleotide
ucaaggauuaccuauaugu

SEQ ID NO: 883514 - RNA, 19 nt, Artificial Sequence
  Description of Artificial Sequence: Synthetic oligonucleotide
ucaauugagacacauggcc

SEQ ID NO: 883515 - RNA, 19 nt, Artificial Sequence
  Description of Artificial Sequence: Synthetic oligonucleotide
uucaaagauggcaacaccg

SEQ ID NO: 883516 - RNA, 19 nt, Artificial Sequence
  Description of Artificial Sequence: Synthetic oligonucleotide
aaagguuuaccagauagac

SEQ ID NO: 883517 - RNA, 19 nt, Artificial Sequence
  Description of Artificial Sequence: Synthetic oligonucleotide
ugguaaaugauacaguuca

SEQ ID NO: 883518 - RNA, 19 nt, Artificial Sequence
  Description of Artificial Sequence: Synthetic oligonucleotide
uacuuuauuacugugaacc

SEQ ID NO: 883519 - RNA, 19 nt, Artificial Sequence
  Description of Artificial Sequence: Synthetic oligonucleotide
uuuacauccguguaagggg

SEQ ID NO: 883520 - RNA, 19 nt, Artificial Sequence
  Description of Artificial Sequence: Synthetic oligonucleotide
aucaaauugggaugggucc

SEQ ID NO: 883521 - RNA, 19 nt, Artificial Sequence
  Description of Artificial Sequence: Synthetic oligonucleotide
ugacgaagcaucaucacgg

SEQ ID NO: 883522 - RNA, 19 nt, Artificial Sequence
  Description of Artificial Sequence: Synthetic oligonucleotide
uuuaacucaaggauuaccu

SEQ ID NO: 883523 - RNA, 19 nt, Artificial Sequence
  Description of Artificial Sequence: Synthetic oligonucleotide
ucauguauaggacaaauau

SEQ ID NO: 883524 - RNA, 19 nt, Artificial Sequence
  Description of Artificial Sequence: Synthetic oligonucleotide
uauuaauaguaauucaugu

SEQ ID NO: 883525 - RNA, 19 nt, Artificial Sequence
  Description of Artificial Sequence: Synthetic oligonucleotide
gauauugccacuuggaguc

SEQ ID NO: 883526 - RNA, 19 nt, Artificial Sequence
  Description of Artificial Sequence: Synthetic oligonucleotide
gaaguucuaauccaagucc

SEQ ID NO: 883527 - RNA, 19 nt, Artificial Sequence
  Description of Artificial Sequence: Synthetic oligonucleotide
ugcccauuuaguuuuaggg

SEQ ID NO: 883528 - RNA, 19 nt, Artificial Sequence
  Description of Artificial Sequence: Synthetic oligonucleotide
aaguccuuuacucggcggc

SEQ ID NO: 883529 - RNA, 19 nt, Artificial Sequence
  Description of Artificial Sequence: Synthetic oligonucleotide
uucucaaggaggauuacag

SEQ ID NO: 883530 - RNA, 19 nt, Artificial Sequence
  Description of Artificial Sequence: Synthetic oligonucleotide
uguauuguggaaugcaccc

SEQ ID NO: 883531 - RNA, 19 nt, Artificial Sequence
  Description of Artificial Sequence: Synthetic oligonucleotide
ugaauaggggcuuuggcag

SEQ ID NO: 883532 - RNA, 19 nt, Artificial Sequence
  Description of Artificial Sequence: Synthetic oligonucleotide
agguuuaccagauagacaa

SEQ ID NO: 883533 - RNA, 19 nt, Artificial Sequence
  Description of Artificial Sequence: Synthetic oligonucleotide
uuuagugggccuuucaagc

SEQ ID NO: 883534 - RNA, 19 nt, Artificial Sequence
  Description of Artificial Sequence: Synthetic oligonucleotide
uaaccuucaauugagacac

SEQ ID NO: 883535 - RNA, 19 nt, Artificial Sequence
  Description of Artificial Sequence: Synthetic oligonucleotide
auugaauaggggcuuuggc

SEQ ID NO: 883536 - RNA, 19 nt, Artificial Sequence
  Description of Artificial Sequence: Synthetic oligonucleotide
auauugcuaagaaauauac

SEQ ID NO: 883537 - RNA, 19 nt, Artificial Sequence
  Description of Artificial Sequence: Synthetic oligonucleotide
auuuacauccguguaaggg

SEQ ID NO: 883538 - RNA, 19 nt, Artificial Sequence
  Description of Artificial Sequence: Synthetic oligonucleotide
auacaguucacuuacaguu

SEQ ID NO: 883539 - RNA, 19 nt, Artificial Sequence
  Description of Artificial Sequence: Synthetic oligonucleotide
gaauuaaaguuacugucug

SEQ ID NO: 883540 - RNA, 19 nt, Artificial Sequence
  Description of Artificial Sequence: Synthetic oligonucleotide
uuaccuauauguuauuaac

SEQ ID NO: 883541 - RNA, 19 nt, Artificial Sequence
  Description of Artificial Sequence: Synthetic oligonucleotide
aaaugucuuacggagcaac

SEQ ID NO: 883542 - RNA, 19 nt, Artificial Sequence
  Description of Artificial Sequence: Synthetic oligonucleotide
uauuuaaacauacgguauc

SEQ ID NO: 883543 - RNA, 19 nt, Artificial Sequence
  Description of Artificial Sequence: Synthetic oligonucleotide
uuuauuacugugaacccaa

SEQ ID NO: 883544 - RNA, 19 nt, Artificial Sequence
  Description of Artificial Sequence: Synthetic oligonucleotide
ugugacguugcuccggugg

SEQ ID NO: 883545 - RNA, 19 nt, Artificial Sequence
  Description of Artificial Sequence: Synthetic oligonucleotide
ucguucauuauauauuucu

SEQ ID NO: 883546 - RNA, 19 nt, Artificial Sequence
  Description of Artificial Sequence: Synthetic oligonucleotide
uauaaccuucaauugagac

SEQ ID NO: 883547 - RNA, 19 nt, Artificial Sequence
  Description of Artificial Sequence: Synthetic oligonucleotide
uauugcuaagaaauauacc

SEQ ID NO: 883548 - RNA, 19 nt, Artificial Sequence
  Description of Artificial Sequence: Synthetic oligonucleotide
uaauucauguauaggacaa

SEQ ID NO: 883549 - RNA, 19 nt, Artificial Sequence
  Description of Artificial Sequence: Synthetic oligonucleotide
agaccuuggacacccacgc

SEQ ID NO: 883550 - RNA, 19 nt, Artificial Sequence
  Description of Artificial Sequence: Synthetic oligonucleotide
auaaccuucaauugagaca

SEQ ID NO: 883551 - RNA, 19 nt, Artificial Sequence
  Description of Artificial Sequence: Synthetic oligonucleotide
uccauauaaauuuggcaug

SEQ ID NO: 883552 - RNA, 19 nt, Artificial Sequence
  Description of Artificial Sequence: Synthetic oligonucleotide
uacaacaagcacuugggga

SEQ ID NO: 883553 - RNA, 19 nt, Artificial Sequence
  Description of Artificial Sequence: Synthetic oligonucleotide
caucacggcacuaagcagg

SEQ ID NO: 883554 - RNA, 19 nt, Artificial Sequence
  Description of Artificial Sequence: Synthetic oligonucleotide
acaaaauuacacaucguuc

SEQ ID NO: 883555 - RNA, 19 nt, Artificial Sequence
  Description of Artificial Sequence: Synthetic oligonucleotide
uggggaaacccucugacug

SEQ ID NO: 883556 - RNA, 19 nt, Artificial Sequence
  Description of Artificial Sequence: Synthetic oligonucleotide
caauugagacacauggccg

SEQ ID NO: 883557 - RNA, 19 nt, Artificial Sequence
  Description of Artificial Sequence: Synthetic oligonucleotide
ucuccauauaaauuuggca

SEQ ID NO: 883558 - RNA, 19 nt, Artificial Sequence
  Description of Artificial Sequence: Synthetic oligonucleotide
acacagaucacuaaggaug

SEQ ID NO: 883559 - RNA, 19 nt, Artificial Sequence
  Description of Artificial Sequence: Synthetic oligonucleotide
uaccuauauguuauuaaca

SEQ ID NO: 883560 - RNA, 19 nt, Artificial Sequence
  Description of Artificial Sequence: Synthetic oligonucleotide
aucaucacggcacuaagca

SEQ ID NO: 883561 - RNA, 19 nt, Artificial Sequence
  Description of Artificial Sequence: Synthetic oligonucleotide
uuguauuguggaaugcacc

SEQ ID NO: 883562 - RNA, 19 nt, Artificial Sequence
  Description of Artificial Sequence: Synthetic oligonucleotide
uuuuaggguaauguuaucu

SEQ ID NO: 883563 - RNA, 19 nt, Artificial Sequence
  Description of Artificial Sequence: Synthetic oligonucleotide
uauuggggucuuuaguggg

SEQ ID NO: 883564 - RNA, 19 nt, Artificial Sequence
  Description of Artificial Sequence: Synthetic oligonucleotide
acauacgguaucaagguac

SEQ ID NO: 883565 - RNA, 19 nt, Artificial Sequence
  Description of Artificial Sequence: Synthetic oligonucleotide
aacuccaucaacgaucaca

SEQ ID NO: 883566 - RNA, 19 nt, Artificial Sequence
  Description of Artificial Sequence: Synthetic oligonucleotide
uaccauauuuaaacauacg

SEQ ID NO: 883567 - RNA, 19 nt, Artificial Sequence
  Description of Artificial Sequence: Synthetic oligonucleotide
uuaggguaauguuaucuug

SEQ ID NO: 883568 - RNA, 19 nt, Artificial Sequence
  Description of Artificial Sequence: Synthetic oligonucleotide
accuauauguuauuaacaa

SEQ ID NO: 883569 - RNA, 19 nt, Artificial Sequence
  Description of Artificial Sequence: Synthetic oligonucleotide
cuuacggagcaacagauuc

SEQ ID NO: 883570 - RNA, 19 nt, Artificial Sequence
  Description of Artificial Sequence: Synthetic oligonucleotide
auuaauaguaauucaugua

SEQ ID NO: 883571 - RNA, 19 nt, Artificial Sequence
  Description of Artificial Sequence: Synthetic oligonucleotide
guaucauaauauuuacagc

SEQ ID NO: 883572 - RNA, 19 nt, Artificial Sequence
  Description of Artificial Sequence: Synthetic oligonucleotide
ucuuuugugcccauuuagu

SEQ ID NO: 883573 - RNA, 19 nt, Artificial Sequence
  Description of Artificial Sequence: Synthetic oligonucleotide
agggcuuuaacucaaggau

SEQ ID NO: 883574 - RNA, 19 nt, Artificial Sequence
  Description of Artificial Sequence: Synthetic oligonucleotide
aauuuggcaugacgagaac

SEQ ID NO: 883575 - RNA, 19 nt, Artificial Sequence
  Description of Artificial Sequence: Synthetic oligonucleotide
caucaugugcaucuguugc

SEQ ID NO: 883576 - RNA, 19 nt, Artificial Sequence
  Description of Artificial Sequence: Synthetic oligonucleotide
uggcaugacgagaacauca

SEQ ID NO: 883577 - RNA, 19 nt, Artificial Sequence
  Description of Artificial Sequence: Synthetic oligonucleotide
uagauggauggccagcugc

SEQ ID NO: 883578 - RNA, 19 nt, Artificial Sequence
  Description of Artificial Sequence: Synthetic oligonucleotide
cauguauaggacaaauauc

SEQ ID NO: 883579 - RNA, 19 nt, Artificial Sequence
  Description of Artificial Sequence: Synthetic oligonucleotide
cuauuggggucuuuagugg

SEQ ID NO: 883580 - RNA, 19 nt, Artificial Sequence
  Description of Artificial Sequence: Synthetic oligonucleotide
ucuaauccaaguccuuuac

SEQ ID NO: 883581 - RNA, 19 nt, Artificial Sequence
  Description of Artificial Sequence: Synthetic oligonucleotide
aauuguagcaaaacacgca

SEQ ID NO: 883582 - RNA, 19 nt, Artificial Sequence
  Description of Artificial Sequence: Synthetic oligonucleotide
uuaguuuuaggguaauguu

SEQ ID NO: 883583 - RNA, 19 nt, Artificial Sequence
  Description of Artificial Sequence: Synthetic oligonucleotide
uuccuagcguacucgaagg

SEQ ID NO: 883584 - RNA, 19 nt, Artificial Sequence
  Description of Artificial Sequence: Synthetic oligonucleotide
uguggaaugcacccagcag

SEQ ID NO: 883585 - RNA, 19 nt, Artificial Sequence
  Description of Artificial Sequence: Synthetic oligonucleotide
uugcugugaacuuuccuag

SEQ ID NO: 883586 - RNA, 19 nt, Artificial Sequence
  Description of Artificial Sequence: Synthetic oligonucleotide
uaauaguaauucauguaua

SEQ ID NO: 883587 - RNA, 19 nt, Artificial Sequence
  Description of Artificial Sequence: Synthetic oligonucleotide
aaacacgcagucucgauuu

SEQ ID NO: 883588 - RNA, 19 nt, Artificial Sequence
  Description of Artificial Sequence: Synthetic oligonucleotide
accuuggacacccacgcgg

SEQ ID NO: 883589 - RNA, 19 nt, Artificial Sequence
  Description of Artificial Sequence: Synthetic oligonucleotide
ugucuuacggagcaacaga

SEQ ID NO: 883590 - RNA, 19 nt, Artificial Sequence
  Description of Artificial Sequence: Synthetic oligonucleotide
gaugucuccauauaaauuu

SEQ ID NO: 883591 - RNA, 19 nt, Artificial Sequence
  Description of Artificial Sequence: Synthetic oligonucleotide
aaccgauucaaagauggca

SEQ ID NO: 883592 - RNA, 19 nt, Artificial Sequence
  Description of Artificial Sequence: Synthetic oligonucleotide
guaauucauguauaggaca

SEQ ID NO: 883593 - RNA, 19 nt, Artificial Sequence
  Description of Artificial Sequence: Synthetic oligonucleotide
auacaacaagcacuugggg

SEQ ID NO: 883594 - RNA, 19 nt, Artificial Sequence
  Description of Artificial Sequence: Synthetic oligonucleotide
uggguaacaaugguaaaug

SEQ ID NO: 883595 - RNA, 19 nt, Artificial Sequence
  Description of Artificial Sequence: Synthetic oligonucleotide
uauuuuaccugaaguguaa

SEQ ID NO: 883596 - RNA, 19 nt, Artificial Sequence
  Description of Artificial Sequence: Synthetic oligonucleotide
cuuuagugggccuuucaag

SEQ ID NO: 883597 - RNA, 19 nt, Artificial Sequence
  Description of Artificial Sequence: Synthetic oligonucleotide
auauguuauuaacaaaauu

SEQ ID NO: 883598 - RNA, 19 nt, Artificial Sequence
  Description of Artificial Sequence: Synthetic oligonucleotide
aaauuuggcaugacgagaa

SEQ ID NO: 883599 - RNA, 19 nt, Artificial Sequence
  Description of Artificial Sequence: Synthetic oligonucleotide
agcaaauccaucugcagaa

SEQ ID NO: 883600 - RNA, 19 nt, Artificial Sequence
  Description of Artificial Sequence: Synthetic oligonucleotide
uagggcuuuaacucaagga

SEQ ID NO: 883601 - RNA, 19 nt, Artificial Sequence
  Description of Artificial Sequence: Synthetic oligonucleotide
caaagagucccaugugacg

SEQ ID NO: 883602 - RNA, 19 nt, Artificial Sequence
  Description of Artificial Sequence: Synthetic oligonucleotide
caucaaauugggauggguc

SEQ ID NO: 883603 - RNA, 19 nt, Artificial Sequence
  Description of Artificial Sequence: Synthetic oligonucleotide
aaaacacgcagucucgauu

SEQ ID NO: 883604 - RNA, 19 nt, Artificial Sequence
  Description of Artificial Sequence: Synthetic oligonucleotide
uuaccagauagacaauaaa

SEQ ID NO: 883605 - RNA, 19 nt, Artificial Sequence
  Description of Artificial Sequence: Synthetic oligonucleotide
uccgauauugccacuugga

SEQ ID NO: 883606 - RNA, 19 nt, Artificial Sequence
  Description of Artificial Sequence: Synthetic oligonucleotide
cuaggaaauuucuuuugug

SEQ ID NO: 883607 - RNA, 19 nt, Artificial Sequence
  Description of Artificial Sequence: Synthetic oligonucleotide
ugucaagaagcaagcaaac

SEQ ID NO: 883608 - RNA, 19 nt, Artificial Sequence
  Description of Artificial Sequence: Synthetic oligonucleotide
uguugcaaggguuuuguua

SEQ ID NO: 883609 - RNA, 19 nt, Artificial Sequence
  Description of Artificial Sequence: Synthetic oligonucleotide
uugggauggguccuguacc

SEQ ID NO: 883610 - RNA, 19 nt, Artificial Sequence
  Description of Artificial Sequence: Synthetic oligonucleotide
ugguaacgaggaaugacug

SEQ ID NO: 883611 - RNA, 19 nt, Artificial Sequence
  Description of Artificial Sequence: Synthetic oligonucleotide
uuuaggguaauguuaucuu

SEQ ID NO: 883612 - RNA, 19 nt, Artificial Sequence
  Description of Artificial Sequence: Synthetic oligonucleotide
guuccuagcguacucgaag

SEQ ID NO: 883613 - RNA, 19 nt, Artificial Sequence
  Description of Artificial Sequence: Synthetic oligonucleotide
cucgauuuuggcugcgugg

SEQ ID NO: 883614 - RNA, 19 nt, Artificial Sequence
  Description of Artificial Sequence: Synthetic oligonucleotide
uuacauccguguaaggggu

SEQ ID NO: 883615 - RNA, 19 nt, Artificial Sequence
  Description of Artificial Sequence: Synthetic oligonucleotide
ccagauagacaauaaauac

SEQ ID NO: 883616 - RNA, 19 nt, Artificial Sequence
  Description of Artificial Sequence: Synthetic oligonucleotide
cuuuaacucaaggauuacc

SEQ ID NO: 883617 - RNA, 19 nt, Artificial Sequence
  Description of Artificial Sequence: Synthetic oligonucleotide
uuagugggccuuucaagcc

SEQ ID NO: 883618 - RNA, 19 nt, Artificial Sequence
  Description of Artificial Sequence: Synthetic oligonucleotide
aaaccaauggcggguguuc

SEQ ID NO: 883619 - RNA, 19 nt, Artificial Sequence
  Description of Artificial Sequence: Synthetic oligonucleotide
uccuaggaaauuucuuuug

SEQ ID NO: 883620 - RNA, 19 nt, Artificial Sequence
  Description of Artificial Sequence: Synthetic oligonucleotide
cacggcacuaagcaggagg

SEQ ID NO: 883621 - RNA, 19 nt, Artificial Sequence
  Description of Artificial Sequence: Synthetic oligonucleotide
ugcguggucaaagaguccc

SEQ ID NO: 883622 - RNA, 19 nt, Artificial Sequence
  Description of Artificial Sequence: Synthetic oligonucleotide
aaaauggguaacaauggua

SEQ ID NO: 883623 - RNA, 19 nt, Artificial Sequence
  Description of Artificial Sequence: Synthetic oligonucleotide
aggcggagauuucugggcc

SEQ ID NO: 883624 - RNA, 19 nt, Artificial Sequence
  Description of Artificial Sequence: Synthetic oligonucleotide
gcuauuggggucuuuagug

SEQ ID NO: 883625 - RNA, 19 nt, Artificial Sequence
  Description of Artificial Sequence: Synthetic oligonucleotide
auaguugcauacacagggc

SEQ ID NO: 883626 - RNA, 19 nt, Artificial Sequence
  Description of Artificial Sequence: Synthetic oligonucleotide
ucggauggugacaauauuu

SEQ ID NO: 883627 - RNA, 19 nt, Artificial Sequence
  Description of Artificial Sequence: Synthetic oligonucleotide
ugacaauauuuacauccgu

SEQ ID NO: 883628 - RNA, 19 nt, Artificial Sequence
  Description of Artificial Sequence: Synthetic oligonucleotide
ugacauuacgcuccuccca

SEQ ID NO: 883629 - RNA, 19 nt, Artificial Sequence
  Description of Artificial Sequence: Synthetic oligonucleotide
uuacggagcaacagauuca

SEQ ID NO: 883630 - RNA, 19 nt, Artificial Sequence
  Description of Artificial Sequence: Synthetic oligonucleotide
augacgagaacaucaaauu

SEQ ID NO: 883631 - RNA, 19 nt, Artificial Sequence
  Description of Artificial Sequence: Synthetic oligonucleotide
auggcggguguucucaagg

SEQ ID NO: 883632 - RNA, 19 nt, Artificial Sequence
  Description of Artificial Sequence: Synthetic oligonucleotide
caugugacgaagcaucauc

SEQ ID NO: 883633 - RNA, 19 nt, Artificial Sequence
  Description of Artificial Sequence: Synthetic oligonucleotide
guaauguuaucuuguguga

SEQ ID NO: 883634 - RNA, 19 nt, Artificial Sequence
  Description of Artificial Sequence: Synthetic oligonucleotide
uaauguuaucuugugugac

SEQ ID NO: 883635 - RNA, 19 nt, Artificial Sequence
  Description of Artificial Sequence: Synthetic oligonucleotide
agccgagagaccuuggaca

SEQ ID NO: 883636 - RNA, 19 nt, Artificial Sequence
  Description of Artificial Sequence: Synthetic oligonucleotide
uuggcuccgauauugccac

SEQ ID NO: 883637 - RNA, 19 nt, Artificial Sequence
  Description of Artificial Sequence: Synthetic oligonucleotide
aauggguaacaaugguaaa

SEQ ID NO: 883638 - RNA, 19 nt, Artificial Sequence
  Description of Artificial Sequence: Synthetic oligonucleotide
gacauccgcaugauguugg

SEQ ID NO: 883639 - RNA, 19 nt, Artificial Sequence
  Description of Artificial Sequence: Synthetic oligonucleotide
gaauggcagugacauuacg

SEQ ID NO: 883640 - RNA, 19 nt, Artificial Sequence
  Description of Artificial Sequence: Synthetic oligonucleotide
ucggcggcaaauuucuucu

SEQ ID NO: 883641 - RNA, 19 nt, Artificial Sequence
  Description of Artificial Sequence: Synthetic oligonucleotide
ucaucacggcacuaagcag

SEQ ID NO: 883642 - RNA, 19 nt, Artificial Sequence
  Description of Artificial Sequence: Synthetic oligonucleotide
uguucggugaugagcuuga

SEQ ID NO: 883643 - RNA, 19 nt, Artificial Sequence
  Description of Artificial Sequence: Synthetic oligonucleotide
gguaucaagguacaucuca

SEQ ID NO: 883644 - RNA, 19 nt, Artificial Sequence
  Description of Artificial Sequence: Synthetic oligonucleotide
gcagucucgauuuuggcug

SEQ ID NO: 883645 - RNA, 19 nt, Artificial Sequence
  Description of Artificial Sequence: Synthetic oligonucleotide
agaucacuaaggaugucuc

SEQ ID NO: 883646 - RNA, 19 nt, Artificial Sequence
  Description of Artificial Sequence: Synthetic oligonucleotide
aauggcggguguucucaag

SEQ ID NO: 883647 - RNA, 19 nt, Artificial Sequence
  Description of Artificial Sequence: Synthetic oligonucleotide
caucaucacggcacuaagc

SEQ ID NO: 883648 - RNA, 19 nt, Artificial Sequence
  Description of Artificial Sequence: Synthetic oligonucleotide
uuuacucggcggcaaauuu

SEQ ID NO: 883649 - RNA, 19 nt, Artificial Sequence
  Description of Artificial Sequence: Synthetic oligonucleotide
uucggugaugagcuugaug

SEQ ID NO: 883650 - RNA, 19 nt, Artificial Sequence
  Description of Artificial Sequence: Synthetic oligonucleotide
auauauuucuuggagcuua

SEQ ID NO: 883651 - RNA, 19 nt, Artificial Sequence
  Description of Artificial Sequence: Synthetic oligonucleotide
uuacuuuauuacugugaac

SEQ ID NO: 883652 - RNA, 19 nt, Artificial Sequence
  Description of Artificial Sequence: Synthetic oligonucleotide
gacacauggccggacauug

SEQ ID NO: 883653 - RNA, 19 nt, Artificial Sequence
  Description of Artificial Sequence: Synthetic oligonucleotide
acaccguuggcuccgauau

SEQ ID NO: 883654 - RNA, 19 nt, Artificial Sequence
  Description of Artificial Sequence: Synthetic oligonucleotide
uguauaggacaaauaucuu

SEQ ID NO: 883655 - RNA, 19 nt, Artificial Sequence
  Description of Artificial Sequence: Synthetic oligonucleotide
aggauuaccuauauguuau

SEQ ID NO: 883656 - RNA, 19 nt, Artificial Sequence
  Description of Artificial Sequence: Synthetic oligonucleotide
ucaaauugggauggguccu

SEQ ID NO: 883657 - RNA, 19 nt, Artificial Sequence
  Description of Artificial Sequence: Synthetic oligonucleotide
aacaagcacuuggggaaac

SEQ ID NO: 883658 - RNA, 19 nt, Artificial Sequence
  Description of Artificial Sequence: Synthetic oligonucleotide
gagauuucugggccaauuc

SEQ ID NO: 883659 - RNA, 19 nt, Artificial Sequence
  Description of Artificial Sequence: Synthetic oligonucleotide
uucuaauccaaguccuuua

SEQ ID NO: 883660 - RNA, 19 nt, Artificial Sequence
  Description of Artificial Sequence: Synthetic oligonucleotide
aagcccaucuuguucuuau

SEQ ID NO: 883661 - RNA, 19 nt, Artificial Sequence
  Description of Artificial Sequence: Synthetic oligonucleotide
cauugaauaggggcuuugg

SEQ ID NO: 883662 - RNA, 19 nt, Artificial Sequence
  Description of Artificial Sequence: Synthetic oligonucleotide
aucaugugcaucuguugca

SEQ ID NO: 883663 - RNA, 19 nt, Artificial Sequence
  Description of Artificial Sequence: Synthetic oligonucleotide
uacgguaucaagguacauc

SEQ ID NO: 883664 - RNA, 19 nt, Artificial Sequence
  Description of Artificial Sequence: Synthetic oligonucleotide
ugugacgaagcaucaucac

SEQ ID NO: 883665 - RNA, 19 nt, Artificial Sequence
  Description of Artificial Sequence: Synthetic oligonucleotide
ucgauuuuggcugcguggu

SEQ ID NO: 883666 - RNA, 19 nt, Artificial Sequence
  Description of Artificial Sequence: Synthetic oligonucleotide
acauccgcaugauguuggc

SEQ ID NO: 883667 - RNA, 19 nt, Artificial Sequence
  Description of Artificial Sequence: Synthetic oligonucleotide
aacauacgguaucaaggua

SEQ ID NO: 883668 - RNA, 19 nt, Artificial Sequence
  Description of Artificial Sequence: Synthetic oligonucleotide
uuaagcucuuuccauccuu

SEQ ID NO: 883669 - RNA, 19 nt, Artificial Sequence
  Description of Artificial Sequence: Synthetic oligonucleotide
auuggggucuuuagugggc

SEQ ID NO: 883670 - RNA, 19 nt, Artificial Sequence
  Description of Artificial Sequence: Synthetic oligonucleotide
auucauguauaggacaaau

SEQ ID NO: 883671 - RNA, 19 nt, Artificial Sequence
  Description of Artificial Sequence: Synthetic oligonucleotide
aagcaaaccaauggcgggu

SEQ ID NO: 883672 - RNA, 19 nt, Artificial Sequence
  Description of Artificial Sequence: Synthetic oligonucleotide
ccggacauuggcauaaagg

SEQ ID NO: 883673 - RNA, 19 nt, Artificial Sequence
  Description of Artificial Sequence: Synthetic oligonucleotide
uuccauccuuaauuguagc

SEQ ID NO: 883674 - RNA, 19 nt, Artificial Sequence
  Description of Artificial Sequence: Synthetic oligonucleotide
aggauuacaggguacccuu

SEQ ID NO: 883675 - RNA, 19 nt, Artificial Sequence
  Description of Artificial Sequence: Synthetic oligonucleotide
auuacaggguacccuucug

SEQ ID NO: 883676 - RNA, 19 nt, Artificial Sequence
  Description of Artificial Sequence: Synthetic oligonucleotide
gaaugcacccagcagccga

SEQ ID NO: 883677 - RNA, 19 nt, Artificial Sequence
  Description of Artificial Sequence: Synthetic oligonucleotide
gcaagcaaaccaauggcgg

SEQ ID NO: 883678 - RNA, 19 nt, Artificial Sequence
  Description of Artificial Sequence: Synthetic oligonucleotide
uuacgcuccucccauugaa

SEQ ID NO: 883679 - RNA, 19 nt, Artificial Sequence
  Description of Artificial Sequence: Synthetic oligonucleotide
acaggguacccuucuggag

SEQ ID NO: 883680 - RNA, 19 nt, Artificial Sequence
  Description of Artificial Sequence: Synthetic oligonucleotide
cuuugugcaccgcugugac

SEQ ID NO: 883681 - RNA, 19 nt, Artificial Sequence
  Description of Artificial Sequence: Synthetic oligonucleotide
gacgaagcaucaucacggc

SEQ ID NO: 883682 - RNA, 19 nt, Artificial Sequence
  Description of Artificial Sequence: Synthetic oligonucleotide
acaagcacuuggggaaacc

SEQ ID NO: 883683 - RNA, 19 nt, Artificial Sequence
  Description of Artificial Sequence: Synthetic oligonucleotide
acgcagucucgauuuuggc

SEQ ID NO: 883684 - RNA, 19 nt, Artificial Sequence
  Description of Artificial Sequence: Synthetic oligonucleotide
gugacauuacgcuccuccc

SEQ ID NO: 883685 - RNA, 19 nt, Artificial Sequence
  Description of Artificial Sequence: Synthetic oligonucleotide
aaugcgcuugcucgcuugu

SEQ ID NO: 883686 - RNA, 19 nt, Artificial Sequence
  Description of Artificial Sequence: Synthetic oligonucleotide
agcacuuggggaaacccuc

SEQ ID NO: 883687 - RNA, 19 nt, Artificial Sequence
  Description of Artificial Sequence: Synthetic oligonucleotide
aucagaccugcacacagau

SEQ ID NO: 883688 - RNA, 19 nt, Artificial Sequence
  Description of Artificial Sequence: Synthetic oligonucleotide
uuguucggugaugagcuug

SEQ ID NO: 883689 - RNA, 19 nt, Artificial Sequence
  Description of Artificial Sequence: Synthetic oligonucleotide
agucccaugugacgaagca

SEQ ID NO: 883690 - RNA, 19 nt, Artificial Sequence
  Description of Artificial Sequence: Synthetic oligonucleotide
aguaaaucuccagguaaca

SEQ ID NO: 883691 - RNA, 19 nt, Artificial Sequence
  Description of Artificial Sequence: Synthetic oligonucleotide
cuauuuuaccugaagugua

SEQ ID NO: 883692 - RNA, 19 nt, Artificial Sequence
  Description of Artificial Sequence: Synthetic oligonucleotide
gucaagaagcaagcaaacc

SEQ ID NO: 883693 - RNA, 19 nt, Artificial Sequence
  Description of Artificial Sequence: Synthetic oligonucleotide
ggcacuaagcaggagggcg

SEQ ID NO: 883694 - RNA, 19 nt, Artificial Sequence
  Description of Artificial Sequence: Synthetic oligonucleotide
caaguccuuuacucggcgg

SEQ ID NO: 883695 - RNA, 19 nt, Artificial Sequence
  Description of Artificial Sequence: Synthetic oligonucleotide
cauuacgcuccucccauug

SEQ ID NO: 883696 - RNA, 19 nt, Artificial Sequence
  Description of Artificial Sequence: Synthetic oligonucleotide
auggguaacaaugguaaau

SEQ ID NO: 883697 - RNA, 19 nt, Artificial Sequence
  Description of Artificial Sequence: Synthetic oligonucleotide
cuuuauuacugugaaccca

SEQ ID NO: 883698 - RNA, 19 nt, Artificial Sequence
  Description of Artificial Sequence: Synthetic oligonucleotide
gagcuugaugcucugcaca

SEQ ID NO: 883699 - RNA, 19 nt, Artificial Sequence
  Description of Artificial Sequence: Synthetic oligonucleotide
cuccgauauugccacuugg

SEQ ID NO: 883700 - RNA, 19 nt, Artificial Sequence
  Description of Artificial Sequence: Synthetic oligonucleotide
accguuggcuccgauauug

SEQ ID NO: 883701 - RNA, 19 nt, Artificial Sequence
  Description of Artificial Sequence: Synthetic oligonucleotide
acggcacuaagcaggaggg

SEQ ID NO: 883702 - RNA, 19 nt, Artificial Sequence
  Description of Artificial Sequence: Synthetic oligonucleotide
uuguuccuagcguacucga

SEQ ID NO: 883703 - RNA, 19 nt, Artificial Sequence
  Description of Artificial Sequence: Synthetic oligonucleotide
uccuagcguacucgaaggc

SEQ ID NO: 883704 - RNA, 19 nt, Artificial Sequence
  Description of Artificial Sequence: Synthetic oligonucleotide
acaguucacuuacaguuua

SEQ ID NO: 883705 - RNA, 19 nt, Artificial Sequence
  Description of Artificial Sequence: Synthetic oligonucleotide
aauucauguauaggacaaa

SEQ ID NO: 883706 - RNA, 19 nt, Artificial Sequence
  Description of Artificial Sequence: Synthetic oligonucleotide
caugacgagaacaucaaau

SEQ ID NO: 883707 - RNA, 19 nt, Artificial Sequence
  Description of Artificial Sequence: Synthetic oligonucleotide
aacaccguuggcuccgaua

SEQ ID NO: 883708 - RNA, 19 nt, Artificial Sequence
  Description of Artificial Sequence: Synthetic oligonucleotide
caagcacuuggggaaaccc

SEQ ID NO: 883709 - RNA, 19 nt, Artificial Sequence
  Description of Artificial Sequence: Synthetic oligonucleotide
guauaggacaaauaucuuu

SEQ ID NO: 883710 - RNA, 19 nt, Artificial Sequence
  Description of Artificial Sequence: Synthetic oligonucleotide
guuuuguauuguggaaugc

SEQ ID NO: 883711 - RNA, 19 nt, Artificial Sequence
  Description of Artificial Sequence: Synthetic oligonucleotide
gauuaccuauauguuauua

SEQ ID NO: 883712 - RNA, 19 nt, Artificial Sequence
  Description of Artificial Sequence: Synthetic oligonucleotide
accgauucaaagauggcaa

SEQ ID NO: 883713 - RNA, 19 nt, Artificial Sequence
  Description of Artificial Sequence: Synthetic oligonucleotide
ugacauccgcaugauguug

SEQ ID NO: 883714 - RNA, 19 nt, Artificial Sequence
  Description of Artificial Sequence: Synthetic oligonucleotide
aacucaaggauuaccuaua

SEQ ID NO: 883715 - RNA, 19 nt, Artificial Sequence
  Description of Artificial Sequence: Synthetic oligonucleotide
cucaaggauuaccuauaug

SEQ ID NO: 883716 - RNA, 19 nt, Artificial Sequence
  Description of Artificial Sequence: Synthetic oligonucleotide
cauacgguaucaagguaca

SEQ ID NO: 883717 - RNA, 19 nt, Artificial Sequence
  Description of Artificial Sequence: Synthetic oligonucleotide
uuggcugcguggucaaaga

SEQ ID NO: 883718 - RNA, 19 nt, Artificial Sequence
  Description of Artificial Sequence: Synthetic oligonucleotide
uuauuacugugaacccaaa

SEQ ID NO: 883719 - RNA, 19 nt, Artificial Sequence
  Description of Artificial Sequence: Synthetic oligonucleotide
ucacuaaggaugucuccau

SEQ ID NO: 883720 - RNA, 19 nt, Artificial Sequence
  Description of Artificial Sequence: Synthetic oligonucleotide
cucggcggcaaauuucuuc

SEQ ID NO: 883721 - RNA, 19 nt, Artificial Sequence
  Description of Artificial Sequence: Synthetic oligonucleotide
aguuacugucugaacacca

SEQ ID NO: 883722 - RNA, 19 nt, Artificial Sequence
  Description of Artificial Sequence: Synthetic oligonucleotide
acucaaggauuaccuauau

SEQ ID NO: 883723 - RNA, 19 nt, Artificial Sequence
  Description of Artificial Sequence: Synthetic oligonucleotide
uucuggagugacugacagc

SEQ ID NO: 883724 - RNA, 19 nt, Artificial Sequence
  Description of Artificial Sequence: Synthetic oligonucleotide
caucuagggcuuuaacuca

SEQ ID NO: 883725 - RNA, 19 nt, Artificial Sequence
  Description of Artificial Sequence: Synthetic oligonucleotide
uuggacacccacgcggacc

SEQ ID NO: 883726 - RNA, 19 nt, Artificial Sequence
  Description of Artificial Sequence: Synthetic oligonucleotide
aagagucccaugugacgaa

SEQ ID NO: 883727 - RNA, 19 nt, Artificial Sequence
  Description of Artificial Sequence: Synthetic oligonucleotide
uguuccuagcguacucgaa

SEQ ID NO: 883728 - RNA, 19 nt, Artificial Sequence
  Description of Artificial Sequence: Synthetic oligonucleotide
augugacgaagcaucauca

SEQ ID NO: 883729 - RNA, 19 nt, Artificial Sequence
  Description of Artificial Sequence: Synthetic oligonucleotide
accaauggcggguguucuc

SEQ ID NO: 883730 - RNA, 19 nt, Artificial Sequence
  Description of Artificial Sequence: Synthetic oligonucleotide
cuagcguacucgaaggcaa

SEQ ID NO: 883731 - RNA, 19 nt, Artificial Sequence
  Description of Artificial Sequence: Synthetic oligonucleotide
uauauauuucuuggagcuu

SEQ ID NO: 883732 - RNA, 19 nt, Artificial Sequence
  Description of Artificial Sequence: Synthetic oligonucleotide
auuacgcuccucccauuga

SEQ ID NO: 883733 - RNA, 19 nt, Artificial Sequence
  Description of Artificial Sequence: Synthetic oligonucleotide
caagaccuccgaucagacc

SEQ ID NO: 883734 - RNA, 19 nt, Artificial Sequence
  Description of Artificial Sequence: Synthetic oligonucleotide
cugguaacgaggaaugacu

SEQ ID NO: 883735 - RNA, 19 nt, Artificial Sequence
  Description of Artificial Sequence: Synthetic oligonucleotide
gauuacaggguacccuucu

SEQ ID NO: 883736 - RNA, 19 nt, Artificial Sequence
  Description of Artificial Sequence: Synthetic oligonucleotide
gaccuuggacacccacgcg

SEQ ID NO: 883737 - RNA, 19 nt, Artificial Sequence
  Description of Artificial Sequence: Synthetic oligonucleotide
guuuaccagauagacaaua

SEQ ID NO: 883738 - RNA, 19 nt, Artificial Sequence
  Description of Artificial Sequence: Synthetic oligonucleotide
gaaccgauucaaagauggc

SEQ ID NO: 883739 - RNA, 19 nt, Artificial Sequence
  Description of Artificial Sequence: Synthetic oligonucleotide
aaccaauggcggguguucu

SEQ ID NO: 883740 - RNA, 19 nt, Artificial Sequence
  Description of Artificial Sequence: Synthetic oligonucleotide
guccuugaauggcagugac

SEQ ID NO: 883741 - RNA, 19 nt, Artificial Sequence
  Description of Artificial Sequence: Synthetic oligonucleotide
ggauuggccauguccuugc

SEQ ID NO: 883742 - RNA, 19 nt, Artificial Sequence
  Description of Artificial Sequence: Synthetic oligonucleotide
aauugggauggguccugua

SEQ ID NO: 883743 - RNA, 19 nt, Artificial Sequence
  Description of Artificial Sequence: Synthetic oligonucleotide
cagcaaugcgcuugcucgc

SEQ ID NO: 883744 - RNA, 19 nt, Artificial Sequence
  Description of Artificial Sequence: Synthetic oligonucleotide
uugcucgcuuguucgguga

SEQ ID NO: 883745 - RNA, 19 nt, Artificial Sequence
  Description of Artificial Sequence: Synthetic oligonucleotide
gacauuacgcuccucccau

SEQ ID NO: 883746 - RNA, 19 nt, Artificial Sequence
  Description of Artificial Sequence: Synthetic oligonucleotide
uggcggguguucucaagga

SEQ ID NO: 883747 - RNA, 19 nt, Artificial Sequence
  Description of Artificial Sequence: Synthetic oligonucleotide
ccgauauugccacuuggag

SEQ ID NO: 883748 - RNA, 19 nt, Artificial Sequence
  Description of Artificial Sequence: Synthetic oligonucleotide
guuuuaggguaauguuauc

SEQ ID NO: 883749 - RNA, 19 nt, Artificial Sequence
  Description of Artificial Sequence: Synthetic oligonucleotide
cagucucgauuuuggcugc

SEQ ID NO: 883750 - RNA, 19 nt, Artificial Sequence
  Description of Artificial Sequence: Synthetic oligonucleotide
caaugcgcuugcucgcuug

SEQ ID NO: 883751 - RNA, 19 nt, Artificial Sequence
  Description of Artificial Sequence: Synthetic oligonucleotide
auuuuaccugaaguguaaa

SEQ ID NO: 883752 - RNA, 19 nt, Artificial Sequence
  Description of Artificial Sequence: Synthetic oligonucleotide
caucaacgaucacaugcuc

SEQ ID NO: 883753 - RNA, 19 nt, Artificial Sequence
  Description of Artificial Sequence: Synthetic oligonucleotide
gauuggccauguccuugcc

SEQ ID NO: 883754 - RNA, 19 nt, Artificial Sequence
  Description of Artificial Sequence: Synthetic oligonucleotide
accuucaauugagacacau

SEQ ID NO: 883755 - RNA, 19 nt, Artificial Sequence
  Description of Artificial Sequence: Synthetic oligonucleotide
guucucaaggaggauuaca

SEQ ID NO: 883756 - RNA, 19 nt, Artificial Sequence
  Description of Artificial Sequence: Synthetic oligonucleotide
cagccgagagaccuuggac

SEQ ID NO: 883757 - RNA, 19 nt, Artificial Sequence
  Description of Artificial Sequence: Synthetic oligonucleotide
gcggguguucucaaggagg

SEQ ID NO: 883758 - RNA, 19 nt, Artificial Sequence
  Description of Artificial Sequence: Synthetic oligonucleotide
augaaccgauucaaagaug

SEQ ID NO: 883759 - RNA, 19 nt, Artificial Sequence
  Description of Artificial Sequence: Synthetic oligonucleotide
agcaaaccaauggcgggug

SEQ ID NO: 883760 - RNA, 19 nt, Artificial Sequence
  Description of Artificial Sequence: Synthetic oligonucleotide
aguugcauacacagggcau

SEQ ID NO: 883761 - RNA, 19 nt, Artificial Sequence
  Description of Artificial Sequence: Synthetic oligonucleotide
ggcaucuagggcuuuaacu

SEQ ID NO: 883762 - RNA, 19 nt, Artificial Sequence
  Description of Artificial Sequence: Synthetic oligonucleotide
uauugccacuuggagucac

SEQ ID NO: 883763 - RNA, 19 nt, Artificial Sequence
  Description of Artificial Sequence: Synthetic oligonucleotide
ccacugguaacgaggaaug

SEQ ID NO: 883764 - RNA, 19 nt, Artificial Sequence
  Description of Artificial Sequence: Synthetic oligonucleotide
caaauugggauggguccug

SEQ ID NO: 883765 - RNA, 19 nt, Artificial Sequence
  Description of Artificial Sequence: Synthetic oligonucleotide
uccuuuacucggcggcaaa

SEQ ID NO: 883766 - RNA, 19 nt, Artificial Sequence
  Description of Artificial Sequence: Synthetic oligonucleotide
cuccgaucagaccugcaca

SEQ ID NO: 883767 - RNA, 19 nt, Artificial Sequence
  Description of Artificial Sequence: Synthetic oligonucleotide
uguuaucuugugugacauu

SEQ ID NO: 883768 - RNA, 19 nt, Artificial Sequence
  Description of Artificial Sequence: Synthetic oligonucleotide
ggguaacaaugguaaauga

SEQ ID NO: 883769 - RNA, 19 nt, Artificial Sequence
  Description of Artificial Sequence: Synthetic oligonucleotide
gcgcuugcucgcuuguucg

SEQ ID NO: 883770 - RNA, 19 nt, Artificial Sequence
  Description of Artificial Sequence: Synthetic oligonucleotide
ugguuguuccuagcguacu

SEQ ID NO: 883771 - RNA, 19 nt, Artificial Sequence
  Description of Artificial Sequence: Synthetic oligonucleotide
gcggcaaauuucuucugug

SEQ ID NO: 883772 - RNA, 19 nt, Artificial Sequence
  Description of Artificial Sequence: Synthetic oligonucleotide
uagcguacucgaaggcaaa

SEQ ID NO: 883773 - RNA, 19 nt, Artificial Sequence
  Description of Artificial Sequence: Synthetic oligonucleotide
uguucucaaggaggauuac

SEQ ID NO: 883774 - RNA, 19 nt, Artificial Sequence
  Description of Artificial Sequence: Synthetic oligonucleotide
uccggugguuguuccuagc

SEQ ID NO: 883775 - RNA, 19 nt, Artificial Sequence
  Description of Artificial Sequence: Synthetic oligonucleotide
agaccugcacacagaucac

SEQ ID NO: 883776 - RNA, 19 nt, Artificial Sequence
  Description of Artificial Sequence: Synthetic oligonucleotide
cuuuugugcccauuuaguu

SEQ ID NO: 883777 - RNA, 19 nt, Artificial Sequence
  Description of Artificial Sequence: Synthetic oligonucleotide
aggccagauuugaaaaugu

SEQ ID NO: 883778 - RNA, 19 nt, Artificial Sequence
  Description of Artificial Sequence: Synthetic oligonucleotide
cucgcuuguucggugauga

SEQ ID NO: 883779 - RNA, 19 nt, Artificial Sequence
  Description of Artificial Sequence: Synthetic oligonucleotide
guauuguggaaugcaccca

SEQ ID NO: 883780 - RNA, 19 nt, Artificial Sequence
  Description of Artificial Sequence: Synthetic oligonucleotide
acgcuccucccauugaaua

SEQ ID NO: 883781 - RNA, 19 nt, Artificial Sequence
  Description of Artificial Sequence: Synthetic oligonucleotide
cccauuuaguuuuagggua

SEQ ID NO: 883782 - RNA, 19 nt, Artificial Sequence
  Description of Artificial Sequence: Synthetic oligonucleotide
ggugguuguuccuagcgua

SEQ ID NO: 883783 - RNA, 19 nt, Artificial Sequence
  Description of Artificial Sequence: Synthetic oligonucleotide
aguccuuuacucggcggca

SEQ ID NO: 883784 - RNA, 19 nt, Artificial Sequence
  Description of Artificial Sequence: Synthetic oligonucleotide
cuggagugacugacagcag

SEQ ID NO: 883785 - RNA, 19 nt, Artificial Sequence
  Description of Artificial Sequence: Synthetic oligonucleotide
gguaaaugauacaguucac

SEQ ID NO: 883786 - RNA, 19 nt, Artificial Sequence
  Description of Artificial Sequence: Synthetic oligonucleotide
uggccggacauuggcauaa

SEQ ID NO: 883787 - RNA, 19 nt, Artificial Sequence
  Description of Artificial Sequence: Synthetic oligonucleotide
gugguuguuccuagcguac

SEQ ID NO: 883788 - RNA, 19 nt, Artificial Sequence
  Description of Artificial Sequence: Synthetic oligonucleotide
caaggauuaccuauauguu

SEQ ID NO: 883789 - RNA, 19 nt, Artificial Sequence
  Description of Artificial Sequence: Synthetic oligonucleotide
ggcggguguucucaaggag

SEQ ID NO: 883790 - RNA, 19 nt, Artificial Sequence
  Description of Artificial Sequence: Synthetic oligonucleotide
cugcguggucaaagagucc

SEQ ID NO: 883791 - RNA, 19 nt, Artificial Sequence
  Description of Artificial Sequence: Synthetic oligonucleotide
ccggugguuguuccuagcg

SEQ ID NO: 883792 - RNA, 19 nt, Artificial Sequence
  Description of Artificial Sequence: Synthetic oligonucleotide
agucucgauuuuggcugcg

SEQ ID NO: 883793 - RNA, 19 nt, Artificial Sequence
  Description of Artificial Sequence: Synthetic oligonucleotide
aucacggcacuaagcagga

SEQ ID NO: 883794 - RNA, 19 nt, Artificial Sequence
  Description of Artificial Sequence: Synthetic oligonucleotide
agcaaugcgcuugcucgcu

SEQ ID NO: 883795 - RNA, 19 nt, Artificial Sequence
  Description of Artificial Sequence: Synthetic oligonucleotide
uccguguaagggguuuuau

SEQ ID NO: 883796 - RNA, 19 nt, Artificial Sequence
  Description of Artificial Sequence: Synthetic oligonucleotide
cgaucagaccugcacacag

SEQ ID NO: 883797 - RNA, 19 nt, Artificial Sequence
  Description of Artificial Sequence: Synthetic oligonucleotide
cuucuggagggaucaucca

SEQ ID NO: 883798 - RNA, 19 nt, Artificial Sequence
  Description of Artificial Sequence: Synthetic oligonucleotide
gcccauuuaguuuuagggu

SEQ ID NO: 883799 - RNA, 19 nt, Artificial Sequence
  Description of Artificial Sequence: Synthetic oligonucleotide
uacauccguguaagggguu

SEQ ID NO: 883800 - RNA, 19 nt, Artificial Sequence
  Description of Artificial Sequence: Synthetic oligonucleotide
ccauauaaauuuggcauga

SEQ ID NO: 883801 - RNA, 19 nt, Artificial Sequence
  Description of Artificial Sequence: Synthetic oligonucleotide
ggagugacugacagcagca

SEQ ID NO: 883802 - RNA, 19 nt, Artificial Sequence
  Description of Artificial Sequence: Synthetic oligonucleotide
caugcucaauuccacugua

SEQ ID NO: 883803 - RNA, 19 nt, Artificial Sequence
  Description of Artificial Sequence: Synthetic oligonucleotide
uggggucuuuagugggccu

SEQ ID NO: 883804 - RNA, 19 nt, Artificial Sequence
  Description of Artificial Sequence: Synthetic oligonucleotide
gcuuguucggugaugagcu

SEQ ID NO: 883805 - RNA, 19 nt, Artificial Sequence
  Description of Artificial Sequence: Synthetic oligonucleotide
ugcucgcuuguucggugau

SEQ ID NO: 883806 - RNA, 19 nt, Artificial Sequence
  Description of Artificial Sequence: Synthetic oligonucleotide
cuuggacacccacgcggac

SEQ ID NO: 883807 - RNA, 19 nt, Artificial Sequence
  Description of Artificial Sequence: Synthetic oligonucleotide
acgaggaaugacugcccuu

SEQ ID NO: 883808 - RNA, 19 nt, Artificial Sequence
  Description of Artificial Sequence: Synthetic oligonucleotide
ccgauucaaagauggcaac

SEQ ID NO: 883809 - RNA, 19 nt, Artificial Sequence
  Description of Artificial Sequence: Synthetic oligonucleotide
aguucuaauccaaguccuu

SEQ ID NO: 883810 - RNA, 19 nt, Artificial Sequence
  Description of Artificial Sequence: Synthetic oligonucleotide
cucccaggucuuuuguuaa

SEQ ID NO: 883811 - RNA, 19 nt, Artificial Sequence
  Description of Artificial Sequence: Synthetic oligonucleotide
acauggccggacauuggca

SEQ ID NO: 883812 - RNA, 19 nt, Artificial Sequence
  Description of Artificial Sequence: Synthetic oligonucleotide
agugggccuuucaagccca

SEQ ID NO: 883813 - RNA, 19 nt, Artificial Sequence
  Description of Artificial Sequence: Synthetic oligonucleotide
acgcggacccggccaucgc

SEQ ID NO: 883814 - RNA, 19 nt, Artificial Sequence
  Description of Artificial Sequence: Synthetic oligonucleotide
uggagggaucauccacuuu

SEQ ID NO: 883815 - RNA, 19 nt, Artificial Sequence
  Description of Artificial Sequence: Synthetic oligonucleotide
gagggcggugggauuggcc

SEQ ID NO: 883816 - RNA, 19 nt, Artificial Sequence
  Description of Artificial Sequence: Synthetic oligonucleotide
cacuguauucuccuuccgu

SEQ ID NO: 883817 - RNA, 19 nt, Artificial Sequence
  Description of Artificial Sequence: Synthetic oligonucleotide
cggacauuggcauaaaggu

SEQ ID NO: 883818 - RNA, 19 nt, Artificial Sequence
  Description of Artificial Sequence: Synthetic oligonucleotide
gucuuacggagcaacagau

SEQ ID NO: 883819 - RNA, 19 nt, Artificial Sequence
  Description of Artificial Sequence: Synthetic oligonucleotide
guucuaauccaaguccuuu

SEQ ID NO: 883820 - RNA, 19 nt, Artificial Sequence
  Description of Artificial Sequence: Synthetic oligonucleotide
cauggccggacauuggcau

SEQ ID NO: 883821 - RNA, 19 nt, Artificial Sequence
  Description of Artificial Sequence: Synthetic oligonucleotide
auggccggacauuggcaua

SEQ ID NO: 883822 - RNA, 19 nt, Artificial Sequence
  Description of Artificial Sequence: Synthetic oligonucleotide
ucacggcacuaagcaggag

SEQ ID NO: 883823 - RNA, 19 nt, Artificial Sequence
  Description of Artificial Sequence: Synthetic oligonucleotide
auacgguaucaagguacau

SEQ ID NO: 883824 - RNA, 19 nt, Artificial Sequence
  Description of Artificial Sequence: Synthetic oligonucleotide
cgcuuguucggugaugagc

SEQ ID NO: 883825 - RNA, 19 nt, Artificial Sequence
  Description of Artificial Sequence: Synthetic oligonucleotide
cguuggcuccgauauugcc

SEQ ID NO: 883826 - RNA, 19 nt, Artificial Sequence
  Description of Artificial Sequence: Synthetic oligonucleotide
caaaacacgcagucucgau

SEQ ID NO: 883827 - RNA, 19 nt, Artificial Sequence
  Description of Artificial Sequence: Synthetic oligonucleotide
gugacguugcuccgguggu

SEQ ID NO: 883828 - RNA, 19 nt, Artificial Sequence
  Description of Artificial Sequence: Synthetic oligonucleotide
ccaucaacgaucacaugcu

SEQ ID NO: 883829 - RNA, 19 nt, Artificial Sequence
  Description of Artificial Sequence: Synthetic oligonucleotide
gcaaaacacgcagucucga

SEQ ID NO: 883830 - RNA, 19 nt, Artificial Sequence
  Description of Artificial Sequence: Synthetic oligonucleotide
ggcaugacgagaacaucaa

SEQ ID NO: 883831 - RNA, 19 nt, Artificial Sequence
  Description of Artificial Sequence: Synthetic oligonucleotide
agcagccgagagaccuugg

SEQ ID NO: 883832 - RNA, 19 nt, Artificial Sequence
  Description of Artificial Sequence: Synthetic oligonucleotide
ggauggguccuguaccaua

SEQ ID NO: 883833 - RNA, 19 nt, Artificial Sequence
  Description of Artificial Sequence: Synthetic oligonucleotide
cugugacguugcuccggug

SEQ ID NO: 883834 - RNA, 19 nt, Artificial Sequence
  Description of Artificial Sequence: Synthetic oligonucleotide
agccacugguaacgaggaa

SEQ ID NO: 883835 - RNA, 19 nt, Artificial Sequence
  Description of Artificial Sequence: Synthetic oligonucleotide
ugacguugcuccggugguu

SEQ ID NO: 883836 - RNA, 19 nt, Artificial Sequence
  Description of Artificial Sequence: Synthetic oligonucleotide
ccuagcguacucgaaggca

SEQ ID NO: 883837 - RNA, 19 nt, Artificial Sequence
  Description of Artificial Sequence: Synthetic oligonucleotide
auccguguaagggguuuua

SEQ ID NO: 883838 - RNA, 19 nt, Artificial Sequence
  Description of Artificial Sequence: Synthetic oligonucleotide
ggcggagauuucugggcca

SEQ ID NO: 883839 - RNA, 19 nt, Artificial Sequence
  Description of Artificial Sequence: Synthetic oligonucleotide
ggauuacaggguacccuuc

SEQ ID NO: 883840 - RNA, 19 nt, Artificial Sequence
  Description of Artificial Sequence: Synthetic oligonucleotide
cugugaacccaaagccacu

SEQ ID NO: 883841 - RNA, 19 nt, Artificial Sequence
  Description of Artificial Sequence: Synthetic oligonucleotide
gcaugacgagaacaucaaa

SEQ ID NO: 883842 - RNA, 19 nt, Artificial Sequence
  Description of Artificial Sequence: Synthetic oligonucleotide
ugugcaccgcugugacguu

SEQ ID NO: 883843 - RNA, 19 nt, Artificial Sequence
  Description of Artificial Sequence: Synthetic oligonucleotide
gugcaccgcugugacguug

SEQ ID NO: 883844 - RNA, 19 nt, Artificial Sequence
  Description of Artificial Sequence: Synthetic oligonucleotide
cgauauugccacuuggagu

SEQ ID NO: 883845 - RNA, 19 nt, Artificial Sequence
  Description of Artificial Sequence: Synthetic oligonucleotide
ccguuggcuccgauauugc

SEQ ID NO: 883846 - RNA, 19 nt, Artificial Sequence
  Description of Artificial Sequence: Synthetic oligonucleotide
caauggcggguguucucaa

SEQ ID NO: 883847 - RNA, 19 nt, Artificial Sequence
  Description of Artificial Sequence: Synthetic oligonucleotide
caacuccaucaacgaucac

SEQ ID NO: 883848 - RNA, 19 nt, Artificial Sequence
  Description of Artificial Sequence: Synthetic oligonucleotide
ccucccaggucuuuuguua

SEQ ID NO: 883849 - RNA, 19 nt, Artificial Sequence
  Description of Artificial Sequence: Synthetic oligonucleotide
guccuuuacucggcggcaa

SEQ ID NO: 883850 - RNA, 19 nt, Artificial Sequence
  Description of Artificial Sequence: Synthetic oligonucleotide
ccaauggcggguguucuca

SEQ ID NO: 883851 - RNA, 19 nt, Artificial Sequence
  Description of Artificial Sequence: Synthetic oligonucleotide
ggccagauuugaaaaugua

SEQ ID NO: 883852 - RNA, 19 nt, Artificial Sequence
  Description of Artificial Sequence: Synthetic oligonucleotide
cuuuacucggcggcaaauu

SEQ ID NO: 883853 - RNA, 19 nt, Artificial Sequence
  Description of Artificial Sequence: Synthetic oligonucleotide
ccguguaagggguuuuaua

SEQ ID NO: 883854 - RNA, 19 nt, Artificial Sequence
  Description of Artificial Sequence: Synthetic oligonucleotide
ccaggucuuuuguuaagcu

SEQ ID NO: 883855 - RNA, 19 nt, Artificial Sequence
  Description of Artificial Sequence: Synthetic oligonucleotide
cucugcaacuucccugcau

SEQ ID NO: 883856 - RNA, 19 nt, Artificial Sequence
  Description of Artificial Sequence: Synthetic oligonucleotide
cucggauggugacaauauu

SEQ ID NO: 883857 - RNA, 19 nt, Artificial Sequence
  Description of Artificial Sequence: Synthetic oligonucleotide
caaaccaauggcggguguu

SEQ ID NO: 883858 - RNA, 19 nt, Artificial Sequence
  Description of Artificial Sequence: Synthetic oligonucleotide
gcucgcuuguucggugaug

SEQ ID NO: 883859 - RNA, 19 nt, Artificial Sequence
  Description of Artificial Sequence: Synthetic oligonucleotide
guacccuucuggagugacu

SEQ ID NO: 883860 - RNA, 19 nt, Artificial Sequence
  Description of Artificial Sequence: Synthetic oligonucleotide
ggauuaccuauauguuauu

SEQ ID NO: 883861 - RNA, 19 nt, Artificial Sequence
  Description of Artificial Sequence: Synthetic oligonucleotide
cauaacugaggcggagauu

SEQ ID NO: 883862 - RNA, 19 nt, Artificial Sequence
  Description of Artificial Sequence: Synthetic oligonucleotide
accuccgaucagaccugca

SEQ ID NO: 883863 - RNA, 19 nt, Artificial Sequence
  Description of Artificial Sequence: Synthetic oligonucleotide
cugcaacuucccugcauuu

SEQ ID NO: 883864 - RNA, 19 nt, Artificial Sequence
  Description of Artificial Sequence: Synthetic oligonucleotide
cugugaagucagagcacuu

SEQ ID NO: 883865 - RNA, 19 nt, Artificial Sequence
  Description of Artificial Sequence: Synthetic oligonucleotide
ccgagagaccuuggacacc

SEQ ID NO: 883866 - RNA, 19 nt, Artificial Sequence
  Description of Artificial Sequence: Synthetic oligonucleotide
cgaggaaugacugcccuua

SEQ ID NO: 883867 - RNA, 19 nt, Artificial Sequence
  Description of Artificial Sequence: Synthetic oligonucleotide
augcgcuugcucgcuuguu

SEQ ID NO: 883868 - RNA, 19 nt, Artificial Sequence
  Description of Artificial Sequence: Synthetic oligonucleotide
cauccgcaugauguuggcu

SEQ ID NO: 883869 - RNA, 19 nt, Artificial Sequence
  Description of Artificial Sequence: Synthetic oligonucleotide
cuuguucggugaugagcuu

SEQ ID NO: 883870 - RNA, 19 nt, Artificial Sequence
  Description of Artificial Sequence: Synthetic oligonucleotide
caucugacauccgcaugau

SEQ ID NO: 883871 - RNA, 19 nt, Artificial Sequence
  Description of Artificial Sequence: Synthetic oligonucleotide
cuguugcaaggguuuuguu

SEQ ID NO: 883872 - RNA, 19 nt, Artificial Sequence
  Description of Artificial Sequence: Synthetic oligonucleotide
gcaaaccaauggcgggugu

SEQ ID NO: 883873 - RNA, 19 nt, Artificial Sequence
  Description of Artificial Sequence: Synthetic oligonucleotide
gcggagauuucugggccaa

SEQ ID NO: 883874 - RNA, 19 nt, Artificial Sequence
  Description of Artificial Sequence: Synthetic oligonucleotide
ccgcaugauguuggcuuug

SEQ ID NO: 883875 - RNA, 19 nt, Artificial Sequence
  Description of Artificial Sequence: Synthetic oligonucleotide
gcguggucaaagaguccca

SEQ ID NO: 883876 - RNA, 19 nt, Artificial Sequence
  Description of Artificial Sequence: Synthetic oligonucleotide
cccucugacugaaggccaa

SEQ ID NO: 883877 - RNA, 19 nt, Artificial Sequence
  Description of Artificial Sequence: Synthetic oligonucleotide
gguuuaccagauagacaau

SEQ ID NO: 883878 - RNA, 19 nt, Artificial Sequence
  Description of Artificial Sequence: Synthetic oligonucleotide
acucggcggcaaauuucuu

SEQ ID NO: 883879 - RNA, 19 nt, Artificial Sequence
  Description of Artificial Sequence: Synthetic oligonucleotide
agcugcuauuggggucuuu

SEQ ID NO: 883880 - RNA, 19 nt, Artificial Sequence
  Description of Artificial Sequence: Synthetic oligonucleotide
ggcuccgauauugccacuu

SEQ ID NO: 883881 - RNA, 19 nt, Artificial Sequence
  Description of Artificial Sequence: Synthetic oligonucleotide
ccgaucagaccugcacaca

SEQ ID NO: 883882 - RNA, 19 nt, Artificial Sequence
  Description of Artificial Sequence: Synthetic oligonucleotide
cauccguguaagggguuuu

SEQ ID NO: 883883 - RNA, 19 nt, Artificial Sequence
  Description of Artificial Sequence: Synthetic oligonucleotide
ggggucuuuagugggccuu

SEQ ID NO: 883884 - RNA, 19 nt, Artificial Sequence
  Description of Artificial Sequence: Synthetic oligonucleotide
guucggugaugagcuugau

SEQ ID NO: 883885 - RNA, 19 nt, Artificial Sequence
  Description of Artificial Sequence: Synthetic oligonucleotide
ccuuuacucggcggcaaau

SEQ ID NO: 883886 - RNA, 19 nt, Artificial Sequence
  Description of Artificial Sequence: Synthetic oligonucleotide
gggauggguccuguaccau

SEQ ID NO: 883887 - RNA, 19 nt, Artificial Sequence
  Description of Artificial Sequence: Synthetic oligonucleotide
caccguuggcuccgauauu

SEQ ID NO: 883888 - RNA, 19 nt, Artificial Sequence
  Description of Artificial Sequence: Synthetic oligonucleotide
caacaccguuggcuccgau

SEQ ID NO: 883889 - RNA, 19 nt, Artificial Sequence
  Description of Artificial Sequence: Synthetic oligonucleotide
gcggugggauuggccaugu

SEQ ID NO: 883890 - RNA, 19 nt, Artificial Sequence
  Description of Artificial Sequence: Synthetic oligonucleotide
ccauguccuugcccgcaau

SEQ ID NO: 883891 - RNA, 19 nt, Artificial Sequence
  Description of Artificial Sequence: Synthetic oligonucleotide
cggugggauuggccauguc

SEQ ID NO: 883892 - RNA, 19 nt, Artificial Sequence
  Description of Artificial Sequence: Synthetic oligonucleotide
ccguguucucucggauggu

SEQ ID NO: 883893 - RNA, 19 nt, Artificial Sequence
  Description of Artificial Sequence: Synthetic oligonucleotide
cagcugcuauuggggucuu

SEQ ID NO: 883894 - RNA, 19 nt, Artificial Sequence
  Description of Artificial Sequence: Synthetic oligonucleotide
cggagauuucugggccaau

SEQ ID NO: 883895 - RNA, 19 nt, Artificial Sequence
  Description of Artificial Sequence: Synthetic oligonucleotide
aaaaguaugcaguuggugc

SEQ ID NO: 883896 - RNA, 19 nt, Artificial Sequence
  Description of Artificial Sequence: Synthetic oligonucleotide
uuauugaagauacugagcc

SEQ ID NO: 883897 - RNA, 19 nt, Artificial Sequence
  Description of Artificial Sequence: Synthetic oligonucleotide
uuaguaacaaccauggaag

SEQ ID NO: 883898 - RNA, 19 nt, Artificial Sequence
  Description of Artificial Sequence: Synthetic oligonucleotide
ucaucaauuaguuuccugg

SEQ ID NO: 883899 - RNA, 19 nt, Artificial Sequence
  Description of Artificial Sequence: Synthetic oligonucleotide
aacugauuaguuuagauaa

SEQ ID NO: 883900 - RNA, 19 nt, Artificial Sequence
  Description of Artificial Sequence: Synthetic oligonucleotide
aaauaguauaaguacaacu

SEQ ID NO: 883901 - RNA, 19 nt, Artificial Sequence
  Description of Artificial Sequence: Synthetic oligonucleotide
uuuaguaacaaccauggaa

SEQ ID NO: 883902 - RNA, 19 nt, Artificial Sequence
  Description of Artificial Sequence: Synthetic oligonucleotide
uuuaaguuagcuuaacuca

SEQ ID NO: 883903 - RNA, 19 nt, Artificial Sequence
  Description of Artificial Sequence: Synthetic oligonucleotide
uuuagauaacaauacaccc

SEQ ID NO: 883904 - RNA, 19 nt, Artificial Sequence
  Description of Artificial Sequence: Synthetic oligonucleotide
aauaauaccacuaggcaag

SEQ ID NO: 883905 - RNA, 19 nt, Artificial Sequence
  Description of Artificial Sequence: Synthetic oligonucleotide
aaguacaacuaccauguac

SEQ ID NO: 883906 - RNA, 19 nt, Artificial Sequence
  Description of Artificial Sequence: Synthetic oligonucleotide
ugcuguugcauaaucaucg

SEQ ID NO: 883907 - RNA, 19 nt, Artificial Sequence
  Description of Artificial Sequence: Synthetic oligonucleotide
uauaaguacaacuaccaug

SEQ ID NO: 883908 - RNA, 19 nt, Artificial Sequence
  Description of Artificial Sequence: Synthetic oligonucleotide
uauaauuugacuugaaaau

SEQ ID NO: 883909 - RNA, 19 nt, Artificial Sequence
  Description of Artificial Sequence: Synthetic oligonucleotide
ucuccauuaaauuccaagg

SEQ ID NO: 883910 - RNA, 19 nt, Artificial Sequence
  Description of Artificial Sequence: Synthetic oligonucleotide
uguaagaccaacuuaacaa

SEQ ID NO: 883911 - RNA, 19 nt, Artificial Sequence
  Description of Artificial Sequence: Synthetic oligonucleotide
ucaauaauggguugagugg

SEQ ID NO: 883912 - RNA, 19 nt, Artificial Sequence
  Description of Artificial Sequence: Synthetic oligonucleotide
uuuucggauacaaacaucu

SEQ ID NO: 883913 - RNA, 19 nt, Artificial Sequence
  Description of Artificial Sequence: Synthetic oligonucleotide
auaguauaaguacaacuac

SEQ ID NO: 883914 - RNA, 19 nt, Artificial Sequence
  Description of Artificial Sequence: Synthetic oligonucleotide
aaguuagcuuaacucaggc

SEQ ID NO: 883915 - RNA, 19 nt, Artificial Sequence
  Description of Artificial Sequence: Synthetic oligonucleotide
cauaaguauauuaucaaac

SEQ ID NO: 883916 - RNA, 19 nt, Artificial Sequence
  Description of Artificial Sequence: Synthetic oligonucleotide
aaauaauaccacuaggcaa

SEQ ID NO: 883917 - RNA, 19 nt, Artificial Sequence
  Description of Artificial Sequence: Synthetic oligonucleotide
uauguuauugaagauacug

SEQ ID NO: 883918 - RNA, 19 nt, Artificial Sequence
  Description of Artificial Sequence: Synthetic oligonucleotide
ugaauagugacauuuaaua

SEQ ID NO: 883919 - RNA, 19 nt, Artificial Sequence
  Description of Artificial Sequence: Synthetic oligonucleotide
ucagcgaaguuauagaagc

SEQ ID NO: 883920 - RNA, 19 nt, Artificial Sequence
  Description of Artificial Sequence: Synthetic oligonucleotide
aucaucggcaaauaauacc

SEQ ID NO: 883921 - RNA, 19 nt, Artificial Sequence
  Description of Artificial Sequence: Synthetic oligonucleotide
auaguuauaauuugacuug

SEQ ID NO: 883922 - RNA, 19 nt, Artificial Sequence
  Description of Artificial Sequence: Synthetic oligonucleotide
aaauauaauagacauucua

SEQ ID NO: 883923 - RNA, 19 nt, Artificial Sequence
  Description of Artificial Sequence: Synthetic oligonucleotide
uaacaauaccuucagaacu

SEQ ID NO: 883924 - RNA, 19 nt, Artificial Sequence
  Description of Artificial Sequence: Synthetic oligonucleotide
uuaguuuacaaaauaguau

SEQ ID NO: 883925 - RNA, 19 nt, Artificial Sequence
  Description of Artificial Sequence: Synthetic oligonucleotide
uguugcauaaucaucggca

SEQ ID NO: 883926 - RNA, 19 nt, Artificial Sequence
  Description of Artificial Sequence: Synthetic oligonucleotide
ucaucggcaaauaauacca

SEQ ID NO: 883927 - RNA, 19 nt, Artificial Sequence
  Description of Artificial Sequence: Synthetic oligonucleotide
aagaaaauagucagaugcc

SEQ ID NO: 883928 - RNA, 19 nt, Artificial Sequence
  Description of Artificial Sequence: Synthetic oligonucleotide
auaaucaugacagaaaaga

SEQ ID NO: 883929 - RNA, 19 nt, Artificial Sequence
  Description of Artificial Sequence: Synthetic oligonucleotide
aauaccacuaggcaagacu

SEQ ID NO: 883930 - RNA, 19 nt, Artificial Sequence
  Description of Artificial Sequence: Synthetic oligonucleotide
uuagauaacaauacacccu

SEQ ID NO: 883931 - RNA, 19 nt, Artificial Sequence
  Description of Artificial Sequence: Synthetic oligonucleotide
ucggauacaaacaucuuug

SEQ ID NO: 883932 - RNA, 19 nt, Artificial Sequence
  Description of Artificial Sequence: Synthetic oligonucleotide
uuuacaugugaauagugac

SEQ ID NO: 883933 - RNA, 19 nt, Artificial Sequence
  Description of Artificial Sequence: Synthetic oligonucleotide
aaugacaaauuguuguccu

SEQ ID NO: 883934 - RNA, 19 nt, Artificial Sequence
  Description of Artificial Sequence: Synthetic oligonucleotide
uguaugucugaauaauucc

SEQ ID NO: 883935 - RNA, 19 nt, Artificial Sequence
  Description of Artificial Sequence: Synthetic oligonucleotide
uaguauaaguacaacuacc

SEQ ID NO: 883936 - RNA, 19 nt, Artificial Sequence
  Description of Artificial Sequence: Synthetic oligonucleotide
aaaugcuuaaaugaugaca

SEQ ID NO: 883937 - RNA, 19 nt, Artificial Sequence
  Description of Artificial Sequence: Synthetic oligonucleotide
aauucguacagcuuugaau

SEQ ID NO: 883938 - RNA, 19 nt, Artificial Sequence
  Description of Artificial Sequence: Synthetic oligonucleotide
uccauuaaauuccaaggca

SEQ ID NO: 883939 - RNA, 19 nt, Artificial Sequence
  Description of Artificial Sequence: Synthetic oligonucleotide
cuucuauuggcuucggugg

SEQ ID NO: 883940 - RNA, 19 nt, Artificial Sequence
  Description of Artificial Sequence: Synthetic oligonucleotide
uuaacaauaccuucagaac

SEQ ID NO: 883941 - RNA, 19 nt, Artificial Sequence
  Description of Artificial Sequence: Synthetic oligonucleotide
uaaucaucggcaaauaaua

SEQ ID NO: 883942 - RNA, 19 nt, Artificial Sequence
  Description of Artificial Sequence: Synthetic oligonucleotide
auugagauuguuuuacaug

SEQ ID NO: 883943 - RNA, 19 nt, Artificial Sequence
  Description of Artificial Sequence: Synthetic oligonucleotide
uuaaauuccaaggcaauca

SEQ ID NO: 883944 - RNA, 19 nt, Artificial Sequence
  Description of Artificial Sequence: Synthetic oligonucleotide
cucauuuacaauaugguga

SEQ ID NO: 883945 - RNA, 19 nt, Artificial Sequence
  Description of Artificial Sequence: Synthetic oligonucleotide
aaugguagcugagugauca

SEQ ID NO: 883946 - RNA, 19 nt, Artificial Sequence
  Description of Artificial Sequence: Synthetic oligonucleotide
guuuagauaacaauacacc

SEQ ID NO: 883947 - RNA, 19 nt, Artificial Sequence
  Description of Artificial Sequence: Synthetic oligonucleotide
uuaacucaggcaaacauua

SEQ ID NO: 883948 - RNA, 19 nt, Artificial Sequence
  Description of Artificial Sequence: Synthetic oligonucleotide
aauaagaccuuuaacaauu

SEQ ID NO: 883949 - RNA, 19 nt, Artificial Sequence
  Description of Artificial Sequence: Synthetic oligonucleotide
ugcuaaauguuguaagacc

SEQ ID NO: 883950 - RNA, 19 nt, Artificial Sequence
  Description of Artificial Sequence: Synthetic oligonucleotide
auucguacagcuuugaauu

SEQ ID NO: 883951 - RNA, 19 nt, Artificial Sequence
  Description of Artificial Sequence: Synthetic oligonucleotide
uugcauuuuaguuacugga

SEQ ID NO: 883952 - RNA, 19 nt, Artificial Sequence
  Description of Artificial Sequence: Synthetic oligonucleotide
uaaguuagcuuaacucagg

SEQ ID NO: 883953 - RNA, 19 nt, Artificial Sequence
  Description of Artificial Sequence: Synthetic oligonucleotide
ucuauuauacccugccagc

SEQ ID NO: 883954 - RNA, 19 nt, Artificial Sequence
  Description of Artificial Sequence: Synthetic oligonucleotide
ugaacgugacuccauaugu

SEQ ID NO: 883955 - RNA, 19 nt, Artificial Sequence
  Description of Artificial Sequence: Synthetic oligonucleotide
aacccguugagcaucuucc

SEQ ID NO: 883956 - RNA, 19 nt, Artificial Sequence
  Description of Artificial Sequence: Synthetic oligonucleotide
cuaauguacacuugcaauc

SEQ ID NO: 883957 - RNA, 19 nt, Artificial Sequence
  Description of Artificial Sequence: Synthetic oligonucleotide
uucagaacugauuaguuua

SEQ ID NO: 883958 - RNA, 19 nt, Artificial Sequence
  Description of Artificial Sequence: Synthetic oligonucleotide
caagcuaauguacacuugc

SEQ ID NO: 883959 - RNA, 19 nt, Artificial Sequence
  Description of Artificial Sequence: Synthetic oligonucleotide
guuagcuuaacucaggcaa

SEQ ID NO: 883960 - RNA, 19 nt, Artificial Sequence
  Description of Artificial Sequence: Synthetic oligonucleotide
uagauaacaauacacccua

SEQ ID NO: 883961 - RNA, 19 nt, Artificial Sequence
  Description of Artificial Sequence: Synthetic oligonucleotide
cauucuauuauacccugcc

SEQ ID NO: 883962 - RNA, 19 nt, Artificial Sequence
  Description of Artificial Sequence: Synthetic oligonucleotide
aauuacuaauggucuaaga

SEQ ID NO: 883963 - RNA, 19 nt, Artificial Sequence
  Description of Artificial Sequence: Synthetic oligonucleotide
auauugacuuuguaaaaca

SEQ ID NO: 883964 - RNA, 19 nt, Artificial Sequence
  Description of Artificial Sequence: Synthetic oligonucleotide
acuaugaucaaauggguuu

SEQ ID NO: 883965 - RNA, 19 nt, Artificial Sequence
  Description of Artificial Sequence: Synthetic oligonucleotide
ugauaguuauaauuugacu

SEQ ID NO: 883966 - RNA, 19 nt, Artificial Sequence
  Description of Artificial Sequence: Synthetic oligonucleotide
accucaugagaucauauug

SEQ ID NO: 883967 - RNA, 19 nt, Artificial Sequence
  Description of Artificial Sequence: Synthetic oligonucleotide
aauguguaugucugaauaa

SEQ ID NO: 883968 - RNA, 19 nt, Artificial Sequence
  Description of Artificial Sequence: Synthetic oligonucleotide
uuguaagaccaacuuaaca

SEQ ID NO: 883969 - RNA, 19 nt, Artificial Sequence
  Description of Artificial Sequence: Synthetic oligonucleotide
cucaggcaaacauuaaugc

SEQ ID NO: 883970 - RNA, 19 nt, Artificial Sequence
  Description of Artificial Sequence: Synthetic oligonucleotide
cugaaaacacccaaacuug

SEQ ID NO: 883971 - RNA, 19 nt, Artificial Sequence
  Description of Artificial Sequence: Synthetic oligonucleotide
aaacccguugagcaucuuc

SEQ ID NO: 883972 - RNA, 19 nt, Artificial Sequence
  Description of Artificial Sequence: Synthetic oligonucleotide
augauaguuauaauuugac

SEQ ID NO: 883973 - RNA, 19 nt, Artificial Sequence
  Description of Artificial Sequence: Synthetic oligonucleotide
ucagaacugauuaguuuag

SEQ ID NO: 883974 - RNA, 19 nt, Artificial Sequence
  Description of Artificial Sequence: Synthetic oligonucleotide
aaucaucggcaaauaauac

SEQ ID NO: 883975 - RNA, 19 nt, Artificial Sequence
  Description of Artificial Sequence: Synthetic oligonucleotide
aauguacacuugcaaucuc

SEQ ID NO: 883976 - RNA, 19 nt, Artificial Sequence
  Description of Artificial Sequence: Synthetic oligonucleotide
ugcaucuuugaauugggcu

SEQ ID NO: 883977 - RNA, 19 nt, Artificial Sequence
  Description of Artificial Sequence: Synthetic oligonucleotide
uacauaaguauauuaucaa

SEQ ID NO: 883978 - RNA, 19 nt, Artificial Sequence
  Description of Artificial Sequence: Synthetic oligonucleotide
ucaauuaguuuccuggcau

SEQ ID NO: 883979 - RNA, 19 nt, Artificial Sequence
  Description of Artificial Sequence: Synthetic oligonucleotide
aauggucuaagaguaauau

SEQ ID NO: 883980 - RNA, 19 nt, Artificial Sequence
  Description of Artificial Sequence: Synthetic oligonucleotide
agauacugagcccugcauc

SEQ ID NO: 883981 - RNA, 19 nt, Artificial Sequence
  Description of Artificial Sequence: Synthetic oligonucleotide
ugcucaauauucuuaauuu

SEQ ID NO: 883982 - RNA, 19 nt, Artificial Sequence
  Description of Artificial Sequence: Synthetic oligonucleotide
ucuuuucggauacaaacau

SEQ ID NO: 883983 - RNA, 19 nt, Artificial Sequence
  Description of Artificial Sequence: Synthetic oligonucleotide
uauuauacccugccagcag

SEQ ID NO: 883984 - RNA, 19 nt, Artificial Sequence
  Description of Artificial Sequence: Synthetic oligonucleotide
aguaauauacauaaguaua

SEQ ID NO: 883985 - RNA, 19 nt, Artificial Sequence
  Description of Artificial Sequence: Synthetic oligonucleotide
acaugauaguuauaauuug

SEQ ID NO: 883986 - RNA, 19 nt, Artificial Sequence
  Description of Artificial Sequence: Synthetic oligonucleotide
ugugaauagugacauuuaa

SEQ ID NO: 883987 - RNA, 19 nt, Artificial Sequence
  Description of Artificial Sequence: Synthetic oligonucleotide
aacucuauauauaaaguuu

SEQ ID NO: 883988 - RNA, 19 nt, Artificial Sequence
  Description of Artificial Sequence: Synthetic oligonucleotide
uacaauauggugacauccu

SEQ ID NO: 883989 - RNA, 19 nt, Artificial Sequence
  Description of Artificial Sequence: Synthetic oligonucleotide
ugaaugacaaauuguuguc

SEQ ID NO: 883990 - RNA, 19 nt, Artificial Sequence
  Description of Artificial Sequence: Synthetic oligonucleotide
aaggcuaggcacaauguag

SEQ ID NO: 883991 - RNA, 19 nt, Artificial Sequence
  Description of Artificial Sequence: Synthetic oligonucleotide
cuuaauaccacaauccgcu

SEQ ID NO: 883992 - RNA, 19 nt, Artificial Sequence
  Description of Artificial Sequence: Synthetic oligonucleotide
aauucaggguaguaccacu

SEQ ID NO: 883993 - RNA, 19 nt, Artificial Sequence
  Description of Artificial Sequence: Synthetic oligonucleotide
cacaauccgcuucaaaucc

SEQ ID NO: 883994 - RNA, 19 nt, Artificial Sequence
  Description of Artificial Sequence: Synthetic oligonucleotide
uguuugucccugcuaaaug

SEQ ID NO: 883995 - RNA, 19 nt, Artificial Sequence
  Description of Artificial Sequence: Synthetic oligonucleotide
aguauaaguacaacuacca

SEQ ID NO: 883996 - RNA, 19 nt, Artificial Sequence
  Description of Artificial Sequence: Synthetic oligonucleotide
uccgcuuucauugacauuu

SEQ ID NO: 883997 - RNA, 19 nt, Artificial Sequence
  Description of Artificial Sequence: Synthetic oligonucleotide
auuuacaauauggugacau

SEQ ID NO: 883998 - RNA, 19 nt, Artificial Sequence
  Description of Artificial Sequence: Synthetic oligonucleotide
ugaauugggcugcuaauuc

SEQ ID NO: 883999 - RNA, 19 nt, Artificial Sequence
  Description of Artificial Sequence: Synthetic oligonucleotide
accacaauccgcuucaaau

SEQ ID NO: 884000 - RNA, 19 nt, Artificial Sequence
  Description of Artificial Sequence: Synthetic oligonucleotide
caaauaauaccacuaggca

SEQ ID NO: 884001 - RNA, 19 nt, Artificial Sequence
  Description of Artificial Sequence: Synthetic oligonucleotide
gagauuguuuuacauguga

SEQ ID NO: 884002 - RNA, 19 nt, Artificial Sequence
  Description of Artificial Sequence: Synthetic oligonucleotide
uauugaagauacugagccc

SEQ ID NO: 884003 - RNA, 19 nt, Artificial Sequence
  Description of Artificial Sequence: Synthetic oligonucleotide
aauguaggugcucaauauu

SEQ ID NO: 884004 - RNA, 19 nt, Artificial Sequence
  Description of Artificial Sequence: Synthetic oligonucleotide
gcaaauaauaccacuaggc

SEQ ID NO: 884005 - RNA, 19 nt, Artificial Sequence
  Description of Artificial Sequence: Synthetic oligonucleotide
aauccaccaauguguaugu

SEQ ID NO: 884006 - RNA, 19 nt, Artificial Sequence
  Description of Artificial Sequence: Synthetic oligonucleotide
uaaaauuacuaauggucua

SEQ ID NO: 884007 - RNA, 19 nt, Artificial Sequence
  Description of Artificial Sequence: Synthetic oligonucleotide
auaccacuaggcaagacuc

SEQ ID NO: 884008 - RNA, 19 nt, Artificial Sequence
  Description of Artificial Sequence: Synthetic oligonucleotide
uuuaacaauuuagcauuag

SEQ ID NO: 884009 - RNA, 19 nt, Artificial Sequence
  Description of Artificial Sequence: Synthetic oligonucleotide
ucgguggaaauucguacag

SEQ ID NO: 884010 - RNA, 19 nt, Artificial Sequence
  Description of Artificial Sequence: Synthetic oligonucleotide
ggaaaaggggcuuaauacc

SEQ ID NO: 884011 - RNA, 19 nt, Artificial Sequence
  Description of Artificial Sequence: Synthetic oligonucleotide
acagucuugaaugacaaau

SEQ ID NO: 884012 - RNA, 19 nt, Artificial Sequence
  Description of Artificial Sequence: Synthetic oligonucleotide
caugauaguuauaauuuga

SEQ ID NO: 884013 - RNA, 19 nt, Artificial Sequence
  Description of Artificial Sequence: Synthetic oligonucleotide
uacacccuaaagcaguuuc

SEQ ID NO: 884014 - RNA, 19 nt, Artificial Sequence
  Description of Artificial Sequence: Synthetic oligonucleotide
aaugguaaugguagcugag

SEQ ID NO: 884015 - RNA, 19 nt, Artificial Sequence
  Description of Artificial Sequence: Synthetic oligonucleotide
aaaaggggcuuaauaccac

SEQ ID NO: 884016 - RNA, 19 nt, Artificial Sequence
  Description of Artificial Sequence: Synthetic oligonucleotide
cucaugagaucauauugac

SEQ ID NO: 884017 - RNA, 19 nt, Artificial Sequence
  Description of Artificial Sequence: Synthetic oligonucleotide
uucgguggaaauucguaca

SEQ ID NO: 884018 - RNA, 19 nt, Artificial Sequence
  Description of Artificial Sequence: Synthetic oligonucleotide
ggcuuaauaccacaauccg

SEQ ID NO: 884019 - RNA, 19 nt, Artificial Sequence
  Description of Artificial Sequence: Synthetic oligonucleotide
aacgugacuccauauguua

SEQ ID NO: 884020 - RNA, 19 nt, Artificial Sequence
  Description of Artificial Sequence: Synthetic oligonucleotide
augaacgugacuccauaug

SEQ ID NO: 884021 - RNA, 19 nt, Artificial Sequence
  Description of Artificial Sequence: Synthetic oligonucleotide
gaacugauuaguuuagaua

SEQ ID NO: 884022 - RNA, 19 nt, Artificial Sequence
  Description of Artificial Sequence: Synthetic oligonucleotide
ucggcaaauaauaccacua

SEQ ID NO: 884023 - RNA, 19 nt, Artificial Sequence
  Description of Artificial Sequence: Synthetic oligonucleotide
ugcauaaucaucggcaaau

SEQ ID NO: 884024 - RNA, 19 nt, Artificial Sequence
  Description of Artificial Sequence: Synthetic oligonucleotide
ggcaaauaauaccacuagg

SEQ ID NO: 884025 - RNA, 19 nt, Artificial Sequence
  Description of Artificial Sequence: Synthetic oligonucleotide
ucaaauccccaucuguauc

SEQ ID NO: 884026 - RNA, 19 nt, Artificial Sequence
  Description of Artificial Sequence: Synthetic oligonucleotide
agaaaauagucagaugccu

SEQ ID NO: 884027 - RNA, 19 nt, Artificial Sequence
  Description of Artificial Sequence: Synthetic oligonucleotide
auaaguggccauuuucagu

SEQ ID NO: 884028 - RNA, 19 nt, Artificial Sequence
  Description of Artificial Sequence: Synthetic oligonucleotide
ucaugagaucauauugacu

SEQ ID NO: 884029 - RNA, 19 nt, Artificial Sequence
  Description of Artificial Sequence: Synthetic oligonucleotide
guuauaauuugacuugaaa

SEQ ID NO: 884030 - RNA, 19 nt, Artificial Sequence
  Description of Artificial Sequence: Synthetic oligonucleotide
ucucagcgaaguuauagaa

SEQ ID NO: 884031 - RNA, 19 nt, Artificial Sequence
  Description of Artificial Sequence: Synthetic oligonucleotide
auaaucaucggcaaauaau

SEQ ID NO: 884032 - RNA, 19 nt, Artificial Sequence
  Description of Artificial Sequence: Synthetic oligonucleotide
auuaaugccucugaccaca

SEQ ID NO: 884033 - RNA, 19 nt, Artificial Sequence
  Description of Artificial Sequence: Synthetic oligonucleotide
cucagcgaaguuauagaag

SEQ ID NO: 884034 - RNA, 19 nt, Artificial Sequence
  Description of Artificial Sequence: Synthetic oligonucleotide
aucaauuaguuuccuggca

SEQ ID NO: 884035 - RNA, 19 nt, Artificial Sequence
  Description of Artificial Sequence: Synthetic oligonucleotide
auuauacccugccagcagu

SEQ ID NO: 884036 - RNA, 19 nt, Artificial Sequence
  Description of Artificial Sequence: Synthetic oligonucleotide
ugagauuguuuuacaugug

SEQ ID NO: 884037 - RNA, 19 nt, Artificial Sequence
  Description of Artificial Sequence: Synthetic oligonucleotide
cuucgguggaaauucguac

SEQ ID NO: 884038 - RNA, 19 nt, Artificial Sequence
  Description of Artificial Sequence: Synthetic oligonucleotide
gucagaugccuuuucucgg

SEQ ID NO: 884039 - RNA, 19 nt, Artificial Sequence
  Description of Artificial Sequence: Synthetic oligonucleotide
uuuguaaaacaugaugcuu

SEQ ID NO: 884040 - RNA, 19 nt, Artificial Sequence
  Description of Artificial Sequence: Synthetic oligonucleotide
ugcuaauucaggguaguac

SEQ ID NO: 884041 - RNA, 19 nt, Artificial Sequence
  Description of Artificial Sequence: Synthetic oligonucleotide
aaauucguacagcuuugaa

SEQ ID NO: 884042 - RNA, 19 nt, Artificial Sequence
  Description of Artificial Sequence: Synthetic oligonucleotide
uuagcuuaacucaggcaaa

SEQ ID NO: 884043 - RNA, 19 nt, Artificial Sequence
  Description of Artificial Sequence: Synthetic oligonucleotide
aggguaguaccacugaaaa

SEQ ID NO: 884044 - RNA, 19 nt, Artificial Sequence
  Description of Artificial Sequence: Synthetic oligonucleotide
uaggaacauagucuugaac

SEQ ID NO: 884045 - RNA, 19 nt, Artificial Sequence
  Description of Artificial Sequence: Synthetic oligonucleotide
acucaggcaaacauuaaug

SEQ ID NO: 884046 - RNA, 19 nt, Artificial Sequence
  Description of Artificial Sequence: Synthetic oligonucleotide
cacaaggcuaggcacaaug

SEQ ID NO: 884047 - RNA, 19 nt, Artificial Sequence
  Description of Artificial Sequence: Synthetic oligonucleotide
gcuucuauuggcuucggug

SEQ ID NO: 884048 - RNA, 19 nt, Artificial Sequence
  Description of Artificial Sequence: Synthetic oligonucleotide
uaagcgaccuacuguuuca

SEQ ID NO: 884049 - RNA, 19 nt, Artificial Sequence
  Description of Artificial Sequence: Synthetic oligonucleotide
aucggcaaauaauaccacu

SEQ ID NO: 884050 - RNA, 19 nt, Artificial Sequence
  Description of Artificial Sequence: Synthetic oligonucleotide
uucaaauccccaucuguau

SEQ ID NO: 884051 - RNA, 19 nt, Artificial Sequence
  Description of Artificial Sequence: Synthetic oligonucleotide
acagguguaaaaucaugaa

SEQ ID NO: 884052 - RNA, 19 nt, Artificial Sequence
  Description of Artificial Sequence: Synthetic oligonucleotide
auucuauuauacccugcca

SEQ ID NO: 884053 - RNA, 19 nt, Artificial Sequence
  Description of Artificial Sequence: Synthetic oligonucleotide
uacuaugaucaaauggguu

SEQ ID NO: 884054 - RNA, 19 nt, Artificial Sequence
  Description of Artificial Sequence: Synthetic oligonucleotide
aaauggguuugagaaacaa

SEQ ID NO: 884055 - RNA, 19 nt, Artificial Sequence
  Description of Artificial Sequence: Synthetic oligonucleotide
gaauugggcugcuaauuca

SEQ ID NO: 884056 - RNA, 19 nt, Artificial Sequence
  Description of Artificial Sequence: Synthetic oligonucleotide
agcgaaguuauagaagcug

SEQ ID NO: 884057 - RNA, 19 nt, Artificial Sequence
  Description of Artificial Sequence: Synthetic oligonucleotide
cauugcauuuuaguuacug

SEQ ID NO: 884058 - RNA, 19 nt, Artificial Sequence
  Description of Artificial Sequence: Synthetic oligonucleotide
aucucagcgaaguuauaga

SEQ ID NO: 884059 - RNA, 19 nt, Artificial Sequence
  Description of Artificial Sequence: Synthetic oligonucleotide
ugugcauuugaagacugaa

SEQ ID NO: 884060 - RNA, 19 nt, Artificial Sequence
  Description of Artificial Sequence: Synthetic oligonucleotide
aguuagcuuaacucaggca

SEQ ID NO: 884061 - RNA, 19 nt, Artificial Sequence
  Description of Artificial Sequence: Synthetic oligonucleotide
gauacugagcccugcaucu

SEQ ID NO: 884062 - RNA, 19 nt, Artificial Sequence
  Description of Artificial Sequence: Synthetic oligonucleotide
auaauggguugaguggcac

SEQ ID NO: 884063 - RNA, 19 nt, Artificial Sequence
  Description of Artificial Sequence: Synthetic oligonucleotide
ucagaugccuuuucucgga

SEQ ID NO: 884064 - RNA, 19 nt, Artificial Sequence
  Description of Artificial Sequence: Synthetic oligonucleotide
acugauuaguuuagauaac

SEQ ID NO: 884065 - RNA, 19 nt, Artificial Sequence
  Description of Artificial Sequence: Synthetic oligonucleotide
guaacaaccauggaagaaa

SEQ ID NO: 884066 - RNA, 19 nt, Artificial Sequence
  Description of Artificial Sequence: Synthetic oligonucleotide
caauccgcuucaaaucccc

SEQ ID NO: 884067 - RNA, 19 nt, Artificial Sequence
  Description of Artificial Sequence: Synthetic oligonucleotide
uaguaacaaccauggaaga

SEQ ID NO: 884068 - RNA, 19 nt, Artificial Sequence
  Description of Artificial Sequence: Synthetic oligonucleotide
uucuauuggcuucggugga

SEQ ID NO: 884069 - RNA, 19 nt, Artificial Sequence
  Description of Artificial Sequence: Synthetic oligonucleotide
uugaagauacugagcccug

SEQ ID NO: 884070 - RNA, 19 nt, Artificial Sequence
  Description of Artificial Sequence: Synthetic oligonucleotide
agguaagcgaccuacuguu

SEQ ID NO: 884071 - RNA, 19 nt, Artificial Sequence
  Description of Artificial Sequence: Synthetic oligonucleotide
agcuaauguacacuugcaa

SEQ ID NO: 884072 - RNA, 19 nt, Artificial Sequence
  Description of Artificial Sequence: Synthetic oligonucleotide
aguauauuaucaaacucua

SEQ ID NO: 884073 - RNA, 19 nt, Artificial Sequence
  Description of Artificial Sequence: Synthetic oligonucleotide
uaauggucuaagaguaaua

SEQ ID NO: 884074 - RNA, 19 nt, Artificial Sequence
  Description of Artificial Sequence: Synthetic oligonucleotide
uucccauaccuccuggaaa

SEQ ID NO: 884075 - RNA, 19 nt, Artificial Sequence
  Description of Artificial Sequence: Synthetic oligonucleotide
agacauucuauuauacccu

SEQ ID NO: 884076 - RNA, 19 nt, Artificial Sequence
  Description of Artificial Sequence: Synthetic oligonucleotide
cacuuuuccagguaagcga

SEQ ID NO: 884077 - RNA, 19 nt, Artificial Sequence
  Description of Artificial Sequence: Synthetic oligonucleotide
agauucaauaauggguuga

SEQ ID NO: 884078 - RNA, 19 nt, Artificial Sequence
  Description of Artificial Sequence: Synthetic oligonucleotide
ucugaccccgggauacggg

SEQ ID NO: 884079 - RNA, 19 nt, Artificial Sequence
  Description of Artificial Sequence: Synthetic oligonucleotide
acauugagauuguuuuaca

SEQ ID NO: 884080 - RNA, 19 nt, Artificial Sequence
  Description of Artificial Sequence: Synthetic oligonucleotide
acauucuauuauacccugc

SEQ ID NO: 884081 - RNA, 19 nt, Artificial Sequence
  Description of Artificial Sequence: Synthetic oligonucleotide
uaccuucagaacugauuag

SEQ ID NO: 884082 - RNA, 19 nt, Artificial Sequence
  Description of Artificial Sequence: Synthetic oligonucleotide
ugcuggcaagcuaauguac

SEQ ID NO: 884083 - RNA, 19 nt, Artificial Sequence
  Description of Artificial Sequence: Synthetic oligonucleotide
cuuuucggauacaaacauc

SEQ ID NO: 884084 - RNA, 19 nt, Artificial Sequence
  Description of Artificial Sequence: Synthetic oligonucleotide
augacaaauuguuguccug

SEQ ID NO: 884085 - RNA, 19 nt, Artificial Sequence
  Description of Artificial Sequence: Synthetic oligonucleotide
cugcuaaauguuguaagac

SEQ ID NO: 884086 - RNA, 19 nt, Artificial Sequence
  Description of Artificial Sequence: Synthetic oligonucleotide
aaauccccaucuguaucuc

SEQ ID NO: 884087 - RNA, 19 nt, Artificial Sequence
  Description of Artificial Sequence: Synthetic oligonucleotide
acacgaaacugcuggcaag

SEQ ID NO: 884088 - RNA, 19 nt, Artificial Sequence
  Description of Artificial Sequence: Synthetic oligonucleotide
guaaaaucaugaacgugac

SEQ ID NO: 884089 - RNA, 19 nt, Artificial Sequence
  Description of Artificial Sequence: Synthetic oligonucleotide
uccgcuucaaauccccauc

SEQ ID NO: 884090 - RNA, 19 nt, Artificial Sequence
  Description of Artificial Sequence: Synthetic oligonucleotide
acaauccgcuucaaauccc

SEQ ID NO: 884091 - RNA, 19 nt, Artificial Sequence
  Description of Artificial Sequence: Synthetic oligonucleotide
uaauucaggguaguaccac

SEQ ID NO: 884092 - RNA, 19 nt, Artificial Sequence
  Description of Artificial Sequence: Synthetic oligonucleotide
uuccagguaagcgaccuac

SEQ ID NO: 884093 - RNA, 19 nt, Artificial Sequence
  Description of Artificial Sequence: Synthetic oligonucleotide
aacuuucuacagucccuca

SEQ ID NO: 884094 - RNA, 19 nt, Artificial Sequence
  Description of Artificial Sequence: Synthetic oligonucleotide
aaugggccuaagaaagcug

SEQ ID NO: 884095 - RNA, 19 nt, Artificial Sequence
  Description of Artificial Sequence: Synthetic oligonucleotide
cuaauucaggguaguacca

SEQ ID NO: 884096 - RNA, 19 nt, Artificial Sequence
  Description of Artificial Sequence: Synthetic oligonucleotide
guaagcgaccuacuguuuc

SEQ ID NO: 884097 - RNA, 19 nt, Artificial Sequence
  Description of Artificial Sequence: Synthetic oligonucleotide
cuggcaagcuaauguacac

SEQ ID NO: 884098 - RNA, 19 nt, Artificial Sequence
  Description of Artificial Sequence: Synthetic oligonucleotide
gcuaaauguuguaagacca

SEQ ID NO: 884099 - RNA, 19 nt, Artificial Sequence
  Description of Artificial Sequence: Synthetic oligonucleotide
gcgaccuacuguuucaucc

SEQ ID NO: 884100 - RNA, 19 nt, Artificial Sequence
  Description of Artificial Sequence: Synthetic oligonucleotide
ggccuaagaaagcuguucc

SEQ ID NO: 884101 - RNA, 19 nt, Artificial Sequence
  Description of Artificial Sequence: Synthetic oligonucleotide
gguugaguggcacagcaca

SEQ ID NO: 884102 - RNA, 19 nt, Artificial Sequence
  Description of Artificial Sequence: Synthetic oligonucleotide
cuuucuacagucccucaca

SEQ ID NO: 884103 - RNA, 19 nt, Artificial Sequence
  Description of Artificial Sequence: Synthetic oligonucleotide
gggcuuaauaccacaaucc

SEQ ID NO: 884104 - RNA, 19 nt, Artificial Sequence
  Description of Artificial Sequence: Synthetic oligonucleotide
uugaauugggcugcuaauu

SEQ ID NO: 884105 - RNA, 19 nt, Artificial Sequence
  Description of Artificial Sequence: Synthetic oligonucleotide
gaagacugaauccaccaau

SEQ ID NO: 884106 - RNA, 19 nt, Artificial Sequence
  Description of Artificial Sequence: Synthetic oligonucleotide
ucguacagcuuugaauucu

SEQ ID NO: 884107 - RNA, 19 nt, Artificial Sequence
  Description of Artificial Sequence: Synthetic oligonucleotide
uugcauaaucaucggcaaa

SEQ ID NO: 884108 - RNA, 19 nt, Artificial Sequence
  Description of Artificial Sequence: Synthetic oligonucleotide
cacgaaacugcuggcaagc

SEQ ID NO: 884109 - RNA, 19 nt, Artificial Sequence
  Description of Artificial Sequence: Synthetic oligonucleotide
aaccccuuaccaaccaucu

SEQ ID NO: 884110 - RNA, 19 nt, Artificial Sequence
  Description of Artificial Sequence: Synthetic oligonucleotide
aagcuaauguacacuugca

SEQ ID NO: 884111 - RNA, 19 nt, Artificial Sequence
  Description of Artificial Sequence: Synthetic oligonucleotide
aaauagucagaugccuuuu

SEQ ID NO: 884112 - RNA, 19 nt, Artificial Sequence
  Description of Artificial Sequence: Synthetic oligonucleotide
caaugguaaugguagcuga

SEQ ID NO: 884113 - RNA, 19 nt, Artificial Sequence
  Description of Artificial Sequence: Synthetic oligonucleotide
cauuaaugccucugaccac

SEQ ID NO: 884114 - RNA, 19 nt, Artificial Sequence
  Description of Artificial Sequence: Synthetic oligonucleotide
uaccacuaggcaagacuca

SEQ ID NO: 884115 - RNA, 19 nt, Artificial Sequence
  Description of Artificial Sequence: Synthetic oligonucleotide
acccguugagcaucuuccg

SEQ ID NO: 884116 - RNA, 19 nt, Artificial Sequence
  Description of Artificial Sequence: Synthetic oligonucleotide
cucacacgaaacugcuggc

SEQ ID NO: 884117 - RNA, 19 nt, Artificial Sequence
  Description of Artificial Sequence: Synthetic oligonucleotide
uggcuucgguggaaauucg

SEQ ID NO: 884118 - RNA, 19 nt, Artificial Sequence
  Description of Artificial Sequence: Synthetic oligonucleotide
auaggaacauagucuugaa

SEQ ID NO: 884119 - RNA, 19 nt, Artificial Sequence
  Description of Artificial Sequence: Synthetic oligonucleotide
uucguacagcuuugaauuc

SEQ ID NO: 884120 - RNA, 19 nt, Artificial Sequence
  Description of Artificial Sequence: Synthetic oligonucleotide
accaacuuaacaauaccuu

SEQ ID NO: 884121 - RNA, 19 nt, Artificial Sequence
  Description of Artificial Sequence: Synthetic oligonucleotide
uacaacuaccauguacaaa

SEQ ID NO: 884122 - RNA, 19 nt, Artificial Sequence
  Description of Artificial Sequence: Synthetic oligonucleotide
guaagaccaacuuaacaau

SEQ ID NO: 884123 - RNA, 19 nt, Artificial Sequence
  Description of Artificial Sequence: Synthetic oligonucleotide
ggggcuuaauaccacaauc

SEQ ID NO: 884124 - RNA, 19 nt, Artificial Sequence
  Description of Artificial Sequence: Synthetic oligonucleotide
ggauacaaacaucuuuguc

SEQ ID NO: 884125 - RNA, 19 nt, Artificial Sequence
  Description of Artificial Sequence: Synthetic oligonucleotide
auggucuaagaguaauaua

SEQ ID NO: 884126 - RNA, 19 nt, Artificial Sequence
  Description of Artificial Sequence: Synthetic oligonucleotide
auuccuuuaaaugggccua

SEQ ID NO: 884127 - RNA, 19 nt, Artificial Sequence
  Description of Artificial Sequence: Synthetic oligonucleotide
agaucauauugacuuugua

SEQ ID NO: 884128 - RNA, 19 nt, Artificial Sequence
  Description of Artificial Sequence: Synthetic oligonucleotide
caucggcaaauaauaccac

SEQ ID NO: 884129 - RNA, 19 nt, Artificial Sequence
  Description of Artificial Sequence: Synthetic oligonucleotide
gcuuaauaccacaauccgc

SEQ ID NO: 884130 - RNA, 19 nt, Artificial Sequence
  Description of Artificial Sequence: Synthetic oligonucleotide
uagcuuaacucaggcaaac

SEQ ID NO: 884131 - RNA, 19 nt, Artificial Sequence
  Description of Artificial Sequence: Synthetic oligonucleotide
uuucggauacaaacaucuu

SEQ ID NO: 884132 - RNA, 19 nt, Artificial Sequence
  Description of Artificial Sequence: Synthetic oligonucleotide
auucaggguaguaccacug

SEQ ID NO: 884133 - RNA, 19 nt, Artificial Sequence
  Description of Artificial Sequence: Synthetic oligonucleotide
aaguuuggaaaaggggcuu

SEQ ID NO: 884134 - RNA, 19 nt, Artificial Sequence
  Description of Artificial Sequence: Synthetic oligonucleotide
cuauuauacccugccagca

SEQ ID NO: 884135 - RNA, 19 nt, Artificial Sequence
  Description of Artificial Sequence: Synthetic oligonucleotide
guaguaccacugaaaacac

SEQ ID NO: 884136 - RNA, 19 nt, Artificial Sequence
  Description of Artificial Sequence: Synthetic oligonucleotide
uccagguaagcgaccuacu

SEQ ID NO: 884137 - RNA, 19 nt, Artificial Sequence
  Description of Artificial Sequence: Synthetic oligonucleotide
agcgaccuacuguuucauc

SEQ ID NO: 884138 - RNA, 19 nt, Artificial Sequence
  Description of Artificial Sequence: Synthetic oligonucleotide
accauguacaaaaucucau

SEQ ID NO: 884139 - RNA, 19 nt, Artificial Sequence
  Description of Artificial Sequence: Synthetic oligonucleotide
uuauacccugccagcaguu

SEQ ID NO: 884140 - RNA, 19 nt, Artificial Sequence
  Description of Artificial Sequence: Synthetic oligonucleotide
ccuaaagcaguuucccuug

SEQ ID NO: 884141 - RNA, 19 nt, Artificial Sequence
  Description of Artificial Sequence: Synthetic oligonucleotide
uuaauaccacaauccgcuu

SEQ ID NO: 884142 - RNA, 19 nt, Artificial Sequence
  Description of Artificial Sequence: Synthetic oligonucleotide
gaaauucguacagcuuuga

SEQ ID NO: 884143 - RNA, 19 nt, Artificial Sequence
  Description of Artificial Sequence: Synthetic oligonucleotide
augggccuaagaaagcugu

SEQ ID NO: 884144 - RNA, 19 nt, Artificial Sequence
  Description of Artificial Sequence: Synthetic oligonucleotide
uggcaagcuaauguacacu

SEQ ID NO: 884145 - RNA, 19 nt, Artificial Sequence
  Description of Artificial Sequence: Synthetic oligonucleotide
uuaaugccucugaccacaa

SEQ ID NO: 884146 - RNA, 19 nt, Artificial Sequence
  Description of Artificial Sequence: Synthetic oligonucleotide
uccuuuaaaugggccuaag

SEQ ID NO: 884147 - RNA, 19 nt, Artificial Sequence
  Description of Artificial Sequence: Synthetic oligonucleotide
auuguuguccugccacuuu

SEQ ID NO: 884148 - RNA, 19 nt, Artificial Sequence
  Description of Artificial Sequence: Synthetic oligonucleotide
caaauccccaucuguaucu

SEQ ID NO: 884149 - RNA, 19 nt, Artificial Sequence
  Description of Artificial Sequence: Synthetic oligonucleotide
ggaaauucguacagcuuug

SEQ ID NO: 884150 - RNA, 19 nt, Artificial Sequence
  Description of Artificial Sequence: Synthetic oligonucleotide
accccuuaccaaccaucuc

SEQ ID NO: 884151 - RNA, 19 nt, Artificial Sequence
  Description of Artificial Sequence: Synthetic oligonucleotide
cuuaacucaggcaaacauu

SEQ ID NO: 884152 - RNA, 19 nt, Artificial Sequence
  Description of Artificial Sequence: Synthetic oligonucleotide
accaucucaucaauuaguu

SEQ ID NO: 884153 - RNA, 19 nt, Artificial Sequence
  Description of Artificial Sequence: Synthetic oligonucleotide
aggggcuuaauaccacaau

SEQ ID NO: 884154 - RNA, 19 nt, Artificial Sequence
  Description of Artificial Sequence: Synthetic oligonucleotide
cccugcuaaauguuguaag

SEQ ID NO: 884155 - RNA, 19 nt, Artificial Sequence
  Description of Artificial Sequence: Synthetic oligonucleotide
acaaggcuaggcacaaugu

SEQ ID NO: 884156 - RNA, 19 nt, Artificial Sequence
  Description of Artificial Sequence: Synthetic oligonucleotide
auccgcuucaaauccccau

SEQ ID NO: 884157 - RNA, 19 nt, Artificial Sequence
  Description of Artificial Sequence: Synthetic oligonucleotide
uacugagcccugcaucuuu

SEQ ID NO: 884158 - RNA, 19 nt, Artificial Sequence
  Description of Artificial Sequence: Synthetic oligonucleotide
gguguaaaaucaugaacgu

SEQ ID NO: 884159 - RNA, 19 nt, Artificial Sequence
  Description of Artificial Sequence: Synthetic oligonucleotide
ucuauuggcuucgguggaa

SEQ ID NO: 884160 - RNA, 19 nt, Artificial Sequence
  Description of Artificial Sequence: Synthetic oligonucleotide
auaauaccacuaggcaaga

SEQ ID NO: 884161 - RNA, 19 nt, Artificial Sequence
  Description of Artificial Sequence: Synthetic oligonucleotide
ccucaugagaucauauuga

SEQ ID NO: 884162 - RNA, 19 nt, Artificial Sequence
  Description of Artificial Sequence: Synthetic oligonucleotide
ccacaauccgcuucaaauc

SEQ ID NO: 884163 - RNA, 19 nt, Artificial Sequence
  Description of Artificial Sequence: Synthetic oligonucleotide
ucccugcuaaauguuguaa

SEQ ID NO: 884164 - RNA, 19 nt, Artificial Sequence
  Description of Artificial Sequence: Synthetic oligonucleotide
cgggauacgggaacaaugc

SEQ ID NO: 884165 - RNA, 19 nt, Artificial Sequence
  Description of Artificial Sequence: Synthetic oligonucleotide
guauaaguacaacuaccau

SEQ ID NO: 884166 - RNA, 19 nt, Artificial Sequence
  Description of Artificial Sequence: Synthetic oligonucleotide
aguuauaauuugacuugaa

SEQ ID NO: 884167 - RNA, 19 nt, Artificial Sequence
  Description of Artificial Sequence: Synthetic oligonucleotide
cauugagauuguuuuacau

SEQ ID NO: 884168 - RNA, 19 nt, Artificial Sequence
  Description of Artificial Sequence: Synthetic oligonucleotide
auacgggaacaaugcuucu

SEQ ID NO: 884169 - RNA, 19 nt, Artificial Sequence
  Description of Artificial Sequence: Synthetic oligonucleotide
uacgggaacaaugcuucua

SEQ ID NO: 884170 - RNA, 19 nt, Artificial Sequence
  Description of Artificial Sequence: Synthetic oligonucleotide
ccugcuaaauguuguaaga

SEQ ID NO: 884171 - RNA, 19 nt, Artificial Sequence
  Description of Artificial Sequence: Synthetic oligonucleotide
cuucugucucugaccccgg

SEQ ID NO: 884172 - RNA, 19 nt, Artificial Sequence
  Description of Artificial Sequence: Synthetic oligonucleotide
auauguuauugaagauacu

SEQ ID NO: 884173 - RNA, 19 nt, Artificial Sequence
  Description of Artificial Sequence: Synthetic oligonucleotide
caggguaguaccacugaaa

SEQ ID NO: 884174 - RNA, 19 nt, Artificial Sequence
  Description of Artificial Sequence: Synthetic oligonucleotide
aauccgcuucaaaucccca

SEQ ID NO: 884175 - RNA, 19 nt, Artificial Sequence
  Description of Artificial Sequence: Synthetic oligonucleotide
cccuugaaaacugaaucug

SEQ ID NO: 884176 - RNA, 19 nt, Artificial Sequence
  Description of Artificial Sequence: Synthetic oligonucleotide
guaugcaguuggugcaguc

SEQ ID NO: 884177 - RNA, 19 nt, Artificial Sequence
  Description of Artificial Sequence: Synthetic oligonucleotide
agcuuaacucaggcaaaca

SEQ ID NO: 884178 - RNA, 19 nt, Artificial Sequence
  Description of Artificial Sequence: Synthetic oligonucleotide
ggguaguaccacugaaaac

SEQ ID NO: 884179 - RNA, 19 nt, Artificial Sequence
  Description of Artificial Sequence: Synthetic oligonucleotide
caaggcuaggcacaaugua

SEQ ID NO: 884180 - RNA, 19 nt, Artificial Sequence
  Description of Artificial Sequence: Synthetic oligonucleotide
ccgggauacgggaacaaug

SEQ ID NO: 884181 - RNA, 19 nt, Artificial Sequence
  Description of Artificial Sequence: Synthetic oligonucleotide
ugcaccucaugagaucaua

SEQ ID NO: 884182 - RNA, 19 nt, Artificial Sequence
  Description of Artificial Sequence: Synthetic oligonucleotide
cucugaccccgggauacgg

SEQ ID NO: 884183 - RNA, 19 nt, Artificial Sequence
  Description of Artificial Sequence: Synthetic oligonucleotide
acuaauggucuaagaguaa

SEQ ID NO: 884184 - RNA, 19 nt, Artificial Sequence
  Description of Artificial Sequence: Synthetic oligonucleotide
aggcaaucacaggaccuug

SEQ ID NO: 884185 - RNA, 19 nt, Artificial Sequence
  Description of Artificial Sequence: Synthetic oligonucleotide
ugaccccgggauacgggaa

SEQ ID NO: 884186 - RNA, 19 nt, Artificial Sequence
  Description of Artificial Sequence: Synthetic oligonucleotide
ccagguaagcgaccuacug

SEQ ID NO: 884187 - RNA, 19 nt, Artificial Sequence
  Description of Artificial Sequence: Synthetic oligonucleotide
cuaauggucuaagaguaau

SEQ ID NO: 884188 - RNA, 19 nt, Artificial Sequence
  Description of Artificial Sequence: Synthetic oligonucleotide
ugggccuaagaaagcuguu

SEQ ID NO: 884189 - RNA, 19 nt, Artificial Sequence
  Description of Artificial Sequence: Synthetic oligonucleotide
cugaccccgggauacggga

SEQ ID NO: 884190 - RNA, 19 nt, Artificial Sequence
  Description of Artificial Sequence: Synthetic oligonucleotide
gcuuaacucaggcaaacau

SEQ ID NO: 884191 - RNA, 19 nt, Artificial Sequence
  Description of Artificial Sequence: Synthetic oligonucleotide
cggcaaauaauaccacuag

SEQ ID NO: 884192 - RNA, 19 nt, Artificial Sequence
  Description of Artificial Sequence: Synthetic oligonucleotide
gcuucaaauccccaucugu

SEQ ID NO: 884193 - RNA, 19 nt, Artificial Sequence
  Description of Artificial Sequence: Synthetic oligonucleotide
gguagcugagugaucaaaa

SEQ ID NO: 884194 - RNA, 19 nt, Artificial Sequence
  Description of Artificial Sequence: Synthetic oligonucleotide
cagguaagcgaccuacugu

SEQ ID NO: 884195 - RNA, 19 nt, Artificial Sequence
  Description of Artificial Sequence: Synthetic oligonucleotide
uugcaccucaugagaucau

SEQ ID NO: 884196 - RNA, 19 nt, Artificial Sequence
  Description of Artificial Sequence: Synthetic oligonucleotide
ccauauguuauugaagaua

SEQ ID NO: 884197 - RNA, 19 nt, Artificial Sequence
  Description of Artificial Sequence: Synthetic oligonucleotide
augguagcugagugaucaa

SEQ ID NO: 884198 - RNA, 19 nt, Artificial Sequence
  Description of Artificial Sequence: Synthetic oligonucleotide
acgaaacugcuggcaagcu

SEQ ID NO: 884199 - RNA, 19 nt, Artificial Sequence
  Description of Artificial Sequence: Synthetic oligonucleotide
ggcaagcuaauguacacuu

SEQ ID NO: 884200 - RNA, 19 nt, Artificial Sequence
  Description of Artificial Sequence: Synthetic oligonucleotide
agauaacaauacacccuaa

SEQ ID NO: 884201 - RNA, 19 nt, Artificial Sequence
  Description of Artificial Sequence: Synthetic oligonucleotide
cuuccgcuuucauugacau

SEQ ID NO: 884202 - RNA, 19 nt, Artificial Sequence
  Description of Artificial Sequence: Synthetic oligonucleotide
gcaagcuaauguacacuug

SEQ ID NO: 884203 - RNA, 19 nt, Artificial Sequence
  Description of Artificial Sequence: Synthetic oligonucleotide
caccaauguguaugucuga

SEQ ID NO: 884204 - RNA, 19 nt, Artificial Sequence
  Description of Artificial Sequence: Synthetic oligonucleotide
ccaguugagcucuccugac

SEQ ID NO: 884205 - RNA, 19 nt, Artificial Sequence
  Description of Artificial Sequence: Synthetic oligonucleotide
gggccuaagaaagcuguuc

SEQ ID NO: 884206 - RNA, 19 nt, Artificial Sequence
  Description of Artificial Sequence: Synthetic oligonucleotide
augcuucuauuggcuucgg

SEQ ID NO: 884207 - RNA, 19 nt, Artificial Sequence
  Description of Artificial Sequence: Synthetic oligonucleotide
aucuuugaauugggcugcu

SEQ ID NO: 884208 - RNA, 19 nt, Artificial Sequence
  Description of Artificial Sequence: Synthetic oligonucleotide
ugccuuucacuggucccaa

SEQ ID NO: 884209 - RNA, 19 nt, Artificial Sequence
  Description of Artificial Sequence: Synthetic oligonucleotide
gucccugcuaaauguugua

SEQ ID NO: 884210 - RNA, 19 nt, Artificial Sequence
  Description of Artificial Sequence: Synthetic oligonucleotide
caauuaguuuccuggcauu

SEQ ID NO: 884211 - RNA, 19 nt, Artificial Sequence
  Description of Artificial Sequence: Synthetic oligonucleotide
gaacgugacuccauauguu

SEQ ID NO: 884212 - RNA, 19 nt, Artificial Sequence
  Description of Artificial Sequence: Synthetic oligonucleotide
auacacccuaaagcaguuu

SEQ ID NO: 884213 - RNA, 19 nt, Artificial Sequence
  Description of Artificial Sequence: Synthetic oligonucleotide
cagcgaaguuauagaagcu

SEQ ID NO: 884214 - RNA, 19 nt, Artificial Sequence
  Description of Artificial Sequence: Synthetic oligonucleotide
ggauacgggaacaaugcuu

SEQ ID NO: 884215 - RNA, 19 nt, Artificial Sequence
  Description of Artificial Sequence: Synthetic oligonucleotide
caccucaugagaucauauu

SEQ ID NO: 884216 - RNA, 19 nt, Artificial Sequence
  Description of Artificial Sequence: Synthetic oligonucleotide
ccacuaggcaagacucauc

SEQ ID NO: 884217 - RNA, 19 nt, Artificial Sequence
  Description of Artificial Sequence: Synthetic oligonucleotide
caacuaccauguacaaaau

SEQ ID NO: 884218 - RNA, 19 nt, Artificial Sequence
  Description of Artificial Sequence: Synthetic oligonucleotide
ccaacuuucuacagucccu

SEQ ID NO: 884219 - RNA, 19 nt, Artificial Sequence
  Description of Artificial Sequence: Synthetic oligonucleotide
gggauacgggaacaaugcu

SEQ ID NO: 884220 - RNA, 19 nt, Artificial Sequence
  Description of Artificial Sequence: Synthetic oligonucleotide
caguuggugcagucaucaa

SEQ ID NO: 884221 - RNA, 19 nt, Artificial Sequence
  Description of Artificial Sequence: Synthetic oligonucleotide
ggcuaggcacaauguaggu

SEQ ID NO: 884222 - RNA, 19 nt, Artificial Sequence
  Description of Artificial Sequence: Synthetic oligonucleotide
ggguugaguggcacagcac

SEQ ID NO: 884223 - RNA, 19 nt, Artificial Sequence
  Description of Artificial Sequence: Synthetic oligonucleotide
cccucacacgaaacugcug

SEQ ID NO: 884224 - RNA, 19 nt, Artificial Sequence
  Description of Artificial Sequence: Synthetic oligonucleotide
ccuuaccaaccaucucauc

SEQ ID NO: 884225 - RNA, 19 nt, Artificial Sequence
  Description of Artificial Sequence: Synthetic oligonucleotide
ccugacacagguguaaaau

SEQ ID NO: 884226 - RNA, 19 nt, Artificial Sequence
  Description of Artificial Sequence: Synthetic oligonucleotide
cccuaaagcaguuucccuu

SEQ ID NO: 884227 - RNA, 19 nt, Artificial Sequence
  Description of Artificial Sequence: Synthetic oligonucleotide
cgcuucaaauccccaucug

SEQ ID NO: 884228 - RNA, 19 nt, Artificial Sequence
  Description of Artificial Sequence: Synthetic oligonucleotide
ccgcuuucauugacauuuc

SEQ ID NO: 884229 - RNA, 19 nt, Artificial Sequence
  Description of Artificial Sequence: Synthetic oligonucleotide
ccuguuugucccugcuaaa

SEQ ID NO: 884230 - RNA, 19 nt, Artificial Sequence
  Description of Artificial Sequence: Synthetic oligonucleotide
ccgcuucaaauccccaucu

SEQ ID NO: 884231 - RNA, 19 nt, Artificial Sequence
  Description of Artificial Sequence: Synthetic oligonucleotide
ggcuucgguggaaauucgu

SEQ ID NO: 884232 - RNA, 19 nt, Artificial Sequence
  Description of Artificial Sequence: Synthetic oligonucleotide
cggauacaaacaucuuugu

SEQ ID NO: 884233 - RNA, 19 nt, Artificial Sequence
  Description of Artificial Sequence: Synthetic oligonucleotide
cccuuaccaaccaucucau

SEQ ID NO: 884234 - RNA, 19 nt, Artificial Sequence
  Description of Artificial Sequence: Synthetic oligonucleotide
gguaagcgaccuacuguuu

SEQ ID NO: 884235 - RNA, 19 nt, Artificial Sequence
  Description of Artificial Sequence: Synthetic oligonucleotide
cccgggauacgggaacaau

SEQ ID NO: 884236 - RNA, 19 nt, Artificial Sequence
  Description of Artificial Sequence: Synthetic oligonucleotide
ccccgggauacgggaacaa

SEQ ID NO: 884237 - RNA, 19 nt, Artificial Sequence
  Description of Artificial Sequence: Synthetic oligonucleotide
cccauaccuccuggaaaau

SEQ ID NO: 884238 - RNA, 19 nt, Artificial Sequence
  Description of Artificial Sequence: Synthetic oligonucleotide
aaccaaaucaucaaacugc

SEQ ID NO: 884239 - RNA, 19 nt, Artificial Sequence
  Description of Artificial Sequence: Synthetic oligonucleotide
uuuuguggcaggaauaggg

SEQ ID NO: 884240 - RNA, 19 nt, Artificial Sequence
  Description of Artificial Sequence: Synthetic oligonucleotide
aaugauuccucaccaaagg

SEQ ID NO: 884241 - RNA, 19 nt, Artificial Sequence
  Description of Artificial Sequence: Synthetic oligonucleotide
ugaccuuagaaacaaagag

SEQ ID NO: 884242 - RNA, 19 nt, Artificial Sequence
  Description of Artificial Sequence: Synthetic oligonucleotide
ucuguaaugucuuugguca

SEQ ID NO: 884243 - RNA, 19 nt, Artificial Sequence
  Description of Artificial Sequence: Synthetic oligonucleotide
ugaguuauaaaaucaaagu

SEQ ID NO: 884244 - RNA, 19 nt, Artificial Sequence
  Description of Artificial Sequence: Synthetic oligonucleotide
ggauauuucauccugaacc

SEQ ID NO: 884245 - RNA, 19 nt, Artificial Sequence
  Description of Artificial Sequence: Synthetic oligonucleotide
aaaucucccagaaauaagg

SEQ ID NO: 884246 - RNA, 19 nt, Artificial Sequence
  Description of Artificial Sequence: Synthetic oligonucleotide
uuauuugcagcccaguuca

SEQ ID NO: 884247 - RNA, 19 nt, Artificial Sequence
  Description of Artificial Sequence: Synthetic oligonucleotide
caaaucaucaaacugccag

SEQ ID NO: 884248 - RNA, 19 nt, Artificial Sequence
  Description of Artificial Sequence: Synthetic oligonucleotide
uuguuuaaaaguucgugag

SEQ ID NO: 884249 - RNA, 19 nt, Artificial Sequence
  Description of Artificial Sequence: Synthetic oligonucleotide
aauuuaggcagaucaccac

SEQ ID NO: 884250 - RNA, 19 nt, Artificial Sequence
  Description of Artificial Sequence: Synthetic oligonucleotide
auuuauagaaaucugcgau

SEQ ID NO: 884251 - RNA, 19 nt, Artificial Sequence
  Description of Artificial Sequence: Synthetic oligonucleotide
uguaucagauacauuagga

SEQ ID NO: 884252 - RNA, 19 nt, Artificial Sequence
  Description of Artificial Sequence: Synthetic oligonucleotide
aauacuggcacacuaccgu

SEQ ID NO: 884253 - RNA, 19 nt, Artificial Sequence
  Description of Artificial Sequence: Synthetic oligonucleotide
auuggggauauugauagcc

SEQ ID NO: 884254 - RNA, 19 nt, Artificial Sequence
  Description of Artificial Sequence: Synthetic oligonucleotide
agaucuaaaugaugggccc

SEQ ID NO: 884255 - RNA, 19 nt, Artificial Sequence
  Description of Artificial Sequence: Synthetic oligonucleotide
agaauuuaggcagaucacc

SEQ ID NO: 884256 - RNA, 19 nt, Artificial Sequence
  Description of Artificial Sequence: Synthetic oligonucleotide
ugugcuucucauuuugugg

SEQ ID NO: 884257 - RNA, 19 nt, Artificial Sequence
  Description of Artificial Sequence: Synthetic oligonucleotide
uuugagugugaacugaugu

SEQ ID NO: 884258 - RNA, 19 nt, Artificial Sequence
  Description of Artificial Sequence: Synthetic oligonucleotide
auaguaucgauguucagca

SEQ ID NO: 884259 - RNA, 19 nt, Artificial Sequence
  Description of Artificial Sequence: Synthetic oligonucleotide
ucgauguucagcaaacacc

SEQ ID NO: 884260 - RNA, 19 nt, Artificial Sequence
  Description of Artificial Sequence: Synthetic oligonucleotide
aaagguaggagcaggagag

SEQ ID NO: 884261 - RNA, 19 nt, Artificial Sequence
  Description of Artificial Sequence: Synthetic oligonucleotide
ucagcuauuaaguaccgcu

SEQ ID NO: 884262 - RNA, 19 nt, Artificial Sequence
  Description of Artificial Sequence: Synthetic oligonucleotide
aagccgugguuucacaccc

SEQ ID NO: 884263 - RNA, 19 nt, Artificial Sequence
  Description of Artificial Sequence: Synthetic oligonucleotide
uuauagaaaucugcgaucc

SEQ ID NO: 884264 - RNA, 19 nt, Artificial Sequence
  Description of Artificial Sequence: Synthetic oligonucleotide
acaauagcaaaucucccag

SEQ ID NO: 884265 - RNA, 19 nt, Artificial Sequence
  Description of Artificial Sequence: Synthetic oligonucleotide
uagcaaaucucccagaaau

SEQ ID NO: 884266 - RNA, 19 nt, Artificial Sequence
  Description of Artificial Sequence: Synthetic oligonucleotide
uucauuaccaguguaagaa

SEQ ID NO: 884267 - RNA, 19 nt, Artificial Sequence
  Description of Artificial Sequence: Synthetic oligonucleotide
aauuauccaauuaagccgu

SEQ ID NO: 884268 - RNA, 19 nt, Artificial Sequence
  Description of Artificial Sequence: Synthetic oligonucleotide
uugagugucgguuaauggc

SEQ ID NO: 884269 - RNA, 19 nt, Artificial Sequence
  Description of Artificial Sequence: Synthetic oligonucleotide
uucgugaguuauaaaauca

SEQ ID NO: 884270 - RNA, 19 nt, Artificial Sequence
  Description of Artificial Sequence: Synthetic oligonucleotide
aaaucaaaguggucaaccu

SEQ ID NO: 884271 - RNA, 19 nt, Artificial Sequence
  Description of Artificial Sequence: Synthetic oligonucleotide
aaaucuucaguuacaaucu

SEQ ID NO: 884272 - RNA, 19 nt, Artificial Sequence
  Description of Artificial Sequence: Synthetic oligonucleotide
uaaagaacugaguaguuau

SEQ ID NO: 884273 - RNA, 19 nt, Artificial Sequence
  Description of Artificial Sequence: Synthetic oligonucleotide
aagcaugccaccauaagag

SEQ ID NO: 884274 - RNA, 19 nt, Artificial Sequence
  Description of Artificial Sequence: Synthetic oligonucleotide
uuaacucugcaaaaucagc

SEQ ID NO: 884275 - RNA, 19 nt, Artificial Sequence
  Description of Artificial Sequence: Synthetic oligonucleotide
agaacugaguaguuauugg

SEQ ID NO: 884276 - RNA, 19 nt, Artificial Sequence
  Description of Artificial Sequence: Synthetic oligonucleotide
aaauggagcaggagaaggc

SEQ ID NO: 884277 - RNA, 19 nt, Artificial Sequence
  Description of Artificial Sequence: Synthetic oligonucleotide
ucuaagucaccauugcuga

SEQ ID NO: 884278 - RNA, 19 nt, Artificial Sequence
  Description of Artificial Sequence: Synthetic oligonucleotide
gaacugaguaguuauuggc

SEQ ID NO: 884279 - RNA, 19 nt, Artificial Sequence
  Description of Artificial Sequence: Synthetic oligonucleotide
guuacaaucuucauaaaca

SEQ ID NO: 884280 - RNA, 19 nt, Artificial Sequence
  Description of Artificial Sequence: Synthetic oligonucleotide
uuuugugagccauuggaga

SEQ ID NO: 884281 - RNA, 19 nt, Artificial Sequence
  Description of Artificial Sequence: Synthetic oligonucleotide
ugauuccucaccaaaggga

SEQ ID NO: 884282 - RNA, 19 nt, Artificial Sequence
  Description of Artificial Sequence: Synthetic oligonucleotide
aguaguuauuggcuacagc

SEQ ID NO: 884283 - RNA, 19 nt, Artificial Sequence
  Description of Artificial Sequence: Synthetic oligonucleotide
cauaguaucgauguucagc

SEQ ID NO: 884284 - RNA, 19 nt, Artificial Sequence
  Description of Artificial Sequence: Synthetic oligonucleotide
uuuauagaaaucugcgauc

SEQ ID NO: 884285 - RNA, 19 nt, Artificial Sequence
  Description of Artificial Sequence: Synthetic oligonucleotide
aagaacugaguaguuauug

SEQ ID NO: 884286 - RNA, 19 nt, Artificial Sequence
  Description of Artificial Sequence: Synthetic oligonucleotide
aguaccacaauagcaaauc

SEQ ID NO: 884287 - RNA, 19 nt, Artificial Sequence
  Description of Artificial Sequence: Synthetic oligonucleotide
aguaccgcuuguuuaaaag

SEQ ID NO: 884288 - RNA, 19 nt, Artificial Sequence
  Description of Artificial Sequence: Synthetic oligonucleotide
aauuaagccgugguuucac

SEQ ID NO: 884289 - RNA, 19 nt, Artificial Sequence
  Description of Artificial Sequence: Synthetic oligonucleotide
ucaaauacuggcacacuac

SEQ ID NO: 884290 - RNA, 19 nt, Artificial Sequence
  Description of Artificial Sequence: Synthetic oligonucleotide
auugcaaaaccagacaaug

SEQ ID NO: 884291 - RNA, 19 nt, Artificial Sequence
  Description of Artificial Sequence: Synthetic oligonucleotide
acuaagugaggauauuuca

SEQ ID NO: 884292 - RNA, 19 nt, Artificial Sequence
  Description of Artificial Sequence: Synthetic oligonucleotide
guuuaacuuccagugaucg

SEQ ID NO: 884293 - RNA, 19 nt, Artificial Sequence
  Description of Artificial Sequence: Synthetic oligonucleotide
ugagugucgguuaauggcu

SEQ ID NO: 884294 - RNA, 19 nt, Artificial Sequence
  Description of Artificial Sequence: Synthetic oligonucleotide
aaguacucgcugccgaagg

SEQ ID NO: 884295 - RNA, 19 nt, Artificial Sequence
  Description of Artificial Sequence: Synthetic oligonucleotide
augaaccccguauuauugc

SEQ ID NO: 884296 - RNA, 19 nt, Artificial Sequence
  Description of Artificial Sequence: Synthetic oligonucleotide
gagaucuaaaugaugggcc

SEQ ID NO: 884297 - RNA, 19 nt, Artificial Sequence
  Description of Artificial Sequence: Synthetic oligonucleotide
cuuguuuaaaaguucguga

SEQ ID NO: 884298 - RNA, 19 nt, Artificial Sequence
  Description of Artificial Sequence: Synthetic oligonucleotide
aaaaguucgugaguuauaa

SEQ ID NO: 884299 - RNA, 19 nt, Artificial Sequence
  Description of Artificial Sequence: Synthetic oligonucleotide
guuaaaacagucauuagaa

SEQ ID NO: 884300 - RNA, 19 nt, Artificial Sequence
  Description of Artificial Sequence: Synthetic oligonucleotide
ugaucgagauaacagcaca

SEQ ID NO: 884301 - RNA, 19 nt, Artificial Sequence
  Description of Artificial Sequence: Synthetic oligonucleotide
uugucgaagucccauauau

SEQ ID NO: 884302 - RNA, 19 nt, Artificial Sequence
  Description of Artificial Sequence: Synthetic oligonucleotide
uccugaaccaggcugcaag

SEQ ID NO: 884303 - RNA, 19 nt, Artificial Sequence
  Description of Artificial Sequence: Synthetic oligonucleotide
aaauacuggcacacuaccg

SEQ ID NO: 884304 - RNA, 19 nt, Artificial Sequence
  Description of Artificial Sequence: Synthetic oligonucleotide
ucgagauaacagcacagug

SEQ ID NO: 884305 - RNA, 19 nt, Artificial Sequence
  Description of Artificial Sequence: Synthetic oligonucleotide
cacuguaucagauacauua

SEQ ID NO: 884306 - RNA, 19 nt, Artificial Sequence
  Description of Artificial Sequence: Synthetic oligonucleotide
aaaguugugauguccucaa

SEQ ID NO: 884307 - RNA, 19 nt, Artificial Sequence
  Description of Artificial Sequence: Synthetic oligonucleotide
agaugcaagagcuccaacu

SEQ ID NO: 884308 - RNA, 19 nt, Artificial Sequence
  Description of Artificial Sequence: Synthetic oligonucleotide
uuaauggcuuuccaggauc

SEQ ID NO: 884309 - RNA, 19 nt, Artificial Sequence
  Description of Artificial Sequence: Synthetic oligonucleotide
ucauguguuuaacuuccag

SEQ ID NO: 884310 - RNA, 19 nt, Artificial Sequence
  Description of Artificial Sequence: Synthetic oligonucleotide
augggagcaacacacaggu

SEQ ID NO: 884311 - RNA, 19 nt, Artificial Sequence
  Description of Artificial Sequence: Synthetic oligonucleotide
auugauagccaccagggua

SEQ ID NO: 884312 - RNA, 19 nt, Artificial Sequence
  Description of Artificial Sequence: Synthetic oligonucleotide
ugaccaugggucuaaguca

SEQ ID NO: 884313 - RNA, 19 nt, Artificial Sequence
  Description of Artificial Sequence: Synthetic oligonucleotide
guaaggguagucuaccaug

SEQ ID NO: 884314 - RNA, 19 nt, Artificial Sequence
  Description of Artificial Sequence: Synthetic oligonucleotide
auuagaacaaaugggcaug

SEQ ID NO: 884315 - RNA, 19 nt, Artificial Sequence
  Description of Artificial Sequence: Synthetic oligonucleotide
ucggaugugggguugguug

SEQ ID NO: 884316 - RNA, 19 nt, Artificial Sequence
  Description of Artificial Sequence: Synthetic oligonucleotide
aggaauagggacaagaaaa

SEQ ID NO: 884317 - RNA, 19 nt, Artificial Sequence
  Description of Artificial Sequence: Synthetic oligonucleotide
cuguaucagauacauuagg

SEQ ID NO: 884318 - RNA, 19 nt, Artificial Sequence
  Description of Artificial Sequence: Synthetic oligonucleotide
uuaaaaguucgugaguuau

SEQ ID NO: 884319 - RNA, 19 nt, Artificial Sequence
  Description of Artificial Sequence: Synthetic oligonucleotide
uaucagcuauuaaguaccg

SEQ ID NO: 884320 - RNA, 19 nt, Artificial Sequence
  Description of Artificial Sequence: Synthetic oligonucleotide
guggucaaccuucuguugg

SEQ ID NO: 884321 - RNA, 19 nt, Artificial Sequence
  Description of Artificial Sequence: Synthetic oligonucleotide
uaauauauauucagagcuu

SEQ ID NO: 884322 - RNA, 19 nt, Artificial Sequence
  Description of Artificial Sequence: Synthetic oligonucleotide
ucaaaauucaaggggcuac

SEQ ID NO: 884323 - RNA, 19 nt, Artificial Sequence
  Description of Artificial Sequence: Synthetic oligonucleotide
gaaugauaggaaagguagg

SEQ ID NO: 884324 - RNA, 19 nt, Artificial Sequence
  Description of Artificial Sequence: Synthetic oligonucleotide
auuaaguaccgcuuguuua

SEQ ID NO: 884325 - RNA, 19 nt, Artificial Sequence
  Description of Artificial Sequence: Synthetic oligonucleotide
aggauauuucauccugaac

SEQ ID NO: 884326 - RNA, 19 nt, Artificial Sequence
  Description of Artificial Sequence: Synthetic oligonucleotide
cagugaucgagauaacagc

SEQ ID NO: 884327 - RNA, 19 nt, Artificial Sequence
  Description of Artificial Sequence: Synthetic oligonucleotide
aaucaaaguggucaaccuu

SEQ ID NO: 884328 - RNA, 19 nt, Artificial Sequence
  Description of Artificial Sequence: Synthetic oligonucleotide
acagucauuagaaaacuug

SEQ ID NO: 884329 - RNA, 19 nt, Artificial Sequence
  Description of Artificial Sequence: Synthetic oligonucleotide
guuggaaaguacucgcugc

SEQ ID NO: 884330 - RNA, 19 nt, Artificial Sequence
  Description of Artificial Sequence: Synthetic oligonucleotide
uggcacacuaccgugacag

SEQ ID NO: 884331 - RNA, 19 nt, Artificial Sequence
  Description of Artificial Sequence: Synthetic oligonucleotide
aaauccaaguguugggcau

SEQ ID NO: 884332 - RNA, 19 nt, Artificial Sequence
  Description of Artificial Sequence: Synthetic oligonucleotide
uuuggcccaagcuggauca

SEQ ID NO: 884333 - RNA, 19 nt, Artificial Sequence
  Description of Artificial Sequence: Synthetic oligonucleotide
aagaugcaagagcuccaac

SEQ ID NO: 884334 - RNA, 19 nt, Artificial Sequence
  Description of Artificial Sequence: Synthetic oligonucleotide
aguauugugccaccauuug

SEQ ID NO: 884335 - RNA, 19 nt, Artificial Sequence
  Description of Artificial Sequence: Synthetic oligonucleotide
aggcagaucaccacaaaac

SEQ ID NO: 884336 - RNA, 19 nt, Artificial Sequence
  Description of Artificial Sequence: Synthetic oligonucleotide
uggcaguaccacaauagca

SEQ ID NO: 884337 - RNA, 19 nt, Artificial Sequence
  Description of Artificial Sequence: Synthetic oligonucleotide
uuugugagccauuggagau

SEQ ID NO: 884338 - RNA, 19 nt, Artificial Sequence
  Description of Artificial Sequence: Synthetic oligonucleotide
uccaacuacuaagugagga

SEQ ID NO: 884339 - RNA, 19 nt, Artificial Sequence
  Description of Artificial Sequence: Synthetic oligonucleotide
aguguaagaaaaguauugu

SEQ ID NO: 884340 - RNA, 19 nt, Artificial Sequence
  Description of Artificial Sequence: Synthetic oligonucleotide
uauuaaguaccgcuuguuu

SEQ ID NO: 884341 - RNA, 19 nt, Artificial Sequence
  Description of Artificial Sequence: Synthetic oligonucleotide
aguaucgauguucagcaaa

SEQ ID NO: 884342 - RNA, 19 nt, Artificial Sequence
  Description of Artificial Sequence: Synthetic oligonucleotide
uggaaguaaagaacugagu

SEQ ID NO: 884343 - RNA, 19 nt, Artificial Sequence
  Description of Artificial Sequence: Synthetic oligonucleotide
ugguuucacaccccacugg

SEQ ID NO: 884344 - RNA, 19 nt, Artificial Sequence
  Description of Artificial Sequence: Synthetic oligonucleotide
agcuauuaaguaccgcuug

SEQ ID NO: 884345 - RNA, 19 nt, Artificial Sequence
  Description of Artificial Sequence: Synthetic oligonucleotide
ugugaaauauucaggcauu

SEQ ID NO: 884346 - RNA, 19 nt, Artificial Sequence
  Description of Artificial Sequence: Synthetic oligonucleotide
caaaucucccagaaauaag

SEQ ID NO: 884347 - RNA, 19 nt, Artificial Sequence
  Description of Artificial Sequence: Synthetic oligonucleotide
ucgugaguuauaaaaucaa

SEQ ID NO: 884348 - RNA, 19 nt, Artificial Sequence
  Description of Artificial Sequence: Synthetic oligonucleotide
uaccacaauagcaaaucuc

SEQ ID NO: 884349 - RNA, 19 nt, Artificial Sequence
  Description of Artificial Sequence: Synthetic oligonucleotide
cgaaugauaggaaagguag

SEQ ID NO: 884350 - RNA, 19 nt, Artificial Sequence
  Description of Artificial Sequence: Synthetic oligonucleotide
gucgaagucccauauauaa

SEQ ID NO: 884351 - RNA, 19 nt, Artificial Sequence
  Description of Artificial Sequence: Synthetic oligonucleotide
ugccuuccaauguuuauca

SEQ ID NO: 884352 - RNA, 19 nt, Artificial Sequence
  Description of Artificial Sequence: Synthetic oligonucleotide
ggaaguaaagaacugagua

SEQ ID NO: 884353 - RNA, 19 nt, Artificial Sequence
  Description of Artificial Sequence: Synthetic oligonucleotide
caaguguugggcauccuug

SEQ ID NO: 884354 - RNA, 19 nt, Artificial Sequence
  Description of Artificial Sequence: Synthetic oligonucleotide
uaagccgugguuucacacc

SEQ ID NO: 884355 - RNA, 19 nt, Artificial Sequence
  Description of Artificial Sequence: Synthetic oligonucleotide
guucgugaguuauaaaauc

SEQ ID NO: 884356 - RNA, 19 nt, Artificial Sequence
  Description of Artificial Sequence: Synthetic oligonucleotide
uuauccaauuaagccgugg

SEQ ID NO: 884357 - RNA, 19 nt, Artificial Sequence
  Description of Artificial Sequence: Synthetic oligonucleotide
gugaggauauuucauccug

SEQ ID NO: 884358 - RNA, 19 nt, Artificial Sequence
  Description of Artificial Sequence: Synthetic oligonucleotide
gaccuuagaaacaaagaga

SEQ ID NO: 884359 - RNA, 19 nt, Artificial Sequence
  Description of Artificial Sequence: Synthetic oligonucleotide
uuuaacuuccagugaucga

SEQ ID NO: 884360 - RNA, 19 nt, Artificial Sequence
  Description of Artificial Sequence: Synthetic oligonucleotide
gaauuuaggcagaucacca

SEQ ID NO: 884361 - RNA, 19 nt, Artificial Sequence
  Description of Artificial Sequence: Synthetic oligonucleotide
aguguuugauuaacucugc

SEQ ID NO: 884362 - RNA, 19 nt, Artificial Sequence
  Description of Artificial Sequence: Synthetic oligonucleotide
auauauauucagagcuugg

SEQ ID NO: 884363 - RNA, 19 nt, Artificial Sequence
  Description of Artificial Sequence: Synthetic oligonucleotide
uccaauuaagccgugguuu

SEQ ID NO: 884364 - RNA, 19 nt, Artificial Sequence
  Description of Artificial Sequence: Synthetic oligonucleotide
agguaggucugccuuguuc

SEQ ID NO: 884365 - RNA, 19 nt, Artificial Sequence
  Description of Artificial Sequence: Synthetic oligonucleotide
gaucgagauaacagcacag

SEQ ID NO: 884366 - RNA, 19 nt, Artificial Sequence
  Description of Artificial Sequence: Synthetic oligonucleotide
uguaguugagugucgguua

SEQ ID NO: 884367 - RNA, 19 nt, Artificial Sequence
  Description of Artificial Sequence: Synthetic oligonucleotide
cuugaaugauuccucacca

SEQ ID NO: 884368 - RNA, 19 nt, Artificial Sequence
  Description of Artificial Sequence: Synthetic oligonucleotide
aaaguacucgcugccgaag

SEQ ID NO: 884369 - RNA, 19 nt, Artificial Sequence
  Description of Artificial Sequence: Synthetic oligonucleotide
cacacuaccgugacaggcc

SEQ ID NO: 884370 - RNA, 19 nt, Artificial Sequence
  Description of Artificial Sequence: Synthetic oligonucleotide
agagcuuggaaaauauucu

SEQ ID NO: 884371 - RNA, 19 nt, Artificial Sequence
  Description of Artificial Sequence: Synthetic oligonucleotide
uuaagccgugguuucacac

SEQ ID NO: 884372 - RNA, 19 nt, Artificial Sequence
  Description of Artificial Sequence: Synthetic oligonucleotide
uguuuaacuuccagugauc

SEQ ID NO: 884373 - RNA, 19 nt, Artificial Sequence
  Description of Artificial Sequence: Synthetic oligonucleotide
ggcaugaccaauucugugc

SEQ ID NO: 884374 - RNA, 19 nt, Artificial Sequence
  Description of Artificial Sequence: Synthetic oligonucleotide
ugaaccccguauuauugca

SEQ ID NO: 884375 - RNA, 19 nt, Artificial Sequence
  Description of Artificial Sequence: Synthetic oligonucleotide
agugaucgagauaacagca

SEQ ID NO: 884376 - RNA, 19 nt, Artificial Sequence
  Description of Artificial Sequence: Synthetic oligonucleotide
acuaccuguaguugagugu

SEQ ID NO: 884377 - RNA, 19 nt, Artificial Sequence
  Description of Artificial Sequence: Synthetic oligonucleotide
acaaaguaauuauccaauu

SEQ ID NO: 884378 - RNA, 19 nt, Artificial Sequence
  Description of Artificial Sequence: Synthetic oligonucleotide
aucagauacauuaggauuu

SEQ ID NO: 884379 - RNA, 19 nt, Artificial Sequence
  Description of Artificial Sequence: Synthetic oligonucleotide
caccauuugccuuccaaug

SEQ ID NO: 884380 - RNA, 19 nt, Artificial Sequence
  Description of Artificial Sequence: Synthetic oligonucleotide
cacaauagcaaaucuccca

SEQ ID NO: 884381 - RNA, 19 nt, Artificial Sequence
  Description of Artificial Sequence: Synthetic oligonucleotide
gcuccaacuacuaagugag

SEQ ID NO: 884382 - RNA, 19 nt, Artificial Sequence
  Description of Artificial Sequence: Synthetic oligonucleotide
uucguaaggguagucuacc

SEQ ID NO: 884383 - RNA, 19 nt, Artificial Sequence
  Description of Artificial Sequence: Synthetic oligonucleotide
uaccgcuuguuuaaaaguu

SEQ ID NO: 884384 - RNA, 19 nt, Artificial Sequence
  Description of Artificial Sequence: Synthetic oligonucleotide
uaaaaguucgugaguuaua

SEQ ID NO: 884385 - RNA, 19 nt, Artificial Sequence
  Description of Artificial Sequence: Synthetic oligonucleotide
caccuagacugcuaguagc

SEQ ID NO: 884386 - RNA, 19 nt, Artificial Sequence
  Description of Artificial Sequence: Synthetic oligonucleotide
ugagugugaacugauguuu

SEQ ID NO: 884387 - RNA, 19 nt, Artificial Sequence
  Description of Artificial Sequence: Synthetic oligonucleotide
uggcucggagaucuaaaug

SEQ ID NO: 884388 - RNA, 19 nt, Artificial Sequence
  Description of Artificial Sequence: Synthetic oligonucleotide
acuguaucagauacauuag

SEQ ID NO: 884389 - RNA, 19 nt, Artificial Sequence
  Description of Artificial Sequence: Synthetic oligonucleotide
augauaggaaagguaggag

SEQ ID NO: 884390 - RNA, 19 nt, Artificial Sequence
  Description of Artificial Sequence: Synthetic oligonucleotide
cuucguaaggguagucuac

SEQ ID NO: 884391 - RNA, 19 nt, Artificial Sequence
  Description of Artificial Sequence: Synthetic oligonucleotide
ggagaucuaaaugaugggc

SEQ ID NO: 884392 - RNA, 19 nt, Artificial Sequence
  Description of Artificial Sequence: Synthetic oligonucleotide
uccuuagccacaucccaca

SEQ ID NO: 884393 - RNA, 19 nt, Artificial Sequence
  Description of Artificial Sequence: Synthetic oligonucleotide
uuagaacaaaugggcauga

SEQ ID NO: 884394 - RNA, 19 nt, Artificial Sequence
  Description of Artificial Sequence: Synthetic oligonucleotide
uggggauauugauagccac

SEQ ID NO: 884395 - RNA, 19 nt, Artificial Sequence
  Description of Artificial Sequence: Synthetic oligonucleotide
aacuacuaagugaggauau

SEQ ID NO: 884396 - RNA, 19 nt, Artificial Sequence
  Description of Artificial Sequence: Synthetic oligonucleotide
agcacuguaucagauacau

SEQ ID NO: 884397 - RNA, 19 nt, Artificial Sequence
  Description of Artificial Sequence: Synthetic oligonucleotide
uugagugugaacugauguu

SEQ ID NO: 884398 - RNA, 19 nt, Artificial Sequence
  Description of Artificial Sequence: Synthetic oligonucleotide
aaacuugucgaagucccau

SEQ ID NO: 884399 - RNA, 19 nt, Artificial Sequence
  Description of Artificial Sequence: Synthetic oligonucleotide
aaaguucgugaguuauaaa

SEQ ID NO: 884400 - RNA, 19 nt, Artificial Sequence
  Description of Artificial Sequence: Synthetic oligonucleotide
aguugagugucgguuaaug

SEQ ID NO: 884401 - RNA, 19 nt, Artificial Sequence
  Description of Artificial Sequence: Synthetic oligonucleotide
ucccacaugaaccccguau

SEQ ID NO: 884402 - RNA, 19 nt, Artificial Sequence
  Description of Artificial Sequence: Synthetic oligonucleotide
uuuugccaccauacaaagu

SEQ ID NO: 884403 - RNA, 19 nt, Artificial Sequence
  Description of Artificial Sequence: Synthetic oligonucleotide
aucagcuauuaaguaccgc

SEQ ID NO: 884404 - RNA, 19 nt, Artificial Sequence
  Description of Artificial Sequence: Synthetic oligonucleotide
uaccgugacaggccaagca

SEQ ID NO: 884405 - RNA, 19 nt, Artificial Sequence
  Description of Artificial Sequence: Synthetic oligonucleotide
gaagggacuccccauagua

SEQ ID NO: 884406 - RNA, 19 nt, Artificial Sequence
  Description of Artificial Sequence: Synthetic oligonucleotide
auacuggcacacuaccgug

SEQ ID NO: 884407 - RNA, 19 nt, Artificial Sequence
  Description of Artificial Sequence: Synthetic oligonucleotide
caagcaugccaccauaaga

SEQ ID NO: 884408 - RNA, 19 nt, Artificial Sequence
  Description of Artificial Sequence: Synthetic oligonucleotide
gauuccucaccaaagggaa

SEQ ID NO: 884409 - RNA, 19 nt, Artificial Sequence
  Description of Artificial Sequence: Synthetic oligonucleotide
ugaguaguuauuggcuaca

SEQ ID NO: 884410 - RNA, 19 nt, Artificial Sequence
  Description of Artificial Sequence: Synthetic oligonucleotide
cacuaccuguaguugagug

SEQ ID NO: 884411 - RNA, 19 nt, Artificial Sequence
  Description of Artificial Sequence: Synthetic oligonucleotide
auugagcucaaaggaagug

SEQ ID NO: 884412 - RNA, 19 nt, Artificial Sequence
  Description of Artificial Sequence: Synthetic oligonucleotide
auagggacaagaaaacaaa

SEQ ID NO: 884413 - RNA, 19 nt, Artificial Sequence
  Description of Artificial Sequence: Synthetic oligonucleotide
cacacugccuucccaacag

SEQ ID NO: 884414 - RNA, 19 nt, Artificial Sequence
  Description of Artificial Sequence: Synthetic oligonucleotide
aggccagauuucuuccugg

SEQ ID NO: 884415 - RNA, 19 nt, Artificial Sequence
  Description of Artificial Sequence: Synthetic oligonucleotide
uagaaaucugcgauccauu

SEQ ID NO: 884416 - RNA, 19 nt, Artificial Sequence
  Description of Artificial Sequence: Synthetic oligonucleotide
gacaguucuuuucaagugu

SEQ ID NO: 884417 - RNA, 19 nt, Artificial Sequence
  Description of Artificial Sequence: Synthetic oligonucleotide
ugcgauccauuucuucaug

SEQ ID NO: 884418 - RNA, 19 nt, Artificial Sequence
  Description of Artificial Sequence: Synthetic oligonucleotide
ugguuggaaaguacucgcu

SEQ ID NO: 884419 - RNA, 19 nt, Artificial Sequence
  Description of Artificial Sequence: Synthetic oligonucleotide
ggaaggaucaaaggcagug

SEQ ID NO: 884420 - RNA, 19 nt, Artificial Sequence
  Description of Artificial Sequence: Synthetic oligonucleotide
guaucgauguucagcaaac

SEQ ID NO: 884421 - RNA, 19 nt, Artificial Sequence
  Description of Artificial Sequence: Synthetic oligonucleotide
aaguauugugccaccauuu

SEQ ID NO: 884422 - RNA, 19 nt, Artificial Sequence
  Description of Artificial Sequence: Synthetic oligonucleotide
auaggaaagguaggagcag

SEQ ID NO: 884423 - RNA, 19 nt, Artificial Sequence
  Description of Artificial Sequence: Synthetic oligonucleotide
aguggucaaccuucuguug

SEQ ID NO: 884424 - RNA, 19 nt, Artificial Sequence
  Description of Artificial Sequence: Synthetic oligonucleotide
gguuggaaaguacucgcug

SEQ ID NO: 884425 - RNA, 19 nt, Artificial Sequence
  Description of Artificial Sequence: Synthetic oligonucleotide
ggacaguucuuuucaagug

SEQ ID NO: 884426 - RNA, 19 nt, Artificial Sequence
  Description of Artificial Sequence: Synthetic oligonucleotide
accgcuuguuuaaaaguuc

SEQ ID NO: 884427 - RNA, 19 nt, Artificial Sequence
  Description of Artificial Sequence: Synthetic oligonucleotide
auauuucauccugaaccag

SEQ ID NO: 884428 - RNA, 19 nt, Artificial Sequence
  Description of Artificial Sequence: Synthetic oligonucleotide
cuguuggaaguaaagaacu

SEQ ID NO: 884429 - RNA, 19 nt, Artificial Sequence
  Description of Artificial Sequence: Synthetic oligonucleotide
aaguaccgcuuguuuaaaa

SEQ ID NO: 884430 - RNA, 19 nt, Artificial Sequence
  Description of Artificial Sequence: Synthetic oligonucleotide
gaguaguuauuggcuacag

SEQ ID NO: 884431 - RNA, 19 nt, Artificial Sequence
  Description of Artificial Sequence: Synthetic oligonucleotide
uacucgcugccgaaggacu

SEQ ID NO: 884432 - RNA, 19 nt, Artificial Sequence
  Description of Artificial Sequence: Synthetic oligonucleotide
aacuugucgaagucccaua

SEQ ID NO: 884433 - RNA, 19 nt, Artificial Sequence
  Description of Artificial Sequence: Synthetic oligonucleotide
aucgagauaacagcacagu

SEQ ID NO: 884434 - RNA, 19 nt, Artificial Sequence
  Description of Artificial Sequence: Synthetic oligonucleotide
uucucauuuuguggcagga

SEQ ID NO: 884435 - RNA, 19 nt, Artificial Sequence
  Description of Artificial Sequence: Synthetic oligonucleotide
ugccaccauacaaaguaau

SEQ ID NO: 884436 - RNA, 19 nt, Artificial Sequence
  Description of Artificial Sequence: Synthetic oligonucleotide
ugucgguuaauggcuuucc

SEQ ID NO: 884437 - RNA, 19 nt, Artificial Sequence
  Description of Artificial Sequence: Synthetic oligonucleotide
acuaccgugacaggccaag

SEQ ID NO: 884438 - RNA, 19 nt, Artificial Sequence
  Description of Artificial Sequence: Synthetic oligonucleotide
uggucaaccuucuguugga

SEQ ID NO: 884439 - RNA, 19 nt, Artificial Sequence
  Description of Artificial Sequence: Synthetic oligonucleotide
cccguauuauugcaaaacc

SEQ ID NO: 884440 - RNA, 19 nt, Artificial Sequence
  Description of Artificial Sequence: Synthetic oligonucleotide
cuucuguuggaaguaaaga

SEQ ID NO: 884441 - RNA, 19 nt, Artificial Sequence
  Description of Artificial Sequence: Synthetic oligonucleotide
auuaagccgugguuucaca

SEQ ID NO: 884442 - RNA, 19 nt, Artificial Sequence
  Description of Artificial Sequence: Synthetic oligonucleotide
uuaggcagaucaccacaaa

SEQ ID NO: 884443 - RNA, 19 nt, Artificial Sequence
  Description of Artificial Sequence: Synthetic oligonucleotide
ugucgaagucccauauaua

SEQ ID NO: 884444 - RNA, 19 nt, Artificial Sequence
  Description of Artificial Sequence: Synthetic oligonucleotide
cgguuaauggcuuuccagg

SEQ ID NO: 884445 - RNA, 19 nt, Artificial Sequence
  Description of Artificial Sequence: Synthetic oligonucleotide
uggcggccccgaaugauag

SEQ ID NO: 884446 - RNA, 19 nt, Artificial Sequence
  Description of Artificial Sequence: Synthetic oligonucleotide
accuguaguugagugucgg

SEQ ID NO: 884447 - RNA, 19 nt, Artificial Sequence
  Description of Artificial Sequence: Synthetic oligonucleotide
ccgcuuguuuaaaaguucg

SEQ ID NO: 884448 - RNA, 19 nt, Artificial Sequence
  Description of Artificial Sequence: Synthetic oligonucleotide
auccaauuaagccgugguu

SEQ ID NO: 884449 - RNA, 19 nt, Artificial Sequence
  Description of Artificial Sequence: Synthetic oligonucleotide
cagucauuagaaaacuugu

SEQ ID NO: 884450 - RNA, 19 nt, Artificial Sequence
  Description of Artificial Sequence: Synthetic oligonucleotide
auguuugagugugaacuga

SEQ ID NO: 884451 - RNA, 19 nt, Artificial Sequence
  Description of Artificial Sequence: Synthetic oligonucleotide
caccuccugaccauggguc

SEQ ID NO: 884452 - RNA, 19 nt, Artificial Sequence
  Description of Artificial Sequence: Synthetic oligonucleotide
cuuuggcccaagcuggauc

SEQ ID NO: 884453 - RNA, 19 nt, Artificial Sequence
  Description of Artificial Sequence: Synthetic oligonucleotide
cuuagccacaucccacaug

SEQ ID NO: 884454 - RNA, 19 nt, Artificial Sequence
  Description of Artificial Sequence: Synthetic oligonucleotide
gguuaauggcuuuccagga

SEQ ID NO: 884455 - RNA, 19 nt, Artificial Sequence
  Description of Artificial Sequence: Synthetic oligonucleotide
aucuaaaugaugggcccca

SEQ ID NO: 884456 - RNA, 19 nt, Artificial Sequence
  Description of Artificial Sequence: Synthetic oligonucleotide
cagauaggggcagaagaug

SEQ ID NO: 884457 - RNA, 19 nt, Artificial Sequence
  Description of Artificial Sequence: Synthetic oligonucleotide
ugggcauccuugaaugauu

SEQ ID NO: 884458 - RNA, 19 nt, Artificial Sequence
  Description of Artificial Sequence: Synthetic oligonucleotide
uaucgauguucagcaaaca

SEQ ID NO: 884459 - RNA, 19 nt, Artificial Sequence
  Description of Artificial Sequence: Synthetic oligonucleotide
cauuggggauauugauagc

SEQ ID NO: 884460 - RNA, 19 nt, Artificial Sequence
  Description of Artificial Sequence: Synthetic oligonucleotide
uugggcauccuugaaugau

SEQ ID NO: 884461 - RNA, 19 nt, Artificial Sequence
  Description of Artificial Sequence: Synthetic oligonucleotide
acacuaccgugacaggcca

SEQ ID NO: 884462 - RNA, 19 nt, Artificial Sequence
  Description of Artificial Sequence: Synthetic oligonucleotide
uggaaggaucaaaggcagu

SEQ ID NO: 884463 - RNA, 19 nt, Artificial Sequence
  Description of Artificial Sequence: Synthetic oligonucleotide
auggcaauaacagguugau

SEQ ID NO: 884464 - RNA, 19 nt, Artificial Sequence
  Description of Artificial Sequence: Synthetic oligonucleotide
gcaucacacauccuaccag

SEQ ID NO: 884465 - RNA, 19 nt, Artificial Sequence
  Description of Artificial Sequence: Synthetic oligonucleotide
auauucaggcauugugcuu

SEQ ID NO: 884466 - RNA, 19 nt, Artificial Sequence
  Description of Artificial Sequence: Synthetic oligonucleotide
cagccaguggcaccuagac

SEQ ID NO: 884467 - RNA, 19 nt, Artificial Sequence
  Description of Artificial Sequence: Synthetic oligonucleotide
auggcucgggcuggcagcc

SEQ ID NO: 884468 - RNA, 19 nt, Artificial Sequence
  Description of Artificial Sequence: Synthetic oligonucleotide
cuccccauaguaucgaugu

SEQ ID NO: 884469 - RNA, 19 nt, Artificial Sequence
  Description of Artificial Sequence: Synthetic oligonucleotide
caccauacaaaguaauuau

SEQ ID NO: 884470 - RNA, 19 nt, Artificial Sequence
  Description of Artificial Sequence: Synthetic oligonucleotide
gggaaccaaaucaucaaac

SEQ ID NO: 884471 - RNA, 19 nt, Artificial Sequence
  Description of Artificial Sequence: Synthetic oligonucleotide
accuagacugcuaguagcu

SEQ ID NO: 884472 - RNA, 19 nt, Artificial Sequence
  Description of Artificial Sequence: Synthetic oligonucleotide
ggaaccaaaucaucaaacu

SEQ ID NO: 884473 - RNA, 19 nt, Artificial Sequence
  Description of Artificial Sequence: Synthetic oligonucleotide
ggcaguaccacaauagcaa

SEQ ID NO: 884474 - RNA, 19 nt, Artificial Sequence
  Description of Artificial Sequence: Synthetic oligonucleotide
gauaggggcagaagaugca

SEQ ID NO: 884475 - RNA, 19 nt, Artificial Sequence
  Description of Artificial Sequence: Synthetic oligonucleotide
guaguugagugucgguuaa

SEQ ID NO: 884476 - RNA, 19 nt, Artificial Sequence
  Description of Artificial Sequence: Synthetic oligonucleotide
guaccgcuuguuuaaaagu

SEQ ID NO: 884477 - RNA, 19 nt, Artificial Sequence
  Description of Artificial Sequence: Synthetic oligonucleotide
ggaaaguacucgcugccga

SEQ ID NO: 884478 - RNA, 19 nt, Artificial Sequence
  Description of Artificial Sequence: Synthetic oligonucleotide
gucacuccaccuccugacc

SEQ ID NO: 884479 - RNA, 19 nt, Artificial Sequence
  Description of Artificial Sequence: Synthetic oligonucleotide
ccacaauagcaaaucuccc

SEQ ID NO: 884480 - RNA, 19 nt, Artificial Sequence
  Description of Artificial Sequence: Synthetic oligonucleotide
cgauguucagcaaacacca

SEQ ID NO: 884481 - RNA, 19 nt, Artificial Sequence
  Description of Artificial Sequence: Synthetic oligonucleotide
gcuacagcagggucggaug

SEQ ID NO: 884482 - RNA, 19 nt, Artificial Sequence
  Description of Artificial Sequence: Synthetic oligonucleotide
gguaggucugccuuguucu

SEQ ID NO: 884483 - RNA, 19 nt, Artificial Sequence
  Description of Artificial Sequence: Synthetic oligonucleotide
ccaauuaagccgugguuuc

SEQ ID NO: 884484 - RNA, 19 nt, Artificial Sequence
  Description of Artificial Sequence: Synthetic oligonucleotide
gacaggccaagcaggcaag

SEQ ID NO: 884485 - RNA, 19 nt, Artificial Sequence
  Description of Artificial Sequence: Synthetic oligonucleotide
ggucacuccaccuccugac

SEQ ID NO: 884486 - RNA, 19 nt, Artificial Sequence
  Description of Artificial Sequence: Synthetic oligonucleotide
auaggggcagaagaugcaa

SEQ ID NO: 884487 - RNA, 19 nt, Artificial Sequence
  Description of Artificial Sequence: Synthetic oligonucleotide
caaaguggucaaccuucug

SEQ ID NO: 884488 - RNA, 19 nt, Artificial Sequence
  Description of Artificial Sequence: Synthetic oligonucleotide
uugugagccauuggagauc

SEQ ID NO: 884489 - RNA, 19 nt, Artificial Sequence
  Description of Artificial Sequence: Synthetic oligonucleotide
cugauagccccagccagug

SEQ ID NO: 884490 - RNA, 19 nt, Artificial Sequence
  Description of Artificial Sequence: Synthetic oligonucleotide
cugcggaugcucucugaac

SEQ ID NO: 884491 - RNA, 19 nt, Artificial Sequence
  Description of Artificial Sequence: Synthetic oligonucleotide
uaaguaccgcuuguuuaaa

SEQ ID NO: 884492 - RNA, 19 nt, Artificial Sequence
  Description of Artificial Sequence: Synthetic oligonucleotide
ccguauuauugcaaaacca

SEQ ID NO: 884493 - RNA, 19 nt, Artificial Sequence
  Description of Artificial Sequence: Synthetic oligonucleotide
uaguaucgauguucagcaa

SEQ ID NO: 884494 - RNA, 19 nt, Artificial Sequence
  Description of Artificial Sequence: Synthetic oligonucleotide
ggcagaucaccacaaaacu

SEQ ID NO: 884495 - RNA, 19 nt, Artificial Sequence
  Description of Artificial Sequence: Synthetic oligonucleotide
gggacuccccauaguaucg

SEQ ID NO: 884496 - RNA, 19 nt, Artificial Sequence
  Description of Artificial Sequence: Synthetic oligonucleotide
guaccacaauagcaaaucu

SEQ ID NO: 884497 - RNA, 19 nt, Artificial Sequence
  Description of Artificial Sequence: Synthetic oligonucleotide
acugauagccccagccagu

SEQ ID NO: 884498 - RNA, 19 nt, Artificial Sequence
  Description of Artificial Sequence: Synthetic oligonucleotide
gggacaguucuuuucaagu

SEQ ID NO: 884499 - RNA, 19 nt, Artificial Sequence
  Description of Artificial Sequence: Synthetic oligonucleotide
guugggcauccuugaauga

SEQ ID NO: 884500 - RNA, 19 nt, Artificial Sequence
  Description of Artificial Sequence: Synthetic oligonucleotide
gaaagcugccaaaggggaa

SEQ ID NO: 884501 - RNA, 19 nt, Artificial Sequence
  Description of Artificial Sequence: Synthetic oligonucleotide
gcacacuaccgugacaggc

SEQ ID NO: 884502 - RNA, 19 nt, Artificial Sequence
  Description of Artificial Sequence: Synthetic oligonucleotide
acuccccauaguaucgaug

SEQ ID NO: 884503 - RNA, 19 nt, Artificial Sequence
  Description of Artificial Sequence: Synthetic oligonucleotide
gggcaugaccaauucugug

SEQ ID NO: 884504 - RNA, 19 nt, Artificial Sequence
  Description of Artificial Sequence: Synthetic oligonucleotide
ucacuaccuguaguugagu

SEQ ID NO: 884505 - RNA, 19 nt, Artificial Sequence
  Description of Artificial Sequence: Synthetic oligonucleotide
acuacuaagugaggauauu

SEQ ID NO: 884506 - RNA, 19 nt, Artificial Sequence
  Description of Artificial Sequence: Synthetic oligonucleotide
ccccgaaugauaggaaagg

SEQ ID NO: 884507 - RNA, 19 nt, Artificial Sequence
  Description of Artificial Sequence: Synthetic oligonucleotide
auuauccaauuaagccgug

SEQ ID NO: 884508 - RNA, 19 nt, Artificial Sequence
  Description of Artificial Sequence: Synthetic oligonucleotide
agcaaaucucccagaaaua

SEQ ID NO: 884509 - RNA, 19 nt, Artificial Sequence
  Description of Artificial Sequence: Synthetic oligonucleotide
ggccccauuggggauauug

SEQ ID NO: 884510 - RNA, 19 nt, Artificial Sequence
  Description of Artificial Sequence: Synthetic oligonucleotide
gagcccggcagcccauggc

SEQ ID NO: 884511 - RNA, 19 nt, Artificial Sequence
  Description of Artificial Sequence: Synthetic oligonucleotide
ucuaaaugaugggccccau

SEQ ID NO: 884512 - RNA, 19 nt, Artificial Sequence
  Description of Artificial Sequence: Synthetic oligonucleotide
gagaugggagcaacacaca

SEQ ID NO: 884513 - RNA, 19 nt, Artificial Sequence
  Description of Artificial Sequence: Synthetic oligonucleotide
cuuuauuugcagcccaguu

SEQ ID NO: 884514 - RNA, 19 nt, Artificial Sequence
  Description of Artificial Sequence: Synthetic oligonucleotide
aucugcggaugcucucuga

SEQ ID NO: 884515 - RNA, 19 nt, Artificial Sequence
  Description of Artificial Sequence: Synthetic oligonucleotide
guggacuacuuuuccuaaa

SEQ ID NO: 884516 - RNA, 19 nt, Artificial Sequence
  Description of Artificial Sequence: Synthetic oligonucleotide
gguuucacaccccacuggu

SEQ ID NO: 884517 - RNA, 19 nt, Artificial Sequence
  Description of Artificial Sequence: Synthetic oligonucleotide
ccuaccagcugcaacugca

SEQ ID NO: 884518 - RNA, 19 nt, Artificial Sequence
  Description of Artificial Sequence: Synthetic oligonucleotide
gcuucguaaggguagucua

SEQ ID NO: 884519 - RNA, 19 nt, Artificial Sequence
  Description of Artificial Sequence: Synthetic oligonucleotide
cucaaaauucaaggggcua

SEQ ID NO: 884520 - RNA, 19 nt, Artificial Sequence
  Description of Artificial Sequence: Synthetic oligonucleotide
gaaccccguauuauugcaa

SEQ ID NO: 884521 - RNA, 19 nt, Artificial Sequence
  Description of Artificial Sequence: Synthetic oligonucleotide
cuaccgugacaggccaagc

SEQ ID NO: 884522 - RNA, 19 nt, Artificial Sequence
  Description of Artificial Sequence: Synthetic oligonucleotide
uggcaccuagacugcuagu

SEQ ID NO: 884523 - RNA, 19 nt, Artificial Sequence
  Description of Artificial Sequence: Synthetic oligonucleotide
ggcacacuaccgugacagg

SEQ ID NO: 884524 - RNA, 19 nt, Artificial Sequence
  Description of Artificial Sequence: Synthetic oligonucleotide
agccgugguuucacacccc

SEQ ID NO: 884525 - RNA, 19 nt, Artificial Sequence
  Description of Artificial Sequence: Synthetic oligonucleotide
gaagucccauauauaacuu

SEQ ID NO: 884526 - RNA, 19 nt, Artificial Sequence
  Description of Artificial Sequence: Synthetic oligonucleotide
uggcagaauuuaggcagau

SEQ ID NO: 884527 - RNA, 19 nt, Artificial Sequence
  Description of Artificial Sequence: Synthetic oligonucleotide
gugucgguuaauggcuuuc

SEQ ID NO: 884528 - RNA, 19 nt, Artificial Sequence
  Description of Artificial Sequence: Synthetic oligonucleotide
uaguugagugucgguuaau

SEQ ID NO: 884529 - RNA, 19 nt, Artificial Sequence
  Description of Artificial Sequence: Synthetic oligonucleotide
ccgaaugauaggaaaggua

SEQ ID NO: 884530 - RNA, 19 nt, Artificial Sequence
  Description of Artificial Sequence: Synthetic oligonucleotide
ccaccauacaaaguaauua

SEQ ID NO: 884531 - RNA, 19 nt, Artificial Sequence
  Description of Artificial Sequence: Synthetic oligonucleotide
gcggaugcucucugaacac

SEQ ID NO: 884532 - RNA, 19 nt, Artificial Sequence
  Description of Artificial Sequence: Synthetic oligonucleotide
cacugccuucccaacagcu

SEQ ID NO: 884533 - RNA, 19 nt, Artificial Sequence
  Description of Artificial Sequence: Synthetic oligonucleotide
gguucacccaggucucaga

SEQ ID NO: 884534 - RNA, 19 nt, Artificial Sequence
  Description of Artificial Sequence: Synthetic oligonucleotide
accuucuguuggaaguaaa

SEQ ID NO: 884535 - RNA, 19 nt, Artificial Sequence
  Description of Artificial Sequence: Synthetic oligonucleotide
cugaacacuguggacuacu

SEQ ID NO: 884536 - RNA, 19 nt, Artificial Sequence
  Description of Artificial Sequence: Synthetic oligonucleotide
cagcuauuaaguaccgcuu

SEQ ID NO: 884537 - RNA, 19 nt, Artificial Sequence
  Description of Artificial Sequence: Synthetic oligonucleotide
caguaccacaauagcaaau

SEQ ID NO: 884538 - RNA, 19 nt, Artificial Sequence
  Description of Artificial Sequence: Synthetic oligonucleotide
ggccccgaaugauaggaaa

SEQ ID NO: 884539 - RNA, 19 nt, Artificial Sequence
  Description of Artificial Sequence: Synthetic oligonucleotide
cccggcagcccauggcucg

SEQ ID NO: 884540 - RNA, 19 nt, Artificial Sequence
  Description of Artificial Sequence: Synthetic oligonucleotide
cuacagcagggucggaugu

SEQ ID NO: 884541 - RNA, 19 nt, Artificial Sequence
  Description of Artificial Sequence: Synthetic oligonucleotide
acacaccacagggaaccaa

SEQ ID NO: 884542 - RNA, 19 nt, Artificial Sequence
  Description of Artificial Sequence: Synthetic oligonucleotide
cuguaguugagugucgguu

SEQ ID NO: 884543 - RNA, 19 nt, Artificial Sequence
  Description of Artificial Sequence: Synthetic oligonucleotide
cugcgauccauuucuucau

SEQ ID NO: 884544 - RNA, 19 nt, Artificial Sequence
  Description of Artificial Sequence: Synthetic oligonucleotide
ccuagacugcuaguagcug

SEQ ID NO: 884545 - RNA, 19 nt, Artificial Sequence
  Description of Artificial Sequence: Synthetic oligonucleotide
gauagccaccaggguaucu

SEQ ID NO: 884546 - RNA, 19 nt, Artificial Sequence
  Description of Artificial Sequence: Synthetic oligonucleotide
uggcuucguaaggguaguc

SEQ ID NO: 884547 - RNA, 19 nt, Artificial Sequence
  Description of Artificial Sequence: Synthetic oligonucleotide
gccgugguuucacacccca

SEQ ID NO: 884548 - RNA, 19 nt, Artificial Sequence
  Description of Artificial Sequence: Synthetic oligonucleotide
ccaaaucaucaaacugcca

SEQ ID NO: 884549 - RNA, 19 nt, Artificial Sequence
  Description of Artificial Sequence: Synthetic oligonucleotide
ggcagaauuuaggcagauc

SEQ ID NO: 884550 - RNA, 19 nt, Artificial Sequence
  Description of Artificial Sequence: Synthetic oligonucleotide
ggcggccccgaaugauagg

SEQ ID NO: 884551 - RNA, 19 nt, Artificial Sequence
  Description of Artificial Sequence: Synthetic oligonucleotide
agacugcuaguagcuguuu

SEQ ID NO: 884552 - RNA, 19 nt, Artificial Sequence
  Description of Artificial Sequence: Synthetic oligonucleotide
gcggccccgaaugauagga

SEQ ID NO: 884553 - RNA, 19 nt, Artificial Sequence
  Description of Artificial Sequence: Synthetic oligonucleotide
ccaacuacuaagugaggau

SEQ ID NO: 884554 - RNA, 19 nt, Artificial Sequence
  Description of Artificial Sequence: Synthetic oligonucleotide
uggccccguuuccuggauu

SEQ ID NO: 884555 - RNA, 19 nt, Artificial Sequence
  Description of Artificial Sequence: Synthetic oligonucleotide
auggcggccccgaaugaua

SEQ ID NO: 884556 - RNA, 19 nt, Artificial Sequence
  Description of Artificial Sequence: Synthetic oligonucleotide
ggcuucguaaggguagucu

SEQ ID NO: 884557 - RNA, 19 nt, Artificial Sequence
  Description of Artificial Sequence: Synthetic oligonucleotide
ccagauaggggcagaagau

SEQ ID NO: 884558 - RNA, 19 nt, Artificial Sequence
  Description of Artificial Sequence: Synthetic oligonucleotide
aucccacaugaaccccgua

SEQ ID NO: 884559 - RNA, 19 nt, Artificial Sequence
  Description of Artificial Sequence: Synthetic oligonucleotide
ggacuccccauaguaucga

SEQ ID NO: 884560 - RNA, 19 nt, Artificial Sequence
  Description of Artificial Sequence: Synthetic oligonucleotide
cacaccccacugguuaaaa

SEQ ID NO: 884561 - RNA, 19 nt, Artificial Sequence
  Description of Artificial Sequence: Synthetic oligonucleotide
caucauggcggccccgaau

SEQ ID NO: 884562 - RNA, 19 nt, Artificial Sequence
  Description of Artificial Sequence: Synthetic oligonucleotide
ccacaugaaccccguauua

SEQ ID NO: 884563 - RNA, 19 nt, Artificial Sequence
  Description of Artificial Sequence: Synthetic oligonucleotide
gcagggucggauguggggu

SEQ ID NO: 884564 - RNA, 19 nt, Artificial Sequence
  Description of Artificial Sequence: Synthetic oligonucleotide
cacuaccgugacaggccaa

SEQ ID NO: 884565 - RNA, 19 nt, Artificial Sequence
  Description of Artificial Sequence: Synthetic oligonucleotide
ccaauguuuaucagcuauu

SEQ ID NO: 884566 - RNA, 19 nt, Artificial Sequence
  Description of Artificial Sequence: Synthetic oligonucleotide
gcuggcucggagaucuaaa

SEQ ID NO: 884567 - RNA, 19 nt, Artificial Sequence
  Description of Artificial Sequence: Synthetic oligonucleotide
ggucaaccuucuguuggaa

SEQ ID NO: 884568 - RNA, 19 nt, Artificial Sequence
  Description of Artificial Sequence: Synthetic oligonucleotide
ccgugguuucacaccccac

SEQ ID NO: 884569 - RNA, 19 nt, Artificial Sequence
  Description of Artificial Sequence: Synthetic oligonucleotide
cacauccuaccagcugcaa

SEQ ID NO: 884570 - RNA, 19 nt, Artificial Sequence
  Description of Artificial Sequence: Synthetic oligonucleotide
ggcuacagcagggucggau

SEQ ID NO: 884571 - RNA, 19 nt, Artificial Sequence
  Description of Artificial Sequence: Synthetic oligonucleotide
cccgaaugauaggaaaggu

SEQ ID NO: 884572 - RNA, 19 nt, Artificial Sequence
  Description of Artificial Sequence: Synthetic oligonucleotide
cagggucggaugugggguu

SEQ ID NO: 884573 - RNA, 19 nt, Artificial Sequence
  Description of Artificial Sequence: Synthetic oligonucleotide
gucggaugugggguugguu

SEQ ID NO: 884574 - RNA, 19 nt, Artificial Sequence
  Description of Artificial Sequence: Synthetic oligonucleotide
ccguuuccuggauuggcau

SEQ ID NO: 884575 - RNA, 19 nt, Artificial Sequence
  Description of Artificial Sequence: Synthetic oligonucleotide
ggucggaugugggguuggu

SEQ ID NO: 884576 - RNA, 19 nt, Artificial Sequence
  Description of Artificial Sequence: Synthetic oligonucleotide
cagguaggucugccuuguu

SEQ ID NO: 884577 - RNA, 19 nt, Artificial Sequence
  Description of Artificial Sequence: Synthetic oligonucleotide
cggccccgaaugauaggaa

SEQ ID NO: 884578 - RNA, 19 nt, Artificial Sequence
  Description of Artificial Sequence: Synthetic oligonucleotide
ucuaauuucucaaugaaag

SEQ ID NO: 884579 - RNA, 19 nt, Artificial Sequence
  Description of Artificial Sequence: Synthetic oligonucleotide
aauucaaagacugagcauc

SEQ ID NO: 884580 - RNA, 19 nt, Artificial Sequence
  Description of Artificial Sequence: Synthetic oligonucleotide
uguuuuauccucuaaacug

SEQ ID NO: 884581 - RNA, 19 nt, Artificial Sequence
  Description of Artificial Sequence: Synthetic oligonucleotide
ucaaugaugucugugaucg

SEQ ID NO: 884582 - RNA, 19 nt, Artificial Sequence
  Description of Artificial Sequence: Synthetic oligonucleotide
acauguaucggucaaaauc

SEQ ID NO: 884583 - RNA, 19 nt, Artificial Sequence
  Description of Artificial Sequence: Synthetic oligonucleotide
ucaacauagacucuguagc

SEQ ID NO: 884584 - RNA, 19 nt, Artificial Sequence
  Description of Artificial Sequence: Synthetic oligonucleotide
ugcauuauuauuuacucgc

SEQ ID NO: 884585 - RNA, 19 nt, Artificial Sequence
  Description of Artificial Sequence: Synthetic oligonucleotide
aauaguagccauccucgcc

SEQ ID NO: 884586 - RNA, 19 nt, Artificial Sequence
  Description of Artificial Sequence: Synthetic oligonucleotide
cauguaucggucaaaaucc

SEQ ID NO: 884587 - RNA, 19 nt, Artificial Sequence
  Description of Artificial Sequence: Synthetic oligonucleotide
agugcauuauuauuuacuc

SEQ ID NO: 884588 - RNA, 19 nt, Artificial Sequence
  Description of Artificial Sequence: Synthetic oligonucleotide
aaugcuuaaaucccuuuug

SEQ ID NO: 884589 - RNA, 19 nt, Artificial Sequence
  Description of Artificial Sequence: Synthetic oligonucleotide
ugccauaguaaccacaucc

SEQ ID NO: 884590 - RNA, 19 nt, Artificial Sequence
  Description of Artificial Sequence: Synthetic oligonucleotide
auuauuucacacuaggaga

SEQ ID NO: 884591 - RNA, 19 nt, Artificial Sequence
  Description of Artificial Sequence: Synthetic oligonucleotide
gaaauaguagccauccucg

SEQ ID NO: 884592 - RNA, 19 nt, Artificial Sequence
  Description of Artificial Sequence: Synthetic oligonucleotide
auuaacauaucuccuaucu

SEQ ID NO: 884593 - RNA, 19 nt, Artificial Sequence
  Description of Artificial Sequence: Synthetic oligonucleotide
auggaaacguaauucacac

SEQ ID NO: 884594 - RNA, 19 nt, Artificial Sequence
  Description of Artificial Sequence: Synthetic oligonucleotide
auaguaaccacauccuuuc

SEQ ID NO: 884595 - RNA, 19 nt, Artificial Sequence
  Description of Artificial Sequence: Synthetic oligonucleotide
acguaauucacacaaaccu

SEQ ID NO: 884596 - RNA, 19 nt, Artificial Sequence
  Description of Artificial Sequence: Synthetic oligonucleotide
ucuuuagucacucgauccg

SEQ ID NO: 884597 - RNA, 19 nt, Artificial Sequence
  Description of Artificial Sequence: Synthetic oligonucleotide
aaauaguagccauccucgc

SEQ ID NO: 884598 - RNA, 19 nt, Artificial Sequence
  Description of Artificial Sequence: Synthetic oligonucleotide
aacguaauucacacaaacc

SEQ ID NO: 884599 - RNA, 19 nt, Artificial Sequence
  Description of Artificial Sequence: Synthetic oligonucleotide
aaaccuaccucaccaacuc

SEQ ID NO: 884600 - RNA, 19 nt, Artificial Sequence
  Description of Artificial Sequence: Synthetic oligonucleotide
gauuuccucauugacaggg

SEQ ID NO: 884601 - RNA, 19 nt, Artificial Sequence
  Description of Artificial Sequence: Synthetic oligonucleotide
uuacuuauuaacauaucuc

SEQ ID NO: 884602 - RNA, 19 nt, Artificial Sequence
  Description of Artificial Sequence: Synthetic oligonucleotide
ucuguuuacucuuuaguca

SEQ ID NO: 884603 - RNA, 19 nt, Artificial Sequence
  Description of Artificial Sequence: Synthetic oligonucleotide
cuaaacugcaguauuugcc

SEQ ID NO: 884604 - RNA, 19 nt, Artificial Sequence
  Description of Artificial Sequence: Synthetic oligonucleotide
uuuuaagcaguuaauucgu

SEQ ID NO: 884605 - RNA, 19 nt, Artificial Sequence
  Description of Artificial Sequence: Synthetic oligonucleotide
auccucgccagucauaagc

SEQ ID NO: 884606 - RNA, 19 nt, Artificial Sequence
  Description of Artificial Sequence: Synthetic oligonucleotide
agacugagcaucuaauuuc

SEQ ID NO: 884607 - RNA, 19 nt, Artificial Sequence
  Description of Artificial Sequence: Synthetic oligonucleotide
caaaccaacaacugugucc

SEQ ID NO: 884608 - RNA, 19 nt, Artificial Sequence
  Description of Artificial Sequence: Synthetic oligonucleotide
aaauauggccaucauccug

SEQ ID NO: 884609 - RNA, 19 nt, Artificial Sequence
  Description of Artificial Sequence: Synthetic oligonucleotide
acucgauccgucucaaugc

SEQ ID NO: 884610 - RNA, 19 nt, Artificial Sequence
  Description of Artificial Sequence: Synthetic oligonucleotide
gacuuaaauucaaagacug

SEQ ID NO: 884611 - RNA, 19 nt, Artificial Sequence
  Description of Artificial Sequence: Synthetic oligonucleotide
cauuggaaaaucagggagg

SEQ ID NO: 884612 - RNA, 19 nt, Artificial Sequence
  Description of Artificial Sequence: Synthetic oligonucleotide
uuggauccaacccuggaag

SEQ ID NO: 884613 - RNA, 19 nt, Artificial Sequence
  Description of Artificial Sequence: Synthetic oligonucleotide
cucagauugauccacauga

SEQ ID NO: 884614 - RNA, 19 nt, Artificial Sequence
  Description of Artificial Sequence: Synthetic oligonucleotide
uuauccucuaaacugcagu

SEQ ID NO: 884615 - RNA, 19 nt, Artificial Sequence
  Description of Artificial Sequence: Synthetic oligonucleotide
uuacucuuuagucacucga

SEQ ID NO: 884616 - RNA, 19 nt, Artificial Sequence
  Description of Artificial Sequence: Synthetic oligonucleotide
uaacauaucuccuaucuuu

SEQ ID NO: 884617 - RNA, 19 nt, Artificial Sequence
  Description of Artificial Sequence: Synthetic oligonucleotide
gucaacauagacucuguag

SEQ ID NO: 884618 - RNA, 19 nt, Artificial Sequence
  Description of Artificial Sequence: Synthetic oligonucleotide
uagugcauuauuauuuacu

SEQ ID NO: 884619 - RNA, 19 nt, Artificial Sequence
  Description of Artificial Sequence: Synthetic oligonucleotide
gaagauggaaacguaauuc

SEQ ID NO: 884620 - RNA, 19 nt, Artificial Sequence
  Description of Artificial Sequence: Synthetic oligonucleotide
uuuuccacgagucugcauu

SEQ ID NO: 884621 - RNA, 19 nt, Artificial Sequence
  Description of Artificial Sequence: Synthetic oligonucleotide
agacacuucagggauuucc

SEQ ID NO: 884622 - RNA, 19 nt, Artificial Sequence
  Description of Artificial Sequence: Synthetic oligonucleotide
cugguaaaaguccugaguc

SEQ ID NO: 884623 - RNA, 19 nt, Artificial Sequence
  Description of Artificial Sequence: Synthetic oligonucleotide
acagaagcucccugaaagc

SEQ ID NO: 884624 - RNA, 19 nt, Artificial Sequence
  Description of Artificial Sequence: Synthetic oligonucleotide
aaguggguauuucucaaca

SEQ ID NO: 884625 - RNA, 19 nt, Artificial Sequence
  Description of Artificial Sequence: Synthetic oligonucleotide
agucaauggcugcuaaugg

SEQ ID NO: 884626 - RNA, 19 nt, Artificial Sequence
  Description of Artificial Sequence: Synthetic oligonucleotide
aauuccccggcguucggac

SEQ ID NO: 884627 - RNA, 19 nt, Artificial Sequence
  Description of Artificial Sequence: Synthetic oligonucleotide
guuaauucguaucccagac

SEQ ID NO: 884628 - RNA, 19 nt, Artificial Sequence
  Description of Artificial Sequence: Synthetic oligonucleotide
augcaggcuagcuuguccc

SEQ ID NO: 884629 - RNA, 19 nt, Artificial Sequence
  Description of Artificial Sequence: Synthetic oligonucleotide
agucugcauucuuucagcc

SEQ ID NO: 884630 - RNA, 19 nt, Artificial Sequence
  Description of Artificial Sequence: Synthetic oligonucleotide
ucuccuaucuuuacaauua

SEQ ID NO: 884631 - RNA, 19 nt, Artificial Sequence
  Description of Artificial Sequence: Synthetic oligonucleotide
ucacacuaggagaguaugg

SEQ ID NO: 884632 - RNA, 19 nt, Artificial Sequence
  Description of Artificial Sequence: Synthetic oligonucleotide
aacgugagggacugggcuc

SEQ ID NO: 884633 - RNA, 19 nt, Artificial Sequence
  Description of Artificial Sequence: Synthetic oligonucleotide
uuaauucguaucccagacc

SEQ ID NO: 884634 - RNA, 19 nt, Artificial Sequence
  Description of Artificial Sequence: Synthetic oligonucleotide
uugcuucacaccuaagcag

SEQ ID NO: 884635 - RNA, 19 nt, Artificial Sequence
  Description of Artificial Sequence: Synthetic oligonucleotide
uagguuggugaaauaguag

SEQ ID NO: 884636 - RNA, 19 nt, Artificial Sequence
  Description of Artificial Sequence: Synthetic oligonucleotide
aagucaucggcugaggcug

SEQ ID NO: 884637 - RNA, 19 nt, Artificial Sequence
  Description of Artificial Sequence: Synthetic oligonucleotide
cuguuuacucuuuagucac

SEQ ID NO: 884638 - RNA, 19 nt, Artificial Sequence
  Description of Artificial Sequence: Synthetic oligonucleotide
uuauacagacgugucauga

SEQ ID NO: 884639 - RNA, 19 nt, Artificial Sequence
  Description of Artificial Sequence: Synthetic oligonucleotide
guuuuauccucuaaacugc

SEQ ID NO: 884640 - RNA, 19 nt, Artificial Sequence
  Description of Artificial Sequence: Synthetic oligonucleotide
aggacgauguagaugaggg

SEQ ID NO: 884641 - RNA, 19 nt, Artificial Sequence
  Description of Artificial Sequence: Synthetic oligonucleotide
acacaaaccuaccucacca

SEQ ID NO: 884642 - RNA, 19 nt, Artificial Sequence
  Description of Artificial Sequence: Synthetic oligonucleotide
aagcgagugauguacugga

SEQ ID NO: 884643 - RNA, 19 nt, Artificial Sequence
  Description of Artificial Sequence: Synthetic oligonucleotide
uuuuauccucuaaacugca

SEQ ID NO: 884644 - RNA, 19 nt, Artificial Sequence
  Description of Artificial Sequence: Synthetic oligonucleotide
ucgauucugauccauuauc

SEQ ID NO: 884645 - RNA, 19 nt, Artificial Sequence
  Description of Artificial Sequence: Synthetic oligonucleotide
uuuauccucuaaacugcag

SEQ ID NO: 884646 - RNA, 19 nt, Artificial Sequence
  Description of Artificial Sequence: Synthetic oligonucleotide
ucuaucuguuuuauccucu

SEQ ID NO: 884647 - RNA, 19 nt, Artificial Sequence
  Description of Artificial Sequence: Synthetic oligonucleotide
aguuaauucguaucccaga

SEQ ID NO: 884648 - RNA, 19 nt, Artificial Sequence
  Description of Artificial Sequence: Synthetic oligonucleotide
uacagacgugucaugaugu

SEQ ID NO: 884649 - RNA, 19 nt, Artificial Sequence
  Description of Artificial Sequence: Synthetic oligonucleotide
ugcaguauuugccccaaac

SEQ ID NO: 884650 - RNA, 19 nt, Artificial Sequence
  Description of Artificial Sequence: Synthetic oligonucleotide
guaauucacacaaaccuac

SEQ ID NO: 884651 - RNA, 19 nt, Artificial Sequence
  Description of Artificial Sequence: Synthetic oligonucleotide
ggaaacguaauucacacaa

SEQ ID NO: 884652 - RNA, 19 nt, Artificial Sequence
  Description of Artificial Sequence: Synthetic oligonucleotide
ucuggccggacauguaucg

SEQ ID NO: 884653 - RNA, 19 nt, Artificial Sequence
  Description of Artificial Sequence: Synthetic oligonucleotide
uucagccacauucugguaa

SEQ ID NO: 884654 - RNA, 19 nt, Artificial Sequence
  Description of Artificial Sequence: Synthetic oligonucleotide
cuucuggcgggccuuaugg

SEQ ID NO: 884655 - RNA, 19 nt, Artificial Sequence
  Description of Artificial Sequence: Synthetic oligonucleotide
uuugccccaaaccaacaac

SEQ ID NO: 884656 - RNA, 19 nt, Artificial Sequence
  Description of Artificial Sequence: Synthetic oligonucleotide
gacagagaagauggaaacg

SEQ ID NO: 884657 - RNA, 19 nt, Artificial Sequence
  Description of Artificial Sequence: Synthetic oligonucleotide
uuugacauuuuaagcaguu

SEQ ID NO: 884658 - RNA, 19 nt, Artificial Sequence
  Description of Artificial Sequence: Synthetic oligonucleotide
uuaagcaguuaauucguau

SEQ ID NO: 884659 - RNA, 19 nt, Artificial Sequence
  Description of Artificial Sequence: Synthetic oligonucleotide
gaagcgagugauguacugg

SEQ ID NO: 884660 - RNA, 19 nt, Artificial Sequence
  Description of Artificial Sequence: Synthetic oligonucleotide
gagaacgugagggacuggg

SEQ ID NO: 884661 - RNA, 19 nt, Artificial Sequence
  Description of Artificial Sequence: Synthetic oligonucleotide
uuuauacagacgugucaug

SEQ ID NO: 884662 - RNA, 19 nt, Artificial Sequence
  Description of Artificial Sequence: Synthetic oligonucleotide
gagucaauggcugcuaaug

SEQ ID NO: 884663 - RNA, 19 nt, Artificial Sequence
  Description of Artificial Sequence: Synthetic oligonucleotide
uugccccaaaccaacaacu

SEQ ID NO: 884664 - RNA, 19 nt, Artificial Sequence
  Description of Artificial Sequence: Synthetic oligonucleotide
aucgcuuucaccaccaugu

SEQ ID NO: 884665 - RNA, 19 nt, Artificial Sequence
  Description of Artificial Sequence: Synthetic oligonucleotide
auuuucagagucaauggcu

SEQ ID NO: 884666 - RNA, 19 nt, Artificial Sequence
  Description of Artificial Sequence: Synthetic oligonucleotide
cauugacagggacacagag

SEQ ID NO: 884667 - RNA, 19 nt, Artificial Sequence
  Description of Artificial Sequence: Synthetic oligonucleotide
gauggaaacguaauucaca

SEQ ID NO: 884668 - RNA, 19 nt, Artificial Sequence
  Description of Artificial Sequence: Synthetic oligonucleotide
ugguaaaaguccugaguca

SEQ ID NO: 884669 - RNA, 19 nt, Artificial Sequence
  Description of Artificial Sequence: Synthetic oligonucleotide
ggugaaauaguagccaucc

SEQ ID NO: 884670 - RNA, 19 nt, Artificial Sequence
  Description of Artificial Sequence: Synthetic oligonucleotide
gaugcaggcuagcuugucc

SEQ ID NO: 884671 - RNA, 19 nt, Artificial Sequence
  Description of Artificial Sequence: Synthetic oligonucleotide
uccuaucuuuacaauuaca

SEQ ID NO: 884672 - RNA, 19 nt, Artificial Sequence
  Description of Artificial Sequence: Synthetic oligonucleotide
uccucauugacagggacac

SEQ ID NO: 884673 - RNA, 19 nt, Artificial Sequence
  Description of Artificial Sequence: Synthetic oligonucleotide
ugcuccucaaugcuuaaau

SEQ ID NO: 884674 - RNA, 19 nt, Artificial Sequence
  Description of Artificial Sequence: Synthetic oligonucleotide
uaaauauggccaucauccu

SEQ ID NO: 884675 - RNA, 19 nt, Artificial Sequence
  Description of Artificial Sequence: Synthetic oligonucleotide
cucgccagucauaagccgg

SEQ ID NO: 884676 - RNA, 19 nt, Artificial Sequence
  Description of Artificial Sequence: Synthetic oligonucleotide
uuucgauucugauccauua

SEQ ID NO: 884677 - RNA, 19 nt, Artificial Sequence
  Description of Artificial Sequence: Synthetic oligonucleotide
uuuacucgcuuccucugcu

SEQ ID NO: 884678 - RNA, 19 nt, Artificial Sequence
  Description of Artificial Sequence: Synthetic oligonucleotide
uaugguacuccucccucca

SEQ ID NO: 884679 - RNA, 19 nt, Artificial Sequence
  Description of Artificial Sequence: Synthetic oligonucleotide
uaccucaccaacucaaaau

SEQ ID NO: 884680 - RNA, 19 nt, Artificial Sequence
  Description of Artificial Sequence: Synthetic oligonucleotide
aucucaaguggguauuucu

SEQ ID NO: 884681 - RNA, 19 nt, Artificial Sequence
  Description of Artificial Sequence: Synthetic oligonucleotide
uucacacuaggagaguaug

SEQ ID NO: 884682 - RNA, 19 nt, Artificial Sequence
  Description of Artificial Sequence: Synthetic oligonucleotide
uucugguaaaaguccugag

SEQ ID NO: 884683 - RNA, 19 nt, Artificial Sequence
  Description of Artificial Sequence: Synthetic oligonucleotide
uauccucuaaacugcagua

SEQ ID NO: 884684 - RNA, 19 nt, Artificial Sequence
  Description of Artificial Sequence: Synthetic oligonucleotide
uccuccugacuuaaauuca

SEQ ID NO: 884685 - RNA, 19 nt, Artificial Sequence
  Description of Artificial Sequence: Synthetic oligonucleotide
uccucgccagucauaagcc

SEQ ID NO: 884686 - RNA, 19 nt, Artificial Sequence
  Description of Artificial Sequence: Synthetic oligonucleotide
guagucucugggcagaaca

SEQ ID NO: 884687 - RNA, 19 nt, Artificial Sequence
  Description of Artificial Sequence: Synthetic oligonucleotide
cacucgauccgucucaaug

SEQ ID NO: 884688 - RNA, 19 nt, Artificial Sequence
  Description of Artificial Sequence: Synthetic oligonucleotide
auuuacuuauuaacauauc

SEQ ID NO: 884689 - RNA, 19 nt, Artificial Sequence
  Description of Artificial Sequence: Synthetic oligonucleotide
agaguaugggaacauugaa

SEQ ID NO: 884690 - RNA, 19 nt, Artificial Sequence
  Description of Artificial Sequence: Synthetic oligonucleotide
uacucuuuagucacucgau

SEQ ID NO: 884691 - RNA, 19 nt, Artificial Sequence
  Description of Artificial Sequence: Synthetic oligonucleotide
ucgucuguuuacucuuuag

SEQ ID NO: 884692 - RNA, 19 nt, Artificial Sequence
  Description of Artificial Sequence: Synthetic oligonucleotide
uggaggcuacuuuuccacg

SEQ ID NO: 884693 - RNA, 19 nt, Artificial Sequence
  Description of Artificial Sequence: Synthetic oligonucleotide
auuccauccguccagucua

SEQ ID NO: 884694 - RNA, 19 nt, Artificial Sequence
  Description of Artificial Sequence: Synthetic oligonucleotide
agcaucuaucuguuuuauc

SEQ ID NO: 884695 - RNA, 19 nt, Artificial Sequence
  Description of Artificial Sequence: Synthetic oligonucleotide
ucaugaugugcuuuucgau

SEQ ID NO: 884696 - RNA, 19 nt, Artificial Sequence
  Description of Artificial Sequence: Synthetic oligonucleotide
aaguaaauauggccaucau

SEQ ID NO: 884697 - RNA, 19 nt, Artificial Sequence
  Description of Artificial Sequence: Synthetic oligonucleotide
auucguaucccagaccuga

SEQ ID NO: 884698 - RNA, 19 nt, Artificial Sequence
  Description of Artificial Sequence: Synthetic oligonucleotide
uccucuaaacugcaguauu

SEQ ID NO: 884699 - RNA, 19 nt, Artificial Sequence
  Description of Artificial Sequence: Synthetic oligonucleotide
gcuuaaaucccuuuuguaa

SEQ ID NO: 884700 - RNA, 19 nt, Artificial Sequence
  Description of Artificial Sequence: Synthetic oligonucleotide
uauuugccccaaaccaaca

SEQ ID NO: 884701 - RNA, 19 nt, Artificial Sequence
  Description of Artificial Sequence: Synthetic oligonucleotide
uucgauucugauccauuau

SEQ ID NO: 884702 - RNA, 19 nt, Artificial Sequence
  Description of Artificial Sequence: Synthetic oligonucleotide
uccgucucaaugcugguuu

SEQ ID NO: 884703 - RNA, 19 nt, Artificial Sequence
  Description of Artificial Sequence: Synthetic oligonucleotide
uauacagacgugucaugau

SEQ ID NO: 884704 - RNA, 19 nt, Artificial Sequence
  Description of Artificial Sequence: Synthetic oligonucleotide
agcagccccaaguaaauau

SEQ ID NO: 884705 - RNA, 19 nt, Artificial Sequence
  Description of Artificial Sequence: Synthetic oligonucleotide
ucuuucugccagcucccag

SEQ ID NO: 884706 - RNA, 19 nt, Artificial Sequence
  Description of Artificial Sequence: Synthetic oligonucleotide
uaaccacauccuuucuugc

SEQ ID NO: 884707 - RNA, 19 nt, Artificial Sequence
  Description of Artificial Sequence: Synthetic oligonucleotide
agaagcgagugauguacug

SEQ ID NO: 884708 - RNA, 19 nt, Artificial Sequence
  Description of Artificial Sequence: Synthetic oligonucleotide
uuuucgauucugauccauu

SEQ ID NO: 884709 - RNA, 19 nt, Artificial Sequence
  Description of Artificial Sequence: Synthetic oligonucleotide
augaauuccccggcguucg

SEQ ID NO: 884710 - RNA, 19 nt, Artificial Sequence
  Description of Artificial Sequence: Synthetic oligonucleotide
cacagaggaagcccauugg

SEQ ID NO: 884711 - RNA, 19 nt, Artificial Sequence
  Description of Artificial Sequence: Synthetic oligonucleotide
gggguugcccuucaggacg

SEQ ID NO: 884712 - RNA, 19 nt, Artificial Sequence
  Description of Artificial Sequence: Synthetic oligonucleotide
ucauucugacugcuccuca

SEQ ID NO: 884713 - RNA, 19 nt, Artificial Sequence
  Description of Artificial Sequence: Synthetic oligonucleotide
auucugguaaaaguccuga

SEQ ID NO: 884714 - RNA, 19 nt, Artificial Sequence
  Description of Artificial Sequence: Synthetic oligonucleotide
cuuaugguacuccucccuc

SEQ ID NO: 884715 - RNA, 19 nt, Artificial Sequence
  Description of Artificial Sequence: Synthetic oligonucleotide
agguccaaguucuuauaca

SEQ ID NO: 884716 - RNA, 19 nt, Artificial Sequence
  Description of Artificial Sequence: Synthetic oligonucleotide
aaucccuuuuguaaugcau

SEQ ID NO: 884717 - RNA, 19 nt, Artificial Sequence
  Description of Artificial Sequence: Synthetic oligonucleotide
cuuggcaauuccauccguc

SEQ ID NO: 884718 - RNA, 19 nt, Artificial Sequence
  Description of Artificial Sequence: Synthetic oligonucleotide
caaauuuauacagacgugu

SEQ ID NO: 884719 - RNA, 19 nt, Artificial Sequence
  Description of Artificial Sequence: Synthetic oligonucleotide
aguaaccacauccuuucuu

SEQ ID NO: 884720 - RNA, 19 nt, Artificial Sequence
  Description of Artificial Sequence: Synthetic oligonucleotide
cuuaaaucccuuuuguaau

SEQ ID NO: 884721 - RNA, 19 nt, Artificial Sequence
  Description of Artificial Sequence: Synthetic oligonucleotide
cauucugguaaaaguccug

SEQ ID NO: 884722 - RNA, 19 nt, Artificial Sequence
  Description of Artificial Sequence: Synthetic oligonucleotide
aacauaucuccuaucuuua

SEQ ID NO: 884723 - RNA, 19 nt, Artificial Sequence
  Description of Artificial Sequence: Synthetic oligonucleotide
uccguccagucuauuaagu

SEQ ID NO: 884724 - RNA, 19 nt, Artificial Sequence
  Description of Artificial Sequence: Synthetic oligonucleotide
uugaguccaucucaaugau

SEQ ID NO: 884725 - RNA, 19 nt, Artificial Sequence
  Description of Artificial Sequence: Synthetic oligonucleotide
cagaaacccugccaggcag

SEQ ID NO: 884726 - RNA, 19 nt, Artificial Sequence
  Description of Artificial Sequence: Synthetic oligonucleotide
agacgugucaugaugugcu

SEQ ID NO: 884727 - RNA, 19 nt, Artificial Sequence
  Description of Artificial Sequence: Synthetic oligonucleotide
cucuguagcaucuaucugu

SEQ ID NO: 884728 - RNA, 19 nt, Artificial Sequence
  Description of Artificial Sequence: Synthetic oligonucleotide
ugggcagaacacaaauuua

SEQ ID NO: 884729 - RNA, 19 nt, Artificial Sequence
  Description of Artificial Sequence: Synthetic oligonucleotide
caacauagacucuguagca

SEQ ID NO: 884730 - RNA, 19 nt, Artificial Sequence
  Description of Artificial Sequence: Synthetic oligonucleotide
gcuaaugguugguuugggg

SEQ ID NO: 884731 - RNA, 19 nt, Artificial Sequence
  Description of Artificial Sequence: Synthetic oligonucleotide
cagggauuuccucauugac

SEQ ID NO: 884732 - RNA, 19 nt, Artificial Sequence
  Description of Artificial Sequence: Synthetic oligonucleotide
ucgccagucauaagccggc

SEQ ID NO: 884733 - RNA, 19 nt, Artificial Sequence
  Description of Artificial Sequence: Synthetic oligonucleotide
aguauuugccccaaaccaa

SEQ ID NO: 884734 - RNA, 19 nt, Artificial Sequence
  Description of Artificial Sequence: Synthetic oligonucleotide
cuagcuugucccgaggcac

SEQ ID NO: 884735 - RNA, 19 nt, Artificial Sequence
  Description of Artificial Sequence: Synthetic oligonucleotide
acacgcuuugaguccaucu

SEQ ID NO: 884736 - RNA, 19 nt, Artificial Sequence
  Description of Artificial Sequence: Synthetic oligonucleotide
ugcuaaugguugguuuggg

SEQ ID NO: 884737 - RNA, 19 nt, Artificial Sequence
  Description of Artificial Sequence: Synthetic oligonucleotide
cacuguggugaccuugcgg

SEQ ID NO: 884738 - RNA, 19 nt, Artificial Sequence
  Description of Artificial Sequence: Synthetic oligonucleotide
agccccaaguaaauauggc

SEQ ID NO: 884739 - RNA, 19 nt, Artificial Sequence
  Description of Artificial Sequence: Synthetic oligonucleotide
acgugagggacugggcucc

SEQ ID NO: 884740 - RNA, 19 nt, Artificial Sequence
  Description of Artificial Sequence: Synthetic oligonucleotide
gaaacccugccaggcaggg

SEQ ID NO: 884741 - RNA, 19 nt, Artificial Sequence
  Description of Artificial Sequence: Synthetic oligonucleotide
ccugacuuaaauucaaaga

SEQ ID NO: 884742 - RNA, 19 nt, Artificial Sequence
  Description of Artificial Sequence: Synthetic oligonucleotide
caaguggguauuucucaac

SEQ ID NO: 884743 - RNA, 19 nt, Artificial Sequence
  Description of Artificial Sequence: Synthetic oligonucleotide
ucauaagccggcugggguu

SEQ ID NO: 884744 - RNA, 19 nt, Artificial Sequence
  Description of Artificial Sequence: Synthetic oligonucleotide
aaccuaccucaccaacuca

SEQ ID NO: 884745 - RNA, 19 nt, Artificial Sequence
  Description of Artificial Sequence: Synthetic oligonucleotide
ggcaagaucuuucuucuca

SEQ ID NO: 884746 - RNA, 19 nt, Artificial Sequence
  Description of Artificial Sequence: Synthetic oligonucleotide
gccccaaguaaauauggcc

SEQ ID NO: 884747 - RNA, 19 nt, Artificial Sequence
  Description of Artificial Sequence: Synthetic oligonucleotide
aaagcagccccaaguaaau

SEQ ID NO: 884748 - RNA, 19 nt, Artificial Sequence
  Description of Artificial Sequence: Synthetic oligonucleotide
ggagaguaugggaacauug

SEQ ID NO: 884749 - RNA, 19 nt, Artificial Sequence
  Description of Artificial Sequence: Synthetic oligonucleotide
auagguuggugaaauagua

SEQ ID NO: 884750 - RNA, 19 nt, Artificial Sequence
  Description of Artificial Sequence: Synthetic oligonucleotide
cacgcuuugaguccaucuc

SEQ ID NO: 884751 - RNA, 19 nt, Artificial Sequence
  Description of Artificial Sequence: Synthetic oligonucleotide
gugcuuuucgauucugauc

SEQ ID NO: 884752 - RNA, 19 nt, Artificial Sequence
  Description of Artificial Sequence: Synthetic oligonucleotide
ucguaucccagaccugaac

SEQ ID NO: 884753 - RNA, 19 nt, Artificial Sequence
  Description of Artificial Sequence: Synthetic oligonucleotide
aaccaacaacuguguccac

SEQ ID NO: 884754 - RNA, 19 nt, Artificial Sequence
  Description of Artificial Sequence: Synthetic oligonucleotide
uacauuugcuucacaccua

SEQ ID NO: 884755 - RNA, 19 nt, Artificial Sequence
  Description of Artificial Sequence: Synthetic oligonucleotide
agucauaagccggcugggg

SEQ ID NO: 884756 - RNA, 19 nt, Artificial Sequence
  Description of Artificial Sequence: Synthetic oligonucleotide
uuuccacgagucugcauuc

SEQ ID NO: 884757 - RNA, 19 nt, Artificial Sequence
  Description of Artificial Sequence: Synthetic oligonucleotide
uaucuccuaucuuuacaau

SEQ ID NO: 884758 - RNA, 19 nt, Artificial Sequence
  Description of Artificial Sequence: Synthetic oligonucleotide
agucuggccggacauguau

SEQ ID NO: 884759 - RNA, 19 nt, Artificial Sequence
  Description of Artificial Sequence: Synthetic oligonucleotide
ugcgggucuucucauuggu

SEQ ID NO: 884760 - RNA, 19 nt, Artificial Sequence
  Description of Artificial Sequence: Synthetic oligonucleotide
aucggucaaaauccuccug

SEQ ID NO: 884761 - RNA, 19 nt, Artificial Sequence
  Description of Artificial Sequence: Synthetic oligonucleotide
gccaucauccugcauacac

SEQ ID NO: 884762 - RNA, 19 nt, Artificial Sequence
  Description of Artificial Sequence: Synthetic oligonucleotide
cuggcgggccuuaugguac

SEQ ID NO: 884763 - RNA, 19 nt, Artificial Sequence
  Description of Artificial Sequence: Synthetic oligonucleotide
ggaacauugaagccauguc

SEQ ID NO: 884764 - RNA, 19 nt, Artificial Sequence
  Description of Artificial Sequence: Synthetic oligonucleotide
aacuuccuuggcaauucca

SEQ ID NO: 884765 - RNA, 19 nt, Artificial Sequence
  Description of Artificial Sequence: Synthetic oligonucleotide
uggccggacauguaucggu

SEQ ID NO: 884766 - RNA, 19 nt, Artificial Sequence
  Description of Artificial Sequence: Synthetic oligonucleotide
ugcauacaccugaggcugc

SEQ ID NO: 884767 - RNA, 19 nt, Artificial Sequence
  Description of Artificial Sequence: Synthetic oligonucleotide
ugccgguuuauggagggac

SEQ ID NO: 884768 - RNA, 19 nt, Artificial Sequence
  Description of Artificial Sequence: Synthetic oligonucleotide
gcaggguugccauaguaac

SEQ ID NO: 884769 - RNA, 19 nt, Artificial Sequence
  Description of Artificial Sequence: Synthetic oligonucleotide
gaugugcuuuucgauucug

SEQ ID NO: 884770 - RNA, 19 nt, Artificial Sequence
  Description of Artificial Sequence: Synthetic oligonucleotide
gucucaaugcugguuugcc

SEQ ID NO: 884771 - RNA, 19 nt, Artificial Sequence
  Description of Artificial Sequence: Synthetic oligonucleotide
ucgauccgucucaaugcug

SEQ ID NO: 884772 - RNA, 19 nt, Artificial Sequence
  Description of Artificial Sequence: Synthetic oligonucleotide
gaacgugagggacugggcu

SEQ ID NO: 884773 - RNA, 19 nt, Artificial Sequence
  Description of Artificial Sequence: Synthetic oligonucleotide
ucacaccuaagcaggccuc

SEQ ID NO: 884774 - RNA, 19 nt, Artificial Sequence
  Description of Artificial Sequence: Synthetic oligonucleotide
gcagaagcgagugauguac

SEQ ID NO: 884775 - RNA, 19 nt, Artificial Sequence
  Description of Artificial Sequence: Synthetic oligonucleotide
cauagguuggugaaauagu

SEQ ID NO: 884776 - RNA, 19 nt, Artificial Sequence
  Description of Artificial Sequence: Synthetic oligonucleotide
cuucacaccuaagcaggcc

SEQ ID NO: 884777 - RNA, 19 nt, Artificial Sequence
  Description of Artificial Sequence: Synthetic oligonucleotide
uucgucuguuuacucuuua

SEQ ID NO: 884778 - RNA, 19 nt, Artificial Sequence
  Description of Artificial Sequence: Synthetic oligonucleotide
acaugaauuccccggcguu

SEQ ID NO: 884779 - RNA, 19 nt, Artificial Sequence
  Description of Artificial Sequence: Synthetic oligonucleotide
caccuaagcaggccucggg

SEQ ID NO: 884780 - RNA, 19 nt, Artificial Sequence
  Description of Artificial Sequence: Synthetic oligonucleotide
uugacauuuuaagcaguua

SEQ ID NO: 884781 - RNA, 19 nt, Artificial Sequence
  Description of Artificial Sequence: Synthetic oligonucleotide
cuguuuuauccucuaaacu

SEQ ID NO: 884782 - RNA, 19 nt, Artificial Sequence
  Description of Artificial Sequence: Synthetic oligonucleotide
ccguucauucaacugagac

SEQ ID NO: 884783 - RNA, 19 nt, Artificial Sequence
  Description of Artificial Sequence: Synthetic oligonucleotide
cgauccgucucaaugcugg

SEQ ID NO: 884784 - RNA, 19 nt, Artificial Sequence
  Description of Artificial Sequence: Synthetic oligonucleotide
cacaccuaagcaggccucg

SEQ ID NO: 884785 - RNA, 19 nt, Artificial Sequence
  Description of Artificial Sequence: Synthetic oligonucleotide
cauccguccagucuauuaa

SEQ ID NO: 884786 - RNA, 19 nt, Artificial Sequence
  Description of Artificial Sequence: Synthetic oligonucleotide
agaaacccugccaggcagg

SEQ ID NO: 884787 - RNA, 19 nt, Artificial Sequence
  Description of Artificial Sequence: Synthetic oligonucleotide
ucccgaggcacacgcuuug

SEQ ID NO: 884788 - RNA, 19 nt, Artificial Sequence
  Description of Artificial Sequence: Synthetic oligonucleotide
aucggcugaggcuggcuca

SEQ ID NO: 884789 - RNA, 19 nt, Artificial Sequence
  Description of Artificial Sequence: Synthetic oligonucleotide
cugugaucgcuuucaccac

SEQ ID NO: 884790 - RNA, 19 nt, Artificial Sequence
  Description of Artificial Sequence: Synthetic oligonucleotide
agcucagauugauccacau

SEQ ID NO: 884791 - RNA, 19 nt, Artificial Sequence
  Description of Artificial Sequence: Synthetic oligonucleotide
gcuggcucauucuugguga

SEQ ID NO: 884792 - RNA, 19 nt, Artificial Sequence
  Description of Artificial Sequence: Synthetic oligonucleotide
ucuuagcuucauucaugau

SEQ ID NO: 884793 - RNA, 19 nt, Artificial Sequence
  Description of Artificial Sequence: Synthetic oligonucleotide
caucuucgucuguuuacuc

SEQ ID NO: 884794 - RNA, 19 nt, Artificial Sequence
  Description of Artificial Sequence: Synthetic oligonucleotide
caggcuagcuugucccgag

SEQ ID NO: 884795 - RNA, 19 nt, Artificial Sequence
  Description of Artificial Sequence: Synthetic oligonucleotide
cagaggaagcccauuggaa

SEQ ID NO: 884796 - RNA, 19 nt, Artificial Sequence
  Description of Artificial Sequence: Synthetic oligonucleotide
cauaagccggcugggguug

SEQ ID NO: 884797 - RNA, 19 nt, Artificial Sequence
  Description of Artificial Sequence: Synthetic oligonucleotide
ugcagaagcgagugaugua

SEQ ID NO: 884798 - RNA, 19 nt, Artificial Sequence
  Description of Artificial Sequence: Synthetic oligonucleotide
caugaugugcuuuucgauu

SEQ ID NO: 884799 - RNA, 19 nt, Artificial Sequence
  Description of Artificial Sequence: Synthetic oligonucleotide
cuaggagaguaugggaaca

SEQ ID NO: 884800 - RNA, 19 nt, Artificial Sequence
  Description of Artificial Sequence: Synthetic oligonucleotide
aggcuagcuugucccgagg

SEQ ID NO: 884801 - RNA, 19 nt, Artificial Sequence
  Description of Artificial Sequence: Synthetic oligonucleotide
cugaggugucacccagugc

SEQ ID NO: 884802 - RNA, 19 nt, Artificial Sequence
  Description of Artificial Sequence: Synthetic oligonucleotide
guggguauuucucaacaau

SEQ ID NO: 884803 - RNA, 19 nt, Artificial Sequence
  Description of Artificial Sequence: Synthetic oligonucleotide
ggauuuccucauugacagg

SEQ ID NO: 884804 - RNA, 19 nt, Artificial Sequence
  Description of Artificial Sequence: Synthetic oligonucleotide
ucgcuuucaccaccauguc

SEQ ID NO: 884805 - RNA, 19 nt, Artificial Sequence
  Description of Artificial Sequence: Synthetic oligonucleotide
cacuuucucuggaggcuac

SEQ ID NO: 884806 - RNA, 19 nt, Artificial Sequence
  Description of Artificial Sequence: Synthetic oligonucleotide
caucggcugaggcuggcuc

SEQ ID NO: 884807 - RNA, 19 nt, Artificial Sequence
  Description of Artificial Sequence: Synthetic oligonucleotide
gaagucuggccggacaugu

SEQ ID NO: 884808 - RNA, 19 nt, Artificial Sequence
  Description of Artificial Sequence: Synthetic oligonucleotide
cugaacaguggaacacaga

SEQ ID NO: 884809 - RNA, 19 nt, Artificial Sequence
  Description of Artificial Sequence: Synthetic oligonucleotide
uuggaaaaucagggaggac

SEQ ID NO: 884810 - RNA, 19 nt, Artificial Sequence
  Description of Artificial Sequence: Synthetic oligonucleotide
gucauaagccggcuggggu

SEQ ID NO: 884811 - RNA, 19 nt, Artificial Sequence
  Description of Artificial Sequence: Synthetic oligonucleotide
auguaucggucaaaauccu

SEQ ID NO: 884812 - RNA, 19 nt, Artificial Sequence
  Description of Artificial Sequence: Synthetic oligonucleotide
uuccccggcguucggacuu

SEQ ID NO: 884813 - RNA, 19 nt, Artificial Sequence
  Description of Artificial Sequence: Synthetic oligonucleotide
cuaucuguuuuauccucua

SEQ ID NO: 884814 - RNA, 19 nt, Artificial Sequence
  Description of Artificial Sequence: Synthetic oligonucleotide
cuaccucaccaacucaaaa

SEQ ID NO: 884815 - RNA, 19 nt, Artificial Sequence
  Description of Artificial Sequence: Synthetic oligonucleotide
uucaaagacugagcaucua

SEQ ID NO: 884816 - RNA, 19 nt, Artificial Sequence
  Description of Artificial Sequence: Synthetic oligonucleotide
ugaucucaaguggguauuu

SEQ ID NO: 884817 - RNA, 19 nt, Artificial Sequence
  Description of Artificial Sequence: Synthetic oligonucleotide
ggcuacuuuuccacgaguc

SEQ ID NO: 884818 - RNA, 19 nt, Artificial Sequence
  Description of Artificial Sequence: Synthetic oligonucleotide
caacaacuguguccaccac

SEQ ID NO: 884819 - RNA, 19 nt, Artificial Sequence
  Description of Artificial Sequence: Synthetic oligonucleotide
cucgcuuccucugcuagga

SEQ ID NO: 884820 - RNA, 19 nt, Artificial Sequence
  Description of Artificial Sequence: Synthetic oligonucleotide
aggaagcccauuggaaaau

SEQ ID NO: 884821 - RNA, 19 nt, Artificial Sequence
  Description of Artificial Sequence: Synthetic oligonucleotide
uauggccaucauccugcau

SEQ ID NO: 884822 - RNA, 19 nt, Artificial Sequence
  Description of Artificial Sequence: Synthetic oligonucleotide
ccgcugaagucuuucugcc

SEQ ID NO: 884823 - RNA, 19 nt, Artificial Sequence
  Description of Artificial Sequence: Synthetic oligonucleotide
cuggccggacauguaucgg

SEQ ID NO: 884824 - RNA, 19 nt, Artificial Sequence
  Description of Artificial Sequence: Synthetic oligonucleotide
cacaaaccuaccucaccaa

SEQ ID NO: 884825 - RNA, 19 nt, Artificial Sequence
  Description of Artificial Sequence: Synthetic oligonucleotide
auguuggacugcaggcgag

SEQ ID NO: 884826 - RNA, 19 nt, Artificial Sequence
  Description of Artificial Sequence: Synthetic oligonucleotide
ugaucgcuuucaccaccau

SEQ ID NO: 884827 - RNA, 19 nt, Artificial Sequence
  Description of Artificial Sequence: Synthetic oligonucleotide
caccuggugaugcaggcua

SEQ ID NO: 884828 - RNA, 19 nt, Artificial Sequence
  Description of Artificial Sequence: Synthetic oligonucleotide
auuccccggcguucggacu

SEQ ID NO: 884829 - RNA, 19 nt, Artificial Sequence
  Description of Artificial Sequence: Synthetic oligonucleotide
uuccauccguccagucuau

SEQ ID NO: 884830 - RNA, 19 nt, Artificial Sequence
  Description of Artificial Sequence: Synthetic oligonucleotide
gacauguaucggucaaaau

SEQ ID NO: 884831 - RNA, 19 nt, Artificial Sequence
  Description of Artificial Sequence: Synthetic oligonucleotide
uuccacgagucugcauucu

SEQ ID NO: 884832 - RNA, 19 nt, Artificial Sequence
  Description of Artificial Sequence: Synthetic oligonucleotide
cacagagcaucugaggugu

SEQ ID NO: 884833 - RNA, 19 nt, Artificial Sequence
  Description of Artificial Sequence: Synthetic oligonucleotide
gaccaagucucagacuccu

SEQ ID NO: 884834 - RNA, 19 nt, Artificial Sequence
  Description of Artificial Sequence: Synthetic oligonucleotide
cuccugacuuaaauucaaa

SEQ ID NO: 884835 - RNA, 19 nt, Artificial Sequence
  Description of Artificial Sequence: Synthetic oligonucleotide
ccggcguucggacuucagg

SEQ ID NO: 884836 - RNA, 19 nt, Artificial Sequence
  Description of Artificial Sequence: Synthetic oligonucleotide
ugcuagcgaaggccucuuc

SEQ ID NO: 884837 - RNA, 19 nt, Artificial Sequence
  Description of Artificial Sequence: Synthetic oligonucleotide
cauccucgccagucauaag

SEQ ID NO: 884838 - RNA, 19 nt, Artificial Sequence
  Description of Artificial Sequence: Synthetic oligonucleotide
ccucuuuugaauggcaaga

SEQ ID NO: 884839 - RNA, 19 nt, Artificial Sequence
  Description of Artificial Sequence: Synthetic oligonucleotide
agucaucggcugaggcugg

SEQ ID NO: 884840 - RNA, 19 nt, Artificial Sequence
  Description of Artificial Sequence: Synthetic oligonucleotide
cagauugauccacaugaau

SEQ ID NO: 884841 - RNA, 19 nt, Artificial Sequence
  Description of Artificial Sequence: Synthetic oligonucleotide
ccguccagucuauuaaguc

SEQ ID NO: 884842 - RNA, 19 nt, Artificial Sequence
  Description of Artificial Sequence: Synthetic oligonucleotide
gcacagcauagguugguga

SEQ ID NO: 884843 - RNA, 19 nt, Artificial Sequence
  Description of Artificial Sequence: Synthetic oligonucleotide
auagacucuguagcaucua

SEQ ID NO: 884844 - RNA, 19 nt, Artificial Sequence
  Description of Artificial Sequence: Synthetic oligonucleotide
ccaaaccaacaacuguguc

SEQ ID NO: 884845 - RNA, 19 nt, Artificial Sequence
  Description of Artificial Sequence: Synthetic oligonucleotide
aggagaguaugggaacauu

SEQ ID NO: 884846 - RNA, 19 nt, Artificial Sequence
  Description of Artificial Sequence: Synthetic oligonucleotide
aggugucacccagugcaga

SEQ ID NO: 884847 - RNA, 19 nt, Artificial Sequence
  Description of Artificial Sequence: Synthetic oligonucleotide
caugauccuuuccugccgu

SEQ ID NO: 884848 - RNA, 19 nt, Artificial Sequence
  Description of Artificial Sequence: Synthetic oligonucleotide
gggaacauugaagccaugu

SEQ ID NO: 884849 - RNA, 19 nt, Artificial Sequence
  Description of Artificial Sequence: Synthetic oligonucleotide
gguugcagaagcgagugau

SEQ ID NO: 884850 - RNA, 19 nt, Artificial Sequence
  Description of Artificial Sequence: Synthetic oligonucleotide
gccagucauaagccggcug

SEQ ID NO: 884851 - RNA, 19 nt, Artificial Sequence
  Description of Artificial Sequence: Synthetic oligonucleotide
cucaaugcuuaaaucccuu

SEQ ID NO: 884852 - RNA, 19 nt, Artificial Sequence
  Description of Artificial Sequence: Synthetic oligonucleotide
cucgauccgucucaaugcu

SEQ ID NO: 884853 - RNA, 19 nt, Artificial Sequence
  Description of Artificial Sequence: Synthetic oligonucleotide
cagagucaauggcugcuaa

SEQ ID NO: 884854 - RNA, 19 nt, Artificial Sequence
  Description of Artificial Sequence: Synthetic oligonucleotide
uugccgguuuauggaggga

SEQ ID NO: 884855 - RNA, 19 nt, Artificial Sequence
  Description of Artificial Sequence: Synthetic oligonucleotide
uggcucauucuuggugauc

SEQ ID NO: 884856 - RNA, 19 nt, Artificial Sequence
  Description of Artificial Sequence: Synthetic oligonucleotide
ggcaggguugccauaguaa

SEQ ID NO: 884857 - RNA, 19 nt, Artificial Sequence
  Description of Artificial Sequence: Synthetic oligonucleotide
gacugcuagcgaaggccuc

SEQ ID NO: 884858 - RNA, 19 nt, Artificial Sequence
  Description of Artificial Sequence: Synthetic oligonucleotide
gucuggccggacauguauc

SEQ ID NO: 884859 - RNA, 19 nt, Artificial Sequence
  Description of Artificial Sequence: Synthetic oligonucleotide
gcccuucaggacgauguag

SEQ ID NO: 884860 - RNA, 19 nt, Artificial Sequence
  Description of Artificial Sequence: Synthetic oligonucleotide
gcguucggacuucaggcuc

SEQ ID NO: 884861 - RNA, 19 nt, Artificial Sequence
  Description of Artificial Sequence: Synthetic oligonucleotide
ggaagcccauuggaaaauc

SEQ ID NO: 884862 - RNA, 19 nt, Artificial Sequence
  Description of Artificial Sequence: Synthetic oligonucleotide
ccaaguaaauauggccauc

SEQ ID NO: 884863 - RNA, 19 nt, Artificial Sequence
  Description of Artificial Sequence: Synthetic oligonucleotide
gauccgucucaaugcuggu

SEQ ID NO: 884864 - RNA, 19 nt, Artificial Sequence
  Description of Artificial Sequence: Synthetic oligonucleotide
ggggaagucuggccggaca

SEQ ID NO: 884865 - RNA, 19 nt, Artificial Sequence
  Description of Artificial Sequence: Synthetic oligonucleotide
gcccugauccucuuuugaa

SEQ ID NO: 884866 - RNA, 19 nt, Artificial Sequence
  Description of Artificial Sequence: Synthetic oligonucleotide
agcgagugauguacuggau

SEQ ID NO: 884867 - RNA, 19 nt, Artificial Sequence
  Description of Artificial Sequence: Synthetic oligonucleotide
ccgguuuauggagggacug

SEQ ID NO: 884868 - RNA, 19 nt, Artificial Sequence
  Description of Artificial Sequence: Synthetic oligonucleotide
cgauucugauccauuaucu

SEQ ID NO: 884869 - RNA, 19 nt, Artificial Sequence
  Description of Artificial Sequence: Synthetic oligonucleotide
cuuuucgauucugauccau

SEQ ID NO: 884870 - RNA, 19 nt, Artificial Sequence
  Description of Artificial Sequence: Synthetic oligonucleotide
uggggaagucuggccggac

SEQ ID NO: 884871 - RNA, 19 nt, Artificial Sequence
  Description of Artificial Sequence: Synthetic oligonucleotide
aagucuggccggacaugua

SEQ ID NO: 884872 - RNA, 19 nt, Artificial Sequence
  Description of Artificial Sequence: Synthetic oligonucleotide
ccgaggcacacgcuuugag

SEQ ID NO: 884873 - RNA, 19 nt, Artificial Sequence
  Description of Artificial Sequence: Synthetic oligonucleotide
cacacgcuuugaguccauc

SEQ ID NO: 884874 - RNA, 19 nt, Artificial Sequence
  Description of Artificial Sequence: Synthetic oligonucleotide
cgauguagaugaggguggg

SEQ ID NO: 884875 - RNA, 19 nt, Artificial Sequence
  Description of Artificial Sequence: Synthetic oligonucleotide
gucaucggcugaggcuggc

SEQ ID NO: 884876 - RNA, 19 nt, Artificial Sequence
  Description of Artificial Sequence: Synthetic oligonucleotide
cugcucugacugcuagcga

SEQ ID NO: 884877 - RNA, 19 nt, Artificial Sequence
  Description of Artificial Sequence: Synthetic oligonucleotide
gccggacauguaucgguca

SEQ ID NO: 884878 - RNA, 19 nt, Artificial Sequence
  Description of Artificial Sequence: Synthetic oligonucleotide
gacgugucaugaugugcuu

SEQ ID NO: 884879 - RNA, 19 nt, Artificial Sequence
  Description of Artificial Sequence: Synthetic oligonucleotide
ggagaacgugagggacugg

SEQ ID NO: 884880 - RNA, 19 nt, Artificial Sequence
  Description of Artificial Sequence: Synthetic oligonucleotide
ccgucucaaugcugguuug

SEQ ID NO: 884881 - RNA, 19 nt, Artificial Sequence
  Description of Artificial Sequence: Synthetic oligonucleotide
ggcguucggacuucaggcu

SEQ ID NO: 884882 - RNA, 19 nt, Artificial Sequence
  Description of Artificial Sequence: Synthetic oligonucleotide
ccucaaugcuuaaaucccu

SEQ ID NO: 884883 - RNA, 19 nt, Artificial Sequence
  Description of Artificial Sequence: Synthetic oligonucleotide
cugagucauucugacugcu

SEQ ID NO: 884884 - RNA, 19 nt, Artificial Sequence
  Description of Artificial Sequence: Synthetic oligonucleotide
ggccggacauguaucgguc

SEQ ID NO: 884885 - RNA, 19 nt, Artificial Sequence
  Description of Artificial Sequence: Synthetic oligonucleotide
ccagaccugaacaguggaa

SEQ ID NO: 884886 - RNA, 19 nt, Artificial Sequence
  Description of Artificial Sequence: Synthetic oligonucleotide
ccauccguccagucuauua

SEQ ID NO: 884887 - RNA, 19 nt, Artificial Sequence
  Description of Artificial Sequence: Synthetic oligonucleotide
ccauccucgccagucauaa

SEQ ID NO: 884888 - RNA, 19 nt, Artificial Sequence
  Description of Artificial Sequence: Synthetic oligonucleotide
cccaaaccaacaacugugu

SEQ ID NO: 884889 - RNA, 19 nt, Artificial Sequence
  Description of Artificial Sequence: Synthetic oligonucleotide
cccaaguaaauauggccau

SEQ ID NO: 884890 - RNA, 19 nt, Artificial Sequence
  Description of Artificial Sequence: Synthetic oligonucleotide
uccauccguccagucuauu

SEQ ID NO: 884891 - RNA, 19 nt, Artificial Sequence
  Description of Artificial Sequence: Synthetic oligonucleotide
uucggacuucaggcucauc

SEQ ID NO: 884892 - RNA, 19 nt, Artificial Sequence
  Description of Artificial Sequence: Synthetic oligonucleotide
cgucuguuuacucuuuagu

SEQ ID NO: 884893 - RNA, 19 nt, Artificial Sequence
  Description of Artificial Sequence: Synthetic oligonucleotide
ggcuugaucucaagugggu

SEQ ID NO: 884894 - RNA, 19 nt, Artificial Sequence
  Description of Artificial Sequence: Synthetic oligonucleotide
gcgggccuuaugguacucc

SEQ ID NO: 884895 - RNA, 19 nt, Artificial Sequence
  Description of Artificial Sequence: Synthetic oligonucleotide
cuguggugaccuugcgggu

SEQ ID NO: 884896 - RNA, 19 nt, Artificial Sequence
  Description of Artificial Sequence: Synthetic oligonucleotide
gugaugcaggcuagcuugu

SEQ ID NO: 884897 - RNA, 19 nt, Artificial Sequence
  Description of Artificial Sequence: Synthetic oligonucleotide
cguucggacuucaggcuca

SEQ ID NO: 884898 - RNA, 19 nt, Artificial Sequence
  Description of Artificial Sequence: Synthetic oligonucleotide
ccggacauguaucggucaa

SEQ ID NO: 884899 - RNA, 19 nt, Artificial Sequence
  Description of Artificial Sequence: Synthetic oligonucleotide
ccggcugggguugcagaag

SEQ ID NO: 884900 - RNA, 19 nt, Artificial Sequence
  Description of Artificial Sequence: Synthetic oligonucleotide
uccccggcguucggacuuc

SEQ ID NO: 884901 - RNA, 19 nt, Artificial Sequence
  Description of Artificial Sequence: Synthetic oligonucleotide
ccucaaacuuggagaacgu

SEQ ID NO: 884902 - RNA, 19 nt, Artificial Sequence
  Description of Artificial Sequence: Synthetic oligonucleotide
cugcaguauuugccccaaa

SEQ ID NO: 884903 - RNA, 19 nt, Artificial Sequence
  Description of Artificial Sequence: Synthetic oligonucleotide
ggugaccuugcgggucuuc

SEQ ID NO: 884904 - RNA, 19 nt, Artificial Sequence
  Description of Artificial Sequence: Synthetic oligonucleotide
gccguucauucaacugaga

SEQ ID NO: 884905 - RNA, 19 nt, Artificial Sequence
  Description of Artificial Sequence: Synthetic oligonucleotide
cccggcguucggacuucag

SEQ ID NO: 884906 - RNA, 19 nt, Artificial Sequence
  Description of Artificial Sequence: Synthetic oligonucleotide
gccgguuuauggagggacu

SEQ ID NO: 884907 - RNA, 19 nt, Artificial Sequence
  Description of Artificial Sequence: Synthetic oligonucleotide
gucccgaggcacacgcuuu

SEQ ID NO: 884908 - RNA, 19 nt, Artificial Sequence
  Description of Artificial Sequence: Synthetic oligonucleotide
caaugcugguuugccgguu

SEQ ID NO: 884909 - RNA, 19 nt, Artificial Sequence
  Description of Artificial Sequence: Synthetic oligonucleotide
cuccucccgcugaagucuu

SEQ ID NO: 884910 - RNA, 19 nt, Artificial Sequence
  Description of Artificial Sequence: Synthetic oligonucleotide
ggggagggagcuugucauu

SEQ ID NO: 884911 - RNA, 19 nt, Artificial Sequence
  Description of Artificial Sequence: Synthetic oligonucleotide
gccauccucgccagucaua

SEQ ID NO: 884912 - RNA, 19 nt, Artificial Sequence
  Description of Artificial Sequence: Synthetic oligonucleotide
cagagcccugauccucuuu

SEQ ID NO: 884913 - RNA, 19 nt, Artificial Sequence
  Description of Artificial Sequence: Synthetic oligonucleotide
cgggccuuaugguacuccu

SEQ ID NO: 884914 - RNA, 19 nt, Artificial Sequence
  Description of Artificial Sequence: Synthetic oligonucleotide
cggacauguaucggucaaa

SEQ ID NO: 884915 - RNA, 19 nt, Artificial Sequence
  Description of Artificial Sequence: Synthetic oligonucleotide
gcgggucuucucauugguu

SEQ ID NO: 884916 - RNA, 19 nt, Artificial Sequence
  Description of Artificial Sequence: Synthetic oligonucleotide
ccccggcguucggacuuca

SEQ ID NO: 884917 - RNA, 19 nt, Artificial Sequence
  Description of Artificial Sequence: Synthetic oligonucleotide
cgccagucauaagccggcu

SEQ ID NO: 884918 - RNA, 19 nt, Artificial Sequence
  Description of Artificial Sequence: Synthetic oligonucleotide
aaacccaugggguacaagc

SEQ ID NO: 884919 - RNA, 19 nt, Artificial Sequence
  Description of Artificial Sequence: Synthetic oligonucleotide
uuugaguuguccuugaagg

SEQ ID NO: 884920 - RNA, 19 nt, Artificial Sequence
  Description of Artificial Sequence: Synthetic oligonucleotide
aaagaauuggcaugagacc

SEQ ID NO: 884921 - RNA, 19 nt, Artificial Sequence
  Description of Artificial Sequence: Synthetic oligonucleotide
aagaauuggcaugagaccc

SEQ ID NO: 884922 - RNA, 19 nt, Artificial Sequence
  Description of Artificial Sequence: Synthetic oligonucleotide
uggaacuuaauuuaaauga

SEQ ID NO: 884923 - RNA, 19 nt, Artificial Sequence
  Description of Artificial Sequence: Synthetic oligonucleotide
uuaaauuagaugcacagaa

SEQ ID NO: 884924 - RNA, 19 nt, Artificial Sequence
  Description of Artificial Sequence: Synthetic oligonucleotide
aaauuagaugcacagaacu

SEQ ID NO: 884925 - RNA, 19 nt, Artificial Sequence
  Description of Artificial Sequence: Synthetic oligonucleotide
uguuaaauuagaugcacag

SEQ ID NO: 884926 - RNA, 19 nt, Artificial Sequence
  Description of Artificial Sequence: Synthetic oligonucleotide
cuaaaacucaguaaacucc

SEQ ID NO: 884927 - RNA, 19 nt, Artificial Sequence
  Description of Artificial Sequence: Synthetic oligonucleotide
aacucuagggcccucuggc

SEQ ID NO: 884928 - RNA, 19 nt, Artificial Sequence
  Description of Artificial Sequence: Synthetic oligonucleotide
agcacaaucagacuugggg

SEQ ID NO: 884929 - RNA, 19 nt, Artificial Sequence
  Description of Artificial Sequence: Synthetic oligonucleotide
ucuauugagagaaaagcac

SEQ ID NO: 884930 - RNA, 19 nt, Artificial Sequence
  Description of Artificial Sequence: Synthetic oligonucleotide
gaaguugacagccugcagg

SEQ ID NO: 884931 - RNA, 19 nt, Artificial Sequence
  Description of Artificial Sequence: Synthetic oligonucleotide
aaaaccgaagucugucacc

SEQ ID NO: 884932 - RNA, 19 nt, Artificial Sequence
  Description of Artificial Sequence: Synthetic oligonucleotide
uucuauugagagaaaagca

SEQ ID NO: 884933 - RNA, 19 nt, Artificial Sequence
  Description of Artificial Sequence: Synthetic oligonucleotide
cuuggauacaccauaaguc

SEQ ID NO: 884934 - RNA, 19 nt, Artificial Sequence
  Description of Artificial Sequence: Synthetic oligonucleotide
augggguacaagcacaccc

SEQ ID NO: 884935 - RNA, 19 nt, Artificial Sequence
  Description of Artificial Sequence: Synthetic oligonucleotide
accuuucucugauagaugg

SEQ ID NO: 884936 - RNA, 19 nt, Artificial Sequence
  Description of Artificial Sequence: Synthetic oligonucleotide
uucucguagaucuggauag

SEQ ID NO: 884937 - RNA, 19 nt, Artificial Sequence
  Description of Artificial Sequence: Synthetic oligonucleotide
uaaaacucaguaaacuccu

SEQ ID NO: 884938 - RNA, 19 nt, Artificial Sequence
  Description of Artificial Sequence: Synthetic oligonucleotide
uccaugaccauguacaagu

SEQ ID NO: 884939 - RNA, 19 nt, Artificial Sequence
  Description of Artificial Sequence: Synthetic oligonucleotide
gagagaaaagcacaaucag

SEQ ID NO: 884940 - RNA, 19 nt, Artificial Sequence
  Description of Artificial Sequence: Synthetic oligonucleotide
aauuagaugcacagaacuc

SEQ ID NO: 884941 - RNA, 19 nt, Artificial Sequence
  Description of Artificial Sequence: Synthetic oligonucleotide
aaacucaguaaacuccuug

SEQ ID NO: 884942 - RNA, 19 nt, Artificial Sequence
  Description of Artificial Sequence: Synthetic oligonucleotide
auaaaugggguaauuuccc

SEQ ID NO: 884943 - RNA, 19 nt, Artificial Sequence
  Description of Artificial Sequence: Synthetic oligonucleotide
uaugaagggagcuuccacc

SEQ ID NO: 884944 - RNA, 19 nt, Artificial Sequence
  Description of Artificial Sequence: Synthetic oligonucleotide
auagucgucaaaguuacuc

SEQ ID NO: 884945 - RNA, 19 nt, Artificial Sequence
  Description of Artificial Sequence: Synthetic oligonucleotide
uagucgucaaaguuacucg

SEQ ID NO: 884946 - RNA, 19 nt, Artificial Sequence
  Description of Artificial Sequence: Synthetic oligonucleotide
ucaguaaacuccuugccac

SEQ ID NO: 884947 - RNA, 19 nt, Artificial Sequence
  Description of Artificial Sequence: Synthetic oligonucleotide
aucugcgccgcguagaaac

SEQ ID NO: 884948 - RNA, 19 nt, Artificial Sequence
  Description of Artificial Sequence: Synthetic oligonucleotide
cuuggugagauccaccugc

SEQ ID NO: 884949 - RNA, 19 nt, Artificial Sequence
  Description of Artificial Sequence: Synthetic oligonucleotide
aggaacgggaaguugacag

SEQ ID NO: 884950 - RNA, 19 nt, Artificial Sequence
  Description of Artificial Sequence: Synthetic oligonucleotide
aguuacgagagggauaaac

SEQ ID NO: 884951 - RNA, 19 nt, Artificial Sequence
  Description of Artificial Sequence: Synthetic oligonucleotide
gaugaggacuccgagagcc

SEQ ID NO: 884952 - RNA, 19 nt, Artificial Sequence
  Description of Artificial Sequence: Synthetic oligonucleotide
gagucaguuggcuaucccg

SEQ ID NO: 884953 - RNA, 19 nt, Artificial Sequence
  Description of Artificial Sequence: Synthetic oligonucleotide
aacuuugguaugaagggag

SEQ ID NO: 884954 - RNA, 19 nt, Artificial Sequence
  Description of Artificial Sequence: Synthetic oligonucleotide
uaaauuagaugcacagaac

SEQ ID NO: 884955 - RNA, 19 nt, Artificial Sequence
  Description of Artificial Sequence: Synthetic oligonucleotide
auugauggagacccggauc

SEQ ID NO: 884956 - RNA, 19 nt, Artificial Sequence
  Description of Artificial Sequence: Synthetic oligonucleotide
uuacgagagggauaaacac

SEQ ID NO: 884957 - RNA, 19 nt, Artificial Sequence
  Description of Artificial Sequence: Synthetic oligonucleotide
gaauucaaguuugaccagg

SEQ ID NO: 884958 - RNA, 19 nt, Artificial Sequence
  Description of Artificial Sequence: Synthetic oligonucleotide
uuauugguaauaguuuuca

SEQ ID NO: 884959 - RNA, 19 nt, Artificial Sequence
  Description of Artificial Sequence: Synthetic oligonucleotide
ucgaugagaagguucucgg

SEQ ID NO: 884960 - RNA, 19 nt, Artificial Sequence
  Description of Artificial Sequence: Synthetic oligonucleotide
aagugggagaacaucuccc

SEQ ID NO: 884961 - RNA, 19 nt, Artificial Sequence
  Description of Artificial Sequence: Synthetic oligonucleotide
gaagucucauccuucgcag

SEQ ID NO: 884962 - RNA, 19 nt, Artificial Sequence
  Description of Artificial Sequence: Synthetic oligonucleotide
uauugagagaaaagcacaa

SEQ ID NO: 884963 - RNA, 19 nt, Artificial Sequence
  Description of Artificial Sequence: Synthetic oligonucleotide
ugucucguggucucggugg

SEQ ID NO: 884964 - RNA, 19 nt, Artificial Sequence
  Description of Artificial Sequence: Synthetic oligonucleotide
uacgagagggauaaacaca

SEQ ID NO: 884965 - RNA, 19 nt, Artificial Sequence
  Description of Artificial Sequence: Synthetic oligonucleotide
cuucgcagcacacagguug

SEQ ID NO: 884966 - RNA, 19 nt, Artificial Sequence
  Description of Artificial Sequence: Synthetic oligonucleotide
ucugauagauggcaaucca

SEQ ID NO: 884967 - RNA, 19 nt, Artificial Sequence
  Description of Artificial Sequence: Synthetic oligonucleotide
auuagaugcacagaacucu

SEQ ID NO: 884968 - RNA, 19 nt, Artificial Sequence
  Description of Artificial Sequence: Synthetic oligonucleotide
ucccuuuccaaguaggacu

SEQ ID NO: 884969 - RNA, 19 nt, Artificial Sequence
  Description of Artificial Sequence: Synthetic oligonucleotide
aaagcacaaucagacuugg

SEQ ID NO: 884970 - RNA, 19 nt, Artificial Sequence
  Description of Artificial Sequence: Synthetic oligonucleotide
uacaaguuugaguuguccu

SEQ ID NO: 884971 - RNA, 19 nt, Artificial Sequence
  Description of Artificial Sequence: Synthetic oligonucleotide
guagaaacgggcauggggc

SEQ ID NO: 884972 - RNA, 19 nt, Artificial Sequence
  Description of Artificial Sequence: Synthetic oligonucleotide
augucauugaccccguucu

SEQ ID NO: 884973 - RNA, 19 nt, Artificial Sequence
  Description of Artificial Sequence: Synthetic oligonucleotide
guuugaguuguccuugaag

SEQ ID NO: 884974 - RNA, 19 nt, Artificial Sequence
  Description of Artificial Sequence: Synthetic oligonucleotide
accccuaaaacucaguaaa

SEQ ID NO: 884975 - RNA, 19 nt, Artificial Sequence
  Description of Artificial Sequence: Synthetic oligonucleotide
ucagucguggcaaaccacu

SEQ ID NO: 884976 - RNA, 19 nt, Artificial Sequence
  Description of Artificial Sequence: Synthetic oligonucleotide
uuucucguagaucuggaua

SEQ ID NO: 884977 - RNA, 19 nt, Artificial Sequence
  Description of Artificial Sequence: Synthetic oligonucleotide
aaggucaggacgaucugcg

SEQ ID NO: 884978 - RNA, 19 nt, Artificial Sequence
  Description of Artificial Sequence: Synthetic oligonucleotide
uggcaaaccacuuaugguu

SEQ ID NO: 884979 - RNA, 19 nt, Artificial Sequence
  Description of Artificial Sequence: Synthetic oligonucleotide
cacacgcuuggcaaaaccg

SEQ ID NO: 884980 - RNA, 19 nt, Artificial Sequence
  Description of Artificial Sequence: Synthetic oligonucleotide
augaccauguacaaguuug

SEQ ID NO: 884981 - RNA, 19 nt, Artificial Sequence
  Description of Artificial Sequence: Synthetic oligonucleotide
augggaaccgcaccuuccc

SEQ ID NO: 884982 - RNA, 19 nt, Artificial Sequence
  Description of Artificial Sequence: Synthetic oligonucleotide
uggauacaccauaagucug

SEQ ID NO: 884983 - RNA, 19 nt, Artificial Sequence
  Description of Artificial Sequence: Synthetic oligonucleotide
aaucucccuuuccaaguag

SEQ ID NO: 884984 - RNA, 19 nt, Artificial Sequence
  Description of Artificial Sequence: Synthetic oligonucleotide
uucucauuuagagugugcu

SEQ ID NO: 884985 - RNA, 19 nt, Artificial Sequence
  Description of Artificial Sequence: Synthetic oligonucleotide
gaaguuacgagagggauaa

SEQ ID NO: 884986 - RNA, 19 nt, Artificial Sequence
  Description of Artificial Sequence: Synthetic oligonucleotide
ucgcugaaccuuccgaucc

SEQ ID NO: 884987 - RNA, 19 nt, Artificial Sequence
  Description of Artificial Sequence: Synthetic oligonucleotide
accauguacaaguuugagu

SEQ ID NO: 884988 - RNA, 19 nt, Artificial Sequence
  Description of Artificial Sequence: Synthetic oligonucleotide
cugauagauggcaauccag

SEQ ID NO: 884989 - RNA, 19 nt, Artificial Sequence
  Description of Artificial Sequence: Synthetic oligonucleotide
guuugggagaaguuacgag

SEQ ID NO: 884990 - RNA, 19 nt, Artificial Sequence
  Description of Artificial Sequence: Synthetic oligonucleotide
gucaggacgaucugcgccg

SEQ ID NO: 884991 - RNA, 19 nt, Artificial Sequence
  Description of Artificial Sequence: Synthetic oligonucleotide
cucagggcgagguucaaag

SEQ ID NO: 884992 - RNA, 19 nt, Artificial Sequence
  Description of Artificial Sequence: Synthetic oligonucleotide
uguucgauccaacccuccc

SEQ ID NO: 884993 - RNA, 19 nt, Artificial Sequence
  Description of Artificial Sequence: Synthetic oligonucleotide
ugggguacaagcacacccc

SEQ ID NO: 884994 - RNA, 19 nt, Artificial Sequence
  Description of Artificial Sequence: Synthetic oligonucleotide
acgagagggauaaacacag

SEQ ID NO: 884995 - RNA, 19 nt, Artificial Sequence
  Description of Artificial Sequence: Synthetic oligonucleotide
auccuuaguguccagugcu

SEQ ID NO: 884996 - RNA, 19 nt, Artificial Sequence
  Description of Artificial Sequence: Synthetic oligonucleotide
agaauucaaguuugaccag

SEQ ID NO: 884997 - RNA, 19 nt, Artificial Sequence
  Description of Artificial Sequence: Synthetic oligonucleotide
aaaguuacucgugucccca

SEQ ID NO: 884998 - RNA, 19 nt, Artificial Sequence
  Description of Artificial Sequence: Synthetic oligonucleotide
uuugaccaggaacgggaag

SEQ ID NO: 884999 - RNA, 19 nt, Artificial Sequence
  Description of Artificial Sequence: Synthetic oligonucleotide
ggauaaaugggguaauuuc

SEQ ID NO: 885000 - RNA, 19 nt, Artificial Sequence
  Description of Artificial Sequence: Synthetic oligonucleotide
gaacgggaaguugacagcc

SEQ ID NO: 885001 - RNA, 19 nt, Artificial Sequence
  Description of Artificial Sequence: Synthetic oligonucleotide
aucuggauaggcuggucag

SEQ ID NO: 885002 - RNA, 19 nt, Artificial Sequence
  Description of Artificial Sequence: Synthetic oligonucleotide
uggcuguucgauccaaccc

SEQ ID NO: 885003 - RNA, 19 nt, Artificial Sequence
  Description of Artificial Sequence: Synthetic oligonucleotide
aaccacuuaugguucuuga

SEQ ID NO: 885004 - RNA, 19 nt, Artificial Sequence
  Description of Artificial Sequence: Synthetic oligonucleotide
agaauuggcaugagacccc

SEQ ID NO: 885005 - RNA, 19 nt, Artificial Sequence
  Description of Artificial Sequence: Synthetic oligonucleotide
caagugggagaacaucucc

SEQ ID NO: 885006 - RNA, 19 nt, Artificial Sequence
  Description of Artificial Sequence: Synthetic oligonucleotide
ugcgccaaagaauuggcau

SEQ ID NO: 885007 - RNA, 19 nt, Artificial Sequence
  Description of Artificial Sequence: Synthetic oligonucleotide
guuacucguguccccaggg

SEQ ID NO: 885008 - RNA, 19 nt, Artificial Sequence
  Description of Artificial Sequence: Synthetic oligonucleotide
ucccaaagcgcuuggugag

SEQ ID NO: 885009 - RNA, 19 nt, Artificial Sequence
  Description of Artificial Sequence: Synthetic oligonucleotide
cucucuuuccuuacccugc

SEQ ID NO: 885010 - RNA, 19 nt, Artificial Sequence
  Description of Artificial Sequence: Synthetic oligonucleotide
uuacccugcccuuggauac

SEQ ID NO: 885011 - RNA, 19 nt, Artificial Sequence
  Description of Artificial Sequence: Synthetic oligonucleotide
ucguagaucuggauaggcu

SEQ ID NO: 885012 - RNA, 19 nt, Artificial Sequence
  Description of Artificial Sequence: Synthetic oligonucleotide
cauccuucgcagcacacag

SEQ ID NO: 885013 - RNA, 19 nt, Artificial Sequence
  Description of Artificial Sequence: Synthetic oligonucleotide
uaaccagcagccaucucgu

SEQ ID NO: 885014 - RNA, 19 nt, Artificial Sequence
  Description of Artificial Sequence: Synthetic oligonucleotide
ugggguaauuuccccagca

SEQ ID NO: 885015 - RNA, 19 nt, Artificial Sequence
  Description of Artificial Sequence: Synthetic oligonucleotide
uuagaugcacagaacucua

SEQ ID NO: 885016 - RNA, 19 nt, Artificial Sequence
  Description of Artificial Sequence: Synthetic oligonucleotide
cagcacacuguucaagagg

SEQ ID NO: 885017 - RNA, 19 nt, Artificial Sequence
  Description of Artificial Sequence: Synthetic oligonucleotide
agcugagaaauucauugaa

SEQ ID NO: 885018 - RNA, 19 nt, Artificial Sequence
  Description of Artificial Sequence: Synthetic oligonucleotide
ugcucucccuaacuugggg

SEQ ID NO: 885019 - RNA, 19 nt, Artificial Sequence
  Description of Artificial Sequence: Synthetic oligonucleotide
caaaaccgaagucugucac

SEQ ID NO: 885020 - RNA, 19 nt, Artificial Sequence
  Description of Artificial Sequence: Synthetic oligonucleotide
gaauuugggccucucuuuc

SEQ ID NO: 885021 - RNA, 19 nt, Artificial Sequence
  Description of Artificial Sequence: Synthetic oligonucleotide
agucgucaaaguuacucgu

SEQ ID NO: 885022 - RNA, 19 nt, Artificial Sequence
  Description of Artificial Sequence: Synthetic oligonucleotide
aacaucuccccaccaggca

SEQ ID NO: 885023 - RNA, 19 nt, Artificial Sequence
  Description of Artificial Sequence: Synthetic oligonucleotide
gcgcuucucauuuagagug

SEQ ID NO: 885024 - RNA, 19 nt, Artificial Sequence
  Description of Artificial Sequence: Synthetic oligonucleotide
uccgauccgccgcaagugg

SEQ ID NO: 885025 - RNA, 19 nt, Artificial Sequence
  Description of Artificial Sequence: Synthetic oligonucleotide
aaguccggccuuucacacg

SEQ ID NO: 885026 - RNA, 19 nt, Artificial Sequence
  Description of Artificial Sequence: Synthetic oligonucleotide
uguuugggagaaguuacga

SEQ ID NO: 885027 - RNA, 19 nt, Artificial Sequence
  Description of Artificial Sequence: Synthetic oligonucleotide
uuccuuacccugcccuugg

SEQ ID NO: 885028 - RNA, 19 nt, Artificial Sequence
  Description of Artificial Sequence: Synthetic oligonucleotide
gaucuggauaggcugguca

SEQ ID NO: 885029 - RNA, 19 nt, Artificial Sequence
  Description of Artificial Sequence: Synthetic oligonucleotide
agaagggugucucgugguc

SEQ ID NO: 885030 - RNA, 19 nt, Artificial Sequence
  Description of Artificial Sequence: Synthetic oligonucleotide
uccaaguccggccuuucac

SEQ ID NO: 885031 - RNA, 19 nt, Artificial Sequence
  Description of Artificial Sequence: Synthetic oligonucleotide
cacacuguucaagaggaag

SEQ ID NO: 885032 - RNA, 19 nt, Artificial Sequence
  Description of Artificial Sequence: Synthetic oligonucleotide
aaaucucccuuuccaagua

SEQ ID NO: 885033 - RNA, 19 nt, Artificial Sequence
  Description of Artificial Sequence: Synthetic oligonucleotide
uccuugaaggagaauucaa

SEQ ID NO: 885034 - RNA, 19 nt, Artificial Sequence
  Description of Artificial Sequence: Synthetic oligonucleotide
aguuacucguguccccagg

SEQ ID NO: 885035 - RNA, 19 nt, Artificial Sequence
  Description of Artificial Sequence: Synthetic oligonucleotide
cuguuugggagaaguuacg

SEQ ID NO: 885036 - RNA, 19 nt, Artificial Sequence
  Description of Artificial Sequence: Synthetic oligonucleotide
aguuugaccaggaacggga

SEQ ID NO: 885037 - RNA, 19 nt, Artificial Sequence
  Description of Artificial Sequence: Synthetic oligonucleotide
ggugauggacagcugacag

SEQ ID NO: 885038 - RNA, 19 nt, Artificial Sequence
  Description of Artificial Sequence: Synthetic oligonucleotide
uucaagaggaagucucauc

SEQ ID NO: 885039 - RNA, 19 nt, Artificial Sequence
  Description of Artificial Sequence: Synthetic oligonucleotide
aaguacucaggggucccac

SEQ ID NO: 885040 - RNA, 19 nt, Artificial Sequence
  Description of Artificial Sequence: Synthetic oligonucleotide
gggagaaguuacgagaggg

SEQ ID NO: 885041 - RNA, 19 nt, Artificial Sequence
  Description of Artificial Sequence: Synthetic oligonucleotide
cucugauagauggcaaucc

SEQ ID NO: 885042 - RNA, 19 nt, Artificial Sequence
  Description of Artificial Sequence: Synthetic oligonucleotide
gaaacgggcauggggcucg

SEQ ID NO: 885043 - RNA, 19 nt, Artificial Sequence
  Description of Artificial Sequence: Synthetic oligonucleotide
uccuugacagagucaguug

SEQ ID NO: 885044 - RNA, 19 nt, Artificial Sequence
  Description of Artificial Sequence: Synthetic oligonucleotide
gguccuucaagucagagcu

SEQ ID NO: 885045 - RNA, 19 nt, Artificial Sequence
  Description of Artificial Sequence: Synthetic oligonucleotide
cuggcuguucgauccaacc

SEQ ID NO: 885046 - RNA, 19 nt, Artificial Sequence
  Description of Artificial Sequence: Synthetic oligonucleotide
gagggauaaacacagggau

SEQ ID NO: 885047 - RNA, 19 nt, Artificial Sequence
  Description of Artificial Sequence: Synthetic oligonucleotide
cuggauaggcuggucagcg

SEQ ID NO: 885048 - RNA, 19 nt, Artificial Sequence
  Description of Artificial Sequence: Synthetic oligonucleotide
agucagucguggcaaacca

SEQ ID NO: 885049 - RNA, 19 nt, Artificial Sequence
  Description of Artificial Sequence: Synthetic oligonucleotide
uuacucguguccccagggc

SEQ ID NO: 885050 - RNA, 19 nt, Artificial Sequence
  Description of Artificial Sequence: Synthetic oligonucleotide
agcacacuguucaagagga

SEQ ID NO: 885051 - RNA, 19 nt, Artificial Sequence
  Description of Artificial Sequence: Synthetic oligonucleotide
ucugcgccgcguagaaacg

SEQ ID NO: 885052 - RNA, 19 nt, Artificial Sequence
  Description of Artificial Sequence: Synthetic oligonucleotide
uugguaugaagggagcuuc

SEQ ID NO: 885053 - RNA, 19 nt, Artificial Sequence
  Description of Artificial Sequence: Synthetic oligonucleotide
cuaucccggccucagagug

SEQ ID NO: 885054 - RNA, 19 nt, Artificial Sequence
  Description of Artificial Sequence: Synthetic oligonucleotide
cuugaaggagaauucaagu

SEQ ID NO: 885055 - RNA, 19 nt, Artificial Sequence
  Description of Artificial Sequence: Synthetic oligonucleotide
ccugucacuaaaaucuccc

SEQ ID NO: 885056 - RNA, 19 nt, Artificial Sequence
  Description of Artificial Sequence: Synthetic oligonucleotide
uccugcucucccuaacuug

SEQ ID NO: 885057 - RNA, 19 nt, Artificial Sequence
  Description of Artificial Sequence: Synthetic oligonucleotide
uucucugauagauggcaau

SEQ ID NO: 885058 - RNA, 19 nt, Artificial Sequence
  Description of Artificial Sequence: Synthetic oligonucleotide
ccuugacagagucaguugg

SEQ ID NO: 885059 - RNA, 19 nt, Artificial Sequence
  Description of Artificial Sequence: Synthetic oligonucleotide
guagaugaggacuccgaga

SEQ ID NO: 885060 - RNA, 19 nt, Artificial Sequence
  Description of Artificial Sequence: Synthetic oligonucleotide
ugcgccgcguagaaacggg

SEQ ID NO: 885061 - RNA, 19 nt, Artificial Sequence
  Description of Artificial Sequence: Synthetic oligonucleotide
caaguuugaccaggaacgg

SEQ ID NO: 885062 - RNA, 19 nt, Artificial Sequence
  Description of Artificial Sequence: Synthetic oligonucleotide
agcaagcagcccucuguac

SEQ ID NO: 885063 - RNA, 19 nt, Artificial Sequence
  Description of Artificial Sequence: Synthetic oligonucleotide
ucucugauagauggcaauc

SEQ ID NO: 885064 - RNA, 19 nt, Artificial Sequence
  Description of Artificial Sequence: Synthetic oligonucleotide
uucgcagcacacagguuga

SEQ ID NO: 885065 - RNA, 19 nt, Artificial Sequence
  Description of Artificial Sequence: Synthetic oligonucleotide
gucaccugaauauagcccu

SEQ ID NO: 885066 - RNA, 19 nt, Artificial Sequence
  Description of Artificial Sequence: Synthetic oligonucleotide
guaugaagggagcuuccac

SEQ ID NO: 885067 - RNA, 19 nt, Artificial Sequence
  Description of Artificial Sequence: Synthetic oligonucleotide
uccccagggccuuuaaacu

SEQ ID NO: 885068 - RNA, 19 nt, Artificial Sequence
  Description of Artificial Sequence: Synthetic oligonucleotide
agggagugcagauacucaa

SEQ ID NO: 885069 - RNA, 19 nt, Artificial Sequence
  Description of Artificial Sequence: Synthetic oligonucleotide
acuccgagagcccaccagu

SEQ ID NO: 885070 - RNA, 19 nt, Artificial Sequence
  Description of Artificial Sequence: Synthetic oligonucleotide
cccagagacgauuuucucg

SEQ ID NO: 885071 - RNA, 19 nt, Artificial Sequence
  Description of Artificial Sequence: Synthetic oligonucleotide
guacaaguuugaguugucc

SEQ ID NO: 885072 - RNA, 19 nt, Artificial Sequence
  Description of Artificial Sequence: Synthetic oligonucleotide
ucucguagaucuggauagg

SEQ ID NO: 885073 - RNA, 19 nt, Artificial Sequence
  Description of Artificial Sequence: Synthetic oligonucleotide
uuuucucguagaucuggau

SEQ ID NO: 885074 - RNA, 19 nt, Artificial Sequence
  Description of Artificial Sequence: Synthetic oligonucleotide
aguguccagugcuggagug

SEQ ID NO: 885075 - RNA, 19 nt, Artificial Sequence
  Description of Artificial Sequence: Synthetic oligonucleotide
uccuguuugggagaaguua

SEQ ID NO: 885076 - RNA, 19 nt, Artificial Sequence
  Description of Artificial Sequence: Synthetic oligonucleotide
uagaaacgggcauggggcu

SEQ ID NO: 885077 - RNA, 19 nt, Artificial Sequence
  Description of Artificial Sequence: Synthetic oligonucleotide
acacuguucaagaggaagu

SEQ ID NO: 885078 - RNA, 19 nt, Artificial Sequence
  Description of Artificial Sequence: Synthetic oligonucleotide
ccacacaagguccaagucc

SEQ ID NO: 885079 - RNA, 19 nt, Artificial Sequence
  Description of Artificial Sequence: Synthetic oligonucleotide
acgggaaguugacagccug

SEQ ID NO: 885080 - RNA, 19 nt, Artificial Sequence
  Description of Artificial Sequence: Synthetic oligonucleotide
acaccccuaaaacucagua

SEQ ID NO: 885081 - RNA, 19 nt, Artificial Sequence
  Description of Artificial Sequence: Synthetic oligonucleotide
augagaccccuggaaaagg

SEQ ID NO: 885082 - RNA, 19 nt, Artificial Sequence
  Description of Artificial Sequence: Synthetic oligonucleotide
caaguccggccuuucacac

SEQ ID NO: 885083 - RNA, 19 nt, Artificial Sequence
  Description of Artificial Sequence: Synthetic oligonucleotide
ccugcucucccuaacuugg

SEQ ID NO: 885084 - RNA, 19 nt, Artificial Sequence
  Description of Artificial Sequence: Synthetic oligonucleotide
agacgauuuucucguagau

SEQ ID NO: 885085 - RNA, 19 nt, Artificial Sequence
  Description of Artificial Sequence: Synthetic oligonucleotide
uaagucugggugugacuga

SEQ ID NO: 885086 - RNA, 19 nt, Artificial Sequence
  Description of Artificial Sequence: Synthetic oligonucleotide
ggaagucucauccuucgca

SEQ ID NO: 885087 - RNA, 19 nt, Artificial Sequence
  Description of Artificial Sequence: Synthetic oligonucleotide
cucguagaucuggauaggc

SEQ ID NO: 885088 - RNA, 19 nt, Artificial Sequence
  Description of Artificial Sequence: Synthetic oligonucleotide
ucuggauaggcuggucagc

SEQ ID NO: 885089 - RNA, 19 nt, Artificial Sequence
  Description of Artificial Sequence: Synthetic oligonucleotide
ggucaggacgaucugcgcc

SEQ ID NO: 885090 - RNA, 19 nt, Artificial Sequence
  Description of Artificial Sequence: Synthetic oligonucleotide
gauaggcuggucagcgaag

SEQ ID NO: 885091 - RNA, 19 nt, Artificial Sequence
  Description of Artificial Sequence: Synthetic oligonucleotide
gcaagcagcccucuguacc

SEQ ID NO: 885092 - RNA, 19 nt, Artificial Sequence
  Description of Artificial Sequence: Synthetic oligonucleotide
accacuuaugguucuugau

SEQ ID NO: 885093 - RNA, 19 nt, Artificial Sequence
  Description of Artificial Sequence: Synthetic oligonucleotide
agcuagaagugaggugccc

SEQ ID NO: 885094 - RNA, 19 nt, Artificial Sequence
  Description of Artificial Sequence: Synthetic oligonucleotide
uuccccaauaucuggcuuu

SEQ ID NO: 885095 - RNA, 19 nt, Artificial Sequence
  Description of Artificial Sequence: Synthetic oligonucleotide
caagaucuucauggcauag

SEQ ID NO: 885096 - RNA, 19 nt, Artificial Sequence
  Description of Artificial Sequence: Synthetic oligonucleotide
ucauccuucgcagcacaca

SEQ ID NO: 885097 - RNA, 19 nt, Artificial Sequence
  Description of Artificial Sequence: Synthetic oligonucleotide
auugagagaaaagcacaau

SEQ ID NO: 885098 - RNA, 19 nt, Artificial Sequence
  Description of Artificial Sequence: Synthetic oligonucleotide
gggauaaacacagggauaa

SEQ ID NO: 885099 - RNA, 19 nt, Artificial Sequence
  Description of Artificial Sequence: Synthetic oligonucleotide
agcgcuuggugagauccac

SEQ ID NO: 885100 - RNA, 19 nt, Artificial Sequence
  Description of Artificial Sequence: Synthetic oligonucleotide
agaacucuagggcccucug

SEQ ID NO: 885101 - RNA, 19 nt, Artificial Sequence
  Description of Artificial Sequence: Synthetic oligonucleotide
gauguugccccuuccccaa

SEQ ID NO: 885102 - RNA, 19 nt, Artificial Sequence
  Description of Artificial Sequence: Synthetic oligonucleotide
gaaccgcaccuucccagag

SEQ ID NO: 885103 - RNA, 19 nt, Artificial Sequence
  Description of Artificial Sequence: Synthetic oligonucleotide
ugacagagucaguuggcua

SEQ ID NO: 885104 - RNA, 19 nt, Artificial Sequence
  Description of Artificial Sequence: Synthetic oligonucleotide
gaagaaggguggguaacca

SEQ ID NO: 885105 - RNA, 19 nt, Artificial Sequence
  Description of Artificial Sequence: Synthetic oligonucleotide
aguuggcuaucccggccuc

SEQ ID NO: 885106 - RNA, 19 nt, Artificial Sequence
  Description of Artificial Sequence: Synthetic oligonucleotide
uuccgauccgccgcaagug

SEQ ID NO: 885107 - RNA, 19 nt, Artificial Sequence
  Description of Artificial Sequence: Synthetic oligonucleotide
gucacuaaaaucucccuuu

SEQ ID NO: 885108 - RNA, 19 nt, Artificial Sequence
  Description of Artificial Sequence: Synthetic oligonucleotide
agggcccucuggcuguucg

SEQ ID NO: 885109 - RNA, 19 nt, Artificial Sequence
  Description of Artificial Sequence: Synthetic oligonucleotide
auucaaguuugaccaggaa

SEQ ID NO: 885110 - RNA, 19 nt, Artificial Sequence
  Description of Artificial Sequence: Synthetic oligonucleotide
gacgaucugcgccgcguag

SEQ ID NO: 885111 - RNA, 19 nt, Artificial Sequence
  Description of Artificial Sequence: Synthetic oligonucleotide
aagcacaaucagacuuggg

SEQ ID NO: 885112 - RNA, 19 nt, Artificial Sequence
  Description of Artificial Sequence: Synthetic oligonucleotide
ucguggcaaaccacuuaug

SEQ ID NO: 885113 - RNA, 19 nt, Artificial Sequence
  Description of Artificial Sequence: Synthetic oligonucleotide
guucgauccaacccuccca

SEQ ID NO: 885114 - RNA, 19 nt, Artificial Sequence
  Description of Artificial Sequence: Synthetic oligonucleotide
accccacuagcaagcagcc

SEQ ID NO: 885115 - RNA, 19 nt, Artificial Sequence
  Description of Artificial Sequence: Synthetic oligonucleotide
agaaacgggcauggggcuc

SEQ ID NO: 885116 - RNA, 19 nt, Artificial Sequence
  Description of Artificial Sequence: Synthetic oligonucleotide
ucagcgaagaagggugggu

SEQ ID NO: 885117 - RNA, 19 nt, Artificial Sequence
  Description of Artificial Sequence: Synthetic oligonucleotide
gccuuuaaacuuugguaug

SEQ ID NO: 885118 - RNA, 19 nt, Artificial Sequence
  Description of Artificial Sequence: Synthetic oligonucleotide
ugugcucaaucugcuucag

SEQ ID NO: 885119 - RNA, 19 nt, Artificial Sequence
  Description of Artificial Sequence: Synthetic oligonucleotide
gucucguggucucgguggg

SEQ ID NO: 885120 - RNA, 19 nt, Artificial Sequence
  Description of Artificial Sequence: Synthetic oligonucleotide
ggccuuuaaacuuugguau

SEQ ID NO: 885121 - RNA, 19 nt, Artificial Sequence
  Description of Artificial Sequence: Synthetic oligonucleotide
cuuacccugcccuuggaua

SEQ ID NO: 885122 - RNA, 19 nt, Artificial Sequence
  Description of Artificial Sequence: Synthetic oligonucleotide
caagcacaccccuaaaacu

SEQ ID NO: 885123 - RNA, 19 nt, Artificial Sequence
  Description of Artificial Sequence: Synthetic oligonucleotide
caccuuucucugauagaug

SEQ ID NO: 885124 - RNA, 19 nt, Artificial Sequence
  Description of Artificial Sequence: Synthetic oligonucleotide
cuuaguguccagugcugga

SEQ ID NO: 885125 - RNA, 19 nt, Artificial Sequence
  Description of Artificial Sequence: Synthetic oligonucleotide
cuguucgauccaacccucc

SEQ ID NO: 885126 - RNA, 19 nt, Artificial Sequence
  Description of Artificial Sequence: Synthetic oligonucleotide
uuccugcucucccuaacuu

SEQ ID NO: 885127 - RNA, 19 nt, Artificial Sequence
  Description of Artificial Sequence: Synthetic oligonucleotide
agggacagucuggaggaag

SEQ ID NO: 885128 - RNA, 19 nt, Artificial Sequence
  Description of Artificial Sequence: Synthetic oligonucleotide
gggguaauuuccccagcag

SEQ ID NO: 885129 - RNA, 19 nt, Artificial Sequence
  Description of Artificial Sequence: Synthetic oligonucleotide
cauugaccccguucuugag

SEQ ID NO: 885130 - RNA, 19 nt, Artificial Sequence
  Description of Artificial Sequence: Synthetic oligonucleotide
ugggaaccgcaccuuccca

SEQ ID NO: 885131 - RNA, 19 nt, Artificial Sequence
  Description of Artificial Sequence: Synthetic oligonucleotide
agguucccaaagcgcuugg

SEQ ID NO: 885132 - RNA, 19 nt, Artificial Sequence
  Description of Artificial Sequence: Synthetic oligonucleotide
gucagcgaagaaggguggg

SEQ ID NO: 885133 - RNA, 19 nt, Artificial Sequence
  Description of Artificial Sequence: Synthetic oligonucleotide
gggccuuuaaacuuuggua

SEQ ID NO: 885134 - RNA, 19 nt, Artificial Sequence
  Description of Artificial Sequence: Synthetic oligonucleotide
uccgccgcaagugggagaa

SEQ ID NO: 885135 - RNA, 19 nt, Artificial Sequence
  Description of Artificial Sequence: Synthetic oligonucleotide
auauagcccugcuggucga

SEQ ID NO: 885136 - RNA, 19 nt, Artificial Sequence
  Description of Artificial Sequence: Synthetic oligonucleotide
gcgccaaagaauuggcaug

SEQ ID NO: 885137 - RNA, 19 nt, Artificial Sequence
  Description of Artificial Sequence: Synthetic oligonucleotide
cugcucucccuaacuuggg

SEQ ID NO: 885138 - RNA, 19 nt, Artificial Sequence
  Description of Artificial Sequence: Synthetic oligonucleotide
agucguggcaaaccacuua

SEQ ID NO: 885139 - RNA, 19 nt, Artificial Sequence
  Description of Artificial Sequence: Synthetic oligonucleotide
cugguggaacuuaauuuaa

SEQ ID NO: 885140 - RNA, 19 nt, Artificial Sequence
  Description of Artificial Sequence: Synthetic oligonucleotide
ggagacccggaucucuucc

SEQ ID NO: 885141 - RNA, 19 nt, Artificial Sequence
  Description of Artificial Sequence: Synthetic oligonucleotide
gagaaguuacgagagggau

SEQ ID NO: 885142 - RNA, 19 nt, Artificial Sequence
  Description of Artificial Sequence: Synthetic oligonucleotide
cugaugcgccaaagaauug

SEQ ID NO: 885143 - RNA, 19 nt, Artificial Sequence
  Description of Artificial Sequence: Synthetic oligonucleotide
ucgauccaacccucccacc

SEQ ID NO: 885144 - RNA, 19 nt, Artificial Sequence
  Description of Artificial Sequence: Synthetic oligonucleotide
gguggaacuuaauuuaaau

SEQ ID NO: 885145 - RNA, 19 nt, Artificial Sequence
  Description of Artificial Sequence: Synthetic oligonucleotide
accccguucuugagguucc

SEQ ID NO: 885146 - RNA, 19 nt, Artificial Sequence
  Description of Artificial Sequence: Synthetic oligonucleotide
ggaaguugacagccugcag

SEQ ID NO: 885147 - RNA, 19 nt, Artificial Sequence
  Description of Artificial Sequence: Synthetic oligonucleotide
cucauccuucgcagcacac

SEQ ID NO: 885148 - RNA, 19 nt, Artificial Sequence
  Description of Artificial Sequence: Synthetic oligonucleotide
cuuucacacgcuuggcaaa

SEQ ID NO: 885149 - RNA, 19 nt, Artificial Sequence
  Description of Artificial Sequence: Synthetic oligonucleotide
aaagcccgguuccuuccuu

SEQ ID NO: 885150 - RNA, 19 nt, Artificial Sequence
  Description of Artificial Sequence: Synthetic oligonucleotide
aacgggaaguugacagccu

SEQ ID NO: 885151 - RNA, 19 nt, Artificial Sequence
  Description of Artificial Sequence: Synthetic oligonucleotide
uguugccccuuccccaaua

SEQ ID NO: 885152 - RNA, 19 nt, Artificial Sequence
  Description of Artificial Sequence: Synthetic oligonucleotide
ggccucucuuuccuuaccc

SEQ ID NO: 885153 - RNA, 19 nt, Artificial Sequence
  Description of Artificial Sequence: Synthetic oligonucleotide
cuagcaagcagcccucugu

SEQ ID NO: 885154 - RNA, 19 nt, Artificial Sequence
  Description of Artificial Sequence: Synthetic oligonucleotide
acgcuuggcaaaaccgaag

SEQ ID NO: 885155 - RNA, 19 nt, Artificial Sequence
  Description of Artificial Sequence: Synthetic oligonucleotide
agcugaagugagaugggaa

SEQ ID NO: 885156 - RNA, 19 nt, Artificial Sequence
  Description of Artificial Sequence: Synthetic oligonucleotide
gugucucguggucucggug

SEQ ID NO: 885157 - RNA, 19 nt, Artificial Sequence
  Description of Artificial Sequence: Synthetic oligonucleotide
gaugcgcuucucauuuaga

SEQ ID NO: 885158 - RNA, 19 nt, Artificial Sequence
  Description of Artificial Sequence: Synthetic oligonucleotide
ccgguuccuuccuugacag

SEQ ID NO: 885159 - RNA, 19 nt, Artificial Sequence
  Description of Artificial Sequence: Synthetic oligonucleotide
gucguggcaaaccacuuau

SEQ ID NO: 885160 - RNA, 19 nt, Artificial Sequence
  Description of Artificial Sequence: Synthetic oligonucleotide
agggauaaacacagggaua

SEQ ID NO: 885161 - RNA, 19 nt, Artificial Sequence
  Description of Artificial Sequence: Synthetic oligonucleotide
uugccccuuccccaauauc

SEQ ID NO: 885162 - RNA, 19 nt, Artificial Sequence
  Description of Artificial Sequence: Synthetic oligonucleotide
auccuucgcagcacacagg

SEQ ID NO: 885163 - RNA, 19 nt, Artificial Sequence
  Description of Artificial Sequence: Synthetic oligonucleotide
uccuuacccugcccuugga

SEQ ID NO: 885164 - RNA, 19 nt, Artificial Sequence
  Description of Artificial Sequence: Synthetic oligonucleotide
aagguccaaguccggccuu

SEQ ID NO: 885165 - RNA, 19 nt, Artificial Sequence
  Description of Artificial Sequence: Synthetic oligonucleotide
ccuuaguguccagugcugg

SEQ ID NO: 885166 - RNA, 19 nt, Artificial Sequence
  Description of Artificial Sequence: Synthetic oligonucleotide
aauuggcaugagaccccug

SEQ ID NO: 885167 - RNA, 19 nt, Artificial Sequence
  Description of Artificial Sequence: Synthetic oligonucleotide
agucugucaccugaauaua

SEQ ID NO: 885168 - RNA, 19 nt, Artificial Sequence
  Description of Artificial Sequence: Synthetic oligonucleotide
ggcuguucgauccaacccu

SEQ ID NO: 885169 - RNA, 19 nt, Artificial Sequence
  Description of Artificial Sequence: Synthetic oligonucleotide
agccuuguuguagccuuug

SEQ ID NO: 885170 - RNA, 19 nt, Artificial Sequence
  Description of Artificial Sequence: Synthetic oligonucleotide
gggcugaugcgccaaagaa

SEQ ID NO: 885171 - RNA, 19 nt, Artificial Sequence
  Description of Artificial Sequence: Synthetic oligonucleotide
uucacacgcuuggcaaaac

SEQ ID NO: 885172 - RNA, 19 nt, Artificial Sequence
  Description of Artificial Sequence: Synthetic oligonucleotide
ggacagucuggaggaaggg

SEQ ID NO: 885173 - RNA, 19 nt, Artificial Sequence
  Description of Artificial Sequence: Synthetic oligonucleotide
cugcgccgcguagaaacgg

SEQ ID NO: 885174 - RNA, 19 nt, Artificial Sequence
  Description of Artificial Sequence: Synthetic oligonucleotide
ucaggacgaucugcgccgc

SEQ ID NO: 885175 - RNA, 19 nt, Artificial Sequence
  Description of Artificial Sequence: Synthetic oligonucleotide
ccccuaaaacucaguaaac

SEQ ID NO: 885176 - RNA, 19 nt, Artificial Sequence
  Description of Artificial Sequence: Synthetic oligonucleotide
aggacgaucugcgccgcgu

SEQ ID NO: 885177 - RNA, 19 nt, Artificial Sequence
  Description of Artificial Sequence: Synthetic oligonucleotide
ggagaaguuacgagaggga

SEQ ID NO: 885178 - RNA, 19 nt, Artificial Sequence
  Description of Artificial Sequence: Synthetic oligonucleotide
gucagucguggcaaaccac

SEQ ID NO: 885179 - RNA, 19 nt, Artificial Sequence
  Description of Artificial Sequence: Synthetic oligonucleotide
gaagggugucucguggucu

SEQ ID NO: 885180 - RNA, 19 nt, Artificial Sequence
  Description of Artificial Sequence: Synthetic oligonucleotide
caaagcgcuuggugagauc

SEQ ID NO: 885181 - RNA, 19 nt, Artificial Sequence
  Description of Artificial Sequence: Synthetic oligonucleotide
acgaucugcgccgcguaga

SEQ ID NO: 885182 - RNA, 19 nt, Artificial Sequence
  Description of Artificial Sequence: Synthetic oligonucleotide
ccuuggauacaccauaagu

SEQ ID NO: 885183 - RNA, 19 nt, Artificial Sequence
  Description of Artificial Sequence: Synthetic oligonucleotide
auagcccugcuggucgaug

SEQ ID NO: 885184 - RNA, 19 nt, Artificial Sequence
  Description of Artificial Sequence: Synthetic oligonucleotide
guaaacuccuugccacacu

SEQ ID NO: 885185 - RNA, 19 nt, Artificial Sequence
  Description of Artificial Sequence: Synthetic oligonucleotide
ccagagacgauuuucucgu

SEQ ID NO: 885186 - RNA, 19 nt, Artificial Sequence
  Description of Artificial Sequence: Synthetic oligonucleotide
uggcuaucccggccucaga

SEQ ID NO: 885187 - RNA, 19 nt, Artificial Sequence
  Description of Artificial Sequence: Synthetic oligonucleotide
cauaagucugggugugacu

SEQ ID NO: 885188 - RNA, 19 nt, Artificial Sequence
  Description of Artificial Sequence: Synthetic oligonucleotide
aagcgcuuggugagaucca

SEQ ID NO: 885189 - RNA, 19 nt, Artificial Sequence
  Description of Artificial Sequence: Synthetic oligonucleotide
cuuugguaugaagggagcu

SEQ ID NO: 885190 - RNA, 19 nt, Artificial Sequence
  Description of Artificial Sequence: Synthetic oligonucleotide
agggagcuuccaccuuucu

SEQ ID NO: 885191 - RNA, 19 nt, Artificial Sequence
  Description of Artificial Sequence: Synthetic oligonucleotide
ccauaagucugggugugac

SEQ ID NO: 885192 - RNA, 19 nt, Artificial Sequence
  Description of Artificial Sequence: Synthetic oligonucleotide
gggcgagguucaaagcccg

SEQ ID NO: 885193 - RNA, 19 nt, Artificial Sequence
  Description of Artificial Sequence: Synthetic oligonucleotide
accauaagucuggguguga

SEQ ID NO: 885194 - RNA, 19 nt, Artificial Sequence
  Description of Artificial Sequence: Synthetic oligonucleotide
ggaaccgcaccuucccaga

SEQ ID NO: 885195 - RNA, 19 nt, Artificial Sequence
  Description of Artificial Sequence: Synthetic oligonucleotide
ccggccucagaguggauug

SEQ ID NO: 885196 - RNA, 19 nt, Artificial Sequence
  Description of Artificial Sequence: Synthetic oligonucleotide
uggggugaauuugggccuc

SEQ ID NO: 885197 - RNA, 19 nt, Artificial Sequence
  Description of Artificial Sequence: Synthetic oligonucleotide
guuugaccaggaacgggaa

SEQ ID NO: 885198 - RNA, 19 nt, Artificial Sequence
  Description of Artificial Sequence: Synthetic oligonucleotide
uacccugcccuuggauaca

SEQ ID NO: 885199 - RNA, 19 nt, Artificial Sequence
  Description of Artificial Sequence: Synthetic oligonucleotide
cuuccgauccgccgcaagu

SEQ ID NO: 885200 - RNA, 19 nt, Artificial Sequence
  Description of Artificial Sequence: Synthetic oligonucleotide
agucugggugugacugaag

SEQ ID NO: 885201 - RNA, 19 nt, Artificial Sequence
  Description of Artificial Sequence: Synthetic oligonucleotide
ccgauccgccgcaaguggg

SEQ ID NO: 885202 - RNA, 19 nt, Artificial Sequence
  Description of Artificial Sequence: Synthetic oligonucleotide
ccaaguccggccuuucaca

SEQ ID NO: 885203 - RNA, 19 nt, Artificial Sequence
  Description of Artificial Sequence: Synthetic oligonucleotide
gguggaguggguguuaaau

SEQ ID NO: 885204 - RNA, 19 nt, Artificial Sequence
  Description of Artificial Sequence: Synthetic oligonucleotide
ccuuucuauugagagaaaa

SEQ ID NO: 885205 - RNA, 19 nt, Artificial Sequence
  Description of Artificial Sequence: Synthetic oligonucleotide
uauagcccugcuggucgau

SEQ ID NO: 885206 - RNA, 19 nt, Artificial Sequence
  Description of Artificial Sequence: Synthetic oligonucleotide
caggacgaucugcgccgcg

SEQ ID NO: 885207 - RNA, 19 nt, Artificial Sequence
  Description of Artificial Sequence: Synthetic oligonucleotide
gcaagugggagaacaucuc

SEQ ID NO: 885208 - RNA, 19 nt, Artificial Sequence
  Description of Artificial Sequence: Synthetic oligonucleotide
cgaagaaggguggguaacc

SEQ ID NO: 885209 - RNA, 19 nt, Artificial Sequence
  Description of Artificial Sequence: Synthetic oligonucleotide
ggggcugaugcgccaaaga

SEQ ID NO: 885210 - RNA, 19 nt, Artificial Sequence
  Description of Artificial Sequence: Synthetic oligonucleotide
ggugugacugaagcugaga

SEQ ID NO: 885211 - RNA, 19 nt, Artificial Sequence
  Description of Artificial Sequence: Synthetic oligonucleotide
gcugaaccuuccgauccgc

SEQ ID NO: 885212 - RNA, 19 nt, Artificial Sequence
  Description of Artificial Sequence: Synthetic oligonucleotide
uugguaggggagggacagu

SEQ ID NO: 885213 - RNA, 19 nt, Artificial Sequence
  Description of Artificial Sequence: Synthetic oligonucleotide
cgcguagaaacgggcaugg

SEQ ID NO: 885214 - RNA, 19 nt, Artificial Sequence
  Description of Artificial Sequence: Synthetic oligonucleotide
cuggucagcgaagaagggu

SEQ ID NO: 885215 - RNA, 19 nt, Artificial Sequence
  Description of Artificial Sequence: Synthetic oligonucleotide
aaguuacgagagggauaaa

SEQ ID NO: 885216 - RNA, 19 nt, Artificial Sequence
  Description of Artificial Sequence: Synthetic oligonucleotide
caguuggcuaucccggccu

SEQ ID NO: 885217 - RNA, 19 nt, Artificial Sequence
  Description of Artificial Sequence: Synthetic oligonucleotide
gggcucgcugaaccuuccg

SEQ ID NO: 885218 - RNA, 19 nt, Artificial Sequence
  Description of Artificial Sequence: Synthetic oligonucleotide
auggggcucgcugaaccuu

SEQ ID NO: 885219 - RNA, 19 nt, Artificial Sequence
  Description of Artificial Sequence: Synthetic oligonucleotide
gccaaagaauuggcaugag

SEQ ID NO: 885220 - RNA, 19 nt, Artificial Sequence
  Description of Artificial Sequence: Synthetic oligonucleotide
cagcgaagaagggugggua

SEQ ID NO: 885221 - RNA, 19 nt, Artificial Sequence
  Description of Artificial Sequence: Synthetic oligonucleotide
gcacaccccuaaaacucag

SEQ ID NO: 885222 - RNA, 19 nt, Artificial Sequence
  Description of Artificial Sequence: Synthetic oligonucleotide
cuuuccuuacccugcccuu

SEQ ID NO: 885223 - RNA, 19 nt, Artificial Sequence
  Description of Artificial Sequence: Synthetic oligonucleotide
auguugccccuuccccaau

SEQ ID NO: 885224 - RNA, 19 nt, Artificial Sequence
  Description of Artificial Sequence: Synthetic oligonucleotide
ggcgagguucaaagcccgg

SEQ ID NO: 885225 - RNA, 19 nt, Artificial Sequence
  Description of Artificial Sequence: Synthetic oligonucleotide
gcuguucgauccaacccuc

SEQ ID NO: 885226 - RNA, 19 nt, Artificial Sequence
  Description of Artificial Sequence: Synthetic oligonucleotide
cccuaaaacucaguaaacu

SEQ ID NO: 885227 - RNA, 19 nt, Artificial Sequence
  Description of Artificial Sequence: Synthetic oligonucleotide
cauggggcucgcugaaccu

SEQ ID NO: 885228 - RNA, 19 nt, Artificial Sequence
  Description of Artificial Sequence: Synthetic oligonucleotide
guugccccuuccccaauau

SEQ ID NO: 885229 - RNA, 19 nt, Artificial Sequence
  Description of Artificial Sequence: Synthetic oligonucleotide
cgcugaaccuuccgauccg

SEQ ID NO: 885230 - RNA, 19 nt, Artificial Sequence
  Description of Artificial Sequence: Synthetic oligonucleotide
ccguucuugagguucccaa

SEQ ID NO: 885231 - RNA, 19 nt, Artificial Sequence
  Description of Artificial Sequence: Synthetic oligonucleotide
ucgcagcacacagguugaa

SEQ ID NO: 885232 - RNA, 19 nt, Artificial Sequence
  Description of Artificial Sequence: Synthetic oligonucleotide
cauagucgucaaaguuacu

SEQ ID NO: 885233 - RNA, 19 nt, Artificial Sequence
  Description of Artificial Sequence: Synthetic oligonucleotide
ggauaaacacagggauaaa

SEQ ID NO: 885234 - RNA, 19 nt, Artificial Sequence
  Description of Artificial Sequence: Synthetic oligonucleotide
cacaccccuaaaacucagu

SEQ ID NO: 885235 - RNA, 19 nt, Artificial Sequence
  Description of Artificial Sequence: Synthetic oligonucleotide
gguaaccagcagccaucuc

SEQ ID NO: 885236 - RNA, 19 nt, Artificial Sequence
  Description of Artificial Sequence: Synthetic oligonucleotide
gaucugcgccgcguagaaa

SEQ ID NO: 885237 - RNA, 19 nt, Artificial Sequence
  Description of Artificial Sequence: Synthetic oligonucleotide
ccuuccgauccgccgcaag

SEQ ID NO: 885238 - RNA, 19 nt, Artificial Sequence
  Description of Artificial Sequence: Synthetic oligonucleotide
ggcugaugcgccaaagaau

SEQ ID NO: 885239 - RNA, 19 nt, Artificial Sequence
  Description of Artificial Sequence: Synthetic oligonucleotide
cagagacgauuuucucgua

SEQ ID NO: 885240 - RNA, 19 nt, Artificial Sequence
  Description of Artificial Sequence: Synthetic oligonucleotide
aacgggcauggggcucgcu

SEQ ID NO: 885241 - RNA, 19 nt, Artificial Sequence
  Description of Artificial Sequence: Synthetic oligonucleotide
ccagucagucguggcaaac

SEQ ID NO: 885242 - RNA, 19 nt, Artificial Sequence
  Description of Artificial Sequence: Synthetic oligonucleotide
ccgcaagugggagaacauc

SEQ ID NO: 885243 - RNA, 19 nt, Artificial Sequence
  Description of Artificial Sequence: Synthetic oligonucleotide
ccgcguagaaacgggcaug

SEQ ID NO: 885244 - RNA, 19 nt, Artificial Sequence
  Description of Artificial Sequence: Synthetic oligonucleotide
gcuaucccggccucagagu

SEQ ID NO: 885245 - RNA, 19 nt, Artificial Sequence
  Description of Artificial Sequence: Synthetic oligonucleotide
cgccaaagaauuggcauga

SEQ ID NO: 885246 - RNA, 19 nt, Artificial Sequence
  Description of Artificial Sequence: Synthetic oligonucleotide
ggacugcauggaaggggug

SEQ ID NO: 885247 - RNA, 19 nt, Artificial Sequence
  Description of Artificial Sequence: Synthetic oligonucleotide
gcgcuuggugagauccacc

SEQ ID NO: 885248 - RNA, 19 nt, Artificial Sequence
  Description of Artificial Sequence: Synthetic oligonucleotide
cgagagcccaccaguccac

SEQ ID NO: 885249 - RNA, 19 nt, Artificial Sequence
  Description of Artificial Sequence: Synthetic oligonucleotide
cagaacucuagggcccucu

SEQ ID NO: 885250 - RNA, 19 nt, Artificial Sequence
  Description of Artificial Sequence: Synthetic oligonucleotide
ggggagaagggugucucgu

SEQ ID NO: 885251 - RNA, 19 nt, Artificial Sequence
  Description of Artificial Sequence: Synthetic oligonucleotide
ggacgaucugcgccgcgua

SEQ ID NO: 885252 - RNA, 19 nt, Artificial Sequence
  Description of Artificial Sequence: Synthetic oligonucleotide
cagucguggcaaaccacuu

SEQ ID NO: 885253 - RNA, 19 nt, Artificial Sequence
  Description of Artificial Sequence: Synthetic oligonucleotide
ggggcucgcugaaccuucc

SEQ ID NO: 885254 - RNA, 19 nt, Artificial Sequence
  Description of Artificial Sequence: Synthetic oligonucleotide
gccgcguagaaacgggcau

SEQ ID NO: 885255 - RNA, 19 nt, Artificial Sequence
  Description of Artificial Sequence: Synthetic oligonucleotide
ggcauggggcucgcugaac

SEQ ID NO: 885256 - RNA, 19 nt, Artificial Sequence
  Description of Artificial Sequence: Synthetic oligonucleotide
gcgccgcguagaaacgggc

SEQ ID NO: 885257 - RNA, 19 nt, Artificial Sequence
  Description of Artificial Sequence: Synthetic oligonucleotide
caaaccacuuaugguucuu

SEQ ID NO: 885258 - RNA, 19 nt, Artificial Sequence
  Description of Artificial Sequence: Synthetic oligonucleotide
gguccaaguccggccuuuc

SEQ ID NO: 885259 - RNA, 19 nt, Artificial Sequence
  Description of Artificial Sequence: Synthetic oligonucleotide
gguaggggagggacagucu

SEQ ID NO: 885260 - RNA, 19 nt, Artificial Sequence
  Description of Artificial Sequence: Synthetic oligonucleotide
ggguacaagcacaccccua

SEQ ID NO: 885261 - RNA, 19 nt, Artificial Sequence
  Description of Artificial Sequence: Synthetic oligonucleotide
gcgagguucaaagcccggu

SEQ ID NO: 885262 - RNA, 19 nt, Artificial Sequence
  Description of Artificial Sequence: Synthetic oligonucleotide
cgauccgccgcaaguggga

SEQ ID NO: 885263 - RNA, 19 nt, Artificial Sequence
  Description of Artificial Sequence: Synthetic oligonucleotide
gggcccucuggcuguucga

SEQ ID NO: 885264 - RNA, 19 nt, Artificial Sequence
  Description of Artificial Sequence: Synthetic oligonucleotide
cccgguagaugagguccag

SEQ ID NO: 885265 - RNA, 19 nt, Artificial Sequence
  Description of Artificial Sequence: Synthetic oligonucleotide
ccccacuagcaagcagccc

SEQ ID NO: 885266 - RNA, 19 nt, Artificial Sequence
  Description of Artificial Sequence: Synthetic oligonucleotide
gcccucuguaccugucacu

SEQ ID NO: 885267 - RNA, 19 nt, Artificial Sequence
  Description of Artificial Sequence: Synthetic oligonucleotide
cgccgcguagaaacgggca

SEQ ID NO: 885268 - RNA, 19 nt, Artificial Sequence
  Description of Artificial Sequence: Synthetic oligonucleotide
cccaaagcgcuuggugaga

SEQ ID NO: 885269 - RNA, 19 nt, Artificial Sequence
  Description of Artificial Sequence: Synthetic oligonucleotide
cgccgcaagugggagaaca

SEQ ID NO: 885270 - RNA, 19 nt, Artificial Sequence
  Description of Artificial Sequence: Synthetic oligonucleotide
gcacacuguucaagaggaa

SEQ ID NO: 885271 - RNA, 19 nt, Artificial Sequence
  Description of Artificial Sequence: Synthetic oligonucleotide
ccccagggccuuuaaacuu

SEQ ID NO: 885272 - RNA, 19 nt, Artificial Sequence
  Description of Artificial Sequence: Synthetic oligonucleotide
ccuuacccugcccuuggau

SEQ ID NO: 885273 - RNA, 19 nt, Artificial Sequence
  Description of Artificial Sequence: Synthetic oligonucleotide
caccugcagaagguuccgu

SEQ ID NO: 885274 - RNA, 19 nt, Artificial Sequence
  Description of Artificial Sequence: Synthetic oligonucleotide
cccguucuugagguuccca

SEQ ID NO: 885275 - RNA, 19 nt, Artificial Sequence
  Description of Artificial Sequence: Synthetic oligonucleotide
ccaugaccauguacaaguu

SEQ ID NO: 885276 - RNA, 19 nt, Artificial Sequence
  Description of Artificial Sequence: Synthetic oligonucleotide
ccaaagcgcuuggugagau

SEQ ID NO: 885277 - RNA, 19 nt, Artificial Sequence
  Description of Artificial Sequence: Synthetic oligonucleotide
ggcccucuggcuguucgau

SEQ ID NO: 885278 - RNA, 19 nt, Artificial Sequence
  Description of Artificial Sequence: Synthetic oligonucleotide
gccgcaagugggagaacau

SEQ ID NO: 885279 - RNA, 19 nt, Artificial Sequence
  Description of Artificial Sequence: Synthetic oligonucleotide
ggggugaauuugggccucu

SEQ ID NO: 885280 - RNA, 19 nt, Artificial Sequence
  Description of Artificial Sequence: Synthetic oligonucleotide
ccuucgcagcacacagguu

SEQ ID NO: 885281 - RNA, 19 nt, Artificial Sequence
  Description of Artificial Sequence: Synthetic oligonucleotide
cuagggcccucuggcuguu

SEQ ID NO: 885282 - RNA, 19 nt, Artificial Sequence
  Description of Artificial Sequence: Synthetic oligonucleotide
cccggccucagaguggauu

SEQ ID NO: 885283 - RNA, 19 nt, Artificial Sequence
  Description of Artificial Sequence: Synthetic oligonucleotide
ccgccgcaagugggagaac

SEQ ID NO: 885284 - RNA, 19 nt, Artificial Sequence
  Description of Artificial Sequence: Synthetic oligonucleotide
aauacagugaauuuacuuc

SEQ ID NO: 885285 - RNA, 19 nt, Artificial Sequence
  Description of Artificial Sequence: Synthetic oligonucleotide
aaaacuguaucguauaguc

SEQ ID NO: 885286 - RNA, 19 nt, Artificial Sequence
  Description of Artificial Sequence: Synthetic oligonucleotide
uuaaauguggacaauaucu

SEQ ID NO: 885287 - RNA, 19 nt, Artificial Sequence
  Description of Artificial Sequence: Synthetic oligonucleotide
aauguaugccagcuuaugc

SEQ ID NO: 885288 - RNA, 19 nt, Artificial Sequence
  Description of Artificial Sequence: Synthetic oligonucleotide
auagcuauaaaaucccacc

SEQ ID NO: 885289 - RNA, 19 nt, Artificial Sequence
  Description of Artificial Sequence: Synthetic oligonucleotide
auacaugcuaauuauaauc

SEQ ID NO: 885290 - RNA, 19 nt, Artificial Sequence
  Description of Artificial Sequence: Synthetic oligonucleotide
cuuaccuaaauauagcugc

SEQ ID NO: 885291 - RNA, 19 nt, Artificial Sequence
  Description of Artificial Sequence: Synthetic oligonucleotide
aacuguaucguauagucug

SEQ ID NO: 885292 - RNA, 19 nt, Artificial Sequence
  Description of Artificial Sequence: Synthetic oligonucleotide
uuuaaucuccuucuuagcc

SEQ ID NO: 885293 - RNA, 19 nt, Artificial Sequence
  Description of Artificial Sequence: Synthetic oligonucleotide
agauugguuaaccacaagg

SEQ ID NO: 885294 - RNA, 19 nt, Artificial Sequence
  Description of Artificial Sequence: Synthetic oligonucleotide
aauauagcugcucugugug

SEQ ID NO: 885295 - RNA, 19 nt, Artificial Sequence
  Description of Artificial Sequence: Synthetic oligonucleotide
ucgaauuucacuaagugau

SEQ ID NO: 885296 - RNA, 19 nt, Artificial Sequence
  Description of Artificial Sequence: Synthetic oligonucleotide
auaggacuaaguaagauac

SEQ ID NO: 885297 - RNA, 19 nt, Artificial Sequence
  Description of Artificial Sequence: Synthetic oligonucleotide
acauguuucguccacuccc

SEQ ID NO: 885298 - RNA, 19 nt, Artificial Sequence
  Description of Artificial Sequence: Synthetic oligonucleotide
uucauuggcagcaaauuag

SEQ ID NO: 885299 - RNA, 19 nt, Artificial Sequence
  Description of Artificial Sequence: Synthetic oligonucleotide
aaaaguaccccagagguug

SEQ ID NO: 885300 - RNA, 19 nt, Artificial Sequence
  Description of Artificial Sequence: Synthetic oligonucleotide
aguauuauggcuaugaaaa

SEQ ID NO: 885301 - RNA, 19 nt, Artificial Sequence
  Description of Artificial Sequence: Synthetic oligonucleotide
uucaauacagugaauuuac

SEQ ID NO: 885302 - RNA, 19 nt, Artificial Sequence
  Description of Artificial Sequence: Synthetic oligonucleotide
aauagcuauaaaaucccac

SEQ ID NO: 885303 - RNA, 19 nt, Artificial Sequence
  Description of Artificial Sequence: Synthetic oligonucleotide
uguagaauggacacaggcc

SEQ ID NO: 885304 - RNA, 19 nt, Artificial Sequence
  Description of Artificial Sequence: Synthetic oligonucleotide
uacaugcuaauuauaaucu

SEQ ID NO: 885305 - RNA, 19 nt, Artificial Sequence
  Description of Artificial Sequence: Synthetic oligonucleotide
agugaucuuaccuaaauau

SEQ ID NO: 885306 - RNA, 19 nt, Artificial Sequence
  Description of Artificial Sequence: Synthetic oligonucleotide
aauuuacuucaugagacag

SEQ ID NO: 885307 - RNA, 19 nt, Artificial Sequence
  Description of Artificial Sequence: Synthetic oligonucleotide
aaucuaggcauguucaccu

SEQ ID NO: 885308 - RNA, 19 nt, Artificial Sequence
  Description of Artificial Sequence: Synthetic oligonucleotide
uucauugguacaaaacagc

SEQ ID NO: 885309 - RNA, 19 nt, Artificial Sequence
  Description of Artificial Sequence: Synthetic oligonucleotide
aauaggacuaaguaagaua

SEQ ID NO: 885310 - RNA, 19 nt, Artificial Sequence
  Description of Artificial Sequence: Synthetic oligonucleotide
augcauaucagacaggcca

SEQ ID NO: 885311 - RNA, 19 nt, Artificial Sequence
  Description of Artificial Sequence: Synthetic oligonucleotide
aguaagauacauuuuaaua

SEQ ID NO: 885312 - RNA, 19 nt, Artificial Sequence
  Description of Artificial Sequence: Synthetic oligonucleotide
gauaucgaccuugagagag

SEQ ID NO: 885313 - RNA, 19 nt, Artificial Sequence
  Description of Artificial Sequence: Synthetic oligonucleotide
caugcuaauuauaaucuag

SEQ ID NO: 885314 - RNA, 19 nt, Artificial Sequence
  Description of Artificial Sequence: Synthetic oligonucleotide
uacagagccauaaugauuu

SEQ ID NO: 885315 - RNA, 19 nt, Artificial Sequence
  Description of Artificial Sequence: Synthetic oligonucleotide
cuaauuauaaucuaggcau

SEQ ID NO: 885316 - RNA, 19 nt, Artificial Sequence
  Description of Artificial Sequence: Synthetic oligonucleotide
uugaccuauccauacaugc

SEQ ID NO: 885317 - RNA, 19 nt, Artificial Sequence
  Description of Artificial Sequence: Synthetic oligonucleotide
uuaguugggcacuugcagg

SEQ ID NO: 885318 - RNA, 19 nt, Artificial Sequence
  Description of Artificial Sequence: Synthetic oligonucleotide
aaugauuugcuuauaauuu

SEQ ID NO: 885319 - RNA, 19 nt, Artificial Sequence
  Description of Artificial Sequence: Synthetic oligonucleotide
auaaaagugucuggggugc

SEQ ID NO: 885320 - RNA, 19 nt, Artificial Sequence
  Description of Artificial Sequence: Synthetic oligonucleotide
ucuuaccuaaauauagcug

SEQ ID NO: 885321 - RNA, 19 nt, Artificial Sequence
  Description of Artificial Sequence: Synthetic oligonucleotide
uuuauccuaauaagguuug

SEQ ID NO: 885322 - RNA, 19 nt, Artificial Sequence
  Description of Artificial Sequence: Synthetic oligonucleotide
auagacacacuucucgggg

SEQ ID NO: 885323 - RNA, 19 nt, Artificial Sequence
  Description of Artificial Sequence: Synthetic oligonucleotide
uuaugcaugucgaauuuca

SEQ ID NO: 885324 - RNA, 19 nt, Artificial Sequence
  Description of Artificial Sequence: Synthetic oligonucleotide
aaguauuauggcuaugaaa

SEQ ID NO: 885325 - RNA, 19 nt, Artificial Sequence
  Description of Artificial Sequence: Synthetic oligonucleotide
gauugguuaaccacaaggc

SEQ ID NO: 885326 - RNA, 19 nt, Artificial Sequence
  Description of Artificial Sequence: Synthetic oligonucleotide
cuuaggugaaguucuacag

SEQ ID NO: 885327 - RNA, 19 nt, Artificial Sequence
  Description of Artificial Sequence: Synthetic oligonucleotide
cugaguuuauccuaauaag

SEQ ID NO: 885328 - RNA, 19 nt, Artificial Sequence
  Description of Artificial Sequence: Synthetic oligonucleotide
ugcuaauuauaaucuaggc

SEQ ID NO: 885329 - RNA, 19 nt, Artificial Sequence
  Description of Artificial Sequence: Synthetic oligonucleotide
accauuauaaaagugucug

SEQ ID NO: 885330 - RNA, 19 nt, Artificial Sequence
  Description of Artificial Sequence: Synthetic oligonucleotide
ucuguggacaauuuuagua

SEQ ID NO: 885331 - RNA, 19 nt, Artificial Sequence
  Description of Artificial Sequence: Synthetic oligonucleotide
cuguggacaauuuuaguag

SEQ ID NO: 885332 - RNA, 19 nt, Artificial Sequence
  Description of Artificial Sequence: Synthetic oligonucleotide
ucuguaacaucauucaaua

SEQ ID NO: 885333 - RNA, 19 nt, Artificial Sequence
  Description of Artificial Sequence: Synthetic oligonucleotide
guaccugcuauuucuaagg

SEQ ID NO: 885334 - RNA, 19 nt, Artificial Sequence
  Description of Artificial Sequence: Synthetic oligonucleotide
caggauaagaaguuggcug

SEQ ID NO: 885335 - RNA, 19 nt, Artificial Sequence
  Description of Artificial Sequence: Synthetic oligonucleotide
uccgcugcgaaccuugggg

SEQ ID NO: 885336 - RNA, 19 nt, Artificial Sequence
  Description of Artificial Sequence: Synthetic oligonucleotide
ugaugcauaucagacaggc

SEQ ID NO: 885337 - RNA, 19 nt, Artificial Sequence
  Description of Artificial Sequence: Synthetic oligonucleotide
auaaucuaggcauguucac

SEQ ID NO: 885338 - RNA, 19 nt, Artificial Sequence
  Description of Artificial Sequence: Synthetic oligonucleotide
uguaucguauagucugugg

SEQ ID NO: 885339 - RNA, 19 nt, Artificial Sequence
  Description of Artificial Sequence: Synthetic oligonucleotide
ggugcuuuagcucauagac

SEQ ID NO: 885340 - RNA, 19 nt, Artificial Sequence
  Description of Artificial Sequence: Synthetic oligonucleotide
uauuauggcuaugaaaacu

SEQ ID NO: 885341 - RNA, 19 nt, Artificial Sequence
  Description of Artificial Sequence: Synthetic oligonucleotide
auuucuaaggggcuguaca

SEQ ID NO: 885342 - RNA, 19 nt, Artificial Sequence
  Description of Artificial Sequence: Synthetic oligonucleotide
uuucuaaggggcuguacag

SEQ ID NO: 885343 - RNA, 19 nt, Artificial Sequence
  Description of Artificial Sequence: Synthetic oligonucleotide
uugcuuauaauuugucuga

SEQ ID NO: 885344 - RNA, 19 nt, Artificial Sequence
  Description of Artificial Sequence: Synthetic oligonucleotide
uuaguagcacaucaucaca

SEQ ID NO: 885345 - RNA, 19 nt, Artificial Sequence
  Description of Artificial Sequence: Synthetic oligonucleotide
ugauuugcuuauaauuugu

SEQ ID NO: 885346 - RNA, 19 nt, Artificial Sequence
  Description of Artificial Sequence: Synthetic oligonucleotide
ucauuggcagcaaauuagc

SEQ ID NO: 885347 - RNA, 19 nt, Artificial Sequence
  Description of Artificial Sequence: Synthetic oligonucleotide
ucuuaaauguggacaauau

SEQ ID NO: 885348 - RNA, 19 nt, Artificial Sequence
  Description of Artificial Sequence: Synthetic oligonucleotide
ggcuaugaaaacuguaucg

SEQ ID NO: 885349 - RNA, 19 nt, Artificial Sequence
  Description of Artificial Sequence: Synthetic oligonucleotide
acagaacuuaguugggcac

SEQ ID NO: 885350 - RNA, 19 nt, Artificial Sequence
  Description of Artificial Sequence: Synthetic oligonucleotide
aucuuaccuaaauauagcu

SEQ ID NO: 885351 - RNA, 19 nt, Artificial Sequence
  Description of Artificial Sequence: Synthetic oligonucleotide
uagcuauaaaaucccacca

SEQ ID NO: 885352 - RNA, 19 nt, Artificial Sequence
  Description of Artificial Sequence: Synthetic oligonucleotide
auaucuugcuguucauugg

SEQ ID NO: 885353 - RNA, 19 nt, Artificial Sequence
  Description of Artificial Sequence: Synthetic oligonucleotide
aaagcaugugaacuacacu

SEQ ID NO: 885354 - RNA, 19 nt, Artificial Sequence
  Description of Artificial Sequence: Synthetic oligonucleotide
ugaaugucgacaucucuga

SEQ ID NO: 885355 - RNA, 19 nt, Artificial Sequence
  Description of Artificial Sequence: Synthetic oligonucleotide
uucccuaauagauugguua

SEQ ID NO: 885356 - RNA, 19 nt, Artificial Sequence
  Description of Artificial Sequence: Synthetic oligonucleotide
uguggacaauuuuaguagc

SEQ ID NO: 885357 - RNA, 19 nt, Artificial Sequence
  Description of Artificial Sequence: Synthetic oligonucleotide
ugaguagauagccugcgaa

SEQ ID NO: 885358 - RNA, 19 nt, Artificial Sequence
  Description of Artificial Sequence: Synthetic oligonucleotide
uaagugaucuuaccuaaau

SEQ ID NO: 885359 - RNA, 19 nt, Artificial Sequence
  Description of Artificial Sequence: Synthetic oligonucleotide
ugcauaucagacaggccag

SEQ ID NO: 885360 - RNA, 19 nt, Artificial Sequence
  Description of Artificial Sequence: Synthetic oligonucleotide
uaucguauagucuguggac

SEQ ID NO: 885361 - RNA, 19 nt, Artificial Sequence
  Description of Artificial Sequence: Synthetic oligonucleotide
uggcuauacuguagaaugg

SEQ ID NO: 885362 - RNA, 19 nt, Artificial Sequence
  Description of Artificial Sequence: Synthetic oligonucleotide
uucccuuaggugaaguucu

SEQ ID NO: 885363 - RNA, 19 nt, Artificial Sequence
  Description of Artificial Sequence: Synthetic oligonucleotide
aggauaagaaguuggcugu

SEQ ID NO: 885364 - RNA, 19 nt, Artificial Sequence
  Description of Artificial Sequence: Synthetic oligonucleotide
ccgauaucgaccuugagag

SEQ ID NO: 885365 - RNA, 19 nt, Artificial Sequence
  Description of Artificial Sequence: Synthetic oligonucleotide
uuggucagugaucaaagau

SEQ ID NO: 885366 - RNA, 19 nt, Artificial Sequence
  Description of Artificial Sequence: Synthetic oligonucleotide
auaaugauuugcuuauaau

SEQ ID NO: 885367 - RNA, 19 nt, Artificial Sequence
  Description of Artificial Sequence: Synthetic oligonucleotide
cauugguacaaaacagccc

SEQ ID NO: 885368 - RNA, 19 nt, Artificial Sequence
  Description of Artificial Sequence: Synthetic oligonucleotide
gucgacaucucugaugugg

SEQ ID NO: 885369 - RNA, 19 nt, Artificial Sequence
  Description of Artificial Sequence: Synthetic oligonucleotide
gacuaaguaagauacauuu

SEQ ID NO: 885370 - RNA, 19 nt, Artificial Sequence
  Description of Artificial Sequence: Synthetic oligonucleotide
agcagaauaggacuaagua

SEQ ID NO: 885371 - RNA, 19 nt, Artificial Sequence
  Description of Artificial Sequence: Synthetic oligonucleotide
augcuaauuauaaucuagg

SEQ ID NO: 885372 - RNA, 19 nt, Artificial Sequence
  Description of Artificial Sequence: Synthetic oligonucleotide
ccugcuauuucuaaggggc

SEQ ID NO: 885373 - RNA, 19 nt, Artificial Sequence
  Description of Artificial Sequence: Synthetic oligonucleotide
gugaauuuacuucaugaga

SEQ ID NO: 885374 - RNA, 19 nt, Artificial Sequence
  Description of Artificial Sequence: Synthetic oligonucleotide
auacaagucuguaacauca

SEQ ID NO: 885375 - RNA, 19 nt, Artificial Sequence
  Description of Artificial Sequence: Synthetic oligonucleotide
ugcagaaccaggccuucgg

SEQ ID NO: 885376 - RNA, 19 nt, Artificial Sequence
  Description of Artificial Sequence: Synthetic oligonucleotide
accuaaauauagcugcucu

SEQ ID NO: 885377 - RNA, 19 nt, Artificial Sequence
  Description of Artificial Sequence: Synthetic oligonucleotide
gaucuuaccuaaauauagc

SEQ ID NO: 885378 - RNA, 19 nt, Artificial Sequence
  Description of Artificial Sequence: Synthetic oligonucleotide
guguguguaagguaccugc

SEQ ID NO: 885379 - RNA, 19 nt, Artificial Sequence
  Description of Artificial Sequence: Synthetic oligonucleotide
uacuauguucacauacaga

SEQ ID NO: 885380 - RNA, 19 nt, Artificial Sequence
  Description of Artificial Sequence: Synthetic oligonucleotide
cuuaaauguggacaauauc

SEQ ID NO: 885381 - RNA, 19 nt, Artificial Sequence
  Description of Artificial Sequence: Synthetic oligonucleotide
caauuuuaguagcacauca

SEQ ID NO: 885382 - RNA, 19 nt, Artificial Sequence
  Description of Artificial Sequence: Synthetic oligonucleotide
acaauuuuaguagcacauc

SEQ ID NO: 885383 - RNA, 19 nt, Artificial Sequence
  Description of Artificial Sequence: Synthetic oligonucleotide
uaaguauuauggcuaugaa

SEQ ID NO: 885384 - RNA, 19 nt, Artificial Sequence
  Description of Artificial Sequence: Synthetic oligonucleotide
aguuuauccuaauaagguu

SEQ ID NO: 885385 - RNA, 19 nt, Artificial Sequence
  Description of Artificial Sequence: Synthetic oligonucleotide
gcuaauuauaaucuaggca

SEQ ID NO: 885386 - RNA, 19 nt, Artificial Sequence
  Description of Artificial Sequence: Synthetic oligonucleotide
aaggccaagucuucuuuca

SEQ ID NO: 885387 - RNA, 19 nt, Artificial Sequence
  Description of Artificial Sequence: Synthetic oligonucleotide
agggaaucuucuucagugg

SEQ ID NO: 885388 - RNA, 19 nt, Artificial Sequence
  Description of Artificial Sequence: Synthetic oligonucleotide
uuaccuaaauauagcugcu

SEQ ID NO: 885389 - RNA, 19 nt, Artificial Sequence
  Description of Artificial Sequence: Synthetic oligonucleotide
cuauacuguagaauggaca

SEQ ID NO: 885390 - RNA, 19 nt, Artificial Sequence
  Description of Artificial Sequence: Synthetic oligonucleotide
agacauguuucguccacuc

SEQ ID NO: 885391 - RNA, 19 nt, Artificial Sequence
  Description of Artificial Sequence: Synthetic oligonucleotide
ugaccuauccauacaugcu

SEQ ID NO: 885392 - RNA, 19 nt, Artificial Sequence
  Description of Artificial Sequence: Synthetic oligonucleotide
aagugaucuuaccuaaaua

SEQ ID NO: 885393 - RNA, 19 nt, Artificial Sequence
  Description of Artificial Sequence: Synthetic oligonucleotide
ggguauacaagucuguaac

SEQ ID NO: 885394 - RNA, 19 nt, Artificial Sequence
  Description of Artificial Sequence: Synthetic oligonucleotide
ugaugaacaugugacugug

SEQ ID NO: 885395 - RNA, 19 nt, Artificial Sequence
  Description of Artificial Sequence: Synthetic oligonucleotide
guagcacaucaucacauug

SEQ ID NO: 885396 - RNA, 19 nt, Artificial Sequence
  Description of Artificial Sequence: Synthetic oligonucleotide
gucgaauuucacuaaguga

SEQ ID NO: 885397 - RNA, 19 nt, Artificial Sequence
  Description of Artificial Sequence: Synthetic oligonucleotide
uuuuacugcaucguccagu

SEQ ID NO: 885398 - RNA, 19 nt, Artificial Sequence
  Description of Artificial Sequence: Synthetic oligonucleotide
ugaacuacacuggcuauac

SEQ ID NO: 885399 - RNA, 19 nt, Artificial Sequence
  Description of Artificial Sequence: Synthetic oligonucleotide
uucuaaggggcuguacagg

SEQ ID NO: 885400 - RNA, 19 nt, Artificial Sequence
  Description of Artificial Sequence: Synthetic oligonucleotide
guaucguauagucugugga

SEQ ID NO: 885401 - RNA, 19 nt, Artificial Sequence
  Description of Artificial Sequence: Synthetic oligonucleotide
ucccuaauagauugguuaa

SEQ ID NO: 885402 - RNA, 19 nt, Artificial Sequence
  Description of Artificial Sequence: Synthetic oligonucleotide
ucgacaucucugauguggc

SEQ ID NO: 885403 - RNA, 19 nt, Artificial Sequence
  Description of Artificial Sequence: Synthetic oligonucleotide
uggcuaugaaaacuguauc

SEQ ID NO: 885404 - RNA, 19 nt, Artificial Sequence
  Description of Artificial Sequence: Synthetic oligonucleotide
auggacacaggccauugca

SEQ ID NO: 885405 - RNA, 19 nt, Artificial Sequence
  Description of Artificial Sequence: Synthetic oligonucleotide
ggauucauguccuucagga

SEQ ID NO: 885406 - RNA, 19 nt, Artificial Sequence
  Description of Artificial Sequence: Synthetic oligonucleotide
caagcugacagagcaaggc

SEQ ID NO: 885407 - RNA, 19 nt, Artificial Sequence
  Description of Artificial Sequence: Synthetic oligonucleotide
aaauagcuauaaaauccca

SEQ ID NO: 885408 - RNA, 19 nt, Artificial Sequence
  Description of Artificial Sequence: Synthetic oligonucleotide
uaugcaugucgaauuucac

SEQ ID NO: 885409 - RNA, 19 nt, Artificial Sequence
  Description of Artificial Sequence: Synthetic oligonucleotide
uuucccuuaggugaaguuc

SEQ ID NO: 885410 - RNA, 19 nt, Artificial Sequence
  Description of Artificial Sequence: Synthetic oligonucleotide
cuugaguagauagccugcg

SEQ ID NO: 885411 - RNA, 19 nt, Artificial Sequence
  Description of Artificial Sequence: Synthetic oligonucleotide
uguguguaagguaccugcu

SEQ ID NO: 885412 - RNA, 19 nt, Artificial Sequence
  Description of Artificial Sequence: Synthetic oligonucleotide
ugauaaugugugugguucu

SEQ ID NO: 885413 - RNA, 19 nt, Artificial Sequence
  Description of Artificial Sequence: Synthetic oligonucleotide
uagcagaauaggacuaagu

SEQ ID NO: 885414 - RNA, 19 nt, Artificial Sequence
  Description of Artificial Sequence: Synthetic oligonucleotide
agagccauaaugauuugcu

SEQ ID NO: 885415 - RNA, 19 nt, Artificial Sequence
  Description of Artificial Sequence: Synthetic oligonucleotide
ucucucccacccgauaucg

SEQ ID NO: 885416 - RNA, 19 nt, Artificial Sequence
  Description of Artificial Sequence: Synthetic oligonucleotide
uucguccacucccaggucu

SEQ ID NO: 885417 - RNA, 19 nt, Artificial Sequence
  Description of Artificial Sequence: Synthetic oligonucleotide
guauuauggcuaugaaaac

SEQ ID NO: 885418 - RNA, 19 nt, Artificial Sequence
  Description of Artificial Sequence: Synthetic oligonucleotide
agcaugugaacuacacugg

SEQ ID NO: 885419 - RNA, 19 nt, Artificial Sequence
  Description of Artificial Sequence: Synthetic oligonucleotide
guuugugcagaaccaggcc

SEQ ID NO: 885420 - RNA, 19 nt, Artificial Sequence
  Description of Artificial Sequence: Synthetic oligonucleotide
cauaaugauuugcuuauaa

SEQ ID NO: 885421 - RNA, 19 nt, Artificial Sequence
  Description of Artificial Sequence: Synthetic oligonucleotide
gaguuuauccuaauaaggu

SEQ ID NO: 885422 - RNA, 19 nt, Artificial Sequence
  Description of Artificial Sequence: Synthetic oligonucleotide
gacauguuucguccacucc

SEQ ID NO: 885423 - RNA, 19 nt, Artificial Sequence
  Description of Artificial Sequence: Synthetic oligonucleotide
cuuagcaggcuuauuggca

SEQ ID NO: 885424 - RNA, 19 nt, Artificial Sequence
  Description of Artificial Sequence: Synthetic oligonucleotide
aaacuguaucguauagucu

SEQ ID NO: 885425 - RNA, 19 nt, Artificial Sequence
  Description of Artificial Sequence: Synthetic oligonucleotide
ugaauguaugccagcuuau

SEQ ID NO: 885426 - RNA, 19 nt, Artificial Sequence
  Description of Artificial Sequence: Synthetic oligonucleotide
cagagguugguuuggucag

SEQ ID NO: 885427 - RNA, 19 nt, Artificial Sequence
  Description of Artificial Sequence: Synthetic oligonucleotide
agcuuaugcaugucgaauu

SEQ ID NO: 885428 - RNA, 19 nt, Artificial Sequence
  Description of Artificial Sequence: Synthetic oligonucleotide
ucccaccauuauaaaagug

SEQ ID NO: 885429 - RNA, 19 nt, Artificial Sequence
  Description of Artificial Sequence: Synthetic oligonucleotide
uagauugguuaaccacaag

SEQ ID NO: 885430 - RNA, 19 nt, Artificial Sequence
  Description of Artificial Sequence: Synthetic oligonucleotide
uagacacacuucucggggc

SEQ ID NO: 885431 - RNA, 19 nt, Artificial Sequence
  Description of Artificial Sequence: Synthetic oligonucleotide
ucucugauguggccuuucc

SEQ ID NO: 885432 - RNA, 19 nt, Artificial Sequence
  Description of Artificial Sequence: Synthetic oligonucleotide
gaagguuucugcuguuauc

SEQ ID NO: 885433 - RNA, 19 nt, Artificial Sequence
  Description of Artificial Sequence: Synthetic oligonucleotide
gguaccugcuauuucuaag

SEQ ID NO: 885434 - RNA, 19 nt, Artificial Sequence
  Description of Artificial Sequence: Synthetic oligonucleotide
ucguccaguagguucccag

SEQ ID NO: 885435 - RNA, 19 nt, Artificial Sequence
  Description of Artificial Sequence: Synthetic oligonucleotide
cacacagaacuuaguuggg

SEQ ID NO: 885436 - RNA, 19 nt, Artificial Sequence
  Description of Artificial Sequence: Synthetic oligonucleotide
uccauacaugcuaauuaua

SEQ ID NO: 885437 - RNA, 19 nt, Artificial Sequence
  Description of Artificial Sequence: Synthetic oligonucleotide
auggcuaugaaaacuguau

SEQ ID NO: 885438 - RNA, 19 nt, Artificial Sequence
  Description of Artificial Sequence: Synthetic oligonucleotide
uaucgaccuugagagagcc

SEQ ID NO: 885439 - RNA, 19 nt, Artificial Sequence
  Description of Artificial Sequence: Synthetic oligonucleotide
aucguauagucuguggaca

SEQ ID NO: 885440 - RNA, 19 nt, Artificial Sequence
  Description of Artificial Sequence: Synthetic oligonucleotide
ucccacucggaccaucaca

SEQ ID NO: 885441 - RNA, 19 nt, Artificial Sequence
  Description of Artificial Sequence: Synthetic oligonucleotide
caguuaaguauuauggcua

SEQ ID NO: 885442 - RNA, 19 nt, Artificial Sequence
  Description of Artificial Sequence: Synthetic oligonucleotide
auaucgaccuugagagagc

SEQ ID NO: 885443 - RNA, 19 nt, Artificial Sequence
  Description of Artificial Sequence: Synthetic oligonucleotide
ugcuauuucuaaggggcug

SEQ ID NO: 885444 - RNA, 19 nt, Artificial Sequence
  Description of Artificial Sequence: Synthetic oligonucleotide
aaccacaaggccaagucuu

SEQ ID NO: 885445 - RNA, 19 nt, Artificial Sequence
  Description of Artificial Sequence: Synthetic oligonucleotide
gaccuauccauacaugcua

SEQ ID NO: 885446 - RNA, 19 nt, Artificial Sequence
  Description of Artificial Sequence: Synthetic oligonucleotide
uuaucagaccaggaggcuc

SEQ ID NO: 885447 - RNA, 19 nt, Artificial Sequence
  Description of Artificial Sequence: Synthetic oligonucleotide
auagcagaauaggacuaag

SEQ ID NO: 885448 - RNA, 19 nt, Artificial Sequence
  Description of Artificial Sequence: Synthetic oligonucleotide
auagccugcgaaggucucc

SEQ ID NO: 885449 - RNA, 19 nt, Artificial Sequence
  Description of Artificial Sequence: Synthetic oligonucleotide
ccuaauagauugguuaacc

SEQ ID NO: 885450 - RNA, 19 nt, Artificial Sequence
  Description of Artificial Sequence: Synthetic oligonucleotide
aaaguaccccagagguugg

SEQ ID NO: 885451 - RNA, 19 nt, Artificial Sequence
  Description of Artificial Sequence: Synthetic oligonucleotide
caggcaacauccaaaagua

SEQ ID NO: 885452 - RNA, 19 nt, Artificial Sequence
  Description of Artificial Sequence: Synthetic oligonucleotide
ucguauagucuguggacaa

SEQ ID NO: 885453 - RNA, 19 nt, Artificial Sequence
  Description of Artificial Sequence: Synthetic oligonucleotide
cuguaacaucauucaauac

SEQ ID NO: 885454 - RNA, 19 nt, Artificial Sequence
  Description of Artificial Sequence: Synthetic oligonucleotide
augugaauguaugccagcu

SEQ ID NO: 885455 - RNA, 19 nt, Artificial Sequence
  Description of Artificial Sequence: Synthetic oligonucleotide
gcagaauaggacuaaguaa

SEQ ID NO: 885456 - RNA, 19 nt, Artificial Sequence
  Description of Artificial Sequence: Synthetic oligonucleotide
gaugaaggagaaggcgaag

SEQ ID NO: 885457 - RNA, 19 nt, Artificial Sequence
  Description of Artificial Sequence: Synthetic oligonucleotide
ugugaacuacacuggcuau

SEQ ID NO: 885458 - RNA, 19 nt, Artificial Sequence
  Description of Artificial Sequence: Synthetic oligonucleotide
acaugcuaauuauaaucua

SEQ ID NO: 885459 - RNA, 19 nt, Artificial Sequence
  Description of Artificial Sequence: Synthetic oligonucleotide
aucuaggcauguucaccuc

SEQ ID NO: 885460 - RNA, 19 nt, Artificial Sequence
  Description of Artificial Sequence: Synthetic oligonucleotide
cuacgauccggccaagcuc

SEQ ID NO: 885461 - RNA, 19 nt, Artificial Sequence
  Description of Artificial Sequence: Synthetic oligonucleotide
agugcacaucauuuaucca

SEQ ID NO: 885462 - RNA, 19 nt, Artificial Sequence
  Description of Artificial Sequence: Synthetic oligonucleotide
agagccgcuccacacagaa

SEQ ID NO: 885463 - RNA, 19 nt, Artificial Sequence
  Description of Artificial Sequence: Synthetic oligonucleotide
uuucccuaauagauugguu

SEQ ID NO: 885464 - RNA, 19 nt, Artificial Sequence
  Description of Artificial Sequence: Synthetic oligonucleotide
uacaagucuguaacaucau

SEQ ID NO: 885465 - RNA, 19 nt, Artificial Sequence
  Description of Artificial Sequence: Synthetic oligonucleotide
cacuaagugaucuuaccua

SEQ ID NO: 885466 - RNA, 19 nt, Artificial Sequence
  Description of Artificial Sequence: Synthetic oligonucleotide
cugaugcauaucagacagg

SEQ ID NO: 885467 - RNA, 19 nt, Artificial Sequence
  Description of Artificial Sequence: Synthetic oligonucleotide
caggauuggugauuugcuc

SEQ ID NO: 885468 - RNA, 19 nt, Artificial Sequence
  Description of Artificial Sequence: Synthetic oligonucleotide
agugcuacuuuugagccuu

SEQ ID NO: 885469 - RNA, 19 nt, Artificial Sequence
  Description of Artificial Sequence: Synthetic oligonucleotide
uagaauggacacaggccau

SEQ ID NO: 885470 - RNA, 19 nt, Artificial Sequence
  Description of Artificial Sequence: Synthetic oligonucleotide
agacacacuucucggggcu

SEQ ID NO: 885471 - RNA, 19 nt, Artificial Sequence
  Description of Artificial Sequence: Synthetic oligonucleotide
cucggcaccaggauaagaa

SEQ ID NO: 885472 - RNA, 19 nt, Artificial Sequence
  Description of Artificial Sequence: Synthetic oligonucleotide
uagauagccugcgaagguc

SEQ ID NO: 885473 - RNA, 19 nt, Artificial Sequence
  Description of Artificial Sequence: Synthetic oligonucleotide
cagagccauaaugauuugc

SEQ ID NO: 885474 - RNA, 19 nt, Artificial Sequence
  Description of Artificial Sequence: Synthetic oligonucleotide
cucccacccgauaucgacc

SEQ ID NO: 885475 - RNA, 19 nt, Artificial Sequence
  Description of Artificial Sequence: Synthetic oligonucleotide
auaaugugugugguucuca

SEQ ID NO: 885476 - RNA, 19 nt, Artificial Sequence
  Description of Artificial Sequence: Synthetic oligonucleotide
agaauaggacuaaguaaga

SEQ ID NO: 885477 - RNA, 19 nt, Artificial Sequence
  Description of Artificial Sequence: Synthetic oligonucleotide
guugaccuauccauacaug

SEQ ID NO: 885478 - RNA, 19 nt, Artificial Sequence
  Description of Artificial Sequence: Synthetic oligonucleotide
caaagcugaugaacaugug

SEQ ID NO: 885479 - RNA, 19 nt, Artificial Sequence
  Description of Artificial Sequence: Synthetic oligonucleotide
uagugcuacuuuugagccu

SEQ ID NO: 885480 - RNA, 19 nt, Artificial Sequence
  Description of Artificial Sequence: Synthetic oligonucleotide
agaccaccagguaauuauc

SEQ ID NO: 885481 - RNA, 19 nt, Artificial Sequence
  Description of Artificial Sequence: Synthetic oligonucleotide
ccauacaugcuaauuauaa

SEQ ID NO: 885482 - RNA, 19 nt, Artificial Sequence
  Description of Artificial Sequence: Synthetic oligonucleotide
uaccuaaauauagcugcuc

SEQ ID NO: 885483 - RNA, 19 nt, Artificial Sequence
  Description of Artificial Sequence: Synthetic oligonucleotide
uucucucccacccgauauc

SEQ ID NO: 885484 - RNA, 19 nt, Artificial Sequence
  Description of Artificial Sequence: Synthetic oligonucleotide
cauguuucguccacuccca

SEQ ID NO: 885485 - RNA, 19 nt, Artificial Sequence
  Description of Artificial Sequence: Synthetic oligonucleotide
ugcuuauaauuugucugau

SEQ ID NO: 885486 - RNA, 19 nt, Artificial Sequence
  Description of Artificial Sequence: Synthetic oligonucleotide
accuggcuacgauccggcc

SEQ ID NO: 885487 - RNA, 19 nt, Artificial Sequence
  Description of Artificial Sequence: Synthetic oligonucleotide
cacgggaggaucugcagca

SEQ ID NO: 885488 - RNA, 19 nt, Artificial Sequence
  Description of Artificial Sequence: Synthetic oligonucleotide
gagguugguuuggucagug

SEQ ID NO: 885489 - RNA, 19 nt, Artificial Sequence
  Description of Artificial Sequence: Synthetic oligonucleotide
caauacagugaauuuacuu

SEQ ID NO: 885490 - RNA, 19 nt, Artificial Sequence
  Description of Artificial Sequence: Synthetic oligonucleotide
ggagacggggcagaaagug

SEQ ID NO: 885491 - RNA, 19 nt, Artificial Sequence
  Description of Artificial Sequence: Synthetic oligonucleotide
ggaggcuccacaccauacc

SEQ ID NO: 885492 - RNA, 19 nt, Artificial Sequence
  Description of Artificial Sequence: Synthetic oligonucleotide
ccaaaaguaccccagaggu

SEQ ID NO: 885493 - RNA, 19 nt, Artificial Sequence
  Description of Artificial Sequence: Synthetic oligonucleotide
agcccuguccuggguauac

SEQ ID NO: 885494 - RNA, 19 nt, Artificial Sequence
  Description of Artificial Sequence: Synthetic oligonucleotide
acuguaucguauagucugu

SEQ ID NO: 885495 - RNA, 19 nt, Artificial Sequence
  Description of Artificial Sequence: Synthetic oligonucleotide
acuucucggggcuguuugu

SEQ ID NO: 885496 - RNA, 19 nt, Artificial Sequence
  Description of Artificial Sequence: Synthetic oligonucleotide
gaaguuggcuguguugucu

SEQ ID NO: 885497 - RNA, 19 nt, Artificial Sequence
  Description of Artificial Sequence: Synthetic oligonucleotide
agguaccugcuauuucuaa

SEQ ID NO: 885498 - RNA, 19 nt, Artificial Sequence
  Description of Artificial Sequence: Synthetic oligonucleotide
uccggccaagcucuagcaa

SEQ ID NO: 885499 - RNA, 19 nt, Artificial Sequence
  Description of Artificial Sequence: Synthetic oligonucleotide
guaugccagcuuaugcaug

SEQ ID NO: 885500 - RNA, 19 nt, Artificial Sequence
  Description of Artificial Sequence: Synthetic oligonucleotide
augugacugugcagucugc

SEQ ID NO: 885501 - RNA, 19 nt, Artificial Sequence
  Description of Artificial Sequence: Synthetic oligonucleotide
cuggcuacgauccggccaa

SEQ ID NO: 885502 - RNA, 19 nt, Artificial Sequence
  Description of Artificial Sequence: Synthetic oligonucleotide
guagauagccugcgaaggu

SEQ ID NO: 885503 - RNA, 19 nt, Artificial Sequence
  Description of Artificial Sequence: Synthetic oligonucleotide
ccaguuaaguauuauggcu

SEQ ID NO: 885504 - RNA, 19 nt, Artificial Sequence
  Description of Artificial Sequence: Synthetic oligonucleotide
ccuuaggugaaguucuaca

SEQ ID NO: 885505 - RNA, 19 nt, Artificial Sequence
  Description of Artificial Sequence: Synthetic oligonucleotide
cccgauaucgaccuugaga

SEQ ID NO: 885506 - RNA, 19 nt, Artificial Sequence
  Description of Artificial Sequence: Synthetic oligonucleotide
gaacuuaguugggcacuug

SEQ ID NO: 885507 - RNA, 19 nt, Artificial Sequence
  Description of Artificial Sequence: Synthetic oligonucleotide
ggcuauacuguagaaugga

SEQ ID NO: 885508 - RNA, 19 nt, Artificial Sequence
  Description of Artificial Sequence: Synthetic oligonucleotide
agaacuuaguugggcacuu

SEQ ID NO: 885509 - RNA, 19 nt, Artificial Sequence
  Description of Artificial Sequence: Synthetic oligonucleotide
ggccuuuccaguuaaguau

SEQ ID NO: 885510 - RNA, 19 nt, Artificial Sequence
  Description of Artificial Sequence: Synthetic oligonucleotide
gcuauacuguagaauggac

SEQ ID NO: 885511 - RNA, 19 nt, Artificial Sequence
  Description of Artificial Sequence: Synthetic oligonucleotide
gcuugaguagauagccugc

SEQ ID NO: 885512 - RNA, 19 nt, Artificial Sequence
  Description of Artificial Sequence: Synthetic oligonucleotide
ucucggcaccaggauaaga

SEQ ID NO: 885513 - RNA, 19 nt, Artificial Sequence
  Description of Artificial Sequence: Synthetic oligonucleotide
accuauccauacaugcuaa

SEQ ID NO: 885514 - RNA, 19 nt, Artificial Sequence
  Description of Artificial Sequence: Synthetic oligonucleotide
guccgcugcgaaccuuggg

SEQ ID NO: 885515 - RNA, 19 nt, Artificial Sequence
  Description of Artificial Sequence: Synthetic oligonucleotide
ccuguccuggguauacaag

SEQ ID NO: 885516 - RNA, 19 nt, Artificial Sequence
  Description of Artificial Sequence: Synthetic oligonucleotide
ugucgacaucucugaugug

SEQ ID NO: 885517 - RNA, 19 nt, Artificial Sequence
  Description of Artificial Sequence: Synthetic oligonucleotide
cauagacauacagcaggca

SEQ ID NO: 885518 - RNA, 19 nt, Artificial Sequence
  Description of Artificial Sequence: Synthetic oligonucleotide
gacacacuucucggggcug

SEQ ID NO: 885519 - RNA, 19 nt, Artificial Sequence
  Description of Artificial Sequence: Synthetic oligonucleotide
cuguacaggcaacauccaa

SEQ ID NO: 885520 - RNA, 19 nt, Artificial Sequence
  Description of Artificial Sequence: Synthetic oligonucleotide
acccgauaucgaccuugag

SEQ ID NO: 885521 - RNA, 19 nt, Artificial Sequence
  Description of Artificial Sequence: Synthetic oligonucleotide
gcauaucagacaggccagg

SEQ ID NO: 885522 - RNA, 19 nt, Artificial Sequence
  Description of Artificial Sequence: Synthetic oligonucleotide
cauuggcagcaaauuagcu

SEQ ID NO: 885523 - RNA, 19 nt, Artificial Sequence
  Description of Artificial Sequence: Synthetic oligonucleotide
ucccuuaggugaaguucua

SEQ ID NO: 885524 - RNA, 19 nt, Artificial Sequence
  Description of Artificial Sequence: Synthetic oligonucleotide
gauagccugcgaaggucuc

SEQ ID NO: 885525 - RNA, 19 nt, Artificial Sequence
  Description of Artificial Sequence: Synthetic oligonucleotide
acaccauaccuggcuacga

SEQ ID NO: 885526 - RNA, 19 nt, Artificial Sequence
  Description of Artificial Sequence: Synthetic oligonucleotide
gcuguucauugguacaaaa

SEQ ID NO: 885527 - RNA, 19 nt, Artificial Sequence
  Description of Artificial Sequence: Synthetic oligonucleotide
agagguugguuuggucagu

SEQ ID NO: 885528 - RNA, 19 nt, Artificial Sequence
  Description of Artificial Sequence: Synthetic oligonucleotide
gggugcuuuagcucauaga

SEQ ID NO: 885529 - RNA, 19 nt, Artificial Sequence
  Description of Artificial Sequence: Synthetic oligonucleotide
gugaacuacacuggcuaua

SEQ ID NO: 885530 - RNA, 19 nt, Artificial Sequence
  Description of Artificial Sequence: Synthetic oligonucleotide
ggucucggcaccaggauaa

SEQ ID NO: 885531 - RNA, 19 nt, Artificial Sequence
  Description of Artificial Sequence: Synthetic oligonucleotide
cuggguauacaagucugua

SEQ ID NO: 885532 - RNA, 19 nt, Artificial Sequence
  Description of Artificial Sequence: Synthetic oligonucleotide
cacccgauaucgaccuuga

SEQ ID NO: 885533 - RNA, 19 nt, Artificial Sequence
  Description of Artificial Sequence: Synthetic oligonucleotide
cuauccauacaugcuaauu

SEQ ID NO: 885534 - RNA, 19 nt, Artificial Sequence
  Description of Artificial Sequence: Synthetic oligonucleotide
ugcuacuuuugagccuuuu

SEQ ID NO: 885535 - RNA, 19 nt, Artificial Sequence
  Description of Artificial Sequence: Synthetic oligonucleotide
ccgcugcgaaccuuggggc

SEQ ID NO: 885536 - RNA, 19 nt, Artificial Sequence
  Description of Artificial Sequence: Synthetic oligonucleotide
gcuacgauccggccaagcu

SEQ ID NO: 885537 - RNA, 19 nt, Artificial Sequence
  Description of Artificial Sequence: Synthetic oligonucleotide
caaaaguaccccagagguu

SEQ ID NO: 885538 - RNA, 19 nt, Artificial Sequence
  Description of Artificial Sequence: Synthetic oligonucleotide
cccuaauagauugguuaac

SEQ ID NO: 885539 - RNA, 19 nt, Artificial Sequence
  Description of Artificial Sequence: Synthetic oligonucleotide
cauccacacgggaggaucu

SEQ ID NO: 885540 - RNA, 19 nt, Artificial Sequence
  Description of Artificial Sequence: Synthetic oligonucleotide
cugcuauuucuaaggggcu

SEQ ID NO: 885541 - RNA, 19 nt, Artificial Sequence
  Description of Artificial Sequence: Synthetic oligonucleotide
cagaacuuaguugggcacu

SEQ ID NO: 885542 - RNA, 19 nt, Artificial Sequence
  Description of Artificial Sequence: Synthetic oligonucleotide
ucccaggucucggcaccag

SEQ ID NO: 885543 - RNA, 19 nt, Artificial Sequence
  Description of Artificial Sequence: Synthetic oligonucleotide
guaccccagagguugguuu

SEQ ID NO: 885544 - RNA, 19 nt, Artificial Sequence
  Description of Artificial Sequence: Synthetic oligonucleotide
ccagugaaugucgacaucu

SEQ ID NO: 885545 - RNA, 19 nt, Artificial Sequence
  Description of Artificial Sequence: Synthetic oligonucleotide
ucagaccaggaggcuccac

SEQ ID NO: 885546 - RNA, 19 nt, Artificial Sequence
  Description of Artificial Sequence: Synthetic oligonucleotide
ccacccgauaucgaccuug

SEQ ID NO: 885547 - RNA, 19 nt, Artificial Sequence
  Description of Artificial Sequence: Synthetic oligonucleotide
gcuauuucuaaggggcugu

SEQ ID NO: 885548 - RNA, 19 nt, Artificial Sequence
  Description of Artificial Sequence: Synthetic oligonucleotide
gcuuaugcaugucgaauuu

SEQ ID NO: 885549 - RNA, 19 nt, Artificial Sequence
  Description of Artificial Sequence: Synthetic oligonucleotide
ccuggcuacgauccggcca

SEQ ID NO: 885550 - RNA, 19 nt, Artificial Sequence
  Description of Artificial Sequence: Synthetic oligonucleotide
ggcuguacugaugcauauc

SEQ ID NO: 885551 - RNA, 19 nt, Artificial Sequence
  Description of Artificial Sequence: Synthetic oligonucleotide
gguuaaccacaaggccaag

SEQ ID NO: 885552 - RNA, 19 nt, Artificial Sequence
  Description of Artificial Sequence: Synthetic oligonucleotide
ccggccaagcucuagcaaa

SEQ ID NO: 885553 - RNA, 19 nt, Artificial Sequence
  Description of Artificial Sequence: Synthetic oligonucleotide
cagcuuaugcaugucgaau

SEQ ID NO: 885554 - RNA, 19 nt, Artificial Sequence
  Description of Artificial Sequence: Synthetic oligonucleotide
gcagagaccaccagguaau

SEQ ID NO: 885555 - RNA, 19 nt, Artificial Sequence
  Description of Artificial Sequence: Synthetic oligonucleotide
gguccgcugcgaaccuugg

SEQ ID NO: 885556 - RNA, 19 nt, Artificial Sequence
  Description of Artificial Sequence: Synthetic oligonucleotide
cccuuaggugaaguucuac

SEQ ID NO: 885557 - RNA, 19 nt, Artificial Sequence
  Description of Artificial Sequence: Synthetic oligonucleotide
ggcuacgauccggccaagc

SEQ ID NO: 885558 - RNA, 19 nt, Artificial Sequence
  Description of Artificial Sequence: Synthetic oligonucleotide
uggcuacgauccggccaag

SEQ ID NO: 885559 - RNA, 19 nt, Artificial Sequence
  Description of Artificial Sequence: Synthetic oligonucleotide
caccauaccuggcuacgau

SEQ ID NO: 885560 - RNA, 19 nt, Artificial Sequence
  Description of Artificial Sequence: Synthetic oligonucleotide
ugcgaaccuuggggcucag

SEQ ID NO: 885561 - RNA, 19 nt, Artificial Sequence
  Description of Artificial Sequence: Synthetic oligonucleotide
ccacacgggaggaucugca

SEQ ID NO: 885562 - RNA, 19 nt, Artificial Sequence
  Description of Artificial Sequence: Synthetic oligonucleotide
caggcuuauuggcauccau

SEQ ID NO: 885563 - RNA, 19 nt, Artificial Sequence
  Description of Artificial Sequence: Synthetic oligonucleotide
gcacuugcagggaggaucu

SEQ ID NO: 885564 - RNA, 19 nt, Artificial Sequence
  Description of Artificial Sequence: Synthetic oligonucleotide
ccaggauaagaaguuggcu

SEQ ID NO: 885565 - RNA, 19 nt, Artificial Sequence
  Description of Artificial Sequence: Synthetic oligonucleotide
ccuuuccaguuaaguauua

SEQ ID NO: 885566 - RNA, 19 nt, Artificial Sequence
  Description of Artificial Sequence: Synthetic oligonucleotide
gucagugaucaaagaugau

SEQ ID NO: 885567 - RNA, 19 nt, Artificial Sequence
  Description of Artificial Sequence: Synthetic oligonucleotide
caauggcugcacugaguuu

SEQ ID NO: 885568 - RNA, 19 nt, Artificial Sequence
  Description of Artificial Sequence: Synthetic oligonucleotide
gccuuuccaguuaaguauu

SEQ ID NO: 885569 - RNA, 19 nt, Artificial Sequence
  Description of Artificial Sequence: Synthetic oligonucleotide
cgauaucgaccuugagaga

SEQ ID NO: 885570 - RNA, 19 nt, Artificial Sequence
  Description of Artificial Sequence: Synthetic oligonucleotide
cagacaggccagguccgcu

SEQ ID NO: 885571 - RNA, 19 nt, Artificial Sequence
  Description of Artificial Sequence: Synthetic oligonucleotide
ccauaaugauuugcuuaua

SEQ ID NO: 885572 - RNA, 19 nt, Artificial Sequence
  Description of Artificial Sequence: Synthetic oligonucleotide
ggcagcaaauuagcuucau

SEQ ID NO: 885573 - RNA, 19 nt, Artificial Sequence
  Description of Artificial Sequence: Synthetic oligonucleotide
acgauccggccaagcucua

SEQ ID NO: 885574 - RNA, 19 nt, Artificial Sequence
  Description of Artificial Sequence: Synthetic oligonucleotide
cagagaccaccagguaauu

SEQ ID NO: 885575 - RNA, 19 nt, Artificial Sequence
  Description of Artificial Sequence: Synthetic oligonucleotide
cguauagucuguggacaau

SEQ ID NO: 885576 - RNA, 19 nt, Artificial Sequence
  Description of Artificial Sequence: Synthetic oligonucleotide
cacacuucucggggcuguu

SEQ ID NO: 885577 - RNA, 19 nt, Artificial Sequence
  Description of Artificial Sequence: Synthetic oligonucleotide
cgaccuugagagagccgcu

SEQ ID NO: 885578 - RNA, 19 nt, Artificial Sequence
  Description of Artificial Sequence: Synthetic oligonucleotide
cagguccgcugcgaaccuu

SEQ ID NO: 885579 - RNA, 19 nt, Artificial Sequence
  Description of Artificial Sequence: Synthetic oligonucleotide
gggcacuugcagggaggau

SEQ ID NO: 885580 - RNA, 19 nt, Artificial Sequence
  Description of Artificial Sequence: Synthetic oligonucleotide
auaaucuauauacaagccc

SEQ ID NO: 885581 - RNA, 19 nt, Artificial Sequence
  Description of Artificial Sequence: Synthetic oligonucleotide
uuuauaaucuauauacaag

SEQ ID NO: 885582 - RNA, 19 nt, Artificial Sequence
  Description of Artificial Sequence: Synthetic oligonucleotide
uagauuguggcucaguggg

SEQ ID NO: 885583 - RNA, 19 nt, Artificial Sequence
  Description of Artificial Sequence: Synthetic oligonucleotide
uccgagaugacccaggacc

SEQ ID NO: 885584 - RNA, 19 nt, Artificial Sequence
  Description of Artificial Sequence: Synthetic oligonucleotide
uguaacugagagucgaugg

SEQ ID NO: 885585 - RNA, 19 nt, Artificial Sequence
  Description of Artificial Sequence: Synthetic oligonucleotide
aauacuccgcuguaagugg

SEQ ID NO: 885586 - RNA, 19 nt, Artificial Sequence
  Description of Artificial Sequence: Synthetic oligonucleotide
uuuaaagugucuccuacca

SEQ ID NO: 885587 - RNA, 19 nt, Artificial Sequence
  Description of Artificial Sequence: Synthetic oligonucleotide
aaggcuucggcauccagcg

SEQ ID NO: 885588 - RNA, 19 nt, Artificial Sequence
  Description of Artificial Sequence: Synthetic oligonucleotide
aacccaggcucuuagauug

SEQ ID NO: 885589 - RNA, 19 nt, Artificial Sequence
  Description of Artificial Sequence: Synthetic oligonucleotide
caacuugagagccaggucg

SEQ ID NO: 885590 - RNA, 19 nt, Artificial Sequence
  Description of Artificial Sequence: Synthetic oligonucleotide
ucuauauacaagccccggg

SEQ ID NO: 885591 - RNA, 19 nt, Artificial Sequence
  Description of Artificial Sequence: Synthetic oligonucleotide
guugggauguaacugagag

SEQ ID NO: 885592 - RNA, 19 nt, Artificial Sequence
  Description of Artificial Sequence: Synthetic oligonucleotide
ucuccuaguagguucagag

SEQ ID NO: 885593 - RNA, 19 nt, Artificial Sequence
  Description of Artificial Sequence: Synthetic oligonucleotide
cuauauacaagccccgggg

SEQ ID NO: 885594 - RNA, 19 nt, Artificial Sequence
  Description of Artificial Sequence: Synthetic oligonucleotide
uuagauuguggcucagugg

SEQ ID NO: 885595 - RNA, 19 nt, Artificial Sequence
  Description of Artificial Sequence: Synthetic oligonucleotide
uaaagugucuccuaccacu

SEQ ID NO: 885596 - RNA, 19 nt, Artificial Sequence
  Description of Artificial Sequence: Synthetic oligonucleotide
ugugcuugccacauccucg

SEQ ID NO: 885597 - RNA, 19 nt, Artificial Sequence
  Description of Artificial Sequence: Synthetic oligonucleotide
aaggcaagacccgaguagc

SEQ ID NO: 885598 - RNA, 19 nt, Artificial Sequence
  Description of Artificial Sequence: Synthetic oligonucleotide
auaggcgcugaccugaagg

SEQ ID NO: 885599 - RNA, 19 nt, Artificial Sequence
  Description of Artificial Sequence: Synthetic oligonucleotide
cugaguucggaauacuccg

SEQ ID NO: 885600 - RNA, 19 nt, Artificial Sequence
  Description of Artificial Sequence: Synthetic oligonucleotide
uauucaagggugagggucc

SEQ ID NO: 885601 - RNA, 19 nt, Artificial Sequence
  Description of Artificial Sequence: Synthetic oligonucleotide
cuuuaguucuacugggugc

SEQ ID NO: 885602 - RNA, 19 nt, Artificial Sequence
  Description of Artificial Sequence: Synthetic oligonucleotide
ucuccuaccacuaggcaca

SEQ ID NO: 885603 - RNA, 19 nt, Artificial Sequence
  Description of Artificial Sequence: Synthetic oligonucleotide
uuuaacaaacggccccagg

SEQ ID NO: 885604 - RNA, 19 nt, Artificial Sequence
  Description of Artificial Sequence: Synthetic oligonucleotide
gaauacuccgcuguaagug

SEQ ID NO: 885605 - RNA, 19 nt, Artificial Sequence
  Description of Artificial Sequence: Synthetic oligonucleotide
gaaggcaagacccgaguag

SEQ ID NO: 885606 - RNA, 19 nt, Artificial Sequence
  Description of Artificial Sequence: Synthetic oligonucleotide
gauucuaccacagggagga

SEQ ID NO: 885607 - RNA, 19 nt, Artificial Sequence
  Description of Artificial Sequence: Synthetic oligonucleotide
gccaaacucaacuugagag

SEQ ID NO: 885608 - RNA, 19 nt, Artificial Sequence
  Description of Artificial Sequence: Synthetic oligonucleotide
cuuagauuguggcucagug

SEQ ID NO: 885609 - RNA, 19 nt, Artificial Sequence
  Description of Artificial Sequence: Synthetic oligonucleotide
uuuaguucuacugggugca

SEQ ID NO: 885610 - RNA, 19 nt, Artificial Sequence
  Description of Artificial Sequence: Synthetic oligonucleotide
ugaagcaagggugugucag

SEQ ID NO: 885611 - RNA, 19 nt, Artificial Sequence
  Description of Artificial Sequence: Synthetic oligonucleotide
agacccacaaccccucccc

SEQ ID NO: 885612 - RNA, 19 nt, Artificial Sequence
  Description of Artificial Sequence: Synthetic oligonucleotide
aaucugaaggggauggcag

SEQ ID NO: 885613 - RNA, 19 nt, Artificial Sequence
  Description of Artificial Sequence: Synthetic oligonucleotide
augggaacggccucugugg

SEQ ID NO: 885614 - RNA, 19 nt, Artificial Sequence
  Description of Artificial Sequence: Synthetic oligonucleotide
cugcgauucuaccacaggg

SEQ ID NO: 885615 - RNA, 19 nt, Artificial Sequence
  Description of Artificial Sequence: Synthetic oligonucleotide
cuuucggugccuaugggac

SEQ ID NO: 885616 - RNA, 19 nt, Artificial Sequence
  Description of Artificial Sequence: Synthetic oligonucleotide
uuccgauaauccuggaaag

SEQ ID NO: 885617 - RNA, 19 nt, Artificial Sequence
  Description of Artificial Sequence: Synthetic oligonucleotide
ugcgcugugaucuuucggu

SEQ ID NO: 885618 - RNA, 19 nt, Artificial Sequence
  Description of Artificial Sequence: Synthetic oligonucleotide
cugagaaucuccacucagg

SEQ ID NO: 885619 - RNA, 19 nt, Artificial Sequence
  Description of Artificial Sequence: Synthetic oligonucleotide
uucggggaggcccuucucg

SEQ ID NO: 885620 - RNA, 19 nt, Artificial Sequence
  Description of Artificial Sequence: Synthetic oligonucleotide
ugcgauucuaccacaggga

SEQ ID NO: 885621 - RNA, 19 nt, Artificial Sequence
  Description of Artificial Sequence: Synthetic oligonucleotide
aggcugguaacucuuucgg

SEQ ID NO: 885622 - RNA, 19 nt, Artificial Sequence
  Description of Artificial Sequence: Synthetic oligonucleotide
uugagacgggaacugagac

SEQ ID NO: 885623 - RNA, 19 nt, Artificial Sequence
  Description of Artificial Sequence: Synthetic oligonucleotide
guaacugagagucgauggc

SEQ ID NO: 885624 - RNA, 19 nt, Artificial Sequence
  Description of Artificial Sequence: Synthetic oligonucleotide
gaagcaagggugugucagg

SEQ ID NO: 885625 - RNA, 19 nt, Artificial Sequence
  Description of Artificial Sequence: Synthetic oligonucleotide
ucuuucggugccuauggga

SEQ ID NO: 885626 - RNA, 19 nt, Artificial Sequence
  Description of Artificial Sequence: Synthetic oligonucleotide
gagacgggaacugagacca

SEQ ID NO: 885627 - RNA, 19 nt, Artificial Sequence
  Description of Artificial Sequence: Synthetic oligonucleotide
uccgauaauccuggaaagg

SEQ ID NO: 885628 - RNA, 19 nt, Artificial Sequence
  Description of Artificial Sequence: Synthetic oligonucleotide
uuaaagugucuccuaccac

SEQ ID NO: 885629 - RNA, 19 nt, Artificial Sequence
  Description of Artificial Sequence: Synthetic oligonucleotide
gaggaguccgagaugaccc

SEQ ID NO: 885630 - RNA, 19 nt, Artificial Sequence
  Description of Artificial Sequence: Synthetic oligonucleotide
uuccaguuggaggaguccg

SEQ ID NO: 885631 - RNA, 19 nt, Artificial Sequence
  Description of Artificial Sequence: Synthetic oligonucleotide
caggcucuuagauuguggc

SEQ ID NO: 885632 - RNA, 19 nt, Artificial Sequence
  Description of Artificial Sequence: Synthetic oligonucleotide
aguucuacugggugcagcu

SEQ ID NO: 885633 - RNA, 19 nt, Artificial Sequence
  Description of Artificial Sequence: Synthetic oligonucleotide
aacaaacggccccagggau

SEQ ID NO: 885634 - RNA, 19 nt, Artificial Sequence
  Description of Artificial Sequence: Synthetic oligonucleotide
ugagacgggaacugagacc

SEQ ID NO: 885635 - RNA, 19 nt, Artificial Sequence
  Description of Artificial Sequence: Synthetic oligonucleotide
cuguacuggugcaaugagg

SEQ ID NO: 885636 - RNA, 19 nt, Artificial Sequence
  Description of Artificial Sequence: Synthetic oligonucleotide
aggucaaugcgcugaguuc

SEQ ID NO: 885637 - RNA, 19 nt, Artificial Sequence
  Description of Artificial Sequence: Synthetic oligonucleotide
uggcguaccugaagcaagg

SEQ ID NO: 885638 - RNA, 19 nt, Artificial Sequence
  Description of Artificial Sequence: Synthetic oligonucleotide
gauauaggcgcugaccuga

SEQ ID NO: 885639 - RNA, 19 nt, Artificial Sequence
  Description of Artificial Sequence: Synthetic oligonucleotide
cuuccgauaauccuggaaa

SEQ ID NO: 885640 - RNA, 19 nt, Artificial Sequence
  Description of Artificial Sequence: Synthetic oligonucleotide
uugagagcuaccccagaga

SEQ ID NO: 885641 - RNA, 19 nt, Artificial Sequence
  Description of Artificial Sequence: Synthetic oligonucleotide
gaagagaagaggggaagug

SEQ ID NO: 885642 - RNA, 19 nt, Artificial Sequence
  Description of Artificial Sequence: Synthetic oligonucleotide
uuucccaaggcuucggcau

SEQ ID NO: 885643 - RNA, 19 nt, Artificial Sequence
  Description of Artificial Sequence: Synthetic oligonucleotide
ugaguucggaauacuccgc

SEQ ID NO: 885644 - RNA, 19 nt, Artificial Sequence
  Description of Artificial Sequence: Synthetic oligonucleotide
ucggcuuuguggcauuaug

SEQ ID NO: 885645 - RNA, 19 nt, Artificial Sequence
  Description of Artificial Sequence: Synthetic oligonucleotide
ugaccugaagggcugggcu

SEQ ID NO: 885646 - RNA, 19 nt, Artificial Sequence
  Description of Artificial Sequence: Synthetic oligonucleotide
cagaugaaggcaagacccg

SEQ ID NO: 885647 - RNA, 19 nt, Artificial Sequence
  Description of Artificial Sequence: Synthetic oligonucleotide
ggucaaugcgcugaguucg

SEQ ID NO: 885648 - RNA, 19 nt, Artificial Sequence
  Description of Artificial Sequence: Synthetic oligonucleotide
aucuauauacaagccccgg

SEQ ID NO: 885649 - RNA, 19 nt, Artificial Sequence
  Description of Artificial Sequence: Synthetic oligonucleotide
aagggugugucagguaaag

SEQ ID NO: 885650 - RNA, 19 nt, Artificial Sequence
  Description of Artificial Sequence: Synthetic oligonucleotide
accccuuaaguccuccauc

SEQ ID NO: 885651 - RNA, 19 nt, Artificial Sequence
  Description of Artificial Sequence: Synthetic oligonucleotide
aacucccucagcggggugg

SEQ ID NO: 885652 - RNA, 19 nt, Artificial Sequence
  Description of Artificial Sequence: Synthetic oligonucleotide
gucuccuaccacuaggcac

SEQ ID NO: 885653 - RNA, 19 nt, Artificial Sequence
  Description of Artificial Sequence: Synthetic oligonucleotide
uucucgagaagguggcccc

SEQ ID NO: 885654 - RNA, 19 nt, Artificial Sequence
  Description of Artificial Sequence: Synthetic oligonucleotide
agcuaccccagagagcagc

SEQ ID NO: 885655 - RNA, 19 nt, Artificial Sequence
  Description of Artificial Sequence: Synthetic oligonucleotide
ugaucuuucggugccuaug

SEQ ID NO: 885656 - RNA, 19 nt, Artificial Sequence
  Description of Artificial Sequence: Synthetic oligonucleotide
ggcauuauguaaacggucc

SEQ ID NO: 885657 - RNA, 19 nt, Artificial Sequence
  Description of Artificial Sequence: Synthetic oligonucleotide
ugucaacucuuucucuccu

SEQ ID NO: 885658 - RNA, 19 nt, Artificial Sequence
  Description of Artificial Sequence: Synthetic oligonucleotide
gaugaaggcaagacccgag

SEQ ID NO: 885659 - RNA, 19 nt, Artificial Sequence
  Description of Artificial Sequence: Synthetic oligonucleotide
aggacggaagccuccacug

SEQ ID NO: 885660 - RNA, 19 nt, Artificial Sequence
  Description of Artificial Sequence: Synthetic oligonucleotide
gaguagaggaaggacggug

SEQ ID NO: 885661 - RNA, 19 nt, Artificial Sequence
  Description of Artificial Sequence: Synthetic oligonucleotide
ugugcgcugugaucuuucg

SEQ ID NO: 885662 - RNA, 19 nt, Artificial Sequence
  Description of Artificial Sequence: Synthetic oligonucleotide
uccgcuguaaguggaagga

SEQ ID NO: 885663 - RNA, 19 nt, Artificial Sequence
  Description of Artificial Sequence: Synthetic oligonucleotide
gugccuaugggaccagggg

SEQ ID NO: 885664 - RNA, 19 nt, Artificial Sequence
  Description of Artificial Sequence: Synthetic oligonucleotide
cuuguugguagugccaaac

SEQ ID NO: 885665 - RNA, 19 nt, Artificial Sequence
  Description of Artificial Sequence: Synthetic oligonucleotide
acuuugaccaccaggcugu

SEQ ID NO: 885666 - RNA, 19 nt, Artificial Sequence
  Description of Artificial Sequence: Synthetic oligonucleotide
caucaggggagcuucgcug

SEQ ID NO: 885667 - RNA, 19 nt, Artificial Sequence
  Description of Artificial Sequence: Synthetic oligonucleotide
uuuuaacaaacggccccag

SEQ ID NO: 885668 - RNA, 19 nt, Artificial Sequence
  Description of Artificial Sequence: Synthetic oligonucleotide
agugccaaacucaacuuga

SEQ ID NO: 885669 - RNA, 19 nt, Artificial Sequence
  Description of Artificial Sequence: Synthetic oligonucleotide
gaccugaugacaccugaga

SEQ ID NO: 885670 - RNA, 19 nt, Artificial Sequence
  Description of Artificial Sequence: Synthetic oligonucleotide
cuucucgagaagguggccc

SEQ ID NO: 885671 - RNA, 19 nt, Artificial Sequence
  Description of Artificial Sequence: Synthetic oligonucleotide
gguagugccaaacucaacu

SEQ ID NO: 885672 - RNA, 19 nt, Artificial Sequence
  Description of Artificial Sequence: Synthetic oligonucleotide
uuguggcauuauguaaacg

SEQ ID NO: 885673 - RNA, 19 nt, Artificial Sequence
  Description of Artificial Sequence: Synthetic oligonucleotide
cuggcguaccugaagcaag

SEQ ID NO: 885674 - RNA, 19 nt, Artificial Sequence
  Description of Artificial Sequence: Synthetic oligonucleotide
ugucuccuaccacuaggca

SEQ ID NO: 885675 - RNA, 19 nt, Artificial Sequence
  Description of Artificial Sequence: Synthetic oligonucleotide
accaagguugcugcucagc

SEQ ID NO: 885676 - RNA, 19 nt, Artificial Sequence
  Description of Artificial Sequence: Synthetic oligonucleotide
aguucggaauacuccgcug

SEQ ID NO: 885677 - RNA, 19 nt, Artificial Sequence
  Description of Artificial Sequence: Synthetic oligonucleotide
ggaacugagaccagagaag

SEQ ID NO: 885678 - RNA, 19 nt, Artificial Sequence
  Description of Artificial Sequence: Synthetic oligonucleotide
aucuuucggugccuauggg

SEQ ID NO: 885679 - RNA, 19 nt, Artificial Sequence
  Description of Artificial Sequence: Synthetic oligonucleotide
aggcuagcggggaagggcc

SEQ ID NO: 885680 - RNA, 19 nt, Artificial Sequence
  Description of Artificial Sequence: Synthetic oligonucleotide
gagccgaaguucaccacgg

SEQ ID NO: 885681 - RNA, 19 nt, Artificial Sequence
  Description of Artificial Sequence: Synthetic oligonucleotide
cuguugggauguaacugag

SEQ ID NO: 885682 - RNA, 19 nt, Artificial Sequence
  Description of Artificial Sequence: Synthetic oligonucleotide
uaggcacaagucugagucc

SEQ ID NO: 885683 - RNA, 19 nt, Artificial Sequence
  Description of Artificial Sequence: Synthetic oligonucleotide
ugaggguccuccaggccgc

SEQ ID NO: 885684 - RNA, 19 nt, Artificial Sequence
  Description of Artificial Sequence: Synthetic oligonucleotide
auguaacugagagucgaug

SEQ ID NO: 885685 - RNA, 19 nt, Artificial Sequence
  Description of Artificial Sequence: Synthetic oligonucleotide
gcaagacccgaguagcagg

SEQ ID NO: 885686 - RNA, 19 nt, Artificial Sequence
  Description of Artificial Sequence: Synthetic oligonucleotide
guagaggucaaugcgcuga

SEQ ID NO: 885687 - RNA, 19 nt, Artificial Sequence
  Description of Artificial Sequence: Synthetic oligonucleotide
gacaccugagaaucuccac

SEQ ID NO: 885688 - RNA, 19 nt, Artificial Sequence
  Description of Artificial Sequence: Synthetic oligonucleotide
aggaccaccaagguugcug

SEQ ID NO: 885689 - RNA, 19 nt, Artificial Sequence
  Description of Artificial Sequence: Synthetic oligonucleotide
gagaugacccaggaccacc

SEQ ID NO: 885690 - RNA, 19 nt, Artificial Sequence
  Description of Artificial Sequence: Synthetic oligonucleotide
aguauucaagggugagggu

SEQ ID NO: 885691 - RNA, 19 nt, Artificial Sequence
  Description of Artificial Sequence: Synthetic oligonucleotide
ugggaacggccucuguggc

SEQ ID NO: 885692 - RNA, 19 nt, Artificial Sequence
  Description of Artificial Sequence: Synthetic oligonucleotide
agugaggcuccagacccac

SEQ ID NO: 885693 - RNA, 19 nt, Artificial Sequence
  Description of Artificial Sequence: Synthetic oligonucleotide
cuaccacuaggcacaaguc

SEQ ID NO: 885694 - RNA, 19 nt, Artificial Sequence
  Description of Artificial Sequence: Synthetic oligonucleotide
gcgauucuaccacagggag

SEQ ID NO: 885695 - RNA, 19 nt, Artificial Sequence
  Description of Artificial Sequence: Synthetic oligonucleotide
agagaagggccuuccaguu

SEQ ID NO: 885696 - RNA, 19 nt, Artificial Sequence
  Description of Artificial Sequence: Synthetic oligonucleotide
uauaggcgcugaccugaag

SEQ ID NO: 885697 - RNA, 19 nt, Artificial Sequence
  Description of Artificial Sequence: Synthetic oligonucleotide
uucggugccuaugggacca

SEQ ID NO: 885698 - RNA, 19 nt, Artificial Sequence
  Description of Artificial Sequence: Synthetic oligonucleotide
ggggaacucccucagcggg

SEQ ID NO: 885699 - RNA, 19 nt, Artificial Sequence
  Description of Artificial Sequence: Synthetic oligonucleotide
ugcucagcuuccgauaauc

SEQ ID NO: 885700 - RNA, 19 nt, Artificial Sequence
  Description of Artificial Sequence: Synthetic oligonucleotide
cugggccucggucugugcg

SEQ ID NO: 885701 - RNA, 19 nt, Artificial Sequence
  Description of Artificial Sequence: Synthetic oligonucleotide
ggaacggccucuguggccg

SEQ ID NO: 885702 - RNA, 19 nt, Artificial Sequence
  Description of Artificial Sequence: Synthetic oligonucleotide
gcugaguucggaauacucc

SEQ ID NO: 885703 - RNA, 19 nt, Artificial Sequence
  Description of Artificial Sequence: Synthetic oligonucleotide
ugagagucgauggcacccc

SEQ ID NO: 885704 - RNA, 19 nt, Artificial Sequence
  Description of Artificial Sequence: Synthetic oligonucleotide
uucggaauacuccgcugua

SEQ ID NO: 885705 - RNA, 19 nt, Artificial Sequence
  Description of Artificial Sequence: Synthetic oligonucleotide
aguccgagaugacccagga

SEQ ID NO: 885706 - RNA, 19 nt, Artificial Sequence
  Description of Artificial Sequence: Synthetic oligonucleotide
ucgaagggacucaggggcu

SEQ ID NO: 885707 - RNA, 19 nt, Artificial Sequence
  Description of Artificial Sequence: Synthetic oligonucleotide
agaggguucagagccagau

SEQ ID NO: 885708 - RNA, 19 nt, Artificial Sequence
  Description of Artificial Sequence: Synthetic oligonucleotide
ccgauaauccuggaaaggc

SEQ ID NO: 885709 - RNA, 19 nt, Artificial Sequence
  Description of Artificial Sequence: Synthetic oligonucleotide
gccauagaagaccucagga

SEQ ID NO: 885710 - RNA, 19 nt, Artificial Sequence
  Description of Artificial Sequence: Synthetic oligonucleotide
caggacugccauagaagac

SEQ ID NO: 885711 - RNA, 19 nt, Artificial Sequence
  Description of Artificial Sequence: Synthetic oligonucleotide
gacucaucucugugcuugc

SEQ ID NO: 885712 - RNA, 19 nt, Artificial Sequence
  Description of Artificial Sequence: Synthetic oligonucleotide
accuguacuggugcaauga

SEQ ID NO: 885713 - RNA, 19 nt, Artificial Sequence
  Description of Artificial Sequence: Synthetic oligonucleotide
uaguucuacugggugcagc

SEQ ID NO: 885714 - RNA, 19 nt, Artificial Sequence
  Description of Artificial Sequence: Synthetic oligonucleotide
gcagcugcgauucuaccac

SEQ ID NO: 885715 - RNA, 19 nt, Artificial Sequence
  Description of Artificial Sequence: Synthetic oligonucleotide
gucagguaaagggcugggg

SEQ ID NO: 885716 - RNA, 19 nt, Artificial Sequence
  Description of Artificial Sequence: Synthetic oligonucleotide
ggagccuugagacgggaac

SEQ ID NO: 885717 - RNA, 19 nt, Artificial Sequence
  Description of Artificial Sequence: Synthetic oligonucleotide
ucggcauccagcgcagggc

SEQ ID NO: 885718 - RNA, 19 nt, Artificial Sequence
  Description of Artificial Sequence: Synthetic oligonucleotide
agcaggcaacuuccccagc

SEQ ID NO: 885719 - RNA, 19 nt, Artificial Sequence
  Description of Artificial Sequence: Synthetic oligonucleotide
ggcucuuagauuguggcuc

SEQ ID NO: 885720 - RNA, 19 nt, Artificial Sequence
  Description of Artificial Sequence: Synthetic oligonucleotide
agagacuugggaacuggga

SEQ ID NO: 885721 - RNA, 19 nt, Artificial Sequence
  Description of Artificial Sequence: Synthetic oligonucleotide
gcaaugagggugucccagg

SEQ ID NO: 885722 - RNA, 19 nt, Artificial Sequence
  Description of Artificial Sequence: Synthetic oligonucleotide
uuaguucuacugggugcag

SEQ ID NO: 885723 - RNA, 19 nt, Artificial Sequence
  Description of Artificial Sequence: Synthetic oligonucleotide
ugggccucggucugugcgc

SEQ ID NO: 885724 - RNA, 19 nt, Artificial Sequence
  Description of Artificial Sequence: Synthetic oligonucleotide
gugcgcugugaucuuucgg

SEQ ID NO: 885725 - RNA, 19 nt, Artificial Sequence
  Description of Artificial Sequence: Synthetic oligonucleotide
caagacccgaguagcagga

SEQ ID NO: 885726 - RNA, 19 nt, Artificial Sequence
  Description of Artificial Sequence: Synthetic oligonucleotide
gauaauccuggaaaggcuu

SEQ ID NO: 885727 - RNA, 19 nt, Artificial Sequence
  Description of Artificial Sequence: Synthetic oligonucleotide
ggauguaacugagagucga

SEQ ID NO: 885728 - RNA, 19 nt, Artificial Sequence
  Description of Artificial Sequence: Synthetic oligonucleotide
guucggaauacuccgcugu

SEQ ID NO: 885729 - RNA, 19 nt, Artificial Sequence
  Description of Artificial Sequence: Synthetic oligonucleotide
cucuggaccacagugccca

SEQ ID NO: 885730 - RNA, 19 nt, Artificial Sequence
  Description of Artificial Sequence: Synthetic oligonucleotide
gagaaccccuccagcaggc

SEQ ID NO: 885731 - RNA, 19 nt, Artificial Sequence
  Description of Artificial Sequence: Synthetic oligonucleotide
gcaagggugugucagguaa

SEQ ID NO: 885732 - RNA, 19 nt, Artificial Sequence
  Description of Artificial Sequence: Synthetic oligonucleotide
gcugcgauucuaccacagg

SEQ ID NO: 885733 - RNA, 19 nt, Artificial Sequence
  Description of Artificial Sequence: Synthetic oligonucleotide
ucggucugugcgcugugau

SEQ ID NO: 885734 - RNA, 19 nt, Artificial Sequence
  Description of Artificial Sequence: Synthetic oligonucleotide
aagacccgaguagcaggag

SEQ ID NO: 885735 - RNA, 19 nt, Artificial Sequence
  Description of Artificial Sequence: Synthetic oligonucleotide
ugguaacucuuucggcuuu

SEQ ID NO: 885736 - RNA, 19 nt, Artificial Sequence
  Description of Artificial Sequence: Synthetic oligonucleotide
uccaucaggggagcuucgc

SEQ ID NO: 885737 - RNA, 19 nt, Artificial Sequence
  Description of Artificial Sequence: Synthetic oligonucleotide
ucggaauacuccgcuguaa

SEQ ID NO: 885738 - RNA, 19 nt, Artificial Sequence
  Description of Artificial Sequence: Synthetic oligonucleotide
uaaguggaaggaggagccu

SEQ ID NO: 885739 - RNA, 19 nt, Artificial Sequence
  Description of Artificial Sequence: Synthetic oligonucleotide
aggacgguggaggguagag

SEQ ID NO: 885740 - RNA, 19 nt, Artificial Sequence
  Description of Artificial Sequence: Synthetic oligonucleotide
ugaccuguacuggugcaau

SEQ ID NO: 885741 - RNA, 19 nt, Artificial Sequence
  Description of Artificial Sequence: Synthetic oligonucleotide
uacuccgcuguaaguggaa

SEQ ID NO: 885742 - RNA, 19 nt, Artificial Sequence
  Description of Artificial Sequence: Synthetic oligonucleotide
acuccgcuguaaguggaag

SEQ ID NO: 885743 - RNA, 19 nt, Artificial Sequence
  Description of Artificial Sequence: Synthetic oligonucleotide
gccgaaguucaccacgggc

SEQ ID NO: 885744 - RNA, 19 nt, Artificial Sequence
  Description of Artificial Sequence: Synthetic oligonucleotide
ggaggaguccgagaugacc

SEQ ID NO: 885745 - RNA, 19 nt, Artificial Sequence
  Description of Artificial Sequence: Synthetic oligonucleotide
cagauccuggcguaccuga

SEQ ID NO: 885746 - RNA, 19 nt, Artificial Sequence
  Description of Artificial Sequence: Synthetic oligonucleotide
ucggugggcuggccguagg

SEQ ID NO: 885747 - RNA, 19 nt, Artificial Sequence
  Description of Artificial Sequence: Synthetic oligonucleotide
acaaacggccccagggaug

SEQ ID NO: 885748 - RNA, 19 nt, Artificial Sequence
  Description of Artificial Sequence: Synthetic oligonucleotide
ccgaaguucaccacgggca

SEQ ID NO: 885749 - RNA, 19 nt, Artificial Sequence
  Description of Artificial Sequence: Synthetic oligonucleotide
caaggggaacucccucagc

SEQ ID NO: 885750 - RNA, 19 nt, Artificial Sequence
  Description of Artificial Sequence: Synthetic oligonucleotide
gaagaggggaagugaggcu

SEQ ID NO: 885751 - RNA, 19 nt, Artificial Sequence
  Description of Artificial Sequence: Synthetic oligonucleotide
ggugccuaugggaccaggg

SEQ ID NO: 885752 - RNA, 19 nt, Artificial Sequence
  Description of Artificial Sequence: Synthetic oligonucleotide
guagguucagaggguucag

SEQ ID NO: 885753 - RNA, 19 nt, Artificial Sequence
  Description of Artificial Sequence: Synthetic oligonucleotide
ggcugguaacucuuucggc

SEQ ID NO: 885754 - RNA, 19 nt, Artificial Sequence
  Description of Artificial Sequence: Synthetic oligonucleotide
agccuugagacgggaacug

SEQ ID NO: 885755 - RNA, 19 nt, Artificial Sequence
  Description of Artificial Sequence: Synthetic oligonucleotide
agccaggucggugggcugg

SEQ ID NO: 885756 - RNA, 19 nt, Artificial Sequence
  Description of Artificial Sequence: Synthetic oligonucleotide
ccaggacugccauagaaga

SEQ ID NO: 885757 - RNA, 19 nt, Artificial Sequence
  Description of Artificial Sequence: Synthetic oligonucleotide
aggucggugggcuggccgu

SEQ ID NO: 885758 - RNA, 19 nt, Artificial Sequence
  Description of Artificial Sequence: Synthetic oligonucleotide
cugucagacugacucaucu

SEQ ID NO: 885759 - RNA, 19 nt, Artificial Sequence
  Description of Artificial Sequence: Synthetic oligonucleotide
gacgggaacugagaccaga

SEQ ID NO: 885760 - RNA, 19 nt, Artificial Sequence
  Description of Artificial Sequence: Synthetic oligonucleotide
agcugcgauucuaccacag

SEQ ID NO: 885761 - RNA, 19 nt, Artificial Sequence
  Description of Artificial Sequence: Synthetic oligonucleotide
caaugagggugucccagga

SEQ ID NO: 885762 - RNA, 19 nt, Artificial Sequence
  Description of Artificial Sequence: Synthetic oligonucleotide
ggcaagacccgaguagcag

SEQ ID NO: 885763 - RNA, 19 nt, Artificial Sequence
  Description of Artificial Sequence: Synthetic oligonucleotide
cacuaggcacaagucugag

SEQ ID NO: 885764 - RNA, 19 nt, Artificial Sequence
  Description of Artificial Sequence: Synthetic oligonucleotide
agcccuguugguagagguc

SEQ ID NO: 885765 - RNA, 19 nt, Artificial Sequence
  Description of Artificial Sequence: Synthetic oligonucleotide
cugugcgcugugaucuuuc

SEQ ID NO: 885766 - RNA, 19 nt, Artificial Sequence
  Description of Artificial Sequence: Synthetic oligonucleotide
auaauccuggaaaggcuuu

SEQ ID NO: 885767 - RNA, 19 nt, Artificial Sequence
  Description of Artificial Sequence: Synthetic oligonucleotide
acgguggaggguagagaac

SEQ ID NO: 885768 - RNA, 19 nt, Artificial Sequence
  Description of Artificial Sequence: Synthetic oligonucleotide
agaguagaggaaggacggu

SEQ ID NO: 885769 - RNA, 19 nt, Artificial Sequence
  Description of Artificial Sequence: Synthetic oligonucleotide
ucaaugcgcugaguucgga

SEQ ID NO: 885770 - RNA, 19 nt, Artificial Sequence
  Description of Artificial Sequence: Synthetic oligonucleotide
accugaagcaagggugugu

SEQ ID NO: 885771 - RNA, 19 nt, Artificial Sequence
  Description of Artificial Sequence: Synthetic oligonucleotide
gagcccuguugguagaggu

SEQ ID NO: 885772 - RNA, 19 nt, Artificial Sequence
  Description of Artificial Sequence: Synthetic oligonucleotide
acucccucagcgggguggg

SEQ ID NO: 885773 - RNA, 19 nt, Artificial Sequence
  Description of Artificial Sequence: Synthetic oligonucleotide
acggaagccuccacuguug

SEQ ID NO: 885774 - RNA, 19 nt, Artificial Sequence
  Description of Artificial Sequence: Synthetic oligonucleotide
aacggccucuguggccgac

SEQ ID NO: 885775 - RNA, 19 nt, Artificial Sequence
  Description of Artificial Sequence: Synthetic oligonucleotide
cgauucuaccacagggagg

SEQ ID NO: 885776 - RNA, 19 nt, Artificial Sequence
  Description of Artificial Sequence: Synthetic oligonucleotide
gccgucuccuaguagguuc

SEQ ID NO: 885777 - RNA, 19 nt, Artificial Sequence
  Description of Artificial Sequence: Synthetic oligonucleotide
uggccgacgcugucaacuc

SEQ ID NO: 885778 - RNA, 19 nt, Artificial Sequence
  Description of Artificial Sequence: Synthetic oligonucleotide
gguagauacaggggcugug

SEQ ID NO: 885779 - RNA, 19 nt, Artificial Sequence
  Description of Artificial Sequence: Synthetic oligonucleotide
ucgagaagguggccccguc

SEQ ID NO: 885780 - RNA, 19 nt, Artificial Sequence
  Description of Artificial Sequence: Synthetic oligonucleotide
auacuccgcuguaagugga

SEQ ID NO: 885781 - RNA, 19 nt, Artificial Sequence
  Description of Artificial Sequence: Synthetic oligonucleotide
cccuucucgagaagguggc

SEQ ID NO: 885782 - RNA, 19 nt, Artificial Sequence
  Description of Artificial Sequence: Synthetic oligonucleotide
caaugcgcugaguucggaa

SEQ ID NO: 885783 - RNA, 19 nt, Artificial Sequence
  Description of Artificial Sequence: Synthetic oligonucleotide
cggaauacuccgcuguaag

SEQ ID NO: 885784 - RNA, 19 nt, Artificial Sequence
  Description of Artificial Sequence: Synthetic oligonucleotide
aagugaggcuccagaccca

SEQ ID NO: 885785 - RNA, 19 nt, Artificial Sequence
  Description of Artificial Sequence: Synthetic oligonucleotide
aaggacgguggaggguaga

SEQ ID NO: 885786 - RNA, 19 nt, Artificial Sequence
  Description of Artificial Sequence: Synthetic oligonucleotide
gaacccaggcucuuagauu

SEQ ID NO: 885787 - RNA, 19 nt, Artificial Sequence
  Description of Artificial Sequence: Synthetic oligonucleotide
auacaggggcugugaccug

SEQ ID NO: 885788 - RNA, 19 nt, Artificial Sequence
  Description of Artificial Sequence: Synthetic oligonucleotide
aagggacucaggggcucca

SEQ ID NO: 885789 - RNA, 19 nt, Artificial Sequence
  Description of Artificial Sequence: Synthetic oligonucleotide
gcucuuagauuguggcuca

SEQ ID NO: 885790 - RNA, 19 nt, Artificial Sequence
  Description of Artificial Sequence: Synthetic oligonucleotide
guccgagaugacccaggac

SEQ ID NO: 885791 - RNA, 19 nt, Artificial Sequence
  Description of Artificial Sequence: Synthetic oligonucleotide
ugcucgccccaggcuagcg

SEQ ID NO: 885792 - RNA, 19 nt, Artificial Sequence
  Description of Artificial Sequence: Synthetic oligonucleotide
ccccuuaaguccuccauca

SEQ ID NO: 885793 - RNA, 19 nt, Artificial Sequence
  Description of Artificial Sequence: Synthetic oligonucleotide
gguggccccguccuuuccc

SEQ ID NO: 885794 - RNA, 19 nt, Artificial Sequence
  Description of Artificial Sequence: Synthetic oligonucleotide
ccugaagcaaggguguguc

SEQ ID NO: 885795 - RNA, 19 nt, Artificial Sequence
  Description of Artificial Sequence: Synthetic oligonucleotide
gacggaagccuccacuguu

SEQ ID NO: 885796 - RNA, 19 nt, Artificial Sequence
  Description of Artificial Sequence: Synthetic oligonucleotide
agauuguggcucaguggga

SEQ ID NO: 885797 - RNA, 19 nt, Artificial Sequence
  Description of Artificial Sequence: Synthetic oligonucleotide
gggaccugaugacaccuga

SEQ ID NO: 885798 - RNA, 19 nt, Artificial Sequence
  Description of Artificial Sequence: Synthetic oligonucleotide
gcugugaccuguacuggug

SEQ ID NO: 885799 - RNA, 19 nt, Artificial Sequence
  Description of Artificial Sequence: Synthetic oligonucleotide
ggaccugaugacaccugag

SEQ ID NO: 885800 - RNA, 19 nt, Artificial Sequence
  Description of Artificial Sequence: Synthetic oligonucleotide
agcaagggugugucaggua

SEQ ID NO: 885801 - RNA, 19 nt, Artificial Sequence
  Description of Artificial Sequence: Synthetic oligonucleotide
gagccuugagacgggaacu

SEQ ID NO: 885802 - RNA, 19 nt, Artificial Sequence
  Description of Artificial Sequence: Synthetic oligonucleotide
cugaagcaaggguguguca

SEQ ID NO: 885803 - RNA, 19 nt, Artificial Sequence
  Description of Artificial Sequence: Synthetic oligonucleotide
gguggcgcggguggcaggg

SEQ ID NO: 885804 - RNA, 19 nt, Artificial Sequence
  Description of Artificial Sequence: Synthetic oligonucleotide
caggacccacagguaacag

SEQ ID NO: 885805 - RNA, 19 nt, Artificial Sequence
  Description of Artificial Sequence: Synthetic oligonucleotide
cuaccccagagagcagcgc

SEQ ID NO: 885806 - RNA, 19 nt, Artificial Sequence
  Description of Artificial Sequence: Synthetic oligonucleotide
ggaaggacgguggagggua

SEQ ID NO: 885807 - RNA, 19 nt, Artificial Sequence
  Description of Artificial Sequence: Synthetic oligonucleotide
caccaagguugcugcucag

SEQ ID NO: 885808 - RNA, 19 nt, Artificial Sequence
  Description of Artificial Sequence: Synthetic oligonucleotide
gauguaacugagagucgau

SEQ ID NO: 885809 - RNA, 19 nt, Artificial Sequence
  Description of Artificial Sequence: Synthetic oligonucleotide
gaccccuuaaguccuccau

SEQ ID NO: 885810 - RNA, 19 nt, Artificial Sequence
  Description of Artificial Sequence: Synthetic oligonucleotide
uucggcuuuguggcauuau

SEQ ID NO: 885811 - RNA, 19 nt, Artificial Sequence
  Description of Artificial Sequence: Synthetic oligonucleotide
gggguagauacaggggcug

SEQ ID NO: 885812 - RNA, 19 nt, Artificial Sequence
  Description of Artificial Sequence: Synthetic oligonucleotide
gggaacggccucuguggcc

SEQ ID NO: 885813 - RNA, 19 nt, Artificial Sequence
  Description of Artificial Sequence: Synthetic oligonucleotide
ucugugcgcugugaucuuu

SEQ ID NO: 885814 - RNA, 19 nt, Artificial Sequence
  Description of Artificial Sequence: Synthetic oligonucleotide
gcuuccgauaauccuggaa

SEQ ID NO: 885815 - RNA, 19 nt, Artificial Sequence
  Description of Artificial Sequence: Synthetic oligonucleotide
ugcuugccacauccucgaa

SEQ ID NO: 885816 - RNA, 19 nt, Artificial Sequence
  Description of Artificial Sequence: Synthetic oligonucleotide
gguggccgucuccuaguag

SEQ ID NO: 885817 - RNA, 19 nt, Artificial Sequence
  Description of Artificial Sequence: Synthetic oligonucleotide
cccuugagagcuaccccag

SEQ ID NO: 885818 - RNA, 19 nt, Artificial Sequence
  Description of Artificial Sequence: Synthetic oligonucleotide
gcccuguugguagagguca

SEQ ID NO: 885819 - RNA, 19 nt, Artificial Sequence
  Description of Artificial Sequence: Synthetic oligonucleotide
gcgcugugaucuuucggug

SEQ ID NO: 885820 - RNA, 19 nt, Artificial Sequence
  Description of Artificial Sequence: Synthetic oligonucleotide
ggcguaccugaagcaaggg

SEQ ID NO: 885821 - RNA, 19 nt, Artificial Sequence
  Description of Artificial Sequence: Synthetic oligonucleotide
gaacucccucagcggggug

SEQ ID NO: 885822 - RNA, 19 nt, Artificial Sequence
  Description of Artificial Sequence: Synthetic oligonucleotide
ggaguccgagaugacccag

SEQ ID NO: 885823 - RNA, 19 nt, Artificial Sequence
  Description of Artificial Sequence: Synthetic oligonucleotide
gguaugggaacggccucug

SEQ ID NO: 885824 - RNA, 19 nt, Artificial Sequence
  Description of Artificial Sequence: Synthetic oligonucleotide
aucagguggggagcccugu

SEQ ID NO: 885825 - RNA, 19 nt, Artificial Sequence
  Description of Artificial Sequence: Synthetic oligonucleotide
cucuuucggcuuuguggca

SEQ ID NO: 885826 - RNA, 19 nt, Artificial Sequence
  Description of Artificial Sequence: Synthetic oligonucleotide
ccuuccaguuggaggaguc

SEQ ID NO: 885827 - RNA, 19 nt, Artificial Sequence
  Description of Artificial Sequence: Synthetic oligonucleotide
acggccucuguggccgacg

SEQ ID NO: 885828 - RNA, 19 nt, Artificial Sequence
  Description of Artificial Sequence: Synthetic oligonucleotide
aggcaagacccgaguagca

SEQ ID NO: 885829 - RNA, 19 nt, Artificial Sequence
  Description of Artificial Sequence: Synthetic oligonucleotide
ggauggcagauccuggcgu

SEQ ID NO: 885830 - RNA, 19 nt, Artificial Sequence
  Description of Artificial Sequence: Synthetic oligonucleotide
gcucgccccaggcuagcgg

SEQ ID NO: 885831 - RNA, 19 nt, Artificial Sequence
  Description of Artificial Sequence: Synthetic oligonucleotide
gugcaaugaggguguccca

SEQ ID NO: 885832 - RNA, 19 nt, Artificial Sequence
  Description of Artificial Sequence: Synthetic oligonucleotide
agcagcgccgagggaggag

SEQ ID NO: 885833 - RNA, 19 nt, Artificial Sequence
  Description of Artificial Sequence: Synthetic oligonucleotide
gagggugucccaggacgga

SEQ ID NO: 885834 - RNA, 19 nt, Artificial Sequence
  Description of Artificial Sequence: Synthetic oligonucleotide
ggcucuauggagccaggcu

SEQ ID NO: 885835 - RNA, 19 nt, Artificial Sequence
  Description of Artificial Sequence: Synthetic oligonucleotide
ccauagaagaccucaggau

SEQ ID NO: 885836 - RNA, 19 nt, Artificial Sequence
  Description of Artificial Sequence: Synthetic oligonucleotide
agggugucccaggacggaa

SEQ ID NO: 885837 - RNA, 19 nt, Artificial Sequence
  Description of Artificial Sequence: Synthetic oligonucleotide
cccgaguagcaggagcagg

SEQ ID NO: 885838 - RNA, 19 nt, Artificial Sequence
  Description of Artificial Sequence: Synthetic oligonucleotide
ccgagaugacccaggacca

SEQ ID NO: 885839 - RNA, 19 nt, Artificial Sequence
  Description of Artificial Sequence: Synthetic oligonucleotide
cccuuaaguccuccaucag

SEQ ID NO: 885840 - RNA, 19 nt, Artificial Sequence
  Description of Artificial Sequence: Synthetic oligonucleotide
gcagcgccgagggaggagc

SEQ ID NO: 885841 - RNA, 19 nt, Artificial Sequence
  Description of Artificial Sequence: Synthetic oligonucleotide
gggcagcugcgauucuacc

SEQ ID NO: 885842 - RNA, 19 nt, Artificial Sequence
  Description of Artificial Sequence: Synthetic oligonucleotide
ggggaggcccuucucgaga

SEQ ID NO: 885843 - RNA, 19 nt, Artificial Sequence
  Description of Artificial Sequence: Synthetic oligonucleotide
agguggccgucuccuagua

SEQ ID NO: 885844 - RNA, 19 nt, Artificial Sequence
  Description of Artificial Sequence: Synthetic oligonucleotide
cuaguagguucagaggguu

SEQ ID NO: 885845 - RNA, 19 nt, Artificial Sequence
  Description of Artificial Sequence: Synthetic oligonucleotide
gcgcagggcaucagguggg

SEQ ID NO: 885846 - RNA, 19 nt, Artificial Sequence
  Description of Artificial Sequence: Synthetic oligonucleotide
cuguggccgacgcugucaa

SEQ ID NO: 885847 - RNA, 19 nt, Artificial Sequence
  Description of Artificial Sequence: Synthetic oligonucleotide
cagcugcgauucuaccaca

SEQ ID NO: 885848 - RNA, 19 nt, Artificial Sequence
  Description of Artificial Sequence: Synthetic oligonucleotide
cagugggagcugaagcgcu

SEQ ID NO: 885849 - RNA, 19 nt, Artificial Sequence
  Description of Artificial Sequence: Synthetic oligonucleotide
ucggugccuaugggaccag

SEQ ID NO: 885850 - RNA, 19 nt, Artificial Sequence
  Description of Artificial Sequence: Synthetic oligonucleotide
gcaggacccacagguaaca

SEQ ID NO: 885851 - RNA, 19 nt, Artificial Sequence
  Description of Artificial Sequence: Synthetic oligonucleotide
gggaggcccuucucgagaa

SEQ ID NO: 885852 - RNA, 19 nt, Artificial Sequence
  Description of Artificial Sequence: Synthetic oligonucleotide
cuguccccaucauggggaa

SEQ ID NO: 885853 - RNA, 19 nt, Artificial Sequence
  Description of Artificial Sequence: Synthetic oligonucleotide
gaagggccuuccaguugga

SEQ ID NO: 885854 - RNA, 19 nt, Artificial Sequence
  Description of Artificial Sequence: Synthetic oligonucleotide
cacugucagacugacucau

SEQ ID NO: 885855 - RNA, 19 nt, Artificial Sequence
  Description of Artificial Sequence: Synthetic oligonucleotide
gcguaccugaagcaagggu

SEQ ID NO: 885856 - RNA, 19 nt, Artificial Sequence
  Description of Artificial Sequence: Synthetic oligonucleotide
ccgcuguaaguggaaggag

SEQ ID NO: 885857 - RNA, 19 nt, Artificial Sequence
  Description of Artificial Sequence: Synthetic oligonucleotide
ggcgcugaccugaagggcu

SEQ ID NO: 885858 - RNA, 19 nt, Artificial Sequence
  Description of Artificial Sequence: Synthetic oligonucleotide
ccuaguagguucagagggu

SEQ ID NO: 885859 - RNA, 19 nt, Artificial Sequence
  Description of Artificial Sequence: Synthetic oligonucleotide
gggagcuucgcuggcugca

SEQ ID NO: 885860 - RNA, 19 nt, Artificial Sequence
  Description of Artificial Sequence: Synthetic oligonucleotide
gugaucuuucggugccuau

SEQ ID NO: 885861 - RNA, 19 nt, Artificial Sequence
  Description of Artificial Sequence: Synthetic oligonucleotide
cccagucucuggguauggg

SEQ ID NO: 885862 - RNA, 19 nt, Artificial Sequence
  Description of Artificial Sequence: Synthetic oligonucleotide
cgauaauccuggaaaggcu

SEQ ID NO: 885863 - RNA, 19 nt, Artificial Sequence
  Description of Artificial Sequence: Synthetic oligonucleotide
ccgaguagcaggagcaggu

SEQ ID NO: 885864 - RNA, 19 nt, Artificial Sequence
  Description of Artificial Sequence: Synthetic oligonucleotide
gcuagcggggaagggccug

SEQ ID NO: 885865 - RNA, 19 nt, Artificial Sequence
  Description of Artificial Sequence: Synthetic oligonucleotide
ggacugccauagaagaccu

SEQ ID NO: 885866 - RNA, 19 nt, Artificial Sequence
  Description of Artificial Sequence: Synthetic oligonucleotide
cucggucugugcgcuguga

SEQ ID NO: 885867 - RNA, 19 nt, Artificial Sequence
  Description of Artificial Sequence: Synthetic oligonucleotide
ggcagauccuggcguaccu

SEQ ID NO: 885868 - RNA, 19 nt, Artificial Sequence
  Description of Artificial Sequence: Synthetic oligonucleotide
ggacggaagccuccacugu

SEQ ID NO: 885869 - RNA, 19 nt, Artificial Sequence
  Description of Artificial Sequence: Synthetic oligonucleotide
ccuggcguaccugaagcaa

SEQ ID NO: 885870 - RNA, 19 nt, Artificial Sequence
  Description of Artificial Sequence: Synthetic oligonucleotide
gcgcugaccugaagggcug

SEQ ID NO: 885871 - RNA, 19 nt, Artificial Sequence
  Description of Artificial Sequence: Synthetic oligonucleotide
cuauggagccaggcuggua

SEQ ID NO: 885872 - RNA, 19 nt, Artificial Sequence
  Description of Artificial Sequence: Synthetic oligonucleotide
gugaggcuccagacccaca

SEQ ID NO: 885873 - RNA, 19 nt, Artificial Sequence
  Description of Artificial Sequence: Synthetic oligonucleotide
ggaacucccucagcggggu

SEQ ID NO: 885874 - RNA, 19 nt, Artificial Sequence
  Description of Artificial Sequence: Synthetic oligonucleotide
ccuugagagcuaccccaga

SEQ ID NO: 885875 - RNA, 19 nt, Artificial Sequence
  Description of Artificial Sequence: Synthetic oligonucleotide
ccaggacggaagccuccac

SEQ ID NO: 885876 - RNA, 19 nt, Artificial Sequence
  Description of Artificial Sequence: Synthetic oligonucleotide
ggguagauacaggggcugu

SEQ ID NO: 885877 - RNA, 19 nt, Artificial Sequence
  Description of Artificial Sequence: Synthetic oligonucleotide
gcucccagucucuggguau

SEQ ID NO: 885878 - RNA, 19 nt, Artificial Sequence
  Description of Artificial Sequence: Synthetic oligonucleotide
cucgagaagguggccccgu

SEQ ID NO: 885879 - RNA, 19 nt, Artificial Sequence
  Description of Artificial Sequence: Synthetic oligonucleotide
ccguccuuucccaaggcuu

SEQ ID NO: 885880 - RNA, 19 nt, Artificial Sequence
  Description of Artificial Sequence: Synthetic oligonucleotide
cgacgcugucaacucuuuc

SEQ ID NO: 885881 - RNA, 19 nt, Artificial Sequence
  Description of Artificial Sequence: Synthetic oligonucleotide
gccaggucggugggcuggc

SEQ ID NO: 885882 - RNA, 19 nt, Artificial Sequence
  Description of Artificial Sequence: Synthetic oligonucleotide
cgaagggacucaggggcuc

SEQ ID NO: 885883 - RNA, 19 nt, Artificial Sequence
  Description of Artificial Sequence: Synthetic oligonucleotide
cugcucagcuuccgauaau

SEQ ID NO: 885884 - RNA, 19 nt, Artificial Sequence
  Description of Artificial Sequence: Synthetic oligonucleotide
ggccgacgcugucaacucu

SEQ ID NO: 885885 - RNA, 19 nt, Artificial Sequence
  Description of Artificial Sequence: Synthetic oligonucleotide
gcagggcaucaggugggga

SEQ ID NO: 885886 - RNA, 19 nt, Artificial Sequence
  Description of Artificial Sequence: Synthetic oligonucleotide
cagcgccgagggaggagcu

SEQ ID NO: 885887 - RNA, 19 nt, Artificial Sequence
  Description of Artificial Sequence: Synthetic oligonucleotide
cccguccuuucccaaggcu

SEQ ID NO: 885888 - RNA, 19 nt, Artificial Sequence
  Description of Artificial Sequence: Synthetic oligonucleotide
cggugccuaugggaccagg

SEQ ID NO: 885889 - RNA, 19 nt, Artificial Sequence
  Description of Artificial Sequence: Synthetic oligonucleotide
gccgacgcugucaacucuu

SEQ ID NO: 885890 - RNA, 19 nt, Artificial Sequence
  Description of Artificial Sequence: Synthetic oligonucleotide
guggcgcggguggcaggga

SEQ ID NO: 885891 - RNA, 19 nt, Artificial Sequence
  Description of Artificial Sequence: Synthetic oligonucleotide
gaggguccuccaggccgcu

SEQ ID NO: 885892 - RNA, 19 nt, Artificial Sequence
  Description of Artificial Sequence: Synthetic oligonucleotide
ccacauccucgaagggacu

SEQ ID NO: 885893 - RNA, 19 nt, Artificial Sequence
  Description of Artificial Sequence: Synthetic oligonucleotide
ggucggugggcuggccgua

SEQ ID NO: 885894 - RNA, 19 nt, Artificial Sequence
  Description of Artificial Sequence: Synthetic oligonucleotide
gggccucggucugugcgcu

SEQ ID NO: 885895 - RNA, 19 nt, Artificial Sequence
  Description of Artificial Sequence: Synthetic oligonucleotide
cccagaacccaggcucuua

SEQ ID NO: 885896 - RNA, 19 nt, Artificial Sequence
  Description of Artificial Sequence: Synthetic oligonucleotide
ggcuagcggggaagggccu

SEQ ID NO: 885897 - RNA, 19 nt, Artificial Sequence
  Description of Artificial Sequence: Synthetic oligonucleotide
ggggcaauccaggcuccuu

SEQ ID NO: 885898 - RNA, 19 nt, Artificial Sequence
  Description of Artificial Sequence: Synthetic oligonucleotide
ccccacugucagacugacu

SEQ ID NO: 885899 - RNA, 19 nt, Artificial Sequence
  Description of Artificial Sequence: Synthetic oligonucleotide
gauacuacaguuuauauag

SEQ ID NO: 885900 - RNA, 19 nt, Artificial Sequence
  Description of Artificial Sequence: Synthetic oligonucleotide
aaauucuaagcuuauaggg

SEQ ID NO: 885901 - RNA, 19 nt, Artificial Sequence
  Description of Artificial Sequence: Synthetic oligonucleotide
uuugaagggugaaagaugg

SEQ ID NO: 885902 - RNA, 19 nt, Artificial Sequence
  Description of Artificial Sequence: Synthetic oligonucleotide
cauaauaaagguuccaugg

SEQ ID NO: 885903 - RNA, 19 nt, Artificial Sequence
  Description of Artificial Sequence: Synthetic oligonucleotide
aaacuaucaacacugucuc

SEQ ID NO: 885904 - RNA, 19 nt, Artificial Sequence
  Description of Artificial Sequence: Synthetic oligonucleotide
uccgugaaaguaaugaugg

SEQ ID NO: 885905 - RNA, 19 nt, Artificial Sequence
  Description of Artificial Sequence: Synthetic oligonucleotide
agaaauucuaagcuuauag

SEQ ID NO: 885906 - RNA, 19 nt, Artificial Sequence
  Description of Artificial Sequence: Synthetic oligonucleotide
uugucuaacauucuuuagg

SEQ ID NO: 885907 - RNA, 19 nt, Artificial Sequence
  Description of Artificial Sequence: Synthetic oligonucleotide
auauacaagacuccaaggg

SEQ ID NO: 885908 - RNA, 19 nt, Artificial Sequence
  Description of Artificial Sequence: Synthetic oligonucleotide
agcacaguaaaugugagcc

SEQ ID NO: 885909 - RNA, 19 nt, Artificial Sequence
  Description of Artificial Sequence: Synthetic oligonucleotide
aaauaauaauccuaugaga

SEQ ID NO: 885910 - RNA, 19 nt, Artificial Sequence
  Description of Artificial Sequence: Synthetic oligonucleotide
gauaaugcaaucugcacag

SEQ ID NO: 885911 - RNA, 19 nt, Artificial Sequence
  Description of Artificial Sequence: Synthetic oligonucleotide
aauacuaacucaauuucac

SEQ ID NO: 885912 - RNA, 19 nt, Artificial Sequence
  Description of Artificial Sequence: Synthetic oligonucleotide
augaccagaaauucuaagc

SEQ ID NO: 885913 - RNA, 19 nt, Artificial Sequence
  Description of Artificial Sequence: Synthetic oligonucleotide
accaugaaaauaauaaucc

SEQ ID NO: 885914 - RNA, 19 nt, Artificial Sequence
  Description of Artificial Sequence: Synthetic oligonucleotide
uguguagacaucuagguga

SEQ ID NO: 885915 - RNA, 19 nt, Artificial Sequence
  Description of Artificial Sequence: Synthetic oligonucleotide
aaaguaaugauggugcauc

SEQ ID NO: 885916 - RNA, 19 nt, Artificial Sequence
  Description of Artificial Sequence: Synthetic oligonucleotide
uguugcauuguuauuauca

SEQ ID NO: 885917 - RNA, 19 nt, Artificial Sequence
  Description of Artificial Sequence: Synthetic oligonucleotide
cauaguguaaacaagucug

SEQ ID NO: 885918 - RNA, 19 nt, Artificial Sequence
  Description of Artificial Sequence: Synthetic oligonucleotide
ugaaugacuaccaaucagc

SEQ ID NO: 885919 - RNA, 19 nt, Artificial Sequence
  Description of Artificial Sequence: Synthetic oligonucleotide
aaaggagccauuuaauaca

SEQ ID NO: 885920 - RNA, 19 nt, Artificial Sequence
  Description of Artificial Sequence: Synthetic oligonucleotide
uucaucaaugcuaaagugc

SEQ ID NO: 885921 - RNA, 19 nt, Artificial Sequence
  Description of Artificial Sequence: Synthetic oligonucleotide
augacuaccaaucagcuga

SEQ ID NO: 885922 - RNA, 19 nt, Artificial Sequence
  Description of Artificial Sequence: Synthetic oligonucleotide
uguguaagaaaauaccaug

SEQ ID NO: 885923 - RNA, 19 nt, Artificial Sequence
  Description of Artificial Sequence: Synthetic oligonucleotide
aaugcuaaagugcaaaaua

SEQ ID NO: 885924 - RNA, 19 nt, Artificial Sequence
  Description of Artificial Sequence: Synthetic oligonucleotide
ugagaauuguuuaagcaca

SEQ ID NO: 885925 - RNA, 19 nt, Artificial Sequence
  Description of Artificial Sequence: Synthetic oligonucleotide
aguucuaagugucauguuc

SEQ ID NO: 885926 - RNA, 19 nt, Artificial Sequence
  Description of Artificial Sequence: Synthetic oligonucleotide
uaaaugaucaacaguggca

SEQ ID NO: 885927 - RNA, 19 nt, Artificial Sequence
  Description of Artificial Sequence: Synthetic oligonucleotide
uuaauagggaaaagcauca

SEQ ID NO: 885928 - RNA, 19 nt, Artificial Sequence
  Description of Artificial Sequence: Synthetic oligonucleotide
aagaaaaggagccauuuaa

SEQ ID NO: 885929 - RNA, 19 nt, Artificial Sequence
  Description of Artificial Sequence: Synthetic oligonucleotide
uuccauaaguguuggaugg

SEQ ID NO: 885930 - RNA, 19 nt, Artificial Sequence
  Description of Artificial Sequence: Synthetic oligonucleotide
uauuaucaaguucaagccc

SEQ ID NO: 885931 - RNA, 19 nt, Artificial Sequence
  Description of Artificial Sequence: Synthetic oligonucleotide
ucccaaacuaucaacacug

SEQ ID NO: 885932 - RNA, 19 nt, Artificial Sequence
  Description of Artificial Sequence: Synthetic oligonucleotide
ugucuaacauucuuuaggc

SEQ ID NO: 885933 - RNA, 19 nt, Artificial Sequence
  Description of Artificial Sequence: Synthetic oligonucleotide
uguggaugcauuacuacag

SEQ ID NO: 885934 - RNA, 19 nt, Artificial Sequence
  Description of Artificial Sequence: Synthetic oligonucleotide
uauacaagacuccaaggga

SEQ ID NO: 885935 - RNA, 19 nt, Artificial Sequence
  Description of Artificial Sequence: Synthetic oligonucleotide
acagaaccgauguaaacac

SEQ ID NO: 885936 - RNA, 19 nt, Artificial Sequence
  Description of Artificial Sequence: Synthetic oligonucleotide
agggaaaacucuuaaaugu

SEQ ID NO: 885937 - RNA, 19 nt, Artificial Sequence
  Description of Artificial Sequence: Synthetic oligonucleotide
ugaaaugagauauugugua

SEQ ID NO: 885938 - RNA, 19 nt, Artificial Sequence
  Description of Artificial Sequence: Synthetic oligonucleotide
uucaacauauccaagcaaa

SEQ ID NO: 885939 - RNA, 19 nt, Artificial Sequence
  Description of Artificial Sequence: Synthetic oligonucleotide
uguuauugccuccugaggu

SEQ ID NO: 885940 - RNA, 19 nt, Artificial Sequence
  Description of Artificial Sequence: Synthetic oligonucleotide
ucucauaguguaaacaagu

SEQ ID NO: 885941 - RNA, 19 nt, Artificial Sequence
  Description of Artificial Sequence: Synthetic oligonucleotide
ugaccaauuccaaagaaaa

SEQ ID NO: 885942 - RNA, 19 nt, Artificial Sequence
  Description of Artificial Sequence: Synthetic oligonucleotide
uucuguaauuagcagagca

SEQ ID NO: 885943 - RNA, 19 nt, Artificial Sequence
  Description of Artificial Sequence: Synthetic oligonucleotide
acuauuaucaaagcaaugu

SEQ ID NO: 885944 - RNA, 19 nt, Artificial Sequence
  Description of Artificial Sequence: Synthetic oligonucleotide
gaugcauuacuacagugug

SEQ ID NO: 885945 - RNA, 19 nt, Artificial Sequence
  Description of Artificial Sequence: Synthetic oligonucleotide
ugaccagaaauucuaagcu

SEQ ID NO: 885946 - RNA, 19 nt, Artificial Sequence
  Description of Artificial Sequence: Synthetic oligonucleotide
aauacauggcaacucaaaa

SEQ ID NO: 885947 - RNA, 19 nt, Artificial Sequence
  Description of Artificial Sequence: Synthetic oligonucleotide
ucuaacauucuuuaggcua

SEQ ID NO: 885948 - RNA, 19 nt, Artificial Sequence
  Description of Artificial Sequence: Synthetic oligonucleotide
cauuacuggaucaauugcc

SEQ ID NO: 885949 - RNA, 19 nt, Artificial Sequence
  Description of Artificial Sequence: Synthetic oligonucleotide
auuacuacagugugaacug

SEQ ID NO: 885950 - RNA, 19 nt, Artificial Sequence
  Description of Artificial Sequence: Synthetic oligonucleotide
aagauggcuucucauagug

SEQ ID NO: 885951 - RNA, 19 nt, Artificial Sequence
  Description of Artificial Sequence: Synthetic oligonucleotide
aagaauauaugaaugacua

SEQ ID NO: 885952 - RNA, 19 nt, Artificial Sequence
  Description of Artificial Sequence: Synthetic oligonucleotide
uguaaacacuccuuuguag

SEQ ID NO: 885953 - RNA, 19 nt, Artificial Sequence
  Description of Artificial Sequence: Synthetic oligonucleotide
acauaucccagaucugucc

SEQ ID NO: 885954 - RNA, 19 nt, Artificial Sequence
  Description of Artificial Sequence: Synthetic oligonucleotide
gaucaauugccacuguugc

SEQ ID NO: 885955 - RNA, 19 nt, Artificial Sequence
  Description of Artificial Sequence: Synthetic oligonucleotide
ugagauauuguguaagaaa

SEQ ID NO: 885956 - RNA, 19 nt, Artificial Sequence
  Description of Artificial Sequence: Synthetic oligonucleotide
auaaauacauggcaacuca

SEQ ID NO: 885957 - RNA, 19 nt, Artificial Sequence
  Description of Artificial Sequence: Synthetic oligonucleotide
acuaccaaucagcugacuc

SEQ ID NO: 885958 - RNA, 19 nt, Artificial Sequence
  Description of Artificial Sequence: Synthetic oligonucleotide
aagcuaaccucacagccag

SEQ ID NO: 885959 - RNA, 19 nt, Artificial Sequence
  Description of Artificial Sequence: Synthetic oligonucleotide
uguaaucuguucauggccu

SEQ ID NO: 885960 - RNA, 19 nt, Artificial Sequence
  Description of Artificial Sequence: Synthetic oligonucleotide
ucagaauacaucuugucua

SEQ ID NO: 885961 - RNA, 19 nt, Artificial Sequence
  Description of Artificial Sequence: Synthetic oligonucleotide
ucaacaguggcauuaccug

SEQ ID NO: 885962 - RNA, 19 nt, Artificial Sequence
  Description of Artificial Sequence: Synthetic oligonucleotide
aaaguuuggguccggccuc

SEQ ID NO: 885963 - RNA, 19 nt, Artificial Sequence
  Description of Artificial Sequence: Synthetic oligonucleotide
uucguuuguugcuaggucc

SEQ ID NO: 885964 - RNA, 19 nt, Artificial Sequence
  Description of Artificial Sequence: Synthetic oligonucleotide
aauucuaagcuuauaggga

SEQ ID NO: 885965 - RNA, 19 nt, Artificial Sequence
  Description of Artificial Sequence: Synthetic oligonucleotide
ugaaaagcuuauuugugcu

SEQ ID NO: 885966 - RNA, 19 nt, Artificial Sequence
  Description of Artificial Sequence: Synthetic oligonucleotide
uuuccguacagguagggca

SEQ ID NO: 885967 - RNA, 19 nt, Artificial Sequence
  Description of Artificial Sequence: Synthetic oligonucleotide
uuacuauuaucaaagcaau

SEQ ID NO: 885968 - RNA, 19 nt, Artificial Sequence
  Description of Artificial Sequence: Synthetic oligonucleotide
uaagcuuauagggaaaaca

SEQ ID NO: 885969 - RNA, 19 nt, Artificial Sequence
  Description of Artificial Sequence: Synthetic oligonucleotide
uuaguucuaagugucaugu

SEQ ID NO: 885970 - RNA, 19 nt, Artificial Sequence
  Description of Artificial Sequence: Synthetic oligonucleotide
uguucauguuccauuaacu

SEQ ID NO: 885971 - RNA, 19 nt, Artificial Sequence
  Description of Artificial Sequence: Synthetic oligonucleotide
ucuguaauuagcagagcac

SEQ ID NO: 885972 - RNA, 19 nt, Artificial Sequence
  Description of Artificial Sequence: Synthetic oligonucleotide
ucugauucuuuucccauga

SEQ ID NO: 885973 - RNA, 19 nt, Artificial Sequence
  Description of Artificial Sequence: Synthetic oligonucleotide
uccaguauuucucacugac

SEQ ID NO: 885974 - RNA, 19 nt, Artificial Sequence
  Description of Artificial Sequence: Synthetic oligonucleotide
aauccuaugagaauuguuu

SEQ ID NO: 885975 - RNA, 19 nt, Artificial Sequence
  Description of Artificial Sequence: Synthetic oligonucleotide
auaauaaagggaaaacucu

SEQ ID NO: 885976 - RNA, 19 nt, Artificial Sequence
  Description of Artificial Sequence: Synthetic oligonucleotide
augaaugacuaccaaucag

SEQ ID NO: 885977 - RNA, 19 nt, Artificial Sequence
  Description of Artificial Sequence: Synthetic oligonucleotide
uuuuauguaucuuguuugu

SEQ ID NO: 885978 - RNA, 19 nt, Artificial Sequence
  Description of Artificial Sequence: Synthetic oligonucleotide
uggugggugcauaauaaag

SEQ ID NO: 885979 - RNA, 19 nt, Artificial Sequence
  Description of Artificial Sequence: Synthetic oligonucleotide
cuaacauucuuuaggcuac

SEQ ID NO: 885980 - RNA, 19 nt, Artificial Sequence
  Description of Artificial Sequence: Synthetic oligonucleotide
cuuugaacauaucuuguac

SEQ ID NO: 885981 - RNA, 19 nt, Artificial Sequence
  Description of Artificial Sequence: Synthetic oligonucleotide
cauauccaagcaaauuggg

SEQ ID NO: 885982 - RNA, 19 nt, Artificial Sequence
  Description of Artificial Sequence: Synthetic oligonucleotide
uguaucuucagcccuuccu

SEQ ID NO: 885983 - RNA, 19 nt, Artificial Sequence
  Description of Artificial Sequence: Synthetic oligonucleotide
uuagcagagcacuaaauuu

SEQ ID NO: 885984 - RNA, 19 nt, Artificial Sequence
  Description of Artificial Sequence: Synthetic oligonucleotide
aagcaaauugggcacauua

SEQ ID NO: 885985 - RNA, 19 nt, Artificial Sequence
  Description of Artificial Sequence: Synthetic oligonucleotide
aauuguuuaagcacaguaa

SEQ ID NO: 885986 - RNA, 19 nt, Artificial Sequence
  Description of Artificial Sequence: Synthetic oligonucleotide
uggugcaucuuuaauauua

SEQ ID NO: 885987 - RNA, 19 nt, Artificial Sequence
  Description of Artificial Sequence: Synthetic oligonucleotide
  modified_base (6)..(6): a, c, u, g, unknown or other
uguggnucccaaacuauca

SEQ ID NO: 885988 - RNA, 19 nt, Artificial Sequence
  Description of Artificial Sequence: Synthetic oligonucleotide
uaauaauccuaugagaauu

SEQ ID NO: 885989 - RNA, 19 nt, Artificial Sequence
  Description of Artificial Sequence: Synthetic oligonucleotide
agugcaucaaaguuugggu

SEQ ID NO: 885990 - RNA, 19 nt, Artificial Sequence
  Description of Artificial Sequence: Synthetic oligonucleotide
aauaauccuaugagaauug

SEQ ID NO: 885991 - RNA, 19 nt, Artificial Sequence
  Description of Artificial Sequence: Synthetic oligonucleotide
uguuccauuaacugcuucu

SEQ ID NO: 885992 - RNA, 19 nt, Artificial Sequence
  Description of Artificial Sequence: Synthetic oligonucleotide
uuaccugaagucuuuuaug

SEQ ID NO: 885993 - RNA, 19 nt, Artificial Sequence
  Description of Artificial Sequence: Synthetic oligonucleotide
uucacuagcaccauccauu

SEQ ID NO: 885994 - RNA, 19 nt, Artificial Sequence
  Description of Artificial Sequence: Synthetic oligonucleotide
gagauauuguguaagaaaa

SEQ ID NO: 885995 - RNA, 19 nt, Artificial Sequence
  Description of Artificial Sequence: Synthetic oligonucleotide
caucugauguuuugguucg

SEQ ID NO: 885996 - RNA, 19 nt, Artificial Sequence
  Description of Artificial Sequence: Synthetic oligonucleotide
ucaugaagauacuacaguu

SEQ ID NO: 885997 - RNA, 19 nt, Artificial Sequence
  Description of Artificial Sequence: Synthetic oligonucleotide
ucaaugcuauggcugagug

SEQ ID NO: 885998 - RNA, 19 nt, Artificial Sequence
  Description of Artificial Sequence: Synthetic oligonucleotide
auucuaagcuuauagggaa

SEQ ID NO: 885999 - RNA, 19 nt, Artificial Sequence
  Description of Artificial Sequence: Synthetic oligonucleotide
auuguguaagaaaauacca

SEQ ID NO: 886000 - RNA, 19 nt, Artificial Sequence
  Description of Artificial Sequence: Synthetic oligonucleotide
uagacaucuaggugaaacc

SEQ ID NO: 886001 - RNA, 19 nt, Artificial Sequence
  Description of Artificial Sequence: Synthetic oligonucleotide
acaauggacaccaaguuca

SEQ ID NO: 886002 - RNA, 19 nt, Artificial Sequence
  Description of Artificial Sequence: Synthetic oligonucleotide
acauauccaagcaaauugg

SEQ ID NO: 886003 - RNA, 19 nt, Artificial Sequence
  Description of Artificial Sequence: Synthetic oligonucleotide
aaacaagucuggcucagaa

SEQ ID NO: 886004 - RNA, 19 nt, Artificial Sequence
  Description of Artificial Sequence: Synthetic oligonucleotide
auuagcagagcacuaaauu

SEQ ID NO: 886005 - RNA, 19 nt, Artificial Sequence
  Description of Artificial Sequence: Synthetic oligonucleotide
  modified_base (11)..(11): a, c, u, g, unknown or other
agccuuguggnucccaaac

SEQ ID NO: 886006 - RNA, 19 nt, Artificial Sequence
  Description of Artificial Sequence: Synthetic oligonucleotide
aaugaaaucuauacaggaa

SEQ ID NO: 886007 - RNA, 19 nt, Artificial Sequence
  Description of Artificial Sequence: Synthetic oligonucleotide
auuuauaaauacauggcaa

SEQ ID NO: 886008 - RNA, 19 nt, Artificial Sequence
  Description of Artificial Sequence: Synthetic oligonucleotide
agaaccgauguaaacacuc

SEQ ID NO: 886009 - RNA, 19 nt, Artificial Sequence
  Description of Artificial Sequence: Synthetic oligonucleotide
augaagauacuacaguuua

SEQ ID NO: 886010 - RNA, 19 nt, Artificial Sequence
  Description of Artificial Sequence: Synthetic oligonucleotide
cacuguguagacaucuagg

SEQ ID NO: 886011 - RNA, 19 nt, Artificial Sequence
  Description of Artificial Sequence: Synthetic oligonucleotide
uacuauuaucaaagcaaug

SEQ ID NO: 886012 - RNA, 19 nt, Artificial Sequence
  Description of Artificial Sequence: Synthetic oligonucleotide
auaaagggaaaacucuuaa

SEQ ID NO: 886013 - RNA, 19 nt, Artificial Sequence
  Description of Artificial Sequence: Synthetic oligonucleotide
agaauuaggggaugcuuug

SEQ ID NO: 886014 - RNA, 19 nt, Artificial Sequence
  Description of Artificial Sequence: Synthetic oligonucleotide
cuuggguagauuuugcuga

SEQ ID NO: 886015 - RNA, 19 nt, Artificial Sequence
  Description of Artificial Sequence: Synthetic oligonucleotide
ugaagggugaaagauggcu

SEQ ID NO: 886016 - RNA, 19 nt, Artificial Sequence
  Description of Artificial Sequence: Synthetic oligonucleotide
uaacucaauuucacuagca

SEQ ID NO: 886017 - RNA, 19 nt, Artificial Sequence
  Description of Artificial Sequence: Synthetic oligonucleotide
ugcauuacuacagugugaa

SEQ ID NO: 886018 - RNA, 19 nt, Artificial Sequence
  Description of Artificial Sequence: Synthetic oligonucleotide
aaaugguauacugcuucuc

SEQ ID NO: 886019 - RNA, 19 nt, Artificial Sequence
  Description of Artificial Sequence: Synthetic oligonucleotide
uguguguggaugcauuacu

SEQ ID NO: 886020 - RNA, 19 nt, Artificial Sequence
  Description of Artificial Sequence: Synthetic oligonucleotide
cuaacucaauuucacuagc

SEQ ID NO: 886021 - RNA, 19 nt, Artificial Sequence
  Description of Artificial Sequence: Synthetic oligonucleotide
ucuugucuaacauucuuua

SEQ ID NO: 886022 - RNA, 19 nt, Artificial Sequence
  Description of Artificial Sequence: Synthetic oligonucleotide
ugcaaaauaucuccauauc

SEQ ID NO: 886023 - RNA, 19 nt, Artificial Sequence
  Description of Artificial Sequence: Synthetic oligonucleotide
ggagccauuuaauacagug

SEQ ID NO: 886024 - RNA, 19 nt, Artificial Sequence
  Description of Artificial Sequence: Synthetic oligonucleotide
cauuguuauuaucaaguuc

SEQ ID NO: 886025 - RNA, 19 nt, Artificial Sequence
  Description of Artificial Sequence: Synthetic oligonucleotide
uguugcuagguccugcuuc

SEQ ID NO: 886026 - RNA, 19 nt, Artificial Sequence
  Description of Artificial Sequence: Synthetic oligonucleotide
auacauggcaacucaaaau

SEQ ID NO: 886027 - RNA, 19 nt, Artificial Sequence
  Description of Artificial Sequence: Synthetic oligonucleotide
gauugcuguguguggaugc

SEQ ID NO: 886028 - RNA, 19 nt, Artificial Sequence
  Description of Artificial Sequence: Synthetic oligonucleotide
uugaacauaucuuguacuu

SEQ ID NO: 886029 - RNA, 19 nt, Artificial Sequence
  Description of Artificial Sequence: Synthetic oligonucleotide
ucaauugccacuguugcau

SEQ ID NO: 886030 - RNA, 19 nt, Artificial Sequence
  Description of Artificial Sequence: Synthetic oligonucleotide
agauacuacaguuuauaua

SEQ ID NO: 886031 - RNA, 19 nt, Artificial Sequence
  Description of Artificial Sequence: Synthetic oligonucleotide
aaccgauguaaacacuccu

SEQ ID NO: 886032 - RNA, 19 nt, Artificial Sequence
  Description of Artificial Sequence: Synthetic oligonucleotide
aaguaaugauggugcaucu

SEQ ID NO: 886033 - RNA, 19 nt, Artificial Sequence
  Description of Artificial Sequence: Synthetic oligonucleotide
cugugauaaugcaaucugc

SEQ ID NO: 886034 - RNA, 19 nt, Artificial Sequence
  Description of Artificial Sequence: Synthetic oligonucleotide
ucuuuguugccacuucuaa

SEQ ID NO: 886035 - RNA, 19 nt, Artificial Sequence
  Description of Artificial Sequence: Synthetic oligonucleotide
  modified_base (2)..(2): a, c, u, g, unknown or other
gnucccaaacuaucaacac

SEQ ID NO: 886036 - RNA, 19 nt, Artificial Sequence
  Description of Artificial Sequence: Synthetic oligonucleotide
cauaaguguuggauggggc

SEQ ID NO: 886037 - RNA, 19 nt, Artificial Sequence
  Description of Artificial Sequence: Synthetic oligonucleotide
caugaccagaaauucuaag

SEQ ID NO: 886038 - RNA, 19 nt, Artificial Sequence
  Description of Artificial Sequence: Synthetic oligonucleotide
uuuugguucguuuguugcu

SEQ ID NO: 886039 - RNA, 19 nt, Artificial Sequence
  Description of Artificial Sequence: Synthetic oligonucleotide
agagcacuaaauuuauaaa

SEQ ID NO: 886040 - RNA, 19 nt, Artificial Sequence
  Description of Artificial Sequence: Synthetic oligonucleotide
guagacaucuaggugaaac

SEQ ID NO: 886041 - RNA, 19 nt, Artificial Sequence
  Description of Artificial Sequence: Synthetic oligonucleotide
  modified_base (7)..(7): a, c, u, g, unknown or other
uuguggnucccaaacuauc

SEQ ID NO: 886042 - RNA, 19 nt, Artificial Sequence
  Description of Artificial Sequence: Synthetic oligonucleotide
uguguggaugcauuacuac

SEQ ID NO: 886043 - RNA, 19 nt, Artificial Sequence
  Description of Artificial Sequence: Synthetic oligonucleotide
agucucagaacugauuuug

SEQ ID NO: 886044 - RNA, 19 nt, Artificial Sequence
  Description of Artificial Sequence: Synthetic oligonucleotide
cuugucuaacauucuuuag

SEQ ID NO: 886045 - RNA, 19 nt, Artificial Sequence
  Description of Artificial Sequence: Synthetic oligonucleotide
uguaauuagcagagcacua

SEQ ID NO: 886046 - RNA, 19 nt, Artificial Sequence
  Description of Artificial Sequence: Synthetic oligonucleotide
uuuauguaucuuguuugug

SEQ ID NO: 886047 - RNA, 19 nt, Artificial Sequence
  Description of Artificial Sequence: Synthetic oligonucleotide
gcuuauagggaaaacagug

SEQ ID NO: 886048 - RNA, 19 nt, Artificial Sequence
  Description of Artificial Sequence: Synthetic oligonucleotide
aauaaagguuccauggguu

SEQ ID NO: 886049 - RNA, 19 nt, Artificial Sequence
  Description of Artificial Sequence: Synthetic oligonucleotide
uaaacacuccuuuguaguc

SEQ ID NO: 886050 - RNA, 19 nt, Artificial Sequence
  Description of Artificial Sequence: Synthetic oligonucleotide
cagagcacuaaauuuauaa

SEQ ID NO: 886051 - RNA, 19 nt, Artificial Sequence
  Description of Artificial Sequence: Synthetic oligonucleotide
cuuauagggaaaacaguga

SEQ ID NO: 886052 - RNA, 19 nt, Artificial Sequence
  Description of Artificial Sequence: Synthetic oligonucleotide
aaagcuaaccucacagcca

SEQ ID NO: 886053 - RNA, 19 nt, Artificial Sequence
  Description of Artificial Sequence: Synthetic oligonucleotide
aaggagccauuuaauacag

SEQ ID NO: 886054 - RNA, 19 nt, Artificial Sequence
  Description of Artificial Sequence: Synthetic oligonucleotide
agguccugcuuccugauug

SEQ ID NO: 886055 - RNA, 19 nt, Artificial Sequence
  Description of Artificial Sequence: Synthetic oligonucleotide
guauacugcuucucacugg

SEQ ID NO: 886056 - RNA, 19 nt, Artificial Sequence
  Description of Artificial Sequence: Synthetic oligonucleotide
gaaaacucuuaaaugugca

SEQ ID NO: 886057 - RNA, 19 nt, Artificial Sequence
  Description of Artificial Sequence: Synthetic oligonucleotide
  modified_base (4)..(4): a, c, u, g, unknown or other
uggnucccaaacuaucaac

SEQ ID NO: 886058 - RNA, 19 nt, Artificial Sequence
  Description of Artificial Sequence: Synthetic oligonucleotide
uggaugcauuacuacagug

SEQ ID NO: 886059 - RNA, 19 nt, Artificial Sequence
  Description of Artificial Sequence: Synthetic oligonucleotide
ggugggugcauaauaaagg

SEQ ID NO: 886060 - RNA, 19 nt, Artificial Sequence
  Description of Artificial Sequence: Synthetic oligonucleotide
gacaccaaguucauaaaga

SEQ ID NO: 886061 - RNA, 19 nt, Artificial Sequence
  Description of Artificial Sequence: Synthetic oligonucleotide
ugaacauaucccagaucug

SEQ ID NO: 886062 - RNA, 19 nt, Artificial Sequence
  Description of Artificial Sequence: Synthetic oligonucleotide
gguuccauggguuuguuca

SEQ ID NO: 886063 - RNA, 19 nt, Artificial Sequence
  Description of Artificial Sequence: Synthetic oligonucleotide
aaacacuccuuuguaguca

SEQ ID NO: 886064 - RNA, 19 nt, Artificial Sequence
  Description of Artificial Sequence: Synthetic oligonucleotide
acuuuugaagggugaaaga

SEQ ID NO: 886065 - RNA, 19 nt, Artificial Sequence
  Description of Artificial Sequence: Synthetic oligonucleotide
auacucaucacgacuuggg

SEQ ID NO: 886066 - RNA, 19 nt, Artificial Sequence
  Description of Artificial Sequence: Synthetic oligonucleotide
gaaaugagauauuguguaa

SEQ ID NO: 886067 - RNA, 19 nt, Artificial Sequence
  Description of Artificial Sequence: Synthetic oligonucleotide
auauaugaaugacuaccaa

SEQ ID NO: 886068 - RNA, 19 nt, Artificial Sequence
  Description of Artificial Sequence: Synthetic oligonucleotide
gagaauuguuuaagcacag

SEQ ID NO: 886069 - RNA, 19 nt, Artificial Sequence
  Description of Artificial Sequence: Synthetic oligonucleotide
gcuuauuugugcuccuugg

SEQ ID NO: 886070 - RNA, 19 nt, Artificial Sequence
  Description of Artificial Sequence: Synthetic oligonucleotide
agcuuauuugugcuccuug

SEQ ID NO: 886071 - RNA, 19 nt, Artificial Sequence
  Description of Artificial Sequence: Synthetic oligonucleotide
aaguucuucuaaagcuaac

SEQ ID NO: 886072 - RNA, 19 nt, Artificial Sequence
  Description of Artificial Sequence: Synthetic oligonucleotide
uaaagguuccauggguuug

SEQ ID NO: 886073 - RNA, 19 nt, Artificial Sequence
  Description of Artificial Sequence: Synthetic oligonucleotide
ucguuuguugcuagguccu

SEQ ID NO: 886074 - RNA, 19 nt, Artificial Sequence
  Description of Artificial Sequence: Synthetic oligonucleotide
ucuugccucgcuguaaucu

SEQ ID NO: 886075 - RNA, 19 nt, Artificial Sequence
  Description of Artificial Sequence: Synthetic oligonucleotide
aacacuccuuuguagucau

SEQ ID NO: 886076 - RNA, 19 nt, Artificial Sequence
  Description of Artificial Sequence: Synthetic oligonucleotide
uuucacuagcaccauccau

SEQ ID NO: 886077 - RNA, 19 nt, Artificial Sequence
  Description of Artificial Sequence: Synthetic oligonucleotide
uucaaacgaaagcagccuu

SEQ ID NO: 886078 - RNA, 19 nt, Artificial Sequence
  Description of Artificial Sequence: Synthetic oligonucleotide
augcaugacaauggacacc

SEQ ID NO: 886079 - RNA, 19 nt, Artificial Sequence
  Description of Artificial Sequence: Synthetic oligonucleotide
ucuaagcuuauagggaaaa

SEQ ID NO: 886080 - RNA, 19 nt, Artificial Sequence
  Description of Artificial Sequence: Synthetic oligonucleotide
uguugauccuggcuagcac

SEQ ID NO: 886081 - RNA, 19 nt, Artificial Sequence
  Description of Artificial Sequence: Synthetic oligonucleotide
uaaugauggugcaucuuua

SEQ ID NO: 886082 - RNA, 19 nt, Artificial Sequence
  Description of Artificial Sequence: Synthetic oligonucleotide
agauacuuggauaaaugau

SEQ ID NO: 886083 - RNA, 19 nt, Artificial Sequence
  Description of Artificial Sequence: Synthetic oligonucleotide
uaguguaaacaagucuggc

SEQ ID NO: 886084 - RNA, 19 nt, Artificial Sequence
  Description of Artificial Sequence: Synthetic oligonucleotide
agacaucuaggugaaacca

SEQ ID NO: 886085 - RNA, 19 nt, Artificial Sequence
  Description of Artificial Sequence: Synthetic oligonucleotide
uacaagacuccaagggaaa

SEQ ID NO: 886086 - RNA, 19 nt, Artificial Sequence
  Description of Artificial Sequence: Synthetic oligonucleotide
aaagguuccauggguuugu

SEQ ID NO: 886087 - RNA, 19 nt, Artificial Sequence
  Description of Artificial Sequence: Synthetic oligonucleotide
ucucacuggcuguaucgag

SEQ ID NO: 886088 - RNA, 19 nt, Artificial Sequence
  Description of Artificial Sequence: Synthetic oligonucleotide
gcauaauaaagguuccaug

SEQ ID NO: 886089 - RNA, 19 nt, Artificial Sequence
  Description of Artificial Sequence: Synthetic oligonucleotide
auaaagguuccauggguuu

SEQ ID NO: 886090 - RNA, 19 nt, Artificial Sequence
  Description of Artificial Sequence: Synthetic oligonucleotide
uacuacagugugaacuguc

SEQ ID NO: 886091 - RNA, 19 nt, Artificial Sequence
  Description of Artificial Sequence: Synthetic oligonucleotide
guugcauuguuauuaucaa

SEQ ID NO: 886092 - RNA, 19 nt, Artificial Sequence
  Description of Artificial Sequence: Synthetic oligonucleotide
ugcuucgaaguucuucuaa

SEQ ID NO: 886093 - RNA, 19 nt, Artificial Sequence
  Description of Artificial Sequence: Synthetic oligonucleotide
cauacucaucacgacuugg

SEQ ID NO: 886094 - RNA, 19 nt, Artificial Sequence
  Description of Artificial Sequence: Synthetic oligonucleotide
aagucagaauacaucuugu

SEQ ID NO: 886095 - RNA, 19 nt, Artificial Sequence
  Description of Artificial Sequence: Synthetic oligonucleotide
uuacuggaucaauugccac

SEQ ID NO: 886096 - RNA, 19 nt, Artificial Sequence
  Description of Artificial Sequence: Synthetic oligonucleotide
uccauaaguguuggauggg

SEQ ID NO: 886097 - RNA, 19 nt, Artificial Sequence
  Description of Artificial Sequence: Synthetic oligonucleotide
uguccgugaaaguaaugau

SEQ ID NO: 886098 - RNA, 19 nt, Artificial Sequence
  Description of Artificial Sequence: Synthetic oligonucleotide
  modified_base (18)..(18): a, c, u, g, unknown or other
agcauaaagccuuguggnu

SEQ ID NO: 886099 - RNA, 19 nt, Artificial Sequence
  Description of Artificial Sequence: Synthetic oligonucleotide
cauuacuacagugugaacu

SEQ ID NO: 886100 - RNA, 19 nt, Artificial Sequence
  Description of Artificial Sequence: Synthetic oligonucleotide
ucccaugaccagaaauucu

SEQ ID NO: 886101 - RNA, 19 nt, Artificial Sequence
  Description of Artificial Sequence: Synthetic oligonucleotide
uuuuccguacagguagggc

SEQ ID NO: 886102 - RNA, 19 nt, Artificial Sequence
  Description of Artificial Sequence: Synthetic oligonucleotide
uucuaagcuuauagggaaa

SEQ ID NO: 886103 - RNA, 19 nt, Artificial Sequence
  Description of Artificial Sequence: Synthetic oligonucleotide
acgaaagcagccuuucuuu

SEQ ID NO: 886104 - RNA, 19 nt, Artificial Sequence
  Description of Artificial Sequence: Synthetic oligonucleotide
aucaauugccacuguugca

SEQ ID NO: 886105 - RNA, 19 nt, Artificial Sequence
  Description of Artificial Sequence: Synthetic oligonucleotide
acucuuaaaugugcaacug

SEQ ID NO: 886106 - RNA, 19 nt, Artificial Sequence
  Description of Artificial Sequence: Synthetic oligonucleotide
gaaccgauguaaacacucc

SEQ ID NO: 886107 - RNA, 19 nt, Artificial Sequence
  Description of Artificial Sequence: Synthetic oligonucleotide
gggugcauaauaaagguuc

SEQ ID NO: 886108 - RNA, 19 nt, Artificial Sequence
  Description of Artificial Sequence: Synthetic oligonucleotide
ucacgacuuggguagauuu

SEQ ID NO: 886109 - RNA, 19 nt, Artificial Sequence
  Description of Artificial Sequence: Synthetic oligonucleotide
agaucuguccgugaaagua

SEQ ID NO: 886110 - RNA, 19 nt, Artificial Sequence
  Description of Artificial Sequence: Synthetic oligonucleotide
uugguucguuuguugcuag

SEQ ID NO: 886111 - RNA, 19 nt, Artificial Sequence
  Description of Artificial Sequence: Synthetic oligonucleotide
gaucaacaguggcauuacc

SEQ ID NO: 886112 - RNA, 19 nt, Artificial Sequence
  Description of Artificial Sequence: Synthetic oligonucleotide
guuggauggggccugaaua

SEQ ID NO: 886113 - RNA, 19 nt, Artificial Sequence
  Description of Artificial Sequence: Synthetic oligonucleotide
acuucuaagggcugugaua

SEQ ID NO: 886114 - RNA, 19 nt, Artificial Sequence
  Description of Artificial Sequence: Synthetic oligonucleotide
agaccugucuuacuauuau

SEQ ID NO: 886115 - RNA, 19 nt, Artificial Sequence
  Description of Artificial Sequence: Synthetic oligonucleotide
gacaucuaggugaaaccac

SEQ ID NO: 886116 - RNA, 19 nt, Artificial Sequence
  Description of Artificial Sequence: Synthetic oligonucleotide
uggccuguaucuucagccc

SEQ ID NO: 886117 - RNA, 19 nt, Artificial Sequence
  Description of Artificial Sequence: Synthetic oligonucleotide
auacaagacuccaagggaa

SEQ ID NO: 886118 - RNA, 19 nt, Artificial Sequence
  Description of Artificial Sequence: Synthetic oligonucleotide
cuugccucgcuguaaucug

SEQ ID NO: 886119 - RNA, 19 nt, Artificial Sequence
  Description of Artificial Sequence: Synthetic oligonucleotide
acgacuuggguagauuuug

SEQ ID NO: 886120 - RNA, 19 nt, Artificial Sequence
  Description of Artificial Sequence: Synthetic oligonucleotide
auggggccugaauacuaac

SEQ ID NO: 886121 - RNA, 19 nt, Artificial Sequence
  Description of Artificial Sequence: Synthetic oligonucleotide
gaacauaucccagaucugu

SEQ ID NO: 886122 - RNA, 19 nt, Artificial Sequence
  Description of Artificial Sequence: Synthetic oligonucleotide
cuuggugggugcauaauaa

SEQ ID NO: 886123 - RNA, 19 nt, Artificial Sequence
  Description of Artificial Sequence: Synthetic oligonucleotide
uguucacuuuccaguauuu

SEQ ID NO: 886124 - RNA, 19 nt, Artificial Sequence
  Description of Artificial Sequence: Synthetic oligonucleotide
guaaucuguucauggccug

SEQ ID NO: 886125 - RNA, 19 nt, Artificial Sequence
  Description of Artificial Sequence: Synthetic oligonucleotide
uuccguacagguagggcau

SEQ ID NO: 886126 - RNA, 19 nt, Artificial Sequence
  Description of Artificial Sequence: Synthetic oligonucleotide
uaggggaugcuuugaacau

SEQ ID NO: 886127 - RNA, 19 nt, Artificial Sequence
  Description of Artificial Sequence: Synthetic oligonucleotide
aaccucuuuugaaaugaga

SEQ ID NO: 886128 - RNA, 19 nt, Artificial Sequence
  Description of Artificial Sequence: Synthetic oligonucleotide
guaaacaagucuggcucag

SEQ ID NO: 886129 - RNA, 19 nt, Artificial Sequence
  Description of Artificial Sequence: Synthetic oligonucleotide
guagauuuugcugaugagu

SEQ ID NO: 886130 - RNA, 19 nt, Artificial Sequence
  Description of Artificial Sequence: Synthetic oligonucleotide
ugagugcaucaaaguuugg

SEQ ID NO: 886131 - RNA, 19 nt, Artificial Sequence
  Description of Artificial Sequence: Synthetic oligonucleotide
cucuuaaaugugcaacuga

SEQ ID NO: 886132 - RNA, 19 nt, Artificial Sequence
  Description of Artificial Sequence: Synthetic oligonucleotide
ucacuagcaccauccauua

SEQ ID NO: 886133 - RNA, 19 nt, Artificial Sequence
  Description of Artificial Sequence: Synthetic oligonucleotide
uucccaugaccagaaauuc

SEQ ID NO: 886134 - RNA, 19 nt, Artificial Sequence
  Description of Artificial Sequence: Synthetic oligonucleotide
ugguucguuuguugcuagg

SEQ ID NO: 886135 - RNA, 19 nt, Artificial Sequence
  Description of Artificial Sequence: Synthetic oligonucleotide
ugauugcuguguguggaug

SEQ ID NO: 886136 - RNA, 19 nt, Artificial Sequence
  Description of Artificial Sequence: Synthetic oligonucleotide
auggcaacucaaaauaaaa

SEQ ID NO: 886137 - RNA, 19 nt, Artificial Sequence
  Description of Artificial Sequence: Synthetic oligonucleotide
uuauugccuccugaggugu

SEQ ID NO: 886138 - RNA, 19 nt, Artificial Sequence
  Description of Artificial Sequence: Synthetic oligonucleotide
aucgagguucaucugguuu

SEQ ID NO: 886139 - RNA, 19 nt, Artificial Sequence
  Description of Artificial Sequence: Synthetic oligonucleotide
ucuguccgugaaaguaaug

SEQ ID NO: 886140 - RNA, 19 nt, Artificial Sequence
  Description of Artificial Sequence: Synthetic oligonucleotide
agaaaaggagccauuuaau

SEQ ID NO: 886141 - RNA, 19 nt, Artificial Sequence
  Description of Artificial Sequence: Synthetic oligonucleotide
acaucuaggugaaaccaca

SEQ ID NO: 886142 - RNA, 19 nt, Artificial Sequence
  Description of Artificial Sequence: Synthetic oligonucleotide
uuguugauccuggcuagca

SEQ ID NO: 886143 - RNA, 19 nt, Artificial Sequence
  Description of Artificial Sequence: Synthetic oligonucleotide
gagccauuuaauacaguga

SEQ ID NO: 886144 - RNA, 19 nt, Artificial Sequence
  Description of Artificial Sequence: Synthetic oligonucleotide
auaauccuaugagaauugu

SEQ ID NO: 886145 - RNA, 19 nt, Artificial Sequence
  Description of Artificial Sequence: Synthetic oligonucleotide
cuguccgugaaaguaauga

SEQ ID NO: 886146 - RNA, 19 nt, Artificial Sequence
  Description of Artificial Sequence: Synthetic oligonucleotide
ucuaagugucauguucuuc

SEQ ID NO: 886147 - RNA, 19 nt, Artificial Sequence
  Description of Artificial Sequence: Synthetic oligonucleotide
ugaacauaucuuguacuuu

SEQ ID NO: 886148 - RNA, 19 nt, Artificial Sequence
  Description of Artificial Sequence: Synthetic oligonucleotide
uuggugggugcauaauaaa

SEQ ID NO: 886149 - RNA, 19 nt, Artificial Sequence
  Description of Artificial Sequence: Synthetic oligonucleotide
cugaccaauuccaaagaaa

SEQ ID NO: 886150 - RNA, 19 nt, Artificial Sequence
  Description of Artificial Sequence: Synthetic oligonucleotide
gaaccucuuuugaaaugag

SEQ ID NO: 886151 - RNA, 19 nt, Artificial Sequence
  Description of Artificial Sequence: Synthetic oligonucleotide
guaauuagcagagcacuaa

SEQ ID NO: 886152 - RNA, 19 nt, Artificial Sequence
  Description of Artificial Sequence: Synthetic oligonucleotide
gguuuguucacuuuccagu

SEQ ID NO: 886153 - RNA, 19 nt, Artificial Sequence
  Description of Artificial Sequence: Synthetic oligonucleotide
ugacucuucugcagaccug

SEQ ID NO: 886154 - RNA, 19 nt, Artificial Sequence
  Description of Artificial Sequence: Synthetic oligonucleotide
ugggugcauaauaaagguu

SEQ ID NO: 886155 - RNA, 19 nt, Artificial Sequence
  Description of Artificial Sequence: Synthetic oligonucleotide
guucguuuguugcuagguc

SEQ ID NO: 886156 - RNA, 19 nt, Artificial Sequence
  Description of Artificial Sequence: Synthetic oligonucleotide
uggcauuaccugaagucuu

SEQ ID NO: 886157 - RNA, 19 nt, Artificial Sequence
  Description of Artificial Sequence: Synthetic oligonucleotide
acuacagugugaacuguca

SEQ ID NO: 886158 - RNA, 19 nt, Artificial Sequence
  Description of Artificial Sequence: Synthetic oligonucleotide
ccauuacuggaucaauugc

SEQ ID NO: 886159 - RNA, 19 nt, Artificial Sequence
  Description of Artificial Sequence: Synthetic oligonucleotide
cuaagcuuauagggaaaac

SEQ ID NO: 886160 - RNA, 19 nt, Artificial Sequence
  Description of Artificial Sequence: Synthetic oligonucleotide
cagaauacaucuugucuaa

SEQ ID NO: 886161 - RNA, 19 nt, Artificial Sequence
  Description of Artificial Sequence: Synthetic oligonucleotide
aaguguuggauggggccug

SEQ ID NO: 886162 - RNA, 19 nt, Artificial Sequence
  Description of Artificial Sequence: Synthetic oligonucleotide
uggacaccaaguucauaaa

SEQ ID NO: 886163 - RNA, 19 nt, Artificial Sequence
  Description of Artificial Sequence: Synthetic oligonucleotide
ucuauacaggaaccauguu

SEQ ID NO: 886164 - RNA, 19 nt, Artificial Sequence
  Description of Artificial Sequence: Synthetic oligonucleotide
  modified_base (13)..(13): a, c, u, g, unknown or other
aaagccuuguggnucccaa

SEQ ID NO: 886165 - RNA, 19 nt, Artificial Sequence
  Description of Artificial Sequence: Synthetic oligonucleotide
auaucccagaucuguccgu

SEQ ID NO: 886166 - RNA, 19 nt, Artificial Sequence
  Description of Artificial Sequence: Synthetic oligonucleotide
gugggugcauaauaaaggu

SEQ ID NO: 886167 - RNA, 19 nt, Artificial Sequence
  Description of Artificial Sequence: Synthetic oligonucleotide
gcuguaucgagguucaucu

SEQ ID NO: 886168 - RNA, 19 nt, Artificial Sequence
  Description of Artificial Sequence: Synthetic oligonucleotide
cuaccaaucagcugacucu

SEQ ID NO: 886169 - RNA, 19 nt, Artificial Sequence
  Description of Artificial Sequence: Synthetic oligonucleotide
uucugcagaccugucuuac

SEQ ID NO: 886170 - RNA, 19 nt, Artificial Sequence
  Description of Artificial Sequence: Synthetic oligonucleotide
aggcuacaaaacuuuugaa

SEQ ID NO: 886171 - RNA, 19 nt, Artificial Sequence
  Description of Artificial Sequence: Synthetic oligonucleotide
guugccacuucuaagggcu

SEQ ID NO: 886172 - RNA, 19 nt, Artificial Sequence
  Description of Artificial Sequence: Synthetic oligonucleotide
ugugcuccuuggugggugc

SEQ ID NO: 886173 - RNA, 19 nt, Artificial Sequence
  Description of Artificial Sequence: Synthetic oligonucleotide
agaauuguuuaagcacagu

SEQ ID NO: 886174 - RNA, 19 nt, Artificial Sequence
  Description of Artificial Sequence: Synthetic oligonucleotide
  modified_base (3)..(3): a, c, u, g, unknown or other
ggnucccaaacuaucaaca

SEQ ID NO: 886175 - RNA, 19 nt, Artificial Sequence
  Description of Artificial Sequence: Synthetic oligonucleotide
uuacuacagugugaacugu

SEQ ID NO: 886176 - RNA, 19 nt, Artificial Sequence
  Description of Artificial Sequence: Synthetic oligonucleotide
caaaguuuggguccggccu

SEQ ID NO: 886177 - RNA, 19 nt, Artificial Sequence
  Description of Artificial Sequence: Synthetic oligonucleotide
uugccucgcuguaaucugu

SEQ ID NO: 886178 - RNA, 19 nt, Artificial Sequence
  Description of Artificial Sequence: Synthetic oligonucleotide
uuggguccggccucaguga

SEQ ID NO: 886179 - RNA, 19 nt, Artificial Sequence
  Description of Artificial Sequence: Synthetic oligonucleotide
uggcuucucauaguguaaa

SEQ ID NO: 886180 - RNA, 19 nt, Artificial Sequence
  Description of Artificial Sequence: Synthetic oligonucleotide
gugaacugucaccauuauc

SEQ ID NO: 886181 - RNA, 19 nt, Artificial Sequence
  Description of Artificial Sequence: Synthetic oligonucleotide
gcaacugaggaauacauuu

SEQ ID NO: 886182 - RNA, 19 nt, Artificial Sequence
  Description of Artificial Sequence: Synthetic oligonucleotide
  modified_base (12)..(12): a, c, u, g, unknown or other
aagccuuguggnucccaaa

SEQ ID NO: 886183 - RNA, 19 nt, Artificial Sequence
  Description of Artificial Sequence: Synthetic oligonucleotide
gaauuaggggaugcuuuga

SEQ ID NO: 886184 - RNA, 19 nt, Artificial Sequence
  Description of Artificial Sequence: Synthetic oligonucleotide
uuccaagccaucuguuauu

SEQ ID NO: 886185 - RNA, 19 nt, Artificial Sequence
  Description of Artificial Sequence: Synthetic oligonucleotide
guucuaagugucauguucu

SEQ ID NO: 886186 - RNA, 19 nt, Artificial Sequence
  Description of Artificial Sequence: Synthetic oligonucleotide
uaaacaagucuggcucaga

SEQ ID NO: 886187 - RNA, 19 nt, Artificial Sequence
  Description of Artificial Sequence: Synthetic oligonucleotide
uaccaaucagcugacucuu
